United States Patent Application Publication US 2013/0129668 A1 - sequence listing, part 5

SEQ ID NO: 67411 - DNA, 122 bp, Homo sapiens
acacattctgaaagacgaagtattctaaagccaggctggccagcaaggattttatattaccgaatcttttggggttttttccatgagaatactgtgaagccataagcaaggcagcaatatga

SEQ ID NO: 67412 - DNA, 122 bp, Homo sapiens
tgtacttgtcgctcctttgccttcaccttgacacagaaaaactggtcttaatacgtctctcgccccaggtacccctaccttcagccaaacacacccatctatctctggaaatagcacctctc

SEQ ID NO: 67413 - DNA, 122 bp, Homo sapiens
aaataagtggctggccacttatctcttgtctatttggtctcaaatcttcctccacgtgttcgcattttatactcttcaaaaaatgcagaggtttgaggatgcattggattgttggcttttat

SEQ ID NO: 67414 - DNA, 122 bp, Homo sapiens
tgggtcaaggctacattctcttttgcctacgagtctctgaaataaaaagcaagttcactgcgtctaaggtacaatgatggtacaggcattttgtaagctttccatatccaaaagggagacat

SEQ ID NO: 67415 - DNA, 122 bp, Homo sapiens
ccagcgtccatcagggccacagcatttcccagggccacatacctagatctctgcttcccacgtgcgtgtgcgtgtgtgtgtgtgcatgcacatgtgtgtgtgcctacatgtgtgtgcgtatg

SEQ ID NO: 67416 - DNA, 122 bp, Homo sapiens
ctcatggaccgcgggcgcgctctggcggccgggccgctccaggctgaagccgccggaccacgtgtgtagtcgcagctgccatctttcatccgggcatcggccatcttggtaaaggcaatgtt

SEQ ID NO: 67417 - DNA, 122 bp, Homo sapiens
cggagcttcggctcttgccacaatctggtccggggactagatcagcggtgttgatggcagcgcttttctctaagcgctttctcttgctgagaaacggattttgccttccaaagggtggttta

SEQ ID NO: 67418 - DNA, 122 bp, Homo sapiens
agggaactccctgaccccttgcgcttcccaggtgaggcaatgcctcgcccagcttcggctcgcgcacggtgcacacacacactggcctgcgcccactgtcttgcactccctagtgagatgaa

SEQ ID NO: 67419 - DNA, 122 bp, Homo sapiens
gtacaggcacatgccaccatagatatggggggggtctgactttgttgcctgggctggtctcgaactcctggcctcaagcgatcctcctgcctcagcctcccaaagtggtaggattacaggca

SEQ ID NO: 67420 - DNA, 122 bp, Homo sapiens
ggtagtagaaggaatgcaatctcttgccattcatagagccccggaggccacgtgagaaaacgctgatgcggcacctccatcgagggatcacccctcttttgggctttcctggcgcgtgttgt

SEQ ID NO: 67421 - DNA, 122 bp, Homo sapiens
cagacatccatgggtagagacccagaagcacgcagaccccagcccctctttccacccagacgagatgaccaaagccccatccctgactgtctcagcttacccctgaaagcctgcactttccc

SEQ ID NO: 67422 - DNA, 122 bp, Homo sapiens
tggtgctaaaacaaatagtgctgctatgaacattcttgtatacatttattggggcatatgcgcacataattctgttgggtatatatctgggagtggaagtcctggctcataaggtatgcata

SEQ ID NO: 67423 - DNA, 122 bp, Homo sapiens
tgcaagtctctctgtaacatcctggggagagagtggggagaagaaagctattaaaaaggtcgttaacccatttggtgtcatgcagctcagtcttcgtgattcccatcatctggctgtcaaaa

SEQ ID NO: 67424 - DNA, 122 bp, Homo sapiens
gatccgcccacctcggcctctcaaagtgctgggattacaggcgtgagccactgtgcctggcgggagttgggtctgttttagttactatcatgcttccagcactttgagtagtaccagatata

SEQ ID NO: 67425 - DNA, 122 bp, Homo sapiens
tatggctttaaaaaaatctgataaagtttctcataaaggctcacccaggaaaataaataacgcaatgttacaaatacatgtccaagttgatgaagtatttatggatgtggctgaggacagaa

SEQ ID NO: 67426 - DNA, 122 bp, Homo sapiens
ttgagggagtcccaggaggggcttatttgagggcctttgccacttgctcataggcgagctcgatctcctcatcatctggacaggtggaagcgaattcttcccgggcgtaggcattgctcaag

SEQ ID NO: 67427 - DNA, 122 bp, Homo sapiens
agtcacaccgcgcggccttttgggtctggctcctctcgaggtgtggtattaaggttcgcccgcgctcagtgagcactttgtcaagaacaattcctggtgccctgtagcctgcggcaagctcc

SEQ ID NO: 67428 - DNA, 122 bp, Homo sapiens
tatcggtttttaatggcagccaagctgatggactcctcgccttcctcctcctcatcgtatcgatcaggttccaggtaactggcgctcagcccccgctggtgctgtttctctctcattcggcg

SEQ ID NO: 67429 - DNA, 122 bp, Homo sapiens
ccggggatcttctctagataaagcgcggtggaaacacacacagacacatgacgatgctgtcgacccacatgcctgagctctgggattccacggctggagctcggaactgcgaaggggcagag

SEQ ID NO: 67430 - DNA, 122 bp, Homo sapiens
atgcgcaatgccacttttgcgagccagccacagccaatgaggcgggtgcctcgatgggaccgctgcgcacgcgcgtagacgtccgtcgagtcccaggtggtaggaaacgatgggcttctctg

SEQ ID NO: 67431 - DNA, 122 bp, Homo sapiens
tgggttcttggccatctgtgcgtcataatcaccggccgccccggggacccgtaacacaaacgggctaatttcatgtgtaatgatctttaatcagaaccgagcgcggctgacagaggccgcca

SEQ ID NO: 67432 - DNA, 122 bp, Homo sapiens
acaatcagccctcccagacggcttttcgagtctccctaaccccggtgggagaggacgcggcgccagagcccagctccggctagttttcccgggggcaggtgtagccttgggcgcggggccgg

SEQ ID NO: 67433 - DNA, 122 bp, Homo sapiens
atacaggtgtccctggtggtgaatgtggccagcgagtgcggcttcacagaccagcactaccgagccctgcagcagctgcagcgagacctgggcccccaccactttaacgtgctcgccttccc

SEQ ID NO: 67434 - DNA, 122 bp, Homo sapiens
ataatcggcctccggtccctgaggattcggaaactcctgacgcagctaaagtgaatctggcgctgagatgccccctccatgggccggacgcggagggaaggggtgcccagttgggttctggg

SEQ ID NO: 67435 - DNA, 122 bp, Homo sapiens
ggaagtcccaggaagggcagccagggccctttagagccatcaaattttattctaagtctacgtgggagacagtgcgcttagcttcataaaaacaccagtggaggtgctaacacttgccccag

SEQ ID NO: 67436 - DNA, 122 bp, Homo sapiens
ccactcattctttcacagatatccaggactgggttagggagcctggtggtggcaggaggccgccctccagctcgctggctgccgtgtggaagtcctttctcctcggattctgatctagggac

SEQ ID NO: 67437 - DNA, 122 bp, Homo sapiens
actgaaaaaaaaaaaaaaaaaccctcaccgaaatgtgcagcggctccggagcgagaacagcgctcgaacctccacccgccaccaccgccttcttctccgcctccaactcctcccccgccgaa

SEQ ID NO: 67438 - DNA, 122 bp, Homo sapiens
cggagacaatcctccatccggctccgttatccagataatcctgcgctctcgggggttttccgatctggatgattatctatctggtcgttcacacctcagctcacttaagcggtgaagaaact

SEQ ID NO: 67439 - DNA, 122 bp, Homo sapiens
ctcacaccacgcagatatcttaacacaggggttcacacatggtgaccgggcagacagatgcgtgtgaaactaatgtgtagactaaatgcaatatacagttaatgcctggtgggaaacagaat

SEQ ID NO: 67440 - DNA, 122 bp, Homo sapiens
cgggtgtgaaatatcccagccgtgtgcacacagagagggtgtgaaatatcccagcccagccgcacacagagagggtgtgaaatatcccagcccagccgcacacagggcgggtgtgaaatatc

SEQ ID NO: 67441 - DNA, 122 bp, Homo sapiens
cagtgagtttttaaattcaatttgtaggccctagcaaaaatgtctttgtattttgaccctcgatcaaaggaaaggcagaactcacttttccatgtgagactttgagtagacctgaccttgaa

SEQ ID NO: 67442 - DNA, 122 bp, Homo sapiens
gtgaagagctcggggcggggcctcgggcgtggggcggggaccagggagtaaggcggggcccgcctcgagcagaagaggtaaagagcgtggggcggggcctccggcgcggggcggggccggaa

SEQ ID NO: 67443 - DNA, 122 bp, Homo sapiens
aggaaggtccccgagctcttttgtgtggatctaatgcccacccacacctaaaagaaccaacgcggcgccacggaggagacgtggagcgctgcgaatgtctcggcagcggggatgagaatgcg

SEQ ID NO: 67444 - DNA, 122 bp, Homo sapiens
gccgggaagggggcgattgatccatctgtcggtgggccgggctcaccggcgtgttttagtcgcagaatttacaataaacgcccagaaggacctaaaaggaagcgtctggctgggaaagggct

SEQ ID NO: 67445 - DNA, 122 bp, Homo sapiens
aaggcggccaggtgagattctccaacgaccagaccatcgagctggagaagaaattcgagacgcagaaatatctctctccgcccgagaggaagcgtctggccaagatgctgcagctcagcgag

SEQ ID NO: 67446 - DNA, 122 bp, Homo sapiens
ggagcgtgggcactgggtcagtgttggggtccagggacccgggggtgccatggtccggctcgccgcccgccggccagatcttgtcccagaagaaggacaggaaggccagccgcctcctgagg

SEQ ID NO: 67447 - DNA, 122 bp, Homo sapiens
tacataatcactgacatttaaaggaactaacaataaagtcaatggtaggtttctgggaagcgcactcataaaactatagagacatctgtccagttcttggagattcctcatgacacttctag

SEQ ID NO: 67448 - DNA, 122 bp, Homo sapiens
cacagtaaagacactgctacactttaactcagtgtcccatggttattagagcttagaacccgggggaaactgctgtatagaagaggtcaaacaagctgagtgcaggttttgtcacgaaactg

SEQ ID NO: 67449 - DNA, 122 bp, Homo sapiens
ggtaggtgccctggcacaggcacagaaccagagagaacccttgccgctgctccggaatgtcgggccacaccctccggatacgggaaaggctttcttctccatttcaaatgaccctgtttcgc

SEQ ID NO: 67450 - DNA, 122 bp, Homo sapiens
aaggcagcagacccctgaacaaaggaccttccaaataagtggatcacgaggtcaggagatcgagaccaacttccaaaataagtttggaagttcctactagaacaaggctccaggtggaaaaa

SEQ ID NO: 67451 - DNA, 122 bp, Homo sapiens
gacaatgctacttcagtttggagcacaaacatatgatcagcacatggaaatgtggtaattcggatgcattcgtgattgcaacagattgaagaaattagaccagacaaagagtgtttttagag

SEQ ID NO: 67452 - DNA, 122 bp, Homo sapiens
ttcgctgtggagatgagaaggtggaggttctgggcactgtggctgcgagtgtgagcgatgcgtttgtgggaatcagaggagcggatttgggaaaagtgaatccttgagattcagggccttac

SEQ ID NO: 67453 - DNA, 122 bp, Homo sapiens
agaaaggaggtctctgagatgaggtccaagactctccatggagtggagttatgtgggaaccggcgagaatcgcctttctgaatgaagagccctcttcactgccccaccctcaccttagaatt

SEQ ID NO: 67454 - DNA, 122 bp, Homo sapiens
tgcggagctccggccccctgacgtggggcatgtgctgaggatgctgctggggaagatgtgcgcgccgaggtacccctccgggggcgcctgggaccctcacccaggccagggcttcggggaga

SEQ ID NO: 67455 - DNA, 122 bp, Homo sapiens
ttgggcacctgggggtcacagagacagaggctggggctgttagcggctccacctgggcggcgccggtggcagctcggaggcgagggtagcggttagcagagcacggacagcccagccccacc

SEQ ID NO: 67456 - DNA, 122 bp, Homo sapiens
gagctacctgtgatggctctgtgtttttaaaagactgacattaaattttttccatatgttcgtctaaataacctttccctggtaccactgggacattccatatatatggtcttgggccattg

SEQ ID NO: 67457 - DNA, 122 bp, Homo sapiens
cccggggaacactcaccagcatctctagcctccacctccctctcgcgccagtggcactcccggttgagacaactgagaatgttccctgggcacagtggcccgggttgagaagccctgcagtg

SEQ ID NO: 67458 - DNA, 122 bp, Homo sapiens
tcatgaagccagactgcctccaccgcagggaacagtgtgacgcataaaccagcaccacgccggcctctgctggctgtgcagcctggctctacatggtgaccaggaacacggccgccaaccgc

SEQ ID NO: 67459 - DNA, 122 bp, Homo sapiens
tccccgccaccccactctacaaccatactgcttttctgttttaactacttctattacaaccgtatttttttcttctgcttttctctgaaaacacattcaaataggcccctcccagctagaca

SEQ ID NO: 67460 - DNA, 122 bp, Homo sapiens
gagccgcgggctctggttggtgtgggctcgggggcggggcgcgcggggccgggccggaggcggggctagcgccgggcgctggagctgcgggcgcacggagaggagtcgccagcagctggagc

SEQ ID NO: 67461 - DNA, 122 bp, Homo sapiens
aggaacagaaaaccaaacacagcatgttctcattcataagtgggaattgaatattgagaacgcatggacacagagaggggaacaacacacacctgggccttttggggagtcgggggtaaggg

SEQ ID NO: 67462 - DNA, 122 bp, Homo sapiens
cacggtttagccgagaacagggggaaccgcagcagcagatggagcgcccacgtccggggtcgcctcggctctaacccttggtcatggctcagcttggtgcgcagaaacccgacgtcaatcag

SEQ ID NO: 67463 - DNA, 122 bp, Homo sapiens
gagagggtttctccaggaaaagctgtaggtcctggggctcctacatcatggtgcaagtaccgtgtaatcttacttccttcctcccctccacttccatccttcaagacctctcgagattcttt

SEQ ID NO: 67464 - DNA, 122 bp, Homo sapiens
gagggcggggacagcggaatgacgttttaaggacgcttgcgcgcgggatttaaactgcggcggtttacgcggcgttaagacttcgtagggttagcgaaattgaggtttcttggtattgcgcg

SEQ ID NO: 67465 - DNA, 122 bp, Homo sapiens
ctgttacataattcgggcgtgaaatcccggaagggggagctcctgagcccgtccagcacccgggattggggtctccccatcacacacccttggtggcagggcctggctgggggcggcaagca

SEQ ID NO: 67466 - DNA, 122 bp, Homo sapiens
cgagcagtgggcacacacacatacgtgcgcaccactgtgtacatcagcagtgagcacacacgtatgtgtgcgccactgtgtacgtgagcagtgggcacacacacgtacgtgcgcgccactgt

SEQ ID NO: 67467 - DNA, 122 bp, Homo sapiens
caaaacaaatctcctggcccttcaagtgcttggcccaaggaaaagtaacgccgagccctgcgactctgccaggtatttaaaaatgtaagataaggtgatatttgtgagccggccagaaggca

SEQ ID NO: 67468 - DNA, 122 bp, Homo sapiens
caaacaatcacttttgggctcaaagggtgggaggtacggagagcttactggagctgcatccgcataccaggcgttggtgtcaccacagaagctgctcttgtggaggatgaagggcccactct

SEQ ID NO: 67469 - DNA, 122 bp, Homo sapiens
ggtgatccacccgcctcggcctcccaaagtgctgggattacaggcgtgagccaccgcgcccgcccagcctaatagacaagtggatatttgtatgcaacttggtgggatgcagacattcaggg

SEQ ID NO: 67470 - DNA, 122 bp, Homo sapiens
gcgcacgctaagaaacgcccaagggagtaactccactgtgacgttaaaattggggcggtgcgagtaagtcgtttcctgctgtcgtcgtgagatttaaagacacctcgcgagacctcacctaa

SEQ ID NO: 67471 - DNA, 122 bp, Homo sapiens
ccagcctgccccaaaccagccctccgctgtctgtctgccttcacgcaattctgtagatagcgctaagaggggatatcaaatagctgaggagtcccctgacccctggcttcggagccccctag

SEQ ID NO: 67472 - DNA, 122 bp, Homo sapiens
tgcgcgcaagcgcgctggcgtcacgcacgccgacagacgtggcggcgccggagtcctaggcgcgcaaggtccagttcccgtcttgggcctgtcctggatagcgttagggagacagttcacag

SEQ ID NO: 67473 - DNA, 122 bp, Homo sapiens
cgggtgtgtgggaatgcgcgcggctctgtaaacatctggtgactcaccgcatagctatgtcgtggccggcctgtgcactgacgtgctcgcagtggagctggaagcggtgcccgcggcccctc

SEQ ID NO: 67474 - DNA, 122 bp, Homo sapiens
gtggtgtgagagattcgggcaagaatcctaaatggatgctcagtctgcaccaaatcacaccgcagtcactgagtcaccatggtaaccattctggccaaggaaagctgagaaaaaacaaacac

SEQ ID NO: 67475 - DNA, 122 bp, Homo sapiens
gtcaaaattctggtggtatagacttcagatttccggtcacttctcctgtttactcaccagcgcctgactattctaggcatcaccttcttgcccctatttacttttgcctggaccatttcatc

SEQ ID NO: 67476 - DNA, 122 bp, Homo sapiens
ctgattctcctgggcctaatggttttttttctttctttctttctttttttttttttgagacgagtctcgctctgttgcccagactggagtgcatcgccgcggatgtcttggctcactgcaag

SEQ ID NO: 67477 - DNA, 122 bp, Homo sapiens
ctgggcgccctggccgctgccctgagggagcgcgggggccgcctcggtgctgctgccccgcgggtgctgaaaactgtcaaggtgaggtcccacctcggggtctttatgtgtccaaaggggag

SEQ ID NO: 67478 - DNA, 122 bp, Homo sapiens
ctgcgggctgacggccctaccgggtccagcagtggccagctggcctggttgacacctgtacgcattgtttttaacacagtgattttcagtagtaatggtgagatggataataacgatgcccg

SEQ ID NO: 67479 - DNA, 122 bp, Homo sapiens
atacacaaacaacgggcgtgtctctgttccagtgaaactttatttacaaaaacaggaatccggcccacgggccacagtttgcaatccctggtcattgggaaaacctgctcttccagtatttc

SEQ ID NO: 67480 - DNA, 122 bp, Homo sapiens
gaggcgcgttctggcctgctgacagcagttctactcccacaactcacatatgtctgattccgaagcagggaagtgtgtccaacacacccaatgcaaagacaggttgttgaatattttttctc

SEQ ID NO: 67481 - DNA, 122 bp, Homo sapiens
gccgacgtcctgatggaggccctggaggccctgggctgcgagtgccgcatcgagccccagcgcccggcccgcagcctgcggtggacccgagcgagtcccgacccctgcccccgcagcgtgag

SEQ ID NO: 67482 - DNA, 122 bp, Homo sapiens
actgggccagggatgcagagctgtgtttgtggtgagacctgggagcgactcctggactcccggttccaggctgcatggccttggatacgttaattagttatttgagcctgtgtcttcgtcat

SEQ ID NO: 67483 - DNA, 122 bp, Homo sapiens
aagttaatcagaaataaacagtatctgggatctcatccgtcctaaacccaggggtcagagcgtggggggcttccactaacttcaggttaagaggatgaaacagatccgcggagaagggtccc

SEQ ID NO: 67484 - DNA, 122 bp, Homo sapiens
aacaaagtcagaaggagaggctgccatggctacggctccaggtgacgtcacggccagctccgtgacgcgcggccagggcagcccgcggagaccgaggctcctctgtgacgtcagcagccggc

SEQ ID NO: 67485 - DNA, 122 bp, Homo sapiens
gtccagggactcaccggctgcgaggagccgcgtcttcaccaactgttcacgctcactctccgcggctcggagactcagccgcccttccctgggcactcattggtaagtcctcggaagcgtgg

SEQ ID NO: 67486 - DNA, 122 bp, Homo sapiens
ctgggcgtgggcctggctgggggcccgactcgaggtctggactgggccaaatttaagcagcggtcccgacagccccaagatagcggacccccgccccaggttcctgtgaaacccaaatccct

SEQ ID NO: 67487 - DNA, 122 bp, Homo sapiens
tgaccctcgtgctacccccctttctccaggccctgggacatcttgctggggaggcagcggcggccccaggcccgggtactccctgcgcgtcccgcggagcccggcttcccggcccagtttcc

SEQ ID NO: 67488 - DNA, 122 bp, Homo sapiens
cactaacgggatccggtgtaaataattctgagcagctccaggtcctgagcccagcaagcacgtgctgcggcagggcgcggggagggcgcgcttcgcggaggaagattccgggcggcccgaac

SEQ ID NO: 67489 - DNA, 122 bp, Homo sapiens
ctggctgcggtgattgatggcgcgcgctgcagaggctgattaacccggagccgctgcagccgcggtgtggagcgctgctgcagtccgccgctgtcctcgcggacttgtttgcacagagccaa

SEQ ID NO: 67490 - DNA, 122 bp, Homo sapiens
aaaacctcgtgtggtagttcaagcctgcttagaagcttttaaggcctcgtgccaggtttccggtgttttcatagatttctcttgttcagttattgtcgcctccaaatttgtcattctctcat

SEQ ID NO: 67491 - DNA, 122 bp, Homo sapiens
ggagtgtgccaacctggtggggaattatgcagtccctgaaatgctggctgtaaaagtttacgtgcgttggtgttttagtaagtgaggtgaaaaaagagcacacaaacctgccgctgatgtaa

SEQ ID NO: 67492 - DNA, 122 bp, Homo sapiens
ggggctcggctgcgctgctgtgcggccagcactgggccccttgcactccagcttcctccacggagcaaagtagaggactcactgccctggacagggcccagtaactgtggaacagccccccc

SEQ ID NO: 67493 - DNA, 122 bp, Homo sapiens
cggggacagggccggagcctgggccagggcaggggctggggctggagccgaggccggagtcggagccgagtccagagccgaatccggggccggagctgggaccccagccgagtcccgggccg

SEQ ID NO: 67494 - DNA, 122 bp, Homo sapiens
attgcaggcgtgagccactgcgcccggccccaacatgtttttctaatgcttaaggaaacccggagataatattcccatgttttgccacttagtaaagcattttatatgcctgtgtcagcgag

SEQ ID NO: 67495 - DNA, 122 bp, Homo sapiens
tcctcccctttgaaaaatgcaaacttttagaacaggcccgccgcttcgggcaggttttgccgcggaaaccaccctccctccccgcccccggatgtccagagggctgggtggggaatcccggg

SEQ ID NO: 67496 - DNA, 122 bp, Homo sapiens
cagttagaagctgcagcaaggttcacaggcgtccacgtgtgcgtcttagaatcgaaggagcgtggaggattcggaaggctagtgagtgagcaccagattgtggaaggtgcagggcctgagat

SEQ ID NO: 67497 - DNA, 122 bp, Homo sapiens
tggggagctctggggtgtcaagggcattcgagtttgtgtcaccaaggcaaggaaactggacggtcagctcctggggctgggtgtaatctctcagacatctgtgttaatgaagggtcatcttc

SEQ ID NO: 67498 - DNA, 122 bp, Homo sapiens
aggacaaggtgacaggggagaccagggtgctgtccagcaccacgctgctccctcggcagccgctccctctgggcatcaaagtctacgaggacgagaccaaaggtacgagcaccccggcccct

SEQ ID NO: 67499 - DNA, 122 bp, Homo sapiens
ttgggcacaaagttcgccatggtctagtcagcgatctgctgactagagatggaaacaaatcggagggtgcataggagacaggctgtccccaggaggtgggtacagctagcatcaggatgggg

SEQ ID NO: 67500 - DNA, 122 bp, Homo sapiens
agggtgggaaatttggggactatccgaagtcagaaccacccgtaacacctgacatgtaaacgctcctgggctctggctccaaacttgggggtgccgcatccccggcccaatcagggcggtct

SEQ ID NO: 67501 - DNA, 122 bp, Homo sapiens
ggatggggtgcgctcggtggggtgtctcactttcgtagtactcgaagcacttggcgggagcgctgctgctccacgtgtagtcagacggcttcttcccgcggttgtcccgggcgtagatgttg

SEQ ID NO: 67502 - DNA, 122 bp, Homo sapiens
agttgggggaccgctggggccttgtggcctctgagcaccttggctgggttccagggcggacggacgccggtggtctctggcctcgctcccttcatctggctatggcaccaacacgcccagtt

SEQ ID NO: 67503 - DNA, 122 bp, Homo sapiens
tcccacccctggtggcccagtgagtagtgagttcccagtccctgaggctaccccttccatcgcccacagaggtgaatgccgatactcgcccagctgttcctgacgggccccggggtctctct

SEQ ID NO: 67504 - DNA, 122 bp, Homo sapiens
ggcggtggtgctcggcgtgctgtccctgctggtgctttgcggggtcctgttcctgggcggcggcctcctcctccgcgcccagggcctgacagcgctgctgacccgcgagcagcgcgcgtccc

SEQ ID NO: 67505 - DNA, 122 bp, Homo sapiens
caatacacacactcacagggacaaaggtccagggagcaacaaacactcacgctcagtgcccgtccatccctctgtgcctgcatccagtcaagggacccaggcagagcgctcactacttccag

SEQ ID NO: 67506 - DNA, 122 bp, Homo sapiens
ataattaatattctcgtagatgaggagattgagtcccagaaaggagaaagggggagggctcgcccaaggtcagctcctgtttcagagcttggaacaaggttctctgatcccattgggtgctc

SEQ ID NO: 67507 - DNA, 122 bp, Homo sapiens
cttcgtggtgccccacagccacatggacgtgggctgggtctacactgtgcaggtaggtgccgaccacgccccgcgcgcccctgaggctgcagcttccctctccccgcgggatctgagtgtgg

SEQ ID NO: 67508 - DNA, 122 bp, Homo sapiens
gccgccttccttgagcaccacatccagactgcagttcaaagtgttgggactggacaaccccgagaacaactcccaaagtgtgtaggaattacaaaacgaaaggtaaaaatccgacaagttcc

SEQ ID NO: 67509 - DNA, 122 bp, Homo sapiens
agcgtttgtgtcagtaatgggaaatctgcaagctagacggaaatgacctgctagtgattgcgctgtaaagaagccggaatccacctcttgaaggcatgaagttcaggtatttgaaaggctgg

SEQ ID NO: 67510 - DNA, 122 bp, Homo sapiens
ctggaaccggccggtcactcctctctggcgggaataggctctgtgcgggcctcacagcagcgtccaagccctggcctctcggcaccggggtacctgtccggcgtccaggaagaattaggtca

SEQ ID NO: 67511 - DNA, 122 bp, Homo sapiens
cctctctcaaacaacttaaggctttttttttcatttttacaggaagtgtccttcctgctgcgtacaaaaggcagcaatgcagtagagtgggatcagaggggattgggctgcatacaccttgg

SEQ ID NO: 67512 - DNA, 122 bp, Homo sapiens
aatgtgttaaataacaccacaggggcacaagcagcaaactttgacaggaggatgcccgtgcgcagaacccacaacccagtttcttcaaaagagagcctgcaaggaaaagagaagcacaggca

SEQ ID NO: 67513 - DNA, 122 bp, Homo sapiens
cggaactcggcccccttgtttggggggcggcagccacgtgttcacggggactgtcgtgcgcgccgggttcgcagccgtgcgagctctgaacccacccgtggagctcctgtcgcgggaaactg

SEQ ID NO: 67514 - DNA, 122 bp, Homo sapiens
ggcggcgattgcaacactagcttcgctgcttaaaggggcagccacacctgctgttggtgccgccagccgccggccgcgctagttagcagccggcgagacggagacagagggtggttccggga

SEQ ID NO: 67515 - DNA, 122 bp, Homo sapiens
cgacaccagggtggtgcacgccgcgaaagctgccctggccgccttcaacgctcagaacaacggctccaattttcagctggaggaaatttcccgggctcagcttgtggtaaagactgagattc

SEQ ID NO: 67516 - DNA, 122 bp, Homo sapiens
ccatcaaaaaaggcaattgcaacttgcaagttattcacttttataagttgtttgtacctacgtcttcttttaaaatactccaatacagttatttgatattgattaaactaaagtcaagtgag

SEQ ID NO: 67517 - DNA, 122 bp, Homo sapiens
agtgggagatgtctgctcgtcacccacaggcgcggcccatgtgtgtctgccacgttgtgtcgtgcatgtgccctggtcctgtgcttctcagtgactgagttctctcgtccacccatgcctgg

SEQ ID NO: 67518 - DNA, 122 bp, Homo sapiens
gaggctgttttcgcacttgggcttcgcgcttccttgacactttcctgtctctgctcgccgcgccaggtcgcggcgcctgcctgggcgtcttctccaactccgggtcacctcggggcgagggc

SEQ ID NO: 67519 - DNA, 122 bp, Homo sapiens
ccggcaaagggggcccaggggccaggccccttttgaggatgggtctgaggtttgccccaccgtttcaacccccaagtccacccacaccgggtgtcccgtgggagagagctggctgcatcctg

SEQ ID NO: 67520 - DNA, 122 bp, Homo sapiens
ggctggcggatcactcgcggttaggagctggagaccagcccggccaacacagcgaaaccccgtctccaccaaaaaagtacgaaaaccagtcaggcgtggtggcgcttgcctgcaatcgcagg

SEQ ID NO: 67521 - DNA, 122 bp, Homo sapiens
cgtcatccaccaccggacacacacgagtgggccaggtgtgcagtccccggggctagccaccggggaaagcacagagaagccaccacaaggggaggtggcctttccgcaccacccccgacgct

SEQ ID NO: 67522 - DNA, 122 bp, Homo sapiens
cccgtgtaacaaggtccagtgcctgggtcccctccttggactcctgagtggccgagacaccgctagtgcgtggacaccactccagcccccattacctttccacccttacaccacgacccaca

SEQ ID NO: 67523 - DNA, 122 bp, Homo sapiens
cgggactccgtcttcccacagggcacgtggcgggcggaggcagggaccccacacctcaggcgggcgggcgtgtgcgaaccttttgcaaacctcccagctcggtcctctcaccgccgcccccc

SEQ ID NO: 67524 - DNA, 122 bp, Homo sapiens
actcccagaaatatgcccatgaaatctcctagatgctgaaaatggaccaaatctcaccaacgccttttgaaggcaaattattcaaatggataaatgtggattactatatctttagggttttt

SEQ ID NO: 67525 - DNA, 122 bp, Homo sapiens
tactgtcttgcttgcacactgccttccaatctctcatgaactttggtctcttttgtgggacgattagtaaaatttttcctttggagaagacgcctgtcttcattctcaattcctccactttt

SEQ ID NO: 67526 - DNA, 122 bp, Homo sapiens
ctagcaatgccatttaaatgtatatgccctctagctgacttaaggagagtcacaagttatcgcccttgagacaaatctggctcactgcttatttcttgtaaatgaagatttgttgtaacata

SEQ ID NO: 67527 - DNA, 122 bp, Homo sapiens
catttgggagtagtttcatggtgaggagaacctcaggaagaagtgaagagccaaggcaggcgttagggacccccgggctccagcctgccagagcatctggaagggaaaaggcagcagccatg

SEQ ID NO: 67528 - DNA, 122 bp, Homo sapiens
ttccctccccctcatctgcccccgaatgtgttttggctcaacaggtatcacatgaaaactcgcacttaaaccctggtcatcttctcacaggagccacccttacatttttctgccagggctgc

SEQ ID NO: 67529 - DNA, 122 bp, Homo sapiens
cacaactaaaaggcactaacatgggagaagatttgagagattagaaggatggtgaaggtgcggttgtccaaaatccccctctggggggagatgattgatatctggctgtcattccaagaagc

SEQ ID NO: 67530 - DNA, 122 bp, Homo sapiens
tgccaaaacatttaacctgaatctaatgataaggacaccatcagacaaatccaagctgggcgacattctgccaaacagctagcctgagttcttcaaaaagtcaatgtcactaggagaaagaa

SEQ ID NO: 67531 - DNA, 122 bp, Homo sapiens
gcggcggcagcggagggtgcagcccgggctgcgcttggccatgatggtggaagtggtgagcggggtgatggtgccgaatcggccccgcgcccccggagtaggcacccaaggcagcgggcgga

SEQ ID NO: 67532 - DNA, 122 bp, Homo sapiens
gttcccacctgggccgctgcagggaggaggtcgcagagctgccggctggcgccgccccgccgctctcctgcctgcccgctccccgcatgagccccgcggccccgccctgcgccacccgcccg

SEQ ID NO: 67533 - DNA, 122 bp, Homo sapiens
tccagaatgccccgacccacggcccccaaccaccaaggaagtactttgtcgcccctgtgacgtttcctaccttgatctgtgcacagagtttacctggtcaccgcggtattgcaagcctctcc

SEQ ID NO: 67534 - DNA, 122 bp, Homo sapiens
ccgcatcgccccccgcggggctggtccccaccctttctccgccccctcacctccggcagccgactccggctgccccctatgggtctagggaaacccctcgagacttcccccatgctcactct

SEQ ID NO: 67535 - DNA, 122 bp, Homo sapiens
gccacctccagagggccggggcctacagcctcaaggggccgcccaaggaggcggacctggcgcagcccaggcgtccggcccctccccgcggctggcccggcctccggggaagcccccttggt

SEQ ID NO: 67536 - DNA, 122 bp, Homo sapiens
tgacctcatgatccacctgcctcagcctcccaaagtgctgggattacaggtgtgaaccaccgcgcctggtgtacattggctcttcagggcttctgtctggaagtgacacttaacttccactg

SEQ ID NO: 67537 - DNA, 122 bp, Homo sapiens
acccctgggtctcctctgctgggaccagacctgcctgccggtaaattcttaagagcagcccgcgcagaatctatcccaaggagaccgcccatttttgctggggcaatcagggaactgcgtct

SEQ ID NO: 67538 - DNA, 122 bp, Homo sapiens
cctctcgccgggagctcagcgggttcctggggtggcaggcgacgcgcagggagacggtaacgcatcagaggccccggggctgcagccagcccgcccctcccaccccggagccgcatgttccg

SEQ ID NO: 67539 - DNA, 122 bp, Homo sapiens
tacacacacggctgaccagatatccgacacctgaagtgcacaggcatgcagcccagccagcgcagaaaagctgaacagaggtttctgctgctgccacacaagaaagacagagatagactgcc

SEQ ID NO: 67540 - DNA, 122 bp, Homo sapiens
gggcataaccgggctccatcccaatgctgcctcatccctgcagtcaccccgcacaggtgacgcaggcttcagagggccccggacctcgcctgagggtgaagaaaatcacggcatcactgaca

SEQ ID NO: 67541 - DNA, 122 bp, Homo sapiens
acctctggcctcttggacggagcgggctgggggcgactcgggctggggggtactcggacccgggctcgctgagccctggcgcccgggccctgcctgttggcccctagaaggggtaaggtggg

SEQ ID NO: 67542 - DNA, 122 bp, Homo sapiens
aatgctgggctgaattcaaataactgattttttttctatgtctttataatcatagacttacgtccaaagagatgggaggaaaaaaacctgaacctacatccctattactgaaaccatgccag

SEQ ID NO: 67543 - DNA, 122 bp, Homo sapiens
cttcgcgcgggatttcccataaattcaggctccgggcaagattgtgtgttttttcctctccgcgggccgccgctggccgtgtgggccgaagaagccctggagggggagaggggagccgctct

SEQ ID NO: 67544 - DNA, 122 bp, Homo sapiens
ccaaatgtgcctctcccctccaggatcagcggcccagagatagggacatgtcattgtttccgaggacgcgttgtttgaggtcaccttaaggccagatcggtgtttcattgacgattctgttg

SEQ ID NO: 67545 - DNA, 122 bp, Homo sapiens
gacacccaggctgaaaaccgagtacaacataaccctgcgggtctccgacgtcaatgacaacgcccccgccttcacccaaacctcctacaccctgttcgtccgcgagaacaacagccccgccc

SEQ ID NO: 67546 - DNA, 122 bp, Homo sapiens
cagtctcctgcacgggagggtgtgagaaggccacccaggcagcctgcagctagagctcggcgctgagagagcacaggagagtcagacacctccattctggttacactttttccagatgctga

SEQ ID NO: 67547 - DNA, 122 bp, Homo sapiens
gctctcagctctgaaggctgtgagacccctgatttcccaccccacaccgctatatttctgcgtatgtgtctttaattcctctagcgccgccggattagtctcccgaccgagctggtcttggc

SEQ ID NO: 67548 - DNA, 122 bp, Homo sapiens
ctgacggcgcggctaccatggcggcggcatttgaagcctcgggagccttagcagcagtggcgactgctatgccggctgagcatgtggccgtgcaggtcccggccccagagccaacacccggg

SEQ ID NO: 67549 - DNA, 122 bp, Homo sapiens
tgactctgtatggttgtctagatggatccaccagcatgatgttttctggtttgaggtcagcgtggataagacctaggcttttgagtttcatcagggctgtggctacctgctggagaactggg

SEQ ID NO: 67550 - DNA, 122 bp, Homo sapiens
caacaagccagaaggaagagcctagcctgtcatcttggataccacccagatggaaaagcacgtcacagtcaaaatcacaatcaacattcttgcaacaatgtttgattaaaataaaaagtaaa

SEQ ID NO: 67551 - DNA, 122 bp, Homo sapiens
gggcagagacctcctcccttaggcttgttcggatgcgaatgggagaagctttcttagagccgcagctggctggctgaggagtcactgaaagtggggcgctgtccacagagatgcgtgcatcc

SEQ ID NO: 67552 - DNA, 122 bp, Homo sapiens
gctcggagatgctggggcccatgatctgggaagaaaagtgtggtcaggacactcttgggacgctcttttgatagctctctataagggagctgctttccatgtcttttaagattttccttctt

SEQ ID NO: 67553 - DNA, 122 bp, Homo sapiens
cagcagcgctggggtggagacgaagatcagctggagggcccacagccggatgtgggacaccgggaaaaagtggtcatagcacacatttttgcatcccggttgcagtgtgttgcagacgaagt

SEQ ID NO: 67554 - DNA, 122 bp, Homo sapiens
gttccccaccaccactttttgtccagtggtccctttccaaacaattgcttgttggaataccgtgtcgaggcaagctgaaccccaaggaaagcaaagacattcacagagacgttacctcattc

SEQ ID NO: 67555 - DNA, 122 bp, Homo sapiens
ggacctggtccgtccaggctccttcccatcctcacacccgcgcctttctccctgcggccccggctcgctgctccagctgcccagctcttcccaggacaggggatcccgccaagggggccgcc

SEQ ID NO: 67556 - DNA, 122 bp, Homo sapiens
gataagttttcctcctggctgtcagttagttattctaacccgagtggtcatttaacatcccgtctctgagaagtggattctatccactcttagatgcacaatcttaaatctgacttcctaaa

SEQ ID NO: 67557 - DNA, 122 bp, Homo sapiens
gtacgggtgagtggtgggggccggggcggagtctgtgggtcaggacgcccgcggctgggtcggccccgccccgcctcctcttggcctcggtttcctcttttgctcgtggggcgcgagtggcc

SEQ ID NO: 67558 - DNA, 122 bp, Homo sapiens
cgtgcgtgcgtggattcgggcgggcgggcgagtccacggggcggggcgccgagggggtggcgcgcgcgggtcggcccgctgggcggcgggcacgcgccggcgtcttcgctccgggctcccct

SEQ ID NO: 67559 - DNA, 122 bp, Homo sapiens
gccggggaatggctgatggaggaagcccctgccgggagcaggagcagcggaaacctacatcggccacacagatcccggcgggggagggagggcaacgctcagaagcagagctgcgcgatgtg

SEQ ID NO: 67560 - DNA, 122 bp, Homo sapiens
gcttccaaataaatattatttatatagattgtcctcccactcgtcctcagcctataggaacggtgccataatttgaatgtttgacttctatccctgccttggctcacagctagagagtggag

SEQ ID NO: 67561 - DNA, 122 bp, Homo sapiens
gatggtatccccaagtcttcaaccgagtactgattgtggcttcgatgtaagaaagctatccgaggacagggagagaaccaactgagagaagcaaaggaaaccatccctgagcctcacacggg

SEQ ID NO: 67562 - DNA, 122 bp, Homo sapiens
agggagggcttgctaactctcgtgggcttgccctgagtctcgcgagtgccagcattgccccgcccttggatgggctcctgctttccagcgtctcaccgtcccactgtcctaccgtcccagtg

SEQ ID NO: 67563 - DNA, 122 bp, Homo sapiens
cctcccgccgcccgagctgctgagacccacagcgggggcggtgggagaaccggatggaaccggattgggagcccgcctcctcctccccccgcgtccccggccgcgggctccccctccccgcc

SEQ ID NO: 67564 - DNA, 122 bp, Homo sapiens
ctggctgcagtgccggggccttctgcagaatgtgtgtcttgcgcaggttcatcgtgcagccggctgggcccatcaggtgagctttccatgcctgcagcagaggaggcacacagagtgttaat

SEQ ID NO: 67565 - DNA, 122 bp, Homo sapiens
ggacccctgcctggggccgcccgctcgggcccgtgttgtctcaggcagtagggacactggcgctgacggcgggggtaggaaaccacagagactggcaacttcccaggttcctagagaggagg

SEQ ID NO: 67566 - DNA, 122 bp, Homo sapiens
caccaacaggagagtgactgtgggagccagtcccaaggtgggaagggagccagcctgctccgggagctgggagactccagccaaagtgggattcaggaacccagaggtgcagacttcctatg

SEQ ID NO: 67567 - DNA, 122 bp, Homo sapiens
ccatgggagaggggaagggttcaagcccgggatgggcccgcgtgacgtcgatgggtcctgcggcccccttgcccaacctcgggtttagggaggagggttcacagtgtttttgtgggggcggg

SEQ ID NO: 67568 - DNA, 122 bp, Homo sapiens
gcttagcacagtgagcacttcctaccttacggtgagggtcgggattgggagcggctccgtcggggggctctggctcaccatcactcgtgagtcctcactcaggctgtgtcacggtggctcac

SEQ ID NO: 67569 - DNA, 122 bp, Homo sapiens
acgtgcaggaggcctgggagcacagaggccccgtgtgcttcgaggacttgaggcaggaggcgggcagaggcgcccagggcgtgagtgtggccagcaggacagagggcaggactgcgcttctg

SEQ ID NO: 67570 - DNA, 122 bp, Homo sapiens
agacactctctttggaaaataaccagaattccacagcaataaacacaatgataaccatcacgtactcaacacccgcctggacactgggctcccacatattcccaacaactctgcaaggagga

SEQ ID NO: 67571 - DNA, 122 bp, Homo sapiens
gtcccgcccacctcagctcttcgatgccggtgaacagcttctgcaattcctgctcgctcacgtaggggccctcgccagcccgaggccccattccccagcctgcggggaccaggccgtgtggc

SEQ ID NO: 67572 - DNA, 122 bp, Homo sapiens
gtggaagagcaggcatcgggaaggagtcaattttcagcgagggagatgtccagtggtcaacgggatatgaggagagcggtttgacataacattcagattcagaaggaagtggtatgtggctg

SEQ ID NO: 67573 - DNA, 122 bp, Homo sapiens
ccacagcgagggacagagatgagactagacttggtgtccagcgtccagtcagccctcccccggatgggtggacagacacataggccactgaaaatccaagtcctgccccagctcagccggag

SEQ ID NO: 67574 - DNA, 122 bp, Homo sapiens
gggaccagacctaaagggagaaggcgcgatctggggccctccctccgcaccccctcgccccgagaagccccaaacccaggtctttgaccctcatgaacatcctttgtccttcctctctcctg

SEQ ID NO: 67575 - DNA, 122 bp, Homo sapiens
ggaagagctctgtttcccaggcatgaccctacgaaaggagactattttgtggtaacttgtcgctaacaggtgtttgcaattagattttgaaatttgtgggtctgaatatggaacctgaaact

SEQ ID NO: 67576 - DNA, 122 bp, Homo sapiens
cgagcggcaggcagcgaggcggaaacggtcgccggtttcagtggtggccccactggaagccgagttcaggagcggctaagcggtcgccggggaaagcaccggggcttcccagggtcccctcc

SEQ ID NO: 67577 - DNA, 122 bp, Homo sapiens
actaaggtcagaagttaagtaaactgccccaggtctaactgggctgattagtctggccttcgatcacactgttctgtcaccatcaaattcaccctgaggcttggggaccacttgttcagggt

SEQ ID NO: 67578 - DNA, 122 bp, Homo sapiens
gaattgggagaggaagtatagaggacagtaaaatagtaagctatggttctggtcctgtttcggagaagatagatatgcttgcttgctaatgttaaacttggttaggaaaagaataaatctac

SEQ ID NO: 67579 - DNA, 122 bp, Homo sapiens
cgcagccaaggcaaaggccaagtccgcggccgaccccgcggcggccgcgtccccgcctcgcgcgtccccgggccggacaaaagccatggctgcttgttatccggtcaatggaacgggttatg

SEQ ID NO: 67580 - DNA, 122 bp, Homo sapiens
cttcagacttttctggaattagcagagagcgtcctgaattatttccagccctttctgggccgcatcgaaatcatgggaagcgccaaacgcatcgagagggtctattttgaaatcagtgagtc

SEQ ID NO: 67581 - DNA, 122 bp, Homo sapiens
agggaatcctggagactgccggggcggggggcgggggcggcggtcgcaggagggacccggcgcgggcgggaccgcggcggtcgggggacaccagctgcgtcggagcgcccagaacgccccgc

SEQ ID NO: 67582 - DNA, 122 bp, Homo sapiens
ctggtggaagtgaatattgcctgcagcaagaagaaggactgttcatgtgggagcgcaaggcggcagcggggttggaaacccacccccacacagtcaacacctgctgtcacaccaggctaatc

SEQ ID NO: 67583 - DNA, 122 bp, Homo sapiens
atgccctttgtggggctgcagggacgactttgaaggctgtcagctgcacgtgtttatgtgcgcagggatgcacgtgcacacacatgcacacatacacacacgcacacatgcacacaaacgca

SEQ ID NO: 67584 - DNA, 122 bp, Homo sapiens
aggggggagggagagattagtttgggaagtagcacggattgctcatccgatccgtgccgccgcagggagtgtgtcaagttacagaggcgccggaatcggcccctgcgctcctcgccagccgc

SEQ ID NO: 67585 - DNA, 122 bp, Homo sapiens
ttcggaggctggcccactttggcaggatgataaagtggcaaagtcaggtccctccttccacgggctgctcttccagtcagatgttgcctctctctgagtgcctcacagtccagccatggcag

SEQ ID NO: 67586 - DNA, 122 bp, Homo sapiens
gacgtgccctacgagcagcttatgcagctatacagtgcgcgtcggcagcagcgtttgaaccgggtctggggcggaaacagcactcgccgctgaagcgcctgcgcaaggccaagaaggaggta

SEQ ID NO: 67587 - DNA, 122 bp, Homo sapiens
gggcggggacagagggaaagaaaccgctttgcatgttgggagtagtagtttgtgtaatatcgcgagctgtcctttagttgactgctctaacagtagaaattaattctcctggatttgatggt

SEQ ID NO: 67588 - DNA, 122 bp, Homo sapiens
ctcttgcgcagccctcggtccaggtcctgggccgcgtcccccgagacccggcggtaggagcggccacagtggctcaggggcctgtccatggtcatgtacccgtagaactcaccgccgccgcc

SEQ ID NO: 67589 - DNA, 122 bp, Homo sapiens
tccactcccttgccctctccagaaatcaattaatttctcccatggtattactgtaaatatcgcatagattctgtcatgacatctccttgacagcaggcaacacatcgggtctgatttgcctc

SEQ ID NO: 67590 - DNA, 122 bp, Homo sapiens
gctggagctctgcgatccacagctgaggacaccaggggctggcacccctccggcaagaaccggcaccacaccttctgagctttgacatcctggagcctgtagtggcactgcaccagaatgga

SEQ ID NO: 67591 - DNA, 122 bp, Homo sapiens
aaacatgcgtgtggaagtgtatttttcatataatgacttattttcctctctgtagatacccgctagtgggattgctggatctaatggcagatttacttttagttctttaaggaacatccata

SEQ ID NO: 67592 - DNA, 122 bp, Homo sapiens
ctgacccctggccagccggcttccctgatgagctcagaggacaggacacctgggagtctccgacgagcaacaggaaatacggatgcatttaatcccggcgtacaaactcactgagcacaaaa

SEQ ID NO: 67593 - DNA, 122 bp, Homo sapiens
ctcagagacatgaacgtcgattggccgaacggcagggcccgagcgggcaatgattggttgcgtccggccgtccgtgcggcggccgaggaggaaggtgggaggggcgttgctgagggtagctg

SEQ ID NO: 67594 - DNA, 122 bp, Homo sapiens
ctcccgggtctgccgtcgctgccgccatcttggagggagctactattgtgtcactgggggcggggaggagcgggaccagatccgccccgctcagccaatggcccgtgagcctccctgggccg

SEQ ID NO: 67595 - DNA, 122 bp, Homo sapiens
cggcgcgagcggttaaagggccggtgcatttaaaggagcggtgcacgtgggtctctgaggcgtgtagcaggcgggggcgttttgttcttcttctctctcgccggagacctccgttgcgccga

SEQ ID NO: 67596 - DNA, 122 bp, Homo sapiens
ccatgcatccccaggctgaccttgctgcagggtgtgacagtgagcgattccatgcctgtgcgggggttgtagctcttctgcttacagaaccctggatccagcacataaatgatgccctcaat

SEQ ID NO: 67597 - DNA, 122 bp, Homo sapiens
cggccaccagagaaggatccttactctgcgcctgggattgctcgttatcccgtttctccccgcaagtaacctgttcttccgagcgggcttcgtggtcccgagcgtggggtgctgtgtgatgc

SEQ ID NO: 67598 - DNA, 122 bp, Homo sapiens
caacctgaggcaggctggcgcccacggctgctggagaagctgctacagtgaaaaacccctcggcttcccacctcctccccttctctggctctcagtcgttccccttggaggggcgagggagg

SEQ ID NO: 67599 - DNA, 122 bp, Homo sapiens
atataaagtgactcagtgttaaaatctgatacactacagaagcactgtatggtttatattcggaatggttttttatgtcaaaggaagtgcaatgaatataggcaaggaattaaagccattaa

SEQ ID NO: 67600 - DNA, 122 bp, Homo sapiens
ctggtggggcgtggctcggtgagggaggtctcgcttgggggcgtggtctcccccagtaggcggggcttggtgccgggggcggggtctggcgggcgcgggcgcgtgtgcgtgttgtgggcctc

SEQ ID NO: 67601 - DNA, 122 bp, Homo sapiens
gagaacctgtgcacttggattccttgaaagtttttgtcttggtttcactggcatctatctcgcattcagttccgatatctgtgacttcatcatatccatggcctgccactagctacagaagc

SEQ ID NO: 67602 - DNA, 122 bp, Homo sapiens
tcagattttcaaagcgtaccctgtttacatcattttgccaatttcgcgtactgcaaccggcgggccacgcccccgtgaaaagaaggttgttttctccacatttcggggttctggacgtttcc

SEQ ID NO: 67603 - DNA, 122 bp, Homo sapiens
catggagcagggggtggcgctcgtggaggaggctctggccacacaggagcccacagagggcgtgggaggctcaggcatggagggctgcaggtccccagccctgccccgcgggaaggcagcta

SEQ ID NO: 67604 - DNA, 122 bp, Homo sapiens
ggtgccaagggaggcgaaaggagatctgggctcgggttcggcagcgggagaaagaactcgcgcttaagtttccaggaggtttctgttttgttgttcgaaagccccccttctcgcctgtgcgg

SEQ ID NO: 67605 - DNA, 122 bp, Homo sapiens
ctgggcgatgccccccacccccaggcacgcgctctccccgtgcggccgcaccgcgcatgccggttttcacatcagaaaatacgatttgcaaagcacacttagggtgtcccccttaacttccc

SEQ ID NO: 67606 - DNA, 122 bp, Homo sapiens
ctctttaaccccggtcttttactggctaaactcgtatccctggcgtctccttcctgcgcacgtcttcatttactgatttactgtgagggtatatgagagggtgaagacaaacagtcctcggc

SEQ ID NO: 67607 - DNA, 122 bp, Homo sapiens
gcagtgaaggcgtgccgggctgccagcgactctgggcaggaggagcccagagcgagggaccgccggcgcggaccaggcagaagcctctgcagctgtggacgcccctgtgtggctgtgcattt

SEQ ID NO: 67608 - DNA, 122 bp, Homo sapiens
tgtcagtgggcctcaagctcccttagcatatggcctctggaataaagtgagcccgcacctcgggagggggcaagcagaggcaggagcaggatggcaggtggcaggcggggctgcacagggga

SEQ ID NO: 67609 - DNA, 122 bp, Homo sapiens
cacagataatgaggggacaagacctaattgaaccgagtattgccgggaaggaaaaggcaacgggccaagcctttgacagggtgcgacactgacttttatcatcgttatagtctttaaatcct

SEQ ID NO: 67610 - DNA, 122 bp, Homo sapiens
agggggaaggcacggctggaggcccgtgcgcaccgccactctcctggaaccgctgctggccgagccacagccctgcggaaattctactgcgtgtggcagagaccgatgtgcaaaaggtttct

SEQ ID NO: 67611 - DNA, 122 bp, Homo sapiens
agcggctcagcggggctgggggcgcggggtcaagcctggcagtccggcccggcggaggcgcggctgacagggcagccccccagcccgccgggcctcacctggaagtgctcctgaaagcgaac

SEQ ID NO: 67612 - DNA, 122 bp, Homo sapiens
tgtcggttcgcccaatgtcaacttaaataccaggtttatccatgactaaacaatatgttacggggattttcttctcagagctttgctggattggactgtttgtttggtatcacatagacctg

SEQ ID NO: 67613 - DNA, 122 bp, Homo sapiens
gagccgggagccccggagcccagttcgcgagaggcagcagcggctgtagccaagcacacccgccggccagatttctgtcccgatcgggcttcaacgactcgccccgcctctatacttttccg

SEQ ID NO: 67614 - DNA, 122 bp, Homo sapiens
aatgtaatccacatgcagctggaagccggagcctgttcaggggcatggtgtctccacatgcgcctgccttatgtgctacaagcatcatggccaggccctggggcagcaggtgtgagctggaa

SEQ ID NO: 67615 - DNA, 122 bp, Homo sapiens
ggagaggcaagcggggaacccgcagcttatttcccaggggcacagctcagcatgcctccccgctgcagagccctcccaactgccctcgccttgagcgttctacctgcaagaagcgggcgcag

SEQ ID NO: 67616 - DNA, 122 bp, Homo sapiens
cacccaatgtgacacaggattgagacaagttatgtgacctccacaaagctcaacctctcacgccagattcgatgcttcccaaaaggaacacacccatgtcttggcagtctccgataggctga

SEQ ID NO: 67617 - DNA, 122 bp, Homo sapiens
tgacagaacaacagggctgtttcaagactgtaggaagctgtgccaagtctgtaggagccccggagtccactgtggatactgtttctaggaagggagaagggagtcagagaaagtggaggtca

SEQ ID NO: 67618 - DNA, 122 bp, Homo sapiens
gccgtgggatggacgctgggttcctagaagggcgcgcaggaagacggcggacggggaagacgttctttctgactgcccttttcctacttatcttggaggacgatgcggagtttaagctcctt

SEQ ID NO: 67619 - DNA, 122 bp, Homo sapiens
gccgggctgagcgtgcgtggatggaggcggtcggcttcagcacgcatgcgggttccggagcgggaggcgggaggacgccgcggctctgactcaatgcgcgtgcgcgcggttggggggttgag

SEQ ID NO: 67620 - DNA, 122 bp, Homo sapiens
ctagggaaggccgggcaagcaggcagctgcagggtcctggaggccatactgagggggagtcggagatccccagcaccgggaagtggaacgtgatgctggagtatgagcagtggtttcctaaa

SEQ ID NO: 67621 - DNA, 122 bp, Homo sapiens
gcagggccaggccatggtggtggagctgattctgaccttccagctggcactctgcatcttcgcctccactgactcccgccgcaccagccctgtgggctccccagccctgtccattggcctgt

SEQ ID NO: 67622 - DNA, 122 bp, Homo sapiens
acataacggagaggtgtagtcagaacagatgtggaagcaagacagggcaaggctgactcacggcttttagtctgagcagctgagtaaaaatggtaccgtttacatcaaatagggaacggtgg

SEQ ID NO: 67623 - DNA, 122 bp, Homo sapiens
ctaccggtgatctacagcacccctgcgcgctgacggtgggaatgcacggatggacatatgcggctcctacctcctcagggcttcactcccggctgggggcgtgttacatcctctccacttcc

SEQ ID NO: 67624 - DNA, 122 bp, Homo sapiens
ggtcattctctccgaccggccctgcctggagctaagtgccgagagcgaggccgagatggccgagtggatgcagcatctctgccaggctgtgtccaaaggggtgagcttcgcctgcccctacc

SEQ ID NO: 67625 - DNA, 122 bp, Homo sapiens
acgtggccctggcctacccaccaatgttctagaacattctggaacattctgttctcagcccggagcctgggaactgggtaaacctgggccatcgagcggcatccaacatgaggaaaatacca

SEQ ID NO: 67626 - DNA, 122 bp, Homo sapiens
cttgcgcctggccctcagcccgcccatgtgcaggaggggttccggggcagccgggttacacgcgagagccccacgcgccggaggttccggggcagccgggttacacgcgagagccccacgcg

SEQ ID NO: 67627 - DNA, 122 bp, Homo sapiens
cccacaccccctttgctccccgaagtggcctaataaaggaagtgccccgtagccctgctgcgaacttcaggcattaaatcagccctcctcatcctgttgttgcacatcctgttgttattccc

SEQ ID NO: 67628 - DNA, 122 bp, Homo sapiens
gtccgcctctccgccgcgccgccgctgtccgcctctccgccgctgtccgtctctccgccgcgccgccgctgtccgcctctccgccgctgtccacctctccgccgctgtccgcctctccgccg

SEQ ID NO: 67629 - DNA, 122 bp, Homo sapiens
tctgagaaacagcagggcacgtgggtgcggcctgggaacagatcaggattgacctgcgtgcgagccagcttgtcacagtgatgtgacgatgagtcaggacacctgggcgtggcgctgtccag

SEQ ID NO: 67630 - DNA, 122 bp, Homo sapiens
caaatgaaaattgtaaactaaaaataaaatcctaaaccccccaaccaactaaacagaccccgcttttggtgagggggccctcagaaaaaccttaaaaactgaattcccagtcatgaccagaa

SEQ ID NO: 67631 - DNA, 122 bp, Homo sapiens
ttcccggcatccggcatccagactcagcctcctccccaggccacggccgccgtggccagtcggtcaagcccttctaggaacttcctttgagctggcgcccttgttcactgctgacgccactc

SEQ ID NO: 67632 - DNA, 122 bp, Homo sapiens
ggagtgggtgagagggaaaagaaaggtatagatggttcgttggaaaatgtggttttataccgggttttggtgtcaggtccccgagggcaacatggactccacactgtgatcctccgggcagc

SEQ ID NO: 67633 - DNA, 122 bp, Homo sapiens
gctggggccgcaggtggggagcttcggcctcccagacccctcccacccacgcaggtgggacgaagcgagggtatgaagcccaggccctccctgctccggcgcttgccctcacaacccttcct

SEQ ID NO: 67634 - DNA, 122 bp, Homo sapiens
tcccccaccttggccgggattaccctccgagttccaggccatgacaaatgacatcactcccggcccaggcttaaaatctccccatgtgaggggatgtgtttccttcagcctctgctgtctgg

SEQ ID NO: 67635 - DNA, 122 bp, Homo sapiens
atcccagtgcctgggggaggtgcaggggctcaggcctgtgatcccaccactttgggatgccgaggtagaaggattgcttcagtgcaagagttaagaccagcttagaccacacacagagacct

SEQ ID NO: 67636 - DNA, 122 bp, Homo sapiens
ttcacagtcataactttccgttattagagttactaacggactagagaatagggcagttatcgggacataccctcaagggaaactactgtaaagttcctatgtcaccttcacactatttccga

SEQ ID NO: 67637 - DNA, 122 bp, Homo sapiens
cgttcgggcgaggaggggagattctgtctcagaggcctcgggctgcacgttcttccgggccgcgcatttgcagcccacagcaggccccagccggcccctctggagttgggccactgcttctg

SEQ ID NO: 67638 - DNA, 122 bp, Homo sapiens
agacccgcgtgtttgggggagtctgggactgcccgaaggcatgacggcccgatctgttgccggtcacagtcagtctcctgcccctgttcggctgctccccgagggccatggtgaggctggtg

SEQ ID NO: 67639 - DNA, 122 bp, Homo sapiens
gacaccccaaggtgaggacccctttgtgggtgagtccccccacactcaggtgactccaggcgggcacaggcccgcccaaccgctcgtcatcacggggggcgactcgtccagggccccagccg

SEQ ID NO: 67640 - DNA, 122 bp, Homo sapiens
agtgctgggattacaagcatgagccaccgcccccagcctcttgcacagtgttttgaggttcgtccatattgtaatatctattaatactttttttttttttttttttttttttgagatgaggt

SEQ ID NO: 67641 - DNA, 122 bp, Homo sapiens
ttaggccattcctgccggttgggtctttgggaggcttctatttggcacaacatttcaatacgctatgacatattaagcatgctctagagctgaacatccaatcagaaaggcccgggtggatg

SEQ ID NO: 67642 - DNA, 122 bp, Homo sapiens
agggcgtttgccacagccccttaactccttccaaaacactccgcttagatactgataaggcgccaactgcagcctggagaacccctatgcgccatcttggcttcccgcaggcctctgcgccg

SEQ ID NO: 67643 - DNA, 122 bp, Homo sapiens
ttgattgtttagctgttgtgtgctctttatgataaaagggcattgtcaaagtgccattgtcgtctggcacatggtcttgaaaactgaaaatatgtaatagcttaattgttatggccacagtg

SEQ ID NO: 67644 - DNA, 122 bp, Homo sapiens
actttgcctctcttcagttcgataaaatgttcttgatttgctagctaaacagtcaaataacgtaaaatgaaaggtattttaggagaaatttgaaggtggtttccatgttttgttactgtcct

SEQ ID NO: 67645 - DNA, 122 bp, Homo sapiens
gagcggagccatggaggagggctccggaccaaactcagccattgatcaatgtagggaaaccgatcggggtgactgggagttccagcaactacccgccacacagcctggacaattgcgaggtt

SEQ ID NO: 67646 - DNA, 122 bp, Homo sapiens
cagggtgaccctcaccctcagataatcagaagattccgtggatcctttttgatttggcagcggcttctctggaggtttcctggaaaatatgtggaggagagccttcctctgcgggtcttgtg

SEQ ID NO: 67647 - DNA, 122 bp, Homo sapiens
ccacagacttttgtcactaaaagcccaggtgactccccagatgcttacggatattaaaaccgattatgctgaaggagtggaaggagagtcaagtaaaagaagaagatcaagtaaaaagaact

SEQ ID NO: 67648 - DNA, 122 bp, Homo sapiens
aggccacgcacccacagaatgtggtgaaatggatactgttccctgcaactccacattccccgtgtcaatcataaaaaccagggaccgcgagaacaacagtgtggggggaaaactgtgccaat

SEQ ID NO: 67649 - DNA, 122 bp, Homo sapiens
cgtcagggagtcggggccgtgggctggggctgaagccgtggaccttcgtcctcggggctgcgccccggaatgcgcctcgcctcgtccggtccctgtgcagccggctctgcccggggacttcg

SEQ ID NO: 67650 - DNA, 122 bp, Homo sapiens
ttatataaattacaacatggagtgactaactagtggctctccctctaaggattttaccaccgaatccaaatatatttcactgattgcatctaggcagctataggagtgttttataggttgct

SEQ ID NO: 67651 - DNA, 122 bp, Homo sapiens
tcgagggcgcctcaacacccgggtaagcgcgccccggctgcctccctctgcccaccgcgccgccttcagcgtagcagttccccactgggtctgggtctgcgccctggctctccctctccgcg

SEQ ID NO: 67652 - DNA, 122 bp, Homo sapiens
cccagctctgagacccgctcctcctccccacgctgtccccgtgccaggaccattacgctccgcccccggtgcagagccccgccccaggccccgcccccaaccctttagctctcaccatcgca

SEQ ID NO: 67653 - DNA, 122 bp, Homo sapiens
tttgttccccatcgctgaaagatcggtgccatccggagctgtgaggctctctttgtttctcggaccaaggtctccttggctagggtgggaggggccgatatcgagaccacaagtggacgcgg

SEQ ID NO: 67654 - DNA, 122 bp, Homo sapiens
ctggagggggcagaaagagcctctgccacacccggaccccctgggctcctgaacagccaccggcctgcagactcggatgacactaacgccgccgggccctcagctgccctcctggaggggct

SEQ ID NO: 67655 - DNA, 122 bp, Homo sapiens
ggagagtagacgttttagaaaagcacgaggaaaccaaaaacaggcttttccaacaattaccgctggagttgctccacactggagatgctccaggcgggcaggctcgccgcagctctggacac

SEQ ID NO: 67656 - DNA, 122 bp, Homo sapiens
aacctcacgaagcctagaagggccggagggacaggctgggagttagctgggagttgctgacgcagttccttctgcgctttgttcaagatgtgggtctggcgctttcggtgaggggtgctcta

SEQ ID NO: 67657 - DNA, 122 bp, Homo sapiens
attcctcattgcattaggagaatgagtgaatcagggccttggctaggggagaatggaactcgggagcagctaatgaactaggaaaagagcagccctgggtcccttccttagatccataacct

SEQ ID NO: 67658 - DNA, 122 bp, Homo sapiens
gatttgttttattttgagaaaggttcctggaagacccccccaccccacccagggtggagacgtccacctggcagcgcctcggcccagctccggcctgaccacccaggttcatctccccctgc

SEQ ID NO: 67659 - DNA, 122 bp, Homo sapiens
cgcaggggcccaataccccacccgccgcgcgcactgacacccggagagagggacgcacagcggctgtgggtgaagcttcacaaaacccagtcgatagacacacgcacgagttgtacacaaag

SEQ ID NO: 67660 - DNA, 122 bp, Homo sapiens
tcatccaaacaggcaagtgttggcctttattttgatggtgttcttgtctcaggttcgcctcgagcctattcgttattctgtgttggaggaaacagagagcggctcctttgtagcccatctgg

SEQ ID NO: 67661 - DNA, 122 bp, Homo sapiens
aggcggagccacgcccgccccgaggagcaccgggctccatcgccttcccccagattgcagcggaccttgatttcaagaaacattcccgccgtgtcaacagcagccctgtgcagcggctgccc

SEQ ID NO: 67662 - DNA, 122 bp, Homo sapiens
gtcttcttgatttcttacactgtgaccatctttggcaatctgaccattattctagtgtcacgcctggacaccaaacttcatacccccatgtatttttttcttaccaatctatcactcctgga

SEQ ID NO: 67663 - DNA, 122 bp, Homo sapiens
cgctgattggctggcacaaccggcaccggagccaatgggagcacgccttgttgtcaggcgcgcagccggacggcgcggtggtcgggacagactggccgttgctgtggagacgcctggtgagt

SEQ ID NO: 67664 - DNA, 122 bp, Homo sapiens
agggtctgttatatttcctggttcttgtgaggagtgggagaaataaaaattagaaatgagcgatttccaaatacgcttcaaaattgttggctttagggagatcaagaagaccttacaagtta

SEQ ID NO: 67665 - DNA, 122 bp, Homo sapiens
gacagggacacccggggacggcgcctcactcaccctacacgtgacagggacacccggggacggcacctcactcaccctacacgtgacagggacacccggggacggcgcctcactcaccctgc

SEQ ID NO: 67666 - DNA, 122 bp, Homo sapiens
cagccagagagggaccctggggagactccgcctcctacaaagctggttgggcctcagtcgcgtcatctggaaaatgggggtggcagggaacttcgccaattctctccacctccttcctggac

SEQ ID NO: 67667 - DNA, 122 bp, Homo sapiens
cttagaccatggctgcttcccacaatgccctggcactgaaagtgtgcagactcctcccagcgcggctgcctcctccctgcacgctcctccccgctgcctcctccccgcgccctcctccccgc

SEQ ID NO: 67668 - DNA, 122 bp, Homo sapiens
agaaaaaagaaaaatgccctggcactgctcagctcagaaccttgaaagggatccttgtttcgctctgggtcagggtcccatcctcaaagcagtcacttccagagccccatggagcctcatat

SEQ ID NO: 67669 - DNA, 122 bp, Homo sapiens
ccagggcatccagcgtgaaggaggtagaactaggccggcccgcgaggaggcaggggcaggcgccagtgacgcaatgactgcaacatgccgccagggtgcagcagagcccgaccccgggttgt

SEQ ID NO: 67670 - DNA, 122 bp, Homo sapiens
tccttctgagcaggaattgaaaaaagaagacacttctgcaggctgcactccccttcttttcgcagccaggacttgctgctcattcactccagagccggctgggaggcagccctttcacacgg

SEQ ID NO: 67671 - DNA, 122 bp, Homo sapiens
ctggcccctccccttgtcttccagataccctgtgtaacgaactcgaccaggagcggaaggcgcgctatgccatccagcagaaattgaaaggtgcggaagccgggaaacaaagataggagggg

SEQ ID NO: 67672 - DNA, 122 bp, Homo sapiens
tttcactggtgagaaagtacatgatgagtcaattacattctgaatgagtgatcgaaagcgcgatgtctgttcgtatgagcacccccagtaagtgagcgcttggaaagactttacatctaata

SEQ ID NO: 67673 - DNA, 122 bp, Homo sapiens
tgaatagaaagaaagggggctaacagtctgaattggccccttccagattcatactgatgtcggagaggaaaaggaatttatttacactgcagtgccttggcagcaaacatggctgcccctgc

SEQ ID NO: 67674 - DNA, 122 bp, Homo sapiens
ggcgcgccgggcactagcggagccaagaggtcgggggcggggcggggccggaaccagccccgcccactcggagcagcgccgcctccgccaggcagcctcccggccgacctcccagcctcagt

SEQ ID NO: 67675 - DNA, 122 bp, Homo sapiens
attgggaaaatatttgcaacatatgagtcagtgaaagatgaggccaaatttcctaagtaccgggccagcttgggtagagacagtgctccagccacccaggcaaatgctttctcctctatcca

SEQ ID NO: 67676 - DNA, 122 bp, Homo sapiens
tccggccggtcaggtgggtcagcaggtccacaatgtaggtccccatggtgtgcaagcccccgccgcccatgagctcatcacagatccagccatagctggggctcagcaggctgcctgagtag

SEQ ID NO: 67677 - DNA, 122 bp, Homo sapiens
ctatcctccgttccgcggcgccgggtccgccttccgtctgttctagggcctgctcctgcgcggcagctgctttagaaggtctcgagcctcctgtaccttcccagggatgaaccgggccttcc

SEQ ID NO: 67678 - DNA, 122 bp, Homo sapiens
ccctgtttccgcgtggtgtctccattccccctttcctcccgtgcgcctccctcccttccccgccccgggccgcggctcctgattgtccaaacgcaattctcgagtctatggctccggccgag

SEQ ID NO: 67679 - DNA, 122 bp, Homo sapiens
atcccaacacaacagggcaaatccacaaagcaatctcatctactgaaaaacaattacagccgggccagggaaaaacaccacaaaaggcttggaaatttcctgagaccagggtatatgaaatc

SEQ ID NO: 67680 - DNA, 122 bp, Homo sapiens
agcacacatacacacacacaaacacacggggcctcacagagccctcagcacgggctctcgcgagaagctgccccaagctccaaatttgagcggccgaagtatcgcgagacctaagtatggct

SEQ ID NO: 67681 - DNA, 122 bp, Homo sapiens
agcggaggagggacagcagtgatggcgtgggccccgaccttgatcccggcctagggagagcgtgcagtgcagcccaccttcagtttctggatcttgccagccagcgaggagtgagtgcccac

SEQ ID NO: 67682 - DNA, 122 bp, Homo sapiens
caaaactaggcgtttgcgccaggcattgtgggaattgaagtccgacgttcacaccggctccgtaaacctcacggcacggagactaggtctcccagaatccatggcgtgacaaacgcagtaat

SEQ ID NO: 67683 - DNA, 122 bp, Homo sapiens
cccgtctagcatcgcagacctggttttcacctactgagcccaccgtcagcggggcgcgcacgcccccaaaccagctgtttacatacaggaatcaggtattggggcccctcggaggccgaggc

SEQ ID NO: 67684 - DNA, 122 bp, Homo sapiens
agtagtttagtaatgattctgaagtaaagcagtggtttgattctgatccaggaataccatcgttattactctctcctaaagcattcacagatgaaagcagtgcagtcatgaaatgtgcaagc

SEQ ID NO: 67685 - DNA, 122 bp, Homo sapiens
aggactgcgcaccggaagtagtggcggcgctgcgtaacgtcgagaggaagtgcctgatgccgcggcctgtgattgggagttgctggagtcggtgcttcactcttaaggttccgatcacagac

SEQ ID NO: 67686 - DNA, 122 bp, Homo sapiens
gactaggcccgaagcgcgcgaaccgctctccgccccaggtcccgccccccccgccgccggcgtcacacgcaccgccacttccggcatgcgcagggacgcaccttccggctcagctcctccgt

SEQ ID NO: 67687 - DNA, 122 bp, Homo sapiens
caagcttagcctggccgggaaacgggaggcgtggaggccgggagcagcccccggggtcatcgccctgccaccgccgcccgattgctttagcttggaaattccggagctgaagcggccagcga

SEQ ID NO: 67688 - DNA, 122 bp, Homo sapiens
tggaggagtctgagggctgggggcgggcggggagcgccggtccagccgctttcggtcaatcgcagaagcccaacgcccggagggagggaggcaggggaaggagaggggcggactgagggtgg

SEQ ID NO: 67689 - DNA, 122 bp, Homo sapiens
aatgtttgaagatcatcgcgtatcttggaattgccaggcttcctgctccacagattccagcgctgggcaaatggacacaaggaaacataacttctgcataacttttactacttctttccttt

SEQ ID NO: 67690 - DNA, 122 bp, Homo sapiens
ggctactcaagggacctggtatggggcggccccactcccacctccccttggtggggtccccggcccaggactcaccggaaaatgcagtgagcggcggtcagcacccactgggggtggatgag

SEQ ID NO: 67691 - DNA, 122 bp, Homo sapiens
ccagctggacaggggaagcagtggggagaaaggaggcccttgggcactgtctgaaaagtgcgatgccaaatgatctttagggacagacagtaaattatatcccttgctaaaatacctctcgg

SEQ ID NO: 67692 - DNA, 122 bp, Homo sapiens
cttcggccgcggctgctcccgacacgttgttgttggcgttggtggcggcggctgcggcggcggcggccgcgagctccagccccgggccatcgctccagccccagatcacttcccctttggca

SEQ ID NO: 67693 - DNA, 122 bp, Homo sapiens
aaagggcagaagaaacgcctgactttaggtttctctattgcaattcccttgcaaaacaagcgaagagagttgattccagagaccgcgaaccctcggcggttcggccgcaggtcccgagggta

SEQ ID NO: 67694 - DNA, 122 bp, Homo sapiens
gcccatctgggacttcaaagcgcagcgcggggctcaaaggcggcccgggtgggggtggggcggggagggcgctctggcttcctcccaggcagccggcccggggccagcggggggccttccac

SEQ ID NO: 67695 - DNA, 122 bp, Homo sapiens
tcccacactcgcttcgttaacccactgctggccgttgccccaggtcctccagaagggccacgaactgactggaccctccaggttcacctcccagcctcagcccagaaagggtgagaggcctg

SEQ ID NO: 67696 - DNA, 122 bp, Homo sapiens
gttgcagtcacagacttacatgccagtgagattggtaacccttagcttctttgcagagagcggcctcaggtggagctcacctttgaggagactgagaggagagctctgcttctgaagaagtg

SEQ ID NO: 67697 - DNA, 122 bp, Homo sapiens
ccccccaatttacaagatacactttctgtgcagcaggcagcctccagcatgaccccctagcgggtcagagtgggcagggcttcaggccgaactctcctctccagcggaggtctcagctgctt

SEQ ID NO: 67698 - DNA, 122 bp, Homo sapiens
tacagaacgatggagtatatggcagaatccaccgaccgcagccctggacacatgtgagtgcgacacttcttccttcccccttaaatgtgaaaatcttcagtgagcccgggaaactcactatg

SEQ ID NO: 67699 - DNA, 122 bp, Homo sapiens
actttcttctaggatgtgagcacctactgtgtgctgaacactcactattgccagggactccgcctggtattttacacacagtatctctactgtttttttgaatgcagtctctgagatcttat

SEQ ID NO: 67700 - DNA, 122 bp, Homo sapiens
ggtgcgggatataatctcctggtgcgccgttttttaagcccgtgggaaaagtgcggtattcgggtgggagtgacccgattttccaggtgccatctgtcacccctttctttgactcggaaagg

SEQ ID NO: 67701 - DNA, 122 bp, Homo sapiens
aggaggaggaggaggcggcagagagagtcctagctggagcgggagcgcagggaacacccgcggtggcagcagcggcccgcgcgccctcgcgcccgacccgggctcgcctcggcttcctcggc

SEQ ID NO: 67702 - DNA, 122 bp, Homo sapiens
ccgaagcccctggggccggagcaactgtgaccacagcgaggatgcggggctggtctgcaccggtacgtcgggctggggcctggccccctcctgtcttcctcagaccccagctccctcttgcc

SEQ ID NO: 67703 - DNA, 122 bp, Homo sapiens
ctctgcctcgccggtcccacgtccgtggcacacctgcggctgcctctcctgcctccacgtcgcaggtcaggaggacagaggcacctgtaagccctccgtcccccacacgcgtttcctccacc

SEQ ID NO: 67704 - DNA, 122 bp, Homo sapiens
tgcgcgaccccgggccaggccctattagtgtctgggcttcgggcatctagtctgcaaaaccgactgtgtcgcttttctcgggctgcggctccgctggggaggctgcggcaggggaaggctcg

SEQ ID NO: 67705 - DNA, 122 bp, Homo sapiens
aaactcccttctcctccgccagtgccacacacaacactgagcgtgcagagctcagaaaaccgagctcagggtctctgccagctcctgcttccgtcccagcagtagaagaatggagtagaatc

SEQ ID NO: 67706 - DNA, 122 bp, Homo sapiens
agcgtaagtcagttgcctgttttactttccttccatttcctgcctcgattcctttctcttcgtctattttgcccatccttgctctaacaatgtttctcaattcagaaggcaaacacgtaaca

SEQ ID NO: 67707 - DNA, 122 bp, Homo sapiens
cattgtgtaatcttattattatgctcacttcggaggaatagggaagtccttaccttgtttcgtcttgcaatactagaatttccttgaaagcaaagtgaacctggagtgatagattcactttc

SEQ ID NO: 67708 - DNA, 122 bp, Homo sapiens
ccgagttcctcccggcgggaaccccccgccccagaactttggtctcgtcccacccacccccgcccgcgccatggtctcgccctagggagccatcgataactctacgctcggcctcgatcgac

SEQ ID NO: 67709 - DNA, 122 bp, Homo sapiens
gcaggacagatgcggccgtggctgccgttctgctcttgctgtccctctcccagccacccacgtccccggtgctggtagccccacctgccccgtgtcagctcggcggttctgtccttgagggt

SEQ ID NO: 67710 - DNA, 122 bp, Homo sapiens
aagctctgggaagccgggtcggtgggggccacttcacgcctggctcggtcccatccaaggcgcagcctgaagcacccattgctcggggtggcctgggaggcagcagagcccacaatccagtg

SEQ ID NO: 67711 - DNA, 122 bp, Homo sapiens
aggcccagttagaggctgcagtggggtgcagggcagtcagactggaaccatggagctcagcgtcctcctcttccttgcactcctcacaggcctcttgctactcctggttcagcgtcacccta

SEQ ID NO: 67712 - DNA, 122 bp, Homo sapiens
cccagactgcgcatgtgcgcccccgtgcggaatcgcgcaccccagcggttttccagcgtacgcacaagttccgccctaagggaccgcccctttaagcgcgggcactgcggtggaagcgcgcg

SEQ ID NO: 67713 - DNA, 122 bp, Homo sapiens
cccacaggcggccgccgcggccctccacggcccacacggcccccgcagggcacagccttacgcagcccttgcgttgcactgattccccggccgcgcccactgcatagtggctctcctcgtcg

SEQ ID NO: 67714 - DNA, 122 bp, Homo sapiens
cagtaattgaactttgggaaaacttcagcacacttccttagcatacaatttcttgtgatgcgaatcacaactgttaatttgtattttgcttttgaatcctatatctcagagtgatgaagtct

SEQ ID NO: 67715 - DNA, 122 bp, Homo sapiens
ttggggactgcacggtgggaaacacacttggaagtgttgatacattcagaaaagcacgggcgggaccgtgaagggagaaggaacaagtgtgactggggaacgaggcgacatgtgggtccggg

SEQ ID NO: 67716 - DNA, 122 bp, Homo sapiens
ctgggaagctcagcattgagaactgccgatttggtgccatagagaagtaggcaggcatgccgtgcgttaatgaatcatgtgcgtccatgtgtctttctgcatccagctgaggagcaagttga

SEQ ID NO: 67717 - DNA, 122 bp, Homo sapiens
tcagctacccctaacctctgcctgcggctggtagtacatgccaatctgagcatgtgttcgcgaccacgatgagtgtgccgcacttccggccagatcgccggatttccgctgagtgaccctta

SEQ ID NO: 67718 - DNA, 122 bp, Homo sapiens
cccctcaccaatgatggggtccccagtgagtcatctgctggccggcttctgtgtgtgggtcgtcttgggctgggtagggggctcagtccccaacctgggccctgctgagcaggagcagaacc

SEQ ID NO: 67719 - DNA, 122 bp, Homo sapiens
cccttggtgtcaggggagctgtgtccccgggaccagtatgtcgtgctccttgatttttttcgaccacggtcctggcccaaatctttcaatgaacaagttccttagattaggcaactgattgg

SEQ ID NO: 67720 - DNA, 122 bp, Homo sapiens
cgcgcagacgtctgcgggcgggggcggggcagagcctaggggcgggacctgggcaccgtccgcaccgccgccgtcgcgcggaggacactgggagtcgtagtctcccgaatgggaggagggcg

SEQ ID NO: 67721 - DNA, 122 bp, Homo sapiens
acagctcccggtctacatcgaagtgcttgataaacgatcattgttattccgatagtatcacggcccacacctccccggtgggtgagagcctgggagggtgcctggtacatggtctacgttcg

SEQ ID NO: 67722 - DNA, 122 bp, Homo sapiens
gatcctcattagcccacctaacagacttggaccaccctagaccataagctgtagaatcagcgttcaaagccattctgctcaccactttttagctctatgatttctaggcaaattacttaacc

SEQ ID NO: 67723 - DNA, 122 bp, Homo sapiens
attctgtattattcagtgcataattctagagcacctgagactgggaaagttgccactgggcgtccagcagcagtggtgtactcaggatcagggtaaacccagtctaaggagggtctccactg

SEQ ID NO: 67724 - DNA, 122 bp, Homo sapiens
caggctaggtctaggctaactacaaccgtgcagaggagtccttgtccccattttgagccccgagaaaccactgtggcatgagaggcaggtctcagtagcctggaagcttcctgcggagacaa

SEQ ID NO: 67725 - DNA, 122 bp, Homo sapiens
gggagtgagttggtgttgggacccagttgggccattcagtggatgctcaagtggttaagccgtcttgcgtgggtgtagttggccaaagtttgaatcaaagttcagtgttgacatctggaagt

SEQ ID NO: 67726 - DNA, 122 bp, Homo sapiens
agtcaggccaccaactatggcgaggacctgacccggcaccacgatgagctgtgagcaccgcgcacctgccacagcctcagaggcccgcacaatgaccggaggaggggccgctgtggtctggc

SEQ ID NO: 67727 - DNA, 122 bp, Homo sapiens
caggactatgggcaatggggagccaaggcaggtcttctgttgagggagggcaccctgctccggcagtcagtttgttcaagagaatgggagctgaggctacacacaagcttggctattaagaa

SEQ ID NO: 67728 - DNA, 122 bp, Homo sapiens
aagatcgaaacgaagggctaagcccccctcgcccgggtcctgccggaaagttcagctcggcggcctccaggatcaaaaattttaaaggctgcagcccggtccccagtggatcggccagataa

SEQ ID NO: 67729 - DNA, 122 bp, Homo sapiens
gtaaacgccaggccctgattggccgcctgtccttgggtcttggctggtcctaagagggaacggggagcacagctggggtcacagcctcagccgggactcctgccctccagcccctcagcatc

SEQ ID NO: 67730 - DNA, 122 bp, Homo sapiens
ctggtgtctctgtggaagcaatgccagtcctctaattcatcttcgccaagctagaggacgcgagcacatgtgcaggtctgtgacctaaagcccttgctggccagggtgctattcttaccttt

SEQ ID NO: 67731 - DNA, 122 bp, Homo sapiens
caggatactagtagctggaaagcaaaattcgaaggcctgggtaggggcagtcctggaatgcggcgggggagggggcgtggcctctgccctggagcagaggggcggggcttgtgcggctccga

SEQ ID NO: 67732 - DNA, 122 bp, Homo sapiens
tcattttttaaaatgcatttatttcctagtcatctatgtgggcgatttcttaaatttttacgtacaccaagtccaagaaaagtctgaaaaacttattctggaagaaccaaggtattgccaca

SEQ ID NO: 67733 - DNA, 122 bp, Homo sapiens
cacaggcgtgtgcagggtctgcacatggcactgctggtcaggagccagcgtcctgcatgtcgagggtggtgcctgatgtgggtcccccgccggtgacagtggtccccgcctccagcgtgcgg

SEQ ID NO: 67734 - DNA, 122 bp, Homo sapiens
gtggagcacgccccttcccagcaaggggggcgttcattgcgcagagctccaccaggcaggcgcccagggatggccaccagtccccgagtttccaatggcctctgccttcctcagacacctcc

SEQ ID NO: 67735 - DNA, 122 bp, Homo sapiens
cagtcaaaaggaccggatgccgtggagcagggggcgatgcccgttggggaggctctggcccgtttggggagcccactgtgggggatcttgggcatggcaggctgcatgtcggagccttgccc

SEQ ID NO: 67736 - DNA, 122 bp, Homo sapiens
catcatagtccaatctcccattttatgaacagggaaactgaggctcagtgactagacagacgttgcccagagtcatggtcatggaggaagcttgtgctagaatggtggagaggaaaccagag

SEQ ID NO: 67737 - DNA, 122 bp, Homo sapiens
gcacagagagatgcagtcacttgcccaaggtcacacagggcaaggggttgggccaggattcgaagcaggcaggctgtctcctgggtctgaactctcaactacttcaccctaatcaaacaatc

SEQ ID NO: 67738 - DNA, 122 bp, Homo sapiens
atcaattggcttcctagggtttatcgtgtgagcacaccatatatttacagtaggaatagacgtagacacacgagcatatttcacctccgctaccataatcatcgctatccccaccggcgtca

SEQ ID NO: 67739 - DNA, 122 bp, Homo sapiens
ggatgggagcaatgagttcatgcacttcatccaaatgatgcttactgaacgtctactttgcgccagagtcaggtggacaaatttatttgatttaaagaaggctaggaatgaaagaaacaagg

SEQ ID NO: 67740 - DNA, 122 bp, Homo sapiens
actggcttgcttgtcttttcctggtgatcatgtacagcatttcttccttgtcctgttaaacggtgtcgtcggaattcttccacctccctccttctacgctgccactgggcgctgcacacgcg

SEQ ID NO: 67741 - DNA, 122 bp, Homo sapiens
cagaaagggaactccctgaccccttgcgcttcccaagtgaggcaatgcctcaccctgcttcggctggtgcacggtgcacgcacccactgacctgcgcccactttctggcactccctagtgag

SEQ ID NO: 67742 - DNA, 122 bp, Homo sapiens
aattgaaaactgtaggcttccttgcacagatgttgcagccagcctcaggagtaaagtgcccgctgactgctgccgccacctctgtctcgctccctgtcagtgctgctggcacgtgggacgcg

SEQ ID NO: 67743 - DNA, 122 bp, Homo sapiens
ggagaggcggcccgtcttgcccatccactgaataaccccttcaccccagttttttcgacccgcctttcctgagcttcggtacaaactccgcagctagagctcagctttcacattcccgcctc

SEQ ID NO: 67744 - DNA, 122 bp, Homo sapiens
cagttctcactttagtggttacagtcgtataaaggggcatcaagtgtcctggagacccatcgtttctacctaatactttcatggccatcttaacagactgcaagtgtttcattgaaaacagt

SEQ ID NO: 67745 - DNA, 122 bp, Homo sapiens
ctgttcattgtgcctcgccctattgaactgtgtggtgtaaggcagagtaaggaggaaagtcggtggtttctacagttccgtgctgtatagaaggaagttggctgcttttagccgatctgagc

SEQ ID NO: 67746 - DNA, 122 bp, Homo sapiens
ggcaagatgcttccaaacacaaaatgactcaatgtatacaatataactgcataggccgggcgcggtgcccacaactgtaatcccagcactttgggaggccgaggcaggcagatcacctgagg

SEQ ID NO: 67747 - DNA, 122 bp, Homo sapiens
cgccacaaccactctgaacgatgtagacatcctctccacgcacactctcatcaatttccacgcaggtctcctggttgctgaatttcttagtcaccaccttgcctagctccaggcccaggcgg

SEQ ID NO: 67748 - DNA, 122 bp, Homo sapiens
gcctgtttcctaataaattccgtctcattggtgcgggaggcgcgggagcccgagggtctgcggcgcgggagcggcccctccccggctccggtctccgggcccaaccaggcgcccgggctccg

SEQ ID NO: 67749 - DNA, 122 bp, Homo sapiens
gtggggtttcttcgctctcgtcaccttctgggagaagaaccctggggaagaagccaaatgcggatggacagcaggatacacaattctctagtgctctcagggatgaaaaaataaataagcta

SEQ ID NO: 67750 - DNA, 122 bp, Homo sapiens
tggctgctactcggtcctgtgccagcttgcctcctccatgcctaacctttgaagatgaaccgagacccacctttggagatgaacagagaccctggtcagggaagaacacttgccacttctca

SEQ ID NO: 67751 - DNA, 122 bp, Homo sapiens
gacagagcagcaagaggtgagggaccattttgcaggagccacccctcccctgggagcctgcgggccgggcgtcccctcccgctgggatcggagcgcgcagccggggtgcggggcgcacagca

SEQ ID NO: 67752 - DNA, 122 bp, Homo sapiens
tgagccagtgctgctggccaagacgcgctcgtctgagtccatcccacacctgggcgcagacgccggcctgcatgctgcactgcacgccactgtggtccaggacctgggcctgcacgacggca

SEQ ID NO: 67753 - DNA, 122 bp, Homo sapiens
gagactggccaaacgtacttataggagttctggaaaacagccaaaagtgtacagcaaccacgcaaatgcccaatcaagaaaaagcagaattcaaatagcaggaaatttcctcattttttttt

SEQ ID NO: 67754 - DNA, 122 bp, Homo sapiens
agatccaggcggcggcggaggcggcgggcgcaggagagcggctcccagggctgaagtggccgccaccaccgccgcctgcgcctggagcccggtggccgccggacgcaccgcgcggatcggga

SEQ ID NO: 67755 - DNA, 122 bp, Homo sapiens
ccccgcgggagctcagcgagggggcgggcggccacggagtgaggccggggcggggtcgggcgcggggcggacgtggggaggggttggccggggccagaagcagggtgcagggcaggcgcggg

SEQ ID NO: 67756 - DNA, 122 bp, Homo sapiens
cttcttgcaacttaacatgcccccttcctgccagaggcccctgcaccctagaaagggcaacgcagcgtaggaggtagattgaatgtgaaggtggttttgtagcccagtacgaaaatgcagat

SEQ ID NO: 67757 - DNA, 122 bp, Homo sapiens
tcttctggccctggcctccaattggctgccgggcgtgggaaagcgtgcaccactgcctggcgcccataaagacgcctccaccacctgcgccgccgccgcctcccggccgccctccgccccgc

SEQ ID NO: 67758 - DNA, 122 bp, Homo sapiens
atatccacgcaatcaaatgtacaaatcttagacaagcttcacaaatgctcatgtataggccgggcgccgtggctcacgcctgtaatcccagcactttgggaggccgaggtgggcggatcacg

SEQ ID NO: 67759 - DNA, 122 bp, Homo sapiens
ccagccccacctcgcgagctcgggcattgctcggggctgggctctgggagaaagtcctctcgccttgcccagctcagagggcgtcctgagaagcttcaggtgttgtagagacgcccggtcgg

SEQ ID NO: 67760 - DNA, 122 bp, Homo sapiens
ggcgcgcacgccgagcggctgaccgggggcgaggccgggggcttgacaggggcgtggcctcgcgcggccgagaggctgcagcggcagcagctgtcgcgccagtcgcaacagaagcaggtccg

SEQ ID NO: 67761 - DNA, 122 bp, Homo sapiens
gtctggacttgctcttggaggcaaggggatccccagtggattttcatctgcagagaggttcgatttgcatttcatacaatccaggggtctgtatggaacttggggaaggggtggtggaggaa

SEQ ID NO: 67762 - DNA, 122 bp, Homo sapiens
cacgtttatacctgaattaacttttcacatccagttaagacgcatgggaggccctgtccgcgcatgtcccagcgcagctgggagtgttggttggaagtgggggctgcgatgacctaccaccc

SEQ ID NO: 67763 - DNA, 122 bp, Homo sapiens
cagcttgtgcctaatagaaggttgagaccagcagagactgctgtgagtttctcccggctccgaggctgaacggggactgtgagcgatccccctgctgcagggcgagtggcctgtccagaccc

SEQ ID NO: 67764 - DNA, 122 bp, Homo sapiens
caggcgcatttctgctcattccgcggcgtcggctgcggctgcagtggtggtggcgggtaccgcacggggtatggtccccgggtccgagggcccggcccgcgccgggagcgtggtggccgacg

SEQ ID NO: 67765 - DNA, 122 bp, Homo sapiens
aacccggagaggggaggggagaggatggggaaggagaggggaccgtgcggctcccggaaccgtctgcccagagcggcagcgcctcccggtcactacaacaacggcggcccagtcaaaccccg

SEQ ID NO: 67766 - DNA, 122 bp, Homo sapiens
gtggaagcatcttctccaccaaacagcccaacctgcttcctgtccccaacacactgactccgcacagcaactggggtgtcctgaccagtgagctagagttccaccttactcctgtggaactt

SEQ ID NO: 67767 - DNA, 122 bp, Homo sapiens
gcaggtcattccgcaggtagaatcttaacagctaaaggggtggacgggttcacagctcagcgctcgggacagggcgcagcagccgacacccgacctgaagccgacggccacgcaggtgggca

SEQ ID NO: 67768 - DNA, 122 bp, Homo sapiens
aaacctaataccgtgtggatgacgcagtacctatacccaacgtgcacggaaacctaacaccgtgtggatgacgcagtacctatatccaacgtgcacagaaacctaacaccgtgtggatgacg

SEQ ID NO: 67769 - DNA, 122 bp, Homo sapiens
ggacccggataccactggcaggaagtccatcttcacagctgccaacccatctgtcaaacccgcagtcccctatgagagtacagatgaatggaggaggaagatttaaaagtgaattcgtgggc

SEQ ID NO: 67770 - DNA, 122 bp, Homo sapiens
gtgttcggagtttcttccttctggtgggttcgtggtctcgctggctcaagagtgaagctgcggaccttcgcattgagtgttacagctcttaaggctcctctggagttgttcgtttctcccgg

SEQ ID NO: 67771 - DNA, 122 bp, Homo sapiens
cactcaagcaacacaagctgctagttcccgttaattattgtgcgcgagccatcgatcgcacgccgacacctgacccgtctgtatgaaatgggaatagtttgctccgtgacagttgctataga

SEQ ID NO: 67772 - DNA, 122 bp, Homo sapiens
aaaggtggaccaagcctggtagcacctagcaagtccagcttcatctttgctgtgctgagtcgtgtaggtggtgttcttgtgtctctggtttgctggaggacctagttttagtgtattttagg

SEQ ID NO: 67773 - DNA, 122 bp, Homo sapiens
aagggttagagcaaagatttaaatccagtccggctccagagcgcctgtttttcactattacgctgtattgtctcttattgtaaatcaattatacctggaaatatttactaggtcaacaagat

SEQ ID NO: 67774 - DNA, 122 bp, Homo sapiens
atgaggctctgctcaagaattgaggtgtgacgaaggacttgaaggacaccacgtgggtgccgtctttcttagggaagttcaggcagtggtgaagagcatgggtcttggagatgaagggtctg

SEQ ID NO: 67775 - DNA, 122 bp, Homo sapiens
ggcggctctcagaggcaccgcgagagaagggctaccctggctactgtggggattagcacccgccgcggccgcgaactggcccccatcaccgccgacctgccccggccgccatgttgggagga

SEQ ID NO: 67776 - DNA, 122 bp, Homo sapiens
gccagaacctctatccatgcccagatccccccgcccccacaccgctccgagcctcacacgcgttgtcttaagtacaaagggtgaccggctttgcacaagcagctccaggacgcgtcccgagc

SEQ ID NO: 67777 - DNA, 122 bp, Homo sapiens
agcggcatgttggtttatttatggcgccgggcttcttaatggaatggattatttccttggcgtgattatgatcagaggcctctggcaccgcatttattcggtccacacagcctgactatgaa

SEQ ID NO: 67778 - DNA, 122 bp, Homo sapiens
gaatccaccgcggtgctgtttccagcgagtcagattccagatcgcgctccagcctggactcggaattcctgccccgcgggtctgcattttcacagcggcaggtgtgagtgccgcgcagctgg

SEQ ID NO: 67779 - DNA, 122 bp, Homo sapiens
tgtctgccccctctttaaaatcgatctacacacatccacgcacatgcgaccccgaggaaacgaaacccactctagaaaacgcgaccttggccgcacctaaagcagccagccgtgagtgcaga

SEQ ID NO: 67780 - DNA, 122 bp, Homo sapiens
gagcccagtcgacagctgaccttacccagccctctaaagcagtttgcggtcacaattacccgtctcttcaccccgcccccatcgacatcaaacacgacccaccttctagccctcctcccctt

SEQ ID NO: 67781 - DNA, 122 bp, Homo sapiens
cagtgtccggctcacctcggaggctgacagcaggaccagtgtggtgcgtgctgcccactccggcgaggctatgggctgagcccagttccagccgccaaatgcaagccgttgtttcattttgc

SEQ ID NO: 67782 - DNA, 122 bp, Homo sapiens
cccagctcagctctatccccggggcccgcaggacccaggggacccaccctcccgcgagcacgcacgcgcagggcccacctctgcgagttccaaaccctcggccctcgggtcgcctgccctgg

SEQ ID NO: 67783 - DNA, 122 bp, Homo sapiens
ccccgcccgcagcctccccttccaggccccgggagcattcccaccccgacactcacacaccggcaaacaggaacacacagtcaggctccggcccggagtcctcggcctcccgggaggggcac

SEQ ID NO: 67784 - DNA, 122 bp, Homo sapiens
cactgtccccactgtgcaaattattgaaagtgaggctcaaaaaggagaagtcgctcaccccggccagccagaccccaaagcctgtgaccttcacactgtcttgagaggggtcagggcagctg

SEQ ID NO: 67785 - DNA, 122 bp, Homo sapiens
gggcttggactcccaggttagtaggtagaagtttttttatttttattttttcttagagcacgactgattttactatcatacggccatttaaaaggaatttaatggatttttgagcacattaa

SEQ ID NO: 67786 - DNA, 122 bp, Homo sapiens
cttttagatgcccctcccctccattttaatatggtcctatctccttggtttaattgcaggcgcattgaacagtcctgggcactacatgtaaattaagcccaaagatggggagaaaggaaaag

SEQ ID NO: 67787 - DNA, 122 bp, Homo sapiens
gcagtcctctttcctacaaccttgattagatcatataagttccagaagggcatgccaccacgaattcttcttaatactgatgtagcccctttcatcagtgactttactgcttttcagaatgt

SEQ ID NO: 67788 - DNA, 122 bp, Homo sapiens
gccacagacacacagaacatccgcaaggtcttcaaggacgtgcgggactcggtgctcgcccgctacctggacgagatcaacctgctgtgacccaggccccacctggggcaggcggcaccggc

SEQ ID NO: 67789 - DNA, 122 bp, Homo sapiens
ggcaggtggcttcacacctcagtttgctcatccattcaatgggggttccactaagacaaccgatgtgaaaactcttggagggagaccagagctgggggccggggggcatgatccttcccccc

SEQ ID NO: 67790 - DNA, 122 bp, Homo sapiens
cttgcaatagttaagcgcattttatttcaatagtgttaacaagtgacaacagagagaacacgaacctcccattaggtgaacagttggtttgacccaagttaagatggcggtacccaggtttc

SEQ ID NO: 67791 - DNA, 122 bp, Homo sapiens
aagcagatgtaggtgacaaagtaaggatttcaggaggcttattggagagtaagccgtgaacgtgaaagggtgaggaagcgggattggacaagggaatcctttatgccaaaaagcagatatga

SEQ ID NO: 67792 - DNA, 122 bp, Homo sapiens
gagagcggcctaactcggccacccactctgtgagagaccccttttccagctggactgtgccggaccctggtgtggggcccgccagccatatttctcacctaagttcgaccctctgcctcctc

SEQ ID NO: 67793 - DNA, 122 bp, Homo sapiens
ttctgtttccatccttttactttctattttctgttactaattcatttcattcagtttttacgtctgtgaatatcctctctaatgccttaactaccaaaattttctctctcttttttgttttt

SEQ ID NO: 67794 - DNA, 122 bp, Homo sapiens
tcattctccccaaaagtctggccaaattcctcaaattgtccattttctgccttgagtcctcgtccatcgaaaccgtaagagaattcatcttcacctagaacagtcaacaaattagttaccta

SEQ ID NO: 67795 - DNA, 122 bp, Homo sapiens
ggacgtctctgcagagccgagatttgggctctgaagcccgacggcccttcaacatgtctgcgcaggataagtgagctttcggggagtgaaggggcacatcttgttcctaccgacggtgcttc

SEQ ID NO: 67796 - DNA, 122 bp, Homo sapiens
gccgtgggccctcggggaaaggttccgtgcactcggggactccggtgaagcctgttcagccgtctgtgtcatgtggccatcttgagtctactctgtcgctcttgtgccctagcaccccgaga

SEQ ID NO: 67797 - DNA, 122 bp, Homo sapiens
cacagtcaccgcacaaagtctccatcgcgttggacggtccgtgggaatttctcagggctccggaggccagcggggctggaggcagacctcatcggcacttctgacaacggcaatttttgtgc

SEQ ID NO: 67798 - DNA, 122 bp, Homo sapiens
tccacaggcgaggcttgggctttgctctgtaaaccatctggaaatgaggtcctcccttcccgggtccgattgccccagggcttagcttctgaacacaatcacgaggctctgccaggactttg

SEQ ID NO: 67799 - DNA, 122 bp, Homo sapiens
ctgaatcttctcctaagcccatcagtgaggttccttataaaaattcagttttgggccaggcgaggtggctcacgtctgtaatcccagcactttgggaggtggaggcaggtggatcatgaggt

SEQ ID NO: 67800 - DNA, 122 bp, Homo sapiens
ggggcataagcggcaaagactcggggctggcaggcgcatagggagtggggcggggctggccgggcccagaggaacgcggctcggattcccgggggaaggccaagcggggcggaccccatctc

SEQ ID NO: 67801 - DNA, 122 bp, Homo sapiens
gccggtgacccacacctggctctcctccccggcgtctcctctccgcttctttgtttggagcggaggccccgccccaccccgcccccaggcgcactcgcccggccattccggttcagccggtt

SEQ ID NO: 67802 - DNA, 122 bp, Homo sapiens
cctgttgttcctgggccagtggccatcagcctgttgcccagcccctgatgcgctgaagctcgggcccttcctcgcgccctggtctcctgcactgagctgtggtgagcacatccgggtcctgc

SEQ ID NO: 67803 - DNA, 122 bp, Homo sapiens
tgagtgctcaacgccaggcccatggcagccctgggagcagccgcccaaagcctcctcaggcggcagcgtgtcctgctgagttacttaaacctggaaaccacttgacgtcagctgttcgtaat

SEQ ID NO: 67804 - DNA, 122 bp, Homo sapiens
atggtgactctgcccttgttgaagatgctatgctgtggctgtgatgtttcagatcccagtcgtggtgactctgcccttgttgaagatgctatgctgtggccgtgatgtttcagatcccagtc

SEQ ID NO: 67805 - DNA, 122 bp, Homo sapiens
taactcgtcaactggcttcagactgtcctacgctctgacaactggctccagactgtcctacgctctgacaactggcttcagactgtcctgtgctctaactgacaactggcttcagactgtcc

SEQ ID NO: 67806 - DNA, 122 bp, Homo sapiens
gatgcaccatcccccttaaacatgtagatttctccgggtaaacaaccaatggggagatctcgccaggcaggatttctttccccagggaaatagcctccgtttcgatgtcttgaaagcacaag

SEQ ID NO: 67807 - DNA, 122 bp, Homo sapiens
acaaatatgtggataagctaaaatacttttgcttggatctgcttaaattagatggcttaacgttttaaaacatttctcaggttgagcaaaactgcaagatgaacattactctggtaaagcag

SEQ ID NO: 67808 - DNA, 122 bp, Homo sapiens
tgatggctctccatcctcctcatcctctacagatttgtgaggcttcaccaagagccttcccgtagtcacaccttagagctctgaggtggtggctcaccccaggccagagagaggacggagac

SEQ ID NO: 67809 - DNA, 122 bp, Homo sapiens
gttggggatggcctgtgcttttgtgatgagatggaaaaagctgaatccatagtcatggtccgggtgtgtcaataaccacctctatggtgctgtgttcctgagccaatagagccttgggttcc

SEQ ID NO: 67810 - DNA, 122 bp, Homo sapiens
gcagccgctgcagtccaggagctgtgcacgctgctgttacctaacacctcggaacggctccgtctccgcggcgggctcgcttagggattgcagtaggaagcaaacgctgcatggagaaacac

SEQ ID NO: 67811 - DNA, 122 bp, Homo sapiens
tagggaggggtgagggctggggttatggtaaggagtctgtgggccagctgggattttggtcgacttgggaggtgctcccaatatctgattaaatatttacgcccccagggaagaaatgattc

SEQ ID NO: 67812 - DNA, 122 bp, Homo sapiens
gttgggaaagtgcccagatctgcctgggggacacacgagcctcgctgccagtgccgggcacgcagcctctccagtcctgccgtcagcaaccgcctccggccctcatgtcaaatcacacctga

SEQ ID NO: 67813 - DNA, 122 bp, Homo sapiens
gagccggggcggcggcggcggcagcattgtgctcctggctgcagtgagggtgtgagcctgcgtgtgtgagtgaatgcggattccctccagagcccactccaattcccatattgctccccagg

SEQ ID NO: 67814 - DNA, 122 bp, Homo sapiens
aaccccctttaaaacatttaccttcctcccctgctcctcctcctcccccctccccccacccgcccccaactcacaactcttttgagtccagaatctcagaatcgggcgttgggctttgccgg

SEQ ID NO: 67815 - DNA, 122 bp, Homo sapiens
tttacctcctgtgtcttcctctgctgtcgagacgttcctgtctgcttcccgggagcctcacgtgctccttgtcctaaccagcccccgcgcgccatcttcccgtggagtgtggggaagctgct

SEQ ID NO: 67816 - DNA, 122 bp, Homo sapiens
ccgcacgtcctcagggacaccgggaacaggtaccactgccgagaagggagcgagcgacggcggttctgacgccacaacgaggtaagactcagtgttggccgatcacgtgtggctgttgtcat

SEQ ID NO: 67817 - DNA, 122 bp, Homo sapiens
gccccttcttcgcgtgaattcctgctctttgatgtgcaccaaaacccttcccattcctaacgtttcctcctcgttcgccccggcgttctttgcacctccctcggctcctttcgggctgtctg

SEQ ID NO: 67818 - DNA, 122 bp, Homo sapiens
tcgtgcaggcgccgcgctggaccgacctcgtgcaggcgccgcgctgggccatggggagagcgagagcctggtgtgcccctcagggacttctatttgcttttaggagccaattcattcctttg

SEQ ID NO: 67819 - DNA, 122 bp, Homo sapiens
tgtgaagaggacattttacaagatagactccatcctggaaaagagaaacattttaaatagcgtttgaaaaaagtggcattaaaaacatctatgacaaacttaggggtttatcattgaaaaca

SEQ ID NO: 67820 - DNA, 122 bp, Homo sapiens
ctctttttccctgctttttcttctgcatggcatttgtctccttttctactgttgcctccccgcactggaacagaagcttcgtgagaacagggactttgtcttgtgtgttcgctcctctcttc

SEQ ID NO: 67821 - DNA, 122 bp, Homo sapiens
gcagccccactgaggggaagcctcgggcaggaggtgagaccccgcgcacgcaagcacccccgccccaagcagggccctctgcccgagggagactctcacctcaaataaacgggcgctgccgc

SEQ ID NO: 67822 - DNA, 122 bp, Homo sapiens
cgggaggcgcagggaccggacggctcccgagtcgcccacctgacggtaccgagagggcggcgcccctccgagcagagccgtcccggccactcccctgggatctgacttggctcttgcggtcg

SEQ ID NO: 67823 - DNA, 122 bp, Homo sapiens
acacagccccaaacagcccaaagattcccattgataattatcgacggctttattaaaatgcgttatttttctttcttaccttttcagttgcttttcttagaaacagggaccaaaatcaaaga

SEQ ID NO: 67824 - DNA, 122 bp, Homo sapiens
taggtccctgtaatgtgaacatcttacatggccacagtaaatttgtcacaaccaaggaaccgacactgatacatgactattaactgagctccacactttgttcagatgtcaccagtttttcc

SEQ ID NO: 67825 - DNA, 122 bp, Homo sapiens
caccgtggaattacactgaagcctctcacccaaagacagtgaataaatctcattaccagccggttccttttttatttccttccttcccttggggaaataattcaacgtcattggatttttcc

SEQ ID NO: 67826 - DNA, 122 bp, Homo sapiens
gccgccctcctctctatggttttggagccggcggagagcgcgcaagggttggcgggactgcgagtttccggtctgggctttggcgggtctggtttgaagctctcctgtttgacgaaagtatg

SEQ ID NO: 67827 - DNA, 122 bp, Homo sapiens
cagtcagcccgcaaaacactttcaccaagtcctctaaagtgttgcataaggcaaagataacgttaagtctgtggaggcttccgttatcgggaaaagatgctgtagtgatcttttctgagtgt

SEQ ID NO: 67828 - DNA, 122 bp, Homo sapiens
cattgtcaacctcgccgccttctccaacagctgcctaaaccccctcatctacagctttctcggggagaccttcagggacaagctgaggctgtacattgagcagaaaacaaatttgccggccc

SEQ ID NO: 67829 - DNA, 122 bp, Homo sapiens
acacaggcgcctaacaccgtcgtcctctgtatcccactttcggttaaggggcagaaataccgccctatctgtaaattaggcccatggaagccgagccgcacctcattcctatatgcaaatta

SEQ ID NO: 67830 - DNA, 122 bp, Homo sapiens
tatctgcccttcggtcttgctgaagcccagcccagtattcaatgctccccatccccatctcgctccgtcccctcgggggccaacctcctccggtcacgtgggaagtctcacatgcggcgatt

SEQ ID NO: 67831 - DNA, 122 bp, Homo sapiens
cgcacgttctcacaaaaccatttgaaaacatgagctggagacgccaaattctgggacccacgaaaggctttggagctcgctcgggctcctcgaagttgggcgtgcgtcgcagaacagtgctg

SEQ ID NO: 67832 - DNA, 122 bp, Homo sapiens
atttattcaggacacacgtgtgctccgagtgccagatacatggtggaccccgacaaggcacgcaggtctcagacaacaggtgacgctgtgtccccggcctgtgcagcggggacacccacctc

SEQ ID NO: 67833 - DNA, 122 bp, Homo sapiens
tgactcagtgcagctttcaagagaggcagaaagaatacccacagagaaggcacatgtgggcggtggcagtgtaggaccaggaaagaagctaggtctctatattccctcgcattttgaatctg

SEQ ID NO: 67834 - DNA, 122 bp, Homo sapiens
ggccgcactgacatttgaggcccggcccgcagccgctgcaagaaggccccgcgcctcggccggcccggccccactggctctgagcaaatcaatcctctcacctgcgaggtgtaaataattcg

SEQ ID NO: 67835 - DNA, 122 bp, Homo sapiens
ccgggacagccttcgccctctgttttctgtgatggcatttgcttccaacttttgttggtacgtagaactaaaccggtttgtgtttatacacttgggtgaagcgggttactttttgtattttc

SEQ ID NO: 67836 - DNA, 122 bp, Homo sapiens
ttcgggacggcagcggccataacggactcggctgggagcctgcgctgttgctaggctctacgccatgaggtcagacgccgcggccctcggcacatacgtcccagcgtggtgacgtcgaagcc

SEQ ID NO: 67837 - DNA, 122 bp, Homo sapiens
tggattcccagccccaggaccgcaaggcctccgtggcgcttgccaggcccccatctgcagcgctttgttatgcagccgaatcacagatacccagggcagggcggcagtgcagggggtgacct

SEQ ID NO: 67838 - DNA, 122 bp, Homo sapiens
cacagcagccgaattcaagtcattctgcctgctgtgtgtaaagccagacagcacaggaagcgccccaccacagagagctctgagggcagaaggcctgttttatcactctgagtccttggctc

SEQ ID NO: 67839 - DNA, 122 bp, Homo sapiens
ggcttagttcgctgccctggaaggtgaggagccgtgggccagctgtagctgggccttctccgttctccagtccctcgatggccatcagctccggacccttggccagccggcgcccgccttcg

SEQ ID NO: 67840 - DNA, 122 bp, Homo sapiens
aggtgtgcgcagccctcccgccccgggagtccggggatgtgggtggcgagggctgctgggcgttggagcaccaggaagcgccttcccctgtcattccccttcctgtgttctctggctgccgt

SEQ ID NO: 67841 - DNA, 122 bp, Homo sapiens
ggccgtacgcctaaccgctaacattactgcaggccacctactcatgcacctaattggaagcgccacactagcaatatcaactattaaccttccctctacacttatcatcttcacaattctaa

SEQ ID NO: 67842 - DNA, 122 bp, Homo sapiens
tttcaagaacgggcagggggccggggtggttctggagggaccaagaacttgtataaccaacgaacaactacataatactgaacctgaaacaaagattcatgattggtaccatgggtgcactc

SEQ ID NO: 67843 - DNA, 122 bp, Homo sapiens
tggcccccggtggccggcggtgggagcctggttcatccgccaggtcctgagcgacctccccggcagccctggcgccccagccgctcctaggggccactctctcgacccctcttagcctccgc

SEQ ID NO: 67844 - DNA, 122 bp, Homo sapiens
cgtcccccccggagccgggaggcggctgggaagtgctcgtgggggccgccgggacccctgcgttccgcttaggtcggctgctggatagggaggggccccagactctcccaggatctgagtgg

SEQ ID NO: 67845 - DNA, 122 bp, Homo sapiens
agcatcggatgcggagacactgtaggtggagcacatcagagctcaggagatccttgaattcgggaacagattttccatccagccccttctggggaggtccctctgggagaatctggagcttg

SEQ ID NO: 67846 - DNA, 122 bp, Homo sapiens
caaggatggcggaggcctatccggaaagtctacagtcatagtccaggtggttgatgtcaacgacaacccaccggaactgaccttgtcttcagtaaacagccctattcctgagaactcgggag

SEQ ID NO: 67847 - DNA, 122 bp, Homo sapiens
gcccggaggaggggcgcgcggtgacacgaggcgccccaaactcaggccgcctcagaggatcgccagggccagcggccagaccaggatccgacctcacacactaaacgtttcaccactttacc

SEQ ID NO: 67848 - DNA, 122 bp, Homo sapiens
tcaggcttatggggcatcctgtgccaccccctgctggggctgaggacacttgtgctggcccgccccggccctcctgcaggctgggcctggacgcagggtctccccacgagctccctctgtgt

SEQ ID NO: 67849 - DNA, 122 bp, Homo sapiens
tagagctgaggaagcctcccccaagtgaggcttctgcttcaatctagccagccactttcacgtgctagcagcccatggtgaagcccaccagccttgcccacagggcttctacttatatctgt

SEQ ID NO: 67850 - DNA, 122 bp, Homo sapiens
ccagaagcggccgggcgcggtggcttctgcctgtaatcctagcactctgggaggcagaggcgggtggatcacctgagatcgggagtttgagaccagcctgaccaacaaggagaaaccccatc

SEQ ID NO: 67851 - DNA, 122 bp, Homo sapiens
gggacataaaccaagaatggggctgagcgctcatcacccggagggacttgtgcttctttccgcggtagagggggggctacttcctcctgccgcggccgcaatcgagaggcaataggcggcga

SEQ ID NO: 67852 - DNA, 122 bp, Homo sapiens
cggggccaccgcccctgggcagccagtccgtcgggcctcggacaagcagccaatgggaggcgtcaacgtcatcgcggggcgccgcggcgccgggcggggagcggcggacggtctaggcgggg

SEQ ID NO: 67853 - DNA, 122 bp, Homo sapiens
tttcaccatgttggccaagctggtctcgaactcctggcctcagcgatccgcccgcctcggcgggattacaggcatgaaccagtgcccagtcaagaacaaaggatttagaatattacataaac

SEQ ID NO: 67854 - DNA, 122 bp, Homo sapiens
ctcttcagattaaagggactctttcattccacaaagcattaaaagataattgtgacgaagcgtgctatgtgctctcatgaaaaggtctgcttcgcttttaatactcaccagtgccctggaca

SEQ ID NO: 67855 - DNA, 122 bp, Homo sapiens
agtttacagcctcacctgggggtggaggctgttctgaggggcccccaagaggtaagttcacgcatcactactgaccctctccctgtgaaagcagaaagtcagcacgcatcctaccccagacc

SEQ ID NO: 67856 - DNA, 122 bp, Homo sapiens
acctccaactggagttttagcctcaacaggccctgaaatgcagttttcttcagattggtccgtgatgcctatgacccaaggacctgagtcttccaagagctcagcccaataaaagcactttt

SEQ ID NO: 67857 - DNA, 122 bp, Homo sapiens
ggtgatccgcccacctcggcctcccaaagtgctgggattacaggcgtgagccaccacacccggccaggtctttgttttcttgagtatattataatgttgctttagagtgcctggtaatccca

SEQ ID NO: 67858 - DNA, 122 bp, Homo sapiens
cttggaaggccgggcctgctccgtcagaggggccgctcagctggccgggcctccctccgtcggcatacatcagccatggtatttaacaagtctattcaggaaaccaggccccaaacagcctt

SEQ ID NO: 67859 - DNA, 122 bp, Homo sapiens
ccgatttccgggcacagctagaaagaccgggacgcgattcaactcccaatccggtgaatccgcctagcgccttcgggtcctgccgcccccggccagtcccgacccgcacacatatgcaggca

SEQ ID NO: 67860 - DNA, 122 bp, Homo sapiens
tttacttgtgaatgatctgtgggggcagcccttcccaaatgcctgaggtttttacctttccgtgtggatatggctgatgcctaatgctagtaacagctattcttttggaagagggtgttgca

SEQ ID NO: 67861 - DNA, 122 bp, Homo sapiens
cacagctgtggtataactctgagaatgttttctctacatgtagacaattctggatccttccgtggtgcccgttaccctggtctttaacttttgtcctttgcaggggaggggtcaatgccttc

SEQ ID NO: 67862 - DNA, 122 bp, Homo sapiens
taacactcaccttgaaggtctgtagcttcactcctgaagccagcgagcccacgaacccaccgggagggatgaacaactccggacgcgccacctttatgaactgtaacactcaccgcgaaggt

SEQ ID NO: 67863 - DNA, 122 bp, Homo sapiens
gggggcctctgaaggtgcccgggcagggcgccggcggctccaggctgacaatggagggggcgcggagcagccgggcggaggttagggacccgagtccgggggcgggccgcgccggggaaggt

SEQ ID NO: 67864 - DNA, 122 bp, Homo sapiens
agccctgggctccaggcctgcgtacattctagaaccctgtgaggcatctcttctggagtacgctccaggttagagcagggaaaggcatgggagcctcagagacctctcacggcagcccttct

SEQ ID NO: 67865 - DNA, 122 bp, Homo sapiens
ggctgcaggcattctttggccccttccattgttgaggaagacccaggcccaggtcagtgtcgcacagttggccatgcttccctccggagccaggaggctgggtgaaaggggtggagcatctt

SEQ ID NO: 67866 - DNA, 122 bp, Homo sapiens
ctgtggccaacctggcaaaagacctgggtcttggggtgggggaactggccactcggggcgcgcgaatgcattacaaaggaaacaaagagctcttgcagcttgatataaagaccggcaatttg

SEQ ID NO: 67867 - DNA, 122 bp, Homo sapiens
cccagctaattttgtatttttagtcgagacggggtttctccatgttggttaggctcgtctcgaactccaaacctcaggtgatccacccacctcggcctcccaaagtgttgggattacaggtg

SEQ ID NO: 67868 - DNA, 122 bp, Homo sapiens
gcaggaaggagggcggcggaggctccgctctcggggagtttgtgggggaaccgcgagcggcgtagcggatcccggagcccggcccccgccgcccgcccgtccggctgcctgccccgcccgtc

SEQ ID NO: 67869 - DNA, 122 bp, Homo sapiens
cccaagagaatcggttcttaagaacatgattagaaatcccacgcctaggccgacgcagcacggggactctgaggactctgagatcgagtctccagtttgtcagctgcgtttgggggtctgga

SEQ ID NO: 67870 - DNA, 122 bp, Homo sapiens
ttgattcaatttagcacaaatttttgccggatttggtgacgtatggctccctgttggaaccgcattgaatgtgactccaaagagagaggctttattaggccaagccgcgctgagcaggtggg

SEQ ID NO: 67871 - DNA, 122 bp, Homo sapiens
gcgaccagcatgacagatggtctgccacgtctctgcggagccgcctcccgcatgcagccacgcttggtgcccatacagataggcggccccaggtgcctccttccacgcctgtctcagcccag

SEQ ID NO: 67872 - DNA, 122 bp, Homo sapiens
cgaaaaagaacttctccgtcagtcacctgctagacctggaggaagccggggacatggtggcggcacaggcggatgagaacgtgggcgaggctggccggagcctgctggagtcgccgggactc

SEQ ID NO: 67873 - DNA, 122 bp, Homo sapiens
tccatgcaccacatgtccagattatccatagatatccatgcactgcatgcccaagttactcgtagatatccatgcactgcatgtccaggttaccggtagatatccatgcaccacatattcag

SEQ ID NO: 67874 - DNA, 122 bp, Homo sapiens
gcagcaaccgagaagggcactcagccccgcaggtcccggtgggaatgcgcggccggcgcccgcaccccatttataggaagcccaggctgcaagagcgccaggattgcaaaaggtccaaaggg

SEQ ID NO: 67875 - DNA, 122 bp, Homo sapiens
ggggtcacaaggtgcatggtggggagatcataaaactcattgtccagaagaagaatgtcacgaggtcaattgattagttggggcagggcaggagcaagtcataatggtagaatgccataagg

SEQ ID NO: 67876 - DNA, 122 bp, Homo sapiens
cagcccataccttctgcgtggcaaggccaggatgccgtgctgtgcccgctcctccccctccgccacccaaacaagaagcccaggcagattctggccctggagtacaggcctgcgctgtcctg

SEQ ID NO: 67877 - DNA, 122 bp, Homo sapiens
cggcctcggcggcggtgcgggaggtggcggagaccacgcggacaagctcagcttgtacagcgagacagacagcggctacgggtcctacaccccgagcctcaagtcccccaacggggttcgcg

SEQ ID NO: 67878 - DNA, 122 bp, Homo sapiens
tctccaaaggataactctttaaggcctagctggcgtcaactctaaaacctctgccagccacgcctactcaccaaactttccttggattcacctggaatctcaccgcctgcaccagttgtgtg

SEQ ID NO: 67879 - DNA, 122 bp, Homo sapiens
ttaagagctgtaacactcactgtgaaggtccgcagcttcactcctgagccagcgagaccacgaacccaccagaaggaagaaaatcggaacacatccaaacatcaaaggaacaaactccggac

SEQ ID NO: 67880 - DNA, 122 bp, Homo sapiens
gcgtcagcgagctgctcagcagagaaaggcgagaccaccagggctttaggcctagagaagcggaggctgtcctagggatctcagagacaccatcactttcacttccagcagcctctgggaag

SEQ ID NO: 67881 - DNA, 122 bp, Homo sapiens
tcttctccgctttcgcttctccactctagccgggggtggggtgggtggggttggggtctccgcgggggtttccggccccgcggcccgctcccgggtgtgcctggaggagttctccctctgtg

SEQ ID NO: 67882 - DNA, 122 bp, Homo sapiens
cattcgtttagctgcttcagaccccaagctaaataaagagctggtggttagagtcccagccggctcagctcaacctcacaccccaccccacccctctcatcccttgaccaccctcaccaccc

SEQ ID NO: 67883 - DNA, 122 bp, Homo sapiens
tccctagctccacgccgaggcggaccgggcaggggtcagaaaccctgtgtctgttttctgcggggtgacgacctcctgtaagggtgggattgcttttgcttgctttccttctcccctccctc

SEQ ID NO: 67884 - DNA, 122 bp, Homo sapiens
ccccgtgatcgtgcccctaccggtgcccatccccatccccatccctatccctcacgtcagcgactccaagccccccaacgggttctccagcaacggggagaacttcattccgaacgcccctg

SEQ ID NO: 67885 - DNA, 122 bp, Homo sapiens
caggaagttatcctctgcccggggccgagctctgacctgcctgctggctctcagctctgccgtctggagtatccaggacaccttggaagcagttgtgactgtagcttccaggccaagtcagg

SEQ ID NO: 67886 - DNA, 122 bp, Homo sapiens
ggtggcttgtagctagatttctgcatcacagagcctctggatccattcattcattctccgcgggtttcttaagtactgcagtgccaggctttggggacacagctgtttttgtttttgttttg

SEQ ID NO: 67887 - DNA, 122 bp, Homo sapiens
aagaccttttgttccttcatcaaaggggatgtctgggacagggttgactcagggcctccccgcacatcccccagggcagcagcgccaaagcagcccctcccccgggcccagtgcccctgaac

SEQ ID NO: 67888 - DNA, 122 bp, Homo sapiens
ggcttaggggtctacgggcgatctcccttctggcgatgctccaggccttcacccggctcccgagcttccacaacatcaggcccgctcaggacgggtgtgctcatcccttcactttttaactt

SEQ ID NO: 67889 - DNA, 122 bp, Homo sapiens
agcctgggcgatagacagagactctgtatcaaaattataataataataataataataatccgagcctgaccagtcgccccacagcgtcaaggtgaaaccaggtgaccgcgactacagcgttt

SEQ ID NO: 67890 - DNA, 122 bp, Homo sapiens
actcagaaaattcctgaaaggagagccagactgatctaggaaactacacacagagatacccgcaggactgggaagaaagagaggtctcacataagaccttgcacccccagccttctagcttc

SEQ ID NO: 67891 - DNA, 122 bp, Homo sapiens
acggctctctgggaaatgtagacccgctacacgggacggtacccgcctaagaccatactgcgcaggtgctgatctgagtctgggtccctcctgggtcgaggagttctttggcccagatctgc

SEQ ID NO: 67892 - DNA, 122 bp, Homo sapiens
ctgacacttctccctacccctaaaatcgggacaccgcgcggaatggacgcggccactaagcggagcggcaacaaggaacaatcgcgcccctcctcgccgtagctgcgaacagggctgaccgc

SEQ ID NO: 67893 - DNA, 122 bp, Homo sapiens
acatattgacttgcgaggcatagtaagattgttgggtaatgctgaatggccttttggactcgtggttttaaatatgagactagtccagcctatgctttaaaagaacattggtaggacaaaaa

SEQ ID NO: 67894 - DNA, 122 bp, Homo sapiens
gacggggggcacgggggacactagcaggcagtcccctcgactggcgacccccgcttctcccggccctccagcacgccacgccgctcccgctccatcgccccggcccgctccgacctcaccgt

SEQ ID NO: 67895 - DNA, 122 bp, Homo sapiens
ttttctcatgagagactctcaagacttgactgacaaaattgaaatgttcttctaaacacccgggaacattttcagggctgccagcatccggccttcccgagtcccacaggtttccttaaaat

SEQ ID NO: 67896 - DNA, 122 bp, Homo sapiens
ggggaaaaggcgatcaaaccctcccgctcctggagcaagtgaaaatgggttttcccttcccgccagctccgctggcagcaggtggtctggttctctcccctgcaggtgcctcccgccaccca

SEQ ID NO: 67897 - DNA, 122 bp, Homo sapiens
tgcctggttgcttcagcagcaaactgagtgaggcaagaaatctctctgttccttagtgtacgagtctgtcctcatactgctgtaaagaaacacctggggctggagaatttataaagaaaaga

SEQ ID NO: 67898 - DNA, 122 bp, Homo sapiens
agtcctgagaggctgaaggggcaggtattgttcccgccgccccttgggcaaggggcctcccggagcaaaggctagggggcccgggctcccagttctggggtcgtcctggtgacagggtgacc

SEQ ID NO: 67899 - DNA, 122 bp, Homo sapiens
taggcctggaagccttgattgctgagcctcacagcctctgtcaggcggctgcggatccagcggtccaccaggctctcatggcctccgggcttggggagagagggtgtatcagccggcgggcc

SEQ ID NO: 67900 - DNA, 122 bp, Homo sapiens
ggcgaggccaaaggactgaacccgcaggagcgtcacgggcgccggggcggctgccgacggcgggactgggtcagtgagaagcccgtgggcccccgccctgcctgctactcccatccccacct

SEQ ID NO: 67901 - DNA, 122 bp, Homo sapiens
cggggagaaagagcagggggacgtcgggcctgcgcctggcaccgccgctacctggattcgcgggcccctcacacactcacctgccggtaaggatagctggccatggtgattctgacgtcaca

SEQ ID NO: 67902 - DNA, 122 bp, Homo sapiens
atggggatgtgctgctaataactaacactaattgaccacctgccgtgtgcccatcctcttcgaacatgcaacttccttgttccttatcttgttactgtctctttctctctgccagaatccaa

SEQ ID NO: 67903 - DNA, 122 bp, Homo sapiens
cccaggactgaagtttgttaagtgagtgtaatacaaagacaggtcgagcaacaaggcaagcgttttctaactgcagatcatagcttttgtatgccttctgcctggaatgttttctcctagct

SEQ ID NO: 67904 - DNA, 122 bp, Homo sapiens
caggttgcaggccccgctcttggcgatgaagcgggctttggggaggcggtctcggatgcgcggcttgcgcaggttctctgcggcgatgcgcgccagcacatactcctccgggatgatactct

SEQ ID NO: 67905 - DNA, 122 bp, Homo sapiens
aattaattctggaccttcattataaaactgaaatatctttctttagcttttccaattctccgatgtcagtctgtgacaaatcccagaccatccccactgtgcacaatgaacacagaatcatc

SEQ ID NO: 67906 - DNA, 122 bp, Homo sapiens
cacgtgccaggccttgttcattatgtttgcacattcattcattcattcattatttcaccccgcactgggcactccctatgccagggtacaggacagctacagagaaaaccaaagcagtcaca

SEQ ID NO: 67907 - DNA, 122 bp, Homo sapiens
agtggtggtttctcccttcccttaagaaacctggttatttccaaggctcaacccctgcaacgccccaccaagccagtcacccaccactgcacattgagaatctgctgctctgtgaatgaaat

SEQ ID NO: 67908 - DNA, 122 bp, Homo sapiens
agtctgcaccggttagcttcaggcccatcatctcttacttgattggctgatgaaatgcaacgtcattgctcctgtatatctcaggcatttgacggcttaaggctttgttttattttttaaaa

SEQ ID NO: 67909 - DNA, 122 bp, Homo sapiens
aagtcaccgaatggccaggcctggagcccttcagcaagcccagcgcgcccggcgctctcccgaggacgcccgcgccagtccccaccagcttctgtctgtcccccagggtcccaggggagcgg

SEQ ID NO: 67910 - DNA, 122 bp, Homo sapiens
ggcggggccctgggacaggacggaatccctattggtcagaagaggacctgggggcggggccgcgcgtgccgttgcagaggcagcgggacgcggccacctcgaagccacgtcagggcagcccc

SEQ ID NO: 67911 - DNA, 122 bp, Homo sapiens
gcccagagcgggcccgccccgctgcggctcccacgcggggctgggcctcggagtttgccccgtaaagcgaattgcactttgatgttcagaaacccactttgttctcagccacgcaaaactcc

SEQ ID NO: 67912 - DNA, 122 bp, Homo sapiens
gtcgcccctcattggctagaaactactgctcgtctcggtcgttgttagcagcgaccagggcgggtacaatcttggtcgctaggacacggctaacttccgctttcttccccctctcctaggct

SEQ ID NO: 67913 - DNA, 122 bp, Homo sapiens
ctataaaattttgtctaaactactcagggaacacataatgcactgccttgatttgagggtcgcatatcttacatcatgtagaatagtttctcctttcctcctcctgctgcacccttcctcag

SEQ ID NO: 67914 - DNA, 122 bp, Homo sapiens
tcctaggaaggtgagctcacctgtagggccctcagcatcttcatccatcagagcccagagcgggctcagaggaaggggcggggggagaagctggctctgggccgtggtcccaaaagcctcac

SEQ ID NO: 67915 - DNA, 122 bp, Homo sapiens
agggagacttccagatatggtacacagatgtcacattgctagaacgtctctagacggcaacgaaacattaaagcctaacctgaggtaatccctcaccggcagtgaagctcctctgctaggca

SEQ ID NO: 67916 - DNA, 122 bp, Homo sapiens
cacaagctccatgagtgcaaggtctctaggtttttccccttttgtgtctgcagcaatcaacggggcaggctgatttctggccctgggctccttttagctctgagattctacaaggtacctag

SEQ ID NO: 67917 - DNA, 122 bp, Homo sapiens
gtcttcgggctgcgtgggcctgggaggcgccgggaagagcagtcgcgacggggctagggacgacacactgcattcactggaagggacaacgcagcgccagtacatagcctgaaacgctcccc

SEQ ID NO: 67918 - DNA, 122 bp, Homo sapiens
gcaagaagaaaaagagcccgaagcctcggcgtcttgatgacgccggacagccagtcatggcgactgccaggtctcgggttcccgctcaactacagccggctcacagctccatcagccaatcc

SEQ ID NO: 67919 - DNA, 122 bp, Homo sapiens
gggtccgggccgtctggagggaggaggggtcgggaccgcgagtgtcagggtcacctgggacgccgctaggactcccggagactgggtccccagcccgcttctccccaaggaccccctgtccc

SEQ ID NO: 67920 - DNA, 122 bp, Homo sapiens
catctaagttaaaaaaaaaacccaccgcaaacataacatgcttagcacccttaagtgttccggagacaaggagaattagcaggaaaggggcacttgggactgttctgagatgatggaaatgt

SEQ ID NO: 67921 - DNA, 122 bp, Homo sapiens
atgtgaaggcccaggtcgaggtgtacactgggggcggggaagtggaggtgaccacacgagcgccccatcactgagcgccgccgcgaaatctgcgctctttgggtcacttggagcgcggccag

SEQ ID NO: 67922 - DNA, 122 bp, Homo sapiens
ctgctgacacagagcccgacccgcggccgggcggttccgccccagtcccacactgccccgcgcggcgtcccggccctcttggcccgcctggtcccaccccggagctcagagcaacttccggt

SEQ ID NO: 67923 - DNA, 122 bp, Homo sapiens
ccccacgctatcagggcccacccccagtctccttgtagagcagggactggcgcctggagccgtctccgggtctcattctgaccagaccaggctcctgttaccctgcctcctgggtcagaggt

SEQ ID NO: 67924 - DNA, 122 bp, Homo sapiens
ctggctgcgaccctcggatcccaagcatatctggcgatggagcggcggcagcccgaggcacgtgttgtgtgtgctccgattgcaaaagaaaaaaaaatgcatttcaaactattaactttttt

SEQ ID NO: 67925 - DNA, 122 bp, Homo sapiens
ctcgcacccctcagcccacacttggggtctcctggtgcagagatgtgctgaggccctgtccgtctggatggtgctcatggtgggcagggggcccctgctctctaggctgtcgtggacgtggt

SEQ ID NO: 67926 - DNA, 122 bp, Homo sapiens
tgcagacatttgaggggcacgatgcttctgtgctgaaggtggcctttgtgagccgtggcacgcagctgctgtccaggtgagtgggctggggtggggcagcgatggagtggggggtggcgggg

SEQ ID NO: 67927 - DNA, 122 bp, Homo sapiens
gcaggcgggcgccaggcccgctgtgggtgggcaccagttctcagcaccgctcactgctgccgggcacactgggaccagcaggctcctcagccaaccctgtccctcggcccggccctgccaga

SEQ ID NO: 67928 - DNA, 122 bp, Homo sapiens
cccccacccgcaccccggcttggctttcccccgtgggcgcttttcggcgcatgctcagagcgccgggagggctgttctgcccctacagaggcctcctagtcctggctgagcgggaacctcaa

SEQ ID NO: 67929 - DNA, 122 bp, Homo sapiens
gtccgtccgggaaacggaggaaaaaaagagttgcgggaggctgtcggctaataacggtaacgataattattgttattaccatgctaacaggttataaacattgactgaactaagcaccctgc

SEQ ID NO: 67930 - DNA, 122 bp, Homo sapiens
gcaaccccagaaatgggcgacttcaaggaggcgggagataacatcccctccagggggcgacgtccaagagcatattgtgtggctgcgtgcactgagtagagctcaacgcccgggacctaaaa

SEQ ID NO: 67931 - DNA, 122 bp, Homo sapiens
tttagtctcttttaaaaatgaattgtatctgaaaatactaacgtatggttcattgaaaagcgtgataaaaattcctgctagtgttgttacctggagcatttaaattagccttctcaggtgaa

SEQ ID NO: 67932 - DNA, 122 bp, Homo sapiens
ctggctttggtctgcttattgatgttagctggagtcacatgagtgcagcagctgggagtccgcctctggaaagaagacaggcaggagccaagtgagggcaatcctgaactagctttttctgg

SEQ ID NO: 67933 - DNA, 122 bp, Homo sapiens
gtaattaattgaaattccataaaagctagttttcgttttctgagttttcagtcgttcattcgcatagacactccctccaaagcctaaaattaaggtctggccagcaacaaaagaatttagag

SEQ ID NO: 67934 - DNA, 122 bp, Homo sapiens
ggagaggtccactgctgagaggcccaccctgctttctgggggcttggccaagttatagagcggaggccagggagagacgagatacatgtgcaaagctccaagaaagacaagcagatgaaacg

SEQ ID NO: 67935 - DNA, 122 bp, Homo sapiens
ggagccctgggccttcccccatttcttcatatgcagaataatccagattagtttaccaagcgcgctgataaccactttaaaaacagagtccctcctgcctccccgtggcatggggtagaacc

SEQ ID NO: 67936 - DNA, 122 bp, Homo sapiens
ggcggaggtcgtgcggtgaggcaagaacatgccattgcattccagcctgggtagtaagagcgaaactccttctcaaaaacaaaaacaaaaaaaaacccaaaaaaagacaggagggtcataag

SEQ ID NO: 67937 - DNA, 122 bp, Homo sapiens
cgtaacatgaaggccatccagctccatcctcccactgctgcttgaacaatatgcttaacacgtagtgccgcagtcgctgcttgggtaagtcctttgacagggcactccctccttcccttttc

SEQ ID NO: 67938 - DNA, 122 bp, Homo sapiens
acagagaaggactagatttgcggatgcctaccttagctgcaggcttaggcccacacctgacgcgtaagctgcctaaacggcagctaacgtagatccacccagacgccggaaacgggggaagc

SEQ ID NO: 67939 - DNA, 122 bp, Homo sapiens
ctctggccccagctaaaagagccaaggaaggctttgcctttgattctctcctttttgaaacgttaatgaaattttttttgaataggcagaacattcacaatattcaaaatccaaaaggcaca

SEQ ID NO: 67940 - DNA, 122 bp, Homo sapiens
taaatggagtggggtctgggcctcccagagagacgagtgcttaaatcccgagagtccccacgggatggtggggaggaaggctgtggggagagtgtaccctgccatggggggcaggtgctcca

SEQ ID NO: 67941 - DNA, 122 bp, Homo sapiens
aacaacacaagggcctcccctgaaacacctggccctcggctgccaggtgggggctacttacgtgtgtgtggcgtgaaggagggggggcgtgtggccccctgggatgcggcaggcggtggggg

SEQ ID NO: 67942 - DNA, 122 bp, Homo sapiens
acattcccaccagcagcgtgagggttcccttgtctccacatccgcgccgggacttgtttccgcagccattttaactggggtcagaggatgtctcacttgtttctatgtgcatttctctgagg

SEQ ID NO: 67943 - DNA, 122 bp, Homo sapiens
ctgggcacgccgcggggagcacccgcccgcgcagccttcccccaacctgggcccgggccccgaccccgtcccctgccccgacccgggcgcccccacctgcgaccgccttctccgccgcccgc

SEQ ID NO: 67944 - DNA, 122 bp, Homo sapiens
tgactgtagaccttgccgcattcattgcatttgtaaggtttctctccactatgaattctccgatgcactgtaagacgtgaacattgactgaagaccttgccacattctttgcatttgtaagg

SEQ ID NO: 67945 - DNA, 122 bp, Homo sapiens
ggggagtgagcagctgcccccggtgtggccatgagtcccgcagggaggaaccctggctcacgtgctgggagcacagcgtcgtgtcgaaaacagtttgcacagttacgcttttcagtcaccag

SEQ ID NO: 67946 - DNA, 122 bp, Homo sapiens
ttgttctgcacaggtgacccggcctgtacgggcgccaagtcccagatcccgcaatcagagcggccagagagcagagaagagacctagaggatctgcaagctgacctatccacccgagactct

SEQ ID NO: 67947 - DNA, 122 bp, Homo sapiens
gaagcagcaagactactagcaagggctctgcatttgtactcttgcccctggctaggcagtcgccaggggtgggcctgcttctcactgacccgtgggtcaggctgtaaataagagcgaccctc

SEQ ID NO: 67948 - DNA, 122 bp, Homo sapiens
ccagcgatcgcgcaggcagaagtgccacaccagggcggcacagcttagcagggccagggccgtgcccaccccgacggccgcgtggaccagagtgcgggggttgggcggcaccgcaaggcggc

SEQ ID NO: 67949 - DNA, 122 bp, Homo sapiens
gagagatagagatccccgaggtgtggggcagagcccacgcatctgaattccaagaacaggcgctttctgacagagaataccaggaaatgacttcacatttttccagactatcaacatacttc

SEQ ID NO: 67950 - DNA, 122 bp, Homo sapiens
ctcggcccgcagccggatcaactcctgctccgcggccaggcgctgctgcgcggtgccttccgccagctgccgctgcttctccagctcttgttcagccagctcccgctgccggacggcctgct

SEQ ID NO: 67951 - DNA, 122 bp, Homo sapiens
gtgataactacggatttttttttaacagcaaaaaaaaaaaaacaagtcggggatcccagacgctgaaacaggaggcccttggcacgggcctggctctgcccagaagtaatcacttccactca

SEQ ID NO: 67952 - DNA, 122 bp, Homo sapiens
gaccccggccccagccgcagccgccaacaaccctacaataaacaagaggacaggattgagcgtccgcgtcccggagcgcactggctgggggcaactcctcacccccggcgcgccgcccgctg

SEQ ID NO: 67953 - DNA, 122 bp, Homo sapiens
gagaggccctgcttgctgcctcctccagtgcagagggcacaggtggacaagctccaggggcgggcacccccatgcctttctgcagcctcaggccctgcccaagtccccttgggctggcaagg

SEQ ID NO: 67954 - DNA, 122 bp, Homo sapiens
agcccacttggattaagctcatcaaccaatgggaatgtcagtgattggatggttgtatgtcggcgtgaaacaatggttatctgttaaactgaattttatatccgtgtggtgttcagtttttt

SEQ ID NO: 67955 - DNA, 122 bp, Homo sapiens
cagacgcgctcaggccgccccctgagggcgcccgttctcaggtgagctcccggactagcgcgcatgcgcacaggtgagtgcccgccccgcccccgggcttggccacctgcccaagaaacttg

SEQ ID NO: 67956 - DNA, 122 bp, Homo sapiens
tcggggtgggggcgcggggatgggtggtcgcgatgccgggagggcaggcagggccctggccgtgcttatgaagttggagctgtactctcagctactcgaagctggtccctgctttaggctgc

SEQ ID NO: 67957 - DNA, 122 bp, Homo sapiens
gtgttttatctggtaaccctcattcttacacacacacacacacacacacacacacaaaggcgggatagttgtcattcccactgtaaacataaggaaactgggcagaggccaagcaaccttgt

SEQ ID NO: 67958 - DNA, 122 bp, Homo sapiens
ctcacttgaagcccgtctcgtagtccgtcccgtccacccacttccagggcccgttttggtcgtggaggcccatccaggtgttcacagggcctatgtggtgctggacaaatttctgaggagag

SEQ ID NO: 67959 - DNA, 122 bp, Homo sapiens
cattagaaactgggtccacccaaacattgcgattactgctgccttcttgcccttgccgcacgtggccgcccccacatttccccagagtgtagaacatcctgtcgcccttcatttgcatatta

SEQ ID NO: 67960 - DNA, 122 bp, Homo sapiens
gtccagggctcggggttttggaggtgcttgagcctccctgccctctgtgaccgcaggaaccgtagcctcacttgggtgctcaacatagtgcgtgggcgtctttttggaggcgagacaaaatc

SEQ ID NO: 67961 - DNA, 122 bp, Homo sapiens
aagcgcctatgctcatgcctgcactcagacacatatccacacagatacccacagatgccgcgtgccactgagtcatagctacctcctcagagagcacgtgcctgcatgtacttgcacacagg

SEQ ID NO: 67962 - DNA, 122 bp, Homo sapiens
caccgctggcccagaggttgcactcagtgccctgtcgccggactaggacgaggatgtggccgctgcacttgctcccgcggtgacgtcaccgcctccttccgctctgcggcctggcggtctcc

SEQ ID NO: 67963 - DNA, 122 bp, Homo sapiens
attttaaagctcctgccaatttccacctacaccattctttgccttgcttactgtgtccttcgtgcttgcctcctttctgcttcacacagtctaaatccctttcctatttgtgactgttccct

SEQ ID NO: 67964 - DNA, 122 bp, Homo sapiens
attcatcacgactttgaaatcacagtagtgactagatccaatgttagatcttgtttaacgcgttgatggaatcgtacatatttgtatgtgtaacaattttgatttttaaagtattttgataa

SEQ ID NO: 67965 - DNA, 122 bp, Homo sapiens
atccatgaaggtgttttatggatgtctccgggggtgggggttttactgggatgaaaggaacggaggattcagagatgggggaaccctggctgactggaccccccaggtccctcctccggcat

SEQ ID NO: 67966 - DNA, 122 bp, Homo sapiens
cttgaacccgggaggcagaggctgcaagccgtgggtatcgcgccattgcactccagcctccgcgacagagcgagaatctgtctcagaataaataaataaataaataaataaataattagttc

SEQ ID NO: 67967 - DNA, 122 bp, Homo sapiens
cccctcagacctgtgaggccgcggccgccgccgcccccgcggggccatggtgccgctctccgctctcgagcgactggaagctcccgccaagcccctcgccgctccgaacagccaatccgggc

SEQ ID NO: 67968 - DNA, 122 bp, Homo sapiens
cgagcgcgggtcccgcctccttgaggcgggcccgggcggggcggttgtatatcagggccgcgctgagctgcgccagctgaggtgtgagcagctgccgaagtcagttccttgtggagccggag

SEQ ID NO: 67969 - DNA, 122 bp, Homo sapiens
cattcattcatccattcagtcagtcagtcagtcagtcagtcagtcattccttcattctttcgttctttcattcattccgtcattactttaacaggcggtgatttgcccctgccacggtgctg

SEQ ID NO: 67970 - DNA, 122 bp, Homo sapiens
tgctttcagtccgggctgcagctgaactcacctttctgctctgtcccaaggaccccaaggcgtgcccggcaccagcaaggacggccaggacggtgctcccggcgagcctgggcctcccggag

SEQ ID NO: 67971 - DNA, 122 bp, Homo sapiens
aattccaatgatgagcttctgactgggtttaagagtcaccattactgtgtacaatctaaacggtgatgaacacagacagtgttgttgttcctttggtgtctgttagtatggtctatcagaaa

SEQ ID NO: 67972 - DNA, 122 bp, Homo sapiens
caggtgagagcctgctcgggctttgagtaggtgcctgtccggggcaggaacacgcagcctcgctgcacccatcccagccgggccccgccctggggagcatggctacgtttgtccccaccttc

SEQ ID NO: 67973 - DNA, 122 bp, Homo sapiens
gtccttgtctctcaggcccgctccaagaatcacctagtgcagctactacagtgaaccccacgcagggtatcccacgtggaacattttctggcgtccgggccaggtcaagcggaagtaaacac

SEQ ID NO: 67974 - DNA, 122 bp, Homo sapiens
tcctgtgctcccaggtctgggcgttaggattctctcagtcccggagccacgccggctgaccgcagggctcggggagcgcggctgggccccttttcccgggtccgggaagcgccgggccacgc

SEQ ID NO: 67975 - DNA, 122 bp, Homo sapiens
tctggggactgtcccaagatcgagagacacacttcacagccaagccctcgtctgcagcctcggagctatgagatgttccagctccagggaaaaaactcaggaatcagaagtctggccagccc

SEQ ID NO: 67976 - DNA, 122 bp, Homo sapiens
gtcccctgctcctcacctgtcgccagccggtggcctctccactagggctgagggcttcctcgacacagggccggcgccaggtctgtggctgtccacgctccacccgtccctttggggctcag

SEQ ID NO: 67977 - DNA, 122 bp, Homo sapiens
tgctatagggagtaatatcaaggggctgtgacgcaatgttatggaagccgccattttgtacggaagccaaagtccaatcacttccatagcaagcaatcgaaagaagatggccgctcccacga

SEQ ID NO: 67978 - DNA, 122 bp, Homo sapiens
ggtctctggggacctcctgggggcagtggggagccacggagggttcgaggtgggaaggggcgaaatcccacgtgtgcgggcagagttcccctggggctgtcccacctggccccaccgcctgg

SEQ ID NO: 67979 - DNA, 122 bp, Homo sapiens
cgacagcaaaaccagcatgaatttctttttcctctttcacaattctagggctagaagattcgttcttactgcagacctcagtaagctcagcatacgattttttttcttaagctcagaacttc

SEQ ID NO: 67980 - DNA, 122 bp, Homo sapiens
caggcacaggtgtccaagcagaccttgggtggacataacagtgtacaggtaaggagttgacgtggggggagggtgagtagtcagcagcccagtggagtcctggagtaggtcttatggaagga

SEQ ID NO: 67981 - DNA, 122 bp, Homo sapiens
aaatacaaaaattagccaggcaatgtgggacgcatctctactcccaactactcaggaggccgaggcgggaggattgctggagcctggaaggtcggggctgcacggagccctgatcctgccac

SEQ ID NO: 67982 - DNA, 122 bp, Homo sapiens
tctaatacttccatgaattaaccaggtatagaactaatctaggctgggcgcagtggctcacgcctgtaatcctagcactttgggaggccgaggtgggcagatcacgaggtcaggagatcgag

SEQ ID NO: 67983 - DNA, 122 bp, Homo sapiens
ggtccctgcgggccttgtcctgattggctgggcacgcgtttaatataagtggaggcgtcgcgctggcgggcattcctgaagctgacagcattcgggccgagatgtctcgctccgtggcctta

SEQ ID NO: 67984 - DNA, 122 bp, Homo sapiens
gagtttggtggggttctgggtgctttggggcttcccgacggagacgtgtgctactcctcgcgtcctgtcagggccctaccagctgcactgtcggacgcgacacatgccatgccccctcctct

SEQ ID NO: 67985 - DNA, 122 bp, Homo sapiens
gaatcggatgtgaaatgtaacagctgagtgatgtcaatttcgatttttcaagtccgatgccggactgggtaagtcatgtcttttcaatgcctggtggacaaatggccttcatttggaagcaa

SEQ ID NO: 67986 - DNA, 122 bp, Homo sapiens
tacatataaggagtaacaatttatgggaaatctcaatctgcaaaacaggctttcctctgccgatgccctgtggacttggtgggagacctggccggcatccactctctcacccatcttgagac

SEQ ID NO: 67987 - DNA, 122 bp, Homo sapiens
atttcccaatcggaccagcttagcctgggcaggcagcctcgtgctgaggtgcctggagaccgcccaccccctaggtgctcgcttccccccgggtctgacctgatcgaagtaaatgatgcgcg

SEQ ID NO: 67988 - DNA, 122 bp, Homo sapiens
tctggggagaagggcggaggcaaagccgaggaggtgcgggttgtggtccattctggaggacgctgatcgaatgccccaaacttcccggaatgtatgtctgagatttgatcccagagagggag

SEQ ID NO: 67989 - DNA, 122 bp, Homo sapiens
ggtctctgcagccgtttgcatttcctgaaaccggatcttagtgtcagagccgcccccagccgggcgggcgcctcagccatggccctgcgcaaggaactgctcaagtccatctggtacgcctt

SEQ ID NO: 67990 - DNA, 122 bp, Homo sapiens
gcggcccctccattctcctcttccagcggtgtcttgggtaccgggctctgtgagctagatcggttgcttcaggaacttaatgccactcagttcaacatcacaggtaccagggtgactgagag

SEQ ID NO: 67991 - DNA, 122 bp, Homo sapiens
gcacattctgatcttcaccacttcaaattgggccactcctggctatctcccatcagtagacgaaaatattcacaaccacacagccagaacctttgcctttgttcttaatagaaacacccaga

SEQ ID NO: 67992 - DNA, 122 bp, Homo sapiens
ggtccccggggagctggcgccgcgctctctccgtcttgctcccttccggccacccccgcccggccttccctgtgagaagtcaacggctcctgggtggtttcccaccgaaaggcccagcgcgg

SEQ ID NO: 67993 - DNA, 122 bp, Homo sapiens
ggaatgtatgatgaagcagaaatgagccgtcaggatgatattttaatggcttatatgtcacgttggtgcatgtggctttgaactggagccgttcgcgtttcctgcagagagcgccgcaaatc

SEQ ID NO: 67994 - DNA, 122 bp, Homo sapiens
cctctaattctttcgggagactggtgtcatggtaatcatgcaaaacctttaattaggtgtcgagaatacaaatatcaaaaagattcttagacatacgtattaaaatgcttaacacttctttg

SEQ ID NO: 67995 - DNA, 122 bp, Homo sapiens
cacctgatgagaaatcatttgggttgaatcctgggtgtggattctgttctgagaagacagcgactgtcacagacgcctcctgattggtggactctcaaagatcttgatcgtgacacattttt

SEQ ID NO: 67996 - DNA, 122 bp, Homo sapiens
tgaagggggaacggggctggctccagtggagcgaggagcggctcctgccttgggatgacacgaaggccagatttggaagcgaaaccgcccggtggtgaagggttgtgcaatactccgtttca

SEQ ID NO: 67997 - DNA, 122 bp, Homo sapiens
ttcaccgtgatggagcaagcacaggggctgggcaagcagcttgcagcccctgacccaaagcggcgggaggcacatgggggaaagcgctcccaaacggcgtctcggaggggcctgctgcgggg

SEQ ID NO: 67998 - DNA, 122 bp, Homo sapiens
gaagcgctcgcgacctaactgccccgggtgccgggcgcctagggaggggccgccaccgcccgctccgccccgggggcctgcgcccagcagcccccgcctccccggaatccagaggccgagcc

SEQ ID NO: 67999 - DNA, 122 bp, Homo sapiens
tagtggggacaccgccggcactgcaggcaggagataagttgcagcaaaatcccgttcagccgatcacccaggcaagactcgtcccagtccgactctcggggatgcttttcacactcgtagga

SEQ ID NO: 68000 - DNA, 122 bp, Homo sapiens
ctccgggcctccccttcctgtttctatctcctcctggacctgttgcttagagccctaccccgaggtccccccgcccggcttccttatgggaactggccccgccttaagagtggtaggaggga

SEQ ID NO: 68001 - DNA, 122 bp, Homo sapiens
tgactccatcagccatcagagggccctgctcaggctggttcccagggatactgggaatcacgtatcactgatttgtaagaacagccactgtggtctggtttctgagcttccactgatcccaa

SEQ ID NO: 68002 - DNA, 122 bp, Homo sapiens
gtgagagtccgggggtcgcttccttttgggtttaaggtccccctgaggctggtcccgtcccgggtgtttctgctatagggcaatgtatacactttctatcacgtagttttcctgctctgaaa

SEQ ID NO: 68003 - DNA, 122 bp, Homo sapiens
gtgtgtgtgtgtcacatgggatggactggtggagagatgttctcatcagccctgtctacacgagagccctgccaaacagctgaaatttaatttccatcccttcccatgagtcccttctgcta

SEQ ID NO: 68004 - DNA, 122 bp, Homo sapiens
tatacacggacggcagaacaagaagtggctgtgtcactggatacctgtacatttgaataccggccattagggagaatcgccctgtaaacattgatccagtgattgaggccggtcggcttgct

SEQ ID NO: 68005 - DNA, 122 bp, Homo sapiens
agccgcccgcatccttctctaacaatcttggcttcttgaaagtccgggcctcccgggcaccgcatgcagccaggaacctagcggagctggcggtcccgcaaagcttttctcctggtgcgcgc

SEQ ID NO: 68006 - DNA, 122 bp, Homo sapiens
ttagtatttggcattgactttcattttctccaacctctgttttctagaagcctgcctgtacgggaagtacaggaataaagagaagctgatcgtgggggttttcttgccagacttcaaaggag

SEQ ID NO: 68007 - DNA, 122 bp, Homo sapiens
caggcgggtgggactcagtggtgtgtgtgtgtgcggcgagtgcctgcctgtaggtggccccggccaagccagccccgccccaggaggaggctgaacattagtcctgcatgagggtgtctggg

SEQ ID NO: 68008 - DNA, 122 bp, Homo sapiens
gggcccccgcccagcctcggcccggcctccagccgcgcttaccgatgtggatgatggagtcggcccgcaccgacacgcactggcatatccaggggagaagccacagcgtcagcgcttccatg

SEQ ID NO: 68009 - DNA, 122 bp, Homo sapiens
gtttccccgcactggggccgcccctcagcggagcggagtcggggaggccggggctccgctcgagttaatcaatctgctgtttccagtcctgcggccgctgccgtgggctcagcggcccgact

SEQ ID NO: 68010 - DNA, 122 bp, Homo sapiens
ttccagcagacccccgcgacttctccaaacactccaactccttgcagcgcttacacttcgcgatctgtccagaaggaagctcgggctcaggctggagaacccgccagggcttcctaaaaagg

SEQ ID NO: 68011 - DNA, 122 bp, Homo sapiens
cgatcgcggcgccagcatcgtggaggacaagttggtgaaggacctgaggacccaggaaagcgaggagcagaagcggaaccgggtgcgcggcatcctgcggatcatcaagccctgcaaccatg

SEQ ID NO: 68012 - DNA, 122 bp, Homo sapiens
tcaaaaaaaaaaaaaaagaaagaaagaaaaggggtaattatagtagtatttccagagaggcgccttctctacccaagaactagggacacatcctaaggggagcctccttcccctctcctggt

SEQ ID NO: 68013 - DNA, 122 bp, Homo sapiens
gagaacttggagaatagtttttgctttgggggtagaggcttcttagattctcccagcatccgcctttccctttagccagtctgctgtcctgaaacccagaagtgatggagagaaaccaacaa

SEQ ID NO: 68014 - DNA, 122 bp, Homo sapiens
gggctgaactcggtgacgcctccctcacacccagcttcagtggcgccaacgccgcttccccgcaccctcagggcgagggaagacttccctggctcaccaacttgctgccgcccagcgccttt

SEQ ID NO: 68015 - DNA, 122 bp, Homo sapiens
acacttgacttgctcggagttcactggcccgaaataatgttcccaatgcaagtcggcggacggaacattcggagtggacggtttgcttcccccccactttttaatacattaaacatgcgtta

SEQ ID NO: 68016 - DNA, 122 bp, Homo sapiens
gtaaggctgcacaaaatagagaaataaagagcatgaaaataaagccgtgctaagaaacgacgtgcttaagaactgagatttggccctggaaatggggagggttaacagatcaccttggctgt

SEQ ID NO: 68017 - DNA, 122 bp, Homo sapiens
tcagggacgagccagtgacttgactcttgggcgctaagcttgggagggagcgcaggaggccgctgtccttcctttccggttcacgtcacccttctctccctctgttgctccacctgcagcca

SEQ ID NO: 68018 - DNA, 122 bp, Homo sapiens
tccatggcggggtgcggtggcagcggcaagggcgcgagtgagccgtgtcgggccggccggcgccttaaacccgccgccccgcccggcctgtccgcgggaaccacaccccggggcggtgagag

SEQ ID NO: 68019 - DNA, 122 bp, Homo sapiens
caagctgcacattccacagtggaaagcgggagcggcgacccgaaggcagcgaagttctctcgggctcagctcccgaggccgggagcgcgcggcggttccacccgcagagcggcgccgcgtcc

SEQ ID NO: 68020 - DNA, 122 bp, Homo sapiens
gggccactctgcgaggccgcatcaccctcacacccagaaaagcactcagtgcagccatttcgagctttgaaagggaacttggtgatcaaggtagggcacacaggcctgtctcctcgaccctc

SEQ ID NO: 68021 - DNA, 122 bp, Homo sapiens
ggtgcgcttgcgcaacgctcctcttcagccctaaccggctcagctgacgtgcccagaagacgaagatggccgccacgctcactgcgtgtcacgcagtttttcaccccggcccggacggctgg

SEQ ID NO: 68022 - DNA, 122 bp, Homo sapiens
agtcaggggtcagaggtcaagaggccagcaggctcaagagttctgtggacggggctggtccgtccaggccagccatcacctctccaggaagaatttgagagcccggtcgatgttcatgcggt

SEQ ID NO: 68023 - DNA, 122 bp, Homo sapiens
atgttggccaggatggtctcaatctcttcacctcgtgatccgcccgcctaggtttacaggcgtgagccatcgtgcccagcctaaaagggttaattctgggcactgtggcttacgcctgtaat

SEQ ID NO: 68024 - DNA, 122 bp, Homo sapiens
acctaaactcaagtcattttctaaagtaagttacccacattgaccaaaatgcagcttcaacgttgagtaaagggatttctgagagctggccaatgccttttgccagctgcagtgagattctg

SEQ ID NO: 68025 - DNA, 122 bp, Homo sapiens
gctggctctggaaagcctgtgcggtcctgggcaggaagcccggcccgtggagcaggttttcgttctgcttcagcaataaataagggtgaccacagggactttgcttttggtttcctttcctg

SEQ ID NO: 68026 - DNA, 122 bp, Homo sapiens
ggcagtgtgtggtctgtgaggtcagagcaattctagaaaaacaacttggatgtggttgatcgatattctggatccagtcatggcttgcaaagaaaatagctgtatttggaatgaagaggact

SEQ ID NO: 68027 - DNA, 122 bp, Homo sapiens
tttgccacgcaggtcttctctgtaggcacccctccatggatgcgcgaggaacgagtgtggcgaaggctgcgagttcccacggggtccttggcccggtagtgaaggtgacctgaggactgctg

SEQ ID NO: 68028 - DNA, 122 bp, Homo sapiens
atacggaggtcagggaaggttcagaactgaacgaggcccctgccctggggaaatgctggacgccccaggctgggagttttgaaggccacagggcaagaggctacgtgcagacgtggctgcaa

SEQ ID NO: 68029 - DNA, 122 bp, Homo sapiens
gggccggttgcctgggtaacgcgtggctcccttgggctggcgggaggggccggaggctcgcgaggggcgggggcggcgacggcggcggagcgtaggggaggggaccggagaggaggggatga

SEQ ID NO: 68030 - DNA, 122 bp, Homo sapiens
gcgcgaggcggagaacgcgatgaatgagttctcccctcgcctcggagttgtctgagttggcggcgctgcgcccaggcttccggctctcagcgccccacgcgcgcgtggctccccgggctgcc

SEQ ID NO: 68031 - DNA, 122 bp, Homo sapiens
ttagataaataggccagtaaggtgagagcgctactgcccgcgcacacgctcggcctcccacgcatgcgcgccctaggcctacacacgcatgcgtactcccactcccacgcccgccgtccccc

SEQ ID NO: 68032 - DNA, 122 bp, Homo sapiens
agcctctttgacggcccaggtccaacagcgggcggcgggggtggaggctggggcggcagacgctggaggccggcagggccccggctgggtccggctggctgggacgggacagagggagtctt

SEQ ID NO: 68033 - DNA, 122 bp, Homo sapiens
ggggaccgttgaaataccatgaaaaatattggagtaaaacagagactcccgtgtgggtcccgggctgttggctagggtggcaggccgcgtgcatttcctctctctgcgcctctctctgctat

SEQ ID NO: 68034 - DNA, 122 bp, Homo sapiens
gagagcctgccctcatctctgagctgggcgctacatgctccaagtctgcttggaagtggccgggttattattccccaactgcagaagccacactggcgcttcctgcctcactccttcctggc

SEQ ID NO: 68035 - DNA, 122 bp, Homo sapiens
gagaacaaaacaccaggtacctgcgggtgttgcttgcacgtaccaccttgtcacctcctccggaagaagagagaagctgagaaccctgctgagctttgttcttatcaggttttacttctgta

SEQ ID NO: 68036 - DNA, 122 bp, Homo sapiens
agcggaggctcagcgccactcgctgccgcgcgctggaacagcgcccgagcgcactgccggcggggcagagccccagccagcgccccccgctgcggctgcaggctcctacccttcctgggcgc

SEQ ID NO: 68037 - DNA, 122 bp, Homo sapiens
ggggggatttctaaggactcaaggtagctttgccaggggaagcacaagtcaaaggcctatcggggggcagactgagcaaggagagtaggagcctgggcatcccgttgccacctgctgtgtcc

SEQ ID NO: 68038 - DNA, 122 bp, Homo sapiens
gcagtgacttattagtttccagagcgttgcctctgggcaggaacagtgaatgttaagagacgttgagcgtaatcaacacagtggccgcagtgacataagcaggagttttaaaagactaggaa

SEQ ID NO: 68039 - DNA, 122 bp, Homo sapiens
tctggtgggggcggggccgcgcagggccgttcccgccgccggccgcccgcgccccgcccccgtgccgcagctcacaggccccgcctcggtccgcccctccgctcgctccccaagccgccgcg

SEQ ID NO: 68040 - DNA, 122 bp, Homo sapiens
gggcctaaaataaatcagggctggggatcagatgcctccaatctggcctttaattgcaggcgtgacatggcttgcctcggcgagtctgctcctaattaaagtgggctggcggtgtatgaagt

SEQ ID NO: 68041 - DNA, 122 bp, Homo sapiens
gctctgcagccccctcggggacgcccccaccagctcaaattccgagtgcagaaaagaaaccggaccccccagtgaggcctgccaggcctcccggaccccttgttactcaggaacctcacctt

SEQ ID NO: 68042 - DNA, 122 bp, Homo sapiens
cagccctcagccaacacaacagccaaggattttagccccggccctcagccaacacaacagcgaagtattttcaaggtttctggctctgtggggggaacaaggcaggatgccaggaggcctgc

SEQ ID NO: 68043 - DNA, 122 bp, Homo sapiens
cactccaccgcaggcctacgggagtccagcttagacccgccggctcccacacacacatcccgggaggcccggatcagcctgcctgacagccaagctgcagcttctctcctgttaatggagtt

SEQ ID NO: 68044 - DNA, 122 bp, Homo sapiens
gacaggacccagttccgatttcttggcttgtcttcctctttatttttactgtgtgtgtctcgggttgctattttctgttttgtgtatgaaaagacctgccattacccacaatgcttcactct

SEQ ID NO: 68045 - DNA, 122 bp, Homo sapiens
tcagcgtgaccacctggtgcagatgctctcccggaacctggaggggcaccaccagatagccgctgcctgcttcctgccgtcctattgctggctcgtttgtgccaccttgcacttcctgcatg

SEQ ID NO: 68046 - DNA, 122 bp, Homo sapiens
aacgtcctggttctcatgtggtcaagaaggtagatggagagaaacgtgtgctaagcagcccggccctccccagagaagccacgggcagaggctcaccaacacctgcccctccctccatggtg

SEQ ID NO: 68047 - DNA, 122 bp, Homo sapiens
ttctgacagtggagccaggacgtccgggagctgacaatctaaacgcgacctgggaaggggcggtagcgggagtggctgcttcctgggaggtggtgctcgcaaacctggcagctgactgggtg

SEQ ID NO: 68048 - DNA, 122 bp, Homo sapiens
cagcccaggtgcgctggcttccttccagctgagcgctgtccccgcgccgcctccaggggtcggcagaatgctgaacagtaagcatggcgcatcctcaaccttggccccacaatgaatcaccc

SEQ ID NO: 68049 - DNA, 122 bp, Homo sapiens
cggatctggctctgcggagggtgctctcggctcaggggttctgtcagcagccagttaggccgcaggggccggggagccacggggggtagctggggagggggtgtgcaggcaattcggagggg

SEQ ID NO: 68050 - DNA, 122 bp, Homo sapiens
caggagcccgctcgggccgggtctgggctgcgtgtgtcagtgtgcgcctggggacgagggcggggccccagctgaagcctccgagccacacatgcacacttgtgggttcctgccgagttgaa

SEQ ID NO: 68051 - DNA, 122 bp, Homo sapiens
tcgatcatctcatcctgcccaaacacttggttcacaggtacctgctgctcaagcctctcgcgggcccagtccagcttctcggccacagtgcctccgttcacctggatctccatcaggtgggc

SEQ ID NO: 68052 - DNA, 122 bp, Homo sapiens
tgcaggagccaagctggttagcactgagaatccagtttggtgcctgtgacacggagggcccgggcggggaagggtggggggcttgcaggggtgcctgggtcgggggctgcaggtgggagtga

SEQ ID NO: 68053 - DNA, 122 bp, Homo sapiens
gggctgtggctccagcaaaggcgccgtcctcctccctctcgtcccctccgccccgaggctcggctttcccacatcccacagcagcccatccccgggacccagagggcaaggggaggaccggg

SEQ ID NO: 68054 - DNA, 122 bp, Homo sapiens
taacatggatccactacgggaccaacggactcctgcccctagaaacagggcaacaacgcacgacaccctggaagccgggtcatacttcactactagcaccagaaggggcttccgcctctcca

SEQ ID NO: 68055 - DNA, 122 bp, Homo sapiens
aatagaactttctccaaatggtttcagcacgatctgtgaattctcttccctcttagaagccgtcacttctctataaagctccagtcctttctgtcctcctcccttgctccttgaacatgtct

SEQ ID NO: 68056 - DNA, 122 bp, Homo sapiens
tatgtcatttggttataagcctgtgtggcaggccaagtgtgagctacagctgttttggcacgcaggggaggcctgtgctcataaacagcctcggagtgggtgtgcctgcctgaaggtccgcc

SEQ ID NO: 68057 - DNA, 122 bp, Homo sapiens
atggccaataagtacatgaaggatattcaatcactaattgtcagggaaatttgaatcaaccgcaatgagctactacttcatacccagtaagatggctatttaaaaaaaaaaacaaaacaaaa

SEQ ID NO: 68058 - DNA, 122 bp, Homo sapiens
aggcaaaaaccaaatatacgattatcattaaagttcattgtcttacagaatctttcttaccggtttccaccccagagggacaaagcccggaccgacaaacatggcattgaagtaattataaa

SEQ ID NO: 68059 - DNA, 122 bp, Homo sapiens
gttcccggcgcgcgcgtcagcctgactcgagcgtctccacgtccggggcccgcaggggagcgcccctgccccgtccggtcgcttgttgtgttgtcatcacgtggcctgggcgggccctgacg

SEQ ID NO: 68060 - DNA, 122 bp, Homo sapiens
ctcttctctcaagaggtgtgacgcagaaaattctagatgcttaagtgcagctcttgaaatcgttttccttcttcctcgtgatctaacatttaaatcaaggaggagccaaaggggtgtgtata

SEQ ID NO: 68061 - DNA, 122 bp, Homo sapiens
ctgcggggccgggcctccggcacccctcccgccacccgttgcctcctgcgcccagggtcacggcccctggccctacccaggcccagactgagaccccgacccctgagcccggggggacggcg

SEQ ID NO: 68062 - DNA, 122 bp, Homo sapiens
gcggcgagagtggccagacctgaattccgttcacctgtcacctcccacaaaaggcaggttcgggggacttaggcattcgttgccactttctgggggagggggaggtcgaggggccgccgttt

SEQ ID NO: 68063 - DNA, 122 bp, Homo sapiens
ggaggttggcggcaatggcgtcttcggtgatctggggaagaagcaccatgtcatccacgccgctctgcttcacgttgtggctctgccagtggaagcgctccttgctgccctggggggtgaga

SEQ ID NO: 68064 - DNA, 122 bp, Homo sapiens
ttctcacgtggacagcactcccagatacctttccttgcatctgcattaacagctatgtaccgagaagttcagagtcttttcactctccttaaaatactttcctcgcaaatgaagtaatgcag

SEQ ID NO: 68065 - DNA, 122 bp, Homo sapiens
actcggtcttctgtggtcctggcctgacagaatttgtcccaaggcaggacaaggtcactccgagcagtgtgtcagtaggtggggcctctgcatgcgaggcaaggccaagctggctcaaagag

SEQ ID NO: 68066 - DNA, 122 bp, Homo sapiens
cggccatccacgactttcgcaccttccgccattttcctgcctgtgagggtggacagatcgcgctcgggtctcggcctcctgagtgccggtgactgcgggaggcgacggagtgcttctggggg

SEQ ID NO: 68067 - DNA, 122 bp, Homo sapiens
tctggtggcgtgccgtgatcgtatagtggttagtactctgcgttgtggccgcagcaacctcggttcgaatccgagtcacggcagtaccttgatgtcgcctcaatttctcaacgtactgagca

SEQ ID NO: 68068 - DNA, 122 bp, Homo sapiens
ccttttgctccagatgtataacataaaacagtcaacagataccaaggaagcagcagccatcgaggctagaagaaatcgagaaaaagagcgacaaaaccgattcttcaatgtgcggaaccgag

SEQ ID NO: 68069 - DNA, 122 bp, Homo sapiens
ttcgtcctcgcagatgcggcaagcgggtccagccaagaataaatgcgaggtgggcagcagcggaatcacttctcactggggtgggatgaggccagagggaaacgaggaggtgggctcagaag

SEQ ID NO: 68070 - DNA, 122 bp, Homo sapiens
gggcggtaaggggccgtgggaagtaattgtcgctctttcaaacgtggtgggagcgcgtcgcgccaagcgcccagggaaatgtagttttttttttgtttgttttgttttgttttttaagatgg

SEQ ID NO: 68071 - DNA, 122 bp, Homo sapiens
ctcggagcctacttgaaccgaagagtccctccctgggccaacgaaggacccaattcccctcgccccggatccagcctctaagtggtttcccgggtaaggtcagcagaggtccgccgcctcaa

SEQ ID NO: 68072 - DNA, 122 bp, Homo sapiens
cccttaagagcgtctgagggcgaaggccaagtcccttcctccagagtcctgaaacgcagccggagccagtgggcggcctctgtgtgggcggggcggagcgaaccattagcctcgtccgccgg

SEQ ID NO: 68073 - DNA, 122 bp, Homo sapiens
ggcagaccgcacaatggcgttcgcgggtcatgtgtactcagggggacattgaggcaggcacgggggagaagccgtgagactgcaaacaatgctggctgccccctaacgaggcatctcccaac

SEQ ID NO: 68074 - DNA, 122 bp, Homo sapiens
ccccgctcaggatcttcccgggattggctgagctacccgacctctccaggggatcggctgcgcgccccgcccttgcccagagtcttcccgggattggctgcgggcctcgcgaccctcctgct

SEQ ID NO: 68075 - DNA, 122 bp, Homo sapiens
gaccagcctggtcaacatggcgaaaccctgtctctactaaaagtacaaaaattagccgggcgtggtggtgtgcgcttcccagctacttgtgaggctggggcatgagaatcacttgaatgctg

SEQ ID NO: 68076 - DNA, 122 bp, Homo sapiens
gccctcaaaccgtggggtttccggaggcagcgtttgcaaaagttactattggctcccaggcgggtgagcacgtgtctggcttttgccacagatgacccaagagagattcagctgttttatgg

SEQ ID NO: 68077 - DNA, 122 bp, Homo sapiens
ccccagatttgttttgaactgagctcactcacagcccagggccctgatgctaaaggactccggaggccggtttagcatcagaaatgctttggtggtagctctggttttcattaggtcctttg

SEQ ID NO: 68078 - DNA, 122 bp, Homo sapiens
accacggggctgaagaggggtctgtagggtcctcagccccactgcctccctgggggcctgcggcgtctccagggacccaaacacctggctcccagggggagctgcgccctgtgctggcagcg

SEQ ID NO: 68079 - DNA, 122 bp, Homo sapiens
tcctggctagggaggcggccttggctggcttgaccgtcatccttgaggcctgcggggcaacggtggctgtccttggcccggctttggaatgtggctttgcagggctggtgttggcgccattc

SEQ ID NO: 68080 - DNA, 122 bp, Homo sapiens
aggggtaggggtcgagggatccggggaggaactggctgaatgcctggatggagagggtcccgggtccattctctgggtggggcatgtgtagctgcttaaggttttgattattatatccacat

SEQ ID NO: 68081 - DNA, 122 bp, Homo sapiens
aaactcctccggctgatttatctctgtgaagaaccctgctgagagacgtaggaagagtcccggggccctatgaaatcttcggggttccaggaaagactcgtttactctcgccgttggagagc

SEQ ID NO: 68082 - DNA, 122 bp, Homo sapiens
ggcccgatggctctggggggattcagactctggggtctgcaccaggatgttgcgggcgcacgcctgacacaaattgtgagagcagggcaggatgatgggctcccgatagaaggagccgcaca

SEQ ID NO: 68083 - DNA, 122 bp, Homo sapiens
ccagagagggacggcatgtgacgtggcaggccctgggcgccgggcacagggcgcgcgctgcggcagcctctgcgtgtcactgtgtgcctgaggcttccatggtgaggtgctggggcacccct

SEQ ID NO: 68084 - DNA, 122 bp, Homo sapiens
taacagaacggaacttctgaggattctgccccatgccctgctctggggagaggggtccatcgccaccccgcacagccggtgagtccccacaccagcagccccagcccccactcgcctcgccg

SEQ ID NO: 68085 - DNA, 122 bp, Homo sapiens
ttcacgcgcgactagaagcggttccttgtgcatttctagaatcttgtagatgtgttttctcgtgagaatgatgcagacttactgctgacttaaggtcagtttgtttgaaaagggagaacgtc

SEQ ID NO: 68086 - DNA, 122 bp, Homo sapiens
caagggccttctgacccctccccgcaaaaggcaaaatcaagactacagaaggtgaactttcggttgtaaaagaacgagtgaacacatactggaattccggtgcaaaccgccgaaccggggtt

SEQ ID NO: 68087 - DNA, 122 bp, Homo sapiens
aagactaggaggttcctctaggacctcatggccctgctaccttcctggcctctcacaggacgttttcttcccgcagatagaaaaggagggagctactctcaggctgcaagtaagtatgaagg

SEQ ID NO: 68088 - DNA, 122 bp, Homo sapiens
ggcgcccgggctccaggccgaagagcttggcggcctgttgggctgcaggaccggctgggccgcggggcgcacgctcgcagggcctcgggtccgcctcgggcttgagcagctccttggcaggc

SEQ ID NO: 68089 - DNA, 122 bp, Homo sapiens
gacactggccaccgctaattagctggcaaggtaagggtttgtccgttttaccgtgagcagcgttagtgagcaccattgcacacagcaagaagggagagagtaataatgagagagagagagag

SEQ ID NO: 68090 - DNA, 122 bp, Homo sapiens
catgctctcactgctgaattcctgcacttactcctagaatataccagtgctgtttgctcccgccatcctgagggctttagaaagtgctttaaaaagggaggatctcgaagcagcagctattt

SEQ ID NO: 68091 - DNA, 122 bp, Homo sapiens
tttcctcttccactttctctactttgaacccatcccagcagagtccaggaagtagcctggcgccggagactggcggcggcgacgcccaatgggacgcgccagcggcggcggcagccccgccc

SEQ ID NO: 68092 - DNA, 122 bp, Homo sapiens
acctcatgatctgcctgcctcggcctcccaaagtgctgggattataggcatgagccactgcgcctggccaggaagtacatacttaaaacttagtgccaacaaatcccagtgggccaccaatt

SEQ ID NO: 68093 - DNA, 122 bp, Homo sapiens
ccgcagcaacgtccgccgcgccgccgttctctcgtcgcttcgttagccattttcttgcaacgtcttgagtcttgagcaacaacgatgtgcgggcactgaatgacatagtgcgcgcgttactc

SEQ ID NO: 68094 - DNA, 122 bp, Homo sapiens
gggcaccgcgttgcccaccgccgccgctgccgccatctttcctagcgccgcgctcacttccgggcagaggaacgcctcacttccgaagttttacttccggtaagccctgagcgccgccatgg

SEQ ID NO: 68095 - DNA, 122 bp, Homo sapiens
cttcctcctccagctgcacccacccgtcctttcctgctcgggagggctgggtttgaagcgcgcgccacggccagcccgggaccgcgggggagggcgagggaggcgcgcagccgcacgcacgc

SEQ ID NO: 68096 - DNA, 122 bp, Homo sapiens
gtgtcatgattgtgggaactacaccagatcccttacagtactctttgtcttgtgtttagacgtctaatttttaccagtagccacaatcagttaatgtggaatcccaaatcattatgctccca

SEQ ID NO: 68097 - DNA, 122 bp, Homo sapiens
actgcaagaagcgcaaggtgcccacgtagtccctctcggtgcccaagatctcgttgaggacgcagaggcggaggcgcagctggcgctcggactcccgggcggccgcgcacgggccggggccg

SEQ ID NO: 68098 - DNA, 122 bp, Homo sapiens
tgcaaggggcctgtgtttacacaactgggtcatggtgtctacacaggattggagaacaaacgggaccacggtttggacaaattctcccaaagcacagaagctcctagtggaggccaccactt

SEQ ID NO: 68099 - DNA, 122 bp, Homo sapiens
accccgttagacaagttggtgggtatcctcctggggatagcagcaccagccgcttgtgtgcggatcacaggaacccacggcttacggaggcgagtgggctgatcggacttgccctaagctta

SEQ ID NO: 68100 - DNA, 122 bp, Homo sapiens
cgctgccgctaccgccgctgccgctcccggtgccggtgccgcggcctccgcagccgccgccgcctccaccgctcgggggacattgtccctttaaatcgctccccccgccgccccgccccccc

SEQ ID NO: 68101 - DNA, 122 bp, Homo sapiens
gagagaaggggggataaagctgcttcccagaaactaggacagcaacacctggctggtccccgaggacgaggacgggacaagaaaggcctctcctgcaggaatgaggttaaaatacaatcagg

SEQ ID NO: 68102 - DNA, 122 bp, Homo sapiens
tccacctccttctccacaccgctcctcttgcccgccatctcctgcagcttggccttgagccgagtgatctcctgctctgtctccggatccacctggaagatctcgtggacgcgctcctggag

SEQ ID NO: 68103 - DNA, 122 bp, Homo sapiens
ggcgcttcccaaaggcaccgatggagtgcagggtagccgccgccctcaggatttatcaaccgcgaggcgctgtcagcaactcgtgcccggaagccaccccgccccggcacacacatactcca

SEQ ID NO: 68104 - DNA, 122 bp, Homo sapiens
ctcagcgccgtggtacctaccgaggggaactattttggggagtctgtgcccacggcgcagcggggagggagggcgcactgccgcctggcgaggctttgtgttgccaaagcgagagcagggta

SEQ ID NO: 68105 - DNA, 122 bp, Homo sapiens
aacacagatttactgttttgctacatatccagataggaatttacttaaggcttagtttgtcgcttatttggatcgtggtgatgtagggtgattactctagcaaaaagcaagaaggctggtac

SEQ ID NO: 68106 - DNA, 122 bp, Homo sapiens
gtctgtgcctctccttctctttcagcttctcagggaggcaggcgctctccctcggcttgtcgtctccaggtggctccgtgaaagagacctccaggaaggcagtcagccccggctcctgccct

SEQ ID NO: 68107 - DNA, 122 bp, Homo sapiens
ggaccgagctgcgggctggagggaggggcagcgccgagggggcgggacggggagggctcgcggagtaggccaacggttggccccaaccgccactgactacagcctgcgcccgcctcttttcg

SEQ ID NO: 68108 - DNA, 122 bp, Homo sapiens
gtggagaataactctggaactgaaatgaagtcagtgaaccgacacaaaaccagatcctagcggtgagctggctgcggaggaaccaaagaaaaatgaatcctcgaggaaccctctcccatgct

SEQ ID NO: 68109 - DNA, 122 bp, Homo sapiens
ccaggcgcaggcccagggcgcagcccgccgccagcagcgcggcgcacagcagcagcgaaccgccagcctcggcccccagctcccactcagcgcccatgcttcaggcttccgacgccaacggc

SEQ ID NO: 68110 - DNA, 122 bp, Homo sapiens
cagtgtcaccacagacacaggccagaccactctcgagggagagttgggtcagactacacccgaggaccattcgggaaaccacaagaacagtctcaagtcgccagccatcccagagggtaagg

SEQ ID NO: 68111 - DNA, 122 bp, Homo sapiens
ccaacatggtgaaaccccatctccactaaacatacaaaactagccaggagtggtggtgcacgcctgtagtcccagctactcagaaggctgaggcaggagaatcacttgaacctggaaggtgg

SEQ ID NO: 68112 - DNA, 122 bp, Homo sapiens
tttcattcaatgtctactatattccagtccttgtgcacagaatattctgaggatattaaacgaataccttctttagcatttctagtcttaaggaatcacactatcctttaatagaaaattaa

SEQ ID NO: 68113 - DNA, 122 bp, Homo sapiens
ctcactggtcagtggaagaaagtttgtttcctgcgtttgtcctcatatttatagttttctcgtccacctacaagttgattgtgacgttatgaatagaagatgaatggataatgtgtttttgt

SEQ ID NO: 68114 - DNA, 122 bp, Homo sapiens
tccttctgtcctgctgcagactaaaggtctggccaatgtcttgccccaccccgccagccgcgatacggcgcagttcctatattcatgttatttattgtgtactgactccatctgccccgtca

SEQ ID NO: 68115 - DNA, 122 bp, Homo sapiens
tggccgtctcaggacaccctgtccctctggccacagggaagccaggcctgtgacagcactcgcctcccctgcagggactgggcctttgtgggcacagcacagcctcccctagcgcacgggac

SEQ ID NO: 68116 - DNA, 122 bp, Homo sapiens
agccagggcagtctgccttagacccagcccacccctgagcaatagacacaaacaggtccacgtaagtgattctggggccagagaaagcgtgtagcatttgtaccctctgggtgatttcacat

SEQ ID NO: 68117 - DNA, 122 bp, Homo sapiens
ggggtgggtagaagcagagaaagaggtggtcccagcctcagccccgtgccacagtggtggcggggcgaggggggattgggaacatcaactgtccagggaacagtcccaccctgtgggaggtg

SEQ ID NO: 68118 - DNA, 122 bp, Homo sapiens
ggggtgtcgtcattggctgcctattagaaaaacgacaggacaatgcataccaccgcctcccgactgtaaacataggggatatgtgttcacttagcatggacttctgggaggggccaaggaag

SEQ ID NO: 68119 - DNA, 122 bp, Homo sapiens
tggacagagctctgggaagcagcggctggagggggaggggcctggggacaaacaatgtcgcgttggctttgatcctcaggacccaagggacaggaagagatgagctaggcaagagaggagcc

SEQ ID NO: 68120 - DNA, 122 bp, Homo sapiens
caaccctgtgacttaggcgtcattatccctacttcaaaggtcagaaaactgagtttcaaacggtgatgaggcatcttacctagatcctattttttaaggaacacagtaactaatgttttcct

SEQ ID NO: 68121 - DNA, 122 bp, Homo sapiens
tgtggggtactacgtccctccacactgagaatccgaaagccaagatgcccaagattctatcgttatctgcttgtcttgtagaagcccctctgtgagactgaggggcaaaggagagagggcag

SEQ ID NO: 68122 - DNA, 122 bp, Homo sapiens
cacagtcacaagttttgttggcagttcttaactcttggcaccattcaaagttttgtcaatcgtgagacaactcattgttaacctctcagcgccttctacaagtgtaatgtatggtactgtcc

SEQ ID NO: 68123 - DNA, 122 bp, Homo sapiens
gggctctgagtcctctcccggccaggccgagcttagtatgtggaggcggcggcgggagtgcgggcatggaccaagggaagggggacacccaaaccgcattggtgccttcctttccctccact

SEQ ID NO: 68124 - DNA, 122 bp, Homo sapiens
tttggttggcgtgtaaagcgctatgccactgattccatctctgacataggtgggagctcacgccaggtgggtcaccacagtccgttagcgggggaccatgaaccgcagaccctcggtaatat

SEQ ID NO: 68125 - DNA, 122 bp, Homo sapiens
gcatgatatcatgtcttccttacgggcctggggcccatggtgttctgggatgtgtagtcccgacggctccgactcccctttccctcctcccaaagggaaggcggatgggcacggggcttgcc

SEQ ID NO: 68126 - DNA, 122 bp, Homo sapiens
aagatatcgcttagctcctgcgcccggaagaaaatccagcgcaggtcgggttccggcgcgcggaagccctgcgaaccccaaatgtgtgcgctgagccgaggcctctaagcggtaggagagaa

SEQ ID NO: 68127 - DNA, 122 bp, Homo sapiens
taaagcgggatgcgcgggaagcctgcaggcctgaaagaaatggctcgcccaaagatccatcgcagtgctggccacactccccagaggaattaggatggaggtgacaagaccctgcccagccc

SEQ ID NO: 68128 - DNA, 122 bp, Homo sapiens
ccaagataagaggtagccagagtgtcaattccaactgtcaatcagtgagatccatcaggccgcccaaagaattgcaaatttgattttttaatggtagtaattaaaaatcgaattttttctct

SEQ ID NO: 68129 - DNA, 122 bp, Homo sapiens
caccggtcaccaccaggtgtgctctgagcatggttttgtgtcccctaaagcatgccagggcggatcccagaggccctgcagcgggaatggccactgcagcggagatgggagcagacagggcg

SEQ ID NO: 68130 - DNA, 122 bp, Homo sapiens
tttgtcttgggagattcctggagatggtggggagcccctgggcacgtgcagcatatgtggcgtgggcttcttcaggtgctggtggatccctcaggatggtaaatgtccattttccaaaatct

SEQ ID NO: 68131 - DNA, 122 bp, Homo sapiens
gctatgatggcggtctgactcgcaaaacaccttgggagatataatcccagaaagtgacggcgcgcgcctctgggtattataggagttgtagtttcaggagggtgcatgtgggctgtcaggag

SEQ ID NO: 68132 - DNA, 122 bp, Homo sapiens
ccgcgcgtaaggggtggctctgggcaggaaaccacgtgcgaaccgccccacggcagggtgcgtcccacagaaggagcagtgtgttccgtcccgctgcacggcctgcgagggatttccatggt

SEQ ID NO: 68133 - DNA, 122 bp, Homo sapiens
gaccggcccccaggagggctcggcatcgagcgcagaaggcggccccctggaagacaaaggcgcggactcgctcgcccgggcggcggtgcagacgcgaagcgccagccccaacctcggctcct

SEQ ID NO: 68134 - DNA, 122 bp, Homo sapiens
ggaagatgactcacttaattaacacgctgctcctgaccgtacacttggaagcagaggttccgttcctttggttcttgccaaagctgcttacgaaaccatatcttgtgttggtgcccatggtg

SEQ ID NO: 68135 - DNA, 122 bp, Homo sapiens
ggtccggccgccccgtaccacgtcatcgagcagctccccctccccttgctacaagtcgcacgcgcggaagtaaacacctctacgtcatcagggcgcgtcctcgtctttcccctcccatctcc

SEQ ID NO: 68136 - DNA, 122 bp, Homo sapiens
tctcctgctgaatgaggaagtggctgggagcaaggcccaagggaggccaccccaaggagacggggacttctagcccccagctggagcctggggctggggaaggaggaacctgaggttagggt

SEQ ID NO: 68137 - DNA, 122 bp, Homo sapiens
tcgctctcgggaagccaagccaggtccaactgataaccgcattccttgaggaccctcggccgggagtgactgccagtgggcagacaggaagaaaagagccctggcccagatcaggcaggcat

SEQ ID NO: 68138 - DNA, 122 bp, Homo sapiens
ttcctcgtctcccactctggccggtcagcttcagctctggctcttgctgagcgtggagggcgcaggggcaggatccggcgcccaccgctggggcgcatgcacctcctcgcctcctcgcaggg

SEQ ID NO: 68139 - DNA, 122 bp, Homo sapiens
ggagacgcctggagtatccgaagcgagcagtgtggacgagtcaccagcaccgtctggccacgcagggtcctcccaggagtggctgcacctacctgcccgcccctcccctggccccgcccact

SEQ ID NO: 68140 - DNA, 122 bp, Homo sapiens
cttcgcagtgggggcgggggatgtacagactcctttgagaagctaatgaaaagttatcatcgcctatcatctccccttcctattccctcccccataccttcacatacactttacatttttgt

SEQ ID NO: 68141 - DNA, 122 bp, Homo sapiens
aacgaggagtggttgcaatccatccttaactggaggacagaagcaggccggccctgtaatcgactgacctcaacaggtgtctccaagcagcgacgcctttttcgttcatcgtcctggctata

SEQ ID NO: 68142 - DNA, 122 bp, Homo sapiens
ttcccggcgggggagggggcgcgggaggaattcaccctgaaaggtgggggtggggggggtcgcatcttgctgtgagcaccctggcgaaggggagagggctttttctatcagttttctttgag

SEQ ID NO: 68143 - DNA, 122 bp, Homo sapiens
cccgcgtggctttcgcggcgggcgctgcggcccggtattggacagcctggcagggcagcgcggggccgaatccggctgccgtggctgaggctcatggatcactcttttgtggtagggccaca

SEQ ID NO: 68144 - DNA, 122 bp, Homo sapiens
gggccctgcccggcggttgctgctggaaccagcccccgcaagggcccgcagcggccgggccgtttacctcagacccgcgccgcagcctcccggagcccgcgcccaggactccctcacgacct

SEQ ID NO: 68145 - DNA, 122 bp, Homo sapiens
gtggcctccggccaaggtgaagaggtgtgtgtcttggtgtaaataaaccgctactgcaaccgatttcgctcatcctttggttccgcattgaggctcgccagggtctaaatccgcacagagac

SEQ ID NO: 68146 - DNA, 122 bp, Homo sapiens
ttccccaacatcgcgggggccgagaccaatgcctccactctcttcctttccccaacatcgcgggggccgagaccaatgcctccagcccccagagcttcccgccgctcagccacttcctgact

SEQ ID NO: 68147 - DNA, 122 bp, Homo sapiens
ggcttgcgactaaagggagccaacgagcgcgtgagcgtttgagaccagctggctgagggacgccgaaaatcccgcgcggaggaaggcgggagagcgctaccgctgctaccaaggcggcggcg

SEQ ID NO: 68148 - DNA, 122 bp, Homo sapiens
cgcagagtccttgccccaaacttccagtcgggagcccgggagagacgctgggcatcaagacgggtggcagcctgcccggccgctgctcccggcccgccgagttcgccacctcacccccaccc

SEQ ID NO: 68149 - DNA, 122 bp, Homo sapiens
accaaggagcatgactgctgggttgtatggtaagagtgtgtttagtttgtaagaaattgacgaactgtcttccaaagtggctgtcccatttcgcattcattagcaccagcagtgaatgagag

SEQ ID NO: 68150 - DNA, 122 bp, Homo sapiens
cagctaatgagtggcagaggccagagggcttggcctgcagaactgtctaaggccagaggccgtccatacactccgtctcctgaaggggaagcgggctcttctcagatgcacagggacaatgt

SEQ ID NO: 68151 - DNA, 122 bp, Homo sapiens
gaaagaggatatgagcaaggccattttaactattttgaccacctgagcgctggtacgctccgcgttgtagcctctttttctgccggattgcggtgagtcaggctgcccatcttctccgcctg

SEQ ID NO: 68152 - DNA, 122 bp, Homo sapiens
acgcacctccagagggtgtggacatgccccactatgtccttcagctcctaggatgtgggtcgcacacatcccacgagctcacctatttctgttctttttaacatggtcctgcattattggag

SEQ ID NO: 68153 - DNA, 122 bp, Homo sapiens
atgcaggggccggacgcttatggacgatgcatatgtggggccggatagaattgtggcaggcggcgctggggctgatgcgcctcacccagattatcctctgtaatcctcacagccctgtgaag

SEQ ID NO: 68154 - DNA, 122 bp, Homo sapiens
ctaaggaggctggtgaggggctgacagtcttaattctaagggacgtctccagcggtgacacggggctccgtccccaagcagaccccctgctgggatcagtggaacccgacccagtgaccttc

SEQ ID NO: 68155 - DNA, 122 bp, Homo sapiens
gattcaaggtggtggtgagggtgccccagtaacggcatggggtaataaatggagagaaatcgaaaccggaagttctgtcttcaagaaaaggaaagggtggaagtgacttgttcacaatagaa

SEQ ID NO: 68156 - DNA, 122 bp, Homo sapiens
tcgaggggcggggcattgcccacgtgaccagacgtccccgggagcgcgaggtggagcgcgcgccagctcccttcggtgctgagtgcttagtgctgggatctcgtgggtctctgtcggctttc

SEQ ID NO: 68157 - DNA, 122 bp, Homo sapiens
gtacgcagaagataaatcatgcagtatattcatttcatttggcccatgtaactccactgacgtcactgtggatagataactggggtctgtaccaggcccctctcgcttctgcactctgaggc

SEQ ID NO: 68158 - DNA, 122 bp, Homo sapiens
ggccaattagacacatcatgaatgggtttcaccatctgagtgctgatggcatgcctggggcgttgttgggtgttagggcgtggtaagagaaagaaagccactccttagcaaggaaatcatgg

SEQ ID NO: 68159 - DNA, 122 bp, Homo sapiens
gattcaggttcactacccaatctgtcactcatgtagcacaggagtctcagccaagcctggcggaacgaaaggtttagggtcaaacatttggaaatgttcattgtaatcactaactgtggcac

SEQ ID NO: 68160 - DNA, 122 bp, Homo sapiens
tcacattttcatactaaaaacaaaatgatcagagccttgatttctccactagaaactacacgtacagttaagagtccacatgcaacaccttaaatcacagactgagacctcacattctgacc

SEQ ID NO: 68161 - DNA, 122 bp, Homo sapiens
gtgttttggaggcctctcaggtacagggactgtcagcccagctgtaagtggaccttggaccgcaaatttgcatgggcccctttgccaaagccctgtgcccactgctggggaacgctggggac

SEQ ID NO: 68162 - DNA, 122 bp, Homo sapiens
tggacaaaacaggagtcctcgccagtgcccgggcgcgtctgcagtgtcagctcagggcagcggcagggaatcaaacagcttcccaggggaggccaccaaggagcgaggagaaaagcaggcac

SEQ ID NO: 68163 - DNA, 122 bp, Homo sapiens
agcgggcatcgcggatgagccggtacactagcgcggtaaactccccgtcggggatctgcgcgccgctcagaccagccataaccaccacggctgttatgcgtgcggttaccacggcaacaggg

SEQ ID NO: 68164 - DNA, 122 bp, Homo sapiens
tggcctcacgggtccgggtttcagaggccaccgagtggcctgggacgatggatcgcgacacggaggtgcatggctccatcatggggaagaatgtgctttaaaataggtgcatggaggaagag

SEQ ID NO: 68165 - DNA, 122 bp, Homo sapiens
atagaagcaggcaaggaccgccgtgggcacggggtcagtgagacagggtcctgctcgcggcgtcaaggaggagcgctgtgggtgggtagggtaggcgcgccccctcggccttgcctttccaa

SEQ ID NO: 68166 - DNA, 122 bp, Homo sapiens
ggctgaaggcggcggcgaaccgaagaagccggcatattctgcccttcgcgaatctttttgcggtctgggcttgctgtacataactcaatagccggaagcccttaccccaaaaagcatttgcg

SEQ ID NO: 68167 - DNA, 122 bp, Homo sapiens
ggctgggccggtcgggcgcgcgggtcaggtggcgaagggcggagtctgcgcggggttgggcggagcctgcgcggggccggtaggatcgcgtcgggagccggtaccgaggcccgagccgcggg

SEQ ID NO: 68168 - DNA, 122 bp, Homo sapiens
cagcgaaggaagctgccttttccagcaacaggcgggcgcggaattcaggctttgaggatgcgccccagctgcgcctcctgcccggcttcaattgcgggcccccagagtgagcacctcaggga

SEQ ID NO: 68169 - DNA, 122 bp, Homo sapiens
ccggctagtttcagtgcctcagaaagcctaacgggatggtgagtttctctcacacggagccggccagcctgtccaacacaccacgggtctctacctttggctataatgagttcagtgagatt

SEQ ID NO: 68170 - DNA, 122 bp, Homo sapiens
accgcacctgcacgtgggcgcacacacacacacacaggcaaggccacaggctccaacacacgctccagacagtgtctgttacgagtggcctcggtttctccccgtggaaacggcacgatggg

SEQ ID NO: 68171 - DNA, 122 bp, Homo sapiens
agtggtggccgaggaggacacggagctgcgggacctgctggtgcagacgctggagaacagcggggtcctgaaccgcatcaaggtgaggccggaggctggggccgggcctggcggatccgcag

SEQ ID NO: 68172 - DNA, 122 bp, Homo sapiens
acctcgccgggcatctctatcttgctggaagtcatggtggcgggccgggtgtccctagcccgcggcgtggggcagtgcgggctgtgcgcgcggtccgcggcccgggggcgcgctcgcctgta

SEQ ID NO: 68173 - DNA, 122 bp, Homo sapiens
ggaggcgcccgggctgcctgatccttacccccggggcatttcccgggtccctaggcaaatcgctcctcgcccagtggtcctcactcctgggagccagtgacactttcttatttatttatttg

SEQ ID NO: 68174 - DNA, 122 bp, Homo sapiens
tttccatcattcagccttattaaaatacaccccttttaagccagaatcttttgagaatggcgtttgtgtgtggaccagccctacatttgataatctacctgtcattctggtagatatttaca

SEQ ID NO: 68175 - DNA, 122 bp, Homo sapiens
ttcagtgtcccagggaccccacccccagcaaacttggctcctttcagctcccctcccttgcgggcagaggcagggcgttcaagcccatttaatcttggcagaatgcaatttcctgcttcagg

SEQ ID NO: 68176 - DNA, 122 bp, Homo sapiens
cctgttcgcccctggcggtggtggcctatgagcggctggcccacgtgcgggcccggctggcgctggaggagcactttgagatcatcctgggcagtcccagctcaggcgtcaccgtggggaag

SEQ ID NO: 68177 - DNA, 122 bp, Homo sapiens
gcggcatatggagagaggatgagcaaggtactggctctgacgcgggctccaagggcgaggcgcgcccattcgcgcggggcacagggtcagagcgtctgcagcggggctctgagagtccagag

SEQ ID NO: 68178 - DNA, 122 bp, Homo sapiens
cctggcagggcccgccacctcacaggctggttctccatctgggggcctgcttgtctgcggcgactctttagttcacaggaggggacggccggcgctgacagcttcccctttgctttccccac

SEQ ID NO: 68179 - DNA, 122 bp, Homo sapiens
agtacttaataattgcacattgttgcgttcagggtagccaggaacaaacattcactcactcgccaagaggagaacatgacagctgcacttccctggaggactgggctctcgggtcatcaaga

SEQ ID NO: 68180 - DNA, 122 bp, Homo sapiens
gggagggcggactctttcttaaccctcattgtctcctcctccctcttcctttttaaaagacgccttgcgggcagagctgtcagcaaccccgcggccgtttgtacttggccgcggcggagctg

SEQ ID NO: 68181 - DNA, 122 bp, Homo sapiens
ccggccccgccccttccccgccccggccccgcccctgtcccctcccgccccgcctctgaacggcccggacccaccccggctccctggccccgccccctgacctcccttgccccgcccacttc

SEQ ID NO: 68182 - DNA, 122 bp, Homo sapiens
cgggctggccgggcgcggaggtaggggcctggccgggacggctgggactggaggcgggggcggccgggcggcgggggcggggaaggggcgggcgcggaggcggtgccgcagcccgagccgga

SEQ ID NO: 68183 - DNA, 122 bp, Homo sapiens
gtttctaataatacaatttgcattggaagaatatgactaccccaaaacttgcctgctaagcgtccataaatgcttcctttaactcagaggacctggagttctgctagaaaattgaatctgtg

SEQ ID NO: 68184 - DNA, 122 bp, Homo sapiens
aacatcgattgaattatttacttaaaacataaatattcctcagcagatataatgcattgacgcacctgggctgctttgctcaactccttggaaaagtcgctggtaaatctttggaaggattg

SEQ ID NO: 68185 - DNA, 122 bp, Homo sapiens
cctggtgctgggtctgtgggaagatctccttggtcgtcagcacctcttcctcaggaccagcgggtcattagagtcttaaccaggggcccggtggccagacctgtccctgctcacagctgggg

SEQ ID NO: 68186 - DNA, 122 bp, Homo sapiens
tcctgtgggccttaagcttccgtgtcaacgagtgcattagtgggtgcgcacatgcctgagcgccctctgcatatgagtgtgcacacacgcatgggtgtgtttacacgtctgtttgcgtaatt

SEQ ID NO: 68187 - DNA, 122 bp, Homo sapiens
ccacacccggatccgccaggacagagaagccggtaccccagcgggtggtctgcttttctgcgcagaagcactgtggtctatttctgagttctacccacttcctacccctcaccgcacacaaa

SEQ ID NO: 68188 - DNA, 122 bp, Homo sapiens
cacgctcgcccggaatgtggggttgtgattgttactctacgttccggaggcgcgtctcggcgctcctgctccggctgcggctcgcgctgtccccggcttggccgcgcgggatgccgcccggg

SEQ ID NO: 68189 - DNA, 122 bp, Homo sapiens
agacccgaccagcactatccagccctctgcaccgcccccgcggcgaggtctggaccaagtcgcccctagcaacaacagccgggccggctttctcaggccatgctgattggcgggactccggg

SEQ ID NO: 68190 - DNA, 122 bp, Homo sapiens
ttcctcgttgttaagtcacttgctcttccaggtgccaccctgcgggaagtttgggcagcacggagtccgccagcattctacaggaagtttgggggagcacaaggttgcctgcagaaggccat

SEQ ID NO: 68191 - DNA, 122 bp, Homo sapiens
attcaggtaaggcaatgaaaggaagcctgcacctggcggatccggatcggatagcggatccgcaatccctgggcggggctgggcggtatggagggggcttacggcagtcggcctcgtccgat

SEQ ID NO: 68192 - DNA, 122 bp, Homo sapiens
ggtcctactgtgcagagaccactttgcttcctgtctaaccaccatgactgaggggtgtagcgggatagatatggggttggtggggaggcagagagtagggaggcaggtgcagggaggccagg

SEQ ID NO: 68193 - DNA, 122 bp, Homo sapiens
gagtggttgccgtgcacatctatattgaaaaacatcagcagttacgagccaaatcccactcggagttcctgaagaaatctacttttgcccgcctcccaccctacaggtatcgattccggagg

SEQ ID NO: 68194 - DNA, 122 bp, Homo sapiens
acgcaggacagcaggacacgcagggcggccatggctctctggactcctcgcccggccccgcggagccgccccctcgcctatagcctttcagggctcgctccgcccacaggccagcgccgcga

SEQ ID NO: 68195 - DNA, 122 bp, Homo sapiens
agttgggaaaacttggagtgctgctcgccttacttttgctttctcgctccttccaggccgcgccgggagcccccgcttctcccgcccgccgggtccccaagcccggagtgggtcccagctgc

SEQ ID NO: 68196 - DNA, 122 bp, Homo sapiens
cgcgcggaggcgggacccggtttggcgaagagcaagcgtccccaggattggccagcttggcgccactagataggcttccgggcgtgattgggcgagcgggccagacttccggattcctgaca

SEQ ID NO: 68197 - DNA, 122 bp, Homo sapiens
tggggacgagctgggcgtgcggggctggggccacaggggctcagggttaggctgcggggacggacaggaggatgagctggaaaggggtgagtcacgcgacccggggaagaacttcaggggcg

SEQ ID NO: 68198 - DNA, 122 bp, Homo sapiens
ttgggcaaactgtttccttctttggctcactcgggatcccccagcaatgtcctttgttctcgaactcccagtgactcgaggggtgtcctctgattgctcacctcaggtggagcctcgaaagg

SEQ ID NO: 68199 - DNA, 122 bp, Homo sapiens
acttcttgccatttctgaatgccgcgccagtcgtccgggctgaaaaccgtgttgtacacccggagatctgaccccatcattcaccgtagctgctttaaaaccgcatctagaaggcagtgtct

SEQ ID NO: 68200 - DNA, 122 bp, Homo sapiens
gaggccgatccccgctgcgtcggtgggaggccaccatcctcagaaccgactcttcctccccgcctccacccaccacgagctcaccgggaagcagttctctgccgcagaggccgtaagccaca

SEQ ID NO: 68201 - DNA, 122 bp, Homo sapiens
cactcgctggccactcacctcctgctgtgcggcccagttcctaacaggccaagctcaacccggaggttggggatccctgctcagtacgacatactacctttgagacttttagcttctccaga

SEQ ID NO: 68202 - DNA, 122 bp, Homo sapiens
gcagcatgaatcactgtatcagcccctcctcctgacgagggcacaacacccagaatagctcggtgatgacgcagcagcctgaaacctttgaaagccctcatctttcagagggaggaaatgaa

SEQ ID NO: 68203 - DNA, 122 bp, Homo sapiens
caaagatcgcaggcggggccgcggtgtctgacagctccagcacctcaatgaatgtgtactcgctgagtgtggaccctaacacctggcagactctgctccatgagaggtgggcccgaagaggg

SEQ ID NO: 68204 - DNA, 122 bp, Homo sapiens
gaggaaagcgcttgtgattgctttgagaaatgggtgattttttttttctcccatggaagtcgctttagtgatcttaaaaggtgttggctgtgggtgctattcaggtccagaaaattggtctc

SEQ ID NO: 68205 - DNA, 122 bp, Homo sapiens
cgctagcgagttcaaagggggccatcctgccataccccgccatgctcggatgcccggtgccggcacatgagggctgctccttcatattgcccagcccggcagtgcaacgggggcggaggctg

SEQ ID NO: 68206 - DNA, 122 bp, Homo sapiens
gccgtgcccggaccctccccagctttaaaaacccttgcccataagccactgggaagccgtcggggaatctgggttttaagcacgagctgagctgcccgattctccctgtttggagtcctgcg

SEQ ID NO: 68207 - DNA, 122 bp, Homo sapiens
attttgaagaacaggttttgaagggctgtagagaaagctggaagcacactccaagtggaacgataacttggaaatatactgtcttattatcacaggctgctcctgaaagccacgcgtccccg

SEQ ID NO: 68208 - DNA, 122 bp, Homo sapiens
aatgctcagggctgtcggagacagtttgcttgtgtacccggcaggccacaacagaaccaacgagaacagcctgggatcaaccaagggtttactagatgacctgaaaaataatctggatgggt

SEQ ID NO: 68209 - DNA, 122 bp, Homo sapiens
agaaagtaaaaaatattccacatcttggcaaactctaccaattttatggcttcattggcccgtagcaaaattatccaagttcctttaatttatccttgcaaagttttagaatttttattaat

SEQ ID NO: 68210 - DNA, 122 bp, Homo sapiens
actagtggattggagctgactcgttgccatggttgccatagtgatattctctggtagtcccgctgtgttgtgcccaggactcccactggggactgaccccaatcccgttgccatggaaactg

SEQ ID NO: 68211 - DNA, 122 bp, Homo sapiens
ctccagcccgggtgggcacctggtttctgaggcccacagaactaactggctgagaggctgcgggggcgcaggcagtgaggtggggagagttccgggttacctccttcccttgagcccccgtc

SEQ ID NO: 68212 - DNA, 122 bp, Homo sapiens
agcacacgggacgggaccttcgcctttgcctgtttttttttcgaccaggagaagcaggtgcgagagtctggggcttaggaggtggaaggcggggaaagagaatccactaggtcctcgtgtag

SEQ ID NO: 68213 - DNA, 122 bp, Homo sapiens
ttcctgatcctagaagttgtggcatactctgctactaattggtggctcccatgatattcccgtcctgttgatgtcacaatagacccattgtgacattatcattgatcaaacatgtaaagaat

SEQ ID NO: 68214 - DNA, 122 bp, Homo sapiens
cgtctggaagccaggactctggcggctcccatggccctgggcccctcgttgggtcctgaacgctgctgtggcggcgacgcgggcgctatcggaggctgggagcgggaatccggagccgggag

SEQ ID NO: 68215 - DNA, 122 bp, Homo sapiens
agatggagctctggccagggcctgggggaagctggagtctcctcagattaggggactccccgcgactcccctccactgccaaaatgagacctccatccccagccccatccaccaccctccac

SEQ ID NO: 68216 - DNA, 122 bp, Homo sapiens
cgagtgtcacatcctctgcctctcatttgcacactgctccctcgctatgctcaccgctcccgccgatccagggacgtgatccagggactctgggaaatgcaaagctacacacagtggagcgg

SEQ ID NO: 68217 - DNA, 122 bp, Homo sapiens
tcaacccagcttttcccgactccgggaagaaccgggaagagaaggcggaggggagcgaagcgccgcctgataaatactgtggcccagtcccgcccccctaacgtcacttccgccccgcgcca

SEQ ID NO: 68218 - DNA, 122 bp, Homo sapiens
ccacatgattcattcctggcattagcaaaacccatgcttttttgttgctgtttaaattcccggcctgaaatgtctatagttcatgttgatcttaaattcaagaagtacaaagtcacctaaaa

SEQ ID NO: 68219 - DNA, 122 bp, Homo sapiens
acatgaattctgctgcttagataatgttccatgtgagagggagggctatctgcagcacagcgaaagagaacacttacccctggcactgagcccatgctgttcatctggacagagtggttcat

SEQ ID NO: 68220 - DNA, 122 bp, Homo sapiens
actgcccaactctggccttatgctggatcagggtccgagggcgctttgaggcgaaggtggcgctcgccaggtgctcaacatcaaatacgaagtccccgcccctaacgtggcctaaatttgct

SEQ ID NO: 68221 - DNA, 122 bp, Homo sapiens
aaaagccaaaaatacaggaacggtccagactttccaaagaggccccttactgcttacaatcgcttcttcaaggagagttggccccagtactcccaaatgtaccctgggatgagaagccagga

SEQ ID NO: 68222 - DNA, 122 bp, Homo sapiens
ttgtgagaaagcaagtgaaattactcgtggaagtgaatggactgctttgagtcttcaaggcgttaattttccaaacgtttgaattctatccctggtctgagagctagggatgcagcctagca

SEQ ID NO: 68223 - DNA, 122 bp, Homo sapiens
ctccagccaggacccttcacaacctgattgctaagcttgttagcatagaggtggtctaaccgctacatgagccgctcacccctgacaaccacactgttgtaatgtatcagaaatgttgatta

SEQ ID NO: 68224 - DNA, 122 bp, Homo sapiens
ccacgaactgggggccttccagacctgtcagaggcccacacctctcggagggtttcatcccgcagaggcatggtgcctttgcctatcgcacccctttctctgcaggtctaggagcctccctc

SEQ ID NO: 68225 - DNA, 122 bp, Homo sapiens
tgatacttacatgggtaagattttcaaatgtcatatgaagaaaacttttattgcaaaatacggaatattctctgtagtaagagaagagggtgaatatttgtcacagggcaacactccagaac

SEQ ID NO: 68226 - DNA, 122 bp, Homo sapiens
aatctccatcataatggctaacatttactgcatattgtgtgcaagataccctcctgcatgcgttacctggattgttctgtttaatcttcacaatgatcctatgagacgggagctattactat

SEQ ID NO: 68227 - DNA, 122 bp, Homo sapiens
tgcgcgcctctctccccgcccaacccacgacgcgggcgctcctcactctcgcaacggtcacgcagaccccgcctctgcgaacccggccaagtcccgagcggaagcgccttgagcggaagcgg

SEQ ID NO: 68228 - DNA, 122 bp, Homo sapiens
ggggaagggaaaccacagctttaaacgaagacaaccaaaagaatgcaaactggatttatccgagatatttgacttttaaaaatctcaataaagttttccagttttctccaaagaagtatcac

SEQ ID NO: 68229 - DNA, 122 bp, Homo sapiens
ttgggaccttggggacttggcaatgccaaggtgtttgctgaggctgtggactctccagcccgggagaggtcgccggacctttgaggggcattggaatcctgggctcctcctctgctgggtgg

SEQ ID NO: 68230 - DNA, 122 bp, Homo sapiens
ttattttaataaggataataacagctaatattttctttgaacattcactacatgtcaaaccgtgtgctaggtgatttacaagcatcatctcatttaattctcacaacaactctgagaacagg

SEQ ID NO: 68231 - DNA, 122 bp, Homo sapiens
tagcaagataactgcagttagcaaattgcctttgcttccccagccgccagagaacatgcccgtgatactgcagatatgagtcttgatgcatatgtttttaataaagcatgatgactgttccc

SEQ ID NO: 68232 - DNA, 122 bp, Homo sapiens
gaaaatatgccatttctagcgcttcagccacacaaagaaagcggcggaatgatccgctctcggcgaccgcaagtcccggctcgcccggcgcctgcgcggcagcgggggtgggagctgcggac

SEQ ID NO: 68233 - DNA, 122 bp, Homo sapiens
tcttccctcccgcaagggcttatataataccctaacccacttccatccgacttggctcggcgctgcatggcgtttttgtggcaggagcaggcaacacagccgcgagctgattgcagaaattc

SEQ ID NO: 68234 - DNA, 122 bp, Homo sapiens
ctgacgcaggtgagggatgagcagttgggcaacgtggggatgagcatccaggttgagggacgggacaaaggacctggtggacaaatcaacctgggggtttgagaaacagcaagaggaagagg

SEQ ID NO: 68235 - DNA, 122 bp, Homo sapiens
ggaaagcggagagtaaggaagagacagcaactcagagctgcagctttctcagcttcaaaacgaagacaataagaaaaggggacccctcaagatcaaaggaggggatggaacaatatgtgagc

SEQ ID NO: 68236 - DNA, 122 bp, Homo sapiens
gggcgctctccgcgctgggccctgccgcggccggtgcgttacatcaggaaacgcttggtccggttttctgtctgctagtcaaaacaattggctgaatctcgaaataacttttttgatagtcc

SEQ ID NO: 68237 - DNA, 122 bp, Homo sapiens
aagcaatctgaaaattcccaatccaatccagtgctgaagcaaacactgataagacacaaacgctttttcagcttctttctccaggaaactgatgggatcaatgaaaagaaaataaaacaatt

SEQ ID NO: 68238 - DNA, 122 bp, Homo sapiens
gatcccacaaacgacatatgacaatcagtctcattgctttataatcacaccaggtacaaacggttttagaaatcagttgaggctccctcttgaagactcaagctggaaaaggagtagggaaa

SEQ ID NO: 68239 - DNA, 122 bp, Homo sapiens
ggcgcgctccttgccgctgtccagcagctgtttctactgccaggtgctgcgtcccgcgatcgttataacacatgcgtacaaatgagcacaacgcgccataaaagtgttattgttattactat

SEQ ID NO: 68240 - DNA, 122 bp, Homo sapiens
ttccctccctccctcccgcgcggcgtttggggtttgcggtgggggccggtcggggagaagcgtgagctggccgggcagggagggccgggggagacctggggccgtgcagaggcgggtgggtt

SEQ ID NO: 68241 - DNA, 122 bp, Homo sapiens
gcctgcagcacagtggccacgaactgctccgtgtcctgggccgcgtcggcgtggccgtcccgcagccactcagtgaagacttgcatgaccgcccgccgtgggaagccctccgagtctacgga

SEQ ID NO: 68242 - DNA, 122 bp, Homo sapiens
ggaaatgaacgaatgaatgaacgaacgaaagtggagtggtggagaggaccacagaagacgcggtcatccagcgcgtgaaccttcaccactgctgggctgtggaccctcacttccgccgccag

SEQ ID NO: 68243 - DNA, 122 bp, Homo sapiens
tattaggatcctcggcaagtttgctctgggccgctttaatattgagcagtggcataatctcgggacctaaactttaagcgttctttcaggctcagaaagtttatcattccttggaacctggt

SEQ ID NO: 68244 - DNA, 122 bp, Homo sapiens
aaacggaggggcgggaggaggttaaactgaggaagccacgagcccgcagtaaagagagggcgatcgaggcaaaagggtaggtaacttgggacttctgtgccttgaaagtgttaaggattgca

SEQ ID NO: 68245 - DNA, 122 bp, Homo sapiens
tggaggccactgaggcccttctccctcaaaagccacacaccaccagaccgaggggcccaccgaacctgcccgaagcccactggctccgcctgaagcccactggctcctcctcaccctcactc

SEQ ID NO: 68246 - DNA, 122 bp, Homo sapiens
aggagggaaaagttcctgggcatcctctctgtctgaggtcacctggtcagacatggtctacggagtctggtctctctacagtgcacagaagatacgtgtggtcaggtgaattgtgtgtagag

SEQ ID NO: 68247 - DNA, 122 bp, Homo sapiens
agaaaaggagggagaaaggccaagcccaaaggagggtcagtgagtccagctccaggggaacgccccccttcccagaaacctggtgggcccctgggaagggaacccagcgagaagaaccctgg

SEQ ID NO: 68248 - DNA, 122 bp, Homo sapiens
aaacctctagggggagcatgcagacgggcaggttgtggggcacgtgggctccgaactcaccgcagcgtctaggggtgaatgcttacagctgctgaagcaaagccccagtaggcgtgtgttac

SEQ ID NO: 68249 - DNA, 122 bp, Homo sapiens
cctctgccgatggcctttccctagcctgtgtcctcaaattcacgctcccttctgaggtaacgtgacgcctccccaccaccccacggtctggcagtgtaaacagttttcacccttgctcattt

SEQ ID NO: 68250 - DNA, 122 bp, Homo sapiens
tctgccatgatcagcagccccaaggcctcagccttctccggctcacagtcagcctgtcctcggggtagctggtgttacacgtcaacagtccaggctctaattcccagtcacttagtcaaaca

SEQ ID NO: 68251 - DNA, 122 bp, Homo sapiens
aaagggttcttggtactaacctcactttaatcattgccaaagagcatgaagacagcccagcgtcctcccacaagaaagccttgggcctcacaaacttggcaagcagtctcaggcacaaaact

SEQ ID NO: 68252 - DNA, 122 bp, Homo sapiens
taaccagcagctgcgctccaggccagaagtggctgcacttcagtaggatgggagtcaccgcgttgaccctagtgggtgttaaatgctttggaattctaccagatacagttaaaagtcccctt

SEQ ID NO: 68253 - DNA, 122 bp, Homo sapiens
gattgtgacgaggcggggagcaagccaatcagcggcagcggggagccggccagggagcagcgcaggaggcgtcctgcccgactccaggcttcaggccagccagaccggtcccaacctgtccc

SEQ ID NO: 68254 - DNA, 122 bp, Homo sapiens
tgcagccgcgccgcgggaacccgcgggagaggttcctagacgcccagccgcccggcgccccgggtccagccgccgcgcctgtccaagttttgaccgcctcagcttgccccctgctcgcgcca

SEQ ID NO: 68255 - DNA, 122 bp, Homo sapiens
ccatgcacagaaaacaacatgtgctactgtccagctcggcaccatggcctgcccagggctcgccagtggccagggctttgccaggggggttgacaggggttagaggggtatcccagatacag

SEQ ID NO: 68256 - DNA, 122 bp, Homo sapiens
cagaagcaagatttcatcagaacactggccccttgtcaatttatcactctggtgaaacagcgtgacgcttgggatttccccagaacgtcaaactgcaattttacatgtgctgcttggaagca

SEQ ID NO: 68257 - DNA, 122 bp, Homo sapiens
ctgagaatcctggggtaacaattgcctttgccctggcttgtgtggcaagctgaggagacccggtgctgcttccctccatccagtgagtgctcagctcttaaagcagggatgtcactcagaag

SEQ ID NO: 68258 - DNA, 122 bp, Homo sapiens
cggtcgctgctcggtgcccgagggcccctttccagggcatctggtggacgtgagcggcaccgggaccctatcccagagctaccactacgaggtgtgtttgaccggagactcaggggccggcg

SEQ ID NO: 68259 - DNA, 122 bp, Homo sapiens
ccccatgtaaaacagcagggaagggctcaaggaggggaagtggtgggaggagaaaacgtgcgtggctgccccagccccgccgccgcctctgcacggcacggtgtcctgtccgtggctccata

SEQ ID NO: 68260 - DNA, 122 bp, Homo sapiens
gctccacctgcccggggtcctaggggtcgccgccgccgccgcagccacttcggcggcccgcgatgctgcctccgctgccgccgccgccaccgccgccgccctgtgcattatgggagcgggag

SEQ ID NO: 68261 - DNA, 122 bp, Homo sapiens
tgcattcatttctggggctttgtaactaattaccacaaacttggtgacttgaaacaagaacgcattgtctcactgttctggggcagagtccaaaattaagatgattccttctagaggctctt

SEQ ID NO: 68262 - DNA, 122 bp, Homo sapiens
cagagcctgccaggggaagtcacactctcatgaaagagctagccagcaagaaactagaaccgtggacatgtaagataggcacatgcgtggcgagtccgaagcgggaagcaagcagagggtgt

SEQ ID NO: 68263 - DNA, 122 bp, Homo sapiens
ctcggcccggcctccagccgcgcttaccgatgtggatgatggagtcggcccgcaccgacacgcactggcatatccaggggagaagccacagcgtcagcgcttccatgtcccccgggcgcgcg

SEQ ID NO: 68264 - DNA, 122 bp, Homo sapiens
cattcaagaaggaagatcctccctcttgcacaattagagtgtccccatcggtctccagtgcggcatcccttccttgccttctacctctgttccaccccctttccttcctttcctctctgtac

SEQ ID NO: 68265 - DNA, 122 bp, Homo sapiens
acgctctgcctgttaccctcttctcccagcccgctcaggagggcagctttgggaggcagccggaatcctcttctcattctccatccgacatctcctccttctgtcaagaagctccatctcca

SEQ ID NO: 68266 - DNA, 122 bp, Homo sapiens
acccagtgttctctcctataatcttccccacagagtgtgggaacaaagctcggtaaggtgcggtttcttgcctaatgacccatgctagtaagtctcagagaggaatgtgggcaaagccggtc

SEQ ID NO: 68267 - DNA, 122 bp, Homo sapiens
gtgggaggaggtgcttatcatgctacctgaccacgtttctatcatccttctgagtgccaccgtccccaacgcccttgagtttgctgactggattgggtgagacgtgtgtcccgggttgcctg

SEQ ID NO: 68268 - DNA, 122 bp, Homo sapiens
ttactatttattgcttgctgaagtcaaatgcattgtttgtcatttaataagagtcagtgacgttgtgctgattgtcactagataggtcccattgctcatcaatgtgtgaatgtgtataggtt

SEQ ID NO: 68269 - DNA, 122 bp, Homo sapiens
actcctgtgtggcacctcactagggtggggagtcaggcgtcaagggcctgggctggactccgtccacgataaaagagcagacttttggcagggggtggtagatacatcaaattgacccaggg

SEQ ID NO: 68270 - DNA, 122 bp, Homo sapiens
gcccagcgtgcctgtgcagcctagttggtcccggaccgcagacctgtcccggggaggctgcgcaccgccccgcccctcccacccctccgaggcccagcgagcaagtgcgtgttctcgggtcc

SEQ ID NO: 68271 - DNA, 122 bp, Homo sapiens
gtcttgggtgccctgtctcgaatctacaaggtgggagcgggtgagaacccagcgactgcgcggctgaatgacagggagtagccccgccgcctccaacatggcagcttctatccagcgaagcc

SEQ ID NO: 68272 - DNA, 122 bp, Homo sapiens
gcacagcttctctttccaacatctactaaaaaatccttttgaaacaatgtgggaggctgacgactattcccctattgcagtggtccttgacagggggtgatttggccccccaggagacattt

SEQ ID NO: 68273 - DNA, 122 bp, Homo sapiens
ctccctcattgatagactcccaacactactggagaacatcagcaaaactccaggaggaagcgccggcatcctcccactttctccccctcaattccctctcccggggccactcacacttttag

SEQ ID NO: 68274 - DNA, 122 bp, Homo sapiens
gcgtcctggcttccacaatgcagacaaaacttaaaaattctcaggggcttctcattttagcgtgggtggcagaggcctggagaagcccgaggtcacttcagaccggccacctccttggacct

SEQ ID NO: 68275 - DNA, 122 bp, Homo sapiens
ggggttgaggcccccttctcccctgcctgacgacgacggcggcaggaactcgaccggcgccggacagctcgcaacttgccttaccaagcgtaaatctcggttcctcccaactacccgcggcc

SEQ ID NO: 68276 - DNA, 122 bp, Homo sapiens
agacgcacaggggaggaggccccggagtgagcatggacattcactgaggctggggctcttcgctgttggcctccggagcagctctttttgcctggttaaaaacaaagcagggggtagtcaga

SEQ ID NO: 68277 - DNA, 122 bp, Homo sapiens
gtaccggaattctgaaaggcaagcggcgaaagccgtgaggagggcgggcctgggagggcgcgggcaacttggaactccagatgctgcgggaaccacctcccaccccgcccgccctgagtgaa

SEQ ID NO: 68278 - DNA, 122 bp, Homo sapiens
ggcagagcctcagggcagtgctgctgtgggaagggttccaacaaggtcttgtatcttaatcgtgagagattccttctcaacttccactagctcagctttagttctgaccagtggtccccttc

SEQ ID NO: 68279 - DNA, 122 bp, Homo sapiens
agcagggacagtgcacgcagagcggtgtgcatgtgcaccaaccgcggacttaccttggagcgaggctggcggacttggctcccattggtgaatccagtccttcccccggctttgccaatttc

SEQ ID NO: 68280 - DNA, 122 bp, Homo sapiens
gaattgtccaataggctgaacctcagcgaccagcaagtcaaaatctggttccagaacaggcgtatgaagaagaagcgcgtggtgcttcgggagcaggcgctggcgctctactagccgcgcgc

SEQ ID NO: 68281 - DNA, 122 bp, Homo sapiens
ctcggcctgtgccagggacagagatgggagtgtgtcgcagggtggggctgcggcccccaccgttgggcagcgggaggaggcggcgggaggaggcggctgtgcctgggtctggtttgaactga

SEQ ID NO: 68282 - DNA, 122 bp, Homo sapiens
tggctctggctgaaggtagaagagaactacgtcaggatgttggacataaactcgttgaagcgtttggagtactgctcagggttcacagtcgagatctcggcccctgcctgtaatacacaaga

SEQ ID NO: 68283 - DNA, 122 bp, Homo sapiens
gcggaagcgggagcctctgtcggccgcggaagcctggagtgggcggtacgcagacgcgcgcggtgagacccgctgtctgctcagcggactctgcccgcccccacctccccctgcgtcgggcc

SEQ ID NO: 68284 - DNA, 122 bp, Homo sapiens
tgagacggcgcaatggcggaaagcaaagcagaaatggcgtgacagccacatgtgcggggccggggaagtggaggctggctgctcctcacgggcactcgggtgaggctctctccacctcgcgc

SEQ ID NO: 68285 - DNA, 122 bp, Homo sapiens
ttaattgggtatttcttgctctcattctaaacatcaatcagaatttatgatgactggccccgtgaatgtacaactttggcaacatctgtaaattcaatacccaatgcttataaatatgtctt

SEQ ID NO: 68286 - DNA, 122 bp, Homo sapiens
cttaccaccttcagatccaaactggcctcctggtagacatcatctttttcaaaaaggcagcggtactgcccgtcgtccgaaggtctggcactgagtatctgcagggtcagtctgccctcgtc

SEQ ID NO: 68287 - DNA, 122 bp, Homo sapiens
tttaaaaatcgctctcttcctcctgtaggaaggtctaggggctaggtcttttagtgcacacgtgatgaaagtgacattttggccaggtgaaacctcaagctggtacaggcagctaaaacacg

SEQ ID NO: 68288 - DNA, 122 bp, Homo sapiens
gccctcctgtctgggaaggccgtccagaagcaggagccccggggaaaacaactggctggacggggcggccttcagtgtctctcccagcctgagagtcgcttcccaccacctgggcacgaacc

SEQ ID NO: 68289 - DNA, 122 bp, Homo sapiens
ggggccgggacaggggcgggggccgcgggcggggggcgggccgggggcgggggcgtggggcggcccatttcctcctcctagccggactggagggagacaaagcagcgcccgtctgcttcggg

SEQ ID NO: 68290 - DNA, 122 bp, Homo sapiens
agacctgaaatcaaatctatcttgctccaaatgctacatgctatatctgtttctgtctgtcggcagataatgcagttttacttgggttaatctatgtcaataggtgaaaactcaacattaag

SEQ ID NO: 68291 - DNA, 122 bp, Homo sapiens
gggctgcgcgcggtgctgtcggcccagctagagttccgagtgggcgtgggcttggccgcccggcactcgcagcaccggctggccccgggcagtgaggggcttaccacccgggccagcagctg

SEQ ID NO: 68292 - DNA, 122 bp, Homo sapiens
agccaaccatccgctggcgaattttgtagactcaaagaccacctgtgaggaaagtcaggtcgcccgaggccccatccccaaggggccgtactcgcagcgtctccatcctctttgcatagaca

SEQ ID NO: 68293 - DNA, 122 bp, Homo sapiens
cccactctcacttaagagtgagcagaagcctcctttatacaggaaattccagtcaataaacgtagaggcggagctggggacacgcaaatgggattcagagacaaggagatgaactcaaaagt

SEQ ID NO: 68294 - DNA, 122 bp, Homo sapiens
tccttcagctaccttttgttgtctttcccaattcggttcaaagttcagcttttccttctacgtgatgacacagccctccccatttgagaagagcatagctttaaaaaaaaaagttagaaacg

SEQ ID NO: 68295 - DNA, 122 bp, Homo sapiens
cttcccgactcgacgctcgaaacggctttccgcgcgccgcgccgcgccccacccccaccccgtctcaccccaacccccagcccggctcacctgccgcccgcgtctccatggcaacgccccac

SEQ ID NO: 68296 - DNA, 122 bp, Homo sapiens
gcatcttagccaagagtagaacccatctcaagaaactactttctttgctgctccataaagcgactcctcaaccattaaagttttatcatgaaattgcagcaattcagtcacatcttcaggct

SEQ ID NO: 68297 - DNA, 122 bp, Homo sapiens
cccaggtgaaaccgcctttgcaaaatgatgactgaaacagtgaaagagatctaactcagccgactctatcttgcttctaacctccaagctgtccttattcatccctgctggtaggttgaaat

SEQ ID NO: 68298 - DNA, 122 bp, Homo sapiens
cgccccgccccgccccgtcccgctccacggacgcgcccggacgctactggttcgcctttgcgcatgtgcaattgccctcgtaccgaactccgcaggacgaagcgtgtatttttttcccatcc

SEQ ID NO: 68299 - DNA, 122 bp, Homo sapiens
ctgtaggaacaccttctcctgtctgctgctgccacagagggtagcaaatcccatgctaggcgtggagaggagacttgggcatgtccctggagggacactgctgcagtcacttcacttacaga

SEQ ID NO: 68300 - DNA, 122 bp, Homo sapiens
agggatatccaaattgattgctaagaatattaaatagcttttggaaaaatgagcaacagtcgtgcagctgtggcatttgcttgttcttgtactgtggattgctagagaataaagcagaactc

SEQ ID NO: 68301 - DNA, 122 bp, Homo sapiens
gcgcccctgccccgacgttcccggccacgggatctctctgccccgccacctgcccgccttcgctcctgggggttagaggattagggtcagagctcttggaaagccccaccatacacctaagg

SEQ ID NO: 68302 - DNA, 122 bp, Homo sapiens
attaaaatctgtgctaatgcacggcagtctataacaattctacaagccaatcagacagtacgtgacatttcaatgagtaaaaaagagcataaaactgtatgtgtaagaacaaaatgttaaaa

SEQ ID NO: 68303 - DNA, 122 bp, Homo sapiens
cactcccgcaggtgcatctgcagacgcagcaggaggtgaagctgcgcatgacgggcatggcgctgcgggtggtgcgtaccgacggcatcctggcactctacagcggcctgagcgcctcgctg

SEQ ID NO: 68304 - DNA, 122 bp, Homo sapiens
cacggggcctgtttaccatccggcacacaggaggcccatgcatctttaccgtcaggcacacgggaaacccacgcgtgtttaccgtccggcacagggaagacccacatgtgtttactgtccag

SEQ ID NO: 68305 - DNA, 122 bp, Homo sapiens
atcggccgccaccacgtcacggacgtcctctccggctttgtcatcggctacctccagttccgtctggtggagctggtctggatgccctccagcacctgccagatgctcatctctgcctggtg

SEQ ID NO: 68306 - DNA, 122 bp, Homo sapiens
tgagggggcggaacgaggcggggccaccgagcggttatagctgggcctgcaggggacccacggctcgcctccagcctcctgcgctccggtacctgggcgtcccaactccactgcgcgcccaa

SEQ ID NO: 68307 - DNA, 122 bp, Homo sapiens
ggcgtggcctgcgggcacccggtgggtggggaggcctgggttgggttgggctgggtccagcggcagcgcgcggtccgcagaccctgtcccacctcggtcctcgagaccgaagtctcggaggt

SEQ ID NO: 68308 - DNA, 122 bp, Homo sapiens
acatccgtgcatctgtctgtcatggagggccatgtggtcacctgtcccacagctggagcacgcagagcaggcatcatggtgtccatcctcactgttcttctgtgcctcagtcagtggtggag

SEQ ID NO: 68309 - DNA, 122 bp, Homo sapiens
tccttgccaaccccagggtggctcctcagctctcaaacaaggggcgggctgcagggattccgagggcccctccagcaagaggtcccacatgcatctcccaatgggacacttacctggcccac

SEQ ID NO: 68310 - DNA, 122 bp, Homo sapiens
atacaaagagagcacattttcttgtgagcaaagcagatggtgggaagttttcagggaccacgtgtaaagcacccagccccaggtggccgggtcagaactggataaatacttacagctggtcc

SEQ ID NO: 68311 - DNA, 122 bp, Homo sapiens
ggaaggcacgggacttgaacctctccccgactcgcccccaatcgcgttccctcccttcttcgttcttaacagccctgccccaaggctccctgaacggagccagatggaagttgtcccctttc

SEQ ID NO: 68312 - DNA, 122 bp, Homo sapiens
aacgctgcgtacggcggagacgatacgtaaacagcgcctcggaatagcccgagggctccgcggggaactacgggtattcttggaagcactttacgtcagttgcgacgatgggtgtattttgc

SEQ ID NO: 68313 - DNA, 122 bp, Homo sapiens
acctctgccccaacacttagaggaggagttgcgggcctctttttacagtggataggattccgaaggggagagtaaatcagtaaggctccacccatttcacaggaggcctagagaccggcgct

SEQ ID NO: 68314 - DNA, 122 bp, Homo sapiens
gagccgcggcgccggcatttaccttggtattgccggacaaggcctgtccggtaatgtccccgacgcccgcccctcgccctgccccgcgggcttatgggaaatgtagtccgccgttccgccgc

SEQ ID NO: 68315 - DNA, 122 bp, Homo sapiens
agttccctatctactttgcgactataattgcaagcctcattctgtcctgttacagtcgtgcggcaattaggctgagggactggcgcgcccgctcccccgactgtgagcctaggcggcgggtg

SEQ ID NO: 68316 - DNA, 122 bp, Homo sapiens
ggggcgctgaaggggtgcagatctgccgcagcaagaggcgcgtggaggtgggtgggcgagcgtgcaggccccagaacctgactcacgggcacaaaccaggggacaagagcagaggaggagat

SEQ ID NO: 68317 - DNA, 122 bp, Homo sapiens
tcgccgcagccccctccccgccccgagggtggctgggcccggaggaggggcgccccgccccgtccgtgcatccggctccgccccttgctggaaaggctacgtattcagccctggaggtgcca

SEQ ID NO: 68318 - DNA, 122 bp, Homo sapiens
atgactccaaaactcggaatagtcacaatttactaccgggaggtggtgtccgatccttaacgctaaagggaggctgggcgggcggagacagaccccatttttgcagagaccccagacaccgg

SEQ ID NO: 68319 - DNA, 122 bp, Homo sapiens
cccacctgtcggtgacctggggccgcattggtggagtggaggagactgaggccaggtccccggcatcaccggcctcgtcatcacttgcgttctgaatcaggtctacttcttcctcatccccc

SEQ ID NO: 68320 - DNA, 122 bp, Homo sapiens
agaccctgaaaagacctgcacccacccccaaaggggcggggctggtgggcggagaggaggcggggcgcgctccttcagccccgcccaccagccctggactccggctcccgaggagcggagct

SEQ ID NO: 68321 - DNA, 122 bp, Homo sapiens
gtatgtctaatctacttaagaatttgaacccaaagaggtctgttaaacaattggcccattcgtctgaatctttctgaacttttcctgcttgtgcatatcttctgatcacaaaatcttgtcaa

SEQ ID NO: 68322 - DNA, 122 bp, Homo sapiens
gcccatcgtgacatgacaaataagcagtccatgtaccttcgtatgttcacagagagttcccggcaggggatgtggcttctgtggctcaggttagaacccagcctctgtccctgtccgtctgt

SEQ ID NO: 68323 - DNA, 122 bp, Homo sapiens
cttctctaagatatgcccacttaggggcctgtgactcctccagaatgagtgtaccacactcgggacaccagaagcgagaggggacacaggctctgacctcgagagcacgtcagctctggaga

SEQ ID NO: 68324 - DNA, 122 bp, Homo sapiens
ttgggaaggcacaggatgccactgactcagcaccagaagaatgtgtgctttgggttgtttcgccaaccacgggcatgagctgagtgaaagaaggaagtaaaggaagaggtggggcacccact

SEQ ID NO: 68325 - DNA, 122 bp, Homo sapiens
cctggtgggtatcgggggcagcggacgccagagtctggcccgcctggcttcatccatctgcgactacaccaccttccagatcgaggtcaccaaacattatcggaagcaggagttccgagatg

SEQ ID NO: 68326 - DNA, 122 bp, Homo sapiens
cccaggtcaggcggggcgcagtgtctggcaggccaggcatcggaggccaggcacagcatccggtgggcctggagctgggtggggttggcacggtgctgtgtccggcaggccaggggccagtg

SEQ ID NO: 68327 - DNA, 122 bp, Homo sapiens
tgtgagcaaaactttttatggtttacagtcagaggcagtgttgtctaatggttagagtgccggccctgaggccagaatggctgggtttgtgtcctggttctactgcttcctagctgtgtgac

SEQ ID NO: 68328 - DNA, 122 bp, Homo sapiens
ggccacttttactcctggttgaaggcaaaggcgctgacggcagcccaaggctcagggaggcgtggcgtggcgatggtgaggggcggggttaggggcgggattaggattcttgtcccttagcg

SEQ ID NO: 68329 - DNA, 122 bp, Homo sapiens
acgtttcagagattaatttcaaaatatggtttattccgggaggaagcagcatcctaagcacgtgacatttaaagaccaggctataaggaagtgcctctgcccccaggccaggtggcagctgt

SEQ ID NO: 68330 - DNA, 122 bp, Homo sapiens
tagttgggattacaggcgtgcaccaccacacctggctaatcattctatttttagtagagacggagtttcaccatgttagacaggctggtctcatactcctggcctcaagtgatccgtctgcc

SEQ ID NO: 68331 - DNA, 122 bp, Homo sapiens
tatgcattgccaaaaaaatgaaacagtctgtgtatctcatttctcctaggagagtcttgtcgatttttggcattcaatttctttggttgtcttgagacctcagctctctgaggggcttaaga

SEQ ID NO: 68332 - DNA, 122 bp, Homo sapiens
ggagcccccggggatggaggaatgccacaggctcctctgtacacccgccataccctgtcccgcctggccctgcagctgtagggagtgctcaccatcaccatggcagccctccaggagcaggc

SEQ ID NO: 68333 - DNA, 122 bp, Homo sapiens
gtgtcctccacgccccgaacacacggggcgcaggcgcagtttggaactgcgtagaggtgacggcggcgcaggcgcagtttagaactgcggagaggtgatggccgcgcaggcgcagtttggaa

SEQ ID NO: 68334 - DNA, 122 bp, Homo sapiens
gaagaacatcgagagcacatcaaagtgcagcagctcatggccaagggcagtgacaagcgtcggggcggtcctccaggccctcccatcagtgagttccaagctgggattgagaagggagcagt

SEQ ID NO: 68335 - DNA, 122 bp, Homo sapiens
ggctcatttttgtatttttaatagagacagattttcaccatattggtcaggctggtctctcggcctcccaaagtgctcggattacagacgaagaatatttttaagaagggcaaaagcacatg

SEQ ID NO: 68336 - DNA, 122 bp, Homo sapiens
aagtccaaaaaggaagcaaagacgagcatccgaagtctcacccaaaaataactactgctgcgtattatagcgtattataattggggaaacagcattccaaacttctctccatgcacaggtaa

SEQ ID NO: 68337 - DNA, 122 bp, Homo sapiens
acacccacgcgagccggaaacaaccaggagcactattcccggccgggtgggtccagcagccgcgggcttcgccccgccgggactcgcggccgcgcctcctctgtaccacagctcccaaggtc

SEQ ID NO: 68338 - DNA, 122 bp, Homo sapiens
gccatgggccaggagcgtctgtgcgagcctctgagcccagcatctccctgggagcgtgagcgtgagcacccctctgtccgtgctggaactgccccacactcatcagcttgctggaacatgcg

SEQ ID NO: 68339 - DNA, 122 bp, Homo sapiens
ctccacaaacccactctggcctttctaccaggattcttccaagcccaggataggaagcaacggcaggaatgggtactccgaactttcccccaaccccacgtgcttaagaatggccgattata

SEQ ID NO: 68340 - DNA, 122 bp, Homo sapiens
tcctgaccttcctgagccctaggaggaacacacatggatgccgagtgatggtgagggatccgggtgaaactggaggctgtggaaacactggagtggggggtaggggtgctgttacatcggaa

SEQ ID NO: 68341 - DNA, 122 bp, Homo sapiens
tggtggtgttcacagtggcagcggtggcagcatggtggtggcgggggaggtatcaggctccgccagtgtccctgcatgcgtttgcccggcagtggtgttagcacaggggtggggcactggta

SEQ ID NO: 68342 - DNA, 122 bp, Homo sapiens
gctgttgatgccttatggaccagttttgtagtcatttccaggtgggattcaagatgctttcgacccagggggctatagatgtttagggaagcaattctcacactgtggaatgcatacgaatt

SEQ ID NO: 68343 - DNA, 122 bp, Homo sapiens
tccacagcactcatctcaatttgtggttatttgacttttctcctgtccctctgggccgcccgcccccttcgttagaatgtaaactgtgtggagcgcaggcctcgcctgtcttactgtgccct

SEQ ID NO: 68344 - DNA, 122 bp, Homo sapiens
tctttagggtggcggcttcccccgaccccggacccgggaaccggccgccggcgcggggcgcgatctgcactgccggtcccacaggagttaaaccccgaggcagacaaaagggaggccgccgc

SEQ ID NO: 68345 - DNA, 122 bp, Homo sapiens
aaccggaaaacgcttccaatggctgtgtttccggcgacggcgcgggggcagctgggaatccggaatgctgcccgatggccctgggtcctcgctgtggggcaatccgggcttgcagacgaggt

SEQ ID NO: 68346 - DNA, 122 bp, Homo sapiens
agcagctggcggacgcgacccggaggcggtgggggtgcggctgagccatgcccggtggcgcggcctgagcccctccacctgctgcaatcatgaaggacagcggggactccaaggaccagcaa

SEQ ID NO: 68347 - DNA, 122 bp, Homo sapiens
ccctgcctctccatagaacaaccagcctagaagcctagggctcctgctggcctgacccttcgggattcccactatcgtattttgcatttcctgcaatcatccattcaagtgctacacagtcc

SEQ ID NO: 68348 - DNA, 122 bp, Homo sapiens
tttcctgttctcttgtgtctctctgctgtgtctctctctttttctttctgttttttgagacggagtctccctctgtcacccaggctggagtgcagtggtgcgatctcggctcactgcaacct

SEQ ID NO: 68349 - DNA, 122 bp, Homo sapiens
aaaatacttttgcccatcctttgcatctcccctatattctggttccctaatacagagtctcgtaggggtagagagataccattatgttagtgtcagatacacctggctatttaatagttttg

SEQ ID NO: 68350 - DNA, 122 bp, Homo sapiens
ggagaccgcagcagtcagggacatttctgaagcgagcgtcttcgatgtctatgtgcttcccgagctgtatgtaaagctacgttactgtgtgagttgtgcaattcacagcaaagtagtcagga

SEQ ID NO: 68351 - DNA, 122 bp, Homo sapiens
tttattctgtacaaggtttagttataagagatttacatatattgcctcattgatattcaccgctgccctatgggtgggcactatcatttctcccatttttacacatgagtaaactgaagttc

SEQ ID NO: 68352 - DNA, 122 bp, Homo sapiens
gtttagttccacaaacattttatatgtgcctactatgtgccagatacggtgggtgggaggcgctggggacactgagatgagcaggagatggtctcagcttcagggagctcacagcctggggt

SEQ ID NO: 68353 - DNA, 122 bp, Homo sapiens
gcaggcgggccgctgacatcgagaggaaccacggtgctttggtgtgagctcggtttttggcgggggcgctaaagtagggggatccgatattggtttccttggcaggcggggtacccaagtac

SEQ ID NO: 68354 - DNA, 122 bp, Homo sapiens
ctctacccatcccctgatgcccaggtcaccgggagggctgctgggagcctctcctgtccccgccgggcagtgtcactgagtccttgaaatcctcccctgccccgcgggtctctggattggga

SEQ ID NO: 68355 - DNA, 122 bp, Homo sapiens
tgtctaacccttcctcatagctgtgcttgtcagctgccacttggtcatcttggaccaacccgcacagaggatgtatctggtacagtgctgcccttctccgattaacatgagacttgactagt

SEQ ID NO: 68356 - DNA, 122 bp, Homo sapiens
tgatatgacaatgtgtactcctgttctgcccctggggattgtccactcaatgggtgggcacgagaaagagcagatgaggtgtttgtggtaaagcctaagccagtgcagccatccccgtcgcc

SEQ ID NO: 68357 - DNA, 122 bp, Homo sapiens
tagctggacaagttctccaagtccccaccagattagctagacacagagcgccaattggtgcgtttaccaacctttagctagaggcagagtgctgattgttgcatttacaatcctttagctag

SEQ ID NO: 68358 - DNA, 122 bp, Homo sapiens
cagctcttctggaatggaggcgcctttgttttgctgcccaagctggtgtttggccccaggcggtactaaatcccgtcgtctaggagaaagcggaggaccttcacgaacaaggaagatcctgt

SEQ ID NO: 68359 - DNA, 122 bp, Homo sapiens
acgcggaaacctgggtactgcaagtgcccagcgcccgaggggtttgctgtaaaggtgactcggtatgaaagcgcctggcataggccctggctcctgcctcactggaagagtacagtgatcat

SEQ ID NO: 68360 - DNA, 122 bp, Homo sapiens
tattgagagggaaaggagaaccatttcccacattagagctctggtgttgagtattcagtgcgatttgatatattttaattgctattgcactataacaccctttcctttgaaaattctttggg

SEQ ID NO: 68361 - DNA, 122 bp, Homo sapiens
ccctgccctctcagtggctaactccgtaggtgggtctatgtctcaatctccggaatttgccgtggtttgatgaggttgatgccaactccttcttcccacgctgctactgcctgggggctgag

SEQ ID NO: 68362 - DNA, 122 bp, Homo sapiens
gacgggctgtgagccatgtcgctcctggtccctctgatcctagctggacgggctgtgagccgtgtcccgcctggtcccccgaccctggctggacgggctgtgagccgtgtccctcctggtcc

SEQ ID NO: 68363 - DNA, 122 bp, Homo sapiens
ctagcgttgttacgaaacaagaccagcggcatcctgaacagttagctcctttctgaagggcgagtaccaaatgaaaaacgcaccttatcttccgcctaaaaattttaccgaaaaagccagag

SEQ ID NO: 68364 - DNA, 122 bp, Homo sapiens
ggcggcatttactaaacacccccaaggtgcaaggctgcaagagaatcgagcgccgcaaggcgagcttatcttccacacctggtacagtgcccaggacagagaaggtgtttagcaagtttctg

SEQ ID NO: 68365 - DNA, 122 bp, Homo sapiens
tagctcctttacggtttcccactgctgttaggacaaagtctacattctgtcacttggcctcgcttgctcctgccctgtcttcctctgcagcccatctctctccaccctcccttcggcctctg

SEQ ID NO: 68366 - DNA, 122 bp, Homo sapiens
tgcctgggattggtgggggccggcgtgagtgacagacaggggggcgagctgcgcgaccagcggtttgtttttcggagcgttcctgaggtggagaacggtggccggacggagagactgcgggt

SEQ ID NO: 68367 - DNA, 122 bp, Homo sapiens
ataggcaaaatttcctgcaccagcaaactcaaggttttcccctgacgtgatttagccttccggccgcagttcctgctcttccttcccctcaccctttcctgcctgtggggcccgctcaagct

SEQ ID NO: 68368 - DNA, 122 bp, Homo sapiens
cttgaaaaagagttacaactccgtttccatatggtagacagaggaatccctctaaatatgcggcaacggagttgcttctgtttctaagagctgtctataggacctctcctccagtggtgtgc

SEQ ID NO: 68369 - DNA, 122 bp, Homo sapiens
agtgatttgcataatagagatgtttagaaagtgttgggtgaataaataacttaataatgacgatggcccaataaaggcagtgcagagggaaacataatgacctcaggagtaattcagagata

SEQ ID NO: 68370 - DNA, 122 bp, Homo sapiens
ttccgagtggtcgatgtaaggctcagtctgcagtcttctgatttgccctttccaagtggtcggtgtgagtctcagtctgcagtcttctgatgtaccctttccgagtggtcggtgtgagtctc

SEQ ID NO: 68371 - DNA, 122 bp, Homo sapiens
tttcaatcaggtccgccaagtttgtatttaaggaactgtttcagttcataccttccactgcgataggaatcatgtctggtcgcggcaaaggcggaaaaggcttggggaagggtggtgctaag

SEQ ID NO: 68372 - DNA, 122 bp, Homo sapiens
aagcagaggcaacatggcggccttagcaagctatagctgcgagatttgaattactccactcgtagctattgcattcctgacgatggcctctgtggcttcgtgcgattcgcgtccgagctcag

SEQ ID NO: 68373 - DNA, 122 bp, Homo sapiens
caacgttaccccctgcggtccccgtccattgtctgggcgggtggtgagtgaaagggtgaccgcaggcagataacacagccagaacaggaattagtaggtaggcctgggagacacctcagtga

SEQ ID NO: 68374 - DNA, 122 bp, Homo sapiens
tacgaaaaggggttggagtggtacaggtaggaccctgggctccgcgggctggtggagacgcgtgggggagacgcggaggggaagccgcggctttccacgcccttcgagcatccaggcaccgt

SEQ ID NO: 68375 - DNA, 122 bp, Homo sapiens
cctagacaggtcagctggaagggaagacataggtctccataccgagccagaggttcaccgcgaaagaggggccaccgccctgcccccacccagtcccaaccccgcgtcctaaagctcctcct

SEQ ID NO: 68376 - DNA, 122 bp, Homo sapiens
tgccttttttccttcttcccactttttggccccgctgcccccgggcagttcttggagtcccgccctggccactccccgccctatcgcggcggctcccactgcacgactttgttgccacctaa

SEQ ID NO: 68377 - DNA, 122 bp, Homo sapiens
ggagcggcagggtcgcaacccaagagatgaacccccagtggccccgtcacgagctcccaacggaagggatgtcctagtgcagaggcagccaccacgctcgccccctgtactgggaaggccgc

SEQ ID NO: 68378 - DNA, 122 bp, Homo sapiens
caatgatcttcctgaaaactccatcgtcaactatgactcccaggccctaaatatgttagccgatctagcattaagctctgctacttcttccacaccagtatctgaggctagaaatcttcact

SEQ ID NO: 68379 - DNA, 122 bp, Homo sapiens
cagcgcccgaccccctcccacggccgggcgggggacgtccccgaggcgcggggctcgagccgtgctttgtgcgcggcaccccccagcctccggcgcggctcccccacaacctccggcgcggc

SEQ ID NO: 68380 - DNA, 122 bp, Homo sapiens
gtagcccgactccgtgtcgctgctctggcctgacgtgcctgactcgggagtgccccgcggcgtgtcctggcccgagtcctggatccccgggaacacatcgcccacgttctgtgacacgatgc

SEQ ID NO: 68381 - DNA, 122 bp, Homo sapiens
caaggcgtacaaatgccgagcccagcagctttcttgcaatgcccggccttagcagggcgccggactaatgagggtcactcaaaggggctgatcaaatattcaaatttccccgcacgccagga

SEQ ID NO: 68382 - DNA, 122 bp, Homo sapiens
gagttgctggcctttgtcgttctgagtgtaggcatgttccgggcatgtctgcactctatacgacccagggaaatttactaaggtggcatccactgggtacctcatgtgtgtggcacccccag

SEQ ID NO: 68383 - DNA, 122 bp, Homo sapiens
tagctgggattataggcacatgccaccacatcaggctaatttttctatttttaagagagacgggatttcgccatgttggccaggctagtctcgacccacttacctcaaatgatctgcccacc

SEQ ID NO: 68384 - DNA, 122 bp, Homo sapiens
ccgccttggcctcccaaaatgctcacaggtgtgagccacctggcctgccctgtgagccaccggaagctgcctttttccttcttgccacaatccctaagttcaagacctagttctgaagtgat

SEQ ID NO: 68385 - DNA, 122 bp, Homo sapiens
ttcccggcctcgccgactgctgtgaaatcactcagcagccaggcaagcccctaaatctgacgcacagagtgttgaaaggaaggatgtctgttttcataacctacctcagttacaataaatat

SEQ ID NO: 68386 - DNA, 122 bp, Homo sapiens
aaaatataatacagatcatcagggtaaagggttgtgggtggggatgcgcatgggtctgtgcgctgacagcaccgccaaggagaagacccaggtttaagagtggagtcaggtctggccagggt

SEQ ID NO: 68387 - DNA, 122 bp, Homo sapiens
ccacgctctccgcggggccggcagggggcggtgtggaacagggcccgcggcactgagcctcggggcttcccgcagacggtgcagatcctcatcggcctcatccacctaggctttggcagcgt

SEQ ID NO: 68388 - DNA, 122 bp, Homo sapiens
ctgccatcgccttagcaacaggctaacaaacctggctccgcctatcccgggcgcccggggcggggtctcagttaccaggctagtttgagagctcccagtttcaagtcattgaaactattcca

SEQ ID NO: 68389 - DNA, 122 bp, Homo sapiens
ctcttgcaggtggcgagggactccccggtgaacaggtggcacatgacaacctgcaggcagcgagccatgaaggccagcacggcatcgggctggagggtgccgctgcgagagaccaggcacag

SEQ ID NO: 68390 - DNA, 122 bp, Homo sapiens
aaatccaaacacaaccaaactcttaacttttaaagttttttcagtgttcagtaatgttcacgtgtttgttctaacagttacctgtatatttgtatcttcttgtcctttttgcctgaggccca

SEQ ID NO: 68391 - DNA, 122 bp, Homo sapiens
ggtttttccccaggggaagtgaggtcactcagaacagccccaggggccaagccccagagccggggaccaatgagcagactgtgtgtcacaagaagctggcctgtattcctgtcccagggctg

SEQ ID NO: 68392 - DNA, 122 bp, Homo sapiens
gccaggcgtgatggctcacgcctgtaatcccagcacttcgggaggcccagatgggtggatcgcaaggtcaggagtttgagtccaacctggccagcatagtgaaaccccatctctactaaaaa

SEQ ID NO: 68393 - DNA, 122 bp, Homo sapiens
gatgcctgggccaggatgctgcaccagctgtccctctagagtcctcacctccacctgtggcgagggggcggcagagtgctctgagggcgtcgaggtttctgaggcgctctcatcccggctac

SEQ ID NO: 68394 - DNA, 122 bp, Homo sapiens
agagacagagagggactgaggctggagacggcgagagacataagggagccgcgggcggcgcgggtcgggccaccagacggggggcggcagcagaggcggggcggggcggggcgcggcgggac

SEQ ID NO: 68395 - DNA, 122 bp, Homo sapiens
ttcaagtgattcttctgcctcagcctccctagtagctgggattacaggcacgtgccaccacgcccagctaatttattttgtatttttgtatttcactctgttggccaggatgatctcaatct

SEQ ID NO: 68396 - DNA, 122 bp, Homo sapiens
gtagcctgccacacactgctctggcgaggcgtccaaccggggcaaatgcgtacccgggagcgctctcaggatctgcgtctctcaggctggtcggagtccccagcaggcatgttccacagggc

SEQ ID NO: 68397 - DNA, 122 bp, Homo sapiens
gaggagtccacccaggtcggcggggaccccttccctgctgtgtttggggacttcctgggccgggagcgcctgggatccttcggcagcatcacccggcagcaggagggtgagcaccgcacact

SEQ ID NO: 68398 - DNA, 122 bp, Homo sapiens
tgtccagcgccacttcaagatcgtgatgagagggtcgctgctccccaggactggcatcttcgctgctctggggcctagctaaccgttcgacccggtgccagggcgctgagcgggcatggctt

SEQ ID NO: 68399 - DNA, 122 bp, Homo sapiens
ctcgggctgaagtcgcgggtgcgcaatcggggtggggactcgcgagcagggcctgggaagcgccggagtggcggcgggggatgacgtcactgtctgtgagtggccgggcgtggcctgcgcct

SEQ ID NO: 68400 - DNA, 122 bp, Homo sapiens
agcgctgtgtaagtatggcttcgttttcctgtgggcgtcggtcgtggagttggtcccacacgctgtcatgttgggtactagcagtagagaatgaacggcccgtgtgacatggtggtcctcac

SEQ ID NO: 68401 - DNA, 122 bp, Homo sapiens
tgcagcctcggccccgatgcagctgaggggctaagcaccatggtgtcctgactgagcagccgggcaggccctctggacaccggtgcaaagcagcagcccccgccccgtcctctcagagtgct

SEQ ID NO: 68402 - DNA, 122 bp, Homo sapiens
ctccaagcacaccggccataagagtgcgtgtgtccccaacatgaccgaacgaagaagggacgagctctctgaagagatcaacaacttaagagagaaggtcatgaagcagtcggaggagaaca

SEQ ID NO: 68403 - DNA, 122 bp, Homo sapiens
cgccatgttcactgtgggacggtagctgcctctccagccggacgcgatgcctggaggctgcgggcgcggtcctgctgcgtgaagcccgagggaggccatgtctagtgtgggcgccgtcccgg

SEQ ID NO: 68404 - DNA, 122 bp, Homo sapiens
gccacagagagagggctcaagtgcattttccacaccaggggtggctggtgccctctgagccgctgcatcacgatgcttagaatgaaatgcacggcccggccaagagtggcagaaccgcccgg

SEQ ID NO: 68405 - DNA, 122 bp, Homo sapiens
aagagtctgcgaggctgaatgaattggtgcatctcgctgcattggaagcagctgcctcggcgcagacaggaggagggagagacggaggggaaggggaggcgggcagagggagacgctgggga

SEQ ID NO: 68406 - DNA, 122 bp, Homo sapiens
tcccttcccccccccattttccagtccaaataaccatgaaaaattacacttcaatgtcagcgcgacgacaaaggaggcgcgctctctgggagctcagcggatttgcaggggtttttcctttc

SEQ ID NO: 68407 - DNA, 122 bp, Homo sapiens
accgagagaacttacttgtctggggtcatacattgaatctgtgactcaaaaacttccacccggttcaggaaagggtagccaggaggtgcaggtcacttgcgaagccagccgactcagccctg

SEQ ID NO: 68408 - DNA, 122 bp, Homo sapiens
ccttttaatgtcttagtttagttgccaaacctctttgtgatagaggatttcctgagttttcgtcagtaaagtcttgagtgctctagagagaaatagaaggagagaaaaagagggcttcacaa

SEQ ID NO: 68409 - DNA, 122 bp, Homo sapiens
ggctaccctgcacgctctctgtgctgctgataatcgagtgcaggggttcctccttgtcctcggcggtctgcgtgctgaacagtcgtcctgcctgcaagctccaggctgggtttcgcctgggg

SEQ ID NO: 68410 - DNA, 122 bp, Homo sapiens
tctgggctgggctctgtatatccagttttcgtcatccacttccacctgctgcccacaaaccgagagctctccatcactgcgaaacagcctctttgtctgcctggacaaggaggagaaattta

SEQ ID NO: 68411 - DNA, 122 bp, Homo sapiens
ataaaatgggaataataactgtgtaccttgtagggctgtaatgatgcagtgagataatgccgtgaagaacaaggcctggcataagcacatgctcaatagctaggtgctgctaagatgtttat

SEQ ID NO: 68412 - DNA, 122 bp, Homo sapiens
agacgcctctgtctctgtcccccgccgccaccacacagatgcacgtactctcttcacttccgtgtacccagtaaatgcagatcctgatttaaatctgcagcacgctgctttcttcccattgc

SEQ ID NO: 68413 - DNA, 122 bp, Homo sapiens
attagagaatatttttcactattagcttggaagaagatctgcttcaatagcgtatgatatcggaaccctgactttggaggcttcagacatcctgaaatataattcagataatatgaaaagga

SEQ ID NO: 68414 - DNA, 122 bp, Homo sapiens
gaggatgtcaccatgagcaaccccaagactgggcagggggggctctgatgcagcccacggcgaggagggctgcccgtgctgcctaaatgggttcagaaagaaagccgccctctcgcccatgt

SEQ ID NO: 68415 - DNA, 122 bp, Homo sapiens
ccctgaccgctaccggccccagcccggagacgagggccccgggcggacgccgcagagcgccgaggaggctttcctgctggtggcaaccgcctacgagacactcaaggtgaggcctgcgggcg

SEQ ID NO: 68416 - DNA, 122 bp, Homo sapiens
gtttaaaaaaatcatttaaaatagatcaaaagcagaccaaagtatctagaaattagcaaccgaggcagctacagttgtcttcaaggaagtcttatttgctagttctttgtaaattatagggt

SEQ ID NO: 68417 - DNA, 122 bp, Homo sapiens
acagaaaggaggaggcattggaaagcctatggagggcctggcccagtctggcagatccaccgctgttctgcacagctggcaccatgcaacagtgggctcagctgcatgtgcacgattcatgg

SEQ ID NO: 68418 - DNA, 122 bp, Homo sapiens
ccgagcgcggaggggggaccgagccagtgccgtgccctcgggccgcgccaacatgccccgcggcttcctggtgaagcgcagcaagaagtccacgcccgtttcctaccgggtccgcggcggcg

SEQ ID NO: 68419 - DNA, 122 bp, Homo sapiens
gatttcacccaccctctagacccagttttgctgggagtgtgaggccattaaacatgtggacgtcagacagctctgggttccacctgctcctggacccgccagctgtgtgaccttggataagc

SEQ ID NO: 68420 - DNA, 122 bp, Homo sapiens
ccctacgactgcagaccccaggaccagattgcaggtgccctgtccagcagcgcagccattcgtgaagggctcgcagcctggcccggctcaacagctgatgcccccgggaggaggctgtatta

SEQ ID NO: 68421 - DNA, 122 bp, Homo sapiens
atagtctctgtccttttgtgcctggcttatttcacttagtaacatgtcttcaaggctcatcgatgtggcatgtgtcagaatttccttcctttttaaggctgaatctatttattgtatggaca

SEQ ID NO: 68422 - DNA, 122 bp, Homo sapiens
cagccatcctgcttttacagctaaacaaatggctcaacaacggagtgactgtcacattcacgtttctgttggggaaggacaataaaatttaaaaacgtgagcgcggcagccctcccctccgc

SEQ ID NO: 68423 - DNA, 122 bp, Homo sapiens
gctgagtgaaatactgcgggtagggataaaacacacccacgttatttaccaagatgccaacgtctttgtccttcagggcttctcgaattggaaggtagatctcacgaccgctgctgaagtcc

SEQ ID NO: 68424 - DNA, 122 bp, Homo sapiens
gggctcaagtgatcctcctgcctcagcctcccgagtagtgggaccacaggcacctaccaccgtgcgtggctaaatttttaattttttgtggagatggggtattgctatggttgtgaattcct

SEQ ID NO: 68425 - DNA, 122 bp, Homo sapiens
caatcatgatactgctctccacagtggtggctgacatacacagaaacgaataaaacagatcggtgagggtctctgattaaatacaatttccacagcatttgtactgaggaaccctcaagttt

SEQ ID NO: 68426 - DNA, 122 bp, Homo sapiens
tttaatcctccgcattccagccagggttcctgtgacataatgaggcccaaggagggatctcgagtgacttgtcagcagaacccccaaagggattttctatagatagccagggcgtgtctcgg

SEQ ID NO: 68427 - DNA, 122 bp, Homo sapiens
aatcacagccctcccagggagatgcccctccaggcccacctgtccggagaggatcagcctcgctctaacactgaatgccctaaggccactgtgagccctgccccttaagtcagaggagcagg

SEQ ID NO: 68428 - DNA, 122 bp, Homo sapiens
gggggcgggctcatcttgcaggagcgtccacgtattggtggagccgcggacttagagctgcgattcgctgcgcgaaattgccgaaagccctcccgcggagggagaaggggcgggaagaaggg

SEQ ID NO: 68429 - DNA, 122 bp, Homo sapiens
atgggtttgataaaccaaattgtgttacctgtttatagacatagatttctatcagccagacgtgtgcacagcacagcacaaaccatagccacccccgtcgaagtctctttctgtgcatttcc

SEQ ID NO: 68430 - DNA, 122 bp, Homo sapiens
ttgctcagtggtgcagctctggcttccccagcatgctgaatgtctttaaggtcatcagctcgccccttcccagcctgtggtgtcaaatgtcttgccccttgtcaaatgtgcttggatcgatg

SEQ ID NO: 68431 - DNA, 122 bp, Homo sapiens
ctttttcacttttactcttaagaggaactgtgtggagcccatggctcccataaatcctgccggcgggaaggccggcctccccgcgcctgctctgggcctccctccctgcctccctcccgctg

SEQ ID NO: 68432 - DNA, 122 bp, Homo sapiens
gcgcccagcagcggcggatatcgaagatctcgcgtgcgtcgatgctgtcgggaacctgctcgtcctcctcgcctgccgtcacaggccgctccccagagcgctggtagatgagggggttggca

SEQ ID NO: 68433 - DNA, 122 bp, Homo sapiens
agttggcatctgaagtggggcagccttgtgaaactgagcccttaacctgtggggcctgcccgaactccagatgattagtattaggattgaatggagttgttggtattgcagtatgattgtgc

SEQ ID NO: 68434 - DNA, 122 bp, Homo sapiens
gccccaggtggtgtcgggctaggggggcataacggtgccgaaagtccgcacaaagccgtccgctggggtcccgccgcgtccgcgagggaatgactgtgccccctccccttcctgatcctcag

SEQ ID NO: 68435 - DNA, 122 bp, Homo sapiens
ggtagctgggacactgctacccttctcctgttctatgacacgagtcctgggtggactgttcggctgagttgccaccttataaaacttacttctcatcttgtctccttgccaggcaccctggg

SEQ ID NO: 68436 - DNA, 122 bp, Homo sapiens
cactcacacacgcacaacacacacacacgcatgcacacacacatgcacgacacacaggcgcgcgcgcacacacacacaaagtttgaggactgagctggaggcctgtcaatcctggtagcatt

SEQ ID NO: 68437 - DNA, 122 bp, Homo sapiens
ccccgtttccagtctcaccccctccgcaccaggccccgctccccaggccccccggacatacgcgccacgcctgcccgccttaccatgtaccaggtccccaggatgatcgtcccggtgcggac

SEQ ID NO: 68438 - DNA, 122 bp, Homo sapiens
gagcctctgcaggttgaattcttttaatctggctagtgaacggccgggctccccgcccgccgtgctctgcgcctgccgagctcctggccctgcgtgcagcgttttgggcacagtgattcagt

SEQ ID NO: 68439 - DNA, 122 bp, Homo sapiens
ctagcagccggcctgaggagggagggagaatgtgatccggtggaaattatcactatggggcgagacaaggccgagagttgtaagactgaaagagaatcccgactgggagacaggagtcctga

SEQ ID NO: 68440 - DNA, 122 bp, Homo sapiens
gacacggcagtggtggcatcctgtgttcccctaacagcttccacagccacgtcctgtatgcgacggttccaagatctcaattcacctatgagagcagcgtagatctcaccttccacattgag

SEQ ID NO: 68441 - DNA, 122 bp, Homo sapiens
tggcggagtatgaccttttggggacactccatcggaaaaaagggaaggaaggatcagacgcggctgtatacaacttcttaaactcactgtgtgctcaattcccagaagtaaggagggcactg

SEQ ID NO: 68442 - DNA, 122 bp, Homo sapiens
tcgcatcgcggattacgaaacgccgcggagctgaggcagttccgctggctagtgtgtacgcggcgagcttctcccggcgccgcccgctcggctcccatagcgcccgcgacagcggtccggac

SEQ ID NO: 68443 - DNA, 122 bp, Homo sapiens
tccacaagtggtgggcatcttgccacttaactagggtcacagagcttattagatccctaacgctgagtcctagaatcgcaaacacccgtccgttgaacaatcccacatcacttctctccagt

SEQ ID NO: 68444 - DNA, 122 bp, Homo sapiens
gatcttgttaagttgcagattctgattcagtaggtctgggatggagcatgagattgtgcacgtttaaccagttcccgggtgacatcaatgctgcgtgtgaagactgcacttggagtagcaga

SEQ ID NO: 68445 - DNA, 122 bp, Homo sapiens
gcttgaggtttcactgtagtccactgtaccttcattgtcatattccttgctataaaagctcggggccgggctgaccagaccagatgacaaccgatcttcatactcagacattgccatcatgg

SEQ ID NO: 68446 - DNA, 122 bp, Homo sapiens
caaggtcacctgaggccgcctctttgatttgcctgacagagtcacagaagctgaccgctgcgaggcaggggctgcggccttttcccgtggcatgatcaacacctcgcaggaactaattgaat

SEQ ID NO: 68447 - DNA, 122 bp, Homo sapiens
ggctgccgccccgggaagatggcgaggaggagccgccaccgcctcctcctgctgctgctgcgctacctggtggtcgccctgggctgtaagttgctcgggttcctctacccttcctgcctgga

SEQ ID NO: 68448 - DNA, 122 bp, Homo sapiens
taaccacacacagtgcatccagccaatcatcagtctcatgctctatcaaatagttttaatcgtgtgactgggggcactattttaggacaattaggtgaaactgaaccctcagaataagcacg

SEQ ID NO: 68449 - DNA, 122 bp, Homo sapiens
cacaggtacagctgcatatcaccaggcaatacagcaattttgtatatatgcattgtccttcgttatctagtcaactgtgcaaaaaatatagaaagtgtactgggaaaatttatcaactgaga

SEQ ID NO: 68450 - DNA, 122 bp, Homo sapiens
ctccgcgctcagcgggaggaggcgctcggtcccgcttcttacaaccagcggcgctcacggcgggcccggggatcagcatcccgggagcttctcaggaatgcagattcccaggccctcactgc

SEQ ID NO: 68451 - DNA, 122 bp, Homo sapiens
tgaaaccgacctcggcccctcagatgtcaagcctgcttctgagaggatgtctctgactaacgtctctgacaatcacttgtgctgaggagtcccctgtgtccacctatgatggtctgacctgt

SEQ ID NO: 68452 - DNA, 122 bp, Homo sapiens
ccaatgagccaagtaaaaccatggcatatttaagagaaagggccacaggcataatcatggcgggtataaactgaaactgacctagaaatgctgggtcatattcccaatctaccactagatgt

SEQ ID NO: 68453 - DNA, 122 bp, Homo sapiens
cgccgccgcctcggcgcttgcagaacccagaagtgaacagcaggcgacccggaaggtttgcgcgcggctccgcagcgagccagagccggagcccgagcccggagcctgtgccggagccccag

SEQ ID NO: 68454 - DNA, 122 bp, Homo sapiens
tagagatagacaggtaggatacctggcgttggggcacaagctagtctcaggcaattttaacgtatggacaagtgtagccatgacattgtcatcaacgggcatagcaacttgttctcttacta

SEQ ID NO: 68455 - DNA, 122 bp, Homo sapiens
aattgaaagtttgtggcaagcctgcatcaagcaggtctatctgcaacatttttccgaaagcgtgtacctgcttcgtgtctctgcgtcatattttggtaattttcacaatacttcaaatattt

SEQ ID NO: 68456 - DNA, 122 bp, Homo sapiens
acactgcttcccgccgccacctgcctcctcctccagctcccgctgtctccccggcgccggcgccctgggtggccacagtccctccagcctccgcccctcgccgcagtctccagggcgccgga

SEQ ID NO: 68457 - DNA, 122 bp, Homo sapiens
agcccagagacatgccctcccaacgtaaaagccagcactgttgcctcttcccctccaaaccgcttcctcaaagtgtgtacaccttggtaggcttgtcaaacccaactgtaaagatagctggg

SEQ ID NO: 68458 - DNA, 122 bp, Homo sapiens
cagaaaccggccagatgtgttcttcagacctgggggagctggagacagaatccactccagcgggcgcatgtacgggctccctctggacccactgcagtcagatgagggctcagttcccccag

SEQ ID NO: 68459 - DNA, 122 bp, Homo sapiens
tcccctcccagcttgtgcccgctgactgctggcgcactctctcctaggccaacgaggtgacggacagcgcgtacatgggctccgagagcacctacagtgagtgtgagaccttcacggacgag

SEQ ID NO: 68460 - DNA, 122 bp, Homo sapiens
aggagtcgaagcactccagcgccttgttgatgtacctgaactggacgatgatgctgcagccgagcacggccaggagtaccaggcacaggcagagggctctctgactggacgggttgttatgc

SEQ ID NO: 68461 - DNA, 122 bp, Homo sapiens
gcgcgccgtgggggtcccggtgcagctccccgcggtgcagctggctctcctctcgcaggtcgcggttctcctgggtgagctggtccagctggccctccagctcctcgatgcgccgccgctgg

SEQ ID NO: 68462 - DNA, 122 bp, Homo sapiens
gctctgctcgctcctgggatgcgagggctttatgaaggagtgggctagactggcgatgcccgggtgcccctggcaacaccccctggcatagcctgagggggtggggttgggccgcagcccag

SEQ ID NO: 68463 - DNA, 122 bp, Homo sapiens
aagtgggagggagggggccttcccagagtgggccggggggacctgacccgcctggcctcgcgccctacccccacccctggcaagctctcccgcacccgcgaagagcggtgattttccttcag

SEQ ID NO: 68464 - DNA, 122 bp, Homo sapiens
gaacggtagttaggaaaaattttcaagtctccttcggctgcggggtcgcgccattccaggcggtgccaactgggagctccttcacccgccccaggccgagaaacgcgatcccagttggtcag

SEQ ID NO: 68465 - DNA, 122 bp, Homo sapiens
ccgtcactttttctaaatctttgcctagaaatccctcgtgctggactctttcaccctgcacgggggagaagccctcctcccgggagcctgtttggggggcaggcctggccgagtggctccgt

SEQ ID NO: 68466 - DNA, 122 bp, Homo sapiens
gccggtaggatcgccagcaaaggcaagggtagacccagtggcagaagcctccttggtcagcggcaggcaaggttctccctcccttccctagagtggccagctgccctcacagaactagacct

SEQ ID NO: 68467 - DNA, 122 bp, Homo sapiens
ttgtaaagtgaggtgcaaatccatactgaagactataatttcatgtactgctacatcctgcggagtgattaccagataaagtacctcagtggctacataaaagtcatttgcagcaactattc

SEQ ID NO: 68468 - DNA, 122 bp, Homo sapiens
acacagacacacatcaacagtgcagatacttgtgcaaacacaaatgtacaagtccttattcggattcacaagtatggatatatagccacatatacaggtgcgcacacacacacacaaataca

SEQ ID NO: 68469 - DNA, 122 bp, Homo sapiens
ggctgcctataggaactgcccctcctgctcccgcagcactccctccagggccctccccaccgtgggtcaggcagctgtcagatgatagggcctcgtgccatcaacatctacccctgtgccaa

SEQ ID NO: 68470 - DNA, 122 bp, Homo sapiens
ccctccaccttttagatgtgggcggggagggccggggacggaccgcgaggacgccccctgcgctttctaggacctcccctccttccccagcccctgcgcgtcgccgggagagggaaggagcg

SEQ ID NO: 68471 - DNA, 122 bp, Homo sapiens
aggatcacgggggcagaaccaggccggaggacgggcttgggccagctcatctgaggtggccggccaggctggagctggggccctcggtgtgtggccgccctgcgagagccgtgccccactcc

SEQ ID NO: 68472 - DNA, 122 bp, Homo sapiens
agcccgtctgcctctgagactgcggtagtgttttccttctttccttgggagaccagcggtcggcagagattgcccacactctgcatgcctatgtagagggagagatcgaagactgagtgaca

SEQ ID NO: 68473 - DNA, 122 bp, Homo sapiens
tctttcctggtttgactttcatcaaaaattaaacgacagaccataccgacgctttgaaaacgtgactgagctggtgcacaaaacaatggtgcctagaattttgaattgtgcaatgttgtgca

SEQ ID NO: 68474 - DNA, 122 bp, Homo sapiens
cccctcgcgttccggggccgcctgttcctgcgcatcccaaacgccagcgctgcccacccccgctcagtcccaagcaccccgcagaagcaggcaggtgcccacggttactgaaggctcggtga

SEQ ID NO: 68475 - DNA, 122 bp, Homo sapiens
tagatccgacgttggaaactatgctgtcgcgtcacttcccctcaacagagcccgggaaaacgacagcaccaagtgcatcttctctcaccaggcctttactaaatggagaaaccctgtgacgg

SEQ ID NO: 68476 - DNA, 122 bp, Homo sapiens
gcactagcgaacgcgcaattcccttccccagggaagccacgcaggggctttccccgacggcgtctcacagccaagtgagcttgtgaacacggagacggccgaggatccgagacaaggagctc

SEQ ID NO: 68477 - DNA, 122 bp, Homo sapiens
gtgtgtcacggcacaggccctggcccagccccaaggagcccgccgcctggcaggctctgccgcttgggactctgggccctcggcctctaaatcaacccctatccaactgtggggagatgagg

SEQ ID NO: 68478 - DNA, 122 bp, Homo sapiens
ttttttttcctcttaaaggggcaggacttatatccgggattgtggggtgagttgcagcagcggcagctgcacatgtgggtttgtttataagaacaaggttagaaactcgcaggcctccccct

SEQ ID NO: 68479 - DNA, 122 bp, Homo sapiens
agaggctctgcctagcttgtgcttctcttcttgtgactgccttgggtcactcatgtctaccgaggaagagcctccaagtctcaccaggaagactgatgtaaatctaattacattgctaccga

SEQ ID NO: 68480 - DNA, 122 bp, Homo sapiens
ggggccaggccgggcaggggagctcggctgccgctcagggtctcaaggtctgggcgtggccggggtgagctccgccccgccgtgtggtagttcgggccgggctgcgggcggggcgggagcgg

SEQ ID NO: 68481 - DNA, 122 bp, Homo sapiens
cggttagggcgagggtccctgggatcgtcgggtcaggccttgggccaacgtaggcactctcgcagttcctccgccttcaggaaggtctttttggcaggggccctacgggtgcgcgcttcggt

SEQ ID NO: 68482 - DNA, 122 bp, Homo sapiens
gcggcggctgcgcggtctcgggcggaggctccctcggcctgtccagcagctccttccaggcgctcggcggccaccaccgcatctgcagccaggcccgctgcagcccacagcgcccccggcgg

SEQ ID NO: 68483 - DNA, 122 bp, Homo sapiens
gcctgtggccgctgggaggctgcgccatggcccgctccggagagctgcgaggtggctctgcgaggtttggctggagctgggcagcgaggcctgcccacgggtgggagagccgccgacccgtc

SEQ ID NO: 68484 - DNA, 122 bp, Homo sapiens
tgaaacgcagccaagggggggtccccacccctagctgggattcgagtctctggtgcatgacgggcttccgggcacgcacagccgggacattgttccccgcggcctggggacccggggccgca

SEQ ID NO: 68485 - DNA, 122 bp, Homo sapiens
acgcacccagaggagactcctggtcccctgtccggaccccgccccgaccaggtccagccccgcccaacggcaagttaagagccccccagtgccagacgctccagacagactgccactcttgg

SEQ ID NO: 68486 - DNA, 122 bp, Homo sapiens
gggtgcccagtgcgctcagccaagcggcgcccctgcccgctcctggactcgggggtcacgcgggcaccggaaggagctacagtttgtaggttttctgagttgtctctcccttcccagggagc

SEQ ID NO: 68487 - DNA, 122 bp, Homo sapiens
aaaagtatgatttgccttttgcagtcatttacatggggcttctgatgtgaaagctatagacgtagggttttgaaacttacctttaatatgatagacaagcctaagacttgatgtcaatccct

SEQ ID NO: 68488 - DNA, 122 bp, Homo sapiens
gctacaactggcgcttcattgcgctataaactgatgggcgctttatgtgccacaaactgacggatgggcgcttcagtggcgctacaatccagaacgaggagcagcgatataggagctgcaga

SEQ ID NO: 68489 - DNA, 122 bp, Homo sapiens
aggcggttgtctggggcaggcaccgaagttgcgtcgcctccctccctgggagctgtgatacggcacacaaagcgggcacattagcttgctcgcccccaccccccgcccccataaataaataa

SEQ ID NO: 68490 - DNA, 122 bp, Homo sapiens
ttaggttcctgggctgggcagtttctcaccagaagctgcaggatgtcatcaggaacattccgagcactgttgcacacaccccgggcagccgagtgggagaagatcacaggtgcctgtgacac

SEQ ID NO: 68491 - DNA, 122 bp, Homo sapiens
atttgtttttctctgatttgtagttacttcactatctcaagataaaagaatattttacctcggtgagagaggactcaagtttttttgacaatgtcatttgtgatacagccaagggctttata

SEQ ID NO: 68492 - DNA, 122 bp, Homo sapiens
cccagggacgcgcgccgctggcaacccggagcgcgccccgcttcctggttccgcccggcgcgcgctcgctagcccgctgtccctcgcgccccctccgcgaccgcccttgaaggacccggacc

SEQ ID NO: 68493 - DNA, 122 bp, Homo sapiens
ttctcctttccctttttgattctgtcacacagcattctgcatattttatcttccacttaccgagaccaggcttgcttttcatttttgcttctccagttcctacaaattccttacactttgaa

SEQ ID NO: 68494 - DNA, 122 bp, Homo sapiens
acagcgccccctccagcaggccgcgccggccgcccgagggccgcggtgctgcagtgcccccgcccgcagcgccccccaccgccccgcagcggcctcgccccgcagcacccccactaccgccc

SEQ ID NO: 68495 - DNA, 122 bp, Homo sapiens
ttgactggaaaggaatttgtaagtcagagtgagggagactagattttgttgtatttggaccggaccacttccctaaggtctgtcatcatgagttttgatttcttacagttgagctgtgacta

SEQ ID NO: 68496 - DNA, 122 bp, Homo sapiens
cgcggggcacctgcggcgctgaactcaagggttgccgcgcgcccccgccgcgcctcacctcgcctagcccagagcatcctcctccgctgccgcagccgcccaggaagcggctccccatgccc

SEQ ID NO: 68497 - DNA, 122 bp, Homo sapiens
gtgcaagcagccatgcatacatttctgcagtagcttccctatagcttgcaggaaccagagcgggcaataagagccccatcctccaaatactggggatctgtgctctgattgatgatggctgc

SEQ ID NO: 68498 - DNA, 122 bp, Homo sapiens
ctccatcctgatgtgtttctggcctttgtcgacttcctctgtgggtgaggtggggactcccgcaggaggcggggtggccgcaccacctgctttcctcccgccagctgcaccacctcgtgagc

SEQ ID NO: 68499 - DNA, 122 bp, Homo sapiens
agttccacaaatataattaagctactattatgactaagacacagggctgacaactttcctcgccctcagaatacatggttctatcctacgagtgccattcggaaagttcagaagaagaaaag

SEQ ID NO: 68500 - DNA, 122 bp, Homo sapiens
atcttggccgcctgtgggaaggcgcccccgttggtcttgtagaaggaggtggcaaaggagcggtagcgctccatttccgagttgtaatccacaaggctgttcagagccccctcgggcaagtg

SEQ ID NO: 68501 - DNA, 122 bp, Homo sapiens
tacctgcttgctgctgctgggcatgagttgtaggaaagcctgagagaaagaggcaaaagacggccactaagggcaagtgccgatgtttcctcattttgaatttgtctaagcaccaaatatga

SEQ ID NO: 68502 - DNA, 122 bp, Homo sapiens
agccccgccccgcgcgcttcccagcacgcacacctaccgcccccgcatccctaccctgtacgcgcagccacagcactcgcccgcgtccgcattccacaccctaccccgcgcgcacgtccatg

SEQ ID NO: 68503 - DNA, 122 bp, Homo sapiens
agcaaaggaatcttctctccagtcctgcctgtcacttactccggctcacgctgaagcgttcgcgtttacggttccaaaaccaagactgaaaggcagtcttcacatatttattgtttataccc

SEQ ID NO: 68504 - DNA, 122 bp, Homo sapiens
ggttaacatggggaaacccatctctactaaaaatatctctcaaggcagcctcttggtgagcgaaagttctgaggcaacccggtggagggttagagttccccgatgggcaggctttggtttgc

SEQ ID NO: 68505 - DNA, 122 bp, Homo sapiens
ataaaacaagttggaaatccatcttccctccccctttttataattaagtagaataatttgcgtataatggtgttatctcgtccttaaatgtttgggatgattcaccagtgatgccatctaaa

SEQ ID NO: 68506 - DNA, 122 bp, Homo sapiens
agacgtggcaccgggaactcggaggcggggagcggctgggaagtggccgtggtggttggccgcggtggagctagcaggcgggcgggcgggagcgggcgccggagtggagaaaggagccagcg

SEQ ID NO: 68507 - DNA, 122 bp, Homo sapiens
tatctgttcatggtggcactagataccctggacccagccaaccctgtctagaaagacttacgtgtttagagagttccacaaaaactgtcttttatgttgttcttggagctgaaatgggattt

SEQ ID NO: 68508 - DNA, 122 bp, Homo sapiens
acctcccgccttagcaaccaccgagtctcttccagagcctctcgcctcaccccactagctcggccctagcaaccatgccccgcccctattactgacccgcagccattggctaattcgcttga

SEQ ID NO: 68509 - DNA, 122 bp, Homo sapiens
actaaacaaaaggacctggaacaaaggcaaaatttgtcgggctttctcatctatctagtgcgcagagaacaaaaggtctagaattctaatatatgattactgcaaagttaaaataaaagcta

SEQ ID NO: 68510 - DNA, 122 bp, Homo sapiens
ctcgaagtgcctttacgcttaggtagaatttccatgcctccctcgcgctccaccctgctgcgtgaacattttcctggcctgctaaggagggaaagcagctttaaaaggcattaactgtaacc

SEQ ID NO: 68511 - DNA, 122 bp, Homo sapiens
atgcagcgtgactatggtggaagaggacaaaagcctggatggaatcacacgtcaacacggcgataatagcacagggcattcagtgcacgtttctgtgagccttccatcatgcttcgacggct

SEQ ID NO: 68512 - DNA, 122 bp, Homo sapiens
cctgggaggcggcggctgcactggtcccgccgcctgagggaagccaacgggatgttgttacggaaccagcggatccagagcaaccccggaagtgaaagggaactgggggaaaggaggaaaag

SEQ ID NO: 68513 - DNA, 122 bp, Homo sapiens
tacggtgtcttctgtgggttagcagaagctttgtaccacatggcaccaccagggggcattcgcagatcaggttggctgggggattgccttccccttttgcagacccagacttctgaagtaaa

SEQ ID NO: 68514 - DNA, 122 bp, Homo sapiens
acgaaggcaggccccgcccacccgtccgcaagccccgcccatgccccgcccgagcccggccgcggctagaactccccgctccccagctgggctcactgcgcgtcttccgggcaccccgtcct

SEQ ID NO: 68515 - DNA, 122 bp, Homo sapiens
aggaatatcaaagagggtttggagaatgagagagccctttcacttgatgcagcaggttagcgtgatttaaaacatgaatgagggagagacagaagaatgcgagggagtgaggaaagaggagg

SEQ ID NO: 68516 - DNA, 122 bp, Homo sapiens
cctgctgcgcaccaagtccgcttgctgaggagaagggtgtctcacctggcacaagggccccgctccagagtggccgcacccagagcagcttctgtgacacccagaaccccagggtacgtgag

SEQ ID NO: 68517 - DNA, 122 bp, Homo sapiens
cccgaggagccagtcaggtaaaggctttccgggccctggcaccccgagcttggtcaggcccggccttgatcgtagcggaggccaccggggccttttggccgggactgattttgcagctcccg

SEQ ID NO: 68518 - DNA, 122 bp, Homo sapiens
cggggtaggggtcgcacaccatgcggcaggtgcccagcatctcatagtggccttccgggccgcccgagctcaccagcacggggatgagcaccaccagcaccagcagcatcaccacacccgcg

SEQ ID NO: 68519 - DNA, 122 bp, Homo sapiens
caggtgggtgggtccctggaggggacaggccatgctaaagccaccaagcccccaaaagtgcgaaaggatgaacaggagggcggcggggcagagctgggtgccttggagtggggtgggggctg

SEQ ID NO: 68520 - DNA, 122 bp, Homo sapiens
cggggacacgtatgtgcggggagcgcgcccggaaccgtcggggccgagcacggcgtctcacgccagagcagccgcggatcggagcatccgctggtccaggaccccccctcccgcccgccagg

SEQ ID NO: 68521 - DNA, 122 bp, Homo sapiens
cgcggacgcgccgggcaacagctgagctctctcctgtccactattgtgtgtccggaaaaccggaccgcggcggcggacacagccacgggctccctcagaagccggaacgtgacttttttttt

SEQ ID NO: 68522 - DNA, 122 bp, Homo sapiens
tgatcacgcctgtaaagaccctctttccaaataaacccatcttctgaggttgcaggaagacgtggctttggaggacactgtttggctcactgggagggtgtgggctgtggagcagggggacc

SEQ ID NO: 68523 - DNA, 122 bp, Homo sapiens
gccatggtaaagccttcgaagaagctccaaatcttcaggaagctgacctgaagatgaatgcgtggggaacatggatttttgaggtgtaggagtagggggtatgtggaagccagtgacagagc

SEQ ID NO: 68524 - DNA, 122 bp, Homo sapiens
ggagctcccagaatattgaagctcttctctttgcagcaactgaggtctaagtcctaccgacgttagagggatagacgaattgacctttccaggtcctctgctcgccaccagcctacggagcg

SEQ ID NO: 68525 - DNA, 122 bp, Homo sapiens
cgagcccgagcccaggcaggagctttacagacagcctcttcccttcccacttcctgcaggcgccccacgcgtgcgatcctcccggccaagacccgcgggaggaggccgcccccttcccggcg

SEQ ID NO: 68526 - DNA, 122 bp, Homo sapiens
aggaaacagcctgttgacgcaacaatgtgtacaacacgatcccattttgtaagacatgcacgcgtaaggtgcgtgtggatgtaagacgctatgatggctccgggtgagaaatgtattacagg

SEQ ID NO: 68527 - DNA, 122 bp, Homo sapiens
atttgctgttaataaattggcaacacaaggaagggccccatgtccaggctcaggcaggagcggctgcctcaggcagaggcagggcaggcacagctgccccgtgccccaagggatggagggaa

SEQ ID NO: 68528 - DNA, 122 bp, Homo sapiens
aggcacaaagtaggcctgaaataaatgataatagttcacatttcctgagaacttcctaggcgtaaacacccagctaggtattttacatacattattttgtcgaaacctcccaactaccctgt

SEQ ID NO: 68529 - DNA, 122 bp, Homo sapiens
cctgctgagcggcgcggagctaccacgccctgccagactcgcccttgggtccctgtctgacgagctctaggcaatctgccctcgttcgggacacaaccatcggtctcacccctcagtttctg

SEQ ID NO: 68530 - DNA, 122 bp, Homo sapiens
cacttctagtcatcattctctccagtgtgagaccagaccaacaaactgggaggtccattccggcactgagggatgatcaaaatctaactatggggtgattaatcagccatgctttcagagaa

SEQ ID NO: 68531 - DNA, 122 bp, Homo sapiens
gttagtccttccccgaccccgaaacagatgacattgtacaataaaggactttgagaggaccgcgggacagctgtgcgtgcgcccaccacagcccctccccagaccggccacacacgggcggc

SEQ ID NO: 68532 - DNA, 122 bp, Homo sapiens
acctactcagggtccactcaccttgatcttggcagggcccatgtgaatccagggtgagcccgggttagcactcccctgctgtcaaattcgggaggctactttacctctctgagccccttcct

SEQ ID NO: 68533 - DNA, 122 bp, Homo sapiens
cgtgtccgccggggccacgtgtgcgggatgggaatgcttgggccacactggggactaccccgtggccacaccgggggtccagccggctgcggcggggcgctcggacccacaggcgcgcggaa

SEQ ID NO: 68534 - DNA, 122 bp, Homo sapiens
aaagagtctttcaggggctcaaatcattctctgccttgcacttgaaaaggctcatgtccccgtggggactgtgagtcccaatgggcgggaccctggtctgatttctgtgccattcctagaca

SEQ ID NO: 68535 - DNA, 122 bp, Homo sapiens
ctagaaggaagcccaggcagggttgttcagtgggaggtactggctttggaagtagataaacgtcggttcacacaaacctgatctttagcaagacacatctgtgaaataggaataatattaca

SEQ ID NO: 68536 - DNA, 122 bp, Homo sapiens
ccccacccaggcctcagcctcggcccaggctgggcggggcaggtggggaccctccttagacggcccagccctgcccctgccgggttccacttcaggcagcccagtccctgcagggccctccc

SEQ ID NO: 68537 - DNA, 122 bp, Homo sapiens
tctgactcctctgaatttcaaccgactgatttgcggaaaaatatcctggcatggaaattgcggcagctggaggccgcgctccagggacccaccgcggggtgtcagcaggacagaagcactcc

SEQ ID NO: 68538 - DNA, 122 bp, Homo sapiens
cccgccgccagctggcccgggctgcgcgcccccgccgccaccgcgcgccccctgttcgctcgctccttcgctcgccggctttaaagtctctgccaggatccatgctcacatgttacttcctg

SEQ ID NO: 68539 - DNA, 122 bp, Homo sapiens
ttaaaggtttctttaatatcggccagtccaaatattctcttgtcaaatatttctgtggcccgtacttgaaatctgtgaacaggacactttttttttttttaatgtcaaaataaaccatctgc

SEQ ID NO: 68540 - DNA, 122 bp, Homo sapiens
tgaagtttgaaggggtcttggcggccatctcaagcagtctcaggggtcccgaaaggaaagcggaaggggtgggctgcccggccacccccatacctgtatttcatgccagtgcctcggccggt

SEQ ID NO: 68541 - DNA, 122 bp, Homo sapiens
acccgccagacctggtgcgcctggaagaggcggcagctgcagcagcgtagcacccgagaacgctgaagcgacgccatccctgcttgtgcagtcgccaggcagccaagcgcgtgcgctctgca

SEQ ID NO: 68542 - DNA, 122 bp, Homo sapiens
ggaccttccaaggcccgggtctgaggcctccctgtccaggcagccttcccagaccccccccgccagaagggagcacttggtacctgacccttcagttcctgatttgacccagatccggacac

SEQ ID NO: 68543 - DNA, 122 bp, Homo sapiens
gcgcaggcgcaagataagctaggagccgcgcgagtcgtagtgtcgctgtttgcgggtctccgcgcgggaccggggcgcagcggggtcgctgaggcgagggtgtcatgtcagacaacgaggac

SEQ ID NO: 68544 - DNA, 122 bp, Homo sapiens
gtggcagaggctccctagatggaagctgcaattgctcaggccgtgagtccaaacaggactcgcgcttataggcgtggagcggagctggatttctcccttggctaacacagcgggaaggatga

SEQ ID NO: 68545 - DNA, 122 bp, Homo sapiens
ccggaggcagttactcctccccctgctgtacaagcatggacggggttgggcgttcattctcgggaagtacaggctacattatgcaaatcatttcagttaatcctcccaataccgctgtaagg

SEQ ID NO: 68546 - DNA, 122 bp, Homo sapiens
agggagcaacaggtgaagagagacacggagaagtaatgacagctactgctaggcagatgccggcaacagggctcccatgccaggactctgcagtagggccccccatctcagagttcactcca

SEQ ID NO: 68547 - DNA, 122 bp, Homo sapiens
actcgatgacatcacatccacttccgcttccgaaggcggcctcttttcattcctcgggaccgctctaggctgccaccacgccggctggccccaaaaactcgatggttgttgggcggggtcgt

SEQ ID NO: 68548 - DNA, 122 bp, Homo sapiens
gcgttcgcgcccctcgggcgaggaccccacgcaagcccgagccggtcccgaccctggccccgacgctcgccgcccgccccagccctgagggcccctctgcgtgttcacagcggaccttgatt

SEQ ID NO: 68549 - DNA, 122 bp, Homo sapiens
aaataaagtaaaatatatagtgttttaggtggtagtaattcctatgtcaaacaacagcgccgacgaagtagaggggataggaatgcgtgtgtatgcctgtgtgggcacgttcgctacctctg

SEQ ID NO: 68550 - DNA, 122 bp, Homo sapiens
aaggccccttccaggacacgaagggcaaagagagaccttcctaagaggactgcaacccagcggcctgaggggaccagcctccagcaggacccagaagctcccacagtgcccaagaaggggag

SEQ ID NO: 68551 - DNA, 122 bp, Homo sapiens
tgatacctctgctcacgcagtgtggggcacagctggtggcagtgctgctgcgtcaacgggcgggggccgtagcctggtgctcgggctggtctgtggccctgggatggaggacagatagggcc

SEQ ID NO: 68552 - DNA, 122 bp, Homo sapiens
ccttccctcaggcccgggtgctcagaacgctggaggacttgcttttcttgggccttgatgcgaagtgctgaccccgctgggcaggcggggcagctccggcgctcctcggagaccactgcgct

SEQ ID NO: 68553 - DNA, 122 bp, Homo sapiens
cctcttggtaaaccaaaggtggggagctggcaaacgggagctctgctgtctcttgctttgcgatgattctggcagcctgttccgccactccgctctatccagggaataagaggctgtggaac

SEQ ID NO: 68554 - DNA, 122 bp, Homo sapiens
ccgtgacttttctttggtgggaaaaaggtatactttgtagggttaaactgttcccagatgcgctcaaattcttccagaaaaagccgcacgtactcgtcgtcctccgtgatgagaacattctc

SEQ ID NO: 68555 - DNA, 122 bp, Homo sapiens
atacttaatgctcaatatagccattatgactattatgccagttactttgggctcacatgtcgtagcatgaacagttggaccacgtgattgcagggtaaatgggctcaacctgcaatggctgt

SEQ ID NO: 68556 - DNA, 122 bp, Homo sapiens
accgaacgccgcctctgccgtcccctcacttgccccgtgcccccaccgcagggctgaaggcgacggaaccgagcctttgtacccccaccagccccgttccctggcgtctcccggccgccggg

SEQ ID NO: 68557 - DNA, 122 bp, Homo sapiens
cagcctcttcctgctgtgtcaccatctgcgggaggtggtactctagtctcccctaagactcggcttgccacctgcaccagctccctgggcaaaggtcacctgtgttcttaatagagcagaga

SEQ ID NO: 68558 - DNA, 122 bp, Homo sapiens
tgcttagggttccaccctcatgccaagtggcagaggccccgggggaagcctcctgcggaacgtgggaacaaagggatgcggggcctagcactctacgccggtgtctgttcgtctgtccagaa

SEQ ID NO: 68559 - DNA, 122 bp, Homo sapiens
gcccaatttttactggataaagtgtacgtcttgggattgaaaataaccatcggacaggtgcggtggctcacgcctataatcccagcactttgggaggctgaggcagatggatcacctgaggt

SEQ ID NO: 68560 - DNA, 122 bp, Homo sapiens
ggatgccctagggagtgtcagcgtcctcggtcctccctgtggtgatcccttcaacgagtacgcactgagcccgtgatgggccaggtacaatgcacaggctcattcttccaggcccaccagcc

SEQ ID NO: 68561 - DNA, 122 bp, Homo sapiens
gtttccccaaggttttccacagatgagcaaatgggcctagaggtggacaaagggcccagacgtgagcaaaggatggcagcaagcccggacccaagcgacgcggcgaaagcacagcgacccca

SEQ ID NO: 68562 - DNA, 122 bp, Homo sapiens
tccctgctaggcagaggcatttattaagggcttcatacccgaaggccggatgcggggagtcgccctcaccccagccaccctgcgacaacccctggaggtcaccttgcccggggctcggggag

SEQ ID NO: 68563 - DNA, 122 bp, Homo sapiens
tacaggactctcagacactgctgctgggagcagcctctgggtgggtggcggaggctgaggcgatgctgtccaccacacgtggcacgcgggcagccttgactacgcaagcccctggggcacgt

SEQ ID NO: 68564 - DNA, 122 bp, Homo sapiens
ctcctgcagagaggacagaagtcgcaacattgaacactcaccccgccacagtaaccaaggcggtcattaagaggagaaacagcaaactaagcctttctccaacctggggtgatgcaacaggg

SEQ ID NO: 68565 - DNA, 122 bp, Homo sapiens
aaggcgactccgggagcacaggcttctgccctctcctgatgtccctagcagcgccgggcacgcagcagtgctcgctgggtttttgttgcacctttgagaggaaaaggagctcggtgtcccct

SEQ ID NO: 68566 - DNA, 122 bp, Homo sapiens
caaaatttctcgccgggccttagttgccttcccgcagggcagggctcaggacctgcagcccgccatgcctgagcctcccccgcgctccctgggctcctgtgccgcggagcctcccctaagag

SEQ ID NO: 68567 - DNA, 122 bp, Homo sapiens
ggaggaatccaaaccatgccgttgtaccgtctgggtacagagcaaagggtctcgtttttacgtccttccctgagaggctctggagggcggttcaagctccgactccgacccgaaagccccag

SEQ ID NO: 68568 - DNA, 122 bp, Homo sapiens
ccaggtgaacaaactgttgtaaccagcacgtgggtaaaaggcaagttccacatcacccgacgtggaagctccccgatgcccacgtgcgccctaccctgtgaccctctcccatccagggccct

SEQ ID NO: 68569 - DNA, 122 bp, Homo sapiens
actcagaaagctgctgttgctgggctggtttggacatcagcaagcaaaaatgcatcaaaccggttttaactctggaagatagatgtcttaagatccaaagatgatgatgaccgcttttgtca

SEQ ID NO: 68570 - DNA, 122 bp, Homo sapiens
gtcctatttaagccgcgccgccggcgcctttcagcaccactagcgctggccagcaccccgcgctctttgggcggtgcccacggcagcagaggctactgtttcagcctaggtctcagccgcgc

SEQ ID NO: 68571 - DNA, 122 bp, Homo sapiens
gaaaattctgcatttctaacaagccctcaggtgatgttgatactgccggtctagaaaccacgtcctgagaaccatcgtctaaggctagggcaaggactgtggattttaatctaaaagcccac

SEQ ID NO: 68572 - DNA, 122 bp, Homo sapiens
ctgaacgttcaggcgtcattcgcatctgtggcggcttctattttctgccaggtcctttcacgcagctgcatcctcagggctggtcacaagtgggtggcggctcgagctctctccagtctctg

SEQ ID NO: 68573 - DNA, 122 bp, Homo sapiens
ggcagacagggcttgggcagtttctgaatcacgtgggggcagcagactcctggtcatcctcgtctgcctctgcagggcctctcctcaatggagctggctctggtctgggaaagcttggacag

SEQ ID NO: 68574 - DNA, 122 bp, Homo sapiens
aaataattagtgtcataatgttaaactactcttgaatgtgatacctatattttacttattcgttgtacaagtatagactcaaattggatagtaaaggagagtttaataaacaaactatttat

SEQ ID NO: 68575 - DNA, 122 bp, Homo sapiens
ctgcgacaactatcatgctagagtgaagaagggctgagactggggttgggccttccatcgcggaaggaagtcacgggtggaggccaagttgggctgattttcctgctgctgctaagagaaaa

SEQ ID NO: 68576 - DNA, 122 bp, Homo sapiens
agggcagcaggtgtgaggcagagcgggggtggggtgggagcagaacacaggcctccctcccgggccggctgcctctcattgactaagtcactcctgagagggtgcactcacaccccagttgg

SEQ ID NO: 68577 - DNA, 122 bp, Homo sapiens
tggagcagggggcggtgctcatcggggaggcccgggccgcacaggagcccatggagggggcgggaggctcaggcatggcgggctgcaggtcccgagccccgccccgcgggaaggcaactaag

SEQ ID NO: 68578 - DNA, 122 bp, Homo sapiens
ctgtggccttcccaaacaagtcccagcttgctcctgccgccatggggggagcaaatagcccgcaccaaagttcccagaggcaccctccgagcaacctggtctttctcttggggacagggagc

SEQ ID NO: 68579 - DNA, 122 bp, Homo sapiens
tactgtaacatgagctgctgattggttatatattgttctttgtatcacacattccaggaacgtgaagataatgggtgaggcagctagtcaggaacaaaaatgcctttaaagaattgccccca

SEQ ID NO: 68580 - DNA, 122 bp, Homo sapiens
tgggttggccgcacccatgcagggctcctgccccggagctcgcggcgtgcgcagggtcctcgtgctgctattaacgtatttgcccatttgtaaagcacgattttaagggatggtgagttaaa

SEQ ID NO: 68581 - DNA, 122 bp, Homo sapiens
ctgcggtccaagccttctctgcttcctcctacctcgtcttaggcctctgtagaaagtgcacgccgcgtttccccttccaggctctgagagggcctgcaggcccgtggccgcctccgacaaga

SEQ ID NO: 68582 - DNA, 122 bp, Homo sapiens
gaaagatgtgcgggtggtctggcagagagacctgagaaaagatgacagcccctcgctccccggtatgtgtagctatcaggcagccgcttatccccagggatgaggaactgaggccagaagag

SEQ ID NO: 68583 - DNA, 122 bp, Homo sapiens
gtggtattttttctggcaccgctagccgtgaatgtgtatggaaaataaagagtctggaaccgcatgggagactcaggagccagagcccggggtggattccatccctgaacctgcagccctgg

SEQ ID NO: 68584 - DNA, 122 bp, Homo sapiens
cttctggttacgaaattcactttttccagcgcctttttctggccgctccagcgagggagacgccatttgcaagctgcttccggtggctccggaaatgaaactgttcttaaaccctaccggct

SEQ ID NO: 68585 - DNA, 122 bp, Homo sapiens
agtccccttagtaagcgggattccagcccgtaccagagagggacaatcggacagccgtggcggtgggcactctctgggaaagagcagcagctcaggaagacgagccacaacagaactgtggg

SEQ ID NO: 68586 - DNA, 122 bp, Homo sapiens
gtggggggtgggggcggggtgcaggttaagggaggaggcccggagagggagcaggaggggcgcagaccctgttaccggggagatttcagccacccacgcccgctggccttggctcctgcagg

SEQ ID NO: 68587 - DNA, 122 bp, Homo sapiens
gggctgcagtcagacagacacaggttcacatctgggctctggcactccttggctgtgtgacgtgagacaggttgaccttttctgtgccttagtccccgctcctgcaaggtggcatgaaaaca

SEQ ID NO: 68588 - DNA, 122 bp, Homo sapiens
gggagaggagtcggggggccgcgggacgctcaggaagcgaagcggggaaggctccgggcgcgtcgcaggacccgcgctggagatgggtttgaagccctgtcctgaaaaagccggcccggagt

SEQ ID NO: 68589 - DNA, 122 bp, Homo sapiens
ggcggcacagtgggacccccttctataaaccggggttgagatgtggttctgtgcccaaggcgcgggcccctgagggcctcctgcctctggaaataggccccaaggctgcactggggggataa

SEQ ID NO: 68590 - DNA, 122 bp, Homo sapiens
gtatgtgtcctcttcagtggagctgtgaagagttctagttggggatagatctcattctcacgtgctcaggctgcttagaaagctgatcatctcctctttggacacatgaacattatttcttt

SEQ ID NO: 68591 - DNA, 122 bp, Homo sapiens
ccctcaggtaggaggcggcgcgccccggggtcgggagtggaatcgctggaggctgcgagtcgcctgcccgcctgtgggcgcgcccgttgggaggggagcgccccccagcgggcgcgggcgcg

SEQ ID NO: 68592 - DNA, 122 bp, Homo sapiens
gcatttctgggagctgcatgtgggtgacgcagcagcattgttcgcaggcacaggaagccgcggctgagctgaagggctcgagaaggagcccagagcgctgcacgctgctccctctgggtagt

SEQ ID NO: 68593 - DNA, 122 bp, Homo sapiens
ccaatgaccactgaggtctgggaggtgggggtgcaaaagacccactctagggcaaaagtacgaagggctctagaaaaacttgcaaaaggaagactgtgcctttcccaacccgaggggaattt

SEQ ID NO: 68594 - DNA, 122 bp, Homo sapiens
tttgataaacacaggtgcccgccatgaggaagagtcggggtggggcgctaaggccagggacgtcggtgccatcaggtggggaggggtaccccggggccgccctccgcgggcagacgagcggg

SEQ ID NO: 68595 - DNA, 122 bp, Homo sapiens
acgggaacaaagcctgcctcctctctctgcccagagctgtaaatagcactctgctggcttcgcaggctgagcgccggtctggggacaggctgaaaatgcacacaccaaggagcatttgtgca

SEQ ID NO: 68596 - DNA, 122 bp, Homo sapiens
aggctcaaactataaaaattctggaagacaacataggtgataccatcctcgaaataggaacgggcagagattcacctctccctctccctctccctctccctctccctgtccctctccctctc

SEQ ID NO: 68597 - DNA, 122 bp, Homo sapiens
ggtgtcactttgcttgcgaataccatgcttgaacatctctgtgcttcagcctggtggcagcgtgtgtcccagcacgttttattaggctggtgtgagactattagcagtagagtttgcctgga

SEQ ID NO: 68598 - DNA, 122 bp, Homo sapiens
ccagaccgtggggtccccagcagtcctgaccacatgctcgccatggtggaggaagcccgtcgcctccagggatctggccctgaacccctctgtgtccactgcaggttttggaaatgggcttc

SEQ ID NO: 68599 - DNA, 122 bp, Homo sapiens
ttttttaaataatccttcgcaggaatctgaagcacgcgacactcacgggccattcagctccgcctctccagggaacaagaaggttaactgagtaacgtggtcacggagcaaccccgagtcgc

SEQ ID NO: 68600 - DNA, 122 bp, Homo sapiens
tttttgtcgccgcggatttttgcacacccgccgccgtggctttttgcgcccccgccgctgcggctttttggccgccccaggtttttgccaccccgccgctgcggctttttccccgcggtggc

SEQ ID NO: 68601 - DNA, 122 bp, Homo sapiens
cagccaggcgcccctccccccgcgccgtccaccccggaaggaatttcctcctctggcggccgctattgttgtccaccttcgctgtttgggtcggatcgcgtaaccatagtatccaaaccgtg

SEQ ID NO: 68602 - DNA, 122 bp, Homo sapiens
gcaaatccaggattctactttccacaaatccttcaggattctactttctgcaaagtaaaacggcttatttcaacattttcagcagacagaaggaccacccacacaccaaaaaattccttggc

SEQ ID NO: 68603 - DNA, 122 bp, Homo sapiens
aggagctgccacaccacctctcctggctctattacctctggtggcaatctcatccctcctcgaatcgtcaacccttctggccaagggtcgggtacacattcagccaagtgctgtgatggaca

SEQ ID NO: 68604 - DNA, 122 bp, Homo sapiens
tttggccagagacacacctggccctcagggggctgagctggagactgagctggggctggccgggacgtgacaaggcaggacagaggcggcccctccgctgctcctttttggaatgcgagctc

SEQ ID NO: 68605 - DNA, 122 bp, Homo sapiens
tgccagaacttgcctgtggttcatggggtcagctcgtttggtgaacttgcccctgctgaccgaggcgtggacagggaggacgcttgccttgcacgcagaacactgtgcaggtgtgcagggcc

SEQ ID NO: 68606 - DNA, 122 bp, Homo sapiens
acttgtcaatgatcttcatcgcataggcctgcctggtctcgcggtgtctgcactccttcacgacagcaaagttcccatccccaatgacccggccagtctcataatgcttttccacattggcg

SEQ ID NO: 68607 - DNA, 122 bp, Homo sapiens
cgcatcagaatttcaggcatgtggggcattgagctgccatgaaataccagagccatcccccgtgcctgacaggtcccagacgccccagggtccctgctcctgggagggcaaagaggaggagt

SEQ ID NO: 68608 - DNA, 122 bp, Homo sapiens
tctccacagagacccaggctgaggggattgtggagcctaacagactgaaagctttctggacgttggaatgtttttgggaggagcctcaatgccacactgcctgcaccccccgcccccaccac

SEQ ID NO: 68609 - DNA, 122 bp, Homo sapiens
cccgtgtccccatgctctccggcccctcccggcctcgggcgccgggaaatcgggggacggcgggacacccacccgcctcgcaccttcctcagatgcggcatctgcgcccgggggcggccggg

SEQ ID NO: 68610 - DNA, 122 bp, Homo sapiens
ggccgcgtgtccaccggcactggggttggggtctcacaggcggcgcggtctccgttggtgcgggggttgatctcagccttgttctgccgacctcgcgtgcctgtcacctcctccagtcggta

SEQ ID NO: 68611 - DNA, 122 bp, Homo sapiens
cctggtctttgacaccccaggccaggctgccttgtcatgcagatgcccatcccattgtgccgcagctctgtcaccctgtgctggttgccccctgtagagatgccccatgttcttcttgggct

SEQ ID NO: 68612 - DNA, 122 bp, Homo sapiens
tgacacataaaaaggaatctacttttgttttccttgattctggcccaaaaatggggcactcggttgcattccctctgttccttggcccagcatctcacttgtgcaagcaccagcccttccag

SEQ ID NO: 68613 - DNA, 122 bp, Homo sapiens
attcattcatgaatctgacagatgtgtattgcgcccccccctccacgtgctctccctggccggcggccccgtgccaccacccagcctcaccctcattgaagctgacgggtcctgctccaccg

SEQ ID NO: 68614 - DNA, 122 bp, Homo sapiens
gcagtgcccagggcggtggccgtgagtctggtttttgctttaccaagtgtacggaaatggcgtttacgtttctctgatgctcttttgaagccatacaacttaggggctttaaaaaaaaaaag

SEQ ID NO: 68615 - DNA, 122 bp, Homo sapiens
aagaagaaaagctgcaagaaggcaggtcagtcaggaacaccgccatttctcacatctcatcgctacttcgaattttctcatctaaggacccgcacccgcacggttcacactgtcttcttccc

SEQ ID NO: 68616 - DNA, 122 bp, Homo sapiens
gaactggttaattcattggctggcttcccagccctgcatggccaacactcactgtattttcgattgcttaaataaaatcgtggacacttttcttctttcccattcaccttgggcatattgtt

SEQ ID NO: 68617 - DNA, 122 bp, Homo sapiens
catgatcacccagcttggaagcagattccaagttgggtgcagctgggccctcagctgtttcgtaatcctcatgcaagagtgagggtgaggggcctgtggggctcaggtggggctgtcagagc

SEQ ID NO: 68618 - DNA, 122 bp, Homo sapiens
aaggtgctggcagaaagatcacacccagcgcactgctcttaccattggaatcagggctgtcggtccgctccaattgtctggtttcctgaacttattttcaagttcgccattgagagaaacct

SEQ ID NO: 68619 - DNA, 122 bp, Homo sapiens
tgggagtgaccactccatgggggtgcccggcccctgccatccctgacagtgaggctctggcgctgagaccaggcagtttgagaagggcccccttggagccacagcctggcactgggccatat

SEQ ID NO: 68620 - DNA, 122 bp, Homo sapiens
tgggtatcctttagatgctgagaagggttttatggttctgtactagcactgtttgccttacggtgatgtctttgctcctacagaaaggcttaagctcaaccctttggggtattaaaaagaac

SEQ ID NO: 68621 - DNA, 122 bp, Homo sapiens
cagtcactagtgtccttactaaagaaaacagagacatgcagacacacagagagaatgccacgtgaagacagagaaaaaaattggggttacacctctacaagttggcaaatgcaaaagatcgc

SEQ ID NO: 68622 - DNA, 122 bp, Homo sapiens
ccttctgttccagttgctccaatcagagtaatacactgcacagaaagcatacaagatatacgatgtctgtggacagatgctctgtggcattattaaccctggcagttgctttagccgttgtt

SEQ ID NO: 68623 - DNA, 122 bp, Homo sapiens
ggcgttctggccggctagccaagcgctggactacatttcccagaggcacggcgtccggagcgctggactacatttcccagaggcaccgctcccggagcgtagcttcatttccgttagtttgc

SEQ ID NO: 68624 - DNA, 122 bp, Homo sapiens
ccggcctcgcctcaacgtacgtccgggaggcctggcgggaggtagcagcgattcccccaccgcccatgtggcaagtctgggtgaccagcagcgtcggtatgcacagcctcccagtgggtgtg

SEQ ID NO: 68625 - DNA, 122 bp, Homo sapiens
gtcagctcgatgtcacggtcgggtctcagggcatagaaacggaacatgttggccaggtcccgggcaccgggaaagccaagcttttcgtagtcctcaggagtcatctggaagcagaggagcct

SEQ ID NO: 68626 - DNA, 122 bp, Homo sapiens
ggcgaggctcacacgtgctgccaggtgacaaactgcttttgctaagcccacttggtttggcggctccctttaaatgaggccttctcaggaatacaaccccagggaacacatttcactggcct

SEQ ID NO: 68627 - DNA, 122 bp, Homo sapiens
gggggacaccttgggccacaggatactggttgcttcaggggtacccatgccccctgccctcgcctggaatcagtgttactgcatctgattaaatgtctccagaaataaagaataattctgcc

SEQ ID NO: 68628 - DNA, 122 bp, Homo sapiens
ctgccagtgactctcatgtgcattcatgtccctctcttctctctgtcctgtcttctctgccgctgcctcttctctgcaggtacacttgctgaaggaccagttggctgctgaggctgcggcgc

SEQ ID NO: 68629 - DNA, 122 bp, Homo sapiens
caagcaaggtcaacaaattctcaaacccagttgtcattcatccccagacaggtcagaggtcggttcctgaggcattgttgatctcagcagagatgatgtgcagggttgatattcttagattt

SEQ ID NO: 68630 - DNA, 122 bp, Homo sapiens
aggattaggtgtgtccagagcaattccagccggcagaattaggaccagggagagagtttccgggaggcacttttcagcgcagtgtcggtgaaccctaagaaagctgtcctgttgggatcggc

SEQ ID NO: 68631 - DNA, 122 bp, Homo sapiens
gctgcctcacatgcagggcactgggggctacagctggaatgtgctgagtggcagctgccacgtgaatcattatacctcatcaggctgagcctaggacttccagacacaaaccagctcagact

SEQ ID NO: 68632 - DNA, 122 bp, Homo sapiens
gggaagcccacgctggtgtgctcccgcgcggtggggagctggtcatactcgcagcagaggcggcagagggtgtgctctgaggagggcccacctaagacggacctcatggccttcagccccag

SEQ ID NO: 68633 - DNA, 122 bp, Homo sapiens
aaccttacacctgcgcaaaaataagcctccctcataagaaagcccaaagatgtccggggtcggggaggaggaaagtgtctctcatctgtcccatcaacgaaaattagtgaaatctgcctcag

SEQ ID NO: 68634 - DNA, 122 bp, Homo sapiens
accctcgcaggcagccaacggccattctctccccaccacagccaaggcggaaggtccaggcgcttacctttgccgagggaggtggctaggccattcatgaactgtgggaaaggcttgctggg

SEQ ID NO: 68635 - DNA, 122 bp, Homo sapiens
ctctctcgcccccaggccaaaatcctgagcatgatggaagacaataagcagctcgcgctccgcatcgatggggcggtccagtcggccagccaggaggtgaccaacctgcgagccgaactcac

SEQ ID NO: 68636 - DNA, 122 bp, Homo sapiens
tttaacctgatagtcatcattcagaaactaactcgaatcccaacatcattcctggaataacgggacagccgcatagatggggctcacaaggatgtctcccctctcgttcctttccagaggat

SEQ ID NO: 68637 - DNA, 122 bp, Homo sapiens
gtgctcctcggcagccgttgctcggccggttttggtaggcccgggccgccgccaggcctccgcctgagcccgcacccgccatggacaactacgcagatctttcggataccgagctgaccacc

SEQ ID NO: 68638 - DNA, 122 bp, Homo sapiens
gggcttcatcaaaatgtcatggacaggctgagtatgaataatttccagcttagagactttcgaatcctggacacacaagctgagctccctggaggcgtgcatgggtgtgtggacaccccagt

SEQ ID NO: 68639 - DNA, 122 bp, Homo sapiens
tgtggaggaggccgcaacggccggggtgtcagggatccggcggtgagtggctgcactggccgccacgtggccgggaggagaaatgcaaacaaggaaaccggggagagcggggagggggtgag

SEQ ID NO: 68640 - DNA, 122 bp, Homo sapiens
gagtctgcactaggaaactggtgggagccgaggtccggaagtccgacgctggtcggtgggcgcatgcgcagcgcgcgctctacggcgctgaaccggggcgagcagagagctgtcaggtaaga

SEQ ID NO: 68641 - DNA, 122 bp, Homo sapiens
gcctccaactcctcctctagaattttctaacagatttacactcagagcctggtcgccccccgttagcccagattcaaaaggtgaacatctgtttgcagaatctgattcatgagaaggtgagt

SEQ ID NO: 68642 - DNA, 122 bp, Homo sapiens
tagccccgccctccgtctccaaggagccctggaaggagctataccagcggctccagaaggcggggagaggcggggccggactccgggacagccaatgggcgaggagtgccgcccagcctgac

SEQ ID NO: 68643 - DNA, 122 bp, Homo sapiens
gagttcagggctgcactgacttaggaagggagcccgcagagtgcagcggccaccaggggacgctcccagcgtccagcaccccgcccccagccagcctgctctgtccccgccgcccggcccag

SEQ ID NO: 68644 - DNA, 122 bp, Homo sapiens
aggggtggacggcggacacagagcccttggcagcctccaggctcacgtggggcacacctccgactgcaccgcatcccggagagctgcatgctctgctcactgaggtggggctgtgtccgcca

SEQ ID NO: 68645 - DNA, 122 bp, Homo sapiens
gattgagaatcaccgggttagcattgtctgtctattgatttaattcattaattgagacttcgtccttttctctctgatactcatggttcattacccagcctattaacatttcctgccctggc

SEQ ID NO: 68646 - DNA, 122 bp, Homo sapiens
gcagagccggggtgagcacccgtctcctgagcctcccccaacgcagtgccacctgctgtgcgtgctgtgtggccagctctagctggcttgtgcaataccagagcctggcagccggccgggtg

SEQ ID NO: 68647 - DNA, 122 bp, Homo sapiens
tctttcatcttcagcctgtatactaaactgccgtactgcctgatacacagtcatgttatacggcagcaaatgttctccaatataaaactgcagcctgtgtcttacatttcctgaatttagga

SEQ ID NO: 68648 - DNA, 122 bp, Homo sapiens
gttctgggagccgccccaccacgctccacgcgcgagtctctgggtcataggcctctaccacgtccgagagttcaaatgtattgtcgtatcccccagagacgtacagcttccccccaaggacg

SEQ ID NO: 68649 - DNA, 122 bp, Homo sapiens
aagggctttactttcttctcatctgatcgcaagtgagtgaagagaagttactccgagcggcgtccctgaagttttggggttcgaccattcttggcgagaagagcgactttccatcgcaggca

SEQ ID NO: 68650 - DNA, 122 bp, Homo sapiens
cgcccgccgtgcaataatcattgcaccaccgcacacctcccaagggatgggcaacttttccgagcgctgtcacagctgaggtcgtgtcctgagctcccaggcgccccgcggggtaagcagga

SEQ ID NO: 68651 - DNA, 122 bp, Homo sapiens
aagccaaggaggagtcaccagaagccaaaagaagcaaggaacaaaatttctactacagcccggggagaaagtgctacgtttccaacaccttgatttcagagttctggcttcccgaactatga

SEQ ID NO: 68652 - DNA, 122 bp, Homo sapiens
ctgcctgcctcggcctcccaaagtgttgggattataggcgtgagccactggcgcccggcccgctgagggttgtaatctgcacctgtcaccagtgtggtttctgcaacagcagtttcctgttc

SEQ ID NO: 68653 - DNA, 122 bp, Homo sapiens
ctctgttgggcaatggaggtcagtggcaccactgcacaagcccctctggccagcatggcccggggaggggtgtgggtaaaacaaacggtccccacaccagcccggggaggaagggtagctgg

SEQ ID NO: 68654 - DNA, 122 bp, Homo sapiens
ccgtcccgggcccctcactcaccggtctgcctccccgcgctcgggatccgaggaccggagcgaagcgtcagtgacgccgccaacgggcccggatcaggccactgccatctttcttgcgggcg

SEQ ID NO: 68655 - DNA, 122 bp, Homo sapiens
gccggaattgcctcagatgttccaggcagaagcccaggaggcctccaggaaccgccagaccggcaggaggaacgtcgaggtccaaggcacaagtcagaggttcctggtctgcaggggcccaa

SEQ ID NO: 68656 - DNA, 122 bp, Homo sapiens
ctacgcttaggtggaagggggcatcagtgaactggaacggctcagaccccatcctgtgaccgttggatgtgggtaaaccctgtggtccaccactcatcacctcatcaccgaggatgacagct

SEQ ID NO: 68657 - DNA, 122 bp, Homo sapiens
ggactactgacaaaggatgcttgagtacgttttcacttcaagctctacctgtaagtagggcgctcagagaattccagggtaacctcgggaaagtatgggtcaggctaagagtaagtttgcta

SEQ ID NO: 68658 - DNA, 122 bp, Homo sapiens
gctcctctcaccatccaagtttctgcagcagcagtgttaagaaagattccttgccgggcgcggtaggtcacgcctgtaatcccagcactttgggaggcagaggcgggcggatcacttgaggt

SEQ ID NO: 68659 - DNA, 122 bp, Homo sapiens
acacaagcgtggcccagatagtgaggctatcccacccagccaggaagaagcttggccaaacgtggggcactaagagaggcaatttcttggccaagggagccccatcctctccattgcaccac

SEQ ID NO: 68660 - DNA, 122 bp, Homo sapiens
agattaagcacttaaatgacctgcatttcacatacacttgtggattcatactgattctaacgtttggtcacacatgcatatctcagccctgggccatggtttttttattgcctccataccat

SEQ ID NO: 68661 - DNA, 122 bp, Homo sapiens
atcactgtcatcctcctcctcctcctcctcatttgagtgtcatacagcttcttttgcttacggttattattgttttgttttttaatctttattactgtagtgtctatgttgcttatggagaa

SEQ ID NO: 68662 - DNA, 122 bp, Homo sapiens
tgatggaaggtttgggtctgtttgagctctaccctgaatcatgtctctagcaggaaactacgtggaaagttgggaagaatcaagttcatcttagttaacaacctggggaaaatgtcctattg

SEQ ID NO: 68663 - DNA, 122 bp, Homo sapiens
ctcttccctgaggccacgggagatttcatcagaagaatatcagtctattgatatgggtgccggcagcctttctcaacagaataccaaagctacagctcctctgtcccctggctgcctccggg

SEQ ID NO: 68664 - DNA, 122 bp, Homo sapiens
acagcttgggaagctaggctagtactggggtgggggcagcagagctgagaccctccaccccgagcccctagcctgtgctatcctcccagcctgagggggaggagctgaggcaatcctggctg

SEQ ID NO: 68665 - DNA, 122 bp, Homo sapiens
gccccgcagggctgatgcctcacctctcttttcttctttatcccgcaggatccccgggctcgcctagagatgtcctggtcaccaagtccgcctctgaactgacgctgcagtggactgaggga

SEQ ID NO: 68666 - DNA, 122 bp, Homo sapiens
tgtagactgaggactctggggaaaggggagaagacgtgcttgtcctagtattgcctctggcgaaggagcagggatgtttgttaatgtcacagccccaagactgaggttctcaatgcccatct

SEQ ID NO: 68667 - DNA, 122 bp, Homo sapiens
gtttctgtctcgccctcagcaaacccggcagcccgagagctttgaaaacatcgaaatctccgagatttaaaaaataataataaaagaaaggaaaaatcaggctgcggtgggaagaacccgct

SEQ ID NO: 68668 - DNA, 122 bp, Homo sapiens
taacaagatctcagggtccttgtggctctggaaggaaatgattgtgagtgacttgagtttcgtcagatagttgtcagtggagagggactgagatcccaccaaggctagagaggcctgatgcg

SEQ ID NO: 68669 - DNA, 122 bp, Homo sapiens
cctccctcccagatctcagctcactgaataattcattgacttccccatctttccaagatgcgtttctactctgtgagttttacagcattatctattcattgatggattatgatgggaataaa

SEQ ID NO: 68670 - DNA, 122 bp, Homo sapiens
gggtgacggactcacctggaaaatccggtcactcccacccgaatattgcgcttttcagaccggcttaaaaaccggcgcaccacgagattatatccggcacctggctcggagggtcctacgcc

SEQ ID NO: 68671 - DNA, 122 bp, Homo sapiens
aagtgtcacttaaatgagaagtggtctctgaaaataaatgaaaaggtcaagaatagcaaccgggattcaattgttaaaagcctatttgtggttcattaatgctttgaatttagagacttatg

SEQ ID NO: 68672 - DNA, 122 bp, Homo sapiens
gtatagagctggttgaggggtttactcatgaaaggcctctcccaaaaagccatgtagtaacgggcagatttacgtttgaatttaaactctggtgccttgtgttaatatatgagagtgtgtgc

SEQ ID NO: 68673 - DNA, 122 bp, Homo sapiens
cctcgccccctcccaaggtggtagatgtacccagccatgccagtcagtctgccaggtgagcggccaggtggggcggaggtgggcctggaaaggggacgacgacaaggcggcgacgagagagg

SEQ ID NO: 68674 - DNA, 122 bp, Homo sapiens
aatgaatgtatgcatcagtgaatgaatgaataaacaaacaaatgaacaattctcctgtcacgcaggatctgctgaagatggcggctgtaagttcacagagcactgcctaactttggttcata

SEQ ID NO: 68675 - DNA, 122 bp, Homo sapiens
ttcattaaggaaagctgctgaaatctacaggcaccttttaaggagaggacagggacatagcgatgggtgccgtttcactagaaacctgtgcccattcacggccaggcggggagactcagagc

SEQ ID NO: 68676 - DNA, 122 bp, Homo sapiens
aggcatgttgggagtctcacatgagatgctgttgatgagcacctagcagtgtgtctgacacgcaggaagagctcaggaaatgtttggcccctgccctgccttccctgtgcctgtcacacagt

SEQ ID NO: 68677 - DNA, 122 bp, Homo sapiens
agtttcggcggcttccggggacgctctttctttcttctcgctggaagactggaggaccagcgaggggctgtttgtggagccggcgggcgggccgtttgtctctccttcctgcgcctctttgg

SEQ ID NO: 68678 - DNA, 122 bp, Homo sapiens
atatatttattcattgaatacattcttactgagtgccactatgtgtgtgcacagtctgtgcgtagccgtggggatacaatgacgaataagacaagcccattctctgcccttacagagctaac

SEQ ID NO: 68679 - DNA, 122 bp, Homo sapiens
accgacggggtagatgagcttgcccagcgtggcatcatctgtctgcaggatgctgtccaccgtcaggccccgcgcccgcagtcgctgcatggcgcccgccgtcacctggtctttggtttggc

SEQ ID NO: 68680 - DNA, 122 bp, Homo sapiens
ggtgaaagggccgcgacccggcctgggccccacctagactctcaagccccgccccactttcgggcatttttcagttccaggctcacagccaggacggaagccgctgcccccaggcccctccc

SEQ ID NO: 68681 - DNA, 122 bp, Homo sapiens
ccactagactctgcaggtccccatgggaagcgccctgccctccacgcccacctacgaggtcgcgacccccctaccccgaaccgccctctgcagacaacgaggctcggaggaggcaagcagcg

SEQ ID NO: 68682 - DNA, 122 bp, Homo sapiens
tgcgctgtgggtgaagcagcgcccgcactcgctgcagaggtagagttcctcagcagcgtgcgtcttccggtgcgccaggtaccgcctgtgttcactgaagtcctcaccacactctccacaca

SEQ ID NO: 68683 - DNA, 122 bp, Homo sapiens
acaaccagcggttctttctttccttttctagagacagggtcttgctgtgttgcccaggctcgtctggaacttccggcctcgaaattttggcctcaagcattcctcctgtctcatcctcctgg

SEQ ID NO: 68684 - DNA, 122 bp, Homo sapiens
gggctcgggcctcgatggccgcgccgccccgggggagccggagccgagctggccgccgcccgcgcgcactcaccaagcccgctgagctcctcctcgcacgagtaccagatgccggtgtggaa

SEQ ID NO: 68685 - DNA, 122 bp, Homo sapiens
gttaatggggtcactaagccagcaggaagtcagaaagaactcgactcctacagactcaggcggactgctaggaaggcaggggctggcgtgctccatattggccactaggtggcgctgtggac

SEQ ID NO: 68686 - DNA, 122 bp, Homo sapiens
caccactggggcccagcaccagctgtggggacacaagggagaagcaatagcccaggctcccgggcagatgctcaggagccctacagacctcagatcagaatcctgctgctgttttggctcat

SEQ ID NO: 68687 - DNA, 122 bp, Homo sapiens
gcacctttgatttctcccaaacccggcagcccgagactgttgcaaaccggcgccacagggcgcaaaggggatttgtctcttctgaaacctggctgagaaattgggaactccgtgtgggaggc

SEQ ID NO: 68688 - DNA, 122 bp, Homo sapiens
aactgacagagtgtggaaaggattcttaaagaagaaaattctaaaatgggtcctgtatgtcgggttaaaacaattagttagataaagaaatagtatgttaaaactccaatttctttctcaat

SEQ ID NO: 68689 - DNA, 122 bp, Homo sapiens
cggcccctgcggatcgcggcccggtgtcactcggcggcggcggtcgttccgggagcactccgggctccgatctccggtgtcacagcaaagatccgcgtctttccgatgaatccagccaatgc

SEQ ID NO: 68690 - DNA, 122 bp, Homo sapiens
caaaagtggttcaatgcctaaagaggcttcctcggcatttggatgtctggcgccatgtaccgccgcttacccatgactttaggctgcttgttcgttcaggttcaatacgctgtcgagagaga

SEQ ID NO: 68691 - DNA, 122 bp, Homo sapiens
ctcggtgccacgttggatggggggtagaagagggcagggtgacccagccccagggagggtcgctctgtcctcctggctttacttttgagaaggtcatgtggcctccaaggacctgacagcag

SEQ ID NO: 68692 - DNA, 122 bp, Homo sapiens
aggggagtgccccagggcaaggatttctttgggtcttgttctctgagcctgggacaactccgggcacaggaggagttcaacaggcatttgtgattgaatgaatgagtcgggaggagctaaga

SEQ ID NO: 68693 - DNA, 122 bp, Homo sapiens
ggtgaaagtcccggaccttgagacagtcggggagctgatccatgagcaaccatcgcatgccgggtacagccgcaaacaatgtacacagctgcggaattatttttctttcttttttcttttct

SEQ ID NO: 68694 - DNA, 122 bp, Homo sapiens
aatcaccatacagccaattgaggtgacactctgagcagtgacttagtgggattcttttgccgtaggttaactagagtctgaggggcatacagctgtggaaaagatgatttagttaatctgta

SEQ ID NO: 68695 - DNA, 122 bp, Homo sapiens
gaaagcccagatgtccaggaagagtccgcctatcagccaatgaagagacagcagtgagagcggttgcgcagtgaaggctagacccggtttactggaattgctctggcgatcgagggatccta

SEQ ID NO: 68696 - DNA, 122 bp, Homo sapiens
catggggaggatagaattttgtgtatgcaaagtgtgcatagtgctgaatagggcagggatcgggtggaacacacaaaatatttggtgagtgtgcttccctgtgattgagaacactggccaac

SEQ ID NO: 68697 - DNA, 122 bp, Homo sapiens
cgcagcatggctgtggtggacgcgggaaacaacgggaaagttcttgacagagtctgtgtccgctcagtccctgcacttttcctttccaaatgcatctcgttggatatggaatagatcgtaga

SEQ ID NO: 68698 - DNA, 122 bp, Homo sapiens
ttttacttagaacaaataaaaactcttcataagttctctgtgacataagaaagattggcccggtgcggtggctcatgcttgtaatcctagcagtttgggaggccgaggagggcagatcgctt

SEQ ID NO: 68699 - DNA, 122 bp, Homo sapiens
gggtctgctgatcctgcctctccagagtggaccaccaagaatggctcttcccatgtctctcgctcactccttcggcctctgaccgcccggggttccccggcctactgtgcggtgtgctacgc

SEQ ID NO: 68700 - DNA, 122 bp, Homo sapiens
agaggcagggagagagcaccccaggacctccttctccaggccacgcactccctatgtgggcgccttaatacctgctagacctatttgtctgggagctgcaggagccttgcagttgattgtgg

SEQ ID NO: 68701 - DNA, 122 bp, Homo sapiens
ccaggggccctggctcgggtgggccggcggctgtcaggggccagagccctgatggataagcgctgacggcccctctcccgcgccccgcgccgctgacacccatcacgccgcggcggggaccc

SEQ ID NO: 68702 - DNA, 122 bp, Homo sapiens
aggcaaccgagcgagggggtgggtgggactcacagcctaccaaataacagtcccagaaaccgaaacgaaatcgaggtggaattctgaaaacacggctcaccagaaagaggggtggagaagga

SEQ ID NO: 68703 - DNA, 122 bp, Homo sapiens
attagcacctgattcacggaggcagccaaggctgggtagcgactgctggtaactggcccccggagtcgccccaggggaaaaggccaaagggggatctggagacccccggccggggagcgggc

SEQ ID NO: 68704 - DNA, 122 bp, Homo sapiens
ggaactggcagaggaaggtctcgaacccacacccgtgggaactccaagtctttgaaagtccgtcccgcccctgcgtgaagaatgggcgcgcggctggactcgtcaccgggggttttagggaa

SEQ ID NO: 68705 - DNA, 122 bp, Homo sapiens
agttttgttttgcttttccttgaagggggtttaaaataaaatcaaatcctatctgctccccgcacgagccggcagcaggcaccagagacgcagggacctgcgcgtcgcatccagcgccccct

SEQ ID NO: 68706 - DNA, 122 bp, Homo sapiens
accgccctgttttcgcacacaagctcatcagctcccaaagttgccatctaagggcaagttcgcagagaacactgaagcccattttgtccaagcacggcagacctcccctgaccccctcagga

SEQ ID NO: 68707 - DNA, 122 bp, Homo sapiens
cggtggcccccgcagaggcgcgccctgtactctgcgtggtgtttggttccacattgtcgccgacctcactggagatgcgctggaagcacggtgagggccatgggcgcagaacgcacaggcag

SEQ ID NO: 68708 - DNA, 122 bp, Homo sapiens
tgcttctgggggcttgtgtccctttttccctgattcttcccctggcgggggctgttcacacgtgcagtggcctgttagcccttgggaggggagcatgcgcagtgtgtttactgaaatttttc

SEQ ID NO: 68709 - DNA, 122 bp, Homo sapiens
tcttcattggctggggtgtggggttatatgcattggaaggcagggaggcaggcctctgagcgcagcagccccaatcatccactcagacgcccagggtcaccagcacctcggcttgtcttctg

SEQ ID NO: 68710 - DNA, 122 bp, Homo sapiens
catccgtcctcagtggacatagggtggcctccactttctggccattgtgaattgtgctgccgtgaacacctgtgaacccgcttctgggtggactcgtgctgctgtgagcacctgtgaacccg

SEQ ID NO: 68711 - DNA, 122 bp, Homo sapiens
aggcaggtgcggctggggaacttgctgggcgggcgtgggccgggctgtgggctccgaacccgaccttggactagtcctttgcacccactcaggttctggttccttttcctcaccttcatgcg

SEQ ID NO: 68712 - DNA, 122 bp, Homo sapiens
gggacgcggcgtcggggggctgctgcgctgctcggccccagcgggcccgccgcgccgccgcggctctggctgcctcctgcatgccaattaggccctaatttgatttctgttctatctgtgcg

SEQ ID NO: 68713 - DNA, 122 bp, Homo sapiens
caagatgaatgctgaggcagggcctttgaaagcggatttaagtacttttaatattgaaatcgtgcaaattagcaaaagaatcgcacctaaaagtggcctgcgctggcctgcccctcaccgcc

SEQ ID NO: 68714 - DNA, 122 bp, Homo sapiens
tcagcttcattcctgccgcatcatctttactgaaggcaacaaagaagggaaaaaatgcttcgggagttgttccacaggcacaggaaatcttctagaatatcaattgtgagggaaacattcca

SEQ ID NO: 68715 - DNA, 122 bp, Homo sapiens
gtgggcagggacctcgggagggctgtgggggactggacagcgttagggtccaggcagtaacgaggtggccctgggaagcccaaaagaggggctgacaactttctgtccaattatagacttca

SEQ ID NO: 68716 - DNA, 122 bp, Homo sapiens
tgaggggtgtcgggcttgccagaggcccgcttttaatgaactttcccatccaaagttggccgagacaatgccaatcaattggaattgattacttctcgaaatccatgcctcagcttgcagga

SEQ ID NO: 68717 - DNA, 122 bp, Homo sapiens
gaattgaggtggctcttaactagataattagaatcgctggtggtaatcactggcgaaatacgcgtacgtttctgtaggtttagggaccgggcaagtctgggaaatgccacctggtggttctc

SEQ ID NO: 68718 - DNA, 122 bp, Homo sapiens
atgcattctgtccctgcgacaggagtggctgagcagtttgccatcgcggaagccaagctccgagcatggtcttcggtggatggcgaggactccactgatgactcctatgatgaggactttgc

SEQ ID NO: 68719 - DNA, 122 bp, Homo sapiens
taggaccctctgagccaggtgcaggataaaatctcctggtgtgctgttttttaagcctgtcggaaaagcgcagtatttgggtgggagtgacccgattttccaggtgccgtctgtcacccctt

SEQ ID NO: 68720 - DNA, 122 bp, Homo sapiens
cgtgtgcatggacaggagggggctcaccgcgtgtgcacgagcacagagtcctggtagagccggtcatacatgcagatcttcaggtccacgctgggcttcggcacccagaccggcacatcgat

SEQ ID NO: 68721 - DNA, 122 bp, Homo sapiens
gacctagccgcctcctctcccacgccgtcctaggtggtcgcgcgctccgcttcgaccccacggcctttgtgaaagccaaggaaaggaagcagagagagatccagatgaagtcagtgcccctt

SEQ ID NO: 68722 - DNA, 122 bp, Homo sapiens
tacagtaggctccattggaggcatacttctgtctcctgttaataagtcctgtttacagaacggagattcttttttattgtgtttcttttttattaacagtattctgaagtctcaggaaactg

SEQ ID NO: 68723 - DNA, 122 bp, Homo sapiens
agagagccacgggctggtgtgtcaggcagcggagctgacactcccagaaagcaagatcttcgaactacagggtgcgcgcaggctctcgcttctctccaccatggggggccctgcagtactcg

SEQ ID NO: 68724 - DNA, 122 bp, Homo sapiens
gatgagaagtgggagagaatcttatgcctggaggaggggccctgagcccaaaactgcagtcgggagtggtcaacagaaccgagagtgctgccctcctgagattcaggaacacagtgtttgac

SEQ ID NO: 68725 - DNA, 122 bp, Homo sapiens
tctccctgtggcgcactggcatccaccatgcccacctcagaggccaggaggcacgtcagccgggaaggctgcagggaacccccaagcccaggccaccagggccctaccctgccatggggcgc

SEQ ID NO: 68726 - DNA, 122 bp, Homo sapiens
ccttccttgaacaaatctgggccattatctctgccttatccaaggcacgggggccatagtcgtgcgtaaagctaattaaaatctgggtccccgcacgcacgtgataaatgggacaaacagct

SEQ ID NO: 68727 - DNA, 122 bp, Homo sapiens
gccgagggggacctagaaggtcaaagtgcgcctcagcattttctctcgccctgcacaagccgcatttcgccccgagaactacgcttcccggcaggctgcgcgccgcgcggtgacgcacttca

SEQ ID NO: 68728 - DNA, 122 bp, Homo sapiens
gtgaggctgcagagacaggccgggggcggaggtgagcgctcatgggctcagaggccttggcgagggcagggtttggaggttggtgttggcattttgagaagccactggagaggctaacggaa

SEQ ID NO: 68729 - DNA, 122 bp, Homo sapiens
gtgggagctggggaaggcaggcaaccacagtttacaaacgtcaagctcagtttccaggaacgggcgggggacacagagaggaggggttgcgggcctgtgagaatgaagagcacagagcggag

SEQ ID NO: 68730 - DNA, 122 bp, Homo sapiens
tctgtaaactgagaatcataaactccctttgtaggatagtggtgggattaaatgagataacgtatctaaatgtattcccattgaagtcaaataaagtctagagacaaatctctaaagtataa

SEQ ID NO: 68731 - DNA, 122 bp, Homo sapiens
gcccagacggggcagtggtgtgcatgctccagttccccagccccagctggtactgggacacggtgaccaagatctgcgtgttcctcttcgccttcgtggtgcccatcctcatcatcaccgtg

SEQ ID NO: 68732 - DNA, 122 bp, Homo sapiens
ctctcgcaggctctaggcggctagagaggctccagagcgccctgcagatgggttgcttttcgcgtgccccttgtgatgggaggattaggtcgcaggctccaccctacgtcatcctcccaagc

SEQ ID NO: 68733 - DNA, 122 bp, Homo sapiens
cggtggggtccgggcctgcaggcgcgacctgaggccgccagggaggctgggtggcgagggcggggcggctgccgacttagccggcctgactggtcgggcttccggggtcccgctgctcccta

SEQ ID NO: 68734 - DNA, 122 bp, Homo sapiens
caggcctgtgtaactaaaggttctgtgctgccaggctgggcgtttcccccagggaaggcacgagagagcgaatgcagggccggccgcggggcctggggactgtgccgctcagcaccacccac

SEQ ID NO: 68735 - DNA, 122 bp, Homo sapiens
tcgcgccgcgtcgccccccgggccgcctccttgccgccagtggcgggctccgttctccctcgaagcactccccccagctccatgaatggaaatcggctccgcaggtgagtcagagtagctgg

SEQ ID NO: 68736 - DNA, 122 bp, Homo sapiens
tccatgaagagataatcgctgaatgacaaaggctgcagagactccactccaagtgggctccggacaggctggaattggcacggattctgcatacaaatgcaattaccactcttaacaatagg

SEQ ID NO: 68737 - DNA, 122 bp, Homo sapiens
gctcgcttcctcctctacccaggcgcggagctcagcctacctcgtggacccgcgcatttgcgggggcttgaattcccgagcttctcgcttcctacgcgcgcagcagacccgcagctcggtgg

SEQ ID NO: 68738 - DNA, 122 bp, Homo sapiens
tccaacgtggtctttaaacttctgggtccggtgctagtcaaacaggagctgggggaggctcgggccacagtagggaagaggctggactatatcacagctgaaatgtgagtttttattccacc

SEQ ID NO: 68739 - DNA, 122 bp, Homo sapiens
tatcccacgggaaattgaccaggtagcaggagacaaaaacacagccattgtcattaccctcggccaacacttcagaccctttcccatcaacattttcatccgtagggccatcaatattcaaa

SEQ ID NO: 68740 - DNA, 122 bp, Homo sapiens
acggccgcaccgcgggctcctctggcccgcaagaacacgtgcatggcgtcctggggaaggcgctgagtgcggagtcgcggcgccgcacgcggcaccatggccctggagcaggcgctgcaggc

SEQ ID NO: 68741 - DNA, 122 bp, Homo sapiens
tcccagcgggcagagttgaccccgaggccaacagccaggccacagccagcgccctccccacgtctcgcctcccccagtccagacacaaacctggtcaagggcgcccagaccagggctcaacc

SEQ ID NO: 68742 - DNA, 122 bp, Homo sapiens
gtctaccctccccagttcccgccctgctgggggcgaggacagagagcagggggcgcgcggcgctgcccctctcgggcctccggccgacccccacgcccagcagccacacaccctttccccag

SEQ ID NO: 68743 - DNA, 122 bp, Homo sapiens
agtccctctcgggtttcagcagcggcaaatctcagcgagcccaggggcggcgacgagcagcgccacgccaagcggaggagcggggcgtgcggcgagggcgggcgggggccggcgggcgcccg

SEQ ID NO: 68744 - DNA, 122 bp, Homo sapiens
tgtcctccctccctgccccctccccccaccccggctggctccccggcccggctccagctccggtggggagagcctcaaacactgctcgttagtgactttattgctaaacaatttagaaaggc

SEQ ID NO: 68745 - DNA, 122 bp, Homo sapiens
tctcggagcctggacctggcttgggggtatcggagccgggattggggggagcgggccccacgtgcctgtgacgcgggggcgcccggtaggtggcggcggcgacgcggggccggcggccgtgc

SEQ ID NO: 68746 - DNA, 122 bp, Homo sapiens
cctggctgcagcacccccatgggatgccctgggctctgggatgccccaggctctggcatgcgaggctgggcaggcgtgccccttctggctttcccttcctgactcttctaggaagggctgag

SEQ ID NO: 68747 - DNA, 122 bp, Homo sapiens
gggacgcaacgccgcgtcaggccgggggctgacctggaaatgaggccccggcggcggcggcgccaactgttttcaaacagtggcggacaaacagggcttggggctggcccgcacgctgcctg

SEQ ID NO: 68748 - DNA, 122 bp, Homo sapiens
gcattctttatgaattttgttaatggtgcaggtcttgaatggaactctcaaatgatctcacggttttggagtatttcaagaatattgacaaagtagattgagcttttcgtgtgagtgtgcct

SEQ ID NO: 68749 - DNA, 122 bp, Homo sapiens
cctgcccgccgcgagccccttcgcccttggggccgtgaccgggtcccctttcttctcacccgcacactgcccggctcaacatgctgctagtgctggtgctaccgctgatgccgccgatctgc

SEQ ID NO: 68750 - DNA, 122 bp, Homo sapiens
tttcaaattatttaccctgtaaggtataaagggcaactgttattccctgtgttgcagatacggtgacctctgtggagcagagtggtgaagtgacctgctcaggtgtctcaaggttagaattt

SEQ ID NO: 68751 - DNA, 122 bp, Homo sapiens
tctgagcttagccttctgacttgctttgggcaatgacccatgagcagacttccagtacaccgtgtccaaccagtggctcccaaagagctcatcaggtgcagcttgccttccatgccatgaga

SEQ ID NO: 68752 - DNA, 122 bp, Homo sapiens
aatgttaaggtggctgaggcacacagattggctggagtctagacagccaagggtttggcccggtgatctacacatcgcttggtgctgtacaaatgatcacatccgttaaccccttatgccct

SEQ ID NO: 68753 - DNA, 122 bp, Homo sapiens
aggcaggggcggctcctcccggccacaccgacctgcccttcgcagggtgtcccgggccagcggaggcagagaaaaccagcttgcgggaacgcagtcgctcccagcaccagggccgggccagt

SEQ ID NO: 68754 - DNA, 122 bp, Homo sapiens
gtatatctgttttggcaagttgtgggcagctctcttttacttttgtcacccagaggcttccgtagacaaaaggaaaggagagaggtgtgttcaaagacccccatggcgaagagcccatcccc

SEQ ID NO: 68755 - DNA, 122 bp, Homo sapiens
tgcacggtgaccgcctaggcatggggctcggcgtttgggacccccaagacgtcctagaaccgcagagaaggcactgtgcctgcactccagggcctcagcccccagtgacaacctcccaaccc

SEQ ID NO: 68756 - DNA, 122 bp, Homo sapiens
cactccaatctctcctgagcctccctcggccacctcccaggatgcatcacgtgctcgcctcgtgacatgcgcccaggtgctcgcttgctcagatatgcgccctgttcctgcctcaggatgcg

SEQ ID NO: 68757 - DNA, 122 bp, Homo sapiens
agtggcgcctgttttggcgatgtgagtggcgctgggtgtaggcctctgaatctgccggtgcgtggtggcaagagcaggtcaatcacagggtgatcttacgtcttcccgggggtcgtgaatcg

SEQ ID NO: 68758 - DNA, 122 bp, Homo sapiens
gagggtatatcacgaggtcaggagtctcgaactcctggcctggccaacacgatgaaacctcgtgtctactaaaaatacaaaaattaaccgggtgtggtggtgcactcctgtagtcccagcta

SEQ ID NO: 68759 - DNA, 122 bp, Homo sapiens
catcagaaagctgagagaaatctgggacccaggagccagtccagagattttcaaggtcatcgggaggtgatgctacatgttaccaaacacggacatgagtttacagactaaaaacctgattt

SEQ ID NO: 68760 - DNA, 122 bp, Homo sapiens
acccggttcccccacccccacccccacatctgaaccctggggctgggcaaggtaacgctgcgggcagagcctccagttccttcataagggcctctctagaaagggaggcgctgggggggacc

SEQ ID NO: 68761 - DNA, 122 bp, Homo sapiens
cgagaggtcgagggcgacctgggcacgcttcagtggaccgagggccgcattcccaggccgcgattcctcccagaggtagaacacacctaggagagaagggaaggagggacttgggcagggtg

SEQ ID NO: 68762 - DNA, 122 bp, Homo sapiens
agaaacgggctaaaaaacatacagctattaaatgggagccactaagtagaaagccaaacacgtgaaaaaaaatggaataagattacaaatgggatagcacatagaagaagggaatgacattg

SEQ ID NO: 68763 - DNA, 122 bp, Homo sapiens
ggagttcatactggggcttgatcccagcccacacctttcctacaggctttctttccagcccgggccagcccaggaaattcagaaatctgtgggaccctctgagggttctgctagaccaggtt

SEQ ID NO: 68764 - DNA, 122 bp, Homo sapiens
cagtggcggactcggagcccagtagaagccccagccacctgagctggatgaggtttcaggcgttgcaagtggtggacagcgcccagccgaggccggaaaagtcgatggggctcagttcggcg

SEQ ID NO: 68765 - DNA, 122 bp, Homo sapiens
gccccagtgggccgcctcggagtcgggtgggtcttccatcccggaggtaagggaaacacacggtagagaaggccagggctgaaccccaagggacggtcttgtgtgttcagaggctggtttta

SEQ ID NO: 68766 - DNA, 122 bp, Homo sapiens
ctcagattcaaacaggcttgagtgacaacttgaggacaaggacactttgccaagattttacgcagcggctggcagggccagagaggcagcatggtgtggcaggagaatgaggacctgcgcaa

SEQ ID NO: 68767 - DNA, 122 bp, Homo sapiens
ggagcagttcctcttccttggctgcggcagggctgcttgggccggaaaactaacttgtgtcggcgcccggccgccccgcgccggctgccggctagctcaggccgacgccgaggggagcggcg

SEQ ID NO: 68768 - DNA, 122 bp, Homo sapiens
ccttcccatcagcagcttaacctcggggtatctcttggacaggccggctttgtctccagccgaggtcagcagcagtcagatgcgggatgaatgcctggcccaggcggcccccactcaccgcc

SEQ ID NO: 68769 - DNA, 122 bp, Homo sapiens
gattttctgagctggtgaacacactgaggggctgggaggttggcactcccagagacatcacggaagctccttcccccataccttgccctatgcatctctttttatctttttttgtctgttcc

SEQ ID NO: 68770 - DNA, 122 bp, Homo sapiens
ctcctttccaaccctctgaagtcaggcaggccctctcagaggttcctgaacccaagtggacgtaggattccatgtcctgaaagcgcccaccctcacagcacccggctcctgtgggcgccaga

SEQ ID NO: 68771 - DNA, 122 bp, Homo sapiens
cgtgagaccccgaatgacacctcaacggctggcccctacttgtgccaaaaagtctctcggcgggtgccaggcagggctcaggaagtgctcggctgccccttgaacgtcagtcccggcagagc

SEQ ID NO: 68772 - DNA, 122 bp, Homo sapiens
tggagaagtcagggaggcatctcaggtgtgaataaccttcccattctgtcccctcagttccgatgcctcaaccgctcagccgccggaatcgcagccactgccggcttcacagacgcctgcct

SEQ ID NO: 68773 - DNA, 122 bp, Homo sapiens
aggccttgagcgctgtggttctgcagaacgctgtctgtctcttgtggaggaactgacacccgctggagaaagtgtggagggaagcgagggctgcacctgcacgcaggagctgaggcaagcgg

SEQ ID NO: 68774 - DNA, 122 bp, Homo sapiens
ttcacctgacccccatgctcggccttctggaagatgcccacagacactggcaataatggacgctggcacactctgccggcgcggccggagccccggagttcagcacctcggacagagcccga

SEQ ID NO: 68775 - DNA, 122 bp, Homo sapiens
gcaccaagaaccggcccgggttatagggggcgccaataaatctttctggaacggagcccccgctctgtccgggtccccgcatgaagcctcagtttccagcgaccgcgctgctgccagcctgg

SEQ ID NO: 68776 - DNA, 122 bp, Homo sapiens
tttattaaacgctctcaacagtctattaggatggcatggtgattgccccctttctgaggacgcggaaacttgagatttggcgaggcaagaagccaggcgcacacagctaggcgggccgcggg

SEQ ID NO: 68777 - DNA, 122 bp, Homo sapiens
ccgccgctcgcggtccagggctcctggtttctccactgggctgggggcccggagcatggacgtcgtgaggcggagaaaaccttgggatgggtggaaaagaaggatcggagagagggcgggag

SEQ ID NO: 68778 - DNA, 122 bp, Homo sapiens
cgggagctgcttcttgatctggccaagagaagcatcttggacaagctgcacctcacccagcgcccaacactgaaccgccctgtgtccagagctgctttgaggactgcactgcagcacctcca

SEQ ID NO: 68779 - DNA, 122 bp, Homo sapiens
gcaaaacacttggacgggatggccctgagcctcaattttcccctgtcacgggttggttagcgtttatggagcccttactcggtgcctggcgctgcacagagtgctgtgctcaagttatctcc

SEQ ID NO: 68780 - DNA, 122 bp, Homo sapiens
cggctgcggaaaaaaaaaagcggggagaaagtagggcccggctactagcggttttacgggcgcacgtagctcaggcctcaagaccttgggctgggactggctgagcctggcgggaggcgggg

SEQ ID NO: 68781 - DNA, 122 bp, Homo sapiens
aatttttttccttgcatttttaatctctgccatgccaagaacacgtgaggaggtaacaagcgaagggaggggtagctttgcccgggggcagacctggcgtgaaccgggcatcctcgattcct

SEQ ID NO: 68782 - DNA, 122 bp, Homo sapiens
gggtcctctgacaggggcaaggatttgggcctttggagaaccgatccttacgcaggaggccgcaaatgggctttgcaggggcaatcaggagactggacaagggcaaaagaagagcagccttt

SEQ ID NO: 68783 - DNA, 122 bp, Homo sapiens
gtgagactctgtctcaaaaaaaagttaaacacaaatttaacttaaaaattaaccgccaggcgtggtggctcacgcctgtaatcccagcactttgggaggccgagacaggcgaatcacctgag

SEQ ID NO: 68784 - DNA, 122 bp, Homo sapiens
ctcagcatcatcggcgacatcaacatgaacaccatcagcacagctacgggggcccgtggacgactcctagttgcaggtacagagcgtcccggctggacccaggtaccagggctggcccccac

SEQ ID NO: 68785 - DNA, 122 bp, Homo sapiens
atcactgcacacaaggttccagcagagcccgaggaccagaggccagcacacacctggtcacgtcattgtcacaagttaggcagtgccccaccccaccaccaccgtgtcctttatgccaggtc

SEQ ID NO: 68786 - DNA, 122 bp, Homo sapiens
cttggtcccataggaaaagggggatggggcctgtctggcccaatgtgaccaccttgcctccgggaaatgagcactagcttgggtagggctgcggtgagtcattctgattcctccgcacccac

SEQ ID NO: 68787 - DNA, 122 bp, Homo sapiens
cgctccgtggcgtcccgagccagctgtttcctgcgggagagcgtgcccggggcgggagggcgctggccgccgcctcgttggcctcccggtgcctgcgctggtgcccggctccccgcggagcg

SEQ ID NO: 68788 - DNA, 122 bp, Homo sapiens
gagttcgagaccagcctggcctacatggcgaaaccctgtctaataaaaatacaaaacagccgtgcgtggtggcacgcccctgaaatctcagctactcgggacgctgaggcccgagagttact

SEQ ID NO: 68789 - DNA, 122 bp, Homo sapiens
cccatctggccgctgctcatccaggaaggtcggagatgtcgggccctcccacctgggtcacgcgctaggcatgcctgagagcaaaggccacgccccgacaccccacggggccctggcgcgcc

SEQ ID NO: 68790 - DNA, 122 bp, Homo sapiens
ggaggttgggctcgcgtgtttctctgcgctgtggtcgtcatggaccggaagcgtgtgcagcgcgcctgccttgaggccagcatcagggaagggtgttcccaggtgcagaggaagtgtccttc

SEQ ID NO: 68791 - DNA, 122 bp, Homo sapiens
gagtctatgttctgacctccttatgccccacttttctcttccgtaacctggaaatcatgacggtttttaccttccagcattgtgaagattacttgagataacgaacacaaatatttacgaaa

SEQ ID NO: 68792 - DNA, 122 bp, Homo sapiens
gtattaaaaaggtgtgatccccttgcttttagatttgagcagatggcccatggtttgaggcggttgcctccgcaggctcggcctttaccttcagcaccaaggccagcgcacctggctccacg

SEQ ID NO: 68793 - DNA, 122 bp, Homo sapiens
gccccggcgcattcctaggagacagagccgtgagggcctctggctgcaactcgcgagggtcggctttccctgggtctccgccctacgggagacagtgaaggcgggagcaaggccccaaccga

SEQ ID NO: 68794 - DNA, 122 bp, Homo sapiens
gccgctccacacacctacccggggggaacgtgtgcctgggccgctggagtcgcgaatggccggttattcacacgttcaagtacccaaggcaggcggccctgcaggcgtcgtcgcgggttctt

SEQ ID NO: 68795 - DNA, 122 bp, Homo sapiens
aaaaagatcaacaagcagaacttgatcctccgcaaccagatccagcaggcctttgtggagcgcgatatcctcaccttcgccgagaacccgtttgtggtcggcatgttctgctcctttgagac

SEQ ID NO: 68796 - DNA, 122 bp, Homo sapiens
accttgccacctgggcacccccttgggcgtcccttaggcacctctgacactgaccctgaccgccctggcagcacgggccctcccagcagccttgccaaggggccagctccagcaagtgggca

SEQ ID NO: 68797 - DNA, 122 bp, Homo sapiens
ctcgtggtgcgctgttttttaagccggtctgaaaagtgcaatattcaggtgggagtgacccgattttccaggtgcctccgtcacccctttctttgactcggaaagggaactccctgacccct

SEQ ID NO: 68798 - DNA, 122 bp, Homo sapiens
cagccggcggcgctatgtgcggggccgctttttgggcaagggcggctttgccaagtgcttcgagatctcggacgcggacaccaaggaggtgttcgcgggcaagattgtgcctaagtctctgc

SEQ ID NO: 68799 - DNA, 122 bp, Homo sapiens
gaagcccagtgtcatggttagtgaggaaaattataaaaattaaactgtctctataaaatgcgcagccactactactgtcagttgatattgccagagaaaatgctagtgtggtcagatctgac

SEQ ID NO: 68800 - DNA, 122 bp, Homo sapiens
gaaaactcgctgtggggagggacgtgaggcttcggcaccaggaacccctgcgggctaagacggtgttggccaatcacatccagtcactctcctgggaaagtcacttttatggagacagcccc

SEQ ID NO: 68801 - DNA, 122 bp, Homo sapiens
tgcgctttttctctgggtttgccggttctggacctctcgtgggaacagagttgctccatgcgctatccttccatctggctccttccacttcacgtcatggctttgagactcctccacgtggt

SEQ ID NO: 68802 - DNA, 122 bp, Homo sapiens
gaactcctgaggcaaatacagcacagtgcaatgcaaaggggatgggatttggaaaccaagcgaggactgaagcctcagctctgacagtcactaattacaggacactgtatagttttcttgac

SEQ ID NO: 68803 - DNA, 122 bp, Homo sapiens
gcggcgctggcacaagtcacgcctgctgcaggcttcaggaggcggcttgacaggtgtgtccggctcgcactttgtgggcgtggacggggttcgggctttcctgcagacctattcccacgagg

SEQ ID NO: 68804 - DNA, 122 bp, Homo sapiens
ttagggagatgtaaaacttcaatcaatacatgtaagatgtacattggtttggtctggaaacgcggggcaacttgtagggagagggatgtcctaggtcataggcagattcaaagattgcctga

SEQ ID NO: 68805 - DNA, 122 bp, Homo sapiens
gcagccgcctctaggctaggtggccacgagttgcgtgcgagagcgagggctgcgcatgtgcgaggcgtgcgtggtgcgtgtgtggcgccgcgggcttccgctccgacgtggggatcactaga

SEQ ID NO: 68806 - DNA, 122 bp, Homo sapiens
ctcaggagcctccatcctgtaccaatggccagagagccggggggtgacagacaggggggccggcagccgagccaggcaggacgctgcgcgccgcgttactggagccggtgtcccggcaaccc

SEQ ID NO: 68807 - DNA, 122 bp, Homo sapiens
agtgttttcaaatggagcagaatgcttctgctctggctgaatccaatgagaggcacagaacgacacccaccttaagctgcaggcctcctgggacaagcgtgtttgctggaaggcttttaatg

SEQ ID NO: 68808 - DNA, 122 bp, Homo sapiens
cggaggacggcgaggaggcggagttccacttcgcggcgctctatataagtgggcagtggccgcgactgcgcgcagacactgaccttcagcgcctcggctccagcgccatggcgccctccagg

SEQ ID NO: 68809 - DNA, 122 bp, Homo sapiens
cttccacggatgggaagagcaaaagctacaagacttcttgagccccaggcttggaacggacgcaccttcccttccaccgcattctcttcatcaaagtaagtgacaaggtgggccaaacacaa

SEQ ID NO: 68810 - DNA, 122 bp, Homo sapiens
tctttgaagcttcagaagttccctagagtggaagagcagaccaggggcctgccatccttgcgtgctcaccacctcctcacagggcctaggggcaggggaacttggctggctgcccatgagcc

SEQ ID NO: 68811 - DNA, 122 bp, Homo sapiens
gctgcgctctggagtcgtgctctgggacagatgggcaagctccgctcttggggccggaagcgtgtagcgtctccacccgggctccaatccccagcctcgcactcagcaccaggcagagttca

SEQ ID NO: 68812 - DNA, 122 bp, Homo sapiens
ccccctggggcccctggctgccgagtcccgctaaggcaaagacgccagcaagcgaggaagcgcagcggaagaaaaacaagcgggcgcgcgaggggagccccaggagggctgccgagtggctg

SEQ ID NO: 68813 - DNA, 122 bp, Homo sapiens
ccctgagaccccggcgggggagcctaataatggcaggtaacagtcagcacttgccacgcgcgaggcatgttctcagtgtgtgtcttgtgtcatttctgtgatgcttgcacatcgtcaggggg

SEQ ID NO: 68814 - DNA, 122 bp, Homo sapiens
gtgacctgaccaaggggagcagatagctctcccctggacagagaaaagtccgtgcaatttcgagacctgttttcacagttgacatttggtaatccaaatgagagtgtgtttcagatcgaagc

SEQ ID NO: 68815 - DNA, 122 bp, Homo sapiens
ggaccggattttcctctgcaaactagaaaatggattggactagtactgcgtgcatcaggacgaattactgaagtcttagaggaggctagtgtctccaggcagggtatggttttattcagaag

SEQ ID NO: 68816 - DNA, 122 bp, Homo sapiens
cccgggcctggcactagacgagtggctgccacacctcgaacttggctggcataaactgctcggcttgtgggaggcgcgcagggaggcgctggtccaggcgcacatctaccagctcttcctgc

SEQ ID NO: 68817 - DNA, 122 bp, Homo sapiens
ctcctagacaaacatccgcacatcacctctgccaagtcttctgtcctgcgaaacctcagccgcccacccctgccatcagagggacctcactgtcccaggactggggggggcctctggtgtct

SEQ ID NO: 68818 - DNA, 122 bp, Homo sapiens
gcattgcgctgtagccgccgctgcccgggcccgggcagtcctcctgggggccgccgcccgcgcgcagctccagctccagctcctcctgaggccgctcctgctgcagttgccggcggaactcc

SEQ ID NO: 68819 - DNA, 122 bp, Homo sapiens
gggcggcccgcggccgggcccccgggtaggggtgggaggtggagggggccgcggggggcccggccgccgccattaactccggaattaggtctaagccgcccaccacccagccactgccccgg

SEQ ID NO: 68820 - DNA, 122 bp, Homo sapiens
ccttggatgggcgggtggcaccaggaagggtagatggagctttctagaggtcaatgtcagcgtactttctgctgaaacaattgaaggaggaaaaaaaaaaagtatgtgctttgtggttccct

SEQ ID NO: 68821 - DNA, 122 bp, Homo sapiens
acataccttctcctgcgccttcttcttggactcctcgtccatccagcccagctcgtccagcgtctccacaaacactgtccgcaccttgtcaatgagttctctgacctgggaatcgggcatgg

SEQ ID NO: 68822 - DNA, 122 bp, Homo sapiens
attcccccttataaatagatgtcaggatacaggatatagaaggatcttcttcatgatcttcgtgctcatgaatttaaaaaaatattattgtaaaagaatcaagggcaggatgaataaatcag

SEQ ID NO: 68823 - DNA, 122 bp, Homo sapiens
atctcggctcactgcaacttccgcctcccgggttccagcaattctcctgtctcagcctcccgactagctgggactacagacacctgccaccgggcccggctaattttttgtatttttagtag

SEQ ID NO: 68824 - DNA, 122 bp, Homo sapiens
cagggtttgaaggaaggttcgctgcagtgggtgactacccataccgcagcctggctcctgcggccgccatgcggacatgttcagatacaagagggagggagagcaaatgggaaaaatcaacg

SEQ ID NO: 68825 - DNA, 122 bp, Homo sapiens
cggccggcgaccagtgatccaccagggtcttagcagccaaagcagcaccaggctcaggggcgcctcctgggctccaggctgacaaccaccacaggcacaagaggctgctgggcggtggcact

SEQ ID NO: 68826 - DNA, 122 bp, Homo sapiens
ccccccaaatatttgtgctttaggtgtagttaccagatgatgaattttcctcctatgctccgtagtcttgtaataaaaagcatgtacagtgtagacgtttgctggcatggctcttcctttga

SEQ ID NO: 68827 - DNA, 122 bp, Homo sapiens
ttttacctgggaagcagggctcaaaacctggccaggaggtcttgttgggccaggaatgtccgtggttggtgaggaggctgggagaaggcctttttgatggctccattgttcacagcgctgcc

SEQ ID NO: 68828 - DNA, 122 bp, Homo sapiens
gtggggaagctctggaccagctgctggttgtgggggggcttcggccacgggtgccacttacggtctttcttcattaatttttgcatgaggctgctacattttaagatgtggccatatgtaaa

SEQ ID NO: 68829 - DNA, 122 bp, Homo sapiens
ctataagcaagctcctacccacctcctcacctactcagggacccgtcccaagtggacccgcgcacaggagcacgggaaaacgagtcctgtggtgacacctcgcctggagactcagagctgcg

SEQ ID NO: 68830 - DNA, 122 bp, Homo sapiens
gtcagcaaggttaggtagcgaacctttgacttggaatgctaaattcctgtgagtccatcacggggacacatgggaagatgcgtctgaaagtgctccgcggtgaaggcggggtctgtgtgccg

SEQ ID NO: 68831 - DNA, 122 bp, Homo sapiens
aggaaatactttgtggagtccaagacccccaggtcatccaggggtggtggtgtcacagaccgggaccgcggctctgcttccatccgcagattgacgtcttccgtggccgagcacaagtgggc

SEQ ID NO: 68832 - DNA, 122 bp, Homo sapiens
ctggaggtccgtgctgaggcgacgcggcgaccgttctgcctggagactgcggcagcgctccgactgcccccgccgctgccgacgtggcgaccgccccccacctgctgattgggcggcagcag

SEQ ID NO: 68833 - DNA, 122 bp, Homo sapiens
cgcgggccgcttagggactgggagtccggggcagcttagcgggaccaccagaggggccagcgcccggcgggcggcgggggtggggtgggtgcgacgccgggcgactctcggctcccgtgggg

SEQ ID NO: 68834 - DNA, 122 bp, Homo sapiens
ttcatcgctgcctccaagaacaacaggacgaccgcaggtttcgcctcacagaaacggaaccgctggaaaggcctctcttgacattcccgaaaggaaaataaaaattcctctgaagtacattt

SEQ ID NO: 68835 - DNA, 122 bp, Homo sapiens
ggagcccctaacgctctttcttctgtgctcgccccgccccctccggcgtgggccccgccccgactaagccccagccaggccccgcccccgatgttagcgcaagccacgcctcctcagctccc

SEQ ID NO: 68836 - DNA, 122 bp, Homo sapiens
tcagcctggccaacatggtgaaaccctgtctctacttaacatacaatagaattatctcagcgtagtggtgtatgtctgtaatcccagctactcaggatcctgaggcaagagaatcacttgaa

SEQ ID NO: 68837 - DNA, 122 bp, Homo sapiens
gtgtccagcccagcccccacacccaccggagagctagcgcggccctgggctcctgtcgggcgctggtcctcacctgttccggccaccctgggcctcgacccggccaaggtggagccccgggc

SEQ ID NO: 68838 - DNA, 122 bp, Homo sapiens
cgctcgaaggtccgcgcggccacgcggccagccccgggctcctctgggccacgcgtgtcacgtcaacactcgccgggctccacgaactggcgttgtcagatgaaacacggcacaactggttt

SEQ ID NO: 68839 - DNA, 122 bp, Homo sapiens
cagttgtgtcagggtcagttggagcctgggacaagctgctggcagtggaagtgtgagcaccggtgggattccagacagggggccctgtgacttctaggagtttggacttgggaaggggtggg

SEQ ID NO: 68840 - DNA, 122 bp, Homo sapiens
caaaacaaaagccttaggagacgtaatcagcaaccgttcactgcagcagggcgggtggcgcggtgtctgtgtttgtgcctgtgtgcaagggcatgtgcgatattttctgctgttgctaagat

SEQ ID NO: 68841 - DNA, 122 bp, Homo sapiens
ttgtggggggcagacagtggaacacaattcatgcacaacacgtcagaagctgataaacatcgagggaaaggaaagcgccctgcggaggagcgaggaaggggaagggagggcacagggcagag

SEQ ID NO: 68842 - DNA, 122 bp, Homo sapiens
aactggccagaaatgtgctttgcatatgcagaaagacccacttctgtgaccccgcacactcggcactcatgactaatgtccctagggaaagagggagatgagggacattcaattctccccac

SEQ ID NO: 68843 - DNA, 122 bp, Homo sapiens
tttcagcaagtgaactcgcccttgctgctcaaagtctgtccctgaatcatcagcaccactcgggaacttttgaaaaatgcaggatttggggctcagacctagtgggtcagaagctgtatatt

SEQ ID NO: 68844 - DNA, 122 bp, Homo sapiens
ctgacactcatctgcgtgtctgcagatcgcaaaagcctttgggcacctgctctggaagttcgtggaggagtctgtccaagttcgcccaaggccgagggggctatcaaagaagagctctgggt

SEQ ID NO: 68845 - DNA, 122 bp, Homo sapiens
gtcaggagatgcctcttggcccttgcaggtcagctacggtgctagcatggagctgctgagcgcccgggagaccttcccctccttcttccgcaccgtgcccagcgaccgtgtgcagctgacgg

SEQ ID NO: 68846 - DNA, 122 bp, Homo sapiens
gaaaaagctcgggcccagcaggcgcgtcacagggtggagggggcgggactgcaccatttgcgcaggcgcctccaatagttggccaatggaaaagctgtggctctagaaagccagcccgcgct

SEQ ID NO: 68847 - DNA, 122 bp, Homo sapiens
aatcagctgactccaagtggagcaaagcccaggtcttgacatagatacagataacatacacgcccagatgatgtcacaatcagctgtatctaaacagagcagagctcaggtgacatcacaga

SEQ ID NO: 68848 - DNA, 122 bp, Homo sapiens
gctctggaccgcgcggccgcagtgtgccgcccgctgcgctatgcggggctcgtctccccgcgcctatgtcgcacgctggccagcgcctcctggctaagcggcctcaccaactcggttgcgca

SEQ ID NO: 68849 - DNA, 122 bp, Homo sapiens
cttttttaaatgaatatttctcagctgttggtgagctcagctgagggagggcgggcgccacgggtccctgactcagacctgactgtggggctgggacacgactgcccctagtgggagcaagg

SEQ ID NO: 68850 - DNA, 122 bp, Homo sapiens
gcgcaacgccggtgggctggcactgctggggaacccagtacaccctccgcagccactggccggtgtgctaagcccctcattgcccctgcgggcagggccggccagctgctccgaatgccggg

SEQ ID NO: 68851 - DNA, 122 bp, Homo sapiens
caggaatatcgtgggggcacgtatcagtatttaccaatcatgactggagtttaaagcccacgccctttagtatcatggttgaggccttcaagggtggcccatgctggcttctccagctttat

SEQ ID NO: 68852 - DNA, 122 bp, Homo sapiens
tttccctatacgtataataagacttctcgaggccccatctagatccgaccttcgaggattcggaagccttaggctgtggatgctctgtggtggggactctggagggtgggaggctgccatgt

SEQ ID NO: 68853 - DNA, 122 bp, Homo sapiens
tccctaaaccccgcggtgttgagaatcacctagcaacacggtgcggagacaggatcaggccgcgaagcagggtgtatgccagccgtgaggggagaatgctgcagagctgagtgtcacaactg

SEQ ID NO: 68854 - DNA, 122 bp, Homo sapiens
agccccatctgtcctctaccccagagcctctcacctccaagtgccgcaaaagctgagtggcgttcgcctctgacttcacggctttgtactgactgacagtcaggagcaaggacttcaagcag

SEQ ID NO: 68855 - DNA, 122 bp, Homo sapiens
agaaactatttaaagacatacaaactagataatatacttgcttcattctcgtttgaccttcgtacccaagcaattatttctgcaaacaaacaaataaacaactactaatagcacttcccgca

SEQ ID NO: 68856 - DNA, 122 bp, Homo sapiens
tggaggttcaggcagtgacgtaacttgctgccttaggtggccttccgctctggcggctgtcgcgacgggggttcagggaatatttactgggcctctccgctccctctgctcttggaggtgcc

SEQ ID NO: 68857 - DNA, 122 bp, Homo sapiens
cggcgggcgcggcagctgtgcccgtctgcccaagggttaatccgtcccctgcagctgccgcgcgtgccttgcagaatttcaccagaagagggtacagtttgaaaagctcctgacgtcaggct

SEQ ID NO: 68858 - DNA, 122 bp, Homo sapiens
cggcctagtcctcacggctctggacagcaccccattcattcatctgcttgctcattcattcgttcatccatccatttgctcattcagcaggcatttgtcgaacacttgccgggtgctggcat

SEQ ID NO: 68859 - DNA, 122 bp, Homo sapiens
gtgacatggtcagatttgcatttctgggaggtcaccaggttactgtagagatgataaatacgagggggataacattagaagcatcgtgacaaacagaaactgggtgagtaatccaagtgaga

SEQ ID NO: 68860 - DNA, 122 bp, Homo sapiens
gcccccatggcaaagccatcgagcagtggctgtgagaggtaggcggacacgaagcccagccggaggacgcccatgaggacctgtggacggagtgcggtcaggccagcaggcgcctggcggga

SEQ ID NO: 68861 - DNA, 122 bp, Homo sapiens
cgggccacgctggaggtcgggcgcccgcaaccctgcgccaggccgtcctgggcttgccgacgctcggcccctgcagctccatccgcccgcgggctgcctttgctttgcctccctgtgtggct

SEQ ID NO: 68862 - DNA, 122 bp, Homo sapiens
gagcccgggcgccgggcagtggcggcagctgcagcctcaggagcaggctgagggcgagcgcggcgaggctcgccatccgggcggcggcgggcagctcagccccttcccgcgggggccggggc

SEQ ID NO: 68863 - DNA, 122 bp, Homo sapiens
ccagagcgtgcggacctgatcttgctgggacgagggtgatgagcggctgtccaggagaagcgggctgtggccacgccgcgtggggaaggcccagacgtcgagtgggcctgggcagagtcggc

SEQ ID NO: 68864 - DNA, 122 bp, Homo sapiens
gccggagctacagcgcaccggcctccagaccgcacccaggccacaggtggtagagcactgcggggcagagacccgtgaaagccaggcagatcccatccccgccaggcctccacagccaggaa

SEQ ID NO: 68865 - DNA, 122 bp, Homo sapiens
tgataacgatagttcatatttcatctccatgtgaccttgaaaaaaatcactctgagcatccgtgacctcatccgtgcaactccttttaaaaattattcttagaagaaccccagtgaataagc

SEQ ID NO: 68866 - DNA, 122 bp, Homo sapiens
gctggctggagggtgagaaggagggagagaaggatgactgatttcacactccagagttaccgacgttaaaggcgatccgacgaatcctagggagtctttacaagtttggttaagaagccaaa

SEQ ID NO: 68867 - DNA, 122 bp, Homo sapiens
tggcgaaagaaagggcagcggaagtgcgctccctttgaaaccctcccccttagcccactacggacccgaacttcgcgcacaggaatcgcgcatacggaagtcccgcccctttctggaaggct

SEQ ID NO: 68868 - DNA, 122 bp, Homo sapiens
tttcaaaagattcccaaacatgttaaatacaatatggctacagcaaagattaggcaaatccgaaccaagtgcagaaactaaaccgccagctctggatttaaaagctgtctgctccacttgag

SEQ ID NO: 68869 - DNA, 122 bp, Homo sapiens
ttaagtcctatattggacaagactagaacatgaattaaaaggctcctaactgtaaatccacgaggagcacttaccagctgaaggtcacgctgctggtcacacagcttcgttactcactttaa

SEQ ID NO: 68870 - DNA, 122 bp, Homo sapiens
tattgaccaccagttacgtattagttgccaatatgccagcttggacatcagcgttggatccgtttgaccagtttgcactagttttatccataatgatggatttaacagcatgacaaaaatta

SEQ ID NO: 68871 - DNA, 122 bp, Homo sapiens
ggtggagacccaccaggtccacgagtacctgcgcagcaagctctgctctctctatgagaacgactgcatctttgacaagtttgagtgttgctggaacggttcggataggtaaggcctgcgtg

SEQ ID NO: 68872 - DNA, 122 bp, Homo sapiens
tcccgcagaccgcgcccggccgggtgtcacttgtgggcgcacgctgccgggatgctgggccgagcccgcggtttaagacccagatctcagccaggtccctttcgccgtccgagcctctgcac

SEQ ID NO: 68873 - DNA, 122 bp, Homo sapiens
tttcgaccactgcccgatcatgcgcttactcaagtaggattccgaaaaaattcagtcgcgcgtccctcctgaggttccgcagctggccaggcccggcccgggctggtgcggctgcgcactgc

SEQ ID NO: 68874 - DNA, 122 bp, Homo sapiens
agttatttctaccatcgtaaatgtcagcttttacagttataaaacccctttagcgccaggcgcgtcgcacctgcagctctgctggaagctgggcaaacggtcgagcaggcggccgagcgacg

SEQ ID NO: 68875 - DNA, 122 bp, Homo sapiens
ttgggccctggcacctccacgccccgtcccgaggccccgtgcctctgggctctgagcgcacgcgttgtgtgtagtggccctggcacctccacgccccgtcccgagtccccgtgcctctgggc

SEQ ID NO: 68876 - DNA, 122 bp, Homo sapiens
taaacctatggattttagtccaatgaggaatcctcttcctttggtctaaattttgcatatcgtctgtttcttacagggcttccgtattgtctcaggctccactggaaatgcagcaaggattc

SEQ ID NO: 68877 - DNA, 122 bp, Homo sapiens
gtctggtctcaaacttctgggctctaatgattctcccattttggcctcccaaattacaggcgtgagccatggcacctggccaggctcatcagttatttgtttttttgtttatttctaatttt

SEQ ID NO: 68878 - DNA, 122 bp, Homo sapiens
accggtgcctcagcttctccatttgcttcatcctctccttgtgccgcttgtggcgctcctcgatctccaggtccttctgggacagcatcctctcgaagctggtcatcatcaggtcgccgtcc

SEQ ID NO: 68879 - DNA, 122 bp, Homo sapiens
gccgaggttgccttagggctctctgcccagtaacaggcatcgaacggtgcagactgaagacgccctccgtcagcgacgccgtcgcaatggccatttgtcaattcttccttcaaggccggtgc

SEQ ID NO: 68880 - DNA, 122 bp, Homo sapiens
gaagaccgatgcgtcctccctcagcttagcgagtgcaactgcaagtcagaggacggtgcacgggagaaagtgacacaggctgatgtgaccgagccccgcatctctcgtaatcaccatcattt

SEQ ID NO: 68881 - DNA, 122 bp, Homo sapiens
gggcacgcggcggcccctggggcacccggcgggagctgcatgctgcctagttgctgcttgcgttggccagacccacacagcccctggactggggagctccagtccgctagcagtctggggac

SEQ ID NO: 68882 - DNA, 122 bp, Homo sapiens
agggtgagctcagcggctcggaaagtggagactcagatggccgtggcgtctatgaattcacgcaggacgtccggcacggtgaccgctgggaccccacgcgaccaccccgtgcgacggacaca

SEQ ID NO: 68883 - DNA, 122 bp, Homo sapiens
cagcaaggagaagcagtatctgcacataggcctgaagccacgcgtgcgtgacaactaccgcgccaacaaggtggccttctggctggagctcgtgccccacctgcacaacctgcacacggagc

SEQ ID NO: 68884 - DNA, 122 bp, Homo sapiens
gtttgaccaggttgtgagggaggaggagggctaaaggcagaaagcataataggaagcacccgcacaggggtgaggatcagggcttagtacctaccccaggcaccagtgtgcacatagttggc

SEQ ID NO: 68885 - DNA, 122 bp, Homo sapiens
cccggcctggagctgtggaaccgcccgcgcgacctccagttcccgcccgcccgtgcctggcgctccagacctgggatcctcccggcggctctgcccagctctgcccgccttctttgcgggct

SEQ ID NO: 68886 - DNA, 122 bp, Homo sapiens
ggtatgccagtaaagcaatttcacatcccctgttggctttagagctctaaatcaactttacgtcctctgttggttttagagatcagcctcatttgctttatcagatgcacctacatagcctg

SEQ ID NO: 68887 - DNA, 122 bp, Homo sapiens
gccactcctaagcgtcctccgtgaccccggctgggatttagcctggtgctgtgtcagccccgggctcccaggggcttcccagtggtccccaggaaccctcgacagggccagggcgtctctct

SEQ ID NO: 68888 - DNA, 122 bp, Homo sapiens
gcacttgggacgatgacacatttgagagagctcccaggacagcatgtagttggcaaggggcggtgtgtatgtcaggcactgcagggaagcattcaagtggcaggtatttcccatattctgga

SEQ ID NO: 68889 - DNA, 122 bp, Homo sapiens
cctcacggggaggcggggctgtgggaaccgcagtgcagcgcagaggggcggggcctgcggcgcgagacctggtgcgggaggcccgggcagggagaagtgtgcggggccgggacaagccggct

SEQ ID NO: 68890 - DNA, 122 bp, Homo sapiens
atattcctggtcctgcccctctctgggtgtccacagtcaggtccctctgagtgattctctcggagtctcctctggcaagcccctccagcagtcaccaccacctgggcacccacccccagggg

SEQ ID NO: 68891 - DNA, 122 bp, Homo sapiens
ctgcaaacctagagcataggaaacactgcctgggagcacttcacctacaagggcctttagcggcttcagggcccagccacacccttctccacgtacgtgttccagacccagtcaccccgagc

SEQ ID NO: 68892 - DNA, 122 bp, Homo sapiens
gctgtccgtgcaaaccccagccagggtccacctgctgctccacacagcccatcccttctccgggctgaagctccctcatatgggacatccactacactgtaggaccccagcccatgcgtccc

SEQ ID NO: 68893 - DNA, 122 bp, Homo sapiens
ctgtacaccgcgtcgcgcacgccccgccccccggcgccgcctgcgtccttcccactccaacgctgggtgacattgagctcaccagcgccaccgtccccggcgaagttctgcgctggtcggcg

SEQ ID NO: 68894 - DNA, 122 bp, Homo sapiens
ggaggaggcgggagttggcagaggaggtcccagctcccctcggcggtccggtccgggaggcgttgggctttcgagcgctaggagcccagggcggcggaagacccggggcgccgctcaatcgt

SEQ ID NO: 68895 - DNA, 122 bp, Homo sapiens
gattgattttaaagtaaaactatacagtggcttaataatattgcctagattttcctcattcgagcatggttgtccccagctcctgggtatactgccttaattatgtcgttggtccaatactt

SEQ ID NO: 68896 - DNA, 122 bp, Homo sapiens
tttatcacatcgttttagggagccaggaccatggacttagcaccagacagggctactggccgcccgtggctcccgttgcacactctatcagtatctcagctccttcgagtgttttggctact

SEQ ID NO: 68897 - DNA, 122 bp, Homo sapiens
gctcgtgccaagcaggaggagctggaagccgccctgcagcggggcaagcaggatatggcacggcagctgcgtgagtaccaggaactcatgagcgtgaagctggccctggacatcgagatcgc

SEQ ID NO: 68898 - DNA, 122 bp, Homo sapiens
actgagccccgtggcccgctcccgggtcagcgcgcctctctgctctcaccggggcgggtccgctgttggccccacccactcccagcccacccggccccgcaatggcccggcccagccgccca

SEQ ID NO: 68899 - DNA, 122 bp, Homo sapiens
ggctggccaccaggtggcactgttgcatagcaaaaggaacgcggctccgcgctggagaaccgggccgggctgcgcggaagccctggagggccagccgggtggagggagctgcaggagggggc

SEQ ID NO: 68900 - DNA, 122 bp, Homo sapiens
ctccaccgaggcccaaggcacgctactcggcgtgaccataagcataagggatgggagaaacgggcattcgttggttaaagtgaagatatgtcacccagctcacacatcttagcactgcctca

SEQ ID NO: 68901 - DNA, 122 bp, Homo sapiens
agaaattgaaggccagttacttgcttaagaactcaaggtaaagccaggtccagtttctcccgctgtaataacttcttatgaggtaattatattgatctgtccactagataggacttcttatg

SEQ ID NO: 68902 - DNA, 122 bp, Homo sapiens
atcgcaaaactgcatttttaaaataccactttgtgataatttaggatattattttggtaacgtcacacattataacatggaatctagagctactgcatagcatcatgagcatgatagtttaa

SEQ ID NO: 68903 - DNA, 122 bp, Homo sapiens
ccgctctgctcgcaggtttgggctagtctggggcggggacttgggagcgcctaaaacttgcgaggagggcggggccgcagaccggtcctttaaaggttggaagtggccccgaggcgccggca

SEQ ID NO: 68904 - DNA, 122 bp, Homo sapiens
gtatttgaagttactcaacttcagatttcacaagcgggctaacactcacctttatgaatacgaaaatttatgacaaaggacaggattacagttctaccattgtacctcctttttaatctata

SEQ ID NO: 68905 - DNA, 122 bp, Homo sapiens
gcctttagccacctcggtgggtgatcctccttatagctcgggcccttgccatgcttctcccgagcctgagcccgccccacgctgggcaccaagtccaccttgtccgcagcttctcagaatga

SEQ ID NO: 68906 - DNA, 122 bp, Homo sapiens
tccttcctcttgtcggggcctgggcttaggacacgcccgttccgcgtccgtctctggctccgcacttgctgccctctcgccgctcacattcgcaaagggggacagacactcatcggataatg

SEQ ID NO: 68907 - DNA, 122 bp, Homo sapiens
gtgtcgaggatgaaagcatgaggcgcttgcagggggtccttggaaccaggtgccactcctcggcctgacggggagccccgccccctcccgggtctccactgtgccccaggcatgcccacccc

SEQ ID NO: 68908 - DNA, 122 bp, Homo sapiens
gaaggcccagaagattcctgacattccaggcctgtggccctctcagtgtctgcagggagccgtcagccagtggaaagagtacatcgccaaggccatacctgcccgggcctgggtctgggcca

SEQ ID NO: 68909 - DNA, 122 bp, Homo sapiens
cttggatgtgatccatttgctgtagtcttccaccttggtgtacagaaacaggccagggcacgtctcaccaccgaagttcaggactcctctcagaacccacagatcgaactgctgtagctggc

SEQ ID NO: 68910 - DNA, 122 bp, Homo sapiens
cgcctgcagaaccagcatgggaaagccatgtacaaaggaatgtaggtgctggcaggcgagcgtggagggcagaggcgcccgggggagggatggggcccccttccctccagtctccaggcagc

SEQ ID NO: 68911 - DNA, 122 bp, Homo sapiens
gtttcatttgactattgcatggctggcaacatttctattgattgtttccagggaccttggcggatgagctcctgttgagtctagcatctctgttaaatctgttctcaaataggtaatgcata

SEQ ID NO: 68912 - DNA, 122 bp, Homo sapiens
cacccggccaggggctgcagcccgcacccggacccaggcccatttaaagccccacagcgtcgggccacgatcaatatatcagcccgaagctagctgcctccttctggaagtctttgggtatt

SEQ ID NO: 68913 - DNA, 122 bp, Homo sapiens
ccccctgttcgcggcagcgcggtagacacagagtcagcagtcacgttggggcaggttactcggtgattctcttccccacaaatcaaatcagtttgcgcaggcccctgtgttcttcaaggtcc

SEQ ID NO: 68914 - DNA, 122 bp, Homo sapiens
cccgcagccaccactgggcgccccttgcccatcacccagacttcgcaccctccacactcccgcttccgcccgtcgccttgggccttagcggcacccgcaccgcaccccagcgccacccggca

SEQ ID NO: 68915 - DNA, 122 bp, Homo sapiens
cgcagggaggaagctagtcctctcaaggcctgtctggaatctgtttatcaggttccactccgctgcccgagatcgcttcttccgttactcagtgcccgggggagggacctggcgcactatcc

SEQ ID NO: 68916 - DNA, 122 bp, Homo sapiens
ctccccggccggcccggcccgctggggcctgggttcctttgggttggggaagtgggggtacgaacccacgcggctgtgccaaggggtcccaactccggagtccaaccccacccaccagtcct

SEQ ID NO: 68917 - DNA, 122 bp, Homo sapiens
cctccttcacggcgggtcctcatcctttaccttctctctctggagcccaaattggaactccgctcctcccctccgcgcagctccatgcactggccctttgggacgcctctttctttctttgg

SEQ ID NO: 68918 - DNA, 122 bp, Homo sapiens
caggctgtcgctgagcccggaattctgcaccgggagaaacttttcagcccgcagagcaaccgcagggcagtggacgggggccgcgcgaggacaaacagcggcggcgggtgcaaagccccttc

SEQ ID NO: 68919 - DNA, 122 bp, Homo sapiens
tgccttccatacccccacctcctgtttccctgctcttttaatcctgtaatcctgctgcctcgcctgtggacatttccttgtggaggaagcagcatgtctacttggggctcccagccaacttg

SEQ ID NO: 68920 - DNA, 122 bp, Homo sapiens
gggctgcttccctgtccccctgggtggaggctgccgtctaaacctgactccaggtgagttcggcaaagaggtgaaccgaggggtctcgaaccagagacgtggcattggcgaggctgctcagc

SEQ ID NO: 68921 - DNA, 122 bp, Homo sapiens
aagcgcggtctctgtccggatcccccatggcccccaggtcccgctttctgttcccggccccggacgcccgcggccagttctccgcgaccctgagaatcaagagccaagcatcgggtaggagc

SEQ ID NO: 68922 - DNA, 122 bp, Homo sapiens
aacacgtgaatgaagtgtacggccttctgttcccagctgaggggccccctcccacggtggcgttagcagtggggtacagtgcggtaagagaggtgctaagggacgggatgagggtctttctt

SEQ ID NO: 68923 - DNA, 122 bp, Homo sapiens
gcagcctgggagggccagcccggccaacccaccgggcctgctgatggccgagcccacgctcgaggggctgaccagagttcaatgcgcctcagaaaactccataaactatcccgtcttatttg

SEQ ID NO: 68924 - DNA, 122 bp, Homo sapiens
catctgccaggtgaaggcctttggcctgggcgacgtcaacctgctgcagaacctgctgttcggcagcctgatctccgccgtggacccagtggccgtgctagccgtgtttgaggaagcgcgcg

SEQ ID NO: 68925 - DNA, 122 bp, Homo sapiens
acaaaacgttttctcacaggtctacattctctttaaaacaccactataaacacctggaaacggaaactaaacgtagacaaaacgaataacattgtgttgctgctgcacgtgaatacactttg

SEQ ID NO: 68926 - DNA, 122 bp, Homo sapiens
cgtgatccgcccgcctcggcctcccaaagtgctgggattacaggcgtgagccactgcgcccggccgcccagctaatttttttgacttttagtatacatgaggccttgctatgttgtccaggc

SEQ ID NO: 68927 - DNA, 122 bp, Homo sapiens
gcttccgggaatcttggtcggaaacaagccgggcctccccagctgcctgggcttgaccggcggggagcctggttggcctttcttatttatatagagaacacttcacttttttgtacattttt

SEQ ID NO: 68928 - DNA, 122 bp, Homo sapiens
gaaaagggaggaaaaaaaacaagttacatggaattagttggaagcgggcgcattccccagcgaccgcagccattaacattataatctcaaacgccattttttatgtaacactattgttagta

SEQ ID NO: 68929 - DNA, 122 bp, Homo sapiens
ctcggcgcgagcgggactatcagggtgacctcacctgtgaccttcaccaccgtgaggtaccgccgcgcctgggagtcacccgcggccgctcgccggtaggtgcctgcctgagtctaatcgta

SEQ ID NO: 68930 - DNA, 122 bp, Homo sapiens
aaggaacagcccctaccccaggcgacaacaggccaggaagaaactgacattatatgaccccgccttagctcaggacactgcagagtgcagggaagtggcaaggtgtggttttcagtgtcagt

SEQ ID NO: 68931 - DNA, 122 bp, Homo sapiens
gaaacaaaaggctcagcttgacagtgtctgcgtttttgcgtcacccagctctttgttccacgcctgctccaaagcctattaatttgtcagatggtcttctcgggaaagataaagttgctata

SEQ ID NO: 68932 - DNA, 122 bp, Homo sapiens
aatatccaaagtatagaggaaactcaaacaactcaatacctgtagtaagaaaacaaataacgtaattgaaaaatgggcaaaaaatctaaatagacatttctcaaaaaaaatctacaaattgc

SEQ ID NO: 68933 - DNA, 122 bp, Homo sapiens
acctgcccggcccccacccacgcaggcagctcccaggaggcggggaggcgggaaaagcctcgctcagcgggtgcctcaccaatgtgctccgaatggataatgagccagactccagcactcag

SEQ ID NO: 68934 - DNA, 122 bp, Homo sapiens
atacaacgcagaggaaacagaataccccagccaagcaatttccatgtcaaacatcatccgcgcggctgctccatctgtgaacgtgagtggtcgcctggctccctcttccgcggcggccgctt

SEQ ID NO: 68935 - DNA, 122 bp, Homo sapiens
cccgcccaccttttctttagacccgcgtctcaccccgggccggaagggctcctgcgcaggcgtttgtagccacttttaagttttatcagctagttcatgcttgcgttgaaagagtggtcgtt

SEQ ID NO: 68936 - DNA, 122 bp, Homo sapiens
ttctctcaggactccttgttaagaaaaataaactcctatttattgagaccatgagagttacgttgagaggtatattgttattgaagctgacaatattcaatgccatgagtttgaagatcatc

SEQ ID NO: 68937 - DNA, 122 bp, Homo sapiens
acttcactttctacctttgctcttcttccccggccatgtctcctgctctggtcctggggccggaagtcagcgctctgtgcagatgagcttggggcagcccacgccctgcaaaccctgccagg

SEQ ID NO: 68938 - DNA, 122 bp, Homo sapiens
aattctgttcctgttgaacacatggatcatttcaagggctactattatttaaccctacagcgattatgattattttcatgcatatcactttattttggattctttcctctgagagattccaa

SEQ ID NO: 68939 - DNA, 122 bp, Homo sapiens
ggaaacccacattgtttgggaagtgccttctgatactgattgaacagaaatctgtcatcccgtgccttctcctgtggttcttagatttaagcaaagaacatcacagctctcgatccaggaga

SEQ ID NO: 68940 - DNA, 122 bp, Homo sapiens
ccgctgtctctggttcattcccatcggtcaggccctcattccagtcttccagtcacttaccgggcctcctgttccaattccattcccaggcactcaacaagatagccgaggccagctcactc

SEQ ID NO: 68941 - DNA, 122 bp, Homo sapiens
gtgtgtaccacagagaagcacggtctggcaaatacaagctcacctacgcagaagctaaggcggtgtgtgaatttgaaggcggccatctcgcaacttacaagcagctagaggcagccagaaaa

SEQ ID NO: 68942 - DNA, 122 bp, Homo sapiens
ctcatcctttggcacggccaacatagacagcgtcctcattgactgcttcacgggcggccacgacagctacctggccatccctggcagcgtccccaggccgcccatcagcgtcagcttccccc

SEQ ID NO: 68943 - DNA, 122 bp, Homo sapiens
catgacctgcggtcagaaactcttgcttgcacccctctccattaccacactcagtggttgcggcgtcacgtgatcaccacggagattttgcgaatccttcttttccccaacttctcccccta

SEQ ID NO: 68944 - DNA, 122 bp, Homo sapiens
tagtaagctctccacgaatccagacaattcacttgtccctgagggagatggtggacccagcggtaatgaatggtttatgtcccaatctgacgtatgtcaggctgatgtcctgtacagtaaaa

SEQ ID NO: 68945 - DNA, 122 bp, Homo sapiens
gcagctcaaagatcagctactacaacctgacacgcctgtggcagatgtggcctcactgcccgggtgcctcacagacctgtgctggctcagcagaaggaatctccccacagcccagagggtga

SEQ ID NO: 68946 - DNA, 122 bp, Homo sapiens
tctgctcttgcagtcttagtgtacaccctggttcttcaagggcagcaagcaggactattccggtagcaaccagagctggagctcagggccccgcactggaaagctggggcagcttaggtggt

SEQ ID NO: 68947 - DNA, 122 bp, Homo sapiens
ggtggtcagcaccctgcccgcctggccctcacccggcccccaccctgtccccctgcccggcggccgcacctggctcaggatgccctggccatactgcggctcagtggaggtgaggaaggcca

SEQ ID NO: 68948 - DNA, 122 bp, Homo sapiens
gcgagcctcgcgggggcgggggcggggcgccaaggggcggggctgtctcttaaagggccccgggccgctgcccttaggccacttcctgggggcggagaggacctcagcggctgcggcgacac

SEQ ID NO: 68949 - DNA, 122 bp, Homo sapiens
tcacctgtgcctcaccaccctgccatcgcccgagttttctgctctgatctaatcctcacacgcctgtgcagcaccagcttccaacaccaggtgcaccgccagggtatttactgatccagtga

SEQ ID NO: 68950 - DNA, 122 bp, Homo sapiens
tgccctcggcgatacccatgctagtggtgaagtcatccgttgtgtccccgttgaagttgccgcagagccctgagccggcggggcgtgagctcgacttgaacccatccctcctgcacccattc

SEQ ID NO: 68951 - DNA, 122 bp, Homo sapiens
cccaggtgatcctcccacctcagcttccagattagctggtgctataggcatgcaccaccacgtccatctaaatttctttattatttgtagagatgaggtcttgccatgttacccaggctggt

SEQ ID NO: 68952 - DNA, 122 bp, Homo sapiens
atctggcaggggcatctgagggatgccagcttttttgctggtgccactaagctctactcacgctgctgcttctgccgggccttgtcacagatggcaggtctcaggtagatcttgcgcccctc

SEQ ID NO: 68953 - DNA, 122 bp, Homo sapiens
tggccctctcggctcaccgtccgcgcagcctcctgaagcagccgtaaactccgccccttgcgcgcaggacggcgcgaaaacccaattgacaagaattccctccgaagctctgtggtccgatc

SEQ ID NO: 68954 - DNA, 122 bp, Homo sapiens
agcaggcacaggggctccagcagccgcggcgtgtccttgtcctccttcggggggctacagcggcatcctgtctgggtccaacggattgcttgcgggcaacgagaagctcaccatgcataacc

SEQ ID NO: 68955 - DNA, 122 bp, Homo sapiens
taaccaactcatcattagaaactacaagtcccaggatgcactacacgatgaacgtcggatcgaggacctcgtgtctctgaagtggttgccctcgccttatttgaatgggaataatcccaatg

SEQ ID NO: 68956 - DNA, 122 bp, Homo sapiens
aacttgcgaggagggcggggccgcagaccggtcctttaaaggttggaagtggccccgaggcgccggcagccctgggcggtcccgggaatcgcacaggacccggctcccctcgcctaagctgc

SEQ ID NO: 68957 - DNA, 122 bp, Homo sapiens
tataaaaattaggccgggcaccttgcatcgtttcagggggctgacacctccctaagggcccggtaattgaatccctcggatttgagagtgagaaaccttggctcagttcttcccagggggat

SEQ ID NO: 68958 - DNA, 122 bp, Homo sapiens
gccattgcaatccagcctgtgtgacagagtgacactctcactaaaaaaaaacccaaaaaacgaaatggaagtacctagttggctacttgcatctagaaatcaggagagagacctgggctaga

SEQ ID NO: 68959 - DNA, 122 bp, Homo sapiens
aacaacaacctttacccatctcagagaaatactatgaaaatcacaagggctaatgtctgtcgacacattgtggacagcaaaaatactgttcaaatgcaaattacaatgcctatttgaaatat

SEQ ID NO: 68960 - DNA, 122 bp, Homo sapiens
ttcatagccctgtacaatgctgcttgatccatatgcaacaaggcagcactgtaaagaagccgagggcagtaagaaaacttccaagaatttcactaatcaaatgcaacattaagcactggtgg

SEQ ID NO: 68961 - DNA, 122 bp, Homo sapiens
tttctggcatttacttactgtcatttatcctggcacaataatcaagcaccctgctaatgacggtgtgactgtcaatatcactttcaagttacgagacctattcagcataggataaaggggag

SEQ ID NO: 68962 - DNA, 122 bp, Homo sapiens
tcagtgtcgctgtcgaagacacttccggttgcgacggaggtaggcttacgaggcctgtgtcgggtagaaagggtccttcctggaccgggaccctctgccacgaccatggaccgtaggaaaaa

SEQ ID NO: 68963 - DNA, 122 bp, Homo sapiens
gaacccgcagccggtggcaagggattgtgggaagcagttcattcctggaacagtcgtctgcgggccttgcacggagggcgtttcgggagcggcgggtgcgcgtggggacctggactccccac

SEQ ID NO: 68964 - DNA, 122 bp, Homo sapiens
gcccggaaaccccaccgggacccaaggccgcaggtcctcaccaaacaggcccgccctttgcgcaggtcctcagggaacaggcctgccctttgtgcctcccctgggctcggctgagacaaccc

SEQ ID NO: 68965 - DNA, 122 bp, Homo sapiens
gtagagctgctctgccagttcctggacgtgacgcaggacacgctgggggtggttctcatccgcccgcatccttgccacctcgtgggccaccagctagcggggtaagcaggaggttaggtaag

SEQ ID NO: 68966 - DNA, 122 bp, Homo sapiens
agatgtgcttcgggaggatgggggtctcttctccgagaagccgggagcctgttgggcagccggcgcccggtctccccttctgctgcggaggatccctgctggcggtcgtggtgctgctcgcg

SEQ ID NO: 68967 - DNA, 122 bp, Homo sapiens
gattaatgcaggcgctcacaggggaccaggagggctgcagagactaggtgctcttggctccgcgggcgcacaaaccgcaactgctggcggcaccagggactgcgagcaggggcatggagtgg

SEQ ID NO: 68968 - DNA, 122 bp, Homo sapiens
acggaggtgcagtgagccaggcggctggcagagcagcaccccgggtcagcttctgcctcccgcatttccgatggtctgaatcgtttgtggcagccaccatatattatttttggaataaaatc

SEQ ID NO: 68969 - DNA, 122 bp, Homo sapiens
gtaggaatcaataaaaattgtattagatgttccccttatctttggggctcttgtcttactcgtacttcctttgtggtaactttaggattctcatgtttctcttccttgacgttgcaaaattt

SEQ ID NO: 68970 - DNA, 122 bp, Homo sapiens
tgcccactgagcgcaaacagggagcacatctgagcacccggctgctgggggaagtgcaagcgcctctgctcccggtgaggggctcaagctccacactgaccgagagattggctgcctctcac

SEQ ID NO: 68971 - DNA, 122 bp, Homo sapiens
ctcaggtgatccacccgcctcggcctcccaaagtgtggggattacaggcatgagccaccgcgcccggccttatttaataaactctttggagtaggtactatttattaaccctgttttacaaa

SEQ ID NO: 68972 - DNA, 122 bp, Homo sapiens
cccagcgcgcgggggtggagagagccgcggggcaggggcgccctgtgggtcccgcggtcacgccggatcgctcggccgcagtagtggggcccgggcgggcgcagggccgggctacggggacc

SEQ ID NO: 68973 - DNA, 122 bp, Homo sapiens
ttcctgttttgttcacggtggggccagtcctccagggatccgcatctcttcgtttgccttcgtctggctgagccgggctggtgcgctgagctctaggtgcaggcggaagctgggtcaggtgc

SEQ ID NO: 68974 - DNA, 122 bp, Homo sapiens
gctactggatagttgagtctggagcgtggcaaagacctgtgggctgcagatacacctttccgagttgcctgtggcttccgaacttgttctcaaattacttcctcaagaaagcctctctatcc

SEQ ID NO: 68975 - DNA, 122 bp, Homo sapiens
ccggccgcctcccattggtcgcgggcgcgggggcgaggctgggcggtgagcggtactgcacgccgggttccccaggctgcaaatggaaaggcgaagacaggagaatttaaatgagtttctct

SEQ ID NO: 68976 - DNA, 122 bp, Homo sapiens
tggggttggggagggagtagtgagagaaataaaaccctgggaaaaagaaaacgcggaatccggttgctcttctcacagtagccagaaggaagggcagagctgatctctggcaagtccttccg

SEQ ID NO: 68977 - DNA, 122 bp, Homo sapiens
tttcctcggatttcacatcgatagcacttattcgagttttcacgagtaacctgacgcaggcggaaccgacgaagactagccggcaagaatcctacagtcgcagccatctgcgcagcgtccgc

SEQ ID NO: 68978 - DNA, 122 bp, Homo sapiens
ctcctgcctgcacgcgctggagcagctcgcagatggcaagctgcgcttcgtggtggagcccgtggaggcctccttcccacagctcctggtttacgagcgcctccagcaactggtaggtccag

SEQ ID NO: 68979 - DNA, 122 bp, Homo sapiens
cgggaagggacgtgggttcagagcatggagcaaatcctcgaggtggccttgggagtggtccgcatccgtgggtagacgctgtgggtctcatgagctttggtcgcacgaggcaggcagttgca

SEQ ID NO: 68980 - DNA, 122 bp, Homo sapiens
aatcctactctgcgctgcacaggccccagggtcaagtccttactctgccacctgtagctgcgcgatcttggcttacctctctgagtcttggtctccgcaagaagaaaaagaggaagcccctc

SEQ ID NO: 68981 - DNA, 122 bp, Homo sapiens
gattgcaggcgtgagccaccacgcccagcccaccacgcctgttaataagctataccctcacggacctgtcattggcattaaatttgataatacattagagtattgtatatgaagtatacgaa

SEQ ID NO: 68982 - DNA, 122 bp, Homo sapiens
cgtgtaggtgatctgcccatcttggcctcccaaagtgcagggattacaggcatgagccaccgtgcctggccacacattgtcatcttaaaagcatagcagtcagtcttccttttaattatgga

SEQ ID NO: 68983 - DNA, 122 bp, Homo sapiens
cgaggtctgaggagcaattaaaattatctgtatctcctacagccactgattaccaaaagacgtgttccctctaccaaggcaggttcattatataatatacaacgtccaacaaagtttgttaa

SEQ ID NO: 68984 - DNA, 122 bp, Homo sapiens
gcgacggagacactaccgagaaccagatgttcgccgcccgcgtggtcatcctgctgctgccgtttgccgtcatcctggcctcctacggtgccgtggcccgagctgtctgttgcatgcggttc

SEQ ID NO: 68985 - DNA, 122 bp, Homo sapiens
cttcaagtgcctccaaagcctatgataaagggtggccaccagagggaattctctaatctgcgaacttggctgtgatttttcaaacagaatctgccagtggcttctcatggacttgagtcaac

SEQ ID NO: 68986 - DNA, 122 bp, Homo sapiens
aggggctgtgtgggggagccctggagccctgtctgcgagttaccccgatgaacagggagacgcggcagaggcagggccggggaggggccgtgtgggggagccctggagccctgtctgcgagt

SEQ ID NO: 68987 - DNA, 122 bp, Homo sapiens
tagctgcattaatggagattctcaacagatgcaaatttcccccacaaaagactttgcaggcgcatttccatttgctgaccctgtggcagctagttaaaatatgtcagagaaatataatttgg

SEQ ID NO: 68988 - DNA, 122 bp, Homo sapiens
cccggaaagtccatatggggctcccagcttccccttggacaaaggactaactgagctgcccgccctctcggtgcttccttggacctccaccaaggaggcagcctcaagttcccagacagtaa

SEQ ID NO: 68989 - DNA, 122 bp, Homo sapiens
gggtggacagctggggcttgtagtcccctcgctaccctctattctggaagaggcgggtcgcggccgctgaactccagctctgcgcctgcccaggcggccgcacgctcaggggcgtggcatgg

SEQ ID NO: 68990 - DNA, 122 bp, Homo sapiens
ttttggaggctaggaatgtaggagtctccccaaagtcattcggggtgtccacttctgctccgaacacgatgagggccttgatcatctccacgttgtctttctgttggagatggagagaggat

SEQ ID NO: 68991 - DNA, 122 bp, Homo sapiens
gtgttgtcagcaatggccaccagcgcatgcagcactgtgttgcctcgcgagtcctggcgccgcatgtccgccttcttgtgggggttctccgtcaggtagttgacaatgtggggctggttggt

SEQ ID NO: 68992 - DNA, 122 bp, Homo sapiens
tgaactgtgcacgcgagggatccaagctgacgctccttatgaaactaatgcctgatgatccgtcactgtctcccatcgtccccacatgggaccgtctagttgcaggaaaacaagctcaggcc

SEQ ID NO: 68993 - DNA, 122 bp, Homo sapiens
atcaccagaattattatcctcatttttcagaggctgaggctaagattaagagaggtaaagcgacttgcccgcagtcacagttagtgatgaatttagactggaactccgatgtttcttgacac

SEQ ID NO: 68994 - DNA, 122 bp, Homo sapiens
gaattaagaccttggccgggcgcggtggctcacgcctggaatcgcagcactttgggaggccgaggcaggcggatcacttaaagccagaagttcgaggccagcctggccaacatggtgaaacc

SEQ ID NO: 68995 - DNA, 122 bp, Homo sapiens
gacccagatgtggctgagctcttcttcaaggatgacccagaaaagctcttctctgacctccgggaaattggccatggcagctttggagccgtatactttgtgagttgggtcttgggagggtg

SEQ ID NO: 68996 - DNA, 122 bp, Homo sapiens
gagccagtccaggtaaattaggaagacaaggatttaggactggggcgaaaagagccagaacggaagaaggacgccagggggagcaagaacctacactctccagatatcgcgagaggtcccgc

SEQ ID NO: 68997 - DNA, 122 bp, Homo sapiens
ttacgacgggaaggcgcggctggctggggaggggctccccggcgcgcctccaggccggcccgagtccttcgcctttgtggatgaggatgaggacgaagacctctctggcaagagcgaggtga

SEQ ID NO: 68998 - DNA, 122 bp, Homo sapiens
caagacgcagcacagctgaaatgcaccctcacccactgtgaagccttgaactgcaaaccccgtcaccagcagagctgactactctttccccctctgtactctgtgcaacctctaacgtgggc

SEQ ID NO: 68999 - DNA, 122 bp, Homo sapiens
gactggaactcggtaggcgaggatcccctttgacgcccccctacagtttcccttcaaacacgtaggtctcagctggtaccctggctgcgctactggctttggcctcctggggccttatggtt

SEQ ID NO: 69000 - DNA, 122 bp, Homo sapiens
gacgtcggcgccggtgagtgcttgaggggctcgggccaggagactttctttgtgaaactccggcggtgggagccgggccaggcctcagcggctgaggagtgcctgtgaggcagaaggcgtct

SEQ ID NO: 69001 - DNA, 122 bp, Homo sapiens
actcagctcccgtttggacggtgaagctcccaggaccggcggctggagggaggctgctcccggggaacaaggacgcggcgcgggtgcgtctgggagagaccgggggagcctccaggagggac

SEQ ID NO: 69002 - DNA, 122 bp, Homo sapiens
atggtggccactgaggatcctaacaaggcagttcctgcatcccaaggcaaaaggtgggggcgggtaaaaaatgcccacgcccacctcctgctcccccatcccgccggccccactattaaact

SEQ ID NO: 69003 - DNA, 122 bp, Homo sapiens
tcatttacagcacataattcagtggctttcagtagattcataatattgtgcaagcttcaccgcaatcagctttagaatagtctcattacctcgaaaagaagctctgtctgccttaaccctca

SEQ ID NO: 69004 - DNA, 122 bp, Homo sapiens
ctggcctgtggggggcagcaatgtcagtaacactgtttgtcaacacacacaagacaaggacgctaagagcccccggcccagccccgcaggcctgcgagggcaccccatgcacagggcgacac

SEQ ID NO: 69005 - DNA, 122 bp, Homo sapiens
ggcttaacttcgggagagcagttttgctagccggccctgggtgccaagccctgcaggaggcgcagacccctggagacaggaccggactctgcagagcccgaccagcctcccagcttggcctt

SEQ ID NO: 69006 - DNA, 122 bp, Homo sapiens
ccctttcgctttcattaggggagacaaatctgctgtcaggcagccagctttccaatttaccgataatgattcttgcatgaaaattgatcgaggggctctccaccgccgtgcgctctcgcctc

SEQ ID NO: 69007 - DNA, 122 bp, Homo sapiens
ctacatttagctacttccaacctggaagggccagagtttcatcttcacagggttaggtaccgattctatgggtgggttttcctgtcctgctctcagacacagccagcaccactctctgggtg

SEQ ID NO: 69008 - DNA, 122 bp, Homo sapiens
tcaggggatatttgctcccacagggtggcccctctgggtgggagctggctgctgaggggccggggtgctgagcacttaatttcatccccggctcccggcccaggccacgcagctggactccg

SEQ ID NO: 69009 - DNA, 122 bp, Homo sapiens
atgctgctggccagagaccctccccaggtgcccattggagggtgcattgttcccaccagccgtgaggggaggtcctgtgggcacgctggacatagtatctcagaatattttccccatccggt

SEQ ID NO: 69010 - DNA, 122 bp, Homo sapiens
acgcatgcgcaccgcggcgcgctgggcggggctggatgggctgtggtgggagggttgcagcgccgcgagaaaggcgagccgggccgggggcggggaaaggggtggggcaggaacgggggcgg

SEQ ID NO: 69011 - DNA, 122 bp, Homo sapiens
gcaggcacccaggcggctcccttccccgcacgcatcgcggccagtccagcccctcccggccgcccacgggaccccagccgagcctgagccaggcgcccaccgcccccacgcgcagggccggc

SEQ ID NO: 69012 - DNA, 122 bp, Homo sapiens
ccccggctctcggcttgcaaagtccctctccccagtccaacccccggcccccacaggcctcggcgccccgccccgccccaggccccgccccagagagttctataaagttcctctttcccacc

SEQ ID NO: 69013 - DNA, 122 bp, Homo sapiens
ctctaccatttgtgtagaaaagggagaaaaacacgtttcctttgtgtgtgtcaaaggcatcgaatgtctggaatgatccagcaccggctacactggttgaccttggaggaggagaggcgggg

SEQ ID NO: 69014 - DNA, 122 bp, Homo sapiens
agactgaccactatatgcccctgccaccaatgactggttgtgtctcaaacataaatacaacggcaaaaacaaaaagcaagaaagacaaagaaagggtatggaaacagtttaaaaaataaatt

SEQ ID NO: 69015 - DNA, 122 bp, Homo sapiens
gcgtccccgaccgtcccggctgccgggcgtctcctgctgcttcctgcagcccgcccggcgcgcccccgccccgaccccggagggcaggtacctcggagccccggcccccaggagcctcccgg

SEQ ID NO: 69016 - DNA, 122 bp, Homo sapiens
ggctatcctgggggctcaggggtggaggcgggtttcccagccttgggcgcagagggtccccgctgtccccaccgtccgtcccccaacccgggacccctgtcctttgcgccgtgggaccccat

SEQ ID NO: 69017 - DNA, 122 bp, Homo sapiens
gagcgggggcagcccacagccgcccaccccatgactactgcgctcagacaggaggcaaggcgttaaactaaggcagtagcccaggaagcgtatggccactgagtttggtgtgcttgttcaca

SEQ ID NO: 69018 - DNA, 122 bp, Homo sapiens
tcccatgtcctcggcagggtgagctggacgcctacgggtctgagaaggcacccgggttcccggcatcagctggccactctctgcctaagaaagggccggggtcgctgcaccctctggtggct

SEQ ID NO: 69019 - DNA, 122 bp, Homo sapiens
ggcggccgtcatgggggtgcagcagcgcctgggtggtgacaccgtaggccacgagccacacgctcagaaagaagaggaagaagaagacgtccttcatctccacggggcaggggcagagagag

SEQ ID NO: 69020 - DNA, 122 bp, Homo sapiens
gggccccgctcccgggggagccgagtgggcagttccagcggggacccggtgcggagggttcgcgtcagcggccgaactggacctgggcagaccggtgcccaggggacgacggtgaagcaggg

SEQ ID NO: 69021 - DNA, 122 bp, Homo sapiens
gggggcccaaatgcccgggtcccgaggcggcagagatggggatttgctggcgtctgttcgcggtaccccagctctggcagggtggagtctgcacagagctcggagtgcccctgtccccacct

SEQ ID NO: 69022 - DNA, 122 bp, Homo sapiens
ctcagttttcacgcctactagtggtcagttatgggagtgtggtgacccactgaacacagccgcagtctacactgctgaattcatacccagagccaaccacaggcctgtgcgttggaatgcac

SEQ ID NO: 69023 - DNA, 122 bp, Homo sapiens
gttctttatccactctaagacttgatttccacatttgcaaaaacaaaaagctggctaattcgctcttgcagtccatcccaccgtctctgtgcccaaaggtctgcctgcttataaaacaagaa

SEQ ID NO: 69024 - DNA, 122 bp, Homo sapiens
aagtttggtatattgaaggccattcaatgtggctgaatatagggtctgtggccacacaatcgggaaaatgctgcaaagaaataacttggcctgaggcttctcacaatctctttccatctaca

SEQ ID NO: 69025 - DNA, 122 bp, Homo sapiens
ggcaccttctggggagcagctgcacatggagcccctgactccagacggctgcctgcaggccgcgtgtggaggccgcgtgtggaggccgtgagtggaggccgcgagtgaggaaaactccccgg

SEQ ID NO: 69026 - DNA, 122 bp, Homo sapiens
ttccccgttttgcatatggggatgacggcgaaggtggaggtcacgtggagggcggcggcccggcgctgaggcgcttcgggagcgggctccgcccagcccaggccgagcccggacctcacacg

SEQ ID NO: 69027 - DNA, 122 bp, Homo sapiens
taaaccccccactttgcactgcacatgctttctaaaggctttctgtacttgagatatgaacgccttcccactttaatttttggatactttccctcatccctaaggtatcatctagagtttcc

SEQ ID NO: 69028 - DNA, 122 bp, Homo sapiens
cttctccctgctcccatgccagcttccaagatggccttccagacacaccaccagcacccacgtcctagtctgaggctctattttgggaaccagaactaagacatctacactcatttaagaca

SEQ ID NO: 69029 - DNA, 122 bp, Homo sapiens
aacacaggattagctcttgagttagacaggaagctggggtgtttgggactgaggcttcatcgtggcagctaataatgtcagggagcatgagcacttgtttcttccaaggctcacttcaagga

SEQ ID NO: 69030 - DNA, 122 bp, Homo sapiens
gggtgaggctgcgtgggtgttgctgattgatgaatagaccctgccatcactgcatatctccgggggtgccttccacacggcatctgtacaaacagcacacctggggtgtgtggccacagcca

SEQ ID NO: 69031 - DNA, 122 bp, Homo sapiens
gagcacccccgctcccggtgtcttttggtttcgaccggccgactgggaggggccgtgggacgccattcccataatgctctggggcgtgccgccgccgtcgctgccacctcccctaccgctag

SEQ ID NO: 69032 - DNA, 122 bp, Homo sapiens
gcagagaatgggtttcccgtaaccccgcctgtgtctttccttcagcctcgtcccaaatgccgtgggagggaaggcactctctgtcaagctgctgtcaccttacctgaagtaaggagtccacg

SEQ ID NO: 69033 - DNA, 122 bp, Homo sapiens
gtggagcatatatcctttaaggagaaacattgtcacacacagcatgatcctgtagtgaaacgggtagcctggttaagggatcagtaaacacgtgaaggactcatgagatattaacacataag

SEQ ID NO: 69034 - DNA, 122 bp, Homo sapiens
aactcgccagatcaggtgaggcgcgccagtgtgtttaagagacgttgcagaatagtagtccgccgtctctcgagcgcttactagtcgttgcttatgctgtttcctatccctgcagtgcctcc

SEQ ID NO: 69035 - DNA, 122 bp, Homo sapiens
tacccaccacaaaaccacatcaacaaatcagctaagagcatgctattatttcagttttttcgctgcatttagattccatctacccatggaagtgtgcaggaagatggagtcaccaaacggga

SEQ ID NO: 69036 - DNA, 122 bp, Homo sapiens
gacgcccttctcattcctccccaacttcatcccaactccccggtctacccaggtagttttcgtcttattcggaggctggacatttgctactggtccctgaagttttgcggctgcacccacag

SEQ ID NO: 69037 - DNA, 122 bp, Homo sapiens
cctgaaacgcccagtctcccggaaggtgggccgccaggagtctgtggacgacctggaccgcgacaagctgaaggccaaggtggtggtgaagaaagcagacggcttcccagagaaacaggaat

SEQ ID NO: 69038 - DNA, 122 bp, Homo sapiens
ctccctccctccgattggctgcggcggcagcgcggacctggctgcgctttcgccacaccacgcagcctgcgcatgctcagtgctggctagggaaaatgtgctctcaggtgcaggctgagggc

SEQ ID NO: 69039 - DNA, 122 bp, Homo sapiens
aggcaccactcaggctgagaggcaccagagcaccccaatgttattgagtctgggtcctgccgcagagccacccagacccagggcgcgcaaagacccctgtccggatgtatctgaagtggaca

SEQ ID NO: 69040 - DNA, 122 bp, Homo sapiens
tttacagtacattacactgttgactctggctgctggctgggagctcagctgttccatggtcgatgctggagcttcccctcatgctcggtccatggacacagaggttgatgttgatctccagc

SEQ ID NO: 69041 - DNA, 122 bp, Homo sapiens
agtgaaaatgtgaataggtcatagtttacgacggacgtccacgatctctccagagagatgcggcctcagggagaccgtgggcccccgagacacaccactcacccacgttacgttttcttgga

SEQ ID NO: 69042 - DNA, 122 bp, Homo sapiens
ggagggagaaaggagattgcctcggattccgacagcaggtaaatatgtcacttctaaaaccgttgaccatcgaggttggaaaggcggcagaaggtggccggcttctaaaaccgttgaccatc

SEQ ID NO: 69043 - DNA, 122 bp, Homo sapiens
ggagtggcccagaaggcctctgtcggccggtcagcgtgctagcggcctttctccaagaagcggccagctggccaggccttcccgggcaggtctgtttgtctgcccacatgcacacacgtgca

SEQ ID NO: 69044 - DNA, 122 bp, Homo sapiens
cctcgcgccgccggagccaatggtgacccggaccccgcccaggagtctgcccattgggggcgtcctcccctctccctccggccccgcccgcaggttcctgggtctctccttcaagaccacat

SEQ ID NO: 69045 - DNA, 122 bp, Homo sapiens
aaataggaattctgctcaccttaaattgtaatttatctgttcttgatatttctgacccaacggggaccatctaaaatctgaaagttgtcagttttaacaccagaggccagaagaatgatagt

SEQ ID NO: 69046 - DNA, 122 bp, Homo sapiens
tattatacacaacccaaccaattcgaccttaaacagatttttagaagaacttaagaaatacggggttaccacaatagtaagagtatgtgaagcaactgatgaccctgctcttgtggagaaag

SEQ ID NO: 69047 - DNA, 122 bp, Homo sapiens
ataaaagcgtgtgtgtatgtgtgtgtgcatgcatatgtatttccaatcaaaagtcaggagcgcggactatattatatagaacccagagattcaaaggcctgattatgaatggatagttacac

SEQ ID NO: 69048 - DNA, 122 bp, Homo sapiens
tagaaaagcctgtgaggaggtgagggacagtgagcaagcccatggcaaacagagggtccccgtccctgcacatctcagactgagaaggaagcaggatgagcaagtgaaaccacctcataatg

SEQ ID NO: 69049 - DNA, 122 bp, Homo sapiens
cgatgtcttctctaaatgagctgctcgcatcgactgctaataatggtgagtttatggaagcgatttcagcgcaaactgcgagagggtcttcttactctaatcagcctgcctgagctaatgga

SEQ ID NO: 69050 - DNA, 122 bp, Homo sapiens
ccaggagggaatggacctgcctgagggcacagaggaggcagcagctcgcaaaacaaggggcgattttgtttcagttttgacctttccagttctggggttcagaatttcctccagttagggaa

SEQ ID NO: 69051 - DNA, 122 bp, Homo sapiens
cggctagggcggaggtggcggccctgatggcggcgagctggtggccaacatgctcccagtcgctggcggcggtgcctgctcctgacctgggctccactcccaccccgtgcgccaagcgcagc

SEQ ID NO: 69052 - DNA, 122 bp, Homo sapiens
atggcttctctggcagttactgggagcagtgttgacaggcctgggagcaagccgaggctgcgtctccagtgccagcaggaggatggcggtgactgatgcaaagctctgaacggcaggagtga

SEQ ID NO: 69053 - DNA, 122 bp, Homo sapiens
tgtgttcacatctcagccctgggcaagtgacctacacacctgtgcctcagtttcctcttgcgtgaaatgggaatgacagtctctaggatcagatggtaccatgctgctctgccgtcctcagt

SEQ ID NO: 69054 - DNA, 122 bp, Homo sapiens
cggcgacttcgggcgtgtaaggagtatggtttccccgccggcgagggggtgtggtaaccccgggaacgccggctggagtcggacccgcgggctgctgacctgtcctcgggattgcggcgaca

SEQ ID NO: 69055 - DNA, 122 bp, Homo sapiens
gaggaagaacacctgtgtgcaaaataagccgcccccccgcccccggggcctcttggattacgctgtgctccaactacccattgcacgagttgcatcacacaaatgagcccccttttccatac

SEQ ID NO: 69056 - DNA, 122 bp, Homo sapiens
aaccccaacagagaggcttctgggcgggagggcccctggcatcccctgagtatagcaggtcggggaacaggccctggagccaggctgctgggccttgagtttcagctgggccatattctagc

SEQ ID NO: 69057 - DNA, 122 bp, Homo sapiens
tagtttgtccttaagtgcccagcttcctgccgtcttttgggaggactctgggcagtgggccgctcccattgccacattcagcagcctgtttcagggacccagggtggcaggtggctgctggg

SEQ ID NO: 69058 - DNA, 122 bp, Homo sapiens
tacgagaagaggagatcaaaaaatattgccctttaggtgctcgtgatggtcctgtgggttcgttcagttgccagaaaagaatggtaacatgaacagcggagcgtgagagcgtcaccggggga

SEQ ID NO: 69059 - DNA, 122 bp, Homo sapiens
agataaaaaggccccttggctgagatttgttttattattagttagccatgctaccgggcccgttactttccctttgagtctcactgtttaaaatctctcacatgacattttgggctggatgg

SEQ ID NO: 69060 - DNA, 122 bp, Homo sapiens
gacggccccagggcaggcaccggcactcaccattgtcctggatgatctgtctgaggtagtcggccatgaggttccgcagggaccgcttgtaggggaggcccaggcggtgggggaagagcaca

SEQ ID NO: 69061 - DNA, 122 bp, Homo sapiens
ggagatgaaggcagagaacagagatctgcagccaaggtgcagagagacgccctcagcccccggaaaccccctcgtcactgcccccttccacttcatttcccttcccggacctagcgatccag

SEQ ID NO: 69062 - DNA, 122 bp, Homo sapiens
caaggagcatggcgctgtgactagctcagacaccgtgtcctccctccaaacctcagggagcgagggccctgtcaggtccctgggagcagacgaagattctcctgaagccagggaggcagggc

SEQ ID NO: 69063 - DNA, 122 bp, Homo sapiens
attgccagtccctcttccttgtgtagtcagactgggcttagagtttcccttttgtaggtccgtgtgactccttttgtatgtgtgtttatcaaaggacagactcctctgaggacccataaaaa

SEQ ID NO: 69064 - DNA, 122 bp, Homo sapiens
tgggtcgcccgggaccaagcctggctgaagggacacattgagcggggcaaaggcatgtggcgcatcagccgggctcacgagcgtgtacccgagaaaccaccgcacggagcccatggcggagg

SEQ ID NO: 69065 - DNA, 122 bp, Homo sapiens
ctcgttctcccaggctgtcctgtcgaggttccctgagtccccccgcacactgaaaggcatcgcaggtgcagtgcgcacccctttcccacccaccccaagaagccctgtcccgccatcagtct

SEQ ID NO: 69066 - DNA, 122 bp, Homo sapiens
tccagatggggatggaggtggccaggctgccccgttgattgtgtgccgaggagccctccccgggaaggctgtgatttatacgcgcaggcttgtcacggggtgaaaggaagggccactttttc

SEQ ID NO: 69067 - DNA, 122 bp, Homo sapiens
agttctgtcttccgatcccgggtccgaggggccggctgtgcggctgggaagcgccttctccggttgggatcgccccatccatgtctccccggaccctcaaatcgggggcggcggcaccgggg

SEQ ID NO: 69068 - DNA, 122 bp, Homo sapiens
cttcggggaggtgttaggacacttggggcggagttagcctcgctcagggcgcggctaaggcgcccagatggcctgcgggcgccaccacgtccctggtcccagctcgggagcacatcagaggc

SEQ ID NO: 69069 - DNA, 122 bp, Homo sapiens
gcaggcccgggcgcggcacagccgctgtgcgcgatggggcagtgcgagaggttgcagttgcgggcgccagccgaggcacaggtgatcacggagggccggttctgcggggaggaggggtgtca

SEQ ID NO: 69070 - DNA, 122 bp, Homo sapiens
gcgagaaatcctgcttccaactgcgatttcagctttcttatggaaatgaacgcgacggcccgttcgccccgagcctccctcccgttcccagcccctcttcagcttaccctttcctcccgcta

SEQ ID NO: 69071 - DNA, 122 bp, Homo sapiens
tctcggtttaaaccgacgggggagagtcaaagcctccggagccagagggcggctaaggcccgcacggtccccgggctggaggcgaccgagcccgttacctgatcgcgttgaccggcgggttt

SEQ ID NO: 69072 - DNA, 122 bp, Homo sapiens
gccctaggggtaggagcatattttaggggtcgagcgacacacccctgggcttccagaagtcggatggggctaaacgtggagagcaacaagcagggagacgcgacgaataccaggccgaggga

SEQ ID NO: 69073 - DNA, 122 bp, Homo sapiens
tggaagccacgtgtgttttttcggtagttttactagaatgtgcattcgtgtggccgttctcggtggtgttcttggttaggagccacgtgtgttttttcggtagttttactagaatatacgtt

SEQ ID NO: 69074 - DNA, 122 bp, Homo sapiens
cctgcgcggtgaagcgccatagagctgagcactcctcccagattcctagagcggacagggcgatggcaggttcgccgggtgtgaggcttcacagcggtccggtgaccaagtcgaggtaaggg

SEQ ID NO: 69075 - DNA, 122 bp, Homo sapiens
ttttaggtttgacacctatagatccaagaaagagagtgaacgtctggtccagtatttgaacgcggtgcccgatggcaggatcctttctgttgcagtgaatgatgaaggttctcgaaatctgg

SEQ ID NO: 69076 - DNA, 122 bp, Homo sapiens
ggtgttgagatacaagcataggaacgaactcaaggctaacagctgttctgtattcagagccgcacaatcaaggaaaaacacgatcggaggcgggccctggacgggaacaagaagggtgggct

SEQ ID NO: 69077 - DNA, 122 bp, Homo sapiens
tatccatggcttttagaacgtctgagttgcctgttacttgtgaatcaatttttctagtcccggtaagtgaactgaggaaccatcttttcagttgcttattggacaactccctctgaatatcc

SEQ ID NO: 69078 - DNA, 122 bp, Homo sapiens
ggggggtagcggggtcagtgtcggctccctgtgggggcaagagtctgaagggttgtgattcggggaagcaatagccgtgggtgtacggtgctgacctcggcccccagccaggcctcagggcc

SEQ ID NO: 69079 - DNA, 122 bp, Homo sapiens
tggaagggtcacagtgcctgctaccattcccccatcatcttctctctctttgtacaaagtcgtctccgagactgaacattgaatatgcctgctaacaaagtctaaatcatagaaacaatgaa

SEQ ID NO: 69080 - DNA, 122 bp, Homo sapiens
ataccgggaccacctcccgggggtcgaggtgggaaggaaatgtccctgagagccgggacgcgctgcctccgctgcctggaggagctgcgctgtcctgccagctaacttttgcccacggtttc

SEQ ID NO: 69081 - DNA, 122 bp, Homo sapiens
agtccctgtggacggaattcttgaagtgtagcgccgctcagtccttccaccggaagtgtccgatcggaatcagccctgtccgagaggtgagtccgggtttggggatccagatgtccagcccc

SEQ ID NO: 69082 - DNA, 122 bp, Homo sapiens
aggagcggagctagcgggtgagccaaggggatgtgcacaggcctcctcagtcccgcccagcgcgcgcgcgcggcggcgaagccggcgggcggggccggggagggccctcgccgggtcagctc

SEQ ID NO: 69083 - DNA, 122 bp, Homo sapiens
cgtccatgggtcagctatgtggactctagctgccaaaggcgcttctccttctgaacagagcgctttgctcagccagtgtagacatggcctgataaacaatggaacttctcccttgagaactg

SEQ ID NO: 69084 - DNA, 122 bp, Homo sapiens
gtttttaagccacacccgtcgtattcttctcagactatcaaatcataaagaaatgggcaccgaaccagcactcaaaaccttgacttttccaatttcagataagattttgctatcattcggtt

SEQ ID NO: 69085 - DNA, 122 bp, Homo sapiens
gcggcggtgagcgatgccttccctctgccacaaggcgccgcctgcagagcctgccgcgtccgccacgcccagagcgtacccgcagctcagcgccgagttactcctgctggcggtggccaggg

SEQ ID NO: 69086 - DNA, 122 bp, Homo sapiens
gtggccctgaagtgtaacaggtgtgcttcttcagacccagcgggaagccctctgtccccacgcccgggcatcacctctgtcccctcgggcttggtcggcgggcacttctccccttcctctgc

SEQ ID NO: 69087 - DNA, 122 bp, Homo sapiens
cgtgatccgcccgcctctgcctcgcaaagttctgggattacaggcgtgagccaccgcacccggcccaggttctgttctttcaaatgtttactgaggtgcagtttcaagagctgaagtgtata

SEQ ID NO: 69088 - DNA, 122 bp, Homo sapiens
acgacgaaaaaagcttctgggtagaattggaagttctggggctctcggcgccgcggcctccgcgcggttctcttcctcccctccccggcctgcttttcctccttctttccctctttgttgcc

SEQ ID NO: 69089 - DNA, 122 bp, Homo sapiens
acctgggtcctgacgcctcgcagcaaggagcgcagctgtccccgcatcacagatgaaaaccggcgtctcaggaatgaaaaaggagcccttgtcacatctcacagaaccatgagtcgggaaac

SEQ ID NO: 69090 - DNA, 122 bp, Homo sapiens
aatcaagatgtcatcagggctgggtacctgctgcaggcttcaggggagaatctgtcccctcgctttttccagcttctagaggtcactgcattctttggttcatgacccctttgtccatcttc

SEQ ID NO: 69091 - DNA, 122 bp, Homo sapiens
ggcgggtggccgcctggggagacccggacatccaggggacgagctcaggcagcgctgacacgaacttcctaagccgcgcttcgggctgtggaccgccagagctgaacgcagtggcccctccc

SEQ ID NO: 69092 - DNA, 122 bp, Homo sapiens
tgaatcaccaccatcagggcaggtaatcaccccctgtccttcccaccgctttcatctgggcgccaaggccctcattaggccgcacgtgacgagggcggacaggggactggctgggccggtcc

SEQ ID NO: 69093 - DNA, 122 bp, Homo sapiens
ttgcaagtgacagccactgaccaggatgagggggtcaatgctgagataaactactacttccgaagcactgcccagagcacaaaacatatgttctcattggatgagaaaacaggtatgattaa

SEQ ID NO: 69094 - DNA, 122 bp, Homo sapiens
gactaggcctgagcgcctcaagggccgagctgggtcctccccacccgccggattccccagcgcccaggctgtctccaaagaatccccccgagagcaggtccccgcttctcgggcgtcggggc

SEQ ID NO: 69095 - DNA, 122 bp, Homo sapiens
cagggcatgccgggaactgcgagccggccgcgggtcttcgggctgcgtgggcctgggaggcgccgggaagagcagtcgcgacggggctagggacgacacactgcattcactggaagggacaa

SEQ ID NO: 69096 - DNA, 122 bp, Homo sapiens
ccttcccgggatggtggccggtggctcagggaagtcccattcgaaatagttgaaaatagccgaagtcgttgctcattttatgattaacagtatcctctgaggcctcccgcccaccctcaccg

SEQ ID NO: 69097 - DNA, 122 bp, Homo sapiens
caacgtgtgtgtgtgtatgtgtgtatgtgtgtatgtgtgtgtgtgtgtgtatgcacacagcgcgcacatacagcagcacgtttgcctaaaagccgtgtgagtgtgtgtgtgtgtagcgcacg

SEQ ID NO: 69098 - DNA, 122 bp, Homo sapiens
gcccggcagcctgtccaagctattccagtgggtcctcacctcacccctgtgaacaggcatcgtcatcccttaaggattggaggaaggcaaggagggctctgccaggccatgccatttgtctg

SEQ ID NO: 69099 - DNA, 122 bp, Homo sapiens
ctaggccgttcccttcagacagccccgggccagcggccccctcgggaaatgtccagcggccgcagaaggggcagcgccccctggcacagcttctcccggttcttcgctccccgaagtccttc

SEQ ID NO: 69100 - DNA, 122 bp, Homo sapiens
gagtcccatttctcacctttcacacccccatcctcacacaagtaacccgggtgtctgacacgttacttaggtttttaatccgcgctgagacaatctcacagagaccctacttcacctctcag

SEQ ID NO: 69101 - DNA, 122 bp, Homo sapiens
cctccatgctcgtgaccaggttgcgttcggtcgtgttttccgtggggcaggcacagcctccgggcccttgggcagcctcgctctgcagtgaaagaaaacaccaaaaacgcctgcccagcaag

SEQ ID NO: 69102 - DNA, 122 bp, Homo sapiens
tctaagaatgcctaactacaagaaaaaggccacctaggcaatggaagccctcaaagaagtcggaatgtcatagtcttgaaatgaaagggaaactgggaaactgggtttctcattaaagttgt

SEQ ID NO: 69103 - DNA, 122 bp, Homo sapiens
tgagtgggtggcagagagagagcagggggtgtgaatgggctggagaccccaaaggctggccgtgcctccccaacttggtgagcttagccttccgtttttggaaagcagcctggagctggcct

SEQ ID NO: 69104 - DNA, 122 bp, Homo sapiens
aaatccctttccacaccctcggggacgtcccctggccctggtatcctcaggcccgcctggcggctgacacaagttgttctaacagggtattccgtgcgctcacagttgcctgacagagcagc

SEQ ID NO: 69105 - DNA, 122 bp, Homo sapiens
cgcccggaaaagggcagcgctggagtccgcatgaggccagagggcgagccctggggtccccgcagcccgggccgaccgggaccagcgtagcggagacggggacgcgggagggcgcccggagg

SEQ ID NO: 69106 - DNA, 122 bp, Homo sapiens
acccagtcaacttctctcttcatcctttgcccaaatatctcttgttctatgaatctttgacgcttccagccctttccctgtgaactcactcaccatacagtgtctcccacctcactggcact

SEQ ID NO: 69107 - DNA, 122 bp, Homo sapiens
cccggccccgtagggagcgcaccgccccctccgtatcctcgcggctacgccgggtttcagcgtgacaccctcgccagccgcctcgcctaacaaacttgacggatttgctccacaacctttct

SEQ ID NO: 69108 - DNA, 122 bp, Homo sapiens
gtattttgaatgatgaccacattcacagagaaaaccctgtttaataaaaagtgcacatggcgccttagcaccatctcccacaacttgcccacatgtcggacatatccgacagttaaaggtag

SEQ ID NO: 69109 - DNA, 122 bp, Homo sapiens
ctcttttggagaatgctgaacgtcataccttcctgatcgtaacctcaacgtggccctaagcgccctgtccagggccccagagtttctgaactcagcttaagtcagctccccaaattcagcag

SEQ ID NO: 69110 - DNA, 122 bp, Homo sapiens
ctcagcttcagaaagccctggaatgccccacaatggacaagcaaggaacaccctccgggacggaccgcgagactcggccctgagatgcctcaataccctggacaccccagaacctcagattg

SEQ ID NO: 69111 - DNA, 122 bp, Homo sapiens
tgtggctaaccagcctgtgcctgacctggagggcttggagctcatgccaggtgcctggcccgatgtcgccgacccggagccggttgtgcgccaggctgagctcccgcagttggtccaggccg

SEQ ID NO: 69112 - DNA, 122 bp, Homo sapiens
tgaaactgaggcactccttgtttaaaaacaatacccaagagctctacaacaatgctgtgtcgcccaggctggagtgcagtggagtgatctcagctcactgcaacctccgcctcccacgttca

SEQ ID NO: 69113 - DNA, 122 bp, Homo sapiens
gcggtgcgctcccggcacgggggtgctcgagcactgagtccgggcatggagcagcgaaggcgccgcctgcagtgcccacggaccaaacgggggtgacctctgaggccgccggcagctccgag

SEQ ID NO: 69114 - DNA, 122 bp, Homo sapiens
tccttatttgtctcttttatctcattcccatgtgagatgaatgaaaggatttccctgaaacgagcaggtatacaggagagcataaagggcttatgcaactaaatgcttcaccccttgacctt

SEQ ID NO: 69115 - DNA, 122 bp, Homo sapiens
ttcattcttgaagtcagtgagaccaagaacccaccaattccggacacattttggcaaccacgaagggacttttgcctatcaccaagcagtgagacaattgccgagcggtgagaccatcgcct

SEQ ID NO: 69116 - DNA, 122 bp, Homo sapiens
agccggtcaggaatccaggcaacctgaccctatttgccagtgtccgcttttaattttggtcgctaagggcaagcgcccgtgacaaacatggcggcggcagcctcaggcgcagtcacctgccg

SEQ ID NO: 69117 - DNA, 122 bp, Homo sapiens
cttttcgaagattccttccaacaggttagatcatggtgcccgaaaccagtggcaggccgacgccctcctcccagcaccccatctcctatcgcgtggcctgttaaacccacactgcagacttt

SEQ ID NO: 69118 - DNA, 122 bp, Homo sapiens
actttctgtagagcaacttcgcggacttccggttcaagccggaagttgtggttaccaaggcgacgcaacgccgcccggccaggtgagcaaaactgatcttacctttggatgccggggctccc

SEQ ID NO: 69119 - DNA, 122 bp, Homo sapiens
agagaaggtaccgggtagcccagctggagtatgacctgggttctggactttcttcaattccgtagattgagtgtgtggcctcctgctggtagctactatggagaacaacactagctttgatt

SEQ ID NO: 69120 - DNA, 122 bp, Homo sapiens
tgtcctggcctgggtggaaccctgggaggcgggggcgtcgtggctggtgtgccccactggcgctaggccgtggattgcttggtttccagaacatctctgcggggcgcagggccttcctgtca

SEQ ID NO: 69121 - DNA, 122 bp, Homo sapiens
gtactctgtccctttacttctcaagccggccaacgcttaaggaaaatagaaaagaacctacgtgaatatcggggcatgttccccaatatctggcacccacgtggtctttcttttttcctaag

SEQ ID NO: 69122 - DNA, 122 bp, Homo sapiens
ggtctgatccactatagctttctgaatcccagagaaaccattacatctgagaagtatgctcggcaaatcgatgagctgcaccaaaaactgcaatgcctgcagccggcactggtcaacagaaa

SEQ ID NO: 69123 - DNA, 122 bp, Homo sapiens
cccagccctacgccaggcgagggagcagtgcggtgggcggtaccccaagtccgctgggggcgtggccctggagccatgcctcgcccccagcgcgcgctcccggcgccggccccgccccctca

SEQ ID NO: 69124 - DNA, 122 bp, Homo sapiens
tgggtggaggtgtcggaaatgccactacggtcctcgtgtgccacggggcagcagctccaccggggctcctcctcaagccaggccacggcagtgccggccacctcctccactctgaccccagg

SEQ ID NO: 69125 - DNA, 122 bp, Homo sapiens
gaggccacagtgccttctggaagagttgttgtgctgcttgggagcactgcacaggagaaacgggggctggaggtaaagacaggaggctcgggaggcggcgacgtgggcgagctggaatagtc

SEQ ID NO: 69126 - DNA, 122 bp, Homo sapiens
tctatttccaagacaagcaaaattccttaacagcacccttctttagcgtgctaactttatcgagagcttggtacatagtaagtgctgtaagccctaaatgactggactagagaagtcaaaaa

SEQ ID NO: 69127 - DNA, 122 bp, Homo sapiens
ctaagaaggacacacactgtgttgtgcaattagagaaaaccaggctgagctttcgtcatgcgagatgtaatgccttgaagccaaatgatgcagtatttttagttgtaattactggcttgttc

SEQ ID NO: 69128 - DNA, 122 bp, Homo sapiens
tgggtgccatggagcagggggcggtgctcgtcggggaggcttgggccacgcagcagcccacggtggggggcaggctcaggcatggcgggctgcaggtcccgagccctgccccacggggaggc

SEQ ID NO: 69129 - DNA, 122 bp, Homo sapiens
tgtggatccttctcccgcaatctccgtgcgcggcccgagtcagtacccgcagcctcccgacgcacccgctggctccaagcctccctaccccaggtttcctggctgagagagagacagaggga

SEQ ID NO: 69130 - DNA, 122 bp, Homo sapiens
acgggcggatgacctccttccggacgcagatgagggacgggcggatgacttccttccagacgcagatgagggacgggcggatgacttccttccagacgcagatgagggacgggtggatgatt

SEQ ID NO: 69131 - DNA, 122 bp, Homo sapiens
cgagttccttcctctgtaaaatacggaggctgagaccgatgatcctaacgtctcttcctacggtgcagtatgttacacactgctggccccattgccccttattgcaccccaagtgcaagaag

SEQ ID NO: 69132 - DNA, 122 bp, Homo sapiens
aacggtggggtccgcgctcaccgccttgagcccgcccctgcgcccggcgccctcagcccacgccccgcccagtcccccaggccctagcgtttacccccacgccccgcctcgccccgcgaccc

SEQ ID NO: 69133 - DNA, 122 bp, Homo sapiens
tgacccccactcacgcgcatcacctctcaatctcggggcccgcgacctgacccccactcacgcgcatcacctctcagataatctcggggcccacaacctggcccccactcacgcgtatcacc

SEQ ID NO: 69134 - DNA, 122 bp, Homo sapiens
aggcgctagctgactggggtggttgggaccgttagctcggcaggctggcaggctccggggcgctactccattggcggccgggatggagactatgcgagcgcagcggctgcagcctggtgtgg

SEQ ID NO: 69135 - DNA, 122 bp, Homo sapiens
gttttgctttccccggatcaaggaaaaagtgttctcccgggcgcctggcgtgcaaggactcgggctccagggggcgggtctagcttcttgtacacctttattaggaatgtttatagcaatcg

SEQ ID NO: 69136 - DNA, 122 bp, Homo sapiens
aaagggagagatgtgttctgctgtggacaagtttgaagatgctcagttggcctggccacacggcgagatccaccctgtgggttgacactgctggttgtcagtgggaaccatggggcatattt

SEQ ID NO: 69137 - DNA, 122 bp, Homo sapiens
tgaaaattggcacatcttggcttccgcaggtaccagggcctttaaaaaggttcagctggccgggcacggtggctcacgcctataatcccagcactttgggaggttgaggctggcagatcacg

SEQ ID NO: 69138 - DNA, 122 bp, Homo sapiens
tcagcgggtcccgcggaggccgctggacacaaaggcagctttgtgaggcggcgacggctccgcggccgccccaggacagagcggcctgggcagagggcgggccggggtcggcgccgcggagg

SEQ ID NO: 69139 - DNA, 122 bp, Homo sapiens
atggtgagggcaagaaaatgcattttcactttaaagtctagcaactgtaattggcaagggcgtttgacctacagacttcttccatcaagtaatacaggaatggaagggccccccacgtttgg

SEQ ID NO: 69140 - DNA, 122 bp, Homo sapiens
cccattctagatctatcatcagaatctgcactgtgacaagaaccctagctgattgttacgcgctttaattaagtttgagggagcgctgttctaagcgtgaatggtttcatatgccctctagt

SEQ ID NO: 69141 - DNA, 122 bp, Homo sapiens
ggaatagagataaataccaaaataaggaaaggaagcaaccattaattaaaagacagttgccgtggcatctgtaagtatttaacagtcaaaatgctaactttacctagtattaaaggtagtcc

SEQ ID NO: 69142 - DNA, 122 bp, Homo sapiens
tcgcccacgctgcctgggaggcgcgcttctgccgccttcttgccgcgctcgctctagcctcgcccactcctgcggccttacagggccgaacctcaccctgccctgcggaaggcaggcctaca

SEQ ID NO: 69143 - DNA, 122 bp, Homo sapiens
gagacgagatgtcgctatgttgcccaggctggtctcaaactcctggcctcaaagatcctccgcctcggccactttgtctgagccactgtgcccggcctgaggacacatgtttgacataaata

SEQ ID NO: 69144 - DNA, 122 bp, Homo sapiens
ggcggtgcgagctccccgcctgcgggacgcacggagaccgcggtcagcgcgccgcctggccggcccagcgcgcccagcccgcgcccagccccgtccactcccgtccagccccgccgcccggc

SEQ ID NO: 69145 - DNA, 122 bp, Homo sapiens
ccacaataataaaacaatatgatattgttggtaggaaagacacattagtgcaacagaatccggaaataccacaaatgtagtattttatttcaatcaggaaaagatgatttcgttgataaatg

SEQ ID NO: 69146 - DNA, 122 bp, Homo sapiens
ggacatttcccttaatcttgttatcctcctcagagaggcggcacccaccccattggcagacgccacgggaattctctgggcctgcttgtcatcactccagatgttgtttagagttcttctgt

SEQ ID NO: 69147 - DNA, 122 bp, Homo sapiens
ggacgtagccatcgacacagtgaagacgggcatggggggcaaggcggggaacaagggcgccgtcggcatccgcttccagttccacagcaccagcttctgcttcatatgtagtcacctgacgg

SEQ ID NO: 69148 - DNA, 122 bp, Homo sapiens
ggggttggcgcagaggccggagggggtggggggcaggccgacggggtgggacaggaaaagcggagagaaaccgccctctgcaggtccccttggctcccccgggaggaaaggcagcctgccct

SEQ ID NO: 69149 - DNA, 122 bp, Homo sapiens
attttaccctaacctccttttgaagtcttctccaactttgttatagcagttccgtccttacgctgcccacattcaaattatgcgcctctccttcctgccttgattttaccctaacctccttt

SEQ ID NO: 69150 - DNA, 122 bp, Homo sapiens
tgactgcgctgtgctggtgcagggtggggtcagatccttcccactagagactggggtaggcgggcggcagagggggcggggctgcgggctgcagctgcagaggggacgtcagtctccgagac

SEQ ID NO: 69151 - DNA, 122 bp, Homo sapiens
tcctggttggtgcaaggccaggtccgggaaccagccggccaggttgcagccttttttccccgcccagcacatgttgggtgtgagcgagtgcagattaggcaaggccccaattatccctcggc

SEQ ID NO: 69152 - DNA, 122 bp, Homo sapiens
gccccccgccaggagaccaccccggattcccgagccagtgcacctgccggtggtgcccgacggcagactctccgccgcctcctctgcgttttccctggcctcggccgggtgagacctacaag

SEQ ID NO: 69153 - DNA, 122 bp, Homo sapiens
cgattccgggaagcggacagatcgaagagaccttctgggcgaagcggcagggcagcctcgcggggctgggagtggatctgaggtcccgacccaggcggctcggagtgctccaggagccacct

SEQ ID NO: 69154 - DNA, 122 bp, Homo sapiens
cctccatccgtgtagttgggtgtgatcatctatcctcttcagctgctaatgtttggaccccggatttcctcctctgtcgcgggcctgccgtcaccgcccattctgtcttccttccaggtctc

SEQ ID NO: 69155 - DNA, 122 bp, Homo sapiens
tagtcaattcatgtggcctaagtggcagccagttaactccaatggttaaatctcagaagccgacctttctcatgaatatttgtaacattcacacaaagacaattgctttagctccagcttgc

SEQ ID NO: 69156 - DNA, 122 bp, Homo sapiens
ctgactcccgaagggggtcttgagaggggtcctgcgaacccctcctctcccctggagacccgtccgggggcggggcctttcccagcctctgctcacagcctgcgccggcccagcctgtagtc

SEQ ID NO: 69157 - DNA, 122 bp, Homo sapiens
ttccccacacaccagagaggctggtagggctggccctgtgccaggcacacaggtgacagacggtccctgccattggagagccacaggccgtggaagtaaggaactgcacattgggatgttca

SEQ ID NO: 69158 - DNA, 122 bp, Homo sapiens
caagtagcttgtccaagctcacaagtgatcagcatcccagacaaactggccctggcctctcgtcccatgtagaatgggcagagggttgctggggtgggagccccttgggcagggcagttgtt

SEQ ID NO: 69159 - DNA, 122 bp, Homo sapiens
tggttggagtcccacggggctgcccttttccacccctaggggcctgctgaagactgaggacggaggtgggggcaacaggatggggagcccgcaatagcccatcctgacctaatccgaaagga

SEQ ID NO: 69160 - DNA, 122 bp, Homo sapiens
atcatcaaatttcattttctttaaattgtatataatgaatgtgttctccctttttaggtgcgctttgtaaagaatataacttcctggaaagagatgaaaccaggattttatcatggacacgt

SEQ ID NO: 69161 - DNA, 122 bp, Homo sapiens
tccccggcggtcgcagccgggcgaggggtcgcagaggaggcgccattcagcgtagccgcgcgggcatgctccccggccgcccagagcccctgtccgtctgcggcccccgccccgggcgctct

SEQ ID NO: 69162 - DNA, 122 bp, Homo sapiens
attcacgtttcatcttttctttgaacctactccttgacttggttttttgtcttgcctttgcgaacattcatttttgcttaattatatttttctcatttatatttgctttccttgaatttcct

SEQ ID NO: 69163 - DNA, 122 bp, Homo sapiens
tcctcaaaacaaacctattttatttccgtttttacagacgaggaaactgaaatacaaaaccgtgagcatggggagactttgttgtgatcagagaaggcatcctgaggaacacacacgtgaat

SEQ ID NO: 69164 - DNA, 122 bp, Homo sapiens
cccaattattataggctccaaccagctgatatgtactctgagagttcacaaatagccattcggaggacatttgccacattttccaagcccccttggtcctgggttaaaacattttgtttgca

SEQ ID NO: 69165 - DNA, 122 bp, Homo sapiens
tcaatcctaaatcactaagacaggaagtgaattactctgtcggagcctcaatttctacctcgaaaaatatgttttattactaactcctgtactagattgagagttacggagaaggatttatc

SEQ ID NO: 69166 - DNA, 122 bp, Homo sapiens
cttccctcatccacacccgcagcgctgccagaaggcgctgctctgcctgtggtcagccctcgacccgtgtgcttggtgggagctgcatccccgcacaggcagccccactgctccccaatctc

SEQ ID NO: 69167 - DNA, 122 bp, Homo sapiens
gctaagttagtgatctcagtcagttcagcaaaactcaggagagggaggagagggccgccacgtccctgccgtcccatagctggaaatcggcaggccctttctgtggtgagttccacgcatta

SEQ ID NO: 69168 - DNA, 122 bp, Homo sapiens
ggttgaatggctaacaaaggacagcacagatagctgagcccaaactgtgtggctcctccacgaatcaggtttctccccactgtgctctcaaggcacgcccgccacaccagcctcatccctca

SEQ ID NO: 69169 - DNA, 122 bp, Homo sapiens
gttctagggtctgctttgttcctgcctgttccgctccagctcacttgcatcctggtctctcgtgtctcgttattcggtcgcagttgcatgagcttcctcagagcagaggctggatctcattt

SEQ ID NO: 69170 - DNA, 122 bp, Homo sapiens
tgcttctttaataatcaacaatgttgctcgcagtcccagcgctccgaacgacggtgcctccggttgacagcaacctgagcggacccgcgcctaggccctccgccaggcctgcgctgcctcgc

SEQ ID NO: 69171 - DNA, 122 bp, Homo sapiens
tgttgaactctgagcggtggtgtgtttccctggataccgccgggtgtgcttgttctatttcgttcctgcgtttttagagctttgcggttccctgtgtgtgcaccactgtgcgtgctcccgct

SEQ ID NO: 69172 - DNA, 122 bp, Homo sapiens
cagttcctgcagcaacaatgttttgtgccttagtttcctcattagtcaaaagattgcctccgttgggtgcaggaagactccgctataaatactgttcttcctcaccagtggccctctacctt

SEQ ID NO: 69173 - DNA, 122 bp, Homo sapiens
agcccctgtgtgaggacacaggaattcctcttgggatacagggaaggcccccagctgaatcgtatccaaggaagatgttgcaaagcttgcaaagcttgttcagaaaaaggagcccagcttga

SEQ ID NO: 69174 - DNA, 122 bp, Homo sapiens
ggcgccgcaatgctgaccgcgagacccgcacccctccagggcgggaagcaggtttggtcacgggcccctgaggaggaatcgtagctctccgagcccaggcctagtcctcaccaccccactcc

SEQ ID NO: 69175 - DNA, 122 bp, Homo sapiens
cgtgattcaccctccttggcctcttaaagtgctgggattacaagtgtgagccatcgcgcccggccggtttatttttttaaaaatggctgggcacagtgacttgtggctgtagttctagctac

SEQ ID NO: 69176 - DNA, 122 bp, Homo sapiens
ccagctacttgggagactgaggtgggaggatcacctaagcccaggaggttgaggttgcagcgagccgtgtttgcaccacttcactccagcctgggaaacagagcaagaacctgtctcaaaaa

SEQ ID NO: 69177 - DNA, 122 bp, Homo sapiens
gaaaatctcctcagttcttgtctgttccataaggccagcccaccatctgagccccaaactcgagtgctcaccctgcagcccgggttgggatgtctgtgctccaggctggagaccacagtgaa

SEQ ID NO: 69178 - DNA, 122 bp, Homo sapiens
gcaaaatattcaaacataaaatctcagatgcagccaaatcagaacagcgtgttctggtgacgcgtttcggcaaacgcaatcattcacgggctcctctgagcctaattaagcaaaagcccagc

SEQ ID NO: 69179 - DNA, 122 bp, Homo sapiens
ctgcgtcagcagcctccaacccggcatggattagcccgggaagactcgactcacgacttccgggcgccctgccgctctgctttcagggagtccccacgccaccgccacgtggacgcagtagc

SEQ ID NO: 69180 - DNA, 122 bp, Homo sapiens
tgtgtcttcaagaccccagaaatcacagctggtaggtggtcaagcagcagtgctctggggcgattctgaggtaaggattgcaggcagaaccagggaggaagttaaacaagggctgggcttcc

SEQ ID NO: 69181 - DNA, 122 bp, Homo sapiens
cgcagcggccatccacgcagcgcccgcgcccgcgacagtcgccaggacaggcgcgcgtgccgcagtcccggcctgtgtaccccggccaacacatgcagcggccactctcacagcggccccgg

SEQ ID NO: 69182 - DNA, 122 bp, Homo sapiens
gaaggccaagctggcagagcaggccgaacgctatgaggacatggcagccttcatgaaaggcgccgtggagaagggcgaggagctctcctgcgaagagcgaaacctgctctcagtagcctata

SEQ ID NO: 69183 - DNA, 122 bp, Homo sapiens
catttttgagaatctaagccccctgtgggcaggaaccgtatctgtgttgttcctgcggtgcgggggcttagagtagtgaccagcacttagtaaaacatactcattaaatgactgaatgaacg

SEQ ID NO: 69184 - DNA, 122 bp, Homo sapiens
tcccacctctggacctcccctcgaagcccctcccttgtgggccgccagagcatccatcctcggagtgtgtccagcatgttcaggacagcaggaacagggcattctttggaatgcactgtctt

SEQ ID NO: 69185 - DNA, 122 bp, Homo sapiens
aagaggtagttgcgaagactcaaaatcctaaatcacgcactcatcagtacgcagctgttgcgaaacagctcttaaattgccactttaaacccaaagagagtatgtctctagcctcagctgct

SEQ ID NO: 69186 - DNA, 122 bp, Homo sapiens
ggcgaggagaggagccaatatatataaggaaggcccccagcgcgcaggtttcagtagcggcgctgcgcgcaggccgggaacacgaggccaagagccgcagccccagccgccttggtgcagcg

SEQ ID NO: 69187 - DNA, 122 bp, Homo sapiens
gacctgacaaggaagagctcattagggtctctggagagtggctgacaactgaggagctgtcggctctgtcaaaagacctttgaaaatagttcttgtttttgaatcagtatcttctgaatcac

SEQ ID NO: 69188 - DNA, 122 bp, Homo sapiens
gaggtgtggagggagaggcgcgggcaggaacttgggctgcgtgcagcgctcgtgggccagcgcgagttccaggtgggcgcgggcttggcgggcccacacttggagcggccggccagccggcg

SEQ ID NO: 69189 - DNA, 122 bp, Homo sapiens
tggaagatgagggttgcattcacactctcttcatagctgtgacctaaggatgatatgaaacgacgcccttggcagatctatcagaacccctaccacataataagtgctcagtaaaaggtttt

SEQ ID NO: 69190 - DNA, 122 bp, Homo sapiens
cttgatggtctgcagaatgatcttctcctttgtggtggtgttcatggccaccagccaggtcgtgaaactttggtctctcttgattcttgtgagcagtggcacattgctgtcactcacaggca

SEQ ID NO: 69191 - DNA, 122 bp, Homo sapiens
gccgccgccgccgccgccaccaccagtaacctcccccttcctcctcctcccctccccgcccgccccacccgggaggcgcacacccacatatccggggaagcctcccgccgccccgccaacct

SEQ ID NO: 69192 - DNA, 122 bp, Homo sapiens
agccaagtttactcagatctgtgctccaagctcctcctgccctgcctggtctaccactcccgggtcattgcttaccaattccatttggtgtactttttggtaatattcaagaaaaatgtcaa

SEQ ID NO: 69193 - DNA, 122 bp, Homo sapiens
cactacaggtggtaactcccctgctgctcaatgtggcgtaaatcttcccttccatagctgcgggaccacagctcaccgacctgggacaaacacccgagacgggccgaattccagctcgcagg

SEQ ID NO: 69194 - DNA, 122 bp, Homo sapiens
agcacagggctggatcccaactcctcatcctgtcaatcagggcctttgtgaccaacctctcgcctctccacccaccatgcttcctcatgggctcctgtctggttcccagactcacttctcaa

SEQ ID NO: 69195 - DNA, 122 bp, Homo sapiens
ccctgggttgctgttgttggtggagaagttggccttggggtccaaggcagcctggggcatcggccgcacggtggccgtgggggcggcgggggctggggtgctgggtgggggcagcagcagag

SEQ ID NO: 69196 - DNA, 122 bp, Homo sapiens
gcgtgacacttgaccgcgtctgccggcccctccccttgtccgtcccctccgcgccgctggcgcgcgccttctgaatgccaagcattgccataaactccggggacaaaagcctgggtcacaaa

SEQ ID NO: 69197 - DNA, 122 bp, Homo sapiens
agcgggttcacaacctcgatgccatctaccaccctgattcccctttgccatgtaaggagacgtatatgagcacatatgtgaatatatcaccctaggtcctggggacccagtgaggatggtat

SEQ ID NO: 69198 - DNA, 122 bp, Homo sapiens
gaccaacatgtggcatcactgcatgtcaacgtgaggaccctactgaccaaatccctggctcggaagcaaatgacctctgtgacctcgggccagtaacttaaatgctcacagcctcagtttcc

SEQ ID NO: 69199 - DNA, 122 bp, Homo sapiens
ctgcctagaggaggtgggctggcggcgctgtagctgtgcgcctggctacaagctgggggacgacctcctgcagtgtcaccccgcaggtgagaagcccccaatacatcgcccaggaatcacgc

SEQ ID NO: 69200 - DNA, 122 bp, Homo sapiens
aggtggacacacccccagtgatattgttcctaatttcaacgtgggagggatgatactacacggaatgcccctgggggtaaaaacactcctgtgatattgttcttaatatcaaggggaaagac

SEQ ID NO: 69201 - DNA, 122 bp, Homo sapiens
gggaggctggggacagagctgaagcccaggttcagatggcggccatggaaggcggagagccgtcagcgaggcagcgccggggctgcgggagcttgcgggagggaagcgcccgtgagccgcag

SEQ ID NO: 69202 - DNA, 122 bp, Homo sapiens
gagagaaaggagggagccggcttcactctttcccatgtacaagtctgatctagtctgatccgtctccccctgacctatcggtccttggagagtacaacctgggtcccgacagatgctgatga

SEQ ID NO: 69203 - DNA, 122 bp, Homo sapiens
gtctgcacgcccgggagtcagcactgggatatgacagcatgtaaattaccctagaggggacggcggagaacggtcctccgccacttctccggctggcgggcgggggccccgagcggctggat

SEQ ID NO: 69204 - DNA, 122 bp, Homo sapiens
ctgcacgatcgctatcttccaaattgccttcctgtgctgcagctgccacgactcctcagccgtggtcagtgtcaggtctaaaagacctgtccccttgctggcttccctatatctcccacatt

SEQ ID NO: 69205 - DNA, 122 bp, Homo sapiens
tcagaggaaagaggtcttgtatcctaaagtagaggaaatggagttggggaaagccctattcgagaggagatgggcatctgacctgggaagcagaataggaatctccgttgagcccaggcatc

SEQ ID NO: 69206 - DNA, 122 bp, Homo sapiens
ggtaggtggggtaggtgtcctccctgctccttgttgcctctttcagatcatttattcctgcgcatcccccccgaaactgtggctttgaagttgtgccatcagaccacacctctttgatagtc

SEQ ID NO: 69207 - DNA, 122 bp, Homo sapiens
aaagtgggagagaaggtcttaggtccaaacacgttgatttgtgtgctttgtggattcctccgtctgtactgactctgtgccggtgttgttgcccaggctgtagttactgaaaggggaagtgg

SEQ ID NO: 69208 - DNA, 122 bp, Homo sapiens
tcttttgcacacatccttggctcgggggtccctgtgagtccagcacgtcgccggaccattcgcggcagtaaacacaacttgggatctgcatctccctaagggaacttcgcaaggtgcaccca

SEQ ID NO: 69209 - DNA, 122 bp, Homo sapiens
aggcagatttttaaataacccctgaaaaaggatggagtcggggaatcaggcctggagaaccgagtccaagagcattctgccatgaaagagaatccacgcgttctgatgagcacccatttgcc

SEQ ID NO: 69210 - DNA, 122 bp, Homo sapiens
ttcttttcttttaaacaaaaaacaacaacaacaaaaaacctgcccaggagtggtggctcacgccagtaatcccaacactttgggaggctaaggtaggcggatcacctgaggtcaagagttca

SEQ ID NO: 69211 - DNA, 122 bp, Homo sapiens
ggtaggagctcaggaagcagttcaggaagtggctgatggcggctgagaggccggagagctcgactccctgcgaggcaggttggatccgagtcatgagggccctcagccccacctcaggctct

SEQ ID NO: 69212 - DNA, 122 bp, Homo sapiens
ctcggaaggggcaggggaatgagcccagggaccccagcggggcgcaggtaggaggctgtgcgctcgccgggtgcgctccggccccgattcccagcgcagccagtaagtggcgctgggcctcg

SEQ ID NO: 69213 - DNA, 122 bp, Homo sapiens
ggtgatctgcctgcctcggccttgcaaagtgctgggattacaggcgtgagccactgtgcccggcctaaaatagtaaagctttgtgttgaagtacctctcatttgcaaactcctttcgcgtat

SEQ ID NO: 69214 - DNA, 122 bp, Homo sapiens
caaggtcacgcgctcgggtggcgcgcggcccggcgcgctgtcgttcggcgtcaccacgtgcgaccccggcacgctgcggccggccgacctgcctttcagccctgaggccctggtggaccgca

SEQ ID NO: 69215 - DNA, 122 bp, Homo sapiens
ccacttcgcctctctcaggcctcagggacccgggccctagcgccccgcggcgacgccccccgcccccatccacgcacacccaccggcactgctgccgccatcctgcgtccccacgtggagga

SEQ ID NO: 69216 - DNA, 122 bp, Homo sapiens
tggctgtgccgctggggataaacggtgtaacactggggcaggtcagtttccttgttggtacgatgggactcttacacaggccccttcctttccagcaccagatactgctacaccatctcatc

SEQ ID NO: 69217 - DNA, 122 bp, Homo sapiens
ggagcagccccagcagcgacaggagctgcagccagggcgccatggcgagggcgaagccggcggcccggacccaacagacgctccaccgacccaccgggtaccgagcccgcggccagcggggc

SEQ ID NO: 69218 - DNA, 122 bp, Homo sapiens
gcctgatggaggccttgggctctgggcactatgtgggaggcagcatcaggtccatggcggcggcggccctgtctggcctggcggtgcggctgtcgcgcccgcaggggacccgcggctcttac

SEQ ID NO: 69219 - DNA, 122 bp, Homo sapiens
tatcacaaagattggctgggggcagtggctcatgcttgtaattccagcactttgggaggacgaggcatgagcctcactagaggccaggagttccagagcagcctggccaacatagggaaacc

SEQ ID NO: 69220 - DNA, 122 bp, Homo sapiens
tgtttcacatctggggaaaccgaggcgcagagcgggacggccctgggcctggcgggaagtcgcgcaaggaggccggcagggggcgcacccggcccaccctgtcccttccaggccgcgccgcc

SEQ ID NO: 69221 - DNA, 122 bp, Homo sapiens
agggtctcacactgtatctccaggtcggttgtacaaagggtcagttcatccaacactctgcgaagaccactggtgtcggcctcaacactgtggtgcagagccagctcattttcatacctgaa

SEQ ID NO: 69222 - DNA, 122 bp, Homo sapiens
gttctatgcgaagatgctcgccaagaggctcgtccaccagaacagtgcaagtgacgatgccgaagccagcatgatctccaagttaaaggtgagtttcatcttttcctgaaaaatcccagctt

SEQ ID NO: 69223 - DNA, 122 bp, Homo sapiens
tgcaactccactccccagaacagacccaagaagaactgaaaatgggtgtaaaaaacaacacgtacaagaatgtgcacagcagcactgttcgcaatgggcgaaaacgacccaagagtccgtca

SEQ ID NO: 69224 - DNA, 122 bp, Homo sapiens
gtggacgggtggctccttgggctggaagcaggagctgttgtttaacaggtgcagagtttccgtttaggaagatgaaagggctggacatggacagtggtgatggctgcaccgcggtgtggata

SEQ ID NO: 69225 - DNA, 122 bp, Homo sapiens
ctgtgcttccaggagctgggggacctggtgaagctctggatcaccatcaacgagcctaaccggctaagtgacatctacaaccgctctggcaacgacacctacggggcggcgcacaacctgct

SEQ ID NO: 69226 - DNA, 122 bp, Homo sapiens
gcgccgtgcggagtcttttctttttatgaatgaaaagttctcgggctgaaccactgcgaccgcggggggtgggggcgttgcagcggcgcggtcacctccaggctccacccccgagacgcgcc

SEQ ID NO: 69227 - DNA, 122 bp, Homo sapiens
ctgagagagccacggtgtcccaggtcgggggcagcagagtgagggtctggccgtgggccccggtcgggggctgagccacgctctggtcaggaaagacatcgccagacacctgtcataatcca

SEQ ID NO: 69228 - DNA, 122 bp, Homo sapiens
gccattaacccctgacagggaaatcaggtgcacatccatgggccagaacttacctgtgcacgccgctttctcctgtcatgacaggggtttaatgtcgagtttcctgttgcctaaccactatt

SEQ ID NO: 69229 - DNA, 122 bp, Homo sapiens
ccattcctaagggggcaccaggagggtagcaataaagccctccccacaggccggggagaccgtcttgtgccaggaacctccgcccacatgggaggggcagtctagcctctcagtttcccggg

SEQ ID NO: 69230 - DNA, 122 bp, Homo sapiens
gtggctgtacgtgtggatttgtgcatgcgggcgcccgtgtggcacgagtgtgccaggcggcgaatgctcaggtggagggctgcagcctgccttcatgtaggtgacacaactgtctagagcac

SEQ ID NO: 69231 - DNA, 122 bp, Homo sapiens
tattaccatcatccttatattctggtgtaacaagatgttccaagtttatctggtactttccggaatgagttagttctttctctctctcttttttttttttttttttgacggagtctcactct

SEQ ID NO: 69232 - DNA, 122 bp, Homo sapiens
ccccagcccgcgggacccctggggactctgggcgcctgttctgcagatgaccggttctaacgagttcaagctgaaccagccacccgaggatggcatctcctccgtgaagttcagccccaaca

SEQ ID NO: 69233 - DNA, 122 bp, Homo sapiens
aactcttttgaagtaggctgggataactaattcagtcaagtacaattcagttagcccttacgtgactttggaacaatcatttgctgatgttatcccattgtttcctgatccgtcaatgtgga

SEQ ID NO: 69234 - DNA, 122 bp, Homo sapiens
gcccgctgcgatggtagagaagtacagcctgcggcaacccatcaccagaaaccttgacatcgtcccaccctttgacccagcacttccgcttttggatttacccagaggaaatgatcaaagat

SEQ ID NO: 69235 - DNA, 122 bp, Homo sapiens
ctccagggtgagctgcctgattgtgcaggccagctgaggctccccttgggagggacctgccgaagagaggcagcagcgtggggccgggacagtgacctctcctccacctggagccatggcca

SEQ ID NO: 69236 - DNA, 122 bp, Homo sapiens
tcaccaggacagcatgggaaagacttgcccccacaattcagtgattcattcatctcccaccggctccctcccacaacacatgggagttatgggagctaaaagatgagatttggataaggaca

SEQ ID NO: 69237 - DNA, 122 bp, Homo sapiens
tggaatcggacccagatggactctaagcggcctcctgcttggaaaccctgtcagaccctgcgttttctacagagcggctgtcacacggcttttccggacggtgattatggactgcgtgtggg

SEQ ID NO: 69238 - DNA, 122 bp, Homo sapiens
cgccgtgcgccctgcgctcaccgtggtctggtccaggtctcctgggggcgcggggcaggacggcggcagcgagctgtaagcggaggtgggagctccgccgatcgccagcctcggaggaaatg

SEQ ID NO: 69239 - DNA, 122 bp, Homo sapiens
ccgtcctgtgcaaatctgcctgctgccagagccggaccccgagcgccttggggtcagaggcgtgtcttgggtttcagaacccgccagcaccatgcaaaagttaggacatggcctttttttgt

SEQ ID NO: 69240 - DNA, 122 bp, Homo sapiens
ctttttcatctctagatcccagggcctagcacgtgatgataatagtcatggcttactgtacggaatgatcacaaattgtcaggtgctactgaatgcattacacataagggcccatttattta

SEQ ID NO: 69241 - DNA, 122 bp, Homo sapiens
ggactgcgtggaaggtgggcacgggcccctggagggccttgctgggctgggcatgggtcccgctcacagcctggttctgcctcaaggggccaccgggaagccctgggcccggggtgccgccc

SEQ ID NO: 69242 - DNA, 122 bp, Homo sapiens
acactgtgtcccctatataaaataagcacccatctcttcatctgtctcctaggcctgcgacgatgcaatgactgcacgcaaagcgcacattcacggtcaggtcacttctggcgtccggctgt

SEQ ID NO: 69243 - DNA, 122 bp, Homo sapiens
cctagtttcatttctcctgcgtgaatcagatcatcttctcaccccacgggagccctgggacgccgaggctgggtgggggcggtgggataatcctccgtggcacggggtgggggtggaataat

SEQ ID NO: 69244 - DNA, 122 bp, Homo sapiens
gcagagtatcaattgtttgcccctgtgatcacgtggctgactggtgttgcggctcactgccgctgcccagtagtaccgcatatgactattctgcgaaaagaccaaaattcaaaatttaaaat

SEQ ID NO: 69245 - DNA, 122 bp, Homo sapiens
gagaggcgtcagggtggcagacacgggaccgccaagaactcggacaggagagatgcgggacggcgggagatactcactggtctggaaattccagggcctgactcttgatcttactgtgtaaa

SEQ ID NO: 69246 - DNA, 122 bp, Homo sapiens
aagcgtcgctttgcgctccaagtctaaagagttgcatttggctcacatcgaattcggtgccgcccgagggctgaaccgcacgacctcccaggagcttttctctcggagcggcttgccggtct

SEQ ID NO: 69247 - DNA, 122 bp, Homo sapiens
tggcccacacctcatggggggcggcggcggagccaagggggactcccacaacgggcagcccgccaaggacagcctcctgccactgcagcccacgaaggagaaggagaaggcccggaagaaac

SEQ ID NO: 69248 - DNA, 122 bp, Homo sapiens
acgactcagagttcgacgagaacgactggtccgactgagcaaaggccggcggagaggccgcgtgtgggagcgtgttgaagattttaagtggtctctacacccaaatagtggtattctaatcc

SEQ ID NO: 69249 - DNA, 122 bp, Homo sapiens
aaggtggaagcgaagaaacagctcccggagcaaactgtacaaaaacctcgccaagagtgtcgggaggcaggaccgttattcctgcagagcaggttagaactgatctctttcggccactccag

SEQ ID NO: 69250 - DNA, 122 bp, Homo sapiens
tccagtgtgggacaattattaatcaaccataaagggatacaacataatcaaaatggttcacgacaaaattatttgtgtggattctcttaaaacatccctttgaaaggatgaaaatgcaggat

SEQ ID NO: 69251 - DNA, 122 bp, Homo sapiens
ggccggcggccgccgctcctccggccgagagccacggggcggacgctgacagcgcggcggcggcgcctgcagccccagcacccggcccggcccttcgggcggcacccccacctgcccggccg

SEQ ID NO: 69252 - DNA, 122 bp, Homo sapiens
gccctgttcctcattgtttttctgtacatttttaaaagggctgcctacctttttcagaatcgatgagcaaaatcacacatcctcatgtccatctggtgctctgtattgtgtccgaggctact

SEQ ID NO: 69253 - DNA, 122 bp, Homo sapiens
cttgacttcagctgaaggctcttgactactgtccagcagagctagatcaggttggcttagcgcctgctgtggtgcttcaagccacacagcccttggccaggcatctctcacgtcattcccct

SEQ ID NO: 69254 - DNA, 122 bp, Homo sapiens
cgcaaaagaatagagagcgatgagcagcgagggccgtggggagctcagcgggcttctggtcgccaagttcagctgagctgcaggcgcccccgcctgggagttgccccagccccaaaggagaa

SEQ ID NO: 69255 - DNA, 122 bp, Homo sapiens
gctagagacctggaggctcttaagagcatctggaggtggcccaacctgtctctgctccttcgtgatgcagcccaggctccctgtgtgggattggtgttggtgctccatttccctggcatggg

SEQ ID NO: 69256 - DNA, 122 bp, Homo sapiens
tcaacagtacttccggggcaagtgagcgcccacaaggccaagtgcctgcgcgttctttcccgcggaagtagttgacatttacaaggagcagcgcccccaaaggtctttagctgttttttaag

SEQ ID NO: 69257 - DNA, 122 bp, Homo sapiens
ccgtgtgggattgagaggggcctggtggggtgggttccaaccaacccgcccctcgagtgccggaatcagcaggacgaatcgggtcccaaagatgtgggcaagactgttccgagggtcgaaac

SEQ ID NO: 69258 - DNA, 122 bp, Homo sapiens
gcggcacctgcgtgcagggcacactgagaacgcaggccctaaattcatcaccctgcgtggcgtcatgctcaaatctgtccgtgaaaatggccagagtgactctttctaggaggaagtggacg

SEQ ID NO: 69259 - DNA, 122 bp, Homo sapiens
gaggcctggggtccgcggtggtaggatgttatgggaagtgccctgtgatgaggctgcaggcggtcgtacatggcagttgagtgggatgggtagagttctttccttgttcgagaaggcagggt

SEQ ID NO: 69260 - DNA, 122 bp, Homo sapiens
gtgtcagctctcacgtcctggatgaaagaaataggggaatgcaccccaggagtactaccccgtgctgggacctttgctaaccagaaaatgaaaatccatcccagctccaattgccctcacct

SEQ ID NO: 69261 - DNA, 122 bp, Homo sapiens
ccaactcgcaggccggagaaaacacgagtagctaggtgggcggccccaaacctcaactcccggcattgccaagcaacagccattcagttcggttgctgggacacgcgtcaccatggcgacgg

SEQ ID NO: 69262 - DNA, 122 bp, Homo sapiens
aaatgaaattggaaaaacgtacattttatagcctctactgggcgcgaaaaggaagctgtgcgattggcttacgttttatttttatttagaccaataggactcgagtatgcaggatacctatt

SEQ ID NO: 69263 - DNA, 122 bp, Homo sapiens
aagtcagcgtttggcttcaaatatttcccagtgtggactggcttttagtcaacgggaatgcggtaactgttggtaacagaacaacgagctgtgcaccaagccaagtctctcttcggtgccac

SEQ ID NO: 69264 - DNA, 122 bp, Homo sapiens
tgatatgggatgccctctccccaggctgctggtaagtgcctcgcaagatgggaagctgatcgtgtgggacagctacaccaccaacaaggtaccagccctgcctccctgagcctccaccactg

SEQ ID NO: 69265 - DNA, 122 bp, Homo sapiens
tgtgacgccttttcacttgcatggtgtgtttaaggtccatccacactcagcacgtttcctcgctgcacgatactccagtgtctggatacacccattttgtctgtccatgcatcagctgatgg

SEQ ID NO: 69266 - DNA, 122 bp, Homo sapiens
aactggcctcattctaacaaaggatttggaaccttttaaaattccataaatcaggccaggcgcagtggctcatgcctataatcccagcactttgggatgccaaggcagggggattacctgag

SEQ ID NO: 69267 - DNA, 122 bp, Homo sapiens
tctttggatttgtaggccactcctcaacttttcagctcccgcacgattccttagggcaagcgaccagtggttgacaccgcatatacacctggcttaaagttattgactcgctgccagttgga

SEQ ID NO: 69268 - DNA, 122 bp, Homo sapiens
tgtgagtacatggtttcagtgagtccagctctggactctgtaaacactttccccagatgtcgtggctgagctacaaatccttggacgggtgacagaattggctgttgttctgttcagtgtgt

SEQ ID NO: 69269 - DNA, 122 bp, Homo sapiens
gcagaccacgtgacccacctgcccgagccagccctgcggcctctgcccgctccctgctgccgcggctgagagacagccagccctgtccgtcccaggggcctcgccctcctgtcggctacttc

SEQ ID NO: 69270 - DNA, 122 bp, Homo sapiens
aaatgttcattattattattgcttaagctgagggaatagctagatagcaccagattcttacgtgtacagcagaagagaaggaccgggggaaaaaaatccatattgtttgcattctcttctta

SEQ ID NO: 69271 - DNA, 122 bp, Homo sapiens
cctcctattccgaaaagaactttaatgaggttggcttggcaaggcctgcggtgcttacctcggcttcgccctaccccgccagaagccctcataggttgtatccactggtctcccccaggtgc

SEQ ID NO: 69272 - DNA, 122 bp, Homo sapiens
aaggcttgatgtgcacacagtggcgtatggtgtgcagttcgtgagtgctgtcgtcattgtcgccattgtcattgttctgatgaaacactctggtactatttgtgttttttgtaaaatggttc

SEQ ID NO: 69273 - DNA, 122 bp, Homo sapiens
aggcatctgaaatgagcaccaccgcagcccagtcctggccggccgcgcttgggacggacacgcacgtggtgtactccagcatggcgcacttgcgctccaggttgtgcttgtccatggcgctc

SEQ ID NO: 69274 - DNA, 122 bp, Homo sapiens
cggtgccctacttctaaccacggagagaaccgccggacagacgatcagtgaggaaagacacggcctcaacccacctgcagaacaccaccccaacagcaccgagggcgcgtcctcctcccgcg

SEQ ID NO: 69275 - DNA, 122 bp, Homo sapiens
gggaatgcatgagggcgctcagacttggagtgcttggtccatgcgcgtttgaatgtgcaacgcccctgctcctcctgttttagggcctgtgtccatgctggctcccacatactcccctggcc

SEQ ID NO: 69276 - DNA, 122 bp, Homo sapiens
catcatgctaagcctttacaagcattagctcatttgaactttgcagcaagccttcatcatcgacataataatacctatgtctgtgaattacagatgaagaaatagtcacaagagattaagta

SEQ ID NO: 69277 - DNA, 122 bp, Homo sapiens
cactcatggtcacggtttcccaggctctgccagtgactggttctctgttttattcatcgtcgcttgccctgaggttgaaccacgactgagaagcctcccacatgagtgttttctcccccagc

SEQ ID NO: 69278 - DNA, 122 bp, Homo sapiens
gggcctaactccaataccaccctgaacactctggggtcagtgggaccctgtttgtacagacgtctgcgtcttccggctctttaggacataagcagtactgctatggaagaaaggaaacctaa

SEQ ID NO: 69279 - DNA, 122 bp, Homo sapiens
tttgcagcctgcgtgttcatcctggtggggccactctgcctggtgctggtctcctacttgcgcatcctggccgccatcttgaggatccagtctggggagggccgcagaaaggccttctccac

SEQ ID NO: 69280 - DNA, 122 bp, Homo sapiens
acgtggccgccatcctgctgtgtcctggagtgctcccattcttccctgctacagtacatccgtgcttctcacgaacatttgcccaccactgtccacctggcaagcctctctgggagggtttc

SEQ ID NO: 69281 - DNA, 122 bp, Homo sapiens
caccgccgcacagctgcctatggactctggagttgctgtgtattgagcatggggcacagccgggggtaaaaggggagaaggctcctttaatctgcggatcggggcgccgttgatgagtgtta

SEQ ID NO: 69282 - DNA, 122 bp, Homo sapiens
acagcgagtttctctaattggaagatttgaaaagtactagcaagttcattttgctacagacgtaagcttgctcttcagtgagctgagtcccatgtctactaattggtttcaaattcagcagg

SEQ ID NO: 69283 - DNA, 122 bp, Homo sapiens
aagaactttatgtacccaaggtcgtacaatctgacacctggatttcttgttgttaactatcgccctatgctccaaagccaatatgttttgcatgttgataactatgagaaccagtagaaaaa

SEQ ID NO: 69284 - DNA, 122 bp, Homo sapiens
cccccggttcctcttgcctccctgtggatctggaaaggcccccccacttcccttcttgaccgccacctccccacacacagctggatgctaacgaggcagagccggtgtttgatgagcgggag

SEQ ID NO: 69285 - DNA, 122 bp, Homo sapiens
tgagctccatggccactcacagctgtagccaggaggaagtggaagggcaggaactcaagccgtgttactcggtcacagcggcggatacagtggagctcaatgccctgattgtcatagatgtg

SEQ ID NO: 69286 - DNA, 122 bp, Homo sapiens
caccctcggtcctttattgttgactcgaagctcccaaaatggcggacgctccttcctcctcggaaacctccgcccgcccccacccagccctctcgctacggcctcctctcgcccccgccccc

SEQ ID NO: 69287 - DNA, 122 bp, Homo sapiens
cagagttgagcaatccggggggggcccacataccagttttctccttgatttcacacaggacgctaaagagagcaggcttcattcggtggcagtttagggcgtgtttccttgggaggagtggg

SEQ ID NO: 69288 - DNA, 122 bp, Homo sapiens
ggtggggaggcccggctagtagggccgcagccaaccgcgctctcctcttcgcagagtgcgcgcgcaggatgaagaagtgcatcaggtgccaggtggtcgtcagcaagaaactgcgcccaggt

SEQ ID NO: 69289 - DNA, 122 bp, Homo sapiens
ctctggcctcaggctcgctgtcgcgccattttgccggggtttgaatgtgaggcggagcggcggcaggagcgggtagtgccagctacggtccgcggctggggttccctcctccgtttctgtat

SEQ ID NO: 69290 - DNA, 122 bp, Homo sapiens
ttcgacaagggcctggatatccaaattgttctggccagcggattggagacccctcctagtcgtgcctcttccttgctggcaaactgaagagtccttcccaagtgtccgtttcctcagctgta

SEQ ID NO: 69291 - DNA, 122 bp, Homo sapiens
cccccgacgatgggtcctgggctggtcagcagggtcactgggcttcccacaccctcttgccgtgctgctgtggcccttgtctgccagcagctagtgcgggggttcccagcagccgagtcctt

SEQ ID NO: 69292 - DNA, 122 bp, Homo sapiens
gcaccgctcgcaggcactccgcgagccgggggaccaagtttggcttctcctggttgccatcgcctcggtctccacggcaaccgacggctcacagaaaggagccaatagcaaggccgcaccga

SEQ ID NO: 69293 - DNA, 122 bp, Homo sapiens
ttgcaagcaggatttcttagccaccccgtgcagtagcacattcatgaactaatctggcttcgcgtgtaatgtgcttgtatgagagaggagaaaactcggcccacgtatgaatacctaaatac

SEQ ID NO: 69294 - DNA, 122 bp, Homo sapiens
tgctgcagagcaataagtcgcgggagcagaacttgcaggacgacctggattggtaccaggcgctggtgtggagccttctggagggcgagcccagcatctcccgggcggccatcaccttcagc

SEQ ID NO: 69295 - DNA, 122 bp, Homo sapiens
agaacctccacagtccctgagtctaactccctcaccttacggatgaggaagcaggtataccgactctcagtttccacctcttccttttacctctgcgtcccacctcagtgtcgacgcgcagt

SEQ ID NO: 69296 - DNA, 122 bp, Homo sapiens
gccaccgggactgtctttcctgcagtggaactttccagattatcttcctttcccccatctcgccttctgcctcctgccgtcttctcggtgtttagctcgggcagggtccctcctgcagaaac

SEQ ID NO: 69297 - DNA, 122 bp, Homo sapiens
acctggaggcgggagaatcgatgagccgaagaaaggcggcacctcgcgtaggggcatccccggggcgtttccttggccgggaagccgttccttcccttcctcgagaggaggcgctttcctgg

SEQ ID NO: 69298 - DNA, 122 bp, Homo sapiens
tctccgaaagaattaaaaatggccgagaatgtggtggaaccggggccgccttcagccaagcggcctaaactctcatctccggccctctcggcgtccgccagcgatggcacaggttagtttcg

SEQ ID NO: 69299 - DNA, 122 bp, Homo sapiens
cgggaggggctccctgcagggaactgcgcgggaggcgacggcggggcggtctggaacagccgcggccagggaggcggcttggcggcgcgcggggcccgggacgggggtgcggtcgcagctgc

SEQ ID NO: 69300 - DNA, 122 bp, Homo sapiens
gttaggtgtaagtgcttgaatctctggggggcccatctaggtgaaatggagctgagaacacgcaagttacttggatctgtcaggtagtttctggtcttacagccccagaaaaataaaataga

SEQ ID NO: 69301 - DNA, 122 bp, Homo sapiens
aggcgctgcggagcagggggcggcactcgtcgggggaggctggggctgcccaggagcacacggcggcgacggggaggctcaggcatcgcagactgcagctgcagctgcagaccgagccttgc

SEQ ID NO: 69302 - DNA, 122 bp, Homo sapiens
ttggcatattgcagtgtggcaggaaggcagtgagcaaagcagagagtggttgcatgtgtacggtgtaggagaagtaaaaagaggtcagatcagaccaattcaccacgagtttcattttagat

SEQ ID NO: 69303 - DNA, 122 bp, Homo sapiens
ggttgatatggtcgttcttgtagcggatgccatgcaatgcatagctgttctgcagcacgtcggggtcggcctggaactggaggtggttctctgtgaactgcagccccccgaagctgagcacc

SEQ ID NO: 69304 - DNA, 122 bp, Homo sapiens
ttttatgtattttatttatttatttttagcagtctgttttaaaagatgaaaatattaatacgtttgtcagaataatacagggaaccatttcagatgttaggaagtggttgtacaccaataaa

SEQ ID NO: 69305 - DNA, 122 bp, Homo sapiens
cacttcctcagagaaggtctgagaaactgggcaggaaactatcttcaaagatcagaacatcggtcatctgaaagaagaatgaaattttcttgttaaactggagattcctgggcccaccacag

SEQ ID NO: 69306 - DNA, 122 bp, Homo sapiens
cagagagtcggggaaccaacgtggattccctgctaaatgctatttggcagcgcaagaaggcggcctccccgccctgcctcagtccctagggaaacgtgcgccgcaggctccctctctccact

SEQ ID NO: 69307 - DNA, 122 bp, Homo sapiens
ttacgccgcgcccgccttaatatgattggtttttgttcctgtcactctaggatccaagcccgccattggtcggcttccgttacgccgctgatgtggagtagggccgagcgcggaacgcgagg

SEQ ID NO: 69308 - DNA, 122 bp, Homo sapiens
gatgagcccaggaaaagggaatcccaggtaccccttctgatgcttcgttgccttagcagccgccccgaggccggcgctttcagaggaggcttaccgggcggtgtcgccagacaaggttgaga

SEQ ID NO: 69309 - DNA, 122 bp, Homo sapiens
acctctaccctctgttacccatgcttattttgctagagagaaaacaaaggccccttccaacgtagcttatggagatgtgaccctggtccccaccctctgctagattgtgcaccggcacacgt

SEQ ID NO: 69310 - DNA, 122 bp, Homo sapiens
cgcagcactctattgcatgtaataccgccggcggcactctacacgacttggagccgcctgcgctaccgtatgcagcactctccacggtagctccctggggactcaaacttttccagttcccc

SEQ ID NO: 69311 - DNA, 122 bp, Homo sapiens
gcctctgcctcccccaccaggaggctgcagaggccaaggtacagccacggtaacgctggacgcagcatcttccccagccctgcagaagcagagaggccacttccgtcgcaagccctgcctct

SEQ ID NO: 69312 - DNA, 122 bp, Homo sapiens
gacccacagcactcattcctgaagctactggttggttccctgagaggtcccagaactctgcgaagtgagtccagcgctggtaagtcaccacctgcttagggtcatgcccatctgatcagcag

SEQ ID NO: 69313 - DNA, 122 bp, Homo sapiens
atgggagccctgcgacccccacctgagtgggagggtcaccgagagacccagggcgcaccacggcgacaccagaccaggcactagcggtgtggcatccccattgctccttccttgaacaaatc

SEQ ID NO: 69314 - DNA, 122 bp, Homo sapiens
cggggaacccgatcatcgtctggtctaagagagggctctctatcttcatcatcccccagacgccggggccgctcttcatctcttctatgagacctgtcctcatctcgcccttctccacgtct

SEQ ID NO: 69315 - DNA, 122 bp, Homo sapiens
atagtccagttagaaaatttgtcttctgtgctttttatttcttttcttactttaggtaaacgtttgcttaattaaggccttctgtagcactgatactgctgatctctggcatgaagcgcaag

SEQ ID NO: 69316 - DNA, 122 bp, Homo sapiens
ttcttcaaactccttaaagttgtctgaacttttctgtatgtgatttttattctccagaggcgagaatccacagtgctcatggtgtattcaaagaggtctgcaacactgaaaagattgaaaac

SEQ ID NO: 69317 - DNA, 122 bp, Homo sapiens
tgcagtcgtcgctgtggtgaccccaggtcctgatgcgtccggcccagggccagccaatggcggtagaggtcttgggcacctgacaagaggggcggtccccccgccggaaggggcggggcgag

SEQ ID NO: 69318 - DNA, 122 bp, Homo sapiens
ggcatgagaagaacaaggcatggcacttctgctcctgcagctgccgcagcagcccctccccgctccacattgaaccccacgttggggtcactactggagtggatggaggcccttcacatttc

SEQ ID NO: 69319 - DNA, 122 bp, Homo sapiens
acatcctgaggcttcacccaagaccaggggataagatttggcaatctgtgcttaaaaaagcgtttgccttgctcacttctgagaaccagtggtctaaagagtgttgggaagcctgacagtgg

SEQ ID NO: 69320 - DNA, 122 bp, Homo sapiens
gagattaagatgcaaaatggggcaagtccaaaggcctccatactccgggttggcgatcatcggcagaaaaacagaaataaggatccctccactgggctgcttctatagggaggacaagagag

SEQ ID NO: 69321 - DNA, 122 bp, Homo sapiens
acgcgagcgatccgagcagggtttgtctgggcaccgtcggggtaggatccggaacgcattcggaaggctttttgcaagcatttacttggaaggagaacttgggatctttctgggaacccccc

SEQ ID NO: 69322 - DNA, 122 bp, Homo sapiens
atgggggcgggagccaacatagagccctcagtgggatgagggtgaaactgctattgccggcggctcctgttttaccgcgtcagcatgctggtgcatttatttcgggtcgggattcggggtgg

SEQ ID NO: 69323 - DNA, 122 bp, Homo sapiens
tcctcttcaatttcattcattggtgttttatagttttcattccaagatctttcacttcttcggttgtttttcctacttatttttttgtagctattgtacattagcgcactttctgggtttct

SEQ ID NO: 69324 - DNA, 122 bp, Homo sapiens
tgcccgctgagatcacttctgaagacttgggatgcttgagtaaacagattagccgttcagcgaatgttggtttattttaggccctgggttcagaatcttcaacttgtgttttgaacacagta

SEQ ID NO: 69325 - DNA, 122 bp, Homo sapiens
gcggctcaggagccagtggttgggggtctgagaagaactcaccaccttgaagaagttattcggctttgggagccgcaggggccggcggtccggggctccctaggccacgtctacaggggttc

SEQ ID NO: 69326 - DNA, 122 bp, Homo sapiens
cttatttattgactcctgatattaagagtgaacaaacccctggccaagtgggaacttgctcggtagcctttatctttctatcactcattcagtcaattcattaaagcctgtttgtctctccc

SEQ ID NO: 69327 - DNA, 122 bp, Homo sapiens
aactaggggcggactgggacctgatcctccaagctggaggcttgaaaactcaagggcaggcgcctggtccagcgattcggaaaccgagatgcaaagtcctcccgcgctcctagagaggaccc

SEQ ID NO: 69328 - DNA, 122 bp, Homo sapiens
cgggagactgatgccccaacaggcaggaaacctcccttgcaaacaagatggcagcagcctcggctctcccagaagggccaggccctgcctcagacccattgcacaggtgaggaaaatgaggc

SEQ ID NO: 69329 - DNA, 122 bp, Homo sapiens
ctgagaatgcttctgtttacgcaggtgagttctctcccgtatccaacgaaatcctcagagcggtccgaatctccacttgcagattctacacaaagtgtgtttggaaactgctccatccaaag

SEQ ID NO: 69330 - DNA, 122 bp, Homo sapiens
ggccaggctcgccgcaggctctcagggcacataaatgagcaccatgtccagggaagtgtgcgcgagggcctccctgccatgttgtctggagtgagaaacacgctcgccagcctcaacagcca

SEQ ID NO: 69331 - DNA, 122 bp, Homo sapiens
gccggaagtgtgtctgcgtaaaactgcggctcggaggcgggacaggcagtgctcccgaagcggaagtttcgcggggaagcttttgcacctaaggacacttcctgtttcctagtaacaatagg

SEQ ID NO: 69332 - DNA, 122 bp, Homo sapiens
cctcggcctcacaaagtgctgggagtacaggcgtgagccaccacacctggcctaaatcttcgtatttgtatgtatatttaagggaccacactagtatgttcccttaccagataagaaaacct

SEQ ID NO: 69333 - DNA, 122 bp, Homo sapiens
atggaaaacatcagctacattaaatactcataagcaaaataaaggctggcctgtagagcacggcctttttattccatttgtctcacctcagccttagagtcttaggcacactttccatcctt

SEQ ID NO: 69334 - DNA, 122 bp, Homo sapiens
tcttgtactgtgttaaatcttctctcactcccttgggcttcgggggtgtcctggtaggtccgcagtctccacacccgtcactgagagccgacctcggtcctcggcattgcgcggtaagccgg

SEQ ID NO: 69335 - DNA, 122 bp, Homo sapiens
agctgaattgagttcagaaaattaaaccgaaccatgtagaaatactgcatacaaaatgcacgcacctcaaaatacctaccagctgtctcagttcaccacaactatcaaccacacccatccac

SEQ ID NO: 69336 - DNA, 122 bp, Homo sapiens
ctgagtcatcgagtaccccccacccctccgagcctgcaatgtgtcaacagccagcccacccgggctcagctcccagccgcctgagtcagccctgactgagcctctccccggatcctgtctca

SEQ ID NO: 69337 - DNA, 122 bp, Homo sapiens
agcagccttgtagtcagattttacagacgtctcgcgtgcctaaaccaaccagggtcattccgtccccgtcacagagacttgttcaaatagctcaagcccatcagcatacggtgttaacctgg

SEQ ID NO: 69338 - DNA, 122 bp, Homo sapiens
cccctaatttccctctttctcaaaaggggtttcttatttcatgcgcctctgcttacgaaccggactgggatgtgaatctctgcctctcatacctttgttgtggaacaccagttggtgtggtt

SEQ ID NO: 69339 - DNA, 122 bp, Homo sapiens
ggtgggtcctggccaggactggcaccaaggcagtggaatcctttcaaaataggcctccagcgccatagaccagaaagcaggcgcccaattctgggacactgggagatggtgcaggcagccac

SEQ ID NO: 69340 - DNA, 122 bp, Homo sapiens
aggcagaagtctccgccttcctcaagcttggttgagaagtccacctgcagttgcaaagtacggctgtttgaaagcgggcgccagaggtggcgggaagctccccctgtgcgcccattggtgga

SEQ ID NO: 69341 - DNA, 122 bp, Homo sapiens
ggagaacagcagccagtataattcaaggagtagcttgaagagactttaatatcccctacccgctagcttcgtcagcttcccactaagtcaccctaagtaaacatgcaatctgggtaggaact

SEQ ID NO: 69342 - DNA, 122 bp, Homo sapiens
gaaacaacaaatttccaagtcccacgacgatacccaaccttaatcgagtagttgaaaagacgccttcaatcgctgcttgagactgtgacgccaattttatcgcctcctcagcggctgcaagg

SEQ ID NO: 69343 - DNA, 122 bp, Homo sapiens
cacacctgcgcgcgctctgcctctttcccgcgccccgcgaggtcccgccccgcgcatgagcgacgcaaacaccgccctcgcagcccgcgacagtcagcaccgccccagccaggcgcctgcgc

SEQ ID NO: 69344 - DNA, 122 bp, Homo sapiens
caaggggttggggcaatattcatttattttgccaaattacttaagagtggaaggccaagtcggtctctgtccgagttgaattcagctgtcccggagtcagccgctgtgtccttttgtgaaag

SEQ ID NO: 69345 - DNA, 122 bp, Homo sapiens
gcgcgctggcctcctggggacctcattcctttccaaagactcccaggttgcggggtgctccggggaccgaccccgcggtgctccccggggccgccactgcctccccgggccccgttccccga

SEQ ID NO: 69346 - DNA, 122 bp, Homo sapiens
cagcggagagagagcaccagagagagagggagagagagagagagcgctagagagagggagcgagcatgtgcgatgagcaatagctgtggaccttacagttgctgctaactgccctggtgtgt

SEQ ID NO: 69347 - DNA, 122 bp, Homo sapiens
gttcactggagcagacaggaaaaatgccccagttccaagacagacaaagcactggctccccgacacccaactataagacatgactgggagagatggaggatatgagataataaatataaagt

SEQ ID NO: 69348 - DNA, 122 bp, Homo sapiens
gttggactgctcggtcattcttgggttctggacacccttaacatcatggattttaatcaacgagtggcgattgcgcgagtaggaatattagctatttattaggttgtgctgattaattaccg

SEQ ID NO: 69349 - DNA, 122 bp, Homo sapiens
ttcttgaggtccagggtacatgtgcagcctcaggatttcccagtggattatttggctgaacgaaaaagatccagatagagtgtttcccccccaccaatttttattggtagaggaagaaaata

SEQ ID NO: 69350 - DNA, 122 bp, Homo sapiens
aggccacttctctcaccacaaacctcagtctcaagccacttggttgtcatggaaacaggccggaatagaacagatggtctccactagccaaattccaattaaacagggcagagatggatagg

SEQ ID NO: 69351 - DNA, 122 bp, Homo sapiens
ctctccaacgaggatcgcagagccctcatgccgagcggctcgctatggggccggctcgcccgctagagtggtcaggcctgattatccctggcagctctgttatctggggtaagacacaggaa

SEQ ID NO: 69352 - DNA, 122 bp, Homo sapiens
gccggaaagaagccgtgtcctggagaatgtagctgaaggcctggccactttcgacaagaacgggaaagagacgactaacttgtactaatatcttagtgcttggcagggcattttttcattcc

SEQ ID NO: 69353 - DNA, 122 bp, Homo sapiens
ctccagggctctctccctcgcgctctctcccagccgcttgctcgcagccccagcagccgccgcagcatcacttcacacaaaggactgtcacccgcggagcagctcctccacctccacgtcct

SEQ ID NO: 69354 - DNA, 122 bp, Homo sapiens
ccgccgcctcgcccgtgatgccaccgcagacccagtcccccgggcagccggcccagcccgcgcccatggtgccactgcaccagaagcagagccgcatcacccccatccagaagccgcggggc

SEQ ID NO: 69355 - DNA, 122 bp, Homo sapiens
gcgggcagaggctcgggcccagcgccgccttccgctgggatctgttcccaggcccagggacgccggccccaccccagttgcctaggtgacgaggggccgcttctctcggccgagattgcggc

SEQ ID NO: 69356 - DNA, 122 bp, Homo sapiens
tatcactgatttgaaatttcttcgtggagactttcttccttcatggagactttcttccttcgtggtgagttgtatggaacaagataaagcaacacggcaattttgtaaggtagtagagtagg

SEQ ID NO: 69357 - DNA, 122 bp, Homo sapiens
cccaatggacggagcactgcggcgccaggagggggattgtgatagggagataggaggctgcggctgaccaataaagaccaaactggcttaaaaaggcggaccttaggcagcttgattgacgg

SEQ ID NO: 69358 - DNA, 122 bp, Homo sapiens
acatttcaaatggaagagagaaggccactgccgcacagaagtttaagaagtctacgtccacggcacacgggtgcatctgtagcccacggcacttggtgcgtctgtagcccacagcacacggc

SEQ ID NO: 69359 - DNA, 122 bp, Homo sapiens
tgggccgggagtggggtcgggggtgcgtgcgggtgcgatccgggcctgcagggtgcggagcgggggcgtcccggggcgagggcagcgggccggttcccgcccgcccggggccgcggcttccg

SEQ ID NO: 69360 - DNA, 122 bp, Homo sapiens
atggttaccccccactccctgcgttctccagtttctcaggtgttcatgtattttcactgtcggtcatagtgagctagtttgattcatcatagaaactgcctacttggtggcataagctgtaa

SEQ ID NO: 69361 - DNA, 122 bp, Homo sapiens
ctgtcttagttggaggtctagtagaggaatccaatgagcgtagcgggtctaggcaaggggcggtgcgacggggaggggcagcggggagcggttagaggtgggagttggcgctgcgggccggg

SEQ ID NO: 69362 - DNA, 122 bp, Homo sapiens
taagcacaatatcggacaacgtattttcggacattatgtgttgggactgtctcaagggtccgtgagcgagattctggcccggcccaagccatggaataaactgactgttcgtggcaaggagc

SEQ ID NO: 69363 - DNA, 122 bp, Homo sapiens
cctcagagaagaaatgacaatgctatcctcagaccggaaaagctcaggaagcagactctccggcaggaggcacaacgcaggcgggaggtgcaggagagcggtgctgctcgggactaggttct

SEQ ID NO: 69364 - DNA, 122 bp, Homo sapiens
cgtgaccgggaagtgattgtgacgaggcggggagcaagccaatcagcggcagcggggagccggccagggagcagcgcaggaggcgtcctgcccgactccaggcttcaggccagccagaccgg

SEQ ID NO: 69365 - DNA, 122 bp, Homo sapiens
gagaggtgagggcagagggagacatgtaaaaaagattgaggttgagcctaaagggaagggcggctggatgctatcaggagtctacctggctctaatcaacaggacagctgtttatcattgct

SEQ ID NO: 69366 - DNA, 122 bp, Homo sapiens
taatggtcccgggtctccctgactgtggaggagcggggcttttctgcacgtggatactaacgggaggaattgcaccttccccctagttttttgtggggtgtttatcttgtttcactgttctc

SEQ ID NO: 69367 - DNA, 122 bp, Homo sapiens
tcaacacgcccaacacacctgtcctctgcaggcagcctttcctgggccagctgttgctcacgtggggatccagctgatcagagagcaggctcaggaggaaaaggtgagtggctgttgttaaa

SEQ ID NO: 69368 - DNA, 122 bp, Homo sapiens
tagccaaataaaacgaagagagatgaccccgttttgagtgaggaggatttctggatgagccggcgatatgtcctgcaactgtcgatttggcagatttgactcaatcaactgacaattggttc

SEQ ID NO: 69369 - DNA, 122 bp, Homo sapiens
aaaaacaatcttcgcggctcgtcagcacattgcatgctgggatgcgtgagctattttcttcggaaggcagcgaattgtattctgggacttgtagtgtccgcctggtagaagtggatgtaacg

SEQ ID NO: 69370 - DNA, 122 bp, Homo sapiens
gctcttaaacatagagtcctcatactaaagacaatataaccgttccccagggcaagcaggcgagtagcaatctgcaagacctgaaaataccacaggaagcaggagaagagaaaaggggactc

SEQ ID NO: 69371 - DNA, 122 bp, Homo sapiens
attagcttattaataatttgacacatggtgaattaatttacatggttgggttcttcgcaacgtctgttgcctgatcctcctgtggatgaaggctatgagctctggcctgccccgggagcggg

SEQ ID NO: 69372 - DNA, 122 bp, Homo sapiens
aagaaaacgtcaataaaaattaattgatgagttggcagggcgggcggtgcgggttcgcggcgaggcgcagggtgtcatggcaaatgttacggctcagattaagcgattgttaattaaaaagc

SEQ ID NO: 69373 - DNA, 122 bp, Homo sapiens
caaaatccttatgattggtttgctggctgcctcgggagaccctgttgccaggatacttggcgttcccgacccgacccccgttccccattggctgtcagggcaaaagccgccatctaatgagg

SEQ ID NO: 69374 - DNA, 122 bp, Homo sapiens
gggattacaggcgtgagccaccgcacccggccgtgagtttatctttgctaatttatcattcgcagtttaaccctaaagcccttgtaatggttctcatctccaggttgaacagtgatggttct

SEQ ID NO: 69375 - DNA, 122 bp, Homo sapiens
cgcaaagaaagtcgcgtggattggctctgacacaggactggggtggccgtggccaggagccgagggacccttccacacctattctcctgtgcattaagagcataggctttggagtcagataa

SEQ ID NO: 69376 - DNA, 122 bp, Homo sapiens
gcaggggggcggggataaggaaaagggggagtggctatcccaggttttacgctcagcccgcgccactctagtccgccagcagggactgggaaccggccccgcctctgcccctcccactcagc

SEQ ID NO: 69377 - DNA, 122 bp, Homo sapiens
tgcggctgcgcccggccaacccgcggcgtgttgctatgtgctgagccgaggggataggtgcgggggcgcgtccatcacggggtagcccccggcccggacccggagggatgcggagtggcggc

SEQ ID NO: 69378 - DNA, 122 bp, Homo sapiens
tcagatatttaaatgatggtagggtaagtcattatgccaatgggagaatgaggcaaaaagcggagttcatccttgtgctaaccaaagaaaagatgaaatggtgagggctcatcaattctggg

SEQ ID NO: 69379 - DNA, 122 bp, Homo sapiens
catctgtgaaggggcctttgaatttgaggtctatgggcgggtcgaggaccaggatctgctcgtgcttcgccgtggccccggaggcagacgccattggagagacagcgcagagcagggggcgg

SEQ ID NO: 69380 - DNA, 122 bp, Homo sapiens
gtccaggttttttgctctttgtgactttttaatgcctttcagatgtgacgactctccatacgccttctcacacgtgacccgtgactcatgggccgaggcctctgcatttgggacccccacct

SEQ ID NO: 69381 - DNA, 122 bp, Homo sapiens
agcttctctaaatattgacattgtatataacgccagtgcagtgatcaaacacagggcactcgcactgggataatgcgattagctaatctacagcacttaccacatttcattaattgcccctc

SEQ ID NO: 69382 - DNA, 122 bp, Homo sapiens
agtctggggcacacaccaagtggggagacagacacagactccaggtggcagcttcaagaacgagtgatttaagaacagccctcccatcttagcaatgtcccggggtggctggagccacggtc

SEQ ID NO: 69383 - DNA, 122 bp, Homo sapiens
cagctaagcttttcacttagtactgtggccttggagatgctgagaactgcaaaaatagtccgcagatttcaaaaccactcaaggcagcgaggggctttcaaaattgctcagacatgtgtttg

SEQ ID NO: 69384 - DNA, 122 bp, Homo sapiens
cccattctctaggtccacagagggtagagacactcgggggaacgtacttttactggggtacggggagccctgccccacggctgtcagctcgggtcgggcgcgccgggtgcccaggaggcagc

SEQ ID NO: 69385 - DNA, 122 bp, Homo sapiens
tcccactcgccgcggggggcggctgggggccccagacccgggcaggtcgctccttgccgccgggcgcgctggccttctcagcacggccttgtccagcagtacccgcagcagtcagcaagaac

SEQ ID NO: 69386 - DNA, 122 bp, Homo sapiens
cacttttaggtatccacagagtaacacatgtaagatatattcatggagatggaggtcagtcgtggaagccaaggaataacgggtgtgcaagttgcccaacgggaaagaatgggattgaagtg

SEQ ID NO: 69387 - DNA, 122 bp, Homo sapiens
gatgaggagtctgggcatctgttccttataagaggggtcactgctttagtggaactctcacggaagttcatgacctaggagggtttaaaaaacactggctttccatgaagacaatgaaaaga

SEQ ID NO: 69388 - DNA, 122 bp, Homo sapiens
gttctcacgctcgctgtcgacgtaaacctgagggaagcgtgttctcacgctcactgtcgacgttgtaaacctgagggaagtgtgttctcacactcactcgacgtgagggaagcgtgttctca

SEQ ID NO: 69389 - DNA, 122 bp, Homo sapiens
ccccagggaatccacaggccctgactgggccccagtgggtggcagggcaggtgggttgaacgctgagagtgagattcttgccctcctgacctgggcctccccagaggctgtgccttaccaat

SEQ ID NO: 69390 - DNA, 122 bp, Homo sapiens
aagcttcccaacccggacattgagcaaaagccccgcgctcgactcccctagcggcgcccgcgttcggccacctccgggggagtttcggctctttccgtcagttcagctcgggccctccgttc

SEQ ID NO: 69391 - DNA, 122 bp, Homo sapiens
gtggcttggggtaatccaggatccgggctcaggggagggggtggggggcgtcactgtccccgaggggccagccctttgcagatctccaaaaagttcaaagtccctggtcattaacttgggct

SEQ ID NO: 69392 - DNA, 122 bp, Homo sapiens
cttttaaggaagttaaaggttatttcctaagaaagcaaaacaagccccacttgtaaaacccgggtagtggctcagctggagagcaggcgctgtgaagtgtacaagtttctagtctcatcttt

SEQ ID NO: 69393 - DNA, 122 bp, Homo sapiens
aaccgagtctgaggaaatgactctcagatgagaaaaagctttgtgcacacagatgtccatcgtggcatgacttgcagcactgggaaactggaaaccaattgtcaaggaccggttggaaaatg

SEQ ID NO: 69394 - DNA, 122 bp, Homo sapiens
ggagacggaacagggagatcacgaagacagcctctcctttaaaaaatgaccatgatctcacgcctcctcccaacccagtggaaactggagcaccgctcaaggagacgctgctgtcacaggat

SEQ ID NO: 69395 - DNA, 122 bp, Homo sapiens
cgtaaaacttgaacttattcccaagtaatattaaggttaggcagagtaagaaaagtatagcgatgggaattgatacataactggtgtacaatgatgaggactgtttaataagaaatggaaga

SEQ ID NO: 69396 - DNA, 122 bp, Homo sapiens
agcagcgggggcaacgccactggcctcgggggcatcgcagcccaggtaggcgagtgcagtcggtgctctgtgttcagaacccctgctccccacagccaggactgtcatgagctgatgaggta

SEQ ID NO: 69397 - DNA, 122 bp, Homo sapiens
ttgttgggaggtctgtcagggatgttgtctcctcagggagcccgcctcttcccactgctgcgcgcagacggcctgcacgcggacgccattttctttggtacacgctgtctctgggtagaaag

SEQ ID NO: 69398 - DNA, 122 bp, Homo sapiens
gggattctctcctccttctcctaacctgtgtcgggtccttcttcctggatactcaccgggcggccccagttctcactcccattaggtgacaggtttttagagaagccaatcagcgtcgccgc

SEQ ID NO: 69399 - DNA, 122 bp, Homo sapiens
tgtttggtggcttcaacaacccattgatcctctcggctccgtgggccagaaaatgcagtgcggaggcagccacggtcctcctggaggagctgctcctgctttcccagcgtccggaggccgca

SEQ ID NO: 69400 - DNA, 122 bp, Homo sapiens
cacccgcatatccaaggacaccacatcagcggacaagtcataaacagccttgggaatacgcggaaaggtcaaatttacctaaacaattaaattctcttttaaattttaaggaaacacaagta

SEQ ID NO: 69401 - DNA, 122 bp, Homo sapiens
tggcaggcttggagggggcatgccagggtgcctgtgtgagggggaggagggtgttagttccgggctgttaggggactgtcacctaatcctctgctcacccctgctgcagctggggacatttt

SEQ ID NO: 69402 - DNA, 122 bp, Homo sapiens
ggcctctcactaccgcaaccaccaagctggacccggccgcgggccctgacagatccctatcgcggttccacgcggactctgggtccagccaaatggtcccgagcaagccaaagcggcagcgg

SEQ ID NO: 69403 - DNA, 122 bp, Homo sapiens
tggataatgcccactcactcaggacaggaaggacatcgcgcactttcaggccggctggttcggtcttggcctcgttgacttatgttgactctcaagggccgccacccaggcacctgcccagg

SEQ ID NO: 69404 - DNA, 122 bp, Homo sapiens
cagcgcagtgagaaccaggctttccacccttaccccttacgcgactgtttcagacagtgtcgtccaactttaagttggccacttactccagcgccgctgggataattcctaatgattctctg

SEQ ID NO: 69405 - DNA, 122 bp, Homo sapiens
agggtggccccaggagccggtggtgggagtcctgtgcccctgtccccacaggcttggccccggctaggacattcccgggcccccctgctcaggccctgagcacagacacaggcaggaccacg

SEQ ID NO: 69406 - DNA, 122 bp, Homo sapiens
ccggaacagccccagggggactgcacgtcacgtgggcattcgcggggggtcctctccagacgcccctcccctaccccttcctagagaggacacaggcgcgctggctgccggaggagaaagga

SEQ ID NO: 69407 - DNA, 122 bp, Homo sapiens
cccggcccgctctcacctgcttgccaagttcagagcctttcaggaagtcgtccaccgaggcgcccctcctcttgaagtctggagagtcataggcgtcctcctcgtctgaggcggcgtactgc

SEQ ID NO: 69408 - DNA, 122 bp, Homo sapiens
ggtagcaaccggactgacgtctggaggcggggaggctccgcgtgacagagtgataacgcccggggcgtatgttctgcggtccgcgcggctgggcgggaggcccgagataggcaaaccaaaga

SEQ ID NO: 69409 - DNA, 122 bp, Homo sapiens
gcctgccctgccccttggggttgtggggatcctcaggccaggctgcctgccactctcacccgtggtgcggaggcctgtgctgcagtccacgcctcgcaccgtcacgatgagcagcgcgtgcg

SEQ ID NO: 69410 - DNA, 122 bp, Homo sapiens
tccttcacttccccaagtccaccctgactggcttgggtgcacagccagggctagagtgtccgggtcccgcctgggccacaggcgggccctgccaggtctctcagaccttccggtcctcgctg

SEQ ID NO: 69411 - DNA, 122 bp, Homo sapiens
cggtgtcgcgcctgggacctgagcgggcaggcccaggctgaagtctatggaggtgcgggtcggcgaccaggatgagcgcagagaggggaccctggcaggctccgacccgaggccgtttgtta

SEQ ID NO: 69412 - DNA, 122 bp, Homo sapiens
cctcttgtccggcataacaccgcacacacacatttgcacaccggggagagagggagggcgcggcggccgcccccgctgtcagtcagcgccatgctgtccaatccgggccttgtcgccacagc

SEQ ID NO: 69413 - DNA, 122 bp, Homo sapiens
agggcggatgtgagggtgccagctaagcccagcccctgcccggcggtggccagcataacgcggtgacactctctggagcccccactgccaccactctgctgtcaagcccgctgggctaaggg

SEQ ID NO: 69414 - DNA, 122 bp, Homo sapiens
tcttattgcccaggcagtagggcaatggcgcgatctcggctcaccgctacctcagcctcccgggttaatgttgttttttgaaaagtcagcagtcagactctaagaagggtgcggcccgagcc

SEQ ID NO: 69415 - DNA, 122 bp, Homo sapiens
tttggggagggaagagcggggctggggtctaaggaccctgggccgggcctggctctccgccggccgggcctgcgggtgtcggcgacccgggggctccgcgggcggctcgggcgctcacagag

SEQ ID NO: 69416 - DNA, 122 bp, Homo sapiens
actttcccagattgatctctgttgccgctcagggaggtcagctccaggccctcagcctttcggccgggagccaaactgccctgcctgccaagcccctccttctctgcaccttaaacagccgc

SEQ ID NO: 69417 - DNA, 122 bp, Homo sapiens
ccggaccatccgcaaatggaacaccacactctacgaaggcacctggcggcgggggagcaccgcggggggctgccgaaactacccaggtgcacaggggcgggctctgggtcttgctgcttcct

SEQ ID NO: 69418 - DNA, 122 bp, Homo sapiens
ctcgttttggttaatctcaggctcgggtgttgtagcaacattggaaatgggaggggtttacgaagtgaacatgaggtcaggtgcctgaattcaacagtctacccattccccttttccagata

SEQ ID NO: 69419 - DNA, 122 bp, Homo sapiens
cagccctggccctctagaggccgacggaggagtgcgggggaagttagcttgcgcctgtctcgtcagccgtgcacgagaaaaaaaaggaccttcgagaagaacaagggagggcaagagttacc

SEQ ID NO: 69420 - DNA, 122 bp, Homo sapiens
gggacgcggctcccggggcagggcagccgtcacccctgcctcccgcccccttggctgggacgtctggggtcctgtggggcccccacaatggtcccaaacagctgcctctgccactgactgca

SEQ ID NO: 69421 - DNA, 122 bp, Homo sapiens
agcccgcgagcgtggggccggggcagactggaggccgggcgggccccgccgagggtggggcggggccgggcgcacgggggcggacctcggcgcgctcccggccgctcgctggctccggggcc

SEQ ID NO: 69422 - DNA, 122 bp, Homo sapiens
ccaactccaacccagaaccagctaggcctgtgctgccggagaggctgtcaagtcaatgcacgagggctctgccagggacggcttcagcccaacaaagggcatgtgtggcgaggccccaagac

SEQ ID NO: 69423 - DNA, 122 bp, Homo sapiens
cctctgaggggccagcttccagcttggagggtgtttcaggaggggtctcctctgcagagacgtggcctcctccagagacccttggccacagcccctgcccgctccgtgctgggccgaggcca

SEQ ID NO: 69424 - DNA, 122 bp, Homo sapiens
tgtttttgctttcattttcccctcaggccgattcagccacagcagccagaaagcagtggccgcacccctaatgtgccttgcaaaagtccagcatgctgtctgggcagggaccaaacttaagg

SEQ ID NO: 69425 - DNA, 122 bp, Homo sapiens
gagggcaaggagtttgaactctgaacctagggcaggctcagcttcgggggctaagaccctcgtatggcgcttaatgcccctctaagggctgaagttttccctgggcctgcccgggagatggg

SEQ ID NO: 69426 - DNA, 122 bp, Homo sapiens
aaaacagcgaattcccccacagattacactaatggaaaccctgtcagggtaagtcaaatccgggtctgtggtcaaaatctaattaaggtttctgtacttaaaaagaatatgaatgcctgggg

SEQ ID NO: 69427 - DNA, 122 bp, Homo sapiens
cagataccaatagcaacattgtcatatgcagtttgcctcaaatcagaaacaagaagacatcggaatctgagatgctgccctagagaggacagttaaagaaggttcagtggtcctcagtttgc

SEQ ID NO: 69428 - DNA, 122 bp, Homo sapiens
agacttacgtggaccacttatgatagaaaccaaaatgatttcctcttaccaagttgaaaacggtttatgttaaaattgtttgccggcgggttggacccagtcctgctagggagtctgctgca

SEQ ID NO: 69429 - DNA, 122 bp, Homo sapiens
gggaggtctcgcggcctgcttctcggattgctaggagccagcgcaggcagatgccggttccggggcttggagaacgtggctcggtggcacagagccgccgggcgaggcgggggcagggaggc

SEQ ID NO: 69430 - DNA, 122 bp, Homo sapiens
ggctcaagcaatcctcccacctcagccacctaaagtgctggtattataggtgtgaaccatcgcgtctagcttccgatgaaatttaaatacataatgatttgatataaattttcatttgtata

SEQ ID NO: 69431 - DNA, 122 bp, Homo sapiens
aggcaagatcagacgacaaagaaagggaaggcagaggcgggggcgggagggaggtttatccgtaggagtcagcccagttgggtcaaactaaggacccagtgcagaccccgaggcccagagac

SEQ ID NO: 69432 - DNA, 122 bp, Homo sapiens
tataactaaatttgtaaaaagcaccttcttatactctcaggcaaactttgaacccgagctcggcttcaacagggagctggactctatcagtggccccatgggggagctgggcagtaatccaa

SEQ ID NO: 69433 - DNA, 122 bp, Homo sapiens
ccccccgggaacccaggcgtccccaactcacggctctggggtctgggaaaagccggaaggcggaatccagccccaggggacttaaccccttcagtgccctgcctcgggggacggactgggcg

SEQ ID NO: 69434 - DNA, 122 bp, Homo sapiens
ccctcacatgcccttatcacccctttctcaggcgggagcatgctggggctctgcgggcagcggctccccgcggcgtgggtcctgcttctgttgcctttcctgccgctgctgctgcttgcagc

SEQ ID NO: 69435 - DNA, 122 bp, Homo sapiens
gcccccccaccccacagtaacccgcgcggcccctttaagagacggcagcggccgggtggccgtcctcagggccaggcggcactcacccactggttggccttggggcagaaggtgtacagagc

SEQ ID NO: 69436 - DNA, 122 bp, Homo sapiens
aggtcgccgcttcttaagcccatcaatgagggggcgtggttgctttgctgggccccgccccgagctgcgccctgagaggctctgctaggcccggcccgggtcttcaccggcgcaggagcctc

SEQ ID NO: 69437 - DNA, 122 bp, Homo sapiens
ggggaagggccctatgattgggctgtgacgcgtgagcgcattaatgacgtcactgcggctcgggagagcgcgccatgaggtcataagagcctttttcctccaggaagagagataccgcgatc

SEQ ID NO: 69438 - DNA, 122 bp, Homo sapiens
gccacacagctgaggacgaaagtgccatccacggctacagtctgattcacaggaccttgtcgaataactgggggaggccgatctgcaatcactgccagaagaaacaacaggaaatagatttc

SEQ ID NO: 69439 - DNA, 122 bp, Homo sapiens
ccattcgttctattccttcatttaactaatactagttgcactaatattagtgtcaggtaccgagccaaccttaggatacagctatctcagagaagtatctgccctgctcttgttccttccca

SEQ ID NO: 69440 - DNA, 122 bp, Homo sapiens
tttcctctgacaggtatggccacaacccttaagcccacggcgataagggatgttcgctcacgctgggcgatggggaggagggacagagggcctccgaaggaggggaggtgtgcaccctgatg

SEQ ID NO: 69441 - DNA, 122 bp, Homo sapiens
cgctgcttgcggagggagtttgcccgtatacggttttatttaggcaggtgatgagccagccggactttcaggcagaactggactggaacaggcatggcctaggaggtgtccctgtcccggtg

SEQ ID NO: 69442 - DNA, 122 bp, Homo sapiens
agtgactcgtgaacatttgatagatgagctgtacctgtgtgtgtgcttgagaagagacttcgagctgcttttatctgcatgctgggtttggttccattatactcactggaccctctgtgctc

SEQ ID NO: 69443 - DNA, 122 bp, Homo sapiens
cttgtctggctctgattcatgttctgctccacagtcagaatgattttcctaagcacaggtcggatcatgtgacttagcctgctggaagagcctcaggactccacgtcactcttcacacagcc

SEQ ID NO: 69444 - DNA, 122 bp, Homo sapiens
gcacgtaaccaagtgcagtgggtctgaagcgaaaggcaagaaaagctctgcccttaggaacggggtgtcactgcgcggctcgcaggcacctctctttgacctatttataatctgcgccttat

SEQ ID NO: 69445 - DNA, 122 bp, Homo sapiens
tctggccaaggcctgcctgagctgtccaagaggaagtctgcacagcctgtcctgtgggtgcgtgtatgtgtgtgtgtgtgtgtgtgtgtgtgtgtgtgtgtggtgactgattagactcattt

SEQ ID NO: 69446 - DNA, 122 bp, Homo sapiens
tttttgggtttactgggtgaatagcactttccttacataggcatgtgatttcaggtttttcgtactgagaacattgagatttcagttggaagacaccctgaaatcttatgagtagcataccc

SEQ ID NO: 69447 - DNA, 122 bp, Homo sapiens
gaatggacctctcctctccgcgaagggcattctaaagtcagcctgaaatgctaatccaggcggtgatgggaatgggctgtgggacgtgcctccattacagcctcctccccttggaattcagg

SEQ ID NO: 69448 - DNA, 122 bp, Homo sapiens
tggcaaggacaccgggcaccttgacccacatgctaggggttagggggtgccgtgcacggccgcttgggaaactcaggcagcatcttagttaaacatacacttgctgtgccacccggcaattc

SEQ ID NO: 69449 - DNA, 122 bp, Homo sapiens
ccctccaagacacagaggtgcctctgtcccctactggctctgtcttgaagatgcacctctcggagcctcggttggctcctctggaacagggagtagtgagaagacgaacctcacagggttct

SEQ ID NO: 69450 - DNA, 122 bp, Homo sapiens
cacacagaagcactgtcgcaggttgggttccccgaaagcagatactgaggtggagaatggcgtgcaggaaggttcataggacagtgctgtgggctgagccggctgggtacaggcttgtcagg

SEQ ID NO: 69451 - DNA, 122 bp, Homo sapiens
ggaggggctagggggccagtgggttagacaaagaaggaaactgtgccttggccagatccacgccaattatgtctgaataaacgcatccacagtgcgagctaaagagccttccttccctcacc

SEQ ID NO: 69452 - DNA, 122 bp, Homo sapiens
tgtgtagcttgcagacaaacctcatccacaaggaggctactgacattggaagcactttggcgcattttcagaggcaaagccagcctgataaagctccttgtgacagcctgacttgctattct

SEQ ID NO: 69453 - DNA, 122 bp, Homo sapiens
aaattactcctccaggaccccacaatgctgaccctactaccacacctttaaatgttacttcgtcttctaaactgattcaagtgaccagaccaggacagaaatccatctactcaatgagtaac

SEQ ID NO: 69454 - DNA, 122 bp, Homo sapiens
catcattagggtcagcccagctttctgacctgaggagctcttttaagattctgtttccgccgggtgtggtggctcatgcctgtaatcccagcactttgggaggccgaggcaggcggatcacg

SEQ ID NO: 69455 - DNA, 122 bp, Homo sapiens
acacttagtctaggagcccggagatccctcatccagctttccccggggcaaggggtgaagcgctaagcaaggctgatcactgtcctcaatcatcacccaacccgcgcacagaagccgtggcc

SEQ ID NO: 69456 - DNA, 122 bp, Homo sapiens
agagcgagcccagcctcaccagcgacgagctgcacctgcccgggaagcctggcctgggcacgccctgcgccagcctcacactgggcccgcccacaccgcccgcctccatgcccaacctcgcc

SEQ ID NO: 69457 - DNA, 122 bp, Homo sapiens
tatttgggtacagtacctttatgctccaaatatttcatgcttttgaaatattctttccaacgttaaacatttagatattgacaaataagaacttcagcaacacagcattaatcattagcatt

SEQ ID NO: 69458 - DNA, 122 bp, Homo sapiens
tgagtatagaatgttttggtatgccgatagtgaagtcttattcatctttatatgttccaacggtacctggtacagagtagttactcagtaaaagtatgttgaataattttattaacgtgatt

SEQ ID NO: 69459 - DNA, 122 bp, Homo sapiens
cagggacgcagtggaactggccagctggcgaggcggccagggtggaccccagggacacggcggcctagggatgggggtgtggatgagggtgggggtgggagaggggctgggagagggactgg

SEQ ID NO: 69460 - DNA, 122 bp, Homo sapiens
aaagcttcacatggcaataatcacaaacacataaagtgtgtctgttatgtgtaaaagtggcgcaacagtctttgatcccagcctcaccagagattgctactgggaagaagtggcagaaggct

SEQ ID NO: 69461 - DNA, 122 bp, Homo sapiens
gcttggtattggttcccgcccgaaggtcctttcctttcacacccgacctctctagatccccgacttaaccccgattgaagaagaaattttccaggatgggggtggggttttgctggatttgt

SEQ ID NO: 69462 - DNA, 122 bp, Homo sapiens
tttaagtggtaagaggagctgggtgtgcaagaatttccccataatccccatcctgagcctcgtcttcacaaggcaccaatgtgagtaaggcaccaacattgtttgggcaactaaactaagtg

SEQ ID NO: 69463 - DNA, 122 bp, Homo sapiens
ggttaagttattttttgatcgtgtataccaagcagatagaatactgtgcttagtggaacccgctaaaaacctttttctctgtttttccaaacacaggcattctgtagcatagcaaaaccttc

SEQ ID NO: 69464 - DNA, 122 bp, Homo sapiens
ggcaccctggtcctggaaggccaggtagaagccagccttgctgagcggtcccagacgcagcgtcttgacattcaccttcccggtggcctcggccccagggcgcttccgggtgagatgctccg

SEQ ID NO: 69465 - DNA, 122 bp, Homo sapiens
acgatcagaaccaatgggcgcggccagcgcggctacgattggcagtgcaaaagaccaatccgtgtcgcagaagttcgctcctccctccattcgtggagcctgagatgggtgggtttatagag

SEQ ID NO: 69466 - DNA, 122 bp, Homo sapiens
gaagagaaagaaaaccgaatgcccgcttttcgagagcactgcaaaattagccccgggacccggctgcacaaaagtgcagccttaaagaatgccagcccatattctagacacccaagtaaagc

SEQ ID NO: 69467 - DNA, 122 bp, Homo sapiens
gcggtggcttccacggactgccgctatcggagggccctggcagcctcctcctccttccctcgattatagaagggaggcgctgcctccaccatcccaggctgcgtcccagtcctgctcagccc

SEQ ID NO: 69468 - DNA, 122 bp, Homo sapiens
ttctggatcactgtctcttcatggtgcactcaatgtaagactccagcaggaagatggtttcgtccacctggatctcactggcatccaacctgagtgaaaagtaaaggcatttgcctagactg

SEQ ID NO: 69469 - DNA, 122 bp, Homo sapiens
gccctggctgtacattttgaaacctgtttttctctgtctgggactggctggtttgtgtttcggttttagttctcctatctttggactgttggtttccatccctctccccacccccacatgtg

SEQ ID NO: 69470 - DNA, 122 bp, Homo sapiens
cctcaagtgatcctcctgctaccgctcctaaagtgctgagattacaggcgtgggccaccgcgcccagcctgaaattcaattttaattgagtatgctgtatttttatttgctaaatctggcac

SEQ ID NO: 69471 - DNA, 122 bp, Homo sapiens
cagttaaataactacgcaaaagacgtactcacgggtaccctccccagagctccacccgggcgacttccgcaatcggagtaaacagcggggtgcaaaccaagtgaagtggggggcggagatta

SEQ ID NO: 69472 - DNA, 122 bp, Homo sapiens
cgggggccccgcgcaggatccctgcctccagtcgagggagcgggaaggggaacgcgggtccgtgcttaagaaaccatcgtcttagactcgcccaagtcctgagcttggggcagccttggccc

SEQ ID NO: 69473 - DNA, 122 bp, Homo sapiens
ggaccccaccctttcaccttttggaatggctcccactctatttttctgcaggacggttctcgcatgatggtgctggtagacaaaatggagccccgggcaaaaattagtgtttaacattctgc

SEQ ID NO: 69474 - DNA, 122 bp, Homo sapiens
aggttccagacatttctcctgatcaccagaagttcttttgattaataaggctactggtcacgaaaactcagcttactaaaagagatccagtcttctggttctaactaaaacatcccaccgga

SEQ ID NO: 69475 - DNA, 122 bp, Homo sapiens
gccgagattcccgcgcttcaagtcccgcagccctggctgcgtcttagagaggcgtgaaaccggatgatgggagccgcttgttggcttagatattccttcaactagaatgacgtatcttgcag

SEQ ID NO: 69476 - DNA, 122 bp, Homo sapiens
accactcctccaaagacagcagctcccggccagcaggaggtggcaccccaagccccgacccgctgagagccggcttccagcccccgaaccctcactggagccgagtttctccgcgagggacc

SEQ ID NO: 69477 - DNA, 122 bp, Homo sapiens
cggtcctccagagacagaggggccggaagttctcttcacggagccgcgcggctgcgggggcgcaaatagggtcagtgggccgcttggcggtgtcgttgcggtaccaggtccgcgtgaggggt

SEQ ID NO: 69478 - DNA, 122 bp, Homo sapiens
tggggaaggtgttgggagagtggtggtacagggggcgttgtggcagtggtttgtgggccccgcctgccacacagcccccatagagactgagagtcccccagcaggtctgaggagagggtgag

SEQ ID NO: 69479 - DNA, 122 bp, Homo sapiens
gggcaaccatgagggctccgtatgtcccggcccatttaatcccacaacaactccatggtgcgactgttgctatgctggctttataggagaggatactggcacagtgaggttgggtcacttgt

SEQ ID NO: 69480 - DNA, 122 bp, Homo sapiens
ctttggggtgatgacgacgctcctcttcgaacgggtggaggacttgaggtctgaggagctcgaggccgtgatgagggcgaatgccatttgtttggatgcggtgatcgggcctcccgggtaga

SEQ ID NO: 69481 - DNA, 122 bp, Homo sapiens
accaccagtcaatccaacagttctatgtctgtatggttttttgctttgtttcctctaaatcggtgattcttaaattgtattttatttgatgggcacatgagtaagtcaatacaagtacagac

SEQ ID NO: 69482 - DNA, 122 bp, Homo sapiens
ggggcctccgaggaggagggggatgggccgcccgccccgggggagggggcagcgtggcctcgcccgccccctgcccgccccggccacgggggacgggccttaccccccactactcggccgcc

SEQ ID NO: 69483 - DNA, 122 bp, Homo sapiens
agactactacacagtagtgagcgtccatggtgcaggaaggagaccctcagaacacagaatcgctcacactgcactgctgacaggggtgtggagaacagaacagggccctaacacggcaccaa

SEQ ID NO: 69484 - DNA, 122 bp, Homo sapiens
tatgcattaattgtcccttctggttccagaggagtggcagtgatgacctcaggccagaaacgagctgggccaaggttgttcagaagatcaatttattttccaggaatgtagcttacatatca

SEQ ID NO: 69485 - DNA, 122 bp, Homo sapiens
gtcgccaggccagaggttagagggacatgttcatggcttaaatttattgccctgactcttcggagcggcttcctctcctcctccccaccccccggcttttgccattcatgggccgctggatc

SEQ ID NO: 69486 - DNA, 122 bp, Homo sapiens
cagaagtattgatcacagacgaacaagtggcagctacggatgggctgtctgagccccatccgggaggtaacagccagagacagtgttgccacgcagatccccctcctcacatgccactgctc

SEQ ID NO: 69487 - DNA, 122 bp, Homo sapiens
gcagccgcgcacccctcatctggtctcggacacacttgctgggacgatgctgggaatgcccggagtcgggcgcgctttttcctatgcggcgggtggggacactgaggctccgagtgggggtg

SEQ ID NO: 69488 - DNA, 122 bp, Homo sapiens
gcggccagcgcgtgcatatagggggtctcccagcgctccatcaccggcttgcccaggatgcgcaggtgcgtgtccgctgcgtcgtaggccgcgggcgccgccccccacgcggggctgcagtt

SEQ ID NO: 69489 - DNA, 122 bp, Homo sapiens
agcaggtggtcctgcagcaggtggtctggcagcagctggggcggcagcagctctcctggccgagaccttgaccacagctctggtcagagcagacagagccacagcaggagctgaccatggcg

SEQ ID NO: 69490 - DNA, 122 bp, Homo sapiens
ggcttgcttttcagcctggcccggggctccgaggtgggcaactctcaggcaggtaagtggcgcgagagcaccggcgggctcggcacctgggagccggaacccagtgcgcgcagcctcggagg

SEQ ID NO: 69491 - DNA, 122 bp, Homo sapiens
actggcgcaagcgcacgccggcaggttgtacccagaatccgggcccttgccagacgggggcggaaccggaagtcgctgtacatctcatggttgctaagaaacggagcttccacaaaccagat

SEQ ID NO: 69492 - DNA, 122 bp, Homo sapiens
cctgcagcccgacacaagacacgctgggtaagcgcctgaggagtcagctgaccaaaaaggcggggtggctgagtgggcaagtggaaatggatggcgggactgaccgacggagaggcgggcgg

SEQ ID NO: 69493 - DNA, 122 bp, Homo sapiens
cactctgtgagcctcaatgtcctcaactggaaaatggggagaagaataatctctacctcacggaagtagttcatgttagttcatgtgaaatcagacatctaaaagtgctctgcgaagcaggc

SEQ ID NO: 69494 - DNA, 122 bp, Homo sapiens
ggttcaggcaagcaagaggaaactgaaggccagaggtaaaagctggcatcagaaccacagcgctggggtctgacacaactgcaaactagccgtgactttgcgtaggcctcagtttgctcatc

SEQ ID NO: 69495 - DNA, 122 bp, Homo sapiens
acagcccgctgccaagtcctccctccgcctccgcagccccccgccccggcacgccccggccgcggctgggccccgaacgggaaagcctgaaggaaccgtccccaccctcccggggcacggtg

SEQ ID NO: 69496 - DNA, 122 bp, Homo sapiens
cagctttactaagtcctgcataggggtttgggggccctccactgcctcatccaggattagcggatatcactgcccgcagcaaatatgttaggagttgtagaagtagtggactggtatggcac

SEQ ID NO: 69497 - DNA, 122 bp, Homo sapiens
ccggcccagtcctccacgtgtttgctcattcattcattcagcagacaatttcctccgaggcgttgaaggaggtccctaccctcgggtatggcccatagagatggttcaggggtaaataaatg

SEQ ID NO: 69498 - DNA, 122 bp, Homo sapiens
acatagctatgcaaactgcagcgagtctcttcccgctctgggcgccacctgactgacccgcgtaaggagggactgtgactggtccccaggcaaacgctttccctgccacctgcacctgttgc

SEQ ID NO: 69499 - DNA, 122 bp, Homo sapiens
aagcctcatccctttctgtaaaaggccaggaggacagcaaccagactggactcccctctccggctacagatcttttcctctaattgaggtttccttttgctagaggctgtaattaaagcaag

SEQ ID NO: 69500 - DNA, 122 bp, Homo sapiens
gcctgaggccaaggtcacccagcagccgggcccatcgggggattcgtttcctgtatctctcgagagcgggcatccagtctcctggaccaaggaagaaaactacattttcaggctttcccagt

SEQ ID NO: 69501 - DNA, 122 bp, Homo sapiens
gtccggcccgaggtgacgtggtccttcagcaggatgcctgacagcaccctacctggctcccgcgtgttggcgcggcttgaccgtgattccctggtgcacagctcgcctcatgttgctttgag

SEQ ID NO: 69502 - DNA, 122 bp, Homo sapiens
ggcgcgaggactcggtagggaagttggtgccggggcgggctccgcggttcccgggccccgcgacccgcacctcgccccttccatgcgcaagagcctctccgcacacagcgctgatcccctgc

SEQ ID NO: 69503 - DNA, 122 bp, Homo sapiens
ttagggacggtaacaccactcacctcccaggggagttgtagggtacaggtgagtactgctcggagaggaagtggaacattcctcgtgcgcagggagtgccccctgagtctgcccacccctcc

SEQ ID NO: 69504 - DNA, 122 bp, Homo sapiens
ttgaaatctgaatttttctggccccaagccaggtactcagataacctgtaattaaaactccggtcctctgcctcatgtctttatgactttccctcctgtgtcctgctttcagagcaaccata

SEQ ID NO: 69505 - DNA, 122 bp, Homo sapiens
gcggtttccaggaggaaagctatcaggcatccacatggaaggccaaatacaaaggatatacgagccaaaaatgagttgagaaagaaaagggacctggctaaagatggaaacactaaggagag

SEQ ID NO: 69506 - DNA, 122 bp, Homo sapiens
tgaactttagccagacttaggccttctttccagttccgtttttgcacaagcagatctgcacgtaatgttgttttaaatatcctactaccccaaactagttcgctcttatcttttagctgtca

SEQ ID NO: 69507 - DNA, 122 bp, Homo sapiens
gggctgggggctgccgtcagtggacctggacagcctggccgtgctggtgaggggtggcgccggcgccctctgctgtgccctgatgactggggagggggccgaactagccaagcatccaaacc

SEQ ID NO: 69508 - DNA, 122 bp, Homo sapiens
tatctttttattcagtacaagttgaaattacagttgtattaaaactgactgaaggctgggcgcagtggctcatgcctgtaatcccagcactttgggaggccaaggtaggtagatcacttgag

SEQ ID NO: 69509 - DNA, 122 bp, Homo sapiens
cagacgacgagggcgtgcgcggcacctgcgaagatgcttccctgtgcaagaggtgcctgtcgggcgcggggttcggggccggcatctggggcgcgggcctaggtgggaggtgggcctgcatc

SEQ ID NO: 69510 - DNA, 122 bp, Homo sapiens
ggagagcaacagctcacgactaggattccagctatgctacttatgactatcagggcccagcgtaggccagagcccagggatgtctaccatctctgcagggggtcatcagtaaggctcttgac

SEQ ID NO: 69511 - DNA, 122 bp, Homo sapiens
cccggcccagtcttacctgcaggtagctgagggcctgagattcgggaagaaacctttaaacgctaagggacaaagtggtgcgtaggccaggcctggacgcccagggacctggccggcctgca

SEQ ID NO: 69512 - DNA, 122 bp, Homo sapiens
caggaggccccgcggctcgcctctggcggggcggggctggagggggcgtggtcaaggcctcggctcctccgagcgcctcccagctcacggcgccccccgaacccggctccaagggactcggt

SEQ ID NO: 69513 - DNA, 122 bp, Homo sapiens
gacgttctggtgtgtgtcaccatcggtggttgccgtttcttggagtgtgggttgtggtcccgctttctggtgtatgtcgccatcagtggtcactgtttcttggagtgtggggtgtggtcccg

SEQ ID NO: 69514 - DNA, 122 bp, Homo sapiens
gcaggcaaccatggagcgcggacatgctcagagacagccctgagtgtctcgctgcagaatcgcctgtggttgttgatgaaagcactcactaatgatttgttcctctacctgggcattttgaa

SEQ ID NO: 69515 - DNA, 122 bp, Homo sapiens
agctgctcttcctcctgctgcagctgctcttcctcgcggtattgtctctcctgttcttggcgccttctcttctcgcgctcctctctctgtagctcctcctcctcctcctgcagcagctgctg

SEQ ID NO: 69516 - DNA, 122 bp, Homo sapiens
gaatctcgcaaaaggtgatgctaacaggcagccaggagtgatagagggcccatgagagaccggagaagagtgctgctaccaccaaatcctccccctccatccccagcagcacctgcagaggc

SEQ ID NO: 69517 - DNA, 122 bp, Homo sapiens
gggctccattcccaattcctgggtcaaggtgaattaaccctatgttggagcactggaaaccgttatttgcaaacattgctgttaccatttagaaatatgtgcactatcagctgggtgcagtg

SEQ ID NO: 69518 - DNA, 122 bp, Homo sapiens
tacagagataccattgcttagtgattggctgtacactgtaactcatagggtatgagttatcgtgtccagcatatggcattttatggcttcttggttccagtctagagcccatatagcaggtg

SEQ ID NO: 69519 - DNA, 122 bp, Homo sapiens
atcaagtcaaggcagttatttgctgtgggcaggtgccaaggctggctgcttcagtccccacgcgagtcgcccccgagcctgcttctgcagcccagcctggaaagtgcaaggcacttggaaag

SEQ ID NO: 69520 - DNA, 122 bp, Homo sapiens
cagcgcacagcaccccgagatgcgcacagcccccgcggatgcacacagccccccaagatgcgcacaggccccccgagatgtacacacccctcaagatgcgcacagccgcccccggagataag

SEQ ID NO: 69521 - DNA, 122 bp, Homo sapiens
tggcttgcttttgaaggctctgctaagtcgatggtcaggttgccaaagggccggtcatctcgcatcctccctcccttcggtgcctctggtctgatgtccagtgaggatcaaagccaggagag

SEQ ID NO: 69522 - DNA, 122 bp, Homo sapiens
cgccccaccctgggcagtttgctttgacatttcagtgcctcattgctcaagctaccagcacgggcgtagccgacgccgggagagcccacagagtgcgagctccatggtgcctgtcaccagcc

SEQ ID NO: 69523 - DNA, 122 bp, Homo sapiens
tccaactcacaacgtcctctcctgactcacccaaaacagcaaggacaaggaagaagaaggcggcaacgaggagaggcaggtccggcctggagagcttcagcagcctccacatcaagactttg

SEQ ID NO: 69524 - DNA, 122 bp, Homo sapiens
cctgcaagaggggccaggcaaatgcagaccatctccttacgtacagagaccctagaaccccgcacaattcacagggcacatcgaggcctgaagacacctttaggtgtgctcaggttattgat

SEQ ID NO: 69525 - DNA, 122 bp, Homo sapiens
agagtcagcaccccacataggagccaaacacgggaaatgtggggcactctctctgctcaacggcgataggacctgggccagcattgctctctcccagggatgctgcccataggacacaaata

SEQ ID NO: 69526 - DNA, 122 bp, Homo sapiens
ctggggaggtgctgtccctctgagaggagggaggcgtggttctcgggggcggggcagcggcgtccacaccccccagcccagcagcccgctaggatggggcgagcccgcgcgcccacggtgga

SEQ ID NO: 69527 - DNA, 122 bp, Homo sapiens
gaaagggaagctgtccgtccatggcagcgggcaagggcgtgcacactcacgagggttccacggagcaaaagtaggataatttctgggcagacctgccgtccgaacggctgggagctgcgggc

SEQ ID NO: 69528 - DNA, 122 bp, Homo sapiens
cgtaaatcctgcagacaggagcccaataagacattaggtcaactcagggcatttcgaaaacgctattttctgaacagacggctaagcaagaggcttgcagggcccatctcctcagagttatt

SEQ ID NO: 69529 - DNA, 122 bp, Homo sapiens
ggccaatcagagacgtagcggagcccggcggactacattgcccagtaacctcctgggctccgctgtgtttttctattctggggtgtaaggggcagctggaccactccagctgggactgctag

SEQ ID NO: 69530 - DNA, 122 bp, Homo sapiens
cgacagagcaagacaccgtcgcaaaaaacaaacaaaaaaaacccctgcgttctttcctcacgtggaagagtggaattgctctctgctcttgcccttgctagcatagattataaaattctttc

SEQ ID NO: 69531 - DNA, 122 bp, Homo sapiens
gccccatggcagtaacctttaaaactggccattaaagtttataagtcagacgggcaccaacgtgaaggatcaagaagagaaaaacagccccctcccttggggacccagagccacagccttcc

SEQ ID NO: 69532 - DNA, 122 bp, Homo sapiens
gtccggccgcgcatgcgctgagctggcgggcccgagtgttgtcggctgggaaatggcggccgcgggcttggtcgctgtggcagcggctgccgagtactctggcacggtagcgtcgggaggta

SEQ ID NO: 69533 - DNA, 122 bp, Homo sapiens
gtagggaggaaaagacacatttaagagcctggataaaacagtgatgggaaaatccacacacgattgacttacttaactgtatttaattaggaaaaatctctagaatttagaggaaactggaa

SEQ ID NO: 69534 - DNA, 122 bp, Homo sapiens
cctcttcccttcgctctccccagcttgagacggatgggttagtgcagccacggaggcttgcgcggtgggaggggttgggaccagccttctgctgccctgggtgctggggatcccggggcttt

SEQ ID NO: 69535 - DNA, 122 bp, Homo sapiens
ccacccccaggaggtcaccacattgatgctgaacttagtgaagatacccaatcagcatagcgcactacagcccaggactcctgggctcaagcgatcctcctacctcagtctcccaagtagct

SEQ ID NO: 69536 - DNA, 122 bp, Homo sapiens
ctcagcagattgtgggtaagcagtttcatgtcgccgcacaaactctcgccaggccggaaccggaaaaaggtcgtcctccgctgcctcacttccggggatgctcctctcgatgctattggata

SEQ ID NO: 69537 - DNA, 122 bp, Homo sapiens
gggcctgcagttgcaacccgggccgcccgcagaggcaggcggggcccaggtggcgtggaccgcccgtcaccagctctgcctcgccagtctgagtccgacttattaactagcttccgtcattc

SEQ ID NO: 69538 - DNA, 122 bp, Homo sapiens
aggtccccgcggaaacccggccgccgccctcctcccgccggcagcccccgggaacccggccgagccctcggcacttcccgcccacgcggcccacgggacctcagaccaccccgtctctccct

SEQ ID NO: 69539 - DNA, 122 bp, Homo sapiens
agtaggcagtgtagttatctggggaagagcatttcaggtgcagggaccagcaggtgcaaacgccatgaggggacagtgcttgctcagtatgaagaacagcagggaggctgacgtggctggag

SEQ ID NO: 69540 - DNA, 122 bp, Homo sapiens
tgataactttctttctaccccagctgttagcacagtgcttgtgagtataaagcaagtgctcgttgtttatcagaaataaaattatgtttaggtttgtcagtgttttatgagagaaatgattc

SEQ ID NO: 69541 - DNA, 122 bp, Homo sapiens
ctcccgcatgctgctcaaacagggtttccacctgcaccctcctttaagtgtgggctggaccgccgcccagaggctgaggggctcctgggcaagaaactacatgcaaggcagaaggggccgct

SEQ ID NO: 69542 - DNA, 122 bp, Homo sapiens
ggacaccagccacgtgcagcctatcaagctggccagggtcaccgaggtcctgggcaggaccggctctcagggacactgcacgcaggtgcgcgtggaatttatggacaacacgagccgctcca

SEQ ID NO: 69543 - DNA, 122 bp, Homo sapiens
ttcatgacatcttgagctcacaagaacgttccctgccatcaccactaagtgttcagtggacgttttgggcttttggaaacggaagtgatttgagggtctttgttccaagaaaggcggtgctg

SEQ ID NO: 69544 - DNA, 122 bp, Homo sapiens
gctgctaagtttaaatattggtcccctccaaatcacatgtttaaatgtggtccccagtgtcggaggtgggggtaaatgggaggtgtttgggtcatgggagtggatccctcatgaatagatga

SEQ ID NO: 69545 - DNA, 122 bp, Homo sapiens
cagctctccagctgtatccgtgtccaggaatggaaccaaagtcttggtgaaagtctcagtcgattcctgaggcagagctgacatctgggaggaagcagaggaccccaggtattcaaaggccc

SEQ ID NO: 69546 - DNA, 122 bp, Homo sapiens
cccccaccccgccccacccagataaactatatctacactgtctcgtcaagttctctgacacgatctttctgggctctacatttcctactagtttgtgtccagaaactgcaagttgacatgaa

SEQ ID NO: 69547 - DNA, 122 bp, Homo sapiens
cacaaacgccctctttcccgaagaccccagtagtgacctgtgggattctggctgggtgtccgtgacttaccctcaaagagaacctgcacgcctggggtcccaggatggctggcttgcccctc

SEQ ID NO: 69548 - DNA, 122 bp, Homo sapiens
aaaacgttcatttttggaaggcccagaggccagaagacagctcaggcagcctccccacggcggcgcacgctgtcagatgcgacccagcctcacttaaaacttcaaagacacgcgtttcaagg

SEQ ID NO: 69549 - DNA, 122 bp, Homo sapiens
ctcgccccggccccacgtgagcccggcccctacccgcccccacccactcgttccctggggcggcccaaacccagtccccaggcctggagcccccgggctctacgcctcgcccgaagcagccc

SEQ ID NO: 69550 - DNA, 122 bp, Homo sapiens
aaccccattttatagataaggtaataaaagcatagagcaatgtaaacatttgttacaaatcgcagctagttagtagcagcactagaacagatacacatgctagccgatgctaaagcctagca

SEQ ID NO: 69551 - DNA, 122 bp, Homo sapiens
cccggaaggggcaaggagccaagacctccaagagccagctaccaactggagtgaaaggaccggggggaggggggaacagaacacaagataaaactgtggggcggcgggaggacagcagcaga

SEQ ID NO: 69552 - DNA, 122 bp, Homo sapiens
gccctcacctgtgtcaccctcgaccccgccggccctcacctgtgtcaccctggaacccgccggccctcacctgtgtcaccctggaacccgccagccctcacctgtgtcaccctcgaccccgc

SEQ ID NO: 69553 - DNA, 122 bp, Homo sapiens
ctctatagccatactggacaggaaccaggtgccccgtgtaggcatcgtcggtcggtttgccgtcagagatggcgcatctcgctgcatcccccgagagtacaccggttgctctagccacctgc

SEQ ID NO: 69554 - DNA, 122 bp, Homo sapiens
ggcgcccgcccattgggccgcccacccgcgccttatctgcatggccacgcccccggcgaccgagcaacagccgcctattggcgaataagcttcctgacgaagactctcgggcgtgcaaccgc

SEQ ID NO: 69555 - DNA, 122 bp, Homo sapiens
agccgcggggacctagcggggccgagaggggcggcttggagctgggggatgcgggcgcagcggggcagctggttcttacggtgagggcgcccccggtgaggtctgggctcaggccgggcacg

SEQ ID NO: 69556 - DNA, 122 bp, Homo sapiens
gccgccgctggcggagctggccgcgctcaacctcagcggcagccgcctggacgaggtgcgcgcgggcgccttcgagcatctgcccagcctgcgccagctcgacctcagccacaacccactgg

SEQ ID NO: 69557 - DNA, 122 bp, Homo sapiens
ttgggtggtcgatgggactgggcgccctggagcagggggtggtgctcgtccgggaggctccggccgaacaggagcccatggagtgggtgggaggctcaggcacggcgggctgcaggtcctga

SEQ ID NO: 69558 - DNA, 122 bp, Homo sapiens
cagtaggggagctcagaggattttctatttacttcatctggcctgttatcccggcaggtgcgcccttctctcccacttgcccctctgactcccaatttcccattcccacttctcctccccat

SEQ ID NO: 69559 - DNA, 122 bp, Homo sapiens
gctggggtcaggagcctggcggtagcaaagagcatcaccgaaaggaagctggtaggctagcgaggccagccccaaagacccacagatacacgcgctgctccgaactcgcgggcccgcggcgt

SEQ ID NO: 69560 - DNA, 122 bp, Homo sapiens
caggaaactgacagccagaaacagtaccgtcagaatcattataaagatgacagtagctaacgtggaccgaatgcttgctgcatgtgaggagcttcaaggatatcagctcatttcgtcctcac

SEQ ID NO: 69561 - DNA, 122 bp, Homo sapiens
accttcaagtgagcaaagattcaagagagcaaattaatgtcctgcgctattgtgaagggacgcaaaggatccagagaggaaaccagctgactctgagagaagggcctgaaaaggagaggaag

SEQ ID NO: 69562 - DNA, 122 bp, Homo sapiens
actgctccctctggcctcggctggcccttctcacctcacttctccctcccccggctgggccgaggacgcctcccacttgcacgaccttgttctgctggtctccagctgctgcctctgtctgg

SEQ ID NO: 69563 - DNA, 122 bp, Homo sapiens
aggatggtttgcgataaactccctcatccatctggcaactgtcattagttctcctgtgggcgaggggggagcgaaaaaaaaattaaaaccacgtaagttttttttttaataagttgatattt

SEQ ID NO: 69564 - DNA, 122 bp, Homo sapiens
cagggctggaaggaaacacggggttcagggatctgtgaggacggggactggagaacaccccgagttttctgctgggacccacgagaaccaactgcatttaatttggggaagacagagagaga

SEQ ID NO: 69565 - DNA, 122 bp, Homo sapiens
gaggagagagggggaaaagctccgagcggtgcgtgtggagggtgcaagcgcttgcaagtgcgtgcaagtgggctggtacgtgtgttgagaaggcatgagtgtgtatgaaggggtatagagag

SEQ ID NO: 69566 - DNA, 122 bp, Homo sapiens
tttcaattttaattcactatttcatgttaactagcctaggatgaaatagtagatcctcttcggttccagttcccttaaaacagtcctgattcttagtcctttttattaatataataccttca

SEQ ID NO: 69567 - DNA, 122 bp, Homo sapiens
ctgaaaacttcttcatcttctttaactgagatacgaaataccagaagctggacttggcgacgacatgattaggcgcaaacattcacatgccatagaggggcggtgtgtggcatttgggggtg

SEQ ID NO: 69568 - DNA, 122 bp, Homo sapiens
ccgcgcagtcatcattaattgatgctgtctttacaagattagcagccaatgcagagtgttcgtctatctgttagatggatcagtttattttttaagaaatggatagagaacttcttaggaga

SEQ ID NO: 69569 - DNA, 122 bp, Homo sapiens
gaactacggcgctgcggaagggtccgtactgtccacccttcccccagcgtgattagagagcggagtggccccagctgcctccacgtgtctcttctcctgactctcctcttcctcccccttcc

SEQ ID NO: 69570 - DNA, 122 bp, Homo sapiens
gggagcgacggactcacgcgggatcgcaggcactgctgcaagacgccgaacaggctgagccggtaggcgaaagaagtaagggtcacagaagaagcaaagaaaacgaaataaattccgaatcc

SEQ ID NO: 69571 - DNA, 122 bp, Homo sapiens
ctgactcgtcacaaagcatccagacgcgtctcggccctgcgtccaagacgcaaagttgtgcggcaaccaagcctagagctaagcagtcaccaggagtggagacaaaagcagtgaaaggatgg

SEQ ID NO: 69572 - DNA, 122 bp, Homo sapiens
ctgtgctcttcaggagaagtgacacctgtggctgggctccttcctctaggctctcccctccgactcctccctgtgaaataagagagtggggctacaggcagcacagggtggcctggactcag

SEQ ID NO: 69573 - DNA, 122 bp, Homo sapiens
agcagaagtttgtttcccatgtaacttcaggtctttgtacatgtaccctctgcatccccacggggaggaggggaggttggcaggatggattcagacatacttggatgcctggtgagaacccc

SEQ ID NO: 69574 - DNA, 122 bp, Homo sapiens
gcagcgttccgacatccagaatgcagtaaggacggcgctgaagtgcagcggtctgttccccggacctgcagccgctccagggcagggcttaggccgctctggctccccggcggccggcacag

SEQ ID NO: 69575 - DNA, 122 bp, Homo sapiens
tcctgcagttctcacagcgacctgccagaaaaagtcgttcccaaatgtttgtaaatcctccgttgggcaacccgccttcacgttctgcggtgatcttgtcgagcgactaagcgtgcagtatt

SEQ ID NO: 69576 - DNA, 122 bp, Homo sapiens
ggagtttttcagaaaaagtacagtgaaagataagctttaaataagtggtgaggcggagatcggccagcatctaaatcatttgtacatgatcaagggaaaatcttgaacttgaaatctcccag

SEQ ID NO: 69577 - DNA, 122 bp, Homo sapiens
tccaaggaagacgtgaccgaaatgtaaagcactggacggcttacccaataagggacccagcgtttcttattacccaacatccccctgagtctggcttttagaaaaatatgcaaagcgtccgg

SEQ ID NO: 69578 - DNA, 122 bp, Homo sapiens
gccagcgtcttggctttcttctccttcgggccctcgggccggtgcttgtggactcggctgcgactggccagggagatgtggatgtacagcaccgtcatgatgaccacaggcaggtagaaggc

SEQ ID NO: 69579 - DNA, 122 bp, Homo sapiens
tagtattgtgagcttgaagacaatgaacctttctgggattcaatcacctgacttaccatacgggaaggtcaaaatacttttcattagccaggtgactctaaataaaacaggagtgaagtgac

SEQ ID NO: 69580 - DNA, 122 bp, Homo sapiens
aacctccccaccaaatacacaacaagctttaaccagtgggcctgaccctgcgagaccagtcgaggaaagagtggatctttggaatccagcatggcagcagcaagaactgaacaaggctgcat

SEQ ID NO: 69581 - DNA, 122 bp, Homo sapiens
gccagttccacctcccggaactaccttccttcctccaccgcacactggccagggaggggccgtcagatgttagcaaactcttcctgcccaagaggccacacctgccagcccactctcaaaat

SEQ ID NO: 69582 - DNA, 122 bp, Homo sapiens
caggaagaatgctttacaaataaaaaaaatatatatatgtattaccttcttttggtaccacgatatagcatctctctcatttgaggccatctgtgtctccagccagagaatgggatttcact

SEQ ID NO: 69583 - DNA, 122 bp, Homo sapiens
aaatacttttccctttggggaagttggtggagaaggcttctgtgctcaggtccccaaacacgggtagagtgtcagactcaggaaccttctgaccctggcacagttgggactctctgaggtcc

SEQ ID NO: 69584 - DNA, 122 bp, Homo sapiens
gagtttcagagtcccgccggagttagagctggcagagtccaattgctcagagcgccgaggcgggggcggggcagggggacgcttgcaggtccggtggtcccgcgggctgcgagcccccacgg

SEQ ID NO: 69585 - DNA, 122 bp, Homo sapiens
tgttattcttttgtccatcattccctgacctctccccgcacctccctgccaaagcacaaacgaaaggaccatagagaccaaccagtacagtttgcctaagtttgcaaacaaggaaactgagg

SEQ ID NO: 69586 - DNA, 122 bp, Homo sapiens
agcctcccttatttagtccgcgatggcttccctcgcgccccaccgtcctcttccggaaggcggctccctccctgcgcagcccggagcccctgagatcagcctcgagcaggcgcccgagcgag

SEQ ID NO: 69587 - DNA, 122 bp, Homo sapiens
gagtagaaaaataggcttgactattctaaagctgcttcagaaagaatctccggaagaccacggaggaaccccgcaggggagccaggcggatactcagccgctcgcggtagaagggcgcgcaa

SEQ ID NO: 69588 - DNA, 122 bp, Homo sapiens
agtcgctttggattttgcctggactccagctccgtggggtgctagttaatgtttagtgagcggctctcttcactcccacccgcaaagcagggctgtgtcgtgctgccatctccgcggcgtaa

SEQ ID NO: 69589 - DNA, 122 bp, Homo sapiens
gcctttccgtcaattcctgtcctgggcgtacgtcaagatggcggcgtctgtattaaacaccgtgctgaggcggcttcctatgctatctctcttccgaggttctcacagagttcaggtaactc

SEQ ID NO: 69590 - DNA, 122 bp, Homo sapiens
ggcggcggctctcacgttgcagccctgcaggcagctcccgggatgcttgcgaggccagtccgctcctgcctgcacaagggctaggaagagctgccagaggaaacgctgtctgacccggagaa

SEQ ID NO: 69591 - DNA, 122 bp, Homo sapiens
acccgcccctcggaaactccctcgctccccgcggactccccggcccctcgcgagcccacccggcccttcattccgtctcccgaacctgctcgggttcccgcgccccacgcttgctgcagagg

SEQ ID NO: 69592 - DNA, 122 bp, Homo sapiens
acgatcctgcagccttgctggttaccgagctctttgctaacagacttgtttcagggtatgcgccggccacaggcgttagcagagcggagtggggtggctgacgcagcccgtctcatctcccc

SEQ ID NO: 69593 - DNA, 122 bp, Homo sapiens
tattgcttttcagaaagcggggagaagagatggtgccagtgacctaagtcacagtttcctcgaaaggtagaaattgctaacaattcaagttgacaactgccaatagcaacccaaccccgttt

SEQ ID NO: 69594 - DNA, 122 bp, Homo sapiens
acaggggacagaaaggccgtttctccaggtccaggcagctcaggcccctatgagccctggcgtagcagagacccaggcttcttggtagaggcccagagccctgtactgccaccactgccgga

SEQ ID NO: 69595 - DNA, 122 bp, Homo sapiens
ctcattctatggtagcttccctcagctcctcctcacctccacacttttccgtttctcaagcgcttctggagcttttcgtcaccaaaggaactttctggaaaaaagttcctttggtgactctt

SEQ ID NO: 69596 - DNA, 122 bp, Homo sapiens
accacgttcgtttcgttcctctggactactgagttaatgataccggcaatcagcgcaaagcgagataatcaccagcgcactcttggatctgtatacaggtttgtaaactatgtggaggaaac

SEQ ID NO: 69597 - DNA, 122 bp, Homo sapiens
gagattacatgaatgatgtcatttaatcttcaggccaagtttgctctactttacccctcccggccccaacactccacagaaagtagtgagctacatggtagagggcctgcttttatgtggtg

SEQ ID NO: 69598 - DNA, 122 bp, Homo sapiens
gcgctgaaatgtctatcatctcctttacaaagacggtactgcctgcttccccaagccaagcgtctgcttttctgttttgctgaactcaggttgcttagcgaccacgcactctaaagccattc

SEQ ID NO: 69599 - DNA, 122 bp, Homo sapiens
ggtttattttgcttttgcagaggaggcagatgttgacctctcttctttgcacagtctctccgcaaaattttcccccaaccatttgctttcttgcgccaccccccaccggggcactatccctg

SEQ ID NO: 69600 - DNA, 122 bp, Homo sapiens
ccatccaggttcggggacgaacaactgcttggtgtcacaactaaactgtgcagacgtcgccgtctttccctaaacgacacggcacgagaaacctactttcattttttatctgaaagttctga

SEQ ID NO: 69601 - DNA, 122 bp, Homo sapiens
ctcgagccccaactcccctccccgacgcgaccctcagactcacggcctgaggggctcctccggcaaaacagcggctggctcggaccctccctcagagcacactaaccagcagcacccgggac

SEQ ID NO: 69602 - DNA, 122 bp, Homo sapiens
tccgcccgccttagaacgaaagctggccgttccgtttcacaaactgcgaacctgaaacttcggatatccctttctcgatgacagccgaaacgcaaagtggcttagagtacttttgattcttg

SEQ ID NO: 69603 - DNA, 122 bp, Homo sapiens
ccccctccccgccgggcctctgggaatggggtgtacgggggcgcgaccccctccccgccccgagtcagacaaagaatacttcccggcccagactttccagagctgggaagggaagtggctcc

SEQ ID NO: 69604 - DNA, 122 bp, Homo sapiens
gggtcgggggctccggaggagctgagggaagtcggctgacttgccctgaaggctgagactcgcccacccgccaatctacccctacacctcctgccccctcccccgaccttcggtccatcttt

SEQ ID NO: 69605 - DNA, 122 bp, Homo sapiens
tcccacataggcagagaccacttaaatacaaactttattctctctccaagaagatgcagacgtcacaggtggccctgagctcccacccgaggcttaggcccaaggggcctcttccaggctga

SEQ ID NO: 69606 - DNA, 122 bp, Homo sapiens
tgctgcccacaaggaccagtttgaatgtcacttcctccctaacagctttccaagccactacgtgagaattaattgcttcctcctctgggatctcctagtagtttgtatctgatcctatgact

SEQ ID NO: 69607 - DNA, 122 bp, Homo sapiens
gcattttcttagtgtgatggaaacagcatcaggctctgaaaggcctttgtttgagagcaacgcacggaactgtggcaagccaccagaaaacgctcagcttattttatgaaacacatttaaga

SEQ ID NO: 69608 - DNA, 122 bp, Homo sapiens
ttctgttccagaggctgaattaaacaaaatctacgtgatcgccttggagatgccggggatcgaacccggggcctcatacatgcgaagcatgcgctctaccactgagctacatcccctggcac

SEQ ID NO: 69609 - DNA, 122 bp, Homo sapiens
aactgtgcgtgacatgatcttcgtaacggcctcggcacgctccacacccctggagtctcccgaggcccccatgtgctgctgagtggccaagatgatgccaggctgccctatacactggggga

SEQ ID NO: 69610 - DNA, 122 bp, Homo sapiens
gggctctctggcgcctggctgtgtcaggcctgtcccagctgaggacggtgaccctggagccgcgcccgcgcctggagctgcagccccgcggccgcccggacagctgcagcccggcagcactg

SEQ ID NO: 69611 - DNA, 122 bp, Homo sapiens
gggaccacgggcctgcggatgcaagcgagtcctacggactcctgcgcgcgagctcgcgggcgccgctgcgggccttcccgctggcaccttttcctaggtttccaaccttcctccccattccc

SEQ ID NO: 69612 - DNA, 122 bp, Homo sapiens
ttgcacctgacctgggatttttatgctgggctgctgcaggggcttggaggaagaaagcggcgctatccatgtgcggttactaccgaaaccgaggaaactggggattgcgttggaagtcggca

SEQ ID NO: 69613 - DNA, 122 bp, Homo sapiens
acaatcctcaggatgaatgactgcctagactttgaacgtaatggtcaaccagttttcacccgaattttgactgtttcatttagaagaaaagcaaaatgagaaaaagctttcctcatttctcc

SEQ ID NO: 69614 - DNA, 122 bp, Homo sapiens
gctggccccggtgctaagcccctcactgtccgtcgccggcctctccaagtgcagggcctgcgaagacccgcgcgtagccccggttcccgcccgcgcctctgcctccacacttccccatgagc

SEQ ID NO: 69615 - DNA, 122 bp, Homo sapiens
cccgacattaacagggccaggaggaaccgctacggccaccaccgccacccgccgaggagccgcccaagcccatttgccgccacagccaaactttgcggctccaaagcgaccgccccgccgag

SEQ ID NO: 69616 - DNA, 122 bp, Homo sapiens
agagaggggccaatgagcctggagctgggggcgggggcagggccgcgattggctgagaggcggccagagggcgggcgggggggaactcaaggcctgcttgatacgtccgccattttgggcgc

SEQ ID NO: 69617 - DNA, 122 bp, Homo sapiens
gcccaccgtccacctgcctcaatgggggcacatgccacctggggacacggcaccacctggcgtgcttgtgccccgaaggcttcacgggcctgtactgtgagagccagatggggcaggggaca

SEQ ID NO: 69618 - DNA, 122 bp, Homo sapiens
tgggaaggcgaccaagggcagcagcaggggctcctgcggggcgcaggtctgtgctggcgccgggcctggcctctgcaggctcggcggagcctcccgattgctcccgccgcacccgcccgcgg

SEQ ID NO: 69619 - DNA, 122 bp, Homo sapiens
cttggctcagatgagaggccatgccctgtgctgactctctgaggttggtggatgtgtagccggggctgatggagtgagagaagtggatgagggcacaaaaggagcaaaagaaagtttcccag

SEQ ID NO: 69620 - DNA, 122 bp, Homo sapiens
gcagaaaataggaagcaggctaaagatgccctaggacttagggacaaggcaacagtatgacgaaaggttgacttctgtgcatcactgttcagcttacaaagtgcataatagagaacatttcg

SEQ ID NO: 69621 - DNA, 122 bp, Homo sapiens
aacagaagcctttccagtttacagctttaaaattattccttttgacgtggatctgctgagcgccaacttgttggtgcttctcccgctcacccctggccagggcgtgtaatgacttcagtatt

SEQ ID NO: 69622 - DNA, 122 bp, Homo sapiens
aaactagagcaactgccagaaactaattcaagaagaaagatcctctctgcttgtagctcccggctgattcactgggtctgatcccggaatgtcggggctcccctggagacacacagggctcc

SEQ ID NO: 69623 - DNA, 122 bp, Homo sapiens
aatggataaaatttccgtagttggggacataagataacggctgttcaccttctccttggccgggagtgttaatagcagttcctgtgccctctctgtgtaggtaacagtgcctcgaacacaca

SEQ ID NO: 69624 - DNA, 122 bp, Homo sapiens
ggggtgcgagatggaggccaggtgccctgggcagatctagcttgctacaaagaggcaagacggtgcctttggcaacactgcctcacctggaagaacagccagtgaacggcttgaattttata

SEQ ID NO: 69625 - DNA, 122 bp, Homo sapiens
cccatcgacgccttccttcttatctctcaacctcatctctgtccccgccaatattcagcccggctaagaagcttaggagctggctaaggctgctcctccacctggatgcacacacagggcta

SEQ ID NO: 69626 - DNA, 122 bp, Homo sapiens
cacccaggcccgcagctcctatctggccaatgagatcctgtggggtcaccgctttgagcccgtgctctttgaggagaagaacctgtacaagatcgactactcgcacttccacaagacctatg

SEQ ID NO: 69627 - DNA, 122 bp, Homo sapiens
ggtcggcggctccttcctgctgggtgcagtccccgaggctgcttcttgcccgggaagaggcgaaaaggagcggggtggaaaggaggctggcaggagggtggaggggccggagggctgcagag

SEQ ID NO: 69628 - DNA, 122 bp, Homo sapiens
cctcccagctggcctggctcaaggccccactcccggcctcccctcccacctggcagtgcccgggaaatgccctataggtccttaaccaatggacagaggtgcaatcgtcccgcaccggcccg

SEQ ID NO: 69629 - DNA, 122 bp, Homo sapiens
cctggccaaccagtggcaggtctccaagcccaaggacaacccactgaacgaagggacggacgcagcccgggccgccatcgccttctcctttttctccatcttcacctgggtgagtacagcca

SEQ ID NO: 69630 - DNA, 122 bp, Homo sapiens
cccgccccgcctgccccactcgcacacgggctatcactcagcctgcgccccgccctagctcgccagaggctccgccccacccgcctgccaacacgctgtcactcagccttagccctgcccag

SEQ ID NO: 69631 - DNA, 122 bp, Homo sapiens
caggtgggatccgggatctgcatctccaggtaccaggtgcgccctccgtccggtcttctccgcccccaccccgccccgtccccacaaggtggggacggggctgcagatgtagatgcggatct

SEQ ID NO: 69632 - DNA, 122 bp, Homo sapiens
ctggcgaggaggcaacgcacaactgtggtggtttttggagtgggtggaccccggccaagacggcctgggctgaccagagacgggaggcagaaaaagtgggcaggtggttgcagctgagggac

SEQ ID NO: 69633 - DNA, 122 bp, Homo sapiens
ccccgcgtggctccgcctcctgcacctgcagcgcccgccgccgaagacccgcggagtcggcggttccaacccagcgccgccgcacgccgggtgccttctcaggtcccacccggagcctcgac

SEQ ID NO: 69634 - DNA, 122 bp, Homo sapiens
gtacgtttagcgtggccgggattctgcagccctggacgtgtctttccctgccctgttctccgaggcggacctgtggagctttaagctcccaccttcggttttgtactgggcgcgggaattgc

SEQ ID NO: 69635 - DNA, 122 bp, Homo sapiens
tgatcactgcccagtgaggttaccagcagcccttagaagccccaactcacatggtactttcgtgctgccgccggggagtgacaaagagcatgcgggtggggcgggcactactggcatctggg

SEQ ID NO: 69636 - DNA, 122 bp, Homo sapiens
gatggggttggaggggcaaagggcttattagaggagtaatgcctgtgaagaaaaggggaacggaacatgtttgggtatagggagccatcagactgcagtgcacacctgacgaagtctctgcc

SEQ ID NO: 69637 - DNA, 122 bp, Homo sapiens
catgctatttgctatatcctctagctgatttagcttgctagtcttttttcatcctcctctcgtttgactatcctcttcgttatggagaatcagactgttgtataacaaattcagagtgtctt

SEQ ID NO: 69638 - DNA, 122 bp, Homo sapiens
agcagacacccccagcctgtccagccccaagcctcagtgcccggggctgcagtcaccgcgcgccccgccgtttaggatgttttttgtgtccttaaaaagtgccggggatttcatcgtcaggt

SEQ ID NO: 69639 - DNA, 122 bp, Homo sapiens
gatgttagcagagctggtgtggttgcggggacgtgaaaaggctggggatagagtaggaatcgaggaatgccagagcccaggcctagtccctcagtcccttggtgtcaaagggcacagagatg

SEQ ID NO: 69640 - DNA, 122 bp, Homo sapiens
ccctgtcacttcaaaaggtcgcccaaccagcgagcggggggtttacccacgactctggctcgcaccccttgcgggcctgcgcaggcggccccgtagcgcaagggagggcgggaaaggaaggg

SEQ ID NO: 69641 - DNA, 122 bp, Homo sapiens
cgctctacgaggacgctgtgagggaggcatgatcataagcccatttcacagatggtgaaacggatcctagagagagagccacgcgcccagagccccagagccacacgctgaatttcaccaag

SEQ ID NO: 69642 - DNA, 122 bp, Homo sapiens
gccttttgcctcctgcaactcaacatcctcttcaccctgccctgcctgcagttgagggggcgaagaagaaccctgtgttctcaggaagactgcctccaccaccgctacccagagaacctctg

SEQ ID NO: 69643 - DNA, 122 bp, Homo sapiens
agcaagggactcgcggttgacgggacacggatcctctaaggcccagagtgtcccgagtagcggcagtggggagtgctcagggtacgctaatggtgagtggttgcagttgatgggacaaaaaa

SEQ ID NO: 69644 - DNA, 122 bp, Homo sapiens
tcgccttgtccttgcaggcttggaggtgcctgttcccattgcttggcctctgctagctcccggcccccgcacggatctcgaagtggggttggggcctagcccgagggctgtcacacccccgc

SEQ ID NO: 69645 - DNA, 122 bp, Homo sapiens
gcagctatacaccatttagttttgtaaaggtgttttcccatctgttatttcacctaggctcgaaacaacaaaaccaagctgctggggataaatagagggagcggaggagaatcccaaaggcg

SEQ ID NO: 69646 - DNA, 122 bp, Homo sapiens
gttccaagcccccttggccggcctggggctggtcgcacagcaggcaaaagggattatgctcgccccacaacactagggtgtggcagtgagaagaaatctcacagatgccttcctgtgcccgg

SEQ ID NO: 69647 - DNA, 122 bp, Homo sapiens
gaaaggagcctctggtgaaagaaacaaaagatggacctcacagaaggcatcgcatgccttcggcccccccaggaaccctaggcagggaatggcagtgaggcatgatgatcaagaggatgagt

SEQ ID NO: 69648 - DNA, 122 bp, Homo sapiens
ttcccctcctcccagagtgaaaacgtatccatttgactcttgaaagagcaaacctcagaacgaggctcatgggcagttgggaaagcaatgcgactaaaacacaataactgcccttaaggaac

SEQ ID NO: 69649 - DNA, 122 bp, Homo sapiens
ccctcccggattcagaagcggcctcagtgaggcgtttgctggagggagctttccatcattcggccgcgagaggaaacgtggggaggcgccctcccctgcccccaccgcctgccttcctgcct

SEQ ID NO: 69650 - DNA, 122 bp, Homo sapiens
aagggcggagcctgtgcagtgagcgtttggccacctggtcgcacaccgagtgctcgtcagcgcgcatggcctgagcgttctgccctgacactcgctggcctctgggcgcttctgtctttgac

SEQ ID NO: 69651 - DNA, 122 bp, Homo sapiens
gggtttcttgtcataacaacataggaacaggtcacccgcgtgttactcaaaactgtaggacggcagtgagggctttgctaatcccagaacagaggtgtaacctggctgcatatccagcctcg

SEQ ID NO: 69652 - DNA, 122 bp, Homo sapiens
cccggctctgctcagcccgcgccttccgcggcgtggccgcccgcgcctcaccggcctctgcggcgcgagcccggcgggggcagcatcaactttcatgtgacattaatagccttactgctctc

SEQ ID NO: 69653 - DNA, 122 bp, Homo sapiens
tccccctctgttgccctagcgccccttggaagccaagaatatgaggaagtcttcttccttcgcgccttcttcttccttacgctccagggcagcctgacagagccgctcgaaggctctgctgg

SEQ ID NO: 69654 - DNA, 122 bp, Homo sapiens
acccggcgccgcaggggtcccccagattcaattctagctctcgggctggtggggcggtcgcgggcgcctctccaagggagctgattcattgtctggtaggccctctgcagggcccagctggc

SEQ ID NO: 69655 - DNA, 122 bp, Homo sapiens
atgtctattttaggcttgcaagaaagaaaagaaaaactgctttgcctttagaaaatgttacgaaataatcaggaaaatgttaaaattatagaagcaagaggttatgcagaaaagaaatgaga

SEQ ID NO: 69656 - DNA, 122 bp, Homo sapiens
agatgaaaaggatctgtagaggctgctggtgatggctgcacagttcgtgaatgtgcttaacgtcactgaaatgtggttaagatggaaacaatttgtgaagttttaccgtaatgaaaaaaaca

SEQ ID NO: 69657 - DNA, 122 bp, Homo sapiens
tggcgccttcacggcacgaggctcaagccgaccacctcagctccgtgcatcctcagcaggcgctgcagagcctctgcgtgggccccttcccaggggtctctggcacctgcaaagctggctgc

SEQ ID NO: 69658 - DNA, 122 bp, Homo sapiens
tcacctgcgggacatgatcatcgtgcccgagatggtgggcagcatggtgggcgtctacaacggcaagaccttcaaccaggtggaggtcaagccggagatgatcagccactacctgggcgagt

SEQ ID NO: 69659 - DNA, 122 bp, Homo sapiens
ggcgccctcttttccagccccgctcccgcgctgccgccggagagggactcggggcgcagccgccccgcctctgccggggccccaggaggaatctaagaaaagagagatggagggaggaaatg

SEQ ID NO: 69660 - DNA, 122 bp, Homo sapiens
catgttgcagagccaggattttaaattagatccagccagttccagaatcattactttttccgttccgtatgcataccaggctgcctctttctagattatcctccaaaaagccctggggaggc

SEQ ID NO: 69661 - DNA, 122 bp, Homo sapiens
tgatccttacaaatgtgtagagctgtgcatccgcgccacagcacaccagggtgagggcctcgcagtgcggtttaggtcctgagatgtgcgtccgcgccccagcacacctgggtgaggtccgg

SEQ ID NO: 69662 - DNA, 122 bp, Homo sapiens
cccacgtggccagagctctgctagggtagtgtccaggcagagcccaggccagctgggatccggcgctgggaccgcagacccgaacagtgtgttctcccgggtggctgcgtccctctcggcct

SEQ ID NO: 69663 - DNA, 122 bp, Homo sapiens
gtgtaattaagagatatcactgcccgtttttctcagtgatgaggccgcagctgactcagtcgataagggccgtgaaggagtggggcccagggcgcagtggggatggactggccttttcacgg

SEQ ID NO: 69664 - DNA, 122 bp, Homo sapiens
tggggaggctcgcagggctgctgtccctctggtcaggagaaggctggttctcggaggccacgtcagggccagggcctggcccagccccacatccagcagccccgtctgtgtcctcccagact

SEQ ID NO: 69665 - DNA, 122 bp, Homo sapiens
agtcagcgtttagtgtttgacagctttctcagcactccctgactccgtttacctttactccgcatcccattctcttactgcctatctgaaggattggatgggcagagtataggtggcggtgg

SEQ ID NO: 69666 - DNA, 122 bp, Homo sapiens
agtaacaaaggaaaaagaaaaaaattaataaaaatttcacgatatggagccagcgtgttccgattccgtccacaaaaataactcaggctgctttgccgaaccatcctgtccaccaggggcgt

SEQ ID NO: 69667 - DNA, 122 bp, Homo sapiens
atcccaaggaggcaatctgtcaggcgccgcccgggcggcagtatgcctgagggggtcctccgtgttcgcgcctcccgccgcctgcactgaaaggtctgtacctgagcctggatacttgaaca

SEQ ID NO: 69668 - DNA, 122 bp, Homo sapiens
gcgcttgcgcaagagccgtcgcctgcccttcgaccggaaatcagccgcccctcccaccttcgaccggaaatcacttcctgggacttttcactgtgggctgcctcttccagcgtttttttggt

SEQ ID NO: 69669 - DNA, 122 bp, Homo sapiens
tccttctgagaacaagggagtcataaagtccaagcaataatggaggagggctggcagctccggagggaagtgacaacatcccacggcagcgacctgcacacagggttctgagcaatgctctg

SEQ ID NO: 69670 - DNA, 122 bp, Homo sapiens
gatccagacactcaagtacaccatcaagtacatcggggaactcacagacctccttaaccgcggcagagagcccagagcccagagcgcgtgagctccatccggggaaactgaccggttccagc

SEQ ID NO: 69671 - DNA, 122 bp, Homo sapiens
cccaaatatttcacttcaagaatgtataggcggtcaaccaaataatgcatacaatacctccgtacaatacctccatgcaatacctccatacaatacctccatagagtaccatcctcctatta

SEQ ID NO: 69672 - DNA, 122 bp, Homo sapiens
agtagctaccatattggacagtgtaaccttagaagattcaaggcagaacctgggtgaggccgcccctatgcctcccaagactgggcgacctgtcactgtgtctctttccattgctgaaagtg

SEQ ID NO: 69673 - DNA, 122 bp, Homo sapiens
gtgggtgtttcccttgtcttatctgtgagtgagcatatgctagggttgaatttattttgacgctttcattttaaatttggaaccaaagtaagagtttaaagtgcaacagaagagagtctgct

SEQ ID NO: 69674 - DNA, 122 bp, Homo sapiens
tgggatacggaggcagccgggctgccccaggctcagcgtcctttggtgactgcctgggggcggcccagcctctctccattgtgtgggataatttgatgacattaggctgtcagggccaccat

SEQ ID NO: 69675 - DNA, 122 bp, Homo sapiens
cccatgtgatgttgttcctaataaccagggggtagaggatgacgttactccaaatatcgccgtgggtgtacatcccttctgcgatcttgttgctaatacccaggcggggagaagacgatatt

SEQ ID NO: 69676 - DNA, 122 bp, Homo sapiens
gggtcgcggggaggccaccggagactgaagcagttacacaggctgcagggaagggagcaccgaccaagtcacttggggctccaagagcccgatctgggggtcttcaaggtcgaggagaaaag

SEQ ID NO: 69677 - DNA, 122 bp, Homo sapiens
ggcagttgccagctccagagccagctgcttgacacctattgtccccgtttgggcgtcaaacgatttcgcctgaaggaccctagcgtcgattgctctcaaaactcaaggggcctttccttcgg

SEQ ID NO: 69678 - DNA, 122 bp, Homo sapiens
caccggctggtgccggcggcttccagggcggctgagggaccgtggccaggaacatgggctcgcagagctacgggagaaggatcgagactgtctgcacattattagaagccagcctgtttcct

SEQ ID NO: 69679 - DNA, 122 bp, Homo sapiens
ggtgggggaggagacacggttgggccctgaagtcgcctgcgtggtgacccaggaaatccccgagccgagccgtaaggtccttaagtgagtaactttgccctggaggaaagtggattctacga

SEQ ID NO: 69680 - DNA, 122 bp, Homo sapiens
cggcgcgtgagaccctgggcggtgcaggggagcgttgacgacagacgtgggccgtgacgtcgccgcgccctgacgtccagccgactggcggcgcggtcgcccgggagaccgggaaagccgtt

SEQ ID NO: 69681 - DNA, 122 bp, Homo sapiens
tgtggggtcgggtgtggatcgtctcccgcgtctgtggggtcgggtgtggatcctctcctgcgtctgtggggtcgggtgtggatattctacttgttttttctgtctttgatgtagcgctcctt

SEQ ID NO: 69682 - DNA, 122 bp, Homo sapiens
tgaattcgtccatgattttgcgaatggctttgccgcgggcaccaatgatgcgggcgtgaacgcggtggtccagcgggacgtcctcagaaaccatctgctcaagttcacccacaattctcagt

SEQ ID NO: 69683 - DNA, 122 bp, Homo sapiens
attcttacaataatgtatgtacattatagtctcagaatacatatgcctgttcccccattgcgttttgagatcacctgacaaccactatcctgatggatcttcaaaagtcagtgtcttgcaac

SEQ ID NO: 69684 - DNA, 122 bp, Homo sapiens
aggtctgacccaggcgagtccctagaaggcgggcgggaggagccgtagcaggggcagtttcgggaatccgagtttccggagattgcctgagcaccgcagaacctccaggttaagttctctca

SEQ ID NO: 69685 - DNA, 122 bp, Homo sapiens
ttgagaaagcattactaaacttccccagacttggcaaagtacacgcttagctgttcttatcgtgcctacagctgtggggagctttctttgaagagtctctcctccccatcaccaaatgcagt

SEQ ID NO: 69686 - DNA, 122 bp, Homo sapiens
agtgttgtattcatcttgggtctgataaccaacagtgtctctctgtttgtcttctgtttccgcatgaaaatgagaagtgagactgctatttttatcaccaatctagctgtctctgatttgct

SEQ ID NO: 69687 - DNA, 122 bp, Homo sapiens
ctatcagagaggttctgggataattgatctctcagggggtatcaagtgggaccaatcaggcgagatcccagttctagttctgggtgggtcaacgagattcactttgtgctggggttacagat

SEQ ID NO: 69688 - DNA, 122 bp, Homo sapiens
aattatagcagttacttgctttgcaactttatataactccatctctctgaatctcactttcgtcatctgtaaaatggaatgatagtaccttgttggggttagcatgaggattaaatgagatt

SEQ ID NO: 69689 - DNA, 122 bp, Homo sapiens
ggctccagcatcgaactcatgcccagcaccctttaaaccctcccgggactctgcagaacccgctgaccactcacagagcccagctcgggggagggctttaaggtgaagcacgtgaccccctg

SEQ ID NO: 69690 - DNA, 122 bp, Homo sapiens
agagctgaggaggtggctccctcccgcagaggtgcatgacttggctggagtgttttgcttcgctggcacacgtcttctcttttcaagttagctgagctcacacatcccccttgcttgtttgc

SEQ ID NO: 69691 - DNA, 122 bp, Homo sapiens
tctggaagcttttagggggcggaggtagaggtggggaggcagaaggaaaattccctcaaacgttcgtcaggcctaagagagtcgtcccttcactcaaaattgcccgtcaccccccgcccccc

SEQ ID NO: 69692 - DNA, 122 bp, Homo sapiens
atcatcctttgatggacacttaggtagattgcatatcttggctattgtgagtagtgctgccgtgagcatgggagtgcagtatttcttcagtatattgatttccattcttttgggtctatacc

SEQ ID NO: 69693 - DNA, 122 bp, Homo sapiens
ccaagaaagtgtggggccgactaagactagtgtctatctgcatagggctaataggagctgcgctacagctcagagttgtagcaggaatagggaagtctccaaagccaagcagcatctaaaag

SEQ ID NO: 69694 - DNA, 122 bp, Homo sapiens
gcccccaactccattatgaggcccttctaccagggtccggtgggcgaccctgacaagtaccgcctgtctcaggatgaccgcgatggcctgcagcaactctatggtagggggagagggacctg

SEQ ID NO: 69695 - DNA, 122 bp, Homo sapiens
gagagggaggcgggggccggccggctgctttctggagcgcgtctatttcgggctctgcggcgactctggaaagccctgtctggaggatggctcccaggggctttcacggccagcaccccggc

SEQ ID NO: 69696 - DNA, 122 bp, Homo sapiens
aatgatcctctgcctgggcctgtccaaagtgttgagattacaggcgtgacctattacgtccgacctgccttttgggtttttggtttttgttttgttttgtttaattgaaggttagggtgcct

SEQ ID NO: 69697 - DNA, 122 bp, Homo sapiens
cgtttgacggggtgacacgagcctgcagggccgagtccaaggcccggagataggaccaaccgtcaggaatgcgaggaatgtttttcttcggactctatcgaggcacacagacagaccatggg

SEQ ID NO: 69698 - DNA, 122 bp, Homo sapiens
gccacacctcgatcatcaggaagaggatcatgcagagggtgctccagaggtcccaggccacgcgtgtctcgttctgctgcctgccctcctccgccacctgctccagtgcctccttttcggcc

SEQ ID NO: 69699 - DNA, 122 bp, Homo sapiens
agaaaaggaggagcccagttcttgcttgagaatgataaacttggaaacccttgggaaaggcgtgggggtcatgcagagacttgtattggtagggagcctgagtcgaggtccctgccggagtt

SEQ ID NO: 69700 - DNA, 122 bp, Homo sapiens
ttgccgtctttccccagcatgtggctgtgggaaagacactgaagatgaacctgcaacaagcgattctgacaccagcgctaggctctacagcccacgggggacttgctagcctcagtcacagg

SEQ ID NO: 69701 - DNA, 122 bp, Homo sapiens
cgtgcagatattgcctggacacacacatgtgcacagatatgctgtctggacatgcacacacgtgcagatatgctgtccggatacacacgcacgcacacatgcagatatgctgcctgggcaca

SEQ ID NO: 69702 - DNA, 122 bp, Homo sapiens
catctgggtggaagattgaggcccattgctctatgactgaagttgcctgcgttcccttgccgaaggtcatgcctcccagcagtagaggaaaatggtggcaggcactgaattgggggtgggtc

SEQ ID NO: 69703 - DNA, 122 bp, Homo sapiens
gcaggccccagccacaccagcctaagttctgtttctgagccatgcctcgtcctttatggccgctgcacatgatgttccttctgcccagatcatcttccctgctcttcccccaagtcctcgtc

SEQ ID NO: 69704 - DNA, 122 bp, Homo sapiens
tcatcagaaacttctagggaccctagaaatgacggatcacacagagtaaaatgctggttccggggcctttgcccagagttttgtctccttagcctgggcaaggcccagaaatcctcatgttt

SEQ ID NO: 69705 - DNA, 122 bp, Homo sapiens
tagagtccgcagcccgcccgcccgctggctctcgggcccagccgggctgcctggttagcccggggagggccacatccctgccgccccagtcaccgcccttcttgagccgggaatcccgccca

SEQ ID NO: 69706 - DNA, 122 bp, Homo sapiens
cctctggcctggaccaccgccgcaggtgccccccgacccacgcccgcagccaggacggtccgtcctgccactcctactgatctgctctactcaggtctcaggctaaatgtcacctcctcaga

SEQ ID NO: 69707 - DNA, 122 bp, Homo sapiens
aaaagaggcatatgggttcacttgggcctggtgaggggtaggtgggcaattcccgccttccgcactctaaccgtgcccctcctccagtgttgaccacctaagaacccaaaatgagctgtaat

SEQ ID NO: 69708 - DNA, 122 bp, Homo sapiens
acaggcctgtgcccccacgcctggctaatttttgtatttttagtagagacgggatttcgccgtgtttgccaggctagtcttaaactcctggcctcaggtgatgcacctgcctcagcctccca

SEQ ID NO: 69709 - DNA, 122 bp, Homo sapiens
aaggtaggggtgggtcgagttcaagggctgaggcagaagacccccggggagggcctgatccgagggatttgggaaagaagagattcggtctcccaaggggctcacacgccccttccctgggc

SEQ ID NO: 69710 - DNA, 122 bp, Homo sapiens
acggggcgcacggagggagcgctccggggttggtgttccccagggtcatagaataacccacggggagaaagagactgcccagggactcgaggggacggggccaggggcggcttcttcaagag

SEQ ID NO: 69711 - DNA, 122 bp, Homo sapiens
ggggacacactggacgaggggccttgcatccctgcacccttggaagcagcctgtttccgacgtctaggagcactcaaggcagaagtgggtaaggtgctccggaggccctcgtggatctgtct

SEQ ID NO: 69712 - DNA, 122 bp, Homo sapiens
cgggcacggcgctggggctgcttacctggcaggctcagcaatgagggcggggcggcggcgcgcgggcctctggaaccctgccggtccaccgaaggtcccgagcccgctatcttcgtaggtgc

SEQ ID NO: 69713 - DNA, 122 bp, Homo sapiens
tgaggagaaaagcaggaggagataatagaggagaatacatgctctgaagtgagggtggggcgggtagtgcaggcagaatgtacagggccttgcggagagatgtaaagacttgcctttaacct

SEQ ID NO: 69714 - DNA, 122 bp, Homo sapiens
agtgggcggggaaggggcggagcgaacagaggtgggcggctcccgtcctatgacgtcagccgtaaggcgctgctgtcgtaaaaggacgtccggtccgtctcctagtgtccggaatcggctgt

SEQ ID NO: 69715 - DNA, 122 bp, Homo sapiens
ggaatagggaaggacaaagtctggaggcagctctgaaaaggagaccccaccccaggctgccggggaagattcaggaagctgcaatggttttttatgaatttttttttagagagagagtcttg

SEQ ID NO: 69716 - DNA, 122 bp, Homo sapiens
attgttccttaccggggagaacaggtggcagggagggatggttccagaccccatggcacccgtgtctctgcagtgtgtccctctcatggggggacagtaggcagagctccccggctgccctg

SEQ ID NO: 69717 - DNA, 122 bp, Homo sapiens
gaacttgtgaaatgggggagccggctggggttgccggcaccatggagtcaccttttagcccgggactctttcacaggctggatgaagattggggtgagtgggatctgagaatgtaccagggt

SEQ ID NO: 69718 - DNA, 122 bp, Homo sapiens
ctataagcttaggcgttggaataaaacacagataactggattaaaacagtataacagattcggttcattaaaatccatgagagaacgggattgaagatttagataattgtgagaaatttatt

SEQ ID NO: 69719 - DNA, 122 bp, Homo sapiens
gctccttgttcagtcccctgaccttcttttatttctcttggtcagaactgagctacagaacggtggattctgccttgagctttgaaagtgagtcaaggagagaattaagcagcaattccaag

SEQ ID NO: 69720 - DNA, 122 bp, Homo sapiens
cgtattcagtaggccacatcgctgtctcctcctgagagttctggacctggggtactctggcgcccacccacctgggggtcagtgttctaggcagtggcagtatttggcagctgcaggggccg

SEQ ID NO: 69721 - DNA, 122 bp, Homo sapiens
ggccatggggggtagctcttagtgccaccctacagatggggaaaccgaggcccgagaggccgagcagcaggtcagagtctcagaggcagtgagtagcttccctgagactccaatctaagcaa

SEQ ID NO: 69722 - DNA, 122 bp, Homo sapiens
cagatggcaagcggcatcagcctggtctccttcaacagccgacccgacggcatgcaccagcgctcctactcagtctccagtgccgaccagtggagtgaggctacggtcattgcaaactcggc

SEQ ID NO: 69723 - DNA, 122 bp, Homo sapiens
aggttgcgctttgaggataaaaagctgggccctgtgcagttttccaagacaacctctgggcgccgctgtcgaccaaaaggaagtgaaggcttctcaattctgcaggagcgtcaggcagggtg

SEQ ID NO: 69724 - DNA, 122 bp, Homo sapiens
atgagaaaaatctgtattaaggaattttagctccacccagggcaattatccccttccttccgtaactgccaatttcctccccaatcccaagagcgcctctgcccagttccgcagtctctgct

SEQ ID NO: 69725 - DNA, 122 bp, Homo sapiens
gtttcctggaaaatgaaacctatctcatttgttgcctgtgtcaaggggcagtgcttcagtcggggtggagctgcttaaaaggcctgggatcacaccctttgggaacacatccaagcttaaga

SEQ ID NO: 69726 - DNA, 122 bp, Homo sapiens
ggtagatggatccaaaaatatgttgaatcaaaaaatgcagaatgtgctgtgtgcaaaaaccggagaaggaataaataacccaccctgagggagattcattcagatgtttcctctccaagaaa

SEQ ID NO: 69727 - DNA, 122 bp, Homo sapiens
gcatgcggccttgacctcatggatggcgccctctgcatcctggatggcacacaggggctccgtttggaagagcttcactgtctttttcacatcacccttcagctcctggatctctgagcgca

SEQ ID NO: 69728 - DNA, 122 bp, Homo sapiens
actcaattagactccctagtcacctgtgtagggcaccaggcagcaggcagggatgctgcccgaatcaacaaggctgctcgggccaggccagccccaagaatagccgcggcaggcgcaggacc

SEQ ID NO: 69729 - DNA, 122 bp, Homo sapiens
agctcgccagcgtcttgggaagctgccgcaggcgcttcttccttctcggcaggaagatggcgcccggctctgcagtggccctgcctcccctcgccgttagatgtctctgcaatcagtcgaag

SEQ ID NO: 69730 - DNA, 122 bp, Homo sapiens
tcgaggccattttatctctgtcctccgtccccaaggcccgggttgagaggggtgctctggcggccggagagaccggccactcacggaggccggaggatgccctccccgggctgagcggcggc

SEQ ID NO: 69731 - DNA, 122 bp, Homo sapiens
ctccatgcttcaagcgctgtcgataaagctgtgcacttctgcagactctgtgcgtggttccgcggcgatcccggggttggaactggctctgggaccaatggctcgggcgagcgcttttctgg

SEQ ID NO: 69732 - DNA, 122 bp, Homo sapiens
tccttaaggaaaagcacgtgggcaggggccgcagcccccgcgagatacccggggcgtcggcggacattagccgctaggaccttaggcgagaaaatgtggacgcatccccgccggccctgagg

SEQ ID NO: 69733 - DNA, 122 bp, Homo sapiens
ggcctgagaatgtgcttgtctcgccagtctcccaggtgatgctgatgggctgatccgggacgggcaccccttcgggaaacgctgcccaaaagtttcgtgttcctgtgcagttactggggcga

SEQ ID NO: 69734 - DNA, 122 bp, Homo sapiens
ggttccgctcatgtgcccgagctgttgctgttactgcctcggctggtcgtggtggggctgcggtggtgtctggagaatccctaggtcaccacaggttccctgggttccagccttcacaagtg

SEQ ID NO: 69735 - DNA, 122 bp, Homo sapiens
gctgactctgagacagagctaatttgttagggtgagccctaggagccacacatgtgggggcggggggaagaggaagtgggcagagggagagctgagctgcagtgcaggcaccaggccagcct

SEQ ID NO: 69736 - DNA, 122 bp, Homo sapiens
ttcgtgagcgagaaggaagttaaacctcgcggaatagactggcatttcgggacgccttgtcgccgcagcctgggccctgcaacggggtaaacttcatggtggccctgcgatctggggagggg

SEQ ID NO: 69737 - DNA, 122 bp, Homo sapiens
tgccccgaccgatgcctgcggactcccagccccctcccctcgcctcctcccctgagcagccggtgggcctggcctcgaggccacagggctgagttctaccctcgcctcaggtcccctttctc

SEQ ID NO: 69738 - DNA, 122 bp, Homo sapiens
ttgcgtagattgaccgagatgagtgtcctgcactctgaagaaccttggtggctcctccttcggaattgatttaagcagtggtagcatagtgttttgaagacagtcaacggtgggttgggttt

SEQ ID NO: 69739 - DNA, 122 bp, Homo sapiens
cagccacaggcccggagtcacacagccgaaaatgacggagcccagtcccagcttgtctgacgccaaagtggagggcttttacacagctgggccggacctcctgaccactcgaactctgcggc

SEQ ID NO: 69740 - DNA, 122 bp, Homo sapiens
agagactttctgctgggtcttctataatgagtaaataccattcatttgtacttagcagcacgcagctgcataagggcaattaatatgctaactcaagttaaaacagtaggtcctcttaagaa

SEQ ID NO: 69741 - DNA, 122 bp, Homo sapiens
ccagcaaacgattcccagctgtggggtcaggtcaagcaggaggactggagggtggagaggcgcccaggccaggaatagctctgggggaggaaccacaagggccccttgaggagtcacttcct

SEQ ID NO: 69742 - DNA, 122 bp, Homo sapiens
agcaccttccctttggaagtgtacatccggcggctcaggaacatccgtcgagcagtggttcggctcctcgatcgaagcccaaagaccgtggtggtcatccggacggccaacgcccaagagct

SEQ ID NO: 69743 - DNA, 122 bp, Homo sapiens
ctagggatgtaattcttgcccttgcagagcttcagaccagatagcatcaccctcccttaccggtgcccactcatggtcatttatcatgcactttcccagccataagtggatttgccagcagc

SEQ ID NO: 69744 - DNA, 122 bp, Homo sapiens
tgagtcatgaaaaacttgtgaatagtactgtacatttcagattactaaattagagctcatcggaggatttatatgactggttactggtgaaaagatcagagaatgtcctttcatccatcagt

SEQ ID NO: 69745 - DNA, 122 bp, Homo sapiens
gacgccgagagggcgcgcggggctggcctctggcgccgcgcggtgtttaccaacaaagggcgggcccggggcctcgtcgccgcaccacctgtattcagccctcacctccgggggcgtgggct

SEQ ID NO: 69746 - DNA, 122 bp, Homo sapiens
aaacacgccctggagtgcccgcgacaacatgctgtccgtaatccagcttcctgatgtcctcgccaacattggtgcctccaatgcaggcatggcactggacattcatgtagtcaccgagagca

SEQ ID NO: 69747 - DNA, 122 bp, Homo sapiens
gggagaggaggggctgaaagtgcctggtatacctcgccacactcccataattacccaaaccgtctcattccaagcccaaggaccgggctttcaaggggacacgaaaggaacgcccgggaggt

SEQ ID NO: 69748 - DNA, 122 bp, Homo sapiens
tatttatgtactggaatataatgcagcttgaaatcaaggcatgcctcactcataaaaaagcgtggctaaattctcaagttattgtgcagagtgaaagaagctaaggaattaagagtaaattt

SEQ ID NO: 69749 - DNA, 122 bp, Homo sapiens
tcaaccttcaaacgtgattaatcaggaggccttcttttcccatcaccaagggggccaaagcgaggagcgagcgcatagcaaaagggacgcggggtccttttctctgccggtggcactgggta

SEQ ID NO: 69750 - DNA, 122 bp, Homo sapiens
ccatagatagggctacccgccctccccctacaaaggactcctcacagcaatggcagcagacggagtgccagcattttcttgtgctggttccctgggctccaattcgacggggctgccttttt

SEQ ID NO: 69751 - DNA, 122 bp, Homo sapiens
cacacgttcatccttcacatgagacactaacatgccaacaccacacatgttcatccttcacgtgagacactaacatgccaacaccacgcatgttcatccttcacgtgagacactaacatgcc

SEQ ID NO: 69752 - DNA, 122 bp, Homo sapiens
ggtgtctcccacttcccttacagcccaggggtaattccagaagcaccagaagaggctgcacgcaccatcctcacagttagttccactgacacccggggggcagcggcaggcccccgtgacag

SEQ ID NO: 69753 - DNA, 122 bp, Homo sapiens
atgggtgatttttcaccggcttcttccactttatattgagtcacttaacatcctgtgaagcggaaaggaggccggtactttcagcctgaggtcggccagggtgctgcaattccggacagaga

SEQ ID NO: 69754 - DNA, 122 bp, Homo sapiens
ccgggccagccgcggccggccaggcggcagcgcccgccccgcgctccagaccccaccctccggcctagccaccgcccctccgcgcagcccccgcccccatttggccgctcgcaaacttgggg

SEQ ID NO: 69755 - DNA, 122 bp, Homo sapiens
ggcctggagcgtcacagtggcgtactccaggccagaccgaatcagagtgggcgaaagctccgtgttccgccccttcccacttgatcgacgtcaaagcccaccagtgagcgggcgtctagagt

SEQ ID NO: 69756 - DNA, 122 bp, Homo sapiens
gggaaaggaaacatggctagtgcacagtgtggaaaatgctgccactcacactgcagagaacgcaggggatgctgaggaaaatcagtgccggcccatgctcccagaggggagggtagacggtg

SEQ ID NO: 69757 - DNA, 122 bp, Homo sapiens
cgaactcctgacctcaggtgatccacccgcctcggcctcccaaagtgctgggattacaggcgtgagccactgcacacggccttcacagcacttttgagaggcttaaatgacatagtgcatgg

SEQ ID NO: 69758 - DNA, 122 bp, Homo sapiens
ggcctaaaaacattttccattttgggcgccctccgagattggaggcgcgcaccaccgtctcgccgatgtgccaccctgggctgcagctgcagcttcgtggacccccagtgtgctcgagttct

SEQ ID NO: 69759 - DNA, 122 bp, Homo sapiens
ccctgcagtgcccagagcaccaagcacccatccgttgaccccgcatgcgtgacgctcacgcgcgcagtccccctggcttcttccaggaaggctgaagcggcctaatctcggccaaaagatca

SEQ ID NO: 69760 - DNA, 122 bp, Homo sapiens
tatacgtgtgttcagtgactccgcagctgcaggaagaactgctggtatggcgccaggctccgcccgccccgtcctccttccttccttcgtgtttcagtcagccggtcttttttttgtgtgta

SEQ ID NO: 69761 - DNA, 122 bp, Homo sapiens
gtattagcacttaacggccagtggtctctcctttccctctggaggaggtcggggtgggggcgactgggaccaggtggaaggtagtgtagggttaagaagcgtcagacctcggagaagggcct

SEQ ID NO: 69762 - DNA, 122 bp, Homo sapiens
tggctctcatcccagaatcttctccctacacctgtggtttagagagaaaagtactgagggcgactatcccaggactcaggggaaagagagatctgggcagacttcttggaagagaggggctt

SEQ ID NO: 69763 - DNA, 122 bp, Homo sapiens
ttgacataggcacacagaaaacgactgtttgggaagaattgcatgctctcacacctgctacgacataaacctttgaaaaggacaccagaaaagcagagaaaaaaagaaaaatactttgttat

SEQ ID NO: 69764 - DNA, 122 bp, Homo sapiens
atagtaggtggctctgaaaagagcctttatgtccatcaaaggggccccgggggcggcgggcggcctcacttgcccttggccttgtggtggctctccgtcttcttgggcagcagtacggcctg

SEQ ID NO: 69765 - DNA, 122 bp, Homo sapiens
ctgagaacccattcaacctgctgagcaggctgggcagaaaggagcaggacttgggacagacgactgaagatgcagagaccccatgggccccacccctgggccttcctcccatgtggctgcag

SEQ ID NO: 69766 - DNA, 122 bp, Homo sapiens
ctgcgtggccgtgtagctgccagaaaagatcgtgaaggtcatcgtagcccgcgtctaacccgttgagagtcgtcaggccggccagccccagttcttatctgttgtggcagatacgattgctt

SEQ ID NO: 69767 - DNA, 122 bp, Homo sapiens
gcagcaagcacggcagcaacaggaggaactcgaggccgagcatgggactggggacaagcccgcggcgccgcgggaacgcaccacgcggctgggtgagtgtctgggatgaggtccgaggaaga

SEQ ID NO: 69768 - DNA, 122 bp, Homo sapiens
gggctgcggagcgggcgggggcagagcaggtccggcgccaggcctgcagaaagcggcctgcgggccagtttggctctgcaggctgtggcctcattactgagagcaacagttttatctagaaa

SEQ ID NO: 69769 - DNA, 122 bp, Homo sapiens
gcagaagcgcccaccttggaggccaaaatcaggttaaaatggcggcctcactcccggggccgtgcggggggcttttctcgcctcgccgcggcctcccggccagcgcgctcgtcttaccatag

SEQ ID NO: 69770 - DNA, 122 bp, Homo sapiens
cctagttttcccgcagtagactctgggggcgcggttgcaaaacctagctgcccacaggggcgggcccagggtggtacattttgcaccttgaagaggagacaaggatcgaatcaggccgccca

SEQ ID NO: 69771 - DNA, 122 bp, Homo sapiens
tcaaacaatagctaattacagtagcacctgccttccaggctctgtcacgtcggctcctgccggagcgaggccttgtctgcgagctgcgtgattattacagactctgtctgcacaaagtcgct

SEQ ID NO: 69772 - DNA, 122 bp, Homo sapiens
ctctggtcatcttgaatcgaagagtcgcctttcaggcatggcgggcagtcacttgcccgccgccgggcccgccaggagaggaaaggtgaagggagggagcgaggccgccggcctagcccgat

SEQ ID NO: 69773 - DNA, 122 bp, Homo sapiens
cactacacaggcagagatgctggggggttttctgaggactccagggccaaagccagcctccgccagcctggggaagggctctgggaaaatggaacaggaagttccttgccccagtcccatcc

SEQ ID NO: 69774 - DNA, 122 bp, Homo sapiens
tactgtagtctactaagcatgcaatagcattatgtctttaaaaaaacaatgtaggctgggcgtgatggcttgtgcctgtaatcccaacactttgggaggctgaggtaggaggattgcttgag

SEQ ID NO: 69775 - DNA, 122 bp, Homo sapiens
ggcggcggcgcgggcagagagcgcagagtagagcagggcagggcctgaggcagaaacccgcgtccccgcgccggcgctcacgagctctgcgcgccccgcccccaaccgcctttatgtgggcg

SEQ ID NO: 69776 - DNA, 122 bp, Homo sapiens
tctttctcaaagccttctgtccctggtttttgcaagtgctgcatttccgccgagaatccgcgttgcctactgctgccacctcctgttcatttagaactatgcaaagactccgcttccgtttt

SEQ ID NO: 69777 - DNA, 122 bp, Homo sapiens
ccgcccagaatcttccttctgggatgccgactttttcaacacgtgccaggagcccttcctcggcccggaatccccagagtgcccacagtggacagggcacctggatacaccccagactaacc

SEQ ID NO: 69778 - DNA, 122 bp, Homo sapiens
gtgaggaggtacatgtgacagcttgcgcaggggaagcttcacgaaaaccccgcagcagtgcgtggaggagggcagcgaccgtcagtctctttattttcctctttatgcacacttctacggtc

SEQ ID NO: 69779 - DNA, 122 bp, Homo sapiens
ggttgggcagggacgtgatacagtcaaggctgcattttaggatatttagcaaaagtccagcgacctgctggctctgtcgggagggtggagtgaaagaccagagttctccctgtgcgttaacc

SEQ ID NO: 69780 - DNA, 122 bp, Homo sapiens
aagccctgagcgggcggggcctgcaaccgcgcatctccattggtccagagggtgggagggcggctcccgagagcagcgccccgcccatcgctgaccactctggggcccgagcaccgcccctc

SEQ ID NO: 69781 - DNA, 122 bp, Homo sapiens
cgagcaactggcttgagcagacagaacggggaagactccactctgtcccgaggggccagccgcaggcgtccccagggccaccctgccctgaggtccttgtgtggccgccctggcttggcagc

SEQ ID NO: 69782 - DNA, 122 bp, Homo sapiens
gaagttccagcgcatgaagaaggtgggcacagctcagaccaagatccagctcctgctgctcggggacctgttggaacagctcgaccatggccgtgctgagctggatgccctgctccggtcgc

SEQ ID NO: 69783 - DNA, 122 bp, Homo sapiens
cgtgatacacccacctcggcctcccaaagtgctgggattacaagcgtgagccactgtgcccggccttaaccatctattcacaagaagagtaagaaatggaatgaaaggaccaggcgcagtgg

SEQ ID NO: 69784 - DNA, 122 bp, Homo sapiens
cacacatatcagtactgcacccacctgaccaggagggctggcacagaaactgactcaggccgctggggcagctaggctttggctctcaaccatgcccagctgccccggggccagaaagcccg

SEQ ID NO: 69785 - DNA, 122 bp, Homo sapiens
actccgtctctttcccatgccaagggtctgctgagcagctgccaccagcagctgagggctcggtgatgacatgagatctagaagcaacatcaagaatggcctccttagctagcccgagttcc

SEQ ID NO: 69786 - DNA, 122 bp, Homo sapiens
agccgcagacctattccaagtttccacgtagttgcgagagcccaaaaactgtcacgtgcacgtcgctgctgagtgggaggaggtgtttgtcatcgcgttcaaaaggggcgtttcggtgtctc

SEQ ID NO: 69787 - DNA, 122 bp, Homo sapiens
gggagaggagtgttggtgcagggcgggcgcggggacgcagggtcctcgaaccagctggcccgcccccactcggcagagggtctaggcctggccgcgtgtcggtcggcgctagggccccgcgg

SEQ ID NO: 69788 - DNA, 122 bp, Homo sapiens
gcttgttaattaggagctgcatagtacgatttctgacctaccaaacaaggtccttgagttcgaattaaaaagccttgttccattcctgaatagaccactgagcctcatgtggaggctctaat

SEQ ID NO: 69789 - DNA, 122 bp, Homo sapiens
agataaggaaagacatttatagtgtgcaattgcacggtgcaacagttcacaaaaggaagtcgtggattctctctgattggaggttttttgaaaaaacaggttagggattggcctgggtggtt

SEQ ID NO: 69790 - DNA, 122 bp, Homo sapiens
gagagacagaactttaagatttttctcagaaagaaatgataaagtgtgacccggaggtggcgtaacatgccctggttccattaggtaaactgagtcactaactctgcttcagtgcgctcgct

SEQ ID NO: 69791 - DNA, 122 bp, Homo sapiens
cccttccctttacccttctgctggagtactgtgcccagctgctcaattctaatgaaaaatcggctcttaacaaagatctaaaattcattcaaatgaatgtggcatagacctacagtttcaag

SEQ ID NO: 69792 - DNA, 122 bp, Homo sapiens
gtcactgcactctagcctggaaaacagagcaagaccctgtctcaaaaaacaaacagcatacgtcttattgttttgttcgcttatttctgaaataatctcgttagtaaagcactatacttgat

SEQ ID NO: 69793 - DNA, 122 bp, Homo sapiens
gagggtccagggcctgcccagggtcactgggtaggtgacaggggagccagggcctgctcccggcctcaggccaccttggggctgcctctgaggccaggaaacaccactgagagggagccagg

SEQ ID NO: 69794 - DNA, 122 bp, Homo sapiens
gagggcctggggactgccttcttaggtcttgaggatgggggcttgagtgatggtgggtgtcgtgtttttctgtagaaactgagtatcgcagactgtcagagtggacatagccctttgagatc

SEQ ID NO: 69795 - DNA, 122 bp, Homo sapiens
tatttcaccccctcaacaggcctctgagaaacaggcccctattatcgctcccacttttgccgaagaggcttaatacttagattatgcagcttccccaaggttacacaaccagcacgtggtgg

SEQ ID NO: 69796 - DNA, 122 bp, Homo sapiens
tctcctcggggctcgggggcgctgggcggcggccctgggctgctttggctaacttggctgcggggcaggcgcgaggagcggcgcgccgaccgggccgagcggagaggccgcccattggccgg

SEQ ID NO: 69797 - DNA, 122 bp, Homo sapiens
gaggaggaacctgaagcacccagggcagtgatgaagctgaggttcagggggccctggcctcgccctaggtacctgtgacccaggttctcccagcccagcgcatgccctccacggacaattca

SEQ ID NO: 69798 - DNA, 122 bp, Homo sapiens
ccctcgactccgcttaggaagtggtgggggcggcgtggcccccgtcgggaggcgttcgaacgcccgctaggagagagaaaggattcccctgtgcttggagcccgcactcgggcgcggaggga

SEQ ID NO: 69799 - DNA, 122 bp, Homo sapiens
ttttatacttaaactccaaatttaggattaagactccagttaatactgccaagcagaaggcgtccttggagaaagagaagtctcctgaacatacccactggggtacctagaatagattttgc

SEQ ID NO: 69800 - DNA, 122 bp, Homo sapiens
cactcagcagcaggagggaataaaaagccacctgtggggtggccactgccaagggctccccgacacaagcacagagcacagcctggccttggctgcagcaccacagcagatgcctttatgcc

SEQ ID NO: 69801 - DNA, 122 bp, Homo sapiens
tgcaaagcagaaagagggcggtcagcgaagagcggctgcggcttggggctagcgtcccagcgccccggggaccagggttaggtgaccccgaaccgtccctagagggacggaggagctagtca

SEQ ID NO: 69802 - DNA, 122 bp, Homo sapiens
ccccggccgccccctgggtggaagtgcttggggtggacgccttaagcgcggatccctcggcgctggtgcccgccgccccttccctgcctgggaggcagacgcagacctccccacacccccta

SEQ ID NO: 69803 - DNA, 122 bp, Homo sapiens
gtcataagtcatcccactttcaactctcaggaacactcgcagccagtgccacgctgtcctcgccatccaatattgatagccaccccagttcctgccagccagcctggcacacataaccatag

SEQ ID NO: 69804 - DNA, 122 bp, Homo sapiens
aaaaagaaaccgagagagcaggtgtgcagacttgattaaaaggtgcaaaacccgcacaaccgcaggcaaaggtactttatcctcacgttgcccagtaccggctgcgaggtgcgcaagcaggg

SEQ ID NO: 69805 - DNA, 122 bp, Homo sapiens
ggaaccaactctggacacagcaggacgtgagacttctacctgctcactcagaatcatttccgcaccaaccatggccacgtttgtggagctcagtacaaaagccaagatgcccattgtgggcc

SEQ ID NO: 69806 - DNA, 122 bp, Homo sapiens
gctctcggacctggagcgttgggaacgcagtaagagcaagaaccgcacgctggacaacagcgacctgcagcggctggagcgcgcgcgggcggcggccggggccggcgcggcctcggagcacc

SEQ ID NO: 69807 - DNA, 122 bp, Homo sapiens
ccaaaactccaaaatccactactgaaccaaccccaagcccgaccacctcagagcccgtcccggagcccgccccaaacatgaccaccctggagcccactccaagcccgaccaccccagagccc

SEQ ID NO: 69808 - DNA, 122 bp, Homo sapiens
aaaggaggaggctgcgtggccacggacgcagactctggtgtgatgcagccatgaccaaaacgcctgcagccccaggaagacagaaacacggcggagaggatcaagtgaaaatggggagcccg

SEQ ID NO: 69809 - DNA, 122 bp, Homo sapiens
aaatgcattttccctctcccttgattaagccaactttattagacttagctagaggagaaccgggtgactatctggtactggcaacatggactaaggcacaaggctagaagcaggtcacagga

SEQ ID NO: 69810 - DNA, 122 bp, Homo sapiens
tatgatcgaactaagaaaaaaatgcagatacagaagcacgttggttaacaattcagagagcgggtttggtgtgcagctgcagcccttgtatgatggtctacacaaattattcaggtttatac

SEQ ID NO: 69811 - DNA, 122 bp, Homo sapiens
tataatcatcgtatttagattccttcacatgtgaatagcatttttttaagtcctcccacacgcttgcagtgggactgaatgaggaaaatccaaggagttaggtcagtaaagagccacagaac

SEQ ID NO: 69812 - DNA, 122 bp, Homo sapiens
caggctggagcctatccagatagggactccccaggctgctctcccctgcacctctatacccggctgcgccttcatggggacccttacccagccgaattggtgatggggaatcggagactgct

SEQ ID NO: 69813 - DNA, 122 bp, Homo sapiens
tcttccttctctccgccgcgaatgcgggcaggatgcgagcaaaagacccggcaaagagggcgccgagggggcgcagccggggcgctgggcggacccagaggggacatggagaggaacgcgga

SEQ ID NO: 69814 - DNA, 122 bp, Homo sapiens
gagggatcgctggagatctgggttactcagcctggagctgctagggtctggacatttgtgcgggttggaggccccggaggtggaagtgggaagcaagggcggcgagcgagacggaaccctgg

SEQ ID NO: 69815 - DNA, 122 bp, Homo sapiens
tgcgagtgctggagaggaaccccggacaccaccatttcacatgaagaggcaggcgacatgcgagtgctgaggaggaaccctggacgccaccatttcacctggaagaggcaggcgacatgcga

SEQ ID NO: 69816 - DNA, 122 bp, Homo sapiens
tgggtacacaagtacagagaatagcccattccgtgagaggaaaggccattaaaaggaggacgttatcgctctttaactaaaaaaaacatccacagagaaagggtttggcattggcaaggcca

SEQ ID NO: 69817 - DNA, 122 bp, Homo sapiens
agctcagcacagctccttttcaaagcagaacagatacgatatttatggggtagccaggaacgtgacactggctagagtgaggagtaacaagaaatgaaaacattgaatcagatctcactcct

SEQ ID NO: 69818 - DNA, 122 bp, Homo sapiens
aacattgtaaatgtaaacactcaatccttcctaagcagttctttgaatatgtagttaatccgttggaataaaattttgcaatggtttgttctttctagcgctttatcatttgataccttcat

SEQ ID NO: 69819 - DNA, 122 bp, Homo sapiens
ccttagattggagctccctgaggatggggctgtgtcccttagactgggcctccctgaggacgagtctgtgtctccctcagactggggctccctgaggatggggctgtatcccttagattggg

SEQ ID NO: 69820 - DNA, 122 bp, Homo sapiens
gccgggtccgcgcagcgggcgacttgccgcatgggccgggtcgaggtgggggggcggtttcgggggctgggaagctggggtgccggggacaggagggtgggggagctggggaaaggagggct

SEQ ID NO: 69821 - DNA, 122 bp, Homo sapiens
atcctcttcgtgcccttattcttaagtctgccaaagccgagaggaacttagtgagctactcgggctggtcacacctgcatcttaaaagcaactctcagagaatacattacataacacaaaag

SEQ ID NO: 69822 - DNA, 122 bp, Homo sapiens
ctgttgctggtgatctacaggcatttttaggaataattgacactgacagaacatattatacgtgcctgaagtgagccttgaataccagtaggtggctctataacatcttaaatcagggactt

SEQ ID NO: 69823 - DNA, 122 bp, Homo sapiens
cccacaccttcctccactttggctctgtcctcctgccggtgtgaggagcccccaggcacgcgggcgccccgctttagaaattcagtttagaaggtgcacctgtgcatcagtaccgaggcatc

SEQ ID NO: 69824 - DNA, 122 bp, Homo sapiens
caaaatcagtctttccccaggtcggcctttggataactcagaggtcagtccctgcaggatcgcccagtttccatcagggcaaatgctgatctcctaagtgaaaagtcctggcggctgcctcc

SEQ ID NO: 69825 - DNA, 122 bp, Homo sapiens
tgggggagggacgtggcacaaggtgggggacagtgtcaggggtggggcagggccagcaggcggcactgccagcccacagggtccttctagcagaggcaccacctgcccatccttgggcccac

SEQ ID NO: 69826 - DNA, 122 bp, Homo sapiens
gcgcgggcgacgtcaggaggcggggaaggggcggggaggggcggggcgatttataggccccgcccacccatcgcctttgccaccctcgaacgggcaaaagaaagaaagaggcaggtaagggg

SEQ ID NO: 69827 - DNA, 122 bp, Homo sapiens
agggtctataaagcagcagcaccaggagccgtgcagtgcaggatcctcctgtatcttgaccgccacagtggtggttacaggaagctatgcacctggaaaaactgcagggcgcacacacacgc

SEQ ID NO: 69828 - DNA, 122 bp, Homo sapiens
aggcggtggcgcgcccatacagctcccccgagagccgcggcacgggcgagtcgcggcgggcgttgagcttgaagtagagcacgtcctccagctcccagcacagcaggtccttcagcagcacc

SEQ ID NO: 69829 - DNA, 122 bp, Homo sapiens
ggagagtcagaaatccaggaagggtcttggggcatcctctgaggtcctaggcatcaagaacgtgtcctctgcaccctgcagaggcccagatgacacagcacccaacgccccaacatatacac

SEQ ID NO: 69830 - DNA, 122 bp, Homo sapiens
gacaaggcgaaggcggtggcggtggcggtggcggcggcggcggcgccggggatcgcgggccgagaggagagcccagccgccggctccctcggctcaatcgcccgcccttcctgggactgacc

SEQ ID NO: 69831 - DNA, 122 bp, Homo sapiens
tggtagtgctggagccctggggttgatggggtcatctccaatatgatgtggattcctttccgatgggttggcaggcagatggaacaaggggtggaagacttaaaagcaacctctcaggccag

SEQ ID NO: 69832 - DNA, 122 bp, Homo sapiens
aaacatgacgaagtaaaatgggcaccgtcaaaaaccgcatttgaagacagtgcgcatgagcgcatggttaagttttcagacgttttgcaagctggatgttaaatacattttttgacgtcatt

SEQ ID NO: 69833 - DNA, 122 bp, Homo sapiens
atgacagaagctacaggtgcagggcactccctgtaggcctggagataattgtggaaggaacgggttgggatgcagagaaaagcattgaggactattttagtgggggaaggggactgactgta

SEQ ID NO: 69834 - DNA, 122 bp, Homo sapiens
tccccgggcttcttatgggaaaggcatgatcttcttgagacttcagcgtaggcacatcctcggggagcactttctaatgggaagtgtgagtctgggtggatagtgcccatgactcattgtaa

SEQ ID NO: 69835 - DNA, 122 bp, Homo sapiens
gattgggcccaacaaggctagaccagaatgtggagtacaggaatggccattcttcaagtccgaggggtcaggttcttagcctggtgcttccagtcgttacaggaggggtgtctctgtttgga

SEQ ID NO: 69836 - DNA, 122 bp, Homo sapiens
gtgggacggggcagggcgggcattgagcccagtgtcctggggtcagggtgcttcccctgccggcctcaccccaccaagcggatctcatggtgctcctctggctgggcccacccgcagtggta

SEQ ID NO: 69837 - DNA, 122 bp, Homo sapiens
catttaaacattagattccttccagcagcggtgtttgcgtgatttcaaaggtagggaaaccgtgtgtttcgtatggtggggtgccggtggaagaaagggagtttgtgggttccacaagaacc

SEQ ID NO: 69838 - DNA, 122 bp, Homo sapiens
gccccgggcacggtgcttcccgggaaaagtggcctcgggcgtgaatagggaggcttcggacggccggggcttgggacacggcctggaaggagggggtgattccaatgcgcctaagccgaaag

SEQ ID NO: 69839 - DNA, 122 bp, Homo sapiens
taggaaaaccatcttagcctctgcttcatgcaattttagtttgcagtgggtgggtacaaacgaaagcaaaccagaggtagaagttttttccatacatagggcatgcctagtggaaaagcagc

SEQ ID NO: 69840 - DNA, 122 bp, Homo sapiens
tggcccgggcgagctgggcgggcgcgggtctccgggacggtctggggtggctagggggtgcggcgcccggcggggatccgaatagggggcagccagcgtacggtgtgggaactcgggccggc

SEQ ID NO: 69841 - DNA, 122 bp, Homo sapiens
caacggctgttcaacgtatgaagcattttataagttcatttcagcttcacaggatttgtccgtttgttctggagtacatgttaaggcatatggcctgatttttggtttggagaatttggtca

SEQ ID NO: 69842 - DNA, 122 bp, Homo sapiens
ttcctgtccatctgaccccttctgttttctgcaaggagctgccagccatctaactgggctcgtcggcctgccccagctgcaggcccggtgctacacgggctcgggaacagaacatcgtgggc

SEQ ID NO: 69843 - DNA, 122 bp, Homo sapiens
caatgagagtccttgctgtgcaggcaccgggatgctcacatagtaaaaactcgagtccatcgggaagcccaggaactgaaaggcataaagaaaccgagtgctagaacacgaagatgacattt

SEQ ID NO: 69844 - DNA, 122 bp, Homo sapiens
ctttgcctgtctagtttcccccatcccttcctggcatagctacagccctggtttcaggtccggagagaggagcctctttggagggcaatggaaggcatttttaagaaatcgtttagaaaaga

SEQ ID NO: 69845 - DNA, 122 bp, Homo sapiens
ccccgcttagggtaaattttcttcattagtcacgtttaaaagcccaccaatcaggcctgccgggtccggaattcaggaggtcagcgacagccaagcaggaactctttgggaagggtaggggc

SEQ ID NO: 69846 - DNA, 122 bp, Homo sapiens
gccagcggctagaagtccgggaatcacaacgcttagtgcggactttagaaaggcaggatgcgagaaattggaagcataacggagaaaagcctgatcgaacaaataacattattttataggga

SEQ ID NO: 69847 - DNA, 122 bp, Homo sapiens
gtcagtctggggtatgactgtgaagctcagcatctgggaccatagggacaagagacgacccgggagcactaagaattcatcttctggtccgcccctccgatgacggttggttggtccataac

SEQ ID NO: 69848 - DNA, 122 bp, Homo sapiens
ccaccaggactcagaggcggccatcaaccgccagatcaacctggagctctacgcctcctacgtttacctgtccatgtcttactactttgaccacgatgatgtggctttgaagaactttgcca

SEQ ID NO: 69849 - DNA, 122 bp, Homo sapiens
cttgaacccttgaggcgccaggaatccctagtacactgacgcatgtgcttcccatgagcccgacaaggtctggcaggggagaggcagtggttcctgatctctgtcactctctgggtgaacgc

SEQ ID NO: 69850 - DNA, 122 bp, Homo sapiens
cctgggctggctgggctgaggtcccgttgggtctctctttcgtggacgttttttccaatgcgatgaaacctagttctcgctagatggcgctcaatagcaaaagaagcaagagtagacttcgg

SEQ ID NO: 69851 - DNA, 122 bp, Homo sapiens
ttctcttggaaagaaatttacttcctgttcgtagttcattccttccctcttacacgcatgcgttcattgaggaggactcttcccagtcgcctccttgcccagcctgctaactgctagaaacc

SEQ ID NO: 69852 - DNA, 122 bp, Homo sapiens
cgactgtgttccatgctgagggtggcagaggctggcctggatgctggatgaggctcaactcgggggcctgggctgttgcactggggctggactggggatcacggaagagggccaggcccgcg

SEQ ID NO: 69853 - DNA, 122 bp, Homo sapiens
aataaaagtttcaactcctcagatgttttatcttatttctgcctgatatgccttcctccacggggtgtgtgatacatcccaactcttcagcttccaggttttctatccctcgctccaaaaga

SEQ ID NO: 69854 - DNA, 122 bp, Homo sapiens
cagggggcggagcctcaggatttcgcgccttgggcagggggaggagcctggactccagctcgagtgtgctggcctggaattcagtctgtgaggtggaagcctgttagcaggaccacttattt

SEQ ID NO: 69855 - DNA, 122 bp, Homo sapiens
gggcaacaatatgaggagaggttttgcttcttggtccctgtcccatctgcttagagtatccgggttgtctggggctccgagggaggagcactacagcaggagccaggaattcgcctgcctct

SEQ ID NO: 69856 - DNA, 122 bp, Homo sapiens
tcacgccaccgcagaactcacacaggggagaagaagtttgtgtgcccggtgtgtgaccgacgtttcatgcgcagtgaccacctgacgaagcatgcccggcgccacatgacgaccaagaagat

SEQ ID NO: 69857 - DNA, 122 bp, Homo sapiens
gtgctcactgcccagtcagggcagcacctgcgtgccaggcccagccctgggttagggccccgccgggccctctgtgcataccgccgacactgcgggccaaggtctcggtgactccaaaatga

SEQ ID NO: 69858 - DNA, 122 bp, Homo sapiens
tgctccggtccgtgccctgggcctgcagggtcttccgcgtctcccagtctcgcctcatcccgccattctgcccatgctccctgggagcttggttgtgggaatcatagtacttggctccccag

SEQ ID NO: 69859 - DNA, 122 bp, Homo sapiens
ggggcgcctcctgcatggagtggggccaccgccgtcgtcagtgggtcgggatctttgctccggtgacgggtttctttacagaaggaaggagagcgctctcttcggagagcccacgtgttttg

SEQ ID NO: 69860 - DNA, 122 bp, Homo sapiens
ctgacttgcctcagcctaaatgtcacttctgcagagagctctttgtgactgccaaacccacgttaggtcccctttccatgattctcattaaaatggcaccaggtctttttaattcatagtga

SEQ ID NO: 69861 - DNA, 122 bp, Homo sapiens
ataaacaaacaacagacaaacaaaaaaaaaaccaaattccaaatggcccccggaccctcccgcagatgcagggcgcacactggccagttctaaccatagacttgactgcatgttgacaaggg

SEQ ID NO: 69862 - DNA, 122 bp, Homo sapiens
tgtcgctggggcttgctatttctttgttccttgtttgcctttgagcccatgtgaaattcccggcgggggaagagaggctgagctccccgcctgcccctgcctcagcactggccctgggctgg

SEQ ID NO: 69863 - DNA, 122 bp, Homo sapiens
tgggtagcggggtggggagaagcagttcccacacataacctgtaggtggcaccagagcagcgcaagagccaagggttccgctccagcgttcctggagacccgggcagggcggggtagggcta

SEQ ID NO: 69864 - DNA, 122 bp, Homo sapiens
cccctccctggacacccaggcgacaatggcagaactgcccacaacagagacgcctggggacgccactttgtgcagcgggcgcttcaccatcagcacactgctgagcagtgatgagccctctc

SEQ ID NO: 69865 - DNA, 122 bp, Homo sapiens
gtgattttaatttcaggaatgcccaacaggactcagaaagctgtgaatgtaaactgactacgtatcttggtctttgtgtgtgtaaatcagacagctaatcctgtgctctccttgctctgttc

SEQ ID NO: 69866 - DNA, 122 bp, Homo sapiens
tggctgaggcctggcgagagttcgagtgtggcacgggcagtctggcactgctgggggatccggcgctccctggcctgggtgctaagtccctcactgcccggggccggccggcttctctgagt

SEQ ID NO: 69867 - DNA, 122 bp, Homo sapiens
tgagtgggtccaggcagctgttgaggctcagcagcgccaggctgagggtgtgcaggatgtcgagcgtggaggcggcgcgacaccggtctccgttgtcttcccccccagccacctagggcgcc

SEQ ID NO: 69868 - DNA, 122 bp, Homo sapiens
gggcggtgggaacacgattggctccaagcggccatcaaacatatctgccattacctctgtcgccttgctcttttctcgggacctctggccctggtgcgggtcttccagagcatagtcgagag

SEQ ID NO: 69869 - DNA, 122 bp, Homo sapiens
tgtttttaagccagatatttaaaatattagcaaaaatgtaaagcaatgccactcttctcccggattctttcatttggagaaatatagttatttttcataaaatgtacattatttatgttcac

SEQ ID NO: 69870 - DNA, 122 bp, Homo sapiens
aggaggacgcgaggcgggaaatcaacgccctttaacggctgcgtggggggtggtctcccgcgcccgccgccaggggtttccgggcctaacgggccttccggggcggcgccaggggccccgct

SEQ ID NO: 69871 - DNA, 122 bp, Homo sapiens
ccggactgatgtatgggtgggaaggcggccgatgcatttctttgccatttttctccccgccgagcttgggtcctcatggagggcggatggcagacatttcactctgggatccgatgcctgtg

SEQ ID NO: 69872 - DNA, 122 bp, Homo sapiens
taagggaggagggtggacaggctgcactttgtccaactccctgtggtcaccacgtgccaccgacccaacagcatcacctcacctctaccctgggacaggcactgtccaggcactttgctctg

SEQ ID NO: 69873 - DNA, 122 bp, Homo sapiens
acttcttttccttaagaatcacccagcctccggtgttccttcacagtagggtgaggggggcgaacgcacaccctgagccttaggggcaactcctgctgctgtgcccaggctgggccgggcag

SEQ ID NO: 69874 - DNA, 122 bp, Homo sapiens
gtgtgaagcttcgtggcacattttgagctgcctttctaggtaatcgcagggctggaagcccgtcatcgattctcagggaggctgtcagcgtgcaggggggagcggggagtgtcgtggagaca

SEQ ID NO: 69875 - DNA, 122 bp, Homo sapiens
aaaggcatgttcaaactcattcagaccttgttcagagggactgatgtagtaggatctaagcgtcctgggagattccgccattctctaacagggagcagcttcctttattgcactgaatatgt

SEQ ID NO: 69876 - DNA, 122 bp, Homo sapiens
gcctggtcacgccccctcccccgcgcgccacgcccacagtccgcccctgcgggcccgccgcgctcctcgcccggcctcgccacgcctacaacccgcctagccacgcccacatgcccctcccc

SEQ ID NO: 69877 - DNA, 122 bp, Homo sapiens
atctcaccttccacctttagctggtatagatttcattcattgaaaaagatgttagtgccccgtaatgaagtaatagattaaggcagccttcatgcattgctgccaaaatcattaggtgaaag

SEQ ID NO: 69878 - DNA, 122 bp, Homo sapiens
gtggcactcaggatgggggaactcaggaaagaaatgcttcttccagtaacaggccctacccgtctcctcccatgggctgctatggcctgtcttgtcttgacaagatgagtgtgtttgtggag

SEQ ID NO: 69879 - DNA, 122 bp, Homo sapiens
agggtttcaccgtgttagccaggatggtctcgatctcctgacctcgtgatccacccgcctcggcctcccaaagtgcagtccagaactcttaatgttgtgttgtatcaattttgctaacagtt

SEQ ID NO: 69880 - DNA, 122 bp, Homo sapiens
atgatgacactttattttaggcatgacaaggaagatttcagataaagattatgccggacgcgaagttcccccatggggccacatgactgtctgctttccagaaaagacattagtgctccttg

SEQ ID NO: 69881 - DNA, 122 bp, Homo sapiens
aggacagaccacaagggattctctgtctcaaattcttaatagggctgctgttgagaaacccgcccgagaggtaagtgctgtaatgtcctcaccatttcacagattaagaaactgaggcacca

SEQ ID NO: 69882 - DNA, 122 bp, Homo sapiens
ggtttggcacctttccattccccccgttatagaaaaaaaatattctgacactcgttaaaacggtaaggaaaacttaatttaagactaccgcattgcaatagaggagagaaatggggctcaac

SEQ ID NO: 69883 - DNA, 122 bp, Homo sapiens
ttggggtcgcctcctctcttccttcaacatttccctgtgaattgtctattcagtgcagtgcgaaataactgtttgctggtgcctctctctcagcctggaggaggatttactctttctctacc

SEQ ID NO: 69884 - DNA, 122 bp, Homo sapiens
gctcaagttgtttcagccttggctattaggagctctttcaggctggttcttgtatcccctcgatatgctctcttccttttgttttttgagcacttcttacttcctggtactgtaaaatgctc

SEQ ID NO: 69885 - DNA, 122 bp, Homo sapiens
cctttgcgcgcggggcggggcaggtggcgcagcagcggcggcggcggctgtgggtaaaggcgcggcgcgcggcccccgagcgcgccaaccttgccctagccggagcccgctgcggcccagcg

SEQ ID NO: 69886 - DNA, 122 bp, Homo sapiens
caacctgcatccttccagttgctgctcttctcatatagagaagatgctcctagcaatacacgctttgccctaagcatgggcacaagctcttctgtcagttctctacaatgacaatgaagact

SEQ ID NO: 69887 - DNA, 122 bp, Homo sapiens
ggcacaactcagaaagtgacagcgacaatattaggagtgaaaaagatcaattaagcccatcgagctgatttgtgaagctgattaaattaggagcctccctgggggcagaggctctctcaggt

SEQ ID NO: 69888 - DNA, 122 bp, Homo sapiens
gccaaagcaaaacatatcctaactgagactttgcagctcttgtggccactctgggctcaccgggaacatgagtggaagagcccgagtgaaggccagaggcatcgcccgcagccccagtgcca

SEQ ID NO: 69889 - DNA, 122 bp, Homo sapiens
tgggaagggacacgaagggcctgaggggtccaactgcgcatgtgtattcctcggttttcccggccccagaagaaagagcctgtgggcaagccacgcccaccgctacgccgggaagcaggagg

SEQ ID NO: 69890 - DNA, 122 bp, Homo sapiens
aaaaggtaggggttcccgagacggtactcggtgcaggtcttggtaaatccgcttctgccccgtgaggacctggtcatgacaatagagtagtgtttaatttaaaaagtttttgttataataaa

SEQ ID NO: 69891 - DNA, 122 bp, Homo sapiens
cagcccctttcagttcactgtggggccgctgggtgaaggtggtgcccacaaggtgcgggccggaggcacagggctggagcgaggtgtggccggcgtgccaggtaaggggcaggtggccagga

SEQ ID NO: 69892 - DNA, 122 bp, Homo sapiens
agccacacaagataacctcaacaaagatagcatgctactggctagcattttaactcccagcgttgaagcagataagaagattcttaaacaggtaagtatttaaaaatgtatttaatcctttt

SEQ ID NO: 69893 - DNA, 122 bp, Homo sapiens
aagggacttagcctatccatgactcttcgtcctgcttctcacctcccatgattgccctaacgatgtgaaagtgctttcaaacaaagatgcccaagaaagaaggtaggcaaatgtgcaagcat

SEQ ID NO: 69894 - DNA, 122 bp, Homo sapiens
ttggcggagcggcggaggcgcccagcggaggtgaaagtattggcggaaaggaaaatacagcggaaaaatgcagagctggagtcgtgtgtactgctccttggccaaggtgagggccgagtagg

SEQ ID NO: 69895 - DNA, 122 bp, Homo sapiens
gtttgtggaactaattttgagctgccagaatataagaaccttctcaccccctattctggccgctaaaaacacaacacaacctaacaaagtttacagaaaacccagggccaccttccactctc

SEQ ID NO: 69896 - DNA, 122 bp, Homo sapiens
tgcctctgcggccccatggcgctcaccttcccctgtcggaagtttgaatggtatggtcggcggcagccagaggttcgctattcagtgcctgccagccaccaggttaccctggagaggggcta

SEQ ID NO: 69897 - DNA, 122 bp, Homo sapiens
gcggaattgggctcgccccgggacgataacagagctctgccgggggctggaggcactgaccgggtgaccagagacccagagaccagaccccctccacggcgcccgggatttcggggacggct

SEQ ID NO: 69898 - DNA, 122 bp, Homo sapiens
agggggacgtgggtgggcggggtgggcagtggtggtagctggggcggggtggtgagcccgcgccttggaggggctgggaaggccagcgtgttgggggaggcgcctgggcctctgggactggg

SEQ ID NO: 69899 - DNA, 122 bp, Homo sapiens
gggggcagagctggtgactgggtgggctctgcgttgcagagggatacggccatgagccagcgcgggcgatccggcttcctgtcccacctgctgctgctcagccatctgctgcggttggagca

SEQ ID NO: 69900 - DNA, 122 bp, Homo sapiens
cgcggcgcgggccaaggagacggcgttcgtggaggtggtgctgttcgagtcgagcccaagcggcgattacaccacctacaccaccggcctcacgggccgcttctcgcgggccggggccacgc

SEQ ID NO: 69901 - DNA, 122 bp, Homo sapiens
gcggcgcttgtccttcacactggacgacgcgctggtgctgcaggcggcgcgcagctgtcccgagctccacagcctttttctggacaacagtaccctagtgggcagcgtgggtcccggctcag

SEQ ID NO: 69902 - DNA, 122 bp, Homo sapiens
gaggtctcgaactcagaccctagcccggcgcgacccaacccacttcgcagtcggagttcgcgccctgagttcggtctccagcttccccggctccgaatccatcgccctgttcagtgtccgag

SEQ ID NO: 69903 - DNA, 122 bp, Homo sapiens
ttcactgcccaggaccggtggtgccggcctgccctcccagtgcaggtcccgcggagcccgcgccaagcggaacccgtgctggcctgccagcaccatgcgcagcctcggttcccgcccacgca

SEQ ID NO: 69904 - DNA, 122 bp, Homo sapiens
ataccaacctcacctggctcccgcgcgtcgctcaccgcccgcggggacagcggccgcatccgcccaacccacttgggaagggggatccctatctgggtctttcaatcatacccaaggcatcg

SEQ ID NO: 69905 - DNA, 122 bp, Homo sapiens
tactaaaatctgtgaaagtcagctttgtttagttgtttttactgccgagattcaaatgaccgtcctcttccacctctttaccacctctattccggctctgtccactggaaatcatctgggat

SEQ ID NO: 69906 - DNA, 122 bp, Homo sapiens
gttggaagcaggagaaagtggggggtggggggaagttgtccgaaatgccctctgaattgccggctgcagggtccttgtgctgcgctggttctttgaaagtctcagtgttgatattgaactta

SEQ ID NO: 69907 - DNA, 122 bp, Homo sapiens
ctgaggctgttcaaaggaaatcagaggctggatttggcaggccctttgggaatcaaagttcgcgtctcctgttagaagagagttgccttttctctcctgagggcaggggtcaggggatagcc

SEQ ID NO: 69908 - DNA, 122 bp, Homo sapiens
caaactcatccgagacaatcagtgagcagagccacgtgattacacccagcacatgggcaccgctctgcctcacgctccaatgccctggacccaccgagaccagaggataggaggcagccaga

SEQ ID NO: 69909 - DNA, 122 bp, Homo sapiens
ggcaccagatgctgacccactggacccggaagatcattgtggaggaggggcacaccgtcccgcagctggtccacattctgcacctgatagtgcaacacttcaaggtgtgtaggagggacggt

SEQ ID NO: 69910 - DNA, 122 bp, Homo sapiens
tcacctcctcgtggatgccttgcagactcaagtttagtttctcaccttctgtgctcccatcgcactctgcaggggatacctgttatgcatatgtgtcagctgcgcttctggtctcccatgac

SEQ ID NO: 69911 - DNA, 122 bp, Homo sapiens
gccttttgcgcccagttctttcacacagcattgagttttccaggttcccccgtgtgggagcggagtggggagggcttcactctttttgtggctgagcaatagtccacgttaaaccctgctcc

SEQ ID NO: 69912 - DNA, 122 bp, Homo sapiens
tggctcaggagcgggctggctcaggagtgggctgactcgtgtctgttctcatgtcgggcacgcagccagccaggcctagcgtggggctccaaaatcgtgtgtagacaagtgatccaccgggc

SEQ ID NO: 69913 - DNA, 122 bp, Homo sapiens
cctccagaatctccccacggctgtcaccatgcctgaaatgtcaccattaaagggaaacatcgttccgctggggttcggaggcattaaagtctcttattaaagtgaaactatcccagagagaa

SEQ ID NO: 69914 - DNA, 122 bp, Homo sapiens
ctttttatatacagtctctagtaacagatgcattccatcgttccaagttgtacttataaacgctataattcttggtgctaaaaataggtaagttatgtcttgaacagcaaagtggtagcaat

SEQ ID NO: 69915 - DNA, 122 bp, Homo sapiens
ggctccgggaggatgcctgtctcaccagcttcccccaccccactgtccccaacccccacacggccctcagaagaggcaggacctcagtgggtccccaagggcccaagagcctctgaggtgtg

SEQ ID NO: 69916 - DNA, 122 bp, Homo sapiens
ggggacgtgtacagaggctaatattgagccaccaatcagttatttgacaaataccataggcgctctgtgagcaggagctggctcctatcccagaccccagccctgtgacctgctctccactc

SEQ ID NO: 69917 - DNA, 122 bp, Homo sapiens
tcaggcagggcccgaagatcgctcgtgcccaggagttcgagactaccctatgcaacatagcgagaccctttcttttctttcttcttctttttttaaaggtcctgctttaaaaaccagaagga

SEQ ID NO: 69918 - DNA, 122 bp, Homo sapiens
gagcacatgggcccgcgggccgggcgggctcggggcggccgggacgaggaggggcgacgacgagctgcgagcaaagatgtgccccgggacccccggcaccttccagtggatttccttgcgga

SEQ ID NO: 69919 - DNA, 122 bp, Homo sapiens
cctcggcggtgccttagcctccagagcttctgaccgctgacgggaacacccgaagggggacgcccactttgcaagagggtggtgccaaaatggacctttgtaagggggcgtgtcgccgcgct

SEQ ID NO: 69920 - DNA, 122 bp, Homo sapiens
atggcgtaggtgtgtgcgcgccctcacaaatttatggaatttatgggcggtgagcgcggccggaaaaggtttgggggacaagtaagagagggcgcctgcacgctctctccaggcccgggact

SEQ ID NO: 69921 - DNA, 122 bp, Homo sapiens
gatgtttcacatacagatagaaatggaatgaattttgccaattgtctagttgtttggtctcgggaaagcacatctgtatggctgaattttgtgtagacaaaatatctggacaattgcttgca

SEQ ID NO: 69922 - DNA, 122 bp, Homo sapiens
agcagatggactgcctgggggactatgggctcctcctctgggctacttctctggtgtagccgagggctgctggaaggcagggtggggacctgtgtttggggtagggctgaattaccaccggg

SEQ ID NO: 69923 - DNA, 122 bp, Homo sapiens
ccaagtgtcttctcagaagacaaggctgttgagagcattgttgagctcagccttcctcaccgtgaaaatgttttgctttttctctctggtcctagagcccaaccagaaaagcacaaaggcca

SEQ ID NO: 69924 - DNA, 122 bp, Homo sapiens
cagtgggggcaccagggtctgcaggacgcggggctggaattggtcctggcagccccaggtcggtggcaaagagcaataactgcttcccaaagggctgctggagattcctcgaacgcctagag

SEQ ID NO: 69925 - DNA, 122 bp, Homo sapiens
ggggactttaaaatttatctctctgtgatagtttttcagctattatgaaactaaaccaaacgaaggcagtgggggccattataaaggaagtttgagaatctgaaagtcttgatttcttaaaa

SEQ ID NO: 69926 - DNA, 122 bp, Homo sapiens
ctcagtgttgtgtgtttgtgtgtgtgtgtgtgtgtgtgtgtgtgtgtgtgtgtctgtgcgcgcacgcgtgagagagagagagaatacttacttttatgattaatgcatcttatgaaaatcag

SEQ ID NO: 69927 - DNA, 122 bp, Homo sapiens
tgttgagatgtcccataggctggatgttggggatacagcagggaacaagaacactgcgttcgctcaaccagtttaccatctacctctctgaacttgttcttagtctgtaaaatgaagataat

SEQ ID NO: 69928 - DNA, 122 bp, Homo sapiens
aatataagagacagaaggaccagcctaagaggtaggaaaaacagaaagtaacaccagaatcgttatactcaggcactggtcaaaatactgactactgaggtctgagaaacagtcactggaga

SEQ ID NO: 69929 - DNA, 122 bp, Homo sapiens
cctgcgtgcctcgtgagatccctggtcctgcgtggagtctggctttccgagtccaagatgcgataggggacgagggatggtcagtgaggcgggaagagggccggctcccgaggtctcaaagg

SEQ ID NO: 69930 - DNA, 122 bp, Homo sapiens
aactactacagcacctgcatgacacagaaagcgatatcaccatggatacatgccttggcacgtaggacataccttcatataaagaaaaaggctccccttcctctagggggaggtcagctcca

SEQ ID NO: 69931 - DNA, 122 bp, Homo sapiens
tctgcagcttttttttcccccttttaagttctgtatggcaggaaaatgcttgagagtgtccgtgtccatatagatacccacagtcacttgtgatattgtggctgcaggaagggtgctccacg

SEQ ID NO: 69932 - DNA, 122 bp, Homo sapiens
tcaaggaggctgaaggaggggttgcagagtcactctcttgctcccctcagtaaggttgaccgggtttagagaaaaatgtttacatttctacctcctatttccttcccttataggcatgccag

SEQ ID NO: 69933 - DNA, 122 bp, Homo sapiens
aaagacagatgcttgagcagtgtttcccggacctcccagagaaagctgacccagaggacacggagctatccatttgggtggacttttcagggcctttccctgtatttcaagtccttagttaa

SEQ ID NO: 69934 - DNA, 122 bp, Homo sapiens
atgtcgggaaggaaatctgatgtcaaagagagggctgttcaaatggttcattagaaagtccggtccatttgcgaatttgttccttcaacaagagtgctcattcaagttactcagattttctg

SEQ ID NO: 69935 - DNA, 122 bp, Homo sapiens
ttgttatccgaaaaaaacaaacagcgttcattcacctgtcaagcaacaaacgactctccacgagaatgcagattttgatcaataggagttttattacttggctcaagtaaggggagcactgg

SEQ ID NO: 69936 - DNA, 122 bp, Homo sapiens
ccatctcttccttaagatcttcccattgtcttagcaaagctggacaccctcaatggtgcccgctctccactagtgaaacagatgcaggatgcctgggtcctgcctgagcccagggaagaggc

SEQ ID NO: 69937 - DNA, 122 bp, Homo sapiens
gggagtcttctgcacttggtttgttcttagggaaatcgtcaccgttttttgttgcactaccgtctgatttattatggagtgcagagaaaagcttgtcctcagaaactgatgcgtaaggccta

SEQ ID NO: 69938 - DNA, 122 bp, Homo sapiens
agctacttgggaggctgaggaaggagaattgcttggacctgggaggtggaggttgcagtgcgtcgagaccgcacctctgcacaccagcctgggcaacatgaacaaaagtctgtctcaagaaa

SEQ ID NO: 69939 - DNA, 122 bp, Homo sapiens
gactggtgggaagattggggagatggaagcgggggcagttgtgtgcgaaaggtacagggtcgtggaaacatgcacaagaaagtgacattttagaaggtggtttttgttccataataaattta

SEQ ID NO: 69940 - DNA, 122 bp, Homo sapiens
cgcagtttctccgctgctgtttccaccggctttgtaacactgggaatttacatcctcacccgcacccctcacgcccgaggattttaaactcacctttactctcgaactgagagttgcggtag

SEQ ID NO: 69941 - DNA, 122 bp, Homo sapiens
gcggaagccgaccaagagatgcagagaacgtccgccagctctctgggagaagcgagcaggcggctggtgacactttccagggcagaaataatgcacctgtcccttagataaccttttgcacc

SEQ ID NO: 69942 - DNA, 122 bp, Homo sapiens
cctcataagtcttgctagggggacaaacaacgagagaatgaaactggcagccatagaatccgggccttgatgcccaggcctcgccatgcatacctgctggccggcatctccctgagacccgt

SEQ ID NO: 69943 - DNA, 122 bp, Homo sapiens
taaaaacgcgcgtttgggggtttcgctgtctgtcgttagtcttcacctgaaaacttgaaccgactcccagatcgggaacaggcatattgtgtttggaagggagatgtagtgaaattaacgtt

SEQ ID NO: 69944 - DNA, 122 bp, Homo sapiens
gttaggcttgagtgcttgtctggagtcacagctcgagataaactcacttagccctctcaccgagggggtggcttaaggaactgcagcaccttacaaggaacacccttgttagtcagctgagg

SEQ ID NO: 69945 - DNA, 122 bp, Homo sapiens
ctatcaccgccccagcccagccaaaagtgctgtgcttttcgtgcaactgaagctctaagccggctggtcagagaaaatcctcaggtctttctcacaaggcactgccgcggtgaagccaggcg

SEQ ID NO: 69946 - DNA, 122 bp, Homo sapiens
gcagctgcagcgccgcccggctccgcggacgctgagctgtgaccagaggcgttccgggctcgccagccgtgccacccagccctgccccaggactagccgacccctcgcgcagtccggggagc

SEQ ID NO: 69947 - DNA, 122 bp, Homo sapiens
ataatttgtacgacttgaattcttttaaatttattgagattcattttggggctcagaatacgttctatcttggtaaatggtgcaggtacacttgaaaagaatgtttattcttctgttgttgg

SEQ ID NO: 69948 - DNA, 122 bp, Homo sapiens
agcttgcgaggccgccaaagctgttgtctcaacaaggagagtctggggctagtccaaagtcgtgtctacagcctgcagtttggtgtttgatttggaggaaatatttactctccctggcctca

SEQ ID NO: 69949 - DNA, 122 bp, Homo sapiens
atctcctcccttcccccatctggctgtacagctgtggtgctttgtgacttggccacaggtcggggaaggagaaggaagctgctgcccccgataaaacctgaggcttctgtatctttttggat

SEQ ID NO: 69950 - DNA, 122 bp, Homo sapiens
cccaaaggccacgtggtggggaaacagggccggggacacaatggtggcacagtgaccagccgtccgggccctggctaatcactagaaacacctggaggaactcgttgaaggaaacaagtaag

SEQ ID NO: 69951 - DNA, 122 bp, Homo sapiens
gctcggtctacaagaccaggtgattgaactctcctccccgtggctgcagatctgaaggctcggctattgaagcagagggggacgaggaacagcgtgcggggcggccagcaccgcagtggaaa

SEQ ID NO: 69952 - DNA, 122 bp, Homo sapiens
accacgctgtgcacacatgagattggctgacttggcaggactgtgcaattgtcagaaggccgtggggagtgggggccagtgcctgcagcctgccctgcctctctcacaggcccttagagcat

SEQ ID NO: 69953 - DNA, 122 bp, Homo sapiens
cggagacacactcgagatacataggcacgaaaagctctagactgagcctgcaggtcccgccgcaggaacaggaagtaggcgctggccccacgtgcaaaggcactcacgaagtggtggctgta

SEQ ID NO: 69954 - DNA, 122 bp, Homo sapiens
tgtttgaaccaatcgaagccgtatagcgtgagtgtgaagcggagcctcagccttgccgtgcgggcctttgtgagctactgcgtggcatgagcagtgcggctctcccgcggattctctagcgc

SEQ ID NO: 69955 - DNA, 122 bp, Homo sapiens
ctgtcttccaaaaaaaatgtacatgttcgtaattattccccagctgcctgcgtttgcaaccgaacctgacacctcggcttcacccgaacttacatgctgttgtgttttccctccagccccag

SEQ ID NO: 69956 - DNA, 122 bp, Homo sapiens
gaagcgagctaacccaagagccaacaacgagcgcggagagggcagcggactgagcggagccgccggccagagcgggctcggagcccgggtctccgccgctcgggacccggctaggcggcggc

SEQ ID NO: 69957 - DNA, 122 bp, Homo sapiens
acagccccgggactctgccaggtggatgttgtgcgtagccggagccaggttgaaggtgagcggcgtgtgggccagaagtcccgaggttgcaggcgcggagggaaccggggatgtcggggggt

SEQ ID NO: 69958 - DNA, 122 bp, Homo sapiens
gtgaaacgctgcccgtcgcgagtaatgcaaacgtgttcaccttcagaaagagcagatcagcgtttagcatgagattttcccgagagccctccactcagaacgtgagtatgtttctcagcagg

SEQ ID NO: 69959 - DNA, 122 bp, Homo sapiens
cgtcagacccacagatgggggcagacggcacacaaggctgcgaagtccccaagggtggggcgggggcggggcgggggggggtttgcacggcacctcggcaagggcggcatctgagctgagag

SEQ ID NO: 69960 - DNA, 122 bp, Homo sapiens
tttaccacttttacagaaacagctgttatacccattaatggttcacctcgaacacccaggcgaggtcagaacaggagtgcacggatagcaaaacaactagaaaatgatacaagaattattga

SEQ ID NO: 69961 - DNA, 122 bp, Homo sapiens
agccccgcccccaaactctgtctccccgcggtatcctctggggctctccaggccccgcctcggctcgggccccgcccctccaggccccgcctccagccccgccccgcagacggcgctcgcag

SEQ ID NO: 69962 - DNA, 122 bp, Homo sapiens
cctggattagaagcccgacacctgagcggctctgctcctttccttggtctcacagagaaacgtcagaggcttctgagccgtcaaatggttgtcaggaggcccaggtgccaaatcacactcat

SEQ ID NO: 69963 - DNA, 122 bp, Homo sapiens
tgacctaggagggaggggtgtttggtgagtcaccagcaccagggtctccaaggctgagcccgcctccccaacccccgggacaactccctcggtccccgtggggacctgaaactcaaggcctt

SEQ ID NO: 69964 - DNA, 122 bp, Homo sapiens
ttgctaggcactaaggatcaactccttatttcctactgaactcacattatatgaacattacgatttgtaaaataaataaataaagtaaaataaaataattctggtctgggcatggtggctca

SEQ ID NO: 69965 - DNA, 122 bp, Homo sapiens
cagagagattttgaacttcagcagagggggctttgctgcggctccctctggagcaagccccgcctccatggccagggcaggtgctgctggcaaggcctcccatctttactttgatccctttg

SEQ ID NO: 69966 - DNA, 122 bp, Homo sapiens
gttttcatcctacctccagcgtgttttcttctgcagtccctgagggacacagtccccaggcgccatctctttgaggctttgttctgtgctctgtggccttaccttgccctccctgagccaat

SEQ ID NO: 69967 - DNA, 122 bp, Homo sapiens
ataggcaaaattaataatgaaatagaagctctgtcttctcttcatgaacaagtgtggagacggtagtgtataaaaacgtgcattcagcttaatataactacagttggccttcaaacaacata

SEQ ID NO: 69968 - DNA, 122 bp, Homo sapiens
agatagtgactgaggaagagcagcctcacatctggcagtttgcctctgggagaattccagcgtgacatctgcagctctgtggttccagaaaggatggttcccacattgaagaagacatctgt

SEQ ID NO: 69969 - DNA, 122 bp, Homo sapiens
ctccagcaggtcgatagcaaaacaaacgcactattgaccgccgcgcgcactaaatcctcccggcagacaagatgatgtgagcccgaatcgaatcgactgctgaactcataaccgctggggcc

SEQ ID NO: 69970 - DNA, 122 bp, Homo sapiens
tccccggtttcccgcgcccctggactggcgggaggctcccagccttcagggaccagaagacgttcaacatgggagcccagcccactcgactctggtcagttccttccatcgatccacgaggg

SEQ ID NO: 69971 - DNA, 122 bp, Homo sapiens
gctgcactggaaagagctagatggagcaggggtggggaatcactccgcttccaaccccttcgctcaggcccccccttctttaaataaccctcaaccctgccccacttccgtccacccaccct

SEQ ID NO: 69972 - DNA, 122 bp, Homo sapiens
agaaggcacaaaacacagaaatgggggttctcacactacagattaaggagtgtcccaggccgggcacggtggctcacacctgtaatcccagcactttgggaggctgaggcaggtggatcacc

SEQ ID NO: 69973 - DNA, 122 bp, Homo sapiens
gtgggccagcggaagcgcctcatctcctcggtggaggacttcaccgagtttgtgtgaggccggggccctccctcctgcactggccttggacggtattgcctgtcagtgaaataaataaagtc

SEQ ID NO: 69974 - DNA, 122 bp, Homo sapiens
tggccatcatctacgaaatctggtctcaacctgcagtttgaaatatcctgccttggcagacgcggcagggaggtgcgtggagggagaattgaattaaaaaaaaaaacaacaaaacacgaata

SEQ ID NO: 69975 - DNA, 122 bp, Homo sapiens
tggctgttgatgtggccttcctgaacctgcttttagtttaagagtagccattagtgcagccgcaatttcactgattgttaggcaaatacttacctggatatgaaaagagcctcagagctacc

SEQ ID NO: 69976 - DNA, 122 bp, Homo sapiens
ggctgccagagcagcagaggccagctccgcacgttgctttggcctctttgccgttcagcacgggaactgcttccagaggcagctgcccaacatctgggccacattaacttcatttagcaaat

SEQ ID NO: 69977 - DNA, 122 bp, Homo sapiens
tgggctccagtgaccctggctcagaggcttcagaaaacagcctcctggcctgtggtgccacggctggctccctggtctggttctgtggcctgctccccatcccaccctcaccccagcctctc

SEQ ID NO: 69978 - DNA, 122 bp, Homo sapiens
aatcctggcacctcgggaggccgaggcgggcagatcactcgaggtcaggagctggagacccgcccggccaacagggcgaaaccccgtctccaccaaaaaatacaaaaaccagtcaggcgtgg

SEQ ID NO: 69979 - DNA, 122 bp, Homo sapiens
cactgtcaccaggacagcaccaagccatgagggatccaccctcatgacccagttacctcccggcagggcccacctccggcactaggaattatacttcaacataagatttggagagggaaaac

SEQ ID NO: 69980 - DNA, 122 bp, Homo sapiens
cactacaagagaccttagcgtctctcaagtgttgagtactttgcccgtcctgaatgccttcgggaactctgaaaagcgcattatcaccggtggcttatgtacattctttcttaaccccctcc

SEQ ID NO: 69981 - DNA, 122 bp, Homo sapiens
gggagggggtgtcctggcatcccacccccggcagaggctcttgtgggcagtggtgagggccgggcctggaggtcagatggcagactccctgcggtaggagatgttgtccagcgggagggaag

SEQ ID NO: 69982 - DNA, 122 bp, Homo sapiens
ccagccccacaagacagagtccaatacctacccaaaggggtgcaacaggcacctggcctgcgctgagacacgtgggacctctggaaaaacatttttataaataaagcattgtgacagtttac

SEQ ID NO: 69983 - DNA, 122 bp, Homo sapiens
accgaggcccagcactgggccagaggaggtggcagctcgccggcaaagcagggtgggctgcgtccgcgggggcgaacacccgacgctatccgaagacgtcccgcgcgggccggcgggggcgc

SEQ ID NO: 69984 - DNA, 122 bp, Homo sapiens
gcacaggaccctccgagccatgtgcgggatataatctcttggtgcgccgttttttaagcccgtcggaaaagtgcagtattcaggtgggagtgacccgattttccaggtgccatccgtcaccc

SEQ ID NO: 69985 - DNA, 122 bp, Homo sapiens
cttcgttaattaatgaaaagcacatagaagaaaacagcctggctctctaagtgggcagtgcgattcccaaggacggcacttcgcctgatagtcttcctctaggctgagaagccagagtaaat

SEQ ID NO: 69986 - DNA, 122 bp, Homo sapiens
gggctgggccctgggtgagtgcttcacctgtgcagtctcattcagccttcaggggagccccgtgagcttggggttcacagcctgtgtattagccctctagggctgcatatcaaagtaccaca

SEQ ID NO: 69987 - DNA, 122 bp, Homo sapiens
gtacatcgggttcctggtgctcatcttcgcctccttcctggtctacctggctgagaaggacgccaactccgacttctcctcctacgccgactcgctctggtgggggacggtgcgtgagggtc

SEQ ID NO: 69988 - DNA, 122 bp, Homo sapiens
tccgttacccgccgcgagctcacttagggctccgcaggcacccctgggcaaggccagacacggggcctgggattccaataaccggtctcacgtcttacctcaggaacagcgacccgggtgat

SEQ ID NO: 69989 - DNA, 122 bp, Homo sapiens
tcgctgtcgaagcgcgcgtactcctctcggttatagatgtatctggtcacaagacgcacgcgctccgtcccgttggtgaagtagcacatgcccttaaactggaacacgaaatcctctgcggg

SEQ ID NO: 69990 - DNA, 122 bp, Homo sapiens
ttgattttactcagaggcccgaggacttgctttcaggttcagggacagataataagcaggcggccgaacgcctgcttgcgaacgcctgcttctgcacgcagtgtgcaccacgggaagttcac

SEQ ID NO: 69991 - DNA, 122 bp, Homo sapiens
tggcgacgtggtccccgatgaccctgagatcctcatgcagcagggagaattcctcaactacgacatgctcatcggcgtcaaccagggagagggcctcaagttcgtggaggactctgcagaga

SEQ ID NO: 69992 - DNA, 122 bp, Homo sapiens
gggggatttttagtagagggaatgaatcctggggggaaaaggatgaagtggagccttccacgatacacagcacagacaggctgagttactgctggtgatggagccagaaagtcaaggacgta

SEQ ID NO: 69993 - DNA, 122 bp, Homo sapiens
ggcggctgccactctggacgaacttcttcagcagctctgtggggctgccggccagaatcacgtcgtagctgggtgaggaaggggaggatgggcaggggtccactgggaacctcagcatcctt

SEQ ID NO: 69994 - DNA, 122 bp, Homo sapiens
agagatctagaggagacatgttcttcaattatgattgagaattaggaacatcccacaccccgggaacactccactccctttctttagagccatctgatcccagcgagtccgacaggcactag

SEQ ID NO: 69995 - DNA, 122 bp, Homo sapiens
gcccggcgatgtgagaggcggccgtcggctcctgcctcaggaagggcatgttcggaggggcggcctcggcacgccacccgcctaagcgcccccttcccaccgcagccgccgccgccgcagcg

SEQ ID NO: 69996 - DNA, 122 bp, Homo sapiens
gaaggggagagatatctccccgcactgtgacccacaccccctcttactggcccgtggtggcgtcatgaggaggatgaatggctgttcagttaaagtacctaggccttgtgattcttgatgtc

SEQ ID NO: 69997 - DNA, 122 bp, Homo sapiens
taaattccaagacaggctttcctactgcagatggcatgagcccagagccataagcacacgcgcccaaatacacaaactaggatcgctggcgggtagccatgctctattcaccccaattacta

SEQ ID NO: 69998 - DNA, 122 bp, Homo sapiens
aaggtttggaacattcagaacactctttccaaatcaaaccagcattcaataaggtaaacacgacttcaggagagcaggaggcggctgggttacctggccatgaaaaatggcaacctccgggc

SEQ ID NO: 69999 - DNA, 122 bp, Homo sapiens
gaaacaggaagttaatttggctaggagataaaccgtcactcaccctgcatgtaacctggacgtgacctgcacgtcctgggagcttctgttttcctgtccccacgcactcgcagcgtgcagac

SEQ ID NO: 70000 - DNA, 122 bp, Homo sapiens
cctggagggcccagggagagagggatgtgaaaggctagcccagtcccgctctgttctcgccgcaccctccacagtcaccatctgaggacctctgccggttcctcagtcctcagtagccaact

SEQ ID NO: 70001 - DNA, 122 bp, Homo sapiens
tttagtcatagagaaattctcctgccttccagccttgacttgatcctaacacaataagcccgggtatacattcactgaagtcatgagttagtcatgtcctcaaacaaaggagacaaggagct

SEQ ID NO: 70002 - DNA, 122 bp, Homo sapiens
gggtgacggggactccaaatgagttacagcagaaagaaagagaggtgccccctccgtccgcgaaagtcacctcctagcccaggccacactcggcggcacaaagcggccaggaaggtctgcat

SEQ ID NO: 70003 - DNA, 122 bp, Homo sapiens
tcaaacctctgcatctagtttttctccttgctagctatgtaaataaaattaaaatgtgaccgtgttagtcatttcttgcattgctaaaaagaaatacccatggcagggtaatgtataaggaa

SEQ ID NO: 70004 - DNA, 122 bp, Homo sapiens
tagccctttggctggggctgcagtcccacgatccacacaacgaccctggctccgcagacgcgccaaccacccacggaggcaagaaactgcagaaagtaaagggaaagggagcccagtgccgg

SEQ ID NO: 70005 - DNA, 122 bp, Homo sapiens
gctgggattgcctggggcagacacaggctcggaccagccccagcaatcccagtttatcagcgagccggctgagggcccggagttatctcagtgcccggcctgagaccttgtgggcagcctgt

SEQ ID NO: 70006 - DNA, 122 bp, Homo sapiens
gggagggtcccgggctggtgggcagggccgggggcggcggcgtgggggcggcaggggccgcggcgggctcgggcgggctcgggcgggccgggccgagccgccgagaggggatttggaacaaa

SEQ ID NO: 70007 - DNA, 122 bp, Homo sapiens
ctgtggtgggagcatgagaccacaaaccaggaagtggggggggggagtgcccagagattgcgcaacccccagcactcagtccagaacatctggagaagttggttgctggcgccccggtgccg

SEQ ID NO: 70008 - DNA, 122 bp, Homo sapiens
aaaaccatgctcaataggattacacttaggccgaacctaggtgagaatgttggaagaggacgttgggatcctattatccctggcagagccactgtattttgggctggagacctggaggccct

SEQ ID NO: 70009 - DNA, 122 bp, Homo sapiens
ggcactggtccagctgaactgacctgggggaccccaatgaccaggatgcatccccacccccgcccctgctgccaaggaccacaacggtaggaaaaggagagcagggaatgggctgcaaggtg

SEQ ID NO: 70010 - DNA, 122 bp, Homo sapiens
ggagccggaggggtgagatcgcccacctggaaagccagcgtcagccccggggctctgaggcgcgcggcgtcccggcgctgctcgcggggtggactcggaccccgcgggggtgtcgcgcgcgt

SEQ ID NO: 70011 - DNA, 122 bp, Homo sapiens
ctacaggaatcaggcccagtttctatctaatattaacaataattatcatacactatgccccgttacatgatagtacaatagttcaaagcacagactctgggggtagactccttggtcccttt

SEQ ID NO: 70012 - DNA, 122 bp, Homo sapiens
actccgcatcccattctcttactgcctatctgaaggattggatgggcagagtataggtggcggtggttggtcctccccgtatgttgtccatttaattccagagcactgatttttccgaagtg

SEQ ID NO: 70013 - DNA, 122 bp, Homo sapiens
gactttgtcaaacctagaccctaactgcggcacaaccagtggcacatgctctgggtgctgcgggggaggtacaggaaccagaggactcccccgccctttgggagctgaggctcgctacagag

SEQ ID NO: 70014 - DNA, 122 bp, Homo sapiens
ccttctatacaaagtccctctgctttaagtcaaaaggtcaattctggattaaaacttgtccgcactaagtttataggaggtaacatgcaaataatgtgataaagttaaaatgacttgtcaat

SEQ ID NO: 70015 - DNA, 122 bp, Homo sapiens
agttgtgggttttcctctgggcggcgaagccagtttccatcagaactgcccagaggcgggcgctgccttcctggggtgacgcagcagcaggaagagtttccggatcctggaatccgtgggcg

SEQ ID NO: 70016 - DNA, 122 bp, Homo sapiens
gcgcgcgctccgtggcccgcctgtcgcccgagacccgggagcgcgcgcggagctggtgcgcgctggactggcgcctgtacgagcatttcaaccgcaccctctgggcgcagctgcgcgccgag

SEQ ID NO: 70017 - DNA, 122 bp, Homo sapiens
cccatccccaccatggcagccacctccccatgcccgtggttctgccacttccgtccccaccgtggcagccgcctccccatgcccgtggttctgccactcccgtccccaccatggcagccgcc

SEQ ID NO: 70018 - DNA, 122 bp, Homo sapiens
ctggcgggggtcagggtaggggggaggggcagggctcggggttcgggggcggggtgttcacggtgagaccaaaagtcaggtaggagcctccggggtccctgctgtgtcacccggacaggccg

SEQ ID NO: 70019 - DNA, 122 bp, Homo sapiens
gtctgcaaaacgaccttaatacctgttctgaatacccccacatggctgtggtacagcaggcgtgagatgtttaaagtactcctaagtaatttataaactgcaaaacgcttcccagcacaagc

SEQ ID NO: 70020 - DNA, 122 bp, Homo sapiens
aacccagtaggttggccatccacatggagtaagtaaatgcaaacactcgaaacacacaaacgctctcagtgtagctgaggtgaaggcatctttctccacataactatgttcgatttaatttg

SEQ ID NO: 70021 - DNA, 122 bp, Homo sapiens
tccccttgactgtgccactggtgtgcatgaggatgacctaagtaaacaccttgatcgcttcgagaaccgccgggcagagggctggcctttgcactgctgagctgcatcgctgctggtgtccc

SEQ ID NO: 70022 - DNA, 122 bp, Homo sapiens
tgggaagccaggtgcccagaggagccccagaagctgtgccatcatcagcacccacctggccgaagcccgctggtgaccccaattcaaaggcaggccaggtgcgctgtcctgccctggttccg

SEQ ID NO: 70023 - DNA, 122 bp, Homo sapiens
gctccagaaccgactccgctccgcactggccttggtcacaggttgagggggttctttccccgggcggtttggggtattggagtgaggtcaggggcgtgcccttggagtgcgcggccgctgtg

SEQ ID NO: 70024 - DNA, 122 bp, Homo sapiens
cttgactatatattatttgcaggagtggtggtggtgtatgtgtgtgtgtttgtatttgctcgttaagtacatagttgaacctagtatattccttggttatgggtttaattattctccttcat

SEQ ID NO: 70025 - DNA, 122 bp, Homo sapiens
gataggtacaaatgacacatctgagtccagagaagttaagttagccaagatcacacagcacgtgtgatttaaacacaggcagcctaactccaaagcccatacacttaatcactatgtcatat

SEQ ID NO: 70026 - DNA, 122 bp, Homo sapiens
tcaccactgcacgatgcaacgttgctgcaatagacaggccggggtgagccagaactggcacgattgtgtgcaattgagaaggcgactgtctcatctgtaaaatgggacaatgacatcttgct

SEQ ID NO: 70027 - DNA, 122 bp, Homo sapiens
taacattataacttctttaattttagaagagaaataatttgtattaacaagacttttctgcgggagcagcttacttaagttaggttgtgtagtttcactagttgcttctgagagccagatac

SEQ ID NO: 70028 - DNA, 122 bp, Homo sapiens
gccgccgccgcctccgccgctccactgccccggtcggttcagcccgccgccgccgccagccggcccgctcctccagccggcgcagctcgctcagcgccagcagcaacagccgccgcagcagt

SEQ ID NO: 70029 - DNA, 122 bp, Homo sapiens
gaataacagcactgtcccattttctcattttcaattcaaattcaaagatttgaggccaggcgcagtggctcatacctgtaatcccaacactttgggaagccaacgcaggcagatcgcttgag

SEQ ID NO: 70030 - DNA, 122 bp, Homo sapiens
gtagtgttggcgctcctgaagagagacgacgcccgtttatcacccccaggcaactagctgcgcaaatcagcggtggctccagggctagagaatccctggagctaaccgcacccctctccctt

SEQ ID NO: 70031 - DNA, 122 bp, Homo sapiens
cgtacttggttaaggctggtgagtgcagggcagggcgtggccccacggccggcaggagtccggcgcacactgggcctggagcgcactgactggggctctggctagccgggctacccgtgggg

SEQ ID NO: 70032 - DNA, 122 bp, Homo sapiens
cgacctccgccagagcccactgcgctctgcctgcctcagcactggggctggggacagcagcgctggcccaaccgcgccgcaacccccagccaggtgccgccgcggagtagaggccactctgc

SEQ ID NO: 70033 - DNA, 122 bp, Homo sapiens
ggggaagggaatcggaagggagagctctcataactgtggtgcagctattcccaccacggccgacctgagactatcaacgtaacatccgcatgcggagctgggaagagtgttttccacagtcg

SEQ ID NO: 70034 - DNA, 122 bp, Homo sapiens
tcagcctccagagtagctgggaccacagggaccacagggaccacaggcgccctgccacgacgctggctttatttttatttatttatttatttatttatttatttatttattttttgagagat

SEQ ID NO: 70035 - DNA, 122 bp, Homo sapiens
tctctgcctttgtccctcctccgtgacaaggacggttccatgccgtgcccacagacacgccgactcacacgcatgcagagaggcagcggcacacttgccagtcccttcactccctcgcttgt

SEQ ID NO: 70036 - DNA, 122 bp, Homo sapiens
gcataatcattaatcctgtcacacgttatcttacgtacaggaagaggcaagagctaggatcgctgactgtatctttttaaaaaatgaagtgattcaagcaacagatgtgaaaacttgtgctc

SEQ ID NO: 70037 - DNA, 122 bp, Homo sapiens
tccaaggtcttctcagggatccgcttcctccaggaagattcttcctcacttgtcagtcagcgagactgccttggtcttaacctctgacctcagggattattcaagcctggaagggtcgggag

SEQ ID NO: 70038 - DNA, 122 bp, Homo sapiens
cactttagtatgggtctctgtaggaatcatcgtcttaacccactggttctcaaactgagccgctcatgatactagttaataacatgataataacagccaggctgggtgtggtggctcacgcc

SEQ ID NO: 70039 - DNA, 122 bp, Homo sapiens
ctctcctgacactcagggctcctcaggagccggccattctgagccaaggacccagcctgccgaggctgccaccaaaaccagagcccgtccagggcccaggtccttgctcctgtctgggcctc

SEQ ID NO: 70040 - DNA, 122 bp, Homo sapiens
gcaaaggtggacctgtggttggtggaggggcttagcatctgcatatcccaacacacatctcgtgcatcattagcttataaaatctcacctaggggtgtgttttctactatcaaaatgaggaa

SEQ ID NO: 70041 - DNA, 122 bp, Homo sapiens
gcagaactgtgtccgaaactggtggcctctatggcttataagaatgaagccgcagacactcgccctgtgtgtttcagctgttacaatatcccgtccagagtttctttcagtgggtttctgat

SEQ ID NO: 70042 - DNA, 122 bp, Homo sapiens
cggcttgcttactgaaggtgacaggctcgctgagctgctgtagagcatgggcgagagaggcgcatcgtcgtcctggacttcatccaactctgtgcttgccatgatgggcgacaggcggccac

SEQ ID NO: 70043 - DNA, 122 bp, Homo sapiens
cagaggcagaaccggccacagatgcccacccccgcctccaaggtggcccggggccctacacgcagccacctggtcccagggcagccctgcacaccacccctggttctgtctggctccagctt

SEQ ID NO: 70044 - DNA, 122 bp, Homo sapiens
actgccactcccttggccaccatgcaggtccccacccagtcctttggcctttgctccctccgcctcctctgacctcacctgtgccctcccacagtgcctgaggcttggacgctgtggtcctc

SEQ ID NO: 70045 - DNA, 122 bp, Homo sapiens
tgttttctccttcggtgatatcgaaactgactttcagccctttcattgcacttgtgactccgggggacacgtgctgatttcctggttctatcctaacggtgcctgcccttttctgtttactc

SEQ ID NO: 70046 - DNA, 122 bp, Homo sapiens
atctgtgttatgtctgtgaggttacagtaaatagtaaactgctgacccacagctgtgcaacgtgggtggcatctcaaaggagccttgaagaggaggctgaaaaagatactttttcagaaaag

SEQ ID NO: 70047 - DNA, 122 bp, Homo sapiens
aaactcgccccagaagaagttcccctaagcgctgaggcccaggcaagggcgggcttcggtcgggaagggtggaatccacgggtgcgaatccacgggcacgtgtgatctggggtccgcggagt

SEQ ID NO: 70048 - DNA, 122 bp, Homo sapiens
gggaaacgaatggctctgaaagttagctgaagccgctggaatagccccccagccccgaggcggggcaggtgcctgccgttattggcttttcgaccccaacccttttctatctggagctgcct

SEQ ID NO: 70049 - DNA, 122 bp, Homo sapiens
caggcccaccttaaacaaataacaaggctacttccccacgaaaagtgcccaagcccggcacgtcatccagggcactcgtgactgtgagacagtcgtttccctacaacacacacagactgcca

SEQ ID NO: 70050 - DNA, 122 bp, Homo sapiens
tgtgcaaagaggtcagcaaaataaaggattcactgcaattcatccttctgtggtcactgccgggctttgggctcccatcccttcccggccctcccattccatatccctcttctgtatttgca

SEQ ID NO: 70051 - DNA, 122 bp, Homo sapiens
atcctgccctgccgtcttctgactttgaggcctcgtatcccagtccaagaccatttcaaacggtagaactggtgccagacacttggaggaggcagggcaaagactcgccagtccgtataaac

SEQ ID NO: 70052 - DNA, 122 bp, Homo sapiens
ccatatgttaatattttaccacaactacaaaaacaaacagaacagaacagaacccaggtccggtgtgctcaggcctggactgcccctttccccttatgccactactccgggttttcctttgc

SEQ ID NO: 70053 - DNA, 122 bp, Homo sapiens
aacgggcggggaaagaagtgcctatggccgctgaaaacaattgtggggtggagcctcccccgtgcggcggccctgtcttgggaactgaccctatgttttacacctcccggctattttttagt

SEQ ID NO: 70054 - DNA, 122 bp, Homo sapiens
attgtgctccagcctgggcaacaagagcaaaactccatctcaaaaaaaataaagaacctgcgaatgagttcccacacgttttcctaatgggctgctgctttcctaggagtctctcgctcaca

SEQ ID NO: 70055 - DNA, 122 bp, Homo sapiens
ctcttggcgggatttttggactggaaggcggggaacctgatcctgcctttgactcaattacgccctgacagggagggaacggaagggaaatggagaatgggagggatgagaggagcgggcca

SEQ ID NO: 70056 - DNA, 122 bp, Homo sapiens
ccccacccagcggccttacctgggtgtgccggggcctggccgcgtcgggaggttctggtccgtggggcatgtagcagccgcacgcccagccacccccactggcaacagaggcctatttttag

SEQ ID NO: 70057 - DNA, 122 bp, Homo sapiens
gtggggatgcaatcaccctgatttgttccaggaaggctgtctataggtgcatcaatgctgcgttcctttgggagaagccccagctctgtctgcagtggcgtaccagggggaacaaggatccc

SEQ ID NO: 70058 - DNA, 122 bp, Homo sapiens
ttcttaagcggactattttatatcacaattaatcacgccatcaagaaggcgcgggtcccgcgtgcgagtgcggccagcggagcccctcacataaaattagacaataattgaagccataaaaa

SEQ ID NO: 70059 - DNA, 122 bp, Homo sapiens
agggctgcagccccaagatctctaggctgtggcagcctggggcgcttttccaccggagttcgcccagacaaatgtatttttcctccggagacggagatgctgcaggatgtttctgatccggg

SEQ ID NO: 70060 - DNA, 122 bp, Homo sapiens
gcggccccggccctggaagcgccccggcggagctggcctgcggtgggctaggggcagggccggagccgcggcggcggagctgtgggtaggtgcgggctcagccgagctaggcctcggggccg

SEQ ID NO: 70061 - DNA, 122 bp, Homo sapiens
aagtgcgggcttcccccacccccggcagcgaccctacctcccgcccccgctgcgtgcgcgcgtgtgtccgtctgtctgtatgctctctcgacgtcagtgggaatttccagccaggaagtgag

SEQ ID NO: 70062 - DNA, 122 bp, Homo sapiens
ggggtccctttgggaggctgaggcaggaggatcgtttgagtctccgaaggcagttagtcccggaagcagctctgagaacaaggctgggcccaccccggcccacccacagctcatctctgtgg

SEQ ID NO: 70063 - DNA, 122 bp, Homo sapiens
cccacagccacgctcacagcacacggaggctgcgggctcgtgtccagctcatggaatagtcgctgagacaaggcacttgggcaaaaagtacccggctgaggaaattcccccaaacagagaca

SEQ ID NO: 70064 - DNA, 122 bp, Homo sapiens
atccttaacagcatttatatgcttgatctcctctccacgcagcccatcaataagccattgcgctccacggtcacacttcagcactcccaatacaccaggcagacactgagtacgagtctcgg

SEQ ID NO: 70065 - DNA, 122 bp, Homo sapiens
acacttcaattcaacaaatagtgccagccctacatgtgttcaggaagcctactaaagaagcgggttgaaacattaaatgacagctactactcaggtggggttttctaaaaggaagaggggaa

SEQ ID NO: 70066 - DNA, 122 bp, Homo sapiens
cactctgctccacagataattagtgctgtggtgtttctgtttagagctgagctgtgtggccggagaccattgttgacttgaatggttacctggatgagctttggattgttagggacttgggt

SEQ ID NO: 70067 - DNA, 122 bp, Homo sapiens
gcagccctgagcagctgccccgcccaaccatactccaatccccacccaccccactctccccgcaactgcatgcggtcccctaccctgcatcacccggccatgcagcctggtacccgaagagt

SEQ ID NO: 70068 - DNA, 122 bp, Homo sapiens
gtgcagtggcctgtctttgacaaccgccgtaaagaggatttttgggaagagaaaccacatcgtgaaattctcatcatcgtacgtaagtcccagaggaaaacactcagagccccggctcttca

SEQ ID NO: 70069 - DNA, 122 bp, Homo sapiens
aaaactgaggcccagagatgggcgttgtgccaccggggccacacggctggcaacacctggcgggatcaggatttggacctgaacagcctgtctggagagcgggtgcttgtggcctggtccct

SEQ ID NO: 70070 - DNA, 122 bp, Homo sapiens
tcccctaccttctctgcccctggtcctgcagtttgctccgtggttacaaaccaagttccacggagaagccagttcaaatgcagaggcttgtgcagtctggctgcccaggcaggagaggaaag

SEQ ID NO: 70071 - DNA, 122 bp, Homo sapiens
ctgccctctgacctcggcagggcacagtcacatcctggctggaattcgtgtagtgcttcacgtggcatgtcacggacttgccgtctgggcactgtgtggccggcagggtcagctggctgctc

SEQ ID NO: 70072 - DNA, 122 bp, Homo sapiens
ggtgtctcaatgacagtaacgttcccgaaccccggaccttagctgtcatttcacctgcgtcgtcccggacgccatttggctgttgacgtggttccgagccagcaaataacgccagcagccct

SEQ ID NO: 70073 - DNA, 122 bp, Homo sapiens
tgattggaatcactgttgctctcagttttttaaagaggataaccatccaatacacttaaccgaaatcctgagaacaagaagagaaaataaatttaaaatcagactttccccccttctttaca

SEQ ID NO: 70074 - DNA, 122 bp, Homo sapiens
tggtggggggagggagggaagagtctgagtcctcgaggtgggtgagtaagcatggatcatcgctcatgtttataagaaagtgacagaggaacctgggggccgagcggcttgtttgtgggctg

SEQ ID NO: 70075 - DNA, 122 bp, Homo sapiens
gagttagacctgaattttagtcccaggtctactattaactctgtgtgactttgcataagtcgtttgcattttctgtgacttggtttcctcatttgaaccgaggatctttaaggctccttcca

SEQ ID NO: 70076 - DNA, 122 bp, Homo sapiens
tgctgtttggttgaaaaaccagctgaaaaaactcagttgggaccaatagagacttgctctcgacccggtctaggaaaccacttattttgacttccgaggcctgtcaatctgaaggcaaaaga

SEQ ID NO: 70077 - DNA, 122 bp, Homo sapiens
ccctgggggcttatggaaccaggaattcccttttccccagccctaatagcaatcagatggcgcaagtggaaaatcacggcgctcggcaagcaagctggaaattggcgggctgtggtgcctgg

SEQ ID NO: 70078 - DNA, 122 bp, Homo sapiens
tcagggaggtctgtgctgaccgtctgacatcagccacatcgcagcatcccgctgcgatctcgttttgatttcttcaaagtgattcaagggctgaggagcacttggtgagcagtctgagtgta

SEQ ID NO: 70079 - DNA, 122 bp, Homo sapiens
agcggaaagcggctctgccaggccaaggccgacagaaaccgagagcatgtcgctatttgccggagagaactgccctgccaggctgccacaggtgacttgcccgcgcgagccacggcctctgc

SEQ ID NO: 70080 - DNA, 122 bp, Homo sapiens
caaagaaaacagattaagggactttggacctataccttatgcataaatgttactgcactacgatcatttattcttgtaaccccagcactttgtagagtgctttgcatataacagatacacca

SEQ ID NO: 70081 - DNA, 122 bp, Homo sapiens
tcttctgagatccggcaaagccgagcttctgagagctcagtcttcgccacttcaattccccgcggtttgagctgcaaggaggactccagacaagaagctttattgtctgcgagtcccagctc

SEQ ID NO: 70082 - DNA, 122 bp, Homo sapiens
taacaattagagctgcttgaacatgggatgaatagctttgaagtatggtgagtttctcaccgctgaagatgttgaaatagcctgaatgggtaacttccttgagcaggctgaacaagggctta

SEQ ID NO: 70083 - DNA, 122 bp, Homo sapiens
gagctgtctcgtgcctgctcgtggtgcgatccttgtcttcctccagtgctggtcccggtccgtccatgggcagagtcaggctgttcatgagtgctcacctggtagagggaagaccctgaacg

SEQ ID NO: 70084 - DNA, 122 bp, Homo sapiens
ctgcggcgggacgggcggatcagcggggatctaagtctcctgaggcaagggcgccccgaccgcagcgactcctgacacacccaggccgcaggacgaagcgctaccgcctggggctgccagct

SEQ ID NO: 70085 - DNA, 122 bp, Homo sapiens
gaggcggggatgggggggaagcagggcggccccgcagaggggaagctgcgcctccgcaaacgctcagaagcagcttcgccagacagccgcaacgtacatgttgactgcccgaggcggaagtc

SEQ ID NO: 70086 - DNA, 122 bp, Homo sapiens
ggcatcaagtgcgccaagtgccaggtgggcttcagcagcagcgacctggtgatgagggcgcgggacagcgtgtaccacatcgagtgcttccgctgctccgtgtgcagccgccagctgctgcc

SEQ ID NO: 70087 - DNA, 122 bp, Homo sapiens
cacagctgggcagacatgaccactgtaccctcctcgcggttccggcgtcgggcacgctcccgccggtgactgaccatggactccgtgcctgtctcgttgtccatcccgtcacggctgctggc

SEQ ID NO: 70088 - DNA, 122 bp, Homo sapiens
aacccacaccgcttcaccaccggactccaactgggagggggcgccagcgcacccaggacgcggtgccccaagggaccccattccaagctgcaaactcaagtcccccgcctccccaggccaaa

SEQ ID NO: 70089 - DNA, 122 bp, Homo sapiens
tgcgatcaaactgagcacccgggggtttcccaaacccagggttaccggatcctgagcatgcgcggaggagggacagggagccgcccacgccgggctccgcggctgcagttgctgttgtggcc

SEQ ID NO: 70090 - DNA, 122 bp, Homo sapiens
atccacccacctcaacctcccaaagtgctgggattacaggcgtgagtcacagcacccggtcgcaagaagttatcttaagatgattcgaaataaatggaaaaaactttaagaggcagtgtgat

SEQ ID NO: 70091 - DNA, 122 bp, Homo sapiens
ctatgacgcctttgtctgctactcaggttgaatgtcccgtttgtatcttagtggacttggcggatggtaggcgcatgtttagccttagtggacactaccaaatggctttccaaagtaccatt

SEQ ID NO: 70092 - DNA, 122 bp, Homo sapiens
atgccttcccttggagtacagctggggtcacggatgagcacggagatgcctctcacactccgcggcttcaccacccacctggaggggactagaattcgaagtgcccgcgaaagaagcaaggt

SEQ ID NO: 70093 - DNA, 122 bp, Homo sapiens
tggaaggcctgagccccgggaacactggctggaaaatggaactcggaggacagagcttgtcgacggcgtctcgtatgaatcccggaggagacgcccgtgtcgagggcagttagaatccaggt

SEQ ID NO: 70094 - DNA, 122 bp, Homo sapiens
actctgccacccaccagacaggcacccgccccctaaacccccccattccttcccatcgcccgctcctccacaaccacttccggttccgggacggacacacacacagtcacatcgtggacccc

SEQ ID NO: 70095 - DNA, 122 bp, Homo sapiens
aaagatcatcttggccagacccatgaccctggaatcccagacgggcagggcagggtagggcgcgcgacctcttcccctggtgggaaggtcctcccggcggggcctcctcttcccctccccgg

SEQ ID NO: 70096 - DNA, 122 bp, Homo sapiens
cctatgatcaattgttttcaccctaaggctcaagtgaaaccaaacggttggtcactttttcgatttagtattttttcaatttcttagatctcaggatatttttagtagattttggatgagac

SEQ ID NO: 70097 - DNA, 122 bp, Homo sapiens
tcctcatctgtagaatgggaataattaagtctgcttcttgtctgccattcttgcagcggacgatggtggataaatgaacatgctttcaaacttttgagttctgacgagcagtactctcaaca

SEQ ID NO: 70098 - DNA, 122 bp, Homo sapiens
aaagtggccgaggggtcaggtctggggtggtctgcagagaggcaggcggcggtgcggaaccgggaaccacgcgctcacccgccaagtcggacaggcccggcgtgggtgggtgagacactggg

SEQ ID NO: 70099 - DNA, 122 bp, Homo sapiens
ctaatcagccgtcctcctctccgactagaaataacttccctcccatcttaaattaagtagcgtgtgttctgtctctgtcctagaagatgtacttaatggtcataaactctgtttgcaacact

SEQ ID NO: 70100 - DNA, 122 bp, Homo sapiens
cacgtgggaagtagggggtgcagccatcatgccgcgtccacaggggaagtggcagggaggcgcaactgcggtgccgcattcaaatgggaagtgggggtgcagccatcatgccacaaccacag

SEQ ID NO: 70101 - DNA, 122 bp, Homo sapiens
gacagcattccttggggagcgccgggtcggcgtgtccaaagagcgggggcaaaacggcatcgaggcagaggctctatggctcctcccccatctgcagcagggagttgatggcggcatccttg

SEQ ID NO: 70102 - DNA, 122 bp, Homo sapiens
tgtggggccagagccagagctggggacgtttggaggcctcctgtgactaccagagtgggtcggggtgggggagggaggctgcctgaagccagagccagccggctgctggccggcactttgtc

SEQ ID NO: 70103 - DNA, 122 bp, Homo sapiens
gacagactccggtggctcccagacaccgggaacccagggagcatcgcccggctcccctcccgctgcttacacttcttcaaggtgatatagacgctgcccgacgtccggcacttctggaaaag

SEQ ID NO: 70104 - DNA, 122 bp, Homo sapiens
gcaatgcacccatagacagtcacaagaaggagacccaggaagtggcttaactctctgtcccgccagctctgcattggacagtccccacctgcacccagcaagggggcatctggagcagccat

SEQ ID NO: 70105 - DNA, 122 bp, Homo sapiens
cacgaaaccactttctttgcttatcaatcagaagcaactcctcatccattcaagttaccgcgagatggcagcaattcagtcacaattttaggctccatctcttaattctaattctcttgcta

SEQ ID NO: 70106 - DNA, 122 bp, Homo sapiens
acaatgctaatcaatttcagaatactcaaatcatcaacaacataaatgtgacaataaacacgcatcccagcttcctatatcttttcatcctcttcccatctccgcagggtcaacatctcaat

SEQ ID NO: 70107 - DNA, 122 bp, Homo sapiens
gcgctcgccgcgggacacggcaggcggggcggggccgaatacgagtggccaggggcacgacgggagctgtagtccagggcacggcccgacccgcgtgaagaggggaataatccttttcctcg

SEQ ID NO: 70108 - DNA, 122 bp, Homo sapiens
ccggcgtggaaagcccggacgccggcgcgccgcccaccgggacctgggaaacccgacacccgagaccctttttatgcgtcgggaaatgagtcattcggctgcacagcccaaagggagggcaa

SEQ ID NO: 70109 - DNA, 122 bp, Homo sapiens
tctcagggcttgtctagggcagagtaaactgaggcacaggtttttttccccagccctggacggcctctgtagtcattcacacttactcgcacgtacctacacacacactctcccatgtgtac

SEQ ID NO: 70110 - DNA, 122 bp, Homo sapiens
cactgaaagcaaaacttcgtcctgtgagttgagcccaaaaactcccgggagcggcagaaacgaacggcctcctcctccaggaccatctttgttgccctagcacatccctggccccaggctgc

SEQ ID NO: 70111 - DNA, 122 bp, Homo sapiens
taccaagttcgtcttcatcctttgatcccctcttccaaaaactaccccctccccccgccacgtgtgtgaggcctgcagtggtgtgcacagaagccacccttgggcctgctgggtgacaggtc

SEQ ID NO: 70112 - DNA, 122 bp, Homo sapiens
ataggctcgaaggatgactcagctccagtgactaaagcaaggaggtggtggtggtaggaacggggtaggggctaaaaaggaagtgagttaacactatatctgatgaaggatgactccaaaat

SEQ ID NO: 70113 - DNA, 122 bp, Homo sapiens
gcccatggacatgagttcctcaccccgtgtccctcttggggaaacaggtttcaggagcgacgggtcttgtagcctggggcagccaggccacctgggtgcagctatgcctgaaggcctcctgg

SEQ ID NO: 70114 - DNA, 122 bp, Homo sapiens
acaaagggcgcccgcctttccagcgattctaacacctaccctcttacccgtgctcccctgcgcattgcctcctgggaaatgtggtttctaagaggcagagctctgcgacttagaactaccta

SEQ ID NO: 70115 - DNA, 122 bp, Homo sapiens
tggtatattacagggttcattgtttaattcattctcattccctccgtccctccctccctccggcacacagacagagtaacataaactccatgagggctgctttgcccactgctatgtcacca

SEQ ID NO: 70116 - DNA, 122 bp, Homo sapiens
gcctggcacagccctgagctctccctctgtctctgcccgtcgaccctgcaggttcacgtacggccacgcgggcaccatctacaaagacttcgtgtacatctcggggggccacgactaccaaa

SEQ ID NO: 70117 - DNA, 122 bp, Homo sapiens
ttttcggtacgtcacctgcgcaatccacaattgctccgagaagatgctgacagccccattcgcaggccccattgaccacgggtctctgaccgtgcaggacgattacatcttctttaaggtaa

SEQ ID NO: 70118 - DNA, 122 bp, Homo sapiens
ggacccccgtagaccccgaccttgcagactggctatgagcactcggggaggaggggcagccgtccacctgaggcctgcagcatctgtcctgcctgaggtcaaggttccacaggaccaaagcg

SEQ ID NO: 70119 - DNA, 122 bp, Homo sapiens
accatttttctcttttctactctgactttaaatacaggatgaaatgactcttagttttggcgtaatgcctttaaggtttagagaaatcatacctgcacagttgtgttttaacagggcctgtg

SEQ ID NO: 70120 - DNA, 122 bp, Homo sapiens
cgcagaccggctcggccataaaaaccttgctgagaatcaaagagagagaaatatatggaacggaagagtcgacgattttgtgtaaagtttagggtttgtattcatcgatatatatttacata

SEQ ID NO: 70121 - DNA, 122 bp, Homo sapiens
aaaagaaagcaagccacgagcatttatacacgaacatcggaccttattgagaactgaaagcgggagcgaggataaggaggcgttgctgcctcactttttgctccgcccctcgaggggcagtg

SEQ ID NO: 70122 - DNA, 122 bp, Homo sapiens
ccacagcggccggttttcgctcgaggtccttcatgtggttgccgtcagatggtcagatggcggccggggccggggctggggtcgctggacacttgacccagctggaggcctacggggaggcc

SEQ ID NO: 70123 - DNA, 122 bp, Homo sapiens
ggggctcctgataacaaagctgctctctaggatcccacagcccagaccacagagaggcctcgggcatcaagaggcaggactgggggccaggggtggggctgcttctatttcagaaaccctgg

SEQ ID NO: 70124 - DNA, 122 bp, Homo sapiens
ggctgtctggagagcagtcacctcaggatgcacagggctgggtttgcagggctcaggaggcgaggagtagataggcaggaatggagatgggacgggagagatgagtgagtctgaggcatctt

SEQ ID NO: 70125 - DNA, 122 bp, Homo sapiens
ttaatcactccccatgcaggaatgtagactcctgaagaatttttcctccttgagggccatcgtttcggcactgcagtctaattccatctatcggttaaaaaagacttgggctgccgtcccaa

SEQ ID NO: 70126 - DNA, 122 bp, Homo sapiens
ctgagaccggtggcgggagcctggctgagcactcactttcctcatccactttgagttcctcgttgagcctgatggcgtcggcaacctccttctcgctatggcctttactcgccaaaaacttc

SEQ ID NO: 70127 - DNA, 122 bp, Homo sapiens
tcccacacaatcatcagtttgccaggtgcacgccaccaaaattgggtattagggattagacgctcgccccggtgcttccggccctgactccgcccacttctctccgcccggaagcctgggga

SEQ ID NO: 70128 - DNA, 122 bp, Homo sapiens
gaacaaggaagagggtaacactctaggtggcgatgcacggagccccgtggcctggttgctcggcagggtgaggagaagctgtaactgccagagcctgagaatcgccccttctcaggacatgg

SEQ ID NO: 70129 - DNA, 122 bp, Homo sapiens
aggacggcgggcaggccggggtggggtggggctgggggcgcttgtgacggtggccgtgaccgcggcattaggtgatgcgtccttgaggggctgggggcttccgggcggcgagcggggcgcag

SEQ ID NO: 70130 - DNA, 122 bp, Homo sapiens
cagccccaccccatggcatagcagcaggcccctgggagccctgagcgctcattaaaggaacgcactttaatgacagccacacgccaccctgccacaagcagcgctcttctccctatgaagtg

SEQ ID NO: 70131 - DNA, 122 bp, Homo sapiens
agagaggttaacttactggattgaggaaaagaagtcgttagcaagagttccatagtaaagcgctaactctagctcatgtgtctggcagagcaatggtggaatgtggttagcgcatagcttct

SEQ ID NO: 70132 - DNA, 122 bp, Homo sapiens
cttgaaaagcatttagcattgccctcttgctgcacttggagataaccatgtgaacaagcccgagctatcctgctggaagatgagagacacatggataagaactaacaacctgcccaaccatc

SEQ ID NO: 70133 - DNA, 122 bp, Homo sapiens
tgggggacacagccctgacagccggaggggggctttctgggcacagagctgtctgggatccgccaaggcaacacaggaaggagtccagagctcacctgggtgagacccgagagctgtcagtg

SEQ ID NO: 70134 - DNA, 122 bp, Homo sapiens
ctttgtgccaagcattgttctagacacgggtatgtaaccgcgattgagagagacagaccacgcacagcctggattttattttaagagctattgggtgccgttggtgggtttgagtgagtggg

SEQ ID NO: 70135 - DNA, 122 bp, Homo sapiens
aatggcaggtaaacatttgttagcaggagactcatttggtgaaataaaattctcagccggcgcggtggctcacgcctataatctcaacactttgggaggccgttgcgggcggatcacctgat

SEQ ID NO: 70136 - DNA, 122 bp, Homo sapiens
ggcggcggggactattaacggtcacatggaggccgccgcatctgtgatggcagagcgggtcggtgggtccccactgctgtgtttactgctccttaatgtggtattgtttactcacaattaaa

SEQ ID NO: 70137 - DNA, 122 bp, Homo sapiens
accacataaaagcttagaaaacagctgcgctttgctccgagacctgccagccatcagggacgaatgagttttaaaggcccttactgctttgtgtcttgagggaatatcttttattaatcgtg

SEQ ID NO: 70138 - DNA, 122 bp, Homo sapiens
gccgggggcagcgcgatcccgcggggccctgtgagcccccagcgccacggcaccatggtacgcagggccctgcctgtccccccgcttatccgcccacctgccagctctgacctcccaggcac

SEQ ID NO: 70139 - DNA, 122 bp, Homo sapiens
cttcctgaaagatgatgctcccttgggccccttgaattttaaagcaagcaccattaccttcggtgaaccttcctgcccccagctctatgccagggttccggtttcagagctattcgccttac

SEQ ID NO: 70140 - DNA, 122 bp, Homo sapiens
tcctccttcttgggagttagagggacaagacagccgcaggcgcggggaggggtctccgtgcgctctcacagccgcgtgtggctctgtggtcgctggattccaaaagacggtgcgccggaaaa

SEQ ID NO: 70141 - DNA, 122 bp, Homo sapiens
ctaaagtcacccaggtagcagcacagccagggtttggaagcaggtggtctgggcactgagcgagcacaaagctgttcaatggacaaaagtcttccacatgtcagaattaatgtctgtgttca

SEQ ID NO: 70142 - DNA, 122 bp, Homo sapiens
gtgtacccaatattggtcccccacaataccaccacacatccactcagggatggatagggccgactgactgaaaaaagtttgaaaaagtttagtgtcactacatcctattatgtttccaagga

SEQ ID NO: 70143 - DNA, 122 bp, Homo sapiens
tgaatgggtaggcgaatggatggttagatagatgtatttatcataaggaattggcttatacgtgattatggaggctgagaggtcccaaggagacaagcagccctgtcccctgtagacagagg

SEQ ID NO: 70144 - DNA, 122 bp, Homo sapiens
ggcgaagggcgattcctgcaccgtctttaccgcacctgggaggagttctgggcatagctgcgtgcagctggcgacactttactcaatacaagaggtcttgagtgcgcaaggcctcatctggg

SEQ ID NO: 70145 - DNA, 122 bp, Homo sapiens
ccccgagaagaagtgggacaagtacaccatccgctaacacccgcctgccagagcggaaaccgggggtggggggagacactcatttctaggccccatcaccagtcacttgatttcgtgacctt

SEQ ID NO: 70146 - DNA, 122 bp, Homo sapiens
gtggccacccacggagctgcctgggcagctgcagagcagccctggaatgaatgttctggtcgctgcatctgggtgagtggcagacttcctggctgcctctttttctttttttatagcctctt

SEQ ID NO: 70147 - DNA, 122 bp, Homo sapiens
aaacatactccccagatgcaagcccctctccccagcagggaacctggcccctcgtccccccgacaagagtgtgctcccccacccagggtaggaagctttgggtttccaaagcaccaacccac

SEQ ID NO: 70148 - DNA, 122 bp, Homo sapiens
acagtggcggacgccggcaccaggggcgatggagagcaggcgacaccgagggtgtccatccggtccacccaacctggtgcaaggctctgggaagcgcgctgacaggatttcaaggccagagt

SEQ ID NO: 70149 - DNA, 122 bp, Homo sapiens
ggatgactggcttctggagccactatcttgggtcccactgatggtgcatgagcaagaaaccgcaacaagcattgagttgtcaggtggaagagggatccaagggaattgggaatgggcaggtg

SEQ ID NO: 70150 - DNA, 122 bp, Homo sapiens
ttcgtttctctctttccccttcccatgtccaagaagacacttgagttccacgggcaagagcgacgcctggcgatggaaccggccctccccggccctgctcccggtcctgcttgccgggccca

SEQ ID NO: 70151 - DNA, 122 bp, Homo sapiens
ggtgtactgtttttccagttgagaaggtcgacgcaggtgaagggcttgtacccaaaaacacgcttctccaccacgtgaccatcctcatctatcccagtataccgctgctctctcaggggcat

SEQ ID NO: 70152 - DNA, 122 bp, Homo sapiens
ggcggcgcaaaacacccgccgtgtacgtttcgcgggacaaaaaccacgcgcccgccgggccgcgctcaggccttcgccctcagggacttcggaaccgccccgtcctcaagatcgaaaagccc

SEQ ID NO: 70153 - DNA, 122 bp, Homo sapiens
gatttattcaactttttagaggctctccacagtttactgagtatgtgtgttttgtgtgtccgtttttgtggctgttaacagttgctgttgcaacttttctgtaaaccccaaagtattctaaa

SEQ ID NO: 70154 - DNA, 122 bp, Homo sapiens
ctcccccgctcggggcagctggcctggtggcaccctcaggggcagccagtgcgtggccagcggctccaccagtggccgggagccgaggccagaggcttgcgcggtgcgcacggagcagtgga

SEQ ID NO: 70155 - DNA, 122 bp, Homo sapiens
gcccttggtatggtacgcttgggtgctagaagtgacagtgcacatcagattgatgaggtacgtgtccactagggtgctacacagggtcctaaactctgggtccacactcaaagtcagaccct

SEQ ID NO: 70156 - DNA, 122 bp, Homo sapiens
ggcgtcaggcgctgcagtcagggaaggctcccttaggggctgggttcctggcgcttacgacgcagagaaggataagggcgatggtttcgcaatcccaccccctcctttgtcctcctccccac

SEQ ID NO: 70157 - DNA, 122 bp, Homo sapiens
ataggtccagcttgttctacatccaaataataattcaaccaatgatttgtgagcacctaccgggcactgtgccaagtgtggaagacacaaccttcagtaactcaagtttcccttcaggaact

SEQ ID NO: 70158 - DNA, 122 bp, Homo sapiens
agaataaaatgaataagcggagggccagcagagagactaacgaaaggtccccgaggtgcccgggaggcggagctgcaagaccacccgcacgcgcacgccgccgccctccttgcctgagcaca

SEQ ID NO: 70159 - DNA, 122 bp, Homo sapiens
gccggagatgtaagtaggttccaagtgctgtaggtgttggagagctcttgaaggcttttccgtggttagacttgtggtttaaaatttaagctcttcttgatagtagcatgtagattagatgt

SEQ ID NO: 70160 - DNA, 122 bp, Homo sapiens
cgggcggggcggagcgggccagggcggagctgccaggagcaggcccggatgtctgccgaccgccgaggacccgccgtcgcgctgacaacggcagcggagaggcagagccgcgcacgcgcaga

SEQ ID NO: 70161 - DNA, 122 bp, Homo sapiens
ccctcgccgctcattggctggggcggagggcaggataccaatcgcgtgggtcccgtcctccgccccgccctccggccgcgcatcaaggatctttgctcctcccgcggattcgatccgcgctc

SEQ ID NO: 70162 - DNA, 122 bp, Homo sapiens
aaaaatccctctaaaatatcaaacagcccttagagaaaccaagtaagcctttcgtttgaacgcctgttactggctcttgtgacccagtgaagaatgatttaaagcaaagtactttgtgtcag

SEQ ID NO: 70163 - DNA, 122 bp, Homo sapiens
ctcacctttggaaaacagggcggccaggctgatgagtaccggcgaccagtggtgccacagcgtccccatctcagacgggcacatcctggagacccggagcgcagatcctccgctccccggcg

SEQ ID NO: 70164 - DNA, 122 bp, Homo sapiens
cctggggaagggagaaaagtggccctgaggacaggcctggctctgtcaccccctcttccccgccttctgaggaacccccaccccagtccaatgcctcagcctccgcacctggttgcttcccc

SEQ ID NO: 70165 - DNA, 122 bp, Homo sapiens
ctgcaggacctccaggctccaggaatttggaccgagtggtagagacatcgccggcagagacggcaatcgccagcttcctctctgtgctgtcttgtgattcaaagcagattctgctccacttt

SEQ ID NO: 70166 - DNA, 122 bp, Homo sapiens
gtgctgggccgggcgcagggggtcctgttcgactgtgacggggtgctgtggaacggcgagcgcgccgtgccgggcgccccggagctgctggagcggctggcgcgggccggcaaggcggctct

SEQ ID NO: 70167 - DNA, 122 bp, Homo sapiens
tctgtcttccaagagagacccgtgggaagcaggcagtgcctaattggttttccccaggttcgtgaggattctgttaatttgtgttaatcattttgttaattttgtgggtggggcggtgtctc

SEQ ID NO: 70168 - DNA, 122 bp, Homo sapiens
gcagctttttccctaagaaaagttgacgttaacccttaggcttcagcccacctcacccaccgtgcaaatcagacccttgtacccccatgtaagaagctccacgcgccccccaccaccaccac

SEQ ID NO: 70169 - DNA, 122 bp, Homo sapiens
tttccataccaggaaccgctttagccagcctggggctgcctttagagtcgctgctgcttccgccttctctcctggggtttgtgcgccctgactggcagcagggggttgggccgccagacccg

SEQ ID NO: 70170 - DNA, 122 bp, Homo sapiens
ttcaaatgagtacatatattgccaggcctcaacgagaatgaatctccttcgagacaggaacgggacaatgccttcaatcagcaacattctgtttttacagtctatttccctcttattctctg

SEQ ID NO: 70171 - DNA, 122 bp, Homo sapiens
gcccctcctgtcccctctcccgtccaagctcacaccacccagcaaagctgccctgcctggcggtcctgcacacccacctgcgctgttgtgatgctcacctccacactttcgctcatgtgcac

SEQ ID NO: 70172 - DNA, 122 bp, Homo sapiens
gctcagcactggggggctcttggtgcttttcttgcgaatcgccatggtggggccgccgcccgcgcctgcaggtgctccgccccggttctgctcttcccagctgctcaccgactcgccgccgc

SEQ ID NO: 70173 - DNA, 122 bp, Homo sapiens
taaattcaataaaaaacgagccccatgctgcatttctttcttccatgctcagcagtggcccgagcctacgccagagaacggggccaagctgcccttctcccccaaagggagcccgacacagg

SEQ ID NO: 70174 - DNA, 122 bp, Homo sapiens
taaccagaaggaactgtctattccagaagctgggcctggggaactgggttgaagcagccacgggaaggagcccttttgcctgtagctgagtcttattctggtcccttagatgtgtcctcgct

SEQ ID NO: 70175 - DNA, 122 bp, Homo sapiens
ctgctttggtctgtttacacatcaggatttcatgtaagatttcattttctgaaaggtatccgatgctaaagaaagttaaaacatctgtttccttctagctctaccaccctctgatttttttt

SEQ ID NO: 70176 - DNA, 122 bp, Homo sapiens
ctgccccactgctcctcacccagctgcctctgctccagccccggtactactcagtcagctcggcacccagcacccacccaggagagatccacctcactgtagctgtgctggcatacaggact

SEQ ID NO: 70177 - DNA, 122 bp, Homo sapiens
ctccggcctcccacctgctgctgctgaggctgctcctgcagcaggggccatcttgttgctcggcctcctcttcctcctcctcgtcctccgccgcccagtcgctcgttgtcctcgtccccttc

SEQ ID NO: 70178 - DNA, 122 bp, Homo sapiens
ccccgggacttgcagcggtctcagctccctccgcaccagagccgtctagcgtccgggcagcgtttgttgctaagcaacgggcccgcgcaggttccatttccggtcatctgttccttctgggg

SEQ ID NO: 70179 - DNA, 122 bp, Homo sapiens
gtctctatgtcccctccacctggttctttttgtcagacgagtcactaagtccaggccacacgcaagggatgggaatgagactctgccttttgaggagtgctcaggaatgcatggccgcattt

SEQ ID NO: 70180 - DNA, 122 bp, Homo sapiens
ccgctcccatggccccggaccttggcaacgctgcgcagcgcgtcagtcaacgtcacagggcgtgggggtggctagaggccccagtggcctctgatctcacagagcagatcagcgcgggtgtc

SEQ ID NO: 70181 - DNA, 122 bp, Homo sapiens
cgtgcgcagcgcgtgggggtggcccagggcagcggggggcgggcgccgcggagcgctgtgcgcgggtgtctgcggggagcgcgcacggcaagtgagcggggacctcgggggagcggggctcc

SEQ ID NO: 70182 - DNA, 122 bp, Homo sapiens
agttactctcggagcctgtaaggcgagatggcgtgaaggacgatgtcgctaacctgcccacgacagagtaggtccccacaccagggaggccacactcctcattcatcttcacatcccgagat

SEQ ID NO: 70183 - DNA, 122 bp, Homo sapiens
cgcaattcagaaatgttttcaagcatctggggcattgctatggttacaactacaggcctacgaagtcaggtgcgagaactgcttggagtcctggtgaggacggcccctcctcgccatccggc

SEQ ID NO: 70184 - DNA, 122 bp, Homo sapiens
gagtttgtttgaaggtctcgcgagatcgagtgagtacggctcgccaagttggagcgctctcgcgatagacacagcaactattcagctgcgaggggacgggagaggtggtgagcactctcgcg

SEQ ID NO: 70185 - DNA, 122 bp, Homo sapiens
gtccacgctaaaatcatcttgttggtctctttggcgctgtcagcgaccagtatcagcgcccggcttgtccccgctgcccgccgcgtccctggcccggatgtgggaggcgaaggcggtgagca

SEQ ID NO: 70186 - DNA, 122 bp, Homo sapiens
tggctgcacaggctgggagggggcggagggtcggtgggtggttgcgatcctcacggccagcgtgggggcattcggatggaattagcttaagtgaatggggttttaggaaatgtccccaaagg

SEQ ID NO: 70187 - DNA, 122 bp, Homo sapiens
tggaaagtattggttttcagcaacagggacaacactgtagaggaattaccagctggaaaccgacttattcatgttaatgtagcataatatataacaaggcatcaggctttccttggcctgaa

SEQ ID NO: 70188 - DNA, 122 bp, Homo sapiens
tagccatcatctttatttatgagtattctaaacaaagaagctggcaaatgtggatacagtcgatgtctcccaggccacaccaaccagggggtaaaaatagggtcaccatgtgttttatgcag

SEQ ID NO: 70189 - DNA, 122 bp, Homo sapiens
cagagtgtggtctccacgcaagaggctggagcctgcagacccgggagggccccgggctggcgtcacatagcacagcaatgccagcagcagcgcagtctcaggctctccccgccccgatgatt

SEQ ID NO: 70190 - DNA, 122 bp, Homo sapiens
cttcgtcccaccgcgattcaaactgcccattcttatcttttttgattgtagctgttaagccgatagctcgcggtagggaaggatgggccttctctacaagccgagaaggctcagggagcttc

SEQ ID NO: 70191 - DNA, 122 bp, Homo sapiens
gttctaggctatagaaatgcaaattccatcatcaaaagctcacattcctggaggaggtggcgtggcaaataataagcacagttgggctaccccctttgggtcccctacctttgtatgggagc

SEQ ID NO: 70192 - DNA, 122 bp, Homo sapiens
gggtttgtttttcagtggggccaggagggcaggaggccaggtgacccatggagagccacccgagggggaagctgccatgtcttcatggtgcccactctgccccctgagtttggagtcctaaa

SEQ ID NO: 70193 - DNA, 122 bp, Homo sapiens
cggctgcccgccgccgggttgggggatgtgccgaagggcgggcctccctgcggaaagcgacgtcacggccgctcctgcagtgtgaatgaatcaaaacgcccgggtgaccgcggcctcccggg

SEQ ID NO: 70194 - DNA, 122 bp, Homo sapiens
tacccctctccagctctcccctccctacacatccctcaaaccgtcccgctgtaatgcacccgccctgttccttggtaacttgaagctgcttatagaatgtggagatgggggtaattgaaagg

SEQ ID NO: 70195 - DNA, 122 bp, Homo sapiens
gccgctggattgcgagcaggcccaggtgcggggccaggtgggcgttgtcgcagccgggaacgcccagccgctccagctgcccacaggacaaagcccagggttccccggccgggcgcacgcct

SEQ ID NO: 70196 - DNA, 122 bp, Homo sapiens
aattgtctggcggggccggaagagccgcgtgggctgctgaaagcgtcgggaggaggtggccgcttcgcccagcagctgccgccggggatgtttgcagattacgtcagcgctggcgagcaggg

SEQ ID NO: 70197 - DNA, 122 bp, Homo sapiens
gccgccgtgttgaaccaggatggggaatgatcccattcctcaggtattcgtctgggagaccgtaaaggattgcttccagacaggaaggacgtctgtcttcctaaagagtgtctagcccaact

SEQ ID NO: 70198 - DNA, 122 bp, Homo sapiens
agtatatacaattcaaataagatcatccttccaaatatactctgtaagtgaggcgaaggtcgctgcacgcttgagtgcacgtctttccgcataggtaggacgctcaagtcttaccgggaggc

SEQ ID NO: 70199 - DNA, 122 bp, Homo sapiens
tgcagatattctctcccaagtttagtatctgtgaagattgttctggcctagctagggaggcggacatcacaagtgagctgaagtccagaagcaaagaaaagcacttcttcagagaaacagga

SEQ ID NO: 70200 - DNA, 122 bp, Homo sapiens
tctagaggtttttcttcttggtccttcctgagacctcttggctcccaagagcctcttgatcggggcaggaatgagggtgccccagggtgcgagagtcgtggatccctgaaaagaggaggctg

SEQ ID NO: 70201 - DNA, 122 bp, Homo sapiens
aggattcactgagaaggtccctggggacagccccgccgcggggggaggggggggggggagcgcgccggtccccgcgctcgaaactcgcccgtacctctgcttcatctgcacttagttttgtt

SEQ ID NO: 70202 - DNA, 122 bp, Homo sapiens
gagctgctgcccccgtgtggcctggtgcgggggctcctcctgctcactgggggcgcgtcccggtaaaccagaacctcagcccatcaactcactcgtggggttactgaggaggagaatctttg

SEQ ID NO: 70203 - DNA, 122 bp, Homo sapiens
ccacaaatagcaaggcagggaccttccccaggggcatctgggctcccacctccagagaagcgtccccctggaatctttcttttcctgacaacactagatgcctttctccccagccccgtgac

SEQ ID NO: 70204 - DNA, 122 bp, Homo sapiens
cagagcgcactgcggctatcagagatggggtctccggatctgcgacttccacgaggcgctcgcgagggggaagttaggaactggtttcgcaaggaaggatgcggttggcacacagtgcgagg

SEQ ID NO: 70205 - DNA, 122 bp, Homo sapiens
ctgtctgtggttgggggtgtagctcagtggtagagcgcgtgcttagcatgtacgaggtcccgggttcaatccccggcacctccaccagttttgggagtgcgcactttctcctctcaatggac

SEQ ID NO: 70206 - DNA, 122 bp, Homo sapiens
attctagtctggctgattttctgttttctttttatacaattgcacgaaggctccccaagtcgtcaagtttcccttgcttggcatgttatcctcatacacagaatcctctctgtgtgctagtg

SEQ ID NO: 70207 - DNA, 122 bp, Homo sapiens
ggcgacagcggcgtctggttggagccggcgccccctgggaggcggcgggggcggaggctgcgcagcgggtgaatgagcaccattgtatgccccgccacctgggctccccgggctgccaggac

SEQ ID NO: 70208 - DNA, 122 bp, Homo sapiens
ccttacctccattttgtagtagtagcccaaattctccttggtaattaggagcaatgatcccggaaagtatactaactcccttctttacctgttaattcagatgcatgaggagctcaaagtgg

SEQ ID NO: 70209 - DNA, 122 bp, Homo sapiens
gccccgacagcaggagcctctgatccaccttgttccagctgtcttgaggaccatctctcccggcagcataccgtgtggcttcacactgctctgcctctctgaacctcggtttcttcatctat

SEQ ID NO: 70210 - DNA, 122 bp, Homo sapiens
tctatctctttgggccccagttcctcatctgtaaaatggggataatgacacaaagcttgccgggttgctgtcaggattagataacgtgtatgctttggcgcatgggaagtcacttgggacat

SEQ ID NO: 70211 - DNA, 122 bp, Homo sapiens
tgcgcgccgacgaagcccgggaaggcaggcgcgcgggttagaacgcgccagaggtcggcgcgcgcacacccgcaccgccccgaccccaggtagtgaggccagtgattccgagtgtgtgagga

SEQ ID NO: 70212 - DNA, 122 bp, Homo sapiens
ttttgtgactgcagaggcacagcgctcacctgtacagaggcgaggtgacctgcaggaagccggggccaataaagtaatcttaaaatcgttatcagtatgcaatgctgtttgagtttttccat

SEQ ID NO: 70213 - DNA, 122 bp, Homo sapiens
atcacgaggcggtgagtggccatggtggcagcagggaccacagaggactctggacggggacggctgcttcccaacactcccagctttataatagtgtcttcccagcccccacccaccccagc

SEQ ID NO: 70214 - DNA, 122 bp, Homo sapiens
ttttttcttttttctctttgtttctctctttttttcatttgttagcttgtcagtaatgaccgggtggcggatacatgtcaagaaaactaatcaccttctaacaggattaagactagaattaa

SEQ ID NO: 70215 - DNA, 122 bp, Homo sapiens
cgggtcgtggagctggtgacctgcaggcttttcccctgacctctgggactcagagagcctcgggttctgggtcccccagagcacagagccggtccaggcggggggcggcccccgcgtccctc

SEQ ID NO: 70216 - DNA, 122 bp, Homo sapiens
aagggtgtatagggcatccacacacacacacccatgcaggcctgcctccctccattctgccggggtttcccaggagtggggaatgctggcagcagttcctccattcaccttctcctgtccat

SEQ ID NO: 70217 - DNA, 122 bp, Homo sapiens
gaatgtggctgtgcaccgaccgggagcacacgtgggggttagtggtggtttaaatggccgcggagcagcagccggaccggcagggtctcggcgggttggtgagtcctgttttagtggggagg

SEQ ID NO: 70218 - DNA, 122 bp, Homo sapiens
cccagatagcagcagccaccctgtagttggccacccccaggggccacagccaattatagacgtttctgtctcccagctgtggaacctcaggcaagcctttgaacctccttgatctcagcttt

SEQ ID NO: 70219 - DNA, 122 bp, Homo sapiens
tcaggctcagctgtgtaggggcccatctcacccgtctttgcctccacagagactgggctgcgtcgtttcccatcctggatcccaaagagcaggaacttgtacttgcgggagggttccaggtc

SEQ ID NO: 70220 - DNA, 122 bp, Homo sapiens
gggcggacgttttgccgccccggcgacgtcagcgcgtccggcgttgcttggctaccccgccgttcccccgtcccgctgctgctcacctccccgggtgaaactctgacgcagtcaccgcgggt

SEQ ID NO: 70221 - DNA, 122 bp, Homo sapiens
gtgtgccagacgcgcagggtgggtcggtgcagcccagggacctgtgtctgtctttcagagcgcatcactcaggtgaggaccgacatctacgtcaccagcttcggcccggtgtccgacacgga

SEQ ID NO: 70222 - DNA, 122 bp, Homo sapiens
ctcctgccttggcttacatcttgctttttcttctttttctgagacaagatgtcactctgtcgcccaggctggagtgcaatggcgcaatcactgctcactgcagcctcctcctcctgggctca

SEQ ID NO: 70223 - DNA, 122 bp, Homo sapiens
tgattaatgtggttatcaagcctccctgaaactatcaactctgaaccatacctgttaagtcgggtagagcagattctgaggcctcagtgcacaggcagcaaagtgaagtgtcctgatctctg

SEQ ID NO: 70224 - DNA, 122 bp, Homo sapiens
ctgctatgtgccagggcctgtgctacgcagtgggataacaggggagaacaagacaggcagcgtgcctgccttcaaagaggcttctttctattgtggggagacagacagtaaatacttttaag

SEQ ID NO: 70225 - DNA, 122 bp, Homo sapiens
ccccctcccgaaaaaggggtctccgcagggcctggatggtacggaagttcccaggacacacggatggggcacctcggagatgaccccgggaaccggcctgcggggctgtgccacgggcaggc

SEQ ID NO: 70226 - DNA, 122 bp, Homo sapiens
ctcaatggcattactggatccaggttaggattatctgagaatacatttatctgcattttacggaaggcaaccgaggttcatagagatagtgatttggccagcgtcacaggcccagtaaaagg

SEQ ID NO: 70227 - DNA, 122 bp, Homo sapiens
cagtagcactcaaccgttaatagggaacccagcagagcgctggaggctcattagaggaatcgttagagccggtcgttaacgcatcaacctctggaaaggacagggaaacaggaaccaccgtc

SEQ ID NO: 70228 - DNA, 122 bp, Homo sapiens
aagataaaaacaaaaccaaaaaaaaaaaaactataacacccggagggtgacccaaatcaccgcaagattggggaaaaaattttaaacaaaatcaatcctgaaggagtaggggagagcggaga

SEQ ID NO: 70229 - DNA, 122 bp, Homo sapiens
tgtcggtgcccagaagtcacaaccagctcaagggtgtgcaatgcaggggggtgtacccagcgggtgggggcgccgcagctcccagcctcgccctcaagcccggccctttagcagcctgtgac

SEQ ID NO: 70230 - DNA, 122 bp, Homo sapiens
tggagggctccatggagcggccgatccatagggtgcggggccgccgccgcccgcaggagccgccgccgcctattgttcatgcgcctccgcagagctgggaggacccccccccaacgacggcg

SEQ ID NO: 70231 - DNA, 122 bp, Homo sapiens
cgtgagtgaggtgcacccctcaacggccacctgtccccgccctaagtgaggtgcacccctcgacggccacccgtccctgctgtgagtgaggtgcacccctcaacggccacccgtccccgccg

SEQ ID NO: 70232 - DNA, 122 bp, Homo sapiens
actcgacaaggcttccccttacgagcagtgagacctaggctactttcgaacgcttccttccgaacggtaagccacttcgctctcgggcaggacaggtcctccctgcagagagagacaactca

SEQ ID NO: 70233 - DNA, 122 bp, Homo sapiens
cggtttgtaaactgtaacgggaaacaaaggctgagggcaggaaggggcagcagcggccagcgtccctagaccctcagacccctcagacaccgtctggcgtcgggctccatcttcttgctggg

SEQ ID NO: 70234 - DNA, 122 bp, Homo sapiens
tgagtcagaatgaccccaaggcctactcccatccccccgaaaaaagtgtttggttgagaacgaacagaacttgagtaggtgccttgcaaaaaaaaatagctgctttgaaatcataggggagg

SEQ ID NO: 70235 - DNA, 122 bp, Homo sapiens
tccaagagcctccctggcccccagggctcagagggtggcagagcggagagcgaaggtggccgcagccttcccggccccacagccagcctggctccagctgggcaggagtgcagagctcagct

SEQ ID NO: 70236 - DNA, 122 bp, Homo sapiens
aaaccttcacttcactgtcacaatcgttctcgaagagaggaatgctggggtgattatcctcggataaatgacttacagcagtcccaaaatattcaggccctggtttccaattttgaataaca

SEQ ID NO: 70237 - DNA, 122 bp, Homo sapiens
tttcctgcagcggccgctgagacgcataatgatgatgtagatgtggcttaaaatgatcatcggtgggggcaggactggcctgtcatgaaatgtcataatcagctgatatcgctggaacttcc

SEQ ID NO: 70238 - DNA, 122 bp, Homo sapiens
tctgcagagcgcccagttcctcttcggccactactactttgactacctggggaacctcatcgccctggcaaacctggtgtccatttgcgtgagtgtggatttgccccagagctggcacggaa

SEQ ID NO: 70239 - DNA, 122 bp, Homo sapiens
acacaaataaaactttccagtggagcttgctggagcacttctcgaattcctatccagcaccgtcattctacaatctgttttctttcaaagggaatatatttcaactgagatttttcctcttt

SEQ ID NO: 70240 - DNA, 122 bp, Homo sapiens
tcatccgagccgcggctaccgcaccgcctcctccgggaagccttccacgaccaccactcacgcttcattctctgcagagcccttgtgactccgttgctcgcctgtcatccctctcctcttac

SEQ ID NO: 70241 - DNA, 122 bp, Homo sapiens
tagaatgaagccgattgaaagttaacttcaccctgaagaaactcctcctggcgtttgcaacgatctcctgtatgtctcacgtccagcttgactcaaaaggactctaaagagctggagagcgg

SEQ ID NO: 70242 - DNA, 122 bp, Homo sapiens
ggctcaccccacgaaacaaaaacaggtcccccaaacagtacgtgctgcaaagctgcattgcgtagagcagaaagtaaatagcacgagaattcagagaagagcatgagactgggctggggaca

SEQ ID NO: 70243 - DNA, 122 bp, Homo sapiens
ctgcactttcgctcactcattaattttggtatttttctcacggtgcctcagcccctgtcacggctgccatggcaacaggaggcagtgtgctcagtgccaaaatatctgatcaaaaaataacc

SEQ ID NO: 70244 - DNA, 122 bp, Homo sapiens
tgtggccggcaaggggctcaggaggtgagtcccttgcccacacctccaaccccgctggcccggtttataacatggacagccctgccctctagtgtctgcaaccgggagccctaaggcgccat

SEQ ID NO: 70245 - DNA, 122 bp, Homo sapiens
tccttagtttcaggatgtgaattatacagattatcattagcctaggaacactcaccaacacgatggcttaatttctctagcttattttctaccaaaaacaaggttatgaggggaaaaaagag

SEQ ID NO: 70246 - DNA, 122 bp, Homo sapiens
acttctctgtagcgcttagtaaccagatcctaggccactgcccatctcatactgcctgtgcgtgagtataggacagagaggagttttggtttgtcctgatgtgtacataaaggtacatgaca

SEQ ID NO: 70247 - DNA, 122 bp, Homo sapiens
ttgctgtgggcaccctctttgctagggtgccaaggtcggagctgatattggttatctcatcgggccttgcagcagcgccgcagatattctgcctcccattttgcccgcggggacgccgaggc

SEQ ID NO: 70248 - DNA, 122 bp, Homo sapiens
gacccatgtccaaattacatataatggatatgactagaagtttgttaggtgtactagacacgaaggtggatatatggagagagaactttgtaaaggcttcctgaagcccaatatgaacatct

SEQ ID NO: 70249 - DNA, 122 bp, Homo sapiens
taacccagtggcacaaacctgggaggagacgccgcagaacgtcctgccctggccgttgtccgcagcaggggaatcacaaaggattcattttccttgcgactattttgattttttaaaatttc

SEQ ID NO: 70250 - DNA, 122 bp, Homo sapiens
actggcttcatccaggagagctgtgtgcttacgaagagtcagctggcttgtccctaaaaccggttatgcccattgtatttattattgaaattgaaacactaaatttacatataatttaaata

SEQ ID NO: 70251 - DNA, 122 bp, Homo sapiens
gggtttgctaacctgtgactgtcaccactccatgctccagggcacctggcccaagggatccggcctcttgggcacacaaatccatatggagccctgaaggaccagacagggaccttgccttc

SEQ ID NO: 70252 - DNA, 122 bp, Homo sapiens
aggaagctcaggttcttaaatgaatccaagccctaaatcccagttgaccccaagcagcaccgcccctctccgtgcctcggcagagctgtctacgaaatggattcccctccccacaccccaac

SEQ ID NO: 70253 - DNA, 122 bp, Homo sapiens
attccagcagcctcagtttcatagatcgttttcttatgcacattagataggacagtataacgtcctctcatgggccaatagggtgaatcaaaagctgcatagtcagtgcatctcaaacttaa

SEQ ID NO: 70254 - DNA, 122 bp, Homo sapiens
gggacgcggtctcgggactgacggcgcaggggacgcgcgggattgacggagcgggagatgcggtcgcgggatgggatgtgctccccgtagctcccggcgtggctgcagtgggccggttgcgg

SEQ ID NO: 70255 - DNA, 122 bp, Homo sapiens
tcacgcactgcagcacggtaggcattctgcctgggacgcagagctctgggtcagcccccgcgactgggcagaggacctccttgaagagggcagacacacacccgtgagctcaccgttcgcca

SEQ ID NO: 70256 - DNA, 122 bp, Homo sapiens
taccacgtggtcggaagcagcctcccacaagcggctctgactccgccctccgcttcggagcggctcacctggcctcagaggtgcagcgctaactccacctggggcttcgttctgagctgcgc

SEQ ID NO: 70257 - DNA, 122 bp, Homo sapiens
gttggaagggtccagggaaatggggtcactcggggacgtgggccgcctccgggcgggcaacgcctgagaagcacgcagcgctcggcgcccagtgcgcccccacgagcgggcacggcgccggg

SEQ ID NO: 70258 - DNA, 122 bp, Homo sapiens
aataataattgattgtgcatgggaatatgagagctgtcatgggtgatggttagtcaaggccgacttggaaggggagaaaccaaggcaatgtatgtctagcagatagtgtactgctggtttcc

SEQ ID NO: 70259 - DNA, 122 bp, Homo sapiens
ctctcctcccctcgatccctcctcctcctcttcacctccagcgcccagctgctcgctgagcgcagttccgacccacagcctggcacccttcggcgagcgctgtttgtttagggctcggtgag

SEQ ID NO: 70260 - DNA, 122 bp, Homo sapiens
gccaccacacccagccagcgaaatggctatttctagtgggagagccaatatccaaagattcgtttgtattcattacagttattaccaaatatattggcccactttcttcctgaggttttctt

SEQ ID NO: 70261 - DNA, 122 bp, Homo sapiens
aggtcttcttcaccgacaggaagtgccttctggtgcctgcacgttttaactaagatgtgtcgccaattacttttaattactgtcgtccacgctattgtcatcagcatttcacaagtttctcg

SEQ ID NO: 70262 - DNA, 122 bp, Homo sapiens
aattaaagactaattcagaattttcaagtgatagtaaacaactgctatctcaaacacatacgatataaaatgaaaccactggtgcctaactgccagttctttcactcaaacctctgctgtga

SEQ ID NO: 70263 - DNA, 122 bp, Homo sapiens
gaacaaattacaatgcactcatccatgaacagaggtcacggcaatacagatcctcttcaacgcgcatgcacacgacacccctcctagcacccatcaacacctacggcatgcacacactgcag

SEQ ID NO: 70264 - DNA, 122 bp, Homo sapiens
tcattatatgccaggcattgaccagttgcaattttatggtccagaattaatattattattcgtaaactagctataatagagtatatacagtgctgtgggaatacaggggaagaagcaattaa

SEQ ID NO: 70265 - DNA, 122 bp, Homo sapiens
gcccgcctcgccagtcttggcccgtgtccgcccagcagttccgggtccgggtcgggtactcgttcccagccttggaaaaattccctacctgggggctgtagtagaccccctgcgagctgagc

SEQ ID NO: 70266 - DNA, 122 bp, Homo sapiens
ggcccaggtgctaagcccctcactgcccggggcttgtgggccagccagctactcccagtgcggggcttgccgagcccacgcccacccagaactcaggctggcccgcaagtgtggcgcgaagc

SEQ ID NO: 70267 - DNA, 122 bp, Homo sapiens
aggtggctcaaaactgtggctccaggtactactcctccaggcgggctgctccctggggcacgtgttctcagtccaccagtgggccatgccgcatcagcccacctgcttcctggcacatggga

SEQ ID NO: 70268 - DNA, 122 bp, Homo sapiens
tcagcgtctctgggcccccactgagggggcgtgcggtggccggagagtgcgctgcgcatgcgcctggggaagaaagaagcggccgagcgctgcgcttgggggaggggatttcacgatccgct

SEQ ID NO: 70269 - DNA, 122 bp, Homo sapiens
gcccggggctctcggtgcagcaggccgggtggccacggggcagagccggaggaccagagacgcccgagcgggagggacccggcgcgccttggcctcgatggcctgcgccctgagcggcgcgg

SEQ ID NO: 70270 - DNA, 122 bp, Homo sapiens
tctgtaagtggtctcttggctccgcgactgcagcctgcaccgcctcgcccactcctctcgcgcgcagcaagccccgcctcctccgttacgaaagagcgcttctggccccacttgctctcggc

SEQ ID NO: 70271 - DNA, 122 bp, Homo sapiens
gacagcaatggatgcagtctctctctctcttttttgaggcgaaagcctggcttcccttcccggatcggccgcctgtgggactcgagagacctgtgcacgcaggggacgcggcggtgcccggg

SEQ ID NO: 70272 - DNA, 122 bp, Homo sapiens
atcgggtcactcccacccgaatactgcgcttttccgacgggcttaaaaaacggcgcaccacgagattatatcccgcacatggctcggagggtcctgggcccacggagtctcgctgattgcta

SEQ ID NO: 70273 - DNA, 122 bp, Homo sapiens
cgggcaggggtgggaccttagctggagcggccagggaagcgctcactgagatgacatcagcgaggactccaggccaggcaggggacttggttgtggtgtcgggcggaagagcagtcctggca

SEQ ID NO: 70274 - DNA, 122 bp, Homo sapiens
cgtgcaggtggcacctgctactgaggcgctatcgggctggcggggctccctggagcggaacgtggggggctccctgccacatggcctgcttgacagagctgcccctgtcccctcctcaacct

SEQ ID NO: 70275 - DNA, 122 bp, Homo sapiens
gcaggagcaccgggaaggccagcacgtggctgcaacgtctcccgccttcaggacgcgggccgaggccaaggcacctggaagcagagtgtccactgacggataacagactcaccggttggcca

SEQ ID NO: 70276 - DNA, 122 bp, Homo sapiens
ctgctcccaaggcctccctgggctgctgtgggctcctggggaggtggccctcgtggcccacgctccatgccagtggctcacgctctgctcctggctaccccagagggagttgtcacgctaca

SEQ ID NO: 70277 - DNA, 122 bp, Homo sapiens
tggttcacagaaaaaaggcaaaactggttatcctgacttcaagctccaacataaactgctcgctttctccgggaaacttgccccgccacacacacttgactgcgtggccagttctttcgaag

SEQ ID NO: 70278 - DNA, 122 bp, Homo sapiens
tgcaggaggagaagctgagcaactaccggatggagatgaaacccttgctgaggatggagacgcatccccagaaaagacgctacagcaagggcggcgcctgccggggcttgggggacgaccac

SEQ ID NO: 70279 - DNA, 122 bp, Homo sapiens
ggcggggacagcagggctccgggcaaggaggtctggatgctgagggcggtccctgaggggcgggcggggcccgaccggcgctctgtgtggccgaggccatgaagccgcagccgcccggctag

SEQ ID NO: 70280 - DNA, 122 bp, Homo sapiens
cgggcggcgcgggtcgggccaccagacggggggcggcagcagaggcggggcggggcggggcgcggcgggacagcggcccctttgtgcctgagccctttgtgcccagcccgcgcgccccgccc

SEQ ID NO: 70281 - DNA, 122 bp, Homo sapiens
gaaccctgaggctccaacaaggacagtcttgtcccacaagagttgtccagtgcttggccacgctctgcaccaccccaggccctcagcccttcagcccccccggcttctcttgctcagaagaa

SEQ ID NO: 70282 - DNA, 122 bp, Homo sapiens
tgtgggcaggggctgtggtgggcaggcaggaccagtcacctcatcttccaacaggggcttcgcatctgaccacacctctccctgatgcaccaatcctctcaaccacacccccaccaaggcct

SEQ ID NO: 70283 - DNA, 122 bp, Homo sapiens
gtattcctgggagcaacgttccgtattcctgggagcaatgctcggtattcctgggagcaacgttttgtattcttgtttgcaacgcttgttattcctatgagcaaagttcggtatccctgcga

SEQ ID NO: 70284 - DNA, 122 bp, Homo sapiens
tcttcatctgtaaagtggaatgataataggacctgcctcatggggctgtcctggaacaagcgagtgcttggtagtaagtgcaaagctcaataaaatgccattgctactgacataggtgacac

SEQ ID NO: 70285 - DNA, 122 bp, Homo sapiens
tgactttcggacctctccccaatataaaaatgaggagcccgacggaggtctatcagggagcgtgggggaagagaccgtttgatccaatctctgcttggcgtctcctcctcttcttcactcag

SEQ ID NO: 70286 - DNA, 122 bp, Homo sapiens
aggctgagctggcactacagcccatacatcatcaagttcacggacacccctagatggctccgtgacacggtcaaggtccttgggaactcccacacatttctatactcggcacaccgatcacc

SEQ ID NO: 70287 - DNA, 122 bp, Homo sapiens
gacaaagtcccagactgtgctgtaggaaatgtggccctcccccgcacccccccccacccccgactgcggccttgccccaagcctttggttacccaagaatttaaaggaagtgaatttcatct

SEQ ID NO: 70288 - DNA, 122 bp, Homo sapiens
tcttctctgggtggggccgactggtcctgtctccatctagaagagcacgtggagggagggcggaggcatctttgaatcaaaggactgcagctggggaggaacacaggacacagacagcgagc

SEQ ID NO: 70289 - DNA, 122 bp, Homo sapiens
ttctcagatcgaattttttggctacattgatactcttcggctctgtccttgccagaagttcggaaggattccagcgccccacaccttgcttgattcaccctcatcccctcccctaactggag

SEQ ID NO: 70290 - DNA, 122 bp, Homo sapiens
ctctggggaggaaggttggaggctaagtttgcttgcagggaatgggtgcggttgagcgcccgggcctggccagagcctcccagtttacatcctgcttccctgttgccaatccgactcccggg

SEQ ID NO: 70291 - DNA, 122 bp, Homo sapiens
ggcctggctgagaagacgctggagcacagacctgaattcactgaggcagcgtcgtgtgggcgtctgagggaacagtgttccaggcacagggaacagccagtacaaaggccctggggtaagag

SEQ ID NO: 70292 - DNA, 122 bp, Homo sapiens
cctcttcatcgtaggggttgggcggggcgcgtcggggactgaaagtcgtttcggggcgggcgcccgtctccccgcggccgggtccgcatccaggcgccgccgctacggcccggccccggccc

SEQ ID NO: 70293 - DNA, 122 bp, Homo sapiens
ctgagagaggccagcacgctctctcaccccttcccactgtggctcctgccatggagcagccgtgcccagcccctgggagggttcacctggtactccctcaaagtgcccagggcctccccgtc

SEQ ID NO: 70294 - DNA, 122 bp, Homo sapiens
ggtgtgtgttaacaggttcttttagtgcatctatagccaaaactgggagcaatgcagtcccgcgtacagtcgcaagatacttttttgtcttatatcttttgacatttattgggacctctccg

SEQ ID NO: 70295 - DNA, 122 bp, Homo sapiens
ggcggggttagcgggcgtggcgctgccggggacggtcggcctagcttttcgagctgtgtacgtttgcgtaaaggctgggcggcgatagaacgtttccgtggaccagagtcgtggctgttgtc

SEQ ID NO: 70296 - DNA, 122 bp, Homo sapiens
cagaccgggccactcccatcgaatttggaaagcggttaaaagaggtcgtgccgcattctgcgccgcgtccctcttccttcagtcccgccgagtgtccccgaccagaggtgacctcctagaag

SEQ ID NO: 70297 - DNA, 122 bp, Homo sapiens
aggcatcttggaaggtcccaaggccaggtctttgcttatgcagttcccatccggaaagcacggcacctgcctctctccctactcaaatcctacgcatggttcaaggcccagctatgacttct

SEQ ID NO: 70298 - DNA, 122 bp, Homo sapiens
gaagtgtgtggaggaacattccggaggtcttggtcaccctgcaggcagcagattcttgggcgcaggtgatcggcacgctgggtggcgtgggaggaagcaagtggggcacgggaatcgcctgt

SEQ ID NO: 70299 - DNA, 122 bp, Homo sapiens
tcagatccctcttctcctttccaggatttgttgttgttgctgtttattgttgttgctctccgttgagggcctttcctggactaattctttaaagtgtgtcttttttgtcatgtgcagctact

SEQ ID NO: 70300 - DNA, 122 bp, Homo sapiens
gcttcttgaagaagactcagctggcgggctccctgctgtgggcactgggggctacgggtccggctctcacaagcacggcggtgctaaatgctttcctgaacacacagtctcgtgaatgactg

SEQ ID NO: 70301 - DNA, 122 bp, Homo sapiens
ctcctccactctcgtggggtttgcaggccatctttgctgttccttggctggtggaggcagcgcctcaatctctgcccgaatcttcacatggtattctccctgcgagctgtgtccaaatttcc

SEQ ID NO: 70302 - DNA, 122 bp, Homo sapiens
ttagacaccacgtaaaggcagaagaggtgacgatcgatcccagagccggtcatggcgaggcgatacatatgctgatgcttctcagacgccaacttgaacaacttcagcctctgttccacctg

SEQ ID NO: 70303 - DNA, 122 bp, Homo sapiens
gaccgcgacgcccccggggatcccgctccccgcctttgcgtcctgtctaccgcggggtggcggcccccagttttccccgagcacctgcgggagagtggtaaaggcgccatcgggggccttcg

SEQ ID NO: 70304 - DNA, 122 bp, Homo sapiens
gacaccccagcccttctccctgagggcgctttaaaatcacattttaagtaaagcagtgtacgaatgcttgtacacaagtgttacatttgccatgcaaaaagactggaatctcaaagtcagga

SEQ ID NO: 70305 - DNA, 122 bp, Homo sapiens
tggaagggcagcggtgtgggcttctcctcgggaaacagataaaggaaatgagggctggcccgggccgccagcctcccgcttgccttctgcacctgccggcctcaccgagtcctgagcggccc

SEQ ID NO: 70306 - DNA, 122 bp, Homo sapiens
atgaaatatcgggggtgaatttcccccgatatctggcgcccgatgtggggctcgaacccacgaccctgagattaagagtctcatgctctactgactagcgcctgccatcacacctggcaatt

SEQ ID NO: 70307 - DNA, 122 bp, Homo sapiens
gaaagtttttgaagctcactcaacaagtattaaattgctgtggttagtagatccagaactcggctaaagaaacttatctcactcaaataaacaaaattattttattatgagatccactggcc

SEQ ID NO: 70308 - DNA, 122 bp, Homo sapiens
tcagatttaacaatgcagtcagataaacagttgtggcagctgctgccatggcaacgtcaccgtccttaccctcccagtgcgcgccccttccccacccctcctcctcctcctgctttcctcca

SEQ ID NO: 70309 - DNA, 122 bp, Homo sapiens
gtgctgtctatcctgctgccttggggggattgcttggggcccagggaaggggccacagctcgtctactctctgaggccctggtactggcacaaggtgtggcacaagggttctataggccgct

SEQ ID NO: 70310 - DNA, 122 bp, Homo sapiens
aagagagagagcgaatcaccgggctgcgggcgcgccgcggccgaggcgggggccggggcgcgcagcctggctccaggcggctgcagctgctgctgctgctcaggacttaaccttccatcccg

SEQ ID NO: 70311 - DNA, 122 bp, Homo sapiens
gcaaaggagatgcgtccccggcacactcattacttgtagctacaggaaaattctcaattacggcgtcctggctgtcaatcatctgcaagtggaccccgcctgctccggctcagggcggtgat

SEQ ID NO: 70312 - DNA, 122 bp, Homo sapiens
ggaaagatttatcttttcatccaatacccacaaatgggcatgatgcgtagttttgataaacgtaattaattgaaattccataaaagctagttttcgttttctgagttttcagtcgttcattc

SEQ ID NO: 70313 - DNA, 122 bp, Homo sapiens
aggcaagcacgatgctcaggaaggcggcctctcagggcagcgtccagtgtccgtccctcccggcgggaccctcgcacgccacctctgctggagattttggcttccaaagaagagtctggtgg

SEQ ID NO: 70314 - DNA, 122 bp, Homo sapiens
gagatgggtagagggcaatgggccaagtgcccgggggttgggggtcacctgcttaggctacgcatgtctaggaggggttaaaggaagaggctgctgggttggtcactcactctgagacctcg

SEQ ID NO: 70315 - DNA, 122 bp, Homo sapiens
ctctctcagcgagtgtcctccgtgtctccgagtcgcgcccgttctgttgtgcgtaaatgccgttctcagagctgttgtttgtttagggatgtatcatgttttcagcttaacatttgtgccat

SEQ ID NO: 70316 - DNA, 122 bp, Homo sapiens
atggggttatttttgtctgaggcgcaggctcagtcaggaccctggagagtttccaggggtcgggaatgggaaccacagcattcccatagctctttggctcagcctctgtcgcctgttgccaa

SEQ ID NO: 70317 - DNA, 122 bp, Homo sapiens
ttgccaacacccaaactcaagtctgtccctatgacctgaatgaattcacatcggttctgccgcatgccagccctctaggcctcagtatccctgccggtaacagaggcagtcacttctgcctg

SEQ ID NO: 70318 - DNA, 122 bp, Homo sapiens
tgtggcttcccaaacgtgtctccttaggagactacacagcccgaggcaggtgaattttcccgaatgacaagaggattattcccgaaccccgtggtggcgtctgcttctatcctgtttcgttt

SEQ ID NO: 70319 - DNA, 122 bp, Homo sapiens
gggccttccgaggtcgggccgtgccccgctgggcagcgcagagggggtgtgtagggcacgcgacttggagccaggtccagacccatcctggctcctctcagggctccttcccctgcccccat

SEQ ID NO: 70320 - DNA, 122 bp, Homo sapiens
gttttgttttttgtttctgtacctgttacatttttctagttggggcagaatcgtacaggccggggggatcaatgctctgagccatggcactctgcgttgaaggtcccatcccaggacgagtt

SEQ ID NO: 70321 - DNA, 122 bp, Homo sapiens
gatttttaacaggctccgctcagctggctctgtcggctcgagtctgagcccatccgtcagcgtcaattaggaagcctcagctcagaacgcaacaccaggggctgcgcagaggaagaagcgcg

SEQ ID NO: 70322 - DNA, 122 bp, Homo sapiens
ttcctcctgattaccaagtgagatttcctgggtatactgtatgctaaatggcagagcagccgcctgccacttgcttcaattatccctcttttaactgctgagggaaaagcaattttttaaaa

SEQ ID NO: 70323 - DNA, 122 bp, Homo sapiens
tggaatacagactgtaatattaaactactatgtgtatattgtttctacagttgtatacaccgtagtgtcttttacaggtatataaggtcaatggccctagtctaattcagatttaaactagt

SEQ ID NO: 70324 - DNA, 122 bp, Homo sapiens
aggggcaggtctcggtctagaacacctgctaggcgcagatctaggacccgatcaccagtacgacgcaggtctcgtagtagatcaccagccaggagaagtggcaggtcacgctctagaacccc

SEQ ID NO: 70325 - DNA, 122 bp, Homo sapiens
agtggtcagacaccactacatatccttcaaatgatgtggcccagtgaagctggagggtgtcgtcacggagccaggcagcctggtatctcagccatccaccaggacagagccagcaggcacta

SEQ ID NO: 70326 - DNA, 122 bp, Homo sapiens
tgaaactgcattactgagtgtaaaatgaccacatatggtatgcacaaacacagcacagcacgctgaaaaatacatacattaccggctgacagacacgggggtaatcacaccaagcaaacaca

SEQ ID NO: 70327 - DNA, 122 bp, Homo sapiens
tggtttctcgtgcccctcagggtcaggagcagtctgatcaaaaggagggcatccactgtccggggccattcccacagctcccggatgctgggtctggaggctgcgcccttcccctgcaggag

SEQ ID NO: 70328 - DNA, 122 bp, Homo sapiens
atgtacggatgaatggcccggcggagggggcggcggggaaagggagggggcaggggctggcggccacaattcaaagacaccgtcaaggtgtgtgcccctcgccgtaattggagaggaagctg

SEQ ID NO: 70329 - DNA, 122 bp, Homo sapiens
aaattgcttgtaagaaagaagagccatggccaggttcacatgggggacattcctgagccccgccagacctcagcttccagctcaccttttctccccacagtgaagggtgcgcccagcctgta

SEQ ID NO: 70330 - DNA, 122 bp, Homo sapiens
tcagactggtgcaatgtggaaagacaaaatacacacttgaaatatttgcatgataatctacggaacaaaaacatttagtgggagtggtggtagaacgtttccaggatcaacacttgaatgct

SEQ ID NO: 70331 - DNA, 122 bp, Homo sapiens
ggacaatgtctctctgaaggctgtaccccatccacacctcaccagaatccaaggaggcttcgggggtgtctgcagagtgggaagaggtgccttggagccgagctcttctcttttttctctcg

SEQ ID NO: 70332 - DNA, 122 bp, Homo sapiens
tactcacacccacacttcaaagtccagcctctccttttagcgcaagctggccaggaactgcggcctggagtggggactgcagacaccacagtgcccgggcttcccactccacaggaacagct

SEQ ID NO: 70333 - DNA, 122 bp, Homo sapiens
ccacgggagctgcccagttggacctcagtgtgggtccttctgggattccccatggacagacgtgcacgctgatttgtggactggggcgtgtgctcctctccacatgggctctcaggagctca

SEQ ID NO: 70334 - DNA, 122 bp, Homo sapiens
aaagactctgccctttctggttgtgatatgacatctgtctcaagatacatctgtagaaaacggacttcaccttacatctgacaggtttgcttctaagcataaaccaaaatccatcgaataat

SEQ ID NO: 70335 - DNA, 122 bp, Homo sapiens
tctgtagcgaccggttccctcaggaatgaagttggttgcatttacccctctgttcaggaacgaagatgccgaggagcctgcctacggagacacggccagtaacggagatccccagatccacg

SEQ ID NO: 70336 - DNA, 122 bp, Homo sapiens
ccggcgttgaaggggccgtgggaagtaacggggggtaccacggtttaggatgcgctggagcgaaaggattggggtggggtccgtgctcttggcagtcgtctctgccaggcctgtgttcacat

SEQ ID NO: 70337 - DNA, 122 bp, Homo sapiens
ctgtgggtgccgccgggaggaagacgagcgccctggccgtgcctgccgtaggccgcacgccgagccctacgaggacttctggatctgggtgtccatgaccgtgtgcgtcttctggctgatgt

SEQ ID NO: 70338 - DNA, 122 bp, Homo sapiens
gactgcagacgactttgcctggatccaggcggcaaactcaggtggtggaaaggggaagcccgccatctaggaattgaggaccgaggtgcccacatctcagtatcgatcaaacagagcccaga

SEQ ID NO: 70339 - DNA, 122 bp, Homo sapiens
ctgcttttctcgggtgcgatcatggtggggtgtcgggacatgaggtgaaatgtgctggggcgtgtgagggtgcctcagtgtgcttcccagcattcatccaggagaaaacagacaatgcgtga

SEQ ID NO: 70340 - DNA, 122 bp, Homo sapiens
atccgcccgcctcggcctcccgaagtgctgggattacagccgtgagccaccgcgcccggccgactctatcataatttcaaagcagtaataaatgtaagtgacagcttaagataccaccttgt

SEQ ID NO: 70341 - DNA, 122 bp, Homo sapiens
gtggaaggcaggtaggcgaccggccgttcctctaagtctccgccacgcaggaaacaaaagcgatagaaggtccgttcctgtcctccggtgctttgatgagttcaggctgaagccgatggggg

SEQ ID NO: 70342 - DNA, 122 bp, Homo sapiens
ctcaggcggtaatgccagcgaagggagcggctgtaaatacagtctggctggctcacttgccgctcacctcctgctgtgcagcctggttcctaataggcaagggacggtaccgggggttgggg

SEQ ID NO: 70343 - DNA, 122 bp, Homo sapiens
taaaatatccccccagtttttcaagtatatgtctgtgtgaaattgacttttctttatatacgtcaaccagtgcataatattggaacagattgaatgcagaagcagggaatcagttgtcttca

SEQ ID NO: 70344 - DNA, 122 bp, Homo sapiens
ggtgaaaatcttcatgaccttggattaggcaatgctttcttaagtatgaaattaaaagcacgaaaaaaaaaaataggtaagttggacttcatcaaaatttaaaacttggccagacacagtgg

SEQ ID NO: 70345 - DNA, 122 bp, Homo sapiens
tcaagaatagggttgagggtcttgagaggtagaactaccctaggcagggcttctccaactcggcctttggaccccgcgcgcgcccaagggcgtgcccaccgcggaagcacagatcatcttcc

SEQ ID NO: 70346 - DNA, 122 bp, Homo sapiens
cgtctgcaagccgagcgtggccacggtcctctggccccgggaccatagcgctgtctaccccgactcaggtactcaggtatgtctcaagtccatgtcctccaaacagactcaggtgagcggac

SEQ ID NO: 70347 - DNA, 122 bp, Homo sapiens
ggccccgtccgaccttatcgcgggttaacagcccaggatgttgacttgagctggcttggtcggctacaggtgagacggtttaaagtctcacaatcaccttagaggttaatcagaataactgg

SEQ ID NO: 70348 - DNA, 122 bp, Homo sapiens
gcaaccatcactaccgtgtatctccagaacattttcgccttctccaactgaaactctgcacgcattaaactcaaatttcccattctcccctgcttccataattttgttttaaactgcaagaa

SEQ ID NO: 70349 - DNA, 122 bp, Homo sapiens
agctcttattacatactcctaaatcaggttcatagtttgtctacctaccaaggtagcttacggtttatccataaggactcaactatgtgagtacagagactttctcaggccagattttagtt

SEQ ID NO: 70350 - DNA, 122 bp, Homo sapiens
cccacgccgcccgaaactggaccccggatccagctgccgcagtggcggcaggaggaacctcgctgccgccgcgcggcggtggcggtatttaaaggggacgcagccatactgccaggagcgga

SEQ ID NO: 70351 - DNA, 122 bp, Homo sapiens
acgtagacacctcctatcgtggggtttacctgcttcaaatcctttagtaacccctacacacgccccgcaccacgtaaaatcctcactctccgttcccctagcctcgcccttctttgccccta

SEQ ID NO: 70352 - DNA, 122 bp, Homo sapiens
ttcagatttcttttagataggcaacaaggagccattgaaggtttttgagaaaggaagatgcgtggacagacctttattttattaagatctctgtggaggtagaggtggagaggctgcaagga

SEQ ID NO: 70353 - DNA, 122 bp, Homo sapiens
ggagggaagatgtcaagacctcggttcgaattccagctttgccgccgctggcttagctgtcgcgtgctggtcagtactaagtggtgatgacagctgctgaccttacagagcactcactgtgt

SEQ ID NO: 70354 - DNA, 122 bp, Homo sapiens
acgccccttcgtacagcagtgaggttagaacgtgaggggatcacagacttcgtccaccttcgggaggaccgcaggacctctttctttcttgccacttgggatgatacaaccaggactccatg

SEQ ID NO: 70355 - DNA, 122 bp, Homo sapiens
gcccccatggccgccgcgcgatggtcgccgaacccacaggaggccgggctgtctgcgccccgctcccggggccgcccctagtcgccccgcctccaatcaccgcggccctgccccgtccgggt

SEQ ID NO: 70356 - DNA, 122 bp, Homo sapiens
gaccctccattctctgccccagtgtatttaaccagcacaacctaacaggaagctccctctcggtgacaacccttcccccgacagacgcgcccagcagccaaccaccggctagaattggcctg

SEQ ID NO: 70357 - DNA, 122 bp, Homo sapiens
gaaggacacctccatggagcgcttggggcagcccctgagcaaggttatcgaccagctcaacgggcagctggaccccagcacctggtgctcccgtgctgagcccccagaccagtcctttcgga

SEQ ID NO: 70358 - DNA, 122 bp, Homo sapiens
ggcttttgccccatttctctacccaagtttagttttggggtgtgcttcacagaatctgaccgtttatccattaagaaaatattattgaatttatattttatgctgtgcactggctatgtggt

SEQ ID NO: 70359 - DNA, 122 bp, Homo sapiens
cacaaaaaatcgctgtcatgtgaccgtgttcctgtcaatgaagtattagcagatgtgtcccgtgtgccttccactgagtatatttggagggacaaagcctgtcttttttgccccttcctttt

SEQ ID NO: 70360 - DNA, 122 bp, Homo sapiens
gctcggggagccggtctatggactttccgaagacgaggtgagtggcacccccttcctgctcgggactccccggggagttcctatcccgcgccggcagggggaggggaaaggggccgtccccg

SEQ ID NO: 70361 - DNA, 122 bp, Homo sapiens
cgccgggagcgcactgtgtacaaacagaggcggcgtgcgtgtgagtctgagcctggcaggcgcgctccccactcccccggcgcccgcccgccctccgcccgccctgttattcactccccggg

SEQ ID NO: 70362 - DNA, 122 bp, Homo sapiens
ccttcctcttcaccatcaccctgggagagccactcagctgtcgtgattcgcccaggactgcgagggttctggggacttggtactttcagttctaaaaccaggacagtgcagggacactggga

SEQ ID NO: 70363 - DNA, 122 bp, Homo sapiens
agcagggaaggtggggggaagggagggatttcacaaggaaggctgcattagattggccaccgtaagaaaggagataaccaatgaaaatcaagcaacagtatttaagtactgtattcctaaac

SEQ ID NO: 70364 - DNA, 122 bp, Homo sapiens
gttcttaggagatatgtgctaaatatttagggatgaagtgtaataaacttgaaaatggctcggcaaaaataatgtgtgtgtgcatgtgtgtggagagagacagagcaaatgtgacaaatgtt

SEQ ID NO: 70365 - DNA, 122 bp, Homo sapiens
aataacttggccagagctgcagggcagagctgcctctggctttccttgcccatgggtgtacgatcactcagccacagcacccagaaagaccagcttcttcaaagctgcacagacgcacatag

SEQ ID NO: 70366 - DNA, 122 bp, Homo sapiens
gcggtagtatttcttgctaataaaaggtccccacagggacatttttgctatgactgcaggcgtggccagtctccctgcacagcttccgggaagaggtggggataggaggctcgccccgggga

SEQ ID NO: 70367 - DNA, 122 bp, Homo sapiens
ttcggccacggcgacttggccaacaacagcggcagcagggtctccccattgagggaagcacgcacccctacgtcacgggctttggctcctccagtccgtatccctcccctcagctcacatcc

SEQ ID NO: 70368 - DNA, 122 bp, Homo sapiens
caaggttgtagtttgaaaggcaagctccacaatgaccatagctttgttttattttcttttcggtcgggatatattaaaacatttttaactttccactgacatgaaaggagggtgtgtgatat

SEQ ID NO: 70369 - DNA, 122 bp, Homo sapiens
ggcattgtagtcactcactgccttcgttgccgttctaagctaggggcgcagcccgaccgtcggactacatcccccaagtggacccttgagaaaacctggcagtcggccttgtctgccgcgca

SEQ ID NO: 70370 - DNA, 122 bp, Homo sapiens
cgtcatccggaaggctgccataagcctgcgtttcgcagagctgcgctgaggctcccgtgtcgcggccgtccggccggcgcgctgatgtggctgcaaacctgggtatcagatcagccgccgtg

SEQ ID NO: 70371 - DNA, 122 bp, Homo sapiens
ctcttcacctcacaggcagatcaaacaggaaaacaaaaacaaaaccaaacccaaaatacacgtaaattgcagagtgcttgaggtttcttttaagctgtctatgtaattaaaagctgttactt

SEQ ID NO: 70372 - DNA, 122 bp, Homo sapiens
aggactgggaagatttccacgctgagattcccaggcgcaaactgcagctgatgcgttcctcgaggttctctttgagatggaaacgagccggctgctcgtgttcatttctgttttgcttttct

SEQ ID NO: 70373 - DNA, 122 bp, Homo sapiens
tagtgttgtgagcacagcatcatcactagagtaatgtgctcggtgtttggaaggaaccagcgtggatgggcaagaagttctaacacttttgattaaaagtaacttcctggccgggcgcggtg

SEQ ID NO: 70374 - DNA, 122 bp, Homo sapiens
acacctgacggcctgatattttgtttcacaggaacagacaatctacagatgaatgtcacccggactccagagtcatttcctcccgggaaattgttaccaatttcaccaacatggcctttcac

SEQ ID NO: 70375 - DNA, 122 bp, Homo sapiens
ttgctgtaaagctggccacgacccaccaaaaccaagatgatgatgagagtgacctccggtcgtcctcactgctacactcccaccagcgccgtctcaaagaacataaataaaataaaattaaa

SEQ ID NO: 70376 - DNA, 122 bp, Homo sapiens
ggactagggcagggtatcagaaggtgatgtcatcctcgtacagggacagcagcagcaggacggtccagccgcccagcaggcccacgttgtgcagcaggaagaggagccagggccgcgggtcc

SEQ ID NO: 70377 - DNA, 122 bp, Homo sapiens
cacccctccttcgagaatcagcccggcctcctgtccggcctaatcagaatcattcttttgcgtaatcccgcctcctccgataagcctcgccccgttcccgcccctaccattccgccctgcct

SEQ ID NO: 70378 - DNA, 122 bp, Homo sapiens
gaaaccacccagcccgaaagcagcatgggctgtgcccagagccgccgtgccagaagcccacgcttagaaatagagggccgaagaccaaagaggactgcgggttcttgggccaaacgtgaccc

SEQ ID NO: 70379 - DNA, 122 bp, Homo sapiens
aaaacagcaacaacgatggcagtgtggatagtgaagcaaagggagtgcccctgccctggacgtgtgctgcgcttaggaacagcaatggtatgaaggaatccagtttggttgtacctctgtac

SEQ ID NO: 70380 - DNA, 122 bp, Homo sapiens
gtcccgaaccgcgtttctcccgcccaaaccctgccggggccgccgcccacctcgtgtgaccgcaagaggggtaaagtgaagttccagcgctgtcctaaattcaacctaaaatcgcattggtt

SEQ ID NO: 70381 - DNA, 122 bp, Homo sapiens
cccaacttatgtgaggttgcccgcccgtctccttcttgtctccccggcccaggtccctcccgcctccaggtccatccatcccgtccggaaaagaaggacccagagggaagaaggaacagtgg

SEQ ID NO: 70382 - DNA, 122 bp, Homo sapiens
cccaaccattttaaccgtaaggattttgcatgttttcttgtgcagacagcaccttgcatacgtatgtggtgttttacatttgaacagtgcatgcctgtttacatttgaacagtgtgtgagcc

SEQ ID NO: 70383 - DNA, 122 bp, Homo sapiens
tccacctgggccaggcccgcatctgctgcccagcaacgagtgcgtggagctcttcagaaccgcctacttctgcagaggtgaggctgttctctctgggcacatgagcttccaccccctacctc

SEQ ID NO: 70384 - DNA, 122 bp, Homo sapiens
attcgattttttaaatgtaaaccttaggattggttcttgggtgaagagtccgctgctcttcgctattaggttagcgttcggaagttttcagtccttgttttcccgttgacttcgctgcctat

SEQ ID NO: 70385 - DNA, 122 bp, Homo sapiens
gaccagtaagagacctgggtgctgagcacgtgaatcaacagatgcggatgactgtgtaggcgggcccaatgggagcacagcagcaggaagtaacttccagacagtgccataccgccaagcgc

SEQ ID NO: 70386 - DNA, 122 bp, Homo sapiens
aaaaaaaacttttaacatttaaaaaataaaaattaacaaaatttcacttattccaggacacgctggcatttggactcaatgaaaagggcacctaaagaaaataaggctgactgaatgttttc

SEQ ID NO: 70387 - DNA, 122 bp, Homo sapiens
ctcgaccgccgctgctccgcggggactcggggagctcgaaggaactctgggaaagtttcccgctccgccccggcccgagcggaagcgcggatggggcgtggcccggtagctgtggccgcgcc

SEQ ID NO: 70388 - DNA, 122 bp, Homo sapiens
agtcagtaagtgtgtgccgggggccgagaggctggggtggcggagcccagcggtgtggtacgtttcgctcttttaatatcgggaacagttaaaaccatacagaaaatgccaagtacagcata

SEQ ID NO: 70389 - DNA, 122 bp, Homo sapiens
aatgaggcttaggcatttggctcagtccacccccagggtgaccagctggtcacctcactccgcaacccaaatccaggggattcattcgttgtctaggaataacttcttccaccttgggaatt

SEQ ID NO: 70390 - DNA, 122 bp, Homo sapiens
aagactccgaaggaggaatagaggggtgtgtcccacggggcttcaaatcctcatgcaccccgttttccagaattttctgtgaacgtttgtctgccccagtgagagctcatcttaatcttgat

SEQ ID NO: 70391 - DNA, 122 bp, Homo sapiens
tcagttgggtcagtttacacaattctgactgaaaagttacagtggagcaaactttcaactcgataggtaacaaaactgttgtacccagatctgctacagttaagaggagagctttcagtgga

SEQ ID NO: 70392 - DNA, 122 bp, Homo sapiens
aagggtcagaggtccaaactggacttggccaccctcacgattctcacttggagcagcctgcggtggcccagctgcagcggcacagtcccggcgccttctgattggctcagctacagcccctc

SEQ ID NO: 70393 - DNA, 122 bp, Homo sapiens
gcagagaagcattgcttctttctaaagtacggctaaaataaaaggtatctccaggctaggcgcagtcactcatgcctgtaatcccagtattttgggaggccaaggcgggcagatcacctgag

SEQ ID NO: 70394 - DNA, 122 bp, Homo sapiens
gttacattccctttcgatggaactaaatgcggttatctgcggtcctaacctctctcgcatcggagtgcaatgtttctgaacaagctctgttagaactggaaaatgggagggggtgagggagc

SEQ ID NO: 70395 - DNA, 122 bp, Homo sapiens
tggtctgtataggagactcgacaatgtatatttcaggcgttgggcatcatgtgtagccggcggaatgcctgttcagccatggtccagcctgaacgagcgggcctcttgcttcattttgcagg

SEQ ID NO: 70396 - DNA, 122 bp, Homo sapiens
ttcccaggactgtttgctcatgatctggttgggagccctgagggggtagcagggacagggcgggaccccagggagctttggacaaagcggggctctaaccagtctctcctgacagatttgct

SEQ ID NO: 70397 - DNA, 122 bp, Homo sapiens
gggggcggggaaaagtggggttcttctctcctgcaccccgggacccttccctgtgcctgtcgtggagagagatgagggcttcccgccgcgtctcgctgagagcaggagggaggcgtgtgtcg

SEQ ID NO: 70398 - DNA, 122 bp, Homo sapiens
tgctgggattgcaggcgtgagccactgcaccaggcctgtatcagatacttttaaatgtatcgcctaagatccgttagacacaccagtcttccagctccttgccacttgttttgtccagctgc

SEQ ID NO: 70399 - DNA, 122 bp, Homo sapiens
gcagcctaatttcaccccagggaagcccctggtgggcttgtggagggcggggtgaaaagccgctggtttagggaaggggtccagcctaggctgaggaatgagatgcgggttgggacggtccc

SEQ ID NO: 70400 - DNA, 122 bp, Homo sapiens
gagttaactaggaggaaatatgaagggagccctgcagagctgccacctctagggtcctgacgaaggaggagtttttttcagccctgccaagcctttgcttttgttccgttcccaaaggtggg

SEQ ID NO: 70401 - DNA, 122 bp, Homo sapiens
ggatgccgccaatccaacatcataaacccttccggcaaacagacactgcccgtgcctctgcgcggaagcctaacccccaggtgctcctcgatgacggcttcgtgccttctccctctgtcttc

SEQ ID NO: 70402 - DNA, 122 bp, Homo sapiens
tgtcagtcctgtgacctggcctcaggaccactcttgtagcccaccgtgggtggatgaagccggtgggaacagaatgataggagttaaccactttttaggcgttattgggccttttcacttta

SEQ ID NO: 70403 - DNA, 122 bp, Homo sapiens
atagctgactccattatgtgaattctgactgcagcaaaagcatcagctctcttaccaggccgggtctgtggaggtgctactgggtcatttcaggaagttcagcctagatcctgctccttcat

SEQ ID NO: 70404 - DNA, 122 bp, Homo sapiens
gcacaaacacattgcccatacaaatccagacctacaacactctccaaagaaacatagatgcgccacatcatcctttgattctggggactgcagcgggcgtcctcccgattgatcccaggtcc

SEQ ID NO: 70405 - DNA, 122 bp, Homo sapiens
cccaggggaggcctgggagtccatcagtgctccccgtagtgcccagagccccagtccccccgcaccagcacacccagggccatgccaggggccccaggaacctcctccagtatcccgcgttt

SEQ ID NO: 70406 - DNA, 122 bp, Homo sapiens
tgccacggcgtgatgaatgcctggcgtcctgtgtggtgagtggtgtgctggctctgttgccgcagggcagccagtgtgtactgcccgcagggctgccctgtgtggagacgctgagctgtgtc

SEQ ID NO: 70407 - DNA, 122 bp, Homo sapiens
aaatctctcgaaatctcagttggcgctggagctggaggggcagttgaagctcctgaagggcggggcacggagcttgaaggggcggggcctagcctcagagaggggagggaagaggcgggagg

SEQ ID NO: 70408 - DNA, 122 bp, Homo sapiens
gagttggtgatgtcagactagttgggtcatttgaaggttagcagcccgggtagggttcaccgaaagttcactcgcatatattaggcaattcaatctttcattctgtgtgacagaagtagtag

SEQ ID NO: 70409 - DNA, 122 bp, Homo sapiens
actttcctaacagtgtctctatggctgtcccaagcagctagtgatggtcacaaggctagacgcagtgaccaaagagttctaatctgaacatcagtgagtagaactcaagcacccactggtta

SEQ ID NO: 70410 - DNA, 122 bp, Homo sapiens
gctgccctcccggagcgtgggcgagtgattccgattgtgcagcagaaacccagggtctcacgggaacgaggaaacccgcccacgcccagcctccaagcgacgctctccatgacaaccggcac

SEQ ID NO: 70411 - DNA, 122 bp, Homo sapiens
gtgaagccaggccccggctgactcacttctgaccatgaggtgtgccctgccctggtcagccggcctcacaggctcacctgtgtcagcctcctgtgatgctccctgactcgcgggaggagaag

SEQ ID NO: 70412 - DNA, 122 bp, Homo sapiens
gcaaggcaatcttatgttcagacatatgacgtcaggggggagtggggaatcaaggtttcccggaagtggaagcttggagctggccttaaagaccctagaaccctctgggatgggtcatgtac

SEQ ID NO: 70413 - DNA, 122 bp, Homo sapiens
gctcgaggggtggcaccaatggcggcagcagtggcggcgctggctgtggtggtggcaatgcgcggagaacggcgggttccactgcgagtgttgggggaagccttggacagggccttctttga

SEQ ID NO: 70414 - DNA, 122 bp, Homo sapiens
gtacagagctaagacagaaatagcagacatagttcaatggtccctgcacctagagagtgccgtggaaacagggcccagtcaccctccaactgcacagtcccatgaagccaaaaagacaatcc

SEQ ID NO: 70415 - DNA, 122 bp, Homo sapiens
gggaatgaaggccatgcgcctgcgtgctgtgtcataaacagggaagatgcagcccggagacggactgggagagagaagagactgccatttccccgggaaaggaattcctcctgatggccgtg

SEQ ID NO: 70416 - DNA, 122 bp, Homo sapiens
gtattcccctgctttgaggctcaggaccacagaggtcacaggatctgattcagatgccagcgggtttccctagggggcccaatgaggctttccatgtagggcaagagttatggctccctgct

SEQ ID NO: 70417 - DNA, 122 bp, Homo sapiens
cactgcttccaggcccccagggaggtccgtggccaaggcatagcaggctgaggagctgcccgtgcagccaccgcacaggtctctgcctcccagatcgcaggacgacacaggagcggtgacag

SEQ ID NO: 70418 - DNA, 122 bp, Homo sapiens
cctcccggaagtgatttcctctgggttacggcgcaggcgcaagataagctaggagccgcgcgagtcgtagtgtcgctgtttgcgggtctccgcgcgggaccggggcgcagcggggtcgctga

SEQ ID NO: 70419 - DNA, 122 bp, Homo sapiens
cgcagagcgctggttgacggccgggactccattttgttcgccgttactctgcgcgtaagtcgcttgtccgtggcttctctgagaagaaaagttgaaaaagggtaaaagttttcaggaatatt

SEQ ID NO: 70420 - DNA, 122 bp, Homo sapiens
ggtccggttaagtagtaggtgcgctaagagctccccgcgcctcttagcgcgccgtgtacgcgcctggaggcagggaccggggacgcggagctgggcgggagactcgcgggtcagggacgcgg

SEQ ID NO: 70421 - DNA, 122 bp, Homo sapiens
accacccctactctagaaaaaggctaccccggtagttccaggaaccagtgtcttctccctcgccgtccggcggggggtcggtagaaggaaggcgaggcggagacgtgcagacgtctgaggcc

SEQ ID NO: 70422 - DNA, 122 bp, Homo sapiens
atctcaaaacacatcaattgcagccatgcaggacaaccatagctgcacacgctagaatggcgggtggcctcgggtccgtcaatcacaccagtgtggggaccaagggagactccatcctgcat

SEQ ID NO: 70423 - DNA, 122 bp, Homo sapiens
tggcgcactagtagggtctgtagcgtatcccgaggatcattccgactttcccgccccgtacgtgaggggccgccttgaagcctcttccgccacggacactcgaaactgatcttgaagcccct

SEQ ID NO: 70424 - DNA, 122 bp, Homo sapiens
aggtgggccctcacctgatgatggtgtgcatgccccgtacctgcggcgtgctcttcaggacgctcagcgtccggggcagcgggtggcactggtgtgccgaggccagcgcagccctggggaca

SEQ ID NO: 70425 - DNA, 122 bp, Homo sapiens
acatgcactccccaaggcaggctccatcaccgggccccagcccctggctctctcctccaacgcagctccccagccggcctgtaaaaccgaggacaggctcccgccacgccctcggcggtcct

SEQ ID NO: 70426 - DNA, 122 bp, Homo sapiens
gtcggaagtgcctgcggaagtttttttctttttcgtttttaacacggaatctcgctctgtcgccccagctagagtgcagtggcgttatctcgactcactgcaacctccgtctccgggattca

SEQ ID NO: 70427 - DNA, 122 bp, Homo sapiens
taagcatgaggcaaaagaagagccccagcagataggcaatcaggtagccctaagataggtcggaaagaggtcttctgtgaccccagaatcctctttcttgatctcttcctttccccaccacc

SEQ ID NO: 70428 - DNA, 122 bp, Homo sapiens
tgacagagatgtcaggatgatctgacaaagagttgaaagcaaccatgatgaatgcttccacgaacaattaggaacatgctagaaacagatgaaataacagaaagcctcaccagagcagtgcc

SEQ ID NO: 70429 - DNA, 122 bp, Homo sapiens
ctccgggggcctgggaacggactggtgcttgcgtgcggggcttttccactggttcccttccgtactcgggcttcccccgctgttgttactccctcaacgggaacacaactccaccgccgcct

SEQ ID NO: 70430 - DNA, 122 bp, Homo sapiens
agtctatggaatcagacagaccccattctaattctggcacagctctcactagaaagactacgaggtcaaggatcatgtctgttttgtccatcaatgtctggtacacgcacagtgcctgatac

SEQ ID NO: 70431 - DNA, 122 bp, Homo sapiens
tatttcattcctggacagtcttctaaacatagttattttgttccccaatgttttttggttcgtaagcaactacattttattttcttatttacaactacatttgcaaatgctaaaatttatgg

SEQ ID NO: 70432 - DNA, 122 bp, Homo sapiens
ctatgcaatatgaaacctgagaacaaggcttaataacagcccctccaggacggcggcaagcgagccctcaagcgcagtctgcatttccccagccgcagccaggcagctgccggcaccttggg

SEQ ID NO: 70433 - DNA, 122 bp, Homo sapiens
actcgaggtctgcttgccctgggagggcttgggaaatcttcacggccaccctctaaccatcgcttcctctcctctcgccccccatttcagcaggaaggagcgccccacctccctgaacgtgt

SEQ ID NO: 70434 - DNA, 122 bp, Homo sapiens
aggcggtctgaggaagataagggcccacgccccactcacctggcacctgttcggtggtcccggggcatcatggtctgcagctctgggcccccagccccactgtgaagtcagtcctgcatgct

SEQ ID NO: 70435 - DNA, 122 bp, Homo sapiens
ggaatagaaatagcaacttggccaataaattcctcgtgagagccttatcatgcaattacacgttgacttgcttcacactctcccagcctcttaatccaacacccccaccaggaatgaaattt

SEQ ID NO: 70436 - DNA, 122 bp, Homo sapiens
gctcacgcagacaacgtggctccagtggagcaagttgtggcggatgctggggctttccttcgggatgcggctctgcaggacatcgggaagaacatttacatcatccgggaggtggtcactga

SEQ ID NO: 70437 - DNA, 122 bp, Homo sapiens
gtggtgggcaggcctgggctgtagtcaccctggcacacgctggtagagttggggtctgtccggctggcgtgggcacctttgggacggggtctctgtggtgggcaggcctgggctgtagtcac

SEQ ID NO: 70438 - DNA, 122 bp, Homo sapiens
cgggcttagggggtgggaaataccccgattgggtgggacttaatggactttccgcgcctgcgtccaggactgaggccgtgagagcgctctcttcaggcgctctgacttgtttctgctccatc

SEQ ID NO: 70439 - DNA, 122 bp, Homo sapiens
gacagcctcagcaggggatcgtcgagcaaaagcccgcaggaatgctcctttctggggccccgccctcccggccgacagcttttaggtagacgtggaggcgactcagatcgcctcgcggttcc

SEQ ID NO: 70440 - DNA, 122 bp, Homo sapiens
acgcatctaaggagaccaaaacaagaagcaaagttactggcagagtgctgaaaagcccttcgcagacagtcaaagaaacgaaagcatggagggatggagagcaggaaggaggaaagatgagg

SEQ ID NO: 70441 - DNA, 122 bp, Homo sapiens
ctcattcattcaatcaatcagtcaaccagttggtcagtcaacagacatatctcaggcacacgtgccaggcattagtatctatgggtggaggctgttaagtaagctgattttcattttcattt

SEQ ID NO: 70442 - DNA, 122 bp, Homo sapiens
gttctggcccaaacgtgtaacctgtgtgatcttgtcccattctcttcacctctctggcctcgagtttctcacgtttcgaattggaatggcaacacatccttcacatagctcataggattgtt

SEQ ID NO: 70443 - DNA, 122 bp, Homo sapiens
gcccaggcagaaacttcagtttcttaggactgaaggtgtcatctatgagacagtcggttccgtggcattggcagtgatttgccatagagcttggacttaacttatatgtagtccacgctcca

SEQ ID NO: 70444 - DNA, 122 bp, Homo sapiens
tgctgaaggatggttttctaaagagagtgggagaagctagtaatggactcggaagagagtcgaggagaagactttctgtgatcgagtccacatcacagttctgtccttaagatttccccagg

SEQ ID NO: 70445 - DNA, 122 bp, Homo sapiens
cgaaggaaatggattgttaaaggcgttcgggccctgctgctttagtgaatagttcacacccgttttcgcagcggagatgtcggccactgggaagaatcaaggaccaagtttctgattgggat

SEQ ID NO: 70446 - DNA, 122 bp, Homo sapiens
actgggacccggatctgtggattttgcttctggtaagcagaaccagaactgaggggcagtcgctgtgttgaatggatgcatgaatgaatgggagatggcctaggtgttcaaggggcacgtgc

SEQ ID NO: 70447 - DNA, 122 bp, Homo sapiens
cattgacacagaaaaaccataggcagcttgagaacttaggtaacagtggagagtctaaaccgaaacattgactgcaggatctgtaagtcctgcagacaagtgtgatgctttgaaatgcctaa

SEQ ID NO: 70448 - DNA, 122 bp, Homo sapiens
actagggtgctgaaggcgtgattgtgccagtcgactgcgagttccttccgcagcttgtatcgttacccactcctgcaggtgctgctgctgcctccactgtactcagacccaggtagcacagg

SEQ ID NO: 70449 - DNA, 122 bp, Homo sapiens
ctgtagataaagactgctgagaagagcaccctctggtgttgtcacagaggcaagtgctaccgcacaggcatgctgcagtgaatttaactgatcctctgtccctgcaaccgttgtttaaggat

SEQ ID NO: 70450 - DNA, 122 bp, Homo sapiens
tgttcgaattattttccatgagcacttttgaaaatcagtctattaagggattttagagttcgtaaatctttttagagtgcctggggatagggccctaagactaaggtacttattaaaaaaga

SEQ ID NO: 70451 - DNA, 122 bp, Homo sapiens
ctctggtggaggggctttgtgacctcatcggacacacaggggcctcttccaggaactctccggggactgtgggctcccttctcctccagggatacagcctggagttttttgtttgtttgttt

SEQ ID NO: 70452 - DNA, 122 bp, Homo sapiens
gtggggcagaaggtcagggggtgccacggcccacgacgcccccaggtactcgcggcccagcgcaaatgccactggggtgtgtgtggctgttctctgctgtatagtttccctcctaaaatctg

SEQ ID NO: 70453 - DNA, 122 bp, Homo sapiens
ctgggcgcctcctccgagtctagagtcccacacagaacagccctggactctgggcctctccgtccgagccagctagcagttcatttcaagtgagagaaagggacgttaggattgtttctccc

SEQ ID NO: 70454 - DNA, 122 bp, Homo sapiens
tcctcagttgaccttaggctgtgtgaccttgagcaggtagcataacctctctgagtttcccgcgtgccttatgtgcagattgagatgctaaaatgagagagctaaattggaaagctttttcc

SEQ ID NO: 70455 - DNA, 122 bp, Homo sapiens
tttcgggacatgcttcagcccccagccctccttggtcactgtcgctctgtccactcttaacggcccccgcagccgtcacggctgctgcagctgttgcgacccctcccacctttacggagctg

SEQ ID NO: 70456 - DNA, 122 bp, Homo sapiens
ggcagagtgatgggcataacacacacttgtccctgtccccttcccccatggagcttacatcgtaatcagtaatgtgaacaatgttgtaatgctggaataggcattgatgtgtaaatactttg

SEQ ID NO: 70457 - DNA, 122 bp, Homo sapiens
tggcagtgagaccgtgccagagcctgcctgcctcacccccgccgctgcgcagccagaggccggggattaggccagacaccagcggctcgccaagagctccatttgtgaccgttccctccgta

SEQ ID NO: 70458 - DNA, 122 bp, Homo sapiens
gcaaggaaaccccagaggccggaactagaattgcaaattttttttcaccccggattccaacggtgagaaaccctttctatggaagaataatgttctcaggtgggggaaacacacctaaggtc

SEQ ID NO: 70459 - DNA, 122 bp, Homo sapiens
aataggagggggtgaatggagctcagattgcaagcttagtctagcgggcttcagagctcgcgctctcccttcactctcactgcctggtggcggagacagtcaccagcggctcggtctgcggc

SEQ ID NO: 70460 - DNA, 122 bp, Homo sapiens
gatttcgtgtgccgctgccacccgcccacccgccttgtgagatggaattgtaataaaccacgccatgaggacaccgccgcccgcctcggcgcttcctccaccgagcctgcttgtcctgcccg

SEQ ID NO: 70461 - DNA, 122 bp, Homo sapiens
agttgctttgagtggtgttgttctcccttgcaacctttgacctattatgaagataaataacggatgctggcaaggtggtggagaaaagggaacacttacacgcttccagttagaacactctt

SEQ ID NO: 70462 - DNA, 122 bp, Homo sapiens
ggaactgaggagtgtctctgccccgccgccaccccgtctgggaggttgggaggtgaggagcgtctctgaccggcggccccctctgggaagtgaggagcccctccgcccagcagccgcccggt

SEQ ID NO: 70463 - DNA, 122 bp, Homo sapiens
tgctgtccttagttttctggcctattagatgaaataggttatcgtcttccaggcatatttcgcatttcaatttttcctgccctgttttaaaaatcactgctacataggtgaaatgtgttata

SEQ ID NO: 70464 - DNA, 122 bp, Homo sapiens
ccacctgcacccagcccctgaccttcccagcggggagcttcaatgaccactcgcttcccacggaaccagggggcactgggccgcatgccacagaacaatccccttggggctgctcgtcatat

SEQ ID NO: 70465 - DNA, 122 bp, Homo sapiens
aaggagatgaccatgagatcctcactcagaagaactggcctaatgagtttacctgaacagcgtggagagcaccaagggatctaggctgaggtgtccgtctcctgtgaggaggggcggcagtg

SEQ ID NO: 70466 - DNA, 122 bp, Homo sapiens
aaaggcccagtggaaatgccggttctccttgctgccattactgcatttatctggcaaccccgcaccacaacccgagacctagaagaccctatgccccaggcggggctgaacaggacagacct

SEQ ID NO: 70467 - DNA, 122 bp, Homo sapiens
gaggcccggccccgggggcgcggccgcccgggcctccgtgtgccccagggggctccgggccgcgagccgctgccgaatggcttttgacaaaaaaacccttgaccaccaaggccagcctcttc

SEQ ID NO: 70468 - DNA, 122 bp, Homo sapiens
attctagaggaggctttattgggtgcggtctgtgcaagagagacgatggggaatgccaatcggagaacccagattgaaaggaaaggtttttggaacccacatcaaaagactggctgctcgga

SEQ ID NO: 70469 - DNA, 122 bp, Homo sapiens
atttaagttaaacataaactatataaatttcctttaaaaaatcttaataaggtactacttcgactggggttataaattcgtttcactggctatttaaagaatagatgtgactagtcgccatt

SEQ ID NO: 70470 - DNA, 122 bp, Homo sapiens
agggctgctgcaggggcctgaggtcctggaccttgtcttctgggctcctaggaagctcatcgccctccttttgcccttcccactgggggtctcctccatgctgtatcagaatcctagagggc

SEQ ID NO: 70471 - DNA, 122 bp, Homo sapiens
gcaacagctctaagaatgtggagaatgtaaacagccttttattgtccgaagggatggcagcgtaaggaatgtgtgcttatcaacagggctgcagctccctacctcacttaccatgataaagt

SEQ ID NO: 70472 - DNA, 122 bp, Homo sapiens
gggcaggcagctcggggcagggagcagcagtgcaggcctggcctgtgtccccgtgcccagcgggctcccggagcagcattccagagcctcctgcagagccagcgaaggaaagctctagaggg

SEQ ID NO: 70473 - DNA, 122 bp, Homo sapiens
gcttcatattcaaattccactccatgagcccaaggtggagagtgttttgttatctacccacgtgggactgatttcccttttaggcctctaaatcaaataccagtacggtggcaggagcccaa

SEQ ID NO: 70474 - DNA, 122 bp, Homo sapiens
tgtcatatctcctttgacattccattgcactctttaagaagcaatgggaaggaatgttatcgtaacaccaggggggctgtttcaaagtggcgcctgaagattttgctgtgccatttccatta

SEQ ID NO: 70475 - DNA, 122 bp, Homo sapiens
ggcggctgcttcaccgcttccttcttgcctgcagctcctactgaagcccaagttcagcggcgtggagaagatcaagaccatcggcagcacgtacatggcagctgcagggctcagcgtcgcct

SEQ ID NO: 70476 - DNA, 122 bp, Homo sapiens
gtggcgagggcggggcggctgccgacttagccggcctgactggtcgggcttccggggtcccgctgctccctaggccccttgccccgattcaggctcccaaggtggggcatcagtccggccct

SEQ ID NO: 70477 - DNA, 122 bp, Homo sapiens
tgcgcctgcgtagcgtgaccctgcgcagcctgggaggcgggtcttagctccaggtgcgtacggcatctgacttgacgtggcccacaactgaaaggtctggggagaaggcgccgtgtccgggt

SEQ ID NO: 70478 - DNA, 122 bp, Homo sapiens
gcccgcgcagaaccagctgtctgagctgcccgggcagcgggggagcagcgagcgggcttccgcgagccggagaaggcacaggcctgtcccgggtcccggcaggtcagtgtgaaggtgggcgc

SEQ ID NO: 70479 - DNA, 122 bp, Homo sapiens
tcttagaagtaaaaggccccctaaacagaacaaggatgaggaataaggcccttccctgcacggttgctagtaaaagttaccaaaacccctatgtagagcagcattttggccgagtttatcaa

SEQ ID NO: 70480 - DNA, 122 bp, Homo sapiens
ccacccccaccacccggaagtgaacaccacgagctagcgtgtctacttcacaggccaggtcgtcaactcaactgtcaaggtgtccattgtaccagctgggccatggatccctcccgcctgaa

SEQ ID NO: 70481 - DNA, 122 bp, Homo sapiens
aaataactaaatacagaatcaatgcttcaaatcctgatcatctgatcccaagaacagagacgcttctggactaaattcaagacaaacttttgctattataccaaggtcgcacaaaaatctat

SEQ ID NO: 70482 - DNA, 122 bp, Homo sapiens
ctaaacttggcaaatgaaggagagaatggagtgaagaataaaaaggacatggtagggtaccgatatctattgtcaaaaggaaataagtgtattataaagaagggaatgaagttgttatcaag

SEQ ID NO: 70483 - DNA, 122 bp, Homo sapiens
tgggagggagccactgctgaggaaacacctccttaacccaaagacagagggttccccaggcgggggtgtgggaactcggaggtgggggtgagggaaggccaacctccacgcttcggcccgga

SEQ ID NO: 70484 - DNA, 122 bp, Homo sapiens
gcttagaggtttattaatgctcctccgcgctcccgggggagggggcgctaggtactaccccgccaggccccgccccgttccattccgggccccgcgccgtcccccgccccccgcgctgtccc

SEQ ID NO: 70485 - DNA, 122 bp, Homo sapiens
gaaaatggatgaaaccacttgttaaagccgaaatgtaatggggcacgcagtgggtgtggacgtcaaactcgctgccggccagggggcttgccctgggaaccccactcccgctgaaggccagc

SEQ ID NO: 70486 - DNA, 122 bp, Homo sapiens
agccgaccctgcggcgtggcttcgggctgcgatcaggaggggcgaggagggtggaggctgcgtgtttggagatacgcaatcaattaagagtttttttattaatggaaaggtgtggagggcgg

SEQ ID NO: 70487 - DNA, 122 bp, Homo sapiens
taaacacacgaccagcacaaacagctttctgatgaattccctgaagctcacgccacacctcgggcagaaagacagctgcagcgggaaaacatggacgaggcaatttgttcaacaactccggg

SEQ ID NO: 70488 - DNA, 122 bp, Homo sapiens
ataccagcatagtctgctgagtaaccagtccgagattagaagtccctgatgagccatccccgaatgaatggagagaacatttcctggcttacgggaaggagagccagagccaagggaagtgc

SEQ ID NO: 70489 - DNA, 122 bp, Homo sapiens
agggggtcccggtgcccaggcgggggcggcaggctccactgggcacttgctgagagcttgcggcttgagcagccgctggtcagtgaagccgtgtccggcttcgttggctcccggcttgggac

SEQ ID NO: 70490 - DNA, 122 bp, Homo sapiens
aagaaacgcgcgggctgtgcgaggcggctcgcggctctggagtgcctgaggggcagagggcggcaaacgttaactgtaggggctttgctgcgttcctcacacattcgtttttttgtttgttt

SEQ ID NO: 70491 - DNA, 122 bp, Homo sapiens
ttctgcagatcagaatataaacaccaaccacagctgtaaaaaagaaaagaatatatgcaacgaagggaaattatataaacaaaggatcattggaggtactgatgagttcatttagttcaatg

SEQ ID NO: 70492 - DNA, 122 bp, Homo sapiens
cacgagttagcgagaagatggctgggaggcggcgagcccccgctcccggggcgcgcatttcgaactccataggtatgggtgagttggttagcattggattcgagtgcttgttcttatctgag

SEQ ID NO: 70493 - DNA, 122 bp, Homo sapiens
cgtcaacacttccctttgagtgtaatgctgcaggagtacagtccagaccctcagtggaatcgcggtcggtttagctccggcagttgggtcccagggaattctgggaagtgtagtccagacgc

SEQ ID NO: 70494 - DNA, 122 bp, Homo sapiens
accttatttcatttgtgggtcaacagtggattgactgacctgagatcattttccctcaaccgcaaaaatatacagtttatgaaaaccaggtcttgagaaaatagagcttaatatcaataagg

SEQ ID NO: 70495 - DNA, 122 bp, Homo sapiens
gtgctccagttcccggtgagcctcggtactgtggcagcagtcagtgtgtctggcgggtgtcggcgtgaagcggggctgggccagcgggaggtagctctgtgggagtggaaggcctgtatttc

SEQ ID NO: 70496 - DNA, 122 bp, Homo sapiens
ccctgctaggcctgatcttgcgggtaaagatgctgataaaatgacatggcaagagggagacgataaagggacattgtagatagcaggctttgagcctgacattttatttctgccataaccct

SEQ ID NO: 70497 - DNA, 122 bp, Homo sapiens
ttcaacttaatcctacatgtattcagggagcccctgctatctgtgccagccaggaactggcgttcaaagctaaagggactgtggctcctgctctcaaagtagttaccttggaagtgagaggc

SEQ ID NO: 70498 - DNA, 122 bp, Homo sapiens
ccacctgctcccctcccagatgctgtccaccgtgtgggggtatggacgttagggagggtccgggatgcaggtggctgccctcactccccgctgactgagacggccactgtgcagaaggacag

SEQ ID NO: 70499 - DNA, 122 bp, Homo sapiens
ccctcaccaacacggtactgacactgcctatgcttgtgcttattttcaagaagattccagcgaccctacactgggacacttcttgctgggtccagatggagaaaaagtctgcctgtccctcc

SEQ ID NO: 70500 - DNA, 122 bp, Homo sapiens
agaaagtgccaagagcaggaaattcaccaacaatgaggcggactgtgctcgcggcggaatcggcagccccatcacccgcagccgcgccttggcctccggataattaggtccccaaaccaggc

SEQ ID NO: 70501 - DNA, 122 bp, Homo sapiens
gaagctgtctgagcagtgggcaggaggggctgagctcagggtgagggctggcggcaggggcgggtgaatggaaaatacccatctgaactgccacacatcctgactggatacaggctttaaca

SEQ ID NO: 70502 - DNA, 122 bp, Homo sapiens
cggccgttagcgaggagtgcacaccgtgcagcgggtgcgtggggtacaccagcgggtatccggacttcagcgccgcagccgcagcagccggatcatgtgcgcaagaagcgctggcggccgcc

SEQ ID NO: 70503 - DNA, 122 bp, Homo sapiens
acccttggcacttttctgtgatggtggagatgtgaagtttgttctggattctgcttttctcgaaggtggacatgaaaaggtgtactttcatccaatgaccaatgctgcaaccatgggattga

SEQ ID NO: 70504 - DNA, 122 bp, Homo sapiens
tgagctggcatttgcttctctgtctcatcactctcttttctttattcaagaaaagctggccgggcacggtggctcatgcctgtaatcccagcactttgggaggccgaggcgggcggatcaca

SEQ ID NO: 70505 - DNA, 122 bp, Homo sapiens
ctggcgtccgcccccccaccaccccccaccggaacttttccgttggagcttgtaggtgttcgccaatttcaccattaggtgtgttagttttgtaacctgaaggaaaaaaaaaactcatgttt

SEQ ID NO: 70506 - DNA, 122 bp, Homo sapiens
tcacattctcgttcctattcacggtcacctccataccccagaagaggcagaggcaagagccgcaattaccgttcacggtctagatctcatggatatcatcgatctaggtcaaggtcaccccc

SEQ ID NO: 70507 - DNA, 122 bp, Homo sapiens
agccagctaattcaaggttcatcatctagacagaaagtgagtaaataatagctacacttccgacacatttttaaattaatctatgtgtataaggcacagtgataagtttagtagagaaggta

SEQ ID NO: 70508 - DNA, 122 bp, Homo sapiens
ttattgaacgttttaagttactggaagttggatatccagaaggctggacccacgccgggtcgagtgaggaactggaggtccaatccacggggatgttaatgtgttttgttttgtttgttttt

SEQ ID NO: 70509 - DNA, 122 bp, Homo sapiens
atagtccattttactacctctctttggtaatgttttttgttcaagaaaccacgttgtggccgggcgaggtggctcacgcctgcaatcccagcactttaggaggctgaggcgggtggatcacg

SEQ ID NO: 70510 - DNA, 122 bp, Homo sapiens
tccatgcttgaaatcggtccactctgccacttctctcatgcctctcagttatgtgtcagccgagggcttcctaagaagaggcttttcctgcctcccagaggtgcctggccttaggggctggg

SEQ ID NO: 70511 - DNA, 122 bp, Homo sapiens
ccccacagcttccccaagaagggcctgagcccttgggggcagctggcgtctgtgaggatccgggatgggggctgtctgctcctgctgggaacggcccctccagatgcatctccctgtccctg

SEQ ID NO: 70512 - DNA, 122 bp, Homo sapiens
cgttatcttgaggcggagctgctgcctcaggctgctgttagtgacttccagaaccctgttcgtctgctggagctgctgagacacctgcagatctgtttggccacagagatttggtggatgtc

SEQ ID NO: 70513 - DNA, 122 bp, Homo sapiens
aggtggcggggggcacggcccaggccccgagcttggggccagcagcgcccaactctcagacgttcctcctggtgcaaactgcccagggcctccagctgatccccagcagcgtgcagccccct

SEQ ID NO: 70514 - DNA, 122 bp, Homo sapiens
gttgaggcagtgagctgtgatcatgccactgcactgcagcctggacaacagagcaagactcggtctcaaaaaaacaagtgtttgggtaataaaattcaacaataaggttgtataacctagac

SEQ ID NO: 70515 - DNA, 122 bp, Homo sapiens
cagtaaggagtccagccctctagtgccgtctcgatcccctagacagcacagttagtgctccggcttcggcctcagctcccgtatggactgtgccccccaaagggctcgcgcctgcattccca

SEQ ID NO: 70516 - DNA, 122 bp, Homo sapiens
ggcgcatgcgaaccattgacaatgacgtaatcttgcagctcacagccggagtgaggctttcggggagggaggagctccggtgagagtaacagggtcggatttgtctgggccaggcccaggct

SEQ ID NO: 70517 - DNA, 122 bp, Homo sapiens
cacccaccttggcctcccatcggcctcccaaagtactgagattacaggcatttgccactgcgccaggcctaaatgtgctttttaacaagatctcccaggtgcacagcagcatacatattagg

SEQ ID NO: 70518 - DNA, 122 bp, Homo sapiens
ccccagtacccgggagtcgcttcttcacggcgcagagcattctgggaaagggacctccggcgcttgctccaaaggatccgcctcatcgactcagaatttgagaattggaaggcgccagaggc

SEQ ID NO: 70519 - DNA, 122 bp, Homo sapiens
agtggcactccctttgctaaagtaatgaggaatgcatgcattcaaggtacccagaagctccgtggtaactgtcatctacaggcagagtgacagtagggtattacagcctggggtttagaatg

SEQ ID NO: 70520 - DNA, 122 bp, Homo sapiens
cttataatatttggggtttacttaagttagggcaaagtaagacaatgttctgcaaatactcgtgtgactggaattaactacagcccatcctagagagagaatacaaaaaacagaccaggaaa

SEQ ID NO: 70521 - DNA, 122 bp, Homo sapiens
aaattcaaacaatttagtgtagcattcagagtcaactctgtctttatcttctatctcttacggtggctctgtttgttaactagactggtcttattctccaactaggccatatatattcttca

SEQ ID NO: 70522 - DNA, 122 bp, Homo sapiens
ccagcaccgacgtggggacgctcgctatttcagcaccgacaaggggcaccgacacggggacgctcactattccagcaccgacaaggggcaccgacacggggacactcactattccagcaccg

SEQ ID NO: 70523 - DNA, 122 bp, Homo sapiens
gatttaccaaagaattcagtattgacttattctgtctccattttatttcataatggaacccgtctaattttatgctaaatgtatgctgtaaggacaccttgctactctgaaaaaataaggga

SEQ ID NO: 70524 - DNA, 122 bp, Homo sapiens
ggacgaacaactgcttggtgtcacaactaaactgtgcagacgtcgccgtctttccctaaacgacacggcacgagaaacctactttcattttttatctgaaagttctgaaatacatctgttta

SEQ ID NO: 70525 - DNA, 122 bp, Homo sapiens
caatgttttattttaaagccacaaaacagggagcctctaatttaagatttttgggtcactcgaaagtcttttcacactgagctcaagtgtcctttcctctgaaacctcttctggttctccac

SEQ ID NO: 70526 - DNA, 122 bp, Homo sapiens
gtgccggtggccagagtggccgaggtccggggccctgcccactgcctgctgctgggggaacgggtggccctcaacacgctggcccgctgcagtggcattgccagtgctgccgccgctgcagt

SEQ ID NO: 70527 - DNA, 122 bp, Homo sapiens
accacgggactacatctcccagaattccgctcgccggatcccaccgcactgaagggactgcgcgtgcgcgagtcaggtgacgacccgcccctacaggccccagaacccccgagattccccgc

SEQ ID NO: 70528 - DNA, 122 bp, Homo sapiens
ctacatcctcactctcactgatgaacagtttctggtgcaggtgaagcactagctcctagccgggcagggaatggtgttgctgggaatgcagatggctggacagtgccctcatggccagaccc

SEQ ID NO: 70529 - DNA, 122 bp, Homo sapiens
tcgggacgggcgtccgggctcgggtagtggtcacactcttggtctcctttgtccctagttcgggaggcggaaaaagatgagcgcgctctgaagcaggagattcacgagctgcgagggcgcct

SEQ ID NO: 70530 - DNA, 122 bp, Homo sapiens
gccacgcactgtgctgagttccagtgatacagcagtaaacaggatttagactgtctttgacgggaggtgcccatgtgtgtgggaagctgcatggggagaggggtacggggtgggaggtggtt

SEQ ID NO: 70531 - DNA, 122 bp, Homo sapiens
tttggggccgactacgactggttcttcatcatgcaggatgacacatatgtgcaggccccccgcctggcagcccttgctggccacctcagcatcaaccaagacctgtacttaggccgggcaga

SEQ ID NO: 70532 - DNA, 122 bp, Homo sapiens
tgcccttacaaaataggcctaagagagctcatccagcccttaccttatgtgaggacacagcgtgaaggcaccatttctatgaatcagaaacaggccttccccagacactgaatctgctggca

SEQ ID NO: 70533 - DNA, 122 bp, Homo sapiens
gagaggaatttaaagtgttttgagttcctgctctcaaaaaccttagtgtttaatggagcacgaaagcaagaagcaattatgacaaaaggcaagataaataaggtcaaaattgaagtctagta

SEQ ID NO: 70534 - DNA, 122 bp, Homo sapiens
gctactttacacattgagaacccaacccgctactgcctgagctgctgaaaaaggactaaacgtggtttttcattcttctccgagacatttccgaggagaaattagttcagcaggcagccctt

SEQ ID NO: 70535 - DNA, 122 bp, Homo sapiens
ttaacagggaaggaaaacaaatcaagtttgtttatttctggaatcttcacccacctctgacgtttttcccttgtagttctgtgatatgagcaacaatggaccagaagattttatctctagca

SEQ ID NO: 70536 - DNA, 122 bp, Homo sapiens
tcctatgaggcttccgagggctgtgagaggaagaagggccaacgctgggggtccctggaacgacgggggatgcaagctatggagggtgagttttcccaaaaggcttctttctttcccctccc

SEQ ID NO: 70537 - DNA, 122 bp, Homo sapiens
gctcccccagccttcctcttactgaacctaccccccaccacccccccaacaacctgctcgcgagaaaccaggccttggaaggagtcccggggagcaggcaccagagactttgaaaagtggca

SEQ ID NO: 70538 - DNA, 122 bp, Homo sapiens
gctccataaaggggacaaggctaaggcaacatccactactagattcaaaaatgaatataacgaggctttatattcaggtaacccagaggttcattatacagactggtattaaacaaacaact

SEQ ID NO: 70539 - DNA, 122 bp, Homo sapiens
cagtggcctgccgtccttgatgtccttggcttgtcactgcagctcttcactccctgcctccgtggtcacatggcattctccctctgtgtcccagtcttcatatacccatttccccacccccc

SEQ ID NO: 70540 - DNA, 122 bp, Homo sapiens
cgggaaccccgagggcggagagctccccactacgcctgggcctcccagggatggcagctccgagagccccctagacccggtgccttgcaggacgcctctggagatcaggagggctggcggcg

SEQ ID NO: 70541 - DNA, 122 bp, Homo sapiens
gcctcaggctcctgtgattctcctgcctcggcctgccgagtgcctgggattgcaggcacgcgccgccacgcctgactggtttttgtatttttggtggagaccgggtttcgccgtgttggccg

SEQ ID NO: 70542 - DNA, 122 bp, Homo sapiens
gcaataaagtagatggattaaccgtgacgtttacagatggagcaggggagaatgaagaggcgtcagtttgggcatcaggctggatcttcacactctgacctcactctgctctatcctgccca

SEQ ID NO: 70543 - DNA, 122 bp, Homo sapiens
ggggtgggggcagcggggcggcgggggcaatggctctgagggtgggcgaggaccaagtgccgccaaggagcgataatgatggcttgagtcaaagccgccccgcgtctcgcccgcgctggcat

SEQ ID NO: 70544 - DNA, 122 bp, Homo sapiens
acccattattaccatttcttctaaggatatgagtgatcacacaggtctccagatgccctccgggcctgcagccatacagcctgcgggccaccacatcacatgagccatactatctttagcca

SEQ ID NO: 70545 - DNA, 122 bp, Homo sapiens
gaagtgcaggcggaccgacccaccgacagaataccgagcctgggctgcccgacgcgcaggcgccctccccaggcccgcactgcagcccccagcgccccggggccccggcgccttcgacccct

SEQ ID NO: 70546 - DNA, 122 bp, Homo sapiens
ctgttagctagtcctgatttcattagtaaatccttcaatcttgctaagcctcaatttcctcgtctatgaaagggaaaaaatacccatatgtcatctgagactcacaagatcattgattgatt

SEQ ID NO: 70547 - DNA, 122 bp, Homo sapiens
atgctacatttataagtaggtaataatcattgactcctcgctatgtaccacactctttctcggcagcgacctgttggcagggtcacaactccttggggtcttgtcttcagtctggcaagtca

SEQ ID NO: 70548 - DNA, 122 bp, Homo sapiens
tcccgcacttggtctagtgtatacattcaccaaacttgtgttcaataattgactcatccgcgctgagttctgaaagctagcgtggggaggcggagccaggggaaagccctgcccatttgggc

SEQ ID NO: 70549 - DNA, 122 bp, Homo sapiens
tcggccctcccaccttgcaaaaggaatcagatgcaagggcctgaatcaggacccatccgacgttagctggtcatgtggcctcaaaccagcccctgtgctctccaggaaatgggggatcccca

SEQ ID NO: 70550 - DNA, 122 bp, Homo sapiens
actgcccatgttggaatatgtgtttcatataccaacaatctcttccagtagccctttttgcgtgtgatcttagacgctcctgtcatgtaattccagtccccaggtttccagtgtctataagc

SEQ ID NO: 70551 - DNA, 122 bp, Homo sapiens
tgactgactatagcatcagtcatcactgcacaccctacctggaattagtatataaagctacgcggagcgatctctgcccctgaccctggaaaaatctgtctcacccacaaagatgtgggctc

SEQ ID NO: 70552 - DNA, 122 bp, Homo sapiens
ggccaggctgcccatcaggtcgccgacgtagttgaagtggcgggccacgccccagaagcccgacaccagcagcttgctgtggtgcctctgcccatcggcggatgtgtaggagcactcgatga

SEQ ID NO: 70553 - DNA, 122 bp, Homo sapiens
ttgcacacattccggagccttctctcctccagctgaaagccgactgctcactcacagcagcggcaacacaaccacctccggctgttcggggcgtgcggcctgcacacagtgacacattcaca

SEQ ID NO: 70554 - DNA, 122 bp, Homo sapiens
cccaaacgccgcctgtcaaaggagacgccacccgcattaggacctagactggggcccttccgctcggggtcaggcgcagcgccctcggcttgggccccgccgcccctttaggggtccgggag

SEQ ID NO: 70555 - DNA, 122 bp, Homo sapiens
cctggccaaggaagccccctccaggcattggccaggttctgactcctacagtgttacagccggcagggaacttggacccacaagctcctcccctccccaagcctcagtttccttgtttgtaa

SEQ ID NO: 70556 - DNA, 122 bp, Homo sapiens
gcgggctcagagctttgtcacttgccacatggtgtctcccaacatgggagggatcagccccgcctgtcacaataaagtttattatgaaaacaggctggtgtggggacatggggacagataag

SEQ ID NO: 70557 - DNA, 122 bp, Homo sapiens
gcagcctgagatcaaactgcaaggcggcagcgaggctggtggaggggcgcccgccattgtcgaggcttgagtaggtaaacagagcggctgggaagctcgaactgggtggagcccaccgcagc

SEQ ID NO: 70558 - DNA, 122 bp, Homo sapiens
tgttgaaacaaacaaaatcaaaaacgggagcagagtagaagtttctcagaaccccacttccgccactccgcgctgaatgtttcgcgtcaactcagcaagcgcacacgtcatggctcacatgg

SEQ ID NO: 70559 - DNA, 122 bp, Homo sapiens
ccttttttttttttcacccatatctcactttctttgcaaggtcaccttctggccatgaggcggggagagctccaaaggaggttttgcatgagttgagcgctccctcttgtggctgtccagga

SEQ ID NO: 70560 - DNA, 122 bp, Homo sapiens
gaatttaaagaacggtttccatacagctgagagggtcgaggcaggggtaagtgtagaagacgcaagaaatggagacaccctgggaacagaactctagactgcactccaaccgtagcacttac

SEQ ID NO: 70561 - DNA, 122 bp, Homo sapiens
tctacaaagtagtgtacttgggcaccaaatgcaccactattttttttttttttaaagcttcgttcagggcagccccacacaggttcagccaccctcaacattgcctccaggaggctctgccc

SEQ ID NO: 70562 - DNA, 122 bp, Homo sapiens
gcagcaggggagcaacagcggcttctcatcttccagggctgccaccagcacaaaggacaccgcagcagcacatctgagtggctgcaaaaggggcacccaggacagggcacccttctggtcta

SEQ ID NO: 70563 - DNA, 122 bp, Homo sapiens
tggcactcgacagtattggcagagattcttgccaaacactggtcatccagcaaagaaagtcgggaataaactcctgatcttctcggaggaaaggggcgctgggggccgagtgctggatccca

SEQ ID NO: 70564 - DNA, 122 bp, Homo sapiens
tctgctggacgatgtgcgctgcgcgggctgggagcggaacctgctggagtgccagcacaacggcgtgggcacccacaactgcgagcacgacgaggatgcgggcgtcgtgtgcagccaccaga

SEQ ID NO: 70565 - DNA, 122 bp, Homo sapiens
tcaccactgtggcttggggtgtgaggaaagaaggtggaaaaatctgaattctgttgccagcgtctgtttttcctcgtcaggaataattgacgatgtgtgcgagatttctgcaggcacagctc

SEQ ID NO: 70566 - DNA, 122 bp, Homo sapiens
ctctgccgccgcccgcccggaatcgctttatgtaaatgaagcccaactcgcagtttgcagcgcgcaccgcccggggaaggggggcgggcggggcggggggccttcggggatccacattacac

SEQ ID NO: 70567 - DNA, 122 bp, Homo sapiens
ttttcagcaaaatgttttcagagagctgggctggagacctgcccttgaaagagcagtgtccgctggagatggaggaacaggaagtgggtaggagcaccggccttcctgagtcagaagagtct

SEQ ID NO: 70568 - DNA, 122 bp, Homo sapiens
ctttccccaaagttgctggtctgtttctttccacgttgctgagagcccggatttattaatcgcaccagttgagtcttgattccttacctttatggccactgcaacgaggcagcggggtgcgc

SEQ ID NO: 70569 - DNA, 122 bp, Homo sapiens
gagaaagtgattctctttttggtgatccttctaacctaatgatgtcagtgaaaaaggccacgtcctcccctcaacacacgctagtcccccttccaatagagggaacttgccacagagttgag

SEQ ID NO: 70570 - DNA, 122 bp, Homo sapiens
tccaaagggttggcaaaaaagataaactctgaggcagccctgctgggttctaatccacatcgtgtgagactaagaaataattacacatcctttatgtcttcctttgtcatctcctgtaaaat

SEQ ID NO: 70571 - DNA, 122 bp, Homo sapiens
aaatttagagtttgttaaaacaaaacaccggaaccgcaccggggaccatatttagagtaacgccttaataatgcgcatgagtctccggcagggctgtgaaggtttccgggaagccagccaat

SEQ ID NO: 70572 - DNA, 122 bp, Homo sapiens
ttggagaaaagtggaatctttccctcactatatacagtgctttaataattgtttaatcctcgatgatactagaacaggacaggctcaaatgtcagtagtgctggtactaaaaacaatgaaaa

SEQ ID NO: 70573 - DNA, 122 bp, Homo sapiens
ctgtgtgtgtaggggcgagggggtggcggtgccagggtcctgcagttcaccaggtgcccacgtgcctgccacccgagcgccattcactcccgaccgcggggacctggggcacagccgggccc

SEQ ID NO: 70574 - DNA, 122 bp, Homo sapiens
ctcctttctctgccttcctccacgaccctccttttccgcctgccttcttggtctctgctgcggggggccaacctggaccttggggtccagtgtcctgccattagtcatctgatacccgggca

SEQ ID NO: 70575 - DNA, 122 bp, Homo sapiens
gtgacacctgtcagcacgcctcttttgggcgccagtccaaaaatcgcggtatctgattggcgaggttggagggggctgaacgaccctaattggttagttggacctcgaaccagactttcatc

SEQ ID NO: 70576 - DNA, 122 bp, Homo sapiens
gattccatcccgcttttttgtttttggtgggggtttttgaggcaaaaatccttcatcagccgtgttgtgttccttcatctagaggctcatagggagcactccccaaggcagcttgtaagtgc

SEQ ID NO: 70577 - DNA, 122 bp, Homo sapiens
ggggcggggaggcgggcaaggaggggcagaaagttccggaagcctctgcatcagccgccccgttcagacaggctgctggagacccctaagccaaaggaactgatgatagcacagagaagggt

SEQ ID NO: 70578 - DNA, 122 bp, Homo sapiens
ggggtgagttcctcccatcttgaagaagcgttgttcatctgatcagctttcacagtgtgtcgactccctgtctgcagactagttgcattgcccctgttcagccagacccagaaagaccctag

SEQ ID NO: 70579 - DNA, 122 bp, Homo sapiens
tgcaatacagagcactttaaaaaaagtatttcaggctccctctctcctgttttctccttccgtgacctcttgtaagactttgatcatttgaaaggaatgtgtgggtggtgtgtaacctttag

SEQ ID NO: 70580 - DNA, 122 bp, Homo sapiens
tctggtcagtgtttgttccggctcgaactgagctttcactcagagtccaccactgttgaacgccgctgccccagacctgccattgactttcacctctccagatccagcagggtgtccgctgc

SEQ ID NO: 70581 - DNA, 122 bp, Homo sapiens
ttggcctataatgctcctggagcaattcattcagtcctcccagggagcatctcacatatccgaccacacaagtctgtatgtattcaactcctcagtcattccacaaacatactgacatcttc

SEQ ID NO: 70582 - DNA, 122 bp, Homo sapiens
tcagcctgggcccaggtcgaggaaggcctttgtcctgcagaacaaaagccactgtttgcacgtgttaaacttcatcaaacttcaacagacccaggtgcaaaaccccacatcccaaatgccat

SEQ ID NO: 70583 - DNA, 122 bp, Homo sapiens
agcccatggggacaaagaaattggaggcagctctgagcagcagaaatcccatttctcacccgtgtcccagaagaaaacgcgtcaggctggggaagctgagcagaggccagttctgtgcctag

SEQ ID NO: 70584 - DNA, 122 bp, Homo sapiens
ctgaggggccccaccctacctccatggcctggccggaggggcctcaaccccacagtcagtcgcaccgcaggcagaggggacggaaaccctcacaccactagtcacagccagccattcgcttg

SEQ ID NO: 70585 - DNA, 122 bp, Homo sapiens
gctgggctttgctgggctttgctgggtcttggctgcagcccagggcacatttcgtgttctcggcacactcgctgggtccctggtggaactgctcatccaggcatccccctcttcctgccaag

SEQ ID NO: 70586 - DNA, 122 bp, Homo sapiens
cacatttgtagtgcaagctgcttccatgttgattttgatgtgtggaggctgcagatcctgcgggaggcaaattttcagacatttgggtcctcggcagctgcagcagagtttcctgttaactc

SEQ ID NO: 70587 - DNA, 122 bp, Homo sapiens
tttgtaatgacagggatctccttgtgttgcccaggttggtctcacactcctcagctcaagcgatcatctcactttggcctcccaaagtgctaggattcagggatgagcccactgcacctggc

SEQ ID NO: 70588 - DNA, 122 bp, Homo sapiens
acatccagggctgctttataaacacggattgatgacacattatgcccccaccccgggaagcggcacacagtgctacaaacagctggtggcttccagccggctgatggcccctccctccccag

SEQ ID NO: 70589 - DNA, 122 bp, Homo sapiens
aaatggttggggctgggcaaccacccttgaaaatgtctgctgcattgaatcactgagtctcggttttgttaaataattttttttttttggttaaagatataagcagaaaggttttgttttgt

SEQ ID NO: 70590 - DNA, 122 bp, Homo sapiens
gcaaagacccttaacctacacctaaacactgatatcttctctacatgggtatttattctgcggacctcaggcttcctggactaaagcaactcataaatgagacaatttttttccttcagttt

SEQ ID NO: 70591 - DNA, 122 bp, Homo sapiens
gcaggccgctgggctaagtcattatatgctttattgcctttaattctcacaaaaactctacgaagcaggtactatgttatcctgttttaaggttcaggaaaccaaggcttagagaatgtaag

SEQ ID NO: 70592 - DNA, 122 bp, Homo sapiens
cgttcctggacggtcagcaaaatacagtcccaagaaggctctgtgctgatttgtcttttgcggtgacatcatgttgctcatgttttatgtttttcggagttcattagtttctttttgttctc

SEQ ID NO: 70593 - DNA, 122 bp, Homo sapiens
gccgtaagacctggaggtggtgcctccccccaaaaaataccggcgggggtagcttcctcacggccttcgcccgggctgccctcggcctcagctcggctcctttccttgtgggagggcgagaa

SEQ ID NO: 70594 - DNA, 122 bp, Homo sapiens
ggggacgctggggcctctttcctggtcgcccggcggcagctgaggttattttttccccctcgccgctgcagaatttccctccgagttggataaataagcagcagagtccaacgtcaacgaaa

SEQ ID NO: 70595 - DNA, 122 bp, Homo sapiens
cctgcctaggccccctgccagcccaatacccgcacctcatccatggcgcggatctccaggcgcagcttgtccatgaccgtgatgaagagctgggggcaggtgtgcacatgaggctcgcgtgt

SEQ ID NO: 70596 - DNA, 122 bp, Homo sapiens
ggaaactgcggtaggactgagtgaagggaccaggggcagcccagggaagagatgagaccacgcggggcaccatcgctgtctccaaataccttaactgacacaagggagcagccttctttctg

SEQ ID NO: 70597 - DNA, 122 bp, Homo sapiens
cagggagggcccggtccttggcgaaaggccacaaaagctatttgaagtcatttactcctgcgttcagaacctttacatgctgtatgtcctaagtttactgcttctacttctttttatttgtc

SEQ ID NO: 70598 - DNA, 122 bp, Homo sapiens
ctgccttgggctgcccatctccattcctgtactggaccaggaagtggtcaaactgtccctcgggaactgtccaggacaggctgagggagtcaggggtggcatctgtcacggtcagctccccc

SEQ ID NO: 70599 - DNA, 122 bp, Homo sapiens
caagctctctgctgtctggcctgtgcttgctgtgctggggccacagataagaatctgacacggcctgagaagcaaggacacaaggcattacaaaaaagtgggaagatgccgtgggaatacaa

SEQ ID NO: 70600 - DNA, 122 bp, Homo sapiens
ttaatacatgccagtttattttccttttcttcctccacaagtatgggctactagggaggacgaagggttggtgccgtggtgtttatgtgcctggacagaaagtgaagcgtatccaagaggct

SEQ ID NO: 70601 - DNA, 122 bp, Homo sapiens
gaaaggcggtagcggccctcccaggtgtcagagcgtgaacagagcatggcactgcctgcgcgggtcacccgtgatgtcgggagctcacatgtgaacgagccgcctgctaaactcggaaacag

SEQ ID NO: 70602 - DNA, 122 bp, Homo sapiens
ataaaaaacaactacttgggtggttattagaggaaatggtttactttgtttttttgttggcgtggctctgttaccagtgtttttggattctattaccagattgccaaggtgcgactcctggc

SEQ ID NO: 70603 - DNA, 122 bp, Homo sapiens
tgtgctcacaagggccctctacagaccttcctgaagtacattcactaatcaggctgcctgcggtcactcgctgcggactgcgtggtgcccaggccgccgtgctgatttgatgaggatctggc

SEQ ID NO: 70604 - DNA, 122 bp, Homo sapiens
cttgctatagtcaattcattctccagatgaaagcctgaaagcgccacgacccaagtttcacgtctatccactcaagaggcctgcttggcgcaggcgcataccttcaaaggcctcccgccctc

SEQ ID NO: 70605 - DNA, 122 bp, Homo sapiens
gtccccagcaaccgccgagcagcattgaccaacagacggccggtttatcaaacagactgtcgatttcaccaatagtagtggaaaggcgggcatgaacatgattggcagcttgcgtcttccaa

SEQ ID NO: 70606 - DNA, 122 bp, Homo sapiens
gacggggttttgccttgttggccaggctggtctcgaacttctgtcctcaagtgatcctctcgcctcggtctcccaaagtgctgggattacaggcataagccactgcacccagccagtttatg

SEQ ID NO: 70607 - DNA, 122 bp, Homo sapiens
acacaggtataaggtccagctgtattatttatttacagcacagttcaaagtcattaaatccggtacaaaagaaatggctctcacttcctggattggcaccagacatcctaccagctgcaatt

SEQ ID NO: 70608 - DNA, 122 bp, Homo sapiens
gagacggcgctgtctgcctttgcgtggctctccctcgtctgggcggtcttctcatccttccgggctgcgtggtagcttttcttggaagcctcaacctggcatgcatggagaccactctggac

SEQ ID NO: 70609 - DNA, 122 bp, Homo sapiens
cagagtgcaccgcgcctgtaggctgctgggcagcgggaagaccccactgcgcagctcagacgccggcatcgactctccgtgctggctgtgtccggccgcgcgacatctggtcttggggaaag

SEQ ID NO: 70610 - DNA, 122 bp, Homo sapiens
ctgtgccacctgccagccctgctcccacaaactggtctcattagttgtaaacaacatccacgtccattgcaatctcaaaaccacctgatgcagctatgtaggaaaagattctcatccccagt

SEQ ID NO: 70611 - DNA, 122 bp, Homo sapiens
gagctaggggaccaatttgagactgctgttttttagtctgattgtgttatttcctgtgcacgctgaggggagatttagagatgggaagaaaatatgactcccagtgactgtggtgggagaga

SEQ ID NO: 70612 - DNA, 122 bp, Homo sapiens
agaccatatggcccgcaaagcctgaaatatttactgtctgtctggttctttccaggaagacgtttgccaactgttggtttaagatactctcatcctgtcgttgctttgctcagcgatctgct

SEQ ID NO: 70613 - DNA, 122 bp, Homo sapiens
tgggaaactgaaacaatggatggcatcacagaggtgcctaaaatcgtcttcacgcaggtgcgtcagttcgcgggtgcgggtctcaggaccaggtggcggttcttggtctgcagaaatgctaa

SEQ ID NO: 70614 - DNA, 122 bp, Homo sapiens
gggaggggaacaaggatagagcgctcgccaacggccgacgctccaggccgtcccgcccagcgcagctgcacccaatcacaatgctcagatcgggaggtggagccaatcaggtccaaccaaga

SEQ ID NO: 70615 - DNA, 122 bp, Homo sapiens
acacagtgtcactgggccacccgctagaagcaggaggaggcagctctgcccacggcatcccggcagcagggtgagcaacacctgagcccagtgagagaataaactcacaacaagctgcatga

SEQ ID NO: 70616 - DNA, 122 bp, Homo sapiens
catgcttcagatggcacacctgtgggccaggggccaccatatcttgttatagataaggaccgaggcccaaaggggagccctttggtcaaggtcactagcagatcctccctctctccctgact

SEQ ID NO: 70617 - DNA, 122 bp, Homo sapiens
aggattggaggtgggaaagttttcaaggttaccgaaaaagaggaaaacagatcaagagtacggaatagggacaggtcttttaaaagtggagcctttgaatttaacctctccatttcagtaat

SEQ ID NO: 70618 - DNA, 122 bp, Homo sapiens
cagccaagtgggagacaagttcaggtttctgctccatgggatccaggagcctgcagtcaccgatgagcctggaggaccacaaggtggccagggcccttggagagctgtgctgcggaatcgta

SEQ ID NO: 70619 - DNA, 122 bp, Homo sapiens
ggtttctttcatgctgattcgctcggaggaccctggcccttctgctgcgctcaccgccgccgctctggtaaatgactgtccgcatggtttcaacatgcagttcttcctgcgaagtccactag

SEQ ID NO: 70620 - DNA, 122 bp, Homo sapiens
gagcggaactcaggcagtgccactcgccagcttacgtcaaaagaacaaaaggagtgaggacggtactcgcggctctgccaacacttcccagccccgcacgtctcacacacaccagaacgcgt

SEQ ID NO: 70621 - DNA, 122 bp, Homo sapiens
actgggatttctcggccccagtctcagctgcattaagttcataacgatttgtaaatgccacgttaagtttactcattgaaaccccctgatgtccaaacgccagaggccaagctcttgaaaca

SEQ ID NO: 70622 - DNA, 122 bp, Homo sapiens
tctgcggcagccgtaaagcaacctggaggcgcggtgctggcttttacgttctgagccgctcgccctgccgcttccctgcgcgccctctgcctcctacttcccgccagcttccctcggtccgc

SEQ ID NO: 70623 - DNA, 122 bp, Homo sapiens
agatacttcagctagcacagttagccccctcaccatgtgatgccctgcactgcctcgagacgctgcagtctctgccagcaagaagaccctcaccagatgcagcccctatacctaggacttct

SEQ ID NO: 70624 - DNA, 122 bp, Homo sapiens
ctggttcaggcaacccctgagccttggcactgattcctggaggagtcctgtgtgagtcagcgccaaacctttcctgttccttctggcttatccagattcttgagaaattgattctggggccc

SEQ ID NO: 70625 - DNA, 122 bp, Homo sapiens
tcaccctcttcaggcccaccctgccccagaggcccacggaaaccctgcctgtactggggccgcagcgctgcccccacccatacgtaattacacggctcggtgtaattgcaaattcgaggttt

SEQ ID NO: 70626 - DNA, 122 bp, Homo sapiens
ccacccaaatcataataataagtgagccatgaattggggttgtccaccgtcttgcaaggccggtcagtcactttttggtttagagaaccatcagaataggccgggcatggtggctcatgcct

SEQ ID NO: 70627 - DNA, 122 bp, Homo sapiens
gcctgagccgggcccgcggaccgagctgggagaggggttccggcccccgacgtgctggcgcgggaaaatgttggagatctgcctgaagctggtgggctgcaaatccaagaaggggctgtcct

SEQ ID NO: 70628 - DNA, 122 bp, Homo sapiens
ggcggcggccaggagctacagctgtgggctgcactcccggcgtggagtctccttcctgcccgcgcaggccccggcgccccagcgaaacgctccggccgctcccctctcccaacactctggtt

SEQ ID NO: 70629 - DNA, 122 bp, Homo sapiens
tgacggggatttatctaatttagttagcacatcatcagagatctgcggaggcctctcctgcgggcacccgtgcctggcccagcggcacctctccctgcggaggcctctcctgcgggcacccg

SEQ ID NO: 70630 - DNA, 122 bp, Homo sapiens
agcaaatgcgatcattatcctcttcacccaggcctctttgctggtgggaggttagttttgcgtttaatgaacatgggctgagtctctctaatgaggaagagatgggtgcacagtgattagaa

SEQ ID NO: 70631 - DNA, 122 bp, Homo sapiens
aggtccaggcctgctggccctcccttggcctgtgacagagcccctcacccccacatcccccgggctcaggaggctgctctgctcccccaggtcttcacctcagacactgaggcctccagtga

SEQ ID NO: 70632 - DNA, 122 bp, Homo sapiens
cagctaagccatatctcacaagccagagagagaccacaggctctgaggacactcaccttgcgtgctgggccacacccacagagccagcaggaccagcctccagaccatcctgcctcctgcag

SEQ ID NO: 70633 - DNA, 122 bp, Homo sapiens
cgtggaggccttgctggccgcgctgggcgccgccaaccgcgggccccgggccgagccccccgccgccaccgcctcagccgcctccgccaccggggtcttccccgccaaggtgctggggctcc

SEQ ID NO: 70634 - DNA, 122 bp, Homo sapiens
caacctgtgattttcagggtgttttcaggcaacatgcctgggagtcgagtctgttacctccgctcaggggaagccagcgcgcatgcacgcgcacacccccacagcacacccggccatgactc

SEQ ID NO: 70635 - DNA, 122 bp, Homo sapiens
tccctctgcgattgatttacaatctgtaacatacaaagacagggctggaatcccagccgtcggaaacgtgcccaaacacgtggaaaaaaaaatcctctctacctaatacactttccaggctt

SEQ ID NO: 70636 - DNA, 122 bp, Homo sapiens
aggtaaactttgatgggcagcagatgaataatgaggctgcagcacagagtgggacacaaacggctaggacactgggtcagagggaggggctcgggcaggtaatctcatcattgaggaaggac

SEQ ID NO: 70637 - DNA, 122 bp, Homo sapiens
agaagcctaattggagaagattcggttttcttcgccatggcaggtccctttctcctgacccgcagttgcaggggctgagggtaggcgcaggtccgccctggggtcgaagccaccatcgggcc

SEQ ID NO: 70638 - DNA, 122 bp, Homo sapiens
agtttttttaaaaaatttacatagaattggcatatattagacacttcatgtttaattgaacggatcatttttgagtaaacttttcttgtgatagcctgtggtcgttgcattatttccccaag

SEQ ID NO: 70639 - DNA, 122 bp, Homo sapiens
aatgacttctattggagtggattaccccgggaagctgtaggctgcactgggggagaattccgcctcggtatcttcatttccatctaaaatcaaacatgatccggtaactaaggttttccgaa

SEQ ID NO: 70640 - DNA, 122 bp, Homo sapiens
atagttgatcaaaccattccctgaacatgttggatacccaccttcaccagttgactgttgcgatgtggctttgctccacacttttcgtagcagggaatgagccagagaaggaactgggatct

SEQ ID NO: 70641 - DNA, 122 bp, Homo sapiens
atgagagatgcaaagtgcttgaattttctgactcttcctttcagacccccccaagacacacgtgacccaccaccctgtctttgactatgaggccaccctgaggtgctgggccctgggcttct

SEQ ID NO: 70642 - DNA, 122 bp, Homo sapiens
agcgagggcagatggggcgggccaaggacgcagccagtccccacgccgggccctgcaccacggcagctagcgcggccggtgcttattccaccccagaagatccggaatgtttcctcccatgc

SEQ ID NO: 70643 - DNA, 122 bp, Homo sapiens
cgcccaggatgcggtagccctgctgtagctcgtaggtcagctcctgctccttgcagcaaccgcctccgatcaccatcgcctccatctcttcctcctgatcgtccgcgtcctccagcgaggag

SEQ ID NO: 70644 - DNA, 122 bp, Homo sapiens
ccttaaagcggattgcctggagcgtgccagcttgtgtgcgcgtataaatgcggcgcccgccgaagggctgggaagatttgactcgcattagatctccagaaaaggcccttggttacggcggg

SEQ ID NO: 70645 - DNA, 122 bp, Homo sapiens
tctgccgcagaggggatcggactggtttgagggacccagccccctcaggtccttctccctcgccgcggcccagccccctcgcagcctgagtgggggctctgcaggctctgggtgtctgcagc

SEQ ID NO: 70646 - DNA, 122 bp, Homo sapiens
caggtgccccagagcaagtgcaggcccctctctgggactcatttcctcagaatcacgaggcgtagggaaactggatgatgccaggagagtgagattctggccccctccttcctggctgtctc

SEQ ID NO: 70647 - DNA, 122 bp, Homo sapiens
gtaccctgagggagcgggagggcacctggtgaggagccgcagctgctgcgagacagcccccgcccctcctgcgggaggtctgttgtctgattctttgcatgagggagggaagcccgtgctgt

SEQ ID NO: 70648 - DNA, 122 bp, Homo sapiens
cgcggggcgccatggcacaccgagcggctccgtcttctgctcctcagagagcccggctggcggcctgggatgacaaggtaccatccctccagaggctgatcccaatgcatcggcttcgctta

SEQ ID NO: 70649 - DNA, 122 bp, Homo sapiens
tgggggcggctggctgggccggggggtcagtggccaactcactgcccttccagaaggcaccgctagtagaggtgggtgttgagggcaccagcatctccagctcctccagaaagaggctggag

SEQ ID NO: 70650 - DNA, 122 bp, Homo sapiens
gaacccaagaggggctgcggggtcagccttggggcagccgggctggaggcagcttcgctccgcagacgcagacgcgagacccgcctgggaccctccgccgaccccgctgcggccccgcgacc

SEQ ID NO: 70651 - DNA, 122 bp, Homo sapiens
tcctgtctttgtctgctcttcctgcaaggctacggcgcctggagcagggtctgcagcggccgccgcagcaacgcgagccaagtcgtgccccgcacggccgcccggggccgcaccctcgctcg

SEQ ID NO: 70652 - DNA, 122 bp, Homo sapiens
gggccactctcggtctccctcttcattctgggcgcgcattagctctggtccggccggttccgctgcagctgaacagcaagatgcggcacccaggttaccctgatcatcgcagatttctcccc

SEQ ID NO: 70653 - DNA, 122 bp, Homo sapiens
gcttttctttggcaaagagagctctccacggaggtcctcacccggatggcactgtgagcccgagtgggcgatgtctgctctcccaggggcagggggtggaaggtggcacagtttggaccgga

SEQ ID NO: 70654 - DNA, 122 bp, Homo sapiens
gtcctgggagctggacgcgcacattcaaacaaccaaataatattagatagtgtcaagcaccgtgaagaaagggaaacggagagacggagtggatgaggaagggatcaccctgccgggctcag

SEQ ID NO: 70655 - DNA, 122 bp, Homo sapiens
gttggagaggtcgtacaggccttcgcaggtctggctcgtctgcatgaagtcggtggggctcggcctccctggggagcccgtggctgcactccctgcgcgggggctcattttggacccttccg

SEQ ID NO: 70656 - DNA, 122 bp, Homo sapiens
gaagaagggcaaggcctcctccccacattagggtctgggatcagagggagtgcatgaagccgcttgaggctggcgcggtagtggtgccagcggcaccttcagggacaggaaggggcggtgat

SEQ ID NO: 70657 - DNA, 122 bp, Homo sapiens
tgcctctgctgtggaactgccctttcctccctcggactaatgaaggaccaaagaccccagcgtcttatccacacctccaaaaaagctgcagttgacacaaggaggggaggccagtctttctc

SEQ ID NO: 70658 - DNA, 122 bp, Homo sapiens
gcctccgggctgctgtatcaggcaaggctcagccaggagaggtgggtaggagcagctgcacgtcaggtgcaagagaaacaggtgcaagagctgttacctgctctgctgcagctcctggagtc

SEQ ID NO: 70659 - DNA, 122 bp, Homo sapiens
ggaggatctgaggcctggaggtgtcctgacttgcccaaagctgataccccaccatcaacacgggaggcggggggggcgcgcccagagcaggggtcgaggacggggccagtctagaagtgctc

SEQ ID NO: 70660 - DNA, 122 bp, Homo sapiens
cataaggaactcgccctccggaaagacgcgggggaattctgggagtgcgcggccttggagcgcgcacatgcgcggcagctcccgctgctgaatagctgagaggcgcacccgggcggccagct

SEQ ID NO: 70661 - DNA, 122 bp, Homo sapiens
tgtccgcggccctgctcagccaatcagcgagtgggctcctaggcaggtcctgagtgacagcgcggcgggctggatcaggagatgcgcgtgcgcggcccggcccggctgatcgcttcgggtgc

SEQ ID NO: 70662 - DNA, 122 bp, Homo sapiens
gatgaggttgatggtgtagaagagcggcagccgccggatgacgaaggcataggtgatgtccgggtagatctcggcacagcactcgtacttcctggtgttgtaggtgcccacggcatccacga

SEQ ID NO: 70663 - DNA, 122 bp, Homo sapiens
aatccacattatcaccaggcttggtggcacatgcctgtaaatcccagctctttgggaggacgaggcaggcggatcacttgaggtcaggagttcgagaccagccaggccaacatagtgaaact

SEQ ID NO: 70664 - DNA, 122 bp, Homo sapiens
ttgaaggggctggcgggctcacaattattaagtggttagtaactgctgagggttcactaacgtatttcagaggagctaaaaagactaaaatttagtgtaaataatagaactgcagatagtag

SEQ ID NO: 70665 - DNA, 122 bp, Homo sapiens
gcaggctgcagagagctggagtgaaggctgatggggccacagtggcatgtccacagagaccggggcctgatttgcagcttgtggcacctgccgaacccccggcgttggggtacatggcccat

SEQ ID NO: 70666 - DNA, 122 bp, Homo sapiens
agctggggttacttcctgaggggacttcgccttgggggctccttgccccccgcccggaagcgggccctctacgggaggggtagcggagttggtcttcccaccttccgcctggcccgagagta

SEQ ID NO: 70667 - DNA, 122 bp, Homo sapiens
atcacccaccaggagtcccgggcgggggcaccacctgctccacgctgtcgcgggcttctgcgaggccatgatccgtgcccaacgccagcaaagggcagcttgtgcccgagagtgggggaaat

SEQ ID NO: 70668 - DNA, 122 bp, Homo sapiens
tcagtcagccggcgcggcacctacaagctcagtcgggatcctggagaggcgggaaggcagcggggccctttccacagagagaacacagctcttcgggagattcccccgctgcccccgagccc

SEQ ID NO: 70669 - DNA, 122 bp, Homo sapiens
taccaccctcactctaaggtgtgaaacgcatggaatagcgaaattcctctttcctaaaagcgaagtttgagagtcactgaggaaaggatatcttcaggaacgcttccttcaccacttttcct

SEQ ID NO: 70670 - DNA, 122 bp, Homo sapiens
ccaacgttagaaaggccgcaaggggagaggaggagcctgagaagcgccaagcacctcctccgctctgcgccagatcacctcagcagaggcacacaagcccggttccggcatctctgctccta

SEQ ID NO: 70671 - DNA, 122 bp, Homo sapiens
cgcccgcactcaccaatgggcttgtccaaccgcatgaggcgcaagtacggctgcagggggcggggcgcagagtccaccaccgccgccgcggacaaactgagctggcgcccgcgcggctcggg

SEQ ID NO: 70672 - DNA, 122 bp, Homo sapiens
cccctcagccccgccggccccctggcacagctggccacaaagatcaagtcttgctagcagcgcctgcctgctcaggcccgggcctgctccgccgccgctgggctccacactgtctgtcttgg

SEQ ID NO: 70673 - DNA, 122 bp, Homo sapiens
cgatgtggggcagctcctcgtattttaaatggaagacaccaattcaaggcaccaccataacgggaaacaagttcaaaggtttttatgtacggatcctgggcagggagggtgcgatgagtcag

SEQ ID NO: 70674 - DNA, 122 bp, Homo sapiens
ggacgggccccaggttggcacagaaagcatgttcctctgagggcgggaagacagggcgtccgcctgcagccctcaccgaggtgctgcgcatgggcgtgccccgggctgagccgcctccacca

SEQ ID NO: 70675 - DNA, 122 bp, Homo sapiens
gcgcagcccctgttcccgcccgcgcgtctccctccacatctccgggcaagcaaagggagccggctccagcctcggccagcccagagagtgcctcccacagtgcagcggcgggctgaagggct

SEQ ID NO: 70676 - DNA, 122 bp, Homo sapiens
ccgcttccgggtttgtgcgaatctgctctctggggacagaagccaggcctgggcgggacccgcggggaggtaggcggggcctgagcgaggtaggggcggggcgcgaggcggagagaccttgc

SEQ ID NO: 70677 - DNA, 122 bp, Homo sapiens
ctaaccgtcctggctgccccagcctgatgactcagctgattaggggccctgggcagcgcccgggactttcctgccgccctccccagatccaaatcacaggccaggctggagggtccagctga

SEQ ID NO: 70678 - DNA, 122 bp, Homo sapiens
aagtactttcacactcatcatctcagtccttggagtcaggctggatattagggactgacacgttatcaacaaggagccaagatggtgaggcacgcctggtgctcatgctcatgagttgctca

SEQ ID NO: 70679 - DNA, 122 bp, Homo sapiens
aggaagccccaacgagctctcctttacttggctcacaattcttaaagttagcatcaaaaccgaagaagccactttcatttctaagtgtgaagtccagcttggaagtatattttaaaacaatc

SEQ ID NO: 70680 - DNA, 122 bp, Homo sapiens
agggaccgtgaccggacaaaagagagagaccgagatcgggatcgagagagagatcgtgaccgggatagagaaaggagctcagatcgtaataaggatcgcagtcgatcaaggtaaggctttac

SEQ ID NO: 70681 - DNA, 122 bp, Homo sapiens
attgtagcggaggcgccaagccatgacacgggcaccgagctccccctagctgccaagtggcgctaggcgcggctcggcgtttcagcttgccatcaaccaaaagccaattcaactgaaagttt

SEQ ID NO: 70682 - DNA, 122 bp, Homo sapiens
cacgtcagcagtgccccactgagggggcccgatgcaggaagaggcagcccagaggccagccggtccccaccacccagctaccgggtttggagaggaaacacagagcagtgtctatttagatc

SEQ ID NO: 70683 - DNA, 122 bp, Homo sapiens
gcaggaaatgcctcattttaggttttctataaaggacataatagacaagaaaagcaaaagcgaagaggttatcatctatcatttagaaatggacaaggggcaatcagaccattttaatggag

SEQ ID NO: 70684 - DNA, 122 bp, Homo sapiens
ccatccgacatctcctccttctgtcaagaagctccatctccaggaaactactggacacaccgtagggatggacacgcaaggatgaaccttgcccctggagttagagaccccacaagtgcagt

SEQ ID NO: 70685 - DNA, 122 bp, Homo sapiens
aaactcatttggacccaagttcgccttaaccctcccctcccccaaccccccttctttaggcggtgtgtggcatttgtttgccacttttaaaggcccagctctgtttgctctgatgttctttt

SEQ ID NO: 70686 - DNA, 122 bp, Homo sapiens
gcggcttcaggggtttgggtctcgtggcgtaccagaaggtggtgagtgctgcaaaagctccgaagcccataagcgtgttggtcggaagagtacgcacgtactgtcggaagtcaaccagctct

SEQ ID NO: 70687 - DNA, 122 bp, Homo sapiens
ggcctttggtcagattctttcgtctgaggaggcaataattgaggctgctgcagacacatacggattcgccaccggcaactcaggtacctgccaccggcaacaggctcgctcagcctctgccc

SEQ ID NO: 70688 - DNA, 122 bp, Homo sapiens
gaatctgctcttcggaggctatcgcagtgccttggaaggcggcaggaatccgcacacacccgccccggaagtgagccgcttctggcgcggggcattgtggggggcgtagtctctttctcagg

SEQ ID NO: 70689 - DNA, 122 bp, Homo sapiens
aaagtatatctgcaggtcggagttagtctagggttttcaggttacgtactctgctttagccgtcagtcttcaggaaaatcactcaggcttcaagggtcttaagacagtggaaaggctgactt

SEQ ID NO: 70690 - DNA, 122 bp, Homo sapiens
ttcaccgaagttgaagggccgggaagggcctgagatggggtctcggccctgtccccaagccgggcggcccggccggctggcctccctgggcggccacgtctgcagcccccgcccggggccca

SEQ ID NO: 70691 - DNA, 122 bp, Homo sapiens
ggacagacactgaggagctggaccaagcaaaactacggcttcaggaccaaggccaaggcccgcatggccctcggtggtccagaccctccggcgccaccttgtggggcaagtgtttgacggga

SEQ ID NO: 70692 - DNA, 122 bp, Homo sapiens
taggaaggagggaacagaagtcctccactatgcttttcaattgcgtagccaggagagaagcggaggctgtagacaaagggtattttaagtaactcggccagcagctcaccaaaggggaaaac

SEQ ID NO: 70693 - DNA, 122 bp, Homo sapiens
ccaggcgctcggagcgttaccagggaaacaggtctcggttttgcggctcccactcagctgcgggagaaagctaagcagcaaaattcagaccaggctctgaacccgcagtaaaaagtaataat

SEQ ID NO: 70694 - DNA, 122 bp, Homo sapiens
tggactgaggccaatgacttggctaagtaagggatgctgtgcacagacctatccctaactcgacaagatcttcatggtgactctagtagcctcagctctcctgtttggatcagccacctggt

SEQ ID NO: 70695 - DNA, 122 bp, Homo sapiens
gctggatgcctgattcaaggcctgcggtctggaagttctccgatggtggagcggcccctacggccacgccgcggtcggccaggaggtggcgctgtgactgcagaaatggcgggctccggctg

SEQ ID NO: 70696 - DNA, 122 bp, Homo sapiens
tcccaaacaactcgccttctcctccaacttgggcgacagtgaatgtccaccaagattccacggggctcttttacccaggacccaggttcctgcagggctccccacttgctggcctcacaatc

SEQ ID NO: 70697 - DNA, 122 bp, Homo sapiens
cctcacggatggtgtaggttctgtctgctccttgcgtttcagtggaggtgcacagagctccggggggcatcggggaccgcgggcccaggacgtgtagtagggagcagtgctgtacacttcct

SEQ ID NO: 70698 - DNA, 122 bp, Homo sapiens
gaagcggaaacacgttttttcaagttcctgtatttttatgtggagttgctcactgcccaacgtagaggactaggaatcaggagtcggtggccgtatgctggaggctggagccgcgggagcgc

SEQ ID NO: 70699 - DNA, 122 bp, Homo sapiens
acatccgctccaaccagcagctggtgcccagctactctgaggcggtgctcatggacctggcggggctcgggacgcgctgcggcggggcaggcggcggctacgcgccctcgtgccgctacggt

SEQ ID NO: 70700 - DNA, 122 bp, Homo sapiens
gcgaggggggcgggccagacgagcggggcggggcgagctgctgcctaatcctttgtctgccgcgttccagcccttcccggaagcagcgtcttcctagaaccgcgggctgagcggtggggccc

SEQ ID NO: 70701 - DNA, 122 bp, Homo sapiens
gggaggtgcccctattattatttgacaccccccttgtatttatggaggggtgttaaagcccgcggctgagctcgccactccagccggcgagagaaagaagaaaagctggcaaaaggagtgtt

SEQ ID NO: 70702 - DNA, 122 bp, Homo sapiens
gccctgggcatttcttccgtcccttttgacagtctaggcggaataatccttttgtggccccgggcccctgccctgacagacgcggccgcagctgagcgcgcagcctcgctccattgttgggg

SEQ ID NO: 70703 - DNA, 122 bp, Homo sapiens
cgatcacgcgctcgccgcagagctcctcgctgttcagctcgtaaagggcgtcgtcggtgtcgcgggagtcctcgaactccacgaagccgtagccatttttgaggtctacttcgaggaggcgg

SEQ ID NO: 70704 - DNA, 122 bp, Homo sapiens
ggcgcgctctggctttccgcgctggcacaggggtgggacaagccaagtttccaggagactcgcccagcgcgggcccggccctcgcagcgtgggggtggccgggcgtccccgcggcgctcctc

SEQ ID NO: 70705 - DNA, 122 bp, Homo sapiens
cctggtgaagagtgtggggtggggattcccctggaagaggggctgggctcctctctatagcgtggctgtggtgtgctggaagtgccagcataatgactaagccccttgttccttcccaagca

SEQ ID NO: 70706 - DNA, 122 bp, Homo sapiens
ggcgttcaggagggccaaccaggaagatgacatccagcccacatttgtctctgtggctgacgctctgaggtttggcgctctggagaaacgttgaaagaaaactaaagatgggcagtggtcgg

SEQ ID NO: 70707 - DNA, 122 bp, Homo sapiens
tataagaggagaacactttgggatcagttctcagataaacccaaggttgggggcagggaacggtgggctgtaacagccaatcatgtcccatggaagcagagtttcctggtgcccccagcaat

SEQ ID NO: 70708 - DNA, 122 bp, Homo sapiens
gtttcaggaatggcaccttccctgctcacctgaggatggtgatgttgttggcacagaaggcgaggtctcagggggacaggcgcatcacgacgcacagccttcccatcctggaccacagcatt

SEQ ID NO: 70709 - DNA, 122 bp, Homo sapiens
ctgctgtgtgctatgggcccttgggtagggcacgggctcaggcaaatgagccagagcacacgcagatatagaggcatgtgcactggctgcgctctgcttccactctggtgcctgccagcatg

SEQ ID NO: 70710 - DNA, 122 bp, Homo sapiens
gtcaaaaaataaacacacttataaggctttgatggatattgccaaactgttctccaaaaacgtggttctaacatacattttctccagcagtgtacacttagtattttaacctgcactgagat

SEQ ID NO: 70711 - DNA, 122 bp, Homo sapiens
cccacggatgcacctctgcaccgtgtggggtggtggggcccgtagcatggccgtgctgggcgttagtgggtatgaggggcgcagatgtgtctcaggacagagtgagctgtggtgaggctgag

SEQ ID NO: 70712 - DNA, 122 bp, Homo sapiens
ttggggactctggcaggggtgtgacaggaccctgggatgctcaccaggaagtcctcaagacgaagaggggggcggcctgggggtggctgctccaggaagagctgcagggtgacgttgagcgc

SEQ ID NO: 70713 - DNA, 122 bp, Homo sapiens
ggaggatccaaccccaccctcgacgggcttgaggggttagcccgcctcccgcagcccgggcgccccagatgtgcagcctgctcgcctctgcgccgcctccggctggggaagggccctgggca

SEQ ID NO: 70714 - DNA, 122 bp, Homo sapiens
aggcacgtggtatgggggcgctctcttattggtcgtgaatggtaccttgtggtacagagacgtgatgtggttggctagaatgaatcccagcttcccactagatgcccctagctggctgttgc

SEQ ID NO: 70715 - DNA, 122 bp, Homo sapiens
cctatcctgtcagccgcagtcgtgctgccagctccagcgaggaggaagaggagggcccgccgcagctgcctggagcccagagtccggcctaccacggcggccactcctcgggcagtgacgac

SEQ ID NO: 70716 - DNA, 122 bp, Homo sapiens
caaaggtttctcttctgcctcagccaccagaggagggcaccctgctgtcaggtatttctccggaagaaacccccctgggatcccagaggcacggcccctgtggtgcccatctgccctctcct

SEQ ID NO: 70717 - DNA, 122 bp, Homo sapiens
ctgggaagcccctgcgctagtcctggtgctgctgtgtaaataaagccgcgatgcggagctcgcctctggtcttctcttattgtttacccaaggctggcagatgttttataagccccgaacgt

SEQ ID NO: 70718 - DNA, 122 bp, Homo sapiens
ccctgtgccactgcccctgaatggggccctgttaaccccatctgcacaggcccacggctccggctttatgggttgctatggcaacccctggccttgacaactgaagtgcacttggctgagtg

SEQ ID NO: 70719 - DNA, 122 bp, Homo sapiens
ttgggcggtcaatgggactgggtgccgtggagcagggggcggcgctggtaggggaggctccggccgcacaggagctcacggagtgggggaggctcaggcatggtcccgagccctgccccgcg

SEQ ID NO: 70720 - DNA, 122 bp, Homo sapiens
gaaataaacaattcatacatttcaacttgctgctgttctgagtagcgtgatgaaatcttgcgccatcccacttcattctgcctggaatgtgaatcatcccttagtcaagcatatccacgctt

SEQ ID NO: 70721 - DNA, 122 bp, Homo sapiens
ccgcccccaccttgctccagtgtggaaagcagccacctgcccagggcctttgcacctaggcgttctctaacggacctcctatgttttttcctcggatagctataggattgctctctcacctc

SEQ ID NO: 70722 - DNA, 122 bp, Homo sapiens
ggcaaatgtggccagcaaatgtgctttgtttagtccctcccagggtttaagatattttttcgaattagtttccaacattttagaatcagaagtgtcgaaagacaaaatgacagcaaatttaa

SEQ ID NO: 70723 - DNA, 122 bp, Homo sapiens
gctgtgtccggaattacccatcaaatgggcctggggaggcctgctgggctggcaccctcccgcggcctcctcccgccgtcctgcccgctgtggctggccagttcctgtcacttgtggctcaa

SEQ ID NO: 70724 - DNA, 122 bp, Homo sapiens
ttcctgaaggcggaggaactgcgagtgcctacgttggcccaaggcctgacactacgatcccggggaccctcgccctaaccggccccacctcccgggccccaaacctggactcggccccgccc

SEQ ID NO: 70725 - DNA, 122 bp, Homo sapiens
tccgtcccgcaggtgcaaccggaaacctcgggcagtgcccatcagacaaacgcaggaagacgagaggcggagagaggaagcccgggggagccgggggaccctgagaacgacagggtggggcg

SEQ ID NO: 70726 - DNA, 122 bp, Homo sapiens
gccagttcaagtatgggaagcctggcccagatgcctcaggggtccccaggtcagaagagccgcccctcttccctctcccttctcttcggactgaccctcagggagtaggcgagagttttgct

SEQ ID NO: 70727 - DNA, 122 bp, Homo sapiens
gacaggacaaatgggggaccctgaggactatgcttgttaggctggtagttccatggaagtcgttgggaggctgtgggtgggcagcagaggggtttaggggattttgtggaggaacagaggca

SEQ ID NO: 70728 - DNA, 122 bp, Homo sapiens
aaatttataaaaattatcccatagagtcctatgaggcagggaatgttactgtacccatttcgcagatgaggaaacttggggcaccgacatttcccagagccaacatgtaaaccaggcatttg

SEQ ID NO: 70729 - DNA, 122 bp, Homo sapiens
caggtggagtcctaactggttctggaggagaccagtatcctcgatagccatggagatgagcgggaggaacagcgggccctgagcagccccggaagcaagtgccgcattcttcaggaaggaag

SEQ ID NO: 70730 - DNA, 122 bp, Homo sapiens
atgtttcgccatcttcttggacaatcctaagagggcattgcagaggcttccggacactgtcgttttcctgggaagtccacaggaactttagcttggacgagaaaggactagggaaaaatttt

SEQ ID NO: 70731 - DNA, 122 bp, Homo sapiens
agaaaggaaagctgcgggggaaaagggccaaaccctgaaattacccggatgtggtccccgcgcgcgcatgctcagtggcttctcgacaagttggcagcaacaacacggccctggtcgtcgtc

SEQ ID NO: 70732 - DNA, 122 bp, Homo sapiens
tgtgttttgtgtttccttcctcttagcagcctaagagaaatgtgcagtgtagctttttgtcgacatgagctgcaaggtaatgacacttctgcttctttggtagttacatccttgtaataacc

SEQ ID NO: 70733 - DNA, 122 bp, Homo sapiens
gtctgcctgagtcctggacaaggatctgtctgtggaaaccagggagagacccccaggctgcgcccagccccttccccttcacttctcgtcctggaatccctgtccctgaactggactccctg

SEQ ID NO: 70734 - DNA, 122 bp, Homo sapiens
gggggccaccccctgcagtttgtccggccggggctgcagggcagccaggtcgctctgggtcggtggccgtgggtgtcagcctctctgctgccggctgcctggccatggaggagccctgtctg

SEQ ID NO: 70735 - DNA, 122 bp, Homo sapiens
tggggcactgtgagaattgagattctctctcttcccgcccagtgtttacctctgaatagccggttctcgcaccgcctaccgctttaaggagagttacgcgaaaggagtcctccattaattgg

SEQ ID NO: 70736 - DNA, 122 bp, Homo sapiens
gggctgctgccaggtgtacagccgcccacacacaccccggccacagccgcacccccgacgcgctaccggcactgaggcctctgtagttttccccaaggtccgaagactaaacgctgttctgg

SEQ ID NO: 70737 - DNA, 122 bp, Homo sapiens
ctagaagccttacctcatttcgtgcaaccagagttataaaagctccttgtttatagcactcgatagcaatgcacttcccgatgccactggaacctcctgtaacctaaaacaaaatcataaaa

SEQ ID NO: 70738 - DNA, 122 bp, Homo sapiens
tccacagggttcaagctggccaggttctgccatttcctggcctggcgcctgacctctgagcggtgagggttagtgaggtgtctgggaggactggcaattcgcgggctttattggcatcttat

SEQ ID NO: 70739 - DNA, 122 bp, Homo sapiens
gcaacatccaaacgtgttcagtgggctcgctcatctctctaaacagagcatgaggtagctcgcgtgttctcaaactcatcatatgaggcgtgactgcattcgggtcatgggcaatgggacca

SEQ ID NO: 70740 - DNA, 122 bp, Homo sapiens
aacggccacagagtttaaatgagagccagggaagggaatccggcaaggggccgccccgcccgcatctcccacctagctacattgttccggcacgggcaatcctgcgctctttaatatgctgt

SEQ ID NO: 70741 - DNA, 122 bp, Homo sapiens
gagccccgcccggcgcgccccgccggaatgactcggcgctttccctcgttggggcgggtgcggaaaaatactaataccccaccctgttgcggatggctgaggttggagtgaggcgcccttgt

SEQ ID NO: 70742 - DNA, 122 bp, Homo sapiens
tggagtgcgagcagatccgtctgaagtgtattcgtaaggagggcttcttcacggtgcctccggaacacagggtgcgcggggtgccacccgggcagctctgcccgcctcgctagcggcactgc

SEQ ID NO: 70743 - DNA, 122 bp, Homo sapiens
aagcagctgagcccctgctattccacctcatccactccatcctccccaattaactggtaacgaggtggtgacgccctaaccacatttcacttcctgctaacaaagcttgtacaacaaatgca

SEQ ID NO: 70744 - DNA, 122 bp, Homo sapiens
ggcgggggcgggggcgggggcgggggcgggggcagccgggagcctggagccagaccggggcggggccgggaccggggccagggaccagtggtgggaggaggctgcggcgctagatgcggaca

SEQ ID NO: 70745 - DNA, 122 bp, Homo sapiens
tgggggcaggtgaggccgcaggctttcccacggaggtctgcagaagcaacgctgctgagccgaggcggggaccccagacgtgtgcgctgagcctccggccacacaggtggaaccagctggac

SEQ ID NO: 70746 - DNA, 122 bp, Homo sapiens
gatcagcagcatggacaagaggttgcctcctgtcaccttctccatcgcctggcccagcaccgacccaccccgcctgcagcaagcccagcaacatcatccccgccgctgccgccatttcactt

SEQ ID NO: 70747 - DNA, 122 bp, Homo sapiens
cagcacgcagcccctccgggagccagggaaaaccgccggcgaagatctggagcggtaaggcggagagaagggtctttccacctgcgcggctgcagccggcggatccctcttcccaggctccg

SEQ ID NO: 70748 - DNA, 122 bp, Homo sapiens
cggcccgggagctcggggttcccggcactacctgaatgcagcccgaagccaagttgtgcacgcgtttgtcctataaaagcgaagtgagtggattcccattttggaatcccggtgtctccaac

SEQ ID NO: 70749 - DNA, 122 bp, Homo sapiens
gaaagtttacgaatttgtgttgggtcgcattcaaagctgtcctgggtcccatgcggcccgcgggttagacaacttgctgtaaacagtacaagccagtaatggagtttcacctgtcattttca

SEQ ID NO: 70750 - DNA, 122 bp, Homo sapiens
tgttccccgggtgtgtgttggcattcaggctacagggctgcctcatcctgaagaaggctgcgtttacccagggagccataaagagatgacctccgataacctgaatcaatatttccccattg

SEQ ID NO: 70751 - DNA, 122 bp, Homo sapiens
caactatttcatctcctgcctcaaggctggcagcttaaatctaaatccttcctgaagggtcgaccagtgtttagcttctccgtcccaggccggccagcccccgccaatccactcgcgcccct

SEQ ID NO: 70752 - DNA, 122 bp, Homo sapiens
ctgaggctattgttaaaatgtagtctgattcagcaggttgcgggggagagggagaagagccgagaatgtgcaggtctaaaaagctcccaggtgatgccaatgtttctggtctccagacctag

SEQ ID NO: 70753 - DNA, 122 bp, Homo sapiens
cacctcccggggcccgaagtgggaaggaagaactcctgggaatagagtggcaaggctgggcggccggcagaaaagcatcccggcctctcgggctcccagctcgatacgcaccgcagagcgcc

SEQ ID NO: 70754 - DNA, 122 bp, Homo sapiens
gcagctacctgttgaaaaaaattaattcaagagatatcccttaatatctactctgcaaggcgtggtgcttgacttcatagaaattttcaccaatgccaatagtttgcaactgtgttttatat

SEQ ID NO: 70755 - DNA, 122 bp, Homo sapiens
gagccagtggcctgccgtctcccagcactctgctattccaaggcctctgctctgacggttcgaaaagggatggtccctgtttctgatgccaattgcacggttttgtcttaacctttcttttt

SEQ ID NO: 70756 - DNA, 122 bp, Homo sapiens
ttgaatctaatattgacaccacagcctatgttcttaatcactaccactgcgcatcaactacgtttctggcacatgccgctggggatatgccagatacatactcttttgcaccttgtacaata

SEQ ID NO: 70757 - DNA, 122 bp, Homo sapiens
aagaatatcaagtaattgaacggttaagtaaattacacagtaacataatagagcattactcggccattgaaaagtatacttatgaggatcatagcacatagcaaatactgaagtgtggcctc

SEQ ID NO: 70758 - DNA, 122 bp, Homo sapiens
ttttttttttttttttaagctcctaggaagccggttccagtttaagggttgggtagggatcgaccaagcagctcctctgatgtggttacgactttgccgaactcctcaagggcgagcttccc

SEQ ID NO: 70759 - DNA, 122 bp, Homo sapiens
cgtcatcgtagcctcggtactggtcttcatcttcgtgctgctaatgcgctacaaggtgcacggcggccagccccccggcaaggccaagattcccgcgcctgttagcagcgtttgctcccaga

SEQ ID NO: 70760 - DNA, 122 bp, Homo sapiens
agttagggggtttcccttctcccctcccctcccctgttggggtgggggcaagggtaagagcgtctccctggaggaggtgcctaaagcaggctgtgagtcactcagatgagcttccgggtgaa

SEQ ID NO: 70761 - DNA, 122 bp, Homo sapiens
agaggctcaccgggaaggagggaccctgttcagagagacacacccggaaggagtgagccccggtcagagaggctcacccggaaggagggagccctgttcagagagacacacccggaaggagg

SEQ ID NO: 70762 - DNA, 122 bp, Homo sapiens
tcggagtgtatctgttcccctcctcatgctgaccctgccccagccggccacagtgcacagcgtcccgggtctcagtccctcctgggctctaggcagagccactgggttcacgtttcgattcc

SEQ ID NO: 70763 - DNA, 122 bp, Homo sapiens
tttttagtgtgacaatttatctgcccaggaagagcaaatactgtgactgtctatgttgctcgtttttcttgttagcaacacctggttaatttgttattaagaaatacctttaagccatagaa

SEQ ID NO: 70764 - DNA, 122 bp, Homo sapiens
caaaaagaaaggggtggccggaggaggggggaagaaggagtggggaagagggacgggaagcggcaatgggttcccaaacagaacgaaaaaaactccaaatgccaccaacctggactcaaccg

SEQ ID NO: 70765 - DNA, 122 bp, Homo sapiens
gaatcctgggatagtggcggacctgaagttggcctctgtgaaggctgagtcctggggaaccgggaccgagaagatttcgaaggtggaggagcgtgtctcaagattggggctacctgttcttt

SEQ ID NO: 70766 - DNA, 122 bp, Homo sapiens
acatgctgttgacctcttccacagttggcacttcacttcagagtttactagctagaactccgtttgtcatcaaccccgcgccttcagcaggacaggaatcacgtcttccccctcccctacgt

SEQ ID NO: 70767 - DNA, 122 bp, Homo sapiens
tattatggaaaacatttcaagtttactccttctgttttgagttttgtagcagtgtacccacgctgggtattaccatgtaaataatctgtgagtgaaagttgccattattctatgtagtggtt

SEQ ID NO: 70768 - DNA, 122 bp, Homo sapiens
caggtgtgacagatgataatccaaaacacacatgcaaaggtacagacaacagcaccttaccgttaaaactcgagtgacgctatgcttccagagctgtctcctcccaatcctaaacattgtag

SEQ ID NO: 70769 - DNA, 122 bp, Homo sapiens
cgaggccaacccccacactatttggatgggattgaaggggaagagcggagtaagatcagacggcagtaggacttcagctccccgccatcgctgtgtcctgtggttgaaacgatggaggtcgc

SEQ ID NO: 70770 - DNA, 122 bp, Homo sapiens
taagttaatgtgtatgattttagatatgtttttattttggttttggttgtttcaacttagcgtgacccatacaagggaaaagagggctggataaaatgtgatcatgttgaccattaataaat

SEQ ID NO: 70771 - DNA, 122 bp, Homo sapiens
tgctgctggaaccagcccccgcaagggcccgcagcggccgggccgtttacctcagacccgcgccgcagcctcccggagcccgcgcccaggactccctcacgacctctccagggtcccggccc

SEQ ID NO: 70772 - DNA, 122 bp, Homo sapiens
gcggactgtggcgcgggccgggcggcgcccccagccccgcagcctggctttcttcctgctcgggtgtcccacctgggaattcgttgcaccgcacagccgaacccgagtgtgtcaatgggtgt

SEQ ID NO: 70773 - DNA, 122 bp, Homo sapiens
aaaccacagggcctactccagcacataatgggcctattgtgaagcagtggaagtcaagttcgtctacagaagtttaatcatggccctaggaggaagttcaagtttaaaaagggtcctgttct

SEQ ID NO: 70774 - DNA, 122 bp, Homo sapiens
ctacccccggggtaaagggggccagcctcgcacaggtgggtccgttgcaggcgtctgttgcgagaccacatcctcaccacccggtgaacggcactgggagcagactcaagaggctcgagagg

SEQ ID NO: 70775 - DNA, 122 bp, Homo sapiens
attcccttgcatccagggtgctctactagacctgcgttcttccatcattctttcagcccacgtggttgccaatactgggagttatcagtcttttccatttttgccaatctaatggataaaat

SEQ ID NO: 70776 - DNA, 122 bp, Homo sapiens
acttttggggtgaatgaatcacttccagaaacttggggtggtgcctctaaaatatgtacacgggttaaagcttctctcggtttgtttcactctcctccattccctcgcacactgatctcatg

SEQ ID NO: 70777 - DNA, 122 bp, Homo sapiens
ggggcggtccgcgtcccgcctccccgggggccctggcggggactgtggggaccacgcgcccggcctcccccgcagcttccacttcgagagcactttgcgaaagtttgcgaagttggtttcaa

SEQ ID NO: 70778 - DNA, 122 bp, Homo sapiens
catggcatccttgcccccagagcagtacttgtatgtgatactgccccccgtgggccctcccgccgcactcctgcacagagcgaacagtcacctgctggaggtccccgctgctcactcgggag

SEQ ID NO: 70779 - DNA, 122 bp, Homo sapiens
aggctgaggcaggagaatcacttgtacccgggaggcagaggttggagcgagcagagaccacgccactgcactccagcgtaggcaacaagagtgaaactccgcgcccctcccccccaaaaaag

SEQ ID NO: 70780 - DNA, 122 bp, Homo sapiens
cccacagtctgggcaggggtagggcttctctccggtgtgcaagagctggtgctggagcagcgtgctgcgctgggagaagcgggcctcacagtgctcgcaggcatagggacgctccccagagt

SEQ ID NO: 70781 - DNA, 122 bp, Homo sapiens
cgccggcggccgcggcccgcacctcgggcgtgcgcggcgcgaggtggtggtggtgggccgcgctggccgccagctgcgactccagcgagcccaccaggtcgctcaccactttctcgtccacc

SEQ ID NO: 70782 - DNA, 122 bp, Homo sapiens
ttgtgaccaattcctgtttgttcaaaaccaaaggaaacatgaggatgagttcaattctctcgaagagaattgcatgaacagctgttacatgcaggagagggactcatgactcactggtgaca

SEQ ID NO: 70783 - DNA, 122 bp, Homo sapiens
ctggcctcagtttccccaagcttacaggaggacattgagggtctggggatgctttccacacggttctggtagcggcggcttctggcttgaccaccaggtggcgcctggtgcccaatgaagca

SEQ ID NO: 70784 - DNA, 122 bp, Homo sapiens
aataaaagactgaaattggccagaatttatttctagggacccagctgtcagtgcagactccgtgtaatacctagacttggtgtgaggcatgactgagtatggttcagtttcctcctctaatc

SEQ ID NO: 70785 - DNA, 122 bp, Homo sapiens
ctttaaaaatgtaaaaatcatttttagtttgcaccatacaaaaacagactgggccaaattcggcccgtgggcagtagtttgccaacccctggtataaaatatctactttgtcttgtcagaga

SEQ ID NO: 70786 - DNA, 122 bp, Homo sapiens
agttcttagcgtctggcactgaactggcactcaacaaatgatcatttaaaaacttcacatcgtttgacaaattctaaagaagtggtacaggagaatgaagcctaaaaacactgagcaaatgg

SEQ ID NO: 70787 - DNA, 122 bp, Homo sapiens
ccgggtaaatgcttaaccacactcctccctgtaaaaataacggtgtcattaaacatggaccggctgttccatgagctcattcctaggaaacagtggctgagtagcagaagcctgaccggtct

SEQ ID NO: 70788 - DNA, 122 bp, Homo sapiens
ccggggctaccagggctggtttcatccctgtgctaggctttctgtgaggatgagcagcaccgggatagacaggaagggcgtcctggctaaccgggtagccgtggtcacggggtccaccagtg

SEQ ID NO: 70789 - DNA, 122 bp, Homo sapiens
ggcaaaagactgtttcccagctctgtctgaggttcagcttggcgacattccctggaagagcgtgacggaaagtgcaatggaggcgggaggagagcgatttcttagacaaaggcaagtcttgc

SEQ ID NO: 70790 - DNA, 122 bp, Homo sapiens
cattctttagggtaaacaaaatgtaccgagcccctgctgggcagccaaccctggcggagacgtgcggacagattctaccttcaaagagctgtcctgggaaatgccactgtttggtaacaatt

SEQ ID NO: 70791 - DNA, 122 bp, Homo sapiens
agacccccttaaaaattagcctcaagcagcagatactctctttttaggtttgtgtgtctccgtgaggtcagatggattccccaaacacggttttagagagaatcacaacctttaatagatcc

SEQ ID NO: 70792 - DNA, 122 bp, Homo sapiens
aggcctgatttagcacctttgcaggttactcctggctcgcaatggttgtagttgtggggacgagtgggtcatgcatcatccttagcaggcagacacatagtctgtccccattgcagccaacc

SEQ ID NO: 70793 - DNA, 122 bp, Homo sapiens
tgtaactgagatatgagaaccaaatttgcattttggaaaggtaggacatagtgtgaaaggcggtttcacgaattctatattaaatatcatcattgttagtgcttgacctggtttaaatattg

SEQ ID NO: 70794 - DNA, 122 bp, Homo sapiens
ggacgtgatggcgtcacgtcacgccacagggatttcacctcctgcggatggtaatggcctcgccgccctcccgcccccacctggactccgacggtgccggcaagaaacgggaggagggaagg

SEQ ID NO: 70795 - DNA, 122 bp, Homo sapiens
tattcagtctcttcactttaagtgcaatctaatattgcatacaaatttgtattttatacccgcaccacaaagctctccctgcaacgctacagttgcgtattccattgactgcattttatccc

SEQ ID NO: 70796 - DNA, 122 bp, Homo sapiens
catgaacaagctatgagggaagatgagcttgtttatgatgcaagccagtataaacacagtcggaggatgacacagatagctgcacttttcccagtgacatgagcaagttcttactgcaacac

SEQ ID NO: 70797 - DNA, 122 bp, Homo sapiens
aagaggggaaaagatgagcctgttcgatttgggtctttttagtctcctccttcggaaccccgggccccgccgcactcgtagaatatgtctatgtctctgagggactgggaagaaggggatgc

SEQ ID NO: 70798 - DNA, 122 bp, Homo sapiens
caagttgcgaaagaggacaaatggtcgccgcgctagtcccttgctgttgcaggtgactgtcgggggcgcgaaagagggcgcccttccctgagaggacaaaagccaaggtttggctatccagc

SEQ ID NO: 70799 - DNA, 122 bp, Homo sapiens
gtggaaaaccaaaggcaggaattatcctctgaatttgagcacctcaaccagtttttagaccgtgagcaacaggcagttctctccagattagctgaagaagagaaggacaatcaacagaaact

SEQ ID NO: 70800 - DNA, 122 bp, Homo sapiens
tagagccccctcccccggcggcggcggcggtggcggcggcagagaccgaagctccagtcccggcgctgctctttgaccccttgaccctgggcttgccctcgctttcgggccatgacaggcgg

SEQ ID NO: 70801 - DNA, 122 bp, Homo sapiens
cttaggagacgttgcacactttgcagacaggaagtaaaggaaatgggaccccagagtggccgcagaggggcctgtggggtaagacactacagtgtgtgtcataaccaagacccgatcaggga

SEQ ID NO: 70802 - DNA, 122 bp, Homo sapiens
gggcggccggtgtgtgtgggatcttggagcccctggtggaaggggcagcccgtgtgtccgcgtgtgtgttcgtgcccatgctcgtgtctcctgtgtgtcggtgccatgtgcacacgggggcc

SEQ ID NO: 70803 - DNA, 122 bp, Homo sapiens
ttgaacacctcctacgtgccaagccctgacatcaaaatgggtcagaagccagcagccgctcgctgaatctgtgttcctctttggaaaacgagaaccgtgaagcctgctggcatggtcagagc

SEQ ID NO: 70804 - DNA, 122 bp, Homo sapiens
atttgacattcccttccccaacaataacacggctaaaactcccgcgggaagcgtttcaggcggagagagagccggtcactccatccccacgggattaccctccctaccacaacccacgaatg

SEQ ID NO: 70805 - DNA, 122 bp, Homo sapiens
tatgtccaggaaagtatctgatgtatttgttgtcatgcaaggacaagtaacgaatagtatcgtctattttgttagagctgtaaacagctgtgtttgcctcatgagtgtatctgatgaggtcc

SEQ ID NO: 70806 - DNA, 122 bp, Homo sapiens
ccatatgaataaagctctttgttccagagaactgcctgctcttttattccccccctttttcgtatttgttcatttcaaaagattgctcaatgggtctcttgttcctccaaaacgtcccaggc

SEQ ID NO: 70807 - DNA, 122 bp, Homo sapiens
cctgcacgggggtgggggggggcatcctggcagggaggggcccgcactgcggctcctggccgctggcctcgccctttggtcgcgttttggcctcagtgtgccgtgaaggagggtgttgggcc

SEQ ID NO: 70808 - DNA, 122 bp, Homo sapiens
ggttccaataacacggcatcataaaggcaacgcaacccacagttctcaagacatttaccacggtcactacatccggcagcggggtggcccctagctcctgctgcccccccgccctttctccc

SEQ ID NO: 70809 - DNA, 122 bp, Homo sapiens
catgcgcagacgcatggccacagactgccggtcagtgtcagcaggcggtgggttagggtccgcaggcccagaccaggccgccgacaccaataagctacaaggaggagctttaccgctgcctg

SEQ ID NO: 70810 - DNA, 122 bp, Homo sapiens
agtaaagtgaggacaagagctctttcaaaaacctgtatgcaatctgggcatggtggctcacgcccgtaacccaagcactttgggaggccaaggtgggaggatcacttaagttcaagagttca

SEQ ID NO: 70811 - DNA, 122 bp, Homo sapiens
gggagattgtgttcagagggcagaacttgtcctggttaatgcactaggaatttcttctggcgtctccaaggttgtgcttcaacaacatttctggaatgttcttttatcattatttgggctct

SEQ ID NO: 70812 - DNA, 122 bp, Homo sapiens
gtcaccgagggtctcatccgcatctgcatccgcggcggccgccgcagccgccacctcggccgccacctcggccgccaccttcgcatccgcatccgcatccgcatccgcctccgcctccccca

SEQ ID NO: 70813 - DNA, 122 bp, Homo sapiens
ctgagaaactgccccccgcaagactcagcccactgcaatacagagcagagcagaggggcacggaagggatctgtagcaaatggtagagaatgaccattcagcagaaatagttaaacaggctt

SEQ ID NO: 70814 - DNA, 122 bp, Homo sapiens
cttactcatgggcagtacagggagtcagttctagtgagcagaatgtcatgtgttctctctcggcactttgcaaactatcgcgagtcatgctacagttttttctttctttttaaatttccaac

SEQ ID NO: 70815 - DNA, 122 bp, Homo sapiens
aggagtgaacaattgtttattccagaaatggcaactccatatcattcattcaatgatccccgctttccctttatgtgataatagacattactgtcctgctaagtccagatataccctcagca

SEQ ID NO: 70816 - DNA, 122 bp, Homo sapiens
tgtttatttggttcaagctacttcacaaggacatgccctgttaattcacagtgcttttcccgaaagcctactagaactaggcctggtgagaggccctgagaaggtgtatccttttgtccaag

SEQ ID NO: 70817 - DNA, 122 bp, Homo sapiens
agcggcatcactgtctggggtaaatatccggggttcatcatctctcgtcaagatgattaacgacatggacacacatgggtgagttaagaagcggaaagtttaataggcggaagaaaagagtg

SEQ ID NO: 70818 - DNA, 122 bp, Homo sapiens
ttctctctgcccaagcctgtggtccaaggtgcagggatctcacaggaaaacaggtagcctcggggtgggaattcccagagcactgaaggcgccggttgttggccagagggaggccgggactc

SEQ ID NO: 70819 - DNA, 122 bp, Homo sapiens
ccctggcacctctgcgcaagcccactttccccgagacccttccgtcccactgcgcttctgcgtccctctccgcgacttctcttcagagactgacttgtcctccgtaaggcaaaatctagtcc

SEQ ID NO: 70820 - DNA, 122 bp, Homo sapiens
aggaggggccgggcggtgtggccgcagggtccgcggaccgggctcgagtctccttcctgccggcgtcctagtgcagccggccacctagcagggctgggaggccatcacctccagcggagacc

SEQ ID NO: 70821 - DNA, 122 bp, Homo sapiens
aaaaaggttgaatgtgagttcgggcgtgagaaaacagcagcgcgcatgcgtgagcgtgagcgcgcatgcgtgagcgtgagcgcgctgggaggccggaaacaaaggtggatgcgcgtgaacag

SEQ ID NO: 70822 - DNA, 122 bp, Homo sapiens
gtggtgtgtgtgaggtcacagctagcgcaagtgccttcactgggtgtgtgttggggggggcgcgggtgtcgggggtcgggggtggtgggatgacagtttaaaggcctaggagcccctaactg

SEQ ID NO: 70823 - DNA, 122 bp, Homo sapiens
actatataattcgaatgaaccctaatagaatattgaccggtgtcctgaattttctcctcccgtgcacagcgtgagtaattcccgtgaaactatgctcatgcggatctagattgaatctgatc

SEQ ID NO: 70824 - DNA, 122 bp, Homo sapiens
accgcacccggcctggtttctcttcttctaaggccactgatcctgtcagaccagggcccacgctcatgacctcatctaaccctaatcacctcccaaaggtcccatcccctaataccatcaca

SEQ ID NO: 70825 - DNA, 122 bp, Homo sapiens
aggtaaatactcccagggccagccctggggcgagcgggcaagggagggctgacatccagacggatggggctttgggatgtgaatcacagaggcccctccagagagcacgatctgaaggctgc

SEQ ID NO: 70826 - DNA, 122 bp, Homo sapiens
aacagggacggcctccgaacagggacggcctccggaacagggagagcctccaaacagggacggcctccggaacagggagagcctccggaacagggagagcctccagaacagggagagcctct

SEQ ID NO: 70827 - DNA, 122 bp, Homo sapiens
tgtcacgacacgctggaagcagcagaaggcaaagaaaccagatcagtggctgccaggagccgggactcagggggacctttcagggtgacgaacatgttctacatcttgactgcactggtgag

SEQ ID NO: 70828 - DNA, 122 bp, Homo sapiens
ttccaggagtctttggctgtggtccccacaggcgaggagcaaatcctggagaagtgtccccgttggggccggaataggggtttcgacggcagcgcgggagtccccagagggcttgggagcgg

SEQ ID NO: 70829 - DNA, 122 bp, Homo sapiens
gataggcgagcgcggccgggcgcgggtgcggcactaatcactcccagatgtccctaatagcggagataaagacggacagagcggccgggaataaatttgtaatcagggctctaccatctgat

SEQ ID NO: 70830 - DNA, 122 bp, Homo sapiens
gccggctccccgctcctggcccgcgagcgcccgacctcagggcgcaggcgtaggtgcatccggctttcccgccacgtgacctctcagttgctgacactagatagggcgtggctgcggggcgg

SEQ ID NO: 70831 - DNA, 122 bp, Homo sapiens
gagggcgccccggaaaccatgggtaagtgcggaggctttgaggtggcctctctctgcaaccgtggacatagcaagagcccacaccaccccccgacccccgctgccctctacggtgcttgggg

SEQ ID NO: 70832 - DNA, 122 bp, Homo sapiens
ctccacaggcttgggggcttggggcctcctggaaagatccctccgccgcgctgaccagtacggggctcgctcccgcactttgaaggctgccgcggtctttcgtcatttataatcaagcccaa

SEQ ID NO: 70833 - DNA, 122 bp, Homo sapiens
ggaggaaaattaggaggccaccacgcctaacttcagggctgcctgtggcactgacttccccgggtcctgctcaggaaagtagggtaatgactagtgccattcacaagctgtttagctgacat

SEQ ID NO: 70834 - DNA, 122 bp, Homo sapiens
gccatttatatagatgataatcattaaattttttttgagcactcattatgtgtcagtcatcgttctagcactcaggatagaatagcaaaggagacaagattcctgctctcatggagtttgta

SEQ ID NO: 70835 - DNA, 122 bp, Homo sapiens
gagcggcctccactcttgctgcgcgctggccttgggcccagggccttaagtcatcgcaaacgtttactttggggctggctgattaaaggttaaatgtccaaacctagaaaccgccgactgcc

SEQ ID NO: 70836 - DNA, 122 bp, Homo sapiens
cgtgcgcgcctgcgagtggaccgtgaattcagttaccttgttccctgttgctagtttctacgctaaataagaagaagaagaagaaaaagccatctttaatacttaaggtccacgcttctcat

SEQ ID NO: 70837 - DNA, 122 bp, Homo sapiens
gttaactggaaaggcgcctgcctcttgttttgtttcagaaatactgttgggaaaaggatccgatttctgctcggagtgaaggaagtggtctctggagaattcctaggtcaaggctggcattt

SEQ ID NO: 70838 - DNA, 122 bp, Homo sapiens
ctgccaggagcccgcagccctggcgcccgccgccgcccggagccccgcaatatgccgccgcggccctctggctctaggccatggcgaggctctgccggcgtgtcccctgcaccctgcttctc

SEQ ID NO: 70839 - DNA, 122 bp, Homo sapiens
actaccacaatgaatccaagtaatcattcctactgagatttaataggctcatattatgatcggaaaatacctagttgtccagatgatgctcactccaaaaacttgtcagcacacctgagttc

SEQ ID NO: 70840 - DNA, 122 bp, Homo sapiens
gatcagaggcctcttctgccctggtataaaggagatattcactgaggtatatgtaaagagcgttgaaatcacataaaaaggtataactattctggtttgggggaaagaaagaaagatacata

SEQ ID NO: 70841 - DNA, 122 bp, Homo sapiens
ggggctgcatgcggtgctcgcgggccagcgtgagttccgggtgggcgtgagcttggcggtcgcactcagagcagccagccggtgccgcggacggggcagtgaggggcttagcacccgggcca

SEQ ID NO: 70842 - DNA, 122 bp, Homo sapiens
ccacttgcagatgagctcctgcttgattggctgccgcatgtagcgcaggaaggccccagccgcccctgggaggtgggggtggtgctggtgcgggtgctgcgcgggcgccggcggcggcggcg

SEQ ID NO: 70843 - DNA, 122 bp, Homo sapiens
agagtctgagctctaccccttctccctttcttggggatgaccggcatgatgctttgcctacggcacaactacacctctgggtgtagttcctgaggtcctgtcatctcttcattcttccacga

SEQ ID NO: 70844 - DNA, 122 bp, Homo sapiens
aaaacatggcagaaatggagaaagaagggagacctcccgaaaataaacggagcaggaagccggctcacccagtgaaaagggagatcaatgaggagatgaaggtattttttgatctcgggggc

SEQ ID NO: 70845 - DNA, 122 bp, Homo sapiens
tgatttaaatgaagaatcctgtgggcccagcccagccctctatgctaaccaatctgaagccggcaggtgtgtggtgttctgtttatagctgccagatcagctcctgttgtaggttctatatg

SEQ ID NO: 70846 - DNA, 122 bp, Homo sapiens
cgccttccctgtcgcgccattgggcttcgccggtccaaaacacagacccattggtcatcccggctgccgctcagacagaagcccatttcaagcttgcttgcaggggcgagtgatgggctcgc

SEQ ID NO: 70847 - DNA, 122 bp, Homo sapiens
tttcttcgctaacgcgcgaggagtaggctgcatagacccggcgcaggaggtgttcattttcggatccagccctgtagtcactttagctaaacccggttccaaaggggtgggagtcgtcggag

SEQ ID NO: 70848 - DNA, 122 bp, Homo sapiens
aaactcagtttccagtgtccaccccaggaggctccccagtccttttgaggtcacctctgccggcactgtccttgcccaacctaggggtggggcagaccctgggctcccaggaaacattcaat

SEQ ID NO: 70849 - DNA, 122 bp, Homo sapiens
agatatacttctgataaatgaaatatctaatcctgatgctgtcctgtatttagaactgcccgtgtgcttcattctgtctggaaatgcaaaatgattggcattatgggcatttaataagaatg

SEQ ID NO: 70850 - DNA, 122 bp, Homo sapiens
cctgccttgttcctgtatgtgccgcttcaccggtatcacgtcctgggtctggtgggaccccggcctggctgccctaccggaagctaagaaaactcctcccccaggggtggccgtcgggcctc

SEQ ID NO: 70851 - DNA, 122 bp, Homo sapiens
tatagagtgacaaaagtacatttttggctgctatgtggaaaatagtttaaagggcaaggacggaaaattaagaaactgccttgattaggagaatagcaaagacaggccaagataaatcaatt

SEQ ID NO: 70852 - DNA, 122 bp, Homo sapiens
ctcctgcgctcttgtgcaccaagcagcttgtggcggcttgtggcagatcccaccccatcccgtcccccaccccaaggctaaacctgcctgtgctcacacacgcatttcccacctgggcttgt

SEQ ID NO: 70853 - DNA, 122 bp, Homo sapiens
acaataccccaaatatgcaaacaatctcacgtccaccgactgatgagtgggtaaacaacacgtgacctacccctacagtgaaatatgattcagccacaaaaaggaacgaaggaccgacccac

SEQ ID NO: 70854 - DNA, 122 bp, Homo sapiens
tccttttttgtggttgtggtttggtttctaggcagatcacgctggaacgtcctcacttcacgtgctcagtctggccctcgcgtgtgttttcagctccatttcctgtcattctccacccactc

SEQ ID NO: 70855 - DNA, 122 bp, Homo sapiens
cagagagaggagagagcagagagcaggccccggccttttcttgtagtactcttgcccctccgcccctccgtccccccgcccccaccacctccgggtgcagtcggactcccgagcttcgcgct

SEQ ID NO: 70856 - DNA, 122 bp, Homo sapiens
cagtgcccctcgtgctccctgggagcagagctcagagcttggcagggtggggcccgagggcgcccgctcctggatcctgcacaacgtccctgacatgtcggccagcagcacagacccagcct

SEQ ID NO: 70857 - DNA, 122 bp, Homo sapiens
cgaagcctctggccagccgcgcctccggtccaggcctccctgtgtccacatcaggtctcccggcttttcacaacagtgaccttgacagcgcccagagtccgcggcttccatccagtcccctc

SEQ ID NO: 70858 - DNA, 122 bp, Homo sapiens
acagacccaataacctgtccagggttcctgtgagaaagatacacctagttcatacactgacgaaaaacctgctacatacattgcaccacagcaactgaagctaaatgatcaaggaattaaaa

SEQ ID NO: 70859 - DNA, 122 bp, Homo sapiens
ttggtctgcaagtgcccagtgagctgggtggtgtgggcctttgcaacacccaggtgagggcgccctatcgccacatcccagtatgccataccccagcttggcagactcagctcttttgccat

SEQ ID NO: 70860 - DNA, 122 bp, Homo sapiens
acatctgacatctgaaacagcaagtgtaaaatgctttaaataagccaaaactaaaccaatcgttatgttaactaaaaatacatgaatgctaccgaagatagtcgaatattagaggaagagat

SEQ ID NO: 70861 - DNA, 122 bp, Homo sapiens
cctccccgaacccagcccgtggcttaactcccctccgaccgagcgcccgctgaccctccccgcaatactgtcgtgaagcctcagccccacatctggacctgcccctttaatcaacaagcccc

SEQ ID NO: 70862 - DNA, 122 bp, Homo sapiens
ctggcactggccagcagcctcggggcaacactgaccccagagctgggaagtgcagccaggcgggcgccagcaccgtggcaggccaggccatcggtaaagcagaccaatgacatgacggggag

SEQ ID NO: 70863 - DNA, 122 bp, Homo sapiens
acaccagcgccagcaaggcagggtggctctggtgggcagagggctaccccacctccaggccggggtcttgccagccgcttcccatcagcactcagattgtcttgtgaagcccaggctggggc

SEQ ID NO: 70864 - DNA, 122 bp, Homo sapiens
cgcccaggtgcggggagtggggttgcaggtaccctgcggcttaagctgtccacatgcgggcggtggagaaacgtggagtagggagggcctgggcccatttcggaccttatttgcccttactt

SEQ ID NO: 70865 - DNA, 122 bp, Homo sapiens
gagaaggggctggaacctatcccacagcccaggtgcaagacttctggggtcactgctccccgctgctgcataatatatttaaacctggactttgtgcttttcctcctaactgctgtctgtcc

SEQ ID NO: 70866 - DNA, 122 bp, Homo sapiens
agggatgtgagtgggagctgagcccacactggagggcccccgagggcccagcctggaggtcgttcagagccgtgcccgtcccggggcttcgcagaccttgacccgccgggtaggagccgccc

SEQ ID NO: 70867 - DNA, 122 bp, Homo sapiens
ttaaataatcataaataagaaaaccttactattctttggcataacacagctgattgattccgctgagtttcaaagtcttagaaattgcactcattccttctttagagtcctgcttcatggca

SEQ ID NO: 70868 - DNA, 122 bp, Homo sapiens
agccgcgtcttcacgtccagcaggatcttgtactcctggttctgctgctccatctcgcagcggagctgggccagctgctcctccacgctgccaatcatctcctggatctgggccagctgcat

SEQ ID NO: 70869 - DNA, 122 bp, Homo sapiens
gggatgaagaacaaacttttagagaagcttctggtgtgaaactgagggtggtttctgtaacgagaggcgtgtttatgctgacataagccagggcagggtctgtgattacaggacctacagtg

SEQ ID NO: 70870 - DNA, 122 bp, Homo sapiens
gtgggggcggggaaggaaacttctgaaccatctggtcccgggccgggggagaccgctgggcggggacgcgaggagggaaggggcgtctgtgggcgggacctcccgggattggagtgaagagg

SEQ ID NO: 70871 - DNA, 122 bp, Homo sapiens
ttccgagacctggggggccgcgtgtgactgcagcagaacttggcccttcctgcctgacaccgcgccacagtgaacagcaggggacggcacagctgatgaaggtgatatgaatacagtagtca

SEQ ID NO: 70872 - DNA, 122 bp, Homo sapiens
gcggcggagctggatcccttgctggttggcgtcaatgcacttgttaaaaatttgtgacagcgctcaggggcgtttttgctgcctttatgatttgaggattgccagttggacacttttctagt

SEQ ID NO: 70873 - DNA, 122 bp, Homo sapiens
ttactcttcctttgccgggggtggctgcttcaggctggggaggggctcgctggcagatttcgggaaggacaattgtcagggcttccctgtgtggtccttttgacaaacacaggatatcccgg

SEQ ID NO: 70874 - DNA, 122 bp, Homo sapiens
gttcttcccccacctgccacgtacagagcccaagttctcgctaggcttgttgggtcagcgcgattggccggggcccgcgcgagcctgcgagcgaggtgcggcggtcgcgaagggcaaccgag

SEQ ID NO: 70875 - DNA, 122 bp, Homo sapiens
gtgttttggggccccagaatttggcattcaccaaaatcagtgttctgtgggccctgaaagcgcaggatgtcgcccttgtctggagcaccccactgaaggggcagtggctcccgtggggaagg

SEQ ID NO: 70876 - DNA, 122 bp, Homo sapiens
ttcacccactatttcatgttgtaataagggccaccataaggatgccctcctcatagtgttcggttctgatcttcctcgagaacagtcacttggcgcactttaataatctggactgctccaga

SEQ ID NO: 70877 - DNA, 122 bp, Homo sapiens
cacagcctcttggccaagcacggaaaaggttacaggggctggtgtaaggttggatgggaacgtgaatgagatccaggatatggtacatggggctcctggctctccctgtgtaatgtgcccca

SEQ ID NO: 70878 - DNA, 122 bp, Homo sapiens
tcatttttacacagagcaaaggacttgctcagtgacctccctccattccctgcagggctgcgcgtgtggaccgcagtgagagaaagcggggctgtattcgctccacactgctcgggccgagt

SEQ ID NO: 70879 - DNA, 122 bp, Homo sapiens
caggagtgtgccaccccttcacacactcactcccggccctgcacgcttcccctcacggtccgagttcctgcaaatgcttggccagaccgaggtcgccgagatgctcgctccagtctctcccc

SEQ ID NO: 70880 - DNA, 122 bp, Homo sapiens
gtgcacttctccgtgtctgagttgcctagtcgcggctacggcgtcatggaggagatccggcggcagggcaagctgtgcgacgtgaccctcaaggtaccgcggactgggcggcagcgggctga

SEQ ID NO: 70881 - DNA, 122 bp, Homo sapiens
gcagacggggaactgaggccccttgaggcaggacacatccagggtgacgctgctcgtaagcgtcagagcattcttttttttttttttttttttctgagacggagtctcgctctgtcgcccag

SEQ ID NO: 70882 - DNA, 122 bp, Homo sapiens
cctgtacttgaggccagccaggttttccaccacgatgtcaatgaagcaggccacgaggcccgtgaggatcccaatgagggcgcagatgacccagcgcttgatctccaccgtccggaaggcct

SEQ ID NO: 70883 - DNA, 122 bp, Homo sapiens
tatatttaatcagtttttttgcagttttcagtgagatgtgaactctatccctgtccaagccgtttggttcaaatcagctgagacagagaataatcaagatttatgattctcattctgactcg

SEQ ID NO: 70884 - DNA, 122 bp, Homo sapiens
cttcttccgccgtctggagcggccggccaaggacagcgagggcagctcagacagcgacgccgatgagctggccgcgccctacagccagggtctggacaactgaggccatgcccagcgcgccc

SEQ ID NO: 70885 - DNA, 122 bp, Homo sapiens
actccaaattcagcagtttgcaaagtgcctccaagaaaacagctgggacctgcaatcactcgttcggactcctaggttatcggggccgcggcgactccgctcagttagaaaggtagcgcggg

SEQ ID NO: 70886 - DNA, 122 bp, Homo sapiens
aagcaagaagggagttgagaattctgtggtttctggactgggccagcaggtggatagggacgccatgaactgaagtaggaagacagaggacagagtagacttaggtggggaaaggttgagtt

SEQ ID NO: 70887 - DNA, 122 bp, Homo sapiens
caactggaaggaaggtgggacaggaactcccaggacgccacggggatccccgaggcagggcgagtcgggcgagggtggggaaggaggaactctctaacacctccccgcccctcgcctcccag

SEQ ID NO: 70888 - DNA, 122 bp, Homo sapiens
ctccgggccatgctgctcaggacctcctcgctgccgggaaaactcctcgtgccgcacctacgcaacctggcgccgtcagatactctgctgcgctgcagctccctcagccagggctgttcccg

SEQ ID NO: 70889 - DNA, 122 bp, Homo sapiens
cctcccatctcagcctcccaaagtgctaggattacaggcctgagccaccgtgcctggcctcgtgagggacattttaatggagcacactggaacatgtggaatgggtttagactggattattc

SEQ ID NO: 70890 - DNA, 122 bp, Homo sapiens
gcgccccctcacccggaatacacacacggtattcaatacaaccgcctcgaacatcccagacgtctagaaggataccatctgtgcagaaagctgcgtgagtcacacggaaacagaaggggcaa

SEQ ID NO: 70891 - DNA, 122 bp, Homo sapiens
cccaggaaactcagacgtccgaagttcacgaggagttgggtcgtgagaggggccagacctcgatccgcggggcgacagctgcagtgtcgcgtcgcgagcaggagcttggcggcgtagagcgc

SEQ ID NO: 70892 - DNA, 122 bp, Homo sapiens
ggtgaccgagtaaagtgagaggcaggtgagacggttcacccaatcacacgggaaggggcgcgcgctgcccaaccgcgctctccgcctacctccgctgctcgggaagctgctggcctggccct

SEQ ID NO: 70893 - DNA, 122 bp, Homo sapiens
acctgctgcagtgccggagagtcctcagggaactggagcgctacttctccacagtacagacgccacgctgcacatcacaccactgacaccatgcacaccacgcacaccacacataccacgct

SEQ ID NO: 70894 - DNA, 122 bp, Homo sapiens
gagtatttctaagtaagtttcactgtcctttctcctccaattttaggtgttcaggcgcttcgtggaggttggccgggtggcctatgtctcctttggacctcatgccggaaaattggtcgcga

SEQ ID NO: 70895 - DNA, 122 bp, Homo sapiens
ccacttccctccgtgaaaacggctggacaaggttgaacctagacgcatgcgcccaaagcgcggggtgcgaggtgggtggacccatcgcttcccgctctcttctcccaaagcgcttacggcag

SEQ ID NO: 70896 - DNA, 122 bp, Homo sapiens
gccctgtcagctgcttgtcggtgccagcacagcccgtctgtccttggtggagctctgaggcggctctcgcgttagataagacgtctgagctcttgtgtggcttggtaatgctgtggccacct

SEQ ID NO: 70897 - DNA, 122 bp, Homo sapiens
ggtccagagaggggcctggggaggcgggaggagggacgcgagagccagagaagtgggcgccgacagagagccctagagagaaagagatgcagatagagacagacagaaacggaggaggaaag

SEQ ID NO: 70898 - DNA, 122 bp, Homo sapiens
tcctttttcttttcttttttcccttttttttccttttggcaacccacacccttccacacacgctcaccccaaaattaaacaccaagatcctctaacttgtttggattgactgatgaagacat

SEQ ID NO: 70899 - DNA, 122 bp, Homo sapiens
cccccggaagccccagagatcctttcttggcaaatgtgtatgatgtctagataggactgtcgcctccccatgtccagctgctggaggtatataggttatgtagctacagatgctacttggat

SEQ ID NO: 70900 - DNA, 122 bp, Homo sapiens
gggggggaggtgtgggggcgggggaagccgtcgctcagggggtggcacctcaaaacccgccgtcccgggcccctcttcagccgagtccggcagaagggcgtcccttccgccacctccccaac

SEQ ID NO: 70901 - DNA, 122 bp, Homo sapiens
ttgcaattcaccattaacccttgccctaccagagagcggaagccaaagagagttcccaatcgcttccctcagagtcctctgctggagatggaaaaacttcatactgccctagggtgagcatc

SEQ ID NO: 70902 - DNA, 122 bp, Homo sapiens
tgcatttggcatgggactgctgggcaattagtagaccacacggcaacaagtccctgccatcgacccacctgcacccagaagacactagaggacgagaaattctcaggccaaaggcaaatgct

SEQ ID NO: 70903 - DNA, 122 bp, Homo sapiens
tgttgctgtaaacagccgcttccctgttactatctatagcaggatctcctggctcccgggcgcggcggctggaggcaggtctgcggtccggctccccgcgcgccccgaactatccgcccgcc

SEQ ID NO: 70904 - DNA, 122 bp, Homo sapiens
ctcccccagcccggggcggttggccgggaggcggggccctggcgcgcgggttggccttcacgccccttctgtccccagcgtgtgcctctggtagaacccctggataacccgggaatataacc

SEQ ID NO: 70905 - DNA, 122 bp, Homo sapiens
cctaaaccattagtcctgcagaaacagccacccaagggcccagccagggctgcatgcccacgcccacctcagcaggggctgtggattgttccataaccttttaatgatcccttccttccagc

SEQ ID NO: 70906 - DNA, 122 bp, Homo sapiens
aactcgctccgcgctcccgcgccctgacgtgcggccgagctggcggctacgcagtaacgtcgccgcacctcattggctccagtcccaatgcctgcgccaaggacctgcgcgcgcatgctggc

SEQ ID NO: 70907 - DNA, 122 bp, Homo sapiens
gcctagtcgcgcgcctgcgtactgcggtcagagggccgaggcctgggggcgagctggggtcgtgcagtacagcctctttccggcaaatcacgcgagatttcgttcacccgggctccacaggg

SEQ ID NO: 70908 - DNA, 122 bp, Homo sapiens
ctcagggaccgtctttggatcgggggacccaggctgcagccttgcaggtctgaaggaagccgggaggggcgccgaggcccgcgtaggggaacagggccgccgccccctccgcttgcgccctg

SEQ ID NO: 70909 - DNA, 122 bp, Homo sapiens
ctgatagccaggatattgaagccacctgggtctctgtttcccccaccctcgggcctggaccgtcaatgccggctccgctcacaccatctgtgtccacgcagagggtcgggccgtgggagccg

SEQ ID NO: 70910 - DNA, 122 bp, Homo sapiens
gagagggagtaggctggtttgggtagggctgggagggctcctatggctgcagttcaggaacgtggcagaacatacttcagttttgttgcattcttcctttttccctttaggaaagaaaatag

SEQ ID NO: 70911 - DNA, 122 bp, Homo sapiens
gttcatgtaaaattttccctgtcttcaaacaggggcagagcacatatcaagtaggcaaggcggcatgaaaatcagccagacagaagaggaatcagagctcaggatatagattgagaaggact

SEQ ID NO: 70912 - DNA, 122 bp, Homo sapiens
acacacacacacggacagagtcagcacaacgcctctgagccacacagccaggccagcacacgcgggggccagggcggaagccaagccccagcagccgcccacttcctgacctccttcctttg

SEQ ID NO: 70913 - DNA, 122 bp, Homo sapiens
tgtatgatatagcagtcacgcttcttggtatgatatttacccaaatgagttgaaaatttacgtccacacaaaaacctgcacatggatgtttatagcagctttattcataattgccaaatctt

SEQ ID NO: 70914 - DNA, 122 bp, Homo sapiens
ttagtaaacaaagaagcacatgggcccggattccagccgcttcacagctcgggattcctccgcccagggcgggagccagtccagccattggccatcacacccagagacaccgcgatcccagc

SEQ ID NO: 70915 - DNA, 122 bp, Homo sapiens
atgacttgatagtctagagaagttggggacaggacagccacctcagtggctgaggtagatcggcataaactgcccttaaactggacccacagggaagtggtggccgaggcatgcagcattca

SEQ ID NO: 70916 - DNA, 122 bp, Homo sapiens
cagcttgaacacatacatgtattagctctgtgcacaggtttaaaataccattgggcggggcgcgatggctcacgcctataatcccagcgctttgggaggctgaggtgggtggatcacgaggt

SEQ ID NO: 70917 - DNA, 122 bp, Homo sapiens
gtgtctgcttagttcacatgcaaaagaaaacatcttgaggcaggagcggaggtaaaacagcgccacacaacacacacaacagggggcatttgcagcttgttaatgctgatttaacagcaatt

SEQ ID NO: 70918 - DNA, 122 bp, Homo sapiens
tgagctcgggctccccccagctcccagggcggcaccagcctggcccttttacctccaacacgccctatgctccctggcaccctggagtctgaaggcagtccaccgacctgggccagatagaa

SEQ ID NO: 70919 - DNA, 122 bp, Homo sapiens
agaggcctaagaaggaaccaaccttgctgatgccttgatcttgttgatcttgggctcctacgctccagaatcatgagaaaacaagtttctgttgtttgagccacccagtctgtggtacctca

SEQ ID NO: 70920 - DNA, 122 bp, Homo sapiens
ttacaaatggctccaccagagcagaaggaatctcaaaagcatcagaaggccaaacgcagccgagagaaagagccaataagaaagtcaacaaggtgcctggaccagatggatctggtgggatg

SEQ ID NO: 70921 - DNA, 122 bp, Homo sapiens
gcatgaacttctaaacccaaattggaagagacagctacagatggagcacgcacagctacacgcaaacatacacatatccttctaacacctgcagctcctggccccagaatgcagacacccaa

SEQ ID NO: 70922 - DNA, 122 bp, Homo sapiens
ttgattttgtcaactctagcatccaaaggctggtttttgctttgttcctgattacattttcgatttcctccacctgagcttgtacttttagtttgtcccatggaacttgaagcagtagtgga

SEQ ID NO: 70923 - DNA, 122 bp, Homo sapiens
ctccacatggcagcaggaacattggcagggctcttctggagagaggagagagccaataggcgttgctatggtggaggcatgacataattcaattttactttattattcactggatgtgccca

SEQ ID NO: 70924 - DNA, 122 bp, Homo sapiens
gtgcctcacgacctaacaccctccccacggggcagcgtttgtcaggaacggtaaacccagcgcgtccgcacccaggcgcagaaactctccatcagggaaatgtgaaaaattgatctttttgc

SEQ ID NO: 70925 - DNA, 122 bp, Homo sapiens
cggccgcgccggcctgcgctccttgcagtctaaacaaaggccagcgggggaggctccggacggtgaggcttggggaagccactgatccctggccctagagggccagatcgggggcgccccaa

SEQ ID NO: 70926 - DNA, 122 bp, Homo sapiens
tcaggagggttccctgcatacagagccttcgtcaggagcgttctctgcggacagagccttcgtcaggagggttccctgcatacagagccttcgtcaggagggttccctgcggacagagcctt

SEQ ID NO: 70927 - DNA, 122 bp, Homo sapiens
ccgcagggcacggcacagtttgtaattagggcttctgtgcatgtgtttttgtttaatgttcgtctcccccatcagactctgagctgcacgaaggtagaggccacacccagcaccgcatatcc

SEQ ID NO: 70928 - DNA, 122 bp, Homo sapiens
attatttttccttggtgagtcctactcttgacttcgctagctaacaggacagtaacacaacgcaaggataaagtgacacgccaccacgcctagctcggtgcatgttggctaacagacgatgg

SEQ ID NO: 70929 - DNA, 122 bp, Homo sapiens
aggaggcgaattcgatctctcctcacaaacagcccaggaaattacacccggggaagccttcgcttagatcctcaggctctgccctccctctgatgcacccccgaagaatgcccctgaaggtg

SEQ ID NO: 70930 - DNA, 122 bp, Homo sapiens
aagctaccacttcttgtagttgccattgtctcattccaccaaaaaacatctcagaccgcccgcggccaccccaaatacgcctgtccactgaagcctcactaaaaggaggaagcgctgatgtc

SEQ ID NO: 70931 - DNA, 122 bp, Homo sapiens
ggccgcttggacatagacacccgggttaagggacccggaaggtgccttctgaaaatatggcgaccacccttcaattgtcacaggctgctcttaagggcgccattatttgaccatatcaaata

SEQ ID NO: 70932 - DNA, 122 bp, Homo sapiens
ctgggggatcccgtagaggtttggcgtgtggcctgcgggttccccgggcgggtcgacgtgcgctcctctctggtctcgagtcaccaggaccagatcgaggatgcggccgaccccctgcccga

SEQ ID NO: 70933 - DNA, 122 bp, Homo sapiens
tattagctttcttatcattggaaatatggttattaaatgctacttgatcttccttgatgacgtcctcagatgatcattccaaacatcagtaatctaaagatcatggtagacatgcagaaaaa

SEQ ID NO: 70934 - DNA, 122 bp, Homo sapiens
gtgtgtgggggggggagggtgcatccaccactaatgtgtgtccgtgtgtgtgggggcatccgctgatgtgtgtgtctgtgtgtgtgtggggggggcatccactgatgtgtgtgtctgtgtgt

SEQ ID NO: 70935 - DNA, 122 bp, Homo sapiens
ccaaggaggcgggtttggtgcggccactccaaggccaaagcgagaaaatcttactgcgcacgcgcaatagacagccgatggagccaccgatggagccgtccggaggggagcaagagcccgga

SEQ ID NO: 70936 - DNA, 122 bp, Homo sapiens
ttagggaacctcgggatttcccccacattttgtggagcgatgggtattgaattcagacctcgagcctgtcctcagtacccaggccagagaggtggggtgaagacaggggagactgaaatgga

SEQ ID NO: 70937 - DNA, 122 bp, Homo sapiens
gcttcaagaggtggccgagattcccccaccccgcccccagatccccgggagaggtcagcacggcccctcccgtgggtgtcacagagaccgataccggtcccgctccccgggaaggagtgggt

SEQ ID NO: 70938 - DNA, 122 bp, Homo sapiens
cctggcagctacctacggcagctgagagctgcgctctttagccgagcgggatcagggctacgtggacacagcccgtgccagtgtgggtggggcacgagctgtgggttccgatggcccagtag

SEQ ID NO: 70939 - DNA, 122 bp, Homo sapiens
ccttcgcccatcttccgcccacaagggctcatttctcctccagctccttgggaaggctctcgggtaactgccagcttgtggcaggatcgcagaaaaatccaggagcctcttcagtgtctgag

SEQ ID NO: 70940 - DNA, 122 bp, Homo sapiens
agggcgggcgtgactttataccagttgttcctcagcgggagtttccaattaacgatttaacgattaccctaattcattaagtagtacccaattcttcccttaatgggctgcaaacataattg

SEQ ID NO: 70941 - DNA, 122 bp, Homo sapiens
ggaactccctgaccccttgcgcttcccaggtgaggcaatgcctcgccctgcttcggctcgcgcacggtgcgcgcacacactggcctgcgcccactgtctagcactccctagtgagatgaacc

SEQ ID NO: 70942 - DNA, 122 bp, Homo sapiens
cattgtcagtggccagccattgaggatttcaaagttcccttgtcattcctttactgggcacgaatatgtgcataattcttagtatctacatggcaacgctatacggagtttctggttacagg

SEQ ID NO: 70943 - DNA, 122 bp, Homo sapiens
tgtgcaggaatgtgacatttgtaaaggcacaaggagaggcctttgccagtgggactgcatcgcagcaggcctcagctgtcaagctattactacaaatgtcatccagaacatgtgatggagac

SEQ ID NO: 70944 - DNA, 122 bp, Homo sapiens
tgagtgagtgagcgagcgagtgagtgactgtgcgagcgagcggcagaaggaactccgacccgccccaggtgcggagcggcgcgcccggcaggggtcactgcgggccccgcgggcgggaaggg

SEQ ID NO: 70945 - DNA, 122 bp, Homo sapiens
aggagggagctctagaatccacgggagacctggctgtgtttgcaaagaagaaaacatagacgtaaagcccaaaggggtccgtagggaactgctgcttccagcttccatttcctcctgcaaac

SEQ ID NO: 70946 - DNA, 122 bp, Homo sapiens
agccgggctgagggttgtgcggagaggagcacacgggccagtctcacggggcttttcagccggcactaggggttcggcccctttccaggggcaatgggcagagcacggtcagacttgtgacc

SEQ ID NO: 70947 - DNA, 122 bp, Homo sapiens
ctgaagaaagagctctttgaatttttcatagaaaagactggtgcccaaaaggccagggctcgagaatgaggctgcctcaagcacagtgcttggcaggacaccagggctgaaaggtacagcaa

SEQ ID NO: 70948 - DNA, 122 bp, Homo sapiens
cttttcagttgggcctgacccacttctcttccaggaaagcgcccgccttccttctgcacccgtcaacctctggagtgtcctgaaaaccctcccttgtgggagtctctgggctgcctgttggt

SEQ ID NO: 70949 - DNA, 122 bp, Homo sapiens
aacaggggcagctccagctgtgcgagaacatggctggatttacgtctgcggcaaagcacccggtcacctttctctgcttggagtgcaatctttttttggaagccctgctggaaaatctgaat

SEQ ID NO: 70950 - DNA, 122 bp, Homo sapiens
tacagagactggaggctctactcaggaaggcaatttgcaaatcttcagcgagggaagctgcgaggctgagattcaggaacaacacttgcaggaatatgccctggagggactgacactcgaga

SEQ ID NO: 70951 - DNA, 122 bp, Homo sapiens
aatatgaacacattttagtagcattcacttataatccaagacattttgcaatccctcctccgtttttccatttttcattgtacatagagctatatgaggcattacagaggatactaaaatga

SEQ ID NO: 70952 - DNA, 122 bp, Homo sapiens
tccctcaccctttccctcccttgctcagggctgagtcctgctggccctccctcttcagctcgggagcaaagcaagacctgctccgctccctatcttgtaagaaaggtcaccgtggcatgcac

SEQ ID NO: 70953 - DNA, 122 bp, Homo sapiens
cctggcttgggatcaccctaatttaggcctctcaaagaaacatcaaagattgtcaagtttcggtgccagcattcttcatccctctgtggcattcctgtgctgggttgcatttagcattcagt

SEQ ID NO: 70954 - DNA, 122 bp, Homo sapiens
agcatttcacccagtgggcgggcggcagagttagcagagctggactttaacagaagctcccgccccaccttgcaacctcgctcatcagctcagctgcttcccccaggaggtgccagctcaga

SEQ ID NO: 70955 - DNA, 122 bp, Homo sapiens
aaccgagaaagcagcgccgcagcgcgccttccgccacgcccaggtccgcaggtcttcgctcggggcggaaaagaatcctccccgcgcactcccagccaggaggaacgccagaggccccgccc

SEQ ID NO: 70956 - DNA, 122 bp, Homo sapiens
tggctccagacctctttactacagctctcagttagaaaattatttctaactgagatatttcggttcagcaagtgttggcttagttcctgtgtgctatgccagcagaaaatatagttcctaca

SEQ ID NO: 70957 - DNA, 122 bp, Homo sapiens
aatttttatgctcgttactctgctgtagggtatgtatttaccaagattagcagaacaccgcgagttcaccaggcggagacaagtcactgtgaagtgggcagcacaggaccccccggagggca

SEQ ID NO: 70958 - DNA, 122 bp, Homo sapiens
aaatggcctggaacccgctgaaacccacaggtgaccagagacacggttaggtgatgggtgcgagaaagggatcgagtgaaccctggcactgccaagggctgacttgcagtcactcctcagaa

SEQ ID NO: 70959 - DNA, 122 bp, Homo sapiens
tcctgtagccgggactccgcgcccaggagcgcggcccgcccaaaggacgtctgcgcgacacggagcagagacccaggggacgaccaggaactgtcctaggcacttccctgccaagagaaatc

SEQ ID NO: 70960 - DNA, 122 bp, Homo sapiens
cctaatgaatcaaggctgtatttccagggagcttgagacttgatgttaggcttacacacacgcacacacacacacacacacacgcctttccagtgggctggctgggcctcttctcctcactg

SEQ ID NO: 70961 - DNA, 122 bp, Homo sapiens
atttgcgggccgtggccatcattctaagcatgcagcactccaggcaccaggagtcctccccgtgcttcaacccctcttcgatgagtttgcacccccgacctccgctaatgttcacatccttt

SEQ ID NO: 70962 - DNA, 122 bp, Homo sapiens
ctcgggccagaaaaaaatctccccatcactccagtgcgagtggttggccttgctctggtccggcactgtgtgcgtcgggaagtcggcctggagttggggttgcagggacgccacggctggtg

SEQ ID NO: 70963 - DNA, 122 bp, Homo sapiens
tggatggatgagaagaatatcccttccctcctgccgatgctgcgccacaccacagcctcacggcttgttctgttagaccgatgcctccgcccggctctctccgtgtcctgcacacagtacgc

SEQ ID NO: 70964 - DNA, 122 bp, Homo sapiens
cagaagcctctggaaacagagctgctcctttccagcaggccaggccgaccggggaggctgcggcccatcgtgcgctgggggaaggtgagccaggctcccatcacgtgccgggagctgatctt

SEQ ID NO: 70965 - DNA, 122 bp, Homo sapiens
aaacgcccgccccccaccccctgccgccctcgccttatgccgagactttgctgttgaacacgaagtaaacgtttcccagaaagcccagtttaagaaacaattcagggcgaggtgagggcaca

SEQ ID NO: 70966 - DNA, 122 bp, Homo sapiens
gtcccggttcccttggagacagagctggccagggcggccgcggctgggcaactacgacagcggagcccctggggaagccaagatgccgtcgaagggaaaggacaaaaagaaaggcaagagca

SEQ ID NO: 70967 - DNA, 122 bp, Homo sapiens
tgcactctgcagggcaacctcatggcttatcctttacaagtggcatactcagaagaataacgaggaagaaagtgtaagaaaagagggctgtttgggcaaagaaaatctggttgattcgatgt

SEQ ID NO: 70968 - DNA, 122 bp, Homo sapiens
ccgctgacctgtgtggtcactggattgatttgtgtctccctcgctggcctgtgaactccacgaaggccacagcagtgtgttcattgttctaccctgacccccagcaccacattcggcacatt

SEQ ID NO: 70969 - DNA, 122 bp, Homo sapiens
gcatcatccaccgcaagttcagctccatccagatgcagctcaagcagagcacgtgcgaggcggtgatgatcctgcgttcccgatttctggatgcgcggtgagtctcccatggggctgtcctg

SEQ ID NO: 70970 - DNA, 122 bp, Homo sapiens
cctcaagcagtatgagctcttgtgaggatgctgccgccaccctgcgacggagcggcgccccggactgcctgactgccagccccatgccatggtaggaggcagagtctctagttccatctcgc

SEQ ID NO: 70971 - DNA, 122 bp, Homo sapiens
gggtggatacacaagttgaggagtcctatgtgtcataccactccagcccccaactgcccacgcccaaccatggcccaccctcagattacaaccactgctatgtctccaggtccttagtccca

SEQ ID NO: 70972 - DNA, 122 bp, Homo sapiens
tagaggtggtgtttcgccatgtttctcagcctggtctcaaactcctgggctcaagcaacgcgtgtgcctcagcctgcaaagttctgggattacaggcttgagcactgagcccggcccagtac

SEQ ID NO: 70973 - DNA, 122 bp, Homo sapiens
tgattcaaaaaatatttcttgtgtctttaaacaaattgagttgaattcaacacagaggggcgtttctctacaactctacactgaccctacattctctagtgttttcatattacacttacctc

SEQ ID NO: 70974 - DNA, 122 bp, Homo sapiens
gagctggggccggcgccgggaattcaggccgcgttcgccgccgcttcctgctgcgccaagcgcgggacacgtcacaccagtggccccggaaatcggctcaaccgtacttccgctcagaacgc

SEQ ID NO: 70975 - DNA, 122 bp, Homo sapiens
aggcaagtgggatctcttctcatttttctgtgcatatctgtgggggatgcgacaactatccgctattcagtggcagaggaaatggagagcggctcgtttgtggccaacgtagctaaggacct

SEQ ID NO: 70976 - DNA, 122 bp, Homo sapiens
ggagcgcggtgaggacccgctcagtggaatcggcagaggcgggagctgtccttatcaattcgagctcatttccctcaacctggccctgcccgcttccccgcttcgcaaactgttggcttccc

SEQ ID NO: 70977 - DNA, 122 bp, Homo sapiens
caaactgtgttatacctatctgattcctcatctgtcttcaccattgtcctgcacacttctcgaagtcagggatcataatttattcatatttgtaatcctaatccctagcacaaagcacgtcc

SEQ ID NO: 70978 - DNA, 122 bp, Homo sapiens
tcacctcctccagctggctgtgcacgtgctgcacaatcaggtcgatggccaccgtgttgccgctccctggggcgggatgggggggcgggtgaccgggggctgggccgttggcctgcccgaca

SEQ ID NO: 70979 - DNA, 122 bp, Homo sapiens
ggtgagactgcgctgagttcccaccggcttcgggttctctttggttcattcgcggttatgcggctaaaatagaaaaaaggaagacatttttcctcgcggaggtatagagatcctagaggcca

SEQ ID NO: 70980 - DNA, 122 bp, Homo sapiens
acgtgacggggctggactttgatcgccgagggctctctgctcttcagagtctgcttggaacgggataagtgggtaattccttccgatacatcctctccacccgtgcagagacaccctaccaa

SEQ ID NO: 70981 - DNA, 122 bp, Homo sapiens
aattagacctcttagttcctcattttcctcatctgtcacatgggataattatggtgcccacgcccaggcatgtcatgaggatgaatggagttaatgtttataaagagtttagggcaggacct

SEQ ID NO: 70982 - DNA, 122 bp, Homo sapiens
gctggctgccagctttgcctcagcatcctgtctgcctcccaggcattcctctttgcaagccgactcatacagtacccggaggcgagtgcctgtgctcccatgtgtggataatgaggttgtag

SEQ ID NO: 70983 - DNA, 122 bp, Homo sapiens
cgggggttcggcctcagtcaggcgctcagctccgtttcggtttcacttccggtggagggccgcctctgagcgggcggcgggccgacggcgagcgcgggcggcggcggtgacggaggcgccgc

SEQ ID NO: 70984 - DNA, 122 bp, Homo sapiens
gcgctcacccggaacccacgccggcccgctagcgccgggcgcgcagcctcggcgggcgggcgcctcgccttccacacctccccgccagcagagggagctggctccggcctcggccagcccca

SEQ ID NO: 70985 - DNA, 122 bp, Homo sapiens
gcggaccttcaacaagtggcgcagcggtgagcccaacaatgcctacgacgaggaggactgcgtggagatggtggcctcgggcggctggaacgacgtggcctgccacaccaccatgtacttca

SEQ ID NO: 70986 - DNA, 122 bp, Homo sapiens
tctctaatccttatagcaactctataagttgctataagaaagtgatattattcttgaaaccgacacttcagaaggttgagtcacctacctaagaccacacagctaatagggccaaaccagga

SEQ ID NO: 70987 - DNA, 122 bp, Homo sapiens
gcatgtccggacaggctgccgggccctgctctcagccacccctcctgctgccgccaccctcgccacaggccacgggccctggcaggtcgtgctgcccagacacatggcaggagatggtgagc

SEQ ID NO: 70988 - DNA, 122 bp, Homo sapiens
ggacatgacaggagtgggtagcccacgggacactggcacgagcgccatgatgggcggagacgcgcggaatcggccggcccggaagtgccagctgcctgcgtcggccggaagtgccgcgcggg

SEQ ID NO: 70989 - DNA, 122 bp, Homo sapiens
gaagaaacgctcacctggtgaggggcgagacacggacaaaggctggaaggccgggcagagcggggttatcgtgtgacggagaaagtggcctgcccacctgatgggcgtgtgggtatgtgtgg

SEQ ID NO: 70990 - DNA, 122 bp, Homo sapiens
ggacgaggaagcaagcacgtgggggtccgggcaggaaggtgctgagcggaccgcagtgggcgaatactggggcttgaccggtggcgtacagtgggaagctcggaggggagagtcaggggtct

SEQ ID NO: 70991 - DNA, 122 bp, Homo sapiens
atcagtaggacgggagggaatgcgctcccccagccctcggggagtacacctcggggggagcgagtgccccgagggcaggaggctgccggggcgccggaagctgctgtcccggcggagtcgca

SEQ ID NO: 70992 - DNA, 122 bp, Homo sapiens
taagaatccagtatagctttctctatatttcctcttagaattaatgcttgagagaaacaacgggtgcctgacatactggaacctgcccattgctattttctgatgctcttctccgtccaata

SEQ ID NO: 70993 - DNA, 122 bp, Homo sapiens
attgtgcccaccttgctgctgacagttaagcatcactaaagtaggaaatagggtccaaaccgacactacttaaggagggcaagtagtgatgggacctcatcatcccattgctatcatggagc

SEQ ID NO: 70994 - DNA, 122 bp, Homo sapiens
tgggagggttccctggggtgggctggggtggcggtggccagtcacctctaactgctgtcccgcctgcttgcagacctgctgcggatgttctttgacgcactgtatgacgaggacgtggtgaa

SEQ ID NO: 70995 - DNA, 122 bp, Homo sapiens
gaccttgagaatcacttggcctctgggagcctcaattttctcatctgccaaatgggggtacgcgggggagggccccgctggaaggtggctgggaaaagctgggtgcaccgtggaggtcctcc

SEQ ID NO: 70996 - DNA, 122 bp, Homo sapiens
gaaggaaggactgggtagcggctgagggtaataagagcagggagcagctactgcgtgatgcggtggtttccagtgctaaaacagcgattgcaaatttgagggaaagaaggacgtctctcaat

SEQ ID NO: 70997 - DNA, 122 bp, Homo sapiens
agtcggtgctcaatacatttttcttggtctttcaataaaccaacatccttggtggttaaacgccaggccactaaaaataaatcccaagtccttttccaagcgggcacagtgcacctgcagga

SEQ ID NO: 70998 - DNA, 122 bp, Homo sapiens
cgggaccaccgtcatctatgtggccgtcgtgggccaacacattggtgtgaagcacatggccgaccacgtgttgtatctgaatctaggtcgacccactgtgcgattaaacaccaaagtagcgt

SEQ ID NO: 70999 - DNA, 122 bp, Homo sapiens
gcgtctgacagaggagacattaggggaaggggagcgcatatcaaaaccagaaactttatgcgcatttctggaagaggaacaacggatatgtctgtggccgtgggacccagcagccccgtacc

SEQ ID NO: 71000 - DNA, 122 bp, Homo sapiens
gctgggtccccttcctgccaagtcagcaaccagctatgtgaccttgctcaggtccatctccgggtgtcagtttcttcatctacaatgcaagagggttgcccacctctgagaacccttctaac

SEQ ID NO: 71001 - DNA, 122 bp, Homo sapiens
cgactctcggctcccgtggggcgaggaagatctggacacacggctgacagcagccggcagcgcctggagcgaacctgctcgggaccaccgagagagcatgccacccggccaacttcttttcc

SEQ ID NO: 71002 - DNA, 122 bp, Homo sapiens
cgccttggcctcccaaagggctgggattacaggcgtgagccaccgcgcccggcctgcagccgactttcatgattgtattgttgagtgttatgtatgtatggctatactttcacgctcattta

SEQ ID NO: 71003 - DNA, 122 bp, Homo sapiens
acccaagcgcagaggaaaatcaccagcagaaatacggacacaaaggggattctctgtccccgatgatttctgatttcggcacacccagacccacggcgcacccatcgcgccccgcacccccg

SEQ ID NO: 71004 - DNA, 122 bp, Homo sapiens
tttcgaggcgggaagccgggctgtcccgaatctcggagggtgcaaggccaggaaagagtccgggttcccactccgcattcactgcctggtgtgaccttgggcgtctctgagcctcaattttc

SEQ ID NO: 71005 - DNA, 122 bp, Homo sapiens
cagacgcgagcccagacgtgggtgtcaccaacccctttcaatgacaagccccacagtagacgaggacgtttttggttgcgcaagcggcttctgaagtggttcctgtgggcactgcgggaatt

SEQ ID NO: 71006 - DNA, 122 bp, Homo sapiens
gaggaagggagaagagatggcagggagggcgtgggcggcacctgtggtcgagttggcctgcgtttcggatccgagggcgacgcagacggagctcagaaccagacccagccagagaaggcctc

SEQ ID NO: 71007 - DNA, 122 bp, Homo sapiens
gaaatgccatctttaataaggttttatgaagcattaaatacccacaggtatttaccctctcgcatcccagtttttcagagacatcaacagtctcagaaatgccttgactgtgacataaactc

SEQ ID NO: 71008 - DNA, 122 bp, Homo sapiens
gggctccctctctggggccctctcccccaggggaggcctgctccagccccaggggagctgcggccctggctcctgttcccagtcggagtgaccagccctgggcctccttcccagcttcggcc

SEQ ID NO: 71009 - DNA, 122 bp, Homo sapiens
cataaaactcaacctccattttttagaacagatccagggggtacatgtgcaagtttgttacgtggatacattgtatagtggtggggtttgggcttccagtataccatcacccaaatatcaac

SEQ ID NO: 71010 - DNA, 122 bp, Homo sapiens
caccttccaggagtccgcggtgaggtgggaggaacagaggcctcactaagcaacactgagcgctgtgatcaatacgtgtccaatacagagaaaccaggaggagcagccggcttcccgtgcca

SEQ ID NO: 71011 - DNA, 122 bp, Homo sapiens
catggacgtgcctgaggggtccgggcacggccatacgcaggacccctgtgcccggggaggcgctgcagggattccccatccggtcgtcttggggccagcccgtcttatggactctgccttgc

SEQ ID NO: 71012 - DNA, 122 bp, Homo sapiens
agagaagtcctggaatggagactgggggcggatgacaatagagtggagaatggcagaggtcgtggtaaatgatagtggcagcagccttttatctggagacttcaggccctcctatgctaact

SEQ ID NO: 71013 - DNA, 122 bp, Homo sapiens
ctccaagagatagacccaccctgcgccggagaagcgaggctcccaccatgctgtggggagcgctgctgacccttgcaggagcagtggccagtgcggtgagaaggcagcctgggggaagaggg

SEQ ID NO: 71014 - DNA, 122 bp, Homo sapiens
ggagagaggcgattcggatatagacatccctgcgcaggttgaagccttccggggggttgacgtcatacagaagatacctgagcagggagaaggaggaccacaggtctcaaatgctgaggttt

SEQ ID NO: 71015 - DNA, 122 bp, Homo sapiens
accggcgaacactgctaggcacagcctggtgccaagctacgaaggtgggtcaggtctgctcgtggggaaggtgggaggactgcgcacggccgggagccgaagcagccatggcggtgggtggc

SEQ ID NO: 71016 - DNA, 122 bp, Homo sapiens
actgcaagggacagtcggcccagtggctcctcccctgcgtgggccgagatgttttctgcccgtgacctcagcagcacccttgtcagtccccgcacggcctctgccctccttcccagtcaccc

SEQ ID NO: 71017 - DNA, 122 bp, Homo sapiens
gggccgttgccctgcatgtgactgtggagtctcccttgggtgtctttgacttagagcggccgcactgcctgggcttctgagacattgcaacgcgctcaggccttcctcacgcaggcccttgc

SEQ ID NO: 71018 - DNA, 122 bp, Homo sapiens
agcgcgagttccgggtgggcgggggctcggcgagccgcacttggagcagatggctgtccccgccgcccgggcagtgaggggcttagcacctgggccagcagctgctgtactcgatttctcgc

SEQ ID NO: 71019 - DNA, 122 bp, Homo sapiens
cgtgctgctgtcagaggagagacccgaagactacttgagactgttgcttgaaagcagtgtcggcagcacctggacctggacttgtgacgctgatggatttcagctctaaagagaaacccctg

SEQ ID NO: 71020 - DNA, 122 bp, Homo sapiens
acgtctttccccacctctgctggtccggcgatcacaccacaggcccctcccgacctcgcccgggctgttccctggggccccggtttgcacctgcacccctgccctgcatgctcagaccaaat

SEQ ID NO: 71021 - DNA, 122 bp, Homo sapiens
atgcggccgccgggctattgggaggtgggtggtcgcggccgcagcgccaagtcgggctggcgggctcagtgctcgctgggggcagggcggcgaactggaggaagagggtggacgttggtgag

SEQ ID NO: 71022 - DNA, 122 bp, Homo sapiens
ccatgcaccacgcaagggttaagattgcacaagggaagagttcttgcgccatctactggccgtctccgagccgcccgttcttccttcgcatgtataagggaccctgtttttgccatcccttg

SEQ ID NO: 71023 - DNA, 122 bp, Homo sapiens
ggcgtgctggttttgctagcagcttgggcggtgatgcaggccccagcacagctcacagttcgcagcagatgtaaaggttttacctgccctgagcaaacgcctggcagcgttcagtgtggtgg

SEQ ID NO: 71024 - DNA, 122 bp, Homo sapiens
cgtcttctatatttagaaacagtgttcttggaagcagacagatgctctgaggcctgagctcgtgtttatggcaagcaacacagccaaccatgcacagggaggtcatgtctggattagaatgg

SEQ ID NO: 71025 - DNA, 122 bp, Homo sapiens
gcgattgcctggagagctcctggctctcctcccgggtccccgctgggtcccaggagtccccggaggggaagcaaggagccccagtgccctggagtcctgtctccaccaacctcgcccggctc

SEQ ID NO: 71026 - DNA, 122 bp, Homo sapiens
ctcccacctgacaggaagcaaagggaagctccatctttccgtgttggttaattgtggccccggaggttaccatgacttaggaacaacaggacatggggtcgtattgtgtgtgctgggtctcc

SEQ ID NO: 71027 - DNA, 122 bp, Homo sapiens
ctgcccatcaggatttgaatccaggtctctcaactgagtccagtgctctgtttcctacaccgcattttctagggataaaattgaactaaaacggaggaggtcctggagtagagaaaggacaa

SEQ ID NO: 71028 - DNA, 122 bp, Homo sapiens
tcaactggaaaggcagaaaaaacactgagaaggatacaacatgggcccagaagccagggacgctctggatgacggcgcctctgcggtctaggtggggcttgtgcctccattccatcttttcc

SEQ ID NO: 71029 - DNA, 122 bp, Homo sapiens
ggcattctctctatgacttgctcggttacgacatttggaagccccagagagattcgccaccgggtgaagacctgactcattccgggcttccccagacagacagctggcttacagggccacct

SEQ ID NO: 71030 - DNA, 122 bp, Homo sapiens
aaatagtaaaggccccaaggacagggtgggtggtggcccagccccccacataccaccacccgccaagagagcagctgtgtgcccatgagcaacattttccaccgtgctgactgcacttttcc

SEQ ID NO: 71031 - DNA, 122 bp, Homo sapiens
tgtctactcttaaattgtcataggcctacttcctactccctttcttccttcagctcagttcgaccattacctttaggcagcacccactaacaccacttagtttacccaccccacccctcttt

SEQ ID NO: 71032 - DNA, 122 bp, Homo sapiens
gtgcaaccactgagtccagagtcaggaacaacggctctgcacactggtgggaatccaccccggcttgcgcctgcgccccggccgtggctctgtggagctctccgtcccagggaaccttctcc

SEQ ID NO: 71033 - DNA, 122 bp, Homo sapiens
gataattagcgctaattacatgtgtgcaaacagccgcggcagagggcgcgggctaggccgcggggccgcccctcccccggcctgaccctggcagtcccaccgcagtggaggggctctgctgg

SEQ ID NO: 71034 - DNA, 122 bp, Homo sapiens
tttagtgctcatgaggccctgcgaggcaacacctgccgtgctatggttagcccctttccacggggaaggacgctgaagctctgaaaggtgaagcaactttcccaaggctacacagccaggaa

SEQ ID NO: 71035 - DNA, 122 bp, Homo sapiens
gtcactgagataaccagctcggctgttagcaactctgttagcaaagctgtttgtctttctcggaaacaacaggtgagaattccccttacagacctgcccatgctttctaaagtggctctccc

SEQ ID NO: 71036 - DNA, 122 bp, Homo sapiens
ggctgttgagagccacgccatacggggggacgctctggttcaggtacaacagcgagttgacggcaaacaccaccaccccacctggaggtggacacaggctggtgggcaggctcagtgctctc

SEQ ID NO: 71037 - DNA, 122 bp, Homo sapiens
agcagaatttggactgaaagaaaagggggctggatgcattggggagggtttgggctgtggcgggagcccggggctctgaagcacttattccagctcaatcctagtacaggaaggacaatttc

SEQ ID NO: 71038 - DNA, 122 bp, Homo sapiens
tcaaagaccagagcacacacttcgggctctgagctctggagcccgcttcttgcagaaaaccgggtatgggggaagggctgcaggggcgagaaatcctgcttccaactgcgatttcagctttc

SEQ ID NO: 71039 - DNA, 122 bp, Homo sapiens
ctctcagaaacataacgtgacttgtctgaggtcacaccgcacagctagtcagtgtgaaaccgactcagaacccacagctggctgggtgtggtggctcacgcctgtaatcccagcactttggg

SEQ ID NO: 71040 - DNA, 122 bp, Homo sapiens
agtagtcattcagtgaaagtttgttgacaagcataataatgtcccaatctagttctatttcgttactttggacctggcttactctgaggtgggcttaagtgttagtgtaagttattagcatc

SEQ ID NO: 71041 - DNA, 122 bp, Homo sapiens
atggcggtgtggagtgggtctggaggaagcttgctggtcagggatggagtggtgcccacacgtgtttctaaacattggaaaactcacacggaattatcatgattggatagaacattttcatc

SEQ ID NO: 71042 - DNA, 122 bp, Homo sapiens
aggggagggaggtaccacttgatttttcttcctctttctttaggaccaatcaatacaaagcggccactgaacttcaatgacgcattgttccaactgatttccggatccttcacatgaaccag

SEQ ID NO: 71043 - DNA, 122 bp, Homo sapiens
ctcccagctgctccacctcctgggattggaaggtggcctggatctgtctggtcattaacgcgtgtttaggtagcaaaacaatgtaaagtgtatgttttttaagactgcaaatgttggagtct

SEQ ID NO: 71044 - DNA, 122 bp, Homo sapiens
cctttctgagtccaagaaaggggtgacggaaggcacctggaaaatcgggtcactcccacccgaatactgcgcttttccaacgggcttaaaaaacgatgcaccacgaggttatatcccgcacc

SEQ ID NO: 71045 - DNA, 122 bp, Homo sapiens
ctgcggggtctgcgcggctgcggtggccaggtgaggacgtctctgcccttgcgcggcctgcgctgtatgcttcctgcctggcccgcgcttcccctgcctgcatcacccgctgcccgcgcggc

SEQ ID NO: 71046 - DNA, 122 bp, Homo sapiens
caggaaaaacgtatggccactgccaagaggtaatagtgcccatcacctcctgtctaagcacgcgcgaggtccagaactagtgctgcagtccaggttgccgtgccaaccgcagcagagcacgc

SEQ ID NO: 71047 - DNA, 122 bp, Homo sapiens
cacacagcggcctggcagtacctccatcatcccttgggcagggtgggagtgggtgaggatcggggtggaggcagagtgtcacagaaggcaacccacctcacccagctcatcaccctctggta

SEQ ID NO: 71048 - DNA, 122 bp, Homo sapiens
ctcaggtcctccgggttcaggggctggagccatggccatggcctgcggtaggcagaaccacgccacgccagcatctcctagaaggggctgccctgggcccgcggcaccagacggacacagct

SEQ ID NO: 71049 - DNA, 122 bp, Homo sapiens
gtgggatgggttgactttggcggctgcaacaaatggtttccctgacactctgggggtgaacgtgccatgatttgctgactccatacctactgcctcatgggaacagacttcctcctttcgag

SEQ ID NO: 71050 - DNA, 122 bp, Homo sapiens
accggcttccccagtgaatacccaatgaatacccatttctgaacttgctcgataagaacacggctgaaggtagattcctacaaggtaaattcctattactgtcacttaggttgtggctttag

SEQ ID NO: 71051 - DNA, 122 bp, Homo sapiens
tcccgggttcaagcgattctcctgcctcagcctcccaagaagctgggaattacgggcacccgccaccatgccctgctaatttttgtagttttagtagagacgggggtttcaccatgttggcc

SEQ ID NO: 71052 - DNA, 122 bp, Homo sapiens
ttctttttctttttttggtagcttaaacaataagacctttattgttacaaaacccagcagcgtgaggagttcctgggttgggtgaattagaggctggaaaaattcatcgcaagcattacaag

SEQ ID NO: 71053 - DNA, 122 bp, Homo sapiens
gtattagatcccctctaaaactccagagtagctaaactggactttattacgcgctgcccccgcccccttccctccccccaccccaacccccctcgccaccattgccactggcctgcgcttag

SEQ ID NO: 71054 - DNA, 122 bp, Homo sapiens
caaaaaaaaaaaaaaaaaaaaaaaagtgcagtctagcccgcatctgcggcctcttcatctcgatgatagtcttttcctgtgtcttagcgttgcatgatgggagaaatagtctactttccggt

SEQ ID NO: 71055 - DNA, 122 bp, Homo sapiens
tctcaccccaggaaggaggcgggcgagggcggccaaggctgggcggctgaactcatcctccggggttgggccctgcctctggggccacagacctcgctctccctcctgggccccgatcaagc

SEQ ID NO: 71056 - DNA, 122 bp, Homo sapiens
cacgtacatgagcggctgggacaggatggtgagaccggagcccaggagcacctgactggccgcgtccgccatgatggcacccgcgggcggacggacagacagacggagccaccaagcgaccc

SEQ ID NO: 71057 - DNA, 122 bp, Homo sapiens
ggtggggcggggcaggtgggggtccccgccaggcgcgcccaccccctagcctagcagccccgctctcctgcgggctcccccgtgggccaagtctcctaaactgggccagcctggagtcaggt

SEQ ID NO: 71058 - DNA, 122 bp, Homo sapiens
cgcaatcttcagcgctgcctggtgaggagctttcagacgtggctgcggtcccagggtggccggcgggagccagggaaatgggagaaggaaggaaggagcaggttttgcccccagctccctct

SEQ ID NO: 71059 - DNA, 122 bp, Homo sapiens
cagggccctgggtggggcttgctggcgctaaaaggatttctcagcaggctcagggtctcccgccccgaatgacccttctggccacttcaagctactcctctgctgcccggcttccctctgcc

SEQ ID NO: 71060 - DNA, 122 bp, Homo sapiens
agacggggggtaggaagatggggtggtgttaatttaatcctaacacctgaaattacttcccgggcttgccgtaattttctcaaatacaattatgtgacggtatcaagatcactttcatccat

SEQ ID NO: 71061 - DNA, 122 bp, Homo sapiens
aaataaatggttctgactccactactaactccttggtgactttacaatattgtatgcccacgtctcctctctaagcaaagtctgctcctctacagaatgagtgggttgttctgtcaggctac

SEQ ID NO: 71062 - DNA, 122 bp, Homo sapiens
ctccacccacagcggccacggcccacggcaggagtgctgcacctccacccacagcggccacggcccacggcgggagtgctgcacctcctccacgaacagcagccacggcccatggcaggagt

SEQ ID NO: 71063 - DNA, 122 bp, Homo sapiens
ctgggaaggtggcccaacaggccaggagctgagcacacagcagggcggatgagagtgaggcgctccggccagatcgggtctcagtccagctttaacacttcccagctctgacactggggaca

SEQ ID NO: 71064 - DNA, 122 bp, Homo sapiens
actccgttgtccaggctggagtgcagtggtatgatctcggttcgctgcaacctctgtctccggattcaggagattctcatgcatcaacctcccaagtggctgagattacaggcatgcgctat

SEQ ID NO: 71065 - DNA, 122 bp, Homo sapiens
gcctttgcggagcagacggcgctggagcccggccagggaagaccaagtctgggacttcagcgccagcctcgccaccctgcttcccacaaccagatgtctcctgcgaagtagccccctctaat

SEQ ID NO: 71066 - DNA, 122 bp, Homo sapiens
aaaaacatctgctacgtcatcacgcacggcgacgccaaggaccaggagtaggggcacccgcgggcctccgctgcccgacgcttctgttcggcccgacctccaccccggctcccaataaaatt

SEQ ID NO: 71067 - DNA, 122 bp, Homo sapiens
aggttctagcctacctacccgcgtgccgtccggggttgtgaggccagtgcgcttgcgccgcggctgttccctaacttccaaatcccgtcgcagaatctcgcgcgacgtacttttttccctcc

SEQ ID NO: 71068 - DNA, 122 bp, Homo sapiens
ggcgcacagggtgcaaacctgggcaaaacagcatctgattatactgataagtaccctttacgaggctcttaccatgatggacacggggctaagtaagctcttcatcatcatctccattttat

SEQ ID NO: 71069 - DNA, 122 bp, Homo sapiens
tgggctgttctacttagattatttcctctccagttggttttacccaactcctgtccaggccgcatcctttccattgctctgtcattttttagtctcatttcctctccccaagagactggtaa

SEQ ID NO: 71070 - DNA, 122 bp, Homo sapiens
agaattcctttgtctttccttaatagtcagctttaagtgcagtgcaggcgtgccctctagcggccaaataaaaaataaagaaatacgggaaaccttcagcattgtaacaatcgcacgtcccc

SEQ ID NO: 71071 - DNA, 122 bp, Homo sapiens
accccgtcaggatcctgggctgggtccccttgggggtgagggtctgggatgagctgctctcgaaagggggatggcgctcatgggttctgcgtctccatcgtggtggggccgcctctgaagat

SEQ ID NO: 71072 - DNA, 122 bp, Homo sapiens
ctgtgtgaacgagcgccttgccgaccgcacaccctcccccactttttccacggccgattccgacatcactgagctggctgacgagcagcaagatgagatggaggattttgatgatgaggcat

SEQ ID NO: 71073 - DNA, 122 bp, Homo sapiens
ctctggcgcaggcccctccaaccacaacatcctgagctcttggcaacaattgtttggtgacggcctcagcttttaactagaattttggagaaaagctgcagtgtgtctttaacttgttaagc

SEQ ID NO: 71074 - DNA, 122 bp, Homo sapiens
agtgccagtgataatgactgtccagtgttaactgtgtttgtcagttaagtcaccaacctgcgtcagaccagtggccaaacacgtgccccagtatagtcgggtcaatgccttggtgaagacta

SEQ ID NO: 71075 - DNA, 122 bp, Homo sapiens
ctattgcactttgggatctgttgttgtgttgttattttacacatcacttgcagttatccacgtgtgattactggaaggtgggctatgaggttaattgactgcagtcatttagtcaatgttta

SEQ ID NO: 71076 - DNA, 122 bp, Homo sapiens
gtgcctaatgttaattccataaggctcctttgttatgctccccaccccctaccacacacccgcaactggcctttgccatgaggaagatgtgtacctataatcaggcatttctttactttagg

SEQ ID NO: 71077 - DNA, 122 bp, Homo sapiens
tttcagtacttggaaagggccacagtacaagagactgaagtgtgacccctccatacctaccgccctcagtttgccactggtgccaccaagaggctgctttgggttctgccatccctctcccc

SEQ ID NO: 71078 - DNA, 122 bp, Homo sapiens
atttctctgagacacaggagctgtgcatcctgacctgggcatgccgcagcacaggaagagcgggcagggcatctggatgtggcgctgggttccttcatcagcaatggccttctgcagtaagc

SEQ ID NO: 71079 - DNA, 122 bp, Homo sapiens
tattatgaaatgtacatttatctccttaggtcatttcatcacagaatccctattatgaaacgtacattctcccctttgttctagtgaggaggccccaccaatcagagaaaagatctgtttct

SEQ ID NO: 71080 - DNA, 122 bp, Homo sapiens
gcggggcacgctgtattaggcgagccgagattacttgggccaaaggcggttgctagactgcgagagggagagcaggtacgggggtcgtgccggtaccgcctcatcctcccaaagcctcactg

SEQ ID NO: 71081 - DNA, 122 bp, Homo sapiens
tgtactttctttgtttaacagtcaccaggtgaccaagtggcttttctaaaagccaaaggccgtggacgacgggattgtgagcgacttttctctagtgttttctatttgagatttgaaatacc

SEQ ID NO: 71082 - DNA, 122 bp, Homo sapiens
aagcgaggcaaagtagggaggcgagacccagaggcctttaaagggatcggtccgctcccacggtgcccctcggagcacgccggccgcccgcccgcccgcctggcgctgctgccaccgcgtgc

SEQ ID NO: 71083 - DNA, 122 bp, Homo sapiens
caactttctgttcttcctaaagcatcggccttcagtaacttcccaaatctgaggttctatcgtttagaaacagtaaggaaatatgtagaattcttaattagcatcacttagtaattaattga

SEQ ID NO: 71084 - DNA, 122 bp, Homo sapiens
cttcctggtgcggtgctgaattgggctgttcgttcctctgagcaccaaggagagggatggcggctcaggcttcaggcagtgcccgccggtgcctctagaaggtgctccgtggtggggcccgg

SEQ ID NO: 71085 - DNA, 122 bp, Homo sapiens
gttggaaacccacctggctaggcacagcccagcagctccagttacctgggcacctgggagcgcgggaggccatcacgcaggtcgccactaggtggcaggcccagggaaaggaccggaggcag

SEQ ID NO: 71086 - DNA, 122 bp, Homo sapiens
ttgtctgatctccacctcccaactgaattaggggagctgggcttctggaaacccaggtgccgggtgttgcagagtggctgaaagctgggatgtggcagatccgtggctacattcatgcacac

SEQ ID NO: 71087 - DNA, 122 bp, Homo sapiens
agacacggacacccacagtgacgggggccgtgtggggccatggggctcagagcccatgtgcgtggacggacagtcacagggcggccatggggcctgccagacagagggtgatcatgcggaca

SEQ ID NO: 71088 - DNA, 122 bp, Homo sapiens
acaccagcatcaccacacaaaggagagtaatgcattatgttgcatcgtgctaggatattccgatggctaccatgtcactaagtgatagaaacttttcagcttcatcatgatcttatgggacc

SEQ ID NO: 71089 - DNA, 122 bp, Homo sapiens
gagctgggaagtagtgtccgttggagtgtccagccctgtggggggcagtgtccggtgcagcgtccgaggtgggcagttgtccaagctccagggagggtcgtgtccggtagggcgtccggtgg

SEQ ID NO: 71090 - DNA, 122 bp, Homo sapiens
tggaaaacatgtttaccagacacagccaacgagacgtgctcctggctcttggcacaagtgcgttcctctgggcatgcgtttctgcacctcgcgaagaaatggattttctgccctgtactaat

SEQ ID NO: 71091 - DNA, 122 bp, Homo sapiens
cagctggccaggagtcaacggcccacagaggaacaagggaaaatggcaggcagcgaggtgcggggtcctcaacagccaggacaccccgcccgggagctcagccctcctggaagccgcggggc

SEQ ID NO: 71092 - DNA, 122 bp, Homo sapiens
aattaaagataattttccttattaattaaatatggggtttcaccatgttgcccagactggcgtacagctctttatgcagggtttatttctagaagtagaattgatgggttaacatcaattct

SEQ ID NO: 71093 - DNA, 122 bp, Homo sapiens
ccctgcacacgcttcacagagatgctgtcagacgcagagctggtctggggcatctgttgccgcgtcagctcaaaaggatgctgtgttgtcaccaatgggattccccagcccaggcggtgttg

SEQ ID NO: 71094 - DNA, 122 bp, Homo sapiens
caaacactgtcacatacatccatgaaagttagatgtcactggatatcacttttgatgtaacgaactttggaatgatatgtgttacaattcccacaggcatctgaaaaaaaaataaaacaatg

SEQ ID NO: 71095 - DNA, 122 bp, Homo sapiens
tcacagaggaggttctgagcccaggattcagcaagcagctctggaaccattcgcaaagggcgagaacaaggttgaacaccaggaatcctgcagttctgtcttggggttatggattcacttgc

SEQ ID NO: 71096 - DNA, 122 bp, Homo sapiens
atgtataatctcgggacaggatgcaaatcgtctctcccaggtccagtgagcctgtgacctcggaggtgggacacatcacgcactgcggagtgtgggaggggtacctgagatactgaggagag

SEQ ID NO: 71097 - DNA, 122 bp, Homo sapiens
ctccttttgtatcaagtcgatggaaagagactcacatttaggcacaccaggcaaaatgagcgaagcattcaggctgaggaggcaagtttaaaaattaaactggctggctgggcgtggtggct

SEQ ID NO: 71098 - DNA, 122 bp, Homo sapiens
ccaacagctgccttctcagggtcattggcctacccttgtttggggcttgcagttatgttgcgatgctgttcaagagcaggctaccatctattatctcccacctgggctggaaggggtgcctg

SEQ ID NO: 71099 - DNA, 122 bp, Homo sapiens
gggctggccacagtgccgggggaagctgcaatgaatcctcagctctgggcccagtggaggcgctggggacggaagaaggggagcggccggggtcactgaggcagatgtggcgctaccgctcc

SEQ ID NO: 71100 - DNA, 122 bp, Homo sapiens
tttcgcactcggccatacatgctgctttcactcttctctatcttgcagtcctctaaattgcgtgcatttatgccttaaaatgtcaaatatgacttagtctcacaattctctgcatccatcat

SEQ ID NO: 71101 - DNA, 122 bp, Homo sapiens
cccccttttgtcaactactgaaaaaaagtctccgttaaatttgaaacacaaactgtctcgcgatgggctgtcctgccaaagaaagcagcagcgaataagtacgtggcagatggtgctgtcga

SEQ ID NO: 71102 - DNA, 122 bp, Homo sapiens
ccgcctgcggattctatctataaatcagcctaagccccgcttccttttaaaacaggattacgccgggtcgagggagcctggcgtggccgcgcagtggccgggtcccgcggattcccctccag

SEQ ID NO: 71103 - DNA, 122 bp, Homo sapiens
aaccgtggacaggagggggttaccagagaaaccgtggacggggggggttaccagagaaaccgtggacagaacgggccaccagagaaaccgtggacaggagggggctaccagagaaaccgtgg

SEQ ID NO: 71104 - DNA, 122 bp, Homo sapiens
cccacccagctcggccccctccaggtcccctcaaccccactccgcggaggactaactccgcgcctcctctggaagtctctccaagccccccgggctgcctgaccccagatcccgcccggaat

SEQ ID NO: 71105 - DNA, 122 bp, Homo sapiens
ggagaatgtgaacacctgtcagtgttatcctgcccagggggcgagggagctggatactcacgatccagctcctaacgtggctgcccactgggggcaagcaggtggtgagtgggcaggggagc

SEQ ID NO: 71106 - DNA, 122 bp, Homo sapiens
aatagagtcacgtgacctggtttccctgttctgggtcccgcagcttcctgagctgacctgcgggcaaactctgcctcagcagccccccaactacgtggcaccatggccccgactgtacacaa

SEQ ID NO: 71107 - DNA, 122 bp, Homo sapiens
gccctgctgcccttcgacaacctgcacgatgacccctgtctcctcaccaaccgctcggcgcgcatcccctgcttcctggcaggtcagacagggaggaaggtggtgtcttcccaggaaacagc

SEQ ID NO: 71108 - DNA, 122 bp, Homo sapiens
agcgagagcgcccccgagcagcgcccgcgccctccgcgccttctccgccgggacctcgagcgaaagacgcccgcccgccgcccagccctcgcctccctgcccaccgggcccaccgcgccgcc

SEQ ID NO: 71109 - DNA, 122 bp, Homo sapiens
tgcgtgtaaaggttattgagaaactggcctcagtccctagaaaggacccaccatctccatcgcttaggtgaggaaaatctcctggatttaaatctagcaactcaggccagagttgagcggct

SEQ ID NO: 71110 - DNA, 122 bp, Homo sapiens
gaatgaatgggaggataggccacagagaaactcggggcagggtagcagggagcaggggtgcgggaaacagtgctaatcccatgagaggagggcaacacagggaggaatgcagccaggaaaaa

SEQ ID NO: 71111 - DNA, 122 bp, Homo sapiens
gaaggaaaactagcctggcaacctggagagctcccgggccagagccaggaggcagctgtgcgatctggatgtacctaaaccctccagggccacatagtgaccccaggccctggtcactccat

SEQ ID NO: 71112 - DNA, 122 bp, Homo sapiens
ctgaaaccttagcttatttattccctaaccctccccagcacttccatttggggttcagaacgatctgctgaggactgtggccccaagggaggaaggggacacccaatatgtggcccagagct

SEQ ID NO: 71113 - DNA, 122 bp, Homo sapiens
ccctgtcccctgctcacccagcacctaggctgagccacccatggccggagtcgggaggcacgtgtgcattgagggaatgaaagcaagaagaggcagctctgattgccttgtgaattcagtcc

SEQ ID NO: 71114 - DNA, 122 bp, Homo sapiens
gttgtaggaccctcactacgtccagcaggcgctgaccaacgtcttgctgatggacgccgtcgtgggcacactgcagtcaccaggcgccatctacgctgcctccaagttatcctactttgata

SEQ ID NO: 71115 - DNA, 122 bp, Homo sapiens
ccgggccctgagccccgcccacgcgccgcgccccaccccggtaccccggcctttaagccccgcctacactcccagccccgtcccgccgtcccaggccctgagccccgcccacaatccgagcc

SEQ ID NO: 71116 - DNA, 122 bp, Homo sapiens
gggtgccgcctctgagtagggcgggcgaggaggcagccaaggcggagctgatggctgcgccgagggcggggcggggtgcaggctggagccttcgggcatggcgggctttggggggcattcgc

SEQ ID NO: 71117 - DNA, 122 bp, Homo sapiens
aatcgagaatttgatcccatatctacctgactctaaaactcaggactggcttcatgggcccgtgaccagtacagtcacacagagacctgaatttagaagggctctgagcttggtttcatgct

SEQ ID NO: 71118 - DNA, 122 bp, Homo sapiens
cgaccccgcgccgccccgccccgcggcctgcctgccagaggagccgagggggccgcccctcgcccaacctgcccgacatggggaaccccgggcccaggtaggcacatgggggaatcaggtgg

SEQ ID NO: 71119 - DNA, 122 bp, Homo sapiens
tggggagggagagagaggagagagtgagtcccggccagagtctatccccttccgggctttcggcaccagaatgtaagggcagccgagggaaggaagaatagacccaaagtcaggcgagtaac

SEQ ID NO: 71120 - DNA, 122 bp, Homo sapiens
ttggcagaccctggtgtcgtgggcggactgggccctcagcgccacactcctggagctccacggcctggaggccatcttgcaggtggtcgccatcgctgccttcgccaggcacttctgaagac

SEQ ID NO: 71121 - DNA, 122 bp, Homo sapiens
aagccaaacatacagaagcacataatgttatatagcttgaacataaactttcttcttacccgcactctcttaaagtaagttatgatgtctatgatattgaaggccgctaggatgtactacaa

SEQ ID NO: 71122 - DNA, 122 bp, Homo sapiens
accttcagggacggcccaggagtggggtagcagccacagaagtggtaacatctgtagcagcgcagctccttggttctgttcatgacccataccttcttgccacacagtaggtaggagctacc

SEQ ID NO: 71123 - DNA, 122 bp, Homo sapiens
cgatggggcggagttcaagctccgattagtccgcgctccgtggcgggcttggcgattggacgccggcgctgtcagccgcgcgcggaccggggcggggcgggcggtgccccgggctgggcgag

SEQ ID NO: 71124 - DNA, 122 bp, Homo sapiens
cccctcagggcagtagtggcctgacaccccccttcccgtgcaggtgtctgataactctgccgcggtcgtgccggcccagtacatctgtgccccggacagcaagcacacgttcctcgcagcgc

SEQ ID NO: 71125 - DNA, 122 bp, Homo sapiens
tgcatgaatgctatctctagagacagacatggttacaaagatgtgctaccattaaagatacgtttccaggtttcctgtaggtctgagacaactgttgagagaaactgggcagtaattccatg

SEQ ID NO: 71126 - DNA, 122 bp, Homo sapiens
cgcgctggtgaatgttgatggtgtcttctcgggtcaccacctcgctgattgcagaatggccgtttttcttctcgccatccttttctgcgggagccattctgccgggtccaagttggaaagga

SEQ ID NO: 71127 - DNA, 122 bp, Homo sapiens
tttaaatatatgcaaggaatttgaatagacatttctccaaagtgagacaggtatactacacggtggtctcaaaagaataggaaattttaggcagcagtttcaggtgactagcaaaaggaatc

SEQ ID NO: 71128 - DNA, 122 bp, Homo sapiens
ttcctaatagcagtgcaatgacagcctaatacagtctgtgaaggtgttctcagaagacatcggcacttgaatcagtggactgagtgtcttagtccatttgtgctgctataagaaaatgcctg

SEQ ID NO: 71129 - DNA, 122 bp, Homo sapiens
tgaggtgaggacccaacaggtgtcccagctcagcggagatgccagctcgggcgctttggccgccgggtgcgggcagccagcccagctcaccgtggcagagctggctgcagggcagcacagag

SEQ ID NO: 71130 - DNA, 122 bp, Homo sapiens
tgcacccgtctgttagcctctcgctggtcggcgggagaggggaggaggccagcgcctgatcggccacaccgctggagtcctgggctggcagcggtaaccttatccttgtgcaaaaatctgct

SEQ ID NO: 71131 - DNA, 122 bp, Homo sapiens
ccctggggtcctccgccgcctcctgatcttccgccagtcccgccactcctccgccctgggcgtgccttccgcaggtgaacctgaaggtgcgtctgcaatgctgctgttgcattctcgttctt

SEQ ID NO: 71132 - DNA, 122 bp, Homo sapiens
cccagcggacagaggcggctggtgtgttccggggtctccctcccttcccgcagcactcggcgcccgcaagctgccacctcccggggcggccagggaaactcagccggctctgggaggcgggg

SEQ ID NO: 71133 - DNA, 122 bp, Homo sapiens
gctgctggctcccgaggggaggtgaggagatggcgctgccctgcccttcactctcagcttcgggcacagctactcctgaatgatgaacatgcctctggtcatctcatgaaacgcagacatgt

SEQ ID NO: 71134 - DNA, 122 bp, Homo sapiens
tgcagctccctggaggcgcttgccttgtgaggagcaggagcctgagagtgcggaaccgagcgtgtccttctcgccgtcccctggaaaagatgagctgtgtctggtcccagcacatgatgctc

SEQ ID NO: 71135 - DNA, 122 bp, Homo sapiens
ctccccgcgggggaggacctcgccgctctgaagagcaccgtgcacatgtgggtgcacaaacgtgggtgttggtgtggacggggcgcagatctccgtggatgaactgcgtctggactcttaga

SEQ ID NO: 71136 - DNA, 122 bp, Homo sapiens
agtcagcaccgaagcagtggttaagccggagggctcggaagaacggcaccttttctttctcgaaaaagttatatgggggctgaatgagcttctggaggcttgtttaccgttttttattgtca

SEQ ID NO: 71137 - DNA, 122 bp, Homo sapiens
cgtgatcgtcagccaaagcccccggggcggtgcgccgcaggcggtcttcccgggtgttcgcggaagctgcgcgctcgcgcccccacggttctccagcgacccctgaagatgcttccgtccgc

SEQ ID NO: 71138 - DNA, 122 bp, Homo sapiens
gccaggatccatgctcacatgttacttcctgtatggaggcatggccagtttccagccccgcgctcttcgttccttcccagcctgcgccggagccacaactttcaggagcatggactgaaggc

SEQ ID NO: 71139 - DNA, 122 bp, Homo sapiens
ttctgcttcagtaggactgcggtggggcccagtcatttgtattcctaaattctcaggtgacgctcatgctgctgaaccgggtaccacactaggagaatcactgctatgccattcattcccca

SEQ ID NO: 71140 - DNA, 122 bp, Homo sapiens
agctcagtgcacgaacactagggacaggcctgtgttaggcctgggctgggccgggagccacggagctgaagagctgcctgaagagccagcaccagcacagcacggcaatggcctcgccccag

SEQ ID NO: 71141 - DNA, 122 bp, Homo sapiens
tgctgtgacgtccgtgcacgtagggcacacgcctgggactcccgggccctggtgcctgtgcgcactcagtcctgtcctgggttgggaccgacacctgcagcagccccaccccgccccgggcc

SEQ ID NO: 71142 - DNA, 122 bp, Homo sapiens
gtcgaactcctgacctcgtgatctgcccgcctcggcctcccaatgtgttaggattacaggcgtgagcatggggcccagactaacgtttgtatttttactagaggcagggttttaccattttg

SEQ ID NO: 71143 - DNA, 122 bp, Homo sapiens
gaaatatcaaccgccagctttcatctgtgcctgggggcggtccttcctgtgctcgtggcacgtgtttatactatgattgacaacccttaaggagaaaggctaaggtcatgaaacaaagctct

SEQ ID NO: 71144 - DNA, 122 bp, Homo sapiens
gaaatagtcccctttccacactcccatctagttggggtactcactcaatagcctgcatggcgtcctttctacaccccacttacctgttctcgtatctgaagaaatttagtagttttgacctc

SEQ ID NO: 71145 - DNA, 122 bp, Homo sapiens
tctcactgcctcccagaggcgcaggcctgaactgatgcctggggagctgtgtgaggtgtgcggccccaggacgtcagggcctgtgagaccgggcaccgcggctccaccatttcgtgggttag

SEQ ID NO: 71146 - DNA, 122 bp, Homo sapiens
cgcgccgcgcccccgccctcggtcgcaggtggctcgttccgggaattcctaagcggaaaccggtcccaagccccgcgccttcgctcggcccctttaagagccagaatttccggagggctgac

SEQ ID NO: 71147 - DNA, 122 bp, Homo sapiens
gaaacaggctgggagagcttggaggagcgggcgccaggagtcagggcaggccgggggcggcggctccccagaccgcaggcccgcccgcctcacctgcagcaccaaggcctgcgcggccccgg

SEQ ID NO: 71148 - DNA, 122 bp, Homo sapiens
gtagtcacttggcaaccccaaagagaatggcaagaaaatctcagacatatccaccagctccgacttggaggtgctgtacccatttagaatccaaatgcctatagatttattattaagtaaaa

SEQ ID NO: 71149 - DNA, 122 bp, Homo sapiens
tgtggggtctgtcccgggtcaggacctgttgtctctgcgacgttgccagtccggagagctcggagggccaatgcagccccggattcaacaagatgcgaaaggacttctaaagccaggaaccg

SEQ ID NO: 71150 - DNA, 122 bp, Homo sapiens
agaagcgcgcggcagtccggggaaacccgtcggactcctcagcccgcacggcacctgccccggccaagcaggctccgcccatttcctgcctgcactcccggagggagttccgtccgtcccgc

SEQ ID NO: 71151 - DNA, 122 bp, Homo sapiens
tagcccgtcgagcacttgtcggcttctccctcttcctcgagtttcctccagtcttctccacggcagcaatttcgtcatgaaaggagcatataatgcagttatttagggaataactcccaaaa

SEQ ID NO: 71152 - DNA, 122 bp, Homo sapiens
acctccaaaaggtcctcctctggacacactagtgcagggttaggcacccaaagtctcaggcggcctgactcctatagcttttctgaacgtggcccacatttcagctctctggctggggtcat

SEQ ID NO: 71153 - DNA, 122 bp, Homo sapiens
gagaggctgggaagaactgggaggggtgtccccaatgcggggcgcccaagcgtggcagcacgggctgggagcggggagccagcggggtgcggcgccggagtgcggggagaaccaccaggcgc

SEQ ID NO: 71154 - DNA, 122 bp, Homo sapiens
ttttagagaagccaatcagcgtcgccgcggtcctggttctaaagtcctcgctcacccacccggactcattctccccagacgccaaggatggtggtcatggcgccccgaaccctcttcctgct

SEQ ID NO: 71155 - DNA, 122 bp, Homo sapiens
cagcccaggtcccagagtgaacatggcatggatgagagcacagacattgaaatgggcaagcggcatgagcaagaaatacacctttgctgttgtaagccatatagcctttaggactgtttgtt

SEQ ID NO: 71156 - DNA, 122 bp, Homo sapiens
aggcggggcgggatggaggcgcgcgcgcggcccctccgcacagacttcctgctgccggggcgggggatgctggccccggctccccgggcctctcgcgacccccatccccctgggcctgggac

SEQ ID NO: 71157 - DNA, 122 bp, Homo sapiens
tggggccggggatatctaacccacagagagaaaagggcccctgcaggctctgcgcaccggcgcccgtgcagccctccccacggatcactgttcctggactgaatgaattgctctatgaccta

SEQ ID NO: 71158 - DNA, 122 bp, Homo sapiens
tgtttttagaagcctttagttgaccttggcctgcgtgggtgttctcgtctttcctcctatcgtatgttacggttacctgcagaggctggcgtcgaaggagaggtgctatgcgaggatggccc

SEQ ID NO: 71159 - DNA, 122 bp, Homo sapiens
caccggcttgcctgtatcaaccccaaatcgcctgagagccatctagtactgtagcagaaccgtttcaacatgaagagttctgctcatcgcctgtagcgtggtcttcgaaacacctgaatcaa

SEQ ID NO: 71160 - DNA, 122 bp, Homo sapiens
gaattacctgcaaggcaggactcaagcagcagtgggtaactatttgatccctggttcagtcgttgcttttccctatgttacagcttccactggcacactcttgctccatagagtgccttcct

SEQ ID NO: 71161 - DNA, 122 bp, Homo sapiens
aaaacgaacaaacaaacaaacaaacaaacaaaaaagttccattctgaatgggtagagaagcggctatggggcaagaggccaattaaaggagatcacttctgtaagttcaagcttgggaccta

SEQ ID NO: 71162 - DNA, 122 bp, Homo sapiens
ctcaggcgcctgcgctttagctgctaactcgctctagtagctgtggtcggggctcgggaccggctgccatcttagtctagggactgaggagtcgccgccgccccgagtcccggtaaaccccc

SEQ ID NO: 71163 - DNA, 122 bp, Homo sapiens
gcttccacagctggacccaaagtgcagcccgggaagggggtcacccactgatgcagcaggcggcagagaaaggtgtcctgggctgtaatttggagaccagagttctgggatcccggatcact

SEQ ID NO: 71164 - DNA, 122 bp, Homo sapiens
tcacctccctctgacgcactttaaagagtctccccccttccacctcagggcgagtaatagcgaccaatcatcaagccatttaccaggcttcggaggaagctgtttatgtgatccccgcacta

SEQ ID NO: 71165 - DNA, 122 bp, Homo sapiens
ctgctgcagagtcagtcgtgtgccctcctgctgcagagtcagttgtgtgccctgtgaccacggacacgggcagacattcccgggcacttctcgcagtgggtgcttgatgaccacggtgtggc

SEQ ID NO: 71166 - DNA, 122 bp, Homo sapiens
gccattcttccaggccagcgtcccagggcgctgctgtgcgtggttcgcagccccggcaaacgatggcctgcactgcgtgctgtccgccctgttcctgctggactctctgcactgtgtcctga

SEQ ID NO: 71167 - DNA, 122 bp, Homo sapiens
ccgaggaagggcaaatcagccttggctgggctaaggcttctgctggctccagcccctccgcggacagaccctgcccacccaaggggccgcctggtctcacttgtccggctccgagctgcgga

SEQ ID NO: 71168 - DNA, 122 bp, Homo sapiens
aactctggccagaggcagagcgcgaggtgaggagtccagggccccagagcccaggattggcggcggctttgtcttcaatcgtccacctgtatctcctcgtctgacaggtggggccgggagtc

SEQ ID NO: 71169 - DNA, 122 bp, Homo sapiens
atatgaaaggccacacgtcttcggctttgcttgtcaaatggagaggctgccagaaccggtcggctccatggttctcatgccccaaagtcctgcaaattgacacgtaagtaggcaacacacaa

SEQ ID NO: 71170 - DNA, 122 bp, Homo sapiens
tgccactgcagcctacacccttcccggccctcggtgcttgtcttttctttggcgttcctgcgccccctgacccgcggtcctgcagtcctgctcccgtgacgtgccctccctccttccgttcc

SEQ ID NO: 71171 - DNA, 122 bp, Homo sapiens
tgcggagcttggcggttcgcagctctcggggtagcatcttctggaaacaagcccggaggccggccaggcaggggtaataccccaaacccaccactgaggaaaccgcgacttaaaacctaggt

SEQ ID NO: 71172 - DNA, 122 bp, Homo sapiens
tccacctggccaggcctcctggccgccacgcagaatacctcgaatctggcgggctgtgatcgagcccccctgacctgtcagcctcgagcccaacacccgactcggggccgaggctaggctgc

SEQ ID NO: 71173 - DNA, 122 bp, Homo sapiens
tctcttcttcaaaatgtcgacaaatcgacgaagggccatttaagggaaagtgggccggggcggtaatagcccaattgggagtttgaacggcagaagggctggctccctctccatgccagagg

SEQ ID NO: 71174 - DNA, 122 bp, Homo sapiens
gcagcggcccgtcctgagtcccggggcctgccgggagttgtagttctggtgggagtttcgcgctgcctgctggactcgaagcgggtctgggagaacccagcctaccttctttcctcctccac

SEQ ID NO: 71175 - DNA, 122 bp, Homo sapiens
gctgcggcagctccccgggctccatctcgcatcccctctgcgttccgcctcccttggaagcgcattccccacctccgctagtgctgccctatttccggtacccagcgcggaattccactgct

SEQ ID NO: 71176 - DNA, 122 bp, Homo sapiens
agctgtgtcattcattaaaacaagtcctgcctgccacccatttgtgctgattgggggtgtcgtatgttagatagaaaaatggcaagattctctcttgtggtctgttcccaaggccaccactt

SEQ ID NO: 71177 - DNA, 122 bp, Homo sapiens
ttatattagaggggctagtcggccaaacaaaatgtcatctgctggctcaggccaagactacgagttaaagcctcaaacttgtgcagaaaattgtaataccataccctaaggattctgggaaa

SEQ ID NO: 71178 - DNA, 122 bp, Homo sapiens
gagcggggatgaggcttcaggaaggaatgccccgctcaggagccccccccagagccccaccgggaactcatctctccgcctggtgacgtcacgttggcccgagcactgcagcccgagtccag

SEQ ID NO: 71179 - DNA, 122 bp, Homo sapiens
ttaatcactcgagtatttgctaagttccaaccacccgcaacagagttcctacaaaaccatcgcacaacgacaggacaggaaatgaagggcaggggataaagcaagaagaaacaagcagcgga

SEQ ID NO: 71180 - DNA, 122 bp, Homo sapiens
cgagcgtaaacagtgcacggatgcgtgtgctcaccgtgtgcgcaggcgagtgtaagtgcacgggtgtgtgtgctgtgcgcaggcgagtgtaaactgcacgggcgcgtgtgctcaccgtgtgc

SEQ ID NO: 71181 - DNA, 122 bp, Homo sapiens
ccgtgtactcaggctcagaggtgccccggggccacagacactccagcacctccagctgcccgaagtgcacttccatgctggttgtccgccggccccgactgcccgtccgcagctcccaggac

SEQ ID NO: 71182 - DNA, 122 bp, Homo sapiens
gtgttgggagtggggggtgggttgtagtgtcgccggggcccctgtcttggcttcttccagcgcctgggcaaacgcccagcctggagatgggaagcgctctcggccccgcccccttcccggtc

SEQ ID NO: 71183 - DNA, 122 bp, Homo sapiens
gggtgccagggagggaggataggcaactggtccattcgtttatcctccccaccttcccggcgcagccttctcagggaaactccgcctcaaggctggggactggaggaagggtggtggggcca

SEQ ID NO: 71184 - DNA, 122 bp, Homo sapiens
taggcgctgaggcgacgttgtccccggtgtcctggctcttggtggtgcatgcaaagtgcccggttgctctgttgctgcggcgcccttgtacaggtggcagctgtagctgagttctcagtaga

SEQ ID NO: 71185 - DNA, 122 bp, Homo sapiens
ccttcattttcctctgggccgagactgatcaggaggctagtgagccggtttctggtgctccgctgacctcgttatcaccttgtggttggctgagccctctcccagtgtgtcagtggcacccc

SEQ ID NO: 71186 - DNA, 122 bp, Homo sapiens
ttctataatcagaaaaaaaaactaaagttgaggaatcaaagagccttggtgcatgcacgccgccacacaccacatgcaacgcgagcaccgccacccacggccgccctggccgccgcccggca

SEQ ID NO: 71187 - DNA, 122 bp, Homo sapiens
ttacggagggggcggcgccgcgggcggagcgcgcccggcctctgggtcctcagagcttcccgggtccgcgaacccccgaccgcccccgaaagccccgaaccccccaagtccccttcgaggtc

SEQ ID NO: 71188 - DNA, 122 bp, Homo sapiens
acaactgtggtagtatttaatattactttaatatgttgtattctttttcgccacccttttcggggtttatattttgttgtccctgcactaacagatttacttgatgccgcaagaaagacttc

SEQ ID NO: 71189 - DNA, 122 bp, Homo sapiens
gatgaatgtgggagacttggataccccttgacaatactgaagcaaaattgttaggagacacggagagcggagtgaaattgaaggcggtttgctctgtgaacaaaggagactttcattccagc

SEQ ID NO: 71190 - DNA, 122 bp, Homo sapiens
tcttcctatcacccagcaaccaggccccctccccggacaccaaggaatggagcccttcgccgacccgcaccccagccacggcgctcgccctttgcctggcaacgcccctcaccccgcctgcc

SEQ ID NO: 71191 - DNA, 122 bp, Homo sapiens
aagcaggtccattccccaaattgaagtcctgtgactccagccgccaaggctgcaggcttccgtacatgaggacccaaaaacacaagctgacttatggggtccagccctccagcacttacaaa

SEQ ID NO: 71192 - DNA, 122 bp, Homo sapiens
taattgtgaacacaaaagtactattccaaggcagagaccaccgccattccttgaacctcacggtaactatgtgccaaggtctgtgcctcgtataaatattatcttcctactcctcgtaacac

SEQ ID NO: 71193 - DNA, 122 bp, Homo sapiens
gtgtccccaggaaaaagaagcttcttggtccatgctgacatacgctctccgcagtcgggacgcttccctcttagggggctttcctctgcctcacggtggccccagttcctcgttcctcgact

SEQ ID NO: 71194 - DNA, 122 bp, Homo sapiens
acgcgatgactggaacccgaagagccggggcccggtttacggccgccatgaagcaacgcgcgccggtaggtttgggaatcagggagccctctgaataggagactgagttgggagggaaaggg

SEQ ID NO: 71195 - DNA, 122 bp, Homo sapiens
ctctgcacctcgctcccgtcctagaattggctgggctccctccacaggccccgcctcccacgtggccactgcactttgctcccatcctaggattggctggtctccctcaggccccgcctccc

SEQ ID NO: 71196 - DNA, 122 bp, Homo sapiens
ttcggtcattatcagcacagagttgacaacttaagtcctaagaacaaaagtgttgtcccacggagggtgttcagagaagcaggaggatgggattcgtctcggggagaggccacgggtggccc

SEQ ID NO: 71197 - DNA, 122 bp, Homo sapiens
cctgagaaagttagacttagaagaaagtccgagttgctacctctggtttagaagacctcacgtgatctggtggctgcctgatcagattcgtttcgcactctttcttgctcaccatgatccag

SEQ ID NO: 71198 - DNA, 122 bp, Homo sapiens
tctaaaagctcttgggtcagtccttattttctttcttacaggcggatgttcccctctgttcgggtcaaggtgaaagggttggatccagggaagcagtaccatgtggccatcgatgtggtgcc

SEQ ID NO: 71199 - DNA, 122 bp, Homo sapiens
cggccgacggagactacaacccagaggcggaggacaaagcggaaggccgaagagcgaggacgaaaccggcggaaccgcactttggagcctaacgagccatcgctgcgtctgagactgggacc

SEQ ID NO: 71200 - DNA, 122 bp, Homo sapiens
tgctgggattacaggcttgaaccatcgctccaggcctcgataaatgtttaatgaataaaacgatgaaaggacccgtcgcctcctaaatgcagatctcgagggagcctccaggtggcgctcgc

SEQ ID NO: 71201 - DNA, 122 bp, Homo sapiens
tttatgtgttggattttgttggtgtctttcatttgctcaaaaattcagtcttcggccgggcgcggtggctcacgcctgtaatcccagcactttgggaggccgaggcgggcagatcacaaggt

SEQ ID NO: 71202 - DNA, 122 bp, Homo sapiens
gatcccaggcctgagaaggctctttctgcttagagagtccagggctgcctggcatcgagccggctctgccccgcaggtcccagtgaatccacattgcagcaggaagccacagggcaggaacc

SEQ ID NO: 71203 - DNA, 122 bp, Homo sapiens
gtgttggtgcagtgtcagcccccggctgtggtcacctccttggccctgcactctgagtggcggctcgtggccttcggcaccagccatggctttggcctctttgaccaccagcagcggcggca

SEQ ID NO: 71204 - DNA, 122 bp, Homo sapiens
ctcggactccgaccccgactccgcctcgccgcccagcactggacagaacccgtcagtgtccgttcagaccagccaggactggaagcccacccgcagcctcatcgagcacgtatttgtcaccg

SEQ ID NO: 71205 - DNA, 122 bp, Homo sapiens
tctccagctcctggggcaggtggagtacacgggccgggctttaccagcacgcaccctgcacgggtagcagagaaagctgccttcagtcagactcaccggttaactgggttgagaccgcgggg

SEQ ID NO: 71206 - DNA, 122 bp, Homo sapiens
cgacggcctcgcccccccaccccgccgccccgcccccgccccacgggccggtggggagcgcgtgtctgggtcacatgagccgcctgcccgccagcccgggcccagccccccgccgcccccgc

SEQ ID NO: 71207 - DNA, 122 bp, Homo sapiens
ccggaaggccaatggagaatcagcgcgggcggagctgctcgacctgctgggagttgtagtcgccttccgaggccttgacttcgtcctgggagtggctcgagccggttaatgggggtgggccg

SEQ ID NO: 71208 - DNA, 122 bp, Homo sapiens
ccacctcatggccacgcggtctcagcagctctggcgactgggaaacgtagggttacagggcggtaaagatcatcagaaaggagggctgaggagagaaactaaagactaaaggtgagaggtca

SEQ ID NO: 71209 - DNA, 122 bp, Homo sapiens
gttcagcaaggtatgtgatggcttttaaggagcacgggaagatcacatcctgctgtattccgggttagtttgagtgagtacatgtgtgacaaggacagcccagtgttcctgtatatgtgact

SEQ ID NO: 71210 - DNA, 122 bp, Homo sapiens
atttggtgggcagggggctagggaatgagtgccactaactggctggggatgaaatcatagcggggctgaaaagggtccctgtgcactgattctgcctctggatggaggccttgggaccagct

SEQ ID NO: 71211 - DNA, 122 bp, Homo sapiens
acatttgttcacggccagggaggaaggtttgatggaggcctgcaggaaacaacagccaggcgcaaggctttgggagttgaagcatagcttctgcgagatagaaacaaggttgacatgggcac

SEQ ID NO: 71212 - DNA, 122 bp, Homo sapiens
ggaaacctgattaacaaggttaaggtctcctggcataaagttcagttacaatgcagatatcggtgagacaaaaaaaaaaaatgacacgaagaaaggcttgtttacccaccctgaccctgggc

SEQ ID NO: 71213 - DNA, 122 bp, Homo sapiens
agaagctgaggctggagcggcgaggagaaaacgacatcgagtcaccccgcgcgtgagcgacgctctggagcaggagagaaggaaaaggaagagacacacgtatatagcatgtgttacctgat

SEQ ID NO: 71214 - DNA, 122 bp, Homo sapiens
agagaggagatgcccgggccaggctcccacagagaagtgctggcagagctcatgtgtgggcgacccctggccctgagctgtgggtgactacagcaactgggggatttgtcaggacctggccc

SEQ ID NO: 71215 - DNA, 122 bp, Homo sapiens
agcatgtcacctgttaaaaataaaacaaatcccgatctgcaaagaaattacagaagaaaccgagtgttctctagccaagtctgtaaattacaaactgaaggagttaaagcataaactggggt

SEQ ID NO: 71216 - DNA, 122 bp, Homo sapiens
ctacctggagaagaacgtcaaccagagcctcctggagctgcaccagctggccaaggagaacgacgaccccacctctgtgacttcctggagaaccacttcctgaaccagcaggccaagaccat

SEQ ID NO: 71217 - DNA, 122 bp, Homo sapiens
gttaccaaagtattaaatattaaccctttttatttcttacttatggttacacttaggtgtcgttctctgggccacattaatgaagttatttagattgtaggctatattaaggcatagattgc

SEQ ID NO: 71218 - DNA, 122 bp, Homo sapiens
cccgcttccctcacggcctggccctcccgcttccctgattcccggtagggtcgctctccccgcctcctggcccctcttggctcggatgacaaagattgggtaaaggctttcaacgagctagc

SEQ ID NO: 71219 - DNA, 122 bp, Homo sapiens
tcctgcgcactgaaagaccgttctccggcaggttttgggatccggcgacggctgaccgcgcgccgcccccacgcccggttccacgatgctgcaatacagaaagtttacgtcggccccgaccc

SEQ ID NO: 71220 - DNA, 122 bp, Homo sapiens
cccctaccccaccaacccctgtccctttggccattagtcccggattatctagcgatgccccgtgtaccgtctggctttgctgtttactccgcgcttggccagttgaggccttttgtatttat

SEQ ID NO: 71221 - DNA, 122 bp, Homo sapiens
tgcgaagccactcagcatgttcgattttagaaatggaacctagtattctactgttgaatacgaggcaggccaggtaagttaggtttcactgcatcctagctatgcggttgatattctcaatt

SEQ ID NO: 71222 - DNA, 122 bp, Homo sapiens
acaattgattgcaaggaacagcaactacctcaggctaacttacaactaaaattggattcacgttaaggatgctggaatatctccaggaactcagctgcaagatgttcatagaaatcctagag

SEQ ID NO: 71223 - DNA, 122 bp, Homo sapiens
ccgggatcgcggcgccggggccgcaaaccggggccgcaaaccagcgccgccacccgcgtccggacccagtcccctgtgagcgacacctggcaaagtttcacaaggtgggagacagcccaccg

SEQ ID NO: 71224 - DNA, 122 bp, Homo sapiens
gcttgcggttgggacagggctggctggctgttggacgctggacacctgcagcttcccctccgagaagaggcaaacagctcgtcttcagccgatgcccggtcccgcagcctgaatctgggggc

SEQ ID NO: 71225 - DNA, 122 bp, Homo sapiens
atcactcatcccaaagagctccatcaatgacctgagaaatccgtcacaatcaacaacggacgccacagaaccccatcaccgaagcctgaaaccgcaatcactaactccacaggcaacctcga

SEQ ID NO: 71226 - DNA, 122 bp, Homo sapiens
tcaagtccagctcccggaggttgtggttggcctggagcaccacagaaagaccctcacaggcggcagagcccagccggcagatgcccaacctgcaaagacaggatgctagggcggagtgggag

SEQ ID NO: 71227 - DNA, 122 bp, Homo sapiens
acctcccgcgtcagtcccagcgcccacgcccccaacaacgggcacttgtccgaccagtcacgggtacttgtgtctcccccacaacccccaaggcctaggctggacaaacaaatacggagtgg

SEQ ID NO: 71228 - DNA, 122 bp, Homo sapiens
ggtggggggaatcagcaaggacatggctcctgactcctgtgcggaacgtgagtgactgagcggcaaagcccgagtgagcgagcggtgggctgccgggccgggcggggggcgccggggcgggc

SEQ ID NO: 71229 - DNA, 122 bp, Homo sapiens
ccccagcctcgggccccgccctagccccgtcactcccccttactcccctcagcgtttaggcgggaaagctggagagctcccagaagctctcgggcatttcttctggtttttttcccctccac

SEQ ID NO: 71230 - DNA, 122 bp, Homo sapiens
ccaggggcgaggcgcccccgcccgacgtcccggtcccgagcgctccccggcgcggcgcctcgcagcccagcgccccaccagccccgccggcgccgcagaccccagcctcgggcgggtcgggc

SEQ ID NO: 71231 - DNA, 122 bp, Homo sapiens
caacttcaactggaccgagaactacaattcccagaatgcacctaaacaaggccccgggaacggagtccggcgttgctgcaggggattgtgggtggcgtggtttccctcagagatttttcacc

SEQ ID NO: 71232 - DNA, 122 bp, Homo sapiens
aggctgcgcggtcagaggcgcctggagcgagcgaatcctggcccaccgcctgcccaaccgcgtgaccttgattgagttaatgaacttcacgcctcagcgtccaggtctgtaaaatggggtgt

SEQ ID NO: 71233 - DNA, 122 bp, Homo sapiens
tggcttctgtctctggtgccaaacccccaggcaagggaagtcccatgaggaaatttatcccgcctcaaatctgaaatcctcctcacaatcgtcaggagttgctgaggattctgggcttagtc

SEQ ID NO: 71234 - DNA, 122 bp, Homo sapiens
attccacgtcactaaacgggtattttaaagttccagaggcaacaaaagtgacaattccatcgtaatgtgtctcatcatatggactcagaacatgaatcaactctcaatctgaagcccagtgt

SEQ ID NO: 71235 - DNA, 122 bp, Homo sapiens
atcctcccccggcctggccccgacattaacagggccaggaggaaccgctacggccaccaccgccacctgccgaggagccgcccaagcccattttgcataaatgttttatgaggaagattcaa

SEQ ID NO: 71236 - DNA, 122 bp, Homo sapiens
tgcctgcctgccacccgtccccccggaagtgaccttagagagagcagagttcagaggtcgcggatggactccagcgtttcaccagcagcaaccaccgcctgcgtgccttacgccccttcccg

SEQ ID NO: 71237 - DNA, 122 bp, Homo sapiens
gaagggaagcaatcaaattgcttacagttccccaccagctggcgcggggctgcagtacagcgggagcggatataatacagcatctgtacacctcaagctctacactccaggaagtgtcactg

SEQ ID NO: 71238 - DNA, 122 bp, Homo sapiens
caagcgcaccctgtcctccagcacccaggccaccctggagatagactccctgttcgagggcgtggacttctacacgtccatcactcgtgcccgctttgaggaactgtgctcagacctcttcc

SEQ ID NO: 71239 - DNA, 122 bp, Homo sapiens
cacagggctccacaggagactcaccccaacgcggccgaactcgcaggccaggtccaggggcgtcttccccgagttgtccaccatgcacgggttagactggtgctgtagcagcatctcagact

SEQ ID NO: 71240 - DNA, 122 bp, Homo sapiens
gggcggggtgggaagccgagagactttcccctttagaaccagcagtgggcggggccagggcgggacctgtgagtctctcagcatcgttcccagcgcagaggcatttttcgggttttggaggc

SEQ ID NO: 71241 - DNA, 122 bp, Homo sapiens
aaggaaacagaaagcctgaagtccaagtgagggaagttctcaggccaacagcgacatgctcgtagttcatatggaaacgctgcacgtgctgccggcactgtcttcttgggagcacctgttcc

SEQ ID NO: 71242 - DNA, 122 bp, Homo sapiens
ccccaacatcctagttacggggttctggcttctatctttaggctactggaggaccagaagcgaaatacgactccacgtgaaaccaatcccgggagcggtcagcacggaccgccaacctcacc

SEQ ID NO: 71243 - DNA, 122 bp, Homo sapiens
atcaagccagcagccagatagatgcatctgaagttttgaagaaaggtataggttggagggcgtcattctgcatagatggctttgaagccatcagactggatgaggtaccctagggagccagt

SEQ ID NO: 71244 - DNA, 122 bp, Homo sapiens
agggcccgtgcgagccaggggccagtgcgcccctgcgccccgagcgaggccagtcccggccgttcccttgcggccccagcgttaccctctgcccaacccggcccccggccctcccgcgcgag

SEQ ID NO: 71245 - DNA, 122 bp, Homo sapiens
gttaggcccactgtgcctctccttttttctctttattttcatgctttttatcagtgtcctcgctgtccttcctggttagacacttggctttcatcatgaactcttctttaagttttttgaac

SEQ ID NO: 71246 - DNA, 122 bp, Homo sapiens
accccagaccctgccaaccatgcaccttccttctgcctttagttctgcacctttgggagccggctggtgagcccaggatgctatgtgtttagccgccggctggaccggttctgctcagcact

SEQ ID NO: 71247 - DNA, 122 bp, Homo sapiens
aggaggagattggaaaaattctcttatggcccaactgtatagaaaatagaccacctcggccgtctcacttactgagtaacctttcctaccagagaatgtgctatatatgatttctttacttt

SEQ ID NO: 71248 - DNA, 122 bp, Homo sapiens
cacgcgcgttcattcacttctcttcataacagccccgggaggcaggtgtgaccagccccacggtgctgagggaagcagaggctcggaagcggagggacctccccgagaacacggtgaatacg

SEQ ID NO: 71249 - DNA, 122 bp, Homo sapiens
cccctgtaactgcgtcccccagcacgcactgctgacgcgcatccccagcccggggcggcgcgctccgcaggcatcccgcccccgactcccgctccgtcccaacatcgcgcaggcgcaagacc

SEQ ID NO: 71250 - DNA, 122 bp, Homo sapiens
tcttctcccatctaaatttaatctcctgaatggcaaaagcatttccttctgtcttagcatcgtccatattcaccacgagtccttgcataggagagattggtgtatacatgatgacaacctga

SEQ ID NO: 71251 - DNA, 122 bp, Homo sapiens
tgtccaccctcctaccattctctcttttgtcgattgctgtgatgtgtcactatcctggttcgcctctcctctgtcccttcctgctccccctacactgattctcaggcctcagctgtctgttc

SEQ ID NO: 71252 - DNA, 122 bp, Homo sapiens
tttgcagcatccaatagaaaggtgggaggcggagttaaagcgctaagagaagcgttactccgcgagactctcctgaaaagtagtccccgaggtcacaaggcagtggcaggtgtctgtagtcc

SEQ ID NO: 71253 - DNA, 122 bp, Homo sapiens
atccgcccacctcagcctcccaaagtgctggaattacaggcgtgagccaccgcgcccggccgaccactactcactcggtggtatatattcttcagatcagctgaaggcacacacacgcatcg

SEQ ID NO: 71254 - DNA, 122 bp, Homo sapiens
cctaaattttcaaatctttctgatatgtggagccattattaaccagtaggaagcttcagacggttatcacttggtaggcagggaagacagtttgcagatatcaaacagatcttgccatgcgg

SEQ ID NO: 71255 - DNA, 122 bp, Homo sapiens
ggaaacacaggtgtaggtaatgtcaaaggacatccaacttgtgttctaggaccacagcctcgcccttctgtcgtggcccccactgggtgaggagagcgccccggccacaccaggggtcagtt

SEQ ID NO: 71256 - DNA, 122 bp, Homo sapiens
cataaagtgtttttttgcctcaccttgtcattcctggaaatgactccctggaaaacccttcgcagagatgggtgtctgggtttcagtttttagaaatctttccacattaatattttccttag

SEQ ID NO: 71257 - DNA, 122 bp, Homo sapiens
ctcactagggagtgtcagacagtgggcgcaggtcagtgggtgcgtgcaccgtgcgcgagccgaagcagggcgaggcattgcctcacttgggaagcgcaaggggccagggagttccctttccg

SEQ ID NO: 71258 - DNA, 122 bp, Homo sapiens
acactccttaaagctaaaaatgaagatctcgatcgtgtattgaaagagcaaatccatcaccgttgcagtgaacccatgccacttaatgatatgctggtcatgaaacaagcaaagatctctca

SEQ ID NO: 71259 - DNA, 122 bp, Homo sapiens
tagcacagcagtccgagatcaaactgcaaggtggcagtgaggctgcggggggtgggtgcccgccattgccgagttcgttgtttgattaggtaaacaaagcggccgggaagctcaaactgggt

SEQ ID NO: 71260 - DNA, 122 bp, Homo sapiens
tgcagtttggctgaggacagtggtaatcctcaaaggctagaaatggctttcaaatctgagcgctctgcagaacaagtccaggaaaaatgctgctttggtatttctgagaatgaaactagaag

SEQ ID NO: 71261 - DNA, 122 bp, Homo sapiens
aatgagagacaaaagcctacttcaagatttgagttcattgttccactaggaatccaggtccgatagaaatatgatgtgagtcacgtatgtaatttagaatttttctagtagccacatgtaag

SEQ ID NO: 71262 - DNA, 122 bp, Homo sapiens
caaccaacaatgatctttatttttaaagataattttcaaccacttcatacccactagtgtcggccattattttaaaaagaattgaaaacagggtctctttttgaaaattttgaaacatacag

SEQ ID NO: 71263 - DNA, 122 bp, Homo sapiens
taacccctccaggaactgagtattctcattcatacaaaatctggcctgtttgtcaaccctcgtcttacaatgacagctagcaatgggagagaaattacaaatggctctcactccagtgccag

SEQ ID NO: 71264 - DNA, 122 bp, Homo sapiens
ttcacctccaggttaaaagcccagagaagaccgccaggggcgcgtggaaatggtgtccctcgtctccaaggcccagacggagcttagcttcctcttgaaggagccatatctgtatttctggt

SEQ ID NO: 71265 - DNA, 122 bp, Homo sapiens
gtgggcgcgagagcagacgccagctacagttttttttgggttatgtcgtcatgaagccggcgctttcagttgtgcaaccttgaacaaatgggttcagtatctcggaatttcagttttgtctt

SEQ ID NO: 71266 - DNA, 122 bp, Homo sapiens
ataatttcagccctctgttaagttgcgaaattcaaggaagaaaaaaattcaagggaagatcgataaaataaacagaaggaaggagtcctgtagaagtcactgatttttccacaattaacaca

SEQ ID NO: 71267 - DNA, 122 bp, Homo sapiens
ttcactccctcaggctctcttataagggcattaatcccattcatgaggacagagctctcacggcctactcccctccttgaggtcctcttcctaaaactgtcacattttatatgttttcatat

SEQ ID NO: 71268 - DNA, 122 bp, Homo sapiens
gtggacgcccgcgcagcgcatgctaatgagcccgcgtcgtcgctcgcggattggctggcgcggattccagctgctttccaagttggaggcgcctagtgagggtcagggaggcccggcccgcg

SEQ ID NO: 71269 - DNA, 122 bp, Homo sapiens
tctctccatgcgctgccgcttcacaaaggcgcatctctaggtcggtggtcaggttctgcccggacgctgcaactggctccgggacttgtgtccttggtgagcctagcggagtgctgggtgcg

SEQ ID NO: 71270 - DNA, 122 bp, Homo sapiens
catcagagaagatggggagaataaaataatcaggaggctgggtttgtgcttggctccaagcgtgagcaactgggatattctggtcataaatattccttgctacccttcgagcagtgctctgc

SEQ ID NO: 71271 - DNA, 122 bp, Homo sapiens
gggacagggaaatggaaaaggcttatcccgagcctgtggggtcaggataagtggttggtccggcttctaagcagatttctctttagccttaggaagaatttttaactagaattggtgaggcc

SEQ ID NO: 71272 - DNA, 122 bp, Homo sapiens
cccagctacttgggagcctgaggcaggattgtttgaacccaggagtttgaggctgtggtacgctatgcctgtgcccgtgaatagccactgcattccaatgtaggcaatataacgagaccccg

SEQ ID NO: 71273 - DNA, 122 bp, Homo sapiens
tttctctggagagagatgtgtggcatttatagtctgatgccccctgaccacgttgccactcggacattctgtgacttggatgaactgactcttgcctgcaaaggtgccttcagggaggctaa

SEQ ID NO: 71274 - DNA, 122 bp, Homo sapiens
acatggcctattgcccacacaagatggggagtcaaatcagaggccttcaaatgaatgaagcgaagataccccagaatacatcattagtaaaagataaaatagaaaaacacttcctcataaag

SEQ ID NO: 71275 - DNA, 122 bp, Homo sapiens
tcgactctatcatccaacgctccgaggacaacccctgtccccacccccgggacccggacccggccagcaggacccactgagaagggctgcccgggtcacctcagctgcccacacccacactc

SEQ ID NO: 71276 - DNA, 122 bp, Homo sapiens
atgaagggtacagaacaaattatcataaaaataacactcattttagggagaaaatgtgagcgagaaatagtaggtaatgagagtacctactctttgctaggctgtgttatatgtgatatatt

SEQ ID NO: 71277 - DNA, 122 bp, Homo sapiens
gggaggagcagccccagtcagggcagggccatccagaggcccagcaaaggacacctgtcccgacaagagaagctgccaacccctctgtgggtccccagcttttagtcactgtttcctctcct

SEQ ID NO: 71278 - DNA, 122 bp, Homo sapiens
gaagcgcagctttgtggagcgccccagaggtgcgtgccagagccggggtttctgcagggacgaggggagcagacccagcacaggcgccatcccctgcagaagccataccatccgcctgcacg

SEQ ID NO: 71279 - DNA, 122 bp, Homo sapiens
acgggagcatcgcctgggaggccggccccgcctgctcctgagctctgaggctgtctcgttcggaggcgccagcttgggctgtgccacttctacctggtacccgtcagggagatggatggagg

SEQ ID NO: 71280 - DNA, 122 bp, Homo sapiens
ttccatctgcgaagactccaagatcagagagctactcacctgtctccatagcgacagcagcggccataacaaacgaagacaccaaaacgccaccagcctgacagagcaaaagcccagagacg

SEQ ID NO: 71281 - DNA, 122 bp, Homo sapiens
gtttggtatttctttagaaggaccacatgagattgggccaccagaatggtgctgccatgccgatttagggtgactcaaattgtttatacaagcaagaactctaccaaaaatatttgcccagg

SEQ ID NO: 71282 - DNA, 122 bp, Homo sapiens
aatgaaataaaagtgtaacttttctttcaatttatatgtataatttttttcaagtggctacgaagttgttggacataaatccttattaagttatttggacctgagtacttaataaaaggaat

SEQ ID NO: 71283 - DNA, 122 bp, Homo sapiens
agctccctcccacgtctacatccaagatgtctggcttccactttccgtgtcactaaagggcggggaagctgcaggggaggtgcctcatctgcagcgtcgtctccagtgactggcacctcaga

SEQ ID NO: 71284 - DNA, 122 bp, Homo sapiens
tgagcacgggtttgggaaggccggtgcaagtgtgaaagccctcagcagagagcgagcctgcgtgggcttgtggggctcctgagcaccccggtgagtggagtgtgtgaactcggtgtgagcac

SEQ ID NO: 71285 - DNA, 122 bp, Homo sapiens
cgtgcgcgtaaatcctgcagacaggagcccaataagacattaggtcaactcagggcatttcgaaaacgctattttctgaacagacggctaagcaagaggcttgcagggcccatctcctcaga

SEQ ID NO: 71286 - DNA, 122 bp, Homo sapiens
catgaggcattcgaagtgacaaccttatggtatttcctctgcttggggttttgccttggccgtttggtgttgggagcaggtgtgagcaaagggagcagggacagatgagccacctctgctcg

SEQ ID NO: 71287 - DNA, 122 bp, Homo sapiens
ccagcacacctatgctgattggtgatggctcaagtgtgttaatgtgtgtgtgccggcgcccggcctcgcctccaccgctcctcactggcccattagcgaagcctgacctctgtcatcatcct

SEQ ID NO: 71288 - DNA, 122 bp, Homo sapiens
gagcccgaggcgaaaaagtaactgtcaaatgcgcggctcctttaaccggagcgctcagtccggctccgagagtcatggcgaccgcagcgtctaaccactacagcctgctcacctccagcgcc

SEQ ID NO: 71289 - DNA, 122 bp, Homo sapiens
gggagagcccccatggcccttgaagattaaggtatttcccatctgggtctttatggaagacgttttctggcccaactctaccctgtagtaccccccaacatcccctgggtcccctcccccat

SEQ ID NO: 71290 - DNA, 122 bp, Homo sapiens
gcgcgatcactctcacccagaacccccgccgccgttcccagggccttggcacctcgccaccgagtgtcattgggggctgaaatttgacacaagccttcctggcctccccgacgcagacaccg

SEQ ID NO: 71291 - DNA, 122 bp, Homo sapiens
accaaagaagcagcctttgctcacagtcgagacgattcatgagggaacttccaccagccccgtcagtcccatcagccgagagtttcctggcactaagaaaagaaagcgacgacgcaatttag

SEQ ID NO: 71292 - DNA, 122 bp, Homo sapiens
gatggaattccagttcaaatcaccgaagtgccgcttcagttgtagcctgtgcagtcttctcgtagggaagcttacaactgccactttgctttttgaaatgccaaaaatggccatgaaaactt

SEQ ID NO: 71293 - DNA, 122 bp, Homo sapiens
cgcccctcccccctcctcagaaatgtgaggcagctttcgccacgaaggatcggctgcgggcgcacacagtacgacacgaggagaaagtgccatgtcacgtgtgtggcaagatgctgagctcg

SEQ ID NO: 71294 - DNA, 122 bp, Homo sapiens
cacagtccaatgccttttattcacagagctgtgccactgtcaccactattagttccagaacgttttcatcacccattagtcactccccagccccctcccccagcccctgtcaaccactcatt

SEQ ID NO: 71295 - DNA, 122 bp, Homo sapiens
gcggcccccgcagcgcacggacccccccaccctgcccgaccccagacccgcagccgagcccgtctggtatgtggtgggtggagagggtaccaactaagcatcccaaagtccttcagggagca

SEQ ID NO: 71296 - DNA, 122 bp, Homo sapiens
aggctgaggtgggagtttcgcttaaggccagcagttagaaggctgtagtgaggccaggtgcggtggctcatgcctgtaatcccagcactttgggaggccaaggtgggcagatcacgaggtca

SEQ ID NO: 71297 - DNA, 122 bp, Homo sapiens
atgctacttgcttttgccggactggaggttctttgaaatagcagaggtctcagaccaagccgtcagctgaatctttgctggcgctccttaatccctgtaaatatcattgcgtttgcttcacc

SEQ ID NO: 71298 - DNA, 122 bp, Homo sapiens
tccctgtgtgctgtctctccctccatgctcacccgtggctgtggcttcctcaaaacacagcgacctcacttgacattcaggcgtctcttgctcccaggatttactgtgacttctgcattttt

SEQ ID NO: 71299 - DNA, 122 bp, Homo sapiens
ccccgagctgaaggcctccatcaagaagggggaagatttcgtgaagaccctgaagtgagccgctgtgacgggtggccagtttccttaatttatgaaggcatcatgtcactgcaaagccgttg

SEQ ID NO: 71300 - DNA, 122 bp, Homo sapiens
ccggtctatcgggtcagttgcagtttgggaaactgagcaatgtctgcaatgtaaagaatccgatccacccaacccttatcaacccgctcagacagctgcagctgtgggtgaggcccttggga

SEQ ID NO: 71301 - DNA, 122 bp, Homo sapiens
acaggcagcaggtgccttccggggagtcggcgatcttggaccgagtagctgacagcatgacgttcggtgccctccttccctgtgaggaatgctcaggtcagctggtcttcaagagcgacact

SEQ ID NO: 71302 - DNA, 122 bp, Homo sapiens
cactgtaaaagcccagcacccaggccagtgtctggcacacagtgggctctattctgttgacgaatgactaatggctgcctggatgaactgcacatgttaagggcacaatgtctggcttgaca

SEQ ID NO: 71303 - DNA, 122 bp, Homo sapiens
tatgaaaatagatagtattcaggcagcagcaacgcggaggaaacgggaatgaaccgagagcgtagtgaccatcatgagcctccttaacaagtccaagagtgagatgaccccagaggagctgc

SEQ ID NO: 71304 - DNA, 122 bp, Homo sapiens
aggccccgcagacaccagcccaggacccggaggccacccacaccaccgccggccgatgggcgtcttaccagacatggttagacctggccctctgtctaatactgtctggtaaaaccgtccat

SEQ ID NO: 71305 - DNA, 122 bp, Homo sapiens
ttgtgatggttactggctcttctctaagaataatggagaaaaggtgttagtttgtactgtcgcacagggcagtcgtaggagactctgaaaaagcaaataaatcaatgttaaatcagaaatgt

SEQ ID NO: 71306 - DNA, 122 bp, Homo sapiens
atcttgtcccctcagtatctttttttttcccccgaagccttcctcatccacagctgaagccgtttgtggaaacctatcaggtttgtccaagccaggttatgcagagcttgagaaatgaggaa

SEQ ID NO: 71307 - DNA, 122 bp, Homo sapiens
tcagcaccgtccctcccgcagctgccgaagcgagtgggtgatctggctgggatgccttggcgtacgtgcgaggtgtccctgtcgccacagccaatatataagcgaaaagcgacaaacgttac

SEQ ID NO: 71308 - DNA, 122 bp, Homo sapiens
agggagaggcgcgggtgggaactggggctgcgcagagcactcgcgggccagcgtgagttccgggtgggcgtgggctcggcgggacctgcacttggagtgcccagggcagtgaggggcttagc

SEQ ID NO: 71309 - DNA, 122 bp, Homo sapiens
tgaggtttgggaagggagcatggagatggcggaggggcgtggcttccactcaggcgccaccgggttctgccctccgtcccctctgtcactgcctgtcctcagagctccagctctccctcgcg

SEQ ID NO: 71310 - DNA, 122 bp, Homo sapiens
gctgtgtgccacacactgtcttgtgtgctggaagtgcccagaagagtaagaaagttcccacgctcagggcatccacagatgtgtaaaagagtcagtgcagccagagatccaaggtgccacac

SEQ ID NO: 71311 - DNA, 122 bp, Homo sapiens
gccgagccgcactcctggtacacctggttggccgggcactgacccacggctgtgggcacacgcggctccggtgagagggtcccaccccccccacccctccctgccccaccccagcttgatgg

SEQ ID NO: 71312 - DNA, 122 bp, Homo sapiens
acttccagcctccagattgtcagaaacaaatccctggtgtctgcggtgttggggctgacacgcgctctgcctggctgccaggtcctctgcaggcggggacggtgccggccattgctagatcc

SEQ ID NO: 71313 - DNA, 122 bp, Homo sapiens
cggtagaagaggcgtgcggtccgtgctctcctcgccatcgttccgggccaggtctcgaaccggagacctcatgacgcctacgtgagcaggtgtactcgccacctggcagagaagggagcgcc

SEQ ID NO: 71314 - DNA, 122 bp, Homo sapiens
gactctctcaattaatggctttgtttaatcataccccctgtccagaagagtattgtcttacggataatttcgtttgcctaacgagattttgctaattaaatctcctttcagttggtgtgact

SEQ ID NO: 71315 - DNA, 122 bp, Homo sapiens
gagggccgacctgtgacagacctggttgggagtgcacgtcgactaggatcttcctcgcctcgggcttccttggagaggccgccggctggtctgagatttgggtccagttacagtaaatccag

SEQ ID NO: 71316 - DNA, 122 bp, Homo sapiens
cttagggacagagtggctgtccctcttccttaaagggacagactccggttcagccccgtgcgccaggtcttcggaggaatctttatgctaatgagtgtattagcagtccagatgacggatgt

SEQ ID NO: 71317 - DNA, 122 bp, Homo sapiens
ttcctgcatttccagtgcctgggtgggccacgtaggggtgtccgtgtctctgaacgcatccgtgcccaccctcaccccttgggttttgggaaggactaatgaaatcatgaaaactgacttcc

SEQ ID NO: 71318 - DNA, 122 bp, Homo sapiens
aacctctgcaggccccgtgactccctggcagcgtgcctgggctctgtgtggggttagtcacgggtgtcgaattcacacaggctgccggcgtggtgggcagaaccagggttggaacccccctc

SEQ ID NO: 71319 - DNA, 122 bp, Homo sapiens
tctcaacttgaattgtagctcccacaattcccctcatgctgtggggagtttttctcttttcgccaatcatctttctcttgctattctcatgactgtgaataagtctcatgagatttgatggg

SEQ ID NO: 71320 - DNA, 122 bp, Homo sapiens
cccatcttgcaagttagaaaggtaagcttagagggccaagccacggaaggaagccaggcacgagggggttctgtatcagctccaagacctgtgggggctgagccagtctgttcagctgctgt

SEQ ID NO: 71321 - DNA, 122 bp, Homo sapiens
tagaatgtaatatagtacagtcagctcaggacatcccatttctaagttataagagaattacgcattctgtgttcattctgaacagtcatattgttaacttgaatgagaacattttccttgga

SEQ ID NO: 71322 - DNA, 122 bp, Homo sapiens
gcttaggagcctgattatttttcagctggatgtacaaatctcggcctctccccggcctctcgtctttctgatcttctaccctccaccgcatgggagggcacaggttcccttgtgtcccagcc

SEQ ID NO: 71323 - DNA, 122 bp, Homo sapiens
ctcttgctacgtgcgaggcactgggcaggacactctccatgtgtaattctcaacacaccccgggaggtagatttatcattatttccatttgagagaggagggaccaacttaggtgtgggtga

SEQ ID NO: 71324 - DNA, 122 bp, Homo sapiens
agttcctccccgtggatgcccggcgccagcctggccccccacctggccctgggagtcacacgggctggcaggccgccctggtgtccaccatcatcatggtgcccgtgggcctcatcttcgtg

SEQ ID NO: 71325 - DNA, 122 bp, Homo sapiens
aagagccccgaaccctcagagcccacggagacttcatgcctgaactgagtcttggtaacacggaggaggcagcaagggggatgatatgagcagagcaccatgatgagaaaggactcgagagc

SEQ ID NO: 71326 - DNA, 122 bp, Homo sapiens
actggtttgtttctggatggccgaacgccaaaagcgacagcagcaaatcgcaccagctgacgcggcggcggccaatgggagcgaacgccggagcccgctccccggggaccgcggcgaccgag

SEQ ID NO: 71327 - DNA, 122 bp, Homo sapiens
ggagtctcggagaaccaatccaatctgagggggacgcctgtgggagtcctaagtatccagcgcagctgggaggcccacgttgggaagtcggagaccgaccccgcctcccgactgcgccgact

SEQ ID NO: 71328 - DNA, 122 bp, Homo sapiens
ctgaaatgctagcaaaatgaaggtatgttttctggaaaccagctatcaatctagcacaagcgactattaggaaaatcaaggaggtgctgcggggatgtggaataggacacctgggttttgat

SEQ ID NO: 71329 - DNA, 122 bp, Homo sapiens
gacatacctgtgagcatgtgcccatgtgcacgtgtgaggccatggctacacctgagtgggcgcatgctgtgcgtgttagtgcattcacattcctgttcattgtcatgcagatatttgtcagg

SEQ ID NO: 71330 - DNA, 122 bp, Homo sapiens
ctacagccgccctaggactcccgctctctgaggtcctacagcacttcgcatttccctcaacgccgcactgagaactctgcattgtgtactcgtctgtcaccaatctgcgagttacaaagcag

SEQ ID NO: 71331 - DNA, 122 bp, Homo sapiens
aaccctgccattttctgtctgagcctttgttctgcctttaacatcacctccccatatggacgcaccgtcttgtctcttccatgttttcgtagtcttagttttctaccactgccagaagtacc

SEQ ID NO: 71332 - DNA, 122 bp, Homo sapiens
tacgcagtgacgtctgcccacagtggggcctgcacgcagggcgtttgctcacggcaggtgcgtgcatggtggaggcggtgccgcggggctttggtccagcctggtcaaggtgtggaaaagcc

SEQ ID NO: 71333 - DNA, 122 bp, Homo sapiens
caacacagcgaaaccctgtctccaccaaaaaaatacgaaaaccagtcaggtgtggcggcgcgcgcctgcaatcccaggcactcggcaggctgaggcaggagaatcaggcagggaggttgcag

SEQ ID NO: 71334 - DNA, 122 bp, Homo sapiens
ctattgcaatttccctgtcttgataaatcggttctgtctaggcaaggtgaacctattgggcggttacatacagatgaacctaaaagacaattcggaagcctgtttcaaataactgtctgatt

SEQ ID NO: 71335 - DNA, 122 bp, Homo sapiens
ctaacaaagtgactagaccatgggacatgacaattatttgttatatgattaatttctaggcgtttagtggtggtgcttggaacaggaaggatgggcacttctgattcagagattgctcactt

SEQ ID NO: 71336 - DNA, 122 bp, Homo sapiens
atgcgcactccgggacgcgcgcgaacacgcagcagccagaatccacaggggcgtggtttgcgcgcgcaggaacttggatctcaaccccagggctaggtgcctcctcccgctgctttccgcca

SEQ ID NO: 71337 - DNA, 122 bp, Homo sapiens
ggtgccgcggatccctggacggctgagcgggggcggagcgccatctactggttatcagtgcgacgggcgcccggcaggtttccggagcagagcctgcgcgctaactgtgcatcatttagtca

SEQ ID NO: 71338 - DNA, 122 bp, Homo sapiens
ttctctgcatgtccttgggagcctagcagggtgacaggctttacagacattcttaagcaacggcattacatatttattaagtacttcccttacttcaggctctgggctagctgctggtaaag

SEQ ID NO: 71339 - DNA, 122 bp, Homo sapiens
ggggacagaacaggaaacgtccccggcgagcctggcgggggtggcggcaggggtgtctgtcgcctgcgctgggcaggacgcgcgtcctaccggcctcccactccgcgggcctcaccagccac

SEQ ID NO: 71340 - DNA, 122 bp, Homo sapiens
ggaatatggagcccgcaatgcctgctggcccaaaactagcagagccgttcgagccaaggacgcagggttgaattctgtcactttccctgccatcgttttaggagcggctccgggcacttgcc

SEQ ID NO: 71341 - DNA, 122 bp, Homo sapiens
agggtggtacaagagggcacttttcttacatcccttagagacaacaaacagtcctaaagtcgtcttgccagcacacaaaaaggagtgatatcaccagacaaaaatgagatgtcatgtgtctc

SEQ ID NO: 71342 - DNA, 122 bp, Homo sapiens
ggggagtgcagaaacaggctctgggccttagcactaggcggtctgttctggtctgtgtcccggaaacaagatggttatgagcagagagattatctcacagctgctgtctgacatccatccgt

SEQ ID NO: 71343 - DNA, 122 bp, Homo sapiens
ggcctcccggaggggcgtggaaggggcggggctgctcggcgcggggcggggccgggaggtcgccgcctcagtcttccgccctgggccacgccccggtcccgggtcacctctcggagccgcct

SEQ ID NO: 71344 - DNA, 122 bp, Homo sapiens
attatgattaggcattattagaattagggtaaaatttaagatatctttccggagcaaatacgttgttttagccagagggaagatattacaagacccaacgggactggaggaagtgatgagca

SEQ ID NO: 71345 - DNA, 122 bp, Homo sapiens
tcggtcctccctcctaccgcccgcgcgtcaatccatcagttcgtcaatccgtccttctcacgtccgcccctcccggcccagcgactcctcagctcagcctcttgcagactgcggttgtcaag

SEQ ID NO: 71346 - DNA, 122 bp, Homo sapiens
gaaggaaaaagtgagagcacaagcgagccagccaggagtcgaacctagaatcttctgatccgtagtcagacgcgttatccattgcgccactggcccctgcctgtaacgctgtcttaactgtt

SEQ ID NO: 71347 - DNA, 122 bp, Homo sapiens
tcatataagcagaatcatatgttgtttgtgcttttgtgaccctgatttaacttagcataacgtcctcaagattcatccatgttagcatgtattggaatttcctccttttttaaggccgaatg

SEQ ID NO: 71348 - DNA, 122 bp, Homo sapiens
cctgacggccccagcttgatgtttaccttgcgcgcttagttaggattgctctttctagtacggcctttattatggcagaaattgagccactacaggtctgcacagcaaagtcgagggaaata

SEQ ID NO: 71349 - DNA, 122 bp, Homo sapiens
tccttaccttccccggttcttggaaaaatttccttccattttctgttcagtatcagccttcgcatccttctactactcaccccgccttcaccctccaccccacctccctccctcccctccct

SEQ ID NO: 71350 - DNA, 122 bp, Homo sapiens
agaattgaatcatgggggcagtttcccccatactgttcttgtggtaatgaataagtctcacgaggtctggtggcttcataaggaaaaaccgcttttgcttggttctcattctttcttgccac

SEQ ID NO: 71351 - DNA, 122 bp, Homo sapiens
gctgacttccccctcggcccaggtccctgctacatccccataaagacgcagcctccatgtcgcccacatgccctacactgtgcttctgccttcgggctaccaaccgcctcctggcacctgca

SEQ ID NO: 71352 - DNA, 122 bp, Homo sapiens
aaggaatcaggtggaggggtagcaccaatgcagggcaaggaatcaggtggaggggtagagcgcagatgcagtgatgcagagaagggtagaaccccatcctccagggaaggaaaggttaggag

SEQ ID NO: 71353 - DNA, 122 bp, Homo sapiens
ggctggccgggaccccccgggatgtcacccgtgagaaccgtaccccagcatgccccacagcgccccacctggctcatcccaggggctgccggccccaaatccaaattcccggagaccagccc

SEQ ID NO: 71354 - DNA, 122 bp, Homo sapiens
aaatgtcaagactgtgagcaagtgtttccccttgtgtgttttgctacgtacggtgacagccgtgatgccccaaatcatagcttccagttgagcacctgtcacagcagcgcccgaccacaaga

SEQ ID NO: 71355 - DNA, 122 bp, Homo sapiens
gcgtgttagtgctgcgtggcgcggcctggtcgcatggttaagtgtgtgagtgctgtgtggcgcggcctggtcgcatggttaagcgtgtgagtgctgcgtggcgcggcctggtcgcatggtta

SEQ ID NO: 71356 - DNA, 122 bp, Homo sapiens
ggtggctgcctccaacctgcaggcgtggggagacgggtgcatcagggggagccgggtccccgcccactgcccagctccaccctcgcccagcgctcaccaggcctgcgtgccgcccgcccagt

SEQ ID NO: 71357 - DNA, 122 bp, Homo sapiens
aatgggactttaatgcttaacctgctgtagaaaaatccgccttagaaagtggcccttattcgtatattgtattcgatgtttgagccccctgatatcttatcattttaacaaagcttaccttg

SEQ ID NO: 71358 - DNA, 122 bp, Homo sapiens
cgttgggcacccgggcaggagtctgcgaacgctgagtttctctggaaaggcgcggacccccggaggagccgtcccagccgcctggggagacgccccctcctctcccggtcttctttcccggg

SEQ ID NO: 71359 - DNA, 122 bp, Homo sapiens
tgtgacgtcacaaccggtgccttgtttccggtgcagaagcctggtctccccgttcggagccggcagtctgcgcttgagacgttaagacttgagacaggccagaggagctctcagggccggag

SEQ ID NO: 71360 - DNA, 122 bp, Homo sapiens
gccgcgagccacagatccaagaggaaaaagccgttcccggcccgggccttgcccaaggcacgagagtaaatgcaccttccgcgtgcctcggcgcacctgggctcacctgtcccctcccgcag

SEQ ID NO: 71361 - DNA, 122 bp, Homo sapiens
gggcctaacgcgtcacggggcgggattgaagcgtcgtccggcccctcccgtgccgggaggcggggtttccagagcaaaggcgcccccagaggcctggggcttggtcctttctaacttgttga

SEQ ID NO: 71362 - DNA, 122 bp, Homo sapiens
gactccactgcattaggcgggctgggcacttgcttgccgttgatattcttaaatgaatcacgttgttaaatgcggagggagggctgtgcgcgcagacctatattcttacttctgggagaccc

SEQ ID NO: 71363 - DNA, 122 bp, Homo sapiens
aaaaaggacaggaagataccacactgttatgacttgcagactctatgattatttgcacagcgaattcaagagaacctacaaacttattagaactgaaagagttcacttttgctgaatataag

SEQ ID NO: 71364 - DNA, 122 bp, Homo sapiens
atgctggctttctggaaatccgtaattaagttcagtgtttgtggaatggagtgtaattaacgaccattaattaacagggtttcgttcgtgagagcctgccaggctaagcagcagaaacacga

SEQ ID NO: 71365 - DNA, 122 bp, Homo sapiens
ccagacagcagcaaccttactcctccctacccccatgtcatctccctctggccaaagaaccgggagaatgatctgccactcaaagacaaggaaaaagagacattacctcattaccagacatc

SEQ ID NO: 71366 - DNA, 122 bp, Homo sapiens
gaggtaggctgtgggcttggactcccagggctgggacagagccggatggtgggacagagtcgggtggtgggacagtcccgggtgggagaggtcctcgaaccaccttatcgctttcacccctt

SEQ ID NO: 71367 - DNA, 122 bp, Homo sapiens
ggggcggggctgagaactaggctggcgccgctgcctggtaagcggggaccaagaggcccacggcctccatcaggaaccaggtgcttgtccaaatcccggacttcaaggagcagcaatggtgt

SEQ ID NO: 71368 - DNA, 122 bp, Homo sapiens
aaatggtaaattggaaaacctgtatccagacatttcttcagccacttcattggcaccaagcgtctctcaaaatgtcttctgttccttaacctaccaggcctcccaaagacagcaatgggaga

SEQ ID NO: 71369 - DNA, 122 bp, Homo sapiens
gacaaaaggttctgcagagccctcttctctctggtgctcaggtcccttagctgagcgcggcgccccatccggccactgagtgaccttctggcaactgacgcccccttcccgcggggcccagc

SEQ ID NO: 71370 - DNA, 122 bp, Homo sapiens
cggccgctcccgctgctcttagcatcattctcagtgatttctataaccagatagttcttccgcagccccaacctctctgttccctgacctctctctagtgactttttccttccccaacatct

SEQ ID NO: 71371 - DNA, 122 bp, Homo sapiens
cctcaccaagaagtcaatatctttatccaggagtgactacaagaaaggtctttgcctggtcgtcttctctatttgttgccctggttctgcttccaatcctgcgccagttggcaatggagtgc

SEQ ID NO: 71372 - DNA, 122 bp, Homo sapiens
tccctgacacctcgtttgtctacccttctctgcacgtgtcagtggctccccgctcgcgtccgtgtgtcattccctacacacgcctgtgtgtcctcttcacacgtctgactggagcgtcggcc

SEQ ID NO: 71373 - DNA, 122 bp, Homo sapiens
cctccctgccgctcctgctttgtactgtgacgctcagcctgtgatgactggtgtggaatccgctgagccaccttggcctaaggagactttaccactctgagattgtaaatctgtaaaataga

SEQ ID NO: 71374 - DNA, 122 bp, Homo sapiens
tgtctcccacctcccccatcagaatgggatatctagatgtcctccaatctaagaggtttccgggctctgctcacctctctcaggctgggtcctttctaccccctcagattaggctcatacac

SEQ ID NO: 71375 - DNA, 122 bp, Homo sapiens
ttttgtcttgcatactcaaaataaccatgacaccaaggttatgaaatagactactgtacacgtctacctaggttcaaaaagataactgtcttgctttcatggaatagtcaagacatcaaggt

SEQ ID NO: 71376 - DNA, 122 bp, Homo sapiens
tcctctcactccagcgccaacactgactggtcccctgggctcgtgggccgccggcagcctcggctcgttctccagacagtgttccaagaagccacttccagcgaggaagcgttggcctgaga

SEQ ID NO: 71377 - DNA, 122 bp, Homo sapiens
gggattactttgtaaataaatacatgaattaacatattaggaattttttaaacagatacacgcaggattctgtgacaaactactaagtgaaatgtctctagtgagttattgccatagaattt

SEQ ID NO: 71378 - DNA, 122 bp, Homo sapiens
aaggccattttcattcagccccttcagagcagttgaacatttcgcccatcatcataacatcgttaataatgaagtttaaacacataataacgtaagcctagtccttttttttactcctaagt

SEQ ID NO: 71379 - DNA, 122 bp, Homo sapiens
ggtcctggcagggcatgtgccctgagtgcagcctcaggggacatgtattccagcctgggccggcttggaagaggtgtcctgccctgcccctgtctagggtgtgttgcaagcctttcctccaa

SEQ ID NO: 71380 - DNA, 122 bp, Homo sapiens
gccagtagatggacagtaaatcgcatacggagctcagaaaaggccccaaatgcgtaaagacgacaaaagagtaaagaagggcaaacaacaaggattttcaacactggagacttaaaaggtgt

SEQ ID NO: 71381 - DNA, 122 bp, Homo sapiens
tacctgcaagttaattgggaaaactggtggtggagtcagtgcatcagtcagctagtgttgcgtaacaaagcactctaaaaacccagcagcttaaatccattgtttatgctcactcatgcttc

SEQ ID NO: 71382 - DNA, 122 bp, Homo sapiens
attgtggagaacaccgccgttatcaagcctccttcatgacgtcacgtgagaggagaggcgcgaggcattgtggggattgtagttccaagacttggaccgccattggccatgaactgtactgg

SEQ ID NO: 71383 - DNA, 122 bp, Homo sapiens
ttctccggccccaggagaggccgtgtggccataaaagggctgacctcctgattcggactccgcaggtagtcactaggggctttcgctgctcctggaagcaatttcaaaccagcaagcaggct

SEQ ID NO: 71384 - DNA, 122 bp, Homo sapiens
cccgcctccgtggggtcccgggcccggccctggcagcagctgccctgcactagcaggagtcgctgtggacgcccttcggcactcaaggaaaaaacgcttccagcgatgcaagcagctgcctt

SEQ ID NO: 71385 - DNA, 122 bp, Homo sapiens
cagtcctgcagctttctaaaggtatccagcactttctaccttgcattctatcttcatcttcgctaggcctcacagcaccgcatgattccgggggagggtgcttatcagactcgcgtgtggcc

SEQ ID NO: 71386 - DNA, 122 bp, Homo sapiens
cagcggagatgcttacattccggtgaggttgggtagacgaggtgccaggccccatcgtgccggggtgggaggggcggctacttcaccactgcccggacaaggcacccagaggcccctgcaat

SEQ ID NO: 71387 - DNA, 122 bp, Homo sapiens
gcatccagtaggggcgggagcggcgcgggggccgactccgcctctcgtccgcctcctgtccgcctcggggaggcggggcccctcagcgttctctcactggcttaagctctcgagcgacgggc

SEQ ID NO: 71388 - DNA, 122 bp, Homo sapiens
cccgggcgccaacgacaggagcctctgtgcggacagggccggacagctggcggcccgctccggatgaggcacctcccctaggcggcagacacatggggaaaaactgagctctgagactattt

SEQ ID NO: 71389 - DNA, 122 bp, Homo sapiens
agccccaggccaaggctgtggcgtgcttggtggtgctgtaggcccaagatgtttatgggtcgagggtccccggggccgggattctgatccctggtgagaggtggctgggaggaagtccagac

SEQ ID NO: 71390 - DNA, 122 bp, Homo sapiens
tcaagagcctctggtctctgctgcgggtggcgaggggcggctggaacagcatacttcagtcgttccgtgtcagcctccacccctggtagcaccagagcctcccaggcgtccccgcagtccga

SEQ ID NO: 71391 - DNA, 122 bp, Homo sapiens
ttcacccctggagcaccaggccaggcggtgtctgtccttgagagccaggcccaggtctcacggtggcgtatggacagctcctccccataggcctggtcacaatagggaagcgggggtggctc

SEQ ID NO: 71392 - DNA, 122 bp, Homo sapiens
accatgattctccctgatttagaatcatccttggctccctgttgccatcagcagagaatccggagtcctcagcacataggcgatgctcggggggcctggcctctgcgtctccccaaaggctc

SEQ ID NO: 71393 - DNA, 122 bp, Homo sapiens
gcttgagggtggcaaacccctgagcgggctgctgaatgcgctggcccaggacactttccacgggtaccccggcatcacagaggagctgctacggagccagctatatccagaggtgccacccg

SEQ ID NO: 71394 - DNA, 122 bp, Homo sapiens
acccggaggcgcgggcggaggtggcggggctaggacccagcggctccggcagagcggaagcggcggcgggagcttccgggagggcggctcgcgggtgaggaggcgtccggggccgcgggaag

SEQ ID NO: 71395 - DNA, 122 bp, Homo sapiens
tagagcggtccagggactcacaggtctcactaaagaaaagtctagcgtaggttcacggcacggagagattttaaggctgcctaagactaaagccaaatacgaagtccacatctgcggtccgc

SEQ ID NO: 71396 - DNA, 122 bp, Homo sapiens
catgtgtaagaaaagtgtatatactatcttatactacctctccaggttgccagagagttgcgaggagagcaaggggcacaaccgtctccctttatagttctacttttctaataaatagtctg

SEQ ID NO: 71397 - DNA, 122 bp, Homo sapiens
acagtaagattcttggctgggatgagccgaacaggacgaagaaccgaattctgccggggccgcttaaggaagactgcctaggcgaggtggcccaggctggggatgagccagtggaggaggaa

SEQ ID NO: 71398 - DNA, 122 bp, Homo sapiens
tcgctttcagcggactgcggagggaatcccccaccccaccccactggggatagggtggcacgtcgcagagtgtcgcagctgtacaaatttggaagcccacagcatcgcctgacctcttgtgc

SEQ ID NO: 71399 - DNA, 122 bp, Homo sapiens
agctgggtgcgttcacgcccaggatgctggggttgtcccacctctaggtttggagtgggacgacgaggagaagcaatttgttcaggagcagagaaagttcgcttggctgtgactcatcgcct

SEQ ID NO: 71400 - DNA, 122 bp, Homo sapiens
atctaccccgggctcaggccctgaagcagccgcccacagcccagccccgccgtgccccgccgtgccccgccgtgccccgccgtgccccgccatgcgactcaaagccccattcaagctacgta

SEQ ID NO: 71401 - DNA, 122 bp, Homo sapiens
ctgcagggggcgggggaggggtcttgctccgaggccaagtggggcgcgcgctagggagagcgggaaggtaagggggctcgagacgggcctgggggcctgacagtagagttgggaggtggaaa

SEQ ID NO: 71402 - DNA, 122 bp, Homo sapiens
actcggaaggggccgcgccgccgctgctgggagttgtagtccggccgtggttgggggagccgcggctcatgcgcggtgcacagaggcttgtttcacatctgtaacaacaggtgaattgggct

SEQ ID NO: 71403 - DNA, 122 bp, Homo sapiens
caatgaaactgactcactgtgctttgggtgggtgtttttacatctgtatgccttgtttttcgcatctaagaaacgggaatgatcttccgtgtggcatgtacacccagagggacttgaagcat

SEQ ID NO: 71404 - DNA, 122 bp, Homo sapiens
gattgttgcgcgctcatcttcctctcggtctacttcgtatccttgcctgaggcaggcgaacgccttgccgggggacacggctgagggtgggccagttgggcacccgggcaggtgtgtgggac

SEQ ID NO: 71405 - DNA, 122 bp, Homo sapiens
ggctattgggggagaggttaagaaacgtagaatttcgcagccagaatgggtacgtctcagcgatcctgaaagcagccttgacagccagaggcgagtcaagtggaaaggctggccgggcttcg

SEQ ID NO: 71406 - DNA, 122 bp, Homo sapiens
aaggctgcagttatggtccatcagctttctaaaaaggaagcttccagacacgctatcatgcgttctcctcagatggtgtctgctattgtacgtaccatgcagaatacaaatgatgtagaaac

SEQ ID NO: 71407 - DNA, 122 bp, Homo sapiens
tattttaatgccagttttatgcatgccctcactggcctccagaataaaagtgctctttaacgattaattatacatacagttcatttccctaataatacttcaatgaaaacactttttatgtg

SEQ ID NO: 71408 - DNA, 122 bp, Homo sapiens
cagggtagactcacagatccaggagctgactgacccgccgtgggcgaggcatcgctgcagcgtctgaagcctcttccgcggtcccagggcctccagaacccagccagggaccgtccgccaac

SEQ ID NO: 71409 - DNA, 122 bp, Homo sapiens
gtggccgtctggagactcggaccggctcagggccaccgccttcctgggggcctgtggccccgccgtgccggccgccccctgtctggaccagcctgagtaatgggtccttcccctcctcccag

SEQ ID NO: 71410 - DNA, 122 bp, Homo sapiens
ttattggttggagctgccatcactgcatgcttaggatgcagtaagctgcatccagtttgccgcagtccccagcacccccaccaagtgtggacgtgggcacccacagctggtattacaggacc

SEQ ID NO: 71411 - DNA, 122 bp, Homo sapiens
gcgaggaggccgcgccacgatctctgtactcattgttcccatggcgctgcccttaaccctcgaaggactgctcccggacctcgattccaagcagggtgaccctctggcctttgtccccgctg

SEQ ID NO: 71412 - DNA, 122 bp, Homo sapiens
aggccatgatcaagaccgctaagatgcaggggaacgtgatggtgagtgccacggacagggcgcgcgctgggtcggggggacccaccgtgaggagcgatgctgggggaggtctgtccttctca

SEQ ID NO: 71413 - DNA, 122 bp, Homo sapiens
cccgggctggggggcgggacgggaggccctgggagcttcctgcagcgtgggggcggctcccgaggtgggaattccgcccccgaaccggcgggctacgtgcgggggtctcagaggctgcggct

SEQ ID NO: 71414 - DNA, 122 bp, Homo sapiens
gtcctccggctggctgggctcggttcgcacggcgcctgtccccgtcctcttcgtagccggcgccgccgccgcagctgcacatcctccggcttagctcgccattgcaacaggagcccctcacg

SEQ ID NO: 71415 - DNA, 122 bp, Homo sapiens
gccagagggaagcaaagcagggcatgaaaagttgcgggggccctactgccccgggtgtgtcgctccttcccaaaggtggggcacccgggagcgagcagggtggtggggcgcccctgcgtccc

SEQ ID NO: 71416 - DNA, 122 bp, Homo sapiens
cagcagtgatctgtatcccaaagttcaggcgtgataacgtcaagaccgtgctgagcctgccgggtacagcgtgaaaatggctggtgctaccgtggtctacgcaacctgttagaccgggatac

SEQ ID NO: 71417 - DNA, 122 bp, Homo sapiens
tccagagctcgctcagctgctgcccagcctcggctgtgaggataggctggctgggcagcacgtctctccccacagggctccctgagaccaccaggaagagcccccaaccaatcttgggattc

SEQ ID NO: 71418 - DNA, 122 bp, Homo sapiens
tccagcttcctcaataggaatggaagccaaactccgaattgatgactcctttcaggaagtcgagagctgtaacgaaagccaggaacaggggcaagggagagatgcgtcccgaatgatccttt

SEQ ID NO: 71419 - DNA, 122 bp, Homo sapiens
ccagcgcagcccaggccacccttctcactgcccctggggctgagtgagcagggctcaggccgtggggagccagccttgtcagacactgcctttcgccatgagtgaccgggcaaacacctcat

SEQ ID NO: 71420 - DNA, 122 bp, Homo sapiens
tgccccacgcagggcctcggcagggcggcaggctagggcgggttcggaggtgacagcgcccggcttcctgcgccaaaagtgaggcaactccggaaacttcctggagccggcgcgcgtttcct

SEQ ID NO: 71421 - DNA, 122 bp, Homo sapiens
gctggtgcgtgttacttccctgtaggggttgtggggagggcagcctgactccagccttctcgtgatgaaaactctgtccagttctgctactgaagggagagagatgagagccttttaggctg

SEQ ID NO: 71422 - DNA, 122 bp, Homo sapiens
agccaagaggaagaggtgggtctggagaagcccccatgaggcagaggttgggcctgtagacgctgacaggaggcaggagctgggcctggacaggtcaacttgaggagattttgggccttcat

SEQ ID NO: 71423 - DNA, 122 bp, Homo sapiens
ggtgattgccccctttctgaggacgcggaaacttgagatttggcgaggcaagaagccaggcgcacacagctaggcgggccgcgggccgcgaccccctggctggtccgtgctctccccctggg

SEQ ID NO: 71424 - DNA, 122 bp, Homo sapiens
gtttgagtcaccccctgagatttcatgactcggaatttcatgaaagtcagtcccagtttacgaaacctctccaacagagaaaactctgttccctgcctctttcactcttcttcctatctggg

SEQ ID NO: 71425 - DNA, 122 bp, Homo sapiens
gccaagtgttggtcagagggtgtgggggtgtctgtcggagactggacactgtgcaccgagcggggctgggggctggacgtactctcgagggtcgggctccacgcgtgggtcccacggcggca

SEQ ID NO: 71426 - DNA, 122 bp, Homo sapiens
gtagaaaggaggccagccctttggaagatgtttctagagggtgtgggcagaaccaagtctcggtagttaggaagatcttggctccaaagtttaacttgcagcgtcccggccgggttcacagc

SEQ ID NO: 71427 - DNA, 122 bp, Homo sapiens
ccgagcctggaggacagagccgggtctgtgtgatgccacccccaactctgcatcggctggcgtgtggaaggacgtccatcccttcacgtccctctgcgtgtttgtgagtgcgattctgagga

SEQ ID NO: 71428 - DNA, 122 bp, Homo sapiens
gcactcagtgaggccttgcaatacggttcacttgttgaattgaattcgtcaattgttgagcgggccgtgctgccaggcaccgcacgttgtgtgtctgccctactctcgtggaaccaaggtcc

SEQ ID NO: 71429 - DNA, 122 bp, Homo sapiens
tctcctcaaaagttcaaaagatgtctatttaggtcccgtttgctctctccaatgcctaaccgtagacattggcatggcactttaggctcatgttctcagtgtgcatctgtcttgctcaggac

SEQ ID NO: 71430 - DNA, 122 bp, Homo sapiens
aggcgtgcaaagaaagctccgtgccacgcccggcagcctccattctttggtagaacgcagcgcagcaatagccgccaagtcccctcctgggtacagtacagctccacagcgcccctgctggt

SEQ ID NO: 71431 - DNA, 122 bp, Homo sapiens
gttcaccctcattgaaattgcagctgcctcagttgcacctccctgcttgatttttctccacggtattggccaacttccatactacgtatcttttcattcattttttttttggttgttacctg

SEQ ID NO: 71432 - DNA, 122 bp, Homo sapiens
cagccgcgtaaagtttgctgtgttgtttttgtgcccgggaggagtgtggccagggtgtcacgtcacacagtacacgtttctcagatggtggttctccagactgctgtcccaaagtctgtttt

SEQ ID NO: 71433 - DNA, 122 bp, Homo sapiens
ggatgctctgccgacacctcaccccggacccccgagggattttctgccgacaccccaccccggacccccaagagattctctgccgacaccccaccccagacccacgagggatgctctgccga

SEQ ID NO: 71434 - DNA, 122 bp, Homo sapiens
ggctctcacacaggcaggcctgcacggcacgcagcagtggaggaggttaccctgggtcgccgacgccaggggaagccaagcgaccgaccccacacttctgagccccgccggggaagtccccg

SEQ ID NO: 71435 - DNA, 122 bp, Homo sapiens
ttaaagcaaccttgctttttgttctcctttgtggccgggatagagttgaatggtctcccacggagagcctggcagactcctttctgtaattcctacctctgtgaaatgccgccctcagtaga

SEQ ID NO: 71436 - DNA, 122 bp, Homo sapiens
tgggagggcatttcagaggactgaacaacaccagaggcgtgaagcttggtgcacggcagccgggggctttcttagtcccggaggaattggggatggggacgtgaagagaaaggtgggagcca

SEQ ID NO: 71437 - DNA, 122 bp, Homo sapiens
aagagtcaggtgagctgagtacgggcatcgcgcatgtggtggattccgtgggaaagaactcggcccacactgggcgtgcccccaggaagcccgtcctgacaacgtggcctcggagctgcgtg

SEQ ID NO: 71438 - DNA, 122 bp, Homo sapiens
gggtggagggcctgactgcgcccgctttgcccctcagtgctggtgcgtgccagtccctagcgctctaggcccaccaaagccccgcggacgcccagccaaggcccgccttcttagcggtgcct

SEQ ID NO: 71439 - DNA, 122 bp, Homo sapiens
aggggcctgggagctggctgtcccccgccctgggctccctgacgaaatcgtccttttctgcggcggatgacaggttgtgggaacaacagcttgaattacggaaagaagtttccccactgagt

SEQ ID NO: 71440 - DNA, 122 bp, Homo sapiens
cagctagaaactcggggcggggggcgctcctcaggagccaggctcctaaagggggtgtggcggccggggcgtttaagggggtgggggcgaaggcatttcggcccggccccggaggccccggg

SEQ ID NO: 71441 - DNA, 122 bp, Homo sapiens
atagcctcagggaaaggatcgggcgtgctcacgagccctctaacccatggcttaaacacccgcttcctaagcctgggtaagtgcagtagctcttcgctcgagaggagccacgtggaagagag

SEQ ID NO: 71442 - DNA, 122 bp, Homo sapiens
gggggaagaggaggagtgtctttcctgatgcagaccccgctccatgctgcagtggatccacgtgcacgatgccatgtagttgcaggttgtcacccctgtgagagagggactgttgttatggc

SEQ ID NO: 71443 - DNA, 122 bp, Homo sapiens
gcacatggcaaggaaaatgaaacagctctctggttctagcatttgtcacctcactggctacgcttacggtttgtcaagagtcatccccagcatgttttgctgcatagttcctcgagcggctg

SEQ ID NO: 71444 - DNA, 122 bp, Homo sapiens
tcagcagacagcaactgcagcctccggagggctgcggggcgcagaggtgacaagacccaccggtgctgccggcgaaccgggggaagatcttctagccagtgacacttgggggcgggggtgac

SEQ ID NO: 71445 - DNA, 122 bp, Homo sapiens
tcccgttgggtactgttctgtgcctggtttgctgcgtcctggtcctccatctctaggtcacgccactcaccgagtctctggcaccagagggtcattttttgcctccggaaggtcggagggca

SEQ ID NO: 71446 - DNA, 122 bp, Homo sapiens
gcagcacggggagctgtcagaagtgcagggaggccattcgggagcccggggcagccaggacgggggaggtcaagagtctgcggcctgggtccatccacccgggctgtcctctcgttctcttg

SEQ ID NO: 71447 - DNA, 122 bp, Homo sapiens
gtagtgcagcgtgggccaatggattctttgttgttcttcccctccagagtggagggtctccgctcagcccatctgcggtttctcacagtgatagtacttcatccacgcagtcgctgtctcat

SEQ ID NO: 71448 - DNA, 122 bp, Homo sapiens
ttcttcccagagaagaagatggactgaaagctgccagttggggactttttgtgatcacggcgttgcagcgttttaaaggaggtgatggggcttgcgctggcttgtcttcccacccaagtgaa

SEQ ID NO: 71449 - DNA, 122 bp, Homo sapiens
gggacgtgtcccaggtaccccctccacccacattggtgaggctgactcaggccccagccacgtgtcccaacctgccctgcgcgtcccagaggggaaggaagatattccaatgctcccaggag

SEQ ID NO: 71450 - DNA, 122 bp, Homo sapiens
attatcagtatgaagtttacctggcagaaagctctgagagccagttaaagtttcttaaaccggtacttcccaacttcttgggtgaagggactggtggggacagcgaggcaaactccaactct

SEQ ID NO: 71451 - DNA, 122 bp, Homo sapiens
tcaatgtgggaggccgcagcagctgcctccccttgagacagaccccggggcccgtgccagcggccacagtaactggctggcccttgccagctgtcacactttgcatgccgctgcttcagccc

SEQ ID NO: 71452 - DNA, 122 bp, Homo sapiens
agcaaaaggggacatgtgcaaggaatcagcagaggaaccccacccaatgatcatttgctacggaagtctcctagcaacctggctgagtggcaggtgtgagggaaggctcccagctgacctgt

SEQ ID NO: 71453 - DNA, 122 bp, Homo sapiens
cccgcacgggggctccaccagggcagggatcgtggtgagggtggctcatgggtcccctcgcggggagcagggtctggcactcaccagggcgcacgactaggacttgttgaattaatccatcc

SEQ ID NO: 71454 - DNA, 122 bp, Homo sapiens
cgcactacgtaggtgggcctgcgggagttctgagtgcgacggcgcaggtctgcaccatggcggcccggcttgtcagccgatgcggggctgtgcgtgcagctccccacagcggcccgctggtg

SEQ ID NO: 71455 - DNA, 122 bp, Homo sapiens
tttccgcgaaagcgcagaagtggacacttacggagaaattcctgtcctcatatcaattcccggctcccgggatttccggcacgcattatgcacaggctgagcgctcaataaatgtggaatga

SEQ ID NO: 71456 - DNA, 122 bp, Homo sapiens
ttaaatcctggggtcatgcccttcacgctaggcaggtggaagtctttacttgtactgggccggacttgagccccgacccttcgccagcatctccccgctgccctcaacacacacacacacac

SEQ ID NO: 71457 - DNA, 122 bp, Homo sapiens
gacgccaactgcacatggtctgcccccaaagcccatgattcgaatcacgatgccatgattcgaatcatcagcatggccctgatgatcggtatccagggtccccacagagccgctttgccaaa

SEQ ID NO: 71458 - DNA, 122 bp, Homo sapiens
cttcctatcctgtctacttaacaaatttttctacatccctcaggaccctcaaactcaatgcgtctgcaatgaaatatgtcagtcgctcctcccccagacctgcaaagcccccagttcactga

SEQ ID NO: 71459 - DNA, 122 bp, Homo sapiens
ccgaacctcggaatgcgaggcccggcggaaacaggccggtgctaactccgtgagtcaggacgaaggcgccggggaaggctggccctaaacagtggctggtgtttttggaaggaggagaaaca

SEQ ID NO: 71460 - DNA, 122 bp, Homo sapiens
acgtttttccctgcacagtggtcagtgctgtgtgtcagtcaaggccatgtctagggtcagcgctgctccaggagcctctggctttgtccttcaggtgggcagtcccttgctgtgtctcttct

SEQ ID NO: 71461 - DNA, 122 bp, Homo sapiens
cactcctggccaagagccactcctggtacaagtgaggactgagatgggcgatggggtgggcggtgcgatgggccagttcgttgaccagctcttgtactagatccatcagcaatgtcgcttag

SEQ ID NO: 71462 - DNA, 122 bp, Homo sapiens
ccagcatgtgggaggactcactgcatcatgaataaatgaatgcttgagaagtaaaagtatcggatacaattggaaacatttagcagaaacaaccaaaaagatgtggtggccaattggatatt

SEQ ID NO: 71463 - DNA, 122 bp, Homo sapiens
atctcagcactctgggtgaaagcaatctcagccagtaaaacatcagaacgctttcacgcacgcgcagtaagcacacgaccggtggcaagagcccggataaaggcggagctaaaggtgccgga

SEQ ID NO: 71464 - DNA, 122 bp, Homo sapiens
ctaacaaccaggtattaaacattgcactgatacttgtcattgccttcaaaataagctctacgtgttttctttacttcagttgtctcatttaaccataaataagtcctcagaggtcaggggct

SEQ ID NO: 71465 - DNA, 122 bp, Homo sapiens
gggctctgggctttgatttaacctgcctgtctgtctctctgagttgacagccggggcctccgcgtgggtgctgctgggaggctcagtggtaaaggccacttttcaggatgtgtctgatttta

SEQ ID NO: 71466 - DNA, 122 bp, Homo sapiens
gggtttcctaactctaccccacactttgtaaacagctcctctgagcaggaaagagagaagcggccatgttctgagatgtcagagttctccgctacagaggacaggggagggagtgaaaatgt

SEQ ID NO: 71467 - DNA, 122 bp, Homo sapiens
tccattcatgtccttctacccatttgttcgagaactttcactgagtaactgttgtgtgcccggcttgatgctgggccctgaagaacatgacagacaagggccctgtgcttgggaggtttgca

SEQ ID NO: 71468 - DNA, 122 bp, Homo sapiens
attagtgttaactctgggagctcgggagcgtgcaccaccaccagtgtcaccgagcgcacccgcacagcagctaaccagtcaggcagcagaacgagtggcggcagtttgccggggcgtgcaga

SEQ ID NO: 71469 - DNA, 122 bp, Homo sapiens
gctcaggaccagtgaccccactggaaagcgccaccctggtctctgtctccccactactgacgattctgcaaaccacacaagcatttattttaccgggtatgcattatctggtccatctagtc

SEQ ID NO: 71470 - DNA, 122 bp, Homo sapiens
agagaccggccctgcagtgcaggatgctccggtggacgtggccgagcggctcccgggcagcgcggctttatatgccgcttctcctgtgcagggctgtcaatcagacacacgaggaagcacgt

SEQ ID NO: 71471 - DNA, 122 bp, Homo sapiens
acacggctgagggtgggccagttgggcacccgggcaggtgtgtgggactagggaggcgcccggcggcgggcgtgggctccctgggagctggcctggccggggcggtggcgcgggccccggag

SEQ ID NO: 71472 - DNA, 122 bp, Homo sapiens
tggcgctctccaagggaattgcgtgggtccataggaagttatacaggctcagggcctacacgcctttgagtgcagcgcctgcagttggatgaatgcgcatctgcggagctggtgcccgccgt

SEQ ID NO: 71473 - DNA, 122 bp, Homo sapiens
gaaacgtatggactacaagtcccgaaatgcctccggcacttagctacgactgcacgtgcgcgcacagctgcccgccggaagaaccgagcttggctgtgtttatctcgttggggactaaggcg

SEQ ID NO: 71474 - DNA, 122 bp, Homo sapiens
tgtctgattagaggaaaagagggaagagttacgcgaggcaatcgggagctccgagggtcccgcagcatccttgcctgggtgttcagccctgtcccgacttcgaggcttacctggatgggaag

SEQ ID NO: 71475 - DNA, 122 bp, Homo sapiens
atggagtatgtatatgttcagctttactaatgccaaaatgttttccaacatagttgtaagcgatttgtgccctcgataagcagggtatgagaatttccattgttccatgtcctagctgactc

SEQ ID NO: 71476 - DNA, 122 bp, Homo sapiens
gactgccccctccccgcctatcctccacccacgcgtaccgccccgttcccccaccgtttccgacccggcagcttctggaaaacagcgcccttgatcctcccgggcaggaagaagggccaagg

SEQ ID NO: 71477 - DNA, 122 bp, Homo sapiens
cgaggaggcggcggcggctgctcccagtcgtggccgctacagccactgctcggctccgctcgcagctgtcccagctgtggctcctgtccgcttgtggcacccacagtctctgccgcggctcc

SEQ ID NO: 71478 - DNA, 122 bp, Homo sapiens
tcgctggctcactggagaggtggtgtctgggagtgcacccccgaaaacccggcagcagcccggcgtcactccggctgttacctctgggagcagaaactaaaggggatccttattctttatac

SEQ ID NO: 71479 - DNA, 122 bp, Homo sapiens
ggcacaaggctttaaaaataaatattttatacaaatgaaggtaaaagaatatattcaaatcggatattttgaagactaaggaaacaaaacttaatttgaggaaagttttgttttaaattgtc

SEQ ID NO: 71480 - DNA, 122 bp, Homo sapiens
caaagcccctggctgccctggggtcctccagcggggaggctgaggctcccagaggccaggcggggcagggcaccagtgacgctgtcccctccgtcctccctcccagcggtctctctgtgctg

SEQ ID NO: 71481 - DNA, 122 bp, Homo sapiens
gaaattgtctttcgtctcccacaccaatattccagattttaaaccagagtatattttagacgaaaggatgtgtttttagttttatctggaaaatctgcacatatttatgcatgttccttttt

SEQ ID NO: 71482 - DNA, 122 bp, Homo sapiens
aggcctctctagcctggcattccagaagccacagccacccagacaagcagagtcccctggcgatggcccacaggcgctgggattaggatggatggatctctcctgcagccagcacaggcccc

SEQ ID NO: 71483 - DNA, 122 bp, Homo sapiens
atattatctgactgatgaattgtgatccctgtcacaggccaaaatagcgaggtcctgcttcgataattgctaaatatatttttcttgaattatatattttttgccttatgtcgactgtgaaa

SEQ ID NO: 71484 - DNA, 122 bp, Homo sapiens
gaggaagcggagaagttgtcgtctctacaaccaagacgcaactttacctcgctaggtttccgggtgtgggccttgaccctccgcaccacgggaacaaactcttacctagactcttggggcag

SEQ ID NO: 71485 - DNA, 122 bp, Homo sapiens
ttcactattatgaattaccagatggaaatgtcttggccatcccttaagcatataagcaatcgacaacatgataagctgataaactgcaaattcattgttaatacttacataacagtgttggc

SEQ ID NO: 71486 - DNA, 122 bp, Homo sapiens
aaggtcacctcgaaatgtaggtactggaagagaaatccagaatgttacatagaagacgcacgctaacaacagagcctaggaaaggtcgccacacgtcctcatcccagctccagggggggcaa

SEQ ID NO: 71487 - DNA, 122 bp, Homo sapiens
cgatagccaagacaacacacaccaacacatgaatgaagaaaatgtggtatatatcgacaacggaatatcattcagccttaagaaggaaacctggtcacaggctgcaacagggataaacctga

SEQ ID NO: 71488 - DNA, 122 bp, Homo sapiens
cgcagcgctcctgctcgctggctctggatggcctctaagactccagcaagctcctccttgcggcccgaggacagtcccgagggccagggagaaggctgcctgggcgtgcgcccagggcgcgt

SEQ ID NO: 71489 - DNA, 122 bp, Homo sapiens
ctccgggtgcatcgaatacagactctcacttcagagaggatcccggagctttggccctcacgtgatgtcatcatttgtgatccttgacatggaggccatatatgggtatgtttctggaacta

SEQ ID NO: 71490 - DNA, 122 bp, Homo sapiens
aggctgaagtgcagtgccgcgatctccacccactgcaaacttcacctccctgggttcaagcgattgtcctggctcagcgtcacaacctcaggtgtgcgccaccaccactgggtaatatatat

SEQ ID NO: 71491 - DNA, 122 bp, Homo sapiens
tctcacttggctgtcttgttttggggctggaaggccacactgtgtttcctggggtagaggcggagtctgggcattctccctttgtagctgagagctaagagcagttgtgtctgctttgataa

SEQ ID NO: 71492 - DNA, 122 bp, Homo sapiens
ctgctgcttccagagatgtagtcgcctatctgtggcaacaattagttttaaaaatggagccgcatctctaataacaaaagcctccagctgtgaaaagtggagctaaatctctctaccgggcc

SEQ ID NO: 71493 - DNA, 122 bp, Homo sapiens
tgatcagtcctctgtgcaataatgaatccaagagctatgatctcagtgctgacttcttcccgaagcaacatgcctatactttcaactacttgcaagatatcttcaagtggatgtcccatggg

SEQ ID NO: 71494 - DNA, 122 bp, Homo sapiens
cttgggtggtcgatgggactgggtgccgtggagcagggggtggcgctactcggggaggctcgggctgctcaggagcccatggagtgggtgggaggctcaggcatggcgggctgcaggtcccg

SEQ ID NO: 71495 - DNA, 122 bp, Homo sapiens
acgcccgagcgccgggtctaggcgggctgcaggtgccggcaagtgctggggccgggccgccgcggaacccacctgtgctgggcctcaggccttgcgccgccctcgggctgccgtcgccaacc

SEQ ID NO: 71496 - DNA, 122 bp, Homo sapiens
ccaccccagcgccccgcacgcaacccccgccggcttctactcctcagtcaacaagaacagcgtcctgcctcaagccttcgaccgtttcttcgacaacgcctactgcggtggcggcgacccgc

SEQ ID NO: 71497 - DNA, 122 bp, Homo sapiens
ccccattccccccaccccacagggcttggattctggctccagtccagtgccgaggcaaagcgcctgtaggggatggcggccagggtcagcggctctccctgtgacggcctttgcccgtcatc

SEQ ID NO: 71498 - DNA, 122 bp, Homo sapiens
actcagccaagagatatgcaggttgtgcttagcagccgatcagtttgagacctgcgaggccgcatccccagggtttttcatctcttctgtttccatttgtgtgagtacagaaaaaataattc

SEQ ID NO: 71499 - DNA, 122 bp, Homo sapiens
ggggagtctctcctttgcccagagcctccctgcccctcccctccgcttcacagctccaggcgaggcctcctcctggggcaggccgagacagctcttctcagacttgctcccaccccagcaag

SEQ ID NO: 71500 - DNA, 122 bp, Homo sapiens
tgacacacttctcagcagaggattttattggtggtcacctgtggcacaggttagaggagccgaagtgctgtgtttgtggtgggggggggaccacaaaccccggccctgccctcttgcttaca

SEQ ID NO: 71501 - DNA, 122 bp, Homo sapiens
cctggtcacctccaggcggctgaagacgaagaagccggagcccttggtcttgcggggctgcgtcgtgctgtgccgggcgtccgggagctgcacctcgttgtgcagccactgcaccgagatgt

SEQ ID NO: 71502 - DNA, 122 bp, Homo sapiens
gttaaaaacctccaacattccagtttagacacagcccctcccctttctggccatagtgaccgctctctggcaagcactgcccagggaagataaatcagttagccagtggcctaagggttagg

SEQ ID NO: 71503 - DNA, 122 bp, Homo sapiens
gccggctggaactggggctgcccgcggtgctcgcgggccagagtgagttccgggtggatgcgggctcggcaggccccgaactcagagcagcgcgccgggcagtgaagggcttagcacccagg

SEQ ID NO: 71504 - DNA, 122 bp, Homo sapiens
gtattgcccagactcccgggccccgaacgccatacctggcttccgcttccggtggcttctcgttgtgccccgcccgcaagcgccctcctccgggccttcgtgacagccaggtcgtgcgcggg

SEQ ID NO: 71505 - DNA, 122 bp, Homo sapiens
ggcgtcggcagcagccatgtttttcgagctgtagcagctgctgctaccctgactgggcttcgctggccgcctcggtttctccctctgccgggtccaggcctcttcgccctgcagctgcggat

SEQ ID NO: 71506 - DNA, 122 bp, Homo sapiens
cttttgtcatactagattatcttcagaaacactgacccctggccctgagcactgaaagagcggttagggtgatgcggctggccacggcatcgcccactagcagtgagtgctgcgcccccacc

SEQ ID NO: 71507 - DNA, 122 bp, Homo sapiens
cggggaacagctacggtaaggcaagagacacagcgggtgagctcacgatggcactgccaacgcgtgcccgctgcagtcctgcgcgcacgcgctccctggctcgtggcttgcgactcgcgtgg

SEQ ID NO: 71508 - DNA, 122 bp, Homo sapiens
agagtggcgcggggggcgtggggcggtgctgaggagctgaagccgtggccagctcgacgccggacagtccagcgagcagcacggcgggaaccggcagccggagcagtcccggagcagaagca

SEQ ID NO: 71509 - DNA, 122 bp, Homo sapiens
ctgagcaaaaggaggaggagccaggagacattgggaatggacccaggagttccggacgcccgtcttccagcgcagcctcggtgggagggcggggcataaagtcccgccacgcccccacaata

SEQ ID NO: 71510 - DNA, 122 bp, Homo sapiens
cgttcagactaatgagtcacagagagatgctgcccaggtctctcactttacaatggctgccgccgccgccgtggcctctctctccgcgtttttggcgctcgcttgctccctcgctcgcccgg

SEQ ID NO: 71511 - DNA, 122 bp, Homo sapiens
ggctcctcagctgcaggatggctccttgttcacagctgctgctcttgcctctgtggaagacgcctgctgctaagagaatctttgtgtgttgtgtataaaatgaactttgtttggaccattcc

SEQ ID NO: 71512 - DNA, 122 bp, Homo sapiens
ccccagccttcggggtcccccatccgcttggcccgagggggtcctggctggaggttcgggcgcgaggtggcgccgggacgcgatcactcggcacgcagacgtcgctcgccaggggttgcgct

SEQ ID NO: 71513 - DNA, 122 bp, Homo sapiens
ctcccctctcgccccttccctccgcagcaggagggaggaggaggggcagctggctgaagccgccacctgccacagcgtggaaaagctccagttgtcacttacccagcggggtgagaatggct

SEQ ID NO: 71514 - DNA, 122 bp, Homo sapiens
tgaggaagccggcatacacgtccacagggtggctgcggtactgcgtgatctgcgtgagcccgcatacgcccgcggcgatggcaaaggcgaagaccaggatgggcttcagcagcttggtggtg

SEQ ID NO: 71515 - DNA, 122 bp, Homo sapiens
gacaacagtgacagcctgacagggccgactggtgccgcagatggctggtccctccgcctccgggccacagccttcctgggcactcccccacgtgaccggagcagggcaggagaaaggcatcg

SEQ ID NO: 71516 - DNA, 122 bp, Homo sapiens
taaaaggggtcgacctggttaactagaaagggcgaccagtgaccctgacctggacgcgctcggattggtcgattccagtgcagtctcagatgagactcttctatgattggccagaaaagtca

SEQ ID NO: 71517 - DNA, 122 bp, Homo sapiens
gtgaggttagatcgcacagccagggaaagaggcagcgccggcaacagggcgcagaggaggcggagtcgagcgctcctccgcagctgccaaaagtgcaagacgtagcttcactcgaatcgctc

SEQ ID NO: 71518 - DNA, 122 bp, Homo sapiens
tgttccagccagcggggcccagtgtgtgtgtgtgtgcgtgtgtgtgtgtgtttgcatgcacgtgtgtgtgaggctggacatatgtctttgacattagtaacaattagtagagaaactccagt

SEQ ID NO: 71519 - DNA, 122 bp, Homo sapiens
gttcaactgactcattcattcaccacaagattccagggtggcgcaaaactacatcctcgccgtaagccttaaaacatgactgtgccccactgacagacatggaaacttgggctaagagagaa

SEQ ID NO: 71520 - DNA, 122 bp, Homo sapiens
aatggggagtttgaggagacccagagaagtggaatgtctgaggtcacacagctggcaagccgtagtgctggggctagaaccctgctgcatctgtggctattccacacctcatgaatcttgct

SEQ ID NO: 71521 - DNA, 122 bp, Homo sapiens
gaaatcgacagcatggagcgtattgagaagcatcaagcctttcgattccgtagcacaatacgttgcctagaaaggaggaacaataccttacactcataaatgtaataagatactgttctaat

SEQ ID NO: 71522 - DNA, 122 bp, Homo sapiens
cgttcggcggatgttctccctcctgaggggaagttctgtcccgggagtaagaggaagtaccgcttctttacaagcacgacttggcacggaagaacttcccgctgcgcctgcgcctgtgcgta

SEQ ID NO: 71523 - DNA, 122 bp, Homo sapiens
gatggtggcgggtgcctgtaatcccagttagttactcggggcaggataatcacttgaacccgggaggcagaggttgcagtgagccgagatcacgccattgcactccagcctgggctacaaga

SEQ ID NO: 71524 - DNA, 122 bp, Homo sapiens
ctcatgatgattcaccatctggccacctgtcactaaccagaacctcgggctccttagctgcgaagtgagtgaaataatccctgcctcacttgttggatcgaatttcatgatacacgagaaag

SEQ ID NO: 71525 - DNA, 122 bp, Homo sapiens
tcctgatgctatgattaatccctcattcctggccttggggtaaagttcatgagggccagacgctgggggctgtataccattcataaactatctcttaaggctcagggctcactgttaaaggg

SEQ ID NO: 71526 - DNA, 122 bp, Homo sapiens
tggccacccacggagcctccaatgcccagaccccctcccaggcctccagggggtttgagccggtgtgccacctccagggccgactccaccttgacgatgcagatgtcagacacgtcctcatc

SEQ ID NO: 71527 - DNA, 122 bp, Homo sapiens
cccgataaccgttttgtttttctcatattatgaccttctcatgttagcaccacttcgcaacgctccaggtcgtgaaggagcaacttcaccatcgccgcctacagacgccactgggagcttgg

SEQ ID NO: 71528 - DNA, 122 bp, Homo sapiens
atggggaaaatgtttttaagcatctagcaaaggattcacggggctctggtaatgaagccccgaaacgacaagactggatcgcgcagggtagggccaacaccagggacaaacccccggcctct

SEQ ID NO: 71529 - DNA, 122 bp, Homo sapiens
aggagaagagagaagatagaaccagcagctgcagagacaagagataattccagcagaatccgtctaagaagacctttcatgtacttccctaggactagatgcataccgttttgtgaaaacca

SEQ ID NO: 71530 - DNA, 122 bp, Homo sapiens
gggatataaatatccgaggagggcgcgcaaggaccgtcaccacccagacttggaacatgacgcacggcgccagggcacccaggccccgctgcagtcaggtctggctggacggtgccacccga

SEQ ID NO: 71531 - DNA, 122 bp, Homo sapiens
ctggctgatggtgtatcactgggatgcctatagggcacaccagtctgtgaaatggttgtccgggtaccagtgagcaccctttgattgacgatgcgtgtctaaatgtttatttgcgtggattc

SEQ ID NO: 71532 - DNA, 122 bp, Homo sapiens
gagatggggtggtcagcctgggggctgcaggggtctcccaaggcctccctgtgggtctttcgagggcacaggccctgctcccggaggctgggagttctggccgcagggcctgtccttcagtt

SEQ ID NO: 71533 - DNA, 122 bp, Homo sapiens
gccagatcgggttggggatcgggatggccaactgggtcccttagtcggtcagctgcccagcggtccagggctgggcgggtgtgggggtttcggctacgtccacccgacctggcggcgtcggc

SEQ ID NO: 71534 - DNA, 122 bp, Homo sapiens
tgcatgccaagtacaatgtgaagtacttctcatgttcttagttaattctcagaaaatgctcgtcagtagttcccattactgccctcatctcacagtgggaaacttgtggcctggagaggtca

SEQ ID NO: 71535 - DNA, 122 bp, Homo sapiens
gcaaatgtgagctagggactccttgatacacaagcatacaggatcatatcaggacccagccggcagaccagacccaccaaaggctgtcacaggcgggctctgtcttcccccatgtgacctcc

SEQ ID NO: 71536 - DNA, 122 bp, Homo sapiens
gaagtgatttattcctgttgtttgttttggattagaccagaagcaacaggcccacaggaccggaagaatcagggaaccacaagtgaggagttagggcattgactaggagaacagatgtgaag

SEQ ID NO: 71537 - DNA, 122 bp, Homo sapiens
aatcagaaatcacctataatatcccctttgtgacaacaccgttgggtaaatatctagaaccggtgcctcgtcactgcagcagccccgcacgcagctgcccgggttcccctccccggacccta

SEQ ID NO: 71538 - DNA, 122 bp, Homo sapiens
tcagtgagcctggctcccgggtgatacccctgcaagactccacggaaggggacagggagccgggctccccacaggcacctgctgagaaaggcaggaaggcctccagcttcacaaagtggccc

SEQ ID NO: 71539 - DNA, 122 bp, Homo sapiens
tggccgtgcgtggggtgcgtgtgcacgtgtgcgctggcacacatgggtgctgggtgtggccgagcgcctctaacaagtgaaaacacgagtgtgaacctctctcccctgcgtcgccacctctg

SEQ ID NO: 71540 - DNA, 122 bp, Homo sapiens
ctgggcattcaggaccttgaggacacgtgaccccacccgcccaccgccactatcaggccccgggaccgcactgacaggaaaccttccgtcgtgagggagcacttcccaggggccgcagggac

SEQ ID NO: 71541 - DNA, 122 bp, Homo sapiens
agcagggcatccccctgacctggtagtacttaggtgggtaggatgattgggggcggttggcgtaactgagggaaccctggtcagactgctccgcaaatgattacagtgttatttctccggta

SEQ ID NO: 71542 - DNA, 122 bp, Homo sapiens
aggattgaccggaagaaaggggacgaccgttgtctcggttaccagggcgctgtggttttgcgtggcaagccagactagtcagaggaaagagccagagacaaacctcatcacgcctgtgtgcc

SEQ ID NO: 71543 - DNA, 122 bp, Homo sapiens
agtggtcccggggcgtcctgacttccaaggctctgggccttcgtgctgcggccaggagcgcgtcgccaagcgcctccccaagggtccccctgcaggggttcctgtcccctaggcacagagcc

SEQ ID NO: 71544 - DNA, 122 bp, Homo sapiens
ggctcaccccgtccgctcggccgctgctcgctgcccggccgcccctcggaggagccgcggcgctaagtagctcctcacccagcggctggaaacgcggcataaatatgtagggactgagccgt

SEQ ID NO: 71545 - DNA, 122 bp, Homo sapiens
taagaactttcaaatacagagaagaggtggtaacaaatcattagtgtataatattgtaagcgaaaaattagaattgtgtgctaagtactggggtaacacagagatggtaattaattctttct

SEQ ID NO: 71546 - DNA, 122 bp, Homo sapiens
aacaccagggggccccctccgccccacgctccctggtggccgcgtcattcctcctcaagccgagtgaggagggcagggaaagtcaccccggctgctgcccccatctcgtcccacgagaagga

SEQ ID NO: 71547 - DNA, 122 bp, Homo sapiens
tgttccttggtgttccggacacgacccacccagactccgccccagaccctccctcattcccgattctgccttcgttagcccaagccctacccgcctaacaccggaggcaccgcccccctccc

SEQ ID NO: 71548 - DNA, 122 bp, Homo sapiens
ttgagaaaccttagttgtaattagctgatattgcatagattgacaaattctccaacgtatcgcaaactttgggttctatttaaactcaggatgcattccagctatcaacaatggtgaattac

SEQ ID NO: 71549 - DNA, 122 bp, Homo sapiens
ttcattccaacatcgggtgggttggtttactttactaaaatccaagaaaaacaaggctgacgtttttgctgttggaaatgaaaagcccttttatgagaaagtccatccccgtcagcatggct

SEQ ID NO: 71550 - DNA, 122 bp, Homo sapiens
tgtgggggcggagccaacccacgaggccatgcttcaggcccctgattggttcaggagtagcgcttgacctaatgaggcgctaccaatgggatgcaaagagacgttccctggccttctgccag

SEQ ID NO: 71551 - DNA, 122 bp, Homo sapiens
gcacccctaaactacgcagaagcccaaacttcctgggggcagctgcctgcacccctggctcgtggaagctgtaaagaggcagctcccggctctccccggggtggcagagaagggcagagagg

SEQ ID NO: 71552 - DNA, 122 bp, Homo sapiens
atttatgtggagtggttcaaaacagaagttaatcactcgggaagcggacgggaggggcggcgctactgcgcatgcccgggagccgcctggagtttggaactccacattctttcagacccggc

SEQ ID NO: 71553 - DNA, 122 bp, Homo sapiens
ccctaccctatccagctcgattttatcaagttctgcaggtaaagcggtgtgacagatctacgcgatttcatccgggggtgctctcggatgcacggtcagtagcatgctgacaaccttaccgt

SEQ ID NO: 71554 - DNA, 122 bp, Homo sapiens
ggctggaaaccgtccaatcaggcacgcagctggaatgaacaggacggcttccggatttggcggggtctttgtctctccctgcagctggagctccaggtcgtctgttcactgctctctgtctt

SEQ ID NO: 71555 - DNA, 122 bp, Homo sapiens
tggcacgcagggacctgtagggtccaagcgcttccatgcaaacaaacgaccttgccccttcgggaaggaaggctcttttcaccagaaacccgtctgcccttgtgggctgggtggaaatttcc

SEQ ID NO: 71556 - DNA, 122 bp, Homo sapiens
ttttacttcatttattagtatgtaagagttcttgtttcatatcccttaccaacaaccgtacgtggtatcatatatttcaattctagccaatcctggtgggtatgtagttgtatttagtttta

SEQ ID NO: 71557 - DNA, 122 bp, Homo sapiens
caaacttgaaataccatgagttcaaaatgcatttaatacacctaactgactgaacattatcgattagcctggcctaccttactcatgctctgaacacttacattagcctacagttgggcaaa

SEQ ID NO: 71558 - DNA, 122 bp, Homo sapiens
cgtcacctgaacgacacgtggaaggaggcgcctgtggagagccctggggagggtcctgaacgtcacggggaaggaggcgcctggggagggtcctgaaccacacggggaaggaggcgcctggg

SEQ ID NO: 71559 - DNA, 122 bp, Homo sapiens
agctgacacttggggtttgagttccagacttgcagaccctgggatccgcttactcctccgcgccacggctgctgtgcttccagaggtggcgtgatgcctcccggggccatggtggggtgaag

SEQ ID NO: 71560 - DNA, 122 bp, Homo sapiens
cctgcggggacacaggagcatggtgagcacgcgccggggacgctcatgcagccctccctccgccatcaggggctccataaccatcactagtgagtgacacagctccaactacgacttcaaaa

SEQ ID NO: 71561 - DNA, 122 bp, Homo sapiens
ccacctcaccctgccccctgcccacctgagctgagatggggcacgtccaggttgggcagccgtagacagaggggttgcctgagatctctgtgtgcccaacatggaacaggcgaggcactggg

SEQ ID NO: 71562 - DNA, 122 bp, Homo sapiens
ctgcaccgcgcccgggttgggatggcagaggcttctcgggacgtgcggatctatgagtgccgtccccagggtagccaccaggggacgccataggccttccttccgtggtcctctttgccttt

SEQ ID NO: 71563 - DNA, 122 bp, Homo sapiens
ctccccacaacactgtggggtggcacgtaaagacctcaagggaagggggcctgggcgatacgctctcctgctgccattcatttgttcaagaaatagttgaacaaatgaatagttaaacaaac

SEQ ID NO: 71564 - DNA, 122 bp, Homo sapiens
gagagcctcccaggttcccccactcatagcttgtctccccggtctccaacaccaagctaccgctccacccctgacttcccatctggtgagtgagtctcctggtctaaacagcagaggggagg

SEQ ID NO: 71565 - DNA, 122 bp, Homo sapiens
aggcatgagccaccacacctggcctggaatctgtattttaaaacacccactaggttgggccgggcacattgactcacgcctgtaatcccagcactcaagaggccgaggcaagcagattgctt

SEQ ID NO: 71566 - DNA, 122 bp, Homo sapiens
tatcaataaaaataaattttaaaattttaaggagacaatcttgcttgcaaagagcactcgcgtgccagctgccgtggtgggtacgccgtgtgcagctccgcagagcagctggtgcgtggtcc

SEQ ID NO: 71567 - DNA, 122 bp, Homo sapiens
aggaaccattaagtacaggagaaagatgtggaaaaagtttaaataataaaatctttaaaacgtgacagagaattggagacatttggctaattaacattttcatagttaaagctcttagtctt

SEQ ID NO: 71568 - DNA, 122 bp, Homo sapiens
agttacatatgcatataatatgatgacaaatgaaaatggttaagacagcatgtatcttgtcgctaaaaggatactcttagggcagagacttgttttgtatattttgaatacgaattttagcc

SEQ ID NO: 71569 - DNA, 122 bp, Homo sapiens
taaataaaaactgtcagagctctctgcaatcttcagtttgggtcttccaggctgctgcagcgttgttcacaaatccacacacctctaaaggcaggcacagagcgctttcctgggtagtcggg

SEQ ID NO: 71570 - DNA, 122 bp, Homo sapiens
acaggtcgcatagcaccggcaacagcttctggggaggcttccgggggcttccaatcatggcggaaggcgaaggggagcaggcgactgacatggcgggagagggagcggcggcggggggcgca

SEQ ID NO: 71571 - DNA, 122 bp, Homo sapiens
agccccaggtttcctaaggcctcttagtgggtgtggctttgggcaccgaccagccaaagtcgttttccccgaggcttaaaggaacatttggggcctatactgagcaaggttccgacggatca

SEQ ID NO: 71572 - DNA, 122 bp, Homo sapiens
ctgccattcacaaaggtgtccaggggcactctgtgggtgctgggccgcaccgtcgggaagcgaggcaggacacagacgcgctcccacgcgaggtcgaggccgcgcccgcctgagcgctttgc

SEQ ID NO: 71573 - DNA, 122 bp, Homo sapiens
catcgcggcctttccccagaccagccaccggggactccagagaggcctcggcccagctcccggaaagggtctcccagccaggccttctagcggcccaaagcgggtaggcagagcgcagatac

SEQ ID NO: 71574 - DNA, 122 bp, Homo sapiens
gagctgggtgccccagaggctgctgggtcttgagccacagctgcagccaatgcagcagctcgcgcctccttcttccgtttctgtttttcctccttgaggcgcttgcgctccttcttctctag

SEQ ID NO: 71575 - DNA, 122 bp, Homo sapiens
cattactcacctggactggtctgtaaactcacagttcctcgtgtcaaattccggagactacgaaatcctctactgtgagtaccaccccggggttgtatgaagtctcgatctcagaaagcgtt

SEQ ID NO: 71576 - DNA, 122 bp, Homo sapiens
cgcctaaagaaacaactcgagcagggctctcagcaaggggaaagcttccctgacaaaccgcgtgtgttcttaagaaaatgtccaggcttgagcataccaatgtatgaaaaatcaatatacag

SEQ ID NO: 71577 - DNA, 122 bp, Homo sapiens
gagaggtgggagaggggggcgagttgggcgcgaggacaagggggtcacggcgggcacgaccgggcctgcacacctgcaccatgccttcaaccctgggagagggacgctctccaggggacccc

SEQ ID NO: 71578 - DNA, 122 bp, Homo sapiens
ggggcggagcggtgttcgcacacaaagcgctggggctggacccagggttcggggccaaggcgagaagtgggagcggggcccgctttggggacccggacagcggtgtggccaccgcgcacacc

SEQ ID NO: 71579 - DNA, 122 bp, Homo sapiens
cacaggtcttaagaggaaattatgatctatgcaaaataatgtccctgacctagtggggagcgggggtggtgtctgccacccagacctttttcctcccgtctgaagggccgagctctggcagg

SEQ ID NO: 71580 - DNA, 122 bp, Homo sapiens
cgaactcctgacttcaggtgatctgcccatctcagcctcccaaagtgctgggattataggcgtgagacaccatgcctggcctctttaatttatttttgagatagggtctcactctgtcatcc

SEQ ID NO: 71581 - DNA, 122 bp, Homo sapiens
actcctggaccccagcaaatgttcacacacctgcgttttcccagccaccaattagaagggcggacagagcgttcgcttattatatatccttgacctagggacccgctcaagcttcgtgtcca

SEQ ID NO: 71582 - DNA, 122 bp, Homo sapiens
cctccacccggggcccgcgcgccccagcccggatccccgacccccgcttccaccccagaacgtgcatagcaaacctcagggcttcaagagaacctaggggaaccgcactaggaggaaaaaag

SEQ ID NO: 71583 - DNA, 122 bp, Homo sapiens
aatgggaattttttagcttgtgcaattaaatagtctaggagtggcactggtgaggtagagcgtgctaatggacctgcccattatggattcattttgttctttcagtaacagaccatgcccag

SEQ ID NO: 71584 - DNA, 122 bp, Homo sapiens
agtatgggagtttttaagaaagcttctaaaaggctgaaaagatacgcaaatgaagaaactcggggctcaacacaccactttaaaggactacaggatcctgtttgcagagtttagaatgaaga

SEQ ID NO: 71585 - DNA, 122 bp, Homo sapiens
ttacaaacctggggtttgctcaggctcgccccgaccagccagggctgaatgtggcaggagcgtctcccagccggcgccccgcaggcactggcttcttctgagcatccccttagctgggggct

SEQ ID NO: 71586 - DNA, 122 bp, Homo sapiens
cgggtctcccctctgctcctcaccttccctctccaacccctcactctcccagtcagtggccgcctcatccccattgggctcccggaggctgacagccagcaccaaggcctgcaggagaccaa

SEQ ID NO: 71587 - DNA, 122 bp, Homo sapiens
cttgcgcgcccctcacccagaagcgcccgaggagtactcacacgtccttggcaggcagcgcgcggccctccaccacgcgaacattcagggagctgctcttggccatggcgcctagccacaaa

SEQ ID NO: 71588 - DNA, 122 bp, Homo sapiens
ctattggtcagaagaggacctgggggcggggccgcgcgtgccgttgcagaggcagcgggacgcggccacctcgaagccacgtcagggcagccccaggtcgggcgcgtgccagcagccagagg

SEQ ID NO: 71589 - DNA, 122 bp, Homo sapiens
cctgctgctgccttaataaagatttcatcctcttcctgtctcctgctctatcctgatgctcgaccttgggtaccaccattgggtaccagtatggtgcctgattatagtagatgaaaagtcaa

SEQ ID NO: 71590 - DNA, 122 bp, Homo sapiens
gatctgaagttagctggcagaaatctcccaagagacattgactaaagaaacaaaacagctcgtgattttttttttttagaacaaaaggaatttaaaagaaccaaaatggaagtgttatcagt

SEQ ID NO: 71591 - DNA, 122 bp, Homo sapiens
gcactccggctcctggagcggttgggagggcgcctggatggcttgcatctgcttctgtgacgcggaggcttccggaggcgtgggctctggaggtggaggtgccccagcttcaggttcccacg

SEQ ID NO: 71592 - DNA, 122 bp, Homo sapiens
cgtgtcgtgagagtgctggctggtgagagagcatgtgggtgggtcgacagggcacactcacgtgcctgtgtgcaggtgtgtgtatgcggtgtgcacacggtggagcgtgtgtgagagagagt

SEQ ID NO: 71593 - DNA, 122 bp, Homo sapiens
cccccagggcaccctatcaagggcacggtcgttacccggcgccgctgccccagtactatccgcacccctcccactgaatgggagtccggcaaccgccgagggccacacttcctttccctagg

SEQ ID NO: 71594 - DNA, 122 bp, Homo sapiens
gggaagctacggtcatgctgcaggttctagtgatgaacaatcccctccaaatctgcagagcgggaatgaaatgagaaattacctcctccctgatactcctctggagaggcgggggaagtgcc

SEQ ID NO: 71595 - DNA, 122 bp, Homo sapiens
ggaggcgccccaagccacggtccgctcccaaagagaagcccagactgggcccacagtacccgggaaggtgagtccttactcgggggcccagatctccccacggaggccacagatctgggtcc

SEQ ID NO: 71596 - DNA, 122 bp, Homo sapiens
gccgcccccgccccacctgccgcccccgcctccgctcttccccaccactgccagccccggcgggaggatgaacgccaacaactagctgccgagctgcacccgtgcacccgctggggcctgga

SEQ ID NO: 71597 - DNA, 122 bp, Homo sapiens
gcgccctcgttggccaggacgggaccctatgcaaataagcggttgccttggaaacggccccgccccctgatcacgctcccggtatctcccagaacggcgggtcgctgggaagtcctgggata

SEQ ID NO: 71598 - DNA, 122 bp, Homo sapiens
gcagaacatgcgcgagtctcttttgttctggaacgggccgagccccaggaagtggagctgcggagctgaggcctcaccgtgtcttggcccaccctgctcagctgataggaaggtgtgtcacc

SEQ ID NO: 71599 - DNA, 122 bp, Homo sapiens
aaaagccgccttttgaaagccggagtgcagtgcggactggctgaggccggggcccaggcgcgcgcctccttcctgcaggcggcccggggcatcgatcgcgcggggcgtaatgaaccctaata

SEQ ID NO: 71600 - DNA, 122 bp, Homo sapiens
gatgagctcatgagggtgggcattagtggctttataggaagagaaagagagaaatgggctcggctgcttgatcccccttcacagtgtgcaccctggactgacctggggctctgcagagagtc

SEQ ID NO: 71601 - DNA, 122 bp, Homo sapiens
aataatctgtcactcaatttaccaaaaacactagactgagaaaggctctcagtttgttaccgttttattgagacatccaaatctttaagacagtccacaattgtgcttctgtgcctctgtac

SEQ ID NO: 71602 - DNA, 122 bp, Homo sapiens
gttgtttttatgaagatccgggaaaacggttgttacaaatacagctctgcaccaattctgcgccagtctgtttggctacagatgctttcagtggaggggacactggggcttgtgttcccttt

SEQ ID NO: 71603 - DNA, 122 bp, Homo sapiens
gcggggccgcggggggggggtggcgtgaggatggggccgaggaggacgcgcgcggctcggcgccccacttccctccctcacccctccctcccggtgcccgctccccgcggccgcgccgccct

SEQ ID NO: 71604 - DNA, 122 bp, Homo sapiens
tgcctagagtcacagttggtttgccgaaggactgtgaattggttctgtcttcagactccccgtttagctgaggagtgggggctactagatttggtgtcagaaaaccagttcctccacttctg

SEQ ID NO: 71605 - DNA, 122 bp, Homo sapiens
gaccgtcctcttcctgtggcatccagcgccttggccctgagccacatgcgactaacgtgccgccgacctgaacccagtgcggccaaggcactgcatctttcatttatttaattttattcaat

SEQ ID NO: 71606 - DNA, 122 bp, Homo sapiens
agctctgtatcttctaggttgcttaattcatttagcaaatccacagcttaggtaccacctcgaggggagggagggtgggggtgttgaatgaagcaattcaacttagaatcaaattttgtaaa

SEQ ID NO: 71607 - DNA, 122 bp, Homo sapiens
gctagtaaccgcctcagcccttcaggcctgaaatatgatttcactttccacaaagccagacgatccagtgccctcaactttcctccactccatgtcagtcctttaaaatcacacccgccctc

SEQ ID NO: 71608 - DNA, 122 bp, Homo sapiens
ggcttccgctccctcctcactcaccgggttgtcctaggggtgaagggagagttcacccaacgcggtggacaaagcccttggcgcacccaaaggcctgcacaggtcgtagctattgtgatgag

SEQ ID NO: 71609 - DNA, 122 bp, Homo sapiens
ctaaggtgatccacccgcctcggcctcccaaagtgctaggactacaggcatgagccaccacgcccagcctcttggccactttttataccaagatcaagttgctcggggtttgaggagggaat

SEQ ID NO: 71610 - DNA, 122 bp, Homo sapiens
aataatccttttcctcggtccggctgtgctgcacactcactctggaagcatcctagagggcgggcgctgctcctcaccctcagaacccggggagccatttctctttcatgagtgtctctgaa

SEQ ID NO: 71611 - DNA, 122 bp, Homo sapiens
gccccgccgccctccagctgcgacccaggggtcgggttagggttagggatgtgtgggagccgcctctgctgcctcctctgggttgggcaggccggcgcgagcccgcgaccacgggaccctcc

SEQ ID NO: 71612 - DNA, 122 bp, Homo sapiens
tcctaggagctcctaaggactctggaacctttccacggggtcttcaaccttcacaggtcccggggtgctgagcccaagaaagagatggaagtcaaagaccagcacgatcagacacacacctt

SEQ ID NO: 71613 - DNA, 122 bp, Homo sapiens
gttccttaacagctaagctcaaaatatgttgttggtaagaaatgacattatggaacacatcgtgtttaagtatgcgacctgttgaagagtgtgtcttggttcttaatcttgagatccatagc

SEQ ID NO: 71614 - DNA, 122 bp, Homo sapiens
ggaccgctgcccggaatgcgtcccatatctgcagccccgcccccagtcccggctccgacccgaggccccagccccgggtcccacaccccgcccactggctcaggcttacctggagcgcagcg

SEQ ID NO: 71615 - DNA, 122 bp, Homo sapiens
aaatggtgtgaaaatagctcaggtaggaggaagcgcagtcagatgcggcatggcggcgggcgcatcgggaaaccactgggcgcccaccccggggagggtttccacctcagctgggcgtcctg

SEQ ID NO: 71616 - DNA, 122 bp, Homo sapiens
tcccaccagcctccggggctgtagtctaaggggcccatgagtggtgtgcagtcgagcgctcggtgttacctgcacgcctctgccactgtcttcgaggacctgcaggtccagcccctccttgc

SEQ ID NO: 71617 - DNA, 122 bp, Homo sapiens
taaccctaactgtgcacaggaccgcgctctccgacccctttgtggcctctcccagaggtacgggctgcgccccaagccagcagtctctcgtagggcctacagccggcagccgctggagcagg

SEQ ID NO: 71618 - DNA, 122 bp, Homo sapiens
gagtcgggacccatctggcccattgtgctgtgccctgctgtgcgttatcacatcaaggtgcgcgccggcagaggcttcagcctggagctcagggtggcgggcattcacaagaaggtgacccg

SEQ ID NO: 71619 - DNA, 122 bp, Homo sapiens
ctctgtcacccaagctgtagtgcagtggtgtgaccgtggctcacagcagacttgaactcccggcctcaaaccgttcccccgacttcagcctcctgaatagataggactacaggtgcgtgcca

SEQ ID NO: 71620 - DNA, 122 bp, Homo sapiens
ggctgagcagaacataggcactacagttaggcacggcagacctgcacctgctctgtaacccgtgttatagattacaatctggaaagtggctgatcatcacaaccacccgctgtgaagaataa

SEQ ID NO: 71621 - DNA, 122 bp, Homo sapiens
tgtccctccgaatgacccactgtctccccacaaggccctccaggagcgccgggcccgctgcgagacgcagaacattgaccccgtggtgtggaccaaccagcgggtgctcaagtgggttcgag

SEQ ID NO: 71622 - DNA, 122 bp, Homo sapiens
atgagcagaaaagaaagcaaaaactatctgtaatctcaccacttagaagaccaaacaaaccgctattaccactgtgatttccatcccttcagttttaaaaaaatatatgtacaagtattttg

SEQ ID NO: 71623 - DNA, 122 bp, Homo sapiens
aagtggttaatttgcattgtcagggtgaaattcaacagaactgctttagggtaaaagtctcggggcctacaaggagtttcctcctgagcaaaaggtgagggaggtaagtagctatctattca

SEQ ID NO: 71624 - DNA, 122 bp, Homo sapiens
agctcagaagcttagggtgccaggcccccagcactataggtgggtgtgtgtgtgtctgtgcgtgtgtgtgtggtgtgtaggggtgggggcgacctcctctaccagccttacttggcggcgga

SEQ ID NO: 71625 - DNA, 122 bp, Homo sapiens
gtgtgctcctgaagcccaggcaggaagaaggagcctgcgtgttcagagtcaagaacaccacgcggtaatggtagagagaccctggaggtcagaggcctagactcccaccgccacctgaccct

SEQ ID NO: 71626 - DNA, 122 bp, Homo sapiens
taaccatgcagaccaacctagtgtgggtccaccaaaggtatctgtctgctggattctgcccggtgggtagatataatgtggaagcaacaataaatttatatggtgggaaaagtgtgttaact

SEQ ID NO: 71627 - DNA, 122 bp, Homo sapiens
catgaaggactttatgtgtcaggggagatgcttgtgatatattgtctaaggccagggggccgtgaatgggtttgggcaggaaagagttagactcaactctttggctgttggaaggattccta

SEQ ID NO: 71628 - DNA, 122 bp, Homo sapiens
tttaggtgatccgcccgccccgaccttccaaagtgctgggattacaggcgtaagccaccacgcccagccagaaagccttttctcgaggtatgcgttacaggctgagcccaggacaggtgggc

SEQ ID NO: 71629 - DNA, 122 bp, Homo sapiens
ctgcaggcctgtgtctctctccaccctctgcagctcatcgacaggaccgagtccctaaaccgctccatagagaagaggtctgtctgtctgtctgtctgctttctgggctcagatcttaggtt

SEQ ID NO: 71630 - DNA, 122 bp, Homo sapiens
cctaaatgactggatcactgggatcacccaagtagccccacagacatcgatgtctatagccggtggtcatctctctgccttctctcatcctaagcccctctcgtgtagcatccaaccgaagc

SEQ ID NO: 71631 - DNA, 122 bp, Homo sapiens
gatccctcccaaatgcagtaataggtcagctattactataccaacctccagagcttcacacgcatccttcccttagcctaagattatacttcattttacaatttcagagatccaaccatctc

SEQ ID NO: 71632 - DNA, 122 bp, Homo sapiens
gtcttcagcaatagccttgatgctccaaatcatgtgtttttgcagctgctttatgctagacggagcatgaaagactttgctctatggcctttacacactccattctccaaataacaaattgg

SEQ ID NO: 71633 - DNA, 122 bp, Homo sapiens
ccgtgcccgtctcaggatagaaaggaaactggaggctgcagagagaaggacctgatgggtcgtagctcagcatctgccgaagccccatctagaaataggttctcgtcctgggaggtgtggga

SEQ ID NO: 71634 - DNA, 122 bp, Homo sapiens
cccaggcagactgccttctttcaccctgtcctgatagacttccctgatctagatatccttcgtcatgacacttctcaataaaacgtatcccaccgtattgtaatcatggtacttgtttttca

SEQ ID NO: 71635 - DNA, 122 bp, Homo sapiens
aggagccagggccgcggactaggggagcgctggacgctcagggaccaggacccaggcgcccgagtccccagctccactgtcctccgcctctacactcggggattctggagaccacgtcgacc

SEQ ID NO: 71636 - DNA, 122 bp, Homo sapiens
gaggctgctttacgccccagaaaccataacaccgatgattctgatgatttttatgactaacgtgctgtgacattggtttcaaataaagtctttaaacaaactaaaatcctgtgttaatatgt

SEQ ID NO: 71637 - DNA, 122 bp, Homo sapiens
acttgctaatgcagggtgactgacagcttggctgatagtggggtcacttggccaaatcttcgcaattatcttccctaggcctccatttcgggaattctgagtcccggtaaacggttgggttt

SEQ ID NO: 71638 - DNA, 122 bp, Homo sapiens
ctgttttggtttaaagcacaatttgggttcacataacacctcattatgcttccccgacatcgtttccacaccagcatcagatgctgggaactagagcttgaaaacactgcagggccgcagag

SEQ ID NO: 71639 - DNA, 122 bp, Homo sapiens
cccctctctccctgccctctccaggcgccaggcacgctcttccccagccagggaccgcggcggggactcaccaacagcaggaccgcggcgacaacgagcacaagggtcttggggacccgggg

SEQ ID NO: 71640 - DNA, 122 bp, Homo sapiens
ggtgaagcggctgcagcgcgttctttaactttcccagaaagacctacagtttgtaaagcgcgcgatctcatgcatgtcccagccagcccagcagctggggggtgcagggccacgtccagtct

SEQ ID NO: 71641 - DNA, 122 bp, Homo sapiens
caggagataaggggtgagcgtatgtttgctgcggagggcagccactgttgccccatccctcgggcacagaacctcagccgctgcctggctgctgctcaggcctgatttcctcttcttaggca

SEQ ID NO: 71642 - DNA, 122 bp, Homo sapiens
ggagcatctctacccagccaccaccctgtctgggaggtgaggagcgcctctgcccggctgcgaccctgtctgggaactcaggagtgcctctgcccggccaccccatctgagaaatgaagagc

SEQ ID NO: 71643 - DNA, 122 bp, Homo sapiens
acagaggtacacttgctttaagcaaataggccacttattgagataaataaaaactaccttcgtaacctttggatttttaaacttagaaaggacttttaaaagaagtcttcccacttccaacc

SEQ ID NO: 71644 - DNA, 122 bp, Homo sapiens
agcgcgcggggtgcggccgccgggatgcccgatccgagtcgcgcgggtggcggcgagcggcgctattgtcttaaagataaagcctaagccacggggactgcctcctcctggactctggagag

SEQ ID NO: 71645 - DNA, 122 bp, Homo sapiens
gggggaggggcaggtggtctcatgcctgggccagccacttgcggattctggctgctgggtcgccctctggctgaggtccccatggaagggggtgcatcttgggcttgctgaccccagggctc

SEQ ID NO: 71646 - DNA, 122 bp, Homo sapiens
gtttgcgccactatgtaaataattttccaacattgcttgttggggcaggtgtcagagcttcgggaagaggggaagcaaaattatttcagaacagagaaatcaatgtgagttatttattacaa

SEQ ID NO: 71647 - DNA, 122 bp, Homo sapiens
cattgcgatgcagtcacagaccagggacaacggcaaaaattccagccctttggaaaaattcgacatctgatgtcaactggaggcagaggctgctatcttagtggtagcgagtgggttacaga

SEQ ID NO: 71648 - DNA, 122 bp, Homo sapiens
acagttgacagggtcccttcccttcacaggtgagccatgtagtccacaagtggaggtggtcgtaagtgaaaaccacattaccagcatggtaaagggttagaaagagggcaccgggtgggcga

SEQ ID NO: 71649 - DNA, 122 bp, Homo sapiens
aaggtattctacttccattcgcgttttcttggggaaggcagtgtgccgagcgcgtgtgagcgtgtttggggcttgtccaagactgtcactgcttgaaaatgggcttttcttcggatcggagg

SEQ ID NO: 71650 - DNA, 122 bp, Homo sapiens
gcctgtggaccagcagctctactacaagtcctacttcctctttatctttggcatagaattcgtgggccccgtggtcaccatgaccctgtgctatgccaggatctcccgggagctctggttca

SEQ ID NO: 71651 - DNA, 122 bp, Homo sapiens
gcgcggacgccagacgcacacgccggaagtgacgcagcttcgtgagcgcggagcggggcacggcctccacctgagagcgcctcgccccatagccacgcccccacccaaggaagcagtcggga

SEQ ID NO: 71652 - DNA, 122 bp, Homo sapiens
acccctcccaaggacaagtgcctctcgccagacctgcccctgcccaagcagctggtgtgtcgctgggccaaggtgagtgggggccagcaagagtagtgtggagtctggggcaggtcaccccg

SEQ ID NO: 71653 - DNA, 122 bp, Homo sapiens
tggcggccgccggcttgacgtgtacggcgctgatcacctacgcttgctgggggcagctgccgccgctgccctgggcgtcgccaaccccgtcgcgaccggtgggcgtgctgctgtggtgggag

SEQ ID NO: 71654 - DNA, 122 bp, Homo sapiens
tcactatgccttcaacgccgacttccggaaggtgtttgcccagctgctggggtgcagccacgtctgctcccgcacgccggtggagacgatgaacatcagcaatgagctcatctcctacaacc

SEQ ID NO: 71655 - DNA, 122 bp, Homo sapiens
actgtcccatttcagtatttcctaaagagatctcccagacctccctccctgcaactctcacgctgccacctagggagtccccatttggatgcccaaagaagcaccctctggcacctcctgga

SEQ ID NO: 71656 - DNA, 122 bp, Homo sapiens
ccgaggggtcgtgtacggggaggctggatgccgggacgggggggatccactccagactcgcgccaagccaatggaaagcctcctatccaatatcccccaggtagtcgcgctgcccacacctg

SEQ ID NO: 71657 - DNA, 122 bp, Homo sapiens
aggcctgctccacctgaggccccgagacccagcctgtcgaggacagagacggacgctcatcgaaggaaggggcagctgagtgtccttctcagagaagcttcacgatgacgatgaccagaaac

SEQ ID NO: 71658 - DNA, 122 bp, Homo sapiens
agagagctacctgccagcatgttccttcagctcgagtttggagtccagccctggaggctgcgcacctcctcccaaatgcaggcttgtggctctggaagctgccactggggtcaaaatggcat

SEQ ID NO: 71659 - DNA, 122 bp, Homo sapiens
cgccgcgctgcacgcccggggtgaaccctctgccctcgctgggacagagggccccgcagccgtcatgctttccgccatctacacagtcctggcgggactgctgttcctgccgctcctggtga

SEQ ID NO: 71660 - DNA, 122 bp, Homo sapiens
cctctgcggccgggtgatcccaagaccccggggtccagggaggcacgggatctgctcccccggtcccaaatgcaccggctgcgccttaggagggacggcctccacccatggcgctggcgccc

SEQ ID NO: 71661 - DNA, 122 bp, Homo sapiens
aatttactgctcttaattcttatgcaaattctgacctccgatggcgcctatcaattaccccgcccgcagtgaaagcgaaagcgacagtttcttctcttcgcttttttttcttttttaagaac

SEQ ID NO: 71662 - DNA, 122 bp, Homo sapiens
gcaccggcagacccagaactcatgtatttgctcctggttcccagtctcggggaccctggccggcacgcgtcctcaaatgcggcttttttcagatgccggataattttcaaaacagaaagtag

SEQ ID NO: 71663 - DNA, 122 bp, Homo sapiens
gcactgtgctgagctgctgcagcaggcacagcccagacgcaggtgcagcctggtggccggcggggagggcggccctggggaggtgaggccagcgctagggcaggctggcaatgcgtcccaga

SEQ ID NO: 71664 - DNA, 122 bp, Homo sapiens
ccagggaacaccagcagccacaggagctggaaggggcaagaatggattctcccctagagccgctggagggatgtgggccttccaacacctcgatttcacagccttgggacttctggcctcca

SEQ ID NO: 71665 - DNA, 122 bp, Homo sapiens
gcccggccgcgccaggtacacgggcaggtcgtcctcggtgttccacgcgcgccgccggtccgccatacccgtccaaggccggccacccaccgcgctcccgcctgcccgcccgcggccctggg

SEQ ID NO: 71666 - DNA, 122 bp, Homo sapiens
cgtggccatcctaagaactgcaatcctctgttcctgctcagccccttctgagcatcaaggcgagaatttaaaaataaataaataacagctaattttttgagggaactaaccatgttccaggc

SEQ ID NO: 71667 - DNA, 122 bp, Homo sapiens
gctccttccaccggccggacctaggaaggacccagggtccaaacatggcccgaggctggccgagagcacaacagccggcgggcgctgacgggcacggagcgcacgggaccgcggaggaaccc

SEQ ID NO: 71668 - DNA, 122 bp, Homo sapiens
gttccttgcttgagaccttgaccattttgaggctgtccttctgcacaaatatggaaattccgcactttttttgtgatccttccgaagtcctgaagctggcctgttctgacaccttcatcaat

SEQ ID NO: 71669 - DNA, 122 bp, Homo sapiens
cacttctcagatggggcggttgccaggcgcagggtctcctcacttctcagacggggtggccgggcagagacgctcctcacctcccagacggggtcacggccgggccgaggcgctccccacat

SEQ ID NO: 71670 - DNA, 122 bp, Homo sapiens
ctttctgtgcgccagttcacactccgggtcagagttcctggcccggtgcacctgagaggtcgctctccgactcccgcgctggaccctcttgcgccattgaaccccctgatccgggggcctcg

SEQ ID NO: 71671 - DNA, 122 bp, Homo sapiens
tggtcagtatgatctcctgtggcatttcttcagttgtgaatcactcatgcatcgttatttcgctttttacaatcttgatgtgtgtgctccaacaagactgaatgttccctgggggcatcaca

SEQ ID NO: 71672 - DNA, 122 bp, Homo sapiens
ggctgtctgtcagcaatgataatggatcctggggaacctggggtcagaccgtggctccatcgccagctctgtggccctgggcaaactgctcagcctccttcagagccactctcttcccctcc

SEQ ID NO: 71673 - DNA, 122 bp, Homo sapiens
tggcaaacagcccgggccccagccctggggtgagagcctaaggcctggggtagaaggtgacgtaaccaggacgcggtgagatgtggcgcgcgcgcctaaactcgcgcggggcgccagcagct

SEQ ID NO: 71674 - DNA, 122 bp, Homo sapiens
tccaagaagcagtatcagcactctgtccattcattcaatacactccagcacctaaagcatcgctcatcctagaaaatcatggttatcagggaaggagagctaaaataaaaaaaaaaaaaaaa

SEQ ID NO: 71675 - DNA, 122 bp, Homo sapiens
ccgccccctgggtcctgcaggcgcccgattggtggatgattctctccaggtgaggacctacgcgcgagggggcggggccagacgggctcacatgatttgccggcgactgtagcgccggtccc

SEQ ID NO: 71676 - DNA, 122 bp, Homo sapiens
tgagcgtcagtccgaattcacaaatttcaagcggatccggattgctatggggacctggaacgtgaacggaggaaagcagttccggagcaacgtgctcaggacggcggagctgacagactggc

SEQ ID NO: 71677 - DNA, 122 bp, Homo sapiens
agccaaggccttcattctgggctgggccgccgggagggggcgcgcgagacccgcagacagcggaactggagcccgaactctggttcgcactgtacaggcctgcaatgagtctcactcgcctt

SEQ ID NO: 71678 - DNA, 122 bp, Homo sapiens
aatttacatagtgatttttatttacattatcatatttaaacttaatcaaagtccttggcacggcccatggaacaagctccatttttttgataaagaaactgaggctagaaaagtttctatgt

SEQ ID NO: 71679 - DNA, 122 bp, Homo sapiens
cactgagacttttttaaaaaaataaatcttagcaagaagtgatgtggcataacatggtaacgcacatcaattgattcaatcacccacggaaacctcccactggcatcaggaagcaatttgta

SEQ ID NO: 71680 - DNA, 122 bp, Homo sapiens
gcgctcaggccccttcgggacaactaccttctagttttgcgcggctgagagtggactttgcggagcgggtggccggtgctaccctttggaggtggcgcggctctaggcggagcaatgagcca

SEQ ID NO: 71681 - DNA, 122 bp, Homo sapiens
gttgcgtcaacgcctttagcgcccggccggtccgcactgtatcctgggagccggcgcggccgacgaaggcacatgaggcttcctggaggcaggcagccgcacagccccacctgcagctccgg

SEQ ID NO: 71682 - DNA, 122 bp, Homo sapiens
acctaactaaacaaattgtgacacaatcgtgacagcccggagactgcatcccatccctcacgtcccatgacaatgcccgggaaagcgcagaggtggacagtgactcaggcgcagacacaggc

SEQ ID NO: 71683 - DNA, 122 bp, Homo sapiens
ggtcttcgcctcgccgggttcggaacagcaggctgggatcagcaaccatcgagacgcatccgccgagacctccgagcatcctagagaggacacggaagcgagtctttccttacgcacctgtc

SEQ ID NO: 71684 - DNA, 122 bp, Homo sapiens
ttagctgattcttttcaaatttatctcaaaatttctaaataacatgatttattgctacttcgtgacgtttcagtttcagacagtatctgttgaattcccactgtagaaagtgaggatttaac

SEQ ID NO: 71685 - DNA, 122 bp, Homo sapiens
agacggccccgagccgggttggatacgtgggttcctagggaggtgcacactagccgaggacgcctctcagatgctgctgtggccagctgctgacgagcccggccggagggcactgttcccac

SEQ ID NO: 71686 - DNA, 122 bp, Homo sapiens
gagctccaccccttctcgttcccagaagcagcctcctccccgccttccgagtgctgctcccgggatactctagaatcccggctgcaaactggctgcaaagaagagttgctcgcgcgcaaggc

SEQ ID NO: 71687 - DNA, 122 bp, Homo sapiens
tggcgctgtccgcggtgctgaagctctgagtctggcgccgccaagggctggccttggaggcggttaccagagaggaaggggtcacagagcgaggactctccactagacctgagccctctgtt

SEQ ID NO: 71688 - DNA, 122 bp, Homo sapiens
gcccagcgccggggacctagggctttgcaggagtccgcccgggagctctatcagagcgggcgtcctccccgccgctccaaaggtggcttggggcaggtggggcgtcccggagggaatggagg

SEQ ID NO: 71689 - DNA, 122 bp, Homo sapiens
catggaactgggaccaggacccactgactttagctggtggtttagaatccacaggggcctcgttaaagatgacagagaaattaggatgtggtagatctggagtggggcctgggaatctgcat

SEQ ID NO: 71690 - DNA, 122 bp, Homo sapiens
aagccccgcccctctctctggctttaggccgctcccaagcccagagctgctctgcgcaagcgcgaccgaccgagcagctccgaggagtccgcccggaaacaaacattccccagggcaatgtc

SEQ ID NO: 71691 - DNA, 122 bp, Homo sapiens
gaatgacctatgacatcagagattccgaccttcctgattggaaggaccggactctgtcggcgcctggcagttcaggtgaacaacagtaacttctcagagctgttctccactcctgacttctc

SEQ ID NO: 71692 - DNA, 122 bp, Homo sapiens
caagtaatcaagtacagtcatgcatttcataacatttcagccaacaatatacagcatatacgaatatggtcccatgagactataatatggtatttttactgtaccttttatatgtttagata

SEQ ID NO: 71693 - DNA, 122 bp, Homo sapiens
ggtggtttcagctgcactatctgtatgaaatggtgtcaccaaaacccttttcttcagtatcgacaaagattacattctgagtaccaaccaaaccctaaattgaaagacaaaactatggtttc

SEQ ID NO: 71694 - DNA, 122 bp, Homo sapiens
agtctctgtccacctctgtctgttagatatgagtcccctcctgcttccccttgtcaggtacgtgtctccatctgttttctattggatatgaattcctcctgcctctgcctgttgggtgcgtg

SEQ ID NO: 71695 - DNA, 122 bp, Homo sapiens
tgaagttaaggaatggttcccaagacccctcttacttatgacaccaatagcaaatgcaggcgtccctgagaccactgtggggtttgatgatttgctagaaagattacagagctcactgatca

SEQ ID NO: 71696 - DNA, 122 bp, Homo sapiens
cgatgcgtcccccgttggtcgttgagcctgcctctgattggctggtttgtacctgcaatgcgtcactgggactcgcagccgccgccgggacgcggtgcggcttctgccgttgctgctcgggc

SEQ ID NO: 71697 - DNA, 122 bp, Homo sapiens
cagaggaccagcgacaaagggtggggacaaacgccaatatgccccgctggaggcagaggccgggagtcaccaaaagggctggggataaaatgagccttagcccataccctatgattggaatg

SEQ ID NO: 71698 - DNA, 122 bp, Homo sapiens
gcaggcatagagcaggggagcagcagagaaggcgcgagaagaaagggctgaggccaggttcgactttgagcctacagctaagttagtgatctcagtcagttcagcaaaactcaggagaggga

SEQ ID NO: 71699 - DNA, 122 bp, Homo sapiens
tgggcacagtgcaaaggctgtgtttgctttgcctgtgcagaattaggaggtttgggaaaacgggctgttgtgagagaactggttatttacagcttcgcaggaaagtaataacaaatttacca

SEQ ID NO: 71700 - DNA, 122 bp, Homo sapiens
aataatggaagctacagtcttatccagttcctttcaactatttacatagaataagccctccgaacgtgaggatgaattattgttcaacctatccacactaaacatcaaaaagccaacttagc

SEQ ID NO: 71701 - DNA, 122 bp, Homo sapiens
aatgccccgcagaggccctaggagctggttcatgggacttcacgcgcctccagtgtcttgcggagccccagccccagcaagcagcggctgaaattggtgcgccttgtgctgtggtctgggtg

SEQ ID NO: 71702 - DNA, 122 bp, Homo sapiens
agagggagtcctggacagccagacccctgctagcttggccaccacaggctccggccagcccggctagggaagagttaatcggatcggctttggctgatagttcaggctccaaagttcagtcc

SEQ ID NO: 71703 - DNA, 122 bp, Homo sapiens
tttctagtccacagtgtctacgtaatgcctagcacatcataggcgcctaggagacacctgcgcatgaatgaacagtgtcttcactgctttggtcctgccctggttaggacccttgccacctt

SEQ ID NO: 71704 - DNA, 122 bp, Homo sapiens
agtttcgctctctctggggcggggcgagcggcgggcggcgctgggccagccaagttggagcgcgccccgcccggcgccctcgccgtccccgcgccctccccgccggggcgcgctgcccgcag

SEQ ID NO: 71705 - DNA, 122 bp, Homo sapiens
ggtggctgccgccgccgcacctgctgcgagatagtgatcttcgtcgcggaagggtgagggcgcccactgcaggaggaggtgcaggtgccgcggccgcctggctgccgggagccgaaagcttc

SEQ ID NO: 71706 - DNA, 122 bp, Homo sapiens
ctggataacttgtccaggaaggtgcccctcccttttggagtgaggaacatcagcacccctcggggcaggcacagcatcacgcgcctggaggagctggaggacggcgagtcctacctatgttc

SEQ ID NO: 71707 - DNA, 122 bp, Homo sapiens
ctgcgaaagaagctgggcaccctctttgccttcaagaagcctcgttcaacgcggggtccacggactgatctagagaccagccctggggcagctccccgaacccgaaaaactacatttggcga

SEQ ID NO: 71708 - DNA, 122 bp, Homo sapiens
cctccttcccgcagatccccaggcgtgcacagcaggcagaagctgtgggggagatcgcagcgcccgctgtgtcctcccggtgaccagctgtcacctgagcccagggcgcctgccccagcagc

SEQ ID NO: 71709 - DNA, 122 bp, Homo sapiens
tgaagtcatagttctcgtcactgaggcaggggtccagcgcgaggtggtggttgtggtcgtcggtgcccggcgccaaatgcagcccgggttccccgcgcagcagggccaggggcacgtcgccg

SEQ ID NO: 71710 - DNA, 122 bp, Homo sapiens
tcaaatgatacgcagctactccctttaaaccctgcttcccctccctgtgagctttcatttcgatatcttctaagccaaagtcaggcaaagctctggagaagaaaatggcttggctcctcctg

SEQ ID NO: 71711 - DNA, 122 bp, Homo sapiens
aggccgggtgtctgccactcactgtcacccgcagccaggctggccaataagcacggggggcggagacacaacggccaattctcggcttcagggacgggactaaagtctcgaggcgggtcttg

SEQ ID NO: 71712 - DNA, 122 bp, Homo sapiens
gcccgcgccccttaaagtgatctccagttgtccgaaaggcccgccagggatctggcgaaacgggggcgggggagggctcagggaagaggagaagctgagcccgggccccagaagctcggtgg

SEQ ID NO: 71713 - DNA, 122 bp, Homo sapiens
gagtaggggtctctctccctttgtctccccaacgtcaatcaggaggcagccttggaggtccgtggtcctaggacagtgtgtagcccttcgtgtgtgtgtgtgtgtgtgtgtgtgtgtgtgtg

SEQ ID NO: 71714 - DNA, 122 bp, Homo sapiens
ggtctgcaggcttcgggggagggccggtccatccacatgcttcctggtgcggagggggctcgctggattccaaggaccagggccagggcctccatggagtcccgttggaccctaaagctctg

SEQ ID NO: 71715 - DNA, 122 bp, Homo sapiens
cggagaagtagaggctttcgtggtcggggctgaaggtgacagtgaagtcttgtgtcttcccggggtccatgacgcccttgacgggggccacgctgaacacgctctgaccgttgagattctgc

SEQ ID NO: 71716 - DNA, 122 bp, Homo sapiens
tcctcccaccttctagtcctgactgagggggcccaaaagcaaactccccgggggcttaaacgctcggattcctgagaaacggcaagtgagaaaggagttgcagttgtacgaagaaggagcga

SEQ ID NO: 71717 - DNA, 122 bp, Homo sapiens
attgagaagggagagagtggacacaggaaggatgcgcctctgtccagtcctgaggctgggcgcacacaccaggcccttcgaaaagctcacattttttccagcttttctcacccagtatcact

SEQ ID NO: 71718 - DNA, 122 bp, Homo sapiens
ttggggaaacaacaacccaaacaaaaaacaaacaaaaagaacctcggactcttttcttgtcgctgtccgaggagttctcggggcaaatctggtctgatgtgcacttaggccgagctacagtt

SEQ ID NO: 71719 - DNA, 122 bp, Homo sapiens
ttctccccacccccggagctgatctccacccacactcagccctgcctccaggcctggtaccgcccacagccccgctccagagttggtccccgcccccggaactggtccccgtcaacactcag

SEQ ID NO: 71720 - DNA, 122 bp, Homo sapiens
taagttttatttttggaggtgtcttcggaagtagctaagcggattagaatggggctcaggcgcgtggctgatctcgaacggcgctctataccacccccaccgccccctagtaaccccagagg

SEQ ID NO: 71721 - DNA, 122 bp, Homo sapiens
ggatcctactcaagcctatagaagccttccttagcttacatgtcgagtaaattaattagacgaattgtgaattattctgatttattcagagaaatcctttgctctgcaggccgtactgggca

SEQ ID NO: 71722 - DNA, 122 bp, Homo sapiens
ctggggcctttttcctactcagtcagatgccagagggtgtggccgtcatccagttacagacggagctaataacaaagtcactctgcctttcatgtgtgcagcacttcaagcatttctaaatg

SEQ ID NO: 71723 - DNA, 122 bp, Homo sapiens
cgttacagatgcagatgactgtccaggcgacagggagagtcgcaaggacttggttctcatcgactcgcttttcatcatggatcagttcaaagctgccgagaggatgaatatcgggaagccaa

SEQ ID NO: 71724 - DNA, 122 bp, Homo sapiens
ctggtggcccagccccttccagcagcgtcagcagatcccagtggttacgttggtgagcgacgtccgccggcgctagcccagcctggtcccgcagctctcgggctgcccccagccccagcagt

SEQ ID NO: 71725 - DNA, 122 bp, Homo sapiens
aaccttcccccccactaacgcgtcttccgctacgtcaggccgtcgcgtaaacgccctatccgccgccaatggcgggaaggctctacgccccaccttacgccaaatgcgtactcctcccaccc

SEQ ID NO: 71726 - DNA, 122 bp, Homo sapiens
ccccttaagactctgggtctgtctgtgggaagagctttcattccccaccccactctatgccgaccctctccgggggaggctccactggcactgtagacaccacgtgctgggtaaaaaggcct

SEQ ID NO: 71727 - DNA, 122 bp, Homo sapiens
ccagccccggcccgatccctcacggtgcagccagcccttgggaggctgcccatggggatgcgcaccaaccgcagacagataggctgggaaggagagagaacgagggcccgaccgagccggta

SEQ ID NO: 71728 - DNA, 122 bp, Homo sapiens
aggcaaggccacctagaggttctctcttccctttgattccttacagagaagttttctttccgttggtgcatgatgcatgagacattgcctcttataatcctacaggaagctgtgaaatagat

SEQ ID NO: 71729 - DNA, 122 bp, Homo sapiens
aatctacgttgtagaggtaaacctagcagagctaatacaaacaagcaccttcaaagttaacgtcccacttcctgagcactgcaaaatacgacagtgaatgctattgccatttcaccataggc

SEQ ID NO: 71730 - DNA, 122 bp, Homo sapiens
aactggagcccaagctggatacacacctcctttcctacctgaacgccgtgagagccaatccgcgggcagctctaatgtcgcgtgactaggaaacaggccccgcccccccagacccgtcaaaa

SEQ ID NO: 71731 - DNA, 122 bp, Homo sapiens
gtccgagcgctgcgtcccgtcctacctcccggtgaaagcgcgctccgctcgtagcgggtgcgcccctaccgccctggggcagtgggtcccatctactaattgcaaggacggcgacctcgaaa

SEQ ID NO: 71732 - DNA, 122 bp, Homo sapiens
ggcgcgcctgccgggcactgccccgccctgctccctccagcctagcaggcagcgccctggcgcaaactttaaaaacaggaaacaaagggagcgcgccggggagcgccctggccccgcccgcc

SEQ ID NO: 71733 - DNA, 122 bp, Homo sapiens
acctctcctcttacttgatgggatttcagaaatctccttgtgcgcagacatcacccgcaccggcaaagtgaagccaaccagagctgtgaaagatcaggtaccactcacccaaacgctccttt

SEQ ID NO: 71734 - DNA, 122 bp, Homo sapiens
gaatcagattgtgcccacaaggcggaaatgtacgacagcgggttccggtgaccacgaaggcggcaaaggcgacggaatggaggaggtgcctcacggtaagctcgcggagggggcgtgggtcg

SEQ ID NO: 71735 - DNA, 122 bp, Homo sapiens
caggagccgcgctggctgttgcggggcaggctgggcccgctgctgctgcagttggctccgcggccgcccctagccgcccccagccgcccccgcccggtgagtcacccgctcccggccgcgcc

SEQ ID NO: 71736 - DNA, 122 bp, Homo sapiens
cgcctcgagtccccgagccgccgcggcttctcgcctttcccggccaccagccccctgccccgggcccgcgtatgaatctcctggaccccttcatgaagatgaccgacgagcaggagaagggc

SEQ ID NO: 71737 - DNA, 122 bp, Homo sapiens
acagagaccctgaacccgttcctcgacaaatggtactttgggggtgagcgcgaggcctgacgaaagcaaacaacccctttggagcacccatggcagcctccctggggctccaaccccaatgt

SEQ ID NO: 71738 - DNA, 122 bp, Homo sapiens
taaaggcttagacagtttggatgtaccagcctggcagaggaagtccacttttcctccccacgtatcccctgagattcacagaggcaaggcagagaacaagacctgtgcttctttactccaaa

SEQ ID NO: 71739 - DNA, 122 bp, Homo sapiens
ctggcccctcccccttggtctcaggcctcgcaggaggagatgtccactccggcgaagacccggcatagtcctcacctgctctttgagccactctttggtacttgaagagaggataccctttg

SEQ ID NO: 71740 - DNA, 122 bp, Homo sapiens
tcatcttcatcgggtgcctgtcggtcattgagaatgggacggacactgggctgctgcagccggccctggcccacgggctggctttggggctcgtgattgccacgctggggaatatcaggtga

SEQ ID NO: 71741 - DNA, 122 bp, Homo sapiens
aactcggtttggctggagacttcccgagcaacaatatgggctgccgtattaggtttgtgacggagccaagtgtggttggggcttattgaatctgcgggccggagatcgctcgctccggagac

SEQ ID NO: 71742 - DNA, 122 bp, Homo sapiens
ggaatgggtgaggaagggcatgagagatgctctaaagggagttgctaggtgtagctggatcgcagatgagatgatagggataggtgtttgtttgtttgtttgttttttccttgcgacagagt

SEQ ID NO: 71743 - DNA, 122 bp, Homo sapiens
gaagtctgccgggtgtgtgtttgtatccagtcccatagtggaaatgctctcgtatccagacgtgcaccgtctccagtcagcagctgaaaataactcgttcttgaaaggagaaagccaaccgc

SEQ ID NO: 71744 - DNA, 122 bp, Homo sapiens
gacacttctgattgaatcattctttgttgtgggcactgccctgtgtgctgtaggatattacgcagcatccctgccctctgcccactagatgccagtagcaccctccttgccaagtcatagca

SEQ ID NO: 71745 - DNA, 122 bp, Homo sapiens
gccggtttaaatcctcaatcaacatcacatttccctgctttaatcctacgcaaaaaaaggcggcttgaaagaacctgatagtaaccacttggttattattctattggtctgtcctgccttac

SEQ ID NO: 71746 - DNA, 122 bp, Homo sapiens
gtggtgggaatttgctgcagttcagactctctggccaggcaaatccaaattccttcaggacgggttcacagcgtctcttgactgaaagacacatgccgccgcatgggccaatggggatgttg

SEQ ID NO: 71747 - DNA, 122 bp, Homo sapiens
gttcttaatatcctgcctggcatgcgggaggaataaatgagcggcgagaccagacagccccggctgcaaatacgctgccacgtccctcggccatccatcagcccgcgtgtcaggtggtgtct

SEQ ID NO: 71748 - DNA, 122 bp, Homo sapiens
caggctggagtgcagtggcacgatttcggctcactgcaacctccacctcccaggttcaagcgattctcatgcctcagttttgcaggtagctgagattacagttgcctgcacctggcttattt

SEQ ID NO: 71749 - DNA, 122 bp, Homo sapiens
cccccggggtcctccccagacccctcccctccctgtggtccgggggtgcatggggtggggcgcgggggcctcgctggtcctggggttcagtcgggcgcgcgtgctgccacctggtggccaat

SEQ ID NO: 71750 - DNA, 122 bp, Homo sapiens
tagcaaaagaggtccatggggctgtgtgtgatgggcaatttctgattatttgactgacaacgggagtctgggaaaaagagaaaggcagaggtcactgtcacattttcttctcagtgtttcct

SEQ ID NO: 71751 - DNA, 122 bp, Homo sapiens
aagtctggtctcaccggtaatccagggggaccagaggggccagggaggccctgttctccacggaggcctggaagcccctggaaaaagtctttgttaagatttatagggcctctgagatatcc

SEQ ID NO: 71752 - DNA, 122 bp, Homo sapiens
tgtgtctgggaggggtcggactggggccgccctctcgtttccattttagatttttagggccgggagagcccgccactattgatctctctcctcccccaacctcctgcccacccctgggggga

SEQ ID NO: 71753 - DNA, 122 bp, Homo sapiens
agctcaagtgccagctcatcccccagccagatgtaattttcatctgagtttccacaacatcgtgtactctatcttggcacctcacgttccatgttgtattatggatatgcagagacatcatc

SEQ ID NO: 71754 - DNA, 122 bp, Homo sapiens
tatacacaaggatcactctgagtttacattttttctgtaactgtggtcccaaggcagttccggcgtgcaaagtggagactggtatccaggcatagcatccattgctcaggaaactatttatc

SEQ ID NO: 71755 - DNA, 122 bp, Homo sapiens
tgctcaccgcggtgtgctttcccctccaggtgaatgagaagatgtagtgtgacagcagcccgggtgacacctgctgggagcttggcgtggacaccccagccacccccagcccagcccagccg

SEQ ID NO: 71756 - DNA, 122 bp, Homo sapiens
tggcggaaggccccgtgtcccccggagcacaatgccagccgtgctccgggaagcgcatcccggcccaggagggtgcttcttgctcagagcccgggtcctggacccaatctcagaccctgcgc

SEQ ID NO: 71757 - DNA, 122 bp, Homo sapiens
gtggactcgtccctccaaagctttgcaggagagttctcagaggtctgacaggtgttcagccggtctgtcagtgtgctctcccacctggctgtggaccggggtgctctcagcagcatcctgag

SEQ ID NO: 71758 - DNA, 122 bp, Homo sapiens
gatgagccttgcagatggctaacacctccggcagggggagcagccgagcaaaggccccagcggggcgcgtgtctgagcaacagcaaggaggccaacgaggccggagtaggcgtgcggggagg

SEQ ID NO: 71759 - DNA, 122 bp, Homo sapiens
atatctaaaatagagaagtgagtcataggcccaatgaaacttatgaaccaagattagtcacgcggatagtggagctgcttaacatcaatataactttctcttcaggtcgtttcccacaaaat

SEQ ID NO: 71760 - DNA, 122 bp, Homo sapiens
aaaagaagaaagagaaacctgagacaagttaacgtgggaaacccacagatactgcccagtcgagaccctggcgtagcagagggacccgagtctgtgcggggaggctccagccagaggggcgt

SEQ ID NO: 71761 - DNA, 122 bp, Homo sapiens
gggttgggtcatggtgggtacctggcctcacttccgtcactcacaccaggcatgtcccgccggctgccccgaggctgggcaccaagtatcttcggtactcagtgtcctctggctcacaagat

SEQ ID NO: 71762 - DNA, 122 bp, Homo sapiens
tttgtgtgtggaacgatagtagttctgagagtttggaagaaaacaggatgaaagggagttcgtttgattatattcagcttagaagtcacactgtggctaccttttgaagctgtcctcactct

SEQ ID NO: 71763 - DNA, 122 bp, Homo sapiens
tcggaacacaggtgaggcaggggccggggccgggccagcagtgtgcatctgggccccgggcgagtgctggggcggggtccgtgggatgagggctatgttaggtacatgtgccttaggacagt

SEQ ID NO: 71764 - DNA, 122 bp, Homo sapiens
ggaggctttgcactccgggccgcatgggtcctggataaggacctcaagaggttgtagtggcgccccttcgctccggcgtactgtctgaaccctgtgcccaaagagggctgtggcagttcctg

SEQ ID NO: 71765 - DNA, 122 bp, Homo sapiens
accaaataaagaagcacttttataccgccagttatcacaccactagcctgttggctttcccgtccaaattttaaaatatgcaatttttttctttggaaattctgatcattcggtatatgctg

SEQ ID NO: 71766 - DNA, 122 bp, Homo sapiens
ggctggtggctgggcacttgggtcctttggagagctggcactgggtatccgcgcctggggcgccacagcctctttatactgataagcatcttacagctctctcccggcactgatgcctttct

SEQ ID NO: 71767 - DNA, 122 bp, Homo sapiens
ccataacaccagctggtttgggcaggggcggatggtcagtgtttgcaaatcagccctgcccggcaccaggactctagccacccaaagtccaagtggcagtgaactttccagacggcctcatc

SEQ ID NO: 71768 - DNA, 122 bp, Homo sapiens
gggggcccgtgtggactacctgcggtaccaatacgcctgtgacaatggatacccttttgccggccatccggtgttatttcagacactgttggacagatgggctgtgttccgagtggggaaga

SEQ ID NO: 71769 - DNA, 122 bp, Homo sapiens
acctcccgtctgctcatgaacctcatcctcatgcaggcgggctacccgcccatcaccatccgcaaggagcagcggtccgactactaccacgtgttggaagctgccaacgagggcgacgtgag

SEQ ID NO: 71770 - DNA, 122 bp, Homo sapiens
cgggaaggggcggactgcagctgagttggctccaaagtgtgggactcagccaatcggaaccgtgcagggcggggctggcctgcggaagggggcgggttcggaggagtgaactgtgcggttag

SEQ ID NO: 71771 - DNA, 122 bp, Homo sapiens
ggaggggctggactttgatgctgtcactgaccacagacacggcggtgctgggggccatggcggcggcattgctgggggaggtggagatgatggcgtaggccacccccgcactgctcagcgga

SEQ ID NO: 71772 - DNA, 122 bp, Homo sapiens
gttgggttaacttgcttctggtcctctgttcggtggtggcgttgccttctgcgctggccccgtggatggatgttccttttttccgtggtgacctcctctccaggctctgcttggtgggcttc

SEQ ID NO: 71773 - DNA, 122 bp, Homo sapiens
accaagcagaagacagcggccaaagccccgagctgggagtcaggagacctgcgtctagtccgagccctcccgcgggcgggatcatctcgggtcgcgctgtaccccggctctcagacttcccg

SEQ ID NO: 71774 - DNA, 122 bp, Homo sapiens
gaggcactcaaaagttgagagcatcagagtcaccatgggtatagaattcagattgggattcgtaatcatgatcttggtgattggaacttggcagaacagtgacagtattacattctgggaaa

SEQ ID NO: 71775 - DNA, 122 bp, Homo sapiens
gtttccacgtcgctccatccctctgtggtctgagttccagggctgtgctggaacgcgaggcgagcccggggctggctgccgggttaacaagagaacgcggcaaaacaaaaaaaccatctgtt

SEQ ID NO: 71776 - DNA, 122 bp, Homo sapiens
agtctccagttttacctctctccattctatcttctatagaagggtggtgcatgcctgccacgcccttgctcatatccttccaaggctacctgctgtactgaataaaatccaaacttcttatg

SEQ ID NO: 71777 - DNA, 122 bp, Homo sapiens
cgggccccaggggagggaagggtcacctcctccgtctccccgcgctcgctctccttgggtcgtgggcctggccctccccaagctcttaggaggatgctgccacttctcacccccctcgccgc

SEQ ID NO: 71778 - DNA, 122 bp, Homo sapiens
gcctggctttctgccttgaagcatgtgccttggcagtactaagtcaatatgttacacgttcggctagcttaaagttgctgggttgtagagatcctatggagagtatatttgggatacttagg

SEQ ID NO: 71779 - DNA, 122 bp, Homo sapiens
caagattaatccaactgtactctcaattttgcctggccaattcttcaggacccactccctcgccatctgtgaagggtttcactgggggccaattcaagacctggccacctttcaacctcaca

SEQ ID NO: 71780 - DNA, 122 bp, Homo sapiens
aggtctcaggctgtggcactcagggcctaggctctgccccccttggtctctgacagtccccggccactccaggacatttggggctcatcttcccatggagcagggaagcgtgccctctgggc

SEQ ID NO: 71781 - DNA, 122 bp, Homo sapiens
tccccaagtgcaggtagaggctaaagctcagacagcggcacggatggcgggtccgtttgacggcttcaggttgctgagtgtgccccctgctcggccccagagtcccttcctcgttcacccgc

SEQ ID NO: 71782 - DNA, 122 bp, Homo sapiens
ccctcctgccgccaatctgactgtaacgttcatgcattcacctggtccttcctgagtgatcggggccctcgaatcttccccagaccagagaacctccagttctagagtccagagccacattc

SEQ ID NO: 71783 - DNA, 122 bp, Homo sapiens
agcagccccgcaccttggccagcttctcgaacctcctctgggcagaggctgtggaggctgcgaagcggcggaggcgttgaccaggccagctgctcagcctttctggcctcagtttccacagc

SEQ ID NO: 71784 - DNA, 122 bp, Homo sapiens
ggcacgccgggcacaaattgcttgtagagtagcggcacgagctgcttgcgcgcatagcggcgccggccaaccggcccccggcccggcccgcagctctgggctggcagcgccagaagtgccaa

SEQ ID NO: 71785 - DNA, 122 bp, Homo sapiens
aggggcccaatccgcaattaaagatgaactttgggtgaactaattgtctgaccaaggtaacgtgggcagcaacctgggccgcctataaagcggcagcgccgtggggtttgaagcgctggcgg

SEQ ID NO: 71786 - DNA, 122 bp, Homo sapiens
agaccaccgctgtaccaagccgggtgcgggggcacctgggcatacagggccctgcaggtgcggccgggctgcggggaggcccctccttccgcaccagctccacccgtggtagggcagggatg

SEQ ID NO: 71787 - DNA, 122 bp, Homo sapiens
gagttcagtgtgatggggcctgcggctgcacagccagtctatatagcaggatggctgctgcgttggcaagaacaacacaaaaggggccctcagcggtaaggggattttatgcatctctttaa

SEQ ID NO: 71788 - DNA, 122 bp, Homo sapiens
ccagggctttctagaagtctccacggcatcgggtgaccatagcaactcatgccaaactctcgggcccacggctccgcctaccgcttcgtggacgcgcttgttgattggctccgaatgtcgac

SEQ ID NO: 71789 - DNA, 122 bp, Homo sapiens
tgtccttcccagtcttgccccagcctcgggaggtggtggagtgacctggccccagtgctgcgtccttatcagccgagccggtaagagggtgagacttggtggggtaggggcctcagtgggcc

SEQ ID NO: 71790 - DNA, 122 bp, Homo sapiens
ctgttaggaaggcaggcgggacgagacactttccctgggagaagggtgtggctggggctgcgtcacaggaaacttgcagaacaaagagagtccacttagccctgttctgaccccatctcagg

SEQ ID NO: 71791 - DNA, 122 bp, Homo sapiens
ccgaaccttcgccgagggcggggctctcacgggaaaggggtcaacccgggactgaggcggcgtgggaagcgggcgaccttatctctgctcagctggaaaaaggcccagggtaacaccggaag

SEQ ID NO: 71792 - DNA, 122 bp, Homo sapiens
ccattgggccgctgagcgcaagccggccggcttccgggcactccaggccctctggaccaccgggtgcagagaactttctaggaggtgggcctcctacccacccacgggccctcccattttgc

SEQ ID NO: 71793 - DNA, 122 bp, Homo sapiens
tctgcgggtgaagctcggcgttactatcaagcaaccaaactgcaagctttgggagttgttcgctgtccctgccctgctctgctagggagagaacgccagagggaggcggctggcccggcggc

SEQ ID NO: 71794 - DNA, 122 bp, Homo sapiens
gtgctgatgcaaccaacgagacaggactagacgggggtcacccgtccctaaaaaccaggacgggctcgggggagagtgggcacgggcccagcggctgcgctctcagacactggattgggaaa

SEQ ID NO: 71795 - DNA, 122 bp, Homo sapiens
tttgtgcgagcgcggcccctaagcccgcaggctgccctgctgggaggggagagtgggaagcggcctccgggttggttcccagtggtcccagctgggggcagaaattccatctgtctcacaac

SEQ ID NO: 71796 - DNA, 122 bp, Homo sapiens
aaagagttaagagccggttcccgagacggcttcggcggctccgggtccccagaccccgctcgccgctcctgattggctgagcgcctgtcagtagtaaagggtatcagatggcaaagttggga

SEQ ID NO: 71797 - DNA, 122 bp, Homo sapiens
tgggttttggcaggaatttcaagatacagataaaattccagagagtaaaaaagagaaacacgtttactgccaattccttttgaggggaatagaaaaacatatttttgaataagctcatcctg

SEQ ID NO: 71798 - DNA, 122 bp, Homo sapiens
catggcgagtgcctccagctcacaggccctgaggccgcagccgccgctcccgcctccctgcgggccgctgggccccgccgctccgcacccaccgctccactcgccgcactcctagccgcgcc

SEQ ID NO: 71799 - DNA, 122 bp, Homo sapiens
gtcccctctgacaaaggcaccagttccggatcagggcacatccgggcattttgagctgcacgaacccagccctctcaagacaaagctgcctcaccctgctgtcgccattcagtgccccaggt

SEQ ID NO: 71800 - DNA, 122 bp, Homo sapiens
cgcgtgtgccgcttggctcaaggccctgacatcgttccactcagcacagcatcaggtgcccgggacccgggacatcatcgttctgtgtcagcacatcaggtgcccggggcccggacatcatc

SEQ ID NO: 71801 - DNA, 122 bp, Homo sapiens
ttccagcgcttggtgagtgacttcattaaatatgcaatggctgttgggtggcttctcagacgatggttcagttccttgtggaattgcattattactagaggtgtaaaaccaggcagacaagc

SEQ ID NO: 71802 - DNA, 122 bp, Homo sapiens
taacaatccttgccccatagcaaacgtttcgaagcctactctaggcagagttcatagcaccgcctttgtcagcagcactgccataggtaagcctcagaaccctctggggtgagaccggtgta

SEQ ID NO: 71803 - DNA, 122 bp, Homo sapiens
ccgttttgcagctgcgcagtctaaagggcaggccagtgtctggaagcagggcccacgtggcggtccgctggcaggctggtcctggggagcattctgcggacccggtcacgggcttggttagt

SEQ ID NO: 71804 - DNA, 122 bp, Homo sapiens
gtttcccctgtggggagatcactgagtcggaaacgaagctctgtggccatggatctacttcggatagactaggaggaaatggatttcctccgtggggcgggaggctctagtgctcgagggca

SEQ ID NO: 71805 - DNA, 122 bp, Homo sapiens
ttggtgtggggtgcttggaagtgtgagcaccctctctggctctttgccggccccaagggtcgttgcggcggcccccgggcccagtcatcagccctcttttccggtgccggaactatcgtact

SEQ ID NO: 71806 - DNA, 122 bp, Homo sapiens
acctctcttagcatttgctaactgaacttgagtgactgttttaggcaacttattgtgctgcgtgttgcattatttaattatttcatgagagtgtgtcttgttgctctagagaggttatgagt

SEQ ID NO: 71807 - DNA, 122 bp, Homo sapiens
cgtgatccgcctgtctcggcctcccaaagtgctgggattacaggcgtgagccactgcgcccggcagaagtggcactgtttcgcatttttgcaaaactaatgtgtgacataatagaaggtaac

SEQ ID NO: 71808 - DNA, 122 bp, Homo sapiens
tccctccactgagtctattccatggactggatgctgggagccactcctgaattagcacctcgttcactgagcttcccccaggaccaacagccagcccaaccccagtttatccacaggcctca

SEQ ID NO: 71809 - DNA, 122 bp, Homo sapiens
agccaggcggaccacagtctgggagaagccatgctccagagtggtgcaggtgtaggtgcccgcatcgaaacggctaagcctgcggaacagcagcccccgctccgtgtgcaagactcgctcgt

SEQ ID NO: 71810 - DNA, 122 bp, Homo sapiens
aagcgcctgcccctcctaaagccgaagccgaagccaaagcaaaggctttaaaggcgaagacggcagtgttgaaagatgtccacatccacacaaaaaaagaagacccgcacgtcacccacctt

SEQ ID NO: 71811 - DNA, 122 bp, Homo sapiens
ggggatgtcttactcctttccgtgaagcaaaccctttgagtacggtttgcgtccacaaagcgtagggtgagaaccttgggagcgactgggcccgtctttgctccctcggtggggttttgtct

SEQ ID NO: 71812 - DNA, 122 bp, Homo sapiens
tcagtggcaaaactggccagatagagatgctgaggctgtgagaagagacagaactgcaggcgtatggcaagattggtgtggtttcagcctaaagtcacgggatgacacagggtacaacctca

SEQ ID NO: 71813 - DNA, 122 bp, Homo sapiens
cagggagctagaaaaactgtacggtggggctgcgtgagcaccaggggattacgcgggaggcgggggcgagtggatgagagcagagtccctgtttctttcatggggttgaccgtgtggtttgg

SEQ ID NO: 71814 - DNA, 122 bp, Homo sapiens
cgcggtcacgtgactgctgcgggccagccaagatggcggcctcatgcttggtcctgctggcgctgtgtctgctgctgccgctgctgctgctgggaggatggaagcgctggcgccgggggcgg

SEQ ID NO: 71815 - DNA, 122 bp, Homo sapiens
ccctctggtctgcaaaggggtcgcggctcctttaagcgctagccctgccccggtgctactcggcggagctcattggcagtggcttctgtatgttgtccgtaaccagaggtgccaggagtgaa

SEQ ID NO: 71816 - DNA, 122 bp, Homo sapiens
ccgtgtgtggcccacagcaaggagctgcctgtcccaagttcggggggtttctttggcttacgcggatactgtatgtgagtgttggcagagcagcgtgagcctcggcctgcaaactcaggacg

SEQ ID NO: 71817 - DNA, 122 bp, Homo sapiens
agtgttgttggacaaaagaatttaagactcgttagctgggcagccaggcacagtggcttacgcttgtaatcctagcactttgggaggctgaggcggatggatcacctgaggtcaggagtttt

SEQ ID NO: 71818 - DNA, 122 bp, Homo sapiens
actaggaagaactcagtttttctgcatctgcgtctgagttgttgatttttcctagcaactcgatgttgctttgtctagtgaacaaaggctttcctgttaggaagactcattaccgtatctga

SEQ ID NO: 71819 - DNA, 122 bp, Homo sapiens
ggtttacaaaaagtcttcccctatttgtttagagaacccgaacgatgtcgtcactggcagcgaagcgccttggcatgaaccgtaggccagctggctcaggaggtggaggcggtgaggcggcc

SEQ ID NO: 71820 - DNA, 122 bp, Homo sapiens
aatgatctaatttctaccaccggaatgacttgttctctacagtattctcagaacttgctacgtggtaggaggtcaagaacacactgaataacccacctcttcccaccctcctaagcctcctg

SEQ ID NO: 71821 - DNA, 122 bp, Homo sapiens
ggcagccctctcaattctgcaaaaggagctaatataatatttaattactgcagagagcatcggcttgaataaaatctgtctaggaaggaaagaaggctacagttattaatcagtggaggaag

SEQ ID NO: 71822 - DNA, 122 bp, Homo sapiens
gaggctaaggcgggaggatctctccagcttagaaattctaatccagcctggacaacatagcgagaccttgtctccaaaaaaataaaaataaaaatctgtcagtctccaaagtgcactccact

SEQ ID NO: 71823 - DNA, 122 bp, Homo sapiens
ggcttagagatacggaaaaacccaactctgaagcccagagcctgctacaacaccctgctgcgactctcctgaggagagatgttaaggaatgggtcaccttctaaatctggatgcttctcctc

SEQ ID NO: 71824 - DNA, 122 bp, Homo sapiens
atgatcccttttctgggagcattccacattttccaaactgtcatcctgtggtggggtgcccggctaggctatggggagacctggagagttttatgcaaaggaggacctgggcaaatgtgccc

SEQ ID NO: 71825 - DNA, 122 bp, Homo sapiens
ctaaatcagacataggatctgcagctaaataataggtcccaccagcttccaatgtactgtcgtaatgcataattttaagaagttattaagtcttctttcaaccttagtaaagagaaggcctt

SEQ ID NO: 71826 - DNA, 122 bp, Homo sapiens
catgtggctgctggggccgctgtgcctgctgctgagcagcgccgcgggtgagtcggggggcggccggcgaacttcccgcggggcgcggggcgcggggcgcggggcgcagcggccgggtgcga

SEQ ID NO: 71827 - DNA, 122 bp, Homo sapiens
tcagtaggtacccgggtaatagggagtaaaccagcaagttctatgttctgaaaatccgctcgaaagcccatgttagctggaaaggtttggggaaataaattactgtcttagttcattacggt

SEQ ID NO: 71828 - DNA, 122 bp, Homo sapiens
ggcaccacctcctcccatcagcaaggctgcagcgttccaggcagaccacagactccaggacggcaggcggtcggtctgtcttgttcactgtctcggcctctgcccggcacgaaatcaatcaa

SEQ ID NO: 71829 - DNA, 122 bp, Homo sapiens
cgggcgctcgccccgggttacactaggttggaggctcagagaaggaaaagggattagaggcgaggctccgggtcacgggaaaaggtccttggcctcctgtcatggatggtggcgcccaaggc

SEQ ID NO: 71830 - DNA, 122 bp, Homo sapiens
ccaggcactcagtggtgtcacctcaggaggttccgatgacctcacatcaaggtggtgtgccgatgcaggagcaatgcaggccctgaatgttgccccacctgatgcggccactcagctgaccg

SEQ ID NO: 71831 - DNA, 122 bp, Homo sapiens
actgtcagtatctgggattacaggaagtccatcagattactgagctgcgtttgctccacacgtggtagcaaggaaatgaaagtcattcattgtgctttttccttgctccctgtcactggcag

SEQ ID NO: 71832 - DNA, 122 bp, Homo sapiens
ctgggccaaagtcaggtccagtcaagagggcccaaagtggctccccccatccccagaggccggctctggtttctgctatataaacagaggaggacacgccggcttggaggcagcaccacatc

SEQ ID NO: 71833 - DNA, 122 bp, Homo sapiens
caagcaactagattagggggtcatgaatcactttcccaaaagcttccctgccagttcctccgaaaggcactttgacttacaaaaacatgttagaaaggcatcgaagccatcaagaaagacac

SEQ ID NO: 71834 - DNA, 122 bp, Homo sapiens
tctgcaaatcccaggggcctggaactctaaaaaggccattcaagcctcaggtggactccacgtttctccatttccctgcccttccgcttttctttccttaacaagcttcttataacatttgc

SEQ ID NO: 71835 - DNA, 122 bp, Homo sapiens
cgcgcctgaaaagcccagccatccctcccagctgccccaggcctgggaggggccagaaagcgtctccagaagcactggggaccggccctggtctcagtcccagaacaacggctgtggccttt

SEQ ID NO: 71836 - DNA, 122 bp, Homo sapiens
cctgctggtcaagcgggacttcattaccggcttcacttgcctgcactgggccgccaagcacggcaggcaggagcttctggccatgctagtcaacttcgccaacaaacaccagctgccggtga

SEQ ID NO: 71837 - DNA, 122 bp, Homo sapiens
cagtctgggcgcaaagcgggtctcagcaaccgtcccacttgccttcataccctcccaccacgctccactcagggactccagaaccagcttagacctccattgagagctgaaagcctcttccg

SEQ ID NO: 71838 - DNA, 122 bp, Homo sapiens
aagagaaaaataaaataaaataaacatcacagctctttccaactagaatattaggcaccacgagaaaaatatttgccaagcagttttcggtgggttcatttgctttatttttatttaggaca

SEQ ID NO: 71839 - DNA, 122 bp, Homo sapiens
gtgggtgcagtgctgcgggatggacgaacggaacagggatgctggagaggaagccagtgccgtcgggggcacctgccagaaccctggctgggccactccacgcagaatgcacgtaggacggc

SEQ ID NO: 71840 - DNA, 122 bp, Homo sapiens
cccgcctcactcttggcatattttggggggcagccgtccagagcctgttcaaacaggtcccgtgcccgctccagcttgcggcccccatagcgggcaatgaatttggtcaggtaggtgctcca

SEQ ID NO: 71841 - DNA, 122 bp, Homo sapiens
tagctccgagcctgagaatactcgtggcttcaaaagtttgctgagctaccgcagggaggacgaaggctataacactggtccagcctgagagaagcccaagtggggttcactgccctctgagc

SEQ ID NO: 71842 - DNA, 122 bp, Homo sapiens
agactttaagtcaaaaactgttacaataaacaaaagtctatattcacaaaagggttgattcggtaagaatatataattactataaacatatatacaagctgggcacggtggctcaagcccgt

SEQ ID NO: 71843 - DNA, 122 bp, Homo sapiens
ctcccttcccccttatagaaacactttctccaggccgggccgggcttggtaaacctcagccgtgcctgggtagaggacgccgggctgggccgagcgggggtggaatgagggcgtctagaaca

SEQ ID NO: 71844 - DNA, 122 bp, Homo sapiens
gcacgtgccaccgccctgccctgccggctccccgctgtggctgggctgctcgtgacctagcgagatgacactgtcaccaacctgttcacacccagcatgtgtgtggacatcgaagagggtag

SEQ ID NO: 71845 - DNA, 122 bp, Homo sapiens
cccaatcctttgcatcaggttgatttcctccaggccccttcctgaaagttctgcaggtgacgcagccccgcgccggccgccgccgggaagattcgagaggccatcggccagggagcggcggc

SEQ ID NO: 71846 - DNA, 122 bp, Homo sapiens
gcacaaagaagccccgtgggggcggggggtggcaggaggacggacagaccgtcggaccgacgcgggacgcgcggccggagcagcggggcggccgggcccaggcgtccctccccctgagccgg

SEQ ID NO: 71847 - DNA, 122 bp, Homo sapiens
gcgccctcccccagcgccaggaaagcaagctgcgtaaaggctgcggcagtctcggtctcccggagctcttgggagcctggccccgcccctttcccggtgattgatgtgtgctgcctctttct

SEQ ID NO: 71848 - DNA, 122 bp, Homo sapiens
ccctgcaccaagcgaccccgctggggcgccgctacaacttcgccggctgcttcggacgcccggagctttcccagcaggcagaggcgcgtcctcgaccccaaggacgctcacgtgcagttcag

SEQ ID NO: 71849 - DNA, 122 bp, Homo sapiens
gccagctgccgcaaccttttgcagagtcatcatcgcctcctcatttttgtacccacttaccgataggccactgagaggctaagattctgggttaatttctagtggatctggccacagcatag

SEQ ID NO: 71850 - DNA, 122 bp, Homo sapiens
aggttgggaaactccaggagcgcgcgtgcgcccgtgccccggaacgggccagcgtccgagcgcatgcgcaacagctcccgtttcctctgcgcgtccgagtgtttcatgttttgagtcccgcc

SEQ ID NO: 71851 - DNA, 122 bp, Homo sapiens
catcgcctcgccggagggccagctggaggtgcagacggtcatcgtctagcatgaggtctgcggggtcctggccgggcagggacagggcagaggactctgagcgccccacccatgcctgcctg

SEQ ID NO: 71852 - DNA, 122 bp, Homo sapiens
tacgtggttgcagacgtaagtaacaggaatccatctttctttgaaagtcctgcattgtagcgtctgcgacctgggccctgcgggggcttccccgccccgctaacttgctccgcatttccgat

SEQ ID NO: 71853 - DNA, 122 bp, Homo sapiens
tcttctaaggatattctagaactgaaccttgctgtctggcacttcatgcctttttaattgcgtcaccatcctctggctactttagatggggttagggtgggcaggcgctaagcccctccaag

SEQ ID NO: 71854 - DNA, 122 bp, Homo sapiens
aaagaagcaggccagttaagagaaggtgcgattacctagcagtcattttaaattcacgctcgaccctccaatcttcttaagtggtggcctgactttgcgtttcagctggacctggaatacat

SEQ ID NO: 71855 - DNA, 122 bp, Homo sapiens
cttgcctgccatcagagcccaggggtcccttattgagaaagaggtggggcctgctggcaccggggtccctccaccctgctgaaagggtctcctggctgcatcgcagctaacatcccttcctt

SEQ ID NO: 71856 - DNA, 122 bp, Homo sapiens
tcctcctcccctgacacagtgacacccctgcaacctactccccagccaccggtctgggagcgcagccccccggatgcgcaggaccgccctgtgctgttgcccagctgaaagcagcgatcgcg

SEQ ID NO: 71857 - DNA, 122 bp, Homo sapiens
gctgctgaaacagctgaaggccgtggaggatgctattgcacgcaagcgggccaagatccccgggaaagcataggccgtgccccgaccggactggacgcatttttatacatagggtaagcgca

SEQ ID NO: 71858 - DNA, 122 bp, Homo sapiens
ggaaaaacatgagataagcatacttttatgccagtaaaggacttagcaggatgcctggctcgccgtaagtacccaacaaattgttggctattataaatatgataggatgacacaggtaggca

SEQ ID NO: 71859 - DNA, 122 bp, Homo sapiens
catttcagagaaagaaatgccagggcacccatgcatcagcgagatcgacatttgatactgcgcattgttggcaatattcaagtgctaatcattctgtttttgttttccttctaacacatgca

SEQ ID NO: 71860 - DNA, 122 bp, Homo sapiens
ctctgctcctgtctacagataaacacagatacaggacaagcacagatgttcacacacagacgagcgacacgcggacacgcacacacaaacacaagcaacacgcggacatgcacacacacaga

SEQ ID NO: 71861 - DNA, 122 bp, Homo sapiens
ggtgcccagctgccagcccagctccgctgctatctttgcctcacttagtcatgtgcaattcgcgttgcagagtggcagaccattagttgctgagttctgtcagcactctgatgtgctcagaa

SEQ ID NO: 71862 - DNA, 122 bp, Homo sapiens
ggtcaaagccctgtgcaggtccacgggggctgcaggaggtaaaatggaggaggagacaggcggacaagctggggtcagtggtccactcccctgtgtctgtcttaaccgagatgcagctggat

SEQ ID NO: 71863 - DNA, 122 bp, Homo sapiens
tctgttcggcgcccgcccctgcgccagtcttttaaaccggctcggaggcggggctggcgacggcgggaggccccgccccctgccggccccgcccccagctccacttttggtttctctttccg

SEQ ID NO: 71864 - DNA, 122 bp, Homo sapiens
agctccgtctctaactttctatctcctttggatatccttattcgcatattccttccagaacgtacaacttaacgtggcttaaacttaacagctaaacattctccctctgaagtatcccattc

SEQ ID NO: 71865 - DNA, 122 bp, Homo sapiens
tggtacattagcgggtggaggtttggcccacccctgacctggcagaaaggcgcctgtgggcgtgggcataagccagaagctccctgccagctaggaggtgggggctatgtggaggtggtggg

SEQ ID NO: 71866 - DNA, 122 bp, Homo sapiens
tgtgatccacctgcctcgacctcccaaagtgctgggattacaggcataagccaccgtgcccggccctcaggctagtcttgaactcctgggtgcaagtgatcctccagtctaggcctcccaaa

SEQ ID NO: 71867 - DNA, 122 bp, Homo sapiens
tgaaatagcaatgacattgaccatagaaaactgtctaaatagagaggcagttattctcctcgaggccaggtaaaggagcaggcagctgccttcctccatccggtgatgagagggtattctta

SEQ ID NO: 71868 - DNA, 122 bp, Homo sapiens
aaaaaaatggtttgtaagtttaacttcaaaaaaccatgtaagctcggttcctggattgttcgtagaccttcacattgcctttggcaaactgagctagaacatactgtagaagatttgagggt

SEQ ID NO: 71869 - DNA, 122 bp, Homo sapiens
tgattcggaactggaactggagggcgagctggagcaagattccgagtctgaccctgatcccgcgtcacattgatagtggcgacgtctgcttgggtggcggttgtgatggtgatggtgattat

SEQ ID NO: 71870 - DNA, 122 bp, Homo sapiens
agagcttagccgggcacatgggcccctctgaggctcctgttcagggctcagccgtgtctacggggccctccgagctcttcctggaccctcctcggctccttcagttcagggctcagctgggc

SEQ ID NO: 71871 - DNA, 122 bp, Homo sapiens
tagtaagcggcgtctcgcttcacctccaggttaaaagcccagagaagaccgccaggggcgcgtggaaatggtgtccctcgtctccaaggcccagacggagcttagcttcctcttgaaggagc

SEQ ID NO: 71872 - DNA, 122 bp, Homo sapiens
gtgccaaaatgtgaggtgcccggtgtgggacgcgcagtccagttggggctctgcccgcctcgggcctgacctacttagtggttccaagttaagagttggcaggagccgcacaaaactgattt

SEQ ID NO: 71873 - DNA, 122 bp, Homo sapiens
tagccccgcttggatggtaaacaggacctgcccgctggcctcaccggccgccagcacgaacgcctgccaagactggctttctgcagcatggagcacaggcttctctgcccagccctgccatg

SEQ ID NO: 71874 - DNA, 122 bp, Homo sapiens
tgcccggaatttgccgttggcttctccttctctactccagttctttagtgcagggctgtgcggcgcggagccgccagcggcagaacagaccccggagcggagctctgggatacacacacgcg

SEQ ID NO: 71875 - DNA, 122 bp, Homo sapiens
gtgcgcgggcgggggccagggccggggaacgggggccggggccagtcccgggagcggggacgcggaaaccgggaagccggggccggggcgcggcggcccctgaagggccgaggcctgcgcgg

SEQ ID NO: 71876 - DNA, 122 bp, Homo sapiens
cctctgtccatgcgtctgacgaagggcaccgggaggtgaaggccgcgggaaaacaagccccgctcccgtcctttgattctgtcccagcacacggcaccggcagagccccagcttccccagcc

SEQ ID NO: 71877 - DNA, 122 bp, Homo sapiens
tcatggtcatcacaatggggaggaggggagaagaggagtgagccaagacgcggctgcttgcggacagggcagaacctacagatgggaacaaatgaacctggtttcataaaacagcttccctc

SEQ ID NO: 71878 - DNA, 122 bp, Homo sapiens
agtacagctccttccagctctgcctagcgtcgttatcatcaaccttacaatctacctgagcgtcaacaagccagtgtcatcccttcttttaaatgaattctactcaaacagcatttacaacg

SEQ ID NO: 71879 - DNA, 122 bp, Homo sapiens
ctgagacagccaaacgggcctggcaacaggatgtgggatagagacagcagagttcaaagccgactcccaacgtctggacactcagggacctggtttcctgccactatctagtgttccacttc

SEQ ID NO: 71880 - DNA, 122 bp, Homo sapiens
tggtggccacaaagaggaatgggaagggcactggttacaggccaggaggcaatattcacacgtagatgtacatctgtaaatgcatagactttctgggaggatacacaagaaattggtaatgg

SEQ ID NO: 71881 - DNA, 122 bp, Homo sapiens
caccgcattctggtacagaacccaggagtctgggaattctaaattcgagcctggccttttcgtagcattcatatttgtcaagggaggaggagagaatgtatttaacagtttgtcagcttgag

SEQ ID NO: 71882 - DNA, 122 bp, Homo sapiens
ctggcctgcggacctaccagctgcgtctcagtgggacagaaaaagtccagacagcaggaacgcgaccctcacaccctcacaactccagggcattcaccacgtgggaaaaggggccgagggga

SEQ ID NO: 71883 - DNA, 122 bp, Homo sapiens
ggtggcatgcggaactgcggacggctgcgcaggagcggacagcggagaggcggtactgaccggtgcgaggcggtgctgaccggtgcgggccggtgcgggccagtgcaggccaggcccggccg

SEQ ID NO: 71884 - DNA, 122 bp, Homo sapiens
aatgttgcaataatctgatgcagaagactcagcttctcaagggagagggagggggcggagcggaataaatagtaacttatttaagaaatgcacttggattcctgccatcagtcaggggcggg

SEQ ID NO: 71885 - DNA, 122 bp, Homo sapiens
aatacatgggactgctatgaagcaggaaaagtttcccttaggaaaaaactatgcctttaacggtgtgacctagttgaagagctccagacataaaaattcagccttcccaaagcatgaagctt

SEQ ID NO: 71886 - DNA, 122 bp, Homo sapiens
atttcaacaaatgtgctgagggtctggtatttgccaactctgtgtcatggacggacacagcggacataagtagtacagcctgctctttatggcgagcagctagggagagggataaggaaaga

SEQ ID NO: 71887 - DNA, 122 bp, Homo sapiens
ccagcaaagccaccgacctcagtgacaaaccccagggaatctccccaaggaatctcaaagcgagagagagagagagagtcttgagagagaaagagagagagagagagtcttgctttcgaaca

SEQ ID NO: 71888 - DNA, 122 bp, Homo sapiens
gtgaggccacagggcgctgggggaggcgggcagccctcccaaccccacacggcccagccccgagaatccagcctcctcacgtagacaggacatgtccacgcgcacagcacggacgtccgctc

SEQ ID NO: 71889 - DNA, 122 bp, Homo sapiens
cccacagactaggaactaatgccaatttccacatctctaataaccatcttctctccttggcggtcactccatgttcacctcaatggttcctcctccactctgctcaagggactatctcctta

SEQ ID NO: 71890 - DNA, 122 bp, Homo sapiens
ggagtccagagtggcactggccgagtggagccaggaaggcccttcaaactcagcccaagccggggggcgtcatgacgtcggggcacagaggagcctgggtgtccgtgccgtccaccatgggc

SEQ ID NO: 71891 - DNA, 122 bp, Homo sapiens
ggcaggcaggcgaagcgcattccagctggagagtctttgagtgaaataaaaagtagaggacgcatggagtgtggacagctccaagcacgtccctgttgtgacatgacatgcatgctaggcac

SEQ ID NO: 71892 - DNA, 122 bp, Homo sapiens
aatccagcactgtccatcccaccttttctcccgctctgcgtggcactaggcggcaaaacccgccatctttaacaatgcggcaagcccgccatgatgtccacgtgacaaaagccatgatatac

SEQ ID NO: 71893 - DNA, 122 bp, Homo sapiens
ctgacgtcacagaagcgaaggcttgatgctgtctcagcagcctcagctgtgggggggaagcgcgtgtgcatcgtgtcaactactgtacatgttggtcatgtgaaaggaattatatatgtata

SEQ ID NO: 71894 - DNA, 122 bp, Homo sapiens
aaactctattcatgaatatgcagcctccataatcttctcccttgtaacaaacgtgcagtccgttcacaagctgtaaaaacaagcccaaacccaagacatcacaagaggcaagagcagtggca

SEQ ID NO: 71895 - DNA, 122 bp, Homo sapiens
acttgcagtttcagagcacatgcacactgtcagggctagcctgcctgcttacgcgcgctgcggattgttgctccgttgtacctgctggggaattcacctcgttactgcttgatatcttccac

SEQ ID NO: 71896 - DNA, 122 bp, Homo sapiens
gagagtgatccaggaaagtgaagcaggagatgcgggactgccccgggtggaagtgatcctcgactgctctgacaggcagaagacagaagggtgcaggcttcaggcaggaaaggagtgtgtgg

SEQ ID NO: 71897 - DNA, 122 bp, Homo sapiens
ctctgcataacataggattctctgattctggaaaatacatctgcaaagctgttacattcccgcttggaaatgcccagtcctctacaactgtaactgtgttaggtaggtatgcttgaattatg

SEQ ID NO: 71898 - DNA, 122 bp, Homo sapiens
gcaataagaaaagataaaatacggaattcagtcggccagtggcccgcaatcctcttctctcggttcctctttcctcgctcaagatggcgctgctcgcgaagcgttcttggcgttgggcggcc

SEQ ID NO: 71899 - DNA, 122 bp, Homo sapiens
tgctactaatgtacttacaatcattagcttcttctattgcacactgtgctgttctctccccggtgttcaaaaacagaatgtgctgtttgaatgttgaggaacatagtaagaaaacactgaga

SEQ ID NO: 71900 - DNA, 122 bp, Homo sapiens
aaacaggcccagagaggtggagtcaggtgtcccaagccacaccacctgaagtgacagagccgggattccaacccggtggcccttgcctacacccggtgcaccggctgttctgtggggttgcg

SEQ ID NO: 71901 - DNA, 122 bp, Homo sapiens
cgggcggaggaaaagaacgactcgaactcccgggagacaaagccggggaggacttggcagcgcaagcgcagggtgcttccccgctgggcgcgctgggagatggagtctagccaggagggctc

SEQ ID NO: 71902 - DNA, 122 bp, Homo sapiens
cagcaggcttctccctgctaccacgtgtccagaagcacttccacaagccagggttgacatcgcccaagacgaggcgtgacccggggcgggggaggggacttcgcccgcgtcgcgtgaaggat

SEQ ID NO: 71903 - DNA, 122 bp, Homo sapiens
ttccaaacttactgagtcacaatttacattttaacaaaatccccaggtaatgagtctgcacgctaaggtttacaaaagcactggtctactctagaccaccgtaactgtcctctgaaagcttc

SEQ ID NO: 71904 - DNA, 122 bp, Homo sapiens
cacgattttcctcgtctgaggagcagtggctcaccttggccaggaaacagggcaaatagccgcaaggagagaggcgagaagccggccacgtgtttccagccagagtcctcagcctcttccgt

SEQ ID NO: 71905 - DNA, 122 bp, Homo sapiens
taagagagaatttctattgttaggtaggatgctaaataaaaatcaagtgtgcttcatcctcggcttcctcttagtcaggagataggtgagtaaagactttgttcatgtatatttgatgtttt

SEQ ID NO: 71906 - DNA, 122 bp, Homo sapiens
gggccgccttggctgcgtcctcgtgtggatcactgtgtttttatgtgacacggctttgagcgtcgttcacatgttcctcgtggctcattgtgtccacatcttgctccttctgaggaagcaga

SEQ ID NO: 71907 - DNA, 122 bp, Homo sapiens
gcgcccggccgagcctccgcggagaggaggattggtagatcacaggaaacgggaggacggcgctgggctcccagcaggcgccccattttcttggcttgtcgcaagagcagccggaggcggcg

SEQ ID NO: 71908 - DNA, 122 bp, Homo sapiens
tttccttccctccagtaaaacaggcaacggagtttccttctaaggatccaggtgtcggcgcgccccaaattccgccctgggacctggcgtccgagtcccctcccaatcctcccagggacgcg

SEQ ID NO: 71909 - DNA, 122 bp, Homo sapiens
ggagccctacttcccccaggagccctacggagactaccggcctccggcgctgacgcccaacgcgggctctctgttcagcgcctcgcccctaccgccgctcctgccaccgcccttccccggag

SEQ ID NO: 71910 - DNA, 122 bp, Homo sapiens
actgcacaaagccctcttcagcgcacagcacaagcaccattctataaaatctccagcaagcggccaggtgcagtggctcatacctgtaatcccagcattttgggagactgaggcgggcggat

SEQ ID NO: 71911 - DNA, 122 bp, Homo sapiens
cgggctcaggaggtccgcgggaggatggagcagtgagcgggtctgggcggctgctggcagcgccatggagacggtacagctgaggaacccgccgcgccggtgaggggccactggctaagagg

SEQ ID NO: 71912 - DNA, 122 bp, Homo sapiens
cctttcccagcagccacccgcctggccccccgcagtttctcccagcccagcaccgctccccgagcagctgcatggctcctcggcgtccctcacacgattcccacgcggccccacacccctcc

SEQ ID NO: 71913 - DNA, 122 bp, Homo sapiens
tggtgccgtctgggcttaaagccatcgataagcaaactacacaagccagccaatcccgagcgttctaattgccttagtcctgggatcacccacgcagcaagtccagccatgaagcccgcccc

SEQ ID NO: 71914 - DNA, 122 bp, Homo sapiens
gggactgaggatatgaggccaagacgcaggccagcatggaggcattctcaaaaggaaggccgtcgggttatctagatcaaaatcacctgggtggagagagaagcgaacttcctaaaaatgat

SEQ ID NO: 71915 - DNA, 122 bp, Homo sapiens
ccccagctgcgcgtccccgccccacccccgcggctgagccaccaccggtgcagtggtctccgcttggcggagcgagccttgagcttcgttccacagcttctttgcatcttggatttcggggc

SEQ ID NO: 71916 - DNA, 122 bp, Homo sapiens
tgaatggcatgttgtagggtttgtgcattggttattgattggcatgaatgaattttggctcgatccagccacttgatacctgggaacaattctgtagcaataaatgtacagggcctttcttt

SEQ ID NO: 71917 - DNA, 122 bp, Homo sapiens
aggaagtgaggagcgtctctgcccagccgcccatcgtctgagatgtggggagtgcctttgcgccaccgccccgtctgggatgtgaggagcgcctctgcccagccgccccatctgagaaggga

SEQ ID NO: 71918 - DNA, 122 bp, Homo sapiens
ttgaccgaggtgattacatcggtcttagtacaacaggcacttaaagccaaagccgtgattcgtagtctcaccctggcttgagttaggtttcttttttatttttttttgaggcggagtcttgc

SEQ ID NO: 71919 - DNA, 122 bp, Homo sapiens
gctgggggactccctcagatacaagctgtctcctccactggaaggtgaatgccgtgagcgcggggccctggttcagcaccagagacagcgctggcacctcaagagactcagtgacatttgct

SEQ ID NO: 71920 - DNA, 122 bp, Homo sapiens
cgaaggttccgaccttcggggacttgctggaaggctgacacgttgcccttggcaggggcccggtttcttcctgtgccaacagtaagagagtaagatcatgttggtttcagatcttgattctt

SEQ ID NO: 71921 - DNA, 122 bp, Homo sapiens
cgatcagggccgcaactccggggccgactttgcccggcctggcccagcagtggggacttgcgggcccgagcttttccaatgcccgacgtcctcggggccacaggtgaccttcctgtttcctg

SEQ ID NO: 71922 - DNA, 122 bp, Homo sapiens
atcagatttcaatgtctgttcagtgacctacaaacaccagaacctccaaatatgtagcagcgtattactaaataaaaaagaagaaactcatgtggttagagagcattaagtctgagattttt

SEQ ID NO: 71923 - DNA, 122 bp, Homo sapiens
ggcagaggccggaggcaccttggggtcaggaggagacggaagaagccgcggaaggaaaggcggcctccccagggaggtgctgctccgggcccagagccaggcccacaaaacaaaaggagcag

SEQ ID NO: 71924 - DNA, 122 bp, Homo sapiens
gacatagcgatctcttatgtttttgctaattgtttgataaatatttagtaaatttttccacggtatgtatgcactgttttttgtagttccaattctaaaggttttattaatgaataaacatt

SEQ ID NO: 71925 - DNA, 122 bp, Homo sapiens
agaggctgggctccgggagcatgcggctctgtgacacctgctgcagcgtcttagccatggcgctctggtgccagtcgaagctcccgctgccacagctgctgctgctgctactgctgctgctg

SEQ ID NO: 71926 - DNA, 122 bp, Homo sapiens
cggctggccggcgccgcctcctgggaagatggcgctgcacttccaggtcagtgtgctctgcgccgcgggcccgcgctccgccacgctgggaacccggcgggacgcgtctggagaccgagggc

SEQ ID NO: 71927 - DNA, 122 bp, Homo sapiens
ccccgcacgccgggcgccggccactccagcccaactttcccaccgccgccgtcgccgccgcggctcccgaaaatgtgttgttaatgggacttggccgggtttgtgattggaaggggggtacg

SEQ ID NO: 71928 - DNA, 122 bp, Homo sapiens
gattatattcatagccttgaggaagagctagagatgaggcatctttcctcacggaacagccgacacagatattacagcctggctttgggcttcaggagacgggctcagagacatcaagtgct

SEQ ID NO: 71929 - DNA, 122 bp, Homo sapiens
gtctcggcagatttccctgaccttgcgtgccaaggcagaaggtgagatggcaaacagatgcgcgcttccactgagagcgtgcatgtgtgtgcgtgtatgtgagtgcgtgcatgtgtgtgcgt

SEQ ID NO: 71930 - DNA, 122 bp, Homo sapiens
tctcaggactccctggactttgaatcctcagggagttctgagccccccgcccaggtaggccgactcctggccagccagaagctgggggaggtgttggagcggtcccgccggctcccaacagc

SEQ ID NO: 71931 - DNA, 122 bp, Homo sapiens
ccacgctgcggccggctccgccccgcccaaccctcaccctcacgctcacgctcacgctcacgctcacgctcacgctcacaggctcccggctccacattcctcgcagggctccaatccggacc

SEQ ID NO: 71932 - DNA, 122 bp, Homo sapiens
cagggaccaggttttggtagctgtgggtagcctcagttgtcctggaatgaaagacggtttcgtgttggacaaggacatatctgcagaaggccagttctctcgaactcgtcggacttcctggc

SEQ ID NO: 71933 - DNA, 122 bp, Homo sapiens
cctgtcacgtcacctgttcgcggtctcggaatgcagccctgcacctttaaatccagactgcgtcagggagtcccgccccagagggagtgcggctgtcggctggggggcgggacctgcccttc

SEQ ID NO: 71934 - DNA, 122 bp, Homo sapiens
tccagagattgcgactgtggctcgagcggttccctgccagggagcaggaccattgacagccgagccttgactcaccggcccaggccacccgaggggccattgacaactgagccttggctcac

SEQ ID NO: 71935 - DNA, 122 bp, Homo sapiens
actttctcgctgactgccccggatctcaggggaccccggcgtgcgggaagccggaggggacgtgagattcaggggctctggaacacaggtgacgcctgggcttataatgcgggccagttaag

SEQ ID NO: 71936 - DNA, 122 bp, Homo sapiens
tagacctccgcagttcaaacctcagccaggaacagctgggactccaggtgtgggccaccacgccctgttattattattatttttttgacacggagtttctctcttgctgcccagggtggagt

SEQ ID NO: 71937 - DNA, 122 bp, Homo sapiens
aaggttaatgctatcatgatcaactgccaataaaaatatttcaagaatctctctgcattgcgtctgtaacattctaggatttgttgattatatctggggttcaagaaaatttacaggatgct

SEQ ID NO: 71938 - DNA, 122 bp, Homo sapiens
gcgcactggtccctaccttggaggcctgactcccttgagaagtgtccccaacccagttcccgtctcactaccagccaccacctccccagcacggggtcctccgcaggtgatttcatctctga

SEQ ID NO: 71939 - DNA, 122 bp, Homo sapiens
gcgcgggctctcttttctcctctcaactccccccaccacccttgtgggcacacacagacccgggcgcacactcacatgcacacgctgccctgcctgcaatggccgctcagtccgtcctgccg

SEQ ID NO: 71940 - DNA, 122 bp, Homo sapiens
cccttattttcttccaaacagataatccacttacttgatatcattaacccctgcctggcacgacctcctgatccccagtgacccaagaagcaagttgtgtttgctgatgcaaaggggctctt

SEQ ID NO: 71941 - DNA, 122 bp, Homo sapiens
cctctttcctcaaatatggatgcctccaaggaacataattccagctccaagaggtcctgacgtggggcctggaggaccccagtacctgccggcagcatcatctccttgccatgctccaggtg

SEQ ID NO: 71942 - DNA, 122 bp, Homo sapiens
cggcgaggttccgaggtccggcagaggtggagcggctcccgggcgtggggaccaggccagcgccaagcccgagcccccgaaccccgacccacggcccagcctcctgcagcctcggctcgagc

SEQ ID NO: 71943 - DNA, 122 bp, Homo sapiens
aagagaattagaatgaagttggttgctttaggagcgagcggcggtgtgaatctgggtcggcgtttcccggctgggtttgggctcagtgttggtgagtgtctttgtcttctcttttaggattg

SEQ ID NO: 71944 - DNA, 122 bp, Homo sapiens
ccctggaagcagctggcaccagtcagcgccacggggaccatgggagcaaccacagggtggcgggtggcccctcgcccgaggcctggcgctcggcggtcacaccccccgagccccccagggca

SEQ ID NO: 71945 - DNA, 122 bp, Homo sapiens
attctctctgtggagccaatatactctgcacttcctacagtcaaaatactctgaagaagacggagattctaaggtccaagccttagggcaggagctcatttttgcttccttcagaatgagtt

SEQ ID NO: 71946 - DNA, 122 bp, Homo sapiens
aagcgcggcggggactcgagtcagaagtgcgaggcgccgcggctctggcgggggcaggagcggacggactggccgcgtggacagggagggagggcgggcgggcgccgcggagtggaggtgca

SEQ ID NO: 71947 - DNA, 122 bp, Homo sapiens
cttactctttctgctcgggaggctgaggttcctacatttccagctcatgctggactgtaccgtaagcaacaagtgaaatgagttcagtgatctcattctagtccttcgactcctgtccacat

SEQ ID NO: 71948 - DNA, 122 bp, Homo sapiens
gactgtgtcggtcacaggtcgctggggcactgacagacaaacagacgacagacagagccccggggctgggctggggctgggggcgccgccgggcaggggcccctgcgcggcccctggggaga

SEQ ID NO: 71949 - DNA, 122 bp, Homo sapiens
ccaccgacagagcgggctgtagtggagttagtgtaagggcgagtcccgtagagacctggccgtccgtgtgaagaggtcttcaaacccgtttggcgtgaggattcccctgcctttgcccgctt

SEQ ID NO: 71950 - DNA, 122 bp, Homo sapiens
agggctccggtgcccctaccccgaggcagctgctagatggcgctgttactccactctgcgcgctccgcctgccgacaacttgaccccgctgacgtcacggccgtctgaatcatcaaggccat

SEQ ID NO: 71951 - DNA, 122 bp, Homo sapiens
tgcgggctcctccatgctcttctcctctctccccagtgcaagatgtctctgaacgggcagcgtggggagtgctggtgtgtgaaccccaacaccgggaagctgatccagggagcccccaccat

SEQ ID NO: 71952 - DNA, 122 bp, Homo sapiens
gcggcgaggtgggaagggccaggatgcgagcttagcacctcccctagaaatgcagcacttcgcccccccacctcccctgccctcggcgctccctctttcacgcgctccctcccgcctccttc

SEQ ID NO: 71953 - DNA, 122 bp, Homo sapiens
agctcctctggaccgagccacacctctgcctgggaatcctgggctggggctgcagaagcccgctgcgcgcctcctggtttctatggagaccctgcttgatgtcaatggcggctccggagcgc

SEQ ID NO: 71954 - DNA, 122 bp, Homo sapiens
tcgtccccgctgtagcccgtgtcgcaaatgcattcgccgtcctcgcagcgcccgcggccccggcagtccctcggacatgtccgcgtgctgcagtcctcgcctgtgtacccgggccagcacac

SEQ ID NO: 71955 - DNA, 122 bp, Homo sapiens
gcgccctcaggcaacttcgtggacatgagccttcttccagccaccaccaccaccatcgtgcggtacttgaagaaatggtttaccgtcccacatacattttgaatatgtatgtgggatggtaa

SEQ ID NO: 71956 - DNA, 122 bp, Homo sapiens
gcaggaatgtgttcagtggggcccctgtgcctgcggcggcctggccacagccaagcaccgcgactcaaagtgtggtccacggaccggtgccagtccgcaagctgcttgctaccagcccgtga

SEQ ID NO: 71957 - DNA, 122 bp, Homo sapiens
tgacggccaagaacgcctgcccgacctcctgtggccacagcgcgtggcgtgactggacctcgccttagtaggggtggctctgggcaacctcggccccaggcacagctcctgacaaatggtcc

SEQ ID NO: 71958 - DNA, 122 bp, Homo sapiens
gggggctaagaaacctgggttctaattctgattataagcactgaacaagtcaagagaccccggtcttattttttatttcagcataaggaccttaagtaaatcaacctccttgaacctctgtt

SEQ ID NO: 71959 - DNA, 122 bp, Homo sapiens
ggacgtagggggatgctgaaggaagtaccttgttttgtctccaaagggcaacatagcaaacgtgggaagttcgttttcgaactccgccgatcctggactccaggaggctccgtaggggcaac

SEQ ID NO: 71960 - DNA, 122 bp, Homo sapiens
gctccaagtagagggtctttacacatgagtgccaaatgaactgggaaccctgcttgccctcgctcctacccactcccatggcaggggaccccaaaactggttgtctcctcaggtggagcctt

SEQ ID NO: 71961 - DNA, 122 bp, Homo sapiens
cctttgggtctctaataatggaaactgcaaggatcagcataaagtgttcctttgttctgacgttggtataacattgcttcttgaaaaatgaaagtatttggacatacagacagaagcaatat

SEQ ID NO: 71962 - DNA, 122 bp, Homo sapiens
atcagcataaggacagacataaagatcaatggaacagaacttgaaattccaggatgctcacggtctacagtgtaaaatgctgcactttaaggcatcccctgagagcgatttctttctgttaa

SEQ ID NO: 71963 - DNA, 122 bp, Homo sapiens
caccggggcgcccttcggggtgcagagccacaggtggggcccgtttgcgtcctgggctcacgcccacggtccaaagcagctgctgcccaccccgaagccacgcttggcctcgggagagaggg

SEQ ID NO: 71964 - DNA, 122 bp, Homo sapiens
cctcaacacccaacatttcatcctcaactccaaatccatctcttcagggccgcaaaaaagcgttacttcccaaagggcgtgttctccaagaactgcatttagcatttcagatcagagtgacc

SEQ ID NO: 71965 - DNA, 122 bp, Homo sapiens
ggcaggactggtaccagtacccgctggtgcccctcggctcccaaggatcccttaaaggggcgatggtaaaagtgcctaatgagaccggcttgattactccgcccacccatcttggcttagac

SEQ ID NO: 71966 - DNA, 122 bp, Homo sapiens
tagaagcaggccagggaccacccctgccggcccatcgagatgaaggatgctcttgtcgcacgggtgattattgtgcatcatcacaagggctcaggccacttgtcctggaaaacttttttatt

SEQ ID NO: 71967 - DNA, 122 bp, Homo sapiens
agggaggctggggcggctaatgctgaagggagcgaactgtcaccgagaaagcggaagacccggccaactgcagacacacacctggcccctcacactcagagcaaacctcacaacccagcccg

SEQ ID NO: 71968 - DNA, 122 bp, Homo sapiens
gatctctcattcctcacatgagccaccccatcaggtgcacggtgcaccgctgagaggcaacgcaatgacagaaggtacctgaggacctggttacctggccagggctggcgggccacacacgg

SEQ ID NO: 71969 - DNA, 122 bp, Homo sapiens
ggtccctgtcacctagaccttacctcccagggtctagcggatggcggggcaggtgggggacggcacgaaaaacagcagacacgatttcagaccgctggtggcggctgagctcaggtgggcct

SEQ ID NO: 71970 - DNA, 122 bp, Homo sapiens
ccagggaaactctgtgagtatttgtgtatcaaactataaatttagtggtacttaaaataccgctcaatagcatggatatttaaagataaggagatatatggtaaaggcctggttggcaggct

SEQ ID NO: 71971 - DNA, 122 bp, Homo sapiens
ccgcccgtccacacgcccgcccgtccgtccacatgtctgaccgtccgtccacatgcccgccgtccatccacatggccgccatcgactgacgtcagcagacctcagtattccctgtctccatc

SEQ ID NO: 71972 - DNA, 122 bp, Homo sapiens
ggaagggaggagagcgagggacttccgggggtaagggactcggtgaggaactcgggggatcggagaggggctcgtgtgctgggcgacagtgacacactcagcagcccggcgggagccgcggt

SEQ ID NO: 71973 - DNA, 122 bp, Homo sapiens
tcggccggcagaggctcctccagggttccggctggtgggaatctagggaggtccaggagacggggagacaacgaacaagcacgccggccaatcaagaagtgcctgccaggacaagtagccaa

SEQ ID NO: 71974 - DNA, 122 bp, Homo sapiens
agcctcacgtggctgggactgattctagagcccctaactcagctccgtgccagggaagaccgatcaccacaggccgaattccggggtcacggcagcttggcacccagcctggcagtgtgggg

SEQ ID NO: 71975 - DNA, 122 bp, Homo sapiens
ctcttccgtcttagaccctatgtgcacgaccttggatcgatcaacattgaacacctcctacgtgccaagccctgacatcaaaatgggtcagaagccagcagccgctcgctgaatctgtgttc

SEQ ID NO: 71976 - DNA, 122 bp, Homo sapiens
tggaacccatacttgctggtctgatccatgcacaaggcggggctgctaggcctctgtgcccgggcttggaattcggtgcggatggccagctccgggatgacccgccgggacccgctcgcaaa

SEQ ID NO: 71977 - DNA, 122 bp, Homo sapiens
aatagcatatatcatttttgcaacacaaagaaaaatactttaccttacaagccatacagacgtaaacaaaaactttatttctttttggacctcaataacctgaaacactcccgtttcaaaaa

SEQ ID NO: 71978 - DNA, 122 bp, Homo sapiens
tggctgctctcactttcaccttctctctggtgtcaaagagaagccttgaggccgtcccgacggcctcttccttacaggggaaactgctgtgagctgaacacataccgctctttcaaaccttt

SEQ ID NO: 71979 - DNA, 122 bp, Homo sapiens
gtaggggtgcgcgggctggtcagccggccgggagcggggtagggcggcggcgagaacgggcgcctcgctgaccggggagaagaggcctcctgccaaggggccctagtgtagccggagtgaga

SEQ ID NO: 71980 - DNA, 122 bp, Homo sapiens
ccacctacaggcaggcgtctccgggggcggggcttgctcagggttaacgtcactactgagcgccgggcgcgttccgttggcggcggattcgaacgttcggactgaggtttttctgcctgaag

SEQ ID NO: 71981 - DNA, 122 bp, Homo sapiens
atgtgacggtctccacgcaaatgcggcagccccggccttgggaggctgccctgccagggacgcccactgccctgacgacccctgacctccccattgcagtgacgaccgtagcccggaggtct

SEQ ID NO: 71982 - DNA, 122 bp, Homo sapiens
gtatgaaagtgttagaaatatataaatctacaccttaaaggttaattctcaagtggagctcgggcaccatcccagctctaaggctatttgctgtttgggttgttattattattattattatt

SEQ ID NO: 71983 - DNA, 122 bp, Homo sapiens
ggcctggagacaccgagggtcttgtgactggaaagaattccaaagcaggaaatgaaacaccggtttatcacccaggactaactacgtcagaatttcactggtgctgtcagggctcaggatgt

SEQ ID NO: 71984 - DNA, 122 bp, Homo sapiens
ttcggtggaaaaaaaatgatgcttttcaataaatgatgccaggtcaattggatatctacacgaaaaaaaatgagctctagccccgtaccacaccattcacaataattaatatgtaatcaatc

SEQ ID NO: 71985 - DNA, 122 bp, Homo sapiens
cggtccttgtccctctctgctcgggaatgaattctccggggcaaaaccgaggacgggatgcgtcaggggcttggggtgcaaatcccaaagaatttgacacggcttctctctcctcaccactt

SEQ ID NO: 71986 - DNA, 122 bp, Homo sapiens
tatgtggcaattggaaaatttaaaattacactcatggctcacactgtttccatcggacagcgctaccctatggcatgaccctcttttgctgccctcctggcacttacattgtagaatttcag

SEQ ID NO: 71987 - DNA, 122 bp, Homo sapiens
ggactggagcctgtctccgtcttctccctctgggagggtctggtgacggcagggggtgctcgtctctcaccactggagctgtcccctcttcaggcctctgagggagggcaggctgtcagctg

SEQ ID NO: 71988 - DNA, 122 bp, Homo sapiens
gactttggcaagggggcgaagaagcccgggtgtaagcgcagcaggactgcgtctgaaactcggcatcaggctgctaagtgagcccagggctcgggctggggcagcgggcggccaagcaagca

SEQ ID NO: 71989 - DNA, 122 bp, Homo sapiens
ggacacactcatgagcaacagacaaggcctctgctcttgtggagcttctgatcttgtcagcgagacagacattaatgaaacagtcatacagctattaactgcaacaaggaccatcaaggaca

SEQ ID NO: 71990 - DNA, 122 bp, Homo sapiens
ccccgcccctggcaagtatcccttctccacggcaagtgtccccaccctacgccatctcaccggagccagatgactcccagcaaaggctgcagcgatgggagagtccaggtactgcacctgcc

SEQ ID NO: 71991 - DNA, 122 bp, Homo sapiens
gagatgctgattccactgagttgaagtggggaccgacgggcagaccacctgggcaaggaacgctggtcttacccgtgtaggcggtgcaggtggggttgtaggagggcggggggtaggaggtc

SEQ ID NO: 71992 - DNA, 122 bp, Homo sapiens
cattccgtctagcccaaaaggttcctctacaaccttcctccggattggtctatagggacacgatggccttttacgcaagcgtcacccgtgctgacccggaagttttcttcccagttaaaagt

SEQ ID NO: 71993 - DNA, 122 bp, Homo sapiens
ccgtggagagacagttgatgacctgagtgtcccacctgccccagcccccagttactgtcacgcctctcttatgaggcccatcttgaagatgcaacctgtcacccagcccaggcctctctttc

SEQ ID NO: 71994 - DNA, 122 bp, Homo sapiens
gggtgggtgatcagacctcaaatctggggcctttgtttggagaacaagcaaagcagagttcgtgaaaagagaagatatttgggggtcacgggtgatctgccctccaaggatgtcggctcata

SEQ ID NO: 71995 - DNA, 122 bp, Homo sapiens
actgcatcgtacagcttcgggggacctccgcagtttccctgacccggtgctgcccctgaacgtgcctcacaggtccggcaggttcggctattccaggacgaggagatctacagcgacctgta

SEQ ID NO: 71996 - DNA, 122 bp, Homo sapiens
gtggcggcctcgcggggacccacggcgaggggagcaggcgggcggtgattggcggagaggcgggggcggaggccggcgccggccaatgtctcgtggcagagcacccgcccccccagcccctc

SEQ ID NO: 71997 - DNA, 122 bp, Homo sapiens
ggacttcgacgggtcccccgggcgcggaaggggatcctgggagccggcatgcggaaaaggcgccccctgggcaccgggaccgcaccaaactccaacgaaaggcaaaggcacggggcggtggg

SEQ ID NO: 71998 - DNA, 122 bp, Homo sapiens
cagggcctggtcgcacctgagcagcgcggcctccggctgctgctggcgctgcaggctccgcgcctggcctgccagcctgcgcagccggcactcggccgggaagcacttctccagcaggccgc

SEQ ID NO: 71999 - DNA, 122 bp, Homo sapiens
acctcaggtgatctgcccacttcggcctcccaaagtgctgggattacaggcatgagccaccgtgcccagcccatggctcttgttattttgaggtatgttcctgcaatacctagtttattgag

SEQ ID NO: 72000 - DNA, 122 bp, Homo sapiens
aaacgtccagggcaacagcgttcacattccggcggtgccatagagcagacggggggagtccgaggcggtgccgcagagcggacgcggggagtccgaggcggtgctgcagagcggacgcgggg

SEQ ID NO: 72001 - DNA, 122 bp, Homo sapiens
ttcagttctggccactgtattttcagaggtaaactgacaaaaactttgtcatgagtagagcgatatagatggggaaaggtctgtaaaccatgtcacatgcatgcggtttaaaaaaaaaaaaa

SEQ ID NO: 72002 - DNA, 122 bp, Homo sapiens
tgccgggccaatgtcaagagcggtgccatcatggccaacctgtcagacacggagatccagcgcgagatcggcatcagcaacccgctgcaccgactcaagctacgcctcgccatccaggagat

SEQ ID NO: 72003 - DNA, 122 bp, Homo sapiens
aagggcaggggaggcggggatttggagccctgctaaaaaggggctttcgaggcgaacaggcgtgattggtgggctgcactgaaggagatgaaagtggttgagggtttctgggggaaagacgc

SEQ ID NO: 72004 - DNA, 122 bp, Homo sapiens
tcgctcggcaggattatgcgatcacggatcagtcagagcagggtcaggagacggggctgacggcacgggtggcggggacagacgtttgggacttggccgcgactctctgcttctctccagct

SEQ ID NO: 72005 - DNA, 122 bp, Homo sapiens
gtcgctgagggcaacagaatgcggcttgacagatccagggcctgggacccctgctggaatcggcgcggcctgccagcccaccccaccccacgtccccttcccggacctgggcctcccctccc

SEQ ID NO: 72006 - DNA, 122 bp, Homo sapiens
cttatcatacttgtacattagtgcctaccatatagtggggcttaatgagtatctgttgaacgaataatcttttcatatgtagacgctggttctgggagggcaaaattaagtccctattcttg

SEQ ID NO: 72007 - DNA, 122 bp, Homo sapiens
aaagctcccttctactcggcgcactccatctcttgcgttatcagcttttcagcgttgactcgccaaactactccagccagacctctttcctgagctcagacctgcttactgtcatcgtcagc

SEQ ID NO: 72008 - DNA, 122 bp, Homo sapiens
tgcgcgtgtcccgcggccgagctgctaataaagttgcagcgaggagaagcgcagcgacggcgtcgggagagcgcgcctagccggctcgcgagtgagtgagggtccccggcgcgcgcgggcga

SEQ ID NO: 72009 - DNA, 122 bp, Homo sapiens
acagagaggcggggcggggctgagattccggactaggggaaacctcacctgtggccagtccgctcgctttccccggcccccaccccccctcctttccctggggcttagagtctatgggccgg

SEQ ID NO: 72010 - DNA, 122 bp, Homo sapiens
aaaggttgagcgaaagtgagaatgcaaggttttcctgaacgacgttgcttagaggtaacgcggggctgtgatgtctgttaatgggcatccttgcaaaagatgtcgtttgttgctagtgacgt

SEQ ID NO: 72011 - DNA, 122 bp, Homo sapiens
tataacagacaatcatgaaaaaaggccaaagtacttcatctttacgctttataaactgtacgggaaatgcagtaaggcaagcttctcaacactgactcaaaatatcctggatcgcaatttgt

SEQ ID NO: 72012 - DNA, 122 bp, Homo sapiens
gccaaccaggccttcctggtgagtgcgggggcctgaggcctgtgggaccagggcacggatcgtgactaaggatggcaggcactgagtgtcgcatggccctgcctccgccccccagggcttca

SEQ ID NO: 72013 - DNA, 122 bp, Homo sapiens
atgggctgcaggaggccagcacagcccgatgggccaagaactgggtactacccaccatcacggtgcagtcacaaaggaaaccctgggaccgctgctcccggaggctctgcagcagctgctga

SEQ ID NO: 72014 - DNA, 122 bp, Homo sapiens
ggctcgaggaaggcagtgctgtggaattctgggaagcgtagtccaggtcctcctgatactcgcaggcacttccgcccaggaagacgacgtagcagccatcttttccctggctttggtgattc

SEQ ID NO: 72015 - DNA, 122 bp, Homo sapiens
atcagtatgtaactgaaggcttgccacactcactgcattgataaggctcctccccagtgtcggctgtctgatgctgaataatatgcatcctctgatcaaagcgttcccacattcattacatt

SEQ ID NO: 72016 - DNA, 122 bp, Homo sapiens
ggcggacgaggagaagctgccgcccggctgggagaagcgcatgagccgcagctcaggtgccgcgggggtcggggctggggcgggactgcgcgggcccgcgtaagcagggctcgagctcgccc

SEQ ID NO: 72017 - DNA, 122 bp, Homo sapiens
tttcctgcgatctcaaaggtccagattccacattggggatgggcccaactgactttgcttcgctctcattagccggtggtcctccaggaaagcggggccgcctctccgctgtgctctcatag

SEQ ID NO: 72018 - DNA, 122 bp, Homo sapiens
gctataccgaggcgtgggtttgcacttgcaaagagtaaatacactcctccccggagccagcgagctgctcagagcggcggaaacagggatcacgcagatctctccagtctgtccctgccccc

SEQ ID NO: 72019 - DNA, 122 bp, Homo sapiens
ctttccgttcgaacggctggggctctgcccgctcgctgcccattggctggctctcggtggcgtcaccgccttgggtcctcgcgcccttcgtctgcgccagccctggaagcacggggcgggac

SEQ ID NO: 72020 - DNA, 122 bp, Homo sapiens
attcattttattctatcaaaattatttctcaatgccaagatattttgtgtgacgtagattcggggacagactgagtagcacaatacctgggaaaagttaggtgctcagcaattataattgcc

SEQ ID NO: 72021 - DNA, 122 bp, Homo sapiens
cagggaacatggggcttctgtgcctgggaaatagccacaaaccacgatgccagctcccgtcgcttggggatcttctcgcaggttcctgcatggggctgcccaggccctacctaccagccccc

SEQ ID NO: 72022 - DNA, 122 bp, Homo sapiens
cggactccctcatcagcctcctgctgtgctgtgtacaaatcctcctcctgcatgaggccccgctgtctaactcagcaggggagaatgggaggagccaagggaatccgtgctttaggaccaac

SEQ ID NO: 72023 - DNA, 122 bp, Homo sapiens
cagggactaactccaggtctgcgcgcgtccaacgagcacggctctcaaccggcctcctggcgcccaacgaccatggcttccaaccggcctccgtgcgcccaacgaccatgactcccaaccgg

SEQ ID NO: 72024 - DNA, 122 bp, Homo sapiens
gaaccaatctaaacggctcttctaggctcactggtacaggagcaactctgctgacaagcccggggatggtcagatcccaccaccatcaccaagactgaggagggtgcaaagacccctcaccc

SEQ ID NO: 72025 - DNA, 122 bp, Homo sapiens
caacaaaggtgacagatccttggccataagcccttcccactctggtcgcctgttcaactgcgccacctacaggttgagttgctcactgtttctttggagccacatggagttcgttcattcct

SEQ ID NO: 72026 - DNA, 122 bp, Homo sapiens
atctgagcatgcagagcagccacatcagcgtttcttcccgggtgctgccatggctgctcccggagagcccagatgtgcaggcaccttgatgggacattgactgtttaaaaggccactggtgc

SEQ ID NO: 72027 - DNA, 122 bp, Homo sapiens
ggtttctctttcttctcctctcttgcctcttttcgccggctgcctttctttaaatgtgcccgcctcaggcccctcccaccgcagccccgactccacccattgggtgctctcagaagaggggc

SEQ ID NO: 72028 - DNA, 122 bp, Homo sapiens
tgctgacgctcagctcccggccctagtgctgaagctgctgaagatggctacgggcatgcgcgccctgctggacactgtggtgcaagctctcccccaggtaggtggagcccgcgccatcctca

SEQ ID NO: 72029 - DNA, 122 bp, Homo sapiens
aacgaaggaccttatgaaacacacccccaaagcaaccaaccaatccaagaaaaaaaaacacgtctcagggctccattggttttcctggctggggggccctgaccccctgttctagcccggcc

SEQ ID NO: 72030 - DNA, 122 bp, Homo sapiens
aggagatgggggaagaggatgcgactgatgtgcggggtttcttcctcaaaaaccctctgacgggacctccagagcatatagagaggccaggttgaccttgagcccagtttgagagggacagg

SEQ ID NO: 72031 - DNA, 122 bp, Homo sapiens
acttgggaggtagatgttgcagtgagctgagatcacagcaatgcactccagcctacagagcgagagacccctctcaaaaaaaaaaaaaaaaaaaaaggagttccttgacaaaagaaatgtgg

SEQ ID NO: 72032 - DNA, 122 bp, Homo sapiens
tggcaaaattagaaatagagctttggggtccattacagaccattatagttttaaagtgaacgacagaatgtaaaacttctgcctaggtcgaacgactctatgtcatcaccaagtgaacagac

SEQ ID NO: 72033 - DNA, 122 bp, Homo sapiens
gccaccgccccccaggtccgtagggaccaaagaaggggcgggaggaagactgtcacgtggcgccggagttcacgtgactcgtacacatgacttccagtccccgggcgcctcctggagagcaa

SEQ ID NO: 72034 - DNA, 122 bp, Homo sapiens
ggatctgcgccataaaccgtccaccccggttctgttgagggcatccgaaactagacagtgcgtttcaggatctaggacagctcccgccccggccacctgtttttaaccccagctaggtcttg

SEQ ID NO: 72035 - DNA, 122 bp, Homo sapiens
ataggcgtcgctaaagctccaggctgcccagagcctagagtcgggacgcctgcaggggcacgggagcggagaggaggattctgagggccagtcggagggggacaggggcagggcttgggata

SEQ ID NO: 72036 - DNA, 122 bp, Homo sapiens
cctacccagcactggagctgatttaggcagcaatgggaagtacatgagaaggagtagtatcgaaacatgctttgcctaggcttctagtctccagtgggatggagggaagccattcctgatcc

SEQ ID NO: 72037 - DNA, 122 bp, Homo sapiens
atgctactccccatatcgcaggatgtgtaaaaacccctgtgatattctttgcattatacccgggggaggagatgatgttaccaatcatatcgccgtgtgtgtgtgcccccctgcgatattct

SEQ ID NO: 72038 - DNA, 122 bp, Homo sapiens
tacattcaggaggtcaggaagaactccactagccatcataagttgtcctctttaccactccgagggaactatgctagctgtcttattcctctccaaataagaaagtctgattgctatctgag

SEQ ID NO: 72039 - DNA, 122 bp, Homo sapiens
taactttcagaggcttccagctcagtaaagacactgatcaaatcttggtaaaaatgggctcgtgtgcagactttaggtgatgttcttcagcaaattcaacaggccaaaggagtgtttgtcac

SEQ ID NO: 72040 - DNA, 122 bp, Homo sapiens
tgtgccctgcttgatttgaaatccatgctgtttatggaaaggaacctgcagggcacccagcgggaagtctgtgtgacaagtggaaatctagaatctggaagaaacgtggtgtttgaggggga

SEQ ID NO: 72041 - DNA, 122 bp, Homo sapiens
gcggcagcccctgcaggtttctgcgaacttacgcgcccgtctgcacttttgccccgtccccgctcctcccaggaaagcagacaggccatttcaataccagcccagagacacgcagagaagcc

SEQ ID NO: 72042 - DNA, 122 bp, Homo sapiens
gaacgcggtacacacagacactgaaaagtcctgctgtcctcagcctacatacacacacagcgccctgcagtcccgcacagccagcacaccacaccggcctggacacaaactgtgcccacaca

SEQ ID NO: 72043 - DNA, 122 bp, Homo sapiens
aaactcagaaacagttgcttctggattttggcttctcagataaacattctttttgtagttcgtttgttcatccctcattttgctgtctgactttgcctttcttttcccttcactattactga

SEQ ID NO: 72044 - DNA, 122 bp, Homo sapiens
tcccagcgcgctcagcagtgcagagtggaggggccaggcacccactggagccacccagcccggcttccagccccgcctccagctcaccagcagctgacctggtacgaattgcccagcctctc

SEQ ID NO: 72045 - DNA, 122 bp, Homo sapiens
tcgggacctggagggctgggggctgcccgggcgttaggggtaaagctccctacccaactgcgcagaaggcctcagaggcctgggggctgggcttcccctttcacatcgccctttagaggccc

SEQ ID NO: 72046 - DNA, 122 bp, Homo sapiens
cagaaaggctcttgataataacttagaggcttcatccttgcatttttctcaagatgaaaacgctaacataatgagctgtcaaggtaggttcatcaattgtaacaaatgggccactccagtgg

SEQ ID NO: 72047 - DNA, 122 bp, Homo sapiens
gtagcttctaggacctaagagtggtccccaggcaccaactaacaagagagaaagagcctccgacctggggcaaaactttgatttcaaccttgtaagaccctcttcagagcacccaattctct

SEQ ID NO: 72048 - DNA, 122 bp, Homo sapiens
gcctgaagcctggggaaccctctctcccgaggcttgaaccgtctcgaccccacgcgaccccgcagccccgatagcgcccccgtgcgatcaccttgaggttcaggaaaccgtgctcacccagc

SEQ ID NO: 72049 - DNA, 122 bp, Homo sapiens
ggcatatttttgtcaggagctcagctaagctggagaaagtagccaagtaaaacaacaagccgaaatgaagataacagtcaaccctttaatcacttactgtgatagtgtgagctagaaacaaa

SEQ ID NO: 72050 - DNA, 122 bp, Homo sapiens
tgtgcctgtgtgtgcctgggagtgacctcacagctgccggaacataaagactcacaggtccgcctcccaggctcaaagctggctctgcaggggacatgagaggcacaccgaagacccacctc

SEQ ID NO: 72051 - DNA, 122 bp, Homo sapiens
gaggtgtgagcagctgccgaagtcagttccttgtggagccggagctgggcgcggattcgccgaggcaccgaggcactcagaggaggtgagagagcggcggcagacaacaggggaccccgggc

SEQ ID NO: 72052 - DNA, 122 bp, Homo sapiens
tctgtacaaggttgaaaacctgggccgggggtcgcgttggaaccccacaggaaaaaggcgcggaaagccgccgggcattttccggggttccatagatgtccccagtgtcctagtccgtgcat

SEQ ID NO: 72053 - DNA, 122 bp, Homo sapiens
gagcgcctctgcctggcagccaccccgtctgggaagtgaggagcgtctccgcccggcagccgccccctcctggaggtggggggcagcccccacccggccaggtgccccatccgggagggagg

SEQ ID NO: 72054 - DNA, 122 bp, Homo sapiens
agtgtaacacggcttgcccggtgtttctccacggtcctgccgcactgcccctcatgaccccggcatgggctttgctttctgcggaccctcttatttgtcgaagatctcgggagtccacacac

SEQ ID NO: 72055 - DNA, 122 bp, Homo sapiens
agactccatgtcaaaaaaacaaaaaaccaaaacaaaacaatgaaagcttgaaaaactgtgcgtgctcatgctaggagaataggcagtggtactgaaagacaggatgtgggatagatctcaac

SEQ ID NO: 72056 - DNA, 122 bp, Homo sapiens
gcgaacaacagaaaaaaaaaagcgcgctctccctgcccctgaaacattcccagaagcccacgcagaccagaccgatgacctgtctccactgctggaggcgagtcagggacccgaagtctcta

SEQ ID NO: 72057 - DNA, 122 bp, Homo sapiens
aagaaatcgtttttcatattgttgttcagggaagctcacagtcagattgaaaagcggcgtcgggataaaatgaacagttttatagatgaattggcttctttggtaccaacatgcaacgcaat

SEQ ID NO: 72058 - DNA, 122 bp, Homo sapiens
ttgaccttttctgtgccttagtccccgctcctgcaaggtggcatgaaaacagcctgtgctcgagggccggtgaggcctgagtaagtgaatggtgtgaggagcttagtggagtgtgaggcaca

SEQ ID NO: 72059 - DNA, 122 bp, Homo sapiens
aagaagaagcggaagaaaaggagaggaaaaagattgccaggtaaccctattttcccctgacgtgtttgtccaggggctgtgttgggagccctgcaacagttgcagcctgccaggcttacccc

SEQ ID NO: 72060 - DNA, 122 bp, Homo sapiens
attacagacatgttggcacaggaacaacatctgatttcataacagggacattttattatgcgttactttagtaaatgctgcagttgatttcattgccaccagagggcagataaactgctaat

SEQ ID NO: 72061 - DNA, 122 bp, Homo sapiens
cagcctcttcttggagtaggacacggtgtcgcccaccagcttctcactgtcctctggggccgatgagtccgcagctcgaaaggtggcgtgcactggcagcccacaaatggctgcggtgtagc

SEQ ID NO: 72062 - DNA, 122 bp, Homo sapiens
aagagcagccacccaggtgtctccctctgagagttctgaagtccgcgggcctgagaggaacgcaaaactccctcattccgagtcagtcacaagaggccccgcccccagcgctgctggatgca

SEQ ID NO: 72063 - DNA, 122 bp, Homo sapiens
aactcctccttgaaggagcgggaaggcccgggggacacgtcgggactccgctccatggcacgagcagccggctcgggcgcccggaacttttgctccggcccctcccacccgcccggctgcca

SEQ ID NO: 72064 - DNA, 122 bp, Homo sapiens
accaaaacccagaaaccactaagccctgagggggtgcactatggggcaggggaggggcagcgaggggccagctctcacctgcgtgacgtcatccctaggcgtcacacaggtctcaccccctg

SEQ ID NO: 72065 - DNA, 122 bp, Homo sapiens
caagtgggagcggaccttgcgccacctgccccgctcgcgggaaaggcagtaggagggaggcgactaggtctctagcgacagaatccgcacctgccccacgtgccctggctgcaagtcgcgac

SEQ ID NO: 72066 - DNA, 122 bp, Homo sapiens
atgtattgtgggctccaggcgctgtgcctgctgtgcctcatgtataggtcaatcctggagcgcagctggaagacggaacacgggagctagatctccatcgcttacaggctgcgtgatctcga

SEQ ID NO: 72067 - DNA, 122 bp, Homo sapiens
tttttccccctggtggcttaaatggcctggagtcatttcccatttctcccttcccactagcgccagtcctccctcgctgctgaaaaattcaacattcctataaactacagtacttcgtaaag

SEQ ID NO: 72068 - DNA, 122 bp, Homo sapiens
actaacttacctcctgtgccagcagcgcccaagtgcagctgcccaaacgtgagcactgaccgtgagccaggcactgtcctaagcactttgcaggtaaatacgtgtaatcctcacagcaacac

SEQ ID NO: 72069 - DNA, 122 bp, Homo sapiens
ggaatgaagctgcggaaaaagtcaatgtgaagagctggcaggaggagaaggtggaaagcgcgatggaaatcaaatgcggtgccagccacggcattgttttattagcatttgctcgaggaaaa

SEQ ID NO: 72070 - DNA, 122 bp, Homo sapiens
aaccccaacgtgtcactgtcacgggacacttcacacgtgcatgagatgtacatatgaaagcgtctctgaagtacagctgctagaataagagtccgttgtggtccatttatcgcctgttgaag

SEQ ID NO: 72071 - DNA, 122 bp, Homo sapiens
gtaatgaattactgaacaatttaatggattaaaacaacaataaacatttgtcatttctcacggtttctatgtggcaggaatccaggagaggcttactgggggcagttttagcttagggtttc

SEQ ID NO: 72072 - DNA, 122 bp, Homo sapiens
taacccagaagagaggagagggctgagcagatgaagtcatagctgtccacttccttgcatcgggcacggtttaggaatgcagaatacaaatattgctttcagcaagcatcatcctttccagt

SEQ ID NO: 72073 - DNA, 122 bp, Homo sapiens
agtgggttcccttgtggcccgacgtctccctgtgtcttcatacctaaactcggagcggggcgccaggtaaggatgagtattacagtccgagaagcgaacttccaagtcacctccgcccagtc

SEQ ID NO: 72074 - DNA, 122 bp, Homo sapiens
accacgcaggagaaagcaagcactaagaaaacaaacacgaagtgaaggcgcacccagacccggagctgagtgctggccttcgttaattcctatttaaccagatacagctgtctttccctaac

SEQ ID NO: 72075 - DNA, 122 bp, Homo sapiens
tggaactcctgtagaagatactttgaaccgctttagatacaataggatcaggtaaaacggcgctgccttgccagccactgcaggttttcacctgacacagcccccagaccctgtctacgaat

SEQ ID NO: 72076 - DNA, 122 bp, Homo sapiens
cctttgcactatagctcccaaaagacagattgctggagataacctactgaaattcctcaccgtgttatttaacaccatacaggcctaggaactatctgttttgggaaagactcaggcagacg

SEQ ID NO: 72077 - DNA, 122 bp, Homo sapiens
cggcacccgccacccgccgcccgccgcccgccgcccgccgccagcccccgccaagtctcccggacaacaagacaaatccgctttggcacacagtgagacgcacaagaccgtgggcctcacct

SEQ ID NO: 72078 - DNA, 122 bp, Homo sapiens
tcctaccttgaatgagtgatggagccactaggtagaagatcaacagacaggaatgaaccccgtgaaccaaccagtggatccagcatatgagcctctgccaaacggtccacgcagagccgcag

SEQ ID NO: 72079 - DNA, 122 bp, Homo sapiens
cactcagccttttcatcactcggcggggagatggatggttttccggaccgggcgtcccagcgccccggttagctatagggagacgtcagagcgctctggtccgcgatagaagagccccccag

SEQ ID NO: 72080 - DNA, 122 bp, Homo sapiens
gcggagcgccctttgctaataagccaatcagaacgtgagacgctccggtggggcggtgcgcgtcgagcgcggggtggagtctgggtgacttggctggcgggatcaagtgcagctgcttcagg

SEQ ID NO: 72081 - DNA, 122 bp, Homo sapiens
atgtagtgacagttaactgattcagtatagaaaccttgggaaactatgctctccatgttccgcagagccccagtgtctccttttcagaggcctcttccttgtcccctcttatcctatgccat

SEQ ID NO: 72082 - DNA, 122 bp, Homo sapiens
gggtaggggaactgaggagtgggctgggcctgggagtctgctggggaagcggacggtcctcgagagaatgacaggaaagtgggaaggactgaggagtgggcagagcctgagaggcaaacgga

SEQ ID NO: 72083 - DNA, 122 bp, Homo sapiens
cagcaaccccaaacaggcttaggcgggctagaagccggggtcgtgtctgactggggcagtcgcacggccggcggtgcggcccgctcggctctcgcggaggccacagcctcgagaaagggtgg

SEQ ID NO: 72084 - DNA, 122 bp, Homo sapiens
ttggaggataattgagcctgggagagctttgaatctggccctcctgagaccccagggctgcgccgctgccgcgcgccaggcctgggtcccggtgctcccgggcacctcaggagcggagggag

SEQ ID NO: 72085 - DNA, 122 bp, Homo sapiens
gacgggcacgattgctcgtagtctggggtgctgcggtgcggggtgctgcccagggtgtcccggccgccgccactgagcgctggggcgcgcgaatccagctgcagccgctgctgccctgcgcc

SEQ ID NO: 72086 - DNA, 122 bp, Homo sapiens
taaggaatcggctctgcgaaggtgcgaagaaccaaatcctagcgattaatgtcccaacaacgtgaacacttcctgcaactcgaaatcctcaagggaaactctgtcgaatccccaccaagtga

SEQ ID NO: 72087 - DNA, 122 bp, Homo sapiens
tgaggtcaggctaggcccgcccggtcttcgcggggacaagcaagagtcccagattttggccgtagtgcagggtggaaaggggaagccgcgacagaactgaaaaggggaagcgctggctgtct

SEQ ID NO: 72088 - DNA, 122 bp, Homo sapiens
gtataatgcatgcagcctccgcggtgctcaaatctcaccaaaaaccagggacagcgacagcggtcggggccgtggggccacatgaccaccagcctcagggcaactgtccaatgctgggattc

SEQ ID NO: 72089 - DNA, 122 bp, Homo sapiens
aaagctgtaagcgtttgcgtagtaattgcaggtcccacggccgtgacactcgatgaatggcgcacttctaaactcctccaggcaggagccgggggacgccagggcttggccagagccttctg

SEQ ID NO: 72090 - DNA, 122 bp, Homo sapiens
gttagggcccgcgttgcgacgtggtgcagcgcatattttcacaagtgggtctcccttgtccgggactatggccaccgactcgtgggccctggcggtggacgagcaggaagcggctgtcaagt

SEQ ID NO: 72091 - DNA, 122 bp, Homo sapiens
gtgcagcggcacggggttgagccgactgctggggcagagcgcacagagtgctgtcgggggcgatgaatggccagaatttcagagctgcctttacagagctggttatgtttgagctgggtatt

SEQ ID NO: 72092 - DNA, 122 bp, Homo sapiens
gctgttttgaaaatatgaggggccatccaaataaaaatttaaatttcctacccccagctccgaaaagaagttgagtcaaactacttcctgcagagctaaaagtccttgatgttgcatgacta

SEQ ID NO: 72093 - DNA, 122 bp, Homo sapiens
aagttacccagcctcatccctcccacccctgagcaagcttcagggccagcccggcactagcggaggggaaggagcccattctccccatgagaagactacaaagcacccacccagatggggta

SEQ ID NO: 72094 - DNA, 122 bp, Homo sapiens
accacttgcttgtaattttaattgcagataagtttttggatgtgcttccagcattttgtccgttggcagtaaatcagttgttgaagggaattgctcatcaacatccatcacctagaacgctg

SEQ ID NO: 72095 - DNA, 122 bp, Homo sapiens
ttgaagatgtgaggctcagagccgttggcatgacatgtgtcaggtggttggagggtgggccgcagccatcaaagttgttatgcagggggccggcctctgtctccttgggagttgttcttgct

SEQ ID NO: 72096 - DNA, 122 bp, Homo sapiens
ctgttataagcagagaataaaaagccaggaaagggagacagaagcaacaagaggaagaggcgggctattgagggatcacattcccagaggaaaggaggagctggagagcctgggtggaggga

SEQ ID NO: 72097 - DNA, 122 bp, Homo sapiens
cctccccatccaaacaccatttccaaagagctgtgctggttccctgactctctaaaggaacgagaactccccctctccagaagctcccacgacaccggaagcacatactaaggactgagtct

SEQ ID NO: 72098 - DNA, 122 bp, Homo sapiens
tgcaaggtggtatcaataacttcatgttagctggttagcaaaagaagctatatagtgcatcgttgtaatactaaggcatcatatagaagatgtaatgagattggtatgctagaatcattttc

SEQ ID NO: 72099 - DNA, 122 bp, Homo sapiens
caggagctctgcatgccgctccctccagacaggacatggggccctgacctggaggccaggcgtttctagcattgttgactgccagtttattaccagtaaataaagcaatacgcttttcagga

SEQ ID NO: 72100 - DNA, 122 bp, Homo sapiens
tgccaccttcagtccagtggtggacaatacctggaccccatagctgccaactcgggaagccgcgcccccccccaggtgcccaccgcccccagggtacccgggcattccccgaggcctggctc

SEQ ID NO: 72101 - DNA, 122 bp, Homo sapiens
cggaagggcttacctggtggcaggtgagcaccagggcagtccacacgaagatccccgagacgcctcgggccagtgcggaggtgaggaagagccagggggccccctgggagctgttccccatg

SEQ ID NO: 72102 - DNA, 122 bp, Homo sapiens
cctgggtttaagatctgcagtaccaggggactgaaaatcccttctgcctgtgacacaacacgactaaattactaaggatgctatttactgtaacagttccaaaactttctaaaattttcatt

SEQ ID NO: 72103 - DNA, 122 bp, Homo sapiens
tgcaggtgcctggcaggcctggggatttacaccatctggtccccaggcactgcattccatcggggtggggctctgccacctgccccctccccaggcagaattttgttgcccctttccaagcc

SEQ ID NO: 72104 - DNA, 122 bp, Homo sapiens
ctcaaacagagtgccttaaaaaattgttttatcaggataattgtctcatgaccaaatccacgctcaattagagccattcaaaattccttaagatcatgggttctgacttcagccaaacaaaa

SEQ ID NO: 72105 - DNA, 122 bp, Homo sapiens
ggttttgagttccgcacccccagcctctgagctttgcccaggcgctctccctctcccaagcgcacgtccccagcagctctgccatcggctgatcctgctcagtcctgcagtcaactaggact

SEQ ID NO: 72106 - DNA, 122 bp, Homo sapiens
cagaaccctgagggtgctacactcaaatctaatcctactcacaactcagcaggcagtcaacgtcttgcacaaactgccatatcaccaaccagaggcacagatatggacacaatggggccaat

SEQ ID NO: 72107 - DNA, 122 bp, Homo sapiens
gtggaccgggatcctcaggggtgcggcgccaccccacgtgctgacgtatggcccagaagccgcctcatcgcaccgccccaccagcctggaggagcgggctctgtcccttggcccagcggcac

SEQ ID NO: 72108 - DNA, 122 bp, Homo sapiens
agcaggacctgagctgcggctatgactctggcaaaaggagtctggtcttgccggaacgggcgggggttgggggtgtgggccggggagatgccacagggtcattttcaggaactgaagggcgc

SEQ ID NO: 72109 - DNA, 122 bp, Homo sapiens
atacacgaatttaacccatcagtgaacccaccgactgctcaatcaattcatgtgacttagcgctgctgctgcaagtatgaatctgggttactgcctgtgaaaatgacaacttactcttatct

SEQ ID NO: 72110 - DNA, 122 bp, Homo sapiens
gactcttgctgtgcggtttcttatctgctaggacccttccagggcgtgtgttgctatgtgcggcagggggtaccttcgaagtcgaccagaccgtccccattgaggtccacgtcctggaggat

SEQ ID NO: 72111 - DNA, 122 bp, Homo sapiens
tcagccgtctgcatccttgtcctcaaactgctgttaattaaaatctttgccaatctgggccgggcgcggtggctcacgcctgtaatgccaacactttgggaggccgaggccggcggatcgcc

SEQ ID NO: 72112 - DNA, 122 bp, Homo sapiens
aaagacgtacactgctctatctgacctgtaaatgagaatttcaacacctcccccaagcctcgcggcgcggcgcgtgatctctggttcactgcccgggtccgtggggcagggcgcgccgccag

SEQ ID NO: 72113 - DNA, 122 bp, Homo sapiens
aaccggggctgtgcgaggggcttgtgggccagcgtgagtttcgggtgggcatgggctcggcgggccccgcactcggagtggctgccagccggcaagccccgggcagtgaggggcttagcacc

SEQ ID NO: 72114 - DNA, 122 bp, Homo sapiens
tggaggattttgagcctagacactcctccagagcaggctcctgtcccggctgcggaagtgcgcgcgccctcggcaccttaacagttccgcccctctcccggacccagccaatcagcggccgc

SEQ ID NO: 72115 - DNA, 122 bp, Homo sapiens
agcaacccaagtacttaccaccctcttctttctgaaagtcctttccataggggatcagtgcgtaccattcgttcaatcagcttcttccaaagcattccttctgagatcactcgctgccattc

SEQ ID NO: 72116 - DNA, 122 bp, Homo sapiens
tttcttgtggacgcccccggacaggtttcttgcgtacttgtttgccgtcttgaatgagagcgtttggctgctgagcacgtgctgtggcccactgtttggatttgtctacttcaccctgctct

SEQ ID NO: 72117 - DNA, 122 bp, Homo sapiens
caaatctctctgcttccttcgatgttgcctgtggcagaaatttacattatcccttcagcccgcttaaaaaattctgtacttcccaagcggctaaatttttaaagtccctcaaccacaaaaat

SEQ ID NO: 72118 - DNA, 122 bp, Homo sapiens
taggaataatggatagtctctccaggctcaggtaatcctgtctgacttgatctgcagcatcgagtcaaccctcctttccccaagggaaacgttcttctattagaggatgagagcttcaacat

SEQ ID NO: 72119 - DNA, 122 bp, Homo sapiens
ggatggggagggcgcgccgcccggcggtcccagcgcacaggcggccacgatgagggtcaacgagaagtactcgacgctcccggccgaggaccgcagcgtccacatcatcaacatctgcgcca

SEQ ID NO: 72120 - DNA, 122 bp, Homo sapiens
cacatttaggaacgtcttgattaaataagatgcaatgggcttctatgtcgtgggcctcctcggagcctctagtttggaagtggctctcatgaacttaccgtggggcgcgatcattggcagca

SEQ ID NO: 72121 - DNA, 122 bp, Homo sapiens
gggcgggagagacaggaatcccaccttccgccatgccctccttcagggcctggcctcacacgtgcctggtagcaggatggcaacccgatggcgacttcaggcttcacacccacagacgaccg

SEQ ID NO: 72122 - DNA, 122 bp, Homo sapiens
cacatccctgacctttttggcttcatgcttggagcttggcaccccctgagaaccacactccgttgacctctgggaaatggaggctggtgattctcccagcaaacccgcctgggaactaacca

SEQ ID NO: 72123 - DNA, 122 bp, Homo sapiens
ttaactagtctcagtgatctcacccacaaagtgtgcataataacatctgcctcactgggccgtcatagagaccagcgagctaatcaggtaaagaagtcagcaggggctagaacagaatgggt

SEQ ID NO: 72124 - DNA, 122 bp, Homo sapiens
gggctagccacgctatgggcttccagggctttcctggaaggaacagcgacagtcagggttcggtggaagctagcccccacccagatggcattctcccgtccactgaaaactcagctgcctct

SEQ ID NO: 72125 - DNA, 122 bp, Homo sapiens
tttcctagaggaagaatgggcagggaagatgtgggtctaaaggcagaaagacttaatgtgcggtttcgggctttactgtgcatacatactaactgtgaaaggttttcacttcctcctcagga

SEQ ID NO: 72126 - DNA, 122 bp, Homo sapiens
agctctaaacgccaccgcggctgttctcactaactcggctgcccagcgctctccgccgcccgttgcggcctctacctgggaccaggctaaccctcctgcgggccggcccacggcgctactaa

SEQ ID NO: 72127 - DNA, 122 bp, Homo sapiens
acattccaagtcaatgaaacgtaggaatgagtatcaaaatcaagatagcatccagaggcccgacccagaatctctagagatgggtaacaaaacatgttcctaggggtggcccttccctggct

SEQ ID NO: 72128 - DNA, 122 bp, Homo sapiens
gagaagcccccaaagctgagctcctcattcctacaaaagcaggggtcaacaaactatgtacggcctgtgggctagtcatttgcttttttaaatacagtttacacttttggagatttgaaaaa

SEQ ID NO: 72129 - DNA, 122 bp, Homo sapiens
taatcagtcttgcatcagtctccagtcattcatataaaggagcccggggatgggaggattcgcattgctcttcagcaccagggttctggacagcgccccaagcaggcagctgatcgcacgcc

SEQ ID NO: 72130 - DNA, 122 bp, Homo sapiens
cacgctgggacaaagacaggcacacctgctggcggctgaggaaccacaccctgtgggttgcgggaggacaaggcaggctcctgtgccggcaaggtggggtcaaccccgaaggtcgaggacac

SEQ ID NO: 72131 - DNA, 122 bp, Homo sapiens
aagtaaaataaccaataacctaaatttcagatgttcaaaagtactgagagaggggaaactcgggcaaagccagaaaaacagagttgtttccacgtttcactaatgtgttgggtttgagattt

SEQ ID NO: 72132 - DNA, 122 bp, Homo sapiens
tgttctagtttcctcatctataaaaaggataatcgtttccgcttcgtggggttaccatgacgattaaaggagctaacacgtgacaaaagctttaaaaaatgggtggtagtgagccctgttta

SEQ ID NO: 72133 - DNA, 122 bp, Homo sapiens
ggctcatggccaagcacgggccacgacagggcagggagcgcagcccaggccgggaggccgcggaggccccacgcggcagcacggaaaggccagctgtccgtccacctgtctgtccagccccc

SEQ ID NO: 72134 - DNA, 122 bp, Homo sapiens
ggccagccccggaacggttggcggcccttcgtgattggcggtcgagaagcctatataaggcgcggggcagccaggctgccctgtttagcgaccggacccgaaacggggaagttgtcttgttt

SEQ ID NO: 72135 - DNA, 122 bp, Homo sapiens
agttcctgattttatcgaagggcctgccgctgggagatagtccccttggggtgacatcaccgccccaacccgtttgcataaatctcttgcgctacatacaggaagtctctggccggctgggg

SEQ ID NO: 72136 - DNA, 122 bp, Homo sapiens
cttggctcaatgaaaatgattaggctggctgagcaactgcaagattagctgaggctttatcgattgtccactgaatagtaggtttctgtagaaagcaaattcttaccctctgttcccaggct

SEQ ID NO: 72137 - DNA, 122 bp, Homo sapiens
cactttacattatatgatgtcatttactcttcacaacctgccaggaaatggaaatgattacgtaatatactccagtttgcaaatgaaggaatcttcctgcggaacgtatgtgaagcgcatat

SEQ ID NO: 72138 - DNA, 122 bp, Homo sapiens
atgaccagtcttcccggtatccttcagtacttttactcctggcaaaaccaagcagcacgccgcctgattttccggatcttcactgatctaacaaacaactctgccaagatgataaatgctgc

SEQ ID NO: 72139 - DNA, 122 bp, Homo sapiens
agaacccgggcgtcccttaccagcggcacaggagcagttggggtccattgcaacccgaggcgagactagagttcccaagcgagaagggaagaggcagtgggtgcacgtggaaggcggagtgg

SEQ ID NO: 72140 - DNA, 122 bp, Homo sapiens
tacgattacctactgtgtgtcaggagctagtctctaatcctcaaaaccaccctgaaaggtcggcatgattgtttccattttacagataaggcacagggtgctcaggatgtgcccaaggtcat

SEQ ID NO: 72141 - DNA, 122 bp, Homo sapiens
ttcggaggacagctcctctgagaacgggagtcccctgccaaggggagggagctggcagggcgcctctgcattagaattctcccagagaagaccgcggcaaaggcctgtgctccaaaggcaag

SEQ ID NO: 72142 - DNA, 122 bp, Homo sapiens
tgagcctgggaggtcgaggttgcagtgagcggagatcatgcccctgctctctagcctgtgcgagagagcaagaccctgtctcaaaacaaacccacagtttgtttttgttttgagacggaatg

SEQ ID NO: 72143 - DNA, 122 bp, Homo sapiens
ggtcaggtcgccaacaatccggtcaaccacggtgcttcttccctggtgggtgtctggccccgttcttgctggggatggcgctcggggatgccaccgtgtttccccagggcccactgtgcacc

SEQ ID NO: 72144 - DNA, 122 bp, Homo sapiens
aagtttgtttgcattggagcctcgccccctccaggctgctggagtctggtctcgctgatgcgccctcacgtactccaccctgttgatgggctgccctggctgaatgttcatccttcgaaacc

SEQ ID NO: 72145 - DNA, 122 bp, Homo sapiens
tttgcttgtgcatcttgtccagcgcgttttgcttgatttttaaatctagatgcatttaggcgggcgtacacgttcggatttgtcacaggccacctaactctattggtctcacacacgtgtgc

SEQ ID NO: 72146 - DNA, 122 bp, Homo sapiens
gctctcacttcaaggagaggaaacttccttctctctagggaacgagacccaacctcttggcgggcggattggtccattttccaggcatggccaggcttttggcacatttatgtaacaggctg

SEQ ID NO: 72147 - DNA, 122 bp, Homo sapiens
cgccccaataaaaaggctactttcactatcttgtcatagtagggattcatttcctgactacgaaatcaagaaacataaagaaaccttctataagctgaataggggtgactgtgggtgcagga

SEQ ID NO: 72148 - DNA, 122 bp, Homo sapiens
tttctccaatgcaacgtccacccactttaccaccaaaaactccagggcctgacggcagcccggtcccccagcactcaccagcagcccagtgttctccaccaagccacagtgtgcatgcctgg

SEQ ID NO: 72149 - DNA, 122 bp, Homo sapiens
gttacttctccctcagggtaagtcctcatgagggatcatctctgcccatggagctgcttccgctgcccttaggctggtgtaagaggaaggctgtgtaccagaggtagatcttgctcctagtc

SEQ ID NO: 72150 - DNA, 122 bp, Homo sapiens
gttttgtaagccgctttccagctagctgcgtgtgtgtgtgcgcgcgcgtgtgtacgcgcgcgcctatctgatgcatttgactgtcttttatccaactgcccagaagcaaatgtgttaactcg

SEQ ID NO: 72151 - DNA, 122 bp, Homo sapiens
tgtgctcttattcatggttgttcagttccagtgtcctccggatgttgttgcttgctcctgcgtgggtctcagggctggccagtgacaaccttttctcccctgcaggtgcgtccatgtctgtc

SEQ ID NO: 72152 - DNA, 122 bp, Homo sapiens
ggtgctgccttttttccgagccgctgcgggagggggccaggacacgctcccttaggagagcgggcgggtcacaaggacctggacagaggcagaactgaggccagcagccagctccgccgctg

SEQ ID NO: 72153 - DNA, 122 bp, Homo sapiens
ctttcatatatgctagcttgagtggacatctgttccttgcagccaaacaagaccttcaaacgggacctgtttaaaaataattcctgaaacctttcattattttttcactccccctttctcat

SEQ ID NO: 72154 - DNA, 122 bp, Homo sapiens
agaggtgggtagtggcattaagaggagagttgaggagaggcaggtagtggcattaagaggcgagtcaaggagaggtggtaaaagagttaagacaaggccagggaatgacgatggaagggcta

SEQ ID NO: 72155 - DNA, 122 bp, Homo sapiens
ttcttgccttggttttcgaagaatgtgacctggagggctggtgggcggtgcggcgcgccgcggcgcatgcgcgttccggtctgttttccctgagttaaagcgcgcgggtgccagccgggagg

SEQ ID NO: 72156 - DNA, 122 bp, Homo sapiens
ctacctcgaggtcattggcttcaccatgacgtcattggccgcgctgcaggtgggcggacacggcgagcggctgacgcagtgtcgcgaggtggtgctcaccacatccaaggccatcccggtgc

SEQ ID NO: 72157 - DNA, 122 bp, Homo sapiens
aggggtcagggagttccctttccgagtcaaagaaaggggtgacggacgcacctggaaaatcgggtcactcccacccgagtattgcgcttttcagaccaccttaaaaaacggcgcaccacgag

SEQ ID NO: 72158 - DNA, 122 bp, Homo sapiens
cttcccaggtttggcacccacttctccacaccttgagggctcggggatactggatacacccgtgacctcaaccaaggcccggagcggggccccaggtggaagtgaaggccgctgtgctgtgt

SEQ ID NO: 72159 - DNA, 122 bp, Homo sapiens
ggcgtgagcgcgctgtcgggtggggcaggcacaagttccttggggcagtgcccaactcttcgtacgtcttcagcgaatcctccacgaaacacttaagcaaacagatgctcagagagcatatc

SEQ ID NO: 72160 - DNA, 122 bp, Homo sapiens
accaagttgacgcgtggccgcagcctggtgatggagaacatggagcagctgctgagcatgcggatggaggaccagagccagcgcaacatgcccctcagtgtggtgctcattcgggagaaagc

SEQ ID NO: 72161 - DNA, 122 bp, Homo sapiens
gaagtcagtctttggccccatggtatttgtgtaaccaggttacaagatttaaaaatctatcgcaagtgacagtaattaaaaaaaaaaaaaaacaaatgtgggctactctggaagaagaaaca

SEQ ID NO: 72162 - DNA, 122 bp, Homo sapiens
gctgaggagtgcgggcgcacggtgcgggactggcaggcagctccacctgcagccacggtgcgcgatccactgggtgaagccaacagagctcctgagtctggtggggacttggagaaccttta

SEQ ID NO: 72163 - DNA, 122 bp, Homo sapiens
agtgaaccaaggccacagggccccaagctgagactggcaggagcctgacctaggaaaaaccgcacccaattccttgcctttgtcggctttcctggaaagccgaccatccacccttccctcac

SEQ ID NO: 72164 - DNA, 122 bp, Homo sapiens
catgcttctgggtggtctggcccccgcgcctgcctccggccctcctgttcctcacacccacgcatagttaaggtccattatgcacccgactctgtccaggcagggagctgccagggacagtc

SEQ ID NO: 72165 - DNA, 122 bp, Homo sapiens
ccacctcccgtagctgtcaaaatccggagtccagacttccttatggccaggacagctccacgcatgctcagcacctaccagggtcgagctcacacacgtgcctacgacccgccgcggcgcct

SEQ ID NO: 72166 - DNA, 122 bp, Homo sapiens
cccggggggaccaggatgacacctccatttctctccaggaagttttgagtttctctccaccgtgacacaatcctcaaacatggaagatgaaaggggaggggatgtcaggcccagagaagcaa

SEQ ID NO: 72167 - DNA, 122 bp, Homo sapiens
aatgcagttcttccactcgttcttgtcctccaggtcggtcatcacctgcagggcccagcacgctaagcacctcgcaggacagcagcctgccctcctgagcctctgtgggaccagcacagggc

SEQ ID NO: 72168 - DNA, 122 bp, Homo sapiens
atagttttgtagttataaattctattactgctatattgtttctaataccttttacagaagcgaaatgtcttcctgccactaaatagcatttacctgcaagtggagaaggaatcaaagctcat

SEQ ID NO: 72169 - DNA, 122 bp, Homo sapiens
atatttcaaagagaggaaaaagtacttacactaattaccaattttctaaaagtaaatgttcgaagaaaaagggagggaaatctcatattttcaacaggaagtagtaaaccttattttaaatt

SEQ ID NO: 72170 - DNA, 122 bp, Homo sapiens
ggaccctcgtggtgagtgttaacagttcttaaaggcggcgtgtccggagtttgttccttccgatgttcggatgtgttcagaatttcttctttctggtgggttcgtggtctcgctggctcagg

SEQ ID NO: 72171 - DNA, 122 bp, Homo sapiens
agaaattgcggagaacagggaagagggtggcaggaagggtctggtgcacgatacccgccgcgcccgctcggaatcctggttccctggagcgctcaccccagcccgccctgccccggggagcg

SEQ ID NO: 72172 - DNA, 122 bp, Homo sapiens
gagatacctagcttggggaatggaaaaccatgaaaggctttgtaggataggtaagagttacgaaaaagggatcagaggtgggacaatgggatagatgcagcttcaggaagatgaaactgctt

SEQ ID NO: 72173 - DNA, 122 bp, Homo sapiens
tccaatcgtccccctggagttcgtgttggaagatgccagtgagcacgtctcagggctctacgccttgcacggatgagtatggggtgactcagagggaaggggtggtggcagatgcctgcagc

SEQ ID NO: 72174 - DNA, 122 bp, Homo sapiens
actgatcccccagtggggccccgagttcccggagaggaagactcgctccctcccaggggacggctagagactcactgactcatgcgtgtgtggtaggaatcttccaggaagtccccgtcccg

SEQ ID NO: 72175 - DNA, 122 bp, Homo sapiens
aactaggtgacctgctaaaccatctttactgttatttgccagaaaagactggaccagagacgtaaataatacacctcaatatacaacagctcgggcttaatttctaggcagaatttcatttg

SEQ ID NO: 72176 - DNA, 122 bp, Homo sapiens
gagcaggaagcagccggctggagcatttcctttcattaaatacccgcccagctcccctcccgggaaggaggcaggtcacaggccgtccccgggcctcaccacttcaggaatgtacgcggtgc

SEQ ID NO: 72177 - DNA, 122 bp, Homo sapiens
gccaagcggagtccgggggcggctggcaggcggccccgtatgaagtggggcgtgtggtcccgagcccccctccgctccccttccctccaggctcttcggatccgggcgtcagagagggcggg

SEQ ID NO: 72178 - DNA, 122 bp, Homo sapiens
ggggctgcacatcgcttcgcctcccaatttcaggtgagagtccccggccgccgcgcgcctcgcccttcagcggggactgatccgcattggctgccctgcccgccccccaccccagaacctcg

SEQ ID NO: 72179 - DNA, 122 bp, Homo sapiens
gaaggacttggggatgaaaacactgaatccgcggtttcccaaaggtccttccaaaggtgacggccccggcacgagttcacaaaccacagctccgccccatcccctgcccggccccgcccttc

SEQ ID NO: 72180 - DNA, 122 bp, Homo sapiens
cccgggtgggcacctggtttctgaggcccacagaactaactggctgagaggctgcgggggcgcaggcagtgaggtggggagagttccgggttacctccttcccttgagcccccgtcccggtc

SEQ ID NO: 72181 - DNA, 122 bp, Homo sapiens
tgttttgcttgcagagtcatatctttttcgtacaatggaaatcctcaagtccactttgtgcggtctccctctccttcccccaaaaaacaacaacaacaaaacaaaaaccaaaaaggaaaatg

SEQ ID NO: 72182 - DNA, 122 bp, Homo sapiens
cggatgcctgaggtaggcgtcctccccgaagcacccctctcctcaatcgaggctgctgagcgcctgcaaggcctggctggaagccagctcgacctccagccttggaacccaacacccaccac

SEQ ID NO: 72183 - DNA, 122 bp, Homo sapiens
aagacctcacctcgttaatttgggtgatcagaaaagcagacattacctcctcctgtcaatcgccttattttggtgaattcttaaatagcctcttagccactgttgtgactcaataattgtga

SEQ ID NO: 72184 - DNA, 122 bp, Homo sapiens
gttgtttgcaatgattggcaaacggatgagttaaaaaagccttctgcttccacactgttccgtctacattcagaaagcagtaaaaatatattgtgcaatgaacactttccaccttaagcgta

SEQ ID NO: 72185 - DNA, 122 bp, Homo sapiens
cagagagggcagatgccagcccagcacctcattcctcgggattgtgcagacctggccaaacgctaaggccaaagactcaggcatgggggaggctggagaaaggtgggaaagggtcatccctc

SEQ ID NO: 72186 - DNA, 122 bp, Homo sapiens
atgtccgcgctgcgccaggatgagcccttctcatggcccttacatggtagtggtggatgacgagccctccggttttcagcaccgggaagctggacagcacccgcgccgcttcctccctggag

SEQ ID NO: 72187 - DNA, 122 bp, Homo sapiens
ggtggctgccgtaccagtaatgaaagacaagttaacaagagggccgtgcaggcttatttacgagaagttccatgtgacacaggagccttgagaatggaacacccatcgaaccggggaactct

SEQ ID NO: 72188 - DNA, 122 bp, Homo sapiens
gcctctgtctcgaccccgccctccaggggcacaggacgacctgaggaaggtcacccgcatcgcctactccatggtgaagcagtttgggatggcacctggcatcgggcccatctccttccctg

SEQ ID NO: 72189 - DNA, 122 bp, Homo sapiens
cgccagagcccctcaggggagggcgatcccccgcggcaccccggggccaccaccggcccacggagcaggtaaggcagcccttgtgagacagaagagccacccagctgtggcgctcacctctg

SEQ ID NO: 72190 - DNA, 122 bp, Homo sapiens
tacctacgccttagtggggaaagacttgtgttagttaagccatctgcactggtttgtcatcgttttgtggctaactgcattaattttctggctgataagctgtgcttagagttctgtgaacc

SEQ ID NO: 72191 - DNA, 122 bp, Homo sapiens
aaagacatgccttggcctgaaagtcactcacacaaacccagaaatgaaggcgatcctgggcgaagccagacccatgcctgggtgcacacgcacatctgacggtgtcacccagctctctcccg

SEQ ID NO: 72192 - DNA, 122 bp, Homo sapiens
aattgatgaggccaaccaacgtgcaacaaagatgctgggaagtggttaagtgtgcccacccgtgttctcctccaaatgctgtcgggcaagatagctccttcatgcttttctcatggtattat

SEQ ID NO: 72193 - DNA, 122 bp, Homo sapiens
ttatccaaaatgagataagggctatgcaagccgttcatcttttctgaagtggaatgatgtcgtgagcaaaactgagaatgtggcttttgaaatcatttaaaagtggatccatgaaaataccg

SEQ ID NO: 72194 - DNA, 122 bp, Homo sapiens
gcagcttttgtgctcatttccattgcatttcagcacttagaaaagagctgcaaatgccagcgacaggtggtgtggatgcagaagcaaagcaggagcatgaaagccaatcagtgaaacagagg

SEQ ID NO: 72195 - DNA, 122 bp, Homo sapiens
cccgcccactggaatgtgtgtaaacgggagtgcggctcagaccacggactctgtctccaccggtccctgcaggccctccttccgcgtgagcttcagcacggtgggcttttcgctgttcccac

SEQ ID NO: 72196 - DNA, 122 bp, Homo sapiens
catgtaagttagttgtgactccttcacataaatggctacgaaaataggtattgtatctgacgggggatgattcccctaggtagtaccataaaaccgaaggcatgtaaatgtatcctatgaga

SEQ ID NO: 72197 - DNA, 122 bp, Homo sapiens
aggccccagagggcaacccatcctctctcattttccttcccctttatccttgctcagacccgatgccagggctggaaagagagaagacaccagctggacaattcagcagttatttaaaccag

SEQ ID NO: 72198 - DNA, 122 bp, Homo sapiens
aggactcttttgttgacattgggtccacccgatctgggatgctttcccatctgaagatctcgtcccattttcaaagtccctttagctgcaggttccagggagtaggacaggcacattcattt

SEQ ID NO: 72199 - DNA, 122 bp, Homo sapiens
tgaaacggggatgacttggcccgctaggtgaagaggagacggaagcttcctggcagtccccgcgtcacgtggggccctacctagtcagcctcctaacgcccctccttacgcatgcgcccatt

SEQ ID NO: 72200 - DNA, 122 bp, Homo sapiens
agtgggaactgtgtccctcatgggtggggtcagaggttaccttggccagcagccggcgcccgtcattatctaggatgaaaacagccttgatggtgtagagggaaggttcctgcaactgacac

SEQ ID NO: 72201 - DNA, 122 bp, Homo sapiens
gtcctgtcctgctctaccaccattcctaggtggtatcctcattttcatgctgaggactgccgtaccagcaccgtgtcaatgttataaactgtcgcagggggaaaaagaatggggagaaagaa

SEQ ID NO: 72202 - DNA, 122 bp, Homo sapiens
cactcaccgcccaggtagctgtaggtggaggctgtcaggcccccatcggggccctgagcccgcctcaggcccatctctagcagccgcttctctggccctgcgatcaagcgaagccgcgctgc

SEQ ID NO: 72203 - DNA, 122 bp, Homo sapiens
atactatgggaggtttcatcacagatgcttgccatttacttttagggacgtcgcatacgacgtccgtaaattactggctcgggttttgagctttacctggctctcgtcccctgtagtacaat

SEQ ID NO: 72204 - DNA, 122 bp, Homo sapiens
aaagtgctgggattacaggcatgagccacagcgccagacgaaccatctcccttttaagcacgctgtccccttgagttacctgctggtttcaagtggaacactaagggaggaagcagaaagtt

SEQ ID NO: 72205 - DNA, 122 bp, Homo sapiens
atcgagagtctccctggcccagagtcccagggagccctgaactggtcactgaagggctcccgaggtcgcccgcttgggggtacctgttccgctcgctgaacgagtccggcgacccacgcttt

SEQ ID NO: 72206 - DNA, 122 bp, Homo sapiens
agtgtggcatctctaccaggcggggtaccagcctctatgccaggccatatgggcttggcacgtcacgggcagcagctatcacatgagagacggtgattggcatgcgtctgcactgggggaga

SEQ ID NO: 72207 - DNA, 122 bp, Homo sapiens
acatctttcacacttcctttggtctcaaggaatatatagcttaattctctaaagctagaacgtcacaccctccatctgtgctcttccatctggactaactcattcagacattatcacacaca

SEQ ID NO: 72208 - DNA, 122 bp, Homo sapiens
tgtccggacaatccccttttaggcgggctgtgttgccaacaatgcggtcatcagaaagaacgccgtgatggggcagcccaccgagggtgcattgatggccctggcgatgaaggtaggaggtc

SEQ ID NO: 72209 - DNA, 122 bp, Homo sapiens
agaggacggcttccgggtttggcgcggcctttgtctctcgctgcatctggagctctaggtcgcctcttcgctactctgtgtcctctgctcctagaggcccaccctctgtggccctgtgtcct

SEQ ID NO: 72210 - DNA, 122 bp, Homo sapiens
tgagtgacgctgtctcggctcactcggttatatctgctgaacacaagagcttgctgtttacgcaacaccaccttcgcgtgttttaaatgcctttgggagaagcagatccagaatacttgtgt

SEQ ID NO: 72211 - DNA, 122 bp, Homo sapiens
gcaccactgccctccagcttggtgacagagtgggactccatgtcaaaaaaaaaaaaaaaacggttagatgcaaatatcaaaaatgagttaaaaaatatctttggtgtggcttcaattttatt

SEQ ID NO: 72212 - DNA, 122 bp, Homo sapiens
atgtgatatccagggcacaatcttagatgcctaggtgctccttagcccagctgagagagacgctgaagcttcctctcacctcccacagaggtaccctccccatttaagactgacagatactt

SEQ ID NO: 72213 - DNA, 122 bp, Homo sapiens
ggagtgagtgaggaaagaagggtcaaggagatgctggggtccccttccagggaggagtgacgagaggtggtggaagcagagatttttgagaggcacctaaccttcagggatctgttgtttga

SEQ ID NO: 72214 - DNA, 122 bp, Homo sapiens
cggcctctgagtcctggtggtagttctggcgcacctgtgaggtggacgtggtcctcatggcggcgactaaggagaggtggcggcggtggcagtggctgcgtggcgctggggcggcggcaggg

SEQ ID NO: 72215 - DNA, 122 bp, Homo sapiens
atcccctttctttatcattctctccccagggcttccacatcaccgtgctgtggacaatcccggaactcctgtcacgccagtttacatttaggaacagtaatggctcccactgactcagtcaa

SEQ ID NO: 72216 - DNA, 122 bp, Homo sapiens
acacgctgcgctccaacaaacattacaagttaacattctcgctcccaggcccgcagggaccgcagagcctccgccgaggaccccagcccccccaacacccgccctcgccctccagtcccccg

SEQ ID NO: 72217 - DNA, 122 bp, Homo sapiens
ctgttttgtgggacaggccctgggcctccttgctcctggcaggcctcaggtgccgcacgccgcgtcaccgtcaggactcgcaggctgtctggtcatttttgacgttgctgaaggtgagtggg

SEQ ID NO: 72218 - DNA, 122 bp, Homo sapiens
aatccccggccccatttgagccctcagatgattcagccctggaagacaactagactgcaacgttgtgagaggccctgagccagaagcattcagagaaacttctcctggattcctgaccatgg

SEQ ID NO: 72219 - DNA, 122 bp, Homo sapiens
ggcgcggagggagcggagcccgggttgccagtctggtccagggcgcaagagaaacactcacggcatcaggctgtctttccccaggtgcaagggaaccagttgcaaactgcagtgctgtgctt

SEQ ID NO: 72220 - DNA, 122 bp, Homo sapiens
ggtcgtggaagtcttggaactccggagggtggtgagattcaccacgttggtggggcacgccgtgatggtgcaactcgtaatggtggagagctctgctgtggcctggcctgtggtgtgggggt

SEQ ID NO: 72221 - DNA, 122 bp, Homo sapiens
agtaacaactgggcgggcagccggcctctgcgcccgtttatatcgctcctcacaaaatggcgcccgcgccacccggaaatgaaaccttctgattggcccaccgcgccccgcttcgtaacgac

SEQ ID NO: 72222 - DNA, 122 bp, Homo sapiens
tattttttagggtgtgaccatcttctcctcaccatatgaatcccttttgtagtgtaagcacgcacacctcaaatttctccttctttataatctgtctaccctgctttcctcctgtctgcctc

SEQ ID NO: 72223 - DNA, 122 bp, Homo sapiens
gcaggaggtgagcagtggccagtgagtgaagcttcatgtgtatttacagtccctccccatcgctggcattaccatctgagctcttcctcctgtcagatcagaggcaacattagattctcata

SEQ ID NO: 72224 - DNA, 122 bp, Homo sapiens
gcggtgaccgcggccctggctgctcggacccgggaacatgatggtcgctggagcagaaggcgctgagaagggaccacggcggcgctgggtcgtgcgagccagtagcgggctgaaacgtagag

SEQ ID NO: 72225 - DNA, 122 bp, Homo sapiens
gcaagtaaaagccctgaggcactagggtgtcggttaggggtcacaggcggagaggtggggcgcctgggggtttcggtagggagccacccacagataactcagacagccagattctgggggtc

SEQ ID NO: 72226 - DNA, 122 bp, Homo sapiens
tcaggctgcttttccagccccctgcctgtgcgtgcacgggagtcacgatgggatgtttcccgcgtgggttactcagatgcggaaacgcacagagagccttaaggctgctgcgggtgtcacag

SEQ ID NO: 72227 - DNA, 122 bp, Homo sapiens
gccgcgtgagtgccggggtgggcagggggatgggggtgcgggggccacactgccggacagcgctgcccaccaggcacctctgcagatgtttctctggagcctcctggccccaaagtgggcct

SEQ ID NO: 72228 - DNA, 122 bp, Homo sapiens
ccttgccgagcgtcagggtggctggcagccaccttctgtgatcgtcctccttctgggctgcggtctagggctgcacattcaggatggggatgtcccagtgggcgcgcagcacaagggtcagc

SEQ ID NO: 72229 - DNA, 122 bp, Homo sapiens
aatacaagaaaaaactgcatggcaagctattttccttaaaacatgattctgaacactaaacgttacaaaaacagatacttgctacaactgtgaaggagaaactgcatttccctattattaca

SEQ ID NO: 72230 - DNA, 122 bp, Homo sapiens
ttggaggtgcgtgttagaatttttctgagaggggttaaggtgctgttttgtgaagcacaacgagttagtgagtgctaaatctccatgacccctgccgtctatatggcttggatacgtcatgt

SEQ ID NO: 72231 - DNA, 122 bp, Homo sapiens
ttcctctttcctcttcccggactcggacatgcggacatacaatcccggaagactggaggccgtagtcacacactcaaatttaaacctggtgatttctttccattctactgatgtatcatgct

SEQ ID NO: 72232 - DNA, 122 bp, Homo sapiens
cacagtctcatttgaattgtacaagagtcctgggcagggccagagcgggtacatagactccgtttgacagatgagaaaagagtactccagagaggtttagcaacttgcacaaagtcaaacag

SEQ ID NO: 72233 - DNA, 122 bp, Homo sapiens
cgccctgcacacccgtgtcccggaggcagcgctccacgtcctgcaggcactggatgttcccgttagcaaacacagggatggccacagccttcctgttggcagagaaatgcctgtttccaccc

SEQ ID NO: 72234 - DNA, 122 bp, Homo sapiens
ccagcggggatgcgcccgtgccaggccggtggccacgcaaagggccgccggaaccgcccccgagtgaccagtggccacctggcagaaagcctggctcttagggtgttctcggtcccctgcgg

SEQ ID NO: 72235 - DNA, 122 bp, Homo sapiens
gcctgcggccctgggcactgcccaggcagaagtagacgacgggcttggccgcgcagtgcacggcggccatgaggaagctgaagtggtagaagtagtgggggatgtaccagagcaggttccgg

SEQ ID NO: 72236 - DNA, 122 bp, Homo sapiens
tgggcttactttttccacctcccgcccccctggaagagagcgtatgttcaagttcatctccgatacagatcaccgcctgctctcggcggcccttggaatggccttgctcagcacataaaaaa

SEQ ID NO: 72237 - DNA, 122 bp, Homo sapiens
agaaaagtccctcattcatccgaaaacacccactgactttctcccacgtgccgggcaccacgctcagtacaagggacagagggaggaggctctgggctcagacttgccctcgcagagcgtgg

SEQ ID NO: 72238 - DNA, 122 bp, Homo sapiens
ccacagaacagatagatatcctctccctttctattgtccattcactccggaaggagactccgccctgtgctcagcttcagagacttccctgaagccaccgcctggaatgccggacggagtgc

SEQ ID NO: 72239 - DNA, 122 bp, Homo sapiens
ctgcgttccttagcaacgagcgtttcctccagccccgcctccctccgccacacacaaccccgctctagcctcgcctcccaatgacgtccgaaccctgctttctgggagcctagcaacagaag

SEQ ID NO: 72240 - DNA, 122 bp, Homo sapiens
tgtaacccgccggactcccgtcctgactgacacttgccccctccccactctctggaacgccgagcttagggcctttggccccgcccccttgccgcgtctctattgggggacacctacgaagc

SEQ ID NO: 72241 - DNA, 122 bp, Homo sapiens
aagatggcgcccactgcccctccggtccggacaaacggacgtacggtttatctgcccatgcgctctgcaggcgcaacccaccaccaagcttgcgcacgcgcgctgccgctcacccgtttccc

SEQ ID NO: 72242 - DNA, 122 bp, Homo sapiens
aaagagggagcagcagccagctccggtgctcggaacccggttggggggtggcggtgccaccgcgaggcagcctcgtttcctatcggtttggccctgagatgtatttctgttctgactaaaca

SEQ ID NO: 72243 - DNA, 122 bp, Homo sapiens
cagccgtgagaagaggaacggcaaggtggccaagcccgtgctcctgcaccagagcagcaccgaggtctcctccaccaaccaggtggaagtccccgacaccacccagagctcccctgtgtcca

SEQ ID NO: 72244 - DNA, 122 bp, Homo sapiens
gtaaccttttggttaaaatgtcagagctaagactaaatctgaagaaaagaatgaaaccaccgtaagttcttcagactcagtcgtcagcaaggttatggcccgaagccgtgcagaggcggcgc

SEQ ID NO: 72245 - DNA, 122 bp, Homo sapiens
agccgtgggacacacgggaaagccaggaagaagaggaagagcacccccacaccccacccgcgtgaagaagagcaaccccactccccgcccgtgggaagaagagcaccctcacgccgggcccg

SEQ ID NO: 72246 - DNA, 122 bp, Homo sapiens
tctgcagggaagggggaagaaaaccctcccattaggaagcatgcttttgcagttaaatggcgatggtggaggtgatagggacttcaagagtaaaatgcaccttgtattgcataagaagcata

SEQ ID NO: 72247 - DNA, 122 bp, Homo sapiens
cttattacagagcaataaaaccaccggatgacccggccaattagtgctgccctgggcaagcggttgttttgatcttttctaggttctagatgctagagaaagcaagcttgagtggggctgag

SEQ ID NO: 72248 - DNA, 122 bp, Homo sapiens
gcacctcagccccaccccacccttcgttcagtaaggacacctcagccccaccccacccttcgcccagctgcagtgctggccaagaggagaccctcggaagctgttcacggagtgaatgggag

SEQ ID NO: 72249 - DNA, 122 bp, Homo sapiens
tgctggcacaggatggtaagggattgggtaaatccattcacctctctgggccttggttgtcgtatctgtaaaagaagaggaaccgtccctgccctgagtggacgtgaacgtgggtgtggatc

SEQ ID NO: 72250 - DNA, 122 bp, Homo sapiens
cacctgagcgctatcctggccatcaaggggaacctatccaacagtgaggtcaagcgcatccggagcatcttggacgtcagcatgggggcgcaggagccctcccggcccctattttcccttat

SEQ ID NO: 72251 - DNA, 122 bp, Homo sapiens
cacccaaaacaatacctgggagagttggtggtcaataaatatctggtgcatgaatgaatgcgtgaataaagaggcagattcagatttcacacttggcttagaaatgcactatctaatagagt

SEQ ID NO: 72252 - DNA, 122 bp, Homo sapiens
aattcgttgatgacctagttgactctttccccagtcattactaatcctaacctttgggagcgaaaaatatctaaataagttctggtttacaaatttgcaaaatttttgtcaacacttcagaa

SEQ ID NO: 72253 - DNA, 122 bp, Homo sapiens
agccaacattgtgtatttctttttaggcccatcccatcactgaaactattggaggatcctcggcaggagtatttttcaggccctggaaaggtggttggagtaaaagaccttttaagagtctt

SEQ ID NO: 72254 - DNA, 122 bp, Homo sapiens
agtttctccttcttttccatgttattccaggtcatttccatggctttcaaggccttcacccggtcattctggggaccaataagggtatcagccgtgggaggggtcacccggggctagaggct

SEQ ID NO: 72255 - DNA, 122 bp, Homo sapiens
tcatttcctcccaatttccaaactcctaatagaatagagaatagatcaattgtagcaattcgtttcgaagcaaagacaacgcatggtggcgctgcaggctaaggcttcaaaaaaaggaaaag

SEQ ID NO: 72256 - DNA, 122 bp, Homo sapiens
cggcgggagggatccgtgcccaaccccagggaatcgcacctagcccctccccggggtccgcgtcccaaactctgggaagtacctcccaccagccctcataccagaaaaagcgaaattcaaga

SEQ ID NO: 72257 - DNA, 122 bp, Homo sapiens
gtcccctcgcgagccagactcattccaaaccaccttcaatctgtaaagtcaggttggaagcgtcagtgcttaagaatttgagctttagagtcaaaatgctttctggcccttttcttactggt

SEQ ID NO: 72258 - DNA, 122 bp, Homo sapiens
gctctcattccccctcccccgcattgctgggcatcccgatttggacggtctctaaggtcccgcgctgccaaatcaggcctggctcttgtaggattttattgaaaggactgtaaagaaagaat

SEQ ID NO: 72259 - DNA, 122 bp, Homo sapiens
acaccaacaaggtgacagccaggtgaatgtcatatacaagctcatcatctgtcatcttcacgtgacccacagccacagccagatataacaccttcttcattcggaattgattgtggacttcg

SEQ ID NO: 72260 - DNA, 122 bp, Homo sapiens
gcctttgtagaaaacctgggggccttcgctcctatacatggtccccacggcgtggcgcagcgtattatagacctggacacacacacgcactttgaatgagctcagtgaagtggttttagccc

SEQ ID NO: 72261 - DNA, 122 bp, Homo sapiens
tcccccgaggggaatgcagagacctgtgtctcagatggtgccacccaaagtggcagagcccgtgtcagcggtgggacagggccctgccgaaccaccccgggagcacagcgtgggaagaaatg

SEQ ID NO: 72262 - DNA, 122 bp, Homo sapiens
cctgagtatcttgtgtgaggtgcaggggatacagtctaattgcagaagctcctcattcttcggggacctggatggggtgggtgagcgaggggtcagggggtgccgaggggaaatctgggggg

SEQ ID NO: 72263 - DNA, 122 bp, Homo sapiens
tgtggtgaactgaaagaaccaataaaatcatgttcctccacccagaatgagccctgcagtcgacacctaccaatgcttagagacgcgtggtcggtgctgggggcgcggcctggagctgctgc

SEQ ID NO: 72264 - DNA, 122 bp, Homo sapiens
gctgcaggggttttccgggtcagaggaaaaaaaaaaccagcagctttctgtgtgtctggccggggtacttcccatgtccgctctcagccctgtgtcctggggagactgtcctggggcaaacc

SEQ ID NO: 72265 - DNA, 122 bp, Homo sapiens
gcggcagccggggtggctgcgggcgaggggcggcccccgagaagggctaggggctcggggcgccggcgggccgtcaggccttccggatggggacgcgacgccatgcagctggctgggccgag

SEQ ID NO: 72266 - DNA, 122 bp, Homo sapiens
cctgagccctggccgccacggcccacacagcaggccctccggagagagatgtcaggactccgagtggagacactttatccgcatgttcttgaccctcatacagcccttacgggtacttattc

SEQ ID NO: 72267 - DNA, 122 bp, Homo sapiens
ctctagagcgctcgacaaatgtttactgagtgcccacggggtgcctagagcctggcgggacgtcgcggggatgcggctggaggaatcggagccggccctgccctctcggcactcgcggtccg

SEQ ID NO: 72268 - DNA, 122 bp, Homo sapiens
aaatgtgcaagtaacatgaaattatagaacaggtgcaatatatgaaaactcacacacatgcggtacttaaaacatgtcaaaactggatgtgagacatggacacaagaatgaagaatgggcaa

SEQ ID NO: 72269 - DNA, 122 bp, Homo sapiens
ggagtccatcgggtgcgcactccgctgtcgcccaggctgggttgctggggcgccagtctgcggtgttcaggcccaaagcctgcagcctgttcagtccagggcaccgcaggcgccagaactct

SEQ ID NO: 72270 - DNA, 122 bp, Homo sapiens
caggggctgaaggagccatcagtgggaaaagacgggttattgatgatactgaaacacatgcggcttgtttgtcatttaaaaaaaccgtacatcttgagtttcgattcttaagttgtctttct

SEQ ID NO: 72271 - DNA, 122 bp, Homo sapiens
aaaagctttaaataggggaaagagggaagaaaagaggcagaataaataaaagacttgaagcggttgcattcctctgaggcttttaatggtgttcactgaattcacattttacatgtgaaaag

SEQ ID NO: 72272 - DNA, 122 bp, Homo sapiens
aggtcagcttctcaggaacctttcaaacttccccgaaatgcacttgtggtcagcagctagcggtcttttgtttggggaaaaaaaggagtagcggctaagagcggaggtttgaggggccagga

SEQ ID NO: 72273 - DNA, 122 bp, Homo sapiens
agttccaggctgggtgggggatgcatgcatagcctctggctgggatcacccaggctctcccgtccgtagtagtgtgggagtggatacaggtggatactctggtcagagcagcactggtggag

SEQ ID NO: 72274 - DNA, 122 bp, Homo sapiens
atacctgtactatcacaacagcctcctaactggatgcctccagccagtcttgggctctttcgtgctagcttcatctttgaactttgcacacccgtttctttcctcaaacatgccccgccacg

SEQ ID NO: 72275 - DNA, 122 bp, Homo sapiens
ccttctgcattcataaatcttgtaatcatgttaccattacaaatgggatataagaggcagcgtgaaagcagatgagctgtggactagcaatatagggttttgtttggttggttggtttgata

SEQ ID NO: 72276 - DNA, 122 bp, Homo sapiens
ggatgcccgaacgtccccctctgtcctagctggggtgtaggtgcagccccagggcatcgccgcgaagcccctgctcgagacctacggagatagtgggtcccgagccccacggggcggccccg

SEQ ID NO: 72277 - DNA, 122 bp, Homo sapiens
ggtcatggggaggagagagccggacgggctattcaaagcttttgctgcccaagcagcgggcgtgcgtgcgtgcatccgcgagctcgggtccgggcaggcagcagcttcagagcggtagatgg

SEQ ID NO: 72278 - DNA, 122 bp, Homo sapiens
gtagggtggggtgggcaggggtcgccatgctgtcctggcagcgggacccattgggagccccggtgacaggttccactgccataagccctggcctaggggatccagtggcatcgtctcgggac

SEQ ID NO: 72279 - DNA, 122 bp, Homo sapiens
ggagactttccacgtagccggaggaaactcctgcgacatcagagaggtggaatcccgagtcgttctgagtcccaatggttatgctttaagacacttgcatgaaggggtttccgtggatctac

SEQ ID NO: 72280 - DNA, 122 bp, Homo sapiens
cttagtaggatgtgctggttttgtccagtgccaccggccacagtcaccacgtaatatggacggaatgagcaaagcccggctcgctgaggctgcaggctgcaggcaagtgaggactgaaaggg

SEQ ID NO: 72281 - DNA, 122 bp, Homo sapiens
gttgcatcgcctgcagcaggggtgagcagaacatcgctcactccagagccctctgtaaggcgctgcgacaaggcgagccgccgggccggcagcagaggcttgtgttgctggagcgtgtggaa

SEQ ID NO: 72282 - DNA, 122 bp, Homo sapiens
agagggcagttctgcccaccaccctgaatgcccctcccctagctactggagaagagatcccgtttcttggcaacaggaagctcttggtttacacagtgtcacccaagcgactgggagccgcg

SEQ ID NO: 72283 - DNA, 122 bp, Homo sapiens
aaagggagcttccagaatgccttttacatcagttcccggtgtccctcggataaatagcttcgggtgaaaagctgcaactacaaaatacaggaagtggcaacactgtgtcattccatctcctc

SEQ ID NO: 72284 - DNA, 122 bp, Homo sapiens
ctgatggaggcggggtaagactgcaagcactgcggcctgggcttggcgatagctgagaatcgtaggacaaaatgtgtaatgaggtgaaggaggaggccttacgttccttttcaccgccaatc

SEQ ID NO: 72285 - DNA, 122 bp, Homo sapiens
ctcaggtagttccctgtttgtgacatacacacacttagccctgaggctggactgacaggccgacctggctggtggactccagcccaagcctgccagctgcctgccggggtgggggccttggc

SEQ ID NO: 72286 - DNA, 122 bp, Homo sapiens
gtgggctcctaggcaggtcctgagtgacagcgcggcgggctggatcaggagatgcgcgtgcgcggcccggcccggctgatcgcttcgggtgctcgactcctgttgcgcatgctcagcgcgct

SEQ ID NO: 72287 - DNA, 122 bp, Homo sapiens
cccgggcagaggcctactcccctccccagcgacttttggcctctgagcagatggcgggggcgggggcatgggcgcagccggccggtctcacaagctaccacacccatgaaatttcccattaa

SEQ ID NO: 72288 - DNA, 122 bp, Homo sapiens
cgggcggtagagaagggctgagactgggaggctggtgcagcctccccgcctctgaaataccgtcctccaggtattttctggggacaaagacggcgttttttgttagcctcctgtgaaagtaa

SEQ ID NO: 72289 - DNA, 122 bp, Homo sapiens
ggcgagatttagcatggcctctcttggtgctatgtgttccttcatgatcggcttcacttccggcctcatctgccattttatagctcttgctttcaaatgtggagtctcctctgttgtaactc

SEQ ID NO: 72290 - DNA, 122 bp, Homo sapiens
cgaggtggacgggatgatctcagtgatgagcagcaggaagacggtgagtgacagcagcaccgaaatgcacagcgtgatcttctcgccgcagtcggagggcaggtagaagaccagcacagtga

SEQ ID NO: 72291 - DNA, 122 bp, Homo sapiens
gggtccagggcggtcaccctttccgcccagtctttgggtaaggagctccaactttcagcacgagagtgataggtaggaaaggcagggaaggagtgatacaaaagggacttgatttgggtaaa

SEQ ID NO: 72292 - DNA, 122 bp, Homo sapiens
cacgcggaaacaggtaaaaatcattttgcttttattttgcattcaacaagcaagttattacggaacagcagttatgggccaggcatacctcccagagctgggaacacagtggggacctccct

SEQ ID NO: 72293 - DNA, 122 bp, Homo sapiens
ctccgcggccaacctccccagggaaaccagcgattcgcggttcagatagcgaccttcgcccgcaggttcctgctctgccttcagacttcggcttcagtggcacctgctcagcgaggcctcgt

SEQ ID NO: 72294 - DNA, 122 bp, Homo sapiens
cgcctggggcaattcgcccacttgcctttcgccaacctcagaaccttcctttctggcctccgcctttccagttcagcctgcgcagcccgcgggggtcctgacaggtctctgactctgatgcc

SEQ ID NO: 72295 - DNA, 122 bp, Homo sapiens
agggcagagacagagaagcctctggaggttcggaaggacagattcatcagacggcagagccggaagcgattttacaccccttctgcaggagtgagaggagtagctgtttgacccccgctgcc

SEQ ID NO: 72296 - DNA, 122 bp, Homo sapiens
gacattactcccaataaagcagtgggtgtacattacccctgtgttattgcctctaatatccgggaccggaggaggtggggagaggataagattccctccaatgtagcaggtggtttgatgcc

SEQ ID NO: 72297 - DNA, 122 bp, Homo sapiens
gggacgcgggcctggcggggctactggtgggcacgatgggcgtctcgctgctgtccaacgcgctggtgctgctctgcctgctgcacagcgcggacatccgccgccaggcgccggcgctcttc

SEQ ID NO: 72298 - DNA, 122 bp, Homo sapiens
gcccggggctggctgcgcgaagggggcggggcctccggaggctggccagccaattgaggtcgtccggaaaaaagtggtcgcggcgttgccaaggtaggctgcgcagtgtctgggatgatgtc

SEQ ID NO: 72299 - DNA, 122 bp, Homo sapiens
accccagacgtgtgcgctgagcctccggccacacaggtggaaccagctggacctggccatcgtgctgctgtcactcatgggcatcacgctggaggagatagagatgagcgccgcgctgccca

SEQ ID NO: 72300 - DNA, 122 bp, Homo sapiens
gtgtgtgtgtccgtgcctctgtcctgccaacgtgggtgcagcgcccgacccctccctgcccgtcctctgtgtcccaggactcgcggtgaagccctgagcatgggcttccattgttattttct

SEQ ID NO: 72301 - DNA, 122 bp, Homo sapiens
aggtgcaaggcgagccctctgcgcaattaggctacgggcggccgctggcagaagttctggcggcggcgctcgcggccctgcgcgccggagggggcgcccggagtccagcgggccaagaaggg

SEQ ID NO: 72302 - DNA, 122 bp, Homo sapiens
cactacaaaatgaaaaacctgcaccaggagagaagcgagaaggcactgctaagggacactcgatttactcaagatggaataagtacaaagttacgtagtcaggagaactagtacgaaaaagg

SEQ ID NO: 72303 - DNA, 122 bp, Homo sapiens
cccaaccgcaccgactggtaaccccgcccacgggaagaggcgggctcggagcgggaggagcgactaggagcttctgggagaaaggacctcccctggggtggcagaagcgctcgcctgttcac

SEQ ID NO: 72304 - DNA, 122 bp, Homo sapiens
tgatgctcctggacaggagcagctgtaaccacccgctctggacaggcctgatttctgagtcgtctctgggagaaatgttctttgtaagatcatgtgcatgggggtagatggacagcatgcag

SEQ ID NO: 72305 - DNA, 122 bp, Homo sapiens
ctttttcatgaaccaaacaccaccaccagacacccaagactagaactgacaggcagcagacgcccccaaatcttgctgaataaacactcttttaatgatttcacatatatctatttatatat

SEQ ID NO: 72306 - DNA, 122 bp, Homo sapiens
ccaatgaagcgctggaactggagagtctctcgcgtgtctgggagggtgttttgcgcggggcggggtggagcagagccggaagcgggaggggagcgtcaaacaggaaaagaagggaagaagga

SEQ ID NO: 72307 - DNA, 122 bp, Homo sapiens
cggagccctgggagcggagcggggatctggggagggggcgcccaggcctcagccgccggccgacaaccgggccaccttccgtgaggccgcacacgctcccacaggcccgcgcctggcgcaag

SEQ ID NO: 72308 - DNA, 122 bp, Homo sapiens
tgggggcccccaagccccctgttggtggaggcaagggccgtggcctagtggctggtgggtcgcgggctctggggccttcggtgaagctgtctacggcctctgtgacgggcaggagccctggc

SEQ ID NO: 72309 - DNA, 122 bp, Homo sapiens
tggatctgatttctacccatttgataggaattacccctttgcctactgtaagatcaggtgcgatcagttccgactctctgggggcctctgtggcagttacagcccaaacccactccctcagc

SEQ ID NO: 72310 - DNA, 122 bp, Homo sapiens
acacaaaagatgacagtatatgagaaatgaaagcagggtctggagctgctattattagatcgcttttatttggagaactggggcatccacagggaagttgaagacccagagccgactcagcc

SEQ ID NO: 72311 - DNA, 122 bp, Homo sapiens
tattgattttctccaggaagatcaatctggggtccgtgggcacagcaggcatgctgcactcggaagggcagcgccttcctcccaggcctgaggccccacagcaagggtgggagccggcgggg

SEQ ID NO: 72312 - DNA, 122 bp, Homo sapiens
cagtgtgtcccacaattctcttcctatccatgcctgttcctcttccactgcctcatatgtcggtgactgtccaccttctctctctctccccctctccgtttggctcataggaaaagtgtcac

SEQ ID NO: 72313 - DNA, 122 bp, Homo sapiens
gcggcaggaacctgccactcctgggagtaaaaagctgctctcgggaaccctcctgcttctcgggcacaccagccctgggaggacttaacgatgatctggaggaaaaagaggctgcacgaggt

SEQ ID NO: 72314 - DNA, 122 bp, Homo sapiens
gcacgtggatgtcactgaatgtcctttctcttccaatacatatctgtatctaaaagcacacggtttgcttgcagattttcttccttcccttctcctccctatgggaagctgcccactccacc

SEQ ID NO: 72315 - DNA, 122 bp, Homo sapiens
cgtggtgagcaaagccccgcccccctggccgcgggcccccccccgggtccaattcacacccgatgttctgtccccgtgccaaggggcagttcacacccagctccctgacccgccccttaggg

SEQ ID NO: 72316 - DNA, 122 bp, Homo sapiens
gaccccactcatttcggatcttctaacttaatttctcttgaccgagaggctttgtaatagcgtagaatctggagacagggtggcttcgttcaaacagcaccctcaccattgactagccctgt

SEQ ID NO: 72317 - DNA, 122 bp, Homo sapiens
ggacttccctccgcactcttggacgggtgagtgcgcttccacctaggaggacaactacagcggattctcgttattcaggtggtcagattctgtaaggtggccgcgaacactgagttagcgaa

SEQ ID NO: 72318 - DNA, 122 bp, Homo sapiens
aaaaaaagccagatttgtggctcacttcgtggggaaatgtgtccagcgcaccaacgcaggcgagggactgggggaggagggaagtgccctcctgcagcacgcgaggttccgggaccggctgg

SEQ ID NO: 72319 - DNA, 122 bp, Homo sapiens
ggtcagagttggctacaccatgccttccaggcacgccacaccgtgaggtcacaccgcggacgcccctcacacaggggacgcccctcacacagcggatgcccctcatgccacggaggcctccg

SEQ ID NO: 72320 - DNA, 122 bp, Homo sapiens
gaggctctgaaaggcaagagctttcatatgttcatctatagcttatggttcaaaattcagcgtgcatgcatcaatgagaaggggagcgaccgatatagaaatgcatatgtatgggccccagg

SEQ ID NO: 72321 - DNA, 122 bp, Homo sapiens
tgacaggtggacaccaggagtggggcgggcaggccaaagtacagctgggagatgggagtccggagggaattctctgggttagttttggcagtccataggaaagcaggtgcctgccccgcaac

SEQ ID NO: 72322 - DNA, 122 bp, Homo sapiens
ggcctcttctaagatgggggagcctcctctgcaactggacctggagttgccatttcctaacgcccgtcgcggtggagcttagccccttcttccgaaagtcaggttggaggcggcctttaagc

SEQ ID NO: 72323 - DNA, 122 bp, Homo sapiens
gccgcgagttcgctccctgcccccagtgtctcctaagcgagccttctgctcctaggaaggcgcctttccagcagccgctgggaccctggccagtgtttagctcccaactagtaacagacgga

SEQ ID NO: 72324 - DNA, 122 bp, Homo sapiens
cccagtccaggaacttcaagttaaaatcaagggtccccactagggcagacgccaagaggacggtatcagcacaacagctcggcccccaggaacagaagtctctctgccaccttctacctcga

SEQ ID NO: 72325 - DNA, 122 bp, Homo sapiens
gcgccagccaaggtgggatgggggcccacagccaccgcccggcgcccgagaggccacctgcgtgctagaggcaaacttttgtctctctcggtaaagttgcattggccttcttttgcttgctt

SEQ ID NO: 72326 - DNA, 122 bp, Homo sapiens
ccttggcctctggctgacttgaacccagtccctactactcccagcctcccgtctcaggaacgtttaggtccctaggacactccgtgtccttcctgcactattcctgtctcagaatgtgcttc

SEQ ID NO: 72327 - DNA, 122 bp, Homo sapiens
gcggtgctgaagacacaaagggtcccaggtggcaccacctcctgcgtccacccacggggccgccagagcccagtcaagaccctagctcgctgcagccccatcgccagactcaacatccaccc

SEQ ID NO: 72328 - DNA, 122 bp, Homo sapiens
agagaaagtgataccagtgctgctggctggatgtttgacaggtgaacacagcccctgacacggtgcctttggttcaggtcagggcaccaggagcacttgctgccaaggtgtgtgcaggtgac

SEQ ID NO: 72329 - DNA, 122 bp, Homo sapiens
gcctcacactctgaccggaagctgcgaaagtcttggtcatcgggcacctggacactctcacggcccaggaccggccgaggcccttggggctctgtagaggccgccagcttctccatggggag

SEQ ID NO: 72330 - DNA, 122 bp, Homo sapiens
tagggcctgatctcagcccatgaccagttcaagtccaccctgccggacgccgatagggagcgcgaggccatcctggccatccacaaggaggcccagaggatcgctgagagcaaccacatcaa

SEQ ID NO: 72331 - DNA, 122 bp, Homo sapiens
acccagtgtcccagcgcgcagctcgagcgctccggggccgggtgcgagcgcagtctcccgcggagccagaaggggaagagaagtgagaaaaagcgtccactaaatggatcaaggccgcgagc

SEQ ID NO: 72332 - DNA, 122 bp, Homo sapiens
cccaggatcaggagaggctgagctcctttctcagcagcttcttcctatggccccagcctccgtgccctcttccctccaggggggactcggtgcctgcctggggaggaaggagaggcgttgca

SEQ ID NO: 72333 - DNA, 122 bp, Homo sapiens
acatctgggtaagacgccgggggccctgaggcgagcccctccccaggtgtggccccgtgccggaccaggcgccatccacgctcctgcctcgcacccctcagcccacacttggggtctcctgg

SEQ ID NO: 72334 - DNA, 122 bp, Homo sapiens
ttataacccccgggtgccatgtcctaattggtctcggtagcaggctccggggtgcgctttcgggggctaggggacagcgaaagactcagccacaaaggccgcagtctggtcctaaaactagc

SEQ ID NO: 72335 - DNA, 122 bp, Homo sapiens
gcatacgctgggaccagccctctccagggggccgtggggcttgtgtgttcttctggagaccggggggatgcattttgaggaagcgcctctgactccatgcctcccacacacgcggtctgtgc

SEQ ID NO: 72336 - DNA, 122 bp, Homo sapiens
aaattcccactggaaaaaaagtgcaaatccctggagttacacagtcttttaatccctcatcgtctaatactctcctgagcagtccttttcaggaaaaggagcagactcctaagacagagtct

SEQ ID NO: 72337 - DNA, 122 bp, Homo sapiens
caaaagtagaattcagctgagagctagttggagctctggggtgtctcctcccctagatcacgcacacaaaaagatgctaaagaaagcattaaattccccaaagtgaggaggacagaggggtt

SEQ ID NO: 72338 - DNA, 122 bp, Homo sapiens
gcacttaagtattcatcgaagagtcaccccagtagcggtgatcacagacatgaaaagatgcgagacgccggagatccttcaccaccaaataaaatgttgcggagatctgatagtcctgaaaa

SEQ ID NO: 72339 - DNA, 122 bp, Homo sapiens
ggctctcggtggcaggtggaggttcaagacggccccaatgaagatggggagatgttcatgcggccagggaagctgttcgactatttcccaaaaccataccccaacagtgaggctgctcgagc

SEQ ID NO: 72340 - DNA, 122 bp, Homo sapiens
aacctgcaagccgacaccaggccgcaccgccaagcggtacaagcccgaaaacctcgactccggaagcggatgatccgctcgccacgcctcctccgcttgccgccctatacttcccacaatgc

SEQ ID NO: 72341 - DNA, 122 bp, Homo sapiens
ggcccattgcttcccagcgaagcggcagtggcccacgtcagcacctttcctgaaaggcagcggttcccaaacctgccatccgaaatgtgcaagtttccagccaagtccgggaggtgggtgtg

SEQ ID NO: 72342 - DNA, 122 bp, Homo sapiens
gcacacaccccaccgtgatgcggggagtagtagcaaccccctctccccacctgactattacgatccacggtggacctacacagtgtttatgatattgtgagtaaatcatgtccccctcagca

SEQ ID NO: 72343 - DNA, 122 bp, Homo sapiens
cagagcggcctggacctgctgctggaggcgctggcgcggctgtcgggccgcggcgttgcacgtatctccgacgccctgctgcagctcacctgcgtcagctgcgtgcgcgccgtcatgaactc

SEQ ID NO: 72344 - DNA, 122 bp, Homo sapiens
accccacataaaggtttacctaaacacagccatcaatcacagccctcccttcaggaatttcgagtcttttattcataagagaacagagtatattgtggcgaaaatgaactcaggtcaatcca

SEQ ID NO: 72345 - DNA, 122 bp, Homo sapiens
tccacaaatccctattaaaagacagcacggtaccgttcccagaaatcaaggctcacaccacgtggagctgactggatgctcacggggacattcgatcccagcggcctggagaaaggacggaa

SEQ ID NO: 72346 - DNA, 122 bp, Homo sapiens
actgcgccaccctcggcgtcaacctcattgcctgcctggcctggtggatcggcggaggctcggggaccaacttcggcctggccttcgtgtggctgctcctgttcacgccttgcggctacgtg

SEQ ID NO: 72347 - DNA, 122 bp, Homo sapiens
aagacccagaaggcccaggaatgccaggttttgcccagcagctcttcattttcctgcaaacgccttggtgttcacaagagaaggcagcccgggcaaaggtcgatcctccccggtcacctgcc

SEQ ID NO: 72348 - DNA, 122 bp, Homo sapiens
gcgcccctctgctccggctcggggcgggcactggcggagggactggccagtcccctcctccgcgccggccccaaccctgtcgctgccgccgcgctccgagtccccattcccgagctgccgct

SEQ ID NO: 72349 - DNA, 122 bp, Homo sapiens
gatgccagagagcactgcctgattgaagaaaccgaggggagagaccagtctgagatgctgcggatggccagtagctggactgcttgataaatggggtcctggctataccacttcatagctgt

SEQ ID NO: 72350 - DNA, 122 bp, Homo sapiens
aaacatggaaacagttcatattttgagaaaactgagtcttcccattcaaggaacccacctcgcgcttcccagtgtccctctaagaagctccagtaaagaacctgtctacctaggtggattcg

SEQ ID NO: 72351 - DNA, 122 bp, Homo sapiens
aatgacaagggataaactacaggcaagtccaacttcagaagccctgcaggttgatcccgtcgccactatggggagaggagtgacccagcagaactgggacacactgcagtcatcctcagact

SEQ ID NO: 72352 - DNA, 122 bp, Homo sapiens
ttttagtcatacttcctcttatttttttttttttcttttttgacagggtcttcactctgtcgtccaggctcgagtacagaggtatgatatcagcttactgcaacctccacctcccaggctca

SEQ ID NO: 72353 - DNA, 122 bp, Homo sapiens
ctcaggccgggcgggattccgctgaggcctcccccgcgcacagcccccccacctcccccgcgacctctcagaaggagagaccccccgggtgggaaagaaagggctgctgatgagggccggtg

SEQ ID NO: 72354 - DNA, 122 bp, Homo sapiens
tcctttctagtgaaatgggtagccttgctgtcagataaaatagtagccatagctatgacacgtgtgtctctgattaaggtggggttgacagtcagctgttgaaacataaatgatttgcagaa

SEQ ID NO: 72355 - DNA, 122 bp, Homo sapiens
ttctcatttttattcccctgctgtgtgctgaaggtcactggctacaagccggtgaagtcgcggaatggaatccttggcccgaaaacccaaaaatgggaggggcagaggaggtggggacagag

SEQ ID NO: 72356 - DNA, 122 bp, Homo sapiens
ccacctacggcggccgaggagaacctaaaatgtttaaaagagcaaggacaagcgcatttacggcatttcctactctgtaaaatggccgcgcccatagccgtggctcctgacggcagccatgt

SEQ ID NO: 72357 - DNA, 122 bp, Homo sapiens
tggtttggtgtgactgagattcctttgtttaactgtacactgtgatgaataattttcttccgtagtagttctgtgaagggctgactcactgtggttttcatgaggagacttggtaatggatc

SEQ ID NO: 72358 - DNA, 122 bp, Homo sapiens
tgaactcctgagctcaagcaatcctcccaccctggcctcccaaagtgctgggattacaggcgtgagccaccgtgagcttggccccagctctttcatttatggacaggacatttcaggagagg

SEQ ID NO: 72359 - DNA, 122 bp, Homo sapiens
ccaggggaacactgctgtttaatttgtcttaaatacctcttctgagactgtattggtccccgaccacccatttgcaaagatccagcatccgtcaagactatttaacagacgttccaaaaagc

SEQ ID NO: 72360 - DNA, 122 bp, Homo sapiens
acctggaccaggtatttcccctgtaaaggttctgcccactctccagcaagcctactttcccgccctggagcaggtcacacaaatttagttgcacagatccaggattccccaggaggtgcctt

SEQ ID NO: 72361 - DNA, 122 bp, Homo sapiens
cgtcgggccagccctcccttctttccccagtcccgtagagcctgtttctcattagagtaacgggcgcggtccccgcccggcttctgagtgtttgtaaacgtctgacctggggccgtcgctta

SEQ ID NO: 72362 - DNA, 122 bp, Homo sapiens
ttgtgtttttatttgatctttaataaagaatattaagactgagctgactgcctgctatgacgctctaaacacagacttacatttgagaggctgaagggaggaaatggcagccccgtggaaag

SEQ ID NO: 72363 - DNA, 122 bp, Homo sapiens
tgggcacgtcactgctgcccattcccgcaggagcgaccactgtgcgtgagcataggagaacgtctgtggcaggacctgtccggtcttgcgccctttttttttcccggctgaaagcagagctt

SEQ ID NO: 72364 - DNA, 122 bp, Homo sapiens
ctaactctggtgcacaggactggacagttttccctcttatgagagcgggccacaaacagtcggctttctctcttctgcttctccaggaccttagtgcatcactgtagccctcttgctcctgt

SEQ ID NO: 72365 - DNA, 122 bp, Homo sapiens
tggtaaccagcgttaagagcaggatttttaaacatgataatggataaaataaaagaaaagcgaagtcccgcggtcctctgactcctattcattatctccagcagcatatgggaccattctcc

SEQ ID NO: 72366 - DNA, 122 bp, Homo sapiens
ggcccaggtgcggcgaccccagggcctgtgagggctgagggcaactgaggcgcggcctaacgcgagcctgcggattgcccgccctttcctctccatcacggcgctgattggctgcgccgccg

SEQ ID NO: 72367 - DNA, 122 bp, Homo sapiens
aagctgaagcaggcctgggtctcccagggcgggggcgccaaggccggggatctgcaggtccggccccgcggggacaccccgcaggcggaagccctggccgcagccgcccaggacgcgattgg

SEQ ID NO: 72368 - DNA, 122 bp, Homo sapiens
aaaatgccagggacacgtagcactggagcttgctgatggaggcccaccggaaccggaatccgggtttctgccaacagcccgcccactcctccgtcctattggttccttacgcgaaacctcag

SEQ ID NO: 72369 - DNA, 122 bp, Homo sapiens
ggatccgcccacccctccctagcgccccgggccatttaaagaagtgcaactggcagggggcggggcagcgactccggggtggagggcggccggtccaacagaaccgcttccttccactcagc

SEQ ID NO: 72370 - DNA, 122 bp, Homo sapiens
tcacaatagatagagatgactgccatgtgtgtagactttctatagactgtgtgctaaacccgacctgccacttccaaggagtagatgaggaatgtccatggttctggggagccctaccccaa

SEQ ID NO: 72371 - DNA, 122 bp, Homo sapiens
cccaggtacccacttccgccgccggccccaccggcctccctcacccctcccaacaacccacggcctgggagtgtcgattctgcgccactaactcattgatcgccttgcccgggttaattaat

SEQ ID NO: 72372 - DNA, 122 bp, Homo sapiens
gtgagttttcccagctggagaccggggtaaatggcgaactccacctgggcctagaggacccgggatagtgtgccagttcagccacagaggccctcagcttggaggccctgcccctccctcgc

SEQ ID NO: 72373 - DNA, 122 bp, Homo sapiens
tacgtccaaaagagacattcgtttctgttgattcattggagagagtttcttctggaataccggaagcgcagcacccaccagctgtgctgcttaaggtgaagggaggcagtagagggggctgt

SEQ ID NO: 72374 - DNA, 122 bp, Homo sapiens
ttgctgatatataaattgtagtcagctttttcttctttttgtcacaacctttggagattccggtaaaatgcctccttcagaatatttctgggcatccgttatttgtttatttatttattttt

SEQ ID NO: 72375 - DNA, 122 bp, Homo sapiens
ctctgtttctaaaatttccatccttcccctcccttgatgtgaagtaaacttcagaggatccggtgtcgggatggaagggtaatgaatgtggcaagttgtgtttgagtttgaagagtatagat

SEQ ID NO: 72376 - DNA, 122 bp, Homo sapiens
tgaatgaataaagggagctattgaaatgtcaggatgttctaaaacactgccaccttttcacgtgtaacttcaaattgagttccatctcacctctccaaatgtgacccagaaactagggacag

SEQ ID NO: 72377 - DNA, 122 bp, Homo sapiens
agaggaagccccaacgacctccacctacaaggcctctaagtgtaactgtcctgggcgaggcgcggcggttcggttcccatggtaaccccgcagctccagcgtcgcgcttccgggcggacgag

SEQ ID NO: 72378 - DNA, 122 bp, Homo sapiens
tggtaaagggaggcatctctgaagcagatctgaactgaaaagacccgcaggatgaaccaacgagaaggccagtggtatctcccaacactgtcccaatttgaatgttgtttaaatgttgtgca

SEQ ID NO: 72379 - DNA, 122 bp, Homo sapiens
caagtggaaagtgcggcagcggcggctgcgcttggtgccaggcggcatctggggtgggtgcgcccgatgtggagagaggagaggggctggcgttccgaggccgtgggggaagggcgggcggg

SEQ ID NO: 72380 - DNA, 122 bp, Homo sapiens
tgtccactcacctgtccgcgggccagacgtgctgatgggaagcttgtccactcacctgtccgcaggtcagatgtgctgatgggaagcttgtccaaacacgctgagacagtcagaacagccgt

SEQ ID NO: 72381 - DNA, 122 bp, Homo sapiens
ccggggaggaactccgggctcagtaggtgcaaatcaaacgccctggcatcctaagtccagcgggcacgggaagcctccgcaaagggttctcgctgctcccagcttgagcaccgcgtccccac

SEQ ID NO: 72382 - DNA, 122 bp, Homo sapiens
aaaagccttggatggtggagagctactttaaagtctaagggggaaaatacctgtatgttacgtttcactggcaaaatgaactggtaacagaccaaggcagagagacagctagacagtggttg

SEQ ID NO: 72383 - DNA, 122 bp, Homo sapiens
acaagtacggtggtggacacctcgccacagccggacctgcgctcttgctcccctcagtctcgggtctgtataagatacttgattcagacaagcgttttcaaagagaagatgcaatgggcctg

SEQ ID NO: 72384 - DNA, 122 bp, Homo sapiens
tcctgggaaatctcattcaagtccatggccttaagcctctatcaaggatgcccctaaggccgggtgcagtagctcacgcctgtaatcccagcactttgggagtctgaggcgggtggatggat

SEQ ID NO: 72385 - DNA, 122 bp, Homo sapiens
taggcggcggatattggtcccctgctcaggtccgggccccagtttggggagttcctctgtcgtccctgtcacccaccttgccttactcacctcagggatgctgcatccgtcctggccgcctt

SEQ ID NO: 72386 - DNA, 122 bp, Homo sapiens
ggttttctgaaacagatggaaagaccgcctctgcaggccgctggctgacttcaagatagtcgtgctgtatcaagtggtgtgagaaggaaagacccataagagactttgtcatccaagtttca

SEQ ID NO: 72387 - DNA, 122 bp, Homo sapiens
tagcaatcagcgagactccgtgggcgtaggaacccccgagccaggtgcgggatataatctcgtggtgcaccgttttttaagcccatcggaaaagcgcagtattcgggtgtgagtgacccgat

SEQ ID NO: 72388 - DNA, 122 bp, Homo sapiens
cggcgaggcccggccgcaggagcgcgccccgcctgcccgcgctgaccttcccggagtcgccgggaagcgggagggctgcacccccatctgcacccctgccctgaggctcagcccccggctta

SEQ ID NO: 72389 - DNA, 122 bp, Homo sapiens
accgacgcccccagtccttggcgggccttgaaggtttgtaaagtttgggagcctacatttcgggtctcatcacctggaaggcacaagaaggggtggggcgctgaagcccggcagtccacgtc

SEQ ID NO: 72390 - DNA, 122 bp, Homo sapiens
gcccctgacatccccacatctctctgtcccctgatatggctgccttcttccttcagttcccgatgtgtcctattggggagcagtgaggggcagtgcagcctcctctgttatttctgaagcca

SEQ ID NO: 72391 - DNA, 122 bp, Homo sapiens
acggcgcctaggggccggggaccggggccggggcagcgcggcggccgctcgggggccccgcgccgcggcacttactgatctcgtacggcatcctcgcccacttgttaccgcgccgcgctcgc

SEQ ID NO: 72392 - DNA, 122 bp, Homo sapiens
acattggagccggcccaggcgcctcccctctcccgaccccgcagcctgctcagccaacaccgccgagctccacagaccaccgctccctagcgccgcgcagccacaccttccactcgctgggg

SEQ ID NO: 72393 - DNA, 122 bp, Homo sapiens
gccggcacgtgggtgggcgatgacgccatttactgagatttgatccccaccacacggctccggggtgagaattatgacatctggctcaacacggctgcccgggacccacacagccgagcggc

SEQ ID NO: 72394 - DNA, 122 bp, Homo sapiens
gataggcgagcgtggcacaatgagacttgcagggtgggggcaggcagagccggagccagccggaggaaggagtcatacatggtggggcggctgcctgagggatggctgagctggaggctcaa

SEQ ID NO: 72395 - DNA, 122 bp, Homo sapiens
aatgaagagggggcaattcaaatcattaactcatttaataaaaaaatagtaaatgtcccacgcaccgtgctaatgttttacaaggattcttggtatttcatttacacaggtgccattacaat

SEQ ID NO: 72396 - DNA, 122 bp, Homo sapiens
tataagaaggcgcaagctcctggctgttggttttgttttgcacccaagcagggtgatgagcgcctcccgctgagtcacccatttcccatcggagaaggaactctggttaaaatgaagccgca

SEQ ID NO: 72397 - DNA, 122 bp, Homo sapiens
tatgtcagtacaactgttagggcggccttcccatttactttaggtttcaagaggattcaccggaagcacatgccccggtctagtcccatttgaaacagttctgctttactgagaccctaggc

SEQ ID NO: 72398 - DNA, 122 bp, Homo sapiens
tggggactgcgcggcagcaggggtggcagaaggaggaggcacgagggtgtgggcactggccgggtgccaggctgagagggagccacagcaaacgccccttggctttggcatgggcaggacag

SEQ ID NO: 72399 - DNA, 122 bp, Homo sapiens
tggccgacaacatactatgttatcacactacatttgtatttcggtacatggaagagtgtacgcatggccaggttcatggcaacccttactgtttcctagtcagagatgtaaccatatgagcc

SEQ ID NO: 72400 - DNA, 122 bp, Homo sapiens
catgaggtttgtcacctgtatttgccagtgattcccagagctcttacagttgtcccaggacgctttagcacatggccacacgactcccaaggttgacctgggagttattagaagatcagagg

SEQ ID NO: 72401 - DNA, 122 bp, Homo sapiens
aaagatggaaagaaaaatctctagattatccttaaaagatatatcaaatgcagccaggtgcggtggctcacgcctgtaatcccagcacgttgggaggccgaggcgggcggatcacctgaggt

SEQ ID NO: 72402 - DNA, 122 bp, Homo sapiens
cattaaatgaaacttgcctttaaatgaaacttaaatgcgtagagtgagtttccggactcacgtgtggccaggtctccacaggccgtggtcaagctcttgctgacttttgaagcgaaatccca

SEQ ID NO: 72403 - DNA, 122 bp, Homo sapiens
ataggcagagccacgctagagctacacacaaagccaggcgtgccagggaacctccagacacgaacctgggtgaggtgctccccactgggacatgccccaggcacctacagggacagctataa

SEQ ID NO: 72404 - DNA, 122 bp, Homo sapiens
ttccttgcccagtttgaccattgggtccttccttatagaaggtacttcctttctctttcccgagaggacactatactgtgacttcacttcagttgcctaaggtaggaaacttacaaattaga

SEQ ID NO: 72405 - DNA, 122 bp, Homo sapiens
gttctcagccaagaaccggtggcggctggtggggcccgtccacctgacccgaggagagggcggctttggcctcacgcttcggggagactcgcctgtcctcatcgctgccgtcattccaggga

SEQ ID NO: 72406 - DNA, 122 bp, Homo sapiens
gtgtcctgcccatggggccgaagcctcggaggacattatctggacttagtcccttccccgcgatgccatcaagctggacaattttaaggtctgtttctttcccaatgtagggtataggttgg

SEQ ID NO: 72407 - DNA, 122 bp, Homo sapiens
cgtttttcatccacatggttcacagatgacatagccccacgttgagcctgcaacagagcgcgaggtggatagtcccgtccattcaagagtcacactcagaccgagtgaaccatgattctggg

SEQ ID NO: 72408 - DNA, 122 bp, Homo sapiens
gtttccaggaaaatattcagctttgctactactcagcagacggggggaccgtggcacccccggcctcagccagaccgtccgctgcacacctgcatggcactgactgaacatgacgtgtccga

SEQ ID NO: 72409 - DNA, 122 bp, Homo sapiens
actcgggcgacaggaggcggggcggcgcggaagttatcttccaatcaggtgctccgggggcgggtccggaaaactgtccaatcaaggcacggggcggacaccgggaagcggattgcaggttt

SEQ ID NO: 72410 - DNA, 122 bp, Homo sapiens
ctctgccccgcctccggggctatttgcatacgaccatttccagtaattcccagcagccaccgtagctatatttggtagaacaacgagcactttctcaactccagtcaataactacgttagtt

SEQ ID NO: 72411 - DNA, 122 bp, Homo sapiens
aagcttggcttcaggatcgcacagttacaggtccttccctcacattctctcccctttctccgtccaccagggcaaactagagatttaagttttcgcttttgttgactttacaaactcaattc

SEQ ID NO: 72412 - DNA, 122 bp, Homo sapiens
gtcccgaggtgtgtgggctggcttgccccggagggaggcaggtcgcgaatgccgcctgctcggccctcccaggaacagcccccacaggagccctcacagagacagctccagatgtggatggc

SEQ ID NO: 72413 - DNA, 122 bp, Homo sapiens
gcaagacacagggtaagagcaaagacaaggtggctgtggcccatgtccaccctctcggggcgtcccttctcttctctcctccttgggcagggagaccatcggggtgcaacctggctggggcg

SEQ ID NO: 72414 - DNA, 122 bp, Homo sapiens
ctcctgggcccaagcaatcctctcacctcagcctcctgaatagctgggactgcaggtgtgcgctaccatgctcagctaatattttaaggtttataagctgttccaagacgcccccaaagggc

SEQ ID NO: 72415 - DNA, 122 bp, Homo sapiens
ctggagccgcagagccgggcagggcctgggcgggggcgggggcgggggcgctgctgcctgcgctctggcttctcaaccctgtccgagcctcttccaaccagcttagctgagagtgtgaggaa

SEQ ID NO: 72416 - DNA, 122 bp, Homo sapiens
ctgagagaaggatcaaatgtaaggcagtgtggctgcttcaggttcgggttgcctccatcgcgcctgggagagctctccccacccggccccgaactcccgagccccgtgaccgcccggaacgt

SEQ ID NO: 72417 - DNA, 122 bp, Homo sapiens
tgcagactaggccactgggtggcctgggtttgagtcccggtttctcctccacttcctagccgtgactttgcacaacaattcctctggtccctggtttcctcatctgtggaacggagctataa

SEQ ID NO: 72418 - DNA, 122 bp, Homo sapiens
ggtaatctcatggtgcgtgagactccctcaccctccaacctgtcaaagcttgtgcgccaccgccacctcctgggcacatcttgtttcttaatcagccacgaaatcacgtgaacacttcacat

SEQ ID NO: 72419 - DNA, 122 bp, Homo sapiens
gctgtgggcaccttctttggagatggctgggtggtccggatacagcccacctgcagctctcgggtggcaggtggggctggcgtgtctgtgtcaaactggatgtagtccagggtcaccaggat

SEQ ID NO: 72420 - DNA, 122 bp, Homo sapiens
ccggcgcccgccccgccgccctctggctccacctcgtgtggtgaccgcgacagccgccgccggggggccgtgccaccctccatccaggacctcacggaccacgacctcttcgccatcaagcg

SEQ ID NO: 72421 - DNA, 122 bp, Homo sapiens
gatgactgtttctatgtccctaagagaccatttcacccttaaatcaaatgttcacgtttacgtcaatgggcacattaaatataacgacattagtaatgcttattctcccctatccacacccc

SEQ ID NO: 72422 - DNA, 122 bp, Homo sapiens
acgagcctcagggtcccttggtgaagtcctgcagccgctggtgccctctgcgaccagctacgttcccactcgttctgacagcaccagcgccccaggggcagctcgcaaacccctgactcatg

SEQ ID NO: 72423 - DNA, 122 bp, Homo sapiens
caggccccctctgtcctcctatgctgagcccagcatccaggttgctttcccagctggtctcgttatctccagaatctgaccctgggtaatccccagtggtgctgcattctttgttcctgctc

SEQ ID NO: 72424 - DNA, 122 bp, Homo sapiens
ccgcttcaccatatggcagaacacatgcgcggccggccggctcacagatgggcgtacctgcgtccggcccacccgcctgcggtcctgtgtgctcaccctgccctggtctctgcctggactgt

SEQ ID NO: 72425 - DNA, 122 bp, Homo sapiens
catggacattttggcagaaagttggtcatattaatgttcaggccacaagttcccatttcacgtggagttgctgcccgattgcaggaaagtgctaatggttaggattaccattgcttaaactt

SEQ ID NO: 72426 - DNA, 122 bp, Homo sapiens
gaaaccaggagtgcgtcctccttttcggattcttgacgtcaagctccgacagccttggagcgtcgcaagggcggtagagagctgagggagggtgacagggaggggaagccattgcagcaaca

SEQ ID NO: 72427 - DNA, 122 bp, Homo sapiens
gcccagagccggagtctgagccggagcctgagcccgagcccgagcccgtgccagtgcccccgcccgagccccagccggagccccagcccctaccggaccccgcacccctgccggagctggag

SEQ ID NO: 72428 - DNA, 122 bp, Homo sapiens
actgattcctttgaccatctggcttacggacgagctctttgttcgctgctcctccgaaaacgccttcaatgactccctttgaataaagtaggaagtccgaaccgagccgccaggccgcgact

SEQ ID NO: 72429 - DNA, 122 bp, Homo sapiens
gaggctgacccaaagctgcaaccctctattcacaaagcagttctttctggtgaccagccccgatcctgaagccatctaaggccgcgagtcacctcattagcataacaagcgcattcctgtcg

SEQ ID NO: 72430 - DNA, 122 bp, Homo sapiens
ccacttgccccagggcgcgcggggaggcgggcgccttccgtgaggggtgcgctgcggacacgtgtagagttcggggaacttcacctctccacgttagggtttaggattcggagttttaggaa

SEQ ID NO: 72431 - DNA, 122 bp, Homo sapiens
tggcaggaggggtggcccaggcaggacccagtcctgagtcctggagcaaggccagggaggcgcccaccccaccccggccagctgccctctctgctgtttgttctatttgttcttcttttcac

SEQ ID NO: 72432 - DNA, 122 bp, Homo sapiens
cagttcttttactcagcaaaacttacttacagtgcaaggtacacatagtaagtgtaccatcgaacaagctttgaccagtgcatgcacctgtgtgactcagacccctatcaagttgtagagca

SEQ ID NO: 72433 - DNA, 122 bp, Homo sapiens
ccactctggtcaaccttgataacgtcatacgtggcttatggactggatagcactggattccgccgcagccctggccatactgtgccacacgttggaagaactgtgggatgtagaatggaggg

SEQ ID NO: 72434 - DNA, 122 bp, Homo sapiens
gcctgtctctgatccgtctgaacctaaacgccaacaacggccatgcagcctggtggacaccgctgagcaaacgccccagtgaccagcccagatggagtctcaggccagacaccagcacagct

SEQ ID NO: 72435 - DNA, 122 bp, Homo sapiens
ctgagctgctcccggggaccctgccccttccaggtgaccccaggagaagcagccccgggccggggggcaagttccagccacccttccgggtcaagaagccacgactcctggttagggggaaa

SEQ ID NO: 72436 - DNA, 122 bp, Homo sapiens
cggccacgctcggaaacgttcaagccactcccagcctgggtgggtatggactgagggttccggtcccccctctgctgcccgaatcttgctcttccagccatctccccatgcgatctgagtga

SEQ ID NO: 72437 - DNA, 122 bp, Homo sapiens
ggtattccaggcaaaaacaatagtctatttaaagggacagaagcataagcattctaaaggcgagctacttcagaaggtggtttcagtaaacactgtatgaaatgttggctgggaataagaag

SEQ ID NO: 72438 - DNA, 122 bp, Homo sapiens
gcgcggaagcggcggtagctgcagctggcgaagttgggcgactggcggatgcaggccttgcggcacgtcgtgtgcgccctgtccggcggcgtggacagcgccgtggccgcgctgctgctgag

SEQ ID NO: 72439 - DNA, 122 bp, Homo sapiens
acccctcacaaatgactttgaattaaatattaggtttatttttatatgtatggaacctgacgcacagtgataattaaagtgtagctcagccatagagtgagccattggtcactatgggtctt

SEQ ID NO: 72440 - DNA, 122 bp, Homo sapiens
tccggagctggctctcctgcttggtagggaagcgcagtttgtcaatgaccttaactgccacgtcccggcctgtcttccggtgttttcctgcacagggagtagaagagatgggggatgagaga

SEQ ID NO: 72441 - DNA, 122 bp, Homo sapiens
ctatggctgcggctgcggctcttttccttgctggggctcctgcttttctctttcttgctccggctccgactctggctccggctccggctcttgctccgggagcgggagcccgacctgaggag

SEQ ID NO: 72442 - DNA, 122 bp, Homo sapiens
cggctgggaatgaagatgcctgcaggccccagagcacaggcagggctgaagtgcgggcggcgagtgggctgggaatgaagacaccggagggccccagagtggaggcagggctgaggcacagg

SEQ ID NO: 72443 - DNA, 122 bp, Homo sapiens
cccgggggccacagtgtgcggcgcgttccttcattcttgtatggaccccagtgcccaggacgttccttgactgctctgtgagcagggggaggagggctggagggagcgggtgggggggcagt

SEQ ID NO: 72444 - DNA, 122 bp, Homo sapiens
tattccccctcaagtttcaatttcaagcactgactgctaagattggcatgtctccagccacgtacatttgcaaaaagtcagatttgcaatgtaatatgtcatggagctcatgcttgttgaag

SEQ ID NO: 72445 - DNA, 122 bp, Homo sapiens
cctgagcaaacaacagacggtgctcaaagtaacaactggacttaataaaaggagcttacacgaaggaggagctgaaggctgctgtggtcgtgtgctgggggctgccccagctccagctgcag

SEQ ID NO: 72446 - DNA, 122 bp, Homo sapiens
cagcacccccacccccgcttgagggaaattatataatccccactgaggggggagctctcgcgagaaccaggcggatttgccattgacccactaggaggcgccgcggataatggccgcagtgc

SEQ ID NO: 72447 - DNA, 122 bp, Homo sapiens
tgtaaactaactgtgaaacaaggaaacagaagagaggccagaaaaccgtttcctaaatctcggcttggcatctggtgctggaccacagccgctgccaaacagatgggggaagcaccctccct

SEQ ID NO: 72448 - DNA, 122 bp, Homo sapiens
ggaggcactggggacccaattagcaggtcattttcatgtaaaagtttgggattggactctcgtgtatgaagatgatatggcaaccagtgagcaccttcccagtgcaggggaattgaaggtgg

SEQ ID NO: 72449 - DNA, 122 bp, Homo sapiens
agtcaccccctcgatctcttactttcctcttccctccaatctagtggggcccagaaggcacgcggggaatcgactctgagaaagaatgggggcagcgcgcggctcacgaggaacgaagggcg

SEQ ID NO: 72450 - DNA, 122 bp, Homo sapiens
agctctggggctgtggctgtgtgaccctaggcttgtcaccacccctctctgggccttagccgtggagccaaattgtctgggtttaaatctgtttccttactacttgagtggcctgggagagc

SEQ ID NO: 72451 - DNA, 122 bp, Homo sapiens
gcctccccaaggcctgctcaggaatcgggaacttaaaatcaaccggaagcagagcatgtgcgctccagggtgcctgagtatgatggatggcacagctggaggagctggctgtgttgcagaca

SEQ ID NO: 72452 - DNA, 122 bp, Homo sapiens
gggcgggggatgagccagggccgagaaggaactctgaagactccgtagattgctctagaccgcctcagacactctcggcgcagcgtggagaggatttgtgcaaacatttcctctgtggacca

SEQ ID NO: 72453 - DNA, 122 bp, Homo sapiens
tagatttgcataatgcttcctcaataattctgtcaggaagagtgctgagctaaaaaacaacgtgcaattgtgccttttttgaaagaccagctctctaaatggccaactggtaattaggagaa

SEQ ID NO: 72454 - DNA, 122 bp, Homo sapiens
tcagcagtcctgaagtgtggatgttttagagaatgacttaagaagtttgcagcttggacccgtatcccactcattatcaagaagcaactcaagatgactttccctggggcatgtcagttgcc

SEQ ID NO: 72455 - DNA, 122 bp, Homo sapiens
atgcagaaggtgttgggcggtcccgaccaggtgatggaccgcacgaacacccggaccttccgcctcttgcactaatacctccaccacagcaaggagatctaccgcgaggaggcgcagcaccc

SEQ ID NO: 72456 - DNA, 122 bp, Homo sapiens
cccgagccgggtggccgggaggcgggggctttaggggctaccctcgggaagctgttctcccgaggcgcccggtgaggaggcagcgggacgaccgcggttcgggcgccggattctacctccgc

SEQ ID NO: 72457 - DNA, 122 bp, Homo sapiens
ctctacaagatgttttcccctcactgagctcttcctgaaatgactctgtttgggtcacaccgaaacacagaactcatccttcaacctccacataccttgggtatcaagcactgagctttagg

SEQ ID NO: 72458 - DNA, 122 bp, Homo sapiens
tgcacgggagggcgattgatgcggctgccagttcgaagaggcagagcaataaagcctcggcgactgcggtgccttctgctgccggggtgggacccctaagcttttcagaggcctggatgctg

SEQ ID NO: 72459 - DNA, 122 bp, Homo sapiens
tcctgtagatgttttgtgggatgctccttcggtattaaaatgtgtatttcaagaggcagccgtagattctattaagcgtgtatgtaaacggagaacaaatttttcccgatctttatcctttc

SEQ ID NO: 72460 - DNA, 122 bp, Homo sapiens
ctgaagctcatgctatttgctattatattacatctttctagtaatcagaaatatgcacagcgcatccaggaatcagggaggacacaataattcatattgtgaattaaaaggatcactaggcc

SEQ ID NO: 72461 - DNA, 122 bp, Homo sapiens
cactcggccaagggcgacagccaactgctgtgagtgcacggggagaggcccaggcagcggcggcggcggcggctctcgggttgcggtgaagaatgtcagccactagcgtggatcaggtgagg

SEQ ID NO: 72462 - DNA, 122 bp, Homo sapiens
gagacaaaaggacccagaacaaattggctgatgaattcaggtcatgtccactttcatggccggatagggagcagaggggctagtagtgcagggagggtgagtaggaggctcacacctcccct

SEQ ID NO: 72463 - DNA, 122 bp, Homo sapiens
ctgcagccgcacctccgcaagctcctcttttccttctcagctctcggagaggggcagtgtcgcgtcaggagggccggaaaacggccccgcagcgctgccctcggggggtccgcctcctgaac

SEQ ID NO: 72464 - DNA, 122 bp, Homo sapiens
ccttcacttctgcggtccagctcggccactgtcaaaagaagtccacaggcatctcgggcacgtcatccagatctgtcctgccccacactcccaattccatctccctagccataccagccggg

SEQ ID NO: 72465 - DNA, 122 bp, Homo sapiens
tcacctggtaacacagggaaagaaaattgtgaagcccttgcagcgaaaccgaaaacatgccggaagccaaagacattctccataccacaggattcggattcagccacagaaaatataccacc

SEQ ID NO: 72466 - DNA, 122 bp, Homo sapiens
tcacccgacccctaggtaaggaggccgctaggagacgctgtggccacacggtggcgctgtcggcccgggactgaatggagggcccgaggggcgcaagctcgggggtcaggatcccctttcca

SEQ ID NO: 72467 - DNA, 122 bp, Homo sapiens
taattaaatggaaaagtaaacccggagacagcatcccactttcctgcgcgatctggatgccgggttgcagctatgccctcctccaacaagccatggccaactgtctgcagccactcacgcac

SEQ ID NO: 72468 - DNA, 122 bp, Homo sapiens
tcacttcctaaatgggatggcggcggggaataggcgctcctcgcttcctagatgggatggcggccgggcaaaaacgctcctcactttccagactgggcagccaggcagaggggctcctcata

SEQ ID NO: 72469 - DNA, 122 bp, Homo sapiens
ttacaagaacaagaagtgatttgtctgtttatagcaggtttaattaagacagttatgcgccgtgaactctttgggcctcaatcaatgcacttagatttggaaactcagatagaatcacatct

SEQ ID NO: 72470 - DNA, 122 bp, Homo sapiens
tccttcgcgtagacaacacttactgagcacctaccatgtgggcagagctgctggcatcaacgtcgcctagaactgctcagctcccagagtgccagactcaacttccagaacccccagactca

SEQ ID NO: 72471 - DNA, 122 bp, Homo sapiens
gccatggcaagacttcccgcaacatccactccttggaccacctcaagtgagtgtggggggcgtagcgggaggcctcggggctggacagggggacggggcgccgagctccgggtcggggctct

SEQ ID NO: 72472 - DNA, 122 bp, Homo sapiens
ggggtcgctgcgggccagccggctggggaccacccgcacgccctcctcctacggcgcaggcgagctgctggacttctcactggccgacgcggtgaaccaggagtttctgaccacgcgcacca

SEQ ID NO: 72473 - DNA, 122 bp, Homo sapiens
caggacgccatgagattttcaaaacctgacattccccagggaagggccgaccctcttcagcgaggcttacttgaaagacgcttgaatcgcaaagtaaggtcttggcttttccccactctcag

SEQ ID NO: 72474 - DNA, 122 bp, Homo sapiens
agaaaagtgctcaccaaaatattgttttaatggtaattataagagttttctgatgtgtgacgtgtttcgttgccttttctaatgtctttttggctggaagtaaagaaaggctcagaagcaga

SEQ ID NO: 72475 - DNA, 122 bp, Homo sapiens
cgtggcgctgacctttcctttaacctcccgggtgcctgggcgcgtcctgctaaaatgaaacgaagagcagatgtgaactcgggacaatgaaccaccagcgtgtccagctgtggggctgggac

SEQ ID NO: 72476 - DNA, 122 bp, Homo sapiens
tcgttactgaaaggagactcaagggtcagtgtggccctcagcgcagacgtcgggggaccccggctgagggtcgggggcgaccaaagcgcggccactggtcctctgaggccccgcccctcgcc

SEQ ID NO: 72477 - DNA, 122 bp, Homo sapiens
catgtaagtaatggaaaagcccatgattcggcctttccttgagaagacatttctcttcatcgctaggcttccagatatcctctgcagggtcctgaacataaaacctcacatgctgaatgacc

SEQ ID NO: 72478 - DNA, 122 bp, Homo sapiens
tcggcgtgcaggcggactgcacgcgcgcaggggcgctccggctcgcgggctgacaagacgcgccgcgccgcgcccacccgccccgccctgctccaccaatcacaacccgcctctaaacaccc

SEQ ID NO: 72479 - DNA, 122 bp, Homo sapiens
gagaaaaacagcgagaaaagcagctggtctccaaccagcgcctttcaggaccagcactcccgttctcaggagtccacggtccaccaccaagaaccaagccctaggctgtgtcaaattccgac

SEQ ID NO: 72480 - DNA, 122 bp, Homo sapiens
ggggacccttatcttctgttgctccccagtttgagggaagagtaaggggttaagaagtgacgggcaagaggagggagttgctggggaagggcaaacaccagaccaacctttccccaaccttg

SEQ ID NO: 72481 - DNA, 122 bp, Homo sapiens
cctgtttgccatagtttgtcttttcttatttcttcacttccaaactaaacagccctaatccgagcgcatacctctctgtgtgccaacgtttcgcctgtgtctgtgtctgctgcgtatgtaaa

SEQ ID NO: 72482 - DNA, 122 bp, Homo sapiens
cccgactggtccactcccagaaaagcctcggtgggactccgacgtctagggagttgtagccgctaccagaaatatcgatgagcctttaccctgaggtttagaaaggcagctctttctggggc

SEQ ID NO: 72483 - DNA, 122 bp, Homo sapiens
accacaatgtggcacatttagtgatagcctcaccagatcctgtgctgtgtgtgagtgaagcgtcaggagtgagcaggtatacgtgactataagtattcattttggctgtccaaaccattctt

SEQ ID NO: 72484 - DNA, 122 bp, Homo sapiens
cagtcctgccttccacacggcatctcctatggctacaggttggcatcctcggggtgccctcgggccgctggtgcccaatgccaggtgctgtcttcccaaaagctgtttctgttctacctggc

SEQ ID NO: 72485 - DNA, 122 bp, Homo sapiens
gggtctggctgtacaggaggactggaagggcatcctgggagtttcctggtgtccacaggccggacaaaagcaaccccgactccttagagcatggcatggctcagaggtgctggtaaaactga

SEQ ID NO: 72486 - DNA, 122 bp, Homo sapiens
ccaggccctgaggagggccatgacctagtgatgacacacaaggggcattattacagtgtacgcaggatgaccctggaagggatgggtgggtgggagtcaggagagatgtgagcctcgtacca

SEQ ID NO: 72487 - DNA, 122 bp, Homo sapiens
agcctcgactctgcaggtgttagcgctgtaagggccgaacccaaccgccagaatgtctgccgagcctagcatgggatgctgcccagcaaaacagcacccagggagagggcgactgaggaaga

SEQ ID NO: 72488 - DNA, 122 bp, Homo sapiens
cctctgcctgcttctagcacacacatcctgacctccttctgccttcaagacacaagatggcgctttaagccttgttgttaagaaagaggactacaaacgcttgagtttcttccctctgctcg

SEQ ID NO: 72489 - DNA, 122 bp, Homo sapiens
ccctatcccaactgtggagcatcagcagtgaggctcaatgctgggggagcttggaagaaacgtgtcctgataatgagtgcttgaattcttctgccagttggcagcttagtcagcaaaaccag

SEQ ID NO: 72490 - DNA, 122 bp, Homo sapiens
accaggccctctgggaaatgtagtccagagcgggacccacgccgattcctgtcagctcctcgcctgggcccacccgaaacggctgctccctcaactctcaacatccagccgagcctcggagt

SEQ ID NO: 72491 - DNA, 122 bp, Homo sapiens
gcagggggcgaggacacttcccgagacgcgcttcccctgctgtaggcaggtggggtgacgcgagatgccaggcgcgggactgtgagcctgtccaacccagccagagaaaacgttcagcatct

SEQ ID NO: 72492 - DNA, 122 bp, Homo sapiens
cccggagccgggaaggagagggagagagaggagaggggcaaaactgcagggtcctaacttcggatataaagctcggccactcgctacttgtgcagccttggcagaggtgatcatgagcactt

SEQ ID NO: 72493 - DNA, 122 bp, Homo sapiens
gttggtctcaacattcaggagagcctgctcccactctggtgggacaaagaccaccaaaatcgtgcttatattccctgccttgactcccacctcagtgtggtccctggtgtctgctcctcagc

SEQ ID NO: 72494 - DNA, 122 bp, Homo sapiens
ctccatcctgaggaaccccgtgttccagctggagtcctccttcatctactacaaaacctacgcccccgccttccggggcgccccgagcctggacgcgttcctggcctcgccgcggacgttct

SEQ ID NO: 72495 - DNA, 122 bp, Homo sapiens
agtaatgtctctatttctttctatattaaagcctatattaccatatatgtctccagtggacgttttgcttgatagggcccacctaacatgatggtttaaagctcctgaagtcaggagacaac

SEQ ID NO: 72496 - DNA, 122 bp, Homo sapiens
ggcctcttctaagatgggagaccctcctccgcatctggacctggagtcgccatttcctagcgcccctcgcagtggagcttgcccctttcttcggaaagtcggaagaaagccaccttaagcgc

SEQ ID NO: 72497 - DNA, 122 bp, Homo sapiens
cttatcctctcaagtacaacatatcgcgcttacaaattatcgccagccaccaggcagccccgcgctcctcacctaatgcaaatggagcggaggcctctgttattgtattatctgactttact

SEQ ID NO: 72498 - DNA, 122 bp, Homo sapiens
aaaggaaggcacccccataggggccgtggtgctcctccctgcaggactgggatgtgcaagcgtcactcccactgccacaaagatgggccaggtggccaagtgagttaccgctgggactgttc

SEQ ID NO: 72499 - DNA, 122 bp, Homo sapiens
ttcgagaccagcctgaccaacacggtgaaacccaccctctaccaaaaatacaaaattagccgggtgtggtggcacatgcctgtaatccctgctactccggaggctgaggcaggagaatcact

SEQ ID NO: 72500 - DNA, 122 bp, Homo sapiens
gacggggtttcactatgttggccaggctggtctcaaactcctgaccccaagtgatccgcccgcctcggccgcccaaagcactgggataacaggcgtaagccaactggcccggcccagaagaa

SEQ ID NO: 72501 - DNA, 122 bp, Homo sapiens
gagcggacggctgatggaggctcgggtcacggcccttaacaatagcttactcgggtgactcggcatgtgccaccatcagagcggttggcattcatcattactctcagatgtccctaccaaca

SEQ ID NO: 72502 - DNA, 122 bp, Homo sapiens
cgatagaacccgcaacaggaaaacggaaaggccgtgcgccggaagaacaggtagggactacgactcccagaagcctcttgacaaggactacatttcccagaaagctccgcgcggttcccacc

SEQ ID NO: 72503 - DNA, 122 bp, Homo sapiens
tggccttgccgcttttcacccatcactctactgagtgtgtgtctgacttgtttatctggacgcaatctttgtcgcacccagttatctcgctcagcgaccggggcgaccacgtttccttaaat

SEQ ID NO: 72504 - DNA, 122 bp, Homo sapiens
ctgtagatcagctgggactctgcttcatgtgtcttcctcattctgggatccatactgagacggatcagcccctattgtgggacatgttattgtgccagtgggaagagaactttgataggatc

SEQ ID NO: 72505 - DNA, 122 bp, Homo sapiens
cggcccggttgcgctgtagccgctgccgcctctgcctgggtcccttcggccgtacctctgcgtgggggctgcctccccggctcccggtgcagacaccatggtaagtgctctcagccgggtgc

SEQ ID NO: 72506 - DNA, 122 bp, Homo sapiens
actacgaagagtgggtctcatttttctcacttctcattcctgccgacctgtggcaggtgccgttcagatgctgggggaaggaaaggaacagctcagcaatggtgacaggatgggcgccgcca

SEQ ID NO: 72507 - DNA, 122 bp, Homo sapiens
aagccgtgcagacttgattccagagagagtgaaagcaatggcagctgatccgtggcagtgcgcaggacccagtaaaaaggtagccatggtgtctttacttgaccagctggagcacagtttct

SEQ ID NO: 72508 - DNA, 122 bp, Homo sapiens
actcccgagaattctaacaaatattatacaattcctacccgcatctaccctccacctggacgtagaacccgtgtgggaggcagtcctgcagggtttggggtggaatatcccccctgtcgagt

SEQ ID NO: 72509 - DNA, 122 bp, Homo sapiens
gaagtatagagcataatgtacttagtgcattacctagcacatagtagatacccagtaaatcgtggtgtcatttatttttgcccccacaattgaatgtatagttaattgaactcactgagtga

SEQ ID NO: 72510 - DNA, 122 bp, Homo sapiens
agcctccctccacccagtcaacactcttctccagagggagctagcccgtgccttcacccccgtcttctgcctgacggtaaacttgaggtgaatgggctcctacccatgaacacccaccgttc

SEQ ID NO: 72511 - DNA, 122 bp, Homo sapiens
gcaatgcctgggagcggacggacaggtgcatcagctgacaagaaacacagaggaacttcccgaaactagagatctctggggatggagctgcttgggaaggcacacaagcgagtgggcctcgc

SEQ ID NO: 72512 - DNA, 122 bp, Homo sapiens
tgtgcttcttcgagatcttattcccagatttggactgcccttatggatcggctgagataacgggcctgcatttgtggctgacttggtacagaagacggcaaaggtattgcggatcacacgga

SEQ ID NO: 72513 - DNA, 122 bp, Homo sapiens
aaatcagggtcccagagtaaaaaatcaagattcaaatgctaggagaagccaaaacaaaaacgtagaataaaagaccagagtcaggaacaaagtcatgatgacaaaggaggaggccaaaatgg

SEQ ID NO: 72514 - DNA, 122 bp, Homo sapiens
ctttctgttgttagtatctcccaaagagttgctcagaggaaaaaataagagagaaaacatcgcgccctggtttctgggacgactgaaaccacgcagagccacgggtaaccaaggtacccgca

SEQ ID NO: 72515 - DNA, 122 bp, Homo sapiens
ggttcaagtgagtctcccacctagcctcccaagtaccaagtacctgggactacaggtgtccgccaccatgtccagctaatgtttgtattttttctagagacaggttttcaccatgtgggcca

SEQ ID NO: 72516 - DNA, 122 bp, Homo sapiens
tgtagcccatttgcttttcttgtgcctgtgtctgccttgtgcctactgctggcgtggtggcgtgggcagtggacggctccctgcctcgggagtgaccggcggtgctgtcctggctgtgcctc

SEQ ID NO: 72517 - DNA, 122 bp, Homo sapiens
aaaaagtaaaactggttatacaggaaaggtaacagaggtcagtaaacaaaagaatcatttcgaaacagggcaccaaattctgggcatagagatggagatcgggaaattgattgaatgacagc

SEQ ID NO: 72518 - DNA, 122 bp, Homo sapiens
agatgctaagccatgcacggcctcacgcacactgcgcttcaatcacggctgaagcaggaacgagctcttaatagttccagtaaatgcaaaggccgccctggaaaactgcgtgaacctttctg

SEQ ID NO: 72519 - DNA, 122 bp, Homo sapiens
gcccagcggccgcagccagccaggccgcgcccgggacgactgcagagcgcggtgagtgaacgcggccagagggagggactcaggcgtcccaggtccccgccctgcccctccccgggggcccg

SEQ ID NO: 72520 - DNA, 122 bp, Homo sapiens
ggcgggcggccgaacgggggcctgcgcggaccgcccgcggctcagcctccggtctctctccgtctctaagtggtggtggctgtgggtttttctgcaggtgatccttttgagtaatttgtttc

SEQ ID NO: 72521 - DNA, 122 bp, Homo sapiens
cactcctgcccacggagcttctgaggagctccatgaagctctcctccctatgcatgttagcgcaagggacggaacagttcatttaaacctaaatttaatggaaataaggaaaacatagatta

SEQ ID NO: 72522 - DNA, 122 bp, Homo sapiens
tgaatctgcagctcgcatgcgtcccggcagttcccggcgggaggctgacgagacgcaacgcgtctgcgcacatccccgcgttgttctcactgcgcatgtgcagttgcaaccgggatactaga

SEQ ID NO: 72523 - DNA, 122 bp, Homo sapiens
gcgccggagctgactcgtctctctcttctttcccctgcaggaatcttccgataattctgccgccgcgactttaaccgtgcgcaaggcgagagctcgaaacaaacatcacatctaaattaaaa

SEQ ID NO: 72524 - DNA, 122 bp, Homo sapiens
tcatgctcctagaataactaccaagatagcctttagggggaaaacgtcacaagacatgaacgtctcccctggtagaaagaaaggctcctccccgaggtctcagaggccacacctgtaggcag

SEQ ID NO: 72525 - DNA, 122 bp, Homo sapiens
aggggtcccgtctgctgacccggcctcccacctccaggtcaacttggtggtgatgctggccgagttgttcatgtgttttgaggtgctcaagcccgactttgtgcaagtgaaggacttgcccg

SEQ ID NO: 72526 - DNA, 122 bp, Homo sapiens
gcccagcacaatgcccaacacacttgtgcatgccagctcccaggcaacagtggcaatggccggaataaaaatagcccaggcccccaggatttgagtaaacagcagcatttcatttttcaagt

SEQ ID NO: 72527 - DNA, 122 bp, Homo sapiens
cccctattttaaggacgctattgctgtggaggagtaaccccacttttaggaatccttttccgtgcgaaaggctgtttgagatcaggcgcaacaacttctcccgctcaggttaccctcagaaa

SEQ ID NO: 72528 - DNA, 122 bp, Homo sapiens
cttctccgttgcagtctcctgacatcgacaaccaccatgcactcattgaatataacgaggcggagtgcagctttgttctccaggacttcaattcccgcaacggcacgtttgtcaacgagtgc

SEQ ID NO: 72529 - DNA, 122 bp, Homo sapiens
tgtcccactctgggccactccagcgctcgcccagagaaggctcgcgggctccccggagagcggccagtcactgggtgaggctcacttttgggacagcccgtaagagcctcctacctttgtgc

SEQ ID NO: 72530 - DNA, 122 bp, Homo sapiens
cttatccggagatacaggatgtctcgggctctccatctgccgggctctaaaatgggcgctcggtccctgggggctgcatccggaggctggggggactggtcgagggagagcgggcggggggc

SEQ ID NO: 72531 - DNA, 122 bp, Homo sapiens
caaagactccaaagtcataaaatagcctatgaccaactgcagcaagacaggaggtcagctcgcctataatggtgcttaaagtgtgattgatgtaattttctgtactcaccatttgaagttag

SEQ ID NO: 72532 - DNA, 122 bp, Homo sapiens
ctgtagcaagtgtgcccagggctgtgtttgcaaaggggcgtcagagaagtgcagctgctgcgactgatgccaggacaacctttctcccagatgtaaacagagagacatgtacaaacctggat

SEQ ID NO: 72533 - DNA, 122 bp, Homo sapiens
cgctggagtcgctgcgggtcctgggattcagccacgaggaaatcatctgtgagtgagccccgtggaggccaggggtaggggggaaccccacggagagctggggacctggccattcatgcccc

SEQ ID NO: 72534 - DNA, 122 bp, Homo sapiens
gatttttttttttttttttttttgacaatgtgtaaaatggagatggtggcggagagcttgcgccgcgtcttgccctgattgttctgggctgggattggattactgggactgcccagggtccc

SEQ ID NO: 72535 - DNA, 122 bp, Homo sapiens
ctggacagaggtgagacgctcgcggaccttagcttggggttggcggcgttaggaagaaaccgacctcgagaccctgaagacctgacaacagccgttactctggctgacaagtcattggattt

SEQ ID NO: 72536 - DNA, 122 bp, Homo sapiens
acctcaggtgatctgcccaccatagcctcccaaagtgctgggattacaggcgtgagccaccgtgcctggccaagagcctgcattttaacaagattcccaggtgatacattgtaccctgtttg

SEQ ID NO: 72537 - DNA, 122 bp, Homo sapiens
ggtgcgctaagagctccccgcgcctcttagcgcgccgtgtacgcgcctggaggcagggaccggggacgcggagctgggcgggagactcgcgggtcagggacgcggggtgaggctgggggtga

SEQ ID NO: 72538 - DNA, 122 bp, Homo sapiens
ggacggcgaggacaccgaggacggcgaggacggcgaggacggcgaggatggcgaggatggcgaggacactgaggatggcgaggatggcgaggacggtgaggacggcgaggacggcgaggatg

SEQ ID NO: 72539 - DNA, 122 bp, Homo sapiens
tctgacagacgccaacatcctacatgataaacactctcagcaaactaagaatggaaagagcgttttcagcttgataaggaaaaaccacaaataaactgcagctagcagcacgcctcatggag

SEQ ID NO: 72540 - DNA, 122 bp, Homo sapiens
agaacactgcagagtgcgtgacgtcacgacgctcacaccaatgggagcctctgtttatgtcgggagccatcaaatagtcatcttccccctaccatcccccgcccactctccgtcgcgctgcg

SEQ ID NO: 72541 - DNA, 122 bp, Homo sapiens
agcagggacacctaggatgaagaccagcctcacctctctcacagacccgcccaagaaagccggtcccgatgcagtcacagatgaagcggttccagccttctcgacagacgcccccattgcga

SEQ ID NO: 72542 - DNA, 122 bp, Homo sapiens
atgtggggatgataacagggctcacctcagaagtttgctcaagaacgaaatgatgaataccgggcctttgggagcacagctgcaggcaccaagctcttaatgagcgggtattggctgcaatc

SEQ ID NO: 72543 - DNA, 122 bp, Homo sapiens
tgtcccctgtacctgcggcggcggcgtgtctggcgggacccagcagcgcggggcgtgttccgaccacttaaaagttacaaagtgaaactccggcgcctcctgcacatgcgcagagctgcggc

SEQ ID NO: 72544 - DNA, 122 bp, Homo sapiens
cttaacggttacctcggctgagcgaaacccttggctgctgctgatttaactacaggtccgcgcgagttactttccagggaactgaattcagaacaaagagttaccgaagccttactccctct

SEQ ID NO: 72545 - DNA, 122 bp, Homo sapiens
taggacagcagcagtgagcctccatccctgcagggcccgcggcctggggccaccagcaggcgggacagtttagcaaaaagttttagtctaaacagatgataagggctgtcatttgtgtataa

SEQ ID NO: 72546 - DNA, 122 bp, Homo sapiens
tgggccgggagggaggtgtgagcagaggccggccgtcctcctctcccagaagggctcctgcgggacctggaattccatcgatgacgtgtcgtgggttggcggtgacctctaccatgtcccat

SEQ ID NO: 72547 - DNA, 122 bp, Homo sapiens
aagtctgatgctaaagaaagacctaaggatcaagtagatcaaaccttaagacttggaaaacgctgaaagccggctacaaaacatgctggaatccgttaaaaacggggagaagagattatcaa

SEQ ID NO: 72548 - DNA, 122 bp, Homo sapiens
cagctcccggtggtgccacggagccctccttgtggtcccacaagatggcgctgtgtccaacgctagccccggcctctgccagagaggcagggggacccggagcggagccacctctgagccct

SEQ ID NO: 72549 - DNA, 122 bp, Homo sapiens
aaaacaaaacaaaacaaaaaactaagcccccaccccccccccaacaccaaaccatctgaacggacttcctcctaggccagggcagtctaaaatgtaaccaacctgagagactggttcaggcc

SEQ ID NO: 72550 - DNA, 122 bp, Homo sapiens
ccaaggtttgagcggtaggcctattggccaatcaggaagagtacagtactgagtgacaaacgacccaactaaccagcgccaaagcagcatgtcgtgttgaagctcacccagcgtgacgcaaa

SEQ ID NO: 72551 - DNA, 122 bp, Homo sapiens
tgaactcctgggctcaaggaatccttctgcccctgtcttccaaactgctgggattacaggcgtgacccaccgtgcccggctgaaaattggtcttttctcacagacctgatatgtttccatct

SEQ ID NO: 72552 - DNA, 122 bp, Homo sapiens
ctgctgcagcggtgggccagctcatcctcctcctcctccggcctccccagcgaagtggcccgcgtccccgaggtcttaggcaacatctccgcccgctgcacatgcccgaaggcggcggtggc

SEQ ID NO: 72553 - DNA, 122 bp, Homo sapiens
ttgggaggagggcgctggtgctcaatgagtgagcccacctggggactaccaggacgaggacgggcgcaggtgaaagtcctgggctcattgccccagcatccaactttcaccctctgtcccct

SEQ ID NO: 72554 - DNA, 122 bp, Homo sapiens
gggtggcgaggccaccaccagggggcgatttcagggccgcagcgcctagaggtggggggtcgcccgatggccgaaggctgtgtgtgagcctcgccctcaaaccgcctctattgtgctagagt

SEQ ID NO: 72555 - DNA, 122 bp, Homo sapiens
tatgtgtatttctctccctccaggaggacgctgctgcgcatgcggttgggaacaaatgggcggggatttccccggaagtctccctttatggagggttggggttgggcgctccgcagtcctcc

SEQ ID NO: 72556 - DNA, 122 bp, Homo sapiens
aatggtagtttctcagttggagaagcagttcgaagtcattttgagctcctttaaactcaacgctttataaagcggtgattactttcgtgtcctaattaaatggccacgtcactctcttgcat

SEQ ID NO: 72557 - DNA, 122 bp, Homo sapiens
tgtcaaatgtattctttacttttttaatatgttgggattttattttatatctgatgactccgagtgtgtgccatccatttgttaagtaactggcctttagcagatctgtttcaaaaacaaat

SEQ ID NO: 72558 - DNA, 122 bp, Homo sapiens
gtcggcccccggaggttttgtttatggttgggttcgcggcctagtgggccgcgccagagccggggcctcgatttgggagcgtggccggggcggggcttggagcagccgtaggaagggggggc

SEQ ID NO: 72559 - DNA, 122 bp, Homo sapiens
tctggaatactgcctggcaggcaatcatggggcatgtaaagatcccacctggctaccctccgagaggagttttatctggaaaggagaaaacatgaacccttattatgcagccttaatgtgat

SEQ ID NO: 72560 - DNA, 122 bp, Homo sapiens
ttctgcccagccagaagggcgggtgcaccttgcaggaatggctggctggggagcctggggcgtaggacccttctgggactctgacaggactctctgtggggcctggggcatcttctctcagc

SEQ ID NO: 72561 - DNA, 122 bp, Homo sapiens
cccagttcctaacccttgtaccacacatcctgtccattgcatgtgccgcttttcctcagtcgctattgaattcctccttcatactgcttcagtttcctcatctccagcctgcattgcgcagt

SEQ ID NO: 72562 - DNA, 122 bp, Homo sapiens
cccgagccggcgctcataggctgagcacactgaggtcgggactgggaggtggctgcggcgcgtgctcattggctggtgtatggcttgcagccacccttgaattggttgactctgtacggctg

SEQ ID NO: 72563 - DNA, 122 bp, Homo sapiens
ccagggagccgttgttccgctccaggtcttccactgagccgcaacagagaccggttagagcggaccctggggccaggaaatcggggactgggaggcaagctgcctgcgggatttggaatcca

SEQ ID NO: 72564 - DNA, 122 bp, Homo sapiens
agcctgggcactgtagccaggaggacagagatcccggtgttcgggccccggtgtgcagtgcgttcactgcattgttcactcggaatcgcaggtggctttgctggagggacagacagttgatc

SEQ ID NO: 72565 - DNA, 122 bp, Homo sapiens
ctttatttagtcaaaggtcttgagttggtaccttgggactactataaatttgtacagccacgtatagccctaatttgtgtagtacagtcatgtactgcatagtgccagtgaggtcattagac

SEQ ID NO: 72566 - DNA, 122 bp, Homo sapiens
ttgaccaccaccgccaccttctcctgttctcttttgcctttccagcctgtgtgcataaatcgacgctccagtccccaccagcgggcgaccctttctccgtgacccagaaacctggcctctga

SEQ ID NO: 72567 - DNA, 122 bp, Homo sapiens
ccaggatgacattgtccttggaaggtaacacttgtgattggaaccactcttcaagctgaacgggcaataaaaaaaagccaagtttaaggtcaggatactcttccgttcatcatttcactttg

SEQ ID NO: 72568 - DNA, 122 bp, Homo sapiens
ctgaaatcacttgtgccaaatccaatgtttatgattatgctcttgtcttacttaatttcccggtagcatttagcatagctgattattttctcttttgggaaaaaaatttcgatgtctcttag

SEQ ID NO: 72569 - DNA, 122 bp, Homo sapiens
tgaggttcctgacaataaaaattctaagaaaatgatgcattacttttcccaacggaccagcgaggctgcaataagatgtgaatttgttaaatttcaagacagatgggaagttattcttgctg

SEQ ID NO: 72570 - DNA, 122 bp, Homo sapiens
gccaactccagggacccggcctcgcggccttcagacccacaggtttaagcggctccacgacgagagtccaagaccaaacttcccccagagcctggcagaggggctgggaggtgacctctgac

SEQ ID NO: 72571 - DNA, 122 bp, Homo sapiens
tccacgggatacgagtcccacacaacagacggagaatttggcgcagctctgcgcacgctgcgtgtgttacttactggttatattgcagtggccacactgagtcccgtatggcgccgtattaa

SEQ ID NO: 72572 - DNA, 122 bp, Homo sapiens
tgccgttctcgtgctccaccccgactagcacgaagatgggcccggcgctgcagaaggccacggcccagatgacgaagatgaccagcttcacccgccccttggtgaccaccaccttggcccgg

SEQ ID NO: 72573 - DNA, 122 bp, Homo sapiens
ttcagaccaggaactgctaagaagctcttgcagcttctggagggagctgtgatgtggacacgctgaaatcggtggggaggaagcggaagattcaagggacctcaagagacagaagagtcagg

SEQ ID NO: 72574 - DNA, 122 bp, Homo sapiens
agtccgggaaggtgcagttcccaggtgtgaccgcggggtggcgcggtgcgccggcgccggcgcttgcagacttcccgggagagaaacctccgtgcagccctggggctgacgtggatgccacc

SEQ ID NO: 72575 - DNA, 122 bp, Homo sapiens
gaagctcctcccacacatgctggcatcatgtcccctggcttgtcatctttcccttcccaccgtcaccagcgttgtgagggttgtgcacagagtgtcaaccacagacaccacccaacttgtcc

SEQ ID NO: 72576 - DNA, 122 bp, Homo sapiens
caatggaatgttcagaacgcgggacctccttgggttaggatttctagaccccgggatcgtcgtggtgagatttaggatttctggaccccagcgtcatcttgatatgacttaggatccataat

SEQ ID NO: 72577 - DNA, 122 bp, Homo sapiens
gccgtgagcaaaccaccttctgcagctaaagcaccaacctgtgtccaggatgaggggccacgtcctgacgtccacagccgccgccgcctccctggaccgcagcaacttacagatcagctgtg

SEQ ID NO: 72578 - DNA, 122 bp, Homo sapiens
cttctcataccctggggacacctgtcagacatcctaaaacaaggacacctggatcccaagcgatacgtactcagctcagtgctcccttggggttccaggaacccagcgccttccctcacctc

SEQ ID NO: 72579 - DNA, 122 bp, Homo sapiens
gccagcgcgcacgcagatggcggggtggcctggggaggtcttcgggtcccttcctgggaacgcagggccaagttgtgctccgattccacgccccccccacccacgtcgggcacacgcagccc

SEQ ID NO: 72580 - DNA, 122 bp, Homo sapiens
attacaggcgtgagccaccgcgctaggccgagagtaactttcactgcacctctgaaagttcgtgggcagctcctgcccctaacaaagatggcgacgccgccacacatgctcctagcactccc

SEQ ID NO: 72581 - DNA, 122 bp, Homo sapiens
gttctctcctctcggaagctgcagccatgatggaagtttgagagttgagccgctgtgaggcgaggccgggctcaggcgagggagatgagagacggcggcggccgcggcccggagcccctctc

SEQ ID NO: 72582 - DNA, 122 bp, Homo sapiens
gatcccaaaacagctgttcctgaccccagagaccagcctcctgtgacaaagccagcccaacgggggcgtggcccaggccacatgagcaccaccctcaggacaggtgacctcagggaacccca

SEQ ID NO: 72583 - DNA, 122 bp, Homo sapiens
ctggctgaaccgggccgggcgctgccgagactctgggaacgtctcccactcagtctccctcgttctacagctggtagcaggcaggtgctgctggttccttccatcaggagggagtgaccgct

SEQ ID NO: 72584 - DNA, 122 bp, Homo sapiens
aaagtctaagaaccacttccttttgcccttagagcccattcctcagcagacctccactcgcgtcgccaaagcagatcccagacttgactctcatgttgtagtggcacatggaggagcaggga

SEQ ID NO: 72585 - DNA, 122 bp, Homo sapiens
agacgccctggaggcggcaggagccacacagtgtaccttgcctggtgggggcaacgtccccggctgggttctgagagggggtagggcactgcacgagacccggagccacacagacaggtcct

SEQ ID NO: 72586 - DNA, 122 bp, Homo sapiens
ggaggagtaggaggtgcagtagggccgtcttcaggtggtagctgctgagcccgctgggaccggtcaggcggctctgcttggagagcaggaaggatgctatctgcaggcagctgaggtggcag

SEQ ID NO: 72587 - DNA, 122 bp, Homo sapiens
ttaggccattggggaactgaatgctttcctggccccaccagttagccaccttgtgtgatacggaaatctcatcttttcaaatataagacttgtcaagctgtaggaaaaatacatgtgaacat

SEQ ID NO: 72588 - DNA, 122 bp, Homo sapiens
gcggcgagcggggcgcgtggggcggggctcaagcagcagagaaattgataacagattcggcggattacagcggatctctttgttagagccgaagccacacaaaccgaacccactcccagccc

SEQ ID NO: 72589 - DNA, 122 bp, Homo sapiens
ggagaagaggaggtagacctaggagccaacaaatggctatcaatcccaccaaataggctccgcagtggggttgctaaacaacgaagcttccagaagcggaccccagttcccaccctcttgct

SEQ ID NO: 72590 - DNA, 122 bp, Homo sapiens
caggtgtccaggatggggtagagcttgccctggaagtcggcctggaaggtgtagagcggccgcaggtcatcggggcggtcggcatcgaagaaggtgagttcgccctgctcatagtgcaggta

SEQ ID NO: 72591 - DNA, 122 bp, Homo sapiens
cgcggcgccagggcagccaagcgagcgcatgcgtcattgcgtgccccgcctctggtgccgcgggagcggaactatcccgctctggcgtcctggggcctccatgacaacgagggaagggctgg

SEQ ID NO: 72592 - DNA, 122 bp, Homo sapiens
acactcgcctcctgatccagcatccagaacgctctggggcccagcaagaggctgtgctcgcgtctttctcgtatctgatcttcgcctccatccacctgctcgctggtccttggctgtgcctc

SEQ ID NO: 72593 - DNA, 122 bp, Homo sapiens
atggcagtgggaccctgcagggtgggctccgtcgcttcaagaccattgagctcaacagcacgggaagttatggtcatgagttggacctgggccaaggcccagaccccagtctggaccgggag

SEQ ID NO: 72594 - DNA, 122 bp, Homo sapiens
ctttcgcttggttctcattctttttttgcctgccgccatccacataagatgcgacttgctcggacttgcccggacttgccttccggcacgattgtgaggcctccccagccacatggaactct

SEQ ID NO: 72595 - DNA, 122 bp, Homo sapiens
ttttatgggctgagacaagcgacatctaggcccctcgcaatactagctgctttgccacttcgcagagacaaaatgaaaggctctactgcaggaacatttgaaggaactttctttggggggcg

SEQ ID NO: 72596 - DNA, 122 bp, Homo sapiens
gcagctaccaagagagtcagcagacacaataagcaatagctgctgaccttaagaactatccgatacggatagcagttgtactgtgtgcaatgtctaaagttaaggataggccgggcacagtg

SEQ ID NO: 72597 - DNA, 122 bp, Homo sapiens
gctgggagggacacggagagcctcgagagccgtgtggaggaagcggtgctgtttggggtccgggagcaagggcgtggcctggatgcgcgggcgcccgggacggcacgtcctcagaccaaact

SEQ ID NO: 72598 - DNA, 122 bp, Homo sapiens
caaggagtcttgtgttaaagctgggctgggaagccaattagtgacttctgtccccaaatacgttgtctggaagggagtgattcatcggggcctatccttgcttaaaccaaccagatggtggg

SEQ ID NO: 72599 - DNA, 122 bp, Homo sapiens
tgggcggggagggggcggggccgggcaacccggaaggtccggcgtcccagccgcctacctcgctgggaccctggtcttgctgtcccccgctggcctcctgcccaagcgactgcggccaggat

SEQ ID NO: 72600 - DNA, 122 bp, Homo sapiens
aacatggcaaaaccctgtctctactgaaaattcaaaaactcagcccagcatggtggcaggcgcctgtaatcccagctactcaggaggccgaggcatggggatcatgtgaaccctggggacga

SEQ ID NO: 72601 - DNA, 122 bp, Homo sapiens
ctctggtcttctgtgtttgctaattcattagtcaacaaatgtttactaagcacaaagactcgttctttgttctcaagggagggaggcagacagatgattgcagcaaggttgaggataaagag

SEQ ID NO: 72602 - DNA, 122 bp, Homo sapiens
tccagggcccaggtatggctgcaaaagcagacctgggtccagcaagggaaatggttaacccgtgaggccccccatctgcagagccccacagctactgccttgcagagcaccctttttctgac

SEQ ID NO: 72603 - DNA, 122 bp, Homo sapiens
gtgggcactggagttctaggcagaatccaactgagagtgtggatgatctcacgctggatccggcatccctgcagttttccgcaggcaggtctgaaaccatcggcgattgctccttagctcgg

SEQ ID NO: 72604 - DNA, 122 bp, Homo sapiens
ggaaagtattttggtccctatacaggccacagaaaaagagagtgttgaacctacatccatcgtttgtcctgggggtggtcccagcatggcttgttcaggaccgtcttggccctgctctgaga

SEQ ID NO: 72605 - DNA, 122 bp, Homo sapiens
tggcgcgcggcttggtttccattagagacgcaaagtttctgctccgggaggaggcggcggcgccgcgggctcgtcgcctgggggagcagaagcgggtgggaggtgcgggtggccttggcctc

SEQ ID NO: 72606 - DNA, 122 bp, Homo sapiens
ctgtgtctggcatcagggaggaggggacggggacctctgcgtacagtgctcccggaggcgcgaagagcatgttcagcgctggcgtctgcaatgccgtcttcaggaacacctggccccgcagg

SEQ ID NO: 72607 - DNA, 122 bp, Homo sapiens
agcctctcggcttccgtctggccaaactccttgattggctgcactccgccccgcccctctcgtcttgccgcttctttgagcggaagttggatcactgaagcgccaaaaaagaatttagggga

SEQ ID NO: 72608 - DNA, 122 bp, Homo sapiens
ctttgaggtttacagctgtcacgtgtatctttccagccacaccctccaaggctggggacacgcacttggaggcctcttagaatggaggacagcaaacagacagcagagaatgcgctgggcaa

SEQ ID NO: 72609 - DNA, 122 bp, Homo sapiens
agtttgttaactgccttttggaagtcagtgtaagaataagtagtgttgatgggttcagtacgagttgtttccttaactgttttagtcagccagccacagcaacacccagaaacacatgaatt

SEQ ID NO: 72610 - DNA, 122 bp, Homo sapiens
ggctggtcagcacctccctggctgggtggaggtggaaaggccgccttcgggtgtggacgtcggccggcttcctggagggcaggacacggcatcctcccactgcctggcaaccgtctcctggg

SEQ ID NO: 72611 - DNA, 122 bp, Homo sapiens
cttcacttgcgcccacggccgacgccccggcagcggcgggcaggtgccacgacctctggacgtttgtcgccccttctcgggaatggaacgcttagagaagcgcaggtccacacccaaaacac

SEQ ID NO: 72612 - DNA, 122 bp, Homo sapiens
agggcgatacgggcagcggcgggctctgctggtgctggctggggactatcgactggggtccggggcgcctccggccccatcattctccccactcctcctagacagatgggccctgggccgct

SEQ ID NO: 72613 - DNA, 122 bp, Homo sapiens
ctcctccggccgccctcgctgactcagcgtaatccgagccgcggagggcggcggggttggcggagcccgcccggggttaatcgccgagctttgaacgccccctcccgccccgcccgcctcca

SEQ ID NO: 72614 - DNA, 122 bp, Homo sapiens
aactggacaggacagtttggagcaggtgcaggttggagccgctcaggtgcaggttggagccgctcaggtgcaggttagagcagtccaagtgcaggttaatcttttacttcgttaaataaata

SEQ ID NO: 72615 - DNA, 122 bp, Homo sapiens
agcggcacggggtcacagggctttgagtagccttcctcggtgacgctgagtagggaactccgggatggggctccacggtggactctcggggacaggcacccggggccaccctacaaagcctc

SEQ ID NO: 72616 - DNA, 122 bp, Homo sapiens
tgcagtttgatgctgatttgtatttttttcctattttggttgaaaaactgccctgattcacgcttcactcccagcagcttagagccattcgtccagcctttgcgtttggtctcagagcccca

SEQ ID NO: 72617 - DNA, 122 bp, Homo sapiens
tccatccatacaacgtgacatgctttggcaacaacgcagatgaaacgctgagacatgccgcggcgtggacgaagcttgaaaaccttgtgctaattaaaagaagccagacacaaacagacaat

SEQ ID NO: 72618 - DNA, 122 bp, Homo sapiens
gagttcccattgattggctaacctcagagactccagaaaatggaagcgtcctttggtagccgcccatcactctctcattggttaaatgacttgcggagggcggggaaaacgggactgaaaac

SEQ ID NO: 72619 - DNA, 122 bp, Homo sapiens
taaatccatctttactaggcacctactctgggccactaattgtgccaagcctacgggaggcgatgcatccctgcgctggacacagacaaataaaatgcactaggggacacagacaaataaaa

SEQ ID NO: 72620 - DNA, 122 bp, Homo sapiens
aatcaattcagtccacaacctcctggcacctacctctgggctgcacagtcaggtgggccacgaccttctgggagccgatgatgttgacagcctggcattcgtactggccctggtcgtggagg

SEQ ID NO: 72621 - DNA, 122 bp, Homo sapiens
cgatgtaggagaaggtcagctcccggggggtgccccagtcctgcgacgtggtctcctcctcgtcctcctctgagaattcccgggctgtgtgcagctctcgaaaatcagagtcgtcgttccct

SEQ ID NO: 72622 - DNA, 122 bp, Homo sapiens
tttataaaagtaggacttcttgagcatgaacttaacagttctctagcaaaagaatagctacgcaaaatttatataaagctctaattctgagatagatacaaaacagtaactaatcagaaagt

SEQ ID NO: 72623 - DNA, 122 bp, Homo sapiens
ccagtactcaaggacaagtaaatggttcagaaggcaaaggtattgaagaataaatacaaacgattgaaggctaaatacaaaggaagacacatagaaggcacaatgtctgtcaaatccacaac

SEQ ID NO: 72624 - DNA, 122 bp, Homo sapiens
tcctgaatgaactgtttctgtgtaagtcctctcagattgattgtcttctctggaacacaccgtgttctcagaagttctgccctagcctgccaaagccccagagtacacaggcactttttagt

SEQ ID NO: 72625 - DNA, 122 bp, Homo sapiens
tgcggtagcatgtggtgtggtttgcagggcatagtcagccacccagcctgcaccggagatcggcccctcctgcggccctggagcaggtcgagctgggccctggctggcttgtcacatgggca

SEQ ID NO: 72626 - DNA, 122 bp, Homo sapiens
aagacacagatctgggaagagcagagaaaaaacgctcctgcttctgaacccctcccacctcgcatcacctgacaagtctctcaaggtctggtgtcgggaaaccccacctcttcaaagccccg

SEQ ID NO: 72627 - DNA, 122 bp, Homo sapiens
ccatcaaggtgctgatggctgggggtggggttggggccgacttgagagaggaccatttctcgaccccattccacaggtgggagcatccctaaacatctcaggtgctgctgaaattctctctt

SEQ ID NO: 72628 - DNA, 122 bp, Homo sapiens
cgccttcctgaagaaaaagcccagtcccggcagcgttcttctccggctccgcccttcttccgctcgactttctttgccattggctgacaacggagtacataaggacgtcatttcctgccgcc

SEQ ID NO: 72629 - DNA, 122 bp, Homo sapiens
ctctaaatcaaataaatacacagtgttcaggattatctggatggtcatcttaaataacagcgtgtcccacataatcacagcctctgcaattatgcctctgatccatgtgataccaagaccaa

SEQ ID NO: 72630 - DNA, 122 bp, Homo sapiens
ctctcggctccccaccccctctcccttccctcctctccccttgcctcccctcctctgcagcgcctgcattattttctgcccgcaggctcggcttgcactgctgctgcagcccggggaggtgg

SEQ ID NO: 72631 - DNA, 122 bp, Homo sapiens
cggaggcgcctcatggccgccaagcgagcggcgtccttccggcagaattccgcctccgagcgcgcggacagcatcgagatctacatccccgaggcccagacccggctctgagggcggaggcc

SEQ ID NO: 72632 - DNA, 122 bp, Homo sapiens
ctcccgggcccacgttgtaaccacaagcacgcattctcgccccttcattctctcctctcccgtttgggtccctgttgtgtttcagccgtttgtaaattcctgaaatctgtggaaggtttgag

SEQ ID NO: 72633 - DNA, 122 bp, Homo sapiens
tttctcatttggtttcccctcaactattttaatagtgcctgcagacttacaaacagaaggcggtggtttataaggttttaagatgttcacttaggggctaactcactatcggctatggcaaa

SEQ ID NO: 72634 - DNA, 122 bp, Homo sapiens
ctctctcgctctcttttttttttttttttttggtcggaggaaagaaaacagccctgcgcccggatgcgtagagagccgacaagtggaaacagggacacaccctcccgtgagcccgcccaagc

SEQ ID NO: 72635 - DNA, 122 bp, Homo sapiens
gtttgccagacagaggggtgtggacaagggggaaagggactcccaggcaggaggggacagcgtgagcaaaaagcatgcagacctggaaaagcctaataattgagggaacagtgaggagcagt

SEQ ID NO: 72636 - DNA, 122 bp, Homo sapiens
catttcccgtagcttcgaagctcctaaggagttaggatcatcttggcgtacagatcccttcgaagcactgatccctccgctccttcccggcacagccccttcccggcacggccctttcccgc

SEQ ID NO: 72637 - DNA, 122 bp, Homo sapiens
ttggggatgggcccaactgactttgcttcgctctcattagccggtggtcctccaggaaagcggggccgcctctccgctgtgctctcataggcccaggttcttgcgttcgtgtgtccttctct

SEQ ID NO: 72638 - DNA, 122 bp, Homo sapiens
gaactagctcgccccaaggggaccacatcagctctgggggaccaagatgcagcaggggagcgccacgcgagcaggagcccacgccaggacgtaggatctcggcaaggaggcaatgcatgact

SEQ ID NO: 72639 - DNA, 122 bp, Homo sapiens
tgggcgcgaaaggctcgtgtgtaccgaagtataggggacctgtctgcagcaggagggactcgaaggacacggaggattatatcactgaaggcataagattcagaggtgcccgcggtctagca

SEQ ID NO: 72640 - DNA, 122 bp, Homo sapiens
aggtcaacgccgcaccaggagagggacatgatggagtccagatccagatgtcccagggcacgagcacccgaggcgccccttacagccactggcagcccctcaacggcagccgctgtgctatc

SEQ ID NO: 72641 - DNA, 122 bp, Homo sapiens
ttagatggagtaaagggaggacctctgtggggatggtatataagggaggcctgggtccttcggagagacttgcagaaagtctgacttaatcttccctgcaggcccagaatctttccgctcct

SEQ ID NO: 72642 - DNA, 122 bp, Homo sapiens
gcttggaggtggggatgctccggaagtaacttaaccatggggaaataggcacgggtaccccgatgcctggcggggttgtggttctttctttcttttcttttctccttctttctttctttctt

SEQ ID NO: 72643 - DNA, 122 bp, Homo sapiens
ttgccaagggaacggttggcaagcggaagtggggctgcgctggcgcttcctcttccgggtcggcgctcctgcctccctgcagggagctgcttatgggacaccaattcctgcgcggcctctta

SEQ ID NO: 72644 - DNA, 122 bp, Homo sapiens
cccaagcgctgggggcccccgctttggtcgtgggcttcggtgaccacagctagctcctcgcgccggggacacccccacctcggaagagagaacacactgcctagagacccacgggactgggc

SEQ ID NO: 72645 - DNA, 122 bp, Homo sapiens
agggacagaggtggcgctggaagagttcacgggggacagaggtggcgctggcagagttcacgggggacagaggtggcactggcagagttcacgggggacagaggtggcactggcagagctca

SEQ ID NO: 72646 - DNA, 122 bp, Homo sapiens
ggagctccaactgacatgttcattaagggcagggctccgagggcgccacctcgagagcgacggcgggctacccggggcgggctgaggcaggttgtagccccgccccgggccttgggctccac

SEQ ID NO: 72647 - DNA, 122 bp, Homo sapiens
aaggagaggctcgtggattgcaggccgtctacaccaaatgcgctctgcacggccccgtgacggaaacccaggctgctgagtcagacgtgaccggagaagacagccagcgttcagggacccga

SEQ ID NO: 72648 - DNA, 122 bp, Homo sapiens
gggcgtgcagggaaggcggcccgggacgcgggcctgagcttgctgggactgcacagccctcggtagcctctcccgggccctgacccccggcatggtccgtcgccagcttcgtgttggggttc

SEQ ID NO: 72649 - DNA, 122 bp, Homo sapiens
tttcccatttcaaaaaggcagagctaagactctggaatccaaacgcttcccgcgctgccacgccctggcgcccagcgtgacaaagcttcacgcctgaacaaagtgacagatttttggttgcg

SEQ ID NO: 72650 - DNA, 122 bp, Homo sapiens
ggcggcgtgtccggagtttgtcccttctgatgttcagatgtgttcggagtttcttcctcccggtgggttcgtggtctcgctggctcaggagtgaagctgcagatcttcgcggtgagtgttac

SEQ ID NO: 72651 - DNA, 122 bp, Homo sapiens
agctgcggaggacaattcggcagtggcagtggtagttgttctggtttcgggcattgatgacgactgagccatctgggagctcatagggctgaggggagaggacaggacctcagggagggaac

SEQ ID NO: 72652 - DNA, 122 bp, Homo sapiens
ggaagggaggttacctgccttgccaggatccgcggggaggattggggcctccgcggaatgcggtcagaaactcgcagagtggggcctgcagcttgccccccctagagtccgaccctcgacgt

SEQ ID NO: 72653 - DNA, 122 bp, Homo sapiens
aaagtgttgggactacaggagttagccaccgcgtctggccaggaaaactcttagaagttgcgtctgcagccgggcgccggtggctcacgcctgtaatcccagcactttaggaggctgaggcg

SEQ ID NO: 72654 - DNA, 122 bp, Homo sapiens
ctcctatctagggaagctggggagagggaggctggggccagcccacaggggaacttaccgcgcttcacccgggcaggctggagatgggagtcctcagctctcagctctgcatgcagcccgga

SEQ ID NO: 72655 - DNA, 122 bp, Homo sapiens
aagtcagcccagcatggtccagaagctgttgggctgggaagctcccctctagtgacagcacgtgtctatatttggggaaaacagccaactgggaagggatgtttcattagaggttgccagag

SEQ ID NO: 72656 - DNA, 122 bp, Homo sapiens
aataggattctttttatgcattgaaaaatatcctcacaaccctattacaaacagtgtacacgtgtcacaatttttaaaaagtcatgaggaacactaaggatccccctactgtaccataattg

SEQ ID NO: 72657 - DNA, 122 bp, Homo sapiens
caagggagtttgctgaacattcactgaaagactttttattttcagggggctgtggaatttcgaattgcagttttcaggaacagtgagcctgtagctgtcactcacccaccctacctttgcgc

SEQ ID NO: 72658 - DNA, 122 bp, Homo sapiens
cactctcggacctgtcactgagcatccaggacccccacccccggccgtgcaggccgaccccgcccagtcaccactctcaacctgtcactgagcatccaggaccgccttgccatgcaggccgg

SEQ ID NO: 72659 - DNA, 122 bp, Homo sapiens
aaaacttccttcactcaacgcttctttacaaacatcgcgatagcggagcggtctcttgggcgcaccccgccgcatgttcaaccccacccacttcctgtctgacgatctccttacgtcaacgg

SEQ ID NO: 72660 - DNA, 122 bp, Homo sapiens
gtagtcccagctactcaggggactaagggaggatcacttgagcccagaagtggctattcacgggtgtgatcacagaacctgaactagccaccgaataaccactgaactcctgtctccagcct

SEQ ID NO: 72661 - DNA, 122 bp, Homo sapiens
ggcattggttccctttgctccaccccactcacagagacacagggcatccaactgagaaaacgaaactgctctaagcacacggagacgtgatgaagggaggaggtgaactgtttccacattca

SEQ ID NO: 72662 - DNA, 122 bp, Homo sapiens
atctaattaaacaactaataaaaatagttgtttaatccacgttgacatcttcttacattgcgatagaaattttgatatatttatccatatgatgaattgcttaaagccggtggttctcaacc

SEQ ID NO: 72663 - DNA, 122 bp, Homo sapiens
ctcactgatctccagctgcctctggatgcggcctttgcagcgctcgcggtagtcggactgcgtggcgttgtactccgacatgacctccacaaactttctggacagcgtggagtgctgggggc

SEQ ID NO: 72664 - DNA, 122 bp, Homo sapiens
gacccccgagggttggtgtgctcggcacagcttttgggagctagccgagacagtctgctgcgatcctgtgggtctgccctgcctgggccactgtctctgagagactagcactggagcgactg

SEQ ID NO: 72665 - DNA, 122 bp, Homo sapiens
cttgaacctcttaaaaaatatcctcgatcaaagctttggaatccagtaaaaattaggaaacgagtgggcttcagaataccctgagcacaaactagtgcaacaccacatgttcgaacttctgt

SEQ ID NO: 72666 - DNA, 122 bp, Homo sapiens
ttgcctcatctcgttctttattccctgaattccagggaactgcagggattcctcaggggtcgggataaaggagagggagaccaatgctggctcacagcacatgcatacaaaaattcatccgt

SEQ ID NO: 72667 - DNA, 122 bp, Homo sapiens
ttcgccgttgttgctgctcttctttcctcaaaggcgactgaagggcagcaggcccatgctcgcttctgtctgcccgatgagtcacttcaccctaggcctggccctctagagaacactcctct

SEQ ID NO: 72668 - DNA, 122 bp, Homo sapiens
tcgcgggtaccttcttggcagaaaccatctttgcaacatgccatacttcaagcctgttcacgtttccaggctcttcagatgccctgagcagggtgcgaggagagggcagagaggctcccgcg

SEQ ID NO: 72669 - DNA, 122 bp, Homo sapiens
tcacctgtgactcttgcctgatgctcagtgagggcacttgggaagatccagctcacctcacgcgtgcttgtggggttaaaagacaggagcgcgaggaagggaaggggagcgcggggaagggg

SEQ ID NO: 72670 - DNA, 122 bp, Homo sapiens
catcatcggcgtgatcgtgtacatctccgccaacgcgggcgagccgggcccgaagcgggacgaggagaagaaaaaccactactcgtacggctggtccttctacttcggcgggctgtcgttca

SEQ ID NO: 72671 - DNA, 122 bp, Homo sapiens
tccaatcccagatattaggctcccggaattaaaagctgaaataagtaaataaagagagaacgcccagggattttttcagagcagaaagccggtccccagcgtgacgcggaagccaggttgcc

SEQ ID NO: 72672 - DNA, 122 bp, Homo sapiens
cgtgaatgggattaatgcccttataaaagagaccttaaggagctttctcaccccttcctccgtttgaagacatggtgagaaggtatggtctatgaaccagccagcgggccctcaccagaaac

SEQ ID NO: 72673 - DNA, 122 bp, Homo sapiens
ccatcgtgctgctgctggacaacaagtgaggctcctggggctcagcccaccccgcccacccgggccctcagacctgcagccagcagcctccccaactgggcccacccttcgcctttgcagag

SEQ ID NO: 72674 - DNA, 122 bp, Homo sapiens
tatgcgtcccctagagagggcagcatatggagcgctgcagaactctttcagcatggagcacgcttttctcggagcatctggactattattccgtgggaaaaactttggaaattctaacctac

SEQ ID NO: 72675 - DNA, 122 bp, Homo sapiens
gaggccaactgagtggaccccagtgggggccaccaaaggacaatggctggtggttctgggcgccccgagccgcccgcgctggggtcgggggcgccaaccctggacctggccaaaagtgctgc

SEQ ID NO: 72676 - DNA, 122 bp, Homo sapiens
gagcccctgaggaggaggcagaaggggaaagtggaggagctggggccaccctcagcagtgcgcaatcagcccgagccccaggagcagagggagcgggctcatctgcagagggcactgcaggt

SEQ ID NO: 72677 - DNA, 122 bp, Homo sapiens
agaaacagaaagagctcatgagcaggaaaaaagaattaagtccatttccagcacagggtacgttgtcaatgtcagtaatttgtatccctgacatgttgattaatccttttctagatctggtg

SEQ ID NO: 72678 - DNA, 122 bp, Homo sapiens
ttttccctcccgccccggcatctgttctcgcccgaagaagctggtccttagcctgcgctgcggagcaacctttcagtggccacctggagcctgggcaccgttcttcaaataatggcttttaa

SEQ ID NO: 72679 - DNA, 122 bp, Homo sapiens
gccacccttgatggctcactgggatgtagctgggcagccactcggcgatgctgagctgagcgatctctgaggcgatcttcttcctgtgcccaggcttggtcaccccgatggccgtcaggtcc

SEQ ID NO: 72680 - DNA, 122 bp, Homo sapiens
gtaggctttattgagcagagtgaaagtacaaagcttccacagcgtggaaggggtccctcccgaatgggtagccagagttagattatacaactgccttttaaactctttaaggtgggaaatac

SEQ ID NO: 72681 - DNA, 122 bp, Homo sapiens
cgaagagccgatcaggagcggaagaggcggccgcgcgggcgagctcggggcgcgttccggcggagccagcctggatccgggttttcactcgtgccctgttcacaagctcttgggacccgggt

SEQ ID NO: 72682 - DNA, 122 bp, Homo sapiens
atcctgcccccaaaatattgtttcatgtgtatagaataagtgtgtcatgcaaagtttggtcggagttcctaaaagaacaaggagttggatcttcacgaaagttacaaaacagtttgtataac

SEQ ID NO: 72683 - DNA, 122 bp, Homo sapiens
tggacatgagcagactctggccccatgtttaagatcccagtgccattgggcgttggctcacgcctgtaatctcagtgctttgggaggccaaggcagaaggatcacttgagtccacgagttgg

SEQ ID NO: 72684 - DNA, 122 bp, Homo sapiens
ccggtaccaggcgaggccgcgctcgtagcacctgtcgaagaagtggggctcagagcccagcgcgcggacgtcggggtgcagccgcagaaactccagcagggcgcgcgtgccgcccttcttca

SEQ ID NO: 72685 - DNA, 122 bp, Homo sapiens
gatgtccctggggcggatgtcagggttcacctggggctgctttgcccctgcgtgcagcaccgcccagtagggctgcttacctgtcccacccgtgcgcgcccgcgggttctaaactcatttta

SEQ ID NO: 72686 - DNA, 122 bp, Homo sapiens
gactttgcaaatctttctggccggtgaaaagtttaaacaccgtcatgctgttaagtgatccgagagcagcatctttccaccgccctggagtggttctggcagggcaccctgcactgggggtg

SEQ ID NO: 72687 - DNA, 122 bp, Homo sapiens
cccccttgggcccttgagcgtcttagaagccgcagatgccaaggaggggacgctgcctcgcggatggtcacttgggagcaaagctggggactaaaggaaccagggacagagattcctgctct

SEQ ID NO: 72688 - DNA, 122 bp, Homo sapiens
gccattggtggtacatttattttagccacggataattgaaccagcggtttacaattgacacgtgctccgtgctggtgattttatgtggcagccctctgctgcagttccgaaacttgttggca

SEQ ID NO: 72689 - DNA, 122 bp, Homo sapiens
atcctcacacacgtgtacacacatatacacatctgcacacgtgtgtacatgcatatcacacgtacgtgtgtgtgcacatacatgtacacatgtacatacacatcctgccctaccccgccaac

SEQ ID NO: 72690 - DNA, 122 bp, Homo sapiens
agcagaactgggatcacctgcagttgcccagccagcaagcaagagacacattcgaactctcgcttcctactgtttgtttgtttgtatttgttgttactgtttgggtacaagtcacagcctcc

SEQ ID NO: 72691 - DNA, 122 bp, Homo sapiens
cctctataggtaagaaggcccaaggaagaagccctctgctccgtcacctcctcgccatgccgtccccactgccagtgggcgcaacgttacttgcaaggccacaaacacccggaacaatccgc

SEQ ID NO: 72692 - DNA, 122 bp, Homo sapiens
cccatttaagaggcgtgattatgtagtccaaggtcatgtagccagcaagaagtcaggccgcgttagaaccatgtccgaagggctccaaacccttgttctacatccatagtctacagcgacta

SEQ ID NO: 72693 - DNA, 122 bp, Homo sapiens
ctgcccgccccagccctgaccccgaccccaaagagcatcaccccctcaaggctcgccacccgcctccttaccatggccccaccacctgctgccggaagtaaatcccaccggcccccggaacc

SEQ ID NO: 72694 - DNA, 122 bp, Homo sapiens
ccgtctgcaggagttcctgacggcctacgcgcccggcgcccggctggcgctggctgatggcgtcttgggcttcatccaccaccagatcgtcgagctggcccgagactgcttggccaagtctg

SEQ ID NO: 72695 - DNA, 122 bp, Homo sapiens
acggataagatgtccaggctcctcccctttttcacgggttcatggtgaagctgacaatgccgtctgtttctcagaacatgtggagcaccgacagaaacccacacacctgcagggaactcact

SEQ ID NO: 72696 - DNA, 122 bp, Homo sapiens
gaaataagcaaactcccatcacccccacccccattccccgccctaacacggagtaaacttcggcctttttccgcttggatgctcattaagagttagttgactttgtagcggatgcaataaaa

SEQ ID NO: 72697 - DNA, 122 bp, Homo sapiens
cccagcccggcagcctctgaaggcctctgggaggctggtctgtggtgtgggccacagactcggctccgataagagcagtgagagagcagcacgttggatgacgagcgcagattcaaggaatg

SEQ ID NO: 72698 - DNA, 122 bp, Homo sapiens
tcctgcagctcctgctgggagtgttggggcacacgcggtctcggtacccgtgggggagctcggcgggcacgggggcgtgagccgaggcttctgtcagcaaggctgctctaggcagcagggcc

SEQ ID NO: 72699 - DNA, 122 bp, Homo sapiens
gtgcctcaatagtaccccgtgtccactcctccaatgatgaacggtgtctcaatggtaccccgtgtccactcccgcaatgatgaatagtgcttcagtagtaccccgtgttcactcctccaatg

SEQ ID NO: 72700 - DNA, 122 bp, Homo sapiens
gccccagtctccctctgccgggcttggagcagggctagactaggggtggagcgggaccaccgctcccctccccctctccccctggcgcggagccccggcgcagctgggagtcttggaaacct

SEQ ID NO: 72701 - DNA, 122 bp, Homo sapiens
gttgggtcactacttgaacataaaagtttaccttaagatactgcagtgtggggccaggcacgcttgctcactcctgtaatcccaacactttgggaggctgaggtggttggatcacctgaggt

SEQ ID NO: 72702 - DNA, 122 bp, Homo sapiens
ggcggagggggcctataaagccctgtgccaaggggcagactcactggctcagagggaggacgcacccgccagccagccgggaaccttccctcgcgggctcccagggcgggtctcttcctctc

SEQ ID NO: 72703 - DNA, 122 bp, Homo sapiens
atctgctgtttaaactcataacagagaaagtagcttgtttctggctataggaggaaaagacgatattccttagtaaaaatggaaatccacatatggggttcttgtaaaaatgaagatagaaa

SEQ ID NO: 72704 - DNA, 122 bp, Homo sapiens
cgcagccgctggcctgggtgctaagcccctcattgcccgcggcggcagggctggcagggccggctgcgctgccggctgttccgagtgtggagcccaccaagcccatgcctacctggaactcc

SEQ ID NO: 72705 - DNA, 122 bp, Homo sapiens
gggctcaagcaatcctcccgcctcagcctcctaaagtgctgggattgcaagtatgaaccacggtactgggccctactgggggttcttaaggagaatgttttaattgcaatgtaaatgtttgt

SEQ ID NO: 72706 - DNA, 122 bp, Homo sapiens
ctgggctcaagcgatcctcacacctcagcctcctgaatagctgggactacaggtgtgtgccgccacacctggctatttttgtattttttgtggagatgaggttttcaccatgttgcccaggg

SEQ ID NO: 72707 - DNA, 122 bp, Homo sapiens
tggcctcccagagaggatgcgggggaagccgcacaggggcccactgggactgggtaagggcgcgggatgggatcggctctggatatgggtgccccccgagccgcgccccaccccgcgagcgc

SEQ ID NO: 72708 - DNA, 122 bp, Homo sapiens
gcgaggatgtgacttgagaacactttgcgtcagcatcataaaacatgaggattgatgacccgtgtgagtggggcgagtgccaggggaacacaggctctgagttggccggccgtgcttcctgc

SEQ ID NO: 72709 - DNA, 122 bp, Homo sapiens
taagagcgaggttttcaaactactattcccaggaagacgggggtttcccaggtgactttgcgaaggcatggcggggacactgtgaatgtcagcccagaaggtgatcagagcctgttaattaa

SEQ ID NO: 72710 - DNA, 122 bp, Homo sapiens
aaggatttgcaatagacttcctcagttcatttcttcttattccctcctcccttaaagggccgtttccacaatagtgaaaggaacgcaccagtaaaccacaataatcataaaagatgactgta

SEQ ID NO: 72711 - DNA, 122 bp, Homo sapiens
aaaccttaactgttttgggactgactttcaaaagagcgtccccctggctcaagaggccggcgttcgcggagatgtcgtcttaaagggctgtcccccaagcgtgtaggccgcgcacgggtctc

SEQ ID NO: 72712 - DNA, 122 bp, Homo sapiens
ccctggcgtcatctctgactctcccaggggcgacttcttggcagagcggagctcggggcccggatctccacaggggctctcagtgaccccttctggactcagtccgggaatgagtttgtggg

SEQ ID NO: 72713 - DNA, 122 bp, Homo sapiens
agcccccagtgcgggggtccttgtacatgaacaggaagtgctcgcccagccccaggaggtcgcccgggtgcagctcagcctcccgcagcaggaggcacccgttgtgcgtgactggggcgccc

SEQ ID NO: 72714 - DNA, 122 bp, Homo sapiens
cgcggaaaaggaggtagtcccaacccccagagtagggagcggcggcactaggggatgttgcgcatgcgccatacgcctgcgcagaatcgagtgagtgggagactagtcaaaaaggctgacgt

SEQ ID NO: 72715 - DNA, 122 bp, Homo sapiens
aaatgggagtgaaagcgagccgcctgtgaatgtgcacgcttttgtttgggttcaagagaccgtgttgcgatcccgttcttctttccccctcatttcttgtttgtctcccttctgctgtggca

SEQ ID NO: 72716 - DNA, 122 bp, Homo sapiens
cagcctgcacgtactcggattgtgcagcgactccccgtggcggttgaggggcagtggtggcggcggaagcccaagtcgatgctgatgttgatgctggtggcggctgtgaccatgtggctccg

SEQ ID NO: 72717 - DNA, 122 bp, Homo sapiens
cagtcggcaatgcctactacagtagctcgctggctgccaggtgcaggggctgttcaaaagcgacatcagggtcctaaaaggtgggaaaaagcagcagaacttgcatggtagttgattctttc

SEQ ID NO: 72718 - DNA, 122 bp, Homo sapiens
cctagttcatcagccgtccagtaaagcaacccaggaaactgactgggtctctttgcctaccgtattaacattaaacattgatgttctgtattctgtactttactgcacccagcagactttca

SEQ ID NO: 72719 - DNA, 122 bp, Homo sapiens
cacaaagacatgacaaaatctggcttttgttttaaaaggagcatcctcatttgttattgacggaagactaaaggcattctccatccagaaaagactgctaagaactgtgaagcatataaaag

SEQ ID NO: 72720 - DNA, 122 bp, Homo sapiens
gggctcgccccggctgctccacgcccaggccggtccctggcatttcagccagtgggagggcgtccccgccgcccccgtgcctctccgcaggggctgcgccgcgtccccgggcctctccctcc

SEQ ID NO: 72721 - DNA, 122 bp, Homo sapiens
cccgccccttcccgcccttgctgatttaagtccccgaagttctagactggagcccgggagcgcgctccccacgcctccgaagtagtgggggtttacagcccgtccgggtggtgaggcaatag

SEQ ID NO: 72722 - DNA, 122 bp, Homo sapiens
cgaaaactttgtacccgggtgatacgccggcgtctgctgcccaggccaccagttctggggcgccttccgcccaggggtgcacaacggtatctccgccagctgccctccaagccaagaaaagc

SEQ ID NO: 72723 - DNA, 122 bp, Homo sapiens
ctaccaaagtgctgggattacaggcgtgagccaccgcgcccggccggtttctgctttgatcggaattaagtgggcagaaaagtctaggcgggctaagtcttgcctatgcatctgcgcccagc

SEQ ID NO: 72724 - DNA, 122 bp, Homo sapiens
ctggccccactgcccggctggcccatctgattagggccctgtctagcctgcgccttgtggcgaaaagtcacagctgtggggtttgctcaagctcaatacaactctgttattagccagctgta

SEQ ID NO: 72725 - DNA, 122 bp, Homo sapiens
actgggttctctatagtctcctagtatgctaatagcttgttagctatccccacgttttttcggttttggttttggttttttgttgttgtcgtttttgtttttgttttgtttgtttgtttgtt

SEQ ID NO: 72726 - DNA, 122 bp, Homo sapiens
atagtatgtggcaaggatttgaacccagatagcttttactctcaaccattaccctatagccgcctcacagccatgtttccttggctcttaaaccttgcagctgattctcattcatttttagg

SEQ ID NO: 72727 - DNA, 122 bp, Homo sapiens
aggactaaagttatagtcagggcagctagggtggggactcttgttgcccccggcaaggcacgcatttcttgtcatctgctcggaagaagctgcaaggggagagtccagtgagaaaaaggtta

SEQ ID NO: 72728 - DNA, 122 bp, Homo sapiens
cctgctgtgtctagggctgaccttcagttgcaggataatgaataaggcctgctgggtgaacgctggaagaattagggcagcaggggttacttggggatcaaggaaatagttatttactaacc

SEQ ID NO: 72729 - DNA, 122 bp, Homo sapiens
cagcgggctccggcctggccaggattctgggggagccgcccggagcgcggtgaatcggggcggggagaggggcggggaaggcgcgcgaaagccccagcagagaccggcagcggcgggcggcc

SEQ ID NO: 72730 - DNA, 122 bp, Homo sapiens
aaagatcccatagaaatgtttcattctggacagctggtaaaagtctgtgccccaatggttcgatattcaaagtaagtgttgcaaaatgattaatgaactaagatgaaatttcccttttatgc

SEQ ID NO: 72731 - DNA, 122 bp, Homo sapiens
acgcgcttacatcccgcagaaggcggtaaggacacagcgcacaactctgcattatacctgcgagttaaaaagccaagggttcgctcactcaaccttgaatgcgcgtcagaatcacctggggg

SEQ ID NO: 72732 - DNA, 122 bp, Homo sapiens
ggctcaagcaatcctcctgccttgacctcccaaattgctggaattacagacgcgagccaccgtgcccagcaaagttgactattttaatggctttttaattaagggaatgtggggtaaactcc

SEQ ID NO: 72733 - DNA, 122 bp, Homo sapiens
actattttgctggggagaggggtgtgggggcgggatggcgggtcctgggcgtctcggctccgccattgtcattaattataaaattgggaggactgtaattttccacttaggcttgtcaccaa

SEQ ID NO: 72734 - DNA, 122 bp, Homo sapiens
ccaactggatgctgtcttgcagtgtctgctggagaagagtcacatggacaggtaggccagcgtggggtcacagggccgggcaccctggtgggttgggccctctgatcctgggtggattgggt

SEQ ID NO: 72735 - DNA, 122 bp, Homo sapiens
ccgaggaccgtgccggttcatcatcagttcctggagtcctcactgcacagcaggtacaagcggaggctgagagccgcagtcccaatacagatccgcctgatctcaaagcctgcgctctttat

SEQ ID NO: 72736 - DNA, 122 bp, Homo sapiens
gtgaccagctcctggctggactcctggtctggactcagcatcagggaggctctggcctctcgccctcagggctgggggcttcttcacatggtcatcaaagacttggccagttccgcctctcc

SEQ ID NO: 72737 - DNA, 122 bp, Homo sapiens
gagtctcctcctcggcgctccaaccacgtgctgtttattactctgtggggattcccataccgaggcctcttcagttcctggaacagtagcactaaaaggctcctgagtgcctctgttaattt

SEQ ID NO: 72738 - DNA, 122 bp, Homo sapiens
cagtttccaaataccgtgcccgagaattcagaattgcattttttttaggtctttagatcacgagagtgatttgtagctgcaattgcacaagagaacgattccattcacatgaaacccgcgcg

SEQ ID NO: 72739 - DNA, 122 bp, Homo sapiens
ggggagtggggagtcctcagagcaggggaccctgccccaggggtgggtctaggtctgtgccgaccaatcagagcaggcatacgccatcgtgcacagtgattggctcacaggtggccacgtga

SEQ ID NO: 72740 - DNA, 122 bp, Homo sapiens
aaaaaaagtttaataaaaagtaaataaaataaaaggcggcgaataaagagaaaaaccagccgggcatgtcgtcacatgcctgtggtcccagctactcgggcaactgaggcgggaggatcacc

SEQ ID NO: 72741 - DNA, 122 bp, Homo sapiens
gtccccgagcctcggagcgccgcgccgcagtgcatcaaggagcatgcgcctaacactatgcgccatcccattttagggcagagtgaagccacaacgttagtgcgtcagttattggcaaaaaa

SEQ ID NO: 72742 - DNA, 122 bp, Homo sapiens
acatgcaaccaacatgctttagaagcacatgcatctgaaggtaactgccactgaaaaaaacgaatatgtttctgaaacatacttaagaaacaggctaaatatagtaacttagatacattaac

SEQ ID NO: 72743 - DNA, 122 bp, Homo sapiens
gcccggctcacgggtgtgcgtgggtgcatgcatgtgtgcgtgtgggtgcatgcatgcgtgcgtgcattcaaaggccttgatacacatttgcaaagcaccacgattcctctcttaccacccag

SEQ ID NO: 72744 - DNA, 122 bp, Homo sapiens
ctcttgggctccaaagatcaactcagcttcacctaagaggttatgtactgaccttcctaacgatcaaaggcttcagagacactgaattgatgcgtctaaaaaaaatagatacaacgggccgg

SEQ ID NO: 72745 - DNA, 122 bp, Homo sapiens
ctgacataaggatgaggcctggaattgcattcactgcagagtcccaccgggaggaccgaccgttatccccgccgactccccccaggtcgccctggcagtttcggccgctcagttgcaggccc

SEQ ID NO: 72746 - DNA, 122 bp, Homo sapiens
gcccacggctcaccccagcaattgtcagtgctggaaaaatcaccaccgttggtgtattcccggccactctgctggacggatggcaggattcccaagtagtgaaggggaaggcggccctcctg

SEQ ID NO: 72747 - DNA, 122 bp, Homo sapiens
aggcagaccagcaccaccggtctcacctctgccagctaaaacttgcaccggatgcagatacgagttcgccatcatcgaacctagcagacccaggacgcagactgggtgttcacagaaagttg

SEQ ID NO: 72748 - DNA, 122 bp, Homo sapiens
catggcgtcaggcgccgcggccccggggaggtggctcccactttaagaagtgaagttttgcgcccctccccctccctgcccacctcctgcagcctcctgcgccccgccgagctggcggatgg

SEQ ID NO: 72749 - DNA, 122 bp, Homo sapiens
atcctctgggtaagctctggctgccttcatgcgggtggggacatgctgggggatgggaggcggcattaccggacgagcacccgcttcagcagctgctggtccccctccgagtagccaggcca

SEQ ID NO: 72750 - DNA, 122 bp, Homo sapiens
cggtcggcctgcagacagcgtgtgcttggggctcccgtgccgtgcagcaaaagccggatccgggagctcagtgctgaggccggcagtggccacagtcacccagcactgtctgcggggggcgt

SEQ ID NO: 72751 - DNA, 122 bp, Homo sapiens
cccacagccccgcctcccagcccaactggccggttcgccctccccggccgttcatcccggcgccccaggccgccctccatccaggcccggccctttggtcccggccgccttcaggcctgggg

SEQ ID NO: 72752 - DNA, 122 bp, Homo sapiens
aggcggccaggaaaatcagaaccatcggcctcccctgcggcagcatctaaggatgaaacacgcccgacggcttctgctgccttctgcctgatcttcctccctattacccgtatcatgcaaat

SEQ ID NO: 72753 - DNA, 122 bp, Homo sapiens
gaataaagctaagattccacttggaaaagggggctgccaaggatgaggtgggaagtgggtcgcagttggttaatataataccgcgctgctgagagctctgcaggggtcctttcaaggttctg

SEQ ID NO: 72754 - DNA, 122 bp, Homo sapiens
accaaggccacaccccaaggtgtcccagaaactggggaggcagtgctccatccaataaagcgggcaggaaggtggccccaggtcctaggtgctcctggatcgtgtagtctttaactgctgcc

SEQ ID NO: 72755 - DNA, 122 bp, Homo sapiens
gggggcgcgtgaggccaccacccagagcctcttcctagaggagccggaagcatcgggagccgcggtacccgcccatcttccggccaggatgtgtggtcctggtgagcgattgtcctgtggcg

SEQ ID NO: 72756 - DNA, 122 bp, Homo sapiens
cttaggtgatctgcccaccttggcctcccaaagtgctgggaatacaggcatgagccactgcgcctggccggctgactacagattttttaagtgaccatttaaaaagtgaaattttcatcttg

SEQ ID NO: 72757 - DNA, 122 bp, Homo sapiens
ggaaccagtgctctcctcctgcgtggccagtgacaagtagccctgtcagccggagctcgccgtgcgaggaagttcctattagctttatggtcaggagaacttgtcctgttcaggaaatgaat

SEQ ID NO: 72758 - DNA, 122 bp, Homo sapiens
atctcacatagcttcctctctccacccgaaagaagtactgtgactcatcctgcatctgcgcgtctctgatcaccaaggagcagttccccttggcgggatccccagtgagctggaatcggccc

SEQ ID NO: 72759 - DNA, 122 bp, Homo sapiens
cgttttagaatgaaacagacccaaggagccaccagggcgcgtgtggggcgggagtgggggcgggtaaagaggcggattcccaacagcctaattgagaaccgactcctgggaaggctaagcag

SEQ ID NO: 72760 - DNA, 122 bp, Homo sapiens
cctgacccagcagatgagcctggccatgcaggctctgcctcttgtgggagttgccaagaccgaggcctggccaggtacagtgacagtgagtggttcacgcctataattccagcactttggga

SEQ ID NO: 72761 - DNA, 122 bp, Homo sapiens
gcccaggtacacaataaataggagactgctgagctctgtggagaaggctgggaaaggttccgcgaagtcacaattctcaggccctactctccagaaaatgctttagaaagggtcctctgagt

SEQ ID NO: 72762 - DNA, 122 bp, Homo sapiens
ggctgacataagagcttgatacatatcagccagtccatgctgccactgatgtcagatgcacgattatttcctgaagcattgagaaagaaacgttgtttaaatattgcgaatgaagccataac

SEQ ID NO: 72763 - DNA, 122 bp, Homo sapiens
cagaatttggggccactggggctacacttaggtgggttcgggtacaggcgcaagtgcaggcgtcgcaagcccaggtcggagcaaggctggcggcggctccccgtagagccctgggtgcagat

SEQ ID NO: 72764 - DNA, 122 bp, Homo sapiens
ttcctgcagaacgtctccatgcagaagctgtgtgtctacctgagcagcagcgaggtgcagcgggagtgtgagcacgacctcctgcaggccgccctgcagtggctgacgcagcagcccgagcg

SEQ ID NO: 72765 - DNA, 122 bp, Homo sapiens
agtgttgtttgcatttcacagagcaggaagcttaggcacagacagcggctccccgaccctcgctcggcctctgctgagcagggaacggcctgaacgcgtccggccaagcgccgcctccggcc

SEQ ID NO: 72766 - DNA, 122 bp, Homo sapiens
tgtctgcccctgcccagggaggggacaaaagccaccctggagaccccagatgctgggctccgaattagaagccactccactcctggactcttagctttgctgacctcagagcctaggcctga

SEQ ID NO: 72767 - DNA, 122 bp, Homo sapiens
taaaaggtgttagagatgatttttagttcaaggctgcttgtgtcagaaaggaaaaactgacggatagctttcagaatttagcttttatgagaggccttaagtctatcccaggctaaagcttc

SEQ ID NO: 72768 - DNA, 122 bp, Homo sapiens
gagaggccgaggacaaagcgcgggcagtcccgggagtcccagtccctgggaatgtgctcacggcgccgcgggaggtccccgagccgggtccctgggagggacacaccccctcccactccaga

SEQ ID NO: 72769 - DNA, 122 bp, Homo sapiens
tgtcacattttcttctcaccttgtcaccacccacacagactcagcctcctggatgcatcacgcttgggttgcttcacttcctggctcctggtaagccacaattgcaagagctattgctggta

SEQ ID NO: 72770 - DNA, 122 bp, Homo sapiens
aggcctcctgggaaaggtgtgagagggatggaggcacccccaggctccttgtcacacaagcgagcagcccacccgacccagtattgcgggccagcaggccctcagtaggtcctggtgtcaag

SEQ ID NO: 72771 - DNA, 122 bp, Homo sapiens
ggctgagaagatggagctcttcgtgagtttctgcgaggacaccatcttcgagatgcagatcgccgcgcagatctcggagcccgagggcgagccggagaccgacgaggacgagggcgcgggcg

SEQ ID NO: 72772 - DNA, 122 bp, Homo sapiens
gaagcacagcccagccgggtgcccctgccatcacagctgctctttccttatagcagcgggcgtgttctcatgtgccccggggtccctcacccactcatttactggcagccttccccagtggg

SEQ ID NO: 72773 - DNA, 122 bp, Homo sapiens
gaagctgcagaccttcgtggtgagtgttacagctcttaaggcggcgcgtctggagttgctcgttcctcctggtgggctcctggtctccctagcttcaggagtgaagctgcagaccttcgggg

SEQ ID NO: 72774 - DNA, 122 bp, Homo sapiens
ccaggaagccatcagacccagctcccaaagtgatggacttcaaggaaaaacccagctctccggccaaaggttcggaaggtcctgggaaaaactgcgtgccagtcatccagcggactttcgct

SEQ ID NO: 72775 - DNA, 122 bp, Homo sapiens
ccaactgcactatcttctaggcagtgagaccagcatcttcacattttacaatagaagggacggcagctaatttcaatgcatcatgtaactcccaagaggtgtcactttacctggatgcttaa

SEQ ID NO: 72776 - DNA, 122 bp, Homo sapiens
tttttctgtcggcccaacgcggcggggaggcgcggtctcctccgctcctcgccgatccctcgcgggccacctccagtcgcaccagctctgggtcgcccaaccagtcccctcccccaacacta

SEQ ID NO: 72777 - DNA, 122 bp, Homo sapiens
gggccccacacagagtgacgcctctgggtcccgcggtggatggaaagggcggactgcggccgcgctgggcacaggtgggagatggatggggctgcacggtgggcacggagcgcctctgccgg

SEQ ID NO: 72778 - DNA, 122 bp, Homo sapiens
tgttgttattttactgccctgggaatgctatcatcttatttggaagatattaccttatatcggcacaactgtaggatcaatggaagagtacaacacatcctctacagacttcactttcatgg

SEQ ID NO: 72779 - DNA, 122 bp, Homo sapiens
gagctggacatgacctcgagcgagatgatgcacttggggctctggcggcacagcagatcacggtcaatcttctgcttggtgaccagcaggccagagctgggattgatgtccactaggtgtgg

SEQ ID NO: 72780 - DNA, 122 bp, Homo sapiens
tgggaggcagaacagagtccagagtttatggtttgcagcatgagccaggccaccaattggcgggagaaaggaatcaaatgctggagaatgggaactgtcttaataagaaactgggggctggg

SEQ ID NO: 72781 - DNA, 122 bp, Homo sapiens
gagtcagccaagcaggaagcagctgcaccagggggcagctgcttgacccgtggggcccggcggactcatgagttagtgacccctggcacagagaaagcatcagagacaagcaccccgggcac

SEQ ID NO: 72782 - DNA, 122 bp, Homo sapiens
cccctccgcagtggggacggagggccttggggggcgccgagcggtggggacagagggcgccgggggcaccgcgcggtggggacggagggcgctggggggcgccgcgtctcgggggtcggagt

SEQ ID NO: 72783 - DNA, 122 bp, Homo sapiens
agtgacataattttttttttttttgaggtggaatctcactccgtcgcccaagctggagtgcgatgacgcgatatcggctcaccgcaacctcgcctcccgagttcaagcgattctcctgtctc

SEQ ID NO: 72784 - DNA, 122 bp, Homo sapiens
aaacatttgtgttaggaaataacacattaaaagtgcacatttccttcagaccctgagaagcgggcgagtcccgtgcgctccgcaccgccagccccggccccgcgctcgcccagagggccgcc

SEQ ID NO: 72785 - DNA, 122 bp, Homo sapiens
tcccgctgggtgcggaaccgggtgcaagaggccgaagcgctgccccataaagccgatcttcgccggggccccgcccaggccctaacgaatacatcccattggcaggaaccggcagcaggtcc

SEQ ID NO: 72786 - DNA, 122 bp, Homo sapiens
atctaggtcccatccgcctcctccacgccatctccagttccttcccttgcatcttgtgctcgaggtccaagggcggagtagcgaagcccttcctgacacccgactcctcccccaggagcagc

SEQ ID NO: 72787 - DNA, 122 bp, Homo sapiens
atgcctttctgcccatggatgccatggaagaagcatcattaaagtctctcttctcctggccgtcttatctaagtcagagtctcctaaagagccagaacaactgaggaagctcttcattggag

SEQ ID NO: 72788 - DNA, 122 bp, Homo sapiens
gccctgcccttcgcgtccgcacagcaaggtcagacgccggtcatcgcagcaccagcacgacgccaggcactggcctccggagccgttccacccagcaaagatcagcccttctcagccgccgc

SEQ ID NO: 72789 - DNA, 122 bp, Homo sapiens
tcagatcacgttcttccttgtcaggaaacaaatgcagacatcagtaacacactgggtgcccgagagggaggtgaaagtaagtgaagaaagagggatgaaacactgcaggagcgggagcaggg

SEQ ID NO: 72790 - DNA, 122 bp, Homo sapiens
aacaaaacaaaatctggtttctagagtttatagaatcatacaacagcatgtttcatggagcgttccatctcacaaggtggtgtttggtttagagagggttatgtatgccctctgatattctc

SEQ ID NO: 72791 - DNA, 122 bp, Homo sapiens
gctgggccttatgaataagtaggcatttacgtggttggcctgggtcagaggggggcatcccgggcaaaggaaacaacatgagcaacacttgctgaagccaagctgtggagggccccatcagc

SEQ ID NO: 72792 - DNA, 122 bp, Homo sapiens
agaaaaaaaagaagaccttacagcgcgaagaagcgggctttagttaatcgatttcaaacacgcctgtggtgcggctcagtgaccccctccgctcggctgagtccgcttggacttccgctccg

SEQ ID NO: 72793 - DNA, 122 bp, Homo sapiens
cccgcgcggcccctcactccaggacccccgcccttcacccccgggacccccacgcggcctcgcccctgggacctctgcccctcaacgggaccccggttcctctaccctggaacccgcccctc

SEQ ID NO: 72794 - DNA, 122 bp, Homo sapiens
ctcgcaccctgcagcatcctcagtctgaactgtcttcccagtgttgtatgaaaggaaacacgggggtactaaggaactgggtactgacttgggaggggcccaggaatgaaagccagtgtgga

SEQ ID NO: 72795 - DNA, 122 bp, Homo sapiens
ataacaatacttcctaggaaatgggttcctactctaatactatgatgagaattttgtaaacgccaagctagtacaatgaattgccctgagttataataaatatctgcactttgggagtaagg

SEQ ID NO: 72796 - DNA, 122 bp, Homo sapiens
tgcctctcctcagctcccagaagatggtgtatccagggctgcaggaaccctggctgcactcgatgtaccacggggctgcgttccagctcacccagggagaccagctatccacccacacagat

SEQ ID NO: 72797 - DNA, 122 bp, Homo sapiens
aatcatcatgtctgctgtgcagggaacaggctgtaggggcaggtgggggagcagtgaggccgtttggagggaaggacaaatcccagatgacaggatagtagcttgcccagggtggaggcagt

SEQ ID NO: 72798 - DNA, 122 bp, Homo sapiens
ccgatccaggcctgcgggccaggaatgtgctaacggggcaacttgggccttgctggtccacgcaggcacctgtggactttgagaggggactgggtggggaggggcggggaggggcggggcgg

SEQ ID NO: 72799 - DNA, 122 bp, Homo sapiens
cttctgcaatctgaaggcttgcttcttacaaataaagggccagagtctcacacttgccttcgttggagggacttagaagatcctccccacgtccacaccttgtaggaaatgcaaaacagatc

SEQ ID NO: 72800 - DNA, 122 bp, Homo sapiens
tggggcccccctctggcgctatacctccgtgccaactcggggtaggagagcggggcggagcgcagcctgggtcactctggttcagagaagcggacgaggtgggtgagagttaccctctgagc

SEQ ID NO: 72801 - DNA, 122 bp, Homo sapiens
aagtctttctgtcttttcatgctccttgaagtcctttcacagtttttcctggctcttctacgcctcctctcggccacgccctttagcacccaacccctcaacaggtaatgatcctctcttca

SEQ ID NO: 72802 - DNA, 122 bp, Homo sapiens
ctgttgcaaagtgtcatttgctcacctgctacctttgtcagcaggtctaatctggttctacgttttctgtctccagagtactccctcttatcagattttcactttccttttgtcatagtttc

SEQ ID NO: 72803 - DNA, 122 bp, Homo sapiens
tcataaaactaccctcctaatttcttgtaaccacgccctctctctaccccttgaagcctacgggtgtaatggctcccagacatcatcagtgctgggacactgcactgtcctttggtggtttc

SEQ ID NO: 72804 - DNA, 122 bp, Homo sapiens
aatgcaaatgctgggaaacatcctcaatcatttctggaatggaaatctttccctaatgagcgatgacgatggcagagagctgattgcactgaagaaaaactgcttaaaattcataatcaatc

SEQ ID NO: 72805 - DNA, 122 bp, Homo sapiens
cgcgacaacggacaaagaataagtgcttgtgaactgagctttcttaacttctcgatggaccgttaggccagcctcaccgggacaaatcacagggcccctccccacccctgccgacaccttgt

SEQ ID NO: 72806 - DNA, 122 bp, Homo sapiens
tgtcttggagatgcgaagtgcgtcctcgtaaaggtcagctgtcagttttgctggccgctccggcgctggctctcctgtccgggaccacaacgagaaacagcgacagattcgacgcagagctc

SEQ ID NO: 72807 - DNA, 122 bp, Homo sapiens
cggggtaccgggaggtgctgcccggccatggttgctcacgcctgccctcttccaggtcttcggaacttcggctctaaagcgttcctcagcgccatccgcccggaaacacgagcgacagagaa

SEQ ID NO: 72808 - DNA, 122 bp, Homo sapiens
cacagctcctgatgtggataggattgagttggttttaaaatatcaatattggtacagtgtcggaggtctgcaagttagtaagagaagtgacaaagcagcataataaaaagaacacacataac

SEQ ID NO: 72809 - DNA, 122 bp, Homo sapiens
ttccctgagagggggtttatgtggagcgtggtacgggaggcacacgtgctgctggcttgtcggcacacaggtgggcgggtggatgtgagtgggcgcggcttggcagtagctcccattttaca

SEQ ID NO: 72810 - DNA, 122 bp, Homo sapiens
aaccagcaaacacattcaatagaaaatgtgctcataaaattgtctctctctgtagaatcacgggatggctcgttacattcctaaaaccatttcataacccattgattcaacaccacaagctt

SEQ ID NO: 72811 - DNA, 122 bp, Homo sapiens
ccctcactccataataatttcaagagacatcaaactctccaaaatttgcacttgataaaccggtaaagagtgaagttctacaactttaaatcatcctgctaaattaaaggcaaagaaaataa

SEQ ID NO: 72812 - DNA, 122 bp, Homo sapiens
ttgtacaggagcttgctgttggcacctggctccccgctggcactggtgtctggcccagctcgccccttcaccagggactcccgggaggccgaggggctgcccaggctccctgaatccccgtc

SEQ ID NO: 72813 - DNA, 122 bp, Homo sapiens
tgatgatccttttatttttcctgtcctacatttaaaagagaaggaaagaagcggggaagtcggttccaactactcctcgcagccagtcctcgagcgccctctgccgtgtacatgggagctct

SEQ ID NO: 72814 - DNA, 122 bp, Homo sapiens
gagtgtagagagggcgggggcccagcccacagcatccatgccctggggattgggtgccaccggtcaagggctccacggggctggctctgggggagggagagcgggcgccatgttgtgtgtgt

SEQ ID NO: 72815 - DNA, 122 bp, Homo sapiens
tgggggcaggactccggggcagggtgagtccctgcgtgacctgattctctgtgggcaggccgggcagggtggctgcagggcggcggagcctgtgctgctggcctgcatttctctggctggac

SEQ ID NO: 72816 - DNA, 122 bp, Homo sapiens
gtgagtggccagcttcttcacacactatgcaaatgacacacccagtcttaatcagttcttcgcatgctatgcaaattgcacacctggtctgaccaatcttttatgccctatgtaaatcagag

SEQ ID NO: 72817 - DNA, 122 bp, Homo sapiens
cgccccggggctctggtcccttccctgggggcggccgctgcgctagcggccgaggcttcccgttatcctgcaggcagcaagtcatcaccacctcgtggggccctggaggtgcattttcctca

SEQ ID NO: 72818 - DNA, 122 bp, Homo sapiens
ccgcctcagagcgtaaggcccggcccacctcgtagagcacaagctgcgtgcgcaggtcgacgtcagtgcccgcagtgcccaggtggcgctggaccagcgcttccatgccctgctgctccagt

SEQ ID NO: 72819 - DNA, 122 bp, Homo sapiens
cccttcaagaagtggggcaattttcttctttattgactcactcactcttatccccacctgcgttctggaaacctgccactgatattcacaatactatgcacatccatcactatagtttgcag

SEQ ID NO: 72820 - DNA, 122 bp, Homo sapiens
cgacacctcaaacacagaggtttgatcttttgtcgactgtctctagaggcagttgggctacgtcagtgaaagacattagaaagagttgttcaccagtggctcatgcctgtaatcccagcact

SEQ ID NO: 72821 - DNA, 122 bp, Homo sapiens
attagctgttccagcaaaaggtactgcttatttataataaccagataatagcagcgagatcggagaggatagtctagataacattatgagtgtatctataattataattgaaatggaatggg

SEQ ID NO: 72822 - DNA, 122 bp, Homo sapiens
gcgattgtgcttcccaatcaacgggccttcgatgaaaagtgccaaggaggtcgccggatccgcccaagtggaattcccaagatgtttcccggggagcagcctcaggaacgcgcctggacccc

SEQ ID NO: 72823 - DNA, 122 bp, Homo sapiens
agcacggcagctgctggcccaggtgctaagcccctcactgcccagggccggtcgggcggccggcagctccaagtgcggggcccaccgagcccacgcccacccggaactcacgctggccagca

SEQ ID NO: 72824 - DNA, 122 bp, Homo sapiens
tggagatgtgcatagggaccgggactaccaggagaaaggggctgcgggcacagtcagccacgcaggggggaccctcaccttgtctatgaaggaggcaaacttgttgttgagggtcttgatct

SEQ ID NO: 72825 - DNA, 122 bp, Homo sapiens
tgaccgctcgcccacagacaaggagctggtggcccaggccaaggcgctgggccgggagtacgtgcacgcgcggctgctgcgcgccggcctctcctggagcgcgcccgagcgtgccgcgccgg

SEQ ID NO: 72826 - DNA, 122 bp, Homo sapiens
ccagggtgtaggtggtcatctttagacttgggtaactgtgggcggtagagataacgttgccgcagcgcccgtccacctctccccatccacgctcccagcgcctgcaactcctctttcaccct

SEQ ID NO: 72827 - DNA, 122 bp, Homo sapiens
agacatgtgaaaggaggacatggtcacagtcatggacatggacacgctcacagtcatacacgtggaagtcatggacatggaagacaaggtgagcccaggaacaactttcctgaaagctgact

SEQ ID NO: 72828 - DNA, 122 bp, Homo sapiens
agctccggcagttgggtcccagggaattctgggaagtgtagtccagacgctcagtggagtcgcggtcagtttggctccggctggcgggtcccggggaattctgggaagtggagtccaaacat

SEQ ID NO: 72829 - DNA, 122 bp, Homo sapiens
tgatacccatcagaactgctgctgctctaacttatactctttaccttgcccagatctccgcgtaaggaatgctttatgatcaacttgccataggactgatggattaaccagtgttcggcttt

SEQ ID NO: 72830 - DNA, 122 bp, Homo sapiens
tgaaccccagcagcctaaccctgtcaagtctgtcgagcctctggctggtcacacgtgctgcggaatccactcagctttcctcaggtgcagtcaggtccatcctgcagagggaccttctgcgg

SEQ ID NO: 72831 - DNA, 122 bp, Homo sapiens
acaactcttggaacttacagcatcgatcctactattaaagttgcctggagcatgccagcacgttggacatcggcgttccagcaactgcctcagtcactgaatcgagtgggaggctcattttg

SEQ ID NO: 72832 - DNA, 122 bp, Homo sapiens
tgctgcgccccatccccccgcggccggccagttccagcccgcaccccgcgtcggtgcccgcgcccctccccgggccccgccatgggcctcaccgtgtccgcgctcttttcgcggatcttcgg

SEQ ID NO: 72833 - DNA, 122 bp, Homo sapiens
gttgacaaccctaagaaccggatgctgcttattgagaaccttcgggagtcccagccctaccgctacacggtgaaggcgcgcaacggggccggctgggggcctgagcgggaggccatcatcaa

SEQ ID NO: 72834 - DNA, 122 bp, Homo sapiens
ctctcccggcttgcccagttcaccactcctgcccccttgtcctggctccgcccggttcatcgctcctgcccctgtcctggctccgctgcgaggccgctcgcttcccacactctggaaatgtc

SEQ ID NO: 72835 - DNA, 122 bp, Homo sapiens
gagtcttgctctgtccccaggctagagtgcagtggcgccatctcggctcactgcaagctccgcctcccaggttcacgccattctcctgcatcagcctcccgaatagctgggactacaggcac

SEQ ID NO: 72836 - DNA, 122 bp, Homo sapiens
ggcgcggaagccccacagcccgccgagaaccaggaatacgagagccaggcggcgcggcggcgggacctgtactgagcaagaaagaagatttcaaagtaatttattgttatgagatccgtgct

SEQ ID NO: 72837 - DNA, 122 bp, Homo sapiens
attatggacctgttttcactgaataaaagattatgttgttgtttacatgaagcgatccagcgaatgctgatgatttaatgcagcaaaacaaacagccctttcagatttgcctttctattcta

SEQ ID NO: 72838 - DNA, 122 bp, Homo sapiens
attagaaacactatttaagtctcagtttcgtctcctgtcaattgggaaaatatcgtgaggcggagatgtgagatgtgatcacgtttataaagtctgcggcaagaggatgataaagtcacttc

SEQ ID NO: 72839 - DNA, 122 bp, Homo sapiens
cgctcaaaagaaaataaaagaaaaagacaaagtacaaaagagtaacagctataaagaccacgaagccacttaccacgagcagtagaaaaatgagaacgaatctccccggggagacgattaaa

SEQ ID NO: 72840 - DNA, 122 bp, Homo sapiens
agcgggattttgaggcacctatcctgggcactccggcagcccagagggagctcctacccccgaccaagcccagcaggtgcccggcgccctgtgcagggcccaccgagcccacacccactgaa

SEQ ID NO: 72841 - DNA, 122 bp, Homo sapiens
gcttcaccacccgaggccccgaccccccttcaccacccgcttcaccagctgtgcccgcaccgcagccctgcccagagcccttggacacatggatccccgcttccccgctgctgccgctagcc

SEQ ID NO: 72842 - DNA, 122 bp, Homo sapiens
gttattatcactcccgttctagagaagagaaaaatgagggggcgagaaatctcggtggctcggtctatgcacccaggctagttagatggaatttgaagcttggttgcctctcttctcaacaa

SEQ ID NO: 72843 - DNA, 122 bp, Homo sapiens
caagcaaacaaacaaacacttaatttctagccattgccttccttccaagtttgaagccctcgcctttgacccccggctttgcgtttctatctggatgttccacctgatccagactcagtttc

SEQ ID NO: 72844 - DNA, 122 bp, Homo sapiens
ttggctcctggagccatgagggcaattagtgccctgttcgccttcctgtccctgttgcttcgctattcagagcgattttatttgttgtctacacactaccccattcaatgcgaggtactaga

SEQ ID NO: 72845 - DNA, 122 bp, Homo sapiens
ggcggggagccaggccggcagggctgtcatgtcaggggaaggaagcggcccggcgggcggcgggccaggagcggctcccactcgggcctccagactgcagctcctttcctgtctcccactca

SEQ ID NO: 72846 - DNA, 122 bp, Homo sapiens
ctcaggcagagaaatgaagtaaggtttcctgggttctatccaaaagcatcccgtgagtcacggcaggtgagaggagaacacctgtgagtcaagggtccctcttctgagaatgggttttgaga

SEQ ID NO: 72847 - DNA, 122 bp, Homo sapiens
gagacaggggaggaggcaaactgtgtagggtggggttggcaaagcttatctgtaaagggccggacagtaaacataatatttcagactttgtgcaccacgtggtctctcttgcaactgctgaa

SEQ ID NO: 72848 - DNA, 122 bp, Homo sapiens
gggcgaaatcggagcctgagtaacctccagggccggattcagcctcagggcagctcccttcgggtcctgccccagtccccggcaagtctccgcggaagctccgctgaactgggagtgggaag

SEQ ID NO: 72849 - DNA, 122 bp, Homo sapiens
gccacgttggtggtgaccttccacgccaacttcaactacgtgtggctgcgcctgctggagcgcgcgctcccgggccgagcgccgcacgccctgctggccaagttgctgtgcgaccaggtggt

SEQ ID NO: 72850 - DNA, 122 bp, Homo sapiens
gaggcagggaggcacacgcatcatctcctctaactaaatcgtcacagcaatcttgtgcgtcgtatatgattgttattcccatctacagatgtggaaactgaggctcagagaggtgcgggaac

SEQ ID NO: 72851 - DNA, 122 bp, Homo sapiens
taaagggccacagtgagggctctcaagctttggagccgctgagtcatctgatcttcatcgcgctaagctcctgacagatgttacacaggtcagggatgtttgggcaaacctctcaccgtggc

SEQ ID NO: 72852 - DNA, 122 bp, Homo sapiens
aatcataatcgcatccatctcaagaaaatatttacatttgttttgcacaaaagggatggccgtctttttccaaagcgagaacacagagtcagagaaagccaactcaaaagtcccttcgcaag

SEQ ID NO: 72853 - DNA, 122 bp, Homo sapiens
atattgcaatggttgcataaccctgagccacactggctgcctgtactagctgtctgcctacgtcggccttaaaattctttctactctttttaaatcaaataaatgttagaatgggtttcctt

SEQ ID NO: 72854 - DNA, 122 bp, Homo sapiens
agctgggcgggtcccgggcgaaacttgcccttgctctgggccaccccaggaaccggcccacgggtccccggcctctgccccgccccattccggcttggccccgcctccgtttcttaggggta

SEQ ID NO: 72855 - DNA, 122 bp, Homo sapiens
atcaaaagccctctgagccaatggcaagggagcaattcgttggccaatcaaatggcaccacggatcttttcttcccgcttccagccgccaatcattaaggaccaggaaggcgtggagcggtg

SEQ ID NO: 72856 - DNA, 122 bp, Homo sapiens
cccacaaagcctcggatgatattggaaaagctcttcgtggtcttcccggcggcttaaccacgtcgctggaatcctcggggtgctcgcaaaacttgccatggatggagaagccgttttagctc

SEQ ID NO: 72857 - DNA, 122 bp, Homo sapiens
tgtagcccacgccgggtgctattccaggctctaggggctggtgctcatccccacccccagcgacttccgtcctacctggcatgctgcagccctctgccggctgtggtgtcctctgaatttgg

SEQ ID NO: 72858 - DNA, 122 bp, Homo sapiens
ccatttagtgtgaatcctggatccggcagcggcggcggcttcttcaggggtagctgatgccggggccttggagagggacgctttgggagggtcctgggaggcggcgcggcgagcaaaggggg

SEQ ID NO: 72859 - DNA, 122 bp, Homo sapiens
gcccccggctttgttcggcctccagggccccaggagcgcgcggatctggcactccgggcgcggcagacgccagtttcctgagaagctcccactccgtccgggccgcgcagggctgcgggaac

SEQ ID NO: 72860 - DNA, 122 bp, Homo sapiens
aagctaagaatcagaggggaaaggaggagtggggaaaggtaagaaaagcaggaaaaccaacgatggtttctccctggcttcatagtgactccccaaaggaagacaatcttgacaactttcct

SEQ ID NO: 72861 - DNA, 122 bp, Homo sapiens
ttaaaatgatggttagcgagttttcttctttgctttgtttttaactgctgtggttatacacggtgctctgtgaatgaagggtttcagccaaagaactgcagagcagaggcttcctagagagg

SEQ ID NO: 72862 - DNA, 122 bp, Homo sapiens
aatgcagttctcaggtttcaccctacaactatcaaatcataaaccttggaggtgcctctgcgtttgaccaagccctgcaggcagttctgacgctctctcaggtttgagtacctctgctctgc

SEQ ID NO: 72863 - DNA, 122 bp, Homo sapiens
tgacaggggcaccagccgacattcggaatctgctgccaagataagaacagcgaggctgggcgctgtggcttacgcctgtaatcccagcactttgggaggctgacgtgggcggatcacaaggt

SEQ ID NO: 72864 - DNA, 122 bp, Homo sapiens
gcgcaggcgcagtgaacgggcgccgttataagggggcggggcacaaggggcggggatccacgccgaggctccacccctccttagggcaggtatgaccgagagctggggcgggagcgttgacc

SEQ ID NO: 72865 - DNA, 122 bp, Homo sapiens
aacgcccaaaataattctccagagttatttcattccaattgggatttgcctcaacagagacgtgagaggaagagaaggggagggaattcaagtccaagctgcttatttgtcagctccttgaa

SEQ ID NO: 72866 - DNA, 122 bp, Homo sapiens
tcctagataggcttgatcttatgctgcatacctgtatccactctcggtaggaatcctctccgggagtccacccattctcagggtagttcaggcgggagcgctctgcagaccagttggtgcta

SEQ ID NO: 72867 - DNA, 122 bp, Homo sapiens
ctgccctggagaccacagaacttaccctatcgaatctaggattggcgccgaagctactcccgccctttgacgtccccgggcaccccgcccccttcacctcccagctttgccggggaagaagc

SEQ ID NO: 72868 - DNA, 122 bp, Homo sapiens
caactctagtgaggcaacagaaacaacatatgttggcataattcataatgatgatgtttccgttattgggaaccctggggagacaggattttgtgtttttggagtgattttcttgactctct

SEQ ID NO: 72869 - DNA, 122 bp, Homo sapiens
gctcctcgcagagagctgccgcgaaggacgagagcacggagcgcagcagggtccggaggtcggcactggccatgaggcagaggaaggggctgaggcagctgttgagtaggatcaggtagtcg

SEQ ID NO: 72870 - DNA, 122 bp, Homo sapiens
ctaaggtaacgagattcctgttgaagggaggacagaatggggggattctcgctaaacaaacgttaacaggattcttgctaaaattggattcagcaagggctaacacagtcaagaagagtgct

SEQ ID NO: 72871 - DNA, 122 bp, Homo sapiens
ttctcctgggcccactctgtggtgattgttgcgctcggccttcttgaggatgttggtggccggtttccttctttttggcttatttttgtctggttttggcgtcaaggtgaagccgagctcat

SEQ ID NO: 72872 - DNA, 122 bp, Homo sapiens
gttagctgtttaaaccacagacactacttacatatggacattttacgcagacgcattttacgtatagatatttacatatagacaagcaggctcaggtgctaggaatgatggaatctcagcaa

SEQ ID NO: 72873 - DNA, 122 bp, Homo sapiens
ccctcgggtccagccgcagccagcacaccgggaggtggtcaggggtcatctcttctgcgccggccccaaagtagactgtccagttccctgggagatactgcgaaatctgcttcatgtttcca

SEQ ID NO: 72874 - DNA, 122 bp, Homo sapiens
gaggaaggaactctagagagactacagtgtgactgcaaacattcatcagcccttcacatacgttattacctccagtccttaagccagttccctaaaggtggtattaaatgtctccacatcac

SEQ ID NO: 72875 - DNA, 122 bp, Homo sapiens
ggcttggagaagctgaaggatttgctcaaaataacctaaaacaaacgtcgaatcaggatccgtgacagggctgtctgagccagagccctctgagctctctccaatctcccagagccctctga

SEQ ID NO: 72876 - DNA, 122 bp, Homo sapiens
gcagaaaaaacaaattaaagttaagaaagatgagacaaggatctaataatttttaaaacacggaactaatgtcttttcgattttggataatagttgcatgtagacacatgaaataaaatgcc

SEQ ID NO: 72877 - DNA, 122 bp, Homo sapiens
tgggtcgggaggatatcaatttccttcagaatgttggcgagtctcacaggcaattcttgtcgcaaaaatgcaaaagaagttctttcacatgcattttctgaacctataataaatgaaatcaa

SEQ ID NO: 72878 - DNA, 122 bp, Homo sapiens
cctgtggcgccaggagcgggccgaggcgcggcgcacggatgccgtctggatgggaagttacggtttacagcgaagtccacccagcgtttccgaggtgaaggcgccgcgccaggccggggggc

SEQ ID NO: 72879 - DNA, 122 bp, Homo sapiens
actatgttcctcattcacttgagaggagagaagcatgtcaatgtcactaacaaaaatcaccgagggctggcgacacctggccacaagaaaagaggcatggataattttctctgcttctccta

SEQ ID NO: 72880 - DNA, 122 bp, Homo sapiens
gaaattcggaaagtgctgaccagccagctgcaggcttgtagaggtgaggctgtcttcaagcgatcgtttcccgtagcttccgctccaggtgcatttttacctatgttcagagcaaccgcaca

SEQ ID NO: 72881 - DNA, 122 bp, Homo sapiens
gcactgtggggaccgtcgttcatggtgcacacctcatcgatgagcacagcgcgctccgtacgtgaggcgtgagtaacacacttctccacaacattgctgtaatgagataaaaccagggacaa

SEQ ID NO: 72882 - DNA, 122 bp, Homo sapiens
catgcacaggagggcagctctgctgggcgtttgctaagggactaggacctgccatcaggccgcagggccaagagaggatggatagggatggatggatatcctcaggagggtgctaaaggagg

SEQ ID NO: 72883 - DNA, 122 bp, Homo sapiens
gcggaaaagggagggagggggggaaagggggacgaggggcggatgaggggggtttggaagcgcactgccacttgcaaagtcagacccgagcaatcacagccggagcgcgattcgaatgggga

SEQ ID NO: 72884 - DNA, 122 bp, Homo sapiens
ttcagtgttcacagagatgcaaccagtaagtgtttggtgatgagccagggtctttgttgacggatctgaaaagtcctggtatctaaaacccagttgctaagccagccagtgttgcttacatg

SEQ ID NO: 72885 - DNA, 122 bp, Homo sapiens
actgagtcccccttccacgcaacggccggcaggaccagtgagactgagggggaggagcgccgtggcgagagactggcgtttataatcaaacctgtggtcccgcgatcctacttgagggaaaa

SEQ ID NO: 72886 - DNA, 122 bp, Homo sapiens
gcttcgcactggctggttgggtctgacgacgtggccactgtccaatcctcatgctagaggcggggctaaaggccagtggcgcaagcagaaggaggagcgcagcggctgcaagcacgtgaccg

SEQ ID NO: 72887 - DNA, 122 bp, Homo sapiens
atcaggcggtgaaagttgctcttttgtttccgatgggtctttgccttttctttctgggagcgtttcatctttggagttatggtgcaattttaattgtcgggaggggacccacacaggctgta

SEQ ID NO: 72888 - DNA, 122 bp, Homo sapiens
tctcccctccagggcctctcctgtatatatcagagcgcggagtccggcaggggaaaggaacggaaagacagttgtgaagttgccttaacctgtgccctggggtctctaggtagccgtctgca

SEQ ID NO: 72889 - DNA, 122 bp, Homo sapiens
gtgcatcagagaaattccaaaatgagagaggtagatttgcagccaggacctcaggagagacgctgtcagggtgcactgtgtggagctgcttgcaaactgtgtacaactggaatgaggtacag

SEQ ID NO: 72890 - DNA, 122 bp, Homo sapiens
ctgtaaaggaaagttagagaaatgaagggcgatgatgctgtcagaaaagcgagggaggcgcgatgcatgcatggcgggcatctgctcggcaaagcaagggcgctgctccagctggcaggctg

SEQ ID NO: 72891 - DNA, 122 bp, Homo sapiens
gttcacatgccctaggttaccgtacttggagagctgagtgggaggaatgcctaacccagacgtggggaaagcaaaatggaaaacagttactaataaaactcaatatagaaatttaagggagg

SEQ ID NO: 72892 - DNA, 122 bp, Homo sapiens
gagccagccactgggaggagcatggaaagaacccacccaagtccctgccttcagcaagcacgcaatccagtggaaatgtcaccaggcagaagaattaaaatctatttatgatgtattcaaca

SEQ ID NO: 72893 - DNA, 122 bp, Homo sapiens
aacggctgcagctcaaggtagcctggattcttgataagcacacacccgccactggtgtcacgctgaagctggaaggaccgcctctgctaacaacagtgaagaacaaatgtggatgcaaatgg

SEQ ID NO: 72894 - DNA, 122 bp, Homo sapiens
tgggggcagcagactacaacagttatttaattaaaaggcatttttcctctctctatttctcgctccagctcccagaatagctttttcacccctagaccctgagcacatgcctgtctctccag

SEQ ID NO: 72895 - DNA, 122 bp, Homo sapiens
tctgcaccccccacctcggcctccagtccctcccaggagccccgcttgtcccaccttccccggatactgaccccatcagaccctgcctcctcgggctcatgcactctcgctgcagccccgcc

SEQ ID NO: 72896 - DNA, 122 bp, Homo sapiens
aatacctgtacagcatgtcggtctgaaccactgtagacagagatctgtggctgctgcattcgagaggaggaagtggtgatggtggtggtggtggtactgctggttgttgttgacacagaaga

SEQ ID NO: 72897 - DNA, 122 bp, Homo sapiens
aggcctcaggccggagcagccccatcatgccgagggagcgcagggagcggtgagtgcccgcgccgcggggccggacgggacgggacgggacgggacgggtggcgtgggggaggggcggccgc

SEQ ID NO: 72898 - DNA, 122 bp, Homo sapiens
cgctctccctttccacggggtactgctttccctgggagacgcgaagaggagaggagggcccgagttcaagcagggagggaattcagagagcagtcattcaccaagtcccctccagccccagc

SEQ ID NO: 72899 - DNA, 122 bp, Homo sapiens
aactgaatcattccttgttcaaaacatttaatcatcttaagcagtggggcttcaacacaccgtttggttagattgtgcagtcagcactctccagtgattagaatgggggaaagaatccacta

SEQ ID NO: 72900 - DNA, 122 bp, Homo sapiens
ggaggggggcccaagctaaggaatgtaagcagtttctagaagctgaaaaacagaaagaaacggattctctccagaacttccagaaggaatacagcactgttgctatcttgattttagcccag

SEQ ID NO: 72901 - DNA, 122 bp, Homo sapiens
catgatccgcccaccacggcctcccaaagtgctgggattacaggcatgagccaccgcgcccggcctgaagctcaaaagttttatattttgataaagtccaatttatcttgtttgtgctgttg

SEQ ID NO: 72902 - DNA, 122 bp, Homo sapiens
ggcggctacggcggggcgggggccgggggctgcgggaggacatggtccggagctcagccccggggccggggcggcgctcggggcccgggccacgacatccccccggcgggagcaggagcgtg

SEQ ID NO: 72903 - DNA, 122 bp, Homo sapiens
aggtcaaatccccacattttccaccaaagcgcggcgcgttcgagcgccccctggtggcgccgttctcaacagctcgcagcagagccggtttttcactccgggtcccgacccgaaggagggag

SEQ ID NO: 72904 - DNA, 122 bp, Homo sapiens
aggataacacccatcagagctgcagcagtccagttgtgcaaggcatttaatgcccagtcacgcagtctgaatccaacctgaagtctgcttgtcaagccattagccttatccctgtggcgtct

SEQ ID NO: 72905 - DNA, 122 bp, Homo sapiens
ccagctgccccgacgcccgcccggtgcccgctcgcgtgactagccgccgtgttgtggctccgtaaccgtggcaacggctctcaggggagcacaatactcccaacttccctttactccgagga

SEQ ID NO: 72906 - DNA, 122 bp, Homo sapiens
gggtggggccgcctcctgcggagagcagccagtcacggggctgtgcagtcaccctgcccccgtcctaaccacgtagcgctgcaactgcacccagaaagccgcagggcacacaaggccagcat

SEQ ID NO: 72907 - DNA, 122 bp, Homo sapiens
tgccgcgcggggggctgggtctggttgagtcgctgctttcccgagggcagcgcagggatccggggaagctgcggcagggagcgggcgccggcttcgtggctctgaggtgtaacgggggtggg

SEQ ID NO: 72908 - DNA, 122 bp, Homo sapiens
aagagctctggaagcagagagtggtcccagagaaaatgggttgctgcttccatggtgaaacgcagaaggttttttaggtgagcttgagggggcagtatctgattcacatagggcacgaaaga

SEQ ID NO: 72909 - DNA, 122 bp, Homo sapiens
ccagagctggactgtgagctccgccccactgggcctgacgcgagggcgagggtcagggggcggtgggtggggacccagtcccgggattaccccccgtgggtctggggagtcggagcggaggc

SEQ ID NO: 72910 - DNA, 122 bp, Homo sapiens
ggcccaggggcagtgggcgctgagcgagctttggagcagcctggaagtctatggtaggggcgtcctcgtgggtgcgtggtaccagcttcactgtgccctggggaatccgattctctgccctc

SEQ ID NO: 72911 - DNA, 122 bp, Homo sapiens
ccaactccaccccatatcagcttgcttgagcttagacagatcacttgacttctgtgagcccgtttctcttctctgtgtaatgacgataatgattcttgttttatagggtagtggtgaggatt

SEQ ID NO: 72912 - DNA, 122 bp, Homo sapiens
cagaggccagctgtctcacctgttcttcagggtgcctagactttttacccatctattatccgggatgcttctgaagtcattcccatgggcccctgtcaggtattgagaataaatacctctaa

SEQ ID NO: 72913 - DNA, 122 bp, Homo sapiens
gcgggcaccaccccctggctggcccctccccattcgcaggacagctcttacctgccgggccgccgccccagccaacagctcagccgggtgctccttcctgggctccacgcccggagctgctt

SEQ ID NO: 72914 - DNA, 122 bp, Homo sapiens
atgtgtcctggcccctgcccttccacccctctgacccgagatgcagttctaacaggttcccgggtgatgctgctgctgctgacccttgcccatcccggagctcactttgagagctggctgag

SEQ ID NO: 72915 - DNA, 122 bp, Homo sapiens
gccactttctccctaccgaagtcaactcgccggctgcaaacgcggggctcaggcgttgtccgcaattgacttacctcgcaggctttgacctttgccaggtgtagttcctggactttggagct

SEQ ID NO: 72916 - DNA, 122 bp, Homo sapiens
ttgttgaattcacctttaaagtaggtttacaaatgtgaatcatgcaggcaggcctactcccggaagagtgtgctagcagaccttttgaaattggtgctttttttgaatctcacatttctaga

SEQ ID NO: 72917 - DNA, 122 bp, Homo sapiens
ctagtgagagcggggcagggttgggatagttggcaggggcctggtgagatggggccgacccgggggcggtggacggggcctagcgagacggagctggcaggtgggcggggacaggatgctgc

SEQ ID NO: 72918 - DNA, 122 bp, Homo sapiens
aaggtaatgctggctaactaaactttataacatttgaatgtagaccataagctgatgagccggaggtcaaaattagatagctgtaaattatttgggctaatgaaggataaaggtagagttta

SEQ ID NO: 72919 - DNA, 122 bp, Homo sapiens
tttgaaattcaaaggatgaagccctctttgtcttaagggctgagaaacgcagctcagctgcgtctaagatggtttgtactcactctcttcctcccttcttgcttcggcaaggatggaagggc

SEQ ID NO: 72920 - DNA, 122 bp, Homo sapiens
tcagttccttggcctgtggctatttgggaattaaacagagctccacccaggggcttcccccggggcttcaaacagacacagcccccagaccccccagagggagaggggaccaacctcgctgc

SEQ ID NO: 72921 - DNA, 122 bp, Homo sapiens
gctcgcgactccccagttccctagcccagaaaagcggattggagcccgggaagctcattgcgattccaaaggtaaggactggcccaggtcgtggattagcctgcaaaagcatttgggggtcc

SEQ ID NO: 72922 - DNA, 122 bp, Homo sapiens
ctggaatttccccaggaggatcacacacattagaggggcgctgcccagaactaagacctccgtgagactcagccattcaacacatatttgtggagcagctcttatgcgccaggcaccgctct

SEQ ID NO: 72923 - DNA, 122 bp, Homo sapiens
cggactcctaatcacagataaaatgaaccttgggttactcacggattcaagtttcttccccggagactcatatttacagcttgagtcaaattctaaacaaaagttattctggcaagaaggaa

SEQ ID NO: 72924 - DNA, 122 bp, Homo sapiens
cggtgctgtgctacaggtttgcacttgtttctctatgtggcaaggccctgcgtgtgactgcgtttgtgcgtgtctgtgagcacggtgcgctggaaactgcgtgcttgggtctgtggcaggct

SEQ ID NO: 72925 - DNA, 122 bp, Homo sapiens
cgtccagctgccgcagtgtgtgcgtgaacccgcggaagagcaggtactcccggaccagctcgtcagtgcgctccacggcctccgccatcgcagcgctagcgtctttaggggtggtgcggtga

SEQ ID NO: 72926 - DNA, 122 bp, Homo sapiens
tgaggttcggagaagtcagggacttacccgaggtcgcctgggcccaggccagaaagcctccgaagcctgggcgtcgttcacacgggccccgccttggcttttctgagccgacacccccagct

SEQ ID NO: 72927 - DNA, 122 bp, Homo sapiens
ctgcccagagtaggggcgagacagagaggtcccggtggttaaggggtcccctagccctgccgcctccccctgccccgcctcgggctggccgggcgcggaggtaggggcctggccgggacggc

SEQ ID NO: 72928 - DNA, 122 bp, Homo sapiens
caaaagttacctcctctcctgaactcccctaaggcacacctgggcagaggtgttaggaagcggagggtccggcctggggtcttccgcacgtaaagcagcgccacagccggtgttcctggctc

SEQ ID NO: 72929 - DNA, 122 bp, Homo sapiens
tactcccagctttcgggcagaaggctcattccagatattcctgtcccctctgaggcctcccgaccctgccagcccaggcaacctcccccgcgcacggccaccgtgaccccagcgcgggcgcc

SEQ ID NO: 72930 - DNA, 122 bp, Homo sapiens
actgagcctcccttgcctgggtttccctcacccacaaaacgttgatgcgaacatctaaagcgcccggctggacacgcaaggctcggacagtggtcactccgcgaacgcactctgtgacctgg

SEQ ID NO: 72931 - DNA, 122 bp, Homo sapiens
acctcctgttgttttcatgggggctggtttcccttgctgacacgtggccatgaggtccctcgaggtacaggccggcatttggacttgtcctctgcactgtttctttgttagcatttagaact

SEQ ID NO: 72932 - DNA, 122 bp, Homo sapiens
cccgcgcctggggaattgtgttccctggttgcggtgagccggcgagcgacatcgcagcggcgcggcccagctcttggcaggcgtgggttgccgcccgagtgcccaccggccgggcggggtcg

SEQ ID NO: 72933 - DNA, 122 bp, Homo sapiens
actccgggcccggaaacggggggcgccggaccactccaccgcctcggggacgggggagggcggacgagaccactccaagccagggggcttctccgagacaaagttgcgccaccgaccccaga

SEQ ID NO: 72934 - DNA, 122 bp, Homo sapiens
acggaagccaaagtccaatcacttccatagcaagcaatcgaaagaagatggccgctcccacgattgtgggggaggtctccactggggaggggcagaggaaattcggtcgaaaaagagataaa

SEQ ID NO: 72935 - DNA, 122 bp, Homo sapiens
ggccgcacccctcgtgtgagatgctgtggatgtgttctggagatttctgtggccgtgtcacgggcaggggcgtcccgcgtgcacctgcagctcttgcctttgtccgattcttctttcagcac

SEQ ID NO: 72936 - DNA, 122 bp, Homo sapiens
cagaactgctcctccacgtggcccgcagaggcggctctatcaaacctctgtacacccggacgactacctaagattaataaggtagccacccactgggcagggccaggtgaagagaccctgag

SEQ ID NO: 72937 - DNA, 122 bp, Homo sapiens
gcagcagcggactaaaggggtcctcgagcgtggccagagtgggcgcggaggccaaggaggcgctgagagcgagcgagggctgcgagggctgccagcacactgtcacctctcagtatgatcat

SEQ ID NO: 72938 - DNA, 122 bp, Homo sapiens
catctaaaacataagtggacaaacaaggtcacccagtaactttgctcttatgagtaacaccgataatctttttaaatagaaacttgccaaataagataaacacatttggtcatcaactaaac

SEQ ID NO: 72939 - DNA, 122 bp, Homo sapiens
gatctctggggaagttgagctgcgtcctccggttgggccgtgggcaccaggggcctttcccgggcttccctggaagccacggcggctcctggctacaggttgccccgctgcctggtggggac

SEQ ID NO: 72940 - DNA, 122 bp, Homo sapiens
cgactggcaccatttggggatggttaaatgtggagagcggctctccactgtttctcagatcgagcaccaactcatcaatgtctccacgccctacattcaggagtttcattacgtcatatgtg

SEQ ID NO: 72941 - DNA, 122 bp, Homo sapiens
gcaagtgggtttctttcttgcgttcagattttgcagtaatttgcatctggacatgggatacgggaggccaggctgctcctcgcagtacacccacccacgcctgcacctgcctcagcgaagcc

SEQ ID NO: 72942 - DNA, 122 bp, Homo sapiens
ccagataagcagcagacccactgggagtctgactcaaagtcctgatcttacccactgctccgagctaccctaccacatttattctcccatttagctttgtctttaccaaacatttactgggc

SEQ ID NO: 72943 - DNA, 122 bp, Homo sapiens
tgtttaacaattactgtatgtactctatgaataagatacctgaagattgattctctttatcgttaatgtgtggactgtatcaggcaaagtaaaacccctatcatcaaaagcctaaagttatt

SEQ ID NO: 72944 - DNA, 122 bp, Homo sapiens
cgagctccccaaatccattcggatccagcaatccctttaaatccaaaagtaatgatcggccgggtcacaagcgttttcgaacgcaaatgagcaatcttcaactcaaggttctcaaggcttgc

SEQ ID NO: 72945 - DNA, 122 bp, Homo sapiens
attaagagctagccctcagaactatcctctctaaggtttcacagtcctgcccaagatggccgtctcggctctggcaccgcccccactcctgcctctcccaacatggcgaccctgagtctccg

SEQ ID NO: 72946 - DNA, 122 bp, Homo sapiens
ccaaggagggttttagggcccagaaatctcttaaagtctgcaattctcagcatgacaccacgcagatgagtaaatgtttagcacttaatactgagtaaccctcacaagagcccctcagattt

SEQ ID NO: 72947 - DNA, 122 bp, Homo sapiens
ttaggtgcatgcaagttagaatcgtgggctgctttcacagtctacagaagtcctagagcccggactttcatctggagatgtcagggaaataccacattcctgcgctgaccttttctctttca

SEQ ID NO: 72948 - DNA, 122 bp, Homo sapiens
ccacttgttaaaaccacactggtcctgagtagacagtgttataaactgctatctacatggcgtgatgttaagcatgtcagcaagctcccctcttcctataaagacctttccaccaattgacg

SEQ ID NO: 72949 - DNA, 122 bp, Homo sapiens
tggagtaccccgcccacctagcccggccgtgggatccgccctcagcccatggctggactgcgcatgcgcacgccgcaacccgcttcagccttgagcactggagtctggacaagaggagtgtg

SEQ ID NO: 72950 - DNA, 122 bp, Homo sapiens
ggaggcttgggaaaaaagagtagctgtaggcaagtactccaatagaagctctgccttcaccgtgagaacatgccagggttggcctgctggagggagacatgtggagcagaactgagtcaccc

SEQ ID NO: 72951 - DNA, 122 bp, Homo sapiens
agtgttctccgagccccttgccgtgggtgagtgttctccgagccccttgccgtgggtctgcgggaaatgtgtactccgagccccttgtcgtgggtgagtgttctccgagctccttgccgtgg

SEQ ID NO: 72952 - DNA, 122 bp, Homo sapiens
gaaccacgacagtctacccatctctatttaagaacggagaaaccgaggggagaggtaactcgcccaaggtcccacggcgagtccagggcggcgctagactcccagtctctggggtctctcct

SEQ ID NO: 72953 - DNA, 122 bp, Homo sapiens
gatctctaggctggatccgggcctctccaatcaacagcggttaggagggcggggcgcgtgcgcgcgcacctcgctcacgcgccggcgcgctccttttgcaggctcgtggcggtcggtcagcg

SEQ ID NO: 72954 - DNA, 122 bp, Homo sapiens
tcagtctgtagctggatggggctatgggaggttccagaagatcatgcgtgtagccacgtgcgaggtgtcagctgcatcccaagacctgagtgggtgcacagcacacccctgccatgcccatc

SEQ ID NO: 72955 - DNA, 122 bp, Homo sapiens
aggttccataacccagtacttctgcatggttagccagacctgggcaatgtctcagtcagccgtaaacatccaactggtagcctgatcctctctcccaagtccggcgtttccaatggacgtcc

SEQ ID NO: 72956 - DNA, 122 bp, Homo sapiens
catttctttacacctggacatgtctcatcagtgatgcaccttttcaaacaggattgtttccgaataaccctagggcaatctcttttcctccctgtagcaaaaagggagacagcaaagaaaag

SEQ ID NO: 72957 - DNA, 122 bp, Homo sapiens
ctctcgggtgcggagaaggcaggaaacctaacccctgcttccaaatttaatcagtagaaacggtatcatcacccagcacaggccaggatcatttctgaggttagttctggcccaatcatgca

SEQ ID NO: 72958 - DNA, 122 bp, Homo sapiens
ctgtttcgaagggagatgacctgctagaggaagcttgcgggcaacagcaaattgggagttcgactagcactttcagactgggatgcaacgaagaactcgccagcagaggtaagagatgggca

SEQ ID NO: 72959 - DNA, 122 bp, Homo sapiens
ttctgacgtcatgagagtgcgataccaggattggtggacggagctggcgaccgccctaggcgcgctgggtcttgtgggtggaaacgcgctggctgactggggtcggcgtttagttcagcgca

SEQ ID NO: 72960 - DNA, 122 bp, Homo sapiens
tgccgccatcttctccagggttccggcccagcagctatccctgttccggggcttctacgtcgagtcaggcaacccagccaggccctgcactcctaagccacgcatctgaggcaaggcctgct

SEQ ID NO: 72961 - DNA, 122 bp, Homo sapiens
gctgtaagccttcgcaggtgccgttcattctgcccgggacgcgtctctggcctttctgaacgggtgttgcctcctcaggagcccagctgactcgtctcactgactccccctgcagccctctc

SEQ ID NO: 72962 - DNA, 122 bp, Homo sapiens
cacctggaaaatcgggtcactcccacccgaatattgcgcttttcggactggcataaaaaacggcgcaccacgagattatatcccgcacctcgctcggagggtcctacgcccacggagtcctc

SEQ ID NO: 72963 - DNA, 122 bp, Homo sapiens
gtgggtactgcacggagagggcagggggtggcgtgaagccagcatggccacagcctggcccgcctggccagctcctactgagactgtctcacacatgggtggccacgcacactgtgacacac

SEQ ID NO: 72964 - DNA, 122 bp, Homo sapiens
ttaagctgctaacgtagacgtttcaagggtcacatttactcaagagacactcaggtcgcccgggggagcggtgcatattgggacttgtagtcctaccagaaccgaggaaactgcaactccct

SEQ ID NO: 72965 - DNA, 122 bp, Homo sapiens
gactatcttcaatcagaagcatgtacaattggccctctgtctcagcgagttctgtatccacggattcaaccaaccatggattgaaactatttgggggaaaaaaaagtagggtttcatctgta

SEQ ID NO: 72966 - DNA, 122 bp, Homo sapiens
gtccgctgcggctgcgctgggcctctagggagccgggggtcacggccgcatgggtcccagcgccgctctaccgcccggcgcgagcaccgcctcctcctcctcctctgccgccgccgccgccg

SEQ ID NO: 72967 - DNA, 122 bp, Homo sapiens
acggtgttgctgctggatcctcctccaccaatcagcaggagccctcggctcgcgctggggcggggggtcccccactcgccctccccgcggaactctggcacagtcagctgaccgcagacact

SEQ ID NO: 72968 - DNA, 122 bp, Homo sapiens
gaagggtgctggaggcaggctgtagtggggctaaaggagctgactgaccagcgctgcggccggtgcccgaagcagcgagcagcgcacctcagctccggttgccgcgcggcatggtatttatc

SEQ ID NO: 72969 - DNA, 122 bp, Homo sapiens
cctaacatagaattcatcccattgactgtcctttaccatcactgccttaattcaggctttcgtctcttgtgaataaaatcatagtggtttcccctaaacataggcatttggactgcctacct

SEQ ID NO: 72970 - DNA, 122 bp, Homo sapiens
gtaagtggcagatgccaccatgctggcggcgacgcgtctcctgcggagaggatttacctccgtagcctgggctaggaccttcaggaggcctgcacagcctcgatttaggaagccctttgcct

SEQ ID NO: 72971 - DNA, 122 bp, Homo sapiens
ccatctaattggctttggtctaggtacttctgattggcttcccccgggcggtgggaggcgcggttttggggattgttcatcatggattggtgaatttgggctccttctcgaggtggtggccc

SEQ ID NO: 72972 - DNA, 122 bp, Homo sapiens
cctggcacctcgggaggccgaggcgggcagatcactcgcgttcaggagctggagaccagccgggccaacacggcgaaaccccgtctccaccaaaaaatgcaaaaaccagtcaggcgtggcgg

SEQ ID NO: 72973 - DNA, 122 bp, Homo sapiens
cctgtcctcaatctttttgttccagttgagcatcatttggcatcgaacgttcagcggaaccgtttggtccagcatgatctccaggtggctaagcagctccaagaggaagatctgaaagcgca

SEQ ID NO: 72974 - DNA, 122 bp, Homo sapiens
gtgcagaattacaccccaggccacactccctgcaggggccacaggagcaagcactgcagccgggtccctgagtctgacttttacccaaacagggggttgccagttgctgcgagacaaatatc

SEQ ID NO: 72975 - DNA, 122 bp, Homo sapiens
agtgcctcttttgacaagccacgagcctcactcagcccagagtgacacttatcactgggccgtgtgaaaactggggggctggggaggaagtgagaaggatgcgaaagccgaggcgggaggag

SEQ ID NO: 72976 - DNA, 122 bp, Homo sapiens
tagcacttttcactgtattgtagcatgtgatcatgaaaatttagacaaagcataatttttcgagctaaaaggagattaatgaaattattcatggcacattcacaccattggacactgttcag

SEQ ID NO: 72977 - DNA, 122 bp, Homo sapiens
agaaaaagccggctcgcctttgaaaggctgcctttcttccaggtttgtcgtgaggagctccgcgatgtcctctcaacagagcgccgtttccgccaaaggcttttccaaggggtcgtcccagg

SEQ ID NO: 72978 - DNA, 122 bp, Homo sapiens
tggtttaacctaaacatgccctgggcctttgcacattgcaacaccctgagttttctcattcgtctttggcaagtttttactgctatgatagagatgatgggaactactggggagtaagagga

SEQ ID NO: 72979 - DNA, 122 bp, Homo sapiens
gcgaggtccctgccccgggggcttgtgggaaacggcgacctcaaacggaggctgcacagtcgctcaaagccccgcccatcgagctcctcccggcatgcagcgcgcctcgcctcttaagcctc

SEQ ID NO: 72980 - DNA, 122 bp, Homo sapiens
ctgatgccatcgtctaacagttattagactccatcaggttatttgccttgaaccccaaatcgttgggaactaagtgatgtttagtgctcagctgggagggaggtctggcatttaagggctct

SEQ ID NO: 72981 - DNA, 122 bp, Homo sapiens
gcataaagaaatgcatcaaaacattttaaatgaacataaccttttcctttttctttgagacggagtctcgccctgttgcccaggctggagtgcagtggcacagtctcggctcactgaaacct

SEQ ID NO: 72982 - DNA, 122 bp, Homo sapiens
ctcgccccgccgcccacctgccaggggaaggagcgcagtgtgcgtgccgccaggaagcggcgctcgaaactctgcagcaagagttcggtccccgcgttctcctcgggcgccatgacgtgggc

SEQ ID NO: 72983 - DNA, 122 bp, Homo sapiens
ctgcgccccaggacccgctgcccaacatggattttctcctggcgctggtgctggtatcctcgctctacctgcaggcggccgccgagttcgacgggaggtgagctgggccccggggcgccctc

SEQ ID NO: 72984 - DNA, 122 bp, Homo sapiens
cgctgtggccccgagcggaacggcccggaagaggagacgcgtccccgggaacccagtgcccgccctggcccagccccgatccagcctgcgcctcacctcgggttgtagacagagcggcgggg

SEQ ID NO: 72985 - DNA, 122 bp, Homo sapiens
ggtggggagctctgccgagagctcctgcggcacccctagtaccctcctgtgtccctggctcggcactgccaccatctgggaccccagcagcaactggcagcagggctgggagcagctctgga

SEQ ID NO: 72986 - DNA, 122 bp, Homo sapiens
ctgcctccagcctgttctggagacctccaagcaggagctggaggaggatccaccgagcgccgcagcccgtgcagcctcctcctgggagcctccaccctaaagacactctctgctccttctct

SEQ ID NO: 72987 - DNA, 122 bp, Homo sapiens
ggtcgcgggtcctgagcaggagcgcagcagtgcccgggtctcgggtgcgtagccagccaccgctcgttcctcgcgccctgcgagctcgcgcgctccggctccggctccggctccggcgctgc

SEQ ID NO: 72988 - DNA, 122 bp, Homo sapiens
gtgagacctctgtagagacttaaaattccactacaatgattcagccaaggacatagagaacgaagccatcttatggcagtccagtcaaataagaacctttctaacctcttctcagttctgat

SEQ ID NO: 72989 - DNA, 122 bp, Homo sapiens
accatattcaaacccagtctttttactttaagccatattctcatttcattccctacactgcgtagtaagaagctggttcactctagattcttgtgcctggcatgggactttgcccatggata

SEQ ID NO: 72990 - DNA, 122 bp, Homo sapiens
cgactcctgcttccatcctttctcctgagctagaaccaacaaacctagagagttgggcttcggaaaaactagtgttttcatttaattggatatgaagaaagaacaaatatgtacggggcaac

SEQ ID NO: 72991 - DNA, 122 bp, Homo sapiens
gatcatcctatttaaatagcccataatgctacagctcttattaaagagttttgtagacatcgtcttgctgtcacccagactggagtgcagtggtgcaatcacagctcactgcaacctcaaac

SEQ ID NO: 72992 - DNA, 122 bp, Homo sapiens
accttgcctgggtgatgtgtgagcacatgtgattcccgctcacaccaggctctaggctaccgtgcaggcgggagcgcgtggggtggtgcagatcccttgcctcgccccggtgggggaggctg

SEQ ID NO: 72993 - DNA, 122 bp, Homo sapiens
caccagggcggggttcatctgtttgcttgctgtggtacccacaggcattttttgagtaaacgaaagggtgaacggatgggggttggtccagcccagcttctcagaggcagagggaaggacca

SEQ ID NO: 72994 - DNA, 122 bp, Homo sapiens
ggtttttgccatatatatatatataagtaggagagggcgaacctctggcaggagcaaaggcgccatggctgtggagtcccagggcggacgcccacttgtcctgggcctgctgctgtgtgtgc

SEQ ID NO: 72995 - DNA, 122 bp, Homo sapiens
cgcctgtgtcgctgcctgatcgagtgacgggcgaggacatacacactgcggcccccaaggcgcagccgcccaaccgctgctcttttaggaaacgtgcacttgcgctcgcggaggccaggcca

SEQ ID NO: 72996 - DNA, 122 bp, Homo sapiens
catgaatgagctgcaaattcagagacagacaatcttccgaaactgcattgcaataactttcgacccctacctaatttatcacatgtagcacttgacttttgaactttgacacacggaatgca

SEQ ID NO: 72997 - DNA, 122 bp, Homo sapiens
catggctgcatggacagctcaattttcatcagaagggagcctcaaaattctagcatactgcgacccaaaacttacaaaccgcctcagctggcgacctaccggaaaaaaaaaaaaaaagcatg

SEQ ID NO: 72998 - DNA, 122 bp, Homo sapiens
tgttataaaactgtgtgggtatgctgttttccttggacagtctgggcttgtataacagatcgtgtccattagtgagtattttccatgtttctgtggtgagttgctgcatggagcagctgaac

SEQ ID NO: 72999 - DNA, 122 bp, Homo sapiens
ctaatctcagaatctctctgcttcatgcaatcaccatttccaaacaagagtcagcctacacgaatgaaacttttcgtgatcaccagggagccaaagacgtagtttaccaaaggtagctcagc

SEQ ID NO: 73000 - DNA, 122 bp, Homo sapiens
agatggagcgagctgtgccgctcgcggtgcctctgggtcaggtgagacggacgtggtgcgcgttgccttctggggtttgtagttcacgcatggctgggacggggcgggcagggaatcgtgcc

SEQ ID NO: 73001 - DNA, 122 bp, Homo sapiens
agagtcctctggtggaaaaggaccttggtccctcagcccccacagcagcttctgggagctcggtttaaacatcactgctctggggggattttatcagcagggtcaacacacagagacagtgt

SEQ ID NO: 73002 - DNA, 122 bp, Homo sapiens
agttcatatcaggatgaccctacatacccaggtcagattgacgggaccagaagggaacatcgacttctaatccagctttcttgtttaattatgacctaaatctaatttacttccactgaacc

SEQ ID NO: 73003 - DNA, 122 bp, Homo sapiens
tggaacctggactaaaatcaatcccagctcaaggtaattacaggacatgtgctaccaccccggcagggcaagtcagaggctgagctgctctcctagggcagccgtggcgattagttaggaat

SEQ ID NO: 73004 - DNA, 122 bp, Homo sapiens
cggtcccagcctctgccccagcctcagttccagcgccaacgccagcaccggctgcggctccggttcccgctgcggctccagcctcatcctcagaccctgcggcagcatcggctacaactgcg

SEQ ID NO: 73005 - DNA, 122 bp, Homo sapiens
actaggcagcagggggtcaggatgcggcgaagctcccgcccgggctcggcctcgtcctcgcgcaagcacacgcccaactttttcagcgagaacagctcaatgagcatcacctcggaggacag

SEQ ID NO: 73006 - DNA, 122 bp, Homo sapiens
ctgagtgaaggagtaaatgagcaaatgaacagtgtaatgccttatgaattcagcaaaagccgaatcatcatctgtttgttccagtgcagacaggcttggctttgaacagcatccagctccac

SEQ ID NO: 73007 - DNA, 122 bp, Homo sapiens
ggctgagtggcagccctgctgagtttactgtcaggaaaagggccacctctgttcagaccccggcctacctacatgcaagggggaatctcaggagatctttctcaaggcccctgtggttcccg

SEQ ID NO: 73008 - DNA, 122 bp, Homo sapiens
atccaatcagaggcattgtggcgggtccctgcccactgttcctccagacactgagggggtcgcattccttacctcacctttgtccctgcgcgggctgcggctgggatccggtctttccagcc

SEQ ID NO: 73009 - DNA, 122 bp, Homo sapiens
ggctggtgggtgagccgtgaagggaccctgcctttcagggcactacgcgccaccagttcccggtacccagggagcaggcagccacacacgggccttgcaaccttgtcagagaaaaggcgaac

SEQ ID NO: 73010 - DNA, 122 bp, Homo sapiens
cagacgttcacacagcgggctgaaccccgggagagcctcggggaagccggaggcccccagcgtggcaccacccgccctgggctgtgcccctcggagcagcttaccagaacatgtcctgagat

SEQ ID NO: 73011 - DNA, 122 bp, Homo sapiens
ttgtacatttatgacaaagcaggttgaaactggacttacactgatcccctccatggtaaccgctggttctccagatgcggtggctactggagcactcaggccctcggcgtcactttgctacc

SEQ ID NO: 73012 - DNA, 122 bp, Homo sapiens
ctgtggagtgggaacgggaggggctgcgggaaagccaagccaggacgctgggtggcagaccgttagaacagctttcattactcactgaaagcactgggaatctggaggctgtcctggacacg

SEQ ID NO: 73013 - DNA, 122 bp, Homo sapiens
cagaagccctggcagggcataagtgaggggaccccccggcacaggggacagccgatgagacgcatcagagcctggctgcagccttcagacaccggcacctgggggcagagagtggggctgtg

SEQ ID NO: 73014 - DNA, 122 bp, Homo sapiens
ctccttcggctttctccaggagccagcgcgaggcagtagatcggctgcttgagacgcgcgcgcagctcctgcggaccactccctccgccctgcgccagcagctgcgccggctggcagccccc

SEQ ID NO: 73015 - DNA, 122 bp, Homo sapiens
ccgccgcggcgccgccgggctggtgagcgctgggcacctgggccgggaacctccccgcggcggcggcctccggcccccggctctggtcccggtcccattggccactccgctgctactggaag

SEQ ID NO: 73016 - DNA, 122 bp, Homo sapiens
gagtccaaggctatccacctctaaaagtcagagggcaggaagcaagaaacagtcacggcacggccctggaggctgctagggtcacctgtaccccaggctggagctgcctctggcctcccacc

SEQ ID NO: 73017 - DNA, 122 bp, Homo sapiens
ggtcatgagtgcattttggagttctgctgttgagtcagagcatgctggcagtagtggctccgcttgtagaagtgaaacctcctgcttatgttttggccccatgagatctcataagatttccc

SEQ ID NO: 73018 - DNA, 122 bp, Homo sapiens
gctccagggccgcgtgattagggccgtgtccccttggatcacggccgtgtcgccaagcagcggtcccagcggcaatgactcctcaggtggcagttctagcagctgtagccccagtcgttgcc

SEQ ID NO: 73019 - DNA, 122 bp, Homo sapiens
atgagccaggccgcagctgccaacagaatacacacctgggggttcatgatgacagtgtagcgaagaggattgcagatggcaacaaaacggtcaaaggccatgatagccagtaaaatggcctc

SEQ ID NO: 73020 - DNA, 122 bp, Homo sapiens
aaggttataaaaaacatatatcattatcttcactgcttctcaaactttgatgtatataagcgttacctgaggatcctttaatgcatataagaataaaaaaatgcatattcatggcaggactc

SEQ ID NO: 73021 - DNA, 122 bp, Homo sapiens
ggcaaagtagatgcggccataagggaccgtccagtcatccttttcggtttgccagagcgccggcggctgtaccacaaagccaccctggctgtgctggtcctccgcccaacgcttgacgacgc

SEQ ID NO: 73022 - DNA, 122 bp, Homo sapiens
ttacaccgcttcctcctcggaaaaagaatcgtttcctaaactggaactggaactaaagcccgttcggagatccaaaaatctacaatacagaggttatttgtaacctggcgtctccaggctgg

SEQ ID NO: 73023 - DNA, 122 bp, Homo sapiens
aaggtaggggtacgtgcagtgagttgttagctagttgagttgtttcttaatcaaccttggcgtgacttcttcctctggcaccctgttgaggcctctccatcagattaacaggcttcctagtt

SEQ ID NO: 73024 - DNA, 122 bp, Homo sapiens
ccagattggggtacatggccaagggatgcttggccattagctgggcttccacttgctctacgaacgccttccgtgctagctgggctggagagagcttggaaaatagggccgctttcttgagc

SEQ ID NO: 73025 - DNA, 122 bp, Homo sapiens
gtgcctttcccaactagagaattaactcttgcggggcacaaaacagcctctatttctttgcgtccccagcgcctgtttgttgaagactgagttgaaggagtagcaggtggtgttaatttgtc

SEQ ID NO: 73026 - DNA, 122 bp, Homo sapiens
agaaatcctatttaacagccactgatccacatgctagagagtggtcagctacggcaaacccgcaacatgtgacctctgaggtccaaggctgcagccctggaacaaccttcccagcctctgga

SEQ ID NO: 73027 - DNA, 122 bp, Homo sapiens
ctccctctttgctcctgtcattgggaccccacacattttatgccccagccctcctttgaccgcagaccccaaggtctttgcgtatggagcatcgtctaatactgaacaaccccgtgagggga

SEQ ID NO: 73028 - DNA, 122 bp, Homo sapiens
tgtgatccacccacctcggcttcccaaaatgctgggattacaggtgtgagccaccacgcccggccctgggctgggtagaatttcttaaacagaaaaccataaaagagattgttgcagtaaac

SEQ ID NO: 73029 - DNA, 122 bp, Homo sapiens
accctcctgtcccttctcccctctcaccaggcagagacgttgcgtggcaggcggcgatggcgtggctggtggtggcagtaacacttgcagggacaggagttaagcacctggaagggcagcca

SEQ ID NO: 73030 - DNA, 122 bp, Homo sapiens
gaggaaaagttgagctcgtctccccggggagagccgggcaggttctagaacaaacactcgcgctgtatggaagccctttgctgccatctccgcctggccgtggcatctgtgagcgtggcaga

SEQ ID NO: 73031 - DNA, 122 bp, Homo sapiens
gtctctgcaggtcgcttgcctgggagcttctcctgcagagtgcacgggcagatccccctacgactccctgagtgtcctggatgggaccctacccgtccccaacacagggctctggggcccca

SEQ ID NO: 73032 - DNA, 122 bp, Homo sapiens
caaacacacgctagagtggctagaagttctcaaaggatggggtcagtgtaacgagcattccgggtactcttccctggacgcagtgctgaaacgactgcattttatcggcttcagtcttcaag

SEQ ID NO: 73033 - DNA, 122 bp, Homo sapiens
ccgcaaccccgtccctgaaggtggtccatgagctgcctgcctgtaccctctgtgcggggccgctggaggatgcggtgaccattccctgtggacacaccttctgccggctctgcctccccgcg

SEQ ID NO: 73034 - DNA, 122 bp, Homo sapiens
cgcccgcggccctggcttcgggcttcagggagctctggtgcagtctccgcctgtcagtgccggcagtcgtccgcggcgcccgccccggtcccgcactggtgcagccatgtcctcttccccgt

SEQ ID NO: 73035 - DNA, 122 bp, Homo sapiens
gacggcatggagatgctgctgtgctacgaggacgagggtgtctacgtcaacacgtacgggcgcatcattaaggatgtggtgctgcagtggggggagatgcctacttctgtgggtgagtgagc

SEQ ID NO: 73036 - DNA, 122 bp, Homo sapiens
cgggcgcggggcggggtcttgggcgtgggggcggagcctgcgcggggcgtagagatctgacgggtcccagatgcacctgcacccaggtgctgactgccccaccttaggcggtttctctgggc

SEQ ID NO: 73037 - DNA, 122 bp, Homo sapiens
actggcggtgagcacttcccacccccgtgaccacacactagcagtgagcacttcccaccccgtgaccacacactagcggtgagcacttcccaccccgtgaccacacatttacagtgagcact

SEQ ID NO: 73038 - DNA, 122 bp, Homo sapiens
agcttctgattcttctgttgcatcatcctccgtgacacctcataatgcagatggccaccacgcccagccagggcatggacaggcaaccacctctctgcttcaagggcctaattgtaccatat

SEQ ID NO: 73039 - DNA, 122 bp, Homo sapiens
acctggcatgctttaaaaaacccaacactgacaccagagagtctgacatgatgggtgtggcgccacctggcatccggctttcgaaagcgccaccattggtctaatgtgcagccaaggctgag

SEQ ID NO: 73040 - DNA, 122 bp, Homo sapiens
cgccttgcgctcgggtcgcggagttcgaaaagcgaggtgaggcggcgctgggaagctcagcgccggcgtctctcccagccttgggcgctcggtcctcgcccctctgccggaggcgccaggcc

SEQ ID NO: 73041 - DNA, 122 bp, Homo sapiens
tggcacctaaacagaatcagtgacccgggtgctttgtggccagcagcacagaatcaaacccgcatcccagcattgggccacccatctgagggaggccaaaatcatcacagatgctgctgtgc

SEQ ID NO: 73042 - DNA, 122 bp, Homo sapiens
aaagcaggaggaggtggtggcggcgggaagatgtaagttggcgcggaatccgaccgcatccgtgtttcgggggctgcccggcaggacgcatcgtgaagccggtccactcctcagccccgcag

SEQ ID NO: 73043 - DNA, 122 bp, Homo sapiens
aggcgtgcttgggctccggagcccgcgcgctccccctcgtggccgctgctgcctctggcgcgtgacggtccccgaactcgctcgtctcctctgcgctctcctggccgcctcctctccccgag

SEQ ID NO: 73044 - DNA, 122 bp, Homo sapiens
tttgcagcaggcgacggtcccgggcgccacctgcgcgtcggtgggaggctggtccacgcccgggtcccccgacgcccactgcaaagggcagtgggaatgacagactgtaaaccctctcgcct

SEQ ID NO: 73045 - DNA, 122 bp, Homo sapiens
ccattaccaatcccacagactcacccttcaccgcacacatcccgcctctgactcccagctcgattatcaggtcccaaaaccaccatcaccgcttaatgggaaccgctgtcacatccctattg

SEQ ID NO: 73046 - DNA, 122 bp, Homo sapiens
gaaaccgcgagccgtttcctttctcttcggaaatggcagttttgttgtcctggatgaaggcgagcgccgctgcctccctgaatgctgagcacgctggcttcgcggtgcccggaaggaagcct

SEQ ID NO: 73047 - DNA, 122 bp, Homo sapiens
gggtctttctgtggccctcaaagcagcgcccgctgctcctcactgggctaggcctggtagcgagcaaatgcctattgtgggagaagatggtcccagagtttccagctcagagtttccagaat

SEQ ID NO: 73048 - DNA, 122 bp, Homo sapiens
tgccccaggacccaggctttgggctagatccggccccccaggccgctgccgcccccaccgcggtccttggaaacggctgtcgagccacgaagtggacattttagccctaagactacaactcc

SEQ ID NO: 73049 - DNA, 122 bp, Homo sapiens
ccgataccccactagaactggattctctggactgatacattttcactctgtggagctgaccgtcctttgacctagggtcgcaggtgggagcccactggcctgaaagatccgagttttcaacc

SEQ ID NO: 73050 - DNA, 122 bp, Homo sapiens
caaactgcgcagaagcgtactggggacggcgtccaattgggtaagagggttcggtttctacggtgcgtctccggcccaccggccaaccaccaaaccgaacaaagactacagcacccaggata

SEQ ID NO: 73051 - DNA, 122 bp, Homo sapiens
ctccgctgagcagtgaggctggagggctcctacgtcctcccatgactgaaccgtcgctctcgcggtgctgactgctgagcccccgtgccagccctcccaggacacttggaggcttctcctgc

SEQ ID NO: 73052 - DNA, 122 bp, Homo sapiens
gcggcgcgcgcctgccctggcggcagcggcggcggcggcggcgcgtcctcccccgaacgccgtctccagggctgctggctgcgctctccattgttccgcggctgctgcccggggtgggcggc

SEQ ID NO: 73053 - DNA, 122 bp, Homo sapiens
tgggggagcgaggggcggggcgtcggggcagggcggggagccgggggcggggccgagcaccgcggccaatctccgcccgcggcccaaagcgaaaggaagggctggcgagcgcggggccgggc

SEQ ID NO: 73054 - DNA, 122 bp, Homo sapiens
aatgtaggtgctagagatggtgcaccagtagggactgtcactggattggggaaaaaaatccggggctgtccttatctgctcccttaggcaaaatcgttctgtgttagtctggagggtgaacc

SEQ ID NO: 73055 - DNA, 122 bp, Homo sapiens
ccaagacctagaaacagtcatcctgtgacctgaagcagagccatgtgccacaaccaaccacgccacatctgaacccagaggcatcctgtgacacatctgacaagaacgacggcatacagaag

SEQ ID NO: 73056 - DNA, 122 bp, Homo sapiens
cagctaggtgcctccaagaaaccccgccccagaggacccgcacgagttgctgccatttttcgctgaagcccctgccctggggctggtgttcttctctatgattctaccaatcgtcggcattt

SEQ ID NO: 73057 - DNA, 122 bp, Homo sapiens
tccaacaatctctgcaacaatgtagctaacccatcacggggatttgacaaacatggcttccgattgtatcttctttccaattcattttatgaactcaggcaagttccttagcttctttaaat

SEQ ID NO: 73058 - DNA, 122 bp, Homo sapiens
gcccgccctagaccgggctggtgctcccggaaagggggcagcagaggacaccccaaaagacggccctaaagtccccgctagagctccaagtggctggacgctggagctttggtgctgggatt

SEQ ID NO: 73059 - DNA, 122 bp, Homo sapiens
ctgaccgctgtttacaaacacagcctgggggtggggtgggccggccggagcgcgggctggcggggtgggggcggccgcgcgccccggaggacgccaccagcagagaggaacgaggagttggt

SEQ ID NO: 73060 - DNA, 122 bp, Homo sapiens
aagtgctccgcccccgtttcctagaaagattaggtttgcaactcccttgctctctagacccgggcagtctggagttctttgtgtcctatcccggaataacgtgctttgtgatggcgcatcgc

SEQ ID NO: 73061 - DNA, 122 bp, Homo sapiens
tgagtctctgtcacacaagcaccagactgacccaatgccaaacaactagccttcattaaacgctgcctcttctgtgaatgcaggctcagggaccagaccactttgattttaatcccagatat

SEQ ID NO: 73062 - DNA, 122 bp, Homo sapiens
cttctctcttgaagccagcaagaccacgagcccaccgggaggaaggaacaactccagacgcgtcgccttaagagctgtaacactcaccacgaacgtctgcagcttcactcctgagccagcga

SEQ ID NO: 73063 - DNA, 122 bp, Homo sapiens
ctttctacaattttttttttttaagggaatagggtcttactctgttgctcaaggctggagcgcagtggctgatcattgctcaccatagcctcaaattcctattcactgccctcttatatagt

SEQ ID NO: 73064 - DNA, 122 bp, Homo sapiens
gccagcagggtccgaccctcctgctccgtccccgcccctgtcctcgggcccggccagcgccgcggcctctggctccgcctccacacgggcccgcaagcaggcaccgcccccgactctgcccc

SEQ ID NO: 73065 - DNA, 122 bp, Homo sapiens
tgtaaatggacatcatgagccggttccactgtgggccatgctctacatctccactcacatcgtaaacagtccttgtcttggggtctggtctccttgactttttcaaagtttgcccctaacta

SEQ ID NO: 73066 - DNA, 122 bp, Homo sapiens
gagaaaggacactggcactcgggagaggatgcgacaggccactcctgtgacatggcctcccgggaaaggggtctacctcaaactcatccatcatcttgcggatcccacttcctttctgccca

SEQ ID NO: 73067 - DNA, 122 bp, Homo sapiens
gcccttgggagctgacagcccatgggcattaaggcaaagtagttccagtgatttaaaatacggttccaaatacgctaaaaccaacttgtgccaaccagatttacagattggaaatactgcag

SEQ ID NO: 73068 - DNA, 122 bp, Homo sapiens
caccacatcctcagctgtgtgcctctgttccacacagtaggcattcacacatggcaggggcgtgaggagaggaaggagaagagaaacgggcaaaaggagatgcagaaaatgacccagtcaaa

SEQ ID NO: 73069 - DNA, 122 bp, Homo sapiens
ccggctgcaagccctggcccaggcacctcctgtctacctggatgtcctgggctagggggccggcccaggggctgggagtggttagccggaatactggggcctgccctcagcatcccccatag

SEQ ID NO: 73070 - DNA, 122 bp, Homo sapiens
aggacatcctgcgcaaggccgtgcagaaggtgggctgtgtgcgagcctgtgtgtggggctcggggtcacgggcggtacgtcgctgctgtctcgtcagcatggactttggggtggccatgagt

SEQ ID NO: 73071 - DNA, 122 bp, Homo sapiens
cgaaagctggtgggcccaccactggtggcctccatcagaacgctgtcctccttccgggtccggaacatgagccccaggtaccagggcacagagatgatgatgttcaggtcactccaggacac

SEQ ID NO: 73072 - DNA, 122 bp, Homo sapiens
gtcggcgcgggctgctgcagcgggccccgcttgtctcgatggggttgtcctggaggtagtcggccagccacttcaagtggcagtcgcacacaaatgggttttgggctaagtggctgcgagag

SEQ ID NO: 73073 - DNA, 122 bp, Homo sapiens
tgtgtaatgaataatgtttcaagacagaggcaaattgtaacagttactggtgatggtcctcgtgatggcccagtgttaaagagagcagatgttggatctgcaacgggattaacagaaacaaa

SEQ ID NO: 73074 - DNA, 122 bp, Homo sapiens
agaagccagagaagcattcatgtcagaagacaaacactttaaactactattagcatttaccgggatttcatacatttgactatttccaaagggagaagaaaccttgaaaacagtctattctg

SEQ ID NO: 73075 - DNA, 122 bp, Homo sapiens
ggccccatggcctggcgtgggtgctgacctcagtttaaaaccaagggcctgttttcttaccgttggggtacttgtatcaaagcacagatatgaccggtttgtgcggatcggtgtcctccaaa

SEQ ID NO: 73076 - DNA, 122 bp, Homo sapiens
agacagaagaagagggtcacgcacctggggcagagcctaggtggttatttaaaatgagggcggccgagcaggctccccaaacctcccgccggcctggggctcccctgccgcctcctgcaccc

SEQ ID NO: 73077 - DNA, 122 bp, Homo sapiens
ctgatggcttcgggcgctctgcgttcgggaggcctggaaagtcccagctgcgaacatctccgcggccccgtgactcggttcaccgcattgctcagacatccacacctcccgttactttacct

SEQ ID NO: 73078 - DNA, 122 bp, Homo sapiens
ttttctgttccatctaaccagcttttagcagtttaatgccctgcccacccaaaggcatttcgtcctcttctgccctctgcacgggtgggctctctgcatcacttcccaccgctggagaaggg

SEQ ID NO: 73079 - DNA, 122 bp, Homo sapiens
tcgctccgctctgcgccgctaattggtctcgtcaggcggccggcaggagcagatccgagccgtgtcatcctcttagcgccctcacgccacccgccgctcccgccccgtgccccctcccgccg

SEQ ID NO: 73080 - DNA, 122 bp, Homo sapiens
ttatgctactgtgaaagggatcataacagctataccacggggttccaggagggcgcaccacgccagtagctgcacggtggatggcagagcagtcctcgtttgtgccagtcctgtcccaaagg

SEQ ID NO: 73081 - DNA, 122 bp, Homo sapiens
attatgcactgctgaactggtgatgggtatttctattgacaacttccccgccttaagatccgaggaggtttctaaagcatctttctctactgtttacatgaaaccaaggacactgggcagac

SEQ ID NO: 73082 - DNA, 122 bp, Homo sapiens
acacagccagaaagatgccatgcggcagggcacgtgtgtgtgtgtgtgtgtgcgagcgcgcgtgcgcccctgcgatcagcccagcagacagagcacgttcctgtaacgtgttgtgatccact

SEQ ID NO: 73083 - DNA, 122 bp, Homo sapiens
aggctagcctccacgggctgccctctgtgtaaataaagccacagacttccgcccacaggtcgccgcaggtcccgcccgcagcgccgggccgcgggggaggcgggaactggtgctacggccgc

SEQ ID NO: 73084 - DNA, 122 bp, Homo sapiens
ttgacatgaaaagatctggctcatggggcagagccctttccattagcgtggctgggtggccgtgggtgcttctagaggccaaagcctttgtgtttttcactggtggcaggaggaaaattgat

SEQ ID NO: 73085 - DNA, 122 bp, Homo sapiens
cgctgagcgacgcggcggtgatggcaggccaggggcagcaccattcatgggcggcggcggcggcggcgctgcgacccgcggggctgccacccgtgcccctaccacccccgcccctgcgatcc

SEQ ID NO: 73086 - DNA, 122 bp, Homo sapiens
tggctgcaccccttactggctgtgtgaccttaggcaagttttttgacctctctgtgccttcgtttttgaatctataaaatggctatattattacaagttatttatttgatacatttggagat

SEQ ID NO: 73087 - DNA, 122 bp, Homo sapiens
ttagaaaggggaaagatgacacaagcaatagtgaaggctagtggagggaagtggggctttcgtccaaggaagcaaaaaatcataatgtgttattttttagggagtgtctggtgcaggcatgc

SEQ ID NO: 73088 - DNA, 122 bp, Homo sapiens
aggctgagaacaaaccggttaggaaatggcagaagggggttgggacctaggtgagcagcccgtcaggagcccctgggtggcttgcactcctagccccaagtgcaatatacaggtgaggcgcc

SEQ ID NO: 73089 - DNA, 122 bp, Homo sapiens
cgcaaccggttccgccgcgtttgtgggctggtagcccggaatacatttcccagaggccttcgcggccgacgtgcttcgcgcaggaacgcagccgcctcccgactggaggacgcggtagcgga

SEQ ID NO: 73090 - DNA, 122 bp, Homo sapiens
caaacattgtcagaggactggcagtgcataggctctggaaaggtgattcatcaccctgtccgtgaaaaaaaatgttcttcagcttctctctgaggggctggaacagtccacttccctcaaga

SEQ ID NO: 73091 - DNA, 122 bp, Homo sapiens
tactcctgttcccccagatggtgaccatggaggaagacttgtgttgggcccaatggccctcggccagtgtccgtctgccaggtgccagcccccggtgcgctgaagctcaggccattcctgat

SEQ ID NO: 73092 - DNA, 122 bp, Homo sapiens
gcaggagcagaaggaggctttgatagtgaagcagttggaggatgcaatgagggagtaggccgtctgcctcccaaccagcagttccagcccatcacttgctcagggaccccctaatgtcagcc

SEQ ID NO: 73093 - DNA, 122 bp, Homo sapiens
ctaatccttctgcaatttatagttatgtagtctttgagctgcaactgagttttccaccagcgtaataatcacttcctttatttttacctataacaagcagctggattagtgtagtgcatggg

SEQ ID NO: 73094 - DNA, 122 bp, Homo sapiens
gcccctaacactatttcacttgcggcagctcggccctgtaatctgagctgtgaggccccacgttgctgaagcagtcccccacctggagctgtttctgatgaaacttccgggacaggtgtcag

SEQ ID NO: 73095 - DNA, 122 bp, Homo sapiens
caggcttggcggacatcttcgccaggcgggaggacaagggagtgggctgagatgcgtcaacgagctcgcagcctgcacagcctactgatccagagagccccggctgggctggtcctcaagcg

SEQ ID NO: 73096 - DNA, 122 bp, Homo sapiens
cactgctgaattgtttttccaaagcgactgcaccctttcacactcttagcaatagatgagcgtttcggttgttccacatccttgccaaattttgatattttcagtcctcataaaatggtacc

SEQ ID NO: 73097 - DNA, 122 bp, Homo sapiens
gtctccggaggtgagatctttggaggttaattaggattagatgaggacatgagggtacagcgcttatgagtaaaattactgtccttgtaagagtctgaagaggtcaggcatggtggctccca

SEQ ID NO: 73098 - DNA, 122 bp, Homo sapiens
tcatggtgccgggcggcaccatgaagtctctaaagaaggattcccgcctcagaataactccgaccagattattagaggcctcagagaatgtcaaaggttggcgctggctgccttgggcgctc

SEQ ID NO: 73099 - DNA, 122 bp, Homo sapiens
gagctgtgtgccctggtgaggagtggtgtccactttaaggaatgggtgccttctttcaaacggcatggaagcactgcgtggactagtgtggctctgcctccaaccacaaaccagagcagcag

SEQ ID NO: 73100 - DNA, 122 bp, Homo sapiens
aataatgttcacgaaagaaaactccatggttgatgctatcatcttaagtcagacctcagtcgtaaaaatttaagctaagcctatcctaaataaaatttaattaaaatagaaatggggggcgg

SEQ ID NO: 73101 - DNA, 122 bp, Homo sapiens
attgcacacgaacgcccccctcttccccgccccccaccgtaccctctgcagcgccacccgcgtcgcctctccgccgtgcgccaccctgagggctcccgcgattgcatcttcttgagcacagt

SEQ ID NO: 73102 - DNA, 122 bp, Homo sapiens
ttcctagatgggatggcagccgggaagaggcgcgcctcacttcctagatgggatggcggccgggcagagatgctcctcactttccagactgggcagccaggcagaggggctcctcacgtccc

SEQ ID NO: 73103 - DNA, 122 bp, Homo sapiens
ggatcctgtccggggcacacacctgctctttgaggaatccatgagggccttcccacactccgacacacacaggtccacagtcccctggctgacatccttgaggttagctaccgttcagaatg

SEQ ID NO: 73104 - DNA, 122 bp, Homo sapiens
aagcatgtcccccgtgacccagctggctgccacacccagggctggagcctggcgggggctcggtgccagagtccataacattccttggagaatcaacaaagtcaggaaaggcaggcggtgct

SEQ ID NO: 73105 - DNA, 122 bp, Homo sapiens
caccacagagagcggggagcctgcagagagcagggacagcggcttcaaacgcactgtttccgggcaatgtcactaataccaaagtcatgcctcccactggacactcctgggctcccatcctt

SEQ ID NO: 73106 - DNA, 122 bp, Homo sapiens
caaagtactgagattatggacatgagccactgcttggctcctgttttaaaatattttttgcgtggggggttttccagtgagaaccagaaaacctgagacaaattctaaaagagctgtaatgt

SEQ ID NO: 73107 - DNA, 122 bp, Homo sapiens
gatgcttggccaatgaaaagaggtctacccgagagtgcgacgcgcaatgggcgggacttccggcgtctcccctcggcggttgctttcgctgccctcaagagaactcagcttgccggaagctg

SEQ ID NO: 73108 - DNA, 122 bp, Homo sapiens
ttgaaacccgacagggccaggccttaaatttgcgactgacttttcctggatgaagggcctcgaagacgagagtgggagggggtgaaccaactcagctgacccttgtgaccagtccgggggca

SEQ ID NO: 73109 - DNA, 122 bp, Homo sapiens
ctctggtgactcattcacttcctggaagtcctctaggcaacactttcctctcccgagtgacgactcctcagaaggcaggagatcccccccggaaacctttctctctccgtctctccctctaa

SEQ ID NO: 73110 - DNA, 122 bp, Homo sapiens
agaagcattttcaggaaatggagcacaatttttcgaagcttggagcccgagcggggagtgcgaagtcagcagaagaggagcggccggggggaggcggcgccgcagcgaatccccaagtaggt

SEQ ID NO: 73111 - DNA, 122 bp, Homo sapiens
ctggaaagatcggcctatagaggaacttttgagggaggcccaaaaaaacatatgtaagaacggatgaagaaaagcaaaagcaaaaggcaaaaatcagctctccactctacaacaaagtaccc

SEQ ID NO: 73112 - DNA, 122 bp, Homo sapiens
ccccggagcccgggcttccaaggcgaccggggcccccggccgtgcagcccggccccccggcgcatgcccacgccgtatccccctcgcccgtccctcgaggcgccagaggaatccggccccgg

SEQ ID NO: 73113 - DNA, 122 bp, Homo sapiens
taattacatgacaaagttcctggccattagcttttaattttagagtatactttttattgtcgtttgagttttatgtactttttattgtcatttgaattctgcatgatgatagtcttcctttc

SEQ ID NO: 73114 - DNA, 122 bp, Homo sapiens
tgtgctggggctggttttcctccaggacgaccttgctggccacgtgggccaagccgggggcgctcttagaatgtggatctgagcagggagaggtgtgaggtgtcctgagggctgtgggggtg

SEQ ID NO: 73115 - DNA, 122 bp, Homo sapiens
ttgtcgttgtccttttccccagaatccatggtcaggcctagggagccacccctgggtgctcgagatgagtccccaccctcactgaaggtcggtcactggatgtttgtgtgcatcgtaagggg

SEQ ID NO: 73116 - DNA, 122 bp, Homo sapiens
ctgaaagcttcagacagttcctacctttgtggagactatgttctagttgggggagacaaacgtgtaaaccaataaatgagaccccttcaagtgtgataatagccttattttcttcctagcac

SEQ ID NO: 73117 - DNA, 122 bp, Homo sapiens
acccttactgtggactttacatgggctaggtagggagctttaccatcttactgtctacgacgaccctatgaaatggatcctataactaactccatcatggccacgggttggagaatgcggag

SEQ ID NO: 73118 - DNA, 122 bp, Homo sapiens
ttagttatgtcaacaggctgtcaataaaaatcagtaggctggggtcactagagtcactagcgcactcatcagtcctgggtctttaaccagtggtcattgtcaaagctcattagctcgctcta

SEQ ID NO: 73119 - DNA, 122 bp, Homo sapiens
ccaaaaactgtttactgaacgagtgaaccactgaatgttcagttttcagcacatcaagaacgtgttaacaaaatagaaaaaaaaaaaacaaaaactaaacatttgaattactattctaaaaa

SEQ ID NO: 73120 - DNA, 122 bp, Homo sapiens
ctgcgaggggagggtgcccctaccagccggggactgggcttgtgggtggcggcgggggcccgctggggacgacccgcccctctggcagcctcttgcagccggggagccgtgcccactgagcg

SEQ ID NO: 73121 - DNA, 122 bp, Homo sapiens
tggggggtcagttggtaaaggccaccctgcaatgttcatgtggcaaatcaaagtccaagacgggatccccactggattccatggcctcaaatgcttccagtcatcaacttccagctcctgac

SEQ ID NO: 73122 - DNA, 122 bp, Homo sapiens
tagctgactgctcaactacgcataagacaaacagaaaacaaatattaaaatgacagacaacgcatgagaaaggagatgtgtctttgaaggtagaaatactcacgagacttgctcattgctgg

SEQ ID NO: 73123 - DNA, 122 bp, Homo sapiens
tccaaagccccagaatagtccccacgctgcaagcaactcttcgcaattctacagtcaccccgagcagccactgcctagatgcttcctttgaaatgaaacatggtgtgtgtgtgaatgtgcgt

SEQ ID NO: 73124 - DNA, 122 bp, Homo sapiens
gcaagcacacgggagacgtctgtcttcccaagagacagctgggggtaggtggccacatcccggatggtgcctgtgtgtgaccatcacacgcgctctgagccctccggggttcagtgagcagg

SEQ ID NO: 73125 - DNA, 122 bp, Homo sapiens
gaggaagcagggcttgagccaaagctcaaacatctgagcaaaatatatctccttcggcaccgaccatggctctctgccctgcccaggtcagtgcctgagggcacagaaatgtttgaggtcta

SEQ ID NO: 73126 - DNA, 122 bp, Homo sapiens
tttatagcagctttacccataattgccaaaacttggaactaagatgttcctaaatagagccgggggcggtggcttgtgactgtaatccctgctacttgggcagctgaggcagacagtcactt

SEQ ID NO: 73127 - DNA, 122 bp, Homo sapiens
ttgtaggggcgcaaggaggcgggaggagggtggaggtgagggccgggggtggggcgcctccgcccgccagccgctcccgcattaaaatttcatgggcgctgcagcagctacaaagacgacgc

SEQ ID NO: 73128 - DNA, 122 bp, Homo sapiens
ctaacttttagagtcccgagggtcgtcgctgccggggagatctccgccccatttccgtgccgccttgtcctcagggcccaaagccccctgcgctaagggccctgtcccatctctgccctaca

SEQ ID NO: 73129 - DNA, 122 bp, Homo sapiens
ctcatttttggatgtgggtcggccataccaaaattggtccaaattatgggaaaatgagcacgtttttcagtgtaaatggtgtcatctctttgataatatagttcttggtttagtcctatctt

SEQ ID NO: 73130 - DNA, 122 bp, Homo sapiens
aaccagccacagagatagttgcttcttgcaggaagccctccagcatttttggcatcactgcggaggtgtagagaatatccaggaaggacagattcgccaagaaaatatacatgggtttgtgg

SEQ ID NO: 73131 - DNA, 122 bp, Homo sapiens
aaatttgatgctcaccatacaaatgcccagacacgagagagatctcctgggaaattaaaacgcctacacgtagggagaattgaacagaccagggccccagagcctccgcacatggagctaaa

SEQ ID NO: 73132 - DNA, 122 bp, Homo sapiens
gcagacacagaacagtgtataaagcaggcgaaaggaggctctgaatgccagtccagacagcgaagtttctatttgtctgttgtttggttggggagaagacaggaacagaagacaggagtctg

SEQ ID NO: 73133 - DNA, 122 bp, Homo sapiens
tccatgccccctggaacgtgctgtgcagagaggccgagtttctgaaactgaagatgccgacgaagaaggttggtgttgatggtcctgctccgaaatgaatcgccaagtctagaggtcacttg

SEQ ID NO: 73134 - DNA, 122 bp, Homo sapiens
ctagtgaatggatggacagatggacggacggatgcacggatgaatggatggatggagccccgtgcaaaccaaggtttcatcacgtgcctaacgactccgctgaaagtcccagggaagcagat

SEQ ID NO: 73135 - DNA, 122 bp, Homo sapiens
ctcgcgcgctctgactgaggttcggatctgggggtgcttgcctgctccagcagcgcctcccgggcacctgtggcacgttccccatttacgcgagtgggatctccgcgggggggaccctggcg

SEQ ID NO: 73136 - DNA, 122 bp, Homo sapiens
acagccttagaggttgttactatcaatatcccccattatgcagatgagaaaaatgaggttcggagaggttgattggcttaagatcacagtgttgctaggtttggaagcttaccttggaggcc

SEQ ID NO: 73137 - DNA, 122 bp, Homo sapiens
tttccccaacgtgcgggagatgttcaactcccaccggctggggattgagaactcgaccctcggggagtcccaggtgagtggcaatgccagctgccagctgccctacagatccacgccgcctc

SEQ ID NO: 73138 - DNA, 122 bp, Homo sapiens
ggggtgggagagggtgtggggcagcagtctgctggggactaatgtctgcctcccataagccgaccctgccctgatgtggggctctggaggcctttggctcgtgtcccatttgtgacttttcc

SEQ ID NO: 73139 - DNA, 122 bp, Homo sapiens
tgataaatcagcgctgtgaaacactgccaggaaaggcgtcatcagaagcaagtgtttaaacggacctcatccctgccaaggtgagatgaatgtgcagtccccaacgcgtcccacccggaaaa

SEQ ID NO: 73140 - DNA, 122 bp, Homo sapiens
agagaaagtacgtggcaggcaacgcctaaaatatttccttatctagccctttacaggaaacgtttgctgacctttgggttggggcttggcaaggagtgggggcaggaccagtgggaaaatag

SEQ ID NO: 73141 - DNA, 122 bp, Homo sapiens
gctccccacctcccagacggggtggccgggcagagggctgctcacatcccagacgatgggcggccaggcagagacgctcctcacttcctagacggggtggcggctgggcagaggcgctcctc

SEQ ID NO: 73142 - DNA, 122 bp, Homo sapiens
cagctgaatcaatcagtgcatgagtgaaaataaagatgtatgaagtggaagcagtggagacgcaggcttacaactcctgttttttgatagctttccaaaaagttgtgtgaatgtcgcacttt

SEQ ID NO: 73143 - DNA, 122 bp, Homo sapiens
cactgctggacttcttgctgggccattggctccctaaatacacagattattgcttaaaggcgaggatctcctccacttaagtcaaatctcacatgcctcaatgccttttctttttatatgtg

SEQ ID NO: 73144 - DNA, 122 bp, Homo sapiens
gctgaccaaacgcgaaaaggagttatggagaccagggtctgatcaatttggctcacacaacggcagagatatgaaggaggccggatttcgcccaaggctggatctcaccaccccccatcctc

SEQ ID NO: 73145 - DNA, 122 bp, Homo sapiens
cgtttattgctcccacagagaagagaggagagacccagagaggtttaaaattagaggggtcgacagggcacagggaactcctggccaaccatccttaggaaaacaagagaccaggaataaag

SEQ ID NO: 73146 - DNA, 122 bp, Homo sapiens
accaagtggggaaaagcgctgtctgggaaagcgaactacaagtcccagagttcctcgcgccgggggctgtcctcggactgctccaggcattgtaaggctcttctgttggcccagtctgagct

SEQ ID NO: 73147 - DNA, 122 bp, Homo sapiens
ctaagcgcgggtggctggggttgcgagaggcatcaggatccctggcggcgcctgagccagcggctgctaggaggctgtgtccgcaagccagcggggcgaggcgcctgggccctgcgcgtcag

SEQ ID NO: 73148 - DNA, 122 bp, Homo sapiens
ggggagggggaggggcagaggggcgggggctgcggcggccgcggcaactggaggctgcggcggggggggggggggggtgacggcgcctgcgcagtaaggaagagcgtcacgttgggagagag

SEQ ID NO: 73149 - DNA, 122 bp, Homo sapiens
cttgggactttacctgcattagctcatttaagtctcacacatcaacacagatgaggaaatcgagatacaaagagtaagtgtcttgccctaggtcatccagccaatgaacagcagtgccagaa

SEQ ID NO: 73150 - DNA, 122 bp, Homo sapiens
aagcatacacacacatatgcaactaaacagatgttcctattcctcctcctcttccttctacggtactcacaggaaacacatgtctgtgttgtcctaagtccagttactaattagcacgtttc

SEQ ID NO: 73151 - DNA, 122 bp, Homo sapiens
gtcgcgtgagcgaaccgctactccaatgccggaactgttcccggtcgcccagggcagctccggataacgcagcaggcaggggtcacccagaggctgcctccaccctaggcgccgaccgcgca

SEQ ID NO: 73152 - DNA, 122 bp, Homo sapiens
cagagggtggaccaaatgagaggggctccgggacggaacggagcccgcacgcgtaccagccgccctcgccccagccgctgcactttaatggctacctcggcttccccgagctgaggccagca

SEQ ID NO: 73153 - DNA, 122 bp, Homo sapiens
aggccggacgcctgggctgtgccgcctcggcagccaggccgaggaacgtgcaggtgcggccgggagcccgccggccacagctgcatccatgcccttctccgagtggtgatggcggggagagg

SEQ ID NO: 73154 - DNA, 122 bp, Homo sapiens
ggcagcaagagaaagacccccaggctctcagaagcgcccttgcccgctttacctgcttggcggcgcctcctgcggccagttcctcggagcatccacctgtgcagggcccgcgtcctcccctc

SEQ ID NO: 73155 - DNA, 122 bp, Homo sapiens
caaaccctgtcctctgcaatgtgaaatgtgctttgaagtcctttcaccctgaggcttgcccgccttctgctggtgaaagaagctgggggctaggcgcggtggatcacgcctgtaatcccagc

SEQ ID NO: 73156 - DNA, 122 bp, Homo sapiens
gtctcacccagaagagcaggttgaagccaagcagcaggtacttgatgcaccgcaggcccccgcggaagcgccccatgctgcggcccggcggcgggatccccagtccccaggcccgcgctacg

SEQ ID NO: 73157 - DNA, 122 bp, Homo sapiens
gggcaaacagtggcactccttgaatctcacaagccacccttgacttgcatgaaacctctccgtttgagaaccttcgccatgttcacgctgtaagtcatcaaactcagccttctcctgaacga

SEQ ID NO: 73158 - DNA, 122 bp, Homo sapiens
ctcggaagcgggtcagagtctgcgaaagaccagcgaggactcttgggtttcggggcaggccgcgggcgcccacccacgccagcaccgggagccgcgcggcgactcggcgagcccggcaggca

SEQ ID NO: 73159 - DNA, 122 bp, Homo sapiens
aaactgcaggttctttcttctgaattctaatgggtggaatcagcaaatgaaagcagcactcgtcctttttctggctatatagactctaaatatttatccagttgtttatttttagctgtgtt

SEQ ID NO: 73160 - DNA, 122 bp, Homo sapiens
cctctcaggtcgcctgttttcctctcctttctcagctactgtgggtctcctattgctgcgcgtcgcgccaatttctccctccctaggggactagcgccagaagtcgttcctcacccggctcc

SEQ ID NO: 73161 - DNA, 122 bp, Homo sapiens
gtgggcgatcataagtcttttcctacagggctgtgagtacaaaatgaaatgctacgaagtcgaatggatactttgcttcccatcttttccctttaggtcctccagttatttttcttttttaa

SEQ ID NO: 73162 - DNA, 122 bp, Homo sapiens
agctaaggaatctggggagtagccaacccgtttcttacctacgatgaatatctgagcccccgtcccgtcccttctggtggaacgctggccatacaggggattgaggccctgagttttgggtt

SEQ ID NO: 73163 - DNA, 122 bp, Homo sapiens
tggaggcaggaggactactcaagcccaggagttcaggaccaggctgggcatactgagacacggtctctacaaaaaatatagaaattagcccagtgtggtggtgaaccattgtactcccaact

SEQ ID NO: 73164 - DNA, 122 bp, Homo sapiens
ctggatttcagaatcttagatatttcctaaccagagtgcaaggacctaaaagcccttaatcgagtttctaatcacaagcaagatggtcctacattaagggccctttgagagtagcattcatg

SEQ ID NO: 73165 - DNA, 122 bp, Homo sapiens
tgcgcggccccggccgggccagggagcgttaggagcgactggagcacaaagcgccgcagccgttcgcctagcgcagctcccgggggacgcaacgccgcgtcaggccgggggctgacctggaa

SEQ ID NO: 73166 - DNA, 122 bp, Homo sapiens
tcacttggaaacggggctgcggtagccacaaccctccggtagcggtagcgtaaccccgttcggtgatccagccgcacagcgcaacgggtacaaagaaccccactggctaaggccgacctacc

SEQ ID NO: 73167 - DNA, 122 bp, Homo sapiens
ggatggagaacctggcacgctacgtttcgcgggctctgagactcgggtggtgagagtcgccgagatgcgcactgggaagagaaaagagccaggacgcacctgcatttatggcgccatcgccc

SEQ ID NO: 73168 - DNA, 122 bp, Homo sapiens
cacatggcgcatcaaccgcatcgcagaggaagtctgccccttcctcagcccctacggaagcgcccgggctgcaaggccctgccacatggtacggacagggcacagaccgctcggccaagctg

SEQ ID NO: 73169 - DNA, 122 bp, Homo sapiens
ctccgtcctctctgcctcgctctgcagcctgctgctgtgcatgggctgggtggctgggggcggtgacgccgtctcccttccttctttcctccctctcgctgcgcagccaacacggggattgt

SEQ ID NO: 73170 - DNA, 122 bp, Homo sapiens
aagacgtcccgtcatctccgaaagtcctgtgtgcccgttcctggaagatcgcccacccaccgtccccaggggctctcacttgctgcttctatcactgtagaatatttttcctactcttaaaa

SEQ ID NO: 73171 - DNA, 122 bp, Homo sapiens
actcctgctctcctctttctgaggacagcctctccttcaggagtttcccggtcttcagcccgccggggcccccacggaagccccccgcgctctcccgagtgtccaggatgttttccgtggct

SEQ ID NO: 73172 - DNA, 122 bp, Homo sapiens
cacatacacacacacacacttcacactgttcacctgctagtttaaccctatgtttgtgttcgtgaatgagatctgtctactctctcacacttaacataccccctcttttacaagagggcaaa

SEQ ID NO: 73173 - DNA, 122 bp, Homo sapiens
gcgtttctttgaccttggaacctccaggagtggccaggctcccccacagatcacacgcagcgttgcctagaagccggtagctctcccgtaggacgctgggaagcagccagctgttcatgtgg

SEQ ID NO: 73174 - DNA, 122 bp, Homo sapiens
ggcagtctaactgcagagtccatattcctaaacaccattgtgcactgctacctcctgccccgattgctactctcaaccttgcctcgctcagtccttactatgcaatgccacaagaatattca

SEQ ID NO: 73175 - DNA, 122 bp, Homo sapiens
ggcgcatccctggttcccgggcgcatccccggttcccgtgcctctccttccacacctccccgcaagccgtgggagctcccgtcctcgaccagcccagagaggggctcccacagtgcagcgcg

SEQ ID NO: 73176 - DNA, 122 bp, Homo sapiens
ttatcatatcttagactccttttctcttaaatgggtacattacataagtcaacatatggacggtttttttccttttttccttaaaaaatacatttatagaaatgtttctgtttataaaaata

SEQ ID NO: 73177 - DNA, 122 bp, Homo sapiens
gagattcccataaagagaggtgaacttggccgcaacctggccgaaccctcgcacccacggcgcgggcactctaacctggggggctcccctcagggcacgccccgcgccccctttaacccagt

SEQ ID NO: 73178 - DNA, 122 bp, Homo sapiens
accatgagaacggggacgtgcagcatcaacactgagggtgagcgccatgaaaatggggtgcgcgcagtaaacacaggaggtgcgcgcagcctcgtggaggagccccgtgcatgcagtggcag

SEQ ID NO: 73179 - DNA, 122 bp, Homo sapiens
taagctagccctgcctcagaacaaggctggtgatagcacgtgggtgtgggaactcatgtgcgtgggctcagggcatttgtcgccaatgtacatgatcgaagaagcttctatcacctgaaaag

SEQ ID NO: 73180 - DNA, 122 bp, Homo sapiens
attgcggggagggggcagccctatcgtaagtagaggaactctatacacgtttgaaaatatcgctgggctccagggttaaccggtctctaacccattctttactggacctgccaacttcgcgc

SEQ ID NO: 73181 - DNA, 122 bp, Homo sapiens
cctcggcactctcgatctggatcacgtgccgggtggctgccttcagcaggctcttgctctcggctgccagcttggcaggcagccgggggctccgtggggtctggcggggggccgcagaggcc

SEQ ID NO: 73182 - DNA, 122 bp, Homo sapiens
aactagaaagtgacttggagaggtgacatgacttgtcccaggacacagctagctaatgctcgagtccagactcaaacccagctgggactgtcacttgacagtaatccaaagcctgtctggtg

SEQ ID NO: 73183 - DNA, 122 bp, Homo sapiens
agggacgctccggaccaatgagcgggctccaaagaacggccaactggcgagggccgcctacgtcacgtgccagggtcgccgaggcagcgccctgctagtccgcgcctgccgggcgagctctc

SEQ ID NO: 73184 - DNA, 122 bp, Homo sapiens
cgcagcggtggaaggcttcgcgtccgaacgtagcagtgcttccttgttgtcactagagggcgaccgcgcgtaacaggaaagcaaagcgaagggggacctcgctcgcacccaggcttgcagag

SEQ ID NO: 73185 - DNA, 122 bp, Homo sapiens
aggacagacccgctcatctccaagttgaatcagtaggtccagtcttcctccattgacttccggttcctgcgtgctgcgcccaaaagcgctcggcctgcactcggcggaaaggttgttgtcca

SEQ ID NO: 73186 - DNA, 122 bp, Homo sapiens
gcggaggagggacgtctcgcggttatgtaatgcaccggctttctgtgtccccagccaaaccgctctaggactgccggaccctccccgggaagagccatgacccctgacctcggcaagccgag

SEQ ID NO: 73187 - DNA, 122 bp, Homo sapiens
cctgagaatcaagagccaagcatcgggtaggagctgctcaccttggtctgggcctggcggcgcccgcagagccggtcctggaccgagcgaggaggaggggctaataacagaggcggagggcg

SEQ ID NO: 73188 - DNA, 122 bp, Homo sapiens
ctgtccgagatcgactagaagaccctcggaaggtccctctcttctctggacctcactgggcgttcgtttgcccgcgccgtccttccattcggcttgccgggcgcgcagcggcttgcggctgt

SEQ ID NO: 73189 - DNA, 122 bp, Homo sapiens
gagacagtctgcagccactgacctctccagcctccagggcagaggtacagtcccatggagcgtggctgatctgaaggcagttctggcctaaaaggggtcttgtcccttccttgtcctcattg

SEQ ID NO: 73190 - DNA, 122 bp, Homo sapiens
ggcctcaagtgatctgcccccctcagcctcccaaagtgctgggattacaggcgtgagccacggtgcctggcctaaaattgctaatttttgacataaggcaatttttttcttttttcttttct

SEQ ID NO: 73191 - DNA, 122 bp, Homo sapiens
aggagctgtgccagagtggggagccccgaccgacccacaaccagcagcctcagcaagagccgctgactgaaaacgcgttctccccgacacgttttacggctgttttccgggtcttcggtctg

SEQ ID NO: 73192 - DNA, 122 bp, Homo sapiens
tagctacgtggagaaggggactctgctgtgtttgttataatttactacagcaattcatttcggggagcaacagctggaaaataacagtatgccagatataagtgataccaacccaccccaaa

SEQ ID NO: 73193 - DNA, 122 bp, Homo sapiens
tccccgccgctcagtcttgcagggaacgcgccggacctgagggcttgtggtcgcgagggccgtgagaggcagcagtcagctgcgccgcgctgcgcttccccgggtggaggcggccggggagc

SEQ ID NO: 73194 - DNA, 122 bp, Homo sapiens
gaatgttcaagacgttctccataacctcatagcagcgggctccagcggccatgaggagtacgaggagtattttccttgacttctaggagtatgatgagtattttccttgacttctctccact

SEQ ID NO: 73195 - DNA, 122 bp, Homo sapiens
aggagagtgggggagtgaaaacctacagatttaagggtggaactctgatcttccttttctcgccctgctctcagattaccagaaggcaagatattgaaggattcttcttccagaccccagag

SEQ ID NO: 73196 - DNA, 122 bp, Homo sapiens
aacagcggaggaggaggactctggcgtgctacaaaggattgcacaactcgaggctgggagcgcggagcgcccagcggccggccggcgcgcgcggcaccgcggcgagcaggaaccagctctac

SEQ ID NO: 73197 - DNA, 122 bp, Homo sapiens
ttctgtgcagtgctcaacatacagatgagaatactgaggcacgagggacagcctgtgacccggtcaccgcgctcaggaggacgtggttacctgcggtcctgacggcgctgactttttagaat

SEQ ID NO: 73198 - DNA, 122 bp, Homo sapiens
cagcacgagggaagctcggggtgtgagccgcgcatcgggggcctcgaatcggaagggagacgtcgctcgctgattggtcccgcctccccagtctagcgtgaggcgaggcggggcgcggccgg

SEQ ID NO: 73199 - DNA, 122 bp, Homo sapiens
aggcctcctatccagaccaagagcttttcaggcccagcatcccagagcctgcatccacggcgtggcggccagggtttcgagggctcccgcggtttgggcgctctgcccctgcgctccccaag

SEQ ID NO: 73200 - DNA, 122 bp, Homo sapiens
tgaatttcacgttcttttacctcatattgtatcatcccaacaaccctgtgatctagggtgcggcctggaggacctgactatcacatatatttttgacacgaggtttgcccaatctggtttcg

SEQ ID NO: 73201 - DNA, 122 bp, Homo sapiens
acgacgtcacgtgcgctcccggggctggacggagctggcaggaggggccttgccagcttccgccgccgcgtcgtttcaggacccggacggcggattcgcgctgcctccgccgccgcggggca

SEQ ID NO: 73202 - DNA, 122 bp, Homo sapiens
tgaacgccccgtacaaatctcaaatctctgaatgccagtagccaaccactaagtgaccttcgtggctaccagctcctaagtcctcacctccttccccagtgctgtgcctgtggctgtggtgc

SEQ ID NO: 73203 - DNA, 122 bp, Homo sapiens
cagcagggctgcggagggcgagcggcccaggaaggctccttccagcacctgaagggggaacggcacagcatgcaggtgctctgcccacaacaagccagaccccttcccgtctcagccctggc

SEQ ID NO: 73204 - DNA, 122 bp, Homo sapiens
tttgaaaaatttttataccatttatttattattattttttttagctcctgctcaaagcctcgctggactaattttaatggtatgttggttaataacatgccttcgccgtaactaggggatag

SEQ ID NO: 73205 - DNA, 122 bp, Homo sapiens
gatttggttgggtcccagcggagccttagcgtcctctccggcaaaataacaaatgtccgtcgtgcagggcactttcttcgggaaggactcctgggagctcaggagtttgcatacgaagccga

SEQ ID NO: 73206 - DNA, 122 bp, Homo sapiens
cccggccccacccacaccagctcaggctgagagaatctcacagggcttcactgggtcatccgtgaccagctttggtcggttcctgccttggcgggaaaagttgacctacattgcgtgccagg

SEQ ID NO: 73207 - DNA, 122 bp, Homo sapiens
ccacagcacaagggggtggaggtttggccctaaagcttcaggacaccaaagaaattcagtcgaacagcccaccagttctctccatagggacctgggtcccgtgaatgctggttatctcacac

SEQ ID NO: 73208 - DNA, 122 bp, Homo sapiens
caaagagcagatgtcttggaggagattaagcaagttggaaagctcattcatagaagaaaacgattttttaataaatgcttaacccagttcaacatgaagactgggatttggaatgccttaaa

SEQ ID NO: 73209 - DNA, 122 bp, Homo sapiens
cagttaggaggctactgcaagtgtcagtaaaagatcatggctaggcctgaagatgggagacggtggagaaatctgtgacagaatttgagattttgaaagtaaatataaaagcacttggtgag

SEQ ID NO: 73210 - DNA, 122 bp, Homo sapiens
actagaggcccgggaggagtctgcgcagccgcagaagggcttgcagtggcgcctgccgggcgctgagggccgcgggagccgccgggttagccccaccccgaggggtcagggtcagaggccgc

SEQ ID NO: 73211 - DNA, 122 bp, Homo sapiens
atcctatcatctatactttaaggaacaaggatatgaaagaggctctgaggaaacttctctcgggaaaattgtgattcctatggacatgatttgcaaggaattcattataagccaggtagctt

SEQ ID NO: 73212 - DNA, 122 bp, Homo sapiens
atttgagtcactttttcttgtgactcacttgtggcttcagggcctgctttggcccaatcacgtatttaccattgacatttgatgatgaaatcctgctgtgcgcaactaactttatggcttgg

SEQ ID NO: 73213 - DNA, 122 bp, Homo sapiens
caaggcctctcccctgcgccgactgcagaccaaccctccaccaggagcctcgcgggggggcgccgtgggcaccgcagccaggtgcaggcgcctccgcgccctcactccccacgccgaggagg

SEQ ID NO: 73214 - DNA, 122 bp, Homo sapiens
agctatgggacctaggcaaatacatcgtctccctgaggttgtcttctcatctgtaaaggacgctgtggtggtggtgtgagaataaatgagacatggcaagtgtctggaacaaagacgctgtg

SEQ ID NO: 73215 - DNA, 122 bp, Homo sapiens
ggacctgggccacctctctgtgcaggcgcgagagctccgcctcggcagtccgcttctccccgtgcacttgcatcagctcctgccgcagctccttcagctccgagtccagcctcttcctggtg

SEQ ID NO: 73216 - DNA, 122 bp, Homo sapiens
tttgaacggaattgtgaatagttagggtggaatcctgcagatagagccacctactgcacccgcggcgctgggtccttccgggctgcaccggcggcgggtggcgctggaggaaggagagttcg

SEQ ID NO: 73217 - DNA, 122 bp, Homo sapiens
cgactccgctttcgcgggggctgctggggcgtaggtgtcggggacgcgcgcacgggcgcgcgcagctgttgacgcgcttcttagctggtgcgcgccggagcccaaattccaagtggaaactg

SEQ ID NO: 73218 - DNA, 122 bp, Homo sapiens
ataactagggtgtgagtggagttattgtgtttagtctaagaatgaagaaatagcagtgttcggtgaagtggaatttggtgaggcatatacaaaccagaggtagaaagtagtggatttttgca

SEQ ID NO: 73219 - DNA, 122 bp, Homo sapiens
aattcgttgcttccgaaacgcagccggcagcaggtactcgagatgagtagtgtgagctcccgagcacccgtaggtcggattatctggtaaggcaccggaagtgaccgcctcgcggctgcttc

SEQ ID NO: 73220 - DNA, 122 bp, Homo sapiens
tgttttacagacggggaaactgaagcatagagagcttaatggaggaagagatggaaggctcgtgccatgatttggtactgggtcatctgactgtccatgcagttagctacgcattctgcaga

SEQ ID NO: 73221 - DNA, 122 bp, Homo sapiens
ttgaacaaagtagaagaaagaatgaaagaattgagtcaggacagtactgggcgggtgaaacgattaccacccatagtgcgaggagagccatcgacagatattggcccaccgccgatgggcgc

SEQ ID NO: 73222 - DNA, 122 bp, Homo sapiens
cgggactgagaccctgtcggggttgggggatcccgcggcagggcgaggcagtcggataagcgctcctccagtccctgcctcgctctggaccctggctaggctgctagtgatcctttgggcct

SEQ ID NO: 73223 - DNA, 122 bp, Homo sapiens
tagttacctgcccaacaacacagggagaggcagtaacttgaccggctccgtcttcggcttcgttctgtccttttggcagcctgaattggggtcctgagcttttactttcacaccgtcctcca

SEQ ID NO: 73224 - DNA, 122 bp, Homo sapiens
cccctctgccatcactgtacctcacgtggcctccaccacagcacgtcatgtctgccattgcgtgtgtgcccattacatggcgagatccttgaagacagagactcattccccgtctgcctccc

SEQ ID NO: 73225 - DNA, 122 bp, Homo sapiens
cacttttacaatatgtaaagtaattatttagtcacagttgcatagctaccagtgcccaaccgtaggggatgcacccagttaaacacagacaaacgcaaggacatggcatcacaggtcctgag

SEQ ID NO: 73226 - DNA, 122 bp, Homo sapiens
gcatccgcagtcctgtttttgtatttcgcccaagatacacccctgggcaacctcagggtgcgaggaacccagctctgcctcctgctccccgcggctcctgtactacccaaggctcgcgatct

SEQ ID NO: 73227 - DNA, 122 bp, Homo sapiens
ttgggcacagaaaaccaaccatctgaagtgttgattcataaaatgagttccatctttccacgcaggcttcagctgccttccagggtgacatccctttttatgagggggaccattctttggca

SEQ ID NO: 73228 - DNA, 122 bp, Homo sapiens
ggcccacagcagaggcccggggggcacatgcagctcacgggagcagcacagatgcttggccggcggcaggccctacaggagcagcagcggcccagggcatgtccctggggtcaggggtcaga

SEQ ID NO: 73229 - DNA, 122 bp, Homo sapiens
caggcagggccctgacagcctgggcaggctcagagggagggaggtgggaaccaagagacccggggagggctcccggggccaagacccaggtccctgccctgcacatctgccaagggacttcc

SEQ ID NO: 73230 - DNA, 122 bp, Homo sapiens
cccaggagagtctagccagggcatttgtcgtgagctgccagcttgactccctagtgtactcgtctctacgcgcctgtagtttgactccatgatgtatgaaaataaacgcgctttgaccaagg

SEQ ID NO: 73231 - DNA, 122 bp, Homo sapiens
agatagaaatgaaccatctattaactcccttctccaggtttagtgagttatagtcctcctcgttttaaaaattttggaggtgggctgcagttccatcaaatgggacaaaacagagtgcctgt

SEQ ID NO: 73232 - DNA, 122 bp, Homo sapiens
gtcagctttgtgcttccacttatgtttcctattggggccccttcctgtgccctttgtcctcgtctcactgacaggttgccttggagatggggcagaggggtgggattatcatggcccgatcc

SEQ ID NO: 73233 - DNA, 122 bp, Homo sapiens
gttaataaacactatttttgttcctagtcgatagatatttttgttcctagttgataaagtcgatagataagtggctcatctccattacataatctggtgagttgttgaaggaagttttatac

SEQ ID NO: 73234 - DNA, 122 bp, Homo sapiens
ctttactaatcacccatgccttgtaagaattcagttagttgactttttgtactttataagcgtgatgattgggtgttcccgtgtgagatgcgccaccctcgaaccttgttacgacgtcggca

SEQ ID NO: 73235 - DNA, 122 bp, Homo sapiens
agggaccaactgtttccaaggcacagccagaggagggcacgcacctcaccttcctccctacggggctgtggagaccctgcctagtcttccttgaagcacaggaaagaggcttggtctggttg

SEQ ID NO: 73236 - DNA, 122 bp, Homo sapiens
aaggaggagagattttaaactttctggcacgtttgcaaagttacacaagccgttctggcccggccgcccctcagctatttgttcacgtaatgcgattggaaacgtgcaaggcggacagctcc

SEQ ID NO: 73237 - DNA, 122 bp, Homo sapiens
aggagtgaaatctccaaagaatacatgatggcatctatgaaatcattacctttaaactcacgccagtgccagagaatatttgaaaattgttgtgggttttttttaaaaaaaaaaaaaaaaaa

SEQ ID NO: 73238 - DNA, 122 bp, Homo sapiens
cccccgctacacttccgcaacggagctgcatggagcgggccgaccgggggagtcaccgcgcgctccaggagcgcccaggcggctgcagctgcagcaggtcccttccccgccccctgcgctcg

SEQ ID NO: 73239 - DNA, 122 bp, Homo sapiens
gggtcccgggaaaacacgaaggagtagctgtcagcacaggtgccatcgaggttcaggaggcggcaggagtactgcacggcatacgtgtcgtagtctgtgtcgacgatccagtggtcatcatc

SEQ ID NO: 73240 - DNA, 122 bp, Homo sapiens
taaagtaacttctgcccaatcttgggcagagtttctgagcaaatctgtgctggtgagtcgcgaaacagcagccctggctctcttggtggtccggtgtgtggtggggtcagtaattcacactc

SEQ ID NO: 73241 - DNA, 122 bp, Homo sapiens
tgcaccgggagctaaagtgtcagcccctctcgggggccatggcaggagcccaggcagaagcggaatcaccgcccagtccccaggcagagagggttttggcacaggcccctcccaggctttct

SEQ ID NO: 73242 - DNA, 122 bp, Homo sapiens
tccacctggcggccagtaagtagccggtccggttaagtagtaggtgcgctaagagctccccgcgcctcttagcgcgccgtgtacgcgcctggaggcagggaccggggacgcggagctgggcg

SEQ ID NO: 73243 - DNA, 122 bp, Homo sapiens
agatgtgaactttgcgattctgtgaagaggacggaattctgaaatgccccctgcatttcccgcccctcggagagtcgccctgtgtctgcccctcccttgggtgtgggcggaagcacgaattg

SEQ ID NO: 73244 - DNA, 122 bp, Homo sapiens
cactctctctcacacgccccggcggcaggtcctgaaggtggccatcctggccgagaagtacgccgtggactacagctggtacgtggacaccatcctcaacctcatccgcattgcgggcgact

SEQ ID NO: 73245 - DNA, 122 bp, Homo sapiens
ttctgtttgcttactccctatccgggggcccaaggcgctgtctccgccgcccaagccccgcgtaaacctgggtgacctcggagacatccgttggagcatgagttcccgacatcaggcggcgg

SEQ ID NO: 73246 - DNA, 122 bp, Homo sapiens
gctgagagcgaccagcctcggcggcacctttcctctttctggcttttttcaggtcatccgcgcacccctgcgtggcaagggcggcctggaccccaccaaatccctccgcagctgccggggcg

SEQ ID NO: 73247 - DNA, 122 bp, Homo sapiens
tgttttacagaagtaatctgctctgccgttatcctcagccattgtgagctgataatgagccgggagagcagaacaaggcctgcgcagggctgccacttctgatttcattagtctttcactgc

SEQ ID NO: 73248 - DNA, 122 bp, Homo sapiens
tctgggggtgagacccagaaatctgcgttttattaagccctccagccaattctcatgtaccgtgaagtttgacaacatttggagtaaaccaacaatgaggaacctcatgtaaaatgctactt

SEQ ID NO: 73249 - DNA, 122 bp, Homo sapiens
aaagagctatatagagaaatttctcctataaatgattcaggagctaagcctagaaaaatgcgaatctgcgaactattctccctcagtcctctatccccacccccagagtcactaaagaaaca

SEQ ID NO: 73250 - DNA, 122 bp, Homo sapiens
cacagcttgtggcggtgaagccgctcagatggcggaggccttgggtatctctaagcagatcgctaggccgcagacctcggagctcgtcttgggtcacttttatttattttttttgagacgga

SEQ ID NO: 73251 - DNA, 122 bp, Homo sapiens
cgccgacgccttgcccgtcgatgccttgcccgccgatgacttgcccgccgatgccttgcccgccgatgccttgcccaccgaaacccagttaccattgctaagcgcctgcagtgtactggaag

SEQ ID NO: 73252 - DNA, 122 bp, Homo sapiens
ttttatatgtccttctgagcacagacagggtatttctatgaagttacaaagctgcaatcccgttctcatgtgcagcaccacaggttttgctttcaaatatctgcaggtgcatcctcctgcac

SEQ ID NO: 73253 - DNA, 122 bp, Homo sapiens
gtctttgtccccagccctggagccatcctgcagagctactccagctgcacaggtcctgagcggctgcccagcagcccctcagaggccccagtccccacccaagccacagcaggcccccattt

SEQ ID NO: 73254 - DNA, 122 bp, Homo sapiens
gacgaggacctagccgagaggtcgtggtctggacggaaaccaggctgcagcaggaccaggcgccaagggcgtggctggggagcgatggagacgctcggaaggtggggagcgggggacggaga

SEQ ID NO: 73255 - DNA, 122 bp, Homo sapiens
ggcagaggcggctgctcgtgcctgggtcacgtccctgcagaccatggccgagaagttaagcgggtctggtggcccctggggctgccaccccatttgggtcatctggccactgccagaagccc

SEQ ID NO: 73256 - DNA, 122 bp, Homo sapiens
tggccaggcagggacccgggtagatcctctccagttctcaccaggacaccccagccttaccgcgccctcctggactacccagcagccccgagttcgagccctccccaaccccaggccctccc

SEQ ID NO: 73257 - DNA, 122 bp, Homo sapiens
caggaagtgctaacaatctggaaacagcctgtgcctgaagaagagctcaattcagcatgacggtagaccaggctggtactgtaactcttggttctgctcagaagctggtcttaacgggctct

SEQ ID NO: 73258 - DNA, 122 bp, Homo sapiens
cccagttgaaggtcatcccttgcctctctggggcccacaggtcgttttcacgttagggctcggaggtcctcagaaagatgaggttccagacgagaaatccgcctgaggtcacaggtaaatta

SEQ ID NO: 73259 - DNA, 122 bp, Homo sapiens
agagtagtgtggagtctggggcaggtcaccccgcatgggctcagaacacttcccatcctccgcagtgtaaccagctctttgagctcctgcaagacctggtggaccatgtcaacgattaccat

SEQ ID NO: 73260 - DNA, 122 bp, Homo sapiens
gaaacagaccgcaggctgctgcgggcaggggagagacaaacaaaagctcagattcggctccgctgaccttgctcttgtaaccccgaggaaataaaccactgcccccgcctctccagccgcca

SEQ ID NO: 73261 - DNA, 122 bp, Homo sapiens
tgaggggaagcagcttcgtcatgcgtgatggtgtctgccggagtcggggctaatccccaccgcacacacaggcacacacaggcaaacgcaggcacacgcaggcacacacacctccaaacgct

SEQ ID NO: 73262 - DNA, 122 bp, Homo sapiens
acgttgattctgaagaatattctgtaataaattaaactggttgtttcctctggcagtttccgttttcattcccacaatgttattcattgtgggattgtgattcgtcagcatgtgctaactgg

SEQ ID NO: 73263 - DNA, 122 bp, Homo sapiens
gtgacctccagtggagaccccaggcggcagcatcagtatttgatcggcccttcgtcagcacgctgccagccctggccggctgggttcgccaggcatcacccgctcggctctgaagcggacgc

SEQ ID NO: 73264 - DNA, 122 bp, Homo sapiens
gcccaggacggggacctccccttagtccgtcctcccaccgccgggccctgccccgcatcccggccttatgcactgcccctcccacccggccccgcccaggcacggccgaccccgccccgggc

SEQ ID NO: 73265 - DNA, 122 bp, Homo sapiens
aattctgagcagtggtttgttctctgggccagtaggattttatgcatgctttttgtgatccgtgttcaaaatctgcattgccaacattgcagctccaatgtaagcttgttattcaaataaat

SEQ ID NO: 73266 - DNA, 122 bp, Homo sapiens
gagtctgaagctggctttctcttcctccagagaggtggcccatggcagggcttgaattctcgccaggtggagcttgctggaactccagcttcactgctctctcgccgtgtggctgtgtgacc

SEQ ID NO: 73267 - DNA, 122 bp, Homo sapiens
cttccagtagctgcgaactgattttcacctgtatcaggcaccactccaacttggattttccgtacatcataatcctttccattcaccttcaagattctatcatgttgccatgagacactgtt

SEQ ID NO: 73268 - DNA, 122 bp, Homo sapiens
ggtggatgcttgaggccagggcctctatgtcagacagacagggcgtggtgctgaccctgtcgtccctgccacgtccccagtggctcctgtgaccacatcgaccagggtgaggacctgagaac

SEQ ID NO: 73269 - DNA, 122 bp, Homo sapiens
gcactgtttgcctaacatcggtttgtttggaagcagaggcagctgttgccatgattggtacgtaggccactggcctgttgtacagtgtcaaagacattaaatgctgtgttgcattatagtca

SEQ ID NO: 73270 - DNA, 122 bp, Homo sapiens
aaataacgtccaatcagagtaggcgtagatgtttctctcatccaatcagaacgtgaagtccgagaaccaggcctgcacaaccccccagtatataaggtatgctaagggggcgtcgcgctgtt

SEQ ID NO: 73271 - DNA, 122 bp, Homo sapiens
attcaaagttcttgtctgtttttttcctttttcctttacctaattcctcttggcacagaacgtaacttcagataatcagtcctgccctgtatataagagtactcatattcaagaggacagta

SEQ ID NO: 73272 - DNA, 122 bp, Homo sapiens
ccccggggcagcctgagcgcggggttccctcggctgcgggctgggagtctggtctgggcccgcactgttgtcccgggttctgacaccgtaggctgagccagaccccggagaccctgggttgc

SEQ ID NO: 73273 - DNA, 122 bp, Homo sapiens
ttttaaaaaggccatctcgactgccgcgggggtcgcgtcctctccatccccgaccttggacgcaaccccgggcttgggtcccccacgatctagacagaaactcgttgtttctcgtgctccgc

SEQ ID NO: 73274 - DNA, 122 bp, Homo sapiens
caccctcaaccctcctcttctgaacatttgctgtgctgccttcattcccctccttcagcacggaagccctgaattctgtctacccgcttgggcactgactcctcgcagcccagcacagagct

SEQ ID NO: 73275 - DNA, 122 bp, Homo sapiens
cgatggcccttgagctttcctccaccctagtcttgccgcctctgtaaagtgcgagcttttcgggccggcccactgggcacaaaagccccaaagggtctccgcccccttcttccattcctgag

SEQ ID NO: 73276 - DNA, 122 bp, Homo sapiens
cggcggccctgcgggcggccgggaggggcgggggcagcggccgccgccgtttgatggatccgaggatcgcctggtttcagccagagcagctcggaccgtccaacagtctgtggatgcagatc

SEQ ID NO: 73277 - DNA, 122 bp, Homo sapiens
ataccagcctggcaacatggcaaaacctggtctctacaaaaaacataaaaaatagctgggcgtggtctgtagctgtagtcccagctactcaggtggctgaggtaggaggatcaccttagccc

SEQ ID NO: 73278 - DNA, 122 bp, Homo sapiens
ccactgagcaccaggcttatgggcaagccctgatcttcacagcaaccctgagggtgcagacgcgacccctgagagcaaaggggccttgaggccagggggttgcaggagtggcctagtcctgc

SEQ ID NO: 73279 - DNA, 122 bp, Homo sapiens
aagcaaaaggagaaaatatacattggggaccactgatatctctgccacatgcacacctaacgaagagaaaacacaatgttcagatgacattttgcaaaataataagttggaggattccagct

SEQ ID NO: 73280 - DNA, 122 bp, Homo sapiens
atccgctacatcggccacctatcggccgtgctgggtctcagcgaggagagtctgcagtgccggcgcaggcagcgcggggacgcggggtccccttggggctgcccgctgtgccccgaccgtgg

SEQ ID NO: 73281 - DNA, 122 bp, Homo sapiens
cgcgtagaactgattgtaaacccaacttcccgcctcggagcgagccgcggctcggagtagcgtcattcgaaagccaccggagatatcgagagagctccttaactgctcactgagcaaacttc

SEQ ID NO: 73282 - DNA, 122 bp, Homo sapiens
tctcagatgatccaccacctccatctcccaaagtgctgggattacagatgtgagccaccgcgcccagccagggggttagggttttaacttacagatgttgaggggactcaacccagttctta

SEQ ID NO: 73283 - DNA, 122 bp, Homo sapiens
aacatagatgacaatttgatggctgcaggaaaccaccatggcatgtgtatacttatgtaacgtgcacgttctgcacatgtaccctagaacttatagtttaaaaaaaagtttgctttggcttt

SEQ ID NO: 73284 - DNA, 122 bp, Homo sapiens
ggtccatgatctgtggcccatgcacggtggtccatgatctgtggtccatgcttggtggtccgtgctcggtggtccatgggactgatcctgcacaccatgttgttttcctataacttacgtac

SEQ ID NO: 73285 - DNA, 122 bp, Homo sapiens
cacttggtacagcccggcaggctgacgctgccgccgagggcgccccggctaccgccaaaccgtgacaacctcggtgtgcccggggcccccatctggaaccggccctccccgggactccgagt

SEQ ID NO: 73286 - DNA, 122 bp, Homo sapiens
atgcgcgccgcggccccacccctgcgccgtgccccgccccgcgcctcctgtcggcgcgtgcgcattgacttacccgtgccgcgcggacgcactactgtcatttgccgccaaaaccccgcact

SEQ ID NO: 73287 - DNA, 122 bp, Homo sapiens
gggaggggcgggttcggggccccagctgggcacgggtcatgcgcgccgccgccgctcctgcgggcccccggcctgccccgcccccgcccccgcgccccacgtgggccccccccagcgcaaat

SEQ ID NO: 73288 - DNA, 122 bp, Homo sapiens
agggcagccttgctccctcttctttaacaccgtttaggatttctgtgtagttacccagagcgacattgggtgtcacctttgagtcacttgaagccagtttcccccagaggttgatgaatgcg

SEQ ID NO: 73289 - DNA, 122 bp, Homo sapiens
gggcgggcggcggggccgggagggggcctcggctggggcgggcgccgggagggaccgagtcggggccggaggctggccgcgtgcccaccgggccggcgccggggcgagcctgggccgcggcc

SEQ ID NO: 73290 - DNA, 122 bp, Homo sapiens
tcatttggttcttgcacagtaatgtctaaatcacataagaaatgcattgaaaaaaacaatcggggaaaaaagagggagtaatattggctagcacatctttgaatgcatctggaaagaaaaga

SEQ ID NO: 73291 - DNA, 122 bp, Homo sapiens
tctgattacatatccaggcctgaggaccacaccagtgttgtccgctttgacaaagatgaacgggagaaactgtgtcggatagtcataattgatgactctttgtacgaggaggaggaaacctt

SEQ ID NO: 73292 - DNA, 122 bp, Homo sapiens
taagtggatgagcggtgtgtgacacacccgcctcagcgtcgcccggagtccgcaaggctgcggctcaccgttctctgccccatagctggcattgtggagtgaaagggaacgtgggtggagga

SEQ ID NO: 73293 - DNA, 122 bp, Homo sapiens
accttcggacttctcattggttcttagggctcattgttccaagggcgcgtccaattagcgcgcagcgttagcgggagagcggaagaccccgcctcctcgcggctctagggccggcgcggtga

SEQ ID NO: 73294 - DNA, 122 bp, Homo sapiens
atgattgtcctttttgatgtattattgtccttatgaaactgcaggctagcagcccttccccgccaaacaccaacctcctccccacagcagttatgtcttagagcagcaattcattatcagag

SEQ ID NO: 73295 - DNA, 122 bp, Homo sapiens
aagtagagaggcagccgggagcctgccttctgtgttctcggtgcaggggtattctgagaacggcccctgctcacacgggtttaaaaggaactcagtgaccacagacggatgagaacagcgga

SEQ ID NO: 73296 - DNA, 122 bp, Homo sapiens
tgctattgtgtctggtgatctctcttgatttctatcatggaagattccaagaacccaggtcgctgttaacaatttcaattaaaatattaaaaaatttaaaaatcacagtcagccataggact

SEQ ID NO: 73297 - DNA, 122 bp, Homo sapiens
ccatcaactgtcaatcaacatttattgtcagaacactcttcacagcattggttccaatcccggaaaaaccagactctgtgcttcccaattatcacaggcaccggcccaggagaggtgagaag

SEQ ID NO: 73298 - DNA, 122 bp, Homo sapiens
tgagccatggggtggggtgtcaggacagggacaagcagcctctccctcccaggggatgcacgactttcttcgtcttgctggagggtcagacagaaggaattcaagcattttgatgcgcattt

SEQ ID NO: 73299 - DNA, 122 bp, Homo sapiens
gacacacacctcttgagccacgtggactggctggaggccctgcacggtcagcggctgcaccgggccgggtttgggcgcttgtggagtggcctggaccacagatctctgggaggggaaaggca

SEQ ID NO: 73300 - DNA, 122 bp, Homo sapiens
tccttaactctaggttctcctttttgcttctaacctttgactcttatttttttccacagccgtcatggaaatgatgagtcagaagattcagcagctcacagccctgggggcagctcaggcta

SEQ ID NO: 73301 - DNA, 122 bp, Homo sapiens
ccgccgccgccgccgccccgcccccgagtgcctcatctgcatagccccaccccagcgccgcgcggtgtcctgggaaactggggcccacaacaaagggcaaagcaccgccccgcctccgcgca

SEQ ID NO: 73302 - DNA, 122 bp, Homo sapiens
gaaaaagcgttttttttttcataagccgttgaggataatttaacccccatcttgacaggacgtactaatgaccgctaatggatacattcttttaataaatgaagaggcacaagaaaattgcc

SEQ ID NO: 73303 - DNA, 122 bp, Homo sapiens
ctcagtttcagaataaaatttaatgaatgttatgttgaagacatacaaaattaagagagacgggtatattttagggagaaactcctatgtatgctaaaccggattgagaatctctacatttt

SEQ ID NO: 73304 - DNA, 122 bp, Homo sapiens
ggacgggacctgcctcagggccactttaaactcgaagggactcacggactctcacccggacgtctcaatttgctctgggttgagaaagaggggccgcaatttccaggtctgtggggactcaa

SEQ ID NO: 73305 - DNA, 122 bp, Homo sapiens
tccggacacccggtagggcggagggcccaacggtggggtccgcgctcaccgccttgagcccgcccctgcgcccggcgccctcagcccacgccccgcccagtcccccaggccctagcgtttac

SEQ ID NO: 73306 - DNA, 122 bp, Homo sapiens
ggacttcggccccttttctgtaatgtcttcagtttgtactctcagttgggccatgagacacgtgtgcactgtccctgcttctgtaggatattaagcatccatttaacctgtgctttatgacg

SEQ ID NO: 73307 - DNA, 122 bp, Homo sapiens
taggggaggcggagtagtgtctgaggttacgaccaagtgggatgtggccgctgggctggccgacagccgcgacgagcaccagaagggttccaggtgtgcactcaccccgggcttcgaggggc

SEQ ID NO: 73308 - DNA, 122 bp, Homo sapiens
cttgcgatccgcccgcctcggcctccgaaagtgctgggattacaggcgggagccaccgcgcgggccttaatttttattttagtttacttttgataaggagtctcgctctgtcgcccaggctg

SEQ ID NO: 73309 - DNA, 122 bp, Homo sapiens
tataacaaagcatctcttatagattctatatatcctattggttctgtttctctggagcaccgtaatacaatgaccatgtctggtcatcctgtcactgcagcaaccctttatcccttatgtag

SEQ ID NO: 73310 - DNA, 122 bp, Homo sapiens
gtgtgtgtgcgcgcgcgtgtccctctctctccccccgtctctcgctcgcccgctcgctcgcgctccccgtgttgctctcaaggacgaggtgaaatccctttgctggtcatgaggcggcttca

SEQ ID NO: 73311 - DNA, 122 bp, Homo sapiens
ccgcgcatacgcgcaaacccggaatcctggtgcccttaagcgtgactgtactgtgtgtgtcgcgagtacctgagtgtttctggggcggcaggtgtttccacggccgcgtggatccatcgagt

SEQ ID NO: 73312 - DNA, 122 bp, Homo sapiens
gagagtgaggaccgtaagccacccaccagttttcctccctcccatcacctttcatacatccggttccccaggccatctgcagctggccctgcctccatgtaggtgttggagccactgagtgg

SEQ ID NO: 73313 - DNA, 122 bp, Homo sapiens
ctcttccggaggttgagggtggttcgctaaacttccggtgggctccaagagagtttccggcggacttcctgtgcgatcgggcggggttccggtcagtatgcgagtcctgtgagcatcatctc

SEQ ID NO: 73314 - DNA, 122 bp, Homo sapiens
cctgagaaaggaggatgtgcagacactcacagaacaaagcctttgtaaaggaaaggcggccgatgagatggagtgcttccttcacctgtggtgggtctgtatccatgaaatcgcccactcac

SEQ ID NO: 73315 - DNA, 122 bp, Homo sapiens
gaaaactgagcacgggcacagtgcgggagcgggtgggtgcccagggcagccaggggcgcacgggttgggaggcgccaggcggcccgccctccttgcacgggccggcccagcttccccgcccc

SEQ ID NO: 73316 - DNA, 122 bp, Homo sapiens
gcgggaagtgggagaggcgggtggcgcccgagcgcagtagcaggggcgtagggcgcagggcgcaggagcgcgggaccaccggcgccggagcgcggcagggagcgctcgcgggggcgcacagc

SEQ ID NO: 73317 - DNA, 122 bp, Homo sapiens
acccaaacccgcgagttatccgtattctccttcaggagtcatagtcaggccagaagagtgcggagggacggggcccgggaagagcagggaacccccagagcccgcagccaacgcggaggtgg

SEQ ID NO: 73318 - DNA, 122 bp, Homo sapiens
ctacaaaaactctgcaaagcgggtgggaatttcctgcttgggtctagcctccgtgtttcccgcgcacagcccggtctttaccctggatgcttccgaaccggcatcatctggcatctccgaca

SEQ ID NO: 73319 - DNA, 122 bp, Homo sapiens
aagggaggggaagggggttcgcggctgcctggcgctcagcaagtgcaggaacggaggcaccgcagggcaggcggccaggggctcggaggctctgcctctttgagttccagaaaagtcaaccg

SEQ ID NO: 73320 - DNA, 122 bp, Homo sapiens
tttttttccaatatgaacaaaacacctcactggtgtcagatttaggattataccccaccccgcccccacaaaaaaagaaaaaaaaaaaaaaaaaaaaaaaaaacggggccactgactgtggc

SEQ ID NO: 73321 - DNA, 122 bp, Homo sapiens
tgtggcagcccccgcagtctgggtgccccgcgtgtggcagcccccgcagtctgggtgccccgcgtgtggcagcccccgcagtctgggtgccccgcatgtgcaccctcacctgctggtgggca

SEQ ID NO: 73322 - DNA, 122 bp, Homo sapiens
agaagcctggaggacagggctggctttggggatagcagcagggcgagattctggacaattcgggggtttggtttggcttggcctacagggtcagtcatgccgcaggctctgggtgcttctgg

SEQ ID NO: 73323 - DNA, 122 bp, Homo sapiens
acatatgcacattgcatccacgtctgtttcctggaaccacgcacacgcatgttgcatccacgtctgtttcctggaaccacacacgtgcacattgcatccatgtctatttcgtggaaccacgc

SEQ ID NO: 73324 - DNA, 122 bp, Homo sapiens
tcattgcagtgcacttctagagtatcttgtgcctcccatcaaaacctgaacacacaggatcgtaatctgtgctttaagcatctcctatctgcacccccaccccccaccccgccaagctgcaa

SEQ ID NO: 73325 - DNA, 122 bp, Homo sapiens
agaatagcgggcagcgaacggaagacgcccagcgtggcggacaggggagccgggaccacccgggctgaacctcagcctggttaggggaccccgggccctgctgggcctccctctcctctcgt

SEQ ID NO: 73326 - DNA, 122 bp, Homo sapiens
tcaatatgaaacagtaatcctctgagaacgaagaccccgcagtgccggtgcccgctgggccgtgcaggtctcggccgccccacgcccgtgtccgtctccaccgtgaccccctcgcccccggc

SEQ ID NO: 73327 - DNA, 122 bp, Homo sapiens
gcacggcttatcttaacactgattaccgcaccccgcaccccccgctattctcccccactccgcgcactcccagatgcttcacatgaaatcgacatggcaaagtcacagcctcgaactgaaac

SEQ ID NO: 73328 - DNA, 122 bp, Homo sapiens
agctgcgggtcagcaacaccagctgcgagaacggtgcgtacggcagggctggggaccaggcgggctccgcgcttcgcgccctcccctccttgccaccgctctccctcgcatcctctcctccc

SEQ ID NO: 73329 - DNA, 122 bp, Homo sapiens
aaagtctaggagatagagctgggaggatgataacatggaaatgcagccatgttctcctctcgtgattaaagtctcactgccagggaaagattggggctgatgctgagaaagaaggtgtgggg

SEQ ID NO: 73330 - DNA, 122 bp, Homo sapiens
tccatgacggctcaagatggggccagaatttaatcctgagtaatcttgatccccacaagccgatcatgattatcagaaagtaaaggtagacgtcatgcttggaggggaagtgaccttgtaga

SEQ ID NO: 73331 - DNA, 122 bp, Homo sapiens
tctctggtcaggcagggagggacaggagggtgagtagcgaggacccctgagattgtagtccggtgtgacgcacacccacctttttggcctggttgatgatgtagctggtccagatccagttg

SEQ ID NO: 73332 - DNA, 122 bp, Homo sapiens
gcggacgaaacgcttcccggggcctttggattggtctgtctagccacctcatttgcatgacgtaatataataactggaaggccccgcccctctggtgcatttccccgctccaaccacctcct

SEQ ID NO: 73333 - DNA, 122 bp, Homo sapiens
ggcctgaaaacccacaactctgatggattaaccttggctagcccagatacctgtttgagacgccttcacacccattctggctgcagcagagcagggcagggtgtggcctcttcccttgccca

SEQ ID NO: 73334 - DNA, 122 bp, Homo sapiens
cttgaatcaactgtatttctttggaaggacggtgtcatacacggctcctcaagctggcaccgtgtgtctcagtagtggcattttaagggtgttccatccagccaaagtcactggcacggtag

SEQ ID NO: 73335 - DNA, 122 bp, Homo sapiens
cttggcgattttggtggaagcctgtccctcagaacggtctcagtatagtgttttgtgccccgtttgtgtccgtctcaagagcagagcggccctccgcgcggcccttttatccaccagggggc

SEQ ID NO: 73336 - DNA, 122 bp, Homo sapiens
cccatcagccgccacctctttgtttctggagttaccacctcactggtctccctgcttccacgttccttcttcctatcatgtgttctccaggaagcagatggaatgacatgaaaaatgtaaat

SEQ ID NO: 73337 - DNA, 122 bp, Homo sapiens
gtggcgctgtgtgtgtgtgtgtgtttagcatctgccctcccaacttttccagattttacccgtcagattcctggcagctgtgcacggcgcctgtgccggccgtcacgtcccattccgatctc

SEQ ID NO: 73338 - DNA, 122 bp, Homo sapiens
gtgtgtgtgtgtgtaaagagagagagggaactagagactaggggaccaactcagccaaatcgcctccttgcaagcctttccagcagccccaggtatcttggaaagagccaactcacctcctt

SEQ ID NO: 73339 - DNA, 122 bp, Homo sapiens
accaccgaggagtttaatcgagagatgttctggagaagactcagtgagtgcgcctccttccgggctccccttgcctcagttcctccagcgtcccgaccccttttcctcccgctgtcccccac

SEQ ID NO: 73340 - DNA, 122 bp, Homo sapiens
tgaagcagctccattggtctcctatcagtgcctccaaagcttgatatgtcttctcgccaccggatctttgcacgtgttatcatatgcataattttttggcttgtgtctgtttcttcttctag

SEQ ID NO: 73341 - DNA, 122 bp, Homo sapiens
agcgcagctgtgtgcagggcccgcagttcctgtttccgtcgagcctacagcccagagaagcgtgtgcttctccccacggaggtgggtctccgtttcagggtcagacctgaaagcatcggttg

SEQ ID NO: 73342 - DNA, 122 bp, Homo sapiens
gtgactaggtcagtcttctaacttcctctttatcccttcttactccttctgcaaacagtacgatgctgggcagagtggaagatcccttattgtctcaccctggggcaaggagatgggctaga

SEQ ID NO: 73343 - DNA, 122 bp, Homo sapiens
ggaagagcctgagctgtgggcttggccccctgggctcacatccatctccactttactgaccgtgtgcccttgggctggccttactgaggcaaattgataagatgataagaaaaacaccttgg

SEQ ID NO: 73344 - DNA, 122 bp, Homo sapiens
ctctgcctccgctggcgagtcagtagccaccaccaggctgatgagcggaagccaaggtggcgaccctttcaggcgtgaaaatgggagctccggcgaccccctccgtgagaattccccccgga

SEQ ID NO: 73345 - DNA, 122 bp, Homo sapiens
tctgtttgacagcgtggcccttcaaagcctgtggcacagcaggaaggtcagggacctgcacggatgtctgcctcctgctcccgctgtcccccacagtgtgtgccccagtttacctgggagac

SEQ ID NO: 73346 - DNA, 122 bp, Homo sapiens
ccatttcctagccagcatttggaatctgggtgctcttgttttaaatcaaggccctggccacggggcagtgactcacacctgtaatcccagcacttttggaggccgaggcaggaggattactt

SEQ ID NO: 73347 - DNA, 122 bp, Homo sapiens
tccctgttcgtccgccgcccccagtgtggcttgctgccgctggccgtcccctgcctccctcggaacctccgtggagttttcccaggccccccagcctccagacacagccccctcagagaggc

SEQ ID NO: 73348 - DNA, 122 bp, Homo sapiens
gaaaaggtcctcagagaagagcgacgatgacaagaaaccaaagacagactcccccaaaagcgtggccagcaaggcagacaagaggaagaaggtctgcagcgtgtgcaacaagcggttctggt

SEQ ID NO: 73349 - DNA, 122 bp, Homo sapiens
tcccccatgatggagggagggagccccccaacctcagtgaggagagccccgagccggccccggggcaaagaggggtgcagagggagttcccccagatcagtaccccccacccctccccagct

SEQ ID NO: 73350 - DNA, 122 bp, Homo sapiens
taaagagtagaggatcagctggaatgccaaagtgggaaatggcagaaagtccctgttccccgtgtccagtgctacagctgctggttgtgacaattcttgtccttatcctagcacccagacag

SEQ ID NO: 73351 - DNA, 122 bp, Homo sapiens
aaagaaggcacggcttctgctcttaagccaagtggtcttttcaaaggccttctttaaaatcgctcagatgggtgcttttgagtctgcgggtctggtttctgaaaacccaggctgcacgcagc

SEQ ID NO: 73352 - DNA, 122 bp, Homo sapiens
gattacacagcgagtaagtgacacagaggcagaaagatatgcgattccaacccctcagcccgcaggctgacggcgtctcctcccttagttcccccatctcattttcgcgtcggtcgcctcct

SEQ ID NO: 73353 - DNA, 122 bp, Homo sapiens
ggggggctccccagccgcgtccccgccgcttcacgccctccgcgtggaaggacgggggcccggggacccctgcaaacggctgagaccccaaagcccggctcctctgcccggctgtccctccc

SEQ ID NO: 73354 - DNA, 122 bp, Homo sapiens
gcaaaatcctaaggtttcattactggactcagtaccactgggcttgcactgtgttccaggcggtagggtcttcaacagacactctgagaggtgggattgtagggcatcagtttctgcagaca

SEQ ID NO: 73355 - DNA, 122 bp, Homo sapiens
gccgtgaagaggattctggatgttgtagtccgggagctccgagaattttgtcacactctccgtaaccctctctcactcgctcgctccgtttttttttttgtttttttttttttcaagcgcga

SEQ ID NO: 73356 - DNA, 122 bp, Homo sapiens
caaaaaacgcacctggggcttccttcagtgaggaggccctggctgatgtcttctaaaacacggggccctgggcacttgtcaagtgcttactcaagaaatagatttaaagaagtcctgtagtg

SEQ ID NO: 73357 - DNA, 122 bp, Homo sapiens
cgcccccggcaccgcctcttcccgcctcacccatgccctgcgcgcccagcatccaggagtcgcacacactcgacctctgcacacacatcacactgcagggccatgatgggtttactttcgcc

SEQ ID NO: 73358 - DNA, 122 bp, Homo sapiens
tccgtctctgcatctacctcctaggtttcactacctaccttccagtttagccttaggatacgtacgcaaaacacccggtacatacatgggtacttttcttccttttcgcatactttgaagtg

SEQ ID NO: 73359 - DNA, 122 bp, Homo sapiens
atcatagtattactttaaaagcaccaaacatagcatccctgaaaataacatgtttcctgtcgggagaagcatgttaaggtgtctgtgagagatttctggggtttattctaatccatgtttct

SEQ ID NO: 73360 - DNA, 122 bp, Homo sapiens
atgaagtactagacatgccctctcactctcagggggtcagcccagtgccaggatctctggcgagggtcctccccttcccccattccacacagctgctatcccaccgtgggatttactgccaa

SEQ ID NO: 73361 - DNA, 122 bp, Homo sapiens
agccaggaaagaaaaagattttgtctttataaggacattttaacttttttttcatgtccccgccccaccaaaaatcacctgacagaacaggtcacagtgaaattcagacacctcctaccact

SEQ ID NO: 73362 - DNA, 122 bp, Homo sapiens
gcagtgtgagaaggagtctgggaaatagaaccccaggactctccagtgccccactcagcccggggccctcagtccatgccctgcagatagccagagaactgtgataagggctgatggccagg

SEQ ID NO: 73363 - DNA, 122 bp, Homo sapiens
cccatctgagaagtgaggagcccctccgcccggaagctgccccgtttgagaagtgaggagcgtcaccgcccggcagccaccccgtccaggaaggaggagggggtcacccaccgccaggccag

SEQ ID NO: 73364 - DNA, 122 bp, Homo sapiens
catccggcgtgggctgtggctcagggacatcgccgggcggcttcatggccagcaggatctcgacagcccagcggaggtggaagaccacgtcctcgagaggaaagtgtctgtgatggagccac

SEQ ID NO: 73365 - DNA, 122 bp, Homo sapiens
aacatgggttccccaacctccaatttctttccatctatagggttgttctgtagagcagggcgcccacacccaggctgcacacttgagtcacctggggagccccacccaattaaatcccaatc

SEQ ID NO: 73366 - DNA, 122 bp, Homo sapiens
gttagaccaaatatctgagtaccataacccagccaagttgacacataaaatttaccatcacgagaagtaagacagggagtgaaaagaagccaaaaatcaggcaatattaagcaggctgcctc

SEQ ID NO: 73367 - DNA, 122 bp, Homo sapiens
taacccctactcctcagacatggccatcccaggaagtgggggcccgctcagggcagcagccgggaggtgtggccagggccccccgcgtcacagcacacttggagcctgaggcagcccatcag

SEQ ID NO: 73368 - DNA, 122 bp, Homo sapiens
tgctcagggtggccacaggccctggggtccgttattgaaaggacagacatcagctgtgtccggacaccttgcaaggtactgaccccacgtgggggctccaacctgctgccgctggatagatt

SEQ ID NO: 73369 - DNA, 122 bp, Homo sapiens
ggccacagcctgctccaaccagcagatccgccagacttgcgtgcgcaagagtctcatctgcgccttcgccatcgccttcatcatcagtgtcatgctcattgcggccaaccaggtgctgcgca

SEQ ID NO: 73370 - DNA, 122 bp, Homo sapiens
ggactggggaaaggagaagtttacaggattgggcctaaggggtcttgtatgtcaatctaccgtcttactaatgagaaaacgaaggcaacaaagggactcctgcatagtgttccagggaactg

SEQ ID NO: 73371 - DNA, 122 bp, Homo sapiens
gcacgcagccctgcttgccccgccttgcggggtgagggttctgtttaaggtggtcttgtgcgcctagatgtcccaggcactcaccacggggcctctgagttctgcttggattccagaggtgt

SEQ ID NO: 73372 - DNA, 122 bp, Homo sapiens
cacatacgcgaacaaacacgggcgcgcacacacacgaacacgggcatatgcatacttgggcgcacaagaagatctggctggctcagtctgggttaagaatccccctttggccttggcatcgg

SEQ ID NO: 73373 - DNA, 122 bp, Homo sapiens
ttttttcctcctttcttgttttctggacctccttgttatagggctggctggtggggtgggcgatgagttggggaaatgggaaaggaggaaagggggaggagagacccaggaggggcagccca

SEQ ID NO: 73374 - DNA, 122 bp, Homo sapiens
cctcaaatgatccactcgtgtgggcctcccaaagtgctggattataggcatgagccaccgcgcctggcctgagatcttgttttgagctaggagttgctgatgctgctgtcctgggaccaccc

SEQ ID NO: 73375 - DNA, 122 bp, Homo sapiens
tggttccgccattcttaaggaacactggaaggctataaaactactaatcccatcgcacctcgtaagatcgactactagtcaggtgtatgtccctcttccgccatcttgcttgtagtcctctt

SEQ ID NO: 73376 - DNA, 122 bp, Homo sapiens
tgatactgaatgtatactggcgcactgcgggggaggcccagggactcaggtcaccacacacgcttcctcacgtctactcgctcccacacgcgtgagcactctaggggaggcctggggactca

SEQ ID NO: 73377 - DNA, 122 bp, Homo sapiens
tttcttcttttcctttgcgttcatcattttggcgaattactggaagatggctgctccagccgaaaggatacttttctctatttttctattgtttcgtctgtctttatttatttataataaat

SEQ ID NO: 73378 - DNA, 122 bp, Homo sapiens
tggactgtgacgctggcagaggggtcccggggggagcaagcggaggaggtgccagtgaaccgcatcctgccccaccccaaggtgagaaggcagtccccaggcccccaaggctgggcaccgca

SEQ ID NO: 73379 - DNA, 122 bp, Homo sapiens
aacaagcttcgaaatggccacaaggggcttcggatcttctgcagtgaagatgagcagagccgcacctgctggctggctgccttccgcctcttcaaggtgagaccctgggagtggcatggggg

SEQ ID NO: 73380 - DNA, 122 bp, Homo sapiens
tgggatttgtagttctctgggaaatgctaggttggattccattcattcatacatggaatccgcaaatactagttgaagcccactgtaagcaaaaacagttaacgacagtgcgtaaacagtga

SEQ ID NO: 73381 - DNA, 122 bp, Homo sapiens
tgctttccacagttggcttcagggaaagcatctaagactggagtcacaacagagtattcacgcatggggcaaggggtggggacgctaaagctgaactttgcctttagttaaaattacccttg

SEQ ID NO: 73382 - DNA, 122 bp, Homo sapiens
ctcaccaaaaaggtatgaaaataagagcgtctagttaatgggactgttgtgaagatgatccggtggtctagagtaccttcaaacctgctcagtcaagggcagcccaggttgtgcccctggga

SEQ ID NO: 73383 - DNA, 122 bp, Homo sapiens
ctatgggaaagactttgatccagcaattctatttttactaatttataccacatataaacacgtgtatgtaaacacaggtatgcagaagaaagttggtaatagcaaaagactcaatgtaatct

SEQ ID NO: 73384 - DNA, 122 bp, Homo sapiens
caccttggactccccatgtgccatgtccctgtgccccctaagtcccgcaaacaccaggaccgtggccataagacagggcacggtgtccctctaatgtttagactgacctgcttccctgctgc

SEQ ID NO: 73385 - DNA, 122 bp, Homo sapiens
ccaggtttcatggatgaggaaactgaaggtcgtcctgactcaggctcatggctccgaccccggcttctgtggttggagggcagcaccttacttagactcccagcgcacgtggagcagtctgc

SEQ ID NO: 73386 - DNA, 122 bp, Homo sapiens
gacgctagcgcgggaaccagggaggctcggtgaggctcgggacaccgagctcagagacaccgggaagtcccgcgcgagcacagcacggagctggcgcccgtgggggagacaaaggccaggga

SEQ ID NO: 73387 - DNA, 122 bp, Homo sapiens
cctccagatacacctagaccctggggaagacacagccagatgagatgcttggacacatagcggggagataccgacatactcagggagaatcactcagctagatacacacaaacacacacagg

SEQ ID NO: 73388 - DNA, 122 bp, Homo sapiens
ccgccccaggtacgtccactggagaggggagacccacctcggccagcgccgcccatgccgcggcctttctgctgcttctgctgctgcaggcctccgcggccgcggcccttggccaccacctc

SEQ ID NO: 73389 - DNA, 122 bp, Homo sapiens
tgcacctgcactccccagcccttgggtggtcgatgggactgcgcgccgtggagcagggggcggcgctcatccgggaggctccggcggcacaggagcccctagacggggtgggaggctcgggc

SEQ ID NO: 73390 - DNA, 122 bp, Homo sapiens
ggcgtcagaacaccaaagttccggccgagtacagaagcccaggaaggacagcaaggaccccgtagcccagccaactgaggtttttggaggtttttggtccacttggtcgccagttgtaagga

SEQ ID NO: 73391 - DNA, 122 bp, Homo sapiens
ctggatctttacctttgtggaaggaaggttcatggtgtctggcgctcagggtggggtagccgggaaaggagatgtctgtggtggttcaaaaagccaggaaccttgaggctgtcaattgtgac

SEQ ID NO: 73392 - DNA, 122 bp, Homo sapiens
agcgggagggggctggcggagacagcgcggtaggggcagcttcaggtttcctcctggagccggtgtcgggcgcggccggcgggcgggcctcgccatgtgatgcggccgccgcgagccgggcc

SEQ ID NO: 73393 - DNA, 122 bp, Homo sapiens
gcggtctccagactcgctgggaaccaccgcaaagagggtgtgcaagagttgaggccctcacgtcttgggaaaggagagtaggggtggaataggagagtttggggaggggggatccccttaga

SEQ ID NO: 73394 - DNA, 122 bp, Homo sapiens
ggcctcaggctcgaagagagagtgggcacactggtggctccagcggcgtcagtgccatcgcggggcaagttgattcctgggccggagctgggcactcatccatccacagtctccgggctggg

SEQ ID NO: 73395 - DNA, 122 bp, Homo sapiens
gaaggggctaaatggttgggtgtaggggaggcctggggagagcgggcaggaggccagccacggacaggcctgagacaggatcagacagccagtgtgccagggagctgaagaggactctgtgg

SEQ ID NO: 73396 - DNA, 122 bp, Homo sapiens
cagggtcgttagggcccagccctgcctcccgttagggaggcccagctccgcagccacacgcgaggtggaagggcagtgcacaccttttacttggacatgaagcatttgtttcctgtcttgca

SEQ ID NO: 73397 - DNA, 122 bp, Homo sapiens
ggcagaccccggcatgggaaggcagggctggtgcgggcctgcagcgcggctgtgagggcacgagggcgcagggggtgagtcaggaccacgttcccgggcagcggaggacacaaagcgccagc

SEQ ID NO: 73398 - DNA, 122 bp, Homo sapiens
aggcgcagtcccgacgagcaacgcgtttgtagaggggtgggtgcgcacgctctgtccctgcgtgaccttccgaccccgctgtcctcaccgcaatggcggctgtgagggtcctggtggcctcg

SEQ ID NO: 73399 - DNA, 122 bp, Homo sapiens
tctccggcccttggccaacagttgggcccgggccttgtgtaaactgctgtccagtctggccgtctctggcacagccaagtccaggtctgcgaaccgggggaggggagcagagaccagacaca

SEQ ID NO: 73400 - DNA, 122 bp, Homo sapiens
gaggctgggaaagatgactacaagtagttccggtttgccagcagttacagccactcattccgggaacagtgcttcttcgtgtgtggaaggggaggtcagtagcaccccctgaagagcatttt

SEQ ID NO: 73401 - DNA, 122 bp, Homo sapiens
taacaaccacaggatagatgacattcattttctaagaaacaaaatcttggcagttagatccgtggggtaaagaatatagatactaatgtaagttaacacctcaagttcatgtccttggtttg

SEQ ID NO: 73402 - DNA, 122 bp, Homo sapiens
aggaagcctggaggtctcggagtctctatgacgcgcaggtgtctccttcaccttcaccggcgttgaggtagcaggaggttcgcttcatgaattcccccacgttctctggctgtgcgttccgc

SEQ ID NO: 73403 - DNA, 122 bp, Homo sapiens
cgctgtctacgacagagggtggggcagacgctccgtttccggtggcagggtctggggaagcggcggcaggcgccatgtccggccgcgaaggtaagtgttccggaaccgtgaggactgcgggg

SEQ ID NO: 73404 - DNA, 122 bp, Homo sapiens
aggcaggaagtgggatagagctggtgtgtgtgggccaaatcccaaggggtctgcaggaaacgccttcatccggaacttgagggtctccccccagtccagccccctttcccccgcatgagaca

SEQ ID NO: 73405 - DNA, 122 bp, Homo sapiens
ctcctcagaagggagggggccagaggcgagatgtcgcaaccgcctccctccctctttccccgccttggcactcagtcgcctcccagatgagcactctctcagaccgctgcgggccgccaggc

SEQ ID NO: 73406 - DNA, 122 bp, Homo sapiens
gggcttctctgtgcgactgccagcggcctctggcggctcattccgcgcagatctgcgtggcgcccgagccctcccagtgggcccccaaggctccacgcgaccgagtattcttcttcccttgg

SEQ ID NO: 73407 - DNA, 122 bp, Homo sapiens
ttagttaagggcttatcataaagcatcacacatgaaaagacacaacaaagaattttatcccggtaccatttcccaaaacataagaatgtctcgtatcctctctacatagtaaataactctga

SEQ ID NO: 73408 - DNA, 122 bp, Homo sapiens
tcccatatccaagatttggactggtcctaaaacctgatcaccgcaggggtgggcttccgacggcccccacgcgcgtggcggatcccaacacctacctaggaaaccgagggcagccggcaggg

SEQ ID NO: 73409 - DNA, 122 bp, Homo sapiens
ttacgtcccttccagcccttggcggagtctgcgggcgagagggcgcaggtgcagaggtgccgccggcggcgtgcggctgcgaaggaagggaccccgacaccgagcgttcctgcggacgctcc

SEQ ID NO: 73410 - DNA, 122 bp, Homo sapiens
atcgcggtccaaaatttacgcacgcgcctttgagggctcacagagcccgtctctcccggacgaatctcatccaatcagagccagccaggaagccgaggctcagcaaggcctcgcgacgccca

SEQ ID NO: 73411 - DNA, 122 bp, Homo sapiens
cccgcaggtgcaccaggcagccgcggagagaacaccagtgcaaacggagggacgaggacgcgcgcgctccgtgctcctttcactttgctatccaaggctccagtgccaggcttttgcagccc

SEQ ID NO: 73412 - DNA, 122 bp, Homo sapiens
gtgttttgagacagagtcttgctgtgtcatccaggccacagtgcagtggtatgatcttggcgcactataacctccacctcctgggttcaatacattcttgtgcctcagcctcccgagtagct

SEQ ID NO: 73413 - DNA, 122 bp, Homo sapiens
ctgggcctggtcccaggcccacgaaagacggtgactcttggctctgcccgaggatgtggccgttccctgcctgggcaggggctccaaggaggggccatctggaaacttgtggacagagaaga

SEQ ID NO: 73414 - DNA, 122 bp, Homo sapiens
cctccagctctcgctcggcttcctgcagtatcacgtgcagctgcgctgggtgcaggatggcggcggccgcggcggcggcagcagcggtgggtgtcaggctccgggactgctgcagccgaggc

SEQ ID NO: 73415 - DNA, 122 bp, Homo sapiens
gtttccgtgtctgcagagggccagcctcagccactgaagtccctgacatggagctgcccacgggcttcttgggggtgggtgcggcttgggcagcagtggtgccccaggacaggagggcagtg

SEQ ID NO: 73416 - DNA, 122 bp, Homo sapiens
ggtcatcctgccctatcactgacactgcatatctcaaacccaggaaatatctgtacctgtcgcttgcctctacttaccctctgcttagtaaaccacatttaggatggggaacccatgaggaa

SEQ ID NO: 73417 - DNA, 122 bp, Homo sapiens
agataactagttatattgaggagactgaggtactgaatgaatgataataaatccagtcttcgggtcaagatgccccatatatagatggagatgtaagttgaagatgcagtcttccattttcc

SEQ ID NO: 73418 - DNA, 122 bp, Homo sapiens
attgcttcatactatgtttactgttttgcatggatagtgctggagtacttattggtcatacgcctaaagtgaatttgttaattgcacaggatgtatgataatattagtgaacttaaggatac

SEQ ID NO: 73419 - DNA, 122 bp, Homo sapiens
aggtgttccaagcagccaagcccaagaaagcccccttcccctcccccgcaggccagccagcgtggggcctgcttccccagagacgctaatgagtttcaatcttagaagaaaacactgaggcc

SEQ ID NO: 73420 - DNA, 122 bp, Homo sapiens
ccgaaccgcggggctgggacgggcagggcagggcaggcgccggcggggaggcgcggcggccggagccccgcggggaagtctttccaggtcccgactcggctctctctgcaaaacggggcgaa

SEQ ID NO: 73421 - DNA, 122 bp, Homo sapiens
atctggtgagaccaggttgggggccttttcccgggcccacgagttactcccccccgcccacggagcaccttctgtccgggcgcctcccaggccgctgctgcttcttggttctgcttcctttt

SEQ ID NO: 73422 - DNA, 122 bp, Homo sapiens
agggtctagaggcctgaactcctgcgtctagggctggaggagctggcgactccctgatgccgctgcctcctcacccaggtgtatgagcagctttatgacacgctggacatcaccggcagcgc

SEQ ID NO: 73423 - DNA, 122 bp, Homo sapiens
gtccccaagcgccagcgcggacggcggtgcggacagggagctgtattgacctgcgttctgcgtttcagagcccggaccgccctgggacccctgtggccctcaagttcccaagtgacctcgtc

SEQ ID NO: 73424 - DNA, 122 bp, Homo sapiens
gcgaaggcgctgcattttaatgaatcgttattgccggcgaggcctttgtctttctttatccggtgcacaataaaagaattaattagacagaaaatggcagggcaaggaactgacaagtcatt

SEQ ID NO: 73425 - DNA, 122 bp, Homo sapiens
gcttagcttggaattgttaggtggaggcctcctgccctgatagtggctgtgagagggctgcggccgtgacaccgtctgtgtcccctggccctcctggccttccccgggcgcagacgatttca

SEQ ID NO: 73426 - DNA, 122 bp, Homo sapiens
tttctgcttctctttccttttgctttcaacagccccagctctcagacctgctgggggagtcgcgtctggtagagcatctcgtattttctccctacctgcccttgctctcaatggagcacttc

SEQ ID NO: 73427 - DNA, 122 bp, Homo sapiens
tggctgaggccgtgggtgtggctaggagactccatggaggcccacacccagggctgccctcgcggccgctgggccaggggcaggtgggaccgccgggtctgcagctcgcggtggtggaagac

SEQ ID NO: 73428 - DNA, 122 bp, Homo sapiens
ctgtggacttggagtctgaaaattcctcgagtggtagagatgcctcagctaggatgacagcgtggggacggccggcggcgtcccctgccccaggccgcggtggcggcgccgcgaccccgccc

SEQ ID NO: 73429 - DNA, 122 bp, Homo sapiens
cccgcagcctcaggcgccgccacgacccgctacttggactacattgcccagggagcttcccggcctatataagccacccggagccgctttaaagtgcagtaaccatgtggatgtgctgctga

SEQ ID NO: 73430 - DNA, 122 bp, Homo sapiens
gtttgctggagccgggctgacacagatctgacagaggttgtcagatctctgaagaacaatcgactttctaagcagagccccttctctgagtctcgcggtgccgcgttacatttgtaaatgcc

SEQ ID NO: 73431 - DNA, 122 bp, Homo sapiens
agtctgagacctgggattccaatccccgctccgtcattagcggcagggacatgttgggcacgtaacttaatctccctgtaaatctgttccttcatctatgaaatggggataaccaatttaag

SEQ ID NO: 73432 - DNA, 122 bp, Homo sapiens
tttagagacacggtctcactatgttgctgaggctggtgtcgaacttgggctcaaacgatccgcacgcctcggcctcccaaagcattgggattactggcatgagccaccacacctggcccctt

SEQ ID NO: 73433 - DNA, 122 bp, Homo sapiens
gggagacaagtcttgcgaggcagctgagagctgggtgggagatgggggaagaaagaccatcgcagatcccagaaactccagtagttccagtcccaaaggctgccccacccccttccagtagc

SEQ ID NO: 73434 - DNA, 122 bp, Homo sapiens
attgggaaccactggactcaagacagtttgttctgccaaatctttttatatttttcgtcacgttccccctgtagcctggaaagggacggtaacaattaaagaatggcagctaccacaggaag

SEQ ID NO: 73435 - DNA, 122 bp, Homo sapiens
cggtgtcctccccacgggaattctctggcgtgcgcgccgccgagtcacacaccgacccgtcgggcctggccacccactcgccgtgagtgaagggcagagttcaaagctgtgtggaaaccgag

SEQ ID NO: 73436 - DNA, 122 bp, Homo sapiens
acagctgcagctctcctgtgaggttgcacggcatcagaaccatcctgaccttcttagggacgtgcctggaaccacctcgtccacgtccacgtccacctgggggcctcgggaggctaggcccc

SEQ ID NO: 73437 - DNA, 122 bp, Homo sapiens
ccgccgtcggacgcccaaggaaagaggggaaagacaggaggccccgaggggcactgaacccgcgcccgccctcgctggtgccccgccagctcaccgtccacgtgcagctccaagcgctcgct

SEQ ID NO: 73438 - DNA, 122 bp, Homo sapiens
cttggagactccagcaaccgtggaggcccaagaagctgttagagcatctgctcggagagtcgcgaggtctgagccaccagggaatgccaccgttctctctctctttatttatttatttattt

SEQ ID NO: 73439 - DNA, 122 bp, Homo sapiens
ggccggagtgggcggggactggatgagaggggcggggtctaggagagaggggcggggcggcggccacaaacccgcaggcacgccgccggccgccgtttagtcccagagatagaaaaaagtag

SEQ ID NO: 73440 - DNA, 122 bp, Homo sapiens
cccgcccagaaaggggctgttgactgcagcgggctgcgcgcccagaactgggactgggatcgcggcggggcggggcgggcgcgggcccagggagaggcggggccgggggcggggcgggcacg

SEQ ID NO: 73441 - DNA, 122 bp, Homo sapiens
gagcagggaggcttattgggtcccttttaccttgcgagacactgactcctagttgaactacgtgaaaatgtaaatgtcatgtggtagagtcacaaggcctccatgggtcaggcattcagttt

SEQ ID NO: 73442 - DNA, 122 bp, Homo sapiens
tgcgcggagggcgggggccgagcgtcgcggggaggggctcgcggcgcctgcgcagagcggcggcttctctcgcgaggacggacgccattatcgcatctccccgacaaacaccacgagaattc

SEQ ID NO: 73443 - DNA, 122 bp, Homo sapiens
tcccaattgactctgccttccctattctttttttctgccttcagcggggtggggtgaggacgtggaggaaggaaagcttctgttaacaaagccacagagtggaagcagcaaggcttttggta

SEQ ID NO: 73444 - DNA, 122 bp, Homo sapiens
ggtctcgttgggcagtttgtccctgcagcctgcaagaggagggggtcgggatcgaaggaccgaaggaggttgctgactcaggagccaggagctgagaaactcctaggctagcagccgttgag

SEQ ID NO: 73445 - DNA, 122 bp, Homo sapiens
aggctgaggttggagttgggaagcagagccacgtgagaggctgagccacatgagaagccacggccaagctctcagactccacctcttcccgactgccccacctccccttcgattttcctttg

SEQ ID NO: 73446 - DNA, 122 bp, Homo sapiens
cccttcgcccccaccccgacccgggaaggccccgcgcccctcaagcctgggacggtctcgcgtcccccgacccgggacggccccgcgccccgcaagcctaggactgcccagcgctgagcgcc

SEQ ID NO: 73447 - DNA, 122 bp, Homo sapiens
gctgatcgccgatgtcaatgacaacgctcccgccttcacccaaacctcctacaccctgttcgtccgcgagaacaacagccccgccctgcacatccgcagcgtcagcgctacagacagagact

SEQ ID NO: 73448 - DNA, 122 bp, Homo sapiens
gttttcttttccttctttctcttttctcccccttcacttcataccttttgactctgctaacgtgttgagttctcattatgtactgtggattgtttcacatagctcttctcattttatctcag

SEQ ID NO: 73449 - DNA, 122 bp, Homo sapiens
gcagtcccgctgcaggaactgcctcggaacccgggtttcctaaagcagcgcaaagccctccgtatacccacgcgctggcgtgagcatgcccactcctgctgcgcaacgctgggaggcgccca

SEQ ID NO: 73450 - DNA, 122 bp, Homo sapiens
acctcaagtgattcacccaccttggcctcccacagtgctgggattacaggcatgagccaccgcacctggcctcaaatgatttttctgtatctattgagatcgtatggcttttctcttgtttt

SEQ ID NO: 73451 - DNA, 122 bp, Homo sapiens
gacgctgctcagagaggctccatcaattgcaccaagcctacgtgacagaagcgtggggcacgtagacagaagtgtcttggagggctgacggttggggggcactcctatcccagggccttcaa

SEQ ID NO: 73452 - DNA, 122 bp, Homo sapiens
gtcacagctgggcatgacgggctggaggacaatgccctggtgggctggaggggctggcgccgtgcagcccccgcagagacggtcgcaggtgaagcagcggagcaggttggctagagccgtgt

SEQ ID NO: 73453 - DNA, 122 bp, Homo sapiens
gaggagttgccattcgaatttcctacgcggcctccgtgcgattggctggttcgcggatggcgggacgacacgattggctagtcgctcacaagccccgtgccctggttggcccaagacagcgc

SEQ ID NO: 73454 - DNA, 122 bp, Homo sapiens
tacagagcagctttcacggtcctttgttcctctctccccagatcctacagtgtcagtatccgaatcaatcactttcctttccttatatgataagttgataagagcagccagacatgtgtagt

SEQ ID NO: 73455 - DNA, 122 bp, Homo sapiens
gctctcaagacagatcccggcctgggacgctgcgggtggacagagggcaggggcttgcaccgcacgttcccagccttgcacccactcccggtccttggtgacgcagcttacaggtgcaactg

SEQ ID NO: 73456 - DNA, 122 bp, Homo sapiens
agggccgggggaagggaggaggctggggactagcgccgcgagtgccacctggagggaccccggcccccacccttggctccgcccggcccacggacctgttcgtcccgccccttggcggctcc

SEQ ID NO: 73457 - DNA, 122 bp, Homo sapiens
gcctacttggcttgctgcccccaaggggaacgtggccctagataccgggggaggccccgccgcagcctcaagtgactgactcaggcccccaggtttagcacagctgccacaggcctggcgga

SEQ ID NO: 73458 - DNA, 122 bp, Homo sapiens
cttccaggccgagggcaggactttctccagacccttggggccctctgtgtcccctggggacgcccgacccggctttctaggagggggaactccgggtcctgagcccgggccccgccccgttg

SEQ ID NO: 73459 - DNA, 122 bp, Homo sapiens
aagaacaattaatggtatgcatgtatattatgaggaggggagggtaaagaataagctagacgatagttaacctctccagccatgaggctcagagtaatctgtcaatctcttgtcatgcattc

SEQ ID NO: 73460 - DNA, 122 bp, Homo sapiens
ggctgtggacttaacaggctcgcccacaggtaccttccgagcatgcgtggggaagtagcacgcaggcgcggcacgccccgcgcatgcctggtgcacagagtctgcaggtcgggcggtagcga

SEQ ID NO: 73461 - DNA, 122 bp, Homo sapiens
ggaaggcgcccgggaagcccggaagtggcttcactcgggttagggaactaactggaagagcgggcggaagtatgcgataagcgagcgaagacgcctccaccctctctcccgccagaagtgac

SEQ ID NO: 73462 - DNA, 122 bp, Homo sapiens
gctggacgccaacgactcgcctgtgcaccgggtgctgctatggccccggcgggcacaggacgagcaccctcaggaggatggctactacttcctgctgcaggagcgcaacgcagatggaacca

SEQ ID NO: 73463 - DNA, 122 bp, Homo sapiens
tcataagatcatcccatacttggaaaacatttatctaattatcatcacacacaatgggcccgctgccagctgttttttattttaacttcagattctttccagggtgtttgtttgtttttttc

SEQ ID NO: 73464 - DNA, 122 bp, Homo sapiens
ggatggagggggctaaagaggaggcctagaactccccactccaagagccctggagaatcccggtctggcctgagaagatcaggagtttgggataaattgctagagaggccttgtcctcatgt

SEQ ID NO: 73465 - DNA, 122 bp, Homo sapiens
tacgggcctgcgtttttggctgccttggtacagaagacggcaaaggtattggggatcacacggaaactgcatgccgcctcccggcctcagcattccggaaaggtggagcggatgaatcggac

SEQ ID NO: 73466 - DNA, 122 bp, Homo sapiens
agcccagtgcttcctcactgccctctgggacacaggctgtgaactgtaccgtgcggatgccgtctggggagccgggctgtgcacttgcattccggtcagatcgcttaaagcgcctccgtttt

SEQ ID NO: 73467 - DNA, 122 bp, Homo sapiens
cacattccaaagaagttactgtcagtgtttcttcatatataaaattcaagtgagttcttacgtgtgtaattcacatcatttttctcctcatctcatgcataatttattgcaagtttattttt

SEQ ID NO: 73468 - DNA, 122 bp, Homo sapiens
atgcagcacacatccaggagcagccttgcagagatctggcgacaatgtgacagagaaaatcgtccaatgagcttggcatgtgcaggagagaagaatggcagggggagtgtcctggtggattg

SEQ ID NO: 73469 - DNA, 122 bp, Homo sapiens
ctaacccccgaggccttgggttcgtccggagcgcctggaaggtttgcagtcccccctccccgccacccccgaggccttgggttcgtccggagcttctagaaggtttgcagtcccccctcccc

SEQ ID NO: 73470 - DNA, 122 bp, Homo sapiens
tccccaatggccttcatgtataaatattcacatgtatttccccctatttcaaacctaaagcggtatgccatctttcatgctggactatccagcatccattttcagcacccttaactcttatg

SEQ ID NO: 73471 - DNA, 122 bp, Homo sapiens
tagagacgaggttccctcttattgctcaggctggtctcgaattcctgggtttaagtgaaccgcccgcctcggcctcccagagtgtgaggacccgcctggcctaaaataatgttatcacttaa

SEQ ID NO: 73472 - DNA, 122 bp, Homo sapiens
tttgaatccacttacaaattagtcttttcaaaggtgtactttttaagtgtctgcataatgcgaatgttgtgaagtatgtcaactcttgggatttaggaatagcagagtattagtattccaga

SEQ ID NO: 73473 - DNA, 122 bp, Homo sapiens
cagatgaggagaacgcagcaggtggccctctggatgcgagtgaaacagctacgaggcggccggtcccatatggagagccagatgtgcttgtcaaagaagccgcactgcagctcagccaccag

SEQ ID NO: 73474 - DNA, 122 bp, Homo sapiens
ctctgaatgccctctggggtgccaggctgctggcctcagctccccctcaagggcccctggcgccccactcccaggccccgggtccctgtgccctggcgcactcccaggtttgcctgcaggtg

SEQ ID NO: 73475 - DNA, 122 bp, Homo sapiens
tctacccctcgtggatgaactcctccagggccgcgcactccgacaccagctgagggaggccgctcctcagcaccacgaaggacaggatgggcagcaggtcatcggcaccactgtcgggaggg

SEQ ID NO: 73476 - DNA, 122 bp, Homo sapiens
acgaaggggacttgttcaggtgagaaacgttcaactgcgcgctcgcttactgaaaaccgccgagggggaagacgggacgagcgtcttgactttcagggtgcacgtaagtggctggtcccacc

SEQ ID NO: 73477 - DNA, 122 bp, Homo sapiens
tgaacaactttgctttttatctttaaacaaagggaaggaattttcagggttgaaggtattcgacaaagagtgacagtgaagaaaactcaggattgggaagtacagaaagtgtatggcatctc

SEQ ID NO: 73478 - DNA, 122 bp, Homo sapiens
tcacagtctgctccttttttttgtccgccacacgtaactgagatgctcctttaaataaagcgtttgtgtttcaagttaactcaggttcttgtctgggttatacgactagggtttctccaggt

SEQ ID NO: 73479 - DNA, 122 bp, Homo sapiens
tcttttttttttttttttgcttactatgtcttggggtttctccaggtggtagaggttgctcggaggtctgactcccagctggcttgaaagcagtgattgttcatgttttgggggatcgttga

SEQ ID NO: 73480 - DNA, 122 bp, Homo sapiens
gacaagtgttcaatttccaccaagtcctgatgatccctcctccgcccccacatgagaaaccggagaaaagcctcagcctaaatggagcctgctgtgctcggctcccttcgcgcccgagctta

SEQ ID NO: 73481 - DNA, 122 bp, Homo sapiens
gggcgctggccggccgtggggcaatgcaacggcctcccagcacagggctataagaggagccgggcgggcacggaggggcagagaccccggagccccagccccaccatgaccctcggccgccg

SEQ ID NO: 73482 - DNA, 122 bp, Homo sapiens
gcatcctccgcagctgctggcccaggtgctaagccccttactgtctggggtcggcggagccggccggccggccgctcggactgcgggccgccaaggccacgcccacccggaactctagctgg

SEQ ID NO: 73483 - DNA, 122 bp, Homo sapiens
agcaactctttgcatcagaccgtacatttaattaagtaaaggaaagaacaggctactttgcgtttttggtattttcagtgtagtgcagtttgggtagtcaatcacccaggagtttacaatct

SEQ ID NO: 73484 - DNA, 122 bp, Homo sapiens
ggggccaggcttctttaaacaatcttcctagcatttgtagctgctgtagtatacgtggtacgatagttcccccaccgtaatccacagttttgctttctgtggtttcagttacctgcaggaca

SEQ ID NO: 73485 - DNA, 122 bp, Homo sapiens
tgctgtgttttctttgtgggtttaaactactccccattctaaagtactcactgtctcaaacgtcaccccctgacatctcttcccttcacatctccttccactcttcgcttcacaaatcaact

SEQ ID NO: 73486 - DNA, 122 bp, Homo sapiens
ccagctgagcgggcctccgggccccgcccccgctggcgtctgcacagcccccgggtgggacgtctgtctccagacccggggtttttcggctcccccgggccgtgccaaccgcggctccaggc

SEQ ID NO: 73487 - DNA, 122 bp, Homo sapiens
aacccgggaggcggaggttgcacagtgagcagagatccagcttcagcctgcgcgacagagcgagactctttgtcaaaaaaaaaaaaaaaaaaaaaaaaaatcgtgtagttttgtacacaact

SEQ ID NO: 73488 - DNA, 122 bp, Homo sapiens
tggctctttcagggttcacggaagttttcctgacttcttcaggcacccagccccgctgtgcgacggatggtccggggtgcctgttgcagggtcatctgtggggtgctttccacccagggccc

SEQ ID NO: 73489 - DNA, 122 bp, Homo sapiens
aggctgagacaggagaattgcttgaacccaggaggcagaggctgtagtgagctgagatcacgtgcctgcactccagcctgggcaagacagagcgagacaccgtctctaaataaataaataaa

SEQ ID NO: 73490 - DNA, 122 bp, Homo sapiens
cacaggtttgggaccaggaaaagttccaggagcaagtcgctgacaaacaaaagctgcactcgcccggccgctttcttctcgcccccagcccgcgccccgagaccacctggcccgggcgtttt

SEQ ID NO: 73491 - DNA, 122 bp, Homo sapiens
tcagttaaggacctggccagtcagaagctcgtcagttaaggacctggccagtcagaacctcgtcagttaaggacctggccagtcagaacctcgtcagttaaggacctggccagtcagaacct

SEQ ID NO: 73492 - DNA, 122 bp, Homo sapiens
gcgggaaccggggctgcacgtggcgcttgcgggccagctggagttccgggtaggcatgggcggccccgggaaatgaggggcttagcacccgggccagcggctgcggagggtgtactgggtcc

SEQ ID NO: 73493 - DNA, 122 bp, Homo sapiens
agtcccctcgggcacttgccaaggtttgcctgtcccacctcatgcctttcccttaagaagcgagtgagctggggacaagaaagtttttatttttccgtctcccctgaaatgttagccatttc

SEQ ID NO: 73494 - DNA, 122 bp, Homo sapiens
agcagcccggggacagctggggcggggtgggggcggggcggcccaggtcagcccgcagcccgcccaacgcccacctgcccaggtgcctggaggccggaactcgccgggcggtgcctgcggtg

SEQ ID NO: 73495 - DNA, 122 bp, Homo sapiens
gtgggttcagaggctgagtttagaaaagtccggcctgggaagcacatcactgggtggacacggtgacctggatgcaggggggcggctgtgctcgggacacggtgacctggatgcaggggggc

SEQ ID NO: 73496 - DNA, 122 bp, Homo sapiens
gtgcgggaggaggactgcgcaggcgcagtgggccaggcggcccggcgaccaatcggtgcgcgcgctcgcaccctgccgcggcggccgggctgctgtttccaccaccactcctggcccggggt

SEQ ID NO: 73497 - DNA, 122 bp, Homo sapiens
gtgggtggaaggtgatgcccgccccacctcacaggaattacagagcggtgcgcttacctgcgggactgttatgtgcgctctggcacaggctgactcatgtgtgaagtttaaaggtggggccc

SEQ ID NO: 73498 - DNA, 122 bp, Homo sapiens
gccgaacacagaatgaaggtcccactgatgagccacatgcgttactaagagtccagcgagcgggagaggccagacctgaggaggttggctcagagcacccgccgggaggccccggtacaggg

SEQ ID NO: 73499 - DNA, 122 bp, Homo sapiens
ccaaggtctacagtgaggtccacttcacactggccaagcccccatcagtggtcaacaggacggccaggccttttgggatccaggcgccagggggcaccagccagatggagaggagccccatg

SEQ ID NO: 73500 - DNA, 122 bp, Homo sapiens
ccacagggtaggggtgtgtgtgttgtttcattgctctcagtctagttcctaggtcttagacggtcataaaaatttgttagtgaatgccaggtttgagctatgcactgagtcactcctggcag

SEQ ID NO: 73501 - DNA, 122 bp, Homo sapiens
ctgggtgagttgatgatgggaaagttgatcagcctcattcacttgcataactccacagcacggagctagcactctgtgtttctctgttctctgccttcctcacacttcggtgaatccttcag

SEQ ID NO: 73502 - DNA, 122 bp, Homo sapiens
cttctcaccagcccagttctccctaaggtcagggcccacaaaggaacaggaagggggttccgggacacaggatccggcttctctgggtatcttggagtccaggaaggatcctggagatctcc

SEQ ID NO: 73503 - DNA, 122 bp, Homo sapiens
ccccagcctttacctgaagagcagtgctgggttcgtgatctccatcggggagagggtgaccgcagcctttactcaaacagcagtgctgggttcatgatctccatcggggagagggtgacccc

SEQ ID NO: 73504 - DNA, 122 bp, Homo sapiens
tcaacggagggcggtgcccagtgaggctgggattgaaccagggcaggaagcatggggggccgggagggcacccagtgggccaacacgtctttcccctgtgacaggtacgagggggtcggtgc

SEQ ID NO: 73505 - DNA, 122 bp, Homo sapiens
gtgggggtcagcagggtcgtggtgagggcggcaagggacaaagggtgcttgtccgctgcccgccttgacctcggctgctgtggcttcccggacgcctggcctgccgctgattcacgcccagg

SEQ ID NO: 73506 - DNA, 122 bp, Homo sapiens
gatcccggcacgcggggcgatggggttcaggcagcggggtcttggggctgaggaaagggtcgaggtggacctggaggccatggagttgctttcccagacgctgcctcaggttctcctttgaa

SEQ ID NO: 73507 - DNA, 122 bp, Homo sapiens
ggggcggaaacttctggcatcaccctcagccaacacccagttgggtggaagtcattcaggcgggaaggcttttgttacgccttaggtgtgtcacctgttctgaggccgaaggtcccatgaat

SEQ ID NO: 73508 - DNA, 122 bp, Homo sapiens
taactaccctttattgatctggtcgctaagtgtcaggtacttggctaatgactttacagtcgttatctcactttcccttacctccctatcacatcagtatctttatagcctccattttacag

SEQ ID NO: 73509 - DNA, 122 bp, Homo sapiens
tgggaggcctggagcgctgggtttctggaattgagagctcggtgctcttgtgggggtctccgtggggcaaactcaggatgctcccggccccggggcctggcagcactcgggactgagacctg

SEQ ID NO: 73510 - DNA, 122 bp, Homo sapiens
aaataccttcttctttctaagcagtagcttctggaatagcagataattgaatagtaatgtcgtattaatagagatagtgaactgtgtggccacagaaggttttggcttaggagaaacccccc

SEQ ID NO: 73511 - DNA, 122 bp, Homo sapiens
acacctaaaagcctcaacccagcaaccaataggcgacgtctgggaagatcgtgaccccatcgtacttagcctacgaggaaccaggggagagacttgtgcactaggggataaatagcttgttg

SEQ ID NO: 73512 - DNA, 122 bp, Homo sapiens
agcaggcgatgacgctgggtgcggcccgcctggccctgggaacccagaaaggaggatgggcggccactgcagggctgcagctggagtcagggcagaccccgctccccacccacagctccagc

SEQ ID NO: 73513 - DNA, 122 bp, Homo sapiens
cgtctccccccaatcccagaggaagaaccaactctttcaagtcgctgttgccggggcaaccgttttacaagcgtccacatggtgggcacatgtgtgtgtgtcctgcgccccatgtgtctgct

SEQ ID NO: 73514 - DNA, 122 bp, Homo sapiens
tccggggtgctagccgctaggcggctagtgatggatagctgggcttgagccccgccaggccgccgagtccaccctggcgtccgggggctggcaggccggccctccacaaacagcggcctccc

SEQ ID NO: 73515 - DNA, 122 bp, Homo sapiens
agaggagcccacagaactcctccttctgatacttcttctccagctcgggaggacacttgtcgctggggatacagcccgcgctccccggcgggcaggtgggcggcggcaggcagggagagtcg

SEQ ID NO: 73516 - DNA, 122 bp, Homo sapiens
aggcctcgtctaaccaagccatccgaattaactacccactcactcgccatcacatcaccccgatttaattcgcagcggggcactgactttacactcgtgtgtcttctgtgtttatttatggt

SEQ ID NO: 73517 - DNA, 122 bp, Homo sapiens
ccacgtccagagagcccagatcccaggcctgcctgaggcctaacccccgtcccttctccccgggattaaacaggagcctgcacctttaaatcgtttttttgtttgtttgtcttttaatgtga

SEQ ID NO: 73518 - DNA, 122 bp, Homo sapiens
gcgccacacccacaggatggcgcagacacatgctaattttaataattattcaaaacaccccgtgctcccttagtgcctccgccagactccgctggagcttttgttcctgacgtccgtgctca

SEQ ID NO: 73519 - DNA, 122 bp, Homo sapiens
agcctccttcttctgtgtccccagcagcaagtccagtgcctggcagggagcagtatccctcgaggagatcctgaggcactgcctcttgagttcctcctggagggaaggaaggagggcagaga

SEQ ID NO: 73520 - DNA, 122 bp, Homo sapiens
aacctgctaactcctcaggaaaaaaaaaaccctgacgcaaaccagatgtaacctcctgtccggctgccaacatctggaatgctggcaggggctttgcactcaggccggcagcgagctgccaa

SEQ ID NO: 73521 - DNA, 122 bp, Homo sapiens
taaaaatctggaaggactgcctttcctgtggtgcaattcagcagacaggggctgagtgcccgctgcccacaggatgtgcaataaagctggggaaacagtgcagcacacacgggggcaaccgt

SEQ ID NO: 73522 - DNA, 122 bp, Homo sapiens
tgggaagctctcccatgaaggacctgccccggatataaggcagggtccactgcactgaagcggatgggtgggaaggctgagaaagctccacagccccgggcagcagagagcctacacttacc

SEQ ID NO: 73523 - DNA, 122 bp, Homo sapiens
ccatgcctaacttcttcctttacctcctcaaagaaatataggcatatgtcagagagattgcgggtttggtttctgaccaccaaaataaagcgaatatcacaatgagacaagtcacacaaatt

SEQ ID NO: 73524 - DNA, 122 bp, Homo sapiens
ttagaatattacattttgtattatacagtacctttctcagacattttgtagaattcatttcggcagctcactaggattttgctgaacattaaaaagtgtgatagcgatattagtgccaatca

SEQ ID NO: 73525 - DNA, 122 bp, Homo sapiens
ttctagacaggcctgggcctctggggtcagagggcaccctttccccccgggcagaggccccgccccagccagcctgcattccaggtctcagatccctgcagaccaccctgggggaggcactg

SEQ ID NO: 73526 - DNA, 122 bp, Homo sapiens
gggaggaactggcgaggtggcccgggctcggccctccgagggtgtggagcgcccgggaaacgggaccccaagaatccaactgctcccaccctgcgcggccaggagcggggctggcgatactg

SEQ ID NO: 73527 - DNA, 122 bp, Homo sapiens
atgggctggtcctggtggtggggctgccggccaatgggctggcgctgtgggtgctggccacgcaggcacctcggctgccctccaccatgctgctgatgaacctcgcggctgctgacctcctg

SEQ ID NO: 73528 - DNA, 122 bp, Homo sapiens
attcagcaaatcagaatcacggttcgcggcagcaatcccatggatgccatcgagtgtaaccgcccaacggtttcaccttgcccgctgcctagacagagccgattcatccagacaggggaatt

SEQ ID NO: 73529 - DNA, 122 bp, Homo sapiens
cacacccacgcacgcagacactgccacgcacacacccactgatgcacacagacgcacacacgggtggatactcacctacatgcacgtacacacccactctcaatgtgtccactgagcttcgt

SEQ ID NO: 73530 - DNA, 122 bp, Homo sapiens
ccattggctgcccgcggagctgcctcccgcctcccctgcccggcccccgccccgcgcgcccgcccgccaccctgcccggccgcccagagctctccattgggcgtcgctcccggggtcccgcg

SEQ ID NO: 73531 - DNA, 122 bp, Homo sapiens
ttgcttctttggaccacttggtggcactagatttaccttcaggcaagccactggatgaaccgccagcatgacttcgggtggcactgccatcatccacactactgcttccactgttgtgcctg

SEQ ID NO: 73532 - DNA, 122 bp, Homo sapiens
agagactgcaaaagtccagtgcgatgagttaagtaggaaaaaagcatgaaaacatgaagccggcagatgagtttcatttggtgttagcagacacctgcttgagaggaatcttaaagactggg

SEQ ID NO: 73533 - DNA, 122 bp, Homo sapiens
aggctggcctcaatctcttaggctcagatgatgctttcatcttggcctcaggactataggcgtgtgccattctgccctgctcatttttattttcatttatttatttatttatttatttattt

SEQ ID NO: 73534 - DNA, 122 bp, Homo sapiens
tgacatctgaacgcagcagcatgtgtgatgagcctgcaggtcttgcgggagcttcagaagcgcgggctgacctgtgacttgacatttccctgcggcgtgcagatctctcagttttcctttcc

SEQ ID NO: 73535 - DNA, 122 bp, Homo sapiens
cggcaaagctcacccttaggcgaggtcacaacagaggcaggtccttcctgcccagcctgccggtgtagtcacagccaagggtggcacttgaaaggaaaagggagaaaacttcggagaaattt

SEQ ID NO: 73536 - DNA, 122 bp, Homo sapiens
tacccgaagctcaggctcctcaaagtagtgcagtgacagggtcttcaggtcatgggtgcccgggtcgtactccaccacagacagctgcggtcagagggcacagccgtggctgccgactgccg

SEQ ID NO: 73537 - DNA, 122 bp, Homo sapiens
catcctggaggagaagcgggcagtgccggacaggatgtgcagacacaactacgagctgggcgggcccatgaccctgcagcgccgaggtgagtgagggctttgggccggcggtcccagggcag

SEQ ID NO: 73538 - DNA, 122 bp, Homo sapiens
gggaccccctcctcctccttggccttagcttcttcctgcaaggaaggtgatcccatcctccggtgggacctcctgcagcctccagcagcgcgccctccacgccctcctcccaaagtcagaac

SEQ ID NO: 73539 - DNA, 122 bp, Homo sapiens
cagacggcctgtacccacagtcaaaccacagacggcctgtatgcacaaccaaaccgcagacggcctgtacccacagtcagaccgcagacggcctgtatgaacagtcaaaccacagacggcct

SEQ ID NO: 73540 - DNA, 122 bp, Homo sapiens
catggatgccaaggtcaaacacaaaggtggaagatcactcattcaaagactgcagtgggccgagtcaagaaagatgatttgaaatgaaaatcttaggagagactgaatcaaaagtttggcaa

SEQ ID NO: 73541 - DNA, 122 bp, Homo sapiens
ctggaagagcctacaatgttccccagcacgctcttacgttgttgttaagggcaagattctcgccaagaggattaacgtgcgtattgagcacattaagcactctaagagctgagatggcttcc

SEQ ID NO: 73542 - DNA, 122 bp, Homo sapiens
taggaagtgaggagcacctcttcccggctgccatcccatgtaggaagtgaggagcgtctccgccccaccgcccattgtctgagatgtggggagtgcctctgccccccgccccatctgggatg

SEQ ID NO: 73543 - DNA, 122 bp, Homo sapiens
ctgctggtaccacagagtaggggtgttaacaaggatggcacaccctgctgtggttggggacgggagaactggtctcagccatggacccactgggcctgcccgggtcagcactgtccaggcat

SEQ ID NO: 73544 - DNA, 122 bp, Homo sapiens
gtttacaagagggggtcgtgtcccacttccctggcgaactcctacgaatccttcaatacccggcggtaccctctgccagtaaaggctcataaaacacgctacagtcacaggatctcctcaga

SEQ ID NO: 73545 - DNA, 122 bp, Homo sapiens
cttgttttgatattagataacatacagaagaaaggatttcaggaggactttgtcattttccgattactaaagtaggctagagctgtttttacaatacccctgagttaccacatgctgatgta

SEQ ID NO: 73546 - DNA, 122 bp, Homo sapiens
gagttggggttcgggcgctgaggcagagacgccaccctaagtcccatcagtcctggggatcggaccagtggactttctcttaagatttcctctttcattcttaagaatagaagtgttattat

SEQ ID NO: 73547 - DNA, 122 bp, Homo sapiens
cagatagagtcgacttatcaagacaggataattgcaataaagggtttaattcacatcaatcgagctaaatgagagaccagagttttattactcaaataggtctccccaaatattttgagacg

SEQ ID NO: 73548 - DNA, 122 bp, Homo sapiens
agtcacaggatagggtgggatcttgtgggaacctagcagtaggaattggcgcgagcagctcggtcaccggccctactgtctcagagggcggacccagctcgggctggtagtggggcgggggt

SEQ ID NO: 73549 - DNA, 122 bp, Homo sapiens
cggcaaacgcttgtccctcacagggcgccgccatcttggtccgctgccgagttgcttccccgagagtttgaaggctccggaacttccgtcctgggaggttaatatccgcctcttgaggcagc

SEQ ID NO: 73550 - DNA, 122 bp, Homo sapiens
gccgccgcccctgccgtggccccggcgtcgctgcagcacgaagaaggggttggcccgctccgtcacccacagcgcattggccaccagcacctcctccgggctcagccacatcgcggagccgc

SEQ ID NO: 73551 - DNA, 122 bp, Homo sapiens
ccgctcagcgtccccaccttcaagtgcactcctgtctagggcttccctttgagccagggccgggtgtagttgcgggactggcttgaagggaatttctatttctcatcacgccttggcctctc

SEQ ID NO: 73552 - DNA, 122 bp, Homo sapiens
actctttggatccaagtgagaattctgtgcacaccctgcccttgtgtggcatggcgcctgcgcactgcgtttcgtgtgcctgcgttctgcctgctggctattggtggctgtgttgtcttgac

SEQ ID NO: 73553 - DNA, 122 bp, Homo sapiens
tggagaacccagagagggtggggagatggaatcccggcgagccagcgctggcagggaccacggggagcagctggtccagccgccggttttccaagagagaagactaagaagtgagtcacttg

SEQ ID NO: 73554 - DNA, 122 bp, Homo sapiens
atccgaacaacctgagcctctggcccggtccgcagactccctctctgcacagatcactcccgatcccgctcactcctgggacccctcaagctggggagcgcagccctgggcctctccgaacc

SEQ ID NO: 73555 - DNA, 122 bp, Homo sapiens
cgctgggccgcgggcgcaagaaagacgcggaccctcgaggcggacgagttgcgggaacttcgcttgcctggaggacacggcggcccaggcggccgggagcgccggcgccgagccgcgctctg

SEQ ID NO: 73556 - DNA, 122 bp, Homo sapiens
ctcttgtacatacttctttactctcctcccgccaagttcattgaaagagaacccatgtgccggtccagagcatcgctgcatccgtaagcagctagacctcagcttcctctgtcaccatggtg

SEQ ID NO: 73557 - DNA, 122 bp, Homo sapiens
accgggacgacccctgggtgataggagagccgcagtgagcccagggcacggtgctggggccgctctggccgccgccgccaagcgtcacaggaaaacagcaaccaggaccccgcggctcctgg

SEQ ID NO: 73558 - DNA, 122 bp, Homo sapiens
agacagggaagctgaggacatggcaggagtgtttgacatagacctggaccagccagaggacgcgggctctgaggatgagctggaggagggggtgaggcccggggtccccgggggcccgaggt

SEQ ID NO: 73559 - DNA, 122 bp, Homo sapiens
gtgagccagggcaagaagaatggatttggccctagagtacgggttctccaaatgtaacctcggccctacagatctctgagactatgtcagggggtttgtgagattttataacaaaattaaga

SEQ ID NO: 73560 - DNA, 122 bp, Homo sapiens
gttggtgaagtagcacatgcccttaaactggaccaagaaatcctctgcggagaatcacggcgggtcagtcaggccccagcacggccctagccccagcccccagccggaccgcacccttcagc

SEQ ID NO: 73561 - DNA, 122 bp, Homo sapiens
cgagagtcccctggagttgggggtccggggcccacgcggacagccaggctcaggagctctcgggggtcggcagcgcggacccccggatccccgcaggctgggccgcccttgcccgcgctagc

SEQ ID NO: 73562 - DNA, 122 bp, Homo sapiens
ttaccgcccgcggagagaagccgatcgagcctttgtctggaaagtcagcatctccggctccggctgcaatgtgttcctggtgacattagcatcgggcagacccgccggaggaggggggtcgc

SEQ ID NO: 73563 - DNA, 122 bp, Homo sapiens
agatggctgccctggtgttcctaaatgttggcacagcccaactgactcatgtttatgtcccgcagttgagaatatgaagaaacccaatgcctggaatacattgtgggttgcactgcatttcc

SEQ ID NO: 73564 - DNA, 122 bp, Homo sapiens
tcaatatttaactgagcatctactgtgtgccaggcactattctagacaatgaacatacaacgagtaaacagataaaaatctctgtcctcagggagtctgtatgttggggttggggtgggggc

SEQ ID NO: 73565 - DNA, 122 bp, Homo sapiens
aggttggcatgagcgatgacatcagagattctgaccatcctgattggagggaccggactccgtggtgcctggagatcagttggacaacagtatcttctcagagctgttctccactcctgact

SEQ ID NO: 73566 - DNA, 122 bp, Homo sapiens
gtggttttcaaagtgtgcatctccatcagtctctctggcttcctgatgcctgactgtgtgcgtgatgtagagggtaccattacaagggattaattgcacacgggccagtgtgtgtgcaaaga

SEQ ID NO: 73567 - DNA, 122 bp, Homo sapiens
ggggcgtcactgaacgtctctgtgccttgcttttcatttgcggagtggagataggagcaccgttggcatccgcctctccacgctggtgacggtgaagtgccggatccatgcggcccggagaa

SEQ ID NO: 73568 - DNA, 122 bp, Homo sapiens
gttccgaggcagttggtcctctccgggatgccgtaggcatcagctgaccggcccagcccacgtgactacaggggcacttgatgggaatcatggcagcatccaggccattgtcccgcttctgg

SEQ ID NO: 73569 - DNA, 122 bp, Homo sapiens
gcaatacactaacctctccgccggaagagaagaaggaagcgccagggacgcacgcttcctcggcaggactgcagggaaagagccgcacccccagcctctcactactgcagccaacccatctc

SEQ ID NO: 73570 - DNA, 122 bp, Homo sapiens
gtctactggcacgtctgcctgccaataagatggtggaacttcgccaatgggcagagccaacgtgcctttttcggaaacacccccttcctctcttgacaacttgctttctgccgctattggct

SEQ ID NO: 73571 - DNA, 122 bp, Homo sapiens
tggccaacatggtgaaaccccctctctactaaaaatgcaaaaattagttgggcgtggtggcgcgccctgtaatcccagctactggaaggctgagacaggagaataccttgaacctgggaggc

SEQ ID NO: 73572 - DNA, 122 bp, Homo sapiens
gtccagaccgtgaccagagccaggcacgtccatgtcgccctcattgctctcggtggcacccgtgcccctgctctggcacgaattggggtcccaaggtggggcatacagatctgtgcatgggc

SEQ ID NO: 73573 - DNA, 122 bp, Homo sapiens
tcctgggatggaaaagacacaggaagtagaatcacagagccacagacaactgcagtgacacgtagcacgagtaagagctaaacttcgaatattgtaagtcactagaattttggggttgctta

SEQ ID NO: 73574 - DNA, 122 bp, Homo sapiens
tcttccgaggcgcccagaatctcagtccaagcctggccctggtcgcctcgcactgcccaccgcactctgctgggcaccttgaggttcttagaaagcgccagctcctcccgccctcagaccca

SEQ ID NO: 73575 - DNA, 122 bp, Homo sapiens
cccaggtggtgaccaaggcccggcgcagtggccccggagcgtggaggggcagctgctgggcggcctcccgggggagggtgacggcttcacccgccaacgctgcctccctcctgggattaggc

SEQ ID NO: 73576 - DNA, 122 bp, Homo sapiens
tcagatttagccagaaaaggggaaataagtctccctcgccggccaaatcatggcctttgtcgctttcggctccccattggctgcggccgctgtggccccgcctccttgagtggtgcggagct

SEQ ID NO: 73577 - DNA, 122 bp, Homo sapiens
taggaggggcggccccagccctcggagccgattctcggcgctgcgctaggacatcagaggcgatacaggttcgatgttaaatgaaccttcaggccgccggacaatggcgcagacctcacacg

SEQ ID NO: 73578 - DNA, 122 bp, Homo sapiens
tgtagggggtgagggggtcctgggggtgagttccagggtctgcaggcttcgggggagggccggtccatccacatgcttcctggtgcggagggggctcgctggattccaaggaccagggccag

SEQ ID NO: 73579 - DNA, 122 bp, Homo sapiens
cggctccgcatgtttctgaacgagctgaagctgctggtgctgacaggcggggggcggccccgggccgagccgcaaccccgggggggccggggaggcggctgcggctgggcgcccttcgctgg

SEQ ID NO: 73580 - DNA, 122 bp, Homo sapiens
aagagagagagaaaagccccccgccggaaccggaaatacccgctcgaccatgcaaaatggcgagccccatgatacatttctgctcaagatggcggcgccatgtaatgcaaaaggcagaggga

SEQ ID NO: 73581 - DNA, 122 bp, Homo sapiens
acaccggtcccctctgctgtgggaccctgcgggcttccagaactggcgtgaggtccgagtcgctgtgggaccctgcgggcttccacaactggcatgaggtctgagtcccggtgtttcacaat

SEQ ID NO: 73582 - DNA, 122 bp, Homo sapiens
ctgccaggttgcctgaactaaagatgccatggagcaggagtgtcttggtgcattgttccccgcttaggagtacctttaaaaagggggtgaaataaatttggcttaataattgtattctgact

SEQ ID NO: 73583 - DNA, 122 bp, Homo sapiens
ggtacaaattctatttctctgcctgatccccagtggtttaattttttgtttcctaatcttcggcctcagtcaaattatcttttcatagggaaaatattcctagcaacctaaagtacacaact

SEQ ID NO: 73584 - DNA, 122 bp, Homo sapiens
gcggtactccgccagagcaaacactttctcacaatagcggcaggggtacttcctccgccacgagtgtacattgctgtgtctcttcagactggacagggtcacgtaggaacgctcgcaggccg

SEQ ID NO: 73585 - DNA, 122 bp, Homo sapiens
caccaagccatgtattcatcttcctggagctgcaatgctccagctggggcagaatagagacgtcaatatcttccttaggttcctccttggcaaatgtctagggcagaaacaaggtcacaaga

SEQ ID NO: 73586 - DNA, 122 bp, Homo sapiens
cgctcatctctgcggccacgcccgccccttcccgccacccaatcctagcgcttgtctctgcggccgggccccgcccccacccgccccccgcccaatcctcgcgcggactcatgtttgcccgc

SEQ ID NO: 73587 - DNA, 122 bp, Homo sapiens
atcctttgactcctgagctgcacagggtgcggggtcctgacgcagtggggtccctagaaacgggtgccccaaccaactgggctctaaaatgagatcctcctgggccccatggggaacggggg

SEQ ID NO: 73588 - DNA, 122 bp, Homo sapiens
gtctgaaacgtatgcgggctgacgtgtgtgaatgtgcgttcctttgcgtggctccaaagccgtgctccatcgcaccaatattctgattttttagtccgttctcctgtggatggtcactggct

SEQ ID NO: 73589 - DNA, 122 bp, Homo sapiens
gtctcatcaccaagttgctgttcaaaaccttggagtcacccttggcttgtctgtccctcacgcccctgatgtgatctgtcaagaattcatgtcagctctttctccaaagtacaagcagaatc

SEQ ID NO: 73590 - DNA, 122 bp, Homo sapiens
cagctttcaggcccaggctggtgcgagacagaagaggggactgaggatatgaggccaagacgcaggccagcatggaggcattctcaaaaggaaggccgtcgggttatctagatcaaaatcac

SEQ ID NO: 73591 - DNA, 122 bp, Homo sapiens
ccctgaaacccgtgcctctccagccgccccggatctgaacttgtgatcacggagtgtttacgtcgtgccaggcattttaatgcattgttctagttcattttccagcagtcgcattcctcgcc

SEQ ID NO: 73592 - DNA, 122 bp, Homo sapiens
cagaaaccccatggtcagagaccaggtatctgcaaccccaacattcccagcataatgcctcgcacaaggctaactggagactgaggaagacaagtccttccctggaagatggtgccaacact

SEQ ID NO: 73593 - DNA, 122 bp, Homo sapiens
ctacttatagtcaacagaggcacgaaaactaagctgtgctattggctaacattacagtttcgctttaaccaatgggattgcggttttgaaaaacacttattttgattggacaaagttaatat

SEQ ID NO: 73594 - DNA, 122 bp, Homo sapiens
ctatagtggtcattttcataagtcagcagggggtagaggcaggaggcaaatccagcacatcgtcaaaataaccaagtgttctgtgccaaaaggaaatgtgggctaagaactataatgagagg

SEQ ID NO: 73595 - DNA, 122 bp, Homo sapiens
ccccgcccccgggccctacaggcggctcattgattggcctacttctaggaacccgagtctcgcgtgcttattggccctgtcacttaacgctagatggacggacctgagcgccagccaatctc

SEQ ID NO: 73596 - DNA, 122 bp, Homo sapiens
tcttccaaagttagcttggcctaagcccaggaataatgaaggcatcttgacagccaaaggcgcgcagagttgggggtttggttagattagacctcccccactgctataattttctcactgat

SEQ ID NO: 73597 - DNA, 122 bp, Homo sapiens
ggccgcgtgaggactacgcgctacccgcgggactggaggtgtcggggaaactgagggtcgcgctcaacaaccacctgttgtggtccaagtttaatcagcaccagacagagatgatcatcacc

SEQ ID NO: 73598 - DNA, 122 bp, Homo sapiens
actaagagcagcacgatgcttctctactgaatgatgtcatctgcagtcactgggaacacacggaggtagaccaaatgccctatatggtaagtggccacacgtatcgggtaggaaggattgcc

SEQ ID NO: 73599 - DNA, 122 bp, Homo sapiens
ctccccgctgcaccttcctccctctggttccatgttagcgcttggagtacaagtgacccccggagagagcagagggaggggaggaggcagaggggtgaggctggggagggcccagcgaatcc

SEQ ID NO: 73600 - DNA, 122 bp, Homo sapiens
ccatctcctgccctctcctgatctaactccctgctgcatctcttgctctcattccttagacgtcctccccttttgaccccgttccttcatccatcctgcaccccagtcccccagccctaaat

SEQ ID NO: 73601 - DNA, 122 bp, Homo sapiens
actagcaagctgcaggggtgtgaggacgggtagccacgggcagcctcctgcctcctgcctcggagccctgcccttccaggagctggccttggccatgtgcttggctgcagctagggctctgg

SEQ ID NO: 73602 - DNA, 122 bp, Homo sapiens
aaatcctgagcgaattctttgctgccaggacagtccataggctcttactcttagaaattacgtaagcatgagcagtcaacgctgaaaagcagagaatgtggttttctggcggactccagagg

SEQ ID NO: 73603 - DNA, 122 bp, Homo sapiens
accgcagtcacacccatgaagcctgccctgtttgtgcagtgtacgcgtggggaagggctccggctgcttgttggactcttcaggagctggcatggagaagtgcttaggagcccaagtctctg

SEQ ID NO: 73604 - DNA, 122 bp, Homo sapiens
aatgcagctctctaaatgagtcctggggacctccaggaattcagtcaccattcctgactccgttccctctattgcttgccttttgtggaccatcacattgttccccgcacatcatactcctg

SEQ ID NO: 73605 - DNA, 122 bp, Homo sapiens
acaaatgacagcatgtaccgaattcctatgtagtacacaggccagttttgaatcttgcttcgtcttctccccacagcagtttcatttaatatttcctaaatactgcaatcagaaaatttcag

SEQ ID NO: 73606 - DNA, 122 bp, Homo sapiens
ctctgtcgcatttcaaaacaaaccatgatggagtggcggccagtccagccttttaaagaacgtcaggtggagcagccaggtgaaaggcctggcggggaggaaagtgaaacgcctgaatcaaa

SEQ ID NO: 73607 - DNA, 122 bp, Homo sapiens
tagaaagtaagaggtaaacacaataaataagacggcaagggacctcagggcagtgaagcgcgctttcatgcttggattgcagtgaccagtgctatgatgttgtatctgcttggtcagtgatg

SEQ ID NO: 73608 - DNA, 122 bp, Homo sapiens
tggttctgcggctcttagcagatgaactacaactcccaaaaggctatgcagcggcgggcccgcggagaaaagcgttttctctttggtgatcaacgcgaggatgttgccgcaaagccttttgg

SEQ ID NO: 73609 - DNA, 122 bp, Homo sapiens
ccgcgggcaacctcggagcttatactcctcccagtgacgggtctggagtgcgtgggggaccggctgttggcgggtgaggcttggcttgaggcacgcctggtggaaagggggaaagaaacagc

SEQ ID NO: 73610 - DNA, 122 bp, Homo sapiens
cctcctgtcctggaccctgttcgtccgctgccgtgctcaccaggccagccctcggtaacccgccagagccaaacacaggatttcacaaccccggccactttggcctgggtctgtgcggcatc

SEQ ID NO: 73611 - DNA, 122 bp, Homo sapiens
cagctccgatcagtgcttggtatgggaccttgggagagtgaggcacccaccctgagcccacgttccttctccgtaaagtggggacagcaaaatgctctcctcttagggatgccttgagtgca

SEQ ID NO: 73612 - DNA, 122 bp, Homo sapiens
accactgtccccacgagtttctgagagcagagtctgatggtgtcacgcccttccccaagccgccgtctctcctccatctctgtcagcctgtgcaggctcctggcccctccgtgctgtgggca

SEQ ID NO: 73613 - DNA, 122 bp, Homo sapiens
tcccatgcccaggatgccagccccagggagcacctgtctctgtaagaacagcctggccctcggggccaggacctgggctcaggcctagttcttcctactcactcctgactttgagccctttg

SEQ ID NO: 73614 - DNA, 122 bp, Homo sapiens
aatgctcacaacagcattattaataaccaaaaaaacagaaaaaacccaaatgtccatcagcggaggaataaaatttggtgtattcaatttaatggaatattactcaaccataaaaggaagtg

SEQ ID NO: 73615 - DNA, 122 bp, Homo sapiens
cctgacctcaagtgattgccggccttggcctctgaaagtgttgagattataggcaagccacgcctggcctactgttaggattacgctattatgttattattgttgttaatctctcactgtac

SEQ ID NO: 73616 - DNA, 122 bp, Homo sapiens
gtgctgaagaatgaagtactgccaatcacttctccctttgggggtgtcagcccctggagccgctgctccttaccatagctattggtggttggctttcctatgccaaggcaaaaatcaacaaa

SEQ ID NO: 73617 - DNA, 122 bp, Homo sapiens
ggcatgttttctttaatatcaacatgtggttgaaagtcctgaaaaccttgggtaaagaagcgggaggaggtttttaggaagaagtttttctccagtgtacagaactaaagtcttttttcact

SEQ ID NO: 73618 - DNA, 122 bp, Homo sapiens
gcaaacggccccacgaggggtgccacgagagtcaactggcattgggtttgtactcagggtcggacctcagcctggcacctaccttcctcccctccagccccagccgcaacgatcacaggagt

SEQ ID NO: 73619 - DNA, 122 bp, Homo sapiens
acgtaacattctttgcgtcgttagccggcctgctgttgctaagatgcgcagtatgcgtaacgcattctgtttagagaatagaggattttgcctgattccgatctcggtacagaccccgcggc

SEQ ID NO: 73620 - DNA, 122 bp, Homo sapiens
gccgctgtctgccaatcgggtggtgaaaggcagacaaatctaccccgccaccagcaaaaacggcgcgtaacccttgcggcgccggccgaaccgcgccagagctggcgcggggaaagggagat

SEQ ID NO: 73621 - DNA, 122 bp, Homo sapiens
aaaagaaatgtaagagttagtccattgtttccattttacggattagaaaaccaagaccaccgagaatgagcctcagttgtttagtcacggagcacagagccgtgactaaacaactgtgggaa

SEQ ID NO: 73622 - DNA, 122 bp, Homo sapiens
caggtctctgcgggacccacggggctggcgtctcctttgtccccatcctcccggcccctgcgccagcctgcccacacatgggtgctgcccagtggggctgagcaggaggcgggcgctggtgt

SEQ ID NO: 73623 - DNA, 122 bp, Homo sapiens
gagataagtaaagggagaaagataaataaggacacagtggctgtaagaagctgtggacatcgtcttaaagattgcccaaaatgcagtgaattattgatcccctgttcaacgcttacggttta

SEQ ID NO: 73624 - DNA, 122 bp, Homo sapiens
attttactgatgatgttaccgagacttgaagaatcaaggcacctgcccaactactgagaacgcccaaccaccgagtggtggagccaggactcaactcaagtctgccccacttcaaagcccgt

SEQ ID NO: 73625 - DNA, 122 bp, Homo sapiens
ggaaattgtccctaacacttggcgctggtctctttaaaggtgtgtatctcactgcagggccggtgttgctgtatttcactgtctgcccaccatactctgtgttcattgaaggtggaaactag

SEQ ID NO: 73626 - DNA, 122 bp, Homo sapiens
tttcagtttctcaaacttcctagggctggagtgatgaccatcatcgtaaacataatctcacgtacccaagcacagctttattgtttcggatcataggacacagagctttcgctgggagggcc

SEQ ID NO: 73627 - DNA, 122 bp, Homo sapiens
tgaccctcgtggtcatagctggttgtcctgacacagacacttggggtggttccggaaccgcgtcccgttcagaaagtctcttcccagcccagcaagggctgtaaaggaaggctgtgggctct

SEQ ID NO: 73628 - DNA, 122 bp, Homo sapiens
ggccagagtgtcctggtctggccatgttagaacagctgggccatgatccctccgcagggtcgaaggggccgcagctgggcctggaggccactcctggccacgtggcacgcccgctccctgcc

SEQ ID NO: 73629 - DNA, 122 bp, Homo sapiens
agaggcagctgtgtctctgggatgaggatccctacccaggctagggtgggagcaacctggcgggtggctgctctgggcccactgctcttcaccagccactagagggggtggcaacccccacc

SEQ ID NO: 73630 - DNA, 122 bp, Homo sapiens
agatgtttttcccttgggttgggaatggcatgttctgagcttcttttgacttctagtcctcgctgccggtgcagttccaagtagagtcaacataaagccaggcacttgtgagatggagaccg

SEQ ID NO: 73631 - DNA, 122 bp, Homo sapiens
ggccagccttgagcaggagaaccggacactgtgtactcagcagggggagccaagacttagcgctaaccattgcacctggggctgggagccagcgccggagccaggaggcccgctaggcggct

SEQ ID NO: 73632 - DNA, 122 bp, Homo sapiens
tggcaccatcattcagggccacctcccggtgggtgtcatcacttttattgcccaccagcacgatggggaacttatgcaggttgttacctttgatcttgcagatcagctcatagaaggccttc

SEQ ID NO: 73633 - DNA, 122 bp, Homo sapiens
agactgagaattccttggggttaaggtttggagcaggaggtgggcatcctctggggctggcgctacgccccaccctcgactgtcccgggcctcccctcccaggcacaggagcagagaagact

SEQ ID NO: 73634 - DNA, 122 bp, Homo sapiens
tgcaggtgactggagtcagggagagagcctgtgcctgtgcgaggaatggtacataacctccgtgctccttggaaaatcagcagcagcattttcatatctgaagaatctctatgccaactatg

SEQ ID NO: 73635 - DNA, 122 bp, Homo sapiens
accgccacacagttggctgcggattaaaggtagggtgtgacgtgctgaagagggccaaagcgagcccctccctgccgcctgcatgattgggtactatacagccaaaaatagcgtttttagcc

SEQ ID NO: 73636 - DNA, 122 bp, Homo sapiens
tccttctcctgaggaggcaagaattaatgttgctgcagactccttacagataactgccaccgctaatatgttgagatgttcacacatgcatgtgtgaggcccttcaaaatgtgagctgcggt

SEQ ID NO: 73637 - DNA, 122 bp, Homo sapiens
cagtgcaagttctgtcaacccgaggctcaaagccggggcgtgggcctcgtgctgtgcaagcgtctagggcttcgtaggtgtgttttgatgaaggtcacagacgcgcctgggtccctggtggg

SEQ ID NO: 73638 - DNA, 122 bp, Homo sapiens
gctcacttgcctgtgtatgccgttcagttagctagacttagcaaggaaacagttccttgacgctcaaatcataaaggaagagctgcaaagagggcaataaaaagtgttttcttctcttggtc

SEQ ID NO: 73639 - DNA, 122 bp, Homo sapiens
caccgcgcctgcgcacacgaggatgtgtcagggatgggtctcaagctggccacgcccccgcgggagccctgcccacacacaagccacggcaccagccgcctgtacctggcacacaggtacct

SEQ ID NO: 73640 - DNA, 122 bp, Homo sapiens
ggcctgttcagccgcttcccacacctgacaggtcagatgctgctcctgccacggggccggcgacgagccacaggctcccgaaaaaggcaaggggttcactttaggaggggagaggtgagcgg

SEQ ID NO: 73641 - DNA, 122 bp, Homo sapiens
aacttttattccttacccactagatgagaaattgatgctgttttccccacacctacaaaccgcctatgttttttctctgtgatggcctctggctcaggtgtgggtaagaagagtaactgaca

SEQ ID NO: 73642 - DNA, 122 bp, Homo sapiens
aatttcctgaattcaatttctcattgcttaggtcatgtttgcaagtggcccaccctgccacgttaagtccacattgtacagtttatttctggagagaacatattatgttaatttggattttc

SEQ ID NO: 73643 - DNA, 122 bp, Homo sapiens
ctcaagcgatccacccgccttggcctcccaaagtgctgggattataggcgtgagccactgcgcccagccccattcatctttatcagtgcacctagaagagttgggcatcccactgctctagg

SEQ ID NO: 73644 - DNA, 122 bp, Homo sapiens
tctgaggacacagcgttgctcataataatagctcgtatttattgaccacttacaccgtgccgggctctctattaaaccgttaacgcgcattaatcttcacatcagctctgtaaaatcaccag

SEQ ID NO: 73645 - DNA, 122 bp, Homo sapiens
tgccttccattcacttggcgcccgactgccagtgcgcatgcgtttgaaggcggtgcagggcggggagcacacccctgcgaagtgccgggcaccctttgggcggctcccgccggcgagctgga

SEQ ID NO: 73646 - DNA, 122 bp, Homo sapiens
ccacttccggcttggaggccatgccaagctcaggcactgtagtgcgccccagagagagagcgagagcgagagagagagtgaggggcggggggggaaggaggacggtggagagaagaggggag

SEQ ID NO: 73647 - DNA, 122 bp, Homo sapiens
gccgcagagtgcagggcgggcggggccaggccagcagggagtgagcttgtctggccgcctcgcctcggagccactgcactgctggctgcagacacaggctgcaccatgaagccagccctcct

SEQ ID NO: 73648 - DNA, 122 bp, Homo sapiens
gttgggctaaaggtgacactggcgtctcacgggctatgaagacggaatgcctcttaatgccggaattccaagacggaatgcctcttaatgccggtaggagcagaagtgcttttcctaagggg

SEQ ID NO: 73649 - DNA, 122 bp, Homo sapiens
gtgtcattgcaaggagcgaaaggacctctggtctctttcccagacttcaccagatacttccgcacattcaatattttctcaatgcacatgctctatctagttgccaggctgttgaacatgct

SEQ ID NO: 73650 - DNA, 122 bp, Homo sapiens
atttaatcccccttggtacaaaggctcatcttttcactaagcagaagcaccattgagatacgcctaacctttagggttatatcccaaatggggagtccagggcctacgcttggattatctag

SEQ ID NO: 73651 - DNA, 122 bp, Homo sapiens
ccaattagcacagcaacagaaaaccaaataccacgtgttctcgtaagtgggagcaaaacacggtactcagggaggagaaatggagggagaaacggaggggcaagggttgaaaaactgttggg

SEQ ID NO: 73652 - DNA, 122 bp, Homo sapiens
acaaggccaagtgcctgcgcgttctttcccgcggaagtagttgacatttacaaggagcagcgcccccaaaggtctttagctgttttttaaggggagaacagcctttaccctctttggacttt

SEQ ID NO: 73653 - DNA, 122 bp, Homo sapiens
ctcttcagttcccactggaccctgatttgagctggctctggaaatagctgagaacccagacgcgggacgcaggggcaagggctcaaggaggagagtcagagtcaagaggctgccacgccaag

SEQ ID NO: 73654 - DNA, 122 bp, Homo sapiens
ggtggccagaggggaggtccgaggcggggaagaggtgggactcacagtccagctcaaagacgggcaagtggccactagaaggaggcattagccacagagaggggacgacctgctccaggaca

SEQ ID NO: 73655 - DNA, 122 bp, Homo sapiens
cgggcggcgcggagcggcgggagctaaccagatgggctggcggccggtctgggaatggggcggccgcgcaggaacggcctccagctctcagcgctccggtgcagtccccacccgggcccgcg

SEQ ID NO: 73656 - DNA, 122 bp, Homo sapiens
gtaatttacccagagacaaagttaggaagtgcagagttcagattagcacaatattgttcccgccattaccatcccagctccatttgttcatgtttcaaagtcttacacccacctctagctag

SEQ ID NO: 73657 - DNA, 122 bp, Homo sapiens
cccgtcccctcccccaacgccccggccggccggcgggcaggcggctgctgatgctctgtgcgcacctccccacggggcatcctggggatctggtggctcagagtcgccgactttcctgcccc

SEQ ID NO: 73658 - DNA, 122 bp, Homo sapiens
gaaagcatgacatctggcatcaccctgcctggattggtcttccaaacccagcctggtgtccgagatgtaatctccactccctctttcactgtttgtttcagtcaatcataaactcttcccat

SEQ ID NO: 73659 - DNA, 122 bp, Homo sapiens
gtctcaggggcccactgaccaaaggtggccggaatcgcttccccgcctccacctgcagcccggcctctgccctggctggctactcatagcaggctgttgccatgggaacagcagagctgttg

SEQ ID NO: 73660 - DNA, 122 bp, Homo sapiens
tccaacaggcccactagagaggcgggttttccaaagcctggcacggcccactgcaggtgacgccctctgccctccagcgccctcaggcctctggggtccacccttcctccccacccgactcc

SEQ ID NO: 73661 - DNA, 122 bp, Homo sapiens
gtccagtgtggatgctgctggcctcttgcgagatggtttcttcattcatctcctttgtagcgcttggatggtggggaacgggggagggctgagtctcttttttaacctcagacagacgcaga

SEQ ID NO: 73662 - DNA, 122 bp, Homo sapiens
tgggaagggcctggctaaggagctagtcttctgttctgtgtatgaaggatgggccatcagcggggttaagcaggtgagggaggcgaatagctttgcattttaggaggatttcttgggtctcc

SEQ ID NO: 73663 - DNA, 122 bp, Homo sapiens
ggaaacggaaggaatccagcatgggtgattagggctacccactgcccctaacccaaggaccgtcatggtgccagtgactgagttactgcttctcaccttcacacccactcaactgttctctg

SEQ ID NO: 73664 - DNA, 122 bp, Homo sapiens
tgtctcgacaacactgcccagatagctgagatcaatcagaaacaaagcagttaccaacaccggccggggggcaccgcccacgcacacccagagggaagcagggaggggcacagcgagcaccg

SEQ ID NO: 73665 - DNA, 122 bp, Homo sapiens
tccccctgaagagcttggcacaggtatttgccatgatcattgtcattgttgttgtctcttcgtaattgcggcctctttgtgcttattcataatccctctctaacaggcagaatggagcccca

SEQ ID NO: 73666 - DNA, 122 bp, Homo sapiens
aaagcagctttctaaagagccaggcaccacagttggtctggtggccctccgagcgagccccgagccttcccctcccaccttaccgtagctgagccatgtctcggcacaactcaatgttcggc

SEQ ID NO: 73667 - DNA, 122 bp, Homo sapiens
acaccagagatcatttttcagagaaaaccaacagatcaccgtctaagtgcgtcgcttgggcgccccaccccgtctgcgtcctgcatccatctccctgttacagtggcccgcatcatgattaa

SEQ ID NO: 73668 - DNA, 122 bp, Homo sapiens
cgaactcctgacctcaggtgatctgcctgccttggcctcccaaagtgctgcgattacaggcgtgagccacatgcctggcctttttctggatatttcctataaatgggatcgtatgctctgtg

SEQ ID NO: 73669 - DNA, 122 bp, Homo sapiens
aggttagagctgacagaacttgggtatttcgcttcccccaagtgagtcaggctctgttaacgccccagcaggttagactctggttcgctggagtctcctgaggacaggatttgtgaagcgaa

SEQ ID NO: 73670 - DNA, 122 bp, Homo sapiens
gcgaggaggcggcagggtgctggatcacagtccctgcacctgcagaatgcggatacctctcgctccagatagggcgactgcccccgacctgtgctgtaccctaagttggcccgtctggcctc

SEQ ID NO: 73671 - DNA, 122 bp, Homo sapiens
ccgccccggcatatttgtcctctcttctcgctctccccaagatatctggagtcgattttgcgagtccgaaggccacacccagggagtctgcttgtgcctgaacgtgatgaaggatctggatt

SEQ ID NO: 73672 - DNA, 122 bp, Homo sapiens
aggggcggcacacgcccagtggtgcccgaactggctcacacgtggtgagccgggagcgcgcggcccctccccgccacgcgcctcgtgccggccacccggccacgcccccaggactggctccg

SEQ ID NO: 73673 - DNA, 122 bp, Homo sapiens
atagagtttccttatttttaggggtctggatatcataatcctaactccattctacataatcgaggtcagtctcctttgtagtctctaggaagtgcagatggctccaatgatacaacctgaga

SEQ ID NO: 73674 - DNA, 122 bp, Homo sapiens
atctcaggtgatccacccacctcggcctcccaaagtgctgggattacaggtatgagccaccgcaggcggccgagggcactttttaaaataacgtattttggacactgctttgtccccagaac

SEQ ID NO: 73675 - DNA, 122 bp, Homo sapiens
gcccaaccctggggttgacacggactttagcgtctttttaaacttccggcgcgggctctgcggtggcacaggagggtcctccaaactttcctgcgatctcaaaggtccagattccacattgg

SEQ ID NO: 73676 - DNA, 122 bp, Homo sapiens
atttttaacaagctcccgggtgatgcctggtccctgctgctagtccctgcattataaggccgtacccagactatctaggtcaggggtcagcaaactttttctataggcatgaaatagtaaat

SEQ ID NO: 73677 - DNA, 122 bp, Homo sapiens
gggcggggagtaaggtgcaagactgcgccagattcaaggacgagggctgcccgattatctcgctgcataaggcaagagcaagaggatcctcaggattttaaagaggaggcgacggctgcagg

SEQ ID NO: 73678 - DNA, 122 bp, Homo sapiens
agatcctgacggggaagcccacgtacagtgaggacggggcagccccctgggcagctctcgcgtgtgctagatccagcagtgtgtgtgcaaggtctttcttttctttcttttctttttttttt

SEQ ID NO: 73679 - DNA, 122 bp, Homo sapiens
aacgtctctggggaaaaacagcgccacatttccaatcccagaacagggagcgtattggagcgcattctaaagtgggcgtgtcttgagaggaagggattgagagaaaccggggttgtttcgtg

SEQ ID NO: 73680 - DNA, 122 bp, Homo sapiens
gtgaaaagacccagaagatagttctgagcgcccacattcagagcctgagcccagaggcgtcgggaggaatggaggggtcagcgtgagcacggggcggcgccgggtgagagaacggcctggcc

SEQ ID NO: 73681 - DNA, 122 bp, Homo sapiens
agaaaggacgggggtgcagaaacctcagaccaggacagtgagtctgggtgctgtcacctgcggaaggacaggttgtgttcacttctctcccaccctctgcatcctctcttcaatccattttc

SEQ ID NO: 73682 - DNA, 122 bp, Homo sapiens
cacgttccttattgttacggttcgaggctctgttaataaaaacctagggctcgagtggctcggggccaacctctgggaggagtcgctgtgcctgtcctgcagactccgcgtctgaaatggta

SEQ ID NO: 73683 - DNA, 122 bp, Homo sapiens
aatcaaattggataccaccatcttcatattctgttccacgctgatttcatgtagtacttgcgttttatttgagcaaccaccaaaaacacagcttcacaaagataagacctgaacgatagaac

SEQ ID NO: 73684 - DNA, 122 bp, Homo sapiens
caattgatcgctgcgtgtgtttccaggactgtcattgcctttaacagagggcagggggctcgttcggtagtgaggatcccagagtgggccgtgagcccaccagcgtgaacacagagccttgt

SEQ ID NO: 73685 - DNA, 122 bp, Homo sapiens
ttctgaaatcttccttatattaattgctttctttttattagctcttatcccctgcaaaagcgaccttttggtacctctgcaaacgctgaagctgagttgcatcctccgggtcccccctgggg

SEQ ID NO: 73686 - DNA, 122 bp, Homo sapiens
caagactgttcaaatataacaagctgcaatttttttaaaggtctgtgttagaaaatacttcggaaaatagattgtatgaaatgggtgcagccatttaaaatatgtataaagtgtgtatgtac

SEQ ID NO: 73687 - DNA, 122 bp, Homo sapiens
tggagcagtctgccggtcggttgtctggctgcgcgcgccacccgggcctctccagtgccccgcctggctcggcatccacccccagcccgactcacacgtgggttcccgcacgtccgccggcc

SEQ ID NO: 73688 - DNA, 122 bp, Homo sapiens
aatagagcctgctaggcggattggctgctacgcggctgggccctgtttccggtacctaggcgggcagccatggtgaccggcgagcggcatgcgacgccgcctctgtggcctgtggaggcccg

SEQ ID NO: 73689 - DNA, 122 bp, Homo sapiens
tgctgaggagcaaaggagtaaccaagagatccagtgaccgacagagcaagagccatgccgcgccggggcctggtggctgggccagacttggagtattttcagcgtcgctatttcacgccggc

SEQ ID NO: 73690 - DNA, 122 bp, Homo sapiens
aaggtctccctacgcgtgttgtagtaaatgtgtgtctctctgtgactgacagtatgctggcggtcagggcccaagctcagccttgcgtttgagtgtatctttagatggaaaaggcgttggtg

SEQ ID NO: 73691 - DNA, 122 bp, Homo sapiens
acatttgtcttcatcttgcttgacctttgacttctctcaaaatcactagacacagttcaccgcatctttttttttttttttttttttgagatggagtctcactctgtcgcccaggctggagt

SEQ ID NO: 73692 - DNA, 122 bp, Homo sapiens
taaattataaacgggccgggtgcaatggctaacacctgtactcctagcactttggaaggccgagaggggaggattgcttttgtcaaggagtttgagaccaatttgtacaacacagggagacc

SEQ ID NO: 73693 - DNA, 122 bp, Homo sapiens
ttgattctactttttctgtagttaatccttgcatattctcctttcatcctggcttgccaacgcagtcttaattccgccttttttttttctaatggggagcaaaaagaaattcactgtctttt

SEQ ID NO: 73694 - DNA, 122 bp, Homo sapiens
ggggcctgccacacactgctctggcgaggcatcccaccggggcaagtgcctacccgggggcgctctcaggatccgcgtcactcgggctgttgggagttccctgcagggatgttccacagggc

SEQ ID NO: 73695 - DNA, 122 bp, Homo sapiens
cctggcaggcagaccttggccaggtgatcagaaagccgtgcggacgtcaggaccctgatacggtgtgacgggaagggccccgcacctctgtgggcatcttcccaaaacccatcacccagtct

SEQ ID NO: 73696 - DNA, 122 bp, Homo sapiens
aggaaatgggccgaagcgggattcgaaccggcggattcgtttctctgcagcccggagccgcgtagccccgccccggtctccctagaaacaggcacccgtgtctccatagcaaccgctccatc

SEQ ID NO: 73697 - DNA, 122 bp, Homo sapiens
tagcacaaatcagcctttcagaacttagtcactcctggggactacaggaaccagttccagcgggtctgtacacaccagttccacatgcaggagtcttattactgatttctacaaggagaaag

SEQ ID NO: 73698 - DNA, 122 bp, Homo sapiens
cctacgggccccctggtcggcttctgcggtctccatgacggtggccgtgttcttcagctgcgccttcactgccttctggcctgcgctcgccctctaagtcttcaccatcaccaccgagccgt

SEQ ID NO: 73699 - DNA, 122 bp, Homo sapiens
ccttctgcactcccagctacttcacgctcaactcacaggttctgacaggtcagggcaaggcgggggcccaatgagagtggcagactgccttgacacagccccgtgtttccccagacagcata

SEQ ID NO: 73700 - DNA, 122 bp, Homo sapiens
ggcaagagcgtcgctggcgcgtcctcattctgcgattgctgtcaggggaccatccatcagcgccgccctggacgctgggccagactgcccgccgcccgccccgcccgggtctctccagatcg

SEQ ID NO: 73701 - DNA, 122 bp, Homo sapiens
caaactcttgacctcagacaattggcccatcttggcctcctgaaatgctgggattataggcgtaagccactgcgccccactggatcaggtaatgttaacagtcatttctgtagaccagtgag

SEQ ID NO: 73702 - DNA, 122 bp, Homo sapiens
atggcatgctgcaagctctgtgggcgctggtggccaggatgcggacaacccctgccgctacgtgtcctcaagtgagctcagctcttgtgtcggtgggagctggcggtgggtccctgagcaga

SEQ ID NO: 73703 - DNA, 122 bp, Homo sapiens
aagtgacaagagcctggaaggcggtcgaagccaaggatgcgcctcctctttcagctcccgcggtggcggaggttccagctgctgaggaggcctatctccagggcctctgatccccgggttta

SEQ ID NO: 73704 - DNA, 122 bp, Homo sapiens
cattgcaccagcggatcccggtgggctatcaggaaatagcgattaattggtgaattcagtcgttcgttcaataaatatttattatgggtcaggtaagtggctcacctctgtaatcccagcac

SEQ ID NO: 73705 - DNA, 122 bp, Homo sapiens
ttcaggtttcccccggttttgcagtgcggagaccacgggggcccactccccgtggctccgcggaccccgccccttacgtgcccggccccgcccctcacgccgcctgtgtccgcgccgccgca

SEQ ID NO: 73706 - DNA, 122 bp, Homo sapiens
cgtggagggagaatggctgggtgtcccgtttgggctgagtgcgagggagaaacctggcctcgctggctgacgccgaccagctgaattaagcaccgtgtttcccaagtctttcacgtggacaa

SEQ ID NO: 73707 - DNA, 122 bp, Homo sapiens
taagagagtgtcaggcaaagagagaccgggaaggccaggtcctggagactgcagcgaagccggctccctggaggacctgcctacacaatggctaggggaaggccacatgtgcaggaaagaaa

SEQ ID NO: 73708 - DNA, 122 bp, Homo sapiens
gtcattctcttcttgtcaaaacctgctttctgtgtagactctcatgccagtgttagtgtgcggctgtgtacctttctctccttcccctgccctgcttcggtccagcatggtgcccgatacat

SEQ ID NO: 73709 - DNA, 122 bp, Homo sapiens
aaccaccctgggcccagaaacagaggcctgccgaggggaggagcctggcctctgtccacccgtcagcagtgtgaagtctgttgtgtttgagcttctcagagtggaatgactccttttccttc

SEQ ID NO: 73710 - DNA, 122 bp, Homo sapiens
cgtgtgttctgggactgtgttttaatttgtgagggggacacgcggtcttgcattggcgggcgcgggggctgggggggcactccaagggcagccggagggttcatggaaggagtcacggtgtg

SEQ ID NO: 73711 - DNA, 122 bp, Homo sapiens
ggcaggatgtgcaaggcctctcgaggttttcaaatgggcccccgaggcctgggagatccccgagtagccacgcgggcgccacttcagggacgcggggcggcggctactgtgggccgggaggg

SEQ ID NO: 73712 - DNA, 122 bp, Homo sapiens
gtccagttacttgtgaggagccgtggggcgtggcccgctcacctccctgctgttctcaagcgccccccacaaggaagccttctgggacccctgacactcatgcccattttgttgcctggcgt

SEQ ID NO: 73713 - DNA, 122 bp, Homo sapiens
gcggcgccgcactcggggtgtgcctcgcgggggttgccgggcagctggtggaggtgaggccgcggcacggagggactggggaggctgtcaccctccaggcagggggctgggggagaggggac

SEQ ID NO: 73714 - DNA, 122 bp, Homo sapiens
tcctgaggatgaccagacctactgtgcctgcctcacaggggatacaggcccacagttctgcgctgccccgaagctctctgcttctccacccttttcctctagcgaccgagtagttagttgac

SEQ ID NO: 73715 - DNA, 122 bp, Homo sapiens
aaccggcctggcaccatggaaagggcacggaaagggctgccaaagccgtcctcgcgcccacgcacgaaaccaccacctccgcagccgggcccagcagctccactccatctccccttttcaaa

SEQ ID NO: 73716 - DNA, 122 bp, Homo sapiens
tggcgtgcgcctgcagtcccagcttgtacccgggacgcagaggttgcagtgagctgagatcgagccaccgcactccagcctggtgacagagcaagactccatctcaaaaacaaaaaaaggaa

SEQ ID NO: 73717 - DNA, 122 bp, Homo sapiens
cacccacgtgcacacccggcacctccacacactaaaggggacagacaggcgggaatccctcgactgcacacgtgcacacagcacagcctcacccctgcggacacctgggcattcagacgcat

SEQ ID NO: 73718 - DNA, 122 bp, Homo sapiens
ttttgttttcctgcagtggatcccagattgtgggtaagcagaagagtcttttaaagattccgaaataaactcccaagcttgttagctcttgttgaattgaggccttttcctcagttgccagt

SEQ ID NO: 73719 - DNA, 122 bp, Homo sapiens
tcctcccggacaaggagctgggttttgagcctgacacccaaggctgagatgtttgtgctccgtagcttctagtctggaactgctgctgacccctgtgtgacatcacagggcctcagtttccc

SEQ ID NO: 73720 - DNA, 122 bp, Homo sapiens
ccgccagcaggagggaagggtgggcctcacgtggagcgggagaactgggagctgcgcgtgcgcagactggagccggttcattcataaagaaacagaaaggaacccggggtcctaaaggcgtt

SEQ ID NO: 73721 - DNA, 122 bp, Homo sapiens
tgcttacgaaaaccaaattgacatctgcagctcggacctcccctgaaccaagcccaagcgcggaagagggcggaaggagaacccctggactggtcctcaccgagcactacaggtggcagagc

SEQ ID NO: 73722 - DNA, 122 bp, Homo sapiens
agcagattccaattcaaccaaaggaggaactaactgtgggaactgtctggagctggacagcggggagaacgtgcctgtcactggagtacacaggtaattagtcaaactgggacttgacatgg

SEQ ID NO: 73723 - DNA, 122 bp, Homo sapiens
acccatgcgtgtaaaactagtttataaacggctcagacacagctgccccgtgctgagacacgcctcaagactgggggtccagggctccccagaacgctgctgggcctcatccgtcagcaaat

SEQ ID NO: 73724 - DNA, 122 bp, Homo sapiens
agaaatcctcaggcattcggtgctcagtgttgccttgtgctgtccaatataatagccattcgccacgtgtggctatataaacgtaaataaattagtctatatagaataaaatttaacatcca

SEQ ID NO: 73725 - DNA, 122 bp, Homo sapiens
ggaggaaataatgcgtcgagggggcatcctcggccaccgccctggtcctcaggctttcctcgtacctggtgcgtctgctgccactctgtacaaggtgcacttatctctttaagtcattgggc

SEQ ID NO: 73726 - DNA, 122 bp, Homo sapiens
agacacggttgggtagttttaatgaaagtaaacacacaccctacagtgacccagcaacctcgctcccacgcatttatctcagagtaagaaacagaaacattgtccacacaaagacctatccg

SEQ ID NO: 73727 - DNA, 122 bp, Homo sapiens
agccgaacaaggcgccggaatgtaaggagcgtctatgcaaccatgggtgaccatgaaaaccgctctcctgtcaaagagcccgttgagcaaccaagagtgaccagaaagagattggagcgaga

SEQ ID NO: 73728 - DNA, 122 bp, Homo sapiens
accaggagtgcgtcctccttttcggattcttgacgtcaagctccgacagccttggagcgtcgcaagggcggtagagagctgagggagggtgacagggaggggaagccattgcagcaacagct

SEQ ID NO: 73729 - DNA, 122 bp, Homo sapiens
aggctcaaattggcatgagagatgcaacaggctttattgttgcagcaacactaacatatacgccccattccctgctgaggcctgtccccacctcaccccttggttgtcgatggtgtggaaca

SEQ ID NO: 73730 - DNA, 122 bp, Homo sapiens
gacgcgtctggatcccccgactatggcctgagagcgggatgtgagtggcctgggccctcgcgagaccccgaccccgcccgcggcaggtggccgggcacagccgagaagtaagccctgccagc

SEQ ID NO: 73731 - DNA, 122 bp, Homo sapiens
gcaacctcgcgagaagtgcgcggctcaaccggggcggtgcggaacggaatcaccaagtctcgcgagaatcgcgggaggcgcggcaaaaggcggagccgagggtaggaaagtgggtgaatgaa

SEQ ID NO: 73732 - DNA, 122 bp, Homo sapiens
tgccatctgtcacccctctcttttactaggaaagggaattcactgaccccttgcgcttcccggataaggcaatgcctcgccctgcttcggctcacacacagtgcgctgcacccactgtcctg

SEQ ID NO: 73733 - DNA, 122 bp, Homo sapiens
aaaattctaggacaaaccagccaacaggagagccaagtcagctccctgctgggttggtgtcggcaaccatcaccagccccgggccaccgtcaggtgggggcactgcccctctgtgcagcttg

SEQ ID NO: 73734 - DNA, 122 bp, Homo sapiens
ggatagccgatgaccctgcagttgataagggtgtcccgcccggcgactgctgtgatgttccgcatagcccggatgctgggtgggcctgggcaggagtcagaagagaggaggaggaggagaag

SEQ ID NO: 73735 - DNA, 122 bp, Homo sapiens
gcgagggagccgccgaccagcccccgggttgctggcttttgctttcttgggcctggaggccgaactcagctgaaccttatgtattgatctgaaataggagtttggagggtccagtcgagttt

SEQ ID NO: 73736 - DNA, 122 bp, Homo sapiens
gacaccaccatttcacatgaagaggcaggcgacatgcgagtgctgaggaggaaccccggacgccaccatttcacatggaagaggcaggcaacatgcgagtgctggagaggaacccggacgcc

SEQ ID NO: 73737 - DNA, 122 bp, Homo sapiens
agcggtcgcacaccacgcagatgggcatctggtcctcctcgcagtacagcttcaggggctcgcggtgcttctcgcacacgcccatctcgccgccgggccccgacggccgctcggtgcgcagc

SEQ ID NO: 73738 - DNA, 122 bp, Homo sapiens
ctgcctaacatagcaagactgtctctacaaaaaaattaaatttggcaggggctagtggctcgtgcctgtggtcccagcagagacaggaggatcgcttgagcccaggagttggaggctgcagt

SEQ ID NO: 73739 - DNA, 122 bp, Homo sapiens
gagtggagactgatgaacgagttcttgacacagcccttggcagggcgggcttcttccctgcgctgtgacctgacccctcccaggggacatctgcatttaagcaggatcccccatctgtactc

SEQ ID NO: 73740 - DNA, 122 bp, Homo sapiens
caggctctgtggcaaaggctgggccaaggtgcctcgtgggcagccgatccatcaggcggccgacaggcgtgatcgagtgccgtgtcacacgcagcccaggaaacaaacacgccgcgcgaaag

SEQ ID NO: 73741 - DNA, 122 bp, Homo sapiens
tcctcacttctcagacagggcggctgggcagagatgctcctcacctcccagacgtggtcgcggccgagcagaggcgctcctcacatcccagacggggcggcggggcaaaggcgctccccaca

SEQ ID NO: 73742 - DNA, 122 bp, Homo sapiens
cgcgaaccgcgaagtttacacaaagtccgagatgggtccccgggggctatcctgacaaagcgggggtgaaagagggagcggtcgcggagcggccggccgcggaaacgtgacacgaccattct

SEQ ID NO: 73743 - DNA, 122 bp, Homo sapiens
agtcactctaaaatgtggtgagtaaagcaacagtgactgtattgtgtctcatagcatctgcgctttgaagacggaagagctcctctggcttgtggtttctcaatgaattgcccacaggtggt

SEQ ID NO: 73744 - DNA, 122 bp, Homo sapiens
gtgcccctcacgctgagtcgtctaggagaccctccctagtttaaaaagtgtttatttgctcggagaacatttcaggaggccttcctgggaccccaagtgtgccgccccccgggaggggcctg

SEQ ID NO: 73745 - DNA, 122 bp, Homo sapiens
gaagaggagggcgtcagcgtttcggggacggttggcagcagagggtgctgccctgctctccgcgggtgagaggtgactcgaggagaccgcaggagccccttggaggtgaagccacaggtggc

SEQ ID NO: 73746 - DNA, 122 bp, Homo sapiens
ctgccttctctcttctctcgtctgagcccccaggccttttccactttgagggaggtgcttcgaagaatgttgcccacacctaagtgttagaagcctatgtccgttcatccctgagaggtctg

SEQ ID NO: 73747 - DNA, 122 bp, Homo sapiens
cagacgcgcaccaccgtgaagaagttggccgtgtcccccaagtggaagaactatggactccgtatttttggtttcatccacccggcgagggacggtacgggggtgagggtgccccgggggag

SEQ ID NO: 73748 - DNA, 122 bp, Homo sapiens
gtggtgtgcggcctcaggtccgggcggcactggggttagggactgcggagggaagtggtgcgtgttttttgtcctgaggggtaagtaaaagctcgctcttgtccggaatgctttcagaaatt

SEQ ID NO: 73749 - DNA, 122 bp, Homo sapiens
caaacatgtaatgtatttaaagaacctatatggaaattcattatgtggtacttatctccacgtttgtcttctcatctagaccatgatatctttgacagcaagactatcttaactattttggg

SEQ ID NO: 73750 - DNA, 122 bp, Homo sapiens
ggagggacaggcactgtaggagtagaaaaagcatgaacaaaagcataaaaaggaaaagcccgacaagttcaagggaacaatagggagattggcttgattagagtgtgtttatttgttggggt

SEQ ID NO: 73751 - DNA, 122 bp, Homo sapiens
tcaaacagttgcttccccaggttcagtgagcccatgtcaatctcctggtcaaactcagtgcgaatgtcattgagcgagccatcgtccccgaaggccccccactccatattgatacacatctg

SEQ ID NO: 73752 - DNA, 122 bp, Homo sapiens
cccccctttctgatcctgggtctcctcatctttgtttctgactttctctgcctctctctgcgctgtctctatcttgtctctgcctttctcatgctttctgggtctctggatctctgtttctg

SEQ ID NO: 73753 - DNA, 122 bp, Homo sapiens
gcgtctcccacatccctgcggacctccccgcgcctcgcctctcccttctgttacgtatcacgcacaggtggatcccactacgacccagcttggctcctgtcccgcacctccgcacctggcct

SEQ ID NO: 73754 - DNA, 122 bp, Homo sapiens
caccacagggactgaggttctccagatttcaaaagcctgtgatctgcggttgtgttgccccgttccccccgcggcagacaagcccagacacacacggcccagacaccccagaggcaaaggaa

SEQ ID NO: 73755 - DNA, 122 bp, Homo sapiens
ctcctcatcttatttcacctcttaggataattcacactgttaactagtccttgaaacactcgtcttttagtttctgtgccacaacattcttcaggtttcctaccttgctggcctctccttct

SEQ ID NO: 73756 - DNA, 122 bp, Homo sapiens
ccgggacaagcaggctagggggcatcatgggaggtgtctcagcttatctcctccctcttgcgcctctagctcactaatcccgcctctcatctcacctttctctaaccctctcagactgcagg

SEQ ID NO: 73757 - DNA, 122 bp, Homo sapiens
ttattgaacacctactatgtgccaggcattggggtaaacagggtggataaggcctgagctcgcagggcacaaatccaagagggagacacagcaatacccatgtcggctgacacatgaacaag

SEQ ID NO: 73758 - DNA, 122 bp, Homo sapiens
acgcgcggggcgcggagatgtgcaagtggcgaagcttgaccgagagcaggctggagcagccgcccaactcctggcgcgggatctgctgaggggtcacggtgagtctctgtgggtgcgggtcg

SEQ ID NO: 73759 - DNA, 122 bp, Homo sapiens
cactgggtcctggtagagccccaggcagatggcgcaggtcagcttctcctccagcagctgcgcggccatggcccggcggcggcgagagccaggcgggccccgggcgtcttaaagggaccgcg

SEQ ID NO: 73760 - DNA, 122 bp, Homo sapiens
gccatccctgcgagggagtctgggcccctggacgcagttgaagaagggccactgggaggccggcagaacaaggggagggctggagaaggagcgggagtgcaggcgagaggaggaccagagag

SEQ ID NO: 73761 - DNA, 122 bp, Homo sapiens
gctttctcgtttctcaagcgcggagtgttctgtatgatgcaacattttggcttctccccccggcgttgctgcttcgggaaggattgtgtgtgcccttttgttttgaaagaaattgagggaga

SEQ ID NO: 73762 - DNA, 122 bp, Homo sapiens
aagacctactccaaccgcatggccctgaaggaccaccagaggctgcactcagagaatcggcggcgacgggctggacggtccaggcgcacagctgtgcgttgcgccctctgtggccgcagctt

SEQ ID NO: 73763 - DNA, 122 bp, Homo sapiens
gcaccggctcgaactggggcgggccactgccaggaaagcaacgcccctgaatgcttatgccggtggttggtagaggaaatggaattccccagactggtaagagcgcgcgcagacacagcctt

SEQ ID NO: 73764 - DNA, 122 bp, Homo sapiens
cacacacacacacgcgcgcgcgcgcgcgcgcgcacacacatacaccacacacacagctaccgccctgccaggggatgatgaaatgaggaacggaaattaacatttcaggcaacgtctcacat

SEQ ID NO: 73765 - DNA, 122 bp, Homo sapiens
tttcacaccaggcagggaaagcgccagtgtccggcgaataggaagggctggtcgggcaagcgtgtgttttgcaagctcggtgcaaaccagcctgaaggtgcaaagcgtcattgctgtagtgc

SEQ ID NO: 73766 - DNA, 122 bp, Homo sapiens
ggggtgggggcgccccggtacttacactccccaagcaggcaaactttcaggcttgtctttcgagaaccgggagctcgcatcacagttccgggtaatcaccgaggcagcttatgtaattgccc

SEQ ID NO: 73767 - DNA, 122 bp, Homo sapiens
tcttcctgtctctgcattttccaggggccccacaatccctggaattccctggttcacagccgcatggcctgattggagcttctgtgtctgcatggcctcctgcctgagcctcaaacctctct

SEQ ID NO: 73768 - DNA, 122 bp, Homo sapiens
catatttacagtgcattttttctcactaaaatttcccaattctaaaatggtctggccaggcgcagtggctcacgcctgtaatcccagcactttgggaggccaaggcaggcggatcacaaggt

SEQ ID NO: 73769 - DNA, 122 bp, Homo sapiens
gccaccgcttctggcggccgcaggagcgacccacagacaggtaatggctgccatggggggcggggcgtcgtctttagcctttagcgcccctgtgcttcgtgcgcatttcgtggcctctgggt

SEQ ID NO: 73770 - DNA, 122 bp, Homo sapiens
ccgtccccatgcagtactgtacttttcttttcccttctgccgtcaacctcggagtagcttcgctcccagaaggcctcaaagcgcgaccaaagagcgtgacagagcgctttacgacagttgct

SEQ ID NO: 73771 - DNA, 122 bp, Homo sapiens
agggcggggagccaagctggggcgactgggggggcctgggggagctagcggggcgggacccgagcggggcggagagtggcaggaggaggcgaatctccgcgctccggcgaactttatcgggt

SEQ ID NO: 73772 - DNA, 122 bp, Homo sapiens
tcctcccgcaggagccaggctgatgatgctcgcagggatcggatactgggagcccctgaacgcagccaacccggcgcgcaccggtgggggcgtctgcgctggcggagcggctccccgggagg

SEQ ID NO: 73773 - DNA, 122 bp, Homo sapiens
gcttccttgtctaaaagctctttgggactgaaatggctgtttatgaatccttgtcaacctcgttcgcagtcaacgaccagggaataaattattcgtggaatgacacagttcataattattat

SEQ ID NO: 73774 - DNA, 122 bp, Homo sapiens
ttgggtcacccgattggccgtcagacagcgcggtccgtggcaggctatctgtgtgtgtcgcgtggcgctgctgtcagataacagatggcgggctttatttattcatttacttacttacttga

SEQ ID NO: 73775 - DNA, 122 bp, Homo sapiens
tccacttatgccaaacttgcagcagtagctgtatttttcatcatgttaatagtgtatgtccgattctggtggctgtgaaataatgaatacagtcactggtaagggagaacctagaacccagt

SEQ ID NO: 73776 - DNA, 122 bp, Homo sapiens
ccaactctgccgtccagttctgtccttaccaagttgtccctaggctcctctcgggaactgcgcggccatcgcctggccccaccccattccctggatctccccccacttacctggccgccccc

SEQ ID NO: 73777 - DNA, 122 bp, Homo sapiens
ctctctcacttactgcgtgacctgggcaggttatttaagctctttgtgccacagtttcctcgtctataaaacagagacaaggccaggcatggtggctcacacctgtgatcccagccagcact

SEQ ID NO: 73778 - DNA, 122 bp, Homo sapiens
ccggctggagcgtcggcaaggagcctgcccccatgtgggtccgctggtgcttgtgcaggtcggtgccccggcggaagccccggccacaggccgggcaggtgtagggcttctcacctgtgtgc

SEQ ID NO: 73779 - DNA, 122 bp, Homo sapiens
ttgtcctaaaacaaatgccatatattcctggaatttattcagctattactgcatgagatgcggattttagtcttcatcttgtctgagaaatttcttcctgttgacctcacactcatttctac

SEQ ID NO: 73780 - DNA, 122 bp, Homo sapiens
ggctggaaaactaccatttcttaagcagggaaattacaagttagtcttataatgattcatcgtgctgtcacctatttgggccattcataagagacaacatatcaaagagtctgatgatagaa

SEQ ID NO: 73781 - DNA, 122 bp, Homo sapiens
acctacgcctcccagtaccgccgctgtctcaaccgccacccagcccctcgcctgcgcctgcgcctgcagcccactggctcctcaggatcccgatgggcgtgtcaggataacccaaggcgcag

SEQ ID NO: 73782 - DNA, 122 bp, Homo sapiens
tgaaattagtaagatgcactatactgacaccatggggtaagagatcatagctcatacatacgaatgagcggggaaagacgtgaagcagggagatgtgttgatagttactgtatcttcaaggt

SEQ ID NO: 73783 - DNA, 122 bp, Homo sapiens
acacgggactcgggaaccgctatctccaaagggcagctttctttgagggaggctgttagacgtgactccttgtttctaaaaatggacaaataccagcctgggcaacatgacaaaaacccatt

SEQ ID NO: 73784 - DNA, 122 bp, Homo sapiens
ctgccgctgccaccaggggtcggctgcctcccgcctgtgcccttctggggcccaaggccccgttccctgggaatgggtgaggggccaggccttcccgaccatcctgctttccccagcttcca

SEQ ID NO: 73785 - DNA, 122 bp, Homo sapiens
ggggcggatgggggagaggcatcctggcctgcacagcgagggccgtcagaagggtttgttcgcggcagaggccggcggcgcggtcctgggtggcgggcggcgtgggggcaggcgagcggagc

SEQ ID NO: 73786 - DNA, 122 bp, Homo sapiens
ccccttcctgagggaggaggggagccttaccttcagcactgaccagtccctcccaacactcgaatgctgtgtccacggctttggaggctcagctagtgcctggactgtagggtggcccgtct

SEQ ID NO: 73787 - DNA, 122 bp, Homo sapiens
ttaatgtagcagtttgacaaatactttaacatttgccaaacccaacttcctcaatacttgcgggtaaggagaaacagaggcactcattcactactggtaggagtgaggagtggtactcttga

SEQ ID NO: 73788 - DNA, 122 bp, Homo sapiens
tgagtgggcaccgtgagtgtgctgtgcctagttagcttgtgtgtttacttttgagggcttcggggagctgggaaatatcatgtcacctacaccccaatgacagtggagaggtgggagtgggg

SEQ ID NO: 73789 - DNA, 122 bp, Homo sapiens
caacacacaccttccatgtgactgcttctcagccaccactttctgaccaaagagaacaggcgctccaaggagaacctgtacccctgccccagcctcgccttcctaaaaagcagtgtctggag

SEQ ID NO: 73790 - DNA, 122 bp, Homo sapiens
ctgtgggtttactgttggagagggttgccgactgcctagggccagctcttggccccaactcggtcctctactgcggtgcctgcgcggctcccaccacccacttccgcctctgcctggccaat

SEQ ID NO: 73791 - DNA, 122 bp, Homo sapiens
ctgtaaaatggcccaatcagcgctctgtaaatggaccaatcagcagtacgtgggcagggccgaataagggaataaaagctggccacatgagccagcagcagcaacccactggggtccccttc

SEQ ID NO: 73792 - DNA, 122 bp, Homo sapiens
ggagcgacagaggttctccctcccagcccttctgtgcgcccatactgtccatgtgcctgccgcccgcattcagctccccaccccagcaacagagtctcagacaaaagagaagcacagtccag

SEQ ID NO: 73793 - DNA, 122 bp, Homo sapiens
taggataatggaagtagaaagtcctgtttggaaaagggaagaatggggagtaatactctgcgctggtccatagccattgtcagctcctgccaggctgagctgtgagcgcttcctcccctggc

SEQ ID NO: 73794 - DNA, 122 bp, Homo sapiens
acgttttggtttccgggttagaaagctttcattttaaattccactcctatctagtcaagccggagttcctgatggcatctgagacttaatttgagatgttgaggtgtgtcctgccatgacct

SEQ ID NO: 73795 - DNA, 122 bp, Homo sapiens
tcggccggcagcttctgcagccgccacaagggcgtcccctcttccggctccatccctgcgcgaagctggggcttgggtcacgtgtcaaggctggccgcttgtctaaagctacgactcgccca

SEQ ID NO: 73796 - DNA, 122 bp, Homo sapiens
tccgggggttggcattgcctggacatctttagtgttcatcttgctgacatctggtgccctcgggcaggtaggtgcagttggctgcctggtttacagagcttgtactgggcccaggttagcag

SEQ ID NO: 73797 - DNA, 122 bp, Homo sapiens
cggcgaggaagcggaggaggcaggcgcggaggaggcgtgcactaaggcggtcggcgctgacggcaaggcggcagggaccccgggcccgaccgggcaacacgatgggcggaggcgcatccagc

SEQ ID NO: 73798 - DNA, 122 bp, Homo sapiens
caccagcgataggaacactgaagctgggctacggcgtccgcccgagccttttcttaaaggcgccgaccccggaagcggggcgtccgagggagcgcgcgacgggccacgcacgtccgggcgtc

SEQ ID NO: 73799 - DNA, 122 bp, Homo sapiens
gtcacctcctgtcgcggagttttcctgtttcaagtccttcagtgatgcttacatccgccccgcacagcgtaaagtcctcccccgctaggcggattccggtctatgcggtcccccaagcctcg

SEQ ID NO: 73800 - DNA, 122 bp, Homo sapiens
aggggtgccccacggtccaggcactccctgacatcccccatggctgctttgcagcgccaccggagatggatgaatctacctgcccaagtcaccagacgtggctggaaggggctgaggcttcc

SEQ ID NO: 73801 - DNA, 122 bp, Homo sapiens
gctggtactgtccattaagacacgctttcccgcttcctggctctgcaaaagattgctaagcggcaagctgcttacattgcctgaggcctcagtttccctatttgaaaaataggaacagaggt

SEQ ID NO: 73802 - DNA, 122 bp, Homo sapiens
attttagtcggctccccacacacttcacaaatgtgcttgaaaaaataaagggcctcttatcgccacacagctgccacgaaattgccaggagtgctgagtgctcacatatagaagacggccat

SEQ ID NO: 73803 - DNA, 122 bp, Homo sapiens
aagctttccttccggtcttgtgggtgggtgcacgtgtgaggaaggaacccttggctgtgacgcgaacgcttctcaccctcagagtagagacccgggctgagggacaccccacgcgggcgcgg

SEQ ID NO: 73804 - DNA, 122 bp, Homo sapiens
atccagcagcagcgaagacgctgtcccaacctggagtcagagcagaacccttagagcgcccgcccgccctgcctcgtcctcctgccgcgcccgacactcggcgcccgcagcgcgctgccgct

SEQ ID NO: 73805 - DNA, 122 bp, Homo sapiens
ccccgcccactcgttcggattcccggcttcaccttctccagccccgcccaccgggcctaccgcccaggcactgcgtccctcagccccgccccctggctcctccagcggtctcgcccattggc

SEQ ID NO: 73806 - DNA, 122 bp, Homo sapiens
tgaccgagccaagtggggtgtcatggccgcggggggcagcggctgcacttcctcagcgggcggcggtggccggggagttaatcctcgacgcacgggtcggtgtgtgcgtatttgtgttcggt

SEQ ID NO: 73807 - DNA, 122 bp, Homo sapiens
ctatttacaatttccattcaggcaatcttcacattttggaatggcatttgccaagggagacgatctcagctcctcttctattttcaggttccctcttgcatagcggatggcatcagtactaa

SEQ ID NO: 73808 - DNA, 122 bp, Homo sapiens
gggcttggtttgggtagatgtgaaactaatgcaccaggcgggcagtgcaggcagcagagacgtgttcctcacagcccggaggctggggtccaagatcaaggcgctggcagggtaggttcctc

SEQ ID NO: 73809 - DNA, 122 bp, Homo sapiens
tgactatggatggatatgagcttccatctagcggccagtgatttatggcaggaccaggggcgaattaaaagctacagatggattttttttttttttttggtcgcccaggctggagtgcagtg

SEQ ID NO: 73810 - DNA, 122 bp, Homo sapiens
tcaggggagtgacatgatctgatttttagtttagaaagatctgatgtggagatgaacaggcgaagagtggaccggctagaagctgtagcagttttctagatgagagatagtgcggctgggat

SEQ ID NO: 73811 - DNA, 122 bp, Homo sapiens
ttctcggggtgctctcgccgtcaaggccgagggctcggggcggcgggaacgctgggctcgcgtccttcccgtcccggacaggcactccagacgcgtcggggagccacagcctgcgcggccgg

SEQ ID NO: 73812 - DNA, 122 bp, Homo sapiens
cctccatgggccctggggtgccggggctggccccataccccagaagctccccactacctccgggtgtggagctatggtgggcgagcaaacctgggttcagatcccaccttctactcatcatg

SEQ ID NO: 73813 - DNA, 122 bp, Homo sapiens
ccagattgcgccttatcaaaacacaaaaaatcaaagcgctctcttgtctgtggcaaaatgcggaggccccagcgatgtgggggagagcattgtctggcggccaccgaagcaggatttgcatt

SEQ ID NO: 73814 - DNA, 122 bp, Homo sapiens
tgcagtgggtggtgccgaatgaggggagccacactgggggagggggctctgctggaatcccggtggggcaggcagtccaacagtgcagtgccctctgccttgcccatgcccacgccgctgca

SEQ ID NO: 73815 - DNA, 122 bp, Homo sapiens
taagtactgactaataatttttagaaacaacataggccaaacaaaacacataggtggctccgagtttgtaggtagcctgtggtttaatatctttctctcccatttaactcagctccacgggg

SEQ ID NO: 73816 - DNA, 122 bp, Homo sapiens
atatacatattttcctcattagtgggatggagtaacgctgagctgggcaaaagaaaggtccgaatttgcctggtaatattgccacaacttgaaagtggatgattttcctcctaaagcctcct

SEQ ID NO: 73817 - DNA, 122 bp, Homo sapiens
ccatcttcacaactcccctttctctgagaaggtagagaggcaggagagaagtctagggaccgtgcaaactgtgtctcatcccatgtcactgtggctgaaactccacagagtgtcacttgtca

SEQ ID NO: 73818 - DNA, 122 bp, Homo sapiens
cccactgtggctgcaccccgaggaggagtccgtggcaggaggcccacacccaggacccggcgccaacagtgaggagacgaacctggaagacatcccgctgtccagacaccgcgagggaggcg

SEQ ID NO: 73819 - DNA, 122 bp, Homo sapiens
gtggccgcgcagtctgctccggcgccgctttgtgcgcgcagccgctggcccctctactcccgggtctgccccccgggacacccctctgcctcgcccaagtcatgcagccctacctgcctctc

SEQ ID NO: 73820 - DNA, 122 bp, Homo sapiens
aaaaaaaaaaaaaaaaagccaggtgtggtggcgcgtgcctggagtcctagctatttgggacgctgaggccgaggcaggggaatcgcttgaacccgggaggcggaggttgcagtgaggccaga

SEQ ID NO: 73821 - DNA, 122 bp, Homo sapiens
caggacccatgggcacacgtgcacacacgtcagcaccgtgagcgcacacacctgcactcacgcacacacctgcactcacgcactcaggaccgacggacatacgtgcacacacacatcagcac

SEQ ID NO: 73822 - DNA, 122 bp, Homo sapiens
tgtccggaaagcaccgctgatattgtcaggttacacactgaatggagggtgactaataagcgatgccagttgcctgtggactcgagagaatccagataccaagcgacgcctcacgttgcgcc

SEQ ID NO: 73823 - DNA, 122 bp, Homo sapiens
gtggctccggcagggtctccatggttggccggtccagcgcctccaggaagtcgaagctgccgcagtggcgcttgttgaaaggcgcgggctcagcaggccgagccagggatcgctcacatggc

SEQ ID NO: 73824 - DNA, 122 bp, Homo sapiens
cggcgaggcccgtagccctcccccaccgcccgggtcaagacgcgcgggccccctccagggcgcccccaccccccgcgccaacgtcgtagcgtttctgccccttaccgagatcccaggccggg

SEQ ID NO: 73825 - DNA, 122 bp, Homo sapiens
taccaaacagtgttggaggctgggtgggggctccgggcagaaacaccctgtcaacacagacgttgtggtgagcaggctgtgagcacgggagcagaagtgggatcgtctcagcagtgctcggg

SEQ ID NO: 73826 - DNA, 122 bp, Homo sapiens
ccccgggctgctaaggctcccggaacctgcttctccagttctcggctttcgagggctaggcgctagaagtcagagacttcccaaggccggctgggactgggggtgtgtccccctatgggcga

SEQ ID NO: 73827 - DNA, 122 bp, Homo sapiens
ccgcgcccggccacatttttctccatctgtggtctaggctggcgtgcagtggcacaatcccgcctcactgctgcctcggcctcctgggctaaacggagcttcccgactcgcctaagaaagtg

SEQ ID NO: 73828 - DNA, 122 bp, Homo sapiens
cgcgccctccggaaggcgggttagggacgcccggggctcagcttagggaggcgggcgccacgccacgaggaggctgccctgatagccggtgcaagtgctccttggcggggcggcccgcgact

SEQ ID NO: 73829 - DNA, 122 bp, Homo sapiens
tggagacctcacaggtggtattaaaaacgtgccactgcagaaacccttttcctcctacctcgagggtgataaacacagggttaaaaagacacttgttcagtagaaggcaacttcgcagaaga

SEQ ID NO: 73830 - DNA, 122 bp, Homo sapiens
tcccccaactcttcctggaagagacagattctggaggcgcagaggcactgccaagggggccgcaacagaccccgaaagaccttgcgagcctgccatgtcccggtccggaacgccgcacgcgg

SEQ ID NO: 73831 - DNA, 122 bp, Homo sapiens
ggccgcgagccccgtgcagaccacgccgctcacagtgggagcttgcgcttagtaggctctcgatgcatttctgtggaattgtttttctggttggaggaacgtggggttcctaaggggaaggg

SEQ ID NO: 73832 - DNA, 122 bp, Homo sapiens
ccccaaccactggtgctgagaaatgatgcagaaccaagccctcagatcccagatcacccacggctcctgggacatctctggggaagggacttattaatgtagaccctgatgcaacatcccaa

SEQ ID NO: 73833 - DNA, 122 bp, Homo sapiens
acacatggaattctacagctttctgttggttgaatcacacacgttaattgttcatgtaaccgtggaaaaatctggtataacaagaattgttcacaatacgggagtgatttacacatatttag

SEQ ID NO: 73834 - DNA, 122 bp, Homo sapiens
ttaccatggatcctggaggtgcccgcgaacactgcttgtcgcctgggcaaccggagaggacgaagcaggacctaggtggcggcggtggtaccggctgcaatggtgtccaatcccgtgcatgg

SEQ ID NO: 73835 - DNA, 122 bp, Homo sapiens
tataaattgtcattgacctaacagaattaagctgggccatggagaaaactgagaacatcacgattcaaaacacagaattctcaaatggaccagtgtgtttagacctgactgtggaatggaat

SEQ ID NO: 73836 - DNA, 122 bp, Homo sapiens
ttctaccacccctccaaccactccctgcctgtcctctgcccccatgctccagaccgcttccggagggaaagcagcacctgggatctgtcttcagagacaagcagcttccaggcctccccaca

SEQ ID NO: 73837 - DNA, 122 bp, Homo sapiens
tgacgcctgccctggctccctcactccccccgagggacccttacagaacagggaagcgcccgggccctggggtcagtcccatgcttgcacccggccccgccgccccctcaccctgagcgtga

SEQ ID NO: 73838 - DNA, 122 bp, Homo sapiens
gcggcgcggaggagtggggcgcggctgcagccaaggcacctgccaggtgcgacccggtggcgacactcaggggatgcagaaaacccaggggattatggggcactgcctgtagctgcagctgt

SEQ ID NO: 73839 - DNA, 122 bp, Homo sapiens
gttggcctgcatccaggcctctgagaggtcccagagctctgagaagacatggctgggcaccgttttcggcccggcggaatcagcgccggccgcctgcagcctctctgactggctttcctgga

SEQ ID NO: 73840 - DNA, 122 bp, Homo sapiens
caggaacatgagaaggcactagctgcagagccacagggaggggttgcaggcggtgggaaccgcaggctaggcttggctctagccaggtgaggggctgcaggtgcaggacgggaggcaagcag

SEQ ID NO: 73841 - DNA, 122 bp, Homo sapiens
tgagttccaggcaagtccccaggcaaaggtactccacgagtttcacattcacgctcagggcgtcctgttcatgccacatcctaccaacaggtaacacctgtgttggtgcaggcaagagcttc

SEQ ID NO: 73842 - DNA, 122 bp, Homo sapiens
ttgtctagcaacttacgcactttggggtacttaataacttgatggagttgaagatgatgacggtgacaatgacgtcaaccaggacaggaaactggagatgattagacatcctttattctcca

SEQ ID NO: 73843 - DNA, 122 bp, Homo sapiens
gcgagcttcgccgctgtcgctggggtcagggctcggggccttcctgatagactgatctggcgggatcagcaggtcgcgatccactctcccttggtgtggcgccgtggtgccccccttcctcc

SEQ ID NO: 73844 - DNA, 122 bp, Homo sapiens
ctttgcgttgctttaagagggaaaagccaaatacagaaagttggagtttgcgaagacaaacgaagaagatgtcaactgtttttgagaatgcttcggcgtgcacaaagccttttaatgaagaa

SEQ ID NO: 73845 - DNA, 122 bp, Homo sapiens
tacacttagtgatcaacaaatggggtgttccttaaatctggtcgtgttatttacttagaacgcttcagtgttgtctgaatgcagtcatagtaaaatcaaagcctcttactgtcacctaaaag

SEQ ID NO: 73846 - DNA, 122 bp, Homo sapiens
cccaggcaaaagtgtagtagtgcgatctcggcttactgtaacctccatctcccacctatgcgtcctgaattagtgtgtctacaggcatgcaccaccacagtgggctaccttttttttttgag

SEQ ID NO: 73847 - DNA, 122 bp, Homo sapiens
gctgtgttctaatggcttcctaatgggcaacttaatctgtcattaaacccactcaccaagcgccccttgccagactcctcggccattggtctgcttgctgagccacggcgtctgtggggtgg

SEQ ID NO: 73848 - DNA, 122 bp, Homo sapiens
ccacgaagcccgctgtcctcacgctgaccctccctcccagccagccgccacctgagacctcggttcctctgggtcagttcttcccgtctgaagggagtatcctgagctttcttccaccaaac

SEQ ID NO: 73849 - DNA, 122 bp, Homo sapiens
cgcccgcctcagactcccgaagtgctagggttacaggtgtgaaccaccatgcctaactatcgttgctactttctattggaagagaaggcagccctgatttagtctgtttacagtctgcatta

SEQ ID NO: 73850 - DNA, 122 bp, Homo sapiens
ccgtttcaccggtgaggttcaatgactttcccaacatgatgggagtcagaggccccaggtcgcacatcactagagcacccagcctccactcagtccagggggacttctacggggaaccagca

SEQ ID NO: 73851 - DNA, 122 bp, Homo sapiens
ccctagccccttccccgtcccttccccgcccccgtccccgccccgggggccgccgccacccgcctcccaccatggctctgaagagaatccacaaggtaagcggccggaggtcggctgcgctg

SEQ ID NO: 73852 - DNA, 122 bp, Homo sapiens
gccttgaactctggatctcaagtgatccgcctgcctgggcctcccaaaatgccgggattacgtgagccacctttccgccatagatgtattttcaaagtgtaagccaccaccatctgagaggc

SEQ ID NO: 73853 - DNA, 122 bp, Homo sapiens
ccttgccactcacatgttaattaatctctatctaaccctaattgcagtttattcaagcaccgctcaacagctcacccacacaataaacactgatcctacttttatacatattacttcacgtt

SEQ ID NO: 73854 - DNA, 122 bp, Homo sapiens
agcaggaagcaccacctttgcagtgggaacgccaaacagtgcggccactttggaagaccgcggggcagtttcttacaaaatcaaacgtcctcctaccatacaaccagcaatggccctcctgg

SEQ ID NO: 73855 - DNA, 122 bp, Homo sapiens
ggagcaggcacacacacttggcaacttcagagtccacgaagatccaaggaaataagtccacgcagacagagcgggtcggcgctctggactcctcaaatccaacaaatttctggcagctgcct

SEQ ID NO: 73856 - DNA, 122 bp, Homo sapiens
tccttgacggccacgccccgcgggaagagaagcctattgggtggtcacgcctcctcctaacgccagaacctcatcccgctttccagccagcccaccgagaccgccccgaacggctccgcctt

SEQ ID NO: 73857 - DNA, 122 bp, Homo sapiens
gaaaggtggaggagcagcctatccctcctcctgcaggggcccagttgggggccaaaagatcgccttgctgcgtgcatttgtgcaagtcccttcccgttcctgggcctcagcttcctcattca

SEQ ID NO: 73858 - DNA, 122 bp, Homo sapiens
gagtcaaggagaggttagtaaggggtcagggggcataggggccagaggtcagggtctcaccgcatctagcagggtcagctgttcggccaagtggtcagcgaggaacaccaggacatccgtgg

SEQ ID NO: 73859 - DNA, 122 bp, Homo sapiens
gcgggcgggcggggcggggagctccggcagcgcccagccccgccctccggccgctccccgcggtccctccagaccctctggccgccgcctcctcttggaaccccgtgcgccccccgcgcccc

SEQ ID NO: 73860 - DNA, 122 bp, Homo sapiens
cctcttcccagacagccaggcccatctgctgcccagggaagcgcaggcgcctgctagggacgctatggacaccgtgagtccaaggcgctgctcctgccttgaagccacgcgctccacgccgc

SEQ ID NO: 73861 - DNA, 122 bp, Homo sapiens
gctcaactgggatcaggttagccggctgcatgaggtcctcactgaagttgtacctatccacggacgaggcaactttccaaccttggagataactctgaaggacatcgtccagaccgtccgca

SEQ ID NO: 73862 - DNA, 122 bp, Homo sapiens
tgctgggaccccctgaaggacagaggtgaacccggaacccctgtaggacagaggtgaacccgggacccccttaaggacagaggtgaacccgggacgccctcaaggacagaggtgaacccggg

SEQ ID NO: 73863 - DNA, 122 bp, Homo sapiens
aggaaacgagaagtatgtgacgcgtgtccgctggatgggtgagagtttacacggcagacccgggttcctcagcttcaccggaactgagtccctgcccttgttaataatgatccatcaggaag

SEQ ID NO: 73864 - DNA, 122 bp, Homo sapiens
gctgctaaattaacttacttttctgcaggtctttaaataaagcaggagtcccaaagcaagcgacaacagggaccaaggaggtaagacagctgaagacagtgaggacttctatgaactggaga

SEQ ID NO: 73865 - DNA, 122 bp, Homo sapiens
ggcgctgccctgctggggtgtagcctgcgggaggcctagacagacgcacggggaggcccccgacagctgctcctggtgggctttacagggagaggtggtaggaggagcaggacaaggagggg

SEQ ID NO: 73866 - DNA, 122 bp, Homo sapiens
agtctctctgtagagcctggggctgggtgcagaggaggcgagcgcactcctccgcggaagcgtattaaacgtcacccctcctctcccaagcccctgccaaagatcactgacaagctcgcata

SEQ ID NO: 73867 - DNA, 122 bp, Homo sapiens
cctggctgtgtgtgtggcgtccagtgcgagtggtagccagacatcatgcccacctgccctcgagctgcttgcctgcagctggctccttactcacagatctgcatccatccggcgctggggag

SEQ ID NO: 73868 - DNA, 122 bp, Homo sapiens
aatatctgttcattataattgcctggtctgtgagattctgttagagcagcattacatgcacgaagacactgtacaaggactgctgaatgaggaactctgtacagagccgttgttacagaggg

SEQ ID NO: 73869 - DNA, 122 bp, Homo sapiens
agggcgctggtgatgaggtttggtctgtgccttgtgtcccgcttaggaggggatgggcagcgtgttctcacagctttttgctctgcacattggattcgttggcaaaacccacagtttccagg

SEQ ID NO: 73870 - DNA, 122 bp, Homo sapiens
ggtttcccctccctcttctgcttctgcatctgccccaagggcttgcgtttaccgggtttgcggaaaacaagccaagggtgagctgcagaggggctcggggctcggggcagcacggcctcggg

SEQ ID NO: 73871 - DNA, 122 bp, Homo sapiens
cacagccagggtgcgggcgggtgagtgcccacctggtgcagggtgtgaagagcgagagcgcgtgtatgagcacgagcgtctgtggtctctgtgtgtccgtttacatgattgcgcctgtgtct

SEQ ID NO: 73872 - DNA, 122 bp, Homo sapiens
actgtgagtgggaatgctacagcctgctaagaaggagcagagatttggatttcctgaccacgagacttgcaaagaatctccagagactctgggccctggagatcaagccacagctgtgttag

SEQ ID NO: 73873 - DNA, 122 bp, Homo sapiens
ttatttatacttccttcccggcttgacataagaggtttatttttgatctctcactattcccgtttcccctcccctgggatcagagagagaaactgaaaagagggagagagagtggagaaaaa

SEQ ID NO: 73874 - DNA, 122 bp, Homo sapiens
caacatggtgaaaccccatctccacaaaaaatacaaaacgtagccaggcatggtgatgtacgcctgtggccccagctagtcaggaggctgaggttggagaatcacttgaacctgggaggtgg

SEQ ID NO: 73875 - DNA, 122 bp, Homo sapiens
cttaacagtgaagcaataacttagttctgagttattcactctccaaatagaaagccacaacgcaagaatagagactaaacccaaaggaactgacccttcatcaatctgtgaaccctgatggc

SEQ ID NO: 73876 - DNA, 122 bp, Homo sapiens
cgcacacgccccactgggttaggaatttctagaatagcgcgggcccctccgctgcactcacgcacacgccccactgggttaggaagttgtagaatagcgcaggcacctccgctgcactcatg

SEQ ID NO: 73877 - DNA, 122 bp, Homo sapiens
ctcactttgtgatttgcatagctagtctattttagaattgttattatcataaggcattcccgactacagtcagaatgattcatagaggataagaaggtttaagtgaggccaggcgcagtggc

SEQ ID NO: 73878 - DNA, 122 bp, Homo sapiens
ccagggacctccactcttccaaatacctgaaccccctgttcccctacccatctcctctttcggtctttgtaaggagccgtctgtgtccagtggcaccgcctggcagctccacggggcctggc

SEQ ID NO: 73879 - DNA, 122 bp, Homo sapiens
caagacgcggttgcagggactcacaggctgcgctgtgcacactcgacaatacacacaagtcgcctgcctccccgtccacacgcacatagtaacatatcaagcatcgtcctcatcaaaaagca

SEQ ID NO: 73880 - DNA, 122 bp, Homo sapiens
agagaaaatggtgtcattttttcaggcagcaagtgattcctttcaggccttcagcaacgacgcccagatgagtccactccctgcctcctgctcagcccacaggcaatctgggcacaagtgac

SEQ ID NO: 73881 - DNA, 122 bp, Homo sapiens
ccttcggagagtcctctccagtcactatcgtcattcccgcatttcctttgctaggctgtccgggctgggcagctccctcaggcggacacccatggctggcagaccttccgcgcctgccccta

SEQ ID NO: 73882 - DNA, 122 bp, Homo sapiens
ccagggtggcattgatggggcggcaccgtggccgaagcggctccttggatgcccatgtcccgcccatgctcagcagcagcaacagcagcagcctctggggcaaggacactgcttcacccggg

SEQ ID NO: 73883 - DNA, 122 bp, Homo sapiens
tggcccgttcctggctgatcctgtgattggtatcaccaccaaattccagtcacctagggccgtaaagacatcctgtttctgactgtgggacttaatggagaagcaattagagtgaaataaga

SEQ ID NO: 73884 - DNA, 122 bp, Homo sapiens
ttccgtttgttgacatagttgaccagctcatccgacaggggatggaaagagggcctgctccgggcattggccaacaccagcaggcagcagagggaggcccagagctgccacatgttggaagc

SEQ ID NO: 73885 - DNA, 122 bp, Homo sapiens
ggacatgacaacagctcacattggaaattctcagcagaggaactaacagccaagcctggccgctgctcttttggagtctgagttcctcagtgtctcaagacttttcacaccagaaggatgtg

SEQ ID NO: 73886 - DNA, 122 bp, Homo sapiens
ccggaagtcgtcgaaccaggacgtcgggacttccgcccagggaatcaaaagtgggcggggcgtgtgcggactgagcgctctgcttccggggcgcgggtgacgcgacgacggcgacactttgc

SEQ ID NO: 73887 - DNA, 122 bp, Homo sapiens
gagcggctctggccccttaattgtacttcgggctcgtattgtctctcctttcgccacctccgcttcctcagtctgggctccaaagtcactgcaaatttccttgcgacacatacatcacacaa

SEQ ID NO: 73888 - DNA, 122 bp, Homo sapiens
ccggccggggccctcacccggtggctccaccctgcggggaacagagcagctgtcgctctgcggagctttccaggacagagaagaaacgtgttccaagcagctgctaagggaataccaatggc

SEQ ID NO: 73889 - DNA, 122 bp, Homo sapiens
gcgtgtttgcttaacatatttaatgtgatttgggggctgcgtgtacttttttaactgcctcggtgaggggggcctgacctatctcctccccatccccctgcatggtaaaatggcaacgtcct

SEQ ID NO: 73890 - DNA, 122 bp, Homo sapiens
atgtcgccaccaacttcctgctgcagcactgatagtcccaggccaacactgggaccggaccggcagccgagtgacagtgcgtggtccccaccatcagatcagcccggggaccgagcatctct

SEQ ID NO: 73891 - DNA, 122 bp, Homo sapiens
tgaggggaaatccagtgccattcctttgtccttggcgcttctcagcctccctgcagaccgcgagcggagcccccgcacccccggggctggcccctggcctcccgccccagcccggccggcgg

SEQ ID NO: 73892 - DNA, 122 bp, Homo sapiens
ccgtgcccccgaggctgctaccctcttgaggtgcccggagccaaagcagagggttgatcccgccggttgggtgaggtagcacccggtgacggcggctatgactgtgccctgggcgcaggaac

SEQ ID NO: 73893 - DNA, 122 bp, Homo sapiens
caagccaggctgcagctgcaaggaagagacaggggcagctgctgtggcaagtagaggaggcgccacctcagcagaccagaaacagtcccagtcactgagatcaaacaggtctcctgctaaaa

SEQ ID NO: 73894 - DNA, 122 bp, Homo sapiens
agccgggcgggcaccgcgactgcgcccactggaggccctgaagtagcaaggctcctggagcgcgtcctgcgctggagtcctggaggatgccacagatctggagggggtggtggggtcctgtc

SEQ ID NO: 73895 - DNA, 122 bp, Homo sapiens
ctggatgtacagccgcaggccctcctgcaccggctgccccgtcaggtgcacgttgtccaccgtcagctgtgcctcgtcaaacagccactgcaccacgaacacagggcctgcgggcggcgggg

SEQ ID NO: 73896 - DNA, 122 bp, Homo sapiens
tgcaacggcttcagtgcatgacaagggcaccagtggcaaacacatggtcttccatttctccggcatttttcatgactctgcccccattcagcccttcacatagtttccttcctcgttcaacc

SEQ ID NO: 73897 - DNA, 122 bp, Homo sapiens
cacaccatgtccccagcacacgaaacagtgcctggtagacagaatgtatttatggatggacggacaggtagatggatggatgaatggacagatgatagatggatgcaaagacagatgaatag

SEQ ID NO: 73898 - DNA, 122 bp, Homo sapiens
ttcccacgagcctccagtacaggacttcatcagtgccgttcatcggaactctgctgccagcggcctgttcatccaggcaattcagtctcgttgtgaaaacctttcaactgtacgtcttcatc

SEQ ID NO: 73899 - DNA, 122 bp, Homo sapiens
agaatgggaactgtgttctctttatttctgtgtccctggggcccagcactgagctgcgcgcgggtggccaccatgcctgttaaatgacttcactttgatgaggcaggaacatatccatgtct

SEQ ID NO: 73900 - DNA, 122 bp, Homo sapiens
ccgagtagcagtatttcattacagagctcccgattcctcacttccaagtcgcttagaccccggccaatgaaaacaataggaggaaaaccagagggctgtaaccgcagtcactggagtcccag

SEQ ID NO: 73901 - DNA, 122 bp, Homo sapiens
ccgctgcagggacacccacgcccttctctccagaagccgggcaggcagaatccggccagacgacggggctgagccatcaggagctcttgggaaagcaaagcagggagacaccttcagaagaa

SEQ ID NO: 73902 - DNA, 122 bp, Homo sapiens
cttctgcttttgtcccctgcccctccccgcgccccggggattccacgcagccagagaacccgcaacaactccgctcatcttggcgtcagaacgcggccggagaccctcatgaaaaccccagt

SEQ ID NO: 73903 - DNA, 122 bp, Homo sapiens
tggaatttcgagtttggagtcatcacactttaaaagcagatgcttaattaggaaatgcaacgacagatctgaaacaagctctgttgatacacaatagaaaactggaaagagtgaaagaacaa

SEQ ID NO: 73904 - DNA, 122 bp, Homo sapiens
gccaagccgcccctcccctcgttcagccacttgagattctcatcctagtctttctaaggtcggcctgtagattcaggaacagagtacttgggtcctttcttcaggcactcgagctgcattca

SEQ ID NO: 73905 - DNA, 122 bp, Homo sapiens
gaggcaggactgcctccagctctaactgtactgcacctgcacccaccagccagggtccgccgctttcagccggaatccatagacaattcacacggcaaagagaggagaccaagcttgggttt

SEQ ID NO: 73906 - DNA, 122 bp, Homo sapiens
atggggccagtggaaaggggtcgggttgcccttccttccccccaaccacaggaatggaggcgggacacagggccagtaggagcaataggattttaataaacagaacccatcccaaagccatg

SEQ ID NO: 73907 - DNA, 122 bp, Homo sapiens
caccctctgcagccctgctggcatctcaggagatgggcccgagagagggaggggctggggcggccctgcaggctctgctcacactggccttgcctctctgggactgaagaaagggctctgcc

SEQ ID NO: 73908 - DNA, 122 bp, Homo sapiens
gagctacggcgacgcggggccggcggggccgcggggctgaacctgacacacacccagcgccgggcttctcgaccccgagcgctcaccctcggcggcttcgagccccccaccttctgctcccc

SEQ ID NO: 73909 - DNA, 122 bp, Homo sapiens
agtgatctgcctgccttggcctcccaaagtgctaggattacaggcgtgggccaccttgcccggtcgcaaggagctacttgatgtgtcctcccggtaaattcctttctgacttgagtgggcca

SEQ ID NO: 73910 - DNA, 122 bp, Homo sapiens
ttgttttgctattataaagtattggttctgatacgaattgctaaatcattctgtgaaaaccggagtctgatctctggaatgtgctacttaggctgatcactgaattaggctaataggtaaaa

SEQ ID NO: 73911 - DNA, 122 bp, Homo sapiens
tctgtcagtgttctgtgtaaaacggaaatgctaatgtgtatttaccaggactttttcttgcgagaggcagatgaaatgtatctccgtttcatgagtaagttcagagaatataagtgacttgt

SEQ ID NO: 73912 - DNA, 122 bp, Homo sapiens
ccaggggtttcagaccagcctgggtatcatagtgagaccctatctctacaaaaaataagccggacagggtggcgtacacctgtggtccctgttaaccaggaggctgaggtagaagaaaccac

SEQ ID NO: 73913 - DNA, 122 bp, Homo sapiens
tataaaatactttggaaaccaggaactgagcactgttaaaaccatatacattttcacaaacgttggattcttggcaatagatggtaagtatacaagtcctttaataatcagattttttaata

SEQ ID NO: 73914 - DNA, 122 bp, Homo sapiens
ctagacagcctgggtttgaatctcaacttctcccttttcttgctgtgcaaccttgggcaacgtgcttactctcaatgtgagtgactcagtttcctcatagcctcattgtgaggaatgaataa

SEQ ID NO: 73915 - DNA, 122 bp, Homo sapiens
atggaatgggggcaggaagaaccacagtgaagactgcgagtctgaaagccttgggattagcgttattatttggaaatagtttctgaacctacaagcaagtatcccaaagctcagcatggtaa

SEQ ID NO: 73916 - DNA, 122 bp, Homo sapiens
cctcccgagaggcgcgtccctgtcgcctcaggcaggtgcaggccgggcgggcgcgtggggcggggcaggggcgttatctcctgaccgaagagggccgcacatctgtttatctctgaagcggc

SEQ ID NO: 73917 - DNA, 122 bp, Homo sapiens
cccagttagtacaggaatgtaatgaagtgcgaggtgacagagtccctgctctggggacaccggcagtgccgcgaggcatggagcgggggctacttgcccccttgcaccttctggtcgtaggt

SEQ ID NO: 73918 - DNA, 122 bp, Homo sapiens
tcctttccaaaccaggcctgcagaagccgacggctgctcccattgggcccatgcctgccccgccttcccgcccgggaggtcttctgcgcccagcgctcctccagcttcttttgctctcccca

SEQ ID NO: 73919 - DNA, 122 bp, Homo sapiens
gtggggcggtcggagcagcccggctggggtgggagtgtgggggctgagggcacctaggggcgggcgctgagtgccaggcggcctctggtctcatagccttcagatttcagcacttcttccat

SEQ ID NO: 73920 - DNA, 122 bp, Homo sapiens
tggcccaggcatggaccacgggcagtgcagactcagcaggggtgagtgcaagggccagggcggggcctctgcaccccaccacctcccccgactataaagggagcagccagctcctgggctcc

SEQ ID NO: 73921 - DNA, 122 bp, Homo sapiens
actcatgccgcgaagacagaactaggtattttatttctgtttttcttgcagtcctttagtcgtcttcctgtaaccgtgtttgctttcgttagtgttaacttacatattggggtggaggagga

SEQ ID NO: 73922 - DNA, 122 bp, Homo sapiens
ctagagtccaggtgcgcactccccgggctccagggtctgggtaggggagctgaggctgctcggggaaggtctaggaaggctcttgagtagttcttgaggagaccatcctgtgggggtgggct

SEQ ID NO: 73923 - DNA, 122 bp, Homo sapiens
ccaagtgtaaatgaccatgaggcaaactgaaagcgggaaactgctacacgcccactaccacgacagcttccacggtgaatcagtcaccaccacgcagcccacagtcacagacgcgtcgcaca

SEQ ID NO: 73924 - DNA, 122 bp, Homo sapiens
ggaaaaggggcaaatcctgcatgactattgtctaccttgtagcatttcttccattatacacgttgtttgcatctccttttctcaatagactatcaggtccttgaaaaagaacaaggaagaat

SEQ ID NO: 73925 - DNA, 122 bp, Homo sapiens
agtgcctgtggtaagatgtccactttgcatgctgctgtccaagggcctctgaagtcagcccggaagcagcggccggtttgtttgtcctggacaacctccaagccttgttctagttcccctat

SEQ ID NO: 73926 - DNA, 122 bp, Homo sapiens
gcaggatgctcaggaactgttccagcaccagcagctctaggatctgtgccttggagagaacgtcaggcctcagccaccagcgacagagttcccggagccggctcagagtttctaggggccct

SEQ ID NO: 73927 - DNA, 122 bp, Homo sapiens
gtgggggaggatggatgggagctagaaggtggggcggcctgggacccgggcacatgggctcggcgaagagcgggcgcgccgcgggggactggggtgcggggaatgccgggaatgggggttcg

SEQ ID NO: 73928 - DNA, 122 bp, Homo sapiens
caagtcaccacccacagtaggaccatagggccctgtgtcctccattaattcttctctgggcggtttctgttcagcacagctttcggggcaaattctagcttgtccttaaggctcaccacctg

SEQ ID NO: 73929 - DNA, 122 bp, Homo sapiens
atcttgtgtctgaatttttagcatggacttactactttttgtctgttgcattatcttttacgtattttagtttgtacgacaagatggtttttcttcaatgacatctattcttcttaagttag

SEQ ID NO: 73930 - DNA, 122 bp, Homo sapiens
tcccctcccgataaacccctaaatagggactttcccggggggtgaccctggcttttttggcgaaaacccccagtttaaggaggccttccccctggcttcacgttgtggagtcgaaaggaacc

SEQ ID NO: 73931 - DNA, 122 bp, Homo sapiens
gggaggcccgaagggctggagacagacacacttcacacaattaactggaactgctttttccggtttccgacggggacgtccccagagggacttgatggggccggggccccgcgtggcaaggg

SEQ ID NO: 73932 - DNA, 122 bp, Homo sapiens
ttgttctgctctggaggagagaccttggcaaggagtcgccgggcgggtgcagggacctaccgccaccacattccggacccagcgggagccctcctcttaatgcccctccccccgcaagccaa

SEQ ID NO: 73933 - DNA, 122 bp, Homo sapiens
tgctctgggggtcttgggcagcctctagcccaggagagaagacaaggcagtcactcaaggcgctgaaaacaacggcctcctttactgttaaaatgcagccacaggtgcttagccgtgggcat

SEQ ID NO: 73934 - DNA, 122 bp, Homo sapiens
cccgcgggagcagcgagcaggagggatggagggatgggctccccgctgacctggttcatccgctcatccccaggaagcagctgacgctgccgtctctacgcttgtacgaggagcactgcaaa

SEQ ID NO: 73935 - DNA, 122 bp, Homo sapiens
ctatcactcttttaatttttcttattaaaaatacctactcaaatgaagttttctttatgccgtttactcagatgacatctatcaagaaggagcttttaaaaagttaattactgtgaatacac

SEQ ID NO: 73936 - DNA, 122 bp, Homo sapiens
aaatatccaggatccttttctttaatgaagtaactcctgtgttttagctgagtgtgtggccgcttagctgaagtatttctcgttggccttcctggcagcttgatgtggcctcgtgactaagg

SEQ ID NO: 73937 - DNA, 122 bp, Homo sapiens
cctttccatctggcttttaaacgtagcattccaagtgatggcagcggcagccgtcaggagcggccactgtgaagacgctggcagcagcaggggaggcacggccaaggctgtaactccatgga

SEQ ID NO: 73938 - DNA, 122 bp, Homo sapiens
gaatctcccttgaaagggataaacatggttaatgttaatccctaaagagaacagggtttacgcaggaaactgggactagaaagactggccttggtcaggctggagaaggaatttctggcccc

SEQ ID NO: 73939 - DNA, 122 bp, Homo sapiens
catctgccagtgagagtgcataatggagttaaatgtaccctttgagtttgtagagaacttcgagagcatgtttctaaataggcttcatttcagagggtgaaaatgggaagacagagctaatg

SEQ ID NO: 73940 - DNA, 122 bp, Homo sapiens
agccttgacaacaagagtgaaactctgtctcaaaaacaaacaaacaaacaattagctgagcgtggaggcacatgactgtagtcccagccactggagaggctgaggccagagggatcacttaa

SEQ ID NO: 73941 - DNA, 122 bp, Homo sapiens
aaagatgagaacatgattgaagacatacatggtccctgctctcaaagtgagataagaatgcgagtaaatcatagcaattcagcatacctgtagtatgtcttacagagatgagtacagctgac

SEQ ID NO: 73942 - DNA, 122 bp, Homo sapiens
atttttttcccctagattttacagtgaagtacactctgctgatatttacttcatcttactcggaagtgaaagccccactgatttttttaaaatacgctaaaaattagccaggcgtggcggtg

SEQ ID NO: 73943 - DNA, 122 bp, Homo sapiens
cgctcgccgccgctgccttcgcagaccggggagagagtcagcgactgccaaccgcagccccggctcttcagtctggggacagtgggagcccaagcccagcgcgccccagcccggcccaggcc

SEQ ID NO: 73944 - DNA, 122 bp, Homo sapiens
attttggaggaaatggattaaagcaactaggaaagaggttagaggactcaagagatccaacggctctggcctgtgagcagacgggccattcataactttgtagtttctcattcagagcagcc

SEQ ID NO: 73945 - DNA, 122 bp, Homo sapiens
ctgcaacctgccatgcccgagaattcgcggtgggctcctgcgccgccggagcctccccgacgattgccgccccctgcttcacggcttcccgtcccatccaccgcccaagggctgagaagtgc

SEQ ID NO: 73946 - DNA, 122 bp, Homo sapiens
cgctcgcgcagagccccggctcacaccagcggccttaactggagaggcgggaacaggacgcggcccacctccgccaaccactcattggtggtggtgccaggagaggcggggcgctggcagaa

SEQ ID NO: 73947 - DNA, 122 bp, Homo sapiens
gcccagcgccgacagcggcagcaggtagcggctcatgccgggccggggacaggcgtcaggcgtcaggggtcggcgcggagcttgctgcacaccagccgcctgggtagctccgaggaagagcg

SEQ ID NO: 73948 - DNA, 122 bp, Homo sapiens
gttgaaggaaggagaggggcagggtcagacacagggaccccagggcgcccacaggacacacgaggcaccctagtgggggaggaacgcggggcaggatgacagattgcagggtggtggggggg

SEQ ID NO: 73949 - DNA, 122 bp, Homo sapiens
tagcctccccagaaggtgtgaactgagacctaggggaccatggcccctcatcctctgcatcgcagcccctggcacagggctggtccatggtgacagaatggcttgaggtggtgcatcaatca

SEQ ID NO: 73950 - DNA, 122 bp, Homo sapiens
gacctagagataacaataaacgattatagtttaacttaggatggtaatatatctcaactacgacgaagtccagcacatagtaatcgctatgtgtttactatgatgatttttattatcttcat

SEQ ID NO: 73951 - DNA, 122 bp, Homo sapiens
ttttaaaagattgggcagtaagcttgtcttccccgtgctttctcgaaagcttactgagctcgtggccctgagcgcgggccggcatagatttcctcttccacccgctgcggcttttctgagca

SEQ ID NO: 73952 - DNA, 122 bp, Homo sapiens
gggtggtgtacgagtacccgtgccccccccgatctgtgggctgagggtggcggtgactagcgctgggaccagctccttctctctcgctcccaagcccacaagaattcggggagaaagggtga

SEQ ID NO: 73953 - DNA, 122 bp, Homo sapiens
tggtgccttctagacgagaggacagctgtagtgtggacctcccccgcacatgcgatacctcgggccgggcggtgtgacctcacaggcccacttatggcacttgcagtttgggattgctcatt

SEQ ID NO: 73954 - DNA, 122 bp, Homo sapiens
aggcctctgcctcctcacgcgctaccacaggattggcccgtgcgagcccggctgctcgcgcgccgaccaatcagcggcgagtcgggcgcacgcattacctctcagccaatggacgggatcgg

SEQ ID NO: 73955 - DNA, 122 bp, Homo sapiens
actctctgctactcagcattgggagtcagttatctcaactctgcaggatgaggccacatgcgtgaatgggatggaagccagagggtctctacctagctggattgactctgcagtaataacct

SEQ ID NO: 73956 - DNA, 122 bp, Homo sapiens
gcccctcttcgcggccacccggcggcctctttccgccctctgaaccggcagttagctggacgggcctcaagggcccggcgcccagggactcaaaggaccctcccgcgccccgcgaggctccg

SEQ ID NO: 73957 - DNA, 122 bp, Homo sapiens
gaaagagggcgtggcccgcaggaagttctcgcgttacggaaagtgaagtgtttccggctccggtgtcatggccggctcctaccctgaaggtgcacctgcaatcctcgccgataagaggcagc

SEQ ID NO: 73958 - DNA, 122 bp, Homo sapiens
ggccgggccgccgcccaggtgcggcaggtaggctcgggggccgggcagctccggttggggcggcttcccggggcctgcgggtccccgtccctgaggagctccggctcctcggtggcgggaca

SEQ ID NO: 73959 - DNA, 122 bp, Homo sapiens
caggggatctgggttcggagccagaacgcgtggaatgcacactgctgtgactggcattcacgacaagatgagtttctacagaggaaggaaaatgtagagggtgtataaagaattgagtggaa

SEQ ID NO: 73960 - DNA, 122 bp, Homo sapiens
cgcgtagccggcgcgcgaacaccggtgcaaagtcgcctggcgcgggcgccggccctcgagcggcaaacaccaggtgccagggcgtgagcaacagtttgcgtggaggccactcggtctccaca

SEQ ID NO: 73961 - DNA, 122 bp, Homo sapiens
cccccaggggcagccaagggccccacagaggatggcagggacaagccacccatgtggcaacggccacgtcccctccctcagacggcagccagtcatacccgaggcggcaccgcgggcggccc

SEQ ID NO: 73962 - DNA, 122 bp, Homo sapiens
tggcggagtaagggacgttgttgaggccgctggcttggtactggtaggaacccatgtgcgcgtagggcgagcccccgccgccgccgccgcccgccgggtgctgctggttggtgtagtagctg

SEQ ID NO: 73963 - DNA, 122 bp, Homo sapiens
agagaagggcctctgccccgcatgtggggatgcagggcttgggtccagccggcacttgctcgtaacaaggcgtgtgctgagcggacgtcctgtgaggggtggtgggtggcgggacgtctgtc

SEQ ID NO: 73964 - DNA, 122 bp, Homo sapiens
ggatcgagaagcaggacatttcccaccctcttcttgccctttgcctgcaacccccatccccggggtgaccattccccggcctctgcccccgggacagttttgttcgctcctttgctttatgg

SEQ ID NO: 73965 - DNA, 122 bp, Homo sapiens
agattaattaatccagctccgttttatatcagatgacataaatctctgctctacaccctccgctggctacccatgttagagtaaaagctgaaatcctaaaaatagcccacaaggggccatta

SEQ ID NO: 73966 - DNA, 122 bp, Homo sapiens
tttgacctctcgcttgagccgtgacggaggcggcaccgtttccatggtgaccaggctgcgcgtcctccttgcggcagcgcgtggagtgcggcgtcctggagctgcggatgaggtgggtaacg

SEQ ID NO: 73967 - DNA, 122 bp, Homo sapiens
gactctccctgcaccgcgcatcccaccctaaacccaaggatgcgaccgcacctgcagccacgggccgtggaagtgtcaggacactgtgggctgtggcttcatttgttcctgctgtaaaatcc

SEQ ID NO: 73968 - DNA, 122 bp, Homo sapiens
gggagagagagattccggtaatgttgcctctagtctgcttctctattgcgggctgcaggacgttgggtaactcaagaaggatctctgggcctcacgttcctcctgtgggagatatcagggtt

SEQ ID NO: 73969 - DNA, 122 bp, Homo sapiens
tcccacacccctttgcatgaatcgttcttttgtgtacacagctgcagtggcagcacgggtcggaaaggaaatggttagaggaagagctggttttcagacaaggcgagtctgcgaggggggct

SEQ ID NO: 73970 - DNA, 122 bp, Homo sapiens
tttgccaggtgccgcccatggaggttccgtagaaggaacgtgctcaccaacttgcgcaaccgcctcgaccaaacctgttcccaaaccgagcccaaaggattggtaatagggccacacctttt

SEQ ID NO: 73971 - DNA, 122 bp, Homo sapiens
tctttgaaggtaagttgtaagaaagagaaatcattaaagcctggagtgcagaattgttgtcgactgaaatggtatcaagtgagttgaatgcctcatattttaaaaatgggcatgatctctat

SEQ ID NO: 73972 - DNA, 122 bp, Homo sapiens
cccctccccctccggtacctctactccgggacccgcacctccggcagttcattcaggatccgtagtctgcccctaaccacccaccgtcttggcttcagggggtgacccctgcgcctgggtcc

SEQ ID NO: 73973 - DNA, 122 bp, Homo sapiens
ctcctcgctatcactgctgctccctgcggctgcccccgtcccaccccttcaccctcccctcgcccccttggggacccaggcgcgcccaccgatgaccccatcttcaagaccccccgcgcccg

SEQ ID NO: 73974 - DNA, 122 bp, Homo sapiens
gcctttgggctgtttctcttgttggcttccaggggcagggtggcattccagggtctagtacgcagtgtggctccttcaccattgggggttagagagtagcgtagttgcttcactagggggca

SEQ ID NO: 73975 - DNA, 122 bp, Homo sapiens
gaagctggaccgctactctgagtatggggcggctgtgctcttcttgctcatgtgcaccttcgcgctcatagcgcactggctggcctgcatctggtacgccatcggcaatgtggagcggccct

SEQ ID NO: 73976 - DNA, 122 bp, Homo sapiens
atcgcttgaatttctgtctcacaaaaggcacctgagtggagccagtgaagagagaattcccgtgaagagcgggggaagtgcgatggccctaaacacatgtcagtaaagactgttcctggcca

SEQ ID NO: 73977 - DNA, 122 bp, Homo sapiens
agacaccaaacttggcagagaggtggaaaatcagtcatgattacaaacctacagaggtggcgagtatgtaacacaagagcttaataagaccctcatagagcttgattcttgtatattgatgt

SEQ ID NO: 73978 - DNA, 122 bp, Homo sapiens
ccccggcataaggccgggcccgcgagacaggtgtccgatcggcccccgcaaccgtgaggccggctgtctgtccctgccccacgactcacttgcactggagtcacggcagccgccggaattcc

SEQ ID NO: 73979 - DNA, 122 bp, Homo sapiens
aaagatagatttctagatatttaaatgatgaattctagatatttttctgccttgcatagacgcagaggtagcttttaaccatctggaaatgttacataacacactgtggtcagtgacatttt

SEQ ID NO: 73980 - DNA, 122 bp, Homo sapiens
ggcccaagcctggcaccagaccacctcccacctggcccccctgccttcccctctgtctgccgctcacaactcctcgctggccttctgagcctccagttgtgacctccagtgtcttatgtcag

SEQ ID NO: 73981 - DNA, 122 bp, Homo sapiens
ttacttgaattacttcatttagtcctcagaacaattcaagatatgctatatccattatatcgatgaggaaatcaaggcccagagaacttaataatttttggcctatgttcctatattaggtg

SEQ ID NO: 73982 - DNA, 122 bp, Homo sapiens
aagtgcagcagagttagagcctgggctggactgtcggtggggtagagtctaagttgtttccggtctgagccttcaagttgctgggctgtccttggcgtggcgagtcccaggagaaccagtga

SEQ ID NO: 73983 - DNA, 122 bp, Homo sapiens
accatgcctggctaatttttgtaattttagtacagacagagattcaccatattgcccaggcgggtctcgaactcctgacctcaggtgatccacccaccttggcctcccaaagtgcgaagatt

SEQ ID NO: 73984 - DNA, 122 bp, Homo sapiens
ggcccaggagaggggctgcaggagatcaagcatgcttcccagggtgctaccaggatccaccgccatggtcacggctccttcttgctcgttccaggaaataatcctgggagaataaggtggcc

SEQ ID NO: 73985 - DNA, 122 bp, Homo sapiens
cagtgtggctgcccctttaaggaggcgttgcaacaaaccatattggacagacgatgggggcgacccatcgggacccgacgggcctctgactccagcaatacagcgaatcagcggctttcggg

SEQ ID NO: 73986 - DNA, 122 bp, Homo sapiens
ttggattgtggtgggtttttcatgtacttatgtacatgtagttatgtacttacgtacttacgtacttaaatacttacgtacttagtgtcagccacgcgtgtgtctccatccttgtgcctgaa

SEQ ID NO: 73987 - DNA, 122 bp, Homo sapiens
ggcgggagacaagagaagagagcgtgtgcagcagaactgccctttataaaaccatcagatcgggccaggtgcagtggctcagcctgtaatcctgtaatcccagcactttgggaggccaagat

SEQ ID NO: 73988 - DNA, 122 bp, Homo sapiens
acacaggggctgcgctggcaggagtgggggcctggcacacccccaggtagatgccctgcccgttaacgcccaagggcaggggcttgagtgactcatgtgggcctagcgtgaatcagcacagt

SEQ ID NO: 73989 - DNA, 122 bp, Homo sapiens
agcagtggtggccgaggcagaggctgcggctgctctttgctgcagtggggcgcatgcagccgcgaatcggcacctgggcagcaagcgactagcttgcaggttcaggtggaacgcatagacgc

SEQ ID NO: 73990 - DNA, 122 bp, Homo sapiens
gggcagcagggggcaggagaagctggctctagaccacgcgttccttttcacgtgaccagtcgctctctttcccgtggcggccctgcttccggcaggggcatcacccggaagtgggggtagtc

SEQ ID NO: 73991 - DNA, 122 bp, Homo sapiens
gggtccggctgccgccgggatgttgcagcacagggcctcctggctgcctggcctacaggccgcccggattcagccggagggcatggaccgggtggagtcctgcaaggcgagaagggacacag

SEQ ID NO: 73992 - DNA, 122 bp, Homo sapiens
tccttttctttaaacgtcccagtctagcttagaggaggacctgttttgtgtaaggcttgccggagcaaccagcacctttcctggaatacagtcttgtttgtggcttttcctttgttgtacgc

SEQ ID NO: 73993 - DNA, 122 bp, Homo sapiens
aatgtttgtcctggcttgaaatgttatgacctcattaaagggccttatgggcttgttttccgaggagtcaggggaccccgtccatggcatctcccctgctgggcagtggtcggctcacgggc

SEQ ID NO: 73994 - DNA, 122 bp, Homo sapiens
gtttcttagcttcaggctggacttcaacgagcattacaaagccagggagcccaggctccgcgtgtctctgggtaccagggggcggcgcagctcccacacgtgaagctcgcggtcctcccagg

SEQ ID NO: 73995 - DNA, 122 bp, Homo sapiens
ggaatgaacaaaaaatccagatgaggatttcagggtggctctgccctgcctgcctcacaccgccctttccagaacaggcgggggagcgcgaggcagggcggttctcgcttggagacgggtgg

SEQ ID NO: 73996 - DNA, 122 bp, Homo sapiens
ccctggaaaagccgggagggagtcggaggcgccagcccactggggaggtggcgctgggcgcgcgggatgcgcggggagccttctctgcaggagccgcacagtgcactgctgcgcgctgggca

SEQ ID NO: 73997 - DNA, 122 bp, Homo sapiens
aatggttgtatgggtacttgaagtacagtttttattgaatgcctaatgcttttgcaccatcgtaaagttgaaaaatcattaagttgcagaccatctgtgcttaaaagcaaataaataggtca

SEQ ID NO: 73998 - DNA, 122 bp, Homo sapiens
aagtgaggcaatgcctcgccctgcttcggctcgtgcacggtgcacgcacccactgacctgcgcccagtctggcactccgtagtgagatgaacccggtacctcagatggaaatgcagaaatca

SEQ ID NO: 73999 - DNA, 122 bp, Homo sapiens
gggaacatcgaggtgtacacacttaacgcagccagtaaaacgtcagcagccctgaagatgcgcgctggactcgaagaggagttcacactcccggcctgcagggggcgccctgtcctgcccct

SEQ ID NO: 74000 - DNA, 122 bp, Homo sapiens
ttcttagagaaaaaagcaatttaaaaaaaagtgcaaacacctattgagaactattgatcacgtagtgctagaatatgcagaataattagatctttgtggaattgttgggaagaggtttcctg

SEQ ID NO: 74001 - DNA, 122 bp, Homo sapiens
gacttgaaaggaagactgttacaatgaatgtatgagggagtcctaactagggaacaaaaacgtcccaaattaaatgtccatggatttgagatgggaaaaaagaatagacattgagcccaggc

SEQ ID NO: 74002 - DNA, 122 bp, Homo sapiens
aagagagggatagggagagatttgttaaggatacaaaattacagctagataagggggatacgttttagtgttctctacctctgtaggatgaatatatgtaggtaacatattatgtagtttca

SEQ ID NO: 74003 - DNA, 122 bp, Homo sapiens
agctccagctgtgcagccgggcagagatgaatgagatgcagtcgtggctcatcccactgtcggggcggccgggaactgaaaacgaccccatccagtgaggcccggcaggcatggcctgctgg

SEQ ID NO: 74004 - DNA, 122 bp, Homo sapiens
accggctgcggtctccaggaggggccaggaggcaaaatggaaggaagcgctggatctccgcggcggaagtcattcttatgccctgccaaagggtagagggcagcaaccgacttgtgcgaaag

SEQ ID NO: 74005 - DNA, 122 bp, Homo sapiens
ataaaaatttaaatgttctcaaagaggccaaccagagcaggggaaggagggcgccttggacgggcccccacgtagtttcagaggctcattgcctttcaggaacacgacttgctcatctgtgt

SEQ ID NO: 74006 - DNA, 122 bp, Homo sapiens
gagttttccaataatgcggacgctgattggtcaatccaggacggttgctcaagccattggcgcagccgccattggagggcggctctcaaaagttttcagacacaaattaggttcgagggagg

SEQ ID NO: 74007 - DNA, 122 bp, Homo sapiens
tcccggcgtgcaccggggcagtggctgctgcctccagctctaaatagtttggggttggcccggttcccagactgcactggaacactgggctttatgcccccacattcagtgcatttggtggg

SEQ ID NO: 74008 - DNA, 122 bp, Homo sapiens
gtgcccagtacactgaggatgcacctcagttacataaaataaatgaaactggagtactaacgtacagtttaaaggttatagttactatttttatatgatatactagtaatttttgaataggg

SEQ ID NO: 74009 - DNA, 122 bp, Homo sapiens
ctaagtccactgggaccacggagtatgcttgtgaggaaacacattcaggctgcgtgtccacgcgactccttgcttgccccattcacacttagggctcaggacgcccctgtaggcagggtgct

SEQ ID NO: 74010 - DNA, 122 bp, Homo sapiens
cacggcacacgggtgcatctgtagcccacggcacttggtgcgtctgtagcccacagcacacggcgcgtctgtagcccacggcacatggcgtgtctgtcttggcacgcactggaagcacgtgc

SEQ ID NO: 74011 - DNA, 122 bp, Homo sapiens
gttttttttttcttgctttttgtttgtttgtttgttttttaacctttcagaggagaaaggcggattggtatctgatgcctatggggaggatgacttttctcgtctagggggtgatgaagatg

SEQ ID NO: 74012 - DNA, 122 bp, Homo sapiens
attccgacgcgactgggtcatttccagttctctagacgctcggggcttgggacccctaaccgagagaatctcagggtttctggcatcccgactcagtccctctaaggagacagcactacgtt

SEQ ID NO: 74013 - DNA, 122 bp, Homo sapiens
ctccgcccccggggcggggagtcccgcccagctatgagccccgcctctagaaccagaccccgcctccagggctcagagccacgcccccaggacccagagcctgaagtcgtaatcaagagcag

SEQ ID NO: 74014 - DNA, 122 bp, Homo sapiens
aggatgcggagatgtgcgctgcgaagtgtccaggcctactctccaggatgcggagatgcgcgctgccgagggtccaggcctgctctccaggatgcggaggtgcgtgctgccgagtgtccagg

SEQ ID NO: 74015 - DNA, 122 bp, Homo sapiens
cctctacatgggctgggcagccccaaactgaaatgtgagtgccagagtgcatcctttaagcgaggtctgccccacggacacccgctccctctgtgtccctgctttgacagatctatccatct

SEQ ID NO: 74016 - DNA, 122 bp, Homo sapiens
gctgcacctttaccacacgcgtgtgggtttaacatgtacatatgtggcggcccacgctgtcgtgtgcagtgtacctgttcattgcatgctgtgcttagattcggcatattcatttcagcagg

SEQ ID NO: 74017 - DNA, 122 bp, Homo sapiens
gtatttcattacttaagatcgccccagattttccaatcagaataacagaagtcattctctcgttataaattcatatattcaatttcttgtttccatgtctctgcatttctacaatgcgaatc

SEQ ID NO: 74018 - DNA, 122 bp, Homo sapiens
acgccctggatacacggccaccaccccgtccctgacgccctggatacacggccaccaccccgtccctgacgccctggatacacggccaccaccctgtccctgacaccctggatacacggcca

SEQ ID NO: 74019 - DNA, 122 bp, Homo sapiens
tgaaaggggaagtggcttttgtacaaaggccctggggtccttgccatgtgtcagcagctgcgttgctgtgtcctgagatcatgtgtggaccccagggctgccttcctatgtgtgcccgccgt

SEQ ID NO: 74020 - DNA, 122 bp, Homo sapiens
ttcctcaacccctggccacagggagtggcctcaggagcccaactcagggccaggagtggccggagtggatgtccagtgaagaggcagggtgagggaacaggaggactccactcggcctgaag

SEQ ID NO: 74021 - DNA, 122 bp, Homo sapiens
gtgtggcggcctggtcctccagcgccatctgggccacctcgctcattttgggctggtccacgtactcatgctggtagccctgctgcgtgatgggcaggaccaccacgctggggatgtggctg

SEQ ID NO: 74022 - DNA, 122 bp, Homo sapiens
agaaatggcccagctggcatagctgtgactcccacgataccttttgttgccagagacctccgctactgtgaatcttgggaccaaaaatatgcaatcttttcatcggatcattgagaagttcc

SEQ ID NO: 74023 - DNA, 122 bp, Homo sapiens
ttctatctaaaaaatggacatttgtacattaattgaaacacacaaatacatgtacagccacggtaagaaaatataaaaagaaaagaaaaccagaacttcccagcagccaatagccaggggcg

SEQ ID NO: 74024 - DNA, 122 bp, Homo sapiens
ccgggcggggccgggctgggggtgcacacgggtgaggaccggcgcggggcctggcttgctcgcgggaggatgcaggaagtcttccctgccctgattttatgaacccaaagctctgtggttga

SEQ ID NO: 74025 - DNA, 122 bp, Homo sapiens
actttctttccctctcctgttctgccatggtaaagatgtgcctgcttctcctttgccttccgccatgattttaagtttctgaggcctgccagccatgcttactgtacagcctacaaaactgt

SEQ ID NO: 74026 - DNA, 122 bp, Homo sapiens
gtaacaagcttaaatatgtgccaagtctagaaacaagagactagggggataaggacctttcgaaattaaatgcaagatttgaaaactgattggctgggggatgaggcaaaggcaggtcttta

SEQ ID NO: 74027 - DNA, 122 bp, Homo sapiens
tacttcgccctgcctgtgtggccttcacctacgtgctttacaaataagaactcacttacccggtgaacaaccccaggccgtgggaactactccccggggtgttcatctggttccttttctca

SEQ ID NO: 74028 - DNA, 122 bp, Homo sapiens
tcaagatgtaatgtagccgtgagcacgttagggtaaacgaatgcttgcgcagaaagtgcccgatccactgactgttgtccttccgagaagacagagactcagagacagagggggccacgtgg

SEQ ID NO: 74029 - DNA, 122 bp, Homo sapiens
ctgtcaacctagccaccacctcctcctccctgggctccaggaagttgctcagagttgtggcgctgggaggagactgcgggagctatgctggtgaagcgatgctgtcatctgagcttgtgctt

SEQ ID NO: 74030 - DNA, 122 bp, Homo sapiens
cggcgtccgggaggagcggaccggccctcccggggaccgggcaagagggtgggccggaagcggcatcaggccccgtgcccattggccagcctcgccaggacgctgcgacctgggacgtgcga

SEQ ID NO: 74031 - DNA, 122 bp, Homo sapiens
ctgtaagatatcatcagtagttacagtcacccttctgatcctcctgcaaccctaagacaacgccatcctaccaaccatctccctaaatactcacacctcaccctaccaccataaaagataaa

SEQ ID NO: 74032 - DNA, 122 bp, Homo sapiens
tggggatggaccatgtctctcatctctgcttgtaggtcctcaaggcctgtgatggccgaccgtatgctggggcagtgcagaaatttctagcttcagtacttccagcctgtggggaccttagt

SEQ ID NO: 74033 - DNA, 122 bp, Homo sapiens
gttttgtgttgtctctcagacccttgtttggccacatgagcagctccacagagaaatggtcgatactattgtagatattatcatatcccactactcccttctcttttgtttagcatgatatg

SEQ ID NO: 74034 - DNA, 122 bp, Homo sapiens
cacatttcagttgtgtctacttctctgcatgtccactctcctgggtgtccaccataaagtcggtgggaatagatgagtatcacagacaggtttagacctttataacccagaggtgttaccct

SEQ ID NO: 74035 - DNA, 122 bp, Homo sapiens
tctttgccatggggaggtatacattaaacatcagagcccttaatttaatagctattattgcggctgtgtatagtctgtttctttatagtaaggaattatttatcaaaacatagcttccatgc

SEQ ID NO: 74036 - DNA, 122 bp, Homo sapiens
cgggagcctgcggccaggtgagtgtgggcggggcggcaaggcggaagctccaggcgcaggcggcggaagcgcgtgtctccaggtcgtcgcgtcgggctcctgggatttggcggcaactgtgg

SEQ ID NO: 74037 - DNA, 122 bp, Homo sapiens
tggcctgcgtcctgggtccccgaaagaccctggggagccctggcggccaccgagggggcacgagctgggcaggaaaagagcctccagctccccagcgctccacatctgcgcggggggctccc

SEQ ID NO: 74038 - DNA, 122 bp, Homo sapiens
caaagcacagagtcttattggctacggaaattcaccttctttgggggcctgttgctaaggcggtcgacgtcatttgatcccctccaccttttcgcagggggtccaatttagtcccaattgac

SEQ ID NO: 74039 - DNA, 122 bp, Homo sapiens
ttgttaactgcactatcccagagagaaacactcatgtgctcgtgcgttaattcatcccttcgacactcatgcacatctgtttttattttcttccagtgttttctgagcattttctatgggac

SEQ ID NO: 74040 - DNA, 122 bp, Homo sapiens
caccattgtccaatctgttgaaggttaaataatacgttgttcaaaattgcataggtaaagcgcagaatggccaaagggtcagaactacagcaataggtaggtcccattctctgccttttcat

SEQ ID NO: 74041 - DNA, 122 bp, Homo sapiens
ctttgggggaggggtcgcgtaggcgcctcacctgaccctgcggccgtgcggttgctgctccggggcaggtctccttccaggccaggggcccggaatcatgtacataaagcaggtaaggcctt

SEQ ID NO: 74042 - DNA, 122 bp, Homo sapiens
tgaacaaaagaaggaggctggtgagtgagtaatcagtgtgtccagacagcctcctgttggcgctggcatgaaaagagacaactcccggggatgcctgcctgctccggcctcggcctggccag

SEQ ID NO: 74043 - DNA, 122 bp, Homo sapiens
actgcagttagttgcctgcctgccagtcgaggtgatgttcacacttcgttctacgcacaacgcgtgttctgtacatattgctaaactgagggatgggcagagaagggcaaactgtaactaca

SEQ ID NO: 74044 - DNA, 122 bp, Homo sapiens
gagctctgaccagcttggccagagggaatgcagctgattccccctgctctgtgcccgacccgtgttaaagtttaacccggcttccaggtctcctcttttccagacaggggcgcagggaagga

SEQ ID NO: 74045 - DNA, 122 bp, Homo sapiens
tggtcttgatcacttcttcttcagtttttttttttaaacacatacaccttctgagggttgcggttgtacaaaattagctgcagatcaaggccatagcttgccgacccctggttagaagaaaa

SEQ ID NO: 74046 - DNA, 122 bp, Homo sapiens
ccatctgaaatgtctgtaagtgctcagaatgctctgaatcgttcccattctttaccaaatcgacccatggatccactgtggatgttcaccaatcagattctttcataaggtatttaatctag

SEQ ID NO: 74047 - DNA, 122 bp, Homo sapiens
taagtttggccgggtgcggtggctcacggggcccctgattgtctgaaggttgcgctggcacgcgcaacttccgggacagaggctgtggctggaaggagctgggcatccggcctgaggcgcag

SEQ ID NO: 74048 - DNA, 122 bp, Homo sapiens
ggtgggggcggacagttgcgccaatccccgaagcaagggagggagcagcgggtcagctgacgctgagaaggcgcgagtgaaggaatgagaagaatttgcttgctcagaagatgggagcgata

SEQ ID NO: 74049 - DNA, 122 bp, Homo sapiens
ggaaggcaccggagaccctcggcacaaggcactgaacctggagcgcctgaggggaactgacgcttgcttggcacctttgggaagactgcgaaccagctcaggtcccaggggagcgtgtccgt

SEQ ID NO: 74050 - DNA, 122 bp, Homo sapiens
tttcacggctgaaccgtattccaccgcacggatcagcctcacgatgctgacccagtcctccgcccagggacacatgggcagcttctgccctttgtcagtgatgctgctgtggacatgggtgt

SEQ ID NO: 74051 - DNA, 122 bp, Homo sapiens
tggtttgtgcgcggccaggcgctggagcctccgctgccgggagcagtaagtgtgtgacgtcggggtagaagggagtgacccaaattccaaaagctctttgggatgctgcgatgtcgcggccg

SEQ ID NO: 74052 - DNA, 122 bp, Homo sapiens
caaaggccaggtagtaaccgtttcagggcgtgtgggtctcacgatgtctgtcccaaccagcggtggcctttgcggcagggaggcagctgtggatgaggcctgtggccgctctgtctcctttg

SEQ ID NO: 74053 - DNA, 122 bp, Homo sapiens
aacccgccagtgaggctggagcagctcagcagtcagggaaatagtacctccctgagaagtcgccgtgtggcggtaattggatccgggaaagttccttgctattgaaatttattttagcaatt

SEQ ID NO: 74054 - DNA, 122 bp, Homo sapiens
accctgtgaccgggacccagacctgaagtcaccccagagggccccgccacggcccggactcgaagcttagggcagcacactgagcctcacgaagggccctgcgcctgtcctggcttgcataa

SEQ ID NO: 74055 - DNA, 122 bp, Homo sapiens
taaaagaccaaagtgcctttctttcttttgaatgaagatgaatctcagaaatagaggaaacgtcatttaaaagaggagacacaggggagacgtcccccagcctcagggttctcagtgggaac

SEQ ID NO: 74056 - DNA, 122 bp, Homo sapiens
cagtcgcttctctccccactgcccagaggctaggaggtgcaacagatagatacccaagctcgccgagtagcaaaggggtggggtgagagaggagtctccaggtttccccaggttgcaaaagg

SEQ ID NO: 74057 - DNA, 122 bp, Homo sapiens
tctctctctcctagcatcccccacctgccatatagacacactgttagctttttgagtttccgctgaccccaatccagtctttccaacacttcccacactgccccatcacctcctagtcctga

SEQ ID NO: 74058 - DNA, 122 bp, Homo sapiens
gatctgcaaggcctgcaaggtgcccggacagaaacttgagcagatattggtgccgctgcccgagaagagctcagccgagtctccccgagcccagctatcggcatccgcgaaaaagcggggag

SEQ ID NO: 74059 - DNA, 122 bp, Homo sapiens
cctcggaaggacgtcagtgcctgaggcctcttcctctccccggcagcagcctgtgtcgctcgatagggtcacatctggagaagggcagagggttcccctcaagcctccgctgagcactgacc

SEQ ID NO: 74060 - DNA, 122 bp, Homo sapiens
gcagatattttcccttttaaaaattagactcactactgactgtgggactggtattaggtgcgattttattcattctgttttagttctcagcacatagttataaaaacagcccttctcaaagc

SEQ ID NO: 74061 - DNA, 122 bp, Homo sapiens
gactttggtcgtcaaaccacctcttcccctcccttttgaacttcagcctccccacacaggcgggcttctcgggcctgcccgctgctgcccgctgctgcccgcttgccctggcccgtctcgct

SEQ ID NO: 74062 - DNA, 122 bp, Homo sapiens
ccctaactcttattgcacctggttttcaacccccttgagcccttgggtcctttgctgctccgctttcccccattccattaactggtcctgctctcttttccctcttcttggctgctagacct

SEQ ID NO: 74063 - DNA, 122 bp, Homo sapiens
tgctgggccccaagccggctcagcttcctgtgtggctgagagaggaagtttaacgggtgacgtccccggacagaggccctgcccccacccccgtgagaaacccaggcatcctgcctgctaat

SEQ ID NO: 74064 - DNA, 122 bp, Homo sapiens
cagtcccaactggggaggccactgaaggaggtacccattgcccctttgcctctggactgccgctgcagtcctctaacctgtgttgggaggagggcctttgagagcatggggtttgcagtggg

SEQ ID NO: 74065 - DNA, 122 bp, Homo sapiens
gagttttctgggctgacggcactttgggggaatttatcctggggagggacaccccggggacgccgcgtctgcagggggcgttgtagggaggagggtatgccagggaatcagtaaagactgat

SEQ ID NO: 74066 - DNA, 122 bp, Homo sapiens
ttgcatggtggagggtgagctttctgaaaacccctcccacatgcagggtttgcaggatggcgagcctcagctttccttgctctcttgtgcatgtgtatatacacatacgcactccttcacca

SEQ ID NO: 74067 - DNA, 122 bp, Homo sapiens
accacttggcccgggagttggctgcgggcagcggcttggcagcctgcggccgggggcggacggtggggcggtgtgggtttcagcctccccggagggccctcacggctgagcaaacgttcggg

SEQ ID NO: 74068 - DNA, 122 bp, Homo sapiens
gtgctgatttttattgtgctatatagtatataaattgagatatttttggtatttctgcaacgtgacctgataatgaatctattcatcctgagtaagctatacttctgtgctttatattgata

SEQ ID NO: 74069 - DNA, 122 bp, Homo sapiens
ttttttaagcctgttggaaaagcgcagtatttgggtgagagtgacccgattttccaggtgcgtccgtcacccctttctttgactcggaaagggaactccctgaccccttgcgcttcccaagt

SEQ ID NO: 74070 - DNA, 122 bp, Homo sapiens
tgtgaagataaaatgaggaaatgaactcgaaggacttagaacggtgcgcggtgtgcggtgcgtgctgagtgcgtgttagctgttgtggtgcggtggtgctgggggctgcagggcgtatctgg

SEQ ID NO: 74071 - DNA, 122 bp, Homo sapiens
tgagtagggtttacagatacaggatgcggcaggaattccaggcagaggaaagcaggtgtgcgaaggcagaggagtgtggacaggcttagagttttgggggctctctaaaagggacacccccg

SEQ ID NO: 74072 - DNA, 122 bp, Homo sapiens
cgccgccgctacctgcgggaccgctccgaggaggcggcgggcggcggagacgggctgccgcggtcccgggactggctctacgagtcctactactgcatgagccagcagcacccgctcatcgt

SEQ ID NO: 74073 - DNA, 122 bp, Homo sapiens
gtatccaccacccccttcctctcgctgatgctgctctgaatctgacactgtggattggttcggctgctgtaggattttctacaaacggaacatggacaggtcctctttgggtccgccctttg

SEQ ID NO: 74074 - DNA, 122 bp, Homo sapiens
cctgggcctcccggggtgggtccggagaccgagcgctgcgggggatgaccacgctgaccgcggctcctcatggggagaggccgccttgtcttgacctaatgtatgtacacatataaatacag

SEQ ID NO: 74075 - DNA, 122 bp, Homo sapiens
cttttctctccacacccccaagcaagcagtaggtgcctttccaaagaacaggtattgctccgtggtttccagaccagctccagtgagtaagacgaagctttgtttatcatcacttccccacc

SEQ ID NO: 74076 - DNA, 122 bp, Homo sapiens
gctgtggttgtgacagccctggaggttggggctggctgtgggcggagataagctccgggccgggcggagggcggggactaggctgtgggtgtaccggtcttggagggcagtggtgattggca

SEQ ID NO: 74077 - DNA, 122 bp, Homo sapiens
tctttttgcgtttctccagcctgctgagtaccaggaggccttgcgaaagcagagctgtgccgcagccggatctcctgctgtgttgggggaaggcaggagagttccaaggcagaggctgagga

SEQ ID NO: 74078 - DNA, 122 bp, Homo sapiens
cgagttagacttcccagcctcctcaattagtcctccaccctaacctcagaagcacacccgcgacactctggtttgacccctcgacagcctgtaggagccttccagccgggggataaccaccc

SEQ ID NO: 74079 - DNA, 122 bp, Homo sapiens
ctcacctaggcgccggcggccgcttccaagatggaggctgcagtgggcgggcccaaggcacgtggaaataccaaacagccccagatgaaggcaagttaaaggaaccggccaaaactgcagag

SEQ ID NO: 74080 - DNA, 122 bp, Homo sapiens
ggggcgggggccggcgagcatgcgcagtgtggtgtggacagggcgtggttggcaagcatgcgcaatgtgggccgggcggggctggcgagcatgcgcagtatggggcggggcggggcagggct

SEQ ID NO: 74081 - DNA, 122 bp, Homo sapiens
ccaactaccaggacccgcgtccggcttccccaccacacacctgagcctcgatctgccctgcggccccacctgagtgattcccgggccaaccagctcaccggtcatggtgcatgagcatattg

SEQ ID NO: 74082 - DNA, 122 bp, Homo sapiens
ctctgttcccaggtccacagggagattgtcagcggcctcaagtgtctgcaccacacctaccgccggggcctgcgcggtgagggcagcggtggggggaacggggcgggggggggaagcggggg

SEQ ID NO: 74083 - DNA, 122 bp, Homo sapiens
gcattgtttctgaggatggtcattatatgaatgttatgtcatctgcactcattgtcctctcgccactagaatggaagctccctgagggcagagtccttgtctgttttgcctggtgctgtgtc

SEQ ID NO: 74084 - DNA, 122 bp, Homo sapiens
gttctttcagttcttcagcagacaagttggccaagatttcatcttcattaatctcctcatcgagaagttcttcttgatctgaatttctgctgtgctctgacattattttttctaaatattat

SEQ ID NO: 74085 - DNA, 122 bp, Homo sapiens
ttgatgtattatagcttttacttcttcatgctatcatttcatacactaatctcacaaagacgattgtaagaagaaagtcaatttaagtagaaatctatgactgaaatgatataaagaataaa

SEQ ID NO: 74086 - DNA, 122 bp, Homo sapiens
gcctgccgtctctacctctctacctgtgagttttttccctgcatttacttcagtctgccgcgtcttctccccgcccttctctgtaaggtaaatatgtggaggaaataattcctattaaaggt

SEQ ID NO: 74087 - DNA, 122 bp, Homo sapiens
ttaggaaccaaggtccacagccatcttagaaccccggaagtctcagaccccaggggcctccgccaccccatcaagattcaaagcccactgctccttggggacctgtgtgcaggctttttctc

SEQ ID NO: 74088 - DNA, 122 bp, Homo sapiens
ctgataaaatgtggttttgtcctttaacatctctatctgttaaagacacacatgggtggccgggcggggtggctcacacctgtaatcccagcactttgggaggccgaggcaggcagatcacc

SEQ ID NO: 74089 - DNA, 122 bp, Homo sapiens
atggtcctgggtttttggggctggggccaaaccagtggctgtttctgaaatgtgagcttccgccccaagctaaaaagtgttcacacgtgggtggtctggaaaagaccaaagagagagacctg

SEQ ID NO: 74090 - DNA, 122 bp, Homo sapiens
ttatttaattaattcaagtcagtttatttccacagacattcctgagggcccacagcaagtcggaaaccaagctcagcactagggagatgaggatgacccaacagcctctgcaccccagggct

SEQ ID NO: 74091 - DNA, 122 bp, Homo sapiens
gagcaagccctctggtgggaacctgccccccagccagtgccgcggcccaggtccaaggcccgtcccagaccatccccagcctggggctgcagacagagatgagggtcagtgcgagctagggc

SEQ ID NO: 74092 - DNA, 122 bp, Homo sapiens
ggcaggttgagccccggcctggaccgccccacgctgccttccgtccacgcagagcgggctcggccctcagggctttccttcgagtcgtgttggaaagaagcagaagcagcctcacccgtggg

SEQ ID NO: 74093 - DNA, 122 bp, Homo sapiens
cattcacacacagtatatcctactattcacactcggggcatggggatgcggggtgcctcccggggactcaccggcgcttctgtctctgtacagaatcagtatatcccacaattcacatgcag

SEQ ID NO: 74094 - DNA, 122 bp, Homo sapiens
ttcgcgtgagtcacgttccctcccgtggatggaccatctggtcaccagcaggggcatattcgggtcctttctagtttttggccatcacaggtaaagctgatgtaaacacttgcagactggtt

SEQ ID NO: 74095 - DNA, 122 bp, Homo sapiens
ccgtacgaggtggggttgggcggggccgcccggggcggcaggaggacccgttagcctgcacgtcctcgcatcgctccccgcaagaagtctttgggaacccccaggcactgtcgagaggcagc

SEQ ID NO: 74096 - DNA, 122 bp, Homo sapiens
ggccatggcgcagggagcggatcgggcgggcgagcggcggatctagtgtgtggaggcggccgcgggcgcggggggctgttttcgggcggggtgggcgcccatgctgtggccgggggcagtga

SEQ ID NO: 74097 - DNA, 122 bp, Homo sapiens
tagaaactggtgtcatctttgcacgtaactgtctctgtgtgtgtcccgtcgtcttcagctcggaggtgctcgtggctagcgggacgcccgcactgcactttaggatggatgtgcagcggatt

SEQ ID NO: 74098 - DNA, 122 bp, Homo sapiens
accgatcgactgcccctttgcaggttcctaatttattcagatctgtagaacggagacgggcgtggccaaaaatgggactagaggggtctccgagaagtcggagaatgggtgtcagcttgggc

SEQ ID NO: 74099 - DNA, 122 bp, Homo sapiens
tcgccggtcgcccctgcgctgcgcggaccgcagccacagccggactggtgggaacggcggcgacagacggattggctgacagtcccagccctcagaacagccccggcctcgaagcgttggcg

SEQ ID NO: 74100 - DNA, 122 bp, Homo sapiens
tatcatctgcaagggagaaacaaagacaatataaggaaatcagagctcatcttgcccagacggtcaaaattaacataaccagtgagggactgatgaatagcagataactctagaagtggtgc

SEQ ID NO: 74101 - DNA, 122 bp, Homo sapiens
ttgttttggaagtaaagtaggagaagaaggaatagaatgaacttttttttttattagaagcggatgggagggattatttgtcagggtagttttgtagcacaaatagcatttcaagcctttga

SEQ ID NO: 74102 - DNA, 122 bp, Homo sapiens
aggggaccatgaagttaactgtgactttcggaagggtgcagtctgttaccctttcggtggcgaggtcagtttccgggaggctctgcaacactgatattttccagatgtttctcctcttctcc

SEQ ID NO: 74103 - DNA, 122 bp, Homo sapiens
cttttcagtgtctccatggtcggctcttcttcagggacccccatacgtattacggttgtgcgtggggtactcttacactcacgggggtgccgggcccctggaacctgcaactcacgcaggat

SEQ ID NO: 74104 - DNA, 122 bp, Homo sapiens
cgcagggggaggctgggaagggcatcgggagacacgggcctgcgccccctacccgggccccggcccacctgtccgcacacctgtccgaagccttaaaaggtcttcattccttttcggtctga

SEQ ID NO: 74105 - DNA, 122 bp, Homo sapiens
agctccttttgtttgaagcttagcaaagctactttggttgctatgaaaacagaatcagtacgatggactgtttcagggtttcaggctgtgctcctcttggaagtcacagcccccttgcagcc

SEQ ID NO: 74106 - DNA, 122 bp, Homo sapiens
ggtcacttgagggacccaatagggttaagaaccactgacgtggccgggcgctgtggctcacgcctataatcccagcactttgggaggctgaggcaggcggatcacaaggttgggagagcgag

SEQ ID NO: 74107 - DNA, 122 bp, Homo sapiens
gggtaaatacagccccggctttctgctcaggggacagagtttgaggcactgcagaggaaccggccaaagtatgagacccatatattgagagtaacagagtgtaaagttcaaaaaaatcaaaa

SEQ ID NO: 74108 - DNA, 122 bp, Homo sapiens
taggctccacatcagaaagcagtgcactcacgctgacaggcttgatcccctgtggctgctcgactctgggctctggtccaaagctgagagccccccttcccctcatgacagcctcttctgcc

SEQ ID NO: 74109 - DNA, 122 bp, Homo sapiens
cgcccccagccctcgaaggctcgccccgccccggggccggcccagcgcgcccccgccccccgcccggcctcccggggtccctgcccaccctccacccgcacagcctgggacgcgcggaccct

SEQ ID NO: 74110 - DNA, 122 bp, Homo sapiens
agttgtcctctcttcagctctgtaagggaaaaccaacagaggcctcaccagtctctggaacgcctagctctttcaggcagggagtcttttgccaaagcaaacaatcccagctctacgattgt

SEQ ID NO: 74111 - DNA, 122 bp, Homo sapiens
aaatcgtaggacttccgaaagcagcggcggcgtttgcttcactgcttggaagtgtgagtgcgcgaagatgcgaaaggtggttttgattaccggggctagcaggtgaggctcctttgtgttgg

SEQ ID NO: 74112 - DNA, 122 bp, Homo sapiens
ccttgtggagcgactgcactcgtgcgctgtgggcctcccagtccgagaagctgcggaagtcgccactctccaccacgtacatgcggccgtggtagttgggctcctcatacaggacccacctg

SEQ ID NO: 74113 - DNA, 122 bp, Homo sapiens
cacagataaagatttgttgtatttgagcctactgacaaattcagaaaccaaggccacaatcgtgtacacaactagagatctacaatctaagaactgaagcatatctttccccaaggtaaaga

SEQ ID NO: 74114 - DNA, 122 bp, Homo sapiens
ggttaccggcgtgagccaccgcgcccagtctatttttatttttattttttacttttcagacgagcatttacttttcagacagtggcttgatcacggctgactgcagccttgaactcccggag

SEQ ID NO: 74115 - DNA, 122 bp, Homo sapiens
gggatttttcggccgggttgtaacttcggtctggggtagtatttttggagggtgggagtgcgtgggcatggctcagctttttgtttgcatttcttagctgttgaaaaaagaaaaaaagagcc

SEQ ID NO: 74116 - DNA, 122 bp, Homo sapiens
atggaaaaacagagtatgaatctggcaggggctcctggaatcgcatgtgttgcctgcttgcgtttttaagtgttgtccctggagtgaatcagagcctgcaggcggaccgcaccacaggctgt

SEQ ID NO: 74117 - DNA, 122 bp, Homo sapiens
ttgcagatctgaattattggggtgctcatgttaagaatggatgacaaattgaaaaataagcgtgtactcactttgagaaaataaatctggtcctcagaaccacccattatgcaagggaaaat

SEQ ID NO: 74118 - DNA, 122 bp, Homo sapiens
atctgtcagccgctccctctgggcttccgtcctccgcccgcgcccgacggagcctgttcgcgtcgactgcccagagtccgcgaatcctccgctccgagcccgtccggactcccccgatccca

SEQ ID NO: 74119 - DNA, 122 bp, Homo sapiens
aattccccagggggccagcaggaatctgtgccgctgagagacagcatgcattctggaagtcggtgattcacatctgagcactcagaggagattttggaaacccattaggttagcagagccgc

SEQ ID NO: 74120 - DNA, 122 bp, Homo sapiens
ccatggggctgggcccctgctggccgccactctccgggctctcctttcaaaaagccacgtcgtgctgctgctggaagccaacagcctccggccagcagccctacccggggctcaacacacag

SEQ ID NO: 74121 - DNA, 122 bp, Homo sapiens
cgggattgtttcgggatgaccttttcttcccaataagtgggcaccagctgctgataaaggcgggagagggacactcagcctttgtgaacactttccacattcctggggccaggagattgaca

SEQ ID NO: 74122 - DNA, 122 bp, Homo sapiens
gcttaggaactttgcacgcaccatttggctgcctagaacactcctcatgcactcttcgtccggttaacaccgactcccttcaggatgtaacctcggagaggatcccatagagttgtcaagtt

SEQ ID NO: 74123 - DNA, 122 bp, Homo sapiens
agcacatgaaaccaaattccacgctggaggtccatagaccagctgccgaagaggcccccacgcaggtccccaggtggcattgaccttgtccagggcatcacagttctcaacctttcccctga

SEQ ID NO: 74124 - DNA, 122 bp, Homo sapiens
agaaccgtctggtgacccagtgatgaaagctcgaatcttataggatccgtattcatttcccgtgggctcaagcccagcctccgcgggcggcgcgggccctcgcggcgagtgtccacgaggag

SEQ ID NO: 74125 - DNA, 122 bp, Homo sapiens
tccaggaagttggccgtcatggatagccagggccgagtctgggcacaggagatgctgctgcgagtgtctcccgaccatgtcacgctgctcgacccggcctccaaggtgccggggggcacgtg

SEQ ID NO: 74126 - DNA, 122 bp, Homo sapiens
aagttcaagttctataaggtaaagttcaacttcaaattctgtaaggtaaagttcaagattcggcatatgttggtgggtgctcaatgttcaataaaaactggggaataggcctggtgcagtgg

SEQ ID NO: 74127 - DNA, 122 bp, Homo sapiens
aggagacaaaagaagattatgagaaggtggacccttactctctctttaatcactttgcctcgctttcctaagatcaggacataaatgatgtctgcctcaatatattcctttcgtctctcctt

SEQ ID NO: 74128 - DNA, 122 bp, Homo sapiens
aggccacaccttgctttacataataaaggtgtccttaaaagggtgtgcaacttgaacttgcgtaagtaaagcgtgcttgacctgctcccgggggacctttgtctgaaggactaattctgaaa

SEQ ID NO: 74129 - DNA, 122 bp, Homo sapiens
cacgagctggatggtgaccctcccactgctggatgccatctggacactggcctcacaagccggcaccaggccctttaacctcctgagtcacgggggcggggcctctcttccattggagcccc

SEQ ID NO: 74130 - DNA, 122 bp, Homo sapiens
gctgttgtctgcccgcacccgggcccgcaggccaggtgagagatgcacgggaatggggtgcgcgggcggagggacgccgaggggagactgcgggggtcactgttgcgccttctcctcacccc

SEQ ID NO: 74131 - DNA, 122 bp, Homo sapiens
tgtgtttggctttctgaccccaatcacccacaaagtctgactggatttctggagagttagcgcagactttccatttctggaacacctccgtaatttcctaaaaaaaacaaacttcgtggttt

SEQ ID NO: 74132 - DNA, 122 bp, Homo sapiens
tacgtgcagcacatggagaaaggtgtagacaaaattcagcatgctgaaggggtgggaagacgtagaccctgctgctacatcaaccgttgtcagactcccatgttcctcgccatcccctttca

SEQ ID NO: 74133 - DNA, 122 bp, Homo sapiens
caggagatgagacgtatcttgacatcttccgcgacttctccctcatggcgtcagacgacccggagaagctgagccgtcgcagtcatgacctccacacgctgtgacccgaggcccacggggcc

SEQ ID NO: 74134 - DNA, 122 bp, Homo sapiens
attttatgagacttgatataaggaaaatgggtgaagagaaaatgaaaagtaagggaaagtcgaccagtccaaatgacatgctaaagccccaaactcctgcttcaggggcattgctgctttgt

SEQ ID NO: 74135 - DNA, 122 bp, Homo sapiens
aggggggagaaagtgacaagggtgacccagtgtcctgggtgcacatatgagtggggcagccgggcctagccagagcagtgacaaacgcatgcacacatgggttcacccacatacacgtgcat

SEQ ID NO: 74136 - DNA, 122 bp, Homo sapiens
catagctttactcagcagtaaaaatttaaatttgattttatcttgtgttggcagagtatacgaaaacacacttacatattgttggtgggagtttaaattggtgaaagttttttgttgggaag

SEQ ID NO: 74137 - DNA, 122 bp, Homo sapiens
acggccgggcctcggaaaacggcgggcgcgaagccgccggggccggggcgagaacggcggcgggggctcaccatgtccttggacgagcccagcttcttgaggccgtccaggggcagcaggtc

SEQ ID NO: 74138 - DNA, 122 bp, Homo sapiens
atgatggaggagatgctcatatcaatgactgagagaacaccaagaaagatgtacatggggcgggcatggagccttgggtctgcccagacagtgattaaaataagcaggtttcccagctgagt

SEQ ID NO: 74139 - DNA, 122 bp, Homo sapiens
agcgcacaggcctgctgggcaggtcgggaagagagaatccgtaaaagtgcctgagaatgccgcctgtggacagacctcggaacagggctatttacactggtcccaagacctctcgtcggagc

SEQ ID NO: 74140 - DNA, 122 bp, Homo sapiens
tctctttagttgtctattggttgattttaccatcagtctcccctgtcctcctatcatcgccgctatatttgtgtctcggtgcatactctcattggccctacctgcagtcgctctacgtaagg

SEQ ID NO: 74141 - DNA, 122 bp, Homo sapiens
cgagaccctgctgcgcaccatcgagcttggtctgaaggtgtcgccctccacgctcttcgccgtggccagcatcctggagggctgtgccttcctctgggtccccacagaacactctggtgccc

SEQ ID NO: 74142 - DNA, 122 bp, Homo sapiens
tataatctcgtggtgcgctgttttttaagccggtctgaaaagcacaatattcgccaggtgcgtccgtcacccctttctttgactcggaaagggaactccctgaccccttgtgcttcccaggt

SEQ ID NO: 74143 - DNA, 122 bp, Homo sapiens
caacccataaatctactttgtcttcctcgaaagaggggcgcgggtgggcgcgtctccccgcgagcatctcacctaagggggaatccctttcagcgcacggcgaagttccccctcggctgtcc

SEQ ID NO: 74144 - DNA, 122 bp, Homo sapiens
aggtgaggccaggccggccgggcgtcaccgcaggtgtgcactccgcgcgcgcactcagctcgctttggtgtttctccaggccctcagggcccaccactcctagtcccagcccacaggtctgc

SEQ ID NO: 74145 - DNA, 122 bp, Homo sapiens
cctgggacctcggattagggaagatgcaacaccccgcaccctctggcttagcagaacctacgcctgcatgtcctccccacgaaacatgcgctcgccccagccctcctgcctcctaccctcct

SEQ ID NO: 74146 - DNA, 122 bp, Homo sapiens
gcaagcataaacacattacttttctttcctacaaaagagtctaaaaattatcaaggaactcgtaaaataaaattagcacttctattgtgtgcttctttaataatcaacaatgttgctcgcag

SEQ ID NO: 74147 - DNA, 122 bp, Homo sapiens
tagtgattggctgataggaggagccagcaagtgtggctgagctccggggtgtgtggacgccgctttgttgcctgaggtgggtggcggtggaagttaagggagtcaggggctatcgctcctcg

SEQ ID NO: 74148 - DNA, 122 bp, Homo sapiens
tatatcgacgtctccttgaaacatcaccttaaattaaaaatttgcttatttttgaggaatcgatttcttctcccggaacgccaacgtctcccaggatttgtcttcacagaagacactgtggg

SEQ ID NO: 74149 - DNA, 122 bp, Homo sapiens
ctgccctttgttttggagccgtagcccggcccagacgccgttaacagccttggagcgcggcgccggccaatcagcgcgccatgtcgccagcgccccgcccccatcctgcctccgttccgccc

SEQ ID NO: 74150 - DNA, 122 bp, Homo sapiens
tgccccctccccggaccctcctagcagggacttgatgctgaagccctcactgggtggtggcgggggactgggcggccggtatggccggccgtgcagcacgtaggggcccaggtccttggcga

SEQ ID NO: 74151 - DNA, 122 bp, Homo sapiens
aaagcctggcatccactcgggtgggaggcagttgttctgaaccagggaggctgcgccctgcggggcaggtgcacgcggaccaccccacgccttcagccgaattgacttccacagaagggggc

SEQ ID NO: 74152 - DNA, 122 bp, Homo sapiens
ctagtaaaagaaatattttttcacaaaaagtattttctattttcccctcacctcttacctcgtctcacctcaaagttcaagaagcttaactttgtgatcaaaggaaaatagtataattgaat

SEQ ID NO: 74153 - DNA, 122 bp, Homo sapiens
tgcatgctcgtggtgttcctctttatgtaagggaagcttctgggccttttccctgcctgtcgaacgttctgtatgtttttgcgggatgtgtgaggtgtgctgtcttgctccactttgaggca

SEQ ID NO: 74154 - DNA, 122 bp, Homo sapiens
gctcacttgccgctcacctcctgctgtgcagcctggttcctaataggcaagggacggtaccgggggttggggaacccctgctctaaaaccttcacatcggtcccaaccccttctccagcgtc

SEQ ID NO: 74155 - DNA, 122 bp, Homo sapiens
ggagaggcaggaggacaccgagttccccgtgttggcctccaggtcctgtgcttgcggagccgtccggcggctgggatcgaggtgaacttaaaccccagcctgggtgttcactgggggcattg

SEQ ID NO: 74156 - DNA, 122 bp, Homo sapiens
gccacgcttcagagcagggccactgggagcctggggtctgtcccagcacagccaacagctcgctgggtagcccggccatccccatgccctgggcctcccgactggcacagggttggcatcac

SEQ ID NO: 74157 - DNA, 122 bp, Homo sapiens
agcgcacgacggccacagcgcggggaaagagcgcacgacggtcatactgcagggaaagagcgcatgacggtcacagcgcagacaaagagcgcacgatggccacattgcagggaaagagcaca

SEQ ID NO: 74158 - DNA, 122 bp, Homo sapiens
cccaataaagtgtaccctataatgtgctagagaccctatgttgatttacctgtgttacatcgtcagcagaaatcaactttaccaggtacacaccatgcttatatatttaatgcatataaaaa

SEQ ID NO: 74159 - DNA, 122 bp, Homo sapiens
cgggtagcgtgccacacggcacgtcccggccgctgcaggaaggcggggctcaggtcccgccgactcccacatgctgggggacaccgggagcgcctcccactcccagcccgccggagagcctt

SEQ ID NO: 74160 - DNA, 122 bp, Homo sapiens
tttgtcagggaagttaaactagtgagagacctatgaacaacagcaacaatttaatgagcacgtcttatatgccaagctttgtggttaagcactttgctttatctcacttaattctaactatg

SEQ ID NO: 74161 - DNA, 122 bp, Homo sapiens
ctagggctaggcaggctgtgcggttgggcggggccctgtgccccactgcggagtgcgggtcgggaagcggagagagaagcagctgtgtaatccgctggatgcggaccagggcgctccccatt

SEQ ID NO: 74162 - DNA, 122 bp, Homo sapiens
taatcaacactggttcacttagaggtttctggtcctaacgaccagtccacagagcgtccacgaagacttccagaggccagtggtgatgtggggaataaacccgcctaaaccgaattaaacca

SEQ ID NO: 74163 - DNA, 122 bp, Homo sapiens
tggtaccgcggcgcctcagcccagcctccgcgctgacaatcagcgcccggcagcctagagcgtccctcggcttctgggccgagtcccactcagggccattcaaacgcggccgcgcgcgcggc

SEQ ID NO: 74164 - DNA, 122 bp, Homo sapiens
cagccttgggaaggcagcacccaggtttgagtgtggaggtttgattatcacggactggctcggggccggcttggttctcccgcgaaggttccagggtgtgtgtgtgtgtgtgtgtccgcgcg

SEQ ID NO: 74165 - DNA, 122 bp, Homo sapiens
tcaaagagtcacaaatcacccttaatcaaaaagggtgcagaaatttttttgggccctccccgccatgagctcctacgtagccaattcattctataagcagagccccaatatccctgcctata

SEQ ID NO: 74166 - DNA, 122 bp, Homo sapiens
ctcgcgcccgccccctcgcgcccgccccctcgcgcccgccccctcgcgcccgccccctcgcgcccgccccctcgcgcccgccccctcgcgcccgccccctcgggtaacaaacatggcccccg

SEQ ID NO: 74167 - DNA, 122 bp, Homo sapiens
acccctgcccccaccaggtgccaccgactgcagcagctacttccgcctgggcgtgaagggcgtgctcttccagccctgcgagcggacctcactctgctacgcacccagctgggtgtgtgatg

SEQ ID NO: 74168 - DNA, 122 bp, Homo sapiens
ccctccactcccagggagaggggcccgggtggggtgattcccaggttctaagacccgccccgccgggtggaaaactgccctggagctagctcggtctagcagaggacgcaggactaagaccc

SEQ ID NO: 74169 - DNA, 122 bp, Homo sapiens
cggacagggggcggctcttgagcggcgccggggagacgggacgggcggagaaggtggccacgctcgcacaaacgttgcgagtattacttgagccctccttccgcgctggactgaaataaaag

SEQ ID NO: 74170 - DNA, 122 bp, Homo sapiens
atcccaaatcccaacacgagattgttcaggacaacttcagtggcctggtcggatccaaaacgtccaaacacgggaatctggccagtgtgtcaatgtccagacaggttgggttggcagaaact

SEQ ID NO: 74171 - DNA, 122 bp, Homo sapiens
gcttaattggtccctgctgctaaccatgactgaaaacacatgggttttacttagcaatagcgtgacattttcttttctcagacttctccggatgggggctagttcagttttggtttgaaagg

SEQ ID NO: 74172 - DNA, 122 bp, Homo sapiens
ggcggagggagggagggaggcgtcgcggagtttctctcagccttttgtgcggacacctcccggattccgcgcccgcacccggccccccaaaagacacggggagccgcgggcgaggggtgcag

SEQ ID NO: 74173 - DNA, 122 bp, Homo sapiens
tgaacaccggtcgggcgagctggcagttgggagtttccctagcgactcagttcgggtgggcgttgggcgcctgagtcagccaaacagcctactcggggttcttgggtagcctttggggtgag

SEQ ID NO: 74174 - DNA, 122 bp, Homo sapiens
aaggcgaccaccttgtgaacgaagatttgaaaagtcacttgaagaaaagggtgaacgaggcgaattttcagctgatagaccgattattgaccgacatattcgaggtcgtggtagtcttggaa

SEQ ID NO: 74175 - DNA, 122 bp, Homo sapiens
atttgtacttgcggccaggatccagggaggtgatgacggccgagcgctggggtccttccacgggcaccacctggggctgcccgtccctgtctttgtactggatcacgaaggagtcaaactcg

SEQ ID NO: 74176 - DNA, 122 bp, Homo sapiens
ggtttatggagcctgcggctgaggcaggctccgcagaccccgagccagagtgggatttaacggcggccggtgcgctgtgcttggtcaaccccggtaaccgtcacgctgctagtgatatgaaa

SEQ ID NO: 74177 - DNA, 122 bp, Homo sapiens
cccaccgccgggcctggggcggggcgttcaggaggctctgggaaaggcggcggtggccggcgcggggggcgcgcaggcgcagagcggcgggccgggcgtccgcaaggtggcgcccgcggggc

SEQ ID NO: 74178 - DNA, 122 bp, Homo sapiens
agcccgggcccaggaaaattagaagttttccattcctgatacactgtacacatttttatgcgagagtggagaacattttattcttgacacttttgtgtatataacccttggaatagattctc

SEQ ID NO: 74179 - DNA, 122 bp, Homo sapiens
gggagggggtggcggcggtgaccagcggccacgtgaccacgctcgcgccgtaacggcggccgcctcccgccgcgcgccctccccgcgctccacctctaataacctcgcggcccgcgcgcctg

SEQ ID NO: 74180 - DNA, 122 bp, Homo sapiens
gaataggggagcccgtagagcagccccattggtgtcgactggcgagatccttcctccccgcgatgttgcctgtcactgtacagaactgactatggcaggcttgttcggagcacgggagggta

SEQ ID NO: 74181 - DNA, 122 bp, Homo sapiens
cagaaggagctggcggacatcactttagaccctccacctaattgcaggtgagttgcttttcggattttttccatttttaaaattcttctaacctttgtcttgggtttttctttttattatat

SEQ ID NO: 74182 - DNA, 122 bp, Homo sapiens
ggccaacatggtgaaaccccgtgtctactaaaaatacaaaaaattagccgagcatggtggcgcgcgcctgtgatctcatccagcagtgctttacttgtaattattttattcctgctgccgtc

SEQ ID NO: 74183 - DNA, 122 bp, Homo sapiens
tggcctccccagggccagcagtggggtgcgggtcactggctgacagggaccccctcctgacgcctggtcctgccctatcctgctcgcctcgccccttaccctcaggtttctcctgcaggaat

SEQ ID NO: 74184 - DNA, 122 bp, Homo sapiens
ggacattcccactgcatagtaaccgacagtcagcgctgggcattcccactccatagtaaccgaccctcagtgctgggcattcccactccatagtaaccgacactcagcgctgggcattccca

SEQ ID NO: 74185 - DNA, 122 bp, Homo sapiens
aagctgggcggcgcacttggcctgagcctgcgtggccctccctggtggagtcgagtggaacgacccgggttggagatggggttgcggggagccgagcgctggtcaggccacacccctcccca

SEQ ID NO: 74186 - DNA, 122 bp, Homo sapiens
cggacaggggtgcggcgagaccagtcgcgctggaggaaaggagggaagcccgcagtggtccgctgaggcactgagaaagccaggccagtagctcaaagaggagataggacgtgcccctctcc

SEQ ID NO: 74187 - DNA, 122 bp, Homo sapiens
gaagtcatccttaaaggcaagagaactgagccacctggtgtcagcaaagttcttcagaatcgaagtctcagggccatgcacagtggctcatgcctgtaatcccagtactttgggaggccaag

SEQ ID NO: 74188 - DNA, 122 bp, Homo sapiens
accacgtctggcggatgagtcctgtgattatcaggtcacctgggtaacgcccaaccacgacgggctgggtctcagcgcgaggcctgcagcccggcgccgactggaatccccagcactgccgt

SEQ ID NO: 74189 - DNA, 122 bp, Homo sapiens
tgtgcagaaccctgcctattcctaaacatctgtccccacctcaatcatctaggagtcccacgtgccttaccggaacagcaaactgacctacctgctgcagaactctctgggtggtagtgcta

SEQ ID NO: 74190 - DNA, 122 bp, Homo sapiens
cagcgcccaggacagacctcccttccacggcaggcccagcatggtgctgactgtaggcaccgctgactttgctcttcccagcccccgtgcccacaggagttaattgagcacagacccagccc

SEQ ID NO: 74191 - DNA, 122 bp, Homo sapiens
cgatcaggctgccccgctgtgtttgggcctgtgagccccttagaaggcgtccttaggggtcgctccctcactccgatgctccgcgcgttcagcccctcggggcgtctccgtcctcacaccca

SEQ ID NO: 74192 - DNA, 122 bp, Homo sapiens
gaagctttcccagagaggagcaggatggagccgctgccctcgaggaaaagctagcctgctcggggaagacagagtggataaagacacttaaagtttattagacgatgtgtttccagtggagt

SEQ ID NO: 74193 - DNA, 122 bp, Homo sapiens
tcagactgctgcacgcgacagttgcattgtttatcctgagccaggaactttaatagagtccggatgcggttaggctgacagaagaacccagacctgcatgttcagtacatgaaagtaggcag

SEQ ID NO: 74194 - DNA, 122 bp, Homo sapiens
aatgtagctttcattattattcaggcactgtggggccaacatattaggagaggactgccccggagacgatagttactcatagttccccaagaggagtggataccccgccccacagggagcca

SEQ ID NO: 74195 - DNA, 122 bp, Homo sapiens
ctctgccattaactcagaaatgcacctgccttggggcgacctctgcaagtggcctctggccgggagcggagccgctgctgcccggttcactgggctatagggacggcctctggggcacaccc

SEQ ID NO: 74196 - DNA, 122 bp, Homo sapiens
tgtgagggctctggggacctcgagtgagtggggagtggtggatttgtcctgctttatccacgcacctgccaatgggtccttttcaagggtcccagagaactcaggcagcaggcagcccgcga

SEQ ID NO: 74197 - DNA, 122 bp, Homo sapiens
taatagaaaaatgagaaaaggaaatggaacaggaagttcccagaaaaggaaataaataagcggccgataaacaaatgaagaaatagtctgttattaaatgaaagtaaatcagaccgagtgcg

SEQ ID NO: 74198 - DNA, 122 bp, Homo sapiens
taattttaactccacatcattagcccattttgatatgcagtaaatgccgttggatcagaacgcaccagaaaccaagattctccagaaacccagagccaatatgtctgactcttaaaatcaca

SEQ ID NO: 74199 - DNA, 122 bp, Homo sapiens
ccctagcctggtcccgcccaagtggaccccgcccccgccccgaggcaccccattggccggcgtccccgccccagcgaacccggccccgcccccgaggcgccccattggccccgccgcgcgaa

SEQ ID NO: 74200 - DNA, 122 bp, Homo sapiens
actaaggaggggaatctcaggcatcaccgagccgtttcgggcatgaggccccgccccatccgcctgcacaaggctcctgcaccccactcccgagagcacctgactgcctgactggcagaggt

SEQ ID NO: 74201 - DNA, 122 bp, Homo sapiens
tcttcttctctcgtcaactcgtaactcctatctcaagttcacccacaggtctagtgactccggctggctgctgcggggcgaggagactcgcagaatgcctgactagaggccactcgcgcgct

SEQ ID NO: 74202 - DNA, 122 bp, Homo sapiens
gctgcccccccatccccgctcccgccgctactccggggacagtgactcctcagcctcctccgcccagagcggcccccttggtacccgcagtgatgacacaggcactggcccccggagggagc

SEQ ID NO: 74203 - DNA, 122 bp, Homo sapiens
agcagactatttccaccaggggaaataagaagcacaaagagcgcctgctgcagctctttgcgctcttgcccaaagctaagcttcctctgggctgtggggagactcctctggtccccgttcca

SEQ ID NO: 74204 - DNA, 122 bp, Homo sapiens
ctcagtgtctgggtaaaggcttctacagggccagcatggcataggggggaggtgtgcatgcgttcctgaagccacaaggtcttctgaggagacctgactattggggtggggactagagactg

SEQ ID NO: 74205 - DNA, 122 bp, Homo sapiens
agggctgcgccagcttcagaatcctgctgccatctagggatgagatgaagcgtcttcccgcgtacagccgccctgatggatcgctggggcctcgggcggggtgcaccgctgtcctttcgccg

SEQ ID NO: 74206 - DNA, 122 bp, Homo sapiens
actacttcaaggcacactcccacggttcagaaaaccgattggctaaaactgggaaagtcccgcccacaacgctcactggccaatggctgcgtgaaatcagtgcgaagtgggcgggatagaga

SEQ ID NO: 74207 - DNA, 122 bp, Homo sapiens
catggacgaccctcatctctggggtacccgggccagtgtgctgggcagggggaggaaaggcgaggattcgggacgggcccagcctcgtcagaacaaaccccttctcgctgccttttcatgga

SEQ ID NO: 74208 - DNA, 122 bp, Homo sapiens
ggcggaagttggattcctggcctgagaatattaggcgtagttttccagtttttggcaaagcggaaatacttaaggcccctgggttgactgggttctttgttttatctaccggcttctgcttt

SEQ ID NO: 74209 - DNA, 122 bp, Homo sapiens
aatagggaaagctgccttgattatcttgtaattctctaccaaaccaagaataaaaaagaacggcggctgtgtgtttgtgatattttctatcagcaaatttcagttcataccactagttagtt

SEQ ID NO: 74210 - DNA, 122 bp, Homo sapiens
gggctgcagacgcctgagctccgtaggggttggggctgggggctgcggagctgtctacatcggactcctccgggtcagcccgttaggagccgcctcccctctgcccctccgaagagacgagc

SEQ ID NO: 74211 - DNA, 122 bp, Homo sapiens
ggtttggggaagttcaagggaggaatcctgcaaagaagaggggcgactttttccgtgtttcgggacagctaatctttttagtgacaggatgagagagcccttcatgttcagagggaccgagt

SEQ ID NO: 74212 - DNA, 122 bp, Homo sapiens
ggggcctaaacagccacaaacactgcagagatgagcaccagacttaagttggagatacaccgattctcctgtttctggggaaggattctcagaaggtggctcatatgagtaaaaatcatttt

SEQ ID NO: 74213 - DNA, 122 bp, Homo sapiens
tcgccactgcgcatgtgcttggcggagcaggcccggcagcggtggcagcggtagcagtggcggctcccgcatccccggcgggcggcgcgtgggtcaggtgccctggccgcgagcgcaggggc

SEQ ID NO: 74214 - DNA, 122 bp, Homo sapiens
ccctagtgtcatgtgcccagggttagctgagcctcgtgtgaaatgtagagtcggtgccgacgtggcctcgactgcgccctctgaccacattgcagatggcgcctttcaggcagtgctgggtg

SEQ ID NO: 74215 - DNA, 122 bp, Homo sapiens
aaacggcttctgaccaatgagcagagacggcaaacagcaaatgcgttaccgtggctttcacgtgtcatgaaggtgatgctgtaacctgagcctcagagctcattttatttgtgaattcctat

SEQ ID NO: 74216 - DNA, 122 bp, Homo sapiens
cccatgtgtggcaagatggaaggacggcaggctcccgcctctaggcttggggctctaccccgatggtttcccaaggctgccaagaaggagccctaactttcttcctctcccttcctggaagg

SEQ ID NO: 74217 - DNA, 122 bp, Homo sapiens
ctcctgtgtgttgtttttcataattcttcgcgaaaggccaggcaagctgcacacatcaagcgaaacgcctgaggggcggccagcgcgagggtttctggccatcgaccctcacctcccgggac

SEQ ID NO: 74218 - DNA, 122 bp, Homo sapiens
atgcatgtaataacgatgcgtccagagctccggacaatgcgtgagttgatgctgaacacgcgctaggcccaatgacatgagccgaaacccaaaccccgccccacaccgtgcagctgccctga

SEQ ID NO: 74219 - DNA, 122 bp, Homo sapiens
tttgccgcctcgaaggacatgaaccatctgctggctgaaggcgcttggacctgaaaccagcgacaggttttggcagctgcacgctcactcccagggaggcgagggcgcccggcgaagtgtgg

SEQ ID NO: 74220 - DNA, 122 bp, Homo sapiens
agcgtgcgccactcaagcgctggggccagaagggagatgcagccaggacgcggagcgccgcggaggcttggagtgccacgagcatcctcagggaggtgttaaattttctcttttcttctccc

SEQ ID NO: 74221 - DNA, 122 bp, Homo sapiens
gaggcggaggttgcagtgaaccaagataacgccactgcactcctgcctgggtgacaagagcgaaactccatgtcaaaacaaaaaaagccgggcttggtagctcacgcctgtaatcccagcac

SEQ ID NO: 74222 - DNA, 122 bp, Homo sapiens
aagaaaaaaaaattttttaacttgctaaaaaaaaaaagagattcacctgtaatttggacccgcctatagaaaataatgtaagtaagtgtattatggccagttaaggtaggcactataaaaat

SEQ ID NO: 74223 - DNA, 122 bp, Homo sapiens
ctggaaagtgcaaggcacttggaaaggagccacgcccaacgccctgtaccagcggcctcccggacaccaacagcgtcctctgcgcctgctgcagcttgtcccttagtcctccctggacagag

SEQ ID NO: 74224 - DNA, 122 bp, Homo sapiens
ctaatctcatgatgtgaggtcttagtgtccattgatttcttcctgtgtgtgtgtgttgatcgttctcatgccctttgcctggtggatcctgcctgcccttgactacaggtattctgaggatc

SEQ ID NO: 74225 - DNA, 122 bp, Homo sapiens
tatctgtaatcccagcactttgggaggtcaatgtgggccgaccacttgaggccagaagttcgacaccagcctggccaacacggggaaaccctatctctactaaaaataaaatacaaaaatta

SEQ ID NO: 74226 - DNA, 122 bp, Homo sapiens
ctggctgcgagcgagcagctcctgaaaaagccagcaacagcgaaaatagccgaaagcagccgactagccggagattacacaaggggcgcggcgattggccaggcgggcgggcagaaggaaag

SEQ ID NO: 74227 - DNA, 122 bp, Homo sapiens
cttagggcctgcggtgaccaggtgggaagagcagggcggaatccatctcaggtaaacccgcggggccatcccagacctcccactcaagcccactgtttgtcccaagaaccagccaactctga

SEQ ID NO: 74228 - DNA, 122 bp, Homo sapiens
aacgcttgatttattcacccttggagggggatggggagcaggaagaaacaaagacagctgcggtcttcaaggagtgtggtccaagaatgtgacctgtaaaatctcttattggagatagttta

SEQ ID NO: 74229 - DNA, 122 bp, Homo sapiens
atgccgccattccctcagggtccccgaggcccccacccctctgggagtcccgcgccgtcacgagtggtcacagcggatgggcgccagccctggtcaccttaagcaaccagctcgccaggctt

SEQ ID NO: 74230 - DNA, 122 bp, Homo sapiens
gtttcttcgggaccaggaaggcgtccccaagtggcagccgcgaggcatttggtatcgaagcgtcctccctggcgccccccggtggctgccccacgtccggagaacaaggccggcgatgttcc

SEQ ID NO: 74231 - DNA, 122 bp, Homo sapiens
accccgcgtccccgccgccaccccccaccccccagtccccacctctccgcctcccccgcccgccgccttcccgccaagccaggggagacagtgagccccggcttgtaaagaaaagtaaaatg

SEQ ID NO: 74232 - DNA, 122 bp, Homo sapiens
caagtatcaccacttaaaagaattttagcaatcattttattcaaacactcaaccagagcacggggtcacatagaaagaacattgcacaaatagcattgactgatttttttttccatccttta

SEQ ID NO: 74233 - DNA, 122 bp, Homo sapiens
gaaaagtaaagtgtgggagacagaaacctgttttccctggctctctggggaatttcacatcggtccccataccagattcaagacctactctagcccaacttctaccctacctagcccaggga

SEQ ID NO: 74234 - DNA, 122 bp, Homo sapiens
ttagggacctctgcccactctaccctcaagccaggatgcccggagcggtccccggaaatgcgtgtgcttcgggtgatttaactgattattgaataggcccgcaggaggtgtgtcctgccccc

SEQ ID NO: 74235 - DNA, 122 bp, Homo sapiens
aggacttgtcctatttccgagatatgccgcgggccgaaggatacctggcgcggatccggccggctcagctcacgcaccgcgggacgttctcctgcgtgatcaagcaagaccagcgccccctg

SEQ ID NO: 74236 - DNA, 122 bp, Homo sapiens
gcctgcaccctgtcttatttggaaaaggggtctctgtggaggtaattaagttaaggatctcgaggtgagggcgtcctggactatgtgatcacagacgtcctcatcagagagacgtaccagga

SEQ ID NO: 74237 - DNA, 122 bp, Homo sapiens
ccagccgagtggggagggcgcggcgcctgccagcgctggacctggggctgcactgtttcccgccaggctgctgctccagcccagcccaaagactggggacgaactggtctaagggagccaga

SEQ ID NO: 74238 - DNA, 122 bp, Homo sapiens
gctcatcgccgcctgctacggccacctggacgtggtggagtacctggtggaccggtgcggcgcgagcgtggaggccggtggctcggtgcacttcgatggcgagaccgtggagggtgcgccgc

SEQ ID NO: 74239 - DNA, 122 bp, Homo sapiens
gagaaagctaggtgacttggagccagcgctgctgggtacctagcgtcttcaaggaactgccgcgcgccgccagtcgggggcgcgggctggcaccgggctccctccgcgggccagggccgcgg

SEQ ID NO: 74240 - DNA, 122 bp, Homo sapiens
ttctccgtctgactcagctcctagaccacacgggagcctctgctcttttcccgacatctccggatttcagcatctggctcagcttcctggtcatcggtacctgcaccatcatctgtccacac

SEQ ID NO: 74241 - DNA, 122 bp, Homo sapiens
ctcaccttgaagccctccaccgcctcctcgagcggcagcacgctgtggccgcggtgctcgcgggagcggtcgcacaccacgcagatgggcatctggtcctcctcgcagtacagcttcagggg

SEQ ID NO: 74242 - DNA, 122 bp, Homo sapiens
aggctggaatttaaccatttcctaaatccaattcttcctgcctgcctgatctatctagcacgttgtgaggccttgcaaatagaatcatttatatcacatgcactatttaaagtaatgttagt

SEQ ID NO: 74243 - DNA, 122 bp, Homo sapiens
catccgagagtgaggcagctggtgaggcccgcgtgcccttgtggcagttccgtcttgggacgataatgaagatggcttttgagcgtacaaaggataataaattattactttgcgctcaataa

SEQ ID NO: 74244 - DNA, 122 bp, Homo sapiens
tccgcaagacaccaagcctccagaaatgctccagaaacgctccagaaagcctttaaagaacggatttgaacccagccctcccacagcggcttcaccctggactccacgaaacgccagcagat

SEQ ID NO: 74245 - DNA, 122 bp, Homo sapiens
gaaactcttgtggaatcttcaggaaagggtggtaaagttgaaaggacctttcctccctcccgctgtcttggtgataagctctatcgtttaattggtgctgaagtgagcagctgccagcccga

SEQ ID NO: 74246 - DNA, 122 bp, Homo sapiens
aagacatgacctatttaccccagacaaaatatgaccaaacagactcctgcttacaatttccgtgggcaggttggccacctgtagctcatccctagcactgatcctaagtccctcaaatagag

SEQ ID NO: 74247 - DNA, 122 bp, Homo sapiens
tctcgcgagaacagcgcagcacctccgactcgcgagaagtaaacaccgcgcccgcaggctcggcttactcgccgataggctcagcgactacaactcccagcaggccacgcgccgcggcccgc

SEQ ID NO: 74248 - DNA, 122 bp, Homo sapiens
aagctgcccggcttacgcattcccttcctctgctcaccccgcaacccgcactagcccagccgccacctgaataccattgagtgactgcaattgatgttacagtcttttgcgaagataagaat

SEQ ID NO: 74249 - DNA, 122 bp, Homo sapiens
agccccgagtcggatgtgctgccgggctcaggtcccgcaggagacccacctggagttcctcgctcccgccccttgtcctgcggggagggcgggctcctttactgatgagcagcggtgtcgca

SEQ ID NO: 74250 - DNA, 122 bp, Homo sapiens
atgaccgcggccgcagtctctcccagcttagcattttctgcccagggacgactcacggtgcgcaggtctcccacccaccgcaggcaaccccttcccccgaggggcgcaggagggccgggacg

SEQ ID NO: 74251 - DNA, 122 bp, Homo sapiens
ctctctctcggggaccccccatggcctcaggctcccacattcgtgggcacagacatggctcgtgggtcaactagggaagctattctctggacactcactcccagatgccaggggagcctcca

SEQ ID NO: 74252 - DNA, 122 bp, Homo sapiens
tttcccagggatctattacttttcttatgatatcacattggctaataagcatctggcaatcggactggtacacaatgggcaataccggataaagaccttcgacgccaacacaggaaaccatg

SEQ ID NO: 74253 - DNA, 122 bp, Homo sapiens
taaaaagatcctattagttctcataattgattctgagggctgcagcgtgcctcatttagccgtccctgctcggttcacgccaaggatgtaattcatgcacacttggacgtccaacatggctg

SEQ ID NO: 74254 - DNA, 122 bp, Homo sapiens
gtggaagcagcgcggacccacggcacaccgaacgcactccaacagaacccgacgcagacacgcgctttcaaccggcggagacactggcaggtcaatagagatattgactatataaacaaaag

SEQ ID NO: 74255 - DNA, 122 bp, Homo sapiens
ggtatccagctctcctgctcccacaggccagacctggggctagccagggaaaggcctgaacgtcggaggaggcagtctccagggccgccaagtgagggctgctattcgtcaaagctccagag

SEQ ID NO: 74256 - DNA, 122 bp, Homo sapiens
agatagggacatgtcattgtttccgaggacgcgttgtttgaggtcaccttaaggccagatcggtgtttcattgacgattctgttggttttatttcagtaagttctatatcaaaaggatctgg

SEQ ID NO: 74257 - DNA, 122 bp, Homo sapiens
tcaaaagagcaacgtcctctctcccaattacccactgtcagtccgggaactggggcgggccggctgggaattaaatgctaaataccccctaccggctggctccattacccgggacatccagc

SEQ ID NO: 74258 - DNA, 122 bp, Homo sapiens
atcaacaaacagagccttcgtttattcatgtgcaaacggggccaaggaccgggcctgccccgaggtatgcctgaggcttgggtgagcaggcgccgggctcgcagggcgcgctcctaacccgt

SEQ ID NO: 74259 - DNA, 122 bp, Homo sapiens
aaaattagccaagcatggtggcacacgtctgtaatttcggctactcaggaggctgaggcacgagaatcactggaatttgggaggcagggattgcagtgagccgtaatcgtaccacttcactc

SEQ ID NO: 74260 - DNA, 122 bp, Homo sapiens
cccccgtagcccggaagccttgatagtgcccttctctacctgagccgcttgaaactgggtcgggccagggccccctgagcgaccactcgaggctgcagtgcccctgacctgggcatcctaag

SEQ ID NO: 74261 - DNA, 122 bp, Homo sapiens
gccgggcatggtggagggcgcctgtaatcccagctacttgggaggctgaggcaggggaatcgcttgaacccaataggccgaggttgcagtgagccaagatcagaccattgcagtccagcctg

SEQ ID NO: 74262 - DNA, 122 bp, Homo sapiens
gaaaatctctatgctaacaagggttagtagtgtgctggaatggtacactcacctctcttgcgcatggtagctcaccccctactccctttaactatccaaaacactcgatgtctcctgagcct

SEQ ID NO: 74263 - DNA, 122 bp, Homo sapiens
agccatgacgtaccacccgccgacagttgccacgcctgcccaggaccgccctcacggaggcggtggccacagactacccatccagaagaagtccttccatgtcaaagatgaggtgggtgaag

SEQ ID NO: 74264 - DNA, 122 bp, Homo sapiens
gaggcgcagactcggcgggagcctgaggagcaccaggaggccgggtgcagccgggcggggcgggcggtgaggaccccacagctgctgcttccctgcacagttcgccttctccaaggcccggc

SEQ ID NO: 74265 - DNA, 122 bp, Homo sapiens
gctggccactgcccaccgccagctgcaggacatctgccggctggagcgggcagtgtgccgcgatgagccctccgccctggcccgggcccttacctggaggcaggcaagggcacaggctggag

SEQ ID NO: 74266 - DNA, 122 bp, Homo sapiens
cctgaggccagccctggctgcccaggcggagctgcctcttctcccgcgggttggtggacccgctcagtacggagttggggaagctctttcacttcggaggattgctcaacaaccatgctggg

SEQ ID NO: 74267 - DNA, 122 bp, Homo sapiens
ggcgctcagaccacaattgtgggagccgccatcttgagaccgtcccgcttccccgcccagcgccttagtgcagccgccgctcccgaaacagcctcgacacacctaacgaatggaggcgggcc

SEQ ID NO: 74268 - DNA, 122 bp, Homo sapiens
gagcagcgagctccggggagcggatccgagagggccgagtcctcgaaagaggccttgaggcgacgggagacccgggatcgaagtcagctgccggagggagagccccccatgccggctcgaga

SEQ ID NO: 74269 - DNA, 122 bp, Homo sapiens
tggcttttgagatgtgttcccaattctgtatttaaaaatcaagatatttatccctaaatccgatttctggcaatacttggatggagctgggagaaggctctggggtaggcaaccgttcccag

SEQ ID NO: 74270 - DNA, 122 bp, Homo sapiens
ctactgctaccctcatttcacctgcgctgtggacactgagaacatccgccgtgtgttcaacgactgccgtgacatcattcagcgcatgcaccttcgtcagtacgagctgctctaagaaggga

SEQ ID NO: 74271 - DNA, 122 bp, Homo sapiens
cagctggcaggagctcctcagcaaaggcccttggtcatcagtagtgcacacttgctaagtcgaaaagtgacgtcgcaaggtctgcgttgcaggtagattaggggtgggaatagaggcaagag

SEQ ID NO: 74272 - DNA, 122 bp, Homo sapiens
ggggcagcagacccagaccctctgctgccccatcgcagaagccttcaggatgaggggacacgcttgtgccctcaagtctgagagatcaggcctccatgcacagctagctgccctctcctctg

SEQ ID NO: 74273 - DNA, 122 bp, Homo sapiens
atagacattctcagttacttacatcgttaacccaaacatttggtttcaggatcccataagcgacccatgacaggaagacttgggcttccctggctagagcttctctcattagagcagatgtg

SEQ ID NO: 74274 - DNA, 122 bp, Homo sapiens
tgttgaccctctcgtgaaggcagtgaatggagacaggtctgggagccaccagcatggcctcggcctcctgagtgcagggcaggagactcatggcgcgcagggcccgtaacacgctggaggcc

SEQ ID NO: 74275 - DNA, 122 bp, Homo sapiens
gtacaagagacactgaagagactgagtggactagctgtggtggctcacgcctgtaatgctcgcactttgggaggccaaggcaggaggatcacttgaagtcaggagttcgagagcagcctggc

SEQ ID NO: 74276 - DNA, 122 bp, Homo sapiens
cagtgaacactgccagggtatacatatttttctaattgtaaactaaagagagcaatccaccgtgccccagcacctgcatcatacctgttctaaagcatttaccaagttgtattgcaatggtt

SEQ ID NO: 74277 - DNA, 122 bp, Homo sapiens
tagtaaagtgagaactggaaacagcttaacgtccagggtaagttagtttcactcactcgacggaatgtatgcagccgttaatgtatttctgcattttcccatatttccagtgaacatacagt

SEQ ID NO: 74278 - DNA, 122 bp, Homo sapiens
ttcagtttgccactagaagcacgtgaggccagggacttttttatttgtcactgcatcctgcgtgccttggatgtatgtactcagtgttctctgagtaaagactgaatcaatgaatatgcttt

SEQ ID NO: 74279 - DNA, 122 bp, Homo sapiens
cgggacctggatgcccccggggggtgtccggtgagagggtgccaggagggagagcagccccgccctggttaaggccccccacaccccggcccgcagggaggcgctgcctactgtgtccgggg

SEQ ID NO: 74280 - DNA, 122 bp, Homo sapiens
ccgcgaagccagggtggttgaggatggcctctacgatgcgcacgtagcccttgctgatggcgagcagcagggcgtcgccaatgcgcgccaggttctccttcttgagcagcagctcggtcacc

SEQ ID NO: 74281 - DNA, 122 bp, Homo sapiens
tcctcagcagtgcttggcctggtttaggcagcagagctccttctaataaagacccttgaccgtggagctcccagcatagtcaggtggtgagtccactgtgtgcgccagggaccacgttccca

SEQ ID NO: 74282 - DNA, 122 bp, Homo sapiens
cagctcagtgtgtggtgagcggcggcggcgcggccgggccggggagcgggcgcggcccggcggcctcagcatggaggacggcttctccagctacagcagcctgtacgacacgtcctcgctgc

SEQ ID NO: 74283 - DNA, 122 bp, Homo sapiens
agcaggcctggccccctcagtgtctccctgtcaatttctaccccttgtagcagtcattttcgcacaaccctgaagcccaaagaaactgggctggaggacagacctcaggagctttcatttca

SEQ ID NO: 74284 - DNA, 122 bp, Homo sapiens
tcctgagtaagcttgttcatgaaacaggtttccagttgagccatgtgaacagagacccgccgcacacctttaaatggtatacactccaagtccagaagaataagcatgtagctttgcttatg

SEQ ID NO: 74285 - DNA, 122 bp, Homo sapiens
actggttagtggctcagggatgcatttcagagctcagcgctgaacacttcgcttcagagccgcgcctctagatggcggaggaacgctgcggggaggggcgcagacttcccaaggatgcagtt

SEQ ID NO: 74286 - DNA, 122 bp, Homo sapiens
atgtgctgcccatggtcccacatccatgtgtggctgcaccaggacctgacctgtccttggcgtgcgggttgttctctggagagtaaggtggctgtggggaacatcaataaacccccatctct

SEQ ID NO: 74287 - DNA, 122 bp, Homo sapiens
atcgcccaccgacatcacctttacacctgttctcagggatgagtttctgacccagctctacgggaccaggcgaagatgagaaaagggagaggctgggtgctgcggggcgcgctggccggccg

SEQ ID NO: 74288 - DNA, 122 bp, Homo sapiens
cgccggcatgcgtttctctgtttgcctctgcagccgtgcagcacgagcgggggcctcggacgtccaccatccgcaagcaagtggccctctacttccgtggacacaaggaggagaacggggcc

SEQ ID NO: 74289 - DNA, 122 bp, Homo sapiens
cgcctgccccggtaacgacccctacttccacctgggcggacccagcgcagctttcctccccgggagatgggttttcctgaccccacccccagagatcgtgcctgtgactcgccctccccagg

SEQ ID NO: 74290 - DNA, 122 bp, Homo sapiens
tgaaggtgggggcaggggaaggcgacgggccgctcaggagtctgctggaagcgtgagggtcggccgcgctccgctgccctatcctgggcccaccccacccgccaacgacctcgcctggctgc

SEQ ID NO: 74291 - DNA, 122 bp, Homo sapiens
cctctcccaggcattggtcacttctccgcggaggagcagcgaaggcgacagctctcttggcgcggctgcctgggagccgggcgcttgctgggtgggtgctcgggcccggtgctcccgctccc

SEQ ID NO: 74292 - DNA, 122 bp, Homo sapiens
atcgggctgcagactttggcaagggggcgaagaagcccgggtgtaagcgcagcaggactgcgtctgaaactcggcatcaggctgctaagtgagcccagggctcgggctggggcagcgggcgg

SEQ ID NO: 74293 - DNA, 122 bp, Homo sapiens
gacttggctagacgccaccccacatcaggacctccgaacccgggtggccacccgctacctcggcaccgaaccacagctggccggccaggttgtcgtgccggatctcctcagggaacttgacg

SEQ ID NO: 74294 - DNA, 122 bp, Homo sapiens
gccgacccctcgccccttccccgactgccgcgtgtgcgcgcgcagtcactgcgctggccccgcgacccaggccgagggactcggttaccgaaagagtccccctcataagacccgcctggccg

SEQ ID NO: 74295 - DNA, 122 bp, Homo sapiens
agggacctaaaaggagtttgtctcatgcactttccacatctcagctttatgtcttacactcgctattattttttctctgaacctaactgatttgactgtcttgtttgacctctgtctttgat

SEQ ID NO: 74296 - DNA, 122 bp, Homo sapiens
ggaatcatgcttccacaagccgaggaacaccgacggctgccggcacaccacagctaggagcgccaagggctgccggtacaccacacaccacagctgcacagaggcctgggacagatgctccc

SEQ ID NO: 74297 - DNA, 122 bp, Homo sapiens
ccagatgtcgagtattcctctttattgaaataggactgtggtaagccactttatggctctcgattgtgtatgagaaaatcatgcttagtgccttgttagtaaaagaaagaaaacctgaaagt

SEQ ID NO: 74298 - DNA, 122 bp, Homo sapiens
gtggaaaaatctgggtccaagctttatttcttaaatattcctctctgcccagcatgtgcacgcagcccgctctggccaggcgagcgggtgtcaatcaaggtgctgagcatccccagggtgcc

SEQ ID NO: 74299 - DNA, 122 bp, Homo sapiens
tgcctcactccaatctctggccatcttcacatgcccttcttctctgtgtttgtgttcctgcgtcctttctctcctaaggactcttgtcgctggatcagggcacaccttaatccaggatggtc

SEQ ID NO: 74300 - DNA, 122 bp, Homo sapiens
gcctaaatgaagaaaactataaaactaccaaggagcatgaaagacttgcagggagaacctcgttctcccataagaaaacggaggatgtatttgtagtcagagcgatgggccgcaaagacgtc

SEQ ID NO: 74301 - DNA, 122 bp, Homo sapiens
acgccggagccaatcagcggcccccaagcttgtctgattctgtctgctccaatcaggaggcgcggtccttccagcctcttgctcctgtgaatcacaggtcggcgggagccttttttcctttt

SEQ ID NO: 74302 - DNA, 122 bp, Homo sapiens
ttttaatgcgcctactatatgtgagttctccagctaacattgttttgatggtgcccatgccgtgggtccgtataagagagtgctatcaattgataccgtaattatcaatgcatatagcgttg

SEQ ID NO: 74303 - DNA, 122 bp, Homo sapiens
ttttgtgcagctctagatgatgtatgcttctctactaggatgagggcttcctgcagtgagcgctttccccaccagccaagaagccaggtccctttaagtcttacaaacaagcatttaataca

SEQ ID NO: 74304 - DNA, 122 bp, Homo sapiens
ccccgcaccgtggggatgcccaactcacagtgacttcccgtttggggcccggtgtggccgcgggcgggtttatccaaagggatggctggaaattggccgctcccacgaggctccctccaggc

SEQ ID NO: 74305 - DNA, 122 bp, Homo sapiens
aaagcccacctgggctagtgaaaggagaggaaataagggggcttgtaaaaggggagccgtcgctccaaaagtagagaagacaagaaatgctgtaagataagcaaccaacgcagacaggcctc

SEQ ID NO: 74306 - DNA, 122 bp, Homo sapiens
gggttctccaatcgcagcaaagggcccgggctgggtgttgccgagcggtcctcggctccccggtggaccatgcccctccagaggtctggcccagcgtcgctctgctctgcaaaaaagtggct

SEQ ID NO: 74307 - DNA, 122 bp, Homo sapiens
cctcgtgacgtcatgggccattccacgtgcggagcagcgcgggggacgcaaggcgggcggcgtgaccactgctaaacaggagaggggatttaaagggcccagcagagagtcggaggagaggg

SEQ ID NO: 74308 - DNA, 122 bp, Homo sapiens
tcttctcagtaaaaggggtccgcgaatcgggttctgcagttgcagaatctgggtccctagcgctcctcgctggctgtctctctgctgccctctgctggtgcctcctccacctggagattccg

SEQ ID NO: 74309 - DNA, 122 bp, Homo sapiens
tgcaaacagctgaaggtgttctttcaactatagtaaaaggggtgtctcggtggccacaggcggcccagatgaaggtgctgctggggaaaatgtcaccacgctggtcttgggaggctccatga

SEQ ID NO: 74310 - DNA, 122 bp, Homo sapiens
tccaatcaggaggcctaagccaagtgataagcagccagacaacagccatcccagctggggcgtggactttgctccagcagcctgtcccagtgaggacagggacacagtactcggccacacca

SEQ ID NO: 74311 - DNA, 122 bp, Homo sapiens
cgccccgattctctagtagaccctggcgtggggcacctgagatctccgccactgaaaaggcgctatagaaatgcaaggaattatgattttaataaaattgtctcatttaggagcgagcttct

SEQ ID NO: 74312 - DNA, 122 bp, Homo sapiens
tttttttttttctttttgagatggagtccactctgtcgcataggctggcgtgcagtggcgcgatctcggctaactgcaacctccacctccctgggttcaaatgactctcctgtctcagcctc

SEQ ID NO: 74313 - DNA, 122 bp, Homo sapiens
cccttcctccaggtggcacagagcctctaggaggcgggagagggctggaaagacaacccacgtgacacacccccgaggtttgggattggctggtggggttgacactgctgaggtctaaacaa

SEQ ID NO: 74314 - DNA, 122 bp, Homo sapiens
ccccaccgctccgctccgggagccatccccggtcgcaggagtccggggagggccgggaggcgccatggtctctctctgtagcctttcctggtagtcaatttgttgtcccgaggattcatctt

SEQ ID NO: 74315 - DNA, 122 bp, Homo sapiens
cccactgaccccggcgcaaagcgtcctggggcttgtagtttcggccgagggtgggctccgcggtcgccggtttctcttcccagctctgccctcgcttgctggccggtctccggggtcagcgc

SEQ ID NO: 74316 - DNA, 122 bp, Homo sapiens
gggagaaggcccagacctcaggatggcccgaggtccagtgagggagagtcaaaaactccccgtcaacccctagctgtgaagaaaggagcatgtgaactgggagggtcttgaagagggtaccc

SEQ ID NO: 74317 - DNA, 122 bp, Homo sapiens
gcggaccagctagagttccagatgggcctgggcttggcgggccccgcactcggagcggagcggcctcgggcagtgaggggcttagcacccgggccagcagctgcggagggtgcgccaggtct

SEQ ID NO: 74318 - DNA, 122 bp, Homo sapiens
caaatattaacagaccttaaaggatagactgcaatacagtaacagaatgcctcaatgctccgctataatcaacaccccactgtcttcaacggacagatcatccagacaacaaaacatcatca

SEQ ID NO: 74319 - DNA, 122 bp, Homo sapiens
gtcatgtatagagctatggccaaatgctgtgacatagggtatgcccctccagactcttgacgaggctgttctttctatgtaaacagtaccagtctctgagctaaaacacttaagaaacacaa

SEQ ID NO: 74320 - DNA, 122 bp, Homo sapiens
ctcagtgagggccacaaggtgaggaccaagaatgtgagcaagcatggccactgctgccaccgcaggcaccccaccaagcacagaaagttcgtgtgggacatgatgtgagaggtgtgtggctt

SEQ ID NO: 74321 - DNA, 122 bp, Homo sapiens
tgcctggtgattcatcctccctccaggccctttgtccgccagggcttggcagccgcccagcgaaggcctttgtccccaaccccgagtgattgagacttggcttcccacagccgacctcctcc

SEQ ID NO: 74322 - DNA, 122 bp, Homo sapiens
tttcccagcaagatctccatgtacagctacatctttagggccgctcgggttaatatatgtcgtcagaggctcctcacgccaatcccggggcggcaggggcggcgcctcgagctctcggcaat

SEQ ID NO: 74323 - DNA, 122 bp, Homo sapiens
atttgttggaagttgtttcttttgaccttaatgataatatgtgcactgtactaagttccacgtattaagtacacactgtacactatactaagtaatggtcattatctttccttacttcctga

SEQ ID NO: 74324 - DNA, 122 bp, Homo sapiens
gtaaaggaagagaaaagaaagtcgaattcagaggtgtttctggatatggcattctgaccacgtgaacagaaatgggtccctctgattcagctgaggcctccctggaagagctgagtggaaat

SEQ ID NO: 74325 - DNA, 122 bp, Homo sapiens
acctcacagtttagctttcaggaggtaatacccatgcatgaagcaactcagcccaacgtccggcatatgttaggcgctcaggagttgttgctcttacctatgaacagtggtgatgtgcgatg

SEQ ID NO: 74326 - DNA, 122 bp, Homo sapiens
ctattgagtgagcttagttcattgctaaatatcttcatctcaacacagcttcattgttctcggcctattcaagtgtgaaatctcagtagtgaaatcttatgaaagggccacttaatttccat

SEQ ID NO: 74327 - DNA, 122 bp, Homo sapiens
aagtatagtgttttccctgcctacttcatgttttgttatgtttacaaaatggtactattccgctctatgtttaactcacaagcacgcagaagcggagcaggctgaagataggatgcctgtca

SEQ ID NO: 74328 - DNA, 122 bp, Homo sapiens
tttgtccttctgaaactgtcctccttcttcatctccacacctccgtggtgaggagagaggcgggctttaaggggctggcagctgtggcctcccttgccagtctggctggctggcctcctccc

SEQ ID NO: 74329 - DNA, 122 bp, Homo sapiens
gggactgcgtgagagcccccatacctcataaggaccacacggctgaacacctgcccatgccggggactgcgtgagagccgccacacctcataaggaccacacggctgaacacctgcccatgc

SEQ ID NO: 74330 - DNA, 122 bp, Homo sapiens
aggacccgcgagccccgggtgtccaacctatggggtggctgtggccgtgcagggggaggacgtggggtggtctgggaggggccgcgtccgtgggaggctcgcacgtgtcgggtccggagagg

SEQ ID NO: 74331 - DNA, 122 bp, Homo sapiens
cacgccgcagggaccctccagcagagccgggctgctgcagccaccagcgctgggacgaggcggcagtggccctctggcaaagtgaagtctggagctaggagaaagcggtcatcagtacctct

SEQ ID NO: 74332 - DNA, 122 bp, Homo sapiens
ctccctccctccctccccgcccccactgcacgcagggctggctgggctccagctggcctccgcatcaatatttcatcggcgtcaataggaggcatcggggacagccgctgcggcagcactcg

SEQ ID NO: 74333 - DNA, 122 bp, Homo sapiens
cccctcagccacggccacaaagtgcccttctctcctcctgagtcttgcacataaggaacgcgggctggggctctgttcgtctttctcctcgcccaaggtaaggacctcgggaatctgaagcc

SEQ ID NO: 74334 - DNA, 122 bp, Homo sapiens
gcttttctccctgagcgttgtgtgttagcgattctgtgagtctgacgctgcacaggtgggcgatgctttgctccggccggctcacctccccgatgaaagcccgctcaacggcatctgcaggg

SEQ ID NO: 74335 - DNA, 122 bp, Homo sapiens
gaatgacagattcgtattctaaaggtgagtctgtcaattgcattctgccctatggcagtccggccaagggggtggcaccgcagagccaggagggcaatcccagttcacggtcaccaggctca

SEQ ID NO: 74336 - DNA, 122 bp, Homo sapiens
ccccaggatcctgatcttgaaatgtaccagacatggaccattgcgttaatttgtctgggtcggcttcctcatctgtaaaatgggtataaggttacctgtgctgtcagccacatggggttgtt

SEQ ID NO: 74337 - DNA, 122 bp, Homo sapiens
cctccctccccgccgaggccacttccaccctgagagttccagagcctgcagaggaggcggcgggtaccagggttttcctctggggctttggcgccccccacgctgctctcaggagagggaac

SEQ ID NO: 74338 - DNA, 122 bp, Homo sapiens
aatggccgaggtacactctagaacactcacagtgagtcgggaacacacgcacacaatggccgaggtacactctagagcattcacagtgagtcgggaacacacgcacacaatggccgaggtac

SEQ ID NO: 74339 - DNA, 122 bp, Homo sapiens
gcccccgcctaggcgagagcccagagagctgaacctgcatcccggacctgcggcgaccgtcgtacaccatgggcctccacctccgcccctaccgtgtggggctgctcccggatggcctcctg

SEQ ID NO: 74340 - DNA, 122 bp, Homo sapiens
catagtggcaagtcataccggccacaaacttttctcatgaagcaccagagagcagaaattcgaggtgaggcctgcaagaatggtgcccagcatgggtcctacccagtacacctgtggggaga

SEQ ID NO: 74341 - DNA, 122 bp, Homo sapiens
acccgctctctaaggtgctcttcccctttaagactcacggctcttcccgtcaggctgcgtcgcagtcttaaggccccgccttttcagacagcttccgctgggcctgggccgctgcggggcgg

SEQ ID NO: 74342 - DNA, 122 bp, Homo sapiens
cccacattaaaacttgagcaaagtcatcaggttccagaccatgggatgttctgttgtcttcgtttcaatcaagcaagaagcttttagtaagcttttattagcttttagtaagtttttattag

SEQ ID NO: 74343 - DNA, 122 bp, Homo sapiens
ctcccgagcgctggcaggccactgcgcatgcggcccctcccgagtgctggcaggccactgcgcatgcggacagaccaccccaagggaagaatcggggaaagttaacgcaagccccggaagga

SEQ ID NO: 74344 - DNA, 122 bp, Homo sapiens
gctctttttccattaattctgaaacgtggcgcattctgtccggcctgtctcgtccctcctcgggccacccatctgtattctcgtattctcggtacacacagcgccccctgcagtcattgcgc

SEQ ID NO: 74345 - DNA, 122 bp, Homo sapiens
gggggcgcggaggggcggtggttcctggtgcatccggggagtgccggcccgcggcctctccgtggagattcctccaagcaggcccccaggccgccgcggactcctcagactcagcgccctgg

SEQ ID NO: 74346 - DNA, 122 bp, Homo sapiens
tgagataaaacccagtgcagggatggaggctctgagctgtgtgcccagggccctgagagccggggagccaggggaagtgacaaagaccaggaaggaatttctggccctgccatgggtgaccc

SEQ ID NO: 74347 - DNA, 122 bp, Homo sapiens
gattcgagctgggagtggggctgccgcgggtcggacgcccctctagggagacccaggacccgggagagaggtagaggggagcagagacagccaccagcttctatcttctgctctaagcacat

SEQ ID NO: 74348 - DNA, 122 bp, Homo sapiens
ggccccgcctgccacctggcgccgctccagcgggacgatggcgggcagcgccgtgccaggcggtaattgcagacagactaatttaaagagatgagacggttatttttaactcgcgttaaggt

SEQ ID NO: 74349 - DNA, 122 bp, Homo sapiens
cctcgtcatacggccaccaggttcagcccggaacgcacacggaccgatgctcatctcccgcggccgggacgacaagacacagcggctcccctgggcttgaatcaggcagctgctggtataga

SEQ ID NO: 74350 - DNA, 122 bp, Homo sapiens
ggatggagtagggtccctccagaagcagcgtctgagcagtgaagctgcactgacgaggttcgctcctgctcggtgcactccctgctacgctcccttctgtaactcctgctccttagtgcggt

SEQ ID NO: 74351 - DNA, 122 bp, Homo sapiens
ctcaggcatagggcagccaggcaaaattttaatagaaattcagaggaagtcacactaaaacgcaccaaacttaagcctttcaacaggtagttcatttttcctaaaaacaaacaaattcggca

SEQ ID NO: 74352 - DNA, 122 bp, Homo sapiens
tgcttaatgggagctggtcttggggccgggcttccgcgtgcgttggcctggcggcgagagcgcgcggcgggggcgtgcccggcgggcggggcggggccagccgggggcggggcggggcgcgg

SEQ ID NO: 74353 - DNA, 122 bp, Homo sapiens
tttgcttttcatccccagacttaacccgattctctccctgctctttcagcgacatcaccccgcccggagagcctgtgaacagccggcccaaagcagcttcccgcttccccaaactgtcccgg

SEQ ID NO: 74354 - DNA, 122 bp, Homo sapiens
tgaaaaatgaacactgagcactacgggaacgtcggatcataacgatgacgaaggaaagggcgaatccctccaatggagtctgctgcatggacagggctcaggacggggaacaggagccttca

SEQ ID NO: 74355 - DNA, 122 bp, Homo sapiens
actcaaggcaggaggggccacgagctggcctttctctgacactgacttgccagaagtgggcgttcctgggagtggcagacatgcacccactagagatagatctgaatcaccccctcacattc

SEQ ID NO: 74356 - DNA, 122 bp, Homo sapiens
aaggcgggcgcgcgggaaagccacgaggccccaggagtgcgactgcggtgcctgcggtgccggtgttttgtttgattccctgcctcaaacggagggaaacgaccttcctttatcctacgagt

SEQ ID NO: 74357 - DNA, 122 bp, Homo sapiens
ttttcccccatccacttttctaagcaggcttcaagaaagaactcatcagagataatcatacggcagcttccccaccctttgggtgggttaacactctggtgggtgtttatgttggctttaag

SEQ ID NO: 74358 - DNA, 122 bp, Homo sapiens
aagcagtgagattttcatgctgcttttgcattccaacttaaaaattacacagcatacacacgctggaaaactccactgtgcacttgtgagatcaggagaatgaaaactatgtaatatctcag

SEQ ID NO: 74359 - DNA, 122 bp, Homo sapiens
acagacagagggggaacccagcaaggcctgtgtgttcagattcttggctcctttgtgtagcgttctttcctcctgggtatcaggcaggagccctctggaatgaggtcttacgactattggac

SEQ ID NO: 74360 - DNA, 122 bp, Homo sapiens
ccgtgacacttttactttagactccggtgtcgtccacttccctccttctcgcttccggggcgttagctgagcatactcaggccccagcctgctcgcgctggttgtgtgctgggaacagagtt

SEQ ID NO: 74361 - DNA, 122 bp, Homo sapiens
aacacactcctgtgtgtcaggttctttgctcagcgtagtgcgcctggggaccgtccgcagcgcgtgtgtcctcagtgcatgtgtcctccgctagtgtcctcagcgtgtccgcagtgcgcgcg

SEQ ID NO: 74362 - DNA, 122 bp, Homo sapiens
aaaaatgaaagtgagatctatgaattattacaaatgctctcaatctgctgtgccgtgcagcggggccctgggctggaaagccttttttttctcgtgtttaagttggcgtggaagatgaaata

SEQ ID NO: 74363 - DNA, 122 bp, Homo sapiens
gggtcggagctcggcaggcggagagtaagtgccattttcccagagggttacgagtcatttcggcctggctgggaggtgtgggaagggacagtcgtgtcggaggaagccggagaagttggagg

SEQ ID NO: 74364 - DNA, 122 bp, Homo sapiens
ggactgcggcaggatctgtcgaggaaaaatcttgcggccggcgattccccgccttttaagcgcagcctcgcactccccccaccccacgcaggggcgggccttggggaaccgcgggcgcccac

SEQ ID NO: 74365 - DNA, 122 bp, Homo sapiens
tctccccaccataatccctcccaacacagagttccctctgcaacaccaggagccccccagcgactctccaggaaggctgcacaggccctggcagccaagcctgctcttggcccctttccctg

SEQ ID NO: 74366 - DNA, 122 bp, Homo sapiens
ggactcctcctggctcccaggagccactctcacccacaggcagggggctgcgtcgcttcacgtggcatcaggagggcagtggttctgtactcatgcagcccgcacacccgtgcccagagacg

SEQ ID NO: 74367 - DNA, 122 bp, Homo sapiens
cctcccgtgatatcctagcactctagccttccgtcccaaataatagttatggaaatgcctcggcttctctggaaacaggaggacaagggaactctgttgcaccagaatccatgctgagcttt

SEQ ID NO: 74368 - DNA, 122 bp, Homo sapiens
cagacccaacctgcacttcctttccatccatcaggaccatagcaactggcatttctggcacggcccaggtgctgtcctagctgcccaagaaaacggctgggaagtctccccgcgctgccaga

SEQ ID NO: 74369 - DNA, 122 bp, Homo sapiens
aaatgctggcacggtcagctccgctgctttcctcaggcatttctacccggctgtggtaagcggaggttctcctctttcttttgccctttgaagttacgtagttgccttggggggtgcttagt

SEQ ID NO: 74370 - DNA, 122 bp, Homo sapiens
cgggggcagcggctcctcaaggcggcgggcgccggcgtcttcagagcgccatgcgaaccgcggagcgagtgtggcatctctaccaggcggggtaccagcctctatgccaggccatatgggct

SEQ ID NO: 74371 - DNA, 122 bp, Homo sapiens
gtggtcccattgtctccacgtctgtggtaacccggtgcctttctagagcaggcaggctcccggcatgggtggaaacagagcagggggccagcttcccccaatcaccggtgctgctgtggagg

SEQ ID NO: 74372 - DNA, 122 bp, Homo sapiens
acctggggagccgaggagtaggggtatccaaactgcgggtaggacatggcgggcgcggcccggggcggacgggcggggcctgcagggttctgcgcgctggggccggcgtggcgcggccactg

SEQ ID NO: 74373 - DNA, 122 bp, Homo sapiens
tctgcgcgcgaactaattcgcggccgcataatttaataacttcctccatccatgagtccgcgactgctctggaaaattggttcagtagtaaacagactcctagcaggtggaaaaaaaacagg

SEQ ID NO: 74374 - DNA, 122 bp, Homo sapiens
ctggtggacccgtccctggaccccaatgtatacatcacgcgggagcacagcctggtggtgcgacaggcccgccttgctgacacggccaactacacctgcgtggccaagaacatcgtggcacg

SEQ ID NO: 74375 - DNA, 122 bp, Homo sapiens
gcaggccggggccagggcctcttgaggagaccaggccacggcacccagcaagtgcccaggcgcacagtgaggggtggggggcatccaacacgcctggagatcaggagaaaaggcgggggcta

SEQ ID NO: 74376 - DNA, 122 bp, Homo sapiens
aagccctctcaaatctgaatatgtgtttcacgaggagagagagagcagcagaggggaccacgaggaaggcagagattccctgacgacctcatgcctttgtacaccactcgcctttactctct

SEQ ID NO: 74377 - DNA, 122 bp, Homo sapiens
cgcctgcggcgggcgccccggacccggccgggttcggacgacagctgcacggccgcgcctcggcccctgaacttttgcctgcaccggggccgccccgcaccccccgccaacccccagccccg

SEQ ID NO: 74378 - DNA, 122 bp, Homo sapiens
agaacctgattggtgcccggtcctcactcgtgtcctccgggccccagagataacttgcatcgcctactggcaaggagctctgtgctcactggagcccagctccccacccggccatggccgtg

SEQ ID NO: 74379 - DNA, 122 bp, Homo sapiens
cctggtgcggccctggccgctggctctgttcctggttagaactacgccagacaggccgggcgaggtggctcacgcctgtaatcccagcactttgggaggctgaggcgggcagatcacgaggt

SEQ ID NO: 74380 - DNA, 122 bp, Homo sapiens
tcactttcccagctttcttcttaaccaacaatctacccgaaaccgtcgtttcttggttagcgcttgcgcagacaggcgagaaaggtaagttttgacccagcttagcagccgtagtcagccgg

SEQ ID NO: 74381 - DNA, 122 bp, Homo sapiens
agcggccgggctgggggcggggcctggcccagaggacgccttgtgcagccgggcaggggtcggggcctggagccgcggacctctggagccgccgggcagggggcggggcttgagccggaggc

SEQ ID NO: 74382 - DNA, 122 bp, Homo sapiens
aggtcctttttttgctgtctagtgttattacagatgaagtttttaggaaagaagtgaaaacgtacagttttgcttaaggcacagacgttagaaagtcagtgtccaacatagcctgaacagtt

SEQ ID NO: 74383 - DNA, 122 bp, Homo sapiens
ttcctactgctgatgtggaagaagcttggaaacatgttcctttccaggagataagtgatacggcagaaagacgggtcagatgaggccaagggattggagccagagtcttaccaaactcgcag

SEQ ID NO: 74384 - DNA, 122 bp, Homo sapiens
accatgacattgtgcaggtagatgaaatgccgcgttgtgcgggtgaggaccccgagactccgaaatggcacgaggcacatcccggctgcacagctcatgccttggccccttatggagacccc

SEQ ID NO: 74385 - DNA, 122 bp, Homo sapiens
acaattataatggaagtttggataggaatttaaaacatgtggcaactaaccctgaccctgcggcttcagtctccccgccgctagctgagggccgtggccgctgcacagaggcttgtgaggat

SEQ ID NO: 74386 - DNA, 122 bp, Homo sapiens
gtccctcgctggacccgctggcgatgctgtacaagatcagcaacagcatgctggacaagccggtgtaccccgccacccctgtgaagcaggccgatgccatcgaccgctactattatgaaaac

SEQ ID NO: 74387 - DNA, 122 bp, Homo sapiens
agggcacagtaaatgtacgttacagtagagctgcttgggttagcaaatacatttgcattccgacaatggatgtgctcattaacaatgatacttacctactcataaaagcctctaagaccctg

SEQ ID NO: 74388 - DNA, 122 bp, Homo sapiens
cttcagagagggagaccccgacccaaggggccactgacggactcaacacaggcacagggccgcccgacgcaacgggccacgtattcgccacttaccaaacaacataagcacacacccccagg

SEQ ID NO: 74389 - DNA, 122 bp, Homo sapiens
aaaagcacaagcattgtttaccaccttaatatatccagattctttttgaaatcaagttttcgtgtttatgaaataatgggcccaggaatgaatatccaatgtgatccaaatatattagacta

SEQ ID NO: 74390 - DNA, 122 bp, Homo sapiens
cgcgccgcgcccgtgacggtgcccacgccgccgcaggtaccgggcgccggtgggcgggggcgccgaccaagtttctctcgctgcaaagatggcgtcagtgctgcccaaacttcgggcccccg

SEQ ID NO: 74391 - DNA, 122 bp, Homo sapiens
tcactcccaccccctcctccagccccggcacccacacatccccttcctgcctctgtggatcggtctgtcctgaacatttcatagaaatgggattgcacgccatgtggccttttgtgtccggc

SEQ ID NO: 74392 - DNA, 122 bp, Homo sapiens
aaagacagtgtcatttctgaaacaggcatcacgtctctgacgagtttatacgccagctaccgcacagaccccaagcacctcacagagccaggcttgctcatccacagaggagaatgaaaacg

SEQ ID NO: 74393 - DNA, 122 bp, Homo sapiens
ccctcccggacggggcggctggccgggcagaggggatcctcacttcccagtaggggcggtcgggcagaggcgccccccaccccccggacggggcggctggccgggcagaggggctcctcact

SEQ ID NO: 74394 - DNA, 122 bp, Homo sapiens
gtagtgatggtgttgtttagagatgcagaaaccacttcatccattgctctgagagagtcacgttctattcttcaggaagcatgcttacaacaccaacctaatttttaaaaaatctttcagag

SEQ ID NO: 74395 - DNA, 122 bp, Homo sapiens
caataagagttaaaatcattttctgcctatgaattgtatgacatttaaaatcagtatgatcgaactaagaaaaaaatgcagatacagaagcacgttggttaacaattcagagagcgggtttg

SEQ ID NO: 74396 - DNA, 122 bp, Homo sapiens
cttaggaagagtcaaaggtggttcgtcttctgacttctccagtttgcggctctctggcgccgaccacctcctcttcctcgttgccgcgggcttgctgggttctattttggtgaggaagggcg

SEQ ID NO: 74397 - DNA, 122 bp, Homo sapiens
attacttgtttttgcctctttatctacagataggcaggggcggttgtagtttgttattatcgttgactgccattcatcagccacgacccccaagtgccatctctgggctcaagtaggaggaa

SEQ ID NO: 74398 - DNA, 122 bp, Homo sapiens
ggacccagggttcatcacagggggtgagaggaagaggaatagcaatttaggcacaagatacgtggagcaacttgtccctgtaagatatggctgctgtgtgtcctatctcgcaggagcagaag

SEQ ID NO: 74399 - DNA, 122 bp, Homo sapiens
ggtggccgctgcccttggcgctcctgttcctgctctggccccatgccagcctctcacctgcgctccgtctcctccaggcatgaggctcagagactggagcaggaagcccgcggccggcttga

SEQ ID NO: 74400 - DNA, 122 bp, Homo sapiens
gactgtgacccatgcagacagcaaaggcagggagatgcagcatgcagcgcagcatggcaccgatactggcagacactttagtagacttagggactttaactgcagagaaaatgtgaggttgc

SEQ ID NO: 74401 - DNA, 122 bp, Homo sapiens
cagccagcccgggggcgtcctctcccagcggtgaccagggccagcctttgccagcctgcccgtcctcggactcctggggaacgtacacacagccttttgcttaagcaaggcgctctgaagcc

SEQ ID NO: 74402 - DNA, 122 bp, Homo sapiens
tcctgctctcactggctgttgcatgtagtgtccttaagcttcttctgttatgctcagccccggagatctggcacacagagccatagtaacaatgcgttcagccaggtttccttagctacaca

SEQ ID NO: 74403 - DNA, 122 bp, Homo sapiens
catggacttcccagccttcagaactatgagccaataaatttctgttcattgtcaattactcggtctgtgatattttgttatagcagcacaaagaaccctaagacatgtttcaacagagcaat

SEQ ID NO: 74404 - DNA, 122 bp, Homo sapiens
cggggagcgggctggagtttcggccgagatttgtgttaaaagctcagagcttcagccgctcgcacaggtccttcctcctcccccacaacactggtggccgggtcggagtgagggtcgggccg

SEQ ID NO: 74405 - DNA, 122 bp, Homo sapiens
gtgagaccccgtctccaaaaataaataaattaattaaataaagccttgtgaagaatctgccgtggagcataatgtaacccataaagccacttaactgggcgcacataaactacataaactac

SEQ ID NO: 74406 - DNA, 122 bp, Homo sapiens
ggcgaaagaaagatgcggcctgaggtgggacgtgaacccgcggccctgcagcccagacagcggccccggagtgaccaccagcttcaccgaagcccctttactgtgcccccgaggacacctgc

SEQ ID NO: 74407 - DNA, 122 bp, Homo sapiens
ggccagctccagggcatccccgggtgggcgggcactgctgtgccagcgggcaatggcggacgtcatcttcctcttgggcccaaacagcctgcggggggaatgtgaccaggatatgcctcagc

SEQ ID NO: 74408 - DNA, 122 bp, Homo sapiens
gattagcacctaccttatcctgcaccatttctatgcctatcatgagacctttgcctcggacgtctccaacaatttcaaattcatcccgcagcttagcaaactttagtaacatgtaggtccca

SEQ ID NO: 74409 - DNA, 122 bp, Homo sapiens
tgaaatctcctactgtacgaaatacctgctttggttgtcacactaacacatacacacacacggacactcacacattctctttcatgcaaagcaggcacccacactcacaaacacacacaaac

SEQ ID NO: 74410 - DNA, 122 bp, Homo sapiens
aaagtctgaacgatcctttctcagacatgtctcctgaatctggatcatcaccatgccacccggggtaggctctggtcctaaccggcctggactctgagcaacggtgtcctgactgctctcct

SEQ ID NO: 74411 - DNA, 122 bp, Homo sapiens
agaataagggccccagtcctgtctcctctgagggcatcaaggacttcttcagcatgaagccgtacgggcctgggggctaagggctgggggctggggtgagctaaagggtcttgctccccatg

SEQ ID NO: 74412 - DNA, 122 bp, Homo sapiens
cggtgccggcccggcccctggatccccgcgggcggacgcgctcccccagctcagccctcgcgaccctaacgcggtccgttccttttgcaggagccgggcaggagcccctcggtccggtccgg

SEQ ID NO: 74413 - DNA, 122 bp, Homo sapiens
gggcggcggcggcggatcgaggagctctccaggtcgtcccgggagaggctgctgcagtcccgggacaggatgttctccaagttcacctccatcctgcagcacgccgtggaggcggtaaggcc

SEQ ID NO: 74414 - DNA, 122 bp, Homo sapiens
aatagacgtgtgcgccaatgaacgtgtgcatcaatagacgtgtgcatcaatggacgtgtgcgccaatgaacgtgtgcaccaatagacgtgtgtgttaatggacatgtgcgccaatggatgta

SEQ ID NO: 74415 - DNA, 122 bp, Homo sapiens
aggccaagggcgctggggcacttctgcccgagcttcccaaatcttgagggaaacgggagccgctgcagggtcaggacgcaaagactccgaggcccttcaggccgaggggacgtcgccctcgc

SEQ ID NO: 74416 - DNA, 122 bp, Homo sapiens
gtacccgcgcttcggacaccctgctcccagggcgctcctcgcttccagcctcccactttgcgccttgggctccccatgagccccgctcctgagacaccccacgctctgtgtattccgtccca

SEQ ID NO: 74417 - DNA, 122 bp, Homo sapiens
ttgttttggtcattggcagccaggcagaagtagcgtccggtgtcattggcctggaggtctcgaatgcccagggtcccattggcataggggaagaagcgttcgtcctgaagcactgttgtccc

SEQ ID NO: 74418 - DNA, 122 bp, Homo sapiens
ggtggtcgctgttccaggcagcagaagtccatttggtcgcacctgtgacctgggcacagccgtccgcacccccagcctccgcctggtacaccttggattccttgcattctgatgctgtggtg

SEQ ID NO: 74419 - DNA, 122 bp, Homo sapiens
ctacacgagccggcgtggacccagggctgagctgtgaccacgagggccatcccgacgagccgccatggacccagggctgagctgtgaccatgagggctatcccgacgagctgccgtggaccc

SEQ ID NO: 74420 - DNA, 122 bp, Homo sapiens
ccacttccccaagtacacaagttatttcacaactcttggcaaaaacagtgctgtaaaaatcgtaagtttatttgttaaaaaaaatactgtatttgaaaagtaccttccttctgggattttca

SEQ ID NO: 74421 - DNA, 122 bp, Homo sapiens
tagtacctttcactgatactcccctttttttaaattttgttttttactttgagtcctccccgtagattgcagggggactagtagtccttaactagaaggattacaccaaggtcagagaaagc

SEQ ID NO: 74422 - DNA, 122 bp, Homo sapiens
cctgcaccgcagggcagggaccagggctcccccgagccacccagctcagggatgttcctgcgcagggcgaggtagacggttccatttggagctgggaggacagagtgccgtgggctccagat

SEQ ID NO: 74423 - DNA, 122 bp, Homo sapiens
gctgatccagtgggagaacaacgggcaggtgtacagcttgctcaactcgggctcagagtacgtgccggccggacctcagcgctccgagagtagctcccgggtgctgctggccggcgcgcccc

SEQ ID NO: 74424 - DNA, 122 bp, Homo sapiens
tgggacagagcggtcgcccgaggaccggatctgcgcggcgcagtggcctaaaaaggaggccgagccagtccctagctccgccttcccgggccctgcgccctagtggcctctgcgcggttctt

SEQ ID NO: 74425 - DNA, 122 bp, Homo sapiens
tggcagagcaggctgcctgcctacttgtgcttgattgaagtggcggtgtagttgtggtggcgcgaatcagcgtccagcaacagtttgtggaaactgtgggtttgctgagtatggcgggggaa

SEQ ID NO: 74426 - DNA, 122 bp, Homo sapiens
ggccggggaggagcctggcgcggcgggagcggcggcgcaaagtgaaactctggcaagttgcgggcgcgcggggagctgtcgcgggcagcgcgccctcgggaggacgtggccccggcccccgc

SEQ ID NO: 74427 - DNA, 122 bp, Homo sapiens
tggccgagacgggcctagggcgtccttctccagcatcacctggccgagacggacctagggcgtgcttctagggccaaggtcatggccacatagcccccagccaggagagatgacgccccctc

SEQ ID NO: 74428 - DNA, 122 bp, Homo sapiens
acctctcaggttcaatcaatcctcccacttcagcctcccgagtctgggactacaggtactcgccaccacactcggctatttttttttttttttttagagacagggtctcactatattgccca

SEQ ID NO: 74429 - DNA, 122 bp, Homo sapiens
agcgccccagctcacgatcgtccaggacccgtcgggtccctcagcacagcgcggccctgtcgctctcctgaccacgcccctcatggccccgccctatgcctcgcccctggccctcgcgcccc

SEQ ID NO: 74430 - DNA, 122 bp, Homo sapiens
gatgtttctcgggttctctctcttcctctcttgcctttcctcctttctttgagcttgtttcgctctgagagtacaggcttggcacccacttacccaagaactgattagttcctaaaagaagc

SEQ ID NO: 74431 - DNA, 122 bp, Homo sapiens
ctcacctctccggcagtgatcttggccaagatttaagacaacctcatgatagggtttcaccgggtcatccacatgctccatgggaaaaatcccttgctttgacagtccctgagagtgctagt

SEQ ID NO: 74432 - DNA, 122 bp, Homo sapiens
tgctgcagctggcacccccatgtaggtgccacagggtgtgggtggtgccctctcagttcccgcacgtgctgatggtgacctctgtatcagagggtccctttctcttatgaaatagcatcgat

SEQ ID NO: 74433 - DNA, 122 bp, Homo sapiens
agctgtgatgtctccaaactgtagaggctttggactttttggcccactttcttcatagaacgatagagatttaggatcttactgccctagtttaatcttggtttgcagatgagaggccgagg

SEQ ID NO: 74434 - DNA, 122 bp, Homo sapiens
tgcagagcaagtgcaggaggcgaatgggggaagaacatagtcttccctctagactcggaacgcgttattgacagacaggaaaagtgcccggtctgcgaaagttcagctggacctccgggaca

SEQ ID NO: 74435 - DNA, 122 bp, Homo sapiens
cctcgaggcctcagcattccctgtcccttgaggtctgtctgcaggcctggccacagcacacgtggccccgtcatggtcactggcccgagccgtagggccagttgaaggtactccccgacagc

SEQ ID NO: 74436 - DNA, 122 bp, Homo sapiens
accattgatggctgttgacagatgaggttaataaagcttgattacccccatggggttgctcgggagttaaattctatagtacctgtgaagtacttagtatagtgcttgaaagtactcaataa

SEQ ID NO: 74437 - DNA, 122 bp, Homo sapiens
cccggccactccttgtgcaagcgcaggcctccaaagggtttgggcttcttgcccaaccgccgcgcttatctccgagtctgcccccagtctgccctctcgcaggccgagaaaggaccagaaca

SEQ ID NO: 74438 - DNA, 122 bp, Homo sapiens
agttacttcagaggtccatactgctcttagaaaccctgggcaacataaagaattatttcccgcaatggacctagagcagtaaaaatcctatttgctgctagagttgtgaaaacatttgattt

SEQ ID NO: 74439 - DNA, 122 bp, Homo sapiens
ctaggagggttaaaggcagggtttctaaagttggaagacccagagtggaatcctgggccacgcactcgtgtgatctgccgcaagttgttgaacctaagggtgtaaaatggggattccacctc

SEQ ID NO: 74440 - DNA, 122 bp, Homo sapiens
gccggttctccatcctcggctgggctcaggcgccgccgggctccttttccgagggggctacgttgcctccgcccccagcagctccgccaccatcgccctccagctctacgccaccccgcacc

SEQ ID NO: 74441 - DNA, 122 bp, Homo sapiens
gagattaggaatcccaggtccaccggagatggcagggggtggcctggcccggtgcggggccgcttgcctgcacgcaaccaactaaggcggtggtgcgcaagtagtggtgacggcgggcgcgc

SEQ ID NO: 74442 - DNA, 122 bp, Homo sapiens
ccccacaaaggggcatgggcctccagcctttgcccacaagtgcctcagtgcccactgggtcggcccccatggccaggagggctcaggacaatcctctatttcctgaccttttcctcgtccac

SEQ ID NO: 74443 - DNA, 122 bp, Homo sapiens
gagggtagcccggggtggggctcgacccctatggggtgtgggtggctcagtagacgccatcgagcgggttctctgcctgcatggcagggagacctaccgtgtgttggagctcagccctgggg

SEQ ID NO: 74444 - DNA, 122 bp, Homo sapiens
ctggccgcgctgctggggatgctgcctttgctgggctggaactgcctgtgcgcctttgaccgctgctccagccttctgcccctctactccaagcgctacatcctcttctgcctggtgatctt

SEQ ID NO: 74445 - DNA, 122 bp, Homo sapiens
tgcgaatccacgacagttggtaacccggacccacattagaactcagaggtcaagcagaagcgaacgactggaattccagtcaggcccgccccctttccttacgcggattggtagctgcaggc

SEQ ID NO: 74446 - DNA, 122 bp, Homo sapiens
gcatttttctgcccaattacctgtgagaagatgtatctattgggaataaagaatggggggcggggggtattggaaaggctgatcaataaggctgggcttcatgtcaaacatgtcaatgtatg

SEQ ID NO: 74447 - DNA, 122 bp, Homo sapiens
gagggcgggccggggcgagggcggggcactaggcgaaacgacgccaatgggagggcgggccggggcgagggcggggaattaggcggtgcgaggccaatgggagggcgggccgggtcctctgg

SEQ ID NO: 74448 - DNA, 122 bp, Homo sapiens
gactgagtgcccgggagtgccagagccagtcccaaaaaggacccaggagcggggacaccacggggaggcgccgccactccagtgtgcgggaccctggcacccccggcgcgttctccggcctc

SEQ ID NO: 74449 - DNA, 122 bp, Homo sapiens
tacgggagcattctccctccttcctccaccagccttcgctgggtctggaggccacctggccgcgtgcgacggggatgtctgctaatttgtagaatctaactttgtccaacgtgaaatactca

SEQ ID NO: 74450 - DNA, 122 bp, Homo sapiens
atttctctacagtttttaggcattcgctgtgtgatctagaaaagctacagagtctcgctccgtcgccaggctggagtccaggggcgcgatctcggctcactgcaacctccacctcccgagtt

SEQ ID NO: 74451 - DNA, 122 bp, Homo sapiens
cccgcgggccctggagcctcccgcagcccgcctgggcctccggggcgcgaccccctaatccgctttagtcaatatcttatgagctccgcttgggcaaagtaaacaggcgccgaacaaagcgg

SEQ ID NO: 74452 - DNA, 122 bp, Homo sapiens
gcctatcctcaaccccatgaagaggctcagcaatgtcttcgaccacgtggtgagccgcctcgacaagttggagaaccagctggccctgctgcaggacctgccctccactgcccagctgctgg

SEQ ID NO: 74453 - DNA, 122 bp, Homo sapiens
agcccttgaaggggctgcccagccttgcagctccaactcttctggactccttgcccttggcgaatagttcttcctaagaataggacaggggcactcttctgtaggtacacacctggtcctta

SEQ ID NO: 74454 - DNA, 122 bp, Homo sapiens
gtttgcttgctgccaccctaaccgcagcgtccagaagaagccacttaaaggcaactgtaccgcacatacaggagatggcgagacgagactggctggagatgggaagttgtgtactactgatc

SEQ ID NO: 74455 - DNA, 122 bp, Homo sapiens
acggtaagggtgactgcagatcgaggggcaggccatgttgctggacaccaccctggctggcgtccctctcggcagggtgctctttgccccatggggtgggatccagagctgcagacaggccc

SEQ ID NO: 74456 - DNA, 122 bp, Homo sapiens
agtgctaatcattctgtttttgttttccttctaacacatgcattttttgagattggtttgcgtctcttaatcttcagagctacctgattttgcttattactaactcctttatcattacgagg

SEQ ID NO: 74457 - DNA, 122 bp, Homo sapiens
agcgctgaacactgtacatcctgcagccccaaccccgggtcctcacctccctccttccctcgccctcggtgcacggtgtgtgtttatgtctgcccccctcgctgaagcctgagcactgtgag

SEQ ID NO: 74458 - DNA, 122 bp, Homo sapiens
gccccgcagaagcagttggtctaggcagccccggggactcccaggggtacctggcctttccgcggcggcttaacaaagaggggcgcgacgcgagcgcttcccgccgacgcctcaagccatca

SEQ ID NO: 74459 - DNA, 122 bp, Homo sapiens
ttcctgcaagaatcaataagcagtcagtcacattaacaatgaaataggtccattaacatacgatgctattggtgaaactttatttaggaagggtgttagttcacttcattgctttatcaatg

SEQ ID NO: 74460 - DNA, 122 bp, Homo sapiens
gccccaggcgggcatgagcagggtgtccaggtgtcgggcggacagtcccagcccccgaggcgctctccacaacttcacttcagccacaggcaatctgtggccctggggaagggagtccagct

SEQ ID NO: 74461 - DNA, 122 bp, Homo sapiens
aagcaaaaaatgcatacatcaacagtacaaggaagtaaaaacctgagcatccagtttcagcgtatgagataagcagagcaggaacaccagtgacaggaaccgttggcgtaagttgaaatggc

SEQ ID NO: 74462 - DNA, 122 bp, Homo sapiens
cccctggccacggcccaggctcccaagccagctccctccgccgggcggggcctggagcctcgggtgagatccagctagctgtgtggcctccgtgcctgcctcctcatctgaaatgggggcat

SEQ ID NO: 74463 - DNA, 122 bp, Homo sapiens
gcaattactgacaataatcacactaaacttccacaaagaaactttcctgtgaattcttcccgagtaggtggtcatagtggattcctatagcatatattttcagtgccatttcttcttgccca

SEQ ID NO: 74464 - DNA, 122 bp, Homo sapiens
ccccccaccccgaacattagactgaggacacatacagctctgtggggaggcagcccaaggcggtggcattctcccttcctgcttgccgacaagcccccggcaagcagctgtgacaaagcaag

SEQ ID NO: 74465 - DNA, 122 bp, Homo sapiens
taaatgtcacatttcacccacgagccagcctggccagggggcaaggcaccgcgccacccacgcccagccaaactcatcaatgccagccgatactcatcaacgccagccgatactcatcaatg

SEQ ID NO: 74466 - DNA, 122 bp, Homo sapiens
gttttcccctgggacttcacctaggttgctatgattactcttgccccattgcccaggaggcgccaagccaacccctgatgagtgtagtctgcagagaagccagcaggatcaggacaaaccag

SEQ ID NO: 74467 - DNA, 122 bp, Homo sapiens
atgttatttattggtattgacttcttattagacagagctcatagtatttgttttctgctccgaacacttaaaaaatactaagacgtgatagtgaaaatagctttgaaaagaaactacatatg

SEQ ID NO: 74468 - DNA, 122 bp, Homo sapiens
ctgagccgtgtgtatatataatcatgcctcggtaaaaatcctgccctcggtggctgaggacggaaggagaacacaaaacaagtgcctacggcttgcttagttggaatggcaggattgggggt

SEQ ID NO: 74469 - DNA, 122 bp, Homo sapiens
gtcggcgaggaggctggagcagcgggtaggaagcgggccgaggctcccccgacgctgggccgcaactgtcatcgcagatccctgaaaaacgagctctgtaatcgttgccgtcagcgggtgta

SEQ ID NO: 74470 - DNA, 122 bp, Homo sapiens
tttcgagaagacagggatgcaacagggtcaagaaggtggaacgtaccaaaggacacagtgcgtaggcgcgctcgaaacctgggccggtattctcggcacccagacaccgtccactcgcactg

SEQ ID NO: 74471 - DNA, 122 bp, Homo sapiens
agggtgaggggagttggagggcacccagacctgggatccaagaggcctgcagccccacctcgcccttccccgctggcagcggggagggagtttccctttgagggcgatgagagcccaggtgg

SEQ ID NO: 74472 - DNA, 122 bp, Homo sapiens
gagctgaaaggaacagtgccagggaggaaggaagacaactcagaataaaactagagatggcgatgaaagaattgagtacactgaaaaagaaacagagtttgccacctcagaaggaggcatta

SEQ ID NO: 74473 - DNA, 122 bp, Homo sapiens
agaggaggctgatcgcatgggagctctgcagcagggatggcaatgccggggaggccgtcccgcctgaggccaggcccagctctttgcagccccatattaactacattggctgctggggagcc

SEQ ID NO: 74474 - DNA, 122 bp, Homo sapiens
gccagcagtcagtcagggcgggctttggttctgggagtcagtacttcttatgaccgtgctcgtctgacatctggcctcttgcttcgcaggaggcagaaaggccatgctcctgccctagaaag

SEQ ID NO: 74475 - DNA, 122 bp, Homo sapiens
ggttttttgagacagggtctggctctgtctcacccaggctggagttcagtggcgccatcacggctcactgcagcctcaacctccagggctcagttgatcctcccacttcagtctcctgagta

SEQ ID NO: 74476 - DNA, 122 bp, Homo sapiens
aggggcctcccgccagcgccccaggcccgggctccaggccccaagccccaggccccgccgcggccgccgctgcctgccccgaccagaacgcggccccgcccctgccccaccgccccgaggct

SEQ ID NO: 74477 - DNA, 122 bp, Homo sapiens
taccggctgggtggcccacaacttcgggtgttccgaaccaacttcttcattcagctggtgcggcccggtgtggcccagcccgaggacaccgtgcagttccggatccccatggagtgagtccg

SEQ ID NO: 74478 - DNA, 122 bp, Homo sapiens
gggcttggacctgcttctctcgcccacttatctgtgtatctctgagtagtgagacttccacgttagcgctgtggggaagaggctgggcttggctcagctgctgagggatcagccgaccccag

SEQ ID NO: 74479 - DNA, 122 bp, Homo sapiens
taacatcttacacgagcacagtgtgctggccacaataaggagccagcatggacccaggcacgccttgctctcctggactacacagatactgtgcttcttacaaatggaaggcttgtggccgt

SEQ ID NO: 74480 - DNA, 122 bp, Homo sapiens
ggcatccaaaatccccagccatgtaattaggcaaacaggcttcatggtggagtcgcttcccgcccctggaagcagctttgctggcatcaccactgcttcttcgtccaactctggacagttcc

SEQ ID NO: 74481 - DNA, 122 bp, Homo sapiens
gtgggtctcccactccctcctccaccgcctcaatttaaaactcaagagaaaaaccagcgccgtcccgtcgcccagcgcgaccaccgcctgccgccttgcagcctcgccctcgcggcgcagcc

SEQ ID NO: 74482 - DNA, 122 bp, Homo sapiens
agtgcagtggcgcgatcttggctcactgcaatctctggctcctgggctcgagcgatcctccgacctcagcctgccatgtagaagggactacaggtgggcatcaccatgcctagctaactctt

SEQ ID NO: 74483 - DNA, 122 bp, Homo sapiens
catattcaatctctttcaaaggaaacatggcagttgagtatccagaacacaagtgagtaccgtatactttaaaagaatgcttacagagctctcctcttcggccatgagaaaaaaaaacaagt

SEQ ID NO: 74484 - DNA, 122 bp, Homo sapiens
gatcgaaaggcagcgctgcaagggaccggcggtgaagccactcaccccctcggaagtagccgaggctttaggtccccgccccggccccgcccctaggtcagctgagcgctctccgggcgcag

SEQ ID NO: 74485 - DNA, 122 bp, Homo sapiens
tattagaggaaatcactattacatttctttcatgtaagaattataagatctggccatgcacggtggctcacacctgtaatcccagcactttgggatgctggggtggacagatcacttgaggt

SEQ ID NO: 74486 - DNA, 122 bp, Homo sapiens
cgtggagcgtgccccgtctcacctggtgtctctggctttagcattggacgagccagtgcccgatgaccgttatcacgccatctactttgcgatgctgctggctggcgtgggcttcctgctgc

SEQ ID NO: 74487 - DNA, 122 bp, Homo sapiens
atacccatctttcttctctggctttggggcagcattgggacatctttttccattcttcgtcgatatataactacactgcttgaagggtgcattcttgtcttcaaggatatgcttaatgcaaa

SEQ ID NO: 74488 - DNA, 122 bp, Homo sapiens
ctcccccgcctccgactcttcttcaagactgagatcagagggcacaaaaggatgggcacacgggcttaggcctctcatctctcccaccacccttaggcccaagaccaggtgcccccttgtca

SEQ ID NO: 74489 - DNA, 122 bp, Homo sapiens
gctttactacggggggtccctggcagctcctctgttgaaggacgcatggggcatctgtgccgctctcgtagggacgtttgcagggccttgtgtgactgtgttcacgtcggcccctctcacct

SEQ ID NO: 74490 - DNA, 122 bp, Homo sapiens
gttgcaggagcctcgggaggccgataaagcaggcagggcgagtctgccgggagcagcgggcgagggagctgctctctgattctgctgctgcccaaagcttccacttttctggggctgcaggt

SEQ ID NO: 74491 - DNA, 122 bp, Homo sapiens
ggaaatggcaggagaccactagtcacttgagctcttaagtctcgcatacttccacagcgccgttccgccgccatgtgccaccgctcctccggtccgagattatgtaacgaagcccggcgccc

SEQ ID NO: 74492 - DNA, 122 bp, Homo sapiens
agagggtgggagcagacccctcgggcagaggagaaggagacccgcacagacgccccgtcccgtccccagtgcggccgtcttcgccctctgtggaccttcttggccgtggattgactattcag

SEQ ID NO: 74493 - DNA, 122 bp, Homo sapiens
gggtggggacgggcggcgttcgggactgggaagctacttgactgccacgtgctcctgcctcgcaacagcggctctagattccgagttatggggacaactgctcgagaggccagggtagggta

SEQ ID NO: 74494 - DNA, 122 bp, Homo sapiens
gtactccacaaagctcagctttgtctagtgcctgtgaaggggctttggctcaggcaggggcgggtgtggaaaggtgccaccgtcttgcttgttgaagctgggttactggctgagccgtctct

SEQ ID NO: 74495 - DNA, 122 bp, Homo sapiens
tgcaacacagagaccccgtctctacaaaaaaaattaaaaattaactggcttgctggtgtgcgtgtagtcctagctacttgggaggctgaggtaggaagatcccttaagcccaagaggttgag

SEQ ID NO: 74496 - DNA, 122 bp, Homo sapiens
ctgagaaatgggtagggccaggaagtaaaggatggccaaatactccataagcagcaaatgcgtggctccaatgtgaacaatgatattatagactctgttctgagacctatgcattgacacct

SEQ ID NO: 74497 - DNA, 122 bp, Homo sapiens
cgctcggcaaacattctggtgttagagtctcccgacgtcagcacgccccagactgggaagcgccgccgtgcagctgtgcggggggctccggcgccgcagccctcctggtggagcaggaggcg

SEQ ID NO: 74498 - DNA, 122 bp, Homo sapiens
caggatgtcccaggcacggatggtggcgtcggtgctgcctgtgaaggccgtgtggccgggcgtgtctagcactaggcacagcactgcacccgtgtggccccgcagcgtctggtggcagcagc

SEQ ID NO: 74499 - DNA, 122 bp, Homo sapiens
agcaattaagccgaggctgtgacagcgacgtgggccgggtgctgtctggggtttccttcccgggccggttgtgtgtccaggcccccggggaatctgggataagacactgggggcgctgccgt

SEQ ID NO: 74500 - DNA, 122 bp, Homo sapiens
agggtggaaggcaccacgaaggcaaggagggggtgtgggaggcggggggtgtggggaatgcggcagcctggcccccccgcgaccagcccagccccccgccaaaccccctccacctccaacca

SEQ ID NO: 74501 - DNA, 122 bp, Homo sapiens
atatgaaattcaaatgaggagtccataaataaggttttcttggcacatggccaggcgatccggcaggcgttgtctgtggctgttctcgtgcttggatggctgtgctgagtacctggaacgga

SEQ ID NO: 74502 - DNA, 122 bp, Homo sapiens
ggcgcatttctttgccttgaaaattgagtacccaataaatgtgcgtcgagcagaactacacgagatggagaacaggggtttaggggtatgggggagagtcagcaattactggtgtcctccct

SEQ ID NO: 74503 - DNA, 122 bp, Homo sapiens
tcgatctcttgaacctcaatatctgcccgcctcggcctcccaaaatgctgggattacaggcgtgagccaccgccgccggcccctgcttgctttttaaatgtcaactccagggcccctttcct

SEQ ID NO: 74504 - DNA, 122 bp, Homo sapiens
tcccccgcaggcctccccgaatgtttccaaagatctggggcgggagcgggcggagactgccgccaggagcctcccggccgccccagggctgcgcagccactggagcccatcacccaactcca

SEQ ID NO: 74505 - DNA, 122 bp, Homo sapiens
gccctgggtgtggcagggagcctgaccagttccctccagcctgcgtcatggagccctgggcgtggctgcagggtttaaagagccgacccacgtgcccagcagcctcctcagatccgttctct

SEQ ID NO: 74506 - DNA, 122 bp, Homo sapiens
ttacattcacaagactcctacaactttgcctgtaagtatcaatcccatccttccattttccggctcagatttccctctcctattcatgtgaataggttatgaataaagtaccaggtaagtat

SEQ ID NO: 74507 - DNA, 122 bp, Homo sapiens
ggaggtggaggttgcagggagccgaaatcgctccactgcgctccagcctgagcgacaaagcgataccctgtctgaaagcaaaaagaaaaaaaaaagctaagtggacaaacgaggaaatgggt

SEQ ID NO: 74508 - DNA, 122 bp, Homo sapiens
ttgtttgtcaacctagtcctgctatgtcgtggggactgagcaggccgactcctcccccatcgcacgtccaggatgaagagcgctgtttaggtttgaaacctgcagactcagtcccaaccgaa

SEQ ID NO: 74509 - DNA, 122 bp, Homo sapiens
agaagctaagactggggagatgagaaccagggcccttggcgagagttggggtgggaatcgcgtaagaaaagcaatttctagagcggaaaggtgaccccacattacaaaaagaaatggagtag

SEQ ID NO: 74510 - DNA, 122 bp, Homo sapiens
ggcgtgggaaggtgtcacgtgacaaggctgcacagaacatgtgtgtggtactgagctgggcgtgggaaggcatcatgtgacaaggctgcacagaacacgtgtgtcgtgctgagctgggcgtg

SEQ ID NO: 74511 - DNA, 122 bp, Homo sapiens
aatctacttctctctattgtaggatacccacccacttcattattaaggttttgtgtcttacgtctgtaaatatgtatgattttcacctctgcccaagaaggcaagcctctctctttccaagt

SEQ ID NO: 74512 - DNA, 122 bp, Homo sapiens
tgggcggagccgggaggagccgcgaggatccgcagtggggagccgggaggaacctggcgccggcacccacccgccgcgcccacgcgtgccgcggtcgcttgtttcccgcgggagcccggccg

SEQ ID NO: 74513 - DNA, 122 bp, Homo sapiens
ctctcccactgccttgcctggccttggaggtgaggcccagcacagatgggctctagggggcggtgccagctttgggataatggtccatgtgaacagaactggggcagcccatcagctctggg

SEQ ID NO: 74514 - DNA, 122 bp, Homo sapiens
taacgcctgtctccttgtcttgccctctgtgctgtcgctgccgtgtgctgccgtgtctgtcgctgccctgcagtcctcgtcagtcgtggaggaaaaggtaaaacccaagaggtgtgtccact

SEQ ID NO: 74515 - DNA, 122 bp, Homo sapiens
gccgggcctgaagctggtggtggagacactcatctcctccctcaagcccatcggcaacatcgtgctcatctgctgtgccttcttcatcatctttggcatcctgggagtgcaggtgaggggtg

SEQ ID NO: 74516 - DNA, 122 bp, Homo sapiens
attttggacgagctggatgcggatatcgtctgtctccaggaaaccaaagtgaccagtgagcgctctggattccaggatccctacatactttttctttcccgctaacttttgtcccctgtccc

SEQ ID NO: 74517 - DNA, 122 bp, Homo sapiens
ccccggaggcgcgcatagctcattctctccacttgggcgtggagctcaattttgtacccacggaaccaagaagggcctgagcccggccagtgaggaatcggagtgggaccagtcgccaccgc

SEQ ID NO: 74518 - DNA, 122 bp, Homo sapiens
agcccctggggaatggcgcgagcagaagaagcaaggctgtcggggcctcgcagcatcccccgggcagctctgccgccagcccagactcaggcctggtctcagctcgctggctgagcctggtg

SEQ ID NO: 74519 - DNA, 122 bp, Homo sapiens
gggttctccacctcagtcaccgccgcccggggccgcttcggtgacgcccatgaccctccgcgcccctgccgcggcccctaggggcccacccagctccgtacctaggaggggccgggcgacgg

SEQ ID NO: 74520 - DNA, 122 bp, Homo sapiens
gactccgggtctgaggtttggagggacttttaccctgtattcctattccccttccttcttcgttttgcctcctgttagtgccgattccataattttcctaccggtgtaccttttggatgact

SEQ ID NO: 74521 - DNA, 122 bp, Homo sapiens
ttcgtctgcgtggaactccctccagggcagggcctggcactgtgtagtgaatgtcggcctcgtggtggacccgaaggaaccctacagtcagccccagagccgcgggagatccacgctgcggc

SEQ ID NO: 74522 - DNA, 122 bp, Homo sapiens
agggcgctttctcacacacattgtcaggaggtggtgctggctggggcctgctggaagcagcgagcctcaaaccataagtccccagcccccgagagccccctgacttctgccctggttctcag

SEQ ID NO: 74523 - DNA, 122 bp, Homo sapiens
acaaaaacacgcagagtgtggactggaggctgggttctccctgtcacaagactgtcccatcggaagccccacaggaaggggaactgccctccccaagagcctggctctcatttccccaggga

SEQ ID NO: 74524 - DNA, 122 bp, Homo sapiens
gcccccacctgcccagatgtgagcaccaaccccgagccctgcagcctgaacccgcaccgccgctcctgggccgagaagcagtgcagcatcctcaaaagcagcgtgttcagcatctgccacag

SEQ ID NO: 74525 - DNA, 122 bp, Homo sapiens
cacctccaagctgtcaggctcctccacagcggtactggtactatcattaggctccatggccgacaggtctctaaagaagaacgaaggaaggaaggcccgctgttgcccagaccagagtgtac

SEQ ID NO: 74526 - DNA, 122 bp, Homo sapiens
cgccagagcatgcggggcgcggcgcgggcggcctgggggcgcgcggggcagccgtggccgcgaccccccgccccgggcccgcccccgccgccgctcccgctgctgctcctgctcctggccgg

SEQ ID NO: 74527 - DNA, 122 bp, Homo sapiens
accgacctcaccctccgtgcgttggagcggaaagaagggactcgaccctgtgcttcggggcggggctccgcgaccgtcccccgccaatcccgccccagcgcctcaaggccccgccccgcgca

SEQ ID NO: 74528 - DNA, 122 bp, Homo sapiens
acgtccatgaaagctaaacatggtctatcccatgaaccagcaattccactcccaggcacgcgtgtacccaacagagtgcacatctgtcattaaaagacacaactagagggctgggcgcggtg

SEQ ID NO: 74529 - DNA, 122 bp, Homo sapiens
catttctcgaagccctgagcgcaggagcccggccgagtagcctgatgttcacagtatccacggacagactgcaaaagaagccccacagtgaaaagaatcctggcaactaattacgtgaacaa

SEQ ID NO: 74530 - DNA, 122 bp, Homo sapiens
cccgcctcttccctcggagactgggaaagttacggagggggcggcgccgcgggcggagcgcgcccggcctctgggtcctcagagcttcccgggtccgcgaacccccgaccgcccccgaaagc

SEQ ID NO: 74531 - DNA, 122 bp, Homo sapiens
atggcagtgcactccacgaaggggtggagaggtgccggggcctcggtgcgggcgagagggcgcagtgcagtccaagcggctgcagagggctctagcgcagcaaagctggttggacccaagct

SEQ ID NO: 74532 - DNA, 122 bp, Homo sapiens
ggaatcctggcccccgatggtctacggcagcccccagccggctcctgggatggcttgcagcgcccgcaggcttctccagcctccagaactgcaggagctgcggtccaagccagctcctgggc

SEQ ID NO: 74533 - DNA, 122 bp, Homo sapiens
tttctcacccctagaaccgtgcgcggaggagcgtggcccgtgtgcccattatgctgttgacgaacgccacacgctcacctttgtcctcgcacgttctgtctccgctgcctcacctgagaagt

SEQ ID NO: 74534 - DNA, 122 bp, Homo sapiens
gggctccgctagccggactggttccccatctaactgatctaatcaatgactccgaagagccggggctcctggccccgcccccgccatcctcttctccgcctcccattggacgcgggccgaga

SEQ ID NO: 74535 - DNA, 122 bp, Homo sapiens
agagggacaactgggatggatgaagccctttagtctaccattctggtgaggagaccctgacgtttgtccacaggaccagtcaacacccagacagataactagatcctggaaccccagagtct

SEQ ID NO: 74536 - DNA, 122 bp, Homo sapiens
tttacaccgaaagcgagtgagttctgtagggtagtagcgcgcgcgcgcgcagcctgagtccggaaaccgaagggcaaagaccagctggcacctgagtaccgtatggaagagggcgttgcagc

SEQ ID NO: 74537 - DNA, 122 bp, Homo sapiens
aagtctactttgaatatctgctgcctcccctttttccacaaaatatactgtgatatagtccggactaaaaatttccctcttctgaaatccagcaattctccgatctttacatccgaacaccc

SEQ ID NO: 74538 - DNA, 122 bp, Homo sapiens
gctggtcatagtggcagtgagcgtattcctcctggtgctggccacagtgccccttctgggcgccgcctgctgccatctgctggctaaacacccgggcaagccctaccgtctgatcctgcggc

SEQ ID NO: 74539 - DNA, 122 bp, Homo sapiens
tatttccctgggaagacttagctgctaacatggtttataggcattcagcaccaactcaagcgcccgtttttcaaacatgcacaattacccattttctacaaacagacatcagtgcatacaga

SEQ ID NO: 74540 - DNA, 122 bp, Homo sapiens
tattgggcacttaactgcatgatgggtaccgtcttgtttctgtgtttacttgcataatttcggacagtcttcagaaaaaacatgtaaattatcccatttacaaagattaaagaatttgccca

SEQ ID NO: 74541 - DNA, 122 bp, Homo sapiens
tcccagcgctttccttaggctgtccgtctactggttccagattcgttccatccgtttaaccgcccgatcccgcattccccattggagtcaaaccgctgcctcctggagaagcccaacctacc

SEQ ID NO: 74542 - DNA, 122 bp, Homo sapiens
cgagattggaaggcacacggagagagtacttgggatgcttatactcccctggctgtcttccgaaagcagtcatgggttctacctgctggcacttggtatagctcttaccaagttcaggagat

SEQ ID NO: 74543 - DNA, 122 bp, Homo sapiens
gctgcattcccactgctaagcacagtgcctggcatacagaagatgcccaataaatgtttgcgtgaatgaacaatacaaagatcattttttgagtgcttattatgtgctacacatgggctttg

SEQ ID NO: 74544 - DNA, 122 bp, Homo sapiens
tcctctgaaatccatggtgtgtcatcagtacatgtcttcacccggattgactaacatgttcgttcctaacttacctctgctataatcgggtaggctccgtgggcacagtaactattttgtta

SEQ ID NO: 74545 - DNA, 122 bp, Homo sapiens
cacagctccagcctgtcccgtactgggctgcacacaggaccctttgtctagcccctggcccgggcctgcgcccagcaggacggctcaccttggaggtatccaccagcagccgcagggtctcc

SEQ ID NO: 74546 - DNA, 122 bp, Homo sapiens
tctgactctaacacctgttttagataatatgaaaaaattacaaatggtcaagagggtcagcgtatgccaagatataaaaattggatgagaaattgtatttcaatcttcatcaaagattactt

SEQ ID NO: 74547 - DNA, 122 bp, Homo sapiens
gattctaaagggattttcttgcccttgttcctccagccctacacttgcattactggcctacgtggatgctcaccagctggctgtgtccatcattgcagccaagtctgagaattcctgattat

SEQ ID NO: 74548 - DNA, 122 bp, Homo sapiens
agcaggtatcagtctcattttacccagcccttattcaagatagaggtgctgcgattcaaacgcctctgacagaacaatgggccatgggttggtgaagccacagcttgggcccagatctactt

SEQ ID NO: 74549 - DNA, 122 bp, Homo sapiens
aggggcagcccccgcgccctgcgagctgtaggctgctgggccctggaaggcgagtggcagcgcctgttctccagtaccaggacccaaagagcttgcctcatatggtacacgagggatggcag

SEQ ID NO: 74550 - DNA, 122 bp, Homo sapiens
tgcctcttgcttgccttccccttttgtgcttcggacacacgcggactccagcaggcgccacggaaatgggcaagcccctgcagtgtacccctgtcataactgtgagcagctgcagctccgga

SEQ ID NO: 74551 - DNA, 122 bp, Homo sapiens
agtttccaaaggaaggcaggtgagtttgcactgacttccattttctccctggcttccttccggtgtcagatgagagtccccgcgctcctcccggacagccctcagggtcctcggctatcata

SEQ ID NO: 74552 - DNA, 122 bp, Homo sapiens
cattccgggaagggggtggaaatgattcactgggggaactgtgactgtcccttcctcgggcggggatgcgcctgcgaggtcccagcggccttccctgggcggctgcgccctccctcgcgccc

SEQ ID NO: 74553 - DNA, 122 bp, Homo sapiens
gggtgcgcaggccagtgggcaggcccatgggcagccgggttagctgattccctgccaggtcgaggctgcgcagggcacgcaaccggcggaaggcccggtggtgcacacgggcgctggccagg

SEQ ID NO: 74554 - DNA, 122 bp, Homo sapiens
cccgcagcccggtggctcagacctgcgaaggaaccaaggcaagagggagaaaagccctgccgcctgatcccacgccgccactcacagacccttcgttgaccggcagcattgaacaggaaaaa

SEQ ID NO: 74555 - DNA, 122 bp, Homo sapiens
tgaagggtctgtgaaggaggggccaggcttggggtcctggtggggggcatagcagagaagcgccctgtggcctgtagttcccacactgattcagtcgctggaactggctcattgccttcagt

SEQ ID NO: 74556 - DNA, 122 bp, Homo sapiens
gcgccactcccgcggagcctgcgggatcggggcttcccgggagcagcgcgatcagcaccacgactcggggacacagccagggcccggtttctacaggaagcgcctcatttggagcctttttg

SEQ ID NO: 74557 - DNA, 122 bp, Homo sapiens
cagtttaataacaaagcagacctgtcatttcttcctatagctagtcacaatatagaagttcggactgtcaaaatatatttaaaatctaatttaaaaaattcaacatggtcacagaaaatctg

SEQ ID NO: 74558 - DNA, 122 bp, Homo sapiens
cggcctccttctgtcggtgaaggccgcagcggcctgggaaacccatgcggacacctgcggcgcccggtcaaagacctggaagaaagctttttaaaaaataaaaatggcccaacccattacat

SEQ ID NO: 74559 - DNA, 122 bp, Homo sapiens
acgcaattggagttgctgaggcgacgcaacaagtgtgcctcccccctccatggagatccccgccccatcagagaatgttgcatgatggtccacttagtggctaagggaggcccttttccaac

SEQ ID NO: 74560 - DNA, 122 bp, Homo sapiens
aagtcggagtttctctcgtgcacgtttgcactttgcaggctccagccggtcacttgcacacgccgatgccctggggatgccggttgtagtgacctggtccctgtgactaaggggccttgggg

SEQ ID NO: 74561 - DNA, 122 bp, Homo sapiens
cctccgcggccctgcgctcggttgtgagcggccggcctgggtgagtgcccgcggaggtgtcgccgcggtgcggaggcgcgggcacctgcctggtgcgctctggcccgggcggagcgcagccc

SEQ ID NO: 74562 - DNA, 122 bp, Homo sapiens
ctgtttaatactgaagagctgttgagcactggaaagtgctgtgtaaccctggaaaagaaccgtgtaacgctgcagaagtgtgtggtagctatgccggaggtgtcatctaaaggtgctaccat

SEQ ID NO: 74563 - DNA, 122 bp, Homo sapiens
gccctgtcttgtgctgtgggctgcactctcttcctggggtataattttaacaaagtgtgtcgaccttctcctttgcggttggcacttgtgcgtctgtgtaagaaatacttgtccaccgtgaa

SEQ ID NO: 74564 - DNA, 122 bp, Homo sapiens
cgaatgggccgccgccgcccgccttcttgttggccgcacccccgccccgcgcccgccccgcgcccggcccggcccggcgagaaagccttaattggtaaaattgcccaggagcccgggacggg

SEQ ID NO: 74565 - DNA, 122 bp, Homo sapiens
cagcaccgaggaataccctcctctctagaatgtgaggccactgtgtggaggaagacaccacggtgctctactgagccatgaaagtcacgcctgacctaaacagaagactacgtcccctggct

SEQ ID NO: 74566 - DNA, 122 bp, Homo sapiens
cggcctgagaccagcctagcacatgtgtccgctggggccactctcatcttccactctgtgcgattgatggcatgtgagtgaaggcgaggacagaaggaccacggcccacgacgacgcagaca

SEQ ID NO: 74567 - DNA, 122 bp, Homo sapiens
tgcctcaagtgtgcaggaacaagctgtaatggcaaagtagcatgggctcttcagaactaacgaggttaggctgggcgaggtggctcacacctgtaatcccagtattttgggaggccgaggcg

SEQ ID NO: 74568 - DNA, 122 bp, Homo sapiens
gtaagtccatcgggacaaatcagggggcattcccactgaggcaggacttgagatgaatctcggaagcagaaatgctgagcttgttgggctggccagagataagaaggacattgtgggcggga

SEQ ID NO: 74569 - DNA, 122 bp, Homo sapiens
acagcctaccctccgcccaggggaagcggctgcctccgccaggccgcttccaggaagccccgggccaggccccagcattgttcaggccctggggccagcaccccagccagccgaacaccatg

SEQ ID NO: 74570 - DNA, 122 bp, Homo sapiens
tcggagggactattcgtatgaaagagtgggtcctacctcttgccggggtcggggccgaggcgagtattttgccagagggaggggttttcgggggacctatgggggacgagggcggggagccc

SEQ ID NO: 74571 - DNA, 122 bp, Homo sapiens
ggaaccctccagagaacacagtttctgggatgtcatcagtaatattgaaacacacattcacgtcaactgtactgtaggggaaaagggatatttttccttcccattatggctgaggcccttac

SEQ ID NO: 74572 - DNA, 122 bp, Homo sapiens
atgacaggccggcccagactatggtgattttaaacaatttctgtatatcctaggaagcaccgactggctctcggctgggcgtgcacctcacctggtctccttggaactgctgcggcagccgc

SEQ ID NO: 74573 - DNA, 122 bp, Homo sapiens
ctcgcgtggactctttgggtccggggggaaagaggcgatccgcaaggcgcacccccttctcgtcccgtcccaaaccccacattgaggacccggcgacccgaaagccccgccagagccagcct

SEQ ID NO: 74574 - DNA, 122 bp, Homo sapiens
taaagagcatactaaaatagacagtagatgcttgtgttttccttgaaaagctagtctgtccggaaaggtgagacatatcaaagttgggactttcaggtcataggtggattcaaactttttct

SEQ ID NO: 74575 - DNA, 122 bp, Homo sapiens
ttatttcagcaggagggcaggggtgttcccgatgaagccaggagatccagggaggagaagcgactcccggggccacccatgcttagatctcagagccaggcaagagccaggtcccgggggtc

SEQ ID NO: 74576 - DNA, 122 bp, Homo sapiens
tggtggaggtctggatgatctgcacgcgcgaggatccgcggccgcttctgccgctccctccgtagctcccgccaccgccgccgcagccgctgccataaccgcctccactcctgcctcgtgcc

SEQ ID NO: 74577 - DNA, 122 bp, Homo sapiens
cattcctaataaaggagtccaggctccagcttgaagagtcaggatctctattgtgggcttcgttcttgccaggatttgaagagaaaccctttactaatccacactttgcaacacaatccacc

SEQ ID NO: 74578 - DNA, 122 bp, Homo sapiens
ctaagtggcgaggaggctactgagaaggagggagaggggatagcagccgcgggctccagacgccctctgcccccgcccgacggggagcccatgcagagccggatcccaggcgggcgctcccg

SEQ ID NO: 74579 - DNA, 122 bp, Homo sapiens
ccccccacccgcttctttctatcttaagcctttctccaaccctgttccttcttttccctgcggccgctcggcttgccccccgggggcgccgtcctcttcgtgtccccggacgtagcgctccc

SEQ ID NO: 74580 - DNA, 122 bp, Homo sapiens
ccgcagaccccaacgtttgaccaagtgagtcccagccgtggcccggcgtccgggggcacacggcttaccatctcaggcagctctctggatgctggcagcagggtcacagtgactgtgaggga

SEQ ID NO: 74581 - DNA, 122 bp, Homo sapiens
ccccaatgctactgagcctgggcacgcgcctcccgggagagtcaccctgggcgacagccccgcccacctggctttgatcaatccggacgcggcacctgctgtaccacagccaatcggagcca

SEQ ID NO: 74582 - DNA, 122 bp, Homo sapiens
attcattcagattttcattggagagctgtcatcctgctactgacctcattcaacccagttcggagtgagagatcagcggattaccgcgctaggtaccgtagctgtacgccatattgtgtttt

SEQ ID NO: 74583 - DNA, 122 bp, Homo sapiens
ctggagacttggcctcagctggtgattttgccttttcctttgctggggacttggccttctcggggaacttgacctcggctggggattttgcttcctctttctctggggacttggcctcagct

SEQ ID NO: 74584 - DNA, 122 bp, Homo sapiens
ggacttgggcttcaaaggcgacccctactctttttgcccagtctgggggcggagggcgctcgaagggatacttcaaggacaccacatccaacttgtcgcagccccacgttcaggcacaggag

SEQ ID NO: 74585 - DNA, 122 bp, Homo sapiens
agggaccgagcgggtgcgggcggggcgggcggggcgggcggggcgggggtgtcgggggctcggactcggagccgtccctgccagtggctttcgtgggcggccccgccttggagcccaggcca

SEQ ID NO: 74586 - DNA, 122 bp, Homo sapiens
ctcaggcccggagaccagggatggcgcccacagtgggaacctgggctgaccggctgcccccggggcccacgcctgcagtcgccccactgaagcccagacagacccccacacggcctcgcctc

SEQ ID NO: 74587 - DNA, 122 bp, Homo sapiens
accccagcatccatcagctgctgggcagatgcacaggacacgcatacgatgaaacctgttcggccatggaaaggagggaggctctgactcacgccacagcacagacaagcctcaggacatgc

SEQ ID NO: 74588 - DNA, 122 bp, Homo sapiens
cacacttccagtccccctcagctcaactccactccccaccggctcctgcagatcccgctgcggcaagcccaccacccagctagggagggccgtaccatgatgttgcccatggggccgctctc

SEQ ID NO: 74589 - DNA, 122 bp, Homo sapiens
acgagcacgtgtggtcacagatgctgcagaagcttcgggaggacgagccgcatctggagacgcctcgggcagagctggacagcctgggtcacacagactgggtaaggctcactcccacctga

SEQ ID NO: 74590 - DNA, 122 bp, Homo sapiens
ggctttcccagggttctcggggccggggcagtcgtagggggcggctggggctccacaggacgttcgtgacccaccttgcgccccccagggagtggcaggaccctcccgtccccagcctccgc

SEQ ID NO: 74591 - DNA, 122 bp, Homo sapiens
cgcttcgtggtccccaggtaggaccgaagccgcttctccgctcttggctgtttggaaggccgcaggcggagctcacgggcctgtgagctcccggctggtggcagagtgccggagctggatcc

SEQ ID NO: 74592 - DNA, 122 bp, Homo sapiens
tcccagtctccccatcagccccagggtgcttgttgagtgatttcgcacggcgcacgatggcgtaacggtcagcaggaatgagtgtcacaaaggagggatggaagggaatagcgtaggaaagg

SEQ ID NO: 74593 - DNA, 122 bp, Homo sapiens
aggctggatggtgacacttccacacccttgagtgggactgccttgtgctgctctgggattcgcacccagcttggactacccgctccacgggccccaggaaaagctcgtacagataaggtcag

SEQ ID NO: 74594 - DNA, 122 bp, Homo sapiens
tgagaggctgggtagactgttttgtcccctacaggctgatcaccagttcctcttaggaaccggtgaacctcagggggcccattgcacatccaggtgtgaaactgcggtgtggcctccaggtg

SEQ ID NO: 74595 - DNA, 122 bp, Homo sapiens
aaagtaattctcccattaccagccccaccccaaccctgcccagagaaaaagaagtgacttcgagtctatgggtcttggagggaccaccaacccaagagctagagcagaagaaggacttggat

SEQ ID NO: 74596 - DNA, 122 bp, Homo sapiens
tatcactggtagttcctggaggacagggctccttgtgccctgctgtgttcctggtcttgacgtagtgcctggtatggaacagatactcagtcctcatttgctgaatgcacacacagcatcca

SEQ ID NO: 74597 - DNA, 122 bp, Homo sapiens
ggtgggataaggcctgagagtctgcatttctaacaagctcccaggtgctgttaatgctgccggtcggtccatggatcacactggagtgacagggctagagtacaagctgaaggttaagtttt

SEQ ID NO: 74598 - DNA, 122 bp, Homo sapiens
cggcgccagacgccgagtggggccagggacaggggaggaggacccaggaccctgtgcccgcgcccctggagccgctggagttcggacttctgcaactgttggcactttgggggcttggctta

SEQ ID NO: 74599 - DNA, 122 bp, Homo sapiens
gcgtacacccgccgggccagggacttcttggtcagcaggacggccaccacaccctccgagcggcagtacccattccctgggtagagcagcacctcaggcccggggctcagccccacgccggc

SEQ ID NO: 74600 - DNA, 122 bp, Homo sapiens
gagtcacttaatgacaataacccagtttgtgtggagtcacaaatggtgttcacatcataacgtcaccagactctccagccacacccattgtacacgcattatctcattcaatcctcatgaca

SEQ ID NO: 74601 - DNA, 122 bp, Homo sapiens
aaccggtccctagaagggggcggttctttccggaaattatgactgcagctgttttcactccgctgtgactcagagcgctccgggctgcaggagaggaaggtaggggaccaagctaccggtgc

SEQ ID NO: 74602 - DNA, 122 bp, Homo sapiens
ggatggtgggaattcgggaaaataaccagttaaaccagctactcaaggctgctcaccatacggctctaacagattaggggctaaaacgattactgactttccttgagtagtttttatctgaa

SEQ ID NO: 74603 - DNA, 122 bp, Homo sapiens
aatatattttaaaaaagagagtttggttggtgccagatgtagcttcactctcaaccctgccgtctgctgggggtgagatctcaagggagctatgtggcttttttgaacctcagtttcctcat

SEQ ID NO: 74604 - DNA, 122 bp, Homo sapiens
cttccttactggccatgctgggaaacacaggtcatggcttgggaatgtggccccgggttgcggggtgaggtgataggaagagggagaaggacatgtgacccctgctcaacagcccccttctc

SEQ ID NO: 74605 - DNA, 122 bp, Homo sapiens
ggcagcccaggcaacgacgtgatgacgcaggctctgctgatttgatagtcgggccgaggccgtggaccaattagagtccggccccgctccagcccccaccaacactgccccctcgccccagg

SEQ ID NO: 74606 - DNA, 122 bp, Homo sapiens
agcttttaaactcccactgcccaggtcacactccatagattaaaatatctggacatgggacgagtcatcagtatttttctaaagctctcccagtgcttccaatgagcagcaaagtttgagaa

SEQ ID NO: 74607 - DNA, 122 bp, Homo sapiens
ggctaagaaagaagagttgtcattcatctagtctgtgctgaacgtgggcgtgttggctgtcggagtcagtcaccgtgagagagctggcagggacgctagcacggggcattcagatcttcacg

SEQ ID NO: 74608 - DNA, 122 bp, Homo sapiens
gagtttgcagcgggggaggggcctggcctacatgagaccacccagggagaggggacccatcgggaggagcataggactggatcctgggaactggacattgtgattttgtaacggctccattg

SEQ ID NO: 74609 - DNA, 122 bp, Homo sapiens
ggcggggccttcagcgggcgggcggggttttggcgccgcgaggtggcggcagcagagcggcgcagaagggagggggcggctggccgcgcggaaggagtgagtcacctgaccgctgccctcgc

SEQ ID NO: 74610 - DNA, 122 bp, Homo sapiens
tgtgtgtgtgtgtgtgtgtgtgtgtgtgtgtgtgataagagagatggagggagcgagaagcgcacttgggcacctgtgtgcatctgcgctgatggtggtgtgcccatccgagtgcctgagct

SEQ ID NO: 74611 - DNA, 122 bp, Homo sapiens
tagaaaataaaaactaaactgccacatttcaaaagttctccaaaggtgagtccccaaatgcgactccaaatcacattgattcaacattccatcttttgtgtttcagggataataccaatata

SEQ ID NO: 74612 - DNA, 122 bp, Homo sapiens
ggctcgtctaacaaactggagcctgagattctgagaaaacgaaaccaaacagttgtactccggggttaacacagagcaacttccacctgctgtgcgagttggtgatcctctctcttgccgtt

SEQ ID NO: 74613 - DNA, 122 bp, Homo sapiens
cccggaggcgctcacaagcgggtctggggagatgcccaacaggttcccctccttggcagccgctccaaaatgcaaaaaagatccctcctccccctgggagagcgggcagccgcgacaaaatg

SEQ ID NO: 74614 - DNA, 122 bp, Homo sapiens
caggattcgccaaggagaggagcagaggttcacctgctacatggaacacagcgggaatcacggcactcaccctgtgccctctggtgagcctggggtgaccctggagagggtcaggccagggt

SEQ ID NO: 74615 - DNA, 122 bp, Homo sapiens
ttagaaagtctaccttctggtcttataaacaaaagtggcattggtttcctttgtaactaacgcaggggttcatttggaatccacccatcatgatggagtttggcttcccatcttccttttgg

SEQ ID NO: 74616 - DNA, 122 bp, Homo sapiens
gttccagctccaggcccataagagtctaaagttgtcttcagtggttaacttttccctggtcgagagagggagcagaccccttttatccttctaaatctatatcctgcatttaggcagtggag

SEQ ID NO: 74617 - DNA, 122 bp, Homo sapiens
gccttaggactagaacccgggccaggcgggagtgaccagccgggacactcagggcctccgcgcgttccagctgggtgaccttgaccctccaacttcagccccctgcgcccggctgctctccc

SEQ ID NO: 74618 - DNA, 122 bp, Homo sapiens
attacggtcccccttgcagtaaagtaactgggcaggaaggcgacaaaggtactgcggctccgaaccacagtgggtaacaagggaaacctgctcagacctgtgtgtgcatcgccaatgtcgga

SEQ ID NO: 74619 - DNA, 122 bp, Homo sapiens
gcagatcacgcgcatggagtatgtgcacaccaagagcctaatctaccgggacgtgaagcccgagaacttcctggtgggccgcccggggaccaagcggcagcatgccatccacatcatcgact

SEQ ID NO: 74620 - DNA, 122 bp, Homo sapiens
tcaattaggaccggtcccgggcaccaggcccgccgacttgtcacttcctggacctccaaacgccccttgtgacaggccttgttcctcaggaacaagcaaaggtagaaaaccgaacgcctccc

SEQ ID NO: 74621 - DNA, 122 bp, Homo sapiens
ctgagggctggggtcgtccagtcaggttccaggtgaaagtgtgcagaatcacctgccgcccgcccagctcctgactctgaagtgctgagagtgaacacagcttcagaacagatgaaaggcac

SEQ ID NO: 74622 - DNA, 122 bp, Homo sapiens
ccagggagtgtgacaggcaagcacaaatatgcaaaagagatggcaccaacatagcaggcacgcagggccggcgctcgcaggggtcggggatctggagccaggcccccgccgccgtggctgcg

SEQ ID NO: 74623 - DNA, 122 bp, Homo sapiens
cccaatgcctggaacaggacaggcacagagttggagctcagcaaacgcctgactgagtgacgacgtgcagaaacatatcagacaggcattgtgaagggtagggttttttaaatacagacgct

SEQ ID NO: 74624 - DNA, 122 bp, Homo sapiens
tgctgcaggcagctgggcaagcgcaccaggcacgggggcaggggcggcttcggaatgaggcggctccacatctcgccgcagcagggccaggcaggacccagggtctgaacctcctccactgt

SEQ ID NO: 74625 - DNA, 122 bp, Homo sapiens
tggccaccgtgtcccttgctgcggctgcatcttccagtctctcctccgtcttcctgtggccgctctctttataagaaccctggtcattgaatttaaggcccaccccaagtccagaatgacct

SEQ ID NO: 74626 - DNA, 122 bp, Homo sapiens
ccatcaccccctggctcactcggggctgaaggccttggacatgcctgttataaaccctgtcgggggccaggtgtggtggcgggcgcctgtagtcccagctactccggaggctgaggcaggag

SEQ ID NO: 74627 - DNA, 122 bp, Homo sapiens
tcccggtctcgtgtcaggctctgagttcatccagcttcccaaaatccatgttgatatgaacgttttctcccacaactgattgactggacttttgtctcagggcagagggaggcctccagacc

SEQ ID NO: 74628 - DNA, 122 bp, Homo sapiens
ttgtatgtagtaagaaaacctaccctgccccagagagctttcccgaaagataatggattccgacattcacctcaagaaccggcagacagagcagcaaaggatctgtcgctggccaagcaggt

SEQ ID NO: 74629 - DNA, 122 bp, Homo sapiens
gtttgtttttgagacaagatctggccctgtcacctatgctggagtgcagtggtgtgatctcggctcccggcaacctcaacctcccacctcagcctcctgaattagtgtctacaggcatgcac

SEQ ID NO: 74630 - DNA, 122 bp, Homo sapiens
tttccagcccggggccatataacaatgctagacccatgctactcttggcagctggggaaacgctttgggtggggctggcccacctgccctgtaagtacagcctgggcccacagggaacaaag

SEQ ID NO: 74631 - DNA, 122 bp, Homo sapiens
aagttacagaacggagattggaacttgggtctgtctggctttggaaggctgaagacaaaccgcagtaaagaactttgcacccccaacaccggcgcttactatgggctcatggcaggccggcc

SEQ ID NO: 74632 - DNA, 122 bp, Homo sapiens
tcattatgagggttttttcttcgtgctctccctgattactaacgcacaagacacaggctccgtctaacgtggctggtgcttccccagggggtgccctgggctggcttcgtgcgtgaggggag

SEQ ID NO: 74633 - DNA, 122 bp, Homo sapiens
tcagaggcagggagctggcccggcgttactgactgtcctgcctgcaagtgggtgggcgcccggcttgctgcttcgaggccccaggagtgcttgggagaagggagtcatttccctgttgacag

SEQ ID NO: 74634 - DNA, 122 bp, Homo sapiens
cggggctcagcagcatcccgaaggcggatggggcggggccgaggaggtccgggtgaggagcggcaccctgaacttcccgtcttgtcgctgcaggccccgcagacagacccaagctctgggac

SEQ ID NO: 74635 - DNA, 122 bp, Homo sapiens
cctacagtagaacttttctgtgtcctcttgggttctgagttctttttccaggctgttctccgtgcctatcacctgttaaaggatatggctctgagatctttctattacaaatgctttgcatt

SEQ ID NO: 74636 - DNA, 122 bp, Homo sapiens
agcggttgcagtgagccgagatcgtgcccctgcactctagcctgggcaagagtgaaactccgtttcaaaaataaaaataaactgtcaagtgctctgcagttgttggttgtctagtcatttgc

SEQ ID NO: 74637 - DNA, 122 bp, Homo sapiens
tctcgcgcggccagcaggggccagcatcccccgcggaaagggtcgctgggctgggctggccgagagccggggatcggcgaccccgggcgccgctgccaagccccctgccgtgcgggctgctg

SEQ ID NO: 74638 - DNA, 122 bp, Homo sapiens
acctcgtgatctgcccatctcagcctctcaaagtgctgggattacaggcgtgagccaccgcgcccggcctactctgaatatttatgcaacttttagatgggtctataaatgtgtcttcagaa

SEQ ID NO: 74639 - DNA, 122 bp, Homo sapiens
tattttatttctctaaatttgacctctttccataaattttctttgccccacttccaaatgcggcgagaattcatgcttctcattgaattcacagatatctttagaatgttttattgcttagt

SEQ ID NO: 74640 - DNA, 122 bp, Homo sapiens
agcttgtgggagcgcctcgaggcctggacacgtcctccctctgcaggccgccctgcggcccgaccccaagacccagaccttgccgtgcaaggccaagctgaccgacaagcctctgcagggca

SEQ ID NO: 74641 - DNA, 122 bp, Homo sapiens
gtagtgggtgcctgcggggaaggcgaggggaggcggcgctgggcggggcgttcggggacccgcctgcgagcccagccctggccctgttccatctggccggggctctggccgcgacacttcca

SEQ ID NO: 74642 - DNA, 122 bp, Homo sapiens
ctcaagggagtccactctgacttctgacagcagacagaacctatctgtcctcaggaggggcgcatggctcctacgctctcctctgagcctaggccagtgctcaaggaggatcagcaccctga

SEQ ID NO: 74643 - DNA, 122 bp, Homo sapiens
ttccacagttcgaagatgcctattccccctcacattttaatacctctgaagctagaaaatcgctcacgattaacacgtgccgttaacggagtcttcccgcctctcgcttcccttcccctccc

SEQ ID NO: 74644 - DNA, 122 bp, Homo sapiens
cgccggccggcctcaggagcggcagaaggccccgagcccgccgcgcggtgggctgccgggcgcaccttgcgcttgcgggcctcagccgtgccgctccacacgaagcactggtagatggcccg

SEQ ID NO: 74645 - DNA, 122 bp, Homo sapiens
cggatgcaacggagcgtgggtgcatgccagcctgtgtgagtgtgcttgcctgtgtgcctccgtgtcagacgtgctggagcgtgggtgcatgccggcctgtgcgagtgtgcccctgtgcctgc

SEQ ID NO: 74646 - DNA, 122 bp, Homo sapiens
agacgcgagaggaaggctgagcgcagagcggcgcggccagggtcccttggcttgggactgcgccccgtctccccggggtggggcagggtaggggtgtgcagaggcgtggacttggggaagcc

SEQ ID NO: 74647 - DNA, 122 bp, Homo sapiens
cttccttgaactctgctcacccaccccaacagagcatcatctcttgggcagggccagcagcgcctgtacacagtgcacagagggagccctgctccacgaaggggctcacgctgaatcagaca

SEQ ID NO: 74648 - DNA, 122 bp, Homo sapiens
tggtggcaggtccttcgtgggagggttgccacatatgtgagtgtgcaggggcgagcgtggcgcagtggcatcgtctcactgtcctcctccgttgcagggccgcatcatcgagtgcacacact

SEQ ID NO: 74649 - DNA, 122 bp, Homo sapiens
actaaactcaacacacagctggcgggctgcctggtcagagatgacttttcccgtgtctggcggtgggctgtacatgaagggcactgtcatttctcagggaaggatgttctgatgaatctctt

SEQ ID NO: 74650 - DNA, 122 bp, Homo sapiens
tttttccctcctgggaagtcatgaattctttgtttgatttttcaatataattgttagtttcgaagacatcacagatacgtttcccaagacatctctggattttgctcctctcccaagtcagt

SEQ ID NO: 74651 - DNA, 122 bp, Homo sapiens
tcccagtaatttcctgcatggatgggacagtttaccaactgcagggagaggggctggagccgagtctgggccccttcactgctgtgggacagaggctggcaaacccaccagggtagcccagg

SEQ ID NO: 74652 - DNA, 122 bp, Homo sapiens
ctggagggatgagagtagaaaagggatgatcctattttgatggctttgagggtgggggctcgatttggaaaggaccctgcagaagtggggaagggcactgcaaatcagatagggcaccctag

SEQ ID NO: 74653 - DNA, 122 bp, Homo sapiens
acgcacccctcacagtcccgcaactgcacccacgtcacacaggcaagccggtcctgtcgccgctgcgcggtctctcacgctccccgcctgtctcctagagacgggcccctcctccgcagctc

SEQ ID NO: 74654 - DNA, 122 bp, Homo sapiens
ccagtagaagagagaagcagcagagtgtcattcctccccattaccccctccccgccccgccggcccccagtcaaatgactccacccacaaggcaggcacgggatgaatggtccctggtgtca

SEQ ID NO: 74655 - DNA, 122 bp, Homo sapiens
taatggtttggccgcatttttacctcttgatttccctggtcccaggctgcaacttcagctcgctccgccatggggcgcacgtccgccagcctctgtgagctcagctaagtatgatgcctagg

SEQ ID NO: 74656 - DNA, 122 bp, Homo sapiens
gacaagtagacatgatttctagacctagaggagccctcctgtgaccataagggtaaaagccgcaagctaagaagagggtggccggaagtcataaccatcttgcttctgtaatctaaaaaata

SEQ ID NO: 74657 - DNA, 122 bp, Homo sapiens
acagcagcagccgcagccgccaacagcagcgctgttagtgagctaagtaagcactgacttcgtagaaaaccataacatcggccatcttggaaaagagaaaaacaatggagttacttatttaa

SEQ ID NO: 74658 - DNA, 122 bp, Homo sapiens
cacaggagtgagcagataggaggtgtccagaagctggatcaccgcagcccgcagctcccgcgcctcctcagggctgtgctctcgtgctgtaaggctacgctccccctctccctcctcagctg

SEQ ID NO: 74659 - DNA, 122 bp, Homo sapiens
tcccaagtagctgggactacaggtgtgcactaccagacccagctaatttttaaatttttccgtagagataggttctccctatgttgcccaggctggtgtcaaactcctggactcaagtgatc

SEQ ID NO: 74660 - DNA, 122 bp, Homo sapiens
gccgaggccgaggccgtggctgccggctggatgctcgatttcctctgcctctctctttgccgagctttccgcgacgaccgctccaaggacttctgcaggacccgcaacagcgcagaggctac

SEQ ID NO: 74661 - DNA, 122 bp, Homo sapiens
caccgcggcccggcgccgcgccaccgcgagtccactacccggcgctgctggccgccgcggcgctgctggcgcagacagctctgctgctgcactgctacctgggcatcgtgcgccgcgtgcgt

SEQ ID NO: 74662 - DNA, 122 bp, Homo sapiens
gcctggcgagtttcattgagcggaattagcccggatgacatcagcttcccagccccccggcgggcccagctcattggcgaggcagcccctccaggacacgcacattgttccccgcccccgcc

SEQ ID NO: 74663 - DNA, 122 bp, Homo sapiens
gctctccacttcccgcaccttcacttttcaaagattcccaggtgatgccaacctgctctgcggatggagcccctaagaccccaagcggcccagactacgtttcccagaggcctccgcggcct

SEQ ID NO: 74664 - DNA, 122 bp, Homo sapiens
caggagaaaggcagcgagccggaggggggaccgtcaggaacgctctgggatccatctgggcgtcaccttttgcgggtgctggggacactgcttgcgtgaaggaacagaaacgggccacgtgt

SEQ ID NO: 74665 - DNA, 122 bp, Homo sapiens
ggtgaggcttctccttggactttcctccttcttctccattcttcttcctttccagcaggccggaccccagcgctcgcctctccatgccaggacgctatgtgcctcggtgagtccctgtgcgc

SEQ ID NO: 74666 - DNA, 122 bp, Homo sapiens
cacagccggcctgccaggaggcgattcccagggccaaggggcgggtcccggcgaaatggccgccccggccacgggggcggggtccgaggcaggagccaatcggtgccgagcggagtcaggtt

SEQ ID NO: 74667 - DNA, 122 bp, Homo sapiens
ggtgatccacccatcttggcctccaaaagtgctaggattacaggcgtgagccactgtgcccggcctcaaggaagactttcttaacaattcatcatatagtagaaaatgaaaacattccctag

SEQ ID NO: 74668 - DNA, 122 bp, Homo sapiens
gaaccacctgggcttggaatccagagccccggaacaccttgcagtacttgcccgaagcaacgcgccaacagcgggagggagacgcagacgcgaagaccggcgagaggatgtgcggtgggagt

SEQ ID NO: 74669 - DNA, 122 bp, Homo sapiens
aacagaactccgggaagggcaggaagacttacctaggtgcgggggttagggaaagaatcccggaggccaagggtataagagtcctaggaagaggaagcaaaatattaatagcctcccaggct

SEQ ID NO: 74670 - DNA, 122 bp, Homo sapiens
tccaggaagctctcggcctctagctgaccgcgttgctgctgagcttccctggggagaaggcgccgaggtgcccggtgcgggccgaggcagggctgggcctcgcgggcagcaggcggaagaag

SEQ ID NO: 74671 - DNA, 122 bp, Homo sapiens
cttgaacgcctgacctcgtgatgcacctgcctcggcctcccaaagtgctgggattacaggcgtgagccaccacgcccaggctagaggcctcattttttaagactaatgggatcccaaggcta

SEQ ID NO: 74672 - DNA, 122 bp, Homo sapiens
ggctgggcagtgggatcaggcaacacaacagggctaggcagtgggatcaggcaatatggccgggctgggcagtgggattaggcagtgaagcaggggttgttaaacttcattgtgcatcaaaa

SEQ ID NO: 74673 - DNA, 122 bp, Homo sapiens
agccctggcccaggcctggatttgggggcccgggcggtgcctgaaactgcagtgtgaggtcgggcccagaggagagaaggcggcggcgcggctgaggtccccgcagctgggccaagactcgg

SEQ ID NO: 74674 - DNA, 122 bp, Homo sapiens
acccactctgcagttcagcagctgcaggttagtttcctaagtcagcagtttgtatctgaccgagaatcccgcgttgagcctgttcgaccaggataacccaagaacaccagcgctttctttag

SEQ ID NO: 74675 - DNA, 122 bp, Homo sapiens
ggctgcttttggaattcaccattaggagatgaagaggcagccacaggttgactgagcaagcgtcattgtctatttgaagtttcaaaggtatctctgaaaataaacacagttttctgcaagag

SEQ ID NO: 74676 - DNA, 122 bp, Homo sapiens
tttacccactagacgacaaagtaggcaaacttacctctaaacgaaccccagaatggcggccgcccgctcgggtggagtcttttatacccggacgccgcccaacgcgcccaaacgtgctagtg

SEQ ID NO: 74677 - DNA, 122 bp, Homo sapiens
agctctccttgcaaaatgattggtcaaagtttttccgactgcctgataaagcgtcagctccgacataaatcaatcgggcgagggggctgcgctctcgctgtcatccgtccgcaccgcactcc

SEQ ID NO: 74678 - DNA, 122 bp, Homo sapiens
agacttaatatctcataaatacagacacgctctctaaatgcatgctctgggaaagccagccggctgcgatagatgaaaaccgctcaccagtccccagctgacccggcgctgtcttttctgag

SEQ ID NO: 74679 - DNA, 122 bp, Homo sapiens
ggaatgcgggcattctttggaacaatcgctttattagggacagccattccctccgccctgcggtggccgcttcctgcttttttatggcccaggctgccggccgctggctaattgtccctgtt

SEQ ID NO: 74680 - DNA, 122 bp, Homo sapiens
gggggggcagatcggggctgcggccctggcaggcggcgcgcggtccaaggtagccccgagcgtggacttcgaccatagctgctcggacagtgtcgagtacctgacgctcaacttcgggccct

SEQ ID NO: 74681 - DNA, 122 bp, Homo sapiens
actctttccaggtagattaactgtatcccagaacaaagctcaaggacatttttagaaatacgtatatatccagcacacaagcagggtaaaattcacatctgcaaatttaccaggcattcaaa

SEQ ID NO: 74682 - DNA, 122 bp, Homo sapiens
tgccctcgccgcccgcgccgcccatccgctcctctctgctctcggccaccgcgctctcgtcgatgttctccagtgagtccgcatgctgcaccgacagctccgacagcgccaggctcggcaac

SEQ ID NO: 74683 - DNA, 122 bp, Homo sapiens
ccacaatctgcttctctctacaagcttgtttgaagccaagttaaagcaatggatagaagacggcagcgcgggtgtcagacctgccaatttccaactgcacaccaaatccccgaacatatgct

SEQ ID NO: 74684 - DNA, 122 bp, Homo sapiens
acgtgacccgcggggggtggacacgccgcgcgagcaggagctcggataggtcgctttggccggcctggccgctccgagctccgcccctcttcggtggcgcgtcgggaaggttgcaagtcggg

SEQ ID NO: 74685 - DNA, 122 bp, Homo sapiens
acggtttgcaaaggacgccccccccgggacgcagtggaagcttcaaattcctccgaggtccgggtcaggctggcatcttgcaaaaggagtgcgctcggcccattaaaaaaaaataaaaaata

SEQ ID NO: 74686 - DNA, 122 bp, Homo sapiens
tcggttgcctgcaggcaggcacgcggcgctgtgagaaacgaacgtccgtgacttagcccacgggaccgtttctgcattttcaccccaacctggagagctgcagcacagccgcgggacaggaa

SEQ ID NO: 74687 - DNA, 122 bp, Homo sapiens
ttcccagatatttagacaaagcttcagccactgtttcatgactactgaaggcttgcctgccgcataccccaaaacccgccaccctgaaagtagccattataaatgtttcatgtggaactttc

SEQ ID NO: 74688 - DNA, 122 bp, Homo sapiens
gccgttacgcttcggaagtgtccgggacttctagctgcctctcccacccctgcccctcagcgcctctgcttccatggggccgggataccctagctggcctgccctccggtagggcgggttgg

SEQ ID NO: 74689 - DNA, 122 bp, Homo sapiens
cgggagccggccgaggagcgggcaccggccattggcacaggcacgggccattggcgcatgcgtagggcgcggccttggggcggggcccacccagtggcggagtcttctgaggggcgggtcgt

SEQ ID NO: 74690 - DNA, 122 bp, Homo sapiens
aggttgcacagagaatgagattggccaggctagaaggaagggcggttggctccagctcaccgggcattcatatggtatatggaggagaactgccagatctcagaaacagcatccagatttga

SEQ ID NO: 74691 - DNA, 122 bp, Homo sapiens
tgaccgaaaggagtttgtcttctctttcaacgccatggcgtcctcttccatgcactcggccggcgggggctcctactaccaccagcaggtcacctaccaagacatcaagccttgcgtgatgt

SEQ ID NO: 74692 - DNA, 122 bp, Homo sapiens
tctcccgtagccctgcgggccgctcttcactgctctccagacttggggccctatctgaggcgtcccaaacaccaacttctggctcctggccccaactcgagaggcttccagcgaggacgaag

SEQ ID NO: 74693 - DNA, 122 bp, Homo sapiens
aaacaaaatgaaacaaaagcccactttgcttcaccctgaaatggctctgccttctggtaacgccagattcaactttctctcaggaggaaagcaggaacagcatattaatgaggtttcaactt

SEQ ID NO: 74694 - DNA, 122 bp, Homo sapiens
gaagccaaggattaaaccggccatgaaaactcttttccttctcaactcaccgctgggaagcgagtgtattctgtaaattcctgtatctggccaggagggcttaggggatagggtgggccgct

SEQ ID NO: 74695 - DNA, 122 bp, Homo sapiens
cagtagacccagcccccagagcaggtggggggaccaggaggcaacagagtggatcaggctcggggagaactgaccccaaaggacaaatgggtgcagagattcaggctggccaaggctggcac

SEQ ID NO: 74696 - DNA, 122 bp, Homo sapiens
agctgcctccccgcggggcagagctcaggacctgcagcccaccatgcctgagcctccccacgaccccttgggctcctgtgctgcgcgagcgtccctgacgagcaccgccccctgctccacgg

SEQ ID NO: 74697 - DNA, 122 bp, Homo sapiens
gccaacgttttgggcttgggagcctggcccacagcatccccttgggccaggcagacccctcgctggccccttacattattgacctccccagctggacccagttccgccaggacaccggtaag

SEQ ID NO: 74698 - DNA, 122 bp, Homo sapiens
cctggtggttttattgccactgattgacttcttgaggtgagagggctaaccacgttctgccgttctgccgttctgccgtcagccttgaaggtgccgatgtgccctgtgggcctggcctgggt

SEQ ID NO: 74699 - DNA, 122 bp, Homo sapiens
agctgtcccggtccaaggcagcagtctgatttcggggaaattaaaagggcagaaaggaagcggcagcagaaaaacccccgcgctcccgccagaccagccccttaaaggaacacgcgcacctt

SEQ ID NO: 74700 - DNA, 122 bp, Homo sapiens
ccagcacatagaaactgcgcagcacagagaggctgctgtccagtgagtgaccaccctccacgccaatgaggcaggccagcttttgagagctgttcagacctagaaggaggtagagagtcaag

SEQ ID NO: 74701 - DNA, 122 bp, Homo sapiens
gaggcctacacgatttactggttagtagcagccctggccccgctggtggcagctcctccccgtcccagccaaggccgcctggcaggacgggagtggaggacacaggctcaccctacggacag

SEQ ID NO: 74702 - DNA, 122 bp, Homo sapiens
tgatgtatttgcagaaattggttccttgactggtcctgacctggtatgacatctcacatccggaatgttttcactgaagcattcaacgacaatggaagcaagaaacaaggaagaggttcaaa

SEQ ID NO: 74703 - DNA, 122 bp, Homo sapiens
gctaaatattcagccatttttacccaagccctccaggtctggctgctcttacgtcacttccgttgcttaggagcactgggaagtgtagttcgttgccctctccaggcgcttaccaagcgctc

SEQ ID NO: 74704 - DNA, 122 bp, Homo sapiens
tcttaacaatccagatgggatgctatttctaaggctgttgtcagagtgttgcattttccccggacaggtattaaaataatataaaggcaaataaatgccatcatccttttgttggacctacc

SEQ ID NO: 74705 - DNA, 122 bp, Homo sapiens
cctttctgctcctcgcggcccaggtgagcgcggcaccggtcccgacggcaccgcgggctgcggcccttcggcctctctgtccccgggctacgcgcaggaacgaccccgctcggcccgtcttg

SEQ ID NO: 74706 - DNA, 122 bp, Homo sapiens
aaaactaataaatattctgagtctcaagaaagctttctgaaactatcaaagggacccaggcggcgcatcactacctgtgaggccgaccccactcacagcacagactgcaagtgaggcttaca

SEQ ID NO: 74707 - DNA, 122 bp, Homo sapiens
gaatgaaacatcacacgcatttaacataggttaatcatgcagagagtattttgtaaactgcgaagtgcaggactttcgggaagcttattgtagcgcgtctaggtcggagtaacagtcccaaa

SEQ ID NO: 74708 - DNA, 122 bp, Homo sapiens
agggaaaattcagagtaaccttgccataaatatcccgctccaagacgcctgacgtcagagcggggcgggcggacgggcgcgaggccgggcctggaggggcggcagccgcggcttcccgggga

SEQ ID NO: 74709 - DNA, 122 bp, Homo sapiens
gggccctgagcgccgagatggggagtgaggtggggagggcgggatgctccttcccttctccgcaaaggaaccccttctgattccgactctggagctccagagaccggatccgagacgcgggt

SEQ ID NO: 74710 - DNA, 122 bp, Homo sapiens
gcgcaccacccgaaggtgaggcatttggccccaaacagaccctcgaaaagccggactgatcgaggagttaccctacagcctgatctgcacctgctccagggagagagcgccccacccttccc

SEQ ID NO: 74711 - DNA, 122 bp, Homo sapiens
actctgcccaaggagcagctgccatctgagagggggggcattccctgcagggaggacacccgctcccactcagacacaagaggaaatggaacgatcagtgtgaacgggacgtttcagaagct

SEQ ID NO: 74712 - DNA, 122 bp, Homo sapiens
cttccctgcaacctcaaaccagctcccagggccaggaaggtcgtaggacccagaggagcccgcctgacatttccgctccccgaaaacacgccccccaacccctcccctctgccccgtactcc

SEQ ID NO: 74713 - DNA, 122 bp, Homo sapiens
ggagatcccgcacctcgacggccacgccagcccgggcgccgacggccaggagcgcgtttccgaaatcatcagcttcgccgagacaggtgggtccggccctccggctgtctgccgcggtcccc

SEQ ID NO: 74714 - DNA, 122 bp, Homo sapiens
atcagccacacccccaaacagccctcagtaagagccctacactatcagccagacgttttccgccaccaacgctcccgagaccccactcctgtcaccagttccccgaacattcctgcgagcaa

SEQ ID NO: 74715 - DNA, 122 bp, Homo sapiens
gagatgtgggcgaagaccccaggacctttcccctgctcagagaccaaagggttttcagagcggaggtgggggctcccggcaggggaagttagagccgagggagcggcaggagcacgtgggct

SEQ ID NO: 74716 - DNA, 122 bp, Homo sapiens
tgagagcagacccaggaggatctctgtggccgagagcagacctgggaggacctctgtggccgagagcggacccaggagcacctctgtggctgagcggatccgggaggacctctgtggcagag

SEQ ID NO: 74717 - DNA, 122 bp, Homo sapiens
cgggatatgcaggagacactaatggatctagtatatcacacaggaagcagatcaccaggacgacaattacaatcagcaaatcccagtatccactaaagacagtgacaagggtaaaaagacaa

SEQ ID NO: 74718 - DNA, 122 bp, Homo sapiens
gtgggcaggatcccttccccctctgcttggctgagatccccttggaatttctcggaagaacgtttactgcgaaaggaagcaaaatgcacaaagacgcagagagggggaggtacccggcgcgg

SEQ ID NO: 74719 - DNA, 122 bp, Homo sapiens
tgctgctttggcagcaggaggccagaaggatgatcaatttgccactcaaggtcagtcaagcgttcctgtgtctaggcctgtcttttcgtccatctttaacctttcccctgaagtaatgtctg

SEQ ID NO: 74720 - DNA, 122 bp, Homo sapiens
cactaccccatggaggcctggctggtgctcacatacaataattaactgctgagtggccttcgcccaatcccaggctccactcctgggctccattcccactccctgcctgtctcctaggccac

SEQ ID NO: 74721 - DNA, 122 bp, Homo sapiens
tgccgctgtgggccgagggcctcaccttcttctactgctacatgctgctgctggtgctgccgtgcgtggcgctcagcgaggtcagcatgcagggcgagcacatagcgccgcagaagatgatg

SEQ ID NO: 74722 - DNA, 122 bp, Homo sapiens
gtgggagagtgtgaggtgtaacggattcaagtctgaacccagagcctggaaaaggctgaccgcccagattgacgttgctaggcaactccggaggcgggcccagcgccaaaagaacagggcga

SEQ ID NO: 74723 - DNA, 122 bp, Homo sapiens
ttgcccgaagtcccacggctggtcagtggcaagtggacagtggcaactgcgcctggaaaacgccgtccgtggcgcggtcgcggcgccaggggcatgcctgacagccaccttctctcccgtga

SEQ ID NO: 74724 - DNA, 122 bp, Homo sapiens
ataaagctgcagacatcattgaccattactttcattcccagaccccacctttagaggtgccgcttacagcttgtaatacattcttccagacctttactacacatctacatacttgtaaaatg

SEQ ID NO: 74725 - DNA, 122 bp, Homo sapiens
agcaaaatctgctcaacccaccaaagcctggtgggaacagcttggggtaagcaaggtaagcgggctatattcctaatctgggaggcagagaaagagaacagaagccagatgtgagaactgaa

SEQ ID NO: 74726 - DNA, 122 bp, Homo sapiens
tatttaagttaaaactacttgaatagtattttgctgaagagcaagatatgcattaatcaccggttttatactgtccaaaatgaagcatccccgtgacaaaccagagtgggcagaagcatcga

SEQ ID NO: 74727 - DNA, 122 bp, Homo sapiens
tcacgatgccaatgtacctcctggcagtcccgggccggtcatagggccctggccgctgcacggacatgaacttcagagggggatctgagtatgacctaacttcctcctggctgctcttaaac

SEQ ID NO: 74728 - DNA, 122 bp, Homo sapiens
ccgggaagccccctcgggagcgcgcacgggaagggctgtgggggcgctggccggctgcgacgtcagacccccgcccctcggcgcctgccggacccagctccattcccagccgcgcctccttc

SEQ ID NO: 74729 - DNA, 122 bp, Homo sapiens
acggcccacacacaggctcccagctcatttcctttgcaatgagtggtaactggaggcgggcggtgcatggacctgccttgcaaggcttctctgttagtggtgcctggagcccactctctcag

SEQ ID NO: 74730 - DNA, 122 bp, Homo sapiens
cgcatcagttttggctggtgatgagcacgccccattgccagagcggtccacagtcaggagcggttccatggcatttgccagtgacatgacattctgcaggaaagcgtctctgtgccgcgtcg

SEQ ID NO: 74731 - DNA, 122 bp, Homo sapiens
taagtgagcgggcacttggtgtccccaggcccagcgccaggccctgttcacacattctcacgtggggctctcacagagctgagagcagtagaattaccatcacccttttgctcagtggggag

SEQ ID NO: 74732 - DNA, 122 bp, Homo sapiens
agggggttgtcattggccctgctggcgtctgcacatggctgtgacgttgctgcttccctgcggctgcgctggatttgtgagtgtgtccagagcgtgaggattggtgttgctgtttgtgggta

SEQ ID NO: 74733 - DNA, 122 bp, Homo sapiens
agtgaaggaggtgtgtactccaagggtcgggggattacctccaggctgagtgccatctgccgaatgtagagcatattcaggtcctccaggatgtgcaatctgtcctgcatctctgtgccccc

SEQ ID NO: 74734 - DNA, 122 bp, Homo sapiens
gtcagccgaagccaagtgaggaggcaccaaagtgttctcaggaccagggagtactggcctcggagttggcccagaataaggaggagctgaccccgggggccccccagcatcagctaccgccg

SEQ ID NO: 74735 - DNA, 122 bp, Homo sapiens
cagtacaatctcacttgcatcttcttccctccccaccattccccgcaggggaaagacccccgcaaggagaatgacaggcccacctggggcctaaactccatagctcaaacaaggctgggcac

SEQ ID NO: 74736 - DNA, 122 bp, Homo sapiens
gctgaatcagctgcttggccgcctcggactctccgtcatcctcagaatctgtgattgggtcgggggtagaaaaagacggggagaaaaagcactggcttgtcaaacagagcggcacccgccga

SEQ ID NO: 74737 - DNA, 122 bp, Homo sapiens
gggcggcatacgccatgtgagcacaggactcaggccaccctcgcttgtcctggcgcccggcggcagctgcccagaaacttcctgggagaaagagccctcgggctgccttcccctctgcgtgt

SEQ ID NO: 74738 - DNA, 122 bp, Homo sapiens
ttgcagtggcttagtcgatagtcctggcccaaggcctcactcacatggctgacaggctggcgctccctgatgatggagaggcttcagttcttttccataagggcctctcctcagtgctgctc

SEQ ID NO: 74739 - DNA, 122 bp, Homo sapiens
cgggagtcgggtgacaaagctattgccgagaggtttcaggaactgtcagtcctaatccaacgttcctattggtcagttcccaagcggttggagacaaagctcgcgcgcacattggacccggg

SEQ ID NO: 74740 - DNA, 122 bp, Homo sapiens
caggggagagacttgaactggagccacaactttgccacctgtagccaatgacttggcacacgaaagctctcacagggtggggagcctgcagctgctcccacaacagaagatcaatggaaaga

SEQ ID NO: 74741 - DNA, 122 bp, Homo sapiens
caagagactggctttcgctgtgacccccccggcccatggcaccgtgcggcaggtgctctgcggccgggtgctttggcccagcctgatgtgtgtggcccacccacgctgcacagtccccgaca

SEQ ID NO: 74742 - DNA, 122 bp, Homo sapiens
tttatcatggcaaagatgctgaactctaaagatagaaaaaatggtgaagtagaaagacaccggacagcccttcagtcaagactaattagccattagtaaatggctaattctaaggctagagc

SEQ ID NO: 74743 - DNA, 122 bp, Homo sapiens
cctcattgggtcgctgctcggtgcccgaggacccctttccaggcatctggtggacgtgagcgacaccaggaccctatcccagaggtacaagtatgaagtgtttctgacgcgaggctccggga

SEQ ID NO: 74744 - DNA, 122 bp, Homo sapiens
atcgcagggacctgatcgttctcagacagctaggcagagacaccaaggactctgcaggcacgaagaaactgaaagtcaggagaagcttgtgagggtcacagttgctctcatcatgtaagcca

SEQ ID NO: 74745 - DNA, 122 bp, Homo sapiens
aggaggaattgaattcgctgaagcagaagctggcgtcggctcttttggctgagcaggaaccgcagccagaacggctggttccggtgtcgccgctgccgccgaaggccgctctgtcccgagat

SEQ ID NO: 74746 - DNA, 122 bp, Homo sapiens
cctccagcctgggcatataaagcagagccggcacccgggagccgcgtgtccagagctgtgcggcgggaggtggagcgcgaggtgccctcccttttcccggtgtgttggaggcacggagctgg

SEQ ID NO: 74747 - DNA, 122 bp, Homo sapiens
gcgcccaagcaagtcaagcgacagcgctcgtcttcgcccgaactgatgcgctgcaaacgccggctcaacttcagcggctttggctacagcctgccgcagcagcagccggccgccgtggcgcg

SEQ ID NO: 74748 - DNA, 122 bp, Homo sapiens
gctccttctcctccatcaggaagtccagcagcaccttgctggcgtagttaaacgccttctcgatctgctccacatacgcccgctcttttaacgtgtagatgatctctttagccaccgggcag

SEQ ID NO: 74749 - DNA, 122 bp, Homo sapiens
atgtacagtgcgcaagagggggggcgggagggcggaggacgctggaggaggggcacgtgacggtgtcagccaatggctgagcctcctgcaaaagtttgccggcttccgcagtgatggatcac

SEQ ID NO: 74750 - DNA, 122 bp, Homo sapiens
aaaactaatcaggtctctgtaccatggttcttacaaatttaagatgagccttctagaggccggagtcatattcccttactttcctgcccaaagcatccattcctgtttcttcctccaaggct

SEQ ID NO: 74751 - DNA, 122 bp, Homo sapiens
gcagcgtcaccggctcccggagtggctctaggcagatggggcagctgaagggtccactgccgtccatgactccgcggccgcccagggcgccgccgattgtgctccggcctgggagggacccg

SEQ ID NO: 74752 - DNA, 122 bp, Homo sapiens
cacctgaagcttgtgaccaagggctttgagtttgctgaggcctcttgggaaggccagagccgttcccagtggggcccaacaaggcagggtgaggcaagctctctggacccatctactctcag

SEQ ID NO: 74753 - DNA, 122 bp, Homo sapiens
gcttgaagaggtgaggatagagatgtgatctgggagtggagagaggacatttaaagccaacgactgcatgagctaacccaggtccttgattctagtaaaggtagattaagaagaggtctgag

SEQ ID NO: 74754 - DNA, 122 bp, Homo sapiens
cctggtacacggtgtggtcgataataatgctggcttttggtttagtttcagtaaaagaaccgggatggcaaaaggcgagttatctcttggaattaccctggaattagagcacgttctttttt

SEQ ID NO: 74755 - DNA, 122 bp, Homo sapiens
ccccccagtcaggccggttttccttgtttcaccgtgttctctgaatacactgaattactccgagcatctatagttggcaatgccctgcgcattttccgcactccgatacactttacactgaa

SEQ ID NO: 74756 - DNA, 122 bp, Homo sapiens
tgcgcaggcctctcgctgattggttgcggcggatgcctcgcgggccggtggctatggaggcggcggcggttgatggttgaccgttggctccggggtgggggtcgccgttcgagtgatctgct

SEQ ID NO: 74757 - DNA, 122 bp, Homo sapiens
cgacgggggcgggcctcgaacggtgattggctgaaggggaagccttccggaggagcaaagcgacccctcccggactccatagttcatttcaggtcggaacttgcgcattcgggccggacctc

SEQ ID NO: 74758 - DNA, 122 bp, Homo sapiens
actctgagtccagcacagtgtccagtggggccagcacagccaccacctctgagtccagcacgacctccagtggggccagcacagccaccaactctgagtccagcacagtgtccagtggggcc

SEQ ID NO: 74759 - DNA, 122 bp, Homo sapiens
gcgggcggggccggaagtgtggggacagcgcggggccgagaaccggaagtgcggggcgggcgcgggggcagagcgaaaggcttgaggaccaggtcggggccgggttccgggtcggggagcgg

SEQ ID NO: 74760 - DNA, 122 bp, Homo sapiens
tgcctttgaggttttaaatgaagacttccaaaactgatttacttaagactctacgtaaaacgcctgatctttaaacgcaagaaaagcaagatgaatgtattactttcctggaaaaaaaaagc

SEQ ID NO: 74761 - DNA, 122 bp, Homo sapiens
ccgcgtcccgagctgtggcggccgcgtccccgggcggaaggctcacgctcggtgacgccgcgctgtcccagaacctcagcgactttgcagactcactggtgacccaacggtgcgccccgccg

SEQ ID NO: 74762 - DNA, 122 bp, Homo sapiens
cgcgctccgtgcggggcccggaggacgggggcgtcctggaccacatggtccggatgaccacgagcctctacagccccgccgtggccatcgtgtgccagaccgtgtgccctgagagccctccg

SEQ ID NO: 74763 - DNA, 122 bp, Homo sapiens
ctgggaaatgcttgttgggcgcataaacacttcacggaagacatccagatgagtcaataccgttccatagaggttttaataggagagggatacagcacccctgcggacatctggagcgcggc

SEQ ID NO: 74764 - DNA, 122 bp, Homo sapiens
ttctacttgggcgtctttgtggtctgccaccagctgtcctcttccctgaatgccacttaccgttctttggtggccagagagaaggtcttctgggacctggcggccacgcgtgcagtctttgg

SEQ ID NO: 74765 - DNA, 122 bp, Homo sapiens
ggaggcagagaggagcgggcacgcgggacgggcgtgtgctcgtgaggggtcgaggaaaggcgtatgtggaggcgcgcggggtgggtgagccgaggagacttgctacacagaaacctggagga

SEQ ID NO: 74766 - DNA, 122 bp, Homo sapiens
ctaatccatccggggaagttccctttaaacccaaaaggggacggtgaagccacacgcggccgcccttctcaggagcccacttccacctctcgcaggctagacagcgttccccaagtcccccc

SEQ ID NO: 74767 - DNA, 122 bp, Homo sapiens
tccttattatcccacgctgaaggaacaaatatttaagatctgacacacctttctaaacttcggcaaatcaaatttaccttttattagacatagagaatcgctaattgtgtgaaacaaatatt

SEQ ID NO: 74768 - DNA, 122 bp, Homo sapiens
gggtcccgcgaaagagcccatcagttccgcttgggggccccactgccctcccacctcctacgctgggcgcttctcctgcgaatgacgttttgctgctgctcagcgcagccagtcgcggaggc

SEQ ID NO: 74769 - DNA, 122 bp, Homo sapiens
gtgcacggaatttgccacttcccctgctggactgtcctcccacagtagccctctgctctgcgctgtctcctttgctcagctgcaagctgaagagtcaggggctgtgtctcacgcacctctac

SEQ ID NO: 74770 - DNA, 122 bp, Homo sapiens
agaggtggggaccctggggaggtggctgctcggagtctaggtgacggggcgagacggggccggtaggtggcgggaggggccgggccggagccggcgggagggccaggcccggaggcccccac

SEQ ID NO: 74771 - DNA, 122 bp, Homo sapiens
caaggccaaaagctactccatcttctagccagaccacagactttgttttaagccaggactcgttttccagcagttagtgcaattagggaggttgggaggatgtacacaagagcagggagaaa

SEQ ID NO: 74772 - DNA, 122 bp, Homo sapiens
cccccgcgtggctgccacctcccgccccggagccccctcagagccccgggccggcctccccgcccccactgcatccctaacagaggcaaagttttcccaccttgggcgccccctccccaggc

SEQ ID NO: 74773 - DNA, 122 bp, Homo sapiens
atttgctttaggccagttgaaaaccttttccaagtccagacctgttgggacctagagggacggtcaggctaggctttgtaagttgtgatggaagtgaaaaaatgacttcaaaagcaaataat

SEQ ID NO: 74774 - DNA, 122 bp, Homo sapiens
aggctgaggcaggagaatcgcttgaacccaggaggcagcgtttgcagtgagctgagatcgcgccactgtattccagcctgggcgacagagcaagactccatctcaaaaaaaaagagaggaca

SEQ ID NO: 74775 - DNA, 122 bp, Homo sapiens
tcgaagtaatcatttcctcaaaaatattcgcgtcagccccaccgcccacttgatgaaagccgtcatagcagtgagtaacatcggagcataacatcgcgtcctccggaaggccgagcacctgc

SEQ ID NO: 74776 - DNA, 122 bp, Homo sapiens
cataacaaatgtgtcaagtgtagctacagaagtttttagaaggcaaatgatggctctaaacgcatgtattagaagagatctttaaaaatcaaatgacctggctgggcacatgacctggcatc

SEQ ID NO: 74777 - DNA, 122 bp, Homo sapiens
ctcccacctcctaaatgcggagcggagcggggagcaaaaccatcctcggcctggacccagcgcctccggggaccggccgcgcgccccctgcgtccgcgggccgggatgcggctctgagccag

SEQ ID NO: 74778 - DNA, 122 bp, Homo sapiens
cttgctgtggtttatggcaccaacgtgccctccatctcctctgttgcctttcacgtggctcggtgaaatagaaatgtgatgctgaggcctgtgttagttggcagttatgtgcttggagtggc

SEQ ID NO: 74779 - DNA, 122 bp, Homo sapiens
cgtctggtcctccggaactcgaactttgtgattttgttctttctgtgtgacatcctcatccgttctgagggagaaactccttaaagaagacgagagagtcagtcgttgcgggttcttggagg

SEQ ID NO: 74780 - DNA, 122 bp, Homo sapiens
gagggcgagcagcatcttggagctggagctcagagcccaggtgtggggggtcagcaggtccggaggctctcgaaggtggcgccaggggctttggatttggtcccgagaacaagcgggagccg

SEQ ID NO: 74781 - DNA, 122 bp, Homo sapiens
aggacacccaggcttggggctaagtcccagtgtccatatgaagctgtttctggccttgtccgtttttgttgtcccaggctctgtgcccctcactcagtcaagaacttgtctttgtgttgctt

SEQ ID NO: 74782 - DNA, 122 bp, Homo sapiens
gggcgcccggccccggtagccgacgagacagtagaggtaatagaggccgtcctgcgggagcgccagcccctcggcgtccgagaactgcgtcccgctcgtcagaaacgcctgttccttcgtcg

SEQ ID NO: 74783 - DNA, 122 bp, Homo sapiens
gagacatttaaccttagattttaagaatgaataggagtagcaaaccacagaatggcatgacgaatgtcaaacaagagaatgacatatataaaggccctgttggggattattcatttgttaaa

SEQ ID NO: 74784 - DNA, 122 bp, Homo sapiens
actccctgaagattcatctgcaatgcagatgaagcatcttagaaacaagaatgaaaacagcgtttgatttttacaaaagccaattcagaggctcacttcctgtccagcccagcgtgccagca

SEQ ID NO: 74785 - DNA, 122 bp, Homo sapiens
gtaagaacgcagaagcacccttgggcccatgggccatcttccctattagcacctcctcctcgctacccctcttcaatggcagagacgacgagtgaaaatttgggacttttattgtaaatgga

SEQ ID NO: 74786 - DNA, 122 bp, Homo sapiens
agagaagaagtatgaattactgctgtggttagggttgacattattcctacgattgagcttcgaagacttttctaagcagtaataaacatgaaccaagcgtcacacagttccattcatggtcc

SEQ ID NO: 74787 - DNA, 122 bp, Homo sapiens
aacactcgctagaacaccccggcccagtgggtcctcggtgccggggcggcgttcccaacacgcagagccgcagtacctccagcagccgcacgtccagccttcgcaggatctcaggactgtca

SEQ ID NO: 74788 - DNA, 122 bp, Homo sapiens
tcccaggaggcactgccacccgcacacccacatgcgagcttggaaaggagggtggtccctcggtgtggaccccttattacataggccccctctgtgtttgtagagaacccagtccccaaaca

SEQ ID NO: 74789 - DNA, 122 bp, Homo sapiens
cccaaccttttgtttctgctgtgcatgacctgtgactcttctctttttacctgcagccttcgtgtccgaggccagcacaccaagaccactggccgccgtggccgcaccgtgggtgtgtccaa

SEQ ID NO: 74790 - DNA, 122 bp, Homo sapiens
tgctatgctctggtccctgatggtagcatggtggtattctggcctcttctgtataacggacgtgtcaccccagattttcccaatttggcggaagctgtgtgtacagagggttggcagccggc

SEQ ID NO: 74791 - DNA, 122 bp, Homo sapiens
atactcagtgcagcattctcacagacacccaagataacgttatcctcatggaaacgagctcgacgaagtgacctaccccagagcctcaaggctgtgatgatgctggcatgagaaacaacagg

SEQ ID NO: 74792 - DNA, 122 bp, Homo sapiens
ggtgagtgttacagttcttaaagatagtgtatccggagtatgttccttctgatgttcagacgtgttcggagtttcttccttctggtgggttcgtggtctcactggcttcaggagtgaagctg

SEQ ID NO: 74793 - DNA, 122 bp, Homo sapiens
tgacagcgagacagcacaagaaggacccgctctgtttcaaagcgaggatgtgagtgacttcgtctgtgccgaggtctcttcgtctccaacctgccgggcacagggcacccacatgacacgct

SEQ ID NO: 74794 - DNA, 122 bp, Homo sapiens
cggaggtctttcagcggccccagcccgggacctccagccacacgggcctccgagcctcgccggccgctctcccctgagagttgacaagtgggtcttccctgacatctctcttcctccccgct

SEQ ID NO: 74795 - DNA, 122 bp, Homo sapiens
ccataccgtggcctcctataagttctatttaacaggacaaagatgttttctagatattgtcgaaggcataataatctcaattgtatttttgttgtgatttgtggtgaaacatcaactttctt

SEQ ID NO: 74796 - DNA, 122 bp, Homo sapiens
ttccaagaggataaagtgcaaaccttaaaacaaatggaagatttatggaatagcctcctccgtatttgaatgcattttatcttaataagtcttcttgatggaaacgtgtttttcaaaagtga

SEQ ID NO: 74797 - DNA, 122 bp, Homo sapiens
acacaggattaagccaacacatatgttttgaatgaatgtgtgcacacatgcatgagctggcggcagtcggggttggggtaagcacgaaggcccagctcagttctctgcatgtgacctcccat

SEQ ID NO: 74798 - DNA, 122 bp, Homo sapiens
tccgcaggggtctcctgggaggaacccaccagcgataggaacactgaagctgggctacggcgtccgcccgagccttttcttaaaggcgccgaccccggaagcggggcgtccgagggagcgcg

SEQ ID NO: 74799 - DNA, 122 bp, Homo sapiens
ccctggccgcccacccgagctgtcccctcgctgggaccccgcgcagcctgcccagtcccccgcccaagacctcgaggccgaaacctcaggtccttggatatctggatcccctcgcacgccct

SEQ ID NO: 74800 - DNA, 122 bp, Homo sapiens
cagggcccaaaccaggagagtgtggcatgccacggtggagactgaacagaaacaaagccacgggagactgtagtgttgttccctgttgaaggagagactctctattatagaagacctggact

SEQ ID NO: 74801 - DNA, 122 bp, Homo sapiens
agcttgcagtgagccgagatcgcgccagtgcactccagcctgggcgacagagacagcctccgtcccaaaaaagaaagaaacccactgctgtttaaaggtaggtgtgtgtgtgcgtgtgtgta

SEQ ID NO: 74802 - DNA, 122 bp, Homo sapiens
cgagcgcccgaggactgggaggggtggaacagggtccctccgatctccggggattccctgcggggcgccccaaccaatccttagggcccaaggctacgcgctcggcagccggctcctccgga

SEQ ID NO: 74803 - DNA, 122 bp, Homo sapiens
gcagaggcaccagtgttctcgccttggaatccttgtcgggagagcctagacccaggctcccggcggcgcgggtcgctcacggccaactcttaggcgcagaacccgggcgagcgccggtcggg

SEQ ID NO: 74804 - DNA, 122 bp, Homo sapiens
aggcacagggactgcggtgtttgggccaacctgggctggacctggcgtcgtgtctttggacggactcagggaacatattgattagggaatggaggaccgggaggagggagacactaagccag

SEQ ID NO: 74805 - DNA, 122 bp, Homo sapiens
aaagttcctctccagcctgttcgaatttgacagtgcgctactcttttcctaaccaacccacgggagcagaggtgtgagagtacccgataaactgtaaaacacctcgcagattacagaggtgg

SEQ ID NO: 74806 - DNA, 122 bp, Homo sapiens
tcatctgacttggtcagcagaagtgctctgaaccatccggaactttgggggcctgggggccgtggggaggagtttcaggaagttgaaaacagtattgggtggaatcacacacttgcaatttg

SEQ ID NO: 74807 - DNA, 122 bp, Homo sapiens
aaggcgggacagggcctattcccgcggtttggtccggccattggcgggcggtttgaatgacggaagtgacggcggctcggcgatggctctcccgcaggcgcagaaacggctgctgggcagct

SEQ ID NO: 74808 - DNA, 122 bp, Homo sapiens
atggtagaatgttcagcagcattcctgccatccatatccattaggtgccagtagcacccccgctagagctgtgaaaaattctctccagacatagtcagatgtctcctggggccatatcaccc

SEQ ID NO: 74809 - DNA, 122 bp, Homo sapiens
ccaactgttgaccggtgtccatgccatgcccagcaggatgtcagctatgctgggggaagccgcgcactctctgagctataagagagtacatggagggttctttactttctctcattatctga

SEQ ID NO: 74810 - DNA, 122 bp, Homo sapiens
cacgcaaggccggagccggcttcctcagcttgcagggaggtgtgcagagagaggcgccagcgggaactggggctgtgcgcggcgcttgcgggccagctggagttccgggtgggcgtgggctt

SEQ ID NO: 74811 - DNA, 122 bp, Homo sapiens
tgatcctccacggtagcctgccacacactgctctggcgaggcgtccaaccggggcaaatgcgtacccgggagcgctctcaggatctgcgtctctcaggctggtcggagtccccagcaggcat

SEQ ID NO: 74812 - DNA, 122 bp, Homo sapiens
tctttattatatctaaactcactgattcactctggtgttcctcattcctccctgcagatccgtgctttcatcttggctcatttcccttcagcctgaagatcttcctttagtatttcctttgg

SEQ ID NO: 74813 - DNA, 122 bp, Homo sapiens
tgggatccggtcccctcctgctgggctgcacgggccacgatggaaaggcgcctcgtgacacgctgcggtcagctcagaaaagccgcagatgctgacacgggcaaccctgcccagtgtggggc

SEQ ID NO: 74814 - DNA, 122 bp, Homo sapiens
aaagatttaatttaaaagaaaaaaattcaagctgctccccgttacttgtaagtctaatcccgtgtctaataacattcaggaagaatgtaggaaatgagctgtttcattatatacattaagaa

SEQ ID NO: 74815 - DNA, 122 bp, Homo sapiens
ctacgccttggccatggagctctgcttcttcttagaggtctgggctttcttctccttgggcgtgcccgaggtgacgtcgtcgtggtcgcggttgctggacgcgttctcacggttctagttgt

SEQ ID NO: 74816 - DNA, 122 bp, Homo sapiens
gccatgccttacctctaccgggccccagggcctcaggcacacccggttcccaaggacgcccggatcacccactcctcaggccagagctttgagcaaatgaggcaggagtgcctgcagagagg

SEQ ID NO: 74817 - DNA, 122 bp, Homo sapiens
gaactcactcaatgagaactatgtgagatgtggccaacaattatcatgcttaaaacaggacggccagagccatgaggagattgaagtctgacaatgctagctagctaagtggaaatttacca

SEQ ID NO: 74818 - DNA, 122 bp, Homo sapiens
tgaatttctggactgaagcgatcctcctgcctcagcctcccgagtagtcgggactacaggcgggtgccaccacatctgcttagaattataataaattcgaattctcatagtgcttacttata

SEQ ID NO: 74819 - DNA, 122 bp, Homo sapiens
catgctttctctgagactctgggtagaatctttccttgactttagcaaccttctggtaagcgactgtgaattcaaggcattccttggcctgacagctgtgtcattccaatctctgcctctgc

SEQ ID NO: 74820 - DNA, 122 bp, Homo sapiens
gaagtgctctgagaatgagccgtgtttacggaaagcctctgtctcatgctccgcattctccgttctgattctgaccacagcaagagtggacgctctccacgcctggagattcccattccagc

SEQ ID NO: 74821 - DNA, 122 bp, Homo sapiens
tctatgagtgtcctcgtcctgagggtactattactatttcatctttgtagcctagcatggcgcccatgaaatgtgtttgtggctgaaaggaacctatctttggtcaccaatgacccaacaat

SEQ ID NO: 74822 - DNA, 122 bp, Homo sapiens
ctcccctcccctccctcctccctccgcccgcccgccctccctccctccctcgcgctctctcgcgctcgctcgctcgctcgctccagtatgtaaatgtgtaatagaagccaaatatggagcag

SEQ ID NO: 74823 - DNA, 122 bp, Homo sapiens
aaatggggcaagaatcctatcccttttcagggatgagatgactggcaggctatccctcaccgtgtgggaagctttcaacagccagtggtctttagccacattagttttctgtgtataggtga

SEQ ID NO: 74824 - DNA, 122 bp, Homo sapiens
ttctcagatcgagcaccaactcatcaatgtctccacgccctacattcaggagtttcattacgtcatatgtgttcccaactgaatggaaagttccttgagagacaacaatgagggttccactt

SEQ ID NO: 74825 - DNA, 122 bp, Homo sapiens
gagggcaggtgcggctgagtccgcggccccggcggccctgaggcccctcccaggccggcccgggctctgtgacaaccggccctgcccttaacctgcccggcaggcccagtcacagctcggcc

SEQ ID NO: 74826 - DNA, 122 bp, Homo sapiens
tggtctcgctgactcaggagtgaagctgcagaccttggcggtgagtgttacagctcaagccggcacatctggagttgtttgttcctcccggtgggttcgtggtctcggtgacttcaggagtg

SEQ ID NO: 74827 - DNA, 122 bp, Homo sapiens
tctgaaggccaccaaggagttctgggctgcagatatcatctttgctgagcgggcttattccgcagtggtttttgacaggtatgaaatgtggggagttgccttctctcctgttagtttggctg

SEQ ID NO: 74828 - DNA, 122 bp, Homo sapiens
cgcttcacaccctggttgcgagagggccgcatgctcgacttcctgcctccccaccgcgagcgcttcacctgagggacccctgatgccgcttcctcacagaacctgcaggcactggcaccacg

SEQ ID NO: 74829 - DNA, 122 bp, Homo sapiens
tattcccacctgccacagttcacatgccacaaataacatctcaccttcagtcaagaaaaacgcaaaggaaaaagatggctcatttgaacttgagcccaagctatgttcttcagactgtagct

SEQ ID NO: 74830 - DNA, 122 bp, Homo sapiens
gggcttctgtcccctcctggaggcggagggacacggactggctaggcgctggtgagggggcggcggtcccagcagcaggcatgggagtggcggcgcggcccccagccctgcggcactggttc

SEQ ID NO: 74831 - DNA, 122 bp, Homo sapiens
ctcttcactgggagggtccgcaggggctgacttgctccttaaggtcccaagactattaagcgacacccggtgaggccgggaaaggggctctaagaggcatggacgagagttggcggtgacca

SEQ ID NO: 74832 - DNA, 122 bp, Homo sapiens
tcctgagcctttcattttctcgatttctccattatgtaacggggagctggagctttgggccgaatttccaattaaagatgatttttacagtcaatgagccacgtcagggagcgatggcaccc

SEQ ID NO: 74833 - DNA, 122 bp, Homo sapiens
ccccctccgccgggatcgccgcctcctgccttccccacccgggccagccattcatcgagccgcctcttcccattggtccgcaccccgccactctgccggtcgctggccagtcaggacgcggg

SEQ ID NO: 74834 - DNA, 122 bp, Homo sapiens
aaggcctctctcctgtgcagactccgacaagacttttctgctgtgttacatcttgagaaccgggacacctggtactctgatataaacactgatcatatttacagaacaaagttttctcgcat

SEQ ID NO: 74835 - DNA, 122 bp, Homo sapiens
ggtgtggagggagaggtgcgggtgggaactgggactgcgcgcggtgcttgtgggccagcccgagttccaggtgggcgtgggctctgggaccccacgctcggagcggccggcgggcctgccgg

SEQ ID NO: 74836 - DNA, 122 bp, Homo sapiens
tggagagaatatagttcacataggagccaccagattggccatggtccttgctctgatagtcgcatgtttgacaatttattctaaagaagttcttagaagaaagaaatgcttatttgcactag

SEQ ID NO: 74837 - DNA, 122 bp, Homo sapiens
ctcgccgcgacgccccggtccctacaccatccctctcgtggggctggaaacccggccctgcgtcccccggtcaccctctctgggctgggctctggcagaggagctggcccggatccgcccct

SEQ ID NO: 74838 - DNA, 122 bp, Homo sapiens
caaacctaccctaaactatttgactctcctgatggaattaaactaatctatttagtcattcgtctcatgtaatatctttgccacaaatcctaagatcattttataagtatagggacggtgtg

SEQ ID NO: 74839 - DNA, 122 bp, Homo sapiens
tgctgggggcgccggcaccatttggagtacgtgaggtatacgggtagggcgcggccaggtcgggcgtctgttaggaaaaagactttttatttttatgtttattttttaagagacggagtctc

SEQ ID NO: 74840 - DNA, 122 bp, Homo sapiens
cccacattttgcagacaaggatatttagttccagagtggctgagtgagtagcccgggtcacgaggcagcccaaaagagagtgtcttgtccacattctgaggatgggcatcaacagatgggga

SEQ ID NO: 74841 - DNA, 122 bp, Homo sapiens
cctggtcaggaggggggaggctgaggggtcccggttgccttaggcccggcctgcacaggtcgtgaggaaaagcacctggtttcggccgggcgcagtggctcacgcttgtaatcccagcactt

SEQ ID NO: 74842 - DNA, 122 bp, Homo sapiens
aggcggaggcggagcgtttgggggcggccggggcggcttcggcttcatcggagaaggcggcgcggctgcaccaggtttggccgcgggcgcgcggggccagcgccctccagacccacggagcg

SEQ ID NO: 74843 - DNA, 122 bp, Homo sapiens
agtacctgagcccaggcccaggaacttagagctcgctggaggctcaggacagcctttgatcgtaaacctcccagtgcaacaaaaatgctaatggggttcagggaccctgcagactggtaaag

SEQ ID NO: 74844 - DNA, 122 bp, Homo sapiens
aaaagaggtcagattggtcagatccctcgagacagttcccaaattcctgacttctgttaccgcgactgttcttcgcaattccacctcggcctgtgttcaggactgtggcttttagaatcttc

SEQ ID NO: 74845 - DNA, 122 bp, Homo sapiens
ttcagcctgccaggcccgcggccaccgccggcgcgggaggccggcccacctctgcccgcgcgcctggccttaaagcggtcgtggaattatgcttcctcaggcaggcggtggacgcaccgcgg

SEQ ID NO: 74846 - DNA, 122 bp, Homo sapiens
tattaggggactgggatttacaaatattcccagaaagagagagaataacataaagttagacgaagagtagtagattttctgagcctgtttggcaagaggtagataagaataaggcaaacata

SEQ ID NO: 74847 - DNA, 122 bp, Homo sapiens
tggaaggtgctcgctttatgaagcggtgttactgctgctgcagcctttgggggcggagggcggagggagggagagatccagcaccgggttgcctctgagcgattctcctttcgctgtagggt

SEQ ID NO: 74848 - DNA, 122 bp, Homo sapiens
gaatgcctcagaattgaatccaaagttccctcagtgtcatcttataaatggccccggcttcgcagaggccaagggcccgatggtcgcagctgggagcagtccgccagccgggaggttctcca

SEQ ID NO: 74849 - DNA, 122 bp, Homo sapiens
tacttcaggcgcaagttacactatcccggtctccacagcctgggcctttggggaaactaacgtctctctgggacgttgctttgcgggattatctgcttaatggacggagtgacctaaaaaat

SEQ ID NO: 74850 - DNA, 122 bp, Homo sapiens
atttggagggcaagtaaacagttcttccttggcctctcggcacaagtttctaaagtagagcgatttctgagtttaggagcagctgggcagatctgcacacgcacccagttgtcagtgctgga

SEQ ID NO: 74851 - DNA, 122 bp, Homo sapiens
tcgcccacagcaacgtgtcattgaagctggaattttttccctctgccttatccagcacggcggctcctgctcctcctggagcacagtctgtggcccatggaggtttgctaagggatcggatc

SEQ ID NO: 74852 - DNA, 122 bp, Homo sapiens
acctgggaacagcctgcccagcaaatggtaacactcggcagaaagtggggccgtcacgaacgctggacaggagggttcaagttaaaaacagtctagaaggtctgaaaggacagggagggcat

SEQ ID NO: 74853 - DNA, 122 bp, Homo sapiens
gatactcaccgcccgaggcccgctgggctgcggcctcactcggctccacgcccggatcctcgaacttgctgctctgcttggagccccctgagctgctgggtgtagagatttgttgcaatgtc

SEQ ID NO: 74854 - DNA, 122 bp, Homo sapiens
atcctccccgttctcccagggagtgcctgctggcagggagcagtgctctgctattccacgcggtaagtctcatcaagcaggccctcctagatgcctatgactgggtaaataagtctgcctaa

SEQ ID NO: 74855 - DNA, 122 bp, Homo sapiens
ccccaatatgccaatgttactaatacttctacagagaaaggacccacccaaatccccaaccgccaaggaacccgtccgtgctgctgaggcaggagaaagacaagtgctcttcaaacgccctc

SEQ ID NO: 74856 - DNA, 122 bp, Homo sapiens
cccagcactgggataggacccgcccgcccagtcctcattaaatatggcagcgagcggggccgacgtactgcggctgcgcaagttgaaactcctcctggcagctcctccccggcgggcctccc

SEQ ID NO: 74857 - DNA, 122 bp, Homo sapiens
gctccgcgccctggaagcagatcttgcagatgggctggtggtgctggtgctggtgcccagcgcgctggtcgccgccgccactgctgctgctgcggctgctgcacaccgagcgcgtctcgggc

SEQ ID NO: 74858 - DNA, 122 bp, Homo sapiens
gccgggaagccactccttctaggagcgcagagccttggccctccctgggagtctggtcggcgggctgtggggtcccaaaatcgtgaccccggcccctctcccctcctcccccaccatgtccc

SEQ ID NO: 74859 - DNA, 122 bp, Homo sapiens
cgctgcccccagcgaccccgataacgtggtgttgtgcctgctggcggcggacgaggacgacgacagagatgtggctctgcagatccacttcaccctgatccaggcgttttgctgcgagaacg

SEQ ID NO: 74860 - DNA, 122 bp, Homo sapiens
aataatccaattgtgttattctaaaagtcttcattaaggagattaaatcaggatccatttcgagacaatgaaaacagacaacttaagaggtaaggatagaatatttcagctagtggctttaa

SEQ ID NO: 74861 - DNA, 122 bp, Homo sapiens
ctgattggctgaagccagaggggcggtggtggggtgattccaagggcccagagctctggccggcggaccttttccttctggagtttccccggcgggtgtgagttgttgcggggtctggggga

SEQ ID NO: 74862 - DNA, 122 bp, Homo sapiens
cggtccctttgagatgtatctcccacccaggagtgtttcttggccaggtgtggtggctcacgcctgtaatcccagcactttgggaggtgaaggcaggcggatcacctgaggtcaggagttcg

SEQ ID NO: 74863 - DNA, 122 bp, Homo sapiens
ctgatgatgattcagcatcagtttggtcaccattatcgaagcgttttgaatgtgtagctgcgacctaaataacttcccagaggtaaatgcatcctgtaggtttacaacaagcagtattatta

SEQ ID NO: 74864 - DNA, 122 bp, Homo sapiens
actcggctgcctttgcattgccctgaaatagccctgtccactccttcccacaaaccctcgcgcctagagcagctgagaaggaggtcctgggtatcctggccccaccccagcgtgtccagctc

SEQ ID NO: 74865 - DNA, 122 bp, Homo sapiens
tgtatcctagggccatcatgctttttaatttgtgatgttccaattgatagtgacattggccgaaacttaaaaaccagtcaacagaaaccattcctggctccctgggacaatggatggaggga

SEQ ID NO: 74866 - DNA, 122 bp, Homo sapiens
cttttctaaggatcatatgagtaatgccaggcttattgtagggaacgcagaaataataaccgtaaagagtaaaaacatataatcccagcattttgagaatcccataattagtaattaggtgt

SEQ ID NO: 74867 - DNA, 122 bp, Homo sapiens
aataatccaagtgattgattagacctggcatggcttggttgggctggagaaagatcggggcgcgctggaaaccccgcgtgaagatgaaatgactgtagctccgtgctgctcctccaaactcg

SEQ ID NO: 74868 - DNA, 122 bp, Homo sapiens
atgggtggcaaacaacatcaggaagaggggggcatcctgcaggggctcccaccagagccccgacctcgcccttcagatcgggagctccagccttcaccagaagctgagattggagctgttcg

SEQ ID NO: 74869 - DNA, 122 bp, Homo sapiens
gaagggagcagccaggggcagacaaaaccctcagtaaagtccacgagggaagagaaggaacggtggatccgttccaaatatgagaagaagctctttctggccccactaccctgcactgagct

SEQ ID NO: 74870 - DNA, 122 bp, Homo sapiens
ccgcggaaacttctgctcaagtgactttccccattttctcctctgcctgggacgggggttcgccttgcgctctttctctggtccgcgctcactgcggggttccggcccctccgcccgtggag

SEQ ID NO: 74871 - DNA, 122 bp, Homo sapiens
agcagacatcactataacaaagtgatctcaaaatattgtttattaaaagagacaatgagacgaagctcctggcaaggaataagtgactaaaccatggctgttctgtggtctttgcagtaata

SEQ ID NO: 74872 - DNA, 122 bp, Homo sapiens
agcatctagagctcctgcgtggcagccagctgggaaagccacccctatgtcatgctcttccgagggcggcagcagctgtggtgacggctgcgatctgaaggggcccctccaggccccgcaca

SEQ ID NO: 74873 - DNA, 122 bp, Homo sapiens
acccgtgactgaaaagacaagaactaaggggagggcccgccacaccgcccgtcagtgccacgacattccacctggaggcaggcaggcccgacttcctgcagaaccaacacacaccccctcaa

SEQ ID NO: 74874 - DNA, 122 bp, Homo sapiens
aaagcttttatctgtttttatcctcagtgttctgaaattttgcaaaaacatgctttactacgggtctcgtgttgggcactagatgtattcttttgatttggaaaattatgtcctcaattctt

SEQ ID NO: 74875 - DNA, 122 bp, Homo sapiens
cctgatacttcagctcaggtaggcgtttccggagaattctgggaagagtagtccattttacgggaagtgtagtccactggctcgtggaacactgggtattttggctctggcaggtgaaccgt

SEQ ID NO: 74876 - DNA, 122 bp, Homo sapiens
ggtggctggcacggagaagcatttcctagaagagcaactgccagacatggtggaggtggccgtgcttccttgtgctgagtgctgagaggttgctgcctcactgtgacagctccctgaggccc

SEQ ID NO: 74877 - DNA, 122 bp, Homo sapiens
cccccgcacttggaaactgagtctggcggcagggctgggccacccagagcttgcatattccggaagggaaagtgactccagaagggagagaggaagtgttgagtttggggacaacctggcgc

SEQ ID NO: 74878 - DNA, 122 bp, Homo sapiens
tggatggatgagtggatgatggatggatggatggatggatggatggatggatggatggaacggttgataggtagaaggaaaaaaggaaggattcatagatgagtgggtaggtgggtggctga

SEQ ID NO: 74879 - DNA, 122 bp, Homo sapiens
aggcaaggagctccaggctgcagtgagctatgactgctcctatgaacagccactgcactccggcctgggcagtgtagcaagaccccatcgctaatttttttaagtgcattaaaacacagata

SEQ ID NO: 74880 - DNA, 122 bp, Homo sapiens
acccacctttagcccccatccctgccctcacccagaccttgccttcctcctctgtcccttcgtccccagtccagaccacgcccttgagccaagctgtggccacaccttcccgctcgtctgct

SEQ ID NO: 74881 - DNA, 122 bp, Homo sapiens
gcagaggagccttcgcagcagctgctgcgggaacgagatttgtcccttctcaggccaaggcggggaaggacctcgaagaaacggagggcgccgggctggcagttcaggctcagggccgctgg

SEQ ID NO: 74882 - DNA, 122 bp, Homo sapiens
ggcggcggcgccggctgcggtggtccctgggttgtcaccggaaacggcatcatctttcagcgcccgccccgccagggcacgtcccccaccaccgcgaccttcgcggccgccgcccgggtcat

SEQ ID NO: 74883 - DNA, 122 bp, Homo sapiens
catccgccggcccggggccagagggccctgaaggcgcgggctgcgttctgcgtctctccgcgatctctgccggaccggaactaagaccagaccattttcttctggagtaagtgtgacataaa

SEQ ID NO: 74884 - DNA, 122 bp, Homo sapiens
gctctcacggcctgcaccagatacgctgcggggaggagggaacaccggtcagcagcgccacgaccccgccctgccgcccactgccctttcctgcgagaccctggctccgcgcggcctcatcg

SEQ ID NO: 74885 - DNA, 122 bp, Homo sapiens
ctctgccccctccagcggctgctgcagcaaaggtcacattcctggaacactgggcctgggcgagctgggagataagacctttgccaagctcagaatcattaggtcatcggaaggggaattag

SEQ ID NO: 74886 - DNA, 122 bp, Homo sapiens
cctttctactcaggtgaaatttggtatttagtgattgcctgccaggttcaagatgctgaccgaggagcttaccatcaaaccagagaccagtaccaatagagagtgaacatgatttatcttaa

SEQ ID NO: 74887 - DNA, 122 bp, Homo sapiens
ttaaaggaaaaataggttttgtaattccagtaaatcatttccaaatgctacaaggaaaaacgcaacactgctcactggacatgaagataaattagggaaagccccacctaccctgccccccc

SEQ ID NO: 74888 - DNA, 122 bp, Homo sapiens
gcaagagtcaagaacaggtccctgctcacctgatctcacctcttagcaactctcattttccgaaagagagaggcaatggcagctacaagtctgggacatctgctcttctctaaatccagtga

SEQ ID NO: 74889 - DNA, 122 bp, Homo sapiens
tttctccctaatggaagccctgatcccccagagagctacaggtctgctcccgacgggcctcgggcctgacccgtccacacagggccgtgtcaacagcagcgactcaagggacgtgtgtacat

SEQ ID NO: 74890 - DNA, 122 bp, Homo sapiens
tgttcacaaaagcctatgagataggctcatgttcaaatctgttttatgataagggaaactcggaagagagatgtgaaataacttgcttggggttacaaagctactaagaggcagagaagaga

SEQ ID NO: 74891 - DNA, 122 bp, Homo sapiens
tcagagggagctggcctgctcttaccttcaggtgtcggcggcggctcctgccgcttcccgcgggacaggaaggccttgggcagcagcagcgacagagccaggacaagcccagaagccagagc

SEQ ID NO: 74892 - DNA, 122 bp, Homo sapiens
gaggtgaacgtgggggcagcatgctggctgcccggcccctgcctgggttctgagttgctgcggtgtcgcgggagctgaggccgcccagggcgtggagcgacttctgcgtctcgtcccagggt

SEQ ID NO: 74893 - DNA, 122 bp, Homo sapiens
acagggaggctcctacaggacgtgcaggtgaaggaggaaaatacctccggggtcaggagccgggtgcagtggtgagttgaactgcatttgccgaaaagatacgttcaagcctgagccccagg

SEQ ID NO: 74894 - DNA, 122 bp, Homo sapiens
tgactcctgtgatgcctcatctgtcaaatgcacaatcctggcaaaactgcaaaggtgaaacgtgtacatgagttaaacttttaggctcttttgaagaacaacaaatggattttctttattta

SEQ ID NO: 74895 - DNA, 122 bp, Homo sapiens
ggctgggccgggtcggggctctgggaggcgggagcaggtgagcggccccgagcggctttacgattgtctgccaggcgggctcctgaagtgtgggcatttaacactcgtcacgtgagcgctgg

SEQ ID NO: 74896 - DNA, 122 bp, Homo sapiens
ctgtggagatagagaactaatgtaagccattcactccaagggcctatctaataggaaagacgagacagtttttgcacaaagttcaattaatgttttgtgtatatgaataaatgtttcctatc

SEQ ID NO: 74897 - DNA, 122 bp, Homo sapiens
acaagagtgacacttaaaactgcaccccagactcctgtggttgagatgctgcatgcccaacgtggtctgacttcccactgactgacctaggcatagcaccaggtggagcatgcagacatatc

SEQ ID NO: 74898 - DNA, 122 bp, Homo sapiens
atctcaactctctttccgtaaatcaaagtgaacacacacacaggaatgtattataagcaccgcaagtttaacatttctaaaacagagctcttcttttcctctcttcgcttctccaaatgttt

SEQ ID NO: 74899 - DNA, 122 bp, Homo sapiens
tgctggctcctcaccaaactctactccgcattgactgtgggctcttgttctagaggcacccgcatcctcaggatgaaatgtgagtacaagagcagagactgccggtgctggtgtttgcaggt

SEQ ID NO: 74900 - DNA, 122 bp, Homo sapiens
atgtctcaatccaaaaggagaaaaaaaaaaaaaaaaaaaaaactcaaaaaagcccaaaaacgtcaccatcaacacagggtcactggagcatcatttgtcaaagttcctaaagaagaacatac

SEQ ID NO: 74901 - DNA, 122 bp, Homo sapiens
tcaggcttggaacacccatctgtttgatcacaggaaggaggatgaatgagaaccacaaaccgtctgagagattctgtttgaactgtgtaggctaagcattaacaattcccagcattcctgcc

SEQ ID NO: 74902 - DNA, 122 bp, Homo sapiens
ctagagagggcacagaagctctgagctcctttccatgtgtcttgccctgtgcatctcttccgtctagctgttcaccaggatcctttgcaatatcttttacaataaatgggtaaataaaagta

SEQ ID NO: 74903 - DNA, 122 bp, Homo sapiens
tttaggcgggaggtcattcttctacccaccacaattggtttgctgctggatcaccttcaccgtggggtacaggcacagggggtatactggtagcaagtcagctccaagaatcaaggtcccca

SEQ ID NO: 74904 - DNA, 122 bp, Homo sapiens
aaggatctgaccaggttcataagtaggtacgttagtgctaccaccacagccccattcagtcgccttaacacacacgtctccttctttctgtttcaagcaacccctactggagaatttttcag

SEQ ID NO: 74905 - DNA, 122 bp, Homo sapiens
tagcccctcaacgttcccaaatagatgcccctgttaggcattcccctagacctgggcagtcggtgtcctgcctgcacctctcgctctttagaggccgtggttctggccctcctctggttgcc

SEQ ID NO: 74906 - DNA, 122 bp, Homo sapiens
tgaatcttggttcacaatctcgaggtgtcaagcctgcagagttgaaatcctccacagagtcgggaggtgtaaaatcatctgaattgactctagggccaaaacttcaaggtgcaaaacctgtg

SEQ ID NO: 74907 - DNA, 122 bp, Homo sapiens
ttagcgaatgaatcaatgaataaactggcaattcgtgtctggttcatgggcaccaaaaaccgtgcgaaatggataaatgagcaggtaatggcagtacaaagttcggatctagagaaagatcc

SEQ ID NO: 74908 - DNA, 122 bp, Homo sapiens
aggccgatcccggtgcacacggtgcccgtggctgaggataaggtcagggggctggacccacgtgtggcgagggagggagcgggtggagagagaggcagctctgggtctggccgcctgagctg

SEQ ID NO: 74909 - DNA, 122 bp, Homo sapiens
accccctggcgcccggcacccacgtgcggtaaccgcggctcctcgagagctccagggatgcggatctacagtaagggctgtggccagatgaatgaatgcacattttttagtgggcagaaaga

SEQ ID NO: 74910 - DNA, 122 bp, Homo sapiens
aagtaaaatttgaaaagaaaacccaggctagagcattggggtcactcatttcccatccagcgaagggagagctggtgcctggctgggggaggttaggaaggcaagtcttgggatctgatcac

SEQ ID NO: 74911 - DNA, 122 bp, Homo sapiens
ggggccaggctcggacggacccagcgggcaggcaacccgaggtgctcctgagtggggtctcgactgggaagggggcgcccaggacgcaggtggggttcctgccacacgacactgaggggtgg

SEQ ID NO: 74912 - DNA, 122 bp, Homo sapiens
cgccctgcccccgagcctcagaggaggtacaggcaggcccaggctggataattatcccaacgtcctcctggccccagaaattgagtcagggaaggatgtgtgactccacagggccaatcaga

SEQ ID NO: 74913 - DNA, 122 bp, Homo sapiens
ccagtcccagctctgcccttggccattgtgtgacctcggacaaatgcttttccctctctgcgtctcggtctccctctctgtaaaacgggtgggtctgggggagtcttgcgggagtgaggttg

SEQ ID NO: 74914 - DNA, 122 bp, Homo sapiens
tagccccttccttttcgggaggtgtagtctgcgaggcccctggaaaagcctggcggggggcgtggttctccatccatggcagctccctctgcccactcgggggactctcccccgccaggact

SEQ ID NO: 74915 - DNA, 122 bp, Homo sapiens
tattcagactagcatggcagtgaccctgttagtacccaaggccaattcctaattaacccccgccccccgcctctcattttacatctgaaaatagactgcaaaatttggagccagcaaaagta

SEQ ID NO: 74916 - DNA, 122 bp, Homo sapiens
ggtgtcgcgtgggagcgcgccggagaggggcggtgcttccggggcggtaccgtccggccccgccccctcaactcaggggcccgccttctacgcctggaaccccgcccacgagctcctccctt

SEQ ID NO: 74917 - DNA, 122 bp, Homo sapiens
agatccagctcgcaggcgctcccggccgtcttaaaaagcacatgtgacatgtgtaagcgccgggctaccccgttctcccccatcccaccccctggggccagtcccccctccccaccgccgcc

SEQ ID NO: 74918 - DNA, 122 bp, Homo sapiens
tgcaggaaagtcctgcggtttgcagacaacatctgccttttgcatctcctgggcagacaccgggaatcagagactgtgctttgcacccagaggtggctgtggaagtcatcccccttgttccc

SEQ ID NO: 74919 - DNA, 122 bp, Homo sapiens
ggacatcagatgtcccgtgaggaggagtgtgtactcacaccaggggagttgactggtaggcgagccaccttgggcctatgtccgcatggtctccaggtcaaaattcacatcctactgattga

SEQ ID NO: 74920 - DNA, 122 bp, Homo sapiens
acagtttgccattccatacaaatttggaaacaggtttttaaaaaacagcatgacgcacaacggggacggggcgggggagggcagtggcactggggccccaaatctccgagtcactgattgta

SEQ ID NO: 74921 - DNA, 122 bp, Homo sapiens
cccaggtgtgatggatcctccaagccgctctttgagccgctgtccaggtctgcaggtcctcgttcagggacatgaaatctccttgtcgtaggcggacttaaagtgtccttcgaggaagctcc

SEQ ID NO: 74922 - DNA, 122 bp, Homo sapiens
atggaaattctgaaagatgatctactggataatgtgaactcaattgccacaaagttcccccgggaattagctgttacagtaatatgaagctttgccattttcctttgaccacaaacatctgg

SEQ ID NO: 74923 - DNA, 122 bp, Homo sapiens
ggaggggtggagtgctgtgatctcgacaacttactttcaaagacataaagcacagatctccgcacaggggatgtgtgtgttcctgatgtaatttgcataacttttctgtagtttgaaatgtt

SEQ ID NO: 74924 - DNA, 122 bp, Homo sapiens
tcctctccctctggctgcccacagactcttgtcacaacgcaggccgtggtttaaagggaacgtggtctacagcccgtctggcagcttctccaggcagctgaacttgtttccgtttttggtag

SEQ ID NO: 74925 - DNA, 122 bp, Homo sapiens
tgccgcctcccagttcccgcatcagtggcctgcacagggcccttggggcgaattgcagcacgcctcggggcgagcggcaagggctggggtgagtgcacctgcacccaggcggtcttttcacg

SEQ ID NO: 74926 - DNA, 122 bp, Homo sapiens
tgggaagaaatcttcttgtgatggcatatttgcttcctatatttcttctggaatcatgttcgcttggcttcctgattaaaaacacagttttattgctctctgcactgccaaaccaataaatt

SEQ ID NO: 74927 - DNA, 122 bp, Homo sapiens
gatcagccttgcttttctacagcacagctgggcaaacatcggcgctggtgctagcatttccggttccttgcgcgtgttcattcatgccatcttctgcacatcctggttaccatctccatttg

SEQ ID NO: 74928 - DNA, 122 bp, Homo sapiens
cacaccaacgcgtgctcccacgcgccgcgactcccccgggatgcctgccccacccctatccgcagccagcgtccccctgcccgccggccccgccacggtccatcagggactgcgggcggcgg

SEQ ID NO: 74929 - DNA, 122 bp, Homo sapiens
ctctatggtcgagcgtttcagggatcggccaatcgtaatccagatctcgtaggaaagccccgcctctatccgcatggaggcgggaattgccacgaagctcctgtggagggagaggaagcagc

SEQ ID NO: 74930 - DNA, 122 bp, Homo sapiens
cggcgcagtcagggtcgtggccggcggcgggtgcggcctcctctaggcggatgaagtactcgctgcccagcgacgggctgtgcgcgctgagcaccggaaccacgcccgggggcgcgccgtcg

SEQ ID NO: 74931 - DNA, 122 bp, Homo sapiens
ccaccatccccactgggccttcggacttccccatcagcagggctctggacgggagagcaccgcggaggaacctgcaggcccagggcaggggagaggggagaggggcgtggagctccccgagc

SEQ ID NO: 74932 - DNA, 122 bp, Homo sapiens
acaagagctcccaataggagacaccgtaaatgcctcacaggggtaaactacacacagacacgcatggcggtgcagcggacaccagaacgcaagccagacactcgcactagacacctgcacag

SEQ ID NO: 74933 - DNA, 122 bp, Homo sapiens
tacctccagccagctccttgtaaccctggcaacacggcccgcccgcgaatcgtcacgctacgattggtccgtggtgctaaagcctgaaagcgaattcctcagacattggtccgagtcactgc

SEQ ID NO: 74934 - DNA, 122 bp, Homo sapiens
ccctttccccgcccacccccgggccttggctcccggctgcgggccaggagaagagagcgccgcgtacccgctgcttcccaaaacccactgagcctgatgcgcgcgcctccgctgtgccaggg

SEQ ID NO: 74935 - DNA, 122 bp, Homo sapiens
gcagaatcccggacggagcagccctcggctgggccctcagcgcccgcagcccactggccgcgccctctcgcttaccgccccagatgcccagcttcagctgggacttgttcaggttctccaca

SEQ ID NO: 74936 - DNA, 122 bp, Homo sapiens
cccctttcgagtctggctgcttttgcttagccctgcgcttgtgagatccctccgcggtggcgtggagaggtgtggccacttcccgcttcgtggcaagtcgtgttctgccatttctccgaata

SEQ ID NO: 74937 - DNA, 122 bp, Homo sapiens
ccgaagacttttcctcctctgagctcccgccctctctgcagaccgtgctacctcctgttgcgcaatgattgggtcctgaattttatgtaaatcatatttatgaacaacgtccagtaataagt

SEQ ID NO: 74938 - DNA, 122 bp, Homo sapiens
ggccctggaggcggcaccgcacctgtgcattgagcacaggtggggaaacttaggcctgagcgaggccctggccatgaagccccgcccagtagcgtcagttgcggaactcgaaattcatgggg

SEQ ID NO: 74939 - DNA, 122 bp, Homo sapiens
caaagcgtcccatggtcgtcccggggcacacggggtctggagatgccaccctgccaccttcgcaatcctgtcagctggtttgttttgtgaacagagtagagatttcagaagttgtctataac

SEQ ID NO: 74940 - DNA, 122 bp, Homo sapiens
cggagggcggggtgggggagccgtcctgagccccaggacagtggacctaagaaggggcaccgtgaccgaccgcggttcggtcagcgagtgggacgggccaggccgccgccgcctgaacggag

SEQ ID NO: 74941 - DNA, 122 bp, Homo sapiens
tgtacctacctcccagcacttgaagtggggcctgcaaaccgggtttgaaatgtggtcagacggaaatgcagtagccaggacagaatgggaaactcaggaaggaggctgaggtgggagtctcc

SEQ ID NO: 74942 - DNA, 122 bp, Homo sapiens
agctcagacgcggccgcatcccggtggactgtagaggcggcagcgagctagagcccgagtcgcagctccgggccgcagagcgctgggcgagcgcgagcgccagggcaccggcagggcaggca

SEQ ID NO: 74943 - DNA, 122 bp, Homo sapiens
atatcataagaatgttctttacccctgagtttatttttgtaaactagaacatagtacatgcgcaaactaggaataacagcacctacctcaaagggtgattgtgaccatttgataagctgggt

SEQ ID NO: 74944 - DNA, 122 bp, Homo sapiens
gaggagagggggaagtcatcaagggtccttaagtcacctaaatgccgcgggggtggcgcgcggggagtgggtttgggcaccctcctcgccctcccgcgcggaaaaactggcacatagatgcc

SEQ ID NO: 74945 - DNA, 122 bp, Homo sapiens
tttccgagacttatttcgcgcggtcggagaatcagattgtgcccacaaggcggaaatgtacgacagcgggttccggtgaccacgaaggcggcaaaggcgacggaatggaggaggtgcctcac

SEQ ID NO: 74946 - DNA, 122 bp, Homo sapiens
ttcaggatgtggtatttgacgccactctcagaactgaactccttcggacacagcagacagcggtacttccctgccaggtgggccccctgcaatgcataggcaggccagtgccccagcccttg

SEQ ID NO: 74947 - DNA, 122 bp, Homo sapiens
cccctctggctccttccctcaggatttgcggagcctgtaataattgagggacaggcggggcgccatggctcacgcctgtaatcccagcactttgggaggcggaggcgggcggatcacgaggt

SEQ ID NO: 74948 - DNA, 122 bp, Homo sapiens
caccccttcttccgcgccccctctgccgggggcctgtgtgtgtgcgcgcgtgtgtgcacgcgctccgtgtgatgcctaaaaaatctgaacaaagagacccaccaaaaataggcaaaggaaca

SEQ ID NO: 74949 - DNA, 122 bp, Homo sapiens
cttggggcgatctcaaacagccttccttgagtcccttcacagtctgggggtcccatctgccgtggccgctcacccctcaccccacagctcttacctgctcgacagtggcagggtccatagcc

SEQ ID NO: 74950 - DNA, 122 bp, Homo sapiens
tcaatacctctgggtttccgccggttacgcttaattttgacatatcggtcagactggtgccggataaacttcttggttctctttttgacgatcttgggcttcccaagggttctgaggacggt

SEQ ID NO: 74951 - DNA, 122 bp, Homo sapiens
ggggcctgagtgcaccagtctgggggttgggggcagagggctgagcatgaggcctcaggccggaggcaaatagttctgggcaaaggggccagtgacctgggaagaaaccctgtaaatccttt

SEQ ID NO: 74952 - DNA, 122 bp, Homo sapiens
ggacgccggtgggagcctagtggctcctgcacaaagcgccttcttggtggggaactagaccgcccaggcagcgagctcagggaggctcgggggccgaagcggcctggggttcaagaacctgt

SEQ ID NO: 74953 - DNA, 122 bp, Homo sapiens
ggaccatgggagccttcaaatagctgcgctggcgcaatgataccttaatgatagattttccgttcttatttttagctctcattcgcctacacagttacacggcatttatccgagaacgtcac

SEQ ID NO: 74954 - DNA, 122 bp, Homo sapiens
cgggaatccgaaagggaaaggaggtgcgcaggcgccacacacggcctttacggcaggagtcgtgagcgtcgccagcagaggtcgtaattcatcgcctttaaccttccctgctcttccgcctc

SEQ ID NO: 74955 - DNA, 122 bp, Homo sapiens
ggagagaaggaggatgaatgcagtcgcttgtctaaagctaaccaaacggaccaaagcctccgttcatgggtgtcccgcttggtgcccttaaccctgatgctcttaacctgggcatgataagg

SEQ ID NO: 74956 - DNA, 122 bp, Homo sapiens
tttcgtttcgcagctgtctcccctccgcagcagatacctcggtccagatctccggattgtcgggggacgcaggactcttcgaggaaaaccagccgaatgagatcaaaagttgggggtggggg

SEQ ID NO: 74957 - DNA, 122 bp, Homo sapiens
ccatcccgggggtgggcagtcagggccaagaacgcacagtaaacccccagtacacacaagcgcacacacgcacatgctgacagcactcgcatttttaagatggggaaatagaggctcagagg

SEQ ID NO: 74958 - DNA, 122 bp, Homo sapiens
cacccgaatcaacttctagtcaaattattgttcacgccgcaatgacccacccctggcccgcgtctgtggaactgacccctggtgtacaggagagttcgctgctgaaagtggtcccaaagggg

SEQ ID NO: 74959 - DNA, 122 bp, Homo sapiens
ggatccttagtcctttagagatggactaaatgtctgccatcattacaaaagcatcttgaacgtgatggagcttatgctgagagctaaagtttatgtatttttatcttttaattccattttcc

SEQ ID NO: 74960 - DNA, 122 bp, Homo sapiens
cacacgcgtactctctaggatgccggagcggtcttctcagtggttgtgtggttttactcccgggaggagtttccacccggggatcctcagagaccttgaataggaaagaaagtatatcattg

SEQ ID NO: 74961 - DNA, 122 bp, Homo sapiens
taccacttccaccttggcaagtgaagccccactacaatggaagcgtcgggcgtatcctcccgggcctctttccctccctccccggcccttccctcttccgatttccctcccgccctttcccc

SEQ ID NO: 74962 - DNA, 122 bp, Homo sapiens
ttgaagacaatgaggacatttgtaacaccacctccttggagaattgcacagcaaaatgagcgggggtgtttgtgcctgtttctcttatcctttcccgacattaggttaacacagctttataa

SEQ ID NO: 74963 - DNA, 122 bp, Homo sapiens
cgctgtcgcggccctcgctgtccagcgcgtcgtcctcttcctcccgctccaccatctccgcgaactcctcaatcttctgcaggtagcggcgcttgcagcagccgtccaggtggtcctccgcg

SEQ ID NO: 74964 - DNA, 122 bp, Homo sapiens
tagcactcagcaaatgttgccggttaggatttaacccatgttttcaccctttcctcaacacgccccttctggctggctggctgaattcgaaagactgagcaaattccagagtaaacaagatg

SEQ ID NO: 74965 - DNA, 122 bp, Homo sapiens
tgaccgcacactcaagcggctgcagctccagatggacaacctggagtcccgcgtggccctcgaatgcaaggaaggtctgttggggccagggctcactggggcaactgccacctccgagccag

SEQ ID NO: 74966 - DNA, 122 bp, Homo sapiens
gctgggggcctgctcctgaggcaggagggagcacacaggcttggcgtagcctctggggcacgaacagcagagagctgaggtcagggtccctgccctgcccgacagcttggacaggggaaagg

SEQ ID NO: 74967 - DNA, 122 bp, Homo sapiens
cccaccgccttgcgtacgcacaggggcccggggacggggtggccgggaagggcaggggaacggctgccccagcccgcgccgggcgtgcatacacaacgcacccacactcacacacacacaca

SEQ ID NO: 74968 - DNA, 122 bp, Homo sapiens
ttctcattgttcaattcccacctatgagtgagaacatgtaacaggccaatttctgcgccccgcagcatgttgtcccggagcaggtccccgctggaaaggtgctttagctcgaagtattgagt

SEQ ID NO: 74969 - DNA, 122 bp, Homo sapiens
gggaccgccaggaagggacccgggggagaggcggggctggacgggacacgttagggtctgcgatttcgtgtgatgcccacagcccagcgcccagagccatctgtagtgtcttgtggaacggc

SEQ ID NO: 74970 - DNA, 122 bp, Homo sapiens
agctgtgctcaaatgagctccattacactgccaatgctgaggcttgctgtgtcgaccgtacggtcaccatggtcgccatgccccgaggacctggtcacttccttgactacctgtcctgcctc

SEQ ID NO: 74971 - DNA, 122 bp, Homo sapiens
taagcaaggcctaagtcttctttggaaatcccgtgttgtacccttcctttgcacaattaacgttcctaattattttcatccattttcttctttatttgtgccatagaggaaagagcactaat

SEQ ID NO: 74972 - DNA, 122 bp, Homo sapiens
ccatcatagacgcaggtgctgggccggcatccccctttcacaggaaaccaggcgttggggcgaatgccctttgcagggtcactgcgtgtggccgagcaggccaggaacccgggcttatctca

SEQ ID NO: 74973 - DNA, 122 bp, Homo sapiens
cgggtttccgggagagggcgctgtccttgctcagtgatggccggagagctgcaccctgcacgtctgggcttgaagacagaaatccaccgtgaggtgctccaaggaacactgatgggcagttt

SEQ ID NO: 74974 - DNA, 122 bp, Homo sapiens
agacagccttcaccccatctggtgtcttcaccctcaaattcccatggcaggtgggggatccgtcacccagaatgtaccacagttgggccaccacgctgtggactgtaactgggcaggaaatc

SEQ ID NO: 74975 - DNA, 122 bp, Homo sapiens
gccgtgggggtgtctctggcgtgctcagtgggccagtggccagacctagggacaactccccgggaggctggcccagctgcccggggctagatgacggggatctggatgagggtgggggtggc

SEQ ID NO: 74976 - DNA, 122 bp, Homo sapiens
gcctcgggccctagaagctccagcggggccggggcagcggccggacgggatgggtagcagcggcttcctagccggaggcgcgtgcgtagtgcgtgcgtgcgtgcgtcgtgcgtgcgcgtgcc

SEQ ID NO: 74977 - DNA, 122 bp, Homo sapiens
cacctctcccttcacctgcacggctcattagccgcattctgctgctcggctgctgctttccgtgcccgcagttccccgccctacctcgagggccagcacctgctcccctcctcccggacccc

SEQ ID NO: 74978 - DNA, 122 bp, Homo sapiens
gctgctaggctgcgcccgagggtatttaaacccaccctggctggcctgtactcagatcttcgcggagcggatcagcggccggagcgtttggcggactctgcgtggacttggagctcacggcg

SEQ ID NO: 74979 - DNA, 122 bp, Homo sapiens
tctggaggatggctcccaggggctttcacggccagcaccccggctgatgggggcaggtggcgtgctccgagggtctcctgacactcctaggccttggctttttatcagagaggcagtagctg

SEQ ID NO: 74980 - DNA, 122 bp, Homo sapiens
ggactaatcacagtaattgttaagcacaagtcccttaagcacgtatgtcctttgatgtggcgtgcacgttcagcatcatttctgccctgtggcaaggatgctcgcattttgctctttagacc

SEQ ID NO: 74981 - DNA, 122 bp, Homo sapiens
aacagagatcaccacaggggcctgagccacctgggacgcggggtgtacggagggcgggggcgagctgaaacagccaatccggcaagccgcgcgtgaggccagacgccagtcccacggggatt

SEQ ID NO: 74982 - DNA, 122 bp, Homo sapiens
ggtggccccgcccctgcagaggctgattggcctagcgcgaggtaggtcacgtgccgagggcgcctctggccatgtgacggggcgaggcgggactccgctagctctctgggcagtggggagct

SEQ ID NO: 74983 - DNA, 122 bp, Homo sapiens
cacgttcctgcgcacgcgctctgcggcccttaacgtcccgacttcgccctcctctggccacgcccctgcccgttaagggccctgccacccccgtgacgtacctatcttccctcgggcaacct

SEQ ID NO: 74984 - DNA, 122 bp, Homo sapiens
gaataccaatttttgctccacttctgtcctatgttggcctgggctgatgttgaaagctctcggtcaactgagatagggtgtgcagaatttatatatataaatatatctcctccaacccctcc

SEQ ID NO: 74985 - DNA, 122 bp, Homo sapiens
cggtaggtcagaacagtcgaatatcggcagtttcttatggtttcgatctaagagctacagcgtatctgggaaatgcgtggccacactggcgctacgctccaggtttatcgtgcgaactctaa

SEQ ID NO: 74986 - DNA, 122 bp, Homo sapiens
gtgtagtggaagggaccctaggctactcaccttgaatcaaaaaacctagagttggctgggcgtggtggctcatgcctgtaatcctagcactttgggaggcagaggcaggcagatcacctgag

SEQ ID NO: 74987 - DNA, 122 bp, Homo sapiens
agtcatttcgctggtaggagcgtcctcttcgaaacatccaagagcaaagggcaggcgccgcgaaagttaagagactggcaaagggctggacttcccagagtggcgccttagccccgcaaagt

SEQ ID NO: 74988 - DNA, 122 bp, Homo sapiens
caggtgtccgctgacgcaggtgtggaccctcgggtgtccactgatgcaggtgtgggccctcgggtgtccgccgacgcccggtgtggaccctcaggtgtctgccgacgcccggtgtggactct

SEQ ID NO: 74989 - DNA, 122 bp, Homo sapiens
ttgcaaaaaacctataaccaacatcataattaatggtgagaaactatatgctttccccctcggatcagaaacaagaatgtctcctctcactacttctagtcaacattgcaggaggttctagc

SEQ ID NO: 74990 - DNA, 122 bp, Homo sapiens
tctccgtgaagcagctccattggtctcctatcagtgcctccaaagcttgatatgtcttctcgccaccggatctttgcacgtgttatcatatgcataattttttggcttgtgtctgtttcttc

SEQ ID NO: 74991 - DNA, 122 bp, Homo sapiens
gttggctaccattctgccttaaattcttccatgcatgaaatgtatagggaactatatatacggagatggcttcaagtgtataaattgtctccccaatgaaattggaagcttcctcaaggcaa

SEQ ID NO: 74992 - DNA, 122 bp, Homo sapiens
ccggcctgcgctgatcagctttttcttcagctcggttcggcgccagttgatttttccccccgggatcccccacagttgctcggcgacgccaatatgcggtccgtacttccgcctggggtttg

SEQ ID NO: 74993 - DNA, 122 bp, Homo sapiens
aaagaaatctcagataattcacttcggagtagaaacctccttcagccgcgctcactacggcgcccggcttcgcggcaccggccactagagggcagtggccgccgcaaagccgacgcgggcgg

SEQ ID NO: 74994 - DNA, 122 bp, Homo sapiens
ggtgatccgccaaccccggcctcccaaagtgctgggattacaggtgtgagcctctgcgcccggccagtggtttacatttgtgtttgctcctaggctgtgggttctttgagggcacaggccca

SEQ ID NO: 74995 - DNA, 122 bp, Homo sapiens
tagtattctttatctcataagtaagattgtccccatttcacagatgaaggctcagagtgtcgtgaaagttagagcacccaagttgcacgactggcgagtccagagccggctctgtgtgctgt

SEQ ID NO: 74996 - DNA, 122 bp, Homo sapiens
aacttcggccttggggctgggctctttgatccagctgcgggtccgaaggaacccgggttccgcctcggggggctgcggcgctctagcccccgccgccagcgcgaacccggactccggcgctt

SEQ ID NO: 74997 - DNA, 122 bp, Homo sapiens
tgttttattttgttttgtttttggtagccgcgtagcagagaggcgggcccttttcccaggcggagagcgaggggtggataaaggaacgtagacctgggccctgccctcttcagcccgccctc

SEQ ID NO: 74998 - DNA, 122 bp, Homo sapiens
gtgatgcgaataacatgctttgagaagtcagaaggctggcgtctcttcctccggagctcacggaggagtctctctggtttcctttctcagaggcaaaaaatttccagttggtctcaggctaa

SEQ ID NO: 74999 - DNA, 122 bp, Homo sapiens
cgtgatccgcccgtctaggcctcccaaagtgctgggattacaggtttgggccaccgcgcccggcctataccatgcttcttaaccatgcatcagctgatggtcattgggttgttacaatactt

SEQ ID NO: 75000 - DNA, 122 bp, Homo sapiens
gagaggcctccctggggctgcacagctgggcctgagctggccagcgccagagccaccaggcggccactctgcagtcctgctggtgggaaggccaggcaccgatgagaacagcttagcttggc

SEQ ID NO: 75001 - DNA, 122 bp, Homo sapiens
ttttacgtgcgtcgttatgctttatctaaatgtttcactttatatgcagttttacattatcggtgatgtttacgtcacatactttgccaactcagaaaaaggtatctttaaaaaatcaattg

SEQ ID NO: 75002 - DNA, 122 bp, Homo sapiens
cgcactgacctgttttgagtaaagactccacgcggggaccaggcgtaccggcgccgccaccgacttacaccgccaccgccaaattgcagcaaggggccgggcgcgcccacccccccgggcgc

SEQ ID NO: 75003 - DNA, 122 bp, Homo sapiens
gtgtccctcgggcagcaacatcatcagcaacctcttcaaggtgcgcgaggccggtggggccgcgcctgaccccccgcatgtcccgcccctgggtggggtcctaggggtgggcaggtcacacg

SEQ ID NO: 75004 - DNA, 122 bp, Homo sapiens
atcacagtgatttccatggtgcaacaaacagacaagattaaaaataggcactcccctccccgaccccccatgagaaggcgagatcaccccacagggctcccagttccagctcgccaaggggt

SEQ ID NO: 75005 - DNA, 122 bp, Homo sapiens
cacccccgcgtgggtgtgggggtgtgtccgggctagggcgcgtgtgcttctgtgcctgtgcgtgcgtgtgcgggtcagggtggtgggaccgcgcatcagggcagggtgcctgcgtctgcgtc

SEQ ID NO: 75006 - DNA, 122 bp, Homo sapiens
actctaagataaagagatttaagatggctcctcggtggccgctccactggtgtgacagcccgacatttctaggcgttagcatttctcacgaaaccccatgtagaacagggctggcgagggcg

SEQ ID NO: 75007 - DNA, 122 bp, Homo sapiens
cccctttcttgcttcattaacctctgaaactacagtaccttcaggggctgcccccttaagcgttcagcgcgtccttcctgaggacacgtatgttcctgctctagctgaaggaagcgtaaccg

SEQ ID NO: 75008 - DNA, 122 bp, Homo sapiens
ggctcccttcctctgttcaggcaagaatagaaattggaatctgtgagtagtaagtgaagacgagtctagaaaaagcagcatggggtgaatggagccaccacactgttcagtggcagaaagtc

SEQ ID NO: 75009 - DNA, 122 bp, Homo sapiens
agaatcgcttgaacccgggaggcagagcttggagtgagcccagatctcactactgtactccggcctggatgacagagtgagactccatctcaaaaaacaaacaaacagaaaataaaaaataa

SEQ ID NO: 75010 - DNA, 122 bp, Homo sapiens
aatgttttcgatcttctttaatgatagaagaacacaggcttgtatgtgttgttgctgttacgccaataagccaggatattgcttgtacactgtttttaatcaaatgtgcagtcaaaatgata

SEQ ID NO: 75011 - DNA, 122 bp, Homo sapiens
agtacctacgcgacaacggacaaagaataagtgcttgtgaactgagctttcttaacttctcgatggaccgttaggccagcctcaccgggacaaatcacagggcccctccccacccctgccga

SEQ ID NO: 75012 - DNA, 122 bp, Homo sapiens
aatgcggtactcacgcacaagggaagtatgcggtactcacacacaggagaagtaagaatgcggtactcacacacaggagaagcaggaatgcggtactcacgcacaagggaagtatgcggtac

SEQ ID NO: 75013 - DNA, 122 bp, Homo sapiens
aaaattaaagccaaaatatttcctagcggctaaaagagctccaagcctaggcgaatctgccggtccgctcgccggaaatgcgggctctcctgccggaagctgcccctccaccattttgtggc

SEQ ID NO: 75014 - DNA, 122 bp, Homo sapiens
tgcagccctgtgagctatgcactattagtgcccattttacagttgaggacatgagtagaacgcgacctcagcctgtgcttccgagttccttcattcctccttcccgtccccgggccctcgat

SEQ ID NO: 75015 - DNA, 122 bp, Homo sapiens
ggcaatgttcgcaagctccctggatgcacattgcctcttttctctctttctttttgtcagcggttcagcgaggaagaatgcctccaacccagcccaatccaggccagtacgcactcaccaac

SEQ ID NO: 75016 - DNA, 122 bp, Homo sapiens
gacaggaccgcggctcggcggggctcgccgtctacacgcccattcccaggcccacggccacgacacccagagctgcctcctgccctgggctccctggagcctggtggccgcggctcatgctg

SEQ ID NO: 75017 - DNA, 122 bp, Homo sapiens
gctactgtacagatataaaatcaggttaaataacttaaataacttgccaaaagtattgctcgatgttagctagcaatttgcggagaagacttcctagttcatttcagggagtgaatacctat

SEQ ID NO: 75018 - DNA, 122 bp, Homo sapiens
cctgctgggagtggagattgcatttcagttgccatttgcattcccaatcaatccggactccgcaattaagtcggctggcggagctgggagggaggcggcggcgggaacgggtcctctggggg

SEQ ID NO: 75019 - DNA, 122 bp, Homo sapiens
gttccgctttgcgggcggcttctgatctcttgcggacagctcagattagtggctcgaggccgccgcccccgcagcgccccagccctactgcgccgaatcccctcctcccagcccccagcccc

SEQ ID NO: 75020 - DNA, 122 bp, Homo sapiens
aggagggagatggtgcggcaggtggaccggaccgtgggctacctccgggagagcatcgcgcgcaaccacctcacagaccgcctcaacctgatcatcacatccgaccacggcatgacgaccgt

SEQ ID NO: 75021 - DNA, 122 bp, Homo sapiens
cgtcgcagccgcggcgcaaggtcttggagccgcagacctgaggcccggctcctccctcctcggcttccactaagaacttattaaatagggacgattcacagttgatctgtcactgagcacta

SEQ ID NO: 75022 - DNA, 122 bp, Homo sapiens
cctccgctagaattagcctttcgggcctgcgcgcctacaggtttcagaggccagcgggaacggtggcctcgggtgtgtgggggtgaggggtgtggtgtgtgtgcacgtgttcacgcgcgact

SEQ ID NO: 75023 - DNA, 122 bp, Homo sapiens
ggaacatccatgattgttttcctgtcttgcaacagctcattttcttctctttactgtgttcgtgccatgttctaatttttgaccttgtgctttttcacatgttccatatttgctttggacaa

SEQ ID NO: 75024 - DNA, 122 bp, Homo sapiens
agttgacgcactgctgcacacaccccacccagcggctcgtggtgacctcctcccgtgacacgactttccgcctctgggatttcagggacccctccatccactcggtgaatgttttccaggga

SEQ ID NO: 75025 - DNA, 122 bp, Homo sapiens
acgccacttagtctgtaggtttagcggctagaaagattcagaagctgagttcagtcctgccgccacaatcaatcttcgctcctatggcttcacagaagcgtctcccatgactaccaaattta

SEQ ID NO: 75026 - DNA, 122 bp, Homo sapiens
agtgaagaaatgcgaggccagctccagccgcagcgcacctgtccacgagtctggccgcagcgcacctgtccccgagtccggccgcagcgcacctgtccacaagtgtccacctctaaggcagt

SEQ ID NO: 75027 - DNA, 122 bp, Homo sapiens
aatcaacaactttgtatacttaagttcagtggacctcaatttcctcatctgtgaaataaacgggactgaaaaatcattctggcctcaagatgctttgttggggtgtctaggtgctccaggtg

SEQ ID NO: 75028 - DNA, 122 bp, Homo sapiens
ttacaaaactgtccttgctcttcctgcgtttgcccagtcaagggtatttttgcctgaggtcggaatgatgctgttagtcctggtgatatgattgcatagcaacacagagcagctctgagagg

SEQ ID NO: 75029 - DNA, 122 bp, Homo sapiens
attcacaaggacacattcgtcgctttctcaggacgtgactggcgccacccttattctctacggtcacactggtgtgcggcccacagagagccctctcttgagaaatgggcacgatgacttag

SEQ ID NO: 75030 - DNA, 122 bp, Homo sapiens
cctatagctgggaggaacgcattgcaaacgccaacccaatgattccctaaatggggtcttcgcatcagctgcgttaaaatcaccccagcaggcaggttatccggccgccactccagggtcat

SEQ ID NO: 75031 - DNA, 122 bp, Homo sapiens
attcgctccttgctaagagggaacaccggggaagggcccccactcaccacagagaggagccgtctctgccatcgaagcccccagctccggcctggagaccggcacgacagacgcaggctcct

SEQ ID NO: 75032 - DNA, 122 bp, Homo sapiens
cgggcttagtcggagctccgaagggagtgactaggacacccgggtgggctacttttcttccggtgcttttgctttttttttcctttgggctcgggctgagtgtcgcccactgagcaaagatt

SEQ ID NO: 75033 - DNA, 122 bp, Homo sapiens
ggtcgccatcttgtgcgcgaggttatggaacctctgagtcccgccaactctatggtcgagcgtttcagggatcggccaatcgtaatccagatctcgtaggaaagccccgcctctatccgcat

SEQ ID NO: 75034 - DNA, 122 bp, Homo sapiens
actcttcagcagggattcatttttctagttttcttgtttttttagccacaggaaataaagcgtgcaccctaccctttaattcactgtttcccccattcattttctatttcctggtaaattaa

SEQ ID NO: 75035 - DNA, 122 bp, Homo sapiens
tcccacctcagaggcgcgctcccccttgggccggtgggcattgggccagtgctgtaagatcgtctccggaggctggtagagcttgttggggttcaggtgtccagagatgtagaggtagacgt

SEQ ID NO: 75036 - DNA, 122 bp, Homo sapiens
caggtgtccgctgaaggctgcttccaaggggcgcctgttgctgcccttcccgggagtgagcgccgtgtcttccgtcctgcggcggaaagcaaagggggcaaactctgtgtagcctactttat

SEQ ID NO: 75037 - DNA, 122 bp, Homo sapiens
tcgccgtcatcaagccctccggacactgacacacacacagacacagaatttatttctggacgcattctgcaggctggaggtcccggcaggcacagggctcacaccttgggttttgcaaacac

SEQ ID NO: 75038 - DNA, 122 bp, Homo sapiens
aggacttcttagcatgggaagacctcctatgctaagaacccctagcctaggtcccactgacggaggagatgctgacggccggcagaggagcccttctgccgagaggaagccaaggtgctgcc

SEQ ID NO: 75039 - DNA, 122 bp, Homo sapiens
agccttcctgactgtcctatgctgtggcctgcccctgccttgctgtgtctgtttgcccatcgtccccctgggctgggagccccacgagggcagtgctgcctcctgcagagttgcgcccagat

SEQ ID NO: 75040 - DNA, 122 bp, Homo sapiens
cccactgtggagttggtagcacaggggtatcaggatttaatgagccaatcattgactttacgctccttgttctgactccctaataaaataaccttctagttatattctggcttcccatatag

SEQ ID NO: 75041 - DNA, 122 bp, Homo sapiens
tcctatcccttcataaaagcatctaatggagctggaaaatactgtcagaattaacttttgcggaactctggaatctagtcaaagcgtataacaaccaggggaaagccaaatgaagaaagaag

SEQ ID NO: 75042 - DNA, 122 bp, Homo sapiens
ccgctgagggccgggggctgcgcccaggacaggtgcagagccggtgggctcccagtgctccgggtggaggagtgggggcttctggagaacggcgcggggtggcaggtgtggttacaaggttc

SEQ ID NO: 75043 - DNA, 122 bp, Homo sapiens
tggggaatggggagggaaggagggagggtagatttttctcctgcttgggtctaaggacagcgagagagcattgcccctctgcttggtgtcaaccagggaggaaccagcaggtgacagggcct

SEQ ID NO: 75044 - DNA, 122 bp, Homo sapiens
ttccaaacccaaagagattccaatcatctatctgactttgggggttctattttaaatcaccgttttctctgtcaactcgaaccttcaattagtgcttgatcagattctccagcagtggtaga

SEQ ID NO: 75045 - DNA, 122 bp, Homo sapiens
ggcaccgccccctccggctggagggcgggacttccggtgagtgagtgacgggcgcagcctcggcagcggcggcggcggagccctgaggcgacagcagctgcgggaggcgacgggctgcggcc

SEQ ID NO: 75046 - DNA, 122 bp, Homo sapiens
ctcttaaaggcagcacggttgttcattcctcctggtgggttcgtgatctcgctggcttcacgaatgaagctgcaaactggccttacagctcttaaacgtcacacggacccaaagagtgccca

SEQ ID NO: 75047 - DNA, 122 bp, Homo sapiens
gagccgacctgacactatgctcctcctgccttcccaggtggccccacgatggagtttcctcgaatttcctgaaaactggccagctgctctgaacgagcctgaagaaggcagctgcacaaact

SEQ ID NO: 75048 - DNA, 122 bp, Homo sapiens
tatctatccccaacggtaaaacagtcacataaccagcactttaactataatcacagaaaacgttttacattgctacaagagcaaatgtataatcaagaaagattctttgtaatgttatctaa

SEQ ID NO: 75049 - DNA, 122 bp, Homo sapiens
ctaccctccctaagtttttccaggacttaaaagagctgcaagtagtgcagatcatggccccgttcacacaaatcacttcaagaaaaaaaattagtaaatgtctattagatcttgaaacttat

SEQ ID NO: 75050 - DNA, 122 bp, Homo sapiens
ctccccggcgcccggctggctctcaccggcccgcgtggcgcgctacgtacccagcgcctccgccgtggcccaggcctccgcctctagcccaatctccgcagcgcttacaggccggctcagcg

SEQ ID NO: 75051 - DNA, 122 bp, Homo sapiens
caaagaaaaaaagaaaagaaatagtaaaggtgatcagttttatgcattttcctaccacaacgggaaaaagtgtatacacatttttaagaatgaaacttaaattttgttaaaaacttgagctt

SEQ ID NO: 75052 - DNA, 122 bp, Homo sapiens
agtggagaaggattccatgtgaaaagcagttgaacatgggtcagtcggtcctgagacaggcgagcatcatcccaaaggagtaggcattggcctcaatcgctgtcagtgatagaaagggagtt

SEQ ID NO: 75053 - DNA, 122 bp, Homo sapiens
aataatttataggccatcttaaagaagaaatagaagctatcagctatgtatggacttcaccgttgtttttttgtgtttgtagacaagctatcttaggtcactgctttagcaaattaaattag

SEQ ID NO: 75054 - DNA, 122 bp, Homo sapiens
ctgtcagcctcactgtgaggctgcctgagatgctttttcaccacgcatcctcagcaacttcgcttcactttgtccaaactgttgtggcatcaagaactacaggatacggccaggtggggtgg

SEQ ID NO: 75055 - DNA, 122 bp, Homo sapiens
gaacttatttttctgatacatgttaggagaattgctggcctatgtttccctttttactttcgctgatgcgaatgtcaccttctacgtccttacttgccaggctgaccaaaaggaactatctt

SEQ ID NO: 75056 - DNA, 122 bp, Homo sapiens
taaaagatgattgcagttgcattttagccttctggcatctctcatctctccataccattacgtgttgattgatgtgatcatttatttgtccttgacatcacacataatgttttttccctttg

SEQ ID NO: 75057 - DNA, 122 bp, Homo sapiens
gtcttcctccatcaggctccggaaaagctttccccagagaagacaccggacagcaggggccgcctcccgtagctcttgtgacccagcctgtttctgcatctgagctgcgtcctctgggtggg

SEQ ID NO: 75058 - DNA, 122 bp, Homo sapiens
ggcctcttcacctccgtcggtcccgggagtccgctgggggcgccgtggaggctgtggggacgtttggcttcgctggggattcaggctccggaatcctggagggaggcgaggagttctccaag

SEQ ID NO: 75059 - DNA, 122 bp, Homo sapiens
agattagtagccaagaaagaagaaaacagctcccccatacaggagaaggagggcgcccaacggaataaccccgcctgaagcgaaagcggtccgttatgttaggaggctccaggaggcagtgt

SEQ ID NO: 75060 - DNA, 122 bp, Homo sapiens
tgtcttagcagtgacttgcaggtttgcgggggttcactgtcttagtgacttgcgggtgtgcggggggtttcactgtcttagcagtgacttgcggttgtgtgtgggggggttcactgtcttag

SEQ ID NO: 75061 - DNA, 122 bp, Homo sapiens
aatgcaataacctgaatcagaatgtcagaggttaaaaacaatccaaaaaaaagccacactcgtgctcctacaggaaagagggatgtgacacagcaggactcactggagctaacataaggtct

SEQ ID NO: 75062 - DNA, 122 bp, Homo sapiens
aggaggcaatctgtcaggcgccgcccgggcggcagtatgcctgagggggtcctccgtgttcgcgcctcccgccgcctgcactgaaaggtctgtacctgagcctggatacttgaacagaggca

SEQ ID NO: 75063 - DNA, 122 bp, Homo sapiens
caggagcatgaacacgctgacagggtgctggggtcggggggcagccctgggttcacgctccgccctcgcacccccagagggaccttgtgccagtgtgggcgcccccggaccgcccaccccgc

SEQ ID NO: 75064 - DNA, 122 bp, Homo sapiens
acaggggagaacagaaagggggttgcggtaataccccacgtggtgtccaggcagatggggcggctgagagagttcagtatctgtccacctgtgggtgcagccacattcttctctactcttca

SEQ ID NO: 75065 - DNA, 122 bp, Homo sapiens
ttagtccttagcgtgatttccaaacaaacggcctgtgaaatgatgccaccctataaagctcgaggaactcttccagctcaattaccaccaagcaaattcgccttttaaaaccatgctaatgt

SEQ ID NO: 75066 - DNA, 122 bp, Homo sapiens
ggtaggcggctgggagagcccaggtgggctgaggttgggtgtggtgcgctgtggaacgtgcgagctcctgagccctgtctcttgcaggacaagcactccactggacgtgatgcctaattaag

SEQ ID NO: 75067 - DNA, 122 bp, Homo sapiens
ccggccccgcccgacccgcgcccccggggccccggccgccgccacgggaagcgcccgcggcgcacacaaccccgcaccccggtgccgaaactcggcccccagccttgggcctgggaccccgg

SEQ ID NO: 75068 - DNA, 122 bp, Homo sapiens
tgcaggcaggaggcttcgtgcctcggtgtccctgtcgcgagggctgcagggggttggtggcgaggccagggcgcaactgcaagcccccggattcgcggccagactgcgcattccaaccgcgg

SEQ ID NO: 75069 - DNA, 122 bp, Homo sapiens
ctcaagctatctgcccgcctcggcctcccagagtgccgagattacaggcgtgagccaccgcgcccggcctacccttgaagaccccgcagccaaggtcctccggccccgctctgcgcggcgct

SEQ ID NO: 75070 - DNA, 122 bp, Homo sapiens
tggcaccgtgcatcatctcctcgcccatgctcagcgccgggcctgaggacctggagccgccgctcaaaaggaggtgcctccgaattagaaatcagaataagtaaaaggtttgtatgtccgcc

SEQ ID NO: 75071 - DNA, 122 bp, Homo sapiens
cctccgctgggcaccgggtctcgcccctttcttcctctcctccttccgccgccgggactacggctccgccccccccgccggttcccgcgcccgctcccagcagaacagcgaccgccgcgcgc

SEQ ID NO: 75072 - DNA, 122 bp, Homo sapiens
ggcaaaagcccccctgagctgcaagttcaagtgcggacgtgacgtccctgcgaacttgaacgtcaggagtctggatggacagagacacacaaaacatgggcagggcgagcaggagagaaggg

SEQ ID NO: 75073 - DNA, 122 bp, Homo sapiens
ctcctccctgccccagttctgtgctgctgaggccccttcttgaggctgttcctgcaggggcgttcgtgcctcttatgagtccccatcttactcaacatgggttccttctccctctgtttggg

SEQ ID NO: 75074 - DNA, 122 bp, Homo sapiens
ccgctcggccggacccgggcctctcagcctggtgtatggcgtttcacgccgcccacgccccgccgggaccggggcgagatcttcgcacttcaccgcatcctctctgcatccctcccgcgccc

SEQ ID NO: 75075 - DNA, 122 bp, Homo sapiens
ggctgggaagcgctctgtggagagggacgcgactggagcggctggggggcagccgtcctgcgcctgggaccctcacggggcctccctgctccagtcactcccgcccgcctgccagcctgtcc

SEQ ID NO: 75076 - DNA, 122 bp, Homo sapiens
cccataaactgctttgaaaccataaagaccaaaggttagaagggtttgccgcaggcgctccgttgctaatgtttttgtgagggcttcttcagggcctcttgttagagtgtgacataaacgac

SEQ ID NO: 75077 - DNA, 122 bp, Homo sapiens
tctcatcatatggctcggcctctggctcatcctcggggtcgtggtactggctgaagtaggcgtgggccagtgcctcagctgcactgaccctctggtcactgtccagcaccagcatccttcca

SEQ ID NO: 75078 - DNA, 122 bp, Homo sapiens
aggccacaataagacaaatcattaaaagatcaaacacaatcaaatgacctgcaggaacttcgacagtgtacatattctgaccaaaagtgggcagagagcatgtgaaggaaaagcaccgactc

SEQ ID NO: 75079 - DNA, 122 bp, Homo sapiens
ctaccactacggccaccccaaaggaccccgacgccaacagacagtcaaacgctgatgttgcgggcagaaaacataaaagaggtgacaattgtatactttctaggacaagcacggcttctcct

SEQ ID NO: 75080 - DNA, 122 bp, Homo sapiens
agcaggggagtgaggctgccgggaggatgaaatgcgacggctcacagaggtcgcagcccacgcccagctgcgggagggcctgtcgagtccccgatcaggaaggcccacgtccagatgccttg

SEQ ID NO: 75081 - DNA, 122 bp, Homo sapiens
cggccgggcgcgggtaccggaaaccgtggagacctcagaggggcgggggcaagggcgtcccgctcacctttgacgtcggcactagttaccccaccccacgttaacccttctcctgccggggc

SEQ ID NO: 75082 - DNA, 122 bp, Homo sapiens
tgcttcttgactcttagacgttccggttcacgggggtgacataattgcggggaaacatgccggtctgcccgtggcaagctcctttccaccagttggggtctgagttatccatgacatggata

SEQ ID NO: 75083 - DNA, 122 bp, Homo sapiens
tttgttcacatctttttgtgtgggatatcctcctgttccttttctactggtcaaaatgctcggttttttttaaggcttcaactcttttgtttttactattattaggacactcttctcattat

SEQ ID NO: 75084 - DNA, 122 bp, Homo sapiens
ggggcgcgagggctgaggctctgggcgtggcatcactctcggtccctctgctgggggcggcgaggagagtgcagtgtgtggaaagggatgctgggatgaagggtgtgcgctgagaggggggc

SEQ ID NO: 75085 - DNA, 122 bp, Homo sapiens
gcccgcctgggagtggggcaagggtggacctcacttaagtgcagctgttcaaggggagaccgtcaggcgggaaaccagagcgagctctgagagaacgtcgaagagccactaactgcctcaga

SEQ ID NO: 75086 - DNA, 122 bp, Homo sapiens
cacaataagcctcagtagattggctggtgccgggcaaccttagctgagctcattcatatacgtgtggattgggtaatatacatgaggctccaccgagtagctctgcttcaagctatagatct

SEQ ID NO: 75087 - DNA, 122 bp, Homo sapiens
ggcctgcgagttagacggcacattcctgggctagcagcttcgcggcgtccggcctcccggcgcctccgactccggggcgggaacggcactccacgcccttcttgcttgtcttctccgcctct

SEQ ID NO: 75088 - DNA, 122 bp, Homo sapiens
acccaccgcacaccacacctctgtcatgtgttcttctaccagagatgagctatgcctgtgcggccttatctatatggaatcttgtggtatgcactctttgatatctggcttcttttgttcat

SEQ ID NO: 75089 - DNA, 122 bp, Homo sapiens
agatgccagcgcggtggagtcatgccgctggcttgggcaccattggtcatgcctggaacacgcagcagcgagtacgcacatctggcggctatcccgggcggctccggtcctgatatggagag

SEQ ID NO: 75090 - DNA, 122 bp, Homo sapiens
tccgggtcagccagtgccctgctcctaagggtagagatctagctggggacactggtcgtccgcctaggcagtggtgagagggtgggctacagttgtttgggtattcatgaatggaggagctc

SEQ ID NO: 75091 - DNA, 122 bp, Homo sapiens
atggtgttgccccctctggagatctctatttaggggctgccttggcagggcccaccagaccgtctgtcactctccgctgacaccggctgccggaggagggcggtccccgaggctctcgtgct

SEQ ID NO: 75092 - DNA, 122 bp, Homo sapiens
tgcccattaaatcctaaattgccactagccaacatggatgaagtctgcgagggatggcaccgccgggcacacctgtgtctggcctggtggtgggaaggaggtggagggcccccgggaagggg

SEQ ID NO: 75093 - DNA, 122 bp, Homo sapiens
aggagggaagaggatgttgaagagggagtgccggtggtcagcggacgctgtgtaaggggtcggctgtttgaggcctcgcagtgtgctgcagtacaagctgagcagtctggggaggaaggagc

SEQ ID NO: 75094 - DNA, 122 bp, Homo sapiens
gagggggccgggtgggggccgggtggggtgtgggacccgagggctcctggtggcctccggcgcctgcgtacctgcagccggtgctagggagccgtgggctgcaaggccgggtcttgcgcctc

SEQ ID NO: 75095 - DNA, 122 bp, Homo sapiens
tttcatctataaaatggaggactttggcaaccaatgtcaaagtactttgcataccaaaaacgctctggacaggtgtgtgtgtctctgctaaatattcaggaaagaggatatacattttaggg

SEQ ID NO: 75096 - DNA, 122 bp, Homo sapiens
actctgcacagtctgttggataatctctaattattcctttcctcttcacacctgtgaggccgatgctcagcatatttcagaggaagctggcaccagggatgagggaatctgcccaagcatga

SEQ ID NO: 75097 - DNA, 122 bp, Homo sapiens
ctcctggcagaaggcgaaggtggaatgtcccagctgcctactaggcaatagtgcctatggcgaaaacagctcctggctggcagggggaagctgatttgggaggcgccatcactaagtaatgg

SEQ ID NO: 75098 - DNA, 122 bp, Homo sapiens
tcacctcccagacggggtcgcggccgggcagaggtgctcctcacatcccagaaggggtggcgggcaggggcagaggcgctccccacatctcagatgatgggtggccgggcagagacgctcct

SEQ ID NO: 75099 - DNA, 122 bp, Homo sapiens
cttcctccacacccgagggttggcagaggtcccctaagccctcggcctgttccgaccgcgcgcgagtctccgcaccactcggtgcccttgaccgcggacctcgctgcctctccattggcccg

SEQ ID NO: 75100 - DNA, 122 bp, Homo sapiens
tcttctcctattcataaaataggttttggtaagaccaaaacataagtgccaaatcaaaggcgaagacctgagccatctcaatctaaaatcataagcccattacaatttcagattttccaaat

SEQ ID NO: 75101 - DNA, 122 bp, Homo sapiens
aatcatgcacttgtgactggcttagcataacgtcctcattgcggctcccccatgctgcggcgcgcgtcaagatttccttcctgttcaaggctgcaggacattccgttgcatggctagaccac

SEQ ID NO: 75102 - DNA, 122 bp, Homo sapiens
tcggccaatcaggggaaaaggaaaaggcccaatcagcagaaagtccacagctgaaggacccggatgaagcgagcctaggactttgaagtgcaagcctcgccaattgtagagcagtcaccatg

SEQ ID NO: 75103 - DNA, 122 bp, Homo sapiens
cctccagctgttgattggctgctttcggccgtcgtttggggaaaagaggcggcttgggcgcggagggactggtttagtgggcggaatttgaatgttaaggattaatggacccttgcggatgc

SEQ ID NO: 75104 - DNA, 122 bp, Homo sapiens
ccagctactcggaggctggtggggtcccgctctcacatcaggatccccacatccatacagcgcccagcagcctggggaacaatgcagcctctgggcaggttccagtgccaggccctgaatca

SEQ ID NO: 75105 - DNA, 122 bp, Homo sapiens
ggtagtggaagactggctgagcctggtgaaggccaagttctgtgaggcccccggcagctgcgtggctgtgcactgcgtggcgggcctgggccggtgagtgtcggggcggggtagggctcgcc

SEQ ID NO: 75106 - DNA, 122 bp, Homo sapiens
cctggttcctccgagaaaagcgaagttacttttctttccctgcagggctgaagccgtcttcgcgcggagaggttgcaggggcccctcggggatgagcgagcggcgcgggacgcagtggaacg

SEQ ID NO: 75107 - DNA, 122 bp, Homo sapiens
gagaggagcacaaatttcatgccactgacattgcagtgaggaaactttccccagcggggtcgtcagatagtatgaatttctctttgctaatgtttcagttggtttctttaactgaaagagga

SEQ ID NO: 75108 - DNA, 122 bp, Homo sapiens
ctatcctctctctctgactgcctgctggaaatgcccccatctccctttgagtcctcctcccgggcgactcctgtgacctgtaacctctgtcctgaaatcatcacaatggccagggtggcctc

SEQ ID NO: 75109 - DNA, 122 bp, Homo sapiens
tctgaagccagaaattatactttatcaatttaactcttttcagtcaataactatgtctgacgtcagcaattctgaggtgctagatcttagggaaagggaaaggttcagctaagacaatttaa

SEQ ID NO: 75110 - DNA, 122 bp, Homo sapiens
ctacggggtagcggacatccgccaggcacgcttctagggccgcttctgcaactgcgcatgcgcttgggctgcacccattccgtctagcccaaaaggttcctctacaaccttcctccggattg

SEQ ID NO: 75111 - DNA, 122 bp, Homo sapiens
acagctcagccacagtgccctatgtaagatggctgtgtgatggtgtttctgctgttaccacgttgcattccagtgttctgttgatggtgtgatcacctcctggaaacactgaactcagtgag

SEQ ID NO: 75112 - DNA, 122 bp, Homo sapiens
agcggaggccgtgacgggggtggttggggcatgagtgttcacctctgcccaggaaggtctcggactacatgaatgcctgaagttatggctctctcaaaagaagccctggccgcagcacccac

SEQ ID NO: 75113 - DNA, 122 bp, Homo sapiens
gtctaatacatggccttaaacatagttgatacttaatataaaacagcttcctagctgaggcgggtggatggcttgagcccaggagtttgagaccagcgtgggcaacatggcaaaaccccatc

SEQ ID NO: 75114 - DNA, 122 bp, Homo sapiens
cacagccgtgccacccagccagccaggggctggggctgtgtgagctcccacagctgcacgcgcttgggtccaggggctttgtgctaactgagggcagcaggaggagcacctaacatggggtc

SEQ ID NO: 75115 - DNA, 122 bp, Homo sapiens
ggggcagggccaacctgggcggggccatggccggggacgtgggcgggaccaggtcaggggcggggccaggccaggatctccgctgtcccgggtcctggagctctctcggcccggcaggtttc

SEQ ID NO: 75116 - DNA, 122 bp, Homo sapiens
gatccagaaagtatgtgagacacatcgacaatgtaaactatacacagttaaggggtaggacggcacagtggcagaaatatacactgagtgacagagacagggacacactccacatcattccc

SEQ ID NO: 75117 - DNA, 122 bp, Homo sapiens
accgggtccgcggaaggaactcacactcctgcttcaaggtgtggaaggcgacccaagaggcggtacacagaccgcgagggagcgtgctgtgagaagctcagggagacagggcctgggaggcc

SEQ ID NO: 75118 - DNA, 122 bp, Homo sapiens
gctacctagagatttaaggctgacctaccagtctgcaaatggtacatcctgttgctattacgacctttacccccaccccccgccaccccgacaatttcaccttcaaactctcaacccaaaat

SEQ ID NO: 75119 - DNA, 122 bp, Homo sapiens
gagcaaggtctagcttctgagactccgctctctgggctagcggttcgagctgcaggggggcggggacggattcggagggagcactagagagagagcccgcgctcactcctgccctcctcgca

SEQ ID NO: 75120 - DNA, 122 bp, Homo sapiens
cttactagctgtgcaagtgacttaacctcctggagcctccctgtgccccaatctgtaacacgtgcatacagttaaatgtgaagatgaaatgagatcctatgattaatgagcaaataatacat

SEQ ID NO: 75121 - DNA, 122 bp, Homo sapiens
ccttcctgtcactcttccctttccccagcccccatgagccactgctgacctgctttctaccgcatttctgagtttcactgtatatatggaaatatacagtgagtcttctttttcctctggct

SEQ ID NO: 75122 - DNA, 122 bp, Homo sapiens
cagttggtttggctaagcccagggacctttggcctgttaaaggtctgtaatcttggtgggcgatacagagttatgtgtgttcactgtaagggcagaccaacaagaactttttcctacttttg

SEQ ID NO: 75123 - DNA, 122 bp, Homo sapiens
ctttctcctaacaccttggcttccttccaggactcagtttcccctaaaatgagcccaacccgaccagataggagaggcagagttgtggtttctgtggtccaacaggctggggctccatctct

SEQ ID NO: 75124 - DNA, 122 bp, Homo sapiens
gcggttttccacactgctcacgcccacaaactgtgtgttacgagttcacaactttttcttcgtcaataatcccgcgtattactctcccagccgtttcccagcgtgtcatgtgctgagaaatg

SEQ ID NO: 75125 - DNA, 122 bp, Homo sapiens
cccggctccggtggtttcgggagaacatgctggcggccctgcgactttgcctgctcagtgcgctccccgcgccgcccggcttagcctcctctcctcggcttctgtctctcgacgctcgtccg

SEQ ID NO: 75126 - DNA, 122 bp, Homo sapiens
ggcgtgaacggatatgcccctctcggtctcgcacccaagtggagctactctctgggtgagcgcaaagtgctggctgccggcggtgagcgcaggaggaggaggaggagggagaggaggtggag

SEQ ID NO: 75127 - DNA, 122 bp, Homo sapiens
gctcgcacctctcttggacagcttctgcagtggccggcgcctccagctgctctcccgccccgggctgcagtccagtgccttcgtccatggcgcttagaattcagatttgatagctgatggca

SEQ ID NO: 75128 - DNA, 122 bp, Homo sapiens
aatctatcaggttcagagatcacatctgtcagccgatgcttcttgccttaaggtcctgcacggcgatgaccgctcatttaggaaggaattcatggcctgtggataccttagctctgagtcct

SEQ ID NO: 75129 - DNA, 122 bp, Homo sapiens
agcgtcagtggggacgtcgtgatgcctgggacggggagcaaaaagagggagtcgggataacgggcccaaaaacaatcaggggaagagtcgagccccaaacagggcttggaagggagctacgt

SEQ ID NO: 75130 - DNA, 122 bp, Homo sapiens
gcctccccgccccggaaccctgcaccgcccagagccgccacgcctcccggctgtaggctccgcatctgtaaaatgggccgatgaaccccaagggtcggctcagacccacggactgcagctgc

SEQ ID NO: 75131 - DNA, 122 bp, Homo sapiens
tctctctagctcctcgcgcagtcttaacagcaaaactctactgagctcggacgaaactggcgggctcctgggccaatcaccgtgcagctccccgccagacgctggaccaatggttgtgcgct

SEQ ID NO: 75132 - DNA, 122 bp, Homo sapiens
cggcccagagaaggaaggtcagcagttcagtctctggaggtttcgcaaacctcctcagtccggggaaacgatgttctttggtttaggtcttacacatatctcatgaatgaaaatagctgatg

SEQ ID NO: 75133 - DNA, 122 bp, Homo sapiens
ttttttttttttgtcccctgcccctaggtctctgtctccacacagtgatttctgttatggcgattgggcggctgcagagaccaggactcagttcccctgccctagtctgagcctagtgggtg

SEQ ID NO: 75134 - DNA, 122 bp, Homo sapiens
cgggcctagccacagcagcaacggcagaggccagcgggcgaggtcaagatggtggctccgcgggcgggggaggcagtggagggaggaggagtcagaccttagccagccggaaacaccgaaac

SEQ ID NO: 75135 - DNA, 122 bp, Homo sapiens
gggaacacggtgcacaggtccatgccacttgaatatgtgtgcactcctacacaggcacaacggacatccacatagccaggcatccaactccagcccacccttcactctcctccctgcagccc

SEQ ID NO: 75136 - DNA, 122 bp, Homo sapiens
tgaacgccaggcccggacaataggaccgaaacagcctttgctcgtggcctcgggaaagaccgagcccaagggggcagggctgggacccaggcccgcacaaatgctcccttcgccaggataaa

SEQ ID NO: 75137 - DNA, 122 bp, Homo sapiens
aaaaaatcgaaatctgctctgaagcaagagctgaaatgacgcaggttagactcccagccccgcgctcacctgagggctcgcttcagcccgtctgtcaccgcctccttccttgccttctccaa

SEQ ID NO: 75138 - DNA, 122 bp, Homo sapiens
tggtgaccccggagagtccgaaacgggaaaggggccaaggggcgcctggacccccatcctcgccgccctcttccggagaggaggctccggacataagttcccgtgccctctgaatatctagg

SEQ ID NO: 75139 - DNA, 122 bp, Homo sapiens
tggtgttcccctgtatcaatataccaggatccatgtttccattcttctggtgatggaaaccgtttccagttcctcaccgttacaaacacgatagcgagcattcttgcatttatctctttatt

SEQ ID NO: 75140 - DNA, 122 bp, Homo sapiens
tcggcgggggtctctgggaggcttgctttattgttctgcagccggagcgagcggcagtggcgacggcggcggcggcggcggcggcggcggcgggcggggggcgggggtcctggggggagggg

SEQ ID NO: 75141 - DNA, 122 bp, Homo sapiens
tagtcctcccacagctgagcatcttgggtggaagaggagatgactcatgaagacccaccccggcctcatccgatatctgggtctttccaacaaaatgccatttcccagggcacctcacccca

SEQ ID NO: 75142 - DNA, 122 bp, Homo sapiens
tcctacccgaacctggcatcccagcgctgtgcacacctcagggttccagatccttgatctcgtgacctctgacctgcagtgacctcgccaaccgacgcggccgccccgccacgcccccgccc

SEQ ID NO: 75143 - DNA, 122 bp, Homo sapiens
ctccctctctgccccgagccgtcccggccgcgcagccgccgagtgccacatcagcgacggcgctgcacttccacattcccttaggatgcagccagcgggcctgagagaggggcgggcccgag

SEQ ID NO: 75144 - DNA, 122 bp, Homo sapiens
gcggggccggctcaggggcgtggtcactcggtggggcccagcgggacctggcctaccaggcggagcgggggctgggcaggggcgtggccaatcgggaccggtggggcgggcgagtggcggga

SEQ ID NO: 75145 - DNA, 122 bp, Homo sapiens
tggactctctcccagctacgactttggtgggatccaaaaggaaggaggtggcggggcctacggaagaggatacccaggagccagggagaagggctagaaaacgaataatgtgactccagagg

SEQ ID NO: 75146 - DNA, 122 bp, Homo sapiens
tctcctggtgtctcgttcctttccctttaccggagtcgattgcctcactgcatgtgtattcgtgagttcgcggttgaacaactgttcctttactctgctccctgtctttgttagtgtttctc

SEQ ID NO: 75147 - DNA, 122 bp, Homo sapiens
aaatacaccaattagcagttcactgaatgaagggggctattgaaacttacaaaacacatgcgtgattgttgaaaagcttgtcgaatgtcttccctcccacaattcaaatattattcaaacca

SEQ ID NO: 75148 - DNA, 122 bp, Homo sapiens
gggctacgtgcgccagctctcccagggtgagccgcagtgtgggagggccgcccaggcggacgctggggacctggtatgaggcttcaggcccaaaaggccccgggaggcctggggaaccacca

SEQ ID NO: 75149 - DNA, 122 bp, Homo sapiens
cacagggaccagaacaagtacaaagaagccacagaccttctccatgatgccctgcagatccgggagcagacgctgggccctgagcaccccgcggtgagtggggccccagggagacgaagtgg

SEQ ID NO: 75150 - DNA, 122 bp, Homo sapiens
tcccaaccctacccctattttcggtgatttttgtgtgagaatattaatattaaaaataaacggagaaaaaaaatcctgtttcgctaacggctggtggtagcaggttgagtaccgggagggct

SEQ ID NO: 75151 - DNA, 122 bp, Homo sapiens
tgtggggggagcgactggctgtggggctgtgcagggccctaaacacagccagctgtgccccgtggctcctctgcggccagtgcgggaaccgcgggagccgcagttgggattgaatgtgggga

SEQ ID NO: 75152 - DNA, 122 bp, Homo sapiens
cagatatataagcaaataattagcatgcatgggctatggaaaggtgctcacgatggatcacgttcaataaaaaactatatgcaatgcatgcccagagttttgtaaaatacacgttaggaaaa

SEQ ID NO: 75153 - DNA, 122 bp, Homo sapiens
tcctttccgcaccctcctgggtatctccggtcttcaggcctccttcggagagccctgctccgagcccattgggcttccaatcttggcctgcctagcgccgagcagccaatcagaaggcagtc

SEQ ID NO: 75154 - DNA, 122 bp, Homo sapiens
cggaggcgggtgctggggctggcctgtctgcagctccctggccctacccagtggggatcgcgtgtcagtactggggtttggtgggctgccaaggggtgagccctgaggcggttttctgggaa

SEQ ID NO: 75155 - DNA, 122 bp, Homo sapiens
caatcaccaaagtaattttttcctgtgttagaacagagaggaacttggctggagtccactcggggtgagtgcaagctggaaaatccaggtggctgaggattatatccagagttgcttctgac

SEQ ID NO: 75156 - DNA, 122 bp, Homo sapiens
atgagaaatccagggccccgtacaggaaggcctttcgcaaagtccagactcaattgccttcgcagcccttaaagtttccttaggaaggtctgtgggagaacgaggttggtttaggaattggc

SEQ ID NO: 75157 - DNA, 122 bp, Homo sapiens
ctgacgagccgaaccactcgcggccctggactggtgtgggggacattccggcgggagaggcgaggcgctgcgtttcccttcaggagacagttggctagaagaagaaaagaagtgttcgttca

SEQ ID NO: 75158 - DNA, 122 bp, Homo sapiens
cttcccagagctccaggaagtcgctataacttgggaactcctgtgacggaggctaagtgacgggccgttagtttctgtctctagaaatagcccagaacggctgggcgcggtggctcatgcct

SEQ ID NO: 75159 - DNA, 122 bp, Homo sapiens
gcgtgtgcgtgttgtgggcctcgcactggcacgcaagtctcagcaattcctgagaatcctcggaggaagaggccggggcccggtgcggcagcgccttgggggcggaatcgcaggcgcgggtc

SEQ ID NO: 75160 - DNA, 122 bp, Homo sapiens
aaagaaaaccagaaaagggtggtatcatgggagccaagcagagtcttgtgggaacatggacgtgttcaaaaacactgagagaggacaaataaaatggagactataaaatatccattaaattt

SEQ ID NO: 75161 - DNA, 122 bp, Homo sapiens
ggagggagcagatgagcccaggatgaatggtcagagtcaggtgctgcccggcggaggtcacgagtccagggaggggatcaacatggccgctgcaccccggactgtgttgatctccggctgct

SEQ ID NO: 75162 - DNA, 122 bp, Homo sapiens
aacaggggagatcaggctcctccctctggcaaacagtgcgcacttcctgaggctccaccccgttgcacactcctcccagtgtgcaggccagttggaagttctctggggacctctttatgctt

SEQ ID NO: 75163 - DNA, 122 bp, Homo sapiens
ctggcaccacgcggtgccaggtagggtttggggccttcacagagtcaaaccccaagcatccgccagtctccgcacacggaaaagtcttcccggtgtaccctcttccaggtgttaccgtaaat

SEQ ID NO: 75164 - DNA, 122 bp, Homo sapiens
cggcctccaggtcagaaaccttccaggacgctgagcaccgactgtttgcttccctgcccacggatgccccctcgtggccaatcccatccatcttagaactacgtttcagagttgaggatgca

SEQ ID NO: 75165 - DNA, 122 bp, Homo sapiens
cgtgctcccccgcgccgtcccccggccatcttgggcttggcattcaaggcccttcgggaccgctgctgccactgacccagtgccaccctgctctgcacgaacaataataatggtggttgcac

SEQ ID NO: 75166 - DNA, 122 bp, Homo sapiens
tttgacgtcatcagctcgggacggctacgctgcgccctcccggcctcagcccctcagcggcggaaacgccagtcttcgctgtcccgccttttccgggagggaaatggaaacaaaaatctagt

SEQ ID NO: 75167 - DNA, 122 bp, Homo sapiens
gcgcaatgggcggaactgaagtcccgaggggaagctttgtattgggggtgcaattgaaggcggttgatggtgaagccattctgagtttatgtgttgactccggtacgtcattggttatttgt

SEQ ID NO: 75168 - DNA, 122 bp, Homo sapiens
cacacctcacagacgccgcgccacacctcacagacgccgtgccacacctcacagaccctgcgccgcacctcacagaccctgcgccctacgtcacagacgccgcgccacacctcacagacgcc

SEQ ID NO: 75169 - DNA, 122 bp, Homo sapiens
gtggggatggatcgcggccggcggcgccccggccatgcctcgtccaccttcgggagccggcgacagggagatccccagggatctcgcgtgtgggcgccctacccacccccgggggcaggacg

SEQ ID NO: 75170 - DNA, 122 bp, Homo sapiens
cactgtgttctccaacgcaagcacgcggagaatggattttcttcaggccctgagggacagcgggccctcaggaaccttccctgatcttggtggatctgggccccagctccctggatccaccg

SEQ ID NO: 75171 - DNA, 122 bp, Homo sapiens
atggtttcgggataaaactgtaaaacctcagatgttcagacatcagattctcataagaagcgcacaacctagatccctcgcttgcacagttcacagtagggttcgcactcttacgagaatct

SEQ ID NO: 75172 - DNA, 122 bp, Homo sapiens
ccctcatctaactctaaaacgatggaggcttcaaaaaaatgcccaggagatgagagcaatcgagcttccagttagttgaggagcagactctcacagtggccagtgccctggggagccatgtt

SEQ ID NO: 75173 - DNA, 122 bp, Homo sapiens
agccagaggagcccatgggccaccccaatcggccatccatgagcaaagtgtccatgatgacgctcagcccttcgccccttcaggggcctgcccaaagcagcacagctgatggctagatggca

SEQ ID NO: 75174 - DNA, 122 bp, Homo sapiens
tgcgctcgatttctcacggagccttagctgccttcccgcagggcagggttcgggacctgccgcccgccatgcctgagcctcccacccactccgtgggttcctgtgcagccccagcctctccg

SEQ ID NO: 75175 - DNA, 122 bp, Homo sapiens
ctgcaccaccagcccctaaccctcccgggcgccaggagagggagggagtgcaactgcgagcgcatctgtgggggtgcagaccagccgtctgctctgggctcacctgtgtgggagtccgtcgg

SEQ ID NO: 75176 - DNA, 122 bp, Homo sapiens
cccgcggatacagcagggcccccatgttgcaggtgctggggaggacctgcggaaacgcggcgcctcgcgggcagggggtggctgggacaaaaacacgtgtcatacgagtggttcctcgtcat

SEQ ID NO: 75177 - DNA, 122 bp, Homo sapiens
caacgccagtcacccaccccacgaagctggcctccccgcaccggtgccagcaccccgccgcgccagtcacccagagtcctcctgccccaggaatgaaaccatcctcaggccgggcgctgtgt

SEQ ID NO: 75178 - DNA, 122 bp, Homo sapiens
gacctgggtgggctattatcctattatctgaaggcacaaatacacagacacccatcatgccgtgtgcactgtagacactcggctgtttgtatcaggaggctatttgcatgtgtggtgaatta

SEQ ID NO: 75179 - DNA, 122 bp, Homo sapiens
tggtgaatcagtgcacgcaaatgccagcagctaagcttgagctttctttatccttttcatcggagttctatttcaggaagcccggctttgataccctaaaaatgtcaatgtgatcaagcaaa

SEQ ID NO: 75180 - DNA, 122 bp, Homo sapiens
ttccgaggcggcccacctgctgtctgacaagttcgactagcaagacattgtggaagctgccgctggaaactcgccatctaggagaaccaaatatttctccaagaaaagcaccctttctcact

SEQ ID NO: 75181 - DNA, 122 bp, Homo sapiens
cgcgtcttctccaggttttccttggtcttgaggcgcgtcttctccaggttctcgcgggtacgcaccttggtcttctccatcttctccttggagaaggccttcttgaagtcgtccacgcgccg

SEQ ID NO: 75182 - DNA, 122 bp, Homo sapiens
tgactgccggttgctggtgacaggcacacagcaggcagagccccatctttggtggtggggcggagggaggtgggggcaccagtccctgccacatcctcaatccgcagacactcatcagccag

SEQ ID NO: 75183 - DNA, 122 bp, Homo sapiens
ggcacaagcgggggcagctgaatcttccacgcgagaagcctaagagtagggatacgggggcggggagcagcaggcctgctctgtgtgtaaacaacgggaaagcaggaataacgccagggccc

SEQ ID NO: 75184 - DNA, 122 bp, Homo sapiens
ttcgcgaccaggcctttggcggggtcacccaccaggcggtggaagccgctcaggcaggggcgactcacgatcgaggtgcagcagtcaggccgggaagatcctgcatgttgcgctagggactg

SEQ ID NO: 75185 - DNA, 122 bp, Homo sapiens
caatcagtaagaaaaggatgaaatagttcaacttattatgctcaagatagtgttttctatcggcttattagcaaggtgctagttaggtagttgacaaaaatattaatgacaatcaaagccat

SEQ ID NO: 75186 - DNA, 122 bp, Homo sapiens
cggccaacaggcgcctccaaggactttatcccaccttccctctggatgcattctggatttcggggccagcttagttggcctgtgtcctgaggccaggcaggccagactccccaggacaggag

SEQ ID NO: 75187 - DNA, 122 bp, Homo sapiens
gtgaggcaggctttcccaataccacagctaaacacgttgcacttgccttcagataactctcggagaccttccatcctacaaaacactgattaactaaccttccaaatctgccagtaactgga

SEQ ID NO: 75188 - DNA, 122 bp, Homo sapiens
attcatttcctgtggggtttcatcacaaacagcagcaggtgatgttaactgtttaaaagccgtggaggcaaaaaaaatcacagacatcagttgccatggtcaaaatatatacagtcacttcg

SEQ ID NO: 75189 - DNA, 122 bp, Homo sapiens
agacaaacagagggtggaggctgctcttcacagctggagcgagcgagacactccccctcccggcaaaacagggctcgcttcacagacagcagcccgggagactttccaccgcctggggccag

SEQ ID NO: 75190 - DNA, 122 bp, Homo sapiens
tcttagacactcccccaacccacctgccattcagagccccatcgagatgcaccctcttcccgtcgggccttgccttggccagaggccttcagcttctgcctggctccccgcagggcgctcct

SEQ ID NO: 75191 - DNA, 122 bp, Homo sapiens
gaaaacgtcgtgttctgtctggagtgtgctctgcgccacgtggagaaacagaagtcctgccgagggctgaagttgatgtaccgctacgatgaggtcagtccctgcccgcggggtagggcagg

SEQ ID NO: 75192 - DNA, 122 bp, Homo sapiens
catggttgctgcctttcctttatctctctctctctctgtgtgtgtgtgtgtgtgtgcgcgcgtgcatgtgtgtgtaggggatgagtgtgctgtgcagaaaattaaatgttgtccgctctgaa

SEQ ID NO: 75193 - DNA, 122 bp, Homo sapiens
cgtttaactaagagcaaaggttttgtgccaccttagtgaggcgctccctgtacttcatcacggagcgagaccgagggtgcagcattcgcagcaccaggagggaccgcgcagggcctgggggg

SEQ ID NO: 75194 - DNA, 122 bp, Homo sapiens
cctggggtttctctctccctggagaagctggtggtagtagccgggattctggtccatctgcgcctgggccccactcagcaccatccagacgcgggcacggtgctccagcgggacccctttcc

SEQ ID NO: 75195 - DNA, 122 bp, Homo sapiens
aaaggtaattcgttagaaacccttaagtgcagtttctcctctgtgtcttgtttaacttttcgtgttagcgaaattcacaaatttgaccaaggaaccggagcgcggccgtcctcgccgggatt

SEQ ID NO: 75196 - DNA, 122 bp, Homo sapiens
caccctaaagaccctcagcgggctgaactgggctgagaaacactgccccatggcccgatacgtcctcaagacggacgatgatgtgtatgtcaacgtccctgaactggtatcagagctggtct

SEQ ID NO: 75197 - DNA, 122 bp, Homo sapiens
tggccgaggcggggctgactgacagggaacacctgtggccgaggcgggggctgagtgtgacggggaacacctgtggccgaggcggggctgagtgtgacggggaacacctgtggccgaggcgg

SEQ ID NO: 75198 - DNA, 122 bp, Homo sapiens
ctccacagaagtgacttgacacaccgcgctacatctggggaggggggcgggtccgctttccgggagactcaagtctttgctatttgccttttgtttctgggatgcctttggctgcctttctc

SEQ ID NO: 75199 - DNA, 122 bp, Homo sapiens
cttatagggacaggggaggggcgtggctatcgaagtccccaaggcgtggcctaatttgtgcgggctttcacttcagtagaaaaaatgtgcatgtctcgacatccagtcgaccaggaaatact

SEQ ID NO: 75200 - DNA, 122 bp, Homo sapiens
gaaaacggaagcaggcatatagactctgccacctcatcaaattagtgtaatttaaatgggcgtctttattgaaggacttcagagcctttaaaatgctaatatgttctgattcgtcaaagaga

SEQ ID NO: 75201 - DNA, 122 bp, Homo sapiens
agctggggaatagagatccaagtgcggagaaggcaacgacgggagatttggaatagggaacgctgagtcaccagaaatggaaactccaagttatagagagctcctggaccagcagtaagata

SEQ ID NO: 75202 - DNA, 122 bp, Homo sapiens
caacacttttttccctaactctgtttaggcggtgttggactaagaaaacagcatccggtgcgtcccgggaccacaaggtggccgtgcaccgtcgaggttactaaacactgtctccttggcaa

SEQ ID NO: 75203 - DNA, 122 bp, Homo sapiens
cacacctacacattcatattacagtcacacaggcacagccaacctcttattcacatagaccgatgtggtattgccctgacacatagattcctgcgggtacaattcggtttcaactatgcaac

SEQ ID NO: 75204 - DNA, 122 bp, Homo sapiens
gtcaatattatttaaaacaaaacaccgggagcatgacctttgcctcaactacatattgctcgacaagactcaggaaactccactctaacctctcaacccctgagttctttgagaaactgaag

SEQ ID NO: 75205 - DNA, 122 bp, Homo sapiens
ctgggttcaagcaattctcctgcctcaggctcccaaagtgctgggattataggcagccaccgcaccaggagaggctggatcttatagacatcctggcccctgtgtgcaagtccactgggtcc

SEQ ID NO: 75206 - DNA, 122 bp, Homo sapiens
tagcaccttgggtttctgctgggatgcccagcctccagcccagagtgtgttgttgacccccgtttgggggggcgctgacccccgtttgggggggcgctgacccccgtgtgggggtggcgctg

SEQ ID NO: 75207 - DNA, 122 bp, Homo sapiens
tgagtgtcgtttgtcacactctgggccctggtgcttctgaacaggctcagggaggaagcccggggaggatgcactgctctcacccgcagggtaggtttccatttgcggaaagccccaccacc

SEQ ID NO: 75208 - DNA, 122 bp, Homo sapiens
ctcctccctctcggccactcccctccccatcaacaaatcccaacgcccctcacccgggaccgtggacctcgaggagccaccgttgcctcggatctcggaccaccaaacctattctcccgcca

SEQ ID NO: 75209 - DNA, 122 bp, Homo sapiens
cgcctgccctttgttttggagccgtagcccggcccagacgccgttaacagccttggagcgcggcgccggccaatcagcgcgccatgtcgccagcgccccgcccccatcctgcctccgttccg

SEQ ID NO: 75210 - DNA, 122 bp, Homo sapiens
cgcggggccctcgctcacgggctggacgctggtggaggtgccggcgcgggccccacagtgcgtgctgggctacacggagctccccgctgaccgcgcctacgtggtcaccttggtggtggccg

SEQ ID NO: 75211 - DNA, 122 bp, Homo sapiens
caagttgttctccaagcaactgctccacttgacattcccgccagcagagcacgcgtgttccggtacctcccgccctcagcagccctagcccggtcggcgtttgtgtttttaattttggccat

SEQ ID NO: 75212 - DNA, 122 bp, Homo sapiens
agatgcaccagcctccccagctggcacagtgcccaggaggtgaacctgatccaaaggagtcggggagtgggggatggaacaagcttctgccaccttagccccttgtcttgacccatattggc

SEQ ID NO: 75213 - DNA, 122 bp, Homo sapiens
gagacattcgtgtttcttcaaatatcagaagcttccacatcacagcaggagagctgacgacgagctccacctcctgaaggcttagtccaaaaacttcctgttggcatttgcaccaaacaagg

SEQ ID NO: 75214 - DNA, 122 bp, Homo sapiens
cgctaccctcccaccgccccgggacccctcacccgccccggcccatcccaaccacggcctcgccccaaccttggctgcggttccccaagcagagccgcgccagaaccgcccggctcaccccc

SEQ ID NO: 75215 - DNA, 122 bp, Homo sapiens
gatgagggtctgggagatggccacagccagggagccagcaaggagacgctcctggaagggcggggacccttgtattccacagaagtaattcttgcactgggagaggagagaggagggtgaga

SEQ ID NO: 75216 - DNA, 122 bp, Homo sapiens
cggagcctccctcttccgggctgaagatctcagccattccggctgcatccaggagcggcccgggagcttccccaacagtgaacacagacccagggctcctacccaaatggggacgtgaacaa

SEQ ID NO: 75217 - DNA, 122 bp, Homo sapiens
tggacgtggggctcctgaatgaagctgttatgcgcgtctggggctggcgggcaggctgtccggctgcaagctgggcctccctttgttgtgggggcctcattgagcccacggaagaggctcat

SEQ ID NO: 75218 - DNA, 122 bp, Homo sapiens
ggctcaggagatctggagtgcagttttcccgatctctgctctctcaggaaagtcgagtcacgccgagagacaccctgccgtgacaggtttcttcagcatccctaatgcaggtcaactccggc

SEQ ID NO: 75219 - DNA, 122 bp, Homo sapiens
gtcccagggcccagctcccagccttggctccttgtctgacaacagcagttcagtggacagcgacgatagcatcgaactggagattaggaagtttttggtggaaaaggccaaggagtcggtga

SEQ ID NO: 75220 - DNA, 122 bp, Homo sapiens
gtgcccattccccctaactcttcactcaactacgtgtgtagtccgagggagtgaggaccccgggtccaagagctcaatcccggccccgccccgtcggcccaggccccggggctgggaggaga

SEQ ID NO: 75221 - DNA, 122 bp, Homo sapiens
aaagtgctcaatgttactgagctcagagctccaagggaccttagaaactctctggcccaacgtcctcatttctttacagctaaagaaacaggcctagagaggagtgacattggcctgtgttc

SEQ ID NO: 75222 - DNA, 122 bp, Homo sapiens
cccctccgcgcggcggatcgcatggccgagcgctggcccagagcgcaggaccttgccctgcgcactccgcgcccgggcgccgctagtgccaaggcttccgccctctcagctgcgggatctgg

SEQ ID NO: 75223 - DNA, 122 bp, Homo sapiens
ggcatagggacggggccagcgtgggtgtcagccgtgggtgtggcagttccgcactgacctcggtgcattcctgctctggagtctagcatgggaaaatcacagcccagaagaccctcgggttg

SEQ ID NO: 75224 - DNA, 122 bp, Homo sapiens
ggtaggaagaagcctcaaggcccattcagatgagcctaggggtacaccgggcccggagagcgcccccacccccacttccacccaactggtgtagcccataccaccgagtggtgaaatcatca

SEQ ID NO: 75225 - DNA, 122 bp, Homo sapiens
aaatgtcctcatcattactttcaactgggtgagaaataatctgcctggctaattattgctcgtttttaattgtgggcccttcattcagattccaggagcaggtttcagtgattctgacagcc

SEQ ID NO: 75226 - DNA, 122 bp, Homo sapiens
caagctcaggggcaatgaagctggtcccccacacgaaacacaggcaggacttctgaaaggcggagggtcaggaagcttagtacaatactgccccttctaagaagcttgttgcccttgaccct

SEQ ID NO: 75227 - DNA, 122 bp, Homo sapiens
gcgtgggcgggagcctgggctgtgcgtgtccctcttgggctggcgcgggttcctggtgggcgcgggctcagcgccccgcactgggcgtggcccgccggcgcatgctgggcttgatctgggga

SEQ ID NO: 75228 - DNA, 122 bp, Homo sapiens
ttagacaagtgtgagtaattatgggctaataccgaatggcgaggcttctgcccgggcacccgctctaagatattaacctgttgatgtcacaccctggcccccggttcaaggctgagccctcg

SEQ ID NO: 75229 - DNA, 122 bp, Homo sapiens
cttcatcattttgtaacaagcagctgtgcatttccattttgcactggacctcacaaattacgttgcccgtcctgcctgcctgttgttgcttgcacccctcttgcagtttgtggccacctaag

SEQ ID NO: 75230 - DNA, 122 bp, Homo sapiens
ggctttctccaccgacgggtaacaggcaggcagccagtgcccagggtgccaggcacactccgggccttgtgccaaggagtttccatgcatcagctccctgacccctcattcatgcgggacgc

SEQ ID NO: 75231 - DNA, 122 bp, Homo sapiens
tctttaactccaagaggaagccctgcattctccgcaaatggaaaccaggaatcgggagcgcgtcagctatcgtagggtagacttaaggcccgcagaaaattaaaagcaaaagagcaggcgga

SEQ ID NO: 75232 - DNA, 122 bp, Homo sapiens
cgcgcctccccgaatgcggccgctgctgccgctgcaaacagtgccttgaggagaggaaagcggggaaccgtgttttcgccgcctctgtaaccactgcacacaagaaaaccagcttctgggag

SEQ ID NO: 75233 - DNA, 122 bp, Homo sapiens
tgccaccggaaaactgtctgctagggctctgccctaaccaccttgcaaacgagaaactggcgcgttgaacttagcaagcgccggcacctagcggatagcgctggtattgccaaacaaatatc

SEQ ID NO: 75234 - DNA, 122 bp, Homo sapiens
cggcggtagcggaacccgccgcgggcgcgcgcccggcccaggggagtgggtcggcgcctgcgcagaggcccgccacgcccacacacaggccaccgcccccaccggccggacggcgcggggat

SEQ ID NO: 75235 - DNA, 122 bp, Homo sapiens
tcaatgagcacacttgtgtgtggcacgcattacatctggaaggatgctcatgagaacgaacgtagctcctgaccagtcactgctgaacgcatccctaactgatgtaagacatggctgaggtc

SEQ ID NO: 75236 - DNA, 122 bp, Homo sapiens
aaaagtgcaccaggttaaccgccgggtcaggaaggacaggcttgcttccctggaagtctacgcaagcaacctgaatgcctggacaagccagctcaaaggtcaggctgccgtctctgttgagt

SEQ ID NO: 75237 - DNA, 122 bp, Homo sapiens
gaggaagaggctggactgggaggagagggaagggaaggatgagccacctggctccaggagcgggaaggaaggcaggagaagggagttaattgctctcaaacagggagaaactgttaggttaa

SEQ ID NO: 75238 - DNA, 122 bp, Homo sapiens
gttaccccggcctatgcccgtcccctgagaacttggtgcacagttaccccggcctatgcccgtcccctgagaacttggtggacagttacccggcctgtgcccgtcccctgagaacttggtgc

SEQ ID NO: 75239 - DNA, 122 bp, Homo sapiens
catgacagctgtgtctcgatggagtagactctcagaacagcgcagtttgccctccgctcacgcagagcctctccgtggcttccgcaccttgagcattaggccagttctcctcttctctctaa

SEQ ID NO: 75240 - DNA, 122 bp, Homo sapiens
ttgggacggtcggggcagaatggggagagactccccgcgtccaagataccggactggagccgaggccccaaatgaagggaggccctgcctggaatggggcttcgaatagtaccgaggggcgc

SEQ ID NO: 75241 - DNA, 122 bp, Homo sapiens
agaaattccacaggtcttggcagcttcatcttttgggggttaccattccctcccctgcctcgggtgagtaagaccttttctggtttctgtagtgtagtcaactcttgtttgtatccagaatt

SEQ ID NO: 75242 - DNA, 122 bp, Homo sapiens
tgagggggacaggaggccgcaccattggctggaaggcgtgtgagtgacaggggggccgggcgcagggcccatgggccggtctcgtcagctgcgagcccgggcgctccgggggagggcgacgc

SEQ ID NO: 75243 - DNA, 122 bp, Homo sapiens
tagtggctacggctgtgatgaataccaatgtgagctccttaggccaggagccttgtctttcgttcctgtattcctggtgcctggtatggcgtgggcactgaacaaatgtttgtcagatgaat

SEQ ID NO: 75244 - DNA, 122 bp, Homo sapiens
agcgtgtacacacagggagcctctcatggcagtgcacgggcatggtggatacgcagataccgcatgtgcaagactgctgtctgcacacacactggctgcagctacacggagacatcttgaca

SEQ ID NO: 75245 - DNA, 122 bp, Homo sapiens
tatggagcctagggaccctggctttaatgtgagagttatgtggaatggtaggaagaacaccgagatccatcgagttgggggaacagagccttctaagattgggaaaatcttcgcttaatact

SEQ ID NO: 75246 - DNA, 122 bp, Homo sapiens
tggctaaaagaattcctaaaaccgcaacttttttttttgaggaacttttctcttgcaacacgtgggctcaccatatgttcagggtgccctgatgttcaagttatatggtattaatatggcct

SEQ ID NO: 75247 - DNA, 122 bp, Homo sapiens
aggtccccggggcttcacccgctcaaggtgagccccctcagtccccgcccaccggccagtcggactacactaaggcctgggaagagtattacaaaaagatcggcccagcagccccagcagcc

SEQ ID NO: 75248 - DNA, 122 bp, Homo sapiens
aagggggagagacaaactgccgtaacctctgccgttcaggaacccggttacttatttattcgttaccctttttcttcttcctcccccaaaaaccttttccttttcccttctttttttttcct

SEQ ID NO: 75249 - DNA, 122 bp, Homo sapiens
atcccttccaaaaaaaatttctaacatcccacaatgatccacaggatggaaaccactattcgaaaatattacaactaaaagggacatttaaggttaatataaaccaccttaatacctactga

SEQ ID NO: 75250 - DNA, 122 bp, Homo sapiens
gcggcggcagcactgactcgaaaagccggtagaggatccttagggaagactccaaaatggcggcgtcgccggggtccatcgggtccacacgcggcaccacccccaagcaagaggtaactact

SEQ ID NO: 75251 - DNA, 122 bp, Homo sapiens
acttctctcttatttgcacaagtctatttcagttcaccccgtgagctaaagttcaccacccggtattatttttaaactcattgtccagcatccgttcatatttggttcactcttaatcagat

SEQ ID NO: 75252 - DNA, 122 bp, Homo sapiens
ccagccccccagctttggttcccgctgggaattcaggccctgtcaggctgtaggtcctctcgggagccctctgcctgccctactgctggcctaggcctcgggctgtctggcggccgcgactc

SEQ ID NO: 75253 - DNA, 122 bp, Homo sapiens
ccgcccggctccgccccgctcccgcgtgggcacaggcattgggctcccgggggttctccgcgcccgcccctgccggccctgaccagcctgtagtaactggcccctaggccgcagttctttgt

SEQ ID NO: 75254 - DNA, 122 bp, Homo sapiens
gtccgccccctctgggtccgagaagcttccgcccaaccctttccaggtgccgctcccctgcgcattccagagcagtactctccaaggtgggaaacctaggagtttggagtctcctccgggat

SEQ ID NO: 75255 - DNA, 122 bp, Homo sapiens
gcagcatggtgggcgtctacaacggcaagaccttcaaccaggtggagatcaaggtgtgtgcggccgtccctgccggctggggtgggctggggtcgcctgatgcaggcgggatcagctgacac

SEQ ID NO: 75256 - DNA, 122 bp, Homo sapiens
gttgacccgtgtgtgtccccatgactcaaagagggaaaagtctagctgtttccaatatcccgaaatcagtcttgctgggagaactgggaaaataaaaaagagatgacccccgtaggaagcta

SEQ ID NO: 75257 - DNA, 122 bp, Homo sapiens
ggatcacaaatcaaaccatgtgactcccgcatgagcaggcagagtggagataacacggatcgctgtgtacactgtgtgctccggttgttgcatccgagggttgatcggatggtggttcccat

SEQ ID NO: 75258 - DNA, 122 bp, Homo sapiens
ttcttcctctccctaccagcccatttactatctgaccacaagtgtgttgtccacaagctgcggttcacgtaatacatttcagggcacatgcaccagtaactattggtcatagcccaagctta

SEQ ID NO: 75259 - DNA, 122 bp, Homo sapiens
tagggactggggagagaagagaggtctgcccgtcacaagcatgctggggtaaatggtaaacgcagtatgattctgccagatggtaggagcagatggctcctgccccagcaaaggccaatagc

SEQ ID NO: 75260 - DNA, 122 bp, Homo sapiens
tttacaacaaaagaaacgatgtccttgctgaattggaggttatagtccacagcaggggtacgacctcctccatgcctttttttgggcaaagggtccctttggtgaatcctgtggatttcttc

SEQ ID NO: 75261 - DNA, 122 bp, Homo sapiens
ccctcttagcttatttccccatatgatcagtattgtaacacgaagtactgtaatacttcacggaggctgctttgaggatggattgcaatgatgcaagtacttaataaatgtttcctaaatct

SEQ ID NO: 75262 - DNA, 122 bp, Homo sapiens
caccccaaggatgattttagggcttcatccttccatcccttcttccccagttccctcccacgaggctgatttttcctgctgtttcctgccacgtccacacataagtcaaagataaagtctgc

SEQ ID NO: 75263 - DNA, 122 bp, Homo sapiens
agctgggattacagaggcgcaccaccatgcccagctactttttgtacaggcgtgggccaccgccctcgcctgttttgttttgttttgagaccgaatctcgctctgtcgcccaagctggagtg

SEQ ID NO: 75264 - DNA, 122 bp, Homo sapiens
acctgcgcccacagggcctggggaaaccttgagtacgaatgccacgccgcggcttgtgggcgacaccaccgctgtcaccatgccccagggccacctggcaatgctgctcttttcccgtgacg

SEQ ID NO: 75265 - DNA, 122 bp, Homo sapiens
acagtgtacatttgatacaaattgatttcttaactcaaataacaatgttgtcctcccggtcgggctatgtgtcactcactcgcgagcctgagtgaaaggctcaatctgtctgtgtgacagaa

SEQ ID NO: 75266 - DNA, 122 bp, Homo sapiens
ggtgatctgcctgcctcggcctcccaaagtgctgggattacaggcgtgagccattgcgcccggcctgtatcttttgttactaaagtggcactgctagtacttgtctcaggtggcctttagga

SEQ ID NO: 75267 - DNA, 122 bp, Homo sapiens
ctggaaatcactgtttcaaagtctatcgatacttacagtaatggtgggcaggtggatacccgcttccatggtcttgcactataaactggaatggatttctcaatgcgggaccagattatgac

SEQ ID NO: 75268 - DNA, 122 bp, Homo sapiens
gcaggggttttggatggtggcctccgcggacgagcgcagggatggagaggcctgggcgttcgaacacccacgttcaaagcaaagcccttccagatttagggctttctaacgtgcatttgtat

SEQ ID NO: 75269 - DNA, 122 bp, Homo sapiens
caactacccttcgggaaaccaagtttccaaatatgccgccctcttcctggtttgcacaaacggtttagggcattcgttccggtttcagggtggggtatgccgtcgctcccctcctccccgcc

SEQ ID NO: 75270 - DNA, 122 bp, Homo sapiens
gacgggtggatcacctgaggacgagagttcgagaccagtctgatcaatatggagaaaccccgtctatactaaaaatacaaaattagccaggtgtgctggcacatgcctgttatcccagctac

SEQ ID NO: 75271 - DNA, 122 bp, Homo sapiens
tggctgcgagctggggcccgacgggcgcttcctccgcgggtatgaacagttcgcctacgacggcaaggattatctcaccctgaatgaggacctgcgctcctggaccgcggtggacacggcgg

SEQ ID NO: 75272 - DNA, 122 bp, Homo sapiens
gggccgggctgtcagcgcaaggcccaggccgccgcagtggccacggccgctgccgcccgccggcttatataccgcggctaaatttaggctgcgcccggagctcgtccccatccgggacgcgt

SEQ ID NO: 75273 - DNA, 122 bp, Homo sapiens
atggtgaactgcctaactctacctcgtcccgatggtgaactgcctaactctaccacatcccgatggtgaactgctaactctgccacatcccgatggtgaactgctaactctgccgcatcccg

SEQ ID NO: 75274 - DNA, 122 bp, Homo sapiens
gggcggacccccactccccaccgcaggacagggaggcggtgccacctggccctggaccaccgaggccaaggtctcacaggaagctcagcctccagcccctgcagatccgcacggcagccgca

SEQ ID NO: 75275 - DNA, 122 bp, Homo sapiens
ccatagaaccatctgcccataaatctctgcctgtattaactggagtggtcgctggttgggcggatgctgtcaagtacttgtgatttgatttgtctgatgcaataggtctgcaaccatctggg

SEQ ID NO: 75276 - DNA, 122 bp, Homo sapiens
tattataaacatccatgtgcatacagatgtgagcagcaatccactcatttctttagaaaccgtccttagaagtgttgctggagcaggccaggtgtggtggctcacgcctgtaatcccagcac

SEQ ID NO: 75277 - DNA, 122 bp, Homo sapiens
tttccatttgccccaacacccagatcaattcccctcccctccctgctctgctctatgccccgggagcatctcctggatggcaacatgacttcctggtttactggctttcacatgggtgtgac

SEQ ID NO: 75278 - DNA, 122 bp, Homo sapiens
cagagggagctggtcccctgatgaagcccagcaggtgccggcctcagagactgcagggcccgctgagaacgcacccaccgggaacccgcgctggcccgcgagcgctgcacgcagcctgggct

SEQ ID NO: 75279 - DNA, 122 bp, Homo sapiens
tccccccggccgcctcgctgcccgcctcggccgccggttacgaggctctgctggccccgccgctccgccccccgcgcgcctacctcagcctgcacgaggccgccccgcacctccacctgccc

SEQ ID NO: 75280 - DNA, 122 bp, Homo sapiens
aaggcatcgcagttttctgtctgggtgttagggaaagcagtccatggtcctggggcacggcgttaatgtcagaggagaatctggcccttggagtctggacaacttgcgttaaaatcctggct

SEQ ID NO: 75281 - DNA, 122 bp, Homo sapiens
ctcttttatttacagtgctctctttcacggcctcactgaaacaggagacccgagaggctccggtgaaagggcactgtgtttgtgcattcaggccttccagggctggctacaaaggtgggggc

SEQ ID NO: 75282 - DNA, 122 bp, Homo sapiens
gtcacaagaccacgcacacggtgagacaaggcaagagcataaacatagagagaccacagacgtggcgagaccacggacatggcgagaccacggacatggcgagaccacatgcaaggcaagac

SEQ ID NO: 75283 - DNA, 122 bp, Homo sapiens
gcaagcccactagagctgagattcactccgagttcctgagcgcctgagccgcgggcactgcgtctctgcagcttccagccaacacctgcgcccgtgaccagacgaacgcctagagagtcgga

SEQ ID NO: 75284 - DNA, 122 bp, Homo sapiens
agcctaccgccgccagagtccaggtgattggcgaccccagaggagcctagggagtaggggcgaatgcccttggggaggagagaggtgcggcgaggacgcgaggcatcacgcaagctgcgctg

SEQ ID NO: 75285 - DNA, 122 bp, Homo sapiens
gaaaaaaattgtctaacgtgtgtgggtgaaaactgttaatcaagtgtttctactcccccccgaaaatcccctgaaagttggacaccaactgtataccctaggttgcttaaagggatttcact

SEQ ID NO: 75286 - DNA, 122 bp, Homo sapiens
cacccctcacgcccaattcggtaagagtctggacaggctgggaggcacgcctgggccctgcgagtgagcacatgcacatgggtgtaggggctcctctccctctagtgcctgcagcaggaacg

SEQ ID NO: 75287 - DNA, 122 bp, Homo sapiens
gcccataggcagacaaaataagcagtgttagctggttgcctgacgctctcactgcccctccggcataaatgctgcgctgccatcgcggcaggctaaacagaaatgctgagcctcccaagcta

SEQ ID NO: 75288 - DNA, 122 bp, Homo sapiens
ctgtgccaggcagccctgctaacctatcccatagcttatctgtgcccccaatccctttctcgtcatgcactccccagtatggggttgatggggagtctaggtgagtcccgcgtctcaccttt

SEQ ID NO: 75289 - DNA, 122 bp, Homo sapiens
gcgtgagccactgggcccagcctaatttattactttttataagcgatagccgtactgagccgccccctgaaggcggctgccaggtcttgccccaggcacctgggactctgtttgcaggccct

SEQ ID NO: 75290 - DNA, 122 bp, Homo sapiens
cagcaagaggcaaaactgcagaacagatggggcagaagagaaggagggggcaggttgacacggcctccaggaagcctgcctaagcacctcccaagctgtgctctgcagctcatagaccatgg

SEQ ID NO: 75291 - DNA, 122 bp, Homo sapiens
taggtagtccagggcttatgtgactctctacgcacactttcttcttgttgcttggccttacgtggtcttgctctcatggtccaatatggtgatatctgcattccaggcagcaagaggcaatg

SEQ ID NO: 75292 - DNA, 122 bp, Homo sapiens
tgttcccgtctgcctgtttgtgtccgcacagcctctcagagctaggacgtcgcatgcacacgtgcagagtgaggaacagggctgaggaggcagggcagcccatacaaggaggcagggcgggg

SEQ ID NO: 75293 - DNA, 122 bp, Homo sapiens
acttggcccatggtgcagatctgctccagctcactctggtgggatcacgccagccacggccgggccacggcacatcatggcaacgtgctgcccacctgctacgccacctgtttttctagagg

SEQ ID NO: 75294 - DNA, 122 bp, Homo sapiens
tgcccaggtggatgctcaaggatgagaggccccgcagggcctcacagggcttctggctttcgctgctgctgctgcccctgccccccagctcatcctggggggcggcccggttgctgctgggc

SEQ ID NO: 75295 - DNA, 122 bp, Homo sapiens
agcaagcgtgggtacttaattaaattctaattaggacactatcaatatcctatttagctgcgtagcttttgtgcgccgcggtccctttcagcgcggtaaatagggtctcgacgccttatctc

SEQ ID NO: 75296 - DNA, 122 bp, Homo sapiens
accgtcctccacggacgacacaccttaccccgccactccaccgcggcttgccatgtgccccggccccgagggcccagacaggcccctctcgccacctagaagagaagaagggtctgcaaaca

SEQ ID NO: 75297 - DNA, 122 bp, Homo sapiens
atctttgggggcctattagctcaatgccagggtactgaggcaggacaagggctccccaggcgggatgaatacatgaagattcacataatggacagctccaggggttggcaaacaactgccca

SEQ ID NO: 75298 - DNA, 122 bp, Homo sapiens
gtgtctccaatctcttttactctgggaaagttaccttgtttgaaattgtagattaatttccggtttggccctgttcccttgaaccacaagacaggtccatttggtaaggtattgggtacgct

SEQ ID NO: 75299 - DNA, 122 bp, Homo sapiens
actaggacactcagagctgcccggctgatgatgaggggcactaggacactcagagctgcccggctgatgatgatgggcactaggacactcagaactgcccggctgatgatgaggggcactag

SEQ ID NO: 75300 - DNA, 122 bp, Homo sapiens
ttgctatacttctgaccaagagtctttaaaaagcagattagaattctactattttctcttcgctctcctgtctcctttctgtaggaccacttgactaagctgacaatagagctgacaaaccc

SEQ ID NO: 75301 - DNA, 122 bp, Homo sapiens
gataaaagaatgaaaggtttagagaggtgagtaagaatgagggggtggtagggtcgtgggcgggaataactgtagaggaaggacaaggagaaggaaaaactgagacagtggttcctgaatat

SEQ ID NO: 75302 - DNA, 122 bp, Homo sapiens
cccgacattaacagggccaggaggaaccgctacggccaccaccgccacctgccgaggagccgcccaagcccattttgcataaatgttttatgaggaagattcaaaagctattttttgctaca

SEQ ID NO: 75303 - DNA, 122 bp, Homo sapiens
caagtgtgtggtcctctcagacctatggagttggtgctgttctggctccctcttaaagagcgggaaactgagacacagagaagtcccaccgccgggggtcggggtggggagggcctgggatt

SEQ ID NO: 75304 - DNA, 122 bp, Homo sapiens
ccctgctcctggccggaccgggagcccactggggtctcctccagttctccgctaaagtgtcggtggacggcaagcagctaataagtagcactggacttgcggaccccaggcaaactgccgag

SEQ ID NO: 75305 - DNA, 122 bp, Homo sapiens
aagtggcctgtggttccctcctctgcatgccccggatgtggcctgtggttccgtagagtccgggcctgaccttcccccctcctcctcctctccatgcccccgatgtggcctgtggttccgta

SEQ ID NO: 75306 - DNA, 122 bp, Homo sapiens
cgcttgagtgcaaaaatttattgggatgtgtgatccagcaagtaggagtaaaagacaagacggatgaaggacagaggatggaaaccaatacaaggatgagttattaagttggccacagctcc

SEQ ID NO: 75307 - DNA, 122 bp, Homo sapiens
tgataggctaaatcctaacttcctataacagagaaagttgggcatatgactctcagatctcggtcaccaagcccaggcccccaggctccaaccgaagggaaatttcctctggaaacttttca

SEQ ID NO: 75308 - DNA, 122 bp, Homo sapiens
gggcgaagagaaatgggaccaggcgtcagggcggtgggaccctgtccagggtcctgactccgcgccagggctccagaccagtcggcctccgaaggccctttcacccaccccacacaagagga

SEQ ID NO: 75309 - DNA, 122 bp, Homo sapiens
agaaggtggaatagggggtgccatcggtgggctgggctaggggaggcgagactgggaagtcggtgggcccagagactccgttttgcaacatgaagagttctggagagggatggtggtggtga

SEQ ID NO: 75310 - DNA, 122 bp, Homo sapiens
gacccaagtcatccgggctcccccgggatagggaagtgcgggcgggcggctgggtaggggcgccggcgcagggtggccgagtcgcccgctagcgcttccgccgaggcaggctcgagtgggga

SEQ ID NO: 75311 - DNA, 122 bp, Homo sapiens
gggagccgagctctgtgaggagacccctgtgaatgacaactcatccatcgtggtgcgcatcgcgcccgaggagcggcagaaatacgaggaggagatccgccgtctctataagcagcttgacg

SEQ ID NO: 75312 - DNA, 122 bp, Homo sapiens
cactttgtttctgtccacaaaacctagtccctgttctgtccaaagccttcttccagactccgttaggacccagaagagtgcgtttctcttctagaggctcgggagaagttaggagtgaagag

SEQ ID NO: 75313 - DNA, 122 bp, Homo sapiens
caccaggagtctaaaaggtaaatcacccaaattatctaaatctccactcacctgtctgtacgtataatggttgcttcagttaaagcccttgtggctttacatcattaagggagtagatcagc

SEQ ID NO: 75314 - DNA, 122 bp, Homo sapiens
ttgcagcgtggttcactgcccaggaggacccccaggacccactgttggtgacatcccggccgccttggtgctgattcctgggctctgacctgagacctctgggttctgagctgtgatgttgc

SEQ ID NO: 75315 - DNA, 122 bp, Homo sapiens
acgacccgcggggtgagggtgggagctcctctcctgaccacccgttgcaggcagtcatcccgtcattcggggtcgtcttcagccctcgcggctgtccttttggtgtttctttcccccggcat

SEQ ID NO: 75316 - DNA, 122 bp, Homo sapiens
aggggactgcaggaatcgaataaacgcagtcgagctgcgcggggctgctggaagcccaggcgggggaagggggccgtgtgtgggggcgcagagcgcccttgagccttacgcagaggtcttgt

SEQ ID NO: 75317 - DNA, 122 bp, Homo sapiens
cgtcattggtcgtgcgcctgctcagtctggggcaggggctgggacagcgtctttaatccccggtgccggtgcggggatcagggcaacgtggagtgagacagcgaagggatggcgccgtgagc

SEQ ID NO: 75318 - DNA, 122 bp, Homo sapiens
acgcagctcatcgtgatcttcaacgaaattgactccaccgagcccgcctacagcggctcgcgcctccaggtgatcaccaaggaagtaagcgcctgcatcaagaagatcggctacaactggct

SEQ ID NO: 75319 - DNA, 122 bp, Homo sapiens
gtactgaggtcacagatcatgcctgtaaaacgcccaatacacagtgagggtgtggtgagccgtgtctgtgatggaggggttttgtttgtttgtttgtttgctcgtttgtttttttgagtctt

SEQ ID NO: 75320 - DNA, 122 bp, Homo sapiens
ggcagcaggtcccgggctgcaggccccgtggagagcggaaggcgcgcggcgaggcccgggcgggaacccaaggctggaggccggccctaagagtgcttccctagcagccccggcgggaaaag

SEQ ID NO: 75321 - DNA, 122 bp, Homo sapiens
acaaagctggtcatctcggcggtcacacagagttcacttaccgtagtccataaggcaccccgtcccgaaaagcgccaagtgcacgaccatcggctttaccgcctgctcagcacgcctaatgc

SEQ ID NO: 75322 - DNA, 122 bp, Homo sapiens
ggtccgcagcttcattattgaagtcagtgagaccaggaacccaccagcaggaacaaactccggacacatcttggggacttgtccaggatatcgctatgcggtgagtactatcggaccccttt

SEQ ID NO: 75323 - DNA, 122 bp, Homo sapiens
aatggagatgggaggccccggcaggagcgtgaatgggtgtgggagggaaagcgcttgtgtcgcatgtttggatctgatcacaccacccacctgcctagaaggccccaatggcttcccgccgc

SEQ ID NO: 75324 - DNA, 122 bp, Homo sapiens
cggcacccccatctaaaaatgtgttcgcgcccgcactttcagcactcccagatgacaaaacgctgtgtttgtgtataagtgaaagccactcgcgccagtcacttccagtttacaaagccttc

SEQ ID NO: 75325 - DNA, 122 bp, Homo sapiens
caatcaatcaatcgattataaatcaatcaataataaataaataattgcttactcaattaccgggtgcccccaaaccataagctgttgaggacaaggagtgatctgatttgacattgcttctg

SEQ ID NO: 75326 - DNA, 122 bp, Homo sapiens
actttcatgtattcccacaaccacgcgtctatgctgacaatgcgccttctcactgaaccacgacccacggcgctgcccctgcacaggtggacgcccttcgcatgcacccatccccttcttgc

SEQ ID NO: 75327 - DNA, 122 bp, Homo sapiens
gaagagggccagatacttcacctgaaaatccgccaggatcatctcccggtccatgttggacgccatggcggccgccgagttccgcggctccgggagcgaagcgcgcacctgggaggcagacg

SEQ ID NO: 75328 - DNA, 122 bp, Homo sapiens
ggcgcggggcgagcccgggcgcgagcctgcggccccgccggccgctggcgtgcgtgcgtgcgtgcatgcgtgcgcgccaccgccatcgccatcgccttcctggtttggacagctctaccggc

SEQ ID NO: 75329 - DNA, 122 bp, Homo sapiens
tctccagaagcaaagcccatgctggctggggccaagggctgacttctaagagtggagaatcgtgactccacagcaggggagacctagctgctatgaaagcaacaacttctagggaggctggg

SEQ ID NO: 75330 - DNA, 122 bp, Homo sapiens
aagcgcgcccggtgcttcttggggatgaagatcctgccggcgaggacggcggagtcggggcgcgttcccggaccccggatctctgcaaaccgcggcccgaaggcgcgtcctcgcgggcgccg

SEQ ID NO: 75331 - DNA, 122 bp, Homo sapiens
gcaccccggggcacccacgtggcagagtggatcatgcagagtggcaccccggggcacccacgtggcagagaggatcgctgcggagtggcaccccggggtatcagtgtgcaagtttaaccatt

SEQ ID NO: 75332 - DNA, 122 bp, Homo sapiens
gtgacctcagggccggattggaccctgcttcgtgggaggcgggactcagggcttagcgggcggaggagtatttaagaccgggcggagttggaggtggccaagggcagaatgagcgggattca

SEQ ID NO: 75333 - DNA, 122 bp, Homo sapiens
aaaaccggattttaaagtaaacagactttagaaaagtcttcctactcctccacaggttaccgcttacattagtttattatgtttccatttagttttgttaaaaaaaaaaaaaaaggactctt

SEQ ID NO: 75334 - DNA, 122 bp, Homo sapiens
tataggactagtctccgaggagtggagtccagcagggaccgtctgactgagacagggacgcggcctcaccagaagccatgctctccctccatctccttcctcgctctgggccccagctttct

SEQ ID NO: 75335 - DNA, 122 bp, Homo sapiens
ttctcggctcactgcaacctccaccttccagactcaagcgattcttgtgcctcacccttccgagtacctgagactacaggcatgcgccaccacgcccagctaatgttttgtatttttagtag

SEQ ID NO: 75336 - DNA, 122 bp, Homo sapiens
aatttaaaacctgtatatattcttatggttaaaagtcaatcaatacagattacctaatttcgttatcacagcacccctatgagataggtactgtttttttttaaaggcttaaaatgtatttt

SEQ ID NO: 75337 - DNA, 122 bp, Homo sapiens
ggggaggggggtccgggtagtggggcgcgggactgcaggctttgttgtccgcgacaggctcgggtggttgcttcagaattttgcacttttgccaactgggacagaggtcgcagcttgaggac

SEQ ID NO: 75338 - DNA, 122 bp, Homo sapiens
gaggctagctggcttcaggggccgtgccaagccacggaaggggggtcagacagcaggggacggtgcccagggtgacacagctcggacaggatcagccctggtgggcagccagaggccggagg

SEQ ID NO: 75339 - DNA, 122 bp, Homo sapiens
gccgatgtagtgttcccgggaaaacctgatccagaaggcttccagggagaggagattttgcgcctaagatttcaaatgaaagatctcataacactgtcagtgaaacaactaagcactgctgg

SEQ ID NO: 75340 - DNA, 122 bp, Homo sapiens
gcagccccggaaactggtgatcagagaaacaggggtttgcaattttaagcaatgcagcaccgtcttcaaatgcaggtcgcaggcacccacaaacagagccccacccgcccatttccaggctg

SEQ ID NO: 75341 - DNA, 122 bp, Homo sapiens
ttatcctgtctggttgaaggaaggggtaggcattgaactattttaagctggagcctgatgcgatccaatttgcattttagacagatcactatggtgatgatgggttggaaggagtctgtttg

SEQ ID NO: 75342 - DNA, 122 bp, Homo sapiens
atggcggatgacacaggcggcgcgccgcctttgtcctcgtcttatataggccagctggcacggccccgcctactccacgatcgacagctccaatagccaattgcaattactatgcttgatga

SEQ ID NO: 75343 - DNA, 122 bp, Homo sapiens
actcaactgagaggcccctggagctgatggggagaccgaggcggttacctgcttcaaaggcgatcagatcatgccaggggactgggaacagaaggctagcgagcggtgggggtggggaacgg

SEQ ID NO: 75344 - DNA, 122 bp, Homo sapiens
cctggctgggggacgatctgtgagcaagtccgttcttcccacttagattcacggcgacatcgatgcccacagggaaatcacctgatgggcaccggtgccagcctccaagcagctaacgcgga

SEQ ID NO: 75345 - DNA, 122 bp, Homo sapiens
tttatgtttttgtttgtgttgttgaaaatcagttgactgtaggtattaggctttatttctcggttctatattctgttccattggtctatgagcttattttcatatgagtaccatgctgtttt

SEQ ID NO: 75346 - DNA, 122 bp, Homo sapiens
cggcctcctcggcctcccctcaaagtgctgggattacaggagtgagccaccgtgcccagccgaaataacttttatgaacattcatgaagttcagaggggaccaatttcctgcaaatgtcaaa

SEQ ID NO: 75347 - DNA, 122 bp, Homo sapiens
taaacagaagcatgactcctccaagaagcctgtctgaactcagccctcctttctggctcccgcagaccctgtgctgtctatgctgagccaagtacctcctctgtgagagtcactgttccctc

SEQ ID NO: 75348 - DNA, 122 bp, Homo sapiens
gaagcagttggggtaggaatgagaatttccactttgaaagtaagtaaattgaaagaaagtcgaccctgaggataggccccacaatctaaggcactggctaaatattcagggaaaggtgttca

SEQ ID NO: 75349 - DNA, 122 bp, Homo sapiens
cactgttggcactggttttgagaagggctgcataggagctgcttgctaatggagcctggacgtgtgggcatgggcgctgaagaactaggaaagagtgagcaacgctctctggttggtagtga

SEQ ID NO: 75350 - DNA, 122 bp, Homo sapiens
ctcgggagcgtcgcgggccgggccattcgcgaaccagacgcaacgacgaagcgaccacctcgagagtggggcgggaaagctccgcaccctctatccccgccaccagtctccgcccagtaact

SEQ ID NO: 75351 - DNA, 122 bp, Homo sapiens
ggcagacagtccgagggatacgaccggggggctgaggccaggtatgctttacggcactgccgggcaatgaagcagcccgcgctaggagctggggacgaccacgatgagaacagaaggacacg

SEQ ID NO: 75352 - DNA, 122 bp, Homo sapiens
tggttcctttccagaacatttgggaacacttggcttggtttcagtcaccaaatgcggactcgcccagggtggacttagttctgaggtggcctcttgctccctctagtggtttagaaatcact

SEQ ID NO: 75353 - DNA, 122 bp, Homo sapiens
gcaacttcgagcccagtggcacaccagcaggctttttgtgcaaccgaggaacatccactgcgccccttctgccctgcgcctcctctgtcaaagaccagcgagcgccttagattgcagacctg

SEQ ID NO: 75354 - DNA, 122 bp, Homo sapiens
tccgagctcgagcgtgacgggaagttggggcaatttgttagttatccgccgccaccaagacgcggcacggcgcctggaccggaggggccccgcgcgggcgcgaactttgggctcgggcgagt

SEQ ID NO: 75355 - DNA, 122 bp, Homo sapiens
gaaggagcccagtgctgggggccagcctggggtccctgggcccacctggcatccaggaaacgggagcgcaggatcatcacagcctcgcaggtgctctgcttcagctgcatctggatggcgct

SEQ ID NO: 75356 - DNA, 122 bp, Homo sapiens
aagtgacgtctgtatcactcctgctcgaaagcatccagctgtccattccctctaaagtgacgtctgtatcactcctgctcaaaagtgtccagctgcccattccctctgaaatgacgtctgta

SEQ ID NO: 75357 - DNA, 122 bp, Homo sapiens
agcaccacctgacatcccatgcagcctgccagtgctgcagtgagcacacacgcacacacacgggtgcacacacagagctccgcagcctcctcctgggacccttgccctgcccccctcccatg

SEQ ID NO: 75358 - DNA, 122 bp, Homo sapiens
acgtgtatcttaagtgtattttgaaggaaaaaaactgttcaaaggaatattaaacctttacgctgttcccctactgttaaagacagattgctaatggaaaccatctaagaaactgatcacat

SEQ ID NO: 75359 - DNA, 122 bp, Homo sapiens
gcatgggtaggtgacagctgtgtgcacgggtaggtgacagctgtgtgcacgggtaggtgacggtgtgcacgggtaggtgacggtgtgcacgggtaggtgacagctgtgtgcacgggtaggtg

SEQ ID NO: 75360 - DNA, 122 bp, Homo sapiens
ctcggctctcgtctcaggaatcccagggcagaagtccagcgaggcggcaggtggccggcccgtccccagcctctcttcccactgaggagagatccaagggccggcggagtggtggtgtctgc

SEQ ID NO: 75361 - DNA, 122 bp, Homo sapiens
tggccttggttaagacatttaccctctccaactctcagtttattcatctgggaaatgatacgtttggattaggtggtcttgaattaacattatctaaagcttatactgtattcaatatactg

SEQ ID NO: 75362 - DNA, 122 bp, Homo sapiens
agggcggcggccatgagtgaacgtaagagtggacagacaccaaatgccttctcagggccacgggggccacgacacgttcctccctccagtgagactcctcagagcctggaaaattcaggctc

SEQ ID NO: 75363 - DNA, 122 bp, Homo sapiens
ctccaattctgacggtggcaggtctgtccgggagcccggacccccgtcccccacccacaccgaggctctggctgggacccggggacgctgcgctacttgaccccccaaccccacccccgccg

SEQ ID NO: 75364 - DNA, 122 bp, Homo sapiens
aacataacgcaaatcaaagatgaactggggacatcagttatagaatcactggcccagccccgatgtctgtgttcactcatcacctaggagttagggatgaaacatattgaaatgcaaatgaa

SEQ ID NO: 75365 - DNA, 122 bp, Homo sapiens
gacgtctattcgcctgcagcagacccgaaggaagcttcggctcaatggttcatttgcatgcgcccgtgctattggtcggaggggcggcaccgtagccaatggtgtgcaggggtgttgaccga

SEQ ID NO: 75366 - DNA, 122 bp, Homo sapiens
tgtgacgagatggggaaggcaccaactcctcagaaggagagggggccagctgagcccacacgcagggagactctagcatcggggggtttccggggcaactctgcttttaaagtttaggaaac

SEQ ID NO: 75367 - DNA, 122 bp, Homo sapiens
caggggccaccaaatatgtccatggtctctgctgcctggtcaacggccaccccgggctgccgtctcctggccagacctggagctcacaagctaattttagaaatgactggtcgactcagctg

SEQ ID NO: 75368 - DNA, 122 bp, Homo sapiens
ctctctttcccaggctagtagctgagttttccaatagcctttctggcggttttaggaaatcgtgtcctttataaaaaataatgctacctaaataagtgttttaaacatctgaagatgccagt

SEQ ID NO: 75369 - DNA, 122 bp, Homo sapiens
gggcccatcctgctcctccccctctgacaccctttctcccccaggcgcggaaccctgacccgccttggaggctcatccaggcacctgctgccctgcctgagctccattcacaagacactccg

SEQ ID NO: 75370 - DNA, 122 bp, Homo sapiens
ctgcgtcctgattggcaggcatatggcccaatcgctatggtgggaaggcgtgccccggcccgcccactgttttccttggtgcgtttctctttaaatgcaaataagtgcaggcgtggtgttgg

SEQ ID NO: 75371 - DNA, 122 bp, Homo sapiens
tgtattcagaaatagacttactcactgaattcgtacatattagcactgaggagggtctttcgaagcattaaaaaactgtgggtaataacttacagaagtaaaaggcgtatgctggaggcaga

SEQ ID NO: 75372 - DNA, 122 bp, Homo sapiens
gataacatactgagcttatcaacatctcttgtaaaattgtctagctctggccgggcacggcgggtcacgcctgtagtaccagcactttgagaggccaaggtgggtggatcacctgaggtcag

SEQ ID NO: 75373 - DNA, 122 bp, Homo sapiens
tcgcggtgagtgttacagttcgtaaagtccgcgtgtccggagtttgttccttctgatgttcggatgtattcggagtttcttccttcttgtgggttcgtggtctcgctggcgcaggagtgaag

SEQ ID NO: 75374 - DNA, 122 bp, Homo sapiens
cacatggcgacgcggccggcggcggcgcgcgcgtagctcgcctcgggctcctggcgggagcgggagttagggaggccgggttcccgaattacacacaccagcgttatttattctatcagtct

SEQ ID NO: 75375 - DNA, 122 bp, Homo sapiens
gtgagaatccacgcctacacctgcaggcaggaacacgcgtaaatcacacacaggaaacagcgagaatccacacctgctggtgggaacatgcataaatcacacacaggcaacagtgagaattc

SEQ ID NO: 75376 - DNA, 122 bp, Homo sapiens
ctgcaacggttcctgaaacctcaagacattgagatcatctttatcaacattgaggtgagccggccgatccccagccctcttgggtctgtctagtgcggataacctgctgcccctacctctcc

SEQ ID NO: 75377 - DNA, 122 bp, Homo sapiens
aaaaaaatagacgtgctttgtggccgcatcccagcctgggggtaagggatcagctgtccccggtgcgcctgtactccgcggtgccatccgccacgatggcatcaagcggcgagcgcttcttg

SEQ ID NO: 75378 - DNA, 122 bp, Homo sapiens
cgcccgcaacatatgcgcgaaggaaagtgctacgaacgtcaaatggccgccccccgccgacgccatctgctctgcgaagcagaaacggcggcagctgcgcgcccagtccctccgcccgcgcc

SEQ ID NO: 75379 - DNA, 122 bp, Homo sapiens
gggcgggttgtcccagagcgcaggtggggacagtatcctgtgggcgatagggagccatggcgggtgtttgagcaggagagggaccagggttgaggaggcacctatggggcaggtttgaggct

SEQ ID NO: 75380 - DNA, 122 bp, Homo sapiens
gaaaagtgtcacgtttgggggggcaaccaggtgggaactcctgcatggttaaggatcctccgatcggacgctgcaggcaggcgtaggggatcttactcgagaccaccatggtggggaggtgg

SEQ ID NO: 75381 - DNA, 122 bp, Homo sapiens
taacaagaaaaggtcagcctccctcgctcgacccttagcccggtttttagaattcttcctcggaggcaggggctcaactcacactctcacgcatactggccacgggagagaagcgtgggagg

SEQ ID NO: 75382 - DNA, 122 bp, Homo sapiens
cacaaccccgaacgttcagactgacatagaaacacaggcacagaacacctccgatcatcacggacccacaaagggcctccagcgaagaccagcccaccgtgtctggcacgcactcgcgagcg

SEQ ID NO: 75383 - DNA, 122 bp, Homo sapiens
tttccaccatcctccttcaatatattttccagttttttgggcaaaacaggccttctcattcggagagtaacttgagacctcctggaggggaggctctgggaggaggggcatagctaaggctt

SEQ ID NO: 75384 - DNA, 122 bp, Homo sapiens
ttggccacagcgtcccctgaggcacgagagcggtgctcagcaggcagcggcactgccactcgagctgctcccttgagagccatgggtctggtggctctgacccacctctccccaacctgcag

SEQ ID NO: 75385 - DNA, 122 bp, Homo sapiens
cttactatttctgaatctcagaagaaccctcagaaatagacattggcaccctgatctgaccggtgaggacactaaggctttcaggcataacttgcccaaggaatgggtggaactagcacgca

SEQ ID NO: 75386 - DNA, 122 bp, Homo sapiens
catggtgacactcggctagggctggcaacagctgcgcacctccctccctccttcagctgccgggctgtccttgcaggaatctgcatttgtgatcacaggagtagaggtttaccagggccctt

SEQ ID NO: 75387 - DNA, 122 bp, Homo sapiens
catatcctggctaatgtcaaaccattttccaaaatggttggttgcatcggttctcacgtccgcccgcagaaggtgacggttctttgcactacgtcctccctagcacctgacgctgccagacg

SEQ ID NO: 75388 - DNA, 122 bp, Homo sapiens
cctcagcagggacacctgaagcacaagggagtggccctgagtgggcaggtgtgggcccctcgcctcccggggcaggaaggtgggaggggcgacactgaccacgtctggaggcagcgcctgca

SEQ ID NO: 75389 - DNA, 122 bp, Homo sapiens
ttcccccacggtggcacgcacatcatccggcaccatttccgtgccccgaagacgcccgcgcgggacctgggaccgccagtgaagaacccctcctgggctctttaacgagcagcagatgcgca

SEQ ID NO: 75390 - DNA, 122 bp, Homo sapiens
gaatacagctgaaaagattgaagcaacaggttcgcaggggaaggcctttacagcttctttcgactctgacatttcaggatcagcacaattctcccctatttactgctgaagcaatcaactgg

SEQ ID NO: 75391 - DNA, 122 bp, Homo sapiens
tacgttactgctgcctgagccgccaatgaagtggcgcgacagaaccaaggggcggggaaacggcgcctgcgggactccaattggtcacgaacaataacgaggctgcgctccccagaggggtg

SEQ ID NO: 75392 - DNA, 122 bp, Homo sapiens
gaagattcgaaggattcccatagagcgtggctcacttcccctcaccgggacagcgagcggcggctcacctgggagagcaaagcgtggctctcctgcgcccacccgggagagcaaacaatggc

SEQ ID NO: 75393 - DNA, 122 bp, Homo sapiens
agaaggggtcaaagtgtgaactttctccactgcttggtcctagggggcctcaacctgcaccgcggcacaggacggccgccgtggctgtccggggttcccccctgcgcatttatgcctccatc

SEQ ID NO: 75394 - DNA, 122 bp, Homo sapiens
ccagagtgctgatgccagcgtggatccgagccaggcctcaggggactggcgttcagacctcgggccgctcgcatctctaacaatttgagccctactttaaggtgtggccacggtccccaccc

SEQ ID NO: 75395 - DNA, 122 bp, Homo sapiens
gagcggtgggggcactcaggcagccccagggcctggccaaaccacaggtatgttatgagacgcttcctgttgtggagacattgctgtgggatccggctgccctgcttgctcacccgccccgc

SEQ ID NO: 75396 - DNA, 122 bp, Homo sapiens
aaaggcctctgtccttgcaataaggcagagggtctaattgagctgactaacacaagccaccggcagatgataaaattgaaagcgcgcactgtaacacacactcactggggcctccagagctg

SEQ ID NO: 75397 - DNA, 122 bp, Homo sapiens
aaaatagaaaacgtgaattgttttatagccacacgaaaacatacacatgatcaggccaggcgcggtggctcacgcctgtaatctcaacactttgggaggccgaggcaggcggatcacttaag

SEQ ID NO: 75398 - DNA, 122 bp, Homo sapiens
tggtccaggagcgtgaggtccagggtgccccggataaggctggtccaggcgcgaagggcgcggggtgccccgggtaaggctggcccaggtacgtgaggcccgaggtgccccaggcaaggctg

SEQ ID NO: 75399 - DNA, 122 bp, Homo sapiens
ttattttgcaaacgcctggaagagcacatgaaactcagagaactacaatgcagacgacaacgcctagaaggaatgggtccccgctgctcgaatgaaagattaattacatttgccccaaaagc

SEQ ID NO: 75400 - DNA, 122 bp, Homo sapiens
ggaaaaaccaataacaaatagctcacacatgtactatgtaaacgtactaggtactgcccccgcacgcaccgcgtcaacgtactaggtactgctcacacacgtactaggtaaacgtactaggt

SEQ ID NO: 75401 - DNA, 122 bp, Homo sapiens
gaccccctctatccacgttttttgtaagtttttaacctatcaaaaagttaagaggccgggcgtggacgctcacgcctataatcccagcactttggaaggctgaggcgggcggatcacttgag

SEQ ID NO: 75402 - DNA, 122 bp, Homo sapiens
acacacatggtggtctgtgccccaggcttccgccggacatctcctcctccccgtcctcatcgcagcgtttaggacatcacgtcttcttgtgaagcccagtgttaactgcttttgttttttct

SEQ ID NO: 75403 - DNA, 122 bp, Homo sapiens
gcatgttgcagtttcttttcggttttggttttttttaaatgttttattttgctttcccagcgggaggggaggaagaagagtgtttacaaagtcctgtagccccctcacctttctgttttcac

SEQ ID NO: 75404 - DNA, 122 bp, Homo sapiens
gggaatgcctgctcctgatccgatgtgtttagctggaagaaattcactgagctgcgcactcgcacttgggcacgtttccctgcataaagtttttgtttgtttgtttttgttttttttgagac

SEQ ID NO: 75405 - DNA, 122 bp, Homo sapiens
ctgctctgaactcctctgacttagcattcaacttaagtcaagaaatacttattggctgggcgtggtggctcacgcctgtaatcccagcactctgggaggcagaggtgggtggatcacaaggt

SEQ ID NO: 75406 - DNA, 122 bp, Homo sapiens
tgcgtgtcttagtcctacactgggagacctaggccttaggtcggggtctgatgctagcttcgtgagcgtgcatgagacactggctgcctctgggcctcagttttctaatctgtaaaatgaag

SEQ ID NO: 75407 - DNA, 122 bp, Homo sapiens
tggtgcgcattcaggccgcgcccacccggcatgggggtcacgtctgcacccttaatcgcgcgcacctgcgctgtcccaggacagggaaggcccgttacaactgggcggcctccgccacaggc

SEQ ID NO: 75408 - DNA, 122 bp, Homo sapiens
gctttttactgctgacaggtggaacacacggaaggttccctcatgccaggcatctgttcacgacgtgaacctttcttcgtcagggtaggatctgggccaccgtcctccgcaggagccacctg

SEQ ID NO: 75409 - DNA, 122 bp, Homo sapiens
gacactacatatttatttatgtatttctctccctcaactaggatataagcttatgagagccgagacttttatcctcccctgcttatctccagtgtgcagaacagacacctgagtaaaattat

SEQ ID NO: 75410 - DNA, 122 bp, Homo sapiens
ggccagggaggtctgacacacccccacctcccctagatacaccccctactgatccgggaccggaggagcgagtccagtcgcaacaaactgctgagacgcacagtctccgtgccggtggaggg

SEQ ID NO: 75411 - DNA, 122 bp, Homo sapiens
ccccacaacactcccagcctgtccccagcctgcttccggctttctggtccttttctcttgcggggaaggagaattttatctgactttctctgacttctggcctttcttgggcagctgaaaat

SEQ ID NO: 75412 - DNA, 122 bp, Homo sapiens
atttcaataatgttaatttccttgcttccctcttgaggtccttaagattcataggttctccggactccttgaaagttttgtgtagatgcatgaggtgtatttttcttggaaataaagtccac

SEQ ID NO: 75413 - DNA, 122 bp, Homo sapiens
ttattactgttttatttttgccatctcccctttggtatctctatttttctcttagtctcacgtgagtctccagtctcctctagctctgggttccttttgcagacagcacctgcctctgactt

SEQ ID NO: 75414 - DNA, 122 bp, Homo sapiens
agctgcagaaagagcgccaaagaaatctcaactccagcccggctaggctgggagtgggtgcgggagaaacagatggggggcacctatttagatctgatcttctcttaatgtgaccctgagag

SEQ ID NO: 75415 - DNA, 122 bp, Homo sapiens
gggtcgcattgcatggcaccctgcagccagcagtgcaggctgggccttccagcagggcagcgaggactctgtgaaatggtgtctggtgtgccgtcgtgaatgctggtcagacacgtttccat

SEQ ID NO: 75416 - DNA, 122 bp, Homo sapiens
tcttaatcgcaatagacgcctcaacaccgccctctactggcgcctgtaccaagtgccaggcgctgtgcggagcgtcgctgagcccccacaaccaggctgtgcatttccctatttctcagagg

SEQ ID NO: 75417 - DNA, 122 bp, Homo sapiens
ccaaggtgactttacatagggaggaaatttatttcaggatctggtgaagttgagagctcacgtaaatttggttttagagaagaaatgaaatatcaaatggtacagcatttcccacactggaa

SEQ ID NO: 75418 - DNA, 122 bp, Homo sapiens
ttcacaaccaccccacccccacgcgcctgtgcacatgtccctcccgccgcgcagggtctccgcgggcgcgccccgccccaaatagagcttactacagtaacccgggagtctcacatctgcgc

SEQ ID NO: 75419 - DNA, 122 bp, Homo sapiens
agagtgggaatcgtgtctggagttagctactccctttgctgtgaacaacccactccaccacgtggggtataaaccatggtagggccacgtctctgagctgtggctgctggagagccctctgc

SEQ ID NO: 75420 - DNA, 122 bp, Homo sapiens
gggacaggttagaaaatattcaaatattcataggataataaaaaactgccctgaagcaaacgtgaggaagaagaaatagtggtagccagaatcttggttgttaatgaccagtgtagaaacac

SEQ ID NO: 75421 - DNA, 122 bp, Homo sapiens
ctcagcccggaacaactgggcatgatcgagaagctcgtcgctgcccagcaacagtgtaaccggcgctccttttctgaccggcttcgagtcacggtacttgacacacctggggagaggcggct

SEQ ID NO: 75422 - DNA, 122 bp, Homo sapiens
gtcaccacccagcccaccaagccggcttgactttaggtattctgtgctgcatgtgagtaccgacttaaattatattttaagaagggctactttgaaactctctctctgaaaactctatttct

SEQ ID NO: 75423 - DNA, 122 bp, Homo sapiens
ctagcagcctcccaggccccctgcccaaccccagcccagcctcactcctacctttccaaacgtctgctgctgctgaagatacaagaagccttgtttcactgccccgtctcccatcctctgac

SEQ ID NO: 75424 - DNA, 122 bp, Homo sapiens
ggcggcaggcgcgcgggtggccggcgcgcggctgagggcgggagggacgcctgggaggagcgtgcgtccaaggccccgcccccgcggcgcgagcccgggcctgagctgggacttgggccccg

SEQ ID NO: 75425 - DNA, 122 bp, Homo sapiens
gctatcgcctcactcccgggacgctgaggctggcccccgtccgctcggcttcttccggaacgagctcggctcctgccaggccagagccaggctccagctacccccgcccccgcggagtccca

SEQ ID NO: 75426 - DNA, 122 bp, Homo sapiens
ttctactgccaccgggacaaagccctgggaggagctcccgcccccgcgagccggacagggcggaggctcccccgccgcgcgcgccccaccgcttcccagtcccagacccgtcgcctgcgcct

SEQ ID NO: 75427 - DNA, 122 bp, Homo sapiens
gcggcaagagacttcttggctattgtccatgctcccagaatcaagcataaatgccagacacggcgattgagaagccaatcagtgaaccctttggcaaagcccccatccacacctggcactcc

SEQ ID NO: 75428 - DNA, 122 bp, Homo sapiens
gcaccgctgaaggcagcccctatggagggcgctaaacctcggggccctgggtttctatgacgacaaacaggcgttccagcaaaggaggaagtgagcggatgctgggcgggtacgcaatgtgt

SEQ ID NO: 75429 - DNA, 122 bp, Homo sapiens
atttgcaagcttttttagccagcgggggtgtagacagcctgtacctttaagtcgcttctccgcgctcttcccggcaggacggggaactgggcggtgaggggaagaattgtacttggctcttc

SEQ ID NO: 75430 - DNA, 122 bp, Homo sapiens
tggggtctgacggcaattgctcatcctcagcagtttaaaaatgacatttggttgagttgccgtaggtgttatggatgcttccccctccttcatttgcgttttgctgagttgtcgtcagatat

SEQ ID NO: 75431 - DNA, 122 bp, Homo sapiens
tgtcttctgcgctttgacggactaaagccatgtgaatcatgcgctgattttcagggttatcgggatcaaagagagtatacatacgataggcctcccacagtctctcgtacaattgtgctgga

SEQ ID NO: 75432 - DNA, 122 bp, Homo sapiens
caccttgctaagccaaagatgtgaggggggtgtgtgtgtgtgtgtgtgtgtgcacgcatgcgcagatgtgcatgtctgcactgtgtgtgtccgtatgtctgtgtagcatgtgtgactctgag

SEQ ID NO: 75433 - DNA, 122 bp, Homo sapiens
gtgcacacccagcccgaagcacagctccaggggggtcactgcctcccccactagtcactacggtaagtaggcacgagaagtgctgcgggtttccctgtatggaaataggctctgggtggtgg

SEQ ID NO: 75434 - DNA, 122 bp, Homo sapiens
gcgggccagacagcgccccgcggcctgtccatgagcggcccatgcattatggaagacgcgcgctgggctcgctccctggtccttaaatgacagcaaatgaggtaaagccaggagggtgggga

SEQ ID NO: 75435 - DNA, 122 bp, Homo sapiens
agcagctgaaatcaagattatgttctgactgacacttgctgagggttaaagagctatatacgctttgaggaccagctgaacttgggcaggactaacaccctctggtgaaaatacgggaaccc

SEQ ID NO: 75436 - DNA, 122 bp, Homo sapiens
aagttgttggtgccgatggactgtagctccagcagcttgcacagggccaccagctgcggccgtgtcaggttgtccagggtcagctcatcctcaaataatttggaaaaacgcatgatttcctc

SEQ ID NO: 75437 - DNA, 122 bp, Homo sapiens
cccagttcctgacagttgaataagtgtggaattcacaacagcagaatatttctactagctcgagtatacttaagctaacacactaaataggattgttaagcgttatctttgagccagaagtg

SEQ ID NO: 75438 - DNA, 122 bp, Homo sapiens
tgccctactcagcggcgcactgccagggcgcgcccggccgcaagctctccaagatagccacgctgctgctcgcccgcaactacatcctactgctgggcagctcgctgcaggagctgcgccgc

SEQ ID NO: 75439 - DNA, 122 bp, Homo sapiens
ccgccgccacctctgagcagccggctgggagcgagagccgacagctagtctgcaagccaccgctgtcgccatggggagccgcgtctcgcgggaagacttcgagtgggtctacaccgaccagc

SEQ ID NO: 75440 - DNA, 122 bp, Homo sapiens
cgcctacatccgcagctacccacccctccacctggaccacagcctggccgctcaccgctgcggcctggagcaccgggcctactccccagcccaccccttccgcaggcccaagttgagtggcc

SEQ ID NO: 75441 - DNA, 122 bp, Homo sapiens
tcacgcgcgcagacattccaggccccccctcctcgccccgccccctcgggctccccgggccgcacctccccctggccgcctcccgccggaaccgcaccgccccccgcgcccttgtatggcca

SEQ ID NO: 75442 - DNA, 122 bp, Homo sapiens
tcccaccctcaccaggttccttcctcctttccacattctactgacttgcatttccccagccgactcttttatagctccctggttcaacctcaaggccttgaggttttggcagctctggagga

SEQ ID NO: 75443 - DNA, 122 bp, Homo sapiens
gagagaactatttatatgttcatatgggtgcacatttatatgtgacatcttgaagttcagcggatccatggaagatatattttctaaagggcttcattatctaacaggaatattctcagatt

SEQ ID NO: 75444 - DNA, 122 bp, Homo sapiens
cctgcgtcgtgcgcttcgccaagaccggcgcgttgaggggcgctgccctgggtcccccagcggcactacctgcccctttgaccgaggctgcgcccccagcgccccccgctcgcccacccccc

SEQ ID NO: 75445 - DNA, 122 bp, Homo sapiens
cggtgactctattcaaatctccccccttcccgctgccccaccggactcaggggctggggtcgtagcccggcgggcagcggtgttcaccttccgcataaacctgggcttcctcgcggggcagc

SEQ ID NO: 75446 - DNA, 122 bp, Homo sapiens
gttttggcggatgtttttgaacgaaggaatgtcatcggggctctctcgagcccctcaccccgccagctactctgggggtggcgtggcatagtgagaggagcgctaagttgttgggaggcctg

SEQ ID NO: 75447 - DNA, 122 bp, Homo sapiens
gtccctcatcgtgcaccagcgcatccacaccggtgagaagccctacaagtgcagcgagtgcggcagagccttcagccagaaccactgtctcattaaacatcagaaaatccactccggggaga

SEQ ID NO: 75448 - DNA, 122 bp, Homo sapiens
atgacgtcctctccgggcagaagaagccggccacgtcgcagattataagggcggagctgacgtcgcagccagggcagggcgatactcgagctagctctcgagatcagcgagaggttacttcc

SEQ ID NO: 75449 - DNA, 122 bp, Homo sapiens
ctgttgctatgacgatgagcaggatgtctggcgcccgctggctcgcatgccccccgaggccgtgtcccggggctgtgccatctgcagtctcttcaattatctcttcgtggtgtccggctgcc

SEQ ID NO: 75450 - DNA, 122 bp, Homo sapiens
ttggaaatgcaaaggcagcttttgcctattctctggctgctggctgagaccctaaatttccgtaggaaatcgtcggacatgcacttaatcggtctttgcaatctttccctcgaagttgcacg

SEQ ID NO: 75451 - DNA, 122 bp, Homo sapiens
gatgcagcacagaggttctgtgaaaatctgccatcctccttgcagaaggttgccctctctcgccctccatcccccccgccgtgcttgctgacttaagcagatcagctttcagctctctggca

SEQ ID NO: 75452 - DNA, 122 bp, Homo sapiens
ccaggttcatgaccctgtctgtggcatccagagctcactctgattgccaagtgcaaacaccgggctgagtgaggcactgattcttaagggcagaaaaattcatgctgagtgctcagcaaggg

SEQ ID NO: 75453 - DNA, 122 bp, Homo sapiens
aatgactgacactttgtaggcaacagtcaagtggctttggaggcttccaatgccaggagtcgggggcgggcagctaaagtcgccgagccctgtttcccgccatccaggggcactaagcctcc

SEQ ID NO: 75454 - DNA, 122 bp, Homo sapiens
gactccaagttcctaattcaccaggtggtttttgccgggctaccaacatcaaggatctgccgcaacatgttgtcggtgtcgtccagcctataatgcgcccccgcggcaggcaaagctcatgt

SEQ ID NO: 75455 - DNA, 122 bp, Homo sapiens
ctgccctcctgtgaggatgtggccgagatggtcggaaaggcagaatgaccacaaaggcagcgaacaatgagaatcaatggagaggatgtgaaccagaggccctagggcccaaagtgagtgtc

SEQ ID NO: 75456 - DNA, 122 bp, Homo sapiens
caccaaatttcaggtacccccttcccacactgaggtctcgcccgttctcgcggacctgtccgtgcgcccagcggcatcacgttccgggatgccctttgcagccactggactcccaagacccc

SEQ ID NO: 75457 - DNA, 122 bp, Homo sapiens
ttcccagaaaacccacgcaaataaacatagcgaggtatggtgaagctccgggagtgctgccgcaccacacagaagttctgacctggcctggggcgtatgagagaagcctttgatgagaaagt

SEQ ID NO: 75458 - DNA, 122 bp, Homo sapiens
aaccacgttttccagtaaaaatctgtctggaattctttttactccttccctttctccaagcgtttgcccagatgtcacctttttagggaaagcattcctaactaccccatagtaacacccat

SEQ ID NO: 75459 - DNA, 122 bp, Homo sapiens
tgactgccggctctgcaagcccaggcgctggctcttgagtgtgtcccaagtaccctcttccggcaggaatgggcatcgcccaaggacgtttccagggcggccctcttctgggggggtttcca

SEQ ID NO: 75460 - DNA, 122 bp, Homo sapiens
gaagatcggggacatccttaggctggtggccggccgcatcaagaacaccttctgattgagcggttgccatggccggtctccgtggggcagggttgggccgcatgtggaagggctctgagctg

SEQ ID NO: 75461 - DNA, 122 bp, Homo sapiens
ttgccacgttgttctgccctcagatggaattaggtgaatgtgtgtagctgctttttcactcgtggtcctctccccatcccttgctctgaccccagagctctgtgtatttgcatccagaggcc

SEQ ID NO: 75462 - DNA, 122 bp, Homo sapiens
gtgagaagccagccatgcaagtacctgggaggagatactccaggcagagggaacagccagcgcaagcaccctcagccctcaggcgggagcatcttgcatctgggttgtattcaagcaaagat

SEQ ID NO: 75463 - DNA, 122 bp, Homo sapiens
aacagtcccagactgcccagagtcctgggtcccccacagctccccggctcccagtagcaccgcatttctgaggccacaggtggtgatggataaagctgctctggacttcctgcatcctgagt

SEQ ID NO: 75464 - DNA, 122 bp, Homo sapiens
gcccggtccctggaagttggcccttggaaatctgcaaggggatttggggctggtctgtcccgtcctaggatggggtctcctgagctccccccatcagactgacctttctccgcccgtgttca

SEQ ID NO: 75465 - DNA, 122 bp, Homo sapiens
gccagccccggcgctccttttccgcctggctaaagtcgaccccgcagccacgtggccatccgtgtcctcctcgtgactgctctcacctgcctctgtggagccgtccttggacagcttcttga

SEQ ID NO: 75466 - DNA, 122 bp, Homo sapiens
ccagggtggtcacgcctggcagatggaaatgaccccacatagtgaggttgggggtgggtgcggaggcacagcaggtacttcccctggccctggcttccctgctgagccctgcagggcaggat

SEQ ID NO: 75467 - DNA, 122 bp, Homo sapiens
ttctgatttcatacggttaactttatctctgccagaaagttcagtaaaaacttttttggccgggcgcggtggctcatgcctgtaatcccagcactttgggaggccaagatgggcagatcgcg

SEQ ID NO: 75468 - DNA, 122 bp, Homo sapiens
gggctgggattacagggcgtctcactccgcctcccaagcgctggaaagtcggtggaggggcgtccgctgctctctggcgcccccaattggccgccgaggaaatgaggcggcgatgacctgtt

SEQ ID NO: 75469 - DNA, 122 bp, Homo sapiens
cgcccccaagagacagcttggagcaggcgcctctgctgcaggctgcgtgctgcctcggggcggtggtaccctccctcctcggccccaaccgccaggcctgccgtttgcgcccctcaggggcc

SEQ ID NO: 75470 - DNA, 122 bp, Homo sapiens
tgcgagcttcccggttcatctctaattaaaaagcactcgtgcgagtccacgcagggggaccgccgcctacatgcacttcctggacagcgggagcatttagccaacaccagttcacatccacg

SEQ ID NO: 75471 - DNA, 122 bp, Homo sapiens
gccctagagctgggccagcctggtagtgccggcagcagctgcggtgaaggcaggaggccgcggacgggctgaggaggaggagctcccgtgcaggagcagcctggctgcgggacctgccccag

SEQ ID NO: 75472 - DNA, 122 bp, Homo sapiens
ttctacctaggctgcgcgacctccgcgcccggatccatggcgccccctcttctcgactcccgatgcagagctccgatgcagagctcagcgccagccactcacaaggagcctggcaagtttta

SEQ ID NO: 75473 - DNA, 122 bp, Homo sapiens
ccgtagactcctaggctggagcactggacactgtcttttagtcaaaagagacgtcgccgtcgccgggtcgtcaggttctggaaccaagacaagtccagggacaaccccaaagctggcctggg

SEQ ID NO: 75474 - DNA, 122 bp, Homo sapiens
agttcaagaccagcctggccaacatggtgaaactttgtactaagaagtacaaaaattagccgggtgtagtggtgcacgcatgtagtcacagctacactcaggaggctgaggcgggagaatcg

SEQ ID NO: 75475 - DNA, 122 bp, Homo sapiens
attaacccaggaacgcgagagcagctgctctccggagagggatcccctgtcaggatccagcgcagtctacagggaagctgctttgctttcgatgctgccagcacggccaggcgcctcattcc

SEQ ID NO: 75476 - DNA, 122 bp, Homo sapiens
gggtggagtaatcgggcggtggagctggggtctgtgggctccacctgctgccacgtgtgccgggctgcccagggcccatgagggtggtggcacgggggtccgcatgaggggccgcaggtgcc

SEQ ID NO: 75477 - DNA, 122 bp, Homo sapiens
ctgcttcattttccttcaatgcacttcttactgtctgacataatttatgtcagtggctcacgcctgtaatctcagcactttgagaggccgaggtgggtggatcagctgaggtcaggagttcg

SEQ ID NO: 75478 - DNA, 122 bp, Homo sapiens
ctcagcaccgctccgcagcccctgcctgccacggtcagctacgtcccacctggtctgctgcggagtccccagcccagtgcctagcccagtggagccaccgcctgttcctcgggaaggaacag

SEQ ID NO: 75479 - DNA, 122 bp, Homo sapiens
agcgggagagcgacacggtcagggggctgcgcgggcaacagcttggagctgcgcctgagccgggaggctggggagacccaggccggcctcacgcgtgcaggtagcagagggtggggcagcgc

SEQ ID NO: 75480 - DNA, 122 bp, Homo sapiens
tgctcggctccaccagggtttggggtgagcctggccgcctgcccaagttgtgaatggggccggatgggtgtgatgggcagacacgatgctcaggatgaaggccggggcacagccgaactcct

SEQ ID NO: 75481 - DNA, 122 bp, Homo sapiens
tagacgagcctcttttaagtctcctccctgctcattgtcctctcagtttcttgccaggcacggtggcttatgcctataatcccagctctttgggaggccgagacatgtggatcacttgaggt

SEQ ID NO: 75482 - DNA, 122 bp, Homo sapiens
taccaggtcggcctggagggaccgaccctgtgccgctaaagacttcgggagccacctgtacgggcctcacacaggccgactctgggtcgtcagttcctcatcagctcgaacgaaaggagacc

SEQ ID NO: 75483 - DNA, 122 bp, Homo sapiens
tatccgtcagatgggattagggacctcacactctagtgaccttatttaaagactccatctcgaaatacagtcacattttgagggataggggttaggacttcaacatatgagttggtgggggc

SEQ ID NO: 75484 - DNA, 122 bp, Homo sapiens
tcagggctgagcttgggtcaggggtttgagcaccaagatttgggggaccctcagttttcacgtgctattgcctgattgtgggtcagcagtaggggtagtctcagggaccctacgcactgagg

SEQ ID NO: 75485 - DNA, 122 bp, Homo sapiens
cgctcacctcgctttccggatgcgggacccttggggagccgggggtggcggcgtggggggcggccggaggcggcggcggagcgcgtgtctgccggcagctgggctgggcgtgcgcgcgccgg

SEQ ID NO: 75486 - DNA, 122 bp, Homo sapiens
cccggccccaaatcacactgcgggaagctccagcgttggtgcctgtttcgtctgcgcatgcgccgggacacgcctgcgcccttggccgcagtcagggctcccgagtggtcactctggttgac

SEQ ID NO: 75487 - DNA, 122 bp, Homo sapiens
tgttgaagtcaccaaaggccaggccaggcctctgctgcccgttgccggtggcccgggagtcgactctgcttctgcctcgcacccggcctgggggtgttccgagatctggttggcttttgtgt

SEQ ID NO: 75488 - DNA, 122 bp, Homo sapiens
cccagggcctggaatctgtatctgtaataagttccccacatatttcctccgcagtacccacggatccggaaaccatggccccacacgtccttcaggtctggtgtcctttgatttaagtgagt

SEQ ID NO: 75489 - DNA, 122 bp, Homo sapiens
ctttcacggagctggccaggatagtgctgctgcggcacaggttgaactggctcgggaggccgagcaaggtactgagcttgcaagacctctgctgccgcaccatcgtgtcctgcacacctgtg

SEQ ID NO: 75490 - DNA, 122 bp, Homo sapiens
caacgacgcccctgtgcgccggaatgaaacttgcacaggggttgtgtgcccggtcctccccgtccttgcatgctaaattagttcttgcaatttacacgtgttaatgaaaatgaaagaagatg

SEQ ID NO: 75491 - DNA, 122 bp, Homo sapiens
gcggcctcagttctcacttccattgggtgttgggttcctagatcagccaatcagtgtcgccgcggttcctggttctaaagtcctcgccggcccaccgggactcagattctccccagacgcca

SEQ ID NO: 75492 - DNA, 122 bp, Homo sapiens
cgtcgcgagaggccttgtatctgggttgcggggtctggagaggctctcggatctcgactccgaaccccgcatttcctcccctccttctccctagaatctggccctgcccgttcagccagtac

SEQ ID NO: 75493 - DNA, 122 bp, Homo sapiens
gccgtgcctgccttccctgccgcctcgcgtcgcccaccgaagggacccggccgtgctgtccgcgcccagaggccgaaggcctgtcaccgggctctactcgctgcctttgtggcgggagcgag

SEQ ID NO: 75494 - DNA, 122 bp, Homo sapiens
tgaggccccagtgaccccaggacacaagggatcaggggggacggcttgtggtctggaccccgactcacccacagacaagatctcccggcacttgtcacactggtccttcatccgcaggcagc

SEQ ID NO: 75495 - DNA, 122 bp, Homo sapiens
aacaggcacgcgaggctggtggaaaaagcgggtgctttgactcttagctggaagcgtcaacgggaagctactctaaagcgctttcgctttcactctggtcccggacagtgggggctggttaa

SEQ ID NO: 75496 - DNA, 122 bp, Homo sapiens
tttaatctttattttatatgtaattgtcacttaggctcctggttttcagaattccataatcgcccttccctcaatgttgtctcaaacaaacattatctgagttactctttaacttgaatcta

SEQ ID NO: 75497 - DNA, 122 bp, Homo sapiens
ccaggcgccgcggggagttaaaaagttcgggacctgagcggtgcgtggttccgcggtggccgcctcttcctgccgcgcaggccgagggtcccgacggcgccgctcaccgctccgggactcag

SEQ ID NO: 75498 - DNA, 122 bp, Homo sapiens
ccctgactgtgccagccctcgtccgtctccccaggtctccagtccatggcacctgggtcacgatgcccaggtatcccagcactttcagagacacttcagtgatggctgaggggcaagccctt

SEQ ID NO: 75499 - DNA, 122 bp, Homo sapiens
tctcaatgacagctcggacttgccactggtccgagctttcattggctcaaggatccccgccgtctatgacgctatttccctatgcccgtcacgctactgctaggtcgttgccaaggtgattg

SEQ ID NO: 75500 - DNA, 122 bp, Homo sapiens
attcaccttcacagcgaagctgaaatgagcggcagtaccaggctcagaaagtgacccaaacgcaagccccccaaaacactctgtgtttgggacagggagatcctagtcctcccagctcatcc

SEQ ID NO: 75501 - DNA, 122 bp, Homo sapiens
ggctcaagcccggctctgccactcacagctgggtgtcccggggtgagcctctcagcccctcgttcagcctcagttccacatgtgtaaatggaggtctagtagctacctcacagggcagttgt

SEQ ID NO: 75502 - DNA, 122 bp, Homo sapiens
gcaaggagcgcgcctcgccaggtgcccggactagagggcgctgcgcccctgcaaatctcgcggccccgatgcgccctccctaggcaccattgctataataagttacattcaaaataatgcac

SEQ ID NO: 75503 - DNA, 122 bp, Homo sapiens
gttctcgggctcgaagtcgtacagcgccttgcagctcggctggtccaggggcgctgggggcgggagcgggctgtggggctggggctgctacgcctcaccccgcccagtctggggtctcagac

SEQ ID NO: 75504 - DNA, 122 bp, Homo sapiens
cacatttgggggtgatgggagacagtgacagatcatcaggcattagattctcataagaagcgggcaacctagatccctcccatgtgcagggttcctgctcctataagaatctaatgccccag

SEQ ID NO: 75505 - DNA, 122 bp, Homo sapiens
ccacctaagccgtgtccctagccctggccccgccctgatgttgccgtgtaactcagttcccgccgttttataggctaccgccccagccaggccccgccctctgatgtggccccgccccccga

SEQ ID NO: 75506 - DNA, 122 bp, Homo sapiens
tgggaatgacctcactgcccctccaagcaacgtgttgtgctgccgcccacatcagacatccggggaatggactgcacagcctccatgtgtgctggctccttggcgcctgcagagccgggttg

SEQ ID NO: 75507 - DNA, 122 bp, Homo sapiens
gtgttacagcttttaaggtggcgcgtctggagtctgtcccttttgatgctcagatgtgttcggagtttcttccttctgatgggttcgtggtctcgctggctcaggagtgaagctgcagagct

SEQ ID NO: 75508 - DNA, 122 bp, Homo sapiens
gcgccggccgcgcgcggagtgccgggtgcccggctggaaggtcccgagaaggggcgtggccggggcctcccagcggcttcccggagctcctggagccccaatcccattcccggagtccgcct

SEQ ID NO: 75509 - DNA, 122 bp, Homo sapiens
ccactgagagtggggaagagaacaaggacaggaaggatgagcggagaaggagagagagcgcggcccccagcaacccagccggcagcatgtcctagcatctactgccagcgttcctggccccg

SEQ ID NO: 75510 - DNA, 122 bp, Homo sapiens
agcagggcgaaattagagtgccgaagtggcttgagaagcacagtgaatggtggcgaagcccgagccgggtcgcaagacgcccgctggcactgccggcgccatggcggccgccttcggccacg

SEQ ID NO: 75511 - DNA, 122 bp, Homo sapiens
gaggtgctgagattgaagagaactagtgttcacgagagctcgcggcggttggaaggctctcgcgagagcgtcttgagaattctggccgggggcccaagccgctcggtctcctgtcttcagca

SEQ ID NO: 75512 - DNA, 122 bp, Homo sapiens
atcatcatcctttccttggaaatcactgaggccaaaggagtgggtgagaccacccagaaacggagagggctgaagacagagtctcaagaagccatcatctcaggctcttgtgcggagaagta

SEQ ID NO: 75513 - DNA, 122 bp, Homo sapiens
cctggatccaagatcccttctatattatagttctgaaactcctactcatcttacctaatacgtattctgttttataggaaataagactgatagcataagtttcattatatttgtaagtcagt

SEQ ID NO: 75514 - DNA, 122 bp, Homo sapiens
ctggttaagaagaggcagggagcccctgtacagcccatcccttgaatcctgctcgctcagcgcattcgttccccacccttccccctcattaatatgttcacacattgccaacgcctgagttc

SEQ ID NO: 75515 - DNA, 122 bp, Homo sapiens
tggagcacaggggatttccagggcagggacctgctctgcacaaggctgtcatgctggatccgtgtcgttagccacagaatgtacaacaccaggcgtgggtccccgtgtcgaccgtggactct

SEQ ID NO: 75516 - DNA, 122 bp, Homo sapiens
catgtagctttgcttatgtttatggagctggagcccagggatgctccgattggcaggagtcggggaaagatcagccaatcaaagggcgcctccatttcagggaaactcctgctcatttattt

SEQ ID NO: 75517 - DNA, 122 bp, Homo sapiens
ctctcaggagctgggcccaatggaaggaatgggtacccttgggtcaccagggtccagattcggccctctacggcgcccatgccacaagcctccctcaagaccatctctgcttggcacccact

SEQ ID NO: 75518 - DNA, 122 bp, Homo sapiens
aggtggagggccaggtgcagtggctcatgcctgtaatcccagaactttgggaggccgggacggggcaatcatttgaggtcacgtgctcaagactagcctgaccaacgtggtgaaaccccgtc

SEQ ID NO: 75519 - DNA, 122 bp, Homo sapiens
ctggaacacaggtcggggtggcgccggctcccatcccaccgggacatcctggagggacagcggggctacagggtgcatcagttgtacctgcaggactttaattgatggaggtgacttagtga

SEQ ID NO: 75520 - DNA, 122 bp, Homo sapiens
atcatcctctcgccccctggatattaggatcaatatctcaggggtggtgtacatcccctgcgaaactggaagaaatatcatcctctccacctttggacgttagggacagtatcacgggggag

SEQ ID NO: 75521 - DNA, 122 bp, Homo sapiens
gtcccagaatgggatgttgaggctgggggtgtcctggggctaccacagggaaggacccggcgcagagctccctctggaacccggcactgcggcccgcgccctctactccccgcgcgccggcc

SEQ ID NO: 75522 - DNA, 122 bp, Homo sapiens
ggactgccgccctggccggtagaatcaagagcacagtgcagcagcacgcagcacactcagcggatggagggcctggcttctgcacgccggctggcacttgctgccagttgcccttttctgcg

SEQ ID NO: 75523 - DNA, 122 bp, Homo sapiens
ttgttattgcaggcttggagcacacctcactaatttggaaggcccagcgcagaggaaccacgcccagcccagcaatgagaaagcttgtgttctagttccagttctggtactgagacactctg

SEQ ID NO: 75524 - DNA, 122 bp, Homo sapiens
gaggggcagagaaggcaggaccatgacatctagggcctctgaactttctccggggcgcagcgtgacggctggcatcatcattgttggagatgagatccttaaggtgtgtctgggacagaaaa

SEQ ID NO: 75525 - DNA, 122 bp, Homo sapiens
aacccaccagcttttactgctgaagtttaatattcacagcaaaaccacaacgtggcctcacgttaccaccaggcccggcttgagctttttactcgagctgggcttgggcgatctaaaacgag

SEQ ID NO: 75526 - DNA, 122 bp, Homo sapiens
tagctgggattacagatgcgcaccaccacccttggctactttttgtatttttagtagagacggcatttcatcatgttggccagcgtggtctcgaacttctgacctcaggtgatctgcccacc

SEQ ID NO: 75527 - DNA, 122 bp, Homo sapiens
gccactgcaccctgcccacaggttatttgataacccaaggagatacagttcctaggtcagcgggttcccctgtctcccctcccacctgctctccctctcactcagccccacacccccagcac

SEQ ID NO: 75528 - DNA, 122 bp, Homo sapiens
acaaaacttgtccctggtgccgaaaaggttagggaccctgttgtagatttatgtatcctacgtgtctactattttgtatcctttgacctatatcaccccttttcctcttccctgcttcccac

SEQ ID NO: 75529 - DNA, 122 bp, Homo sapiens
gaaggatgaatcttggggaaagtgtttagttttagtgtgaaactgtcaagccgcttgctccggtggaaactcagggagaaaaacaacagtgagaaagactagcgaaatagcaaggaaccaga

SEQ ID NO: 75530 - DNA, 122 bp, Homo sapiens
ggtctagaacttctgacctcaggtgaacgaggcctcccaaagtgctgggattacaggcctcgtgagccaccatgctcagccctacattggtatgattagataactgtgcctcagtgtgcatg

SEQ ID NO: 75531 - DNA, 122 bp, Homo sapiens
tgcagttcctttgtttcttgagataagattccaaagaacttagattcatttcttcaacaccgaaatgctggaggtgtttgatcagttttcaagaaacttggaatataaataattttataatt

SEQ ID NO: 75532 - DNA, 122 bp, Homo sapiens
cttcctaaaacatggttcttcttgaagacacggtgggagcggagttttgtgtctcctggccggcggctcctggttctcccaggccacacgactgacagctccccttcttgtgctgcatgttg

SEQ ID NO: 75533 - DNA, 122 bp, Homo sapiens
attacatgtttttaccttgttgcggtatctttggccttcacacacacatgtgtgcgtgcacgtgcatttcattaccatgtagacaagacagttattgcttatagtaatttacccatttgagg

SEQ ID NO: 75534 - DNA, 122 bp, Homo sapiens
gggcgggcgcccagatatagcggctcagggccaatcggcggcggggcgggcgggcgggggcgggtcggggccgcctcctccccgggggctccctttcttctcaggccgggcgggattccgct

SEQ ID NO: 75535 - DNA, 122 bp, Homo sapiens
aaactggccataagacccaaagctggcatcataagagaagccaacaaaagagtgggtttacgtatcttcaacatgatgacagtaaatagatcttaacttagaattctaaatgtaggaagtcc

SEQ ID NO: 75536 - DNA, 122 bp, Homo sapiens
ccgtcacgtggcctcttctcgctgacatgtcactgcctctgccagggccagggccagggccggggctggggaaagttcacccttttgccaaccacaactggcagctctggtgagagtgcgga

SEQ ID NO: 75537 - DNA, 122 bp, Homo sapiens
ccagtgtctgctgtgaacgaaagtgaagacggcaggatcccgagtcattaatttgaagctcgctaacaacaccacagtgaaagccacagtcatatctgctgcctctgtccagagcgccagca

SEQ ID NO: 75538 - DNA, 122 bp, Homo sapiens
ctgagcgccggagctcacaggtctcgccttgtcccgaaagccccgcaatcgaggcggaggcgaccgagcccccgactctcctagaacgttgccacaagaagggggaacgtcggaacagtgca

SEQ ID NO: 75539 - DNA, 122 bp, Homo sapiens
gcgcggcggggctgttgccggcttctctcgttacggtggctgccgcccgcttcccttcgccgcactgggagaactggcggaaagactttggatgaaaatgtctgtttctctgtcgggaggga

SEQ ID NO: 75540 - DNA, 122 bp, Homo sapiens
acagaggcggctgaaaggaggcaccagcagaaagggcagccccggctctgccagctgctgcggtgggaggaagtcacaacaaaccctccgtgcccggtggaagggagtgtcctccagcaccg

SEQ ID NO: 75541 - DNA, 122 bp, Homo sapiens
gcgacagcggattccgtgcccggtggccgcgcgccgcccggctgttccgcgtccccttgccggctcacaatgtgctgaccctcccggccccgccgcgcgcctcacaggtctctcgacctccg

SEQ ID NO: 75542 - DNA, 122 bp, Homo sapiens
gagtgctgcctcctggcagccatggcctatgaccgctatgcagccatctgtgaacccctccgctacccactgctgctgagccaccgggtgtgtctacagctagctgggtcggcgtgggcctg

SEQ ID NO: 75543 - DNA, 122 bp, Homo sapiens
ggaagccgcgtggggaccgcagggccaggacggttgggttaccgatcggcgggcagagagcggggtagcagcgcacacaccacgtcccgcgcatgctccagggccagtgcgctcagcactcg

SEQ ID NO: 75544 - DNA, 122 bp, Homo sapiens
ttctctgcaggccccgcgtctgtctgatgaaagggtctgtctgatgaaaggcatgccctgcggagggcaggctcgtggaagtaaaaatggtcctcaataaatgaaccgtttcagacacttct

SEQ ID NO: 75545 - DNA, 122 bp, Homo sapiens
ccgagggcccccgctggctaccataactggccgtgtggccccaggcaagccacattcccacgccactcctcagccaaaccctgagccagggccagggcagacagatggagaaaaaactaaga

SEQ ID NO: 75546 - DNA, 122 bp, Homo sapiens
ggagctagacccaatagagaaagttaacagaacatgtctctgtccagccctccaggcacgcgggcttgcagaatgcttctccagggcgaaggcgctgcaagctgaaggcagtgcaccttgcg

SEQ ID NO: 75547 - DNA, 122 bp, Homo sapiens
gggtctgagcgcaccccaggccgggtggagacgaggggcgaggcgaggccagtgctcggccgccccctcgtggaaggagccgcacattgccgagccttgcctacttgccgcgctggaccccg

SEQ ID NO: 75548 - DNA, 122 bp, Homo sapiens
aagggagactatctccaaggaacactccccatgtccagcagggagctccccatggctgaacgggtcttattatctctatacccaatcctatcatggggcctgcacacagtagttgctccgtg

SEQ ID NO: 75549 - DNA, 122 bp, Homo sapiens
tgaggcagaacctgcgggggcaggggcgggctggttccctggccagccattggcagagtccgcaggctagggctgtcaatcatgctggccggcgtggccccgcctccgccggcgcggccccg

SEQ ID NO: 75550 - DNA, 122 bp, Homo sapiens
agtcgcgatgggttcattaaggcggcaggtaggcagtgccccggcggcggctgcggcaggcggtcctggaatgtgcgaggggcgtgatgacagcggccagcctctttgcgcaacaccttcgc

SEQ ID NO: 75551 - DNA, 122 bp, Homo sapiens
gctgcgcgcggcacttgagggccaacgcgagttccaggtgggcgtgggctcggcgggccacgcactcggagcggcctcagcccgcaagccccgggcagtgaggggcttagcacctagaccag

SEQ ID NO: 75552 - DNA, 122 bp, Homo sapiens
aaaatccgagtcacgttatgcttacaaatgtttgctgctagagatctggcacgacagtgacgggtcagctgagtcggagacggaaaacctgttggtctgcgcaccgtttttgcagctgcccg

SEQ ID NO: 75553 - DNA, 122 bp, Homo sapiens
acagctggacccgtcggactgaagagaccctgaggcctgtggtggtccccaagctgctggcgctcctgggccgtgtgcgggtggcaactcccctcacagtcttcatgggacagtgcggattt

SEQ ID NO: 75554 - DNA, 122 bp, Homo sapiens
tgccagcataggcggccgtggtccgtgcttgcaagtctgagggcggaggagcccgccgcccgcttctcatgggcccacccctgtgatccagcatctgtaaaactccctgggaggccacagcc

SEQ ID NO: 75555 - DNA, 122 bp, Homo sapiens
gaagccagccttaatctcagaaattcaattgcttagcccatctgctaggggctgcccaggcgggccagaggcgaggaggagagacgttccagggatgtcttcccaccgagttagtaccagta

SEQ ID NO: 75556 - DNA, 122 bp, Homo sapiens
gcgtctgcgtcctcagtttccccaggacgcgtaaggagaaaaccgggggagggccccgcacgccgctgcccccccacgtccaagagcccgaccgttcgcccgcgcccctcgaggagtctgcc

SEQ ID NO: 75557 - DNA, 122 bp, Homo sapiens
ctgtaacataatggagcaaacgggacaattccaagaattgtgcgctgggtcctgcagggccgcggggctgttttaggagcgtcctgggtgagccttgaaagagactcacttattcagcacct

SEQ ID NO: 75558 - DNA, 122 bp, Homo sapiens
gagcgcctggagctgctgcaggaatgccgtgagctgctgctgctgctgctgtggcggcggcggtggtggcggtgtcaggtcccccagagctgccttttctcggagcgcgcactgtgggagct

SEQ ID NO: 75559 - DNA, 122 bp, Homo sapiens
gccgtgccatttccacatatgcatcctgctgggcccatctgaaaggtcccacttgcgagacgttcccccccacttccggctcctgtaagactctctgcagccccactccacgccggggtccg

SEQ ID NO: 75560 - DNA, 122 bp, Homo sapiens
taccaatgttgcagcccatttagtcttctgtaatgcttttcattccttaattctcttggccgtgttcttgcctatctaagaccagttacaaaagatagtttactttcattttttctcctttt

SEQ ID NO: 75561 - DNA, 122 bp, Homo sapiens
gatgtcgccagcctacttctcctggccgcaggccgccgcggcggggcaggtagagggccacgccagcacacctgtcaggatgcgggctccgctagccaccatgcttcacccttgatgccgta

SEQ ID NO: 75562 - DNA, 122 bp, Homo sapiens
cgcctcatggaggaggacgagctcccctcgtggatcatcaaggacgacgcggaggtggagcggctgacctgtgaggaggaggaggagaagatgttcggccgtggctcccgccaccgcaagga

SEQ ID NO: 75563 - DNA, 122 bp, Homo sapiens
cgtgcgccgcgcctcctgccctggagctggggttggagcaggctttccctggacccagtccggccccacatcgccaaccccgccagcctgctgcctttccgacctcccagcccccggaggag

SEQ ID NO: 75564 - DNA, 122 bp, Homo sapiens
ggccccgcgcgtggggctgtgtccgctcatctggcctccgggctcggcccgcccccaccgcgccgcctgccccgcccctcactagctttgcaggtcccccgcgtgccccttcaggccgcgcc

SEQ ID NO: 75565 - DNA, 122 bp, Homo sapiens
cctccaaggctctgcgtgcctgcggatgtttgagaagcactagaggatgacctctcatgccgtcccctcctcccagctctcagatgctccataagctccctgcgatgactcaaagtaaacac

SEQ ID NO: 75566 - DNA, 122 bp, Homo sapiens
acctcatggctccaggctggcaagggctcctggcgcaggaagccacagtggcctccgtggcgactgagcaggaggaagaagtaggggttgctgtggaagagttcagttgtcagagtgtggtc

SEQ ID NO: 75567 - DNA, 122 bp, Homo sapiens
tagaaactaggtctcactatgttgcccagggtggtcatagcccaagattttggtctccagcgatctatctgccttggccaccccagtgctgggattaaggcgtaagaaactgtgctcggcca

SEQ ID NO: 75568 - DNA, 122 bp, Homo sapiens
ggacagctgcttctcccctcccctgccctcccttcctctttccctgggctcctccccagccgggccagccagtcctgggccactgcgctcccacagcacaactgaagcaggatcgcaactcg

SEQ ID NO: 75569 - DNA, 122 bp, Homo sapiens
acattaaacttctactctgtaggcaaacaagtgggagccatcaaagagttgtgggcagaacgggctcacatcactctgggggggtgtgtggggtggacaggaggatgggcagagtgaggggc

SEQ ID NO: 75570 - DNA, 122 bp, Homo sapiens
agcgtgcggatcccctttgctcctttgatcagacgtaggattcggccaatcctagcaagacggatcactcggaacagggtaggggacacgaaatacttttctatcagctcggcaagaaacat

SEQ ID NO: 75571 - DNA, 122 bp, Homo sapiens
aattttgtgctgtaaaataatcctagaaaggcaggaatttttcatatatgatattgcaggcgttacgacagtcaggtttttgttgctattaaagtgaagcaaatctgatccccttttaattt

SEQ ID NO: 75572 - DNA, 122 bp, Homo sapiens
gcggccgggaccgctggccaaaggcaggccgggtgctcccgggcggtggacggagctggacggctcggagggcgcgggggccggcgcgggggcgcgggcggccggcgggcagcggccgggga

SEQ ID NO: 75573 - DNA, 122 bp, Homo sapiens
cactggcctttggtaacacgcggcgtccctcatttgaaagatcacacagcccccactctacggtctgacctccttgggatgtttagacccaagccaggagacagggccatagcctcctgccc

SEQ ID NO: 75574 - DNA, 122 bp, Homo sapiens
gccactcgtgtctttgccacacatgtgaagcctgtgggaacttcacggccacatgacccacgtggcaggactgcctgtcacccagcctgggcctgcctcagccccttcccttgctccagacc

SEQ ID NO: 75575 - DNA, 122 bp, Homo sapiens
tggagcactgtgattgacattcagctgcaaagctcttgctgggaaacgcggtggccgagccgtcagcacaggcggcagctgcctcccacacttaagacaggacttctaaagccacagtccct

SEQ ID NO: 75576 - DNA, 122 bp, Homo sapiens
gtgtgagccactgcgcctggccctgaagctttctactaggggagattaaaatatataatacgttataggttgataagggttaaggcagaaaataaagcagaaaagggggatagagagttatg

SEQ ID NO: 75577 - DNA, 122 bp, Homo sapiens
gccgggaggaccagaacaatgagctgtcactgtctgcagcatgtaaaaactcatggcacgcgggggcctccctcttctcccggatctctctctctcttcttgacgtgaccgtgcttcccact

SEQ ID NO: 75578 - DNA, 122 bp, Homo sapiens
agagggcccctcacttcacagatgaggaacttgaggcaagtcaccagcccctgatcatttcgcctaaaagagcaaggactagagttcctgacctccaggccagtccctgatccctgacctaa

SEQ ID NO: 75579 - DNA, 122 bp, Homo sapiens
ctcctttatagaaagagatccctggagggcaggaggggtgcactccagagccctggaggccgttctagaaacccactttcctagtgactcctgggtggtttcttgggccacaaattaattct

SEQ ID NO: 75580 - DNA, 122 bp, Homo sapiens
ccaaaaagggagtggctgttggactttcactagagtcagatgaatgtcacagctctcagacgagccttattcctcaagctgatccttttaaagacaccaggacttgtggagctggtgtctcc

SEQ ID NO: 75581 - DNA, 122 bp, Homo sapiens
gtgttgctgacctcgcacccagtacgcagtgaacacgggcggggaacgtccgcgcaggggcgggcacaccctcattaaatgcagccccagcactcccacctgggtcagcctccgggcgactc

SEQ ID NO: 75582 - DNA, 122 bp, Homo sapiens
tcattccacattcctcagccttgttctgtaaactgagagagagaaagagtggttcttagtcggcttctctgcactaccgagctgtgcctgggattccagttcctgaatccgggatggttaaa

SEQ ID NO: 75583 - DNA, 122 bp, Homo sapiens
cctccactcgctccgccggccgggaggagacgagaaccgcgcctgcgccgccgccgccgccgccgctccagcagggacccagcaagacccgcccccgtccggccccgcccccgccccgcccc

SEQ ID NO: 75584 - DNA, 122 bp, Homo sapiens
tgggttcgttccgggcctccagctatcagctcccgatctcgtgtttgagggtagcgaccccgatttctgtttgcatgcacagccagcagccctagcgccagatcctaaagctggatatcttt

SEQ ID NO: 75585 - DNA, 122 bp, Homo sapiens
ctgaaagggcctgaaaggagcggtttatggtgcattaccagtcaagggctcaggtaccagcgccttgtgtcgggaacccgggcggccgcccgtgctgcaggtgtctgctatacaaacgcccc

SEQ ID NO: 75586 - DNA, 122 bp, Homo sapiens
gtgcgtgtacgcctgtcgcgaaattcaatggaatgtcatcctgcgcctccctggatatgacgaacaatatcacggaggatgtacaacttctgagattttgggagtgatatcatcctcttccc

SEQ ID NO: 75587 - DNA, 122 bp, Homo sapiens
taatgaggcctggaatcttattcttgacctggggagcggaatccctttttgcagtactcccgggccctctgttggggcctccccttcctctccagggtggagtcgaggaggcggggctgcgg

SEQ ID NO: 75588 - DNA, 122 bp, Homo sapiens
ggtgtcctgcggaccccagagcccccgggaagggcgcaagtcaaagagcactggaggcaccgccggcgatggacgtccaggtcccggctcctgtgctggaaagcgttgatggggagcgtcgg

SEQ ID NO: 75589 - DNA, 122 bp, Homo sapiens
agtcggaatccagcagagcctcaggcagcggggagctatagcagttagaaagagcacattcgcagaaaccctgtgacctgcagctgctggcctcctggaagcttcctttgttgctcttggtt

SEQ ID NO: 75590 - DNA, 122 bp, Homo sapiens
cagcatcataaagaaggattcactgaacattcattgaagacataattgtgtgtaacattgcgagtattaaatatagctttttagacatagcactggccttaggtggtaatgctgaatgttgt

SEQ ID NO: 75591 - DNA, 122 bp, Homo sapiens
gaaattacaggctttcttgacagcaaggccaggatgatttaacttcttggctggtttagtcgcatcttaaaataactcttgccccacatacagagaaataagaatgtttaaaatattataat

SEQ ID NO: 75592 - DNA, 122 bp, Homo sapiens
tgttcgaaggtgatccaggtgagtgctagcacctgcgggcagccacgagcaccgggccgccgggggcacttcagcctttgcgcagggcactcccatatttcagcctatgcgagctgaataga

SEQ ID NO: 75593 - DNA, 122 bp, Homo sapiens
tttgatctgtccctcatgtcttacatccaatctatcagcaactgttaccagttttaccttcgaaatatatccagaatacaactgcttcccatcacctctgtagaccccaccttggccaaagc

SEQ ID NO: 75594 - DNA, 122 bp, Homo sapiens
atacctgttttctaataacccagtttgtctcttcttgccttcaggacatcaaactcgaaacggtcatacaaccagagcctcagacaatggccccttttgccagagacccttagataggcctc

SEQ ID NO: 75595 - DNA, 122 bp, Homo sapiens
catgcccggggcgggtccgcggtatcgcagcctcctcacctccgctccctccgccacatgcgaagccaggggaaaaagtagaaacagccccagtagatcctgcagagagagggcagagccgg

SEQ ID NO: 75596 - DNA, 122 bp, Homo sapiens
tttgaggtgaaatttacatacagtgaaatgcaagaatccggaatgtacattcacccagaacgaccttgacctctgctgtgaaggtctcaccgccctggagagctgtgaaaaatatcccccgg

SEQ ID NO: 75597 - DNA, 122 bp, Homo sapiens
cctgtagaaggaaggacaagccaccaccacccctatccttggaattcccaaggtggcagccggagcgaccatccactctactgagtggatttggggctggaaacgaagtatcaggctggaaa

SEQ ID NO: 75598 - DNA, 122 bp, Homo sapiens
atgagcgacgacttgctgtagagctggccgcttttggagcgggcctcggcatagaaggagcgcagcacgcggcacagcgcccccttgtccatggtctcgaagtccgggctctgcgccttctc

SEQ ID NO: 75599 - DNA, 122 bp, Homo sapiens
ttcttctaccacaatgtcacacccttacatcttgtatccgtagggaaatgtggccaggggcgttttaccaagttggtctgggatgacgtgagttaaccctcacactccacagtcagagagat

SEQ ID NO: 75600 - DNA, 122 bp, Homo sapiens
ggtcctgaacgcttgaaggagcctccaggaactacacataaagctgtgctgtcaacggcacggcaggaagaaaacgagacttcagagtggcgctgggcactgagctggagcacggagcacat

SEQ ID NO: 75601 - DNA, 122 bp, Homo sapiens
gatggtagagatggccaggagggtgggactcccgagttcttgctccttcctgatatgcaccgtgacttcctcctccgtgtgccttggaatggggtctttggagcccaccacaggcctcctga

SEQ ID NO: 75602 - DNA, 122 bp, Homo sapiens
cttaaactcctgacttcgtgatccgcccacctcggcttcccaaagtgcagggattacaggcgtgagccactgcacctgtccttctgtgtgtatgttatgtttgaaaacaaagtttaaaaaag

SEQ ID NO: 75603 - DNA, 122 bp, Homo sapiens
acgcgcacccgcctcctgcctttagccgggccaggagctctggggcccttctggagcacccgggagccacctgtgcacttctcagtcgccacggccccggtgcaggcctggcaggagaagga

SEQ ID NO: 75604 - DNA, 122 bp, Homo sapiens
gaatagcgatcgaagacgttaacttggttgcaatctggctctgccctttacaaagttatgcgacctttttcatctgttaattgcttgttgtaaatattaaattaaacaagtcaatgtgtata

SEQ ID NO: 75605 - DNA, 122 bp, Homo sapiens
actgcagtcttttccagagtgctagtggagggctgtcaggccggctagaagaattcaaagcgttcagggaacccacaaaagatttcttgcagccttttagctgcctggcaggcagtagaaac

SEQ ID NO: 75606 - DNA, 122 bp, Homo sapiens
agcaggcttctgcacagatgtgaggtgtggcgggccgtgtccccagggtggccacacagccggccctgcctgtgctccccgcgcacctcccgccctccctaggcaccggatgctggctcacc

SEQ ID NO: 75607 - DNA, 122 bp, Homo sapiens
gccgggggagtgcagtgggcccacagggcctggggcggggtgcggagaccagggcctgaccggcacctgtgccacaggaggtggagcccatgtgcaaggagagcgaccacatccacatcatt

SEQ ID NO: 75608 - DNA, 122 bp, Homo sapiens
tgtcgatacgtacgtgttaatggtgctaaataactgatcacctgacacggggggcgggggcggtgcggagagtagaaaggaagagaatgttgatatcgcgcacggagtcctgtgtccctcct

SEQ ID NO: 75609 - DNA, 122 bp, Homo sapiens
gctctggattttgagacggagcacaaattggaccctgtatttgattctccacggatgtcccgccgtagtttgcgcctggccacgacagcatgcaccctgggggatggtgaggctgtgggtgc

SEQ ID NO: 75610 - DNA, 122 bp, Homo sapiens
ggcacccaccgaagtagaagccttcgtgttggtacttggggttgaagaaggcccccttggcgtgcgcgttgacgtcggcgccggcggcgatgagcagggctgcgatgtccccctgccgccgc

SEQ ID NO: 75611 - DNA, 122 bp, Homo sapiens
acaaaaaacagggcactttaactagacctcaaaaaggacacttggttacacaatgagagccgaaagcagaaagcggagcgttgccttattccacctcagctgggaacatgcatgttgggtga

SEQ ID NO: 75612 - DNA, 122 bp, Homo sapiens
aggcggagtggaagtggccgtggggcgggtatgggactagctggcgtgtgcgccctgagacgctcagcgggctatatactcgtcggtggggccggcggtcagtctgcggcagcggcagcaag

SEQ ID NO: 75613 - DNA, 122 bp, Homo sapiens
ttaattattattttggtggccgcctctcttctccaccccaagccaggcaagactcaccctcggccctgcccgccccagcatttcaaatggaatacctaggtggcccagggggacccctgacc

SEQ ID NO: 75614 - DNA, 122 bp, Homo sapiens
gctggccaggatcctcctgccgagctgatgtcgctcctgccctctgccggggtccggaagcgacatctcaggaggtagctctcagcagagtgaggattcctgcctttcgtagagttttgtgt

SEQ ID NO: 75615 - DNA, 122 bp, Homo sapiens
cacacttctacaaatgaatgttgggtgggtgcatggctgaaacctagatttgctaatccccgtagggaaaacacagagcttcaatacttaaagaccattgctcattgtagattttactgaat

SEQ ID NO: 75616 - DNA, 122 bp, Homo sapiens
gctctcgggagggaaaattcccacaggtcccacaggcaggcaagggccctggaaagacagcggcttcggcctccagcggcccctgcccaaatcccggtaccggctctgcggcccgggcgagg

SEQ ID NO: 75617 - DNA, 122 bp, Homo sapiens
cctaaagttgcccaaggagctcctgctctgccagaggagggtggagagggcggtgggaggcgtgtgcctgagtgggctctactgccttgttccatattatttggtgcacattttccctggca

SEQ ID NO: 75618 - DNA, 122 bp, Homo sapiens
ggtaactccctattcttcaccttgcatatccagtcaatcaccagttcttgtttatagtcccgttacatccaaagtcattttcaaatcttttcctttctctccaaattgcccctcttccagtt

SEQ ID NO: 75619 - DNA, 122 bp, Homo sapiens
aggctggatttttgggggactcatttccagcagccaccagcaggtggagggagtgagatgcgtaaacaaactgtccctcatgcttggtgtttgggcagatgcattgctaaagcgtgctcact

SEQ ID NO: 75620 - DNA, 122 bp, Homo sapiens
gccttccagcgcacatgcgcatcatggtctccaggacgaagcttttgttgggaaagcaggcgggactgactttggctcttcagtgtttgcgcatgcgcgtaacgtcctgaggcggtgggtgg

SEQ ID NO: 75621 - DNA, 122 bp, Homo sapiens
actctgccgccgccgccgcgtcagcggcctcggccccgcccccggctcctcattggagggcgcgctcccctcgtgaccaccggcacctcacgtttctgaagtgtgtttactacactggctcg

SEQ ID NO: 75622 - DNA, 122 bp, Homo sapiens
agggaaggccttattttggtgggcctctgttcagtcggcttcttgagcaagccccgagctcgccattcacccctaagcctaagttctaaagttaaactctaattggtagaaggaaaagggat

SEQ ID NO: 75623 - DNA, 122 bp, Homo sapiens
ttccatgtcaataaatagaggtctgcactagcctggtataaaggctgtataataattccacggtaggtaaaactcaaatgtcctagctctcaccagcaatgagtgcaaatgagatcacagta

SEQ ID NO: 75624 - DNA, 122 bp, Homo sapiens
ttcagcagctgcttatggctctctccttgtgtccccacaatggtcagtgagatggagtcccgtgttcccgacaagaggtcggtgcctgtggccaccctgactttgtaggtggccatggctgc

SEQ ID NO: 75625 - DNA, 122 bp, Homo sapiens
agactcggctaattgattcgacgctggctttgcttcgtcttcccctgctcacccgcgccccgtgcacttttcagatactcatttgtgcttgaaaccactttggaggggggccctgccccggc

SEQ ID NO: 75626 - DNA, 122 bp, Homo sapiens
ttgggggtggggtcgggccggtggcggtgggggaagtagagggagagccaggaaggcggacggagaccagaactgtgatcccttatcgggagtcaggcccaggtggggatatggggcgcaaa

SEQ ID NO: 75627 - DNA, 122 bp, Homo sapiens
gagaaattcccctccccaaccaacaggaggcgccgaggggccatggcctccacggactcccggctcgcgttctctgtggcgctcgttttacgtcacttccttcacggatctctctccgcccc

SEQ ID NO: 75628 - DNA, 122 bp, Homo sapiens
agcagtatagcaaataatataagattccaaagcccaaggtagtaaaaagaggattatagacgtggtggaacctgttggctgcggggcaaatgactgacctgtaactgtcagggatttatgga

SEQ ID NO: 75629 - DNA, 122 bp, Homo sapiens
agtgcggtagaattttccgctatgggtcattctcggtgtccgcggggaagggcgtgacaacgacgggcgtgacggcgaagcaacagtgtctcgagagcgctgccgcccggagggcgccagga

SEQ ID NO: 75630 - DNA, 122 bp, Homo sapiens
ggtcaagccctggtctgacttcctacccagcctcataccctccaatccaggcagcctcctcgccactatgacaaccgtagggtctggaaggccccatgggaatgtaagcttcataaacggag

SEQ ID NO: 75631 - DNA, 122 bp, Homo sapiens
gctcaggattctggagacggaggctgggtgccttctactcctatgattcactcaagtactcggcaatttgcaaaatatagatgaccctcgctgtgctgaaggtgtgaattagaccccgccca

SEQ ID NO: 75632 - DNA, 122 bp, Homo sapiens
tcaaagcagatgaccaggggaacagatgtgaactgtcagtcctctgagcccaagcctgcacgtatacgtccagatggcctgaagcaagtgaagaatcacaaaataagtgaaaatggctggtt

SEQ ID NO: 75633 - DNA, 122 bp, Homo sapiens
cagactcagtggcccacccaggggcatgagtaatgctgggagctgcaggctggcttcccacgctccctcctgggcctggcccccaggcctggctgactccatggggggcctggcagtatcac

SEQ ID NO: 75634 - DNA, 122 bp, Homo sapiens
catcagtaagcctcgagcccctgctgtgtgcagccagccctcggttatgagtaaaatgcacgacctcatcccacggtgccagcgccttccctacacccaccctcgctgtggatgttccaccc

SEQ ID NO: 75635 - DNA, 122 bp, Homo sapiens
ggaggcagcggggggcacacagggtgggggcgggtggggggctgctgggtgagcagcactcgcctgcctggattgaaacccagagatggaggtgctgggaggggctgtgagagctcagccct

SEQ ID NO: 75636 - DNA, 122 bp, Homo sapiens
cccaccctgaacttgagtgagtgtgaggcccaccaggggaagtgctccggtgcccacctgcgccatgggggggctggcccagggcccagagcgtggcgacaacgctgggcgtggtcctgccg

SEQ ID NO: 75637 - DNA, 122 bp, Homo sapiens
aggtggaggagcggttctcccgggtgcctgagcccgtccagaagcgcatcgtgttttggtcgtttccacgcagtgaacgggaaatatgtatgtactcgtcgctgggttacccgcccccagag

SEQ ID NO: 75638 - DNA, 122 bp, Homo sapiens
tataccctagtttggggagctttgggaatatcgaccacttatcattgacacagtagttaccgcctcttgtaatttttaaaatacgtgaatatttacaaggttagatttcatgccttttttat

SEQ ID NO: 75639 - DNA, 122 bp, Homo sapiens
gaccgggctgaccgcgggggcggggccaggttctcacaccatgcaggtgatgtatggctgcgacgtggggcccgacgggcgcttcctccgcgggtatgaacagcacgcctacgacggcaagg

SEQ ID NO: 75640 - DNA, 122 bp, Homo sapiens
attggagcggctgttccgcagcaccatgctgtagaaggtacgttcctctgatgccctgtgcgcaaacccctagccagccttcccacactgccaggataacccttttgaaacctcccctgttt

SEQ ID NO: 75641 - DNA, 122 bp, Homo sapiens
tcccgccgcgtcgcggcctctccgcaccccacgtcccgggagccgaccgggagactctcacggcggagttccacagacctcgttaggttaaaggaacctcgccttgccccccactaatcggc

SEQ ID NO: 75642 - DNA, 122 bp, Homo sapiens
ttagttttaggattgatgtccacttattttcttctatgtgctgattggattgtgttacatcgtagtatgaatcatagtagaaccaccgtgttctaaccttattgtgtatcaccataacagtt

SEQ ID NO: 75643 - DNA, 122 bp, Homo sapiens
agggtggcaatgaccatgagatcttcacagaccccagaaccatgggctactccgtgacagcgcctgaggacacgcgcaggatctgtgaactgctgttctcctaacgtgggagcgggaggggc

SEQ ID NO: 75644 - DNA, 122 bp, Homo sapiens
cccgctccccggagccccggcaccggcgctggccgactaccacgagtgcacggcctgccgcgtgagcttccacagcctcgaggcctacctggcgcacaagaagtactcgtgccccgctgcgc

SEQ ID NO: 75645 - DNA, 122 bp, Homo sapiens
caaggtaggctgcgcagtgtctgggatgatgtcatggctccgtcttaaaggggacgcgggcggcagaaagtggagctgggctggtgtgcgcgcggccggagtctgtggagctggaaattcac

SEQ ID NO: 75646 - DNA, 122 bp, Homo sapiens
ggggaattcaccctcaggattcagagaaccagcagacatggcgggtcaactttctagtcccggagcaggaggagatggatctggcagaggctgggaagggcagcgggttgctctctcatgct

SEQ ID NO: 75647 - DNA, 122 bp, Homo sapiens
tccagagtctacttggaagaatacttaagtagtagcaggtaagcccaagggagaaagtgacgccctgttgtcaagcagctgaagtggacgttttccaactggaagtactgggagagatttac

SEQ ID NO: 75648 - DNA, 122 bp, Homo sapiens
cgcagaagtctctggaaaggcataaactcgcaacttaccctctttggaatttgtctttttcgctcctgcttattaaagaaggaagggtgggaatggaagggagcagagtggggaagatccgc

SEQ ID NO: 75649 - DNA, 122 bp, Homo sapiens
ctttggctgggtatagaattccagcttgaagaccatccttcgccttcgggattctgaaggcgcaactctgttgtcttcctctcccagtactgtcaggaaaatgggcgccacgtgatgctgca

SEQ ID NO: 75650 - DNA, 122 bp, Homo sapiens
ggagccttagagcaagtgacttaaccttctgggcctcagtttccctcatctgaaaatgggcgtgatcaagtcacctcccagggatattttcgaggatgagaggtaaggacggcaggagaagc

SEQ ID NO: 75651 - DNA, 122 bp, Homo sapiens
gggccgggtgccagatactgggatcagccactgcagctccctgagcactctctacagagacgcggaccccagacatgaggaggtaatgccaccatccctgagccccaatccccaccccaccc

SEQ ID NO: 75652 - DNA, 122 bp, Homo sapiens
tttcgtggactcccactgtggaaacctgctggtgttttgctgcggtttcatttccctctgcggaggagccagggcaaccttggccagacaggcacctagctgtgcccttctttccagggcct

SEQ ID NO: 75653 - DNA, 122 bp, Homo sapiens
gtgcctaggaaggctaggaaggtaatgaagagcatgctagaataaattcatataaggaaacgactgcacacaggagatctagtaaggcctctctgagaaggtgatattgaagctgaaagatg

SEQ ID NO: 75654 - DNA, 122 bp, Homo sapiens
tcagcgcctggatccttccagggtctgtctatgctcagggcagcctgcgtgcagcgacgccgcctccagagcgcaccccctgggcgggagccaggagaataaggagaaaacctgaacagggc

SEQ ID NO: 75655 - DNA, 122 bp, Homo sapiens
ttcctccgcctgaaaaagacggtgcgcccgtgggcccctggagggcaggcacctgcactgcgcccagaacggggccatgccagcgaggaggctggggaggggcgcgtagggagtatgtgtgt

SEQ ID NO: 75656 - DNA, 122 bp, Homo sapiens
tagccttctcccttcccgattctccagcctaagagacaaccgagaatcagtatcgctgtgcggtccggggcatcgctgagaagtggattttccatcaggtccagtggaagaagaaacttgaa

SEQ ID NO: 75657 - DNA, 122 bp, Homo sapiens
cctgcctggggattctgggcactcaccgtgcagccatcgacagtgacgctgtaggtgaagcggctgttgccctcggcgcggatctcgatctcgttggagccctggaggagcagggccttctt

SEQ ID NO: 75658 - DNA, 122 bp, Homo sapiens
gtctcaaaaaataataatgaaataaaatacagtacaacatgcatctctcaaagaacagcacggagaggtctcagtaagtcagacagaacatctcacaaaccaagcactaactatgcatcagg

SEQ ID NO: 75659 - DNA, 122 bp, Homo sapiens
gcagacattttcgtgggctccagggacgacacttctaaaggagaggcgaggttcactggacgttttgggaaactgtaaggcaaaaataaaattctaagcctcccaaccgactgaatggacct

SEQ ID NO: 75660 - DNA, 122 bp, Homo sapiens
tgcatttatagcccccctccaactgatctgaattcagtatgaattattcagtcatatattcgttaatatactgatgaataaaattgaaaaataccatttccatagcatttcctcaggtacat

SEQ ID NO: 75661 - DNA, 122 bp, Homo sapiens
gaactggaagtggtctgccactagccgaccaataagtcgctggagtggggcttccttctgcgcgaagctgggtaccagctattaaaagaaagaaggcagccgcccgctgcccacccgcctgc

SEQ ID NO: 75662 - DNA, 122 bp, Homo sapiens
atcaatttatgcaactttaaatatgtgcagtttattgtatatatcaattatacctcagtacggctattaaaaagaaaccctctggctgcacaatgcagaactgattctaggaaagagtggag

SEQ ID NO: 75663 - DNA, 122 bp, Homo sapiens
gcgccgacccacgctgcgtgcgcaccccacagcagccctgtctcccccgcgagctgcagccggaaccttctaacaggaactcaacaggcaggtgttcgttttgcctccagcatcaacatttt

SEQ ID NO: 75664 - DNA, 122 bp, Homo sapiens
cctccaggggtagggtagctgtcactgttgacgtgccagaggtatgagcctcctcccttccggtgatcgtggctcaaaaatccaggatggacctgggcctcttcatctagcccccatcggct

SEQ ID NO: 75665 - DNA, 122 bp, Homo sapiens
tactggccccttgtaccagtgtagaatgatgataacttgtttcaagaagccctaccacctcgtattacacaccttttgctttaggtactaatcttcacttcccaaaacaccagtactcttat

SEQ ID NO: 75666 - DNA, 122 bp, Homo sapiens
gttcagagggactgtgctgtccagccctggagcccagccccgcccagagttaccgccctgcgctgccaattgcctaatcctctaattgggagagatcagaaaagccctccctttcctcagat

SEQ ID NO: 75667 - DNA, 122 bp, Homo sapiens
cagggtggcccctcaggcatccaagagccagaggagcaggtgtcacgggatggcagcgagcgaggccaggccaggagaagcaaccgcagcctcctatggtcgccccttcccgacccacccca

SEQ ID NO: 75668 - DNA, 122 bp, Homo sapiens
tgcactgcacagaaggtcaccgcgggaggccaaatccccggggaggggaaaggacctgggcgtcgggaagcccgtctcctttgggccagccatgggcaggaaccagcgcaaagcgccccagc

SEQ ID NO: 75669 - DNA, 122 bp, Homo sapiens
cgcgggcatggcctgggagctccccttctctcgggggtgtggcccagaggccccattctgcgggggtgggtaacctgggagcccccttctcccggggacgtgacctgtgagctccacttctt

SEQ ID NO: 75670 - DNA, 122 bp, Homo sapiens
gtggaacgggttggagtcgctgtgtcccggccccgcctcggccgtgagacctccagggggcggagcttgccgctgcgctttacggaaacgagtggccttcagctctgtcaatctggagctgg

SEQ ID NO: 75671 - DNA, 122 bp, Homo sapiens
agagactgggctctgttggggccccctttgttcctcgagcttccttcctgttctgggaggcggcttgggaggccgcgacaaggccgggctccagctcttagaccccctctttccactggcca

SEQ ID NO: 75672 - DNA, 122 bp, Homo sapiens
taacatctggccatatttttcaacaaattcagaagtgagtagagaatgcatagtagctgtcggcagaggaggaaccagaatctctccaaagaaattcctcaaacagaatttcacacagggta

SEQ ID NO: 75673 - DNA, 122 bp, Homo sapiens
gagaggctccccgcagcccactctgactgtgccctctgccctgcaggagagtatgacctgcggcgctgggagaagtgggagctggacctggacatcaaggaggtcttcgtccaccccaacta

SEQ ID NO: 75674 - DNA, 122 bp, Homo sapiens
gcgcgagtcgagcggggcgggcttggtccggagctgcgggatgtagatcccgggcggcaccgcactcacttctttttctgtttttgacagctcagttctcttctactttgggagagagagaa

SEQ ID NO: 75675 - DNA, 122 bp, Homo sapiens
tggtactacgaagtctgattagatacgacgcggtacaacgaagcctgattagatacagtgcggtactacgaagcctgattagacacaacgcggtactacgaagcctgattagacacaacgcg

SEQ ID NO: 75676 - DNA, 122 bp, Homo sapiens
ccagagtgagctttactctgtcatcccttcttagtggttctttgatgattccatgactttcgcctggaattctgggtgtacgtgacctcttcatggttattaacttcttcagcaaagtcaga

SEQ ID NO: 75677 - DNA, 122 bp, Homo sapiens
ctttcctcggccgaagcggacgccagccctgcgtcccgtgtgtcccaccctcctcctgcgcgaccacagcttccccgggccccagcatccccaagccgtctgctcccttcctgtcgctttcc

SEQ ID NO: 75678 - DNA, 122 bp, Homo sapiens
agaatatcttattggcccacttcataggctttccactagtcattccctaccacatacttgcggagaaaaaaaatatttgaattggcattcctttcttcctttctgagctgaattaatagtag

SEQ ID NO: 75679 - DNA, 122 bp, Homo sapiens
agatggctcttgcagttccccttcctgatgctggtggaaagcagggctacagagaggtctcgacccaaggccgccccagccagctcagaattggactgggcatgagtgggtttcccattttt

SEQ ID NO: 75680 - DNA, 122 bp, Homo sapiens
tgacttctggaccagtccctgacatccagggtcttccccaccccacccattggttctgaccgtctcacatccactatttgtggccagctctttcggcctcagacactctgatctcctttttc

SEQ ID NO: 75681 - DNA, 122 bp, Homo sapiens
acctccaggcctgggtctctgtccctgggtcagaggccaggctggtgacactgaagatagcgggtgggtccttcccagccatcacccagtgagcccctttctagcccccagagccacctctg

SEQ ID NO: 75682 - DNA, 122 bp, Homo sapiens
accctgcttcgtgtcacctgcggggctgcaaactggggcggggatgcggtgacctctgcacgtgcgctctctgcgctgcccccgccccctaccgtccctagctctgtccccctcaggacgcc

SEQ ID NO: 75683 - DNA, 122 bp, Homo sapiens
gagcccgggacacagagctcgaaaagcctccttggggtcacgctggaagatcctcaactccgggacatggcgtcgagaagagaaaagaggtgagagaaatttccttggagaccagcgcagca

SEQ ID NO: 75684 - DNA, 122 bp, Homo sapiens
gggcgggggggcggggggggaagggggtggcgggggcggaggcagagcaggggtcatagccgtctccatagcttagctactgagtctgaagacatcccagctgtctggctcacacctggttt

SEQ ID NO: 75685 - DNA, 122 bp, Homo sapiens
ggtgaataagactcagtccttacactccaggagcccagagttcagccttccagctccaatcgcagacacacaagtgctaatagactcacaggaggggaagggattaagcagcagaatctcct

SEQ ID NO: 75686 - DNA, 122 bp, Homo sapiens
gagaacaaaagcgactatcacagctgaaaacgtcagaaaagagacaatgtacagatctcgcgatattccctttgcttacgacgtgcttagggaatgaagaggcgtggttaagataaaagagg

SEQ ID NO: 75687 - DNA, 122 bp, Homo sapiens
cacggtgagggcatcaccaggacagtgctaggcaggcagcagatgctaagacattgagggcgctctttgcatatgaatgaaattaccaagcacagtgcctggtgcacagtaggtgctcaagg

SEQ ID NO: 75688 - DNA, 122 bp, Homo sapiens
ggtggcggcggcggacccccggggggcgtcctcgtccagcggggtggtggtgcaggtccgcgagaagaagggccccctgcgcgccgccatcccctacatgcccttccccgtggccgtcatct

SEQ ID NO: 75689 - DNA, 122 bp, Homo sapiens
gcaggactcttctctcggccaggagcgccgcgaacagccccacgatgttctcgtcagtcacggccaccaccagctccgttaggttcctctgaggatcagagagtcgctctgggcgtggacgg

SEQ ID NO: 75690 - DNA, 122 bp, Homo sapiens
gaactcagtgacctcctaaggtcaaataactagtatggaggaaagccagggttccagccacgcagtcttgcttcaagggtccatgctccgtgatccattatgttacatggcttctagatgtt

SEQ ID NO: 75691 - DNA, 122 bp, Homo sapiens
cagggacggtttctgtggcttcgcccggcattttgtgcagggaacgcggaagcaagatggcggcagaaagagcgcgagcgagagcgtgacccacgcttgttgcagcgggaagcaaaaagaga

SEQ ID NO: 75692 - DNA, 122 bp, Homo sapiens
ttcccgagataaaagatcccttctgagctcacacgggagccccgggaccatccaatccagcgtggatatccccagcctaaccaacacctgtgctggggggaaagataagacgccccctttca

SEQ ID NO: 75693 - DNA, 122 bp, Homo sapiens
caagggtggcttcccaaagcctcgggggtctcaccgaaagtggctgagcttaccaaggtgcgagagcctgtttctccccaatctgctgctcagccacagctcaggcagtagggagcagccac

SEQ ID NO: 75694 - DNA, 122 bp, Homo sapiens
aattttgaatagtgcaatttgatatttggtctgtcatttgagcgtgtgtgtttgtgttcacgtgtgcattttacttcctggtgatttacgagaactcactaatgagaaacagatggcctcta

SEQ ID NO: 75695 - DNA, 122 bp, Homo sapiens
gagactgcgcgcccccagcaaaaaatcaggtcggttctccgagcccagtctagcgcttcccgacccgcaaaccaaggcccagtgaccgtccccgctgcgcagccgcctgcgtcgccagccaa

SEQ ID NO: 75696 - DNA, 122 bp, Homo sapiens
cattctaaaatacctatattagcagagtcttcacatagcaccagttaagtgagaactgtgcgaacacagtaataattgctggtatgcatataaaatgcatcaaaaattgctatatgtaacaa

SEQ ID NO: 75697 - DNA, 122 bp, Homo sapiens
tgccccgggctgctttctgtctgggctgttttctcactgtgaacctcgtgggctcctgctcggtgtcctttcttactctgtctctgtttttgcattctattggcaagaatgttatttaggat

SEQ ID NO: 75698 - DNA, 122 bp, Homo sapiens
cgcgtccccttctcctcaggagtggcgggccgcggaagtgacgtggtgcacgggcaggagcgcgtttgaatcggttcccgggtgatcctcgcgcctgccgctgctcggccgccgccgctgac

SEQ ID NO: 75699 - DNA, 122 bp, Homo sapiens
accggccggagccacagtggctccgggtgttggggctgtcctttcttccctttgatcttacgcagggtgacggagccaatcacgagaggctcacccctgacgtcacccagtccccagggcca

SEQ ID NO: 75700 - DNA, 122 bp, Homo sapiens
gatcacactgtccttccttggccagattgaaaactgggtgacagagggtcctagtgaagacgaggccgtgtgcgtgaactgccagaataacagctatggggagaaatgcgagagctgcctgc

SEQ ID NO: 75701 - DNA, 122 bp, Homo sapiens
cgggctggacgtggccctgcacccccggctgctgggcgggccggggcatgtacgagatcgcgcgctttacaaactgtcggtcgttctgggaaagttaaagaacgcgctgcagctacttcacc

SEQ ID NO: 75702 - DNA, 122 bp, Homo sapiens
cagaaggagaaatcagagctccaggaagttaaagtgaaaagctagaaaagtcaggtaggccgtctcaggtctggccatgccgaagttatgcttacgcctcttacgaggacaaaaggaccccc

SEQ ID NO: 75703 - DNA, 122 bp, Homo sapiens
acaggctgaaaaggacatcggcgaggtcagagaaatacctttagggtgtaattacgcctacgcgagtgggtaaaatgagggcataatgacgcggactggattgcaataaacagcttttattc

SEQ ID NO: 75704 - DNA, 122 bp, Homo sapiens
gccaaactgttctctttcggttattgatttaaatgtcacttcttccgggaagccttcccacgcttcctctggctagattgtttgctttttcttaggttgttgggtttttcgtttatgtcact

SEQ ID NO: 75705 - DNA, 122 bp, Homo sapiens
gatggctcttgaccctttccactaataaccagccctcttctcatcttggcagtcccagtacgagaaggaaaggcgaggtccctgtcaggtatctgggatttttatctctatctctcaccctt

SEQ ID NO: 75706 - DNA, 122 bp, Homo sapiens
attccgggagacaatgcatctaaaacgaacagcggctgggaacggtggaggataccttcacgatagttgcttccagagaaaggcatgcaagtctaattttaatggtaagaatcacttactct

SEQ ID NO: 75707 - DNA, 122 bp, Homo sapiens
cagaagcggttcagtgagtttatgaggcaatacttggtcctgagcatgcagtccagccagcgccggcgcaccctgcaccagaatggtaatgtgtagccggaaggggcgctcctcccagctgt

SEQ ID NO: 75708 - DNA, 122 bp, Homo sapiens
acagcagtgataacaggagtaacagcagcagcagcacctgcagctctgcagcactggggccggttctgcctatgggcagttttctctgcctagccaggcctccggtaccctgggccacagtt

SEQ ID NO: 75709 - DNA, 122 bp, Homo sapiens
gcccagcgagcctccccctggagacaggacctctcaattgcagagctgatgtcagtaaatcgtggccatagctgagtgaactggtgaaatcaagccaacctggacacatacgttcctcgttc

SEQ ID NO: 75710 - DNA, 122 bp, Homo sapiens
accttctaggaggagctccactaagcagtctctagggtgtattgctttctccatttctgacgggacatttccctgcaggcttctagttgcagagaccaagcctagctggctcccaagacatg

SEQ ID NO: 75711 - DNA, 122 bp, Homo sapiens
tatcgcctggcacacatccctgtaccatcctaggtccgtttcctgatttgaatacaattgcgatagtaatacttgctaaagcgtagggagagccttttcattcatccagtaaatattcactg

SEQ ID NO: 75712 - DNA, 122 bp, Homo sapiens
cctcactaataattccatcactctgcattatgctatacactaggggcagtcatcccaaaacgaaggaatcactcgtcgtctttacttcaggaaatttcttggtaaaactgacttcaagaaaa

SEQ ID NO: 75713 - DNA, 122 bp, Homo sapiens
ctcacgcgccactgtccctctgaaggcagcgtgctggacagcctgcgcagggctcaagagcgccgcgagctgccctctgacctcaatctgcagcaggtagacggtcccgggaggagggaaga

SEQ ID NO: 75714 - DNA, 122 bp, Homo sapiens
ggtgatccacctgccttggcctcccaaagtgctgggattacagatgtgagccaccacgcccggcctatttattgtttttacagacagacagggtcttgctgtcccccaggctggagtgcagt

SEQ ID NO: 75715 - DNA, 122 bp, Homo sapiens
gcggtcccagctagcgcggttcccctggaagaattaagtagctggccagaggagctatgccgccgggaactgccgtccgtcctgccccgactcctcatatccttccttggttgtcacttcta

SEQ ID NO: 75716 - DNA, 122 bp, Homo sapiens
tcagaactcactactaagccaaagcctgtcctgtagcattctctaatgctttcagtttttcggctgtcagatgcttggtgagaactgctgttatgtggctcacgcctgtaatcccagcactt

SEQ ID NO: 75717 - DNA, 122 bp, Homo sapiens
aaatataccaataacagtgatatacacagtacatgtaaataatattgatctacacagggccgggcgcggtggctcatgcctgtaatcccaagactttgggaggccgaggcgggcggatcacg

SEQ ID NO: 75718 - DNA, 122 bp, Homo sapiens
aggcctctcgcgctgcagcagtctcctcaggagcgccgccatgtgggatggaatagcacacgtgggcttctccctgcgtcacttccggggactgcttccagccaatcggcctccgccacagc

SEQ ID NO: 75719 - DNA, 122 bp, Homo sapiens
ctaataggaattcaatcaagataataacagcattttttattgatgaacgcccccagataacgttacaccaagttacttgttccagccaggaagcccaggcaatgacagacctcgctaaagcc

SEQ ID NO: 75720 - DNA, 122 bp, Homo sapiens
caaacgcaacagtaattcagtaattcttaacacccgtgaccgtcccaccatcacctccctcgttcaaaactgtaagaagcattcgacggagactttgatttgacgtagaaagatcgtgcctg

SEQ ID NO: 75721 - DNA, 122 bp, Homo sapiens
gcaaactcacgggtggccaccagagggggcaagacacacccgacactggcagaagtccctcgctgggacagaaatggagggcgcagcactccctacagccaagaccttctgatttcacacct

SEQ ID NO: 75722 - DNA, 122 bp, Homo sapiens
ccagccccgccacggcaggggcagggtctagtgcagagggctcctcctttcctggcagcccgggttcggatgcttgttgttttgagagagaaatcctttggggctcagagcacaagctgagt

SEQ ID NO: 75723 - DNA, 122 bp, Homo sapiens
gggggcagcctcctctggtgtgggcgcaggccaggctgcaggtgggcactgggactgaggcggtgtgtgaagaagggacaatggcctctgtttcctggttccacacagacacccagattcta

SEQ ID NO: 75724 - DNA, 122 bp, Homo sapiens
gggggcaggagagaagagagagcgcctcaccgcagacctcactgcatacttgaaggctgacgtatctgggctcacatacttctggaaaagatgagtcaagcataggccttgagctcccgagt

SEQ ID NO: 75725 - DNA, 122 bp, Homo sapiens
ccgcggctgagacaggctgctgcaccaggcggccctggaccgccgcttccgcccctaagccgccctcccagcccaggtgacaggtcgccctacccagggagcatcgccctcctccgccgggg

SEQ ID NO: 75726 - DNA, 122 bp, Homo sapiens
ctactacaccatgggggagttcttctgggccacggccaactgcactgtgcaatgcctgtgcgaggagggcggggacgtctactgcttcaacaagacctgcggcagcggggaggtgtgcgccg

SEQ ID NO: 75727 - DNA, 122 bp, Homo sapiens
acccagtgccaagcaagcctctttctcgaggtcgatttagtacgtgtttcttgctttgtgcgtttcttgttgctgatttcgctgttgaagtggcctgagcgctgtcctgtgtggcccagggc

SEQ ID NO: 75728 - DNA, 122 bp, Homo sapiens
tctggaagttctgggaaacgtattccagaactctgtccggaaacaattgggccgcaggagcgcgggccttctgggaagggtagttcaggagctctgggcaggcagagccacttccgccccgg

SEQ ID NO: 75729 - DNA, 122 bp, Homo sapiens
cagatcagagagccttctgccttctcttctctgggtgctcagcctctgtttgcaggtgcacggctcaggcgctaccctggtcctttgattctggcctctggagtccaggaggcctgggaagg

SEQ ID NO: 75730 - DNA, 122 bp, Homo sapiens
ggccactgctgggaggacgtctgtgaaaccaggtgcccctgagagccactgtccccagcccgactccgacgctggactggcgagagggtgcgcccgtggcgtagctcctggccgccgccgct

SEQ ID NO: 75731 - DNA, 122 bp, Homo sapiens
atggaggaggcagaacgcgtggatgtggccttgcgttgttggactcggggtggggtgggccgtgtggtgcagtctaatgactgtgtcgatatttctgggaactgttttcaatagtgagtgct

SEQ ID NO: 75732 - DNA, 122 bp, Homo sapiens
ccccattctcatggagtcacccggaccctgacctcacgtttccccgtccatggaactggccggcagccctcccgggaccctcgggcagctgagaaggccaaagttcagagaggacaagtcgc

SEQ ID NO: 75733 - DNA, 122 bp, Homo sapiens
cctcctcaccttgccttagagacccaggcagcgagggtgtgcaggtcagcgctcaggagtcggactccttagtgtgaactgcacatccaccttctctgaactctgaaaattaccctctctga

SEQ ID NO: 75734 - DNA, 122 bp, Homo sapiens
gcttttgttgcgctcctttattaagtcaggccctcagctgggacttcccgtgcatccatgcgttcattccacagatactgattgaatgcctgcatgtaacaagccatgcttggggtgctcat

SEQ ID NO: 75735 - DNA, 122 bp, Homo sapiens
ttgttcctgcacgccaggagccgtgggccgggccatcaggccatacaagtgctgcgaaagcggcctcgccttcggctgcatcatctcggggatgtttcacttgtctcttctcccagttccag

SEQ ID NO: 75736 - DNA, 122 bp, Homo sapiens
ggtgctacagcagatgtggctaaatgcggaggtcagcagcctcggatccccgactcagctcgcctcccagagaaagctcgaggcaaggggcagggctgggggttttgccggcaggggagggc

SEQ ID NO: 75737 - DNA, 122 bp, Homo sapiens
cctgttttattcgtgtgtaccagtgctcgttgtgcagtgcggtgtcctatgcggtgggtacgcagtaccggggattatatatggtgtgtactctgtgtcatatgcagtgtgctcgaagtacc

SEQ ID NO: 75738 - DNA, 122 bp, Homo sapiens
attgattcctcgatcatcccgccccctacaccgcccactcccgggcatccccattggctgcgtgcttctccggctctcaattcgctgtacgtcatccgtgcatggctgcccattggccctct

SEQ ID NO: 75739 - DNA, 122 bp, Homo sapiens
gcgtctttggcagtagtgggcgtgcttgcgggtccaggagggcccctctcccgcgaccgccgaccacgatgagagcgtgaagaccctctcgaaaggaagggctctgctctacacactggtgt

SEQ ID NO: 75740 - DNA, 122 bp, Homo sapiens
tttgatgcgcggcacttgaaacgtctgctgtactaggttcctgcgcttcttattgcagcgcgctttgcagaagcccgttctgcaggctcctaaagcgcgcgtattccccgggtttgtgctgt

SEQ ID NO: 75741 - DNA, 122 bp, Homo sapiens
tcctcgtggtcccgcccccacctcacctgaagcaggtggaagctggtccctccccagctccgcctccagggtccgctacagcccaagcggctaccgtcactctgaccagggaagccaccctg

SEQ ID NO: 75742 - DNA, 122 bp, Homo sapiens
ttccacactgtgggaagagggtgcccagggagctgcagtctctccagcccagccccaggacgaggcccaggcagcagagccaccccagcagacctggcagtgtgagagaaatgcatgtgtat

SEQ ID NO: 75743 - DNA, 122 bp, Homo sapiens
tcattctcacgtggtcccagcttgggtgacaagttgtatggttcctaattgtagcaggatcgtgggatttggggaagagccagatctcagggacgcctttgtctagctcctccattttcacc

SEQ ID NO: 75744 - DNA, 122 bp, Homo sapiens
cttccaggagggagggcggctgtgaacgcgccttgctttccgcgcctccgcagtttcttgcgcagttgatgatctttataatcagcctcgtcagctccatcttctgtggacatctgggcaag

SEQ ID NO: 75745 - DNA, 122 bp, Homo sapiens
cggaatctgtactctccagccagggctccccatcctcctgcaaagggccagcaccgtgcacgggtacccacggcgccttccaaggggaacgtgcacaggcatacccactgttcattccacga

SEQ ID NO: 75746 - DNA, 122 bp, Homo sapiens
tctcttcgcacattaaagggaagcagccggcaccatggccaggacagctgggtttccttccggctcctgagcctctacatgtgacccgggttgagggcgtgaatctccagcctccgttcagc

SEQ ID NO: 75747 - DNA, 122 bp, Homo sapiens
caggcctgggtgtgaagccaatggccgtcagccgacgtcagtagagcatggcgtgaagtccggcggctcaggctgagcgttggaagccattttggctgcaacctacctgaagcgatgtctgc

SEQ ID NO: 75748 - DNA, 122 bp, Homo sapiens
ccccatccatgtgacaagggcatgtgaccagtatgctgctctggagcgggccaccggcaccggtcggggcggggtggggcctctcggagtcctgtcctctgtgggaacgaaggccactgtgc

SEQ ID NO: 75749 - DNA, 122 bp, Homo sapiens
gggaccctcctagtggacatgcggggattggaggtggagtccttgctgtgcaacccgatccggtccatccagcctggtcttagctcaactctgcattcttatggcggaggaaagctaagata

SEQ ID NO: 75750 - DNA, 122 bp, Homo sapiens
ccccgagatgccccaacccctattcctttctgtagctggggatgctgtataaacgtcaatcgtctgacttttctttgagtctcatgtgttacgggactcctgtgtatatgcacatatgtcat

SEQ ID NO: 75751 - DNA, 122 bp, Homo sapiens
catgattcagcgagctcactctaattaatatctgcagtatctcatctaggaggtgggtttcgggcttgggggacaaaacacttaaaatccttacactcttctacactgcttgaattttaaca

SEQ ID NO: 75752 - DNA, 122 bp, Homo sapiens
cttcaagggagctaaagccagaagatccactttgtatatatttcagaggcaccatttacacggtaatactggggcaggccaattaactaacatcagtggtaacgaatgcgttattttcctat

SEQ ID NO: 75753 - DNA, 122 bp, Homo sapiens
gagataatttccgggtcccggcaggaaagggtcagccgcgcacggtggccgcccgcgtgacgtcagcgctcgtcgcagccatcttggctcctggcagcggctgcccaggcctcggtcgtggg

SEQ ID NO: 75754 - DNA, 122 bp, Homo sapiens
ctgggtctggttattacagcgcaacggagctggagtccatgccgcacaaccagttacctacggtccaaaacatgccaaagttttccgggctttcgcgcccacccgcatcgccagttttccgg

SEQ ID NO: 75755 - DNA, 122 bp, Homo sapiens
cccctggccgctggcgccacctccgccactcgggcgctttccagcagcttccagaaacgtcgcctccccaaacccagccactcacacatggcgggctcagcagccaccggccccgcccctcc

SEQ ID NO: 75756 - DNA, 122 bp, Homo sapiens
ccagacaccaaaatctaaagctttgctgcagtcgcgaaaatgcgggtgctcagaaactcgcgagcaaacaagacaaagaaaatcaagacgctgtctttgagactgtttatttcctcgttact

SEQ ID NO: 75757 - DNA, 122 bp, Homo sapiens
gtcattgcattgtagaaatttaacttatatttaaaaattaggttagcatttggtattatccggaaatataatgatgttaaaaattaaacgatgggccgggcgcagtggctcacgcctgtaat

SEQ ID NO: 75758 - DNA, 122 bp, Homo sapiens
ctgccacagcaaattaatggtggagctaggtctagaacccggatcagtttgactgtctggcgttctttctgctactgggctgtcttttgatagagcaggaaagagaagaggaatcgtgtggt

SEQ ID NO: 75759 - DNA, 122 bp, Homo sapiens
tgtaaagcactaacttccatgttttccaaacaaatcctaaaatacatgtttcaggagaaccgtgttaccctatgtaaatgtgtggtattaatattgctgctaatcctcacacaagagggaaa

SEQ ID NO: 75760 - DNA, 122 bp, Homo sapiens
acacaatgctcttaaaattaaaataattctccaaaggtttgttttatgggcttatttagccggaggcaagcagccattttcaatcttagtatccggtaatcctggcaaccttttgcccaggc

SEQ ID NO: 75761 - DNA, 122 bp, Homo sapiens
cggcggcggccaggagtgctttgtcctcgctgggccggaagggaccgggaaattccaagccgggcgccccctccccgggcgctctcgggctcgccagtcgcagctaccgcgggccctccgcc

SEQ ID NO: 75762 - DNA, 122 bp, Homo sapiens
gtcttatttaatcatcgcaatcaccttgcgaagtaggtagtattattaccatttacagatcgaaaagagaatcaaagaggttcagcatgtcactcaactcaggagaagtggtaaaagcaaga

SEQ ID NO: 75763 - DNA, 122 bp, Homo sapiens
caccccgagctgcaccactgtgaggaggtcatggctgcccagtgccctaaagcactgctgcgtcctccgacgcgagatggctgtgtgccaccgactgtccaaatgccctgccaatgccatcg

SEQ ID NO: 75764 - DNA, 122 bp, Homo sapiens
ttttttttttttttggtgagacggagtttcaatcttgtcgcccaggctggtgtgcaatggcgtgatctcggctcactgcaacctccgcctcctgggttcaagtgattctcctgcctcagcct

SEQ ID NO: 75765 - DNA, 122 bp, Homo sapiens
tcttaaacatacattgcttaatcccttgctttgtgcatggtgaatactcaaagccttcatcgtaggaatgactaaatgacaagtggatgaaacacagacctatcacagcttgatcctgtcca

SEQ ID NO: 75766 - DNA, 122 bp, Homo sapiens
ccggcttcctggctacttcaaccccatcaatcccattctagtttaaatcttacaaagcgccgggcaaggtggctcacacctgtaatcccagcactttgggaggctgaggtgggaggatcact

SEQ ID NO: 75767 - DNA, 122 bp, Homo sapiens
ttggtgtcctggggtgatccagtccagaaggcctcatcccctagccaaggctctcagggccggttttagaaacgaaacaggaagaggcacttggaccctggttcccagagtgggagaaaggg

SEQ ID NO: 75768 - DNA, 122 bp, Homo sapiens
tgttgggctcctgctcggggtgccccctctctggcccgatttccgggcccgctcaccatccgggacccactcagttgggacgcctccacctcgctgcccccacaggaaccccaagatgggcc

SEQ ID NO: 75769 - DNA, 122 bp, Homo sapiens
tccaggccgcagtgactgttctaacggcggtactggccactgcgaccccagcactgtgttcgggaaaggagctgggaatgccctatttggtcacattggggtgggacagacgccatttttgt

SEQ ID NO: 75770 - DNA, 122 bp, Homo sapiens
agcgagcttgtattgctatctcatggctacagttccaagctattggatctttgtttgtgtcggtatatacatgtctagatgtgtttatttgtaggtacacttactgttatatcttgtgccta

SEQ ID NO: 75771 - DNA, 122 bp, Homo sapiens
gctagggtgtggggggcgggtgggactccagccgggagcgggtaacccggactagagtctcgcccccactaggcgggatgaccgctggcagatttgtcggcaaagtttcagtttcttagtct

SEQ ID NO: 75772 - DNA, 122 bp, Homo sapiens
gggcggtccgcctctcagacgtagaggcccggcctcggatgaaggcggaagggagggcaccgcctgttgctgggcaactgtgccccaactcgtctgcccctggggagtgtttgtttccaaag

SEQ ID NO: 75773 - DNA, 122 bp, Homo sapiens
cttggctgggatctcagtgcctcaggctcctgctcagtcagtcctgcgacttttcctccacgtgcctggctcccctgcctcacacacctgcaggggacagggtattccctacacactcatgg

SEQ ID NO: 75774 - DNA, 122 bp, Homo sapiens
atccagtgccagggcctggccgccgcccggcgccgccgctcggacccgtgagtgccccgccggccaagcggggcgcggctgtcacagcccagcccaccattcacagggtctcggcctcctcg

SEQ ID NO: 75775 - DNA, 122 bp, Homo sapiens
cttccgtgcctgttaccacttcccctccaggtccctggtgccacaatgctcttgcccctgcggttgagttatctcttacaacgaactctggccagggtggggcatgggcctagaccctggag

SEQ ID NO: 75776 - DNA, 122 bp, Homo sapiens
gtttctttggctatgaaagtctacaaaacccccatgcaggaacattgcacatcttacacacgcctcctttaactgggctcccgcgacctcggcaggcgagggggtgctggccggccctccgg

SEQ ID NO: 75777 - DNA, 122 bp, Homo sapiens
atccgcccgcctcggcctctcaaagtgctgggattataggcaacagcctccccgcccggccgagcctgcgtttttaggtgtaccatgcagcatacacgaaagggatgaaagacccgcgtatc

SEQ ID NO: 75778 - DNA, 122 bp, Homo sapiens
ggtttatgccactcctctcatatgcataccccgcccagaattatattaactttactgtcgcggtttccagggctgaatggtagagatgtaaagataattagtttgtatgaacatgcttattt

SEQ ID NO: 75779 - DNA, 122 bp, Homo sapiens
tgcggccaagcacgcccacccccggacactggctgcccggtcccggatccccaagggcgacgtttctatttgggatccacaacaggtgcctgagaaacaaagccgcagatcgctccaccgct

SEQ ID NO: 75780 - DNA, 122 bp, Homo sapiens
gagcatatttggaaagctggtagtcattaaccaagttctaattgttctggtctgtttgctcgaagtcagagttttattgtcatgtgtgttctgcccattatccatttatatattcagtccct

SEQ ID NO: 75781 - DNA, 122 bp, Homo sapiens
gccggcacattaggatctgaaggggacattctatgcttgccagactcctcccagagatcccggactcgggggaatgggaagggccagggtaacacctgcgggatgacccgcgaaggggcgcc

SEQ ID NO: 75782 - DNA, 122 bp, Homo sapiens
tgagaaagctcctaactgtggcagggggtcccaaagacggccaccaactcttccttcccacgcctgcaccgcctgcacatgatggtgtgctgctctgtccagaggaggaccctggctggctg

SEQ ID NO: 75783 - DNA, 122 bp, Homo sapiens
tctgtcggtgcaagtgttcagcttccgctggtttgtgcacgatttcagcaccgaggacagcgccacggccgctgctgcctccagctgcccgcagcctggagccgattgcaagacggtggtcg

SEQ ID NO: 75784 - DNA, 122 bp, Homo sapiens
gaaggacatcattcggacgctttccagggtggtgggaagcagcctcccttagcccggctacgtctcatgaatgtgcgtggaccccgcctggccttctgcccgacatgtactccaccccgcct

SEQ ID NO: 75785 - DNA, 122 bp, Homo sapiens
cagaaactctttttaggtttgcctttaaaatttaaatccagtctaggactgggtcatttccgaatcagattttgggtaaataactgacaactggcttattttcatccacgacgaaaatggaa

SEQ ID NO: 75786 - DNA, 122 bp, Homo sapiens
gttctgcctgggccgagctacagagggattgggccgccgggacgtcacgtggactggggccggataatggcgggcgctgcagaagatgcgcgagctcttttccgggctggggtctgcgcggc

SEQ ID NO: 75787 - DNA, 122 bp, Homo sapiens
ggggggggcagcgcggtgccctcctgccgggcatgctggtaatagtgtcttagctgcttccggccgttggtcgcagggctatgggactacagtctcagcatgcgcagggttcaagggtgttg

SEQ ID NO: 75788 - DNA, 122 bp, Homo sapiens
gtcctccaggaagaacaccatcctgcgagaggcatgggggttagcaggagcgacggggcccggggtgggtcatcggccaggagacaggtgcgaggccgcagccagcgccgccctctgctctc

SEQ ID NO: 75789 - DNA, 122 bp, Homo sapiens
attgtgtcgctcttgaatcatagaataattctaaattatgttacgattaaacaggaggggcggggccctgtccatcacgtgactctctcggtgctgtctccggccgttgattggcctgggcg

SEQ ID NO: 75790 - DNA, 122 bp, Homo sapiens
tacaggcataccttggaggcattacagctttggtcccagaccacaatgaagcaagtcacacgaattttgttggtttcccagtaaatataaaacgtatgctgataccatactatagtctaagt

SEQ ID NO: 75791 - DNA, 122 bp, Homo sapiens
ctgtggctgtcgtggctgctctggctgaggctggcgcgctccaccctggactctggacttcgcaggttcctgcctgtcacgccacccccttcctgggagcagcgagcagtgccccaggcccg

SEQ ID NO: 75792 - DNA, 122 bp, Homo sapiens
accaccacgcctggctaattttttatatttttagtagagacggggtttcaccatgttagccgggatggtctcaatctcctgacgttgtgatcggcccgcctcggcctcccaaagtgctggga

SEQ ID NO: 75793 - DNA, 122 bp, Homo sapiens
tgcaaccaaccaaaatcgtcacagagacctctcggcattaaaacgtgaaaatagtcctgacgccagcggcgaaatagccttcggggaccacttccacttccggtccgacttctagcacctcc

SEQ ID NO: 75794 - DNA, 122 bp, Homo sapiens
agcaagattattgcagagaatgacaagttgctaagacatgctgctgctgtaaaagatggacgtgcatagggctattgggggtgggttctagttggagggaggagggtggagcaaacctcccc

SEQ ID NO: 75795 - DNA, 122 bp, Homo sapiens
caggcaaaccccttccagcacccatcacaccggtacctccagtcttggcccacctgctggcgggattcctcggcactagacagaagccccccggggcaaggggctccctccgcggtcagagg

SEQ ID NO: 75796 - DNA, 122 bp, Homo sapiens
cacacacaccatgctcagcgacatcactccgagttggtgacatcctcctgacagctccatcgcacccatgctgtaggtgcggcggccgaggaactcccctttggtaggacgcagagctgcac

SEQ ID NO: 75797 - DNA, 122 bp, Homo sapiens
cttcgagaacggcaaggagctggtcgagctgtcgcaggcctcgccccacgacatcagcaacgtcctcaagctctacctgcgtcaggtgagacccaccggtggtggccaggcagagcctggaa

SEQ ID NO: 75798 - DNA, 122 bp, Homo sapiens
agggcaggacagggctgcggggagatcagagagggtggatcaggcccgcgtagcaggggccgtcgaagagcgccctgtcggggacggcgcccaggaattccatccccaaaccctgctcctct

SEQ ID NO: 75799 - DNA, 122 bp, Homo sapiens
cccagcgttttgcgagcccacgcccaggcccaggagggaggatcctttgttctatgagttcgacaccagcccaggcaatatagcggaatcccgtctctaccaagggggggggggcggggggg

SEQ ID NO: 75800 - DNA, 122 bp, Homo sapiens
gcgcgggtgctgtgccgtccgctgctctcttcctcctcaccgagaactgcccctcgccggcggactacaagagggcagccgggcagagcgagcttcctctcggcagctcagcggtgcccctt

SEQ ID NO: 75801 - DNA, 122 bp, Homo sapiens
caaagttaggtcagtttgttggtgggtcgtttggaattgcgctgggtcctagcaaactgtcgccttgtgactgcagagtcacacagcgggtaagttccaactccaggaaggcctgaggtcgg

SEQ ID NO: 75802 - DNA, 122 bp, Homo sapiens
gagagagccacccccgcctcaccaccaggaatgtcaggcgaacattaggtgatggtcgggcggttgttaacagtttctcttaaggaatcatccgtcacagccagctccagggaaaggcagtc

SEQ ID NO: 75803 - DNA, 122 bp, Homo sapiens
tcagtacgctgcttctgttctggaaagaactgttgacccccaatattcttcttcctcagacgggatctcagtattagcttcagaaactctgagacctctgcaagtgaggaggtaatagagga

SEQ ID NO: 75804 - DNA, 122 bp, Homo sapiens
acggaatggggctgggccccagacggggtctccctgtctcctggggaaaaccagggggcacggcctgacctttttctgttctgcaggcaacaagacccgcagaggaaggctctcctccacat

SEQ ID NO: 75805 - DNA, 122 bp, Homo sapiens
gctggggtcagacctgggaataaaattctagcaggagagaatttccggaaagcagttttccggggttcaggctactgccagatggcccacaccccctggaatgtgaccccctgcctctcttg

SEQ ID NO: 75806 - DNA, 122 bp, Homo sapiens
tgatggcgatgttctacatcttgacaaaaggtttaggttacacagctgtatttttgtcaacgttcatcaaattgcatacttaagacttgtgggtttatactgatgtgaattttaccctctaa

SEQ ID NO: 75807 - DNA, 122 bp, Homo sapiens
atgaagccggagtgcagcgggaaccgaagcccgcagctaccggctcgaaggcgccggcctcggcgagcgctgctcagcttcaagcctggaggagcctcccactcaccaacgaacccctcaaa

SEQ ID NO: 75808 - DNA, 122 bp, Homo sapiens
agggctccctgggtaattattaacatatcacgcgataatgacattgtgcaaaccacaggccgcccctgtcatttctgcggccacagtctctccaactgatgccggtgggctgtgctgcgtac

SEQ ID NO: 75809 - DNA, 122 bp, Homo sapiens
tcagaatccaatagaaatggcggggaccctttctgggtgccccctgcctgtcagacgctgcgcgcgaccccttgtctcctctagtcctaggggaaacctgtgagacagttgcgacatcccca

SEQ ID NO: 75810 - DNA, 122 bp, Homo sapiens
cattaccttcctcttaagatacaggcaaagtgagagagctggtacccaggtgggtgcaaccgcccccaggccagtggctgccctagagccccagataaccagcctgtcctagagattcacag

SEQ ID NO: 75811 - DNA, 122 bp, Homo sapiens
tgccgagtttaatagctaggtgattaggtgattggatgatctgtgcagcaaaaccatcatcgcacatgtttacctatgtaacaaacctgcatatcctgcatgtgtacccctgaacttaaaat

SEQ ID NO: 75812 - DNA, 122 bp, Homo sapiens
tcgtggctagatcttctgcctcagtcttttcttttagcttttcttgaagctgcctagctgcgtatttatacacaaagacctaaaagcctggcttctccaactttttctacctgttactttcc

SEQ ID NO: 75813 - DNA, 122 bp, Homo sapiens
aaactggtttcccgctgctgccctcattttgcttcgccgaacgtcctccctgtgttatgacgtctggtgtcccacttgactgggaatccagaaacagggcacacagcagttaataaacacct

SEQ ID NO: 75814 - DNA, 122 bp, Homo sapiens
ctccaggcttggagactcagtgattaatagtcaatgaaatgaccactgaatggtaaataccgagaattgtgccaactgtaaacctgagtaaatgattattagtgttttaactagtgtcactg

SEQ ID NO: 75815 - DNA, 122 bp, Homo sapiens
cttctcccgaggctgagcctcgagttcttaaagagacaggcgagggcggagtggtggggtcgctgagtgtgactacttgggctggccttgctccagggaacgtagaaaattctcgagtttag

SEQ ID NO: 75816 - DNA, 122 bp, Homo sapiens
tctccacagccccactcaggtctcacacacaggcgcagggactagccacaggtgcagcaacgtcacgtctttcccctgggcgcgtgtgcagctcgaggctttgcaggaggcgcacctgcgat

SEQ ID NO: 75817 - DNA, 122 bp, Homo sapiens
ccagctcctcccccatctcataatggtcctccacgtcctcctgcctgaacgtggacatggcggccggtccgccttccagcagcttccactccagggaaagtgcagtcaccgcagcctggaga

SEQ ID NO: 75818 - DNA, 122 bp, Homo sapiens
gtgagtgagcctggccacttcctctgtgggacttcagttccttatcagtaaaacagagcccgtggctttccatgaatgtggggttgacttaccagaatgctcaggtcccacgttatcctctt

SEQ ID NO: 75819 - DNA, 122 bp, Homo sapiens
tttagagaatagatgatgggtcagctagccaggggaaaaaaaatgaaattccagccgaaacgactctcagctgttgccaagtccaagcaatctttagttgtgggggaaggaaaatctatcat

SEQ ID NO: 75820 - DNA, 122 bp, Homo sapiens
agtgagtcattccagtctctgccggttagcacctgccagcctaagttgagtcgacagagccgttatggagaatgttccctgaccacagtatgtgactaggatttggagataaaaaagatacg

SEQ ID NO: 75821 - DNA, 122 bp, Homo sapiens
cctggctcagtgcgtgcaagcggctacacactacggcataagatgttcccattttgcagacggggaaacggaggctggggaataccgggcctagccgacgggggcggggcgcagggcgcgca

SEQ ID NO: 75822 - DNA, 122 bp, Homo sapiens
atactttcaagttagaggaaatggaaactgaaatcaaaagaaaacaaaaacctacaaagccggagaagtaagctaaggtagacatgattctccaggcagccttgctaagtaattgactagac

SEQ ID NO: 75823 - DNA, 122 bp, Homo sapiens
tcccacctccgctatttcagctgccagaggggaggcaaggtgtggggaagttttccttcccgggcgaagaagctctgcggaactgtcattttccggaactggatgcttgcttcctggcgggg

SEQ ID NO: 75824 - DNA, 122 bp, Homo sapiens
gtttcctcggggagctaaaggagtaactgttcgctttgttttgtttactgacatgtcacccgcgtcgtcgtctctaagacttatagcggtgttaacaaaacttgtattttgactttctgttg

SEQ ID NO: 75825 - DNA, 122 bp, Homo sapiens
cccctccctcccagtcagcctccgccgcagcccaggaagccagccgggacgccgccgccccggaccccgcgccctaacctccacctcgggggcctgcacccccagattgaatcgggaattcc

SEQ ID NO: 75826 - DNA, 122 bp, Homo sapiens
cgcgctccgcttctccgggttttagcggaagcctgcggggggcggggtaaccgcggaagccggcggccgtgggcgcgcgggttgggggctctcgcgccgctccgggctctccccccccccgg

SEQ ID NO: 75827 - DNA, 122 bp, Homo sapiens
ggcccgcttcagaccccggggaaggcagcggcaggactccaggttgaggtagagcaggcccgggcagctgctgatcacagagctgtggggagggcagaccacaggaagttgagctgttgcct

SEQ ID NO: 75828 - DNA, 122 bp, Homo sapiens
gatgagagggcagagcagccgaccacaggggaaacagccaggcggcagcggtgtgcgcaacgaggagggataaataaaggaggagtggggtcctggaacctagaacagccggttccaatggg

SEQ ID NO: 75829 - DNA, 122 bp, Homo sapiens
cgggttctccacgccggccggctgggtgtggaggccgggcgcactcggtagccttcctagcggtgggacatgtgagaaggctaaattaggcaaagctccgaatcctgggagctttccctgga

SEQ ID NO: 75830 - DNA, 122 bp, Homo sapiens
acccactgggaagcatgtgaaaaataccagcccctgggcacccgggctctgcttgagggacgactgaggaaggccgggagtgaggcccaagcagctggattttaaaagctccagggaattct

SEQ ID NO: 75831 - DNA, 122 bp, Homo sapiens
cgccgcccattggctgcccgcggagctgcctcccgcctcccctgcccggcccccgccccgcgcgcccgcccgccaccctgcccggccgcccagagctctccattgggcgtcgctcccggggt

SEQ ID NO: 75832 - DNA, 122 bp, Homo sapiens
gctgcgtgggggaaggaaacggcgcccctggcgccggcccagcccccacgctcaccgtctcgccccaggaccccgaggcccgcgctgcccactggcccctcggaaagacttgaggcgcaagc

SEQ ID NO: 75833 - DNA, 122 bp, Homo sapiens
cggagggagcgcgggtgggaatgaatgagcagacccggagatgcaccctggagtctgcgccgggtcccacctgtttcgccccgcgcggcgcctcgctgcccccgcgtcggtgctgctgagcc

SEQ ID NO: 75834 - DNA, 122 bp, Homo sapiens
tgacatgccggtgctctccaggccccggccctggcgggggaacacgctgaagcgcacggccgtgctcctggccctcgcggcctatggagcccacaaagtctaccccttggtgcgccagtgcc

SEQ ID NO: 75835 - DNA, 122 bp, Homo sapiens
aagtcaaagctcaagaaagctcaagttagggtagagctagaatttaaaccccactctgtccgatttcaaagttttcctctttccgctcttactcttaagtgtgaactgataaaaacaatttt

SEQ ID NO: 75836 - DNA, 122 bp, Homo sapiens
tgtactagaaagggaaactttgctttttttttttttttttgagacggagtcatactctgtcgcccagcctggtgtgtgtgcagtggcgcaatcccggctcactgaagcctccacctcccggg

SEQ ID NO: 75837 - DNA, 122 bp, Homo sapiens
agcatcctgtggcctctctctgcgcggccacccggccgcggcgcgaagcggtctggagggcgagcccttccgcggccccaactctgccgccccgttcccggcattgggaaccagggcaggga

SEQ ID NO: 75838 - DNA, 122 bp, Homo sapiens
aaagacgagtgcatgttaggatgaggggccggggaaaatgcccccgcgggtaaacagccccgtcagggcaggggctctgtgagttcattcgcttgttcactagaacattccttggctgaagt

SEQ ID NO: 75839 - DNA, 122 bp, Homo sapiens
ccctaatgggtaaaagcatgtggttgcatcagttaaggtttttctctcttctcttgctagcgtgttatcttttcttttcttttcttcttttttttttttttcgagatggagtctagcttttg

SEQ ID NO: 75840 - DNA, 122 bp, Homo sapiens
gggagggtgatgcaccctctgtcttcgctttgaatgctctgatctcagaatcagtaaagccgtggctgtgggatcactctcagtcatggtgaaggtatgcgaagaatctgcagttatgttcc

SEQ ID NO: 75841 - DNA, 122 bp, Homo sapiens
cgagtcacccgcacccactcatttccggaggagaccccagcagggtggggcagcaagcaccgggtccccactacattgcagcggaccgcgcccccgggtcgcgtcccggtgctggccccgcc

SEQ ID NO: 75842 - DNA, 122 bp, Homo sapiens
acatccaagtggatataccgaggaggcagtctcctagtgtgtaagggacagaaatcagaacggaaatatacatttgagtcaccagtgtttagatggtatgtgaaactactggaatagatgat

SEQ ID NO: 75843 - DNA, 122 bp, Homo sapiens
tggctgatctgcaaatctgcacgtgtcagctcatcttcagaacagaggcactgtgtgtgccgatgccaaaatcaacatgctggtccatggatttcctccatggggatttcacagggggaaaa

SEQ ID NO: 75844 - DNA, 122 bp, Homo sapiens
taagacatttgaaacacaaatcctgacaaacgcacagaccagcaactcgaggaactcagacgctttggctctcggtgccacctttaaatgctaaaccaccggtaggtagtcgctaaatggga

SEQ ID NO: 75845 - DNA, 122 bp, Homo sapiens
ccctcttgtcacattggttttccagtcccagagctgttggccaaaagcacacctccagcccgaccagaagcactatctttgttgctgtgtgtgtgaaaacgaatgtctctttttgttttgcc

SEQ ID NO: 75846 - DNA, 122 bp, Homo sapiens
agtaataatataatagcacctacctaccagattatcattaagactaaatgcggggccgggcgcggtgactcacacctgtaatcccagcattttgggaggccgaggcaggcggatcacgaggt

SEQ ID NO: 75847 - DNA, 122 bp, Homo sapiens
cactttgtccccaagcagctggtggacttgaagctgacagtggatgggctggagaaggaacgtgacttctacttcagcaaacttcgtgacatcgagctcatctgccaggagcatgaaagtga

SEQ ID NO: 75848 - DNA, 122 bp, Homo sapiens
agagccgtcgccgtccttgtcgagactcgctttcgcccctctgaggaataagttaaaaaccgcgagtctggttctgagccgccccctggcgcaggcgcgaccccacccggccctcccgtctc

SEQ ID NO: 75849 - DNA, 122 bp, Homo sapiens
tcgactgcaagttcacagacacaatgatgcaattatgggcagccagagggcgagcccacacgctgccctccagctgctgaggcagggacccgtctggctggaccccacggaacacgcaggtg

SEQ ID NO: 75850 - DNA, 122 bp, Homo sapiens
aaaacaactgaacaggacctgaaagagtactgtagtacctttggagacgttcttatggtgcggcaaagccaagatgagcctttgagaagcagaaaagtgtttgtggggcgccgtacggagga

SEQ ID NO: 75851 - DNA, 122 bp, Homo sapiens
ggctggcagcgcgcgccgcaggagtttcgattcggagggtctgggcgaaggccgagaactcgcgtttccagcgagttcccgggggcgccgctccgtcccagaggccggggcccctccggttg

SEQ ID NO: 75852 - DNA, 122 bp, Homo sapiens
acacagacagtacaggcccgaagatctcctaggagagaggccccggcgtcagaccctccacgggaccagggaccagggccctgagccctcccagtgcccctgctctggctcaccctctcccc

SEQ ID NO: 75853 - DNA, 122 bp, Homo sapiens
gcttaagtgctggggtttgccttgcttgcggcgagacatggtgggctgcggggcgggcggcggcggcggcggcggcggcggcgggcggacgacggctcggttcacatcgggagagccgggtt

SEQ ID NO: 75854 - DNA, 122 bp, Homo sapiens
cccagacaggctccaccaaaaaacccgggaacaacgaccgccaaaagccaagcctcacgccgaggagcctcccaggctgccccgaggacgaacaacttcgccctccactcaatgcgctcaca

SEQ ID NO: 75855 - DNA, 122 bp, Homo sapiens
agggcttgttattgtcaatagcacaagaggctaaagatggcgccatttccggtcacgcggcgccgagggaggggcggtgtcaacctcagggagtgggggtgagggaagcgctgcagccgccc

SEQ ID NO: 75856 - DNA, 122 bp, Homo sapiens
gcagcaactggttatcttataaatgtgtccacgatgacttggtcacttgtgggatcccaacggccaggacataggattcctattctctgagaggaagcttccatcccctacttaacatgtca

SEQ ID NO: 75857 - DNA, 122 bp, Homo sapiens
ggggacaagagagctagcggtcccgcccggtgatgtaggcagcccggggaggtggagccgcgacgcctgaaggagtccccaccgcagccgcgctctcggtctgccccactaagcagccgcca

SEQ ID NO: 75858 - DNA, 122 bp, Homo sapiens
atggcggcagtgtttaaatgttgataaacaagaacagaaaaaagcaacacgtttgtttttcgttatctgtccatagagcaaatcaggactgaggcgataaggcctgagcacaacctgttgaa

SEQ ID NO: 75859 - DNA, 122 bp, Homo sapiens
ccaggccgccccttgcccggctccttcgcaccgcctgctccagcaaggaggagggcggcgcgcaggaggccagcgctggggaccaggaaccctacctctcagcgatgtaaagggtaccagtg

SEQ ID NO: 75860 - DNA, 122 bp, Homo sapiens
ggttccgactgttcctgtggtagtgaatgagtctcatgagatccgacgaggccgttcccccgactgttcctgtgatagtgaacgggtctcacgagatccgacgaggccgttcccccgactgt

SEQ ID NO: 75861 - DNA, 122 bp, Homo sapiens
gcttcaggaacacgcagtgctggacagcgcaccgcgcgcttcggaaagcctgagccgtctcggtaaataactttacctggatcacagaggttgtgaggggaatggggaacacctgggtgaca

SEQ ID NO: 75862 - DNA, 122 bp, Homo sapiens
ctgttgaggctcagcagcgccaggctgagggtgtgcaggatgtcgagcgtggaggcggcgcgacaccggtctccgttgtcttcccccccagccacctagggcgccagcagcaggtggttggg

SEQ ID NO: 75863 - DNA, 122 bp, Homo sapiens
aggagcaagcctttggcggagagcactgagcagacgtgcagcatctttgctggcttctaccgaaacaccatggatccagacgtggttttgtggtcctgcacgtggaagccagccctgcgtgg

SEQ ID NO: 75864 - DNA, 122 bp, Homo sapiens
tacagaccagagagcagctcgagagaaggaagctttctcaagggcttccggatagcaagacgctgcctcaccccacagccccgactccaccccacatgggaagggggccggtgggagctcct

SEQ ID NO: 75865 - DNA, 122 bp, Homo sapiens
actcaccagatactggcagcattccccccagttgtaacaaccaaaaacatctccagatatcgccaatcgtcccccaggggacacaatcgcccccagttgagagccactgcaatggacattcc

SEQ ID NO: 75866 - DNA, 122 bp, Homo sapiens
atggtgttgggaaggggccctgccctgcccggaactagatggagggctctgagggccccacggtgctgccaagagacaaggtccagccctcccaggaggacacccgggggtgctgggtgcag

SEQ ID NO: 75867 - DNA, 122 bp, Homo sapiens
cccaccacaggctccagtttctttcttttatggctggctttataaaccatgctcaatttccgattgggtttgtttacttgacagttgtttgtctccctgcaaaccagaagaagcaccataag

SEQ ID NO: 75868 - DNA, 122 bp, Homo sapiens
gaaggctgcttccaaggggcgcctgttgctgcccttcccgggagtgagcgccgtgtcttccgtcctgcggcggaaagcaaagggggcaaactctgtgtagcctactttataagggctatgat

SEQ ID NO: 75869 - DNA, 122 bp, Homo sapiens
ggaagcgagagtcagtttttgtgtaggcgcggggaacacaggccggaggccccgtaaggacgggcacatctccctcccgttgcctcactggccgcacctgcttcaggggagcaaagggggct

SEQ ID NO: 75870 - DNA, 122 bp, Homo sapiens
ggaggagagagttctgttccaggagagtcccaatgaggcaggattggtggagcaagggcccgcaaaggcctcctcagtggcctcgactccctgctccaatcccttcacccagcggcgctaat

SEQ ID NO: 75871 - DNA, 122 bp, Homo sapiens
tggtcagaggtaactaccacagtaaaagaaggctatttatgtggtctgtttacagttacccggtttcaacactaagccagctttccgccacgtctcgggcgaacctccggcctgaggtcaca

SEQ ID NO: 75872 - DNA, 122 bp, Homo sapiens
ggctggtaccatcctgactgaaccctgttagaactgacagtgtctggctgccagagaggtcgaggcccttacccgggttggcactcaccccgcgctcccgcccgtcccggccccttcccctg

SEQ ID NO: 75873 - DNA, 122 bp, Homo sapiens
gggcgggggtaggctcggcacaggctaaaaacgagcggagccgccggggcttaggcatcgcggcacctccgttgaacgggtctaagaacagaactcctgaggaccctccgtttccaaccgaa

SEQ ID NO: 75874 - DNA, 122 bp, Homo sapiens
tctggagttctcattagactgggttctaggcgggctgctccagctccataaggaagcactcgatgtcgtcatagaggctgttggcgctggacaggcagaggctgaggctgctgctatccagg

SEQ ID NO: 75875 - DNA, 122 bp, Homo sapiens
cagtgggacctgagtggatccaaaagccagagacaccagcccatcggaagaaactggggacgagagagattccgacgccagcaccgtaggggccgcactcggcgtccgtccgcgcagccttg

SEQ ID NO: 75876 - DNA, 122 bp, Homo sapiens
tggacccgccccgaaggcaaataggccaatcagcgtccagactcttcagctacggcagtccgcttctcctcctcgccctgtcggatctctaggctggatccgggcctctccaatcaacagcg

SEQ ID NO: 75877 - DNA, 122 bp, Homo sapiens
aaaaaatttactaagcaccacttatgtgtcagacactgttgtaggtgcttgaactaaaatcgggcatcaggcagatacccctgcccttgtggtgtgtacgttattgctgggtgagaaagttc

SEQ ID NO: 75878 - DNA, 122 bp, Homo sapiens
gagggagcagggagtcatggccttgtgagggagacagatggagacacacacaacccccatcgcaggtgaatgctatgaaagaatggggtggagggcttcccagggagatgaactgagtttta

SEQ ID NO: 75879 - DNA, 122 bp, Homo sapiens
actggacatactatttggcttaggtccaaaacaattcaaccccgtcatgcttaggacacgcggtctatgcatgcgaaataataaaggacaccttcaccactgctcagagacatgctcctgag

SEQ ID NO: 75880 - DNA, 122 bp, Homo sapiens
ctggcctgcttagccctggccaaggttctcaatggctcccttaggccctcagcctggggccggaggaggcctcctatgcccaatgtaaggggtggtgagtggagagttgggggaaagcctga

SEQ ID NO: 75881 - DNA, 122 bp, Homo sapiens
tagcctattcaaaggagaagttttaattgtgctaggacttagtatacaaatgtgtttccacgtggtgaagtgaactaccacttttcacccagatgctctgtttaacattggggaactcaggg

SEQ ID NO: 75882 - DNA, 122 bp, Homo sapiens
gaagccgtctgaggagaagggcgccaggacgatctggggatgggctgggagcttggtggccgtggtcccttcttgtcactttactgtctcaagcgtcttctctccctggtcgcacgcgctgt

SEQ ID NO: 75883 - DNA, 122 bp, Homo sapiens
gcatgatgaaatgtgctgagcccttttctcctggtgactagtgtgtgtgtggagggatggcgtggacatacttgtgcttctttgtccatgtgtatagtgggtttcctatatgtgcacaagca

SEQ ID NO: 75884 - DNA, 122 bp, Homo sapiens
aggaaggggatgttaccaaggtatgcatgtgttgtcaggcattgctgtcctggctccaggcggcaggactgccggtccacacagcccagcacagggaccttgtagcaggagtgacagcgaat

SEQ ID NO: 75885 - DNA, 122 bp, Homo sapiens
ttcccctccaggctggtcacaagctacaaactggatcatttgacacatctctcgtgcactcgaaactcaaattgaaactctgccattttaaccgtacaaagtaaaataacttttcaaagccc

SEQ ID NO: 75886 - DNA, 122 bp, Homo sapiens
tagtgaacgtggtgcggtgaccgtgtgtgatcggcaaggccatggatagtgcacgtgttgcggtgaccatgtgtgattggcatgaccatcgacagtgcttatggtgtggtgaccgtgtgtga

SEQ ID NO: 75887 - DNA, 122 bp, Homo sapiens
aggtctgtacttatatgccatgtatctctatccctaactttgttcctttcagtaccttaacgtcagggtgctgatggcatggtgataaaatttgtgagtgacccaagcctgggaggaatttg

SEQ ID NO: 75888 - DNA, 122 bp, Homo sapiens
ttttttggtctttaagaacagaccactagtggtgtattttgggctggatatttgctgagccgaccgttgacgtgctgagctgacggttgacgtgctgagctgagggttgacgtctctggtca

SEQ ID NO: 75889 - DNA, 122 bp, Homo sapiens
gagaatgcggcggcgctcgcggatgctgctctgcttcgccttcctgtgggtgctgggcatcgcctactacatgtactcggggggcggctctgcgctggccgggggcgcgggcggcggcgccg

SEQ ID NO: 75890 - DNA, 122 bp, Homo sapiens
catccttccccggggctcggggcatcttgccctctggacaggtttgtgcgttcaacttcccgtcgcccaagcatgttcctctcacctcgggccgggccgctcttcccctcagggcgccaggc

SEQ ID NO: 75891 - DNA, 122 bp, Homo sapiens
ggcctgaagcatgaggccatgccaggtgccaggtgatgctgggaattttcccgggagcttcgggtcttcccagcactctggtctcgcccgccctgcctctcgggctctgcccagcttcctga

SEQ ID NO: 75892 - DNA, 122 bp, Homo sapiens
ctgccctgggaatgtgacccggccagcggtgagttggggccggggcagagggcaggggtgcggggagcgaggactccgacgccgaggcccgaggggggtccgggaggcggcgctcggcgcgg

SEQ ID NO: 75893 - DNA, 122 bp, Homo sapiens
tacttgtccatgaagcctccctaaagctcatgcctccttgaaaaggtgtcagaactgcctcgaggatgtttcaacccacaacattcttctgtcttctgactttctaagcaattgttgtgtac

SEQ ID NO: 75894 - DNA, 122 bp, Homo sapiens
gtgagaagtggcgagcagctcctttatcacggttttagggcggccagtcctacggggtggcgccagcgaactctttttttttaaaaaaagtattcccataaaaggggaaaggggcggcagct

SEQ ID NO: 75895 - DNA, 122 bp, Homo sapiens
cgggagcatcttctctcttgctgtcctagatgaaacatcgcccgccactccgtctcctagcgcactgtgctgtgaatggggtgaatgggtgtatgagagccgtgaattttggacgctggcgc

SEQ ID NO: 75896 - DNA, 122 bp, Homo sapiens
agctgcggcgactggaggagcaccgctacagcgcggcgggcgtctcgctgctcgagccgccgctgcagctctactggacctggctgctccagtggatcccgctctggatggcccccaactcc

SEQ ID NO: 75897 - DNA, 122 bp, Homo sapiens
ttcagagtgtgaacattgtacttagatgtgaaggggttggtctcttcctgagatgcaggccgcctctctgaggttcacagtgtttctaacatccccacacaaaacagaaaaatggcacgtgc

SEQ ID NO: 75898 - DNA, 122 bp, Homo sapiens
agtgcttgggctaaatccaaatacaaccttgttcgatttctagagatggacatgtgcaatcgactgtccaacaggcatattgtttctgtggcccagggtgggcctgtttttaggtcttctta

SEQ ID NO: 75899 - DNA, 122 bp, Homo sapiens
aattcttcacatggcctgcaaggctaagtacttctcctgttacccagctccacttattcacgatgatctagtcacacaaccttcttcagttcctcaaataaatcaggttctttttcacctca

SEQ ID NO: 75900 - DNA, 122 bp, Homo sapiens
gtatctagcacaattcctggcatgtggctgcagtgcaataaaaacatttgttgaaaaaaacgaagcccaggcatttaaaatacctaatgggagggtttagaattaagcagcaaaaataagca

SEQ ID NO: 75901 - DNA, 122 bp, Homo sapiens
tccttctttctttctttctctttctgagagtctcactgtgtcaaacagctgaagtgcagtcgctggagtgcagtggcacaatcttggctcactgcaacctctgcctccctggttcaagcaat

SEQ ID NO: 75902 - DNA, 122 bp, Homo sapiens
caggcgatacggctggatgatggggacgcccaggggggtgacccactccaccacagagcccgtgtgggagacgaggtgggcgctctcgatcagccagtgctggatggcccgggtccccgaga

SEQ ID NO: 75903 - DNA, 122 bp, Homo sapiens
gagtcgtcccagactgctagatactaaggtgaggacccctagtggggacgtagggaccagcgacgctagaacagttacgtccagaagcgtaccacccctgccgtcagcccggaggccacggg

SEQ ID NO: 75904 - DNA, 122 bp, Homo sapiens
ccaggctttagagtcaggcacagtcaagttcaaattctgcccctgccaataagacttcagcgcgtgcactccatctgtgcctcagcttcctcgcctgtgaaataggtcgcctcgcagcctca

SEQ ID NO: 75905 - DNA, 122 bp, Homo sapiens
ggctgccgggagagccgcggcgacgtcagttcctcctttcggggctctgattggtcagagcgcccggcgcttctggttggccggccctgctatcatcccagagtgcattgcggggccgcttc

SEQ ID NO: 75906 - DNA, 122 bp, Homo sapiens
aaatgaacagctctcctgtgacaaggacacgttcggtccccactttacaagtaagggacacggcctctcagcaactccgggactggagggctagggcagtctgggatgcctcatcctgcaat

SEQ ID NO: 75907 - DNA, 122 bp, Homo sapiens
cgagtcgtcacgagccatgattggctcagggccaaccaccccgccccttcacctagggctcggcccaggttctgctccctgacacgcagaggccctgcgtccccacacgccttggttctcgt

SEQ ID NO: 75908 - DNA, 122 bp, Homo sapiens
taaacccgggaggcggaggttgcagtgagccaagatcacgccactgcactccagcctgggcgacaagagtgaaactccgtctcagaaaaaaagaaaagaaaggcagtgtatgcaagtgagtg

SEQ ID NO: 75909 - DNA, 122 bp, Homo sapiens
agtcagcctagccaccttcggaactctccacgcctgatcccgttccccggagcccgcggccgttaccttggtgcctccgagccgtaacacttcctccagggagaacccattctcggcttcac

SEQ ID NO: 75910 - DNA, 122 bp, Homo sapiens
aaactttgtaaaaacagctcttctgagtgtgagaggcctgcctcacagacagatttccaacggagctgacctgaggctgtattttctagaaaggcctgtttggtgatactataaaccacaat

SEQ ID NO: 75911 - DNA, 122 bp, Homo sapiens
ggccttcgtggagacctcggttaaaaacaactgcaatgtggacctggcctttgacaccctcgctgatgctatccagcaggccctgcagcagggggacatcaagctagaagagggctgggggg

SEQ ID NO: 75912 - DNA, 122 bp, Homo sapiens
ggcttcacaaccagacaaatgcttttaatgtatgcaactttctcttatgctaaatcagagcgaaatgcacatgaatcgatataaagattatctgcattttgtggacatgggtggtccagaca

SEQ ID NO: 75913 - DNA, 122 bp, Homo sapiens
aatgggatcttaagtgattctgaatgaaaacaaattggcccgctttcttctccaaacagacgcgcggcgcggtgggggcggcgggcgcgggcccggggcggcccgggcggtggggttggctc

SEQ ID NO: 75914 - DNA, 122 bp, Homo sapiens
cagcccgcctcggaaagtcctggggcggaagggcgaactaatcgtccccctaaaacacagcgtagacccacgcggcgcctgctctaaagctggccgctccccgatcgccgccgctgagcgcg

SEQ ID NO: 75915 - DNA, 122 bp, Homo sapiens
ctggggcacagcctcaccctctgccctcccccaggtccccagcgggacgcccaggcggcgcgggagttcatcctgaagatgttcgtggacctgaaccccgacagcgacaagatcatctactc

SEQ ID NO: 75916 - DNA, 122 bp, Homo sapiens
taaacgtctccctgtgatgctgtgcttccgcggtcacgctcctggtccactttcatgttccgccctgtacacctggctccgacttctagatagcagtagcagaattagtgagaatattcaaa

SEQ ID NO: 75917 - DNA, 122 bp, Homo sapiens
gcgacgacctgggtcggagccgcctcctcggcgcgcctcgctgcctccgcggccccagcgcgggcggccagaaacttctccagaagtcccgcccctgtgatccctccgggccgacgcccagc

SEQ ID NO: 75918 - DNA, 122 bp, Homo sapiens
catccctggctccttcaactcggtccgtctccatgacgtgttcctctgcttctcttcctccgaataaaaaggaaacatgcctcgtaaggacagcagtgccgggctggagccgcctctcccca

SEQ ID NO: 75919 - DNA, 122 bp, Homo sapiens
aggtcttcatctttttgtccaggaaatagcctagcatggtttactgtccctgagactattcgccatcataaataatatttaccagagtcttttgcctttaaactacacaggagcagaaaaac

SEQ ID NO: 75920 - DNA, 122 bp, Homo sapiens
gagagcgagatccgctttcctagaggctgggaggaccaggcccgggcacaggactggcttcgcaccactggccccgcagtcgggtccccggggacgcgccacgggtcactgctgcctgctaa

SEQ ID NO: 75921 - DNA, 122 bp, Homo sapiens
aggggaagcagtggcagcaccacttgcccatcttgttcctgagtgtcttcatagcagagtcgtcgtggtctccagaagcgcccacgttgctcttgccactccccctgcagcaggggaagcag

SEQ ID NO: 75922 - DNA, 122 bp, Homo sapiens
ccactaagaggaagcagggttagaacccagagggaagtggggaggtgagtaggtggattgcgaaggacggggcaaccacagacgggaaggggacccaaatcacagacaagagtagcaaaaaa

SEQ ID NO: 75923 - DNA, 122 bp, Homo sapiens
tacaccccagaaatccacaaaacctgtctcctgaagcactgtttttttcttcttagagaacgaattaaacatctaccagcacaacagtgataaattcaatgacacaaaacaatttcacatgg

SEQ ID NO: 75924 - DNA, 122 bp, Homo sapiens
gcttccaggagctaaggaggtctgcctggcgctcaagtccaggttcttaaccaccactcacgacgaagcccgcaggcttacatggaaagggagttgacggtcaaatccgggcaacgtgcccc

SEQ ID NO: 75925 - DNA, 122 bp, Homo sapiens
ggccgagcgctgcccccgccggcccgcggctgccagccggccctgcccgcgcccgggccccgcgagcggccgcacttcaccttacggaggggagataatgagatcaattagaggcgccgtca

SEQ ID NO: 75926 - DNA, 122 bp, Homo sapiens
taggaggagccggctggaattagcctgcctaatgcgcctgtcagtccgggcgctgcgctgcgttcggcccgagctgtttgtaaattacattagctgctcctttattgcacccgaacctcggg

SEQ ID NO: 75927 - DNA, 122 bp, Homo sapiens
cccaacatgcaagattatgcagccagataaggggtcacaatccctgccagatagttccaacgctgccctctcagccaccaccatggggcggtgtcatttttagatgaatgaacaaaggacca

SEQ ID NO: 75928 - DNA, 122 bp, Homo sapiens
gatcagctgtggagttcacctgtgagcccctagggtcagctccctgatgaccctttcccacgaggatctcctccttgggcaccccatctttggggccatcctcccctggcccccagaacaac

SEQ ID NO: 75929 - DNA, 122 bp, Homo sapiens
gaccccggacggcccggcgggcgtcccccggaccgcggcggaaggcgggaagacgcggctcgacttacagtgacaccatcctaggtgacagcaccagtgcagcttgaagcacttgccatggc

SEQ ID NO: 75930 - DNA, 122 bp, Homo sapiens
tggcggacgcagaagaaatggattaataaattccggaacatacagtattttatctttatgcggaagatcttctaatggaaataaaaccagaggtatttgacatggtgtttaccccggaggat

SEQ ID NO: 75931 - DNA, 122 bp, Homo sapiens
tgtccattagtgaatgaattcctgtgacatcctccagagatggcccctcctcacctgggacggaagctgccagctcgcttcccccaagctgcctcatggcccgcacgccgcctcacggcccc

SEQ ID NO: 75932 - DNA, 122 bp, Homo sapiens
aaataatgagggcgtttgggctcaccagcattttcctgtggtcatttgacggtatcacttcggctgcgaacatgcctgaaccagctaagtcagctcccgccccgaagaagggctccaagaag

SEQ ID NO: 75933 - DNA, 122 bp, Homo sapiens
cggtcccttgcctgcttccggctttcgctcgcttccatatccgctcctctagtcgccctccgctggccccgccttcgtccccggaagattgggtcttctggcgagccactgtttgccgtttg

SEQ ID NO: 75934 - DNA, 122 bp, Homo sapiens
gcattgttaatgacgcctacaccggaaagtaggttaagaggcttgacaccgaactgttggcggtattacagtttaacacttggcgtcctctgactcaatgtgtagatgccagttcatgcttt

SEQ ID NO: 75935 - DNA, 122 bp, Homo sapiens
caagaccggacgctcatgatcccagggataaaaaatctgtccgcgagcgggcagggggcccgggcagggggagtgcgcttcccagggcaccattcgcttaaagtgtgttaatgacttgtcca

SEQ ID NO: 75936 - DNA, 122 bp, Homo sapiens
agcgtctccccgccgcagagcccgccgcgcgggggagctcggccgccgcaccgcctcccgcgcctccgccccgccgcccgctgccgcgactgccaaagtttctcggtcacgtgctggccccc

SEQ ID NO: 75937 - DNA, 122 bp, Homo sapiens
ggggcgaacagctgcgaggtggccaggctcccgtgagtcaccactcaggcctgagtacaccgtggagaggagagataaagcagccacggctgttctgttgccagtcccacccctctggcaaa

SEQ ID NO: 75938 - DNA, 122 bp, Homo sapiens
ggctcgcctctgtggggttatcctggggccacggggtgcttttctctgagtgtggggccccgtcacgaccagcggagcccacaggacaaagctcaagagccccaagtgacgcccagagaagg

SEQ ID NO: 75939 - DNA, 122 bp, Homo sapiens
gacaggctggccaggcgggcagaaatgctgacaggtggatgaagctcagtcttgggctttcggtccctttcttttaatgcccatcctcattcctactctgaattgtcacacttttcccttcc

SEQ ID NO: 75940 - DNA, 122 bp, Homo sapiens
gtgggggggacagagtccaggactgcgggataggaagctggggatatggacaagcagcagcgttatagcgctctgggtttcgggacataggcctgggccatgcggcccccttggccccttgg

SEQ ID NO: 75941 - DNA, 122 bp, Homo sapiens
ctgggtagcagcgcgcggcgcggcgcggcggtggcgggcagcgcgcggcaatgccggccccggggctggactgctgaacccacaccgcttcaccaccggactccaactgggagggggcgcca

SEQ ID NO: 75942 - DNA, 122 bp, Homo sapiens
ttgagagcaagatcccagcgcctccagaattaccacagtaacttgtgctggcatagttttcgatacatctgcaaactttcagaatagggaattgaacaggaaaccacaggtgaatgtaagca

SEQ ID NO: 75943 - DNA, 122 bp, Homo sapiens
ctcatctgtgaaatggggatgacgtgtcatctagggcggtgttgagctgcaattggaagacgtgtatgcagtgcctggggtgtagcggtgtgccatggatgagggtttgtatcagatcacct

SEQ ID NO: 75944 - DNA, 122 bp, Homo sapiens
gtattgaagccgacgccttgaaagtctgtccagagtaaagttgagccagggtgtggctctcgtctccacccatctccctttccctcgcgctaagccctcaggctggcagctgctttcaccca

SEQ ID NO: 75945 - DNA, 122 bp, Homo sapiens
gccggccgggccggacctcccttccaggaaggccaacacggtggcctctgtgctgctggacgtggccctgggcctcatgctgctgtcctggctccacgggagaagccgcatcgggcatctgg

SEQ ID NO: 75946 - DNA, 122 bp, Homo sapiens
cgggtaggcgaggcatggcgcgtcaggtgagataaagccaggcaagccaatgggagggaccgcgtgagtgggttgaggccaagcggcgcgagctccagagctggtgaggcagctggtttgcg

SEQ ID NO: 75947 - DNA, 122 bp, Homo sapiens
caagggcctgagacggatatagggagcttattcttcctttcttcaattgccccacccccacgctgcccagacagatctgggttgcccttgaggaattctaaaggagggaatgcactctccac

SEQ ID NO: 75948 - DNA, 122 bp, Homo sapiens
gcagtttaagatcagagttgaagataagaatctccggcatcaagtgttatgtgatggttacgctgcacataatccctgtcctgtactagattctgagatagtttccagcatcgcgtctgatt

SEQ ID NO: 75949 - DNA, 122 bp, Homo sapiens
ctctttcataaaagaaacggaagtaacaaattctgaccccatgatgagaccccagataaacgttaggggtcaccaggggtgaagggaactggcaacaagtcaggtggccaagactcaaagcc

SEQ ID NO: 75950 - DNA, 122 bp, Homo sapiens
gcccattaatgcctcttagcttgcaagatgggttactagctctgagcacggccctcccctcggggcttcttacattctcctccccctcgccccttctgtctccctccttctccacgccgcgg

SEQ ID NO: 75951 - DNA, 122 bp, Homo sapiens
gtgcactcttccctccctgctgctgttatcacgaaaggctggcttggcctttctcataggcgtatttccactctcaggcgcccttttattgtctgggctccattcaagtgataagacataca

SEQ ID NO: 75952 - DNA, 122 bp, Homo sapiens
aaaaacctttgacctggaagattccaggtatccgggctgcttttgttatcttttcacaaacgcacagttcatcaaggtttggaacagggacctatgatatcatctgatgatctttagctttg

SEQ ID NO: 75953 - DNA, 122 bp, Homo sapiens
accccgccggggcggccgcgggcgggaagggctgtgtggtcctgcaggggtggcctcacacggcccatgtgcctgggatgtgtggaaaggtggcttccccggcccgggggcggccctggggg

SEQ ID NO: 75954 - DNA, 122 bp, Homo sapiens
gattcccggctcagtaacgtttctcctccagggagcccactggaactccactggctgtgccgcctcctcgcccgtcccccgcgcgcgccgcaggccggtgcttggagagcgcaatgtccccg

SEQ ID NO: 75955 - DNA, 122 bp, Homo sapiens
gcgcgggcccgctggccgggccgggtgggctggaggggtggcgttgccggctcggggccccggcgtccgaggccccggcgccgggagccggaagctcggcgcggaaaggatgaggctcgggg

SEQ ID NO: 75956 - DNA, 122 bp, Homo sapiens
ggaaaggctcagcctgtgctgggagtgggagaagtgcagggaggctggagcacgaggacacgggtgaggtggctcagggcagatttctaggccaacaggcatccaatgggccctgccctggg

SEQ ID NO: 75957 - DNA, 122 bp, Homo sapiens
tgcgccgagccggcctcctccaggctctcgctgttggtggtgctcatctccagctcccgccggaagttctcgtacaccccctgacgagccgcatccccggtggagctgctgccgctgtcgct

SEQ ID NO: 75958 - DNA, 122 bp, Homo sapiens
gaaggggagagggccgtgcatgcgtgtaccacacagccttctgtctgggtcacagagcgacgactgtgagcctctttcgggcattgtagggtgcccatagtccatttcatgatgacctcagg

SEQ ID NO: 75959 - DNA, 122 bp, Homo sapiens
tgtgtgaccctggtactgggcaacccctgggacaggcaagtccgtggagacagaacggggcggtggctgcagcctgggagctcggcctccctcggggtgacggaatgttctggaccttgata

SEQ ID NO: 75960 - DNA, 122 bp, Homo sapiens
gcgcctgtagtcccagctacacgggaggctgcggtaggaaaatggcgtgaacccgggaggcggagcttgcagtgagcggagatggtgccactgcactccaggctgggcgacagagcgagact

SEQ ID NO: 75961 - DNA, 122 bp, Homo sapiens
acaggtccgaagtcctcaggagcggaagatcttccaactaagccggagagcggggcgcaccgcacggcgtggagcataacgcccgggcgagggtgattggggtgggaaactccactgctttc

SEQ ID NO: 75962 - DNA, 122 bp, Homo sapiens
gattcggggcagctccgtttctgcgtgttaccgagcttgtgtgtgcgttggtggctgttccgtggctgtggcaggtgacccaatggtgcttccccttcccctccagcaggtcagccggcggc

SEQ ID NO: 75963 - DNA, 122 bp, Homo sapiens
cagttacccacatttgcctattacctacacttctcagtattatactgtcattggcacagacgatgtcatagaacaccacaacaggatcatgcaataacctcaggcaacaaaaataaattaca

SEQ ID NO: 75964 - DNA, 122 bp, Homo sapiens
gccagcccagtcaaaagagcttgaaacctaccaagccggaggactgtgctgtgcctctctcgcccacattttccccaagcactctcaggaacctggcaacaggtaacgtggcaacctttgac

SEQ ID NO: 75965 - DNA, 122 bp, Homo sapiens
ctctccctcctcaattgacacttgcctcttgtcagcaagatctgttttatttcctactagcgtgatgataacatcacttcctccttctgttctgacatcatcaatccactttgtagtttgct

SEQ ID NO: 75966 - DNA, 122 bp, Homo sapiens
gccgacgttgctcctccgaagcatggcgccggcgggagttgtaacccgggctgtccggagcggggagctgcccctcacaagcatggcgtcagctgaaaatgaagcctgtgctgtgcggagcg

SEQ ID NO: 75967 - DNA, 122 bp, Homo sapiens
tgttgccaacaaaatttacactccgtgtcatcagcgagagataacagcagctgacgcggccgatcgcctcccctgccatctgctcagtgcgggggccgcccgaggggcgagggccgctgcgc

SEQ ID NO: 75968 - DNA, 122 bp, Homo sapiens
acagccggctctaccgctctgctcgcaggtttgggctagtctggggcggggacttgggagcgcctaaaacttgcgaggagggcggggccgcagaccggtcctttaaaggttggaagtggccc

SEQ ID NO: 75969 - DNA, 122 bp, Homo sapiens
gggattggaccttcctcatctggatgctgccatgatgaaataaagcatgtgggacagtgtcgggtgcaaagatgccgctgggctcccaactcagtgctcattctctaccaaaatgaatagga

SEQ ID NO: 75970 - DNA, 122 bp, Homo sapiens
ggagtccctcagacagtgcagagacgggagcacgcactgggccctgcacccacttcgtagcgccctggcctgggacgccccaccacgcagcttccagagcaaggatcgccacttcaccctgc

SEQ ID NO: 75971 - DNA, 122 bp, Homo sapiens
acagcaacgttaaaacgcaactgtgtaaatgaggatagagagtgcgaaaggagggagaggcgaggagctgctctatttctagggaggttttggggagactgatcagctccaaggacagaccg

SEQ ID NO: 75972 - DNA, 122 bp, Homo sapiens
acagcagggccgagtgtttatgagacccgatggcctgcaaagcagaaactacttctcgtgcggccctggactgaaagagtttgccgacgcctctatctgccccatccctcctgcgccgctgg

SEQ ID NO: 75973 - DNA, 122 bp, Homo sapiens
tttgagctaacagcttgggaggtaacccaagccagaggggccattccagagagccagctgcggagaagacccaaggaggtaaggtgtcctgcagtggggatccccacactggatgggggtgg

SEQ ID NO: 75974 - DNA, 122 bp, Homo sapiens
gcggaggagagaggaacggcggtggggggggaggagcacccgccaaccccatagcaagaacgctcgccagggtagaaagtatgcccttgtggaccccaggagtctggctgcctcttcgtcct

SEQ ID NO: 75975 - DNA, 122 bp, Homo sapiens
ccagctgggccccctcacgccgcaaatactctctttccctacggcccgaacgctgggctgcgcttcgcctgttccgggctcttgttgcagagaacctatggagaggtgacaggcaagaacag

SEQ ID NO: 75976 - DNA, 122 bp, Homo sapiens
gaacccagtcaatcacattccccaaggcacttagaggtgcttagattgctggagacacaacgggaaaacttcacatttgtgccctctgcattcctcttctacaagatctatattctaaaggc

SEQ ID NO: 75977 - DNA, 122 bp, Homo sapiens
aaatggcacatctaggttggctgcagtcgaaacggtttgagcgtggtcgctgtggctcatcgtcggcaccaattaacgaagcgatgacatctgcgttgttaggggtttcttaaactgagttg

SEQ ID NO: 75978 - DNA, 122 bp, Homo sapiens
ggcggcggtcgcaggggctggggggtgcgcgggggcgaggctgggtggggggcagggagccgcagagcgccaaggccatgctgaatgcccgttctagagaattcaggggccccatcccgggt

SEQ ID NO: 75979 - DNA, 122 bp, Homo sapiens
cagatgcccttgagggggcgtcagatgcccacttcaccaccttcttgatgtcgtcatattcgacaggtttttccaggcggcaggtcaggtccacgaccgacacgttggcagcggggacactg

SEQ ID NO: 75980 - DNA, 122 bp, Homo sapiens
ggggagaggctcgcgaaaaagaccagcggaggcagaagggctagacagatgggaattgggcgcaggaaaagcgatgacaaaaaaaaatctggaagataaccaaaggtggtcctacaaatttt

SEQ ID NO: 75981 - DNA, 122 bp, Homo sapiens
gacagagctggacttgctgaaatcagcatgttccagaggaaaggaggtggccagaactggcggaaaaatgctgaaaacaaaatagaaacaggctatcatgacttggttctgctgtaagtcca

SEQ ID NO: 75982 - DNA, 122 bp, Homo sapiens
agctacaccacagtgttgggagatagcttgacattcacaactaggctatgattttcctatcgaacaccaactaatcagagagggtcactctgtgactgtggtgaagcaaggcaaaaaaaaga

SEQ ID NO: 75983 - DNA, 122 bp, Homo sapiens
gacaaaggctcggccttgagaacagttttgtacttggcaacagccacatcgagggcaagacgatgacctgaaaaccctgcaggaaacccgtcccaaccaactgatcatccaagagtgcgaca

SEQ ID NO: 75984 - DNA, 122 bp, Homo sapiens
ttgcgcggagcgggcgaaggtagcgagcgcgagccgaggatgccggtactgctgctgctgcggcggcaagaggcgcggcggccggaagagggcggggccagggcagctctgagctggccgcg

SEQ ID NO: 75985 - DNA, 122 bp, Homo sapiens
cacaccccacctctaagttgttctgatgtgaccgtttttatactctgccttatctgtaagcgttagttgagggtttgtctccacctcactgcactgtaaaatccttgaggacaaggggctga

SEQ ID NO: 75986 - DNA, 122 bp, Homo sapiens
cagcagggagctgatgcctgtcacaggggcagcactactggagaagcatccagcaaggtgcggctgaggtgggaccaattctcaaaaaaactacgattaaaaaaaagatgttctcttttgcc

SEQ ID NO: 75987 - DNA, 122 bp, Homo sapiens
ttgaccataaccacttatgagtatgcacctgagggggccaccatgtgaccaatggggggccggggaggaggacggccagaaatggcactgcgacgcagaacttgacctagagtcggccaggc

SEQ ID NO: 75988 - DNA, 122 bp, Homo sapiens
gctccttgccagtagagtgtagccggatttggagggactggacactcagtgtgaacaagacgaaggcctcaggaggcagtaaaagctgacaagaggagagaaaatgaagcgcctacgggtgc

SEQ ID NO: 75989 - DNA, 122 bp, Homo sapiens
tagacacccatcaggcagctgcgacccggtggtaaacatgagcgtctcctgtgctcccaccgcctgcgttcttcccggccgcgtccacgttggtttccttctcgttgtcttggtctctcctg

SEQ ID NO: 75990 - DNA, 122 bp, Homo sapiens
ttttgtccttgagctcaaaagtcctgcagggaaaacagcctgagggagctcctgcaggagcgttgcttaggagaggctgtccccttccagccgcaaaggcagctccgggagacacaccaagg

SEQ ID NO: 75991 - DNA, 122 bp, Homo sapiens
ggttctgcagtggctttgtcagtgaggtgcaatttcacatattgtctgcgataaaatccccgtttttggttattgatagcaatgcctttctcaaatgctataggtattttgtgacagctgcg

SEQ ID NO: 75992 - DNA, 122 bp, Homo sapiens
aagtgctaccgtatgtcttctaagaaagggacggctggtgtaggtgtcaataatggtgcacgcccagattccatgttccggaggtcttagagttgagtatgcgccaaccctctaatcttccg

SEQ ID NO: 75993 - DNA, 122 bp, Homo sapiens
gctgcctggtatctccgctgggcgccgcacccagaccctccccacccctcagggtgacggcgactcacaaaagcaggcgttccagagaaggaggacggcttcatttccctcctattttcatc

SEQ ID NO: 75994 - DNA, 122 bp, Homo sapiens
tgagggagaagctgacgggacgcgaggctgtgagaaactgggcgagtgtgcgaggacgcccggccagcctgcgggagccgcagtcggcggaggagaaaggaggcggctcccggtatcccgac

SEQ ID NO: 75995 - DNA, 122 bp, Homo sapiens
acggcaggcccctcatgtggacacagtggcctgtggtgctctgcactgtgaactcactgtcgccgtatctgtggtcatacattccggagagacagtagctgaggtctctcccgaacaggtcg

SEQ ID NO: 75996 - DNA, 122 bp, Homo sapiens
agacgctgagtgatgattggttccttgctccatgcgcggcgctgctggaaaaggactcctcgtatctaccgcgctgctgtgtttgttgccccttaaaaaagagtaaaaatataagaaatctg

SEQ ID NO: 75997 - DNA, 122 bp, Homo sapiens
ggacacggggctttgggaagcccgtttgacagagggcaggagccattcaggaaatgggtccgggacacgtggctttgtagtcactggctggctgggtgtggtaaagccgcacatacgtgaca

SEQ ID NO: 75998 - DNA, 122 bp, Homo sapiens
agttgctgctgttggttttttctcaagcttaactttgatgtgttttgccactaggtggagcgatttagccaagaagttcagattacagaagcccgctgtttctatggcttccaaattgccat

SEQ ID NO: 75999 - DNA, 122 bp, Homo sapiens
attcgctcacagggccaccgccggccccaccgcgggcccagacctatgagcctggctccacgggttctcagaggcacacctgtgtgctgtccaacgcaagcacacacagtccccgtcacctc

SEQ ID NO: 76000 - DNA, 122 bp, Homo sapiens
agaaaaactccacagagcgtgctgtgggcggggccggctgtgcagggagcaccgggtcctcgccctgcccctgtcctccacactcccctacagggactgtgcccctggctgcatcctgcatt

SEQ ID NO: 76001 - DNA, 122 bp, Homo sapiens
actgactaacgtgggcggagctctagctcgcgtattctgaggaggcggggttggcctaggcgaagatccggactctgggtgttttgctaccgtgaccgtttaggtgagtggaatagccaaga

SEQ ID NO: 76002 - DNA, 122 bp, Homo sapiens
tagaaattcgcacatatgcttcttcttgccgtggagactgatggagcctctgctgcggggcggggactctagcgagagggggacgtgaagttcgttccgtactcaggcgtgtgtgcccctga

SEQ ID NO: 76003 - DNA, 122 bp, Homo sapiens
gcttcactgctcaccatctgctgtgctgcatattttcttgttatgtctattttctcattacgtattgctttgctacaggacctaggatcatgtctgacagtaggtgctcactaatttttttt

SEQ ID NO: 76004 - DNA, 122 bp, Homo sapiens
tcccggaccgtggggccaggtacagctcactaggctcgccgaaaagccaacagtaggcaacggggtacgaagagcttgccccagggttcgcggagattcctcctgccttcccacgatgtcag

SEQ ID NO: 76005 - DNA, 122 bp, Homo sapiens
acgtggtgtgattaagtccatgtttttaagacaggaaaaataacagcatgtttgtatgctcgtgggggtgacccaagagggagagaaaaattgattcagtaaattcctgttgcaaaaacgtg

SEQ ID NO: 76006 - DNA, 122 bp, Homo sapiens
ttatcacccatgccctcctaaaagggtgtctcaaagcatatctttctgtagagcagaattcggaactgagaagacgagggctcaaattgaatctcacaggatttgcgtgcaagagaaaccca

SEQ ID NO: 76007 - DNA, 122 bp, Homo sapiens
agcgcgtgggtacttgggagctgtcctggttggttttgcgtctaatcccgtcagttctcgcgatttaagctctgagactgagaacctacttaaagctatggcaaaggcactggaggattgag

SEQ ID NO: 76008 - DNA, 122 bp, Homo sapiens
gcgccgaggctaagagaaacagaaacaaggaaaaagggaaacccacgcccactctgtggccgtgagtgagctctgtgtgtgtcccagtgactagcccatgtgcgtgttggggggggctgtgg

SEQ ID NO: 76009 - DNA, 122 bp, Homo sapiens
ataaagaaaaggaaaacccattgaacctgaaaagtaaacagcacaaaggtcaaataacaacgaaaggcttgtcaaaggcttgtacatggttgccaagagtgtggtactggcaagcaatgctt

SEQ ID NO: 76010 - DNA, 122 bp, Homo sapiens
ctttgctcattgctgttctttcacaaagaacccactacattgcatagttccttccaaatccgctccagtgcttgctgggaaattaacaacttgttctggactttccagatgcaatgtttctg

SEQ ID NO: 76011 - DNA, 122 bp, Homo sapiens
tttctgtgagttggacttttcccgacgtataagcaacgtcatgtaggatctgccgtttcgcgtctggtctagtgcacttagcgtcatgtcctccaggttcatccatgttgttggaaatgcta

SEQ ID NO: 76012 - DNA, 122 bp, Homo sapiens
gggcgggctcacctggcagggcagggctgctcgctgcacttcctctgttggtcatcaggccggcccagggggtcacagtgctcctcgtccacgggccctgcctgccgctccaagcagtacac

SEQ ID NO: 76013 - DNA, 122 bp, Homo sapiens
ttaacacaacattagagaaggtttttcccagacttcgccaggcaccggctgggcggctggcgcactgctcaccactcgtttatgactaatctgactccctagccaggggcagcacagcaagc

SEQ ID NO: 76014 - DNA, 122 bp, Homo sapiens
cagtgtgcgcagaagcacaggccaagacccaacctcgggaccccacaagttttccctgagcggcagccaggctgagttcctaggccctgcatgaccagaccagggcatgagcaattcaaccg

SEQ ID NO: 76015 - DNA, 122 bp, Homo sapiens
caaaccttgccagggctactcagcacgggcgcagtgggggaaactgaggcagtcaaagagcgtacgtggccgatatggcctcagtgccctatgctgtagttttctaggcttaatgcagcaat

SEQ ID NO: 76016 - DNA, 122 bp, Homo sapiens
cgcaggtccctgagcccacagcttcgcgggggtctggccgagcatgcgtcacaacctacgcggccaagagcagtgcgcacgcgcaacctaacgcgggactgccagcaacttccgggcgttta

SEQ ID NO: 76017 - DNA, 122 bp, Homo sapiens
accccgcgtcccagcttgagagctcagctagttggctgaccccgccccctacgagcccgtcgtgtgcaccacacactttgctctacgcccagccccaactacagacccggctcctctcagtc

SEQ ID NO: 76018 - DNA, 122 bp, Homo sapiens
aaggaacagcaggcgcggaggagggggcaagcgtgtgtgagattcagtggtccatgcgtgcgtttgtcgtgtaagggtcattcctggggtttggagtgggggaacaaatcaatgtggctgtt

SEQ ID NO: 76019 - DNA, 122 bp, Homo sapiens
gggtagtgatgtggtgtgtttcctaacacctccggcagtgagccaggctttgagtggctgcgtctaaacacttctttccctgaggactggaagacattagaataaggtttgtcattgagtgt

SEQ ID NO: 76020 - DNA, 122 bp, Homo sapiens
gggtggcttgaggccatggcactcagggcctcaattggggaacaagaacaaattcttgttcggacagtttcgtctttacagaaagcggcatctaaagtgcccttattggggcctggtgcggt

SEQ ID NO: 76021 - DNA, 122 bp, Homo sapiens
taatatgacaaatgcaaagatcgaaggagcttgtgacgcaggcaatgctgcttcctcgcccgtctccctcctatccggctggcggcaggcaggcccgccccccgcgcccccagcggcaagtg

SEQ ID NO: 76022 - DNA, 122 bp, Homo sapiens
gaaactttaaaataccttttatatccatcactgcttctaaattttgtagtttagtaaacgcgccaccaagtcctgttatttaatgaactagtaaataagtccaagtattactaaatcgtaac

SEQ ID NO: 76023 - DNA, 122 bp, Homo sapiens
ctcccctaccctaatgttcagcacttggagacggatggtcggctaaacttatcatttaaccgagagaatcaagttgttgagactggcttttcttccaaccggatacgtgatgggtggagcag

SEQ ID NO: 76024 - DNA, 122 bp, Homo sapiens
ggacggaccgactgacggtagggacgggaggcgagcaagatggcgcagacgcagggcacccggaggaaagtctgttactactacgacggtgagcaccgtcctcgcggcgggggcggggccag

SEQ ID NO: 76025 - DNA, 122 bp, Homo sapiens
gtctgtggtatgtgtcaaagtggcgctgcctgcttgtggtgccagcacggctgacccccacgatctcggaacgagcatatctcggtggcactaggagggcggcccgcctgctttcttggtgg

SEQ ID NO: 76026 - DNA, 122 bp, Homo sapiens
agaaaacacaactcaaactgaactgacctaaatattaaatcacttttttttccacataaccgacaataaaattatacgtcaggcttcagatttggtttaagcgaataacttatgcttcattt

SEQ ID NO: 76027 - DNA, 122 bp, Homo sapiens
aggctgtagccagggagaggcagtgaggacctgccaagggcaagccagaaatgcaaggtccggggtgtgagtcaggtcgtgacccatggagccggtcaagtgtgggaggcaagaggcatggg

SEQ ID NO: 76028 - DNA, 122 bp, Homo sapiens
caaagtctctacagcagtgtttctcacactttaataggtaaacaaatcacccagtatgctcgttaaaatgcagcttctgggttagtaggtgtgggattttcagattctgcatttctgatagg

SEQ ID NO: 76029 - DNA, 122 bp, Homo sapiens
gcggcgactgaacggaagccacgagaaggattcggactaaaatgagtagtgctgaaccaacgtgtgccaaagcgcatatattcattcaatagataatgaactctactgtcagagcgtcgcca

SEQ ID NO: 76030 - DNA, 122 bp, Homo sapiens
cagtaggaacctaataaatgtctgggtaagcctcactccacctactgagctgaaatgagacggtgtcttttgccctactgaggaggaccaatttaggagggctctgccttcatccccccact

SEQ ID NO: 76031 - DNA, 122 bp, Homo sapiens
ttgaagccactgttccccgtgagacccaggctgcatcctctagtctgtctgtctgcatgccgtcttctcactgcacctgctgtcccacctcttcagcgtctctcactgccctttactttcca

SEQ ID NO: 76032 - DNA, 122 bp, Homo sapiens
ctagtctggggcggggacttgggagcgcctaaaacttgcgaggagggcggggccgcagaccggtcctttaaaggttggaagtggccccgaggcgccggcagccctgggcggtcccgggaatc

SEQ ID NO: 76033 - DNA, 122 bp, Homo sapiens
ttgggaagaagagctaatatttcaaatggcaaaataaaagttcagagatctgcttcccgccgtgccccgcggccagccggggcagccgggaagcggatggggcggtgcatcactcgggtccg

SEQ ID NO: 76034 - DNA, 122 bp, Homo sapiens
gaggctggaagggagcatggggcaggtgggcagggtcagggctcatggaactcttcctagcggagaggaagcgcgttcctgcccctgcctcagcccacctgccccctcagccgctggagtct

SEQ ID NO: 76035 - DNA, 122 bp, Homo sapiens
ctaagtgctgagaatgaatctgaaaatcccctgtgggaatggtgtctgaattccatgccacggttctgctcctcggtgtggccttgcatccttatttattcactccagcatttttaagtgcc

SEQ ID NO: 76036 - DNA, 122 bp, Homo sapiens
ggccacattttgagaaactgagctaaaatctccttttaccactcacaaattgaaattggccgcttcatgtcttgtcatctatgctttgttgtgttgagtcagtgtagctgacacaggcttct

SEQ ID NO: 76037 - DNA, 122 bp, Homo sapiens
attcttaagtggttcactatctcataagggagacagacaaatcttggtaccgtaaggcagcgttgaagtgctggaatagggcatgggcagagtccttcatgtttacggatgatagaaccact

SEQ ID NO: 76038 - DNA, 122 bp, Homo sapiens
caccggagatccctatgacagaccctgcgaaatattttgctgcatcagaatgctacaggccgtcaactccctaacatgcgcaaaagcgggcagccgattatccagggtagtggattatccag

SEQ ID NO: 76039 - DNA, 122 bp, Homo sapiens
agccgcgactcaagacagcacctgggggtatttgttttgcctaagcctgctgcacttccacggccattgaatcccaaaaactacaattcccattatgcaccgcgagttcgcggactaaacag

SEQ ID NO: 76040 - DNA, 122 bp, Homo sapiens
ggacaaacagctggaggcttctgctattggaaaacagcatccaaatgttctgtgccaaatcgcattatgggaatgggaaaaggggagacttttgaatctgagatctagatcccaaaggaatt

SEQ ID NO: 76041 - DNA, 122 bp, Homo sapiens
gtgcttcatcctccggttctgaaaccacactttcacttgtctctcagtcaaatccagcagcgctgcaatctccacccttcggggtctgcaaaggtacttgttgaaatgaaattctttttcca

SEQ ID NO: 76042 - DNA, 122 bp, Homo sapiens
aaacatgtttgcatcaaaacccccttttgcctctcaatctgggcagctctggctggggaccggcagtaaccggagatctagtcagtcagccagtaggcggggagttctgccccctgggagga

SEQ ID NO: 76043 - DNA, 122 bp, Homo sapiens
ccggtcacctcctcgcagctgagcgcgtcctcccagggctgcccgagcgctggattccagcgagtgccacccacgtgtaaacatcctttagaggggagaagcggctcacttgcttatctcga

SEQ ID NO: 76044 - DNA, 122 bp, Homo sapiens
ccaaatccagctcctgtcccatctccagccctcaaggtcagccccccaaacccagccccacggggatccccaaatccagacagcccctggcccgccatccctgccatgtgacaaaggggttg

SEQ ID NO: 76045 - DNA, 122 bp, Homo sapiens
tcctgtgattttctctcaatttagattgggagatttctattgttctgtcttcaagagcaccgattgcttcctctgtaatattcactctgctaccaagtccatttattaaattttaatttcag

SEQ ID NO: 76046 - DNA, 122 bp, Homo sapiens
gtgtcctcagcatgaaccaaaccggcttcctttctgggtccagtccagattccagggcgtcggggctgcaaccccacaaagggcgaagtacctggaaaagtacctcgacctgcagtgttttc

SEQ ID NO: 76047 - DNA, 122 bp, Homo sapiens
aaccgacgttgcagacccaagaaagtctgggatggtagtggccaggaacggggtgtgccacggccccacctctcagagcagggaggaggatgctgggccagcccttggggaccccaggcacc

SEQ ID NO: 76048 - DNA, 122 bp, Homo sapiens
tgccaagtcctggcagggggtgcagcagcccctggctcacctagctgtgttggggtggagcgaagccctgcctggctcatggggccagagccccacaggccgcagcggggtggcgagggtgc

SEQ ID NO: 76049 - DNA, 122 bp, Homo sapiens
atatctttcaatcctgtagccagtcacaaaaatcaggaaagtagtattcctggaaggaaccgggctggttatttaccaaaggactgcaaactagccgactcaatttataaggtgcggcatgg

SEQ ID NO: 76050 - DNA, 122 bp, Homo sapiens
gaggggccaaggcacagacacccaggggggcctccccggggctcctgactccaggggtgccgggtagcttaaggggcggccctaaccccagcagccctcaagagacttaaggttgggctgcc

SEQ ID NO: 76051 - DNA, 122 bp, Homo sapiens
ctctggacacttaccaagtcgtcggctgtgcatcgaaaaggggtgagccttatgtgtgtacgtgataccgcaataaacctgacttgtaaaagcagcatgtgaagtcatcagcccaggacccg

SEQ ID NO: 76052 - DNA, 122 bp, Homo sapiens
tgctgttcataaaagaaacctttaaccagggtttacacgctctgaatgcatattatgaaacggagttcaatgggcataagaactactttggcagagcaaggtttccagcacccaactactgg

SEQ ID NO: 76053 - DNA, 122 bp, Homo sapiens
tcttcatgactttcgatttgacaatggtttttcttagatatgacaccaatagattcattccgtacaggaagcaactgctttttccctaaacttttctatgtattataatgctttagaaaata

SEQ ID NO: 76054 - DNA, 122 bp, Homo sapiens
gtttgttacggctcaaactgagctttctcttgccatccaccactgctggtttgttgcggtcggagaccggccgctgacttccatccctccggatccagcagggtgtccgctgtgctcctgat

SEQ ID NO: 76055 - DNA, 122 bp, Homo sapiens
catcaagcccgtgttacacgcctgtattggatgacaaattctaccaagcacacagccgaccgggagttcaaacgtgagtgtcactgtgaagcccaggctccacagcgactgagggccgtggg

SEQ ID NO: 76056 - DNA, 122 bp, Homo sapiens
cagccgcctcgccccgctggcttgcggacacagcctcctagcagccgctggctcaggcggcgccagggatcctgacgcctctcccgacccccgccacccgcgcttagggccaatcgcaaggc

SEQ ID NO: 76057 - DNA, 122 bp, Homo sapiens
aatgattccttaagatccatggccaaaacaaattgccgcaattaacacgtgccactgccacgatctatgggctgaaacgtggctggaacgacgcagaagcagaaaccacagagagcgtgcgc

SEQ ID NO: 76058 - DNA, 122 bp, Homo sapiens
ctacattctaaaaccactgtggtggattgatgatgtgttcttagagtgtttgatagactccgccattaggaacatctgtgcctgggcttttgtttttgtgcatgtgtgaaatgtgtgtgtgt

SEQ ID NO: 76059 - DNA, 122 bp, Homo sapiens
ccgtttcccgcccagctggagctctggagcctttgcttcctcaaatacgagcgggaactgcgttgagcgctggattccaggccgagtgctggcgaggcgcgcagtgagtgagcacacagggc

SEQ ID NO: 76060 - DNA, 122 bp, Homo sapiens
caggagttcccgctcatccattttctcttgcacttgggacacttgtactcgccgaagcagcgctttttgccctggtatggagtcaggccctcgcctttggggcgtgcctacagggcaggaag

SEQ ID NO: 76061 - DNA, 122 bp, Homo sapiens
gaagccttcctcctctgcctcctcttcctcatcctcgtcctcgttctccttggatgcagccggggcctccctggccacactccctggaggctccatcctgcagccgcggccctccttgcccc

SEQ ID NO: 76062 - DNA, 122 bp, Homo sapiens
gatccgcctgctgcaagcccaggttcttacaggaacgctgaccgggctgtctgctggtcgcgtggtgtgctgtttgttttagtctcacctgggggtctgaaggtgggggagaaggttggggt

SEQ ID NO: 76063 - DNA, 122 bp, Homo sapiens
aggccttgaggttctcatcagccacgtgctcctccagggcagccagggcccgctccccaccgtcctggaagtgctgcagcagcctgtccgcgtactccacccacacgcagttggggcagcca

SEQ ID NO: 76064 - DNA, 122 bp, Homo sapiens
ctttccagactagcagttcccagggatgggtgtgtgctaatcgcaggccaacaagcccagcgcggtacagaggtcccattgtgaccggaggcgagaaaccccgcctcggcaccctgacgcag

SEQ ID NO: 76065 - DNA, 122 bp, Homo sapiens
tacaccccgaggtggtctctggtctttctagcccaggaccctcagtgatgtggtccctgacggacatctgcttgttgcagtcagaggggaaatgtcggacgggcgacagccgcggagccaca

SEQ ID NO: 76066 - DNA, 122 bp, Homo sapiens
gactgctgtagcggtgcccacggccagccggagtcctcacatgtcctcaggtggtgcacacgcatgaactgcggcaggtgcacagccctgcgtacctgcaaataccagcacggtcgtgcacg

SEQ ID NO: 76067 - DNA, 122 bp, Homo sapiens
atcggcagggaccacttcctgactaaggagctgcagcgatacatcgaagggctcaagaagcgccggagcaagaggctgtacgtgaattaaaaacgccaccttgggctcgagcagcgacccga

SEQ ID NO: 76068 - DNA, 122 bp, Homo sapiens
gatctgctgctcgcgaggtagagtggcttacttggggagaaaacagagctggtggcgctgcggagtgtcaaaccctggagcccatcgtcaagacgttatactggtggcagttctgctgtgag

SEQ ID NO: 76069 - DNA, 122 bp, Homo sapiens
caagttgaacttttcagagagtgaccacgtccctctgtctggcctccttgggttggagaacgtgtgagagaggaagagagagaggagtgaaagagtctactgagagtgtgcgtgcctgtgcc

SEQ ID NO: 76070 - DNA, 122 bp, Homo sapiens
cgcacgcacctgcggtgagacaggccgcggtgcagcctccactccttcctggctcgctgccgctgcctgaaaccgtacagctgcagccccatggacagcaccaggtgcagcagtgagatgac

SEQ ID NO: 76071 - DNA, 122 bp, Homo sapiens
cacttgaacctgggaggcggaggttgcagtggactgagatgacgccactgcactccagcccgggtgacagaggggattccgtctcaaacgacaacaacaacaaaggctcagctcatgccgag

SEQ ID NO: 76072 - DNA, 122 bp, Homo sapiens
tgaatgcagataccagggaaaagcaacttcccaggcatgtgcattaagagacaaaatggccgagtatgagcttccagggacacacccctgtaaaagggaaagaagcctcagatgggcttgtg

SEQ ID NO: 76073 - DNA, 122 bp, Homo sapiens
cggcagaactgtacattcccaagctccttacattatattcttactccagttgcaatatgacgtcacaaagtagcatctactaccttcttcttgtcttgggcacgcctcctttctaattcttg

SEQ ID NO: 76074 - DNA, 122 bp, Homo sapiens
tttgtgtgtcccgggctttgtccaatcagcactgtctggcttagcggtgctcccgttctccggctggggcatgataatgcgtgttgtcctttgtttcattgttcaaatatgtgtctgcgatg

SEQ ID NO: 76075 - DNA, 122 bp, Homo sapiens
tgtattttccctctgatgttgtcactactggctggtgccgcagacggactcagaaagcaccgtttcattttgctcgagtaaagaaggcaggcgcagagtgctgctcatatattgattgactc

SEQ ID NO: 76076 - DNA, 122 bp, Homo sapiens
aagctgaggtggaagaattgcttgaccccaggagttcaagtctgcagtgacctatgattgcgtcactacagtccagcctgggtgacagagtgagaccgtgtctcaaaaatgaaacaaaacaa

SEQ ID NO: 76077 - DNA, 122 bp, Homo sapiens
cccggacaggtgatgcagtggttctggccaaactcgggctggtaggtgccgacggggcagcggatgcagcggtgggtggtggtgttgtagtggtggccgggggagcagtgcactgccggggg

SEQ ID NO: 76078 - DNA, 122 bp, Homo sapiens
ctgcgacttggggcagggggtcctaggggtggtctggccaggagccgcgggggcggactgcgcggtgcccaggagcacagctgcgctctcaggcacgacacgactcctccgctgcccaccgc

SEQ ID NO: 76079 - DNA, 122 bp, Homo sapiens
tgatatactaggatctcctcataaagtgcaaacccgtcaaggcagtcagaactagtaagtcgttcattagttgcagtcttctgtgacaaaagagatggctcttgccagcctgggcctgtcac

SEQ ID NO: 76080 - DNA, 122 bp, Homo sapiens
tagaaggaaaaaagatcctctcatttcctaataactgcaaaggccaggaatgtgccacagcggcattcaggaaaattcggcgatgcgtgccaccgttgggtgcgcgccccgtccctctagtg

SEQ ID NO: 76081 - DNA, 122 bp, Homo sapiens
gttgctggggcatggccgggagcagattccctttcacatctccgcaggaactgaccctgccgatgcctgacctcagacttccggtccccaggctgtcagacagatttctgttttgcttagtc

SEQ ID NO: 76082 - DNA, 122 bp, Homo sapiens
gggattgaactgctcagcaggagtatgtgtaaagcactcagaaaactgccctgttgttatcgtcattctcattttacagatggggaaactgaggcatagttagcaaggagtaggggtcaatc

SEQ ID NO: 76083 - DNA, 122 bp, Homo sapiens
ggcagcggcgctggcggccgagtgcgcttgtcacgcgtggcggtgcgtggttgctaggggcgcctgaggctgccgggtagcccagcaggccgagggaggaagtagcgtggagccggtgccga

SEQ ID NO: 76084 - DNA, 122 bp, Homo sapiens
ccttcttcatccttctgctgtttgtgtgaaccatgaccctccctgcaaggccttgccaggcgctgtctccacttctccacttcttcacgtggtcctacctcagtgtggggctgacatggaag

SEQ ID NO: 76085 - DNA, 122 bp, Homo sapiens
ctatgcttttactacactaatgcaggttctcatttgctcagtaagcaattgttgaatgcacggcaatatactaggttgttgaaggaaagagaaaagcagtgaaaacatgaaaaggaatctga

SEQ ID NO: 76086 - DNA, 122 bp, Homo sapiens
gatacccagaacaccctgacttagttcacctcccatttcaccagaagtaaagcctgggtccggctttgctgcagtatgcatgccagagctgactggccccacacaccccttacagagctgtg

SEQ ID NO: 76087 - DNA, 122 bp, Homo sapiens
ataattttgccatgttgaataagtgttagaatagagaggtacaaaaagcaagggaagccccgagaaaagcttgatgaagtctgagttttgagctggtctaaaaaaatgagtaggagcaaatg

SEQ ID NO: 76088 - DNA, 122 bp, Homo sapiens
gggcattccctgtgggtgggctggggttctggcctggcctgattatttcctaaacagagacgccgggccagcccctggaacacacttcctgggactcctcttaggtctacacagtgctctct

SEQ ID NO: 76089 - DNA, 122 bp, Homo sapiens
actttgggcggcgggaccttgcggtgaagaggtgtgtgcacgcgcaggggcgccctggagcgcacagctgtatgccttacggggactctgcctgtgcaacagccacaccccgggttggggat

SEQ ID NO: 76090 - DNA, 122 bp, Homo sapiens
ggaggggtggggcaggcagggaggaggagggtggctgagaaagcttcccctttgtgggggcgtgtggccacctccagaggatcagggtgagggaagcttccagaagtggcatgaggagggag

SEQ ID NO: 76091 - DNA, 122 bp, Homo sapiens
tgaaaaagcacagtgtaagaaagagaaatgaggtaatgcttctttcctaggtgttttgctcgtgtcacctgctcttgggaaacctaaagatgacaggtggcatttctaagtgatagtttttg

SEQ ID NO: 76092 - DNA, 122 bp, Homo sapiens
tgccggcggagacaagagaactcggtgtccggtaggacgcgcctagagcgcgagagcctccgggctggagccccagactcgccttggcccctggtagtggaaattgccccgacgtctccaac

SEQ ID NO: 76093 - DNA, 122 bp, Homo sapiens
actgcgcgttggggtctatctccaggttgaggggcgtgaggaggctctcgttgaccgacacggtggtgatgcatggggggctgggtccgcacacgcccccggagcggtagccgaagctgcgt

SEQ ID NO: 76094 - DNA, 122 bp, Homo sapiens
cttgtgcccgcacatgtagcagttccaggggtcttccttaatggctgcctgggcagcccccggccccaccaagaggtccacacactccacgcaaaagcacctggaaggagacccagtgagca

SEQ ID NO: 76095 - DNA, 122 bp, Homo sapiens
cctggtgattatgctgctttgctatgctgtaagtaacataagtcttctgtctctaacccacgaatctcatgtcttctgccagcatccatgatacagtaagagattactttattagtttgtat

SEQ ID NO: 76096 - DNA, 122 bp, Homo sapiens
gcaggttctccgcgatgcgcttgctgggtcgcaggtgagaacctcacggttctccatttccggagatccagctctgagcaggcagagggtcgctcccgtcgcctgcccctgcggtagccaag

SEQ ID NO: 76097 - DNA, 122 bp, Homo sapiens
gggcctgccgaggcgagaccaataagaagcgggtctaggtcggaagtagcgcttcattggcgtggccaggggcgtggccgaggagaggcgtgtccggggagcgaggtccccgaaaggcgagg

SEQ ID NO: 76098 - DNA, 122 bp, Homo sapiens
tttcacattttctatgtctgcttttgtgttaaaatggcagggttgagtgactcatgcccccgggaagcctgaaatatttatgatgtgcttctctacagaaaaggtttgccaagccctggtct

SEQ ID NO: 76099 - DNA, 122 bp, Homo sapiens
agtattcacagtgtatcataggcagtgggggaggggagagaaagcaagaaagactgctctcggcacttgtgcttttgttagttctacagaagaggcagaaaaacaagagataacaaaggctc

SEQ ID NO: 76100 - DNA, 122 bp, Homo sapiens
gcgggccttttgcaggggaaggactcccccagcaggacgtttactgaatctggagggagtcgccctgcagatatcccgcggaagccggaggagacccaggtgcgccccaccggctagctgcg

SEQ ID NO: 76101 - DNA, 122 bp, Homo sapiens
ccatcagaactcggcgcctcctctccctggggtatacacggctatatcctctttgtcatccgtattttgatttgtcttacaactcccacccgctccaaagtctgggttggggaggtggggag

SEQ ID NO: 76102 - DNA, 122 bp, Homo sapiens
aaacaacacctccacccaagctcatccaatctcagccccaactaggtgacgtcatctccccgccctgcatccccaagcctcggggagtcctgtctctaagctacagtcccagctccagtccc

SEQ ID NO: 76103 - DNA, 122 bp, Homo sapiens
tctatttgttcatctagggagcccaaggagcacccatgctgcatttatacatttaatgaccgtactaacagcacaaggtactgaagatagtactatgacctcgacaaactcctctcacacag

SEQ ID NO: 76104 - DNA, 122 bp, Homo sapiens
cagtcgatgtccaggacaggtcccgtgtgcccacacaccgtcgggtaggccttgtcaatgcggcccgtctgtgggcacgagggggcagtcagtgggctccatccctcccgaagccttggtct

SEQ ID NO: 76105 - DNA, 122 bp, Homo sapiens
ggtatgtggactaaacataagcataacacactcagcccacttagtgctcaggaattcagccgtggcagtgagatggagtgtgtgtttagaactgttgattgatctggctctccctgattagg

SEQ ID NO: 76106 - DNA, 122 bp, Homo sapiens
aggtgggggacttgggggtttttctgagacgggctctcgctctgtcgcccaggctggcgacgctggacctcaggcaaaggacagtaatccttgagagacaggagacaaaaccaggtgagtcc

SEQ ID NO: 76107 - DNA, 122 bp, Homo sapiens
gtggttttccaactgaaactccctctcgcttattcgcaggagtcagcttaagtagagctccgcgtgttggttgcagaagtcgcctgtcttccccgcaggaggctgtttgctcgctttgacac

SEQ ID NO: 76108 - DNA, 122 bp, Homo sapiens
gcgccccgcccaccccgcggggattggctgcgaacgcggaagaaccaagcccacgccccgcgcccgcgcccaccaatggaagcgcccgctcgtcttgatagacgtgccaccttccgccaatg

SEQ ID NO: 76109 - DNA, 122 bp, Homo sapiens
gtttcgtgacgaggggtggcacgcacaggtgaagccaggtgtgaggggtcaggcaggtgacgacacattccgcagtccagagagtggctgggtcccttctccgcaggctcttggggctctcc

SEQ ID NO: 76110 - DNA, 122 bp, Homo sapiens
gaagctgagaaaggaaaatcacctgaggtcaggaattcgatatcagcctggccaacatggcgaaaacccatctctagaaaaaataaaaatttgctgggtgaggtgatagtgcctgtaatccc

SEQ ID NO: 76111 - DNA, 122 bp, Homo sapiens
tgggcttctgctagagtcagctgcggcaatcggggcaacaaaattcaggcttaacgtcagcgtgggcatctttggacttcaggatgtattctcaaccagtccagtagaaactaaacgctttg

SEQ ID NO: 76112 - DNA, 122 bp, Homo sapiens
cagttgataccagcttcctgaaccatgtgttaagagagatctcagactgcatgtagagaacgtatgccttgagagataagtgatgtctgccattgattgagggtggagaggaggagccaagt

SEQ ID NO: 76113 - DNA, 122 bp, Homo sapiens
cgcctgccatccgccagggccccgagggactcttaagtgtagtttcggggccgcagtctacggggcgacgaggtggcagtgccgtccggcctcgtgggatacgtgatggtgactgaacagga

SEQ ID NO: 76114 - DNA, 122 bp, Homo sapiens
gccacgcccccttctcctcttgcggcccgccggagacttcggctcgaccctcccggcttgcgacccgggagcccacgcccgcagcagcaggaatgtggttttatttgggtggcgacttctgc

SEQ ID NO: 76115 - DNA, 122 bp, Homo sapiens
ggcatgaaccctcttgccatcctgatggacctgccccggacctacctccctccctctccgcgggagaccccttgttgcactgccccctgcttggccaggaggtgagagaaggatgggtcccc

SEQ ID NO: 76116 - DNA, 122 bp, Homo sapiens
aaacctgagttccagttccaaacaaggcaggctccatggccacgctctcagctcacacttcgggaaacagagtcaccagcgtctgaaaaaataggtccacccactatggatcagactgactg

SEQ ID NO: 76117 - DNA, 122 bp, Homo sapiens
ctggccaccagcttctgcctccccggccagccttccggctccgccgaggtggggaggtggcggcggaagccccctaccctaggccttcgctgagcaccacggccacacggccatcctgcaca

SEQ ID NO: 76118 - DNA, 122 bp, Homo sapiens
ccagccaagagcctggaaccacgtgacctgcccatttgtatgccgcggagcgctccattccggcccctttgtggccagaagaaagtggcccatctgtcgccagttagagactccgcggacct

SEQ ID NO: 76119 - DNA, 122 bp, Homo sapiens
aggtgcagggccgggcgtggtgactcacgcctgtaatcccagcactttgggaggctgaggcgagtgggtcacctgcggtcaggagttcgagaccatactggctaacatggggaaaccctgtc

SEQ ID NO: 76120 - DNA, 122 bp, Homo sapiens
gtcatgtctgggcggtgagagacacaggtgcgaatgactagcttcattttgtaggagcatcggcaggggcgggaccctgattaaaccctgcccagctttggtcaaagcaatcactgacataa

SEQ ID NO: 76121 - DNA, 122 bp, Homo sapiens
aagtctgcacggtggagtagaacctaacacggagtcacttctgtctccacagtgggtctgcgctgggtctcgagagtcttcatttcagaagttcaagggtgaagcgctcgctcctagttcac

SEQ ID NO: 76122 - DNA, 122 bp, Homo sapiens
acagcatcattactctggtgcattttcttttgagccactgttacggcaagagatccagggcgtgccacgtgaaacgcgacagggcctttcctcaagacctctcctccgtgtggtgcgtttct

SEQ ID NO: 76123 - DNA, 122 bp, Homo sapiens
gagcaacgtctctcccctcgccacgtgctcgacgaccccagagccccgagtttcttctcccgaaccgcttgccacgtgtccaagccaaagctgacgtgtttcagcagggcgccgccccctcc

SEQ ID NO: 76124 - DNA, 122 bp, Homo sapiens
atgcgtcacttcctggtcttttggggggagccgggatatataagggcggtgctcacgcagcgctctcgcttacacagtatggccggcgacattagctagcgctcgctctactctctctaacg

SEQ ID NO: 76125 - DNA, 122 bp, Homo sapiens
gttaaattttgtgttcagagttccattataccatgtatttctcggaggtggctcatcacacggctggtggcagtcttggtgccgcagtgattccttaatatttgatttctctcttgatttgc

SEQ ID NO: 76126 - DNA, 122 bp, Homo sapiens
agggtgaggcgggaggaggagtcacacagatggctctgaggtctggagccgggggacagccggtgccacctctgatagactctgcgagaggagccactgccagcttcgggccgccccatccg

SEQ ID NO: 76127 - DNA, 122 bp, Homo sapiens
cgagatctccggccggcgagctccgccccctgaagtccccatcccaagatccggggccggcgagctccgcctcccgaagtccccgcccccagatccccggccggcgtgctttgcggccgccc

SEQ ID NO: 76128 - DNA, 122 bp, Homo sapiens
actaaaggacagcgatgtgaaccactgacaacagttcgcggcgtttgacggcggcgggggcgtggcggggttttatctgtgtattgacgagagccgggcgcggagggaaagagtggggcttg

SEQ ID NO: 76129 - DNA, 122 bp, Homo sapiens
ggccgccctcctgtctgggcgcgcgtggctggcgggtggccggcggtcgagaggctgcggcgggcgaacgccgctggagtcgcccagactgcctcggatttcataatgaatctgaggaagga

SEQ ID NO: 76130 - DNA, 122 bp, Homo sapiens
ccagttggattaacctccaaaggactgagccctgaacaaagagttatcttttaatcatttcgtggggtgggggagatctgtgtagggggaagcatattacagaagtgagaaacaaagacagt

SEQ ID NO: 76131 - DNA, 122 bp, Homo sapiens
tatacctggcacctgagcactaccggtcaccagggacaggagagccataactttgtctttcgtgaggggaatgggatgcagccgggatcgagcaccagtgagccgccagtgtacagacctcc

SEQ ID NO: 76132 - DNA, 122 bp, Homo sapiens
tggccagataggtgccctcctgaaagggttgaactgtaggcagccagaaggtcccatttccggtccatgggccccatggctcatcatcatcccaagcagcaaatgccacggccccttcttgg

SEQ ID NO: 76133 - DNA, 122 bp, Homo sapiens
ttactccatgaccaccatccactggggaggaagtgctgaataaacagggggctttctcgccggtcatcacccggtgaagaggaagtgctaactagttattgtgcttactccccatcgtcacc

SEQ ID NO: 76134 - DNA, 122 bp, Homo sapiens
aggcccctttcctcacaagtaatggctatattccctgccacgggccacaagtggcaccctcggctccccagaaatcagtctgtgctctatgccaggataaggtggaaacagaagcaactaca

SEQ ID NO: 76135 - DNA, 122 bp, Homo sapiens
caggcagacttttctgttgaaatgtctttggggcacgctctccccactccttgggttggtcgtcacaccttttaattcttttttcataaagatgttaaaatatttacagttacatttttgta

SEQ ID NO: 76136 - DNA, 122 bp, Homo sapiens
ctacctggcgatctccttggcgaccttctcgttggggcaagtaacaaaggctgcagagaccgagcccggaacgtagccagagccggaatccgaggccggcgagggctgggtcggagggcttc

SEQ ID NO: 76137 - DNA, 122 bp, Homo sapiens
tcttggggatggtgagctggccgcccggccgggtgggcagcgcgtccgggcgcggtgcttcgctagctataaataggtgctgtgcggggacaggaagatggttccagccctttacaagcacc

SEQ ID NO: 76138 - DNA, 122 bp, Homo sapiens
gcgggcttgtggggagcggcgtcccagcctttcccgggaggctcagccaggtgcctggagcgggagagtcggactcagattcctgctttacctagaatagcaacgtgccctgttcccgttgt

SEQ ID NO: 76139 - DNA, 122 bp, Homo sapiens
acacagctaacagtgacacagctgaggctgctagaacctgggtctactgtcgtccagccacgaactggcttgagatcccggataagtctctctgagcctcggtttccccttctgtcaagtag

SEQ ID NO: 76140 - DNA, 122 bp, Homo sapiens
cgcgcacgccgcacgggcctgggccccgggctctgaatagcggccgtgctgactgctgcgcgccctgtagagtggaggccatattcaggcttccgggtgatgtttgtggccacccgggaacc

SEQ ID NO: 76141 - DNA, 122 bp, Homo sapiens
tgtctccacatacctaataatttgagatgattataacaataataagtatatttcatccagcgtttgtggtgggattgtctgtgctctgagacgtgtcatgatctcaccacattctcttctct

SEQ ID NO: 76142 - DNA, 122 bp, Homo sapiens
ttgtttgagtcactgttttccattgggttataaactttgatgggagagagcgggagagcacgcggtcagtgtttgagttgtcctcttcagtcagcgtctgcctttcttggctctccgtgagt

SEQ ID NO: 76143 - DNA, 122 bp, Homo sapiens
cgggtgacttggttatatgtcacagaataacattcgagaatgggacatggaatgaggcgacggccccagcaagccccagcagccccagccccagccccaggcccagcagcagcagcagcagc

SEQ ID NO: 76144 - DNA, 122 bp, Homo sapiens
tcctaagcgccagtgatgtagctctgcgctcatgcacggaaaggcacctgagagcgcggacgaggaatgggagggccttgagccgtctcgccctgtctgtgaggtgctaatggacccagtgt

SEQ ID NO: 76145 - DNA, 122 bp, Homo sapiens
tctgcgattagaaaagttggagaacgtgccctcctttccacccatcccctcataggcactcggaggttcacaatgcacttatcacattagaccggtctggaaaggtctacaataaagaaaca

SEQ ID NO: 76146 - DNA, 122 bp, Homo sapiens
agcagggaactgcgcctcagcccctcccacgggccgcccactgattccaggatccgaaaacgcttccagctgctccgtcaccccaggaaggcagcgccggcctctgggcggttctggtggaa

SEQ ID NO: 76147 - DNA, 122 bp, Homo sapiens
atgttaaccttttctgatgctcttcatttctttctgctgatcagaaattacatctgggaccgggcagggtagctcactcctgtaatcccagcactttgggaggccgaggctggcggatcacg

SEQ ID NO: 76148 - DNA, 122 bp, Homo sapiens
cagatttcacctgagacggaagttatttcctactgtcagccataatggaagcactacagacgtggcatcaagtattacagtgaattacagttatactgtcagcaatattatgttaacagtac

SEQ ID NO: 76149 - DNA, 122 bp, Homo sapiens
gagagggtactggggttccggccatcctttgctgaggctggaagaaatgcgcctttcagccgccgcctgggagccgcactccctgccaagcccgggtgggatagcgctttggtgagaaggta

SEQ ID NO: 76150 - DNA, 122 bp, Homo sapiens
cgccccagagagacccggtctctaagcctcaccctggctgtgcccccgccgccgctaccacgtccccttcgatatccacatccgcctcttcagccgccatgatgggacctgaccccgtccgt

SEQ ID NO: 76151 - DNA, 122 bp, Homo sapiens
cgggagggcctgctggggaaagtcccgaatcctctggcccagctctggcgacacagccaccggtttccggcactttctggtttcacatctaggggcacagaaatggctgggtctgggaatta

SEQ ID NO: 76152 - DNA, 122 bp, Homo sapiens
gagccgaggccaggctcctgtcgatagtaaggcaggttgcttgcgggtgccctggtagcacgaggtagggactggtagccaagctgcgcactcacaaggaagaatagcggcgccaaggaccc

SEQ ID NO: 76153 - DNA, 122 bp, Homo sapiens
tagagccccaactctaaacagtatatgacacatggtaggtacccagtaacatctgtaaagcgaattaacttcgtgagtcaaaataaatgctgaacagaaaaacagtgaaagatatactactt

SEQ ID NO: 76154 - DNA, 122 bp, Homo sapiens
tacttgaacagctcaaagtcccatagttcaagtaggctccagtctaggcctgcctactcccggcagccaaggtcagcagccctttgtggggtgcttttttcctgattatataacctgttctt

SEQ ID NO: 76155 - DNA, 122 bp, Homo sapiens
tccgcgacagcgactcaggagagggagaaacagagggacttccggtgaccagagcactagcgccgcaaacctcggcctatcccaacgcatcttgttgcccggagttgccggccccgcctttt

SEQ ID NO: 76156 - DNA, 122 bp, Homo sapiens
cattggccgaccgctctagctgtagcggagacccccaagtagggaaattggggcaaaacgcggagcgctccaggctcctacgggctgtgcggtgccagggctcgactgctgagcgtcgtggg

SEQ ID NO: 76157 - DNA, 122 bp, Homo sapiens
ccggcccagcctttcctctcccgcggccaccagcatccccgcggccctggcagccgcgcacgcacacctgggactggtgtcagcgttgatgacacttgcgctgccactgcctgaatcaactg

SEQ ID NO: 76158 - DNA, 122 bp, Homo sapiens
ggatatcaatgaatagttcatgagtttagtgagcaaaggtcaacctccatcaggcgcatgcgtcccttccttttcccatggaggaagagacgcctcttttccttccgctttgcttgtctttt

SEQ ID NO: 76159 - DNA, 122 bp, Homo sapiens
agacccctcactgcccaactctggccttatgctggatcagggtccgagggcgctttgaggcgaaggtggcgctcgccaggtgctcaacatcaaatacgaagtccccgcccctaacgtggcct

SEQ ID NO: 76160 - DNA, 122 bp, Homo sapiens
caggtcccccgagccctgcccggcggggagacggctgaagcccagtgagatttcaagcgccgtgcaggcaggccggcagtgctggcagacctggcactctgtccacagctgctggcccgggt

SEQ ID NO: 76161 - DNA, 122 bp, Homo sapiens
tctgtccactgagacctcgagcccttgagcagaagatgggagagagagggtcttgctgggcgggctccagaagtcctcctggctctgggcgcaggagttggaagagaagagatagagaaaca

SEQ ID NO: 76162 - DNA, 122 bp, Homo sapiens
aatgtagaaaggaatgcacaggtgcaccacaaaactatctgagtaactggatcagccttccggggatcccctggcccaagggtgatcatgggaaggactgaagactaccgagcaggccccac

SEQ ID NO: 76163 - DNA, 122 bp, Homo sapiens
gccgccgcgccgcgccaagccagcagagctcaaagccgggcaggagctctggggcgggcacgccatacatgtccgcttaggtcgccgacagctgggagccggcgccgatgtgcagggcgccc

SEQ ID NO: 76164 - DNA, 122 bp, Homo sapiens
taaggcttagcttgtttgttatttccactctattcattcattaggtgccagatactacaccgtctcctcttagagagtggacatgagctagtgtcctattttctttaagtaaactaacatca

SEQ ID NO: 76165 - DNA, 122 bp, Homo sapiens
gtggagagaggccacagatgccagaccgcagaaccatggtgctgcttccagagccagcctcgaccttacccaaatgagagtaaaaccgggcacataggtagcaaagggtcagcaagtgggaa

SEQ ID NO: 76166 - DNA, 122 bp, Homo sapiens
cccactgcggcccacgaagcgaaggtcgttgaacctggccacctggttcttcatgacggccgaggcattgcgcagctcagcggagtagttctcgtcattgcctgccatcacagtcaccaccg

SEQ ID NO: 76167 - DNA, 122 bp, Homo sapiens
aaaagttacttagtctccctgagtcccattctttctagctactagatgcagataataggccgggtacggtggctcacacctgtaatcctagcaattttggaggtggaggcaggaggaacact

SEQ ID NO: 76168 - DNA, 122 bp, Homo sapiens
gagcctcccctgctcccaccacacagaattaagttccatctcactgccctgtattcaaggcgctgcaggacgagtgctccttcacagcccccagccattccaaactacctgactctcttcct

SEQ ID NO: 76169 - DNA, 122 bp, Homo sapiens
gatttcaggtatcaagtgggtagagctcatgcatgcgagaacgtggtccctgtcagcaatcgctcctaacaccccaaaccaccttcccacccggctcctccgaaccccagaagttcggcagg

SEQ ID NO: 76170 - DNA, 122 bp, Homo sapiens
acatggttactgtaggcaacagatcctataatatatgagctggccgggtgcggtggctcacgcctgtaatcccagcactttgagaggcccaggcaggtggatcgcctgacgtcaggagttca

SEQ ID NO: 76171 - DNA, 122 bp, Homo sapiens
gatggtgcacatttataccctttgcaaaaggaaatggtctgatatgggaaataggaggagcgactgttcctaggtaattcgtggctacagtggacactttgaagtctgggggacgcgaaggt

SEQ ID NO: 76172 - DNA, 122 bp, Homo sapiens
ggtccccacatgcagcgcactggctcggaagccagacaagctcaccatcctccgcatggccgtctcgcacatgaagtccatgaggggtacagggaacaagtccaccgatggcgcgtacaagc

SEQ ID NO: 76173 - DNA, 122 bp, Homo sapiens
ccctgccttgtaacagggcagcggacagcaggtaaattgccttccccgggagtagcgtgccgcccggcaggggcctgggtgtgccaaggcccggctctggggatttcaggacccaggccagc

SEQ ID NO: 76174 - DNA, 122 bp, Homo sapiens
tgagtccaaagtcgtttccctttaagagctccttttcttttaaagttgaattttaggcagcgaggactcttacactagggggcagacagatactgtacttgctctaatcttaagcaattttt

SEQ ID NO: 76175 - DNA, 122 bp, Homo sapiens
gcctcccgggggcctccagccccgcgccccgctagtgacgggcagcctagatgggggcaacgtgcccttcatactcagccctgtgctgcagcctgaagggcctggccccacccaggtgggga

SEQ ID NO: 76176 - DNA, 122 bp, Homo sapiens
tggctcattcggcttgtcactctgttgtcttacatttctttggctcaccctctttgggttcgcacggtgggcggggccagtggtagggggtggtgagaaggtgcgggccccttcttccaatt

SEQ ID NO: 76177 - DNA, 122 bp, Homo sapiens
acagagtgagacctccatctctacaaaaaattttaaaaattagtggggcagggtggcacacgcctgtagtcccagctacttgggaggctgaagcaggaggattgcttgagccagggaggttg

SEQ ID NO: 76178 - DNA, 122 bp, Homo sapiens
ggtgctgaggctgggccaggccacgtggcccatgagctggctggggtggaggggcagatgcgttgaggctaccccatggatccacacctgcaggacaagcagctgctcaggctcaaggaaac

SEQ ID NO: 76179 - DNA, 122 bp, Homo sapiens
aaggatcactccactgaatttgtattacttggatttaccattgctcccaacacccactctcgttaaaagcatttacacagtttctgttggggaacctatattacattttacttttggttgct

SEQ ID NO: 76180 - DNA, 122 bp, Homo sapiens
ggcgctcggaatgtctcttatgcaataaaagcagcagcagagagttggagtcaccttgaccgccatgctgtgctcggaagccggggacgagcgagtgagcgagcagggccgagctgtcaggg

SEQ ID NO: 76181 - DNA, 122 bp, Homo sapiens
ccgcacagggcgagcacccgccaggcacgcccgggctccggccccggctcggccatgccgcggtccacagctctggccccagacggccacgaatatttaattggcaccttggggcgccaggg

SEQ ID NO: 76182 - DNA, 122 bp, Homo sapiens
gctgcagagagataggggtgatctaagcccttcctctgcaatactgatccttttcgtgggcgaagcaatgctatccgtttgagagaacatgaagggggcagagttactaaaactgtattaga

SEQ ID NO: 76183 - DNA, 122 bp, Homo sapiens
ggccaatggtcagaccttggaagaagggtgtttcagggaagagaatagaatagggatatgcgggtgccctttcataccagaagagactgaaataggggatttagggtatagttagatgcaga

SEQ ID NO: 76184 - DNA, 122 bp, Homo sapiens
acgtaccgggcgccatgttggagggttggtggtagcggcttggggaggtgctcgctctgtcggtcttgctctctcgcacgcttcccccggctcccttcgtttcccccccccggtcgcctgcg

SEQ ID NO: 76185 - DNA, 122 bp, Homo sapiens
aaatcataagccataaatatcacctcctctcactgtcttgcctacacatttgagtattttcgcttcacagtacttcctgctacttgtgttagtacacttttttgttgttgttttgttttttg

SEQ ID NO: 76186 - DNA, 122 bp, Homo sapiens
tgtcccgggagacgcggaggacgcgcgcaccgcgcacccgggcgccaggggctggaccgccgctcgctcccgcagccctacccttgcccagcgagccaagccgcagtcccagcccatccgcg

SEQ ID NO: 76187 - DNA, 122 bp, Homo sapiens
tgtgtcacactctgccacagcccccttgggggtgacaagcacacacctttccttgtcacacgtacccgctggagggtctcaaacatggagcccagcccctgtcccctgtctttctcatacac

SEQ ID NO: 76188 - DNA, 122 bp, Homo sapiens
agcccagggcaggccacacgggctcacctgggggaagtttggtgtggatgtgaatgtgtccgtcctaggtataacaacaactgaaatcatataggagttgaatgagcccttagggacaagcc

SEQ ID NO: 76189 - DNA, 122 bp, Homo sapiens
cgcctgtgatcatgcacagtacactggaactctctcctcctcctcacctcattgtctccccgacttatcctaatgcgaaattggattctgagcatttgtagcaaaatcgctgggatctggag

SEQ ID NO: 76190 - DNA, 122 bp, Homo sapiens
gaccatccaggccatgctaagccccgagcaggttcccacaacaggtcacagaggggacgccgggtcaggagatgggggcctggggagcaaggccccccacagctgccctcggtgacatctgg

SEQ ID NO: 76191 - DNA, 122 bp, Homo sapiens
gctgcactagcccctccaggtcgggcaccctgctggggccttccagggctgggctgaactcggcaggccctgcaggcacctggtgcccccagagggtgaggcgaggccagagctgcagccgt

SEQ ID NO: 76192 - DNA, 122 bp, Homo sapiens
ggcgggaagagcttcccctgcacgcagagaacaggtggccaggcgggaagtactacccgacgtccgcctagaatccttgccgctgttgccacacccaccccttcccctggggaggagcaacc

SEQ ID NO: 76193 - DNA, 122 bp, Homo sapiens
cccggagccggggccggactaggggaccgagttgggggtcagagaccgagtccgagccggcggctggagctggggacgtagacctaggccgagccggagcgaagagaaatcccgccgaacgc

SEQ ID NO: 76194 - DNA, 122 bp, Homo sapiens
ttgtatctgctattctgtgacttcctgaagggtgactccagccacctgcctccccagctgcgctcccatcagctcactgctcctgcagaaactgacttgcggccccggtgagtaggcctcat

SEQ ID NO: 76195 - DNA, 122 bp, Homo sapiens
cgtctctcgggctctgattggtcaggcctccacacgtgagcctctaggagccaatcatgtcggcccacctagcatgcgctgattggctcaggctggccaggggcgggcgcggtccttccacg

SEQ ID NO: 76196 - DNA, 122 bp, Homo sapiens
gtcgtggcgtcttgctttttgggggtctgctggaatcggcgggctggtcctagatcgcggcgtaggccggatggcgaggattccagtcggattgtgcgggccgtggcgggttggtgcaccca

SEQ ID NO: 76197 - DNA, 122 bp, Homo sapiens
acaggccgcaggagaagtgcatggagaagggagagaaattgtacctggcctcctgaaagacgcagcctctgaaatgaatattgaagactggggaggatttaaacaggtagagacggatggaa

SEQ ID NO: 76198 - DNA, 122 bp, Homo sapiens
gcgcaggtggggctgcacagacgctgatggtgggcgcgccaccctctgttttccctcactcgccagccccgcaccccaacagcttgcgctggaaaatgcgctttgccagcgggcgccccgcc

SEQ ID NO: 76199 - DNA, 122 bp, Homo sapiens
ctacacactttcatattctaatatagtttcccacagtgaatcattgcagatcccaagcatcggcacacaataactttcaagtttctttgcactagtaatcgagattttttttttatcaacag

SEQ ID NO: 76200 - DNA, 122 bp, Homo sapiens
tctcgctcctccctcttggggcagccataagcctaggagctcctgacgctgtccgggccccgcggctccccgcgctctctaggggagagccttggggcgtatccggggtcgcgctcaccctc

SEQ ID NO: 76201 - DNA, 122 bp, Homo sapiens
ggtttcactcccgtcgcccaggctggactgcagtgtttgcacactgcaacctctgccttgcgggttcaaggttctcccacctcagcctcccgagtagctgggactacaggggcacgccatca

SEQ ID NO: 76202 - DNA, 122 bp, Homo sapiens
tgaagctgcgggttggcttgactgggctcagccactgagctgcctcaaccggccaaggaacgggattatgatgactatgcggacttctatattgtcttcatctcattgtgtgtattatgtat

SEQ ID NO: 76203 - DNA, 122 bp, Homo sapiens
cacagccaacaaaggaaatggttttctgctctgtgatgatgtcagacagcatcttaggggcggtggaggacacatagcagatgtccaggaaggacaggttactgaggaagaagtacatgggc

SEQ ID NO: 76204 - DNA, 122 bp, Homo sapiens
gccagtgcctagtgtgcaaaattgagaggcgctcactctcaggttcctgaagtgcagggccggcacctgacagtgaatgcctctgtaaattttgcaccctagatgcctcctgtctcacttgc

SEQ ID NO: 76205 - DNA, 122 bp, Homo sapiens
atgtctgtccgaggctgcgcaggaggttacgtcaagatgtggccaataaagtccaaaaagcgctttgaatactgttctgggttcacggtggagatctccgcgccagcctgggcagtttttaa

SEQ ID NO: 76206 - DNA, 122 bp, Homo sapiens
agaaggcagtgtactgtggtggaaaccccggtcaggagccagggtctggctctgccactccgggtgtccccttagaccagaggccctacccagtgatgcttgaaatggaggtggcccacaga

SEQ ID NO: 76207 - DNA, 122 bp, Homo sapiens
agaggtgcatactacaggattcctcacagtggatgttgacctcgatcccctgccgagaagcgttggttaggtttcttcattgcagacccactccccccaccccacactgaactcctcagagg

SEQ ID NO: 76208 - DNA, 122 bp, Homo sapiens
gccgtctggaaaaaaggttcctgccttacgctgaaaggctgaagtggggcgcgcgaagggcggcgaagcggagacggcggctctccgggatccagctccgcccctggccagtgtgcggcccg

SEQ ID NO: 76209 - DNA, 122 bp, Homo sapiens
catgtgattggctcccaatgctgggctggggctggcaaccgccctccggcctccacgcagcgcctgtgaaactcttcattcagcagaactggggaccagatgcctctatgccccaccgataa

SEQ ID NO: 76210 - DNA, 122 bp, Homo sapiens
ccccgcctccttcaggatgacgctggacgtggggccggaggatgagctgcccgactgggccgccgccaaagagttttaccagaagtacgaccctaaggacgtcatcggcaggtaaggccgcg

SEQ ID NO: 76211 - DNA, 122 bp, Homo sapiens
ggccggcaggggaaggggcggggccgacggggaggtgctgactcgggggcggggccatcgcgggaaccccgggaggggcgggccgcggggggcggggccaacgttcgctcttctggccttgg

SEQ ID NO: 76212 - DNA, 122 bp, Homo sapiens
aagtgatgaagccctgaactgtggcaatgatgccggagaaggatgtaaaaatcgtaaagtcgactggtgaccaattagagctggaaggacttacccacgctaacacctcccaaatatgggag

SEQ ID NO: 76213 - DNA, 122 bp, Homo sapiens
tcccgcatttattaggcttcctgctaaaggcggggtattattgttcagctggtcccgcgccgtcttctgctattgatgatgcaagtaggagtaggaaaggggaggaggggagaagtcagaag

SEQ ID NO: 76214 - DNA, 122 bp, Homo sapiens
acagccaccaccctcgcctcgatgctcactgtggtttcctgcttttcctgcccccatctccgcccacccttgtgatctacagtagctcatacagtagcctgggtgaccttgttaagggctga

SEQ ID NO: 76215 - DNA, 122 bp, Homo sapiens
tagttgtttactaaaaacattttcaagatttcctaatatgtaccttttacactcactgtacgggaatggaagaacaacaaacacaaactgtttatttttcatggatttttttttttttgagt

SEQ ID NO: 76216 - DNA, 122 bp, Homo sapiens
actgcagcgtaagacatgtctgtgtacgtttgtgactgtcagccaaaataagttaacctccgatggaagtcattttcatgtaattaattattcttgtcgcagctgaaagagacaggtgcatt

SEQ ID NO: 76217 - DNA, 122 bp, Homo sapiens
tctcaagtatggcgtgcacgaggccatcttcgccatgctggcctctatcgtcaacaaggacgggctgctggtagccaacggcagtggctttgtcacccgtgagttcctgcgcagcctccgca

SEQ ID NO: 76218 - DNA, 122 bp, Homo sapiens
aagagacacctgagctctgggcaaacaatccagaggccagcgagaggcccttggcatggccggtgaggagtgctcagtttcctgctcactgaactggggaagtgagaaggagacacagagtg

SEQ ID NO: 76219 - DNA, 122 bp, Homo sapiens
tggcagttacacgaatctacacgtgtgataaaatggccttgcctgaagtgagtgcacgcgcgcgcacacacacacacacacaccagggcatgcagagctacgagagtctgaacgggccctgt

SEQ ID NO: 76220 - DNA, 122 bp, Homo sapiens
ctatttaacatgtgcaacacaaagtttttcatgtattgacagagttgtgcaaccattgtgcgaccattgtcatgatctaattttagaacattttcatctccctctaaaagaaactctgtact

SEQ ID NO: 76221 - DNA, 122 bp, Homo sapiens
ggctcaggtctgctcatctagtcttcggagggaatctgtgcatgtgaaatgaggcccccacgtcatggttataaaggaagagatgaaatcagctcatcttctcccaggctgataatggtcac

SEQ ID NO: 76222 - DNA, 122 bp, Homo sapiens
gtcggcacacagaggtcgctgcagaagcctagctgtggctgttcttagagcagcaagcagcgttctcgccctcatcctgattactaaggcatgaatagtgctgcttctgatggccgtttccg

SEQ ID NO: 76223 - DNA, 122 bp, Homo sapiens
gtagatctcgctcagcgtgagcatcttgctgggcgcctgctggatggccatggtgatgagcgagatgtacgagtagggcggcttggcgtgcgggtagctgcgcttgaacgtcttggcgtcgc

SEQ ID NO: 76224 - DNA, 122 bp, Homo sapiens
ggtctttctccctaggctgggagccaggctttgcactgctgagaagtccctttctctctccgctttctctcatgtaacaaaagtaattaaaataattcctcctcacagttgcagggcacctc

SEQ ID NO: 76225 - DNA, 122 bp, Homo sapiens
gactttagacaatatcagtcgggcagctgtggatcgaataatccgggtggatcatgcaggcgaatatggagcaaaccgcatctatgccgggcagatggctgtcctgggtcggaccagcgtcg

SEQ ID NO: 76226 - DNA, 122 bp, Homo sapiens
acgcatgcgtcacgcgcacgccaggggtgtccctccgggagcgctctgcgcaggcgcggacgcaggttacagcagcgcttggcctctgctgatgccgtcgttatcctacccctcccccgtcc

SEQ ID NO: 76227 - DNA, 122 bp, Homo sapiens
taaaccaactaaaattcaacaatttggctatgatttccttcgaggtttcatatattttttcggctataaaatgtgaacccaggtcaagaggcatatactgaagcctcagttttagcaagaaa

SEQ ID NO: 76228 - DNA, 122 bp, Homo sapiens
cctggagagattacaaaggcccaactcttcctgttgtgtagagaacagaaccaattggtacgcacttggcaggccagagtttacattagccatgcagtaaagagtgaagaattctgacaggg

SEQ ID NO: 76229 - DNA, 122 bp, Homo sapiens
gacttactgcagaaggcccaagggccagtgcagttttcatactgctgttgtagtggcgaacggagccacgagggaagggagcgccgccggcagctgccgggacaccaggataccacgcggcc

SEQ ID NO: 76230 - DNA, 122 bp, Homo sapiens
ctgggagctccaggggcgcctcccggagaccgcagtccgtgctgctgagagagcctcgcgcgatggaatcttgggccttcctggcgcagacccggatgcacgtccgatgactaataacgtgg

SEQ ID NO: 76231 - DNA, 122 bp, Homo sapiens
ggctcggcgggcgcaggcagcgggccaggccagcacccaggcaagggcggggtgggtggccgtacaccggaccgaatcggggactccggtggcgtgggcgcgggccgaaccccgaccgggcc

SEQ ID NO: 76232 - DNA, 122 bp, Homo sapiens
acctgtctctgtggcgcaatcggttagcgcgttcggctgttaaccgaaaggttggtggttcgagcccacccagggacgcctctttgagcttttaaagtattcatgcattgtcaatcactaga

SEQ ID NO: 76233 - DNA, 122 bp, Homo sapiens
ggcgcggggcggggacgggaggctcaggcatggcaggctgtaggtcccagctctgccccacgggaaggcagctaaggcctggcgagaaatccagcgcagcgccggtgcgccggcactgttgg

SEQ ID NO: 76234 - DNA, 122 bp, Homo sapiens
gaggcaaaggcctcattgttctttggggcctgcctgccccgcccccagctgtaggacactcgtggcagatcccgggtgaccgaagacagcccatttccaggagtggggccttcggagcggag

SEQ ID NO: 76235 - DNA, 122 bp, Homo sapiens
cccggctacaggctgcgctctaaggcccggccggtaaaagtgccagcacgacgcagggcgcgagggttctggaagatgtagttcctctatgacgcgatgcctaagatctaatttcttatatc

SEQ ID NO: 76236 - DNA, 122 bp, Homo sapiens
aaaaagtaattaaagcctgctgttctcttttcttctgtgggtcccgccactccccgtgagcggtgaagattctgataacgcggaatggtcattcaggcgtgcaaaccctgctaagtggtgtt

SEQ ID NO: 76237 - DNA, 122 bp, Homo sapiens
ctcgagccgaccttaacacggtccgcgggagcgaccccctcccgttgggccgggccaccacgcctcacctgcgggctggggtcgaagacctccatggggatctcctgggagggtgggtaagg

SEQ ID NO: 76238 - DNA, 122 bp, Homo sapiens
aactttttcataaaataattttgtgcacactttatgctaactgattcccttattgaaccccgaagaagctcaaggtctcaaggggaaaatacgcatgtgaaaggataaagcaattttggcct

SEQ ID NO: 76239 - DNA, 122 bp, Homo sapiens
catacaggccccacaagtgctggcctttgtcgccatgtgttacccttgccccaaccctgtcgccaccgtgggatccgggtccaaactgtatagtatataaatgcacgtaaatgtatgttaat

SEQ ID NO: 76240 - DNA, 122 bp, Homo sapiens
tctgttttttggtactaaatctttcaaagtcactctgcgttttaaacttccagcatgtaccgattcagaccagccacattctaggtgctaagtagacccctgtgggcaatgactgtcacact

SEQ ID NO: 76241 - DNA, 122 bp, Homo sapiens
ggacacggaacgcaaagaagcccagaaatttctgccaaagccctaacttcagtttgattccgcagggtatgctggaatgtgaaatacacaccagcttatccccactgaggcaagggagctgg

SEQ ID NO: 76242 - DNA, 122 bp, Homo sapiens
aatagacccaatgtgacattttgcatgcaggaaccccttaacagctacctccatattatgcgtgcttcatgaatggagacacctacgttatatgaagttctctattgggctgtaaacttcct

SEQ ID NO: 76243 - DNA, 122 bp, Homo sapiens
ccatccgtttgttgtcgtcctccaatcacaggggctcatcctcagggactactttgcaatcggcgcagagcgcagtgagaagagcttgaaaaaaacctctggtatcgggaagtgtagttcaa

SEQ ID NO: 76244 - DNA, 122 bp, Homo sapiens
tgtgccacacctgtgtgatcatatttgtgtgtgtatgtatgtcaatgtgtgagctgtgtgcgtgcagctgggtgtgtctttcctgagccaggtgtgcaagtctgcgagtgtgctgtgtgtgt

SEQ ID NO: 76245 - DNA, 122 bp, Homo sapiens
attcctattgacataggatgttgttctcagtcattctgcaagccagggacctccggccagcgacgccccgccagggcctcgcttgacacactacctgctgcaggagacagcccgtcaactcc

SEQ ID NO: 76246 - DNA, 122 bp, Homo sapiens
caaagaaccctccccggccgtttatttttcccagaaagtgacaattttctcttttcaggtcgtaagcacagaactgagggagaaactgtggctgaacaagaggaaaatgaggaaggagtcca

SEQ ID NO: 76247 - DNA, 122 bp, Homo sapiens
catccaccccgacatgcctgacctggatgtgccagcctggtgcagctccagccaggagttcgtagctgcccaccgagccctgctggagagccgcgaggtatcccgggacctgcaccattgga

SEQ ID NO: 76248 - DNA, 122 bp, Homo sapiens
ggaaataagtgagcactgcagcaactgggttccctgggagtacccacacatccaggctgccgggaactttgcattttcagagagcagagagtttcattagtgaccaccagcacagaagccat

SEQ ID NO: 76249 - DNA, 122 bp, Homo sapiens
atcggacgtttaggtgactctccctgtgtgtggctagtcagtgctgacagggccttagaccggagctgctgtcctaaccagtatatgataccgcacgcagtcccaccctctgtgcacctgga

SEQ ID NO: 76250 - DNA, 122 bp, Homo sapiens
ctcggagtcctcactggagtcctgcctagaacagagattgaactctgtgctggttaaagtcgaacccatttcccatagagcgggagtgggtagaaaaaaagcagcaagctgagagctgtctg

SEQ ID NO: 76251 - DNA, 122 bp, Homo sapiens
aaaagagatagtcttggtgccagtcaagatattcactaccatttgggggactgtagtcgacgtaaagcagatgtcaacaaaggccaagttactaaggaagaagtacataggggaatggaggt

SEQ ID NO: 76252 - DNA, 122 bp, Homo sapiens
gggggcggggtaggctctagggacttgggcaaaattactgaagctaggagagaaacaggacgaggccaagggatcaggttaaaattctttgcatgcagaatgaagaatgaggaggtgctgcg

SEQ ID NO: 76253 - DNA, 122 bp, Homo sapiens
acctgtccccgcgggtggaggcaggcccgtggagcaacgacgcccgggaggcaagagtcgcggcggccgcttcccgacccgacacccggcgccccccagactcggccgcaggcgccgtccca

SEQ ID NO: 76254 - DNA, 122 bp, Homo sapiens
ggaaagacatggagctcagaaagtagtacatgggcctgtggagggaggtgctgctccagacggtgaggatgatggccaggttctccaccaggacaaagaggtaggtgagcaggaagaggagg

SEQ ID NO: 76255 - DNA, 122 bp, Homo sapiens
ccgctcactaacaacctactgtttaaacaaagaaagctgcagacttgtggtacctgcgtgcgccccccacccccgccaccccgctgctcacgaagagcagcccaaggccaaggtgttgcatt

SEQ ID NO: 76256 - DNA, 122 bp, Homo sapiens
cgggctttattatggctctgcctgactccaacaaaaactgagcctggaggcccggggacacgagttaagatgaaaatacttattggagtacattacttcttgatgtagatggcgttttccgt

SEQ ID NO: 76257 - DNA, 122 bp, Homo sapiens
cacctgggtggctcaagcacagcttcaggtactgttaagccgggcacaggggccccgctccgcccggacagctgccgccttgctgcgctgcgcaccccagagagcctccggcaccgcctccg

SEQ ID NO: 76258 - DNA, 122 bp, Homo sapiens
cccgggtctctgcagaccgttggagacggagcagcagcgaggactagagcaacacaaggccggatgtgttctgagccggaagaggagtgtgggataggccgaaaggggtggggggtgggggg

SEQ ID NO: 76259 - DNA, 122 bp, Homo sapiens
taccccgctccggcttaggtactgcacccttcacacgagggttcgggcccgtaaggctggcgaaagaaagggcagcggaagtgcgctccctttgaaaccctcccccttagcccactacggac

SEQ ID NO: 76260 - DNA, 122 bp, Homo sapiens
tcatgccagcgcccacgtacgacgacatgttcatggagcccgcgctcatgttgcccgagccgctgcccatggcggccgccgacatgctcatgtacgtgttcatgccgttcatccccaggccg

SEQ ID NO: 76261 - DNA, 122 bp, Homo sapiens
tgctcggaaccccgcggtggtgtgcgggtgtgtccgtgtgtctgtgcacgtgcaggcgagcgttcccatctgtgtgtgtgcatctgagtctgggctatgtgtgactcagggaccagtctatg

SEQ ID NO: 76262 - DNA, 122 bp, Homo sapiens
tggctcagcctgtggctgcagtgccacagggatcctaggtgcacagtgttgaggagttgacgactcaacacttggctgggaaatcgaaatgtctttgatgtgagttctgtaggtagtggcag

SEQ ID NO: 76263 - DNA, 122 bp, Homo sapiens
aggagccctggcggcttgaccccgaatccttcacacagcccacaaagtagccagatgctccgaaagaaatgatgggagctggacaggaaatgacggccaaggcaacagccttgctttcccat

SEQ ID NO: 76264 - DNA, 122 bp, Homo sapiens
tttttcagcacgtgctgatccaccaacctcacgctttcatgcagagggaaactaggctagcgtagtatgttatgttgacactagggggcagcctcaccacatggagagattctgaaaaacat

SEQ ID NO: 76265 - DNA, 122 bp, Homo sapiens
cctgctgtgtttaagcagcaggtggtgacctcacttctccctttcctgagcactcagtcccgcatcccaggcggaggccctagggaagtctctgaagctgagcacagggtggactctccctc

SEQ ID NO: 76266 - DNA, 122 bp, Homo sapiens
cgccggggggccgcggcgctgctagcgctgctgtgcgtggcctgcgcgctgcgcgccgggcgcgcccaatacgaacgctacagcttccgcagcttcccacgggacgagctgatgccgctcga

SEQ ID NO: 76267 - DNA, 122 bp, Homo sapiens
gtagctcataagcctttgcagggtctggctctgccatccgcagaaggcagagtcaacatacggtctgtacttcctttgtcaccgtcactcacgctttttctgtaacccacgcaggccatcat

SEQ ID NO: 76268 - DNA, 122 bp, Homo sapiens
cggcccgggtccccagcagcagccgcaaccgccagcacaactggtgggccctgcccagagcggcctcctgcagcaacagcaacaggacttcgatcctgtgcagcgttataagatgctcatcc

SEQ ID NO: 76269 - DNA, 122 bp, Homo sapiens
gcctgggactctcgccccctggcggcgagggtggctgtggcagctgcagggaagcaggctcggaccccggccctgaacctgccacctggcgggtggggagaagcggactgcgtcgcctcggg

SEQ ID NO: 76270 - DNA, 122 bp, Homo sapiens
gtttgtagaattgaggagatgctacctaggggagaccatggagatccactgaagtggctgcggctgattgtgattgaatttttaagcatttactgaacattcctaatttgtctgtatggagg

SEQ ID NO: 76271 - DNA, 122 bp, Homo sapiens
acctcgtgatcagcccacctcggcctcccaaagtgctgggattacaggtgtgagccaccgcgaccagccagggaccattcttaaccagcctaaactgcacctggttcctcttcctgtctgcc

SEQ ID NO: 76272 - DNA, 122 bp, Homo sapiens
aaaatgctgagaccccactgggttgatctcaggccctgccacatggagagctctaggtgacgcctgggggaccttcgttgtgcccctatgtctgcggtccccgacagtcagggtctcccacc

SEQ ID NO: 76273 - DNA, 122 bp, Homo sapiens
tatagttccttctggttgtatggtttagtcataaggcacagggcctggctggcacagccacgccttcccacattcttctcacctcctctatgtcctctcccctagtttgggatgaatgcgct

SEQ ID NO: 76274 - DNA, 122 bp, Homo sapiens
agtttgtaaatagactcactttctgattctcacggaggggtttgatttgcggatggagaccgagtccaccctgtttgaatgcagccgcgccctgctcatgcgagctggccttctcttccata

SEQ ID NO: 76275 - DNA, 122 bp, Homo sapiens
cgttccctcccatcccagccccacgggaaccgggtgggctgaggggcagcgtcggtgaaacgcatcagagcggtggccctcggggtgtgtgctcctggcctgcagctctgcagaccctgagc

SEQ ID NO: 76276 - DNA, 122 bp, Homo sapiens
tcaaaagctgcttctacaaggaaacatacatataaacacatacatacacagggactttaacgtttatgtaaaacttccctaagatgttctttcacagagaagtgttaatttttctttctttc

SEQ ID NO: 76277 - DNA, 122 bp, Homo sapiens
gaagccccggggaggagcgcagggcagggcagtggccttactcattgggcagcttctccacgtgcagggccacggaacccgcctcatagccgtgctggttgttctcagggacgtccatgtag

SEQ ID NO: 76278 - DNA, 122 bp, Homo sapiens
ccgtgaggatgaagtgtgagaaattttgggaggtcctagttctaccatccccagtgtcttcgagacccacacccttggtgtggaagaaaggagacaagatgtcatacgaagaggttctgttg

SEQ ID NO: 76279 - DNA, 122 bp, Homo sapiens
ggttcacaaagaacattccaggtctctgggtaaccagggaaataaatgaaggctatgtctcggattcagagggtctgcatggacagttccgagtctggctgtgtattgaccatggctttatg

SEQ ID NO: 76280 - DNA, 122 bp, Homo sapiens
gtgccgggtccggtgctcctggagcgcggtagcagtagacgccgaagagccgtcgggtggcgtccgggaagccgaggctgcgcacaccaggcctgcggcctccgcagcgcgctcgcgggttc

SEQ ID NO: 76281 - DNA, 122 bp, Homo sapiens
cgttggacgagctgccaggtagctgaaagcaggcagccaggcagccgagacacttcccagcgattccagcctgggctccgcaggaagcctcgctgaatcccagccagctggttctaaccttc

SEQ ID NO: 76282 - DNA, 122 bp, Homo sapiens
cacttcatattcctcctccctaggcacccagggaatgactgcccagcatccctgcaaccacgccaggccaggggaccagtccatggcccatgctcacctgtgacatgtgacaattctgggct

SEQ ID NO: 76283 - DNA, 122 bp, Homo sapiens
tactccgctccaggaatcgtcaactaatataaaagcccaggcagccaggaagtcacctggcggctgatgtgtcacagtttcaggtatttatttccagcttactcttgctgtgtaaaaacaca

SEQ ID NO: 76284 - DNA, 122 bp, Homo sapiens
aaaactgctgtgtttcatcacttccatgtttgaagcatttgccttgatcatttgggtaagcgtaaatttttcacctgcaatttgatcattcttatttccttagcagtaattttacagttttg

SEQ ID NO: 76285 - DNA, 122 bp, Homo sapiens
gtggcctcctggggtcccatcatctgtgcggagtggcctcctggggtcccgtcactgatgcggagtggcctcctggggtcctgtcaccatgaggagtggcctcccggggtcccgtcaccgtg

SEQ ID NO: 76286 - DNA, 122 bp, Homo sapiens
gacaccaaggaggctgagggcgccccccaggtggaagccggcaaaaggctggaggagcttcgtcgtcgtcgcggggagaccgagagcgaagagttcgagaagctcaaacagaagcagcagga

SEQ ID NO: 76287 - DNA, 122 bp, Homo sapiens
tgctacagggctcacaaaactcaagaaaacagcgtactttgttttactggttataaaggacgcaaatgaacactcaaatgaagaggtacatagagtaaagcctaaaaagggttctcctaatc

SEQ ID NO: 76288 - DNA, 122 bp, Homo sapiens
gcatgacagcgggagactggacgctgaccccgaggagccaccacaccaaccacagctgctcgtgcccagacaactgcatgtgacagaaggaaacacatgttggtgatttgggtttctgtgac

SEQ ID NO: 76289 - DNA, 122 bp, Homo sapiens
gggggtgaccgccggagcgcggcgtgagccctcccccttgggatcccgcagctgaccagtcgcgctgacggacagacagacagacaccgcccccagccccagctaccacctcctccccggcc

SEQ ID NO: 76290 - DNA, 122 bp, Homo sapiens
aatgaatacctccgaagccgctttgttctccagatgtgaatagctccactataccagcctcgtcttccttccgggggacaacgtgggtcagggcacagagagatatttaatgtcaccctctt

SEQ ID NO: 76291 - DNA, 122 bp, Homo sapiens
gacaggcgggagccggatggtgcatgacctgagaggccaagtcaaggattttgaactccacgctaagagcagccggaagccgttcgctggcgccagctgagcacatgcgcagaaccgtgccc

SEQ ID NO: 76292 - DNA, 122 bp, Homo sapiens
agggcgggccatttagcgtcacaagcagtggtttctggtgacgtcacgggaggacgaccccggtggtctggagggtggcagggatcaggttctgtctgagcccccgagttgtttatctttgt

SEQ ID NO: 76293 - DNA, 122 bp, Homo sapiens
ttcatctgtgacctggagtcatgagcagtgtcctgtggatgcaacaccaaaatcttgctccgggcagccgcagccccactgcttccagcagggtttgtacttcagctaacagtgacctgtgc

SEQ ID NO: 76294 - DNA, 122 bp, Homo sapiens
cggatgccagccggctcgtggctccccgcaagcccgcttgggagcagcccaaggatttggcgcgggaagggccctaggccagtgatctctccagctcagaacacaggctccgggtcatttgc

SEQ ID NO: 76295 - DNA, 122 bp, Homo sapiens
gcactgcggggtttaatttacacccgctgggctgtttatatccccaggggcccacaaatacgcatctgaagatgcgcccggggccttcgcccctttccaggcttacttctcaacgcaagaag

SEQ ID NO: 76296 - DNA, 122 bp, Homo sapiens
ggttagggttcaggcagctggttacctttctgagggggctttttttttcctattgcctttcgcccatctgggctgtgctaaggtttttgtcccagtgtggcaattttccaggctaaaaaaag

SEQ ID NO: 76297 - DNA, 122 bp, Homo sapiens
cacacgtaaagttttacccagaatttcggttcaggggaattggaaaggacagttgtaattcgcttgttctgtaattgtgagatcggtgatgcacttttgaaagtagtgacagtgcctgagaa

SEQ ID NO: 76298 - DNA, 122 bp, Homo sapiens
atttgaaaaagaagggcaaagaccaatttgtgcaggttaggaaagtggagatgctgtggccgaccacacggtgaaggtgttggcacccaaagcctacgggaggcttttctaaaacaaggcct

SEQ ID NO: 76299 - DNA, 122 bp, Homo sapiens
ctggcccagatcaccccagctcaggggtcactctgggaggccccgtgctgtctcctctgccgggggtcactccaggaggccctgtgctggcccttctgccattgtgcccactggatgcaaca

SEQ ID NO: 76300 - DNA, 122 bp, Homo sapiens
tcggggcaggcaggagaaaaccccagactccttctcgaagccctcgctcgtagaagccctcgcctgtagacctggcattggcagtggagactccctggaggtactctcccccacttcgggcg

SEQ ID NO: 76301 - DNA, 122 bp, Homo sapiens
cggggtataccctggaacctgtgacagcgtcgcaaatcccgaagagacacgaaaatagggcgaaatagaaaatcccagccatggttcgccggtgccaacgctgctcctgccgcttctatccc

SEQ ID NO: 76302 - DNA, 122 bp, Homo sapiens
acagtaacttctcattttagagattcagtcagttaacaagtatttgttgaacacctgttacgatgtcttgcactgggctaaatgctggatatatataacaatagtgactgagacaaagatgg

SEQ ID NO: 76303 - DNA, 122 bp, Homo sapiens
ccggatcccaggcctccggccccgccgccccccggagcaggagcggtggatccactggtgcgcttccactgcgaacttcctcttgaagcgcatgccacactcggggcaggggaaaggccgct

SEQ ID NO: 76304 - DNA, 122 bp, Homo sapiens
cgggtcccggagccggctgtctgagggatggacgagacgagcccactagtgtcccccgagcgggcccaacccccggactacaccttcccgtcgggctcgggcgctcactttccgcaggtgcc

SEQ ID NO: 76305 - DNA, 122 bp, Homo sapiens
acgtccctggaggggaggcttcgatcaaagcctgggacgcaggggtctttctgcaggggacgccgctctcggctctaccctgctgtggtgggccggctctgggagggctggcttccgaccat

SEQ ID NO: 76306 - DNA, 122 bp, Homo sapiens
ttctttttgtctctccctcttggtcccagggtcaagcccgcagccaggcagggcagagaacgcccagagcttttgcgattcgcggggagctttaaactcgcgtagagggagagttcctgaga

SEQ ID NO: 76307 - DNA, 122 bp, Homo sapiens
gagtgcggagctggccttttctgtcccatggtgtgtggttctctgcagctccacttcacccgagcagcaggagagtgggccggccgcgtggggtctgctctcccaggggtatcagtgcccca

SEQ ID NO: 76308 - DNA, 122 bp, Homo sapiens
ctaatgagggagggacaggcatgtgctttccctgcaaggccaacctccccttgggcactgcgtcccatcctctgtcacggagtcttcactcctgatggtcttgctgctccatcatctctcct

SEQ ID NO: 76309 - DNA, 122 bp, Homo sapiens
tggccgccctcagggtgcaactgcgggagcagcacctctactaccaggaccagctgctgccggtcagcaggatcatcgtgcacccacagttctacatcatccagaccggggcggacatcgcc

SEQ ID NO: 76310 - DNA, 122 bp, Homo sapiens
gtgcacagctcgcgggtcatgatgagggtgtagtgcagcgggtggcagatagccacatagcggtcataggccatgatcgccaagaggaaacagtccgtgctgccgagggtgacaaagaagaa

SEQ ID NO: 76311 - DNA, 122 bp, Homo sapiens
gagagtcctttgtgtcccgaactctgcctgcctgtccagatacagcagaaccaggctcagcggctccagatagggcggaaccaggctcggcggctcccgcctctcccagcgcttgtcccagc

SEQ ID NO: 76312 - DNA, 122 bp, Homo sapiens
ctctcaccccttccagactccctggggcctctcaaagacgatgtgctactgttggagacacgaggcccccaggacaacagatccctctgtgccttggaacccagtggctgtacttcactacc

SEQ ID NO: 76313 - DNA, 122 bp, Homo sapiens
acccatcggtgctgcctctgttgctggtgttctcagactggggcgccgttgaggagcacgcgctccgtgaagggcacctgcgtgggtgccacgcgctccctgcccagcatcgctctcatccg

SEQ ID NO: 76314 - DNA, 122 bp, Homo sapiens
tcaggggtactagcatatgatacaaacatatatgattaaaagcattcactgttctcccaacgtccacacactcagaaaaacactgctacctgctcatgctagccttctcactatctacagca

SEQ ID NO: 76315 - DNA, 122 bp, Homo sapiens
gggagggacttatcctggggagtacacacccattccctatgcagaccagagggacaacaacgtcagacctttccactgacctctccgttcggcctggggctactccggacagttaggagggg

SEQ ID NO: 76316 - DNA, 122 bp, Homo sapiens
agccggaatgctgggggaggagggggccgggggcgggagctgggaggggccggggagctccgggtagttttccccaagagtccacacagggagagacagcctaaggaagtaaagaataacat

SEQ ID NO: 76317 - DNA, 122 bp, Homo sapiens
tgtgggttgagatgtcagagacatcggagcggatcaagtcgtcgtggccactgtagcggtcgctcttgaaggagaatttgccgtacaggtcactgagctggctgtgcttggaggaggggagg

SEQ ID NO: 76318 - DNA, 122 bp, Homo sapiens
gactcgggcttagggcctgctgtggaggcagcggcggacgccgagctaagcagtgggtatcgggcacattcctttcccagaagggagggttgcagcgccgcggggccgaggcttatggggcg

SEQ ID NO: 76319 - DNA, 122 bp, Homo sapiens
cactcggaaaaacaggtggaaaaaggtggccaaggggtgtctaggaaaggacccagaaggcgccctcactccaagagctaagcggatggtcactgaactccctttaccacttcagactttgc

SEQ ID NO: 76320 - DNA, 122 bp, Homo sapiens
tcctccaggcgccagaaatgcgtgtgggtaggaggcgacccaggtcagggaaccgtgtcccgctcgcactcccggtgagggctgcatggaggcgccgctgccgcggagcagctccgcaggtt

SEQ ID NO: 76321 - DNA, 122 bp, Homo sapiens
ccttcactccactcagctgtcaaaggaaggcattgagaagaggcattcctgggaccctcccggttctgaggccctaacaagctcaagtccccagaccgtgagccctatgtcatttgtcaagt

SEQ ID NO: 76322 - DNA, 122 bp, Homo sapiens
tgggaggacgtggaaggagggaccccggatgcagggcaggttcgtcttgtgtgttgagaacgtgctctccagggatctgtgttaatacaggtagcccaagcacagtgtccaatgagggaagg

SEQ ID NO: 76323 - DNA, 122 bp, Homo sapiens
tttattgtttcagatcacaggctccgagggaactgagtttatgatccacgctttcttcatcgctttggagagtacacgcctaccccaccccagtatatccgttaggtcctagtaaacatttg

SEQ ID NO: 76324 - DNA, 122 bp, Homo sapiens
tgcctcactaaggcaagaggtagcagctaccatcccggagtggccccagggatctagacccgatgaagtctcctgtccactctgccttctcagcccactgcttgcctctccaccctcagccc

SEQ ID NO: 76325 - DNA, 122 bp, Homo sapiens
gaagattagttgaaattctttttaagaaacatctatatttcctcccccactgcaaataggcggttatccttcttctgccaggaaatcagaaggttgttcttgaaaaagatgaattgagagga

SEQ ID NO: 76326 - DNA, 122 bp, Homo sapiens
gcccccttaaccctttgctcgccgccgccgccccagccgcgaccggttcgtgggcagccgcgtccactccccggaccagtaaacaaccccgggtccgtgaatcggctccgccagcaccagcc

SEQ ID NO: 76327 - DNA, 122 bp, Homo sapiens
tcaccagtgaagacatacactaaattgttctgtgcagattacccaagagaacggaacacccgtgcacttacaataacgtgcttctgttggtgtgaatttgagaatttgcggacctcggtgca

SEQ ID NO: 76328 - DNA, 122 bp, Homo sapiens
cagagccagaaagcaggaccctccctcacgggcaccgccagaaagcaggaccctccctcacgggcaccgccagaaagcaggaccctccctcacatgcaccgccagaaagcaggaccctccct

SEQ ID NO: 76329 - DNA, 122 bp, Homo sapiens
ggcagagtccggcgccggtgaggccccggggaggagtcgcggcaggacgcgtacgcccagcgctggagagccaggctctgcccctcacgcccctcgctagggtgctgtacaggcgggtgggg

SEQ ID NO: 76330 - DNA, 122 bp, Homo sapiens
tcggctgcgcgttgtgcgctgtcccaggttggaaaccagtgccccaggcggcgaggagagcggtgccttgcagggatgctgcgggcgggagcaccaaccggggacttaccccgggcgggaga

SEQ ID NO: 76331 - DNA, 122 bp, Homo sapiens
accgatgaccttgactgtgaggttgacctggtcctcgcccacagggttcttcactgtgaccgtgtagacgccctcatcttccttctctgccccctcgaccgtgaagatgctgcggtccttgg

SEQ ID NO: 76332 - DNA, 122 bp, Homo sapiens
aagaaactaacctcaaggccgaagctatttatggtggagcatgacgcgggaaagtacacgcgggaaaataagatgttgggaaacacagtggaaacaaccacaaggaagacaacagttgtgtt

SEQ ID NO: 76333 - DNA, 122 bp, Homo sapiens
aggcacttgggactcccagacgcaggatgcctctgaccgctgagtaaatgacaagggaggcgcggccgcggtacccgctcacctagcgcaaccgcctcgcgcggggagacctcggctgggcc

SEQ ID NO: 76334 - DNA, 122 bp, Homo sapiens
gcaaacccctgcagctgggctcaggaggagggatatgcactttcaactctaacaaaggctcgctgttgccaatggaaccaccattccacatattttttggcaggaagggaacctgtcctctg

SEQ ID NO: 76335 - DNA, 122 bp, Homo sapiens
ctcaagtcatctgtctcagcctcataaagtgctaggattacaggcttgagccaccacacccggcctacttgggttttttggttttgcttcttgtgttgcctggggtggcctcaaagtcccgg

SEQ ID NO: 76336 - DNA, 122 bp, Homo sapiens
aggctgaggcaagagaatcgcttgaacctgggaggcagaggttgcagtcagctgagatcacgccactgcactccagccaaggcaacagagggagactcagtcaacaacaacaacaacaacaa

SEQ ID NO: 76337 - DNA, 122 bp, Homo sapiens
tgcaaagcgccatcctggcataatttgccttggcatttgtcttttaacgagtattttaaacgatcttttaaacgaatataatatctttggaagcccttatttgcatgtattagttatgatat

SEQ ID NO: 76338 - DNA, 122 bp, Homo sapiens
gttcctggttgaattttgagctgaccagcagagcctgaagtctgccgattgtcgtctctacgaagcagatgactgaatacggagtttgataaatgcaagaagtcaaagccaacatctgaaga

SEQ ID NO: 76339 - DNA, 122 bp, Homo sapiens
tctctcgcatggagccgtgggcctcggcgttaaggcactcttcagctacaggtggcagcccgtttagctcttcttaaggtcttgtgatgtcattttcaagaggccagtaaagttctgtgtca

SEQ ID NO: 76340 - DNA, 122 bp, Homo sapiens
cgagcgggaccgtgtgaccatcccagcagcccaggtggctttggccaaacagctggctggcgacatcgccctggagctgcaggcctactttcggagcaagttcccggaactgccctttgggg

SEQ ID NO: 76341 - DNA, 122 bp, Homo sapiens
tgcagctctctctctctgctggctcatggcctcctgccgggtcactgggacagtttgtcacggcctccctgcctccagctgtcactaccaggctcctcttccctgggatgctgcagtccctg

SEQ ID NO: 76342 - DNA, 122 bp, Homo sapiens
ctgggggaggggggtggctggaaaacagatttcaagtcataaagtcagctaggaacaggccgaggcagggagaactctccactcggaggaggagctggggtcctcttccatcccgtcttcat

SEQ ID NO: 76343 - DNA, 122 bp, Homo sapiens
cccgcttccaagtgccccaaccgcggctgtagtggaggtggaagtagagcttttccaccacgaaactgcagctgccgtacataaagaaggaccagagcgacgtgtggccgctggttgtcccg

SEQ ID NO: 76344 - DNA, 122 bp, Homo sapiens
tgtgcagtttcagcaaagctccgaggaagttggtccttttgttccactatttatagattgcgtcaacattgcgaaaaggagaaggcggagcggtggcccctccccctcccctccccccgccg

SEQ ID NO: 76345 - DNA, 122 bp, Homo sapiens
ggcccggcgtggggctcgtgtgcctcccagctactcgggaggttgaggcacatttagaatcgcttgaacccggtaagcgcaggttggcagtgagccgagatcgcgccactgcactccagcct

SEQ ID NO: 76346 - DNA, 122 bp, Homo sapiens
gtgtccagtgatttcctcacctgaaactcttttgtaagcagctcatgttgacatcagctccgcccaggcagccacggggccctcccctgccagggggcagcctctgactttcggcctccacc

SEQ ID NO: 76347 - DNA, 122 bp, Homo sapiens
gcaacacggaggctgccccgcgcagggtgagggctgtcaccgggagagactcgcctgccacggctcttgctgcatgtcctctgctggttcagttttaaactttattgaagtgcaaacgcgga

SEQ ID NO: 76348 - DNA, 122 bp, Homo sapiens
atgctctggtcccagaagcttttttgtttcagccccatagtaactaggcaaatctgcaagcgcatgtctttcatgacgtgttctttgttgaccattttctttcccctactggattgtaagta

SEQ ID NO: 76349 - DNA, 122 bp, Homo sapiens
agctgtggattttggctgcccccgcggtcccagatccgtgctgctgatgtctgcttggcgcgctggatgcctctctgtggaatctgtccctggctgggtcttctgttgagcccccctgtgcc

SEQ ID NO: 76350 - DNA, 122 bp, Homo sapiens
tttggtgactgtccagctagcaggctgtagggctactcctgcatttagcatagtcatctgcgtctaagaaactatgacctgacatttacgaagtctcatgtttgctaagtggacttacagac

SEQ ID NO: 76351 - DNA, 122 bp, Homo sapiens
aggaaaatgactgacagctggaatgaggtttcttattggtccaggatgtttgcctggacccggaaaaaggtgattctgaagaaagtgcccagggatctaaagcaagtgttccctccttacaa

SEQ ID NO: 76352 - DNA, 122 bp, Homo sapiens
acctttaacctcctcccagttgggctcccagtctcaaggcgctcaggtgaaggagcctgacgggatgcccgtgctcccccactcccactccctccgccgggcttccgtgcgcctgacggccc

SEQ ID NO: 76353 - DNA, 122 bp, Homo sapiens
aaagacttggctatttggattctctgatcagcatattcttacataatagacaaatctaagcgggagccaggttgccatcaatggcttgttcaaagagaatggatcataagaacgggggtgag

SEQ ID NO: 76354 - DNA, 122 bp, Homo sapiens
cgcccggggcgcgggggcccgaggggaggccggaagggggcctattcgcactcccctccccgggaccggctcacgaaggggccccctccaggcaccctcccagtcatgcagaccctacatcg

SEQ ID NO: 76355 - DNA, 122 bp, Homo sapiens
cctggggcgcggggccgggggcgcggggctaggggaggcgccccgggaaggtcacgggagcggaggcgcggcgagtggatcgcggcgcggtgggtgcggggagccgaggcgggcggcccccg

SEQ ID NO: 76356 - DNA, 122 bp, Homo sapiens
cacggaaacagagaaaaaagcaactttgtaaacaagaaacctgaccaaggcagactcacccgcgcaggcgctgagtcatgttgacagcaggtgcccttgctaggatgtgatgggcagggcgc

SEQ ID NO: 76357 - DNA, 122 bp, Homo sapiens
atgctggactgtaccgtaagcaacaagtgaaatgagttcagtgatctcattctagtccttcgactcctgtccacatcactaagcgactgcacagcttggcacaggccaggatgagtcagcag

SEQ ID NO: 76358 - DNA, 122 bp, Homo sapiens
gcctaccgctgccgaggaaactgacggagcccgagcgcggcggcggggctcagagccaggcgagtcagctgatccggcccaccccgctcggcacccgagagagacccctagcggcgccgccg

SEQ ID NO: 76359 - DNA, 122 bp, Homo sapiens
gaatgacgggcactggggctttgatgggcattgggtgaaatgggcagagtggcgcttacccgggatggcggtgaagtgggacggggaggtcatcgtgacaaggggcggcatgaggtactggg

SEQ ID NO: 76360 - DNA, 122 bp, Homo sapiens
tctgtaggttcaccatccggggctggggcgctagtctcgctttttggccagagagtcgtgcgccgtcactggtttctcatggcagccactccaacctgcgtgcgccttccctgatgcgccct

SEQ ID NO: 76361 - DNA, 122 bp, Homo sapiens
agatcaagcagtaagaggtgaagcgagagctagaacaagggcccagattctaggaccaagcggctcttgcaagaaaatccccttgtggcctgagaataaagttttaaccagcagcaagggcg

SEQ ID NO: 76362 - DNA, 122 bp, Homo sapiens
ggctctgcgacgggaccagttagggcctccgttccgatggcggattcctgacgggaggcccgagggtccgggaatggcggcgtcctgaggtcgggcccagggcaggccaggctgagcgccac

SEQ ID NO: 76363 - DNA, 122 bp, Homo sapiens
tgagatagtaagataagatgaaggctattataataactgtgttttaagccactaagtttgcggccatttgttaaagcagcaatagaaaacatcctgcctacccaactcaacgtctcattgca

SEQ ID NO: 76364 - DNA, 122 bp, Homo sapiens
aaaactaaaggtcgttgagtttgtctatttagtcagaagtttttgctgccctgcctagaacgcgacccagccaaaattaaattgtctcttcagtctacatatgtatgtgcttgtgacttcac

SEQ ID NO: 76365 - DNA, 122 bp, Homo sapiens
cagcgcggtgccttctgggatgcagaggggcgccgcactccatggtgcgcgataggattgcgttgtcaaggtaacggttgctaagcgtcgtcagacttcggctgccgctgctgagaagcggt

SEQ ID NO: 76366 - DNA, 122 bp, Homo sapiens
tgtgagcctgtgggaggtacatgtttggcacttgcttaaacattaggagggtgggccgggcgtggtggctcacacctgtaatcccagcactttgggaggccaaggtgggcggatcatgaggt

SEQ ID NO: 76367 - DNA, 122 bp, Homo sapiens
acgcgctgaatgtggaaagttgactgggacccagtagtttcccatcccaaacctgctttccgagaagggcttcaaacccaaaatgtgaatcccgcctcccctctcagccagaactgtggact

SEQ ID NO: 76368 - DNA, 122 bp, Homo sapiens
catgaatgaacgaccagacccgactgaattattttttttcttcaggctcctgagtctggtcgacactttcagagtagacgtttccaagagatgattaaggacacacatccgcgcgtctgtac

SEQ ID NO: 76369 - DNA, 122 bp, Homo sapiens
ccgcccgctcctcgtttctttggaggttggcccttccagctccagttctgcccaggtgagcgcccatcccgcggccggccggtcctggccctttgtcgcgatgacgtggcggagttgagggt

SEQ ID NO: 76370 - DNA, 122 bp, Homo sapiens
gcgccgccgccgcccggtaactccaggcgcaactgggcgcaactggggcagctgcgacaccgaatccctcacatctgcaacctgggtgctgcggccactgagaaaatggaggcgcagaccaa

SEQ ID NO: 76371 - DNA, 122 bp, Homo sapiens
ttaactgcacgcggaagagcacgcagtccgacctggccttcttcaagttcccgcgggacccggccagatgccagaagtgggtggacaattgtaggagagcagatttagaagataaaacacct

SEQ ID NO: 76372 - DNA, 122 bp, Homo sapiens
tctgccagggtgggggcttgagactaagaatggaggtataggcagaggtgagggtttcagcgtgggtttcaagtctgtctccctggttctgtgggtaattctcaggagggtggagggaaggg

SEQ ID NO: 76373 - DNA, 122 bp, Homo sapiens
tcgggtcctcggggtgggggcggacgtgttgtgaggagcagggatacgtgttagtgcctgcgcgaggtcaggtagtcaagggtccacaaaaagctgagagaggcatcaggccgcgatgcaag

SEQ ID NO: 76374 - DNA, 122 bp, Homo sapiens
cgcgctgcgcagggagggcgcaggggagggaggcggtggcggcgggcagggaggagcccccggccccgcccgccctccgggccgaccctcacttgcctgaaaccggctcctcgacggccgcc

SEQ ID NO: 76375 - DNA, 122 bp, Homo sapiens
cgctaagataggcggccaggggtgagcgggcagggccggccagcaggccctgaaagcagccgggccaccagcgcgtcccgagtccccctcgcaccgccccgcttgccccgcccctgccctct

SEQ ID NO: 76376 - DNA, 122 bp, Homo sapiens
cgagacgcggcaagcgcggagccgttccttagcaacgagttgttgacatttccgagagagcgggagcgtctgtacctctgcggcgtcactgggagcccgacggaaaactgcgctaaaggctt

SEQ ID NO: 76377 - DNA, 122 bp, Homo sapiens
aaaatgacactattttgtccccaaagaacatagatcaaaaccaaaaaattgaaagagtctcggctgccctaaaatgagagtttgtctttgagttggatcatgactctgttttgaggaaataa

SEQ ID NO: 76378 - DNA, 122 bp, Homo sapiens
cgcgacatcgcaggctgctccctccccggtgggtccttcccctgtgaggcggcggccgggcgctgatgggcactgacggtggtcactaggccgactccgactagagtcctgttagcttgaag

SEQ ID NO: 76379 - DNA, 122 bp, Homo sapiens
ggccgtgggacctgcttgaaggaggggtccggggcagccgtctctgagtccccctcaccccgtcctagtcctcaggcctctccgaggtcgcattgcttcgaccaggcctgggagctgcgctc

SEQ ID NO: 76380 - DNA, 122 bp, Homo sapiens
gggaaataaaagaaaaaaaagatgaaccatctgtagacccgcaccccagctcatgtctcccgaagaacaaagacaggtaaatagttaactaccggcatgggcataaatactgcaacagaact

SEQ ID NO: 76381 - DNA, 122 bp, Homo sapiens
agcagcagcttagaatgttggagtcagtgaattctagcatccaggtgacctcagagttcacggtgcccccttctcccacccaaacacaggcaccagacttggccccaggggctgggaaggag

SEQ ID NO: 76382 - DNA, 122 bp, Homo sapiens
tctgcggcctcctggcgtcaagacccggtgagccagcccagaccctgacactagtccgggcgctcgtcacactgcggcccgactccctgcaaagcccggggccctccctgtctgggtccctt

SEQ ID NO: 76383 - DNA, 122 bp, Homo sapiens
acaaacattgctattattcagctcatttcaaaggattccgctgctgccatttgtgagagccgctggaggctgagtgaaagtcattttgaaagactgatccaaagaagaatggaggccagagt

SEQ ID NO: 76384 - DNA, 122 bp, Homo sapiens
tccactcgggtaaacttcggagtgagttacctgcactcggagaagggccttacctgagcgcgcctctgccaatggcagctcacctgagggagctccccagccaatcatcgcgcagctcgtcc

SEQ ID NO: 76385 - DNA, 122 bp, Homo sapiens
gagagcaggagcgcgcgtggctgaggaaagaaagggaaggcaaccgggcagcccaggccccgccccgccgctcccccacccgtgcgcttataaagcacaggaaccagagctggccactcagt

SEQ ID NO: 76386 - DNA, 122 bp, Homo sapiens
tcgtgccccacccccagagcgctccagccgtggagggggcccggggttggggccacgccccgccccgtccccagctcgaggcctagcccgtgcccatcccagcaggcccgggcgggcagcga

SEQ ID NO: 76387 - DNA, 122 bp, Homo sapiens
agggagaattcccacagattcccagaaataacatttccaaacaatggctccttctgtagtcgtctttatttagagcagaattcagactcagctggtatcccccagggcaaccccaggatggg

SEQ ID NO: 76388 - DNA, 122 bp, Homo sapiens
cagaacaacttctgctcccagaaagccttgcgttccccggacataaagaggctttgagctcggggagccccgccccgtgcggcccctcccacgggcgcgggccccgggcggcagggggcgtg

SEQ ID NO: 76389 - DNA, 122 bp, Homo sapiens
ggaagctgaaagccaaatctggcaagaaacgaagcatggcctctggagtggctgtcagaccggggagagctccactgccagactgcccaacaattcagaggctgctaatttatctgatgtaa

SEQ ID NO: 76390 - DNA, 122 bp, Homo sapiens
caggaatcctcaggtggctgtggctgctatgtgctgtgaggccttggcttgtacagggagcggggacacacagaaaggactctgcttctgtttacctttgtagtcctgacccagttccaggc

SEQ ID NO: 76391 - DNA, 122 bp, Homo sapiens
cagggaccatcaaatgagagcagttctggtcattactgcagcttcagttatgagtatgcacgtagtaacaggtgcacttcctgcatgctgctctgggccagggcctgttccaagcaatttat

SEQ ID NO: 76392 - DNA, 122 bp, Homo sapiens
gctcgcccgtgtggatgcgctggtgctgcagcaggctggaggtgcgcgtgaaggccttgccgcactcgtcgcaagcgtacagtcgctgggccggggggtcggggacaatagggcgaggtcgc

SEQ ID NO: 76393 - DNA, 122 bp, Homo sapiens
gccttgggctcgcttttgaacaattgtgtcccatgcaatgcccgtggttagcccagagagcgcccagagcctccgcacgggctcgccggtgctcgctcgaggggcgcgtggccaggtccggc

SEQ ID NO: 76394 - DNA, 122 bp, Homo sapiens
cacctagaagagccatcaaaacaaggctgttggtcactgatggctcaaaagcaccagggacgctgggcgaggaaaagggagagcttcgggtagtggggagaggcttgggatctaggcacagc

SEQ ID NO: 76395 - DNA, 122 bp, Homo sapiens
aaagaaagcgtcccaaggcgcctggctcaccgctccagagcgcgctcccgggtcggcctccgccctccaagccggagggaaatgctgtggtcccgccgtccgcctgcatcctccagttcctt

SEQ ID NO: 76396 - DNA, 122 bp, Homo sapiens
tcctgctggggtggtgggcttcgagcgcgggtcccaggacgcagtggggcgcagtgcctgcggcaggcggcaggaggcgagcgtggcccaggaactcccgcgggagggtcgggacggggcgg

SEQ ID NO: 76397 - DNA, 122 bp, Homo sapiens
tgttccttcagatgtgtccagagtttcctccttctggtgggttcctggtctccttgacttcggaacaaagccgccggaccctcacggtgagtgttacagctcttaaagatagtgtgtccgga

SEQ ID NO: 76398 - DNA, 122 bp, Homo sapiens
gaggaggcttggcggtgaggaattaaagtatttggccaacagccaggaggaaattgaggccgacaaccacaggagtgagctgagaagcagatcttcccgcagcagtgccttcagctgactgc

SEQ ID NO: 76399 - DNA, 122 bp, Homo sapiens
agtccggagcccagcggtcatagaaatggagcttttgggccaggtcggggatgccatgcgcggccctgacccgcgcccgcacctcgggcaggctcccaccctcctcctgggccatgctcctg

SEQ ID NO: 76400 - DNA, 122 bp, Homo sapiens
agctgtcatggcaaccataatttaatcctccatgagtgtcttggaacacccaggcacccccggaaatgaggagggtgattcagcgggcggcacactcctgtccttatgagtcaggaaaatac

SEQ ID NO: 76401 - DNA, 122 bp, Homo sapiens
tggcgaagagggtgtagggaattggttggcattagtataatggcttcattgcctcttgctcggcttctctctcccacccatcgccaccgcgtccacactccgccgcattccagagaaaaaga

SEQ ID NO: 76402 - DNA, 122 bp, Homo sapiens
gggcctctccttactttcttcgtaagtctctctttctggttctttctctctgtttttccccgtgtgtgattttattaccagttttctctttccttccttctttggaatgtacccggtattat

SEQ ID NO: 76403 - DNA, 122 bp, Homo sapiens
gagagtgactaggaggtcagagaggcagccgcccaccccacgcactccctgcttgtaagccggggccgcattgttgtgttaccacacttctgttttagagcctgttacggttttgagttaca

SEQ ID NO: 76404 - DNA, 122 bp, Homo sapiens
aggcctcccagtgttcccgggaatatgcaaatgccagggcgcaggcctcccaaatcagaccgcgaaggctcggggctgcgagccgaatgcccgccgagctgcctgggaacgggaaccgcgca

SEQ ID NO: 76405 - DNA, 122 bp, Homo sapiens
ccggcctgaggcgcagcctggtcagggagcgcccggggagagctggcggcagagggcagccgatccgcccccagcgcgcgcgtctcggcgccaggagccgtcccggggcgtgttggcgagcg

SEQ ID NO: 76406 - DNA, 122 bp, Homo sapiens
aggaccttatctgtatctttgcctttctccctgcctgggcagtgtggcagaggcacactccggcttgttgacaacatgatgcacacacactttttatacacacagctctgaggagataaggg

SEQ ID NO: 76407 - DNA, 122 bp, Homo sapiens
tcatggtggatccgggctgaccctaccctcatctttaagaacacctcctgggcattcgtccggccagccgactgcttttgggagctaagagaaagagcttgaggtgaataatctttctggtg

SEQ ID NO: 76408 - DNA, 122 bp, Homo sapiens
gtaagagccagcccctcttgcctccctggctcttaggacccccatcgcaggggggcgaggcgccccccgccatgcaaggagtaagagccagcacctcttgcccccctggctcttaggacccc

SEQ ID NO: 76409 - DNA, 122 bp, Homo sapiens
tccaggcccttctttctgcgcagcgcctcgaagatcttgtgctgcaggtataggttgtagcgctgggagcggttccgctccaccagcagggaacggtactggtccaggaggtcgctgcgcag

SEQ ID NO: 76410 - DNA, 122 bp, Homo sapiens
acaggagacacatagcccccaggggcttcaaatattctttgtcataaaatcacccagttccgtttaaaaccctgccagcgagcttggttcagtgatctctgcagctgtgacttcaacaggtt

SEQ ID NO: 76411 - DNA, 122 bp, Homo sapiens
gagacaaggcaatcccatcctctcttcacacatttgtgcaggtgcagctttatttcccaccgtgcggtcccaggaggccgcctggtcttctgcgctcacttcctaggcatccctggccgccc

SEQ ID NO: 76412 - DNA, 122 bp, Homo sapiens
gggatataacgtccactcattgagggtctagtacaataatacataaaaagtgttttataacgtaaaaggactacataaatataagagattcttatagtgctgataataaattccaactggaa

SEQ ID NO: 76413 - DNA, 122 bp, Homo sapiens
cctggccatccgaggcgcgacggcccacgcccggctccgtctcacccctagcctggtctacgccctgaacctgggctgctccgacctgctgctgacagtctctctgcccctgaaggcggtgg

SEQ ID NO: 76414 - DNA, 122 bp, Homo sapiens
ggcacagaaaaaaccaataaagctgagcccagctcttaaaaaaaaaaaggttgataaaaccgacaaaaaataaagaagtagtttatcgtggttctaaaagaaaggcgagggtttttctttct

SEQ ID NO: 76415 - DNA, 122 bp, Homo sapiens
tgaccgctgacagtgaggccactgaccggatgtcccgcaccgcctccatgacgttgatctcgcacataagcttctttgttacccaatcaagggcagccacatgacctcggcgccctccaaaa

SEQ ID NO: 76416 - DNA, 122 bp, Homo sapiens
gcagaggaggtcacgtgggccagaacccaggcggaaatcggtaggtttaataacaacacacgaggccgaaacagcgtccccaagggttgcccacgatggctttgttctcgccagatgtgcac

SEQ ID NO: 76417 - DNA, 122 bp, Homo sapiens
atacatgtttggaattgatcttttacttcattcatcaagtctaaatagcataatcccctccgatgagagtagagttgaatgctttatattaatagacataaattcgattatgaaagagctcc

SEQ ID NO: 76418 - DNA, 122 bp, Homo sapiens
tgcctttgtgtttgatgccgtcgtgtgggaaaagtcaactccgatgccaccattgcgggccggacgaaggatgctttcttcctagaggctccgagctgagctgcgaactcgccccccgccct

SEQ ID NO: 76419 - DNA, 122 bp, Homo sapiens
gaggtcagagagtttcaaaaattaatgagattccctgtggagttcaaatagtaatatctacgtgagctgtcacaaaaagataagattatgatggtatgttttcaacatagatttaactgtct

SEQ ID NO: 76420 - DNA, 122 bp, Homo sapiens
tggaggggctgggtctgagcttttcattggtttttctggtttgagaggtcggtacagagacgcacgcgcacatcagcaaaacacgcacttggaacgaagaaacacggaactaggcaggaaga

SEQ ID NO: 76421 - DNA, 122 bp, Homo sapiens
tcttgagattttagcccctcagtgctgacctgatggagatgtgccttttttttttttttccggggaagtattcacttcaactcccacaacccccgaggaatgactagtgggtttctttcccc

SEQ ID NO: 76422 - DNA, 122 bp, Homo sapiens
agactcgcctgggcaacatagtgaagcccccatctcaacataaaatttaaaaattctgcacgtgtggtggcctgtgcctctagtcctagctacttggaaggctaaggcaaaagattgcttga

SEQ ID NO: 76423 - DNA, 122 bp, Homo sapiens
gcccccgcacgcacgcacccacgtactcgcgcacgcgcgcgccggccccgcccaccgccccgctgtggcccctttggaccgcacgagccaccgtccgcacagccccgccccgcacggccagg

SEQ ID NO: 76424 - DNA, 122 bp, Homo sapiens
cctgcaaactcgccctgccgggcgcggagtgcaattaggctttggggtggtttggctctccggctttccgtagcctctggccccgccccctagcaacgcgctggcttgtgttaacaaccggc

SEQ ID NO: 76425 - DNA, 122 bp, Homo sapiens
ggatgccctgatgcccctgctcctcccccgtcccccgcccagggatgcacacacggggcacgagtcgggcaggaaggaaacgcagataccaggcaggccctgcatctccggcaccttggact

SEQ ID NO: 76426 - DNA, 122 bp, Homo sapiens
tcttcattaaaggggctgggtggaggtggggagagagagaagtaattttcataatctgtacgactgtattattgggaacaccagaataacatgtttcaagcgatcacagagacttcagctct

SEQ ID NO: 76427 - DNA, 122 bp, Homo sapiens
gctggacagatgcctttcgctctccggacaccatcagggagggaggggaacctcagggcccggagcacatccacagggggtgcacctgggagagtccatgattatcaggagaagggacatgc

SEQ ID NO: 76428 - DNA, 122 bp, Homo sapiens
ctctgacccaggctgttgtgtggctcagaaggaaattccaaggccatgactacaacttcccggcacaagtcattgttggtgctcccgggtactgggtcacctcaagagacacatccttctct

SEQ ID NO: 76429 - DNA, 122 bp, Homo sapiens
tccccgcccccgctggacaatgcgtgctttgagactcggtggcctgcaggcagcgggagacgaggggactgggcagccttcctccaaggggcccgcagctgggggagcgccaggcagggagc

SEQ ID NO: 76430 - DNA, 122 bp, Homo sapiens
tcacaggcatcatagctgcggaggacaattcggcagtggcagtggtagttgttctggtttcgggcattgatgacgactgagccatctgggagctcatagggctgaggggagaggacaggacc

SEQ ID NO: 76431 - DNA, 122 bp, Homo sapiens
tctgtcactgattcatcattttttatttgtctgactcaaatccaggtagttttgctcaatcgatggcaggctgttaaacagcatgtgtgtttagggcagcaattcattcatccattttgaca

SEQ ID NO: 76432 - DNA, 122 bp, Homo sapiens
caaggtcctcacagtacaattttctctctgcctcagcgcctcctcctcccctgtaagtgacgcagatgtgcactggggcctatacggagagatggagggagggagggagggagggaaggctt

SEQ ID NO: 76433 - DNA, 122 bp, Homo sapiens
gcatgtaaggctcaaagcagggacctgaaggctactcactgctttaggggagcttccccacgccacaaagctgttcatgccacaaacatttactgatcacttcctgtctgacagaaacagaa

SEQ ID NO: 76434 - DNA, 122 bp, Homo sapiens
gtttcccgggaggaacccttcccaaggctgggttatcacctggcaaaagaaggggacttccgaggtcgtttggtgaaggccttcagcagatctgtttcacgagcaaacttcagactccagct

SEQ ID NO: 76435 - DNA, 122 bp, Homo sapiens
ctggacctcgggctcaagtaattctcacacctcagcctgtccagtagcaggggctacaggcgcgcaccaccatgcccagctaattaaaaatatttttttgtagagacagggtctctctatgt

SEQ ID NO: 76436 - DNA, 122 bp, Homo sapiens
gatggactgaggttacgaatctcttctctgatttaacccaaagtttagatgaggacactgcggatcaagtattcattgacctcttatcaccggccaggctctgtgccctgccgcaacagaca

SEQ ID NO: 76437 - DNA, 122 bp, Homo sapiens
tgggtgcgggtgaggggaggactcaggactctgggctgggtcccgcttgagagaagcgggcggggagggcgcgggtgagtcacggcggcccctctgcgtcgccgctcggactcagccctggc

SEQ ID NO: 76438 - DNA, 122 bp, Homo sapiens
agcaacctgtaccttggaaatgacaaacactcctcgtggtcgtctgatcccagatcattgcggagtttttagaaaacactctaagttctatttaaatttattgcttggcatttctgggacac

SEQ ID NO: 76439 - DNA, 122 bp, Homo sapiens
ttctccccgacacgttttacggctgttttccgggtcttcggtctgtttccacttcagccccgcctccagcattcttattggaaaaaggtgaacaggggaaagttaacagaaccatcgtggaa

SEQ ID NO: 76440 - DNA, 122 bp, Homo sapiens
ttttgttatggtagcctgagcagactaatacagattctaaggtcagtggaaaactacaagcggaagcactcagttcagataggactactagtggcttagacccttcaggaacaaggtttggg

SEQ ID NO: 76441 - DNA, 122 bp, Homo sapiens
ggtattcaaacatcagcatgaggatccagtctaacagggcggggagggggtcagccctcccggaaccacatgaacacagggcaggggagggtagctccacacagcatgcttgaggtgctgtt

SEQ ID NO: 76442 - DNA, 122 bp, Homo sapiens
ggtgcccagcctcggctcctcgcattgcccctcccgggagaaccccactccccgccctcgcgggttagtccttgcactgcctgtttggacacaaagctctgtccatactagcgatgcccgat

SEQ ID NO: 76443 - DNA, 122 bp, Homo sapiens
gccctgaccaacgcgtggtgactgacaggcgccacagtatcctacagacaccacggtgaccgacgccatggtgaccgacgccgcagtgaccgacaccatgtctgtctccaccctggatcccc

SEQ ID NO: 76444 - DNA, 122 bp, Homo sapiens
tggggctggggcacacgtcggtggccacatgctcctggatacaaatggtcgccttttccccgcaccgccggtgggggggtggtagaggcagcgcctccccgcccgggcacggcctggcccgg

SEQ ID NO: 76445 - DNA, 122 bp, Homo sapiens
agttctgatcttttgagaacaacttggatttcacaaatgtttgttaatcatggtttcgatcgaaagggaagagcttccggtttttatttcttgcaagctaacgtttcccactctcatctggc

SEQ ID NO: 76446 - DNA, 122 bp, Homo sapiens
actaaacatgtccacgtgaatgcaggcgtcgaatgcccaagtacatgtgaatacaggtgtcgaatgcccacgtaaacatgtacatgtgaatacaggcatcaaatgcccacgtacatgtgatt

SEQ ID NO: 76447 - DNA, 122 bp, Homo sapiens
cgaattaattaatttatttcacctgggaaatcgcacttatttttcaactgggaaggcaaacggctgaccttcaagttactaacatctacaggacttgaaaagagaagggagtctgtaacctc

SEQ ID NO: 76448 - DNA, 122 bp, Homo sapiens
gcgttgttcatggctgaggcgatgcattaggaagatcctggacctagagaacaagtcccccgaacgctgagttggaggcgggacttcgggtgcgcgttggtgcgtcaacgtggtgggggggt

SEQ ID NO: 76449 - DNA, 122 bp, Homo sapiens
gctcccacctcctggcctgggcccggcgggaggcaagctggcctcgtggccagggagactcgggagatcctatcggccgggcctggcagggcgaggtcggctcctttcctggtgaatggggc

SEQ ID NO: 76450 - DNA, 122 bp, Homo sapiens
gagaaagcgttccaggcagtttcctgagcttcggccctcgacgtagcaaaagagcccgggcgcccacgccgctctcggggtcttctactgccaccgggacaaagccctgggaggagctcccg

SEQ ID NO: 76451 - DNA, 122 bp, Homo sapiens
gggggcaccctggagggccagccaggaagcagggcgaggcgagaggggacggagaagccgcggagatgctgtcacagccgcagcgggcgagcagggacccaccattcccctgtccccgcctt

SEQ ID NO: 76452 - DNA, 122 bp, Homo sapiens
acaggaaaaagtgaccaattctgaggctgaaaagtgcctattttaggggtgggggcctcgcggccctaaagcagcttcccttcccggagatttcagctccagggatcgcccagcgccctccg

SEQ ID NO: 76453 - DNA, 122 bp, Homo sapiens
gattagagaatttgccagttctagctctgtcactcaattatccctatcattctgttaaaacgtgtgtgactttgggtaatttagtctgcaggctctcagaagacaagttttctaaaatgtaa

SEQ ID NO: 76454 - DNA, 122 bp, Homo sapiens
gacgaaggtgatgagcgcggctgacggctcccgggggcagtgtggggtccagtctgaagccgacgcccctctcggtcaggctttcagcagcagaaggcagtggactcttcaccatttcttcc

SEQ ID NO: 76455 - DNA, 122 bp, Homo sapiens
gctttttcacacctcaactcaggattcatttcacacatttctaactcaacccagggtagacgggaatcaaaatgactttcagataagggcaaactggcttatcctggtgtttcaatccaaac

SEQ ID NO: 76456 - DNA, 122 bp, Homo sapiens
taattatctgtggttcctgttgcttgtttttattaggtttttgattacttgacaaaacagcgcttaaaagggttaagggtttttaaaaaaattcatgtaactgtctgtatttcattttgaag

SEQ ID NO: 76457 - DNA, 122 bp, Homo sapiens
ttgcacttggtgatgaagaggacggagctgcagacacacgcaacgccatggatggacgttcgcaacactgcgccgcataggacaggcacacagcccgtgtactgggattccatttgcatgat

SEQ ID NO: 76458 - DNA, 122 bp, Homo sapiens
ggctccggctgggctcccttgcttccaccgggagcacggctcatcccagctcagaggccgcggccaacacctgcacgcctttaccagagagcgacgcaacccccaacctcaagcacaggcgc

SEQ ID NO: 76459 - DNA, 122 bp, Homo sapiens
ccaagtctaaagggtcatgaacctctgagtgaaaacaccaagtgcaggatctgtgagaaccggcaacacccagtcacacgcagagaaccctccgctgcttcttaaaaataacattgactgtg

SEQ ID NO: 76460 - DNA, 122 bp, Homo sapiens
aggagggcgtctgggctgcacctcaatccaggctcgcagggtcggagcccggcaaggccgcgagctctgcccgtgtgtctctgtgtgtgtgtgtccatgtgtgtctctgtgtaagtacgtac

SEQ ID NO: 76461 - DNA, 122 bp, Homo sapiens
ggcagtatggcggaggccatgggggcccctcggcattcacacacagcctggcctcccctgcggagctgcatggacgcctggctccaggctccaggctgactgggggcctctgcctccaggag

SEQ ID NO: 76462 - DNA, 122 bp, Homo sapiens
cgccgagggacccttctccgtgcccaccggtccgcacccccgggctcagcctgtgccattcggtctagccagaggcgcgtcacccagccggcagcccccagccggattcactgtattcttga

SEQ ID NO: 76463 - DNA, 122 bp, Homo sapiens
gaaaatcacggcgtctgccaggccctcctcgcaggctttgcagtttgctaactcgcggtgcggccttgggacagtgcctcagtttccccaagtgtagtgaagtagggctggaccgtgattct

SEQ ID NO: 76464 - DNA, 122 bp, Homo sapiens
cctccatgagaaggaacgccatgggagtcggcttggtttttgaagctgatctctttaccacgaggcacatttctcactgggtgctgcaaggagtatgcctcaccctgaattctgattaacct

SEQ ID NO: 76465 - DNA, 122 bp, Homo sapiens
aaccccaggtaacacaacccgcaatggtgaaaatgagcaaatgcagtccccagagccatgcgtatgtctaatatctattcagatatccaacaagccttctggcttcaaaattctccactcct

SEQ ID NO: 76466 - DNA, 122 bp, Homo sapiens
gctcaattaaagtgtaaccctttgtgccctgcaacctggcacaacgacagaaatattactcgccggaaaggggagggggtctttggggagctggttaaagatccagaatcggcccctcgccc

SEQ ID NO: 76467 - DNA, 122 bp, Homo sapiens
ctgtgagcatgagggagaggaggggactcaagcatcttccctggcaacaagcatccctttcgtgagtcttagggagagaagaggattccgcctctcagaattctggcttggcagcagtgggt

SEQ ID NO: 76468 - DNA, 122 bp, Homo sapiens
gattctgcaggggtgtggggccgtggacaggctgaggctcaaggaaggtggtcctcagctcggctggccgggcagcccctcctccgctgtggcccgcctcaaacgggctggtgcatcctcct

SEQ ID NO: 76469 - DNA, 122 bp, Homo sapiens
ctgcgggggtggggtggtggtagacgttggccgagctcttggccagcacgtcgccaggcacgccggccgcgctgggcgcctgcaggcagtctctgtgcacgagctcctccgcggagtagcag

SEQ ID NO: 76470 - DNA, 122 bp, Homo sapiens
aaacctagattaatcttccttgcagggaggcttcaccctccctcagcagagtgctaaacacgccaatttctaaagaagtgttttctttctttcaggcacgaaaattaatgagctccgtcttt

SEQ ID NO: 76471 - DNA, 122 bp, Homo sapiens
gctggtggaggctgctggagaaggttggttggtcaaaggtggccaagaaagttcccaagccggaggcatccaagcctaagaaagcggcccccaaaacaaggagatataagagtaccttaaag

SEQ ID NO: 76472 - DNA, 122 bp, Homo sapiens
gaagccttctcagagccttgattattctacgggtactgcaacttcccaagaggggctgggcgacggcacgaagaggtccccggaaagatctggccgcaggcagcaccctggctgcacggact

SEQ ID NO: 76473 - DNA, 122 bp, Homo sapiens
ccttaacggttttttcctgctggcggaggtcattctaggaggtgggtcccaagctgacctcgctcagccttggccttcctcaccctgacatattcttggcttttctttacccacttaagcac

SEQ ID NO: 76474 - DNA, 122 bp, Homo sapiens
aggtgtttgtgtcctttacttcatcattgctagtatcttctccaattccttccaggccaacgttaaattaaaaccttaactacctaattcccaaaaactaattttaccaacttttaaataga

SEQ ID NO: 76475 - DNA, 122 bp, Homo sapiens
agggtaggtgatgtgctcaagacttcagagccagtacatggagaggttgggactccaatccgggcagtctgctccagaatccacactttgaccaccaccctccactgtcgctcagccttgta

SEQ ID NO: 76476 - DNA, 122 bp, Homo sapiens
cggtaggaagacttgaaaggggtggtcgaggcacgtttgtggtttgaaaggaaaaaaacacggagcagcagatgtcccccccaagggtgaaagtgcctcccaatcgcacatgcgagggtctc

SEQ ID NO: 76477 - DNA, 122 bp, Homo sapiens
agctgtgagtataaaccaaactagccatccatcactcaaataccttctgggtccttgccccgtgctagaccctgggctggctgttagactcaggatggtgagtgaaatcacaatccacaact

SEQ ID NO: 76478 - DNA, 122 bp, Homo sapiens
gctttctcgggcctcccgcctccttgtattttcctgtgaaatacccaggcgaaagagacccgtgacaacttgactttctcctcttcgagaggcccgtgtgagctcgagagcccacagcccgt

SEQ ID NO: 76479 - DNA, 122 bp, Homo sapiens
ctagagataaaaaaaaaaaaaaaaggaaaatgccagctgatataatggagaaaaattcctcgtccccggtggctgctaccccagccagtgtcaacacgacaccggataaaccaaagacagca

SEQ ID NO: 76480 - DNA, 122 bp, Homo sapiens
tcagcggcggcacggtccgttccgcgacccctctcctgtgaccccaggtaggccgccgatcggttcccggctgaggtcccgccccagcgcccgcctcccgggctccaacctctttgctcagc

SEQ ID NO: 76481 - DNA, 122 bp, Homo sapiens
gcactggtcctgcggcgtgtccttggggatggtggcgtaggggtggggacagagccccaacgtccctcctgtcctcatcccaggcactgccacgagaggaacctggccgtgaacccacaggg

SEQ ID NO: 76482 - DNA, 122 bp, Homo sapiens
accgcagtcctcctctcgggcgctgccctgaggcgtgatggccccagcgtcttgaggccccggcttgcagctgggtgaatcagacactggttcctgggacccacgggccattgtctgttggg

SEQ ID NO: 76483 - DNA, 122 bp, Homo sapiens
ttaggcctttacccggggaccttctggcctcgaggtgtaggggcggcgatggtttttcggcggtagcctgctccatgttttcccgtgtggggtcagacagtttgggccttgggtcagatcga

SEQ ID NO: 76484 - DNA, 122 bp, Homo sapiens
tcagcatgagttttggtgaggacaaaccatatccaaaccatagcaggaagtttaaaaaagcgagtggcggaagcctcagtggaaacgaaaacttctagaccatttaccattaatgcagaggc

SEQ ID NO: 76485 - DNA, 122 bp, Homo sapiens
gctggagtaactgttttctttccatttcacagctcttgaaggaggtgtgactgagtgaggcgctggaaagcttgttctataattacttcttgatccgcttctaggcgtgctgtgcatgcgtc

SEQ ID NO: 76486 - DNA, 122 bp, Homo sapiens
tcaaatattttacagagtttgactcttttggttgacacaccaagctcaagcaggaagaaccgggctcaagaactgtctctctcctttctctctgttaggcatgggggggaagggagtgttgt

SEQ ID NO: 76487 - DNA, 122 bp, Homo sapiens
gttaaaaagaaaatgcacaggagttcaaatgaaaagcattattttttttttttctgttaacgggtttctgtcatttctgctgcctgcttaaaagaacaggaataatttaggctggtgtttaa

SEQ ID NO: 76488 - DNA, 122 bp, Homo sapiens
gttacctgtatgtaccgctttgtcagtatccacgcgtggaggggccgtgagactgcggcccgcctccctgtgttacctgcatgtaccgccttattagtattcatggacctttaactacaaat

SEQ ID NO: 76489 - DNA, 122 bp, Homo sapiens
ggaggtccttttccaggtctttgggaggagccagtcgctacctggagcagactctctcctcgccaagcccattgacaagcagcacacagacactgtggtgaacttccttatccgcgtggcct

SEQ ID NO: 76490 - DNA, 122 bp, Homo sapiens
gaccttcttggcatctttcttataaccacaaattgttctgtccccatatggaagagtgaccgttcccctttagctagtaatggcaccttagcatcttcctcctggcaagggcccctgaggac

SEQ ID NO: 76491 - DNA, 122 bp, Homo sapiens
atgagggagcaagagaaaccctctcaaagtgacgccccaaacaggtccggatttagaattcgaagctaaaggctgttagaaattgggactcctcggcctcctctgcagcccctcctttcccg

SEQ ID NO: 76492 - DNA, 122 bp, Homo sapiens
cggggcgctgattggctgggctcgtggttgccggggcgaccctggccggaactaggctctcggtgagctgggcggctccggctgcaaccttgtgggagtcgcgtgtgtagtgcacggtgcat

SEQ ID NO: 76493 - DNA, 122 bp, Homo sapiens
gtgcctacaggtgccaagtgtggtctcatagctcatatgctcaggagggcagaggttcaccggaggggtgacactgtgcacatattttctcactttataagacaatctatttacattcacat

SEQ ID NO: 76494 - DNA, 122 bp, Homo sapiens
cagctagaaaggtctttctgtttttttcacatctgctcactgattcaaacaccaagtttccgttttctcatcaacaaagtggtcaataaataagaaacaacctcttcctcatagtatagtta

SEQ ID NO: 76495 - DNA, 122 bp, Homo sapiens
ggtggggcctgtgggctctgtgatgtaacttgggaggggcgcggggcggggcctaggtcgcgggccatctgggctctggaaggaacccttagaggagcgggaggacgccacaggtcctcggc

SEQ ID NO: 76496 - DNA, 122 bp, Homo sapiens
ttatgggcagcctgtcctgattactctttactttcttgtgtttatgccctggctccccagcggccatcagtgcctggggccacggctctttctgcagcagaccgcatctagaatcccctgcc

SEQ ID NO: 76497 - DNA, 122 bp, Homo sapiens
agaagcacgggatctggctgcagctctgccaagtatgcaagctgcaagaatgacccagagcgagttacttaatttcgtgtaagaagcaatgcgtggccgctcctaagccatttccactggga

SEQ ID NO: 76498 - DNA, 122 bp, Homo sapiens
taccactaccgagccgagatgaccaatgggagacggccatctgcgcctgcgcaaaaaagtcgccaatgttcatttccggtctttttcgccccgcccttcaaatgcgaaagcgactgccttct

SEQ ID NO: 76499 - DNA, 122 bp, Homo sapiens
gacgtttgcgctctggaaaggtaaactcaggatgctgttggctcctaagcagaaagcaggcgccacccagccttcaagtgcttcaacagtgaagagttaggacggaggcccagcctggaaca

SEQ ID NO: 76500 - DNA, 122 bp, Homo sapiens
tgccctgcccaaggcccacctggacaggcaagtcttccctagtgggtcagtcaactccaccgcttaaggggtccttcctatgtaacggaatttttttacatcatcatcgagtctcgaaatga

SEQ ID NO: 76501 - DNA, 122 bp, Homo sapiens
aaaacagaaacaagacagtcttcctaaactttgtccaggaagcaccaggctacacatacccgtccctattacgatcacatcaaactccgaagggagagtatccgccatcttgacgggaaacg

SEQ ID NO: 76502 - DNA, 122 bp, Homo sapiens
catgagtgagggatgttctctggagctgaaaaacagtaaattgaaggaaaagagataaagcgatttgcagagaaactgtagagatttcctaagggccctttcagtattaagacaattaaaaa

SEQ ID NO: 76503 - DNA, 122 bp, Homo sapiens
cccccggaggctgtaactttgcctcgcttcgcgcctcctttctttggccgcaccgcgacccgtggccccgcccactcccctacgccaaccaatgagacggtcgtcccggcaagcccgtcttc

SEQ ID NO: 76504 - DNA, 122 bp, Homo sapiens
gctgcaacttcctccttcgcggagtcgggggaccgagagaagggaatgggggaggggcgccgcgctccgcagggtctgcaagggaattactgggggtctcagaactcctccttccagcccgc

SEQ ID NO: 76505 - DNA, 122 bp, Homo sapiens
gctctgctcagatgtgagaagtaacgggtcacctggccactaggaacaaaaatgtggtcccgctctgggctccgaggctgcgcgcgcctcgaggaggagctgcccgcagccctggctggagc

SEQ ID NO: 76506 - DNA, 122 bp, Homo sapiens
ggcaccaacaggcaagtggggcggccacaggacatgatgccagcccaactccaccatctgcgcccaaacttggacaggatattagaaggtgtaaaagtagtccagtataaatatatatcttc

SEQ ID NO: 76507 - DNA, 122 bp, Homo sapiens
gaccgtggagcttcagcctctcatctgtaaaagagagagggtgacactcatttcacagggcgttggaatgatttttgcaagtgccaggcacatggcttgatctagagaggtactcagtaaat

SEQ ID NO: 76508 - DNA, 122 bp, Homo sapiens
tcccaagcctcccctgggcagcggaggggctgttaaggtcactgccccaggtcctatgtccgcgcagatcctccccacggccgcggacgggccggagggcgcctgcccagccgctatcccat

SEQ ID NO: 76509 - DNA, 122 bp, Homo sapiens
ctagcccacccgtgagccccctcttggatccacgttctagtttctatccttggggtagctcgagtcagtctcacctcaatcatcctgtgtgctcccagagcacaggacctgcggctgctgca

SEQ ID NO: 76510 - DNA, 122 bp, Homo sapiens
acccccccgcaacttcgggatcggctgggtgaggctgggcaggcctgatgctcaggggttcgtgccgggaagttcaggtcctcggacaacctctctccagctctccgccgccggtacccacg

SEQ ID NO: 76511 - DNA, 122 bp, Homo sapiens
tcttcgtctgtagtatttatgatgttaagataatgcgggtaacagacaatataatagccccgaccttaaacgaagcttttgtactgcagaatacatctggctgtgtgatttttttttttaag

SEQ ID NO: 76512 - DNA, 122 bp, Homo sapiens
taaagagagaaactaagccgctgtcgccagcgctgtgtcatgagccgaacatttcagtatcgattctggccatcggaggggctggctcagtgaacttccagaatgaaacgttcgcaaagaaa

SEQ ID NO: 76513 - DNA, 122 bp, Homo sapiens
cggacacactttgacccagccctgcctgtacgaccggacactctgcggcccaggcctgtacgaccggacacattgcagcctgggcccgtacgaccggacactctgaggcccaggcctgtacg

SEQ ID NO: 76514 - DNA, 122 bp, Homo sapiens
gtctgttcctaacccctgaaaactgttgctacactgcaccaagtttcatatcctttctcacgtgctctcatccctgcctgtctctgtctctattttgcaccattctctattttgctcagcac

SEQ ID NO: 76515 - DNA, 122 bp, Homo sapiens
gaggggctgtggcagggcaggagcagtgtcagccccgcagggggtgcaggaggggaggcgcgtgcccgccccttcatcaccatggcgacacttcctgtgcagggcaggatggttccaggagc

SEQ ID NO: 76516 - DNA, 122 bp, Homo sapiens
acactgtatcccaaaactcagcactattaatgatacataattccaaccaattatgttgaacgaattgtgtccactgctaattagtaacccacgaaatgcttctattttccagctaataagaa

SEQ ID NO: 76517 - DNA, 122 bp, Homo sapiens
gggatggagagagtaaggggtgaggggcctagagaaaccagctgctcctagtctaggcaccgctagtctaggtactgagagtctaggtaccgctagtctaggctctgcacagtcataattaa

SEQ ID NO: 76518 - DNA, 122 bp, Homo sapiens
gaggcgcggaggcaggagaatcacttgaatctggaggtggagattgcagtgagccaagatcgcgacactgcgctctaggcaacagagcaagattctcaaaaaagaaaaaaaaaaaaaaaagg

SEQ ID NO: 76519 - DNA, 122 bp, Homo sapiens
acagagatgcagagcaaggctgggacacagtaggctttgcaggcttcagaggaatggcagcgggtcaagagcagtgacctagtggccctcagccctggatggaggacagaggcagaggggtg

SEQ ID NO: 76520 - DNA, 122 bp, Homo sapiens
ttgatggcagcgacggtgattcccgaaacttgactaattccaaacagtgaacaccagcaacgtcaacgaagagaagaaattccttccacctgagtccgcgaacacagctgcgcgactgatag

SEQ ID NO: 76521 - DNA, 122 bp, Homo sapiens
gaaactgcgtcagcctgaggacgcagggacaggctgtgcggagaagccgctggcctttgccgcttgaaagctgggtccctgcggcctcctcaccccagggctccctcagagaaattctcata

SEQ ID NO: 76522 - DNA, 122 bp, Homo sapiens
ggaggttctcagagtgcatcagctggtgttgctgatgaaggaattagctcacctggaaaccgaccttgtcctttctgaaagaaccatgccaaattttggggtgccttgtcagggcaatcact

SEQ ID NO: 76523 - DNA, 122 bp, Homo sapiens
gaccgagggggatgtggagctggagttagagactgagacccgtggcccagagcggcctcccgagaagccacggaaacatgactgacagcagtgcggcggacttggagcgggtcaccgactat

SEQ ID NO: 76524 - DNA, 122 bp, Homo sapiens
gcaggacaccagcgcgatgctggccgtggtatagtagtcagcatagaagttctccaggagcggcaccttcacctcgtggcccatcatgctcctggcaaagcagtggtggatcccgtaccccg

SEQ ID NO: 76525 - DNA, 122 bp, Homo sapiens
ccttggggaggacgtggggcaagcacaagcgtagcgttaggcctgagactccaccccagccgtctctgagcccagttcagcacgcacgcgtcaggcggcttttttccgcccggctcctttcc

SEQ ID NO: 76526 - DNA, 122 bp, Homo sapiens
ctgctggggcgcaggcggcagcggcgtggccatgaagctgaaggtgaagaacgtgtttctcgcctacttcctggtgtcgatcgccggcctcctctacgcgctggccagccatgtgactgcct

SEQ ID NO: 76527 - DNA, 122 bp, Homo sapiens
tccccagagctgaacccacacacgacagagaagcagggtacaaagggcaggagagggaagcgagaggcagcaagccagaggcagcgactaggggtagctgaaacctcagtccaggcactgcc

SEQ ID NO: 76528 - DNA, 122 bp, Homo sapiens
ctcgatgtaggttgctgcagagtgtaactgctgcagctctgtaagtcctgtgattaacttcgagaattgactctaagtggtctcagatcctatactatgagcagaaaggacttcaggagcag

SEQ ID NO: 76529 - DNA, 122 bp, Homo sapiens
ggggcggcgcctggggaggtggggagtgacccgaggcgggggctgggatcgggagtctcgcggaaggagcctgttggctttgtttggaaccggggttaaagtcaccagccgctgctaatacc

SEQ ID NO: 76530 - DNA, 122 bp, Homo sapiens
ggagctgtgctccacatgcagggcagtggccagggctgccaggccttgtttatctgggagcgccaggctgcctgcctgcacctggtctgggcacctgaaggcagagctgctcctgcttaggg

SEQ ID NO: 76531 - DNA, 122 bp, Homo sapiens
aggagaggccgacaggctctctgaggaaacagacaggatctcctctagcactcccctgcacgggctcattgcccaccctctcttcttctctggttatccagatcctcccatttcttcaagat

SEQ ID NO: 76532 - DNA, 122 bp, Homo sapiens
gcttggagatattactaaagtttataatggaggtaggtacaaaagttttgtaggtatatacgctgtaaaattagatgtgaatcagttgtgtgatgttcattcaaatccggcagaatatctta

SEQ ID NO: 76533 - DNA, 122 bp, Homo sapiens
tcccactttaaacaactgggacactgggcagtaaatggggcacggctttcacagagcgaacgatgaacacacgagcggtgcggggctgaggcccctcagagaaggtcctcgcgagatgggcc

SEQ ID NO: 76534 - DNA, 122 bp, Homo sapiens
tcagtgtcaaggaaaaacacccgctacttagcagaccgggaaagggagtctccctttccccggagagtttagagaagactctacgcctccaactcttgtggagggcctgacatcagtcaggc

SEQ ID NO: 76535 - DNA, 122 bp, Homo sapiens
caaaggggtataaatgagcactatagcttagtttgatactttttctgctcctcctccatccgtggctcatagctcaaaacaccaatctagttgatttggttacacagctgacagtggcaatt

SEQ ID NO: 76536 - DNA, 122 bp, Homo sapiens
tagaattcgaaatccccccggggttgttcatggaatgagccgctctgttatgttgtgagccgtggtattaatcagccacccctcactaggtgttggggttccaccacgcttcctccaccccc

SEQ ID NO: 76537 - DNA, 122 bp, Homo sapiens
cagaacgtagagacaacccgagcgtccttcagtggacacacgaacggccgcaccgcggaacgctactcagccatgaaaacaaacagaccagctgcacacagcaacttggaccatctccagag

SEQ ID NO: 76538 - DNA, 122 bp, Homo sapiens
taggcacaactgacgggcattaacattaaaatagagctcaggaccgggtgcaggagctcacgcctgtaatcccagcactttgggaggtcaaggtgggcacattacttgaggtcaggagttcg

SEQ ID NO: 76539 - DNA, 122 bp, Homo sapiens
aatcttcgaagggacagatgaggggtatgacctggggagcccacaaccgcctttgcttttcgcagatgctgggaacgcagctctgctgccggcggggtggacagaccctcccccagccattg

SEQ ID NO: 76540 - DNA, 122 bp, Homo sapiens
atgatcactccatgggtgtccaatactggacgagcacttcgggggagaggccgggtgactcgcttcttgcagtcaacaatgagggtgacagactggcccttcacagccacagccacacggtg

SEQ ID NO: 76541 - DNA, 122 bp, Homo sapiens
agcctcctgcatcagagcaaagcgatagacagaatgattgtgagtcgatcctggcgtgggcgttctgtggatgctgggcctccttctttcagtgccccctgaagtctgggtaacgccatcca

SEQ ID NO: 76542 - DNA, 122 bp, Homo sapiens
gacaccttccccactgcctgcctacagcccaggagccccattgccacccttgcccaagaacgttggcacatctcctacctggtccccttgaagctgagctcagctgactctgtcacccttcc

SEQ ID NO: 76543 - DNA, 122 bp, Homo sapiens
tccactgtttctcctataaatgtaaatgggtcacgctctgccgtccgcaccttctcctttcgcaggcactgagcgccgtcccatgccctcggattcgaatcacactcagtccattctcctcc

SEQ ID NO: 76544 - DNA, 122 bp, Homo sapiens
cacacacatcgcagtccacggaacaccagctatgcacgtggaaaggagaacgtgtagccacgctatgctgtgccgattcacacacctcgcagtccatggaatgccattcgtgcacgtggaaa

SEQ ID NO: 76545 - DNA, 122 bp, Homo sapiens
tgcgcctcggattgatctgcgtcgtgcctcgataggcagtaaccttcatcgctgcggttgcgtagcgtttacccatgcgccatttgaacttgtgcttaagggatttatctttgccttctacg

SEQ ID NO: 76546 - DNA, 122 bp, Homo sapiens
tgagcctctggcctcctctcccctgcgctgggccttgccctgctcgcccgaactcgcttccgcatccttgctgacccaagctgagaacaagaactctggtcctggtccccaggttccgccaa

SEQ ID NO: 76547 - DNA, 122 bp, Homo sapiens
gcccctagggacttgtctcagcgggcgactgcgagggaggaccgtgtcccatccgttaagcgaagttagcactggttctccagcgcaaaccagcccaaccaggtcttaccactgcggcgacc

SEQ ID NO: 76548 - DNA, 122 bp, Homo sapiens
tggcagtaggctaataatttcaatgtaaaacttctgaaggagttcaggtcccataaccaccgccaattcactgctttagtatactttattgagcaccttcagtatgcctattcttaggatga

SEQ ID NO: 76549 - DNA, 122 bp, Homo sapiens
tgagcagctggtgtgtgtgcagggaagacccccggatccatcgacacctggccagggcggcgaagtggcagcatgatcgtcattacctccatcctctcttctctggccggcctcctactctt

SEQ ID NO: 76550 - DNA, 122 bp, Homo sapiens
cggcccggccccaggggcagacgcgagcaccggggcagagagacccactgcctggagtcgcgctgcctctccgcgggctccacgccgggcccgcagcgcagggatgggtccttggcggccgc

SEQ ID NO: 76551 - DNA, 122 bp, Homo sapiens
tagctgctggttggagcctgccatcacttcagatggggttgttccccagaagaggcaacccgcataccttcccaggtccatcctgggctgccacctgagttgcctgtcttccttctgccacc

SEQ ID NO: 76552 - DNA, 122 bp, Homo sapiens
catccaggatcctgcgcagaccgttgatgtccgactccaccagctgccgcagggacagctcggtctggtacctgcgcaaggacagggtcagagtactacctggtagatcttcaagactcaca

SEQ ID NO: 76553 - DNA, 122 bp, Homo sapiens
gaagcctgggagaagccattcgtgacctaacaaagctggcactggccacccccagggttccggaaactctgagtcagtctggctccgtctcctggcaaccagatgcaggggccatggcactc

SEQ ID NO: 76554 - DNA, 122 bp, Homo sapiens
ctgttggggtgggcaggctggacacaacaccagggtcctcactcttgggacatgggcagccgtcggccgttttggaggcagtgtcaggacttgaagggccagggggaggcagtggccgtcgt

SEQ ID NO: 76555 - DNA, 122 bp, Homo sapiens
ctccaacaagatacgagcacttgtactactgatgataagcgtctctcagggtggaagccccggaatttgtagcatacagttaaggggctttgtctttgaaacattttcttcatggtgatttg

SEQ ID NO: 76556 - DNA, 122 bp, Homo sapiens
caatcagggtgggtgggggctgagggccagggcgggcgctgtggcggggggcagccagagcggggcggatgagaggcggtgggggctggttgggggccagccggggctggaggaagcggccc

SEQ ID NO: 76557 - DNA, 122 bp, Homo sapiens
caggggccctctgcagccaccgggaatggggctgagggcgggttcccgcccctgtgcagccgccccagggccgactgcctggctcggccgcagccactggtacatctggctccggttctgag

SEQ ID NO: 76558 - DNA, 122 bp, Homo sapiens
taagtgctccaaagatccagaagccaggtgagcagctacctctaccttctgcccacacagcgctgacccctagctgtactcagccacccaagaggcagccaaggtgctcccatatttttttt

SEQ ID NO: 76559 - DNA, 122 bp, Homo sapiens
gcccgccccccattggcgagcgatgaaggcgggggcctgcgtctccgtgttcgggtctcacgcagctagatgttgattccacggtccagcctaaggcccctcagtctctctgtgcctctgga

SEQ ID NO: 76560 - DNA, 122 bp, Homo sapiens
aagatgctccagagtggctagagggcatctaagggctccagcatggcatatccatgcccacggtgctgtgtccatgatctgagtgatagctgcactgctgcctgggattgcagctgaggtgg

SEQ ID NO: 76561 - DNA, 122 bp, Homo sapiens
gcccggcgggctttggtttgggcaaggctgccatcgtgtggccgccgtgggtatttccctcggaaagcggccgggcagcgagcaggcgcccgcgcctcttctttttacgggagtccgcgctc

SEQ ID NO: 76562 - DNA, 122 bp, Homo sapiens
gccccgctggcctccccctccctcaccccgccctgctccaccacctgcggggccggggggcggcgaggaacccgaccggccctgctacgcttgcgcccaccttccagatgtggaggcgcgtg

SEQ ID NO: 76563 - DNA, 122 bp, Homo sapiens
agagaagaaaggctccttcacatcacagtcatgactcgcagaggggccttctccaggcaacgtggactttccccgtggtcctcaatcagtggggggagtttcagccctgatggaggcgaaag

SEQ ID NO: 76564 - DNA, 122 bp, Homo sapiens
cttgctccagtctctctctcagccattcagataccgcttccttcactccagagcctcagccggcgcctctcagatcaaaccttgtgccactaggtggagccaaagcccacagcaacagcgcc

SEQ ID NO: 76565 - DNA, 122 bp, Homo sapiens
cagcagctctgtagtaggctgggaggctgcaagagcgagtgcggagctgggtgacagcaacgccccccttcctccagcctggagccaacgtgcgctgccgtgagccccaccaaggcgagaga

SEQ ID NO: 76566 - DNA, 122 bp, Homo sapiens
caggacgtggggaagcagaggccgcttggggcagcagaggccgcgtccaggtgtcggttccggggcaccttttactgtcactctgtccttctctgtgtccaaatttcacccggagcccgaga

SEQ ID NO: 76567 - DNA, 122 bp, Homo sapiens
cagaaaacacgtcagggttttggctcagctgccagatatgcagctatggtgggatttctgcggcagggcaaggaagtggagacagttcgcgtggcagagcacagcgggtgccctatagtggg

SEQ ID NO: 76568 - DNA, 122 bp, Homo sapiens
acggggtacacagggtcataaggagagacaaagacccctgatttctgagctaacagcagccgtcaggggtgtggatagctgaggagatggctgaggatgattcaaacactcccgccattggg

SEQ ID NO: 76569 - DNA, 122 bp, Homo sapiens
tgggaggcgaggcagcgacacagccggctggcactaggcatggggtgacaaggtgcatggcgcggccaggacagccttgtgcaggggacagcggaagctcaggagacaaggtcagaggtggt

SEQ ID NO: 76570 - DNA, 122 bp, Homo sapiens
caagttccgcggcgggcgcgcggggcactgtgggtagcgccggggctcaccaggcggaggcggggcccggcgtcaagctccgcctccgcgccccattggctggcatcacctccgcgcgcctg

SEQ ID NO: 76571 - DNA, 122 bp, Homo sapiens
aatgcctgcgaggaggctgtgggtcctaccctatcgccgcttacgcagtcccagcctccgcggcgcccccaaatgccgcactgttgagtcatctcagcgctgcctcctccgcgctgcgctcc

SEQ ID NO: 76572 - DNA, 122 bp, Homo sapiens
gggaaataaatataaccataatggagtgtgtaagtgttctattagaggggcaaacaaaggcgataaggctgctggttctgcttgggggtactgaggacagtttcatggaggaggtgatattt

SEQ ID NO: 76573 - DNA, 122 bp, Homo sapiens
cggggagcatccacggggtgcccccacctgaccgagagccggctcctgccctcgggaccccgcagtaattagcacccaggcctctggctgagcttgtccagagccaggctgtcggccttacg

SEQ ID NO: 76574 - DNA, 122 bp, Homo sapiens
ggctttttgtggcttttgcccccgcggctttttgcccccgccgccgcgggtttttgccgtcgcggctctttgcccccgccgccacagctctttgcccccgacgccgcgcctttttgcccccg

SEQ ID NO: 76575 - DNA, 122 bp, Homo sapiens
gttagaggagagggtctgaaaacaagaaaggggaatagctgtatgataactgcttgaaggcgagagggcccagcgacagctctgttttagacagggcctccaggcctcttagactcagtccc

SEQ ID NO: 76576 - DNA, 122 bp, Homo sapiens
ggtgatgctaaggggatgcgtgtcgctctgggcggttgtgtaacatggatgtagagaacgcgacagcacccacggctcacctgggaacacaaagccaggacggcgctctccaacacttctcc

SEQ ID NO: 76577 - DNA, 122 bp, Homo sapiens
caaactccggacctcaggtgattctcccgcctgggcctcccaatgtgctgggattacaggcgtaagccactgcgcccggcctattttatctcacaataagacatgaagaaaatggtaactat

SEQ ID NO: 76578 - DNA, 122 bp, Homo sapiens
tttcatcagtggtggggcattgcgcactgactgagttgctggggcatctgcttttccatccggccctgggtgagcactgacaacacctgactgtcttccagtagaactgggccttcctgccc

SEQ ID NO: 76579 - DNA, 122 bp, Homo sapiens
cctgacctaaaccaatgtctttttttcttctcagcagcatgctatctggttccctgctgccgtccctattccaccccctcaactgtccccgcccttcatttgcttgggacctctgacactac

SEQ ID NO: 76580 - DNA, 122 bp, Homo sapiens
ctatgcagtagagaaccacggaatgaagttcttctaaccggtgaaagcggcgtcttggcacgattcacctggcggccgtagacaggagagatttcagtgcgtaggccctggggaagcgcata

SEQ ID NO: 76581 - DNA, 122 bp, Homo sapiens
gggggggctgaggggctcaggcagacaggaagttggcgatgttccaagcggagcagtggccgcctgactgtacagggaagaccggggatttccaggggagagccagggaatgacgtgtccag

SEQ ID NO: 76582 - DNA, 122 bp, Homo sapiens
gcaatcctcccacctcagcctcccaaagttgctgggattacaggcatgagacaccatgctcggctaaagccattttcaatgaaaagaatttggccagatatacagtggctcacacctgtaat

SEQ ID NO: 76583 - DNA, 122 bp, Homo sapiens
ccgggcctctgcacagtcacctcctgcagcctggggtgtgtcgcctctccacgtcctcaccggcgtctgcctttgcatttcccagatgctcgcttcaccccactgagatgtaactcagtttt

SEQ ID NO: 76584 - DNA, 122 bp, Homo sapiens
aagctcgtgcctcatttacagcctgcgggcgggagtctccttgtttaccaaagcagagggcgtgtgggaggcgggggccgtcgctcgctcccgcctcctcggaaaccttgtccccacaaccg

SEQ ID NO: 76585 - DNA, 122 bp, Homo sapiens
ctggactcaagcgatcctcctgcctgggcctcctaaagattcagctgcttttggatcaaccgatcgccttaagaccttttaactcgaacacctgtcacatcctaggatccgcgaaggactga

SEQ ID NO: 76586 - DNA, 122 bp, Homo sapiens
gcaaccagcctgaagtactcaggtttctttctttctttctttctttttaagatggtgtctcgctgtgtggcccaggatggagcgcagtggcctgatctcggctcaccgcaacctccacctcc

SEQ ID NO: 76587 - DNA, 122 bp, Homo sapiens
gccgaagttcagctcttactaaacaccagagaattcatactcgaaataaactctaggaaccgtgaaattaaggaatttgcagaatgctttagctaaaatgttctgattcaggatcagaggat

SEQ ID NO: 76588 - DNA, 122 bp, Homo sapiens
taataccctgagtgagaacccacttaagagccgagagcccaaatgtgtgtttcatgacggcgctgttacagactaaaaggtcaaaacaggacattaaagggtgctccggggggctgagtagg

SEQ ID NO: 76589 - DNA, 122 bp, Homo sapiens
agccaagaatgaacccgtcgttagcccccggtgccctggctcttgtttaaatccttagatcgagaaggacttgaaggagatcccaggctcccagctctgcgcccctgggccagtttcctctc

SEQ ID NO: 76590 - DNA, 122 bp, Homo sapiens
ttcccattggttgagacagcaccgcccagccaaagcccccttgtcctcgcgcgggtgcgccgcctggactcccaccctggccagtcccgggcccaccaccactctggcatccccagcctgtc

SEQ ID NO: 76591 - DNA, 122 bp, Homo sapiens
cagttgttcagcaggttctctgggcctcacctccaaatgtgttacttctggagggaaagacgcccacagaacagcacaagctctccaggaaggaacgacagaaccggcctgtcctgcgttgg

SEQ ID NO: 76592 - DNA, 122 bp, Homo sapiens
tgtccattaagcctttcaattttgtcaattgtttatgtgttttgaagctctgtagttaggcgcatacacatttggtattgttttatattcttgatgaattggcttataaattatctttcttt

SEQ ID NO: 76593 - DNA, 122 bp, Homo sapiens
agattccccttcatggaggcttgggcgggtcacccccagtgcaggccaagatgcaggttacggatgtgagtttctttctgggaagagaccctggtaccgggagaggaggaagaacgcggaga

SEQ ID NO: 76594 - DNA, 122 bp, Homo sapiens
gtttgggagacggcagtggccgcccaggtctgaaaggctgagggcttcgatacctggacccgctgccgccgcggtggcacctcccgccgtctcctgggcaaggcgaggctcgggctgcctat

SEQ ID NO: 76595 - DNA, 122 bp, Homo sapiens
atgggacacattagaaggcagctgagaaaggtggagaaaattcctgagattagggagccacggagctgacttctagcactggacatctcattgtgtgactcagacaaattatttctactttt

SEQ ID NO: 76596 - DNA, 122 bp, Homo sapiens
aggtgaccagggacttctctggcaaaggagctcctgccctgggagagtgcaatgattacccggcactagtaataatctcccgtcaggtggggcgcagtggctcatgcctgtaatcccagcac

SEQ ID NO: 76597 - DNA, 122 bp, Homo sapiens
tcgccccaaaggcagcgccctgcttgccggggcgagtgtgacatgtgtcaaatttgggctcggcgttggggtcgcattccggacccagcatcaccacttgttgttctctttcattttgcttt

SEQ ID NO: 76598 - DNA, 122 bp, Homo sapiens
cagcctgggcagggcagggcagggctgggccgggctgggccgggctggccaggcagggggcgccggcacgtggagagtccgtggaaggtccagactcacccgtaggggccaggcgggcaacg

SEQ ID NO: 76599 - DNA, 122 bp, Homo sapiens
ctcttggtgagaattcccagagtgataatggctacctacagcctggcgaacgagagactacgcgctctggaagacattgaacgggaaatcggcgccatccttcagaatgcaggttcgggatg

SEQ ID NO: 76600 - DNA, 122 bp, Homo sapiens
cacccgcaccgggtcagctctgcccactcagctgcccagacgcccagcgctctgagcgcgcggcccaggctgcaccagtctgctccgccgcgccggcccctttgtctaggggcgagcctgtt

SEQ ID NO: 76601 - DNA, 122 bp, Homo sapiens
actctcctttttccaggggtgtcagcagggagtggcttggtgcagtctgcgcctcccctccgtgttgggaggtcaccgtccttccacatctctcttgttttttggccagttctgggacttct

SEQ ID NO: 76602 - DNA, 122 bp, Homo sapiens
gatcccgggttgagagcagggtggtggagggcacacctagatctggggatctctgccccccgcaggcagtcaaaagggggggcgggaggacccctactgggggccttctcttgctctagacc

SEQ ID NO: 76603 - DNA, 122 bp, Homo sapiens
gcggcaggtggggccagccggccgctccgaagtgcggggttcgctgagcccacgcccacccggaactcccgctggcccgcaagcaccgcgcgcagcccctgttcctgcccgcgcctctccct

SEQ ID NO: 76604 - DNA, 122 bp, Homo sapiens
gtataggagactagcctgggcaacttattgagaccccatctctacaaaagaattttaaaacgagctgggcacagtggctggcacctgtggtcccagctactcaggaggctgaggcaggagga

SEQ ID NO: 76605 - DNA, 122 bp, Homo sapiens
gtccagaataattcagggaactatctttaaagtacaaaaacagcaaatggaccttagctccgacttaagcagaatgaaaggttaagtaacgcttcccccagttctcgtctcgggagacagac

SEQ ID NO: 76606 - DNA, 122 bp, Homo sapiens
attaacatacattctacacagaaataggcttccccaattttgctatcttcttctccctgacggtgatgtgatgtggttctgccaagaaataaccaatgtgacatttttcactgaattcaata

SEQ ID NO: 76607 - DNA, 122 bp, Homo sapiens
gcactagtgactgacagggtggcttcatgggttcacagggggcctgcctgatcccctcagcgctgcacccctgggtcctggagtgtgcccagttcatggaagtcctcagtcaggaggggtga

SEQ ID NO: 76608 - DNA, 122 bp, Homo sapiens
cgggcgggggcggggccgggggcgactggccgagggccgggcaggggcaggggcctgggccgggctcggctctgccgggctgcggtggcgatgcggctgcggcacagggtaggatggaggga

SEQ ID NO: 76609 - DNA, 122 bp, Homo sapiens
cctcaaggccaggataaaggcaaaaggtcttggaaatggaaaagactcaatacacagcaccgtaggccccagaggatgaacactagttacagaggactaagaagcccgaggtgaggctccca

SEQ ID NO: 76610 - DNA, 122 bp, Homo sapiens
cctatgtattttattttctgcatggaaagggatctgtatgtttaccaggctgccaaagggcgacatggcacataaaaagttaagattgaggcgggcagatcatctgaggtcaagagttggga

SEQ ID NO: 76611 - DNA, 122 bp, Homo sapiens
taattagcaaggcatttgaacttgaagtagaaactgcagtctctaacctcattaagtaaccgataccattttggtccccagatttcctaggcctatatacttcatctcagtccatccaaaca

SEQ ID NO: 76612 - DNA, 122 bp, Homo sapiens
ggcagacatcctgaaaatgtaattttccctctcactgagcgtgtcatcaatcccgggccacggccggagctgggtcgcgagggagatggcggctccacggctccccgatgctgacacagatc

SEQ ID NO: 76613 - DNA, 122 bp, Homo sapiens
tgttatcttgctgtggggagagtccccaaagcagtcttgtccagtttttggcagggttgtcgtctggttgccgggactctgggagctgtgtgaagaaagccaagggtgaacagcagaagctt

SEQ ID NO: 76614 - DNA, 122 bp, Homo sapiens
acactggggacagtgccccacccccctcactctagtggaaccccgggcttggcggctcaccggaactggcttgggatgaaaaaacttcgaccttgactcctttgggctctcagccaggtccg

SEQ ID NO: 76615 - DNA, 122 bp, Homo sapiens
gctgggggcgtatccctggacaggtgactggagggcagccccttagggtcaaggctgatgcgacacctagagaggccgggcctaggctagaaaacggagggcagacctcgaagagccccacc

SEQ ID NO: 76616 - DNA, 122 bp, Homo sapiens
tggtggtgtcactgatgatgctgagcgcctccttcagcacgtggtgcatgcgcagcatctcgtcgtgccactgtgcctactctgcccactcctccatcagtgtgttctggttcccacgcgag

SEQ ID NO: 76617 - DNA, 122 bp, Homo sapiens
atgatggctaaagaggagagaatggaaggtggaaggcggttgctgcttgcagaagaggcacgctggcagcattggcagggaggaagagactggaaactgagtagcagatccgagaaaccaaa

SEQ ID NO: 76618 - DNA, 122 bp, Homo sapiens
gtgatcctatgggaggggtaggagtattcaggtccttgacatctcccaaatgtgtgattccgggatgccaaaggcctttggccaggtaatgcagtgtctacaggctgaggttgacatgcatc

SEQ ID NO: 76619 - DNA, 122 bp, Homo sapiens
acttagagacttaccagacacgtttagaatggattctctagggaggggagagaatgagaacggaggcaagagaagagacgagagagtcttgcactactgccaataattacaatgtgctgtga

SEQ ID NO: 76620 - DNA, 122 bp, Homo sapiens
cgaggcatggggcccacgggtcccagcccacagaattacggcagcggcatgagaccaccacgcaattccctcggccccccatgcccgggattaacatgggcccgggagccggcagaccctgg

SEQ ID NO: 76621 - DNA, 122 bp, Homo sapiens
ggactcagacccagtgagcgcacctcttgctgcctcctgctgtgtctggggcatccacaccgccaccccgcgggaaggcaggacgagctgcttgccaggtgacctcccgtgcctcagtttcc

SEQ ID NO: 76622 - DNA, 122 bp, Homo sapiens
agacaggagacagcgctgggtggcggctagtcactaaagtcaaaagcccggctgggagggcgcgacaaaaggcagcaaagacttccgaattccccagaagccagtggactagcacttggctc

SEQ ID NO: 76623 - DNA, 122 bp, Homo sapiens
tattggcggaaaggattatgaggtcgtataactgcactcccgtcagcagcccgcgtctgccgcccacgtacatgcacgccatgtggtgagtgtttcaggatcctccaggtgccgtgctcccc

SEQ ID NO: 76624 - DNA, 122 bp, Homo sapiens
taaaccctcaaattcttagtaaacactttttaataaagctcaagtgcttctcttactcttcgactctcatctcatgccataggtttaggcaaacaaaaatatctcgtcctacctggaatcgg

SEQ ID NO: 76625 - DNA, 122 bp, Homo sapiens
gccccctcctccccagtgccccaggcgcggagcagaccgccggcaacctcctctacaccacgccgcagggaccctccagcagagccgggctgctgcagccaccagcgctgggacgaggcggc

SEQ ID NO: 76626 - DNA, 122 bp, Homo sapiens
agagaagagagaacactgtgataaccaaccagctcgaacagggaggggcagccagcccaccgttgcaaggagagctgggcagatgtctatcaagataaccatttctgctgcctgctgattct

SEQ ID NO: 76627 - DNA, 122 bp, Homo sapiens
ggagccacctgtagctctcatgtacctataagggaccaaccaacacagaggtgagggcaacgtgaacagggaggcctggctcagtgttcctgggagactaaggagttcaaagcacttttcaa

SEQ ID NO: 76628 - DNA, 122 bp, Homo sapiens
gacaacagccaccagtgtcctgaggtctgagcttttgccgcacagtcacctagggagcgacgtcggccaggagtgcgggaagaagtttcctgtgaaggcagtggagaaagctgagaaatgcc

SEQ ID NO: 76629 - DNA, 122 bp, Homo sapiens
aagccccagcatttggagcagggtgactgtgtttctcgtggatggcccaacaagcgaaaacggtgccgagaggcagggtaagcgggccacaggcactcagggggacgttgaggcaggtagaa

SEQ ID NO: 76630 - DNA, 122 bp, Homo sapiens
gaccagacagcagagcggggaaagcttgaccctgagccagcctgttctcaggcgaggctgcgtgttggctcaggctggggatgggccaaagctcaagaaaatggggaaaggaaagaagctta

SEQ ID NO: 76631 - DNA, 122 bp, Homo sapiens
ggtagctagcctgagagggaaccctctaagggacctcaaaggtgattgtgccaggctctgcgcctgccccacaccctcccttaccctcctccagaccattcaggacacagggaaatcagggt

SEQ ID NO: 76632 - DNA, 122 bp, Homo sapiens
gcccgtcggccaatcaggcgcgggggcgttgtctgggggcggggctccggccgcctctgacgagtcccggatttaccagggccggtgggatcccctcgggctcccgccttagcatgctggcc

SEQ ID NO: 76633 - DNA, 122 bp, Homo sapiens
tacacagcaacagggaatgtggtagggaggaacaagagaaatgggaatggaaagagaaatcgctgccttgaagagggtagagtaatgtgcagaagacacaggagaccccagatacaatgctg

SEQ ID NO: 76634 - DNA, 122 bp, Homo sapiens
gaagccattcatgactttgtaaggcagttttgctgaaggccagttctgccctgggagggacggaggtgaatcctcctgagtacctgtggttttcttacttcctgctgaatttacctaagtgc

SEQ ID NO: 76635 - DNA, 122 bp, Homo sapiens
cgatcctgcgacgcccaggccgcccctcccctctcggctcctactcactcttggtggcatcgtcccacattgcactgtccccagcacgcacacattggcgtaaagccaggtcccctcttcag

SEQ ID NO: 76636 - DNA, 122 bp, Homo sapiens
cgggccggaacgggtgtgcacagcgcgccggttacgggggggcaacttaacgggccggaccgcggcgactaccgagggaggtgaggggcgggccgggcgggtgtccgaggcggcggcggcgg

SEQ ID NO: 76637 - DNA, 122 bp, Homo sapiens
aagctgtcctgtacgaagactgttactaataaataaaaggcctctgggaaaagtgctgagcgtacgctggatctattttcagcttgcatcagcagctgctgcccctgggatcacatctttac

SEQ ID NO: 76638 - DNA, 122 bp, Homo sapiens
acctggaggagaaggtgtagagctgggacgcgtctggatcccccgactatggcctgagagcgggatgtgagtggcctgggccctcgcgagaccccgaccccgcccgcggcaggtggccgggc

SEQ ID NO: 76639 - DNA, 122 bp, Homo sapiens
cacagcgcgtgcgccgccgcaagcatggctggtgatgattggacgactggtaacagggggcggagggctccgaagtctggttttgggcgggaattgaaaccgccgctgaagccaacaagaat

SEQ ID NO: 76640 - DNA, 122 bp, Homo sapiens
gttgttttctcacccctacaccccaccgttccgtgggtccctcctctccaggaggccagacgaggaaataagcgaggcctctttaaaggagctctcaaagaaaggtacccggggtatcccgg

SEQ ID NO: 76641 - DNA, 122 bp, Homo sapiens
actgtgcctgctgctgccagctgccgtgttccattctgagtgatcgtggtgcagggacggcgcccacacgcgttgggcccaggctggcctgcctgtgtgctgcggtgctggcttggctcaga

SEQ ID NO: 76642 - DNA, 122 bp, Homo sapiens
cggagacggctgggacagaagctgcttgtcaggccagcctgggcaccttgggtgtctcgtcggtgcacgatgcattacacggcctttctgagaaggaggtgagctgcccgtggggagggaga

SEQ ID NO: 76643 - DNA, 122 bp, Homo sapiens
ggggtcagggagttccctttcctagtcaaagaaaggggtgacagacggcacctggaaaatcgggtcactcccacctgaatgctgcgcttttctgacggtcttaaaaaacgcggcaccaggag

SEQ ID NO: 76644 - DNA, 122 bp, Homo sapiens
cttgtatgtgacacccctgtatcacccctttcgttgcaaattgtacatcttctgctatttcgagctccttgctggtgtcactacctgctggccaacagtttggccattactgattgaaccat

SEQ ID NO: 76645 - DNA, 122 bp, Homo sapiens
tccccatagtgaaatgagaagagcttcacttcctactttgtagagtccaactctttagcacggtgtgcaggcccttcatgatctgcgccccaactccttatccccagattcccagccataag

SEQ ID NO: 76646 - DNA, 122 bp, Homo sapiens
tgggaggaggaggaggaggaagaagaagcgggttggaaaaggaagccttgtttttctcttcgtctcggtagatgaatcatgttcccacaactgcaattgggttttcaaacctccaaggctgc

SEQ ID NO: 76647 - DNA, 122 bp, Homo sapiens
tccactctagggtttgaggggctggaatcagggccagggcctaacagtgtttcttcccctcggccccacggcccatactcaccccttcacctgaggcttctcccctctcaacttgctgttga

SEQ ID NO: 76648 - DNA, 122 bp, Homo sapiens
ctcttgggctaatcagatgctggataacatcaacttcctagagttaaattattacatccacgtattataatgctagtcttcagcaagtgtctccaacccaccccattctcccctagtctcca

SEQ ID NO: 76649 - DNA, 122 bp, Homo sapiens
tgcccccagatctaactgaaaacacttgcccttctcaagcctaacgagctgggcctgcagcgcttttctgccaccactgactacgatgacatagcaaagaaaaaaatatacctatgaaatcc

SEQ ID NO: 76650 - DNA, 122 bp, Homo sapiens
ggaggctccagcgcagtcccggcttctggagaccatggcttcgtcacagagggcagcaggcgccagtgcccggcccgtgtggagaccatggcgcggctgccgcccccgggaccctcctcctc

SEQ ID NO: 76651 - DNA, 122 bp, Homo sapiens
ggggctccgcggctgggagggaattggttgaaaggaattggggggcgcgggggtggtccgcgatatctgcctcttccgccactgccacaccggcgtcccgcgtcgtgccaacggccgggtca

SEQ ID NO: 76652 - DNA, 122 bp, Homo sapiens
tcagccaagtaatcctcatctcacccagtgagtaagtttgaatgcgcacccttccctgtgcgaggatgaagaaaccaggacctgggtcaagaggattgttctaaattctccaatgaggcaat

SEQ ID NO: 76653 - DNA, 122 bp, Homo sapiens
tttattttcctttttttttttttgtcttgtgccaagcccttgaagttaacgtagcgacgacgtggtccttgtaggaccaagcattcttggcattctgtcgagattgagattccagagcatcg

SEQ ID NO: 76654 - DNA, 122 bp, Homo sapiens
tgcaagatcccgcggaacgccacctcgtagttgtgtctgcacaccgtgtccaactccgcccgggtcccctccaggacttccttctggctgttccagtactcggcatcaggccgcccctgcgg

SEQ ID NO: 76655 - DNA, 122 bp, Homo sapiens
cgcgacactgaacctagtaagagtttaacactgtaattggagttactctgtcctagatcccggctcacactcacataagggacctccctcaccctatcctacccccccgaattctgaaccag

SEQ ID NO: 76656 - DNA, 122 bp, Homo sapiens
agagtaaaggagtcgccgcctggccaaggctgcagcagcctacagaggctcagccggagacgcaccatgaccttggccctggccgagacccctttcggagggctcagaccggcgaggagccg

SEQ ID NO: 76657 - DNA, 122 bp, Homo sapiens
cccagggaaggccgaggacagtctggctcagtgtggtgacctctgcactgcctgtggggacgcccgtctctgctgcgtggtggtgacctctgcatcgcccacaggacgcctgtctctgctgt

SEQ ID NO: 76658 - DNA, 122 bp, Homo sapiens
agcagagttccattttggaacgcccgtgccgcgtctccgcgttcccagcccgggtccccgcgttcacagccccagcgcaggtaagaaacttcgcctcggcgcggagccccccagccggcgcc

SEQ ID NO: 76659 - DNA, 122 bp, Homo sapiens
agcaaaacctacagtaagacaggctgggtggggccttattatgaagggcctagaaaaccacgggaatctttaggcattatccctatactctggtaaccacaaatgcttaggcagcatgatga

SEQ ID NO: 76660 - DNA, 122 bp, Homo sapiens
acaaaccccttcaacattttactgcattaacaagtaacatttgcagtccccataggataacggcagctgcataagtccagcctttctagacacgctcctaaaatcattttgtcaatgaagag

SEQ ID NO: 76661 - DNA, 122 bp, Homo sapiens
gggctcgctcgggaaacccaaagtcacacgaaagcggcagcaccaccgcggctgggatatcgtctcccaacatggggagacaaaatggccgccacgccccgagccgaaattacatccgggct

SEQ ID NO: 76662 - DNA, 122 bp, Homo sapiens
ctattccttactttgctatgcctgtactttctagaggtacaggcatagattgttttataccgcttagcagatactgcctgtatttcaacattggctcgctttgtgtctctgtgtcacatttt

SEQ ID NO: 76663 - DNA, 122 bp, Homo sapiens
gaaataggccgtgcagtgtggccccaggcaaaagctttgtcttttctcccaagaacctagcggaatgactgccagagtgatcactataaagcattttaccaggttattttgaagggacgcag

SEQ ID NO: 76664 - DNA, 122 bp, Homo sapiens
gccctccttccacggggccctgtggcttccaagtcttaatctcctctagtctcttgtctacggagcctccttcaaacccagggaaagaaaatcacctgccagggttgtttttcttctaggat

SEQ ID NO: 76665 - DNA, 122 bp, Homo sapiens
ggtgcacagccaggcggcgccctcgactcttcctgggtgtgagggggtgcgccagggctgcgcgagctggccactctgttcccaggccatgcctcatcgccactgatagcgttgccctgggt

SEQ ID NO: 76666 - DNA, 122 bp, Homo sapiens
ccagggcgtccggggcccagattcgcacttgccgggcgcccccgggggccactggctgcacggcgctctttaaggccaacagccctgagttcacgggactgaaatcggcacagagaggccga

SEQ ID NO: 76667 - DNA, 122 bp, Homo sapiens
acggagggggcacctggcgcggagcccccaccctacccccggctagcttgcgtgcgccggcgacatccctctagggggcagaggtcaggcggcccgtccccgccccacctggcccggaggcg

SEQ ID NO: 76668 - DNA, 122 bp, Homo sapiens
acaggatgtcatagtgctcagccaggctctgtgcctcagccaaggagacctcccgaagctcgctgaggtctgacttgttcccgatcagcagctgcacaatgttggagcccgcatacttcctc

SEQ ID NO: 76669 - DNA, 122 bp, Homo sapiens
ctgccaggccgctgactgatccatgagtatgatagtgacttacatcagccacgacgacgacgacgactgatccatgagtatgatggtgacttaacatcagccacggcgatgacgccaacaga

SEQ ID NO: 76670 - DNA, 122 bp, Homo sapiens
cccctccagcggggacgcctctttcatttctgcaccctgcgcctggcacggaggggtgtgcggtcagcgggtgggggctgattgggtgacttgcagtgacagggtggcgaggccctggacct

SEQ ID NO: 76671 - DNA, 122 bp, Homo sapiens
gccctccgaccctggcagccgcggactagcgggattggtaggcggggccagtccgggctccgccctcatggcccgcccctccagccgaatctccgactcgcgcgcggcctgaggcgtggctc

SEQ ID NO: 76672 - DNA, 122 bp, Homo sapiens
caggttccggccccaccaacggctcgacgcatgcgcagggcggcgccgctgacccgcccccgccatccctgcaactggaggaggggattttggaaagttgcgtctgagattacttctgctcg

SEQ ID NO: 76673 - DNA, 122 bp, Homo sapiens
gattcccagcagcggccgcgtgttgagagcctagaagtggccccgaagccgtgcctttcccgatagccaagcagaagtaggacttgaagcaccgaggctgggatgcccatgctggtgacgcc

SEQ ID NO: 76674 - DNA, 122 bp, Homo sapiens
aaaaaatgcgtctcttattaaactttaaggtatcctgaatgctctatcagccaacataaacgagttccttggcgggtatgttaaactttaccacctgtttacatcccccttcttggcagaga

SEQ ID NO: 76675 - DNA, 122 bp, Homo sapiens
gtactccaacctgggcgagagagtgagaccctgtctcaaaaacaaaaagaaaaaaaaaaacgatctcagagagatgaagcctgtgatttgctcaaagtcacacagtaatgtaagcagtatag

SEQ ID NO: 76676 - DNA, 122 bp, Homo sapiens
ttccatgccctggagtcagggttctgacagggcgtgctaaggtcagagtcagaagctgagcggaactctcagagctggacggcgagctgcacggtgagtagaaagctgactcacactttcca

SEQ ID NO: 76677 - DNA, 122 bp, Homo sapiens
gtgaaagtaatatcaagttcctacatgttagtaatgctggtagaaatgctaggaattggccgggcacggtggctcacacctgtaatcccaacactttgggaggccgaggcaggtgaatcaca

SEQ ID NO: 76678 - DNA, 122 bp, Homo sapiens
ctcaaaactggtacttcacagcatatcaaagagatctttgctcattcattcaataaaatacgttgatcatgtattatttgcaagccccctgggttatggaacatggggaaaattaagatgta

SEQ ID NO: 76679 - DNA, 122 bp, Homo sapiens
ccaaccctcagttttggatgttagacatttgtagaaaaaaaattacaaagctgtaggattcggagagttctagacttgccattaatgttcaggcagaacaaaagctgaattgggcaaaaaac

SEQ ID NO: 76680 - DNA, 122 bp, Homo sapiens
ttgagcctaacacccagggctcccaatggctcttgtccacctagtctcatcagtcagccacgctggatctcagagtaatcctgcttaattatacaaactcatcatcagcttcagtcaaggtt

SEQ ID NO: 76681 - DNA, 122 bp, Homo sapiens
cccctccgccacctcccccctagataatcagagcaattagctgcaaaagaaatgtgcttccgaggctagggaagtgctaaatcataaacagccctagatacctccaaattagcatctcccag

SEQ ID NO: 76682 - DNA, 122 bp, Homo sapiens
tcctgccagctctgtgctcagggacccacagagtcaagcaagttattgaattcagcataccgaattttatttattgccgctcaggagggtgggggcctgctgaaagacagggtcggggcctg

SEQ ID NO: 76683 - DNA, 122 bp, Homo sapiens
tcttcaggctgcctctctccagcacagctggtgagctggcttcctgacgaccacttagtccgcactggtatgaaaatggttccgtcaagaactgtcctggccgtgctctgggcagtatcttc

SEQ ID NO: 76684 - DNA, 122 bp, Homo sapiens
gcacggcccaaaggaggccccacgggagcagttctcctggttacctggtttgtacttgaccggtcacggtgagggctgccatctgagaagcgggagcctgtgaagaagcatctctccctcgc

SEQ ID NO: 76685 - DNA, 122 bp, Homo sapiens
tcctatcatcgccgctatatttgtgtctcggtgcatactctcattggccctacctgcagtcgctctacgtaaggggcgttccagagtcagccactgggagtcgctggattcgggttttaaaa

SEQ ID NO: 76686 - DNA, 122 bp, Homo sapiens
gagcgacactattattttgagacagggtctcactctcttgcccaggcaggagtgcagtggcgccgtcttggctcactgcagccccgaccttacaggctcaagcgatcctcttgcctcagcct

SEQ ID NO: 76687 - DNA, 122 bp, Homo sapiens
gggtcccagaccctggggggctcctagcaggcagcaaacttgcgctggatgcgcttgtaccggagcagctcctgctcactgactgagggttgcagccgggcggcagcctgcagcaagtcctc

SEQ ID NO: 76688 - DNA, 122 bp, Homo sapiens
gaacggctcctggaaaggctctgaccgtcacattgggagaagcaatatttgctggagccacgctactcttttgtcacagacaggttaacttgcagtattaaacaacacccgacccacgcccc

SEQ ID NO: 76689 - DNA, 122 bp, Homo sapiens
agagatgacaggagctgggcctagggcaggagacacaggacatggcagggccaggttgtacgggaggtggaacaagtgtaggggggaaggagaggccgctggcactgcagtggaatgcggat

SEQ ID NO: 76690 - DNA, 122 bp, Homo sapiens
cacaaaacactcttctacacacacagaatactcttgtatcactttgggttttttttccttcgtgtgtgtgtgtgtgtgtgtgtgtgtgtgtgtgtgtgtgtgttatgagacaaggtctggct

SEQ ID NO: 76691 - DNA, 122 bp, Homo sapiens
accatggttacaagggttggccctgaaatgccaatcctggcccacatcgcggcccgcacacgaggcactgcttttggagtgaaccgcacgctcacaatacaagtagttggagagttcttcaa

SEQ ID NO: 76692 - DNA, 122 bp, Homo sapiens
accttccattttcctataaaggagggagtgttgtgagcatttatttcccaggaaatggcacgtagatctttctaatagttatgctgagaacatagttttgggggtttcctttgacatttcaa

SEQ ID NO: 76693 - DNA, 122 bp, Homo sapiens
gctctacccctcctgacccgacacgctggttgtggggggcgccactggtatcaagaaacgcgccaggcgcaggtgggccgccaaggggggctagaggctgggcagccgtggcccaggccagg

SEQ ID NO: 76694 - DNA, 122 bp, Homo sapiens
aatactgcagggagtcctgtacatttttctggggaaagatacagagattcaaaatttctacgttcagcctataagaaagacatgtttggttatccaagacacatgtgcctttctcagaaaac

SEQ ID NO: 76695 - DNA, 122 bp, Homo sapiens
aggtgggaatgagaaagcgccatacatgtgttgacttggtaccctaagatggggatggtccgccacatttgcgcgtctgttttgcatggtgtgtactgcacatcacaaatgccatgttggcc

SEQ ID NO: 76696 - DNA, 122 bp, Homo sapiens
aagtctgtgacaccaacaagcacgaaatacggtctagggcagggcggcgttgcggaaggccgacccgagggagagcaggggccgctgggggcagctcccggggccaagggtgagcagagacc

SEQ ID NO: 76697 - DNA, 122 bp, Homo sapiens
cagtcatcccagccggcacgggctgactgctgggtgctggagctggcggcagaggtgccacggtggtccccacaccagcctcagccggctcagcagctgggtcctcgtccagctccgactcc

SEQ ID NO: 76698 - DNA, 122 bp, Homo sapiens
gatcgcagatagtcagggtcgggcagggctgggctccctccctggggcgatgatgaaagccgtggtcgctattgcaccgcccagccctgcgggcactgataaggccctgcaggagggagtca

SEQ ID NO: 76699 - DNA, 122 bp, Homo sapiens
ggggctcagattgagccttgaagtaatcttggaaattgaaacagcatattcaggagtcagcgaagtttttgtaaagaaacagagtaattactaaatattttaggcttattggccaccaagat

SEQ ID NO: 76700 - DNA, 122 bp, Homo sapiens
tgctgggattacagaagagagtcaccattcctggcctgcatttcaattttttaaaatggtcgttggcaatagaaacatagatcaaaaaacaatgggaaaatgttctgtctcagatattagca

SEQ ID NO: 76701 - DNA, 122 bp, Homo sapiens
ccggaatgagccggggaaagcaaggggaaggtttggggttggctcccggtttcgcgcatgcgtgcactgcacaaaccatttggcgggtttttccggccactcagttctgccaccgtcactga

SEQ ID NO: 76702 - DNA, 122 bp, Homo sapiens
gagagggaattatacaaggtaagtgtcactggagttcatcttagaattccacctgctacacgggactattccctgcattgctatataattacagacaaaattgaaaatatgcaacaaaaagg

SEQ ID NO: 76703 - DNA, 122 bp, Homo sapiens
ggggagaggggagaggctcaacagagaggcgggtgatactcacagggggaccagcgctgccgcgagcacctttggctccaggagcaccaacattaccctgtaggagagcacagaggcatcaa

SEQ ID NO: 76704 - DNA, 122 bp, Homo sapiens
aggacggcttgagcccaggaggtcgaggctccagtgagccaagatcgcgccactacactccggcctgcggcatgcctcaaacctggggtccggcaccctgcggccttttcgcggccgcaccc

SEQ ID NO: 76705 - DNA, 122 bp, Homo sapiens
caggcagggcggaagtgcgtcaccggcggcacgcccctgcacatggacctcccccgtccccgccatccctgccgatcctgttgctgccgccttcccgccgtgctcgggctgcccgggactct

SEQ ID NO: 76706 - DNA, 122 bp, Homo sapiens
attaagtcctgacaccttgtcattagcggggcaaacccaccagagctcctgttccagctgcgtggtgcctcccgtagctccagattacgagctcgctgcctcagggaagctgagtggctcct

SEQ ID NO: 76707 - DNA, 122 bp, Homo sapiens
ccttcccttcccacccagggtaaaccaaaggcaaaactgcaggggagggtaaaggggcttcgcagcaattggagggtcagaccagccaagagtaaggcaaactgatgcctttagacaacact

SEQ ID NO: 76708 - DNA, 122 bp, Homo sapiens
gtgttaaatttggccaaatatctttcctgcatctagctaattttcttcttaacctattaacgggatgtgttgtaacaatcaacattctcatattgacccaccatagtatttctgaaataaat

SEQ ID NO: 76709 - DNA, 122 bp, Homo sapiens
aagtggcctttttatatgttcctaggaaagccaagggggaaacttaattatatttctatacggaaatgagggaaaaatagaacaattcatatatttctaatacataagaaaagtcaatgaga

SEQ ID NO: 76710 - DNA, 122 bp, Homo sapiens
gcacctgtgctgaagaacttgcaagcagcaaggacaagtgatttatggcgtgaccgttcccgggggcctccagcctcttcagactttacgagggcaggtgggggcagagaatccctgtcacc

SEQ ID NO: 76711 - DNA, 122 bp, Homo sapiens
gggagagcccaacagggtgctcagctcccaccctccctgctgccaccgcatccctcaatccgctgcctctgtgaattcaattagcaggcactttgtgatttgaggcagcgtgagggagtcag

SEQ ID NO: 76712 - DNA, 122 bp, Homo sapiens
ctcagtcttcttctcatgccctgtacgttaagatgcaaaacatgggggccccatgccattcggggatgaccttaggatcagagcaaagaatggagagaaggttcttggagaacttgagttct

SEQ ID NO: 76713 - DNA, 122 bp, Homo sapiens
tatttcggccctcgtccgcgcccgtcgtgcccctgcagggattggcgcgagtcaccttggcgtctccttaacccttgtgtccctggcgtcatctctgactctcccaggggcgacttcttggc

SEQ ID NO: 76714 - DNA, 122 bp, Homo sapiens
aagagggcagtgatgccgggaccctttctctccccacagtggctccgtcaatcagttcaccgccatctacaacagcagcggagagctcatcaacaacatcaagtactacgacggcttcatgg

SEQ ID NO: 76715 - DNA, 122 bp, Homo sapiens
gcggtaacgccagcatctgggaagacacctgttgccaagcccaccgtggtctagcggtagcgttagtgtcaaggaaaaacacccgctacttagcagaccgggaaagggagtctccctttccc

SEQ ID NO: 76716 - DNA, 122 bp, Homo sapiens
gcagagccaggcaggaggcggaacctgagaaatccacacgcggggacccctgtgcttgggcgttctctgttctctggtgctcccatgttccagaacacacactggtgaattcggaatttaaa

SEQ ID NO: 76717 - DNA, 122 bp, Homo sapiens
ggccgcacttcggttagtgcggtcggtgttgtgaagctcgagctaggcggcctctgcaggcggatcctctagctgcccttgagccctgcacattagtcgctggccctgtacaaggagcatgc

SEQ ID NO: 76718 - DNA, 122 bp, Homo sapiens
aataaaccaatgaccacatcaaacaccctcacagtcacaataattaccacttatctagtgcgtactacatacagacgctacctagtttaattcaatcctctaaataaccatttctgggatcc

SEQ ID NO: 76719 - DNA, 122 bp, Homo sapiens
cccctgatgccccgccctcctcacgactcaagttcctcccacttagctcggtgctaggggcgcatttccccggcatgcctctgctcctttgcgcacgcgcgccgcttcccagtggcaagcgc

SEQ ID NO: 76720 - DNA, 122 bp, Homo sapiens
tgcacggagcgctgcagacactgccagtcactggccgggagcctgacacgcagaggtccccgcacacgaccccgccccgggagctgctgacacctgtgaaccccgaaggctgagtcaaaatt

SEQ ID NO: 76721 - DNA, 122 bp, Homo sapiens
ctcgccacagcccgggcctctccccagtcctctttcaaggtgctctttcacctctacgtccgcagtcacagactctccatccctgcaggggcgctgggctggatcctgaagtcagtccttca

SEQ ID NO: 76722 - DNA, 122 bp, Homo sapiens
ggtgtagacccgggttctgaggccccagtgtgactttccattgttcgcgaggccctcacccgctgcgccgcccgggctgagtcattctaaattcctttctttgtgttttctctctgcagtca

SEQ ID NO: 76723 - DNA, 122 bp, Homo sapiens
ttggtctcctttagccctcgaacaccaaggccagaactcagtggtcctgggagctcgtctcgaggcctttcagcacctggaaagggcacagctctcagagcagagcagggcagcccctcggc

SEQ ID NO: 76724 - DNA, 122 bp, Homo sapiens
cgctccctgacgtcctggtggggaggctctgaggacacagcgttgctcataataatagctcgtatttattgaccacttacaccgtgccgggctctctattaaaccgttaacgcgcattaatc

SEQ ID NO: 76725 - DNA, 122 bp, Homo sapiens
tcctgcccacagcccttgcagggcacgtgaaaccggtcactgtggaccggccttcgcctccggctctgcctctgcctcacgcctcgtcctgcgagtctcacgccagctgctctgtggctatg

SEQ ID NO: 76726 - DNA, 122 bp, Homo sapiens
ggagtagacagcggggaaatgaggcggctcatctcgattggcccagaaagaagacggtcgcgccctatgtactccgggattggctagagcgagccgcgtcccccctcacgccaaccactggt

SEQ ID NO: 76727 - DNA, 122 bp, Homo sapiens
ggggcgagcccgcaaatagggctcaccttcaggtcgttctctggcaggtacttgcacagccgcgctatttccacatacttgtccaggtctagcggcgccattttaagaataacaagccgcgg

SEQ ID NO: 76728 - DNA, 122 bp, Homo sapiens
gaggcggcgcgcgggggccgggcgcggcatggtgggctccgtgggcctggtggtgtccgtcgggggccaggagcccacgcgaggctcggatttaaaggtcccgcggcctcgggccccgcccc

SEQ ID NO: 76729 - DNA, 122 bp, Homo sapiens
cttgagaaagttttaaaacttgagaaagttttaaagtgatatttctgaccatctctctcacgtttggcttctcaatatgagagagatggaaaagtccacgagaaatgcggagccctcctcac

SEQ ID NO: 76730 - DNA, 122 bp, Homo sapiens
cttcttgagaaccatcaccctcggaggatccggtagtgtatcccagtcaagtgtcaaatgcgttgttccctggagaggaaggcttatttccagaaagtactctgacgttttgtaatttgtga

SEQ ID NO: 76731 - DNA, 122 bp, Homo sapiens
ggcctgagaagtgggcggagccagccccggccggaggagcttcttgcttgcaggtgtcagcggcagcaatttcaggcagggtggccaggctgctccccgaggacagcatcttggaggaattg

SEQ ID NO: 76732 - DNA, 122 bp, Homo sapiens
gagggcggaggatggagccccagctgcggggggcagtgagggcggaggatggagccccagcgcactgggccccaggtcccgccttccactcaaacattttatctcgtttcagtgtgcgatcc

SEQ ID NO: 76733 - DNA, 122 bp, Homo sapiens
gggagagacgcctcccacactcccggaggcacgcacgtgctgtggccaccccggagggtccgccttccagagggagaattcaggattcggccagtatcagggaaggagacgctgtggggggc

SEQ ID NO: 76734 - DNA, 122 bp, Homo sapiens
gaggtttctttggtaactgaggcaggaagtaaggatgctacattagacagatgttccacgcgtagttcctgctatcatgtttgagggcccccttgtacggataccaagcaagtacaaaaaca

SEQ ID NO: 76735 - DNA, 122 bp, Homo sapiens
agcccaccgaagctcagaggattcctaaccttcctctttagagagcctcaggttagggaacgtccagtgcgcagaagctgccccgtgggaatcccattgtccatcgcctcctaatgtttcgt

SEQ ID NO: 76736 - DNA, 122 bp, Homo sapiens
gtttcatcttccttcacctcctggagggatgttggatgcgatgtgcctggaaggttcccacggacccaacagccccagaggctctggggctgtagccccagaagtgagccccacctttaccc

SEQ ID NO: 76737 - DNA, 122 bp, Homo sapiens
cgccccctttcctcagcccctatacacaggtaggtgagggttctaaagccattttacaggcgtgattgaagcggaggccacagagcggcagcgctgggtcccgagtgagactcccatcatgt

SEQ ID NO: 76738 - DNA, 122 bp, Homo sapiens
ggggctgcgaggggcggaccttgggggcgtgaccggggggggcgcttggggacctaggggcggggcgttagggggcgggaccaagggacgctcgaggggcgctcggctagtcccgccagagc

SEQ ID NO: 76739 - DNA, 122 bp, Homo sapiens
tgctacggttaccgctatggttaccgctaccgttgcagtcaccgttgccgctaccgctgacgtcaccgctaccgttacagctaccgttgcttttgccgttgccgctggctgtaccgctgacg

SEQ ID NO: 76740 - DNA, 122 bp, Homo sapiens
tgtaaagacagccttgactcaagcatgcgttagagcacgtgtcagggccgaccgtgctggcggcgacttcaccgcagtcggctcccagggagaaagcctggcgagtgaggcgcgaaaccgga

SEQ ID NO: 76741 - DNA, 122 bp, Homo sapiens
cccagaggtgtccaagtccttaaagatgtggcagagtcctagcctctgactgacatctgtcgaggggcctctgcgagagtcgcccaacctggccttgagggacaccaggcacgctcagctct

SEQ ID NO: 76742 - DNA, 122 bp, Homo sapiens
acaccgctcagtctgcggaggacggcagagccagtttgctctggcttggcctgaagaagacgctgagagtcgtcgaagctgtcctcggttattgaaactctgttctgagggaggtggagtgc

SEQ ID NO: 76743 - DNA, 122 bp, Homo sapiens
acggcaatgtttcggatactctgggtaaaaattaaatgtcttacgaaaagtcctgtcacccgtttcttgattactttttacggcggcttccagaacctttcgtcagcgcgagctccatgccc

SEQ ID NO: 76744 - DNA, 122 bp, Homo sapiens
gcgctacgcccgggcgccgcatcctggggcaggggtggatgcctagttgcaggggcttcccgggagaacactgccaaagcaccgccgagggtggggcgcgaaaagtttatttcgcttttacc

SEQ ID NO: 76745 - DNA, 122 bp, Homo sapiens
tggccggctgtcaatggttttcaccccggtaccactttggttgtgtgaaggcttcaactgcgtgaggagatgcgtcggtcccggagcaattgaaatctcatccccatcgtgagcagcctctt

SEQ ID NO: 76746 - DNA, 122 bp, Homo sapiens
caaaaaaaaaaaaaaaccacctgtcgggctgtggttgggtgtatgacgtgtcttggtccacgtcagttcctggggaatctctgcttccctttctgtgctcccctttcccatgggcccccgcc

SEQ ID NO: 76747 - DNA, 122 bp, Homo sapiens
tctacaccagcttcatcgattcctgattggaggttggtctgcccaggaccctaaatcaggcgtgcctgtgagcataaaccagttcacagaaggtgcacagcagaatcactttagattatttt

SEQ ID NO: 76748 - DNA, 122 bp, Homo sapiens
tgacacttcaggcatcaaccctcatggcctctcagccttgcaaaggcagccacttaaagtcggtgtcctgtgtggggcaccaagctgagctgcagacacccagtaggcgcgaggcaaatgcg

SEQ ID NO: 76749 - DNA, 122 bp, Homo sapiens
gcagcacaaggaagagatggcggccgaggctggggaagccgtggcgtcccccatggacgacgggtttgtgagcctggactcgccctcctatgtcctgtacaggtaacgcccccgcggcggcc

SEQ ID NO: 76750 - DNA, 122 bp, Homo sapiens
atcactaaagtttacatttatgagatggataagactgtggaaggtttggggaagaagatccgaagctcagttttggacctgttaggttcaacatgcctcttaacacatccaagcagaatggt

SEQ ID NO: 76751 - DNA, 122 bp, Homo sapiens
tcatcgacaatgctctgtggagctctgggaagcctatcgtaaagttatttaaactaccaccgaattctagaaggaattgcaatgtggagttgcagtcagggtagacgttcatgtcccagagg

SEQ ID NO: 76752 - DNA, 122 bp, Homo sapiens
ttttcctacatccctatcctcagcatcctcctttgaagacattcacttaaaagtggtggccgggcgcggtggctcacgcctgtaattccagcactttgggaggccgaggtgggcagatcacg

SEQ ID NO: 76753 - DNA, 122 bp, Homo sapiens
ccagcggcagccattcggagcgctcgggcgcagaagggctggggcccattggctgtgggacgctgccagtctccggagggggtgtggtgggggtggggtctggggccgcagcgggtcggggc

SEQ ID NO: 76754 - DNA, 122 bp, Homo sapiens
ccacaccagttgagaggctcagcttggctgaggcagctttcccacccctggctgcgtgttcggtccctggtctgtaaacctgtgcccaagctgccccagaccctggagccccgggttccgca

SEQ ID NO: 76755 - DNA, 122 bp, Homo sapiens
ccgcgcccacgaagagagccagggtgagcggcaggaagcctctccaggggttccgcagggcgcgccccgggctgcgggctttggtccgcggcctcatggcgcggggcggctggagagtggtg

SEQ ID NO: 76756 - DNA, 122 bp, Homo sapiens
aagcccttgtggaggtgggcagtcttgttctccgaggaaggctgtgtgcggaaggtcagccgcaaactcctccctgaggatacaaactccctctgaccagggggcctgcccagaggggagcc

SEQ ID NO: 76757 - DNA, 122 bp, Homo sapiens
atcatcatggtcaagcactatgcacggttcataaccacacgtgctgctcctctgtaggaccgcagtgcagcaggtctgtctacgccagcatcaccacagacttgcgagtacggtgttgcaca

SEQ ID NO: 76758 - DNA, 122 bp, Homo sapiens
gggagaacacagccctggctggcgggaagtgacccgagctgccgggcagcttgtgcacagcggaccacatggcaggaaatcatgagttccttccctggtgctccccccgggactcagaacaa

SEQ ID NO: 76759 - DNA, 122 bp, Homo sapiens
gagaatgctctggcctctggaatagctgctgtgtttcttccatgcagacctgtgccctcccgccacctcaattcctcttccctagcatagtggtgacactcggtccaccaccaactgtcctg

SEQ ID NO: 76760 - DNA, 122 bp, Homo sapiens
ctctcagaagccgccctccccactgtgccctttcttggtttatattcctgcttgtgcgtgcgtgtcgctaatgcacctacatttttgtatcggtcaaattctttgtgtctcttttggttggt

SEQ ID NO: 76761 - DNA, 122 bp, Homo sapiens
cccggcctgcggaagcggttggagggagaaggctcaatccgaatggctggggcctcactgcggatcgccttcagccgccatcttgtttcttccgttaccggagcgcggtcacgtgagctgag

SEQ ID NO: 76762 - DNA, 122 bp, Homo sapiens
tgtttttttcttccctgttcccttcacccaaggctcagtgtgcaaaagcagctcgctctgcgtggcagaccccattctaatccttctctttccttagattctgagcccggttagaattagcc

SEQ ID NO: 76763 - DNA, 122 bp, Homo sapiens
aacaatgaaacagcagaagtgacactctgagaaccatgggagagggacctccaccctggtcggtccaaaaggcaaagcattgaaccaaagaaaattactcttgagccttaagattcagcggt

SEQ ID NO: 76764 - DNA, 122 bp, Homo sapiens
cgcccaggatgactttcctggcaagttctgcagacggtgcccctttcttgggacgatcaacgtagatgggcaaaccacaccatcttaaatagccttgcggtgtctcccgggcccaggccggt

SEQ ID NO: 76765 - DNA, 122 bp, Homo sapiens
gcaagggactgcggaaggagtgccgcaatcttcagggtattgacgcccacccgggtcctccgcagcctagagcagggaactgcggaaagagtgccacaatcctcagggtattgacgcccacc

SEQ ID NO: 76766 - DNA, 122 bp, Homo sapiens
tgctctcaattgttcaagaaactgaaagcttagagaggttgaagcgatttgccaagttcacgggctggtgacggagtgggcctcagaactcagatctttctgactcaaactgccttgttctt

SEQ ID NO: 76767 - DNA, 122 bp, Homo sapiens
tctgctgctgccactgagctggacatctccaggctccatctcttgaaccatggatcccagcgttgttagcaatgagtattatgatgttgcccatggagcaaaagatccagtgggtccccact

SEQ ID NO: 76768 - DNA, 122 bp, Homo sapiens
atctgggaaatactcggggctgctggtgcagagctgaccagagagctccagacagggtaccgcgcaggaatggggcgggacgcgggaggctcggctgcgggcccagccgccatcttgcggcc

SEQ ID NO: 76769 - DNA, 122 bp, Homo sapiens
acatctgagagttccaccgtgaggcctcgcctctccactccacagacctctgcctggccacggatccttcaccctggcttgacagctggtttaatctgcaagccagggtggaatgcgtggtc

SEQ ID NO: 76770 - DNA, 122 bp, Homo sapiens
ggagaaccaccaccccccacgtggggaggagggaattcctgtaccttaggcagtgccggacgggtgagagccctgagtgtccttgttgacctccagatcctcttcacagcatgcagagcggt

SEQ ID NO: 76771 - DNA, 122 bp, Homo sapiens
tttttgtatttttagtagaggggtttcaccgtgttagccagtatggtctcgatctcctgacgtcgtgatctgcccgcctcggcctcccaaagtgctgggattacaggtgtgagccaccatgc

SEQ ID NO: 76772 - DNA, 122 bp, Homo sapiens
agtgctttctagcctacacttaggtgaagaactaaaggagctcaggacaatcactgcgagcgtctcctgactctcaaattccctaactccgggactcctagcatctaatgcctggacacggc

SEQ ID NO: 76773 - DNA, 122 bp, Homo sapiens
aggcccccgcttctttcccgcgtgcctcagggacagtttgccacagccctctcccctccccggtgcctcactctgcagaccccagtcctccgggctaagcaggttgtcggtgaagaaacgcg

SEQ ID NO: 76774 - DNA, 122 bp, Homo sapiens
cagcaaagctgtgcactccaggggcaccacaaaggcaatagcttcaagatgggcttgtaccggttgccagtgtggctgtggctgtgatgcgtgggacgggagctggccaagccttgtagggc

SEQ ID NO: 76775 - DNA, 122 bp, Homo sapiens
ggccgcgcggggaaagccgcagaaacgtcctgaagccctggccggcagcccctgaacaaacgaggcctccacaggcgtacactattgtttctaatgtcggaaaagggtgccgcggtggaaac

SEQ ID NO: 76776 - DNA, 122 bp, Homo sapiens
aggtcgcggggccggacattttctccaagcgctttcctggcacagcgcgcaggcggcctgcgccaaagctctggcttcctccaggcgcccagaccccgccctccccgcaggcgccagggcgt

SEQ ID NO: 76777 - DNA, 122 bp, Homo sapiens
aggaagaaactgggacgctgcggacgcggaactggccagacccgcggcgcgtggcacgcgcgagccctcccgcgcatgctccacccgccggcctccagcccgcgccccgggccccgcctccc

SEQ ID NO: 76778 - DNA, 122 bp, Homo sapiens
ccagtagtactcccttaagtcataacaacaaaaaaatgcctccagatgttgtcaactctccgtgaaggataaaactgctccagcttgagaagcaccctggtccaagaagcatcagacaatgt

SEQ ID NO: 76779 - DNA, 122 bp, Homo sapiens
caggacgtcccttagcgccaccgcctcacatgccagtgctgccgggaacccagcgatatccgcaccaggcaagagaactgcgctggggcaatagccagaggccgagacaagggagggatggc

SEQ ID NO: 76780 - DNA, 122 bp, Homo sapiens
gcctgttttgcctgtttgttcttatgttaaagaagggctctacgtcctgtctggaaagggcggagctggctcggaccgccccactgcctttcccaggaccttcactcgtcctgtcccaccgc

SEQ ID NO: 76781 - DNA, 122 bp, Homo sapiens
cccctccttcacccggaccgtgggcatctgggcctcgccgaagccgtcaaggtggctgctcgggcttctagagcccgtgtccagccctttgccaccgaggcctgatcctcttttctgcccta

SEQ ID NO: 76782 - DNA, 122 bp, Homo sapiens
ggacagggccggcgtcggtcaaggtcaattggcaggtgagttgacagcgccgccactaatcgatgaaaacgccccccgcgagcacccagctgctcatggcctccggaagcggacgtagggcg

SEQ ID NO: 76783 - DNA, 122 bp, Homo sapiens
attgtcaaatatttatggacacgtaaacaaagcccacattatgtgtgtggctctggcagccggcaggcggtggagggcgtgctcccagctagcctgcaacagggtggggacacaaaagattc

SEQ ID NO: 76784 - DNA, 122 bp, Homo sapiens
gatggagaactctgcacacatacgcaggagggttgattttttctaattcatctctgtagccgggatagcttctgacgcctaagaaatgtagtcaacactcctacctaaaatgcccagagaga

SEQ ID NO: 76785 - DNA, 122 bp, Homo sapiens
gcctgctaatcatgatcggccgttccctttctcatattaacacaattctatctcagacgccgggcggccgtggccagctgagcagcagagccatcaatgtgcaaataaagcagaaaatagag

SEQ ID NO: 76786 - DNA, 122 bp, Homo sapiens
aaaaaaggattttatcaactatagcaccttcatctcaagagaccagcagctacctaagtacgtaggctctgcagccccttttcccactttggatgtgactttcacctttgagagccttgggt

SEQ ID NO: 76787 - DNA, 122 bp, Homo sapiens
cgtcgaagcgcgcacggggtaacagccctcaaactggggaggccggtggttctcggaccgcgaagggcagcctcccttccggaacttgttttagacaacactctctccaccagagctccgac

SEQ ID NO: 76788 - DNA, 122 bp, Homo sapiens
actttgggatgttattgcctcctgaggaacagacttctcatgctgggtttcagggctttccgtccttatcaaagagctttcctttttgtaatctacaacaggttatacctttcctcagccag

SEQ ID NO: 76789 - DNA, 122 bp, Homo sapiens
ctcagatcccaaatccagccaatcctcaagctttgtcgattgcatttccaaaatatttctcgtatcaaatgcttctcactattgcttgtcttctcccattttatagcacccagctccttgca

SEQ ID NO: 76790 - DNA, 122 bp, Homo sapiens
ttttgttctttctgtaaacatgaatgtgactcagtgaaagcttagtgcttatcacagactcgccactgagggaaagaggattgtatagaggccgggactgtgggggctgagtaatatctggg

SEQ ID NO: 76791 - DNA, 122 bp, Homo sapiens
gaacaccgtcaccccagccactcgcagccaccaagaggtgccgcctgcacctgcaggctccgtctgtccttgctgcacagcccctgcctggagacagcctacacctgtggggtgcccctcat

SEQ ID NO: 76792 - DNA, 122 bp, Homo sapiens
ggggctgaggccgcgtctctcgccgtcccctgggcgcgggccaggcggggaggaggggggcgctccggtcgtgtgcccaggactgtcccccagcggccactcgggccccagccccccaggcc

SEQ ID NO: 76793 - DNA, 122 bp, Homo sapiens
tgcgtccctcgccgcgccgtcgccccggcggccgtccccaccctccctcctccccgcttccgcacggccgccggacactcactactccttgagcagcaccatgtcgcttcgcggctcggtgg

SEQ ID NO: 76794 - DNA, 122 bp, Homo sapiens
tttaaaaaatattcggtatacgaaattgaaactctatatataagatacttcttagccgggcgcagtggctcacacctgtaatcccagcagtttgggaggccgaagcaggaggatcacgaggt

SEQ ID NO: 76795 - DNA, 122 bp, Homo sapiens
gccgtcctagagccaagcgcccgctagagccgagactagggggcggtgaggagtgggacccgctcgcggccattggttgtgcggccaggaggggcggagggacgacgcgcgggctgtgcggg

SEQ ID NO: 76796 - DNA, 122 bp, Homo sapiens
cccgcgaagggccgggtctggtgctctggggctggctttggacctctcgtcctgggactccgtgggagcccgggagctgtgtcagtgcccgttggtgctggagccagtcggcccttccttgg

SEQ ID NO: 76797 - DNA, 122 bp, Homo sapiens
cataaattacagaccacttcggggccttatcttcttatctatccacagctccaccttgtacgcactcctgaaggccatggtgaggttcggttgcatcttggctttaggctgagaattgggaa

SEQ ID NO: 76798 - DNA, 122 bp, Homo sapiens
gagctttgatctccctataggagctttgagttgagaaaactccctttccatcattcctgccgtgggcctctaaatcatgaaattccatatcaaattacagagagcttccctctgagagttta

SEQ ID NO: 76799 - DNA, 122 bp, Homo sapiens
ctgccggagcgggtactggtggtgctgctcgtgcctccagagatgcttgggggctttgagcgtggccccgccggcgctgtcgctgccctctccgctgcccgcccgggccggcgcgctgctgc

SEQ ID NO: 76800 - DNA, 122 bp, Homo sapiens
cttcgaggttgtgataggcagctagattggtgaatgatacacgggctcacacagctctgacggcttcacctctttcacctctaaactacatctctgatgatctccacagtcctctccattct

SEQ ID NO: 76801 - DNA, 122 bp, Homo sapiens
ccatcgggacagactactcacaagacctggctgagctgatggaactgctccagagcctggcgacaccagcactgttgcttgtcactgctgcaccctgcacacagcgggctctgcaggagccg

SEQ ID NO: 76802 - DNA, 122 bp, Homo sapiens
gcatatcaccaggatttgatgtacaaataatttcatcgcccaggtagtaagcccagtacccgatagacagttttccgaaccccacctttctccctccctccttcctcaagcaggccccagta

SEQ ID NO: 76803 - DNA, 122 bp, Homo sapiens
caccggctggggcggggcggaggctcgcgcgccccgtcttgctgtgacgccggggcgggacgtgatccttaatacccaggcgggcgcctcatagcctcccggtgactgccaggggccgaagt

SEQ ID NO: 76804 - DNA, 122 bp, Homo sapiens
aaacccttcagtttcacgaaccacggccagaaatctgcagctgtttccatgtttagacgccgcccaccaagggtccccagttggaaaggaaaagagagagcgcgcccctgtatggagcggaa

SEQ ID NO: 76805 - DNA, 122 bp, Homo sapiens
cgccgtaggatcagggagcatcaaatgagatggcacctggggaaggcccgtgtggcccagcgtccaccactaacgccgttcaatatctacctcaactcccctctaacgcgagaatgtgtatg

SEQ ID NO: 76806 - DNA, 122 bp, Homo sapiens
agcaagaacctaatagagatttcctgaaacactcttccctgaattttccaggaaaattaccgttacctggtccattagcttcagaataacatccaagctcactcaaggatcttcatgggttg

SEQ ID NO: 76807 - DNA, 122 bp, Homo sapiens
tcctaccggcccgcctgttttttcgcctgtggcttaggaactccagcctcacctgatctccgaatggacctcagctgctcctgcgccactggtaaaggatgcctggtttcgggtcttaggat

SEQ ID NO: 76808 - DNA, 122 bp, Homo sapiens
gtggaatgttaataaatttcagtttagttctgtaatgtcaagaatttaagaattaaaaaacggattggttaaaaaatgcttcatatttgaaaaagctgggaattgctgtcttaaactctttg

SEQ ID NO: 76809 - DNA, 122 bp, Homo sapiens
gcgcatgggcgccaacaatctggagcggatgggcctggagcgcatgggcgccaacagcctcgagcgcatgggcctggagcgcatgggtgccaacagcctcgagcgcatgggccctgccatgg

SEQ ID NO: 76810 - DNA, 122 bp, Homo sapiens
ccctcggccctgtccccccagcgcgccccgcggccgccgcgtcttcctcgccgccttcgccgctgccctgggcccactcagcttcggcttcgcgctcggctacagctccccggccatcccta

SEQ ID NO: 76811 - DNA, 122 bp, Homo sapiens
ccgggatggcactgcggcccaggaagccccgtcgccggcctacctcgcgcggcaccctctcggtggcactgcctgctctggtctgaaactgtagccccagcctcaccgaccttcgggaagtg

SEQ ID NO: 76812 - DNA, 122 bp, Homo sapiens
gcggggcgatttcgccttgccgcagagccagtctgcgcctgcgcggactgcggcagagggcggggtgtgagaagcagagtacagtgagactagcattcactgctggccagtgcctgcctttt

SEQ ID NO: 76813 - DNA, 122 bp, Homo sapiens
attctattaaaactgggttcccatttcccctgaccatagttttttaactcaggcagaggacggtggttctgagctgtgctgtgatttctaataataaccattaccaccaaattctcatacca

SEQ ID NO: 76814 - DNA, 122 bp, Homo sapiens
gaagcaggttttgacttgtgtatgcagagcagacctggcccaagggtgggggcttcctggcgggcaacccctgcctcccctctcttgcaggaacgcatcttcctgaccctctccaattacat

SEQ ID NO: 76815 - DNA, 122 bp, Homo sapiens
tacatatattaatgttattaaaattcaggggcatgaatatctaatttgctttcctaacaacgagtatgcaagcacagtaattttatttgtgaaaggccagaattgggtatttccaccttgtg

SEQ ID NO: 76816 - DNA, 122 bp, Homo sapiens
ccaggctggtctcgaacacctgacctcatgatcctctcacctcggcctcccaaagtgctgcgattacaggcatgagccattcatcagacttgttaacacatatatgcctttgtttttccctt

SEQ ID NO: 76817 - DNA, 122 bp, Homo sapiens
gcacggaccctctacttcagtgagtgcatccagggtcgcagggaaccggtggcttagaggcgggggtcggaaggggctgcgaggtgttattgtgagaggcccgcgacctcccctcccccacc

SEQ ID NO: 76818 - DNA, 122 bp, Homo sapiens
cccctcgcacctccccagagttgcctaactcctaggccctgaaagtgccagaacaaaggccgactcccccggcgcctccctcggggactgagcaccctgggccctgctgacgaagcaaaccc

SEQ ID NO: 76819 - DNA, 122 bp, Homo sapiens
agcgcaggagaggtgtcaaagagctggcgcgtctccagagccccgggaggaaggctgtaacggcagccccatcgtagacagggacattcgcatcccgagccctggatctctgaaaaccagcc

SEQ ID NO: 76820 - DNA, 122 bp, Homo sapiens
ccccgggcaccttgggatgggcgcgccaggtactgcgcgagtctagcggggttcgtgctgcgtcccgtacagcgcgggctgcaggtccagccccggcgtggggccgcgtccggcgccccgcg

SEQ ID NO: 76821 - DNA, 122 bp, Homo sapiens
ctctagcgccggaggctgggaacgcaccgcggtgccaccgcgtcctgcaggggcggggcgcgcacctggggatgcacctgtcctagaccccctgcgcctattcctcgcccgccccatccttc

SEQ ID NO: 76822 - DNA, 122 bp, Homo sapiens
ggaggttggggaggcaagtagggtccagcgcatgaagggcctggtgttagtctgttctcacgctgctgtaaagaacttccctgagtctcagtaatttataaaggactgaggtttaattgact

SEQ ID NO: 76823 - DNA, 122 bp, Homo sapiens
cagggggtttcccaaggtcaggtcctgggctggtggctctctgttctccagcaccccctacgcattagacatttcatcagtacttaccgagctgaactgaactgccctgctcctccatgccc

SEQ ID NO: 76824 - DNA, 122 bp, Homo sapiens
aacagccgagcaagctgcagcttcagcggaggtggaggtgggggcggacgccgctcgcgccggtctctgtttccaaagttgttacagtgagaaaataagcggcttcgtgcagcgtgttgtat

SEQ ID NO: 76825 - DNA, 122 bp, Homo sapiens
tggaaggacgcgtgagaggatggcgagaggagggcacagctaaggaaaagtgggaaaaggcgggccttattccagctttctgttgagatcccagaatgtagggttaggttgggaaccagaac

SEQ ID NO: 76826 - DNA, 122 bp, Homo sapiens
agttactcagcaagaagtatgtgcctatactgcagtttccccagcgcccctgctgctgatcgtggcagccctgagtcctgtgaggtcaaatgcttgttgatgtgagaactgctttctattgt

SEQ ID NO: 76827 - DNA, 122 bp, Homo sapiens
ctggaatggtgaccaggggaaccttttccacagcgatctgtggtaatggccaatagaccacggcattcctatggatgagactggcagccaaggaggtcactgctttgccttatacaaaatat

SEQ ID NO: 76828 - DNA, 122 bp, Homo sapiens
ctccagtgatccgctcacctcggcctcccacggtgctgggattacaggtgtgagccacagcgcctggcctgaggaccagtttttgcttgcttgtttgtgcttctggatatcctttttttttt

SEQ ID NO: 76829 - DNA, 122 bp, Homo sapiens
ttataaaacgtttgctgcacacactgagattgcacctggaagtacagaaataagaacacacgtattttattttatttttttacccctgaagatctttaagtcttctgaggagcatggacctg

SEQ ID NO: 76830 - DNA, 122 bp, Homo sapiens
tcctaggtatacacccaaaagaaatgaacataaggactcaattgagtacatgttcacacacgttcacagtagtgctattcagaatagcagaaaggtagaaacagcccaaatacttaccgaca

SEQ ID NO: 76831 - DNA, 122 bp, Homo sapiens
cggggagggagggagggctgaggtgtcccccctgccgggtggaaccggaggcggcggcggcgctggcggcggccgtggtggcggaggcgacggtggagacggctgccctagtgggagaggcg

SEQ ID NO: 76832 - DNA, 122 bp, Homo sapiens
cacgtttgcaatgtgcacgggtgcagctctgtgcagccactctgccgggcgaccctttcccggcacctgccctggaagccgctgggccctgtgtctctgcactgcctcccattgacactgct

SEQ ID NO: 76833 - DNA, 122 bp, Homo sapiens
cattaagctccagctttgaatccaaacggtgcagttaggaaggaggaagagcaaagaagccgggcaaataaagatgacagccaggagccagaggaatgtgtttggctcaggactccccttct

SEQ ID NO: 76834 - DNA, 122 bp, Homo sapiens
tggctgtttctccattgacttcgcgcaaagattgcgaagaaagaaacgcggctggggaagcggggttccctcaccgcagcccacccgggcctccttccgcgacttccctcttagtcagggcc

SEQ ID NO: 76835 - DNA, 122 bp, Homo sapiens
tcttggtttcatttagtaagtgggttagctttttttcagtggggaaaatagaagagatgccgtttttcttagtgtaactgagggtaggtgttgtaattggcaaaaatctatctcaactaatg

SEQ ID NO: 76836 - DNA, 122 bp, Homo sapiens
cagtgaccgcggctaagaggtgtgtcccaccgcccccactcaatccgtccgctatgtattcggggccagccccaaacacttctccaggtctcttgcgctccccgagggtatcttcctcctct

SEQ ID NO: 76837 - DNA, 122 bp, Homo sapiens
agctgggtgtgcaccgagctgagtgtgcactgagctgctgcgcggcaagcagggccaggacgcgggtgagccacaaggtggggctcactgctcaggcacagaggctgggccatcaccaaggt

SEQ ID NO: 76838 - DNA, 122 bp, Homo sapiens
ggtgttttctttggtttttctgattctttttgggggattgcgggagtcagggttagaagtcggcctggtggtgctggaaaaaagttctgaggtccagcgcagagtcccagggctcccaagtc

SEQ ID NO: 76839 - DNA, 122 bp, Homo sapiens
gtatctccactaagtggcagaattggtatccagataaaaattcatgtatctccaagaccacgttcttttcagtggactaggcaacatcccccaaaatgaggatatatgagagttttgagaaa

SEQ ID NO: 76840 - DNA, 122 bp, Homo sapiens
cgctcgtatcacgcaccacgcaccacgcaccgcgcacagccgctcgcgcttgcgcgactgcgggcgagattccgaatccatcgcttccggaaaactcaccaataagaaacctctgtccaccc

SEQ ID NO: 76841 - DNA, 122 bp, Homo sapiens
acaaggcaatagcaaagcacggtagaccagcactaatctgtgctcaccctctgagaagcacgtcccagacagcatcctggggaaaagctcattcagtgagcatcagtgtccgccaacaaaaa

SEQ ID NO: 76842 - DNA, 122 bp, Homo sapiens
aatctattctctccagaacctgaattcacatctttgcaagagggaatctgattggcccagcgtccgaaattgtttacttatggtctaatcagctgtgtcaggggggcatggtcatgttcatt

SEQ ID NO: 76843 - DNA, 122 bp, Homo sapiens
cacttctgagtggcctccctcctgttcacaggcacctctgagatttcctggctgacacatcgcatctccctctggccacagccaagcaacaccagatgtctgcagtagcagtaacactttgg

SEQ ID NO: 76844 - DNA, 122 bp, Homo sapiens
cctcaaattcctggttccttattcccgctggctcccaccaactgaaaagcagaggtggctcgcaagcggcggggctctgccctagattgccagtaggcgctcgactcacatccagctccacc

SEQ ID NO: 76845 - DNA, 122 bp, Homo sapiens
actgcactccagcctgggtgacagagggagactccgtctcaaaaaaacaaagaatgaattcgggcccttaccattcaaaatgtagtccatagagcagtgggatcaccatcacatgggaacta

SEQ ID NO: 76846 - DNA, 122 bp, Homo sapiens
gcggcagcccccgcccaagctcctcctaagcgcctgggggcgctgtgggtcgctttgggtcgcgggggcgctctttctcagcattcttgtttcgtactgaggctttcgggacggcggcggga

SEQ ID NO: 76847 - DNA, 122 bp, Homo sapiens
cagttgtgtgcaagtgcatatacgtgtagcctagtagcccgtgtccttgttccttgagaccgcgctgcctccgccacgtgtcacacgcccaggcacacgtccccgtagggagagccggggga

SEQ ID NO: 76848 - DNA, 122 bp, Homo sapiens
gccccctcgtggcatcctgtggccttgcatgccattgctctcagtccaggaccaggcaaacgtaggctccaataggaaaacggctaagaaagaaagcggaagagcgggagagggaaggtaaa

SEQ ID NO: 76849 - DNA, 122 bp, Homo sapiens
tggaacgacccaaacctacctgaaagcgcgtctctgcagtcccgctggacttctccggctcgaactcctaatctcagcccggaatccagccatattcatttaaggattgcgttttccaaagg

SEQ ID NO: 76850 - DNA, 122 bp, Homo sapiens
cctcccgccggaccctgggactccagagaagcgccgagggcgcgagtacactaagatatacgaccttccctggggaccgggaagggcacaaccacctcttgcaactccgccactaagacgcc

SEQ ID NO: 76851 - DNA, 122 bp, Homo sapiens
acgcaggagggttccggggatggtccgaggtgaggggctgcgccacagacgaacgccttgcgctgctggctgcttttacccatctccgtggtgcagttggcccgattccttgatgcatttcc

SEQ ID NO: 76852 - DNA, 122 bp, Homo sapiens
gccttcttcctggtcctccctccaagaatcttattgttcacaatcacaactgtctctgcccgccctgtggttccctctgccacatgcttgttcaagttgttcctggactgccttctccagcc

SEQ ID NO: 76853 - DNA, 122 bp, Homo sapiens
gatagaattaccccaaccaacctcctcctgcctctgacactagggaagacccagaggcaacgagggtccaggttatgcagtttcctttataaaataagaagaatgagtaaatgcttccagaa

SEQ ID NO: 76854 - DNA, 122 bp, Homo sapiens
gatctgtcctgaagggatctgagaagttgttccaattgctccttctcttcgtcctggtaccgaatagaaattctttcctactcacacttgcctctttctcatatgttcccacattgcagtaa

SEQ ID NO: 76855 - DNA, 122 bp, Homo sapiens
ccaaaaggctatgcagcggcgggcccgcggagaaaagcgttttctctttggtgatcaacgcgaggatgttgccgcaaagccttttgggggctgtagttttctggggctaaatgcacgtgcct

SEQ ID NO: 76856 - DNA, 122 bp, Homo sapiens
agtgctaggctcaatcccagcttcctggatgtcaagttcaagggtctaagaggaggtgggcgtaggaagtctcactgagggtgggcaggtcaatcagcactttgtggactcgccaggatgag

SEQ ID NO: 76857 - DNA, 122 bp, Homo sapiens
agtaccgagatgctgtgagtaggtaccatcgagctctgcttcagctgcggggtctggatccgagtctgccctctccgttacctaatctcggacctcagggcccggccctcacgcctgaacaa

SEQ ID NO: 76858 - DNA, 122 bp, Homo sapiens
gaccctgccgccagccaggtatggtgagccttgagcagcaggaggggccgccacaccccacgccagccccgagggcatgggagaggttctgcttgctatgctgtaagcccccaaggcagctg

SEQ ID NO: 76859 - DNA, 122 bp, Homo sapiens
gactgaggagaaatttgtctccttccccagatgaactccgcgtaacgtggctgagtgcagcgaccccatctcctcccccgaacaggtgaacgcatccccctgccctgggctggctggcaacc

SEQ ID NO: 76860 - DNA, 122 bp, Homo sapiens
cacccaagtagccctttagaaaggctgctgagcaactgagccctcttgccaatagccagacgattgctgaggctttctgccaaagccttgtgagtgagtcatcctggaagtggatcttccag

SEQ ID NO: 76861 - DNA, 122 bp, Homo sapiens
tgcaatgtcaccttttaggccagagatgctctaagtgtgggctgtggactggagctcttccgcacagtctttgtgacctggacccaatgaaaaaagttgagaaattgagaatatatgttggg

SEQ ID NO: 76862 - DNA, 122 bp, Homo sapiens
gcctggttcttggtgacggtctgggaccagacacaggagcagaaggcgtccgggtggttgcgccttggtggttcttacccgagagcctgtctgtgagcacagcctgctctaacccggccgtt

SEQ ID NO: 76863 - DNA, 122 bp, Homo sapiens
catgatgttggggttctctttggtttgtttttttccaagacaggttccctgttgcccaggcgggagtgggtggcacctccaaccgagatctcttgggctcaagtggtgatctttttattttt

SEQ ID NO: 76864 - DNA, 122 bp, Homo sapiens
caggggcccacacccttccaaatatcaccttgccctccattcagaggtgaatcatctgagcgtcaggttgcccaactccgactggttttgctggagcctgcctagaggatgtcgccagccac

SEQ ID NO: 76865 - DNA, 122 bp, Homo sapiens
aaggtaaatttgttgtcatgatcacaagacaagtaaattgcatcatcaagccaggatcttcggatcactggcgtagctctctttccagtgcatcacagatgtccctcatccctggcttccac

SEQ ID NO: 76866 - DNA, 122 bp, Homo sapiens
tctgtgggacagataatgggtgatcgacatgcactctgcaccaggagtggttagaagatccgccgagcttccttactgaaagtggctgctgcgggcaagttctgtttccgccgagcactctt

SEQ ID NO: 76867 - DNA, 122 bp, Homo sapiens
actgagtcccagagatgttaagcaacttgctcaagatcacatagcaagttggtggccctccgggcagcaccccaggtctcctgtccatgactctatatcaaatggcaatagagagtagaagg

SEQ ID NO: 76868 - DNA, 122 bp, Homo sapiens
tgactaacactcacccagaattgctgtctgtgctggctgtgatctgcctccaggagcatacgccatcctgcgtgctgtgtccatcacagtgtctgtgctcggtgccttaccactgtccgtgt

SEQ ID NO: 76869 - DNA, 122 bp, Homo sapiens
tgaccaacatggtgaaaccccatctctactaaaaatacaaaaattagctgggcgtggtggcgggtgcctgtaatcccaattactcggtaggctgaggcatgagactcgcttgaacctgtgag

SEQ ID NO: 76870 - DNA, 122 bp, Homo sapiens
agctggtcggccctgcaggtgctgggcctggggactgaggaagcacagagattccccgcccggttccccgccaacggcgctagccgcgatgccccgcctcactccccgcccccgggatgcag

SEQ ID NO: 76871 - DNA, 122 bp, Homo sapiens
gttctgagcgtcggaaaatgggcactcgctccctgggggtttggggcaacttccccgctacgtcgcccagggattttaaataattgccagccaccagaaaccccctaacccttaattcttcc

SEQ ID NO: 76872 - DNA, 122 bp, Homo sapiens
ttttttttttttggtctctaccttgttattcggactctctgtattgccaaagttgagatccgtgtagttttcctgactataagagactcataatgtgtaaaacaaacaaacaaaaaaaccct

SEQ ID NO: 76873 - DNA, 122 bp, Homo sapiens
cttcagatgagaccacggccccaggtaaacactttgaccttgcagcaggggacccagctacgccacagcccgattcctgacccacagaaactgtaagataataagtgcttgccattttaagc

SEQ ID NO: 76874 - DNA, 122 bp, Homo sapiens
cggcctgcagcgtcctggcgatggcgcccttcttcagcgcgccgcctttctggggggagacgagggccccagtcaaccaccaggtccgggtggaccacgcgagtcagcacgcggctgtctat

SEQ ID NO: 76875 - DNA, 122 bp, Homo sapiens
cgcactgtcttctgggaattgtagtctctcctaggctaggcggcccgtccaaagcgcatgcgcccagacacctccgaaaaccaacgcggcagagcgcagaaagcggagaccgagggtggagg

SEQ ID NO: 76876 - DNA, 122 bp, Homo sapiens
ggaatctttctctagtcgaaatctttggctctggtcttatttcgctcatttctcctacagcgaggagccaaggtggcagccatcttggccatgcaagatcagtgggaggagaactgctgtta

SEQ ID NO: 76877 - DNA, 122 bp, Homo sapiens
ggggacagtccagtcctcatgaaaagcctggctttcctccctctgacgcagctgctgttccgtctttcctgagacggccttgctcctgacctaatctcctccctcctttctgccagcctctc

SEQ ID NO: 76878 - DNA, 122 bp, Homo sapiens
atagtaaaatctcattaattcaaacatgccactgatctttaacttttaatagctcaaatacggaatacataattgatcataggataaaccagtacggggcatgtgtaattttttttatatac

SEQ ID NO: 76879 - DNA, 122 bp, Homo sapiens
aaccactgaaggacttggtgaaaggtacagggacatctccatactacctttgcaacttcccgtgaatctttaattagtttagagcaaaaagtgttaatttcatgtttgtgttaaaaaaaaaa

SEQ ID NO: 76880 - DNA, 122 bp, Homo sapiens
ccgcctgccttgagccttgtgatgtgggcaggacggggccggggcagggccaggagcctgcggggaggcgcggggccaggcgcctgcaggagtggaacctgcccaagatctaggagtagctc

SEQ ID NO: 76881 - DNA, 122 bp, Homo sapiens
cctgggcgacagagcgagaccgtctcaaaggcttatgggtttctgatcaagtcatcttagcgactgaaagggcttcagagaaatctgaacttaagtgcaaacaaaacaaaacaaactccaaa

SEQ ID NO: 76882 - DNA, 122 bp, Homo sapiens
atttttagaaaagcaaaacagttcaacatgttaactcagaaagcataccatcattctccacgttctgagatgtatgccacctgccttagttaccacaagcaactaacactaagctgctagca

SEQ ID NO: 76883 - DNA, 122 bp, Homo sapiens
gcctgagttactccatgttgtttatctcttcctggtgcacatgtataaaaaagatggaggcgaagaacactccaaggtggatgtgcctggttcagggtagctcttcttatcggtgctgctgc

SEQ ID NO: 76884 - DNA, 122 bp, Homo sapiens
agattccaatcaaaccatctaagtgctgctgttcttgcctctgaggagacagtcggcacacgcaccctagactcgagacgaggagacagtcggcacacacacaccctagactcgggacgtgg

SEQ ID NO: 76885 - DNA, 122 bp, Homo sapiens
cttggggcgctgtccaatggcgcggaagagaacacatgagctggccaatcgggaacggcacgggggcgggctcgctcggcgcgaagttcgggcccgggaattccgaaggaggggtaggcgct

SEQ ID NO: 76886 - DNA, 122 bp, Homo sapiens
ctgcggtcccggccgagctccacggtggcagggctggcccgagagactggcggtgggaggcgggggcaggaggccacgctccgcctccgacgtccccgattccccaatatcctgggaaagcc

SEQ ID NO: 76887 - DNA, 122 bp, Homo sapiens
agaaggagtttacaaagtacgagctcatttgggtgattttggagggcttgatttgtggatcgtggtcgttataaccctgtgcttcacgatttatgatgtattaatgaattatagcgatgcac

SEQ ID NO: 76888 - DNA, 122 bp, Homo sapiens
aacttgccagcgacacccccagttttctggatgctgctggcactcactgtgaacacgttccggttgctggggagtggtgggaggggctgcaggggttgggttctctctacatccttgtggac

SEQ ID NO: 76889 - DNA, 122 bp, Homo sapiens
ttatgtcttttcaaaaatctttaaacagctgcggttgatccgagagaaggcggcatctatcgggcagctgatgaaagtgtgtcgtggaaaggacctaagctatgtctgcacccaaacagact

SEQ ID NO: 76890 - DNA, 122 bp, Homo sapiens
gaccccggcccggccccgctcccacagtcacgggcccaggccccgcctcccatcatgtcacgggcccaggccccgcctcccatgatgtcacgggcccaggccccgcctcccatgcagcacgg

SEQ ID NO: 76891 - DNA, 122 bp, Homo sapiens
ctacagagccaggagcgggagctcagaggggtgtagaaagctccaccctcctcccggcagcgcgcctgactggcagttcccaagaactcgcccccaacactgattgggtagagctccaaatt

SEQ ID NO: 76892 - DNA, 122 bp, Homo sapiens
gctggagttggatcactttccacccaagggagcctcatacgattttggagacaggcagcccgccccgcattccacctcagctttatcatttactgttaggcatatgacctcgggcaggttct

SEQ ID NO: 76893 - DNA, 122 bp, Homo sapiens
atttaggaacaatgagtccttagccaacaagagaagtactagtctgcgtgtagtagtcaccgtactttgaactttcttaacttagaagtaattaaagagtagaaattacactcttccaatgt

SEQ ID NO: 76894 - DNA, 122 bp, Homo sapiens
cacgcttccacatcctcagagggcccgggacttgggtcctggccccgccccctgcggacccggcactctgtcagttccgtccccggtcctgggaaccgctctttaccccactctgcgtgtct

SEQ ID NO: 76895 - DNA, 122 bp, Homo sapiens
ctgtgcactgtgcagaagctgcctcatcttctcagggtgagacccaaggctgcagggtgacgacatccacatttccgaagcctgaggtcccagggtgacagttcccccagccttgcgagggg

SEQ ID NO: 76896 - DNA, 122 bp, Homo sapiens
accagccaacacaggagccactggccacagtttaactaaaattaaatacaattaaaaattcgttcggttggccgggtgtggtggctcacgcctgtattcccagcactctgggaggccgaggt

SEQ ID NO: 76897 - DNA, 122 bp, Homo sapiens
actcgttcctccaggtcgtccagagtcttgggtgggaataaaaaacaagttggaaaaacacggggtgcatgagggaataaagaccagagaggttaactggggatttcagagcaatactcaga

SEQ ID NO: 76898 - DNA, 122 bp, Homo sapiens
ccgtccggccccggggacgcagcatgcaggcgctggcggaggaggacctgcagcatttgccgccccagcccctgccaccccagctgagccagggcgatggccgttccgagacgtcacagccc

SEQ ID NO: 76899 - DNA, 122 bp, Homo sapiens
cgatcgactaagaacttaaccagagcccgcggagcaaaaccaatgtaccaacaagaaactcggagcatttcaccagacccaatttggtctgcatgtcaaaatgtagggcctgtatgagtatg

SEQ ID NO: 76900 - DNA, 122 bp, Homo sapiens
gaaagcagaacacctattaaaaatagcacacctatttaaacagctacttcacattcatcacggtgaatacacttttctttttggagggcaggtctggggtgtcagctactttgctcgaccag

SEQ ID NO: 76901 - DNA, 122 bp, Homo sapiens
gaccgcacagcgctgggaggacacatgggccacagggcgggagctgtccgtggttctggccggcgtcgacccgtgggtatttaagggttggggcagcccgcctaccttctgctaaaccgcag

SEQ ID NO: 76902 - DNA, 122 bp, Homo sapiens
gttttctggggattttgctcattggtggtttgggtctcattcacgatattctatagagcccgtgcccaaaacagggggccacgtgatgcctgggaaggggtataaacagcactctggctgct

SEQ ID NO: 76903 - DNA, 122 bp, Homo sapiens
cattacaacatgatcgatgacttctttcactagttccaaaaagggctaagctttgttgagcggcgtccagtaatgcttccagtttttcagtgagccagtctgcaattgtggacagcagttct

SEQ ID NO: 76904 - DNA, 122 bp, Homo sapiens
gggcttccactgtgaagtcagccacaggtgccgctctggcgggacttacacgcttgccgccggagccctgtgtcctctcggctcccccaggtcctggtgcggttcctgttctccatcagcaa

SEQ ID NO: 76905 - DNA, 122 bp, Homo sapiens
atgagaaggaagccgcgcggccagccaggggcagggacattcgtcagagaagcacgaatgcgaaggccgaaagggaagcaagcctggggagctggaaacctgaataagacctgcggggccac

SEQ ID NO: 76906 - DNA, 122 bp, Homo sapiens
cggaggttatcacggacaggacacgactggattggcagggaacctccgacagaagcagaacgctgccttccatctctaaaaccaaaaaaaggctctttcaagtaattttcaatccctggatc

SEQ ID NO: 76907 - DNA, 122 bp, Homo sapiens
caaagcttgttcgtagaaggaccccccactgagatggctacaggcatgggtgccactgcacggattcagcttccaacatgtctgttcacattctcacccatcccccgcacatccctcagggt

SEQ ID NO: 76908 - DNA, 122 bp, Homo sapiens
ggggaaccacagaagctccgacaggagcacggggtccggagcctagagcaggaagccccgcgtctcagcgagaccagggcctggccctcaggacaacatgaggcattgtccaggcccctgtg

SEQ ID NO: 76909 - DNA, 122 bp, Homo sapiens
gcgcggcgcggcgctccactccggcctgactccgcaccggcttttgcgggcggccggcggcgcggggccctttggaaatagaatagccaatgtaatctgacacttcaacttgctcggctccg

SEQ ID NO: 76910 - DNA, 122 bp, Homo sapiens
ggcctcttactctctttactcgccatcttgcgtcgggtcgttcgcccctcgccgccgcctcggactcctctcgttagccaagagcagcccgaccgctggcgctcctgcctttcccaagcgcg

SEQ ID NO: 76911 - DNA, 122 bp, Homo sapiens
ccggcagaggttgggtttcctcaagagcctctggacgacacagctgcggggggtcagggtcggggcactcacacccttggaatgactacgtcccggggttcggcgggagggggcgtgcttcc

SEQ ID NO: 76912 - DNA, 122 bp, Homo sapiens
ctctcttttcatttctccaaaatgggatcttaagtgattctgaatgaaaacaaattggcccgctttcttctccaaacagacgcgcggcgcggtgggggcggcgggcgcgggcccggggcggc

SEQ ID NO: 76913 - DNA, 122 bp, Homo sapiens
aaatgctaaaaatattgctccccctcaagcaattgaaattttgagcaaagatttaggaagcggcaggtagggagatcaaattagaatttacatctctcagctgtaataagcttgttatcagg

SEQ ID NO: 76914 - DNA, 122 bp, Homo sapiens
ccttcagaccacatcaagcggcccatgaacgccttcatggtatggtcccggggccagcggcgcaagatggcccaggaaaaccccaagatgcacaactcggagatcagcaaacgcctaggtgc

SEQ ID NO: 76915 - DNA, 122 bp, Homo sapiens
tttaccgcgttcacagctctcaccagcgcgtctgccgcgccgctggcgtgatagccccaccgaatgcagtttcccagtcccatcctggtctcgtgcacggctgttgagttaccctagctact

SEQ ID NO: 76916 - DNA, 122 bp, Homo sapiens
gccgcttgacacatgtggaagctgaaacctggacaggggaagtgacccctggcggagggtcgggcgggacgcgggggcgggtcctggccgcagccctgcccagagagtgcgggcggaagacg

SEQ ID NO: 76917 - DNA, 122 bp, Homo sapiens
gctgcagctttgaggatttatttctgtttccagtttcccaactttgacagccctgcttggcggccaggcctccccggctctgcagctagagcgggggctcgcacgggggcgtggcagtcagg

SEQ ID NO: 76918 - DNA, 122 bp, Homo sapiens
ccatagcttacacctgctccccactattcagttaggttacctgcctggcaccatggatgccggagtttgcagcctttgatctaaattgcaaatgtatttgtggtacttgagatagttttcat

SEQ ID NO: 76919 - DNA, 122 bp, Homo sapiens
tggcgggcaacgaattccaggtgtccctgagcagctccatgtcggtgtcagagctgaaggcgcagatcacccagaagatcggcgtgcacgccttccagcagcgtctggctgtccacccgagc

SEQ ID NO: 76920 - DNA, 122 bp, Homo sapiens
ctggatctttctatagctcttccaagctgaggccatggccggcctgggtcaggccaaaggcgccagcggcagccgctcaggggagggaacacgaaaggaaactctccaggaagccagcgcgc

SEQ ID NO: 76921 - DNA, 122 bp, Homo sapiens
ccacacagtcacctcctgcaaagtgtcccacctgcttggtaggagcccagtgaggccaaccgccctgctgggctggctgtgttccaggagcccaccgctgagcgtgcacacagcgtcgaccc

SEQ ID NO: 76922 - DNA, 122 bp, Homo sapiens
cacagcccccatggtgacgccagtgatggaggtggccggtcctgaggctgctttctaacacggtggtaactgccagctgaggtgactccccagaaacatgacggtttctcaggccggaaacg

SEQ ID NO: 76923 - DNA, 122 bp, Homo sapiens
tctcatcggagagaaaatcagacccgggcctggcagagctaatgatttcatagcaagaggcgttccgggtagagactatgaaagatggggaagagaggatggggttttgaggttgcaggtga

SEQ ID NO: 76924 - DNA, 122 bp, Homo sapiens
cagggaagtgaggccacagcaggatccagagggcaccccttcccagagcctgggcccaggcgaggccaacagctctgacagtgtggaaatgcatcaaagtcctgagtgagcaactcccttct

SEQ ID NO: 76925 - DNA, 122 bp, Homo sapiens
tactaataatcacagctaacatttactgagcactcagtctatgtgtggcactgtactatacgcttctcatgcatgatgatctcattgacttcccaacaactcaaaaaaggaggtactactat

SEQ ID NO: 76926 - DNA, 122 bp, Homo sapiens
gacagacttctaagtagccaaatagaaggattgtgtctgtgttgacaaatctgttctcagcgtagctatttgtgaggtagaaggtatctttccacatcagaggctctcagaatgctaaaagg

SEQ ID NO: 76927 - DNA, 122 bp, Homo sapiens
tccccacttcccagccggggccagtcgggagcgaaagtgcgctgagctgcagtgtctggtcgagagtacccgtgggagcgtcgcgccgcggaggcagccgtcccggcgtaggtggcgtggcc

SEQ ID NO: 76928 - DNA, 122 bp, Homo sapiens
tccttggaagaggagatgaagggaagtgaaaggcggaatcaaaagtggggagggtctttgcggggccgcagtctttggaattgcgggcgataaatcaactaagtctctttaatattgtcttt

SEQ ID NO: 76929 - DNA, 122 bp, Homo sapiens
tgcggacggcaggcgtggagcacgccttggcgtttcccctcaaccctactcctctaccatcggagctggaaatgactcccaacagtctcagctttggctactagataagataaaaagggcaa

SEQ ID NO: 76930 - DNA, 122 bp, Homo sapiens
cttaaaaccctttaatcctcatcatgtacaggatgtaagatccaaactccttgtaaagggcgtatgaaatcctctgcgatctgctccttgtctactcttggatcttgtccttagtaactcca

SEQ ID NO: 76931 - DNA, 122 bp, Homo sapiens
ccctgacaccacagaccccagagcagcccctgccgacagcgtgcctgctccggacaatcccgagctaaggatctgttagtattaaccgggattttctgtctcgtataacgcatggagcagtg

SEQ ID NO: 76932 - DNA, 122 bp, Homo sapiens
ctcaccagcgtgggaggatgaagccaggtgtaaggtcaggtggtgtccccggggaagccccgtcccttatgccgtctgcaggccggggactggacttctccttgggggtcagggtgagggtt

SEQ ID NO: 76933 - DNA, 122 bp, Homo sapiens
cgccactgcactccagcctgggcgacagagcaagactccatctggaaaagaaaaagaaaacgttcaggtctgagccagaggcccaggctgtaattctgtcacttaccatgaccttgggcaag

SEQ ID NO: 76934 - DNA, 122 bp, Homo sapiens
taaacacttgaacgtaacttgtttatacagagaatgacaggacctcaaagacgaaaactgcgtctgcctgcctggccgcattgggaggcccagcgcgccccctggtggcgcgaggagatccg

SEQ ID NO: 76935 - DNA, 122 bp, Homo sapiens
ctcccaccgcccagccctacgccaggcgagggagcagtgcggtgggcggtaccccaagtccgctgggggcgtggccctggagccatgcctcgcccccagcgcgcgctcccggcgccggcccc

SEQ ID NO: 76936 - DNA, 122 bp, Homo sapiens
gtccatagtgtgcatattaggctgacagagaatccatagacataaggcacagagatgagccgaacacacacagtcctagacattttactgccataaagcagagggttgcagccggccatgta

SEQ ID NO: 76937 - DNA, 122 bp, Homo sapiens
gggaaacctgtaacttgtaacaagtgctgggcaacaggggtacaagtgttaggaggcctccgaggtgggcagggagatgaggggaggaaggtaccctaaccactcttcttgccaaatctcag

SEQ ID NO: 76938 - DNA, 122 bp, Homo sapiens
agcgtcgctgggggtaagcgggaagcagccatgtccaccagaggtccgccggagcctcagcgcgcaggagcggaagtggggttcgaccaaggggtgtggcgagcccggtttcctaggagacg

SEQ ID NO: 76939 - DNA, 122 bp, Homo sapiens
cgcgcaggcggtggaaggaggcagcgaaagttgggcaggaaacttttggccccgcccctccgccccgcccactgcgtcccgccccgcccggcgatccgctatctgcctcgcggctgacccct

SEQ ID NO: 76940 - DNA, 122 bp, Homo sapiens
cactccgcctcccttatcggggccgcccgagatcaagatggcggccacaggggcttcatccgaaccagttgacaagggtgacgacagcttgcccctaagaaaaatggccccgcctagagcat

SEQ ID NO: 76941 - DNA, 122 bp, Homo sapiens
gcaccgcctgccgctccagctccgccagcacgtgctgctctgagggcggggcgacggagacgcgggtgagggcccaagggcaccgcccctgagaaccacccccaacgcgaggccacccgctt

SEQ ID NO: 76942 - DNA, 122 bp, Homo sapiens
cgggtttgccttcgggggcccaggggaccctgagaagtctggccgtgcccgggcggtgagcgcggaggcggcccgccctgtgtccccgcggggcggagccgggttcggggccgcgctctggg

SEQ ID NO: 76943 - DNA, 122 bp, Homo sapiens
cccagcccaggaggaggctacacgatcatgtccgcgggctgccggccggaggggcgaggacgcgcgggcggaggcgcggctgccgtgctcaggcagggagccgagctccgggtgctcgccgc

SEQ ID NO: 76944 - DNA, 122 bp, Homo sapiens
atccgcaggaatcccaaccggagatctcaagagctcgagaaaaaaaaaaggcagcggcggcggcagatgaattacaattttcagtccggtattcgcagaagtcctgtgatgttttccccttc

SEQ ID NO: 76945 - DNA, 122 bp, Homo sapiens
gtaggctgtccctgcctagttggtctgacagtagctccctgcgacttctcatatcacctccgactccccagcctcacctccacgggccctgatgcactggcttcggctgtgtcttttgtgag

SEQ ID NO: 76946 - DNA, 122 bp, Homo sapiens
aatccgcgcggtataaatagccggcgggcgggccgctgacgcgctcggttgtgccgttatcgtgcaatgcttcatccccggtgccgttcaatcccaggtcgttttccctttcagctgcaatg

SEQ ID NO: 76947 - DNA, 122 bp, Homo sapiens
cccgggctcccagtctgccgcgccggctcccgatgccaccgcccgcccgcccagcggcaccgccccccgcccgctctgcgggctcccattggtcgctgcctgcaggccccctcggccccgcc

SEQ ID NO: 76948 - DNA, 122 bp, Homo sapiens
gttttacacggattttggaaaatcgaaattctaggaaacacaggacaccaattaccggtgcgcatgaacagggctggggggacctacaggagaggccagaaggcgcaccacgatcgccagcc

SEQ ID NO: 76949 - DNA, 122 bp, Homo sapiens
aaagagaaaacttgaggaaagggaagaattgaagataacgtaactttaatgactaagaagcgtattttaagcattctgtgatggatggaaaaggtagatgtctaattattttcaggtacatc

SEQ ID NO: 76950 - DNA, 122 bp, Homo sapiens
cactcgccgccgtggccctctccttcctggggcccggcagcggggaggcggcgggggccgcggggctgagctccgtcctgttcaggctcagcctgtacctgagctgcgcggcggccgccttc

SEQ ID NO: 76951 - DNA, 122 bp, Homo sapiens
ctcaaactcctgacctggtgatccacccgcctcagcctcccaaagtgctgggattacaggcgtgagcaaccgcacctggccgagaagctgctattttaaaaaaggaatgtgagctcaaacag

SEQ ID NO: 76952 - DNA, 122 bp, Homo sapiens
gaaaacagcacaaaaatcataactgtacggcttgttaatttttacaaataaatacaccctcgtgaatccagaacctagatcaagaaccagagcattaccagcacccagaaacctccccgcgc

SEQ ID NO: 76953 - DNA, 122 bp, Homo sapiens
tattgtctcctcctccagcaacactttgttgccactgcgacaaagtgggtggtcctcaggcgccgtcaggagattttgaactctctgaagaccgtccctggatcttgggttaaaaatctgtt

SEQ ID NO: 76954 - DNA, 122 bp, Homo sapiens
agtaggaaagctgtagtcacttgaagaagggggttattatgatactttacagctgcagcacgtccttaggagacattgcatcctgttaactttgcagctgactttatctgtgcctatttttc

SEQ ID NO: 76955 - DNA, 122 bp, Homo sapiens
tgtccgcgacagagccgggcttcaccgaaagcacacgctcagcggccttcccggcgagcgcgcagccccagtgaacctatggctcagcattttcagaagaaagcctgtcggcatagactttc

SEQ ID NO: 76956 - DNA, 122 bp, Homo sapiens
cagcccctcctcgggccaggcagggtgtggaccctgccctgaatgcactcagcttccagccgattctgcccctccctccattcactgcacaggcaggcgctgcaggccgtagggagggcgtg

SEQ ID NO: 76957 - DNA, 122 bp, Homo sapiens
gctgcctctgaaaccctcggggagtccgccctcgccttttcctagcttctgcgggctcgccggcagcctgtggggtttcttggcttgcagctgcggcactccagtctcttgtcgcacagcgc

SEQ ID NO: 76958 - DNA, 122 bp, Homo sapiens
aagaagcagacccagaaggacttggagtgtgcactgctgcttcggcagcacgaggccacgcgggagctggagctgcggcagctccaggccgtgcagcgcacgcgggctgagctcacccgcct

SEQ ID NO: 76959 - DNA, 122 bp, Homo sapiens
cttggctcatgcagacctgaggagaaccaggtgagaggatggagggttgagcgcagacgccgctgcccaaacctgaccgccagccccacctgaggtccttctcaccgagctgacttcgcaga

SEQ ID NO: 76960 - DNA, 122 bp, Homo sapiens
cggtgccacagtccgtttgcctgcaggaggaggctggcccaccccggagctcgccaccagcggcctagggtcccccaaggctcctggcagtccactgggaacccggaagcacagtccagcct

SEQ ID NO: 76961 - DNA, 122 bp, Homo sapiens
gcgcccgaaccagcacgcatgcgcgccgcgggccggccccatttccgccccccccccacgcgcccccccatcacacgcacacccaatccccggactgctcgctggtgctgcttgtgagaccc

SEQ ID NO: 76962 - DNA, 122 bp, Homo sapiens
gctggcttcgcctagcggatcctgtgctggggctgcgggtggagctgcccgccagtaccgcgctgtgcgcccgcattcctcagcccttggatggtagatgggaccttgcgccatggagcagg

SEQ ID NO: 76963 - DNA, 122 bp, Homo sapiens
ccttgccctacccacatgtatttcctgctgatgtttgtttacactgcggtggttactagtcgctggtgacatcacccagcgcacgtagctccacttctggggaggatacgtgccctaagtct

SEQ ID NO: 76964 - DNA, 122 bp, Homo sapiens
gctccgcttctgctcacactggcagcgttggtgcacgtgggagtgcagtcacggggctcacgttcgcgtttcctcggctgcctggagcccatagagcgctcctttctgggggtgcttcctcg

SEQ ID NO: 76965 - DNA, 122 bp, Homo sapiens
accttcgggcatgtggactgtgctgtttgggggcgcccccgagatgaccgagcaggaaatcgacactctgtgttaccagctccaggtctacctgggccacggcctggacacctgcggctgga

SEQ ID NO: 76966 - DNA, 122 bp, Homo sapiens
ggaacgtacgtgtgcgcgtaatcacgcacgtacgtacaccacgcacgtacgcaggaggcccgtattcagccacgcctatacaccgccaaatcgctaggaagccacgtattcacgaagccacg

SEQ ID NO: 76967 - DNA, 122 bp, Homo sapiens
catcttcccacgcctgggggtctggctttgtgtgcgaagacccctttcctgcagtctaggcgtggacgggggcgggagagtgggcggagggtgtggggccccactccacagccccaggtttg

SEQ ID NO: 76968 - DNA, 122 bp, Homo sapiens
ccgctgacttgggtgaacagctctgagttccggagagggttcggtctgcggagaagcgcgcgagagacaagcatcctcaaggttctggtacaaaatttggaaaatggacctggcgttgaaat

SEQ ID NO: 76969 - DNA, 122 bp, Homo sapiens
tggaggggagggtgtcccagctgatagccaaagccaaagcacatggtggaggcagtgagacgcctcagcaccagagccttggagcagccctgcagccccacaccctcctgcccgactcaagg

SEQ ID NO: 76970 - DNA, 122 bp, Homo sapiens
gatggatatgctaatgggatctagtgcttcttacctgatggacaggttctataccattatcgagccaatcctaaccactggaaggtgttaggcccatccccacctcaggaagctccctgaat

SEQ ID NO: 76971 - DNA, 122 bp, Homo sapiens
tctcggactccttgccacgctcaagtgaaggggggcagggaggggaactggccaggagggcgacaggctgcccagcaggcacccagagctttgcgtaaacactgaggagagggggtggccag

SEQ ID NO: 76972 - DNA, 122 bp, Homo sapiens
gctgggacagatgggatggcctccacatcctcaggcgatgtgaaaaagccaggaacggtgcgggtgggcaacgcagctccgctgttcccaaacaggtgtgagctggtgccgcacagaatggg

SEQ ID NO: 76973 - DNA, 122 bp, Homo sapiens
ttagtgtctaccccacagcgtcctcccctctacctggaacgaattctctttgtcttactgcggaatgctgctgcacaaggaagcccagaggccacactccgccttgctcagcccctccatgc

SEQ ID NO: 76974 - DNA, 122 bp, Homo sapiens
ccgcctgtcaaaggctccgaggcccagatgagcagggcgattttaaatgtcagatcctgccggccatccgcgaccgtcacctgtgcgtcttcagctcctcaggctcctccgcttgtctcagt

SEQ ID NO: 76975 - DNA, 122 bp, Homo sapiens
tagacactagggtggccgctgggcttggtggccaggtagaccctcaggaccaggaggacccggcctcataggaagaaactggaggagtgactttgccattcccacacacagtggggccttat

SEQ ID NO: 76976 - DNA, 122 bp, Homo sapiens
cgcggcccggtgtcactcggcggcggcggtcgttccgggagcactccgggctccgatctccggtgtcacagcaaagatccgcgtctttccgatgaatccagccaatgccatccagtacacac

SEQ ID NO: 76977 - DNA, 122 bp, Homo sapiens
gtaatgggaagggaaaatttaacaggacccggggacttttccgtgtgcccgccctttccccgtaaaagaagaaaagcctcatgtgtggcttgaaataggccaaggagggctgaatgcgaccc

SEQ ID NO: 76978 - DNA, 122 bp, Homo sapiens
attaatgtagaatcactcgcagctctcgtctttacaacacagggcaactgtcagggttagcgaggcatttgttgtcattccctctctaggtggagccagggcgtgtgatgggagcacggggc

SEQ ID NO: 76979 - DNA, 122 bp, Homo sapiens
attcagaaagaaaaatgctggtgctgacaccctgatcaggaaaacgacagtttggtgcagcgtaaaaatgtgcccactggaaaagctaaaactcttatgatcagaagaagacaaattccatt

SEQ ID NO: 76980 - DNA, 122 bp, Homo sapiens
gaggtagttgtgtgggttttgtgatcagtgggaatgcaggacagaatgccctagtgggggcgagctgaagccaagccctgttctgtctcagcaatactgagtttgaatatatgtctcatttt

SEQ ID NO: 76981 - DNA, 122 bp, Homo sapiens
gtagccttggtgccatgggacagccaatgtctctctcagggcagccgcctcctgggacctcggggatggcccctcacagcatggctgtcgtgtctacggcaactccacagagtgagtaccac

SEQ ID NO: 76982 - DNA, 122 bp, Homo sapiens
gtttagctgccgtatatgtgatgtcactcctaaaggttcaagtaaatggcgtcacacatacgaccaccaagctgccaccaacagcagtagtcagcagcccaaacatcatcagtttttttcag

SEQ ID NO: 76983 - DNA, 122 bp, Homo sapiens
tgcccatcgagcagacaggaggaagcgcagagcgtaaccatccgtgctgttgctatgccacgctgtcctgagggacgtggcctccgactgccatgggtgagcgagggtgatgggaaagatga

SEQ ID NO: 76984 - DNA, 122 bp, Homo sapiens
tctaaagaggatacatgcttaactttctttattaatggaatttgtgataaagtttgcagacgcctcagagaagagctctcacttggacaggaggccctggccaagttgtgtaatgaggaggg

SEQ ID NO: 76985 - DNA, 122 bp, Homo sapiens
catcgtgcctaaggggagtggaggaagaggaggggctttcaggagagttgatgggtgccacgtgctcccttcctggtatcaggaaagtctagtaaagagttggagttatgccggaatgaacc

SEQ ID NO: 76986 - DNA, 122 bp, Homo sapiens
gggcataactgaatcagaggatatactctatctgagacaaggtatcaaagggatgccttccggtactactaactcaattcagttcattcatcatcagcatacatgtaattcatatatagcac

SEQ ID NO: 76987 - DNA, 122 bp, Homo sapiens
tcaaggggagtccctggcatggcaaggcccttgcatccccatggggcctcctgaggaacccgcgatctggggagacaggcagctgggccaaggtgtccagggagtcttcagaaaaggtacac

SEQ ID NO: 76988 - DNA, 122 bp, Homo sapiens
gagggagtgaactagatggttctaggccggcacccatccggcactgacctctggtctggccggagtctcgtgtcggtggaaggcagcgaccgtttcagctctgctgtcagctcattcagctc

SEQ ID NO: 76989 - DNA, 122 bp, Homo sapiens
cggcctacctggctgccggcctacctggctgactgctcgcgccgtctctcccgaacaagccggcctcagtttcccctgaagagacaggggaacttgcaagctcagtcacttccggtgccgcg

SEQ ID NO: 76990 - DNA, 122 bp, Homo sapiens
tcccagggttatgtggggattgaatgggacaaagatattaaacaattagcacagtgtcgtcgcccagggactgctcaatcggtggaggccacaccatcatcttcacaccctggcctacaaaa

SEQ ID NO: 76991 - DNA, 122 bp, Homo sapiens
ctgcttccaggtgtctgtacacaccgtcggtttcatgtgcgcagacgattcagtttcatgcgcgcccgattcagtttcatgctcttccgtctgccgggacaccctcccctctcctcctcttt

SEQ ID NO: 76992 - DNA, 122 bp, Homo sapiens
tttcttttccttctgcaatctcatcttagggccatctctcaccaagcctagcctgcagctcgggaacccgcgatacccggccgggggacgacagggggcgacaaactgtaaggttttcccta

SEQ ID NO: 76993 - DNA, 122 bp, Homo sapiens
atgtcgatgaggttgagcgggtggcagaagaagttgcgcgtactgggcgccagcaggaggcgcgacgacacctcgaagctgaaccaggcgatgcagaagtactcgaggcgtcgcagcaccgg

SEQ ID NO: 76994 - DNA, 122 bp, Homo sapiens
ccagctcgatccgctctggggtgcccctcagtcgcttggcgatgctgggctcctccaggccgttcacgcctgaacctgcgggacaagcacagaagcactgcactgaggtccaaccacagacg

SEQ ID NO: 76995 - DNA, 122 bp, Homo sapiens
gtgttcctaatgttgcctttgttaggaaccatcaactctttgctgtcagccttctggcatcgtttaatgtttgtctaatgggaaccatcactagacctagaacccagcccatacctacctga

SEQ ID NO: 76996 - DNA, 122 bp, Homo sapiens
ctccctcctgtttgttgtggtgtggagccaggtggcatgtgtggcgatggagtcacggggcgggtgacagaatttatgccagattgtaaaattcctggtttaagtttcccctggaaaagttt

SEQ ID NO: 76997 - DNA, 122 bp, Homo sapiens
gtaagccgtctagcatgtcattagtggggacctgaggcgccagcgggaaagtcccctccccgtgggctggaggctgagggagggcgggccctgggctgggatccacaggcaggtggccgccc

SEQ ID NO: 76998 - DNA, 122 bp, Homo sapiens
ctggaggacgcccttctagacgccgcagggtccggtcggctgtcttcttctgcctttcagcgtgagcgctgcatggtctcacctgtacggcacctccctgtcttgttgggtctgtgcgtcct

SEQ ID NO: 76999 - DNA, 122 bp, Homo sapiens
agccatgttgctcacacaaagcctgcctttagtggtctcttcacagacacgtgaaacacacgtcattctccccgtttaaacgtgtaccagaaactagtctccaactcaaatgcaatcataaa

SEQ ID NO: 77000 - DNA, 122 bp, Homo sapiens
cgtgatctgcctgcctcagcctcccaaagtgctgggattacaggcgtgggccgcggcacccggcccaggaacttctcttatatctagaagccaccggatgttaactaagagtcctgggaaga

SEQ ID NO: 77001 - DNA, 122 bp, Homo sapiens
cctggcaagtgcccttttcttcgggaaattgattattctggttcaggttcaacgtttggccgagtctttaagtcccagattcgagtactgccacccttctcacccttcttgatgctataagg

SEQ ID NO: 77002 - DNA, 122 bp, Homo sapiens
acctgagtaatttcagagatccccacccggaaaaggtttccttgattatggcgaattcaacgtgtcactcgggttatgctctaatcgtcatatcaaactccaaaggttcagtggctttaggt

SEQ ID NO: 77003 - DNA, 122 bp, Homo sapiens
gaccccagcggcgccgacgagccctgcgccctccgcggccgcccggcgcgagctcccgggcggggcgctgtccagcgcgcacagagttaaaggcatcatcgcagccattagagggaaaagtt

SEQ ID NO: 77004 - DNA, 122 bp, Homo sapiens
gcgccccctgctccaggggccctctttgccgcccccgcttgccctcccttgccagctcctcgtttcccagactcgcggggaccccacgccagagaggacacgttgacatgtgatgtcctgga

SEQ ID NO: 77005 - DNA, 122 bp, Homo sapiens
cataccttcttccagtgtcagacattcacgatctgacacgaggctcctggttaaggaatccgggccagcacggaacaccagggagggctggggccacagaccgtctctgagcgtgagcagag

SEQ ID NO: 77006 - DNA, 122 bp, Homo sapiens
gtaagaagcaggtgagaggctgtggctgctcaatcttaccttggaagccggggggacacacgatgagagcttgctggaacgggtcaggccgggcacaaatctgggctgttcctgtctgcagg

SEQ ID NO: 77007 - DNA, 122 bp, Homo sapiens
actgaggggaaggggcttcgaggcagccctgcctactgtgccaggagaggactctgggatcgataaccccccttgggtaccacggaccccctactggtctcctcctttccctaccaggctgg

SEQ ID NO: 77008 - DNA, 122 bp, Homo sapiens
gttcttttccaattgctttaatgttctggcacatttactaagcttctactctgggctcaccggttgaaattcaaagctccttcccttgttctaccattgcttttcactttgatttcaataaa

SEQ ID NO: 77009 - DNA, 122 bp, Homo sapiens
gctggcgaagaagtcctggtttgggaacttcatcagcctggagaaggaggagcagatcttcgtggtcatcaaagacaaacctctgagctccatcaaggctgacatcgtgcacgccttcctgt

SEQ ID NO: 77010 - DNA, 122 bp, Homo sapiens
aagaatagctgtcccctgagcgggcattagtcgcgtgtgaggtcagggcccatcattgcgcgtgttgggagcgccgcgctggtctatgagcgagcgcctcggcttgtggctgggccgggccg

SEQ ID NO: 77011 - DNA, 122 bp, Homo sapiens
catgtgggcgcccgcaagacgcgaaacctgaacggctgcggcgtgcggcacctccctccgcgccaagttagttcacgctcccaactcctgcctgcctccccgcgctgccgactgtccgcagg

SEQ ID NO: 77012 - DNA, 122 bp, Homo sapiens
gtgataattccttccataagatacaaccattctcccaagtgatgcgatgacgagtatgtgcgtgactctggagggaaagggtctacatctgtctctgcttgtgcctcggatgggttttacag

SEQ ID NO: 77013 - DNA, 122 bp, Homo sapiens
tctcgaactcttgccctgaaatgatccgtcctcggcctcgcaaagcgctgagattacaggcgtgagccacggcgcccagccttgaatagtttttcacatgcattgcacgttatttcctttta

SEQ ID NO: 77014 - DNA, 122 bp, Homo sapiens
atggcaattgttttcttaagatgtcatttcttgacaaaatagaaaacacaggcaactcttcgacagtactcaaaattcaggggaataatttacaggtctgtataatccccgaattgaagatc

SEQ ID NO: 77015 - DNA, 122 bp, Homo sapiens
acacaatcttctgtcaccagtcacttttcaacagacattcaatcaaaatgctaatagcagcggcaacaagggaccgcggttattgtaatactaattgattggttggagggtgggttttgata

SEQ ID NO: 77016 - DNA, 122 bp, Homo sapiens
gccacctcatcacctgtgtttccgcctcggcagccgggagcatcgccatagagacctcaacgcttgtggaaagttctgaggcccaaggggaccctctataattggtgagggacgtactcagt

SEQ ID NO: 77017 - DNA, 122 bp, Homo sapiens
aggagtggcttccagaggaggagcagctgggactgagtcatggcaggaagctgaggagggcgggagatcacaccagacaattataaaagaagagctggtcctgaagctcacaaccgtaacag

SEQ ID NO: 77018 - DNA, 122 bp, Homo sapiens
ttcacacattttccttgaactgaatacaatcacatcaaactttcccagaattgaaacactcgaccgtccacacacccattataaccatgggaccagcccaaatgggccgtactttgttgata

SEQ ID NO: 77019 - DNA, 122 bp, Homo sapiens
acgacgagatgtactctgtccaggacctcctggacgtgcatgccggccgcctgggctgctcgctcaccgagatccacacgctcttcgccaagcacatcaagctggactgcgaggtgggcctc

SEQ ID NO: 77020 - DNA, 122 bp, Homo sapiens
gtgcatcaaggtaagcccttctttgtttgagagggaaaaataacaaaattacattttcctcgtagccagaagcatttctgactgtgcttacaataacatcatctgatgaatgcaaatgtgtg

SEQ ID NO: 77021 - DNA, 122 bp, Homo sapiens
ttctctaggcctcagtttcctttttttattgacttgagatctctggagagtcttctggctcgaaagttatatgagtctatgattctgatagaaggccccagagaggaatagcgaagggggaa

SEQ ID NO: 77022 - DNA, 122 bp, Homo sapiens
gggtgcagtgagccaagatcacatcactgcacttcagcctgggcaacaagagtaaaactccgtctaaaaaaaaagaaaaaaaaggacattgccagagtcttggcgatttggcccgacgcgct

SEQ ID NO: 77023 - DNA, 122 bp, Homo sapiens
cgagccgagagccacccggaggtgaacattgaacacctgggtcaggtggtgcagtgcagccgtgaagagggcctggtgtgccggaaccaggaccagcagggacccttcaagatgtgcctcaa

SEQ ID NO: 77024 - DNA, 122 bp, Homo sapiens
aagtgaacgtgtctcagagcgctgcagagggattggcggtttgcattgtcatctgtcatacggattccgcagttgcaccagattcggtgtcaggagagctgggagtttgccagttcgccttt

SEQ ID NO: 77025 - DNA, 122 bp, Homo sapiens
tcagagcgtggaggcgagttgggcgacttcaagggcctggcatggcagaggccaggcagccgtggccgagtggacagcgtggccgtctgctgtggctgaaggcagcttccacagctcactcc

SEQ ID NO: 77026 - DNA, 122 bp, Homo sapiens
tgatcgagttagacccccccccgccccccccgcccccccccgcccccggctcccggaggtcgacattttggtttccataggcaaagtcctaacaccacaattgacatagttaaaaaggggag

SEQ ID NO: 77027 - DNA, 122 bp, Homo sapiens
agtctccagcgaatcaagcaattaaccagtcacttggcctttttgcagaaatccacaaaacgtgtagactcgcttaattccatctcctcctggcctcttcacacggaaattggctgctcggg

SEQ ID NO: 77028 - DNA, 122 bp, Homo sapiens
tcctagcccacctgctctctgcatagggttgcggcagagcacctcacacgcgcagatacacgcctggctttaggggaagtcgcggcactgggtctgcagagtccgctgagcacgcaccttcg

SEQ ID NO: 77029 - DNA, 122 bp, Homo sapiens
gaaggcggtgccgaggagttgggaaattaatcacctccagaaagcagagggagcgcgccccgcaagaacccgagtggaaacaaccgaagaccagaaagggagcaggaaggacggctgctctg

SEQ ID NO: 77030 - DNA, 122 bp, Homo sapiens
ctgcccggcttctgcccagtcgtgggcacctcagccctggtggggtgcatggggggcacccggagtggcctcccctcctccacactcctcctctcaaccctcgctcatcttgtctgcctgga

SEQ ID NO: 77031 - DNA, 122 bp, Homo sapiens
ttataataagcaccgaagaactgcgctcgcctgcctgagacgcagccccctggtgaagagcggtccccgaccagggctgtgttgccggaccggcacccactccattaccagcgtctgacctt

SEQ ID NO: 77032 - DNA, 122 bp, Homo sapiens
gcctgcgcgcccggcccggagctcctgttccaagcagggagcatccctggaccgtgccctcgttcctttgaggttttctgtggcacgcaccacagtttaatgcgactcaccccagccatgct

SEQ ID NO: 77033 - DNA, 122 bp, Homo sapiens
aaaagaagcaaacagataccaagagtcggaaacaggctaaggatcaaaagcagaaacatccgttcaagccaaagtaaactcagggcattccttctatccacccatctattcaaataacacta

SEQ ID NO: 77034 - DNA, 122 bp, Homo sapiens
tgcaagcccctgtactcagcaaatcaggcctcctcaagcccccctcctcttcctaggcagcgtcacagtgaaactctgacaccaggagtggacatggcttcatctcagtcatcattcctatg

SEQ ID NO: 77035 - DNA, 122 bp, Homo sapiens
aaagcgatctatttgcagagctgtgtgtgactcaaaagccagggaacaccttgcacactgcgaggttttcattctgaaagcgattcttgcaatcttgcccgcagcgccatttcatgcggctc

SEQ ID NO: 77036 - DNA, 122 bp, Homo sapiens
ttctgagcttctcctactctcagcctcagcctcactcgtcctcaggaccttgctctaggccgaggagaccagtgcccctgtgcaccagctcagcctgcagccccggccctctcgcctcccca

SEQ ID NO: 77037 - DNA, 122 bp, Homo sapiens
tccaaaaagtcactaaaatgaaaagtagtctacctgaaattcaaacctttgaaaagcttacgctcacattacgacttctctgtaaaaattctaccccaagatacaattttcccatcctcata

SEQ ID NO: 77038 - DNA, 122 bp, Homo sapiens
gctgggaagttcttcctgaggtctgaccttaggcctctgctgggagaaccctgaggtcaccgccagcctcttcacagaggttttcaaaagactttctgaacagagaatggtcgttatgtgcc

SEQ ID NO: 77039 - DNA, 122 bp, Homo sapiens
cagcctcacctgtcattcccagggcagagaccgggcccaggcgctttcccccaaggagcccgtagagcagaaacttgtatttcttgccaggctccaggtcctctacggtgactgtgcgctgg

SEQ ID NO: 77040 - DNA, 122 bp, Homo sapiens
aaattgatcaatacgaatgatcacgccccatgtgcatctcctcagcagccacaagagagacgaggtcactggaggataaacatccgtgactgcacctcatgatccatcacgcacgacggccg

SEQ ID NO: 77041 - DNA, 122 bp, Homo sapiens
gaaaaccaacttaaattacggtctcgatcgccatctggcggtggaagtccacattacatccgcggagcaatggctgggaacgttgcataatagagcggggctcaaattccaaattaagtttc

SEQ ID NO: 77042 - DNA, 122 bp, Homo sapiens
agcggaggcctctgttattgtattatctgactttactatcagcattaatccggcttagcccgcttaatgatgccacttgtggcactccgaaggcagcggagaagtctataaactacttccat

SEQ ID NO: 77043 - DNA, 122 bp, Homo sapiens
cggggcgaggggcgaaggagccaggaggctgagaactgcatggtagccctgcctgcctgccgcgctgcgcgccccaccccagccggcggccccgggcttgcaccgggcggggcaggggagcg

SEQ ID NO: 77044 - DNA, 122 bp, Homo sapiens
aagcgcccagcttctcagcgctgctcctgagggtgtgcccttggcccagcgccagctccacgctaaggagggtgctggagtgagtcccccacttatcactcaggtgaggcatggagctggga

SEQ ID NO: 77045 - DNA, 122 bp, Homo sapiens
tctttatgtgttcatcttcgaagtttgagaattccttttttcctgtcttactaggcgtagcgtgcctcctgtgattgttgaagagctgtggtgtgctgctgagtggcgtgtgtattccatgt

SEQ ID NO: 77046 - DNA, 122 bp, Homo sapiens
cagctcaggtaaattaacttaatgaaacagatgactttgtatgtattgaaactgactaggcgctcaaatatccactcagctaatgagcttgcgataggaccctggcagaggtgtcatcattc

SEQ ID NO: 77047 - DNA, 122 bp, Homo sapiens
acactctcaaaatgttactctgacacttgtttacttacaccatttaatgcagaccgaacccgtgactcattagcacagatgtcacaatgccacctgatgcactgctgcagacttcctgcagc

SEQ ID NO: 77048 - DNA, 122 bp, Homo sapiens
cgtggccgctctggagcaggttggagttggcagcgggctgcgctgcagggacaggcgcggcggacagccccgggggcagcggcggggtcctgtctgggagaggacagggttgcggcgggcgg

SEQ ID NO: 77049 - DNA, 122 bp, Homo sapiens
actcttgtgattgacatgccatcttctccagtaaacacaacacaaaagtcaatacatgcccgccccccgagacggaccacggtaccacccaatgggaaaggggaagaaccgaatggcagttc

SEQ ID NO: 77050 - DNA, 122 bp, Homo sapiens
ctgggcacaggggagagcaggcatcttctacagaggcctgggaagctgtgtgccagacagcgccgagcccaccagacccagactcacctacagctggagatccccacttccctgtgcccaca

SEQ ID NO: 77051 - DNA, 122 bp, Homo sapiens
taaactctagcaaagtgctagaccaatgcaatcgtttattatttatttttaacatatcagcgaggtgcctgaagctagaactgcatagtgagattgaaaaacttgtgaggaaaactatgggg

SEQ ID NO: 77052 - DNA, 122 bp, Homo sapiens
tttaatctacttactatcactagacatatcctctctttagagaaatcacacaaaattctacgaggtaattctgtggttgcatttcatcatctctgtaattttctcaggtatcaaacagaaat

SEQ ID NO: 77053 - DNA, 122 bp, Homo sapiens
gagcctggagacgctccccccgcgctgagcccacctccgagcgtggagacgttcccccctcgctgagtccacctccgagcctggagacgttccgcccgccctgagcccacctccgagcctgg

SEQ ID NO: 77054 - DNA, 122 bp, Homo sapiens
ggtggcatttcatgtagagtcactgcaaaagcaaacaccagccagccatttgaaagagcacgtcggtaggtgctgctgtgagctatgtcaggagtggctttgggccagtcaaccggagtcat

SEQ ID NO: 77055 - DNA, 122 bp, Homo sapiens
tttacaggcacagagactgcaacttggggaggccaagcagttggcccagggtcacacagccggccagaggcagagcagggattctgccaggcctattgctcttcccacttcaccatatcagg

SEQ ID NO: 77056 - DNA, 122 bp, Homo sapiens
tccacgaacacggtctctctccccagtgcctcatgcacgtcttagtaataccgagttttccgatccacgaacacggtctcgctccccagtgcctcatgcacgtcttagtaataccgagtttt

SEQ ID NO: 77057 - DNA, 122 bp, Homo sapiens
gacgatggggaaatcgcactggtgaagctgccgtggggtcaggaggaacctgcgataagacgcccaacagttagggcaggtgctttgaggtttggagcctgggaccccacaggaagtgactt

SEQ ID NO: 77058 - DNA, 122 bp, Homo sapiens
gggactcctctgagtggtggccgtcctcgtcccagccctcggtcacccgcagcttcacaccgggccactggttcatcaccgagatagccagcgagttcaggcggtccttgcagcgctgggag

SEQ ID NO: 77059 - DNA, 122 bp, Homo sapiens
agttgctagtgccagagagggcaacacaacaaagaatatcatcttcacagagtaaaagtgcggatgtgatccctcttactacttcatggtgtatttcaaaaaacaaagaattatttttatta

SEQ ID NO: 77060 - DNA, 122 bp, Homo sapiens
tctcactaattcacgtaacgggagccgccggcagcgctgacggctgcacctcccctcccacgcggacactacctgcaggatcggacgacccccagaactgtttgccaacaaagacatgcagg

SEQ ID NO: 77061 - DNA, 122 bp, Homo sapiens
tgcgcacacggaaacgccttcaatgtgaactctcactggctctgccgtgctgtcatttgacgcagagctttctgggtaatgtagtttcccaggttccaaggccgtaaagagagagattccca

SEQ ID NO: 77062 - DNA, 122 bp, Homo sapiens
ttgggaaagcaaggcttatgtgtgtaaaaaaaaaaaaaaaattaagtaacaggagattttcgcaacagttcagctcaatcatagaagaaaaaccacaaggtagttcatgactaatgtccatc

SEQ ID NO: 77063 - DNA, 122 bp, Homo sapiens
cacttgatatgccacattgtccttgtcacagaagcgttgtttcctattttccaagtttaacgtatgctctatagtttcccttgctggtatttaagggtagaaataatttatagattcttggc

SEQ ID NO: 77064 - DNA, 122 bp, Homo sapiens
cttggaagagttccacagtcagagtgacttcttctgcattgcagcaccagtaatacaaatcgctttgacttaaggatctaactactcagattcacattcaaacttaaatgtgttatgttttc

SEQ ID NO: 77065 - DNA, 122 bp, Homo sapiens
tgtggctcccaccctcagacagtgcatccccaggcccgcgtgcggccgggctgtcctcaccggtagttccgctcgcccacacagttgttgagccacttgcagtggtggtcgaaaccgcacac

SEQ ID NO: 77066 - DNA, 122 bp, Homo sapiens
aactctcatgtgcagatgaggaaatggaggcagacaggttaatcagcttgcccaaggccacgctgtggaggggagagcactgagcccagcttcctgtgtccttaacccctggccttcctctg

SEQ ID NO: 77067 - DNA, 122 bp, Homo sapiens
ccaacagtcatgcccccagctcagcgccacagctgtgagagctgttcccggggaggggagcgtcggccaggggacatgggtgagacacacaggacctcttcgtgccagcttttcaattcgtc

SEQ ID NO: 77068 - DNA, 122 bp, Homo sapiens
tggctggaggtaaggaggcgcacagcaggggtaagcgccgccgtcgcacactttgcacgccgcccagggctacaccactcaccgaaaattgggaggcaggtctgggaggcggggttgagcgc

SEQ ID NO: 77069 - DNA, 122 bp, Homo sapiens
gtaaataatattagtatctaccccatatatttgtgaagattaaatgagttcattcaaacccggtaagtgctcaatagatattagtatcactgttagaattatatgacatatggcattttccc

SEQ ID NO: 77070 - DNA, 122 bp, Homo sapiens
gatgacgaactttgaatgtgaagatgtaaataaatcctggctcggcaaccctgcctgtgacgcgacttggagcatatctctgcactcagctcctgagtctatttcctcacgtgggaaaatgg

SEQ ID NO: 77071 - DNA, 122 bp, Homo sapiens
tctgtggaggtctgtaccttcccaaccctttctgccagggccacccctgcaaatcgcgctcgtcactgagggagcctcgggcacgctgtggcatcacgaagaacccttcaaacgacagaggg

SEQ ID NO: 77072 - DNA, 122 bp, Homo sapiens
tttcctctctatcctcctggaacaggagaaaggagagacttacctgtctagcacagtgggcgaagtgagtgggtgtacctttatgggcctatgaaaatggtttattttattaaatgggtctg

SEQ ID NO: 77073 - DNA, 122 bp, Homo sapiens
gattggctagagggggtggttccgctgaggcgtggtaggaagtggctgccgtcaatcactcggggagactccaaacagtgagcctagagctggagactagcgttaaccggcggggcggccgg

SEQ ID NO: 77074 - DNA, 122 bp, Homo sapiens
caaaaccgtttttaaaaaccccattgtgaacatttttggaacaagcctcttagagggtcccgttgccggggtgacaggacgaaacggcgcgagcgggcagactcctggagtccccgcaaagg

SEQ ID NO: 77075 - DNA, 122 bp, Homo sapiens
atggccgcggtgactaatacagaggccggccttgaaaactagccgcgcatgtttagtccccggcccggcgaggcggtgcagcagagagctccgccccggcccggcgaggcggtgcagcagag

SEQ ID NO: 77076 - DNA, 122 bp, Homo sapiens
ctctccaggtgatttgtggatgccgggttccaactcttcttggggccgacgagacaaaggcggctgcaacagcgccaccgctatcaccttcaggaagttgttctgaggcaagcgctcccaca

SEQ ID NO: 77077 - DNA, 122 bp, Homo sapiens
ttgaacagtggagagactgacccaggccctgcaattacattgctgggtgaccttgggcagcgcgtaagtgacccgcttcctctattgccccatctgtaaaatgggtgggtgtgaagcattag

SEQ ID NO: 77078 - DNA, 122 bp, Homo sapiens
cacagccaggctggcagggcagagtcctttccagaatttatctgtttgcttaaagcccagcggaggggccaccttcagtcaaccctccagcatactggtccaagtagttttttcaaagtgct

SEQ ID NO: 77079 - DNA, 122 bp, Homo sapiens
tttttaaaatgttcctctatttgcatgaaagggcactgcctgctgtggaaaggatggatccggtgcacattctatcaactatggagagtcatgcagggaaacagattggttgctgtccagct

SEQ ID NO: 77080 - DNA, 122 bp, Homo sapiens
actcacatggctggccatagtctaatttcttcacaaacagaggcagagcagcttgcaccacgtaaccccaaagcttttctgtaactgatcagaagttcctttctccaccctttagcagaggt

SEQ ID NO: 77081 - DNA, 122 bp, Homo sapiens
gccggagcgggtgtggccttggcgggaccaggcagccattacagtctcggaagcgagaggcgtggggcctgtctcatcatgcccggttcatttttttttttttttttttttttgtagagatg

SEQ ID NO: 77082 - DNA, 122 bp, Homo sapiens
ctcccattatctttaaaggagcagttctcctgggtcctggaagacagtctcctgtgtcaacgtcccacatcacatggaattgggcatgaaaatgtttttttggaaagagcgtcttctcaggg

SEQ ID NO: 77083 - DNA, 122 bp, Homo sapiens
gcactttacggcggcagcgtaagtgcgtgacgctcgtcagtggcttcagttcacacgtggcgccagcggaggcaggttgatgtgtttgtgcttccttctacagccaatatgaaaaggcctag

SEQ ID NO: 77084 - DNA, 122 bp, Homo sapiens
ctgcttggcctgaggggagcagagcagggacctgcagggaatgcccctcacccgtggtgccgtcggcagtgagagggccatggcgcttcttgcccaggaggccatagaggaggaatctgtac

SEQ ID NO: 77085 - DNA, 122 bp, Homo sapiens
gcatggcggcgcgcaggatgttgaggctcagcttcacatccgtgctgtacttccaggcgtcgccccgcggcccaccgcccttctccgccggcgacgcgcccgctgccttgtctgtgggcgac

SEQ ID NO: 77086 - DNA, 122 bp, Homo sapiens
ttaatttatggctttgcagtaaggcggcatcagaggagcaatttaactcacaagaggtaacgcagatggagagtacaactgaaagataccttgtgtggaagggtacagaaggaacctcaagc

SEQ ID NO: 77087 - DNA, 122 bp, Homo sapiens
gatgggtggggcgtctgagtttggttcccagcaaatccctctgagccgcccttgcgggctcgcctcaggagcaggggagcaagaggtgggaggaggaggtctaagtcccaggcccaattaag

SEQ ID NO: 77088 - DNA, 122 bp, Homo sapiens
tgagctccgcctgctgccagagcattactctgtgagctccgcctcctgtcagagcgttaccgtgagctccgccccctgttggagcattactgtgtgagctccgcgccctgccagagcattac

SEQ ID NO: 77089 - DNA, 122 bp, Homo sapiens
ttttttttttttttctgagacaggatctggcagtatcgcgcaggttggagtgcggtggcgcgatcacggctcactgcaaactcaacctccagggctgggctcaagcctcagcctccccagaa

SEQ ID NO: 77090 - DNA, 122 bp, Homo sapiens
tctcgcaatcagcgcgctactccaaactcaaaatccatttcggagagcaagttgtacgcgcgcgacactcagcaggcagagaaaccatcagccgccatcaccaccggcacatcgtctgcttc

SEQ ID NO: 77091 - DNA, 122 bp, Homo sapiens
ctaggaaaataacttccctcaacctcagtttttctctttgtaaaggaagagtgaaaacgacgactcactctgttgtggggaaatacttacaaaaggaaataaaatttaactagtagtatggt

SEQ ID NO: 77092 - DNA, 122 bp, Homo sapiens
tgcttccaggagctgccatttttctgatgtggctgccacgtttcccaactcttctgcctccgagcacttggagttgcgagagagacctctctcccaatgacagctctttgagcaaatcttag

SEQ ID NO: 77093 - DNA, 122 bp, Homo sapiens
gagcgggtctcggagggggtggatttggcccgaggtgcccgcgatcagcgaacgagcgcccgcacggaggagccgggctgcagctcccgggcaaggggagcgcgagctctgactcctcagcc

SEQ ID NO: 77094 - DNA, 122 bp, Homo sapiens
gcccacgcaggatgatgacatcactacagctctaggaccggcttccatcaccaacgcccacgcaggatgacatcactaaagctctagggacggcttccatcaccaaagcccacgcaggatga

SEQ ID NO: 77095 - DNA, 122 bp, Homo sapiens
tggaacacagagagcgagacgcggagtccccgagtctccccggaaactgccgaaaacttacgagcgtccacaactgagaagggccggaaacactgtacaattttgtagagggtaaagtatgg

SEQ ID NO: 77096 - DNA, 122 bp, Homo sapiens
gtctgcctctcagcaaggtggcctcttggaggacgctgtgcccgcgtcaggcgatcctgtcgactgccgccaagacccggcttccggctttgaggggccacgccccgctcgcactccctggc

SEQ ID NO: 77097 - DNA, 122 bp, Homo sapiens
aggctgtactatagacctgaccgagtgagcatgagaagacgagacccggcagaaggagggcgacagcgggcaccgagatccacaggtccagagtctagtcgccacccacaccctgtcttttg

SEQ ID NO: 77098 - DNA, 122 bp, Homo sapiens
cctctgcgcctgcacttgacaccctcccggtgtctctctcttctcatcttaataggacaccggtcctattggacagggccacgcttacaacctcagctcgattacatcggcaaagaccctat

SEQ ID NO: 77099 - DNA, 122 bp, Homo sapiens
cgggctggctcttgcgtacgctgggctggacctttttgtgtatggggtcgttgaggagcccgcttctacactctgagctatctccggtgacttacaaggattttttaaaaaatatatttatg

SEQ ID NO: 77100 - DNA, 122 bp, Homo sapiens
gtttctcattgtccataagaagaaaacataccagctataaaggggccatgaaggtgttcccgccattgagatctgaaagaaaaatattatgaacagttttagaacagaaataattaccctgt

SEQ ID NO: 77101 - DNA, 122 bp, Homo sapiens
atcttggctgcagcatcacctaagagactcggtggagggcgggggcggggcggctccaggcggggccggcacgaggcggggcggggccaacgccggctctgggcgggctctgggcgggctct

SEQ ID NO: 77102 - DNA, 122 bp, Homo sapiens
tattgcttggagggaggggagttaaagagatggcatgatccacaggaagtacagttttggcgggggaaaattgggcaatttaagcaggattttaatgacttattgttgactgatttggaggt

SEQ ID NO: 77103 - DNA, 122 bp, Homo sapiens
tcgggagggaggagatctctggcatccgaatttcttctcctagaaggccagcaacacacccggctaagccacagtagaggcggccacggccaagggggatggctccacgcacgcccccagga

SEQ ID NO: 77104 - DNA, 122 bp, Homo sapiens
cgctgcgtcctcctcgggccgctcgccctcgcccagctcctcgccctccttctctggcagcgcctccgactctttcagcgatttgctgatgctcagtttggccggcagcttcacttcatcct

SEQ ID NO: 77105 - DNA, 122 bp, Homo sapiens
agggggcagagggaccggaccggaagtgacgtgagcgggttccggttgtctggagcccagcggcgggtgtgagagtccgtaaggagcagcttccaggatcctgagatccggagcagccgggg

SEQ ID NO: 77106 - DNA, 122 bp, Homo sapiens
gcagcgtctcacccgccgctcagccgcctcagcacacacaggccctgccgcccgccgcagcgccacattgcgcatgacgagcacctggctggcgaggaaccccctcttaacccgacgcaggg

SEQ ID NO: 77107 - DNA, 122 bp, Homo sapiens
acgaaatgcccagcccggaatgcctgcctttcctggtgctgcgaaggtcattaatgcgagcgcctagcccgggcctgatgtgcatccacactcggggagccagcttgcatctgcatctgcct

SEQ ID NO: 77108 - DNA, 122 bp, Homo sapiens
cctgggcatggggttgggtgaggaagagagcagaacacaagtccctaaggaaggaattcacgagctgatccttcaacaatgaatagaaacttgtaaggaggatgaaaagtagcacagtatta

SEQ ID NO: 77109 - DNA, 122 bp, Homo sapiens
gagcgctcttggtgtccgattacagcgccgcggcgcgcggctccggctgccccggcgcgccgccctgcaggctcgcatcaccaccgcgcagccccggccgcatctccgccagccgcgaggcc

SEQ ID NO: 77110 - DNA, 122 bp, Homo sapiens
aagtgactatgagattcgtggtgtttccttttgtccttcactctgctgaactctaattctcgccttttaagtcattcatttagactttagagtcactaaagaataagagactgaaattacag

SEQ ID NO: 77111 - DNA, 122 bp, Homo sapiens
ggggccagaggctgagtggggagcctggacttccatcctcacctggcagtaaggaggctgcgtggcccttcccctgccagggcgccattcaagaaagccagctaagaccgaaggtttaaata

SEQ ID NO: 77112 - DNA, 122 bp, Homo sapiens
ggctggtggatgcgatgcggggcttggaagcggcgctagacggtgcctgtcagctctggccgcaaccctcagttgtaaaatgaggctgatagtgcctacctagcaggggttttatgagaatt

SEQ ID NO: 77113 - DNA, 122 bp, Homo sapiens
aactataaagaaaaatatcaaaatcataagaaaaaataaattcagtgtgattgttacctccggggggaaacataaagaaataaattggaaaaagcattcagtacaaagaaagcaatagtata

SEQ ID NO: 77114 - DNA, 122 bp, Homo sapiens
ccgtgcctccctcacctcctggatctgcttgtccaaacccccaatgtcactgtattgctccgtgggcctctcgtctacctccatggccttcacccgcgagtcatactctgtgggcagcgtct

SEQ ID NO: 77115 - DNA, 122 bp, Homo sapiens
caaataattcagtaagctcatgtacgagaaggggctcatatcatctagatgttatagaaacgtaaacagaaaaggcacatactttggattacaaagggtctggatttggatccggtatcagc

SEQ ID NO: 77116 - DNA, 122 bp, Homo sapiens
gtgggcaggaagcaccatggataaaccatggcagtctcaacacctcagtgaggacagagacgtggcggcccctcggcgaggacagagacgcggcggcccctcgtgaggacagagacgcggcg

SEQ ID NO: 77117 - DNA, 122 bp, Homo sapiens
ttcccaattctttatatgtcttttaaagcacaatttaacacatgccaaaaaagttccttccgcatcaactggctttgaatttaaactcaatttactttaagtctgccaggtcgtacaaaact

SEQ ID NO: 77118 - DNA, 122 bp, Homo sapiens
ggccccgcccccgctctccgggcgctggacgcgggacgccgtctcctggcaacgcagacgcggagccgagcgcgcccgcaggctctttgctcagagctcagccctacatagatcggcttctg

SEQ ID NO: 77119 - DNA, 122 bp, Homo sapiens
tctgcccggcgtctctggcaccctccctgccatcctcagtgcggctgctgttctcctgtccggtgctgtggctccattccaaaggggcacctggatatttatatttgctgaagttttataat

SEQ ID NO: 77120 - DNA, 122 bp, Homo sapiens
agtttccttgactgtcctcaaagtgcacagcttgtgaatggaggagccaggatgggcgcccgctggctctcctatcccttcagttatgtcagcgtcccccgcagcagcccattgtctggtta

SEQ ID NO: 77121 - DNA, 122 bp, Homo sapiens
cctcgcctccctagaccctgaggtgtataagaatttgctctttctgaagagctacgaagacgatgtggaggagcttgggctgaacttcactgtggtgaacaatgacctgggagaggcgcagg

SEQ ID NO: 77122 - DNA, 122 bp, Homo sapiens
tttggccttgagatcttaatatgtaatgatgactggggctgcagggggccctgcctctcccgctgccctgctctggaagcgcctgggtatctgagagttcagagcaggctggaggggcggag

SEQ ID NO: 77123 - DNA, 122 bp, Homo sapiens
aacgggcagccgggcttcaaaagcaacatgcccctggcgcccgggcagttttagggcccccgtgcgcagctttctttccctggggaggaaaacatcgtgggggggaggggagggcggggcgg

SEQ ID NO: 77124 - DNA, 122 bp, Homo sapiens
ttttcaggtcattctctggccttgccaggaatgcagtgtactcctggcttgaacaaaatgcgctagtgttaaaatattcatctggttttggttgggactgagagggtgtgtgtgtttcaggg

SEQ ID NO: 77125 - DNA, 122 bp, Homo sapiens
gagagggagccaggcaccagaatatcctacaaattactaagttttcatgtctaaccatctcgggaaggtcttcctctcaaggtcacacagggcttgacacaaagaaactgctaaatatgttt

SEQ ID NO: 77126 - DNA, 122 bp, Homo sapiens
cagtctcatgtaattctcaagcaatcttgggaggcaggcactactgttcattgcccctcccgattttagagacaagaaactaagattcagaacacaagaaacttgcccaaggtcaaggagaa

SEQ ID NO: 77127 - DNA, 122 bp, Homo sapiens
ctcctctccctgggaagcctggtcgttgtgatgagaagctgggctatgtggcggccacctcgaaggccaggtctggggaccctcccgcttgtgactcagcggctcagcttcttggttagtga

SEQ ID NO: 77128 - DNA, 122 bp, Homo sapiens
gcatgaaactcccagtgtgtacggagccagtggaatatgggatacccataccttaccaggcgctggttccttctgctcacaataacatctgcccaaagagggagtgggaagaacgcttagct

SEQ ID NO: 77129 - DNA, 122 bp, Homo sapiens
agatttttttttttttttgagatggagtcttgctgtgttgcccaagctgttgtgcagtggcgcaatcttggctccctgcaacatctgtctcctggattcaagcgactctcctgcctcagcct

SEQ ID NO: 77130 - DNA, 122 bp, Homo sapiens
cacgtcccgtggtcacacgcgtgtcctcactgcacacctcctgctgcctcctgcaaggttcgactgctgactttgcttcccacagcatttccactgcttgacacaggtgaatggctccgacc

SEQ ID NO: 77131 - DNA, 122 bp, Homo sapiens
cccctgcccgccggccgggaagcgctcctacgggaccccagccccgttggggaggcggggcggccacgcgggttccaccaatcagcggccaatgttcgaattcgcgtcctggcgcggccaat

SEQ ID NO: 77132 - DNA, 122 bp, Homo sapiens
agagccgggaggtggcgcggaggacgccggctctgcccacgcctgggcaaggttgagctccgttccctccgggctgctcccgcctcctgtccgtgcagggcgcgtttccagccatcgccgcc

SEQ ID NO: 77133 - DNA, 122 bp, Homo sapiens
accaaaatgctcttatagacactgccatcttcccccaactccatctggactcggatgatacggcaatcagaggcccctggcccagatccctctcccccatatccagtccccccggaggcctc

SEQ ID NO: 77134 - DNA, 122 bp, Homo sapiens
gcatccggcggaacctgcaggcacgggccattcttcccgcgacccagggctctgccggaccgcttcccccgtcgctccagtcagacgccaaagctggagaacttccggtgcgtttccgctgt

SEQ ID NO: 77135 - DNA, 122 bp, Homo sapiens
tggcagagtgaagcctgggcatgagccttgcagaaaggctgccctctgacccagctttctcggtgcctccaggtggagaaccggcccctgcctggccacacacagcttcgactgcctggctg

SEQ ID NO: 77136 - DNA, 122 bp, Homo sapiens
ccccccacccgcgtaggccgcattctgggagttgtagtccggtggagcgggggttggcgccgcccgcggacccagccggactccacttcccgtcgagccctgcgaccggcacccactccacc

SEQ ID NO: 77137 - DNA, 122 bp, Homo sapiens
aatgctgactattcctactgccatgttaacattttctggcatgttacatgcaaccttctacgttcaaaatacataattttcataagcaatatagccacacagaaaatactggaagaaacctg

SEQ ID NO: 77138 - DNA, 122 bp, Homo sapiens
tcacttcgtagacatggctgcggctgggcagaggcactcctcacttcgcagacaggacggcggcaaggcagagacgctccttacttcccagatggggcagcggctgggcagaggtgctcttc

SEQ ID NO: 77139 - DNA, 122 bp, Homo sapiens
ggcacaagctgggcctacagggaccagcatgaggcaggagctgggcttgtggaggctgcccggaggccggcacgaggggggtcgtggaaggccggcacgagtggggtcgtggaaggctgccg

SEQ ID NO: 77140 - DNA, 122 bp, Homo sapiens
gaccgtgtccccagcaccgccagccgcggaacttgccttctctggggtggcagtggaaaccgatactgttttccaccttgaggcaagcctcgcaattaacagctacactcctggtcataatc

SEQ ID NO: 77141 - DNA, 122 bp, Homo sapiens
taagctgctgacccctggagctcagaggctgaaggcaaggctgtgaagctatgaggtaggcgtggaggtgagggctcagtcacagtggaccttgcccttggccaccccaaagctagacaagt

SEQ ID NO: 77142 - DNA, 122 bp, Homo sapiens
gtcctgaactcctgacttcaagtgatcctcccatttcggcctcccaaaatgctgggattacggtcatgagccactgcacccagtttgcagattctcattgctagtgactgggttgagagtgt

SEQ ID NO: 77143 - DNA, 122 bp, Homo sapiens
ttgatgttcggtttcagctgcgatattatccccagcgagcctgtgaagggcttagggcgacgcctgtgttcctcaaatacttcagtttgacctttcctggtttggaattccttgctttacat

SEQ ID NO: 77144 - DNA, 122 bp, Homo sapiens
aacagacaacacgaggcggtgtggagcaacatgctgttttaatgacggcctgggtgcaggcgggccccaagtgacgactgggcaaagttttatagtctcctgtaaacagtaagtgtcacagt

SEQ ID NO: 77145 - DNA, 122 bp, Homo sapiens
caaagatatcaaagtaatactgtgtcccttcatagtgcctgctccgtggtcaggaaatgacgctaggtgacactgggaagacccaaggcctggcagggccttggctggtctacaccctaaag

SEQ ID NO: 77146 - DNA, 122 bp, Homo sapiens
agcaccgaggccagcaagacgctgcccgccatcgaggtgggcccggcgagcggccccgggcgggtgggactggggcttcccctgcaccccggagccatccacatgcatttatacgtttattt

SEQ ID NO: 77147 - DNA, 122 bp, Homo sapiens
cattactgttccaacaaaatccctgttgatgaggtaaccagcagtgtttccataggaactcgagctcctggctattcctagcctggttctctgaccagcagcaccagcgtcacctgccagct

SEQ ID NO: 77148 - DNA, 122 bp, Homo sapiens
tatggagggggtggctgagtcctgcctggtgtgagaaggcagggatgccaggccactgaacgatcggtgaccccaaagctcacaggcctgacctggctctgaaaactcgggaggaagtgagt

SEQ ID NO: 77149 - DNA, 122 bp, Homo sapiens
tcagcttccggcgctcggcgaaagccattcattctctcggaccagtttccccgcactgggcgagggacaggcagcccttggcaggacggagacacccccgctgctctgtgcttccctccaat

SEQ ID NO: 77150 - DNA, 122 bp, Homo sapiens
gcctccccgcgcctccccgcccctccccgcccctcccagcgcctccccgccccctcgctccgcctccggcctcctccgagagctccagacctcccggctactcagaagccctcggactgccc

SEQ ID NO: 77151 - DNA, 122 bp, Homo sapiens
atctgtcaaaagtgccattccgctggtgggaagtcctggaagacggttttctcgcgccctcgttctccctccaggtccgtccccccggtcccccagtacatctcccctaacgctcactcggg

SEQ ID NO: 77152 - DNA, 122 bp, Homo sapiens
ggattcttcgtcccgccccttcttaaggaggcgggcagggagtaccgcatcggcggcgggcgagacctgcggaaggacgtgatagttggccaatcagagttcatcacggtagcccagttagc

SEQ ID NO: 77153 - DNA, 122 bp, Homo sapiens
gcgccctctgagaagagtttgtgggcttgatgagtttgctttaccaagtattcccaagtacgatgccacgtggggaaaaaggaacccttgtggcgggtgtggacgaatgtaaatacagacac

SEQ ID NO: 77154 - DNA, 122 bp, Homo sapiens
aaatcagagaggaagaggtctatgcaacagtccaggtgacaaatctttggttgggtgggacgcataaaaacagtagatctggaaggggatgtggatgtgacctggctctggccccttccttt

SEQ ID NO: 77155 - DNA, 122 bp, Homo sapiens
cccagcacccgcccttggctgagttcgcccccagccccagggccccagtgccagggtccccgcactcgcccccagttctcggatcccctcgcctgaacagagattgggggcggagggaggag

SEQ ID NO: 77156 - DNA, 122 bp, Homo sapiens
ttttctggttgcctttctttcaatggggtcccagagtcccgcttccagggcctctcggctcgcgcaccccggtcacgcggggtcacgcgcctgaccgctcccgggtagggttcgagtgaaga

SEQ ID NO: 77157 - DNA, 122 bp, Homo sapiens
tgagcctaggaataccgaggcgtacggaatctctgcccctcccctctcaccgtgccgacccgggaatctagttattcatgcgagggactcctctgcatcccacacactctaggtgctcagag

SEQ ID NO: 77158 - DNA, 122 bp, Homo sapiens
ggaagaaagaggaaaagagagagagaaagtgtgcacgcacaggcgcacaaacacaaaatccggcttccacggaggacagcagcagcctgctgcacagtggggaccaagagatacaaggctgc

SEQ ID NO: 77159 - DNA, 122 bp, Homo sapiens
ctttgccctccgcctcatccctctctagttttttcccactccatcttggcagtgtgttggcgccttcattctcatcccgttagccgcgttctttcttacggccctgctcctccaagcccctg

SEQ ID NO: 77160 - DNA, 122 bp, Homo sapiens
gcaggtcagtgggtgtgcgcaccatgcatgagccgaagctgggcgaggcattgcctcactcgggaagcgaaaggggtcagggagttccctttcctagtcaaagaaaggggtgacagacggca

SEQ ID NO: 77161 - DNA, 122 bp, Homo sapiens
catttcatttaaactctggtgagcttttaattgcctggattgcattgtgaagcggcctaacggttgattgcctccattatgttcccttgttctgtaccattcatccgcacagtctcagcttc

SEQ ID NO: 77162 - DNA, 122 bp, Homo sapiens
acttacgttgcatcgaccctctccactccgcggaagtagccgacaccgtctgatgtgttgcgcaggtggtggcatttgtcgtcgatccggtaagccgtctgtttgtcactcaggtccttttc

SEQ ID NO: 77163 - DNA, 122 bp, Homo sapiens
tgggtgaccgggcggagggggatgctggggaaggaagaattcaggcagctgcaaagagcgcgcgaatatattcattcgacatacctcatgggcgcctaccctgggcctggtccggggcgggt

SEQ ID NO: 77164 - DNA, 122 bp, Homo sapiens
catctacaactagaactgaagacttggctgccaggcactgggctagacatagatttacagcggtgaggaccaccaaggggagctaaaattcgaatgtagggaacagacgattaacaagttag

SEQ ID NO: 77165 - DNA, 122 bp, Homo sapiens
ccgagacgactccatactgcaggtgggggccgcaacggaggaattggttcgccccggctccggaggcagtggctgcgcctttaaggggcgttggtagaggcgagccgattggcagcggctga

SEQ ID NO: 77166 - DNA, 122 bp, Homo sapiens
aggcccgcaggggcggaggggcctcaggactcgcccacagcctttgcagtaactggctgacgcccaccgccttcgcaatgattggccgctggaggtaggcgggatttccgggcacggcttcc

SEQ ID NO: 77167 - DNA, 122 bp, Homo sapiens
cagggactgtttcctaatcttccccacatcctccagttatcagagcagtgttgggttccacgccagtttggcaagaattttgcccccggttctgggctaaacttttgttgctttggccctgt

SEQ ID NO: 77168 - DNA, 122 bp, Homo sapiens
agtattcccgtcctatcaatgtgcgggcccgcgaacaacgtcagccggaccgattctctgcgtctgccagtcccgccacagattcatctgggatcttcaaacagacaagcccttagagacga

SEQ ID NO: 77169 - DNA, 122 bp, Homo sapiens
gcgagactgggctcgccaggcggaagtggttggagactgcgtgttttcctagaaagtcctcgaccttcgtcggggagaggaggggagtgataaattggaaggcggacaagcgacaagtgcgg

SEQ ID NO: 77170 - DNA, 122 bp, Homo sapiens
ctaatcctgtctgggccaaagtgttgctgacaaagctaaacgtaactaaaacaacaacaacgaaaccacaaacaaacaaaatatatagatttccaaagggcatgtaggcaagtctttttgga

SEQ ID NO: 77171 - DNA, 122 bp, Homo sapiens
gaagtggaagccatagaggaagtcatggagcgagagtgatgtctgtagtgaagaatttggcgccatcttgagaaggtcaaagtgattcttcgattaaatgccttacttatcgcctagtgtga

SEQ ID NO: 77172 - DNA, 122 bp, Homo sapiens
cccacagcaaatgacagctgcaaaagagaacaccaatcccatccacactcacgcaaaaaccgcgatgccgacaagaaaacttttatgagagagatcctggacttctttttgggggactattt

SEQ ID NO: 77173 - DNA, 122 bp, Homo sapiens
tgtctgcagacggacccagagggagaacaagtgtgttcctgaaggaggcccccttaaccccggcctgaggcaccccctgtgccactgccctgtgctgagctcagcctggcttccagccaggc

SEQ ID NO: 77174 - DNA, 122 bp, Homo sapiens
gccaggcatctaccagcacctccatgttgaaagggtttttatcttttatgttgaaaatggcgccatatacctacgatgcaacagaacaaagcaggagaggatgaagttcttctccaatatag

SEQ ID NO: 77175 - DNA, 122 bp, Homo sapiens
gagtcaaaatgaaataggcaggtaaggctgaaagaatgctctagtcacaggaagagcctacgcaattcgtggaggtgagtcatggttagagaaggatcctagttccacatggttgtagaaca

SEQ ID NO: 77176 - DNA, 122 bp, Homo sapiens
acgtctttccacgcctcaggagagctgtgctgcccaccgctgcccgcccggagattgcgccgagctggcgtgtgccacaaagggtgatcaccacgctgtgtccactgcactccaatgccatg

SEQ ID NO: 77177 - DNA, 122 bp, Homo sapiens
tggaagctggaggggtccggcatcccagagaggcgtgaggctcccaaacgtgagtgacaacgaccctggtcttgccggcatcctcccatcatattggtggggggtggggggtgggctgacct

SEQ ID NO: 77178 - DNA, 122 bp, Homo sapiens
gaagtaacacattttaatacagtcaaatctaaatattttcccttatggtttgtgcttttccggtcttattaagaaattcttagccgggcgcggtggctcacgcctctaatcccagcactttg

SEQ ID NO: 77179 - DNA, 122 bp, Homo sapiens
tgctgcgactaatgcgcgtttctactgcagcagctgctgcaggtttaaaagcccacactccggcggagtcggtggtcaggcaggtcccgagtgccggcagcatgaagacctccctcccacac

SEQ ID NO: 77180 - DNA, 122 bp, Homo sapiens
tcctcgtgggcattgcaggaagtgtagtcaaagagcaccgcggagtcccacgcttcccgccggaaggtgatactatagaacgtctcctttgagattcaaggaagtgtagcgcaggagatctg

SEQ ID NO: 77181 - DNA, 122 bp, Homo sapiens
gcgcccctcccccaccaacctgtaccacagccctgggcgtggaaggtgctcctaggctctcggtctcgcagcttcctccaaatcagaagctgtggagcccacaaccacctctctctcactgc

SEQ ID NO: 77182 - DNA, 122 bp, Homo sapiens
ctgagactgcgtcccccagtatcacactaggaaagtacagtaaagacagacgtgacgctgcgtgggatgcccgctctcagctgtgtacatgtgcatgtgaaccacgcatgtgcagggacacg

SEQ ID NO: 77183 - DNA, 122 bp, Homo sapiens
taccgcgtaggcgcggattaaacttggacgggaagaccaggactctcgggcttccgcgtccgcccggcagctagcgctccgcgggactgggaactctgcagccggtcccggtgtgattgctg

SEQ ID NO: 77184 - DNA, 122 bp, Homo sapiens
tagaccgcgagaaagagactgttcacgacctcctcctcacagctttagatggcggagacccggtactctccggcaccacgcacatccgtgttacggtcctcgacgcaaacgacaatgcgccc

SEQ ID NO: 77185 - DNA, 122 bp, Homo sapiens
agatccccccttaccttttggtaaataaagtgttggggagaaggtggggggattagggttcggacttggttcaatgctgcagcagaggtttaagacacaatttctcaaccttagcactacca

SEQ ID NO: 77186 - DNA, 122 bp, Homo sapiens
caatggggtaatcactggtgatgggggaggggcggccgggaagtgctgggtagagaaaggcgggtacctaactagggctccaccctcgggcctgtgcctacggacctacatgaggacaggca

SEQ ID NO: 77187 - DNA, 122 bp, Homo sapiens
cgcggcccccgccaggcagcgccggcgcccgcccgcgaggaggagggtcccgcaggtgggcggcctcctcaggccggggccttctgggacccccaagtgccgtgcaggacgccacgaagttg

SEQ ID NO: 77188 - DNA, 122 bp, Homo sapiens
actggaaatgtggaagacaagactgtactaaaggattctacaaggatacagtcagcaattcgaaacctcaaccatctgaatggacccttccgcttggccaagagcattcccaagttatcctg

SEQ ID NO: 77189 - DNA, 122 bp, Homo sapiens
atgagcccatgtattgctttctgtgtgttctggctgctgtggacattgttatggcctcctcggtggtacccaagatggtgagcatcttctgctcaggagacagctcaatcagctttagtgct

SEQ ID NO: 77190 - DNA, 122 bp, Homo sapiens
aaggaagagacgggtggccggatggcctccctcactagttggtgggcgtgagatccacgccgccccagtcccgggggccttcactaaaaccttaactggcctcccaggggagagggaagcgg

SEQ ID NO: 77191 - DNA, 122 bp, Homo sapiens
atcatttttattgtttaaaaaaatccctgcactgatcatacatacataatgtaattttaccgcctcaaatggggaggtgggtagaagtggcggtggggggccctgagttttttttttttttt

SEQ ID NO: 77192 - DNA, 122 bp, Homo sapiens
ttatttgtgattagaaggtaatcgcctcctggtcatgcttccgctggtcaacagtgtctgcggggcgaccccatccttgtggccagagagggcctgtggctgcgctcaaggcgggagcggtc

SEQ ID NO: 77193 - DNA, 122 bp, Homo sapiens
cacaaagccagcgactccaattatgactcctgagctgagaggcctgccaaggtcatcccacgggggctgctggccgccttttgtacccggtgactggcggctggacgcggatccccttccct

SEQ ID NO: 77194 - DNA, 122 bp, Homo sapiens
gcaggagcgggaccccctgggcgcgaggcccgatccccgcccggtcgctggcccgcggcccggcccagggcatggtgtcgtctggaagagtgactgtgtcactgtttccttggggcgctttc

SEQ ID NO: 77195 - DNA, 122 bp, Homo sapiens
cgtatcactccccgactgcgcgcactctgcgggccaccgggatcgtcgtgctgtttggagcgctctcgggaaaaaaaatgcaaaaaccaggaacgaaaatggatatccgcaacgaaaaagaa

SEQ ID NO: 77196 - DNA, 122 bp, Homo sapiens
cccgcagagcgcacggcggacccggggttgggggtcgggggcccagcagtgccttcaccccggagggctccagtcacagcccagaggggtcgaccctctggcctgtgagttgctgcgaggct

SEQ ID NO: 77197 - DNA, 122 bp, Homo sapiens
tgaggaaagaagtttcttcagcgcccgctccgggcaccagcgctgtcaaacctgccactacggaagccacagaacccggttacccgagtcaccccgagccccgcccactcaggttcctcccc

SEQ ID NO: 77198 - DNA, 122 bp, Homo sapiens
ttcagggacaggttccccgtgcggcgaggggcacggtgggccgagagccagatgagaacccgctgcctccacgcggccgtgccctctggcagcctgggctggagggaggtttgcacggctgc

SEQ ID NO: 77199 - DNA, 122 bp, Homo sapiens
ctcctgtggagggacttctggctcggccttggtggtttctggcacaaaccctctctcccccgcaacttccaactcttccttgggcccttctactttcacttctgggggcaaagcccggccca

SEQ ID NO: 77200 - DNA, 122 bp, Homo sapiens
ctggaactcagacccagaggggcggtccctgttgcaagtcatctcccgaaagggcggggccggggctcatcccggaaggaccggtgtctaggtcaccctggagcgctcaccccaccggcacc

SEQ ID NO: 77201 - DNA, 122 bp, Homo sapiens
attaatagatgatggaatttcaggtattaatgaaattaccattactcgactgcaggcagccgtgtccttgcaaaaagaccatgtgatgccgcctgtgaacgcacagggataggcctcttaag

SEQ ID NO: 77202 - DNA, 122 bp, Homo sapiens
gcgggcagagttgtagattagaagaataggccagcccctcttccacgttccaccacggcccgcaacatcctcctgggaccccagcctgcatgcccctataagatgcttttgcactggttcag

SEQ ID NO: 77203 - DNA, 122 bp, Homo sapiens
ccaagcgctacaggcgggaaattgccagggatggaaagcagctgaggctccatttggcttcgcggctccagggcccggcgacctccaaggcccccgcctcaggcgctgcgggcaaacagggc

SEQ ID NO: 77204 - DNA, 122 bp, Homo sapiens
atcagagtggaaacgcacttctgtgactctttgcttgctcctgtctcccaccctagatggcgggctccttgaaggttggcagtgtgtctttgtcagcttctgcctggtagtggctggcattt

SEQ ID NO: 77205 - DNA, 122 bp, Homo sapiens
cctgcgggctaacaatccccacccaaggtccctgccctctgcagaaaggagcgaagggcccgggcgtcctggtgatgttggagcctcccggataaccagggccctttttccctcagggcctt

SEQ ID NO: 77206 - DNA, 122 bp, Homo sapiens
taagtgcctgctatatgtacagagtgaagaaagaaataaccctacctttaagagagtttacggtctggttgtgttgattcaccttctgagaaaaaatgttatttgctttcctcaattttttt

SEQ ID NO: 77207 - DNA, 122 bp, Homo sapiens
aaaggataaagcgttgtttctcctctgacaatttcacatcacaaagggctgctctgcctccgctttccaggggctttcccagtatgtgctcaaagcatgaaggatccgaggcagggactcct

SEQ ID NO: 77208 - DNA, 122 bp, Homo sapiens
ggtgatccgcccgcctcggcctcccaaaatgctgagtttacaggcgtgagccaccgcgcccgtcccagtttattttttccacaggaaaaaggagggactgaggaccccacggaccacagctc

SEQ ID NO: 77209 - DNA, 122 bp, Homo sapiens
agccaacaatggggtcttctacaatagggagtaaacaatgcccatttgagggcaaaactacgattaaaggatgacggaaggcagattaatacagtaatccaacaggctcagtgacaaggtaa

SEQ ID NO: 77210 - DNA, 122 bp, Homo sapiens
tgcacacgcattcgtgcctgtgtgcccgtccagctgtgggacaaactgaaagtggaagtgcgattgctaaaacaggtcaaagaacacgtgtctatttgtctcagacatgacctcaaaccttg

SEQ ID NO: 77211 - DNA, 122 bp, Homo sapiens
tgtccagaaggcttgtctctgactcccacgacaagcatcaccttttctgtgatgtggctgcgcttagtccagcctttggctgtaatgtgggaagaagatatctgctcatcagtactttctca

SEQ ID NO: 77212 - DNA, 122 bp, Homo sapiens
aaagaatcaagggtaggggacaaaatacatttgggctaggattttagtgaagagggatcacgcccagaatgagggatagtaaaagagtggtggtatggggctctgatatcgcttaatctgta

SEQ ID NO: 77213 - DNA, 122 bp, Homo sapiens
ggcagggcctaagagtctggattcctcaccagctcccaggtgatgtcaatgctgctggtccggggaccacactgtgagaagcaagatttagagaggcagatcaggagatggagaaagagact

SEQ ID NO: 77214 - DNA, 122 bp, Homo sapiens
tacaaaatgggtacagtaatgtctccctcgcaggatggtgatgagggttcacggagctaacgaacacaaagcagggattgcggtgctctgtgacggctgcgggcactgtgcggcatcctcct

SEQ ID NO: 77215 - DNA, 122 bp, Homo sapiens
cctggcttcttggcctgatggtgaggcaccagaggtgaagcgaggcatgggctgctggagcgggaatgagggggcgacagtggctccggaaacggggggagggtgtcttcactggcctctcc

SEQ ID NO: 77216 - DNA, 122 bp, Homo sapiens
aagctgaggctgcccaccatcctttgaacacctgccccatattcctgcttccatatctgtcgttactgcagattagttgctctccaaattgcatttccatgctgtgctgtgtgatttggatt

SEQ ID NO: 77217 - DNA, 122 bp, Homo sapiens
gaggccagaaaggcaacacaggtatagtggtcactagcatgggctctagaaaaaaatgctcggatttcaatcctgacgatcatttacttttgaccttgagcaagttaatctctaagtgcctg

SEQ ID NO: 77218 - DNA, 122 bp, Homo sapiens
ggggggtgggggtggcatcgaggctgcgctgccgtggccctctccgccccccctccccaccgcacaccccccagcccagactccagccctggaccgcgcatcccgagcccagcgcccagaca

SEQ ID NO: 77219 - DNA, 122 bp, Homo sapiens
agtattgggacccagtcagactttgtctttaagcatagtccccagctgttcacaaagttccgtggccctcgtggagagtcctggcctgcggctcttcgacgcaagctgggggtgcccttgcg

SEQ ID NO: 77220 - DNA, 122 bp, Homo sapiens
cctaggctgcccgggccttagggaacgaagaccaaactcggcagtgtggaccagagcacacgccaggcgaccacacgcttcccaccccgccgccgttcccactcccttcatgcttccttgca

SEQ ID NO: 77221 - DNA, 122 bp, Homo sapiens
gatatagcccaagcacctagagcaatgcctgccacacagtaggtactcaaaaagtatttgcggactgaaatgaataaacaagtgaatgggttgtagggtagaatcctaaatggctgaactgg

SEQ ID NO: 77222 - DNA, 122 bp, Homo sapiens
taactatgattaaaatgtcagtattcaaacaagggctccaacactaccgtggcccaagggcgtcttcggctcccaccccggggcgtgggcctgggggtccctcttcactgcgcagccacctc

SEQ ID NO: 77223 - DNA, 122 bp, Homo sapiens
gcatccctttgctctacgggaactgagggtgatgaaggggacatgcgcctgggagtaccacgccatgacagagcggcattgagtcctcgggacaatcaatacaccaagaggtggaaattaac

SEQ ID NO: 77224 - DNA, 122 bp, Homo sapiens
cccttgactcaagccacctgagtgtcaaggaatctggcaggtccctgttgttttggggcccgtggtggaatatgagctgagagcagcatttatctgtaaacacaacagttcctattttttcc

SEQ ID NO: 77225 - DNA, 122 bp, Homo sapiens
gagatgagaggatcacttgagggcaggagttcgagaccagcctgaggatcataacaaaatcgtctctacaaaaacaaaagaagagagtttatttgggccagacttgagggttgcaacccagg

SEQ ID NO: 77226 - DNA, 122 bp, Homo sapiens
cccgcgctcactcacaatcgcgcccgcggagtgctttccgcaccgcctccggtgcgtgggcgggagacataagcctagccaagcccatacagcccggctcgggtggctatggagaggcgtac

SEQ ID NO: 77227 - DNA, 122 bp, Homo sapiens
ggggggaagattcatagtacccccgatatcgcagggcatgtatacacccccctatgatagcggtcgtaatatccaggaagagaaaggatgatagtacccctatgtcgcagggggtgtgtaca

SEQ ID NO: 77228 - DNA, 122 bp, Homo sapiens
cactattgagagcttccagtcactagaggtagataggcagatagaccatcagctgactctcgacagagagaggagaaaccaagtctcctttctctggagattagccagggaaaggggttagg

SEQ ID NO: 77229 - DNA, 122 bp, Homo sapiens
ggtgggggggtgctgctctgggctgggttgggaagggagttggggaggggtttaaatgcacggtgcatgtctggtgtctgtcatgccaacctagacacctcatgcttctgtctcccccaccc

SEQ ID NO: 77230 - DNA, 122 bp, Homo sapiens
gcgggagctgtcatcctacgtgtccataagcgcggagagcggggtggtgttcgcgcagcgcgccttcgaccacgagcagctgcgcgccttcgaactcacactgcaggcccgcgaccagggct

SEQ ID NO: 77231 - DNA, 122 bp, Homo sapiens
ctgcaggtacagtaggtactggattaaacaggtctgctgttgcagacagaaaccaggcaccgttctagcacagagctgtgtttggattggagtttccagggccttatcaggagccaccccta

SEQ ID NO: 77232 - DNA, 122 bp, Homo sapiens
tgagggggctagtgtagtgcgcgaggcacgacgggaacggcgagacccggataaagggatcgcggcaccggttcgagaaccctcggcggcggaggcggcggcggcggcggcggcggcggtgg

SEQ ID NO: 77233 - DNA, 122 bp, Homo sapiens
tgaacagtttcactgagttcctcctggctgtaatgaatctcccctagcagtcagctgaaacgtgtttatttaaactatttaaacattcacttggtgcaagatagaggagcagcagcagcagc

SEQ ID NO: 77234 - DNA, 122 bp, Homo sapiens
ctcaaggcagggcatccctggggcagctggtcaccacccagagaatggggccttctgtggcgctggggagggtctcctatcccaggacggccagccttggcccggcccctgggtcctcctga

SEQ ID NO: 77235 - DNA, 122 bp, Homo sapiens
gcagcccggccaggcgcctcaccgcctcggcggagaactggggcagccgccggccgccagcgcctttgcggagcacccgggccacgtctccttcggtccaggggaactcctccagctcgggg

SEQ ID NO: 77236 - DNA, 122 bp, Homo sapiens
ctgagaggtctcacaatcatggtggaagacgaagaaagagcaaagggacttcttacatggcggtgggcaggaggacacatgcagggaaactcccgtttatgaaaccaccagatctcatgaga

SEQ ID NO: 77237 - DNA, 122 bp, Homo sapiens
ccccaaaacagcctcactatgtactggagcccccaggcctctctgggtttttccacccttcgctggcaccagctatatgcaagaggttcctaggacaaaaagacaagatctagccctttctc

SEQ ID NO: 77238 - DNA, 122 bp, Homo sapiens
agctcactaacgatgattattcagtcaatgctatttcccacacgagtcaacaaatgtttccgaagcacccactacgtgccaggctcattctttacttcccaaacgtcttactttttccattt

SEQ ID NO: 77239 - DNA, 122 bp, Homo sapiens
ggaggacgccggagacgttccaagatgcacttagtggagcatgtgcgttcggaaggcccacgggtaagaggaagcccagtgattttaataaactataactagtacagtacctgaaacaaaat

SEQ ID NO: 77240 - DNA, 122 bp, Homo sapiens
accagagacatcacatgcgagtcagcgcacggctgtgttctcagtcggcagcgtgggtgccgtggtcacgcctgcgggtggggtgtgagggttgattcatgtgtcagcgctgctgggccacg

SEQ ID NO: 77241 - DNA, 122 bp, Homo sapiens
gtggtcgggacaatttgcaactagagggtggtcctcatgggtaccctgtggggtgtcgcgcgaggtgaagggccaggccatttccgtcgggtcagcgatttccgccttcgccccgctctcgc

SEQ ID NO: 77242 - DNA, 122 bp, Homo sapiens
acataaggcgaggggagtgcccagtgagcgtggtgagagaagctcacatgttagaggtgtcgttgcggccgtgtgactggaggagagcgacagggtgcgcgtgactggaggagcgcgacagg

SEQ ID NO: 77243 - DNA, 122 bp, Homo sapiens
cgggctgcccatcgcggggaggggttccgcccgggacccgattgccggcattggtagcgccgtgccctgtgacctccaggcgaggccctcgcagctcaggccaggaggacagggtccgggaa

SEQ ID NO: 77244 - DNA, 122 bp, Homo sapiens
tattgattaatgcatctggatccagctagcaatgtacagaaaatgcagaggacagaggaacgtggtaaccaacaccagggggatgcagtcagcaacattcagctaaaattcaggggatattc

SEQ ID NO: 77245 - DNA, 122 bp, Homo sapiens
gaagttagagatcagtgagaaggttttgatgcaccgtagctggtttaaagatggaagggccgtgccctaaggaatacagaaggtctgtgggactgagggctgcccttgtctgacagctgcca

SEQ ID NO: 77246 - DNA, 122 bp, Homo sapiens
aaaaaattggaggaagaaacccagagtgagcactctgcaggtaccctttctaccacttcccgttaatttcccaccttctgctagggacctcaggccttccgatggtcccagggtgcaatcca

SEQ ID NO: 77247 - DNA, 122 bp, Homo sapiens
gaataacgatcacagggaaaggacagtctcttccgtaaacggtgctgggaaaactggctacgcatcgcagaagagtgaaacgagaccctagctctcgccacatacaaacatcaaaccaaaat

SEQ ID NO: 77248 - DNA, 122 bp, Homo sapiens
caaatgagcatcttaatttattgatgctaaacaggtctggttgttgtccccaattttccgcgcgctctgccactcccccccccacacaccccgccccaacccccgccgccagcttcggtccc

SEQ ID NO: 77249 - DNA, 122 bp, Homo sapiens
ttggcctctcagacccacttgcagcctcccggcgccccctccgggcccagctcttcctcccggctgcatctccagggcggactctggcccgactccaggtcccaacaacgtctttggactca

SEQ ID NO: 77250 - DNA, 122 bp, Homo sapiens
tctcataggtggccagccatgagctaaaaatacccatgtcctatatgcacatctgtgaaacgagcacagcaacagtgcccaatacaattgctacagcagcgtctatcggtgcagatgtcaac

SEQ ID NO: 77251 - DNA, 122 bp, Homo sapiens
atttatatcccactttgtttccaaaagaagttttccagcatacagtatcgtaatataggccgggcacagtggatcacacctgtaatcccagcactttgggaggctgaggtaggcagatcgct

SEQ ID NO: 77252 - DNA, 122 bp, Homo sapiens
tgcgtgtggcctggctcacctggcaggatctcgttccagttgacacggatatagcggtcccggtcggcccgcgtgtgctcgtgccagaagcccagcacatgcatgagctcatgaaggacaat

SEQ ID NO: 77253 - DNA, 122 bp, Homo sapiens
acgccactaggcggcaggacgtttcagttccactagaatcttgtgggaccatcatacgtgcggctcattgttgaccgaaatgttacgccgcgcgtgactgtacgtacctaagaagcagaagc

SEQ ID NO: 77254 - DNA, 122 bp, Homo sapiens
aatcgagacgataactgaaaagcagtcactgacggcaaatgagcccctgggacttctctccgcgagctttcccagccaccaggccgctcccatcacccttccgcccgtcggtgccgcccctt

SEQ ID NO: 77255 - DNA, 122 bp, Homo sapiens
cgaagagcgagggaggaaaacccaccttagtcaccgacgcaggagagatgtaaaagggctcgcacatattcactgtctcaagcttcatcccaactgtgaagaaatggcttcgcaaatctgcg

SEQ ID NO: 77256 - DNA, 122 bp, Homo sapiens
acacacttgggccgggttgggaggaactggcaggaaaaggactgaacccttaatgtcaggcggttttgaagcacctggggcaagctatggaaatccccacaggaaggctcacgcagtctctt

SEQ ID NO: 77257 - DNA, 122 bp, Homo sapiens
tgccatggcaaccaggctgccagggaacccaggtggcgacagagcccaggcgccttgagccgagcctgcacggtgaagagccacagaggtggggaagacagggaaggagtcgggcgggaagg

SEQ ID NO: 77258 - DNA, 122 bp, Homo sapiens
ccgagacccagggactccccgggggctggggaccgcagagtggtccgggccgcagctcttcgcagcacaccaggctcacagtgcagcccatccggcctggcgccccggcgggcaggggcgga

SEQ ID NO: 77259 - DNA, 122 bp, Homo sapiens
agggcactgatgcaggtcttcggaatgtatttattgccaaagatcttagcctcgtttcctcggcaggtgcccaacctcactgagaagaatattgtagtagcctcttacccttggagaaatct

SEQ ID NO: 77260 - DNA, 122 bp, Homo sapiens
tgcattgtcggagtccccctctggggctggatgaggccggagccagctccctctggttgccgggaggtgtggagggagaggcacgggcgggaagtgggcgctcgcgggccagcgcgagttcc

SEQ ID NO: 77261 - DNA, 122 bp, Homo sapiens
agcaggttttgtgaatagtttatctaagaaaagattgccaagagaaacatttctccccagcgcaaggggttatttaaggaagcaaagcttctcaagaaaccagagtgaaggtgcactgttag

SEQ ID NO: 77262 - DNA, 122 bp, Homo sapiens
gtgcctacttagggaaacagctgcgctcattcagtgcaatgccacatagaatagtaaaagcggagtatactctctgataaacacattaattttaccagatggttcttcttaagcctttaatt

SEQ ID NO: 77263 - DNA, 122 bp, Homo sapiens
tgagagcggagactatttccttgattctcaaaactctattaaagccttagacataaacagcgcccatatttgctgaattgtgtcagtgggtcattctctttgttcaatgtcccccttcttcc

SEQ ID NO: 77264 - DNA, 122 bp, Homo sapiens
agcccagctttcttctccatctctaagttcatccacatgttagttctgacatctgaattacgtttaaaaacaaggaaagaaaataaaggtgcaaataagaatttaggtcacactctttgtaa

SEQ ID NO: 77265 - DNA, 122 bp, Homo sapiens
gtcctccgggccctgccttatccagttctggacatctgcgttgggattctgagtttagggcgaggcaagagaactttgtgctctctgagtgggcgaggccaggcggattgtctcctcagggg

SEQ ID NO: 77266 - DNA, 122 bp, Homo sapiens
gaacctgggaggagacccggccgcaggcgcgcagcctggaggcgatggtgagccctgccacgcgtgagtcacggaccacccccgccgcgctctgctccccgcctggctctcttcttcccagc

SEQ ID NO: 77267 - DNA, 122 bp, Homo sapiens
actcctggcctcaagccatctgctctcctaaagtgctgggattacaggcgtgaggcaccgcgcccggctggacagtggttttgatttacgtttccctcatgactaatgaggccgaccatctt

SEQ ID NO: 77268 - DNA, 122 bp, Homo sapiens
aaaagtttagtaaacagagtattacactctcgggggtgggagagagcggactgacctctgcgaggtgagatcagcgtcagcttgctgtagtttgagtcattttatgtgtgtgcgtgcgtgtg

SEQ ID NO: 77269 - DNA, 122 bp, Homo sapiens
gccccccgccgaggacctctccatggggtgggggacctccccctggtggcattccccaagcgccccaccaccaccgcggtggcattccccagccccgccccccaacggtattcccggccccc

SEQ ID NO: 77270 - DNA, 122 bp, Homo sapiens
ccttcctctcctcatgccatccctagtctcgttattgacctcagtagaggagtctctctccgtcctcacaagtgtgcctggtcacatcctatttgtgaccatttggacattctgttccctgt

SEQ ID NO: 77271 - DNA, 122 bp, Homo sapiens
cagggcgcccgcctcacagctggtcctcgtccacccagatggtcttgcgctgctcctcgccgatcttgtccttgacaacgcggagcagctcctctacgctgccccacatgtcaggttccacc

SEQ ID NO: 77272 - DNA, 122 bp, Homo sapiens
gtctttgaatatttttcagacattggggaaaattgattctgacagttttgcttaatttttcgatgtttcagttgagggacaggcccttgaaactacctactctgtcatttttgctgacatca

SEQ ID NO: 77273 - DNA, 122 bp, Homo sapiens
cccacgcagctgacccctggccaccccggtctgcctcccgtgtgaccctggggagccgctcgcccctctggcctcggtttctgtgtctgtacaggatgtgttggaagctggtgttctcgggg

SEQ ID NO: 77274 - DNA, 122 bp, Homo sapiens
taaaatgtcaatctttaataaactcaaaaataatttattgagatttcatcttgtagtctacggattatgagttgcgaatagaggctgaggtccccccaagtgttatctgcaggctgctgtgt

SEQ ID NO: 77275 - DNA, 122 bp, Homo sapiens
ctttctttgtaattttatgttaaatacaacttaagaaatgttactaagaacaaagagaaacggtctgtaagaaattatgtaatgcataaataggtcttaccagtggtaactctgttaacaca

SEQ ID NO: 77276 - DNA, 122 bp, Homo sapiens
tgggcgctgaagtgcgagctgttgttgaagcgcttcccgcactgggtgcaggcatagggccgctccccgctgtgtgtcctgcggtggatgaccaggctggagctctggctgaagcgcttccc

SEQ ID NO: 77277 - DNA, 122 bp, Homo sapiens
acaggtgtgtggggcggtggcagcggtaccagatgggccacaggacggacaggcagcgctcggtgctcacggcactcagaaagctcaggcctgcaaagtaggaaaacatcatcacaggatag

SEQ ID NO: 77278 - DNA, 122 bp, Homo sapiens
gttattctgcctccctcccaagatgtagaagctgtggatcagggagttaaaggactgacccgttgtccatcactaacgaagtgagcagctgtgctaacccgagaaccgcccccgcaccgcga

SEQ ID NO: 77279 - DNA, 122 bp, Homo sapiens
actgttcccaggcaaccctggagtctggctcagcgcacaaatctgtccagggcagatggccgggcccccgtgggcttggccttcgcctccttatgatgctgctgctgaaggctctgccggac

SEQ ID NO: 77280 - DNA, 122 bp, Homo sapiens
aggctgtaaacccatgaaggtcaacaaaatattctcatccacttcttgttgtccttcgttcgttttctgtgacatgttgacgggcatgttttgttttcaatgatacttacaatgggctcacc

SEQ ID NO: 77281 - DNA, 122 bp, Homo sapiens
agcgattctcctccctccgcctcccgagtagctgggattacaggcgcccaccaccacacccggctaatattttatatttttggtacagatggagtttcaccgtgttggccagactggtctcg

SEQ ID NO: 77282 - DNA, 122 bp, Homo sapiens
gcgtcgggtttcggacggttgggaactgagctgagcatcagataacagcatccagctggccgtgctgctggaacggcgcgggaggagagagtggaagggggacttctttgggggcggggcat

SEQ ID NO: 77283 - DNA, 122 bp, Homo sapiens
tgtgagccactagagaatctaggttttaatcaaagctcccagctgattttgatgtgcagtcgggttttgaaactactgtcctaaaggatgacatctgtacccttagccttggcattcaaggc

SEQ ID NO: 77284 - DNA, 122 bp, Homo sapiens
gaagctgcttcctcacacaatagacattgttatgtcactggttacaacaaagctctatcacgactcaaggactttaaagacagtagcctgagcccagttactgaatggtgctgttttatcta

SEQ ID NO: 77285 - DNA, 122 bp, Homo sapiens
tgggagtcgggtccggggatatggaaaggggagatgaagagtggggagaagtacctgattcgtgtctcgaccttttaatttgaatttgactgttttgagccccgggttgcctcgctctctcc

SEQ ID NO: 77286 - DNA, 122 bp, Homo sapiens
aaaggggagaaattgagtcaggctttgttgttctgcaaaacagtgacgccgctcaggcagcgctgcgggttacagcatactcagtggcttcatttcactctcacggtaaccgctgggggtgg

SEQ ID NO: 77287 - DNA, 122 bp, Homo sapiens
agtgccttactgaacaattaagtcttaaaaaatctaagtatgttaacaaactgcctttcccgtttcttcctttaaaaagttcactccccttttcgttctttccttttcaccttcctttcgtc

SEQ ID NO: 77288 - DNA, 122 bp, Homo sapiens
tccggagctcggcaagaaggagcctccggagctcagtaaggggaagtgtcagatacactgcgaagagagtgggagctgaggatcagaaactgtggaaagcacacattcaacataaaacaaaa

SEQ ID NO: 77289 - DNA, 122 bp, Homo sapiens
aggcgtccaggtgcggggtggcgatggcgctgttgttgtacgcgccactctcaaagcctccgtcatccgctgcgtgaggtgggagacagagagtgcacggtcggctgcggtcacgagaaaca

SEQ ID NO: 77290 - DNA, 122 bp, Homo sapiens
cttaacccgtgcgacgccgggcagctcctgcggcagccggggagggcgtgatggagaccacgctggaaatgggaatcaaggcacgtttctaaccttgtactggaacgatacatagtctgcga

SEQ ID NO: 77291 - DNA, 122 bp, Homo sapiens
gctcttctttccctgtgtgtaccatcccagtgtaagccatcatcatctattgcttataatcgtatttccacatcaactggcccatttcttcttctccaatctcatttcaaagcacctccccc

SEQ ID NO: 77292 - DNA, 122 bp, Homo sapiens
gcccttgccccgagctgcaaactggggcctaaagctgcagcaccgagaggccacgtggggcgaggcctccccggaaggcctgcggcgccgccgttgtccaccagggggcgccaggaaacggc

SEQ ID NO: 77293 - DNA, 122 bp, Homo sapiens
atttagttgttcacttaacttttctgtacttttccctgatctcattcccctttttccccacgcctgtcttcatactttatgtattcattatacataaatatattcctcaacagtattatttt

SEQ ID NO: 77294 - DNA, 122 bp, Homo sapiens
gatcggagctaaagtctgtctgcaccgcctgcaaattctctaccctgagttctagcccctcgtgctgggtttccgctccacatttcttctctgctggggctgctcccttcctttgtcgaggc

SEQ ID NO: 77295 - DNA, 122 bp, Homo sapiens
tggaaggcagctcagtgggcagcgaggccctggcagagttgcccggctgccccagcccagcgttgccctcctgggcagtctaatccaatgtgaaatgaagtttcctgggaagcagggcacac

SEQ ID NO: 77296 - DNA, 122 bp, Homo sapiens
ggcctcccagagggcttagaagtgttgtctgctccccagccgtgtggagcaggtgcatctcgagcacctgtccttccttcccctgagcctttctgtcaaacagcagcatgggttagagtgag

SEQ ID NO: 77297 - DNA, 122 bp, Homo sapiens
ctctgtctcaaaaaaaaaaaaaaaaaaaaagtatctaaagtgccagaaaaaataatcgggcgcaatggttgtttggcaaccctcattcaggatgttacgacacatttcccaaatattctgct

SEQ ID NO: 77298 - DNA, 122 bp, Homo sapiens
ctcgcggccctccgcgtcccgggctcccgccccagaacctgtgggcagatgtttcctccacgcagtaccctcccggggctctgcctccaggctcgcgtcccagcaccctaggcagaggtttc

SEQ ID NO: 77299 - DNA, 122 bp, Homo sapiens
gggttaaggttagcgggacccgttgggaagccacagtgatcccagggctctgggtcactgcgggtgcgggtgcgggtgcgggtgcgcacagccagggatcctggcgggagccactgcggttt

SEQ ID NO: 77300 - DNA, 122 bp, Homo sapiens
agtctttgtcctgcagcggaggagggacagcagtgatggcgtgggccccgaccttgatcccggcctagggagagcgtgcagtgcagcccaccttcagtttctggatcttgccagccagcgag

SEQ ID NO: 77301 - DNA, 122 bp, Homo sapiens
cgtgggctgaggagtgactggccccgggcgggctcctgccactatcacagtcgagagatgcgagggagttgtagggcagctggcactgtcctcacccgccccggccggcagggcttgtcagg

SEQ ID NO: 77302 - DNA, 122 bp, Homo sapiens
tctgcctgcccacagcccctgtttccataatctcccaggaggcagcctcttgtggactcccgtggtcttcccccaggaagactgaccttttgcatgaaggggattcagggggatttaggcaa

SEQ ID NO: 77303 - DNA, 122 bp, Homo sapiens
ggcaagaagctggtttcccccagaagaaggcagcgagtgagcctgtgtccaggcagggagcggggtgcaaggagcagagctggtcccagggccactgctgggagcaactgagcagagggctc

SEQ ID NO: 77304 - DNA, 122 bp, Homo sapiens
atttttcgctgaagcccctgccctggggctggtgttcttctctatgattctaccaatcgtcggcatttttttcctcccttctttctttttaggaaggcgctggggtgtgcggcggcaacggc

SEQ ID NO: 77305 - DNA, 122 bp, Homo sapiens
tccaacaggggcttcgagcctcttcctgctggggtcccacggatggtgcaggcagaggcccgagcactcctggtggccccgtgtggcccacgtcgctcagtatctttcctcgccttgcagag

SEQ ID NO: 77306 - DNA, 122 bp, Homo sapiens
tgatccctgctgcttgagggacagtagggaaagaaaggtatttttgtgatcgctcttcagcgttccctatgcggcctggttcatacagtcacaacaaaaacccacgctctaatagtacattg

SEQ ID NO: 77307 - DNA, 122 bp, Homo sapiens
gcggcggggctcggcggccgagagtttgcgtggcttcctcgccgcctccctcttcccaaccgagtgtgtgagaatttcatatagatcagctccaatttccgccattttgggaaagttgcaca

SEQ ID NO: 77308 - DNA, 122 bp, Homo sapiens
taaataacacttctagtttgacaattataagagtaatttgtggccggatgcagtggctcacgcctgtaatcccaacactttgggaggctgaggcgggtggatcacctgaggtcaggagttca

SEQ ID NO: 77309 - DNA, 122 bp, Homo sapiens
cacgttctggtccagcaacaagtagatgtcagttggttagggtaggagttggcacccgttcggaaataggagaacctgagagtgcagtcctgcccagggcacaactggaaggctgtggggga

SEQ ID NO: 77310 - DNA, 122 bp, Homo sapiens
agaccgtgagactgctgttgacaattactgttgggaatggagcagctgacatacctgttccggttagacgaggaagcatatgaaggcctgaacatgccgggaggaagaatgagaggcccaag

SEQ ID NO: 77311 - DNA, 122 bp, Homo sapiens
gcagcgcctcgcgggcgaactggtccgtgccgaagaagagcacccgccagggaggcttctcgcggactctggagtcccggcagtcctcccagccgagtcgggccagtgctcgccactgggga

SEQ ID NO: 77312 - DNA, 122 bp, Homo sapiens
ggtcggaccacttgtctgtgctttgataatggagaatttgagtccctggaaaaagctactcgaccaggttagactagtggctggtagagtgcgaatgacaacatgctataccatcaagatgt

SEQ ID NO: 77313 - DNA, 122 bp, Homo sapiens
gtgtctgcctttctctatctatctccattcttgactcctgtatctctgtgccagtgtctccgtctcctgaatctgggtatttcagtctctcctaggaggggtctatagaaactgggccgacg

SEQ ID NO: 77314 - DNA, 122 bp, Homo sapiens
tgtttcccttttattgtagtaagtcaaatttttgaattaaggcctgggcacactcactcacgcctgtaatcttagcactttgggaaggctaaggcaaagggattgcttgaggccagtagtta

SEQ ID NO: 77315 - DNA, 122 bp, Homo sapiens
ggctaagtctttgtaagcattgtctctgtagccttccaaatagtaatctccacgatcaatcgctctgaaggcttgctccactctttcagtacgaatatactgagcttcttttaaattatcaa

SEQ ID NO: 77316 - DNA, 122 bp, Homo sapiens
gaggggtcggaatggaagatgaagcccagtgccagctgtgtgtaccacccaccacaagcccgcatccatcctgctcccagcacccaccatgcctccacattcaccgtgcccccagggcccac

SEQ ID NO: 77317 - DNA, 122 bp, Homo sapiens
gtcctacgcgggcgcggtgctgaactgcaaaggcaaagctcccggtggaaatggcctgcccgctattctgcgccctctctgacaggccctgaacagaagtgtggaaatgccttccgggaggg

SEQ ID NO: 77318 - DNA, 122 bp, Homo sapiens
acctcgtgatctgcccaccttggcctcccaaagtgctgggattacaggcgtgagccattgcgcctggcctaaggttctaattttctatgatgttatgattcattgtcagagagcattatgtt

SEQ ID NO: 77319 - DNA, 122 bp, Homo sapiens
agcataatgtagagaggcaactgaccaaacactacccagtactcctctctgatttaaaaccgcttccaaggataacttgctccatcacagcagtgcccattcacctccattatgtgcttccc

SEQ ID NO: 77320 - DNA, 122 bp, Homo sapiens
gaatttggagttgctgtctctaagtgaaagctgaacctgcaaccccttgagggtttcagccgcagaggggcgggagaaagggcctggttggtaggcgggctcagcggttcgcgcccagttag

SEQ ID NO: 77321 - DNA, 122 bp, Homo sapiens
gtgaagggaagcaggcagggctgacgtgtggtgcaggccccacggggccgtgtgaccccacgggcagctctggtgcactaggggcccatccggctggcactgtgggaagacctgcacagccc

SEQ ID NO: 77322 - DNA, 122 bp, Homo sapiens
aaaatcctctgtgtgatagtttcacaaaacgatgcagtattaagttaggactctaagcgtcgctgttgaccaacctgggcaagaaaatcaacggaaactcaagttacatcctccaacaacaa

SEQ ID NO: 77323 - DNA, 122 bp, Homo sapiens
caggcacacgcctccttcccgctcgccgcgggcgccgagtctggggctcctcgcgtcacacgggagcctcaacaaagggctttgtggggccctccccacccgccagggaggggacgccgggc

SEQ ID NO: 77324 - DNA, 122 bp, Homo sapiens
aggtcaaataaaagtatagacaaattggtgtggatgctataagggaggagagattacatccgcttggggcaatccaaagaaatttattcaaagagtagaggcgtttatgtccatggtagaat

SEQ ID NO: 77325 - DNA, 122 bp, Homo sapiens
acctgaggggaggtcgggctggcaggtggacacagcaccaagcctgcacagcaggcatgacgctggaggcagaacagggcttggtgtgttcaaaggacagcaagacggccaccaggcagaag

SEQ ID NO: 77326 - DNA, 122 bp, Homo sapiens
catgtagatttgaggaagaaagaagaaaaagcaaaaatggaatccaaacttacttaaatccgggaaactgaaagaccaatggtgcaactgaaagaactaagagagttggaaagagtagactt

SEQ ID NO: 77327 - DNA, 122 bp, Homo sapiens
ttaatagtggtaacagactctcaattaggggctcaacatcatggtcgctgaacagaatcacggtcgctgaacagaatcacactcttcacgccgccttggagccaaaattagtttagccgcga

SEQ ID NO: 77328 - DNA, 122 bp, Homo sapiens
aagtccttccccagcgtgggaattgttcctctcgcacctcgttttcgggggaagagggggcgctattcactagtgcgggatggaaggcgcactgggtccctcagttgttcggcagctccaaa

SEQ ID NO: 77329 - DNA, 122 bp, Homo sapiens
ccacttaagctaatcttgcccttcccccacccgagggcttcgcgtggacagaatattaagcggacaagcccgcagggtgcctagactaagtgctgagcttgtagtgaatgcccagccatgac

SEQ ID NO: 77330 - DNA, 122 bp, Homo sapiens
ggaaactcgcgggtctcccctgcccctccctgaaggcggcccttcagcgccgcgcgcttccgcccccacactcgggttgaggagcaaggagagaaaagagcgtctttctctcttgctcaaag

SEQ ID NO: 77331 - DNA, 122 bp, Homo sapiens
cctctgggaccacccccacccctacccccacccccacccgggagctctggcttagattcacgctaacccaggccctgcggacggcagagctccttaatctcgtacagacaggggatgctgag

SEQ ID NO: 77332 - DNA, 122 bp, Homo sapiens
gacagccctcccgctccgatcttctaatcacagaccctggacagatccgggggccctgggcgccccgtgaggccaggccaggctgctgactgacacccagtcacagtggcctgtgtttcctg

SEQ ID NO: 77333 - DNA, 122 bp, Homo sapiens
ttttgacagaactgccagaggctgcgggtcaatggggtggccgcgtgtctagggagagggcgctggcggcgcagagggtgcggggcagggcacttgcgagtgcgtggggaagtctatttggg

SEQ ID NO: 77334 - DNA, 122 bp, Homo sapiens
aatactgaacgtactgcttctgtgagaatttcccctccttgtgtctggtgtgattgacaacgggtgcagccagtggaagcaggaatgtcggggagcgcggggtgcagggggtgccctgtcac

SEQ ID NO: 77335 - DNA, 122 bp, Homo sapiens
atcagctgggttggtgtgcagcaagctgtgtgaccaggggacagcagtggtcctgagggccgtcactgtctgccgtgcagagcccttcctcccacgggggcctacctcacctgtgccaaggg

SEQ ID NO: 77336 - DNA, 122 bp, Homo sapiens
gacccgagcctcagctgtcatttaaagagataggctgcagccgcggctcccgggctccgacgctagggggcggggccgagagccgagcctgcaagaggtgcagctccccgacccgcggggac

SEQ ID NO: 77337 - DNA, 122 bp, Homo sapiens
cccctctctctgcaaccccaggcctctctgctaagctcctactcatcccacagagccatacgcctgccagatactgccccctggatggcacctcaaatgcagtaagccccatccatggtccc

SEQ ID NO: 77338 - DNA, 122 bp, Homo sapiens
cacgggacggccaggccacgtgcccatgggatgaccacggatgagcttgccacatgcctgcgggatgaccacaggacggccaggccacgtgcccacgggatgaccacagatgagcttgccac

SEQ ID NO: 77339 - DNA, 122 bp, Homo sapiens
gatgaggaaacgattgaagttgaagaacaacaggaaggcaatgatgcagaggcccagaggcgtgagattgagctgcttcgccgtgagggagaattgccactggaagagctgctccgttccct

SEQ ID NO: 77340 - DNA, 122 bp, Homo sapiens
aggctattctttgatgtgctggacacccttcacagccaacctttgaaaggaagagagacgcgaaagaattgggccaaatgtagacaatgcttcagaaatagaagattggtagaacttgagga

SEQ ID NO: 77341 - DNA, 122 bp, Homo sapiens
atagagaaggctatttagaagtccgttcttttttctccaatctaaagtacttttgtgtgtcggggactagaaaccacatgcaccacaaaaactacagctgatggctgtgacccaaggcagta

SEQ ID NO: 77342 - DNA, 122 bp, Homo sapiens
ctgcagctccagcgccaacctgggctggctggtcctccctcggaggtttcggggtggcggcgcctagcctgcctgtcatgagtgctgtttcacagactctatctcaaaaacaaaaccaaaaa

SEQ ID NO: 77343 - DNA, 122 bp, Homo sapiens
caggatttcaaaatcccggtctctcttttctcctcacgttttctctctgttgttacttgccgtgttcacagagctggtccctgcagaagagacggaacaggataaagagcacacatgtgaga

SEQ ID NO: 77344 - DNA, 122 bp, Homo sapiens
tcccgggtcctacacgggctttatgctagtttataatatgacttggggcagccgcccccccgaggctgggaggaggcctcaggagatggggatcactggtgatgcccggaggaggcagcttg

SEQ ID NO: 77345 - DNA, 122 bp, Homo sapiens
acagaataatatgcttaaacaataacataatcaaacatgaattcccttggtggtatggcccgtcaagtaatgatcaactcccaatgttgacctgaccatttgagatacacaggaaaggccca

SEQ ID NO: 77346 - DNA, 122 bp, Homo sapiens
agtgtgtggcacttccctctttactctctcttcctcctgctccatccatgtaggataggtcggcttcctcttcaccttccgccacgattgtaagtttcctgagcctccccagccatgcttcc

SEQ ID NO: 77347 - DNA, 122 bp, Homo sapiens
gctggagcccgcacagcacagtagcatccacatccctgctgtgacacctgtgtgggcagtcggcatgtcggcgtggactcccaggctgcagaatcaggtgttcccctcaccacacagtctcg

SEQ ID NO: 77348 - DNA, 122 bp, Homo sapiens
agtcaaacaggatagtatgccagcagaatttgcattgaacacttgatgtcatgtgtcatccgacactggcttttccatcaggttatttcaggataaggtactactgaaaaagcataaccact

SEQ ID NO: 77349 - DNA, 122 bp, Homo sapiens
tgctgcgattccagcgcagcttgggcccagctctggccagtcccaggctggcctggtgctcgccccttgtgtgaccaggctctgaagggaggggcaaaagtcatgagtccctggcttggccc

SEQ ID NO: 77350 - DNA, 122 bp, Homo sapiens
gaggctgacatgcgcttctatgcggccgagatcatcctgggcctggagcacatgcacaaccgcttcgtggtctaccgggacctgaaggtgagcgcccctgctgtccccaggctggacctccg

SEQ ID NO: 77351 - DNA, 122 bp, Homo sapiens
cttgtgatcagcgtgaggccttactaagcagctgccttactatccttccagcccagagcacgtgagctgacgtcttctttggcctgtgtggccgtttccttgccaaaagctcagtttgggga

SEQ ID NO: 77352 - DNA, 122 bp, Homo sapiens
cgtccccccttccaaacgtcagcacagtcgaaaacgtgcaccccgcagcctccactgccgcgagccacacgccacctccagagggccggggcctacagcctcaaggggccgcccaaggaggc

SEQ ID NO: 77353 - DNA, 122 bp, Homo sapiens
gagagaggtgcttagaggcctagaccaggccctacagctttggagccagggcaccagaaccgctactaccctcaccttctctgtgccaggttgatttctttctttttcttttcttttctttt

SEQ ID NO: 77354 - DNA, 122 bp, Homo sapiens
acagaggtcactggatccgattcccagtaccatagaagtgactcaaaccagcgattcaaccgacaagcaggatccgggccacccaaagccgcgcgagagtttacgtgacgacatcggcgtca

SEQ ID NO: 77355 - DNA, 122 bp, Homo sapiens
ggcctccccggtgggcgggaccgtggtcaccgaggtgggcggtgccagaggatctggcggcggggcggggcggggcgcgcgtcctggcttcgcccttccccggggcggggcctccggggacc

SEQ ID NO: 77356 - DNA, 122 bp, Homo sapiens
ggtgtgagctccccaactcaccgggagacaggcgctgccacatcactgcctctgggagcccgtgacctcatgctcagagctctcagaagctcacgtggcctgtgaggcccctgccagggctg

SEQ ID NO: 77357 - DNA, 122 bp, Homo sapiens
gcaagccaaggctgacctggcccgctggccatcatccggaaacagcgggaggaggctgcccggaagaaggaagaggaaaggaaagcaaaagatgatgccacattgtcaggaaaacgaatgca

SEQ ID NO: 77358 - DNA, 122 bp, Homo sapiens
cgtgccaggaggtttgctggactgtcacttcccgtttacttctcatctgtaggcctatgacgctccccaggagtagctagctaataatccttttgagttttttattcttttcactgtccctg

SEQ ID NO: 77359 - DNA, 122 bp, Homo sapiens
aagacgaaatggccagcgggcgcctgcgcaacctaaataaggtcccttgtgcgagttctgcgcacgcgcagccagctgcccgcaccgccccgttgcgtcacaaagagctctggcgcatgcgt

SEQ ID NO: 77360 - DNA, 122 bp, Homo sapiens
cactcaccgaaaattgggaggcaggtctgggaggcggggttgagcgcccaccgccttgggcgcgcccgcgccccccgccatcgcggcccccgcgcccccggcccacgcccgcgcggtcccgg

SEQ ID NO: 77361 - DNA, 122 bp, Homo sapiens
tcaaaagagaagaaattcatcacaaattaggggcccatttgtgtcacctgcctctaaagtcggaggctctgcagcagacgaagccctgtgttgctggggagaaggtggcttcacggacactc

SEQ ID NO: 77362 - DNA, 122 bp, Homo sapiens
taccatcttgctcacatccatgaccgaggctgcggggcacccccccacccctggagatcccgcttcccccaaagctgctcccggctaatcgcgccccgagggtgccatgctgcggggagggc

SEQ ID NO: 77363 - DNA, 122 bp, Homo sapiens
gtccattaaacctctttttctttataaattacccagttgcgggtatgtttttatcagcagcgtgaaaatggactaatacaactagggtctgctttcctggcacagtaagaccagctgtctcc

SEQ ID NO: 77364 - DNA, 122 bp, Homo sapiens
gtcatgtctctcattccgtgttattcccatcccatccccatatgtccttcatgctaagaacggtagccctaacctacaggcgtattcctgtgtcattctaggagcagcagcgctgactggtg

SEQ ID NO: 77365 - DNA, 122 bp, Homo sapiens
gaagcgtctttgggattagtgggagcgctccgttttccctacctatgccatctccttttccggccaccctttgctacttaacctttggggtactgactggtccacattgctccatcttctct

SEQ ID NO: 77366 - DNA, 122 bp, Homo sapiens
ggcacttgctctccagctcccgggacgccgcctctggaacggggcagaggccagaggtgacggtctccccctggcttggaacagaacctgcacggctcagagctccgtgtaacaaaaccccc

SEQ ID NO: 77367 - DNA, 122 bp, Homo sapiens
ccagggccctgaggcgggaggcttgagctgcagtacctggtcagggtgtcccgggagctgcggggagaggaagtggaggggacagccccagtccggcagtcgcgggtgggggctagcaaagg

SEQ ID NO: 77368 - DNA, 122 bp, Homo sapiens
agggagctgggcagcggtgagctgattcgaattccagatgagcgtgaatgacacaaaatccgttttacttgcaaattctgaaccgtgcgcaggaacccagcaagctctgcatcacaacatgt

SEQ ID NO: 77369 - DNA, 122 bp, Homo sapiens
ctacatactgtagctgcatttttccctttataaaaactccctggcagctttattttagaacgtagaacctgaatcggaaactttaaaagcctactgtctccctcctgcaaaataagacagtt

SEQ ID NO: 77370 - DNA, 122 bp, Homo sapiens
gtgccctccaacctggcttcttgccatccatcccaccccagaaaagaaacttgtgtcagacggcatgagaatgactttcctgttcctggaaccagtggacgcatgctggcctctctctatgc

SEQ ID NO: 77371 - DNA, 122 bp, Homo sapiens
cacccgaatattgcgcttttccgactggcttaaaaaccggtgcaccacgagattctatcccgcacgtggctcggaggctcctacgcccacggagtctcactgattgctagcacagcagtctg

SEQ ID NO: 77372 - DNA, 122 bp, Homo sapiens
cccagtgccaaaccactcaggaacctccccagacagaagcctgaggaaaataagacctgccgcgcccactccgagggccctgagagtcccaaagaagagcccaagaccccgtcagtgcccag

SEQ ID NO: 77373 - DNA, 122 bp, Homo sapiens
tcacacccacctccctgcaatctgatttggacggcccatgagaccagaagattacaaaaacgcaaaagatgttgacttatgagtcctagataccctgtatccgctggtgaaaggacgcgatg

SEQ ID NO: 77374 - DNA, 122 bp, Homo sapiens
ttaagactacagcttgcctggttgaatcctaactctgcaaccttgagaaagtggcttcaccgctctatgcctcagagctttgatttgtaaaatgagggtaacaataatagttccaacctcag

SEQ ID NO: 77375 - DNA, 122 bp, Homo sapiens
tggcttattttccaaacaatttgcttaacgtgattcccggccaagctaaacatgactaatcgtgtttacccggtgatcccgcgcctcctggcaggcggggctggggcccaggaggaaggaat

SEQ ID NO: 77376 - DNA, 122 bp, Homo sapiens
gctgtggggggacacacttggagatttggaagacatctgcaggagcagatggccgagaaccgcaccccagatctccccagagtgaaaggatgtagccacacagaacctagggaagaaacaca

SEQ ID NO: 77377 - DNA, 122 bp, Homo sapiens
ccgcccgggcagccagtgggcgccgggctgggtggggcccggttttccacggggaggcggcggtgggctggtggggggtagtggggtgtttttctctttcacacactcacctcctttttttt

SEQ ID NO: 77378 - DNA, 122 bp, Homo sapiens
ggttgaggaaaagcaaagaggagttacattttaacatttgtgatagcgcagctagcagctcgcagctcctgcagacagctgctggggggagggtgcccagggagtccacgctggctccaata

SEQ ID NO: 77379 - DNA, 122 bp, Homo sapiens
ttatcagccacgacactgtactctgcttcctacaaaatattaaagaagacacaatccgtgcgctgagtttacagccaaggagagcagaggcctggatcagacatcacagggggggagctgag

SEQ ID NO: 77380 - DNA, 122 bp, Homo sapiens
gagaacaaagaccaggaaccattctgaattcctaagtcacttgtgggagtggggtaagctcgggggttctcctaagagaggctagagagctggggctcaaataactaaaaaggctgggatgt

SEQ ID NO: 77381 - DNA, 122 bp, Homo sapiens
aagaggctattaaatgacccagggcgcggctttttctcgcgtttacgagctccacctacacgggaacacatggccacccaagcccgtcgctgcgccaagacctccagctcaacacacccgac

SEQ ID NO: 77382 - DNA, 122 bp, Homo sapiens
tttaatctccactaaggaacgtttgtgcatttctctagagcagtggttctcagacttcagcgtgtataagattacccgggggcatattaaaacaccgattgttgggctgtccacccacagtt

SEQ ID NO: 77383 - DNA, 122 bp, Homo sapiens
ggggacactccatctctggttgagacccctgggatcaatgatctatgaagaccctcccaacggtcatcctcaggacaggggagaccatgttctctttccagcccctgtttcatgaatgtgga

SEQ ID NO: 77384 - DNA, 122 bp, Homo sapiens
actttttcaacataaaagttagtttaaaatactttttctgaagaaaaaaagaaagaaatccgcattccccacagtcactggacaggaatctcggcgtggagacacccgttcaatttccaggg

SEQ ID NO: 77385 - DNA, 122 bp, Homo sapiens
agatgatcatctgttccggggttagaactcagtcccctgcgtcctttccgtcccagtcctcggctctttcaaaagagctgggggttttgagagctccactcaagtcccagcagccctgctca

SEQ ID NO: 77386 - DNA, 122 bp, Homo sapiens
ttaaccttattagagtcttctgctagctctgcttgctacagtccaataaaatgacttaggcggataaagcgacaactagactaaccaataaaatattaagttcttttttgggttctgaccta

SEQ ID NO: 77387 - DNA, 122 bp, Homo sapiens
tactggggagccccggggtccctgaggaaggcagtccggaggctgggcgcccagtgggggcggggaggggagcccgccaggtcctcttcggcccccgatgtgtggcgaggccccgcgtcttc

SEQ ID NO: 77388 - DNA, 122 bp, Homo sapiens
gaggaagacgagccggaccccgaggccccggaaaacggctccctgccccgattcgtgccgcgcttcaacttcagcctgaaggacctgacccgcttcgtggatttcaacatcaaagggcgcga

SEQ ID NO: 77389 - DNA, 122 bp, Homo sapiens
aaaaggtgttagtggcatataaccaactataatagcctcagctatgtgaaactctttatacgtcttggaatttttgaagctgaagttgtctatgccaagatacacttgggcaacacaacctg

SEQ ID NO: 77390 - DNA, 122 bp, Homo sapiens
cgctccctgagtgctgagagccacggtcggtgagagaggagcttcctgatgagcctcagacggtgctgaaaccagccgactctgcccaggatcctgagtcctggtttcctgttgacccttcc

SEQ ID NO: 77391 - DNA, 122 bp, Homo sapiens
ggagcttgtcttgaggcagcccgagcaatgctcctaccacctgcttctacacttgcagcccggcgctgaccattaccaaactcccgcgctggaggtctctcaccatggccgcctggggccct

SEQ ID NO: 77392 - DNA, 122 bp, Homo sapiens
agaaatttgataggaataacacaacactgtggtcatatttgacctttttctgtgtctgaccgtataaaccaatctagttatttattgctgtgtgacaaatcattccaaaatgtagtggcctg

SEQ ID NO: 77393 - DNA, 122 bp, Homo sapiens
caatttcgacaatgacagcagcatctggaactacccgcccaaccgggagatctccaggaacgagtccccctacagcatgaccaagccccccagctctgagcacttcccgtccccgcagggcg

SEQ ID NO: 77394 - DNA, 122 bp, Homo sapiens
ggcaggaaggggagggcccatcggggctaggggaaccccggcgcagacctggggtggggtcggaaaagctgtttcatcgcccgctcccgggccctccgctccctccctccctccctctctcc

SEQ ID NO: 77395 - DNA, 122 bp, Homo sapiens
ccctccctcggcatcagtgcaggctctcccacctcattactgttctgtgtctttgggaatcgtagagtctgtggcccccacgtcctaggtgtctcggcaccctggacccaggcgcctccgag

SEQ ID NO: 77396 - DNA, 122 bp, Homo sapiens
catcacctgcaagcgatacaccgaggggccgcaacgagcccccgctaggagcgcggctgccgggaaaataagtccacccagaaccagtctggcgtgtccttggtttattttctttccagacc

SEQ ID NO: 77397 - DNA, 122 bp, Homo sapiens
ggcaggtggctcaggacggtaagcatttctctgcccagtatgctgaatgagggtgtctttcggatttccaagacccgcaaggagcagtttctcagctaaccactaatggcatggcgagttcc

SEQ ID NO: 77398 - DNA, 122 bp, Homo sapiens
cccgtctccaggccccagctgttgaaactttgaagggcaacaaacaaccatccacactgccggaccctaggctgttcagggaggcagctcatttccaccccggccccaggacacccagcctg

SEQ ID NO: 77399 - DNA, 122 bp, Homo sapiens
ccactctgctggcctcgctgtggacgttctcaccgagtggcagccgtgtctgcattggcccgagggcctgggggaatcccgttcccacactggttggctgtgctgcctctagggagtcactt

SEQ ID NO: 77400 - DNA, 122 bp, Homo sapiens
ctcctgcattttagttcaactctggcagcaagaaaacaaaaccacataatctaaggctcacgcccaactctccgaagccccatatgtgctagttcctgtgtggtttgcctacagactgcagg

SEQ ID NO: 77401 - DNA, 122 bp, Homo sapiens
agagaagcggcagcgggggccgggcttgctcactgaggaggcctgaggcaatggttccctcgtcacactcctgtccttccccaaactgtccccagtaggggaccaggggctgggactcaggg

SEQ ID NO: 77402 - DNA, 122 bp, Homo sapiens
ggaccctgtcccagctggtcctgctccactgctatgatggtgtggcctctgatctctgaccgtgtcttgaggggagaccaggcccttgatcacaagcgtatccatggtgaggttccgtggat

SEQ ID NO: 77403 - DNA, 122 bp, Homo sapiens
gatgggaccgtccagcagcgcccaaacttggcgactcgggttcacgttttgcgctcaggacgccgcccgcggctgacatcctcactccaccctagcagggcccgccttaagtaggcgaaggg

SEQ ID NO: 77404 - DNA, 122 bp, Homo sapiens
cttagcatggcccagcacccagcagccaaactgcccaagatcttccatgtcaactggttccggaaggacaaggaaggcaaattcctctggccaggctttggagagaactccagggtgctgga

SEQ ID NO: 77405 - DNA, 122 bp, Homo sapiens
tatttctgacgcactgtggtcaaaacacttcctctgtgaatgtgccctactccagggggccgtgggtagggctgggggtcgaccgcagccgggtgcgcccctcccaggttcccccctccctg

SEQ ID NO: 77406 - DNA, 122 bp, Homo sapiens
ctacataactaataaaattgcagacctcaggattttgacccaggatttgtctggcagtaacgtctgtcccaaagggcgacacaatcctgaggcagctgttcgcaaactcgaggcctcaatct

SEQ ID NO: 77407 - DNA, 122 bp, Homo sapiens
tccttaaaacagagagcagggcacatgttctcaggacctcttgagactgcgcctcgggggcggggtggtggtggaaaaaagacagaaaacaaagaaaaaggctaaagggagcccataatcaa

SEQ ID NO: 77408 - DNA, 122 bp, Homo sapiens
gcctggccacccaggcgcgcaccacgacccgcactcggacgaggacacgccgacctcggacgacctggagcagttcgccaagcagttcaagcagcggcggatcaaactgggatttacccaag

SEQ ID NO: 77409 - DNA, 122 bp, Homo sapiens
gaagcgtcttgatgtgcaccccggcgttcaccaaccaaataagggcctcgctcacacagtcgatgtcatgctgggtattaaaagggttgtgctgcagctaaaatatctcacagtgtgtgtga

SEQ ID NO: 77410 - DNA, 122 bp, Homo sapiens
atgctcccagattctcgaccttcccccggcccgggaggtgcagcctgcgtctgcctctgtcgtgtgtgctgatttgagtggcttagcttgccacagcgcagcctcttctgtccctttcagtc

SEQ ID NO: 77411 - DNA, 122 bp, Homo sapiens
gatcaggatcaattaccccagccaaaacagtaactttcttggcctgttggttcattgacacgaggaccctaaagccatctgaacttccagtttcccttccttcctttttttttttttttttt

SEQ ID NO: 77412 - DNA, 122 bp, Homo sapiens
aaaaatatttatgcaagcaaatcctcatgcagctggaacttgccccaccagattctctttcggtgattcagagctgaaggtgcctcactgccctgtggaacaggtgaataaagccttcccag

SEQ ID NO: 77413 - DNA, 122 bp, Homo sapiens
tgggactggcatctgaagtggaggacactcttgtgggactgagaccttagcctgcaggatcgggtactgtctccagggagaaagcgtcacaatggaacagggttggaggacgcccagcgggt

SEQ ID NO: 77414 - DNA, 122 bp, Homo sapiens
aaaggggtgacagacggcacctggaaaatcgggtcactcccaccccaatactgcgctttccgatgggctgaaaaaacagtgcaccaggagattatatcctcacctggctgggagggtcctac

SEQ ID NO: 77415 - DNA, 122 bp, Homo sapiens
cctccttccttgtgggagggagggccccaggaggacctggggcagtgatgggggacagttcgccagctctgactgccaacctgcgggcttcatgtgatcttatggaaaaggaacccacttcc

SEQ ID NO: 77416 - DNA, 122 bp, Homo sapiens
ttggactccttcccccaacccaaatgatctgcaccccagtgacaacgtggagtggctccgcggaagatggatgatacacacttgtgatgttgctcatgttttatggttaactgcctggaatt

SEQ ID NO: 77417 - DNA, 122 bp, Homo sapiens
gaactgtcagcctcgggactggctgaagggcctgggcaggactggcagggtggccaaggacgtccggagatggctgccacttggcgctctgaccccaatgtccatcgggagtccagagaggc

SEQ ID NO: 77418 - DNA, 122 bp, Homo sapiens
tcctccccgtcagcgttctgagccacaattccttcccatcctccgcctgagcgctctccacgtccagccccaaggctgtctcaccagtttggcaccaggccggtatcttccgccactctagg

SEQ ID NO: 77419 - DNA, 122 bp, Homo sapiens
aggcgtggggtccttggagctctagctccgactgcagactctgtggttctcacaaccacccgtttcctctgacggcatcacagaccgtcgaggagccaccttccccaagttcctgtttctag

SEQ ID NO: 77420 - DNA, 122 bp, Homo sapiens
gtcctagagaggcatgctcacgatcaatcatgcctgttatcattatcaaataaaataaagcgaaaaccctcaaagctctcccttaaatgtgaatcctctttattagcaatcatccagtcggt

SEQ ID NO: 77421 - DNA, 122 bp, Homo sapiens
caaggatgaagcgaaggttggagtgatgtggtctgctgcggggaccctgaggcgtgcaggcggcctctggaagctgaaaagacaggaaggcagcttctcccctgagcctccagaagaacccg

SEQ ID NO: 77422 - DNA, 122 bp, Homo sapiens
acaacagaggcaggtgacgaagatttcttccagtccctcattttgcatcttctctgaacacggtatctgctgtcgacccggagtctgcgtttatcaacttctccacagtcccggagcgggta

SEQ ID NO: 77423 - DNA, 122 bp, Homo sapiens
cacaatgtccccactcccagggtttcggcgtcccagccccctgcgcccaccgcgcctgcccgccagaatccctgtgcccttggtgcgtgtggcctgccgagcctcgagcccctgttctcctc

SEQ ID NO: 77424 - DNA, 122 bp, Homo sapiens
acacccccagggcagaaagccctgttcagaggtaccagggagcaggcacaggccagggtccgaattcgtaacaagcatccgggactccacatgacgcaggtctgagaatcgatcccgggttc

SEQ ID NO: 77425 - DNA, 122 bp, Homo sapiens
catcgggcgggtgaacgcagaccctgactacctgccccgcaccatggactttggcctcaacgtgcgaggattcctggaccgctactgccccccaaactgccccccgagcttcttccccatca

SEQ ID NO: 77426 - DNA, 122 bp, Homo sapiens
tcctcgttctacttggaggacttgttccagccagcgctagtgcgtgagtataaggagagacgggaaggaccggctccatccagccctgaggatcccgaagaaagggtggaaacaccctggat

SEQ ID NO: 77427 - DNA, 122 bp, Homo sapiens
gcggggcctctcgcgcgccctctagaggcttgcgtcccgggagcccggcctcgtgcgccgcgctttgaggtgagcctctctgagaaatttgtgaggagggtccagccgcgggtcggaaggaa

SEQ ID NO: 77428 - DNA, 122 bp, Homo sapiens
gccactgtttccgggagggctgccgggctgctcctcctccctcgagagccgctgtcctcacgcctttcctgctgtccgtccagtgttgatgacttggccagctctccccttagaaaccaaag

SEQ ID NO: 77429 - DNA, 122 bp, Homo sapiens
taagcagcattgctgaggatggccgtgcagggctgattatcccctatttgcacgttctggcggtgggaaggctagaagtctaatgactgaattatcgccctaatgcctctcgctggctggga

SEQ ID NO: 77430 - DNA, 122 bp, Homo sapiens
gcgggcggaagcgggggcggggcctgagctgattctcattgctcgtggaggaggggagcgcggcatagggcggagcggagccctccaggttcgattggattgctccaaacaaggcggaggag

SEQ ID NO: 77431 - DNA, 122 bp, Homo sapiens
ctctgcagtcgagggcaaggactctgcgtgcattctccactgccgtctactcggccactccggtcccgacacctagcctgcgtgagtgtctgtctcgtcttctctgggctttgggggaggtg

SEQ ID NO: 77432 - DNA, 122 bp, Homo sapiens
ataattcctcctttcttcagctaggctcaactcttacagaccgtgcaaaacttgttccagcgacaagcagtcgtatcccacagaggacagagcaatagctttcgcgccactcagcccccgcg

SEQ ID NO: 77433 - DNA, 122 bp, Homo sapiens
tctcctactcagtgtcaagctcagtgcccactgagaatgaacaaggagtgtttttcctttcgtccttaaacccccaaaaccatttagtattaaaatctaaaccctggatcatccgggggtac

SEQ ID NO: 77434 - DNA, 122 bp, Homo sapiens
ccctgggaggaatcctagcaagtccagtggcctctttatccccatgtctaccacctcagtcgcagctgcatccttcccttaccatgtgtaccaatagcagcagccctctgcctctctcctcc

SEQ ID NO: 77435 - DNA, 122 bp, Homo sapiens
ctccgccgccacagccgccttccggctctcgccgcgggtccggagcctcgggaggggccgcgggtgtctcacgcgttgccaagtccctcggtcaacatggctcccgcgccgacgagccgcgc

SEQ ID NO: 77436 - DNA, 122 bp, Homo sapiens
cgtggcctccccgaagaagaaccgatgcactggggctcctggcgtctgcggggtccataacgcctccctagggaggagagggaggagctaggagatgcagggagtgcagaaaccttggagaa

SEQ ID NO: 77437 - DNA, 122 bp, Homo sapiens
acttcctgccccagggagatcctgaggccaggaggcaggctggcccaggcaggctgatggcggagggtggtggggagggtgggggggccctggactttccctcccagtcctggcaccttgca

SEQ ID NO: 77438 - DNA, 122 bp, Homo sapiens
tttgctctagagttccggattgctgagcttggaacagctcctcctagacacagtgtggcgcgggagcagctgcatgagggcccacgtactctgcacacatcagcagcccatccgaccttgtc

SEQ ID NO: 77439 - DNA, 122 bp, Homo sapiens
gcgccgtggggccagcgccccagcccttagtgaattgcttcatctgccactcatgtcctgcgccctggaagctgcagagagagcctcggctccccgtgcaagcgctgggctgacaactgaca

SEQ ID NO: 77440 - DNA, 122 bp, Homo sapiens
agaaaagtgactaaatgcattttgccctcttttcaaaaccagacgggcccaggagtcccccggttttccctgttttctcacttctccgctagcctgctgccgcttctgttctctgggctcac

SEQ ID NO: 77441 - DNA, 122 bp, Homo sapiens
cagagggccccatcagaggaggccggggcggggggctggccggggccacgctgacggtgacgcctgcccatcatacctgtggtgcagttgagcgaagtattgaagccaaggaagggcgaggc

SEQ ID NO: 77442 - DNA, 122 bp, Homo sapiens
cactgatgcagagacgggggagtgttgccatgaactgactggaaactctgtgtgtgtatccgtgagtgcaagatacttagggaaagcgaagaagagcatgctgctacacaccactctggctt

SEQ ID NO: 77443 - DNA, 122 bp, Homo sapiens
tggagggaacagcacagcagcggcccaggggcagggaagcacaggaccattagggagacacgagaaagcccatttgtctagaacagaggattcaagcagtgcaccaaggaaaatgagggcca

SEQ ID NO: 77444 - DNA, 122 bp, Homo sapiens
cctccttccctccctgacaacccacttggaatccaatagcatctcaaacttcacttgttccgaactgagttctggagtcccttctgagccactgctcctcccctggcttctctggcctggta

SEQ ID NO: 77445 - DNA, 122 bp, Homo sapiens
catgatgggcctggaggacgtcacgcgatgggaagtaagccagacacagaaagacaaatacggaaggattccacttctggaggctcctgcagtcgccagattcacaggggcagaaggtggaa

SEQ ID NO: 77446 - DNA, 122 bp, Homo sapiens
ataaactggaacttgtatcctgacattttccatgatctagatttgctgttgcatctccaacgtgtagcataatatgttcctctattcttatgttttccttaaattgggaggcagatctagag

SEQ ID NO: 77447 - DNA, 122 bp, Homo sapiens
gctggggatggtggcacatgcctgttacctcagctactctggaggctgagacatgagaatcgcttgaactcaggagacggagattacagtgagctgagatcatgccagcgcactccagcctg

SEQ ID NO: 77448 - DNA, 122 bp, Homo sapiens
aacccccagggctttccgaagcatggcctggctccaggcccggtcctgtaaggactggaacggcagcaaaatgtgcagggaggcagtcggccggcagagctgcggcgggagccaaggtcagg

SEQ ID NO: 77449 - DNA, 122 bp, Homo sapiens
gtaccagtgctgcaggattggaggcactccctgcccgagggaaattggatcaaggctgggcgtgccgagtgttcccacgcggagtaagacgtgtagccagaaggaggggttcatcccacgtg

SEQ ID NO: 77450 - DNA, 122 bp, Homo sapiens
gagagaacctggataccttggctgctggtgaagaattcacactcttattatgtattttttcgatgagagcctttgaacaccaaggcttctagtcaggcatcttgccctgcccccaccccgat

SEQ ID NO: 77451 - DNA, 122 bp, Homo sapiens
aggaggagtgaataaagcccgcatgcttctggtttgggtgcagatgtgagctgtgcggatcgtaagaggagacacaagaaagagctggggcatgcgccggctctgctgagcctcagcaactg

SEQ ID NO: 77452 - DNA, 122 bp, Homo sapiens
aaacagcttgcagactggatctgtagaaaagcatacagtttcagagaaaggtaccattctcgctggtctgtgacttgaatcaagcccttaaaccatgctccctggtaagcattctaattgtc

SEQ ID NO: 77453 - DNA, 122 bp, Homo sapiens
ggcacacccaggtttccgaaaagccaagaggggtcgtatccccttcctttcagaattgctcgtcatgttctcatagagactttcccagggagaactacacaggatagaggccatttttcctg

SEQ ID NO: 77454 - DNA, 122 bp, Homo sapiens
accttttctatctctctatatattgtgggccactaagtgtttgtggactgatgctgctaacgatctcttggagttagctagtaccggtctcttattcagagtatttactctgctatagcgtc

SEQ ID NO: 77455 - DNA, 122 bp, Homo sapiens
aaggtaaatcttgataaggtgtttttattaggtaagataaacctggtataacatacgttgcgggtgtgtgtgttttgttcagttgtcattttcagagaaataaatgaatttttaaagtgtat

SEQ ID NO: 77456 - DNA, 122 bp, Homo sapiens
cattttttgtgagagcaacgaacctgaaatgttaacaccaacactgacgtctacaattaccgttaccgtttttaataaccactcaggtacctccgactgttctgcgcctgctccacgtcact

SEQ ID NO: 77457 - DNA, 122 bp, Homo sapiens
tgcccctgctcccgctgatttttcccccgctgccggggctttttgcatctttttgccccccgctgctgtggctttttgccaccgtggctttttgccgccgcggctttttgccccagcctttg

SEQ ID NO: 77458 - DNA, 122 bp, Homo sapiens
acttatgcatgcacacacatacacaagcatacatgcatgcatgtttatacacactacacacgtacaatagcacatgcatatatgcatgcataccacacacacatgcacacacacacatacct

SEQ ID NO: 77459 - DNA, 122 bp, Homo sapiens
gggaggggatccgtgttcccccaccccgggcctagaatggagccccggccagccgcgggccgggccccttggttttcaggacttattcttgccggggttggctcgcacgccagcatcgcgcc

SEQ ID NO: 77460 - DNA, 122 bp, Homo sapiens
gcggagttctccagctcgctcagcctcactgagacgcaggtgaagatatggttccagaaccgccgcgccaaggcaaagagactacaagaggcagagctggagaagctgaagatggccgccaa

SEQ ID NO: 77461 - DNA, 122 bp, Homo sapiens
acaaaagcacgcggtcacacaggctgtcgggccagggttttttatcaggggtgggagcagcgggcgcggggttctgccagcctgctagtcacccttgggcgcagccttcaccctcatctcgg

SEQ ID NO: 77462 - DNA, 122 bp, Homo sapiens
ctcagctgggagtgggggacagccccccaatgcgtgaccttgagcaagtccccgagcctccgtgaagtggggctcttgaacacaccccagagggcaacagttctccatttccaggcctgagc

SEQ ID NO: 77463 - DNA, 122 bp, Homo sapiens
acaagagagaaaaaaattaagaccgaaattaaaggaaggctcacgtggggataattccggcgtgcactgcttagacagcttttgcactagaggaaagaaagaattgagagtggggagaaagt

SEQ ID NO: 77464 - DNA, 122 bp, Homo sapiens
ccccatggataaagtgtcaactccgtctttatgacaggccaactcagcgggtgcccaccacgcttggctccaattcaaagagccaccatctttggtccccacctcagtgggttcccttgtgg

SEQ ID NO: 77465 - DNA, 122 bp, Homo sapiens
caactgacaacttaaattgactccctgaagttggccagcgaccaggcaaggatgggaacccgagtatgtcggccccaaactccagtgttccttcaccatgcctgcagtctcagggatgggga

SEQ ID NO: 77466 - DNA, 122 bp, Homo sapiens
cctctaccctatttttaggtactgaccaccaactgttactctgcagacaaaccacatgtgcggtttggggtcttgctcttctaaggcagctccataagctgcagcttccttcctggctccca

SEQ ID NO: 77467 - DNA, 122 bp, Homo sapiens
aagggcgcacactacccaggcagggacagggaccccgcagagcctgccaaggggcagccacgcggcccacggagccggagatgagggaggagcctggcccgcgcccggcccccgctcgggtc

SEQ ID NO: 77468 - DNA, 122 bp, Homo sapiens
aggcccagcactgggccagaggaggtggcagctcgccggcaaagcagggtgggctgcgtccgcgggggcgaacacccgacgctatccgaagacgtcccgcgcgggccggcgggggcgcggtc

SEQ ID NO: 77469 - DNA, 122 bp, Homo sapiens
cgctctctggcgccctctgctggcctggcgcgcaccgcggacacgcaaggcccgggcctgcgccgcgctcacctgtcccggcccaggtgctcgctgtcccttgcccgtggccaggcccgctc

SEQ ID NO: 77470 - DNA, 122 bp, Homo sapiens
tagcgtcttgtaggtctcctgggggtcgtcaatgacgaacgtcgaatactcctcctgctccgggccgtcatacacagatttgctcccacaggcctctgtggagggcggaggggtcagcgcag

SEQ ID NO: 77471 - DNA, 122 bp, Homo sapiens
gtgtccaaaccacgagaactatctgtggttaggtgtgttcatggctgcattaattaaaagcgtgctatagtcccactactggggaggctaaagagggaggatttttttgagccctggagttc

SEQ ID NO: 77472 - DNA, 122 bp, Homo sapiens
tcatgcacgcaaaccctgtctctgagctcttgaagcttatattttactgggaatgatagacggaaatcaagtggcttaataaacaaaatgccttcaggaagactgtcctgaaagttggggag

SEQ ID NO: 77473 - DNA, 122 bp, Homo sapiens
ctgcaacctccctgcctgattctcctgcctcagtctaccgagtgcctgggattgcaggcgcgcaccgccacgcctgactggtttttgtattttttggcagagacggggttttgctgtgttgg

SEQ ID NO: 77474 - DNA, 122 bp, Homo sapiens
tgaactgattcctgttcataaggtaatcgcggaccccatgtggtcctttcacaggggcttcggcaaatcccctgcagtgagatggcccctgggcagctctgttttctgcagaccaggctgtg

SEQ ID NO: 77475 - DNA, 122 bp, Homo sapiens
ttaagaaaggagaattaaggaagcaattcccgtgattcccacgacacacgtgacacttctcggagagagacacaggcttcactgtgaaagtgcagaggacggtgcggtccctaggcgggctg

SEQ ID NO: 77476 - DNA, 122 bp, Homo sapiens
acgggaagacagcgcggggcgcgtcatcgcccgcaaagccggccttcaccagcccagagccgttgtcgcacaccagggcggtggtctcctcgtcgtcacacatcttggcacagcttcagggg

SEQ ID NO: 77477 - DNA, 122 bp, Homo sapiens
tgttatgttcctgaaacacccctatttcctctcttgaaggtttccctgatgatctgttcccgtagctcctcctcccatcccccttacccggcacattggtcagtctctgctgattctctggt

SEQ ID NO: 77478 - DNA, 122 bp, Homo sapiens
gcacgagtcaaatccggcctttccaaagcgagccaagcccactactacaaagagatcccccgagtgttttgccttaaccacatttcagacagccagctttgtggctgctgtttgactccaac

SEQ ID NO: 77479 - DNA, 122 bp, Homo sapiens
aagctcgcgctgattgacagctgcgttgtcccaaaaaggctcagcgaagatgctgatctgcgggtgggtctagacgcgcggcaggcgcgcccgctacccgctctcctccgcgcgccacccga

SEQ ID NO: 77480 - DNA, 122 bp, Homo sapiens
ccgtcggaggaatcccggcgcgaagcccgagctgggggcggcggccacaggcgtccccaccgccttcttgtccagcatgttgttcaggttgaggttggccagggatttctctgtctgccaaa

SEQ ID NO: 77481 - DNA, 122 bp, Homo sapiens
tgtctgtcctggacatttcacataaaaggaatcatacagtatgtgacagtctgtgactggcgtctgtcaccaagcataatgttttatggtagcctgggtcagagtttcatttatttttatgt

SEQ ID NO: 77482 - DNA, 122 bp, Homo sapiens
ggagaatccaactaccccatgactctgggcaagccacttcccagagtgcacttcttcatccgccaccctggccccctactgggctgctgagagtgaaagtgctttgtaaagaacagagggag

SEQ ID NO: 77483 - DNA, 122 bp, Homo sapiens
gtgacgtttctgcaggtttctggaagaagcctggatcacctggggacggggtgaagttggcgttgccctccttgcagtaatagctgctattgttttgcagcagttattatggatcagatact

SEQ ID NO: 77484 - DNA, 122 bp, Homo sapiens
gggattcagttcagtgcctaggtatcctagctattgctaggctgtagctatcagctggcccgctcacctgcgcgctctcaggacctttgccgagtccagggttctcaggatagctcctcgga

SEQ ID NO: 77485 - DNA, 122 bp, Homo sapiens
aacctgtaataatctggtcagttattaaacctatataacctggtcaggcacagtggctcacgtctgtaattccagcactttgcgaggccaaggcaggcggatcacctgaggtcgggagttca

SEQ ID NO: 77486 - DNA, 122 bp, Homo sapiens
ctcgcggaggtggtggccacacgcaggctccgggctctgcaccccgggcgggtgtcagggcgggtcccagtggaaaaacatcctctggccagccggggtccggcgccagctatgggagtcgg

SEQ ID NO: 77487 - DNA, 122 bp, Homo sapiens
cccctccttccccagcttttcttggcacaaagcctcgtgcctgggagaggccgcagcgcacgacggcgtgcggggatatggtcgctttctttttatttacatttatcttgaagtttggacct

SEQ ID NO: 77488 - DNA, 122 bp, Homo sapiens
aaacagtaagcgacccggggaattatactttctagatgaaaaccaatcactcatggaacacgattcaaaggaatgcagggcccaaaagcatcctgtgtctctcttactcttggttttcaccc

SEQ ID NO: 77489 - DNA, 122 bp, Homo sapiens
tcctgagttcaggctgcactgcagagcgttccttgagccacccatgccctcaccattgggcgagagtggggaggttaagaatggatgttttatcctaactgagcagaaggcaggcgggcagg

SEQ ID NO: 77490 - DNA, 122 bp, Homo sapiens
agtacattagatgactgcagtacttaaaatgaaaatgcacccagtacctgatttagctttcgtgacatggtgagtcaaagccacatgcaagctaaaagctatgcagtagaggagattgcatg

SEQ ID NO: 77491 - DNA, 122 bp, Homo sapiens
tccgggcctgcttcagtcttcctttgcagaacaacgggccaggccccttccctctgcccccgggtgcttgaagtctagccccatcctggtccaatgcgctcttggtagcctcctttcccagc

SEQ ID NO: 77492 - DNA, 122 bp, Homo sapiens
gggattatatgagtgtgacgggtgtagcgttaggtgacaatgtcatctccgagttccaagcgttatgtgcgcactgagggacacatccacgttcccggggttggatgtggaaggcagctacc

SEQ ID NO: 77493 - DNA, 122 bp, Homo sapiens
attaaagacttcaagaagtcctacattaagaaatctgtgtgactgtttaacccaacatagcgcagatccacataacctctttacttaggtttgtttattttactacaatcaccataacaagt

SEQ ID NO: 77494 - DNA, 122 bp, Homo sapiens
ttcttagtttaccagtgatgtcaaatgttagcattttctttgttgttgtaattgaggattcgtgtaagaaaagagaaatacaataccaagagtattcagtaaggatagtccttgaaaagact

SEQ ID NO: 77495 - DNA, 122 bp, Homo sapiens
gtctgtgttatttaaattctaatatatgaattatttgaattgaattcatgttcggggccacgttgttgtatgtattgatgtacagccttgaatgtgaataattattgtaaactatattttac

SEQ ID NO: 77496 - DNA, 122 bp, Homo sapiens
tctcctggaatcgccaggacgcagctttaccaatcttggctgagggtcaaggtgagataacgaaatcctaagggaaatttgtcaaatgtactccccaggtgtgtattttcctctgggtataa

SEQ ID NO: 77497 - DNA, 122 bp, Homo sapiens
ccgtctttgacctatacaaattttctctgctctttaactcctagaatgattccattttatcgtggagcttttgtcatagcctctaccatagtgaaaatattttttagagaaaataagaatga

SEQ ID NO: 77498 - DNA, 122 bp, Homo sapiens
aggtaatgtgaattataatttgtatttttaatgattgccaaacagcaaccattgaatttacgtggtctgtgccataagtaagctaaggcttttgaatatctctgagagttaaaaatattttt

SEQ ID NO: 77499 - DNA, 122 bp, Homo sapiens
agggcgagacggcggcgacttagcaggcggggcgcatgctgcggagggcaagagtccactcgtactcgccggtcgccgccggcccaggtgagtccgatgcgctcggagcgtccgcctcgctc

SEQ ID NO: 77500 - DNA, 122 bp, Homo sapiens
gccaaggactgttgttatttgaaggcttgactggggctggaggatccccttccaagacagcgcacttatgggactgacaagttggtgccagctgttggcaggaggcctcagtctttctacac

SEQ ID NO: 77501 - DNA, 122 bp, Homo sapiens
gctacaagccagcggctcacctgcagcaaaacgcctggaggcaggtccatgcaatgcccacgtcttgcatgtcattgtgcagttaaacagctcctgaaccagagagcagctgcgcccagaca

SEQ ID NO: 77502 - DNA, 122 bp, Homo sapiens
aattaaagaaaagctttgggaagcgtgtgtacacagtgataagaaaattcaaactggacacgtattctcatctgaactttataggtaaaccaactagactcccctttcactaattcctactc

SEQ ID NO: 77503 - DNA, 122 bp, Homo sapiens
agaaacaaacagatgttaatggaggcgtgaaggctactgcgctctcactttccgaactgtcgtaaagagccctagtgtcgtgctctcctcggtaggggaggaattggttaggcggcggcggc

SEQ ID NO: 77504 - DNA, 122 bp, Homo sapiens
cactggccggggccctgggcctggagaggagaaagtgagagcaagctgggcccggcctaccggccagcacccaccctcacgcccagcagctccgagaacagccccagtggagacggaaatcc

SEQ ID NO: 77505 - DNA, 122 bp, Homo sapiens
cgctgttgctcttcctccaacttcgcttgcttggtggcggcatccggcccctgggcagctcgccgcttgttcacgtgtgtcccatcctcctgtggagtgggcacgccttcctgtcccgtcgc

SEQ ID NO: 77506 - DNA, 122 bp, Homo sapiens
cccgcgaggcgctcagccgattggaagttccacaacgaccgtcactacccagggccggagcggcaactccgcagcggagctctgcctgcccgctgcgttcccccaagagactagaccccaca

SEQ ID NO: 77507 - DNA, 122 bp, Homo sapiens
cgtgagagcggcggcgaagggcgcccggggaagcccgtgtggtggttaagagcgagggctcgggagtcagggcgcctgggttcgaaccctgaccccgtcgctcttggctgtgtgaccttgga

SEQ ID NO: 77508 - DNA, 122 bp, Homo sapiens
tgttggattcagccagttgacagaactaagggagatgggaaaagcgaaaatgccaacaaacggcccgcatgttccccagcatcctcggctcctgcctcactagctgcggagcctctcccgct

SEQ ID NO: 77509 - DNA, 122 bp, Homo sapiens
aaaaaaaaaaaaaaaaaaaaagggtttgcaaggccgctgcctgaagcatgcatccaaacacgttaagcagctgtggggtaagctgcaaggataatgttcacttgttttgcagacatacccat

SEQ ID NO: 77510 - DNA, 122 bp, Homo sapiens
atcacaggcttcagtataagactgcatggattcaaataccacctctaccactgactatagcgttatgaccttggacaagtcacttaacctctctgtgcctcagtttcctcatttgtggtatg

SEQ ID NO: 77511 - DNA, 122 bp, Homo sapiens
tgcagctgctattcccgccgctgctttagctacaaataaaatgacagagtgaagtgagctcgtccggagacaccttcatcaattaattcccctaaagccagcgctgattggacactcctgac

SEQ ID NO: 77512 - DNA, 122 bp, Homo sapiens
ttccgcggttttcagtgacccagtttgttgcatggcacatgttggaaaggtgaatctgaccgcgttgaccgcgttacttcagagatgcgctgtgagctgctttgtgccgcgaaatgacctgt

SEQ ID NO: 77513 - DNA, 122 bp, Homo sapiens
attctccttgtgaagtcccacatgttaattgcacttgcagatagaatactaccctaatgtcgggaatttcctatttgtgggattagataggcacacctgggtgcttgtttgcactagttctt

SEQ ID NO: 77514 - DNA, 122 bp, Homo sapiens
acctcttcctccggctcctcctcctccttctcccgcagccgccgccacagccgccgggagcgtcacttccgctccagcaggcccatctcttccgcattgcgccgcggccgggggcggaagat

SEQ ID NO: 77515 - DNA, 122 bp, Homo sapiens
gtcgaaaaaggagggggagcaggcgctggtgggagcggtgggcacgggcgtggagtgctgcgagtcggcgcagtcgaacacgaggtccgcgtagtcatcggcgctgcaggacggggtcctgg

SEQ ID NO: 77516 - DNA, 122 bp, Homo sapiens
aattcaagaaggacatgaagttcactaaggagacagcaaggtctgagagactctgtcaagcgggcacgagccgggggctgtaggacagatgtgggaggtgcagcctgggctgcagtggaggg

SEQ ID NO: 77517 - DNA, 122 bp, Homo sapiens
acctcacatgatccacccgcctcagcctcccaaagtgctgggattataggcgtgagccaccgtgcccagcctctggttgtgcacttctaatgataagtaaacttcaggaaaggcatctcaaa

SEQ ID NO: 77518 - DNA, 122 bp, Homo sapiens
cgggatttggggtggaggacgctgggctgggaaccagcaccttgggacggccgggtagttcgggccttgaggagtcccacaccctgacagctggcgccccccacgccccgcctagctctcct

SEQ ID NO: 77519 - DNA, 122 bp, Homo sapiens
ggcggcgagctcgggcacttgacgaggacgcaggtggcagtcacagcatccgtgctgacacgcaaggaaggggactcttcggtaatcccaactatttggtaccagagccaagcaaacgtgac

SEQ ID NO: 77520 - DNA, 122 bp, Homo sapiens
tttgttcctgctcagtggtgagtggctcaccctggcacatagccactctgtggagggggccgcatctctgcccagctcagccacaggccctgggagggcctctggcctgggctttgtcccat

SEQ ID NO: 77521 - DNA, 122 bp, Homo sapiens
gtggataactgcctcggacttggcggggccggtccccacctgaagctcacctcaggcagtcgctagaagttccaatccaatcgtgagctttcctctgggagggacaggatccccttcaactc

SEQ ID NO: 77522 - DNA, 122 bp, Homo sapiens
aatttcaaggcttgagatgattcagagggctaaggctggtgtatttctcaacagtatatccgtttattattcagagtcccaccttgaatcgtaagggaattaccagagctttcctttttgac

SEQ ID NO: 77523 - DNA, 122 bp, Homo sapiens
gtagtccagagagcagtgtgtgccaccctcccagatttctctgattccttggagcaaagtcgcttaattgggagtcagcacagcctcctccctcattagcactggcctgcagtgacaggccc

SEQ ID NO: 77524 - DNA, 122 bp, Homo sapiens
gacgatccccactacgataaataaagtgggctcaagaggcccaaccaacctcttcccaaccgagcctcaagtaacgcttcccttagagacctagattctcacaaggaagcaggtgatagacg

SEQ ID NO: 77525 - DNA, 122 bp, Homo sapiens
tgcttctgacctaagtaaaagctaatggttggcattaatcttgggaattcagacctattccgctccatctctgaagtcaaatgggacaccttgaaaatacttcagtggttttcccacgagct

SEQ ID NO: 77526 - DNA, 122 bp, Homo sapiens
tttgtggatgaggctgggttgctcccaggtaatcataagctccgggccttttggatttgacggagggcagtgacttagggttgacacaaattattccacttggctcttcaagccaactgtag

SEQ ID NO: 77527 - DNA, 122 bp, Homo sapiens
aacagactaagaacagcgcatagaaaacattggggcacaactaaagctcataaatgcacacgttttcataacctgaccgaggtccatgctgctgtagcgcatacccccaagaacagagggcc

SEQ ID NO: 77528 - DNA, 122 bp, Homo sapiens
gctgccaccttcctttctctttccccaggaattttcaatcagctgtattgaggcatcattcgcatatagtaaaattcacttaacagagtttgagaagtttcgacaaagtgtttccatcaccc

SEQ ID NO: 77529 - DNA, 122 bp, Homo sapiens
aaaatacttaccctttttgtgataccctgagatttttgtttctaatctattgttttacaacgctggcagtaaaccactaagttgatttcacaacccactaatggtgtgcgacccacgggatg

SEQ ID NO: 77530 - DNA, 122 bp, Homo sapiens
acttcgacggcaccgttcaaagctctgctcagacactgggacaaataaatgacagggctccgaaaagagggtgaagctcctccgcgcccggcttttccctccgcagagcctgggctccccgc

SEQ ID NO: 77531 - DNA, 122 bp, Homo sapiens
aggacgatgtagccagctcgcagcgctgacctcagaaaaacaagtttgcgcaaagtggagcggggacccggcctctgggcagccccggcggcgcttctagtgccttccagccctcgcgggcg

SEQ ID NO: 77532 - DNA, 122 bp, Homo sapiens
agtggcacaatctctgatttgccatcctggttgcaaccttcattactaagtaaacgcttacgtaaaccttaataatgagattcgggcaatatgattaaatattggtttatttgagtgcaaag

SEQ ID NO: 77533 - DNA, 122 bp, Homo sapiens
gtttcctgattgctcagttggccctgttggttgctttccctgctcacagccggcaattgtcgctggatcgtagggcaagagaatattccagttataacattttgatcagctgcggtactgga

SEQ ID NO: 77534 - DNA, 122 bp, Homo sapiens
tcaattagagaagaaatgaatggaggtcatctcaacccagaaacggaaaaaggaggaagacgaaaagtggagattgaaaaattgatacaatttataaaaggtgatccagggtcctgttcaga

SEQ ID NO: 77535 - DNA, 122 bp, Homo sapiens
aacaaccctgtgaagtaaatgttatcctaattttacgcacaagggaactgaagctcagaacggttaaataatttgcccaaggttacacacacagctggtaagaagcaggatcagaatttgaa

SEQ ID NO: 77536 - DNA, 122 bp, Homo sapiens
tttgtgattcttcacttatttcaggccatctgggcttatatgtgcaagtcacaagggatgcgatggcttggcttgggctcaaaggcctgacattcctgccttcttatattaataagaaaaat

SEQ ID NO: 77537 - DNA, 122 bp, Homo sapiens
gatcctctcgcctcggcctccctcccaaagtgttgggatcaccggcctgagccccctgcccggcctcgctctacgttttttaggcgcattctgaacgtgaagtgtatacactgaattctcac

SEQ ID NO: 77538 - DNA, 122 bp, Homo sapiens
tggtttaactccggcagagaggccgtggccacccagctgagcgagagctactacatcctccggccagaggtggtggagagctacatgtacctgtggcgacagacccacaaccccatctacag

SEQ ID NO: 77539 - DNA, 122 bp, Homo sapiens
gagcaacagtaagggacagagttttggggtccacttgtccctcagcatggaagccatcaccgtggtcctgcatagagtgagtctgcttctactctggcatctgagaacaagtgactctgctt

SEQ ID NO: 77540 - DNA, 122 bp, Homo sapiens
ctagggattggtatcccacaaaggctttcaaagcccaaggtaccacaagcacactaaactcgtctatgaattagaaaacaagatatcactgctgcttctttctgtcttttgaaatgtacaat

SEQ ID NO: 77541 - DNA, 122 bp, Homo sapiens
aagttcaggggtacaagcgcaggtttgttacataggtagacttgtgtcacgggggttcgtcgaacagattatttcatcacccaggtatttagcctagtacccattagttatttctcctgatc

SEQ ID NO: 77542 - DNA, 122 bp, Homo sapiens
ggttccattgtccaaggttgtgcctgtcagcttttccggagaggaaaggacagaaaagttcggggagattggctgcagcagaaaagagcaagctctcaggacattattagaaaggtgaactt

SEQ ID NO: 77543 - DNA, 122 bp, Homo sapiens
cagcggcagcttccgccaactactgctgcccaccctggccgagctcagccgcgtcttgggcgccacctcatcctggcggcggcccacctgccccggctgctactgcgttgccgctagctgag

SEQ ID NO: 77544 - DNA, 122 bp, Homo sapiens
tactacgccaaggctgaccccttcaggaggctgcagcagacactgtcttggaggcagcaccgcaggcacttcggcgtcaaagggaaggggtctcagggagaagctgcagcggggggggcggg

SEQ ID NO: 77545 - DNA, 122 bp, Homo sapiens
tccagaaccagctcctcctcctccatcccttgctaccccgcaggtctgtacatgagtgcacgtgtgtggacccagccaggcagcagagggtttgaacacagcaaaatatagcagttaaaaga

SEQ ID NO: 77546 - DNA, 122 bp, Homo sapiens
gggggccacatgcacccaaccgggccaatcccaaagtcgcagtcttctctccccgccctccgcccccaaccgagtcggtgccctcggctccttagaaactggcgggacctcggcctcgtcgg

SEQ ID NO: 77547 - DNA, 122 bp, Homo sapiens
acagaaagcagataaggattcccatctggtaaaagacaagcacaaagagtcattcacacacgtgacaatgggcccattctagccacttcccctttcaataatcttttagtattttcctttgt

SEQ ID NO: 77548 - DNA, 122 bp, Homo sapiens
caggagggtcagggtcagcaaggagatggttgatggaggcggaggtcagggcgatgcgaccgctggctttgaagatggccgtgagccagggactgcaggtggcctctaaaggctggagaagc

SEQ ID NO: 77549 - DNA, 122 bp, Homo sapiens
tgattggctaatatggatgaggggtggcctagaaccttagcatctagaacgatcctgaaccgggaagccacgcctcccggccctctattggctggccccgggggcgctgctgacgcggaccc

SEQ ID NO: 77550 - DNA, 122 bp, Homo sapiens
gcctggactctagtttcccaaagctggattgcgcctggggcctccaatggtgtagttgcccgactcgggggtggctctcctgccccccaccccagccccctacctgcttctaagcctctgtc

SEQ ID NO: 77551 - DNA, 122 bp, Homo sapiens
ctgtcacggcgcttgctgggcgaagccgagggctctgccatggtccctgcgtcgattttgcgctttcggtgctgctctgggacgccgaggagctgcccagcatgcgcgaccccgggcggccg

SEQ ID NO: 77552 - DNA, 122 bp, Homo sapiens
cacccacaccctgccggcctcgtacatggtgtccagggtccggaaggggccgcaggtgctcgagggcttcaccctggggaagatgccgaccaggaaccctcaccccgagcaacagttcaccc

SEQ ID NO: 77553 - DNA, 122 bp, Homo sapiens
tatcatgaatgcagcacctgggcaaactcacactgccttgccaccaaatggtttgctgagcgcctcactccctggcgccaggctccttgaaattatttattgagaaatctagcacctattgt

SEQ ID NO: 77554 - DNA, 122 bp, Homo sapiens
cattggcccgcccggccccgccgtcacccgcggcacgcccagacccgcgcgcgccccggccgccggcccccagccccgcccgacccgcgctcattggccaggccgctacctcgcgtcgcgtc

SEQ ID NO: 77555 - DNA, 122 bp, Homo sapiens
agtctttgaaacttggcctaggtttctcagtgtaaatccctctgctcaaagttccgaaaacgtccacgatcgccagcggcccgcaaccctgcggcggcccccagtcgccctaacaattgtcg

SEQ ID NO: 77556 - DNA, 122 bp, Homo sapiens
atccgcgttggccccgtgggtcagcagcactatggcacagtcgaagcggttgcgcatcaccgccacgtgcagggccgtgttccccgcggagctggtgctgttcacgttgcagccccgtttca

SEQ ID NO: 77557 - DNA, 122 bp, Homo sapiens
ctcggagccgcgggttccgcgtggggccggagcggggcctcatataacggcggagggcggcgcgccgcggtcctagcgcacgccggtttcgcgcactgcgcggctaggggagcgccccgccc

SEQ ID NO: 77558 - DNA, 122 bp, Homo sapiens
agttttcttggagagggcatgggaaaccttcgtcagtgtgtcatctcctgcaaaggccttcgctccttcctctggggagaaagcacccttcactctctgaatcattagcccaaagcagtaag

SEQ ID NO: 77559 - DNA, 122 bp, Homo sapiens
cacagggccttgagcagggctcaactgcatgtcacatgcctggggtcagtaaaactgtaacggcttatgtcaccctaaaaagagtccaaagcattgtcttgccttcaccctggtccacccat

SEQ ID NO: 77560 - DNA, 122 bp, Homo sapiens
cggcatgtggatgtctctggagaatggaatagactgcaccatcatttccacttcctgccccggtgttgtccccgcactgtcctgggctctgcgaactgccaggatcctttctgctccttccc

SEQ ID NO: 77561 - DNA, 122 bp, Homo sapiens
tgccctccaccccaccctggactcagcttgagtgcctgctcctggaggtgcctctgtacccgcaccccagctgggttggggtcctcctctgtgctgctcctgcctcctctcatcttactgag

SEQ ID NO: 77562 - DNA, 122 bp, Homo sapiens
cactttgtgagtatggggtgaatcggcgtcggccttccactgtggggttaaatctcatcccgcggctctcctcctgtcggtcctgcagttcttttgtccccgggtagaggtgcgtttgcagg

SEQ ID NO: 77563 - DNA, 122 bp, Homo sapiens
aacagattctagatgaaaactattacctacagatgctctcctagggactcttaggaaagtcgaggtggtgaaaaaggacatttgcccccttgtgacttgattagaaagcatgagaatcattc

SEQ ID NO: 77564 - DNA, 122 bp, Homo sapiens
cgctcttggtcttggagcgcccaatatgaatcaggtataccaccaccacagcaatggtggcggccagcacggtcaggcccaggactgcgcccaccatgaccccatcagacttgaactgcatc

SEQ ID NO: 77565 - DNA, 122 bp, Homo sapiens
ggagaccttgtagattcatgcaaccgcaaggtgtacagttattgtgcatttgggattcagcgggaaagtacacaatttctaaactgatgtctgtgcttcacagctttcatgtgatttctgcc

SEQ ID NO: 77566 - DNA, 122 bp, Homo sapiens
agctggtttcaacgagggcccttggaccccacaggaattcataacatgcaggatcactgccggggacctgccggtactccaggtagttttcctgcacgaaatgttgggtgagcagcttcttg

SEQ ID NO: 77567 - DNA, 122 bp, Homo sapiens
aaaaccaggtggtaagagataacctctcacaacagaatctttatctgtgaaataaggattcgaccaacagaaccgtctgttgaaaatttcctctcttggtccaggcaggttctctaaactcc

SEQ ID NO: 77568 - DNA, 122 bp, Homo sapiens
aggtccactgcctaagagtttgcagggccagctattctgtttggcctgcaaactttcagacgagcctacaagcaagttgacagtattttaaaatacatggacaaaataattatcaggtaatg

SEQ ID NO: 77569 - DNA, 122 bp, Homo sapiens
ctgctggagggagatgaccactttagcccggaaaatagactggacatgcaagaaacaacacgaaaaacatggcgtaccagctcggccatgagcgccggtgggtgcagtggggagaggaactg

SEQ ID NO: 77570 - DNA, 122 bp, Homo sapiens
ccgggcgcctcccgacacatggacagcacggtgggggacaggaggttgaggctgaccagccgctccccccacagccaggcgtcgtccaggtgggggtcaatggcagagccccgctcggggca

SEQ ID NO: 77571 - DNA, 122 bp, Homo sapiens
ccctgaaccaattgccaatgcccagtggtgacagcggcgaggcttcttgcagcgcgaatccgtccatcaacacgcaaaggcctaggattcgtaggcgccccaggtgggcggtaccaggactc

SEQ ID NO: 77572 - DNA, 122 bp, Homo sapiens
cttcatctatcattcttactgtggcccactctgctgcagccacactgacctttctgtttccgagctcaccagactgttccctcctcaggacttttatattagctgtcccctttgcctagaat

SEQ ID NO: 77573 - DNA, 122 bp, Homo sapiens
ccacctcccgggttcaagcgattcttctgcctcagcctcccaagtagctgggattacaggcgcccaccaccacgcccagctaattttttgtgttggccaggctggtctcaaactcctgacct

SEQ ID NO: 77574 - DNA, 122 bp, Homo sapiens
aagcagcgttaggggcaggcagcctggttccaaggtcacagccctgtgaggaccatgcgccgtggctgttttgcgggggtgctcacacagggctagcccgtgccagacactgtgccaagcac

SEQ ID NO: 77575 - DNA, 122 bp, Homo sapiens
tcgtcaagtcagcaggtcgtaaaacagcaggttgtaaaaccatctttaagatgggataggcgtttatgtgaagcacgaaacaaaagcatgcactgtctttatgtaaaaagaaaagtcctgga

SEQ ID NO: 77576 - DNA, 122 bp, Homo sapiens
gggccacgtttgaactttaggccttgttctgacttcattgaaaccctcctgaagtgcagacgtcttcctgacccacctgggttttgccaggatgactccgaaaggtgtctcccagcagacac

SEQ ID NO: 77577 - DNA, 122 bp, Homo sapiens
cagggcatgccgaggatgcggtggaggaagcctcaggacgaaaacagggctggcaggccacgtacacggccaaataacgctgcgttatacgaaaacattcagccagtggctttttgtgatta

SEQ ID NO: 77578 - DNA, 122 bp, Homo sapiens
agcagtatgactggctggaaggcataaagcagcagacatggggagaagttcagtgaaaggcggcagagcaacacagcagggctgaggtgcccaggcccagagacagaccctgtagctggtgg

SEQ ID NO: 77579 - DNA, 122 bp, Homo sapiens
gatgagccactgaggtaacccaggaagacatcacaaacacagaggccttcgctgcccttccgcagaacaccctgcttgctacccacaaaagcaccctttaatcggccatgagtcacatccat

SEQ ID NO: 77580 - DNA, 122 bp, Homo sapiens
caccagaggttcaaagaaaatgtgccagtaacccacaatctttccagcatgattcactctcgtttcttttcattcatcatgtccttaggacttgtctatactatcagaaacagcagtgggga

SEQ ID NO: 77581 - DNA, 122 bp, Homo sapiens
tgggtcaaccgcctccgtctccacagcaacggagtttcagagcgcgcggcagcttgggggcggggttcccagtcccccggtcaaattttaggacttttcagcaggaaagctgcacaactgga

SEQ ID NO: 77582 - DNA, 122 bp, Homo sapiens
aagaacttgggattgggggatggctggcagtggtttgggccttggctctgcctccacagccgtgggaccttaagagatctaaaaacccctgtggtccttagcatggcattttggggacagca

SEQ ID NO: 77583 - DNA, 122 bp, Homo sapiens
tctcgttaacaagcagctcacacatacagtgtctcagtagtgacagatgctggcccaccccgaggtcaggatgactcagcagggatcgagtttgcgggcgtcacgctccaaggcccagaata

SEQ ID NO: 77584 - DNA, 122 bp, Homo sapiens
ctgaagggggaggatcacttgagcctgagtggtggagtttgcagattgctgagatagtgccgttgcactctagcctgggtgacggagtgagaccctgtcttaaaaaaaaaaaaaagcaaaca

SEQ ID NO: 77585 - DNA, 122 bp, Homo sapiens
agcaacacatttctgtgtgggagggcctgcccagaagactatggcaccttcactgctccacggctggagcagctcagtgtgagggaagaaaccggctctggaacccgagagacccgggtttg

SEQ ID NO: 77586 - DNA, 122 bp, Homo sapiens
aaaccaagacccacctcacagcgaggaccagagagacaccttggtaagaggccctggaaacgaaacacaaagcgaggaaggacagtgcacgggcctcagacgcgaaaaacaggggtcggagt

SEQ ID NO: 77587 - DNA, 122 bp, Homo sapiens
gttttaaaaatcatgttagtgatgaatttctgaattgacgatgtgaccaagcaatgctggcgctgccttctccaggcagtaaggctggggcagcaggaacctaagaagaaaactcccacccc

SEQ ID NO: 77588 - DNA, 122 bp, Homo sapiens
cgccccccaggtgcagcgggccaatcggagtctagacgtggaggtagacagcgtggagggcggggaagttgtgagaacccgctggaaaagccgcgagttcttggctacgtggcgcggttgtt

SEQ ID NO: 77589 - DNA, 122 bp, Homo sapiens
tttatagccgccgatatgctaatcacccgagccgggtagccaatggccgcctccccctcgcgtcgcccctccgcctgcctctgacaatccctttaatgtggaaaggcttagaggggaaaaca

SEQ ID NO: 77590 - DNA, 122 bp, Homo sapiens
cactgtcatgccgcgttgctctcactcacagatcgaaataaggcccttcctcccgggaatcgtccgcgggctgagttccgcagcgcctgaaaacagtgatttctgaactatcatattgtttc

SEQ ID NO: 77591 - DNA, 122 bp, Homo sapiens
catcctcactagttccccttcctccactttatctcctacctttgcgtctacatttcctcacgtggatgattcccagaccaacgcttccagtactgatgtctcccctgagcttttgacataga

SEQ ID NO: 77592 - DNA, 122 bp, Homo sapiens
taggtgagtctctctatatcctcttttcccttctgataggtagatgccttagaagacagccggccaaaagacggatggaattcagtttcctagattatcatgggaagataaactgatatatt

SEQ ID NO: 77593 - DNA, 122 bp, Homo sapiens
tgtccagggagggagagagtatgatattacgtttaatatcgcagtaggtgtacacccagccggtgatatagatccgaatataatctccagggggtggagtatgacgttactcccaatatagc

SEQ ID NO: 77594 - DNA, 122 bp, Homo sapiens
tgtgctatcgaaagtatgcatgtattttacctacaaggttcgctacactaacagctccatcgagattcctgaattcccaattgcacctgaaattgtactagaactgctgatggctgcgaact

SEQ ID NO: 77595 - DNA, 122 bp, Homo sapiens
agggaaaagagtcaggcagagctgatggatccagtttgaaaaaacaaaatgccattcaaccgtatttcctgttcctggtctcatgtgtggcattagagtagctgtgactgatgctttgtgga

SEQ ID NO: 77596 - DNA, 122 bp, Homo sapiens
cctccgaaccaagactaggtttgggtatatggagttctcaggtgtcagtttctggggaagcgaactgtgggaaaaacatggcgttctcttggcttttgtagaatgtaggtcttcactgctgt

SEQ ID NO: 77597 - DNA, 122 bp, Homo sapiens
ctctaaagattctggtatatccagcccaaccagcccattttaattgaaaatttactgctacgtaataaaagacgttaataacatgtacaatatagatacaggaaaaaaaagtttgagtttaa

SEQ ID NO: 77598 - DNA, 122 bp, Homo sapiens
cccattgcagagtgaagaaaactatctcatgagaaagattaagtaacttgtccaaggccacgcagccaataaaaggatgaggagatttgaacccaggactgactttaaagcctgcactctgc

SEQ ID NO: 77599 - DNA, 122 bp, Homo sapiens
tgctatcactgcatcagctcaattccactcaatcaagtgctcatcactggatctggctgacgtgtgttgaaaattctctaattgtcaggcattgaaccaagctctgacatgctttacttaat

SEQ ID NO: 77600 - DNA, 122 bp, Homo sapiens
gtgtttattatgtattacaaagagctttgcactacctaaaatcaaagtaattaggtagtgcgagtcaaaaatagttttgaaatgttataaataaagtgacaaaacacttctttagatttctg

SEQ ID NO: 77601 - DNA, 122 bp, Homo sapiens
aaagacggggctggactgtcgctcctggctcctgcacacttccatacggaagtgacacgccggctcctctgccattgcattcaccagaactagtcacgtggccacgcccgccttcacagggc

SEQ ID NO: 77602 - DNA, 122 bp, Homo sapiens
gtgaggagcgtctctgcccggccgcccatcgtctgagatgtggggagtgcctctgccccgcggccccatctgggatgtgaggagcacctctgcccggccgcgaccccgtctgggaggtgagg

SEQ ID NO: 77603 - DNA, 122 bp, Homo sapiens
cattacgaaacaaaagtcatgagtcaaagaggaaattcagtctgaagttttagaatatgtcgtagtgaaatactatgtgtcagaagctgcacagtctagatgaaacagtgatctaaggaaaa

SEQ ID NO: 77604 - DNA, 122 bp, Homo sapiens
actactataccacactaagcccatcagagccatagtttcctcttccataaaaaggtataacgacatccaacacactagggagaagtgagaaaacagatctgttctgcaattttagccaatct

SEQ ID NO: 77605 - DNA, 122 bp, Homo sapiens
gtttctttctgggctgataaaaatgctctggaattagatagtgggatggttgcacaacttcgtggttctactaaaatgcacaggctcgtaaatgttaaagtggtgaatgttatggtgtacta

SEQ ID NO: 77606 - DNA, 122 bp, Homo sapiens
cccacgcaccccgcgggactcatatttttcccagacgcggaggttggggtcatggcgccccgaagcctcctcctgctgctctcaggggccctggccctgaccgatacttgggcgggtgagtg

SEQ ID NO: 77607 - DNA, 122 bp, Homo sapiens
gcctctttcctgccagcaggaaggttttgctgccttggctttcgggagccccctagacagcgaactgccccttcgcgtgcagaagtcggggaagagtgctctcagctcgccttccttgcagg

SEQ ID NO: 77608 - DNA, 122 bp, Homo sapiens
ggcacagtacacgagtaggggcagtaaggcctggctagggccggtgccgcacgggagctgcgggtccctgcaacacccaggtgtgcaggcgctacaagaaggagccggggccgctgcccccg

SEQ ID NO: 77609 - DNA, 122 bp, Homo sapiens
ccggaaccggatctccacggccaggagggtccaggtgggtggcccagccctgacgccagtcgtagaaccccagctgcccagagtgatctcggcagtctgggtgggtgggaggggcgtcgtcg

SEQ ID NO: 77610 - DNA, 122 bp, Homo sapiens
agttccagggaaggagggcgtagacaaagcgccacctgaacttgcggcgcgaaaaaggcgcgcatgcgtcctacgggagcgtgctggctcaccgaccgcattgcggcttggttttctcaccc

SEQ ID NO: 77611 - DNA, 122 bp, Homo sapiens
gccaccatggcccggcagacggggcgggcggggcctaggggcggggcttgggggccggggcggggccttacggggagggcggggcttgggggcagaggcgggggccttacggggagggcggg

SEQ ID NO: 77612 - DNA, 122 bp, Homo sapiens
tcttggtgcatgttctctgtctgtcccccaaccccgcatttctgtgtgtgtgagccactgcgtttgtacctgtgtgtgtgcagctgcctcaccccttgcatgcctgtatctctgctccagtg

SEQ ID NO: 77613 - DNA, 122 bp, Homo sapiens
gcaatgagggaaggggacttagaggacgggtgaataggtgcagcaaaccaccacggtgcacgtatacctatgtaacaaacctgtacgttctgcacatatatcctgttttttttgtaagaaat

SEQ ID NO: 77614 - DNA, 122 bp, Homo sapiens
gtaacacctgtgacctgagggttattctattcgcgttagcaactcgcgcgggttgggaggcgccaatgagagcagggcttgaaactagcgcttggcgtctgatggttgcctagcgacggtcg

SEQ ID NO: 77615 - DNA, 122 bp, Homo sapiens
ggctttggtctgtgcaggagcttcccggagatgctttagagctgcgtttgcaaagtgcagcgccaaatgctgcagagaggtgggagtcagaggagaggaggactgcggtcccaaaccctagc

SEQ ID NO: 77616 - DNA, 122 bp, Homo sapiens
cctcctcagtggtcttggctttcagctttcccctctcccagttctgcaattttagcatagcgtacatcttcaaaagaagccactttccatcttcctatttatatttctttcttttcttagtc

SEQ ID NO: 77617 - DNA, 122 bp, Homo sapiens
ggtgggggcgactcagagtggggggcgcccccagaacaggggcggcgcaggccggtcactcgccctctcctcctcgggagccccccgcatgatccagacggagccgggcaggggcaggccgt

SEQ ID NO: 77618 - DNA, 122 bp, Homo sapiens
gagcggagtgcggtgcagggacctgaatggaccgcggtgggaggaggccgggggtggtcccgggacaccgccccgcccccgctgccctgcgcccccgccccctgagcccgccaaccctcgtc

SEQ ID NO: 77619 - DNA, 122 bp, Homo sapiens
catgtcatcccttctagtctttcaacaccctacaggccccaaaccagaaaaactgtcatacgcctcccttaaactagcttcaacttctcctaatttaatccagacaactctgaataggctca

SEQ ID NO: 77620 - DNA, 122 bp, Homo sapiens
aagggaaaacggaggcgccatttgaacatgtctagtccttagttcctgccagcattcattcgtgtaagctcccagcttgcaggctgctctttgttagaaaattatttggggctgcttttcat

SEQ ID NO: 77621 - DNA, 122 bp, Homo sapiens
gctgcaatccaagtatatacatggttgtgaagttaagcactgtgggaggggctgttgctgcggcagctgcggtggcacctctaatctgccgctaggtggcaggagaattccaccatcgccac

SEQ ID NO: 77622 - DNA, 122 bp, Homo sapiens
cacagaactcagaggtacagagagttctctttgtggtctttttgctgatctatgtggtcacggtttgtggcaacatgctcattgtggtcactatcacctccagccccacgctggcttcccct

SEQ ID NO: 77623 - DNA, 122 bp, Homo sapiens
agaaatcgcttggttctgttctcgcgatactgagtgagttctcactcactagctcccgcccgagctggttgtttaaaacagccgggcaatccccaccgcccctcactcattgttgcctctct

SEQ ID NO: 77624 - DNA, 122 bp, Homo sapiens
catcctggactaagttcatcaggatttcttcccctactaccttcccaagatgggctttgacggttgaaagcttgaaaacattagtttacagtttgaaaatgtttctctgttcagaaatctga

SEQ ID NO: 77625 - DNA, 122 bp, Homo sapiens
acgctggttccttctggaaaggtgggacaactcacgaagcaaaggcgggacaactcgaaacgagagggggcttccaggtcataagtagataagagacaaatagtagcattcttttgagtttc

SEQ ID NO: 77626 - DNA, 122 bp, Homo sapiens
gctgctgctgctgctgctgctgctgctgcaggaggctggaggcggctggtgcattaaaggcgaggctcctcccaaccgcgtcagcagccccacgactctttcccagcagcagtggtggccga

SEQ ID NO: 77627 - DNA, 122 bp, Homo sapiens
gccccctttgtatgcgagccgcgtggggagggaccgagttaatgggagcctcccggtccccgctgacacgttcctggcagcctgctccaggctgctgatgcagccttcccgtccccagcatt

SEQ ID NO: 77628 - DNA, 122 bp, Homo sapiens
ggaattctcaacctcatttctcggaattcagaagtcacggttaactcaaagaatgctaagcgggccagggatcacgatctcacagatgggtcccgtgtcccagggcagtgaaggtgccgggg

SEQ ID NO: 77629 - DNA, 122 bp, Homo sapiens
agcgatgaggctgactccacaaaggaagaagcctctggctcagaaaatggaagggtttatcgtccgtaaaagggcaaatcggaaggtcatgaggtgattctgagggattctgataagagagg

SEQ ID NO: 77630 - DNA, 122 bp, Homo sapiens
gcgggtactgaggaaaagcggcagaagcgcctgcttccattggtcagtcctggcaggaggcggagcacccgcggcagctgattggtgcgggaggcaaggtgggcggggctctgagccggagg

SEQ ID NO: 77631 - DNA, 122 bp, Homo sapiens
cggtctttccgcaggaggtgctcgccttatcattggcctcccctgctcgggtcgggctgccgcgactcgcctcggggcacgccggtgcgggccaggctgggccggggcggcgggcgctgcgg

SEQ ID NO: 77632 - DNA, 122 bp, Homo sapiens
ggggccaaggccagagctggacaccacgactgccacgtaagaggaatcccaagcatactgcgatcaagggaagggaagaaaatccactcccagaagcagctttttactgtgactctcatcgt

SEQ ID NO: 77633 - DNA, 122 bp, Homo sapiens
ccctccccaaagcggagcccaagccgcgaccaacttgaaatgtactgggcttcctcaagtcggtggcgttctaagcccgcctcccggagctccctattggtgagttttctcggccaatgcag

SEQ ID NO: 77634 - DNA, 122 bp, Homo sapiens
gcatccacctggaacagcattgtgtcttcgggtcagtagctcccctgccaaaggccaggccgccacagagccccctcccctccgacaaggcccagccagattccgctgcccacaggtgggga

SEQ ID NO: 77635 - DNA, 122 bp, Homo sapiens
ccgagctcaccgggccagcgccggggcctgcaggtggccctggaggaatcttcaagcacccgcccgtgcagcgggccttccgggagaccagtgtggacagcgccctggacacgcccttccca

SEQ ID NO: 77636 - DNA, 122 bp, Homo sapiens
tgctcctacgtctctggctcccccaccctccctcccaggtcttcaacactttcctcttctcgtgactcatcttgcatctacttcttgtgtgtcttgcattggatatgccaaagttctttcct

SEQ ID NO: 77637 - DNA, 122 bp, Homo sapiens
ccagcctcctgctgccctggggctgtgctgggccgtcgggagtgttgcctattaaccaggcggtgtcacctccaggatgcaggggataatggcaaaactgacaatccactggggttcctatg

SEQ ID NO: 77638 - DNA, 122 bp, Homo sapiens
atgcttacagaatgtccacgcactgtgttagatgcctgcagatacagcagggaaaacgctcgagatgccctcaagtagctttacagactaggagagtgacagacaatgtgatgtgtggttat

SEQ ID NO: 77639 - DNA, 122 bp, Homo sapiens
agagctgagtagtctcaggtgtccagtgaccattacgtggcacagtgttggcctgggcctcgccgtccctggcacgacccatgggatgaggccgcgcctccccccccagcggggccgccggg

SEQ ID NO: 77640 - DNA, 122 bp, Homo sapiens
acattctactttaagactgaaaatcatgcaaaaaattgtttgcaaattcaagccagatatcgtgtcctgcttactagagaatcgctcatattaagtcaagcacccctcttagggctgcaggc

SEQ ID NO: 77641 - DNA, 122 bp, Homo sapiens
accatgcctggccttctgtattttttaagattcctatctggagagcccccagctctgcggcggcttcacccgcgagtcccaaggcaagcgagcggctgggtcgcccccaccggccccatggc

SEQ ID NO: 77642 - DNA, 122 bp, Homo sapiens
actgcatggatgcccagaaatgctcctaagtggcctcagagccacaggtctctgctgcaccgcttaggagatggcatcaccctgagcaagggaccctggcggggaccactgggcggcgtgac

SEQ ID NO: 77643 - DNA, 122 bp, Homo sapiens
tatgtctcctgtttgctggtgtcatgtgtcagttgtgaggaaacagtaatataaattcagcgtttcagcaatgtcagtaacggggctggatttcaggactgtgtgagtagcagttgttccaa

SEQ ID NO: 77644 - DNA, 122 bp, Homo sapiens
caaaatcggtgctccttcagtttcttctttagttctgcatgttactggggactaagacaacgggtaagcaaactatttataggcctcaatttacgaaataacggaattgcaaagtccggagt

SEQ ID NO: 77645 - DNA, 122 bp, Homo sapiens
agggaggctggtactattctgattgctgacctagatgttagtcacatgggtctagtcagtcgttgaaatgcactggcctggaaatttatgacacgtgtgtgcatttttctgtgtgtttgttc

SEQ ID NO: 77646 - DNA, 122 bp, Homo sapiens
tgacgaggagcggagggcggggcgtgagtagcgccgaggcgcggaggcggggcgcaggggcgtgccgaggcgcggcagcggggtctggggctggggctgggccgtggggagctcccgcaccc

SEQ ID NO: 77647 - DNA, 122 bp, Homo sapiens
gcgcccagacggtacctgacagcgcctgaggacaaccgggtacacgcggcgtctatgaagcgcaacagtgacgccggagagtcactgcaacttaaaggctgattctgccccgcccccaagac

SEQ ID NO: 77648 - DNA, 122 bp, Homo sapiens
caatttagttcaggatgcgaccgataatggaacgggtcattaattatggaaagttactgccgcagtcagcaggagcaaatgcccaacagaaatggtgttttaacagcccgattcgacaaatt

SEQ ID NO: 77649 - DNA, 122 bp, Homo sapiens
cccgaggctgcccgggtgactctgccgccgccgccgcgtcagcggcctcggccccgcccccggctcctcattggagggcgcgctcccctcgtgaccaccggcacctcacgtttctgaagtgt

SEQ ID NO: 77650 - DNA, 122 bp, Homo sapiens
ttccctttcctcctcggtcccgccctctcgctaccctttataccttcctctcacgctccgcgttgcacagccttgggggcctttaaaaggaaccggaagtgtcgtgagctaagacagtcgcg

SEQ ID NO: 77651 - DNA, 122 bp, Homo sapiens
gggagggagggagggagagcgcggggccaccccgtggggagggaggagagggcggcgcagcgctgtgctgcggggaacgatgcatgccgcttcctccaggacctgtgagtgcagggttggac

SEQ ID NO: 77652 - DNA, 122 bp, Homo sapiens
gagagacggaagcacgaaccccgcagtcccgagagctgagatcacccagccaccctctctcgtgtcctgctgaggagcccaccctttgagacacaggcagcaaatgtgtgccctgtgattac

SEQ ID NO: 77653 - DNA, 122 bp, Homo sapiens
gatttcaaagccctgaatagttctaccacatcaagggcaggaatgatgcgaagccacttacgtattatggtacttgtcagtgtttgtgtacctaaagacaatgctcattttatgtctactgt

SEQ ID NO: 77654 - DNA, 122 bp, Homo sapiens
ggtcttcgtctctataaataaaccagggagtaaagaaaaaccccgctagtttcagtaaagcgttgctattaagcaaagcaaacctatgcaaatatcaagttcttaatgaggagtgtttccta

SEQ ID NO: 77655 - DNA, 122 bp, Homo sapiens
caaacttttatctcaagaactcattatacccataaaaactattgaagatcctgggctgggcgtggtggctcactcctgtaatcccagcactttgggaggctgaggcaggcggatcacttgag

SEQ ID NO: 77656 - DNA, 122 bp, Homo sapiens
acccatgtctatataccatgatcatgatgagctaacttactgtgctggttcatcagcatccgagtagaaatacggttcatgtaaaatcgatccaagaaatattgaagattttgattggtgac

SEQ ID NO: 77657 - DNA, 122 bp, Homo sapiens
ctgcaggcccatgccaagccacctgagggcatgcacacccagcccagttgtgacagcacccgggctcgcccgcaactttgctcaaaaactggagtaggcactgggattgagaagaggccagg

SEQ ID NO: 77658 - DNA, 122 bp, Homo sapiens
gccgcccagggcctgtgtctgcgccggttcctggcaagggcaccttggccgggcggcccgcgtcccctgcgcttcccacacccacgtgggcggacccggcccgcaagctgggccagcctgcg

SEQ ID NO: 77659 - DNA, 122 bp, Homo sapiens
ctccgcaacagcttccggcgtgacgcagtagaaaaggtggcgtggctggcgattcgtgttcgtgagggccttttctggtgaggcggggcttaagggttgtggctctgctctctgtcctgaga

SEQ ID NO: 77660 - DNA, 122 bp, Homo sapiens
ctccacgggacggggacgcttgggctcttctagggagatgggaagctcttgggaggcacccgtcatcccaagcacatctgtgttcaccaggcagtccccactgccaggacccgactccaggg

SEQ ID NO: 77661 - DNA, 122 bp, Homo sapiens
taattgtagtctccttgcaaatcttttccgttctgaattcagatgatgccgcagctccagcgttggagactcagcctcaaggagatgaagaaggtgagccggggtggggattgcacagtctg

SEQ ID NO: 77662 - DNA, 122 bp, Homo sapiens
tttgcactcccacgaatcctgttaccgtgactatctcgccatgccctccctagcactgagcgtgatctctagtatcattttccatcgttgctaatttgaacatgagcagatggagtcctatt

SEQ ID NO: 77663 - DNA, 122 bp, Homo sapiens
cgtgaggatgccctgctcccctgaggtgccttgtcttccctagtgccaggtgtccttcaccgcggcacccccacccggtgccttgtttacccctccacctaccgtgtctctcctcccattcc

SEQ ID NO: 77664 - DNA, 122 bp, Homo sapiens
gcctggctcttaccctttcaatctacaatctgggatggatcactttatcttttctggcctcggttacttaatctaagaaaaagggatagaatgttcttcacctattgtatatagctcttggg

SEQ ID NO: 77665 - DNA, 122 bp, Homo sapiens
cttccttagaggtcatgccttcaggcccatatgattcatctgataaatgtctgaagaaaacgtatgaggcagggagtgataaaaggcatctgaaatacttatattactcaccaatatcatgc

SEQ ID NO: 77666 - DNA, 122 bp, Homo sapiens
gcccggatcccgagtctccctttctgccgctgcaaaagcgttctttctgaccgagacctgcggccggaacaagtcccgctgggcctccatccagaaaacaggttcgctttttgagaaagaaa

SEQ ID NO: 77667 - DNA, 122 bp, Homo sapiens
actttcccaatctcctctgagcttgcatctgaactatgccctacattctagcagataacacgcttgccccagatgttgaattgagtgcagaatacaccaaagaagagaggaacacgaagaat

SEQ ID NO: 77668 - DNA, 122 bp, Homo sapiens
gggctgatgttgagtggcttttccaggttcatggtgcaaactaccattctggggtctgaacgacagtggccctcttctcagctccactagacagtgccccagtggggagtctgtatgggggc

SEQ ID NO: 77669 - DNA, 122 bp, Homo sapiens
ggccgctgttgtgccttttattgccccgtaacaatttttgccttgtgaagtgactgcgggcgtcactccgccttagggtgggggtccgggaccccgccccggggccaccctagcctccctgc

SEQ ID NO: 77670 - DNA, 122 bp, Homo sapiens
cttaggcgtgtccgtcccagagcaccctggctttatctggtttattgctcatggttcaatcgggaaattaggcagcgtgtccccatgacagcagacgcgggtgacggctcttgcctccctcc

SEQ ID NO: 77671 - DNA, 122 bp, Homo sapiens
ggcaaaataggaacagttcatttctagcagaacttggtctgcaccatagaaggacaaccacgccgatgggcacagagccttgaaaggcagggtgctggctgctgagtttcccacttatgttt

SEQ ID NO: 77672 - DNA, 122 bp, Homo sapiens
accgcgcagattctgttcacgggactcagagttgaagctcctctcccttccgaacagctccgcgcaccgccccgcgacgcagcccggcgcaactactttcttctctctcctttctttcttcc

SEQ ID NO: 77673 - DNA, 122 bp, Homo sapiens
tttaatttaaagccacctgaaggcttcagctgaataataaagtaattcccatatggtttccgttctttcagtgttagaacctctgaaatgcagtctacttttagccttggcttctgcatgcc

SEQ ID NO: 77674 - DNA, 122 bp, Homo sapiens
aatccacaaaatgaggccaagaacgacctttccctggccaccaggcaaactgcatgaaagcgagcgggcgttgccgctggcgcccacgctgggtttttcccaggcggggttcgccctgggaa

SEQ ID NO: 77675 - DNA, 122 bp, Homo sapiens
aactactacaaccactgctgccgccaccaccaccacggagagtcctcccaccaccacctccgggactaagatacacgaatccggtactgcgcatcgcccatgctccccatcccctcctggcc

SEQ ID NO: 77676 - DNA, 122 bp, Homo sapiens
ctgaaaaacaccagccagccatccttgtcattgcttccaactggtggacactgatgcatccggagtcacttatgacacagatcaggtttaacaggggtgcacccgaacgcaagaaggcagct

SEQ ID NO: 77677 - DNA, 122 bp, Homo sapiens
gtgactgaacgtgtgaataagcacatgtgtttgagggggcaaaagtcttaccattctagccggtcccccaccaaaggcactactcaggtgtttgtaacaatagccttccccatgtgaatttg

SEQ ID NO: 77678 - DNA, 122 bp, Homo sapiens
cctgtggcccgaggcctcccaccccagggtgggggatatggtgtggatggtaggccaccgcgtggccaggtctggtgagagcaggtgctactgagttctggccacagaaaaccagctgcctg

SEQ ID NO: 77679 - DNA, 122 bp, Homo sapiens
gtcaaggctggcatttgcaccttttcatggtctttccctgcacagtcacttcagcggcggcgtcgctggggctgaggccgggtgactgcggctaggcatgcggatttagttccccgcctgtc

SEQ ID NO: 77680 - DNA, 122 bp, Homo sapiens
tatctgtcctgcagatgagtcagaactaagaccccttgaggaatcatgttgctttggtgccggctgtctggtttctattccatatcctgtgccgcacccttcccccagccacagtgacatct

SEQ ID NO: 77681 - DNA, 122 bp, Homo sapiens
agaagttgccagaaacccaggtcctggacactttctggtgctgtgggccagccccacaaacgtcctggagccactcttcccttccctggctcctgaaaacatccacctcctctatgatgcgc

SEQ ID NO: 77682 - DNA, 122 bp, Homo sapiens
tccctgcagggtggacccggtgcctcacgatgcccccaaacctccaggctacacccgcttcgtctgcgtctctgatacccactcgaggacggaccccatccagatgccgtacggcgacgtgc

SEQ ID NO: 77683 - DNA, 122 bp, Homo sapiens
ttcccaaccaagcaacgtagcaaggtacgaaactctaaagtccctaaagggcagggaccacgcctctcgcgttggcatagtgcctagctcaaggcactttctgggttaacactcgctgagga

SEQ ID NO: 77684 - DNA, 122 bp, Homo sapiens
aagagacctgggctgaatcagggagaaaaatctttgtccaggttctataaaacaaaccaacggtgtcactttggacggatcctctaatctctcagcctgcaatctgaactgtttctacaatt

SEQ ID NO: 77685 - DNA, 122 bp, Homo sapiens
acaccccggggtgagtttctctggggctttattttcgttttgttggttgttttttctccacgctggggctgcggaggggtggggggtttacagtcccgcaccctcgcactgcactgtctctc

SEQ ID NO: 77686 - DNA, 122 bp, Homo sapiens
ataaaataaaaatgctccagccaccccaattccagccttttgcttcagagaggacgaagccggctgagggaggtcacatggccaattagtgacagctcaaaccagactgcctccggactccc

SEQ ID NO: 77687 - DNA, 122 bp, Homo sapiens
cacagcaaaaagaaacctgtcgctgcaggatcccttctctaccccgcggggagagcggcacggagacagttcattactttagaagtggcaactgtttgcagccaggcggtgacctagcggct

SEQ ID NO: 77688 - DNA, 122 bp, Homo sapiens
agttgcccattagtgtcttctcagctgcttgctgtgcatccttcaagtctgctcaagggtcgcctcctcttagaggacttggaggtcttcttggcccaatcctatatatcagtaggctgggc

SEQ ID NO: 77689 - DNA, 122 bp, Homo sapiens
atccgcgggcatttgcgggcagtgataaatttggtttagccgtttcccctccctggaggacgggggctccagcatattcatgatgtcaatcgccttggactacatgccagcgtcattgcgaa

SEQ ID NO: 77690 - DNA, 122 bp, Homo sapiens
cccaccgagctgctgcgggcagcctccccagcactggacccagcaagcaagttatctcgccgactcccagcgctgtctccagactcaactgtctgtgagtgcggcgtcggtgctgcctggac

SEQ ID NO: 77691 - DNA, 122 bp, Homo sapiens
gagcaacatctcaaatgatagtctgagagaggagataatgggctaatgtggatttccttccgaatgtattcactgcacaaggtcagaattcacattgcacttgaagatttctcccagtctac

SEQ ID NO: 77692 - DNA, 122 bp, Homo sapiens
tagattcgtggaagtaatacaatgtaaacatgaaaaatggaaatagggtgtgctggatgccgttaaagagttatagatctgtgctatggaagttcagtagggtaactgagttttccctatct

SEQ ID NO: 77693 - DNA, 122 bp, Homo sapiens
tccggtctcccggcgaaagtgagcgaggtttgcccggagcgcgcacgaggtagggtgtcccgcgggcgggtgacggttgcgggtccccgttgcgggtccccgagccgcctggcacctccgcc

SEQ ID NO: 77694 - DNA, 122 bp, Homo sapiens
tcagcaaccggatagtttgttggaggcgggaaggtacgccgtgggttccgccgcagccagcgctggggctaggcacacgcccgttgccatggagacggggcggggcaggcctccgccctccg

SEQ ID NO: 77695 - DNA, 122 bp, Homo sapiens
aagagtgggggcgggtcacaagggcccgcggtggctgggaaacctcagggcctgtggtgtcgccgcgcaggtccagggtggcgcgtggctgctgagcccccgcctgtgcgacgccctcatgg

SEQ ID NO: 77696 - DNA, 122 bp, Homo sapiens
tgtttttgtttctgaaatgtcagaagaaaacacacctttgagatgagcctgtactgttagcgttcaaactcccccttgtgctttgcttgggtcccgcgtgtgctgagcaggagagaaaggcg

SEQ ID NO: 77697 - DNA, 122 bp, Homo sapiens
cttggcgtacatcgttgtcatcacgcccaccaccacgataagccaactggaggggcttgccgggtacacgccagtgatgatgccgttctaaagacagacacccgggccgtgagcggtgtcct

SEQ ID NO: 77698 - DNA, 122 bp, Homo sapiens
ggcacgtgggcctcaggcacacaggtatcacgtgggtatcaggcacgcagttatcaggcacgcgggtgtcgggcaggcgggtgtcggcacgcgggtgtcgggcaggcgggtgtcgggcacgt

SEQ ID NO: 77699 - DNA, 122 bp, Homo sapiens
aaatattagaaaaacattagaagaatgttcttaaaagcaggacagataacctcctggatgcgttcttgctaaagcaaggtctatgctgtgtgattaaagtcacagcctgaggcataatggta

SEQ ID NO: 77700 - DNA, 122 bp, Homo sapiens
gaccaacatggagaaaccctgtctctactaaaaatacaaaattagtcgggcgtggtcgcgcgtgactataattacaggactgcccagtggtcgggaccctgctaggttccagccagtgggag

SEQ ID NO: 77701 - DNA, 122 bp, Homo sapiens
catcccggggagccgctttcccaccggctccctgggctccagccgccccacgcgagcccccggctggttctggggccaggaccgcccctctccaaggcagacttcccttcattccacgacaa

SEQ ID NO: 77702 - DNA, 122 bp, Homo sapiens
tctccggccatgtgatggatagaggggcgggcgctgggagcccagcccctcctttccacccgccggaaccgtgctgcgtgggagggggcgtccctacctggaaagctggggacgctgggaga

SEQ ID NO: 77703 - DNA, 122 bp, Homo sapiens
ttctcatttcaacaagtgacagagaaggcataaaaggctagtaatatactacagagatggcgcgataaatattggggtgcttgcctagcaggcaaaatcttcgttggcccatgacaaccaaa

SEQ ID NO: 77704 - DNA, 122 bp, Homo sapiens
gaatggcagtgcttaaaatgtctgtcctgaacattcactctcagccttgcgctccagcaccgtgtgctcctgccccccgccaatctcatgtggcctggaggaaagcagattttggacctgtc

SEQ ID NO: 77705 - DNA, 122 bp, Homo sapiens
gcacctgaaacatatttgttgttaatgaaataaaccagatgataaacagtatgataaatacggaagacataaacagcaatgatggggaagccattttacatagcattgaagtcaagaaaggc

SEQ ID NO: 77706 - DNA, 122 bp, Homo sapiens
cctgcccccaggacgacgcccggaagctgatgcacatggcagacactatcgaggagggcacgatgcccaaggagatgtcggacatcatccagcggctgtggaaggactccggtatccaggcc

SEQ ID NO: 77707 - DNA, 122 bp, Homo sapiens
cctgcaaacccaaagatggcgtaaggtcaacgctgaggggcttgggtgggacaggagtggcgtggacttactgaggactaagcactgctcacgtggagcttatctcagagtttcacaaacga

SEQ ID NO: 77708 - DNA, 122 bp, Homo sapiens
cctcacccaaggtgcatataaaccctgaataacctgaagtctaagggcatgaatatcagacgctagggggacagccactgtgttgtctgctaccctcatcctggtcactgcttctgctataa

SEQ ID NO: 77709 - DNA, 122 bp, Homo sapiens
cgcccccgcctgagtggcaaggggacgaactgcgccctgaacaggcctggaagcccaacccggtgcggaccgccctcagtctcctagtccgggcgcgctgagcgcaggggggcgctgtcctc

SEQ ID NO: 77710 - DNA, 122 bp, Homo sapiens
tccttattgatttgttttacactgtgagtcaaaaggctacctcatttcctggtgggagatcgtggttctgtaaatactcctttatccctttgtaaatgctgttaaaggcttcttgaggagaa

SEQ ID NO: 77711 - DNA, 122 bp, Homo sapiens
tgcctccgctcctctaggtgaggagcctattccaggggctccagtctgaaagcctagaggcgaggggcgcgcactacaattcccagaggtccccggactcaagggcggtccccgccccccgc

SEQ ID NO: 77712 - DNA, 122 bp, Homo sapiens
gtcttgtgggtggaaacgcgctggctgactggggtcggcgtttagttcagcgcagcgactcggggacctggagctgacgcctagtacgtatgaggaagaacggggtgggtggctgcctgagt

SEQ ID NO: 77713 - DNA, 122 bp, Homo sapiens
aattcaggaaagtccaaagcaggggaggaggctcactgctaagtcccagagcctgaaggacgaagaaccaggaactccaatgatgtccaaaggcaggtaaaatagatgtcccagctcatgaa

SEQ ID NO: 77714 - DNA, 122 bp, Homo sapiens
tgggtctggctctgaccctcggctgtctctgcagcgtggtcttcgggcctgagctggtgtcgctgggtcctgaggagcagttcacagtgttgtccctctcagctgggcggcccaagcgtccc

SEQ ID NO: 77715 - DNA, 122 bp, Homo sapiens
tgctgcctcccacttctagagctctcggtgtcagaggcaaggagcaagaagagctcagggcgattagagaagcggctggccataggatgtatgcggtacacagaggcagacagaggctggag

SEQ ID NO: 77716 - DNA, 122 bp, Homo sapiens
gctgtatccgccatggccactgacgcccgcaatctccggcccttttaaaatgtccctcctcggcccccgccacagctgcctctcccgattggccctaatcaaccgcagcgagcgggaggcgc

SEQ ID NO: 77717 - DNA, 122 bp, Homo sapiens
tctgaacgctgccagggcagagcagggtccagcggggtccggctgggcggggacgtggctcggaggacttgggaatggcactgatcactgcccgctgcctgtcttagaaagcccagggagcc

SEQ ID NO: 77718 - DNA, 122 bp, Homo sapiens
agactcacacagccccccaacccccgaggccgctgcttatctgctgtacggggcggggaccggccccctcatcctagagctgtcattggactgcggaaacccagaccttccaccccagccaa

SEQ ID NO: 77719 - DNA, 122 bp, Homo sapiens
aggtaaggctttgtactctgagttctccttggcaaattattttttgcagcagttctttttcgccgtcatggtatagttcttggtatcatcttattaggtggcctgttgtcgtccctttttgt

SEQ ID NO: 77720 - DNA, 122 bp, Homo sapiens
aaggattcaagctggtggatctgaaaagccagcagggggatctcctgagaagcgttttcacggctctccaggatacttcctctcctaggataagcagacacttttctgctgggccttaggcc

SEQ ID NO: 77721 - DNA, 122 bp, Homo sapiens
gcgaggcgggaggacgggatctggggttgccacagctgcagccagcgcaccacttgcaggcggcactgcagctcgggctccggcgggggctggcggggctcccgtgggatggcctcctgagc

SEQ ID NO: 77722 - DNA, 122 bp, Homo sapiens
tcccattgcacagatgaggaatctggggtacagccaggcagattccctgctcctgttccccgtctgtatttcctgtctgggcaatgcgaagggaacctgccccttccttcaggatcctcttt

SEQ ID NO: 77723 - DNA, 122 bp, Homo sapiens
ttcgagggggaaatacgagttcctttctgaagggacaggacggctgcttttccacagccgcgacgtgattgagaaatggtggctggcaagggtaggcctgccttcgcccctccaaagtaaaa

SEQ ID NO: 77724 - DNA, 122 bp, Homo sapiens
tctttaccacccctggaaccttgctgagttgacgccactgagctgcgtctcacacccacgcgctgtggaacacccaccaagctggaatccacgcggtttttaaaatagagtcgggggccggg

SEQ ID NO: 77725 - DNA, 122 bp, Homo sapiens
attgaagccccttagattgaagacgtctccctttgcattgttcacacttatatttgatcacgcacaggtgtgactggatctcagcccttgggaagccctggtgtggggagaagacctctggg

SEQ ID NO: 77726 - DNA, 122 bp, Homo sapiens
gatgaagcctccaagtagcaggcttcagagagaatagattgtaaatgtacttaaggtctgcgttgatgtgaatgccggcttgaggtataatgaggcatatctgacccccacttcccctcatg

SEQ ID NO: 77727 - DNA, 122 bp, Homo sapiens
tttgctgcagttttggttgggttcgtcctgacctccagtcgccctggtgagttagggtgacgaggctccttccagcactggcgctcgtctgggaggaagtcgaggcgttctacagaaagaca

SEQ ID NO: 77728 - DNA, 122 bp, Homo sapiens
cgggcatcccggtccgaagacccaggaactgctctggcctggcctggggtctacacctgacgcctggcgagggttggcttcgggtctggtcccaccgggcctgggagggacgggcggctgga

SEQ ID NO: 77729 - DNA, 122 bp, Homo sapiens
acctccatcactctccctatagttaaattttcctggcagatgtggaatctaaggccaggccgtggactattattacatcgtttgttctttcgtgcacacaaaggaaaccacgcctttaccac

SEQ ID NO: 77730 - DNA, 122 bp, Homo sapiens
aaggaaagaaaaacagaaacagttctaccaagtctctcaatgccgtggccttcacatcgacgctcaatgaacgttctcagaagggaatctcctctcctcccggcctcttcgcctgggcgggg

SEQ ID NO: 77731 - DNA, 122 bp, Homo sapiens
cctcccgccccacggggagtcatctgcttgaggaaggaaagacacattgccgggctacagcgcagggcccattgtcatgctgagccacccttgcttccctgcaggcctcctgagtcgcagcc

SEQ ID NO: 77732 - DNA, 122 bp, Homo sapiens
ggtgggtatcctcctggggatagcagcaccagccgcttgtgtgcggatcacaggaacccacggcttacggaggcgagtgggctgatcggacttgccctaagcttacccccagggctagcatt

SEQ ID NO: 77733 - DNA, 122 bp, Homo sapiens
caaaattatggtagcctggcttaaggtaggagcagttaagaatataagtagaagggtttgcgaggtatttatttagtccaatctatgaggcctaatgactgaaattatgtgcacagagaggg

SEQ ID NO: 77734 - DNA, 122 bp, Homo sapiens
cattgtgaacaaaccgccgagagaacaaggtaaggcagaaggaacagaagctgcagagagcggcaggggatagccaccagccagattctgtgactcttcattcatctccccactccagtccc

SEQ ID NO: 77735 - DNA, 122 bp, Homo sapiens
ggcccctggggatcccccactgctcccctgccatcatctctttcccacagaacttcccgacggaggagctgactaccagaagcccccagtgggtgttaaatcacaagctacgcctgggaatg

SEQ ID NO: 77736 - DNA, 122 bp, Homo sapiens
tgggctcgcacatggcttgccacaagaagggagagaacttgtcagtcagccctaggagcccggctgtcactcacagcctgacagctcgggctccgcgtcttattttggactgtgtcgctctc

SEQ ID NO: 77737 - DNA, 122 bp, Homo sapiens
ctatgaaatcataaaagaaaagattgttaaaaaccacttcataaaaacggaaaatgtctacgtggcacaaatgtgataagcaaagtaggcaaagtgctgaagaatgccaccctacaaaatct

SEQ ID NO: 77738 - DNA, 122 bp, Homo sapiens
gagctgggggcggggatttgggccgctgccgggagaagccggaattactttggagagccccgccccctggctccgcaggttggtagggggcggggtcctagggagccccacccagcgcccgt

SEQ ID NO: 77739 - DNA, 122 bp, Homo sapiens
tcaggatgatggcacttgtgatgactcagaacaaaggcaccacaccccggggcgggaggccggcgagtcacccacgaccacactcagggtcaaaacgcaattctgaaagagcaagaaagttc

SEQ ID NO: 77740 - DNA, 122 bp, Homo sapiens
gcttgctctgggaatatgctgtcttggtcacacaggcccaaggtggataagtatggtcctcgtgggtgctggggaagggaaagcaacaagggcaagggagagatggagagcgaggagagggc

SEQ ID NO: 77741 - DNA, 122 bp, Homo sapiens
tccacgactcacttcaaggctgaaccaagaaaacacagtaaaggaacttgccggcggccgcgacggtagcgtcagttagaaatcaggtctccagtgttcccagttcccaccagtccaactgc

SEQ ID NO: 77742 - DNA, 122 bp, Homo sapiens
atggggctgcggccaggcattttcctcctggagctgctgctgcttctggggcaaggtaagcgtgccttttgctcagaggacaaccagtggtttagccccgctggtgtcccatgttgcttagg

SEQ ID NO: 77743 - DNA, 122 bp, Homo sapiens
tgttttgagaataaaaccaggaagcatggaagcatctgtccagcacacaggacacccatgcgtgtttatcatccggcacacgggagacccacgcgtgtttactgtcgggcacaggggagacc

SEQ ID NO: 77744 - DNA, 122 bp, Homo sapiens
cgacccctacctgcggcagggttagtgcaaaggctacaagcctagaactgcagacagcgacggccccgcgctccttctctacctccctccctagcagccgggacaggggtcgcggccccttt

SEQ ID NO: 77745 - DNA, 122 bp, Homo sapiens
agggcttgggaggggatttaaccatttagtcaacctccactcacatcaccctcccttcttcgataatgggcaattgagaaagggcaaatgtgtgtaaaaactatgcagatgcagtttcagga

SEQ ID NO: 77746 - DNA, 122 bp, Homo sapiens
cctcctcctgaagcaggacgtggcaagaagagatgctccagcagttgaaggtgaggacgacggtcactaccagcagcaccaccagcacaagagaaggcaggcggcgagccggccggttggcc

SEQ ID NO: 77747 - DNA, 122 bp, Homo sapiens
gagctcctgggaggacaaaggccctagtgaaggaagtcgaatcttaatcttggccctcctcgctcttgggggcatccttgcagccaagggacttggaatccaaacccttcccaaggccccaa

SEQ ID NO: 77748 - DNA, 122 bp, Homo sapiens
aagctatttctaagtgacattccagtccttttctgcagtccactgcctgtctaaggcattcggttgctgaccatggtgttcacatatgctcactaacgggaaacagtttgtggctaggagag

SEQ ID NO: 77749 - DNA, 122 bp, Homo sapiens
aaggaggccgagccagtccctagctccgccttcccgggccctgcgccctagtggcctctgcgcggttcttcccgacccgcaaacacgccgccacccaaagcctctgtgtcccggcggccacc

SEQ ID NO: 77750 - DNA, 122 bp, Homo sapiens
gcctgactagtctttaatgaggcacatccactcttgggctcagtcaagcaaaagaaccttcggtggactccagtttctcctatgaatattgccaaaggtacagggggctttgggtgccaata

SEQ ID NO: 77751 - DNA, 122 bp, Homo sapiens
tacaacacaacacaacacaacacaacacaacacgtagtgataacagtgaagcacagatggcgtttgttcaggtttgttttccgttctgcaggagcagcagcactggcctgtcgacagtgcag

SEQ ID NO: 77752 - DNA, 122 bp, Homo sapiens
aggtggcggcgggcagagggtgttttttttcttttccctccagagccggggtttgtaaaccgaggccagagtgtccccgtgggccgagcgcacttttttcttgtccgggtgcgctcagtcac

SEQ ID NO: 77753 - DNA, 122 bp, Homo sapiens
ctgggggtgtccatgtcctctctggacctcagttcctgtaaaaaggcccgttggccagatcggccgccgggctgctcacaggtgcacgggctgcacgtaactccgtgggaagaagccaacgc

SEQ ID NO: 77754 - DNA, 122 bp, Homo sapiens
caggttcccgtgcatacacaacattgcgggataggtattgtggaatgaggatccgtgttacgacctacagaagatgtggctgtgaagtcaggagtcacggtctcagagttgactgcactgcc

SEQ ID NO: 77755 - DNA, 122 bp, Homo sapiens
tcacttaaagatataaaaaaacaaggcacatttgcctgatttgaagctgagagcatattccgtatgctggtttagggctgcagaaaagtttttggtgccagtgacacatacacagcactgtt

SEQ ID NO: 77756 - DNA, 122 bp, Homo sapiens
gaacatgcattatttcccccaagactttctgattcaccaacagccatttcttcccccatacgcatcgttattctgaaatgaggccacccagctagcccagaaattggcagagactgtgacag

SEQ ID NO: 77757 - DNA, 122 bp, Homo sapiens
ggtgtgggacataatctcgtagtgcgccgttttttaagcccgacggaaaagagcagtattcgtgtgggagtgacccgattttccaggtgccatccatcacccctttctttgactctgaaagg

SEQ ID NO: 77758 - DNA, 122 bp, Homo sapiens
gccccccacccgccgagcgtacccatggcggcggctcccagggctcctgcgacctgccggcgggacgtgctcctggcaggtgctactcctccgacctgacgtccaggcccggccccgttgcc

SEQ ID NO: 77759 - DNA, 122 bp, Homo sapiens
tgggggtcccggccggagggcccggcctcacccagcgcgcccaggtggccgaaggtctcccgcatcacgtcccggtacagggccctctgcgctggccgcaggcattcccactcctcgggaga

SEQ ID NO: 77760 - DNA, 122 bp, Homo sapiens
tacgaactgcatgcctgtatcaaaatctctcatatacgccataaatatatacacctactacgtacccacaaaaattaaaaaatttttaaaaatcttaacaaatgtgatgctggtggtaactg

SEQ ID NO: 77761 - DNA, 122 bp, Homo sapiens
accagtgtatcgggggtcttggaaatggctaagaaagctggcctctgcctaggaggctctcggcaggggggctgccaatccgggatggttaccggaaatgaaccgcgcgatctggccctttc

SEQ ID NO: 77762 - DNA, 122 bp, Homo sapiens
actttcctaacatatctgtgattgttttgatacttctcagtttctcgcgggcatttcctgcgttctctatagggctctcttgcactgaataaggaaaggaggaattctctctgcattgaggc

SEQ ID NO: 77763 - DNA, 122 bp, Homo sapiens
cgcgttgggcaacattgctggctggaagggaggagcgccctctagggagggacatggccccggtgcggctgcagctcacccagccccaggggcagaagagacccaaccacttctattttttg

SEQ ID NO: 77764 - DNA, 122 bp, Homo sapiens
ttatttgtaaatgagaaattaatcccctgtgaaattaatctcgcagggggagcgaagccacggttgcgggggagcgaagccacggttgccgggaagcgcgggccacccctccctccctctca

SEQ ID NO: 77765 - DNA, 122 bp, Homo sapiens
caccaagccctttcctgcctcagggacattgtacgtgcgtgcgatgcctcctccacagagcggacctccctgaccactgccctaatgggcttctccatcactgtggcctccacggcacttgt

SEQ ID NO: 77766 - DNA, 122 bp, Homo sapiens
taaggggcttccaaccacacctgggccacaggccccttcatagaccaagagtccttgtagcggtcccagcgtcttagctgtgggtgtgggggctcctgagtgaaactcgggaggtcccggaa

SEQ ID NO: 77767 - DNA, 122 bp, Homo sapiens
ccccaccctagcagggaccctcacagaccgggtcctcgtcgttgagcagtttggtgagctcgggcagggcgcgagtggccagctcggcatcgtcctggtagttgatgagatgcacaatggcc

SEQ ID NO: 77768 - DNA, 122 bp, Homo sapiens
agcgcgcggtgaagttgtccagtaaaaatttatggagcgcctacggggagcagggattctcgttaaaatctgggaatcagcaagccctagttccttacagagcaggacagattcctcggttt

SEQ ID NO: 77769 - DNA, 122 bp, Homo sapiens
gaactgctttaggcagtgggcgtgatggttaaaaactcggcctttggcgtcgacctcagacggagatctaccaattaggaaattagctgtgatttagaaaatttaatatttcgatgccatac

SEQ ID NO: 77770 - DNA, 122 bp, Homo sapiens
tgatggccacgctactcccatgtcctcacatgcacctgggttacgtcagcggcagccatgcgtgcacatgcacactcacacacgcacactcacactcaaacacacatgcacactcacactca

SEQ ID NO: 77771 - DNA, 122 bp, Homo sapiens
ccttctagaagccagccacattcaacaatggggaccgtggacatttgaagcatgcgtgttcgtatctccagatgctgacctgagagaatgcctgatctaaaagccacggcgtctacttaaat

SEQ ID NO: 77772 - DNA, 122 bp, Homo sapiens
aaactttgggccaggatgcctggtgtaactgggaagttctgtgttgtcccgctttatgtacggctgagggcgcgagacctcacaattgggcacgcaagcggcggtgccacgccacaatgaga

SEQ ID NO: 77773 - DNA, 122 bp, Homo sapiens
ccggggtacgctctcccgcgcctgcgccaattccgccccgccccgcccccatctaccgaccggatgttagcagatttcccatagtgcctcgctagtggcgggcatgataacacacgccggag

SEQ ID NO: 77774 - DNA, 122 bp, Homo sapiens
aggtcaaacacaaacagcaatagccacagacaagctccatcacagtctccattccatgcccgcctcctcctggcgcaggcaggttgaaactgccgcttcttctgggaggcaagaaagaacca

SEQ ID NO: 77775 - DNA, 122 bp, Homo sapiens
ctcggaggtaaaatgacgtgggcaaagttccctggctcgtttggggaaaggctcagcagccgggccaagaaaggtctttgggggcgcaagtctttggagggcaggtctttggggagcgcttt

SEQ ID NO: 77776 - DNA, 122 bp, Homo sapiens
ggcctgggtcccaggaggaggaaggcaggcgtgcagtgtgccagggtgggctgggccctccgaatggcacagattccggttggtatggacacgcgggccttcccacacagcctcccagaaag

SEQ ID NO: 77777 - DNA, 122 bp, Homo sapiens
cagcagaatcccagcagactgtgcagtggggcaaggatttcatgagcatcctcctctaaacgcgtgagtggcgtgctccccccagtggcaccacacgtggtggtctttggaaggctttgggg

SEQ ID NO: 77778 - DNA, 122 bp, Homo sapiens
acccctgtcccgggagaggcagagcgggagtctgcggagtcgcgggcgggggagcggccccgcgggcagaaacggggcggggcgggcacgccccctgctggacaggggcggagttgtccccc

SEQ ID NO: 77779 - DNA, 122 bp, Homo sapiens
gcctgggtgcagtcagtattttccacagaaaagaaaagattgggacctggctgagcgcagcggcaaacagtgaatgtgggtctccaacctcctgggccagggcgtcctgttgcctcttggag

SEQ ID NO: 77780 - DNA, 122 bp, Homo sapiens
cactcatgcgtgtgtccctgtcggggctgacggggcctgagtcccctgggcactgctgggcggggcccatgtcgtacgggttggggtgacgccgccaccggctgcatctcgctgcctccagg

SEQ ID NO: 77781 - DNA, 122 bp, Homo sapiens
ggagggcctggcagtgcggttgctgcgcggcagcaggctggtgagtgcgttcgaggctggcgtcctgggggcccagggcgaccttggcccctggaatcgcagctggcagagccttctaacgg

SEQ ID NO: 77782 - DNA, 122 bp, Homo sapiens
ggagtcctctggaaggtcattttcccaggctctttgcagagtacctcgagctcattccagcggaagtgtcaggattgggcaccctggaagcaaaacagcagaagagtgaaatcgagtcatga

SEQ ID NO: 77783 - DNA, 122 bp, Homo sapiens
taaccatttccccttccactctactttgccagctctctcctttaggagtccccttgtgttcgatttgggggttcaaagagcctggaatctgagaataaacctcaggggcatgttgtggatgc

SEQ ID NO: 77784 - DNA, 122 bp, Homo sapiens
ggcagctgggcccccgaatctaggccacgcgtctgcagaatgacaagtgatggcgcaacccgcccagctgggtctgaagaaggaggctgcctgggggaccacccacccccgtcccggcccca

SEQ ID NO: 77785 - DNA, 122 bp, Homo sapiens
cgcccacccacgcgaggccccgcccgcccgctcgaagccccgcccacccggcggtcacaccgccttgcgcgctcggcatgacgtcactcccaccaggcacctcgccttgtcaggagctgcca

SEQ ID NO: 77786 - DNA, 122 bp, Homo sapiens
cacctgttccccgtgaggtcccacttcaaacaaaccttcaaagccccttcccctttagggcgcccccgccaacagtccaaaatccagcccccatccacctcgatgaccctgaaatttgcaat

SEQ ID NO: 77787 - DNA, 122 bp, Homo sapiens
ctggctgagaagtacgcggtggactacacctggtatgtggataccatcttgaacttgatccgaattgctggtgattacgtgagtgaagaggtgtggtaccgagtcattcagatcgtcatcaa

SEQ ID NO: 77788 - DNA, 122 bp, Homo sapiens
gtgagggacaccctctgttccctaacgtcccccgctgcttatttttaaacgctcggttggcgggaacccctgtgccagctgaaactccttcagtttggccgcctaggaaacaccgagagtca

SEQ ID NO: 77789 - DNA, 122 bp, Homo sapiens
ccagcatggcgcggaccccgggggcgctgctgctggcgcctctgctactcctgcagctggcgacccctgccctggtctaccaggactatcagtacttagggcagcagggcgaaggtgacagc

SEQ ID NO: 77790 - DNA, 122 bp, Homo sapiens
taatcctttaagatcccccgctacccattaaaatggaatcactttggaagcctctgaatgcgtgctcaccggtacatgaagcattcattccttgaacaccagatatgcgttcatgtgacagc

SEQ ID NO: 77791 - DNA, 122 bp, Homo sapiens
ttcttggtgtgtcacccccacctctctaactcaagtttgctcccggacagagcaggtggccggcagttttagaaatccaagcacactagggtctcagaggtttctgctcagcccccttgcat

SEQ ID NO: 77792 - DNA, 122 bp, Homo sapiens
gcacgaagttgtgcctgcagctgttaccatagtaaccgaggaccggatgtggcgatcttacggtgcgacagtcctcttctcaggccctctggcccgagagcctgttgactctgtgacacact

SEQ ID NO: 77793 - DNA, 122 bp, Homo sapiens
tgccctggtgcacacagatggcacatggcagagcccaagccctctccatgagatctgcagcgtttgtccacacggcagggcaaattaccttgtagagtcagcatggaggtttgctaactctg

SEQ ID NO: 77794 - DNA, 122 bp, Homo sapiens
ggttcttgtcctagagcctctttccctacttctaaatgagtggaaagccacccacaagcccgtgagtgaggatgcccttggtaaacccaggtgatcacaccctgggcaggccctgccccaca

SEQ ID NO: 77795 - DNA, 122 bp, Homo sapiens
ggcgggctggaggagcgggtgggggcggggcggggcgtggcggcgggggatgcgcccctgcgcgagccagtgtcgcctgccctccttccgcacagcccgggtttccgcttccctccgggcgc

SEQ ID NO: 77796 - DNA, 122 bp, Homo sapiens
ctgcaggggaggtggggacccgaataaaggagcagtttccccgtcggtgccattatccgacgctggctctaaggctcggccagtctgtctaaagctggtacaagtttgctttgtaaaacaaa

SEQ ID NO: 77797 - DNA, 122 bp, Homo sapiens
actatgggggctgacccctaagggagccgagcctagtggattcgtgggagttccagcccgcggggtgcacaggttgttgccatgagcaaggatccccatgtgagaagagcgtttccctctcg

SEQ ID NO: 77798 - DNA, 122 bp, Homo sapiens
acaaaacaacgctgctgtacgccgttctatacctggagtttgtgccttatgctctgtttccgcgatttttcgtagcacgtggggactgcttcatcgcccgctgtgacagctgcacagtttcc

SEQ ID NO: 77799 - DNA, 122 bp, Homo sapiens
tccatatacacactatagcccccaaattatttaatatttatttctttaaatgtttgaaaacgctgtgcaattgtatcctgtttcatagtcacataacattttttaatctgaagcagaatgta

SEQ ID NO: 77800 - DNA, 122 bp, Homo sapiens
aggtgggaaggattctgggaccagacctaagggatcatgagcacagctgctgcaggcagacgggcccctggagaagctggggacaagctggaatagagacttcattgcgggaagggctgtca

SEQ ID NO: 77801 - DNA, 122 bp, Homo sapiens
agccctgttggtcccacgaagcctgggccactggtgcggtgacggtggtggggcgggcttcggaatccgtcaggagggaagcgcgcccgtggggccggagaggaagtaaacccgcgcgtcca

SEQ ID NO: 77802 - DNA, 122 bp, Homo sapiens
tctccgctgccggaattcgtcttgcctgacggaagctggggagcgggcaggcggcgggggcggggcctggaggagcctacaccgactctggaggaagactggagcctttgcggcggcgctgc

SEQ ID NO: 77803 - DNA, 122 bp, Homo sapiens
ggggaggggcaaccagattgggcttgaagggggcagggtctgagagcttagaaacagacccgatggacgtgagaaattgcacagacaaggaaaaagtttgttacattagtaggataaacagt

SEQ ID NO: 77804 - DNA, 122 bp, Homo sapiens
ctgggccccatccggtaacccccggcccagtcgggtttcccagttcacattataaccaaacggtcttgccagctagacagacagacacccctgacctgtttaccctgatcctctgctctcag

SEQ ID NO: 77805 - DNA, 122 bp, Homo sapiens
tacgtgcccaccgtcttcgaccactacgcaggtaagcctcggaactgctgactaaggggccgctccccgggccgggaactttggagcaactttggcggagccccctcgccgcctccccagag

SEQ ID NO: 77806 - DNA, 122 bp, Homo sapiens
cggtgggcgtgcgagggggtgtcccgtatgggggcacccgggccctgtttggagggagtccgtggggaagcggctctctcgggtggctttgggagcttgtttgaatgctaagtgtgagtgga

SEQ ID NO: 77807 - DNA, 122 bp, Homo sapiens
cctcggcgcacctgggctcacctgtcccctcccgcagtgcctgcagacagggagggagcgcggctgggccagaaggctgatcaccgcctgccccctgctggccagtgtcagtattgagcccg

SEQ ID NO: 77808 - DNA, 122 bp, Homo sapiens
aatgcacctttagcccaggcctgctcagtgagctccgccgacagccagccctgctcctcccgccatgaccctgcagacccctctgggcttccaagttcctgggggctgcagtgaacatgctc

SEQ ID NO: 77809 - DNA, 122 bp, Homo sapiens
ctcctgggcctcctgcttggcctccgcgctgctagatcccccgggagttgatgtggccggcgctggacccaagcctcgcctgggtggacaaagtggcccccggccccccatcaaagcccgcg

SEQ ID NO: 77810 - DNA, 122 bp, Homo sapiens
caaagcatcatcacagcgtaaggaaataattgaatttctacttgggaaattggattttgacgagttggatttccccagtggagtatgaatgacagtaactcaaactctaagaaaagggcatc

SEQ ID NO: 77811 - DNA, 122 bp, Homo sapiens
atctcttacagggaaggggcccccttcgttctgtcctccctaccccgttcctatacttaacgattggctctaatttaattagaaccctctggtggttctgtaatgggaggcagaggctgtca

SEQ ID NO: 77812 - DNA, 122 bp, Homo sapiens
tcactcttcagtgataaagggatccctttttatttattaaatacacagtttaaattttctcggtgttttctaaccattatgtcttgtatgctccctacagattgtccagttttaaaacctgc

SEQ ID NO: 77813 - DNA, 122 bp, Homo sapiens
ggcgacgggaacagaggatggggacggcgggggctggagtggccgcagcagcgagtccgccgtccgactgcggggagggagggtggcagcgacgccctttgtgtggggagctgctctgggac

SEQ ID NO: 77814 - DNA, 122 bp, Homo sapiens
ccccaggcgtggctctcagggtctcaggccccgaaggcggtgtatggattggggatgccccgccttagggattcgccacctccgcagtttctcttcttctcacaacctgcgacgggtccttc

SEQ ID NO: 77815 - DNA, 122 bp, Homo sapiens
gaggcggcttccggtttcccgggtgggcggagggaaggcggggcaagcacagcgagcgtgcgcaatagcgcagtagcggcgcatgcccatttggcttcccccgtgaccttctcagaaagggg

SEQ ID NO: 77816 - DNA, 122 bp, Homo sapiens
tcccgctgacgattcggggtgcatctcagcccgcggcgaggcgggccgagacccttggctcggggcattcaaggggagtccccccatgaactgcgccaagcctgggtcccgggtggcccagc

SEQ ID NO: 77817 - DNA, 122 bp, Homo sapiens
tggttctagctgtggccgtccagcccaaggggagtctagcaccactgctaaggaggattgcgaggtgtttcttgctgatggtgaagagttggttcgtggaggtcacaatcaacctttatcca

SEQ ID NO: 77818 - DNA, 122 bp, Homo sapiens
gaagagccgaagacagcacagacttgagcggcggcgccgcgggaggcactagagcgggcccgagcgaaacataaacaaacgcacgcacacccgagctcgggctctgaccgcggctcggctgc

SEQ ID NO: 77819 - DNA, 122 bp, Homo sapiens
gagctggaaagagaagaaagaggaaatgaacagaacatcaggttctgctgtatgttagagcgaactagaatcctaggaccatctttagtggagccacctacttgacagaattgtgataattc

SEQ ID NO: 77820 - DNA, 122 bp, Homo sapiens
agttccaaaccctgcatgggaccaggggcaccgagggccccagctcccagggtagggggtcgtgccactatgcactgccttttcttcttccggtgctgctttactttctcttgctcctggag

SEQ ID NO: 77821 - DNA, 122 bp, Homo sapiens
ccctgcccagtagtgtagtggaagaatgacatggaaacctctgattgcaatacaatgagacgaatgctggttgacacacctacaatatatgaccagcgcctggaaaccagccatgctagcac

SEQ ID NO: 77822 - DNA, 122 bp, Homo sapiens
caggaaggccagcttgtgattgtgaggcgaaccactgccagtgctggattattcacaccccggactcagggacagaatgtgaagaagggaacacagactaggggtgcccccgcctggccatc

SEQ ID NO: 77823 - DNA, 122 bp, Homo sapiens
catgggtctcttctcaattaatggagactaaagtgatggcaaatgctgaacgtgaactgtcgctgggtcctggtgagggttgggaggaaacagctattcctggataactgagaaattcaagt

SEQ ID NO: 77824 - DNA, 122 bp, Homo sapiens
aggttgccggcaatttcttgttgtgtcccgagccattccgcggatcttgttttgaaggggcgagtcaggtgtttgtgcggctccagatcctgaacaggttatgcgctgggtccttccttatc

SEQ ID NO: 77825 - DNA, 122 bp, Homo sapiens
ccccactcacggtgacctctggatttggccggcggggccctgggacacgagctctgtgcccgcgaggggagtctggcctggcgggctccgccacgctaccggtgagcaccgggccagccgcg

SEQ ID NO: 77826 - DNA, 122 bp, Homo sapiens
atgacgtttcccaaatcacacagctactatattgtggttccaggacttgagtccaagcagcgtaactccagaaccttacttactctagttactttactcagtatattagattaactccaaga

SEQ ID NO: 77827 - DNA, 122 bp, Homo sapiens
gggggcccgcgactcggggtcctgggcttgcgcggcggcccggagcccacgccgtcctgacgtctcaaggttggagtctgcacagcgagcctgggaatccaggcccagcggccgctcgcggc

SEQ ID NO: 77828 - DNA, 122 bp, Homo sapiens
gcgcctgccttctgcaaagtatcattcccgtgtgggctgagcctggggacaaaggtccggcgctcagcagacacctccttggaacccgaggcctggaaacgaaggtccagagtccctcatct

SEQ ID NO: 77829 - DNA, 122 bp, Homo sapiens
gttccaatgtcagggttttgactttggtgccagggctgcctgggccctgagactgaggtacgggaatggaaggtcaatgccagtacgtgtgctttctttgcaggatgtgaacacctccctgc

SEQ ID NO: 77830 - DNA, 122 bp, Homo sapiens
cagagcctccaccccttcacagaggctaggccaagactcccagcagatcttcccagaggacggtttgaaaggaaggcagagagggcactgggaggaggcagtgggagggcggagggcggggg

SEQ ID NO: 77831 - DNA, 122 bp, Homo sapiens
ccagtaccgcagggccgcagggtcttgggtagccgggagcccggggggacctgcagggcccgaggtctgcttagccagctgcaggaagagttcatcccggagcgcgggcaagtcccggcagg

SEQ ID NO: 77832 - DNA, 122 bp, Homo sapiens
ggagcaatacaaatgatgtttaatgagcatttactaagtgctttaacggtactgattcatcgaatcctcccatcatcctatgaggtattatctccggtcataggaggcccagagaggttctg

SEQ ID NO: 77833 - DNA, 122 bp, Homo sapiens
gcccaggcctcgccgccgcccgccctccccggccgctccccgcggactgccaggccaccgcgaggccgggccactcacatccgtctgcgtcctcctgcaggtcctcctgaagcagcgagagg

SEQ ID NO: 77834 - DNA, 122 bp, Homo sapiens
gatgcgtttgtgcatccacaggacctcggggtagtaggtcttgtggctgcagtaaggacacgggtgaacgactaaagccgcctgcagggaggaggccgtctccttattgctggggtcatccc

SEQ ID NO: 77835 - DNA, 122 bp, Homo sapiens
tggacagacttctgtgtctgaagtcactgagtccaggaaacagagctaggcctccctgcacgcctttacgccaggcctggggaagagagaggaaaccacgtgagtgcctgcatggctcccag

SEQ ID NO: 77836 - DNA, 122 bp, Homo sapiens
gagcggggccgcccatagagaccgcgcctggggctttctgggttaggggatcgacttgcacgttcacactgccaggccgggcagtggcttcccgcccctcggcctcgccgccgccccggccc

SEQ ID NO: 77837 - DNA, 122 bp, Homo sapiens
cagacgcaagcggcctagtcgctccccttccgcatcttccagctagaaagccagttcttccgactctgcccgacccaccacgcctctgggactgggggcttgtggcccactaccaggctccg

SEQ ID NO: 77838 - DNA, 122 bp, Homo sapiens
gacaatgtgctgtctgataaacagactgcatcccccagtgtctgcctggagctcagccagcgtgtggcccgcctttgtcacaaggtgctgtttattctgcctggaagtccaaggacagaaca

SEQ ID NO: 77839 - DNA, 122 bp, Homo sapiens
agcggctacagtaaatttctgatctaaagttaactataaagcctagagtggagatgtcttcgcatttaaggaaggttgaagatacagtgcattgtttttgctcagaaggggaaagataaaga

SEQ ID NO: 77840 - DNA, 122 bp, Homo sapiens
ccatccatcccacaagcattctggttcactcttgatgttttttcactattactaatatttcgaccctgaatatcaatctgaactatgacagctcttagtaagaaattcattctaggtcctta

SEQ ID NO: 77841 - DNA, 122 bp, Homo sapiens
gaataaatgtgagttagaaagagatcttctcgccggtggggccggctgggactcgccgctcgcacgcccttgggcagcggcggggcgcctgctcttccttccgcttgcgctgtgagctgagg

SEQ ID NO: 77842 - DNA, 122 bp, Homo sapiens
gggaagacaaaggtccccccacaaccaccagtagcagaagatgctatccctgcatctttacgtatctttcctttgttttacttttttattgtagtaaaaaatacataacataaaatttaaca

SEQ ID NO: 77843 - DNA, 122 bp, Homo sapiens
ggcttcccaaacttttgggttacaggcgtgagccactgtgcctgaccccaaacattttcacgaattaagcccatctcagtaatgtgctcgtaacattccctcctgtaaaatggaaaacacga

SEQ ID NO: 77844 - DNA, 122 bp, Homo sapiens
cgccaccctcagtcccgccgctgccacagcccagaggcccgaaacccactcgggtcccagcgaatctgaccaaataacccctgaaactcacagtttggtgccgtgtgcgtcaaaccggggcg

SEQ ID NO: 77845 - DNA, 122 bp, Homo sapiens
ggtgtgtctatgctggggcccaggccccggggcgggctgtgtgtgtcgcccccgcttcggcgtctggggatggctgctccatcagatcgtaaccgcactctgcaaaggagccagggggcgag

SEQ ID NO: 77846 - DNA, 122 bp, Homo sapiens
ccttgcctccttcgtcttgcaggtgattgaacgaccagtgtttaaccgaggcccccttggcggcggctctgcctcccagtcccagccttgcagtcagacctgcccttgttatgctgttctgg

SEQ ID NO: 77847 - DNA, 122 bp, Homo sapiens
gctcaagcgatcacccctgtcttggcctcccaaaatgaagggattacaggcgtgagccaccgtgcctggccttgaaaggcaatttcgtcttcttggaagtctccttgcgagggagggagcct

SEQ ID NO: 77848 - DNA, 122 bp, Homo sapiens
ggcagcgtcttctccgggtctcctccccagccaggcggatgtggaagtacctgggcttggcgcctcccaggaggttgtcttcgcccttcgggccgcagcagaaggagaaaggacagccaatc

SEQ ID NO: 77849 - DNA, 122 bp, Homo sapiens
attattggaggtaaagctcttatgtactgctgctgaccattgtacctgccaagcgggttacggggtacttctgcctcttgtctgccaagctggatataattttccttcctctgaaattccca

SEQ ID NO: 77850 - DNA, 122 bp, Homo sapiens
ccaccccaattcctcaggactccacccactccagagctattggattatcagtcgattactcgcttgccattggccgggcagtctcaaggcccgcccattaggggaggggacaaacgggtttc

SEQ ID NO: 77851 - DNA, 122 bp, Homo sapiens
ggaggcagggttccaagccggttctgtcgggttccctcaagaccccgagagcacgcgctccggagggaccccggcacttcggaccctagcagagccagccctgccccaggaccgccccgggg

SEQ ID NO: 77852 - DNA, 122 bp, Homo sapiens
ttcgcgggaagtccccaggcttccagcaaagctcagcttatcccgcccccgcttccaacccggaaccccagaagaacagcatgatgagcctccggcagccaggtgggccacctccccgcggc

SEQ ID NO: 77853 - DNA, 122 bp, Homo sapiens
ggcacacctcccagacggggtggtgtccgggcagaggggctcctcacctcccagcaggggcggccgggcagaggcgcccctcacctcccggacggggcggctggccgggcaggggggctgac

SEQ ID NO: 77854 - DNA, 122 bp, Homo sapiens
aggcacggacgccgggttccccccaccccgtgttccccggcaggtctggggtctgggccacggggaagcgtgctgagtctgcaaatgtccctggaagaggagagcaacatttccgttccgga

SEQ ID NO: 77855 - DNA, 122 bp, Homo sapiens
ttctatactacctttgacggacagagatacttgccccatccccttgccggcttcattctccgtccctgggtcgagctgtggcaagatttctcgatgagggcagagggcgagaggcgtgagaa

SEQ ID NO: 77856 - DNA, 122 bp, Homo sapiens
ccagcacccagaaagcgccagcggaggctggcaggccgtgggccgcatgggcggaggggccggtcctccgatgatggggcaaacgtctccggcctagcccccgacgctcggggatgtaaggg

SEQ ID NO: 77857 - DNA, 122 bp, Homo sapiens
ttccgcgggcgcagcaggcagcgcggcgggagcagtggagctccgcattctagagggcggcggggcgggcgcagggacctggctgggcgaaggcaggaccgcgagtgcggaggctgcgggcc

SEQ ID NO: 77858 - DNA, 122 bp, Homo sapiens
ggctctcgctgcgtttgtagccatacgtcacggcctcttctgcttctcattgggggagcccgtccaatcatgtgattccagtatggcgtataaataaaggcgaggagaaggcggtggtccgc

SEQ ID NO: 77859 - DNA, 122 bp, Homo sapiens
tgaggggtagcagctcagcaaggcaatgaggccggccagagaccgccgcacagaagtgggcgttccccgctgaggggccgggggccgcggtcagcttctctgagtgtcctggtcttggagga

SEQ ID NO: 77860 - DNA, 122 bp, Homo sapiens
ttttttccttgagacggagtttcgctctttcattcaggctggagtgaagtggcgcggtctcggctcactgcaacctccgccctctgggttcaaacgattgattctcctgcctcagcctcccg

SEQ ID NO: 77861 - DNA, 122 bp, Homo sapiens
ggcgccaacctcgctggaggaggctgtcgggggcgggccagccagcggggctgccctcctcgcagtgacgtcccagggggcggaggggcgaccgactgactccgcgccctcccccccgcctc

SEQ ID NO: 77862 - DNA, 122 bp, Homo sapiens
ggtcgtgccgctggaaggccttcccacactcacagcactggaagctcagtttggccttgccgttttccagcggctctttgggacccttgtccgcgtcctcggatgccgcctgctctctcttc

SEQ ID NO: 77863 - DNA, 122 bp, Homo sapiens
tacggtctgagcactgcactctcagctacttcatggaaagcacacatttctactgagactcgcacacgaatgttcacggcagctgcaagtgtgctggtcagaaaggagagaacctgcacacc

SEQ ID NO: 77864 - DNA, 122 bp, Homo sapiens
gctgcggacacctagggtcaggcgctgagtgctgggtggtctcatgttcgcagggtggggcggtcggagcagcccggctggggtgggagtgtgggggctgagggcacctaggggcgggcgct

SEQ ID NO: 77865 - DNA, 122 bp, Homo sapiens
gctttctggggggtaacaggttgctgtcagttggaacacattttttgttcgtgtcttccacgtataagcttaatgctttttcttttcttttgtaaaaaaatttattttctttttttcccctg

SEQ ID NO: 77866 - DNA, 122 bp, Homo sapiens
tggcccagcctcacaccaggccctggccgggctacataccacatggtccgtgtgtacacacgcgtgtggggggcccgagagaccatggctcaggacagggaatctggagagatgctgaactt

SEQ ID NO: 77867 - DNA, 122 bp, Homo sapiens
cgggactgccgggccgggaaaattccatgcccgaattgtgacgtcggcccgttgccatggcggcgaaggcagacattccgcggtgacctcactgcagaaccaggcagctgtcacatgacgcg

SEQ ID NO: 77868 - DNA, 122 bp, Homo sapiens
tgattaatgtgactttttggttttaactgcatcaacgatagaatccgaagcctgaaagggcgcatgcacagtgcctagccctgactgctaactgactcttcagtctcagcagagctttgctg

SEQ ID NO: 77869 - DNA, 122 bp, Homo sapiens
acccgccccgtaggcttgttttggcgtcagctgcgcgctgtgatgacgccacgacgctaacgcccgagaatggcggcggcggcggcggcggcggcggccgctgccattgcccggagatggcc

SEQ ID NO: 77870 - DNA, 122 bp, Homo sapiens
tcctattttgagttgaagtaaaagctcctccctagatggccagtgcacgtctttaaaaagcgactcctttcccacaaaggaaatacgactggttcgcatctatcaagggttggcgttgggat

SEQ ID NO: 77871 - DNA, 122 bp, Homo sapiens
aataagatgactcccttgtcattaattctcaaaagaaattaaatactaagctggaacactcgagggagaaaagactctgaactactgtaaaggtaaataagcctacgagtgggtcacccatc

SEQ ID NO: 77872 - DNA, 122 bp, Homo sapiens
gcctggtggcttcggcctatgagtgggggatggggccctttgtgaagtcgagggttggtgcggagggagaaaactgcaggtctccagtctatccccagtgtgagctagagagcggaccatga

SEQ ID NO: 77873 - DNA, 122 bp, Homo sapiens
cccgcggcagcggcggggcaaaagcagcaatatgctctcagcgccgggagtgacactcaccggcccgaaacctcgaatgaaaccagcagctccgggggcggcggcagcagtggcagcaggaa

SEQ ID NO: 77874 - DNA, 122 bp, Homo sapiens
ccgcgaagtttgcagcgcgcctcgcgcgggagagacgccgtctgctggcgcgcggctgagcgctgtcagttcctgatccggctggtgcccgctccagccgcggcaggttccagagctgagag

SEQ ID NO: 77875 - DNA, 122 bp, Homo sapiens
caaaaagccagaggcaaaaatgcaaatgaagtgagtatagacagaagagcaagatcctttcgagcaaggattgggtattgagatctgaaaagattaacaggtcaggtggcagaaactaagtt

SEQ ID NO: 77876 - DNA, 122 bp, Homo sapiens
tgggactgcaaagagcgtattcatggagggtctcgaaattgccatctctggggaaaggttcgtctttgtgtagctatcgcctacaccctgggtcaggggctgttattgatcagccgaaccag

SEQ ID NO: 77877 - DNA, 122 bp, Homo sapiens
gttttcaaaacccagcacaccagatgcagaggacagtgatcctactacccagacagtttccgggccacagcacaggaggtgcgggaacccggacagggcttgaccccatgagctcaccctca

SEQ ID NO: 77878 - DNA, 122 bp, Homo sapiens
caacaaaaaggcccaaaacagctccgaggatcctgccaaggccacggacgatgtcctgcccgggacatcaatgtcctccttgggaaaatgggctcagccagccaaagtcagggaccccaaac

SEQ ID NO: 77879 - DNA, 122 bp, Homo sapiens
tggcagtgtgtgtgcgcgcgtgtacgtgtgtgtgtgcgtgtctacaggtagcagtggcggcggcggcggcggcggcggggaccggagcaggggacgcatctgcagccacctccccgcctatg

SEQ ID NO: 77880 - DNA, 122 bp, Homo sapiens
tggagagaagtccttgctcgcggggagaggatgggatggtagcggaggctactggcttggcgtagagaaatcagagagtgtgttctacgaacagaggcgaagatttatctctctacttcccc

SEQ ID NO: 77881 - DNA, 122 bp, Homo sapiens
atggaaatcctgttacttaaatagcatctgctcttctcttacgctctctgtctggctgtacgtctggtgttctcaatgcttttctagcaactgttggataataactagatctcctgtaattt

SEQ ID NO: 77882 - DNA, 122 bp, Homo sapiens
gaatttctatctgttttattctttgaagtgccccaagcacttagggtagtgcctggcatacggtaatccatcaataaaaatttgataaatcaatcaaccaatgcaagtactattgaagagaa

SEQ ID NO: 77883 - DNA, 122 bp, Homo sapiens
attcattcaccagtcagccctgtattccaactgaacctgacgtccagctggtaacccagccgaatgcagccaaataagtaaggaaatacgacaaggaatggaggaaatgctcaggcaagcac

SEQ ID NO: 77884 - DNA, 122 bp, Homo sapiens
accggcccggccaacacagcgaaaccccgtctccaccaaaaccagtcaggcgtggcggcgcgtgcctgcaatcgcaggcattcggcagagtgaggcaggagaatcaggcagggaggttgcag

SEQ ID NO: 77885 - DNA, 122 bp, Homo sapiens
ttagaacaggccaggcatgatggctcaagcccataattcccacactttgggaagctgaggcgagaggatggcttaagctcagcagtttgagagcagcctgggcaacatagtgagacctcatc

SEQ ID NO: 77886 - DNA, 122 bp, Homo sapiens
ttttttcctttttgtcttttattgagacagggtttcgcccttttacctaggctggagtgccgaggtgtgatctcagctcactgcaacctctgcctcctgggctcaagtgatcctctcacttc

SEQ ID NO: 77887 - DNA, 122 bp, Homo sapiens
cgatacatactggcaatgcagaacttgaggcgatccttctccagtagcagcttttgcaagcgctcaatagaaagcgcttcaatccgggcaataactgtgtcgaatcgatagattcgatcaag

SEQ ID NO: 77888 - DNA, 122 bp, Homo sapiens
caggaagctggggctgtgtgggccgggctgctaactggggctgtggagcaatctgccagccgagccccttccggagctgtgggttcctctgggtgtggggaagctgccctccacaacctcct

SEQ ID NO: 77889 - DNA, 122 bp, Homo sapiens
cacccctccggggtgtcctgcccagggtgccctccggccttggggcagggaatccgggcacggggtgggcgccgggccctggggtcctcagggactgggcctcagcccgccggtggttccac

SEQ ID NO: 77890 - DNA, 122 bp, Homo sapiens
tagaaaaaggaaaatgcccaataaaaggcatttcagccattttaaatgtcttagaaatttcgacggtcctaatggaaattgaattactttttggaagggatccaaatgtgaacctttgaaaa

SEQ ID NO: 77891 - DNA, 122 bp, Homo sapiens
ggttgggcaggagtgtctacacgtgtgcagcaaccttccctccaggccggattctgcaggcgctagcgtccaccagcctgtgccacaccggcgggctcctcctccctcaatccccgcccaga

SEQ ID NO: 77892 - DNA, 122 bp, Homo sapiens
ggcgggaggtagggcacgcagctgggctacgggggcggcgatgctgttgggggcgacagacgcccagtctgggaaaccttcggtccactttgccgcgccaaagattaaacccgacctgggct

SEQ ID NO: 77893 - DNA, 122 bp, Homo sapiens
gcttcacggctgaaaaaggcagccccgacaatggagccttgtccccggcagcaactctaacggccaccttctttcattccttaaccttgctgtgggcttgtatgaaattggtcccattctct

SEQ ID NO: 77894 - DNA, 122 bp, Homo sapiens
gggaagagcagggaggtggaaaggggaagcggagcaagcggggcacacccttaagggatgcgggcaggctggcctctcaggctgtgctctcatcccgaggccccaggacctgcttcgggcag

SEQ ID NO: 77895 - DNA, 122 bp, Homo sapiens
agggcaaagggcgagggagccgggccgggggtgtttcgggtgtccgaaggcgagtccgatcggaccaggaagtagctcaggggagcctgacctcgacccgcctttctcctcacacgagctga

SEQ ID NO: 77896 - DNA, 122 bp, Homo sapiens
agttagctaactctccagagaattcatggagactcccagaaagacattccttcaaatccccgctagtgtcctcatccatcaaatgggcctaatgcacccctcacctctcagtaaatataaat

SEQ ID NO: 77897 - DNA, 122 bp, Homo sapiens
cgttatccgagagggcggagcgagccgtgggcgcctctaggggtgcgggagccgcgggagcgcagggggtggggcccggcgggccaggggaggggcggcggggcggcgggcggagggagggg

SEQ ID NO: 77898 - DNA, 122 bp, Homo sapiens
tgtgtttgcccatcctctgtggcagctctggggaagggctttggagcctgactctgacttcgctcctgagcagctgagctgggagtatgagagctgccaaggctgcatccctaatctccctt

SEQ ID NO: 77899 - DNA, 122 bp, Homo sapiens
ggggggggggtccgggggccgggggagcgtcgcgctgacggcagccagagcctgcgatgacggggctgctataaataacttcttggaggctcccacacccaagctcccctcccgctttccca

SEQ ID NO: 77900 - DNA, 122 bp, Homo sapiens
cgccctcttgcgccgcccttacagtgcctcctcctcgaggccaaatgcccggccgctcagcgctcgtggcagccgcgtagttgcagagacacggtctgctttccaggcttgggaagtcccag

SEQ ID NO: 77901 - DNA, 122 bp, Homo sapiens
gggatgtcttttcccccccagcagtgatgagtggggctagctgaagcccattggtttccacgatttcaattggctgagaaggcagagagctagctcctccctttctttctttttccacctga

SEQ ID NO: 77902 - DNA, 122 bp, Homo sapiens
ccagccgggtggacacctgagatttccagggttccgtgtggggctccaccctcgtgctggcggcctccacatggaggccctccgtgcctctcagacactttccgacagaaacagacagcaga

SEQ ID NO: 77903 - DNA, 122 bp, Homo sapiens
ttttctccgttgttcctccagagaccctcatggacacaaaatgggtaacatctgagttggcgtggacatctcatccagaaagtggggtgaggctttcccatcattctcctgagtgttgtttg

SEQ ID NO: 77904 - DNA, 122 bp, Homo sapiens
gctcaggaggcaggtggtgcagacgcagaggtccctcatcaccctgctcaggtagaaaagcgtcttacacttgaagtcaaaatgaagggactcaaaaaggtctggagacaccaagaacacaa

SEQ ID NO: 77905 - DNA, 122 bp, Homo sapiens
cgcctcgtgggcccccccgggcctggcagtcccccaaccccctcatcacgcccgcgcccgcgttcggccaggactcaccgcagtcccggagccacagcccccgcgcagcccccgacggcggc

SEQ ID NO: 77906 - DNA, 122 bp, Homo sapiens
tttggagagctgcgcatctgtgtggcaagaggggcccacgggagggcgatgccgccagctcggtcccattatcccgagcacgaccggctgcgttcacaccgcaaagtcaccagccgcgccgg

SEQ ID NO: 77907 - DNA, 122 bp, Homo sapiens
tcaagagcgctaatgaacgttctcattaacacgcaggagtaccgggagccctgaaccgcccgctgctcggcggatcccagctgcggtggcgacggcgggaaggcgctttccgctgttcctca

SEQ ID NO: 77908 - DNA, 122 bp, Homo sapiens
cttcaccatgaatgtctcttccttcctgcagcgtttgtgaggcatatcctgtcggggtgacgggcccatggggcgggtacggctcctcccagcctctcctctagttgatctccccagtgttt

SEQ ID NO: 77909 - DNA, 122 bp, Homo sapiens
cgggttggctggtaaggacaccacctccagctttagccctctggggccagccagggtagccgggaagcagtggtggcccgccctccagggagcagttgggccccgcccgggccagccccagg

SEQ ID NO: 77910 - DNA, 122 bp, Homo sapiens
ccctcggcctccccacggctcccaacaacgcagcaccccacccgagagccaggccttggtcgccgcaactgcagccctcaccatcctgtcaccgggctccgctcagtcaccaccaccgtcgc

SEQ ID NO: 77911 - DNA, 122 bp, Homo sapiens
cacaacgtgagattttattattccacgggtgcttccttgccaatagtagacatggcagctcggctcccttcccttcgggttcgccttattgttgccaattgtaaacatggcctctaggccgt

SEQ ID NO: 77912 - DNA, 122 bp, Homo sapiens
tcgtctgtgcactgccagttttgctgctacctggcttaagctaagaacacctccaggagccgatttgagaatatctataaattttcgcgttgtacaagccagtgatgtcttattatgaggtt

SEQ ID NO: 77913 - DNA, 122 bp, Homo sapiens
attggtgaacgtgtcatgctacatggaaaacacaatttaggctccagacgaaatgaagggcgcggctgagctgacccgagaggggagattgtgccgggtctgaggtgccactgggtccctgg

SEQ ID NO: 77914 - DNA, 122 bp, Homo sapiens
aggaaccgactcctggacgtcctggagcagcccgacccagacttggggaaacagctgtgccggccctcgccttgtggggtaatagcccggggaggccaccgatcctgcccctctctttccat

SEQ ID NO: 77915 - DNA, 122 bp, Homo sapiens
cctcccttgcctcactctgatcctggccccataatgtcctcagtggaaggtgatgggggccggtgctgtggggagagtagaaagaggggttggcatgactaaaaataccagtatgtgtatta

SEQ ID NO: 77916 - DNA, 122 bp, Homo sapiens
cgtggagcacaaggtgtgcaccagggcccagtggcagccaaggtgggtgtggagtgcatccggcaccagcagtttgcttctatggctgctttgtttttcacgctatggagtcttcactccaa

SEQ ID NO: 77917 - DNA, 122 bp, Homo sapiens
tgtggctatcagagtccatattgcacagcacagaaataaattacttccaccatcacagaacgttctattagacagtgatgatgtaaactaagctttaatactttcattacattaagcccacc

SEQ ID NO: 77918 - DNA, 122 bp, Homo sapiens
ctcaagccatcctcctgcctctgcctccggagtacctgagactacaggtgtacaccaccacgcctggctgactttatttttgccagaaactgggtgttgctatgttgcccaggctggtttca

SEQ ID NO: 77919 - DNA, 122 bp, Homo sapiens
agcagggcgagatccctgaggagcggcggctgctcaggtaggccgagctgatggtgctggcgctgctgtcccttctgttgagcatgttcagcatagtgacgtccaccccagagaggtcgctt

SEQ ID NO: 77920 - DNA, 122 bp, Homo sapiens
gacttggcgccggctgtggctactcaggggccaggggcgggcacagggccgggcttcgtgcggtggggctcgctcgcgcggcagcggtggccgaggcctcttggttctgcggcacgtgacgg

SEQ ID NO: 77921 - DNA, 122 bp, Homo sapiens
agcctgagaagggcaggagcaagggatgtctaaggggcctggtggcaggcccttgttctgcggcagccccgtggacccacggggtggccagggccaagtcacatccctctcttccccggtcc

SEQ ID NO: 77922 - DNA, 122 bp, Homo sapiens
tgaggaaagaaataagacacagagacaaagtatggagaaacaacagtgggcctaggggaccggcgctcagcataccaaggatctgaaccagcacaggcctctgggttccctcagtttttatt

SEQ ID NO: 77923 - DNA, 122 bp, Homo sapiens
tgctttccccaaagcacccgggccggccagagtgttggtgcgtaagtgcgggtaagcaggcggtgctagagttttatgtggtgtgcactgtgtggctggggctgctggctgtgtagcgacag

SEQ ID NO: 77924 - DNA, 122 bp, Homo sapiens
actcccttctattaaaaggactatgtgcaaacaggcatgcctggaggaagccaaggaccacgataaaggaaaacaaacaccttatgattcatctaacataggcccggttacaatcgcaggtg

SEQ ID NO: 77925 - DNA, 122 bp, Homo sapiens
agtggcggggcgggctgctggcagggagcggccgagacgtgcagggccttcccgggggatcggaaggttgcggatgccttgggagccgggggcccttgcgcgggattgcaacccccgcgaag

SEQ ID NO: 77926 - DNA, 122 bp, Homo sapiens
ctgaatggtctgcaggtagcacctgccccaaggatggcccctcacaggctggcagcaccacgtcctggaggtccactgaccatcctgtcccactccttagaaggggcttccaggaggtagag

SEQ ID NO: 77927 - DNA, 122 bp, Homo sapiens
gcttctagcggagcgcaggtgcccctcccctggcacgccccagcctcctcgcccgccctgcggcagggggatgcccattcgaccccacctccgactcctcttcaggcaccaggctctgccgt

SEQ ID NO: 77928 - DNA, 122 bp, Homo sapiens
cgttcccgccgccacctcacacctgaccaggccccccggtcctcggcccttcccacctaccgtctcctgccaccaactgtgatgttccaggcaggtgaaaaccagagggctgtgtttcaaga

SEQ ID NO: 77929 - DNA, 122 bp, Homo sapiens
cgcgggaaatcccgagtgcatctggaatacgcagagtcagtaagaccatggctacgtcctcgatgtctaaggtatgtggtggccgatgcgcactgtggctctaccgctgcctcattcccctt

SEQ ID NO: 77930 - DNA, 122 bp, Homo sapiens
agacctgcgtctaaccaaggcccagcacgtcagcacctgagcacctaacgtgtgcagacacgtggcctgcaccccgccgaccagcacccgtcgcggggagccacaagggggtcggtccagga

SEQ ID NO: 77931 - DNA, 122 bp, Homo sapiens
gcagcagcctcaggagggaggagggtgccatggctgctctggggggctgccgcctgccttcgctggttccttagacacagtcccactgtgtcacacagcatcacctctgagacacgccatca

SEQ ID NO: 77932 - DNA, 122 bp, Homo sapiens
gggagccgtgggcgaaggaagggtctgcacggggtcccgggaggacccaggaagtctgcgcgaacggcgggcgtgggtccggagggcccggggtgggaggtctgccgggcgccggcggcagg

SEQ ID NO: 77933 - DNA, 122 bp, Homo sapiens
gcaacttcagttctgaccagaggttctgtgaaccttcaggatttagcaggtttccaggaccggtgggtgaatctacccggggaagttttggtggacaagagctgctcgccagctgtcggagt

SEQ ID NO: 77934 - DNA, 122 bp, Homo sapiens
cgggtggcgtgaagctggcaaaacaagcctgtaagtgcgcgtgcgcacctgacggtcagacgtaggcggaacgccccgaggtcataggcggggtcacgcggaaggccgggcagcgcagggcg

SEQ ID NO: 77935 - DNA, 122 bp, Homo sapiens
gtaacctgataagtccgaagcgttccagtgagggcggggcctcacgaaggcaacccttcgcgcaacctatcagaatcccccctagcaacgctgtgccccgcccatatgggtccggcctccca

SEQ ID NO: 77936 - DNA, 122 bp, Homo sapiens
acaaggaaagggaaataggccacggtagggtcattactattgctccttaagcttcctcgccggtccacctacccagacaaggcaaacggaaatctgcagcaggactcagcttggtgcacaca

SEQ ID NO: 77937 - DNA, 122 bp, Homo sapiens
gcgtcgcgcttgtcaatcatctagaaccgggtgtgattgagcgagttgggatcccactgccgacagccgcgcggaggcggtcgggaaaccggaaaacgcttccaatggctgtgtttccggcg

SEQ ID NO: 77938 - DNA, 122 bp, Homo sapiens
aggacagataaataattgctactaacactctcaactgcagatgagcacccttgagggatccggatgccataaactgtccgggagtgttggcatctggttcttaaagccaggaccccaggagg

SEQ ID NO: 77939 - DNA, 122 bp, Homo sapiens
aacgttacgacttttttacttcttacatatacagtcccgtgatagacagaccaggggactcgtcagctcagagtccatgaggccagaagttgacaccttcaatttctattcagaatgaattt

SEQ ID NO: 77940 - DNA, 122 bp, Homo sapiens
tctggcgctgcggtctcccgatgcaagtcctcgctggagctccaccaggtccaggaagagcgacttggagaaatggtctaaggcgtagacagctgccagatatggaagcaagcgccattgct

SEQ ID NO: 77941 - DNA, 122 bp, Homo sapiens
ttttccctcgtgtgtgttcttggcacctttgttgaaaatcggttgactgtaggtggcatacgcaatatataaagaggaaaatcagccacggaccaatacagaatgttaatttgaagtgatta

SEQ ID NO: 77942 - DNA, 122 bp, Homo sapiens
ccagccaccgccgacccgcccctcgcccttgggcatatgctactacttaatattgccttgcgtttctgaaaggatctgaaatgtaaattttttcacgtgtgttagcatgtatcgtcattccg

SEQ ID NO: 77943 - DNA, 122 bp, Homo sapiens
cttcctgagcaaatcggcctctccagagccttggggggtgggggagtcacccctacagcccgggaacacctctgcaccctgatgctaccaaggacaagggtggcctccccatggggaccaga

SEQ ID NO: 77944 - DNA, 122 bp, Homo sapiens
cagcgtccgggcccctactcttcccgtccgggcccgccccggctcgccccgccccggtctcggccacgccctcaggacacgccccctcggggctcgccccgcccctgcccttaaaggtacag

SEQ ID NO: 77945 - DNA, 122 bp, Homo sapiens
cacacagccgcccacagcgttcaggcgtccctgtccacacagctgcccacagcgttcaggcgcccctgtccacacagccacccacggtgtccagggtttggataaaatctaggcttggcttt

SEQ ID NO: 77946 - DNA, 122 bp, Homo sapiens
ggcacgtggctctgtggcaggtcctgaggcacccacatgccacgtacagacattgggacacgtggcaggacactgagggcagaagccaccaagggcaggatgaccagatggcacagggaggg

SEQ ID NO: 77947 - DNA, 122 bp, Homo sapiens
ccaaccccagccaaagccgctggcatgaggacaggtgcatgatcggattctgggtcagcccgcaggcctcccggctcctgggctcagcggggcaggcttcagcgttaacctggcgctgtgca

SEQ ID NO: 77948 - DNA, 122 bp, Homo sapiens
ctctaagcactcacgcagccggcaaacaagcggaatcatccagcaaggcaaacgcgaaatcggcagcacgccacctctggtactgcacctctgacggacaggagggcaaccaactgccttaa

SEQ ID NO: 77949 - DNA, 122 bp, Homo sapiens
tcatggcaagtaagctaaggcacttcccttcatagacaaacactattctgcttttgaaaacgatgacataccacttcacatccactgagatggctagaatcaaaaactcaaggaataacaag

SEQ ID NO: 77950 - DNA, 122 bp, Homo sapiens
gattgcagcctctgcccggctgccaccccgtctaggaagtgaggagtgtctctgcctggccgcccatcgtctaggatgtgaggacccctctgcccggccgctcagtctgggaagtgaggagc

SEQ ID NO: 77951 - DNA, 122 bp, Homo sapiens
gtcatgactcctgtctttccttgaagaccaggagtttcagctccacaaatgaaaatctttcgcttttgtttggattaagaataactcagaagtgttctcagctgcgaaaagaaaggcactcc

SEQ ID NO: 77952 - DNA, 122 bp, Homo sapiens
cagccgggccgagccagcccgggtcccgcagggaagaacgccagcggcgcgcggaggccgcgctgccctgggccgcgaggtccctatggctgctccaccggaagccccgcccccttctggca

SEQ ID NO: 77953 - DNA, 122 bp, Homo sapiens
tatggaaattctatgtgaaaactctctttagggctgccaaataattcattcccctaacaccgcacattgaagttgcttcaagctttcttttataaatcgtgctgtctgaaaatatttgcttg

SEQ ID NO: 77954 - DNA, 122 bp, Homo sapiens
atcatgcagaactgcacagctaaaccaatggggcaggagctgccatcctgaggcctgccccgcaaaatgggatctgtccatctttactggggaaccatgataaacgagcaaagacagacact

SEQ ID NO: 77955 - DNA, 122 bp, Homo sapiens
ttagagtcgtctctcaaaggctctcagcaaatatctagagacgtggttacatccagtttacgaagactgtcggtgacttcggggtcatacagtacatggacaacgaaagaacagcaattgaa

SEQ ID NO: 77956 - DNA, 122 bp, Homo sapiens
ctgtccccaccggctcaccgttccctcgcccccgccccgacagcattatcgccgccttcccgctctttacctgccaacaggttcctaatttcctcagggagggggtagggagaggaggtgct

SEQ ID NO: 77957 - DNA, 122 bp, Homo sapiens
aaacagggctctgctgtactcagagaggtggagcataactccctcactgtaagggtgggccgcacagtgactgccttccaaagagtgcaatacagcaagtggggaaggagggctggcgcggt

SEQ ID NO: 77958 - DNA, 122 bp, Homo sapiens
gttcaagtatcttttttgtataatgactccttttcctcattttcaagacagcatcagctgcggtagtatagggagaatgcaagattgccctaaggtctcctggataagtattcgtgtttctc

SEQ ID NO: 77959 - DNA, 122 bp, Homo sapiens
ctggccgcccgggtctccggtccacctgcgcgaactgcggggagggcgcacccccgcccgcgcagggcccctgccagctgcacgtacttgcctctgaccgcccccacccagcccctatcgtc

SEQ ID NO: 77960 - DNA, 122 bp, Homo sapiens
gcccggttggccaccccgtttctggggggtgagcggggcttggcagggctgcgcggagggcgcgggggtggggcccggggcggagcggcccggggcggagggcgcgggctccgagccgtcca

SEQ ID NO: 77961 - DNA, 122 bp, Homo sapiens
gtctctgttttatagaaaaggaaactgagtctctgtgggcctggtcctaacccagtcacacgcaagcattcatgcctgcgtgaagtgtgtctggcttcaccctgccccgccaagtggcctca

SEQ ID NO: 77962 - DNA, 122 bp, Homo sapiens
tttcaaatcaacactaaacccaaaagcggaatagtaaaaatgaagcccccaccccacccccggcccccccatgaaatgaaacagcaaaatcctcatggttgattcagtaaacacagactttc

SEQ ID NO: 77963 - DNA, 122 bp, Homo sapiens
ccatcaataccctcagagttgagctggggttaccactctgcagagctatgccaaggagaccgcgaagtggtccaccagcccttctcagcaatttgccccgctccagttaagcggggaaaacc

SEQ ID NO: 77964 - DNA, 122 bp, Homo sapiens
ctgcagccggcagcgcagcctcctcgcgggtcccgcagggcgcgctgcaggtgcgctgggcgtcccgaagccccgccctcgcgtccctgccccgcgcccagctcctcacgctcggtgcccgc

SEQ ID NO: 77965 - DNA, 122 bp, Homo sapiens
tgacgtaatgcgggttgattggcatgcaggccttggacgtccaggattagccacgcatttcgccaatccagaggcaggggagggacggtgcaggcgcagagtattgggtttggctggcctcg

SEQ ID NO: 77966 - DNA, 122 bp, Homo sapiens
cgtcattggaaacatgtacaagtgtaaacctctgtgcgctgttggtgggaatgtaaatggcgcagcaccgcagaaaactatggagattccacaaaaggttaaaagtagaactaccggatatg

SEQ ID NO: 77967 - DNA, 122 bp, Homo sapiens
taaggggtcgggggagcattggccttgcttcagcagtgataggcgcgtgccttcccacagcggacatggagcctttccaaggggagaatcgctccctggccagactgcaagcttcccgggga

SEQ ID NO: 77968 - DNA, 122 bp, Homo sapiens
caggaagaccatcacagagaattcaacgtagtcgaacgtagtccatattctaaaaagtatcggcttgtgtcagccactgcgctggatcttgaagcaaagctgtagatacggaaattgtggct

SEQ ID NO: 77969 - DNA, 122 bp, Homo sapiens
acaggtagcattcctcacaccaacatatgcctccggcggtgcagggccaaatgatctgaccgggaaaagctgcgatcacagtccgcgcacttgaatggcttcactcccgtatgtttgcggta

SEQ ID NO: 77970 - DNA, 122 bp, Homo sapiens
gtttgcagtaaaatctgcagtgggtgtgcagcctgtactttggcagtgattaagcacacccgtggaggcgtcccgagggcgtggactccaacgcctacctctgctgggtctgacagacagaa

SEQ ID NO: 77971 - DNA, 122 bp, Homo sapiens
tcccgccgctcagagacggaagacggcccccgtcacggctgcagcaggtgctgccagggacgctgctcggagctccaggctgcagggacagggccaccccgggccgcccgctcgcccggcct

SEQ ID NO: 77972 - DNA, 122 bp, Homo sapiens
aaaataaaaacacgagaacgtactgcaggagaaaacaggcctggcctgagacggctgtgccggctttctgaggccgtgaatggcaagacctcgagactgtcaagaggagcaagaggagtcgg

SEQ ID NO: 77973 - DNA, 122 bp, Homo sapiens
cggggctcgcacgagctccgggtttccagaggcaggggccggggccgtagaaggcagagtcgcgcggggaaggcccggtaccccgccccttccgcaccgacccctcccccgcggagctggcc

SEQ ID NO: 77974 - DNA, 122 bp, Homo sapiens
aactgaactttgctcccactggtttaatagttacttatttctgcctaagcactcaccttccgattttacccaagtatatatataggatagaaaaaaatgcattatatttgagagctacttcg

SEQ ID NO: 77975 - DNA, 122 bp, Homo sapiens
tcatgattactcttcaggcttcacgaacaggctcccaaacccgtgaaagcagcacaaactcgaacctctcagtcactgtgtggaatctctagacgtctaacctgttgaaggaggaaacacag

SEQ ID NO: 77976 - DNA, 122 bp, Homo sapiens
tgtcagacacggagcccgggcttgggagcgggcggggagggctcccttttctccttgttccgcagcacctgtcacggagacgggagatgggggcctggcccgggatgggcagccctgcttcc

SEQ ID NO: 77977 - DNA, 122 bp, Homo sapiens
gaccatagacgcagagtgtttgcccccaaaactggaggacctccagaatgagattcttggcgtgcaccaggccttttcgctcattcagccggcgttcctacccaggcactgcatcgacccta

SEQ ID NO: 77978 - DNA, 122 bp, Homo sapiens
tgcaggatgaagactagctggctgtccatagcaattcagtatgggagggggacccaggcacgaataatcctaaacctgagcatgattgcttacgtttgaaaaaggacatctaggccgggtgc

SEQ ID NO: 77979 - DNA, 122 bp, Homo sapiens
gtcatttttgtcaaaggaaatcagatgaaaaggggtgtacaaaggaccaggtctcgtgagcgcagccaatcttgtccgctcccaagcgactcaggctcttggcaggacttgctgtagagtcc

SEQ ID NO: 77980 - DNA, 122 bp, Homo sapiens
ccatcctcaggaagtccttccccgcacacggtgctcaatgaaggcgctcccacccattctcgcactccgcccccgcccgcagctgtgtgattttccatttgcttagggaccacgtctgccct

SEQ ID NO: 77981 - DNA, 122 bp, Homo sapiens
aggaaagcttttcaaataaccaaagttttacaatgtaatagttgaaaaacattgccatggcgaacggttcagggatactttaacaacagcaacgaaagactcaaattgcgaaaatcttagtg

SEQ ID NO: 77982 - DNA, 122 bp, Homo sapiens
ggtcttttaagtgaagagaaaaagaaaccagaaacccacggtggccccaccggctgcttccggggacacctgaaatcagcagctggaactgacaatttggagagccccggggatggtcatct

SEQ ID NO: 77983 - DNA, 122 bp, Homo sapiens
cccctctggaaaatcgccagggaaaagtggtgaaaaacgaagccgggagggccctagtctcgggagtctaggaggagcccaacccccggacctaatgccgcagggagaaaagacagagcagc

SEQ ID NO: 77984 - DNA, 122 bp, Homo sapiens
agcaggagtccctaacctcccggctgcaaacggctatgtgtccgtggtctgttaggaacccggccgcacagcagatgagtggccgggagccttactgcctgagctccgcctcctgtcagatc

SEQ ID NO: 77985 - DNA, 122 bp, Homo sapiens
tggagtccagggaaagcgtcccaggcccccagcccgggcagggttcgtgggattggcgtccgctgccccaggcttaccccgaatggaggagtgacccctgtcccctgagctgggtcgcattg

SEQ ID NO: 77986 - DNA, 122 bp, Homo sapiens
cggcctggtggaggctgtagcccccgcagtgggcgcgcggagctcggcagggagcggacccgcagccgtcactgtcgcctccgctcgccttgggttccgaacccttatcggggcgaagggcc

SEQ ID NO: 77987 - DNA, 122 bp, Homo sapiens
agaaggagctgcttttactgggagccacaggtactgctttgaaaaattctaagagtctcacgttgtacccactctcctattttgtgctgatgggtaaggaatacgacaaggagtgagacgat

SEQ ID NO: 77988 - DNA, 122 bp, Homo sapiens
tcctctccccacctggatattataaaccatatcaggggtgtacacacctcacgatatgggcgatatggggagtaatgtcactcccactcctcctgcatattacgaatcagataacgggggtg

SEQ ID NO: 77989 - DNA, 122 bp, Homo sapiens
tcgtggccagaacgccggccgggaccatctgcacaggcgctcgacagctccaagacgctgcggccaagcagaaagttgaacagaacgcggctcccagccacaccaagttcaggtgagcccca

SEQ ID NO: 77990 - DNA, 122 bp, Homo sapiens
gtttttgttcccgtagcgtgctgggatttgcaaaggcttcccaggcttgtgggtaggaaccgttatttgcagttgatttttgttttaggaacagcagttggatgaaaaagatgcccggcgct

SEQ ID NO: 77991 - DNA, 122 bp, Homo sapiens
tattagtacaggaggagacgttgcctcctggttgaggtttacagcaaactggaagctccacggcccacagtggagcacactggaataatctggtgcctcaggcttatgctggccactcacag

SEQ ID NO: 77992 - DNA, 122 bp, Homo sapiens
accgccattttgacctttcaccaatggaaagacttgggactccctctgggttggactcaacgagtaaggcggggaacaagggaggagtaaggggcgtggattcttcgtcccgccccttctta

SEQ ID NO: 77993 - DNA, 122 bp, Homo sapiens
gaagcccacggttgcggggacatgatcaagctacagcgcgctgggggaagcgaccactgccgccccgcggatcccaccggcctggccgggagctccctctgcccggctcacccgcgcttccg

SEQ ID NO: 77994 - DNA, 122 bp, Homo sapiens
tgttcctggcttttcttgtctacacagaactttctactataattgtccccctctctttggcgtcattgttgtcttcctctctcctgggccatttcaccaacccataaacacgcattaatagc

SEQ ID NO: 77995 - DNA, 122 bp, Homo sapiens
aaacatagccaccattttgtccaagcctgggcatgggtggggggccttgtctgctggccacgcaagtgtcacatgcgatctacattaatatcaagtcttgactccctacttcccgtcattcc

SEQ ID NO: 77996 - DNA, 122 bp, Homo sapiens
gcgcggctcggctcggcgcttccagggctccggctcccgagctacttgcatgctcggggccggctccggttctggggaagcccagagcttccggcctgccactgggccccagatgccgtttc

SEQ ID NO: 77997 - DNA, 122 bp, Homo sapiens
tgagcccagcacccacccggggccgcccacccggcacagcgcctgccctctgctcggccccggccaccccaagccggcgcagggtccatgctgtactcccaacccctggctccccacggccc

SEQ ID NO: 77998 - DNA, 122 bp, Homo sapiens
atcagctccatgattcagtatcatagttaatatggaattctcccttgttaacatgaaaatcgctttggcaaagtgttatgtttgtatgcagagcttggagttaatgtcaggaatttcatttt

SEQ ID NO: 77999 - DNA, 122 bp, Homo sapiens
gaaaacacaggaggagctgctttgtgaggagacagcatggcgtcacaagtgtctgcggtgcggcaaacggagatgtcaagtgtgctgtcagacgcagggctctggagctgaccggagaggta

SEQ ID NO: 78000 - DNA, 122 bp, Homo sapiens
cccattgttttgactgttagcattataccctctttcagtcatgccaacccctctagcaaccggtgtcacaaaggaccttgaattcctctcctgaaaacattctttgcttctctaccacaggc

SEQ ID NO: 78001 - DNA, 122 bp, Homo sapiens
acgttccacgcctcgctacgccccctctggtcgcaccgagggatgcaggcggtgcccaagcgcacgccccgctctccagtcatctgagtggtagagggccacgcccacaggcgcctccgagc

SEQ ID NO: 78002 - DNA, 122 bp, Homo sapiens
aggggtgttcgaaacctaatacttgagcttctttgcaaagtttccttggatggttggggacgtacctgtataatggccctggaccagcttccctgttggagtggccagagaagtgtgtaaaa

SEQ ID NO: 78003 - DNA, 122 bp, Homo sapiens
gctgcggtccttcctgggggaaaacaggggcaggagaggggccctagggctcccgggcgccggccacacccaggggcccccgacacgcggttctgcaccccctgcccagcccctctcctggg

SEQ ID NO: 78004 - DNA, 122 bp, Homo sapiens
acaggaagcagtgaaggaaagaggatccaggaagtgaaccttcaacaacaacatggctaccgtgacccagagagaaaagaaaggcacaaaacaggtagaatgtgactcctgcaaagggaatc

SEQ ID NO: 78005 - DNA, 122 bp, Homo sapiens
ccccaggctggacacgccctccccaccctggccctctctaattttagccccatgctgctgcggaggtcatgtgtcagccctgcctactcactccggacagctgcaggctgcgtcttgccagt

SEQ ID NO: 78006 - DNA, 122 bp, Homo sapiens
ctgatgcacgttttgccctggcctgcaccttgctgcctaggcctcttgagctcctggtcccgtagtctcacacatccagctatgtgtccgtcacaccccaggctcttgtccttgactatctt

SEQ ID NO: 78007 - DNA, 122 bp, Homo sapiens
gcctgcgctgagttccttggagctgggggctgcgataccagtctcttggagggtggtgcccggcgcggccgcgcccctttctctatatccattcctgggcatggccacccagactaaatgtc

SEQ ID NO: 78008 - DNA, 122 bp, Homo sapiens
ggaggaagccctgcctgaaaaagctgcaactctattttcattcagccctgcacctgagcacgtcttctgtcactcagggcctaaaggggtatggtgttaaacgttatccaatcagggactct

SEQ ID NO: 78009 - DNA, 122 bp, Homo sapiens
actgaagaaagaagaaaactcaaggtcatctgagccagtaaatatcacactacagatttccgagacaagtcagacctgaccccacattttgggaactagcttaagaacagggctgccatctt

SEQ ID NO: 78010 - DNA, 122 bp, Homo sapiens
gtgttgaaccctcagcctgtggcagattgaggagctctgttgtgtgttccccagtagatgcgactttcttcttctctttatgggggtcggcaaacctttttgggaaagggccagggagttaa

SEQ ID NO: 78011 - DNA, 122 bp, Homo sapiens
accctctagtttacttgctcgggagaagaaactgactcgttttatttagtgcctatttagcgagcccagagtaacgtacatttgtgctgttttcaattttgtgctatcgcaaatcacaaaaa

SEQ ID NO: 78012 - DNA, 122 bp, Homo sapiens
aattgttttttttaaaacatagtaattttcttatatttttccaagcctcacatgtcagtccgttttaactctgtttactctacttcccaggtacacactctctccctctcttcctctccaca

SEQ ID NO: 78013 - DNA, 122 bp, Homo sapiens
ccccgctatatgggtagtaaatgtcaccatctccctctctggatgtcacaaaccataacacgggtggatgatacggggcgtactatcactaattccccaccggatattacgaacgatgtcac

SEQ ID NO: 78014 - DNA, 122 bp, Homo sapiens
cgccatgctccgtgcccaccggtagggtctgagggtttccctggaggggcaggttcagaccggagcccaccttgcagcctggggtgttctgaccgcccctctcagtgctccaggagctcttc

SEQ ID NO: 78015 - DNA, 122 bp, Homo sapiens
gatcctgcattatcaggagatacagagtcaggcttaaagccacagactccagcagctcctcgctgccctagcacagcgggcagggggagccaaggcgcagcatcgcctccacgctccgagac

SEQ ID NO: 78016 - DNA, 122 bp, Homo sapiens
gggtccacggcagccgccatcttggctgagggcaaagacgctcctggcgctcccgtctttcggcttgcctcagttgccactgccatcttggatcagggtaattcccgcctcttgggcgctcc

SEQ ID NO: 78017 - DNA, 122 bp, Homo sapiens
gctaggagcatgcctttgatatgcaaactaaccagccggagccatacctcctcttccatccgaggaggaggcaacattatctgccttattaccccaggccaggttccgggcaactagggacc

SEQ ID NO: 78018 - DNA, 122 bp, Homo sapiens
taaagacaagcttctggagtgtttgcccagtctccggggacccacgtgtgatcaccccgtcggggagcctatagaagcgtaacccagactttccatgactggagcagttgggccactctttt

SEQ ID NO: 78019 - DNA, 122 bp, Homo sapiens
tgcagttttgtctcagcttcctggggcaggcgtgctttgacagctgtgtctgtgttcaggcgtctacgtcttccttctggggtgaatcaagaagcatggaaggaggccaggcgcggtggctc

SEQ ID NO: 78020 - DNA, 122 bp, Homo sapiens
gagagcctgcagggccgcagcaagcaggagctggtgcgagactacctggagctggagaagcggctgtcgcaggcggaggaggagactaggaggctgcagcagctgcaggcgtgcaccggcca

SEQ ID NO: 78021 - DNA, 122 bp, Homo sapiens
gaattcccgtttgcttaagtgctggggtttgccttgcttgcggcgagacatggtgggctgcggggcgggcggcggcggcggcggcggcggcggcgggcggacgacggctcggttcacatcgg

SEQ ID NO: 78022 - DNA, 122 bp, Homo sapiens
gagcaagcaagaaggaggtcggtcagggctctacaagaagagagtcaggtggtattgatacgagtggaaaagatctttttatgttttatgcctagttccttgatacaaacttgtggtggggg

SEQ ID NO: 78023 - DNA, 122 bp, Homo sapiens
gatgtaggcggtgctgaaatgaccggctttgaagaacctgcaggcaaagtttcgtccaatcgtctgagcctgtcctcttattcccggttgtaactaaatactgttgcgagcgcagccgaagc

SEQ ID NO: 78024 - DNA, 122 bp, Homo sapiens
gggcggcggggggtgtggagaacgccacttgaacgcatatgggggaggacgccaggtgaacgcaaaaagaatggacaaggcctggtgaacgcacagagaggagaatgccacgtgaacacaca

SEQ ID NO: 78025 - DNA, 122 bp, Homo sapiens
gcgcggcacaagttcctctgcaccgcagctgggacttgggcactgccggcctgggtgtcccgcggacaggtgcccgtcggcgggcgctcaggctgcagctgccgctgtgcctccgcgctccg

SEQ ID NO: 78026 - DNA, 122 bp, Homo sapiens
cccactacggtttgtagtaggtgcccgacctgaccggcaggcccacagctgggatgcgggcgggccctgctcctgctgtggtacggaaacacctgaccccacgcacagcggtacctccccag

SEQ ID NO: 78027 - DNA, 122 bp, Homo sapiens
ctccctgccagaggccacccttgaagaagattccctgagacttaatgacctggggcaccccggactttcttaatcgtagctccacccactcgagccgggtgccttcgcgtttcccgttttta

SEQ ID NO: 78028 - DNA, 122 bp, Homo sapiens
cgatccaggcagaaatcggggccctgagtctgaatccgggttctgcaaccagggcagatgcgggcttgcctctgctccctgtccctggtctgagagcccattcttcccagatggtcacttgg

SEQ ID NO: 78029 - DNA, 122 bp, Homo sapiens
gggcttctggagccaggtgaagcagcactatggtgtggacatgagctgcctggagggcttcgccacgcgctgtctcatgggccactcggagatcgttgtgcagggattgtccggcgaggacg

SEQ ID NO: 78030 - DNA, 122 bp, Homo sapiens
ggcgcctgcgcactgggatccagtaagatttttctcacgctgtctgtccagcttgagtggcgcgaatgcgcacgcgccaattgcgcctgcgaggaagaagtcacgtggcagccggaaagcgt

SEQ ID NO: 78031 - DNA, 122 bp, Homo sapiens
cagtccctctcctgtgcctccacctgaaattaatacctgggtcatttctgcctgcaggggcgtttgtggtctgaattctagtgcctggcatgcagtaggtactcacacagctgtttgattca

SEQ ID NO: 78032 - DNA, 122 bp, Homo sapiens
cagaaatgaagacccccaaacccagggaaatctgtccatttttatgcttagattctcagccgtgtagaaatacgacgggacgagagggtatgacgcaacggtaatagaccgaggggcaccca

SEQ ID NO: 78033 - DNA, 122 bp, Homo sapiens
cttgaggtggggaagatggaaggatgcgatacccaatggggatcaaggcctttggcttcgcggcagattggcaggtgcttgaaccactgaaatgccgcagagggataccggcgctatggcag

SEQ ID NO: 78034 - DNA, 122 bp, Homo sapiens
gtcagcaaagctgagctcaccagggtgctcagtaagtattacctggtgatggtaattacacgacaatgaagagacaaagcaagagactagctccagaagctccctagtgtgaaaatgaatcc

SEQ ID NO: 78035 - DNA, 122 bp, Homo sapiens
aggaggagcagatgagagagaacatcaaagaaaagtttaaactgatgcttgctgataggacgggagtacagggccaaatcagtgcttcagaacagatctaaatgtaccagtaaagtggatca

SEQ ID NO: 78036 - DNA, 122 bp, Homo sapiens
cccgtggcctgcaggccacatgcggcccacgatatctttatatgcagcccaacataaattcgtaaactttcttaaaatattatgaggttttttttatttttttttagctcatcagctattgt

SEQ ID NO: 78037 - DNA, 122 bp, Homo sapiens
cctcccctaccgcatccccctcctccccacccccaggttccctcggctcgcggccctccgcgtcccgggctcccgccccagaacctgtgggcagatgtttcctccacgcagtaccctcccgg

SEQ ID NO: 78038 - DNA, 122 bp, Homo sapiens
cgggagacttgggggacaagggtgccctaacagataacagagcagtgctccagctgagagcgggggccgaggccggccgggggcgcagatctgtctgccacctccccgcttcctggccgacc

SEQ ID NO: 78039 - DNA, 122 bp, Homo sapiens
ccctggctgtccatctgaactgcttttcaggctcatatggggtgcgggggctactgaggacggacccctcctggggtgaatctgcaccacgagggggctggctggccaaccctggcaccccc

SEQ ID NO: 78040 - DNA, 122 bp, Homo sapiens
gatgtggggtccctcggctgaggctggggccgggacaagagcctggtgcccaccccaaaccggcccccgagtcactcacaggaaggccacctccacagccgagtccaccagcacgcccgccg

SEQ ID NO: 78041 - DNA, 122 bp, Homo sapiens
ggataagacgctggacctgccaggtgcggcagagccgaggacgggagagccttccttccccgcttcatttggggcctatttagccattcttttacatcagtttttccattaatttttttacc

SEQ ID NO: 78042 - DNA, 122 bp, Homo sapiens
ccggcggcagccacgcgcagggaggagcccggggcaccgtagcgctgcgccggcctcacgcgcaccctcgaggccccgcgcgcacccccgcggacccctccccgggcactgccccgcgcacc

SEQ ID NO: 78043 - DNA, 122 bp, Homo sapiens
gcagaaacaggagcggacccattacctatctccagagaaccagaaagaacatgaggtgagcggtgacacagggagattccagggactccagaaacccctttacggagaatctggggtcggaa

SEQ ID NO: 78044 - DNA, 122 bp, Homo sapiens
agacgccgcccagtttatgatcctttacgaccggcttctgccaagggggctcccgctggccggctggtccagcccactgccagaaggaggggcagtcgtttggcccaagttggactgagtgc

SEQ ID NO: 78045 - DNA, 122 bp, Homo sapiens
cataggcgctgactgaggtcctgggaacaagtctccagagggcagtggcactcaaacccacgtacctggctggcctcccagaatgtgagctgagcccaagcatgctgtgaagccaagatgca

SEQ ID NO: 78046 - DNA, 122 bp, Homo sapiens
gcggcaggagtacgtgaccaagggtgggggcgttggcccagcagccgaaggggtcttcagcgcgcccagacccctcggggctgcggggcggaagccggggcgtgacttccggcgccgccggg

SEQ ID NO: 78047 - DNA, 122 bp, Homo sapiens
gccagtatccgccttcactcccctgacagcatgttcggctgagacctgatcagggattggcggcaggagggcggagaaacgggagggtgggaagagagaaggtcgaggattgggccgaagct

SEQ ID NO: 78048 - DNA, 122 bp, Homo sapiens
gtgatcggaagagggcagccacatggatctttccctcctctcccttcctttctggttaaacgtaaaaaacagccgagtgcaaagggaagggctcaggccggcgcaggctgctccccggcgcg

SEQ ID NO: 78049 - DNA, 122 bp, Homo sapiens
cttggttatgttccatgttcaaagcactgtgtgtgtgtgatcaaaacaagtttcaacacacgtaacatagtatggtctctgcagttaagtgtcaatccaaagtttccttggaaaaataccca

SEQ ID NO: 78050 - DNA, 122 bp, Homo sapiens
gaaatggcctaatcatttcccctggtgactaacgctgcccaccacacaccaattcccctgcggtgggttaaccactgtggcagcacagctgtgtgcagctctcacacctaaacgtcccacag

SEQ ID NO: 78051 - DNA, 122 bp, Homo sapiens
ccgctgcctgtagctgagggctgcccacctcccgccctcacagaggagatgctgctgaagcgcgaggagcgggcgcggaagcggcggctccaggcggcgcggcgggcagaagagcacaagaa

SEQ ID NO: 78052 - DNA, 122 bp, Homo sapiens
tggtgtctcatcacagattttctgtaaatgctgcccacccccactgcctctgcctgatgacgtcctctgggtgcttgtgtgagaatcatgcagtgaccacatcatcacccacagctgatgac

SEQ ID NO: 78053 - DNA, 122 bp, Homo sapiens
ggctctgcggagatgtggccaccgggctccctccgcgtccctcgaggctgtggccactcccgctcctgcctgactttgggaccacagggtgtcacatccaatgtctcatttccgtaacattt

SEQ ID NO: 78054 - DNA, 122 bp, Homo sapiens
ttccagctatccacgctcagcgccagggaatatggagactataacatagtatgtggctgacgcaagttgcctacataactcagacgagagctccacaccctggggctgtgcctcgccacttc

SEQ ID NO: 78055 - DNA, 122 bp, Homo sapiens
ctcaatttctttctggtagtgtgtctttgatcagttcagacatttctcagacttcgtatacgccctcgtttgtagatagcgttatgtgttctctgaaactttttattgcttttcagctttgt

SEQ ID NO: 78056 - DNA, 122 bp, Homo sapiens
atctgcctggcaacctgatctcgacgttatatgattggttaaactctgtaagccccatgccgtgcctagagacgagaaacgctggggcgaactgacaggcccagatttaggagtcatgacga

SEQ ID NO: 78057 - DNA, 122 bp, Homo sapiens
tctccgcagaggctgcctgctgcgctcggccctcaagtgcccgggccggccttcgtgctccgaaacaagagacctgggagccctcgggaaacctcccccgacgctctctctcggaactcccg

SEQ ID NO: 78058 - DNA, 122 bp, Homo sapiens
ttaaagggggctcatttgaaaccctacctacagggctgccatccctctggtgaatgcccacgtgggtgacagtgattctagcccttgatttccttgagctgatggtgggcccctgggctgag

SEQ ID NO: 78059 - DNA, 122 bp, Homo sapiens
ttgatgtgagaaagactgagaacagaattgtctgtcttgataatcctcaccataagcctacgaaacaggtaatgttatcggcatttcacagacgaggaaactgttgcttgcacagttaagtg

SEQ ID NO: 78060 - DNA, 122 bp, Homo sapiens
tgtgtatgaaaccgtgtcaggctcaggagacctgtttctgtttctactggtgccaggctccgactgtagggagcattggcagttcacgcagatagtcatggcattcaaggcaaaagcagact

SEQ ID NO: 78061 - DNA, 122 bp, Homo sapiens
tgaccatggggggtggggcagctaacggatgtggcatggggcgggggaccaggccggaggcgggctgccgggaggggggattccctcgtgccccaagggcgaatctcaggtcggaggaaggg

SEQ ID NO: 78062 - DNA, 122 bp, Homo sapiens
agcttgggagagtgggacgtggacaggaacgtaaagaccgaagggtgggtttcgaaggagcggatttcgaagttgcaccggttgaggatggctgacattctctctcagtcagagaccctggc

SEQ ID NO: 78063 - DNA, 122 bp, Homo sapiens
ctgccttattcattagaggccttagaatcccgtcccttagctggttcaataatgtttgaacgaataaaccctgttccattcactagaaggctggattctgggtacaacggtaggggtagaaa

SEQ ID NO: 78064 - DNA, 122 bp, Homo sapiens
gcccgcttagaaaggaactctgaccgccaccggagagggcgtttgcccgagccaggagtccgagaggggtggaaagttctcacctatggtgaagctgtagccatcgatgctgaaagtggcgc

SEQ ID NO: 78065 - DNA, 122 bp, Homo sapiens
atttgaatgttttcaaatatctcagtgtttggcatcttgtaaaccaaacaggcagatgttcggcagacatttttccccccaggaatcatcctgatatttagcatcatgtataaaacaaccca

SEQ ID NO: 78066 - DNA, 122 bp, Homo sapiens
ggaggttgcctgaagtcccgcactccttaaattgctccttaaattgtgtggggtcagacccgtgtccgccctgctgtgggcctccgtgctgcgggttggagggtggccgattcctgagctgt

SEQ ID NO: 78067 - DNA, 122 bp, Homo sapiens
ttaataaacaaagagaaaacttgtctctatgctgtctcatgtactcaggcacaacttttccggatttaaagaaaaaaaaaacaaaaacctgtctctacgcctccattcccagggcgagctcc

SEQ ID NO: 78068 - DNA, 122 bp, Homo sapiens
gagaatgggcaagacgtgggggggctcttccctgaagaggatgcagacagccaatcagggcgtggcaggtgctccttgccagcagccgtcgggaaatgcactgagaccacaggcagagatcg

SEQ ID NO: 78069 - DNA, 122 bp, Homo sapiens
cgccccgtcggatgtgcccttcgctgggccgagcggcgcagggttggagagggaagcgctcgtgcccaccttgctcgcaggtgcccttgctgacctgggtgatggccttctccccgcggctc

SEQ ID NO: 78070 - DNA, 122 bp, Homo sapiens
aggagcccgcgctgctgaccctttgttggagcggggtgcattggctctcctccctcaacccgtcttgacacccgcagctgacaaggagaggtaaaatagggcacccaaactactctgcgctt

SEQ ID NO: 78071 - DNA, 122 bp, Homo sapiens
aagcccgtccgattgggcctctccgcttgaggacccgctgcggagctgctgcctggtggccgcggacgcccaggagcccgagggcgcgggcagcgactcgggggacagccccgccagcagct

SEQ ID NO: 78072 - DNA, 122 bp, Homo sapiens
gaggtgcccaggggctgttgaccgagggacaatgccctgtgtgtctggtggggctctggccggtggcacctccgcctgtggcctgcggccggccgcccagccagcacccacagggccagcta

SEQ ID NO: 78073 - DNA, 122 bp, Homo sapiens
tgcccgagagggagcgggtgcccaagggggtggtccctgtggcaggtcccggggtgggggcgcggcgctccgggaagagccttccgcaggtccccgccccgtcacgtgggcgccggccccgg

SEQ ID NO: 78074 - DNA, 122 bp, Homo sapiens
aaagatggggcttttcttgcctctttgggtgcttaaaaagaacagtcttgaggccaggtgcggtggctcacacctgtaatcccagtgctttgggtgaccaagggggggtggatcacttgagc

SEQ ID NO: 78075 - DNA, 122 bp, Homo sapiens
tgcccctgggtggggaggccaccgcatgtgatgtggtcagcccagccaggcctcgggtgccgatgttgatgttaaggaaagtggcctggctaaatatacctaaattacagtcccttgggagg

SEQ ID NO: 78076 - DNA, 122 bp, Homo sapiens
tctcatcccacgcggctccgctgtgagtcgggcgtcccaggagctgccggcccacccatccgcgggtttcttccgttgggggagccctccagactcgtagaatataagagagcgcccctccc

SEQ ID NO: 78077 - DNA, 122 bp, Homo sapiens
gctcaatgaaagtgatctatttgttttgcttatcaaatgatccctagtgtctgcctagaacggtgcctggcaaataataaatattttttaaataaatgaatgtaccttgcagcctagcaatc

SEQ ID NO: 78078 - DNA, 122 bp, Homo sapiens
ggccgagcttcggagtcccagggccggcagcgttgctccacaggcagctggtattaactccgtgtcggcgtaactgacccactgttggacaaggacagccgcccggctgccccctgggcccc

SEQ ID NO: 78079 - DNA, 122 bp, Homo sapiens
ctgcagaggcttctgggaattgtagttggggctctaaccctccttctgctcttcctttcccgtgctgcctgccaccagaggggccatggcaccccctacaggtactgggggtgggactggtg

SEQ ID NO: 78080 - DNA, 122 bp, Homo sapiens
cattagcgcagccgccgataaagcggggaggctgcatttccaaaggctccgcggccattacgggaaagttagtgtgaaacatgttaaattatccccaaagtggagggagcgggggaggcggc

SEQ ID NO: 78081 - DNA, 122 bp, Homo sapiens
tctttcctccagaaggagcagcgatgcctcgtccgcagttgacgcgtctctgaatcccaccgcagaccccccgctgggtccccactgcaactgcatccagtgccgtatttcagcacatgggc

SEQ ID NO: 78082 - DNA, 122 bp, Homo sapiens
ctgcacacacgattgcatttcctgcacgcagccccccggcggggcaggtcgagccgtttacggatggaagagaggagccccacaccttgttggaggcgccgtcagcaaaggcgagggcttct

SEQ ID NO: 78083 - DNA, 122 bp, Homo sapiens
cttacctcagttagtctccccctaaagtccagttaggattttataactaactggttggagcgtgttctggtcgtgggcagttcagttgcactgaaagaaatctctccagtacggagaagcac

SEQ ID NO: 78084 - DNA, 122 bp, Homo sapiens
aagacacaaatagagccaagatcgactttcttaggaagggggagaggagggaactcttcacgaagggaggtgggagtccacctcagacctctattggaaggaaatcgagttgttccggggga

SEQ ID NO: 78085 - DNA, 122 bp, Homo sapiens
gaggttcaaaaatgttgtgatttatgaaaaagtcgaacactacccgctctcacattaacccgaccaagtcttccggagtttccctggcacccgcgcaggccctaacactagctgtctctgct

SEQ ID NO: 78086 - DNA, 122 bp, Homo sapiens
cacattcgctgtgggtcccggccacggcgtgcagctgccctcaggccgcctgctggtacccgcctacacctaccgcgtggaccgccgagagtgttttggcaagatctgccggaccagccctc

SEQ ID NO: 78087 - DNA, 122 bp, Homo sapiens
gtgggtgtgtgtgtgtgtgtgtgtgtgtgtgtgtgtgtgtgtgtgccggctccgcgcatgcgcctatttcaactccagccacagcctggggccaagacagtgtcttcaaaagaggcccctga

SEQ ID NO: 78088 - DNA, 122 bp, Homo sapiens
ggggcgtccggcgcgggctgggctgggctcgggcgacccccttccccggggcggacggtgcggggacccccaggacagcaacccccgacgagggccactcaccctggcgacccacgatctcg

SEQ ID NO: 78089 - DNA, 122 bp, Homo sapiens
gggggggtcggaaggggccaggtgtggccgagagcatttacctggctgcggaggcagaagcgcaggggcaggaggcacgagaagaggtacttgccccatcggatcacgcaggagaagcacca

SEQ ID NO: 78090 - DNA, 122 bp, Homo sapiens
ctgcattcggggaagtgtagttccatgcgtttgaggcggggtcccggctgagctgttacgcgcccacatgccacaagagggcccctgtgagctggagggccccaggttcctggttataggga

SEQ ID NO: 78091 - DNA, 122 bp, Homo sapiens
ctggcttggctgcctctccctgccgggcaggggccaggaagcctgggtgtcaggcagacccgagccaggctctgcacagcagggcattacgcgccccacgcatcctcttccatccccaggca

SEQ ID NO: 78092 - DNA, 122 bp, Homo sapiens
gatttgttcaaggtcacacaggtagtcgacaatagggctcgacgcccgggtccggctccgcgtagggcatggcgctgccttgcaaaacagccacacccgccagcgacattcacaacccaccc

SEQ ID NO: 78093 - DNA, 122 bp, Homo sapiens
gcccaggttcactgagatgagtagtctttgtgaagctgtagacaggctacataatctccccgagcttcactgtttacattggtgaaacatgtgggttagactagaaaatctctagggtgcct

SEQ ID NO: 78094 - DNA, 122 bp, Homo sapiens
ctgattacaatgctttgaggagaaaaaagatcctgagttcgttcactccccacatgtgtacggattctctgctgtaagccaagtcctgcattaggtactgcaggtacaaagatgagaaagac

SEQ ID NO: 78095 - DNA, 122 bp, Homo sapiens
ccaggtaactgggccaccgtggccggggaacgcagacgcgccaccacctcccggccggcccggaccctcaatctcctcggcgtctttggaagatccgaggcccaggactggtgccaggtctc

SEQ ID NO: 78096 - DNA, 122 bp, Homo sapiens
gtaggcgcccaggtacccagcctgtgggccttgggagcccgccaagctgctgatgaaaggcgctgccagattaaccctttcttggccgcacccccttgctgctgccggctgccgggtggtcg

SEQ ID NO: 78097 - DNA, 122 bp, Homo sapiens
ccacgtcctgtttcagcaggaactccgccatttcccacaggttgatgctgcggcacaaagcggcgctgctcaggctcagcgcccaccatcatttctcatttaactccttttccttccacagt

SEQ ID NO: 78098 - DNA, 122 bp, Homo sapiens
tcccccgcctccctgtgaataaataaaatcctaagtgtctaggtgtgcggtcccctctcgcgctccctggctcccctccctacctcccccaggcggctcgggctggagaaagcagcgcccgg

SEQ ID NO: 78099 - DNA, 122 bp, Homo sapiens
atccattctctggtacagtcagaccaagaagctcaggccgtggcagagccatgagccagccgttgaggaaggagctgcaggcacagtagggcttcctggctaggagtgttgctgtttcctcc

SEQ ID NO: 78100 - DNA, 122 bp, Homo sapiens
gcatggttctccctgtgcacagcgctgccatagccatagtgggcatggctcccctgtgcccggtgctgccatagtgggcacggttctccctgtgcccggtgctgccatagtgggcatggctc

SEQ ID NO: 78101 - DNA, 122 bp, Homo sapiens
gaacagaaataacacttttcgatacgcatgttgaacccgcgtgtaaccccaccaaacaaacgccaagcttgagaggaagtgatgcaaccccgtcaccggaagttaccttcttcccccttccc

SEQ ID NO: 78102 - DNA, 122 bp, Homo sapiens
aggctcaggtgtgggcggcggggccggggcagcacgggttcccggaccgctgcctcccggcgttggcaactcctccacgtgctatccaggaagtaaacaacatcatgaggagcgacttcttt

SEQ ID NO: 78103 - DNA, 122 bp, Homo sapiens
cggagcacggcgaggtcagaggaaggggagcggagtcccgcctgctggccggctgccaggcggagctggagcacctgggcaccacatgtgccctctgctcggggaccgctgttgacccgaca

SEQ ID NO: 78104 - DNA, 122 bp, Homo sapiens
tacatttactagcaagaaaggcatgtcttcagcaaccatccacgtcagagaacggcgaagcgctggtagcagagcgtaagcagcccttgggtgcctgcacctgctttccagtgagcctttta

SEQ ID NO: 78105 - DNA, 122 bp, Homo sapiens
ctaaggtcctcagttccccttgcactccttggcaacagtaggctttttcagtcaagcccccgccacccccgcactgcctgcaatggcgctgctgctcctctagctatgtaaacaagcactgc

SEQ ID NO: 78106 - DNA, 122 bp, Homo sapiens
cattcctcctcctaacaggataaaaatcttgactctctcctttgcatcagctccccaccccgcccctgcccaaggaaataaatgctctgacttttccaagagtgcgaaaaaactaaaattag

SEQ ID NO: 78107 - DNA, 122 bp, Homo sapiens
tctgtgctcccagtccctctcaaccattcagacatgttgattacttcagtattttgggcacgatgagaaaaatatgggcctcttgagcaatactccaggtagctgaaggagtcagatgctct

SEQ ID NO: 78108 - DNA, 122 bp, Homo sapiens
aagaacacttagacttcacatcacttaaaaacattttttgttttaatacagatggggtctcgctatgtgcccaggctggcctcaaactcctgggctgaactcctcctccccaactcggcctc

SEQ ID NO: 78109 - DNA, 122 bp, Homo sapiens
ccaggtgcaggaggtcagcagcgacggcgggtgcgaggccgccctgggcacccactaccgcgcctatctcctcaagtgccacgagctgccgttttatgggtaagagccacagccccgcggtc

SEQ ID NO: 78110 - DNA, 122 bp, Homo sapiens
tttgatttccttaggtaagcagtattttatgtgtttctaacacttaaggagaggcagaaacgaagtttcccagagaatcatgcaggcgtaaaggtgcaagaggccatggaggttgactaacc

SEQ ID NO: 78111 - DNA, 122 bp, Homo sapiens
tcgacctggttaactagaaagggcgaccagtgaccctgacctggacgcgctcggattggtcgattccagtgcagtctcagatgagactcttctatgattggccagaaaagtcaagcgggaac

SEQ ID NO: 78112 - DNA, 122 bp, Homo sapiens
taaggatttgtttcctgagggagcctcttttaacataattattttttaaaaaaacaaatacgtgataaaagagttgaaatcatctacatattataaatttggtatagttatattttgaatgc

SEQ ID NO: 78113 - DNA, 122 bp, Homo sapiens
caacgctgagccgcccacctcagtcgcccacctcagtctccgggaagaaaagcctccgggcggccgctaagcctgggccacagttcccagccaccacccacgccgccacaaccacaaccgca

SEQ ID NO: 78114 - DNA, 122 bp, Homo sapiens
tccaggaagagcatactcaccatcagtcccaagcctcgatctgcagcagtggggtgtggccgtgagccctgtgcttccgagggctgtgctgagtcctcttttagcctcaaggcatctcttct

SEQ ID NO: 78115 - DNA, 122 bp, Homo sapiens
cctttggaatgcgggatgcggtccagataaggccatcgcagctcagagaggctgttcagccgctgttcgattcctctggtgacaagaacactctacttttggaagtagcacttctattagag

SEQ ID NO: 78116 - DNA, 122 bp, Homo sapiens
ctacctgtggcccaaactctaaacttatatattaaagtcctttatttagagcagaaaagccggccttgacctccactgtctcagaaccgcgagaaggagccccggacgccgcagcggaggca

SEQ ID NO: 78117 - DNA, 122 bp, Homo sapiens
agtatcattcttttttttgagactgagtcttattctgtcacccaggctggaatgctatgtcgcgacgtcagctcgctgcaacccttgcttcccgaattcatgtgatcctcctgcttcagcct

SEQ ID NO: 78118 - DNA, 122 bp, Homo sapiens
tcctcccacaaagtatctagtgataactgtcatagctaaggaaatggttggaattataggcgttcctagttcagttcaccaagagggcctggaagcaatgacagtgcagtagcaatcagtat

SEQ ID NO: 78119 - DNA, 122 bp, Homo sapiens
cgctcggctgaggcgctggacaagtggcttgggctcccgcgcctcagtttctctctgtggcgccgcctacctcacagacttgtgagcactcactgacgtgggtagcgcccagggcctgcggg

SEQ ID NO: 78120 - DNA, 122 bp, Homo sapiens
gagacaacacatctgcacagaacaaggtcccagggaggctggtgctgccggcctggggagcgcccccagcacaggcgcgtgcttccctgatggacacgtcaccgccccgggctccagaaaat

SEQ ID NO: 78121 - DNA, 122 bp, Homo sapiens
cagccagtgagaagggagactaatggcttggcgggcagcgcggggaggtggtggcagcctcgagcttcaccccagaagttagagaaggggaggggaagagggtgtcagggaattttggggag

SEQ ID NO: 78122 - DNA, 122 bp, Homo sapiens
gccccagctccgcgttaaaggggtttgccgcccgcagggggcgctgcggtgcagaggcgacgctgccctttcctctccagggccgagcggggggtttgccgcccgcagggggcgctgcggtg

SEQ ID NO: 78123 - DNA, 122 bp, Homo sapiens
caagttagtgcattcactccttatcatggctcttgaggccttcttatatcattttatagacgagtcaaccaagactcagagaagtcagacgacacaaagccagtgggtatctgaggtgggtt

SEQ ID NO: 78124 - DNA, 122 bp, Homo sapiens
caggagagaagtggatgggccctatacctccagccgtgaatgccagactttaagattgcccggaggaagcaaactcttcgtataaaaaaagcaggccatctgcttaacccttggctccacca

SEQ ID NO: 78125 - DNA, 122 bp, Homo sapiens
tgcatttgcgcgaccctccaggcggttcccgagcagctcaccgaacaggctctgcagggccgctggaggtcatggaaaagttttaggcagcagattttacattgaaagccttagctaccggc

SEQ ID NO: 78126 - DNA, 122 bp, Homo sapiens
gcgtctctttctctgtttgtttttctctggtctctggctgggggtctcattctgtccctccgtctctgcgcctctcagtctttacatttctgtctcttgtgtctgtgacgccgttgtctgtc

SEQ ID NO: 78127 - DNA, 122 bp, Homo sapiens
tcgttgtcctcgatggaacgtgggcgtgctccaggaaggagttgcagcgagcatgcgtcacgccctccgcgtgattttccattttcctgtcggggagcagcacccgctatggctcttcctcc

SEQ ID NO: 78128 - DNA, 122 bp, Homo sapiens
ccttcttacttctctactaaatgccactgaattgtttacttctgactcctgaccatcatccggggatgtcaggactaagatgagctgttaagtggaagttgtccagggagttcttggtggct

SEQ ID NO: 78129 - DNA, 122 bp, Homo sapiens
cagtacagggcgatctcaggatgttcaccctccctgcgtctccgcgcgggccaggctggccgggctcagctgctccaagtccaagtcctaatatggaagtcgtgccccgccgcagagccgga

SEQ ID NO: 78130 - DNA, 122 bp, Homo sapiens
aattcaatcgtgttaggccagattacatgctcataatacccaggtgtatttaaaagcacccgcgtttctaaacctcccgcagaaagtgggaagcaatcgccccctcggacctggcgccgctg

SEQ ID NO: 78131 - DNA, 122 bp, Homo sapiens
ttaaagaaatccccctaaagtcccatcccaaggtcacatagagaacgaatggctaagtagcgacaagaacccaagtcacagtctgttgatctcactaccatgctatcctgcctgcccccatc

SEQ ID NO: 78132 - DNA, 122 bp, Homo sapiens
atgctcccaggaggaggacgccaggctgctgaggcctgtggctgacaccagggggcagggcggggcggcggggacagcgtccggaggagggagccgcccagacctagcccgggtggggcgaa

SEQ ID NO: 78133 - DNA, 122 bp, Homo sapiens
ctggagatgtcagggaaataccacattcctgcgctgaccttttctctttcaccgtttaaccggtacagaataaccctgacccagaaagacaacagggttccatccggctttcctcccgtgcc

SEQ ID NO: 78134 - DNA, 122 bp, Homo sapiens
tggcaggggccctgcaggggcccagggctctggcctctgtccctttgtgtgaacagaacacgagtgcaggtagagggcgcggcacatgccagctgccctcactagcagctcaggtgagcagc

SEQ ID NO: 78135 - DNA, 122 bp, Homo sapiens
ggatgacctgatttttcatatttatcaaactaaagtcaactaaagcaatgtttatcaaagcgggttgtgacccatttgtgggtcacagcttcttaaaaaaagaaaaagccaggcgcggtggc

SEQ ID NO: 78136 - DNA, 122 bp, Homo sapiens
gagggcggggagtgccttggccgtggcttgggggtgtcaccctgccggcccagcattggccgggaccctccgtgtgcccagcggggttttggggggcagagtgatggtggagatgttgcctc

SEQ ID NO: 78137 - DNA, 122 bp, Homo sapiens
tatcggggtgactgatgttgacgtacaccctctcgcccctccggagctgcaccaggccgccgaaccccacgctcgtgtaccagagaggcccgtacccttgtctcctggccgggtccagcact

SEQ ID NO: 78138 - DNA, 122 bp, Homo sapiens
acctcatctccccagagaccaggagatagactccccagggccacagcacaaagaggccagcggtccccaaataacaagctcaagcttgcatccccactgtccctcagctccgcccatcagag

SEQ ID NO: 78139 - DNA, 122 bp, Homo sapiens
agaagtatttacattggagccgtggttttagctctcttttggcaattgattaatttagtgcgagagccaataaatccctggacagatgaggaacagattggaggggaggagcttctgtttcg

SEQ ID NO: 78140 - DNA, 122 bp, Homo sapiens
gtgtcttagagacacacacctaccacgtacatgtacaaactgggtggcaagtgcctcattcggtcagacagacaccgtggtatgtatgcctagtttgtgcctgtagttgaaaaaattgctta

SEQ ID NO: 78141 - DNA, 122 bp, Homo sapiens
tgcttagacttggagtgtcttcgtccaaaacctggaaggccatgagacaaatgatgggcacgcaggtactcttggctcccatcccaagaaggcttaacaaacactatattccaaaattggtt

SEQ ID NO: 78142 - DNA, 122 bp, Homo sapiens
aggtcacctgaccggtctcctttgctgtcggcgccaagtcctgcaagtttgcttgagagacgagaaaccagcaagagttgggcaaactttccaaaccaggcttttccttcagtgtggaatct

SEQ ID NO: 78143 - DNA, 122 bp, Homo sapiens
cctggcaatggggcagggaagtatagttcctccacttacagggaggcactgccaatcacacggcagtgagtggggctatataatcctctccaagggaagggagccaatagttattaacaata

SEQ ID NO: 78144 - DNA, 122 bp, Homo sapiens
cctgcagtgttcctcttgcgccctctcctgacaaagcttaacttcggagctggagcaagtcgtatccggcattgcagggaagagtgaatttggcctgtgatccaatcagaagctgcgattct

SEQ ID NO: 78145 - DNA, 122 bp, Homo sapiens
aattgtgtattccttgtctgtgaagtggggctaattaatgatccatgctttgtgggctagcgtgactctgaaatgagctaatgtttgaaggcctgttattgaacccagagaaggggcttcat

SEQ ID NO: 78146 - DNA, 122 bp, Homo sapiens
cagctaattttattttatttttgcagagatagggtctccctgacttgcccaggctggtctcggactcctgggctcaagcgaactcctgggctcctcctgccttggcctcccaaagcactggg

SEQ ID NO: 78147 - DNA, 122 bp, Homo sapiens
taaaatgatcaaagctttatgaaagacagacaaagaattatggaggacagatttaaacgccgcagcataatccacagacattcatcccattgatttggctgtagtctttcctgccatcttct

SEQ ID NO: 78148 - DNA, 122 bp, Homo sapiens
gctgtcacacgcacagtgggtctggggcagcgcagtgtgcggtgggcaggggctgccctgcgcctggaggcactgccgggtgggcgggcggagggattgaccccacccccgtcccctccaac

SEQ ID NO: 78149 - DNA, 122 bp, Homo sapiens
ctgtgatctgcctgcctcggcctcccaagtgctgggattacaggtgtgagccaccacgcccggcctactccctgaattttctacatgaggcaacaggctcaaagaggttgatttgctcaagg

SEQ ID NO: 78150 - DNA, 122 bp, Homo sapiens
ggctttctctgtgacaggccggcaggggagtagccctccctccctaagtgggggccagcacgggcgctgaggcctggaggcaagactgtgtgcgaagggctctgtggatggatcaccaggac

SEQ ID NO: 78151 - DNA, 122 bp, Homo sapiens
tctggagtttgttccttctgatgttcggttgtgtttggagtttcttccttccggtgggctcgtggtctcgctggctcaggagtgaagctgcagaccttcgcagtgagtgttacagctcttaa

SEQ ID NO: 78152 - DNA, 122 bp, Homo sapiens
ctataggtagtcaggggtggaggggggtggtgctgggccttgtgcctcagtttccccgagcgtggaagctggaggagagcacgggttttcagaaaaagactacgattcccagaagctcccgc

SEQ ID NO: 78153 - DNA, 122 bp, Homo sapiens
caggcggagcccaaagccggtgatgcagggtgcgcagggatcccacctggagagtcggggcggcacgttgagaccccaggggtgaagggcgggggatcccaatcccagccctgttttcccct

SEQ ID NO: 78154 - DNA, 122 bp, Homo sapiens
ccttcctcctccagtcagctagagcaagattactcatccctggagttccttctcctcttccgagtgcagctaggtcctgggattggccagggggatcgcctcagctctcctggctgagtcac

SEQ ID NO: 78155 - DNA, 122 bp, Homo sapiens
ctcttttcacccctctgcctttccaaaacattgacaagactcatttccagttaattaattcgagaaccctccctcttcattttgggtactgggctgtcttgtcactgagccctatccctttg

SEQ ID NO: 78156 - DNA, 122 bp, Homo sapiens
gggcgtcacctctcctgccccctcaggccggctttcctgatgaaaattgggttagagaatcggtgctgtggttggggcctgaaagttattacatgacatcctggctaacacggtgaaacccc

SEQ ID NO: 78157 - DNA, 122 bp, Homo sapiens
taactaggtttagggctagagccagagcacatgctggttggcctgaatctcaagaagttacgtgatagaaagtcctccattctcatcccggaaatccccacactcccagacaagtcagaatg

SEQ ID NO: 78158 - DNA, 122 bp, Homo sapiens
tttccacccgccggaaccgtgctgcgtgggagggggcgtccctacctggaaagctggggacgctgggagactcacagcccggaaaacaagggtgacgcacccactcccacctcgacccccgc

SEQ ID NO: 78159 - DNA, 122 bp, Homo sapiens
acaaaagaaatcttggcctcactgaaaggaaaagttcccttgtccccctggcaaggcgtgcgacagcgggtgtggctcgctttttcggtgcccggctgctcaaacctctagaggggagcatg

SEQ ID NO: 78160 - DNA, 122 bp, Homo sapiens
tgggacaaaataagattaaaacaggagtcttcgcgtgagcaagttcagaggcgtggagggcggtgtgttcccgggaaggttgatgggtagaggttaggggcaagggcagggggttggaattg

SEQ ID NO: 78161 - DNA, 122 bp, Homo sapiens
tcggagccccggagcccctcacttcccgcgcttcgttaaggaagggcaggcatctaggggcgccaggtaggtgcagaaaggcagggagggaaaggaaactgcacccaacccagcagtgtccg

SEQ ID NO: 78162 - DNA, 122 bp, Homo sapiens
gcgctcactaccgcgcccaccctcgccacggccgcgcggtccatggaccgggccctcatgcgcgtccaggcaggaaaaaaacaggcaactctcggagactgcgagtctcggaagcgcgggat

SEQ ID NO: 78163 - DNA, 122 bp, Homo sapiens
cgactgcgtctccctcactgcaaaggacagtgtcgcttgatcccacgtgttaaacgactgcgtctccctcactgcaaaggacagtgtcgctggatcccacctgtgctcttaaacgactgcat

SEQ ID NO: 78164 - DNA, 122 bp, Homo sapiens
caagtaatacacaggggaccatacaaataattgtttgggtttggaatgttttaacacaaacggtaatgaaagaataaatagatgaatgaagaataaataaataactttgttcctcatgcctt

SEQ ID NO: 78165 - DNA, 122 bp, Homo sapiens
cgcaggcccctaggaggccaggtgaggccgcgccccagcttgctccggagctgcaggaggcgccctggtctctgcgcttgacatcacccccgccccccgccaacacccggcctccagtcctt

SEQ ID NO: 78166 - DNA, 122 bp, Homo sapiens
tgggtatggtgtttacgtggattttttttctagggggcggatggatgggcgatagaaaaccggagggggcttctcgccaatggccgagttgagctctgttttctgtcttccttcccttgtgc

SEQ ID NO: 78167 - DNA, 122 bp, Homo sapiens
cacagctaaccgactctcttaaactcacatttaatggtatttaacttggtgagacaagtacggtagacaaacaaaatataagtgctgagcattcagtacaggtgtttgtctgctgaaaaatg

SEQ ID NO: 78168 - DNA, 122 bp, Homo sapiens
taaaacccccggggcggcggcgaactggctttagatgcttctgggtcgcggtgtgctaagcgaggagtccgagtgtgtgagcttgagagccgcgcgctagagcgacccggcgagggatggcg

SEQ ID NO: 78169 - DNA, 122 bp, Homo sapiens
ctgcttctctagccagtaactctccaagggcctcatccacttccgtaactttgtcatctacggccaatgaccttcacatctccattccagccctaacttctccccagatctccaaatgcctc

SEQ ID NO: 78170 - DNA, 122 bp, Homo sapiens
aggtaggtgtggccctggtttccaggacaggtggccagactgctctgtgacaaagggccacgcctgcccctgggaggggtattgggctgccgcccgcagatgttgcagtaggaactgaagaa

SEQ ID NO: 78171 - DNA, 122 bp, Homo sapiens
ggttcccggcgcagtcaggggcctgggagcggtgacccttttaggtctgggctagggaagcggagaaaccctccgccggcggatgcaggagctgagggagagccaatatcgctgtgaggccc

SEQ ID NO: 78172 - DNA, 122 bp, Homo sapiens
gagcactctgctgggtcctggggacgcggcgcagcgtggttccaagcgctccgcagtcgccgggcaaccacaatggggctgccttgccgtgagaccctcccccgcgactgccaccaaagtca

SEQ ID NO: 78173 - DNA, 122 bp, Homo sapiens
ctctgctgatacccactcatgctgggcttctccttgggtttttcatagtgaactcatattcgagtgggctcactatctggaactcctgagggcccctgttgggctgttttctttctggaagg

SEQ ID NO: 78174 - DNA, 122 bp, Homo sapiens
ctgtctgctccaagaggacatggtagctctgctcttttgcttctgggttgtcctggcctgcggaggtggccttatacctgcctggactgggggcaggggaaccaaccctggggaagtcccca

SEQ ID NO: 78175 - DNA, 122 bp, Homo sapiens
agatgggtgggggcactctcggggaggtgggcggggtcgcttccaggaggtgggcggcgtcgctctcaggggtactgcagtggagcctgctgccaacatcctctggacactgttacttctct

SEQ ID NO: 78176 - DNA, 122 bp, Homo sapiens
ggagggtctggaagttgctccttctctcagaccaaagctcagcagctcagcctcacggggcggcgggtgggggggggcgggggcgggggcaggatctccgtggtgaccccacctctctggcc

SEQ ID NO: 78177 - DNA, 122 bp, Homo sapiens
ggctcggcgggaccccggggatgcgcggctgtccgcccgccctgtcgccgggatcgggcgcggtctgcaggactgcgggagcccagccgccctggtgacagaggacaacaatctcagcccgc

SEQ ID NO: 78178 - DNA, 122 bp, Homo sapiens
agggagaggtagaggtcctacacctgccaggtccccctgggcaggcattgagcgtctcaacgggttccaggtggtggaaatggagcgggacagggacaccaaggcaggtgcagtgtgggcgg

SEQ ID NO: 78179 - DNA, 122 bp, Homo sapiens
ggcgctggaagagactttggggagtgggtccaacccctcctgcatataggcagactgagccgtccatttaccaaaaaggggaggaagcgtgaatgaaggcaacacttggcagctgtcagggt

SEQ ID NO: 78180 - DNA, 122 bp, Homo sapiens
aagaagaaaaggaggacccaaataagaaaaaagaatagcatgctgaatgactgaatagctcgtgaattacaataggactttgagttgccaaagctgactgcacaatagaatccattgttctc

SEQ ID NO: 78181 - DNA, 122 bp, Homo sapiens
agtcgactctggttggaagggtccagggaaatggggtcactcggggacgtgggccgcctccgggcgggcaacgcctgagaagcacgcagcgctcggcgcccagtgcgcccccacgagcgggc

SEQ ID NO: 78182 - DNA, 122 bp, Homo sapiens
cacggcggcgccgtggtgggggagctggggaggggcgggactgggaagagacccatttggcgtttccaggcaagtaaggaaggtcactcctcgtccaggtggggagccatgcgaacccagat

SEQ ID NO: 78183 - DNA, 122 bp, Homo sapiens
acagcgggcttcggcccgatttgatgtatgtttgcgtctagacgtcgtcctcactgtcatcgcgctttgctttgccaccctgacccgaattcctcgtttcgcgtcttgactgttagctttcg

SEQ ID NO: 78184 - DNA, 122 bp, Homo sapiens
aagcaccctcgcatgggcctcctctccccaaagggccactccaaggcgtgaggtacagcccgccctgccggcagaaaagcgcccccaagcttaaagggaagaagccgcagagtgccggggtc

SEQ ID NO: 78185 - DNA, 122 bp, Homo sapiens
gttggagctcaagtcatgctttatttcggggttccttggccaatggctaaggcagtgacacgaagccagtaagacaagtcgcaagtaggcctcctctaatatgcaatctttgctccagagct

SEQ ID NO: 78186 - DNA, 122 bp, Homo sapiens
ctcccaaggggagagctgggcatcctgctcagctcaactccccggaaattctttcctctgcgccgcgcgggtccgcccggcctcagccagccacgtgcccccgcccgccgcgcactcctccc

SEQ ID NO: 78187 - DNA, 122 bp, Homo sapiens
atcaggggtctttagatttcgtttctgatgccccacccctccacctaacagggaagctcacgaatctgcctagagaaagtatcttgtttggagcttgctggctatttttagccagtattttt

SEQ ID NO: 78188 - DNA, 122 bp, Homo sapiens
ctggaccttttaaaatgtatccaagtctaattcctcatttgtttctagtttatttgtcctcggttttacagcttacatagtttggagtttcctgtttagttttgtttatttttaactccttt

SEQ ID NO: 78189 - DNA, 122 bp, Homo sapiens
acacacagtgaatataatttttctgaacaaggccttctctggtcaaatctggccttcggacgatcaggctggtgggatttcagacacacatcactaggcccaccttcctgccttatctaaac

SEQ ID NO: 78190 - DNA, 122 bp, Homo sapiens
ccagctggacaaaagagacattgttcatctgaacagcgacattgttacagcccccgctttcgctctcctgcttgaattcatgtatgaagggaaactccagttcaaagacttgcccattgaag

SEQ ID NO: 78191 - DNA, 122 bp, Homo sapiens
aagaaagccacctgtctgggatctaaagtttccaaagttttagcttggccaaggcccctgcgctacaatcaccctgattcgaggtgtcctggaggttaccagttccgcgtgcgaagttctgc

SEQ ID NO: 78192 - DNA, 122 bp, Homo sapiens
tgcttgtgtgcttgtgtctgggtgcatgcatgtttctgtctgtgttcatttagaggcatgcgtatgtgttgttacatatatcgtgtggggatctatgcatttgtgtctgcgtatatctgctt

SEQ ID NO: 78193 - DNA, 122 bp, Homo sapiens
agaggcaccgtctggggcctccgagccagggtccggggatgccaagaaagagccaggcgccgagtgcttccacttctcgctgtgcctgcccccgggcctgcagcctgaggacgaagaggacg

SEQ ID NO: 78194 - DNA, 122 bp, Homo sapiens
gcagggcgaaaggaggctgtgtcctcagcctcctccctcggcacgcgcctcccatcctgacggggactgagagcccaggagagctcggggcgtgtccaaactgccgcgccgccctgctccgg

SEQ ID NO: 78195 - DNA, 122 bp, Homo sapiens
cggtgcctggcaacccgggtggaaattaaaatgacaaagcggctagtccagcatcttgaccgcggcagatctctctagtcaccctgcagccgctcctcacccacaaattcacaagcagccaa

SEQ ID NO: 78196 - DNA, 122 bp, Homo sapiens
gtcccactgcacactgacagggctcctctagacgccaagccacaacccaccagtggtgggcggcccctggaggtgctggagaagcctgtgcatttgccaaggccgggacacccagggcctag

SEQ ID NO: 78197 - DNA, 122 bp, Homo sapiens
cgcccgccgctgtggggagggtgcggcccgagacgcttggagggcggcgggcgccggaatcgcagcctgctgtggccacttgcccgcactcttgcctgactgaccattttccgctctggcta

SEQ ID NO: 78198 - DNA, 122 bp, Homo sapiens
aaacagaaggagcggcagagacggggcagtgctagagagacacaggatggaggcactgcccgggacccacccagccacccctcatccagaccaaggagaagggcccagctctgcagcacccc

SEQ ID NO: 78199 - DNA, 122 bp, Homo sapiens
tataaaaatatatacttattagtatatgaaaaaatgtgagaaccagagcatagggccaggcgttgggagagctcccacataggacaagatggcatcttctgcagagctggacttcaacctgc

SEQ ID NO: 78200 - DNA, 122 bp, Homo sapiens
gctggactcggcgtctgtccccaggatgaagacaagcctgaggacgagatggcccaaaagcgggccagcctgctggagcggcagcagcggcgagcagaggaggcgcggcggcgcaagcagtg

SEQ ID NO: 78201 - DNA, 122 bp, Homo sapiens
cagtggcgcgcgggctttggtcggtctgggggtcgttctcgcctcttcttcacactgctccggaggcgtgttttaagactgatttagattcaggcccaaagtattcttacagtaaattagga

SEQ ID NO: 78202 - DNA, 122 bp, Homo sapiens
cacttggtctgatgattggtgtgggggccacctcccggcagggtgctggtgcccgggccccgtggccttgtgtggcctggctccgtgggggccacctcccggcagggtgctggtgcccgggc

SEQ ID NO: 78203 - DNA, 122 bp, Homo sapiens
tttcctagaccgggtgcggcaaaccctccccctgcctcccgccggccccgaggcctggcccgggtcatctccctggaattgagtctggggcagggagagccagcctttccgggggctcagtt

SEQ ID NO: 78204 - DNA, 122 bp, Homo sapiens
gacggtcatttagttttattctcctcccgtgactcccctctgtacactcacaggggaggccgccggcatctgggctgaaagaacccttggcgggcgaggagagcagggtgtcatgttggcga

SEQ ID NO: 78205 - DNA, 122 bp, Homo sapiens
aactttcacatgcttgctttatggccttaactaactgatgtcattacttaactgtccccgcggggacggggaactgaatgtattttcacaaacgtcagttcaagacagatttgtgggagaaa

SEQ ID NO: 78206 - DNA, 122 bp, Homo sapiens
gtagttcaaagaacaccctcgggagcttcacaaggtcggtgcctctggatgtgtgccccgcggccacaccctaaagaaacccagtagcaaagatctccccaagatctccactcagaccccaa

SEQ ID NO: 78207 - DNA, 122 bp, Homo sapiens
gactttcatacaccttcacctcaaaggctttcttgcacctggaaattaaatattacatttcgaattcccatttttatttgcattttgttgggcatcttatatgtaggaatggtccaagaaga

SEQ ID NO: 78208 - DNA, 122 bp, Homo sapiens
ccgggaccggagtgcgaggtccggcttacgtggtgaaacaaacttttatgttcccaagcccggccgaagacacccgcctgaaccacgccggaccacgtgtgcacgacgtacgtcacttccgc

SEQ ID NO: 78209 - DNA, 122 bp, Homo sapiens
tctgtgcccaggcctgagatctgtgactctataactcagccagtggcctcagttagttgccgcccactctcactggagttactatgccaggactgactccaatccaccctgggaatgtagcc

SEQ ID NO: 78210 - DNA, 122 bp, Homo sapiens
gaaggatgagtagaagtgtacatggggaagtgtgagggaacagcatatgcagaggcatcacgctgtgcttgtcagagaccagaggcagatagagccctgacttgtcttactccttacaaata

SEQ ID NO: 78211 - DNA, 122 bp, Homo sapiens
ttgggaggcgccctgcacacgcctcttctttctgaaatctccgacctttcggatttgagccgcgagggaccgcggagcaagggcagcctcctccggaagcctcgggtcactagagaccccta

SEQ ID NO: 78212 - DNA, 122 bp, Homo sapiens
ttcctctgaataaatataaatcacgatcagaaacccaaacagaagcatccctcttgaattcgtgctgctgaaaaacacggaataaattcagcctgcagacacagaatctaatcagcagctgt

SEQ ID NO: 78213 - DNA, 122 bp, Homo sapiens
cagcacaaagagtccggcgctcagagctagcggtttcccgaggactcaccaccaagcccgcggacacaggccccgattccacacttaacgctgccaaagtggcagagccggcgcgggctggg

SEQ ID NO: 78214 - DNA, 122 bp, Homo sapiens
gccaccgggcagggggcgggggtgagccccgacggccaacccgtcagctctcggctcagacgggcgggaaccacagccccgctcgctgcccattgtctgcgcccctaaccggtgcgccctgg

SEQ ID NO: 78215 - DNA, 122 bp, Homo sapiens
cagcggcatttcccatcgggtggacaggtgggcctgggctgcaccttgttctgctctactcggagcggcccctctgtccctgtggcatcgcctctcggctcccggccggctgggctccctgt

SEQ ID NO: 78216 - DNA, 122 bp, Homo sapiens
cggccgtctccagcagcgagggcaggagaagtggcccgggcggtcggcggactgggagggcgccacccgaggactacaactcccggcctgcctcgcgcaggcaccgccccgagcttccgccc

SEQ ID NO: 78217 - DNA, 122 bp, Homo sapiens
gtgaaggtaaagtgattttggtttcattcgctctcctcggtagctttatgtgagtgctagcgccatatgaccagcctacggaaataaaggcacgacaaggcttccgtcagatctgtctctcg

SEQ ID NO: 78218 - DNA, 122 bp, Homo sapiens
agagagggatcactttgggctgggataatcagaggaggcttgctagaggtggaaactaagcgcaaccttgaaagaaaagaacttcactacatagaagctcttccaggcagaggagtgtaagt

SEQ ID NO: 78219 - DNA, 122 bp, Homo sapiens
gacttccctctcacagttcacctttgaaggttccctccgacctccccggcctccccggcccggggctctccacccagagaccactgtgcacctgatggcccgctcccagggaccagcccgaa

SEQ ID NO: 78220 - DNA, 122 bp, Homo sapiens
gtgatgagggcagcacgtggtggccaaggtggcaagctgagtctcacaggctcactccctcgttggttccctgtgggaatggtaggccaggcccagtaagccatgccccaacacgtcctctc

SEQ ID NO: 78221 - DNA, 122 bp, Homo sapiens
tcacagtgcaccacaccatccctccctgcaccgggtggccctgccgcagtgtccacgcctcgtcctcctgctcggctccgccctattttcgccaagccaatcctggaaggttgactctgggc

SEQ ID NO: 78222 - DNA, 122 bp, Homo sapiens
cgcctatagcgcaaagctgcggtatggagaaaagcctagaacccacagccgccatgatgacgcaaacaaaattaaaagggtcaagaactcaaggcccactgtttcacctaagaagaaaagga

SEQ ID NO: 78223 - DNA, 122 bp, Homo sapiens
gcacggggtgatgtacgccgacctgtacttcttgcaaatgtcgtcgaggttgcaggccttcgctgcatccaggcagttgttccctttgggaatgtgctccactgcaaatgcagagaaagaca

SEQ ID NO: 78224 - DNA, 122 bp, Homo sapiens
cagcgagactccgtgggcgtaggaccctccgagccaagcgtgtgatataatctcgtggtgcgccgttttttaagcccgtcggaaaagcgcagtattcgggtgggagtgacccgattttccag

SEQ ID NO: 78225 - DNA, 122 bp, Homo sapiens
tagcctgtatctttacataggaacagccccagcatttagcttagttcatttgcaaaaccgcggtaggaagtagacactcgagttatcgccattttacagattcagaaactgatactcagaga

SEQ ID NO: 78226 - DNA, 122 bp, Homo sapiens
catgaaccccgttcctaggcggcacttgattcctgttccaagatctggggaaatccgacccgaaggaagctttgctctaagacctccttggccgtgttgggctcagacgtggactgaggttt

SEQ ID NO: 78227 - DNA, 122 bp, Homo sapiens
tttctctcttgcatgaggtaatctgctgcggtgggttggattccaagtggcattcatctccgctaatgtgacgtgtaaatgcacaaacacagccacaggcatcagcagagggacgccgttcc

SEQ ID NO: 78228 - DNA, 122 bp, Homo sapiens
cgcctgcggagaaggggcacacagtggcctggccgaagggcgtcaagggcgcggcgtttacgggcgcggccaggccctggccctggttgaggaaggccaccaggcgccgcatctcgtccagg

SEQ ID NO: 78229 - DNA, 122 bp, Homo sapiens
ggctgtgatgaatgagcttggtgggtgggcagccccctccttcctcactcccactcttggcgtcttggtgcagccctaggccggccctgcccttcgtccctcacctcctcgcaccgctccca

SEQ ID NO: 78230 - DNA, 122 bp, Homo sapiens
gttgataagaaattcctaattagagattctgagtaacatagcgggtacagttgccaactacgatttggatgttagtggattttaaatggcaaccctgtgctgtttggggaaaggcaaaggcg

SEQ ID NO: 78231 - DNA, 122 bp, Homo sapiens
gcctcggccgcgtcccgtccctctagctgggggtcactgcgagccgcctcgctcggcggccgctcggtcatcctgtgggcagacagacagacaagcggatgcccgctctgacgaccgcccct

SEQ ID NO: 78232 - DNA, 122 bp, Homo sapiens
ctgttttgtgaaagaaaagaaagtgcttcctttcagagggttactctttgagaaaagcaacgttgaagttgatgctgatcttggtaatacatttggagagcatgcttatcatcagacgtgga

SEQ ID NO: 78233 - DNA, 122 bp, Homo sapiens
tacttcaccagcaagctgggcgtggccatgggccccacgccggtgggtgcctgggtgacccgggctgggggccagggctggtctacacctgtgtatcttcaggcttccctgggaaaaggggc

SEQ ID NO: 78234 - DNA, 122 bp, Homo sapiens
agcgcagcccggtgaaggcacagcggtcccaggaggcatctgggctgcaccccagcgagccgcccatacacgtggagatgccggccaaggccctgcagcacacggcagaggaaggcgcgatg

SEQ ID NO: 78235 - DNA, 122 bp, Homo sapiens
ttttaattaaaggatcataaacatctgccaaagctatgaaacaggccttctgtggacaggcgcggtggctcacgcctgtaatcccagcactttgggaggcagaggtgggtggatcacaaagt

SEQ ID NO: 78236 - DNA, 122 bp, Homo sapiens
atgcctccctctaattagcagggcctggctcagggcctgggcagttatttagagaaccatcgcctgctcccagcagagatatccataaggctggggtggcaggcactgtctgcccaaagtca

SEQ ID NO: 78237 - DNA, 122 bp, Homo sapiens
cttgaagaatcttatgacgtgcgcatcattaccgccattgcagctgaagagcctgagggtcgtagacctgcggtgtgggtctccaaggcgtgggctcttttcactaaacaataggccacctc

SEQ ID NO: 78238 - DNA, 122 bp, Homo sapiens
ccagaaggtcattaattcaagaaatattccttgagtgtcggctctgtcccttgctttagccgttgtatggaggaaaaccataccaatccttagactcacgttcggtctagggctcctggtaa

SEQ ID NO: 78239 - DNA, 122 bp, Homo sapiens
cctccgcgggcggagggccgcagcgggaactgggtttcggcagcgcccctttaaaccagccgcggacgcccggctgctggcgctagttccagcccggccgggcccggcctcgccggtttctc

SEQ ID NO: 78240 - DNA, 122 bp, Homo sapiens
ggaggtcaatccagtgggaaaacaggtgtgtttgtggaaaatggaaatacagccggcaggcgaggaggctgtagagagaggagcacagtgctctgagtagcctgtctgctgtagcaagtcac

SEQ ID NO: 78241 - DNA, 122 bp, Homo sapiens
tgttgatggtggagctggcggtgggggcgggggccgccttggccacggcggcggccgcgtcgcagctcttcaacatcatgatcaccccattagcctccggcggtggctgcggccccatcggg

SEQ ID NO: 78242 - DNA, 122 bp, Homo sapiens
cggcagtaaccaacaatgaatgccccagctcaggagagcagctttgtgaccggaaggccacggcttccaggagcctgaggagggaaggtcagccctgaggagggaacagcacaagccaggct

SEQ ID NO: 78243 - DNA, 122 bp, Homo sapiens
cacgcagtccaggatgccgcggtagcgcggggcgccccgcagtccgtccgcctgcagccgcgacttgaccacgtccacaggataggtagagagccaggacacgatgcctgacgtaccgcccg

SEQ ID NO: 78244 - DNA, 122 bp, Homo sapiens
agcgccacgcgccacggtgccacgatacagtctctgggggaagcggggcgggctcccggccgcagccacagcctccacggtgacctgggtcactgagtagcgggcaaggtcggcctgttggc

SEQ ID NO: 78245 - DNA, 122 bp, Homo sapiens
ggaaaaaaaaaaaagcgatgagttcgccaaatatatggagcacaggaagctcagtctactcgactcctgtattttcacagaaaatgacggtgtggattctgctcctgctgtcgctctaccct

SEQ ID NO: 78246 - DNA, 122 bp, Homo sapiens
ggccgccacgcgccccggtccattgtttcgcttatctgggttccaggcaggtgcgggcggcgcgcggggtccgcacgtgtcaccccggcggctggggcgccgggacccgcgggcgccggcag

SEQ ID NO: 78247 - DNA, 122 bp, Homo sapiens
tgccagtgcacaaatcatacacagcacgaatttcgtctttgcacccaccaagccccaagccgaaagctccctagttgcaccaaggagagagaaaaaacattgcctgacattggtccgcagaa

SEQ ID NO: 78248 - DNA, 122 bp, Homo sapiens
ctcacagttgtgttggggactgagcacagggtctcctgtgctggggccttctacgtcccccgcctgggacatgtctgtccacctacctgggccaaaagcacaacacgggccctgtgtggaga

SEQ ID NO: 78249 - DNA, 122 bp, Homo sapiens
gaggaatggaagaacaacttggcaccaggaaaatccacattctctgtattcctgagaaagcgaacacccagctgtgaatttattgactctcccttaagaagttctaatggaataaatttttc

SEQ ID NO: 78250 - DNA, 122 bp, Homo sapiens
acagggaggaggggaccagaggaggcgggctgctgactggactgttttcaaaggggctcccgtgtttaggggaggtgctgggatgctccacatggctggagagacgaagtagttaaaaatta

SEQ ID NO: 78251 - DNA, 122 bp, Homo sapiens
gaggttggcgtcgacacggggctcatgccgtcagataagaagacagacccttgcagcctccgtgcggtgtttccgagagcgcattcccctgagcagagcagggtctgcgctgtgtgatgggg

SEQ ID NO: 78252 - DNA, 122 bp, Homo sapiens
gacacaactttgctccaccctggagtgggtgactggagttgggagaggccagagatggggcgaaggcacttctgagcctgcaagcttcctgggccccagagagtgcagggatgcctggatct

SEQ ID NO: 78253 - DNA, 122 bp, Homo sapiens
gagaggagagaaatctgtatccctagctggactctgacccactgccggggtcccacatcccggcccaggcaagggctctccactgagcccaccctgcccccaactgctcctgactcctatcg

SEQ ID NO: 78254 - DNA, 122 bp, Homo sapiens
ctaatcatctaaataagtactgaagttggcaggctgaagaagacaggtaataaaagaaatcgatgtatgaagtagaaagagtaagagaaattggggattaagcagcctggagacaaagggca

SEQ ID NO: 78255 - DNA, 122 bp, Homo sapiens
agcacctgctatgggacaggcactaagctagaatctgcgatggacagaaagacgaataaacgcaacccccagcctgattaagcacacagcctgctgcagaggtgactatgtcagagggcagc

SEQ ID NO: 78256 - DNA, 122 bp, Homo sapiens
ctggggagggctctgactacagaaatagtcaaccaccagctagaagccatgattgggggccgggtgcggtggctcgagcctgtaatcccagcacttttggaggccaaggcgggtaggtcatc

SEQ ID NO: 78257 - DNA, 122 bp, Homo sapiens
gcatttgggtgcaggagggcctttaaaggcttcttgtgccagcctgtcgtggcgaccacccgttgtggagatcagtgcggtggagttgtgggaggtgagtgctttgctcaccctcagccagg

SEQ ID NO: 78258 - DNA, 122 bp, Homo sapiens
caggttggcgccaggcagcttgcagaatgtgtgctcggaccccgggcatcgcgaagtgtgcgggccgtgggccccggctgcaccgccagcccctgcctggccaccccaccgcttacttgacc

SEQ ID NO: 78259 - DNA, 122 bp, Homo sapiens
cctgccttcctcggcaagctatgggcgctggtgggggacccaggcacagaccacctgatccgctggagcccggtgagggccggggcccctcgattccccctgtggtcccggggtccctccac

SEQ ID NO: 78260 - DNA, 122 bp, Homo sapiens
gggagccgtaaccagaatctctggcttcagctctgcaagacccgtgtgtggacactcttccggggtccttgactcgctgctcctcctctgtcgctgcaaaggagttgtgaggggggacccac

SEQ ID NO: 78261 - DNA, 122 bp, Homo sapiens
cttgaaatgtgagcatactccaccaagcacaagtacattgcaaaatgcaaaagtactccacgaagtgtgagtgtaccccacagggcccatagaggcaagtgaacatgctccctggagaaaac

SEQ ID NO: 78262 - DNA, 122 bp, Homo sapiens
ctgagggtggggggtccagagagtgggcctggggcctgggccccggcccaggcaccctgacggcctcaggcggccggtgagtgggcatcgcccacccccacccccacccggcatctggctgc

SEQ ID NO: 78263 - DNA, 122 bp, Homo sapiens
caaagacatcagcaggggcagcgtggccctggtcatacacaacatcacagcccaggaaaacggcacctaccgctgttacttccaagaaggcaggtcctacgatgaggccatcctgcacctcg

SEQ ID NO: 78264 - DNA, 122 bp, Homo sapiens
gcctggggttgctatggagataggacgcagcaactcacagagcaaccaggacccagaaatcgcttaagagaccgcggcaaagtaacttaactgagttgccttcttccatattttcacgcccc

SEQ ID NO: 78265 - DNA, 122 bp, Homo sapiens
ggggcctcttgcttgcttgggcggggcagtgagtcattcagagctgcacgtatgtgactgcgtctctctgtgggagctcagtaagtgctctcgcattaatatggaagtcaataccaccagga

SEQ ID NO: 78266 - DNA, 122 bp, Homo sapiens
gctttagcacactgtgagggggtcagatccgaaggcgtgagaccagaagtcgacttcctacgttacccacccccccaacccccgccctttttatttttctgctggacaatgttccctctagg

SEQ ID NO: 78267 - DNA, 122 bp, Homo sapiens
actatgcccagctgatttcttaattttggggacaggcactgtcttccccaggctggtctccggaggtgaagtaatcctctggcctcagtctcccaaagtactgggattacagggaggagcca

SEQ ID NO: 78268 - DNA, 122 bp, Homo sapiens
agaggatggggaaacgcgcgccccaagagcaaaagcaaacagctgtggaggcgctgcccgcggctcaggcttcccaacaggttagctatactgggatccacccggcatttcgcaggaagggg

SEQ ID NO: 78269 - DNA, 122 bp, Homo sapiens
accgaggggcagttggcagcttcacctcagagctgcaggaaggaacggggcagtgaaaatcgaatcgggtgtgatcctaggccaagctcatggcccagcagggccagcaggggcagatggca

SEQ ID NO: 78270 - DNA, 122 bp, Homo sapiens
cgaggctgtcgtgactgtgtagatacttatttgacctgctcccttggcaaacacttgaaacgcaatacatgtttgtggaactgaacatagcctgtgcatgcagcaaggcttctttccctgga

SEQ ID NO: 78271 - DNA, 122 bp, Homo sapiens
ccctcgggggtgcaaagtggccctcacaagccaaggtcccctgttcccagcttgagaatacgtgagcatgccattgaaaagagttggctgctttttgttttttccggttatggagacatgga

SEQ ID NO: 78272 - DNA, 122 bp, Homo sapiens
cttatccgtgtggaagtcattgcccaggcgcgtgtagtacttttctgtgacgacctgggccgccttcttcacggtttgggtgtgaacgcggcccatgttggctggtccttggtaaaagaggc

SEQ ID NO: 78273 - DNA, 122 bp, Homo sapiens
acctcgtgatccgcccgactcggcctcccaaagtgctgggattacaggtatgagccacttcgcccggcctgtatcccatagggtttggtttgactttaaagtttttcttttctcaaaaactc

SEQ ID NO: 78274 - DNA, 122 bp, Homo sapiens
ggaggctgattccagtagttcgcgttattcagcaccagagtaaatgcttgggcataaggtcgtgctttaacccagacaggtcttgtcttatatgtacagcatagtcttaagtatgtatgctc

SEQ ID NO: 78275 - DNA, 122 bp, Homo sapiens
ttgcacatacacttttaggtactggggattcagagaggaaaaaggacaaagatccttccccgttttatggagctttatctactcagtcaggccctcactgggacagaaacacataccaagcc

SEQ ID NO: 78276 - DNA, 122 bp, Homo sapiens
ccacagcctgggtggccagcaggagcagcagggtgcacaggggccaggccatggtctcctcggaggcagagcacagagctggagctgcaggagaggaggttgagagcctgaggcggggatcc

SEQ ID NO: 78277 - DNA, 122 bp, Homo sapiens
acagctggcctgtcattctcatttttcagagggagttgctgaggctggagagggggctgacgtgcccaagggcacatgggaagacagaaaaggctaactggctgacccctagcccagtcctt

SEQ ID NO: 78278 - DNA, 122 bp, Homo sapiens
atagaattcttggctccttattttccccccaaaagaaattcctacctaaaaaataaaaatcgtgctgctctggttcaagtggactcatggagtccctcaacctctgtaaatcctactgcatg

SEQ ID NO: 78279 - DNA, 122 bp, Homo sapiens
caaacacaactcgggatccgagaggacactctgcggctgccagcgaggcgggctggacagcgcaccaatcacggcgcagctccgccctatataaacgggcgggcgcagcgccgcggctcgag

SEQ ID NO: 78280 - DNA, 122 bp, Homo sapiens
tggggcgaggggcctgctcgcaaccgcgcctgccagctgcttgagcgcccaccctgaccccgcggcatcccattcccagtgagacctctgaggagaacttctcagagtgtccccctcgagct

SEQ ID NO: 78281 - DNA, 122 bp, Homo sapiens
aaacacttaaaagatttgtgaccttggcagcattgatgtttccagattgaacttttcttccggattcacgctttgtgttctggcctaaaatagacaaaaacacaagtcaacagcccaggact

SEQ ID NO: 78282 - DNA, 122 bp, Homo sapiens
cagggaagccttaaaagtctagttcaacatcccttgacactcattctctcaggaccaccacggttaaacacatactaatttatccttccattaagggctatctcatcctgcaagaccctaag

SEQ ID NO: 78283 - DNA, 122 bp, Homo sapiens
ctacctggtcctggcgacagccggtgtgtgaaaagcctgtttcctcccctagaaaaagcacgtttggctccgctctccactgacacgtttttagctgagtgacgatggaagccgctggcttt

SEQ ID NO: 78284 - DNA, 122 bp, Homo sapiens
gaatatctcaaccaatgaaggttccagcagctggccatgctatctgtgttcagtcatacccggagggtgagagtccctccttaaacaacacatctcagctgcctgtcgtaggcagagctgaa

SEQ ID NO: 78285 - DNA, 122 bp, Homo sapiens
tttctcgctgcgctcgaagcttctaaactagcccccagaccgcatcccctcgtccccgcccgggagctgcccaagagtccacaggccagcccagggggaaacaaggtacatctgggcaggaa

SEQ ID NO: 78286 - DNA, 122 bp, Homo sapiens
caaccaggggcccatctgggttagtatgtggctctgggatgatgacccttagctgttgcccgccatccaatgaaagacgcaagacaatgttgggcaaaatgacatgggacctatgtcctgga

SEQ ID NO: 78287 - DNA, 122 bp, Homo sapiens
aagtctgcctgttcacctgttgatgctacacagtttgagctcaagctccttattctttgccggcttcccttttttgagttccagtggagtggtactcttgtgtcagagggattcagcactgc

SEQ ID NO: 78288 - DNA, 122 bp, Homo sapiens
gtcagagtcgaccccggccagtcacgagtgcgaactcagctttccactcatgcattcacacgttgaataggcagtgtgagagaaatccaggatggctgctagcttttcagtctgagcaacta

SEQ ID NO: 78289 - DNA, 122 bp, Homo sapiens
cgttaggttactttccaaacacccctagagtttaattgccttgatttcttcccctaaatccgactattagtccatgtccatcaagagatggcctcctctcactttctcaattctctgttctt

SEQ ID NO: 78290 - DNA, 122 bp, Homo sapiens
ccgagttgtgtccgaggcttccacgcgcaggggcccgggaaagggtcagaggcttcctaacgcagactcgagtgcgaagcgcgcagtcgccgggtgggtctctccccagcgacgatttgggt

SEQ ID NO: 78291 - DNA, 122 bp, Homo sapiens
ttggccgccaggagccgcttgcgcgcttcctgccgctgccggtccacggagtccagggagcgctccttcaccggcacgccccggccccgcaggggcttctttggtatcggcggagggacctt

SEQ ID NO: 78292 - DNA, 122 bp, Homo sapiens
acagaaacagggggaaaatattacaaggaaacacaatacccggcagggtcacctgctgaccgggcttcctgctgtgttgcccacccccagctcactgctctcacagcctccttctccagcct

SEQ ID NO: 78293 - DNA, 122 bp, Homo sapiens
tactagaagtggaagagcacaggcatcctagcgagtagcctacctgttacaagggctcagcgtgctgtggtgtctgcagtcaagatcagtaaagatcaagcttgaggtaatttgtatcacag

SEQ ID NO: 78294 - DNA, 122 bp, Homo sapiens
tcttttttctgggttctaattacagaaggcattgtgaaatatctctaggcccatcacctacgtgatgtgactcttctttcctgcctgaaccctgcccccaagagacattgtgacatatcact

SEQ ID NO: 78295 - DNA, 122 bp, Homo sapiens
ggggtcctcattgatgcgcggcttgttcctgatgttcttggcccggttggcgtagcgcagcgtgctgagtgtctcatcgtagttgttgtccgcaggcgacaggcaggccaccatgagcgtct

SEQ ID NO: 78296 - DNA, 122 bp, Homo sapiens
ctcagaggtctcggagaaacactggaatgaaatgattacagatttcattgctaatgtgggcgagtggagtaatgcgaggcaggatccagtaaacacctttcattattcatgtgcttccaacc

SEQ ID NO: 78297 - DNA, 122 bp, Homo sapiens
gagaaagtctctgaagggaatggttcagcctgacggggtggagcagtgacgcccgggctacgcgccagggttgcctggcagccaggagttcgaggaccggcggcggggcggggcctgtctcc

SEQ ID NO: 78298 - DNA, 122 bp, Homo sapiens
ttcaaagcaagggataggctgcagtgtggtgggcacacttactgagaagtaagcaagcctcgtaaagaggctgtgcctatcgatgatgtcatcatgccctgctgtagctggagtcctgcagc

SEQ ID NO: 78299 - DNA, 122 bp, Homo sapiens
tgggatcagtctcccatggccttcaagtgtcagggcaggggctggggacctcccatataacgagcagcctcaggagactccaggcaggcaggagcgtcgggggctgcgactccagaatggcc

SEQ ID NO: 78300 - DNA, 122 bp, Homo sapiens
ctcaagcaatccacccacctcagcctcccaaattgctaggattacaggcgtgagccaccacgcccagcaagttggagatattttaaagtagcatgataaaggggctgaaacgtggcagcact

SEQ ID NO: 78301 - DNA, 122 bp, Homo sapiens
catggaagtagcaatgccacgggcagcaaacttctcggcagggtagcagcagtcgctgcccggaggaaggtcctaaaatcaagacaggaaatgactcaacaaggaacgcggcaccagctcca

SEQ ID NO: 78302 - DNA, 122 bp, Homo sapiens
gcgaggctagaaaccgcctgacagctggcgcggctgcctggctccgagagacactcggcccggctctgaagggaaaacattaaagcaccgaaacagtggaaaaagagcatcaaagatgatgt

SEQ ID NO: 78303 - DNA, 122 bp, Homo sapiens
gctctgctggagacagagctcgaatcagaattcattttattacaggggatgcggccctaccgtggggaggctttaggcgggaaattaaagaaaatcttgaattaaaaaaaaaaaatctgcac

SEQ ID NO: 78304 - DNA, 122 bp, Homo sapiens
cagagtaactagatagcaaaaccataaacccaatggacaatactaggtgagagagtcccacgaacccctcacgatctgcggaatacaaatgcgtggggacaagtcacctgcgccacagcccg

SEQ ID NO: 78305 - DNA, 122 bp, Homo sapiens
ctctgtcattctcccacagtttttgaagacattagcacctgattcactattattcccagccgatctacttctgatgtaatttgtggtaattttaatgttttcatagatttttccccctgaag

SEQ ID NO: 78306 - DNA, 122 bp, Homo sapiens
tggtttcctgctcggggaagaagcctctgccagcggcctcccctctgagcctcagtaagacgctccttgacctgccctgactttctccgtgcctttgacattgattagttccaggaactcct

SEQ ID NO: 78307 - DNA, 122 bp, Homo sapiens
gctctgctcaccggtgtggcctgggctggagtgcactctccctgggggcagctggggcctcgcaattcttgcttcaggatctctcccatgcgagctgcccggagggtgtcagcagggcaaga

SEQ ID NO: 78308 - DNA, 122 bp, Homo sapiens
ttggtccagatattccaaaggtgtgcaggtggccccactgtctggggttagaagccaggccgggaagtcaggtgccacccttctgcatgtgggaaagtaccaagctgctctaggcctcagcc

SEQ ID NO: 78309 - DNA, 122 bp, Homo sapiens
aaaaccaccttcgtgatcatggtatctcccctgccaggtaagtatgagctcttgcacctccgccccgccacagcctcacacgcttcaccctttacacacacggtcacttgccccgcgcagcc

SEQ ID NO: 78310 - DNA, 122 bp, Homo sapiens
ttaaactgttcctctaatatctcttcaggggccaagtccaggctgcaagcaatgtaaatccgttctactggaaagagttgtatacaacagaatgaaaactggctcaaggtcaagaaaaaaag

SEQ ID NO: 78311 - DNA, 122 bp, Homo sapiens
gcgggacgttctcttcggtgcccgcttcccctgcctgggtgtggatggggcagcagtgggcgccactgtgcaacccccagccccagccccggccccgtcctcatcaacacatcatccagtca

SEQ ID NO: 78312 - DNA, 122 bp, Homo sapiens
cgagcgcaaaactcccttggacagaagtttgaaagaatccagtgtagaaacagacttctccgtccaatttggttttaatcagtaatcatataagtatacccacataaccacctaagtggaga

SEQ ID NO: 78313 - DNA, 122 bp, Homo sapiens
tccgatcagagtaattaaaggcttttaactgagctctgaggtcccaaacagggcacactccgtcagcctaaagctgtgaagaagaaccttcaacataaggtgggtgttctcttttagggtgg

SEQ ID NO: 78314 - DNA, 122 bp, Homo sapiens
ggcagaggctgacagccggctcagcccaaggctgccggtgcgtgcatatgcgtgtgtgctcgcgtaagccctgtgtgtggtgctcaccgcccagggcgaggactgccggggtcaaggtgccg

SEQ ID NO: 78315 - DNA, 122 bp, Homo sapiens
ggtttgtctgatgcgaccctcagcttgacttttctctttggcgtagtgatcttggggtcccgagatttattttcctttcacagtaggatacattgatcaggtcagtgccacagtacaagggt

SEQ ID NO: 78316 - DNA, 122 bp, Homo sapiens
aacagcaattttaataacgacgaaaaaccaaaacctggttgagatcttggaaccgctgtgcgccggccgggcctctcccaggggaccacccagccccgcgcggtggccgcctgcagaggcgg

SEQ ID NO: 78317 - DNA, 122 bp, Homo sapiens
tcatccaaatatccacgtttaaggtgtccggattcgtttggcttgaccaccccctccccgcgccaaccctggaggcatcttccgtggggtctgtctcttcgaacccaaaggggtacgcgtct

SEQ ID NO: 78318 - DNA, 122 bp, Homo sapiens
ccaaaggtggggcttctcctgtccgcccggtcctggactcccggcagcggccggcagaggcggtgctgatgctgtaggagggtcaggagccactgcctcgtgctcagccccacgggcgccac

SEQ ID NO: 78319 - DNA, 122 bp, Homo sapiens
gcaccagcggaagccacatcacgccggcgtcgggtcgggtaaatgggacagctccgactgcgctcagcctctaggactgtggctccgcccgggctagttcgctctccagtcaggaggcggag

SEQ ID NO: 78320 - DNA, 122 bp, Homo sapiens
ttatataatattaaggacttattaaaatatggttggattaacacacaactgtgtagtttacggtcattaagaagtgatggatatatttttatgtcaagttagaaggaggccttatgtgtacg

SEQ ID NO: 78321 - DNA, 122 bp, Homo sapiens
cacatgcacagtggccagcaccgacaggagtagcaggagcgtggtctgctggatggacagcgggtttagcggccaagggtcgttcgggctgaggctggtgcccatgctggggacagagagga

SEQ ID NO: 78322 - DNA, 122 bp, Homo sapiens
gccaaggagcgctcccgccgaaggctctccccactgagtcctcaaacccaagaacgccggcgacttcacacccctgaagcttaccattgcgaagctcggagaatagcagcagacaccgcagc

SEQ ID NO: 78323 - DNA, 122 bp, Homo sapiens
cacctgggctttaacccttcccagtcacgggagtgggcggagtgcacgcagggacggagtcgggggcgagcagcgagagaggccgggcttgacccttgaggcggggtgggcagcgtccgggg

SEQ ID NO: 78324 - DNA, 122 bp, Homo sapiens
ggaaaggcggaggcagacagccatgttgccagctcctgcgacggaggctgccaggcgggacgggctgggcacggcacgaggcggcaacaataggcacctcttcatcatctgcctctcaacac

SEQ ID NO: 78325 - DNA, 122 bp, Homo sapiens
ctccatgaaaagtaatttgcttttgcttgatactaatctttttgccctcatactcttgtgcgtggagtttatctatccacctccaacagacactcacacacctcccagtcatttcttatcct

SEQ ID NO: 78326 - DNA, 122 bp, Homo sapiens
gcttttgtctgtcttcgctgtcgtgtctggaatgtcagggaaggggagggctcgggttgacggtggcttcccactgagcaccagcatccaggtgcacccccgcggccacggcgcctctgtcc

SEQ ID NO: 78327 - DNA, 122 bp, Homo sapiens
ttgtaccatctcgagttaaagagacactgtcaccttccgtctttcgggcagccttgcggtcgtggatgggtctcttctaagttcggttttggcgttgtcctgtgagagcctcttccaggggg

SEQ ID NO: 78328 - DNA, 122 bp, Homo sapiens
attgagatgcgtaagagggcatttttttttttttttttttgagacggagtctcgctctgtcgcctggagtgcagtgtggcacaatctcggctcactgcaacgtccacctcccaggttcaagc

SEQ ID NO: 78329 - DNA, 122 bp, Homo sapiens
tgcgcgtgggggaggcgcggagcgcgcgcaggtcaccatgactaagcagagccgggcgcccgccgtgtcacaataaaagtccccgggccctggcctcaggcggtagggaccgctgaggggcc

SEQ ID NO: 78330 - DNA, 122 bp, Homo sapiens
tgaccagctaaagattaacagtttctttaaaaattacaaacttaccccattctaggtattcgagaatgttcttctctcttctcaatggagaattattgcattcatcataaaggcagatgagt

SEQ ID NO: 78331 - DNA, 122 bp, Homo sapiens
cgtgggtcccctcttcctaggagccttcctggggcatcccgcactgcccctcagctccagcgccgtcaggactcggctcagcaccgcttcgccagtgcctcccccaccagcagggagttcca

SEQ ID NO: 78332 - DNA, 122 bp, Homo sapiens
tgagctacgagcctggcggagggtgcgcgccgagccccggtccggccaggcccctgcgtgcgtcccaggctccgcacccctgatgctgcgcgggtgctgagcctgctccggccgggacgatg

SEQ ID NO: 78333 - DNA, 122 bp, Homo sapiens
gacagctagctgggcgaggagagtccgctgtgaggcagaggctgggcctgtgcaggccttcgggaggcaggaggctgggactttcggtggaaagtcaaaagcggggcttgggaaggccgccg

SEQ ID NO: 78334 - DNA, 122 bp, Homo sapiens
ttttttttttttgacagagtctcactttgtcaccctggcttgagtgcagtggcaccatgtcggctcacggcaacctctgtctcctggcttcaagcagttctcctgccacagcctcccaagta

SEQ ID NO: 78335 - DNA, 122 bp, Homo sapiens
cctagatgtacacaagcgagtcacatccagaggtgcacaggcaggactgtacacggaagacgtgtgcacatgcgtgtacacccactcccggaaaggaacaaaaatatacagatgggcacaca

SEQ ID NO: 78336 - DNA, 122 bp, Homo sapiens
taataaatataagacaattgacccgtgttttaatgtttatccgtaagacgaagtgcagcccggctggtgcagtgacgcaggcggcttgctggagccgagaacacccacgtgtggggtgatgt

SEQ ID NO: 78337 - DNA, 122 bp, Homo sapiens
ctcagaacaagcggtgtggcccgaggccgtcacacagcacctgtgctgagagtgagctgacgtggacggcggcaccgtggccgtggcagaggcaccatccctccaccctcactcatgtaggg

SEQ ID NO: 78338 - DNA, 122 bp, Homo sapiens
tccgagccaggtgcaggatatagtctcctggtgcgccgttttttaagcccgtcggaaaagcgcaatgcctcgccctgcttcggctcacgcacggtgcacgcacccactgacctgcgcccact

SEQ ID NO: 78339 - DNA, 122 bp, Homo sapiens
ttccttgccgcatcctgtagcaactgtgtgtcgacctcatctgctggcagctgcacgtatcggaccactgagccccgaatgaagcagttcttcactgataactagacaaagatggacaaata

SEQ ID NO: 78340 - DNA, 122 bp, Homo sapiens
tggcctggagacaccagtgttggggagttttgtgtaaaacagtaacaaagacctcgtgtccgaagcagcaccctttacctctgttgtcagggccacagggaaacccgcacccagccggacag

SEQ ID NO: 78341 - DNA, 122 bp, Homo sapiens
gtaaggccaattagtagacggggcaataactcatattgggagaagcatgcctttagctgccgtaagtggaggaactcacagctgcagccacatccctgcagctctgatctgactgcagagct

SEQ ID NO: 78342 - DNA, 122 bp, Homo sapiens
tttcttcccctacttccattcactcactgcttgagtcacagtcagcaacacgttgtaactcgaacctggggcgtggcagcatttcagagcaaggtagaagggaccagagacattttctagtt

SEQ ID NO: 78343 - DNA, 122 bp, Homo sapiens
accatctcacactgtcacatacacaatcatatccactgatagactgcacacgcagtggcacgcttaaaccgtcacacgtgctcttgtccatgcattcattcccattctaggcactgtccggg

SEQ ID NO: 78344 - DNA, 122 bp, Homo sapiens
ggcgcacgggcgaggtaggcggggcgcggggcccccgcggcggcacaaagaggccggccgcggcagttttgaaaataccaaggaagttgatctgggccggggcccaagaagtgacgaggagg

SEQ ID NO: 78345 - DNA, 122 bp, Homo sapiens
gaagacgcgcagtagaacgaagaggctgccggtgaggaggcaggcattgaccgggctccgcgtcaccagcagcagcactagcagcaggaaggagaaagggcccaggaggccgccctggtcct

SEQ ID NO: 78346 - DNA, 122 bp, Homo sapiens
agctcctttccttcacaaaattgagattccgtttaagcctaatacatatatacacacatacgcagtatctgggggcgcatatacaatcacgcacatacacatacgatcacgagtacatcaga

SEQ ID NO: 78347 - DNA, 122 bp, Homo sapiens
tctttatggaagaatagactgactcaatgaacagacattgtttgatatgattaaacttcacgcagtttgtaaattctgatattgagtgtgtcatgtgccataccaccaaaataagcaaatta

SEQ ID NO: 78348 - DNA, 122 bp, Homo sapiens
gagagggggtgcgcacccaggggacccccagcatgaaggggctggtggggggcgcaggcccgggagagagagggcagggggaacactcagtggggaggatcggggggagggggcgcgggccc

SEQ ID NO: 78349 - DNA, 122 bp, Homo sapiens
taagtcccagaatatggtctgtcttggcgaatgttacatgtgtaaaaaccagatactcttcggttgttggatggagtgttttataaatttccattaattcaagtctgttgtcgtttggatat

SEQ ID NO: 78350 - DNA, 122 bp, Homo sapiens
tccaccctcgtcgtgcccaggagggcggccttgggcttcctcgggcccctctgccattgtcgcctcagcaggacccagcaccccccgccgtacctgtcactgctccgtctttatacaccttt

SEQ ID NO: 78351 - DNA, 122 bp, Homo sapiens
ccacctgtagaccccagatctgtcccccaaggacactcaacatgctggggcctgtgttatcgatttattgcagctccaatatgagtccactcctactcaaaccctgattctcaggggcctgg

SEQ ID NO: 78352 - DNA, 122 bp, Homo sapiens
attgaaatgcatttgctttggggtacgctggttatccgcaagtctggctttgtgggtctgcgtggctgaataagtgaccaagtgccttcggcattatataaacggatcgatgtgtgcgggag

SEQ ID NO: 78353 - DNA, 122 bp, Homo sapiens
caagttcattcatcacgggcccctgctgactcacgcttatgaaagtgattttcctggccccgcccactgcctgcgccgcctcctccctccccgtgaaataccctcacttccctctggcctct

SEQ ID NO: 78354 - DNA, 122 bp, Homo sapiens
ttcatctgaattaacacccacatatgattctacagacatcaatcaaagtgtacaaaatgtcggtcttggagaccatgtccctgattatcatcccatgctatacaccagtttaggatctgatc

SEQ ID NO: 78355 - DNA, 122 bp, Homo sapiens
cgctccctgcgcagctgcccgtagtgccgggcttggtgtcggcggcgctgagggcgggggcggcggggggacgggaggggggcggtggggggaaaggcgggggcggcgggtggctgctgggt

SEQ ID NO: 78356 - DNA, 122 bp, Homo sapiens
agtggaaggttgggaggctgaggaccctgcgacagtgacagcaggtgagcagtggatgtgcggtggttggaatcttggaagtgggtgtcacagttctcgcagtactggagggagggagtagg

SEQ ID NO: 78357 - DNA, 122 bp, Homo sapiens
gcggcagcacgatgaacctcgagggactcaggctcagggaaacgagccagtcgcgaagcacggacagtggacggctccacgtacacgaggcgcctggaggcgcaagattcacggagacaaag

SEQ ID NO: 78358 - DNA, 122 bp, Homo sapiens
ggtggagcgatagaagccggcagggaggaaggggtgggcagggggagggcgagaagccgccgttgacaattacgtctgggtccaagcaaacatgaggcagctgccagccggcctgggcagtc

SEQ ID NO: 78359 - DNA, 122 bp, Homo sapiens
ccgcgctgtgttatctttcccagtatccaggtggagagaggatcatattacttcccatgtcgcagggtgtgtacaccccctctgtgatttcgttgctaacttccaggtttggggaggaagac

SEQ ID NO: 78360 - DNA, 122 bp, Homo sapiens
ggcggcggagggggcgggcaggccggcgggcggtgatgtggcgggactctttatgcgctgcggcaggatacgcgctcggcgctgggacgcgactgcgctcagttctctcctctcggaagctg

SEQ ID NO: 78361 - DNA, 122 bp, Homo sapiens
cctgagttcctcagcacaagcccccaggggccacgctccccaaatacccacagctcccaccgggtagggctggtggttctcatctgtgcccacatcagcacctttctgagagctgcagtatg

SEQ ID NO: 78362 - DNA, 122 bp, Homo sapiens
tcagtggcaaggacaatgcctgcaagggctgagccctgcctcactctgctgtgtaaaggacgcccggtccctgctgggcaagtcagaaggggcccccacacggagcggcctgcgcacctcgt

SEQ ID NO: 78363 - DNA, 122 bp, Homo sapiens
tcggtaaacagagatcaccacaggggcctgagccacctgggacgcggggtgtacggagggcgggggcgagctgaaacagccaatccggcaagccgcgcgtgaggccagacgccagtcccacg

SEQ ID NO: 78364 - DNA, 122 bp, Homo sapiens
ttcttgccttcgtagatgacgtggcccttgggcaggctgtcctcccggccgcggtccaagcgactcgggctgtcctcgccgatgatcctggtgatggtgcccttgtacaggacgtcagctgg

SEQ ID NO: 78365 - DNA, 122 bp, Homo sapiens
acactcaggtttttatatttgttctcttgctcactttgctgtatctttaattccatttgtcgaacagtctaagttttagggtaagaaggagtcacctggtctacctttacatggtaggacaa

SEQ ID NO: 78366 - DNA, 122 bp, Homo sapiens
ggcagatggaacattaggtgacttccaggcctaggccataacaggcattgcagtttctgtcgttgccctcttggaagccagcaccataggaagaagtctgggctatcctgcttgagaggccg

SEQ ID NO: 78367 - DNA, 122 bp, Homo sapiens
gtaagtattgtgtatcatcgtttttaagctctacaaatacgtgtgattcacaaaggtgagcgtaatcatttcttctggaatttcttagtcgttgcaataataagaatgggctctaggcgccg

SEQ ID NO: 78368 - DNA, 122 bp, Homo sapiens
ctccccgcacactccccaccacccttctttgtcaactcaaggcattttcagcctatatcacgatatcaaattaagtttggactaatcaggagaaaacccccatctgcacactttccgctgtt

SEQ ID NO: 78369 - DNA, 122 bp, Homo sapiens
ctgaatgaattaccagagccaattaaatgtaccgagagcccactaggggctaagtgctaacgacacaacggtgaataacttaaggctcctgctcttaaccagctcaaagtttagatgaggag

SEQ ID NO: 78370 - DNA, 122 bp, Homo sapiens
cccattaccaacatcacagagcctctgccactaccgaagggtttatggcgatgcctgccacgtggtctttcttttcatggttcacaagccacagggaagtgcctaaggcacacaaatcttaa

SEQ ID NO: 78371 - DNA, 122 bp, Homo sapiens
tcccgagccctcctgacgtcatgggaccttccggccttttcccgtgctagggtgggactacgtgtcccggcatgccctgcgtcctgccactgactgtgaggcatgctgggatttgtagtctt

SEQ ID NO: 78372 - DNA, 122 bp, Homo sapiens
gtgctggcctccaccatcattgctcaataagtaacactgaactgaactgaatttggataacgtgcaaagctgcttttttacattttttagttgattgagagttagaaaatcgtaccaaaaac

SEQ ID NO: 78373 - DNA, 122 bp, Homo sapiens
tccccgcagtccgggctctcagagccctccttgtaggtcaacagtatcaaaggtgcttaacgcagatacaccaggaggctcaaagcccaaacatcgaaaaaaaaaaaaagacccactcttgt

SEQ ID NO: 78374 - DNA, 122 bp, Homo sapiens
aaaagagacccctacaggcttagcaggaagacgctcagaggattctgacaatatctttaccggagaagaggcaaagtacgctcaaagccgaagccacagctcctcctgccgcatttctttcc

SEQ ID NO: 78375 - DNA, 122 bp, Homo sapiens
gggctctgcaggaaatctcttttgggctgagaccatcctgtttgcccgtcctgtcctgggcgcggccaggcccctctcctgggaggaagcttcggctgaaggccacgtcttggccccctact

SEQ ID NO: 78376 - DNA, 122 bp, Homo sapiens
gacacaggaccctagaagaagtacacggccaaatccttatgggcttgaatggcaagacaccgggagtcttagacacttcaccaccgtggttctcctcaggggcaccaaacactgcttgagca

SEQ ID NO: 78377 - DNA, 122 bp, Homo sapiens
atccctccctagggcagctggccatcacctccagaccaagaagcagtcagttaggggaggcgttccagcaggatctggcggatagcacatcattcacttggagaaattaaaccattgcgtgc

SEQ ID NO: 78378 - DNA, 122 bp, Homo sapiens
ccgcggccaggccagcgcccgcgctcccgcctcgcccggccgcgctctcggagctcccggcgcccgctcttcgtccagcagccgctggccgtctccagctcccgcccgggacgacgggcacg

SEQ ID NO: 78379 - DNA, 122 bp, Homo sapiens
agctcacccggaaaaggagacgtagcccggggtgctgagaagagggggggaacgtgccctcgccagtcagctaggctgggtttgcactttttagtttagagaaatgtttaatcggggtttag

SEQ ID NO: 78380 - DNA, 122 bp, Homo sapiens
caatttagaatacattgaatttgtagagtctacagacatgcgacttgacatcaaaaaccccgataaattaccaaagaaaactcttttccaactataatgcgataactttctaacagcttaat

SEQ ID NO: 78381 - DNA, 122 bp, Homo sapiens
caactcctgccctgaagccctgggcccgggtcacggcgggaaggtgagtgctcacaggcgcgagctcacgttaccaagttgggtcagcgtgcagagaaaagggaattgggaattggagggct

SEQ ID NO: 78382 - DNA, 122 bp, Homo sapiens
cctctgctgtgtcaatgctggatgtgactcctttggcactgttccttgacctctctgatccgtagacaaccccctccgcctggagtggcggatcagctggagccagcgaagcgccccgcgcg

SEQ ID NO: 78383 - DNA, 122 bp, Homo sapiens
ggctggcggatcactcgtggttaggagctggagacccgcccggccaacacagcgaaaccccgtctccaccaaaaaaatacgaaaaccagtcaggcttggcggcgcatgcctgcaatcgcagg

SEQ ID NO: 78384 - DNA, 122 bp, Homo sapiens
ctgtcgtccaggatgtcctgccgtcccgcaatgcccttgcccttgccgctctcatcgaagcgctccttgtgggagcccgtgtatctgctggtgtccgtcagccggtctacagcaccccctgt

SEQ ID NO: 78385 - DNA, 122 bp, Homo sapiens
gtcgagaagggcccgcctggcgggcggggggaggcggggccgcccgagcccaaccgagtccgaccaggtgccccctctgctcggcctagacctgagctcattaggcggcagcggacaggcca

SEQ ID NO: 78386 - DNA, 122 bp, Homo sapiens
gccgcttctgctcccgacgtcgctgcagctcctgctccggcggctcacgcggccgccgcgcgcccgcagcccccacgtcctcgcgcccaggccgggacgacatgtcagcccccgcagcgccg

SEQ ID NO: 78387 - DNA, 122 bp, Homo sapiens
tcttcctggatcgaggaggacttcttcctcccccaccctttctgtgacggtgccgggatgcgccttcctgtctccctccccatggctggtgctggtgaggccaccttcggagaccgtgggcg

SEQ ID NO: 78388 - DNA, 122 bp, Homo sapiens
ccgggcagccccgcctgccggcctcggagtccgcggcgccggcggctagaggtccagaggcgaaccacttgctggtgcagaagagaaaccctcaaatccctggcctttcgcggagacgcctg

SEQ ID NO: 78389 - DNA, 122 bp, Homo sapiens
cctccagccgcgaggactggagtcgcgggaggtggagccccagtccggaagccggggatccgcggccatgacggtgccggtccgcggcttctcgctgctccgcggccgccttggccgagcgc

SEQ ID NO: 78390 - DNA, 122 bp, Homo sapiens
ggagcctgaggcaggataattgcctgaacctgggaggtggatgttgcagttagccgaggtcgcaccattgcactccagcctgggcaacaagagtgaaactccatctccaaaaaaaatagtaa

SEQ ID NO: 78391 - DNA, 122 bp, Homo sapiens
tcaaatgttgctgctctctccattgcttggtatttcgcttctaaagcactttctttttctcgaagtatcttctgatacgttttttgaagtgcctagaataatttaccttgttatttcctaac

SEQ ID NO: 78392 - DNA, 122 bp, Homo sapiens
aaaaagaacactatttcccagtccatgaaatgttattaatatgcaagtgcaagggcacagcgggaggatgagagagagggaaaaaatccaaaacgtcttctgactctaacttgtacatcctt

SEQ ID NO: 78393 - DNA, 122 bp, Homo sapiens
acacgtatgcacacattgtcaacatacacatatgtattgacaggcatgtgtgagtggacacgggtgagggcctagactgttggcacatgcaatacaggtatgcacacatatgtggtacctgg

SEQ ID NO: 78394 - DNA, 122 bp, Homo sapiens
gctgctgtcgcgacgcctttgcggctagagcttcttttactatcctgagtcagagcctcccgaagccacggaggaacgcccacggggccggggggtggggtggggacactgcgcattcaggt

SEQ ID NO: 78395 - DNA, 122 bp, Homo sapiens
gccccgtcccgtccccagggggcctctgtcttcccatcctgattcccgggtccctgcccccgactctagctccccaggaggcggccccagcccagctagggacccctctcggaggccggccg

SEQ ID NO: 78396 - DNA, 122 bp, Homo sapiens
tgcctgaacttccccatccccctccacccgccgtgggctcctgcacggcctgagcctccccgaggagtgccgccccctgctccacggcgcctgatcccatcgaccacccaagggctgaggag

SEQ ID NO: 78397 - DNA, 122 bp, Homo sapiens
ggggaatggaatgccagtgaggaaatgtaatgatgtacagattgtatcaaaataaaggtgcgtccacaaactctacactctgacctcagcctggttagaattacttttggcctcaaaaggag

SEQ ID NO: 78398 - DNA, 122 bp, Homo sapiens
ccgttgccccggtaactgcctccccaacacctgcctgccttccactgcgaaacctgctctcggacgccctgaccataccgcacacaatactgcaagcctgtgtgggcctgggggtgggatgg

SEQ ID NO: 78399 - DNA, 122 bp, Homo sapiens
tagtccagaacaacatcaagccttggatgtttagtgcagagtaacatccagcacccatcacgcagtgctaagtcatttacattcaccatttccattctcaatgggtagaacaatcccatttt

SEQ ID NO: 78400 - DNA, 122 bp, Homo sapiens
tggagaactctggcaagcctgtctcttggctcaggcttggaggcctccgagcagcaacatcgtcccaattataccccgttggagcatcttcagatcttccactcttttcacaacgcaatcaa

SEQ ID NO: 78401 - DNA, 122 bp, Homo sapiens
ctgtttggggactgggtagttttgtatgctagatgtcttacacagttacaccttcaaacacgtattttgtaacagtcagtacttaggtggattttggccattcatattctttctcttttctt

SEQ ID NO: 78402 - DNA, 122 bp, Homo sapiens
gatgtctgggggccgggactcaggagcagtttacagagaagaaaaggccgatgctgaagccgagaagatttcgggacagttctgtgagtgatgccttcacctggatgaaaagcgaagtccca

SEQ ID NO: 78403 - DNA, 122 bp, Homo sapiens
ctgttccgttggtgcatggactggattctattccatccgtgtgtggactggatcctgttccgtcggcgcgtggactggatcctcttccgtcggcgcgtggactggatcctgttccgtcggtg

SEQ ID NO: 78404 - DNA, 122 bp, Homo sapiens
tcggccaatagcaaagccgcaggtggccactgggccctcctttcatctcgtggagcctctcgccagccacagcagggccctcgtggaggttctgagattgtcgcgtgcagggcatgcgacgg

SEQ ID NO: 78405 - DNA, 122 bp, Homo sapiens
ctgagcctgggggcgccgctgcctctgttcctttaagtagccgctgtttagcattcctgccgccgccgctgccgctgccgctgcctgcctctgcgcgctgattggctggaatcaactgagaa

SEQ ID NO: 78406 - DNA, 122 bp, Homo sapiens
ggaggcgcgaggcgggaggctgggcgagaggagccggcggggcgggggcctgggccgtcacgtgggtgcgccgcgcaggcgccgggcgggccagacgtaggcccgggggttcccggcctggc

SEQ ID NO: 78407 - DNA, 122 bp, Homo sapiens
tgctttattaatccccttttcttgaaagtgcacagccaggacctcagtggaggcctgaaacggccgagcacaaggactcccaacgcgaatggcacggagcggactcggtcccccccacccag

SEQ ID NO: 78408 - DNA, 122 bp, Homo sapiens
gtcttctgctgcatgatatcaaagtccctggtttatgctccttttggggctgccagcacacgaatgattttataggtatgattacagagtagtgggttctcagagtaactaagatcagcagt

SEQ ID NO: 78409 - DNA, 122 bp, Homo sapiens
gctaagagcagtgcaggaggaggctgcggacaggtcgcatcaggtacctgagacgatccgcgccatctttgctgagggcgagtgccaggcctagaggggcgggatgggcctggcgctgccca

SEQ ID NO: 78410 - DNA, 122 bp, Homo sapiens
ccgcagattcgtctgtcgttggcttgttggtcctaacaagtttcgatttcagggtgcctgcgtttctttttcttttctcttcttttccttttgttttgttttgagacagagtctcgccgtgt

SEQ ID NO: 78411 - DNA, 122 bp, Homo sapiens
agcaaacctcctgggtgtccgggaccaccggccttagccttctccaagcccagggcagggcgagaagaacatggcccggttcccctcggggtctctggcccagctgcggagggggaaaggtg

SEQ ID NO: 78412 - DNA, 122 bp, Homo sapiens
gttagccattcttgagtaagttctcccccaactacttttcatgattcctttcttggtcttcggcctacctctctgcgtcctccctctcagtctcctgtcttcacgggacactctttctgtgt

SEQ ID NO: 78413 - DNA, 122 bp, Homo sapiens
agaaggccgaaggcacaaagggaagctgcacccattcctggaggagcttaaatagtgactcgagtgcaagaatttaaaaataccgagacagccctaggtggaaaacttccggaaggcccaag

SEQ ID NO: 78414 - DNA, 122 bp, Homo sapiens
tggcctgagagtacttttagaaaacattattcctttacctttttcaaacttgaagcactccgaaagtcccaaccttttgcacatttgcggcagcgacattgatttggtaaacagctgtcaca

SEQ ID NO: 78415 - DNA, 122 bp, Homo sapiens
cccgacaaactgagcaatacccagagaggatggaaatggcgaagaggcctggcgcctgcccgctcccgcgcatgctccctgacttcaccaaggtcacgctgcagcccgcaggaatgaaaatc

SEQ ID NO: 78416 - DNA, 122 bp, Homo sapiens
aagagaaggaacttccctcttgtggggaaatggacagataaacacacaaataaagtccaacgtaccaacgaccttaaaggaggtaaagggatgggaggagttaaggaaagcttcctggcggg

SEQ ID NO: 78417 - DNA, 122 bp, Homo sapiens
aaactctgggacagcagtgggtactgcactagccattaatggccatcatctatttttaatcggaagatcacaagaaagatggtaagcgaatcccagtcgcaagtcaatttaaataacattcc

SEQ ID NO: 78418 - DNA, 122 bp, Homo sapiens
ccttttccaggatgtgggaaaggatttgcttgcagcagctaagtaacatgacatactgtacgtagttgttggccaggataattacacagcaaatcacttatgtggaaaaatactcagtagac

SEQ ID NO: 78419 - DNA, 122 bp, Homo sapiens
cagatatcacctatgcaaaaccaagatcttagcatttaccagaactactcccagaccacccggtccctctgcagcccactccctctcaattgatggtgactctattcttctggttgttgggt

SEQ ID NO: 78420 - DNA, 122 bp, Homo sapiens
cctggtgcgtggggccgcagggctaacaccaacaattcatccgatggagcatgtcgaggtcgagccagaagacttgtccaagcaggttcctgagcaacagttgctctaggcaagtactgata

SEQ ID NO: 78421 - DNA, 122 bp, Homo sapiens
cggcccggcaggacccaggcgtggacttttaagggcatttttctaccttgtggtggctgccgggtttatcagcgtgcagttgaaccggacgtgatattcctgagccctcccgggacgcctgc

SEQ ID NO: 78422 - DNA, 122 bp, Homo sapiens
gtggaggtgggcagtcgagcgttaaagagtaacctgctgccgggaagcccgccaagcaatcgcggccccttccccggctctggcagctctgcgagcgcgcccgtggggaacgggccctcccc

SEQ ID NO: 78423 - DNA, 122 bp, Homo sapiens
tgggagatgattttcaaggtgaaatttctagttcactagagtcactttcgttcaaggcgacgcacaaaatgtcatcccggcctgttccgcgtgcaacgcgctgttctcccatcccatttaaa

SEQ ID NO: 78424 - DNA, 122 bp, Homo sapiens
aataccgccctggtcaagccaattgggccgccaaccaatggcaccgaccgggcctccgcgcgcagcgcctgcccaattgacagagcgctcgcatccctcagctgtagctcgtgcagcctgtg

SEQ ID NO: 78425 - DNA, 122 bp, Homo sapiens
cccgcgcggcgcgggcgtctctaacttcgcggagctcatcgtcaagggtcagctggtggacgccggggagcgccgggacctcaccctcgaggggcggggccggcgacgggggcgggctctgc

SEQ ID NO: 78426 - DNA, 122 bp, Homo sapiens
taatgaccatttatttctcttataatcagtaacaaaagaagggaaaacttggtctaaacacgaatttagggacttaaactagacttggagaaaagctttctatgcaagatttattagatact

SEQ ID NO: 78427 - DNA, 122 bp, Homo sapiens
gctgtattaaataattttcactggtcttttgtacccgattaaacacgaagatgggccaggcgtggcagctcacacctgtaatcccagatcctcccgaggtgggaggatcacttgggtccagt

SEQ ID NO: 78428 - DNA, 122 bp, Homo sapiens
attctaccctgttgctctcacataagccaactgcttcatttcctccttaaaattcagtctcgcttagaatgttttctgtcacaccaggcaatctcctgaggttgaaaaatggcaagaggaaa

SEQ ID NO: 78429 - DNA, 122 bp, Homo sapiens
tacaatagaagggaaaagatattgtgaaaacaagtatcccagtgcttgcttctgtcccagcgtccctcaggcttgtccctctgtgcgtctcctccgccttggtctccttcctgccccatacc

SEQ ID NO: 78430 - DNA, 122 bp, Homo sapiens
ttcaaaatgtttgagaagtgggttgcgactgtgtcgttttaaaattgtacattaagctgacggtaataaaatcttcaagaccaatcatttttagccatagtgtgttgaaaatggtttttcta

SEQ ID NO: 78431 - DNA, 122 bp, Homo sapiens
ctgccctgacgaattcacgcacacaggatgccctctcatacttccactcttaagcaactacgtcataaattatctctacatcctacagggctaggatcagggcaggaatcagcaaatgtgta

SEQ ID NO: 78432 - DNA, 122 bp, Homo sapiens
cagcatctgtgaattcagctcagtacctgcatatgtgggacatgatcatgaccatttgtccgagtcgatgtgtgtctagggagggagggaggtgtccactttgaagcagagatctgactgat

SEQ ID NO: 78433 - DNA, 122 bp, Homo sapiens
aaataagtttaataataaccattctacaagagaagtgagataagcgctcacatatacagtcgtatatgtcctgtatgtcctaagtatagtgctggcatatagtatgcagtgaatgcttttac

SEQ ID NO: 78434 - DNA, 122 bp, Homo sapiens
tgacaccacgtggggccggcgtgtccctgctgtgacatgtgtgacaccacgtggggccggcgtgtccctgctgtgacatgtgtgacaccacgtgggggccggcgtgtccctgctgtgatgtg

SEQ ID NO: 78435 - DNA, 122 bp, Homo sapiens
aaaaagccacaggcaggagaaacccggagagcagggaagtggtctcgatctgaagggagccggctggccacagagaggggctaagcccagacgatgaaacatgaggacttacaaaggacggc

SEQ ID NO: 78436 - DNA, 122 bp, Homo sapiens
gacctctgagcgcaagtccacagccaagggccggggcaacagcgtcctgccttccaaacccgagggcaaaatcaaaggccaaggcctggccaaggtcagcattctcggggagaccgagacgg

SEQ ID NO: 78437 - DNA, 122 bp, Homo sapiens
cagctagtaagttatcgaggcggggctgggctctgactccaaagccagcgttgttagcctcgggtggtcgcgtcttagcaagagctctgcagttgtgcgccaatataggtcgattacccagg

SEQ ID NO: 78438 - DNA, 122 bp, Homo sapiens
ttcaggggccaagcaccgggaagccagcggggccgcagcaccgcactggcatgggtggggcgcgtgtccgactctgcgtagggatggccctgtggctggtgtgcgctctgagcccagggggc

SEQ ID NO: 78439 - DNA, 122 bp, Homo sapiens
aagcgatattttcatgttaatttgctctgtgtcctgcaaagatgagacaaatcacctgctcgtaattcaggcaaaatggagaccaccaggagctgagaggggccatggcttgattcctttag

SEQ ID NO: 78440 - DNA, 122 bp, Homo sapiens
tgtaaggtgaatgtacatggcacttgaggttcactttgtccaaaccagtacctcttatctcgtctctaactctccctctccctctcctaggcagaaagcaatggctgctaaagagtataaaa

SEQ ID NO: 78441 - DNA, 122 bp, Homo sapiens
acgtggtcatgggacggtaatcctctttgaagccatttgttatttattcttacagtcccccggagagcagggaggagcccccagtgcctggatcacaaacgcaaatacagagagggctgcag

SEQ ID NO: 78442 - DNA, 122 bp, Homo sapiens
gacttctgtatcccctttaaaggcaaagcccatggcttacccatctttccacccttttctcgtaatatcttgttgtttgtagtgagtgcctcctatgtgttggttgtattaatttctactac

SEQ ID NO: 78443 - DNA, 122 bp, Homo sapiens
ggccggtggcagggtggaagcggaggggcgtggccagcgagctgccaggcggcgagaacgcgctgggggaacccttggtccgctctgcgcgtcgctctaggatccccgaaaaggagcacggg

SEQ ID NO: 78444 - DNA, 122 bp, Homo sapiens
tgtgacatgtcctcaggaaccacacccacctgagtgctgtacaaaactggtggctggggccgggcaccgtggctcacgcctgtaatcccagcactttgggaggccgaggcgggaagatggct

SEQ ID NO: 78445 - DNA, 122 bp, Homo sapiens
gccagctctcgagccgcgcggccgtcacaggagcccgctccggccgggctttccataccccggctgcagcttttcccataaatatcgagataggaaaattacaattctgggatttgggagga

SEQ ID NO: 78446 - DNA, 122 bp, Homo sapiens
tagttaaatttctaataggaatgttaaaattaatgtttaaagtaaaacactctcttgtctcgatagattgtgtaaaggaatctgggtcacacatgtggatctatgtcttcatggggaatatg

SEQ ID NO: 78447 - DNA, 122 bp, Homo sapiens
gaggcggtgtcagaggtgggggcctccgggcagctgcggacaggcttcacgatgacagctcgccgctgctcctcctccagctcctgcttttcctgggtgccctcgatgtgctggattgcctg

SEQ ID NO: 78448 - DNA, 122 bp, Homo sapiens
attcaatttataatacttagaacaatacaacctagacaaggaattttggactttctgcctcgttcctgaagcaaaattttcccgctctataaatctctctttttttttttttttgagacgga

SEQ ID NO: 78449 - DNA, 122 bp, Homo sapiens
gagtagctggggttacagctgccaccacacgcctggctgaattttgtacttttagtgagacggggttttgccatgttggccaggctgttctcaaactcctgacctcaggtgatctgtcagcc

SEQ ID NO: 78450 - DNA, 122 bp, Homo sapiens
ttacagctgtaacccttcctgggttaggctatttaataacataagaaagtgtggtgactccgcctcaccttgggaggccaaggcgggtggatcatctgaggtcaggagtttgagaccatcct

SEQ ID NO: 78451 - DNA, 122 bp, Homo sapiens
cctggaggacgcagggcttggggagcgcggtacagacaaacacaggctgcttttctcgcccgaaagaccggtttcatttcgcagattgattattgctgcgtgagtgtgtgtgtgtgtgtgtg

SEQ ID NO: 78452 - DNA, 122 bp, Homo sapiens
cccgcccagtcctcgcaggccaaagggtgacccatttcttttttccagtcaccaggagctcggatggtcactctgaggtgtgaatagatatgtttttccttcagtccacactgaattcaact

SEQ ID NO: 78453 - DNA, 122 bp, Homo sapiens
caaagatagaagccagggactcagacttcctccttccagaaataaccatcataaaaaagccgacccagtaaacgcctggcagcctgcggcatagaagaaaatggaaatctccttggctggca

SEQ ID NO: 78454 - DNA, 122 bp, Homo sapiens
tggataagcgcactgggggactatactgcagtgtgaccgccagtgtccccagggaggctgcggaaaagtagaggcaatgagacccgagcagaaatagggacttctcgcggcagtccgcacgg

SEQ ID NO: 78455 - DNA, 122 bp, Homo sapiens
aaacttcagtgcctaccaaagacctattttctgactcttcttgagagtcttccttaggaccggaacgtaccctgtaagtggagaacccagtttgctacaacttggcagaggttcctcggagt

SEQ ID NO: 78456 - DNA, 122 bp, Homo sapiens
aagaaatgctaaagctcctccttgtgttattcattcaacaagtatgtagccatggcccatcgggggctgatgatacaaatgtgactaacacacaccctctgcactggctagctgacagcgta

SEQ ID NO: 78457 - DNA, 122 bp, Homo sapiens
gcctcgcgctccctgacaggagctgcagaaagcgacgcccgaccgagacgcgacgaagaacgccacggccactgcaaaactcccacgctctcatgctcctttacgcaggagctgcgggaaaa

SEQ ID NO: 78458 - DNA, 122 bp, Homo sapiens
gaatgctcttcagtttgttcctatctctgccgggatctatatgttctggactctcttctacgacacggagacctttcccggagcaggaacggggccacggccgtgtttgcattttctgaacc

SEQ ID NO: 78459 - DNA, 122 bp, Homo sapiens
aactgcccgctccgaaatgcgggcgtcgggggagcggcggagggggccaggggaccccaccggaatgagtgcctgtccgcagcgactgggggagaaattatgtgaataattcagcccctcca

SEQ ID NO: 78460 - DNA, 122 bp, Homo sapiens
gcgtgcacctgaacttgcccgcggacccctcgccgggccgtcccccaccctggcccctttcgagtgaaatcgtaaaacgtccacctgcccccgctctgagccagcgacagacgcatcgtggg

SEQ ID NO: 78461 - DNA, 122 bp, Homo sapiens
cagaagaggtccccagggctacacatccagggtctgagcatggcagactgcctacctggtcgtaaaagcagcagtgatctcaggggctcacccagggtggatgttttgtttgcttcttagaa

SEQ ID NO: 78462 - DNA, 122 bp, Homo sapiens
gctgaaatccagatgtgcttctctgggcaacgtccatcaccaccaggcacagatggcgcacggtgcacactgccgagggggccggacaccacagtcaccagacagccggggcccaaccgctg

SEQ ID NO: 78463 - DNA, 122 bp, Homo sapiens
cacagtgtccttcgagccggggggcgccaacgccgcgggctcggccctggtgtaccgcgacgtgctcaagcagctcttcctgtgcgacctgtacgtgctggagcacttcatcacgccgctgc

SEQ ID NO: 78464 - DNA, 122 bp, Homo sapiens
caggtcataaacctcttcccacccactctcactctctacccaaggctcaggcttgtctcacgttgattggccagagcccacgagggcacgtccaatcagcaatcccccctgcgcaacctatc

SEQ ID NO: 78465 - DNA, 122 bp, Homo sapiens
gccgggctcacagtgtgggagcagctggacaccaggcttcttggtgaaccggcgaggggccgagtcccgcctggtgggcatttgccgccgcctccccaccaccagtcactgcctcgcagagc

SEQ ID NO: 78466 - DNA, 122 bp, Homo sapiens
tcaaaggttcttctttttaaataggagttaaaccctctagctagaaagccgattggcctgcgctcgagcgaggctgccttgtgattggttgacaacaaacccgacgccttgagtcgcgttta

SEQ ID NO: 78467 - DNA, 122 bp, Homo sapiens
agagtcacgcaaccactgccaaaatcaaggtgcagctcctcaaaaatagctctcaggtgccgagcctctgcaaccagccttccttgaaccccttagcccgccctgtgcccctcccagtgctg

SEQ ID NO: 78468 - DNA, 122 bp, Homo sapiens
tggacaacagtactggctttttaagatggttgcgaggattgaatgagatagagtgtatgtcgtgcttttagcacagaacctggccccaagtaagtgctcactagctttctattataagccaa

SEQ ID NO: 78469 - DNA, 122 bp, Homo sapiens
ccgctccccccaaactagtgcaaaaaagcttgccagggcctgcagaaagcgccgcgactgcgaggctgacacgcgtctttccttccctcccccggggaatgatcccagcatctctcgcagtg

SEQ ID NO: 78470 - DNA, 122 bp, Homo sapiens
tacttccaccccagttgtgtacgtacacatacacccactcccagctatgcacaccacgtccgtactcccccagatgtgcccaccccaggcgacccgcggctgcaaaagagaacaggaagctt

SEQ ID NO: 78471 - DNA, 122 bp, Homo sapiens
accgggggtgtgtatttgtatcaggttgttcgttgtcttatttctgggcgacgagttcctcgtctattctagatacaagtcccttcccagatccgggcatcgcagacagtttcacctgctca

SEQ ID NO: 78472 - DNA, 122 bp, Homo sapiens
gttggggttcctctcctgaggtgcaaacccctctgcacacacaggtggaggcacagtgagcgtccctaaggggagctggggtgtggggaacctacgcaggcattctctgagtacctggaagt

SEQ ID NO: 78473 - DNA, 122 bp, Homo sapiens
gactttgtcctcacaccttggctgtcattccaagtgacaattatcaatttgatgacccatcgtattctctatacttgatctggagtgacttccagccatttccaaaagttacattcctcctt

SEQ ID NO: 78474 - DNA, 122 bp, Homo sapiens
tgcggggacggctctgacgaggaggactgcagcatcggtgaggcccggcagcggaccggacgctggtggggagtggggagagccaagccctggcctggggtggctcaagggagggcatccac

SEQ ID NO: 78475 - DNA, 122 bp, Homo sapiens
gccagcagccgcgtctcaagacaaagaggcggcccctgagaaaccaccctgcctgtacctcgaccttcgccttccaaccccgagaaagacaaggacatagatgtctgtggttactacccggg

SEQ ID NO: 78476 - DNA, 122 bp, Homo sapiens
caaccctcgtccacacgccagccgtgagggaatttccggggcgtggaggccgggctgtggcgccacctggcaacactgtccttccccatcccgtcacagaggcagcagggcccagggcagag

SEQ ID NO: 78477 - DNA, 122 bp, Homo sapiens
tgagttatgcaaataacttccgcgtgtttgacactttgttctcccttgctcctgaaaacccgccgcaaagcttgccatgcgccccgcgtcatcctggcgtctgcctcctttggcaggggaat

SEQ ID NO: 78478 - DNA, 122 bp, Homo sapiens
tgatgccttcccccacacgccctgagcacctagcacaggtcctgtgtttcacgggagctgcggggactggagaggtcgacaggaccccgacaaaccaggaaagggcctttgaactaaagtaa

SEQ ID NO: 78479 - DNA, 122 bp, Homo sapiens
tcatttattcattcagcaaacatgttaagcatctattttgtgtaagcagagttttaggaacgtaggtttcaggcatcagaaatgaagtaatatgatgtagtgcagtgattctcaaagtctgg

SEQ ID NO: 78480 - DNA, 122 bp, Homo sapiens
ttaaatttaaattagtgaagaaataggctgctgaccaagtaactccctgatagtgtgccgcggcacagcttggctcaagccttgcaaatgctcaatgagagagaaagtatcgatgagacgtg

SEQ ID NO: 78481 - DNA, 122 bp, Homo sapiens
acaaaggcagcgtctacacgacgagtgaccctggaaggggcaacatctcagcgagtgattcggattgactgcacgcctcatctgaaagattgtgcagaaagtggtcaatgccatggccagac

SEQ ID NO: 78482 - DNA, 122 bp, Homo sapiens
agtccagcagcccgggcctgggaggcttgtgagccgggcctttcgtaattgtcccctccccgcggccccctcccccaggcctcccccctctcccgccctcccgcccgccctctctccctccc

SEQ ID NO: 78483 - DNA, 122 bp, Homo sapiens
aatattacaaagaactcccagaatgtcctttacccagattcaccaattaacattttatcacgtttgccttatcattctgtttttctcttcctctcctccttctcctatttgacagtagtttg

SEQ ID NO: 78484 - DNA, 122 bp, Homo sapiens
tatggaggatgcagctgcacttgactgaccgattaaaagatttcccttgactttgagaaacgatatttaatcagaacaaaatactgtgcactaaagatggagttttcctggggaagcggcca

SEQ ID NO: 78485 - DNA, 122 bp, Homo sapiens
ttctctcccaatgaagaaacgtttatatcctgtgattactctaggaaaggggcgtattaacggtcctttgcttccccgcaggggagaaaaagcttgacgaacttcacagaagagttcaagct

SEQ ID NO: 78486 - DNA, 122 bp, Homo sapiens
tgcagcatccaatagaaaggtgggaggcggagttaaagcgctaagagaagcgttactccgcgagactctcctgaaaagtagtccccgaggtcacaaggcagtggcaggtgtctgtagtcctc

SEQ ID NO: 78487 - DNA, 122 bp, Homo sapiens
ctagtctagcagtcccgagtccactgaggaatgcattttaatcttctctgtagttcagtgcgggcctggggaacagccaatgaatgaatggatacggaagtgacggaatcaccatttgggac

SEQ ID NO: 78488 - DNA, 122 bp, Homo sapiens
gagaacagaacagttaaaaccaagccctccgatggaggtgcggggagagggcgtggctcccgtcccaggaggcaggtgagcttctggggattccagttcacctgccccacagccgcaccctg

SEQ ID NO: 78489 - DNA, 122 bp, Homo sapiens
atcaggctctctggaggtggctcctgtaatctgttctttttaaattcctaatttgcgaatcgctgtcttaagtgcaggaattcgcctttgttaaaaatcctgtaagtggttgttatttcttt

SEQ ID NO: 78490 - DNA, 122 bp, Homo sapiens
ctcccattgcctcagtggctgcacctgcttcagggtagcaaagggggctgctggagtgctcgggctgtgggaggtgcccgtcagaaggcgagcgtgaaaacagcagtgtgtgtggaagcaat

SEQ ID NO: 78491 - DNA, 122 bp, Homo sapiens
ccatggcacacgcatacctatgtaaccaaccagcaaaccaccatggcatatgtatacctacgtaacaaaccagcaaaccacccggcacacatgtacctatgtaaccaaccagcaaaccacca

SEQ ID NO: 78492 - DNA, 122 bp, Homo sapiens
tacatttttgttttgcaaaaaatatacctgcctgacctcaccacttttcattatgtgtcacgacctctctcttcataaatgcttggcctgcctttcttagcaccattattgaagagagataa

SEQ ID NO: 78493 - DNA, 122 bp, Homo sapiens
tgagaacgtttaggatcatgcatgtctaattttattgaagcaggggcccatctagctgtgcggctgattccatatgtcaggcagggcggcgtgtaaacggccctgaagttgcgccgtctgtc

SEQ ID NO: 78494 - DNA, 122 bp, Homo sapiens
gcctggctggggcgacaggaatccatcttggcagtgggtgcctccgcggtccagggatctcgtgacccggcagtaacaatttggttttcctgaaaagatgatggtaattcggtgtaagacct

SEQ ID NO: 78495 - DNA, 122 bp, Homo sapiens
agcctcccggccctgccgaagtcacaggagcaaatgcagagcagccctcgagcaccctcccggctccagctccagctccagctcccggctccagctccagctcccggctccatcccccagct

SEQ ID NO: 78496 - DNA, 122 bp, Homo sapiens
gccttcccaggcactggcgctaccgctagaccaaggtctgctaagtaacgagggcctttccgggcactggagttaccgctagacgagggagccctctagtggccctgttcgggcataacaga

SEQ ID NO: 78497 - DNA, 122 bp, Homo sapiens
catggtaggtagttactattcgataccacaaaaatgtctcttgcccttaaaaccagaacacgaggctcaccagacagatgactgaatggagtatggaaaatctttatttctgtttttcttag

SEQ ID NO: 78498 - DNA, 122 bp, Homo sapiens
cgggcgctcaaagcgccgagcagctgcgcagactttctgggctcggaccctcggccgccacgctaatgtcatcattgcaaaacatcagattttgagaactatgcagtctgaattcattagca

SEQ ID NO: 78499 - DNA, 122 bp, Homo sapiens
tcaaggtaaatatggcatcaaaaaaatcacccagaaagaaagggattaatctgctcagcacgatgcggtcccctgctcaggtggtcagaccctgtgctcacgccaggtcactaccactaaca

SEQ ID NO: 78500 - DNA, 122 bp, Homo sapiens
acagcagcgagcacaccgagtctgcagatacaagctcctgccacacggacagcgagaacacgtcctccttctcctccccttcccacgacctgcaggagctgagcaacgaagagaactgctgt

SEQ ID NO: 78501 - DNA, 122 bp, Homo sapiens
ccggagaggcggggcagaggtgtgacgtcatcgccgcggggcggaggcgacagtgtctagcgggagctccgcgtgtagctacgccggccgcctggctttgagacaacgtgattctccgcagc

SEQ ID NO: 78502 - DNA, 122 bp, Homo sapiens
acatttggggtctggggtgtcagaaaagctaagtcccatgtcagctgacattgagatttccgcaaagcattgctggagagtcagggcaagactttacaaggttcttactaatcttttctctc

SEQ ID NO: 78503 - DNA, 122 bp, Homo sapiens
aagaaattctttccttgaaaatggcttggttttaaaaaccaggtttctctgccttcctaccgcacctcccgcgcttccccttagcgtttggggcgtgctgtaggcccctccgtggctagacg

SEQ ID NO: 78504 - DNA, 122 bp, Homo sapiens
ttcttttttcttttttttttttagtaacagctgtgacttaccatttcccccaactactgccggctggtcagggaaagaaatcatgagactgccgagccgcttgctctaccccggggagcgac

SEQ ID NO: 78505 - DNA, 122 bp, Homo sapiens
ggctgcgcagcgtggaccgctcgctgcttctgcagggctggcaggaccagggcttcatcacgccggccaacgtggtcttcctctacatgctctgcagggatgttatctcctccgaggtgggc

SEQ ID NO: 78506 - DNA, 122 bp, Homo sapiens
gcccgtaggaccactaccaccaacgcgcggagactggtagtggccctgaatgcccggtcgcgccgttatttatcgtatacaaggcaagagggaagggtaaggagtgtgagttgtctccaatg

SEQ ID NO: 78507 - DNA, 122 bp, Homo sapiens
ctcccctgcggagcagctcagcctcttcctgcccttccttccatggggccctttgcgtgacgctgcctgtgcactggggcgtggatccttcttcactacgcttgcagaaaatatcttctcca

SEQ ID NO: 78508 - DNA, 122 bp, Homo sapiens
tactctactacaactctctgcccctctgtttgctcatgatatggcagcttcatcccagaacgactgggctaactatgaaaaaggctaataccttttattgaaccatgttaacttcagagagt

SEQ ID NO: 78509 - DNA, 122 bp, Homo sapiens
ttggccgtccaacccatccctatacttgatggagttcaaggtcattggggcagtgcacaacgcccccagtggaatttagagaggagtataaggagtttgaacacatccaaaatagaaattca

SEQ ID NO: 78510 - DNA, 122 bp, Homo sapiens
ttatcaagtgtaagatgagtgtggtaataacacctttcggaattgttctaactattaaaacgggtgtatttgaagtgttttgcatgatatctagcacatagaaaacccccaaaactggtagt

SEQ ID NO: 78511 - DNA, 122 bp, Homo sapiens
tgcaacagacgcaggtaccggctcagaaagctcagtcagtggtgcaggaagcctgggtcgcggtgcatcgtgtttaaaaataaacacacacttcccttggggccagtggcatttattctatt

SEQ ID NO: 78512 - DNA, 122 bp, Homo sapiens
taagcataaaaagaaaataatccagttgatgagaaaagaagaaaagactgacaagaggaccgctgtggctacttgaagagaaatatcacacttgaagagaaatattttaaatattaaaacat

SEQ ID NO: 78513 - DNA, 122 bp, Homo sapiens
caggccaacaaaaaggagacagagaaagcacacaaatttagcataatttatcctacctcccggctgtttgaagctattaacataggtgtatatagccctatatacctatgtaagccccaagc

SEQ ID NO: 78514 - DNA, 122 bp, Homo sapiens
tgggcaagtcttccagaatggtatccccattgctgagatccaggcactcgggagggtatccgacgaggattcgctgaccgccgggggcgatcccggtgatggcggcaatttggccctggagt

SEQ ID NO: 78515 - DNA, 122 bp, Homo sapiens
gtcttgctttccaccatgcaacttcacaatctgcccaaatgtccttttattaaaactagtcgacaaagtcccaaagccctagctgttcggcgtgtgtgtgtgtgtgtgtgagcgcgcgcgtg

SEQ ID NO: 78516 - DNA, 122 bp, Homo sapiens
cgctgctggtggacacagcccctcacaagcagctgcgaggccctcgggcagtggcatgggcgccgtcgcttcctgctaaccccacatcctcatttcccacgcttctccttccaccttccatg

SEQ ID NO: 78517 - DNA, 122 bp, Homo sapiens
cacgtgggtaactgtggaaacgggtcccggcatgcagcgcgcccttggagccttcctgctcggccaactcgtgctttattccccggccagctcctgcgcgctctcgggaggcggttgagttc

SEQ ID NO: 78518 - DNA, 122 bp, Homo sapiens
gcccatccgccagccattggccggcagcttcgtcgtcgtggcaacggccgggaaccgggacggaccccggaagtgacctcctttggcccgccccggaagaggcctctacgggaggcactggg

SEQ ID NO: 78519 - DNA, 122 bp, Homo sapiens
gacggactggcctcagcatccttgcccgcagtcccgggcgcctgcccagccgtcagtccgcgctcgccccgcccctcaggccccgcccctcaggccccgcccgatacgacccgccccttctt

SEQ ID NO: 78520 - DNA, 122 bp, Homo sapiens
gaaattcctagaaaagaatttataactttggctgggagaaggttctctgagttgacaggacgaggcaggaacagccctcagccacacagcttgcagccccgagtactgtggagccatgacat

SEQ ID NO: 78521 - DNA, 122 bp, Homo sapiens
tttccaaggatgtgcatttctcctttgccctcaggtcttcagtaagttagctgtggaattcgaggcctcaagtggtggcctgcgccgtggcagcgtacccacaggtgccatttagtggcact

SEQ ID NO: 78522 - DNA, 122 bp, Homo sapiens
ataaacaccctgggcccttcctccaaaaaatacacactcattgaaagccccccccacccccggccccttcgcactatgcacagccctcaggagctccacctttggttttgggggagtctcta

SEQ ID NO: 78523 - DNA, 122 bp, Homo sapiens
actccgggagggaatgaggtaacagtcccagggcggggcagggggtgggcctggacaggacggcagctgctgcactgcgggatgaggctgagggtcatggctgtgaggcctcatcggggagg

SEQ ID NO: 78524 - DNA, 122 bp, Homo sapiens
ggtattgaaaatgggccttgcgccgtcgaaggttcttgtccgaaacgccatagtaggctgcgtgggggctggcagagcgcagctcgaagtcccgggccagtgcctcgtccaccaccttggcc

SEQ ID NO: 78525 - DNA, 122 bp, Homo sapiens
gagtcatctgaagtcacctgggcgtgtggagggacatgcatctgcaaggcccccatgtggcgctaagcacagagtgggtgctgcagacgggctcagccgctgcgggcaggtgcaggcaggat

SEQ ID NO: 78526 - DNA, 122 bp, Homo sapiens
gactgggttgctctcctcccttccccggtcccgcccccgtctgtctgtgtcgactgcggacgctatcgataaagttgctgttttgacaacatggcggcgcccatggtccgtggcccggcagt

SEQ ID NO: 78527 - DNA, 122 bp, Homo sapiens
ttcctattttcctaagaaacagtatggtttctaagccacctccatcaacaacaccccaagcgcagagttacagaaaggataaaggtacaccaagtcaaaaacccatagtgtttccttttctt

SEQ ID NO: 78528 - DNA, 122 bp, Homo sapiens
cgctgcagggaaccgacgggacccggccgagagccccgactgtgaggaggcggctcacggcgcctacctgggaccgaccctgactgtgaggaggagactcacggcgcctacctgggaccgac

SEQ ID NO: 78529 - DNA, 122 bp, Homo sapiens
cagtcacgcttagctccgcccccaggattaaggcccgcccaggggcttccctccgcccttcgcttgagaattccttttaaataccgctctggcgcccgagcgcgcctcttgcgtgctcgtcc

SEQ ID NO: 78530 - DNA, 122 bp, Homo sapiens
tctttatcctaacctcatcctgtttctttttggtacatctaagggcaaatggaggtgatacggctcctgatagaatatggagccaggccctgcctggttactagtgtgggctggaccccagc

SEQ ID NO: 78531 - DNA, 122 bp, Homo sapiens
atgctgcaggttcggaggcgatggctgtggtgggtgtagcatggtgggctctggggcagccgcactgggctgcaggtagcgctgtctcactgttgcccacacggtgggaagagggtgagggt

SEQ ID NO: 78532 - DNA, 122 bp, Homo sapiens
agtagctcttttcttggcaggggttaatacttagttagggccattagtcgtgtggtagtccgtctgtccacaagagcctctatggctgtttggatatttttgacaatgaggggtaagagaca

SEQ ID NO: 78533 - DNA, 122 bp, Homo sapiens
atggcacatgacccagaaccaggagagccacaaggaacagaagcagctgtgtcatggccacggggctcctggggaggctgctggagagagcacaagaggaaagacccgagcaggctgagcct

SEQ ID NO: 78534 - DNA, 122 bp, Homo sapiens
ccaggctggaatgcaacggcaccaatcacagttcactgcagcctctaactcctgggcttacgtgatcctcctgcccgagtagctgggactataggtgcgtgacaccacactcaactaatttc

SEQ ID NO: 78535 - DNA, 122 bp, Homo sapiens
gtctcgcggctccaaccgccgcccaacgcggggcggccccagtgggaagggaagtgggtgcgtcccccaaatctgtgtccacgtgccgctgtttacacgctccctggggcagggaggagtcg

SEQ ID NO: 78536 - DNA, 122 bp, Homo sapiens
ccaggccgagcgcggttgctggcccgcgcctccctccccgaggcaccattgttccgggatcgctgtgaccgccacaaagtgaatcctttcggtgcggacagtcgccttcaaagccaggcccc

SEQ ID NO: 78537 - DNA, 122 bp, Homo sapiens
gggcgggcccctgggccccgggatagctccggagcggcgcgcgttggggcggcggggccccgtccacccccggccccgcgcggcctcctcccggcggcctcagtcccagcttcccgggccca

SEQ ID NO: 78538 - DNA, 122 bp, Homo sapiens
gtattctacttctctgtggagatgacaatgccaacccttaacctctgggacttttagatacgtggcagagatttggtttgtttgttttgcagtgcactcatctcctctctatcttcctctca

SEQ ID NO: 78539 - DNA, 122 bp, Homo sapiens
aatgggtctagctatgctgtttagctgggacatcctgctaatgtctctttcacgtgggaacgagttgctcctgaaagccagaaacagattggatggtcctggcctaattcggacacccacct

SEQ ID NO: 78540 - DNA, 122 bp, Homo sapiens
tacaaaatgagattctctgagtgcctgacaaaacgaatttaagtaccagccaagtacacacgatgatagcttcaaggaatacaactgactttatgatatgaattttcaaggaacgtatctta

SEQ ID NO: 78541 - DNA, 122 bp, Homo sapiens
gagtctcagaacctctccacagctgtgtctgcctgctcaaccaccactaagggctggggacggactgacatttgtggaaaataatgacagcaagcacatagagcttacgatatgtcagacac

SEQ ID NO: 78542 - DNA, 122 bp, Homo sapiens
aagaacgcgctgacgtcagccgcttccccgaagggtgacgtaagcgcgccacggggaggccgaggcagctgatagaatgttctgagtttcgatgccttaaagggaccaggcctgggatcgtg

SEQ ID NO: 78543 - DNA, 122 bp, Homo sapiens
cgccgttgacggcgtgcgaccccgcgatgcacaggtgtgccatgttgatgcgcttcactgcgccctcctccaccagcgacatgcgccgcagccggtctacgtcccctgggaatgcggccgcc

SEQ ID NO: 78544 - DNA, 122 bp, Homo sapiens
gtggagcacgtcggtgagggcgagaccagacttgcagtaccacaaaggaaacaagcttcccgccgcagttccatccacatgtccaatcccatcctgaccgcgactgcgcggcggagaactgg

SEQ ID NO: 78545 - DNA, 122 bp, Homo sapiens
ttgcccaaccttccgcagagatggcatccccagcgggaagtgaaagtcgtgtgaatccttcgatagctcagttggtagagcggaggactgtagttggctgtgtccttagacatccttaggtc

SEQ ID NO: 78546 - DNA, 122 bp, Homo sapiens
ttttgtactctgtccctttatttctcatattggctgatgcttagggaaaatagaaaagaacgtatgtgaaatattggaggtgaattttgcccgatatctggctgaatttcccgatagtcttc

SEQ ID NO: 78547 - DNA, 122 bp, Homo sapiens
ggttgtctgtcttccctcccacccccggagacatcgcagaggaggctgtaggggtccccacgtgcctggccagagatggaaggggctttgccccgctctccaaaaggtctcgacctcgatcc

SEQ ID NO: 78548 - DNA, 122 bp, Homo sapiens
gacgcatgattacgtgtaatttacaaaacacatttgatgctcaggcaacctcacagatctcgtgagcaaactcttctgggagacagtgaaatccaatcagttatgttctctgaagccttcca

SEQ ID NO: 78549 - DNA, 122 bp, Homo sapiens
gcttctgcccccaccaccgtgctacgttcggagctcgcctccggacctgaccaaacgatgcggcccaaacaagcctcggggcccaccccggggctccctgctgactgcccctgactctgggt

SEQ ID NO: 78550 - DNA, 122 bp, Homo sapiens
ctggctgaatcattcatgccataaaacacccttggcagaggtgatgggtcgggggggatccgagccatagggtgtgaaatgaagaatgcagatcctaaaagatgcatggaatttgatcccaa

SEQ ID NO: 78551 - DNA, 122 bp, Homo sapiens
gtgaatttattgactagtagacaaatcagagggtcaggttccatctactggtcatcttttcgcaactgttgctctgttttattcatatctcctttaattttccccttccacctttctaaaaa

SEQ ID NO: 78552 - DNA, 122 bp, Homo sapiens
gccgctcggctccggccacggcaagggctggctggggaggttccttggcgcgggctggggcgtcccgccggccgccaggacgagcgcggggggcggaccgcgggcgagcgcgcaggaggcag

SEQ ID NO: 78553 - DNA, 122 bp, Homo sapiens
tggggggctgaagctacctgccgggctctgagagatgggtggcccgaggaccgtcggagtcgcagagaggaggaacgctagctagctccagccccacttctttgtgctttactaccgtgctt

SEQ ID NO: 78554 - DNA, 122 bp, Homo sapiens
cttcatccaacacacctgacagacaaagccctgggtccaaaatggctcatcggggtcaggcgcggtggctcatgcctgtaatcccagcactttgggaggctgaggcgagtggatcgcctgag

SEQ ID NO: 78555 - DNA, 122 bp, Homo sapiens
gctggctgagaaggtcccgctgggctggcggccctgtggctgtcctcgtaaccagggacccgtaccccagactgcatgggctggagcttttggaggcctcccacccagtctcactttgcctg

SEQ ID NO: 78556 - DNA, 122 bp, Homo sapiens
tttttatcctgaagggaaagataaagggtgggaaagggcgtcaggcgaggcgaggcgaggcgagaggctcgaggttctaaggcgatggtcagactgactgatggacctcagggtggcccctc

SEQ ID NO: 78557 - DNA, 122 bp, Homo sapiens
ggacgtgggaaatctgtagagaagtcgaccgagaagtgagatgcggtggcgacctcggagcgcaccgggtgtgcgcgcagctggggcctctggggagcggcgcggcggggacggaggagagc

SEQ ID NO: 78558 - DNA, 122 bp, Homo sapiens
gcgcctacgtggagtccagaggagcggaagtagtcagatttgactgagagccgtaaagcgcggctggctctcgttttccggataacgactacagctccgactgtcagtgccggccttcctcg

SEQ ID NO: 78559 - DNA, 122 bp, Homo sapiens
tttacataccttttctatgtttagctacacaaatacttaccattgcgttacagttgcctacggtattctgtacagtatcatgctgtacatgtttgcagcctaggagcgaaaggcctttccat

SEQ ID NO: 78560 - DNA, 122 bp, Homo sapiens
ggtccatgtttgttatggctcgagctgagctttcgttcgcggtccactactgccgtttgccgccgtcacagacccgcctctgacttccacccctctggatccgtcaggttgtccactgtgct

SEQ ID NO: 78561 - DNA, 122 bp, Homo sapiens
gcgacccaccccgccctcgggtgctgtggtctcaagcctggttctcatcctggccctgctcgctgtagctgtgagacctcgggcaaatggcttaacctctccgtgcttcattttccttctct

SEQ ID NO: 78562 - DNA, 122 bp, Homo sapiens
tgcgtagattcctgtcaatgctcaggatcctctgccttgtgatatctggagataagtcaacgccttgcaggacgcttacatgctcgggcagtacctctctcagcaacacctccatgcactgg

SEQ ID NO: 78563 - DNA, 122 bp, Homo sapiens
agaaaagcacctttagtttggggcctcggaagggcccatctctcctcgtgggagcttgggcggctaccccagtcaaccatccatgtcctggcccgaccgtttcaccccactctccaacggga

SEQ ID NO: 78564 - DNA, 122 bp, Homo sapiens
ccagcaggacccggtcaccggggtcttccagaggggcggtagccaccgcacaggagccagcggcatcccccaaggagccgcaagccctacctggcttaacccccggacatgtgtgtcgctac

SEQ ID NO: 78565 - DNA, 122 bp, Homo sapiens
ggggaaactgaggcagagctggggttaccccagaagaccctcagattcgcggtaggatgacgtcccacacttggtgactttatgtggctcccggaccagttatgccgtgcaggaatatgccc

SEQ ID NO: 78566 - DNA, 122 bp, Homo sapiens
aggacctagtgaaggggcgggttatcaaggtgtgttgaggagggggtgaaaggaggttgtcgaaggataggaagcagcacaggactggaaagagggaagctgggaccacccgtaggcccaaa

SEQ ID NO: 78567 - DNA, 122 bp, Homo sapiens
cccctcgtccgccatgccacagcgaagatcaagggcgggctcaggcgctggccgctacgccggcaaacaacctaactcccaagcgctcaggaccgaagtgtccctacgccgggcgccaccgc

SEQ ID NO: 78568 - DNA, 122 bp, Homo sapiens
ggagttcctgtgatccagccttagactgtttttctagcctcagctttttctacaacattccgtatctcatgttctaatttaaccttagataggtgctcattaaaatgttcataactctgctg

SEQ ID NO: 78569 - DNA, 122 bp, Homo sapiens
gatcgtattttaacccatctcaggaaaccgagtgtcatcactgagtaatctcattttggacggcttggatttggggatttgcactccattttcaccattattaagtgtgtcaggtttacaac

SEQ ID NO: 78570 - DNA, 122 bp, Homo sapiens
cacctgggccgataataaatgacttcaattatgtgatctaaatcatgaaccccacgcttgcgacagaacatcccccacagctgtcaggttgtcaagggtaacagaggtcatgtgctcatggc

SEQ ID NO: 78571 - DNA, 122 bp, Homo sapiens
acccagagcatatcacagcttctcagagcagttactggaacattggctttgctttacttacggactttaggatctatagacttctttgtttttaacatcacatgttgtttccatcagaagat

SEQ ID NO: 78572 - DNA, 122 bp, Homo sapiens
cgaggggcctgcaggggccaggcttgggcctggggaaggggtagagggggcggcgggggtcgctccaaagacttgtatttcgcgtttgcctccgggagctgggagtaaggccttggatggcg

SEQ ID NO: 78573 - DNA, 122 bp, Homo sapiens
aatggaggcggaagccattatcctcagcaaactaacacagaaacagaagacccaacaccacgcagtctcacttacaagtgtgaactgaacaatgagaacacatggacacagggatggaaaca

SEQ ID NO: 78574 - DNA, 122 bp, Homo sapiens
gacaggacgagcggaaatactgccaggattttaccacctctcgcccatttatttacttctcggtcaccgctttcgggggacagataaacaccacagatgcccatcaaaggggcgcacgggtc

SEQ ID NO: 78575 - DNA, 122 bp, Homo sapiens
acctcagatgatctgcccgcctcagcctcccaaagtgctgggatcacaggcatgagccaccgtgcccagctaagcacaagtaggtgtatctggggttatccttctccaagaaacactcagag

SEQ ID NO: 78576 - DNA, 122 bp, Homo sapiens
cggcgtccccagcttttccccattctgaagagtcagtggccggtgagtggtgctcggcggcggtccagcctggacgctgtggcgcggccccccctcccccgcccccttctcctggggcctct

SEQ ID NO: 78577 - DNA, 122 bp, Homo sapiens
acccgggactcgggcatgagaccccattacgggcctgagcacagcaccaagaccgtcaaacgctaaaaacaggcacaggtggaagtctcacgtggcccgcccccccgcatctagacttgtgt

SEQ ID NO: 78578 - DNA, 122 bp, Homo sapiens
gggagccctaggtttcctctccagccaacggggcgtcgctgccttaatgggaggagcactcggaagggttggtttgggcctgaaactctcccaagtggcatagccccttttccggtatgggg

SEQ ID NO: 78579 - DNA, 122 bp, Homo sapiens
tgtgttcggatggggctggtgcttgggaggctgctctgtgcttacaagaagagttctacccggtccatctttatcacatcttctctaatactaagttcagagaggctttagctcattttcca

SEQ ID NO: 78580 - DNA, 122 bp, Homo sapiens
tcaggtcccgaggccctgcagccccacaggcacgtggccgcttctcgggggtggtgggatcgtgtctgttccgcgtcagttctttcttgggcagcagtcggaggctccagcgctcttggtga

SEQ ID NO: 78581 - DNA, 122 bp, Homo sapiens
ggggcggggccggcgacgggggcgggctctgcccgggggcgtggccgtggggggtggggccggcagggtgtcgctggggcgctatctgaagatgggcctgtggaaatggcagtggcccagcc

SEQ ID NO: 78582 - DNA, 122 bp, Homo sapiens
aaagaccatttcattttgcccagcaatagcctagaatctggcacctgtaggactaaagaccgggaatagcctggaagaagtgggtggggagcgccaggcagggcagaccagatcgcaaagga

SEQ ID NO: 78583 - DNA, 122 bp, Homo sapiens
agcttctttctcgcctttccgagattatttactatctgcgagacacttccggacgcacagcgcaacccgcccctcagcctcgcgtcacttccttccaggcctgggtaggataaaacacggag

SEQ ID NO: 78584 - DNA, 122 bp, Homo sapiens
tcccccaggttcccatttccacggcttattcggctgacccagccccttcccctgcaagggcggcgcgctccttgccgctgtccagcagctgtttctactgccaggtgctgcgtcccgcgatc

SEQ ID NO: 78585 - DNA, 122 bp, Homo sapiens
agggttcctgggaccactgggccatggggtagacagtaggaggcctcacagtcccataggcgtagggccccgcctcctcattcttcagtgaataccgatggacacgttggaaggctccaacc

SEQ ID NO: 78586 - DNA, 122 bp, Homo sapiens
tgcgtgaatgaatgaatcccacctggttcagagctcgggtttctcaagcccccttctccgcgcaaaggaaaaaggtcatcccctgggcgcagctccgcaagcagcgcgaggcgtggcaggga

SEQ ID NO: 78587 - DNA, 122 bp, Homo sapiens
attctcatttttcagataaggaaaccaaaacacagataggttaggcaacgtgcacaaggtcggagagaggcgagggctgcgtcaggattggaacccaggtgtcagcttccagcatgcagagc

SEQ ID NO: 78588 - DNA, 122 bp, Homo sapiens
ctttgagctcaaaggggcatttcgtgaggtcgccttttggttcggagagcgcgcggcgatcgggtggagggggcctggcgggaagaaagctggggcggggaaggggcgcgggccgaggtggg

SEQ ID NO: 78589 - DNA, 122 bp, Homo sapiens
gaccgtcagagaggccccccatctcttcgcagacccctcctccgcgctccccccgccccccgcctgctgtactacctccttgaccgaggctcgatcgcagatcacaatttcctccttgtcct

SEQ ID NO: 78590 - DNA, 122 bp, Homo sapiens
agctctgattggcctggctactatgatgagtgaagtccaccagggaagacactgtggcctcgtttctcatcctcctgtccccaggagtaacacagaagcagctagtaacacaacagcattgt

SEQ ID NO: 78591 - DNA, 122 bp, Homo sapiens
gcctgaccctcctcaaacgcacccagaggagactcctggtcccctgtccggaccccgccccgaccaggtccagccccgcccaacggcaagttaagagccccccagtgccagacgctccagac

SEQ ID NO: 78592 - DNA, 122 bp, Homo sapiens
tttttttttttttgtgggatggattctcgctcttgtcgcccaggctggagtgcagtggtacgatctcggctcactgcaacgtctgtcttccggggtcaaacgattctcctgcctcagcctcc

SEQ ID NO: 78593 - DNA, 122 bp, Homo sapiens
gggacagcgcggccctctccccaccgccccctttcctccccgcccgccccgcccccgcagcgccggccccgcccccgaaccgcccctccccggagcgccaggccccgcccacggaccgcccc

SEQ ID NO: 78594 - DNA, 122 bp, Homo sapiens
ccccagctccatctggaccagcccgcaccattgttaacacaggttgaagcctcatccttccgcacatctgaggcttgcgttgactccttctgccctggaattcttttgtttgctgctgaata

SEQ ID NO: 78595 - DNA, 122 bp, Homo sapiens
caaggcgtctggggcccccgcggctgcggatggcttccagaacgtgttcacaggtgagcgcgccctgctgctggcctccgggtctcaagtcgcctgtcagtcagggccttcccctgccaccc

SEQ ID NO: 78596 - DNA, 122 bp, Homo sapiens
cggtttgtgggggcaggggcggtcggcagcagttgccggcggagttttctcgctggtgggcggacccgagcggaggcccggaggacagccgggagcgcaggctcgacgccaggtgcccggct

SEQ ID NO: 78597 - DNA, 122 bp, Homo sapiens
gggagggtcacgcagccatgacagtgtcggtggttgtgtgtcaggagcagatgatgtggccgactgacgggcgagccacgtttgcagccggggtacacaggacaaaggggtggcacacatcc

SEQ ID NO: 78598 - DNA, 122 bp, Homo sapiens
aaactgaaggaaaatccacagggaccgggattgatggagacgcaaaatgggacagaaaggcgggctgaggaaaccaactttcagggaagtggttattacctggatggaatctggaaacacca

SEQ ID NO: 78599 - DNA, 122 bp, Homo sapiens
ttctctgataatccttttaataagggaataaacttcaggaagtggttttaaaaaatattacggctgaaaagtgctagtgagaggaaactacagacctaaacagcttttccatttctttggat

SEQ ID NO: 78600 - DNA, 122 bp, Homo sapiens
ggcacctgaggcacgagtgtcaggctgcggacaccttgctcttatctttcccgcctgggtcggggagggtggcgtcccgagggcgtgcctgaagagccgggacacggggggagaggctcggc

SEQ ID NO: 78601 - DNA, 122 bp, Homo sapiens
agctggaggtcccatggtgagccccagagggaaggaaggggagggggctgcgagaggaggcgaagagggaaggcgactcaccctgttcttggttcaaagagctgggtgtgtggagacagaag

SEQ ID NO: 78602 - DNA, 122 bp, Homo sapiens
tttaatctttcatgcatttagcagtcatggatggtgccagcgaaggaacaggtgccagggcgttgtgactccacccagcgctgcttcccgggaccttccaattggacaggagctgggggaag

SEQ ID NO: 78603 - DNA, 122 bp, Homo sapiens
ttcaagtaacggaaggtgttgccccgagaacagtgaggtcccatcactggacgtgttccacggagactgctgaaggtgagaggtgacagcgggctggcagccctggctcgctctcggcgcct

SEQ ID NO: 78604 - DNA, 122 bp, Homo sapiens
cggggacgaagcagaggtcgtggcggacagccggcgggcttgggggggggcggtgggcggcgatccacctgggcgacgtggcagccattgccggcgcctcgagacccctccccacccggccg

SEQ ID NO: 78605 - DNA, 122 bp, Homo sapiens
ttcccgcggtcggcagcatgggtcgggagtcacggtgaggcagagcgccgagcgggctagcgggcgagcggcttcttggggtcgtgagaagaggcgggagttgaggtggccgccgggccagg

SEQ ID NO: 78606 - DNA, 122 bp, Homo sapiens
gatgtcagcttcggtggacacaggtaatggctgtcctgtggtcatcatgttccagcatctcggaaatggggctgttgcttcagtgaaccaggaccttaaaggacctgacttcttggtgagca

SEQ ID NO: 78607 - DNA, 122 bp, Homo sapiens
tccttacacctcggcctcccatagctgggacttcttgtatttttgtagacacctgggtttcgtcatgttgtctaggctggtcttgaactcctgggctcaaggcatcctcctgccttgggctc

SEQ ID NO: 78608 - DNA, 122 bp, Homo sapiens
gcgaggtgcgtgtgccattggtaaaatggctttctcagttttggcttcccacaaaaggagcggaagggggagctgtcatgattcccagtgcccacagagccccctctcctggccacagcgcg

SEQ ID NO: 78609 - DNA, 122 bp, Homo sapiens
ttaaaaccctgtgttatgcaatgaattcactcctcgttgtgaatatgcatagaaaggtagcggtatttgttcctttggcaagtttggaagagcagatttgcttttgaaacagctacatttta

SEQ ID NO: 78610 - DNA, 122 bp, Homo sapiens
tccgactgaacgtggcaggcagcaccctgtcgcgctacctgcgggatctgctggtggcggcgaaccctgacctcttgcagcaggccctgccccgcaaggccatcacacatctcaagaagcgc

SEQ ID NO: 78611 - DNA, 122 bp, Homo sapiens
tggggaacaaggggctgtcatttgtctttttctttgggatggtgagcagtgagcagggcacgccgcgaggagcaaactgcagcccaagcacacgcggtcagcacgcggagcacaggtgggga

SEQ ID NO: 78612 - DNA, 122 bp, Homo sapiens
agatgctttagagaatgtggtctgggaggctgtctccggagatgacattgaagctaagaccgaaaagaggctgtcactgagatctggagggatggtcccaggaaggaataatggtgagaaca

SEQ ID NO: 78613 - DNA, 122 bp, Homo sapiens
ttcctctccccacctggctaattcccattgttccctcaagagtgggtgctgtgacacccccgccagaaccccacagtgccctgcaactttgcacagcactatgactgcctaagggcagggat

SEQ ID NO: 78614 - DNA, 122 bp, Homo sapiens
cggaggcgggaggggaggaacagccttgggtgagagcctgagaggtgctgctcgtccgggcgatggaggtcagcaaaaacagtgatgaacgcgtgagcacgtggcctctgctatgtgaggag

SEQ ID NO: 78615 - DNA, 122 bp, Homo sapiens
cacctttgccagcaccagcaccctgcatggactgggccgggcctgtggcccaggcccccacggactgcgcagaaccctgtgggcactggccctactcacctcgctggctgccttcctgtacc

SEQ ID NO: 78616 - DNA, 122 bp, Homo sapiens
taactcagagaaagtgtgaatggggagacaggaggatgttccaatgtcccaaggctcctgcgtttttgaaagcctttgcacctcgtttggggattcctggagggaggcctgcgctcattcat

SEQ ID NO: 78617 - DNA, 122 bp, Homo sapiens
ttcacatagcaagtggtagatgcaaatgcttggaaataaatcgtaggcacttattccagccgtaattatttatctttaatagttaatgttttcaataaatgaccttatggatttctccatat

SEQ ID NO: 78618 - DNA, 122 bp, Homo sapiens
atgctggcttataacaggtccaagctctgcaacatcctcttctccaacgagctgcaccgtcgcctctccccacgcggggtcacgtcgaacgcagtgcatcctggaaatatgatgtactccaa

SEQ ID NO: 78619 - DNA, 122 bp, Homo sapiens
gcagctaaatccatcaaagccccgcgcccggctccgcgccggggctccgcgcccctccctcgagcttgcccaccctccagtgccagctgcaatcctgcggcaccgggtggggagggaggagg

SEQ ID NO: 78620 - DNA, 122 bp, Homo sapiens
cctactcctccctgtttccgcctcaccagcttcccttctctgccagccccaccctgcccccggcccgtgtggctaaactgcccaactgccgattaaaacccgcacctcccaacatacctcgc

SEQ ID NO: 78621 - DNA, 122 bp, Homo sapiens
taccaggtgctctaatggtgtttgcaggaatcagctcatttaaccgttgaggttggaaagcgtgttactgtcccatttttacaaatgagaaagcaaaggtccagggcctttaagtaacttgc

SEQ ID NO: 78622 - DNA, 122 bp, Homo sapiens
agttgtaagatgttaactaaatttctgtgacaaatatggttgttgttgtttttaaaataccgagaacatgatatagttaatgtggaattctaaagataatctggtagttactaagattttct

SEQ ID NO: 78623 - DNA, 122 bp, Homo sapiens
tgtactgtctgaacccagggatcacaaattctgttcattggaaagggttttaaacggagtcggaacctgagtagatttccaaattttacagccaggactacagaagtgcatcattctagaat

SEQ ID NO: 78624 - DNA, 122 bp, Homo sapiens
ccagactgccctaagagtgcctagccaggctgaatccagcatatttagccaagctaccaacggagtagctgaacaaaatgggcatagtacacctggtcaggctggccgcagagcatccaacc

SEQ ID NO: 78625 - DNA, 122 bp, Homo sapiens
cagcgttacatgataggaagcagccgtggctgcactggagctaagacttctgacgctgggcgcacacctgtcctcaaccagctgaggctgtcctgacgctctcgttggagggagagaaggaa

SEQ ID NO: 78626 - DNA, 122 bp, Homo sapiens
tgaccgaagcattggtgacagcctgtgcggtgacccctcagggctgagacccagcaaggccggcctgccctgtgctgccccaacttcctcgcagggctgcctgggctccgcatgtgctgact

SEQ ID NO: 78627 - DNA, 122 bp, Homo sapiens
cctcgtactgcgccgctacacctgacctcaggaggacccacagccgacttcaggaggacccgggtgccgggaccctgggcaaccataacaatgaacaagggcctgattaaaaaaaaaaaaaa

SEQ ID NO: 78628 - DNA, 122 bp, Homo sapiens
ccctgaaacctagggaaggtttcctggaggcactggactccagatccctgcagggcgggacggagaaaaagccctgaataccactgcccacacccctccaagtcgggagcccccacgcgcca

SEQ ID NO: 78629 - DNA, 122 bp, Homo sapiens
gaagtctcggccttcacttcacttccgccttcccagcccgtgaacacgaatgcgcctgcgcgcacctctctcagcggaagtaatagtgacaaagctgggttcgcggctggcccaggagtgcg

SEQ ID NO: 78630 - DNA, 122 bp, Homo sapiens
gcactgtgagcctggaggtgctgctaacgctgggagaagcggtagtgaaatgaagcgaggcgacagcttttaccagtgtagggacatttaaaaacgggatagagagcacaaggagcgtagac

SEQ ID NO: 78631 - DNA, 122 bp, Homo sapiens
cattatccataaccatattggatgaggtgcttcctgactatttagaatttgggtatccaacgtacaagcgttattttcaagatctataagagtttatatttgctcacctagattttcttcta

SEQ ID NO: 78632 - DNA, 122 bp, Homo sapiens
catacgtacattttcattaccagcacagtaccaggaacaaaagtcatcatagtgatcccacgaccacaaaaacaagtccttctcccgttactgtcactgactgtcactctatccctcaaaac

SEQ ID NO: 78633 - DNA, 122 bp, Homo sapiens
atataaattattgaaaacagatcacatgtgggcccgtgtctggccgccgccgccctgccccgtccctgcggccaccacctaatttattgccgtgcgtcctgctgctgtgactgcttttgtac

SEQ ID NO: 78634 - DNA, 122 bp, Homo sapiens
tcatgatctccttaatggcaaaatgctagaaagacttaccgaggggtctgaagatgccttcggttctccaggtcctgaactctgttccagttacaggaggactggcaatccctaggtttcct

SEQ ID NO: 78635 - DNA, 122 bp, Homo sapiens
acggcagacgaacatgctgctgctcacgacattattacaaatgtcactgagcagggcctccgcgtgcacggcccccaggggacgctcactgccgtctccatgggcaggacccaggatgagct

SEQ ID NO: 78636 - DNA, 122 bp, Homo sapiens
tgctactggcaggcctagtgttctgttaatggaaggatgcagaccggagctgttcctattcggccatcttgccagcctagattgaaagattaaagattgctagattgaaataggcttaaaag

SEQ ID NO: 78637 - DNA, 122 bp, Homo sapiens
ggaaacagcaagggcgcccgagcgggagaggttccctcggtgagggggtccgcgcagcggcggaccccgcaccccggcccccaacggcgcctaggaagttgtcactcctctcatttaaagcc

SEQ ID NO: 78638 - DNA, 122 bp, Homo sapiens
gctatattatctttctaaaacatagacctactgacatgcctcccttcctcagaaaccttccgtgggtggttcttacagccttcaagatggagtccagactcttttttttttttgagacagag

SEQ ID NO: 78639 - DNA, 122 bp, Homo sapiens
gagataatatttggccagagctacgtgtagcacagggagccagggcggcagctgcacctgcgagcagcgcaggcggcaggcgcggcctccgggcgtggtggtgggcgtggccgggcggcggg

SEQ ID NO: 78640 - DNA, 122 bp, Homo sapiens
atggagagtaaaacgtcaaagaagccaggcatctcgattgtgcagtgactcggcgcctggcgtggcttccggcttcccgcctgcgtattcccaagtagccgcctgaagacctgtcgaataga

SEQ ID NO: 78641 - DNA, 122 bp, Homo sapiens
acatttcatccagtgcttggaacattggaagatagtattgacttaaatgtttgcagtcaccgtgctatgtactatgcaccaggcattgtgtacactgattgactgaccatgccatatgagat

SEQ ID NO: 78642 - DNA, 122 bp, Homo sapiens
aacaatgtttgtcatctcagtacacacatggtcatttattttttccctctgcatgttgtgcgctttttcagtttataatgtccctgatccacttgtctcatactagctgcaaacaaggaaac

SEQ ID NO: 78643 - DNA, 122 bp, Homo sapiens
agctagggctggaggtggaggaaggatgagatggacaggaatccccagatccccaatctccgtatcaagcaacaagagggacaacaggaagcaaagaggtcccaaattctgcctttagcagt

SEQ ID NO: 78644 - DNA, 122 bp, Homo sapiens
caccgtcaagggtgatgttggctctgggtttccatagatgtctttaccaggttaaggaaacgtcccctctaatactatagctgagagcttttaatatgaatgggtgttaaattttgtcaaat

SEQ ID NO: 78645 - DNA, 122 bp, Homo sapiens
tatgtcgtcagaggctcctcacgccaatcccggggcggcaggggcggcgcctcgagctctcggcaataaaactttttgatgttcacgttgctaattgccgaggtcctcttccaggattggct

SEQ ID NO: 78646 - DNA, 122 bp, Homo sapiens
tgtagatcactgagtgtttgcatggaggcttacaaagatacgactggcccagagggcttccgggtgatccgggaactgcctgtcattggagggggctgggcgggtggattaaaagaccttgc

SEQ ID NO: 78647 - DNA, 122 bp, Homo sapiens
tggaaggaagatccagcttcccccagggccagggccagatgcaggggaatagctccactgcggtgctgggggtggggcaggtatttggccgccagtggtcccatttcaccagatttttcctg

SEQ ID NO: 78648 - DNA, 122 bp, Homo sapiens
cttggatgggagtgtagttaggcaaaggttttcatgcgaaatcaggaaaaaatacgagaacgtattttattaacggaaagaatgcagatttgaggacccgcccgcgcgctcggagcgcccca

SEQ ID NO: 78649 - DNA, 122 bp, Homo sapiens
gccgaatcgtgtccagaggtctcttgtggaacatttctacagctgtctccttcaactagacgcttattcatgtcgccttaatgagaaacaaaacgttctctaatgagcaattacagagcgac

SEQ ID NO: 78650 - DNA, 122 bp, Homo sapiens
ggagggcggggtgtggggggcgggggagggcgggggcgcgcggaggtaacccccggctcgcgcagccattgcccggctccctgtcactcagcccgcgcggggcccccgattggcggcctagc

SEQ ID NO: 78651 - DNA, 122 bp, Homo sapiens
gcttcagcacttctatgtcaccttggatttcaaatgtgttgtcaaaattaaacagatactcgagtttgtcgttggagatgctgcagtcgatgacggtcttcttgctggtgttgacgacgatg

SEQ ID NO: 78652 - DNA, 122 bp, Homo sapiens
tggcttcactgccccgggtgggtgcctcattgctgcaccccctgcgccccccgccgccctcgccctgccccacccgcaggaggttccccgagtccactggctccaagtcggctgcctccagc

SEQ ID NO: 78653 - DNA, 122 bp, Homo sapiens
tgggtcacatgtgcatctgtaaactcaccactgtgaacccagacatgtgatatgctgattcgccagcttaagtcacttttcgacatctggggctgagactgccagaaacattgttgaaatgg

SEQ ID NO: 78654 - DNA, 122 bp, Homo sapiens
cccctttgtgggcctcggctttctcatccatcaaacaagaataggatgatgagaacaacgcgtcctccaggccttcaaagagttattgatggggttaaaggccacagtgttgactaagatgc

SEQ ID NO: 78655 - DNA, 122 bp, Homo sapiens
ccgggccccggccccccgcccggcctgccccagccccccactctgaagctttccatcttccggagctcctgaaagcaacgcacacggatccgcgctgagctcaatacattccccaagccctg

SEQ ID NO: 78656 - DNA, 122 bp, Homo sapiens
tcacacagtatactcagctaacaaacctgcccatgtgtttcctgaatctaaaataaaaatcgaaataatttttttaaaaaagaaaaagacaatagtattacccatgggacaaaatttgtact

SEQ ID NO: 78657 - DNA, 122 bp, Homo sapiens
cccctagagaacgtttgtctggggaataatgtaagtttttggagcggctctcctgagcatcgctgagcatactaattgttcattactggtacaaaatgctatataaagggatactttgcgaa

SEQ ID NO: 78658 - DNA, 122 bp, Homo sapiens
ggccaacccctttgcattacatctgcctgtcagggttggctctttaatctgtcgtgccctcggtattgctctttgtctgcccgtgaataaagtgcagcattgtggttagtaatcccactcca

SEQ ID NO: 78659 - DNA, 122 bp, Homo sapiens
aacagagaggacccaactctacaaaatttttttaaaaattagccagacttggcctgggcacggaggctcacatctgtaatctcaggactttgggaggtcaaggcgggcagatcatgaggtca

SEQ ID NO: 78660 - DNA, 122 bp, Homo sapiens
tacttgggaggcggaggcaagagaatcgcttgaacccgggaggcggagattgcccttcagcgtaggtgacaagagcgaaactccatctcagaagaaaaaaagaaaaagaaagcaatggataa

SEQ ID NO: 78661 - DNA, 122 bp, Homo sapiens
gaacccgcttgcagcaaggtaactgtgcgtcctgtgccttcttgaggcggcggcagcgatcggccctgaccatagaggcggccgtggcgcggaggacttgacctttacggcacgagaggagg

SEQ ID NO: 78662 - DNA, 122 bp, Homo sapiens
ttagcctggtttttgctctcatgacacccaggaggtgctgaaagcccgaggagagttaatcgagttgtgaccttgggtaacaggacagagtcccaaatgagaggaaaccaccaggtcaaagt

SEQ ID NO: 78663 - DNA, 122 bp, Homo sapiens
cccgctcccggcccgctcgtcggcgcaccagactgagactccccttcaggacgctcttcgcgagcggtacccagaggcgaagtcgagacaagcccaggagcccccaccccccgcccgcgttt

SEQ ID NO: 78664 - DNA, 122 bp, Homo sapiens
tctgcttacattgtaaggtgttggctcatttctgaaagcaaaggcatttaaactatctcacggacaactcactctggcccaaaccaccacattcacttgaaacaagaagtgtatgcagtggt

SEQ ID NO: 78665 - DNA, 122 bp, Homo sapiens
atgatggcagcaggttccagtgggtaggtgggtcgggccgaaccaggtttaaccccgagtcgcctctccgcacccgagcgcacacactcccctctggctctcgggccacatcatccccagta

SEQ ID NO: 78666 - DNA, 122 bp, Homo sapiens
tgccaggctgggacgggccgggcaggcgctcacacaaacacagggccctggcgtccggcacgcagaggagacgtcatgtctgtgtgaccacacttcatgccagactgccaggaggccgtgcc

SEQ ID NO: 78667 - DNA, 122 bp, Homo sapiens
aacccccacaaatgtcctaagaaaagcacctgtgacattgaggggccaggagagctgtcacgtgagggtcagctgaggggactaaagacattcagccaagaggagagaaggttcaggagtgg

SEQ ID NO: 78668 - DNA, 122 bp, Homo sapiens
tgggtgacaaaaatgaaactgttttagaaaaaaataaattttactttgttagaataccaacgcaaggttccttagaaggttgttgcagcatctgccctctatgggcagctgtacagtgacta

SEQ ID NO: 78669 - DNA, 122 bp, Homo sapiens
ggctgccgctgcttaagactctgcactttgagagccgctgatacagaacatttccagccccgccgcaaggccctgggctgagggttttttaaagctccccaagtgatttttgagtgcagctc

SEQ ID NO: 78670 - DNA, 122 bp, Homo sapiens
tatgaatctgcgtgatgacgtgtgacaaaaacagacacttactgccgtagggagagttagcggaggagccattaagaaatccaggcgagccagggacccctagactggccatggcgccactt

SEQ ID NO: 78671 - DNA, 122 bp, Homo sapiens
acgaaggagctggtggtggccaaggctggagtctactatgtcttctttcaactagagctgcggcgcgtggtggccggcgagggctcaggctccgtttcacttgcgctgcacctgcagccact

SEQ ID NO: 78672 - DNA, 122 bp, Homo sapiens
gccatgccaggcattttgaggaattcttggctactgtctgaccacctgaatccttggagccgaagaggagcgaggagcagtgttcactcttggaggaaatgggatatttcctccggcccctt

SEQ ID NO: 78673 - DNA, 122 bp, Homo sapiens
tggtcagcacatctaggtggggctatttgaagggggagtggaaagtcggaactagcgctccgaaaaaagacacaggctagtactggatggtaaatgccaggtgtacccacagacacctgaga

SEQ ID NO: 78674 - DNA, 122 bp, Homo sapiens
ctctttgtaacactgtcctctacagaattgtgcttatcagctgcagcatggacttttatgcgcatttttatctcctctggttttgaagacgcagctttatctccacctgccactgggattct

SEQ ID NO: 78675 - DNA, 122 bp, Homo sapiens
ctccagagagagacagagatggcccagaatctgcccctttggtaaagcggtgggacagggcgttggctagggaagaggagaaagtactgaggcttcctgggaggagcaggaatctggtgtgg

SEQ ID NO: 78676 - DNA, 122 bp, Homo sapiens
ctgtttgttgagtgaacaaattaatgaccacatgaatttgcagcttctgtaggagaaaaacggcgtcatcgatttagtctggtgtcctaaaaggaccatgagcctgtcatgggggggaattc

SEQ ID NO: 78677 - DNA, 122 bp, Homo sapiens
tcctctagcgtctactgggtgcagggcactggggagacatgggggatgcttctttgggctcgtctgtactaggtatggttatagggtactgggggttgcctaaaaaaatgctgtgtgacctt

SEQ ID NO: 78678 - DNA, 122 bp, Homo sapiens
cgagcgatcactcccacctctcccttcctaagtgttgggattaacaggagtgagccaccgcgcccggccaagtctccaacttgctcgaggtcactgaacttgcaattgaagaagctacgatt

SEQ ID NO: 78679 - DNA, 122 bp, Homo sapiens
cacgcccttccgcctacacgcagtcctttcggacagcccaaagtgaggtggacgccctgccgtgtgctgaatggcatgtggcctccgcccaggtctccagggagctgttggaaacccagtgc

SEQ ID NO: 78680 - DNA, 122 bp, Homo sapiens
tttaaaagctaaaactgaaacggaaacagagctcctggcagataggaccaggagccacagcgaaggaggtggcctgtgattaggtttttataaatgggcaggtattaatcagggaaaatgga

SEQ ID NO: 78681 - DNA, 122 bp, Homo sapiens
gcgccgcggccgctccctgcgtcccgcccgggccgccgcctccgctgtcaccgagccccgcgcccggcgcccgggctccggctgtcactccacgcacacttccctccgcgcccggcagaggg

SEQ ID NO: 78682 - DNA, 122 bp, Homo sapiens
ggggccggagcgggtgggcggtgtggctgtgtgggctgggcgccgcggccgtgctgccagcggacccgcggcgggctcgggcgcggagcgggggcgcgcggcgcggagcggagcgtctgagc

SEQ ID NO: 78683 - DNA, 122 bp, Homo sapiens
accccagcttgcctggggtccacgggactctcttcttcctagttcactttcttgctaaggcgaaggtcctgaggcaggacgagggctgaactgcgctgcaatcgtccccacctccagcgaaa

SEQ ID NO: 78684 - DNA, 122 bp, Homo sapiens
actcagcatttgcttctgggaggacccgacccgagacactcacgtaaaagaggatgcccacgtacagatgtggcagcaggccctccgagctgggattcagacccaggtcagcacgactccaa

SEQ ID NO: 78685 - DNA, 122 bp, Homo sapiens
ggcccggaggagagttggggaggcggcggtggcctcactctggacgcccctgggtctggccgtgggccgtggcacacacagtgtccctgtcaggcctcacacggtgccaggccacacgctca

SEQ ID NO: 78686 - DNA, 122 bp, Homo sapiens
gtgagctccgcccattgcgttcacagggttctggcgcctctagggaggcctcgccttcaccgtgacgccccactcttccgggcacgcccctgcccaaaggctttaaaggcgccgtgtgggac

SEQ ID NO: 78687 - DNA, 122 bp, Homo sapiens
ctttcttttttgagacaaggtctggcttgtcacccaggctggagggcagtggttagatctcggctcattgcagccttgactttctgagctcaagcaattctcccacctcagcctcctgagta

SEQ ID NO: 78688 - DNA, 122 bp, Homo sapiens
tgcgagcccgcccgtctgggtcctcactccgccctcccgccgttggatttgcgcccggggcggcccccgactttgcgccccgtagttgagttccgtttatggtctgatttccggcctctcgc

SEQ ID NO: 78689 - DNA, 122 bp, Homo sapiens
aaaaggagtctcgcccttgacctggtgtccttgtgttgcaggcgtggtgtccctcgtggccgttcacccctccaccgtcaacccgctcgggaagcagctcttgccaaaaacctttggacagt

SEQ ID NO: 78690 - DNA, 122 bp, Homo sapiens
cttggctcaggagtgaagctgcagaccttcacggtgagagttacagctcttaaggtagtgcgtcgggagttgttggttcctctcggtgggctcctagtcttgctagcgtcaagactagaagc

SEQ ID NO: 78691 - DNA, 122 bp, Homo sapiens
ctgaggccgctttgtgaggtcctcctctgcgcagcacgccccccacccctctcttggtgccgccgcagctactccctagggggctttgctcttggtggtacgcacccgagaccttcttattc

SEQ ID NO: 78692 - DNA, 122 bp, Homo sapiens
ttcttagagcaaaatggctgttcaccagcggcgggtatgttcttagaccctccatctgcccgggccctgctgggagaaggcctcgggcctccacctccagcaatcctctaatacctcctcag

SEQ ID NO: 78693 - DNA, 122 bp, Homo sapiens
taaatacgtaattggtttctgcatacctcatcatttcagtttacaaagaaaatcatttctcgtttcaccacttcatgcaatttttatatctattgtgagtgggtttttttcttcatgctgac

SEQ ID NO: 78694 - DNA, 122 bp, Homo sapiens
atccggatttccctgctttcaagcttctgacttgtcaaggtcactgggggaaatgaatgacgtcccttgaacgcccaggctgtactttgtggatggccttctggaaaatttagctaatgctg

SEQ ID NO: 78695 - DNA, 122 bp, Homo sapiens
tcctgagcaggcagggctggcctgagtcatccccagcattaacggcagggcctggcaccccggcaagaaaaacataatggactctggcaccggatggtcctggttcaaatcccagttctact

SEQ ID NO: 78696 - DNA, 122 bp, Homo sapiens
tttcgcctgtacgcaattacacttttcttttccaattgtcaacgcaacgttgatgaaatacgagctgcttcttgggtagtatttaaaaacggcagccaaaaatctctatcaaacaaagctgc

SEQ ID NO: 78697 - DNA, 122 bp, Homo sapiens
gagagggaaagggacctgtccagggtcacacaggaatcatgcgtcaagcctccccagccacggacttgtctccatccagggcatttcagcccctgcagggcagtggcctgcccctcctcctt

SEQ ID NO: 78698 - DNA, 122 bp, Homo sapiens
gcctcgccccgggcctcagtttccccgcctgttagaagctgggcgggccacaaacagggtcgctaggcttcagggtgtgcatggactgcggccctaggatgccacctgcggtctctgacctc

SEQ ID NO: 78699 - DNA, 122 bp, Homo sapiens
gagtgaagacggattatgaatgaaggaaggaactgcgcacagatcctccccccatgactgcggcggccctcgaggccccttaggggttcaaggcccccatgtggggaacacccagttagatg

SEQ ID NO: 78700 - DNA, 122 bp, Homo sapiens
ccttacttggagggtataaagccaagtgaactagtttctccccaggctaatttttcacaccgctcttctttgttacagagaaatgatatcgccatggcaattacaaaatttgatcagtttga

SEQ ID NO: 78701 - DNA, 122 bp, Homo sapiens
caagggtccgcactgctggtggcactggcagggtcagagtttgccacagctgctgctgcgcgccttgtgcaggttaccactgcagctgaacctacagcagaagcaggcagggctggtcccag

SEQ ID NO: 78702 - DNA, 122 bp, Homo sapiens
ctcaggaaactggaaatgagcgttagcatggagtgactgctaaagggttactggggggcccgcccaagtcccccagctcctttcttccaagtcccccacccacccccccgtcagacccaggc

SEQ ID NO: 78703 - DNA, 122 bp, Homo sapiens
ccctgggggtgaggaggtaccagctgtgtgctttagtcactggctgctttgaggctgggtcggtgccaggctggccactccttcttgtcccctagtgtgactttgcagagctcccggaaggg

SEQ ID NO: 78704 - DNA, 122 bp, Homo sapiens
aaggctggggccgacaagggttcttgcggcaacagggcaaaggtgtggcgggtgcagcctcgatcgaacggccaggcccctcccctccgcgggaacttcccgagagcagcccgcggggcccg

SEQ ID NO: 78705 - DNA, 122 bp, Homo sapiens
cctggcttctagtttacaaaagagctaagtgactgacctaggccgatgactcacaatcctcgttttacaattgagccacctgaggagctttttcaaaatacacacgtctggtttccagaccc

SEQ ID NO: 78706 - DNA, 122 bp, Homo sapiens
ggcgctccggtcggtcttgtgggaaatctgtttttaactgtagtctccctgtcacccagccggcggagcttggcggcacggattccagtgctgcctccaccgctgggaggcaccacttgaca

SEQ ID NO: 78707 - DNA, 122 bp, Homo sapiens
ccatcccggtggagtccttgctgctggatgtgggtcttgctggtcaaatgaatggagacccggagcacaggcagccgaggattgggcagtcatcgggatggcggctcatctgcaaatagcca

SEQ ID NO: 78708 - DNA, 122 bp, Homo sapiens
ggaagtctgcgttgtacataaggacctagggactccgagcttggcctgagaacccttggacgccgagtgcttgccttacgggctgcactcctcaactctgctccaaagcagccgctgagctc

SEQ ID NO: 78709 - DNA, 122 bp, Homo sapiens
ccagacaagaaagatgatcagtgcagcccctatgggtgtccagagtacccctctaccccacgggggctcccctgggttgggacaattaagcctcacttggtgacccatctggcagtcggagc

SEQ ID NO: 78710 - DNA, 122 bp, Homo sapiens
gcgcgtctcgacgcagaagacagaggactgggcatccgagcctcggaatttgggggtcctcggggtgtccgacagggtggagaaggatcgtgccccagggcaacagctttggggattgcccg

SEQ ID NO: 78711 - DNA, 122 bp, Homo sapiens
gagctccgccccttcccaccttctcagctttaattggcttaagattgccctcccctgtcacggattggtccgctctccactaaccatcctccctctaactgccgtctacaattgggtgctcg

SEQ ID NO: 78712 - DNA, 122 bp, Homo sapiens
ttatttttatggctattaagtatatgtctagagcctaggttgctgttctcatccctccgccggccagacacttctgtatagatcatttacccctttgaagatggacttattagtagggttgt

SEQ ID NO: 78713 - DNA, 122 bp, Homo sapiens
ggatctatcctgcaactcggagaacccttttcaaaagaagctacccaatcccaaaccttccgcttttttccaaagagagggaggagataaatagactcaattaatccgtcgactttttctcc

SEQ ID NO: 78714 - DNA, 122 bp, Homo sapiens
ggccaagtcgagggaggctccgggcgcggggcggggtcttgggcgtgggggcggagcctgcgcggggcgtagagatctgacgggtcccagatgcacctgcacccaggtgctgactgccccac

SEQ ID NO: 78715 - DNA, 122 bp, Homo sapiens
agtttttatttctccacccacagaaccatggagtctttaagtatcagaaatttgtctcctcgtcagaatcttctagatttccagaagtttccaagtcgctacatataaatgttgcagaaaaa

SEQ ID NO: 78716 - DNA, 122 bp, Homo sapiens
ttaacttgggtggaggaagtggcttctagcgacggacacacacggtgccatttggtattgcggatgctggagtctggttattgagtagacagatgcttgctggaacgtccagtgaaacttta

SEQ ID NO: 78717 - DNA, 122 bp, Homo sapiens
gctccaccagctcctggaagacggggtcacaaaagacgcagcccatgtgctgcgtctcatcgcccgggagtggggacttggccttgttgaagtccacatcaagcaaggcggcctcacagaca

SEQ ID NO: 78718 - DNA, 122 bp, Homo sapiens
atgaatacatttacaggcgtaaatgcaaaccgcttccaactcaaagcaagtaacagcccacggtgttctggccaaagacatcagctaagaaaggaaactgggtcctacggcttggactttcc

SEQ ID NO: 78719 - DNA, 122 bp, Homo sapiens
caggcggctggggcagagaccagcagcacgggacacgcgtgacctgtgctcctttcgagccgcagacgtcacagtgacgacgtttaagctcctaatctccccaaatcggcgggaaggattag

SEQ ID NO: 78720 - DNA, 122 bp, Homo sapiens
ggcagagggggcaaaaagctgcggcagtggcggttaaaaaaagccacggcggcaaaaacccgcggcggtgggggtaaaatcccgtagtggcgggggaaaaaacagcggtggcaaaaagtcac

SEQ ID NO: 78721 - DNA, 122 bp, Homo sapiens
gcaccccgccacgggttggggcatctcggggaacacctggggccttccgtccagaagcttcgggaagggggctgcccaacctgggggagtggggacaagagcggtcaccaaaaccacaacaa

SEQ ID NO: 78722 - DNA, 122 bp, Homo sapiens
tggagcgtttgaacttgaacttgactctaggatcgccttgccaggtgaaggagaggagagcgacaaagaggggcaaagagatggaccgaggagagccaggctagctctctgcaacgactatt

SEQ ID NO: 78723 - DNA, 122 bp, Homo sapiens
tcaataaaatgagcagtcaccggcccgagtgccgccagcagcagccgggactgagggcagcgcttcgcttcctcggaggagcccactgtgccatcaacaaaccctgaagcccccaccggctg

SEQ ID NO: 78724 - DNA, 122 bp, Homo sapiens
tcaccacgacagggcccttcaaactgaccccgagcttcccttcccttggtcattcagcttcgcctctaggcccagggctggagtcacctttgctctgacccagttggtgcccacccgagtgc

SEQ ID NO: 78725 - DNA, 122 bp, Homo sapiens
ctggtccctgccgcccccctcctcggccagtctggtttcattttttctcctggagggggccgcggggaatgggtcgggggtgcagcgctggtgttggggggggcgcctgcgggcttgggaaa

SEQ ID NO: 78726 - DNA, 122 bp, Homo sapiens
ttgagttccagaccgctcctaagtcagcatatatccctcgcagggaaggcaacttctcaccgcgagatagttacaaatatagtaccgttgctactacccggtgccttcaatgagcagtcttg

SEQ ID NO: 78727 - DNA, 122 bp, Homo sapiens
ggctaccttcccgtcatcctccttaacagtcccagcaggtgaatgccttggaggtcacaccggaccgcagcatgattgctgctgcaggtatctgtgatccttgatctctaaactcctgagct

SEQ ID NO: 78728 - DNA, 122 bp, Homo sapiens
gaggcctgagcgccgcctggggatctggtccatctgggtggcagcttcccagaggcctgccgcgctcggcctgcagttctccgctgcggacggtaggtggcagcgggtcgtgagaaatggcc

SEQ ID NO: 78729 - DNA, 122 bp, Homo sapiens
ccttttctgttgttactttcccttctctctcccaattaaacgacgcaggatgtgtgtgtgcgtgtgcgccccctcccccgccctttatctgtggcaagaagtcttaggacacctagttggtg

SEQ ID NO: 78730 - DNA, 122 bp, Homo sapiens
gttttttttaaacaaatgagctacttcaaaaatacatataactcatctccctgcattgcccgtcttcaatttgtcaatcccattccatctagatcgctttttaaaaataaaactacacatga

SEQ ID NO: 78731 - DNA, 122 bp, Homo sapiens
atcacctcccaggcacacacactcaaagtcaaaaggaggagcccattccaacctctgtcccgcacccgagggctgatggagtcgggtcccaacacaacatcatccctttccccctctgccag

SEQ ID NO: 78732 - DNA, 122 bp, Homo sapiens
gccagtgtaagcggaggctaggacagtctcaaaggcgcctgggtccatgacactgggcagcgagatggaggtcatgcctttgagtaggacctgatcatggaagtaaggggaggaggcagcca

SEQ ID NO: 78733 - DNA, 122 bp, Homo sapiens
tgtcacaatatgattagaaaagtgttctttagagcagttaagtaactctggcactctcaccgtacgtggtgctgataatttttacaaaacaagtaaagcatagggacctgaaataaacctta

SEQ ID NO: 78734 - DNA, 122 bp, Homo sapiens
ctccagtgatccgcccatcttggcctctcaaagtgctgggattataggcatgagccatcgcgaccgacctacaagtcttgttgaccttaggatttaagtcccacctaaggtgcccagtgtct

SEQ ID NO: 78735 - DNA, 122 bp, Homo sapiens
cttccggaacagccgccccgggagcctgggataggggtgagtgctccttgatggcggccccgaacaaaggacgcctccagacccgggcttcctgtccgtagtttttcttggcccttggagtc

SEQ ID NO: 78736 - DNA, 122 bp, Homo sapiens
aagcatgcaaagtttattgtcaacctcaagtctctataaaaccagatcaaagggaacaggcgtttggtttcttcccagatcgctggggggcctcggggctcaggaagccccaggagtccagc

SEQ ID NO: 78737 - DNA, 122 bp, Homo sapiens
ctctctccagtgatacataggagcatgcaggtgcgggcatgctggggctggcccgagaagcgcctgtcggaggactctctttgccccttccccctcctgtttgacatcttttctccccttac

SEQ ID NO: 78738 - DNA, 122 bp, Homo sapiens
gcccttggcctcagccacagggccgttccagagccctgcgtgggcgaggccagggcggcgcgtgatggtgccctccgagaagcactgggaccagcaggaaaggctgcctgccggtgcgcagg

SEQ ID NO: 78739 - DNA, 122 bp, Homo sapiens
tttattgtgagggaaataacacgacatgtcattccttctgcaacagccttaagaactaggcgttcttatcccaatttcacagacgaggacgatcaagtcgttaatttgtcaaaggtcacccg

SEQ ID NO: 78740 - DNA, 122 bp, Homo sapiens
aagccacgttgcgccaaagccccagccccactgtggggacctcctaaagccacgttgcctcggcatcccctgtgaacccaggccttggtttcccaccccagaggcagccacccagcagctca

SEQ ID NO: 78741 - DNA, 122 bp, Homo sapiens
ctgggacaagtaagaaaggaaaggctcctgttcccatctctcatggagtttataggccaacgtaaaagatgaaacacaagtaaatacacaaatacaacatctaggaggtgctacaaaggagc

SEQ ID NO: 78742 - DNA, 122 bp, Homo sapiens
ccattgtccctaaaatccttaggaaaaggatggagtagggaaaatgtgaaacacccatggcgagcagatgaggaggcttgtcccatctctggatgaagaaaatatgtatttaactctgatta

SEQ ID NO: 78743 - DNA, 122 bp, Homo sapiens
cgggacacacacagggacgcgggccctcgcgcaggtgaacacggagtttgggaaaaaccgcgccaaagccggacgcgggacggagcccggggactgacctgggacgcagccgcgcctcctgg

SEQ ID NO: 78744 - DNA, 122 bp, Homo sapiens
ctcccaccccgccccccgccccccacccgcccagccccgccgacccccgccctgcgcacacgcccttggcgggccctggcctcgctctcgcgatccagagagtatggttttcagggctcctt

SEQ ID NO: 78745 - DNA, 122 bp, Homo sapiens
ggcccatctgtacggttggggggtctggggcatgtttttgacagaacattcctagactctcgtgcatttgtctcagcctaaagcccaggctggcctcttgcctcatgaataatgtgtttatg

SEQ ID NO: 78746 - DNA, 122 bp, Homo sapiens
cacaggtccaagcctctgggacttctgactgactggcctcaagttcaggttcccacaaaccgcttgagtttgattaggcttgattaatttgttagaacagctcacaaaacttagggaacact

SEQ ID NO: 78747 - DNA, 122 bp, Homo sapiens
gtgaatatacatctttacaagacccagtagtacatgggtcaagtgtggcaaaacagacatcgcgagccagccaggagtcgaacctagaatcttctgatccgtagtcagacgcgttatccatt

SEQ ID NO: 78748 - DNA, 122 bp, Homo sapiens
ccccatgggctcagttgcagctgccacctgcacaaggcaccctgcagcagcggtggcaaccgctgccctgcccactgccaccaccaatgaggatcccagggtcggccgcataattcacccgg

SEQ ID NO: 78749 - DNA, 122 bp, Homo sapiens
gagggaaactggggtgggattgggggagggctttagtttgcatgcatttccagtcagctccgagttctggtgccttatgtaatatcatgtattacttatgtgtcgagcatttgctgtgtgct

SEQ ID NO: 78750 - DNA, 122 bp, Homo sapiens
tccaggtagctgtcgtaggcgtggtagaacatggccttgactcgctccctgggtgggggacgagaaatcaggcatggggcaagaacacaaaaacaagcgggggaagaacaagatacagggcg

SEQ ID NO: 78751 - DNA, 122 bp, Homo sapiens
ggcgggggaggtgggggctgatccaaagctgcagagaaaccgacttcggcgctgaacaggcggagagtgaaacttaaagacggaggtcacaggctccatgtggaacacggaatgataattag

SEQ ID NO: 78752 - DNA, 122 bp, Homo sapiens
ctaactggccttgctctgcaggtggagcagattgtggaggcgtggaaatgccatgccctgcggagaggggatgaggcccggggcgccccgtgtcgccgccggagaggcaccctgccccggga

SEQ ID NO: 78753 - DNA, 122 bp, Homo sapiens
ccccctttcctctgggaggacccccggcccccgttcgtccccgagctcccagcccgcctccgggagccccagtgagaggaaaaacgtgcggggaccccccagcagctccaaacgccgaggcg

SEQ ID NO: 78754 - DNA, 122 bp, Homo sapiens
cggcagagccctgtgcagcctgccccagcctcccacgcctggagccggcgctcctgtgcccgctccagagctgcttgcgctaactggcacaggctgggcgctcccttcctccgccctcccgg

SEQ ID NO: 78755 - DNA, 122 bp, Homo sapiens
cagcccggccctcccatggcccggggcgccttgggagggcgtagggcaaacctggggctgcggtggggggtggggaggggactccacctccatccatcccgggatggcaactgcggtcaccc

SEQ ID NO: 78756 - DNA, 122 bp, Homo sapiens
cgtgcgctcgcgatgcgggctacatgcatgttcacgtgcctgtgtaggtacatgtggctgcgtgtctggagggagcagcgtgcgcctgcgcggggtctccctccagcctcgcctgggggcgc

SEQ ID NO: 78757 - DNA, 122 bp, Homo sapiens
ctgtggcttgagtgggatccccaaaaccagcgcatgagaatgaacagaactgcccatcggcgatgaggattagggtcatgaagcacaaaactcattagaagcagcatatggaagcaagaaag

SEQ ID NO: 78758 - DNA, 122 bp, Homo sapiens
aggaccctccgagccaggtgcaggatgtaatctcctggtgcgcggtttttttaagcccgtcggaaaagcgcagtattcgggtgggagtgacccgattttccaggtgccctctgtcacccctt

SEQ ID NO: 78759 - DNA, 122 bp, Homo sapiens
gcccggcgacctgtcatcaggcccaacgtaggcttctggaggcaactgatagactacgagcgccagctctttgggaagtcgacagttaaaatggtacagacaccttatggcatagttcccga

SEQ ID NO: 78760 - DNA, 122 bp, Homo sapiens
gctcctgggtgttggcccagtggaatcagtacctggtgtggcttcagtctctacctgctccggtgcctgggatgtgcctggcccagcggccctctgggtatatggcatggggcttggctgtg

SEQ ID NO: 78761 - DNA, 122 bp, Homo sapiens
gggcgcgctgctggcctggtgccgccgccagtgcgagggctaccgcggcgtggagatccgcgacctgagcagctccttccgggacggcctggccttctgcgccatcctgcaccggcaccggc

SEQ ID NO: 78762 - DNA, 122 bp, Homo sapiens
tgctcttgggggaatttccagtggtctaaggtgctttcctgagtggctctttccaccaagcgctcgtccaactcgggtgcctggaggcaggggtggtctctcttgagctctccttgcgttgc

SEQ ID NO: 78763 - DNA, 122 bp, Homo sapiens
cctggtcagaagctattgctatttgagtccagcaattggacagagtttcagaaggggccgcgagcttaagtgaatcaggctgaatggaccaactgctgtgctcagcagaagcgcacagttga

SEQ ID NO: 78764 - DNA, 122 bp, Homo sapiens
ttttcagcgttttgctgcccacacagcacagatctctaagggaaataaacctcgttttctcgatcatctgcctccccattataaagtaaattccacgggctgagcgcggtggctcacgcctg

SEQ ID NO: 78765 - DNA, 122 bp, Homo sapiens
cgctgggggccccagccggggaggcagctggggcgaccgtgcggggtgggggcagggacccgcgaagccaactctgccggagacccaccccccggcggggctgggggctcgtggcgcagtgg

SEQ ID NO: 78766 - DNA, 122 bp, Homo sapiens
gggttggcattagaaaaataatgaacaatatcagcggatattagtgaccgaggaagcaggcgccagtttagctctagacaccacactgagattcacacaattagaagtttacagtcaactgt

SEQ ID NO: 78767 - DNA, 122 bp, Homo sapiens
gagggcgtagagcaggcagcgcagacacttcacggaatcttctctggccattgtgagccccgtaagggagaagccccatcctttcaccacatcctactcccaagggcaaaacggcagcgatc

SEQ ID NO: 78768 - DNA, 122 bp, Homo sapiens
ctcaaccacaaccccaggccagcagcacagacccaagaactgcgtggtcaggcctttccgcgtagccccgcccgcgtagccccgccaaacagccaatggacgcgcagctcgacgctccgcgc

SEQ ID NO: 78769 - DNA, 122 bp, Homo sapiens
agcagtcctcactggcgcttggccttgtaggggcgagagcgtttccgccggtcaggcttccgctgcttgtggagccggccgatgctgaccccttggcgccgccgcacggagatgttctgctc

SEQ ID NO: 78770 - DNA, 122 bp, Homo sapiens
acctgggtaatcgctttgcagatcacaaaagagagcactgccagcagccctgaactgccccgcgccatcacaacccttctatttccccttctcttcttcctacaggcaaccactattttgac

SEQ ID NO: 78771 - DNA, 122 bp, Homo sapiens
agggcagggagagaccctactatgtggaccatgcatggagcagtactcacgacagaagtccggccgcctccactcgcggagctgggccccagcggcctgacaggctgccacgtaggtggcca

SEQ ID NO: 78772 - DNA, 122 bp, Homo sapiens
ctctatgggatcggtgcgaggcgccccctcgcgtggtcccctggaatgtgacgctcttctcgctgctggtggccgcctcctgcctggagatagtactgtgtgggatccagctggtgaacgcg

SEQ ID NO: 78773 - DNA, 122 bp, Homo sapiens
tccaaggagcaggaccaggaggtcagagaccgccaggctgaagaggtagtagttggtgggcgtcttcatagcctggtgctgcagaatcaccaggcacaccaggacattgccaatgaccccca

SEQ ID NO: 78774 - DNA, 122 bp, Homo sapiens
ccttgttttctttatctgtaaaatgtaatataggacttactggaggataacttaaaataacgaataaagtctttagtgcatgaattaaatgatttgtcaggttgtttttagttctaaaaggc

SEQ ID NO: 78775 - DNA, 122 bp, Homo sapiens
atgggaggtattggtttcattcaccaccactgcaccccagagttccaggccaatgaggtgcggaaggtcaagaagtttgaacggggctttatcatggaccccgtggtactaagcccctcaca

SEQ ID NO: 78776 - DNA, 122 bp, Homo sapiens
taaatccccagcccattgttgtttattgctgacccctcagcgctccgctaggagattggccgctttagggaagggggcggagtcccgcccgccccaacagccacctttcgtctccattcaca

SEQ ID NO: 78777 - DNA, 122 bp, Homo sapiens
aaagggctaaaattgagactgccacttggctgtgggagcctgcactgcccctggctgtcacgaacttatctttcttacccagattgtctctgtcttcaggtctggctcagaattcctgcagc

SEQ ID NO: 78778 - DNA, 122 bp, Homo sapiens
gtctagcggcgagataaacacattaaaatggactcccaccattttaataatagaaagtcacgtttccaattaggcattatcttgtaatttgcttttgacgaaagttaaatgtaaggaaatgc

SEQ ID NO: 78779 - DNA, 122 bp, Homo sapiens
ttacataatgccagttcaagctgacacctgtgcctgccctggagctagatcaggttctggcgactgctccaacctggaacgccggctcagtagcgcccaagccgaaggcgaaggggaagagg

SEQ ID NO: 78780 - DNA, 122 bp, Homo sapiens
ttcacccactgtgccagccccttcctacgaacagtcggtctcactctgctactcgtgtctcgaggcttctctacacgcccatcatattgatgctgtcgtactcatggttcttttcttttgtg

SEQ ID NO: 78781 - DNA, 122 bp, Homo sapiens
ctctgggggcgtaggccgacaccgccctccctccagccaatctaatagcgctctcatgggcgcattcctgatgacgtttaggggtagggttagatgcccgtttccgctttcttcccacccac

SEQ ID NO: 78782 - DNA, 122 bp, Homo sapiens
cgggcctggaggtcctcgcgggcgcggtcctgctccagcaggcagctctccaccacggcgcgcagctcctgctcctgacacacctggccccgcgtggcctctacctcctcgcagcgctgcag

SEQ ID NO: 78783 - DNA, 122 bp, Homo sapiens
ctgggcagagggtgcggcaaggctcacacagcaggcaggctgcagctccaggagaaagcccgcaggcctcaaacagaagacgcagtgatgcatccacaccaggaaaaccaagcagccttctg

SEQ ID NO: 78784 - DNA, 122 bp, Homo sapiens
gcagaagtcagcacacgaggacattcagttcttgtgaatatgggcaagaattacaggtgccggtcataatgttctctctcgaagtccttgtaatactgtactttccctgaagtataccctag

SEQ ID NO: 78785 - DNA, 122 bp, Homo sapiens
aaaacagcacctgggtcgcttcatcgccccaaataaacagccagcattagctcagctgctcgctggcagcctcggatccaggcggggtcagtgttgcgcactggggatagtgcctctgctcg

SEQ ID NO: 78786 - DNA, 122 bp, Homo sapiens
cgccaaattcgccatacacaagaagatcgtcctgcaggtattttgcaagcccctcctgtccgccgacatcagcgtgaatctcacatggtgcacttggctccctggtgcagtctcagcctctc

SEQ ID NO: 78787 - DNA, 122 bp, Homo sapiens
acgcgcggctcttccggccggcgggcgcgcgcctcgcttgcgcaggcgcagactgccctccgacacgtggtggcgatattgagctgtgtgtaggtacaccctgcagcttgcgcttttaactg

SEQ ID NO: 78788 - DNA, 122 bp, Homo sapiens
ggaaagggcaaccagtactcccagcgatgacttcgggtcggcggaaggaaaagacctgagcgctaagagcttgggatacgggtcaggcccatccttaggggaaaccggctgggaagcgaggg

SEQ ID NO: 78789 - DNA, 122 bp, Homo sapiens
aactggttcatcacacaccctgaagtcagaaggttgtggctcaacactatgttttagactcgaccaaactgtactctgatgaggagctaatgagaaagagatcaacgataggatgatcatat

SEQ ID NO: 78790 - DNA, 122 bp, Homo sapiens
ctgaggacagagccacttacaccgcagaaccaccaggggcctcgggcacttgtggggattcgggagctggctcttcagggctcagacaggactggaacttctccagctgctctgggcttgcc

SEQ ID NO: 78791 - DNA, 122 bp, Homo sapiens
ttgaataaaacagaagtggatgcagagagccccactggggagctggtgccgggcgctggacgggcgctcgtaggatggacggacatgccacatttcctaaggtggagagggtggccaggaga

SEQ ID NO: 78792 - DNA, 122 bp, Homo sapiens
tcagccaggatggggaacctctgttcttatgacagagacagggaagctgcctctttgggccgcgcgaaccctgtcgatgtctgtgaccctacagagtccatgccaggcggagaaccaccagc

SEQ ID NO: 78793 - DNA, 122 bp, Homo sapiens
atatttttggatgcaatgttgataacgccattatacattcagtggatggattacctttggcggtacctcagtttcagattactatgacttgtcaggtgactcttggctttagtatgaggtag

SEQ ID NO: 78794 - DNA, 122 bp, Homo sapiens
gagtttttgaattagtcaatacagaacccagcataacatatgcgctcaagatgttgtctccggggatctggggcaggctgctactctgtatgatttaccatgtggggaaaaaaaacacctca

SEQ ID NO: 78795 - DNA, 122 bp, Homo sapiens
cgccgctgtgggtcagcttgtggttcttgtagttccctacaacagatcaagaacaaaaaacgtgggggtatggagtagaatggtggggaggaagaggcgggcgtcccaggggcagcccaggt

SEQ ID NO: 78796 - DNA, 122 bp, Homo sapiens
aggaagggctagcgtctgccgcggggtgggtcttggccggatcctatcccgggggaagagcgccacctggcgaaccgctctgagaatgtcccagaacagccactaggaacagtctcccgggt

SEQ ID NO: 78797 - DNA, 122 bp, Homo sapiens
gaagcagctcacggcctcggattctactctcacccaagggtggaagggggtgacagggctcggatcttgccccaaacgctgcacaggcccgcaggagagcaaagaggtctcggacaggctgt

SEQ ID NO: 78798 - DNA, 122 bp, Homo sapiens
ggaggcaaaaacttgttcaagataggggagcccttggttggggggttcctgccacccttccggccacctgtcaggaatgacctcaactctctgggtctgagaagctcccctcagtcacccag

SEQ ID NO: 78799 - DNA, 122 bp, Homo sapiens
ggcggcggcaaggcaaggcagctgcagctgtcagggtctagggggcgacggtgggctcggcgccctcccagtgaggtggtggcggcatgcgagtctcctcggcgcggcggcagcagttttca

SEQ ID NO: 78800 - DNA, 122 bp, Homo sapiens
taaatcatataaactgcacctactgaatgttgccatttggtatgaatcacatggccaagccgtttcccaagtgtgggaattacagaacatatccatgagtagagaggagtctaagcataact

SEQ ID NO: 78801 - DNA, 122 bp, Homo sapiens
ctgtcttgtccccttttagcatgagcagtgtcattattcagcatgtatttagtcagtgatcgccacatgcctggcacttccctgggtgtgaggttgccgcggtgaacagcagatgcagacat

SEQ ID NO: 78802 - DNA, 122 bp, Homo sapiens
cggaccgcagtcggcattttcccttctctcttcccccaagctggagtccttaattaaaggcgcgcctgggacagcggcccaggcagaggccgtggccggagccggtgcgggtgccaccggca

SEQ ID NO: 78803 - DNA, 122 bp, Homo sapiens
tgtggtattcagaaaagctatattcaagcaactagtcactgtcttcacttcccccacaaacgccctccactgtccttttcattctccattggtttggctctggggctgttttatatgcagaa

SEQ ID NO: 78804 - DNA, 122 bp, Homo sapiens
ctgggcggacccgccggaagactcggcgagtgcgcgcgcgcaggagcccattttcccgcccgcaacgtggccccgcccttttacccaggccctacgcgagcttcgccgagtacgcgtgcgca

SEQ ID NO: 78805 - DNA, 122 bp, Homo sapiens
gatcctcccacactgttccctcagagcacttggtgaggatgggccatatgtgatgtggaccgcgtggcctcgctaccagtggctcacccacctcccccttcttgtgcatgccttgctcatct

SEQ ID NO: 78806 - DNA, 122 bp, Homo sapiens
ccatgcccaagacacgactcctcttcccactcccaaccaacagggaggcctgggaagcctcgggccttggtactaagagtgctttcaggacctcaagtcctttctactaccctgttctgccc

SEQ ID NO: 78807 - DNA, 122 bp, Homo sapiens
gacgaggcggggcctggacagggtggggtttttcggaggagttgctctgagaggtgcagccggtttactcccgccctgaagttcccaagggcttccggctctttaacgttctaaatacctgt

SEQ ID NO: 78808 - DNA, 122 bp, Homo sapiens
aggtggcgttggcgggccgaaggtactcaggatgacgttaaggcaggaagaggagagccacggcgagatcgcagagaatggtcagagcctccctagaaggcctctcccattccagaagcccc

SEQ ID NO: 78809 - DNA, 122 bp, Homo sapiens
ggggcctggaataggggcaggcagccttcgctccgctgcctccctgcgcttgctccgaggcgcaaaggcctcaccaggtgtgcagcatccaaagagccccaccgtggccacccccagacgcc

SEQ ID NO: 78810 - DNA, 122 bp, Homo sapiens
agtaatgcaaacgtgttcaccttcagaaagagcagatcagcgtttagcatgagattttcccgagagccctccactcagaacgtgagtatgtttctcagcaggtcctcgtcatctggaaggat

SEQ ID NO: 78811 - DNA, 122 bp, Homo sapiens
atcaattagtcctatatgcaaatgggcaagcctcagagccgcagagccagactcactagacgagcacagtgtgttactcatgctgccaaaagcttataaacagctccgtggaggaggaaaca

SEQ ID NO: 78812 - DNA, 122 bp, Homo sapiens
agggtgtagaaggtggacacgaagaccttgcagagaccctcattccactcgaagtcggggcgctgccgccgcagctgcaccacggagtaggtggcgatgggcacggccacatttagcatgtg

SEQ ID NO: 78813 - DNA, 122 bp, Homo sapiens
ggaggcctgaacccagactgggggcttcggacccgcctgcgctgtgggacctcaggccagcgcctacctgtcgctgggcctcagctttcctgaatgccctactccctgcccaggactcctct

SEQ ID NO: 78814 - DNA, 122 bp, Homo sapiens
ctggagcccttgagaactgagtaggtaggttcaggcagctgtaacaaaataccacagactcggtggcataacaacaaacgtctatttctcacagttgggaggctgggaagtttaaaatcaag

SEQ ID NO: 78815 - DNA, 122 bp, Homo sapiens
tccgcgaggacctggtgacagggaagcgagaggttctcgcgtgcggcagcagccagcggacgtccagtccccagcacgcggctcctcaggccctgcaactcagaggcccgcgcggtgctgcg

SEQ ID NO: 78816 - DNA, 122 bp, Homo sapiens
ctgaggaacccagccagcctcatactcggagcccggccaaaaacaaggtaggggcctgctcgtgtggaccgtggggagggggctgctaggcagaggggcggcctggccgtctccaccaccgt

SEQ ID NO: 78817 - DNA, 122 bp, Homo sapiens
ggattaaactagaaaatgcacaggagaagacatcaagcccaggcatactgcgacatgttccgttatgaattgtgcctgtgctgacccttttccctctccctctcaaatcatgtattgctttt

SEQ ID NO: 78818 - DNA, 122 bp, Homo sapiens
cggagcggctggaactattcaagctgggcagtcctgtccctgacgaccctgccttgccctcgcccagcctccggactgacgctggcgcatccctgtatcgacccatggcgtggcctgccccc

SEQ ID NO: 78819 - DNA, 122 bp, Homo sapiens
tgccatttccctatataaatattccaattcaatttacatcaatattacactcaaaccagccgtattgcaagtctttaacaaagcatattcctaatcccctcagtgtcacaaatattgttcta

SEQ ID NO: 78820 - DNA, 122 bp, Homo sapiens
aggcgcagctcggagcagggctgggaggatgagcaaaggcagacgtgccggctgcagccgcgctccgtgagtgagtggctgctgcatgccgggcctccagctgacagtgcctcccggggtca

SEQ ID NO: 78821 - DNA, 122 bp, Homo sapiens
tggagctgcagcagcagaggtggccctgcttcaaggccctgattgtccccgactctgcagcggagcttgatgttggaagtcagcccgcccttcactcccaggctgggctaaggctcttgagg

SEQ ID NO: 78822 - DNA, 122 bp, Homo sapiens
actgtcttattatcacaggctgctcctgaaagccacgcgtccccgctcaccagctaccagcgctgggagacccctaaccaccaggcattcacaggtgaggaagcccctcccacagcggccgg

SEQ ID NO: 78823 - DNA, 122 bp, Homo sapiens
aattcttgaacttggccttgaacacctgccagggaggccatcaactaaccatgaggggtgcggcatgattagagttggaggaagtagcccgaggcttgaggcgggacccaagggagatctag

SEQ ID NO: 78824 - DNA, 122 bp, Homo sapiens
ctgctcccagagcgagctgtggccggcagagcggcccttgacgcacaaggaagcctgagtcgctggagaaaccacttggattcctcttccctctggtcacggaggacaggctgcgctcactc

SEQ ID NO: 78825 - DNA, 122 bp, Homo sapiens
caggcgcacgccaccacgcctggctaattttttgtatttttagtagagaaagggtttcaccgtgttagtcaggatggtttgtcgtgatccgcccatcttggcctcccaaagtgctgggatta

SEQ ID NO: 78826 - DNA, 122 bp, Homo sapiens
agacgattaaccgaggctcacgtcgcggaggaatttaaagcgcgagatggacgggaggggcgggctcaggcagttataatccaactccataaaggttctggggaggcagtatatggaactgc

SEQ ID NO: 78827 - DNA, 122 bp, Homo sapiens
catgcgcactgggccttccaccgccccccgcccccagcaaagccccccgctcggagcatgcgcgggccgcttggcgccaattgctgaccgccacagccacagccagggctagcctcgccggt

SEQ ID NO: 78828 - DNA, 122 bp, Homo sapiens
aattatccaggggcggtgtggaacgcgggaataaagtgtcatcgcgtccctgggctgctgcgcagagtgctatcgacgcacagatttggtcgcacggataatcatgtttgctttagatattg

SEQ ID NO: 78829 - DNA, 122 bp, Homo sapiens
ctcgccgcgagagcccagggccccgcggacgacgccaccgtctccctccgcctccacttccgccccagcccacccagtgacgccgtgccagccgctcccgcttaggccccgatagcggcgga

SEQ ID NO: 78830 - DNA, 122 bp, Homo sapiens
ggaaacaggccggaggtcatccagcgggggtgcggccaggccggggctcgaaccctgctccgcctgacccagaaaccagacagggctggagaagggcagcagagtgaccctgggcaggggct

SEQ ID NO: 78831 - DNA, 122 bp, Homo sapiens
cacagagagactgagaaatatcaaaacagcaagttaaaaaacagtagcttacgtgtctcccggcacggggctagctgcctccttttactctcacacaccctctcatgccagaagaagtcaga

SEQ ID NO: 78832 - DNA, 122 bp, Homo sapiens
ctataaaagcatacaagcagacacacagccacaggtacacacacaagtgaataaatccagcgacgcctgagcaggtctctcacccctcctcctgagccagcagaggcctggccctgccatgc

SEQ ID NO: 78833 - DNA, 122 bp, Homo sapiens
agcagccacaggcgcacacgctgaccacgctgagcagcgagccgggccagtcccagcgaacgcacatcaagacggagcagctgagccccagccactacagcgagcagcagcagcactcgccc

SEQ ID NO: 78834 - DNA, 122 bp, Homo sapiens
tcgcgtgtttggattaaaccaggttcagcgggagtcgcctggtccagacacactggaccccggtgacttgggtcctgacacagactggccgagctgggggcgtccccagagaccagagaccc

SEQ ID NO: 78835 - DNA, 122 bp, Homo sapiens
ggctctatctgggcagcaggcaaaaagaacccattgggggattacatagccactcctcatcggagaaatttctactggctcttcttccagcctcaactctctttggctaatctttctctata

SEQ ID NO: 78836 - DNA, 122 bp, Homo sapiens
ctctgtgggcggggctccgtgaaacctgccctgccgccgggaattgtctgccaaagcctgcgagcgccagccgagatcgcagcccaacccatggccgggtctcctagccgcgccgcgggccg

SEQ ID NO: 78837 - DNA, 122 bp, Homo sapiens
aatatctgtttatgccccacatttagccccctctataaacttatttatgtgggaagaggacggcatgcattgtgattcagtgtgggctgtggatctatcagcctgagtttcagtctcagctc

SEQ ID NO: 78838 - DNA, 122 bp, Homo sapiens
ggcgaaggggaccacgggctcggggagctcccgcaggtacagcttcagcagggaggccaccgtgtgcacgtctgttgtgctgtgggggggaagaggacaggtgtgtgaggcctgggatgcca

SEQ ID NO: 78839 - DNA, 122 bp, Homo sapiens
agtttaagcaaacaacaattcatgaattgggcaccacttaaaacaagaagatattcagagcgcttctgcaggtgagcagtaagctttaatagaaaagtaaaacagttacttgattggctaca

SEQ ID NO: 78840 - DNA, 122 bp, Homo sapiens
ggcgctcgggcccctcccccgtcccggacttcggtcggcgcggccgccgcgccagtgccgcggggaacataggctggggccccacgcccccatgccctcaccccgttgtcccggcgaggcgc

SEQ ID NO: 78841 - DNA, 122 bp, Homo sapiens
gacagtcctccgggaggcggtggccgagagcctgctcctggagctggaggaggtgacccccgccgaagacggcgtctatgcctgcctggccgagaatgcctatggccaggacaaccgcaccg

SEQ ID NO: 78842 - DNA, 122 bp, Homo sapiens
gcctatagtttctgaggcactgcatggccacgtgcttctgacgtaccggtgggtggggtacggggaggcgccatacctggatgtacatcgtctacccctgtgatgaaagatcctttctgatg

SEQ ID NO: 78843 - DNA, 122 bp, Homo sapiens
agcgcgcgcagccctcgagctgtggaaagcggagcactgtggcggccataagaagtgtggcgcctctcagcctgaggggaggggaaggaaagaaaggggagggggagaagggtggggcggag

SEQ ID NO: 78844 - DNA, 122 bp, Homo sapiens
aagtccgatctgcccacgcttcacagaactcaatgcggagccttctcaggagtcacttgacgtcaaggctgacttttaaatttgccaaaaaggcattctttggggagcggtcggcaccatca

SEQ ID NO: 78845 - DNA, 122 bp, Homo sapiens
tgggtgggtggggagtcaaggcaggccaaagcttcagatttagacagtaaccaccaaatccgacctgggctgcaggtccaaggcctcttcctctttcctgcatgctccgctctgccgctggc

SEQ ID NO: 78846 - DNA, 122 bp, Homo sapiens
gcaaacttctcaggtacaggggaagtagatggcaccctcccactgccctgggacctgctgcgtgggagtggtggaggaaataatgctgattggctgtgtcaaagcccagtctccattcagcc

SEQ ID NO: 78847 - DNA, 122 bp, Homo sapiens
agagccatttgtattgttggtaggatttttgcagctgtgttagtgaataagtgtaatgaccgggcaccctaataaatgctagcataatcaatgatagctgggatccctgttgtcaacattca

SEQ ID NO: 78848 - DNA, 122 bp, Homo sapiens
ggggcggaagcggcgaggcggtggccgagtccgggaacccaggcgccttcagtagcgcggcgtcacagtgtcccttcgggacttgtgtgggacgctcggagctcttgcttgaccttcggttg

SEQ ID NO: 78849 - DNA, 122 bp, Homo sapiens
ctgtcagtattgtaatgaaataattcattatgtaattaattgcttagtgtgcataagcgccgtaatggcagaggctatgtctcttgttcatagtcataacaccattgcctggcttggtgctt

SEQ ID NO: 78850 - DNA, 122 bp, Homo sapiens
aggcaaaacaagtcaatttctctagcattcctcagatattttggttttgaatccttttgccgacgtgacggctcttcctaatccagttcaactgatttctgttcctcttcctttgaggtgcc

SEQ ID NO: 78851 - DNA, 122 bp, Homo sapiens
gcagagccataaggaggcctgttcaggcctcgccatctgctggggatacaatttcatacccgtctcagggctttcatgagcagtctcaaatggtggggccccctctgggagaagagggcaga

SEQ ID NO: 78852 - DNA, 122 bp, Homo sapiens
gggacccacaaggaatttccctgtaagcgcgatgcgaggaggcacaggcttcttcatcttcgtggctgtccaattaggaagaaaatgggaggcaggtgtgtgtgattcggctcccagcttga

SEQ ID NO: 78853 - DNA, 122 bp, Homo sapiens
aggcaggacggaggcagcctcgctctgatgacagtttctgtgaggcagagcctggcgtgacgccgggggcaggaactgttcccctgagtgtgctgtcctcgggggtgggagtgagcgacggg

SEQ ID NO: 78854 - DNA, 122 bp, Homo sapiens
aaaatcgatcccgcctttatcaggagattcctttgccaaagttcagagaactggggttcccgctgcttgccacacagaaaaccgatcactgagacggttattgccaaggaagaggctttaat

SEQ ID NO: 78855 - DNA, 122 bp, Homo sapiens
tcctcttccaccctgtggctgaggccctactggggagctttgagagccacctgccctgcccggatcaggccttggagacctgtcaggctctgcccactgggttcccctgtcctagattcttg

SEQ ID NO: 78856 - DNA, 122 bp, Homo sapiens
tacttttttagtagattccttgatcagtgcctgcaggagtgacagtttttattccagcagcgccagcatgtacatgccaccacctagcgcagacatggggacctatggaatgcaaacctgtg

SEQ ID NO: 78857 - DNA, 122 bp, Homo sapiens
ctttacctcctcacgggcgataaaagacaagcaactcgggctcagaaaagtgctctcacgcgacttgcctgtgtctccgcttgcgtggaccgtcgctcccaggcttggtttctcgtgcaaac

SEQ ID NO: 78858 - DNA, 122 bp, Homo sapiens
catctgccacaaagccgcatggccagaggggcagtgggctgagggctgagagctggccagcgtggcccccgtgggcccggagggagcatactcgatggactccagtgactgcacccctgccc

SEQ ID NO: 78859 - DNA, 122 bp, Homo sapiens
agtgatgccaggggcatggaagggaccctagcccagctcctcccttggcagtcggagcgtcggggccgcattatagagggagggactctccggacgatgggaacgagagtccattgggatcg

SEQ ID NO: 78860 - DNA, 122 bp, Homo sapiens
gtaccataagaaaaactctctcaggtaatctaatctgtcctcatctttctctagagttctcgatgcgcatttgggttgtttgtggggtttactattgcaaacagtgttaccatgaatattct

SEQ ID NO: 78861 - DNA, 122 bp, Homo sapiens
gaagaaaaaatgaaaagggccatacccatgctgtgcccaccacacttaggaccaggcagacgatcctcatggaaaacatcttttctaagggtggggctggctcctgaggagcactccagctg

SEQ ID NO: 78862 - DNA, 122 bp, Homo sapiens
gcggctgctcagcccccggccacagccctaggcacctcagtctggagctgggtttgaactcgcaccgggtggcagtggaccccaggtgtggctacccatccctctggctcttggacactggt

SEQ ID NO: 78863 - DNA, 122 bp, Homo sapiens
acagagtcggaatcccagctgacaaaacgcagaggctatcccacactgccgtgcttttcccgtttgtctaggaggaggctagagttaacgtcagggaatgttctgtgtcattctatttcact

SEQ ID NO: 78864 - DNA, 122 bp, Homo sapiens
ttagcatatgcttgcttcccggttctcacttctggctgttctctgtcctctctccacctccggcagcagcagcacaaaggcatctctacgcccatcggcctgccccagagacctccctggca

SEQ ID NO: 78865 - DNA, 122 bp, Homo sapiens
agcccgatggatacaccctgggagaggcgacggggtggcccctgtgacttcgggctgcgacgcggtgtcgtccccacccccacccccctcactctagaagtcacagcgccatctactggaca

SEQ ID NO: 78866 - DNA, 122 bp, Homo sapiens
acctcctcctccagctgcctcttgaggtcctccagctgctgggtgtaggtgagcttgcctcgggtcagctgggagatcagtgcctccttctcatccagctgccgggacagctcacctgggga

SEQ ID NO: 78867 - DNA, 122 bp, Homo sapiens
tcggctgcgccgccacgctgtgaaattactgcctatgagtcagactccggggagatggcacgggctaaatataacgctgggcaggctgtccgacgcgtcattaacctttttccttcagaaca

SEQ ID NO: 78868 - DNA, 122 bp, Homo sapiens
ttgagaccagcctaggcaacatagtgagaccctgtctaaaaaaagaaaaaaaaaaaaaagcgcagactctggtgccgaactgcctgggtttgaatccagttctgccagggattcgctgtaca

SEQ ID NO: 78869 - DNA, 122 bp, Homo sapiens
agggaacgggaccggagcttcatgcctgcaaagaggtactgccgcccccctacccgatcccgctttggtcacaaaagtcttggatccaggcggagaccttggggacccaggcgcagagagtt

SEQ ID NO: 78870 - DNA, 122 bp, Homo sapiens
gccgccgccgccgcgcttgccttgccccctctttttggcctccccctatttcctaggatccgcattcgggtggactctgccccaggagcttgacagggtgcagggcctcttctggcctctct

SEQ ID NO: 78871 - DNA, 122 bp, Homo sapiens
taaaaatgaggaaaaaaaaaaaaaaaagagagaaaaaggcactggggaggagttgagtctcgaagaacagtctaacataaaggtattccagccgggaagttgagttaacttctgactcaggt

SEQ ID NO: 78872 - DNA, 122 bp, Homo sapiens
aggtccgtgcttggggccgggcaggctcgcggaggggtccaacggtgctcgcggaggggtcggggcgcggctgtcgcggaaccacagaggtccctgcagcgggccgggccggggcgcgggct

SEQ ID NO: 78873 - DNA, 122 bp, Homo sapiens
cggctttgcctcccggagaaggtaaggcgatccctaccccgagtcctaaggtttacttcacggagctgaattaaatagtggagagcagaaaacctaggtttagatgtgcagttctggaccag

SEQ ID NO: 78874 - DNA, 122 bp, Homo sapiens
tgggagggctccatgccttggcagacatgtgcccccacacccctcccaaaccctggacctcgcctccacactagaccacagacagatgggcaagtctgcaagggaaggtctgggattggatt

SEQ ID NO: 78875 - DNA, 122 bp, Homo sapiens
ggtccgctatcaaagacagttagtctaattaggaaagcacacccttgcaggcccagcctccggtgatctctttgttcctctgtctcttcctgccccaaccccacagaaactgaagtgtgggg

SEQ ID NO: 78876 - DNA, 122 bp, Homo sapiens
ggtgggacccgctgagcgccgtggccagtcccccattcccatcccggcaccccaaaggcgcgctcgcccgattgcttcgagttccccgacctggggattttttttttagccgctggtggtgg

SEQ ID NO: 78877 - DNA, 122 bp, Homo sapiens
cctcgccttcgcaggcctaaccaatcagtgccggcgctgcaaggaagtttccagagctttcgaggaaggtttcttcaactcaaattcatccgcctgataattttcttatattttcctaaaga

SEQ ID NO: 78878 - DNA, 122 bp, Homo sapiens
tcccatcaaaagtccggaagctgcccttcagtcgtcaaagtgtttgccttaatttgcaatcgttatgacttgagccaaatgcttatacctcatttgtgtcgtatatgtgaagatacaattgc

SEQ ID NO: 78879 - DNA, 122 bp, Homo sapiens
agccgtgtcccgctgctctaaatctgcagacttgatcgattgcttctgcctgggcggtaccgcccgaattgactgctcctgtctgatgcgtccccgggcgcgggaaacgagtttcaatccac

SEQ ID NO: 78880 - DNA, 122 bp, Homo sapiens
ttcccactccctgaagctgttttttgtttgcatgtttgttgtcagtctcctgtcatcattcgaaggtcagggccttgagggcaggaccctttcttgttcactgctgcatccccacccctcag

SEQ ID NO: 78881 - DNA, 122 bp, Homo sapiens
acaggtgcacactactgcacctggcttctgtgttgtgtttcaagcagcagacagatgccccgactgtaccagtggccagctaaggggaccacacatctgctgatggaactactgactgctag

SEQ ID NO: 78882 - DNA, 122 bp, Homo sapiens
cggcaggctagcagctggccaaggggtggctggggaatcagacctaaccctcgggcagctcgcgggctccaggagaccagtcccttctgtgggtcgccccctggagcggtgctcgggctccc

SEQ ID NO: 78883 - DNA, 122 bp, Homo sapiens
aattaacattcccttgcaggctgggctctgtcttccttctgggcctttgcacattctattcgttggcctagcatgcacctcctccacggcttcccgtgaatcaacctttcaaatttacaagg

SEQ ID NO: 78884 - DNA, 122 bp, Homo sapiens
ggtagacaggtattgaggtttgaatccagcccaattaacaccttttgtaaaaaataacaccgctgttaaaggtacacaacagaaatgagagtctatataatgattctttacagttttagtac

SEQ ID NO: 78885 - DNA, 122 bp, Homo sapiens
aactgctggttctcctagaggcctctcctcagactcgcaggtatgtgggaccagggaggccgggtcctggccaaagggccactggggtcagcccaggagagggtgtggcagtgttgtgggcc

SEQ ID NO: 78886 - DNA, 122 bp, Homo sapiens
tcccccaatttcctctagacccaccagaatgcgggttaatgtccgagagtgcccttcgggcggccctccacgtgcaatccggacctagctttcggccggcactcgccacagaatcgttccac

SEQ ID NO: 78887 - DNA, 122 bp, Homo sapiens
gggccgaggactcggtgacgtcagagggctgtgtgtagcgatgtgtgtggggttcggagccgcgccggcacagccgaagggagcgggcgagcggcgacggcggcggcggcgggcacaggtgc

SEQ ID NO: 78888 - DNA, 122 bp, Homo sapiens
tggcacacttacccggagaacttcgcacacacacgcactcgcaaacacgcgggctccctgcgccaccaggaagcagccgccagaatcgccgggtgttccccaactactcctgggagacctgg

SEQ ID NO: 78889 - DNA, 122 bp, Homo sapiens
ggggagggccaggggcgcgggcggaggcgggaccgggcgagagcgtgcgggcagagggggcggtggccgccagggcgggagggacgcgggtcgcccgcgggcggagggtgtgtccctctgtc

SEQ ID NO: 78890 - DNA, 122 bp, Homo sapiens
tgcgtcccctttaaataatgccaccgctgctcagtgaaggcagggctcctgctgcagctgcggcggcggctggatccgtggtccagtttggggcggcatgggagagggggccttaactatac

SEQ ID NO: 78891 - DNA, 122 bp, Homo sapiens
gtggctgtttgaatgaagtggggctggggactcgagagagcactctggctgggccggtggcgcacggaggccggccgcccctccacggggatctccggcccgcgccgccagaggatatggtt

SEQ ID NO: 78892 - DNA, 122 bp, Homo sapiens
cacccgcaggtccccatctgtcagtcggctttaccacattagcaggtcccgtccgtcagtcggcttcactgcattaccaggtcctgtctgtcagtcagcttcaccacatcagcaggtcccgt

SEQ ID NO: 78893 - DNA, 122 bp, Homo sapiens
taattaatgggaagaagctacattgaacagctgtcaaccatgctgctgcattagttatgccgtaagagtgatcaggcgctgcagcccattgtgatgttgccttacaattctgtccacatgaa

SEQ ID NO: 78894 - DNA, 122 bp, Homo sapiens
ctagtgagcctggagttaaggagatcggcagccagctggatgagagagctgctggtgtgccgcgttcctcactggccgtacgggctccacagcccagcgggtagagcgagggaggcgggcct

SEQ ID NO: 78895 - DNA, 122 bp, Homo sapiens
ggcggtgcgggggtggccgcggtggccgcggctgcctcgggcgccggcgccgcctctccgcgctgttcccccgttgcccccttggtacccccggctgccggggactgcctcgcgctccagag

SEQ ID NO: 78896 - DNA, 122 bp, Homo sapiens
tgccactgagtggtggtggggagtgctcgtatttgcgggggcctgggtggctcttgaaggcgatggttgtccaagtttttcggaaatacaggattggtctgcaccccaagaatgatggaacg

SEQ ID NO: 78897 - DNA, 122 bp, Homo sapiens
gacacgggagccagcagcgtgtcaggtgctcgttgaccccagcgccagtgtctccatccacgtccttcactcgtcaacctttcctggcccaggctgcggtgtcccagcgccaggctccgccc

SEQ ID NO: 78898 - DNA, 122 bp, Homo sapiens
gagtgactcgtggaaaaccctccgcaattctcatcgaactctgctgttccccggaaaatgcgtctcaggtctgcgggctttatttgtggtctattgctctccatgaaatgaggattccggtt

SEQ ID NO: 78899 - DNA, 122 bp, Homo sapiens
gctgtggcagattgagtgtctgctgagggcctgcttcctggctcatagaggccatcttctcgctgtgtcctcacatggcagaaggggcaagagaactcttttaaaagggcaccaatcctatt

SEQ ID NO: 78900 - DNA, 122 bp, Homo sapiens
ggacggaagaaccatggcgggaggagtcatccggaagctacctcgctgccctgtcagttacggaacagaggagagatgccggctggaggacacagcaaatttgaaccaagaggagcttggag

SEQ ID NO: 78901 - DNA, 122 bp, Homo sapiens
acctccaccccgcccactccccctccggctccggcttcgggaaattacatccccgctccgcggctccccccaacccccaccgcgccccggagccggcgcctttataggcacatttattgcaa

SEQ ID NO: 78902 - DNA, 122 bp, Homo sapiens
ccagggggcgctccgggcggttggggaccaggccagggctgcgagagagtgaccttgggccgaacctgggatctggcccatctctgccgcatcccttgcgccgcccgcccaggagccctgac

SEQ ID NO: 78903 - DNA, 122 bp, Homo sapiens
tcacctgagcctggggaggtcgcggctgcagtgagccatgattaacccacaactgcactccgcctgggtgacagagtgaggccctgtgtcaaaaaataagaaagaaagaagagagagagaga

SEQ ID NO: 78904 - DNA, 122 bp, Homo sapiens
ggctgagagactaaccttacacaacatggcggcctggtgtgtctggtgtcctagagcggacgaaagcaggtgactctctagtcaacttccgacttggactccgaagatcggtacgttatttc

SEQ ID NO: 78905 - DNA, 122 bp, Homo sapiens
tcttggagtggcaattttgtataaaaatggaccctcgagtcaggatcttggcgttctccacggtaacagggctcaccagacatgctgtcttggcagacgtggaaccagcaacttcctgggca

SEQ ID NO: 78906 - DNA, 122 bp, Homo sapiens
acagaagctgggcctctaggagcagaagacacagagcagtgaagactacaccagaagctccggctgccgccagagacaaaggccccaccaaacccggaagccgtcctgtctgctccagctga

SEQ ID NO: 78907 - DNA, 122 bp, Homo sapiens
tcatttttggtccccaggaaggatggcaggggtggaagcagatggaaaactatatgcgggcgaggcctgagcccaggcagaaagggacctctgacttggcaagggttcaggagggcctgagc

SEQ ID NO: 78908 - DNA, 122 bp, Homo sapiens
cagttcttcactcattgttttgcatccaaggagtctggaaataagcgggaacaccctgcacgtgagaggggccctgaaattcacgaggggctggggctttgcgtttattcctccagttccgc

SEQ ID NO: 78909 - DNA, 122 bp, Homo sapiens
gaggctcggggctgcagatggaatgcacggcagggaggcgggaccctttgtttgtgtgtgcgtgttgttggcctccatccccactccccagactccacttctccaggcctctctcccgcctt

SEQ ID NO: 78910 - DNA, 122 bp, Homo sapiens
gaggctggggtagggcccacgcgtggaatgtagggtctcttctgcccagaggtggaaagtcgagcagtgctttggggtctgcggggctctccagcgatgatttggggtgctcatggcagggc

SEQ ID NO: 78911 - DNA, 122 bp, Homo sapiens
ggccgcagcccggcttggggacccgctgcgtgccctggcaccagtgcgtggtgaggaaagcggtggtggcgaacagcagcgccagcaggttcagggccacggccaggagcgctcggccgcgg

SEQ ID NO: 78912 - DNA, 122 bp, Homo sapiens
acggttctgggtttcacagcgtcagacccaccagcccttgctctatgctcagggctagaacgcagccgcttccttctgcaggttgtgccctgttcaggttaggtgtgttccagcaccttctg

SEQ ID NO: 78913 - DNA, 122 bp, Homo sapiens
cccgcgagcgtccatccatctgtccggctggcggtccagcgaaaggggctccaggctggacgcagccgccacccgggggaccgaggccaggagaggggccgagagcgcggctgacccttgcg

SEQ ID NO: 78914 - DNA, 122 bp, Homo sapiens
ggtgacggttcgtgtttgggcgctggaaggagcgggctttctgggcgcccctaccacccccgccccataaccgctttccagactccgcctgctggtgttctctggttaccggagtgggtgtt

SEQ ID NO: 78915 - DNA, 122 bp, Homo sapiens
aagtagtggaaaatgccttatattttggcaatattctgttgtattctctcctcgtcctcccgagaaatgatttcaaagcactttactatcattattttaggcttcattttatcaatcctcac

SEQ ID NO: 78916 - DNA, 122 bp, Homo sapiens
cacgcatggtgccctcagagccccgaggagaatgtggcgcttgcttcccacgggagaggccgcaggtaaaagggaaaaacgagactgagctctttctgttaaatgcttctgttcaagttcct

SEQ ID NO: 78917 - DNA, 122 bp, Homo sapiens
aataaagagtaaaagcaaagcatttaaatcgagctattgcagaagacagaaatcagctgccgcgggcgtgggtgtgtgtacagggtgggggagaattgggaaagtatttatctcggaggggc

SEQ ID NO: 78918 - DNA, 122 bp, Homo sapiens
cactctgcctccccatcctggggccgagagagcaggtggagttttctttgtagctgggcccggaggtagcggaggtcttgctgatcaagcccgtgagccaggcccaggtagagggtaaggag

SEQ ID NO: 78919 - DNA, 122 bp, Homo sapiens
cagtttggttcaggagctacctccttgtcattgaattgacgagttacaatgtttggtattcggatacattcagcaagaacacttgaaaactcctcaccaactatttttaaaggcttactttg

SEQ ID NO: 78920 - DNA, 122 bp, Homo sapiens
gtcctcgacccccggcatgtaagggtagagtcaaggagggtcttcttaagcgttcctcggcgcggtcctgaagagattaaaggcgtcaaatggaccgctccacacctgagctgccgccaagc

SEQ ID NO: 78921 - DNA, 122 bp, Homo sapiens
cctgactagatgtagttgtgaatggagctgggattgtggagggacttcatatgtacattacgcatgtgtggaaaggtaaaataaccatcagtcttccaattagaaagccagaaagctacctg

SEQ ID NO: 78922 - DNA, 122 bp, Homo sapiens
atccctagccagtgagcgagtgcgtgagagtgtgggagtgggtgtcagttgggagtgggacgaaggcagaaagagtgtgtcaccctaattgtctatgtaagggattgtgtggatgaaaaata

SEQ ID NO: 78923 - DNA, 122 bp, Homo sapiens
aataatcaccaggactcctgatattcacacagagaattgcttgtggcaaacatttttaaccgccaaactaagatctttcttaagatgaagaaagataagcagcattgttttttagagatgag

SEQ ID NO: 78924 - DNA, 122 bp, Homo sapiens
tctggtgtcatttgcctgattaaaattccaaaggctgcctatctgactcacacaagcaaccgtgagattacagagatctttggttatggtttgcatcttttgaccactggctactgtaacct

SEQ ID NO: 78925 - DNA, 122 bp, Homo sapiens
agacacgcgctctcaccatgtctgaaggacagacatgcagagcgctctcgccatgtctgacggacagaaacgcgctctcgccatgtccgacggaggcgtgtgtgcaataggcagaacctgcg

SEQ ID NO: 78926 - DNA, 122 bp, Homo sapiens
ttgcagctccaggcctgacgttttacggttttgttttttactggtttgtgtttatattttcggggatacttaataaatctattgctgtcagatacccttgcttggtgccagagatgtccttt

SEQ ID NO: 78927 - DNA, 122 bp, Homo sapiens
gggatgcggacgtccgcagggtcgccgcttcggttccagaggccacacggccgggcggggcgtgagggacagcccgaggactacaggtcccaaggttccccgcgccgcttccggggcacggt

SEQ ID NO: 78928 - DNA, 122 bp, Homo sapiens
gcgctcctacctgggacctacattggcttagtaagatgggccggcgcccaccccagccctcgcgcatgcgcataaaagcccactcccgggggcggggcctgagctagctgggcggggcctga

SEQ ID NO: 78929 - DNA, 122 bp, Homo sapiens
aaattgctgtgagactcaatcatctttgtcagcagtacaggcttgctgacttcagttccacggtagtttctgaaacagccttgaatcttgaccttcacccttctcagctgtggactgtgagc

SEQ ID NO: 78930 - DNA, 122 bp, Homo sapiens
gaaaccaggacactcacaccaccttcttctctcacgtccgcctcaaacccttctcgttggcgaagtattcctgggtcccccagcctaaagcacttttctggactcacataaccattattgct

SEQ ID NO: 78931 - DNA, 122 bp, Homo sapiens
tggccaccaagctcagtttcagggcaggccaaatgagtcagctggtaacagagacaagaccggctagtgggatttgactgccaatgtgattctgtgactgttaatgggtcttctgggtccag

SEQ ID NO: 78932 - DNA, 122 bp, Homo sapiens
gtctaaaatctcttctggatggtaaggctaatatccaacagtcataatacaaggcagaaacggacaaggaccaaaagagctttacagaaagggggccatggtggcccatagaagtgaggagt

SEQ ID NO: 78933 - DNA, 122 bp, Homo sapiens
gccagagggtcatcagggcctgaagctcccccaagcacaagagggcgccggtgcagccatcgccccatcacactcctcctttagaaagcaaaagaggccgggcgcggtggctcacacctgta

SEQ ID NO: 78934 - DNA, 122 bp, Homo sapiens
ttgtcctgcaactgcttcttcttctgcttcacgctgaatggcttcttcctcggcatggcccggaccagtcacctggcccgccctccgccgagctcccgccgcctcaactgactgccccccgg

SEQ ID NO: 78935 - DNA, 122 bp, Homo sapiens
aacaaatatactgagaataagttgatcacttaactgtcaatgaatatcaaatagtaaacacgtgattggaatcagatcagtaggagactttctagagtaatcaaatttttgctgaatttaga

SEQ ID NO: 78936 - DNA, 122 bp, Homo sapiens
aagcttccctccgtgctgtggggcttagatcacctccctccctgagtctgtttctccatgcgcgccggaatttctaaacggactcccagaaagaaacggaaagaaagaaggtaaagaaaaga

SEQ ID NO: 78937 - DNA, 122 bp, Homo sapiens
tttgcctgcgaggattcccaaagggatctgggcagctggtggccccgccccctctcttatcggagccccccagcccctccgttctccccacgcctaacttccctccggtccccccccaaccg

SEQ ID NO: 78938 - DNA, 122 bp, Homo sapiens
tccccgcaggggggtcccggttctctccgttcctttgagtatgttgtggggagtggagctcggatagttcctagagtctaggcaagaaaagcagcactgcaggtacagagcctcctcttccc

SEQ ID NO: 78939 - DNA, 122 bp, Homo sapiens
agtccagccactgtctgggtactgccagccatcgggcccaggtctctggggttgtcttaccgcagtgagtaccacgcggtactacagagaccggctgcccgtgtgcccggcaggtggagccg

SEQ ID NO: 78940 - DNA, 122 bp, Homo sapiens
actccgccaccctctcgttagctgcggcctgtggaatacgtgcacgtgctcacacagtcccgtctcacaagccccctgaggcccctcccgaggccttgctccctggaccttgggttcccact

SEQ ID NO: 78941 - DNA, 122 bp, Homo sapiens
cctgggtccctgctctgtgtcctccctgtggtggggctccctgcactctggtgttcatgccgcccccgtgccctgcacaaaaaccaccaccagcagctcacatttcacgtctcggcttttcg

SEQ ID NO: 78942 - DNA, 122 bp, Homo sapiens
cggctccccgcgagcaggccgggaaacgcctgttgctgcttttgtttttccatcaacaaccgggcttacgtaaactcctcgccggctctgggctgccagcgcgggggaggcggccttatctg

SEQ ID NO: 78943 - DNA, 122 bp, Homo sapiens
ctgctcctgcgccactggtaagggatgctaggtttctggtccttaggatacctatttccccgccacaggatagatgtccctaggagtagaggtgttttttgagttctagctaagtggagtca

SEQ ID NO: 78944 - DNA, 122 bp, Homo sapiens
ttgtgaggaaggaatgaacaagcatgtagggtgcttaggacagggccgggctcagcttgccgcctcacagcaacaccagcccggagccctgtcctgagcttgacagggttccgcagttcatt

SEQ ID NO: 78945 - DNA, 122 bp, Homo sapiens
tgaaaataagatctcagttgtctgagagtcatccaacagaatgtcctgtgagggcagacacgctcctctgtactgcctaacagcaggcacctgaaacgaggctagtgggactgaaaaactgg

SEQ ID NO: 78946 - DNA, 122 bp, Homo sapiens
tccaacatccactccagtcctcattcaacttcctcttcctgcgaaagaggggcgctgccccgtgacctacacagactgagacacgatcgccatgaatggagacctctggaaaagctcaggag

SEQ ID NO: 78947 - DNA, 122 bp, Homo sapiens
gaaaagcagctgtgtactcatctaaggagagggccggcagccatggaaaacagccctgcccggctccctgcgcgacacagacagcccctcagcctcacttcctgctgcctctctccccggga

SEQ ID NO: 78948 - DNA, 122 bp, Homo sapiens
gacttggaggctgaagctgcagctgtgatcgcaccactgcactgcagaagcatgggcaaccgaaacaaaattctcatatgtcctttgagtttgtgaagtaccagatgctgtgcttggtgttg

SEQ ID NO: 78949 - DNA, 122 bp, Homo sapiens
gttctgcgcatgtccactgcccactgtttggcttcacggaaccctgtacgcatgctcctacgctgaactttaggagccagtctaaggcctaggcgcagacgcactgagcctaagcagccggt

SEQ ID NO: 78950 - DNA, 122 bp, Homo sapiens
tctgtttgggagcaaggtaaaaaaaaaaaaaaaaaaaaaggaaatgtcaaacatgaaatgcgagatagagtttaacttgccctccgtggtagaagggaagcaaaagtgacatgtaactgacc

SEQ ID NO: 78951 - DNA, 122 bp, Homo sapiens
cacttcatgtcccatcaaacaaaccatatcttcctttttgtcaattccctccaatccccccgccttatgcctggtgttaataggtgttaactggcaagaagattgtggcaaaaatgatcttt

SEQ ID NO: 78952 - DNA, 122 bp, Homo sapiens
caactcaggaagaaggcggggttcaccccttttctattggcccgcggggctgagtgacagcggccctcaccgcccctccggttccaagctaaggaatgggggtatcagcaaaattgcaaggg

SEQ ID NO: 78953 - DNA, 122 bp, Homo sapiens
gcacttttgtgggaagaagaaaataaaggaaaggagaacataaaggaaaaaatataaatacgatacataatattagacacagtggagggatgaatgcagggatggagatagggtgcttcagg

SEQ ID NO: 78954 - DNA, 122 bp, Homo sapiens
agcagggcagttgtcgccgagaagacgacccagtaggcaggatggtacatctcgacgctgcggtgctctcagctgccgggcttgctactgcttctgctgctgctaccgctgctgccttcctc

SEQ ID NO: 78955 - DNA, 122 bp, Homo sapiens
agggtccacgctccgcctttttcacacggaaactctcaagcacctgcaggacatcaacatcgccacccctgttcacaacatgctgccaggtaaggggacgggacggggcccagggatgggac

SEQ ID NO: 78956 - DNA, 122 bp, Homo sapiens
aggattgtggggtagcgaaccccggggccggaagcagtgggcgtacccgccggctgtagccgtaagacgcatgcgctaggccgggccaacggagcccgcctttacctccccactcggcgtcc

SEQ ID NO: 78957 - DNA, 122 bp, Homo sapiens
ttctcccccgcagcagggaggaagccggtggcctcactgccttcgtcctgcctcccgaagcggaatctgcagccagcatgctctctgcccgatgtctgcagccccctggctatgacaagcag

SEQ ID NO: 78958 - DNA, 122 bp, Homo sapiens
ccttcacagagccagctttgacaaatgtcagaatgggcccctggcacggctgcccggcggcgccaaggcctggggatgactggcagtgggggaagtgaggccctgcccgggcggggaccacg

SEQ ID NO: 78959 - DNA, 122 bp, Homo sapiens
ggctgccccaggagtctaatccaaccacttcacttcctcaggaggctggacctgcccctgcggggctgtgggctgaacacagggttcaggctaggtaccccatccagtgggaccccaaatct

SEQ ID NO: 78960 - DNA, 122 bp, Homo sapiens
cctcactcctacggctggctctcgctcactcacccccgcaggcttggcctagtgagtcatcggtagcaaatacagtcaagagaaagagaagataagtactcagataattgagattttttttc

SEQ ID NO: 78961 - DNA, 122 bp, Homo sapiens
ggggccctctcccatcccacccttgccccgcctccctgcccccaccgggccggccctgcccgccgccggaccctggcatgtcaagacctggtccgcgcctgcctgcccagcccgcggaaccc

SEQ ID NO: 78962 - DNA, 122 bp, Homo sapiens
ctaggcaggcaaggaagctaagactgtgggccacccaatggcacacagtggtagcctcggcgaggacaaacccaacccaattcagactcccttcagctgggagggagtgggtctgtgcctgt

SEQ ID NO: 78963 - DNA, 122 bp, Homo sapiens
ccgcgcgcctcacctgccgggccagccggcctctgtcctccgtcttgacgctggtggactcgttgaagatccgcaggcactcctccatggggtcggagtcaaagtccacctccttctccagg

SEQ ID NO: 78964 - DNA, 122 bp, Homo sapiens
cccagactgaacgtaacagctgacatttgcttctggctggattctctgcccttaaaattccgtgacgagtcagaagaaacctggtggcctctccaggcacctaagactacacttcccagaaa

SEQ ID NO: 78965 - DNA, 122 bp, Homo sapiens
ggcaggtggaggtgctgcgggggccccgccgcccggtctgcgcccagacccccgccccgccgccacctggggggaaggaccccgctggcctcccagggacccccaccctggccgcacacggc

SEQ ID NO: 78966 - DNA, 122 bp, Homo sapiens
ctgggctgaatgggaacggcccaagcttgtctgagagctgtcccccagccaggaggcccacgacacatctgtgaccctcagtaggaggatctaaatggaggagagggttaaaagaatctctc

SEQ ID NO: 78967 - DNA, 122 bp, Homo sapiens
aaccccccccgccacctccaggtggttcttcccgccgcagagtgggagcagcataaaaggcggggtcttattagcataatctgcctggcaacctgatctcgacgttatatgattggttaaac

SEQ ID NO: 78968 - DNA, 122 bp, Homo sapiens
tcacttttagtcttcattttacagctggcaggcactgtacaaatcagtcagctcaggctgcgtggcccatgtcccagtgctgtgcaggacctgcctctatcacccgtgtgcactgcccggat

SEQ ID NO: 78969 - DNA, 122 bp, Homo sapiens
tcccctcacgcgagggcaggacaagccagactgggccaatcaggggagggcggcgggaatcgcaccaaagtaggtaaaaaatgcgggaggcgtccccgctgccgcggcccgcgactccgctc

SEQ ID NO: 78970 - DNA, 122 bp, Homo sapiens
tccaagtcaaaagaggagccgtacatctccgctgctgatcgtttcacacctgcgtttcctcggttcacttttggctctgcagccaggttaatatctacaacctggctagcaatcattctgcc

SEQ ID NO: 78971 - DNA, 122 bp, Homo sapiens
ttcgctgaagacggggctgcccagagccaaagcagggtgggctccagagcaagaagccatcgtggacgcggcgtctgcgggaggaaagcagctccttctggcttcgcgaaggccgcctagtc

SEQ ID NO: 78972 - DNA, 122 bp, Homo sapiens
cgtggcgtactgggagcaccggacgcgcgtgggccgcctctatgcggtgtacgaccaggccgtcagcatcttctacgacctacctcagggcagcggcttctgcctgggccagctcaacctgg

SEQ ID NO: 78973 - DNA, 122 bp, Homo sapiens
caaaaggacaaactggtcaagagcgactatttccgccgcagccttggctgttccacaagccggttctgccaaggactcgtcatccccaggcggagtgccacctacatgccaggtgggaggcg

SEQ ID NO: 78974 - DNA, 122 bp, Homo sapiens
atgctgggaatgacaagtggtgcctggatcctcgcgtggtccttctgagcaacacccaaacgcagtacagcatcgagatccagaacgtggatgtgtatgacgagggcccttacacctgctcg

SEQ ID NO: 78975 - DNA, 122 bp, Homo sapiens
aaactgcctaaaatggtgatagaaaagttactgtaataaacattttagtgatgtttagtgcgctgagagattgcctgtgagaaaatgatatgtaatattaagaaaaaacacttgaatacaat

SEQ ID NO: 78976 - DNA, 122 bp, Homo sapiens
tctgcaggcgtcgctgaaggatggggtggtcctctgcaggctgctggagcgcctgctccccgggaccatcgagaaagtaagtcccggcccgcgcccccgcccgcgccccccggtccggcccg

SEQ ID NO: 78977 - DNA, 122 bp, Homo sapiens
acgcgccctgtaggccgggccggagtcacgtgcgccaacgttacgcacgccggcgactctcgcctcgcctaggcctcagctccctaggttttgcttcgcggagtacagaagctgggaggcgc

SEQ ID NO: 78978 - DNA, 122 bp, Homo sapiens
gcctccgggaaatggggacttccaggacccagccacagccccggggtggggacactgacccggagctcacgagataaaggccgtcttgcgggtttatgatatcctgggtaacggcagccttg

SEQ ID NO: 78979 - DNA, 122 bp, Homo sapiens
aacctaggccgagtctgagataaactaacgggcctctgtcgctggcgctcttgtatataacgcggttaacttcatcaaatgggggaccgccctctctcgtgacgtcagcacccaaggaccgt

SEQ ID NO: 78980 - DNA, 122 bp, Homo sapiens
tggttctctggggctgggtcagggagagagcagctgactgcacggggcatgagagggtgacggcaaagttctgcaccctgaatgtgatgatggttatgcccgtgtacacattcaccaaaaac

SEQ ID NO: 78981 - DNA, 122 bp, Homo sapiens
gggttccgccgcgccgggctggggagcggggctccatccgccggggtctgtctgaaggttcgagccgggttagggcgaggagtactgccctggagtagagtctgggctgagggtgtagttga

SEQ ID NO: 78982 - DNA, 122 bp, Homo sapiens
agtcctttatcttcctgcttcagggtgtctctgtctactgttcccactgcctggaccaatcgataatctaccagccagcttactcctacacagaggtcagatcttccacagctgaaacatca

SEQ ID NO: 78983 - DNA, 122 bp, Homo sapiens
gatcctcagcgcagagggagaaatctcctaagagtaggaaggaataacagaattaggaagcgtttccttacttcacagtgagtgcaaacatgatgggaaggcatagagaaaaagtaagaaat

SEQ ID NO: 78984 - DNA, 122 bp, Homo sapiens
gcgatcccgcagcctgggccgggctgtggtgtcgggagcacgcgaagaggcagggatccccggggcatgcggagagggaaccagaacgaggttaggagcctgcaggtgtcgcccagggaggg

SEQ ID NO: 78985 - DNA, 122 bp, Homo sapiens
ggttggggggggggctgcaggcagaagaaaccgagaggtaacttttaaccctagcggcgccggcagctagggagcgcgaggtttgggagacggggagcgcggcgcggggcggcgcgagaagg

SEQ ID NO: 78986 - DNA, 122 bp, Homo sapiens
tccaaatccccgccaccttcctgtaccctgggatggatcagggctcggtccttgaggccgcgccgtcctcgcccctctgtgcgcaagagactcgggccccggccaagggtgagccccgcgga

SEQ ID NO: 78987 - DNA, 122 bp, Homo sapiens
ctttctgctcaattttgctgtaaacctaaaacttctctaaaaaataaatctatttaaaaacgcaccactggtaaatggggttaatcccttaagtgcaaggctgtttgaatatttgaaaatca

SEQ ID NO: 78988 - DNA, 122 bp, Homo sapiens
ccttgcccagggttggttctttgtctcatgaaatacagttagtacaacactccctccccccggccctgcctggtagcacgtgatagggatcagctctctgcaatttgacttgaatagctcag

SEQ ID NO: 78989 - DNA, 122 bp, Homo sapiens
ctttttatatttaggcttacgcaattttggtatcttgaaagcaatttttttaaaaagtgacgaaataaataaagtgactaaaagtttgaagtttgaactgggtcagtttgacaaattaagaa

SEQ ID NO: 78990 - DNA, 122 bp, Homo sapiens
attaaatcgcggggcgagtcacattcccgggggtggcgggctcctccagggaggctggggcgggagcggggggcggcgccagcagcgggctgtggagggccctggcacgtagcgcgcgctca

SEQ ID NO: 78991 - DNA, 122 bp, Homo sapiens
gcactccagcctgggtgacagagcagaactctgtctcaaaaaaaaaagtatcagaaaaagcgcagtctggatattgggaaatgaccatcagtctatgcatgctcaggagttccatgtctagc

SEQ ID NO: 78992 - DNA, 122 bp, Homo sapiens
tgggaactaaaaatacaacaccttaagaaactacagtttggggctgggcacagtgtcttgcgcttgtaatcccagcactttgggaggctgagatgggcggatcgcttgaggccaggagttca

SEQ ID NO: 78993 - DNA, 122 bp, Homo sapiens
aacagcgctttacaccatggatagtaagtagtttatgtgtcagccacttctaataccattcgtgtaatatgattgcattaattgtcattggaagcagccctggctgaggcactgtcattgct

SEQ ID NO: 78994 - DNA, 122 bp, Homo sapiens
cccctgaccactgaaggttccccagcccacccttacccagtgccccacagaggaacagcacgcagaggaagatgctggaggtgcccatggccagacacaggctcaggaatctgggagaggtg

SEQ ID NO: 78995 - DNA, 122 bp, Homo sapiens
tcggcagagacaggcggaagtggcgtcccgatgaggacgaggtgcccgggcagccggggacgggggtgcgaggggcgtgtgcttctcctgttcctgcgtggctcggttccacggcgggcagc

SEQ ID NO: 78996 - DNA, 122 bp, Homo sapiens
cataaaccaagctagaagccctaagacttgctccctcctcactgctgagtagcagggtggcgccaactgtgctttctgagagtgggcagattccaaagagaaaaggaaaaaggggacacgtt

SEQ ID NO: 78997 - DNA, 122 bp, Homo sapiens
tatacaccaacagcaaccaagctgagaatcaaacaaagaactcaattcctttgacaatagcggcaaaagtattttgttttattagaaaaataaaatacttaggaacatacctaacaaagaag

SEQ ID NO: 78998 - DNA, 122 bp, Homo sapiens
gccccccaccacccctccagcgactctgcggtgccagtgccttgttggcttttccggctacgcaccctgcagtcactgagctctcggtctgacgtctgatgtttgtggtttgtttataacac

SEQ ID NO: 78999 - DNA, 122 bp, Homo sapiens
ttgcagtcagtactgtgcaaaaattgaacttgaaatttgaggcccatgagtattttcttacgtaggtatgctctgctccatgcagcttttaggagaggcagcaccaggaaaaacttgtgttc

SEQ ID NO: 79000 - DNA, 122 bp, Homo sapiens
ttggagctgacccgcgttgagctgagtgttgctgcactttgcggggctggttgactggtacggatgattcggtagatggcattcttcccttggagtcaggactagagaagcagtggcggatt

SEQ ID NO: 79001 - DNA, 122 bp, Homo sapiens
aagcaagcggcctgtcatgcctattgcctagctgccagattaaccttgccttgaaaataacgattgccccataggctattcagtgtaaggaagacaaaaattccttgggaacctactagtgg

SEQ ID NO: 79002 - DNA, 122 bp, Homo sapiens
ctggagagtgcagggattgtacacaggctgagggccccaaacatcacattcagaatggcccggagggaactgcactttaatggggtggcacaggacagcagaaccctcagccagcagccaca

SEQ ID NO: 79003 - DNA, 122 bp, Homo sapiens
ggcccaagctgcggaaggacatgtacaagaaaatgctggcggtggatcctgaagctcccacggaggaggagcacgcgcagcgcgccgtcaccaagccgcgctacatgcagtggcgggaaggc

SEQ ID NO: 79004 - DNA, 122 bp, Homo sapiens
cagcatccctccacccccagtccaacgtctcctgtccccaacagcctagctacagggggccgggctatgggttagtctcgcccccgttcatgctcttcacccaatacctgagagaatcggaa

SEQ ID NO: 79005 - DNA, 122 bp, Homo sapiens
tcttctcgacggtgacggctgtctcggtgctgctgctgctgctcctggggctgctgcgtccgctgcgccgacggtgcggggcgctggggcagggcctgagggcggaccggtggtggggagct

SEQ ID NO: 79006 - DNA, 122 bp, Homo sapiens
tcaacgggaaactgaggcccagaaatggtgactgagttggccttggccacatgacacatccgtgggagagctgagtctcttgactcatcacccaatgatcttttctctgtttacacttcaaa

SEQ ID NO: 79007 - DNA, 122 bp, Homo sapiens
tgtcactggcccgcagacacattgcggggtcctcattgtcactggcccgcagacacattgcggggtcctcattgtcactggcccgcagacaggaaaggaaaagtaaatccccgctgaggcag

SEQ ID NO: 79008 - DNA, 122 bp, Homo sapiens
aatgtgtgctgggcacatgggacagccatggcactgagactttggaagtggccttgccagcgctgtcctgtctttctggcccacagatgagggctcctgattgtggaaggccacggaaggga

SEQ ID NO: 79009 - DNA, 122 bp, Homo sapiens
tcctgtcccggtacttactgacggtgcacatgcggggcttggggaagctgagtgtctaaccgcggtgcagctacggatgggaaattctgggcagggacgagcctgtcttcacctgaggaatt

SEQ ID NO: 79010 - DNA, 122 bp, Homo sapiens
ctcctggccgtcctcccttgggaaagtgcttcaactccccagtcccaaagtcctggagggcggagggcgcctcgtgagagttctcgggggtgcggcccgcgccccctgggtcctgcggatct

SEQ ID NO: 79011 - DNA, 122 bp, Homo sapiens
agtgagagcggttctggggaaggctttaaaaagcagatatggaccagggtagagttcgtacgctgtagcttttcaagaacaccgatctcattaattaaagaacagcaactatttaattccag

SEQ ID NO: 79012 - DNA, 122 bp, Homo sapiens
ctttaagctgaagtccagaaaaatgacagaaattcaactcctctttcctatcattgaacacggcatgcaaatggagggattacctattggaaaggtaacacactctctgttagctcagtcat

SEQ ID NO: 79013 - DNA, 122 bp, Homo sapiens
tgtgggttttaagtttcttgatagaacccatctgaaaacgctgaaccaggggcttcctcccgcctccacctctccccagcccagacccatcagccctcgtccaggccaccccacgagcagca

SEQ ID NO: 79014 - DNA, 122 bp, Homo sapiens
caagcgattctcctccctcagcctcccaagtagctgggattacaggcgcccgccaccatgcgtggctaatgtttgtatttttagtagagacagggaacgtttaggctttaagtgatttggag

SEQ ID NO: 79015 - DNA, 122 bp, Homo sapiens
cagggagagggaaggaagagtcggaaacaaagctgcctgttgcccccgtcccaatatctccgtccaaggaggtacaggggcagcgtgatggggtgtgttcctgctcttggaaaccacgtcgg

SEQ ID NO: 79016 - DNA, 122 bp, Homo sapiens
taggctccatcgctggggtggtggttgggggtgggggtgggggtggggaagggggaagtgcgggggagacacttgctgtggttactagggacccagcgtccatcacaaatccgaaggtgggg

SEQ ID NO: 79017 - DNA, 122 bp, Homo sapiens
ccatgacaaaggattttacgtttataaaattatgacagaagccatgtgcattatcctttacggacgcagcctagctctacagcaatcatcctgaaataagcatacctaatttcaagcaattg

SEQ ID NO: 79018 - DNA, 122 bp, Homo sapiens
cctgctcccagccaccagtacttccagtgcctgcttgagctgtgcacaggcgccaggccccggcttgcgctgcagtctctcaacctcctgcagcccctggtcctgtgcaacgtgggagaggg

SEQ ID NO: 79019 - DNA, 122 bp, Homo sapiens
taaatgaaatttctaaccagattctgaatccatgataccactgaaaccagcacacatgatcgcagtaaaacctcattatacttcctccactatcaccaataccctttattctctggaacatg

SEQ ID NO: 79020 - DNA, 122 bp, Homo sapiens
aacaggagagtaggtccacgtctcacccatgacagaggactgagaaactcaagtttgtctcgttacctttgcaggccctgagtataagagcatgaagagctgcctttatgtcggcatggcga

SEQ ID NO: 79021 - DNA, 122 bp, Homo sapiens
agtggaagcttccagagagggaaccattactgtgcccgggagaccagcaaagggtgctggcgaggcgggcagcccgggtggcctcggtgcggcgtgtctgcggagtggcagccaggccagct

SEQ ID NO: 79022 - DNA, 122 bp, Homo sapiens
gcacccgtctgtgacatagttggtaatttccagaggcagagaagatattactgacaataacgtcaacacgctgtgaccaccgtggatcctaatatccagggggggaccggggggtgatatta

SEQ ID NO: 79023 - DNA, 122 bp, Homo sapiens
gggcggcccgggactaggaggggctcggggccaggccggagccgtggtaggctggtgcagcggctgcgcggcgcggcgcggcgcggggcgggcgtgctctccgcggagagttagaggagttg

SEQ ID NO: 79024 - DNA, 122 bp, Homo sapiens
cgctctcagtacactgtctctacaggccaggaaagagttgtgtgtctttggggtcccttccgctccgcctagggttcccggccaggccgagagaccaagcagggaccatgcgcgtgttggta

SEQ ID NO: 79025 - DNA, 122 bp, Homo sapiens
cagcagcaacggcttcttctcgccttgcccctgagccccagctgactagcattggaggggcgcgaccagcctggtggagacccccggggtttcctgaaggtcggggccgctgaggtgggagg

SEQ ID NO: 79026 - DNA, 122 bp, Homo sapiens
tccgtgcagtgaagatatattaggcaaatgactgtttcctataatctttccttttttttccgtttcactttatgttttatgtttcctgataaagtagatttgatcatgcaaacacatacaac

SEQ ID NO: 79027 - DNA, 122 bp, Homo sapiens
atgctactatcatgtgctcctgactgtggcctgtagcaaaaatcacagccagctgcatctcgtgggacctccaagctcctctgactgaacctactgtgggaggagaagcagctgatgacaga

SEQ ID NO: 79028 - DNA, 122 bp, Homo sapiens
aaaaataacggctttcaagagcaatagtaaattctttttttttttaatggagttgtctatcggggttactgataattgtcaactgaacccttttgaaacacaggtttaaataaaccttttca

SEQ ID NO: 79029 - DNA, 122 bp, Homo sapiens
gtgaccgacactgtgccccggagagtttcggccctctcctggctctggccccctggaacacgtgatgcccagcccaaacagtgccacaccctgctctacaatgcctcaacgagagtcacaac

SEQ ID NO: 79030 - DNA, 122 bp, Homo sapiens
tcccctggggctgggctattctcctctgccgcctctgtacctggccaactcctacttatccgtgaggccacagctcaagggtcactacttctggcttctgaatctcggtatggcgtctctcc

SEQ ID NO: 79031 - DNA, 122 bp, Homo sapiens
tggagtgcggagcgcctgagtgagaagcactgcaaggtctcacctccgccatggaaggtccgaaaacagtgggaaggagtgggcgaggcagtgcggtccaaccaaacttgttgtgagggggg

SEQ ID NO: 79032 - DNA, 122 bp, Homo sapiens
cagcagggagagaccatctcagagacaggggaacagccaagcagaaaccactgtgctgggcgcggggggaggccgggaaagacagcacatctgcggggcgggaggaggggagggaagggagt

SEQ ID NO: 79033 - DNA, 122 bp, Homo sapiens
tgtgatggtatttagacccaaggtttttgagagataattagctcatgagagttgagccctcgtaatgaaatgaatgccctaataagaatagatagaagagaatgtgctttatctgtcttgtt

SEQ ID NO: 79034 - DNA, 122 bp, Homo sapiens
gggattacaagcatgagccaccgtgcccggctgtttttctttctttctttctttttgagccggagtttctctctggtcacccaggctggaatgcaatggcgcgatcttggctcactgcaacc

SEQ ID NO: 79035 - DNA, 122 bp, Homo sapiens
cgcactgtcgcgccgaagctcctcaatggccagcgccagctgcagccccggccgcccactcgcctcacctgagcctgggtacgtgcgccccacaacacctcccccaggcagggcccggggac

SEQ ID NO: 79036 - DNA, 122 bp, Homo sapiens
caggtggaacggcaggtgggttcaggtaccagcctggccgggacccggctgtgggaccaacgcttccggtgagcgacagaggcagctccccagggcctggagacccgtggggcggactctgg

SEQ ID NO: 79037 - DNA, 122 bp, Homo sapiens
tcataactggcttagcgccatctccttggcgatgagtgtgttcactcagatctggttgttcgcaagtgtgtggcccctcctcaccccttgctcccattctcaccatgtggcgtgcctactcc

SEQ ID NO: 79038 - DNA, 122 bp, Homo sapiens
gaccatcctgcgggcggacaccatatacagagatgggagggggaccaggaacatgctagacggccaggagtcctcaggagggacaataagacagcctgcccattagctgtctgccaccagaa

SEQ ID NO: 79039 - DNA, 122 bp, Homo sapiens
gtccctcggcggccgccatcttggcccaactgctcccctcactccagttgctcagcccgccgctgagcacagccaatccgcggccgtccactcactgtttcggccaatcaccgagcagacgg

SEQ ID NO: 79040 - DNA, 122 bp, Homo sapiens
ccaaggcaaggcctggtggtgcgcacgtgttcgcgtagcaatcagatgcactgtgagactcgggttatttagctccagtggcgcgatcttggttcactgcaagctccgcctcccaggttcac

SEQ ID NO: 79041 - DNA, 122 bp, Homo sapiens
ggcggcggcggcgggggtggcgggagccattagtgactctgtgaccccgttcaccgagcgcgtccccgcccaggtgctcgctgcccggcgccgcgccgtccacccccggccggggcaggtcg

SEQ ID NO: 79042 - DNA, 122 bp, Homo sapiens
acaccctctgcagccgctggtcggggtgttaagcccctcattgcccggggctggtagggtcggccggctactccgagtgcggacccgccaagcccacacccacccggaactcgtactggccc

SEQ ID NO: 79043 - DNA, 122 bp, Homo sapiens
agagagacatacttagtcatatgaaaagatgtttaagtgaatacattctaagtgaataatcgagttactaaactatatgcataagctcaggggccaggttccctgggttccctgctaaccac

SEQ ID NO: 79044 - DNA, 122 bp, Homo sapiens
tgccaggaggcagagggtcccgaaggccgggtgcttccccagggaaggcgctggtcctgtcgtctgtgtacccatcatctgccttctctcctgactttccctaatcaaagctggacactagc

SEQ ID NO: 79045 - DNA, 122 bp, Homo sapiens
gcggctggcgggtgggcgcggggcgggtgcgggctgggacacaaagacccggagcggagacgaccggcgcgggcggcgggcgctgcgccccgagcggggccgcctgtgactatagatccagt

SEQ ID NO: 79046 - DNA, 122 bp, Homo sapiens
aagtaagaaaaaggttttctctgatggtaagaaagcttcctcaaaggtagagaatgtttgcgactgctcctactcccgctccaggcttggcacccgttcagctcatgacttacacgtcgtat

SEQ ID NO: 79047 - DNA, 122 bp, Homo sapiens
gcaccaccggcggcacacgggtgagctggccgcacctcgggctggagcccggtagcaccccgatggttggccctggggtgccccagcctcgcattccccagctttgggggatgaggcggggg

SEQ ID NO: 79048 - DNA, 122 bp, Homo sapiens
tcttcctccatgtccaagacacccagcttaacaaccctgtagcccccaacttggccctagcggcacctcgcctcgaccttgccattttatactcaattggggcgtagggttctgaagcccag

SEQ ID NO: 79049 - DNA, 122 bp, Homo sapiens
cccgaacggcacgtggcagatgccgtctgccataccaactcaccttcacgtggctgtagtcgcctgctttgttgctctcgggtgggttcacaggtttgccctccactcggggccgaacgacc

SEQ ID NO: 79050 - DNA, 122 bp, Homo sapiens
attattgacccagaaagagttggtgtaattaaatacctagtcaacccagaacaattccagcgggtttacaagagtttggaattcaaaggctcctcacacttggaactaaccagcaacccaaa

SEQ ID NO: 79051 - DNA, 122 bp, Homo sapiens
ggcaacccggcgcccacgagggctcgcggcagagaacgcggtgggttcgtgaggggcgggcgtatgcagggacagagttcggagctgtctctgcagtgtgtctgtgtgactcgcgatgcttt

SEQ ID NO: 79052 - DNA, 122 bp, Homo sapiens
atccacctcctcgctcctgccctcccccgccctccccaacccacgcccgggtgggccaatcgctgctcggtattccaggcgctttctcaggtttctgctgatcttgcagcgcccagaaatgg

SEQ ID NO: 79053 - DNA, 122 bp, Homo sapiens
ggatctggcagtaccagagcagcagcaacagcaggagcagcaggggcagcagcaggctgccgatttccagcccggaggggccgggctcggaccccggcgggcaggggggatttgggggaccg

SEQ ID NO: 79054 - DNA, 122 bp, Homo sapiens
atctttcatcgccgatccgcacaaagccagagggatgcgcagctcctggagccgagaacccgtagggcgcacacgcttccccgcactcgcttagagccacacaccccacgtaatttcattaa

SEQ ID NO: 79055 - DNA, 122 bp, Homo sapiens
ctccagagcaacattggtgctgttgtaaagatgtactgtagaaaagtattcttcacccagcgtgacccccacagaaggtgtcaggtagacttgaaataagcaaagtaataacccagctccca

SEQ ID NO: 79056 - DNA, 122 bp, Homo sapiens
gaatcacagaatcagacactttaaacatgctgttcaactcctttattttatagatagcaccgctgtggtgaagagaaagttgagtcacttgtgaagggccacagtggtatataaaagcaaag

SEQ ID NO: 79057 - DNA, 122 bp, Homo sapiens
tggggttcctgtggagcgggatggcagcgaggctgcgggctccttttccccagtgagtcgcggaggaggactgaaggaggggcctgggttccgggagcaccagcggtgcaaccccgggggag

SEQ ID NO: 79058 - DNA, 122 bp, Homo sapiens
ggcggaggcgggctgggatgctgccgccgccgtgatgatgccgggagcctggggagacggcgggatggcaggagggagaggtatgtgtgtgccggccctgtgccagctggagggggctgagt

SEQ ID NO: 79059 - DNA, 122 bp, Homo sapiens
cactgccccggaagcgcacctagaattgagtctgtctggaggctccgggccagagcagggcgtattgtttcactcggtgaatgctcatttcacgtaaagaaaaccaggcaacggaacaagct

SEQ ID NO: 79060 - DNA, 122 bp, Homo sapiens
tcctggatgggtgacagcccgggaaggctggcgggtctcctaggaccgtgccctgcactgcgcctgagttgagcatcgccaggcggtctggacaccatcggggctgagaacacagagtcctg

SEQ ID NO: 79061 - DNA, 122 bp, Homo sapiens
tcgccattttgcattctctagcaaacttttttccctccaaaacgggaatgtatggtaatccgtgcaggggtaactgttcactttaggctcatattgcgtaaacataccttctcagcaactgg

SEQ ID NO: 79062 - DNA, 122 bp, Homo sapiens
gccagccccgcaacccagcagaccgccgcaagagctgggcatggccactggcccagtacccgacctacccgcttatggatgagttggaactggaggtggcactggcctcggtctgggtaggt

SEQ ID NO: 79063 - DNA, 122 bp, Homo sapiens
gggcttcgagtgttcgggagataatgcacacttcgcagtggatcttctcggggccccgagcgttgcccgcccattaggtggcgccggtcccctcgaacaggtcgctcaacaactcccgccca

SEQ ID NO: 79064 - DNA, 122 bp, Homo sapiens
tcctccttccagaggactgagcaatcagagaagggtgctggcctggatggagcacactaccgagtcgctgacgtgcgggcagacgtcgtagagcttggcgccatcttccgtgttcatggagc

SEQ ID NO: 79065 - DNA, 122 bp, Homo sapiens
tgggaacaactttgaaaaacctaatatatactattaaaactacaagattaggccatgagccgtggctcatgcctgtaataccagcactttgggaggccgaggaaggaggattgcttgaagcc

SEQ ID NO: 79066 - DNA, 122 bp, Homo sapiens
cccaagctggttcccgctgtagcaaacgtccgcggcctctcaggttagactcttctcccacggtctcctcccatggtgtcccctggagggacccaagttggtctcaggcgatccctggttcg

SEQ ID NO: 79067 - DNA, 122 bp, Homo sapiens
agggaaaagggccagggggagcaccggagccggaaacactcaccgtgccattgcggctcccgctccagggtggcatttagagttccaggcaggggccgctatctttagatcctggggacgcc

SEQ ID NO: 79068 - DNA, 122 bp, Homo sapiens
agttgctcagggtgggcttccattctttacaggactctccgtggagtctgggagtggcctcggaccctctgctgctggcaaagcaggatatctgtgtgtcaggtagtttattcacccatcgc

SEQ ID NO: 79069 - DNA, 122 bp, Homo sapiens
cggttgtgaggtgctcacgtgttttggagatagcaaaagtctcaaataatatggcacagacggccagccatggtggctcacacctgtaatcccagcactctgagaggccgaggtgggccgat

SEQ ID NO: 79070 - DNA, 122 bp, Homo sapiens
aagaaaggggcccccggaattctccagctacgtacgaggagcgcgagcccacagccgtctcggctccgagcccgccgccggcaggaaagccacaaagaaaactgataaacccagacaagatg

SEQ ID NO: 79071 - DNA, 122 bp, Homo sapiens
ttgtttgttccgtatgttctctccttcccttccctttctcgggtgaatatagaggacatccggctcttagtgtttgcaggtctaagtagcttccccgcaggtctgctgggcatcagttgtgg

SEQ ID NO: 79072 - DNA, 122 bp, Homo sapiens
aggaaggtggtggctggtcatcccgggctacagaatgcagttgagtgtcctgaagagagacggcaggaagccggggctggagatgagcccctgataccagggtacctgtgcgtgttcgggtc

SEQ ID NO: 79073 - DNA, 122 bp, Homo sapiens
tcctctgagcctgtgagtggtggcaggtcagagccagactaaggctggaatctttttaaacgtggtctgcatgacaggactctggtgctttaaaaaatatacagatattcccagaccccatc

SEQ ID NO: 79074 - DNA, 122 bp, Homo sapiens
ggcaacgacgaagaagctggtttctcagcttcggttggactctggtttttcagtccctcccggagccgcaagaacacgacgtggttaggaagccaggtctgccacagctcgccgtcgcccac

SEQ ID NO: 79075 - DNA, 122 bp, Homo sapiens
tgaggtaggtggtggggcttggggacacgcggctggactggccggagaagtcctcctggccggaggggagccaagtgttcctgttccaggactgcagaactggcccagacctctgtattgga

SEQ ID NO: 79076 - DNA, 122 bp, Homo sapiens
gtttctaattcatctgatgcagcacaagtgagagacatctttctaaatgatggaccattacgcaataattaaatggtcctttagcaagacgcacccctgaagttaaaactatgaaatgattt

SEQ ID NO: 79077 - DNA, 122 bp, Homo sapiens
aaaatcccctacttccaaatccttttccacaggtattctgcctttgactgcaactcttgtcgtcttatgtgggtgttgaattgatctgtctctgcagccagatccaggctcctggaagaacc

SEQ ID NO: 79078 - DNA, 122 bp, Homo sapiens
tgccctttcccctccggcctctgccggtgctgctgcgccctgcggagctccgaacacgtgcgcgtgagtaaggacccagaggggagagtccttggaggtttcccagcctggggaaagaagca

SEQ ID NO: 79079 - DNA, 122 bp, Homo sapiens
tggcgggcaccgccccccttggccaatccgtggcagctgtgggcggacccgcccggctggcgacccgcccctggcttcgtaacgcggctctccattggacaaaggcgcgtgacgcaaaggca

SEQ ID NO: 79080 - DNA, 122 bp, Homo sapiens
ctatcgcgctcagcagctccgccaccgaccaagggggaaaacttctgcagaaacatcaaccgagcttccgtcttaagcagccaacgagcagccacgcagcgtgctgctagcgggacgggagg

SEQ ID NO: 79081 - DNA, 122 bp, Homo sapiens
gggcagacggatttccggttcccggggctacgaggcggaagcgaaggcagacgcagtctccgtcgttgacgttagtcgcagtcttcgctgctaacggtaataactcttaggttgcctgtttt

SEQ ID NO: 79082 - DNA, 122 bp, Homo sapiens
agaagtattatcacttttcaagatgtgttgatgagaccagtacttgtagaattaatgctgcgtgtcagttgatcaaaaattatttgcaaagctcctgttgtatcttgtgtaggagcctgtgg

SEQ ID NO: 79083 - DNA, 122 bp, Homo sapiens
agcgggcggcggggggggggcgccttcctcctctgagaggaggccccgccccacgctatccgggctgtcagccctgatcaaccctgacagagttcccggatgtgctttgccggatgtgcttt

SEQ ID NO: 79084 - DNA, 122 bp, Homo sapiens
ttgcagaagaaagcattattaccgtcagaggggttggcgttggggccgcagtgggagacgcggatgtgctcctgcaggctattgatgtcggcgaacatctcggggcagtagttgcagtggaa

SEQ ID NO: 79085 - DNA, 122 bp, Homo sapiens
cagaagcctctccccacctggccccatctcagagccatatcctcttcaccaggcttcctgcgggtcctgggctgggaggacagcaagcccttctggagtgtgccatcagcccggcaccacta

SEQ ID NO: 79086 - DNA, 122 bp, Homo sapiens
ttgcccctggcggtggagccaagccgccggctttggaccttgcgctctggcccggacccacggtcagcaaggaagggacacatgccccaggacatttgggatgcagaaaaccggcgcctgcc

SEQ ID NO: 79087 - DNA, 122 bp, Homo sapiens
tgctcctggcggtatgggtgctgaccggggagctgtggccgggagctgaggcccgggcagcgccttacggggtcaggctttgcggccgagaattcatccgagcagtcatcttcacctgcggg

SEQ ID NO: 79088 - DNA, 122 bp, Homo sapiens
gagaaaacctgaacagggcctctgtggctaaaggaggccagaaggccccagagaaacccgcgccagaggagggccccccaagcgctgaggcccacgcgccgccgctggcccaggaactggcc

SEQ ID NO: 79089 - DNA, 122 bp, Homo sapiens
gccgctgggcgaggggtgggactgcaggcaccgtgcagccgcggaccaatgagcgggggccggacagcccgtggcccaatagcggcggcgcgggcacgctaggggcgggctgggcgcgccga

SEQ ID NO: 79090 - DNA, 122 bp, Homo sapiens
agcctcattcacatctgtttaattgctcccattccatgttaaaggatccttctcctttcccgccagtttcattagcatgacaggcctggggtgttgagtgtttaactggtgctgcaacttta

SEQ ID NO: 79091 - DNA, 122 bp, Homo sapiens
ggctggccggattctcattacaaagcgtcatcttctatggggagacctcttgttccctctcggggctggttgcttttgcctggacaataagcctggccccagggcacctggggaaggtgtcc

SEQ ID NO: 79092 - DNA, 122 bp, Homo sapiens
ggcgggacccgtgttctggaggcgactgctgggcctcctgcctggccgcccagggctggccgcgctcctgggacgcctgtccgaccgcctcggcaggaaccgggaccgccagcgcaggaggt

SEQ ID NO: 79093 - DNA, 122 bp, Homo sapiens
ccaatcaggatgtgggcggggccaaataagggaataaaagctgggcacctgagccagcagcgggaatacagtctggtggccttccatgctgtgggtgctgtgttctttcgctcttcatgata

SEQ ID NO: 79094 - DNA, 122 bp, Homo sapiens
tgtgcctctgaattgccaatactgtccctgcatctctgagtctacgtgcatgcttgcccccggcgtgccacctgtgcggagcgcgtgaacctggtgtgtgcgtgctgtgtgtgtgtgcgtgc

SEQ ID NO: 79095 - DNA, 122 bp, Homo sapiens
gaactcaggaggcagaaggctgacagtgagcattttctactgctggccctgagtaaaccgcggctagccccggggaagctgccatctgcacgagtaattcatagggaatattaaaacatccc

SEQ ID NO: 79096 - DNA, 122 bp, Homo sapiens
gccaaactccctcatgtacctgcactccccgcggggacccaaggagtggtcagagtgaggcggccagacaggagggccccttgccagggatccggagtcaggaagccacgtaccgctccaca

SEQ ID NO: 79097 - DNA, 122 bp, Homo sapiens
cagtggcgccaagaccagggatgggagcaagcatgggtctgcccggaataggagtagctgcgggacccagagctcagggagacggtggtggcttgaatgaggggagtagaggtagagggttg

SEQ ID NO: 79098 - DNA, 122 bp, Homo sapiens
gaacaagaggcgatgtatttatttacactctcgatgtttccctgcgcggtcggtgtaccccgggcagctctgattcgcaaacgtgtgcaaaactagcaatggcgatcaacgagacttgcttt

SEQ ID NO: 79099 - DNA, 122 bp, Homo sapiens
cagccgggtgctgagcctccggagtccggtagctgaatgaaatacgcagggatcaccagccggacccaaatcttgcgtccctgccagcatcctggagtcctaagaggcagggattggagcgg

SEQ ID NO: 79100 - DNA, 122 bp, Homo sapiens
cttctccacgccccgcccctccccgccccgcgcctgccgcgcattgcagacgcccagcggcgccaagaacccggccaagctgacttggcgactcctcgcagcccctgctctggcacgccaca

SEQ ID NO: 79101 - DNA, 122 bp, Homo sapiens
tccctccagggcgcgtccccgcggctgccaaccagctctttgcgcccaagcccgcgccgccgctaccttggctaatggcagcactgaatgaaaggaacggatgcaggctccggatttatgaa

SEQ ID NO: 79102 - DNA, 122 bp, Homo sapiens
taaattcaaatcattagtctcctcaccccatcaaaaaacttctattagtaatggagacctcgccggagaccttccgcggagagcgctgccttcccaattcccagtggaaaaattctgcgcga

SEQ ID NO: 79103 - DNA, 122 bp, Homo sapiens
ggtgtgggacgatgagcagaaggactttgtctgcaacaccaagcagcccggctgccccaacgtctgctatgacgagttcttccccgtgtcccacgtgcgcctctgggccctacagctcatcc

SEQ ID NO: 79104 - DNA, 122 bp, Homo sapiens
ggatcgccggggagggccaggggcttaggaaggtcgggggcctgggggtccacccgggaccggagattgcggatgaggtcagcgctgccccccccaacacccttccctgctgcataccctgt

SEQ ID NO: 79105 - DNA, 122 bp, Homo sapiens
aggcggagcgcgtactccccctcggcgcccgggctcaggcccatcccgcctctgcggcctcgccggcccccaggccttgcaggggactacgcccctggcgagttcccagtcggcgcggcccc

SEQ ID NO: 79106 - DNA, 122 bp, Homo sapiens
tggcccacacgacagtcctggaggtgagcagggcaagctttattgtcccccttttatagacggggacaaaacatgagacttgctgtgcacctattgcatactaaagatgccaaggggctttc

SEQ ID NO: 79107 - DNA, 122 bp, Homo sapiens
cagaacctctgctaagccgatcgctgcttggggtccctcggggattccagattccagtctcgtatagaatgatgcaagaagggaagagctcagagcggattgatccccgtggggcatcctga

SEQ ID NO: 79108 - DNA, 122 bp, Homo sapiens
taatgaaaaggaaaagatagtcttaaattaggttacatgtcagaggtactctcagaggtacgttcctaaatgagaggtaagctgtaagttggtgctgcggttaagcgctgaaatggaactgc

SEQ ID NO: 79109 - DNA, 122 bp, Homo sapiens
taccgctgggatcctccgaataacgcctggagggcagcgaggtgcagggaggggaagggacgcgcatggcaagctcctgcctcgcatccccacgcaccgagagccctcctgcctgcacgtct

SEQ ID NO: 79110 - DNA, 122 bp, Homo sapiens
ggcacagcaacttgcccaggactgacactgtcaccctgactgcaggaggcacagggactccgggagactcagagggcgaagagcactggcatttggcatgtccatgacattggagactcccc

SEQ ID NO: 79111 - DNA, 122 bp, Homo sapiens
tattcagggctttgccccgccctgttgcccaatagacaccccttccctccccactccccgcggccaggtctacttgttccttgaggatccaggctccgaaaagccctgaggcaggacaggac

SEQ ID NO: 79112 - DNA, 122 bp, Homo sapiens
atggtgcatggtaggtggcagaagggacctctgtgctcagagctgtgcctcaggacccatcgttcagatgggaagactgaggttggggaggtgtgtcttgggttaggaagctgggctcgggg

SEQ ID NO: 79113 - DNA, 122 bp, Homo sapiens
acactccccaagggccaaatcggaccgcctctcactaggcggaaagttttgaaacttttgcgcgctaaaaatgatgagccagacgcatgcgcaaacgtgcactcccggggtggcgcttctcc

SEQ ID NO: 79114 - DNA, 122 bp, Homo sapiens
tactatcctgcctgggaacacctagcctactatgcacatcagaagagggctctctccgaacgacggggttactactaaaagccttttccggagaatgtggtctttttcctaaccgctggcgt

SEQ ID NO: 79115 - DNA, 122 bp, Homo sapiens
ataagtttctccttttctttctgtctctctcaatattttccccggtttcatcctcctccccgcgcccccgtatcagtcatccttttataatttatccagtttttcctctcctattagttcct

SEQ ID NO: 79116 - DNA, 122 bp, Homo sapiens
gcccgcaacatagccccctggatgcgacgccccacaccctggtgcagcccatccccgccacgctggcttccgatcccgccagctgcccttgctgccagcatgaggacggccggcggccctcg

SEQ ID NO: 79117 - DNA, 122 bp, Homo sapiens
cccattttataatctttgtttcttttctcccattctagaaccaagactcagagcttctgccgaaatgaatatagcctgactggactgtgtaatcggtcatcctgtcccctggcaaatagtca

SEQ ID NO: 79118 - DNA, 122 bp, Homo sapiens
cctcggggaggctgtgtgtgtgtgagtatgtatggatgcgtggatatctgtgtatatgcccgtatgtgcgtgcatgtgtatataaagcctcacattttatgattttgaaataaacaggtaat

SEQ ID NO: 79119 - DNA, 122 bp, Homo sapiens
ggtcgaagttctcccgaaggggaagtccttcttttgtgttgaccaattgaacaccttaaccgaggacctgtagccactgggcagctgcgagaggtagttttcctccttttctctaagcaacc

SEQ ID NO: 79120 - DNA, 122 bp, Homo sapiens
cctggtatactcagtatcagccaggatgctgcagaaccagctcccagttggacatggggccgcctaccagtttgctgtgacctctcttattgccccccaagcttatctaagcctgtatcctc

SEQ ID NO: 79121 - DNA, 122 bp, Homo sapiens
cagttccgttgattcacatttggctaagcgttcagttacaacctaaagctcactatctgacggtctgactcgctctgacccccaccatatcctcactatctctaccgctgccctcctccagt

SEQ ID NO: 79122 - DNA, 122 bp, Homo sapiens
ggcctgcagggttggtgagccaagaagaatgagcccaggtcccctggatccaattcagagcggagaccactctctccacctaggtgtcccaggctgaggctgggacaagattcaaccctgga

SEQ ID NO: 79123 - DNA, 122 bp, Homo sapiens
gaggcctcggccccacgcacctgcagctggttggactggtcccagtcgtgggggctatagcgagagaagagtgcggagcgcagtgtgggcaggatggtgggcggccgcagggtactggtgct

SEQ ID NO: 79124 - DNA, 122 bp, Homo sapiens
gtcggtgcccaggcgcaggccctgcaagcaggagacggcctgctgggctgcggcagagtccgggtaatggaggaaggctctgcgccgcgggccctgccaggtgagccgcaggggcacggagc

SEQ ID NO: 79125 - DNA, 122 bp, Homo sapiens
tccagccgcgacctctagacttcagcccttccattggtcgtccgtcacagtgccacagtgcgccatgctcacacgacggccagcagccaatcagcgcggctcatcttcgcccagccaggaca

SEQ ID NO: 79126 - DNA, 122 bp, Homo sapiens
agtgccagacagtgggcacaggtcagtgggtgcgtgcaaagtgcgcgagccgaagcagggcgaggcattgcctcacttgggaagcgcaaggggtcagggagttccctttcctagtcaaagaa

SEQ ID NO: 79127 - DNA, 122 bp, Homo sapiens
gtgtagaataaactagaggccacagacagtgtcaagaagatggacaggtctgaatggcctcgggctaggggatattccactgtcgcctctgactacgggtggtcctgtggctgaggcgcagc

SEQ ID NO: 79128 - DNA, 122 bp, Homo sapiens
acagagcccgcgtccaccctctcctctaggatcggggcttggtgaagtcagagccgaccccgcctccccaggccccacctcccaggcctcttccactgctttagtcctgagggtccacatac

SEQ ID NO: 79129 - DNA, 122 bp, Homo sapiens
ggttggtggaggggagagataccaaatgtcggcgcccagcctgaaataagtggcatgggacgcgcagggagggcgttcagcttcagaaagcagcggctacgctgggtccaaacccggcggct

SEQ ID NO: 79130 - DNA, 122 bp, Homo sapiens
gcgaggcctctgaattaacagcaaagtttcctaagcatcgcagaagtgcgtcccagcccccggctatccctgcggtcaggatataggggagaaatcgtccccaaaccccgaaactctacata

SEQ ID NO: 79131 - DNA, 122 bp, Homo sapiens
ttggaagtcagcaggaccaacagagctgagttttcaagctgccactttagaagggtgtaccgaagatttctggcctgataatagccggtgtgattgcttctgataaataccacttttgattg

SEQ ID NO: 79132 - DNA, 122 bp, Homo sapiens
ctgcggccgccgctgggctgctgccatggggagccgttgagagtggggccctcttcgctccgccgcgctcctccggctgccagcgggggtgggcgggagggaggggcgggggggagcgggcg

SEQ ID NO: 79133 - DNA, 122 bp, Homo sapiens
catcccagatctactgaatctccaactctggggtgagacccaggatactatgttttaaagcgttctccaggggatttagaggcacactgatatcccagaagcactggagtcgacttttaact

SEQ ID NO: 79134 - DNA, 122 bp, Homo sapiens
acccactgagtcccagacacaaactgcatgagggtctacacaggtaagaaggtcggtctccgaggcctggggctccaggccccctcagctctgggaccctgagcccagcccctgtatccctc

SEQ ID NO: 79135 - DNA, 122 bp, Homo sapiens
gcggctgcacaagcatggttcagaccgccccctgggcttctacatccgagatggcatgagcgtgcgtgtggctccccagggcctggagcgggttccaggaatcttcatctcccgcctggtac

SEQ ID NO: 79136 - DNA, 122 bp, Homo sapiens
cgctacggccagtctgctggtggctttgcactattcttgccaccactttattagttcttccgctcacctccatgtattcatcttgacacaggcaaaaagggaggaaaaacaaagccagcagt

SEQ ID NO: 79137 - DNA, 122 bp, Homo sapiens
aaacgttattataaacttattgtataatgtttatagcaaatgtcaacaagtgtatatgtccgtggtggtggaggaaaggccttgggatacacagtggctgacctatttgtgggagggattta

SEQ ID NO: 79138 - DNA, 122 bp, Homo sapiens
gtcggtcttgctgctcttggactccatggggaacagtgtgggcgccatcgggggagaggccgagggctcaggggcaggggccgccggagcctgcagggcagggggcttggacacgcaagcga

SEQ ID NO: 79139 - DNA, 122 bp, Homo sapiens
gtctgggggcggggtttgtggggcctccatctgactgcccagcgcccctcacttgcccctcgacccccacatcatctcactgctgggctgcgcccgcacccccatcttggtggcgacaccgt

SEQ ID NO: 79140 - DNA, 122 bp, Homo sapiens
agccacggagccaggcaggagccggagccgcagagacccaccacagagccaggcaggagtcggagccacggagccaggcaggaactggagccacagagaccagccacggagccaggcaggag

SEQ ID NO: 79141 - DNA, 122 bp, Homo sapiens
gcgaggctgctgcagctgctgtcactcacatcgcagtcggccaacctgggtgaagcagggcgggggtcagggtgccgggcgtgcctggcaccgcactgaccggcagagcaggcctgggcctg

SEQ ID NO: 79142 - DNA, 122 bp, Homo sapiens
atcccgagcaggacagggctctgccaggccgtccctgtgaaactgcttgtaggcactgagcgtgccatctttgaccctgcaattcctgttttctttctgaattcgtgtccagccagtcttgt

SEQ ID NO: 79143 - DNA, 122 bp, Homo sapiens
ggggcgtccggaaaagggggcggcttcgactgcggctctgattctgggtctctgatccaacgttcccgctgttccgctcgcagcccgcgggtcgctgctttcagtttgttgaccaccaagtt

SEQ ID NO: 79144 - DNA, 122 bp, Homo sapiens
aagtgatttaccattggcttggtttcttcggggaatttgaagaattcatacttatttatacgttttcaaatatttatttaagtgcctacaacatgtgaggcatttgggaatgtctcagttaa

SEQ ID NO: 79145 - DNA, 122 bp, Homo sapiens
agcccgggatgagaaagaggcaggggaccgggagggggttcagatctagctgaggacacacgcgcgttctgcagttgtaaaagatttcccggtgggcaggatcgtttcccctcccatcgccc

SEQ ID NO: 79146 - DNA, 122 bp, Homo sapiens
tctcctttgtttattttctaatctatatttttactggaagatttcctctttattctctcccgccctcctacaagcgctcttgctggccgtctgggtgcacacaccgctccctcgatcacccc

SEQ ID NO: 79147 - DNA, 122 bp, Homo sapiens
cgcgccctcacccgggtctcagagcctccccgggccaaagctggggaggatgcagaggggcggcctccccaagccagatctaggggtgacgggaggagaatgtgagctcctgggcgcgggga

SEQ ID NO: 79148 - DNA, 122 bp, Homo sapiens
tggcggcggcggcccggggaccgtgatctccggcgcacgggggacctgcgcctcggggagcgggacctgcgggaagaggagaaaccacatcagagtagctcaggctgtaggggcaagctagc

SEQ ID NO: 79149 - DNA, 122 bp, Homo sapiens
agctgccctgtgtggtgtctcagcaaggaaagccaacaaagctggtagacacaggcagaccgtagcccaccgcctgtgagtggaggctccgagccgacttcacctcctcctcagagggaccg

SEQ ID NO: 79150 - DNA, 122 bp, Homo sapiens
attacttatgtggtttggtttgtttgaaatgaattacaaagtgtattggttgaaacatatcggtttatatgtttgtaattgaggtctaaggcaaaaaggaggctgtgatgttcaggatgagg

SEQ ID NO: 79151 - DNA, 122 bp, Homo sapiens
ttcagcgactctcccctccgttcagcatccaggttccttacggctacagtgccccagccccgcctcaccagcgcgacattctgccctgcctacccactcagacacagtgcccttttcggttc

SEQ ID NO: 79152 - DNA, 122 bp, Homo sapiens
tcaaacccaggcgtcaggcgctgcagtcagggaaggctcccttaggggctgggttcctggcgcttacgacgcagagaaggataagggcgatggtttcgcaatcccaccccctcctttgtcct

SEQ ID NO: 79153 - DNA, 122 bp, Homo sapiens
aactcaagaaggaagaagggatccgtggtaatatttaaatcccaaaatcatactccaaggcgtggctggaaactggctgttcttctccctcaatgccttctttagaagattggcccctccca

SEQ ID NO: 79154 - DNA, 122 bp, Homo sapiens
ccctttcctagtcaaagaaaggggtgacggacgcacctggaaaatcgggtcactcccacgcgaatactgcgcttttccaaccagcttaaaaaacggcgcaccacgacattatatcgcacctg

SEQ ID NO: 79155 - DNA, 122 bp, Homo sapiens
aatcacctatacccactttctatgaatctgcagtttctgcaattcttttatttcttcccacgtatgcttgttctaagaataaccgctgaaatgtaattttacatttgttgtatttaataaac

SEQ ID NO: 79156 - DNA, 122 bp, Homo sapiens
caggaagaaaataaaaacaaagaaactgactagggtcatagttaccagaacaaactgcaccgccctaccacctcaagaaaccaactccccctacaccaaaacaaaccttgcccttccccgct

SEQ ID NO: 79157 - DNA, 122 bp, Homo sapiens
acctcatgtactcactttcttccccaaacagcttagattctattagattccatttcatgacggacgatagaatctaagctgtttcaggaagaaagtgagtacataaggccagcgtggggagg

SEQ ID NO: 79158 - DNA, 122 bp, Homo sapiens
ggacgtctccccggacccatcgctgtccaccccaggctcggccggctcggcccggcaggacgagaaagagtgcctcaagtaccaggtgcccctgcccgacagcatgaagctggagtcgtccc

SEQ ID NO: 79159 - DNA, 122 bp, Homo sapiens
gccagtctatggcctgcccacgtcctggcatctgtcggtgtgatcttccgccggcgtgctcgcctcgacgtccgctcaaagtccagttgctggtcttcttccgctgatgtgttccactcgta

SEQ ID NO: 79160 - DNA, 122 bp, Homo sapiens
gccgcgggtcaagctgcagctctgggacaccgcgggccacgagcgcttcagctgcatcaccgggtccttttaccggaatgtggtgggtgtcctgctggtctttgatgtgacaaacaggaagt

SEQ ID NO: 79161 - DNA, 122 bp, Homo sapiens
ccacgtggccaatggttgtggtatctgcctgcttcccctctggcttgtctgatggtcccacgaagaggctggaaggcgaacttttctgggactgtctccatggggacttggaatgtaataga

SEQ ID NO: 79162 - DNA, 122 bp, Homo sapiens
cctgggacacagcgattggctgggaccaggagagggcgggaagaagaacttggcggagcgcgctcatatctctgattggctgccaagggtagcccttgacagctgccgggtgggacccgtag

SEQ ID NO: 79163 - DNA, 122 bp, Homo sapiens
agcagctcgacgacgtacacactcatcagccagtgcaggaacttggccaggatctcctcacgcagacggtgctctgcggccggaacacagccaaccccttaaacgagaaggacatgccacat

SEQ ID NO: 79164 - DNA, 122 bp, Homo sapiens
tatccttaaaaactctgctccccgaatgcccagggagactgatttgagtagtaataaaaccggtctcctgcacagttggctctgcgtgaattactctttctctattgcaattcccctgtctt

SEQ ID NO: 79165 - DNA, 122 bp, Homo sapiens
cccgccctcagacccagccagcgtcctcggtccgcggccgcccctgcccggtgggttcgacgctcagcacccagcaccctgcgggcgactcccgctcagctcggacgcgccgcccctccgct

SEQ ID NO: 79166 - DNA, 122 bp, Homo sapiens
aaacttagtggcttaaaatcaccacagtctagctcatgaatctgtaacttgggcagagctcggtggagacggtttgcccctgtggctcgactggagtgttcgttcacacggctgccaagtgg

SEQ ID NO: 79167 - DNA, 122 bp, Homo sapiens
tgagccacagtgagatggacttttgtctggtgatgactatactgcaggataatgggccagcgtcctctcaaacttagaatcgcctcatctcagcatcctactaaacagaacatcactgttga

SEQ ID NO: 79168 - DNA, 122 bp, Homo sapiens
aggcttcggtctgcactgcagcaccctgtgggtccagagatggaaggcgctgtgcatgggcgcatggtctggtcagggccctctctgggccaggggctggtcagcaggctcttccggagcgc

SEQ ID NO: 79169 - DNA, 122 bp, Homo sapiens
gccgggtgacgccaaacctgcgattcccaagcggcagcgcggcctcccgagccgggttgacgctggcgtggcggccatgtttattgagggcacctggcttctcccgcttgcgccgccgggtg

SEQ ID NO: 79170 - DNA, 122 bp, Homo sapiens
ctgcagcaccccatcgctgccgtgggcagagcagccgtgttggccttcagaggcgctgcacgggaccccggctcccctgaccaccctctccattaccgcagctctggccaggctgccgcacc

SEQ ID NO: 79171 - DNA, 122 bp, Homo sapiens
tttctgcagcccctgcaggtcaacccttgactgacctccatttactcatacttagattaccgaaagctctccattttcccctgtaaaacacaaatacggagaatcaaatgtactgctgactc

SEQ ID NO: 79172 - DNA, 122 bp, Homo sapiens
ggcagcccttggctggggtcggggaggctcatccgatgggcccagcactgaaggctcttccgcaggcaattccttcttggggctgtggctggggacctgggaagcacaccccttttcctcca

SEQ ID NO: 79173 - DNA, 122 bp, Homo sapiens
cttagttgatccatctttgtgttccaagcacaatgcctcgaaaatccacctgctggaagtcgggtggtgtatgcaaagggatgtcatggtaatttgaaaacttttgaatacagaatagaggc

SEQ ID NO: 79174 - DNA, 122 bp, Homo sapiens
ggcacctggtgggtctcacgtggacacgtgcatcctcgaatgctccggtcacgctccacacgcgccacagacacaggccacacgctccacacgccacagacacgggccacacactccacatg

SEQ ID NO: 79175 - DNA, 122 bp, Homo sapiens
ctgccgatcccccgtgtgcgccctgaaaggtccccgcaaaacccacccctcccgtggagtcgcctcctcgagcccttcatgggtcccagcagctttcctcgcagacccccgccctttggccc

SEQ ID NO: 79176 - DNA, 122 bp, Homo sapiens
tggccgaagctgctgggtcccgctgtgcttcccccgggcatgcgatggggataattcccacgcctcgctcaaagccatcccgggagagccctccctggtccccataggcacagttgggtgtt

SEQ ID NO: 79177 - DNA, 122 bp, Homo sapiens
tggaggcacagcagatggaacacgctgttgcccaatgccagccccaagcggggcagtgtgcggggcctggggagctgtcctgcagtgctgacatctatgaggcagcgtcaagcaaaggtgca

SEQ ID NO: 79178 - DNA, 122 bp, Homo sapiens
tagcattcaccttcttaagatataacatatctgtttgcaagtcctgactccccacttgaccgtgaccccttcaaggacaataaacaagtcattgtccatctttctatacccgtgtagtactc

SEQ ID NO: 79179 - DNA, 122 bp, Homo sapiens
ggcggaaggggaggagccgggagggcggggccgctgccaggagcctggagcgctgcgttccgcgcaggacgccggtgaggcccgcagagacttgcgtccgggcgggaggcggggcccaggat

SEQ ID NO: 79180 - DNA, 122 bp, Homo sapiens
gccgggcggacacatctgctgagctgatgtgtgcagaagcaatcctggacatctccaagacgatcctgccggcccctgtagagggcagtgacgggtccctgtccgcaagcccactcttctac

SEQ ID NO: 79181 - DNA, 122 bp, Homo sapiens
gcccacagccaggcagccaggcagagctccagagaggaggccgggcccacactggatgtccgctcccttcaggatctccaatgtgcgctccgggaccaagcccctactgtgtgcccccagga

SEQ ID NO: 79182 - DNA, 122 bp, Homo sapiens
cactcccctcttgctgcgtgttgatttggaggcactgcagtccaggccgagtcctcagtgcggggagcaggctgctgctgctgactctgtgcagctgcgcacctgtgtcccccacctccacc

SEQ ID NO: 79183 - DNA, 122 bp, Homo sapiens
tagctgtgattacaagtgtgcgccaccaccccaggcaatttttttttctttgagaagtctcgctcttgtccgccaggctggagtgcgacgatgtgatctcggttcactgcaacctccgcctc

SEQ ID NO: 79184 - DNA, 122 bp, Homo sapiens
aggaggccaaacccccgaaggccggcgcgggcccgggagtgggggccattaattactctgcgccaggcctaaagcctccaacccccagcagcagttggcgtggatgtcctgcggattttatt

SEQ ID NO: 79185 - DNA, 122 bp, Homo sapiens
tttggggatagctgtgggaagtcagggctgagaaaggagaaacactcagctccccacacacgtttgtcccaggaaacaatagccctccgtccccgcccacctggcctgtggggatccactca

SEQ ID NO: 79186 - DNA, 122 bp, Homo sapiens
cccggccggagctgcgggggccgagggacgccgcgcccgccgccgccagccgggctcgcgcgggagagcagggaagagaaactttgccttttattgtttttagtccttaagtgcaaggaact

SEQ ID NO: 79187 - DNA, 122 bp, Homo sapiens
atctgcccgcctcggtctcccaaagtgctgggattacaggtgtgaactcctgcgcccggccgcgcctgcgtttttagaagatgccccaagtaaatcatgtgcacagtgaagtttgagaaaca

SEQ ID NO: 79188 - DNA, 122 bp, Homo sapiens
ggggacggggaacgcggcgagggcgctgcgacctctgcccacctggcccggccgcagtctcggagttcctgttcctcacaggagctaattatttatgacagctgcatggttcccctccccca

SEQ ID NO: 79189 - DNA, 122 bp, Homo sapiens
tttcctgcacttctcaataagttacttgcattggaatcattgtctcagggtctgcttttacggaaacccaaattaaaatatttctccacaagagggtacatttcataagggcagggtctttg

SEQ ID NO: 79190 - DNA, 122 bp, Homo sapiens
cactagccccgcactcccgtctcccaggagacagatccggaccaccgtggtggtgtctgacgcctggtggcaggcggggtggcttcagctggggaggtcagggggcagaggggatcctaagt

SEQ ID NO: 79191 - DNA, 122 bp, Homo sapiens
tccttcatggtgcctccagggagccttcctggtcccaggacctctggtggagggccatggcgtggaccttcacccttctggactgtgtggccatgctggtcatcggcttgcccaggctccag

SEQ ID NO: 79192 - DNA, 122 bp, Homo sapiens
cgcctgcggtcctgggttgggatgtgcgcagcaggcgagtcgggagcaccatcccctgagcgcaacctggtgggccccctggggccgcccctttggcgcccgctagtgcgggaggggctatg

SEQ ID NO: 79193 - DNA, 122 bp, Homo sapiens
gagggtccgtgtagctgttcctggagtccccagggacctccgagaaagtcggggctgcagcggggttggggcttgggggaccctccaggtggagagaatctaggggtatcccctagtctctg

SEQ ID NO: 79194 - DNA, 122 bp, Homo sapiens
ccgctgcgctccgcgacccctccgtgtgcccgcggccggcgggaccccaggccctgggcgcgctcggcccaggcgggcggcacagacgcatgccaatctcaggcctccccgccgtgacagcc

SEQ ID NO: 79195 - DNA, 122 bp, Homo sapiens
gtggactgcggaaacccggactgagcgctgccgcggagaaaagggaggggagaaaagggtcgagaataatgcgtccactgtccctcccaggcccagaacccagagggaggctgcagtctggt

SEQ ID NO: 79196 - DNA, 122 bp, Homo sapiens
gccctttttcctacatctgcacagaaactggcactagcaggactgcaaccgaggcagactcgagaattagcagactctggctcaggcaggacaatagagcagcgggaaatttctttcaaggg

SEQ ID NO: 79197 - DNA, 122 bp, Homo sapiens
attttctgttccttttaatgagctggaagctcctcctagctcatgccaggttttcttttccgggctcccacagctcagcctgagtggctaaaagtgatctcggacacagaggctgacattgg

SEQ ID NO: 79198 - DNA, 122 bp, Homo sapiens
agagaggtctaaaccctggggtggatagcaggttggccagggatctgatgcctccccacccgaggcctgggaaacctgagggtaggcagatgtcctgaagatccaggaataccccaggacct

SEQ ID NO: 79199 - DNA, 122 bp, Homo sapiens
ggcaggcacgtgtttgtgctatgggtacttgtgtgggtgcaggtgggacatgtcagggcccgtggtcctctggggacctgtgcctctccacatgtcgggctcctgcctgcatcagtggtgtc

SEQ ID NO: 79200 - DNA, 122 bp, Homo sapiens
tttctgcacagtatcagcagagcctctactctgtcactggcaggatcctagctgtgcaggcgtttgtcagcctaaatctaaatcaagattctgggctgggaattaggatatagctccccatt

SEQ ID NO: 79201 - DNA, 122 bp, Homo sapiens
catgtcgtgcaggaagacatggatggttgatccctgggtttgggggaccgaagcggatgtcgtgaggttacttctgtggacttgggccgaacagcactgtctaagcaggacatgaaaagaag

SEQ ID NO: 79202 - DNA, 122 bp, Homo sapiens
caagaaagtcaagaaacagagagtaatagactcatggaactgatgatctaatggatacctcggataagagaggcctctaggttgctgaccttggcaattgagtgaatgacagtgacctcaga

SEQ ID NO: 79203 - DNA, 122 bp, Homo sapiens
gccctgaggagggaccacccttctgctgtggctctctgttctgagggctaaagctgtgggcgacagacgcagagcccggcgcgttgtcccggaagcagggccttcaggcacagagcccggcg

SEQ ID NO: 79204 - DNA, 122 bp, Homo sapiens
tctgccatgccccaggccatgctacggactccgccacaccccaggccacgttactgcagacgccaccacaccaggccacgctgccttttccagccacagtcccagttaagcccaccctgagt

SEQ ID NO: 79205 - DNA, 122 bp, Homo sapiens
cagggcaaggaagacctagaaagctagaggctgcagcacagggaaataacaagtctctagcgcaaatgtcatggagctccaaagcatgaccttgggcatgcctgtgagaagccaggctgatt

SEQ ID NO: 79206 - DNA, 122 bp, Homo sapiens
tctctgcagaggctcggggtggtctgggggcccctccgctgcagtctgcccgatccctgccgggccccgccccctgcctcaagcacttcccgctcgacctgcgcacgtctatggatggcaaa

SEQ ID NO: 79207 - DNA, 122 bp, Homo sapiens
gctgcaggccaggggctgggggctcacctgtcagagagctctcattcaccatgcactcgccggccaccagggcggcatcacagggcatcagcccaccctcctggggcagcaccaggcagtct

SEQ ID NO: 79208 - DNA, 122 bp, Homo sapiens
tggacagcgcatgctcacctgcaaggtgtcgtaagactcagagctctgggagccgggcaccggctatggctctgtgtggggctgtgtactacgaaggggtcacctctcaccaggagctgctt

SEQ ID NO: 79209 - DNA, 122 bp, Homo sapiens
gtattcatatattgcatttctgtattttttgtttgtattgtaaaaaattcacataataaacgatgttgtgatgtaatattgtgtgaggtcttaaatatcctacagtcgatgtacaagagtag

SEQ ID NO: 79210 - DNA, 122 bp, Homo sapiens
ccgtgtcttgctttaagctgcgtgtcctcgtgtttccgctgcccctgttcttgggcactgcgttgtgttctgtctgggatccccgtgcaaggcccctgggtctggtggctgctgcccggcct

SEQ ID NO: 79211 - DNA, 122 bp, Homo sapiens
taacacatgagtgagctttactcatgtgggccctttattaacaataagccgcctctgtggcggctgggccccgcggggtcggggggtgggggtgcccaacgtggcagggaggcctgcaaggg

SEQ ID NO: 79212 - DNA, 122 bp, Homo sapiens
tgctcaggtccgcggcattgagcttgctcaggacaatgacctcctggctgaagccctcatcgtccagggccgggtagatgagccataggccattctcgtccacagcaaagtccacgtctgag

SEQ ID NO: 79213 - DNA, 122 bp, Homo sapiens
attatatattggctacgattaatcaagatttaattgtataccagctgccgaaatgtttcccgtacaataaaaatcctcaatatgaaataaaggtttcatattactagtcgagttctttacta

SEQ ID NO: 79214 - DNA, 122 bp, Homo sapiens
ggggagtgggagggaggaagatggcccatcagtgcctgagcaagcacacaagctggacctcgtgggagggacaacccaggagacaatgagcaaatgtggactaagcgtgccaacgcaggcct

SEQ ID NO: 79215 - DNA, 122 bp, Homo sapiens
gggtttatttacatattgtttctccctggcattaatcagagtattgtttgaattttccaacggtatttcagttacactctgttgattcaaaagaaggttgtttgtccaagcttgtccaagtc

SEQ ID NO: 79216 - DNA, 122 bp, Homo sapiens
ccggcgggggcgagcggcgccagggtggctctgggcggcggagtgccagtgtggtggcgccgtgctccactgccgggggcccgggcaggttgggcggagcacggacacccacccatcctgga

SEQ ID NO: 79217 - DNA, 122 bp, Homo sapiens
aaggtgacctgggttttcctgggcccacctggagccgtaaggatgaagaggccaagggagcggggaggtgctcacaggggctcgccaccaagtcagcttctagccctctcccagcggtgctt

SEQ ID NO: 79218 - DNA, 122 bp, Homo sapiens
tctgctggcgggcgggatgggggcgctgagcctcggggacggcgcgagcgggggcccgggcgcctagacaatagttgatgcccaaggacggggccacctccgccttcccctcctccgggagc

SEQ ID NO: 79219 - DNA, 122 bp, Homo sapiens
tttaaaattaaaattcttcaggatcaaatttcaacatcaatgtttgcctgaagtttgctccggaatttgttttattaaagttattgttagccagacgtggtggctcacacctgtaatcccag

SEQ ID NO: 79220 - DNA, 122 bp, Homo sapiens
gggaaaatgggcaacggtgattgggaccgaaggggagtctctccgtcactgttgctgggacgcgtgcctgtgctggtgtcttagagcaagagcctccctgagctttcggagtggaaggtaag

SEQ ID NO: 79221 - DNA, 122 bp, Homo sapiens
gccagtagtgagataagtatatgacacagagaatctacaatgcttttcctataagagagacgtcaggctctgcttatttgccaacctttgtgtgttttcttatttatattcacatgcagtat

SEQ ID NO: 79222 - DNA, 122 bp, Homo sapiens
gctgagagtcaaatgagttgatgcgtgtgaagtgcttagaacagtgcccagcacgcagaacgtaagccactgttcattttcattatcgtcatcatcgtcattcactgtaaaatgaaggaggt

SEQ ID NO: 79223 - DNA, 122 bp, Homo sapiens
gggagataccacattcggccacaagagggcgcgtcacattttctccaagagaagctgggccgctgatgaaggacgggctccgggcctcccagagacacttcacctcctgggatcttgctcta

SEQ ID NO: 79224 - DNA, 122 bp, Homo sapiens
agctggccttggggtgatgccatccaggaaggcatgccagatcagatgcccaggtgggttcggaggcctcctctgtactttctcatgatcatcacaaatggatgtcactgtgttgtgagtgg

SEQ ID NO: 79225 - DNA, 122 bp, Homo sapiens
cataacctcctttcagggcttcccatggtcctaaggacaaagtccctgatcccagctatgcgggaggctgagacagaagaattgattgaacccgggaggtggaggttgcagcgagccaagat

SEQ ID NO: 79226 - DNA, 122 bp, Homo sapiens
ctccttggcatggaaaaggagaatgatgccaaggggagcagcaggggcatctgagtcacacgtggccccaggtcctgaggcaggcacaggcattaaaaaaggaggaaggaacctgcatacag

SEQ ID NO: 79227 - DNA, 122 bp, Homo sapiens
tggccggatggggctaccctccccgccgcggccgctgctgatgtcagcctcgctcgcgctcgctcctcccgcacccacctcccggccccaggcacactgcatcggcgcggacgctccggccc

SEQ ID NO: 79228 - DNA, 122 bp, Homo sapiens
gctcaccacaccgcgccgtaggcgcccgagcccacgggctgcaggtcccggtacacggcgcgcacctcccaggccgtcttggtcacctcctggcggtaaaagccactgcgggcgggcggcgg

SEQ ID NO: 79229 - DNA, 122 bp, Homo sapiens
gatcaggcagtccatgttcttaaccactgttctatatggcttctctgcctttatttgcatcgaaaatttccaaagggtgacccaagaagctgttgatggtggttacctctggggagaggaat

SEQ ID NO: 79230 - DNA, 122 bp, Homo sapiens
ggctcaagcagccctcctgcctcagactcccaagtagctgggattactggggtgagccaccgtgcctggcctagagcatactttttaaatgaacatttatgctttgatacagttctcgttta

SEQ ID NO: 79231 - DNA, 122 bp, Homo sapiens
ccttggcttaggtgaggtcttagttacggctctgtgtcctcccaccattacgttctcatgcgatttatgacacgcctctcccctgaattctgatctttatatgttatcactgcgtcctctga

SEQ ID NO: 79232 - DNA, 122 bp, Homo sapiens
gcggggagagggcgggagagctcgttcgaggctccctggtggaaggctggtgccactgcgcgagtgagtaatcgcagccaggcaccggggaaaggggaacgcagagggcctcccagtggctg

SEQ ID NO: 79233 - DNA, 122 bp, Homo sapiens
ctgcgggtgctgaggaggggtccgcgtcctggtgctcaggccgcctcctgtggggtctcccgcgattccctctttgcctctcgcccctccttccccaccccctccagtcccttgtccaaagc

SEQ ID NO: 79234 - DNA, 122 bp, Homo sapiens
tctcgtttctgtcattcttgtatggtcttgggtaacgtaattcacctcagtttagtcttccgtacaaccagaataacaacacctacgtgatagtatcgatcgcggattaaagatcatccgtt

SEQ ID NO: 79235 - DNA, 122 bp, Homo sapiens
ctgccctccctggaccagaggtgagctgcccgaggaccagagctgggctgtcttcatctccgtatctttaaggccaggtgcagggctggaaacacagtaggtgctcaatagatgcttgctaa

SEQ ID NO: 79236 - DNA, 122 bp, Homo sapiens
gaagagattggaggtccagagatgctgaggagtgagaagttctccatattctgaccactgcgggggtacagagatcacacgcctgctctggagaggctggctggtttgtccagaggataaac

SEQ ID NO: 79237 - DNA, 122 bp, Homo sapiens
aggtccacggcattgccgtgcgagaagaggaccgtgtacctgggacaggccgagaagggccgttcacatcctcgctcccagcgcccagctgcagggcaggaggatgcgtagtgacagcccac

SEQ ID NO: 79238 - DNA, 122 bp, Homo sapiens
cagctcagacccacccgcaccaagcaacgctccgcgcgactccacgcactccgggaggggcggccagcccagatctctctcgtcccggagggagctccccgtacctgcagagccgcatgccg

SEQ ID NO: 79239 - DNA, 122 bp, Homo sapiens
aggaacagggcaggttcctgcgggcaggtcctgagtcacactgacagagaaccacggagacgccaggactccccgcagcagagaaacgggccgacacccagggaggcgcgagaataactgag

SEQ ID NO: 79240 - DNA, 122 bp, Homo sapiens
aacaaaaatctcactcactgattagtaacctttttcagttacaaagaaaaacaacatactcgctaaactccctaacatcaggagccatcaggcaaattatctcaagtcttgatttacaaacc

SEQ ID NO: 79241 - DNA, 122 bp, Homo sapiens
ggctggagcgcgggcgcaggcggcaggcggtggggtagttacggcctgggagaccgcaggcggcggcgctgaaagtgacactcggcggcggcggcagcaacaaaaagggtggggggggggcc

SEQ ID NO: 79242 - DNA, 122 bp, Homo sapiens
gttgtaaacgcaaaaatagacaatcagcaaggcgagtaagtaggtccggtggccgggctgcgctctcttccactcagcagcgtcccccaccactgtcgcggtcgcctcgagtgctgccgtgg

SEQ ID NO: 79243 - DNA, 122 bp, Homo sapiens
cgaaggagcggtctgagaatccggcttgagtgttaaaggctaagcgtgtctagctggacccgtggccccgaagaagcgagacaaggcgacgcggagctgtccctgacaccccgaggaccgag

SEQ ID NO: 79244 - DNA, 122 bp, Homo sapiens
aaagggaacttcagcgatacggaaatctcccaaggtgggacgcccgtgcggtggaggcaacgtcactccatcgagccttgctctctggccccgccacctgtacgagtgctgcagacggtgcc

SEQ ID NO: 79245 - DNA, 122 bp, Homo sapiens
gtcatcaggactgtgcttgatgcgccacctctcaccacctctgatcttcaggtgccagggcgctggatacacgttggcctgagcaagtgagggaaagactagtcctgaaatatcctgggggg

SEQ ID NO: 79246 - DNA, 122 bp, Homo sapiens
ataaagcaggaaggccgaaggccccgttttcgcccaaaaacaatgctccacgtaaatttgcgggaacaaaagccaccagaaatccagcccgggttttccgcctctctgctctccgcggacca

SEQ ID NO: 79247 - DNA, 122 bp, Homo sapiens
gaatggggtggaagggtgatggggagctaatgaactagggagaaaaactttccatgtgtgcggtatcgtctttcagaatgtctcctggcatcctaaccatgtaatatgacaattgggggtgg

SEQ ID NO: 79248 - DNA, 122 bp, Homo sapiens
tccgggcctgggtctgagagtcgctggggcctgcgccgtttctgtggcaaccaaagcgtacgttcccttcttccctccgcccctctccctcgcctccttttctttggaggcaggccgggctt

SEQ ID NO: 79249 - DNA, 122 bp, Homo sapiens
cctgcctcattgtgcccaggagttctccaaacccgcgctgcggagtgagtgaccaagttccggccagttcgacctcgaggatccagaggtggagacggtactacctcccagctctgttttcc

SEQ ID NO: 79250 - DNA, 122 bp, Homo sapiens
ctcttctgaaagtcctttggaggctaggactccagtgtcacaaatgactacaagtacctccggattcaatgatgagggttctagaacactgtatttgcagaggttaagtgcatgtacttagg

SEQ ID NO: 79251 - DNA, 122 bp, Homo sapiens
tcgtctgcacacagggcccaccccagctcgtctgggcagggtcacctgcactcagtgacacggaggccgtggctctcctgccatgctctgggccaagctccgcaggaaagggggcccactgc

SEQ ID NO: 79252 - DNA, 122 bp, Homo sapiens
gatctcctgagagcctagccccaaacttctatagagacttaacttctgcttttctggacacgcgtgggcacccagaaccccgaatggggaggaatgctgtagacgccctgctgccctccagc

SEQ ID NO: 79253 - DNA, 122 bp, Homo sapiens
atgtgctgggagaacttgacctcaggtgaggctctagggagagccccaaaggggtgctggcgaagtgaaccctaaatggatgctatagtaagaggagggaggagcacctgggaagaaagagc

SEQ ID NO: 79254 - DNA, 122 bp, Homo sapiens
gccgcgggatcccaccgccacagacacgagggcggtcccgcggcgccccgcctgggacgccggaaggccctcggcacccaccaagacctgcctcacgagcccctggtcccgccaccggggcc

SEQ ID NO: 79255 - DNA, 122 bp, Homo sapiens
acatccgaacaatgagcgaggtaggagctggggagagtggcgcggggtcaccgccagatgcggggtgtggcaacctccaggcggccaaagtctctgacttccaggttcttctgtttgcttac

SEQ ID NO: 79256 - DNA, 122 bp, Homo sapiens
tccctcccgacccccgtggtggcgaggccacgccatgtgaaggttagggccgggacatcccgaggagccgcggtgaaagatgggggatgctgcagaccccagggagatgagaaagacgttca

SEQ ID NO: 79257 - DNA, 122 bp, Homo sapiens
gtccctgccccagtggcgggggtggcgggcggggagggggcaggcgcggcacagcggcggcgtggccctgagtggccaggcctgtctgtcggtctaggcccagcacctgcagggcccatccg

SEQ ID NO: 79258 - DNA, 122 bp, Homo sapiens
ccacggccagcgcctggcgacggcgccggggatcgccgagcggggctgggggcgggggcgcgggaggagcggcttaccgtaaagtctcatgcaaaggcgcagagacccaggggcaggagccc

SEQ ID NO: 79259 - DNA, 122 bp, Homo sapiens
acagtttctactgaatgcttattgctttcccacgatgataaggttgaaacattgtaccatcgcaggtcagacagtctgtacctgcttttacttctagccttgtacattgttctcaagataac

SEQ ID NO: 79260 - DNA, 122 bp, Homo sapiens
aggcaacaaaacataccctgctctgagaacagacttgtctttattaaacaggtaaatgtccgtgggtagaaaaaaaaataaaagaatcgaagaactggttgttaaggaaggtcacagaagac

SEQ ID NO: 79261 - DNA, 122 bp, Homo sapiens
gttgttatctgagtgttctctgtgttggttgctggggagaaaaagaaacaagttggtagtcgctcttctccgtggtagatatgcttgatttgggaacgagtactgaatatagttgaaaagag

SEQ ID NO: 79262 - DNA, 122 bp, Homo sapiens
aaaaaaagaagcaacactcatgtcaaggcttaaatagtatttacccgtgcagaccaggcacgattctaagtactttatgcacaaccttatgaattaagtactattgttatcccattttatac

SEQ ID NO: 79263 - DNA, 122 bp, Homo sapiens
ggttgatgggaggattgagttaatatttataaagcatttcagacagtgccagagatataccgtgtgttaaataagtatttcttacacacacacacacacacacagacacacacacacacaca

SEQ ID NO: 79264 - DNA, 122 bp, Homo sapiens
catatgtgctccgataagagctcttaatctgactccatttttagatttcttcatgatctacgtggttaacaaaattacctcaataacatttggtgcaaatgaaaatctaagacctctcctaa

SEQ ID NO: 79265 - DNA, 122 bp, Homo sapiens
aagctttgggatacagagtgaccgtgtcatagccctctgggggctttgtgcgggctcttgcgtgggtttcgcagtacagctccccttctatgaagaagtagcccttttgcttgaggttgagg

SEQ ID NO: 79266 - DNA, 122 bp, Homo sapiens
gtcccccccaggggaggactaccaacgaaggggacccgggagatggcgggtgggggcccccgggaggacagtgggcgagggagggggtccttgccaggcctggggcggccgggggcggtcct

SEQ ID NO: 79267 - DNA, 122 bp, Homo sapiens
cccgccccgcccccacccgctctccgcccccgccccgcccccgccccgagcccgcgccagcgccggcgggacccgagctgctaatggtcggtaccaacctcgccagcctaggcgggggcgcg

SEQ ID NO: 79268 - DNA, 122 bp, Homo sapiens
tgccttgcccagatccctgggccgtcgtgggacttgggccttctgtgcgctgcggggagccgtgcagggctgcggcgtgggatgctggactcgccctgggtgtcgggggaaggagatggggg

SEQ ID NO: 79269 - DNA, 122 bp, Homo sapiens
tctcctacacacatccgcttgaaaagcaccctttgtgaagcatgtgtgcgggtttcagatcgtttttcctgggtttcctggaggccttggaccgtgttcctgccctggcaggtgccttttct

SEQ ID NO: 79270 - DNA, 122 bp, Homo sapiens
ctctccgggctcgctgcgagccacagtgtctcagccaggggcagggccggggaactcctgcgaaaaaccacgggccggaggagcagcagccgcgcgggcccaggtacccccgccccagacgg

SEQ ID NO: 79271 - DNA, 122 bp, Homo sapiens
ttcctgtccaaggaacccttagagaccattcccaggaggagcgaatgtccacctgtgtggcgtcctcctggggcgctccttctaggggggaccccagtccctcctgcccttccacccagaat

SEQ ID NO: 79272 - DNA, 122 bp, Homo sapiens
acttaggaagtaaaaggaagggctgatgattgctgtgttttctttgcagtgctctggcctcggccacttgttgaggctaatttatgctgccagagggagctggcatgtgtggacctggggtg

SEQ ID NO: 79273 - DNA, 122 bp, Homo sapiens
cgtcctctgggatttgaaggccgcccccgtcaaagttggcattcgggggcctgcgtgttccggagctacggagcggcaactgaggcaggagctcaggactggggggagaaagagagaccctg

SEQ ID NO: 79274 - DNA, 122 bp, Homo sapiens
gcgaatttggggaaggctgtatcagtctgagattcctaactggaggaggcattcgtggagcgcctcgtgtgtgcctggtggaactggattctgggcgtccctcggtgaactggccaggccag

SEQ ID NO: 79275 - DNA, 122 bp, Homo sapiens
tttattctgagattggctggttggggtatggataacaatcgaaggctctgttaccgcaggcgtgtttctgagtcctgctcccgccccatgcccgagggtgcccagactcaccagctcgggtc

SEQ ID NO: 79276 - DNA, 122 bp, Homo sapiens
tcctcccccgcaaggccgcccaccggggtacgctctcccgcgcctgcgccaattccgccccgccccgcccccatctaccgaccggatgttagcagatttcccatagtgcctcgctagtggcg

SEQ ID NO: 79277 - DNA, 122 bp, Homo sapiens
atggatggatgataggatcaccacggtggtaacctctcacattgtcttctccacaggaggcgtctgacacagtatgatgatgaagatcccatggggcagcatcccagtactgatgttgctcc

SEQ ID NO: 79278 - DNA, 122 bp, Homo sapiens
acctgactggggcccagccttcccagcccacgtccccacaccggccgctccatgtgaaaccggtcatgtgagcctgtttacagcagagcagctggtgcaaccatcaagatccgtgcagaggt

SEQ ID NO: 79279 - DNA, 122 bp, Homo sapiens
ccccagcagtcgagccctaagacgctaaccaggaggtgtggagagccatggaggcaggtccgggcgactcaccggctgcgatcctggccgccttggcgtagttcccattctcgatgcaggag

SEQ ID NO: 79280 - DNA, 122 bp, Homo sapiens
ggagggggcggggggatgcgccgcggcggcggcggcgcgggagctggggttggtgtttggcggcgccagagcagcggatcccggtctcgccgcagcagcagcgcgggtgtcgtgcaccgcct

SEQ ID NO: 79281 - DNA, 122 bp, Homo sapiens
gagaaagttgagtttaaacttttaaaagttgagtcacggctggttgcgcagcaaaagccccgcagtgtggagaaagcctaaacgtggtttgggtggtgcgggggttgggcgggggtgacttt

SEQ ID NO: 79282 - DNA, 122 bp, Homo sapiens
cctcactgtcctaggaggtcccacagaaaacaaagtgggcgatggcaggtgcttgctcctcgctgtcccccaactcggcaaaaagacccaaggcccgcaggacaccccccgcccccgcccag

SEQ ID NO: 79283 - DNA, 122 bp, Homo sapiens
cggcagtcctggcaaacctagaaggcgggaataaccctggtgacgggcggggccgggctccggcgctaactgcatccactaggtttggtcaacacagagccgcgccaactctctgaggctgc

SEQ ID NO: 79284 - DNA, 122 bp, Homo sapiens
gcagatacgtgagaagttgcgagtgcccacctgggcgccctctcttccaggttgctaatacgagggccggtgctgtcctccaggctgggaagtgggagcgcggtgtcagttactatgggaac

SEQ ID NO: 79285 - DNA, 122 bp, Homo sapiens
tggcctgtgccggcctctccagcctcatgggtccccagcacggctcctccaccccacacacgagaactccaggctccactcacaccagggaatacgcgaggtggcgagtcacagggttgctg

SEQ ID NO: 79286 - DNA, 122 bp, Homo sapiens
gagggaactaagctgggcagggtcaccgtccccttctgcagaggaggaagctgaggcccacgaggtaaacagtgggctgggagtgggcctggtagaccccaatcccagcccatggagaccaa

SEQ ID NO: 79287 - DNA, 122 bp, Homo sapiens
agctataaaaatcaggtgtaaatatcccttatattagtggtttctgactgaggaaaaatccgtggttagaccccattcctaaatgctaagataatgctaagaagatcagaaagggaaataat

SEQ ID NO: 79288 - DNA, 122 bp, Homo sapiens
tgcaaaaagaacaatggaaaagccaccggatgagtgtgattcagccaagcctgacctccccggagcctgtgtctcaggcttggaggtccccagggagcacgaacatgaactctggggagctg

SEQ ID NO: 79289 - DNA, 122 bp, Homo sapiens
cagctccttgggagatgcaggtgggaaggccgtcgccaccgtggggaatcagatgtgccccgtgcttgttccccagaggtgcaagccctgacctccgccctgcacaggcctcctgccaccct

SEQ ID NO: 79290 - DNA, 122 bp, Homo sapiens
tccgaggaaccgaagacacacagcagggcagcccggctcccccagattgcctcccgtccccggcaggccccacacaccgagcaaacagcgctgggcacagtggcacaggggggaggccggcc

SEQ ID NO: 79291 - DNA, 122 bp, Homo sapiens
cggagtcctgggagctgggagctgagtggagcgagcgcggctctgctcctgggcgcgggccggctccgggtgtccgcgcacttaactccgggggcggggcaggcgcagacccgcgcgcccgc

SEQ ID NO: 79292 - DNA, 122 bp, Homo sapiens
tcccgcccctcactgccccgccgaagcccggtgacccgaggccttgccccattctccaagcgagattggatggtttgtccaatacaaaaggaaagaaagtagttttccaaggttatggaata

SEQ ID NO: 79293 - DNA, 122 bp, Homo sapiens
gagcccatgaaatggactaaaacctgcatcagtctcatgttatctccaagcttctaacttcgatggtggagtaacatgcatgagaaggtcaggtgttttctgaaagagctaaacacacaact

SEQ ID NO: 79294 - DNA, 122 bp, Homo sapiens
tggagccgccgcctccccgctcccggcctcagctgtcgttgtccacaggaagggcggccccgcccagccgtggcgtccgaacgcagccgaggcaaccgaagtagcagggactggctgctagg

SEQ ID NO: 79295 - DNA, 122 bp, Homo sapiens
agttcctattcaacataggtaccctaagaacatggcaacaactcggtgccccccaaagcacgtctcccctgtcctttccttcctttgcttacctctttggggagcatctctctcagtgtcag

SEQ ID NO: 79296 - DNA, 122 bp, Homo sapiens
acttttcaatgtagaagctatctaagagttaatcaagttgccccgccccccccccctccccgagtcataacaagctgctgccgatttactgggctgtataaattgtaggaaaagtgagggac

SEQ ID NO: 79297 - DNA, 122 bp, Homo sapiens
cttcagggctgtccctgacagcggggtctgtgcttgccgctgtctgtgcgtgtggctgggcgtgcggggtgggggcgggtgaggcaggaacgagaggaggagatggggctccccttgtgcag

SEQ ID NO: 79298 - DNA, 122 bp, Homo sapiens
actcagggcacaaacatttggcctctaacccaggcaactaagaggggaaggagctttctacgtcactgttctgtggaactagaaggcctttgccttaaaaagtctgttcttatctgtcagta

SEQ ID NO: 79299 - DNA, 122 bp, Homo sapiens
taaaggtggttcttgcggagtgttgcaaaaagcttccaaggatttatccttgtgttaacacggtaggtcttaagtgagaaacagcatatagagtttagtggaaagaagatgaaatgggagtc

SEQ ID NO: 79300 - DNA, 122 bp, Homo sapiens
ctaggttcatctaggccagcagggaaggtgccacttggaagattgctgggtttcctgcttcgaagtcttcaggagcgggctgagctgcgctggtgtgccgcttaggactgcaatgaggaggg

SEQ ID NO: 79301 - DNA, 122 bp, Homo sapiens
tccctaatgatcactcagccaccctgagcagtgagtctcattcttttcagtaaatcctctcgctgcgtggtgagaaaactgatgcctggagtctgtgacctgcctaggaccacagaactcgg

SEQ ID NO: 79302 - DNA, 122 bp, Homo sapiens
tgcctggtctgaagttccgcgccccacagtggcccgcgggcctcggcggctcctgccctacgccctccaaggcaccaggcaggtggccccagggcctttgcccacgacaccccctgggtggg

SEQ ID NO: 79303 - DNA, 122 bp, Homo sapiens
attcgtagaggcacttgcatcccaggacagatttgagagtgagatctagtctccacagcacgtttgctacttggtgccatcaaggatgtgtactacagcctttttatttataaaaagtaatg

SEQ ID NO: 79304 - DNA, 122 bp, Homo sapiens
ggtagggcgcggcggggctcacaggaacattcctgttgtcctccccatggagattgtgctcgtcgtgcacggcttcccatccgccgcggccgcccttcgggtaaagaagaagaccgggcggc

SEQ ID NO: 79305 - DNA, 122 bp, Homo sapiens
cccagctgaaaactttaaccaggaacctctggctctcaagttgtagggctcccaagcctacgctgcctcaaccccaaccccaacagattctgtacaacttctgacgactgtgaaatggaccc

SEQ ID NO: 79306 - DNA, 122 bp, Homo sapiens
ctccactagttttgctgtctaggtaaatcccctttgggggataaatttatttaatcctcacggtaaccatgcaagacaatttgtgggcgatggataagatctaggggtccatagtgataaag

SEQ ID NO: 79307 - DNA, 122 bp, Homo sapiens
agttgcagccaatttcggcgatttcggcggtgacggggattctcagaggagccgcgtgcccgtgcgctcccgcctgtcggccccagagagcgcagccctgacacctcctcccggaagcccgc

SEQ ID NO: 79308 - DNA, 122 bp, Homo sapiens
agtcgcctctgaactagaatcttcctactgaaatgcagagcctatgatagaaatgggcaccggggaccatctatccaaaagccagcctaaccgatacactcagaagaatttttctccagtca

SEQ ID NO: 79309 - DNA, 122 bp, Homo sapiens
tttctcgtcagtacagccctgttgaatgttctcacggtggggaggtacgtgtttaaaatgcggggaaggtgcttttatttcacccctggtgaaactaggggagctaatttttttaaacatga

SEQ ID NO: 79310 - DNA, 122 bp, Homo sapiens
agttgaagtttgtgggaggagagatgaggcaccaggggcagaaaaaaaaaaaaagaggaccgcgtctcagagaagcggggcctaggtcccccacggatgaaagtgccttcccatcaggccct

SEQ ID NO: 79311 - DNA, 122 bp, Homo sapiens
tttttccccgtggcatgaacgtaacagtttattgactgataaatgaacagtcagcatgctcgggatgactgggcccagtactgggagctctaggtgaaatgtttcggaaggagtccgctcct

SEQ ID NO: 79312 - DNA, 122 bp, Homo sapiens
cttcgcggacgaggcacccggcagagcacgcctcaatccggcggtcaggtccaccgtcgacgcctcagtccggcggtcaggtccaccgtcaacaccagcggtcttgtccacatcaacgcctc

SEQ ID NO: 79313 - DNA, 122 bp, Homo sapiens
ctgaggtgatccgcccaccttggcctcccaaaatgctgggattacaggcatgagccacagcgcccggcctccgatcactttctgagccatggcagacccagccctggaatcaccggcttagt

SEQ ID NO: 79314 - DNA, 122 bp, Homo sapiens
tgttttatgccccgaggagtatcttgcccacccgtaaatgctgacagacagctgcgacttcggcccaggagacccggcggggactgggtccgaccagccctctctcgcgggcgcaggtccgg

SEQ ID NO: 79315 - DNA, 122 bp, Homo sapiens
agcacgcacttctcagatgtgtcccaaggtgcagtgtgtccgatgcccgttcacatccaccgacccgcaggtcttctacatggcatcagcctcctgggcactcgggacaagaggtaaaatgg

SEQ ID NO: 79316 - DNA, 122 bp, Homo sapiens
tcactgtgttaacttaccaaggggattggaagagatgccccaagatagaaagctgtgcctcgagactgaaatgtgcatttggagagcttgttaggctctgccagtggaatgtgggagaggac

SEQ ID NO: 79317 - DNA, 122 bp, Homo sapiens
ggcagggaacggcggggggaagctgggggagctgtcctgcgtctttgcgctgcgttttcgcggtagtggtggttccaggaccgtgatttgtccagacccataaagctgagctctgatgagcg

SEQ ID NO: 79318 - DNA, 122 bp, Homo sapiens
acgtcttgacatcgctgatcctcccgcaggcggtctcacgccctgcccgtcctgggttcacggtttttcatcacctgcggctgtcctgcgatcgaccacagctgtgcaggaggggcaggagg

SEQ ID NO: 79319 - DNA, 122 bp, Homo sapiens
gcgacgttatctctgcattgcccccatttaaccccatggggttaatcccggacaagtgagcgtttaactggcccagcagggcgactggcggtgtagtgcagtgtccgggcgtgaagcactgg

SEQ ID NO: 79320 - DNA, 122 bp, Homo sapiens
ctctcccagagccgagccccgagccccagcccccgtgcttggtgacgtcaggcagctggccgccgagtctacgcaaatgatttgcataatgaggaagcagccgccaatcagagtgggagttg

SEQ ID NO: 79321 - DNA, 122 bp, Homo sapiens
gcgcggggacggtgcccctggggtccgagggcgcacggagggagccgggtgctggaggctcggcctggccgctgttccctcccacccccgacgccgggtgctcccggctctggggaacagca

SEQ ID NO: 79322 - DNA, 122 bp, Homo sapiens
tcaccgataccgtcatccaaccttcctatttatttatacattaaaacactgcagccagagcggcgaggtgtcccgccaagaaacggccaaatccagtttcctccccagccagcctctcctta

SEQ ID NO: 79323 - DNA, 122 bp, Homo sapiens
aagggctgggagcgccgaatccaagggagaagtggagttggagtgtggccgagcagtaggcgtggttgccacaagccaggcctgggaagacggcccctagcgcccaccagcaccaggtggtg

SEQ ID NO: 79324 - DNA, 122 bp, Homo sapiens
tgctcctctcccgctgtcccacctgaaaaccctgcaggtcatgatacatggtcttaaaatcgtccctaccctccctgggtttaactcaaggctgccccagggcttcttagttttgccacctc

SEQ ID NO: 79325 - DNA, 122 bp, Homo sapiens
tttttgtttttgttttgttatgtgtaaaaacaaatgaacccttgggatattaggatatttcggagcaaggtgttgtcactgtttctcagacttggggaatttagaactcatagactttttaa

SEQ ID NO: 79326 - DNA, 122 bp, Homo sapiens
tctgggcgcgggcaaatgaccctcaggccgtctgggaccgggccagccctgcagcctcagcggtggactcagagacggctgccacgtgcacacggtgaactatagcagctgtggcagccccc

SEQ ID NO: 79327 - DNA, 122 bp, Homo sapiens
gcgggatgttggcgctggagccgttgcggtagatctcgttcatggtgcgctgcagggccacggcctgctgggtcaggcacttgaggtactcggagctttccttggtcttctcatggtcctcg

SEQ ID NO: 79328 - DNA, 122 bp, Homo sapiens
atcggaagaggccggaggggcggggcgggcagtggccctgggaaggcgggtccgcggcctcgctccctgacttccgggtcgcggtgcttgaagggagtgttccgtcgtttccgttgccggct

SEQ ID NO: 79329 - DNA, 122 bp, Homo sapiens
gccggggctgcacactctgcacgcatgtgtcaccggccaggctccgcacgcgcctctccccgccatggggagagcagcgatggctcagcagccccggggcccattcccacccttccggtagg

SEQ ID NO: 79330 - DNA, 122 bp, Homo sapiens
cttaacttgccccatactggactccttgtccacagccctccctgcatcctgcttccctctcgctgagcagcgacttcacattccagctgcccaggcctcactgagtcatcttttactccccg

SEQ ID NO: 79331 - DNA, 122 bp, Homo sapiens
agatcagcccttcccagggtctgcaggtgtcacatgatcacagttcagcgggaggctttccgtacccacactggctgtagccacttcagtccatctgccctccagaggaggggtttcttcct

SEQ ID NO: 79332 - DNA, 122 bp, Homo sapiens
tctcccagacatgcaccgttgaatctgctgttcacctggggagatgagaatgtcagtgagcgctggtgcatgtgctgacagtattgttaatggcgccgtttccacatctgcaggcagacttg

SEQ ID NO: 79333 - DNA, 122 bp, Homo sapiens
agttgggatgtagacatagagagatctgttacatctgagatgaaaaccctgcacaattcacgttagggttggccaattgtttgcttgaccttaaatggttagtgtggtttaagcttccccaa

SEQ ID NO: 79334 - DNA, 122 bp, Homo sapiens
tccagtgttttcagcctgcctttgcccctcacccacaccctagccatctccacttagtcacgcatttggctcccaacctgggtgggaccaaacctcacactgtaggttcatgactgtggtca

SEQ ID NO: 79335 - DNA, 122 bp, Homo sapiens
cgaacgccctcaacgcgcttgcgccgttttgataggcttctcgggccgaagtaatcggagcgctgcctctctggaaccgcccccgccacctcttcgccccgcccacgtattaccgcccctcc

SEQ ID NO: 79336 - DNA, 122 bp, Homo sapiens
tgagcttcctgcccctcctgcactgccccccaaaatcttctacattaagcaggaacccttcgagcctaaggaggagatatcaggaagcggaactcagcctggaggagcaaaggaggaaacca

SEQ ID NO: 79337 - DNA, 122 bp, Homo sapiens
tcggatggaaaaatactggtacaagcttgaccgagcttctctaacagacactgtgcatcacgcatcagctgctgctgttgctatggtgacagccacaatttctcccagacagcttgggtctg

SEQ ID NO: 79338 - DNA, 122 bp, Homo sapiens
tccaggacctttgcccatgggccacagcaggactggctgcagctgctcccaccacatccccggcagccaagtcgaggctccctctggcttctgagggctgctgcaagcactgcggtcactga

SEQ ID NO: 79339 - DNA, 122 bp, Homo sapiens
catctttctcagtttaaaaaacaacaacaatgaaaaactttcgctgcttaaccttgatggcgctatcccttccccacccaatggtttcctattgctactgtaacaaattatcttgtggttta

SEQ ID NO: 79340 - DNA, 122 bp, Homo sapiens
tgaggaagaagaaagcaatgaggacagacacgagcagtgtgaggtcagatgtaggaaaggcggcccaaagcctgaggccaagccaaggaacccaggcaccagggacccagaggggctgggct

SEQ ID NO: 79341 - DNA, 122 bp, Homo sapiens
acgggcacgcgctcaccgagttgtccgtgagtccctgcaggatgacgggcctgacgaaggcgtacctggaaagaagggcagagtcgcggccaggccggaccgccagcctcgccgccccagcc

SEQ ID NO: 79342 - DNA, 122 bp, Homo sapiens
aggccgggccgtggggtctccccgggctccacgcaggggcggtggggcggggcgcagtgacgcaaagaggagtgacgcgacgacgcagcgcgacgcggtgacgcacgcccctttgttggctc

SEQ ID NO: 79343 - DNA, 122 bp, Homo sapiens
tcatccccacatttggaatatacctgcaatcatacaggatgcagaatactgtttgctaagcgtggggctggttgctggagataacaagcaaggcctaccaggtccctgctgtcattctggct

SEQ ID NO: 79344 - DNA, 122 bp, Homo sapiens
aaatctgagaaggaagagaaaaacattgcacgcagggcgagacttatatctgggaagatgcgtcaggaacttgggagcacttgggattcagtcccctaaggtggttcatgtacaggctggtt

SEQ ID NO: 79345 - DNA, 122 bp, Homo sapiens
gtgccttcagagattccagaacttgcaacacttggagggaaggactttctgacgctgttccgctggagtggcctattcttgctagtgatggccgttccaggctccaggacacgtgtactccc

SEQ ID NO: 79346 - DNA, 122 bp, Homo sapiens
atagggcaatgacgtaacgatctaccaatagtcgccgtctaaaggtgggctctatagaggcgaccggcaagctggaacaccaacctggaaagagagtgagccacaaggaccaattggaagcc

SEQ ID NO: 79347 - DNA, 122 bp, Homo sapiens
caaccaaatgccaatccactccgcttcatcatttccaagtccacccttcaaagtagacttcgcctattcccaaggatgcagttccatctctccttctcctccttgtcctctgctcctgttaa

SEQ ID NO: 79348 - DNA, 122 bp, Homo sapiens
ggctggtgtcacgaccgactgttgaatgggagcaaagtgccaggacagcggagggcggagcgcgcgccaggcatcccggggctcccccagctggcgctccggtggtccgaggttaatgtagt

SEQ ID NO: 79349 - DNA, 122 bp, Homo sapiens
tctgcaaggggcttccctcgtcggaaagtctcccatccacatcccttcatgtgccatgttcgcatcatgagcaatgttgtaatgaacagccacgcacttcattctttgcacatctcaaagaa

SEQ ID NO: 79350 - DNA, 122 bp, Homo sapiens
ccggggcctgccccggccggggtcaccagtacctgccagcaaaacggggagagttagcggcgctcccacctaggcatgcacgcctagaggcccgggacctgctcctgtcctaaggggcggct

SEQ ID NO: 79351 - DNA, 122 bp, Homo sapiens
ctctctgtctttgtgtctctctatctctctttgtctctcttgctctctttgtgttccccccgctgctgccctagccctgccaagctcagccaagggtcttagggatcacaggtgtgagcctc

SEQ ID NO: 79352 - DNA, 122 bp, Homo sapiens
tcctagcccctttcctagccccttgtcacttatatgaatttaggaaagttgcttaccttccgtgggcctaagtttcctgttctataaaataccagtgatgaagataatagcagtaggtttgc

SEQ ID NO: 79353 - DNA, 122 bp, Homo sapiens
gtaatgacaggcattggtggcagctcttcctcctctgtgtgaggtgctggaactgtgctgcggacacatctgtaggtcaggaatgtgatccaggggtccacttaccaagtcaccataaacct

SEQ ID NO: 79354 - DNA, 122 bp, Homo sapiens
gaggggctctgctttggcagctgtcggggctggagctcaggaccccaactccagccaagtcgggccgcggcggggcaggcgtaggctgcgcaggcaggggtggccgcgggtgctgagccagt

SEQ ID NO: 79355 - DNA, 122 bp, Homo sapiens
agcgatcctcccacctgggcctcccaaagtaatgggattacaggcgggagccactgtgcccgatcttaccctgtgaatccttcaacctgcctcaacttgagccaacagagctgctggcacct

SEQ ID NO: 79356 - DNA, 122 bp, Homo sapiens
accctgggattaatgcctctgctgtggttttacccttctaaactctgctggctaaaagaacgctagggcttctgttaactgttaacagcctgtttttttgttttttattttattttattttt

SEQ ID NO: 79357 - DNA, 122 bp, Homo sapiens
aagggccctgcgtggcgcttggcaagtatacagcaggcactaaatggctgccgacaggctcggtggtaattttgaaagttggctctgtgcagcgttggggctgcggcatctgctggtggcga

SEQ ID NO: 79358 - DNA, 122 bp, Homo sapiens
gccaggcatggtggcttacatgtgtaatcccagcactttacgagtccaaagcgggtggatcgcttgaggtcaggagttagaaaccatcctggccaacatggcaaaaccctttctctactaaa

SEQ ID NO: 79359 - DNA, 122 bp, Homo sapiens
ggcgtgcccggcgtgctgtgcgtctcctctggaaggactgggcgtgcccggcgtgctgtgcgtcccctccggaaggactgggcatgcagtctgtagagtccgtccacacgaagaagactccc

SEQ ID NO: 79360 - DNA, 122 bp, Homo sapiens
ggcgagatccagtccacagcttgcttcactcttagaacagcggcatcctctatttggtctcgcacggggaacttgctggggtaggggagaggtgttagagctttgaaaaagctttgcctctc

SEQ ID NO: 79361 - DNA, 122 bp, Homo sapiens
tttcccccccccgccccgcctccgcccccgcccccgccgcgccgcctctctcccgcgctccggaaggcctgcgtccccgctccccagccaggcgccaccacctgccgcccaggcagccaggc

SEQ ID NO: 79362 - DNA, 122 bp, Homo sapiens
tcatttggttagatttcatgctactaaagcaagttttctagtgtcagcagcttatttcctcgccttcagcagcctcctgtgacattgagattcatgcctcagcccacctgatctgtgtagtg

SEQ ID NO: 79363 - DNA, 122 bp, Homo sapiens
gaccaatgtttgagggtgtggtcaaatggatctgaaacttgttttcttcatacatggtagcgaggctctgagggaagtactaaccctcgccaatctctgatcatcggccaccagcaaagcta

SEQ ID NO: 79364 - DNA, 122 bp, Homo sapiens
cagctccggggagcgaagcgagccggcgggggcgcgaggaggagatgcgccggccccggccgccctgctgcactcacctcagcgctgtcggacgggctctccacagccatcttctgccacgg

SEQ ID NO: 79365 - DNA, 122 bp, Homo sapiens
tcggcggtgcctgaagaactggcggatctgaccacggagcctgaccgcctgagggactcacgcacgcactaggaaaccgccgccgggaacttctgagcttgcgtgctctatcagtacagggt

SEQ ID NO: 79366 - DNA, 122 bp, Homo sapiens
caattttaaacaggacattgccgggaattctcaaatggcatgcaaaattcagtatatccccggagtgcacggttaaaaataacatcagaacgcccctgcgcccaccacacagtttaagaaaa

SEQ ID NO: 79367 - DNA, 122 bp, Homo sapiens
ctgctaaaaggaaaattactgccctgagtagtccctggtcgtgttccaaaggagtcttgtcgcattatttaaatactgaattgcgatattattgaagttggtaccaagttgctcttggcaga

SEQ ID NO: 79368 - DNA, 122 bp, Homo sapiens
agctgactttgcaggcaggggccttgcccacgcagcctcggcagaggcccccgcacttcgcgaaccccagcaatggccccttccagacgccacgtccagctaccgcgcgctcacacctgcag

SEQ ID NO: 79369 - DNA, 122 bp, Homo sapiens
ggagcctcactcacttatttcacagatatttcctaagtgttatataccaggcactatcctcgggatgaataagagagacaaagtcctgggcctcatgaacctcacgatgagtgtgtgtatag

SEQ ID NO: 79370 - DNA, 122 bp, Homo sapiens
ggctcctgcccaacccagcgacctgctcctaaagcaatagcagcactcagagaggtgccccgctgtcctgcccccagttccacagcatggctcagacagagatttagcctaggggtagacgt

SEQ ID NO: 79371 - DNA, 122 bp, Homo sapiens
aggagccgggagcctggagtcgcagagaccactcaccgaggatcatgctggggacccaggcgcccggggttccgcgtcgctctgtcccgggggccgttctggccgggctgggggtacggggg

SEQ ID NO: 79372 - DNA, 122 bp, Homo sapiens
aagggaagggagcaggacttcttttctccgtctcttaataagccccattcccactttgttcgggtcgatatcgagaatgccttctcgccgggctctctggtgcaccccccggtgatttccgg

SEQ ID NO: 79373 - DNA, 122 bp, Homo sapiens
ccccaagatctcaaaaggaaatattgccgagttccgtttcccagagcatctatttcccctcgagtattgcagatgtaatcataaacacaagccagttacagccacaacttcatgctttagcg

SEQ ID NO: 79374 - DNA, 122 bp, Homo sapiens
gagcgggcaggagagacagggtagtgacccccactcacaccagaaaacccctccccccggcgattttgctgccaactcgagtcggctacagacagtccagtgagtccttaattacaaggacg

SEQ ID NO: 79375 - DNA, 122 bp, Homo sapiens
atatctggcatcagagttgggctgagcagggtgactcagagggtgggtcagcgcctggcccggtgcccacctagcccctttgctgtgctggtgcctttcttccccaaacagccccaagggcc

SEQ ID NO: 79376 - DNA, 122 bp, Homo sapiens
aatggaaatggggcccaccatatgtttcttaataattcagcacctgaaagtatccttttccggtccgttgaaaacttcagacaggcagagctcgctgcacatcttaaatactttacagagtc

SEQ ID NO: 79377 - DNA, 122 bp, Homo sapiens
caacaacgtctgcacccaaacccagtcctcagaaccgcagacgtggccctgcgtggcttccggctcgtcgccacgccccctggccaatcacggcagaggactatccgccagccccgcccccg

SEQ ID NO: 79378 - DNA, 122 bp, Homo sapiens
tgggccatggggccggttggaaggatacttggaacgggaagcacatgagaggtgggcacccggtgccgaggacatggacgagggactggtggctgggagggagaggagggccctgtccggca

SEQ ID NO: 79379 - DNA, 122 bp, Homo sapiens
ctgccccgcgcgagggcctcacctgtgggtagaggtgctgcatgaactgctcccgagaaacgccctccagccggggtaccgggaggtgctgcccggccatggttgctcacgcctgccctctt

SEQ ID NO: 79380 - DNA, 122 bp, Homo sapiens
atactctcatctttccaatggtcatcacaataattgcttaactaagtcagtgttatggcacgagtgtttgtatattgttctaaaatctttccattggctgtgactctagtgtattaaccatt

SEQ ID NO: 79381 - DNA, 122 bp, Homo sapiens
ttctgtatgtatgtatgtatgtacgtatgtatgtatgtatgtatttatttttgtagcatccgctcagttgcgtggccacaactgaatcccagtccaggtggcaccattatatgggtagcatt

SEQ ID NO: 79382 - DNA, 122 bp, Homo sapiens
tcaaagaagaggcaccaaggatgccgcgcgaaaactcacgaggccacttaacacaggctgcgtgggaaacaggggctccgcgactgcgctcagattaacggaaaaagacacccctctagagt

SEQ ID NO: 79383 - DNA, 122 bp, Homo sapiens
accgcgcacgggtcggggaagcccggggcagggccgtatgcaaatagcgcgcgaggaggccgcggattggccagcccaggcgggggcggggcgcgccgagggcccagagctggcaggtgccc

SEQ ID NO: 79384 - DNA, 122 bp, Homo sapiens
cgctcacagtgggaatcgccctccccgacgccttcctatcgggattctgagcggagccatcggctgtccactcgagatcgagacaggtgatgttctgggcagagcagcccagtttcgctggg

SEQ ID NO: 79385 - DNA, 122 bp, Homo sapiens
acgttctgcgcgctctctgccagcacagaggagcagcgagtcagggtacggagcgggtagcgttggggaagaggtggccgcgaagcgagacaggccagcggaacggaaaacggaagcacgag

SEQ ID NO: 79386 - DNA, 122 bp, Homo sapiens
cacccccaaataacgggaaatacgggccgtcttctctgaaggaagatttttgggtttatccgaagaaggcaggtgtaaaaagcgactgggaaacagcaatatgcccttctgcctctcctctg

SEQ ID NO: 79387 - DNA, 122 bp, Homo sapiens
ctgcttgggtcttcataaagggactattcaagcagcagatggctgcctgaaccatctgaccgtacaggccctttatactcatgaggttttacaattgtgagtttaggggtcggctccatttt

SEQ ID NO: 79388 - DNA, 122 bp, Homo sapiens
cccctcccctgtggctcctgggctgtcggcgctctgccaggcatgacggggtgcaccatgcgctcggggcccgcacaccgccagtctctcatccccttgtccatagcagaacagtattagca

SEQ ID NO: 79389 - DNA, 122 bp, Homo sapiens
tatttttataaagctttttcataaaactggttgtagttgcacagctactgggagggcagccggggacacctgagccgcccgctgtgcccagatccctcaggctgcctgccatcagaactgct

SEQ ID NO: 79390 - DNA, 122 bp, Homo sapiens
agagctctcccggacatttcaagaactccccgacacgattttctgtgatgcgtgggctgtcgggacatctgtcttctatacctaataaagtcgcccgacgcagaatgaactcctcggcatcg

SEQ ID NO: 79391 - DNA, 122 bp, Homo sapiens
cgtttggcagaagctgagtaagtggagaataactctggaactgaaatgaagtcagtgaaccgacacaaaaccagatcctagcggtgagctggctgcggaggaaccaaagaaaaatgaatcct

SEQ ID NO: 79392 - DNA, 122 bp, Homo sapiens
gagccggcgctgcgcggggaaatggccgagggaatgccgcccatgcaggtgggagaaccccgccggcgccatggccgcgctgccgtgggggcggggcgcgggctgggccgcgggaccgggcc

SEQ ID NO: 79393 - DNA, 122 bp, Homo sapiens
atgatgtatatgaatgacacacagctttcaccgggttgagtaaggccttacctcattcaacgcgcacatccgagcaatggagccaatgttgttggtgatggtgaccaatgtggcccgggcga

SEQ ID NO: 79394 - DNA, 122 bp, Homo sapiens
aataacaactagagatgagaagcagtgaaagacaagaatggtcagaaaataaattcgtcccgggtcatcacagctaatgattctgggctgtctcttaaggtgggggttgttctaagagactt

SEQ ID NO: 79395 - DNA, 122 bp, Homo sapiens
tctcggagcattctgggctttgcttgttcagtgcagcggactggtgagcgcggtgctgcgcggctggcggtttattacccccacgtaagctctataccatcacccagaacacacatcctttt

SEQ ID NO: 79396 - DNA, 122 bp, Homo sapiens
gtcgccacggcgacagcaaaaggctttgtgcccagctggaaaagacaggtgcaaaggccccggaccccgagagcccgggagcccgggaggaggaggcggcggcagcggcgctcgtcttctgc

SEQ ID NO: 79397 - DNA, 122 bp, Homo sapiens
atagtaagagttaaagacattgccagccccagacaccagttaactcagtttcccacaatgcgtggagctcaatagttttcaaagcctcaggtgattctactgtgctgctcagacctaggacc

SEQ ID NO: 79398 - DNA, 122 bp, Homo sapiens
ccccatggaaacaaccccgccccactaaccctcccgccccaatgagtcgtgaggttttggcgttttattgagtattcaagctgacaatcaaacacctgagccttctggttggacactttgct

SEQ ID NO: 79399 - DNA, 122 bp, Homo sapiens
tccaccggctcctctgggcaggaggctccagcctgggggtgcctgacagctctccttccccggcgcctgtattatacatgtaacatttatatttctatccacacagcgttcattcagccatc

SEQ ID NO: 79400 - DNA, 122 bp, Homo sapiens
ttgggaggagcaagtggtgcttgatgaatgcagccacagggcaaccacctgttgcagctccgagccctctggtcctgccccatgtgatgcctgaggctccagacagaagctcccagggctct

SEQ ID NO: 79401 - DNA, 122 bp, Homo sapiens
ggccgagtcgactgatccgctggcgaaccaagtagatgttgggcgccatactgcgtgcgccgcgcccccttccctgcggttcagcccctggcactcggtcttcccctgcgcacgcgtgtacg

SEQ ID NO: 79402 - DNA, 122 bp, Homo sapiens
agataaggaaatcgaggccaaggacagctaaagaagcgaggtgcgcaaggtgcccaggtccgaagtgtttccgctgctttcagactgcagtcccagggctcaggagtccatgctttctgcgt

SEQ ID NO: 79403 - DNA, 122 bp, Homo sapiens
tctgagcgaggggtggcagcgccggcgccccagaatccgggacagaagggtcccaagagtcgcgcttggtgaggtgagagtcccttcttccttcctggcctgcccttctgtaatcatggcgg

SEQ ID NO: 79404 - DNA, 122 bp, Homo sapiens
gaagctatctctgagccccttcctaaccatgtctgccttttatcccttgaagactcagatcgaaagcaagaagcatcaggtggaaacagcttttgagaggctgcagcaggagctggagcagc

SEQ ID NO: 79405 - DNA, 122 bp, Homo sapiens
gcgcggacgcccgggcggggctgtgcgaggggtggggctgcgggaggccctggagcgcggcggtgatggcggggccggtgaaggaccgcgaggccttccagaggctcaacttcctgtaccag

SEQ ID NO: 79406 - DNA, 122 bp, Homo sapiens
cactgcacactaaagactcaataaatgggtgaataaataactgaagtggacaccagacaacggagcagaaagaaaatccatcagcaagttcagatgtggggcttcggagagaaacttcattc

SEQ ID NO: 79407 - DNA, 122 bp, Homo sapiens
tcactcactgccgccgccgggggctctggggggtcctgagggcgccggggaggaggctgccgccgctggccgggagggcccgcgccgagtccccgcccgcccgccggtccggcccgcccggg

SEQ ID NO: 79408 - DNA, 122 bp, Homo sapiens
ttcaaataaaagcacgtgaccaagtcaggccaacgaggcacaaggagaggtcagctgtagcggcttccggcaaagtccctcctctttgtacttcatcaggagttttttggaaagtgagggtc

SEQ ID NO: 79409 - DNA, 122 bp, Homo sapiens
ctatctacgtggaatgtcagtcccttctcccttccaatctaaagttatttcctaattagacgcagtagttaacaaatcctccagttccccaccaacagcagtttaaaaggaagcaagacgtt

SEQ ID NO: 79410 - DNA, 122 bp, Homo sapiens
aaataaataaaaccagttaatgttgtagttaacttgcaaatcaagtaaatctgttggtgccgtatttgagaaataaaccatcacagcgtcacagcaaacacacacttctgaacgtcttcatt

SEQ ID NO: 79411 - DNA, 122 bp, Homo sapiens
gccagcctcaacctctcaaagtactggaattacaagtgtgagccactgagcccagccaagcggatggatttcaagggttttcatatatatgcttataatcatatttaaatgtattgatgggg

SEQ ID NO: 79412 - DNA, 122 bp, Homo sapiens
ttctggggccttccagccaggacacgatggactgcggcttagccagaagccagtttctcccgctgcgctgagccagctccgcagaggacgccgacgcaggaaagcacgcagagtccggactt

SEQ ID NO: 79413 - DNA, 122 bp, Homo sapiens
tgcagtcacgaccctctaccggtggcactggggcgcaaatgaagctgggaatgcaggacccggcgcatctgaggaagtgcagcggggcatggcggtgctagagggtggggacatggaggcgg

SEQ ID NO: 79414 - DNA, 122 bp, Homo sapiens
gcactttgggaggccgaggcgggcggatcacgagttcaggagagaccatcctggctaacacggtgaaaccctgtctttactaaaaatacaaaaaattagccgggtgtggtgacgggtgcctg

SEQ ID NO: 79415 - DNA, 122 bp, Homo sapiens
ggcgccctgcggaagcggcgttagtgaatcggggccttggggagcccaggatggaggtggcggtcgcggcggcgggccgagccctgcggcgggcgggaggtaaggggggcctccggcgcggc

SEQ ID NO: 79416 - DNA, 122 bp, Homo sapiens
cggcggcgtccagggatcgcgtccggagctcccaaccggataccccccccaagcccgaaacggcgctgcccatcctcatacagtcacctcagtccagaaaacagcgattttaatttgaaagc

SEQ ID NO: 79417 - DNA, 122 bp, Homo sapiens
cctgctcccaagggacccgtcgcgttgcagagttgtccggtcgggcctctggggcgggcccggatcctggaccagggccagtctgtccgaaacccaccagtgagcgagcgggagagcgcggc

SEQ ID NO: 79418 - DNA, 122 bp, Homo sapiens
acagccggcgcccgatcaggatctccgcgctgggatcggtggaacttgaggcagcggcggcgcggggcgccatggcacaccgagcggctccgtcttctgctcctcagagagcccggctggcg

SEQ ID NO: 79419 - DNA, 122 bp, Homo sapiens
ccaccagggcgcacgggacggaggccgggggtcccgcttttccgtcagagttcgcggtcacgagtggaacccactgagcactctagtttcctggtattttcatggcagtaattggatgacag

SEQ ID NO: 79420 - DNA, 122 bp, Homo sapiens
ctaggccacgtatgattggaattttccacataaaagcattttaaaaagcagtgttatttacgatgcttatcattagggaatgatattgagaagaggagtaaggaaacctcaacttctaaatt

SEQ ID NO: 79421 - DNA, 122 bp, Homo sapiens
attgtggttaggatatatgccccattttccagatgaagaaactgacaccacaaacttgctcgtgtcaagcaacagaattttattctttaactgttctagaggcaagaattccaaaatcaagc

SEQ ID NO: 79422 - DNA, 122 bp, Homo sapiens
ggccccggggctggatgtcaggcctccattgccctgctcagtttggctgcatttggctgccgtctggggtcctggtcctttgtgcaaatgctttgggattccagttgtgagctgagagagat

SEQ ID NO: 79423 - DNA, 122 bp, Homo sapiens
cccccctctctgctcctggcaatgggcgggggccactctgggccccagcggctccctccacgaggagtgaggctccctggagttggtctggccccatgtgaccccctcctcccagcagggcg

SEQ ID NO: 79424 - DNA, 122 bp, Homo sapiens
cacctcaacatgcagtctggtgcaggtgccactgtcacacagagatgggaagggcatgtgcgggtcacttggaagaaaccctgtgaccccgatgagtgcaatgtggtataatttagtagccc

SEQ ID NO: 79425 - DNA, 122 bp, Homo sapiens
ccgtgtggcgcgcgcaagaggcgctgggcggcaagtagggcattggatccgaagtgcgagcgccatggtggctcctcctgtttttcagaagtggcggagcctcgcttggtttcgtttttgga

SEQ ID NO: 79426 - DNA, 122 bp, Homo sapiens
gagtccagcctggacggggctggccgcagagggcttcacactcgcggctgagccaggagccgtttgctgtgtggcaggtgcggtgcgagctgaccaattactcggcgggggccggggggaca

SEQ ID NO: 79427 - DNA, 122 bp, Homo sapiens
cggtgcagcaggtgtggtctccccagaccaccaggtgcttcacacacgcacaggggcactcgcagtggcgtctgtgcacacacaagtgcacgtggggcctcggagggaggttgagcatgtgc

SEQ ID NO: 79428 - DNA, 122 bp, Homo sapiens
ccgcgccagccttcaggttcctggagagctcggactcagagaattttgcctgctttggctcgcctgtgtgtcgccggcccaccggctgggtcttttgtggctccggtcaccgcgagtggcag

SEQ ID NO: 79429 - DNA, 122 bp, Homo sapiens
gtggcgatctggggcccccaatgggagggctctttgatatcttcctcctcctcctccctgcgctgctccccaggagccagtggacacaagcagagggatacaaatttcgcgcgggcagcgct

SEQ ID NO: 79430 - DNA, 122 bp, Homo sapiens
ttcttgtgggaagcaagacatttcggttatcgactacacagaagagtgaataaaacccaacgcctatcaaccaccaaacgtgactctgcttgcataatcatacaaataaattttctttaaaa

SEQ ID NO: 79431 - DNA, 122 bp, Homo sapiens
ttcagtgtagagtcagctgctgggagctgggagttcccagccactagtcattctttcagacgtctgtaactcattctattaaatcctttctactgtaagcataaattgcctttgtatctggc

SEQ ID NO: 79432 - DNA, 122 bp, Homo sapiens
aaggggcagcgccacctccgcccgattgtgctggctgccccagtggcggcggtcacagctcgggcgccaatgacgcctcttataaaaacaacctgctcgcaggcgtctgcagccggcaggcg

SEQ ID NO: 79433 - DNA, 122 bp, Homo sapiens
gcagggcaggtgaggcagctctgcctcaagccacaatgtctaggacagctctgtttcgcacggtggctgactagctaaaaaatgttcttgtctcagcaatcacaggagaacaagagggtgag

SEQ ID NO: 79434 - DNA, 122 bp, Homo sapiens
ctgccagaagatgaagcgggttgtgcagcataccaagggttgcaaacggaaaaccaatggcgggtgccccatctgcaagcagctcattgccctctgctgctaccatgccaagcactgccagg

SEQ ID NO: 79435 - DNA, 122 bp, Homo sapiens
ggccccctcatccccttgcttttaacgtattacattcctctacataattatttaaagtcacgggcggaacggacttaaggttttgttagttttgttttttgttgtttttttttaagacccca

SEQ ID NO: 79436 - DNA, 122 bp, Homo sapiens
gaggaacagccctcggccgcagccgggggatgcgtgggtgccctgcacactggccttcaacgtttgtgagtttcaggccttcggtagttggcatatgggacactccctctccccgcaggccg

SEQ ID NO: 79437 - DNA, 122 bp, Homo sapiens
cgggcccgaaggaaatgtgtgctccagataagggcgagtgtgtgtgtgtgtgtgtgtgcgcgcgtgcatgcattttggggggctggggctgtcctcacttatcaaagcaattcccaaggcgg

SEQ ID NO: 79438 - DNA, 122 bp, Homo sapiens
gtctcagagactggggtttttttttttttaaaagactgtaggcagaaaaaacaccccaaccggctgttgtgacaatcaaacgtgtctaagaaaattcagccaatgagagtgcgagagtgcat

SEQ ID NO: 79439 - DNA, 122 bp, Homo sapiens
gtgccgcctggctggcgcgtcgtcgcccgcagcctacgacgaggcgctggccgagctccacgcccacggcccagccgccttcgtggactacttcgagcgcaactgggagccccgccgcgaca

SEQ ID NO: 79440 - DNA, 122 bp, Homo sapiens
gggagggggtaggggatgagggcctctcttcactattcctccgcccggagagcgggagcccgcaacgcccgccgaggacgagcggcgggagggaacgctctgccctccagccgccccggtgc

SEQ ID NO: 79441 - DNA, 122 bp, Homo sapiens
tagctgggatgggtgggtgaaggagatggatagtcagagacattggaaaagggaaccctgcgaagatcaaatgcaaacaccaggaggagctgacacgctgcagtgaagaagcgggagggctg

SEQ ID NO: 79442 - DNA, 122 bp, Homo sapiens
tttattagaaacaggctttctagctgtgacaaattatatgtgaaatttcaagtacagacccgcagggttgtgatgacttcaagaatgatcaagtgtggcccagtctaggaaagtggagggac

SEQ ID NO: 79443 - DNA, 122 bp, Homo sapiens
tccggttcacccagcatttcctcttccctgttttctttcgtcgtcgtgggtgggaattgtcgcctaagtggttccgggttggtggatgaccttgagccctcaggaacgagatggcggttctc

SEQ ID NO: 79444 - DNA, 122 bp, Homo sapiens
acccgggtgattcccttcctttccaaagtggtccctgttccaacctcccctacacctcttcgccctgtcccaagccacatatcgatgtcaccttagcaacccaaggacccggcccaaaccag

SEQ ID NO: 79445 - DNA, 122 bp, Homo sapiens
tctttacaaaacgctacactccctgcttttgagtatctaaccatgcgcaaacccatggtccggccacttttaaaaagtgtttaaaggtacatgttgctgacagaagaccccccaccggtatg

SEQ ID NO: 79446 - DNA, 122 bp, Homo sapiens
gaacagaagaacacctggcagggctggggtggggattgcagctagtccatgacccaactacggtgtgaacctggacccggaagctgggctgtaagcggagctaaggtttcttctcctcccta

SEQ ID NO: 79447 - DNA, 122 bp, Homo sapiens
ttgcagatggagaaggtcagtgaagccgcatcacttatgcagctccaggtgggggtcactcggctcaaggtggtggagttggaactcagacctatgtcaccgtgagtccaaaagctcttcat

SEQ ID NO: 79448 - DNA, 122 bp, Homo sapiens
tgccacctgttttcttggtaagttccactaatgggaaacacttgagggagattagaaggccgagaaatcatgcatttctgcctccagaagtggtagtttcaggctacagttgactgtaggtc

SEQ ID NO: 79449 - DNA, 122 bp, Homo sapiens
gtggcgcgtccagagttgctgtccctcccagtgggttcgtggtctcgctggctttaggagcgaagctgcaaaacttcacggtgagtgtcacagctcatgaaggcggcacagacccaaagagt

SEQ ID NO: 79450 - DNA, 122 bp, Homo sapiens
gtcatgcgccctatgtcaggggcgtcatgcgtcctatgtcgggtgtcatgcatcctatgtcggggcgtcatgtgtctatgtgtcatgatatatcgtgtatgtcatatcaatgatatatcatg

SEQ ID NO: 79451 - DNA, 122 bp, Homo sapiens
gccaaactccttgattggctgcactccgccccgcccctctcgtcttgccgcttctttgagcggaagttggatcactgaagcgccaaaaaagaatttaggggaagacctgattttcgcttgag

SEQ ID NO: 79452 - DNA, 122 bp, Homo sapiens
gagtggggcggggacggtgctgtggaagggacgggagagataaaagaggctttcttgtcacgtacaacctcgggtcggctgtttactcagccaaggagagaagatagagtagggctgggagg

SEQ ID NO: 79453 - DNA, 122 bp, Homo sapiens
ctcccattacgtgccgccacctcgcgcccctgcacgtacccaacgtgccctgcgtggtcccgttacgtgtcccatcatgtttcgtgcgcttccattacggatcatacctcgcacctcaccgc

SEQ ID NO: 79454 - DNA, 122 bp, Homo sapiens
taatccccgcgactgcagcagcgccggctccctcccggtccccacctcggccccgggctccgaagcggctcgggggcgccctttcggtcaacatcgtagtccaccccctccccatccccagc

SEQ ID NO: 79455 - DNA, 122 bp, Homo sapiens
attgcttgagcccgggaggtggaggttgcagtgatctgagatcgcacctctgcactccagcgtaggcaacagagcgagactccgtcaaaagaaaggaagaaagaaaggaaagaaggaaagaa

SEQ ID NO: 79456 - DNA, 122 bp, Homo sapiens
cacacactctcacactcacacacagtaagctgggtccggggggtcagtttacccatagatcgcgtccttgtcccgcttcaaggcgtcgttgacagcggatcccatactggccggcatgacat

SEQ ID NO: 79457 - DNA, 122 bp, Homo sapiens
aggcagggtccccctgaagtgggactgcaaagccacctctgtgcttttcccaggctgccccgccggcgccgcctcaccccgtcccgggcacctggccgcccctcccaccacaacacccctgg

SEQ ID NO: 79458 - DNA, 122 bp, Homo sapiens
ccccgccgtcttcccgaactcttacttttgtttattgtttgtcagccttcggggtccggccgcggaaaggacgcgggctcccgtcccggccccggcccggacagcgcccctcggacgcgggc

SEQ ID NO: 79459 - DNA, 122 bp, Homo sapiens
tggctgggaaagtctaaccgcggggcccacgccttttctcatcattttagaaccttagagcgagcttaaggagggctgtactgtttaggacaatcttgattaatcgtttcctttatcaacta

SEQ ID NO: 79460 - DNA, 122 bp, Homo sapiens
gcggacccgcagcgttctgtgactccaccgcggagtccaaaaggcagctgagggtgggagcggaggggaagggaggggggccacaggcgctcgggcgagggaggcgcgtcaatgggccgcag

SEQ ID NO: 79461 - DNA, 122 bp, Homo sapiens
gtttcgctcacagatgtatctatccctggaatgtcctttgggatgtatctgtccctgaaacgtcatttggcaaatagttgacactcaagaaatgtttgttgccgaatggattacctgacctg

SEQ ID NO: 79462 - DNA, 122 bp, Homo sapiens
ccaacaagcccgaagtgagggggcggggcagccgtcaccgcagccctccccgccctcctccgggctgccaatcacaagaactcacctggacgagctcgggcctttccgggttggctccaagc

SEQ ID NO: 79463 - DNA, 122 bp, Homo sapiens
ctccctaaatggaatggggattccgctgacgttcttcagaagctctgcgctgcgggcctccgtgtcccttctactcccgctgtctgaaccccgcgatgtcccccgcgctgttcgtcccctct

SEQ ID NO: 79464 - DNA, 122 bp, Homo sapiens
gagtcgcttcctggagatgcaccctgcctgtcacatcaaatcgacctgctggatgaaatacgtggtgaaggggcccatggacacatggtccgttagttctggaaatacctctcctggtgcct

SEQ ID NO: 79465 - DNA, 122 bp, Homo sapiens
attttttaattctaggattcaaatttccataacaatgtctaacgcagattccttccaaaacgttaacatgtataaacctctcataaaatatcagtaatgccaatgccacaaaggcagaatac

SEQ ID NO: 79466 - DNA, 122 bp, Homo sapiens
aggaggagtaggaggaggaggaggagaaagaggaggaggaggaggtggcagcggccgccgcggtggctgccagtccagagcagaatgatgggcaactctcaccacaagcaaccgaggagtaa

SEQ ID NO: 79467 - DNA, 122 bp, Homo sapiens
ccatttatttttccaaaatgtgttgatgaactcccacaaatcggtaagaaaaagataacccggtagaaaaatgggccgaagatacttcgcaaaagaggaaacacgcaggtccaatttacaat

SEQ ID NO: 79468 - DNA, 122 bp, Homo sapiens
ttccacatcggctccctgatcccgggccagccgcggccggccaggcggcagcgcccgccccgcgctccagaccccaccctccggcctagccaccgcccctccgcgcagcccccgcccccatt

SEQ ID NO: 79469 - DNA, 122 bp, Homo sapiens
gccagggccagaacgagaagccaggtgagcccgtaaacagtcaggggcagaacgagaagccggggggtcccgtatacagtcagggccagaacgagaagccgggggatcccgtgtagagtcag

SEQ ID NO: 79470 - DNA, 122 bp, Homo sapiens
agaggaggtgcctggaagcggctgcagccatcttaggagcctccgaaacttaacctgggtcgggcggtagagtcctcggctcgcgtcctgaggtgccgctgctagttgtcttagcgaggagg

SEQ ID NO: 79471 - DNA, 122 bp, Homo sapiens
gactattacatccattatctcttaattcctgacaacacagcaaagtaaaggcaattatcacgttcctcagaggaaacaggctcacaaaaggtaggatcttgaccaaggtcacacacacacat

SEQ ID NO: 79472 - DNA, 122 bp, Homo sapiens
gtctttcacaaagcatcgttttgtctcattgttttcacctaagacttcttgcaaaacaaccggctttgaaagtgcaagatctgctgcttaactcttgaagagctgacagacatcacaccttt

SEQ ID NO: 79473 - DNA, 122 bp, Homo sapiens
tgctttgtgagttattttggaagtcgctgcagactgtactgttccctttgctattttaggcgtgggctttgccactaggcaggtgggaaatgtgaccaaaccaacggtaattatcagtcaag

SEQ ID NO: 79474 - DNA, 122 bp, Homo sapiens
taattggatccagcccatggtagctgaactgagggattaatgaatttacctaaggtcacacggctagcacagcacacacctgggtcttggcccaggtctgtctcactcctcccagcaggctt

SEQ ID NO: 79475 - DNA, 122 bp, Homo sapiens
ctagcttatgtgccaagagggcaccatgtcataagggacataagtccacctgacagccatcgctttaatgcaacaataatgatgatggcacagggaaacagaggtcaggtgccaggtcaggt

SEQ ID NO: 79476 - DNA, 122 bp, Homo sapiens
accacaaaatggaatataattgttttagaaaatctatcattccacaaacttaggcctattcgaactatagtatatactctcattcaaaatcctcaaactgtatgataaaataaaccttgtaa

SEQ ID NO: 79477 - DNA, 122 bp, Homo sapiens
taagcaaacttgcattgccttgcatgaacaaactcagcttgttttctctctttctttctccggcccacccccgcttcctcttctccttcactccctctgtttggttacacaattaaactgct

SEQ ID NO: 79478 - DNA, 122 bp, Homo sapiens
ctccccacatcccagaagatgggtggccaggcagagatgctcctcacttcctagatgggacgacggcagggaagaggcgctcctcacttcccagactgggcggccgggcagaggggctcctc

SEQ ID NO: 79479 - DNA, 122 bp, Homo sapiens
ctttgggatacctttcccaggaacccccatcccactccctctgccctttactctccaccacgcacacagctccccaggggaccaggccaccctggaccttgctacttcctgctccttgcagc

SEQ ID NO: 79480 - DNA, 122 bp, Homo sapiens
gccgatgtgtgcaatccgggtgcgcaagtcttggcgccacaaatgtcagtgacagccttgcgttactggcaaagttcatgggagttggcccagctttcgggccactgaggagaagcctgtgg

SEQ ID NO: 79481 - DNA, 122 bp, Homo sapiens
acaaattgggctgagcgtggtggctcacgcctgtaatcccagcactttggaagaccaaggcgggcgcatcgcttgagctcaggacttccagagcagcctgggcaacatgacgaaggccgtct

SEQ ID NO: 79482 - DNA, 122 bp, Homo sapiens
atattgtcagaatgaagtcatcacagtagtccagacccctccaaatctgttgtttactcacgtgaccgtgggcaaaatccttttactctcattccctatctagccattagaaccacatgttc

SEQ ID NO: 79483 - DNA, 122 bp, Homo sapiens
gtgggcgggaccgtggtcaccgaggtgggcggtgccagaggatctggcggcggggcggggcggggcgcgcgtcctggcttcgcccttccccggggcggggcctccggggaccgcggggccgt

SEQ ID NO: 79484 - DNA, 122 bp, Homo sapiens
ctggtgtgggtctctgcaccgccatctgttctcatggtgctcgtacacgtggatcgtaggcgctacgcagtccatcgtaaacttggtgttgtctacctgagcacaaggcaaaggacacgaga

SEQ ID NO: 79485 - DNA, 122 bp, Homo sapiens
tttttgtagtttatagttggccatatatcgtgttgaattttatagtcagttaacaaaaaacgtgcttctcttaaatttcatgccagttaagggttttggagctgatcactaaccaactatag

SEQ ID NO: 79486 - DNA, 122 bp, Homo sapiens
agcacctgccaaattctaggtctcttagaagacctcctggctcagtgatctaagtgaaaacgaatggtgagcctccgcatgagcaaataaaacaggctaagttacataacagcatatcagca

SEQ ID NO: 79487 - DNA, 122 bp, Homo sapiens
ccggcccggggcccgcagctgcctgcgcccccgccatcctcccccggcccgcggtcgtcccgcactcaccaggagcacggagccgcgcaccacctcagacacgctctgccgcagctcggccg

SEQ ID NO: 79488 - DNA, 122 bp, Homo sapiens
caaacagaaatctgtgtgtgactcctctggtttgatactgccagtccccacattttcttccgggtgttttcttggcagaatgtgctcaatgtttgatgtttcaccagcaatgaggctgaaaa

SEQ ID NO: 79489 - DNA, 122 bp, Homo sapiens
gttattattcgggactctgagtgccgggccatgctgggggagtgagggcagggggagctgcggaggcagggctctgagggctttagaacaagagccggtgtgtgtttcccactgagtacctg

SEQ ID NO: 79490 - DNA, 122 bp, Homo sapiens
ggtgaggagctgcggtctgtgagtcctctcccgccaatgggtggaccgcgctggcggccgcgagctcgcggagctggtgagttcctcaaagagcggtcccacaacctttgttctcagtgcct

SEQ ID NO: 79491 - DNA, 122 bp, Homo sapiens
acagttccctgctgtgaagtccaagtacagtgtgcttctaactaagggccagaaacagaacgcttgcttgtgttgaccttcattacctgacactgtttaaaagacaaaatgtcagtgttaat

SEQ ID NO: 79492 - DNA, 122 bp, Homo sapiens
ccattaggaatggcagtatgccctttttgtgtactctgaaaggcgcctggtggggaggcccgaggagccactagcaacctttgtgcagagggcaggtctgggcaggtcatggaccggcagga

SEQ ID NO: 79493 - DNA, 122 bp, Homo sapiens
gtggctggggtcgcagggggcacagaccgccgggggttgacggtgaaggtgtgtccactgcggcggggggcccccacccctggccctgccttcaccccatagaacaggcggctcatgagggg

SEQ ID NO: 79494 - DNA, 122 bp, Homo sapiens
cgactggaagcgctgctaattccctgcgtatgcgcctctccctctgcagcccgggacaggcgcagccgccttttgcctgcccctacctcgcccgggacacactggcgccgcctggccaggcc

SEQ ID NO: 79495 - DNA, 122 bp, Homo sapiens
ggagcgcgcgctggtggaggtgctgggcgcagagcgcttctccccgcagagctggggagccgacgccagcccgcaggccggaacttcgccgccgcccggctccggggacgccagcgactgga

SEQ ID NO: 79496 - DNA, 122 bp, Homo sapiens
tcaatcaaaagcagaattgcttccccaataaatgaagccagtacaacaaataaactcaggcgctaattgctggctgcagatgtattaactgaagcaaatgcgaacctggcaaccattaatta

SEQ ID NO: 79497 - DNA, 122 bp, Homo sapiens
gcagggtaggtcccacgctcaccttgccatcactcttcctccggatcttctggcagcggccgtaggagcctgtgccaatggtgtacaacacttcatagtcctcagcccgggaaggcatggcc

SEQ ID NO: 79498 - DNA, 122 bp, Homo sapiens
aggccggcgtggccaggtagtacgcacctggagccgcacggaatgggatgtgccttgcagcgccctaacctctcccacccaccttcgtcacccccttagcggaagagcgtacagatgtccca

SEQ ID NO: 79499 - DNA, 122 bp, Homo sapiens
tggcctgcagcctagcaacacactgccccctggtgtccactaaagccagcaaccagaagacgtatctgatctggaagaagctcaaggctgaggagcactggaccctggggtcagaaaactgc

SEQ ID NO: 79500 - DNA, 122 bp, Homo sapiens
cttgtcgaacttcttcagggagtctaggaaggtgtccaccttgcccatcatgatcttggccgccttccagctcttgtccttggggatcttgcccccaggtgcggtcagaatcatgacggcgg

SEQ ID NO: 79501 - DNA, 122 bp, Homo sapiens
gagcaataatcctcatgttcatgtggagttttaactgagtggtattaaaaatgcaaccatcgtaatgtgatatggaagggccctcaaatattttctattaagaacaaaaataaatcatctca

SEQ ID NO: 79502 - DNA, 122 bp, Homo sapiens
gctggctggatgggaaggattcctgggttcggctgagtctgcccagctttaggcctctggcggggtgcaattgaagtctctgtggtgggaatgggatctgtcagtctagaaagggaaaagag

SEQ ID NO: 79503 - DNA, 122 bp, Homo sapiens
cccagagaggccgtacgtggggcggactcggccgcactgccggtcccggtgacccagtagcggtatttaggcacaccagggatggcctgtggcggtctgcacctctggtacccgccctggcg

SEQ ID NO: 79504 - DNA, 122 bp, Homo sapiens
ttttgatgcagtcttagaagtcatacactgtcacttctgccatactctgctcactagaagcgaatcacttaagtgaagccatgctaaaggtgaaggggattaagctccacttctttaaggga

SEQ ID NO: 79505 - DNA, 122 bp, Homo sapiens
atggacatcgataccagcggcaccttcaatgtgtctcgtgtgctctatgagaagttcttccgggtgggtgcctcgtgcgctctgtgagaagttcttccgggtgggtgcctcgtgcgctctgt

SEQ ID NO: 79506 - DNA, 122 bp, Homo sapiens
agacattttaaataattcagatagaggaaataggttctcagttgaaatttaaagtattttcgactttaaccccatgtgtgaagggatcacaactcaagtaatcataacagcgaaggactggc

SEQ ID NO: 79507 - DNA, 122 bp, Homo sapiens
agtagaatggagttgaaaaggaaacacactagagtcttacttcactgagaatcttaattgcgtcctcctcctgtgttctgtgcacggccacatctgtctgcatagagttgtaaagcagtgtc

SEQ ID NO: 79508 - DNA, 122 bp, Homo sapiens
aggaataagatgccaccttcgctcctgaagaactcctggtggggtgaggagacagacacacgggcagtgacaaagcagatgggtaaacaagggctgacgtgatggagcccacagagagatgg

SEQ ID NO: 79509 - DNA, 122 bp, Homo sapiens
gcctccccagtcctccctctcttctggtgctccccgtttcttttcgccccgcggccaccgcgccgcctccctcactcgcgccccgattctacggcacctccctggtgatcccaggtcctaac

SEQ ID NO: 79510 - DNA, 122 bp, Homo sapiens
cctcgttcatccccacttgctgactctttattgtccagtttttctgaaaacacagtaaaacgcaaaaactaaatcatttgcccacgcggaattggcaagaccacagtccaagggggtatttc

SEQ ID NO: 79511 - DNA, 122 bp, Homo sapiens
gtatgcagcgcccctgggtctgtgtttttattgcactttcctgctggcttccagctgcaccgccagttccggggagggccctgggccagcggctgtccgccccccctccttcataaagtcct

SEQ ID NO: 79512 - DNA, 122 bp, Homo sapiens
tgtgcggagcctggcgtcggccaagccaccgggcaggaggcagccccggcctcccaagggcgcatctgagcaaatatgcaaaagcccacagggcaagacccaggctttcttacggttttccc

SEQ ID NO: 79513 - DNA, 122 bp, Homo sapiens
ttggcatcaagcaatttcaatttccttattccatcatcaacagtgatcatagcatctttccgatccaggacaaaggtagtcaagtgcttacaattggcaaaaaggaaaaagatttataacac

SEQ ID NO: 79514 - DNA, 122 bp, Homo sapiens
gacagaatcaagaggctaatttgggagatgtgagattcccagcccacctggtattgccctcgagttagtggtaaattttgctatggaaaatatctcttgtcaagaccaagctccggcgcatt

SEQ ID NO: 79515 - DNA, 122 bp, Homo sapiens
tgatccttttcctttcaaggggctccctgggcgccctatgcaaatgtgtctacatcttcccggctacctttgactcctctattccaatagttctcacagtagggtccccagaccagcagtat

SEQ ID NO: 79516 - DNA, 122 bp, Homo sapiens
ctgcccttcccccaggtttcctcctgacggtggggactaatggcgtcccagccccccgggcggctgctcagcagcaggaagcagagaatcagaggcacccccgctgggccccgagccccatg

SEQ ID NO: 79517 - DNA, 122 bp, Homo sapiens
gagcagccagcgccatgacctgcaacttgcgggctgaccctgcactacttcaggcagctacggaggcgggcggggctaaaggagattcaatccttccggaaagaaccgcgcccgcccgcctc

SEQ ID NO: 79518 - DNA, 122 bp, Homo sapiens
ccggcccgggggaggatctgtgaaggccccgggaaggcagaggattcctgcgcggactgccgcgttcggagggcagccgggacggctgggccggaggcgggggagccctcggctgggcgggc

SEQ ID NO: 79519 - DNA, 122 bp, Homo sapiens
aattattgtcacatccagtgaaagaatcattgcctatcttctaatgcaatcctctcattccgcagatgcattaactgaggcccagagaggtgaccggattgtccagtcatatgttgaatctg

SEQ ID NO: 79520 - DNA, 122 bp, Homo sapiens
ggagccccggccagccacggctgggcagggccagaagcgcctcctccaggatcctccccgcgctggcccgccccacaggagcaccgcccctaccaggagcccggagctcttcccagggcccg

SEQ ID NO: 79521 - DNA, 122 bp, Homo sapiens
ctgtgggtggacgtggttggtgattggcaggatcctggtatccgctaacaggtactggcccgcagccgtaacgaccttgggggggtgtgagaggggggaatgggtgaggtcaaggtggaggc

SEQ ID NO: 79522 - DNA, 122 bp, Homo sapiens
attgggctagccgctcctcccacgtcgctgccgcagatccccgctcccctcccccacccgcggtccgtccctcctggtcgaccccgttcccgcccccgccccgcgcagactgcagccaggtc

SEQ ID NO: 79523 - DNA, 122 bp, Homo sapiens
gaaggttgtggcactgttgtcatggaagttcaaatgcttcaattcctgaccatttggggtcgtttaaatggaaggaaaggatcaactctctataaaaagtcaaattgttttaaagaggattg

SEQ ID NO: 79524 - DNA, 122 bp, Homo sapiens
ccaaggcaggatgtggccatggtgctgtagagtccccccggcgactcagagcagtgttcccgttccaggttctcccagcagttggggacagctctgccttaggctggcagaggaacccaaat

SEQ ID NO: 79525 - DNA, 122 bp, Homo sapiens
cttgtgctcactataatctgactttactcagtacatttccacctccaggaattaatattccgaaattcccttctgaaaccattacctatgcattgcctttttcatttctcctggaatgtttt

SEQ ID NO: 79526 - DNA, 122 bp, Homo sapiens
gaaagggaagaattgccctctggtcccagatagactaactcccctgggctgccacacagacggccattctgggagacagcagtttgacctgtttgctcagctgctgtcctttccaccctgag

SEQ ID NO: 79527 - DNA, 122 bp, Homo sapiens
aaacctaaaggctgcaggctgccaggtgtgcttggagagcccccttcttccgccgggcctcgcaagcagcgtaggactgtggagaagggcggtgggcaaggagggaactcgagagcagcctc

SEQ ID NO: 79528 - DNA, 122 bp, Homo sapiens
ctcatggtcttcaaactctccatgccttgttagcttcctggaatccacagaatcctttcacgcttgggcactgacctgtaaaaagccatcttaaaaggcttccaggtacattgtcttggctc

SEQ ID NO: 79529 - DNA, 122 bp, Homo sapiens
agatgcagacagatatgacgtgagaccaaagagtgaatgacacctgagcctggcattcctcggagcttaaagaagagttcctggtgtccctctgttttttggaattttttttttttcaaaga

SEQ ID NO: 79530 - DNA, 122 bp, Homo sapiens
ctcaataaaaatggtaactgacttttcttttagacgagggaaggatcagaagtcctgagtcgtttgcatcgcctcccaaaagtttacttgaagtgaagcccctcctggtttcatactccatg

SEQ ID NO: 79531 - DNA, 122 bp, Homo sapiens
cacactgtctttgcaaagtgaaagttgtttattgcttgttacgatttaacaggcaaaatacgacaccagggatgtaatacctacaaggcggtcttcctgaaatgcctgcccggaacagaatg

SEQ ID NO: 79532 - DNA, 122 bp, Homo sapiens
tacatgatgatgtgggtgaagcagcctgtgtctttgaggagctccaggccagagcagatgcgggcagggcccggcggggcgggcgtgaaggcggcctccgggcccacaatgaaggccacgag

SEQ ID NO: 79533 - DNA, 122 bp, Homo sapiens
gggcggcgttgctctgcgctctgcggctgacggcgcttttgtctccggtgagttttgtggcgggaagcttctgcgctggtgcttagtaaccgactttcctccggactcctgcacgacctgct

SEQ ID NO: 79534 - DNA, 122 bp, Homo sapiens
ataaaacgaaacaaaaaacaaacaaaaaaacaaattctccctatgctcttaggcagcgtccggaaacagtacaatccacggatattcagtgtattcagacagggttgtcttttactttcagg

SEQ ID NO: 79535 - DNA, 122 bp, Homo sapiens
cctcccgggccgggcttcccttaaccgtggcctcagggctgcgcggggccaccgcatgaacgctgccctgggtccctgtcgcccctcagacagacacgggatcccaccctcccccgcccccc

SEQ ID NO: 79536 - DNA, 122 bp, Homo sapiens
tttctcaaaacattatgagattttttttgtgattttttttttttttagctgatcagctgtcgttactgtgttttatgtgtggcccagggaagccaaaagatcagacaccctgtcctagacag

SEQ ID NO: 79537 - DNA, 122 bp, Homo sapiens
tccgccttggcgtatacctcccgcactcacggcctggcctccggaggctagacggttcgccgcgctggggaggccccctcaaccctcaagtgccagggctctgtcgcctccccacacccggg

SEQ ID NO: 79538 - DNA, 122 bp, Homo sapiens
cgcagtatggggtgcaggaacgcagcatggggtgcagggatgcagtatgcggtgtagagacgcagcatggggtgcggggatgcagtatggggtgtggagacgcggcacgggatgtggagacg

SEQ ID NO: 79539 - DNA, 122 bp, Homo sapiens
gggtcagagccggaacctggggacattctggccgatgctcttggcggccaggagagggcgcgcgcggactcagcggccgcccgactgcctcaccaggacctagaccgtgccggccgccagga

SEQ ID NO: 79540 - DNA, 122 bp, Homo sapiens
gccggcacctagcaactgacggcctcgcacggaactgccatcctgtgagggcagcggtggcgcccggcaaagttggagcccttgcggtaccagaaagcagcgagagcgagacctgggagcca

SEQ ID NO: 79541 - DNA, 122 bp, Homo sapiens
aaaacaaaccaaaaaaactctttccatttatgaaagagatctggagcctgaaatcatctccgggtcgaggcgtggagagagtgggagaggatccgagggtatggaaaggaccccgagccccc

SEQ ID NO: 79542 - DNA, 122 bp, Homo sapiens
cacaagacatcccagccgtggcacgtgcactctcatacagacgcaacgtcaccattcgcacggtagggcacatccttggctctatcacgcacataatattgcacacaccccctacaccatgt

SEQ ID NO: 79543 - DNA, 122 bp, Homo sapiens
agcctagtcacacctgctagagattcagtcatttaatactgaatgtggggaaagaaaatccgattggccagggtgggtgagaaatccagccctgactcagttgaccatagcgccagtagggg

SEQ ID NO: 79544 - DNA, 122 bp, Homo sapiens
tcagctcctctcctccctgaaccccgacagcgaggtgtcttacgcttcggcattctcactcgcctgactcagacttgttagttttccagagcaactcatgtggccgccgtctagggagttta

SEQ ID NO: 79545 - DNA, 122 bp, Homo sapiens
gggcgtggggcgggtgggccacagggggcaggccgtgggacagggacatggcgctggggacgataccttccacagcagctgggatgccagtgggggccacgcccaccacgcccggagggtac

SEQ ID NO: 79546 - DNA, 122 bp, Homo sapiens
aaaatgctcagggaggccagagaaagacccgcccattgcaggaaccctgaggacttcaggcggctgctgttgggaagggactttttccggcagtcccatcagctctcaggttccccttttgc

SEQ ID NO: 79547 - DNA, 122 bp, Homo sapiens
ctcctgccgtgccaccttccgtgccgatttccctacctaacacggggccagggaaggcagcgagcgcaataaatcagaacacaggtgcccattaacctgccgtgaggaacggtcagagagcc

SEQ ID NO: 79548 - DNA, 122 bp, Homo sapiens
tttccccaggttgctcagctccgtgcctgctctccgctcgcccatcgatggggtcctgcccggcactgccctgtcgcagtcactcctgctgcctggatctctgttcagagttgaactacagc

SEQ ID NO: 79549 - DNA, 122 bp, Homo sapiens
agagtgggatgtggagtgcggggaggccacaagtaacagtaacagcagcactttttctgacgtgtttgaacatccttaactgctgttttttttctctctacagcgtcggaataaagttgttg

SEQ ID NO: 79550 - DNA, 122 bp, Homo sapiens
agtgaaactccatcttaaaaaaaaaaaaaaaaaagaagaagtttccaggaagagaatttccgttcaagttgtaagtcaagtccagaacctcaagagctggcagagagcagaagcctcgtggc

SEQ ID NO: 79551 - DNA, 122 bp, Homo sapiens
gcaatgaaataaatagaattgcatttttcacttggcgtcaagacggtggagacacacccacgtacaacttgaaagcaccttgtttgcttccttttaaagagaggcggctgatcaatcagccg

SEQ ID NO: 79552 - DNA, 122 bp, Homo sapiens
ccttagttcacattctatccttaatgcttactaccactctgaccttttacaattacttaacgtcttcaagcttttatttccctttttgtaaattgactataagaatacatatctccttttga

SEQ ID NO: 79553 - DNA, 122 bp, Homo sapiens
gtgggtaactagcctcccgtcttctgcagactggcagaagaccgaggcccagaagcgacgcgaacagcttctgctagatgagctggtggccctggtgaacaagcgcgatgcgctcgtcaggg

SEQ ID NO: 79554 - DNA, 122 bp, Homo sapiens
atataaacgtaaataaattagtctatatagaataaaatttaacatccagttctgcagtcacgctagccacatttccagttcaagagccacttgtatgcagatacagaacatttctgtttttg

SEQ ID NO: 79555 - DNA, 122 bp, Homo sapiens
ccattcattttgcactaatataaccactaaatatagctctaagacactgatgattaaaagcggctaattatgtgagtgattcatacctcctatgtccaaacaccaagattcagggatgtctg

SEQ ID NO: 79556 - DNA, 122 bp, Homo sapiens
caaatacccagcgctgctcaatgttactattttaataactgatgggtttcccggggcagtcgagccacccccccaaagccgacctccgggagagatctttagctggacgcctcccgcctttt

SEQ ID NO: 79557 - DNA, 122 bp, Homo sapiens
ggtataggaaaaggaacacacggggccaaccagacgcgggagaactatgggaggtggagacggctccttcacatggcaaagaggatgagaaaggctaccatcagacaaaagagccccatggc

SEQ ID NO: 79558 - DNA, 122 bp, Homo sapiens
cccccgcccgccccgaaaagcgacccctagtggtgcaccggtgcggaccagaaaattgcacgctttcttgaaagaggcatttaccgagcgcccaatgtatgcctggcactgggctgggtgct

SEQ ID NO: 79559 - DNA, 122 bp, Homo sapiens
aggcagccacgcctgtgctctttggactctggtgggtggggaggcttcctggtcactaaccgctcaacatcaacctggacctgcggcagtgtctgtgctgactggcgtccccagcttagcta

SEQ ID NO: 79560 - DNA, 122 bp, Homo sapiens
ctcggcgcgcagcgcgccgccgcccgtaggctccattgaaccgctcacgcgccgctcacgcgcaagtcccgcctcccagcgctgccccgccccccgagcccacgcaggcgctggactgctgg

SEQ ID NO: 79561 - DNA, 122 bp, Homo sapiens
ggcacagagaagtaaaggtaggtacagacccaaattcacacaagataatgacatcaccagcgtttaagttgatcatcaaaggctgggctggatttgtcttgctgtatgtgtcaggaaattta

SEQ ID NO: 79562 - DNA, 122 bp, Homo sapiens
acagcatggattacattaacaggcctccctgggtgagtagcgtctctttcgcctaccttacgctcaccccatggttatataaccttttgaacggaatttggaaattcttctgaccctgtcct

SEQ ID NO: 79563 - DNA, 122 bp, Homo sapiens
ttccgctaggagccctccacgctgggggatcctggcgcagagacagcgctgggctactggcgaggctcgcttaaaaagcgtccgtaccccagggtccccgtttgtgggtagaaattcagtct

SEQ ID NO: 79564 - DNA, 122 bp, Homo sapiens
ggacttcaagaatctaccaaaagaaaagcatctcttgaggagtaacttaggccagttccacgttgaagagaaaagtaaacgcctatcacagcagctctacaggattaggaaccggggcaatg

SEQ ID NO: 79565 - DNA, 122 bp, Homo sapiens
acctttcaatgaaaatagaaggaaattagaaattagaaccaagatctcaggccagagccacgagttatgaaaaattattcccaggtcctaagttccactctaggaacttctaacattgccac

SEQ ID NO: 79566 - DNA, 122 bp, Homo sapiens
ccttcaagggctggagtcagttaggtaacaggccacgggccccgggctcaggccactgcacggacccagggaacgggctgacagtccagcagaggcctcagcgaggcggcggcgctgcgcac

SEQ ID NO: 79567 - DNA, 122 bp, Homo sapiens
gggtgcgggcaggcttggggggccggcatgtggccttcagcggcctggtgggcctggagccggccacactggctcgcagcctcccccggctgctggtgcaggccctgcaggccttccgcgtg

SEQ ID NO: 79568 - DNA, 122 bp, Homo sapiens
gcgaagcgccctgggaaatgtagtcctagaagaaccagcgcatgtctcgggtccctgacacggagggactacattcccccggattcctcgcgcgccggctgcttggcgttgccgggagacgg

SEQ ID NO: 79569 - DNA, 122 bp, Homo sapiens
tatgtgaattatttaacgtatggaacacccagtgctcatggactgcagtggtcttattttcggacaagttaagtgagagttccagccctgcctttctcacggggacttggataacatgttta

SEQ ID NO: 79570 - DNA, 122 bp, Homo sapiens
cccattgcgtctgggctcaccggaggggctctgacaggaggatgcccacctgggggcccccgggcacatgcgatgctgctccctgctgcgggacgcctcccctttgcctcccccacatcaaa

SEQ ID NO: 79571 - DNA, 122 bp, Homo sapiens
tttgagaagcagttaaggaaacagtgtgccctccatcatattctgttaccgtattttattcggactccaaaggaaagtgtcgcttgggggagggggaagcactttgatgagcggcggccgcg

SEQ ID NO: 79572 - DNA, 122 bp, Homo sapiens
cataacccttccctgtaaggagaagcctcgcatctggcgtctgctagaacatgaaagagtcgtaaaagcagctgtctctcccagctcctctccactctgccagccgggcctaggttcttcaa

SEQ ID NO: 79573 - DNA, 122 bp, Homo sapiens
gttcccaatgactcggggaaggccccagccacggccacattagtgcagccaagatggccacgactagatggctggctcttcacctctgggagaggcacagctggctttgacaatcgtgggaa

SEQ ID NO: 79574 - DNA, 122 bp, Homo sapiens
ggagccgagcgcggcgcggggccgagggactcgcagtgtgtgtagagagccgggctcctgcggatgggggctgcccccggggcctgagcccgcctgcccgcccaccgccccgccccgcccct

SEQ ID NO: 79575 - DNA, 122 bp, Homo sapiens
ctgaacgagggggcagcatggaggcagcaggggccatgctggagccagcgacagtggcctcgtgctgcatgcaacccgggaacacgctacctcactgcccctgcctggccccctccctcccg

SEQ ID NO: 79576 - DNA, 122 bp, Homo sapiens
tgtatgcccctctagagctttgagcagcggggcactgaagcagcgagccgctccccctgtcgcacgccctgcgaaggggacaagagaacttttcccgtttcagaaaaacaaggcatagttaa

SEQ ID NO: 79577 - DNA, 122 bp, Homo sapiens
aattgtagattcaaatgcaatgtaccatttacctagtttttgtccccagtagtaacatctcgtaatacccaggatattgacatgcagagcatttccatccccacaaggatcccccatgttgt

SEQ ID NO: 79578 - DNA, 122 bp, Homo sapiens
atatatgtgtatgggaggcatggatatgttatgaaatcagctggtaattcctcctcatcacgtttctctcattttcttttgttttccattgcaaggggatggttgttttctttctgccttta

SEQ ID NO: 79579 - DNA, 122 bp, Homo sapiens
gattccgaacttaccctttcacttttcacagaacctgtgacatcatcatcattgaggtggcgcttaaacttgggaggcatattttttacttgcaaagtatcttttgcttctcaacaggatag

SEQ ID NO: 79580 - DNA, 122 bp, Homo sapiens
ggccccgcacagccccccgcgcagaggccgcctggccccgcggcctcctcctctgcgaggcgctcacagccggtaccccagctacggaaacgcagcaggtgcgaaatcgccccgagctcgga

SEQ ID NO: 79581 - DNA, 122 bp, Homo sapiens
acctcaaggtgcttcacttcccctgagccctgggactcttcaggagttgtattatgtggtcggtctctcatgtatgcatgttctaccgtaatggagagacagcgtgcaatgttcttttatac

SEQ ID NO: 79582 - DNA, 122 bp, Homo sapiens
agggaatgaccttcctagtgaaggaggcagtgaaggtgtagatgggctctcgggtgacagcgttggtgaaggtcacccagcccacctcatagtcaagagacaccctcacctgccggggctgc

SEQ ID NO: 79583 - DNA, 122 bp, Homo sapiens
gccagaaactgggctggtttcccagggcctgagtgaaggggagagaatacaggccggagacgcagcaggccaaggctgcatagctcagagaagggtaaagatggaccagcagacccagtcct

SEQ ID NO: 79584 - DNA, 122 bp, Homo sapiens
gagttaagagtggattttacatttccaaatgttcaaacaaatcaaaacaattatacttcacgatgctgtgaaatttgaatgttgctggttcatgaataaaactgtacaggaatccagccatg

SEQ ID NO: 79585 - DNA, 122 bp, Homo sapiens
cttcggcagctttgggggcctcgccgccattagcagggacgggggctgcctgctctttctcggggggtcagccttggcctctgcgcgctctctgtcttctcgggctcttccttcggggtctc

SEQ ID NO: 79586 - DNA, 122 bp, Homo sapiens
tctgttagctaaacagaaagaggaatgctttagcaatagctcatatttatggagtgtttacgatgcattggacactgtgttaagtactttacatgcatcagcttgttcaaccctcacagtaa

SEQ ID NO: 79587 - DNA, 122 bp, Homo sapiens
tcatatataactatcatgcaaaaattatgcaccattttaggagtgtaaggcccactcaaacgcaaataatataaaaaagtaacatacagagtgctgttaggaagagaggaaacattctctga

SEQ ID NO: 79588 - DNA, 122 bp, Homo sapiens
attttgtggatgaaactgaagtgatttttccgaggtcccggaagttggaggggcagggctcgcctttaagctgcgcatgtcgaggtcacttcaacgctctgcctgttaccctcttctcccag

SEQ ID NO: 79589 - DNA, 122 bp, Homo sapiens
ggtggccgcgatgatggagatccagatggacgagggcggcggcgtggtggtgtaccaggacgactactgctccggctcggtgatgtcggagcgggtgtcgggcctggcgggctccatctacc

SEQ ID NO: 79590 - DNA, 122 bp, Homo sapiens
gcgtctgtgaagcactcttatccttcgggtgtgtccatgtgtgcctggttactgagtgcgcggccgtctaggtgtcgacccaaccaatggtagtgctcctaacgccgcgagcccacctttgg

SEQ ID NO: 79591 - DNA, 122 bp, Homo sapiens
gattctggagcttcacagaccagtaaagtcacattccttccctcacggagtttaaagtcccgcagggaaggacagttgggtgaacgaaaggcaaacaccaaatggtaaatgcacacttggga

SEQ ID NO: 79592 - DNA, 122 bp, Homo sapiens
caagctctgctctctctatgagaacgactgcatctttgacaagtttgagtgttgctggaacggttcggataggtaaggcctgcgtggagatgagctgtcgccccaagcttgctggtttccga

SEQ ID NO: 79593 - DNA, 122 bp, Homo sapiens
ttgtcaagggcagggggagaggagagaaatcgtttagtggtgaagagttttagttttgcacgatgaaaaacttctagaaactgttgcacaacaatgtgaatatacttaacactattgaattg

SEQ ID NO: 79594 - DNA, 122 bp, Homo sapiens
tctgtgggctgagggggtgtctgtgtaaggactgtgtctgatggcctgcccgccactctccgcaggctctgccactacttgctgagcacaggactggcctccagggatggcctgaagcctaa

SEQ ID NO: 79595 - DNA, 122 bp, Homo sapiens
ccgctctccggctcgggctccggggggatcggcgctggcggaggctgtgggcgcaggaggcggaggcagggcctggcaggcagggaagggaagggagggaggggagagaggggaagcgcgcg

SEQ ID NO: 79596 - DNA, 122 bp, Homo sapiens
gctgcaaacgccggagagttttgtccggagcgcagagacgcgctgtaaccgagcaaccagcggggcccgcccccggcctgctacggcgctcccagcctgccccgcgccgctcggcgccggaa

SEQ ID NO: 79597 - DNA, 122 bp, Homo sapiens
acggagcgcgggaggaagtcgggctcgccgcctgccatccgcggagtccggctctacccgcggggctgggggtgaagtaggttactgcattccttgtcgctcccccaccaaactccttcctt

SEQ ID NO: 79598 - DNA, 122 bp, Homo sapiens
tggggccggcgctgtgcgtcctccagtcgaggtggggcgctgtggaagagcggcagcttccggtcggcttttctcttccttcggctgccggcgccagcacgtcctgttttcgttggccgcgc

SEQ ID NO: 79599 - DNA, 122 bp, Homo sapiens
ccagaaccctcacaatggggggtgcccaaacccctcagaggtggggaagcccccactccacgccaaggggcacagccagcccctagggctctgccacatcgtacacgccgcccaacgaagac

SEQ ID NO: 79600 - DNA, 122 bp, Homo sapiens
ccctcaacacgcagaaaaagctagtggccgctcagctcgcaggcgcagtgggtgggtgcgcgtggggagcaggcgcgcgcagggggcgggaccgggccgaggttcccgcgcgcggcgagagt

SEQ ID NO: 79601 - DNA, 122 bp, Homo sapiens
gaggccccagaccccgcagcggctcctctgacgggtgctgtgaccccgtccgtgtagtctcgtcccaccccaggagactgaggttcaggggggcagggcgcctccaaagtcgggggtctcgg

SEQ ID NO: 79602 - DNA, 122 bp, Homo sapiens
agctggatacctacaagccatccctgtccttggaaatacacccctctcccaattcgctgccgctaagaagcccagacaattggagaggagtggattttccatctgaattatgcagctccttt

SEQ ID NO: 79603 - DNA, 122 bp, Homo sapiens
tcctatttttcacagcacaagctttcaaatactcctaaggctccacagtgaaagaaagagcggtctatcccactggcagagaacaactgctgcctgaaatcacgtggccctcccttcagggg

SEQ ID NO: 79604 - DNA, 122 bp, Homo sapiens
ccaaccccccaccgctttcccagcacatgtgtgtgtgggcggatctcacctcccctcccccgctgctgcatgtgtgcatgtgaacctcactgtgctactactgcaggcatgagcctacccct

SEQ ID NO: 79605 - DNA, 122 bp, Homo sapiens
ctgccccgtgtagccacgagatttcacactgaccctccagtgttgatgcggccctgtgcccgccctggggtattaacggaatgtccatggcgtggaacccccacaactgtctccagggtgtc

SEQ ID NO: 79606 - DNA, 122 bp, Homo sapiens
tcctggtgggccaggacctctaaaacggcgtcatcctgggggccaggacctctaaaatggcgtcatcctggtgggccaggacccctaaaacagcatcatcctggtgggccaggacctctaaa

SEQ ID NO: 79607 - DNA, 122 bp, Homo sapiens
agccaggagggaggggtgggaactctgattgcatcctggagcgagcaactcataaaaccccgaaccctgcctccaaggctttgccccaaggagcttcttaaaacagagccagaattcacttc

SEQ ID NO: 79608 - DNA, 122 bp, Homo sapiens
cttcgccgggagcacgttggaggctggatttcggagagactcgggattggggtctattgccggcccctcctggatccggcttgattttcatattttaagaagattttcttattacctttgat

SEQ ID NO: 79609 - DNA, 122 bp, Homo sapiens
cttccaccgtgggctagcagcctaccctggtcactgacaccacaccatgtaggaaagaatcgccaccaccaagaaggggcctctcacctctgtataggctgtgtgctggctgatgacgtggt

SEQ ID NO: 79610 - DNA, 122 bp, Homo sapiens
ccccaacatctccaagagcccctagagaagaaggactccgggagtggggtagtggctctccgccctgcgtcccaggtccccaggagggacttcggcctatgtctgactctgtgggaggagct

SEQ ID NO: 79611 - DNA, 122 bp, Homo sapiens
gcatgacatagcctgctatcttgttgtggagcttctcgctggggataatggcgatctcctcgcacacgcgcttatccgtgtggaagtcattgcccaggcgcgtgtagtacttttctgtgacg

SEQ ID NO: 79612 - DNA, 122 bp, Homo sapiens
cgtgaggtcctgatgcggttgggcctggacccgactcaggaggactgcgtggccactcaccggatctgccagatcgtgtccacacgctccgccagcctgtgcgcagccaccctggccgccgt

SEQ ID NO: 79613 - DNA, 122 bp, Homo sapiens
cgagagagcttaaatagaattaatctcttagagatcggggatcatcgctccctcggcatgcgctctcccagcgccgcgcacagagcaaggcgcgagagagctcaggaatcgcgggaaggcaa

SEQ ID NO: 79614 - DNA, 122 bp, Homo sapiens
tattatgtgagagagaatacacttacatcttgtttaagccactgttttttaaaaagtgggcgagaagggaaattctagacaaacaggcaggcatgagcaaaggcagaaaactggaaaatgtg

SEQ ID NO: 79615 - DNA, 122 bp, Homo sapiens
ccccatgctaacataatatatagacatatgagaagtttccaaccctactgcagtacatgccgcaagatatggccatattctgggaatttgcaatacttcaaacagtgaattcacagtaaaac

SEQ ID NO: 79616 - DNA, 122 bp, Homo sapiens
gaaatgaatcacagagagttcattaacgggacaaagcctcgcaggggaacaggattcagtcgtagaactcaggcccaaatgactccgcagctgctggcacaccacgtgtgcaagtgcagaca

SEQ ID NO: 79617 - DNA, 122 bp, Homo sapiens
actggtctcggtccggatctcctgaggcatggtcgggagcagccaggccgccggtttgggcgagagggagcttgttgcccccatccaggccgctcattttggaagaagtcagactagtggga

SEQ ID NO: 79618 - DNA, 122 bp, Homo sapiens
acgcctggctgtcgtagcagttgctcaaggccacggagccagggctgttcggcgtgtgggcgcacaatgcactgacaggctgctgagcgagcgtgacacagccaagcacaggctgatggtcc

SEQ ID NO: 79619 - DNA, 122 bp, Homo sapiens
aagatccggtgtctatccccgggtgtcgtaaagaaacaagtaaaagacgcggttcctgagcgggggaggggcctttgggcgaaggaggcgcgtcgttttctcgaagccagagaaatttgtcc

SEQ ID NO: 79620 - DNA, 122 bp, Homo sapiens
gccaacctgcaggaccccgggcttagctgggttctgttctgatgtcgcattttcaaggtccgctgagtccgagccctgcctgggtctggctgctgcccgcccgctctctggactgtgctgat

SEQ ID NO: 79621 - DNA, 122 bp, Homo sapiens
ggacgacttggtcgccggggcgaccctgcacagcccggagtggagcgaggagcgcttccgcgtggacaggaagaaacttgaggccatgttacaaggtaggcatccctcgtgttctcggactc

SEQ ID NO: 79622 - DNA, 122 bp, Homo sapiens
ccaggagaacgggagtaaaaagatttggctgggagcattaacagctgttcttgacaaagccggagcgggggagccccagggctgcacccccgctcccacggcgccaagcacaggtactccca

SEQ ID NO: 79623 - DNA, 122 bp, Homo sapiens
ctccacctggttgcccatcacgctgcggacacacgttcacaccgccgcaaggggagaaagcgaaaccaactccagggtcatttgcacaggtccccggacaggggctgaggctacctgttggg

SEQ ID NO: 79624 - DNA, 122 bp, Homo sapiens
ctggctatcaaccagacggaaaggggatgtgcctgggagtttgatgccaagggaaggatgcggaatgtctgttttctactaagggcttctgctgggcctttccaatgtccagtttgagttgg

SEQ ID NO: 79625 - DNA, 122 bp, Homo sapiens
agcatccctgacgcacacaggtaccagagactgccccccacggccccaaaatcccccacccgggatgcccagaggagtgccctggggacaagtggcacaccccctcaccggggtggctccca

SEQ ID NO: 79626 - DNA, 122 bp, Homo sapiens
cgcccgggtgggagagtgagtgagtgggtgggcgggcagggggcggtcccgccgctcctgcgtcagaaggggtctggttttcgcaccttccctgacgtcaaacctccatcagggttgcaacg

SEQ ID NO: 79627 - DNA, 122 bp, Homo sapiens
tcatgtgttccctgattgactgagcatggcctggctctgcatttggaggtgtgcggtgcacgaatggggacccatcagagaaggcatgtggccctggggctccaggatttgatttctggtgt

SEQ ID NO: 79628 - DNA, 122 bp, Homo sapiens
cttgaattgtgggagatgtagtctcttttgcgcgcctctttgccgtatcccagttaagagcgaggttttcaaactactattcccaggaagacgggggtttcccaggtgactttgcgaaggca

SEQ ID NO: 79629 - DNA, 122 bp, Homo sapiens
gtcgagtccgtgacgtcaaagagcctggaccaatcagagcacaccggactgcgttttttccgaacgccagcagcagggtcagaagggaggtagtcgccctccgtcgtggcctggcgtggatt

SEQ ID NO: 79630 - DNA, 122 bp, Homo sapiens
gctagtctcaaactcctgggctcaagtgatctgcacactaggattacaagtatgagccaccgcacccagcccctttacaaggattttgaccttggtaaggttagtgacgtcagtgatctcag

SEQ ID NO: 79631 - DNA, 122 bp, Homo sapiens
aaagaaagaggcacagggaaacttcacacacacacacacacacacacacacacacacacacgtcacctgaccatggaacagagagagatgtgaacatgctataacactggccttgaagacgg

SEQ ID NO: 79632 - DNA, 122 bp, Homo sapiens
tcctcacaacaacctaatggggtaggcgctactattatccctaaggctgagatgaggaaacggaggcatagtagggtgaggtaacttccccaaggtcacaaagctggtaggcaaaagagcca

SEQ ID NO: 79633 - DNA, 122 bp, Homo sapiens
cgcccgccgccggttccagaggggcgggaccggagcgagagcctgggtggggcgggcgggcgctgcgcgtgcgcagaggtgcggccggggaggcgcgcggaggctggagctggaggcgcggc

SEQ ID NO: 79634 - DNA, 122 bp, Homo sapiens
cccaagctcttaatgggcgggggtgggggtagaaatgtctttttctattgtgtttgagaccggtaatattggggagggggagaacaagtattatcccacgcagtacaccccaatctcccagt

SEQ ID NO: 79635 - DNA, 122 bp, Homo sapiens
gctcttcacgacgggctgagacaggtggctggacctggcgctgctgccgctcatcttccccgctggccgccgcctcagctcgctgcttcgcgtcgggaggcacctccgctgtcccagcggcc

SEQ ID NO: 79636 - DNA, 122 bp, Homo sapiens
atcactgaggctgcatctgccatgcgctcctggtgtgactgcaccctgtcaggccagacccggcttgagccaacttagccaagccagcgtcagtgtcaccagcctcatgggtggagccaccc

SEQ ID NO: 79637 - DNA, 122 bp, Homo sapiens
ctgggccctataaaagacacatccagcttcagcatctcatctgctctgactccccagggacgtgtctgtgctcctgcgtgtgaccagggtgagtggcaacctgggataccagaggggtatga

SEQ ID NO: 79638 - DNA, 122 bp, Homo sapiens
gggcatggccctgagtgccatcgggggactccagaggaagcccctcacccaccacggctgcggagctgtccttgggtctgttgtgagacatgaagacctagaagcagtggaaagttttggtt

SEQ ID NO: 79639 - DNA, 122 bp, Homo sapiens
aggggagggagggcccgggtggtggcggtggctcctctggggcatgaaggccgagccaggcgctagcctaataaaatgccgggtgtcggaacgctcaaaagaaaaccacaaatgaaatcccc

SEQ ID NO: 79640 - DNA, 122 bp, Homo sapiens
tcaattccctgtctttctgaccctgctccagtctcaggggaactcagctcttttccatcacgccatcctaaggacagggatagaatgccattttggggtctgtgggattctaacgggacaag

SEQ ID NO: 79641 - DNA, 122 bp, Homo sapiens
gggatgtgggaatgaatatggtagtgatgtgcactgagggctggagtctgatcgggtagccgctgggagatgggacagggaagcacacacttgccttgaggttcaaattagataacgtacat

SEQ ID NO: 79642 - DNA, 122 bp, Homo sapiens
gagaatctttctcttctttgtaaagtgcagggctgcagtaggtggcctccggggactttccggctccagcatccccttgagtgggcccagggaatatacacagggccttggggccaacatgc

SEQ ID NO: 79643 - DNA, 122 bp, Homo sapiens
acagacctggatgtcattgtgcgggttccagtccgagtcgtagatgatgacagtgtccgccgtggccaggttgatgcccagaccacctgcccgggttgagaggaggaagcagaactgctggg

SEQ ID NO: 79644 - DNA, 122 bp, Homo sapiens
gccggtccccgctgtgccaggtgggcaggcaggagcaaggcctgcgagggaggaacgggccgctccccgccagccgccttccccagcagccgcaggtggtgccagccactccacagagcccg

SEQ ID NO: 79645 - DNA, 122 bp, Homo sapiens
tacagctcctccaccagccggggcgacgcccggggctgcggctgcaggcggcgctgcacgcggaccaggctgagctcgtgcatggtgaggcccagcgcctccaggcagtccccctgagcccg

SEQ ID NO: 79646 - DNA, 122 bp, Homo sapiens
attcagccatatttttcttaaggactaaagtggggttctcttgtttcccccagggctggccgtgcccaggttgcttagcacaaggcctgccctccccagcaaggcccggccagcctttccat

SEQ ID NO: 79647 - DNA, 122 bp, Homo sapiens
cagggatgtgaacaaacctcatctaagctggctgccgggtcctaatgggcaggtccggtccgccctctaggagaggtgctgtccggtgaggcataaaatcccgggattctggctggaggcag

SEQ ID NO: 79648 - DNA, 122 bp, Homo sapiens
cttctaccctagttgctgcttccctccacccacaccatcatccattcttgtccagggtaccgactgaatgacggcttttggcacgaggtgaattttgtggcacaggaaaaccatgcagttat

SEQ ID NO: 79649 - DNA, 122 bp, Homo sapiens
ctgccacgcgtcctcgggggagtgcggtgtgcagaccccacgtgtgggaagagcatggtgcgtctgtcactgggaggggctggacagaggacagtcagcaaacaagaaacaccaagcggggc

SEQ ID NO: 79650 - DNA, 122 bp, Homo sapiens
ttctggatgtttcatgttaatggggctacgtcgcgtgacctcacgtgtggttcctctgagcgtagtgctttccagggcaaccgtgtcacagtgcagatggacgcacggacggcggtgagccg

SEQ ID NO: 79651 - DNA, 122 bp, Homo sapiens
gctgaactgtgttgttccactataggagtggaagtacagtcagccataactctagcattccgtatgtgaagatgaggatagggtaaattctgagaccctaaacttgtattttctgtttcctc

SEQ ID NO: 79652 - DNA, 122 bp, Homo sapiens
aaggcggcgaggggttcattactgccttcattaattgacacctgtaatgaggaaactttccgagagcccagagcgcccgggccaggccgagccggagctccgcggcggccgcctctcgggcg

SEQ ID NO: 79653 - DNA, 122 bp, Homo sapiens
agcactcagaaccgactgcgaagcagctttggtctgtgaggttctgcgtggcctggcctccgtcaccctctcctcacacgggccccatcatctcctgactctctctgctactgtccttcacc

SEQ ID NO: 79654 - DNA, 122 bp, Homo sapiens
ttaggctctccccaggcaagaacagcccagagaaggtggctgggaaggaatgagattttacgggggcagaagttctgcaggaacgaagcctagtgcccaatgtcagcaggtaatgtgggtgg

SEQ ID NO: 79655 - DNA, 122 bp, Homo sapiens
agctaaatcaaatttctgttgttgagaatgattgtaagtgggtagaaactctctatttaacggaatgccaggatggaatcctcctgtgaagaaatcaatccttaatttctctctcttgcaat

SEQ ID NO: 79656 - DNA, 122 bp, Homo sapiens
cgtccgggacgttctgcagccctatgtgcaggaaagccagaacaagttcttcaagctgcccgtgtccgtggtcaacaccacactgccgtgcgtggcctacgtgctgctgtcactcgtgtact

SEQ ID NO: 79657 - DNA, 122 bp, Homo sapiens
tgacgtcatgattcatctgcctcggcctgccaaactgctgggattacaggtgtgagccaccgcacccggccaacctgctgaacagttttgctgtgatggccacaaatttgccagcctggatt

SEQ ID NO: 79658 - DNA, 122 bp, Homo sapiens
aatagaagggggaagtcggagggctgggattgcgtcgctctgagccccccttttcggaggcggcttttcttattcaaaacaggcccacaatgggcttcacagtgcgcctcgccacggcccca

SEQ ID NO: 79659 - DNA, 122 bp, Homo sapiens
cgcctttcgcccaaaccccatgccctctggactatgcatcttaaaggtcatggtcatgggcggtccttatcaatcaaagcatcaggcggagaaaaaaaccccattctgggatatggtgagac

SEQ ID NO: 79660 - DNA, 122 bp, Homo sapiens
aaaaattattccaaaagtccaatcttggccaaacaaacaaaggaagccagtgtaagagcccgcacacgggcgcagcggtgcccatcccagggcgagtgcagaggctgcgcgcggccaccaca

SEQ ID NO: 79661 - DNA, 122 bp, Homo sapiens
cgcgggtcgtagaggtctaccctctctgcagtcccagcatggctcctggagctctctgggcggccgctgaccccgacatcgcggcggcccgcccccagcgccgcgctgcccaatcagcggcg

SEQ ID NO: 79662 - DNA, 122 bp, Homo sapiens
agtcagacgccagatggttccgaaggtcctgcaggctctcggggcaccctacagccgacacgccaacaaaagcttcggagccgccaaccccaaaacggaaacaccggagccacaagctgagc

SEQ ID NO: 79663 - DNA, 122 bp, Homo sapiens
ggcccgagcgtcacaggcgacccggacctcgggaccggggggcagggcgggtgtctgcagcgtcctcgggaggtctcaggccccttgggcagacgctgcgcgtgcccagagggagggatggc

SEQ ID NO: 79664 - DNA, 122 bp, Homo sapiens
gagaaaccacagtaacatctgccgaagcagcgccatcacttatcaagcgcgaccgggtgccgggcgctgctcccagagctttgcaggctccccttgtccagcgtcctcacaacagaggtgag

SEQ ID NO: 79665 - DNA, 122 bp, Homo sapiens
acacagcgaaagctgacccagaaggcaaacaaagctcaccacgctccggaccgggctgcgcgtcactgttgcagactgcaaatgggacctgagaccaccccgagggccccaccaggagctct

SEQ ID NO: 79666 - DNA, 122 bp, Homo sapiens
aatcttcccctttgggggtctggcatctgagggtgacaggggaataaggttaggaaaagacgccaagctgataaggtgaaactaaaataaactactaacttcctgctaagtgactagcagga

SEQ ID NO: 79667 - DNA, 122 bp, Homo sapiens
gctgtcgctctcgggtgcgaaaagctgtgacaccacctggcaccggcgatcagggactcacgctcgacaccagaggaggctcgtccaggaagaataacaaggagccaccgcgggtctctccc

SEQ ID NO: 79668 - DNA, 122 bp, Homo sapiens
ctcaggtgggaatttcccagtcagcaggatgggcactgcagatgtgtgtctgcatgccagcggacccggcaccctccttcctccctgccaaccgcctccacctctcccactcagcagttcac

SEQ ID NO: 79669 - DNA, 122 bp, Homo sapiens
gaaaaaaagatatatactctgacaacctccagatttgctcatttaccaaccagattttatcgagagttgattatacacacattcgttcatttgttcattcaaactagaaaggtttatttcct

SEQ ID NO: 79670 - DNA, 122 bp, Homo sapiens
gctacgggattggggtaaattggcgctggatccagagtgcgcgcgagaggcactggcgggcgggcttggcaccggcgggcgggcttggcaccggcaggcgggcttggcacccacgtgctgcc

SEQ ID NO: 79671 - DNA, 122 bp, Homo sapiens
cccaacacaagagtctcaatgcaagggttgtaacatgccagcagtgtctgtacaagcaaacgatggcactcgtagcatatggagggcgtggggcagtggagctgtgccttcccctctcctga

SEQ ID NO: 79672 - DNA, 122 bp, Homo sapiens
ttggcgggggcagaggtaactttaccagtgattaaatgcaaatgcgacagtccgtgagaccgaagcccctggtagaagccgggaccctcctgcctctggctgccgctctccgaggggcgggg

SEQ ID NO: 79673 - DNA, 122 bp, Homo sapiens
gtaccgtggctcacacccgcacacccgcacagagaccgccccgtcttacgcaggccatcccggtaggaggtgcgagcattcctggcggcatccttgtgcagctttctcccttcagaagcgcc

SEQ ID NO: 79674 - DNA, 122 bp, Homo sapiens
ggttttgattggaacttggtattcaagtgggattacatgacgcctgagcagagaaggtcccggcaggggaacccagtcgcccctataaagtaagtgccagcatccttcagggtgcccctccc

SEQ ID NO: 79675 - DNA, 122 bp, Homo sapiens
caggacggaagccttcccagtcctgcagccacctgcagactctcacaagcacggtgctcccgggagaagaccttgctaccccaggcccaaggcagtcgagagaaaacgggaagccctgaagg

SEQ ID NO: 79676 - DNA, 122 bp, Homo sapiens
aagcgcagggtcgggcctggaaggcaaggtccccgcctccaaatcctacagtttccatcacgaactgtgctacattaaacagcaatggaaccctaggcctagttctaagaacaagctcggcc

SEQ ID NO: 79677 - DNA, 122 bp, Homo sapiens
ggggcctcagctgttgagggataaacatctgtgtcctgtgtagagaccgggctctctgtgcggagggaaaagctggcaactgtgcagggccccaaccccaccaggagaagaggactctggcc

SEQ ID NO: 79678 - DNA, 122 bp, Homo sapiens
ggctgcagtgccgtggtggtggcagcagtggcgggcggcagcagggagacagtcacacctcgctgttttgtaaactgtttctcacagcttgtttgttccgggttagggctggagcggcaccg

SEQ ID NO: 79679 - DNA, 122 bp, Homo sapiens
gaggaggcagcaccgcaggaagcctccggttcatcatcccaaccccatccagtatgcacccggcaaatgtttattgaagacctactatgcgctagacattactgggaggcagcagtgaacaa

SEQ ID NO: 79680 - DNA, 122 bp, Homo sapiens
tgctccgctctccttcagatggcggattccgtatttgcccagacttcctctttaggcccccgcttctttcccgcgtgcctcagggacagtttgccacagccctctcccctccccggtgcctc

SEQ ID NO: 79681 - DNA, 122 bp, Homo sapiens
tagaatgagggtgagggccacgggatgggatcggggaggacctcctccaggccacaggcacgccctccctttggcccaggcccccctttctcgacctgcccagccggggagctccccggagc

SEQ ID NO: 79682 - DNA, 122 bp, Homo sapiens
ttccctgaccacaccctcactgattagacccccatcaccaggacccactaacaagacccccgctgccaggccaacaatgaccatgactccactgaccaggaccttactgacaaagcctcacg

SEQ ID NO: 79683 - DNA, 122 bp, Homo sapiens
tcctaccttaaggcaggtgtgttaatgcccctccctggagcaaagggctgaccaggcctacggcagaaaggtgaaggtagacagacagcctccttcctgctgccagttgggacctgggccag

SEQ ID NO: 79684 - DNA, 122 bp, Homo sapiens
gggcttggcgttctctagagaagtcgttgccaagggcgaggcgggcaggtgaggcactgacgctgggatctgaggcatctggggtatggtggaagccagctgcttccaggcgagcagggtgg

SEQ ID NO: 79685 - DNA, 122 bp, Homo sapiens
ggctttaagttggcctttgttctaccctttttttagtgtatgataaaagttgtgttggttcgttgatcagcatgcaatgaactctggctcttgttaatcaggtgactacagttttgtcctta

SEQ ID NO: 79686 - DNA, 122 bp, Homo sapiens
ctcacaggttagctagcatttggaagcagggcaagagtccgggccagaggcggtggctcacgcctgtaatcccagcactttgggaggctgagccgggcgatcacctgagctcaggagttcca

SEQ ID NO: 79687 - DNA, 122 bp, Homo sapiens
ctctactgtatcctctagtggaaagcactaccattctgagaaccaagatctttagactcacggagactataactgtggtaacagaaattacaaatgccctagagaaaactggggtgatggaa

SEQ ID NO: 79688 - DNA, 122 bp, Homo sapiens
ggtcctgcccactctctaagacctaagatgcagggtctaagtgtctcacctgcgtggcggcggccctgtagttctgacttccagcgtgaggtagccaccgccaggcctccgggggagaagac

SEQ ID NO: 79689 - DNA, 122 bp, Homo sapiens
agcccactctcggggtgaggggagtcgggctccaccccctaaagggcagcagtagcaaagcgtctgtggacataatcctgaagccaccgtagaagggagcttcaggtttagcttagtcgtaa

SEQ ID NO: 79690 - DNA, 122 bp, Homo sapiens
agtcttcccacccgagacagccagactgccttttgggtcaaacttctgaagttgtgcaaacgtatggacaaattaccatgagctgacaggggcagcctgaccatttcctcacataaagtggc

SEQ ID NO: 79691 - DNA, 122 bp, Homo sapiens
taagtgagcatttgtattaggagacttttccaggaacctggatcaggttctaagtgtgctcggtcagggtcagtgcttcattcaccctgttttcccctctagactgtgaggttttctaaggc

SEQ ID NO: 79692 - DNA, 122 bp, Homo sapiens
ctccgtctcaaaaaaaaaaaaaaaaaaattgttttccttctcatgttacaaatgtagatgcgatgtgtttctttcaagcttttgtttccaatgacattagtttaggttttcttttgtttagc

SEQ ID NO: 79693 - DNA, 122 bp, Homo sapiens
ccgatgcctccgggctggcgtccctgaagccctcgctgggagcccgaacccgcccggacgcggtgcatgctggaacttgtagtcttcggcgctgcctcgccgccttaatataataaacctgc

SEQ ID NO: 79694 - DNA, 122 bp, Homo sapiens
gtgctgatcattaaccaggaggccgtataaggagctagcggccctggcgagagggaaggacgcaacgctgccaccatggacagtagcacctggagccccaagaccaccgcggtcacccggcc

SEQ ID NO: 79695 - DNA, 122 bp, Homo sapiens
tgggcgaggggggtgggaggcccggtgtcacctgtggatggatccacagccctgcaattgcgtgttgcaaagtttgcccggccccgcattcattttgaaggttcttggcgatgcctcgactt

SEQ ID NO: 79696 - DNA, 122 bp, Homo sapiens
aaaatacccagggtggagctaaaagtacagacactgctcaacttacccctggctgcggcccgataaggccgctgagagtggaaaatgactgagtccacctgactaccgaatagcacagcgtg

SEQ ID NO: 79697 - DNA, 122 bp, Homo sapiens
caaccctccaggccacaggttgagcaaatgctacagccatggacagggagacactcctcacgaaggggtggtcctcatcctttcagatcaacttcctgctggaggctccaccctcaccacgt

SEQ ID NO: 79698 - DNA, 122 bp, Homo sapiens
gccagagaaggactttaaaccttcagaggtcaaagggaaacccactggggtctgaggggccgcgcgcgcaaagccgggagggggagtttctggggcaccggcaggggtcgttgggccgactg

SEQ ID NO: 79699 - DNA, 122 bp, Homo sapiens
ccactccaaattccaagaatttattgaggttgatttactggtgggtaaagaagtaaatctcgccaggcatggtggctcgtggctataatcccagctactcagatggctgaggtaggaggatt

SEQ ID NO: 79700 - DNA, 122 bp, Homo sapiens
caacagcctggaaagagctgggtcccctgcacttctctgagcccctgtgtgtgtccttctcgcgttctctactttggagaagcccccctccaacacccactaggtcccaggcatcagtaagc

SEQ ID NO: 79701 - DNA, 122 bp, Homo sapiens
tctctgccatctagaccagaggttcagtggggggccaagcagggtgtggggggtcggatccgagtcggcattcccatagagcagactcaacggcgtgaccttggaagaacctcactgtgaag

SEQ ID NO: 79702 - DNA, 122 bp, Homo sapiens
aattgcctaggcccctggggcattggaggtcctaccgcagctcctagtaggtggtgggggcgcagcggctgtccccactcagtcctggtggggtcgcacgtaacggtcctgagctatgcata

SEQ ID NO: 79703 - DNA, 122 bp, Homo sapiens
cccggacacccctgctcctgcccctggacattctcctcctggcactttgagggcttcatccgtcaggggaaccgttccccacgagctggggatggccccggagcctgtcctgttttcccggc

SEQ ID NO: 79704 - DNA, 122 bp, Homo sapiens
gtcttgttctgtagagttttagacttttagaatgctggagataatataatcaattgattccggcatgataatgatattttgcagtgttccatagcataaagaaggcagcatttatgttaaac

SEQ ID NO: 79705 - DNA, 122 bp, Homo sapiens
caagagcccagcccggccctacaggaacaccaagcaacaggcaccctgttcctcacgtcacgtgagccagacgggacaccacccacatgcaggctgcacggtccacacacacgcctcggagg

SEQ ID NO: 79706 - DNA, 122 bp, Homo sapiens
taagcccagaatctcttctgttccaaccgtctatttcttaagccccgcttggggcccaggcgctgccacaggccgaagggcgaggttcgggccgaggcagcccacgcccgtcctctcctccc

SEQ ID NO: 79707 - DNA, 122 bp, Homo sapiens
gcgttccattagagggcaaaaaggactgtgcagatgtaagcctggaatcttgagcggggacggaagcaacccaagtgtacatcagtagatagataaatggaggcagaaatgtggtctatcca

SEQ ID NO: 79708 - DNA, 122 bp, Homo sapiens
catttgctgtgcaactgatgaagcttcaggacccctgaatccacagactcccccctttcccggagaggccctagcaatgtgttcctgtggccaaatgtttttgtaaaatatgcaaaagttga

SEQ ID NO: 79709 - DNA, 122 bp, Homo sapiens
actacatttgagctattcttacctctaacttttaaaaacacgtgaatgactttttgacatcgttcattcattcaccagtatttgctgagtgccgctcatgaagtgccaggccccttacccca

SEQ ID NO: 79710 - DNA, 122 bp, Homo sapiens
ctggggccggcgtggcgcggccactgctccggagctgcaggcttctaggcgctgggagggcgaagcaggagagccggttagtccatccccgcgctccgcaaacttttctaaccgggtaacaa

SEQ ID NO: 79711 - DNA, 122 bp, Homo sapiens
cctacacattcctctaagagaagtcacaccccgtgatgctagatgggtccaccctgcagccgttttcaaaggctcccaagtggtttcctgcctctgcctctcctgtgacatagctagcaact

SEQ ID NO: 79712 - DNA, 122 bp, Homo sapiens
gccaggaggctggcgtgggcttgccggtaggcgcttctgagctgggtgggctcgccttctcgcccttcctcctctttccttccttgtttcccctaatgacccgggcacttattctagcccag

SEQ ID NO: 79713 - DNA, 122 bp, Homo sapiens
cgcgtcccgcgtcccgcgtcccctgctcacccggtggcaaagccggcgaggaggcggcggcgctggtggggactgacccggcagtccgagaatccaccgcggccttttcacccaaccgcccc

SEQ ID NO: 79714 - DNA, 122 bp, Homo sapiens
ggggaaggcgggtctctggaacagtgagagccagaagcgcggaggcggctgctctcagtacgcgggctccgctgggcgtcccgactggccttcattccacccccggatctcccagactgggg

SEQ ID NO: 79715 - DNA, 122 bp, Homo sapiens
gacacgactgctcagagaggtaggcacactcaggcaggcagaggtggagggccaaagacccgcagggacaggacagccagccagaagttccaggcaggaacagggcaggttcctgcgggcag

SEQ ID NO: 79716 - DNA, 122 bp, Homo sapiens
ttttcgtgggggtggggttgcgacgcagagtttaccatatttctccagggttgctccggccgcagaagttggcaaggttgtgtgtaaggtcgggtggggtggggtcagctctcccgattaat

SEQ ID NO: 79717 - DNA, 122 bp, Homo sapiens
agtgaaatccaggacttctgacatgtagtcctcatttccatccatttaaggactccatatcgctaacttcacaagtgcttcatgagaccatttccatagcacttccccttaggacacctcaa

SEQ ID NO: 79718 - DNA, 122 bp, Homo sapiens
tccctgccctcccccagcctcgctccacccaaggtacaactaaatacccgtttggtttcccgggagatttttgtgttccctaaaagagggggtacccaggtctgtctgtaaaccctcggtgc

SEQ ID NO: 79719 - DNA, 122 bp, Homo sapiens
tgtgccatctccctcctacctatgaatgtcacgggtattgttctggacccagggaaggctcgctggtgcaaatgctttccaaaaacaccgagagtcgctctctctgctgctggtggagtctg

SEQ ID NO: 79720 - DNA, 122 bp, Homo sapiens
actgacttcaaaattgaagccgcggaccctcgcagtgagtgttacagttcttaaaggcggcgtgtccggagtttgttccttctaaggttcggatgtgttcggagtttcttccttctggtggg

SEQ ID NO: 79721 - DNA, 122 bp, Homo sapiens
gtgttgtataatgacattttagtcaatgacaaaccacatgtaagtcagtggaccataagacgattatggagctgaaaaattcctattgcttagtgacatagccattgtatgttagggtaatg

SEQ ID NO: 79722 - DNA, 122 bp, Homo sapiens
ggctcctggggttggccacgggtcattcgtggttcccctggagccttgcggtgtatagagcggcggctgccagggggactctgtgcctcaggcctgtcggttctcgtagaagagtgtcagga

SEQ ID NO: 79723 - DNA, 122 bp, Homo sapiens
gcatgcgttttcccctcctctctttatggtatgacccgggagagagggcgtgaactctgtcgaccagtcagagtgacacaccaaagcttctgaaccaatcagcggggcggtcctgcggcagc

SEQ ID NO: 79724 - DNA, 122 bp, Homo sapiens
ggaggagaagggggagggactccctggggaaggggatttggggaggagctgtctgggcttcgggagtctgagggaggggtatgtacaggcacacagacacacaagagacagaagagacaaaa

SEQ ID NO: 79725 - DNA, 122 bp, Homo sapiens
agcccggcgagcgcaggagtgagcgcgaggtgagcgctagaagaggcttggcgctccccgcgctcccagggtcagccgccaggggaggctgcgccgcccgcccagacctgcacgccctgcgg

SEQ ID NO: 79726 - DNA, 122 bp, Homo sapiens
cccctcaccaaggctgggattctgacccggtcggagagggtgtggctactgcccattacacgtcacaaaggaggtggccaggcgttgctgggctgcccaacactatgaactgcacaaagatg

SEQ ID NO: 79727 - DNA, 122 bp, Homo sapiens
ttccagcatggtcagcaccccctctgctacacacattcccctcgtgaggggccaggggtgcggccctgtgaccaggacagccattcattgggtgactttgagccaccactggcccctgacct

SEQ ID NO: 79728 - DNA, 122 bp, Homo sapiens
tcctgatttctctgaaaaggctcgatttgaccatgagactgacgctttgctttcttgtcgcgtgctgacgtcacatacgtgcttatgcataggcgagggccacatgcatcctcgtttttgct

SEQ ID NO: 79729 - DNA, 122 bp, Homo sapiens
ttttttttgtgagacggagtctcactctgtggcccaggctggaatgcaatggggcaatctcggctcactgcgacgtctgcctccccgggggttcaggcgattctcctgcctcagcctcccga

SEQ ID NO: 79730 - DNA, 122 bp, Homo sapiens
tgcccaccgccactggcagagatcacccctcagacaccctggggcctaatgagacctgatcgccctctctcttctccgaatatgaaaactctgtacctccttggaggccaccacgcacaagc

SEQ ID NO: 79731 - DNA, 122 bp, Homo sapiens
acgtctggctgtaactcgcctccttctgccgtgcttttggtagattcagtaaaacatgcacgtccttggagattccatcgccgcaggagtcattccttagctgtcggctgcaggctgtgagg

SEQ ID NO: 79732 - DNA, 122 bp, Homo sapiens
aaaaaaaataataaggttctcctgttaactttgagcataatgctggttacattccatgtgcggaagacatctgtgtgatgccctgtgtggccagaggtagaaaggccaaggtgctgaagagc

SEQ ID NO: 79733 - DNA, 122 bp, Homo sapiens
cttcttattttcgtagaatttaatgatttccctgctgtggaaaaatatttccagcagggccgggcgcggtggctcacgcctgtaatcccagcactttgggaggccaaggagggctgttcact

SEQ ID NO: 79734 - DNA, 122 bp, Homo sapiens
agacgaggtagattcagggctgggacccgggaattctggccccgggctccttcccttcctcgtgttgcggacactaactcggctcgcgtgtcccctcatttgaaaggggccctgccaccatg

SEQ ID NO: 79735 - DNA, 122 bp, Homo sapiens
gcttccccctcgttgattgggccccttccccttccggaatccaagatggtggggggggggcgggcttccagggcaatcggagcttcaattggtggaatgcaggccctttgagctgaaggaca

SEQ ID NO: 79736 - DNA, 122 bp, Homo sapiens
aaagcagattctcaggccctctggaaactggattcatgggctgggtggggtgcctggatgcgtgaggcaggccgcacagaagctggcagtcagcttggtgaagactagggactggaagaact

SEQ ID NO: 79737 - DNA, 122 bp, Homo sapiens
ggcaggcgcggcggcagcggcggcgccccgagccggcggaggcgaggggggggaagatggcggacgtgcttagcgtcctgcgacagtacaacatccagaagaaggagattgtggtgaaggga

SEQ ID NO: 79738 - DNA, 122 bp, Homo sapiens
aaccattcaaatgatcacaggactattcctagccatacactaatcaccagatgcttcaaccgccttctcatcaatcgcccacatcacctgagacgtaaaccatggctgaatcatccgctacc

SEQ ID NO: 79739 - DNA, 122 bp, Homo sapiens
acccgcgcggcgcgctgccctgggccgccacgcccgcctcctgcgcccccgcgcagcctgcgggcgccactgccttcggcggcttctcgcagccctacctggctggctccgggcctctcggc

SEQ ID NO: 79740 - DNA, 122 bp, Homo sapiens
ccggacccagaggcactggggtagggctcggcagggcgggtccgggcggagcgcggggtgcggagggcggaggcggctccggcgcccgctctgcccgccgctgggtccgaccgcgctcgcct

SEQ ID NO: 79741 - DNA, 122 bp, Homo sapiens
ttaaaaaaaaaaaaaaaaaagttcaaaagggctgaaaaaaaatttttttgacccaaatttcgtggagggtcagagcatgagagagctgaagcactcttatgttaagaagattcttgggacac

SEQ ID NO: 79742 - DNA, 122 bp, Homo sapiens
catcttcgttttggtctttgggcctccaaagaccaaaatcaggcttttgaacaatgttttcggagaacaaacaggaggttgccacgagccatggcaggatgaatgtctggtgttttaagccc

SEQ ID NO: 79743 - DNA, 122 bp, Homo sapiens
ctcgcacgccggggctggggcgctgggcagggcgggcgggcgtggggtcccgggtctcctcgcacctagccgcgcgagccgggctcccgggctcaggggaggggagctgaggggcggagtca

SEQ ID NO: 79744 - DNA, 122 bp, Homo sapiens
ttcagcttcagcttcagcttggcctcattcatttgaaaataaaatgtttacatgaggccgcgcctgtgtccagctgaaagtgggtccttcagagcgtgtgggggattctctgccggcttgat

SEQ ID NO: 79745 - DNA, 122 bp, Homo sapiens
ttgggggaagacccgaccaggaggttgggggatgcagatagaatacaggctccacacgcacggatgtgaaacagaaacacactggccagagggcaggagccgcctaagcaactccggaaaat

SEQ ID NO: 79746 - DNA, 122 bp, Homo sapiens
cactgcattgtgtgtgtaattcagatagcaacaaattcacagcaaaattatttcaggccacgggcttgtggggttgctcataatagctggcccaactcctgtgacactaggatagccatctc

SEQ ID NO: 79747 - DNA, 122 bp, Homo sapiens
gacagcgtaggcgtcagccccgtgcccggcgccgggtacccgctcccctcggcccgcccgcgggacccaccttgtacagccgctgctcgtcaggaggccgcttgaggatgccctcgacgatg

SEQ ID NO: 79748 - DNA, 122 bp, Homo sapiens
ttgcagccccactgctccttctaacattttgtttgtttttgagatggagtctcgctctgtcgcccaggctggaatgctgtagcaagatttcggctcactgcaacccccgtctcccgggttca

SEQ ID NO: 79749 - DNA, 122 bp, Homo sapiens
tctccattttcccctcaattcctccccattctgctacaataacaaaacaattctcacctccggaagatcccgcctctgcctccgcacgagcctttcaggaggtctgaatgtctggtccaccg

SEQ ID NO: 79750 - DNA, 122 bp, Homo sapiens
ccggggccggcgcccagagttccgggagggtgcaggcaggagagggaaaggcagcagcggcggcagctggaggatgaagaaggagcatgtgcttcactgccagttctccgcgtggtacccgt

SEQ ID NO: 79751 - DNA, 122 bp, Homo sapiens
ctaagtgaatgaatccatgaatcagctccatagccgaggggtagaagaagcagccgtcttcgttaaatgggctgttggcagttgcggctgactgctctacccctcgcaggcccgcctctggg

SEQ ID NO: 79752 - DNA, 122 bp, Homo sapiens
atattatttgaatgctgaataggttaaaaggccatgttgaagtaccactcacacccacaccgccctgtctaaatcttgaccttctcaggaatcaaaactaacatttgttgagagacctttac

SEQ ID NO: 79753 - DNA, 122 bp, Homo sapiens
tgaatccagcccaattaaaacggtttgtaaacagtaacatcgctcttcaaagctacacaacggaattgagagtctctataatgattctttacagttttagtacacaactttaaaattcatga

SEQ ID NO: 79754 - DNA, 122 bp, Homo sapiens
gggaaaggggtgacggacaggcgtgggggccaatgggaggcacctgtgggggtggcggggcggagccggggctggggcggtcccgaggacgcggccccgcccctcgcttccccagggctggc

SEQ ID NO: 79755 - DNA, 122 bp, Homo sapiens
ccgggcgggcgttggtgccgtgtgccgaggcgccctgtcaggcgatggggagcggctgggcggggagagccgacggccgcggcggcgcctgaggaacgcagccgggctcgggagcggcgagg

SEQ ID NO: 79756 - DNA, 122 bp, Homo sapiens
gtggcacgttcatttctcggatgtggaaaccattgacgtctgtcttgatgcatttccctgcggtttgcccacactccctgtgggcaggaggagttagagtttgccatcatgcggatagaagc

SEQ ID NO: 79757 - DNA, 122 bp, Homo sapiens
gaccagtacatgaatgagggagactgccagatcctcatccatcacatcgcccgggccctgcgggaagacctggtggagcgcatccgccagtcaccttgcctcagcgtcatcctggatgggca

SEQ ID NO: 79758 - DNA, 122 bp, Homo sapiens
ctcggtctgcgggtccggaggatgggctggcggcccgagccttcctcgcacctgcgggcgcggacccacccgaggccgccggctccggctccggctccctgcctggcccctctgcccagcag

SEQ ID NO: 79759 - DNA, 122 bp, Homo sapiens
ccccggccccctccccgcgcgccgccccagccaaagtccggctccgcaccccgcccggaccgctcttaaatcgccccagcccggccggccacgctgccccagccagccccttggcacggcgc

SEQ ID NO: 79760 - DNA, 122 bp, Homo sapiens
tgctgtgtgggctcattccgctaactaggcctggcctgtgccgactcgctccagcaaactcgagtgtcgcaacacactctgtgtgcttcagagcgagtagaggctttaaatgttactctctc

SEQ ID NO: 79761 - DNA, 122 bp, Homo sapiens
ttctttgttcagtcgcgagactctccctcccctcccccctattgtgcaacaccccatccccgggacccgctgcagtcgctcgccacactgcagtcccctgggcagaaggccctccctggcgc

SEQ ID NO: 79762 - DNA, 122 bp, Homo sapiens
aagccattcctcaaacacggttctggggttgaatgatgcgtgtttgtaattaacgcacttcgacagcaggtatctcccaacttcagcatagtgggtgctcagtgaatattggcccaaatgga

SEQ ID NO: 79763 - DNA, 122 bp, Homo sapiens
agtgttcggagaatgcaggatgataacatacaactcacagcactgttgtggtaaatggcacgcagcaagcaatgaggagcaaggctgagatgacggtggacacgcacccaactgcgcaggtc

SEQ ID NO: 79764 - DNA, 122 bp, Homo sapiens
caccgggtcaatggcagcccccacacaattggggaagccaaaggagagccactctcccagcggcctccacggccccagcgcaagacctgctgggaattgtagtttcctgcccgccccgcctc

SEQ ID NO: 79765 - DNA, 122 bp, Homo sapiens
tttcaatgtgagctccgggtgggcaaggacttggttttgctcagagcctgcacttggaaacgggccttgcgcttggtaagactccatgagtatttggtaaataaacaaatggtttctaaccc

SEQ ID NO: 79766 - DNA, 122 bp, Homo sapiens
tgtccccgctgctggagctgcgcgctaacgggctgctgccaacctaagtgcagcgccccgcgcctggctccaggtggactccagggcaccggctttatttctggtgcactcctctcctgaga

SEQ ID NO: 79767 - DNA, 122 bp, Homo sapiens
gggccctggctggaaactcgcaggccccgggcagcctgggccgcaagtgcgatgaagaagcggggcccggcgcgcacatgtggttccgggcaggagccccggccgcctcgtgcccttcttct

SEQ ID NO: 79768 - DNA, 122 bp, Homo sapiens
ccgccgggcgtgctttcggaaccgcttttgtctttcaaatgaacgcccagcgacagcagacgggagttccaggaccttagagaccggctaatgcttctctttaagttaggaaacaggcgcag

SEQ ID NO: 79769 - DNA, 122 bp, Homo sapiens
cccgtctccgggcttctgaatcacttcctcctttctgatgtgtctctgagcttgagattacgaagttgctgagaaagtcttgcctctcagggcagcttcctgcgagcgggcgagcgagagag

SEQ ID NO: 79770 - DNA, 122 bp, Homo sapiens
ttggctgatgcaacacagctcagaagttgagtccaagcaccaagcccgcaatgtctgcgtcggccgccaggggtcactcctcccgcgcagaaggcggccttggagcctcgcaaccgcagtat

SEQ ID NO: 79771 - DNA, 122 bp, Homo sapiens
accccttcccatcaataatgtccccccgacagaagggaacgattctgacttttatcattacggattaggttttgattttcttgaactttacatagatggaatcataaggcatgttttctttt

SEQ ID NO: 79772 - DNA, 122 bp, Homo sapiens
ggactactagcgcacttccttacaattagaaagtgaaaaactgggtcagccctagagtcacgcaataatgctgcgtcacgaaactgcgcattccaagagaaacttttctcaggcccagaatt

SEQ ID NO: 79773 - DNA, 122 bp, Homo sapiens
ccttgtgccagcctggctgactgtgccacgagttacctgcttgtctcgagtgaagaatagcgctccggcaaaacctggaggcagcgctggaaaaatcgcacgtgccgatcccgtaagaaatc

SEQ ID NO: 79774 - DNA, 122 bp, Homo sapiens
gaacaagccatagctcaggaaacagtgaaaacagaaaactaagaggggcctgcccctactcggtagtcaagcatactacagaaagcctctacattcacaacagcctggttttgtaccactct

SEQ ID NO: 79775 - DNA, 122 bp, Homo sapiens
ggtctccatgcatcacgccggggaggggctgcggcgggcgccgggcctccagcgaactgccgccaccgctgccctgccactgctgctgggctggagctgctatgcctggccccgcctagagc

SEQ ID NO: 79776 - DNA, 122 bp, Homo sapiens
ctacccagcacaggcccggcctgaggggacctaaggggggtcttgtgggtgagggctgcccgggtgacccccgccatccctgccagctctcagaacgctacgggccggtgttcaccgtgcac

SEQ ID NO: 79777 - DNA, 122 bp, Homo sapiens
ggaggcccttctaagccatggattgggattattctttggcttctctattatatttggttgcgaatcactcagaatcagcatcttgcattcagtgctttaggtcttttgatagaaatggtgtt

SEQ ID NO: 79778 - DNA, 122 bp, Homo sapiens
gtgtttgttagttcccagtggcttgctagaggcaggttttacaaccccatgaggcacttacgctggggtttcaggaagaagtgggtgaggggcaagtggcttggtgagcctcgctttgaact

SEQ ID NO: 79779 - DNA, 122 bp, Homo sapiens
ctaccgccccgcgtccgaaaagccgcgggctgggcggtgtgggaaatggctttttggctccgaggccaaattgctcaatgttttggaccgactcgcctcgccgcggtcgctcctgacaagaa

SEQ ID NO: 79780 - DNA, 122 bp, Homo sapiens
cactggctctcagggccctgcttgccagagcctttcccgaccgatgaattcagggctgcacggttgctgcgtgcggagcagacgtggacgctctcgtgtcgtcatgtcgagccacaggtgct

SEQ ID NO: 79781 - DNA, 122 bp, Homo sapiens
tacgtacttgggagcacagtctctcccttagtttagggcggagctatcagtcctgagatgcgctttgatgatgacgtagaatagagtcgtccaagcctagctacccgagcgctcccatggta

SEQ ID NO: 79782 - DNA, 122 bp, Homo sapiens
tgacttccttccttctcgcggagaccgagttacgcgataggcctgtgagggggcggggcccggcgcctgttcgccgtgttagtggccaatcggcagccaggcagggtgggcgcgcgtagggg

SEQ ID NO: 79783 - DNA, 122 bp, Homo sapiens
aagcccccagggccccggccctcgcgcgtaggggactggagaccctgcgcgtctcctccgcgccttcctgcccggcgcctgcacctgctccccggctctcgggcccctggctggagcgaggc

SEQ ID NO: 79784 - DNA, 122 bp, Homo sapiens
ggaaacttggatgcaggaggtttgtgtgtgggctcagggcaccagcatttaaatgcattccggggcatgttcatcatcaagagctttagggaccagtgtgttagcacaaaaggagaagcagc

SEQ ID NO: 79785 - DNA, 122 bp, Homo sapiens
tagggaaacctggagggtcagccagtccatatcttggccctggagagcctgcactggcaccgttttggaatgctaggacctcaaagctactatttaaaggagcttcttaactacgattccac

SEQ ID NO: 79786 - DNA, 122 bp, Homo sapiens
agctagtatgactttgaacgctatattgaatttaatgtggcaactgtaatgagcattttacgttatctcacaacaaaatggggtagatatggttctattttataagtgactggactaaggtt

SEQ ID NO: 79787 - DNA, 122 bp, Homo sapiens
taccaccccctgtccatctgatcctcagacagtaatgtaactttattcttttatgctattcgtcagacccagtacctccaacacatttgtttcctacagataaagaaaatataaaaagtcaa

SEQ ID NO: 79788 - DNA, 122 bp, Homo sapiens
aacttagtgttaaagtcagtaccattcatgtttctgttatgcattaactatttccatattcgctgttagatctttctctttgtagctcacaatgttaggagttgcttcatttttgaggtttg

SEQ ID NO: 79789 - DNA, 122 bp, Homo sapiens
aaccccccgaacgcccgcaaacaccaggccactctagcaaaacctctctcactccgcctgcgcaatccagctgacttccggttacagataaccacgtgattgggaacccttgctgcgcatgt

SEQ ID NO: 79790 - DNA, 122 bp, Homo sapiens
caccggcaactctccggcgcgctggattaacagacgctcgcccctctcaactcccctaagcgaggtcgaagctcctccgcgcgtgccgcggcaccactcccgcctaacccaccctccggcaa

SEQ ID NO: 79791 - DNA, 122 bp, Homo sapiens
gcagaggtggacatgcagctcctggtgcagggactcgcccagctttgagctgtgagtaagcgtccgggcgctgaggtccactgctcttaacccccactcagctgtgggttcaccccggtctc

SEQ ID NO: 79792 - DNA, 122 bp, Homo sapiens
cgcgccacgcggctccacacaacacgccggcccacgcagaaccctcagaacgaaattcaccgtctcaatacaggctcaagggaaacctggagtctgaaaaaaggaagggacccagggcaggc

SEQ ID NO: 79793 - DNA, 122 bp, Homo sapiens
taaatggatgagggaaaggtgctattcagaacatgctcatgttactctagggtggtacaacgcagaagaaattaaccttgtgattcagctaacttgaatatgaatatagctcagagatgtca

SEQ ID NO: 79794 - DNA, 122 bp, Homo sapiens
acggacgggcgtggtggcgtgcgctagcgtgagcttgcgggggctggggagccacacggacgtgcctacaatgggcctttgaggggccctcctgcctgggctgctggaggggagtggccacc

SEQ ID NO: 79795 - DNA, 122 bp, Homo sapiens
aataatgtattcaggcacattgcccagcctctttctccatgcttttcataaaaggaaccacgtcaaggaaaaaaggaaacttctggtcctagatcctctgagtgctggttacaaagagtcac

SEQ ID NO: 79796 - DNA, 122 bp, Homo sapiens
atcttcgtcatcctcatcgtcctcatcctctgaggcaggggcagcagctgctgctttcatcgctgctggttcaatttcatcttcatcctcatcctcgtcctcgtcatcctcctcatcctcct

SEQ ID NO: 79797 - DNA, 122 bp, Homo sapiens
ccactatggtgccggaccccagtgcctcactgtacaaagtcgcccctccccaggcgacaacgagagagggactaaataaaaggttgatggctttccactcaccaggcatggggttgagtggc

SEQ ID NO: 79798 - DNA, 122 bp, Homo sapiens
tagtaaagaaaatgcggaagctctggctctccaaggcaaagtcaaaaaaaaaaaaaaaagcgggggggaatgcgaggaacattttattacacctcctgattttcagtccttgagttttattt

SEQ ID NO: 79799 - DNA, 122 bp, Homo sapiens
ctgaggcaccgcggggccctggacgcgccctgctgggatgggacggccctgcggttttctcgccacctcttgactcacccctctggcctcagcccaggctggcaggatcgccctgaggcgga

SEQ ID NO: 79800 - DNA, 122 bp, Homo sapiens
tcctcttcactctgctctcaggagatctggctgtgaggccctcagggcagggatacaaagcggggagagggtacacaatgggtatctaataaatacttaagaggtggaatttgtggaaactg

SEQ ID NO: 79801 - DNA, 122 bp, Homo sapiens
tcttaagcatttcaaaaaccccaggtgaaaagctaagtatgagaaaggttctcatgcaatcgttaatcaaatgcaactaggttggaagaagatacatgcttattgctttgcggaagtggctt

SEQ ID NO: 79802 - DNA, 122 bp, Homo sapiens
cacgatgagctccttgatggccacggcgcggtggccgtggcggggccgtggcaccggacccgaccagcccaccactcgcttccagcggggctgcagaagcaccgctggcaagttggcgggcg

SEQ ID NO: 79803 - DNA, 122 bp, Homo sapiens
atcactccgggccagaagatgggcgtccggccaggcagctcagccagcggcttggggtaccggcccacggcggccacggccgcggcgctggggctgaagtagagcccgggcggcggcggcgg

SEQ ID NO: 79804 - DNA, 122 bp, Homo sapiens
tcattgttcctggcaagctgacagaaccgcctgatgcactgttacagtagctcacccaaacgacttctaatcagccacttaaacatttatgcatttcaaaacttgatctcagaacataatac

SEQ ID NO: 79805 - DNA, 122 bp, Homo sapiens
gatcctcctggggtgggtgggactgaggccaggggactcctgcccagaactcagggtggccgatgtggggaggggcactgtggggccgacaggtcccctctctggccatcaggcccccagga

SEQ ID NO: 79806 - DNA, 122 bp, Homo sapiens
ggcagctgccatggtgacctccgccccggaagaactcgtgcaggcggaagtgtcgcattgcgtgaggccgtgaatggctgcgcttctgcgggatagacttccggccgccggctgcttagcag

SEQ ID NO: 79807 - DNA, 122 bp, Homo sapiens
tgcagtctcaggtgagagctgagccccagccagatcccgcaggacactctgcagccttaacgatgtcccagagctcatcccacctcgaagcaaggcagctgggctctctgagggctgctgcc

SEQ ID NO: 79808 - DNA, 122 bp, Homo sapiens
ggcggggcacggagggggcacagccaccagctcacctcggggtgcttgcgccgcatgtgtcggctcatggaggccctggtggacaccttggtcccgcacagctggcagctctgcgcctccac

SEQ ID NO: 79809 - DNA, 122 bp, Homo sapiens
tgcggcgccgccacctgacaacggaagtgacgcaccgcccccctcctccccagccttagccgcggccccgcccccccgggccccgccctccgcctgcgtctccagccccacggctttcggat

SEQ ID NO: 79810 - DNA, 122 bp, Homo sapiens
ggggaggacgaggaagaaacgaacgtgatagttctcagctacccccagtactgccggtaccgctcgatgctgaaacgcatccaggataagccatcttccattctaacggaccagtttgcatt

SEQ ID NO: 79811 - DNA, 122 bp, Homo sapiens
tggccactgttggcttctgaatggtttgcaaggcggatatccacgccaaggcctttggatcggccgtgggtacatccgtctgagccgttcctttccatcgcagagcggcggcctccggcggc

SEQ ID NO: 79812 - DNA, 122 bp, Homo sapiens
tcagtgttaaacctgggttggagttgtggcccaggttcccaggactgactgcctaggacccgctaatttagtgagtatctgactctttatttcttctctttctctagtgttgatctacagca

SEQ ID NO: 79813 - DNA, 122 bp, Homo sapiens
gctgtcaccactgagtgagctcgaggtgccccgtcccaggaccgtggcaggagggggtcccgtcctgcgtggggcttgaaggcaggtgggcaagacggtgcatagcccgaatctatttaatg

SEQ ID NO: 79814 - DNA, 122 bp, Homo sapiens
atcacagacagcaaagcgagattaggcagtgatctggctgctcatcttccaacaacatatcggttttcagaactaagccttttctctgtcaacgctcaagccagacagaggttagggaagat

SEQ ID NO: 79815 - DNA, 122 bp, Homo sapiens
agagcagatttacggctacaaagccatgcattggaagaggaggagatccagtcccagaggcggtaggtgttttgtctgagaccttcataaattaggattggacaggattctgatctcagagg

SEQ ID NO: 79816 - DNA, 122 bp, Homo sapiens
gagctggcgagaaggagaaaagcccagctggcggcgtaggggcgagggtcctgcctttcccggcggcctcgccctggccatcctggccctgcgggaaggggtcagcccacccgagcctcgtc

SEQ ID NO: 79817 - DNA, 122 bp, Homo sapiens
ctctttctacttcatttaggttaaaaggctttcctctccaggagcctggcaagccaagcccgccctctgcggggcaacagcacgaggcattacccctacagaccacttggcggcgccgtccg

SEQ ID NO: 79818 - DNA, 122 bp, Homo sapiens
tgtgcacactcccagcaaaacacaaggattttagggcacactaagagccacagagagcaccgctcccgccccacaggtacaggaccccaaaggcacttagatctcccgtttccgccaccgac

SEQ ID NO: 79819 - DNA, 122 bp, Homo sapiens
ttgcggaaaggacagggtcagagacctaaagcgagtgaggcgggaattgcctctgaggcacgccgaggaagggcaaatcagccttggctgggctaaggcttctgctggctccagcccctccg

SEQ ID NO: 79820 - DNA, 122 bp, Homo sapiens
cagtggaggctttgagatgcaggtgtggctgttggggttacgagatgtgcaggtatgtcccgcttttacgtcccagctctgaagcatagttcctatggaaaactccagccatgcttcttttc

SEQ ID NO: 79821 - DNA, 122 bp, Homo sapiens
tacacccctcccccactgggcatacaaatgggctttatccagcaaacaacgctccctccccgcactccccccaccccaggccacacaggcacgtggacccaggcctcaccgtgggaaggggg

SEQ ID NO: 79822 - DNA, 122 bp, Homo sapiens
ccacacagaaaagggggcgccatgcaaagagagtagcctctggttcttttgttacttgggcgtggaaagttggggttttccttttgacttagttataggaaatcagcgggaattggccttca

SEQ ID NO: 79823 - DNA, 122 bp, Homo sapiens
tggtgatgtggggagcctccatgacggctccccctgagattcaggtgggagaagatgcaccgtctggaggcctggcccatccagactcccaggtaaccccgaatactcttttttcaggctac

SEQ ID NO: 79824 - DNA, 122 bp, Homo sapiens
ggctagtcattcatcttaaaaaggaacatggcagggaacaaatggggagtgtcagggggccgggaatctcttgttaccctctgttaagggatgtccaaggacagctagctgggagtcttggg

SEQ ID NO: 79825 - DNA, 122 bp, Homo sapiens
agaccggcggccccggggttgcgggcggcaggagggaccgccactccacggctgcgggcgcgcgtgaacacacggctgaaggtcataggcagcgcatccaggcaacagcattcgttggcgga

SEQ ID NO: 79826 - DNA, 122 bp, Homo sapiens
caccctcccccaatcgctgctcccgccatttcctggggcttggaggaggggttaaaggagcggactgtaggcgtcacatttcccgcctgcgcgcttttcagtctcagtgtccgctggaggtg

SEQ ID NO: 79827 - DNA, 122 bp, Homo sapiens
gactggggcaactgcagggttctcttgcttccattagtggccagcggcccctgctggcggcggggcaccgcagggtcctcttgcacacagtatagtggcggcatgccgcctgctggcagctg

SEQ ID NO: 79828 - DNA, 122 bp, Homo sapiens
cctctctctagtaaccttagtaacgcctcctcggaggatcctctcagagcagctcatcagcgcttcagatcagcctctccctccttcccccagtaaaacagttctcataattagaacaaaaa

SEQ ID NO: 79829 - DNA, 122 bp, Homo sapiens
cctccctctctccctgacacaggcctgagtgactcggcaccgcagccaggtgcaggggggcggcgccgagtgcacctggagaggcgtgggaggtagcagccgcagcttgcctggcgctcgcg

SEQ ID NO: 79830 - DNA, 122 bp, Homo sapiens
ggagtcagaactcaccgccaatccagcgcgcctcgggcgtgtgggcaacaggactcggggcggggcctgtgttgcgaccctggccacaccctcaccgcctgcccgcaatgattggttttccg

SEQ ID NO: 79831 - DNA, 122 bp, Homo sapiens
tggcctcggtcccctgcaaaccccagccccgtagccctgcgaggttacagacagcctaaacgccaccaccacagggcctgtgccgtgcccctgacccgggcacagaaggccactggcccgga

SEQ ID NO: 79832 - DNA, 122 bp, Homo sapiens
catgcccctctcgctgcaacgcggccaaccgcaggcgggtgctgacgacacctccacccccggctcgtaagctaatttgcgtcacatatggcgtaagagccctgtcggagcgggggacctac

SEQ ID NO: 79833 - DNA, 122 bp, Homo sapiens
cgcggggagagggggacgggagccgcgggacgggctcagtcgactcagcgcaaactggggcgcgggacgtaggggaattacggtagccgcgcgggcgctaccacctggaccggccgggatgt

SEQ ID NO: 79834 - DNA, 122 bp, Homo sapiens
attcccagaccctggaggccgctccccggggcccatgggagaggccgtttctttcccagacggcacatccagttcccagcaaaatgtcactaacgggccgggagaggaagccgctttgcagg

SEQ ID NO: 79835 - DNA, 122 bp, Homo sapiens
gagtgcctaggcgaagctaatgtgcctcaaagtcctgggtaagtagaggccctggagacccgtccgcatcctctggcagtggccttggaaccaccgaagggattcagccgaagggccgcgtt

SEQ ID NO: 79836 - DNA, 122 bp, Homo sapiens
tcttctgctgcgaaaatccttccctgggagcatgacccacaccaagcccctaggctgcaccgcttcccagccaggaaacccacgcacatgtgcacaggaggcagtggggcagcattcctttg

SEQ ID NO: 79837 - DNA, 122 bp, Homo sapiens
cttctccagtctatcaacctgggttggacgtccctacctagacacagcttctcttggggacgctgtggaggaaatcggggtctcgggtgtggctatatactcagggacagaagctagacgcg

SEQ ID NO: 79838 - DNA, 122 bp, Homo sapiens
ggactgcagagaggatggaagagacgcgatgggcccagcctctccttccggcctggtggtcgcctcttgcctccccacctgccttggccggtggcccaggccaaggaccgcaggtttgggaa

SEQ ID NO: 79839 - DNA, 122 bp, Homo sapiens
cagacttgacagatcaggcatcaggccctctgcgctggtcccgggctctttaagcaggaacgtgaatggcctcaagatgtctcacatggtcccactagccctcctcctccctttgttcccta

SEQ ID NO: 79840 - DNA, 122 bp, Homo sapiens
cggcgggttttgcagtcaacttcgctccgaatttacagaaaacagctactatgctagggacgcggaacagtgtattagagactgaaaaacaggccgggatcggtggctctacgcctgtaatc

SEQ ID NO: 79841 - DNA, 122 bp, Homo sapiens
gagggagggccgcgcgagacgagaccaaccttcgggacaggggagagcggggctactgaacgcaggggattccgctgagcctccagcccctgagcgtccaccttcggcccagctgggggacg

SEQ ID NO: 79842 - DNA, 122 bp, Homo sapiens
atgagtttggcaacaaggacacttatgacaacaaggcattttccatgggggcggaagctgcgatgaggagtgaacacagatgagcaagtagagacagtgtagattatctttttcaaaaaact

SEQ ID NO: 79843 - DNA, 122 bp, Homo sapiens
tctttccatgttttgaccacgcccttgacccgcccttcaaattgggcacgccttcttccccgctcactgatttcctggcctagcccctgagcagacctccagacctagccccgcccccgttt

SEQ ID NO: 79844 - DNA, 122 bp, Homo sapiens
taaaatccagcctttcaaatggaacttcagttgtaactccagttaaaatgaagcattaaccgttcattcactcactcatacatatgtgtgtatctcctgcctttcgtcccaagtatcctgca

SEQ ID NO: 79845 - DNA, 122 bp, Homo sapiens
cgccagaaccaggacgattgctccgaaggccccaccacgaggaaggcagccaggcgcccgcgccaaccaagcgccttgtttgcgctccacaggggaccgcaccgccactccatccacagcgc

SEQ ID NO: 79846 - DNA, 122 bp, Homo sapiens
gttaaacctcacttgcggaactggactcccacattcgaatgagggagacattatctgcttcgttctccaataaatgccctgaatgtccagcccagtgcctggcaagtagtgagccccaaaca

SEQ ID NO: 79847 - DNA, 122 bp, Homo sapiens
gagtggatgatctgttcctgttgggaggacctgggccatggttgtttgtttctccgtaagcgccttcaattactgttccactactcatcaagcacataagttactcattgagaacctctgat

SEQ ID NO: 79848 - DNA, 122 bp, Homo sapiens
cggtagtggccggtcctctaagccctcagagctatcttccgagtcgctatttttggagtccgaaatgggtcccaggcctaggtcgccatccctgcgcgccgccccagccagggacagctcag

SEQ ID NO: 79849 - DNA, 122 bp, Homo sapiens
agtcatgcttcaaactatatttttcagttacacaagctaattaatatttgctctaacacacgcacacatgcacatatacatacatgcacacagacatattttatttatttatatatttattt

SEQ ID NO: 79850 - DNA, 122 bp, Homo sapiens
caatcagctccaacaggtccagttccactaagtggaagggcttcccgtcaacaccctcaccggagaaaacggattcctcctcagcattcccttataacacctggaaaggggaaacctgtttt

SEQ ID NO: 79851 - DNA, 122 bp, Homo sapiens
gtctccgggacgccctcgcacccctggacaccagaccggactgttcccgacccggagacgcggggccacagcccccagctgaccctaatttattctcagcaccaccccctcccaggtcattg

SEQ ID NO: 79852 - DNA, 122 bp, Homo sapiens
aaagaaaatactcccagcatgaatgagagaaattcaaagagaagaggccttgctgcctcccggtgagaaaaccgactgaggggcaaagagcccagggatctccctagcctgtcccacggctc

SEQ ID NO: 79853 - DNA, 122 bp, Homo sapiens
cccgcacccttcatgacgtgctgccagagaagccacggagtcgtgctaagtgaccacttccgtgtgaagaaggacactccccggtgccttctggatggatgtcccatgggctccagaatcaa

SEQ ID NO: 79854 - DNA, 122 bp, Homo sapiens
ctccgctccaaccccctgaggaggtcactccccatccagccacccctgcccgccggcctccgagtccccgaaggtcccaccatccccgcaggaactccctggatggagggggccgatcccgg

SEQ ID NO: 79855 - DNA, 122 bp, Homo sapiens
cataagctctaggagggcagagactatgttttgttcaccactgtttctccagtgtctagacgtagattctttgaatgcatttaattggagccttgagatatgaagaagtaggatgcggttac

SEQ ID NO: 79856 - DNA, 122 bp, Homo sapiens
gcggggctgggctgggggggtcccggctctgggcccatgcagaggctgtggcccccaggacgggcgggtagttaaggcaaagtgggcgggcaggacaggcgaagctgagtgcggagctagga

SEQ ID NO: 79857 - DNA, 122 bp, Homo sapiens
ctctccggggctctgccaatcgcacctgccaagtgaatggccgatggagtgggcagacagcgatctgtgacaacggaggtgagaagcatcccctccccctacattgctgtctccctgacggc

SEQ ID NO: 79858 - DNA, 122 bp, Homo sapiens
aatgtgtaaaacagttcaaatgttcttgggtatactcaaatcagatcacatgtcctgtaccgtcacatacacagccttcgatacagactaaaaaagcctaaaaggcaaataccaccttccgc

SEQ ID NO: 79859 - DNA, 122 bp, Homo sapiens
ttttcagcattgttgactctagctttgctggtttgatgatgaacatgattgcctctttcacgtctttccatagctctgacagttctctttcatctcaattcatggcttacccattgaacatg

SEQ ID NO: 79860 - DNA, 122 bp, Homo sapiens
gtgggggcactgggagaggggagaagggaagggaagggtgggggaagagagacgagagaacggaaggacgttagtgactaacatctgggtaagcccgggctcttggccccgccctcagcccc

SEQ ID NO: 79861 - DNA, 122 bp, Homo sapiens
ctgccttccgcgctgcaggtgcaaggagggcgagctgcacctggagaagccaggccgcagcgactgggacgtggctgctgcacctgccctccctcggaccggctgtcctgaggccacagggc

SEQ ID NO: 79862 - DNA, 122 bp, Homo sapiens
agtcttctctgtactcatggagagcctcttcttccaacttttcaagcaggcttttttccgcgtcggcacttctcgaggacttcctctccttggaatgttctttgtccgacttctctttgtgt

SEQ ID NO: 79863 - DNA, 122 bp, Homo sapiens
agagtcactggtgtcctggccccaggcgcggcggtggacctgacgctgctggccaacctgcggctcacggacccccagcgcttcttcctgacttgcgtgtctggggaggccggggcggggag

SEQ ID NO: 79864 - DNA, 122 bp, Homo sapiens
agctgctgcggccacggcgccagtggcggccacaggacagcgccggggctccttgagcagcgcgcgggcgtcgtcctccagcagctcctcctcgtcgtcctccagcagttcctcttcctcgt

SEQ ID NO: 79865 - DNA, 122 bp, Homo sapiens
cacgtcaaaactaaacctaaattaattggctaaattgggactcaacacctccaggagccacgcggcagaaagccccaacacactttaaattagcttgcctcatcatatttgaggaaagcaaa

SEQ ID NO: 79866 - DNA, 122 bp, Homo sapiens
agcccagggtgggctggcttagtcgttgggcctctggttgtgcttagaagtggctgaggccgctgtgccgggagctgcgcagcgagctggcctcccaggcgctcggtgttaggcccagcccc

SEQ ID NO: 79867 - DNA, 122 bp, Homo sapiens
cactggcagtgagggggcaacaggcactgtgtctggtatctgcaggctccgttgcaaatacggattaaggctctctgcgtggcagtgctgtatgtgctgggttacatgtggcgaacgttctc

SEQ ID NO: 79868 - DNA, 122 bp, Homo sapiens
aagacactgtccctgcctgttagttccactcacaaagcaatccaagccagggatgagctgcgctgccttcaagaagcaatgcgccttcagacctctgcagctacttcaggtttgccactttc

SEQ ID NO: 79869 - DNA, 122 bp, Homo sapiens
ctgtttcgaaatggggaaagccgtgcgtgcgcgttatttatttaagtgcgcctgtgtgcgcgggtgtgggagcacactttgcaaagccacagcgtttctggttttgggtgtacagtcttgtg

SEQ ID NO: 79870 - DNA, 122 bp, Homo sapiens
ggaatttccttatctgacagagaaaactcttttccaaagaaatgcaattgtcttaaaacccgttccttaggaatcgcattaaataatcagaagagattaatcacccagagaagagacaaaaa

SEQ ID NO: 79871 - DNA, 122 bp, Homo sapiens
atatacagttgttctagcactatttgttaaaaatattttttttcccaaatattatcttggcgttttgttgaaaatcaattgatcctatgtatgtggttctagttctagagcatattctattc

SEQ ID NO: 79872 - DNA, 122 bp, Homo sapiens
gggctttactttgcacaaactcaggtggaatcagtcaggatccagccaggagacaggaaacgcagcagtaatttgaacaggaaaaattcagtatacagaatcgttaacaaaggaaaagaagg

SEQ ID NO: 79873 - DNA, 122 bp, Homo sapiens
tgcggcgggaggcagtgtcaggctcgggcccctggggaattcctcccctcctttcccccccgcaccagtcccctagagaggcgtacccgggtcccgcccgccagagcctgagctttgtaccg

SEQ ID NO: 79874 - DNA, 122 bp, Homo sapiens
tggctactctcatcagagccagccctagggatgcaggccccagggaaagccacaaggggtcgtttctgtgcaagggtgaaatctggtttgagagacaaaataccattgttagtggatgggca

SEQ ID NO: 79875 - DNA, 122 bp, Homo sapiens
tggttatatataacaatcagctacaaaaaatgctgaaattcaggtgccagtacaagccgtcgccagcacaccactgggtggtggctcagagcatcagggacctgtaccagcccctgccggct

SEQ ID NO: 79876 - DNA, 122 bp, Homo sapiens
gctggtgaggaccctccacagcccgggacccgcctgagtccttacctctgcgtgagggtccgcagctcgcgccttccgctccaccagaaacaagttcaagcgcagcaggcgcaaagcgaatg

SEQ ID NO: 79877 - DNA, 122 bp, Homo sapiens
tcacggtgggcacccacccttacggggctgcccgcccctggcttctcaccccacactcctcgacctccagagtgagtccatccggcctgatgagttttccttggaaatctttgagcggttcc

SEQ ID NO: 79878 - DNA, 122 bp, Homo sapiens
agttgatttttcctgtgaatattggtgcatgctcagggaccagcagcacagctgtcccagcggaaatggaggaatgaagtttcattcatagtcgcactagaggaaagccagcccaggacgaa

SEQ ID NO: 79879 - DNA, 122 bp, Homo sapiens
cccactgggcacccgctagggaaacaatgggagggatgaaaacagagaaggaaaagaaagcggatccagggttcccacctccctgggtgaacccgactatcaatgcccacattagacaaaag

SEQ ID NO: 79880 - DNA, 122 bp, Homo sapiens
gagatatagagtctcactctgtcaccctggaatgcagggtggagtgcaatggcacgatctcggctcacggcaacctctgcctcccgggctcaagcaattctctgcctcagccttccgagtag

SEQ ID NO: 79881 - DNA, 122 bp, Homo sapiens
gccttgcgcctaccacccgggcgataaatacccggagccgtcgggcgccctgcccggtgacgacctgtcctctagggccaaggagttcgccttctaccccagcttcgccagctcctaccagg

SEQ ID NO: 79882 - DNA, 122 bp, Homo sapiens
gccgcggtgagggggtcagattttcttccaaagccgccttgctctgtgcaagcgcactatcgcaggctgcgggcgacgctgcctctggccggcgccctccgccgctccaggccggatggtgc

SEQ ID NO: 79883 - DNA, 122 bp, Homo sapiens
caacatcagagagcctaatacacccacggtagctcccacgtatctgaggtttcatctacccgtatccactacagtccaaaaatagtaaatggaaaagtccagcagtaatttgtaagttttct

SEQ ID NO: 79884 - DNA, 122 bp, Homo sapiens
aacaggcagaacctgccgctgggggactgtccctgctctggcagccgcatgaagacacaccgagcgagacacactgctgagcgtatctgcgtatttcagcatttgtcagctaaccgtgtctc

SEQ ID NO: 79885 - DNA, 122 bp, Homo sapiens
tgacttggttcatagtgcctgggctgccctggggatgcctctagtgggcatctgtcaggacgagaagcgagtgcccatttgaaggagactgtgtgtatgtgggggtgtgggggcaggtggct

SEQ ID NO: 79886 - DNA, 122 bp, Homo sapiens
ccaggactcgcaggaccccctctgtacatgttcatggcccaggagtccgggaggcacatccggcgaggctggttcctgggactcaggcaatattcccgatgaagctgatcaaatcggatttc

SEQ ID NO: 79887 - DNA, 122 bp, Homo sapiens
ctgcagggacacccacgcccttctctccagaagccgggcaggcagaatccggccagacgacggggctgagccatcaggagctcttgggaaagcaaagcagggagacaccttcagaagaagct

SEQ ID NO: 79888 - DNA, 122 bp, Homo sapiens
ccaagccctcacccacaactctggctccaagaccagagctgctggcaccagcatctgatgcgatgtcttgtgttaggagaggcacggaatgcctcaggagacttggaggtggacgcgttgga

SEQ ID NO: 79889 - DNA, 122 bp, Homo sapiens
ctcgcttcactgcaccgccctgcacaccaagataccagggccagctttcagttactggcccgggtctccaccaagcgcaggagacctggtctgctctggcctgcgagctgggactcggagct

SEQ ID NO: 79890 - DNA, 122 bp, Homo sapiens
tccctgcccctgtgcccttgagccctggaacctacctttcaaacaaggatcagggttacccggggacattcacccagcaaaacgcagggacagcagagatagaaggacgcaactgtgatcca

SEQ ID NO: 79891 - DNA, 122 bp, Homo sapiens
caagaggataaaaagtgtcttcaattttcgtgttgtctgatgttgaagttagctgtcatccggcactagattagtcacactttgaggcagggctttggagaaggggtcagaacaaagctact

SEQ ID NO: 79892 - DNA, 122 bp, Homo sapiens
gccagtgtgaaaaatcctagtgtcttcaaataaccaccaggaagtcagtctggcccagatcggggggcagtggtcattcatgcactcaccaaatgcttagtaagcacctactatatgctggg

SEQ ID NO: 79893 - DNA, 122 bp, Homo sapiens
gggcttggcagagccaggcatggagggaggcagttgggggagggagcttccatagagacacggcctccgtcctcaaatctagtgagagacagagaagcaaatggataaattacagtgcctgg

SEQ ID NO: 79894 - DNA, 122 bp, Homo sapiens
ccaggatggtgaaatcccgtctctactacaaatacaaaaattagcgggcgtgttggcgggcgcctgtaaatcccagctactccggaggctgaggcagagaattgcttcaacccgggagacag

SEQ ID NO: 79895 - DNA, 122 bp, Homo sapiens
gacagcttttcttgatatgccagaaggtccttaaagtccttatttccataaataccgtcacgatacccctgctcccatcacccagatgaaccgctgttctttgtagtgaaatggtcttaaca

SEQ ID NO: 79896 - DNA, 122 bp, Homo sapiens
ttcccgagaaaacgctgcgtggctggcctgccccgctctcggcggagggagctctggtaacgctttgtaaactgactcggcgaggagagcacctgcctgaatcactcccttgaaaaaggccc

SEQ ID NO: 79897 - DNA, 122 bp, Homo sapiens
ctcccggccggggagcggtgcctgcttatttacgctggaggcagcctggagaggcgccgccgcgggcaccgagaaggacccgctcccctccttcggatccggtggcggcggtggctgcacac

SEQ ID NO: 79898 - DNA, 122 bp, Homo sapiens
atgcaagtgttaagctacttaaaagcagatgtggaccctgaatatacctttaatggtcaacgtgtagataaactgaaagctttttttatcactgaaagcagacgtcatatgttatcttgaca

SEQ ID NO: 79899 - DNA, 122 bp, Homo sapiens
aatggaatcatggatagatatgttgtaacaaactgcacattccctgatgtttgcttttttcgaaaatgcgttagttctaccttctttttaaaaattcattaattcatttatttctgcaaaga

SEQ ID NO: 79900 - DNA, 122 bp, Homo sapiens
acctgtggttcaggtgagggcaagagtccacggagcccggacaggagcggcagagcaggccgcacctcccgggcaccttccggggctgagcacccgaatgcaaatgcgcacccccctgtctg

SEQ ID NO: 79901 - DNA, 122 bp, Homo sapiens
tttgtggcagcagctgttggtgctgactaataggacttcctggcagctgtgccgggcacacgtggcaccggcaggaactgcctctcctcggctgcccaatctgtaccccaaccaccaaagaa

SEQ ID NO: 79902 - DNA, 122 bp, Homo sapiens
tattaatgcaatgctgagatcccagtgaacagaatctggcttagaagaagtgggtatccacggtgcccgagcctaatcttacatcttggatttgtaagtggcatttattgagttgaacatga

SEQ ID NO: 79903 - DNA, 122 bp, Homo sapiens
tctgttttcttgatggtggcctttgcatattcattcaataatcaaagatctgtggaattccgaggaagaatagaggtagttctagcctttgaaaactttggcctctatgtggagggacaagg

SEQ ID NO: 79904 - DNA, 122 bp, Homo sapiens
gcttctccccgctgtggatccgaaggtgccgcttcaggttccctgtggcgagaccgagggcgaacctggcgtggggcaccaccggtggccgaggagcaggggtgtgagggcagccagggcag

SEQ ID NO: 79905 - DNA, 122 bp, Homo sapiens
gcgctgcatggccagccaggtggggcccactctttaatggaaccatgaagcaagtcccttcggaagtaaagcatctttatgctaagaaccatcacctcattgctgctgggaagcacagacct

SEQ ID NO: 79906 - DNA, 122 bp, Homo sapiens
tggaaaagattgtgttgcaactcactgagtggttggtaactggctaaaagacattctccccggtctgttgtttgtttaagcaccagtcattttttttctaacccagttttttctcgccaaat

SEQ ID NO: 79907 - DNA, 122 bp, Homo sapiens
gccaggcatccctttctgtgcttctgcccaaatctgaaattcccctctccttgggacccacgactggggccagcctgcctggggagggaatcccagctgcagaaagtcgggacagtgtgcgt

SEQ ID NO: 79908 - DNA, 122 bp, Homo sapiens
agggctccttggtctagcggtaatgccagcgtctgggaagatgccccttgccaagcggaccgtggtctagcagtagcggaccgggaaagggagtcttcctttccccgggggagtttagagaa

SEQ ID NO: 79909 - DNA, 122 bp, Homo sapiens
gagttcgagaccattctggccaacagtgaaaccccgtctctactaaacacaaaaattaggcgggcgtgctggcgcgtgcctgtagtcccagctactcgggaggctgaggcaagagaatcgct

SEQ ID NO: 79910 - DNA, 122 bp, Homo sapiens
taatcagctgtagccacattccttgacttttgcttcctacataacccctccctattaactcgctttttgctgctgtctaggtcaccgtgcctgggaaagaatggacagggaaaacgctaacg

SEQ ID NO: 79911 - DNA, 122 bp, Homo sapiens
atccccagcaggggaaagggactgggcggggcgcgaagctggggctgccgctttagcctccgtccagctcttatctgggtgcttcggcagctagcactggggagaccttttttaaaagcgaa

SEQ ID NO: 79912 - DNA, 122 bp, Homo sapiens
tgccgcactccgaggccatggacgtgttccaggagggtctggctatggtggtgcaggacccgctgctctgcgatctgccgatccaggtgtgtgcgggcgggggctgggggcgcgggagtcgt

SEQ ID NO: 79913 - DNA, 122 bp, Homo sapiens
atttgtcccaaagcataatttccatgatagaactctgattcacatgtaatttttttgcagcgacgacacagttgaaataactccttcgtggaggctggctacattttcacaacgtctggtcc

SEQ ID NO: 79914 - DNA, 122 bp, Homo sapiens
tttatctactcactcatttgtacccacagttaaacacagatatacctgctccatgacctccgtcacctcccttgactccattacctacactacctccatcaactcaatcctttccaccacct

SEQ ID NO: 79915 - DNA, 122 bp, Homo sapiens
atcatttcatggccattcatttctgaaatgcccccctcatccatcctcacctcctccctccgcctacctgttgtcagcacagagtcatccatgtaatagcgagtttctgggactggggttgt

SEQ ID NO: 79916 - DNA, 122 bp, Homo sapiens
tgtaaccaagggggcggcctgagggggcgtgcacgcccgcgggagttaaggatgggcgcccgcgggcgtgacggggccgcggggcgtgggcgccgctccccggggctggagccggcagaggg

SEQ ID NO: 79917 - DNA, 122 bp, Homo sapiens
tagtgtcccactgcttcggcgacttctttactcagagctgtcactgttggagtctaggtccgtgtcctcccacaatcccctgaactccccgaaggcaggaatggggtctgattcacccccgt

SEQ ID NO: 79918 - DNA, 122 bp, Homo sapiens
tgaggaaaaaaactgtcgtttagatggggactctgttccaccacctagtgggcaagaaatcgaaaatacgcaaacagcaagattcttattaagttattgctcctcccgctacccctactttt

SEQ ID NO: 79919 - DNA, 122 bp, Homo sapiens
tttaaaatgatccagcggttattactgcgattggcttaggaactgacaggcagttttaggcgcaaggagtatagatcctgtttaccggagatgtgttcgtaactgctgtcaaatacagttaa

SEQ ID NO: 79920 - DNA, 122 bp, Homo sapiens
gagagtgtcagtcacggtctttgcctgggcatcgcctacaagcagtcggagcggagaggccgcgggtcaggcgcggcgggcggccatactggaaacgggcacggcccgcgagccctgagcgc

SEQ ID NO: 79921 - DNA, 122 bp, Homo sapiens
ggatggacggcggcagctggttgatgtctggggtttcggggggcggctccctgtgacagtcgcaggggttttcgggggactcccgacagtccgcgtcgccacattcatgctgctgctgggcg

SEQ ID NO: 79922 - DNA, 122 bp, Homo sapiens
tgggcgctaggcctctgacgtcaccaagtgcatccgcccctacaagttagcaaccgaaggcgtccttagcagcagtggccgctgagatgtacgaacttccggttctccgggcagctgccact

SEQ ID NO: 79923 - DNA, 122 bp, Homo sapiens
tggtggttctctcttggtttctgtggagaagccagaccccgctgtggttggcaaggaaggcgagtggagacatcaggagtgtccatccctcagcggccctttctagtggggtggctgcctct

SEQ ID NO: 79924 - DNA, 122 bp, Homo sapiens
cttagttggattcttcaagcaaagagcaactgaacctgagttttggttacgcctggattgcgagctagtctggaacttggctgcagtcctaactctgccactgtctccaagatgggtctctg

SEQ ID NO: 79925 - DNA, 122 bp, Homo sapiens
tgcaattgggttgggagaaaatattcacttaatcttctcaagaagacaactattattctgcgacgattgaggaggaggagcaaatagcagccattgggtcatgcgacaaagtgactcggaaa

SEQ ID NO: 79926 - DNA, 122 bp, Homo sapiens
gatcgggcccttgctaggtgcaagggcctaagcaccttgcgcgttcacacccttaatccccgccacgtcccccacggttcacaggaggcgcactgggccgcagggcccgggcgcgggacgtg

SEQ ID NO: 79927 - DNA, 122 bp, Homo sapiens
ggcttattttgctttattttgcttagcataatgtcctcaaggtttatccatgctgtagcacgtgtcagaattgccttccctttttttttttttttttaattttgttttgagacagagtgtcg

SEQ ID NO: 79928 - DNA, 122 bp, Homo sapiens
ggaaaaaaagggaggccgcaggcacatgatggatctgtgcaatagtcatacgtaagccgccgtgatgtccacaccacggagaccccgtctgctatgcatcacccatagcacgggcagccgaa

SEQ ID NO: 79929 - DNA, 122 bp, Homo sapiens
acccgctggccagactcaagctctgcaccaggtattaccaccctggcgacggctccggagcgtcactgacaaccacccggaaatggtactatcgcttccggggctgcctagcgcgcggcggg

SEQ ID NO: 79930 - DNA, 122 bp, Homo sapiens
gcctcctggctgccacgtctcactgggagctgggcggccgccagctctgagctaagtgagcgcagaggagagtgcagggagcggcaaggccaggctcctccccaccccgtggcgtggcgtgg

SEQ ID NO: 79931 - DNA, 122 bp, Homo sapiens
tccgcagctcccaggacagctgcacggctgtgcccgttagcctgcggggaagaggacaggcgtcagaaggtgcacttagggggctctgatggtctctcctcaggccctggcctcgggcttat

SEQ ID NO: 79932 - DNA, 122 bp, Homo sapiens
aggcgggacgggcaggacccgggggcgggaacgcccctctgaccccaccccacccccaggcgtccggcaccccaacatcatctgtgactgctgcaagaagcacgggctgcgggggatgcgct

SEQ ID NO: 79933 - DNA, 122 bp, Homo sapiens
gcaggccctccgggagcccctccatactgtgaaacaggaaacacatacacgtcattctgccgaatcaagttttcttctttcaccactgagggcttttgtgcaaggccagacaactgcccgcc

SEQ ID NO: 79934 - DNA, 122 bp, Homo sapiens
aggagtcgggcagggcagaaccaggctaaagaaacgtccagcgtagcttcaaggatgcaccgcgtgatccctatcggatctccccgacgcgtcaggcctgcctagacggtgctgggagcgcg

SEQ ID NO: 79935 - DNA, 122 bp, Homo sapiens
agagaaggggggaggcagagagcgggccgggctggcctccttaccattgccctggagcgccgccatctgacagctcaggctccgcaggtcagacacgaactgcttcacgtggagcagcaggc

SEQ ID NO: 79936 - DNA, 122 bp, Homo sapiens
tttcttttcagatgagacaccttgtgcattggaggtggcggcagcttctgcagctgggttcgggggcgtcactggcccttccctcttgctaggagataaacgctgcgcaaagccaatcacca

SEQ ID NO: 79937 - DNA, 122 bp, Homo sapiens
caatttcatcatcactggagatgttaaaatagagactgagtgaagatcaaatggggtggtcgtagccctggagaggctgaatttgaccactgatattctttccagctcggagagtcaatgat

SEQ ID NO: 79938 - DNA, 122 bp, Homo sapiens
aaggaaaggtggtgagttgctggccacagtatgacctgggactgtatctgaaagtcacaacgtataaagccaataccttctatatagcatcctgaccaacactggcagccctatgaggtaaa

SEQ ID NO: 79939 - DNA, 122 bp, Homo sapiens
atttcctgaccagcaatgtcagaaacctgaaacaccagcatgaggtgaggtgagaggccacggagctgcctcctgtattgccgcccgggccatactagaaaaacacaggacagtcagaagac

SEQ ID NO: 79940 - DNA, 122 bp, Homo sapiens
gcctcggcgctcaggtgtggtaagagctgggcggtgcagagcacagagaaaggacatctgcgaggaaagttccctgatggctgtcaacaaagtgccacgtctctatggctgtgaacgctgag

SEQ ID NO: 79941 - DNA, 122 bp, Homo sapiens
caagggctaagggtatcacagaggcgatgcgatgatggagagcgggtgggagttgaagtgcgctgccttcccacgcggtgtaagctctggcagagtgctgcttccctgggcctaggtttctg

SEQ ID NO: 79942 - DNA, 122 bp, Homo sapiens
ccccacgggcaatttccttaaaggaaattccttaaactcccagcttccttctctcgtgagcggtttcccagggctgcacagtctcctattatttgctgggtgaaaagcttctcgtatgtcgc

SEQ ID NO: 79943 - DNA, 122 bp, Homo sapiens
tttaaatctgcagacttctaatacacatccagttcttggattggatttgaagttttgtgccggagacacagagatagtcctgcagcatgtgaattaagatttatctttttttctatcctttt

SEQ ID NO: 79944 - DNA, 122 bp, Homo sapiens
gtctgcgcctgccttcctgacctgggacttgtttccagctctcgcgagactttcaggggtcggagcgcgggggccggccgagaggaaagctggaggcgcgggtggggaacatgtctgagtcg

SEQ ID NO: 79945 - DNA, 122 bp, Homo sapiens
agtattactcatctgacgtccatcactgtagacaaaggttgtggagcatcgcgcggtgcccgctgctgcatttggaaaggctccctcacctctcaccatcctgagtttcactccttagccag

SEQ ID NO: 79946 - DNA, 122 bp, Homo sapiens
gagagggtacacagaggatgcctgtccactgaccaaacctgccctgagcatcaccattgacgctttcgttcattcaaaaaacaaagttaattcagcaggtgctctatgccaggcactgactt

SEQ ID NO: 79947 - DNA, 122 bp, Homo sapiens
cagggctcggcactccagtgtactaagggagtggaaggagaagggaggctgggtgccagccgagctctgaaggagatacaagtccgtgtcagccactgacttgaaccagagaagaacgggtt

SEQ ID NO: 79948 - DNA, 122 bp, Homo sapiens
aaacttttccctcgcccctcaattcaaattcagcagtgcccacggttgccgcaaaccgcccggtccctagcaacaaggttccggccgtagagcgagagcctctaggtgtaaggaaggtgatg

SEQ ID NO: 79949 - DNA, 122 bp, Homo sapiens
ccaagaagccactttgcctcttctcccttcaagcacaagctttactgcaaaagggccagtcgcgtttctatttctctcgatcccaggcttctgcggaccgacgatacgtttaaatgttgttc

SEQ ID NO: 79950 - DNA, 122 bp, Homo sapiens
tgttaaatttctctttagaatcatgaagatattcattaagccttcgccacatgcccagtgcggtgctgagtactggaaatataacgatgaacaaaaagggcaacctctgctctcacatggcc

SEQ ID NO: 79951 - DNA, 122 bp, Homo sapiens
ccatgtggctttcttccgcagctgtgggcctggcctcggcattggcagacttccagggctcggggcccgaagagatgaccttccgaggtggcgacctcatcgagatccttggggcgcaggtg

SEQ ID NO: 79952 - DNA, 122 bp, Homo sapiens
gtggcaaagccacactttccagctttaggtgattttaaaacaatttcttgggccacacagcgtaggtacaacatggattagaggtgaggggaaaactgacactcagtgaaggaccgtcagag

SEQ ID NO: 79953 - DNA, 122 bp, Homo sapiens
tcaagaacctagaaaacccctttctccctcaacagtcttgttttgaagactgttgtattccgtgagctcagaaaagtatatattaaatgtcaaaagcttaacttcgactctttcctgttttt

SEQ ID NO: 79954 - DNA, 122 bp, Homo sapiens
ggaaaaagaagtagatttactgtccctaaccattaaattcccagtctttcaaataatgtgcggggcggggggtgctgggtgtgacagggtgcagtgaataagatgcctatgtacaagacagt

SEQ ID NO: 79955 - DNA, 122 bp, Homo sapiens
ccccatcctgtcatttgtcaccgcggggccgagagcaagctcccaaatttgcagggctcccggacccgaatcctggctcagccacccaatatctccatctgccagcggcctaagtcatgccc

SEQ ID NO: 79956 - DNA, 122 bp, Homo sapiens
ccgtcgggctccagagtgaaattatcagcaccccgcaagccgaggctcctaggaatgcctcgagggctgcacagaccacgttgctcccagaaggtgaagtccacgcctgtggtcccgggggc

SEQ ID NO: 79957 - DNA, 122 bp, Homo sapiens
cccaaggtcacaaggcacagcaggagcaggaatgggccagacaccccactcctattgtcccgcgccaaccaagaattctgccctccccactcactgcttttttttttttttcttcaaatcac

SEQ ID NO: 79958 - DNA, 122 bp, Homo sapiens
tcaccccatttccatgtctcccacaggaacctctaaactgtccccatgtgtgcccttcttcgcggtcaccttctgtgccccaacatctttgaggcaatctgtggcctccaggcagaacaggc

SEQ ID NO: 79959 - DNA, 122 bp, Homo sapiens
gccccgcgctgcactctacttccagggcggcgccctggcaacccaggacgcgaccgccggcgctgcgactatttccggagtcagacttgcctggggctcctttgggctccatacctcgggcg

SEQ ID NO: 79960 - DNA, 122 bp, Homo sapiens
gccgaggtctgccaggtgctgccacggggccaggatgccatcctgctgccacctctgcctcgagcctcaggctgcagggggatctccacccacgcagccatctccacccacgcagccgcctc

SEQ ID NO: 79961 - DNA, 122 bp, Homo sapiens
gagcgagtgcgcggagacctcgggccccgcagctgtagccgagcgcccgagcgcgggggccgccccctccgtcccggcagctggagcgcgctcaatgcacgcccgtcccccacgcgccccgc

SEQ ID NO: 79962 - DNA, 122 bp, Homo sapiens
aaaagcagggaaggagacgctagaagagccacgggtaggcgcgagtcagagtccgaggttcgagggctctgggccggccgcatctgcgagccctccgaggcgccgtagccccgcccctccgg

SEQ ID NO: 79963 - DNA, 122 bp, Homo sapiens
ggctgccatgttgaattgattcggcaggcggtgcaagagaaaccggccaatgagaggagtcggttggtcgccctgtggccagtcacgtaaaggggggggcggggcggtcgtgggggtggaac

SEQ ID NO: 79964 - DNA, 122 bp, Homo sapiens
caaagtcaccatcgcagcgccacagcttgagggcacaatgtccattcccgcaggggaactcgttgggctcacagggtggcggggggcctaggagaccgggcaggggtcagcagcatcctccc

SEQ ID NO: 79965 - DNA, 122 bp, Homo sapiens
aaagtagccttctcgtgcccaagaaagtgtgaatcgctgaggctcggccccatggcctggcgtgggtgctgacctcagtttaaaaccaagggcctgttttcttaccgttggggtacttgtat

SEQ ID NO: 79966 - DNA, 122 bp, Homo sapiens
cccaggccatccgcgttttcacccagcatcgtgtgattcggcagcaggtggtctgtggcccgcactttgagaaaccctggtgcagaaggttcatggttagtggttctctctggaaggaacag

SEQ ID NO: 79967 - DNA, 122 bp, Homo sapiens
cccctccccccttggctcatttacatagttcatctgcagctcaataaatctcaattctgccgcttggtgttccatcagggtctgacttccagttgtgcctgaattcccacagttttgagagt

SEQ ID NO: 79968 - DNA, 122 bp, Homo sapiens
cagggcctgtcaccgccgacgtcgtaaaatgccgcggcggcgtgctgctttccggcagggcgaactccagcacggtctctggaccgaaagtagactgggctctggagaaggtggggcaaagg

SEQ ID NO: 79969 - DNA, 122 bp, Homo sapiens
ttttttttttgagacggagtcttgctctgtcatgcatgctggagtgcagtggcaccatctcggctcactgcaacctctgcgtctcggattccagcaattctcctgcctcagccccaccgagt

SEQ ID NO: 79970 - DNA, 122 bp, Homo sapiens
gccatcagctccggcaagaagaagcggaaacgctgcggcatgtgcgcgccctgccggcggcgcatcaactgcgagcagtgcagcagttgtaggaatcgaaagactggccatcagatttgcaa

SEQ ID NO: 79971 - DNA, 122 bp, Homo sapiens
aaggcgccccccaacctcgcgcgtccccgcttaccgggccgcgcgcccccgggccccccccgcccctcactcggcggccagagcagcaacctgggcccctcccgccgccatcttgcgccgac

SEQ ID NO: 79972 - DNA, 122 bp, Homo sapiens
ataaactacatttagctatacttctgtattgacatttgaatataatagttgatactcctgcgaattctcaaaaagcatgaggggaaaaaacagccagctctaatgatctaattcaggaggat

SEQ ID NO: 79973 - DNA, 122 bp, Homo sapiens
ctactccgctgcgggaccagcggagatcctccacccaataaaagccccaggcgcctataccggattccattttcagttcaggcccaaatccccgggggttggtcgaggctgaggcggggctc

SEQ ID NO: 79974 - DNA, 122 bp, Homo sapiens
gttcaaagaccacctcctctgagaagtcttccctgatagccctcctttctgtgtctctgacggtttgctcactcttctccttaggcatggcttggtcatttccatttggataaatgttcctc

SEQ ID NO: 79975 - DNA, 122 bp, Homo sapiens
gtgataatcctgttagtgctgattcaaatggaatcgttggtataacttgattcactcccccgtattccagagaaattgtgtgtatgtgtgtgtgttggtaatgtggctgaatcccaaactta

SEQ ID NO: 79976 - DNA, 122 bp, Homo sapiens
gggcagcccggccgggaaggggcggccttccctcccggaaggggcgtggctcttcagaggcggcaaattgcaaggagacgccgccgccttcatgctgccggcgggctgctcgcgccggtgag

SEQ ID NO: 79977 - DNA, 122 bp, Homo sapiens
cccatccagcagccagcagctcactaataggtacccagggcaatcaacaggcaggaccttcgtcccaggaactgaggccaccgggcctttctttgcaggctctccagcccaaatccctatga

SEQ ID NO: 79978 - DNA, 122 bp, Homo sapiens
ccaggcaggtaaagacaggtaacataccttgctgtgtgttctgccgttctttctccagatcgcctgaaagctcctcttgaatgtgggggtctcccctcccggctccaggtttttaaacaaca

SEQ ID NO: 79979 - DNA, 122 bp, Homo sapiens
gcaccaatcagcaccctgtcaaaacagaccactctgctctaccaatcagcaggatgggggcgggaggggcgggaggggcgggggccagacaagagaataaaaggaggctgcccgagccagga

SEQ ID NO: 79980 - DNA, 122 bp, Homo sapiens
catctccacttctccagtccgccctactctccacccgtgacctccagtggagaccccaggcggcagcatcagtatttgatcggcccttcgtcagcacgctgccagccctggccggctgggtt

SEQ ID NO: 79981 - DNA, 122 bp, Homo sapiens
ctcttttctcgggacgggagaggccgtgtagcgtcgccgttactccgaggagataccagtcggtagagggtgagttttgggacgtcttggttcttgtttgggagggtagtgggatttcttgg

SEQ ID NO: 79982 - DNA, 122 bp, Homo sapiens
cttaaaatgctgtctgggaacgcagagaaagtctaaacgccaagacgctgaggacagccccgcaggtggactgccatgcccggctcggcccctttttggtccccagagtggacccttctcct

SEQ ID NO: 79983 - DNA, 122 bp, Homo sapiens
gctgtgaacctgggctccagttcccccacatcctcaccagcactggtgattttccattcccggatgacagccatcctggttggtgtgaggtggcatctccttgtggttttgatttgcgtttt

SEQ ID NO: 79984 - DNA, 122 bp, Homo sapiens
ctggggaagggcagggctgcaggctctttgggagacccagagaacaagctcccaatggggcggggggaggaagaactgtcccctcttagggcccctcagcctcagcctgggcagaaaatgag

SEQ ID NO: 79985 - DNA, 122 bp, Homo sapiens
gcgccggcaggagggccctgagcagacccggcccgggggcccggccaaggccgcctgccccgagaccccactcccagcacccacagcagagccactgggccagggtgcctctgccttcctgg

SEQ ID NO: 79986 - DNA, 122 bp, Homo sapiens
tgagggcgccccccgcgatgcggggagtaatatcgcccccctctccccccttgcatattacgagccacggtggtcacacagcgtgttgacattattgtcaataatatcttctctccctctgg

SEQ ID NO: 79987 - DNA, 122 bp, Homo sapiens
ctatgtatgcattctcctcttttttttgatatcctgaatacttacatgcctccttccctccgtcaaccatggagcttgcctctgtgctccccagctggcacctggtcagcaggggccgccat

SEQ ID NO: 79988 - DNA, 122 bp, Homo sapiens
ctatgtcatctttgggtaggctcctttaacggaggcagtgtgctagattgcctgccattacggcccatgctaagacatttacccttagcaaaatggctctggttaacttccgaacctaaaat

SEQ ID NO: 79989 - DNA, 122 bp, Homo sapiens
tcaggtagggaatgtggggcatggtcgcacaggagacccacagggttccctgggatccagcgagggccttcattcccacattgcccccaacagtcctgagcacctcagcaacaaggagttaa

SEQ ID NO: 79990 - DNA, 122 bp, Homo sapiens
aaccgtcgcgaaaacgcctcgcggaatctgagcaggtctaggttccagtcaagcctcccgcggggctgccatagtgatgaaatgagacggcctagaaaaccaggggttcaggcttgggggtc

SEQ ID NO: 79991 - DNA, 122 bp, Homo sapiens
tatttccgcctcccccgcccccgcctcgacattaaccgtttcgcgactacgtcagttggccggtctgtttgggagagccaggcgactaatctggtatagagaccgaaaaacacaggtaaaaa

SEQ ID NO: 79992 - DNA, 122 bp, Homo sapiens
gctgccgggggcgggaaagtgatttctcggaaagcagagcacttcgaagaaggcgggccgcgcgagccaagctgacgctattggtcggtgtggccgtcgctctgcgcaccgcccgtcccccc

SEQ ID NO: 79993 - DNA, 122 bp, Homo sapiens
ggggcgccagcaccttcgcctcactttcctgggagaatggcgcaggagccccaagaaagccgggggggggtctccgaggtcggtcctccactcgatgctcctccgaagtagctgcgtgtcca

SEQ ID NO: 79994 - DNA, 122 bp, Homo sapiens
ggcaggtgccgctgcatccccactccacttggagagaaaaccgaggcacagagggtgcagcgattgcccaaggccacacaggaagtggaatgcacagtaaggctgccaacggataggagaga

SEQ ID NO: 79995 - DNA, 122 bp, Homo sapiens
ccggtggagcaccacaccttccgcctgcagggcctgcaaggtgggcctcctcgccgcgtgcgcccctgagggccccagcctctgagcatccgtgcaggtggtgccctgtgcctaggccttcc

SEQ ID NO: 79996 - DNA, 122 bp, Homo sapiens
actccaccgtggccgctcctccccactcccaaaggccaggctatgctggccggctgaacccgcgcagggtcactgagttccaggagtgtttgtaaatacctcccgcagccagggtgcggcag

SEQ ID NO: 79997 - DNA, 122 bp, Homo sapiens
gaggcacagaaaacgatcacttatttgcccggagtcacacacctatcagtggaggtggggcggcgcgggaaagaggatttaaactcaggcttgtctggttcccaagctcctttacttcctac

SEQ ID NO: 79998 - DNA, 122 bp, Homo sapiens
agcaacatcttaggtccggttccctagacacagagcctgagacatcatttcttgtacacccgatttagagggagtgctgtcaggagaaactagaagtgaaagaagtaagctagaatggggga

SEQ ID NO: 79999 - DNA, 122 bp, Homo sapiens
acatccccaccagattagctagatacagagtgtccacacaaaggttctccaagcccccaccggagtagctaggaacagagtgtcgattggtgcattcaaaaatcctgagctagacacagggt

SEQ ID NO: 80000 - DNA, 122 bp, Homo sapiens
agcatgggatgatgacttaaaactacctgctagggttattgtgaagactaaatgggaagacgtctgtgtaaaactcttaattcagtgcatggcgtatgactgttcagtaaatattaaccatc

SEQ ID NO: 80001 - DNA, 122 bp, Homo sapiens
tctccggccactggccggaatgactctcccagagctcctcttccccgaagctccgcccgccgaccctctaaagcaaacctgcacaccctggggcagctgaagctctcaaggcggtgccgaga

SEQ ID NO: 80002 - DNA, 122 bp, Homo sapiens
tttcatatgaattgccctcaattaattgtttgttttcttccaactctttcatacttctgtcgttgttcctaaaataaggttcctaaagctttgaacttaagaactcagaataataaccaaaa

SEQ ID NO: 80003 - DNA, 122 bp, Homo sapiens
gatgatgatggcgctgagcaagaccttcgggcagaagcccgtgaagttccagctggaggacgacggcgagttctacatgatcggctccgaggtagcccggggcgcgttctcgccctccccgg

SEQ ID NO: 80004 - DNA, 122 bp, Homo sapiens
gtgaatcagtctactgctctcttctttttataaaaacttagaagcaaacagcacaaccaacgtcagcacattcttagtatgaacaaggcaaacatcacagtcaaaaggcaaagtccctgttt

SEQ ID NO: 80005 - DNA, 122 bp, Homo sapiens
gcattcgcccacagccaggattatccagcccaacacgcccctggttctaggctgggaaaccgcgctcatgggttaggtctctgggtttcatcttgggagggcttcgttattgaggagaattt

SEQ ID NO: 80006 - DNA, 122 bp, Homo sapiens
ccctactcacccaggtccgaatccaccgcggtgctgtttccagcgagtcagattccagatcgcgctccagcctggactcggaattcctgccccgcgggtctgcattttcacagcggcaggtg

SEQ ID NO: 80007 - DNA, 122 bp, Homo sapiens
aagaagtcagtcagtattattctacttatattaataaatgaactgatgaaatgacaatggcgagatctcgatcttcaacaataagggagatggaaactgaagcaagaagtggtctacaaacc

SEQ ID NO: 80008 - DNA, 122 bp, Homo sapiens
tagattttagggagacataatacatcactgaatacatgtaagatatacattgatttgatccggaatggtgagacaactcaaagcggggctttcagctcatagtagacttaaagattttctga

SEQ ID NO: 80009 - DNA, 122 bp, Homo sapiens
ggtaactttcgggttctggttgtctccaaagtcatccgaccaatctcgcaccgcccagagcgggcccttcctgtcaattacctactgaagggcaggcggccagcatcgccatggagaccaac

SEQ ID NO: 80010 - DNA, 122 bp, Homo sapiens
agggcagggcgaggcgaggggtcacgtttaaagcccagagcgggatgtgccggcgctggccgctacgcaggctgctggaccgatggaccggctggggtgcgaggcaaggccgccgggctgtt

SEQ ID NO: 80011 - DNA, 122 bp, Homo sapiens
aggcagtcgcactgtgaacagaacaggagaaggcgaagcggggcaaagttccctgcccaccgacgccagcctgcttggatgacttgcctcgtttcataattcacttactgtctgcaccagcc

SEQ ID NO: 80012 - DNA, 122 bp, Homo sapiens
cttcccctctttgtttcctctgataacctgttggggttcctgactccctcacccacaccacgctgagctacatttcctgctgtggcttactctggggctggtggagttggcttttgcttcct

SEQ ID NO: 80013 - DNA, 122 bp, Homo sapiens
acccgcggacggtggcgctgggtggccacggaggtcccgcgctccccgaccgagatagggcgggccctatttcggagaggtgtttggcaccaacattttttaaagccccgtgggtggttctc

SEQ ID NO: 80014 - DNA, 122 bp, Homo sapiens
caaaacaaaacaaaaaagtgctaaaagcacagacctgaaagtccccaaactgatacataacgtttacacctaggtgtgaaaaaaaatcttacccctagagcacctgtggtgagaaagtcaaa

SEQ ID NO: 80015 - DNA, 122 bp, Homo sapiens
aactcagcagttttcaaatttagcaggtcctgttccgtagtttctttgtctaatagagctcggttgtaatatctaacttgaccagaaggaggcgctattgttaagcaacacagtacactgaa

SEQ ID NO: 80016 - DNA, 122 bp, Homo sapiens
ccaaagcgaccccaaattcatttagcatgtgatgtgagctaaacatttttttttttttttcggaaaatggcaagaaatgaagccttacccaaagggttcttgccaatgttgtcatgtgtttt

SEQ ID NO: 80017 - DNA, 122 bp, Homo sapiens
tccgccctgccccggacacaagggtctgcattgcgtccatttcaagaggtggccccaggacgcgggcagcccaggctcctgctgttcttgggcaagatgagactgttcccccaaatcccatc

SEQ ID NO: 80018 - DNA, 122 bp, Homo sapiens
cctggaatagtctcggtgcacagcctcacgtaacagggccctcctgatatggcgagactccgcgctcctcgtcactcacggggcaggcgctgaggaaggaactgtcaggcaccgcggggacg

SEQ ID NO: 80019 - DNA, 122 bp, Homo sapiens
gcagttaggacggctccataagcgatatggggaagaatgtgaattattctaaagaaatttcgaagaaattagcacactttccaagtctcttaggagctactattttagataaactcctagat

SEQ ID NO: 80020 - DNA, 122 bp, Homo sapiens
ttccggcggtgtaccggccaaatgccgcctgccagcaacttccgtcctcctagctaaaagcggaaaacagaggctcggaaccgctgcgtggttcttgctcttcactcggccgttttaaaggg

SEQ ID NO: 80021 - DNA, 122 bp, Homo sapiens
ttctgtgcatcgccgagcaccctggatacctcccgcattggaaagggtggtcctggggtccggagcgccccatcactgccctcattgtaccgaagaccatcagttgccctcccgtgtccgcg

SEQ ID NO: 80022 - DNA, 122 bp, Homo sapiens
tgctgctggggacatggatgccaagcggaggcctgcgtggcctcctgagcagcagctgaccgcccgtctcatgctggacgggacccctgggcgggtggacatgagaccactgttggccaggg

SEQ ID NO: 80023 - DNA, 122 bp, Homo sapiens
tcctcgtcgtcctggccgctcaggactcgccgcagcttctccatggccctgttacagggccgtagcggccgccactctgttgcctgcccctgacgcccaccaggaaaccccgaacccgaaac

SEQ ID NO: 80024 - DNA, 122 bp, Homo sapiens
atggatggcggtggtggttgtacttatgacactgaactatacacttaaaaatgattaggccgggcgcagtggctcactcctgtaatcctaacactttgggaggccaaggcagatggatcacg

SEQ ID NO: 80025 - DNA, 122 bp, Homo sapiens
gacgccttcactggcacctggtgagccccgacatgaggcaggtgtggaccatgcctggcccggtgcagcagctcttggacacttaggcaaggcccttggctgcagctggagaatcctaaggt

SEQ ID NO: 80026 - DNA, 122 bp, Homo sapiens
tatcgtaagtggaaatatgttatttaccactcctcagctgttaactgaccaccttcccaacgcaaccctgctctgtctccttcccatgacccaagttgtaatccaatcaggagagaatacct

SEQ ID NO: 80027 - DNA, 122 bp, Homo sapiens
acctgggcaagaaacttcacctctgctgagccctcattccccatgtgtaaaatgggacaacgcaacctacctcacagggttgttgtggggatgctgcctgatacataccctgtcaccatttg

SEQ ID NO: 80028 - DNA, 122 bp, Homo sapiens
gagctgctgagctcttctctttgctccttgctttcttggcttggatggtccccttaaaaccgctctttcaccccccaccgcaggtgagttgccccctccccaggcagccgctccccagcagg

SEQ ID NO: 80029 - DNA, 122 bp, Homo sapiens
tgggagtatttctgctggtataaaattctcaaaaatcttgtcagttttctgttgatgtcacggggatgcacaccattagaactctcaagttctccacggatctttcctggataaccccaact

SEQ ID NO: 80030 - DNA, 122 bp, Homo sapiens
cccaagcaagtccggaattcctggctcaagcgatcctcctgcctctgcctctatgagtaccgggagaacaggtgtgagccgctgcccagtcatattttgattgacactctccaaatgtgaga

SEQ ID NO: 80031 - DNA, 122 bp, Homo sapiens
gaggcctggtcggcgtgggcgttttattccgagaccaaggggatccactgcagagttctccgctgggcgtgacctcgggctacggcgtgggaggaagcgcgcggcaagacacccagcgaggt

SEQ ID NO: 80032 - DNA, 122 bp, Homo sapiens
tgggtttcttgctccttttccttctgaagcaatcctctctctcccatgaggccccctgagcgcactaagcagaggtgccgcctctgagtggaatgtgccaggccccagagctgcctctgagt

SEQ ID NO: 80033 - DNA, 122 bp, Homo sapiens
ttagcagctctggaattaaccaagattctgaagaggctctggggagaaacaaaatccacgcgtagggtagggtttgcatcgggccatgccaagtaaactcttacctcctccagagaactgat

SEQ ID NO: 80034 - DNA, 122 bp, Homo sapiens
ggggtgcggcagaaggcagctcctcacggcttgagtcccaatctttgccccagttggctgcggaactgaatgaactgcccactcaccccagcactgtaaatggttactctcctcatccttcc

SEQ ID NO: 80035 - DNA, 122 bp, Homo sapiens
ccatgctccatgggaatgcttgacgactccagatatcctataattaactgcagggcttgacgggggacagagaaactccaccgcatgtttatttttacaaagaggcagccgcacagaggttg

SEQ ID NO: 80036 - DNA, 122 bp, Homo sapiens
ctgcgcagccatggcctcggcaggggcggagaggcggccgggggtccaggaggcgacggtcgtggggcagggacagctcacggaggagcccggcagcgctcagacctccgaggtgaccgtca

SEQ ID NO: 80037 - DNA, 122 bp, Homo sapiens
gttcaaaaacagcaggatttgccaacactgcacagcacaaggcctacctgaccctaaggccgtggccctcagctctgggctgcccagcctctcaggctccggaatgccatgctatccacagg

SEQ ID NO: 80038 - DNA, 122 bp, Homo sapiens
ctccccactggcggcagagccggggtgacacagggcaggtgatgggaccctacccactggcggcagagccggggtgacacggggcgggtgacgggacctctccactggcggcagagccaggg

SEQ ID NO: 80039 - DNA, 122 bp, Homo sapiens
ccaggtgagactgattccggtaactttgcccagggaagggcgtctaggcgcccatatccacgggtgggctccgggctcgcagttgaattgagggccatcgggagccctcattatgcatccct

SEQ ID NO: 80040 - DNA, 122 bp, Homo sapiens
taaaaatctgacccaggccccccatttctttccctcatcccctcttccaccacaccatcccggaacaagtgctccaggattccctgcccactggccattttggagtgtgtccattgggtagc

SEQ ID NO: 80041 - DNA, 122 bp, Homo sapiens
taaacgggtatctgaggccagctcgaaagttaggaaataaaatcaggtggggccccatcccgtagatgctgagggacagctctgacctagagttcctgctaagcaaatgttgaaccacggca

SEQ ID NO: 80042 - DNA, 122 bp, Homo sapiens
ccccctttccatccacgactttgctgtctgacacaaaacggaccatcgcagcccggcagacgctttagacaacaaacagcatgcctggagcttttcaataggaagcagtaaggcttgatcat

SEQ ID NO: 80043 - DNA, 122 bp, Homo sapiens
cctgggactcggaccaaaatggcaactccaagcgtgctttgggggaccctgccactcccacggaaggtcctcgccgcccacctccccgtcctccctgtcggctcagcatgggccgccgtcac

SEQ ID NO: 80044 - DNA, 122 bp, Homo sapiens
ccaccccccatgcctcaaatccttcccttgccaacctaactcaatgccattgcagaatgacgaatgagctcagaaatagaccccaagttactaaccctgctaagaacagcaaaagcctttgc

SEQ ID NO: 80045 - DNA, 122 bp, Homo sapiens
tgaggccgatggctttttgacacccaggcttcagccacagacagacagacgttccctgcccgtgggggtttgcccttgctggagagaaacagaaatggacagaaggtcactggggtggccct

SEQ ID NO: 80046 - DNA, 122 bp, Homo sapiens
ctttctgtcttgctttcttcttgtctttctttttcctaacaatcagtagtagaattatagcgttctcagctcccacacagtggcacacccctgagaaggttgagtcacgacctgtcatccgc

SEQ ID NO: 80047 - DNA, 122 bp, Homo sapiens
gaccagcgctcctaggaactctccgccggagggcggggtcctaagcctacctgagctgggcgaggtccgcgcggacccggcagacaccgccattgctctgcggaggaggcaggtgggtcaca

SEQ ID NO: 80048 - DNA, 122 bp, Homo sapiens
tggtggtcgctccgccaggcgctcctggcctggtggctgccttgcacatcgtcggcgggacgcccagtcccgatcccgctgggctggtcacccctcgtacccgcgtcagccttggcggggag

SEQ ID NO: 80049 - DNA, 122 bp, Homo sapiens
ctgtcccttaacccaacaatagaaagataggcgtgcctggagttgctgggggacgaggctcgatccagtgtgaattccgtgaagttgtgcagggtttcactgtttgctgagtgtgttagaca

SEQ ID NO: 80050 - DNA, 122 bp, Homo sapiens
acccggaccagcgggcggactgccctgaggaggccgggagcggagggctgggccagccagcgggcgggcgaagatgccgaacttctgcgctgcccccaactgcacgcgaagcgcacgcagtc

SEQ ID NO: 80051 - DNA, 122 bp, Homo sapiens
gctccttgccctgtagggggcgccacagagtatgttcatttcgcctgtattttgctcctgcgctggtagcttgggtttgggcacagtgccatctggggttctaaacttcctggacaaaggcc

SEQ ID NO: 80052 - DNA, 122 bp, Homo sapiens
ctggaatttgcctttcaccatttgtagcctaaaggcactgtcttggccagccctgggcttcgtgcagcttctgcctcttcacctgcatcactaacagggcgatcgctatcacaagggtagaa

SEQ ID NO: 80053 - DNA, 122 bp, Homo sapiens
cccctggaagaccagtgggtggcgccaggggaggacgtggagctgcgctgtgagctgtcacgggcgggaacgcccgtgcactggctgaaggacaggaaggccatccgcaagagccagaagta

SEQ ID NO: 80054 - DNA, 122 bp, Homo sapiens
aatctctcattgcaaacagaagtcaaatagcaaacagcgtcacagcaactgaacttactacgaactgtttttatgaggatttatcaacagagttatttaaggaggaatcctgtgttgttatc

SEQ ID NO: 80055 - DNA, 122 bp, Homo sapiens
ccagggcggacctgtgggcgggacagaactcagaggacgctattaaaagccggacgcttccggtggaagggagctgttgcggggcttgctgggatcatggcggagaatcactgcgagctcct

SEQ ID NO: 80056 - DNA, 122 bp, Homo sapiens
acatgccctggggtctgcagacgaactcggaccaggagctctagtctgccgctgcctcagcgtgggggcacggctgaggctgggaggacccttagcctcgatcactggtggccctggtggag

SEQ ID NO: 80057 - DNA, 122 bp, Homo sapiens
ctgttcccgagctgcgttcggacccgtctgatcgtaaatcccatgtaaggtacctgccgtcggaagatttgaacgttctacttggacacctaaaacccacagtcctccaggtgggtcctaag

SEQ ID NO: 80058 - DNA, 122 bp, Homo sapiens
tttatagctgatcccttcctgggaagctttcatttcttggtccctcctgacgagggaagacgggcagccaggggcccgttccctgggagatgctggtgatctggattctgacgctggctctc

SEQ ID NO: 80059 - DNA, 122 bp, Homo sapiens
ctttctcctccgcttttgatagtttccttccggcagaaagtttaagttgctcagccaagtcgctgagtgctcttttgcctcctgggggcaattgatttactcacgtaaaacagaaaaataaa

SEQ ID NO: 80060 - DNA, 122 bp, Homo sapiens
ccccggggtcctccacccacctgcccagcccccggatcctccacccgcctgtccagcccccgggtcctgcactcacctgcccggcttccctgttgcctactcacctgtctcccactatgctg

SEQ ID NO: 80061 - DNA, 122 bp, Homo sapiens
tcaatgtcccctaaacattccagaccctcttgtgactctgagtctctgcccctgggttcacgccacttagaatgagcttccccccattttctgcgatacacactgtcactttccctgggaac

SEQ ID NO: 80062 - DNA, 122 bp, Homo sapiens
cttcctgggggcggagaggacctcagcggctgcggcgacacccagggaaggcggcgcggccgggtcccgaaactcctggctgtttccatcagagccctcggacactcccagcccgggctgag

SEQ ID NO: 80063 - DNA, 122 bp, Homo sapiens
tgtggcaccgctactccgtgccgcgcccgtcgagcattgcgttgctgcattgcgccccaccgactccactatgttgaagaaattcgacaagaaggatgaggagtcaggtgagggggccaggc

SEQ ID NO: 80064 - DNA, 122 bp, Homo sapiens
agaactagtggtggtgggatggtatttggtacagaggagggaatgttctgccatctggtccgagaagaagagaaggtcaatttgcctagaaagaagaatgaagctgactcacaaagaagcag

SEQ ID NO: 80065 - DNA, 122 bp, Homo sapiens
tttcagaaaacagtcctccaccaagtgagtagcatgcagacttgtgaatagccacagacacgtacaccccggtgaaggtgcaagatcaaacgttgcttcccacatcggccctcactgcgaac

SEQ ID NO: 80066 - DNA, 122 bp, Homo sapiens
caaggaggtggcccagttggtaacactaggccgggttccctcaggtacctcggggtctctcgcctcagggacttgaacccccttgtagttggggcaatcaggggtgaggaggctccatccca

SEQ ID NO: 80067 - DNA, 122 bp, Homo sapiens
gggagggggcgggggcgcgggcaggggcggaggcgggggcggtggcgggggctcggcctgcgcgtggcccggcggcgccgcgaggcgctccatccaggcgcgggctcctgagggagcgaccg

SEQ ID NO: 80068 - DNA, 122 bp, Homo sapiens
tgctttggctcctgtgttaaatcactttcccaagatggtggaatcccgaatattgtgactcgaaataagatgctattaactaatgagcagaactttcttcagggtttatagcaataaaattt

SEQ ID NO: 80069 - DNA, 122 bp, Homo sapiens
ttcacatcagcttgtggcacgggcctggtggctgaggcaaggggtcccctacatggggatcgggggtgtggggggtccagagatgcccaaagaagaaggaagcgctgcctgttgtctccact

SEQ ID NO: 80070 - DNA, 122 bp, Homo sapiens
ttatgggcaggcctccccctaggaaaggggtgtgggatgcccccaggatggccaagttggcgctagccccaggctggagtgctggacatgattctgacctgggagttagtgggggtaaggca

SEQ ID NO: 80071 - DNA, 122 bp, Homo sapiens
accagccagcatcctggacaactgttctctcttgggtggcaaccagcacagactcttaaccggataatgtcttctttttgattattcttttcaccaatttgggtttgttttggtgtctatta

SEQ ID NO: 80072 - DNA, 122 bp, Homo sapiens
gtggcaccggtgcacgctgaaggagccggcggaaccgggtggccatggggatgtgggcatcgctggacgctttgtgggagatgccggccgagaagcgtatcttcggggccgtgctgctcttt

SEQ ID NO: 80073 - DNA, 122 bp, Homo sapiens
gaactagctccatctgctccttcccaattctcggctccggcgagggggagggggatccctcggcggttaggccgggtcctgcacggttattggctgacacattttcaaagctactctcaaag

SEQ ID NO: 80074 - DNA, 122 bp, Homo sapiens
agaccagtctggctctgcatgtcccctggagggggcaggacggttggggagaaaccctctcggcagcctcaagccagccctgccccacccgctgggctcggaccacgcaaagcacatggggg

SEQ ID NO: 80075 - DNA, 122 bp, Homo sapiens
gtggtacatccagggaatggaaccttattcagcaattcaaagaaatgaataatcaaaccacgaaaagacatgaaggaaacttaaatgcatattccgaagtgaaaggagccaatctgaaaagg

SEQ ID NO: 80076 - DNA, 122 bp, Homo sapiens
acttaaacaataacaatcactgtatctttcacagctgggggctaactgggttcagctagtcggttcttgttcaagagcgcacgtgcttacagtcaggtgatggctggggctgaaatcacctg

SEQ ID NO: 80077 - DNA, 122 bp, Homo sapiens
gcagtgtctctcctggaacttgactcctccaccacatgtccgggaacattctgaccacttcgaccaggcggaccactggccgtggatgggccggggcccgagctccccaaactttacgcact

SEQ ID NO: 80078 - DNA, 122 bp, Homo sapiens
cctcctaaaaacacacgtctccaaatgcaacttgaaagtggaaagctcagccccacaggacgctgtgctggccctggagccacaacgggagggccctgcggaacaacccccgtcaaaggaga

SEQ ID NO: 80079 - DNA, 122 bp, Homo sapiens
tttgcctgctgtggaacctcatggagatgcagtcacacagcgttgctcccctgtctgtgacgtccgtcagcgttgctgcgtgtattgatagcctgttccttctgctgcgtggtgttccgtgg

SEQ ID NO: 80080 - DNA, 122 bp, Homo sapiens
tccagggggcaaaaagcactaacctgtattgttttaatctgctgaaaacaaccaacttctcgagttcccctgctgtcttctagccagtttcctgtaaatgttgcatgtgacattatacttcc

SEQ ID NO: 80081 - DNA, 122 bp, Homo sapiens
gagcctcgcattggcctctcgaggttaccgcagcgatcgcatgcaacagtagatgcacggcgcccggcgggccggcacagtcgctgctcggaaatgacgccggtggtgattctcctctctgc

SEQ ID NO: 80082 - DNA, 122 bp, Homo sapiens
cctggagctcgcgaggggcaggaagcgatgctgctgctctgggctctcgcacctccgcggcgtgcagcccaggcccagcggccccacctggtttcccaaggggatccctctcccagcgtccc

SEQ ID NO: 80083 - DNA, 122 bp, Homo sapiens
agcttccaacagggcccaggggaggccgcgggagaggaccccttccctctcagagagactcgtcaggaaacaattccagactctgacctgggaagaaaagaacaggacacttctctcctcta

SEQ ID NO: 80084 - DNA, 122 bp, Homo sapiens
cgggtccccaggggctggagagcttaactgtccctggagctggcctcaggccttcagccccgggtacagctgatcccctgcctttggggaagggaatatcataataataataagaagagcag

SEQ ID NO: 80085 - DNA, 122 bp, Homo sapiens
atccatgccacggggctgacagccacagatctggaagctcaggcctaggagtgcaggctccgttaagccctgtgtccaacatcctgactcctaggggtgcccaagatttgagtggccacttt

SEQ ID NO: 80086 - DNA, 122 bp, Homo sapiens
agatgtcatcctcccgggcgggggcgaggcagttcagcgagtgaacccagcgaatgaaggcgaccagggtgcgaattccgagtggaagtgtattctcttctctcctccagtgtttctgcgat

SEQ ID NO: 80087 - DNA, 122 bp, Homo sapiens
tatgggaagacttgaattctggatgagaaactcagtgtttattagcagtgaagtcctttccgggaggctgaagagagtctcagggcaggtagttctttgaaaagaccccatctcttctcccc

SEQ ID NO: 80088 - DNA, 122 bp, Homo sapiens
tcgtaaggcgcctgcaggcgtgtcagggcgaggcgtacagaccgacccagagcgggcgcgcggattttgcttttgcagctgcagctcctggcaactggtcaagcaggcagcgtccagcgcac

SEQ ID NO: 80089 - DNA, 122 bp, Homo sapiens
cccacgggagggcgcttgggtgcctgtctgaggcgcctgggacccggcctggggactgaacgggttgggggcggaggggagagctggaggctgggaaaagcccccagggtgcagaaggcaga

SEQ ID NO: 80090 - DNA, 122 bp, Homo sapiens
cgtccgggaggtggggggcagcctctgcccggccagccgcccagtccgggaggtggggggcgcctctgcccagctgcccggtctgggaagtggggagcccctctgcccggccgccgccccgt

SEQ ID NO: 80091 - DNA, 122 bp, Homo sapiens
ctagggtacccggcggggggcgcgaggaggccggggaacatcatggtaggcgcgggcgggcgaaataacccttctttcagtggccggagggtaaacgcctcgcttcccgcccctcccgcccc

SEQ ID NO: 80092 - DNA, 122 bp, Homo sapiens
gctgggtgggggcaccgggaagcgggccgccgcagaagaacccgctgcctttctctacgccggcagaggctgccaggggagctctggcatttgcaaagttggctggtcaattaccaaagggc

SEQ ID NO: 80093 - DNA, 122 bp, Homo sapiens
aggccgaggtgggggaattgcttgagcccaggaggttgaggctgcagtgagctaggatcacgccactgctctcctgcgtgggcaacagaatgagaccctgtctctaaacaaaaatatttttt

SEQ ID NO: 80094 - DNA, 122 bp, Homo sapiens
attcaccaggcacccctgagaccccacggccccaggggtctccatctcacctgtccgttccgcgaacacacacctcgatgaagtccacagtccccacagaatcctgcgtgtgacatcccccc

SEQ ID NO: 80095 - DNA, 122 bp, Homo sapiens
gtggccttcagcagcagcgtttaagatgtctgtccgtattctgcacgagggtttatatcccgttctgagtgctggccatttgggtgggttccagtttttgctggtataaataattctgtgat

SEQ ID NO: 80096 - DNA, 122 bp, Homo sapiens
gtcctgctttcatagtcggggggccggctctgcagggtgatgggctgggaggtgccggggcgaacagtgaaggtgaccgtcgtgctccgtgtacctgagatggtgctcatgatctccgggct

SEQ ID NO: 80097 - DNA, 122 bp, Homo sapiens
agacattttgaaatggaaacagagatgagaaaaacaagcaggagatttccctgcaaatgtcgactctgaaggctaaaggaaattgcatttccacatgtaaagcagaaaaaaatgggccagct

SEQ ID NO: 80098 - DNA, 122 bp, Homo sapiens
ggatttgccatgttggtcaggctggtctcgaattcctgacctcaggtgatccaccctcctcggcctcccaaagtgcaggattacaggagagagccaccgcgctaggccaaaattatgtaatt

SEQ ID NO: 80099 - DNA, 122 bp, Homo sapiens
gccaaggaggcgtcgcgacctggttggccggccggggcctgggggatgtcacggattggtcgcggccgcgagcgcagtggtgtggagcgcgccgggtcccggagccggctgtctgagggatg

SEQ ID NO: 80100 - DNA, 122 bp, Homo sapiens
gatcttctccccttcctgccccggagggtgctggcacaggggtggggctcactcccactccgtagacacaatgatcagaggtcctgggtgtctggggaagctgggctgtgcgtgtatgcgtc

SEQ ID NO: 80101 - DNA, 122 bp, Homo sapiens
ttgccaacggagctggcggagctcactcctcaggtcaggcgggcggcgtagaaaacgcagcggagccaggtgaaaccaaggcaccgccgtggctggcccccgacagttcctctagccgggag

SEQ ID NO: 80102 - DNA, 122 bp, Homo sapiens
ttttttcaattgagagaactcaagcaatcctccctcctcagactcccaaagtgctgcgcccgaccaagggttttgaagagtaaaatttggcaaggtgtggtttaccagtcctacaaagaatg

SEQ ID NO: 80103 - DNA, 122 bp, Homo sapiens
cgtcgcggagcagctcgggctacagagggggccgcggcaggaccatggagcgaggatcgccgcggagggaggtggcggcggcggcggatcggcgctggggaccaggaggcggcggcagagac

SEQ ID NO: 80104 - DNA, 122 bp, Homo sapiens
ttttgcttttgtttttatacacctcaccacaaggtattttaaattctttaaatgtattcccgaatatagaaaatgtttcttgggctctcctgagagtggggtgcccaggctgaccacaggca

SEQ ID NO: 80105 - DNA, 122 bp, Homo sapiens
cgcggccacgtgagcgccagattctggcgcacagaccactgccagtcctttgctgctttgcgcagcctgtcctccccgccaggagcacccttcccgctcccttttaccacgggctccagccg

SEQ ID NO: 80106 - DNA, 122 bp, Homo sapiens
accgacgccgtccctcttagccactgaatctccggtgatccgccagtcccctgcgggacgcgtcggggaccctcttgatcggatgcccggatctctgtagtctctccacccttcatcttcca

SEQ ID NO: 80107 - DNA, 122 bp, Homo sapiens
gatgactcacaaaccagcatatttcaccattacttgttctctcaaaatgttgaaagtatacgctccttttataaacaggaagtaattaaaatttctttataatagcataataaatcacttca

SEQ ID NO: 80108 - DNA, 122 bp, Homo sapiens
ctcaccctttcaaatctagttcagacaccacttcttcaacaaagctgcttgtgatttcctcggccagaaacaatctccctttctctaactacatttagttcttcatcactagctttcaggcc

SEQ ID NO: 80109 - DNA, 122 bp, Homo sapiens
gctggcttcccctagtggatcctgcgctggggccgcaggcggagctgctcaccagtccggcgccacgcgcccgcactcgtcagcccttgggcggtggatgggactggccccgcggagcaggg

SEQ ID NO: 80110 - DNA, 122 bp, Homo sapiens
ggttgtacacattaaagtaaactgcaaaagtcagaaacaacagttcagatatacacatagcgatatgtataaatcttaaaaacatagtgcttggtgaaaagataagaaataggatgagctat

SEQ ID NO: 80111 - DNA, 122 bp, Homo sapiens
ccggcccagggtcctggcgcgcaacgacatgagcatcgccgaggagctgctgtacctgcgcgtggtgcgtggcctaatggccgccatgggcaacacggaccacagcaacagccagcggctgg

SEQ ID NO: 80112 - DNA, 122 bp, Homo sapiens
gaaaccacggtggggggggctcctcctgcatttggcccgctgactggtttccattagagccggcctgctttccctgagctctgcccctgcagttcaaggcttcccctgggggtttcttccca

SEQ ID NO: 80113 - DNA, 122 bp, Homo sapiens
cggagtagggagggaaacgagctttgagcaggggatggcgttttgaaaagacctctctgccggtgtacgaagaatggattagaacggcgaagagtaatagggtggaaaccatcttcatcttg

SEQ ID NO: 80114 - DNA, 122 bp, Homo sapiens
tgtgcctatgcctctgaggctctgattatcccccgtgttcttttggtaaatgtgggcccacgcatccatgtatgcatctctgcacagaacaggatgttggtctgtttgggggctctgcacct

SEQ ID NO: 80115 - DNA, 122 bp, Homo sapiens
agttcaaatcctggctctgtacatggtaaagccctggagaaatgtagcttcacagtaattcgcatgatgatttgggggccttgtcctgaactgcttggcagctggatggctgtgggtggggg

SEQ ID NO: 80116 - DNA, 122 bp, Homo sapiens
tccagggaatctgcatgcatcagccattacctcctctttcaaaacacaagaatgggagcacgcaatgcacactttcctacactttgctcttgtaattttgttttgtttttttgagacagggt

SEQ ID NO: 80117 - DNA, 122 bp, Homo sapiens
cagggctcgggaaaggcgaagtccaggagcccggacctgacgcagaatgtctatagctgccgtcggcagcgtgagctggggcggcggtcctaggggccttggccgcggccgaccccttgggt

SEQ ID NO: 80118 - DNA, 122 bp, Homo sapiens
tggtcagagggggctcggtcagctagggactcatccatggagaattgttcagtggggggtcgggtcagcagcaacctggtaaattgtggtcttgtcagtgggaacccggtcttgtcagtggg

SEQ ID NO: 80119 - DNA, 122 bp, Homo sapiens
attaattagccactgcacaagtaaactacttggtgtagctgatgggaaagcggtaaaactcgatttcaaacttgtctaaaaaaaaaaaagaaaaatggtaaaagatccactgtttgccttca

SEQ ID NO: 80120 - DNA, 122 bp, Homo sapiens
agcacacaatgaaatcgcacagagcatgggggctattggtttactctgctgccttaaacacgccggcttaaacagagttcgcgcactgacctctctagagtttgcctaataggaattcaatc

SEQ ID NO: 80121 - DNA, 122 bp, Homo sapiens
ggcgggaagaggacttccttcttcgtgatcaatatttgcgtagcactttgcaagtgttttcgggttcatcattgcatgtaagcatcctaggatcccattcttaatcctatcgcctgaagaag

SEQ ID NO: 80122 - DNA, 122 bp, Homo sapiens
ccgcagccgcagggttcccatgccagtccactgggatcttgtgccatgtaattgagggggcgccagatctaaggatcagtgaactaatgtgtgccatgacccagtgtgagttgagatcaata

SEQ ID NO: 80123 - DNA, 122 bp, Homo sapiens
aaaatttgagcacgtataagtagagagataattgtggttaataaaggcaggaaggataatcgggaggcaggtattgggagaggttggataacagatacaaaattataggttagataagaata

SEQ ID NO: 80124 - DNA, 122 bp, Homo sapiens
ttataaaatacatgtattattttcacaatcttatattacgcagccgagaaacctacaatgcgcttactaattggttaacagatgcccgaatgctagcgagccagaacattgtgatcatcctt

SEQ ID NO: 80125 - DNA, 122 bp, Homo sapiens
ctggctttcggctgggcccccgggcaggatagagggcggccgcggctgttgttgttgtgacgaggccgggtgttgctgggtggcacagggagaggtgtgtgtgtgtttgtgtgtgtgcgtga

SEQ ID NO: 80126 - DNA, 122 bp, Homo sapiens
aaataaataaataaataataaaacctagcccggactgtaatcacgtccactgggaactggcgcagtagtggaggggacgcgatcaggcccgtggctgcgcccagagcatgataagccaggga

SEQ ID NO: 80127 - DNA, 122 bp, Homo sapiens
acgggccgcagagtacctacagcatggccaccgcaagcgcaactaaaatccagggcttgtcgcaggcacaggctcctccttcggtgggtgggacggcggcgcgcactttctctacgccccac

SEQ ID NO: 80128 - DNA, 122 bp, Homo sapiens
ggcctgaattgagcttcaccaacaacatgcctgaaagcctccgtcactgacaggcacttgcggatggaaaacaaccctttgacaaaagaccctatcggccaaataagtgatcagcccccagg

SEQ ID NO: 80129 - DNA, 122 bp, Homo sapiens
gctgatgtggaagcaacagcaaggcgatcagtaaagggagaggtcagtgaacccatctggcgaggcattgtctgttctccaaatcaagaaggactaaggcttttgtcaaccacccttctcaa

SEQ ID NO: 80130 - DNA, 122 bp, Homo sapiens
tgtgtgtgtgtgtgtttcctttcagtctccattttatgaatgaaactccaggctctatagcgtccattcatgtaagagaaatgcttacagggctctgcccctagggatcaatcagtcatggg

SEQ ID NO: 80131 - DNA, 122 bp, Homo sapiens
tatgccactcaaaggaacaaaacaatgctcacagagtcagctcagatcacacagtcagctcggaaacaggaaagcctgctagctttttgcccagggtgaaggagaaacgaagtagagagtgc

SEQ ID NO: 80132 - DNA, 122 bp, Homo sapiens
tgtttttgcaccatagattataatatgaacatatcagtcacttctgacagccaagcagcacgacaggatgccgtagtgacaagttccaggtgcaacgtgtataagaagataattgtgacatt

SEQ ID NO: 80133 - DNA, 122 bp, Homo sapiens
cgatgggtctccaaaaggtctggaggatgttgcctccgtgttgaattagtcatcaataatcgatttctctgttcatgactaactggagatcagaatgagctcaggatcaaggactaggatcg

SEQ ID NO: 80134 - DNA, 122 bp, Homo sapiens
aaggacaaggtcccttccctcaaatattttgtagtaaggtcaagcataaacagttataatcgagtcatgaggcaatcataatagactagaaagttctgtgaccagtgcctggcaccaagcag

SEQ ID NO: 80135 - DNA, 122 bp, Homo sapiens
aactgaagcctagaagccgcccacagacggcagaactgaagcctacaggccgcccacagacggcagaactgaagcctacaggccgcccacagacgacagaactgaagcctacaggccgccca

SEQ ID NO: 80136 - DNA, 122 bp, Homo sapiens
caaacctatcatgagatacgccagcactgacaagaatcctcactgcggcattgttcatcgcgccccaaactggaaacagctcaatcgatcctcagcggaacggagaaatcatggcctcttca

SEQ ID NO: 80137 - DNA, 122 bp, Homo sapiens
taagtgactcagtgcatttagagtttggccttaggtgggaatatgctacatttacactatcggctgcaactgtgaatggagaaatgaagaaaggtgatataaacacaaggtttggcatatca

SEQ ID NO: 80138 - DNA, 122 bp, Homo sapiens
tcacggccaaggccaacgacgcaggcactgtcagcaagctctgccacctcttcctggaggcgctcaaggagaacttcaaggtgcacccggcccacaaggtggccatgatcctggacccgcag

SEQ ID NO: 80139 - DNA, 122 bp, Homo sapiens
tgtggatgatgtactgagtggtcagagccagacacaggaagtggccgtccacagccacagcgaggggctgctcggcagtcgacacctccttgacgatctgcacccggtcctcgtacaccaga

SEQ ID NO: 80140 - DNA, 122 bp, Homo sapiens
tcgtttacacacaagtgagtggcgctgtaatgagcaggaggaacagtcatgtcccatctgcgacctgtcgcatcaggagaatatctgtagtcacctattctgcccggggccccaaatgcgcc

SEQ ID NO: 80141 - DNA, 122 bp, Homo sapiens
gcctttggctgggagaccctggccagagatcagaagatcaaaggatgagaagatcaggggcgaggcaggtggcactcacttggaggcaccagagagaagcggcagctgctgcctcctaaggg

SEQ ID NO: 80142 - DNA, 122 bp, Homo sapiens
ccttgaagtcgtaggccgactgcttgatgacctcaggtgccatccagaagggggtgcccacgaatgtgttcctcttaatctgcgtgtctgtgagctgccctgctaccccaaagtccgccagc

SEQ ID NO: 80143 - DNA, 122 bp, Homo sapiens
cagactggaattcacaccattagctttccttgtctcagacctttaggctccagactagttcgatggcattggctctcctaagccttcagattgctgatctcaagttgtgggacttaagtctc

SEQ ID NO: 80144 - DNA, 122 bp, Homo sapiens
caattccggacacaatagcaggtgctgataacgatgggagggagttggaacctttgtgcacgtgggtagaaatataacagggggcagccactgtgaacattgaggtgattattcaaaaagtt

SEQ ID NO: 80145 - DNA, 122 bp, Homo sapiens
cggccgatttgcgtgtctccgcccctacaacgagctggttggggggctgttctggtgccgcgcgccgattggatgagaggcccgccgctcaggccctggagcggacggttcctactgcggct

SEQ ID NO: 80146 - DNA, 122 bp, Homo sapiens
agcactcctactcagtctccagagccaaccagtggagtcaggctacagtcattgcaaactcggccattagcagtgacaaggggtgggtgactctgtatgctccagtcgcagtaactccagca

SEQ ID NO: 80147 - DNA, 122 bp, Homo sapiens
cagtttctccttttaccagcaggaaaatgtacatttaagcataaaccacaaggctgcacacggtgagaccaggccactgcccagggagctgctgtcggaggaggagtgtggaaaaggggcca

SEQ ID NO: 80148 - DNA, 122 bp, Homo sapiens
accagcatggtccctgccggcagctcggggccggagggttttgactgcaaggccagcccacgccgagggtccaagcatcgggatatgccgccagcacctggctgctgcagcaccgcgctgga

SEQ ID NO: 80149 - DNA, 122 bp, Homo sapiens
ggcacggggttgggctccccccgcagcggctccaggcggtcggtgttgacgccagccatgcgctgccactcctctgtgcgctcagctgagaacacctgccactgctgggaggcgcacagcag

SEQ ID NO: 80150 - DNA, 122 bp, Homo sapiens
ctcaagcgatcctcccaccttagccttccaaagggttgggatcacaggcatgtgccactgcgaccagccaggataataatctttcatgtgattttccgactttaagccccctgcacccagag

SEQ ID NO: 80151 - DNA, 122 bp, Homo sapiens
ttggaattgcaaaatactgcaaagtacctaaatgtctaagcataaaaaactggttgaatacgcaacagtacatacaatcaatgaactactaagcagttaccaaaaagaatgaagatctcaaa

SEQ ID NO: 80152 - DNA, 122 bp, Homo sapiens
atgtaaaaaagggataatgcttaccttgtttgcatgtatttgaggattagaaataatttacgagtaacctagattttcccaaatctatctcatggagctattgtgaggatcaaatgagacag

SEQ ID NO: 80153 - DNA, 122 bp, Homo sapiens
tccagcagccaccgccgcggccgcctaccgaggggcgcacctgcgaggccgcggtcgcaccgtgtacaacaccttcagggccgcggcgcccccgcccccgatcccggcctacggcgggtaag

SEQ ID NO: 80154 - DNA, 122 bp, Homo sapiens
ggcattcctggaatcactgtcttctgttccattgtgtcttggttccagcggctcctcttccgcttcttacttgggaagtctaaaaggcagagacaaaatccatccgatgtaaatacaagtag

SEQ ID NO: 80155 - DNA, 122 bp, Homo sapiens
atcgtctcctcctcttcatcctcctcctctcctgcagagttctcgcagtcctcgtgtgggcgctggcacgcagcatccttccggcacacaaacaggccatcctcactgttcaggagctgggt

SEQ ID NO: 80156 - DNA, 122 bp, Homo sapiens
gtgtgggagcaggccacgcccctggtcttccaggaggtgccctatgaggacatccggctgcggcgacagaaggaggccgacatcatggtactctttgcctctggcttccacggcgacagctc

SEQ ID NO: 80157 - DNA, 122 bp, Homo sapiens
cccagcgcagtgaggaccccagcccaaagaagacatagaagagggtggcaaagaactcagcgaatatggccctccaaaaggaggctgatcgcagttcccacatggcaggggggatggtcaca

SEQ ID NO: 80158 - DNA, 122 bp, Homo sapiens
ctgactgcagcatgtttttcccaagccctgcgtcttaaagtcctgggcacacacacgagccgggctggtttccttgcgtcttaaagtcctgggcacacacacgagccgggctggtttcctgc

SEQ ID NO: 80159 - DNA, 122 bp, Homo sapiens
aataaatacttattaaataaattatccccattgcagaaaagctagaactaaacaacgtggcggctgttagaaaagtgtgtttctcacatctgcaaagtgagaatgataaaatgaggccaggc

SEQ ID NO: 80160 - DNA, 122 bp, Homo sapiens
tgtggcctctatcacactctgcatgtggcctctatcacgtcctgcgtgcggcctctatcacgtgctgcgtgcggcctctatcacgttctgcgtgtggcctctatcacgtgctgcgtgcggcc

SEQ ID NO: 80161 - DNA, 122 bp, Homo sapiens
agagcaaccagccacctctgcaagggtgtgccaggagcagttgtaccactcacccactagcggccggacaaggtacatcagttcttctaccctaaaggtgggccgcagtgccatctgctttt

SEQ ID NO: 80162 - DNA, 122 bp, Homo sapiens
tggcgccgcacactggggcccccccgccgccgccgccgccaccgccgccgccgcctccgccgccgcccgcccggaggctgcttttccagagctccgagtaactgagcagtgtctttgacggc

SEQ ID NO: 80163 - DNA, 122 bp, Homo sapiens
ccatcctctttccaccatcagctccctcctgtcttggcacctggtgaccgcagtgcatggcgccagcttggcacttccagggctggccccttcctaaccctgccagatcaggtcagcgagag

SEQ ID NO: 80164 - DNA, 122 bp, Homo sapiens
cccacctgggccatgcctggaagctgggacagccccctgccccacatggaaggtgaggcccgaaggcaggaatatccctgaggtgcccacagccctcaggaggggaggctccgcgaatacac

SEQ ID NO: 80165 - DNA, 122 bp, Homo sapiens
gtccaccatgctgtctcccgcccccaccccccatcatggctccgcccagctggcagtcaccgccccacatggctccgcccacggtgcagtcgctgcacatatgccccaccccccaccatggc

SEQ ID NO: 80166 - DNA, 122 bp, Homo sapiens
caccatccgcccgtcccgcgcaggcgccggcgccgccgcccgtctggcgcgcgcctggcacgctctcttgcggctcttgactggcggcctcggccccacttgccccagttacacgcggtccc

SEQ ID NO: 80167 - DNA, 122 bp, Homo sapiens
ggggcgcccgggctccccggagtctccgccgccgccccgggccagcgcggcctgcgggagcgaggctttgagctgctcctccgccagcacctgttgcagccgctccaggttgagtctgcggc

SEQ ID NO: 80168 - DNA, 122 bp, Homo sapiens
tgccaggcgcacacctatgccggcggcctccaagacgtggagatcactgcggcgctttctcgccccgccccggcccctgcaggccccgcccttggtcatgaatatttaaagaagaaggtgcc

SEQ ID NO: 80169 - DNA, 122 bp, Homo sapiens
acgcccaaatattaaaaagcaagttcacaaggtcagcctgcctgcagcttgggccaaggccggccggctgctgcgcgggctcctagttttctgatccttctcctccttgtgtctgcctgtct

SEQ ID NO: 80170 - DNA, 122 bp, Homo sapiens
ccccgcagcggctcctgggagccccaggaagcctgacaagcaagcctgggagatgcaggccggaggtgccaccgtgttggtaccgctgggagaagccctgtccttcctggccagcttggtgc

SEQ ID NO: 80171 - DNA, 122 bp, Homo sapiens
ggctacgccaatagcagcctcaaccccgtgctctacgctttcctcgacgagaacttcaagcgctgcttccgccagctctgccgcaagccctgcggccgcccagaccccagcagcttcagccg

SEQ ID NO: 80172 - DNA, 122 bp, Homo sapiens
ttgacactgacacagggggggcgaggaagcttgtcacggctctgtccttggtaggacaggcgcttggagctctgctcctgctccaggtcagccagcttgcctacctggatacctgcaaaatc

SEQ ID NO: 80173 - DNA, 122 bp, Homo sapiens
caagtacggcgtgtttatgcgagtgagcgaggtgaagcccacctatcgcaactccatcaccgtgccctacaaggtgtgggccaagttcggacacaccttctgcaagtactcggaggagatga

SEQ ID NO: 80174 - DNA, 122 bp, Homo sapiens
gacatgaacttgaagaagagaaacagaaatagagtttgggggagttttctcaggtgccttcgatctcactatcgtgttcagtctaaacgggggtgtggcggaagaaacccatgggcggtcac

SEQ ID NO: 80175 - DNA, 122 bp, Homo sapiens
gcctgggaaaccccagctctggtccttccccgtctaacccccttttctaagacggtcggccgtcactccctgaacttccacagcacctgcttcggtggaaacccggttctgcagtccctgct

SEQ ID NO: 80176 - DNA, 122 bp, Homo sapiens
tactctggaggctgaggcaggaggattgtttgagaccaagagtttgacactgcagtgagccgtgattgcaccactgctcttgagcatgggcaacagagcaagaccctgcctctgaaaaaaca

SEQ ID NO: 80177 - DNA, 122 bp, Homo sapiens
ttctcttgccactcctcaaaaagcaaaattttgcagcccaaatattaaaaattgactccgcgtattccttctcccccacagtggcacacaactgggcaggctccatctcgtctgctgctgga

SEQ ID NO: 80178 - DNA, 122 bp, Homo sapiens
ggactaccgacggcgctggcggtcgggatgggctggagcgggctgcagtcggggctgcatcgccgggtcccagcatagcgcaggctcggcgccgcacccgcagcctttgtcctgagctgcag

SEQ ID NO: 80179 - DNA, 122 bp, Homo sapiens
tgtctcccacaatgtgactcacaggaggcctgcagcttcagttttgaacaaacaaacgcacgtcttcattcagcacaaagctaactagtgttagttatacagctaactagttatgcaggcta

SEQ ID NO: 80180 - DNA, 122 bp, Homo sapiens
acttcctgtgtctgatccagcctcaggcaggccttccctgtgcggtggcagagacggtcccggcaaccacatcttgctttccaggagctgagcctccctgtgcagatgacagctgccttttc

SEQ ID NO: 80181 - DNA, 122 bp, Homo sapiens
tcccagcctcgcggccccgggttggtggtgacgcctggaatcagacgcgcgtagctggaccgggctcttggaccagccaggcgccaccgccattgtctacggccataccattctaaacacga

SEQ ID NO: 80182 - DNA, 122 bp, Homo sapiens
tacctcacaggactattactaagatttagagttcacacatgtgatacacctaatcaagttcgtggcttgttataagcacacaaattctggttttcttctcttctttatgccaaagtattact

SEQ ID NO: 80183 - DNA, 122 bp, Homo sapiens
ccaatgcttagtctcaaaaaaaccactggtaatagggatctcagaaatatcagaagaaaacgttccttctacccctagagctgcagacaagcagattctattccacaatataaggccaaagc

SEQ ID NO: 80184 - DNA, 122 bp, Homo sapiens
ttggtggcaaaagaagagctggaaatgatgtttaatgatactatgatgcttacactgagccgtcttgtttgggtggtctaaggtagcagtgaatctaaatagtcattgccagttgaaaaact

SEQ ID NO: 80185 - DNA, 122 bp, Homo sapiens
tttggtgaaattattattttttttagagtcagaatcttcactgttgcccagttgtctccccgggacccaagccgtcctcccacctcagcctcccacagtactggaattacaggcgtgagcca

SEQ ID NO: 80186 - DNA, 122 bp, Homo sapiens
attaatcagcctcttaaagtacatgtctaaccaatgagactaccttgccctaaacagaaccgtaagaaatctctagttcacctttcctcccattgccttgggttcacagattagggagatgt

SEQ ID NO: 80187 - DNA, 122 bp, Homo sapiens
caccaacagttcctctggattccctgaggagaacatggcgactctgttagcttcactgctcggctgtttctatgtacatgctagcatgtgtcagtgagtgcaagagatgggagtagatttct

SEQ ID NO: 80188 - DNA, 122 bp, Homo sapiens
agaatggacctgccctttctgctccagacttggggctagatagggaccactccttttaggcgatgcctgactttccttccattggtgggtggatgggtggggggcattccagagcctctaag

SEQ ID NO: 80189 - DNA, 122 bp, Homo sapiens
cgggggctccctaagggcagggacttggctgcacttggctgtgtgccctatgggtccaggcgcggggaggggaggccagggcgaatgggcgcggagctggggggtgaaagtcctgcctgggc

SEQ ID NO: 80190 - DNA, 122 bp, Homo sapiens
gcttgaagtccacaccgcccaggccggtgaacccggcgggttttgcagtcaacttcgctccgaatttacagaaaacagctactatgctagggacgcggaacagtgtattagagactgaaaaa

SEQ ID NO: 80191 - DNA, 122 bp, Homo sapiens
tacttgggaggctgaggcaggagaatggcgtgaacccaggaggcggagcttgcagtgagccgagatcacaccactgcactccagccggagccacagagcgacactccgtctcaaaaaaaagt

SEQ ID NO: 80192 - DNA, 122 bp, Homo sapiens
tttctttttataacccaatttattttcttttactgttttatataaagatagtattctgagcgggatgcataaacctcaccagtctgccaaaggaatccatgtccagtaaagattaagaacct

SEQ ID NO: 80193 - DNA, 122 bp, Homo sapiens
gccacgtttgaacactttgctgcttagaaattctccctcctgataccctaggtcatcactcgtaagttcaaacttccacagatggtagtgcatgaacacaatgcagacaagttctttgctag

SEQ ID NO: 80194 - DNA, 122 bp, Homo sapiens
actcctatcctccattcctgcaagagttttaagcttgagagagctgaccacagggccccccggggaacagggatggcacttccctgagcagtcctggcccccggccactgtctcggggccca

SEQ ID NO: 80195 - DNA, 122 bp, Homo sapiens
ctggcccccttggaagccccagtgccctctcattgtctgctctaagcgacttcttaggatcgcaccggccacacggctttgcttacttcctggtagggccctggtgccaccgctagtctttg

SEQ ID NO: 80196 - DNA, 122 bp, Homo sapiens
ccaatcgcttttctctgtcgtgcagtcggctcctgggattggccagggacgggacaggcgcggaaccactgcgcgcacaggcggagcgcggagacttgtccgtcacgtgcggccgcccggcc

SEQ ID NO: 80197 - DNA, 122 bp, Homo sapiens
gcgtggcgggggctcaggaaggagggtggccctaccccagcgggctcggctcggggcctccgcggcagttcggggtccttcacccgccggctccaggtaggctactcctcaggtaagccccg

SEQ ID NO: 80198 - DNA, 122 bp, Homo sapiens
tagacattaacaggtgagtagtcttgtctaacagttatatgggggaaagccactcataaacgtagaactggtagttgtctaatctaccagaggaaagctcccttaactgcacccctgtctat

SEQ ID NO: 80199 - DNA, 122 bp, Homo sapiens
gggctgggctttcaagagagctcaaggctgccagagagtgatccgagagatggatgacttcgcaaagccgcgcccacagacggcccagcggggtgagcgcgtcgcagcccgcactcaaggag

SEQ ID NO: 80200 - DNA, 122 bp, Homo sapiens
ataaatagtcaaaagactcttcgtagtgatagagagcaagtgttctttccaagaagtaaccgtaggtatagagattacagtaaggtgtttagcctgagaagagccttattgatttaatggat

SEQ ID NO: 80201 - DNA, 122 bp, Homo sapiens
agatgaccaactactaggacagcctccctgtgggtggcctgcagtctgttctgctccccccggccccatgccagctgccatgctctatagaacatgtctcccatgctgcccgaggagggcct

SEQ ID NO: 80202 - DNA, 122 bp, Homo sapiens
gaggttccgtgattcccataggtcaggtgacctcacacaccccctaggcagcctcacctacggttgccagaaatttagcaaaacagccaaacatgaacagaaaacattcagcaggatggcca

SEQ ID NO: 80203 - DNA, 122 bp, Homo sapiens
ggcgcgcggcgagtacgggaggccacagctccccaacccccgcgccccgccgaggatgcgcggaccccgccctgcatcctgcggtgtgggctggagctgcctcccgctctcacccagcgccc

SEQ ID NO: 80204 - DNA, 122 bp, Homo sapiens
taagaaggagccagaggggatattgttggcttctgaagggatcaggccctgacctttttccggcagcctcaggagcagcacgttgctgtcagggcctcgagcccggccagaggatggtctca

SEQ ID NO: 80205 - DNA, 122 bp, Homo sapiens
cccagcacagcctcttcaggcattcagagagattctatagctccttcctgtaggtgggaccgcagagcacattccaaactcttcccttaggaaccgtggtcctagtccaggaagcctttctc

SEQ ID NO: 80206 - DNA, 122 bp, Homo sapiens
acgctccgctgcctctctgggctggctcagccgttgcatgttcctgcgtgtgcactgagacgtccaccctggcacgcttcttcccctcggcacgtggtccccacgctgtgcctgcccagctc

SEQ ID NO: 80207 - DNA, 122 bp, Homo sapiens
aaaaagctttagattgatcctaccttgcttcatctaacagtgtcatcaatgagctctcctcgaagacagtaaaggccaaagttctctgagccaagggtccctgctagttaagccaggattca

SEQ ID NO: 80208 - DNA, 122 bp, Homo sapiens
tgtaagtgcttgcgcgtggttcctcctcgttgtcctgttgaagttgctcttggtctggaacgcgcgctagtcgttgtctttcagcactccgctttccacaccgcacgcttttcagttatgct

SEQ ID NO: 80209 - DNA, 122 bp, Homo sapiens
catcctccaatgcctctgaacagactgtgtgtgcaatgtgtcaactgaacgctcaatttacggcctctgctgggagccacgcatcgggaaaggactttgcatgaatttgtggtttcctccat

SEQ ID NO: 80210 - DNA, 122 bp, Homo sapiens
gaaaacgcacatctcctagacgactaaagagctcccggagaaagcaatgtcttttcgcgccgaattccatctaccacatcccccggaatgtcccacgcgtaacgccctctgcgtgcgccggc

SEQ ID NO: 80211 - DNA, 122 bp, Homo sapiens
ctgtcgccccctctcctggtcttcccctgtcaccccattctccgggagaggtgggagggccgcctgagcctgggagctggagtcctccaagcctggaccaagccggaaggagggggccgtga

SEQ ID NO: 80212 - DNA, 122 bp, Homo sapiens
ttcagcgccctgctgctcaaacctctagggggagcatacagatgggcacgttgtggggctcggaccccatggcagtgtctagaggtgtatgtttacagctcctgaagccccagtgggcatgt

SEQ ID NO: 80213 - DNA, 122 bp, Homo sapiens
aatgagagaaaatcatatgcactgttctgaacctgccatctgatacttaatagaacagatcgaaacattcttaggtaggtatttctgtgaaggaaaagttgcaacagtttacactcccgcca

SEQ ID NO: 80214 - DNA, 122 bp, Homo sapiens
ttcatcaaagaaggcaaaaaaaattgttcatggcatgcaaattagaaaatgagaaattggcggttcccattagcaacaaatattctgagaagagtttcatgggaggagaggccatatacatc

SEQ ID NO: 80215 - DNA, 122 bp, Homo sapiens
gccctcagttaccctagcagcgatctgaggagtgtgggccaagggctttggggcctcctccgggaaaactgtggcagcccagccaagacagcaagagtgtggcctggccaaaaaaaaaaaag

SEQ ID NO: 80216 - DNA, 122 bp, Homo sapiens
gcctaccggtagtcgccggccgcccacgacaagctgtagggccacgcggggcgggagggccggccgtggaccagctgcaagtctgcgttctgcagaatcagaggctctgaggaccgccccaa

SEQ ID NO: 80217 - DNA, 122 bp, Homo sapiens
agcgcggcggcggcggcggaacgcgcgggcaggttgccctttcggtgggactaaattctgcggcggaaggacacagattcagagtcacattttaagaaacctgatgaccaatggggacgcgg

SEQ ID NO: 80218 - DNA, 122 bp, Homo sapiens
gttcagcaggagcaccttccagcatggttttagaagtccgggctggaaagcttctgaaaccgctaaaccaagttgcgagcgttgtatgtgcgcgcgcgcacactcaagattcttccgacaac

SEQ ID NO: 80219 - DNA, 122 bp, Homo sapiens
gggtggttccgatgtgtctcctgagcaggcagggtgccacatgcccatacatgctggtaacgcccacggattagaggtgtggggtgaatggcaaggggtgggggaagatgctcttagtccca

SEQ ID NO: 80220 - DNA, 122 bp, Homo sapiens
tacagggaaaatgccgactgtgtttatttttcacctgagcctgcaggaagttggggggtgcgggttgggggggtggtgaagggggatgccaagccaggcccaagcttgacttcagaacagag

SEQ ID NO: 80221 - DNA, 122 bp, Homo sapiens
ggctgcgaggaatgagcggttggctcgggctggtttcctccctccaccgcctgcttgtttcgccatgcccgggccggacggtggggctgcagcggcgaaagcgactgaagtccgggagcagt

SEQ ID NO: 80222 - DNA, 122 bp, Homo sapiens
tccagcctgggcaacaggagcgaaactccatctcaaaacaaaaaaaaaaagaatccctaacgcagaggaaaagattggtgagctttgtttaatcacacacgctgtacattttccacgccctc

SEQ ID NO: 80223 - DNA, 122 bp, Homo sapiens
ttggtaaatatcagtaaattcgtcttcttaaagccacaaggtcaaagaaaagacaggttccgtcttcctaggcggggtacccacagccccgcatctgcccactgtggctatcccagttcctg

SEQ ID NO: 80224 - DNA, 122 bp, Homo sapiens
cccgagtctgcgccgtcgggtgataagggcttcaccggcggcggcagcgggctgcccgggcggcctgcctgcagcagcgtcttaggaaacaggtcaaacttctgcaacttggcctctgggag

SEQ ID NO: 80225 - DNA, 122 bp, Homo sapiens
tggtcaccacggattggggatccgaatccctggctccagatagacttaatgaagaagcaccggatccgggccgtggccacacagggctcctttaattcttgggactgggtcacacgttacat

SEQ ID NO: 80226 - DNA, 122 bp, Homo sapiens
aactggctacccagagatgatgttgacaagagaccccaggagccaaaacccctggattgccggcaccagcagaaccgtggctggacctcagaggctaaatacaatctccacttccactgcaa

SEQ ID NO: 80227 - DNA, 122 bp, Homo sapiens
aaagcattacactatgcactggagactgtataagacaagttccttttctcaaactacagtcgagttggatagataaaacacacaacacataccaaaagacagctataaatccaaggcagtgt

SEQ ID NO: 80228 - DNA, 122 bp, Homo sapiens
cctgtgacaggccccctccggtcccagggcccggctcggcagacgcccagcaatttaaagcgacagctcatagttcttgggtgacctaatctccagtgcttgcggggccccacagcacttac

SEQ ID NO: 80229 - DNA, 122 bp, Homo sapiens
tagtccaacatgtggactggccactcggcttgaagcttccttgggattggatgttgggaccgtccaaacacggcgacttctcatttgtcagcctgcggcagtttaaattgggtggcggtggt

SEQ ID NO: 80230 - DNA, 122 bp, Homo sapiens
agcccagctggggcaggagaggggtgtctccccaccaaacaaacccggtccctccctctccgcactagctgtctgccctgccctgccgtaggagatgggctgggagcctcccacgctctcca

SEQ ID NO: 80231 - DNA, 122 bp, Homo sapiens
aagaacatttatgttgctctcttctaattttacaaagcaacattctatagttttgtctctcgagtggacacaagaagcaagcacctcaaacaagttaaaagaattgctaacatttgttgagc

SEQ ID NO: 80232 - DNA, 122 bp, Homo sapiens
gctatgaatgatagttccagttgttccatatcccaatcaattggtgattgctacaaatgacgtgacgtgatgaaaatattcctggtattcgagaggattgcaaagaatttcccttcttttct

SEQ ID NO: 80233 - DNA, 122 bp, Homo sapiens
ccccacagcacctgtggctggggtagaaatcacccctaatccctagatccccgggccccccgtcccacccgacaagcagacactctcggacgtctctcccaggcagtccatgcctgtaaact

SEQ ID NO: 80234 - DNA, 122 bp, Homo sapiens
tcagtgttgacacactgtagattctgtcaccgtgcaaactttgccttgtcacagagccggcgtggtcttgctggagaggaaagctggaatttgtagccttctgtgttgtgtcttcagcacaa

SEQ ID NO: 80235 - DNA, 122 bp, Homo sapiens
tgggaagatcgcgggactgtgttaagctgtcatgagagtcaattgaatggtcaagaccagcgtagacagaaataaagcttgaccactcagaggccgccatgggctgcttacccgggagaggc

SEQ ID NO: 80236 - DNA, 122 bp, Homo sapiens
accctgcgactcgggcagaaggttgcgacaatgtctccagagcgggttatcctttgggcccggctccctggccctcgaccgcgcagttttctgcccattcgtcaccacgttgagaccgggaa

SEQ ID NO: 80237 - DNA, 122 bp, Homo sapiens
ggcctccgcagtcacctaatcactctcctcctcttcctgttccattcagagacgatctgccgaccctctgggagaaaatccagcaagatgcaagccttcaggtaaggctaccccaaggagga

SEQ ID NO: 80238 - DNA, 122 bp, Homo sapiens
caaaacttttcctgcttctctcctccccagtctcccggttctggctgcaacttcgcactccgcgcctctggcaaccagaagagaccctggcatctccaaagcgctttatctcagtccattgg

SEQ ID NO: 80239 - DNA, 122 bp, Homo sapiens
attctgagtggcagggaccgggagggcaggcagggcccgagcgtgggttggtggggctaccggcgaggaccccttatgggaaggggccggagggagcgggacggggccgggcacatccccgg

SEQ ID NO: 80240 - DNA, 122 bp, Homo sapiens
cactagcatctactttggtgcccactgcccacatctggctctgggctactgctgtccattcgccctccaccgtggcatcaggtatagaccaggtggctgaagctgcatctgctaatggggtt

SEQ ID NO: 80241 - DNA, 122 bp, Homo sapiens
cagacgccacgtcctatatctcccgcaacacggtcgccatttttggtcgccatttttggtcgccattctgttggtactaaggtgttgtggttggtagaagcttaagtgagagcatcgcgagt

SEQ ID NO: 80242 - DNA, 122 bp, Homo sapiens
cttgtgtgaagacattgtatggactagctgtggccctggagccatgtatgtggatggggtcggcctcactgaaccactgagactgtgagtgggagagggatagtcctctgaatgaaaattag

SEQ ID NO: 80243 - DNA, 122 bp, Homo sapiens
atagttgtagtttctaattcaagtcagaaaatcaagcttgaggagtttgaatattccccacgatgctctttcatttaaaaacatgcacaaggaaaagccatgtcactggctggattcccaga

SEQ ID NO: 80244 - DNA, 122 bp, Homo sapiens
accacacccggctgattttgtatttttagtagtgacagggtttctccatgttggtcaggccggtctcaagttctggacctcagctgatccgcgaacctcggcctcccaaagtgctgggatta

SEQ ID NO: 80245 - DNA, 122 bp, Homo sapiens
accagttgcagtcaagatgggatctgtatgtgagcaatgaagggaggagggcaatttatgcgttcaaaatttaaaatgccaaggtagggggaagagagagaaataaagatatatagctccat

SEQ ID NO: 80246 - DNA, 122 bp, Homo sapiens
tatcccttgggtttacctgcagataatccattcggtttaaaatcagatccatgatgactacgcggaggggctaagcagcgccggacaagaacaggagggacagaggcttcgggcccgcaggc

SEQ ID NO: 80247 - DNA, 122 bp, Homo sapiens
tggtagttcgaaacttccggggcttcttcgattacttccggttcgcagcgcggccgacggcgcgctgtgttttcgcaaagcttccgaggattctcggcaatttccgcccacgcccgaaagcc

SEQ ID NO: 80248 - DNA, 122 bp, Homo sapiens
aaaattgtttttggtacgaaataaatggaaagaagatatggggtggggtgctgtggaggccgggccagccaccctccccagaccttagatcatagcgatgctctcgggggcacagttgaggt

SEQ ID NO: 80249 - DNA, 122 bp, Homo sapiens
ggaacttgctccgcagcttcaaagtgtgcacaggttgggcgcagtgattgccccaagacgcgcgccggtctcttaggagtatgtaacttccttgccccttggattaggagatcagaggtgct

SEQ ID NO: 80250 - DNA, 122 bp, Homo sapiens
acagtaaccgaagtttcaggagtggaacgttacgtgtgagtagacgttagcacagtctctcgtttgtggggtgggaacagggtcttgtcacaggtatttcatacagttattgtgggcattag

SEQ ID NO: 80251 - DNA, 122 bp, Homo sapiens
gccccgccctctccgctcgtgattggccctaagttccgggccccagtttcattggatgagcggtcgggggaccgggccaggtgactaagtttccgcggcgccttctccccggccactgcttg

SEQ ID NO: 80252 - DNA, 122 bp, Homo sapiens
atttccttaaaaacaaaagcacagcgtggctttaccatttacgttctgtctcttttccaacgacctcttaactcccctttgttccttcagagttccagcagcagagttggctggtctgctgc

SEQ ID NO: 80253 - DNA, 122 bp, Homo sapiens
acttccgagaaccgctcgggactgggcgccgcgccggagtgcgtggctggggtgatgaggcgttagaaagaaggtggtgcttggtggcacatccgtccctctggctgactacgttgagtggc

SEQ ID NO: 80254 - DNA, 122 bp, Homo sapiens
tctgaggccgtcacctgctcgcggaggagctgttccgctcctgggctgaacgacgctgagcggccagcccccagctgccagttttgatggggacacccctttccaaactggacatactgaag

SEQ ID NO: 80255 - DNA, 122 bp, Homo sapiens
atggctcagcagaaagaaacctggttaggatccagctttcagtcctgaatcctgggctgtcggccaggccatggctgtagctgcaaataggcaaggctgacctaaggtctcacaggacaaag

SEQ ID NO: 80256 - DNA, 122 bp, Homo sapiens
catccgggaggctcgggccgcacaggagcccatggcgggcgggcgggcggggggtgggggcgggcggggggggcggggcggtgggaggctcaggcatggttggttgcaggtcctgagccctg

SEQ ID NO: 80257 - DNA, 122 bp, Homo sapiens
gcgccgactgcggcgccggccaggcagaggcagggccagctccgcccgctccccaccgcccgttcccggccgcctgaacagcggcagccagcaccacgagtccacaacacaccgactcacct

SEQ ID NO: 80258 - DNA, 122 bp, Homo sapiens
gctggcagcgccgcaccctgggccgccggcccaggagggagtcgggagggagcggccgaccgccctcctcgcaggacctggttcccgcggggccgcctccttggctgtcacaggactgggaa

SEQ ID NO: 80259 - DNA, 122 bp, Homo sapiens
cctggcagccgctgatgagcccagcgtgaggccggtgagctgggccaggtggggaggtggcgcgggccaggcagggagactgggaaaggagggcttcgggcgtctccgtgacgagctgtggt

SEQ ID NO: 80260 - DNA, 122 bp, Homo sapiens
ccggaagtgcctcttccctgtgccaggtggagggggagctggtgtggcccctgggatccccggtgtgtggagctctccaagtgctgaccctgaccgcccccacttagccgcacagcccttgg

SEQ ID NO: 80261 - DNA, 122 bp, Homo sapiens
tatctttcatcaacctaaatcttgttgcttcacttttctaaatgatactttggctgtcagcgaatcttatagcttcttttcccttaaagacaataatatataacaacaccaccccacacaaa

SEQ ID NO: 80262 - DNA, 122 bp, Homo sapiens
tttccttcttgagggtggccgcaacagactttcatcttattgactttttggttcaagcatcggaggccaggaggtgcaagcgataagagagaaagttgccgtaagatggagtggtgaagatt

SEQ ID NO: 80263 - DNA, 122 bp, Homo sapiens
ctaagctctgaccccaacgtgagtctccctgccgcagaccacatgggcaatgctgggtctcgagaaggcactttggtgtctgaacaaggtagatctgctggcttctattcccaggccccacc

SEQ ID NO: 80264 - DNA, 122 bp, Homo sapiens
aaattgaggggacggcaggcccggctgccctggaactgggagacagggagaatcccctgccggggtccctggaaacagtgcccaccccacatcactacattccctcggcccgtgttagtgaa

SEQ ID NO: 80265 - DNA, 122 bp, Homo sapiens
tgatcaaaaaaaggtgtaaacgtgctcagatgcatattgccaccgttacccaagagctggcgcagtaccagttcacgagcaggcgggggtgctgggcctgagctcagggcgtgcgggtggga

SEQ ID NO: 80266 - DNA, 122 bp, Homo sapiens
aaaggaatgtgtaagattaagctagccaagtctaaaacaattagagtaagtctgaagcaacggtttttaagcaagaggggcccagggaagggggtaggcatggagtcctgtgacataatgat

SEQ ID NO: 80267 - DNA, 122 bp, Homo sapiens
aaaacaagccaccaccactctggttcaatcaggatccacatgttgaaagcaaaggcctggcggcagggaggcctgtaccaagcaccagccaaggacgaacacaattcagaggttctgcgcct

SEQ ID NO: 80268 - DNA, 122 bp, Homo sapiens
agatatatgcgcatatatttgactgccaaacgccccctcgcatagattatgttaatgaggcgccggccccgccccttccctcccccacccccggcctctgaggtctcggccgctacagggcg

SEQ ID NO: 80269 - DNA, 122 bp, Homo sapiens
atccctgacttaaaaaaaaaattacattttagggttgttgttaccatttactgaacaacacgtgttgattgtagaaaattgggaaaagcccagaaggtaaaaaataaacattataattaaca

SEQ ID NO: 80270 - DNA, 122 bp, Homo sapiens
aagaatcccaaccagagggattcttccccaaacgttcccttgtggcccaagagtgagttccggcctgagtgctgttatgactgccggcgtctctccgactgcctctcgcctcagtttaacca

SEQ ID NO: 80271 - DNA, 122 bp, Homo sapiens
ctgggctgggggaggcctaacagattccagccacattcctgatgaccttcatgtcctcaacgtgtaacatcctgctgtctatccatcctggcagggccagacacaatgtctgcctggagcag

SEQ ID NO: 80272 - DNA, 122 bp, Homo sapiens
agttgccacagggtaagcccagtgcccttttgcccaaggtcaggtcacttggtgctggggcgtcacagagcccaggaaacttgggatcagaaccccctgctccccgctccccacctcatccc

SEQ ID NO: 80273 - DNA, 122 bp, Homo sapiens
atctcagctcactgcaacctccacctcccaggttcaagcgattctcctgcctcagcttcccgagtagctggggttacaggcacctgtagcacatgccaccatgcctggctgattttgtattt

SEQ ID NO: 80274 - DNA, 122 bp, Homo sapiens
ttcaggtgttaagggcttgagaaaacaacccaggtccagaccctttcttcttccatgcctcgcaattcacagcatgacgtggatctagcttcgtccttacccacctcccaagacaggagtct

SEQ ID NO: 80275 - DNA, 122 bp, Homo sapiens
agcttccggaagcaccgtcacaggcgactcattcagcgcctgtttgttgagcagttactgcgttctcatcaccacccacactaggcgcggcgtcaacactcagtgaccccgagaagtggctt

SEQ ID NO: 80276 - DNA, 122 bp, Homo sapiens
ccctgtgcctttcccatgttcaaatgtgttttccgttttggtttctaagacggcgactgccggtttccccaccgcatccacccccggtccggccagcaggaaccaggggaaggagagggcat

SEQ ID NO: 80277 - DNA, 122 bp, Homo sapiens
ccggccaggaggccccgaaacgcggagcctaacggggctgccgcaagagcaaggggacagcgatggccctgcctgatctgtgcggcctggaatcctgggaacgactgtaccttccccagcca

SEQ ID NO: 80278 - DNA, 122 bp, Homo sapiens
gccgccggggaggggtttcccgggacgatccggcccctttcatccaggaagtgaaatcgacgtcggggtcaatgaaaacaaacggggagcccagggggaaggaaggcaggcgaggaagaggc

SEQ ID NO: 80279 - DNA, 122 bp, Homo sapiens
cagtggcggcctgcacctgcggggctgcctggaggccagcgaaggaacgtgtccccgagccgtccccacctatgtttgcctctctggggtccctggttcggcaccccttggacccgtgcctg

SEQ ID NO: 80280 - DNA, 122 bp, Homo sapiens
ccacatcagatttcttgacaacaagagtgttgagattcccaatgaacacacgggagttcacggagtgaggatccatcttgttggtaacgttgctggccattgtgttggatgataaggtttct

SEQ ID NO: 80281 - DNA, 122 bp, Homo sapiens
accccaagtagctgtgactacaggcccgagctgccatgcctggctaatgtttgtatttttcgcatagacacggtttcaccatgttgcccaggctggccttgaactcctgaggtcaagcaatc

SEQ ID NO: 80282 - DNA, 122 bp, Homo sapiens
gacccaaaagagacatccttctgccacccagagctgccctggcgaggtgcactatggggccgccgacagctgcgtggctgccgagggcggaaaggagaaactgtcatgtcccgatagggccg

SEQ ID NO: 80283 - DNA, 122 bp, Homo sapiens
cgtgcaccgcgcactgtatcctgcctgagggtgtgggccagggcgctccctggctgtggccgcgtggggttagtggcctgcagtgttgaccgctcactcatctgtacacctgtgcaccgcac

SEQ ID NO: 80284 - DNA, 122 bp, Homo sapiens
tatttggaacaagttctggttgaaatggaaaacgtggcctttctgggctgtctcatgccacgcccactgggctgcaggcatgacctgctctacctggcactggagtgagtcttgctgaactc

SEQ ID NO: 80285 - DNA, 122 bp, Homo sapiens
ctggggaattggaccatcagggtcgtcttcgagattctttccaaggaggacttcagtggccgtctctgggatgcctttcctaggcccctaagcttagcttctgactccgctctcccacatcc

SEQ ID NO: 80286 - DNA, 122 bp, Homo sapiens
cgcgcgggtctccgggccctgttccgtagccgcgatgctgcgctatttccaggctgcgagcggggacttcactgctctgctgtctcctgcaagaactggctcaagaaatttgcctcgaaaac

SEQ ID NO: 80287 - DNA, 122 bp, Homo sapiens
aaaggctcagagaggaggagtggattacctatgtcgcatatagtacatatatgcagataccgtcatgcacttctttattttttaatccccacaaccatataaggtaggtgatcctctattat

SEQ ID NO: 80288 - DNA, 122 bp, Homo sapiens
ccccagccacacaggtcgggttaaatggctctggctcagtggcaacgcctgtgcagtaaccgttactgcttgatgacccccaaaccaggtcctgcaaagctaccccctactctctcaacagt

SEQ ID NO: 80289 - DNA, 122 bp, Homo sapiens
ctatttcttccttcccctatatgctctactggtgtcacttaactaaaactcctcagtctgcgaccttgagaaacctagaggctaaataggaggagtagagtattgaaggtcatcctctcgac

SEQ ID NO: 80290 - DNA, 122 bp, Homo sapiens
ctcactgttggtgaagtgacggccgccagggaagagtgcagggatctcaggagagacgctcgggtcctttttcaaaaccagtgtgatgcacgatatgtgactactcgccagagtctcgggag

SEQ ID NO: 80291 - DNA, 122 bp, Homo sapiens
aagattctttgcactctgactcccacactgcatttccagcttcatcttctcctgttggaccgtgcatagcctgtgatccagctgcatctgatacccgtcttccccagtgtgtcttgtgcctt

SEQ ID NO: 80292 - DNA, 122 bp, Homo sapiens
ccacaagcactcgggagaacattcatattcaattgccttcctaagacccagacggggcagcgctctccacaggccaccaaaaggtgttgcctgtttggtttcatcagtgattatctgtggca

SEQ ID NO: 80293 - DNA, 122 bp, Homo sapiens
agagggaggagaggaggactcactaggctgcctaactgctgacaccaaaggtactgaaaacgttcaccaccccaccttaagggttttacaagtcatcaagcagtttggtctttcaaaagctg

SEQ ID NO: 80294 - DNA, 122 bp, Homo sapiens
accctgtgcatcctccagagcaggagcctccctagtttctcctgcagcttctaatcctggcgcctggcatggaaatcgtccagcgacaggcggggcccctgctgctgctggtgagatggtgt

SEQ ID NO: 80295 - DNA, 122 bp, Homo sapiens
agcagtaggggcacagcgggtagctcttgccccgagagcctgatgaccacaggaccagctcgaagtcatccagagggcagcggagctccttgtagagcttgatggtgccgttctgggggagc

SEQ ID NO: 80296 - DNA, 122 bp, Homo sapiens
ataatttataaattgtaaactattttagggtttgtgagtttctgttgcaaccactcgactcgtccattgcagtgtgatgaaagccgccatcgaaaaaatgtaaacgaatgagtgtggctgtg

SEQ ID NO: 80297 - DNA, 122 bp, Homo sapiens
ctcagcggcggtgccgagattcagcgaaccactcgcggctctcgacggcagcctgcagctcgccaaggtccccgtggccctcccagagatatggggacaaacaatcctcgcaaaaacggtac

SEQ ID NO: 80298 - DNA, 122 bp, Homo sapiens
acgtttcactggcgctcagggaggcccctcgggtgggcagtgccactttcctcctggaggcgcgcgttaaagatctgcctgggagcgcccggcgggcggctcggcttgcgctctgatgagga

SEQ ID NO: 80299 - DNA, 122 bp, Homo sapiens
ttacttttactcactaagcactacatttttaagatctatccgtgatgatctaactacaaccgatccattgcttctagttatttccttcctacctcccactttgctatggaagtagaggcaag

SEQ ID NO: 80300 - DNA, 122 bp, Homo sapiens
attacagggggatataacagcttagagtgaaatgcgccctagtgtggccctggcctgagccggggctgcagggggaatattgccacccggtatccctatagccctctttgagcgtctgggat

SEQ ID NO: 80301 - DNA, 122 bp, Homo sapiens
gaggaccacaatttttccatctgtcagatgggcttgggagcctttgtcctggctggctgccggctggcctgggctgggactggcctgggaggtgaggggactgtggcgggaaggaggaagca

SEQ ID NO: 80302 - DNA, 122 bp, Homo sapiens
tctgagttcagaccggagtaatccaggttggtttctatctattctacatttcttccagtacgaaaggataagagaaatggggcccacttcataaagtgcccctgccccatagatgatattat

SEQ ID NO: 80303 - DNA, 122 bp, Homo sapiens
caccctcccaccagggacctggccttgagtgtggctgccctgtcctacaacctgtggttccggtgcctctcctgtgtggacatgaagctggtgagggggttcggggtaagggcagggagggg

SEQ ID NO: 80304 - DNA, 122 bp, Homo sapiens
ccgggatgccatggatcgtcctcgttggcggcttctggacactgagccactagagggcatcggtcccggtagggccggacggcaggctccgggataccgccacgctctctatggcgcccaga

SEQ ID NO: 80305 - DNA, 122 bp, Homo sapiens
cttccgctctccccggcacttacagcggtctctctccacttctcccttctaggaccgcggcggctaggtcacctcctccggacgccgacacgcgctgccctggcaaccgtcaccagggaaac

SEQ ID NO: 80306 - DNA, 122 bp, Homo sapiens
taaaactagttggcctacccagttttgtgggactggaaaccagcgtggtggagccaggaccgataagccaattaacaagcgtttgctacagtgactcagtgtactgcttaccaagtaacata

SEQ ID NO: 80307 - DNA, 122 bp, Homo sapiens
tttcaaatgcaaatatttctgtaagagggaatcacctggagtgccagaatcttcagtttccgcctctgtaaaataggtatgaaaacctctccgactcagggcaaggaggctgagaggctgca

SEQ ID NO: 80308 - DNA, 122 bp, Homo sapiens
ccccgccaggaggctctgcctgctgggcaaggcgcactcagccagccccgcaggccgccacgcgaccgaggctcaccaagtccactgcaggtggcaggtgaggtcacctgggcagctctagg

SEQ ID NO: 80309 - DNA, 122 bp, Homo sapiens
cactattgccacctggtggcaacgattgcagatttctttcacagcttccttcactgaatacgtatactttgtatcatcctccaattatggctctgtcataatgttgcttatagtacagactt

SEQ ID NO: 80310 - DNA, 122 bp, Homo sapiens
actttcggccggaacggtgggtcaatctccttccgttcaagttcctcccagttgatctcccgaaacaaagggtgctggcggatgtctcccctcacgcccagcctcttctcaggttctcgcac

SEQ ID NO: 80311 - DNA, 122 bp, Homo sapiens
tgtgctatctcttggcttgagtcgggggtggaggacggacctcgttcacggatttcttaccgaatttctactttcttttttttttctaattggacactgaagccaaggaagtcagtggtcgc

SEQ ID NO: 80312 - DNA, 122 bp, Homo sapiens
cgacgtaaaagaccgaagtgcgcagccagtagctccttatatagcctcccggagtcagaacgaggccgtcccgccctctcgcacctattggacatggaagtagacaggggtgtggtcgcgaa

SEQ ID NO: 80313 - DNA, 122 bp, Homo sapiens
tctcgggccctcgagggctctcttggggttcctcagtggtggccttgggtacctgtgagccggcaggatctgccactgcgcaggagcgtggggggaacccagtggcaggttcatctctgagc

SEQ ID NO: 80314 - DNA, 122 bp, Homo sapiens
ggggagaggggaggttaggagggggtgagctctccttctccctgcaataaatcggcttagcggacgagagccgaacagcccagaaaggattaaagaaaagtctgtataatacgcggagagcg

SEQ ID NO: 80315 - DNA, 122 bp, Homo sapiens
caggcgtcggggcctcgtcgcccaagagcgaacaggggccgcgcccgagacactagcatccgaatttgaatcagcttttacactttttagggacgtgtcactcttgccgttcctcaagtgct

SEQ ID NO: 80316 - DNA, 122 bp, Homo sapiens
atcgccctcccggggccgccaggaatgaggcactgagatcccaccccaagccgctgggggcgccattcgacttcgctcctacggaaatggggcttcgatgtctttctgcgcttgcgcggcac

SEQ ID NO: 80317 - DNA, 122 bp, Homo sapiens
tcccacctgagcagctggtatatactcagatcctttaattctcagttttccctctttcatcgttctgcacctctgtgcttacctgttttctatgggacttttagcatatcctcgcgggaggt

SEQ ID NO: 80318 - DNA, 122 bp, Homo sapiens
tgcttgagtgattccaggtgtcctgcatgaatgaggatctcatccctgtgtctggagccccgagcattgtagaatgtgctccctctgctggttccctctaaaaacgaaaacttggttttgaa

SEQ ID NO: 80319 - DNA, 122 bp, Homo sapiens
agcgtagtgcttaagctctgcccagtgttcctaagcgaaagaagaccgtgatgtgccttacggagaaagtccgcgtgttggataagctccaatcaggcatgagttacagtgctgttggccat

SEQ ID NO: 80320 - DNA, 122 bp, Homo sapiens
gatcacggtgaggcccaagcactgcaggctgaggccacagagcgaacacttgtgctgagccgggccctctcgtgaggctggggtgcgggaagtccgggcaggagagacccgcccccgccgtt

SEQ ID NO: 80321 - DNA, 122 bp, Homo sapiens
tttttctgttcaaggtacttgggagagtttcctcatctcccattagaaagccctgactcacgcaagctcactgagtctcatcctaccccatgcttctctttggtgtgtgttcaccaagattg

SEQ ID NO: 80322 - DNA, 122 bp, Homo sapiens
ggacgccgggaagaagggggtggggccacgtttgcgtccgcgccatcaggcccgagatagcggcgaggtccgctttcagtgtatggttttccctgccaaacggttctgcttggtgccatcca

SEQ ID NO: 80323 - DNA, 122 bp, Homo sapiens
cttttaaaaaatcgcttcttcctcttctatacacctaaacgcacacttctctccccttcacgtccagcaagtaaagccctaacagtcttgtagggcttggtcccagattggaacccggagaa

SEQ ID NO: 80324 - DNA, 122 bp, Homo sapiens
gtgcggctcgaggaaggcgaaggtttttgtgttgctagccggggccagcggcggtggcggcggcggcggaggcgtcggtggaggaggggaggcggcgaggaggcgcagctcccgctgcaccg

SEQ ID NO: 80325 - DNA, 122 bp, Homo sapiens
aagggggaagctgccgcgcggtgggcagagccaggagcaccgggctgaggcggccgggagcgcagcggcttctaggggtgagtgggacccacgcggccccacctgctcctcccgcgcgcggc

SEQ ID NO: 80326 - DNA, 122 bp, Homo sapiens
tctctttaacacgagagtctgcagggctggtgcagcggcgtcaacccgaagagacctgaacgccgatgggcagttgggattctccgtacgcctcggaaacagcagcccaaacctcacaacgc

SEQ ID NO: 80327 - DNA, 122 bp, Homo sapiens
cgctgagagcttctcaccagcgctggacatgtggccaggtggcggccgagggctcgggggcgggggtctgtccacgtgacaggtgcacaccccggcattgctgccctgacatttggaggctg

SEQ ID NO: 80328 - DNA, 122 bp, Homo sapiens
tattatttcaccaatgttttgtagttctcatcatgcaggacttttgcctccttggttaagcgtatttccaagtatcttatttttgctgtcattgtaaatggaattgttttttcttaacttcc

SEQ ID NO: 80329 - DNA, 122 bp, Homo sapiens
cgttttgtttttgttttttacagtgagactgagtgcttcaggttgcatgataccagggggcgcatggctcactcgtggtcctacttctagtgacgcaaggatcccattgcgtttcgttgtga

SEQ ID NO: 80330 - DNA, 122 bp, Homo sapiens
ccccggcggggattagaagcgaggcgggttcagcgtcctgggcgccgcaggaaagtgacccgcagagcgaggcgcggcgccccgggagctggagctcagccccacgacccgcgctgcggcgg

SEQ ID NO: 80331 - DNA, 122 bp, Homo sapiens
gatcagggcaggttctagtgtggccctgtgccccggagcctgcctgccataaagtgtgaccggaagcccccccccccccgcccactgtcagaaccactgaggagagaagagcgcggcgcctt

SEQ ID NO: 80332 - DNA, 122 bp, Homo sapiens
atggtgctgggaaaactggctatccattacacagaagaatgaaactatacccctatctctcgccacatatgaaaaccaaatcaaatggattaaagacttaaatctaagaccaaattatgaaa

SEQ ID NO: 80333 - DNA, 122 bp, Homo sapiens
gcgcagtgggatccacaggcgctctggggtcaggtagtagtcctcctgagggaaccagggcggtgtcaggcgggtcagggcaccccacagcccccatcccgacggaaggaagccctaccttg

SEQ ID NO: 80334 - DNA, 122 bp, Homo sapiens
cacatttaaatgaatcacaggtgaagtcggctgtgcccgtctgacttggcagacaggggccgacaactgggcaactgcgcagaccttctctggcatcacacacagcgcaggacggcgcggga

SEQ ID NO: 80335 - DNA, 122 bp, Homo sapiens
ccccctgcagttctgtgagctgctccatcctagcagctcccatcagctccagggacagtacgcgaacaccaagttataccctcacatttattccaaaaatcttttgggaggaaatcccactc

SEQ ID NO: 80336 - DNA, 122 bp, Homo sapiens
ttcctcctcaggagtccgctgggcccccttcttgtggcccggacggtgcacagtggagctcgcactgctgttgccaaggtgcgcggccggcagctcctcgccagggccccggtgcaggccgg

SEQ ID NO: 80337 - DNA, 122 bp, Homo sapiens
ctgcgcgcagggctccaggtgagggccgagcgcggcccccacaacccggagcccggttcccgggctaggatgtgtcttaatagggtgacttgtcaggtttgaggtaggctggtggggacaga

SEQ ID NO: 80338 - DNA, 122 bp, Homo sapiens
cctgtgttatatagctatttcttgtattttgtgttgtcattgcttcccaactgttttatacggctttgtctccttgacagcaacacttctcaagcatctggaccacaggagttgtgctttcc

SEQ ID NO: 80339 - DNA, 122 bp, Homo sapiens
tcacggcatagaacatcccgaacccgcgagagccgcggcggcagggcaaggcggccaaggcgactctgtgggccaggaacagaagccagctcatcgctcactcccggcaccgggaagcattt

SEQ ID NO: 80340 - DNA, 122 bp, Homo sapiens
gagtgaggggaggagacgcggccccagagcgggggcagggcagggggtcagggcaggtagcggggcccgggccttcgcgggtggctgctcccgctcccccagccctcccctcgtcctggtgg

SEQ ID NO: 80341 - DNA, 122 bp, Homo sapiens
ctgtaaaatgagatcttgatggtttcctgcggggttgccatgagaaagaatcaacatgtacgcaggtaaagcaggcaatacagttccagggagtcaaaaacgggagaaatcgtcccacgacc

SEQ ID NO: 80342 - DNA, 122 bp, Homo sapiens
gattacaggtatgaaccaccacatctggcctcacccctttactttctaaatggctactgccggcataagacctattatcatgttgttagcactctttttgtattgtacctgttccttaaaat

SEQ ID NO: 80343 - DNA, 122 bp, Homo sapiens
tctgccacctccaagtgatggttaagccggtgtgcaggccggtggtgacagggatggggacggcgcagtccccatccccgcaccaggcagcaccgccacttcctcgccagcccggccgcagc

SEQ ID NO: 80344 - DNA, 122 bp, Homo sapiens
gccgtggttggagcaggagggaccggagtattgggaccggagcacacggaacatcaggcccgcgcacagactgacaagagtgaacctgcccatgccgcgccgctactaccaccagagctagg

SEQ ID NO: 80345 - DNA, 122 bp, Homo sapiens
cagacacaccccgggactgtggtgacagtgctcgatctcttcgatgggagagagagcttgcgacccctgtgggaacaggtgcaagggttccgagaggctgtggtccccatcatggcaaaggc

SEQ ID NO: 80346 - DNA, 122 bp, Homo sapiens
cggtggcccgtgcgcggcgggtagacgtgcggggccccgggtggggccgtggggagaggtcggcagggggctttcccagggcagagagttagaatttcacgtcctacagaccgggggcacct

SEQ ID NO: 80347 - DNA, 122 bp, Homo sapiens
gtttgggacccagtatatgctaatgagggcagagtggaggaaggacctgagggtatctaacggaggaaggactgtggaatacctgagcctggcctaaaggagatgagaattgcgtgtctgtc

SEQ ID NO: 80348 - DNA, 122 bp, Homo sapiens
acgtgaggcctgaacaggaaggaactgggagacccaagactgtaccgccaagaccgctttcgagtcgggccgaccggaatttgaattcgtttcttcacttactagttgtgagtctttgggca

SEQ ID NO: 80349 - DNA, 122 bp, Homo sapiens
tggatggcgttatatttctcttggacagcagtggtctgaaagatgacaaaaatcacgatacgtttgaatcacgccatgtctttagggaaaagaagaaagaagagtttcctttcgtatcgctt

SEQ ID NO: 80350 - DNA, 122 bp, Homo sapiens
cccagagaaggtggcaacttctggagaagcagacacagcagaaaaaacacagatagagggcgatactgattaattttgggttgtccctggtgatcaggtatgaacttgggtccccatcaccc

SEQ ID NO: 80351 - DNA, 122 bp, Homo sapiens
tgctgagctcatgcaaaggcaaatatgtctctgtttaaaggaacttggactaaccgactacgaggctggcagctcagttacccaggcaaagccagaaggtcagtgtcgcgcctggctgagga

SEQ ID NO: 80352 - DNA, 122 bp, Homo sapiens
aaggagaaaccagaggtccatcctacaagcacactgaaatgtaatccaattctaagtccccgtattacaacatggactattgtgactgaccacatttgccttatatttaccttcttccgcag

SEQ ID NO: 80353 - DNA, 122 bp, Homo sapiens
cgcagccggcgtctgccgcggagtttggatggcactggactgtgtctgggctaagatgcccgggtcgtgttgggcctcgtgtttgtttattccccataaaatcgcaataaagcttatgataa

SEQ ID NO: 80354 - DNA, 122 bp, Homo sapiens
ggtggatttcctctgccaagaaattagcaagagcagctgaaggcggtgatgcacacggcccggccaaagtgaagtcacccctgctcctgctgtgaaagctgctgatctctttcttagcacag

SEQ ID NO: 80355 - DNA, 122 bp, Homo sapiens
cagttctgcaatacctgtgcatgattctgtgggtgtaacttatcagggttccttatttagcggccctagccatataccaatacctaagtcttcgttaataaccccaactgcatcattactgc

SEQ ID NO: 80356 - DNA, 122 bp, Homo sapiens
gaggtgggtctggtagtgagggatgtacccattgccgtggcaacgggacgacgcaggccgcggccattagaagctctccagccgccccggatcggggcctctccttctcctttggggctgtg

SEQ ID NO: 80357 - DNA, 122 bp, Homo sapiens
ggcgtggccacccccttgcaccccggcctccttaaaggggcagcaccttcgcaaatatcgcgccgagatagcttctgagtgggttggggtcttccagccttccagatgtacagatgggaaac

SEQ ID NO: 80358 - DNA, 122 bp, Homo sapiens
ctttggaactagaccactttgtttccaatcctggccctaccactcatcagcttgtgtgaccgtgggcacattcattaacatctctaggactcagcccttccatctccctctcccacaagccc

SEQ ID NO: 80359 - DNA, 122 bp, Homo sapiens
tggctgttcactttcaaacactgtgatctgcaaagcagctcagtccttaacttctccttccgctctaccacgtttttgccccaggttgaggtttttcctgcactcaatgttcagtgaaatga

SEQ ID NO: 80360 - DNA, 122 bp, Homo sapiens
agagacgcgaaaagctcccgcgggaaactggggagcgggactacatctcccagagagccccggggctaaacagcaggtgattggttgatattgacagccaatgcggctgcgaggagctcggg

SEQ ID NO: 80361 - DNA, 122 bp, Homo sapiens
ccctccaggttcaacggtctcctaacctgtagtcacccacaagagcgtgccctttctgcccgcccttcctagcgttgctccctgcttggctgagcactgcggagtttcacgcctctaaaccc

SEQ ID NO: 80362 - DNA, 122 bp, Homo sapiens
ccggagcaaagtggagggggacttttttccgtccagagagactgaactccgtatctgttccgcggtccgcctccctgcacacacgcccccgagccgggagagcctccgcagcacccagagaa

SEQ ID NO: 80363 - DNA, 122 bp, Homo sapiens
atgcccgcaaaactggggtcaagcggcgccacgaggaagacccccggcgtctgcggccttcgttggactttgacaagatgaatcaggtgggaccagcaagactaggggagcttagatgggag

SEQ ID NO: 80364 - DNA, 122 bp, Homo sapiens
taacaataaaatgaatctccattgaacacaacttgcatttccatgaacaacaatcacctgcgttaactgccaggattccacaactgagagttgtaaaatagcataataataactccaagata

SEQ ID NO: 80365 - DNA, 122 bp, Homo sapiens
ttgaggggctgggggcttccgggcggcgagcggggcgcagtaggaggctcttagagacctcggaggaaaccagcccagcgctacgggactggcaagaatgcgaagaggaaccgagagtgaac

SEQ ID NO: 80366 - DNA, 122 bp, Homo sapiens
ttcatagggcgtttcgtccaaactgcatcatttgcaatatttatggccgcactccctggccgttattaagtgccagtgtgccgcgtggagctgggcctgctgggttagaacacaaagttatt

SEQ ID NO: 80367 - DNA, 122 bp, Homo sapiens
gcccctccccctctctccctggggccgccgccatcttgcaggatgctggggagggagccgcgtgcaggccatggaaacaatgcatcttttatgaagcgatccccgctcctcgcctggaaacc

SEQ ID NO: 80368 - DNA, 122 bp, Homo sapiens
gggacagcgccctctagtgttggaaatcccactcacaactagcattgtgcgatcatagagcgcgcttttgtttatgccatcaggacgggtggttttttgttactaaataaattcaagtagat

SEQ ID NO: 80369 - DNA, 122 bp, Homo sapiens
ggtgcgggatataatctcgtggtgcgcccttttttaagcccgtcggaaaagcgcagtattcgggtgggagtgacccgattctccaggtgcggtcggtcacccctttctttgattaggaaagg

SEQ ID NO: 80370 - DNA, 122 bp, Homo sapiens
acttcacgtgcttcccgtagtctcgcatggtcttgacgccatggaagcgtctggccacctcgtggatgtacgacttcactttgtagcgccggtagtacctgattattgtcagagctgccttg

SEQ ID NO: 80371 - DNA, 122 bp, Homo sapiens
cgaactccctacctcaggtcatccgcccgcctcagcctcccaaagtgctgggattacaggcgtgagccaccatgcccggccccagaattttttctatttgggtctatttttctactttttct

SEQ ID NO: 80372 - DNA, 122 bp, Homo sapiens
cacagggaaagcattcaataacctctatttaataaattccagcaatacctttcctagtagcgtcaaatttgttaggtttacattaaaaaaacacagactatgcaaaattttatttgtatgtc

SEQ ID NO: 80373 - DNA, 122 bp, Homo sapiens
cccgcccccgcctcgtcttcagttcccccgtcgcttccgccgccgtgggtagaacagacccgagctgggagccaggcctgcggcccctcgaacactagccacatctggcccgccgggcctag

SEQ ID NO: 80374 - DNA, 122 bp, Homo sapiens
aaagaaatgcaactcagatcccggctcaaatgaggctgggaaagctgatgcctgtaagaccgacaaagacggtgcaaggtgaggtgaacgccgctgtgtctgggtgccgggctcccttgtcg

SEQ ID NO: 80375 - DNA, 122 bp, Homo sapiens
gagcgcaccggggaccccgcggcgggccgaagacggcagtacccctaggctgcagcctgacgctcaggccccaaggcccccagcgccctttgaaggccggagagaaagaggcgggggctggg

SEQ ID NO: 80376 - DNA, 122 bp, Homo sapiens
cagtacgttacaaaagtgcttctaaagtactactgaaagctccgtgggagtgcccgctggcgtgggcgcggtggaagggaggaagaacgtgtacgccccaggcctccgtaaccatggctgcg

SEQ ID NO: 80377 - DNA, 122 bp, Homo sapiens
ctatattttacaatgcaaaaagagcaaggagttggaatatatagggaaggagagaataaacgtccaagtggtaaattgacaaaaattataatcgggctgttatttcagcactctaaactcag

SEQ ID NO: 80378 - DNA, 122 bp, Homo sapiens
ataactgagtaactgaaccccactcaatgtatctttatgccttgtttacatctgtcactacgttgccacctttgtaattttcaactatatctgaagaggagggcagaggagaaagtagatga

SEQ ID NO: 80379 - DNA, 122 bp, Homo sapiens
cctctgttcccatggccccaccggaaagggctgagtgcttgcctgctgagcactgaccgccgggctttgtcgtgcgtgaaccccacgacatgggggaatttccatggcatgaaaattctcag

SEQ ID NO: 80380 - DNA, 122 bp, Homo sapiens
agactgtaggtaattggcctgtgagaaatgacaccaaccaagactgaacgccattattcacgtctttctttttaagatttttcttttccaatttgagatttgttaactttcttttccttgtt

SEQ ID NO: 80381 - DNA, 122 bp, Homo sapiens
cctctcaacagtccggcgtgcacactctgtgaggagacctgctcggagggcctgcccgcccgcctggacagtcaggcctggaggacagggacaggcgtgcagacacacacacgcacacacac

SEQ ID NO: 80382 - DNA, 122 bp, Homo sapiens
cacttggaacagaagtgtgctgtgtgcgcgtgcttgtgcgtgtgcgtgcacgtgtgtgcgcgctaaatcaaacaccctcgctggctctgtgttcccctcaaggggaagccaactccacggat

SEQ ID NO: 80383 - DNA, 122 bp, Homo sapiens
ccaatgagggctcaaaataaaggcgtttccgcggaaacagtataaaggtgggacttccggcgtcctctactagtggccattttgattggtgttgggtgtattttccagtgagagaccgcgga

SEQ ID NO: 80384 - DNA, 122 bp, Homo sapiens
cacacagcctcgagtcccaaggcccggacagatgtgttctatacacttgtttaaacacggcgctcattaggaggtaatgcatgtatggcaagttgattacaccacaaagcaggatgctttat

SEQ ID NO: 80385 - DNA, 122 bp, Homo sapiens
ttatcgggaccgttccgccgcattcctgccctctcggcggccggtgccatcgcttagatccgcccagggcgcaatccgaaaattatgtgccaagagctataaaaccgttcatagagcccctt

SEQ ID NO: 80386 - DNA, 122 bp, Homo sapiens
atgagcacacgggcagggaaggccctggctgattgaagaactgctgaatgtggttttgcccgccaaggcagtgcctgtggttctgtgatacagcttccagtgggagagctccttgcccaatg

SEQ ID NO: 80387 - DNA, 122 bp, Homo sapiens
ggaggcaggggcagccacaggcacttgacaatgtcttcacttaaccgcgtatcgctgcatcgctagggcgaagagagcaaggaggactgtgaagagcgaagcctgagctgccatgtggtgag

SEQ ID NO: 80388 - DNA, 122 bp, Homo sapiens
gaggagacacggaacaccaaggcccacgcacagactgacagaatgaacctgcagaccctgcgcggctactacaaccagagcgaggccagtgagtaactccggcccagggagcagatcacgac

SEQ ID NO: 80389 - DNA, 122 bp, Homo sapiens
catcgccttgtgcacagagtagcgctcacggctgagcaggtccacgatgccccctgtggccgcctgggcctccagtagcttctgcccagtgatggggtccagcatgttcttggccacggccg

SEQ ID NO: 80390 - DNA, 122 bp, Homo sapiens
atttgcccaccatggtcactggttgctatcaacaactctcaccagaagggtggttgatctcgagaatgtcaaggggaaattcttgaattatcctggttggcagaaaaatctaatttatagca

SEQ ID NO: 80391 - DNA, 122 bp, Homo sapiens
aggaggaggccctggagctgcggggccgggcagccagtctggagcaggaggtggtggccacgggcaaggaggccgcccggctgcgcgcggagctggagcgggagcgtgtgtgcagcgtggcg

SEQ ID NO: 80392 - DNA, 122 bp, Homo sapiens
aggccaaacgtcctgtgctgccacctcatggcaggcagagggcaatgaaactcatctttccggccatgcagggcgcatgcgcggtctgcctcccgcggcgggccgggtctccagggaggacc

SEQ ID NO: 80393 - DNA, 122 bp, Homo sapiens
atttgcttccaattcattggaattcattgacctgacaaaatctcatatcaacatttcttccggaactaaagctttggataaagtaaaaatgtattagcacactctttttgcctctatctttt

SEQ ID NO: 80394 - DNA, 122 bp, Homo sapiens
ccacgatgcccatgtgtaacttggttattacacacacgtttggagcccagtgtgcagacccgcagcgcagaggaggcggcggaacaccccgggttggtcgggtttccaagggctgacccgag

SEQ ID NO: 80395 - DNA, 122 bp, Homo sapiens
gaagctggttgagtgtggggcaggaggactggtcagtcacaagagcttcaacctgccctgcgagccctctctgcacctgctcaagagaaaccctgagaaaccccagtaggtgtgagctcctg

SEQ ID NO: 80396 - DNA, 122 bp, Homo sapiens
ggggcgccggtgtcctgccgcctccttctccttgctctcacctgcgcctattagtccacgcgccttcaaggccaggggctacagcccagacagagaggggacagcagagggagagagagcac

SEQ ID NO: 80397 - DNA, 122 bp, Homo sapiens
gcgcagtcccgggcgcaacctcgcggaacgcgcggcccccgccccccgccccgcgccgctcgtccccgtcagccccgccccggcgctcttctcgccgaccaatcaggaggcgcgaccggcct

SEQ ID NO: 80398 - DNA, 122 bp, Homo sapiens
tcaaagagttccaccatactcctgggaatccagaaaaccacatggatgtgtagagttgtgcgcatgcccagaaaggacctgagaaggccctaatctcacctcttgctaacctggaggctgta

SEQ ID NO: 80399 - DNA, 122 bp, Homo sapiens
ctcctctcgcccagggtgaggtccaaggcccgcagccgcgtgtctactttccggcctcggcgctgcagcttcctcacccaggccttgagctgcgccagctccccctgcaccgaggcctgtga

SEQ ID NO: 80400 - DNA, 122 bp, Homo sapiens
ttatttgacttccttcttagtctgttgtacagtaaactacattgattgatatttaaatatcgaactaggcttccatcattgagataagaacatgattgtgatgtaagttttttatatgtttc

SEQ ID NO: 80401 - DNA, 122 bp, Homo sapiens
tgtctgcacacgagtcacacgtgcaagtgcacgcatggatggtggacacgcgtttacacacgtgaatatgtgtatacacatgcagacacatgtgcctgcccacatggatgtgtgcacaaaca

SEQ ID NO: 80402 - DNA, 122 bp, Homo sapiens
cggggtgtctcagagagatcgctgccgagcaaaaccagacagcagagggcgcccttcacacgtgctcaccaagtgctcaatttaatttgcaatcacagactctagattcactttttctcatt

SEQ ID NO: 80403 - DNA, 122 bp, Homo sapiens
ggcagccctcggagttgggaggctgcagtctacctgggacactcgaggaggcacacgaggcggaaaagtggacgggtgccccgcgccaccgcctctcccgagggcgcgtactgaccaggatg

SEQ ID NO: 80404 - DNA, 122 bp, Homo sapiens
cagccgcgctcgcgtgtcggtggatgagcgggaaccggggggcggcgcctacgcaatgcacgttacgccgcggtggaaggggtgaagctctgcgcacgaggccccgaggagcgggaaacggg

SEQ ID NO: 80405 - DNA, 122 bp, Homo sapiens
gacggagtcgcgcgagggacacgccgcgttgtgggttctcggcctgaggtgcgagagaagcggtgaccgcggccctggctgctcggacccgggaacatgatggtcgctggagcagaaggcgc

SEQ ID NO: 80406 - DNA, 122 bp, Homo sapiens
ggatgactctctttttaggagctaaggtagctggtgactttcagttgaagccaaagctcacgaccattctgaaaatcctagggcccttcagaattatgctaaatctactctgcctgtactct

SEQ ID NO: 80407 - DNA, 122 bp, Homo sapiens
tcctctctggaagaataggtctctgggccccatggggtcttttagagacagtctgttatccgtttttccccctctctcctctctataaataagaatacacattttgtattaagttggtctgg

SEQ ID NO: 80408 - DNA, 122 bp, Homo sapiens
agtactcaactgtggaaaatatagagggcagttcttttggggactaatatggtatatgatcggagactaaagttcaaaaggcaatatgctgagtcatttagacactgaagatagaagaacag

SEQ ID NO: 80409 - DNA, 122 bp, Homo sapiens
tggttgcctgggagtgttttccccgaatttgcaaggggcttgcgcccgggttcgagtttacgtgtgtccatgaccaagtcttggagggaaggtcctagtgtagagtctgtgggtgggttcac

SEQ ID NO: 80410 - DNA, 122 bp, Homo sapiens
ggggagggggccgggctggccaatgggagctgctttcctgagggactcgaaattctccggcgggtggtcgggagctggggctctgaggggctctagcggcgttgcgcgcggtgccggctggg

SEQ ID NO: 80411 - DNA, 122 bp, Homo sapiens
gtggcttacccctagaggcgggagcccttccacgatgttcttcttcccagagagaaggtccgacaccggccttttcttcagagagtccctccgggctcggtagcggcctgacgtggtgaggt

SEQ ID NO: 80412 - DNA, 122 bp, Homo sapiens
tcaaagtgttaggaatttcattaaaaacagggcgagcctcgtcagttctggtgtccgcttcgcttcgcgcggagctcggcgcacctcctggaacagcgccggggcgggaagccggttctccg

SEQ ID NO: 80413 - DNA, 122 bp, Homo sapiens
acgttccctagcctcgccaggaaggcagctgaaccaaagagtccccacccctggctggggcgggaagcattaattgcttttgcaagcttgagaaaaatcatacaacttaattaagattggcc

SEQ ID NO: 80414 - DNA, 122 bp, Homo sapiens
ggaaagagagcactttcctggcagtgatgcaatcacctcacagaactgtggagctgtaaacggccttgcagggaacaataaaccatctgagataatggccttgacactgaaccaggatagga

SEQ ID NO: 80415 - DNA, 122 bp, Homo sapiens
ggcccacctcactccgcacacaagagaaatttaggcagctcagtttattgtcccataattcgtcccgttatggctcgataacggatagcggctcaggagaatattaagagcatcgactctgg

SEQ ID NO: 80416 - DNA, 122 bp, Homo sapiens
gtatattccagcattatctctgtatcctgactgtatctttaatagggtataatcagaacacgggcagaagaatcaaaaggctgagttttgtcatggttaaaatgtggggattagagggagaa

SEQ ID NO: 80417 - DNA, 122 bp, Homo sapiens
gctgccgtgttcggccccgcccgtcacgtctagctggggctcgcccggcgccttcctggacgcagacgtatgagtcccaactccacccagtccggcctggcctctgtccccgggtgaccgcg

SEQ ID NO: 80418 - DNA, 122 bp, Homo sapiens
cgccatcttgggatgggcatggaggcgggaccggcaggggcggggccctgcagacaggggcggggccctgcagacaggggcggggccctgcagacaggggcggggccctgcagacaggggcg

SEQ ID NO: 80419 - DNA, 122 bp, Homo sapiens
tcctgcatcacactcagaaaatacctctgaaaatgagttggtatgaaatgatgtgtctgtcgctcatttggaacaggccctggcactggagtcccttggggaacactggccaatggccttct

SEQ ID NO: 80420 - DNA, 122 bp, Homo sapiens
gcagaatagcactaggtccagtccccagggatcggcaacgtataagcccacagccagcaccgcagtggagccttctgttccttcccatccctgatgagatgagaaacttgagtggcagattt

SEQ ID NO: 80421 - DNA, 122 bp, Homo sapiens
gggctccggacctgcagcccgccatgcctaagcctcccaccccctccatgggctcctatgcggcgggagcctccccaaccagtgccaccccctgctccacggcaccgagtcccattgaccac

SEQ ID NO: 80422 - DNA, 122 bp, Homo sapiens
ttttcatcttatttataaagataaaatcacctggaagtgtcaaggagtggggcggggtggcgggggagaagcagccgtgctgccaggtcacccagacctccagacagccggctagccccact

SEQ ID NO: 80423 - DNA, 122 bp, Homo sapiens
aaggtcctgggccggcatcatcagcctcacctgggaactggttagaactacaaattccctcggccccacccagaccgacgccaagggcagctgtggagtggggcgcggcaatgcgcccctta

SEQ ID NO: 80424 - DNA, 122 bp, Homo sapiens
acccacaaaccgctgtcaagtttgattcctctttctggagttacagccttcctgctcctccgtgatggctcagctgaagtaccacctctgctactcgttttcaaaatacatgttgagtctta

SEQ ID NO: 80425 - DNA, 122 bp, Homo sapiens
tctgggctccccgccgccttccaagctggctcttcaagggccaggtgctggggatgcaaacgtgagtcaggtaatgcccctgctccccccgcctcccggccgccaggccacggcctttagaa

SEQ ID NO: 80426 - DNA, 122 bp, Homo sapiens
tggccagcccctgcctggtgctcggttcagacaagctggggcccagcagaagcaaagaggcggtcactgccccacctacccgacatcgagtcccgccctcgcagacctcctgcagcctcact

SEQ ID NO: 80427 - DNA, 122 bp, Homo sapiens
agttccagggttctgccccaaatattcttttgtgagagagcccccatcccctctcaggtacggttccgtcctgcaggtcagtgagaagctgtcagcaaggtttctttcaggaagcccaacaa

SEQ ID NO: 80428 - DNA, 122 bp, Homo sapiens
ttcacacatacttgttgagcatcctaccatgggccagggttaggcaagggactgatcatacggacaggaaggagtcccagatcatgcccttggggagttcatagtttagtgggaggagagat

SEQ ID NO: 80429 - DNA, 122 bp, Homo sapiens
tattagtaaaagatgaagtgagctagaagcagaaatgggacggagagtatgggtgggcaacggccaaatccaaacaccaagaggggtacttatttggctgcgttcctctatagtttaatctg

SEQ ID NO: 80430 - DNA, 122 bp, Homo sapiens
actgccacagggaataggaagctggcaggttcgcattcgcctccggtgagcggagggtaacgttagctctgtcctttgtcccatacctgggaagataagctgctagatcacactatctgggt

SEQ ID NO: 80431 - DNA, 122 bp, Homo sapiens
gaagaggaaggcgccggctatctacaatcagaacgtgggctgaccgtgacgtcacaatggcgcggccagccaatcgggacccgaaggatgaatcaagcgctatgatgtcatgcggcccggga

SEQ ID NO: 80432 - DNA, 122 bp, Homo sapiens
tgtggtttgcctgctggtcctgagtcccaagtccctgaagcactgacacctgctgagggtcgtgactgtcacccagctctttgagtcccggagtccgccaggtcctggcacagagaggcctc

SEQ ID NO: 80433 - DNA, 122 bp, Homo sapiens
ttagaattctgtttctaagtttatgttttctctgaactatccattttacttgtatctcatcgtccttgactatcatttttcctctgttttcacttatataaacgtagaatttattctgttta

SEQ ID NO: 80434 - DNA, 122 bp, Homo sapiens
gtatgaaattcagttcacacaaggaagcatgagagaaggggactctatctccctccagggcgggggccaactttttaattcggtttttaaattctcaggttcctacttaaagtaaacctggc

SEQ ID NO: 80435 - DNA, 122 bp, Homo sapiens
cttggaggtgcggggggcacctgggcgggcacctctaaatgctggcacctggacactcaccggcctcaccctgtcctggccctgctgacctgtcagccgtgactccaggcaactcagcagca

SEQ ID NO: 80436 - DNA, 122 bp, Homo sapiens
ccaccctccttcctgaggcaaatttgggaggggagaggtccagaagctgtagagtcggggcgccaagcgccagattctgccgctcggaagttgggggcagtccccagtcccgcctcaggccc

SEQ ID NO: 80437 - DNA, 122 bp, Homo sapiens
cctctgtaaggcggagctaaacggtgcattcgcccagcggggaagctagaactaaatgaccgctctgccgactggagccaacgagaatcggcgtaggcgcaatacgggcggaggatggggac

SEQ ID NO: 80438 - DNA, 122 bp, Homo sapiens
ccagcctctgcgccctgggctaagtaaggcagccaaaagttgtggacacttagggtgccgcgcggggggtgtgtgtcggtgtctgtctgtccatccccgcccttccaccccctccctcgcct

SEQ ID NO: 80439 - DNA, 122 bp, Homo sapiens
cccctctccgccaccactccctccgcctcggggctttgggtttggggctgttgggttgtgcggaatctgaagtagtccacttctccgggttttactggcagcttgaagaagagtaaggaaag

SEQ ID NO: 80440 - DNA, 122 bp, Homo sapiens
ttgcgaagcggcaaagtagttcccgggtcactctacttccttgggggattcaaaggaggacgcgtagcaagaaagcggaggacataactctcttcccctctcagagcctcgggccccgcaga

SEQ ID NO: 80441 - DNA, 122 bp, Homo sapiens
tatatgtgattttgtgggcacgaggccaacgtgggacagggcacccactccaggcagcagcgacggcagacaaaacaacgcgtgaacacagtcacgtttctgaacacagtggccgcatgttg

SEQ ID NO: 80442 - DNA, 122 bp, Homo sapiens
caccaactgcccttgggtgaggctggtggccagggggggacccagcaggtgcaagccaggcgatccccagcagccgccggagcccatgtctttcccaccgcacagcacagccaggacatggg

SEQ ID NO: 80443 - DNA, 122 bp, Homo sapiens
ttgttttctctcctgtcagaccgcttcccttagactttggttttctggttgttacccactcgcaagaaaaatttccgaggctgcaacaaccgttccggttttcattaccgtttaactcatta

SEQ ID NO: 80444 - DNA, 122 bp, Homo sapiens
tgaagtctcgcgagaaatacaaactctcgcgcgaggtcgctcgactcacgtgactccgcgcgccctctagccagtccctggctgtcagggacacgaagtaggcggggcctaggaaggaaatg

SEQ ID NO: 80445 - DNA, 122 bp, Homo sapiens
ggggaggcgcagagcaaggccagggaccaaggacgggtttcctgggagctggctgggccccgcttctagctcgtaccggagccgagcttccttcagggcactttcaatataatgaatttagc

SEQ ID NO: 80446 - DNA, 122 bp, Homo sapiens
ggcgcgccgccgacatgggcaacgcagggagcatggattcgcagcagaccgatttcagggcgcacaacgtgcctttgaagctgccgatgccagagccaggtgaactggaggagcgatttgcc

SEQ ID NO: 80447 - DNA, 122 bp, Homo sapiens
aatccgccatagggtgtggtccagggtcgagttatcacagacctgtctccccaaggtccccgcgtcgcgttatctaggcagaagcgctgaccccgcatccctcccgtcgggaccccacgcgc

SEQ ID NO: 80448 - DNA, 122 bp, Homo sapiens
aaccctcaaaggctgaggtcaccccgccagggtcggtttaggtgtggcgcctcctctggacgcccctgggattgcctgcgcgcccggcccggagctcctgttccaagcagggagcatccctg

SEQ ID NO: 80449 - DNA, 122 bp, Homo sapiens
cagcccccgtctagattcaaatccgactgggtgaaggaggacccgaggaggacccacgcacgtgagggcagatccatgagggcaggaaactgacctcagactcttttggtggcaagaggagg

SEQ ID NO: 80450 - DNA, 122 bp, Homo sapiens
gaagaacagcagcagcgcgaacagacgggcgggggccatggcaccgcggactggagaaggcgcgcaggctgcggcgagtggccccgggcgggcgcgccacccatcttataggcggcctaccg

SEQ ID NO: 80451 - DNA, 122 bp, Homo sapiens
agagtcgcctgacctggtctgcagcctgagaccaaacaacgcgagggcggccttacctcgcgaatcctcgggaccccacaacgcacccaaagccggcagggagggtggtccggggcgccggg

SEQ ID NO: 80452 - DNA, 122 bp, Homo sapiens
ccgcgccgcgcggagtcacttggtggacttttccgcccaggggctctcatgctggagtggcggccgtgctctttgttgaggctgcgtctgaaacggcagcggctgttttcctgctagacaca

SEQ ID NO: 80453 - DNA, 122 bp, Homo sapiens
ttcttctttgatttgtgtgtttcttaaaaggaatctcaaccccttgccttctccctgcaacgcccccaggtcttctctgattctcacagcggactcttcccctttttgcccctgttctttct

SEQ ID NO: 80454 - DNA, 122 bp, Homo sapiens
agcagcactgaaatagcagcgtgaatcactctgggacgtcacgtgatgcccaggccaggacgcagctgtggttggtgcgcctgtgttccagggacctgggaggagggccctggccggccaga

SEQ ID NO: 80455 - DNA, 122 bp, Homo sapiens
ccacaaatccctccgtcagaatttttatcttgggaagcgcaaggtcaaaagcatcaagtacgctttgagacaattctggctctgtagaacctgaggatggtatatctgaaaacgaggatgga

SEQ ID NO: 80456 - DNA, 122 bp, Homo sapiens
ccagactcatgctccaccgctgcccacggctgctcgctcacacgcgggctaggcacagcgcgaccacgtttgcccggcctcttccaggcagacggttttccctggccctgaggccgccggtg

SEQ ID NO: 80457 - DNA, 122 bp, Homo sapiens
tggaaagaacagaacagaaagctctccctcttgtgtgaggcagttgctgtggaaaccccacgggcaggaggcccccggccagcacatcctgtctgcttgtgtctgctgcagagttctgggac

SEQ ID NO: 80458 - DNA, 122 bp, Homo sapiens
tccagcgttctgtctctaccagggtatagtaacaggccaggagttatttctcaaaagacacgtaattctctgctgtggattgtatggtcttgtttcagaatcctgggtcctttattgtgatt

SEQ ID NO: 80459 - DNA, 122 bp, Homo sapiens
agggggcaggaaagaccaagctgggtttgcacatctgtctgcaggctgtctctccaggcacggggtgtcaggagggagagacagcctgggtatgggcaagaaatgactgtaaatatttcagc

SEQ ID NO: 80460 - DNA, 122 bp, Homo sapiens
cgcttttgcagataaacgagcagggatcctacctcttttgaccggagatgttgaaaagcacgaccaaagtttttggcttggtctcttgctttccacaacgagataaagtctgaagcctgtaa

SEQ ID NO: 80461 - DNA, 122 bp, Homo sapiens
gtattaatgattcaagctcctatcattacacagttgcagagatagcaaaagttgtcattacgtgaaaaccttcctctgttgaactgaaatcttatgagtcctgtttcttgcatcttcctgaa

SEQ ID NO: 80462 - DNA, 122 bp, Homo sapiens
cggggcttgggagggcagggctttctctgcttgcggacatcgcgaagggcctctggcaggcgccgccgggtggcggcgagacgcctccgcgcctccggggttccttgttcgctgtcggagga

SEQ ID NO: 80463 - DNA, 122 bp, Homo sapiens
atgaaatattgctacagttgtaaattaaaggcagaggtctgcaagtggagagtaaaccttcggaaggcagaattgctcaaatgattgagagtgtcataagtatgtaaaataagttctagttc

SEQ ID NO: 80464 - DNA, 122 bp, Homo sapiens
tgtccctgagcgccgcccgccgccccgacccctctgccccgacctccccgtatcgcagggcgggagaagggggcccccagacccctgaaaacccacgcaagcccctcgcagccagagacccg

SEQ ID NO: 80465 - DNA, 122 bp, Homo sapiens
ctccaggattccagaggagactgtggcgatggtgaatgaaggtcccaaccaggaagagagcgatgacacccctgtgccggagtccgcactccaagcggaccccagcgtctcggtccatccca

SEQ ID NO: 80466 - DNA, 122 bp, Homo sapiens
ttgaaatggagggaggatgtttccatttcaaatgcagaattaattaatcaaccacagcttcggggcaactagaagtagtctctggagacctaaaacttgtcttgtgtgtttattcaagccct

SEQ ID NO: 80467 - DNA, 122 bp, Homo sapiens
ggtactggcttctcccatagtgtgggggcagtgctgactaatgcttccctgttcacaacacgcttagaaagtgagaatatgcgtgtggcacactggggtcagctaaaggggatttgggaatg

SEQ ID NO: 80468 - DNA, 122 bp, Homo sapiens
aaagagcttttgtaggactgtgactgcttggccaaggtatccaactctgattctttaaggcgtgttgggggataacttctcaactggggcctgactggatggaaggaatgaaggtggggagg

SEQ ID NO: 80469 - DNA, 122 bp, Homo sapiens
ggacagccccacaacaagccatgatccagcccaaaatgtcaatcatgccagttgagaaatcgctattatccacagaggaactgaggtaagcaaaatcaccattttttcttgaggatttaggt

SEQ ID NO: 80470 - DNA, 122 bp, Homo sapiens
cgtgggggaggtgggagggggccccgcggccacactacctgttgatcttgtgcgcgaaggcgcggcgctcggaggcagccatggtcctcgcgtcccgccgccgccgccccgggccccggccc

SEQ ID NO: 80471 - DNA, 122 bp, Homo sapiens
tagcaccgggaagctggcaggtgtgaggtgtgttcccggtgtccaacggacactgcaggacgcagggcaagggtgacgccgcggagcctgagcatggacgggaggcaggcggcaggacctga

SEQ ID NO: 80472 - DNA, 122 bp, Homo sapiens
agcgtcctcgaagtagaagagcatgttcccgcgcagcacgaaccagcgccggtggtaggccgcgtgccgcccacccttcttgtacaggaagcctgcattgtccaccggggcgtcacaggtgg

SEQ ID NO: 80473 - DNA, 122 bp, Homo sapiens
agctcctgaaattatgggcaagattatgtgtttggtgcttcttcctggagtgctgaaatacggttctcaaggggatctgcgttcccaaagtgttcaaaggctcgcccctgtggctctccctg

SEQ ID NO: 80474 - DNA, 122 bp, Homo sapiens
gaaagttggggaagcggggctgatcaacagcaaaaatctgccaaaaaagttcgagagagccgggcgctgtggctcagcctgtaatcccagcactttgggaggccgaggcgggcggatcacaa

SEQ ID NO: 80475 - DNA, 122 bp, Homo sapiens
gagactgtggctgagggagcctcagtgttctgtagggcacctcggggcaccggacatgcacgcacagaaccagggctgcaaccccagcaccggcctctgtcggtggcagcaacagacatttg

SEQ ID NO: 80476 - DNA, 122 bp, Homo sapiens
cggccctccaggccccttcgcagttgtgcagcaggagcggaagcttctcagcccacagggcggctgctgcctggctgggatccatggcagagctgggccccagctgcccggtgggtgtgatg

SEQ ID NO: 80477 - DNA, 122 bp, Homo sapiens
aaaataggggacataataccttaattattcttgtgaataatgcctacatgattgaaaacacgaaaagtcttaataggtattgaaagcttagaagggtgcttggtccttagtgttatgtgttt

SEQ ID NO: 80478 - DNA, 122 bp, Homo sapiens
atcgttattctagtgtttttggctctagcagcaagcttcctgctcatcttgccggggatccgtggccactcggtaagggtgtcctcatagtgcaggtagagtgggggaaggctcatgggcag

SEQ ID NO: 80479 - DNA, 122 bp, Homo sapiens
ccaacagccaatcctagcactgggcatttgcgggtggcccagcaagtggcctagcacttgcgggggcgtggccatggagacacagtgaccaaaggcagagaagaatgcgaatgggggagggg

SEQ ID NO: 80480 - DNA, 122 bp, Homo sapiens
cttcccaccagaaagtgagtcccacataaacaggggtctagtcctaattcaacacatcagcgctccctacgtgagcacccagcccgtaacaggacctcagaaaatgttcactgaaacaaact

SEQ ID NO: 80481 - DNA, 122 bp, Homo sapiens
gcggctggggcggggcctcgggcgcggctgcggtgggaggtccagccgtagggggtggggcggggctgcggacgcgcgcctgggcccggcaccgcacagctggctgcagctggcgtggctcg

SEQ ID NO: 80482 - DNA, 122 bp, Homo sapiens
tgggtccctagctttcttttttcgggactgtgggctttatttctgcccacctatcggccacgaggccaatgacatatctttgatgatactgtgaaaactcccactgtgatgagagcatattc

SEQ ID NO: 80483 - DNA, 122 bp, Homo sapiens
cccactgcaggcatgtgcagccccggctctttctgagttaagccagggactgaaatgggtcggcagaatgctcatctgttgggcgctttatggtttataaagccctttcccttctgtgccct

SEQ ID NO: 80484 - DNA, 122 bp, Homo sapiens
cgaggggcggggagggccatgagtcgggcgcggggttggagcaggagttgcccggagaagcgggggcggggcacggggtgtggcgaggcgcggggcggggcataaattgcgccaggggcgag

SEQ ID NO: 80485 - DNA, 122 bp, Homo sapiens
gagactcctagcagctctcaagaataaatcccacttgattctatggactacactgaaatccgttcttttaaaatggactgaagttaagcattacatttttccattaagttttatggagcaag

SEQ ID NO: 80486 - DNA, 122 bp, Homo sapiens
gagagggcacgggacgcggagggggtgctgggagggccctgggagcccgcgtcctggtggcggcaccccctgtgctcccacccagcgggggctcaccaccggccccttctctctggctgctg

SEQ ID NO: 80487 - DNA, 122 bp, Homo sapiens
gcggggctggccctgcccaggggtacccgcaccgactgagcgtccccggcgtgtaatgaccgtgtgcgcctgggataatcccttttaggagaaagcaacttctccagcagcctcctcattcc

SEQ ID NO: 80488 - DNA, 122 bp, Homo sapiens
agccgtgccgagtgaatagcagggaagagccccttataaaaccaaaggatctcatgagaacgaactcactatcaggagaacagaatgggggaaccgcccccatgattcaattacctccacct

SEQ ID NO: 80489 - DNA, 122 bp, Homo sapiens
ttacctctaaaaaacaaaaaaacggaatccccaagtagttagtgttgcattgtctgctgccgtccagagcccagaacgcttcctccagcttggcgccaaggtcccaaagggcgcactgctgc

SEQ ID NO: 80490 - DNA, 122 bp, Homo sapiens
gtgtctggaaagtcttgaccgggtcaaaagggctgacattgagcgagccaagacacgtttcgacccgccgctcccctcccgggggaagcaggacttccgcatctttgaaaatactgtcaagt

SEQ ID NO: 80491 - DNA, 122 bp, Homo sapiens
ggagaggttcagagacgtggaggttacagctagacagccccctggtatttttaggatctccggaccgccctaaattcaaccattccaacgtcacagccacattcccccatttattattaatt

SEQ ID NO: 80492 - DNA, 122 bp, Homo sapiens
gactttctcccttttcctttcccctctggagcagctgggaaaggcgtctctcggagcttccgccattcagaaagtgtttccccgcccctgacggccccagcttgatgtttaccttgcgcgct

SEQ ID NO: 80493 - DNA, 122 bp, Homo sapiens
ccggggtttatgcggggtttactgcttacccagaatagcggctactgctgcctactagggcgcacctaccgctggagcctccgcggcgactgcccacctccaacacacacctcctctgctgt

SEQ ID NO: 80494 - DNA, 122 bp, Homo sapiens
tttccccatttgggcagaaatctgtgagggtgagtcagtctgtcggccgacttcctgctccgggtcagggcagccacactgcacgcaggctgggccgactggggagctcataggccaggctc

SEQ ID NO: 80495 - DNA, 122 bp, Homo sapiens
ataacagatgtcaacaggtggcttattgatatcaggtggtttattgatattgaaactccacgcccctttcaccacagaccacctgttggccataaggctatggtgccagcgatctctcccac

SEQ ID NO: 80496 - DNA, 122 bp, Homo sapiens
ttagatgaggtcaggagggaggagacgcaaacacaattggccggaccttgatcttagacccgcagcctctagaacctgcagagaatgctggagctgcccagggtgtgattcttgttacgtct

SEQ ID NO: 80497 - DNA, 122 bp, Homo sapiens
agcagggctccagccatgtggcacattaaccccagcagagcactttctgcagtactgctccgtattggggacccacaaggagtacagtcggtgagggaagctcgtggagcgttctcaaaata

SEQ ID NO: 80498 - DNA, 122 bp, Homo sapiens
ccccttcttcccccgtgacccctgaccccagctaatctgcatagaggaatgacaggcatccgctgggcaggatccgccgcgccggctgcggccggccgggctgggagacccgcgcggggtag

SEQ ID NO: 80499 - DNA, 122 bp, Homo sapiens
ccttcaaacacacacaggctccgccccactagcacagaccgggacagtctggggcagtctcgtcccgcagggcccagaaagctggaccaggtgaccctctcagactcccccgagtcctctgt

SEQ ID NO: 80500 - DNA, 122 bp, Homo sapiens
agtatataccactttggttcatgtatcttgaagcttttatcattcgtcacctcagccattcgtttttttcagagtaagtcatatgcttagaaccaggaaattgcctgccacatcttgttcct

SEQ ID NO: 80501 - DNA, 122 bp, Homo sapiens
tcccatttttcctctcttgtgcatgacgaactttgttatgccagccttcaagggatattccgaattcctttttcttagaattctagagccagcgggggccttacagatcactgggtccagtc

SEQ ID NO: 80502 - DNA, 122 bp, Homo sapiens
gtctgagattcgggaagcttctgtgcgtaggcgatgcagtttgagaggctgaaaacgtcacgacgcgaaatctaagaaatgtagtcaaattatgtattattaaaacctcaataattgtacca

SEQ ID NO: 80503 - DNA, 122 bp, Homo sapiens
tgaccccttgagcttcccgagtgaggcagttcttcaccctgctttggcttgcgcatggtgcgctgcacccactgtcctgcacccactatctggcactccctagtgagatgaacccggtacct

SEQ ID NO: 80504 - DNA, 122 bp, Homo sapiens
acgcgcttctgcgtgtcctcctcctacagcacgcagtgcagcggacccctgcgcgagcagcggctgtgcaacaactctgccgtgtgcccaggtgggtgggaccttgggctggggcagcggac

SEQ ID NO: 80505 - DNA, 122 bp, Homo sapiens
ggttagcaccctttggccctttggggcctgacctcagcctggacctcggcccgtccacaccgcacggggtgcctacggtcccccacagaggcctcaacacacactgccagcacgcggcctgc

SEQ ID NO: 80506 - DNA, 122 bp, Homo sapiens
gaactcgcgcacctgggggaagccggcaggaggcagcgggcatgcgcggggctgcggtggcgcaggcgccctgccgcgcccgccagtcgggaaccggttctccgagtccgagctggcggcgc

SEQ ID NO: 80507 - DNA, 122 bp, Homo sapiens
tgacacaggtgtcgtggactgggctggtgggttgggccccgagagggtggcaggggcattcgccttggtcctcgccagcatgcccgcggcccccgcgacgttcccccaagaagcagcagcag

SEQ ID NO: 80508 - DNA, 122 bp, Homo sapiens
aaccaaacatctgctctaggtttagaagagggataacatcagcgccaagcaaaccgaaagcgcagaggactcagaagaggggaagaggaataactttatctgtcctggaggtgggcgaagag

SEQ ID NO: 80509 - DNA, 122 bp, Homo sapiens
gggccgggccgccacggtggggcgaaaagccctgaaagttcctctcagttccttccggtgcgcctcccgctcgcccttgcggaggccctgagggcggattcaaggccccgcgagaagccatc

SEQ ID NO: 80510 - DNA, 122 bp, Homo sapiens
ttccctattccctcctcccctgcaatatttccacctgctttcctagagaagcacagagtccgcctctcaccaggcccatagaaaaagtttgtctactctctggaagtgggctttacaattac

SEQ ID NO: 80511 - DNA, 122 bp, Homo sapiens
gggtttcagctccaacctcgctgagttggtgcagctccaggtcattcctggggtgggaatcggatcatccctgactcagcttttaccttaattttatttgcagaggattcttttctcaaaat

SEQ ID NO: 80512 - DNA, 122 bp, Homo sapiens
ccccgccattccacatccagacttctgactcagaacccatagtggctgttttttgaaaaacgaagcaaagctgtaaattgggtcacattatactctgcttaaaaccctatactaacagtctg

SEQ ID NO: 80513 - DNA, 122 bp, Homo sapiens
ttcctacaggatgcccccgcgacctcaccggggaaacaccgcggacagtcgggccagcagcgcccggagctcactccaggtctccaaacttgcagcacttcccagagcgcgcgcgctcggag

SEQ ID NO: 80514 - DNA, 122 bp, Homo sapiens
aaaaatcccctcgaatgtctcccagggaagaaatatagctcctataattaaaggaggcaacggccagagggggagtgcagccggcagccaaaaaagaaaagtaagagttttatttatttgct

SEQ ID NO: 80515 - DNA, 122 bp, Homo sapiens
ctcagcatcccgatgctttcccaagactatgattaaataatcgtgttatgacctgtgtaacggtctgctttccccagataggacacaagagctgactccttttacttccccccaccagacag

SEQ ID NO: 80516 - DNA, 122 bp, Homo sapiens
ccactggtagagaacactgatgagacctgcggcacagacattgaggctccttataatattcgcttccgcaccctcgagctgaccacacaaaactatgaggacctgacccacctgtctcagct

SEQ ID NO: 80517 - DNA, 122 bp, Homo sapiens
tggggctgcagctgtgagcaggactaacagtaccgttcttggaaacttcaaatctaatggcgaggtcagcatgcagacaaaatgtagaaaattagggaggttcaggcactatgggcatgcac

SEQ ID NO: 80518 - DNA, 122 bp, Homo sapiens
aagggcagtcgcggggaggcagtgctaaaatttgaggaggctgcagtatcgaaaacccggcgctcacaaggttagtcaaagtctgggcagtggcgacaaaatgtgtgaaaatccagatgtaa

SEQ ID NO: 80519 - DNA, 122 bp, Homo sapiens
catttccccccagacgctggccgctcttttgtgggttgggcgcgtgaggatccctgactgcgctggggagccagcagtgggagcccgcccagacgggaacagggggccgcccccaagcagaa

SEQ ID NO: 80520 - DNA, 122 bp, Homo sapiens
aaatacattccatttatattacaaaacagaacttaataaaaggtctgcagcatctacatccgggtttataatagcttcaattttctccaagaaaaataaaagcacgtgttttatatttgtga

SEQ ID NO: 80521 - DNA, 122 bp, Homo sapiens
agtcacacgtcctgcatttgggccttgtccacatgcatttcatggtcactggctctgtgccgggcccctgctgagtctggggtttgggtgagtcacctcccccgccaggccccgatttcctc

SEQ ID NO: 80522 - DNA, 122 bp, Homo sapiens
gaaccaaagtgccctggaccaggtcagggcctacagctgtgttgtccagtacaggagccacgagccaaatgtggcatttgaatttgaattaacttagaaattcatttcctcacctgtagtgg

SEQ ID NO: 80523 - DNA, 122 bp, Homo sapiens
ttagtgtcaggattccaccattcctgggcacattcctccctccttggagtcaagtttcctcgtgcagggtccacctgagtctcactctgtctccctgttgtgtttgcacagggcaaaccctc

SEQ ID NO: 80524 - DNA, 122 bp, Homo sapiens
cgggtgccaaccacaggatgggcctgttcaggtgtcaggaagagatgctgagtgagatcacgcaccaaggaacgatgagtgccaagaaggaaaaaaagatggggcaggaagtgccgcggggg

SEQ ID NO: 80525 - DNA, 122 bp, Homo sapiens
gcacaggacgcagtcacggcaccgcccaggtcctcctgccagaagctggctcctggcccccggcacccccaggcctcgaaaccccgcgtcccgcccacgaccccgccctgcgcccctcgcag

SEQ ID NO: 80526 - DNA, 122 bp, Homo sapiens
ccaaaaaagaaccaggagaatcgcatgaaccccggaggcggaagttgtcggcccagatcacgccactgcacttcagcagtgactgtctcaaaagaaaaagaaaaaaaacaaaagccccatca

SEQ ID NO: 80527 - DNA, 122 bp, Homo sapiens
gaagagtttgcccaggttccaccagagccgagaccaactcacagcaaagtagctgcatgacgatctctctctctctcttttttctttttttctccattcctaagaccaggacaattgtgtgg

SEQ ID NO: 80528 - DNA, 122 bp, Homo sapiens
agactcagccgatccacagccatgagtgcgaagcctctcaggcagggcaggcaggcaaaccgcaaacccacagggcgcacccagccccgccgcttcctcccgggcctcgcccgcagctggag

SEQ ID NO: 80529 - DNA, 122 bp, Homo sapiens
aagggccctggacttaagaatgaagagttgagagagatgagtaaagaacactgactaggacgtgcgagaaaagacagatcaatcccaacgattcatcatgccaggagctgtccaaataatca

SEQ ID NO: 80530 - DNA, 122 bp, Homo sapiens
cacatggttccaggcaagtaataacaaaataacacggcatcccagttaatgctgcgtgcacggcgggcgctgccggtcaaatctggaaggggaaggagctcaggtagtcgcggaggacgggg

SEQ ID NO: 80531 - DNA, 122 bp, Homo sapiens
ttctatgaccaattctgtagtgttgccttcagttcaggcacatgcctctgaaaccttaatcgcaaacagatgctgttctgaatcaagagtttccctctttggctactcagcctgagcaatga

SEQ ID NO: 80532 - DNA, 122 bp, Homo sapiens
acggggtagggttggaggaaagagctggggggacccgtgagaaccaggacaggaaaggcacgacttctttagaggaagagagctttgtctccttagttatcagatttgctggggacccggag

SEQ ID NO: 80533 - DNA, 122 bp, Homo sapiens
cctatgttcatccaacttccccaccaacaattttagttcactctgtccagtaaggctttacgctgaaaaaccttggaactggtattgccctgtcattcttactagggtcagaaccatgagac

SEQ ID NO: 80534 - DNA, 122 bp, Homo sapiens
cactgcgtacagttcctcccgatcgttcttgcagatctgatagtggcaggggaatttctgcgagcaggcccagggctcggcgggctggtcaggtggcggcagcagcaaggctgcgctcccgg

SEQ ID NO: 80535 - DNA, 122 bp, Homo sapiens
aacacacattccccaccccccaagccaacaataaaatcatccccttcaatttgccatgatcgtcgctaccaggagccaggtgattatcctaattaatgtctatctaattaaattactgtcag

SEQ ID NO: 80536 - DNA, 122 bp, Homo sapiens
ttcattaatattaataattactaattctagctaacacttgccaatgcataatgggaactgcgtttttaacaaatgttgcctaacaaagactgttatttttttctatatcttggttgtggtac

SEQ ID NO: 80537 - DNA, 122 bp, Homo sapiens
gtgtgtgtttgtgtgtgtgcgtgagtgtgagcgcgagtccccggacggggctgcttctctcgctctctccctcgctagctctacccctcgctgccgtctctgcccccattaaattattagtt

SEQ ID NO: 80538 - DNA, 122 bp, Homo sapiens
gctcaggtgggcttttctgccgggcctctggcttgcgccgtgggcttcacccaggtggagcgtggggctggccttcctccctgcagatgccacagctggtaatgccacagctgggaatgcca

SEQ ID NO: 80539 - DNA, 122 bp, Homo sapiens
aaaaggaccagcgggatccggccgcaagaattggaaagcctaggaagtggcggtggctggcgcgtttggggagcaggagtggggatagggaagcagagcttgagagaccttcctccggggca

SEQ ID NO: 80540 - DNA, 122 bp, Homo sapiens
ctttgaaatggttgcgtcggaggagctgggcgtggttgttctccagccgcttcacctgtgcgcactgcctatccatgcgctctttgaccgcgcgcgtgtgggcgctgaccttgcgggacttc

SEQ ID NO: 80541 - DNA, 122 bp, Homo sapiens
cttgccggggacactttgcagacggctccaacattggcaaacactacagagaactgaccccgctcggccgccgccggcttccacccctcgggctccccgccccccgcctccgcccgcctccg

SEQ ID NO: 80542 - DNA, 122 bp, Homo sapiens
agcgggaagcaaggaagcctcgggaaaccacagggaagctgcaggccagcgactcgaaaccggccaagctcttcccgcgtctgggacggcgggccgccagaggggcggggcgcgcggggagg

SEQ ID NO: 80543 - DNA, 122 bp, Homo sapiens
cctgagctttaaaatgttattcggccgcttcatcacttgtccccgactttgcagcgactccgatggtagcctgagtctccattgcttggagcagccacagtggacactggacgggatattct

SEQ ID NO: 80544 - DNA, 122 bp, Homo sapiens
ggtggcggccccggcacggcggctgctgctgctgctacagctccggacgcccgggccgcgcgtgcctgctccaaatccccgggaaatgcctgactcatacaggaggaagaggaggaggaggc

SEQ ID NO: 80545 - DNA, 122 bp, Homo sapiens
caaacactgcagcgtcaagaagaattgcaattgtcagaaatatcatattcctgtcaaaagcgcatgaaatcaattctgtaaattgagaaacataagtcacagttatatttgttctgcaacca

SEQ ID NO: 80546 - DNA, 122 bp, Homo sapiens
tccgggctgcgggagcaccggtcagggggtggccccatggggtctctgaccagcggagctcggattaggaccctgaaagctagctcagggctcctgccctccaatcagtgtcgcttgtcccc

SEQ ID NO: 80547 - DNA, 122 bp, Homo sapiens
ggtctttcacctctgcaaaccgttaaacatccttccagtaagacataatcgttaagcccacggtgttaaagaaacccagtgagctgttccccgcaggtcaccgcctgcctccaccctcctcc

SEQ ID NO: 80548 - DNA, 122 bp, Homo sapiens
atactgccccgcctgcgtgctgccaaatgctggtgcccaggccggaactccagcaggccccgaattgggacctaaagctggtttgcataggcacttggcaatttttggtagggaggtggata

SEQ ID NO: 80549 - DNA, 122 bp, Homo sapiens
ttcctgaaaaagactgaaaggccccagttgggggcgggggttatgacctccgtggggacccggctggtcagagccctgcacatgcacaaaggctgaggggcgggaagcgtgggctgtccccg

SEQ ID NO: 80550 - DNA, 122 bp, Homo sapiens
aacctcatcatcgcccaagggaactgggagtggcgggcggggaggacgcgggttgtgtgacgatcaccgataattagttggtggttaacgcacaagtaggataaaagagctcgccccaggct

SEQ ID NO: 80551 - DNA, 122 bp, Homo sapiens
aaaagacaaaatacaagcccatattttgttttagattcaacaggcacaaaactactgtttcgatgcttaaatttttggttgcctgttagtttctaaatgcttactcttaatgcctgtactta

SEQ ID NO: 80552 - DNA, 122 bp, Homo sapiens
tgctggatagggaggggccccagactctcccaggatctgagtggggccgggagctctccccgcgcccccacctccccgccgatcccccaatcccggggcgtgagagccggtacctggcagca

SEQ ID NO: 80553 - DNA, 122 bp, Homo sapiens
atcgccccctcctcaaagcattctttcgatcgtctttaaaacatgctcacatttttcctacgtaagaacaaactaaataaacgcttgcctttctctgcatcttccacctgcggacactttct

SEQ ID NO: 80554 - DNA, 122 bp, Homo sapiens
ccccacactgcctcggttcggcaagtgggtcagttggctggggctcacttggcaacgggacgcgggaacgaggggcgcggacgcaggcccgggaggacgcggcggcgggaacctgggggcgc

SEQ ID NO: 80555 - DNA, 122 bp, Homo sapiens
agggggcgccgccgggaagcctgtaattgggctcctgggagctccgcggaggtgggcaggcgccggcccctcaagccctcgggttcggctggcctgctcgacacagcctgcgcacccaggct

SEQ ID NO: 80556 - DNA, 122 bp, Homo sapiens
gggtagggaacagagaaaggctgtcccagattcacataaggagagtgacttctgaaggagcggggctgtgtcagtgccaccgcaggttgagttggaagtgtggccatagctgacccctgata

SEQ ID NO: 80557 - DNA, 122 bp, Homo sapiens
ccaccaggtcccggtggtggcccacatccccctcatactccctcccacccacccagcacccgaatcactcgaagccagcccaaccacacacctgcaggcccgcctggcccttccagcaaccc

SEQ ID NO: 80558 - DNA, 122 bp, Homo sapiens
gacaggaagatgcagccgcttccagcagggacctggcctgagggcaagggaggagcggcacggcggcggctgccttgcgcttccagctcgggccctgctcatttgaacaatatccaacctcg

SEQ ID NO: 80559 - DNA, 122 bp, Homo sapiens
gacccgtggcccagagcggcctcccgagaagccacggaaacatgactgacagcagtgcggcggacttggagcgggtcaccgactatgcagaggagaaggagatcagagttccaatctggaga

SEQ ID NO: 80560 - DNA, 122 bp, Homo sapiens
agatttcagagcagatattttcagacattcattgaagtgaacaaacattctggcacagaacgaaattattgctcaacatctgattctgttgggctgtgcccccatcccagccttacccctcc

SEQ ID NO: 80561 - DNA, 122 bp, Homo sapiens
ctcacagcatcaactacaagagcttgccgggtggcaaattctgagtgtgggttttggtgtcgatctgacgtcacttcagattcagatcgagtatttttaggccagataattggactaatgac

SEQ ID NO: 80562 - DNA, 122 bp, Homo sapiens
cggtcagcgggtgcaccaggggtcgcgggggcaggaagctggtgaaggcgctgctgcccccgccacccccgtaggctcggctaccggccccgtagccgccgtagcccgcgccgctgcccgca

SEQ ID NO: 80563 - DNA, 122 bp, Homo sapiens
cttcccggtgttcagccactgcattgatcctccaccggggcctgccacgcgctgctctgacgaggtgtccaaccggggcaactgcctaccccggagcgctctcaggatccgcgtcactcaag

SEQ ID NO: 80564 - DNA, 122 bp, Homo sapiens
gagcggctgccaccgcgtaagcttcctgcacctgggccacaaacagcgagtctaaaatggcgcccagggctcgcggccgcgcgcttccctggcgcgtccccgcccaagggggcgggaagggg

SEQ ID NO: 80565 - DNA, 122 bp, Homo sapiens
tctctcgagcttagcctgtgctccaagcaaccccttgggcaggtgggtcaggttgtttcccgataaatccaacaacttcaggttctccagattcgtgaagagactggcaggaaggaaatcga

SEQ ID NO: 80566 - DNA, 122 bp, Homo sapiens
ttctacttctacagggcaggagtcatcaaaaacctacaggaaacgttacaactacaaaagcgtcacgggacaattatggtcaaaactgcaagtagcaaagtcacctcttcaaagcaccactg

SEQ ID NO: 80567 - DNA, 122 bp, Homo sapiens
aaagaaaagtgtcgtgctgaataataactagcatttggattgaattctgtggtccaggcacggtgcattaatgtatcatatggtttacattcattgtcttatttcatcttcaaaacgagcac

SEQ ID NO: 80568 - DNA, 122 bp, Homo sapiens
gcaggtcagtgggtgcgcacactgtgctcgagccgaagcagggtgaggcattgcctcactcgagaagcgcaaggggtcagggagttccctttcctaatcaaagaaaggggtgacggatggca

SEQ ID NO: 80569 - DNA, 122 bp, Homo sapiens
ctacatcctggagcccaaatcagtcatgtgggtgggaagttcccagggcagtggtcacatcgtgagaattagcaggaaaggcggggcctttcttgtcatagctatttctgaggatgaaatgg

SEQ ID NO: 80570 - DNA, 122 bp, Homo sapiens
gctgggattacaggcgtgagccaccgcgcctggccgatgtggttcatatttcaggggtcccggaagagttgtttgaggtttctatttggccaagtcaggccctggtggagtttggacagtcc

SEQ ID NO: 80571 - DNA, 122 bp, Homo sapiens
tcctgaaatcgacaacccctgagagggcactcgcggctggcagagcaacctgggagggtgcggatcgtgtccaatctggcgtgaagcagaaaggaaacatcgtgaggagactagaggcagga

SEQ ID NO: 80572 - DNA, 122 bp, Homo sapiens
gggcagcagccgccccctggaggaagggaccgggtctagccccgcctgcgtgcgaggcgccgcgccagggtctcaggatgctttttacccaacaagggccaagcaggcgcgggtgtcccagg

SEQ ID NO: 80573 - DNA, 122 bp, Homo sapiens
ccttcaaggcctgggcacccaacattcccgtctgcacagaccttgcaaggaaggcctggccggccaagcgccggcctcacagctgcatgttgttacaaatctctcagtgggaccttcctccc

SEQ ID NO: 80574 - DNA, 122 bp, Homo sapiens
gtgactacagctcctgcagctaccacagggtccacgagctcagggtcgaaggtcacatcacggggccttagtgtatcacaggcatcatagctgcggaggacaattcggcagtggcagtggta

SEQ ID NO: 80575 - DNA, 122 bp, Homo sapiens
atccagggagctggaaaaggttgggctgacgtgttgagaaaaggccagaaaggtgggagacggggctgaagaagacacctggctgggacaggccaccaaggcctccaagctctgttttaggc

SEQ ID NO: 80576 - DNA, 122 bp, Homo sapiens
ctttaggaacgactcaatcgccggagcaggaagctcagaaaggacattgcagaacttcagcggctcaaggctcagcaggagaagaaactgcaggctctgcaggtgggtttttcgggttcctg

SEQ ID NO: 80577 - DNA, 122 bp, Homo sapiens
aaccatgtgctactacagcaactactatggtggtctgcgttatggctatggagtcctgggcggtggctatggctgtggctgtggttatggccatggctatggaggcctgggctgtggctatg

SEQ ID NO: 80578 - DNA, 122 bp, Homo sapiens
tgatagtacatttcaggagagcatgaggctctgttaggaaggaaacatgatattcccccacggatggagcctggcagtctccagtggatctgtcgtttgctcagagcacatgctctgcagcc

SEQ ID NO: 80579 - DNA, 122 bp, Homo sapiens
ggggacgttgctttagggacccagaggagcagtgtgggttcccgggagggaagccacccacgcccctggactcaccctcgcagcgatccgttcagtccgtattagtttggagcaacgggagg

SEQ ID NO: 80580 - DNA, 122 bp, Homo sapiens
agagagtggcaaatcaacggggtgttgattttgaaggtgctatgtaataaatcagggtagcgattctggtcatctcgccaattttgacagtgagacttgcttatttatggcgttttaaggtc

SEQ ID NO: 80581 - DNA, 122 bp, Homo sapiens
cattaagcagggtcaggaaatggaagggccgtgaccgggtcgccgcgggcgctctgtgggcgatgagggtctcctgagcgagcaagaccagtctctccccgactcgccacgcgccacgcgcc

SEQ ID NO: 80582 - DNA, 122 bp, Homo sapiens
ggttgaacggactcaccaggaaacgtgactttcgtgtccgacctctgctgtatcaggattcgattcttggtgttaaacaagacaacgctgaaggctcggtgcagcagccctgcaaaggtaag

SEQ ID NO: 80583 - DNA, 122 bp, Homo sapiens
gagtgaggggggtacacatttctgctcggtaacccctccaatgcctgaaggggacgatgccgtgacgttgctctgtcgggacacctcttccctcccccgcccgcggtcgccaggttcccccg

SEQ ID NO: 80584 - DNA, 122 bp, Homo sapiens
gacatatacgaaggggttggatatattaattattttttcaaaagcaaaaagtacttactccgtcctgcaatagcaacatggcagagaaaactcgagaacaagatgagcactggagaaatcat

SEQ ID NO: 80585 - DNA, 122 bp, Homo sapiens
atccgcctgcctcggcctcccaaagtgctgggattacagatgtgagccaccacgcccggccgacagcctagttatattttagtgtgaatgaaatagttggttaacctgaatcccattctaat

SEQ ID NO: 80586 - DNA, 122 bp, Homo sapiens
agggctcagattgagtggctcagcagcagctccgccgggggtggtggggcgcgggagtctcgactcccctcatctgtggacccgccgcgctgcggagcatgcgccgtgcttcgtctgcgcat

SEQ ID NO: 80587 - DNA, 122 bp, Homo sapiens
cagattgctgggccctaccctcgcaggaaggatggggctcagggatttgcgtttctggtacgctggcaggttatgctggtgctgcccagccacacaggtagagagctgccgctccagttaat

SEQ ID NO: 80588 - DNA, 122 bp, Homo sapiens
cctgcctcctccctcagactagcatatgtccaggacatacttatcctcaaggctgggcgccggctgggaaaagggccagggcaggaagacatggggagaatgagggcaaaaatcgctctcag

SEQ ID NO: 80589 - DNA, 122 bp, Homo sapiens
aaatctggagcgtttgttacaagggcagaagaccggcgtgatctccccacgcgcgccggccggtgctgctggtggagagaactgacatctaacgcatgtggcccaggagaacaaaaccttcc

SEQ ID NO: 80590 - DNA, 122 bp, Homo sapiens
ctgccaccttcccctgggagaaattcagtgggtttctgccctttcctcgtgtttgctgaacggaagtaaacctgaacaccagggtggcctggaagcagagatgccctcccctcctttctcct

SEQ ID NO: 80591 - DNA, 122 bp, Homo sapiens
ccgtcaactgccgaatacaagtattttccagtcagaaactcccattccagaatctcctctcgctggcggggctgaaacctcatgaaggagggagggattcccagctggaggtcctctttatg

SEQ ID NO: 80592 - DNA, 122 bp, Homo sapiens
gactctatccaccgcccccgggttatcattcagggccccatcatcttggatgctgccctgcgtatttggcagcaatggtgggccacccagggcctctgagtagccacccaaagcctagccgc

SEQ ID NO: 80593 - DNA, 122 bp, Homo sapiens
agcagccaaatgctgggaacaacctgtgtgggtacaagcaagacgtggtgtgtccctcgacggagcacgactcagcgacaacaggagcaaagggtgggggtaggaaggtagcgttgcgtcac

SEQ ID NO: 80594 - DNA, 122 bp, Homo sapiens
atgactacagggccagcaaataataaaaaggagggctgcagggctgggtgggaactgtggcggctgctcagctcttcttacagtgctggcactgtgttttcagattgtctgctttgtcagag

SEQ ID NO: 80595 - DNA, 122 bp, Homo sapiens
aggcgagcacaggcagtcactgcagcagccgccaggcaggcggctccacgcggccctggacgcccagcccccagctctttgttctggcgcagcctttagcctcagagcgcacgtgcgcgggc

SEQ ID NO: 80596 - DNA, 122 bp, Homo sapiens
aaggtgcattcaggaggtttcaggagtgcagctctggaggacgcggccgcggagaggagtcggtgtaatactccagacagatgtccacgttaacttcatgtgtttcccgaacatgatttcca

SEQ ID NO: 80597 - DNA, 122 bp, Homo sapiens
caatatggacttcaacactgagccccggccaaaggctaccaaccccgccaccgcccgacccggcagcactcacctcttgggggcttccccaacagcagggggcttgtgtcccagaaggaatt

SEQ ID NO: 80598 - DNA, 122 bp, Homo sapiens
cgacattagggactgtcgcagcccggggaattgtccccatctgctggcttaccttgtgggcgtggatcccctctaactttcctaattcccgggcggcccgcgggcctgcggcagattcagct

SEQ ID NO: 80599 - DNA, 122 bp, Homo sapiens
cccggccggggatggtgcgtgagaaccagcaggctgaacctcggatttgggggtcatgcccggcctctgggatttgggggtcacgccgggcctcggatttgggggtcacgcccgacctctgg

SEQ ID NO: 80600 - DNA, 122 bp, Homo sapiens
gcccacaccgcttccgtcgctgctgtagtcgcttcctgcggccagcccgggttcaatcagcggccgacaactgtctagggctcagacaccaccagccaatgagggagggcagcgtggagccg

SEQ ID NO: 80601 - DNA, 122 bp, Homo sapiens
ctgaccctcacgcagtgtccgcctccagggaactgtggaacacgtcgcagagagctcaagcgccacgtttggatccctgagcagctgtcacaagcctgcacccaggactggggggcctgctg

SEQ ID NO: 80602 - DNA, 122 bp, Homo sapiens
gagaaaggccatttccctaattcctctagtcaggcccctgagtgcgagatggggagcaggcggtggagctgaatgggcttttgacgggctggagatgctgctgcattttaataggaagccgg

SEQ ID NO: 80603 - DNA, 122 bp, Homo sapiens
acagacaacctgagacccatacacaacaaaggggtgctgccaagtctgtcaggtgctgcccggttctgcatgggaaaggtagggcagggcattctgggaggggctaaaagaggcccctactc

SEQ ID NO: 80604 - DNA, 122 bp, Homo sapiens
gcgtccagcagcgcggcgggccagcctggagcggaagcctggagtggagcaggcagtccgcgggggacagacgtcggctgggattgagccggcagactgcgaaaagtagctggagccggagc

SEQ ID NO: 80605 - DNA, 122 bp, Homo sapiens
cgagtccccgccctcctctgccccgaagggcttcaggtgcccagaccgggcggggcctcgcggagcctcgcagcgcaggcgcagtctgcaggcaacattcaactgcaaggcatcggccaatg

SEQ ID NO: 80606 - DNA, 122 bp, Homo sapiens
tggtacactctggaaaacattttggcagtttcttaaaaatctaaacatgcaactcccatacgacccagcaattacactcctgggcactcttcccagacaaatgaaaacttatgttcacacaa

SEQ ID NO: 80607 - DNA, 122 bp, Homo sapiens
ggttgtgtggtccgccgaggacttgcccggtgacagaagtgctgcttgctgaggtgaccacgatgtgcccggtgcttcctgggaagacgatggtctgctcgtaaggtaggcttgggtttggg

SEQ ID NO: 80608 - DNA, 122 bp, Homo sapiens
acaaaaccaggaagagtgtctggccatcccgggcctgagtttctgcccatgggcagctgccggacaagccctctggtgtgtcagcgggtcaggctgagccagacgtggagatgaggctgaga

SEQ ID NO: 80609 - DNA, 122 bp, Homo sapiens
ggtgtccgcctgaggcctcctgtcccgcggggtatgaggatgcttggggagcatctccggcgccatggcaaccgcgccttttccgacgggatttccggacgcgcccaggagtctgctttgga

SEQ ID NO: 80610 - DNA, 122 bp, Homo sapiens
ccccctgtttacggggcttcttgaatttgggatgggaggaggtgtgaaggcagctgtgggcgcaccagctggagcgcggcggctttcaccagccttgaggctgatcctcctcctgacccggc

SEQ ID NO: 80611 - DNA, 122 bp, Homo sapiens
ggcttggtggctgagtctgcagggtggaatggatgacggatggtggaagggagagagaagcgggccaagggcacaatctgggagtgggggcatcaccatgtatagggcaagcagagcacaca

SEQ ID NO: 80612 - DNA, 122 bp, Homo sapiens
tagtggcttcaggagtcccaaggagtagaaatatctatgtggacactaccttccggatcccgctgcctccgcccccaggcaagattaatgaacatcgtcttagactgaaagagaagtggaaa

SEQ ID NO: 80613 - DNA, 122 bp, Homo sapiens
aaagaaaaaagaaaatccaattcccattcactttctggcctctggctgctgacccaggcccgggggtattttcagaggaagggaattgcggaccccggaggaacccgaaatttgcccctcaa

SEQ ID NO: 80614 - DNA, 122 bp, Homo sapiens
tttcaggggcatcaatgccaggttgaaatatgccattctggcccagctcagtggctcacacgtgtaatcccagcactttggaaggccaaagcgggtggattgcttgagctcaggagttcgag

SEQ ID NO: 80615 - DNA, 122 bp, Homo sapiens
tcggcttcccaaagtgctgggatcctcggctcctcttttgcagacgaggaggcgcaggggcgagtggggagggcgtcctcggtgagcgcgcgaataccctcctgagtcagctgggtcggcgg

SEQ ID NO: 80616 - DNA, 122 bp, Homo sapiens
gatgagcaaagattggaaaagtgtcagagtcaaggccagcaggcagccagcagccatcttcgcgatcgaagatcaatgccccctccctgcccaagcgggggaaggagcggcgctggaaaccg

SEQ ID NO: 80617 - DNA, 122 bp, Homo sapiens
gaagcaaactaataggacccataatcatcagctgttaatattaaggtcccagatggcttgcgggttatacaaaaacatctcatgaaagtgagaatgtatccttattggatggataatttgaa

SEQ ID NO: 80618 - DNA, 122 bp, Homo sapiens
ccacgaccgtttacttttctatgctgttgccagaggctgcctagcagggcctgtgtctcccgctgacctttaaggccagcactgcattcagatgttgggcttttccaattttgcttaaataa

SEQ ID NO: 80619 - DNA, 122 bp, Homo sapiens
acacagtaattccccagtttcttattgacgtcccagcggaagtctgactcctgcgcgtcacgcagtttctgaggcaacgaatctctggcggaagcttttcctggcgcgtttcgggagaacca

SEQ ID NO: 80620 - DNA, 122 bp, Homo sapiens
tcttgtgggaccaaattaggcattctgaacccacgccggcttagctgggccgagtccaggcgctgccgcacgtacagttttggtggcggtgacagacactgttcttgactctaggggcctat

SEQ ID NO: 80621 - DNA, 122 bp, Homo sapiens
ctgttaaatgttcctgccacagttaaagaaaaagagagaaaaagagagtgagagagacaacgataagctattgaaggacgctcagtggaaagtgtggtgatgtaggcagtttttatttttgc

SEQ ID NO: 80622 - DNA, 122 bp, Homo sapiens
gcttaggactgacatctttgtcaatggaacttattatggtaaccacctggtcatcctgagcgtatgaaaagagacaagatcatttacttgtttgggacagcaacctggacagtgcataagaa

SEQ ID NO: 80623 - DNA, 122 bp, Homo sapiens
tccgtgggctcccgcgtctccttcaggatttggacttggacacagcaagtccgatgagtccggccagtcccgccacacccagggccatgcctcccacgatggccatgcccacgagtccatct

SEQ ID NO: 80624 - DNA, 122 bp, Homo sapiens
ccctggcatccctctgacatctattatactggcatattttctttgtcttggacactccagcgtccctcttataaagacccctctgattacattggacctagaggataatccagcataatctt

SEQ ID NO: 80625 - DNA, 122 bp, Homo sapiens
gggtacccccggttccaggactgaccatggagggcaggtgccagcgctgttcggggcctccggtgatggtcccagctcccttcccacaaaggccaggtgcagccttggaatcctctgacact

SEQ ID NO: 80626 - DNA, 122 bp, Homo sapiens
tgtctgtgctattttcggtacttttatggctaaagtaacagttttcacacagcttaacaccgtcacgcaatcctgcttccccaagtcttcttcactcattggtttattagttaaatgaactt

SEQ ID NO: 80627 - DNA, 122 bp, Homo sapiens
tggctctcggcctcgcctgttgctaacctgccattttgttgggtggtgcaaaggtgtagccgatgactgggtgacctggtggctgccacgctgtggaaagtgggggcgggaggcaacaggaa

SEQ ID NO: 80628 - DNA, 122 bp, Homo sapiens
cgcctcatattaacgtgtttggcacatgttgcctaaaagcatctgcattctttgagtgtccgcacgcacacatcctgcatatgcggggcttttggcggtcccgagaatcgcgatatggagtg

SEQ ID NO: 80629 - DNA, 122 bp, Homo sapiens
acggctacacgagagcgcatctctctccgaagttaaagagcacactctcccatcactcaacggatcccaacaagccaccactaccgttaacagaatccggagaggccacggcgcaggcgcaa

SEQ ID NO: 80630 - DNA, 122 bp, Homo sapiens
tcgcccactgcctgtgcctggaagtcctgggcttgcccctcttggaggaagtcagggttccgccctttcgtcgctttttaagaatccgtgcatgtggcagtggaggcagcgaatgctcagca

SEQ ID NO: 80631 - DNA, 122 bp, Homo sapiens
atggtttctctgattatcgacagtgcaaaggatgcatgctgagcgcgacatgggcagggacgtcccgcgtagtccaccaatggggtgtgagcaccttgctattctgcttcccatcttatccc

SEQ ID NO: 80632 - DNA, 122 bp, Homo sapiens
agaaaaagactgggaggagtgatgggcaatggttcaggctgcgatgttttaaaccgctcacgtgatctagcccttcctaaccaccagtcctgttgccctcccgcctcagtatatttcagtcc

SEQ ID NO: 80633 - DNA, 122 bp, Homo sapiens
ctcgctaagtccccactgccccacccccagccccagcgattttcccgagctgaaaatacacggagccgagagcccgtgactcagagaggactcatcaagttcagtcaggagcttacccaatc

SEQ ID NO: 80634 - DNA, 122 bp, Homo sapiens
gttccctgcagcgttcagcaaggctggctctagaagtgctggagagggccaagaggagggcggtggactggcatgccctggagcgtcccaaaggctgcatgggggtccttgcccgggaggcg

SEQ ID NO: 80635 - DNA, 122 bp, Homo sapiens
cgccaccccgcgcccgtgactcacctcggcgccggggcaggctggtccgggcgggcgaggcgcagggctctcccacacttcgcgccgccaatggcaagttggagggagagatgcaaatacca

SEQ ID NO: 80636 - DNA, 122 bp, Homo sapiens
ctatatatcctaggtagacatgattgacagtagccaagagtgaaccacaactattaccaccgtttattaagaataaggagttagggggctgggcgcggtggttcatgtctgtaatcccagca

SEQ ID NO: 80637 - DNA, 122 bp, Homo sapiens
cggccggcacgtcgcctttggcgccctctgccaaccaagagaaacacggttaaatgagtgcgctgggacagaaatccacagctaatcaaggccccatccgctcccaccccctggcccttacc

SEQ ID NO: 80638 - DNA, 122 bp, Homo sapiens
aaacttaaacatacaaaggctaaaaattcttaacaagccaaatgacagcaccaagaatctcgaacgctgcaaaaacaaaacaaaacccccctgaaattggtagcatgtgcaccagcccctgt

SEQ ID NO: 80639 - DNA, 122 bp, Homo sapiens
tgcagaggcgccgccggcggggcggcttcgggagggcgcggcccctttaagacgccccgccggccccgcccccgagccccgcctcccgccgcccacgtgaccccggtcttgtgactgggccc

SEQ ID NO: 80640 - DNA, 122 bp, Homo sapiens
tgtcggggcccggcaggccatgctgcaccaccatgtggttgaccaggcctggctgcaggccgccgtgctccagctgttgcatgcgctcgtgctccagggccccgtcctcgccgtaggccggc

SEQ ID NO: 80641 - DNA, 122 bp, Homo sapiens
caaggatgccgttgctgaggtggctgaaggcaacgggaaggaaggaggcggccagggcctcgtcccagtgggtcacgacgccctgccagagaccaatgctggtggcctcccctcccaggtca

SEQ ID NO: 80642 - DNA, 122 bp, Homo sapiens
tatggcttctttttcatgtttcatctaggtttttagaagtgaagtatagtaaatttggttcgttaaattgtgaaggcgctggaattacatgaacataccaccctagtaaaggcaagttctgt

SEQ ID NO: 80643 - DNA, 122 bp, Homo sapiens
ccagtaccacctatgactgagtcgggaggctgctctctaagaaccccagctgcgtgaccacggggacaaatcaggccacctggggctccttcacatctgtccattgctgtgttaaaagtact

SEQ ID NO: 80644 - DNA, 122 bp, Homo sapiens
gcatctctgtgaagtctacctggagatcttctaagggggctgctccataagcttgtatgccgggtggaacggctggaccttgcctcgctttatgctgtcggcaggtaacacaccgctgcctc

SEQ ID NO: 80645 - DNA, 122 bp, Homo sapiens
gcaaggccaaggccagccagaaggggttggcataaccctgggcccggagccagtggcccccgaggaggcttgccagcatcccagccaccccgatgctggcttccagcagggccatccggaag

SEQ ID NO: 80646 - DNA, 122 bp, Homo sapiens
gtttttaaatagaatttattttccatagtgttatttcacagcaaactctgttccatttcccgcgctctgcctccggggtcttagaacaatcacttcttcagaggaggaccttgccaaccagt

SEQ ID NO: 80647 - DNA, 122 bp, Homo sapiens
agaaggggacgaagacggggccggaggcgcctgaggggggctccgtgcgggaatcggcggcgccacccagccccgcacatcgccgagagaggcccgcgtgcttctgagagcgccgcccctga

SEQ ID NO: 80648 - DNA, 122 bp, Homo sapiens
atagctgcccgttccaagaaccaggagagccctttatacgcaccccattcaactgcagcacgttacttcgcttttgagttgagttgctgggacctctggtccatgcttttcttgggggaacc

SEQ ID NO: 80649 - DNA, 122 bp, Homo sapiens
tgtcccacttccgaaagaccccaggttctaggtgtgggggcgaggcctgtaacccctactcgaagggcattagggaaccgccagcgggcaagagggcggggagcggggcggaggggacggac

SEQ ID NO: 80650 - DNA, 122 bp, Homo sapiens
tctccagcttcagggaattgtttcaggcccttcccttttaagcctagaagtaacaattaccgccccaccacatcccaattagccaggggtacagcactttgcttaaagcttagtcactcttg

SEQ ID NO: 80651 - DNA, 122 bp, Homo sapiens
aaaatatatatgttcatagtacaaatgcacgcaaatatttgtggccgaatctcggcaacccgctggaaaggattaaacgtgcggttgccgtgactaaacgcattcattcaccctacaagatt

SEQ ID NO: 80652 - DNA, 122 bp, Homo sapiens
gaagacgcggtccgctctgggaagttaagagatggcgtccataaagcacatctcccaagccgaaacacacaagcactctctctccccgctgcacccaggtcctagaagaggcgtcccgtgtg

SEQ ID NO: 80653 - DNA, 122 bp, Homo sapiens
caaacatggcagaattcccatttccagttgctgctgagattatagaacacagggcagtggcgtaaaaatgaagcatatacaaaccaaaaaggtaaccaaagttacttgccatttagaaacat

SEQ ID NO: 80654 - DNA, 122 bp, Homo sapiens
accttgtcacacaatcagctgtggacacatccatttctgacttgactccagggtcctggacggcagggaccgtacaggagtcatctttgtggctcccctgtggtccggcacaccataagcac

SEQ ID NO: 80655 - DNA, 122 bp, Homo sapiens
tgcgatggccaccaaggttgacaaagaggcttgcggggaggcctacaacctggcgcgagacgatggcttggccatcatctgggtgacttttaaatatgacggctccatcatcgtccctgttg

SEQ ID NO: 80656 - DNA, 122 bp, Homo sapiens
aaaggattgagaccgctgccaagccacagaatcggagtcgagaggcctgactcagagtcacggagaggttaggacacacatcttgcagggcttaggcaaaaaaggaaaatgggccaggcttt

SEQ ID NO: 80657 - DNA, 122 bp, Homo sapiens
cttctctccctttttagcatttattgccttctttttgtcctttccaacttggagagggtccgggtgtggagcgcgcgtggatcggacgccttggtctgcgcggccctattcattcgctcccc

SEQ ID NO: 80658 - DNA, 122 bp, Homo sapiens
aactgagactcggctgcctaggcagcaatggctcacgggacagaacagcgaagcagtgcccggcaagcggagcgcagcacccattgcgcctgcgcataacaggctctagtctccgggctgtg

SEQ ID NO: 80659 - DNA, 122 bp, Homo sapiens
attaggttaagaaactatttccaacctgagaatcaggtgacatgtccctgctactgtggtcggcacatacatagcttgaggtacatgttgtcatcccaagtctacaagtgaggctctcactt

SEQ ID NO: 80660 - DNA, 122 bp, Homo sapiens
ccctgtgtcagatcaagggcagtttcgtgttaactgatacacatgtgttagggcagagtccgttgactcaagtataatttaatacaaggaaagatcaaataataaatgataaatgacattgt

SEQ ID NO: 80661 - DNA, 122 bp, Homo sapiens
gctactccccatcccgcggtccatctgcatgtcgcgggttcttccgcagcatgtgagcctcgctggggactctggaggcaacgaaagcctccctgtgccttggtctccgaacgcaggccccg

SEQ ID NO: 80662 - DNA, 122 bp, Homo sapiens
cccacaagcgctcagatggctgaattggcaagtctgtggtgctgctctttggggccacctcgttctttgcctttccctccccttagcgatgtgtcccatccgttgcctacagtcaagtcagt

SEQ ID NO: 80663 - DNA, 122 bp, Homo sapiens
cgcggcaaaccatggccccaggtgcgctccggaggcagctgcgggaaccagccatggtcccgggctaatgcccagggataagcacagggatagggatagagatagggattgggattggactc

SEQ ID NO: 80664 - DNA, 122 bp, Homo sapiens
gtctccggggaggtagtgggcacgtgggtccttaacctctccattgcatcatccccatcccggtgggtacagaagcgcagcaaccccgcggtgctcccggaagacaccgcgtctccaacatt

SEQ ID NO: 80665 - DNA, 122 bp, Homo sapiens
agggctcctcgctctgctttcgaaagtccctgggccgtgggagtttcccaggagcctctccgacgcgcgcagcagctaggctcttctaaagccgtccgctccagccctggtggtgctcgttc

SEQ ID NO: 80666 - DNA, 122 bp, Homo sapiens
tgccagtgttgcaagcaaatgacacggttacccccgaatcagccactgtgggtgcgtatccgagtgtggggatgcccgtgtaacatttatatggagacgtcaaggaggaggaaataaacaga

SEQ ID NO: 80667 - DNA, 122 bp, Homo sapiens
atctccacgggaaagtcaaaggcctggaggaagtgcggacctgacgacagatgccccgcacgctggccgggaccgggaagggcggtcaagggtggaaaggggctggcggctgccaggcctgg

SEQ ID NO: 80668 - DNA, 122 bp, Homo sapiens
ttttattgcactgtggtcgggggcagagcgggaaccacaaccatgacttagtgtgcattgcgggttctttcttggtcttacaaatttttcgtgttgtaaatggcccgtaagcccgtgggagg

SEQ ID NO: 80669 - DNA, 122 bp, Homo sapiens
tacatatattagtttatataatcttcactaccactccctgaagtattattattattatttcgagacacagtctcactctgctgcccagactggagtatagtggagcaagcatagctcattgc

SEQ ID NO: 80670 - DNA, 122 bp, Homo sapiens
aaacccatgattttgcagattttattgcttaggatgaagctaagttaaaaaagagtctaacgtgaagtccattcagagaaaaatattaagtacaagtggtcaaaattgtgaatgtgggaatg

SEQ ID NO: 80671 - DNA, 122 bp, Homo sapiens
ggggcctcctgtcacaccccctctgcatgagctgggcttcgttgatggagctggaagcttcgcagtagcggaatttgttcgtacaggaccaagcccagcttttctaagggctggggtgaaaa

SEQ ID NO: 80672 - DNA, 122 bp, Homo sapiens
gaggttaggtgtttaaagttaggacctgaatgggttacgttgcgatacacgatcaaacatcgcccttataagctctgtggtatccccgagccccactcctgtatgcagggaaattagtcatt

SEQ ID NO: 80673 - DNA, 122 bp, Homo sapiens
cctggctgcatgcagacaaggggcaggagggatggcggcccggggctgcacgcgagaacgcgcctggaggagaagggagtctcgaagaagggggtctcatccacacccagaagacggtgttg

SEQ ID NO: 80674 - DNA, 122 bp, Homo sapiens
tctagacacctatctggcagtacatggcatcttataaaccctgaggtgatctctctgatacgaagtaaaggatatcagagtcaagctccagttttgaggaaagaactaattatgaactaggt

SEQ ID NO: 80675 - DNA, 122 bp, Homo sapiens
gcgggggctggcccgtgttgaactccgtgttgcagctgaagaagaccccgtggagcataccgctggtgggggagccgtggctgccactgttgtccttcaggtaaggctgcagcatgttcccg

SEQ ID NO: 80676 - DNA, 122 bp, Homo sapiens
atagtttgccacagagttaagccaagtcaaaacttttaagttctactggcccctgccaagcgattgcagatcagatctcctctcctgcccccaaggagctgcctttgtttccttctttgtcc

SEQ ID NO: 80677 - DNA, 122 bp, Homo sapiens
ttgtggtggtaccccatgcagaggcatcacagtgggacaccgagtcccagctaagctgagcgtctgagagcgagagctgggggcgggccaggaagtatgtcacatagggcttgcttgtaatc

SEQ ID NO: 80678 - DNA, 122 bp, Homo sapiens
cctcagctgggactcagccagacctgccaaggtgtctctgatgacacagaccataaggtccgcttccttcataaaggtctttctgggtggttctcagtactgctgcccatcagacccaccag

SEQ ID NO: 80679 - DNA, 122 bp, Homo sapiens
gcaagatggaggcctaatggaagcgacgggttactctgggggacgatgagtgtccgtgtacgtttgctgattttagcaaatgcagggcagtaagccaataagtaagtaacaggagaaattgg

SEQ ID NO: 80680 - DNA, 122 bp, Homo sapiens
cgggcctggctgggaagcgctctgtggagagggacgcgactggagcggctggggggcagccgtcctgcgcctgggaccctcacggggcctccctgctccagtcactcccgcccgcctgccag

SEQ ID NO: 80681 - DNA, 122 bp, Homo sapiens
ctcgagttgttggaggcccagggatgctgtggcgccgggatttgaaaggtggcagcctcccgggagagagccgtgagggcagaggcccccaggcccggcagagctgccctggattgggagca

SEQ ID NO: 80682 - DNA, 122 bp, Homo sapiens
gtgattaggaatctgggaatgcaagcagttgtgaatgaaatttccagaaaagagaaattacggaggaagaaatacattggagtcttgagctgggaatccagcagaatgagggcaatgatagt

SEQ ID NO: 80683 - DNA, 122 bp, Homo sapiens
cctggaggacctgtgtcacccagaccttctgatccttctttaaaaaggaatacctgtccacgtcacagcgtaagttagcatccactgggaataaaacaggccaggcacacatttaaggggcc

SEQ ID NO: 80684 - DNA, 122 bp, Homo sapiens
ttttggaacttgggttacctccatctaatcagaaactggctctgcagagcccggtgtcagcgacgttttcattcccagcagcgggagcaaatggatctcagaggacagctccttggccttag

SEQ ID NO: 80685 - DNA, 122 bp, Homo sapiens
tcaggcccggggctggtcccgcagccagggccgagggagctgtttggagacgtttctgatcgtcacggggcgggggccacgtcggctgttgggtccaggcggggaggcccgggcggccccca

SEQ ID NO: 80686 - DNA, 122 bp, Homo sapiens
gggctggcagggctgggaggcctttgggaagctcagaggagccgcggggagccgggcgtacgagagcaggccaggactccgctgggcgaggccgagcagggacaccagctcctcacccagtt

SEQ ID NO: 80687 - DNA, 122 bp, Homo sapiens
agtatgatgaactaatgtggttgatctcttagttgaaacaaatgttcagaaatgttggaacggaagcacaggagacatgagggagtgtgctggttttctggccagccaaagcgtccactgat

SEQ ID NO: 80688 - DNA, 122 bp, Homo sapiens
gaaagcataaattgccaggtaatgtgattcattgtgtaagtatagctccagttaaatttgcgtttaggggtgcctctatagcaaacatcagttgactgcaaactgcctgttagcaaaattaa

SEQ ID NO: 80689 - DNA, 122 bp, Homo sapiens
gggccgggtgcaccgcggccgctggcatggcgaggtggccattcgcctgctggagatggacggccacaaccaggaccacctgaagctcttcaagaaagaggtgatgaactaccggcagacgc

SEQ ID NO: 80690 - DNA, 122 bp, Homo sapiens
ataataattgccgtcacttactgagaactgcccaggtatttggcactgtgctaaaggcagcgtaactacctgaggagacggggaccatctccctctgggaaaccgcctcaaaaatcagaacg

SEQ ID NO: 80691 - DNA, 122 bp, Homo sapiens
tatggagaatgcattgaacagggacaagaccaaaaacagtaaaatcagtcaaaagactctcggaataatctaggtaggtgtgtgtaaactttggcccccctttagttatcagtccttaattc

SEQ ID NO: 80692 - DNA, 122 bp, Homo sapiens
aaagacccccaagccaccggctcagacctgcttctgggctgccatgggacttgcggccaccgccccccggctgtcctccacgctgccgggcagataagggcagctgctgcccttggggcacc

SEQ ID NO: 80693 - DNA, 122 bp, Homo sapiens
gttagggtggcagggaagcccggaaccatgaggcagggcgggtcggggcagctaagggaacgggcctggcagatggctcagtcctactggctttgctcacaagcctttgctgctgcatttcc

SEQ ID NO: 80694 - DNA, 122 bp, Homo sapiens
gcatcgccgcgggactcgggctgccgtggctgctggggagacctggtgctgcagccgctccggagctctcggaaactttcctccgcgctgtgcgcgggctccctgtcctttctgctggcgct

SEQ ID NO: 80695 - DNA, 122 bp, Homo sapiens
cttgggccttcctgatgcagacccggatgcgcactgcaaagccaattatgttgtaaatgacggcagcggaaccgaagtcgcaaaatgtcacgcaatgctccgccccctggaggacccgctct

SEQ ID NO: 80696 - DNA, 122 bp, Homo sapiens
caggatgtgggcaaataatggaataaaagctggccaccccagtcagcagcagcagggaaccgctcagatacccttccacaccgtggaaactttgttcttaccctcttgacgaaaaatcttgc

SEQ ID NO: 80697 - DNA, 122 bp, Homo sapiens
taaaacaaatgagtgtgctagaattttacattgattgaaaataaatattcgtggctcttgcgctttgcatagtggttatatttgtaaaattgtatgtaaatcatatatttgaaaatgagtca

SEQ ID NO: 80698 - DNA, 122 bp, Homo sapiens
cagtgcatacccatttgcaaaatcttcaggaaatgtaggaaagtgtaaggcggaaacgaccgatgaccaggaactctgtcttctcgtggagactctagccacggggttgttgcacagctcgg

SEQ ID NO: 80699 - DNA, 122 bp, Homo sapiens
tactttcctggctcgcgcccttccaggagcctttcccaccggagcctgcgaggagaggtccgtacttgctcgctaagtgtcagcttggcagcttggccccgtcacgagggtgtgggtgtgtt

SEQ ID NO: 80700 - DNA, 122 bp, Homo sapiens
gtgctgagctgggcatgggaaggtgtcacgtgacgaggctgcgcagaacacgcgtgtgatcgctcacggcctgcctcccaccaccgaagcagcctccaccaggcagggctctgctgcttcat

SEQ ID NO: 80701 - DNA, 122 bp, Homo sapiens
aggccaagataattactagactatcccaggcttcccaggccctactatggcttcctcagtcgaattacaagacctctaaggtcacttgactactgagttctatgatgtcataagtaactgat

SEQ ID NO: 80702 - DNA, 122 bp, Homo sapiens
aaaacaacaacaaaaacaacccacagagactcgttggagtttaacactcatttaactctccgtgagatcacagccatcctttcttccctggggagaattttcttccccattcctttagaaga

SEQ ID NO: 80703 - DNA, 122 bp, Homo sapiens
gaggcagcggggtgctcggttcccggagtgatggcggatgaggctgcctgtgagcgtgtccgaggcggtcctgtgatgttaaaggtacacgtggtccggacaaaaggcgccaaagtcggaac

SEQ ID NO: 80704 - DNA, 122 bp, Homo sapiens
ccactcagcccgggaggtggggccgggcagtgaccccgcgcgaagtgccagtgcggagggcgggggtggttaccgaaagatgtaatcccaggaggggccgccgccttcgctgtcccctacct

SEQ ID NO: 80705 - DNA, 122 bp, Homo sapiens
attcaatgaattgtaaagtcttatcaactcgacctttacagggcctgtcccatcctcccccgctccccgggggcagcgggcacagcgcagtggtaggtggagactgcactcgcactggctgc

SEQ ID NO: 80706 - DNA, 122 bp, Homo sapiens
tgcttcgagtgggaggagccttggggttattctagcatattccttgagggttattgcagtcggcgagggctagattagatgagagtgcggaactggacccccgttctggcggcggtcctttt

SEQ ID NO: 80707 - DNA, 122 bp, Homo sapiens
ccagtaatcccagcaggtgggcagcagagcggaggggtcgaaggggcgcatggccgcctgcgcgtcctgagagaccgagaagcacaggccgtatcagtcctcaggtgggactaggagcttcc

SEQ ID NO: 80708 - DNA, 122 bp, Homo sapiens
caacacagcaacgctttctcgctacccagtctgttcagattgccctctaggaattggaaacggcccccagatgcatccatttcttctctttctgcataaagtgctgatcacagacactgaaa

SEQ ID NO: 80709 - DNA, 122 bp, Homo sapiens
ggagccccctggacaggactcagcaggacaacggggcaaccttccaatttcaaagaaaaccgctgccctgcccggcgtgggccctgcggggcctgagcctcgcggcctgaggcctgccccct

SEQ ID NO: 80710 - DNA, 122 bp, Homo sapiens
tgggttcccgggaggccggtgcttttcagtgctgccggctgcagagtgcatcacttcacacgccagctgggcttctggcggagttgtaagtcaaagttttgtaaattagatcgtattttagg

SEQ ID NO: 80711 - DNA, 122 bp, Homo sapiens
tgttgaagttccccagggagccccgacgctaatcccaagattcggcgggaaagcggatcccgaacccaggcctaggcttcgcctgtcttccaggagggcttcagggaattgcgaaccctctc

SEQ ID NO: 80712 - DNA, 122 bp, Homo sapiens
cagtgtggactgatagatgcgtttgtcctttaggctgcgatccagggctgctttatttaccgggttgccaggtatgttagctctggccatgggcgctccccctggcactcgtgggctccgtt

SEQ ID NO: 80713 - DNA, 122 bp, Homo sapiens
cttggattttctccaccagattccgcaacagcgagttgaacctgattgcgttcttccttacggaagttttgcagaggggacatttgaaaaatccacatgatgtttccccaatctgagtgatg

SEQ ID NO: 80714 - DNA, 122 bp, Homo sapiens
tttacattctatagcacaggtctaccttatcaaataccctaccaccctactcttagtgcgcgcatgcgcgcgcacacgagcgcgcgcgcgcgcttcagagctccttgaaacacagcccttta

SEQ ID NO: 80715 - DNA, 122 bp, Homo sapiens
ggactcccaagctagatttcttgaggttgaatgccagctctactgtagggtctagccctacggggcttggcgggtgttttccccgtgtgcggagatgagagattgtaacaaataaagacaca

SEQ ID NO: 80716 - DNA, 122 bp, Homo sapiens
tcctacgtggcccacgcaggactgtggggcagaaccccggggcctgggctgtggggtgagcgcccccgccttcccgggggcgctgggcacaagacctcgcgagtgagaagacacatgtggtg

SEQ ID NO: 80717 - DNA, 122 bp, Homo sapiens
tttacttattaaggtgatgaggataactggtttgctcactttatgaatacaaggctgttacgatgaccaaagtcatggaaccagtccaggctaccaggatgagctccaccagagcagggatt

SEQ ID NO: 80718 - DNA, 122 bp, Homo sapiens
ggtgggaggccgctagaggtggcgaaggtggggcggggtggttagccgagcagcgggctccgcgtgctcgcgggagggtagcggcaaagggaggcctagtgattgcaggattccgggtctgg

SEQ ID NO: 80719 - DNA, 122 bp, Homo sapiens
tggaaggatctcacggatctcattcctaatggtccgccgaagtctcacacagtagacagacggagttgagatgctggaggatgcagtcacctcctaaacttacgacccaccaccagacttca

SEQ ID NO: 80720 - DNA, 122 bp, Homo sapiens
tatctcctgaaattctggcccatgcttctcccctggggtggtggcacattcccccatggccgcccttccccggagcagcagcagccctatccccagccaagtcttggcactggacccgcagg

SEQ ID NO: 80721 - DNA, 122 bp, Homo sapiens
aggtagatcgatcgatagatagttagagaggtagacagacggatagatccccgaagcttgcggataaatgttctggaaaaagctgctgaaaagcttctacacaaccttgtttgggggaccat

SEQ ID NO: 80722 - DNA, 122 bp, Homo sapiens
catgcacacaacccaggcacacacgcgtatacagacatcacaacccttccacgcacagcccgcgtgcacacacaccccaggcacacacgtgcgcacacacaccacagcccttgcacggacac

SEQ ID NO: 80723 - DNA, 122 bp, Homo sapiens
aaaaggaggacagcgcccaggaggaaagaggaggaagtaatagtttctaactgtcggacccgtctgtaaaccaaggactatgaatactaaatgttaagttctaggcaattatacggggactc

SEQ ID NO: 80724 - DNA, 122 bp, Homo sapiens
aagtgggcagagggctccgagggtcctctcccgccgtgggattgcacagagggctgggtccgcaggctggctaaaaggacctagcccaggattgcgaggcagcgccctccctgcagctggac

SEQ ID NO: 80725 - DNA, 122 bp, Homo sapiens
cctggtaattttgaaatgacactctagatcgcgaggggtgtgactcagcagggcccaagccggaggcaaaaccttgggcaaaatcttgacccggcagcgctaactatggaaggcccgttacc

SEQ ID NO: 80726 - DNA, 122 bp, Homo sapiens
cggtgggagcacccaaggccagtcacatcctagggtggcctggagagtcctgacccctgacgtgcaagccggcatcatccccgggactgtgagtctggtgggggtgatgcccaggaatgtga

SEQ ID NO: 80727 - DNA, 122 bp, Homo sapiens
tgggagtaaagaaatctggcagagacgagaaagagtctcctgtcctgtgtgtgaacacttcggaggctcatgccctaatatgctgcaactgacaggcatccccttgctgttcttgtctcgtt

SEQ ID NO: 80728 - DNA, 122 bp, Homo sapiens
gctcgggattcagggactgcctcggcacacgggaagttgccctacaggcgcgggagaaagcgcaggcggcggcttggcagggagaggcaggctgcagtgcacattgggtcaggcacacgcga

SEQ ID NO: 80729 - DNA, 122 bp, Homo sapiens
ttgagcaaaagtgaatacttttcttataaaagtaactttccggccgggcgcggtagttcacgcctgtaatcccagcactttgggaggctgaagtgggtggatcgcctgaggtcaagagttcg

SEQ ID NO: 80730 - DNA, 122 bp, Homo sapiens
gcagtaactgacccaggcagaagctatcagtggatgtgcacaccagcgggagcagggttgcggggcgggggacctcaccgacctgcagagtcctagctgtaccaggtcggagggtgcctggt

SEQ ID NO: 80731 - DNA, 122 bp, Homo sapiens
ttgtttggttgttgttgtttttattatattcagcaagattagcccactaagagtaaacaacgtgaaccacctttcactaagtttcaagaaaacagtctaactttggaggagggacccagtgt

SEQ ID NO: 80732 - DNA, 122 bp, Homo sapiens
ctgtttcctggcacagacttgtaagtgaatttcctgcccgcctccgcccacagcgtaagccgcgctggaacagctcacttattgccccagatgtatgtggagtaaccgccttcagtttcctg

SEQ ID NO: 80733 - DNA, 122 bp, Homo sapiens
ccaggctagttctgttctttgccagtgtgtggtttgggagttctgtgaagtgtttgcagtcgctactaataatccaggtgacacggcaaacattgcagttcctaggtccagcacaattagag

SEQ ID NO: 80734 - DNA, 122 bp, Homo sapiens
tacacagaacctgactcttccggcagattgccctagtaaccggaagtctcctgcagaccccgggaaggaggaatctaggttatgattggtcaggactcctgtcagtccgctggtggctgtgg

SEQ ID NO: 80735 - DNA, 122 bp, Homo sapiens
ataggaatttgtggaatgagcccaacctgaatatccccctccacatttggtggcttctgacgtcaggtacctttgcattaatacctgcattctttctgattaacatcaggtatctcaaatat

SEQ ID NO: 80736 - DNA, 122 bp, Homo sapiens
aatgaggatggcaggcggtaataattcctgtggaatccctagaacagtgcccggcgcatgcgaagaaccacgtaaatgctcactattgtaatacatgctgggccctgctcccctcacggctc

SEQ ID NO: 80737 - DNA, 122 bp, Homo sapiens
cggcgcgtgactgggggacgggagtcgcaggctgagcagctgccgagttttttgtgagggcgagggaaccagacgtccacgttgtgattctgcgcgcagaagggtcatcggagtccgggggt

SEQ ID NO: 80738 - DNA, 122 bp, Homo sapiens
ctcaagtgatccacctgcctcggcctcccaaagtgttgggattacaggtgtgagctaccacgcctggctgatttgggcatttctcatgactgaccattttggacacagattgtggcaatgtt

SEQ ID NO: 80739 - DNA, 122 bp, Homo sapiens
tatagaaaaggttgacttcagtttgttcaccagtcacagaattgtgaagcggtctcctggcgatcctcactcaaagccagcatggcacagggagggaggggtggccccgtgacatgacggct

SEQ ID NO: 80740 - DNA, 122 bp, Homo sapiens
gggtttgaagccttggaccagcctgagacaaaacccagatgaccatcttggctcctctcccgctgaccacctctgtccccttctggcctccatttccgttgtcgtgggatcagatgatataa

SEQ ID NO: 80741 - DNA, 122 bp, Homo sapiens
tatcaatgacttccaacagagctttcagaagccagaaactcgccgtgaatttgatctgtccgaccccctagcccttaagaaagatcttccagcccggcagtcagataatgatgttcggaata

SEQ ID NO: 80742 - DNA, 122 bp, Homo sapiens
ggcgtgcgcggggacctgcgctgactaggtccggggaaggtaagcagcccggcaccggtgcgccctggccgcactgcgtggagctttccgcttggttaataatggggtttgcagcacggagg

SEQ ID NO: 80743 - DNA, 122 bp, Homo sapiens
tccagccagatgcctccagcatctgctgccgcggagagcacgcaccaggtccctcctgcccggcaacaggcgcactccgagcgagcccagcgcctctgctcaccatgccaggtcccgctgcc

SEQ ID NO: 80744 - DNA, 122 bp, Homo sapiens
tctacaggccggatcttgtgtcttcatcaaaagacagtctcagagcctcgtggaagagaccgcattaggtactccaaactattgactcttcaaagctgagctgacatggttttggtaacttt

SEQ ID NO: 80745 - DNA, 122 bp, Homo sapiens
acaggcatgagccaccgtacccggcccctaagtaaaaatacacattttaaaaaggggttgcgtgttggccgggcacagtggctcactcctgtaatcccagcactttgggagaccaaggcagg

SEQ ID NO: 80746 - DNA, 122 bp, Homo sapiens
agaaaggaaatccaggctgtcttccagcagcggcagtagcagaggcggaggcggccgagccgggcctcatttgttagcgggtgtcgaggtaatggtcgccaccgaggcccgtcttctcctcg

SEQ ID NO: 80747 - DNA, 122 bp, Homo sapiens
ctaccgccaggtgtgtgtatgctgagtcccagcgttccagatcagtgtcccgcacgtcctcggccttctgccagtaggggaggagtcgggggcggagcgggaggagtggcgcgggccccgcg

SEQ ID NO: 80748 - DNA, 122 bp, Homo sapiens
tcgccggaggccacctccccgagccccgatgtccccgccgcagccctcgccccaggaggccggagggcacggtcccctctgtcggtccccctcgggccacaactcaccgcgcgccagcaagg

SEQ ID NO: 80749 - DNA, 122 bp, Homo sapiens
cctcttcagagaaatcctgacttctgctttgaagcagcccactgaggggattgtgaggaacgctgcagtcttgcctttctagccaacaagtgcgatttcgaattgttacaaatgctcaggaa

SEQ ID NO: 80750 - DNA, 122 bp, Homo sapiens
tgaggcggcaaagggcggccatgaaaccccgacccctgaaggccagcagcacactcgagtcgggggctgaggccggacacagccaccagccaaccacgcagtgagtgttcacacggcagcgg

SEQ ID NO: 80751 - DNA, 122 bp, Homo sapiens
gaaaagaggaaaaaaaagaaagaaaaagaaaacccaaactctacggtgtggcgactcctgcgcacgcctgaaacaggtcacttccacagcccacgttctggaggaagcctgaagactttccc

SEQ ID NO: 80752 - DNA, 122 bp, Homo sapiens
gtgaaacaaagaagtaatagatgcatagcaagagctcagtgtccttccacattgtgtcaccggttgtaccctgagacagattctccaagtcttagaacatggatatgcagtgagagtgaggt

SEQ ID NO: 80753 - DNA, 122 bp, Homo sapiens
gagtctaagattaaaagccaaagttgatttcaaacgaaacattcttggcaactggctttgcgtgttcaagtcttgttcattctttcctctttcctgcactttctcttacaggattaaaatgg

SEQ ID NO: 80754 - DNA, 122 bp, Homo sapiens
catgcccacctcccccaggatcttcgggagccagtgctggtaggtgatgtgctggatctccgcacccacgatcttcctggtctcatagtagatggtgtcgccgtcccagtgcgggttcagct

SEQ ID NO: 80755 - DNA, 122 bp, Homo sapiens
acaatatcctcttgcactggagctttcccatcctaacaccaggagaaggaatcactggagcgaaacgattttaaaacaagaaatgtcatcagtcagactgtgaagccacctactaaaatata

SEQ ID NO: 80756 - DNA, 122 bp, Homo sapiens
ctccggggctgccaccctgcgcttcgatccgggcttctcgggccggggcgaccgctgcctcgcaattggtcgaattcagcaggctccgcctccttgagtcgccagctgcctgccacacgcca

SEQ ID NO: 80757 - DNA, 122 bp, Homo sapiens
gagggagcaaaggtctccggtgtggcaggcaggtttttccaggcagctggcaggtgtgctcgcgcagctgacactgccttgggagcacagaaggtggcagcaaagatcatgcggtcttttga

SEQ ID NO: 80758 - DNA, 122 bp, Homo sapiens
gactcaaactccggggcttaagggatcctcccacctcattcttttaagacaaggtacaggcgggacaaatgcaaagtgtttaaaggaaacagatctacaggcaaaacggtaactgactttgt

SEQ ID NO: 80759 - DNA, 122 bp, Homo sapiens
accaggaggagcccgggaaaacatcttctgaatagaaagagtggaacgacccccaccaggcggcggctccgagtaccgtgttacttcttgggcctttggatctgtctacacagggagggact

SEQ ID NO: 80760 - DNA, 122 bp, Homo sapiens
ttcatttttgtcttatttgtagccagtgaggttgtatttggggtgacattagaacggacacgtgggatgtggcacgaaatcagtgtctcaggactgagttccttgtgtgtgtctgccgggag

SEQ ID NO: 80761 - DNA, 122 bp, Homo sapiens
accctggattgattttatctttctcttggtccgtgatccttgatacaaacaaggttcccacggccccgttagccattccactctatccctggccactgtcctgtttccctggcatcccatcg

SEQ ID NO: 80762 - DNA, 122 bp, Homo sapiens
gggtcctccctctgtcgtcctggctcttggaaaggaaccaggcgggctgaggaactggcgcgccctcgtccgcccacaagtccttggaaagcgcaggcctcgtgcgctctccagcgcccttc

SEQ ID NO: 80763 - DNA, 122 bp, Homo sapiens
cggaagtcacttctcacacgcctttcttattggataccggcttttcatggggccgagcgccgctgggtaggcggaagtagccgcaggcatggcggcggctatgccgcttgctctgctcgtcc

SEQ ID NO: 80764 - DNA, 122 bp, Homo sapiens
aacgagttctgaaacaaagcgagtgccagacgcgcgtgggaaagacgcgcgtgggaaagacgtgcatgggaaagtcgcgcgtgggaaagtcgcgcgtgggaaagtcgcgcgtgggaaagacg

SEQ ID NO: 80765 - DNA, 122 bp, Homo sapiens
ggggacaacaggatgaagtgagggcctgctgagcccagggctgccacctgggagtgaagccggggcaggctgcagggtccgggcccttctgtgtgggcaggtggaagtggtggggatgcagt

SEQ ID NO: 80766 - DNA, 122 bp, Homo sapiens
ccggccagctcatcagccatggagatatatgcgcatatatttgactgccaaacgccccctcgcatagattatgttaatgaggcgccggccccgccccttccctcccccacccccggcctctg

SEQ ID NO: 80767 - DNA, 122 bp, Homo sapiens
tgaaataccagggacttgaaagaaaacagtcataggctgagctctgaaggtcggggtgtgcgagagcctgtcagaggcagggcaatgtgctatactattagaaattccaggtttttaaataa

SEQ ID NO: 80768 - DNA, 122 bp, Homo sapiens
ccgcccagccggggttctcgccgccgtcattcccctcccgccccctcactcccgtcctctcggggctcctcccacgaccctcccaatggcgcctccggagcccccatcccttatcccttctc

SEQ ID NO: 80769 - DNA, 122 bp, Homo sapiens
acacccatagtcgattcgttactcccgttaaggtcaaacgctgacagaaaccagccgcttcgcacacttctacatggggtcaagccccctgttatctttgcggggatgattgtaacaatcac

SEQ ID NO: 80770 - DNA, 122 bp, Homo sapiens
cagtattaggctgttctcaatctataaagatggcagttgcaagaggttcagcctcacatacgccagcagccaccagcactctccattcaagtccactgtgctcagcagtctgggttttccat

SEQ ID NO: 80771 - DNA, 122 bp, Homo sapiens
ctcgggatatgcagcagccatgcctgtgcacacgctgagccccggagccccgtccgcccccgccctaccttgccgcctgcggaccagggtccctggctacctgctacgggggccggcagatg

SEQ ID NO: 80772 - DNA, 122 bp, Homo sapiens
ggcccggccccacacaccagctgcagagatgagaaccacaatcgcattcacgcattcgtgcgcctacggctgtgtcagacgtgacttgtgctatttctgtatcaaaaaccattcaaaatgcc

SEQ ID NO: 80773 - DNA, 122 bp, Homo sapiens
ggcgaggctgcaggcccctccgaatccccggcacgcccgccccggctggctggctccctccgtttcccgaactgcgctccagcctccagacctttgcccgcgctctgccccctgccagggac

SEQ ID NO: 80774 - DNA, 122 bp, Homo sapiens
actaaaggaaaaggcccttgaaggcaggtgtggagatgtccctcacctctggctgtaaagcgccggattcccaccagggagggaacgtggggcagatgcgcggctccaactccgccggacag

SEQ ID NO: 80775 - DNA, 122 bp, Homo sapiens
gcgcggggcgggggcgccgggagcaaggtgcgccgcgcccccgccccggctgctctgccgcgcccaccggagcgccgcccccgccccgccccgccccgcctgctcagagtcccgacccggcc

SEQ ID NO: 80776 - DNA, 122 bp, Homo sapiens
ctattagtattcccaaggtacaaacgaggatattgagttgtagagagggtaaggaactggcgcgatattatcaggtgagccaggatttgtacgcctgaataaagagcctagacgtttaacca

SEQ ID NO: 80777 - DNA, 122 bp, Homo sapiens
ccccgcaactacacacaccagacctccaaattactgctcttcgattaggaataatatactcgctgaacctacagcccaaagcagaaaggctgggccagcccagtagtcctgaatcagctgca

SEQ ID NO: 80778 - DNA, 122 bp, Homo sapiens
tgctgcgggtgcgggagcctctgggtcgtcaaggcagcgcacaacagcgtgtgtgcaggccgacaatggccaaccctggcggctggcctctggtgtgcccagggcataggacaagaggccct

SEQ ID NO: 80779 - DNA, 122 bp, Homo sapiens
cccctctggcacgatcgtggatgaaccccctggcaactgaaatgggaaaggcagcgcccccgactctggggactggaccgaagtccacggtagtgacagctgccagaccctgaggagaggac

SEQ ID NO: 80780 - DNA, 122 bp, Homo sapiens
aaactacctgaaaacttcatggcttaaaataacgatttattatttttcatgactctgggccgactgggcagttctggtgctctctcctggggtcactcatgtgactgcgttcagctggtaac

SEQ ID NO: 80781 - DNA, 122 bp, Homo sapiens
aacctctagacggacagattaagggagtgagcatgttgggaatgtccagtcccttcttctcgcttgcatatccacataagaaagacgaaggataaatgaacggaagataatttaaaatccaa

SEQ ID NO: 80782 - DNA, 122 bp, Homo sapiens
tcttcatagtctggcctctgcctcttgattcagcctccacgcgtgttagtctttctcttacgtgtcttgctttgggatgctggaaggacttggtgtttctgaacctgccactctgtttcatg

SEQ ID NO: 80783 - DNA, 122 bp, Homo sapiens
aagcccggatcgctgtcagccactcactcagtgccgcatggagctcctcggacagcgcaacgtcaaatgtcttcgtatcctgagagctcgctccttgaccagaaatctcatcataagaggcc

SEQ ID NO: 80784 - DNA, 122 bp, Homo sapiens
tcagaatcacttctcattcctaaggcagcaattccatctctgtcccagatacttgggctacgtaacctgtggccagcctttgatccgcccatgtgaagctgcaggtccatttccaaagccca

SEQ ID NO: 80785 - DNA, 122 bp, Homo sapiens
aaggaatagaaaacgaagcctcatatttgatcccacctccaggaagacactttgacttctcgtgggtatcacatggcatccccatgggtaggaatgccaccctcattatatactacattcgt

SEQ ID NO: 80786 - DNA, 122 bp, Homo sapiens
caccgcctcttccccacggaaatgaaaggagcacttccgggttcggcaataacctggagccggcggcgtaggttggctctttagggcttcaccccgaagctccaccttcgctcccgtctttc

SEQ ID NO: 80787 - DNA, 122 bp, Homo sapiens
cgagggcgggggctcaggcagccctcggggcgcctccctcccgcggctgcagaacaaagacgcatccgccctccgcagccggtcccgctctaggaaacgtctacacagatggcttatcaggg

SEQ ID NO: 80788 - DNA, 122 bp, Homo sapiens
ggcgcatgggcaaagatgttgaggggccacgtctgaaacttcactgctcttggctccacgcgaaggctccttggcattcagagtctgctcgttagattgtgcccttggaacagtcgcgaccg

SEQ ID NO: 80789 - DNA, 122 bp, Homo sapiens
aagatggttgccaagtgaatggcttgaactggacaaagtaacaccttttgtctcgctactcgggcgctgcctccatccgtaaggaaaggagaagtggcagagacagcagctgtcctcttcag

SEQ ID NO: 80790 - DNA, 122 bp, Homo sapiens
ctcactagatgcacccaccaacttgcagtggggtctcaacccgactctgcctcaactcaccgcctgctgcttgctctggaattcgtgctctcgctctctgcggtattgctccacctccatct

SEQ ID NO: 80791 - DNA, 122 bp, Homo sapiens
agctggcttttgcacccgcagctcagggccccagacgcatcgcagagccacgggtgcccacgagcagggtcagctctcgggggccctcttccgcagcccagacccgggacaggaagtgaggg

SEQ ID NO: 80792 - DNA, 122 bp, Homo sapiens
caggatgcacccttagtgtcagtgtggagctcctgccttggctgtgtgatgacctgaacccgggggtattttctggacatcgaagtgctacacccagagtccaggacaggctaagtgagcac

SEQ ID NO: 80793 - DNA, 122 bp, Homo sapiens
aaactcacctttgagtcgcatcgagtcccagccccgccccggccccgcccctccccgccccgccccgccaagactccagccctggatccgccccgggcctcggcccagccccagttccggcc

SEQ ID NO: 80794 - DNA, 122 bp, Homo sapiens
tcacctcccagatggggcggcggagcagaggcgctccccacagctcagacaatgggtggccgggcagagacgctcctcacttcctagatgggatggcggccgggaagaggcgctcctcactt

SEQ ID NO: 80795 - DNA, 122 bp, Homo sapiens
attcattaagaagtctgatgatatcataaaccgtgagaagcctctgtcttgcagcagcatcggaaacgtccccgtccccatttgagtaagtgctggtaatccattttatttctctccattag

SEQ ID NO: 80796 - DNA, 122 bp, Homo sapiens
ctatggctccgcgtgatctctaaatacggcagtttctgagcgccgcggcctccgcctctgcgtgctttcctcgcatgctgagtgtctaacctcggcttctgggtttgctgctgctgtttcac

SEQ ID NO: 80797 - DNA, 122 bp, Homo sapiens
attttaggcctcagcccacctgcaaccaggcgttcattaaaacagcatgttgctccacaccgcctcctgttgtctgttggcgcgctgttggggttcaaactgattcaagaaccttacatctg

SEQ ID NO: 80798 - DNA, 122 bp, Homo sapiens
ttaatcaaaatgtttccaaaccccttgagctaattataaaagcgaatagcttttcctctccgaatcatattccttgacttgtaagaatgcaattccactctgagaccaccttgtcgcagacg

SEQ ID NO: 80799 - DNA, 122 bp, Homo sapiens
ttttcagagtttgtctgtggtgacccttgtgaatatggggagatgctttttttgtctccccgtgttcgcgtctgttcaatgctggctgcactgacatccaccttaaaggtttacgtgtgcga

SEQ ID NO: 80800 - DNA, 122 bp, Homo sapiens
ggttagcataaaatatctgatcaaactggtatagggtgaccaaggcctccaggacacaaacgccatcttatcagtcagactatgccaaggactcaggatttatctcccaagagccagccaag

SEQ ID NO: 80801 - DNA, 122 bp, Homo sapiens
cctaggtgggcaggctccaccacctcgcgtggcctagtcggcccgcagcaccaagtccgccgcggctcacggccaaccgcgagccctggccaccctgaacctctccacaactccacttaccg

SEQ ID NO: 80802 - DNA, 122 bp, Homo sapiens
acgggggctgcagtgctgaatacctctgggacgcttgggaactgtgcccctgtttacagacggcaagcccttagtggtagggccctgagattctgagaaacataaggtctgctttatttaat

SEQ ID NO: 80803 - DNA, 122 bp, Homo sapiens
ctgccactaccaacatcttctctggccacccggcaggcccgagctgggccctcagagccccggctgccaaccttggcgccgatctggttcccgcactgcccagtctgcgtgaacgctatctc

SEQ ID NO: 80804 - DNA, 122 bp, Homo sapiens
tcggaatccaggtggctggacaccgcttcgcacggcccagccccgtggctggaacccccacgggtcaagacaggagcccccgccagacagagcccccggctcctccacccaccgaggcgacg

SEQ ID NO: 80805 - DNA, 122 bp, Homo sapiens
cgcgattgagagagacagaccacgcacagcctggattttattttaagagctattgggtgccgttggtgggtttgagtgagtggggtcaggaagtgactcactcctccgagggcttgtgggag

SEQ ID NO: 80806 - DNA, 122 bp, Homo sapiens
cccggggctggcacagccggccctggccccacgcctgtgctcagcacaaccctccttgtgcgccctgtgggaagcacatgtgcccggggctccgtctgttgcccttcagaggctgagtggag

SEQ ID NO: 80807 - DNA, 122 bp, Homo sapiens
aagtgaaaccgaaagcaactaagcgctcgaaagcacgcccggccagctcaaaaactacggcgctgatggaccccagtgatccgacgtaaaggtgcaaacgtaaagcgcacacggccaattta

SEQ ID NO: 80808 - DNA, 122 bp, Homo sapiens
ttagtgagtcccccccgggcagagggcaggtgccaggtgccggggaagggccggtgcccccgcctctcagcgacttagctatgagtcctcggcgctccagggcctggggccctgtgggtccg

SEQ ID NO: 80809 - DNA, 122 bp, Homo sapiens
cttgcccaggcctgcatccgccttccctgccttccctcggatggggctgggtgattgcagcggccttcaccacattgggtagaagcagggagacatgcaaattagaaaaccaggagatcgtc

SEQ ID NO: 80810 - DNA, 122 bp, Homo sapiens
gaatccagcccaggagggcggggctcctgcacgccaccgccaggcttccggcccgcctggcgcagccttccccatccagctgtggatccgtcctgggatgcgtgtcccggcctgctgtctct

SEQ ID NO: 80811 - DNA, 122 bp, Homo sapiens
gctcgtccagcggcctttgctctgtgtgtgactgtccgtgttgctgctcaggttgccctgcgtttaggcagcaccctatccgttcatccgtcccactgcgggcgcagcaccctagccagtca

SEQ ID NO: 80812 - DNA, 122 bp, Homo sapiens
ccgatttccccggtttccctgaacccagcccagcccgggatgagaaactgcaaaatggcccgggtcgccagtgtgctggggctggtcatgctcagcgtcgccctgctgattttatcgctcat

SEQ ID NO: 80813 - DNA, 122 bp, Homo sapiens
gagcaggggggcttgggacgccgagaggaggggccgagggccgcgaggggacgcggcggacgattgtggggagggtctctggcacctcgaagcgaaacacacaaaggcaacgccgcccgcct

SEQ ID NO: 80814 - DNA, 122 bp, Homo sapiens
ctcaccacccttccccttggggaagaccaacaccccaatattgcctctagaagactcagccggccaaatcctacttcccacctccatcccagaaccctttagctcccgctaaaagctacaac

SEQ ID NO: 80815 - DNA, 122 bp, Homo sapiens
tgctcaagggtccttttgttatggtaattataccaacaataatgctaacaatattaacagcggatatagtagaaaggatttgaggctggcagctggaaggcctgcgttctggttccagtttg

SEQ ID NO: 80816 - DNA, 122 bp, Homo sapiens
gccgcaccgtgaggggaggaggccgaggaggacgcagcgccggctgccggcgggaggaagcgctccaccagggcccccgacggcactcgtttaaccacatccgcgcctctgctggaaacgct

SEQ ID NO: 80817 - DNA, 122 bp, Homo sapiens
ccagcctgggtgacagagtgagaccatgtctcttaaaaaccaaaccaatcctagcatgatcggaccctgtctgccaccctctattcctttcctcttgctcagtgtgcatcaggcatctgggc

SEQ ID NO: 80818 - DNA, 122 bp, Homo sapiens
gacagttctgccccaggtttgtgggatgccagagcctggcctatgtcactgcctcctgtgcgtacctttgatctacctcccaaatggccagtgatgaaaggggtaggcgcccagggacacct

SEQ ID NO: 80819 - DNA, 122 bp, Homo sapiens
ctgatggaaagaagatctttctcacactggaggctcatgtcttgcctttgtgtcacatcacgggcttactccaagccccaggaaaagaaggtcatggagtagcctggcaaggaaaacatact

SEQ ID NO: 80820 - DNA, 122 bp, Homo sapiens
cttgggagagcagggaagcctcagtgccgagaacttgggcacagacgaggcagagtggagcgcggaccagagctcgccccccaaacacggcggctccaacatgtcggtgaacgtccggcggt

SEQ ID NO: 80821 - DNA, 122 bp, Homo sapiens
actcgaagatggcattgacagcggaaggggcacactgggcctagggagggctcgaagtcgcggtcatcaggaacttctgggcctatcccagaagcctcatcttctagcataaagtcaaataa

SEQ ID NO: 80822 - DNA, 122 bp, Homo sapiens
cgactggcttctggaggagcagcagcctcggcctcagcctcggctgggaaaagacgcagtcggggccctccgtgctccaaacttgaactactctgggtccccacgaggaggaggctgccctg

SEQ ID NO: 80823 - DNA, 122 bp, Homo sapiens
ggctcccactccgcacagttgcggggaagcggtagcgctgagcagcgcgggcgtagtgggcggtgtccccgctcccgaggcacccggcgcgcagcggggcgggctttgccgggggcggagct

SEQ ID NO: 80824 - DNA, 122 bp, Homo sapiens
atggtgtggcaaatgtcccctcctcccacagcgaccccctggcattttggtgagatgaaccgccgccctgagggaacacccagtaacgattccttcagtgatcccggttctccaaactcttg

SEQ ID NO: 80825 - DNA, 122 bp, Homo sapiens
cggccggggccgcagcgacgcggctgcgctcgtgagctcggcgcggctcagaggcggcggcggccccgcggcaccggccgcctcccccgccgcctcccccgccgcctcctcgccgcccgccg

SEQ ID NO: 80826 - DNA, 122 bp, Homo sapiens
gaacttagggaggggaggcaaaaattttccaaaagcagagcccgccccacccgcggctcacgtcatctgtgaagatggccagcttcccgctctccagcatgtcttccagttcttcgttggtg

SEQ ID NO: 80827 - DNA, 122 bp, Homo sapiens
gaaacaggacgtgggacacgcacagtcctgctcctcttcctgggacccctgtctgctgggcgcacccctcaggcccaggagaatgcacgttgacggtataccccattccacagcgtcgctcc

SEQ ID NO: 80828 - DNA, 122 bp, Homo sapiens
ttgccttaagaggaaagtactacctcttccaattctggttgaggtcatctagccctcttccgatctttaatttgcccactctttaagacctaatatgcactagaattatacaaataattcct

SEQ ID NO: 80829 - DNA, 122 bp, Homo sapiens
gaggagaacgcggcgtgagctctcggagtagaggcggccgtagagctgcgcgatctgctgcgcgcgccgcacgcgcaggcccgtgacgaagcggcactgattggccagaagcgccagcaggc

SEQ ID NO: 80830 - DNA, 122 bp, Homo sapiens
ctctgagagactagaagcagcatgcatctgacaattgtcaatttcaaaacaaacacgctccgggacttgaacgcagcggggcattcagtagcgaatgctgtctccttgagttagggcaaagc

SEQ ID NO: 80831 - DNA, 122 bp, Homo sapiens
cggcaggggcagcgctgccgccggggcctggggctgacccgtctgacttcccgtccgtgccgagcccactcgagccgcagccatgtctggggacgagatgatttttgatcctactatgagca

SEQ ID NO: 80832 - DNA, 122 bp, Homo sapiens
ttattggttgattgtggtttatggaagtaatgctattccttcttaagatgccttcaggatcgtttcaactgtaagggaatattcaatcctcccatcccaggctgagtcgtcatcagagcgaa

SEQ ID NO: 80833 - DNA, 122 bp, Homo sapiens
ggctcctgagtatagaaccacttctcctagcacggctcggaattctggctgccggacacacgtgacaaaccagcgagtcacattattccagatccggcgggcaggtgggtctaggacctgga

SEQ ID NO: 80834 - DNA, 122 bp, Homo sapiens
ccaggcaccggggccttctatggatcccggtaatcagatgcttctgacctgatgagatggcggcaatgtgactgacgtctggaaggctgaggctgctgctgtggctgtgtaaagaagtcccg

SEQ ID NO: 80835 - DNA, 122 bp, Homo sapiens
ataactgggcattttaaagcaagaatgaaagaacagagagggtgagtggggactcaatgacgtcagagaagtgacagattacaaaaagtgggaagggggttggtctgtgttaagcccacctg

SEQ ID NO: 80836 - DNA, 122 bp, Homo sapiens
ttctaaggaggcagaagggctgccatctcggggatcctcctggatccctgcttctgacttcggtcggcaaactcacacccgccctagttttgcccgccagcttcgggtcggttcctccgatt

SEQ ID NO: 80837 - DNA, 122 bp, Homo sapiens
caggttttgaagacgtttttattcagaggccaaactggaccacgatggggactagagcttcgggcctgtccgtgtcctagggacaggacagacacagtcacctcctgtctgtcagggcatga

SEQ ID NO: 80838 - DNA, 122 bp, Homo sapiens
gcggttgcccgggtgacggctgcggaggtggcggccgggctgggatagcgcgagtgtccgcggccgagcagcaggtaagcgcgtccccggatgcagccgggccaccctccgcccgccgtcct

SEQ ID NO: 80839 - DNA, 122 bp, Homo sapiens
cgagggtgactcatagagattagccctgagcgtcgacccctcggcgccgccactgcacagcgagagaaggggagtcaagagagacgcttgagtcccttgactgtcctcccctacgagctctc

SEQ ID NO: 80840 - DNA, 122 bp, Homo sapiens
atgttctttataatttttgtaagtcctgttgaggggtggagttgtcgggacttcctgggccggttcagggaccttcacaaaagtcccctgttactcagggttttgagttcttagccaattga

SEQ ID NO: 80841 - DNA, 122 bp, Homo sapiens
gagagaggcgtcagatgggctgagattctgaaccacacacacttttatctgctggcagtccgccaatggctgcaaataagggatgatctgcccacctgaggccaccaggagcctgcagcctg

SEQ ID NO: 80842 - DNA, 122 bp, Homo sapiens
aactcctgggctccagtgatccttctgcctcagtctcccaagtagtcaggtctacagacacgtggcaccacactcggctaattttatgtagagatagggtcttgctatgttgcctgggctga

SEQ ID NO: 80843 - DNA, 122 bp, Homo sapiens
atttttctgcaagcttggaggacagctcgcgaaaattcagctggggcgccatctgctggacgcgccgcgccgctgcaaggccctttccggaaaggtgtcggggttgcaggtcagcgccccat

SEQ ID NO: 80844 - DNA, 122 bp, Homo sapiens
caggccagaacagcccaggatcaacagaccctgcccaccagcccccgggtggtgctgccccgaatgccctcaggaaaggaccccctcaattggggaggttgaccccctcaaccatggggcct

SEQ ID NO: 80845 - DNA, 122 bp, Homo sapiens
gcaagggagctgacagccttctcatttttctcgtacatcctcctgttcaccccgccatcccgggagccccagccagatgctcttcagggcagggagcacgtgagcagccctggggctagaag

SEQ ID NO: 80846 - DNA, 122 bp, Homo sapiens
aatgaagacaaggaggaagggaaaagacaaggggatcaggcagttggataaagagaaaatcggggcaaaatgaagagcacttgatgggcagtggttcagttcccccaaagagattcaggcag

SEQ ID NO: 80847 - DNA, 122 bp, Homo sapiens
tgctcacgtcttagcctgattacctggccgcctcggctcacctgggcacatggtgagccgcggaactggcaggcaccaaacatttattgaatgaataaaccgtatcccagcagacaccatgg

SEQ ID NO: 80848 - DNA, 122 bp, Homo sapiens
agagtgagaccctgtctctgaaaatacataaaataggccgggcgctttgggaggccgaggcgaacagatcacctgaggtgaggagttcaagaccagcctgaccaacatagtgaaaccctgtc

SEQ ID NO: 80849 - DNA, 122 bp, Homo sapiens
ccccgccctctccactcatgattggccctaagttccgggcctcagttttcactggataagcggtcgctgagcggggcgcaggtgactaaatttcgacggggtcttctcacgggtttcattca

SEQ ID NO: 80850 - DNA, 122 bp, Homo sapiens
gcggggggggaaggccgccgcagctgggaggagggaccagggcgcgcggctacagctgtgcggccccaacctcagcgcgcggacccaggcctcacctgcgagccctgccaccaactttatct

SEQ ID NO: 80851 - DNA, 122 bp, Homo sapiens
ggggagggtgagggaggtggtggagctgaggctgccgctaggaacccgcgccgtcgccgccgtccgcccgggcttttgaggagcagctccttaggctgtggcccccctccccactcggcgag

SEQ ID NO: 80852 - DNA, 122 bp, Homo sapiens
gctagtagcttctagttgactggtttcatggtcagttggacctcccacagcagagctcagcgcagagcttccagtgcttggcggtgttttagaaccaaactaaggtctacttgcccagtgca

SEQ ID NO: 80853 - DNA, 122 bp, Homo sapiens
tgagctgggacaaaggagaatctccattctccggcgctgttggaatacggtcctagaaagcggccggcgctgcagcggctcctcccactcagaggtcctccacttactgtaaagttcttcat

SEQ ID NO: 80854 - DNA, 122 bp, Homo sapiens
cagagcttgagagaaagtgcgaacccggtccctgagcaggtctgattcccatggccccttcgccatctgctctgcaccgaaattggattctcctacgcagaggagaaggtggagaagattct

SEQ ID NO: 80855 - DNA, 122 bp, Homo sapiens
gcaatatttgggtcatgcttatattaaatgataattcattatctgaaattcaaatttaatcggatgtcctgaatgtttgtttgttaagtttggcagccctgtctgggggcaccctgcaatct

SEQ ID NO: 80856 - DNA, 122 bp, Homo sapiens
agtgtcaactctggaaaggggcatcgtcagtgtagagacgagcaacgcaggggacaggcacgctcacccctgtgccagcagccgggccctgcagctctcgcggagcttggcgacggtggcca

SEQ ID NO: 80857 - DNA, 122 bp, Homo sapiens
gtgaggaggcatcagcagttgagccccgaaggagatcaggcagccccacctgcaggagaacgtcagccctccaggggatcagcccctgccagttccacccagctgcaggtgccagcacggca

SEQ ID NO: 80858 - DNA, 122 bp, Homo sapiens
aggcgcggtggcatcacacaggctgagccacagaggctttgggagccggccacctgggcacgggctgaaccacacgggatctgggagccggccgcctgggcacgggctgatccacatgggct

SEQ ID NO: 80859 - DNA, 122 bp, Homo sapiens
cctgtggggccaaggacaggtggggccccgcggggtgggcccagggctggtgagggacctcggacaggagagcccctcagccttagccctgagccgcctcaactcgtgcgccaccatcctct

SEQ ID NO: 80860 - DNA, 122 bp, Homo sapiens
cttattttagaccaatctgaccttcgttggctgcgtgggcatgctggatcctccgagaatcgaggtggcctcctccgtgaagctgtgccggcaagcaggcatccgggtcatcatgatcactg

SEQ ID NO: 80861 - DNA, 122 bp, Homo sapiens
ggcggcggggggcgggagagtctggcgagcggacgctagctctgaggaaactcatcaatccgtgagccccggagtccggggtgcacatcggcccagccgcagcgtcggcggcggcggcggca

SEQ ID NO: 80862 - DNA, 122 bp, Homo sapiens
tgggaattcagcccagcaggtctctgcctcattttacccagcccctgttcaagatggagtcgctctggttggaaacttctgacaaaatgacagctcctgttatgttgctgctgctgccgcca

SEQ ID NO: 80863 - DNA, 122 bp, Homo sapiens
tgtcatttgtgtatacttttcctacatcagttaaaaaaggttcccaccacccaccaaacccgctgccagaacactcctggacagagaggacacaagcagtcactgctgttttttgcaaatta

SEQ ID NO: 80864 - DNA, 122 bp, Homo sapiens
gctgtgtaaggagtgaccggaagtagaaactgggtgctccagtggcgcaatcggttagcgcgcggtacttatatggcagtatgtgtgcgagtgatgccgaggttgtgagttcgagcctcacc

SEQ ID NO: 80865 - DNA, 122 bp, Homo sapiens
catgggacagggttcagagccgctggactgcctggcagggcttgcgcacgtttgagagcacggtgctcccgtttccatcccagctgcagtcctcatcctcttgactgtggcttctttccctc

SEQ ID NO: 80866 - DNA, 122 bp, Homo sapiens
cttcagcacaggcagggagccgtggcggatgctcattaactctgccagggcctgcatggccgggctcttcaggccagctccctggggctacattctcagaaccaaactgtgttcctcttacc

SEQ ID NO: 80867 - DNA, 122 bp, Homo sapiens
ttccttctgtgatgctgtcagtggctaaagaaagctgttggggaggcatgtgagtggctccggttacagttcctaggcagggcagacgcttcagggtagggtagtgccaagtcaatagacaa

SEQ ID NO: 80868 - DNA, 122 bp, Homo sapiens
atatgttgttcttttatgaaatctccctaggtcactctctttcctttctctgacgttttacgttgctcagtattatgagtttagtgctaccaaactgtattttactgtatctatatgtcctg

SEQ ID NO: 80869 - DNA, 122 bp, Homo sapiens
gtttatcgtccttttgctcttttttattaattttttggtattgtgactcctccccaaaaccgcatccggtaaatcgcttctgtattttgttgacagcggacatcatttccaccgttgagttt

SEQ ID NO: 80870 - DNA, 122 bp, Homo sapiens
actattttctgccatgattggcagaaagcaggagcacagttatggagtaaacagattggccggcacttggcaagctgaggaaaccacacgtacttggccctctctggcccctgggacacatc

SEQ ID NO: 80871 - DNA, 122 bp, Homo sapiens
tcggcgcagggacgctggctgctcacctccaggagccgacagaaggtgccttcggcgtcacgcgtccaaccctggggctgatttaaataactaataagctcagagaaattttacgaggggaa

SEQ ID NO: 80872 - DNA, 122 bp, Homo sapiens
gtcttaaatcaatgcctcacaaccataaatcataatcataaaactacagcttaggtcgggcgctgtgtctcaggcctgtaatcccagcactttggaaggccaaggcgggcggatcacgaggt

SEQ ID NO: 80873 - DNA, 122 bp, Homo sapiens
cctcccgcggtcatgtgacgctgcggcccctccaagccccgccctctctagccccgcccccgggccctacaggcggctcattgattggcctacttctaggaacccgagtctcgcgtgcttat

SEQ ID NO: 80874 - DNA, 122 bp, Homo sapiens
aagataaagcaaagattctagaagcatttaaggaacattaaccaagcatctcatttgctacgcacagaagggtactgtattaaaattatgatctaactaaccattgcctcactgtaatccta

SEQ ID NO: 80875 - DNA, 122 bp, Homo sapiens
aatgtcctgcttttattttgccttaaatttcccgtttggtccaggttatgccctgacctgcgaaagaaggatttacagcttgtattgagtgtgtaaaggaaggaggtgtgtgcccttgcgca

SEQ ID NO: 80876 - DNA, 122 bp, Homo sapiens
cacagggtcgcaggcagatgcctgccgggaggtgtgtggttttacttaaaatccagaggacgtgatgtggcaccaggcactgtggctctaccaccgtgagtgtggctcacccagtggctgtg

SEQ ID NO: 80877 - DNA, 122 bp, Homo sapiens
cagtgcgggcagtccccgagccttggacagcccagcacgggtccagccccggccccagcacggctcctgcaccgccccaggacgtcccctgcatagcccaggacagcccaacgccgcccagc

SEQ ID NO: 80878 - DNA, 122 bp, Homo sapiens
tctcggagcgagtgggcggggccacgctcgctgggtgggcggcttctggcgggctcagggcgtcgctcagggcgtcggtgtgcaaagcagcgatggacccgagggtctggagctgggagtgc

SEQ ID NO: 80879 - DNA, 122 bp, Homo sapiens
gaaattataacaatagaagtaaacaaaaagccttcattcatcctctttcaaccataacctcggcataaaaagctcctgtactttacagagctgtattccaattttcgctgctcttaaaattt

SEQ ID NO: 80880 - DNA, 122 bp, Homo sapiens
caggccccgcgaagccctgcctagccccttggcgtgggttagcggtgctttaaggcagcccgaggcgaggaggccaggtcatacctgcgggagcttgatgaggcctcatgagaaagccctag

SEQ ID NO: 80881 - DNA, 122 bp, Homo sapiens
aaaattgtccgaaaatattcctttgttctcttttccaaggtgcaatacaatagcagcattcgtgctttcctatagccaagtctggagtgtagttcaactctccatacacgcttctcactgtt

SEQ ID NO: 80882 - DNA, 122 bp, Homo sapiens
tccgggctctgggccagcagtcagagtgacacctgagcccagccatagagattgcaggcacgttgagttcctggtcctccctgagtacacacacagggaggaggagggctgggcagtcaggg

SEQ ID NO: 80883 - DNA, 122 bp, Homo sapiens
ccccattaataatccacttcgagattagcgcagacgaaagagattaaaacaacagatacacggaaatgtgaaataatattgcaatcaacattgaagggggaaaaataattctttggggtttc

SEQ ID NO: 80884 - DNA, 122 bp, Homo sapiens
tctactgatggagaaatatttgtcaaggcataaccgctttcaaagcacagttcttgccgccgttgcatcacagcaacatccgtttttcagcaaatgcatttcaaaaacgacctacatgtaaa

SEQ ID NO: 80885 - DNA, 122 bp, Homo sapiens
ttggagaactcagctctgctccagccagcacagctcagagaaatggggcatccacactttcggatttgtagcccaccttgcctccttccaattccagctcaggctccagggggataaagcga

SEQ ID NO: 80886 - DNA, 122 bp, Homo sapiens
ggcgccctttcttggcccttgttcccccaaatgtctgactctgactctcggactgagaaacgcaaggtaaatacctccaaatcccggggcgcgggcctggcaccgaaggaagactagcgctg

SEQ ID NO: 80887 - DNA, 122 bp, Homo sapiens
cactgagatcaaggagagaacgaatttgccgctgactgggcagagcgagcgcgtggatcgcggccaccgcccgttcatcacccgcgcgcatctgggctggcaccgggcgaagaatcgtgcgg

SEQ ID NO: 80888 - DNA, 122 bp, Homo sapiens
cctgcagaggtggcagctgggagccctggacaccgagcccgggcccttcccccagaccagcgtcagagcactgcacgcctccaccacaaggcctctggggggtctgacggcccagagaaagg

SEQ ID NO: 80889 - DNA, 122 bp, Homo sapiens
caaataagccagacccagagaatctgtcatgtacacttcctcattcttctttctggtgagcgggaggagaaattccagtgaaggagaggagcaaataccctctcacggccaccctgggacta

SEQ ID NO: 80890 - DNA, 122 bp, Homo sapiens
gccacgcccccaagcgcggggccttgtgggagttgtggtcctgggcggtcgcctaggcgccgcggcaggaaggcggagccgctgaacgagaggactcgggaactacaactgcgaaggccgcc

SEQ ID NO: 80891 - DNA, 122 bp, Homo sapiens
gccccgcgagtagcctggacgggtccagaggggcgtgtgtactcgtgtgtgttgggctggcgcgtggagggtgggatggaaaggtcaggagctgccaagttcaaggctggaggaacctttcc

SEQ ID NO: 80892 - DNA, 122 bp, Homo sapiens
ctacgtctgcgtttccgcctttccttttgtttttctcaggttttgcgtgggaggcggtcccgggatttcaagggtctacgcgcttttctatggcgaatgcaacccgacgagggagtggggta

SEQ ID NO: 80893 - DNA, 122 bp, Homo sapiens
cagtgccagtcagttctgagcgagcggcccctggacagttgcagagaaacacaggcttgtcgtgccgtttaagctttgcttgcaagagtggatgccccgcaatcgttcctgctctcccgggc

SEQ ID NO: 80894 - DNA, 122 bp, Homo sapiens
tggccttgggccagcagaaatggcatcgcaaggactccaaaatacatcatagctgaaccacgccgctagcctggttccaccggggcttccaggaccacgcacctttcctccatttctgtgat

SEQ ID NO: 80895 - DNA, 122 bp, Homo sapiens
tgctggctgtggccggagttccagctggggtttggcggccaggagagtggctgccagcggcgggtgctcctacctgacttccgcgtggggctcgcccctccctcctcctcctccagcgtcct

SEQ ID NO: 80896 - DNA, 122 bp, Homo sapiens
gccggaagagcaaccgagatgaaggtgaagatgctgagccggaatccggacaattatgtccgcgaaaccaagttggacttacagagaggtaagataagttggtagggagaaagggacggttt

SEQ ID NO: 80897 - DNA, 122 bp, Homo sapiens
agagagcaaggggcgaggggctacacacttttaagtgaccagatttcacaagaacccactcgctattgtgagaacagtaccaagaggatgatactaaaccattcatgagaaatacacctctg

SEQ ID NO: 80898 - DNA, 122 bp, Homo sapiens
gtctctctccagcgccgcgcgaggctcctcggacccgaaactccgcggcgctggcccgcccgctcctcacgccacagcccaaataaacatctcccgagagcgagcggggcacgggcgggggc

SEQ ID NO: 80899 - DNA, 122 bp, Homo sapiens
gtgtgagttgatcggcagtgatttctcttccctggaagtgacccagaatccattcctgggcggctggcgtccagctccttagcctgggttagcgctggggatggggcggccacagcagtggg

SEQ ID NO: 80900 - DNA, 122 bp, Homo sapiens
ctgagctcgtccttcacgacaagttgcaaatcacgttttctgggagtgtccataggtccacgggttaacattgtcctgtgagtccccctcctttgagacaggaccttgggctctgaaaacca

SEQ ID NO: 80901 - DNA, 122 bp, Homo sapiens
accctgcaaaatgggggaactcataagaggggcttcagagcccccaacacaggcagacaccgaacctctgcacttagcccatccattactttcactgagctcctgccaagcctccagcctcc

SEQ ID NO: 80902 - DNA, 122 bp, Homo sapiens
ccaatacactctccctttcccactaccttgttactaaaacatcttgctatgcttttacaacgagagagagagaaaaaacaaagtcctaaacttacaacatcagagcaccccagggaattcca

SEQ ID NO: 80903 - DNA, 122 bp, Homo sapiens
agacagtgaggggcttgagacactttgggtaaatttcttcctcggctcagcttcatgggccggctagttttagagtcccctccacagtcagtgcccaggattcatgcatccccagccaggcc

SEQ ID NO: 80904 - DNA, 122 bp, Homo sapiens
attttggagagggagtatcctgctacgtgcagaactccgagaggtgcctgggctccgggacgccgccgccgggggaaaggggacatctgggctgtcagagcggggctgcgcctagcttggga

SEQ ID NO: 80905 - DNA, 122 bp, Homo sapiens
cccagggcaggagactggattgattctgctcaagggaagagcagtagtaacctggccgcccgtcacacctgccactgaggtccttgggatgggtgagtccctgacctgtaattgtcggaggg

SEQ ID NO: 80906 - DNA, 122 bp, Homo sapiens
tatctaaccttcctgtgggggctctggaccagaaagggcgaattgcccctaacgagcatgcgctggacttcggtgaacactgcgcatgcggtccctcccaaacgccggcaggccactgcgca

SEQ ID NO: 80907 - DNA, 122 bp, Homo sapiens
tgcgacggcaggggcaggatggtggccttggtctccaggtgggccgtgctgctgggcagccgcaggccgggcagggtgcccaccacctccttgcccacccgctcctcggtcttggtgctggg

SEQ ID NO: 80908 - DNA, 122 bp, Homo sapiens
ttcacctcttctttcgcgtacttacgggcaaccgaggccatccgaggccctggtcccgaacgaacttgagtagcgagagattcacaataaagaactaagtgtggcctcccaggggctgcgct

SEQ ID NO: 80909 - DNA, 122 bp, Homo sapiens
tctggtgcttagccagccactggattaaagtttttcaagcacgagcgctttgaagtagatcgttactatcactattttagagggaaggaaattggcttggaaaagctaagtgactggcccca

SEQ ID NO: 80910 - DNA, 122 bp, Homo sapiens
actgcacctggccaggtggaggagcatgtcagccgcatccgggaggagctggaccgcgagcgggaggaacgaaactacttccagctggagcgggacaagatccacaccttctgggagatcac

SEQ ID NO: 80911 - DNA, 122 bp, Homo sapiens
gtacgtggctgagtctctggagccaccgtcccccttcgagctgctggagcccccgacctccgggggcttcctcaggctgggccggccctgctgctacatcttccctggaggcctcggggatg

SEQ ID NO: 80912 - DNA, 122 bp, Homo sapiens
ggaggaaagaaagaccagccaggaatggccacctccaaacctgggttgggatcccacccgcggcactgactgcggcctagaagcaagcagcacagctatgcctgagttaggctcactttccc

SEQ ID NO: 80913 - DNA, 122 bp, Homo sapiens
ctggggggagcagagtgggcaggggggctttgccttgcctggcctcctctttccgtctcgcgggctcttcctgcaaaggggaatgagcagaggggggaaaggcagaaagagcgtcgaggaag

SEQ ID NO: 80914 - DNA, 122 bp, Homo sapiens
cgccctccccggttccaccctccttcgctcattcatccctgtcccagcctcaaggggcttcgtctctcctggggaaggggctgttcagagctgggatttcagaccccttcggctgggagttc

SEQ ID NO: 80915 - DNA, 122 bp, Homo sapiens
tcaccctagggcctggactgtggtgataatggtgctggttcagggtggctgtttccaatacgggctcccagccatgctagggccctccagatgatctgctctctggcaccttactggactct

SEQ ID NO: 80916 - DNA, 122 bp, Homo sapiens
agcattgctaagggttggctctgcgctttcactatggttcatgtatttattcttaaaatccgactttaaggtccgggggaggcgaggagaactcaccctggccagcctcagctgcagcctgg

SEQ ID NO: 80917 - DNA, 122 bp, Homo sapiens
gcatcctctggaggctgccgtccaagaggacgatcgacgcgcttttcaggtaggcagctccgcgtggcttcctgtaaatcgctgggctggtggccccaacgaatataagtccttgttcagga

SEQ ID NO: 80918 - DNA, 122 bp, Homo sapiens
caggcgccgtccggagctgcggagggcgtcactacagcccagcgccgacttcgccgcctccgctgccaactgtgaaggagagagaggcatcaaccaccccccgccccaaacaaaaagccttg

SEQ ID NO: 80919 - DNA, 122 bp, Homo sapiens
ctctccctgcctactacgggcagtcgacaggtggggccggccccacctcctggcagcgctcgcccgctccgttcaatccccggtagccccccaaataaattgcacgctggggagcgcaaaca

SEQ ID NO: 80920 - DNA, 122 bp, Homo sapiens
tcactgataaactccccattttggaggtttaaagcagggtgcattgaagatatgaagatacgtatgaggttatgtagcatgtgaggataggcatagctttgttacgtgtctgtaatgcttat

SEQ ID NO: 80921 - DNA, 122 bp, Homo sapiens
gtgccacacgctcagcatgggcctggcccaccgtgggtgtgccagcaatgaacacactgccgccttgcccaccccaagtaaagggaaccccagaaagccgcaatctttgtctgttttgttca

SEQ ID NO: 80922 - DNA, 122 bp, Homo sapiens
cttaaggaggcacttcttaaatcgagggctccgtcttaacctagatgtggatgttaagtccgcatctccctcgggctgatttcccgacctgtagccagcctccgcgagagcccagggcgcga

SEQ ID NO: 80923 - DNA, 122 bp, Homo sapiens
cagtttgttctcccgcaggtcaagccaggtgagctggaactcagcctggggctgggaggccgtctgaaaggcctcgatgctgttgcagctcaggtctagcacccgcagctgctggaggctga

SEQ ID NO: 80924 - DNA, 122 bp, Homo sapiens
tggtcttgggaatgcgggtgtctcctgccttaggctgagggtgtgcgtttccaggccagccgggacagttttcagcctggggaagcttggcctttcctgttcctgccccccagtgcccaccg

SEQ ID NO: 80925 - DNA, 122 bp, Homo sapiens
cattctctgcaagcaatgaagccacattaacattaatgcctgcattttgctgctttgtagcgcttttctgtacaactgtgggacatcaattttttccttctcccattttaaatctcccctgt

SEQ ID NO: 80926 - DNA, 122 bp, Homo sapiens
ttggccaagtatttggatttactctgcttcactgactttgcttgttgctctgaaaccctccggcccctttccagttctcacctaagaactgcatcagggcttattatcccttccttgcacct

SEQ ID NO: 80927 - DNA, 122 bp, Homo sapiens
cagctgcactgacttttcatacttcctgcttgaggaagctgctactgtctctgaacacggcggtacctgccttttctaggggcacaccttgaagatcacatcggccagtttcgatagtttct

SEQ ID NO: 80928 - DNA, 122 bp, Homo sapiens
tgacaaatcaatgccaaataagtacagtcatcttctctagttctcataagactatctccccgccacctatagttagtaccctcaagtcctcctgagctgtgatcagagaataaacatttctc

SEQ ID NO: 80929 - DNA, 122 bp, Homo sapiens
aatgtatagactgtattactgctgcactggctcctgaatgaagcaggcggtgaaggctcacgtgctgaggaaacagggaacaccttggcgccgctgctgagctctgtgttgctcctggtatc

SEQ ID NO: 80930 - DNA, 122 bp, Homo sapiens
tccacgagaacaagcagcccctggcctagatctacaccaggaaagcagaggtggtgctcacgacaagggacaggtagcagctagcagagcctgggctagcaggaagctcacagcatgtgccc

SEQ ID NO: 80931 - DNA, 122 bp, Homo sapiens
tgtggtagaaaagaaaaacccattttctggggaggaattcaagaaggctgcagacatttgcgtaagtaaagaggagccaaatgttaatacctcagggacatttcaaagacctttgcccagac

SEQ ID NO: 80932 - DNA, 122 bp, Homo sapiens
ccgccgtccccgtgcaccccagtgatggccgccgtccccgtgcaccccagtgatggccgccgtccccgtgcacaccagtgatggccgccgtgcccgtgcaccccagtgatggccgccgtccc

SEQ ID NO: 80933 - DNA, 122 bp, Homo sapiens
gggccagggcgagggccaggggcgctcgctggagggacccaggccgggtggtggcgggggcgggggcgccggggcggggagcgcctgggacagggaccgggcccccgccgccccgcccactg

SEQ ID NO: 80934 - DNA, 122 bp, Homo sapiens
aggaaagaattacagttggactgattgtgacagtgccttgtcgtcctctttgaaacaccccgtgttgtccagtataccttataacactgagccacttctccccaccctccagaaggggtcca

SEQ ID NO: 80935 - DNA, 122 bp, Homo sapiens
ggaagatggagcctagaaagacccctgactccctgggtgcccgctctgcctaacgagagccggcaacttgtgaaggaatccaaactggcatctggctattttaaaatagatgccgtttatta

SEQ ID NO: 80936 - DNA, 122 bp, Homo sapiens
agatgatattaaactaaatctttctgacattaaaagtaattatccccaaaccggtggctccgggacggaatggcccctcccgcacccaccccttccctggccgcgccggattccgttagttt

SEQ ID NO: 80937 - DNA, 122 bp, Homo sapiens
cggctccgtgtttagggagggcagtgatcacgcaagccggagcggcgggctgacgttggacgagctgccaggtagctgaaagcaggcagccaggcagccgagacacttcccagcgattccag

SEQ ID NO: 80938 - DNA, 122 bp, Homo sapiens
atcagctcttctcaaacgctgctgacgataaacacccgaatcccctattgctgaagtcaccgttttgggctctcaggaaacctgaaccctgctgcatcccctgccacctaacccttcccttc

SEQ ID NO: 80939 - DNA, 122 bp, Homo sapiens
gcgcgagctttgcctccctgcttaccacgcccagacatggcaaaaggtctattacctttacggtcaagaaagactgaaatgaaattggaaaaacgtacattttatagcctctactgggcgcg

SEQ ID NO: 80940 - DNA, 122 bp, Homo sapiens
ttttcaagctccagattcaacccacttcccctttagttctcccagattcacaatcccacacgtgttcagtgggctcagcattggcatctgggatctcagttctgaactctcagggctcccat

SEQ ID NO: 80941 - DNA, 122 bp, Homo sapiens
ttgtatgtgtgcacctctgaccatgtgtgtacatatgtgtcttgctggaaaggacatattcgctgtccccgtgctgctgggagggccgcctcacagcctcacggttcccagccccagcacag

SEQ ID NO: 80942 - DNA, 122 bp, Homo sapiens
ggacaatgcctgaagtatgaagcacagacacggaaacaccggatgcgaaagactggagaccgagacagcaaagggaggtggagcggagtgctgatctcggttcctccaaaactcgtactgtg

SEQ ID NO: 80943 - DNA, 122 bp, Homo sapiens
aacgctccctgggagggagggtagtctattggtgagctaggacgtttggactcagggttccgaggaaccaggagcgatccttagtgggccgagacttccgaatttgatcaaaggtaaagagg

SEQ ID NO: 80944 - DNA, 122 bp, Homo sapiens
gcgggaacgcttcctccaccagccgaaggcggggcctctgagggcactcccgccacacagcgcgaattgagcctcggggcttcctgggaattgtagttttagtcacggacacatctttttta

SEQ ID NO: 80945 - DNA, 122 bp, Homo sapiens
ggcccggtgaccagcaagagctggtgtgctcctgaagcccaggcaggaagaaggagcctgcgtgttcagagtcaagaacaccacgcggtaatggtagagagaccctggaggtcagaggccta

SEQ ID NO: 80946 - DNA, 122 bp, Homo sapiens
ataccaacacttgtctgttgaccccaactccctctgcatatgcgtatgcagagacacaaacgaatccacagaaaagattctgttgctatttgccgaagctaaaaaccttgagaacctctatt

SEQ ID NO: 80947 - DNA, 122 bp, Homo sapiens
cagcagtacgagctggacctgcgggagcctgcgctgggccagggcagcttttctgtgtgtcgccgctgccgccagcgccagagcggccaggagttcgcagtcaagatcctcagtcgcaggtg

SEQ ID NO: 80948 - DNA, 122 bp, Homo sapiens
ctgccagatagccaaaccctaggttccactctggagctctggcttcccgggaagcctggccgcgagagaatggggcaaaatgtgactgtcttcatggggtgggggtgtcccagctccccttc

SEQ ID NO: 80949 - DNA, 122 bp, Homo sapiens
cccgcgctcctagagaggacccggaagcgcggcgcggtcccggaagacgaggtggtgacacgcttccggcctttgtgactcattgtgtctgtgtcgaggcgtcgggagggcctaagtccgtg

SEQ ID NO: 80950 - DNA, 122 bp, Homo sapiens
cacagcttctggaaagcacacccagggacccctgagctaccaggaaccctccaccaccaccgcactatgtggcccagcttggcgcccaggcccctacctttgaacttcttcagcatcccttt

SEQ ID NO: 80951 - DNA, 122 bp, Homo sapiens
atgcggttgtacttgtggtccaagtcatggagccaggagatgaactggctggtgttgagccggtcgcgcactgacttgttctcgtcgcgctggctctctaggggcatgttttaaacctcaga

SEQ ID NO: 80952 - DNA, 122 bp, Homo sapiens
tttctgcttagaagtcgttagattgatatttgggagttaaatttaaaccaaaactctaagcggactagtaactattaagctgtctaatacttttgaaacaagcgtccctctgctggcttatt

SEQ ID NO: 80953 - DNA, 122 bp, Homo sapiens
ttctggcccattttttctaagaaaatacataaaaactttaggatttcttctctacattcacgaaactgtaatgaaagagatacatattgtaaatatgggtaagaggagtcactccaggaata

SEQ ID NO: 80954 - DNA, 122 bp, Homo sapiens
atgtgcgtgaccatctgctacgggcacagaatgccaggctgccggcggtgccctctgtctcgttggtgaggccgcatttcactccagctccttgtgccatcgtatcacacatctttgttctc

SEQ ID NO: 80955 - DNA, 122 bp, Homo sapiens
cgccggatgcccgcgaggctgctgcggcggcggctgctgctgatgggagagtctcgagtccggctttcatcacatcacctgtctgcgccccttccccctccccgctctttttttcttttctt

SEQ ID NO: 80956 - DNA, 122 bp, Homo sapiens
tccatctgtcagcttccctggtgcagccccctccctctggcccagagactcaccctcaggcgtccaaggctgagctggacaaagagacctgtgtgtactttgtagggggcctcagcagcctc

SEQ ID NO: 80957 - DNA, 122 bp, Homo sapiens
ggggtagggcgagagaaaagcaggacctgggccgggggtgggagtcgggccgttgacgctcgctctgcgaggggctccctgggaacgcccaggcgagcgcctcctgcggggccccgcccccc

SEQ ID NO: 80958 - DNA, 122 bp, Homo sapiens
tgaaaagagaaagtaagcacctcttagagctaaccatttttaatattttggtgattggtgcggtggctcacgcctgtaatcccagcactttgggaggccaaggcgggcgggtcatgacgtca

SEQ ID NO: 80959 - DNA, 122 bp, Homo sapiens
accgacgcccacgcaggatgatgacatcactgcagttctaggaccggcttccatcaccgacgcccacgcaggatgatgacagcactacagttctacggaccggcttccatcaccgacgccca

SEQ ID NO: 80960 - DNA, 122 bp, Homo sapiens
aggagcaggcttgaagatcggtctggtgacggtgagttccagaaactggttagaaagctacgttgtcatctaaacacaaggcaatgaggtccttccctagggtaatgtcagaagaatgaaaa

SEQ ID NO: 80961 - DNA, 122 bp, Homo sapiens
caacatggggaaaccccgtctctactaaaaatacaaatatcagctgggcgtggttgcgggcgcctgtcatcccagctacttgggaggctgagtaacgagaatcgcttgaacccgggaggcgg

SEQ ID NO: 80962 - DNA, 122 bp, Homo sapiens
ggaagaagacaaatcacacatatggaaggatcccatacatgagaagagccatgacagcagcgctgaacagcccagccacagggacggtcacgaaccaggccacgaagatgttccgaaagagg

SEQ ID NO: 80963 - DNA, 122 bp, Homo sapiens
cttccttaagctcccgcccgcggctccgaactgagtcctctcagccgcccgagggcgctgcgctgagccttacactctatgattgctcctaccgactcccatgaggaagtgcgatcgggaac

SEQ ID NO: 80964 - DNA, 122 bp, Homo sapiens
gcacaggcccagcagggcccctccaggtctaggtgagcagagctccacctacaggtaaaacgcggcaaggggcagagaaggagccaagtggcgacgtggtcatgcgcagaaagatccgtccg

SEQ ID NO: 80965 - DNA, 122 bp, Homo sapiens
ccgagcgtcgcaagaaggcccgttggagtctcgcgcaactgggcaggacgcgacttctgacgaagtgacaatggtctatgcatatattaagtgaatatttgagaatttaaatatgcaaagcg

SEQ ID NO: 80966 - DNA, 122 bp, Homo sapiens
tggccaggatccaggtgggccagccgcgcgtctcttgcccggcacctagctcggttcccacggaaagacccccgtctctcgtcccaagccccacagggtcccctcgccgcaggatgcccccc

SEQ ID NO: 80967 - DNA, 122 bp, Homo sapiens
agccatggcggcagcggagttagaaagggaggtgagcgaactacgcagacgcaaagagcccgcagcgcgcaaggcacgcagggtccaggccgcactaatcactttgccacgcccctcgtccg

SEQ ID NO: 80968 - DNA, 122 bp, Homo sapiens
aataggaatattctccaaatgtatttttactctgaatcacagagaatctagaatctgggccgggtcttagaagagttacccagcatggcttccaggcaagggtagaaatccccaagctgcat

SEQ ID NO: 80969 - DNA, 122 bp, Homo sapiens
agccctgctcgagagtcttatattttcccctcccaagtcctcctttctaatcaggtcagccgttgactacgggccccaaaataatgccaagtgcagcctttgctgcattggatttcttgctt

SEQ ID NO: 80970 - DNA, 122 bp, Homo sapiens
aacagtcagcaccaacacagcaggcatgcacatatgccatgcagaagcgggtccacagcccgacgggcggcctgtgtacctcaagggagacttgaggccagaggcaccccgttgagccactc

SEQ ID NO: 80971 - DNA, 122 bp, Homo sapiens
ctgcaggtcctgggactcaccgactttgtagggcagtttgtcagacatgctggcggcactcgtgatggaaacgggcgaagggggctgggcctcagtctgggaacaggaactgggcgggcagc

SEQ ID NO: 80972 - DNA, 122 bp, Homo sapiens
tttccaaggcaccgccgtccgttcttctttccctagaccgaaactggggaagagtgtgggcgcttctttgccccgatgagttcgcctccccaaacgcctacttcggctgcaccagagcatct

SEQ ID NO: 80973 - DNA, 122 bp, Homo sapiens
aacagcactcccaccctccccctgccctccacaacacaccggccctggcctgggaggggccgtctgccaggggaacaagtacagttgtgatctggggcgctcagcgcctccagtataaagga

SEQ ID NO: 80974 - DNA, 122 bp, Homo sapiens
aatttttcttgaaacatacacttaaatcagtcatgctttctgtctaatggatgaggaaaccggagcctgggaaggttcaagagctcagagctaggaggagagaggcccaggactctgcctca

SEQ ID NO: 80975 - DNA, 122 bp, Homo sapiens
ctccctcattcagcttgttgatcagcttcaccttagttaaagcattcatctccgcgggctcgcgctcaacgttcaagtatcagtgccggggcgaggcagcccccgtgtgatacttcgtggcg

SEQ ID NO: 80976 - DNA, 122 bp, Homo sapiens
ttaagcagttaagggcttcctcctggcacagtttgagcaacttgaaacagcacaaagctgcgtggttagaacaactttgagaaaaatgtctgtgtttcttttaaaaaaaaccttggcaacta

SEQ ID NO: 80977 - DNA, 122 bp, Homo sapiens
ttggttactgaattattacaatttctatagcagattttagagtataaaattatagtgtagcgttgaacaactctagtatctattgagtaggcagaaggtgtttaaatggaattgaattgagc

SEQ ID NO: 80978 - DNA, 122 bp, Homo sapiens
gtcagcatgaatagtgctaaggagtcaagccaagacttgcttcagaagagagctgatgtgcggaccttctgcatttccacgcggggatccagtgcttgggtctaaaccccagcgccctgcca

SEQ ID NO: 80979 - DNA, 122 bp, Homo sapiens
agctgagggacaccaaaacctgccttgtcacgtccccgccctgggttcccatggttgagtcgctctcactcacaagctgtgtggcttggggcaagggcttaacttgccaggcctctctttcc

SEQ ID NO: 80980 - DNA, 122 bp, Homo sapiens
ggggacaaagcccgagagaagccgatcctcttccaggataagaagggtgaggtcatcatccgggtccttgtacagtggcacctcagactgattcactgcagtcagtatgttacagaaatcag

SEQ ID NO: 80981 - DNA, 122 bp, Homo sapiens
ggatactgactctagcttctttgcccctcctcagctcagagcgcaacacaggcacttcctcggcccgccccccgcctcgccgagctatttgtcgctggtaattgtggcattggagctgggct

SEQ ID NO: 80982 - DNA, 122 bp, Homo sapiens
gtccccccactccgggtccggctgaatctccatcctccctgtgcggctcctgcaccccggcgaacctggctctctctgtgcctcagtttactcctgaggtccgctgagcaggaagtgcagcc

SEQ ID NO: 80983 - DNA, 122 bp, Homo sapiens
agatctgtacgcgcgtggctcctcattcctcttccttggcttcccaagcccccagggcgtcgccaggaggaggtctgtgattacaaaccccttctgaaaactccccaggaagcctccccttt

SEQ ID NO: 80984 - DNA, 122 bp, Homo sapiens
ggcacaggtgctaagcctcttactgctcggggcttgcggattagggggccgctccgagtgcggagcccgccgagcccacgcccacccggaactcgcgctgggcccgcaagcgccgcgcgcag

SEQ ID NO: 80985 - DNA, 122 bp, Homo sapiens
cctcccaaagtgctggaattacaggcgtgagccaccgcgcccggccgaccactactcactcggtggtatatattcttcagatcagctgaaggcacacacacgcatcgtaacaagtactttaa

SEQ ID NO: 80986 - DNA, 122 bp, Homo sapiens
agtgccagacagtgggtgcaggtcagtgggtgcgcccaccatgcacgagctgaagcagggcgaggcattgcctcactcgggaagcgcaaggggtcagggagttacctttcctagtcaaagaa

SEQ ID NO: 80987 - DNA, 122 bp, Homo sapiens
aaagagcctttcagcacaaatagatactttctttacagtgtaaagaatctgcaccctttccgccccctcacaaatgtctgcatattttcatatcaatgaaaaagacatcagatcatctctag

SEQ ID NO: 80988 - DNA, 122 bp, Homo sapiens
aggctcggtgcaaaacccatcttctaaagggcagctggcctcttctagcggggcagagatcgttcagctttgacccctttgtaattatggcaggagtccagggccccacaccagccacccta

SEQ ID NO: 80989 - DNA, 122 bp, Homo sapiens
cagggaggggaagggaggggaggagaggagaggagaggaaccgtcatggggccttggagtcgagtcagggttgccaaatgccagatgctggtcacctgcttctttatcttggtaacaggcag

SEQ ID NO: 80990 - DNA, 122 bp, Homo sapiens
gagcagttcatctccatgtctgtcataaaacgtgttttagtttacagagaatgacatatacgcacacacaaagcaagttgtgtactgaaaaaagcaaacaaatgaacttaatcccacataaa

SEQ ID NO: 80991 - DNA, 122 bp, Homo sapiens
gtgagaaatttaggaagtcagaaagctgctcactccattccactgtgagagggcttgtcacgcttgggtgctccacttggcaggtgtaaacctctccacttcgaggaactgtttccagcatc

SEQ ID NO: 80992 - DNA, 122 bp, Homo sapiens
gacctagaaaagctgagaaattcacataaatgaaaacacaggggcttacaaaattgctttcggccctctcccttagaagcatatctggcacttggtaactggctggatggaatgtgggtact

SEQ ID NO: 80993 - DNA, 122 bp, Homo sapiens
ccgctcgcaccctcgcccgcgctcctgggagccggcccggctctcactctctcggcgagccggacgcttcggttcaggctctttcagcgctcatggcgcatcctccgccagaaatacgcacg

SEQ ID NO: 80994 - DNA, 122 bp, Homo sapiens
tgtttaaagaattcgtcctcttgccctcaatgccccatcggctccctaattagcagcgcgcggcgcgattacacattctctgcagctcgctgggtccggcccccgcaatgagtgtttgtgga

SEQ ID NO: 80995 - DNA, 122 bp, Homo sapiens
aaagagaagaaaggggcattgagacccccttttcttttcatttcagcaggagcagcgtagcgtgcgcacacgcacacacgcccttcttctaaaacaggtggtttaggcaaaaggctactgac

SEQ ID NO: 80996 - DNA, 122 bp, Homo sapiens
ttccgctgacccgtgcagttggtggccaagctggagacccaggatctccctgaggccgcgcgaggtcttctgggagtcctactcaccacatccgctactcggaatccaagctttaagtggca

SEQ ID NO: 80997 - DNA, 122 bp, Homo sapiens
tgccctggggaccagaggacgagcggaggaagtgtcttgggcggcaaacatcccactccccgcgccggtccgcgcagcccgcgggaacgcccctgggcttgcgggaggggctggagcgcgtc

SEQ ID NO: 80998 - DNA, 122 bp, Homo sapiens
tgaacattttaatccagattttctttgttaactctgctctctggccctttcactcagccccgtttgcacctaaatatgacttacaaaagaaacacagcatttatgtgtacttatttcaactt

SEQ ID NO: 80999 - DNA, 122 bp, Homo sapiens
tcctcctcctactcgcgccgggccggggctgcgcccggggccgcgcgggggaggggcgcgcgcagtgcgcaggatccccaagcaccgccccccgcccgcgcacctgttcgtcccccggccgc

SEQ ID NO: 81000 - DNA, 122 bp, Homo sapiens
agctgcagggctgagatttgctcccagtcctgtctgacctcaaaatcccctgctcttgatcgtgaggccacactccctcagcctggtgagcctgtgggcccagctgctctaggggtaacgca

SEQ ID NO: 81001 - DNA, 122 bp, Homo sapiens
tgcacattcctggggttgggacgggtgtgcacaggtgtgtgtccagcactccagagtccacggttgatgtggggctcccccctgggctgcacgttcccgggactgggacgggtgtgcatagg

SEQ ID NO: 81002 - DNA, 122 bp, Homo sapiens
ccttctctaggcaccggttcaattgccgacccctccccccaacttctcggggactgtgggcgatgtgcgctctgcccactgacgggcaccggagcctcacgcatgctcttctccacctcagt

SEQ ID NO: 81003 - DNA, 122 bp, Homo sapiens
cgtccttgctcacggatgttcttatgcgccaggttgcaggccccgctcttggcgatgaagcgggctttggggaggcggtctcggatgcgcggcttgcgcaggttctctgcggcgatgcgcgc

SEQ ID NO: 81004 - DNA, 122 bp, Homo sapiens
gccttagtctgggtgaagccgagcagcgggcacgcgcacaggccaggtgcacaggacggccgctggtccagcactcgctcagcaccactggccgaatcccggactcgggcgccggccccctc

SEQ ID NO: 81005 - DNA, 122 bp, Homo sapiens
gggccgagttcttaaagtttcggaagagcttccagatgtcgaacacctcccagccagatccgtccaggcctggcacggagcgcacatccagcaaggaggccggctgccggccgctggggcag

SEQ ID NO: 81006 - DNA, 122 bp, Homo sapiens
ctcgcgcccctgtacccggggcgtgcagggaagtgtaagaagggggcgaagggcgagaaacgctgaattctagcctgaattggtaggagagcctcgcaagctgagtcacggttcctgattcc

SEQ ID NO: 81007 - DNA, 122 bp, Homo sapiens
aaccccaggtccatgtgtccaaatccccgtagccagggcggcggccagccaaagaaatgccgccccgagcaggcgcgtgcggctcctggcattctgggtttcatacccgtagggctcgggtg

SEQ ID NO: 81008 - DNA, 122 bp, Homo sapiens
gcacatcacggcgcccgtgacagagccagcttaacggattaataagcgcagccaggtacccgcgcgaggcacttgctggcaatggcgggaggcggacgtggggggtcatgcaataggtactg

SEQ ID NO: 81009 - DNA, 122 bp, Homo sapiens
ttcaagcgattcccctgtctcagcctcccgagtagctgggactacaggtgtatgccaccacgcccggctaattttgttgtgtgtattttagtagagacggggtttcagcatgtcggccagga

SEQ ID NO: 81010 - DNA, 122 bp, Homo sapiens
acatcgccgggtcacagagaccaccgaggccggctctgcctggggaccactggcccacaacgacagtactgtgctcacctgctcatctcgaaggcctgcgacaggcaggtgtccaggttgag

SEQ ID NO: 81011 - DNA, 122 bp, Homo sapiens
gggcgcgggcgccgcgcagatggcctgggcgagccaggtctgaggccccgctccccgaaacgtgaccatgtggattcaacagcttttaggactcaggtgagcgacccggccggcgccgggtg

SEQ ID NO: 81012 - DNA, 122 bp, Homo sapiens
tcttagcgccgcgccacctcaacaacaactttatagacaggcgcagccacagggcggagccgcgggcctcagcggccgcagcggccgcgctgtggggcggggccggcaggggaaggggcggg

SEQ ID NO: 81013 - DNA, 122 bp, Homo sapiens
gcttgcaattttccagcattctgggtactatgaagggaagccagcatagggttaaacattcgccatggaaaatcctctacagaacttgcaatctgcttctaatcattgccctgctctgtgac

SEQ ID NO: 81014 - DNA, 122 bp, Homo sapiens
tgtgtaggttctttcccgtgaggtgcaggtcaggctcttcagcccctttaggaccaccaacgtgcctggtccccacgactcgcggctgcctcctctcgggccggggcagggaggagccgcta

SEQ ID NO: 81015 - DNA, 122 bp, Homo sapiens
tggcccagacctctgtattggaaaggtctttatggaccagggagtccggtgtcttttttacgggggacccctgggctgcgagttgcacagtccaattcgctgttgttagggcctcagtttcc

SEQ ID NO: 81016 - DNA, 122 bp, Homo sapiens
gcaagaaagtagcagaaagtgaggctggcaggcggcggcaaaggagccggcgcgcggcggcggcaggaagtctgtgcccgagaacagcagaaataagagccagggagggaccgcggccgcgg

SEQ ID NO: 81017 - DNA, 122 bp, Homo sapiens
agagaaagcaattcattctgcctgaggttgcagaaggaaaagcatccaaaacgtgacatccgagctgggccttgaagaatgctagagctgacccaccaaggcctggttctaaagtgtcttcg

SEQ ID NO: 81018 - DNA, 122 bp, Homo sapiens
atctatcacataactgctaaaaacatcaacaactcttttgtgtattaatgatgattgctacgttcactgaatgttgaggaggtgccagtatcaagctgagcattttaattgtaatatttcgt

SEQ ID NO: 81019 - DNA, 122 bp, Homo sapiens
caagcaagcgaccacaggggaccggtcccggggctggatgtggctcatgtccgaagcgcacggagccgagccggtgttgctcagggaggctgcccgccccttcacgcagaccctgcggctct

SEQ ID NO: 81020 - DNA, 122 bp, Homo sapiens
caatcaagggcgagtcagccgggctcgggcggagagaggagctgctacgccacagcccagcggcggccattcgcggaaaaagaggcagagcctgtgccagctacagcctcctccgagccacc

SEQ ID NO: 81021 - DNA, 122 bp, Homo sapiens
catgcccagaaggaaagttactgcctagcatcaagactgcacttcacagggcaggcggcccgggctgaccttcagttcacagatcctttcccctgcgttgggcagcagtgcaggctcgctgc

SEQ ID NO: 81022 - DNA, 122 bp, Homo sapiens
cgcaaagacagagcctgtgactgcagacccacacacccacactcccacactgggcttactcgtccaggtaacactttggtttgcagcactcccaaatctgcacgtgcctctcacaacacaac

SEQ ID NO: 81023 - DNA, 122 bp, Homo sapiens
agatggtttcagtcactatgtaaatgagccacatggtttttacatttggaaagttcccttcgggttgatacaaaaaagcagggcctgaatgacagtcattcctcttaggaatggagtccaag

SEQ ID NO: 81024 - DNA, 122 bp, Homo sapiens
taagtggaccgtaggctcaatgtgggcggggtctttgcctacacggttcaccattgcacccgtcatgcgtggagtgtggtatgtgctcaataaatcttgttgaatgaatgaatgaatgaata

SEQ ID NO: 81025 - DNA, 122 bp, Homo sapiens
ggggagatgttggtcaaaaggtgcagagcttcagttacaagaggaatacattccagggatcgaatgtacagcatgctgactacagttagcaacattgtattgtatacttgaaatgtattgag

SEQ ID NO: 81026 - DNA, 122 bp, Homo sapiens
ggaagcctccagccacatgtggctatagagtgctcagaatgtggctggagcaatgaggatcggatgcactcgttgtatttaattttaattcacgtcagtttaaggctaagtagcacctgcgg

SEQ ID NO: 81027 - DNA, 122 bp, Homo sapiens
cctgcgccctgggctcactcgctggggctgccggaggacgcgctccttcaggacccgctgcggccaccaggtggagcctctttatcatcttccgcacccgagccccgggctcactcgctggg

SEQ ID NO: 81028 - DNA, 122 bp, Homo sapiens
aggaaccgctgtctatctctatgcctcctcatatcagtggctggaagctgctggcaatctcgtgagagccccgccttgtccccgccttctgttattctaaggcctcagtgattggcctacag

SEQ ID NO: 81029 - DNA, 122 bp, Homo sapiens
cagccctgagatgtcccccagagcgggcgtagggtaccacctgccaggagaggggagcagcggggtcacagttcagggatgcccccacccatctacaggttttgcaggaatcacacatagtt

SEQ ID NO: 81030 - DNA, 122 bp, Homo sapiens
gaggctggaaagggcgtggggagtgcctgcttcctgggcacaggattttcctctggcgggcggtgaaagtgtttggggatgagctccacgtggtgcctgcacaacattgcaaaggtactaga

SEQ ID NO: 81031 - DNA, 122 bp, Homo sapiens
gaggctcggaggggacaaggaaggtactcgaggtcacgcggctcctccggcgggcgggaacgcaggacgcggagttggggcgcgggctgtgcgcgcccaggttcgcggctcccggggctcgg

SEQ ID NO: 81032 - DNA, 122 bp, Homo sapiens
tccctgacacagaaacattccaagctctctccaataaatactgttagtctgggccagacgcggtggctcacgcctgtaatcccagcactttgggaggtggaggcaggcggatcatgaggtca

SEQ ID NO: 81033 - DNA, 122 bp, Homo sapiens
cccttccgcacctctctcttcgacgctctcccgcgtctcccgggccctctactcaccctgcgaccaggatgataacgcgaagcgggtccccagccacagtgatcaagaaaagcgcgaaggcc

SEQ ID NO: 81034 - DNA, 122 bp, Homo sapiens
ggcatagctgcctccctattgtcaaggattttgagcagatcagatttgaggaccttttttcgataggtctatatttttcttacagccactccccattttaagcgcatcgtgagtaggctttt

SEQ ID NO: 81035 - DNA, 122 bp, Homo sapiens
gttcaccaaaactctactccctaaaaggaagagccctctcagacccccaggccacaagcccgcctcccctgctgtcttgctgggaatcacagggaagtgaggggcaccgagtgaagtttcct

SEQ ID NO: 81036 - DNA, 122 bp, Homo sapiens
aggatcgagagcacggggtagagagagggctggcgatggacaccatctttagggtaattgcgaaattaggggaagggctgaaatacggaaggctcgccgaagatctctaggtagttaataac

SEQ ID NO: 81037 - DNA, 122 bp, Homo sapiens
ctcgcctgcgcctctttttttaaaaaaagcgtgggcgtgccttgcgcaggcgcagtactgcgcgagccttagccgcgcaggctcagcgaagggaggctggcggatctgctaccttttgcggt

SEQ ID NO: 81038 - DNA, 122 bp, Homo sapiens
tgatctttgaaaaacccctaacatataaaccttcaatgagattgatttcagtaataactccgtctcttgtgtgatatggctggcttcatgtcaattaaatgctttcctcactgcaatgccat

SEQ ID NO: 81039 - DNA, 122 bp, Homo sapiens
cagtcacatcctctcctaaccctaaaccccacccaggcacccaccccttccctaggcgggcgggaggacgggcagttggtggttctcaccccgcctgccccggctcttcctgtagctctgag

SEQ ID NO: 81040 - DNA, 122 bp, Homo sapiens
gcagagatggggtctgctgcagagatgggagtgagtcagggagtgaatcacaagctcttccgtggctcagctgacatttcaaaagccctgagcagagaagcccccctcattccaagagagcc

SEQ ID NO: 81041 - DNA, 122 bp, Homo sapiens
tgcgggcactttcttcctgtagggcgctgtttcgtcgcgaaatatattctttgtgtggttcgctcactcgtgcctggttctccgagagcgcagcgcgggctttattctcagggggtgtggcg

SEQ ID NO: 81042 - DNA, 122 bp, Homo sapiens
ttgtcacggtcggtgaagtggtccatgaagatgctgccggcgtcggccacctctgcatagcgcctgaccacgcgatccaggagtcgctgcgaagggcagcgcaggagcgggctggccaggcc

SEQ ID NO: 81043 - DNA, 122 bp, Homo sapiens
gtgagtgcggcgcgggaaggggtggcgggccgagaccggggaccggaaggggcggcccagcgaggactagccctggcaggaggaggggtggctccccggccccatcctcctggatccaggct

SEQ ID NO: 81044 - DNA, 122 bp, Homo sapiens
cggctgaaatccctgggaagggaatgaatgaaactgccgtgaagcaacgcctggcggggccgggcttctggcagctcctggggccagcacgtcccttccagagcgtctgaagccctgggcgg

SEQ ID NO: 81045 - DNA, 122 bp, Homo sapiens
taaacacattaggaaaatgaaacccagaagtttccttctttttgccaaagccaatgctgacgccagaattaacaaccaggtctgcttaacactatagcctgtatcatttatgaacatcaaat

SEQ ID NO: 81046 - DNA, 122 bp, Homo sapiens
tagagctctttcccttcggcgtgccactgaagatcctggtgtcaccatgggccgccgccgcgcccgttgttaccggtattgtgaaaacaagccgtatccaaagtcttgcttctgctgaggtg

SEQ ID NO: 81047 - DNA, 122 bp, Homo sapiens
agaaggcttggcctcagttttggcctcgcctttttgctctttctaacgagcacgaaggggcgatagggacgcggaggacacctttattcttggctggttctagcatgctgcttcatgtcccc

SEQ ID NO: 81048 - DNA, 122 bp, Homo sapiens
cgcgggaggtgagaagcggacgtgctttctgattggctgaggagtccgtggccgttggggcgggaaaaagctgtggagggttcgaggctgtggtggtaattgggttttcctcagacttgagg

SEQ ID NO: 81049 - DNA, 122 bp, Homo sapiens
cccaacacacacacagcccgtcgtcagtgggaatggagccgacgcactccttccctagaccgtcgagccaatcttggaatgtttgtagtaggctgaaaatacagaaactttaagctattttt

SEQ ID NO: 81050 - DNA, 122 bp, Homo sapiens
cacacttcaacatggccgtacttgacagggctgagtcactactgccctctttaggcaggacgtgcctccgtagcttgccataatcgtcaccactctctactacccagccttctgtgctcact

SEQ ID NO: 81051 - DNA, 122 bp, Homo sapiens
gtggcggggagccggggctaggacggtgtgtggggtccgaacggaactcccaggctgtagcgaaagcgtgacagggccggaccctgaagctgaatgaccgctaagtggccctcacgcctcgg

SEQ ID NO: 81052 - DNA, 122 bp, Homo sapiens
ggtgagaaaggtaatctggggcaatccactgccaggtgaaatctggggaccccaggtccgcgtggagggtgtcggggaggagaaggggagtgcgatggggccgatatttcgggggagagcgg

SEQ ID NO: 81053 - DNA, 122 bp, Homo sapiens
gcatgctcaggaaagccaggtcctggctgtgccggaggccctgctccagcagcttctgcacggcctcaggggtgcgtccgctggcccgcagcagacggggcagggtggcatgtggggcgggt

SEQ ID NO: 81054 - DNA, 122 bp, Homo sapiens
ccttccaggccctggacattcttccacacgaggcgactctcccccttgtctccatgtcagcgagcattacacacgcagccttctgagcatgccaagaaggtactgaaccgcatgtgacccca

SEQ ID NO: 81055 - DNA, 122 bp, Homo sapiens
cgttggggtagctgctctcactcttcccagcccagacacagatcaaggacgtggtggaggcggaggtggagatggaaggaggggagggcagagtgaggagatggaaggaggggcggagtggg

SEQ ID NO: 81056 - DNA, 122 bp, Homo sapiens
tggatacatttgctgtatattcattcaaaacaatactagccaattattaaaatgttccaacgattgatatagccacgaatgtggaggaatttaaaatctttttctcaatgagagaagactta

SEQ ID NO: 81057 - DNA, 122 bp, Homo sapiens
gggaggcaggaaatgggatggcagctggaaccccagctaaggggtgggtagaggcttctccgctggtcgcagggactcagctgaggccttttctgcacggctctaacccaagttgcgaatgt

SEQ ID NO: 81058 - DNA, 122 bp, Homo sapiens
cggggggagaggacgcccctgccctggccgcacagggttgggttagaggtgagctggggccggagaagccacgggagccatgtggcgccttctcaggaggtgctcccgcagcttcgcctcct

SEQ ID NO: 81059 - DNA, 122 bp, Homo sapiens
acagacacgggagggaaaaagcaggaaaacgcctgtgtcggggagagggcagccccctcccgtccccgcaggcagcctgattgggccccccgctccctgctctgagcacagcccacccctca

SEQ ID NO: 81060 - DNA, 122 bp, Homo sapiens
agcggctgcagctgccgctgaggggaatcagccattttaagcagcaagcatttgttcaggcgctggcccgccccgtgccgcagaccctgcggccccggcccgggactgcagccgggcaaggg

SEQ ID NO: 81061 - DNA, 122 bp, Homo sapiens
tctcaaccttctggactcaagccatcctcccacctcagccttctgagtagctgggattaccggagtgagtcaccatgcccagctaattattgtattttacgtacaggcggggtttcaccatg

SEQ ID NO: 81062 - DNA, 122 bp, Homo sapiens
ggccgcttgtccctctgctcaggttttatatagcccgcgggcattccctccgcgccaccccgcaggaatgtcgctgcccttctcgagccatatttgggtgttgggcactagagccccctccc

SEQ ID NO: 81063 - DNA, 122 bp, Homo sapiens
tgggactgcctttccctctcctcagcccgtcctcctccaacccgcgctcctttgccctgccgggccccaggatggcaggccacctgactctcacctctgtgcccccacgcctctgtgatctg

SEQ ID NO: 81064 - DNA, 122 bp, Homo sapiens
agctgaacagcgaagtccaagattacccaactggttattactagaggcaggattaaaccccggtgcctttccaacgtgatgaaaccggtggaagaggaaaacgcattcattcactagggaaa

SEQ ID NO: 81065 - DNA, 122 bp, Homo sapiens
tgctgtcaaccagcagagcaaggcggtgatccgagaagctaaagctcagccggttgcgggcgcccagcaggaggacagaaggcagactttcgggccgctcctggagtgcccggccctgtccc

SEQ ID NO: 81066 - DNA, 122 bp, Homo sapiens
tggctggctgcccctttctacccactgcctgagccacgtccaactcccaggctgcctctgcgatcactgggagacaggaatgctccaatgacacccagcagcaagctggctggctccctccc

SEQ ID NO: 81067 - DNA, 122 bp, Homo sapiens
tggagtgaagcggcttccttgcggttgtgtgggtgtcccaacctgggtcgagataccccgcggttcaaaggctcccccgcagtgctttttaaattgacatatgcagtgataacctgctttag

SEQ ID NO: 81068 - DNA, 122 bp, Homo sapiens
actaccttctacacagcacttgggcgtctcctcatggtggatttaggtaccgtaagaaatcgtagtggctcatgaagtcatctggcactcttctaaatttttatttgaggactgaaaactag

SEQ ID NO: 81069 - DNA, 122 bp, Homo sapiens
tcctacatagctagcattttcagttggttaaattcctatttatttcatggattagtcatacgtaccaacagtgagggtgcttcttagcacaacggaaagtcgttgctggaggaaacattgtg

SEQ ID NO: 81070 - DNA, 122 bp, Homo sapiens
gccagtgttcacacccctgtgcgttcccctccccttcagtgcaggctgcacctggtgactcggtctaacaaatagaaaatggcagaagtgatgggatgtcacatctgaaattagacagtaaa

SEQ ID NO: 81071 - DNA, 122 bp, Homo sapiens
gattgggacttccgcttccggcggcaaaccatacttccggtttgtcgttgctataggaaccgctacggcgtttgaaagtgtccgggttgcttaggatccctacaggtagcgcctctggatac

SEQ ID NO: 81072 - DNA, 122 bp, Homo sapiens
tgccgcgcctgtagaaccttacaagacaacattctagttaatgtacttcagagttacagccgtggcgcttcccggccacacagcccccaggagcagggccctgaccacattcccacccccac

SEQ ID NO: 81073 - DNA, 122 bp, Homo sapiens
ggattttcctgaagcaacctaaaggtgaccctagagcacacctacgaatctgggtttgcacggcactgagctccgtgccggctcccgtatctctaccctcaagaaacacaggtattgtgtgt

SEQ ID NO: 81074 - DNA, 122 bp, Homo sapiens
aaatcgggtcactcccgccggaatactgcgcttttccgacgggcttaaaaaacggcgcaccgcgagattatatcccgcacctggctcggagtgtcctatgcccacggagtctcgctgattgc

SEQ ID NO: 81075 - DNA, 122 bp, Homo sapiens
ttccatggcaaactccagagaattaagaagccaaactcaacatcgccatgggcctcaggacgactaaacagatggggagaggcactaaagctcctggtcaccaagagggtatgtaggcattt

SEQ ID NO: 81076 - DNA, 122 bp, Homo sapiens
gctggaaactggatcccttttaaaccagccgccaccacagctcggctcacccaccagcgccgtccgtgaaggctctctctggccctcacggtcagccaggctgccggtcacaccgaaggggt

SEQ ID NO: 81077 - DNA, 122 bp, Homo sapiens
ttcacactgtcccacacagttaacacattattatatacttctcatcgccaaagagtgggtcggctgttagctcctgtgcgttcttaaagtttcatctcggccttgagttagaccctcaggaa

SEQ ID NO: 81078 - DNA, 122 bp, Homo sapiens
agcaggaagcgctcactggctctgaggacagagacatgggccctgctggctgtgccttcacgctgctccttctgctggggatctcaggtgagcgccagggtggggttgagaaggcagaggca

SEQ ID NO: 81079 - DNA, 122 bp, Homo sapiens
gttgttttttgagacaaggtctcattctgtcactcaggttggagcatggtggcgcaatcacgaatcactgcaaccttgacctcccgggctcaaggcattctcccatctcagcctcccgagca

SEQ ID NO: 81080 - DNA, 122 bp, Homo sapiens
ttagaacatcccaattatcaattgcacttttaaagggcagaatggtagaaatgaatggaacggaaaggccaagttcaagggcaaggacacccatttgcccaagggcctcattttgagctgag

SEQ ID NO: 81081 - DNA, 122 bp, Homo sapiens
ggaggcctgcaggaaacaacagccaggcgcaaggctttgggagttgaagcatagcttctgcgagatagaaacaaggttgacatgggcactcgtgcagaatgacgggctccttttggactccc

SEQ ID NO: 81082 - DNA, 122 bp, Homo sapiens
accactcgccgtcgcgtgggcagggggatgcgcggcctgagtcggggaggctacgtgaaccgcgctctatccaggagtcacggcggccggccccagggccgggggtgggggcgggggcaggg

SEQ ID NO: 81083 - DNA, 122 bp, Homo sapiens
gggtctccacacggaggctccaagatgaccacccacattcagtgtgtatccgcagggaaccgggccgtggaagactgcctctgtttgcatttgaccacacacacacacacacacacacacac

SEQ ID NO: 81084 - DNA, 122 bp, Homo sapiens
ccctgctccagccctgctccagccgtgctcccctcgctagccctcagtcgaaagcctcctcgcttcggctcagctcaaactcgatttggggctccacccaccgcaagcgaagccccgcccct

SEQ ID NO: 81085 - DNA, 122 bp, Homo sapiens
tgacactttcacagtcatatatggatgcacgtagaatagtgaaaaagttgagtcacccaacgtgcacatttccagccaagggcaaacaggaggacacgctgctttctggtttcagctcttgt

SEQ ID NO: 81086 - DNA, 122 bp, Homo sapiens
cgatagacaggctaggctctttggaggagcacgtgatgttgcgttttttgtttgcgggttcgggaaccgctgatactgatagcttctgagggagctgcagggatttcccgatttcctgagtg

SEQ ID NO: 81087 - DNA, 122 bp, Homo sapiens
atgctcattcccagttatgaaacagggtacaggcaaaaccactctgcctaacagtcaccccgacggccgacggcgaggaattgtggagggggcgggggagaattgctcagaacttggaaagc

SEQ ID NO: 81088 - DNA, 122 bp, Homo sapiens
cattgtgtttgcaggattgcagtgctcccaaggaaatgaataaactgccagccaacagcccggaggcggcggcggcgcagggccacccggatggcccatgcgctcccaggacgagcccggag

SEQ ID NO: 81089 - DNA, 122 bp, Homo sapiens
ctccactgaagcagaatctcaaagtctgtgaaaacccaacaagttattcaggtctgcgtccgagcgggctctagtttagcagcaccgggttttcgtttatcttgcgtaattagaggcaaaca

SEQ ID NO: 81090 - DNA, 122 bp, Homo sapiens
aatgtggagccaacaattgtccaaaacacaaagtacttccttaagaacaggtctctggctcgggcctttgcttcatgagaactgcacccaactccacacctgtttaaaaatgaagcccaccc

SEQ ID NO: 81091 - DNA, 122 bp, Homo sapiens
gtgtcgccgcagaggggcatgaggacagtgctgggcacggcggctgtgggcagtgtgggccgacagaatccccaggccaggtcaggtgtcccggccatccatggagaacaaggagtcattac

SEQ ID NO: 81092 - DNA, 122 bp, Homo sapiens
ctggtgcagcgggacatccaggccttcctgaaccagtgcggggccagccctggggaggcgcgccactggctcacgcagttccagacctgccatcactccgcggacaagcccttcgccgtcat

SEQ ID NO: 81093 - DNA, 122 bp, Homo sapiens
gaaaggggaccgtctctgtctcaaggcagaatagagaagtggcaggaagggctaatgtcacggaggaacctggtgccccaggcctattctcagcaccgtctacccgctgccccatgaggcgg

SEQ ID NO: 81094 - DNA, 122 bp, Homo sapiens
atggaaaagaagtgatggctctgtggaccagagaacgggtgctaattatgacttcacactcggcaagttcaggctgatctgttatttctcagttacagttagcaaactttaaaaacttaaca

SEQ ID NO: 81095 - DNA, 122 bp, Homo sapiens
tggctacgccaggaagccaggccaagaatgccgcgaaattcccttcttcaaatttttttacgtgcctacattgcaaatacaataccactgtattaattaattgcaacattctggaatgaaca

SEQ ID NO: 81096 - DNA, 122 bp, Homo sapiens
ctaggactgtgacaaagacaccgtccacatgcctactaggtcagtcacctacaaagctggcgaatgaggaaaagagggaaggcagggctacgctgggaaagctctttgtcccctatccacgc

SEQ ID NO: 81097 - DNA, 122 bp, Homo sapiens
cttggctgggcctaaactcaatccgtggtctggtacaggtttcagggcaaagcggccatgcgttccgggggccgcgggcgaccccgcctgcggctgggggaacgtggcctcatggagccact

SEQ ID NO: 81098 - DNA, 122 bp, Homo sapiens
tgctgcattgaggcatgaccggagagctggcacgcgtgtatttctcagagccctctgaagcgtgggctgagatggatgagcgcagacacacagcctggggctgcccggcggtggcggcggat

SEQ ID NO: 81099 - DNA, 122 bp, Homo sapiens
tcccagctataccatgggccgcactcgggaagctggctgcgtggccgctggtgtggttatcggggctggtgcctgctactgtgtatacagactggcttggggaagagacgagaacgagaaaa

SEQ ID NO: 81100 - DNA, 122 bp, Homo sapiens
gcagtcttgaaatagaagcagcagcctcagctacctgggcaccctgacagtcagagacaccgcacaggggcctctgcgacaggcatgcaggcagaccctgcaaggtgaagccgcacagatgc

SEQ ID NO: 81101 - DNA, 122 bp, Homo sapiens
agcagcagtcgctctgttcttgtgatcatggctgagtgggatccagtgtgagtctccacccggcctgttacccagttccagctgcagggcctgggcgcccttttccgcctgggcagcagtga

SEQ ID NO: 81102 - DNA, 122 bp, Homo sapiens
agccaatcagaacccacctgcagacggacctcggttccaagccacattgtgggtggtcagcgggggagggcaggtggaggatgtggaggaatcggccacgtggccaccaggcaagccattgg

SEQ ID NO: 81103 - DNA, 122 bp, Homo sapiens
gttgtgtttttccacctcccggccgtccctcccatccgggtgagtcctcgtgggtcctcccggaggcgccccctagtcccaggctctgcacgccctggccccgccccttgactcggccccgc

SEQ ID NO: 81104 - DNA, 122 bp, Homo sapiens
cataattagaagcagaagaacaaaatgccacgtaaccaaagcatcagagccatcattgcacgtgtctttttttcttttttcttttttttttttcaagacagggtctcgctcttttgcccagg

SEQ ID NO: 81105 - DNA, 122 bp, Homo sapiens
gagaccatagtaggtcttgatgggacggccccggggtccttgggggttgcagaatcctggcgtgacctttacaaatctcttctcccccacgttgcccagaaccggaaggaaaaggacgggat

SEQ ID NO: 81106 - DNA, 122 bp, Homo sapiens
accccacccgggcccgtccgaccccaccccgggttcctcactccccacccctactactcgcgcccaggtccgctacctggaagttgctggagtacaccaaccccttgatagagccctggcgg

SEQ ID NO: 81107 - DNA, 122 bp, Homo sapiens
tccggcagctgcccggaacccgtgtctttttctggggcacccaggaacagcagggccagacggagagagagcagcctccagccaggcacagggtcccgagctgccaccgacaccgagggagc

SEQ ID NO: 81108 - DNA, 122 bp, Homo sapiens
gcctcaggcagagccatctggacaactctgccaggcaggggcatcctgtctgccgtggcacgggccaagaaatggggtcatggcacccagccccaaaggttggccaagtgttggcatgggcc

SEQ ID NO: 81109 - DNA, 122 bp, Homo sapiens
ttaaagcagctctgcattcagcccactgcagtaccctccccccagcacattctgggaacccgagtgccattctgggttggccacatggccctttcttatgtgggagcatctaagtcaggctt

SEQ ID NO: 81110 - DNA, 122 bp, Homo sapiens
ctgtctggttctctccatccccattaccaacatcttagtccaggccagcatcatatcttgcgtgggtcacattatctacattatcaatggtttccttcccctggcctgctctgccacctgcc

SEQ ID NO: 81111 - DNA, 122 bp, Homo sapiens
aatgtccacccgtacttgcaacctgtgggtcatgcagctggtatttcctcagcccttcctcgagggcccctccatgccctccgattgcaaccccagccctggaggtggctggcatgtcctcc

SEQ ID NO: 81112 - DNA, 122 bp, Homo sapiens
cagagcttaacatgttagtaataaaagcttacctcttcggatataagtttactgtagtttcgtttgagccctgtccaagaactcaatatacatgtactggggtcctggaactcacatagcat

SEQ ID NO: 81113 - DNA, 122 bp, Homo sapiens
ctctacaaaaattagctgggtctggtggcaggcacctttagtcttagctactcaggaggccgaggtgggaggatctcctgagcccaggagttcaaggttgcagtgaactatgattgcactcc

SEQ ID NO: 81114 - DNA, 122 bp, Homo sapiens
tatgtattttcttctttccttttagttcagaggtcaacaaagtatggcctatgagccatacgctacaatagcagagttgagtggttgcaacagataccatgtggcctgcaaacctaaaatat

SEQ ID NO: 81115 - DNA, 122 bp, Homo sapiens
cccaaaccctggactgactgctttaaggtccgcaaggcgggccagggccgagacgcgagtcggatgtggtgaactgaaagaaccaataaaatcatgttcctccacccagaatgagccctgca

SEQ ID NO: 81116 - DNA, 122 bp, Homo sapiens
ccccctccagcacctgcaccaggtaccctgccagccccgcccccctcccctgctcagggccgtgcaagtcccaaccagcagggagccgccccatcgacccttggccctgccagctggccgag

SEQ ID NO: 81117 - DNA, 122 bp, Homo sapiens
gatgccagaagtctgctggatgtgcgggtgaaaaaaggaaagcgccgcgcggggaggatgcgggaaccgttccgcggagaagctacggaggaaactggctctcatgcccttggacacgcttc

SEQ ID NO: 81118 - DNA, 122 bp, Homo sapiens
ctactgtacacaaccatcaagggctgccattgtcagcctggacccagggaagtccctggacggggttgctggacttgggaatgatgcagggaggaagaggcagggcctggggccagcagaga

SEQ ID NO: 81119 - DNA, 122 bp, Homo sapiens
cggcggccaccccggaccccgccgcccggactcccgactcggaagtcgcgcccgccgctccggtcccgaccccgggaccccctgccgcagccgccacccctgggcccccagcggacgagctg

SEQ ID NO: 81120 - DNA, 122 bp, Homo sapiens
ggtagattgcttgagcccaggtgtctagggcaaggcatgatggttaccagctccttgctgcgccaacagtgccatggtacaggtgagcagcatggcaggaccaagcacgaaaagcgtgcagc

SEQ ID NO: 81121 - DNA, 122 bp, Homo sapiens
cggcctcgctgagatccagggatgctgcctggagtggccttggtccctctcccaggcctccgctttaacccaccccagactgtcaccgagcccgagtaggactccttgtgtcttcctctgct

SEQ ID NO: 81122 - DNA, 122 bp, Homo sapiens
cgacacctagcccaaaccccgtgcgatggcgaagcttcgcggagctaatagccttctcggcgacggccaccccggagccggtcccctcctgccgcaagttcagctcagaccaggacgattcc

SEQ ID NO: 81123 - DNA, 122 bp, Homo sapiens
gccactatgaagctactgcacattgaattttagaggaaagagcactttgcagacaggccccgtgcactgggaagtccacatggagcttgttccctgggctgccctagtgagcagcaggagcc

SEQ ID NO: 81124 - DNA, 122 bp, Homo sapiens
cctcaggggctgtctgtgcacatacctggccaaggctgctgttttggatttataatagaacgcctaccactaagggacacaccagcgcttcttgggggggcctaagttaagaatctgggcat

SEQ ID NO: 81125 - DNA, 122 bp, Homo sapiens
gcggcgcagcttcagggcagcgcgggctgcagcggcggcggcggttagggctgtgtagggcgaggcctcccccttcctcctcgccatcctactcctccctcctcgtcatcctcccccttcgt

SEQ ID NO: 81126 - DNA, 122 bp, Homo sapiens
aactgaacactcgttttttggcctctcagagtgctgaccgcggggcttccctgggccctccgccctacctgcggaccgagttccatcagcaccagcaccagcaccagcacacccaccagcac

SEQ ID NO: 81127 - DNA, 122 bp, Homo sapiens
agatgctcaacacaatgagttggtttgtgggtcaggcagccacctgggaatcaatatgctcgccagtaacagattacaagcagagatagcctcagtaatttgcaatggattttagagaaatg

SEQ ID NO: 81128 - DNA, 122 bp, Homo sapiens
gattttctcataggggtaaagtgccttcgggaggataggacaagtcccatcctgttcatacgaattacagctcggacttcgggcccttttacactgccttttgtatctgttaacttgcgcta

SEQ ID NO: 81129 - DNA, 122 bp, Homo sapiens
ggcgttaggatggcgggcttgtaggaagcggctcaaatcaactcctcagtcactgatgaacgcgctcacggctcgaagctaggtcctcgagtgagttaatctacttggtaagtattttgtga

SEQ ID NO: 81130 - DNA, 122 bp, Homo sapiens
acacataagatgaaaagctaatactatatctgatggacaggcaatgtggtgtgagagattcgggcaagaatcctaaatggatgctcagtctgcaccaaatcacaccgcagtcactgagtcac

SEQ ID NO: 81131 - DNA, 122 bp, Homo sapiens
accccatgggaagagacagtctttccactaccaacaggagaaaaatcctggggaaaaactcgtgccaatccctgtgatctgcagaagacctgaggaccaggtatcttacccaaaaaaggaag

SEQ ID NO: 81132 - DNA, 122 bp, Homo sapiens
tgcgggacacacagcggggagaggagggaggaggagtgaagggagagccccagactctgccgacctcagctgccagcagggccaagggcgtgatacggccgtgaacctaccctggtatgggc

SEQ ID NO: 81133 - DNA, 122 bp, Homo sapiens
atggcgtggagtgtgtgctcaggtgcacagtgaagcaaacctgaggggacttgggccctgcgtcctccagcacacacgcaccctttcgccgtcacatccggggcacccacccgtggaatatg

SEQ ID NO: 81134 - DNA, 122 bp, Homo sapiens
ttggggtggcgttttggatctgtgagcaggagccgatgaattcccccgagtgtgtgtgttcgtgtgtgtctccgtctgtgcagaaatccgagccaaccactagagctctgtgaatggggaga

SEQ ID NO: 81135 - DNA, 122 bp, Homo sapiens
ttcaccaggtttactttgtaagccgttaaataagatggggctgccaatttgccagaggcacgtgagaggtagttaggaacaattggtaggacctagagggaactaacttcgcttccttagat

SEQ ID NO: 81136 - DNA, 122 bp, Homo sapiens
gaacaccctgtgtctagctctgagccaagaaacctacagaaactactttctgggagatgacggtgagcctccgtgtggcctctgtgtggaacaagggcatgacggggccacagcagcgtggc

SEQ ID NO: 81137 - DNA, 122 bp, Homo sapiens
ctccctgcaaggtgagtcagctcccagaagccccagggcctggtccggctgtcctggccccggcctcatgccctgcactaggtggaagacaggatctccagggaacccggctgctttgggcc

SEQ ID NO: 81138 - DNA, 122 bp, Homo sapiens
aaccaatgggcgtggaggaggtgggtcggctggcggctgtcaccctccaggggacgggagcgcggagaccgggagcgcgcgagctgtcgccgcgccccgggccgagggggaggagccggggg

SEQ ID NO: 81139 - DNA, 122 bp, Homo sapiens
tagtttgttacaaaggaaatgccaattatggaaaaagtcaagccttgagctactgaaggccgagtaacctcgccaaagtttggatgagtcgcttcactaatgcacatgcaatcctgacctag

SEQ ID NO: 81140 - DNA, 122 bp, Homo sapiens
tttggttgaaaaaccagctgaaaaaactcagttgggaccaatagagacttgctctcgacccggtctaggaaaccacttattttgacttccgaggcctgtcaatctgaaggcaaaagaaaggg

SEQ ID NO: 81141 - DNA, 122 bp, Homo sapiens
aagacttcggcttggaattttgtcccccaccaacatttcttgtaataaatcaggtaacaccggctgaagtcttattggataattgtcaaactcgaagtcatatttgatgtaggactttgctc

SEQ ID NO: 81142 - DNA, 122 bp, Homo sapiens
caggagatgcagggcggttgagcttgcagctccctctgcctgaaatgctcttcccaaggccgatggcccgtccgcctttaggtctgagccctcccttccttgagatggcgtggctggccatg

SEQ ID NO: 81143 - DNA, 122 bp, Homo sapiens
gcatgcgtgagcgtgagcgcgctgggaggccggaaacaaaggtggatgcgcgtgaacagacgccctcgcaggccgccggaagcaaaggcgtgagcgcgcgtgcgtgcgtgtgcgggtgcgtg

SEQ ID NO: 81144 - DNA, 122 bp, Homo sapiens
cctctggggagcacctcatcctgggttcgaagagtgggctctgccttacagccaagacaccgggtcctgggtgtggcaggaggttcgtgacacaaattctgaatcccctttcatccccagtc

SEQ ID NO: 81145 - DNA, 122 bp, Homo sapiens
tctcagacccacgccggaggccggctcgctccgcccctccccgcccccttgtccccgccccggctcagacgccgctccccggtgcctctcggcaccggctcacgctctccaggcccacctgc

SEQ ID NO: 81146 - DNA, 122 bp, Homo sapiens
agagccctctgggcctctcctcccatacacactacactgccccttctccccccatcaaaacgctcagagacgttgtgatgatgcgactgaggattatgcaacgtggtccaaccggagcggcc

SEQ ID NO: 81147 - DNA, 122 bp, Homo sapiens
ggttggaaagctctgcttctgttttattaggctgctattgaaaagccaacagcataacttcgactaggtgctttgagatttcttaatgggctgtcaggggcaagacaccagggctgtgctat

SEQ ID NO: 81148 - DNA, 122 bp, Homo sapiens
ataaaaaaaatttttttttgagacgtagtttcactcgtcgcccaggccggagcacaatggcgcgatctcggatcattgcaacctctgcctcccgggttcaagcgattctcttgcctcagcct

SEQ ID NO: 81149 - DNA, 122 bp, Homo sapiens
tcccgagggcagggccggcccggacgcggcgccccaaacggcgggccgggcagagcccagcgccccgctcgcacccagcccgcccgggccccccactcaccggcctggcggaggcaggatcc

SEQ ID NO: 81150 - DNA, 122 bp, Homo sapiens
cactttggaggttgcacgtttaggttctggaagaggccctcagacggccctttggctcagcggtcccccgaaggtgcctgtccagcatgtcgaggggtcctgaccagcctgcccgcggggtg

SEQ ID NO: 81151 - DNA, 122 bp, Homo sapiens
gggttccccagattctggacgcacccctcaaacatgctagggctgaaaaaagtcctaccccgccccccagccacgccgccagcctccagcccagccccggaggggcctcctctccagaggct

SEQ ID NO: 81152 - DNA, 122 bp, Homo sapiens
ggccacaggcaggcagtgcagcaagtgcgggccgggagagcagccccatggagacgccagcgccttcacctgtggcaccaataacaaggccctgctagtccctccatgctgggtctgaacac

SEQ ID NO: 81153 - DNA, 122 bp, Homo sapiens
tttgggggtcccttgactgcgagaagctggtgacagctcagggccctcttcgcagagaatcgtttctgcacaccgactcagaatcgcacacgttttcaaggttctcctgggagctcctagtg

SEQ ID NO: 81154 - DNA, 122 bp, Homo sapiens
agggactccccaggtgctgccccttcccacaccagtgtccccactggacactccaaggcccgcagtgcactgcagtcctgccccttctgcacaggctggagactcccagagatcttgtttga

SEQ ID NO: 81155 - DNA, 122 bp, Homo sapiens
cgcctgtgctcaggccggcgttcagaatgtaggcctctgcgttgcaggagagcagtgccccgttcacgtcgcacccgcagactttgatggtgagggtgttggtgctactcatgggcgggatg

SEQ ID NO: 81156 - DNA, 122 bp, Homo sapiens
cctctagggatgcggatgcggatgggctgagggcgggggtcccagcagctcctacctgctcggcggctggacgggacactcccgggagacgccgaggcgccagccccgcccggaccccaccc

SEQ ID NO: 81157 - DNA, 122 bp, Homo sapiens
gcgggggcgggtccccatccgccgcttcaggcctgcgggctctgagggtcctgcccactgcggagcaggtgttgcaggaatcagtgactcaaaaaatgtcgccaagttaatattgatattac

SEQ ID NO: 81158 - DNA, 122 bp, Homo sapiens
tccgtctggccatgagaacttggttgcgctcacatgaggatcctgagcaggtaattatctcggtccagaagcaatagcttcaggcaaagagaagacgcgttccctccctgtctgtgcatctg

SEQ ID NO: 81159 - DNA, 122 bp, Homo sapiens
gcatctccgagatgagggagggctcggggacgggaaacccactctcagcccgctccacttcgccgaagaattccaaaccaccccaggctcagcagtgtggattgctccgcccagagaccgtg

SEQ ID NO: 81160 - DNA, 122 bp, Homo sapiens
gggccggaggccagctggagggaacagctccggccagagtgacaactgcagcagcagcagcgaggccaacgggacggggctggagctgctgggcggcccgtcgctgcgcagcgcctacatca

SEQ ID NO: 81161 - DNA, 122 bp, Homo sapiens
cctttttataatttccttcttcataaggactatttctccttgtacttttgtgagaattcccgtaacttgtaatcccagctacttgggaggctgaggcaggagaatcacttgaaccgggaggc

SEQ ID NO: 81162 - DNA, 122 bp, Homo sapiens
gtcactgttctaagcaccttactgatgatgtttaattccacaacaaccccatgaggtaggcgctattatcattattattgttttttttttaattgagacggagtctcgctctgtcgcccagg

SEQ ID NO: 81163 - DNA, 122 bp, Homo sapiens
agtattggcttataccctgatgagttctaaaaatgatgtaaggccaatttcttgggtatccgtaaaccccaagaatggggaattttaaagaaaaggaagaatgagaaaggaatttttcagaa

SEQ ID NO: 81164 - DNA, 122 bp, Homo sapiens
gcgcccggggaagagaaggcctgggagtcgcaggcggtggggtgcgaagccgtgcgagtgcgagaccccaagacagcgccgagtcgagcgcgccctcacactagggaacccgtctttggccc

SEQ ID NO: 81165 - DNA, 122 bp, Homo sapiens
accacaaggccgactacagctgagcctatgttcccataaccagaatggttgtgcttctgccgtaggaatgtggtctattttaatagtttgaaatgaagaagttgtccatatcaagccagaaa

SEQ ID NO: 81166 - DNA, 122 bp, Homo sapiens
gcccaggcgcggagcctctcgggggtcacccggccgccgggcccgcgggacgcacggggccgccaggggaggacaacaagcctcaggccctgtccctgcgccccgcccggcctcccccgcgg

SEQ ID NO: 81167 - DNA, 122 bp, Homo sapiens
cacacacacacggcacctgggctaggcccggacacctgtctgcagcatggataagtatgacgacctgggcctggaggccagtaaattcatcgaggacctgaacatgtatgaggcctctaagg

SEQ ID NO: 81168 - DNA, 122 bp, Homo sapiens
cattacataaaaacggtgagagcaggggcattcgcatccagctcgactttcataggaatgcgtctggcgtttcaaacactgtgaggttcactatggttttctgagttgtcattaaattcagg

SEQ ID NO: 81169 - DNA, 122 bp, Homo sapiens
gcatgtgtgctgtgtgtgtgcaggcgaccgtaaacagtgcacggacgcgtgtgtgctcaccgtgtgcgcaggcgagtgtaaacagtgcacgggtgtgtgtgctcactgtgcaggcgagtgta

SEQ ID NO: 81170 - DNA, 122 bp, Homo sapiens
gaagcccccgccgcacttggcttattagttggtggaccggaggggcaaggaggggatgcccgaatcctgcactgagtctctgaggtccttaaagaagaacaaaagtgctagtcaccgcccac

SEQ ID NO: 81171 - DNA, 122 bp, Homo sapiens
ccctctctatgtttattcaaatggatgcaccttgctctctggagacagcaagagtgcgaacggaatgtcagatcaagtagcagatgagttctcttttcctgatggatggtgctctctccctc

SEQ ID NO: 81172 - DNA, 122 bp, Homo sapiens
ggacaggatggccagccacagctggggccagtgtagccgggaaagcacacgcaacgaccacggacacagcgaccctgatcattgcagtcatctgggcaggaccccgaggctgagggtgggga

SEQ ID NO: 81173 - DNA, 122 bp, Homo sapiens
acagctgacgtgaactcgacatcggaaatataaaatcagcagggaagtgggtctgaatcacgggaaagttagttttttcaagtgccaaggacaattgaaagcacatgcttttcaatttgtcg

SEQ ID NO: 81174 - DNA, 122 bp, Homo sapiens
gagagctgatctcggggattcgggtgcggagcccttggcctggaggcgatatgggtggtccgtggcccggttcagtcgcttgcagcagcccggggaacaggtgaggccgcctgccccggtct

SEQ ID NO: 81175 - DNA, 122 bp, Homo sapiens
tttttggacatttcctgcttttcataatctgacagacaaacccttctctttcaatctttacgacatgatgtaaaatctatctgaatccggaaataccactcttaaaaatcagaaatgaccct

SEQ ID NO: 81176 - DNA, 122 bp, Homo sapiens
tcaagcctgctggctgcagccacactggctgtcagccccctgctgctggtgaccatcctgcggaaccaacggctgcgacaggagccccactacctgctcccggctaacatcctgctctcaga

SEQ ID NO: 81177 - DNA, 122 bp, Homo sapiens
tgcgcgctctgcagaaattctgcccgcctctccaggccctccttccagctcccggcagagcgggctggaagtaacggggaagagcggttatttgttggtttaatataatttgtttagtcacc

SEQ ID NO: 81178 - DNA, 122 bp, Homo sapiens
caggcgccagctccccgagcctgtccctgcagccgcgctgtgtgcaggcacgtgggccaccgcgtctcctccactggcactgctgggtctgggccgccaagcccacctgcccacctgcatcc

SEQ ID NO: 81179 - DNA, 122 bp, Homo sapiens
cctgggttcctcaggagaataatcatgtcccccgtgtctgtgggacagataatgggtgatcgacatgcactctgcaccaggagtggttagaagatccgccgagcttccttactgaaagtggc

SEQ ID NO: 81180 - DNA, 122 bp, Homo sapiens
attacatcattgaaggcctaacaccaaaagaagtccaatcagaacctttaaaatggcagccgcaatatcaacactcatccactcaccttgccaaccaccacactcacttctctcaaagcagt

SEQ ID NO: 81181 - DNA, 122 bp, Homo sapiens
cttgcttaccactcacctgccccagctacaaccctctgaaggtggcactattatcatccacgttttacataggaggaggctgagttctggagagggtgactttcccaaatctagacagctag

SEQ ID NO: 81182 - DNA, 122 bp, Homo sapiens
ccaggctgggaagaagggacagctagtaaaggaactctgcccgcctggccggcggagagccgcagagagaggacgctcacaaaagtcggtcgctacccggcccaaacgattgtggagccggc

SEQ ID NO: 81183 - DNA, 122 bp, Homo sapiens
agacgttttccgttttcttttccctcgcttaggcggcgggcgcgcacagtccagtgggagcgatgaggtgtttctaggcccccaagtcacagaaaagcaggcgattgggaacaacggaggcg

SEQ ID NO: 81184 - DNA, 122 bp, Homo sapiens
ccagtggagcacagaggcgcctccgttcctcagcatttacctgagagcagcagcagcacacgcccacacgaaccacgtacttgactcaaaactgccccgggtggaacaacccaagcgcccca

SEQ ID NO: 81185 - DNA, 122 bp, Homo sapiens
aagcaggggaccaagtccctcagacagcggattcgagaagaaagaggttttttgttcagccgggaacgtcggcagactcgcatcttaagagcccagctccctgaaggaagacagagttcctg

SEQ ID NO: 81186 - DNA, 122 bp, Homo sapiens
tctgtattctggtattcttactacttgagctcagctcattgctgtcatcttcccctaaaccgccttaaagcatcttaggtcttttccctctgatcacatgtgctactttttttttttttctt

SEQ ID NO: 81187 - DNA, 122 bp, Homo sapiens
tccacacccacaccccccgccgggcccgcttctcctgagactcagcggttggtcggctaacgggcatcttcaatgacgcagtgaagaaaagcccctgtttccccaaacccttgttctgggtt

SEQ ID NO: 81188 - DNA, 122 bp, Homo sapiens
tggctggaggttcctgaaaacagaaacaattctaatgatgcacatttttacagactgggtcgtctttgctgaggctccactaggagttgcctgggtgttttatttgctgaatcatagttttg

SEQ ID NO: 81189 - DNA, 122 bp, Homo sapiens
gatgaactcatgatcctgactcccagtggtagccagatcaatgttttggtacatactttccgatactctgctatgtgtattttttaaagtgtgaatacatggtatatcaaaatggatgtatc

SEQ ID NO: 81190 - DNA, 122 bp, Homo sapiens
cgtccacgcaccaccccccccagtcatctgcacgctcctctgtgacgtctgtcccgtccacgcaccccccccagtcatctgcacgctcctctgtgatgtctgtcctgtccacgcaacgcccc

SEQ ID NO: 81191 - DNA, 122 bp, Homo sapiens
ggcaccttgtgcgccttctcttgagacagaggctctgtaacccccctcggcatcaaacttcgcactaccctccctttgccacggcatccttccttctcgtctcccgggaggccggacagaga

SEQ ID NO: 81192 - DNA, 122 bp, Homo sapiens
ccccaagaaaccaaagaaagggagttggtggttgtggggagacacgggagagctgcacaccgtgccccttgcctggcgctgctgggcttcccacaaagccagtgaggttcatctgtccccag

SEQ ID NO: 81193 - DNA, 122 bp, Homo sapiens
aatgggtgctgctgtggtttcccacagagtgaacccacagggtgacagataggtcgcacacgcccagtctaagtcgtggctgccagccctcccagggtaaaggccgcctctccggttccgct

SEQ ID NO: 81194 - DNA, 122 bp, Homo sapiens
ccctccagtgtgtgcagcccaggagtccacagttgacatggacacacagcactgaccaaccgccttctagtgaccagacgccaatttattattttgagggcggggacataaagccaagggac

SEQ ID NO: 81195 - DNA, 122 bp, Homo sapiens
ctaaaacttgtaaaagcaagctgtggcacatgttctcaggacctgctcagggctgtgtcacgggccattggtcactcatatttggctcagagtaaatgtcttcaaatattttacaaagtttg

SEQ ID NO: 81196 - DNA, 122 bp, Homo sapiens
agcaaggttaaactgaattaagaccatttttgaaagaattgtcagatgtacctttcaacccgcagccagagaagcttctgcagttgaaggccagaaagtctttgtatggttcttccatctgc

SEQ ID NO: 81197 - DNA, 122 bp, Homo sapiens
agaagatgcacacattgagtaaggatgaggagagtgacatgggtttaggaaagttgctggcgtaattggttgagagaggtgtccaaataaaagtaatacaatttgcaaaatctgtcactaag

SEQ ID NO: 81198 - DNA, 122 bp, Homo sapiens
aaatgtataaaaagcacattgccaactgctctgcgtgatatcctttgtttggattttagacgcagcttgactgacacagagatcctgaataagagactctttggatactgaaaagtctctta

SEQ ID NO: 81199 - DNA, 122 bp, Homo sapiens
gaggcggggcgaacgcgaacgcggcgttcccattggtggcctgcggcttattcgcccgtccgttgagtgacgcacttccggttctccgtttgcgccattgccctggtggttccgcctcgtgg

SEQ ID NO: 81200 - DNA, 122 bp, Homo sapiens
cagccgcccgcccgtccctatattatagcaacgccagaaatgtggtggtggtggtcgccacgttagggtccgcgggggtcctcctgaggcagcctggtgccaacccgcaggcccaggctggg

SEQ ID NO: 81201 - DNA, 122 bp, Homo sapiens
cggaacccgcccgcgcccagcagcggcggatatcgaagatctcgcgtgcgtcgatgctgtcgggaacctgctcgtcctcctcgcctgccgtcacaggccgctccccagagcgctggtagatg

SEQ ID NO: 81202 - DNA, 122 bp, Homo sapiens
cagctctgttaaggggagacgtttgtgttgtttgaggccaccgagcctggtcatctgcgccggcagccgcaggagcccaggccaccatccccacgaggtccgtatactgtgatgtctgcctg

SEQ ID NO: 81203 - DNA, 122 bp, Homo sapiens
tctcagggccgcccggcttccggggctgccctgccttccgcagcgtgcgccccttaggcccgcctcgggaccctccgcccgctgctgggggctttgagcattgtctatgcccgtcctcatta

SEQ ID NO: 81204 - DNA, 122 bp, Homo sapiens
gtgactcatgtttacttcaaaatgtgtgggccacaagtgtgccagagctgtcagaccttccggtgtgcaagctttgatcgttagaagacaagccttgaaggaaaaaacctccatttaggtga

SEQ ID NO: 81205 - DNA, 122 bp, Homo sapiens
aagacctggcgcctgctcattcccccagtcggggcggcggcggcaagcctcggccggcggcgatctgcacacccgcggagaagagaggcagggggtcgaccccacagcccagcccggcgcgt

SEQ ID NO: 81206 - DNA, 122 bp, Homo sapiens
ggggggtcatgtgacggagaggggtctataaatagctggaggtgggcatgctgccccagacgccttggggacagcaagagcagaggcttaaggagctacactgggggaaggacaggggcaag

SEQ ID NO: 81207 - DNA, 122 bp, Homo sapiens
cacggctggggcttctccactgtcattgttatggcctcaaatgaaggccttgtcaccaggcgggggcgggaaggcactggagcgcagcagcattgagagcatccgaattccctcctctgtcc

SEQ ID NO: 81208 - DNA, 122 bp, Homo sapiens
atgaggatgcggttcccgtgtcccccaggacagcttcgtggccggccgcctccatggattcgggtgggcacaggtcctgcagggagctcctgtgttatctgccctccccgcgaagctccttg

SEQ ID NO: 81209 - DNA, 122 bp, Homo sapiens
tgccgaggcgctgtggggccagcggccacgcctcggccaggcagcgacagacaccctccacggtcaagcttccatcctcaggctctgtgcagcaggtcagggctccacccatgcctcacatt

SEQ ID NO: 81210 - DNA, 122 bp, Homo sapiens
cgcaaagtagggacagcagccacagcagacacccccgagtggctccttgctagcacgcctcgctcacagcttagctgttaccgttctcaagtcagtggtctcgtccggaagcatgatgatca

SEQ ID NO: 81211 - DNA, 122 bp, Homo sapiens
gatagtccgcggtcaccgtcctggggcctgggtggaagcactgagcgcgcacagggagggcggctgagtgaagatccctgccaccgggcctctgctcgcttaggctctgtttaaaaggatag

SEQ ID NO: 81212 - DNA, 122 bp, Homo sapiens
tgcagctgagcttctcttgggacctgggacctggcccagcacagcgggatttccagtacccgctgcaccctcagcgctgagcaggtgccgctcacctggccacagccggctcttcactgcgt

SEQ ID NO: 81213 - DNA, 122 bp, Homo sapiens
acatcaaacggttccccaagcctgttcaagggcccagatgtgcgagacaatctcgatggccgactgggcggccctcggttgccagatgtgctcctccgtggccaggaggcagggactgaaaa

SEQ ID NO: 81214 - DNA, 122 bp, Homo sapiens
tgctttcaaaacaagtcaagctagcgcctctataaggtggtgtctgatcttcaccccctacgcaagctgatttctttctaaatggaaagaagctgaaactcaaatgaggcctggcctattct

SEQ ID NO: 81215 - DNA, 122 bp, Homo sapiens
tacctggcaggcagacccatgggtgctgaggggagggcccagccctgggcatctgaacaccggcacacttggatctgcctctgttgcctcctactcctgactaggagcctgggacaaagtcc

SEQ ID NO: 81216 - DNA, 122 bp, Homo sapiens
attcagagaaccacacggataagcaatagagaatgctgagatgagtttacaaatagatgccgagctgctttatccccaggtggtcatcggctgcattccacggagatgcagttcacttgtgt

SEQ ID NO: 81217 - DNA, 122 bp, Homo sapiens
cagtgagaggaaggaaatgatcaccattgcgtggatagtggtgtgatgtggttggtgagacgtgtggtaattactgttttccaggaagtggccagaacctaggagctaccaggccagggaga

SEQ ID NO: 81218 - DNA, 122 bp, Homo sapiens
cttgattgcacttcggtttggaggtttaccaagaattgttcaccatttgggaaaaccacgcgcttcactggccacgctgctcctggtcccggagacccaacaatctgcatttgctgccgtca

SEQ ID NO: 81219 - DNA, 122 bp, Homo sapiens
ggccgccccccaagccgggtggccttcggggtgcttgcccggctggaggtggtgagggggcgggtccaaaggagaggtcaatgggcggggcggggccacaacgcccccacgtccagagccgg

SEQ ID NO: 81220 - DNA, 122 bp, Homo sapiens
aaaaagaccaccagtctgttctgcacacttggtaaacgtgggaggcgtctgcatcacagccgtggaggcaggagggagcagggacgcgcaggaggccctgccaggcggccgaggaggagatg

SEQ ID NO: 81221 - DNA, 122 bp, Homo sapiens
gagttcagaattgtggacaggctcctgaggaccagcagaggctggaggccagggcttgcccgccgggagtgtggctgtggaaagattccagtccacagtgggggctgctgcccagactcacc

SEQ ID NO: 81222 - DNA, 122 bp, Homo sapiens
gcggacggcgtcgcgcgagggacaaggtgcgcgaggcgcacgcatcttcacctccactgtcgggagttgacctgctcctcccgcgtggttacccgtcgctgtaaatggtaccctcgccttcc

SEQ ID NO: 81223 - DNA, 122 bp, Homo sapiens
cctggactcaagcattccactcagacccacctcgggctcgcaaagtggtgggattacaggcgtgagctgccacgcccagccaaccctgactcataaaaaaagaccgacaggtgctaacgggc

SEQ ID NO: 81224 - DNA, 122 bp, Homo sapiens
ctgaaaggtaaacctgtgcactttgagaacaaggcgtccatccttaactccagaggcctgcgtagttcccatggaggcctgaagggagaggccccccagccacaaagagcttcatctccggc

SEQ ID NO: 81225 - DNA, 122 bp, Homo sapiens
ttttacagtgtatttactttgaaaacagttgttatttatgatatgtctaatttttagagtcggttgaaaggactctatgtcttaccaacagcctcaggagtgggaagaattaccttctattc

SEQ ID NO: 81226 - DNA, 122 bp, Homo sapiens
gtctcccctccaggcatcatgggaactgtggtcgcctttccttttcctccctttcctctccgaacgcctccttccgtcagctcaaattcatcccagccgccaatgcatcctccctctccacc

SEQ ID NO: 81227 - DNA, 122 bp, Homo sapiens
gcatccttccacccacgcccgcagcggaggcggagagcgtcacggagggagaagcccgcgcgccgttccgctttcggaatctggagccccatgtcacctccaaagtttggagatttggggcg

SEQ ID NO: 81228 - DNA, 122 bp, Homo sapiens
tcactgctttgaaatcagtggcattctaatctggtgggataattttaccagtgatgtcatcggaacatgtttgcttatttatccatagttctcctaggaaggacggtgtttgtcatggtacc

SEQ ID NO: 81229 - DNA, 122 bp, Homo sapiens
gttggggaggggcgggccgcggcgagtgggtgccctctcgctctcagtcctcccggtccgcgtttgcatgctagcggccgctcccagtggtggtcaccgccagtgccaatcccttgcgccgc

SEQ ID NO: 81230 - DNA, 122 bp, Homo sapiens
agttgccgttcggcctagggctagtggctggcgctccctgagcctccctcaccggtctcacgtaaccatctgagtaggttgcatcccagatcctcgcagctgccggattcgtggagtgtgga

SEQ ID NO: 81231 - DNA, 122 bp, Homo sapiens
cttatggaagaatcgcttgagacttttaaatctatgaaagctcatatgtccataaccagccgcccttgtgtcctgaaggaaaaaatgtaaacaggaaattgctttcaactgcaagaaaaaaa

SEQ ID NO: 81232 - DNA, 122 bp, Homo sapiens
gagggcggctttattaacctcttctggtgttagaagactctgcacttcagctctttcttccgcccacctaccccgtgaatcaaaacagtagaacatttgttttcttgagaaagtgccttgta

SEQ ID NO: 81233 - DNA, 122 bp, Homo sapiens
gcttcagtctcttcagtaatgacggtaagtgctttaactgagattgttaacaagacccagcgagatcgtgaaaagaagacaccccgcacagcgcctgttccctcgttagcactcacgcagta

SEQ ID NO: 81234 - DNA, 122 bp, Homo sapiens
gcccaccccgcctggaagctttctgatttctctgttcgccccgccaggcgctgtggggtccgtctcaccaggtctgcacgtgagccccctgcccccaatccctcccagtcccgcccgcctct

SEQ ID NO: 81235 - DNA, 122 bp, Homo sapiens
gggccgcacccgagctacccgtgcccaccggtgggccggcggtgggagctcgggagcaggcgctggcagtcagtcggaactacctctcccagcctcgcctcagtgagtatcagagagtaata

SEQ ID NO: 81236 - DNA, 122 bp, Homo sapiens
ttcaagaatgaagctgtggacgctcgtggtgagtgttacagttcttgaaggcggcgtgtccggagtttgttccttctgatgttcagatgtgttcggagtttcttccttctggtgggttcatg

SEQ ID NO: 81237 - DNA, 122 bp, Homo sapiens
gcagcagtggtggtagacagctagagaagaaagtgtaaagtttgcatcctccaattatcacggttgcaagacagaacttgaaactagatacacctgattttggttatctctggatgccattc

SEQ ID NO: 81238 - DNA, 122 bp, Homo sapiens
tcctcccattgacttattctgagcctccagcacaggcggttgaaagcagtgaaacaaatacgttgtatagctgcaagcatgccaaggaggttatttcctctttgatacattcatttttagag

SEQ ID NO: 81239 - DNA, 122 bp, Homo sapiens
taagtgaggaagagcaaatttatagaatgctgttacaacatgattttgtcctggtgtggtcgctcacgcctataatatacatacacacttagttgggcatggtagtacttgcctgcagtcct

SEQ ID NO: 81240 - DNA, 122 bp, Homo sapiens
aggtccataggtaagtcaaatctttggtaactgaatctttactgtcactgttgagatgtacggagaaaagagaaaatgtgtatgctatcagctccattgcagccagctaagggtgaggagga

SEQ ID NO: 81241 - DNA, 122 bp, Homo sapiens
attatatggcatatgaaataaaaagactccttacagaattacagtaggaatattgataaacgttcaactattgacaagtgggttttattgttgttgttggcttggtagtcaagttgtcccat

SEQ ID NO: 81242 - DNA, 122 bp, Homo sapiens
aatgggggtggggacgatggagaggatggaaggggcggcgggggggtgcggtggtctgcgcggtacagcagcgtccctgcgggttcccctcatttagtcctcaaaacaaccttgccgcgggt

SEQ ID NO: 81243 - DNA, 122 bp, Homo sapiens
ctcgcttccctgccccgcgcacggtctgcgatcggctgggcttttaagccttctccgcgccggctggtctcccagagaatctaaactcgaaactcttgagagacaccccagcctgcagcaat

SEQ ID NO: 81244 - DNA, 122 bp, Homo sapiens
cgagttccaggtgggcataggctcgccagccccgcactcggagcggcaggccggcaagcccggggcaatgaggggcttagcacctacgccagcagctgctgtgctcgatttctcgctgggcc

SEQ ID NO: 81245 - DNA, 122 bp, Homo sapiens
aaaccatgggagaaagttcacaccctggcctgggccacccaccttcagctctctcctgtgcgtcaggacgcacgctggccccaagagcttcactcaacacggctgggtcctgggcggacgtg

SEQ ID NO: 81246 - DNA, 122 bp, Homo sapiens
gaccccgaaagtggaccccagatcctggggttctccctggtccggagactagggagctgtcgcctgcaccccgggagcacccaccccacgaccacctctggatgccgccgacgggtacccgg

SEQ ID NO: 81247 - DNA, 122 bp, Homo sapiens
ttcctgctcaaggggtggaaatcgggccctgcagggggctctgtgcgctgcgcggggtgccggcctgctgggcagtcccaactcacccgatggtggcggcttaactttaaactgtgctccct

SEQ ID NO: 81248 - DNA, 122 bp, Homo sapiens
catgcggtgcatggtctccatcagctctcgcaggtcgggctggatctgagacacacacagcggctgggaccccgacgccggctccatcccctcctgcctaggccccctgccagcccaatacc

SEQ ID NO: 81249 - DNA, 122 bp, Homo sapiens
cattacggcacttggcatgcaaatcgcttctgtgctgcaggccgggtgctgggcagggctcgcggaaggtttaaacagggttggagtcgtttacgaggggacaagtgacaaggaaaaaaaat

SEQ ID NO: 81250 - DNA, 122 bp, Homo sapiens
gggacttagggtggcatatgtgggttaacaggcaccaggcaaacacaacaggatcacaagcgatgttgtcaggatctattgtccttgctccatcttttgaatctgctttcttctgtgttgga

SEQ ID NO: 81251 - DNA, 122 bp, Homo sapiens
gcgcggaccccgtcgcgcccgatctggggccctcgggttcgatgcgcttcgattgggattcgtttgtctgagaacaaaaccccgattctgagaaaaagagatgggctcagccgcggggaaga

SEQ ID NO: 81252 - DNA, 122 bp, Homo sapiens
caatgacatctgcaaaaacccagaggggggggggggagtcggttattgtttaggtctctgcggctgttttctaagactagtgagcactgttcttatcaccaccactgagaaattaagctgaa

SEQ ID NO: 81253 - DNA, 122 bp, Homo sapiens
acttttactgcatccgtatatcattaaatagttctgtgtttagcacctttatatatcaaccgtatttacccttctgcaacttgcttttttctgtgagcattatatttatgagactcatgcat

SEQ ID NO: 81254 - DNA, 122 bp, Homo sapiens
tccctctgccggtgtgggatctcaagggaattactgcacccagagtggcagtgagggcagcggggtaaaagttcatcctgtctccttcccctcctggggctgggtgagagagtgggtcccca

SEQ ID NO: 81255 - DNA, 122 bp, Homo sapiens
caggctgagtgacagtgacatggcaagcgggcacccagtaaaaacaagcatgggatgcgacgctggataatcaacacagcagtcaggataaatgagccaaatccttcagataaaagtcatcc

SEQ ID NO: 81256 - DNA, 122 bp, Homo sapiens
cccagcaccctccccaagaccatggcccgcacctggacccgcggttaacttagcccgccgcggagagagccaggcaatgcctgggtggtgtcgtgctcaccagctcctttccgcagacctga

SEQ ID NO: 81257 - DNA, 122 bp, Homo sapiens
tctttatttttaacgctgcatcttcgcgtgtgctcagaggtggttgttggcggagaacgccgccgcagtgtttgacctctagcggtgaagggggaaggggaagaggaaaggagagaagtggt

SEQ ID NO: 81258 - DNA, 122 bp, Homo sapiens
atcctgcgcctctcgctcacactcacccagcctgaggagggcgctgtcggcggtggctctcggtagaacaccaggctgttacccgttaacaccacccaagacgggccccagttcttcctgcg

SEQ ID NO: 81259 - DNA, 122 bp, Homo sapiens
acgctccctcgactgcagtcctccagggcccggccgaggtggggagccaaatcgggagaccgacctgggctcttggccggaagcccctcactgcagccctgccccgggaccccgtctccctc

SEQ ID NO: 81260 - DNA, 122 bp, Homo sapiens
tctgtgacccggaggccacacgccgagtctccgggacgaagcctcgcttggcagagccgccggggcctggtctctgtgttctgtgccacagatgccacacgactgtttcccactccctgtgt

SEQ ID NO: 81261 - DNA, 122 bp, Homo sapiens
tcgtcctgccctccggggctgctccgcccgccgtcccgaggccagccggccgcccagcaccgctccccatccgctctttgctccaggccctggatcttagataggggaagagatgagggtaa

SEQ ID NO: 81262 - DNA, 122 bp, Homo sapiens
gtaaccaacttatattcagcgttgagggttctttatctcagataaaatcctacactaggccggtctcaagccagtggtaggtgcctcagtggggccatggcccctctgaatccaagcttgcc

SEQ ID NO: 81263 - DNA, 122 bp, Homo sapiens
tgtaggtcagttcccgagtgataagtgcgtaccaggtggtcgaggggctggggcagtgtgcgtgtgtctcacctgaggttctcctcgagggctgggtatcttggtgccactgagaatccctg

SEQ ID NO: 81264 - DNA, 122 bp, Homo sapiens
caggggcccagcctgggggaggccatttatacccctccccctgggcccaccagcccaactcgccgctgccggcctgacctcgctcccagccctgctgcccagattctaggtgaggcccagcc

SEQ ID NO: 81265 - DNA, 122 bp, Homo sapiens
tccggcggagacttgggagtccggagcgccgaggaagttggggaacggacccccaggccccgcccacccgcgaggtcactcacctcggcttactcagcacttctacttcctcctacttccgc

SEQ ID NO: 81266 - DNA, 122 bp, Homo sapiens
tgggcaggaacagaagtggggaaaaaatgagcagagagagggtgggggcggcacaggaaccggacgggcactgagcgcctcagccatgcccgctgcacacccaattgtagctcatcctccca

SEQ ID NO: 81267 - DNA, 122 bp, Homo sapiens
gcaccacactgacgcctgagcaaagttcactccctgactggagagccacagaggcacgaccgaaggtcaggggacagggtttcctagcatccgcgagccttacagaaaggcaactgtgcagt

SEQ ID NO: 81268 - DNA, 122 bp, Homo sapiens
gtcctgccgggtcctctcccagatggagttctgagccaccccagcttcagctgaagccagcgcccctggaggcctacaacacttcccaaacacttgctccaaggaggttcccttcctctctg

SEQ ID NO: 81269 - DNA, 122 bp, Homo sapiens
cttgagtttttccacagaccataaaatgagattgacactactccttaagtgactatattgcgttaaatgagaatatgtataaaatgctcagcacagtattagcaaaccgcaaacaatactaa

SEQ ID NO: 81270 - DNA, 122 bp, Homo sapiens
gagtgtgagccagtccagggtcagatcctgggctgatgccacctgagggcggggtgggggcgtggcctccgtgcacatgggagactccaggtgcaggagagggggaggtggacttcctcttg

SEQ ID NO: 81271 - DNA, 122 bp, Homo sapiens
aaaagagaagtgaaagcaagcgatcaaaacatttctggaaatctgacacatctggagtgccgtgtggagacgccagggcgcgtggagctttgagcagttaaaaacccagaccgggaggccag

SEQ ID NO: 81272 - DNA, 122 bp, Homo sapiens
aggcccggctcgagccccatctctgcatttggctcctgcacgtggtcttggcggggctgccgcaggtgtgagaacactcgggcccagacagaggctgagggcagagccgggcacaagcgtga

SEQ ID NO: 81273 - DNA, 122 bp, Homo sapiens
tgagagagggacagggcgtgcctccgcgggagcctctgggtggggggaatgggccatgcccgggttcagtgccaacagccctgggactgttgtggagagatgaactgggaggagctggggtg

SEQ ID NO: 81274 - DNA, 122 bp, Homo sapiens
ttcctgctgccaccttcccgccagccacagggatctgattcctcccagggggatgtcctgcgcctcagggtccggtggtggcctgcggcatcccttgcggtgccagaagccgtgggacgagg

SEQ ID NO: 81275 - DNA, 122 bp, Homo sapiens
tgtgatgtggtgttggtgcgtgttgttgcgaaggccctgtgtgaaagtcgcctgggttttcgggtgtgatgtggtattggtgtcgtgttgttgcgaaggccctgtgtgaaagtcgcctgggt

SEQ ID NO: 81276 - DNA, 122 bp, Homo sapiens
gcacccacctctgctcagcttctggggaggccctcagggagttttcctcacggtggaaggcgaagcaggaacaggcacaccacatggtgagagtgggagcaaggggtgaggaggagccacac

SEQ ID NO: 81277 - DNA, 122 bp, Homo sapiens
cggagcgcaggacccctcaggctcggcccctccatctccaacgcgaactgtccgggccgtcgccactccttcaaagggaagatttgaaaagcccgcccctggcaggagccgcagaggacgcc

SEQ ID NO: 81278 - DNA, 122 bp, Homo sapiens
ctccgcggctgcagggtccacagcgccacctgggctggaggctgagccgcagaagcgaagcgcgcagccccaatcggactacaatttccgacgggccccgaggccccgccccgcactacggg

SEQ ID NO: 81279 - DNA, 122 bp, Homo sapiens
ggcgcccacgagctggctggctgcttgcacccacatccttctttctctgggacctggggtcgcggttacttgggctggccggcgaacccttgagtggcctggcggggagcgggcctcgcgcg

SEQ ID NO: 81280 - DNA, 122 bp, Homo sapiens
gggggtgtcccccaaggttagccacaacagtagtggtggccgtgttggtggtgccagtctcgtgggtctcacagggtgggttggagcacaccaaggtgacagtgccaggctgcacatcaccc

SEQ ID NO: 81281 - DNA, 122 bp, Homo sapiens
cccgcggagctcccctctgctgctgaggcggctctcggtggaagagtccggtctgggcctcggcctgggcccgggccgctccccgcacctgaggcgcctgtcgcgcgccggcccgcgtctgc

SEQ ID NO: 81282 - DNA, 122 bp, Homo sapiens
gaggagtaaagacggcgagacgcgtccacgcagggggagtctgtgcggtttggaggaacgcgccaatgtctgcactcatgaggagcccccaagggcggttttaagagggtgaagcaggaccg

SEQ ID NO: 81283 - DNA, 122 bp, Homo sapiens
agatgtagttctgggttcctcagctgcattgtcacggtgaccggacagcataaatttccgcgggtaacctgggcttttaagattaacctcaggggcggaccaatcaccgatgacttattaaa

SEQ ID NO: 81284 - DNA, 122 bp, Homo sapiens
ctcggcctcccctgccccttggttctcggcaatgagctgtgacctgagaccctccagctccgcgctcttcactctggccccgcaacctcacatctcttctccttggcaccgagaagaggctg

SEQ ID NO: 81285 - DNA, 122 bp, Homo sapiens
ggaactgggtggcatagcaggaggtgagcagcaggcaagccagcattacccgctgagctccgcttcctgtcagatcagaggcaacgctgattctcataggagcacggatcctactgtgaaca

SEQ ID NO: 81286 - DNA, 122 bp, Homo sapiens
cccctgctgaaaaaacattaggctgcactactgtggagcataactgctcgctgaaggaatcggctacattaactagcagagcagagcatggaggatggagtcagtgggcatggaacacgctg

SEQ ID NO: 81287 - DNA, 122 bp, Homo sapiens
cctcccgccagcgctcagaggcggggctggccgcagcgcgaggaatgcgggctgggggcccggggcacattccagggaagaccccaggcccaaggggcaagtttacgcaactcgccgcccag

SEQ ID NO: 81288 - DNA, 122 bp, Homo sapiens
agcggctggcagcgggtgctcagagcgcgccccttctctccgcgccgctcctccgcctctcgctccagctcttgctttgcaatctgcagcagcagagtctgcagaggggtgggagggaagcg

SEQ ID NO: 81289 - DNA, 122 bp, Homo sapiens
cgggagaagcagtgcccaggaggttttctgaagccggggaagctgtgcagccgaagccgccgccgcgccggagcccgggacaccggccaccctccgcgccacccaccctcgccggctccggc

SEQ ID NO: 81290 - DNA, 122 bp, Homo sapiens
ctgctcggcggtcaggagcaggtgagagctcggagcttgggggtgggggtccgggtgccccgggtggctagacccctctcgccgggcggggacagaggaggagcgcgggggcgacggcgtga

SEQ ID NO: 81291 - DNA, 122 bp, Homo sapiens
gcagggcctcgaccttgacccacagggctgggtggggctgaaaatgggctcccagaccagcgcgaggagctgcgcccaggcctagcaggcggtttggccgcggctgcagcttagcgtctagg

SEQ ID NO: 81292 - DNA, 122 bp, Homo sapiens
agaaaggcagacagaggcaggaggagctgcaggagagggcggggacaaaggcaggcacaccggccacacacacctgaccacagcgacaccaaagtccatcccgcgcgtggcaggaggaggca

SEQ ID NO: 81293 - DNA, 122 bp, Homo sapiens
agcgcaggcctcagaagtcgatacaggcccttcggtgcaacacatctgaaactagcaccgcggatccccttaaaattccaggtttggttcctttagcgctctccagcaaggtttagtgactt

SEQ ID NO: 81294 - DNA, 122 bp, Homo sapiens
tagggcccctaatacaatcaggtcaaggtgagaatttgccccgaaataaatcactcttcgcggtgtagggaaggtacccaagaagttattgccataggcctcactacatgaccaagacattc

SEQ ID NO: 81295 - DNA, 122 bp, Homo sapiens
tgcgacgataactggccagtgatacacagtgggaggtcagtacaaacctaccccaaaggccgaggaagctgagaggttgaagaaagaggctgacaaacccagtttttcagagacaaattttt

SEQ ID NO: 81296 - DNA, 122 bp, Homo sapiens
cgctagggccaccagatgaaagggaggtgcacaggaaggagctgtggagtggaaagagcgcgggctttcgagcacatacaaacctgattacaaaagtcagatttctttatttcgtcttgggc

SEQ ID NO: 81297 - DNA, 122 bp, Homo sapiens
agacaaacaattgtgccttgtgaacagtcgccacgtcgaaaagactcaagagtacttttgcggaaacctgtctcaggaaaaattcccagtgtgggagggaaggagggtgaactccatcctgg

SEQ ID NO: 81298 - DNA, 122 bp, Homo sapiens
agggctgggcctgggacaaagggttctgggtgctagcagggtgtggcctggtctggcctgcggacagatggcttcctttttccctcccacacagacccaagcttctgtgtggaagcgtgaac

SEQ ID NO: 81299 - DNA, 122 bp, Homo sapiens
cgtttatgctgctttttctccctttctgcactataaaggctggccttccaattcctgccccgacccttcaccgtgatccaatcccacaaggttcccctaatttctgctccgggtggcacctg

SEQ ID NO: 81300 - DNA, 122 bp, Homo sapiens
cctccttcctctcactcttccagtttccaacaaccgtgagcatgaggaaaatctcccctccggattcctcgcccagcctcggatgtgagttacaggcattagagggaggaggaggaggagtt

SEQ ID NO: 81301 - DNA, 122 bp, Homo sapiens
gctcccaaacctgccctccaggccccgcccaccaggtctctggtccctcccaccagcctgcggctctacctaacccatctgcagtcctggggggattcccagtcttgcctaccgggctacag

SEQ ID NO: 81302 - DNA, 122 bp, Homo sapiens
ccccggagcaggctgtcgttgtataggtggcccaggctggcggcccctgaccgaaggtcgcgtcgggtcagtgtgcagcccgtggctgagaggcggctgctgaggggccgggcgggctaggg

SEQ ID NO: 81303 - DNA, 122 bp, Homo sapiens
aaatagccagcaaggtgaaggagccttgtgtcctttcaagacatgtaaacatcttcctagcggtgttttacatcttaggagtcttgagttcgatccctctgttgtaagagaagccaagggtg

SEQ ID NO: 81304 - DNA, 122 bp, Homo sapiens
cttatttttcttgcaccatctcttgcagaacacaagggcttaataattcagcagccagtgcgttcaatgtgttatattacgttaggcaggctagaaagccttactctgtattgatctgaaaa

SEQ ID NO: 81305 - DNA, 122 bp, Homo sapiens
gtccggcaactgcgtcggggccgccgcaagggtgacaggaggacgcgctagttcccaccccgcccagaccccttgccatgtgtaactctgcctattaaacttacagagtttagcagagagcg

SEQ ID NO: 81306 - DNA, 122 bp, Homo sapiens
actggccctcgcttgtgagtgacggagaaacccgcggcactggccctcgcttgtgagtgacggagaaacccgcggcactggcccttgcttgtgagtgacggagaaacccacggcaccggccc

SEQ ID NO: 81307 - DNA, 122 bp, Homo sapiens
gagcgctgagatgtcccttacatcccaacacccaggtaacagggcccagagggacggccccgctgtgtgtggccacagctccttcaactctgaaggccacgaggctgggctctgtcttgctg

SEQ ID NO: 81308 - DNA, 122 bp, Homo sapiens
tctggaaggacagccaagagccagccctccagtaaaagagtgagtcagaccagagaagggcgccccctcgtggcagtgcccacaaagtccaggcagcacggcgtaggaagcctgggaggggc

SEQ ID NO: 81309 - DNA, 122 bp, Homo sapiens
taccttcaaaatatgatttgtctttataaatattggactaataactccaatttgtgcacacgacatctgaagaatgttacgaacatgtgtgaactctgtaaggctcccagtccaactttttt

SEQ ID NO: 81310 - DNA, 122 bp, Homo sapiens
acttatctggcaccaaacttactaagacctcccatctgctttctcctcaagcatgacagccgtacaggtccttacctccctgttcccctggctcacctctaacctctcctctccattcacca

SEQ ID NO: 81311 - DNA, 122 bp, Homo sapiens
tgagggcgacggttccgttccagctgaagcagcagcagcagcagcaacatggcagccccacgcggagcggcggcggcggcggcggcaacaacaacggtggctgctgtggtggcgcctcaggc

SEQ ID NO: 81312 - DNA, 122 bp, Homo sapiens
ctggctccttacccgcaggcgtgcagcccctggaaacactcctacgtgtttgctattctgcgtgggttgatagctaagaggtgagggggaacacaaggccttcagattagggagaccccctc

SEQ ID NO: 81313 - DNA, 122 bp, Homo sapiens
cctacggaggaagcggaaagcgttttctttgctcgaggggacaaaaaagtcaaaacgaggcgagaggcgaagcccacttttgtataccggccggcgcgctcactttcctccgcgttgcttcc

SEQ ID NO: 81314 - DNA, 122 bp, Homo sapiens
tccttacgataatctacctaaagcctgatgatctgatgtggaacagtttaatcccaaaaccgccccccaacaacacctccctgagtacgtggaaaaattgtcttgcatgaaacaggtccctg

SEQ ID NO: 81315 - DNA, 122 bp, Homo sapiens
ttcacgtgctgcttcgcctctttatgctttatctgccattccttttgaaaacaatgaacacgttttactttttctaaagtttttaatttttcatttcatttttgcacccagactggggtgcc

SEQ ID NO: 81316 - DNA, 122 bp, Homo sapiens
tagggtcgaggtctgggtcaggcgctcgtgcaccgctcgtgggaggtcgaggctgatgtccgctgctccccatcagcgttagtgcccagatcaccccgtgctccgctcccgccggaagcggg

SEQ ID NO: 81317 - DNA, 122 bp, Homo sapiens
acttttgctataaaacctgggccttccctctgttctctggagtgcatcttaatttttacacgtgtggtgctgtctccccagtttgcaaatttttcactggaataaagtgtcttttctccaaa

SEQ ID NO: 81318 - DNA, 122 bp, Homo sapiens
cctcacccatcgcgcctgccggttctgcctcccgcatgcttttgtcttccttccagttcacgaattctctttcaaggggcacccacttgctagcaggtccgtttccgccaccaccgaggttt

SEQ ID NO: 81319 - DNA, 122 bp, Homo sapiens
agggctcggaaagcatgccaagagcagccaggggacccacaccaagttggccctgaaacacgccaggcagaaaagaggcaggacagggaacaccgaatttcccctgaaacactctgaatgcc

SEQ ID NO: 81320 - DNA, 122 bp, Homo sapiens
gatggggggcggcggcgcaggaggtgcaagtgctggaatggcagagagaacacccattaacgggggagcaggcttgctctgcggcccttcccatcccgcggccccaagccactatatgcccc

SEQ ID NO: 81321 - DNA, 122 bp, Homo sapiens
tccgcggggcgcctcggaggctgtgacctccagggaggtccggctgggtgcagcgtgacacgccggggcggttgccaaggacctgcccaatctgcgggtccagttgctagggcctccatctt

SEQ ID NO: 81322 - DNA, 122 bp, Homo sapiens
tttggccaaattctcggactctaaaagacagtattggctctgcaggctttctgggctcagcgaacctgcaataccaaagttccacattttggggagtactacctcatctgtgtaagtacagt

SEQ ID NO: 81323 - DNA, 122 bp, Homo sapiens
acccctccgcctgccctaggatgctctccatagtggacgctgcactttgccatggcatgccgggtggacaggactgctggggcccccgtgttccagcctctcctgcgcctccagatacggct

SEQ ID NO: 81324 - DNA, 122 bp, Homo sapiens
gggctttaggttcgccggaatcccacgctcccgacttctgcttccgggtcggagccatggcggtggcaaattcaagtcctgttaaccccgtggtgttctttgatgtcagtattggcggtcag

SEQ ID NO: 81325 - DNA, 122 bp, Homo sapiens
catctggacaccctgcctcaggccctcatctccactggtcagcaggtgacctttgcccagcgccctgggtcctcagtgcctgctgccctggagatgatataaaacaggtcagaaccctcctg

SEQ ID NO: 81326 - DNA, 122 bp, Homo sapiens
gcgagaccggcgcagaacgggcggccccgagcactgctgcgaccccgccggcctcgacctcgacaccccgcgaccccgccggaccctggaagcatgagctgcatcccgcatccgcaggaggg

SEQ ID NO: 81327 - DNA, 122 bp, Homo sapiens
tgttcttgctcttggatggggggctgctactccggagcggcgaactggcgggcgggggtgcgcctgtgagtgtgagcgcgcgtgtgcgtgtgtgcgcgcgctctcgtggccttccggcagct

SEQ ID NO: 81328 - DNA, 122 bp, Homo sapiens
tttttcacatcaggaacaggagttgttcctggactctgtctggggccaggctgggagagacgtggggcagagtggggcaggggcaggggcagggctgggggctggggcctgggcagggccag

SEQ ID NO: 81329 - DNA, 122 bp, Homo sapiens
tgagccaacaccttcactgtgctaacttcccaaagccactccctgctcctccctctaacccggtgccccccctacaggtgcctaaggaacctggttaaaatgccaatcagaggcggacacag

SEQ ID NO: 81330 - DNA, 122 bp, Homo sapiens
cctccctctcgccgctccacacctgtcagccgctctcgcagcagccctgtggcccgagcccggggcctcagctgcaaccccttcgcaccctggatcctcgctccgcgcgcctggcgtatccc

SEQ ID NO: 81331 - DNA, 122 bp, Homo sapiens
aaagtattagaatcctttgctctttcagtcacagcatacaatatttagcttttagcaattcgaagcagaaataggcagcctaattttagtcctgaggtaagtagagcaggcatttcctttcc

SEQ ID NO: 81332 - DNA, 122 bp, Homo sapiens
ggctgccaaagttccctgaaggtgagcaccactggttctacaagctgctggcagtcatggcgttaagagcaggaagagaagcaccagaacccggaagagaaatccagtcctctgctaggcct

SEQ ID NO: 81333 - DNA, 122 bp, Homo sapiens
ctggctgagtacagaagggagagtgtggaaaggcagtgcacctcccaaacaggtaggatgcgactcccagcagaattgagccagggagccaatcaggccgagaggatggtggcataaattat

SEQ ID NO: 81334 - DNA, 122 bp, Homo sapiens
aatacccttgacattttccatgtttgtcaggggaaggaacctgagctcatctagctgaaccgctatagctgcaagtctagtactaatagttgggcatcaagaataccatcccaagccatcat

SEQ ID NO: 81335 - DNA, 122 bp, Homo sapiens
ccacgtcaccttcacacagtccatgtttaataagaggtcgctgctgtgatgatagggggtcggccagacatgtccactgtttaaaaagcagcatccatctgaggactcattggattaaatgt

SEQ ID NO: 81336 - DNA, 122 bp, Homo sapiens
tgggcaggacaggctaaagttcatggaagcgaggtgcccctcgtgcacgcctaggcaacccggtcgacgccacaggcaggtactggcttaggtcggagaggtcggtcctcccgggccctcgg

SEQ ID NO: 81337 - DNA, 122 bp, Homo sapiens
ttggctgtcttgaggaatgcggtcgcccccttgggaaagtacatatctgggagaagcaggcggctccgcgctcgcactcccgctcctccgcccgaccgcgcgctcgccccgccgctcctgct

SEQ ID NO: 81338 - DNA, 122 bp, Homo sapiens
tgcctccctcccggacggggtggctgccgggtggaggggcgcctcacttctcggacggggcggctgccgcgcggaggggctcctcacctctcagagtgggcggccgggcagagacgctcctc

SEQ ID NO: 81339 - DNA, 122 bp, Homo sapiens
gcctcacagctctggggcggcattccaaatcagggtgtgggtgggccgtgctcccgctggcggctctacctgggccccttctgcctctccactccgggcggtggccagcagtccgtggcatt

SEQ ID NO: 81340 - DNA, 122 bp, Homo sapiens
gttggtgtagtcggctttctgggccttttctgacctggccagtctcagattttcagtctccggatcaaaaattgacctggcccttggcccttgccctttaatccctacactgcccggggccc

SEQ ID NO: 81341 - DNA, 122 bp, Homo sapiens
aagccacagagttcctagacccgggaaagggcaactgctcccaaaactgtggaaaggaggcgagagcttccaagtagttttgtggaaaaagcagcaaatgtggtcaaggcagcggagtgtga

SEQ ID NO: 81342 - DNA, 122 bp, Homo sapiens
gtgactgtgggcgagcaactgaacctctctgagcctgttgtctcatctgcaaaacaatcccggggcattgcggtgagggtgaagttgggtcacgtagatgagtggtgctgcccagatcatct

SEQ ID NO: 81343 - DNA, 122 bp, Homo sapiens
gcacagcgctcgccgctacccacccggacccccagaaacgccccgccgctgccgctccgccgaggaccgccaggaaccccacttaccagcagcagctccctggggtgcaaaaagggcagtgc

SEQ ID NO: 81344 - DNA, 122 bp, Homo sapiens
tggtgatgttaatacagatgcttcttcacttaaaataagattacgtcccaataaatccatcgtaaattgaaaattttgtaagttgaaagtgtatacacacacacatacttacatttaaatat

SEQ ID NO: 81345 - DNA, 122 bp, Homo sapiens
aggtagagcacctgcctcagtccccccgttactccactcagtagaacagtggtccgagcacgtcatgtttggggcctggccacattcaccgattgcttacaggcctctgggtgtcacacacc

SEQ ID NO: 81346 - DNA, 122 bp, Homo sapiens
ctttgcctctctgagcttccactttttcttgggtgaggagcaggtctctacctcatgaatcgtggggactgggtgggaatgtgccacagccgggaatggtggcatgagtgtcaatgcagcag

SEQ ID NO: 81347 - DNA, 122 bp, Homo sapiens
accagggtgaccctcagccccaactgcttgagactgagagggctccagctcccaggtctccggacttgctgttttaaaacctcgaaagtcccaggaaaaccagagtgagttgtttgtcctac

SEQ ID NO: 81348 - DNA, 122 bp, Homo sapiens
atgctgctgttgagtaaactcttatgcttcccttcccatgccatatccttctctggtcatcgcaacagggccaaatctctcatgcttcagtgtaaatgccctctccttgcagcatcctttcc

SEQ ID NO: 81349 - DNA, 122 bp, Homo sapiens
gcatctgtactcaccaggcaggcagatgcactggaagccgttgagcaggtcatggcaatccgcgtggttcaggcagggagctgaggcacactcgttggtctccacctcacagagctgccctt

SEQ ID NO: 81350 - DNA, 122 bp, Homo sapiens
acatactaaccgatgcccaaagtatttacctgaattaaaggcggggcccaggattgctgccgccggaactgaggtggcatgtggcccaccctgtgactaacaggccttggacttacacgtac

SEQ ID NO: 81351 - DNA, 122 bp, Homo sapiens
cttatctgctgcattaattagatcaaggccacccttctgggctggaatttaaattcactccgacttgatgattaaaaaaaagcattcagtgttacacagtgtcccctttctgaaataatgcc

SEQ ID NO: 81352 - DNA, 122 bp, Homo sapiens
aaaaactcaaagcaatttcatttaatccttattgtgataaagtgtgagtggctaactcttcgtacaaagaggaagtactgcacatcaagtacataattaaaattgaatcatttgctcatgct

SEQ ID NO: 81353 - DNA, 122 bp, Homo sapiens
gggcgtggcgaaggtcgctgctttcctgctacaacgggcctactttagctaaaacagaaacgtaaggccaggacgggtcaccctttgtgggcccctgaaaaatacaaaacgaagtttggaga

SEQ ID NO: 81354 - DNA, 122 bp, Homo sapiens
agatgaagtgtgtgtggtcgatacaatatgctgacagcttggtggttctgactaggatggcgatactgcagtgaggtctgaggtgtctaatggagatattgaggttgctgaaaatgaactag

SEQ ID NO: 81355 - DNA, 122 bp, Homo sapiens
ttagtggcaggtgcaggttaaataagattttccaggaagagtgccaaaaatcagaattgccgagatctcagggtataatgagagaacatgatagttaagaggtggtttaaaagatgataagg

SEQ ID NO: 81356 - DNA, 122 bp, Homo sapiens
ccggtcaaagcaccgcttgggggcggggcctgcgacacgcggtgggcgggtcctgagtcgcgaccctggtccggacctgacctgaattgcgaccccaacctggactgctcccctgaccgcaa

SEQ ID NO: 81357 - DNA, 122 bp, Homo sapiens
ctaccagggctgcttgtgaatttctcctacttgggctgcttgtgaatttccaccttgctgcggtgtcttcttcctcggtttacttcacacatatttgagtgaggattacttgcccttgggga

SEQ ID NO: 81358 - DNA, 122 bp, Homo sapiens
cggccctcgccaggcggcgctgtgcctgggaggactttcccgctcatcgcgggggctgcacgtggcgctgaagccggggtcccacccccaatgtgctcgtcctaccacagccaaggctggga

SEQ ID NO: 81359 - DNA, 122 bp, Homo sapiens
cccaactgaaacaaagtgtcggccgcccggcgccggcgcccgccccgaccctgcccctcccgcccgcaactccgccgcccaccatggcttccgaggagctgtacgaggtacctcccctcccc

SEQ ID NO: 81360 - DNA, 122 bp, Homo sapiens
ccataaatgccctgctgccaaagccaaagccccccagagcccgccccaacaaggcccctccggccacactgacagagatactcttgtggccccccaagttatagaggcttcggctgccaaag

SEQ ID NO: 81361 - DNA, 122 bp, Homo sapiens
ggccccggggacctgccggctcccaggccccaggaagacgctgctcatgcgtggagcggccgcaggaaaggtactccccgctaaggccttcagggagcggccctttgccctgtgcgatctct

SEQ ID NO: 81362 - DNA, 122 bp, Homo sapiens
gagatccggtccgatgtggtttgaggattgcaaggaggggctggggggtctctggcgagtcggtacaagaatgtagaacagaactgggctttccagaaggcctttcaccccactcccccatc

SEQ ID NO: 81363 - DNA, 122 bp, Homo sapiens
cgcggacgctccagtcaaaggcatctcccctttatccgatgactcaccctcttaggaagtcggcccgagaggcaaatctcaaaataccttgacatgaaacattttgtttttctgatcaattt

SEQ ID NO: 81364 - DNA, 122 bp, Homo sapiens
aagtggaaaacaggctcatttgaatgcctgtttagaaaactggaaataaaaagttccacgcgcaagggcttaaaccttggggggaaaaagacttgccccaaatctctaacaaacccccctca

SEQ ID NO: 81365 - DNA, 122 bp, Homo sapiens
gtctgtgcgctgccttccgggactggtagttctctctgggctcctcgcagctcggcgcgtcgagagcgaactccatctcccaggaggcattgcagcgagttgctctgcgccccgcctcgtcc

SEQ ID NO: 81366 - DNA, 122 bp, Homo sapiens
gaacaagctttgctatgctgcactcctcctatctgaatgtctctctgatatcacccatggcgcaatcagtatttctgtcctcagaattttctgatgcccttcagtagtgggagtggtttgaa

SEQ ID NO: 81367 - DNA, 122 bp, Homo sapiens
tgcgtgctccataggctagggaaccctggccagctccgagcccggtgctgcctccacgcccggcttccccatggctgctgctgccactggcactgctaagtgcgttgccaaggcctctgttg

SEQ ID NO: 81368 - DNA, 122 bp, Homo sapiens
aaggccaaagacaggaaagtggggtagggtggaggcggaagaacgcccaggctacttctgcggcctaaagaagaatagaaagagcccttgtggtatcagtggctcctcagggaggcaggtgc

SEQ ID NO: 81369 - DNA, 122 bp, Homo sapiens
gacccagtggatttcagctaagagatatcttttctgaagggcatacttggcttgtgattgcgactgagtaaatctgaaataatgaaatcccacttctaccaatgattacttaaggtaagtga

SEQ ID NO: 81370 - DNA, 122 bp, Homo sapiens
agaccccccccttggggagaccggaatcctccagccgctgcgcacggataccctgggcggcgaggagagcccggcttctgcgcacccctctccagatgcgaggtgctcacccgcccctcgcc

SEQ ID NO: 81371 - DNA, 122 bp, Homo sapiens
cggaggcggaaaactaagaggggtgggcagctagcgtcgtttctaggcaaccgcagactccgggtccttagccgggcctgatggccctgaggcagttcggatgtgtcccaggaagtgcccat

SEQ ID NO: 81372 - DNA, 122 bp, Homo sapiens
ctggggaaaagtttgccgagaccggctgggagcgcctggcagctctggaattccagcggccgccgcggggttggcgacgccaggcaggagcgcggagcggcgggtgcagccactgggatgct

SEQ ID NO: 81373 - DNA, 122 bp, Homo sapiens
tgcgggtagggcaggaagggtggcctccccaccctgggtgcctgcagagcctggcagccccgccctgtggccatccgatgccacatgtcctctagagttcctgggccggctgctccacagcc

SEQ ID NO: 81374 - DNA, 122 bp, Homo sapiens
tctggtccacagttcagtgggagaagccctgctgggaacagctgggttagagtgcactcacgttgcagaaagcctgttgctagcaaacagatgtccattgtagaagaatgtgtgctcctccc

SEQ ID NO: 81375 - DNA, 122 bp, Homo sapiens
cttctcctccaagaaatacaactagacaaccagaaacatcccaagttataagttttcccacgactctaaccaatcagctggttctcatatttgtcagccctattaaccttatgtcttaaaat

SEQ ID NO: 81376 - DNA, 122 bp, Homo sapiens
ggggaggggcggagggccagcacttggtggcttcggctccagttcccagtgccggaggctcgcgcctgtcccgcccctaccccgcctctggcccgcgggcggagcccagtgccagcccgcgc

SEQ ID NO: 81377 - DNA, 122 bp, Homo sapiens
ctcggcactgtgggtgtgatattcataaatgtgggttatttaacctcccatgtggcaagccgttcactaatgaactatgggagtcagaaaataaaatccactctttctttctccagacagac

SEQ ID NO: 81378 - DNA, 122 bp, Homo sapiens
gtcatttctgctgacctcatccctgaatcagaggaaacagcatggagtaagttctaagttcggggcccacaccatatcaaatttaggcctggggaaggcagtatggctctttccaaaccctc

SEQ ID NO: 81379 - DNA, 122 bp, Homo sapiens
tgagatgaagaactgtgtgtcagttttgactcttacatactgatgccagatgcactcttgcgtgtgtggatctctccccagtccagggcagtaacctcacaatggtacctacagatgcacag

SEQ ID NO: 81380 - DNA, 122 bp, Homo sapiens
aactgttagtggcttaaagacaaaatatgccatctcttatcatgaatgttagggaatgaacgaaagatgccaaggctaccgaagtcatgtcattaaagaatcaatgtttgaaaatcctgttt

SEQ ID NO: 81381 - DNA, 122 bp, Homo sapiens
tgcgcggacccacgcagtcctcagaactaagcagactccgccctccggtccgcgaagtggcgactgcggtattaagtcgacctcgcgatttctcaaatagtgcaggaagaagacattaaata

SEQ ID NO: 81382 - DNA, 122 bp, Homo sapiens
ccgagcccgcgtggcgcaagagtacgagcgccgagcccgtgcgcgccaaggctgcgtgggcgggcaccgacttttctgagaagttctagtgctcccaagccccgacccccgcccccttcact

SEQ ID NO: 81383 - DNA, 122 bp, Homo sapiens
actgtctccccctcccccttctttcccaacctcttgggaacatgtgttggttgcctgcaacgtctgtgctttactttgcaagggttaattagatggcctattattcagcaaattaaaggctt

SEQ ID NO: 81384 - DNA, 122 bp, Homo sapiens
agttcttggagcagttgcggaggcttctgcaatggggtctggaatacggcccccctcctgcggccaatcgtggcattacagccccgtgtgggaacgcccgctgggcccagagcagcgcggtc

SEQ ID NO: 81385 - DNA, 122 bp, Homo sapiens
tgggcctcagtcaggagcacagaaaggacccctggccccttccccaggtggcagagcctgcgcacggcctggtcagcgaagggacgtggtcaatgctgggacctgggctctgggcccacgcg

SEQ ID NO: 81386 - DNA, 122 bp, Homo sapiens
gaattggcctgggaatgctgcccctggaaggcattggacagaacagggacagtcctgttgcgtgaggggcatgggtatgtgctcatcaggccagctccttccatgacctgctcagagccccg

SEQ ID NO: 81387 - DNA, 122 bp, Homo sapiens
ctggcacacacccctcccgactggcctgttaagctcttcctttgaggagtgcggcggcggcggcgtcaatggcttccttacccacatgcccacctgcaggcccaggctgcgttcctcctgtt

SEQ ID NO: 81388 - DNA, 122 bp, Homo sapiens
gcagagagacagcggggctcaggcaagcaggggctgggccgggacaagcacaagggaccccgagcaggagctctcacaagaagagtggctcagggctgcccggtagagagagatcttagtgg

SEQ ID NO: 81389 - DNA, 122 bp, Homo sapiens
cgaagcactcctgtcctccacccgccttcacccctcacccgcacccagctcctcccggctcgtggccacatgaagacctcagacaaatggggcaggctcctgggcccctcagaggccaccgt

SEQ ID NO: 81390 - DNA, 122 bp, Homo sapiens
ggctgctgtatctggcaagtcgggggaggactgttaacccgggggcctgctgtaactcaacgaaacatggagaggagttctgtgccgaccccaaagcaacgcttctccaacgcgaatgtgca

SEQ ID NO: 81391 - DNA, 122 bp, Homo sapiens
tgatgttagcctgcctcacgcaattcatccacagtccttcccagaagttttcaaaaaccacgatgttgttttcaatgaaggccgacactctccactgaggcatgacagtgacagccactgtg

SEQ ID NO: 81392 - DNA, 122 bp, Homo sapiens
ggcggcccgggggcggtccccggggtaggggggcgcgggccccgggcaagcgcagcctcacggtgactaagcatgcgcccgccgctaggcaagacccaggaggatgcccagaggcggggccg

SEQ ID NO: 81393 - DNA, 122 bp, Homo sapiens
agcgtactttggtagcaatttgaaacaaaagcaccttaacgtgactgaggctttgcttcccgttctctttccatctcagcctctcttcctccctctccctccccagggcaaatgcatcactg

SEQ ID NO: 81394 - DNA, 122 bp, Homo sapiens
cgtccctcaaaaatcccctagattctgctctatcccatctaactctaaagcccaaatctacgttttcctgaaagaaagtgtgaaataaataaaataggggtctcatcaaatccagtgggctc

SEQ ID NO: 81395 - DNA, 122 bp, Homo sapiens
cgcccaggtgcgcgcaggcaccgggacacggggcaggagcgggcgggggcggcgtggcctcgtggccgctctcaactcctccaattgcgggttccaggccatccgcggaactcgaggagtcg

SEQ ID NO: 81396 - DNA, 122 bp, Homo sapiens
gctcggcgttgccaggaagccgagagtagccactcagccattgtgtgggtcacatgactccggcgcccagggaggcgggtcccgtcgccgccacgatagatacgggcaggaggccgctgatg

SEQ ID NO: 81397 - DNA, 122 bp, Homo sapiens
taatgtgttcctccaaaattcatttgtcagaacctgatgcccagtgtgatagtattaaaacgtggggccctttgggaagtgattaagtttgggggctcctcaggaatgggatcaatgtcctt

SEQ ID NO: 81398 - DNA, 122 bp, Homo sapiens
gagaggtctgggagggccaccgggaagccacatacatcactgccacttcactaggtgccgcggagagcagctttggagagccgccctggctgatcatgaataatttgccagggaaccgggac

SEQ ID NO: 81399 - DNA, 122 bp, Homo sapiens
gaaagtgaagcaggctgacccgtcaccaagaattctctgccatggagggtcatggaagaacgggaagaggtgctggcggtcacagcagcccagggttcgtctgtgctcgtttatagatttgt

SEQ ID NO: 81400 - DNA, 122 bp, Homo sapiens
ttcaataatgaggcacagcaaactgtagaacgcatgacaaccacagataaggaaagcactcgcacggtcctgacgccattgcccaccctgacattcgttcatggaggtcgcctgcacattcc

SEQ ID NO: 81401 - DNA, 122 bp, Homo sapiens
tcctggaaactgcttagttgagtttctggttgacttgcgctgcgtgcagctggcagctgccggtgaacccagtgacactggttcagtgctcatgtttgttttccaaaaggggctgccctgat

SEQ ID NO: 81402 - DNA, 122 bp, Homo sapiens
aggttcgggggaggggggtcaatactcacctggtcgtagacaggagccctggagtcggagcggctggttttgtcccctgttggcggcagcgcaggggcgggggcctcagagcacagatcggg

SEQ ID NO: 81403 - DNA, 122 bp, Homo sapiens
acgtggacggatttggggggcggcccggagggctgcgggcagggagggcacgcaccacagcggcctggctcgcgccacgcgacgcgcacgcctctccccgcgcaggccgcggcatagctggc

SEQ ID NO: 81404 - DNA, 122 bp, Homo sapiens
gcaaggcgcgccgtacgcggttcctggcttcgcctcccagaccccatgccttccagttctcgctgtctatcctttgtctagccttgattaattggccccggacacagcaaactcagcaagat

SEQ ID NO: 81405 - DNA, 122 bp, Homo sapiens
tctgctcccaacaaacaggtctcctcattgtccttggcatttgacaagttatcccaacttcgaatctcatttcttcctttgctggcagcctccacccttccccacatcagtcggcctaatcc

SEQ ID NO: 81406 - DNA, 122 bp, Homo sapiens
ccagtgatccttggcttcggggtatgaagacagtgctgtggggagggcaggaggcagtggcgggatcccaggtaaggtaaaaaattctggaaggggccattcctcatgtttgcaaaggcaca

SEQ ID NO: 81407 - DNA, 122 bp, Homo sapiens
gaagtcccactcctgcaaacttcagcggcgattggctgaacggaaggggcgtggagagcgcgcgccaaagcacaggaggcggggccggtggaaggggcggggctgagggcggggtgtgagac

SEQ ID NO: 81408 - DNA, 122 bp, Homo sapiens
cggggtcaccgccagggccctgctgggttccacgccacgttcctgtctccgcagggcgttcgatccctagagggaggagcctgtccaaacggacgctaacggcctacctccccctcaggtgc

SEQ ID NO: 81409 - DNA, 122 bp, Homo sapiens
ccacgcccaatcgatcgcccagctcaaaataccggctggtgtgtaggtgggagaggccgccgctccccgtgtgctcgttgtctctgttcccaggccctctagagcaagatactaactatctc

SEQ ID NO: 81410 - DNA, 122 bp, Homo sapiens
tgggctggaatctgtggccaggcgcggagggcggggtctgcacgcgccccgaggtcaccgcggcctcccccggacccgccccgccgaccccccagggcccctcgccggctgcgggcagggcg

SEQ ID NO: 81411 - DNA, 122 bp, Homo sapiens
tctgatgagaggatccatgagagagcagggcaactgcactaagtgcccatttctccaacacggacagggcaccggggagcttggctaacatggtcactcagccttcctttgtggaatcacag

SEQ ID NO: 81412 - DNA, 122 bp, Homo sapiens
cgtcagggcctgtgcatccgcacgcggagccgtctgttaggagcttccagagtgttctctcgacactgccagccccgtgttagcacctgggcctcagtcccacttgctcccaggcgccggtt

SEQ ID NO: 81413 - DNA, 122 bp, Homo sapiens
agtgccgtgtgtgttactgcggcagcagtggccatgtggggccacacgttctcagcagggcggtcacacgtgaacagcctgtgtgtgtctctgagccttggggacacgtttgccagccgacg

SEQ ID NO: 81414 - DNA, 122 bp, Homo sapiens
cggcgaggccgctgctgccggagaccatggtagcgatgtcagcggcagcggcaagggttgcggtcatacgccaatgacactcccaggcccccggggacctcccaggggcagaggccggagga

SEQ ID NO: 81415 - DNA, 122 bp, Homo sapiens
ttgacaatgcttctcagatgccacaaagtacctcagtcttaacaagccaaaactgaacaacgaactgcaagccctctcacttccatacaaaactgaatgaatgaatctgtgaaccaataaac

SEQ ID NO: 81416 - DNA, 122 bp, Homo sapiens
gaccctctaaccaagttgccacgcaaaagcagcaagcaaacctgtgtgagtggggtgtcccgaggcggcagcctcccgcgatcctccgtgcacgccaccacccggctcatgctccaggcgct

SEQ ID NO: 81417 - DNA, 122 bp, Homo sapiens
cggtcagcctgggccttggcggccaaggggaaacttgggagcctcgggactgttggccaccggcccgtgggaggagtaaaggcggccctggctggcaggccgagggtgtgacgcgccggccc

SEQ ID NO: 81418 - DNA, 122 bp, Homo sapiens
catccacagcctccggaggatgcagtggctgcccacgtgatagcagggccaggattcacccgggttgcagcctcatccaaagctgcagggtgctgcaagtaaaatgtgtccctgcctcagaa

SEQ ID NO: 81419 - DNA, 122 bp, Homo sapiens
ccggggtggagggggggtgggggcctccagataaacaggcccccagcctctgcgcaggggcggggtgcgggggggcgcgggctgtgcccccgacgcccggggcgtggcaggatggcagcggg

SEQ ID NO: 81420 - DNA, 122 bp, Homo sapiens
gggcgcgtggcgaggcggacgggaaggctcaggggcggcgaggtagagcgccaagcatcccgcgtcccagactgcacgccctgaccccgcggcgttcggctcccacagccccgcggggcccg

SEQ ID NO: 81421 - DNA, 122 bp, Homo sapiens
cgccaaagcgaaagcgaaatcgcgcgcgcggcctcgaggatggggccctgcccaactcggcgctggggctcaggctaacttgctggagggccccgggaccccagcttggagatcgccgccgc

SEQ ID NO: 81422 - DNA, 122 bp, Homo sapiens
gatacaaaaggaatacagtcttaatactcacattcaatgaaatgtttaactgtatccaagcggagctacgaatggtttgcagatgtgttttagaataagcattttaccagaaaagaagaata

SEQ ID NO: 81423 - DNA, 122 bp, Homo sapiens
tcatcgttcactgtaacttggaactcttgggctcaagcattcctcttgtctcagccacagcgtccaactaattttttcatagagatagggtcttgctttgttgcctaggctgatctcaaact

SEQ ID NO: 81424 - DNA, 122 bp, Homo sapiens
cggaagctgcagtgagccatggtggcaccactacactccagccagggcaacagagagaggcgctgtctcaaaaagaaagaggaaagaaagcgaggaaggaaggaaggaaggagaaggaagga

SEQ ID NO: 81425 - DNA, 122 bp, Homo sapiens
gtcaccgctggtcctggtccaggtggaaacagaccgcggctaccctggtgatggaccccacggggcacacccgcgccaccccgcacccagggctcgcgccgcccgaggcccccggttcctgt

SEQ ID NO: 81426 - DNA, 122 bp, Homo sapiens
ctgcccggccaacgccgaagtgcggagagcagccgcgggccctttaagggccgcgaggtgcgcggtctctttaaggcgggtcctggtggtttctgttttctgaaggaagtgacggggggtgg

SEQ ID NO: 81427 - DNA, 122 bp, Homo sapiens
agcctctcacttcccgttttcccttcctaggcaaatgttcttttcagcttcgctaatccccgtggccagtttgtaactccctagagtccagctggagccttcactcggtcctttggcccgcc

SEQ ID NO: 81428 - DNA, 122 bp, Homo sapiens
tccccggacacctgcgccttcgcctgttcttgggcctgagcccgtcccagtccccgtccccgcaggatctgctgcaacccacctgctgctgccgcagccgctgcctccgctctgagcactga

SEQ ID NO: 81429 - DNA, 122 bp, Homo sapiens
ttttttcccccttgccctttcctgggtcactgcaggtcacgtgatgactgtcacgtgactcggtcaaaggatcttttcctcttacagccttgcaaaaaaaaaaaaagccgttctccaattaa

SEQ ID NO: 81430 - DNA, 122 bp, Homo sapiens
ccttgacaaacccccagccccagttacccagcccccaacccgccgccaggctccttcctccgccagccgcactccagctggcgccatcgcgcaccctctcaggttcatcgtccccgccccct

SEQ ID NO: 81431 - DNA, 122 bp, Homo sapiens
tctggtgctgccgtgtggctgaagattggtggacagaaaagggaaaggaggcacagaaaacggaagcaaagcacagaaaccgccagaggggctgcagctccatgcttgccttatctgaacac

SEQ ID NO: 81432 - DNA, 122 bp, Homo sapiens
gatcaagcagccaatagttaacagggcagacctctgacccaggttttttcacaccctctgcggtgttctttctaaatgccgtagctaccttaattgccttcatacttagcgcatctgtgcct

SEQ ID NO: 81433 - DNA, 122 bp, Homo sapiens
tcccaaagtgccgagattgcagcctcttcccggccgtcatcctgtctaggaagtgatgagcgtctctgcccggctgcccatcgtctgggatgtggggagcgcctctgccccgctgccccatc

SEQ ID NO: 81434 - DNA, 122 bp, Homo sapiens
aatggacactgagaacctggggccagggctggggctcagggagaccttcctggaggaagccgcatctaagatgaacaatcggggcggggcgtggagaggacaagggacgcatggccagcggc

SEQ ID NO: 81435 - DNA, 122 bp, Homo sapiens
cttgaccatacaactaggggtcgattggttttttagactgactgtaattccctggtggcacgcgtggatactgattcacccggggaggggcatagaggagactgaaggaaaacccgtcctaa

SEQ ID NO: 81436 - DNA, 122 bp, Homo sapiens
aggcattaggaaagtcacccactgactaacttgtctggaggtatctatacttttataagacgacaaaaggactttctataaagtagatttcatgcagtgcaaatgggaaaaaaaactgaaga

SEQ ID NO: 81437 - DNA, 122 bp, Homo sapiens
ctgaatggagatctgagactgccgtgctggcaaggcttatataatgaggcactcaccgcccgctcttcccatccctgttaatgtggcatcagagaaaccctagcagggagccaagacagtca

SEQ ID NO: 81438 - DNA, 122 bp, Homo sapiens
tgggagtggggtaccttgcagagcataccgggggttgtagtcggggacattccacagcaccgcccccgcccggactcccggcgctccaggtggagacagcagcttgaccccgcctcccgcga

SEQ ID NO: 81439 - DNA, 122 bp, Homo sapiens
cccccaccccccaagtttcctttggcaaaagcatcccaggcgtggttcaggcagagtccacgccagcgaggctggggccgaaactctccacgccaggaaggcggggtaggcggacccgccgc

SEQ ID NO: 81440 - DNA, 122 bp, Homo sapiens
ggtgagtggcgttcctggcggtcctcggcggagcgggagcagtgggacgtttccgggggtcgggtgggtagcggcgagcgctgtgcggtcagggcggggctcctgtgccctgtcggtggcgc

SEQ ID NO: 81441 - DNA, 122 bp, Homo sapiens
cagtgatgaaccaggaaccgcctgtggggttaggatcaagaacaggggcttgctgatgaacgtaaatataaaaatcctcaacaaatactagcaaaccaaatccagaaacacatcaaaaaatt

SEQ ID NO: 81442 - DNA, 122 bp, Homo sapiens
caaattctgggaagacgaggttctgaccaactgttctgcgaaggcagcaggggaagcttccggaggtgtcttttctctgagcgtcgagatggggacacagcaaagctgtggaaggcagggag

SEQ ID NO: 81443 - DNA, 122 bp, Homo sapiens
ggaccccagagggagagaccccaaatccaatggaatgtgacattgagcaggctattaagtcggctggtgctgctcagcgtgtggtaaaaaatattagcatagttccagggaaggaacaatga

SEQ ID NO: 81444 - DNA, 122 bp, Homo sapiens
gtacagacagataccaaaacaccctgttggtgcctccccacctctaggggctcaggaagacgtgcacagccaatctgcccaaaccccaaccctatcctctcaggactcaatagttgctaccc

SEQ ID NO: 81445 - DNA, 122 bp, Homo sapiens
ctcccggctccaggacccggttccccgtctatgtcccaaagtccaccccgcctagctccgcgcccaaataccggctccccatactctctgtctggtgcaggcatgggcccggcacccccaaa

SEQ ID NO: 81446 - DNA, 122 bp, Homo sapiens
ctgtgaaagagaggatctagaaagattaaaagatgatataatttggtttcaaagaggatacgaaatgttatagaggaactgaaaaagcagtagaagactggacactgagaagagatacatag

SEQ ID NO: 81447 - DNA, 122 bp, Homo sapiens
cggcacccgcccgcccacgccggacccggagggcacgtccgccgggaggggcagttcccacgaggaaagtcccattgatgcgagttggcagtgtagaggatgctcccctccggccgccgcgg

SEQ ID NO: 81448 - DNA, 122 bp, Homo sapiens
caggcgcggactgtcctgctcgcccgctggcagggagttggcgctgctcagttttttctgcgtgacctgctgctctcgctcggctgcttggcctccctggtccgtgggtgtctccacgcctt

SEQ ID NO: 81449 - DNA, 122 bp, Homo sapiens
gctgggacaagataccggtcacaaaggccttgctgataaacaaggatgcagtacagaagccggccaaaactaagatggcgatgaaagtgacttctggtcatcctcactgctcattatgcact

SEQ ID NO: 81450 - DNA, 122 bp, Homo sapiens
tagccatctgcgtggagtgctgaactgagcttcctcccctccagtgctgaaatgggaaggcgttcaaattcccagcctcccatcgggactccacttcctgctcactaatgtgtaagagcctt

SEQ ID NO: 81451 - DNA, 122 bp, Homo sapiens
cgtccccaccctcggttgtcctcagctgccagaaagccgaagtccaggagccctgctctgcgtggaaagcagaggcccacagcctggggcaatgtgcaggccaacctccctctacttccttc

SEQ ID NO: 81452 - DNA, 122 bp, Homo sapiens
ctggggctcgtctgtgttatagcccagccctgaaataaatagtatatacagctagggggccgggcggagcggaggacatgggggtcccgccggggtcacaggtctgagcagcgatcctgctt

SEQ ID NO: 81453 - DNA, 122 bp, Homo sapiens
ggttgcatcttgactgtgccactcactagctatatggctctgggcaggtgactcaatcgacgctttgcttgtgcttggtatgccgtgagtgtccgactaaactaccatggcaaatcttgctc

SEQ ID NO: 81454 - DNA, 122 bp, Homo sapiens
gcgaagcccggccactgtcaccatgggctccagcctcgcctctctgggcctggtggtgagcggcttcagcaacaggtttccggtccccgcagagggtcccactctgaactcccgatttacag

SEQ ID NO: 81455 - DNA, 122 bp, Homo sapiens
tttgaggaagtgccctggccctagggggcctatactcctcagcagcctctccccactgtacgtctctttgcatttggcagcaagggggaatagtttggacaaggaacctgctgctgcaatgg

SEQ ID NO: 81456 - DNA, 122 bp, Homo sapiens
gggaggggcacgggatcaccgtgcacagtgagtgctgtacaaagtgcctgtgcagctccccgaagccgcaggagggcgcccgactaagccttttctgccctgcgtgaggcgcatgcgtgttc

SEQ ID NO: 81457 - DNA, 122 bp, Homo sapiens
gagaggggatgagtgcggaagacacatctacgggagcggcctgttccggcgggcccgccacgacagctcgcacacctgcacaaatcgctgagtccacgtgggagcccagactcagccacggc

SEQ ID NO: 81458 - DNA, 122 bp, Homo sapiens
atttccgaaacagaaagtttgtctgcaacagcgcgccgtactgacgtagcagtgcgcaggcgcagtcccggctcctggcggcgtgttcctcttttcctcggttcccagtgttctggcaggta

SEQ ID NO: 81459 - DNA, 122 bp, Homo sapiens
cgcctccctccagcaccccgggctccgggccctagttgcttgggcaacgggaactgtcagcgacctggcccaatcacctctcggaacgtcactcgggtaggtccagaggcggggtcaacccg

SEQ ID NO: 81460 - DNA, 122 bp, Homo sapiens
gccaagactgctggcctgttttctaccctgattccttaggtggcttctgggacagaattacggttctctaagtatttgcttgcaggtgggtttactgaaacggtcgccactatacgaagttc

SEQ ID NO: 81461 - DNA, 122 bp, Homo sapiens
tgagcccgcaatgacaccgtggcgtcggtagatggctgtagacaagtgtgctgagctgtgcggtgtgaagagtaatgagtctggggaggccttgacctgactggatgctgcttttatctgaa

SEQ ID NO: 81462 - DNA, 122 bp, Homo sapiens
ccaaaaggaaacactttttcactactggggataggtttcagagaggcagccatcccatgtcggtcaatgttaaaaagaactaactcaagatatttaaatcaagatagctgagttggctgtaa

SEQ ID NO: 81463 - DNA, 122 bp, Homo sapiens
tggtcatttgggccctgtggtgttctgatttctctggcacattttccaagtgccccctttcggggtttgggatactttgtgggtggggtagaagccccttccactctgtggttgtggtttag

SEQ ID NO: 81464 - DNA, 122 bp, Homo sapiens
gaactggtcacggcgccgggtgggcttgcagctgtgacgcttatgtggacacctcagtgtcgctggtggttcacctcggcttcccagtttatttattgacgtcaacaaataaatgttgaata

SEQ ID NO: 81465 - DNA, 122 bp, Homo sapiens
ctctgcgcttctttccaactctatcaactttacaagtgcaatcgggccaattgacaggagcgcctcgctggccgcttgttttcactaggatctcagagcgggacctagatgtccctggcctt

SEQ ID NO: 81466 - DNA, 122 bp, Homo sapiens
tgagcctgtcactagacaccgcccacccgatgatagcaatgaaatcaaccccaactaacccggagcctcaactgaccgacggtctctgcactccacttcctggcactggctctcaaactggg

SEQ ID NO: 81467 - DNA, 122 bp, Homo sapiens
cggtgggccagcagcaacacgcccctcctcgcggccctggcgcgacgcggcgctccgccccggcccagctgcagctcctcctggtccagctccagaactaaccctagccccggccccggcgg

SEQ ID NO: 81468 - DNA, 122 bp, Homo sapiens
gtagtaatggattgcttggtttaacttgaaaaggaacatctggtacaatctataccaaagcgaaaaagttcaaattaaagtacaacaaagaaaaaagaaagtacaatggaactatgggggat

SEQ ID NO: 81469 - DNA, 122 bp, Homo sapiens
gcctggtcctactaaatcagcatctgcattttaacagatccccaggtgactcacagcacacgacagtgtgttcctccatgcctgatgactcccaagttacctcctgtcctgacatctgtccc

SEQ ID NO: 81470 - DNA, 122 bp, Homo sapiens
ccacacccggccgagactcgggcttcccccgcgagcgccgactgcagcccgcgcgacgcgcgccccattcatgcaggccccgcctcccgcccagaggcctcacaggcggcccggcccgcccc

SEQ ID NO: 81471 - DNA, 122 bp, Homo sapiens
ataatacaagacaccaggtacatggtgatgagcaaaaactggcccttctctgtaattattcgcaatataatattaaacccaacttacaataaaagaaattcaaaataaaatggtgccaggga

SEQ ID NO: 81472 - DNA, 122 bp, Homo sapiens
gggctggccaaggccggagtcagctccctcggtttgcggggaggtgtggagggagaggcgcgagcaggaacctgggctacacatggcgcctgcgggccagctggagttcccagtcggcgtgg

SEQ ID NO: 81473 - DNA, 122 bp, Homo sapiens
acgcgggggttcgcagaaagaggcggctgctattggaggagcccatccaggcctcccctacgcctagctccggagctgtcagttactcgaacagtgcaacgagattttggcgccacagctgg

SEQ ID NO: 81474 - DNA, 122 bp, Homo sapiens
acaagtagctggacgtggtgaggaacacatctgctgaagaagacgcaagtggcgagtcgtcgagaggacattgaggggagcacactggtagaagggcacgccggcagggcacaccgaaagat

SEQ ID NO: 81475 - DNA, 122 bp, Homo sapiens
agtagcagcagcagcaacatctaagtgagaggcggccatgaggactggaccgagccccgccggcgcggcccgcacccggagactactcgacctcttgccggttgcctcgcaggctccgaccg

SEQ ID NO: 81476 - DNA, 122 bp, Homo sapiens
tagtatcccagtgaaactctgagttggaatgattccctctggtcctgcatatgcagaggacggagcaggctcagccccctggaagatgagctcaaggggaggacaggccttgggagggcagg

SEQ ID NO: 81477 - DNA, 122 bp, Homo sapiens
tgcccgacgggctactccgggctggcagccccgcccttcttcggaaagctgacttacttgcgccccctggtgtttcacatgctgtgaatctctcacgaccgaggtctggccgcgcgccacct

SEQ ID NO: 81478 - DNA, 122 bp, Homo sapiens
cctagctgaaggcctcccagcttagaggctgggatcctaggactgcccctgagttgacggcggggaacagacagacgctgggacctaccctcaagtcccagagttcaagctcatgtggtggt

SEQ ID NO: 81479 - DNA, 122 bp, Homo sapiens
aaagacttcttaggaacacataattcatttgagtatggaactcatggtattaaacaattacgggattaatgtttccacaacagaatgtgaatattataagcaaagatattgtaaaaataata

SEQ ID NO: 81480 - DNA, 122 bp, Homo sapiens
ccagtgtacacatacgcgtccgcatagaaccgaaacggagtccaaaaacagaataatactcgccgtgtccaatgcactcatcttgagagagaaaaacccctgcctgcctggagcttgcgttt

SEQ ID NO: 81481 - DNA, 122 bp, Homo sapiens
gaaacgtttgtgatcaagaccaacttgggtttccccactccccagttgcctttgattctccgccaaaggcttgttcgtaagatgatgaggtacttttttcctgtggttaagaggactttcta

SEQ ID NO: 81482 - DNA, 122 bp, Homo sapiens
cgacaccaaacccagcaccaggggcagcgcacagggatcggtggccagggtgcctcacatcggctgcgcctgcccgcgaggacaagaaggatggggtttcatcagcgggaatgacaccaagg

SEQ ID NO: 81483 - DNA, 122 bp, Homo sapiens
gcagctcggccgccagctgaatggtcttgtgcagcagcgctgcccgctcctccgcagagccggtgcagcccaggatgtccacggccagcatgatggacatggtgtggaacctgtcagagcgg

SEQ ID NO: 81484 - DNA, 122 bp, Homo sapiens
gtaagttttttaaaaaaggaatgccgtcacctcaccagccaccaccccataccaccccctcgaatacacctcaagcagctcttcttgatgttgggaccagagtccctctctcaccgctcctc

SEQ ID NO: 81485 - DNA, 122 bp, Homo sapiens
agccctctggagacacttggctgggactttccaagctgcagatggacctagagagagtgacgggctgacacccagccagatgaagtgattccatgggatgcccccccaaatgaacagtcccc

SEQ ID NO: 81486 - DNA, 122 bp, Homo sapiens
cggtggccgccagtccggtcaccagcaccgcgaaggccgaggggcgcgccggtcgccgtgcgctcaggatgcccagggccagcccgttgcccaccacaccggccacgaacatcagggtgctg

SEQ ID NO: 81487 - DNA, 122 bp, Homo sapiens
gggagcgcccttcctcacaggctggggtagacataacaggagattcagggccttcggtctcgtgtgcagccgtgatcagaaacacagccggacgttcctagaacatcgcacatccaaagggc

SEQ ID NO: 81488 - DNA, 122 bp, Homo sapiens
aggtcaatggtgaagattcagtgggataaaatgtgtaaacactcctcaatgcatattccccggcctctgcctcagcattcagtgtggtcccgtgagagttaactcatagacctaagagccat

SEQ ID NO: 81489 - DNA, 122 bp, Homo sapiens
aaagatccagatatcaaggcacaatatcagcagaggtggcttgctattgatgctaatgctcgacgagaagtcaagaactatgtgagtaacgcttatctgtttggttatattgcccagagaac

SEQ ID NO: 81490 - DNA, 122 bp, Homo sapiens
tctggatgacgatgatttggtacacctagggcgcaaccagagagagctgtggccacctcccggcgggggctgcggcggacggagcacacccagagtaaagttaaccaggccggtgtaaagca

SEQ ID NO: 81491 - DNA, 122 bp, Homo sapiens
cactaactgttccttctcagtttctcttgccgctcactctcagctcccagagttggaacacgtcgtatcattgtctgcctttccctttctagaatgtaagggcctgcaggttagggtgtttg

SEQ ID NO: 81492 - DNA, 122 bp, Homo sapiens
accgacacgtggactgggctcctgggaaaggaagagtggagaaggcgggcaggagctgtccgggtccctagactctccgagtagcaggtcccacgcccccagcggaagaagccggggctggg

SEQ ID NO: 81493 - DNA, 122 bp, Homo sapiens
acttcagggatgctggggtacctagcaactgctaggggtcgagcatttccccatgtttaacgcccacaccaccacggtggggcatctgctctcagacaacgtgtggatgaggaactcaaagc

SEQ ID NO: 81494 - DNA, 122 bp, Homo sapiens
tcactggaacagaacagaggctgcccctgtggcatccagttgctgcgatgtggttcgaaacgttagacttccagttcacttttcaaagaagtgggtgttggacagttgcacagacttgcaaa

SEQ ID NO: 81495 - DNA, 122 bp, Homo sapiens
aaaggggaacactttgtcatttatcaacagcagccttggctaacaagcttggggtgtaagcgatgagtagcttctccaaagggaagcactgaatagcccttgtaaaaaccagcccgagccct

SEQ ID NO: 81496 - DNA, 122 bp, Homo sapiens
cagcagcagcaggggcagctggtactggatggccacgaggaaggggtctgcgatgaacggcgggtacgggaacctcttgatggtcaccgtcagtctctggaacagctggcgtgtggcggcat

SEQ ID NO: 81497 - DNA, 122 bp, Homo sapiens
aataaagccaattataatgtattggcattcattaccaattctctacaaaatacaactacacgatatgccttgctagatccatattctatctgaatttaggaaccaaagacatttgcgtagta

SEQ ID NO: 81498 - DNA, 122 bp, Homo sapiens
aaagagggaaggagcgagtgcagcacagaggaagcaaggaaagcagccgaccggcgtcagcggcttccaaggccggcaacaccctcgggcccgcaccaggcctggccctcccggcttcgtcc

SEQ ID NO: 81499 - DNA, 122 bp, Homo sapiens
cccacaaatctgccctctcgagtgcccaggccagacatggacactgattaatgaagtccacggtgggggtcacatattccccgcacctgagggtttccgccgcgcttccgggtgttcaatgc

SEQ ID NO: 81500 - DNA, 122 bp, Homo sapiens
aatgcagttgatagagcaaatatttcctcctctacatcaacttttggttagcttcacgggcgtgtgcacgcccagggatagggagacaactttaggactatataagtattgcccaaaatggg

SEQ ID NO: 81501 - DNA, 122 bp, Homo sapiens
tttcaacaagaacgttatctccacagtcagcacaatagtgacatcttgtgcctaggaactcgggagatagcacagccctgccacttctcgggtcaaacctggggccccaggaaccagcacac

SEQ ID NO: 81502 - DNA, 122 bp, Homo sapiens
tgcacggccacagctgttccgctcttttcccccagctgctgcttccagagcctggctttgcgtgggcatcctgaggcctccggggaccgggcgggcaagggtggggtttgtggataaggagt

SEQ ID NO: 81503 - DNA, 122 bp, Homo sapiens
gggtgattcggtttttgcggaattgactttgtgtgtggatgtcatggagacacttcctggcgggcgccgagagaaaggggcattgttcttcccgccggagaaaggagggcactgggggagcc

SEQ ID NO: 81504 - DNA, 122 bp, Homo sapiens
ctgatgaaatgttattttgaatattatgaatttttggcaaaataatgctgtcatcatctgcgtaagtttgctttcttcagtagcattgctgagggatgttcagcatttttatcatacaatgc

SEQ ID NO: 81505 - DNA, 122 bp, Homo sapiens
gaccccccatactgggcggcagcggctacaactgtgaggggcaggcagtggctgcctggacggggacgtgcttgtcctttgacgaggagtttgcgcctcattcaagtcccctacctgcatcc

SEQ ID NO: 81506 - DNA, 122 bp, Homo sapiens
gtcgggcaggggcacccccctaacccctgcactgagcagtctggttttagaacctgtaagcgaattgtgctttatcctgggagcctgcctgaagctcacctaaacaccggatcaggtcagtc

SEQ ID NO: 81507 - DNA, 122 bp, Homo sapiens
ggcaaacctgtggtttggccctgagcctctcccagcctgtaacacagcacacagatgcagcgagtcatacttagtgataacaacatcgatgacacgggcagtagcaatgactgatggggttg

SEQ ID NO: 81508 - DNA, 122 bp, Homo sapiens
ggtgggccaagcttatcccagcagctttgggttggttcccagaagctcagggaaccaggacgccattgcattacagggagcactcacacacacaaccactcagtcacactgggacaatttag

SEQ ID NO: 81509 - DNA, 122 bp, Homo sapiens
ggttaaggactatgcaggacagagaaagcccagggcagaacaagcagaaggaactccttccggggtgcctggcactgtcatacactgttaatgtgagattacaatgtcaatcacacaagcca

SEQ ID NO: 81510 - DNA, 122 bp, Homo sapiens
actctcgcgccctccgcgggcctcccaattttctcgcttgcaggtcgggaggtttccgggcggcacaatctctaggactctcctcccgcgctgctcaggggcatgtagcgcacgcagggcgc

SEQ ID NO: 81511 - DNA, 122 bp, Homo sapiens
cgggggaggccgggggccgcgggacggcgggtgcttctggctacctcaggagggggcgtgcgctgaggggaagtagttgctccttggctgccggagcgcactggaaaagtcctccaaaggcg

SEQ ID NO: 81512 - DNA, 122 bp, Homo sapiens
cagccctgtctccgggggccgagaactcgcccttttccctacattaaaagtaaactgttacgtggctctctcccacaacagggaagctcctcagcgttagcactagccgcagggcggagggt

SEQ ID NO: 81513 - DNA, 122 bp, Homo sapiens
tttctgcataggaaggaattgcacagcagcctgagagctgacttcaggcacacacagctacgaagaactaactgatcggtgttcactttccactggtctcttggctatccatttttttgatc

SEQ ID NO: 81514 - DNA, 122 bp, Homo sapiens
ctctcctgccaccgcggcggggcctgcacttccttcctaaactccccgggacagcaatcccgcctcacagactcaaatgccatcagcgggaacaatcggaggaagtgtggcgctttctccgc

SEQ ID NO: 81515 - DNA, 122 bp, Homo sapiens
aaaccacctgacaaaaggcagattcataggaggaaaggcatacaaatttactaacatgcgcgggagtcttacaaaataaaagatctcaaagaaatggccaaatagttgatggttttatacca

SEQ ID NO: 81516 - DNA, 122 bp, Homo sapiens
gcagccacccggccgccacctgttctccggccagctcatggagggctccgtgcccatccgcgacagctggagcaagtacttcgtgccgccgcagctcttccccgggtccgcttacccggtgt

SEQ ID NO: 81517 - DNA, 122 bp, Homo sapiens
agatctagtccctccccccacagtcactgatggtgtcactgaaagccgagtctgacaacacggaataagaagtcctcgatgagccgccgcaatgtgaccttaggccagtcacttgagctcca

SEQ ID NO: 81518 - DNA, 122 bp, Homo sapiens
atttagcagatgatacacagagaatcgcacacacagacaagacatagttacagcctagaccgaagaatggtgccagggtagcagagggtttttcttaagttttatttccctgaaattaaaaa

SEQ ID NO: 81519 - DNA, 122 bp, Homo sapiens
ttgaacatgtgagctatggatatatttgaacatgtggggtgaagtctccgaagattaacacgacccaaggtctgtgaaggtcccttctcagccctgagccacagagattaacattctcaagt

SEQ ID NO: 81520 - DNA, 122 bp, Homo sapiens
aaggactctgccgcggaggggcggcgagcgcctggctgcgctgcaggccccgccaagccccgccccctagccattcttagctgggggaggccagcacggatcagccgctttctttcttttct

SEQ ID NO: 81521 - DNA, 122 bp, Homo sapiens
tcgagccccgcccctcccgtccccagcggtctgcgcaggcgcattttccgaccgggcccgcgcgctcccagctctcgggttggctgctcggttgctgcctgctcagtgcatcctttttgcca

SEQ ID NO: 81522 - DNA, 122 bp, Homo sapiens
cctctaattcttcttgaattaaacacaaaaaaataccaagccaacaaaaatctacaagcacgggtttaactcttcatctggcttacttattctgcttctcattttatagtaacagattcttc

SEQ ID NO: 81523 - DNA, 122 bp, Homo sapiens
cgagactgcaggggccggtcctgcctggcctggcctgggcctgtgcctgcagctgctcagcgcggcccttccccgggcctttgaatttgtagttccctgggcagcactgttcccagctgcct

SEQ ID NO: 81524 - DNA, 122 bp, Homo sapiens
aactacacatccattttagaaaagtcctttttatttctttaaatcagaggccccctctagcgtttgaaagcagtcacaggcaacacacaatgcaattgaaagtaaacagtcacagcatttta

SEQ ID NO: 81525 - DNA, 122 bp, Homo sapiens
agcgaaggccagcttccgcggagtttgtgcccgggcttcccgggctctggccgcctcacgcgcacaaatggggctaggggactgagtggtaagcaactccgagtgttagacggtgatcgggc

SEQ ID NO: 81526 - DNA, 122 bp, Homo sapiens
tcaacggctatgtgttcacgttcagcacgctcggctgagagctttcatttttagggcaaacgagccgagttaccggggaagcgagaggtggggcgctgcaagggagccggatgaggtgatac

SEQ ID NO: 81527 - DNA, 122 bp, Homo sapiens
tgctactcagacgtcctggacgaaaaccagagcaagctcagcgaggacctcatggagttccggcgggacgcatccatgttaaatgtgagcgggcggggctggaggggctgggttgtgagacc

SEQ ID NO: 81528 - DNA, 122 bp, Homo sapiens
gggcttgaggaggattcactaaagcgttttatattctagacaaaccgctggctgcacagccgagtagggggcctgtctctcccctggatggcaaaaggtggagtcactttagtcacaaccgt

SEQ ID NO: 81529 - DNA, 122 bp, Homo sapiens
tgacggggtggagcatccccaaaaaagtgcatgcctaggatcccgcccagtgtatccctgcgcgcggcgggccgggctgggcagctttataaacagccgtggtgtgagcctcgaagggaacc

SEQ ID NO: 81530 - DNA, 122 bp, Homo sapiens
tgtctgatgtgtgtgtgcccgtggtgttcccgggactccccgcgggggctgggaggggatcgcagaaccctagggtggcgacagagcaaacccctccaggactggaggcccgacctccgcgg

SEQ ID NO: 81531 - DNA, 122 bp, Homo sapiens
aatagcaaaaacctattgcccatcaatagtgggtgactaaattgtgctttttattcctttcgatttcctgtagtcttatcatgcaagtggctttccttgtctcattcctgattttaggggaa

SEQ ID NO: 81532 - DNA, 122 bp, Homo sapiens
ttcattcttgctgcccgacaggtagacagcatcaccacctcagctttttcataatagccacgtaattccagcaccaatgtatcccacattgataaagaagccaagccttggaatgccaccat

SEQ ID NO: 81533 - DNA, 122 bp, Homo sapiens
ctctccccaccagagtcaagcagcaaaaatgctaggccttgtgggcggggccggggtgcccgctcttgccactggtccaatcacagcgcggcgttcctcctggccggccgccgattggtggt

SEQ ID NO: 81534 - DNA, 122 bp, Homo sapiens
agtcgaatccagttttaaaatacgccggatgcagtgcaggagacactaagtggcgaactgcggttgccgtgctgctgaaatttagtgagggaagccccggcccgggtgggtggttacgcatt

SEQ ID NO: 81535 - DNA, 122 bp, Homo sapiens
gaagaagacgcgaatggcaggggacagggactggtctcagagcgagttttacccacatggcgaggtccgtatttacctcgggtgaagggcgcgatgcggggattttaaggtcagcagagcgg

SEQ ID NO: 81536 - DNA, 122 bp, Homo sapiens
agtctcccagcatgatcagcccttgtgtgccctcacagggtgggctgcacactgatgtgccgaactcaccacctcctcactcacgcagggtcacacatgcagtcaccccggacacactctca

SEQ ID NO: 81537 - DNA, 122 bp, Homo sapiens
aagttttaccacggcctcgtggccacaagtgacaaaagagacaagtggaggcagctgagccggcctttaggtttctgtacacagggagatttcccatggctggcatttatggaaacaaccgc

SEQ ID NO: 81538 - DNA, 122 bp, Homo sapiens
cctggcctacatggcgaaaccctgtctaataaaaatacaaaacagccgtgcgtggtggcacgcccctgaaatctcagctactcgggacgctgaggcccgagagttacttgaacctgggaggc

SEQ ID NO: 81539 - DNA, 122 bp, Homo sapiens
gcagtcgccaggcagccaagcgcgtgcgctctgcatttgtcccgccgcggccccgccccacgcacgcgctccgaaccctctagtcccctacgccgtctcgcatgcgcttatactcttcgctc

SEQ ID NO: 81540 - DNA, 122 bp, Homo sapiens
agagaagaagaagatttacatggaaattgatcctgtgaccagaactgaaatattcagaagcggaaatggcactgatgaaacattggaagtgcacgactttaaaaacgtaagttggatgtttt

SEQ ID NO: 81541 - DNA, 122 bp, Homo sapiens
tgcctgcctctccctgagtgtggctgacagccacgcagctgtgtctgtctgtctgcggcccgtgcatccctgctgcggccgcctggtaccttccttgccgtctctttcctctgtctgctgct

SEQ ID NO: 81542 - DNA, 122 bp, Homo sapiens
gggactagaatccttgcattcgacaagtttgtcggcaatttccgtcagccgaccagagggcggagctgaggtcggcccagcccggaggcgggaaggacaacttggacccgcagttccgccgg

SEQ ID NO: 81543 - DNA, 122 bp, Homo sapiens
gtcgttgacctgaagccctggctgcaatgaacaagcttcgttttcctaagcagaaggtagcgtaagaggcagaggcattgagaccagctgcacaagaggagaaatccggcgtacgtggaggt

SEQ ID NO: 81544 - DNA, 122 bp, Homo sapiens
ccacttcacatgcaccttctgcctgcgcccgctcaccaaggggtccttccaggagcgcgccggcaagccctactgccagccctgcttcctgaagctcttcggctgacagcccgctcggctcg

SEQ ID NO: 81545 - DNA, 122 bp, Homo sapiens
gagctcctcttaaggaccccaaaatgtctcagtggtaccggattgaaaattggggctggacggtgctctcctgctgaaattcgggagctacttagcagccccaccttggcaccctcgtttcc

SEQ ID NO: 81546 - DNA, 122 bp, Homo sapiens
cccaggcgaagcgactgacttgcccagaaccacactactggggtgggggcagcaaataggcgcctaagatgaagtttagagaaaaatgaacaactctgccgatagaaaagtcgtccctacca

SEQ ID NO: 81547 - DNA, 122 bp, Homo sapiens
gcttcactgtgggccactacaaaaggagatctagtctattgagaatagggctagtctatgcgaaaagagcctgtaaacagatcttggttatattcaaggatactgtttgtggatgctaaaat

SEQ ID NO: 81548 - DNA, 122 bp, Homo sapiens
gtcgggagggggacccaggtggaggcgggagccggcctcagggaggagaagtgattcgcccgagtcacacggcggacaggggttgtgcctgcacccgcctcccctggccttgcccccatggc

SEQ ID NO: 81549 - DNA, 122 bp, Homo sapiens
ggggaaagaaatcacctcttcagaatgtccagaggggagttgccttgcttacctggggggcggtaccctctctcgtgccctcacagggctactcagcctcaggtagctggtgccagaataac

SEQ ID NO: 81550 - DNA, 122 bp, Homo sapiens
tgtactaaaccacaggcactgtactagactgaatttttgtctttaagagatcatctcggccgggctcagtggctcatgcctgtaatcccagcactttgggaggccgaggcgggtgatcacaa

SEQ ID NO: 81551 - DNA, 122 bp, Homo sapiens
ctctgccctaatcctctcttacccagtactatggggtttgtttacaggaaacccttgccacgagaagttttctgctagttttcaaccgtattttggcatcatcaactcaggcatatggaaac

SEQ ID NO: 81552 - DNA, 122 bp, Homo sapiens
aaaaaactctccatttctttctcgtggaggctccagaagaaaagctgcgcatttacccggcgcattctaaccgcctttgaggttccctccggcagccatgggagccgtggtggggcaaagcc

SEQ ID NO: 81553 - DNA, 122 bp, Homo sapiens
gctcgggtggaggctgctcctgtggagggtcgtcctggctcacagccgccatcatgctagcgctcatctgccgcctgccggacggtccccttcgctcgtctggaaggaggagatggagccga

SEQ ID NO: 81554 - DNA, 122 bp, Homo sapiens
ggccccggggtggagggggcaggggcgggggctgcgttccctctcgggcgcctggtcacgcgggtgctgctcccccagccatgagccacctgaacgggcacaagctgcacgggaagcccatc

SEQ ID NO: 81555 - DNA, 122 bp, Homo sapiens
ctgcggtcacacagccagtggctgagtcaggatatgaacccagatgctggttccagagctcgcatttaactgctgggctctgctgcctcttaaataagtttggagtttgtgacagcctgagt

SEQ ID NO: 81556 - DNA, 122 bp, Homo sapiens
accagagatggatggtttctccggaagggcagcttccttgttaattgatcccaagaaggacgccttccctgaaaccctgcaggggtaatggaggcccaggcagcagagagttccttcaaccc

SEQ ID NO: 81557 - DNA, 122 bp, Homo sapiens
ccaaaatgcacaactttcagttcctgaaatccttttgattttttcgccatctcaagctttcgcatatgcgatctacctgttacatttttgtcttcctcagagtaacttcaaatcatctcctc

SEQ ID NO: 81558 - DNA, 122 bp, Homo sapiens
gcagctccttctgggtcttctcaaactcctccttcccctggagggcagagacaggggctgcgctgaggccagttttctgagccagaagcacaggccagccctgtggcgggcgcagtgagctg

SEQ ID NO: 81559 - DNA, 122 bp, Homo sapiens
gttatggcaaccgccaataggttggcttcatctctaactgaaagtctgcacaggagcggccgatcgaagggccccgaggtgggcagcacaggctcctcgacgacttcctaggtcgcaatctc

SEQ ID NO: 81560 - DNA, 122 bp, Homo sapiens
agctgggactacaggtgtacaccactatgtccagctaatttctgtatttttttgtagagacggagttttgccttgttgcccaggctagtttcgaactcctgggctcaagtggtctgtcctcc

SEQ ID NO: 81561 - DNA, 122 bp, Homo sapiens
ggggcttgcggccggcctctccgagtgtggggcccgccgagcccatgcccacctggaactcgtgctggcccacaagcgccatgtgcagccccagttcccgcccacgcctctccttccacacc

SEQ ID NO: 81562 - DNA, 122 bp, Homo sapiens
acttaaacgactcttcttgatagacatattaacagcatccctctacaggtgaggactcctcgtcccacgcaggtccatcctctggcgtagggactaattcacacccagctcagcctggaagc

SEQ ID NO: 81563 - DNA, 122 bp, Homo sapiens
tttaactgtttggcaatatacaataacttattgttaactctgatttccctactgccatatcgaatgctagaacttattccatctatctagctgtactttgtacccattaatgtgaatgggtt

SEQ ID NO: 81564 - DNA, 122 bp, Homo sapiens
ctcgtggtagagcttggaggcctcctgcgagggcagcatggtgcccggaggcggggccggcggcggcggcggctggcgggggccgccggcccgggacggagcgccgggctgccgggcgggag

SEQ ID NO: 81565 - DNA, 122 bp, Homo sapiens
gaaacaccagagtctgtgactccagacaggacccactgtgtcctcttgaactttgcacagcgcgtgacgggggcagacggtgcaccgtggcccggcctttcgcgggggtcctcggggaagag

SEQ ID NO: 81566 - DNA, 122 bp, Homo sapiens
taggtggaactggaggtcattatgttaggtgaaataagtcagacttggaaagtcaaatttcgcatgttctcatttatttgtgggtgctaaatatcaaagcaattgaactcatgcagatagag

SEQ ID NO: 81567 - DNA, 122 bp, Homo sapiens
catccatggtgcacccaatgctggtggatggcttaggacggtaagcattcctctgccccacgtgctgaatgagagtggcttttggatgtcctataccttcaaggagctgtttgtcagcagcg

SEQ ID NO: 81568 - DNA, 122 bp, Homo sapiens
cgggcgtggggcgagccagagacttctcaagaagcccagaggattctggggactggaaagcggccgagttctttaaaaaaaaagagagagagagagaagaaaacaaaatctctcgtctgagc

SEQ ID NO: 81569 - DNA, 122 bp, Homo sapiens
ggtcaaaagggctccacatttggtttaatgctctgctgtcactgtctggaaactctaaatcgttttgaaccaggggccccatgttttcatttagcacctggtcctgcaaatgatttagctgc

SEQ ID NO: 81570 - DNA, 122 bp, Homo sapiens
gggggcttgcggggtggagggacgtgagagttctccagccctcctgcgggcactgcagctcggaggcgggagaggagcactagggcgggagaggagcacgccccactcttggagacatttca

SEQ ID NO: 81571 - DNA, 122 bp, Homo sapiens
tttaccatttcaaagattcagcttccctttcctctgtcattctatcatctagtcccaagccgtcagcacttagttacataagacacctcaaagctgctcactccttttatgtcatttaagaa

SEQ ID NO: 81572 - DNA, 122 bp, Homo sapiens
gctgggccagagcaaatccagtcacaatcatcagcctggcttaaaacggcccttgtcctacgactgtccacctgactctctcttccctttgaataagttcttttctgggagtttctttagat

SEQ ID NO: 81573 - DNA, 122 bp, Homo sapiens
atgaacccacggagaggaacgaagaactccggactcggcgccttgagacctgtgacaccacgaaggtcttcagcttcacttctgagcctgcgagaccgcgaacccaccagaaggaagaaact

SEQ ID NO: 81574 - DNA, 122 bp, Homo sapiens
ttccaacactagggacctctctgttcagatcttacttcacttcctggcagcgttcagcatcgttgagccttaacacccttttctcctgacttctatgacatcatacccttctgggtttcatg

SEQ ID NO: 81575 - DNA, 122 bp, Homo sapiens
ggggacggcgcggagcgggtgcgggagatgccgtgcgggactggggccacctgagccgcccgcctcgtccccgccttctgtgggaaggatgtgcgcgcggatggccggtcgcacaacagcgg

SEQ ID NO: 81576 - DNA, 122 bp, Homo sapiens
aaaccgaggctcagagagcttatgtgtcttccaatttccagtcagtctccacgcagcagccgaagtgatcttttaaaacaaatctttttatctgcgtgtgttattctgaaaaccctttttaa

SEQ ID NO: 81577 - DNA, 122 bp, Homo sapiens
gatagcccagagcactgagtagaatgcatgccagcaaggaagaccgtcttcccactacatcgctccagcagccctgaggaaagtaagaaaaagcccttggaccccattcacagtaacgacta

SEQ ID NO: 81578 - DNA, 122 bp, Homo sapiens
ctccctgtgattcactttccagaggcccctcagtgccccgacgctggcccggagggcggtcgctgactgtcttgagactgaagctcactttcggatcctgggcgttcttgccaggttttttt

SEQ ID NO: 81579 - DNA, 122 bp, Homo sapiens
cacttgagccccggagttcaaagctgcagtgagttacgatcgcgccactgcactccaggccgggcaaccgagtgagaacctgtctcaaaaacacacatagaaagaggaacagcctggccccc

SEQ ID NO: 81580 - DNA, 122 bp, Homo sapiens
aatgaatttcaagtggatttaaatttatccctgtaataatatcattgccatacacttacacgatgaaaaactgtgtgtgtataaaagggattgcagccaatgtgtggaactggcaggactct

SEQ ID NO: 81581 - DNA, 122 bp, Homo sapiens
ccaaagaaaaggtggtaaagaaaaatacagaaggatacacagagacccaaatgttctggtcgcaggcagtctcctccatgtgcggaaaatttaaacactacaggcagcccgttttctcgcct

SEQ ID NO: 81582 - DNA, 122 bp, Homo sapiens
gcccaggcggccgggaccgccgtcccaaagtcacaaaccacacccgtgaaggacgccctccgcaagacagagaggaggctgggcctgggaaggaacctccggcccttcctcaccatgcagcc

SEQ ID NO: 81583 - DNA, 122 bp, Homo sapiens
attgtgcccctttccaatgcagagaatctttcccacattgctgttattctatggctagttcgttctcttgcaaagcctgccttcattgtaaattattctcgtacatcctggagagttagaca

SEQ ID NO: 81584 - DNA, 122 bp, Homo sapiens
gcatgaataatggatccagcccagatgcagcagcctcgtgtgcgacttctcaaggcgcctcgagagtctctcaagggtgctcgctgaggtcacagcctacttgagctattctgggaggggag

SEQ ID NO: 81585 - DNA, 122 bp, Homo sapiens
aaggggtgacagatggcacctggaaaatcgggtcactcccaccctaatactgcgcttttccgacaggcttaaaaaacggctcaccaggagattatatcccgcacgtggctcggagggtccta

SEQ ID NO: 81586 - DNA, 122 bp, Homo sapiens
ggaacgaagcttagtggggaagcactgaagtgcatggcgcaaatttagatttaagcctcacgttagatttcagatttgcacatcgagtcccgcccctatccaatccggggacgtcaccgccc

SEQ ID NO: 81587 - DNA, 122 bp, Homo sapiens
ccctgggtcgattgtgacctctgccaccccccgaaacaccgcccaacccactagtccacacgagcctcaccaaagtagtgaacgaccagacaacacaaaggaaaaagtggctctgaggaaac

SEQ ID NO: 81588 - DNA, 122 bp, Homo sapiens
gccacctaattttgcagattattttccctcctatcaagtcagcataaggtaagaaccctgcgtgactggggatgagggtggggagtggtcctattttgaagaaaagagttttttagcttggc

SEQ ID NO: 81589 - DNA, 122 bp, Homo sapiens
catgtggttcttattcttgctgtcacccgggatcttatcgcaggcagggatgggcagttccgcggctcggaaaagctgagataaggaggggcgaagtaatagtaatagcgacagtactaaca

SEQ ID NO: 81590 - DNA, 122 bp, Homo sapiens
aatagggcataacccagcttgtcctcattcttgttatttgagtgctctttcactctcctccgccatgcccgacccggctaaatctgctcctgcccccaaaaagggctccaagaaagccgtaa

SEQ ID NO: 81591 - DNA, 122 bp, Homo sapiens
aagcggccctgtcagttcaggggccctgacactcagcctttcctggaggggccccagttccgtgagtagcacagtgccaaccccatcagaatattaccacatgtgtcaatcacacaccttgt

SEQ ID NO: 81592 - DNA, 122 bp, Homo sapiens
gactttcttcctctaacagggccttgaccttggtctggattagtgggaaattaacacactcgtcttgaaattttaaatacttgagcctgaatctaccaaatcaggacattcagatttttaaa

SEQ ID NO: 81593 - DNA, 122 bp, Homo sapiens
tctggtttgtttgtggcagacagggggaaccgagtggggaagcgcgtgttatactccggccgaaagctgtggggcgctcagtcctgcgtccagtggttaaattggtaaatgagttgggaaga

SEQ ID NO: 81594 - DNA, 122 bp, Homo sapiens
ttaatatacaagcctaatataaacttaatacgctctccttccccgcccgaacagcagcaacgtgctgcaacagccaggaaatccttgcagtaaaaagcgatggaaggaacttgcccaccaca

SEQ ID NO: 81595 - DNA, 122 bp, Homo sapiens
gttgggggaatgtgttgcagcccctctcccaacccagaaagaaggcatgtaatgtgctaacgccgttaggagtgtttatggcatatgggttatgatattgaatttgtccaataaaccatcag

SEQ ID NO: 81596 - DNA, 122 bp, Homo sapiens
caacgggcattggcttagatggagcagagtgagggaggggcctccgtgggcgttatgaaacgttagctctgcagaaaagtcagtgagactcaaggaactatgccgagggctacaaggacctt

SEQ ID NO: 81597 - DNA, 122 bp, Homo sapiens
gcgtggcagcgtgcaccagcagcacctgcacgcccaagtagctgccgaggcagtagaggccgtacaggagcgggccgccggcgccgagcagcaggagcaggcggcggcggcgcagcgcctgc

SEQ ID NO: 81598 - DNA, 122 bp, Homo sapiens
aaatgatgttgaaaactgaatatcgagaggaggtcgcggcgccggaggccccagaagggtcgaaggcgccgcgggctggggtcggtggcttagggagcccgtctggccatggtggccgcggc

SEQ ID NO: 81599 - DNA, 122 bp, Homo sapiens
tagaggatccttagggaagactccaaaatggcggcgtcgccggggtccatcgggtccacacgcggcaccacccccaagcaagaggtaactactgaagtgcccgaataaaaagaaactcgagt

SEQ ID NO: 81600 - DNA, 122 bp, Homo sapiens
ccggcgcgtgcctgcccccagcatggcttggcagggctggcccgcggcgtggcagtgggtcgccggctgctggctcctcctcgtccttgtcctcgtcctacttgtgagcccccgcggctgcc

SEQ ID NO: 81601 - DNA, 122 bp, Homo sapiens
gtccgtcttgcactgggcaggaagtttcctctagacccaggcagggacccaacttacgcacgctttgttctccaacccacgcacatactctgaaggcgcggtaccgcacccctacatccccc

SEQ ID NO: 81602 - DNA, 122 bp, Homo sapiens
agcacgccccatgctctctcttctcagggattcaacattgctctccagagcttggctggtcgagataaatagcctggcactctcaagactaagaagtccgaaaatgctggagtctctcagac

SEQ ID NO: 81603 - DNA, 122 bp, Homo sapiens
cgccgatgggcgcctcaaggctgcagccaagcgcgtcacattcccgtccgacgaggatatcgtgtctggagcagtggagcccaaagacccctggagacatggtagctaccgcgggtgaagcg

SEQ ID NO: 81604 - DNA, 122 bp, Homo sapiens
gtgcctgggccatactggggtgccctggggtttcttctccatacccagactcagcttccccgctggagtctgtcttcctggaacacggaacgcgggcgggctgtgttctcagtcacaatcag

SEQ ID NO: 81605 - DNA, 122 bp, Homo sapiens
cagcgtagcgtgttccatccgtgctggctttgcaggagggcatagagattgctcgggatacgccagagcccttaagcaacctcacgtgctgttactgaaaataagtaaaaaatattttaagg

SEQ ID NO: 81606 - DNA, 122 bp, Homo sapiens
ccttggtgcgtgtggcctgccgagcctcgagcccctgttctcctcagccctctttcctcccgcgtccccaggaggtgcctctggaagccacggagtcccatcggcaccaagaccgactgccc

SEQ ID NO: 81607 - DNA, 122 bp, Homo sapiens
gactacatgcgtgtacacagtaaggctgggggcagcctaactggtgtttcctactggtgacgtcacctcccacctaaaatcttggtagtattgaggctttggtgaatatcatgtctacattt

SEQ ID NO: 81608 - DNA, 122 bp, Homo sapiens
tatttgattggaaatatgtcagctatgatgatgactttctgggaagcgattcctgtcacccgctttcccctcctccccaccccacgtcctggggctttagagagcgattgggagttgaatgg

SEQ ID NO: 81609 - DNA, 122 bp, Homo sapiens
atgcctgtgttctatcaatgagagtacctgttagttttatagcaatcattgcccctgtttcgattgacctgcttactgtctttaagttgtggttgacccggagttactgacgaatgcagggg

SEQ ID NO: 81610 - DNA, 122 bp, Homo sapiens
atccttctttactctgtacttcagtcatcttcagcatatccttgtaagaaaagcaaggaacggatcaatactcctattttataaataaggaaactgaagctcagaagaggctttctttttaa

SEQ ID NO: 81611 - DNA, 122 bp, Homo sapiens
cagggcgtctccaggcagtgaaacagaggcggggtcggcgggcgattagcggccgaggcacgctcctcttggggcgggctgggcgcccctcgctggggtgggacggggaggcggggcgcgag

SEQ ID NO: 81612 - DNA, 122 bp, Homo sapiens
ccgcttggcgtcttagaaaccttactcaacccagacagaaccctctcggggtgaagcttgcgccccgctgggacccggaagcagaaggaacagaaggaacagaaggaacagaaggccgtgcg

SEQ ID NO: 81613 - DNA, 122 bp, Homo sapiens
agagtccctctcccggtagattttgtagagccgggggcctaggacgcagctcagcagcttcgccatggccccggctcgggccgctgctcttccagcagcaggtccccctgccggccccgccc

SEQ ID NO: 81614 - DNA, 122 bp, Homo sapiens
tgctgtgagcatcagggttcagagttgagtcttcaacaccagacctctgcgatgggcttccggattcgaggccccgtccctttctcagaaggtaaggcttgcgtcaggtgaaccacattggt

SEQ ID NO: 81615 - DNA, 122 bp, Homo sapiens
gctcaaatgaaaacgtctggatacacagggctacacacagaccctcctgtatactgaaaacgctcaaatgagaacgtctggatacacagggctacagagagtggacgggtggctccttgggc

SEQ ID NO: 81616 - DNA, 122 bp, Homo sapiens
cccctgggcagggaggggctctcaggccacctggctcccgcccacccgccttgccctgcacgacagtccaggatgtccgtctctggctacatctcggatgtcactgcttccccattgtcttc

SEQ ID NO: 81617 - DNA, 122 bp, Homo sapiens
aaaattgctggctgcactggagatcactgcagagcgctcctgatgcctcgatgctgacggcggatctggcgcgggctggggcgcattgcacattctgctccagccgggaggcggcgggcggg

SEQ ID NO: 81618 - DNA, 122 bp, Homo sapiens
aggagggagcttccaaaatgctctggctttcctatgaggaatcaaacaatatttttctctcggacaattgtactggcccagagttctaacatcagtgggccaacagccaaatagcgactgtt

SEQ ID NO: 81619 - DNA, 122 bp, Homo sapiens
agtgatcctccagcctcggcctcccaaactgcagggattacaggcagaagccaccatgcccggctaataacctgaatctcttgacggtgaagagaaataaggagaggggtaaaatggctaaa

SEQ ID NO: 81620 - DNA, 122 bp, Homo sapiens
ggttaggggtaaggttaattctacaagttcaaagccagtagcccctgatgcgctgttggacgtgaactataaatttggctctgaggttcccaggcatggaagaatatctagatctgtacaga

SEQ ID NO: 81621 - DNA, 122 bp, Homo sapiens
caggctggcttcccttcctggaatgttaatcattgcaggaatcccagctgattatacagtcgcctttcaggccagaacccaataaaaaatcaagaaaggatcgcccgttctattactgcgct

SEQ ID NO: 81622 - DNA, 122 bp, Homo sapiens
aggacatcccccctgagaggtccctcatatgtctgggtcctgtgggtgggggactaactgcgcaatgtagttaggtgctcaataaacggagttgccgctgaggtctgggctggggtcttgtt

SEQ ID NO: 81623 - DNA, 122 bp, Homo sapiens
gatatagtcacttccctccaggagcgaggcgagaggatgatgcggggtgggctactggcacgtgagagccagtggcaccgagagggcgccccggcggcgaggaaggaggcgcgcgtgggagg

SEQ ID NO: 81624 - DNA, 122 bp, Homo sapiens
acccgccgtgcaggaagcaaagcacggatttctacaggctgctttcccttgaaaaggctgcgcgcaaagcctccgctgagtcccccgacttcgtgacctgaatggtaatctcgcttagaatg

SEQ ID NO: 81625 - DNA, 122 bp, Homo sapiens
taactgctaatttcagctccatctggaattactgacgaatcatgaaaaaatgccttgtcccggatctgcatctgaaaaagttcctcatcccgggtgggtaacttctgggtccttgagctgag

SEQ ID NO: 81626 - DNA, 122 bp, Homo sapiens
cctgtgttccagggaagacccggggacctcggacctgttgggtaccagggaatgaaggtacgtgccccccctttcctggcccgagcccggtggtgccctcagccttgcacagcactaacaag

SEQ ID NO: 81627 - DNA, 122 bp, Homo sapiens
ccagtaagtctgctgtcaacacgcagacatggggggcgtcagcacagcccttgacctctgcgaggtcacaatccagggtggctgcaagaccaacagtagcaccccccacccccgaccaatga

SEQ ID NO: 81628 - DNA, 122 bp, Homo sapiens
atcggccttgtgatctactacttggccttcagtgcgaagagccacatccaggcctgagggcggcaccccagccctgcccttgcttccttcaataaacatcacaggacctgggactgcacagg

SEQ ID NO: 81629 - DNA, 122 bp, Homo sapiens
acaagtgtccaggctcagctaagaccccttccaggtgcagatctgagttctgcctacctgcgggacagctccctctgggtatatcagcaagtaaccccccaggatctgctcagagcctgtga

SEQ ID NO: 81630 - DNA, 122 bp, Homo sapiens
ggcagctggggttgagaagagctactgaggcaaagcctctttcccctcccaccctacaaacgtccctgcttgacttctctgcccctccccatgtcctgctgttgttgatttactcagactac

SEQ ID NO: 81631 - DNA, 122 bp, Homo sapiens
cctcagtgcagcatttgaaggcggtgctctgatgaaggcgggccctacccacagccttctcgggctcccgtcccggtgcgtccctcccgacccaggggaaggacatttggtgtggatcatcc

SEQ ID NO: 81632 - DNA, 122 bp, Homo sapiens
gacgggcatgcggctggccctgccctggaggcttcagaagagcacgtcctgccagcaccccgacttctggacttccagcctcaggaactgtgagagagtaagtgtgtgttgtcctaagccgc

SEQ ID NO: 81633 - DNA, 122 bp, Homo sapiens
aagtctgaattgtcagaatctcttaaaaagttgttagatccaccaccactgggcccctatcgcacagagcaatcaatcagagctgaggagcatgtgctcttcagctcccataagcccaccta

SEQ ID NO: 81634 - DNA, 122 bp, Homo sapiens
ttggtggccacgagaatagacagcatctctgactctcgactttatgacagttctccttcacgacaaagaaagccttattcccgccaggaaggcctgggaagctgggagaggccaggctatgg

SEQ ID NO: 81635 - DNA, 122 bp, Homo sapiens
taatatatggttacataatcagatctctccattaagataaacactcaatggcttggccaacgtccctgggagaaaataaaacagcatacattatttagactgcttcctaagttaaaaattaa

SEQ ID NO: 81636 - DNA, 122 bp, Homo sapiens
ctgggagccagggagcagcaggccagcaatgcagcccgtaccctgcaggtacctctgcaccgaggccaggctgcccacatccttggctgtggcctgtccatgctccagccgctcgtacaggt

SEQ ID NO: 81637 - DNA, 122 bp, Homo sapiens
gtgtccagaaataagcaccgcccggagttccgggcgatgagggcggagcgcttccgcctccgtttggattggctcagactgggaaaaggcgggtccagagagaaatgattggcatgggaaaa

SEQ ID NO: 81638 - DNA, 122 bp, Homo sapiens
ggaacacgcgaaacaacagctgatgctgtcagtgggacggccgcctctccgccgtgcgctcggtggtaactgccaactcgatgacatgtaaactttagcggtgacattgatccctcttctgg

SEQ ID NO: 81639 - DNA, 122 bp, Homo sapiens
cggctatcctgtcccaggcaagggcctgtggtcgcctcctcgccgcccccgggccgctcccgtagtccttgggacacctgggcctttgatgagcccagcagggcttcgggcggagggctcgg

SEQ ID NO: 81640 - DNA, 122 bp, Homo sapiens
tactgaaaaacaggtaaatctctacatcacccatatgggacagaaatgcaaagaacactacgttcctcgagccccacctggccctccactacctagaacctaaactgccctgttcaaacaca

SEQ ID NO: 81641 - DNA, 122 bp, Homo sapiens
gcgccccctggggccggtacccggagcccggcggggacctctgtgggcctggggaggggacgatggcccttcccgggagaggtgtcaggtgacacacctgattcggacccgcccgtcttgac

SEQ ID NO: 81642 - DNA, 122 bp, Homo sapiens
tgggtggccagcagctgatactgcgtgagtgtggtgttgcacgccctggcacagatcaagcgcgtcttccccacggcattgtcacccacgaccacacatttgatagtttcaacgttgggtct

SEQ ID NO: 81643 - DNA, 122 bp, Homo sapiens
taggggccccctgtaagtggctttgtttctggaaaatgtggggacacttttcatactcgacgtagcccacagccaggtctgtgcaccgcatctcggaaagtgtttcgagacctgctcgtccg

SEQ ID NO: 81644 - DNA, 122 bp, Homo sapiens
taaatgcagacggtcagtcctgccgggtcagttgcagggcgtgctgaggcgcacgccagacggtggagggaaaagcgttgccgagtccagcccgtgggcgcgtccttctccacctcctttca

SEQ ID NO: 81645 - DNA, 122 bp, Homo sapiens
atccctcataataataaaaaagcactccactagtatgccaattaagacacatcttccagtcgtgttttgtccttgagtgaaaaatcttgctgctcaattcaagtcattcgtttattcataac

SEQ ID NO: 81646 - DNA, 122 bp, Homo sapiens
agtttatggattcatagatcattgggtttaaagaatacctagagttttctgtatggcattcgttctgtgacaagtttggcctgaaactaatagtctagtcattgttgcaacacttccattga

SEQ ID NO: 81647 - DNA, 122 bp, Homo sapiens
cccagtggaaagggatcgaagccgcaggggaatccgggcccagccgacggcgccgcctggcgggcaccgaggggacgaaggggaggagtcactctccgcttccgggcggccaggttcgccag

SEQ ID NO: 81648 - DNA, 122 bp, Homo sapiens
caaaatctgccagacaaattctcctaaggacaagattttctgatgtggaacttcaagtaacgtacactgcagcttcattttatttctcaaaaaattccctccgccgccccatcccatagact

SEQ ID NO: 81649 - DNA, 122 bp, Homo sapiens
gccccgcccaccccgccccccgccaccgctcctccagcccactgaccttcccacaccccccgggaaccctggactgcgtccacagaccctgagcccacagatccctgaaacctcgcccctgt

SEQ ID NO: 81650 - DNA, 122 bp, Homo sapiens
cacttcctccctcctcttcagctgcattgacctttctgttctgcatactcaccatcctcccgtcctctgcaggccactggtacatactgagtgcatcgtctgcctgaaacgcttttccttcc

SEQ ID NO: 81651 - DNA, 122 bp, Homo sapiens
agtgttgctttccggggcattagtcactgtcctcctagtgggctctatgcccacctctgccgcttcctggccttgtgcctgggccaccgggatccttatgccactgctttccttgtcaccga

SEQ ID NO: 81652 - DNA, 122 bp, Homo sapiens
cgcctgctagggacgctatggacaccgtgagtccaaggcgctgctcctgccttgaagccacgcgctccacgccgcggccctcccattttctgcgtcctcagcgggctgagctgccagagagt

SEQ ID NO: 81653 - DNA, 122 bp, Homo sapiens
ggcagctttcaaaaatgtctaaactctgctcctctctgcaggatctgagtggttttttgacgctgtggcagggcataatcgtggggaagaaataggtctgacatcagtttatgacggtacag

SEQ ID NO: 81654 - DNA, 122 bp, Homo sapiens
aagaataatggaaccatatgttcatacaaaaacttgtacaccaattatagcagcatagcacgatagccaaaaaatgaaagcaacctgtattagtctattctcacactgctataaagaactac

SEQ ID NO: 81655 - DNA, 122 bp, Homo sapiens
gctcatgtcccgagcccagtcacatctccagcggtccggtgatggccgtggggctggcgccgagtggcacggcctccacagtggcccacaagggtctgttgtccacgccgcgtggaccgcgc

SEQ ID NO: 81656 - DNA, 122 bp, Homo sapiens
ttgcacttggggccccggacgggtctgaaagtcaagtttccactgacagtgttccttgtccggtggcctgagaacggtgaccctagaaccatcctttatcgggttgtgtgaagagcctggcc

SEQ ID NO: 81657 - DNA, 122 bp, Homo sapiens
gaggagtgaaacccagaaacttttcagaaagtgcattttcctccacatcagagatggaaccggaggagctcaggttccaggggtatgaagatgcaggcagaaactcccagaattgacgtttc

SEQ ID NO: 81658 - DNA, 122 bp, Homo sapiens
agctctgggggaccaagatgcagcaggggagcgccacgcgagcaggagcccacgccaggacgtaggatctcggcaaggaggcaatgcatgactgtgaggaccagcaagaaacagatttcaca

SEQ ID NO: 81659 - DNA, 122 bp, Homo sapiens
gtgacttagttctggtctcctagggaagtggtttcttccacacaagacaggcttgcaaggcggcctgtgttccttctacttcctggtggagtgcagccatctgcggccatgaaacaaccagt

SEQ ID NO: 81660 - DNA, 122 bp, Homo sapiens
cagccgccggcctcggggggcgggcaccgagtgcgggacgactgcggggaaggcgggggccgcggcccgggctggggggggcgaggcgggggccctgcgcattccgggtctcgcgcccgccg

SEQ ID NO: 81661 - DNA, 122 bp, Homo sapiens
ccttcgatgtcccctctgagccaccgcggccacggccaacagggatgcctccctcaccagcgcctcctgatagctctgggcctgagctcggtagagaaatggaagaggaaggtatatgcagt

SEQ ID NO: 81662 - DNA, 122 bp, Homo sapiens
gttcaacccgtgctttaatgtggacatgagccacctgtacggcagacaaaatgcagatcccgtctgcaggtccaggtggggctggagattctgcatcaccagcagacccgggcaccacaatg

SEQ ID NO: 81663 - DNA, 122 bp, Homo sapiens
ttatgattgcatgaaaattataaggcatttttatggagttttcacacacacatacacacgcgtgcacaaagtttagtaacagtgtactagaacccaccacttaaacggagggatctgaaatt

SEQ ID NO: 81664 - DNA, 122 bp, Homo sapiens
cagagctcctcatcctggacgccctcgccagagggttcatgttatggtttcctgcataagcgatctgagccctgcctcctcaagcgtaactgacagcatgctggatgcacaggcagcaactc

SEQ ID NO: 81665 - DNA, 122 bp, Homo sapiens
cccgggcactctcatgagccctgggggcgacggcacagctgggacaggcggcacagggggcggtgggagtccgatgccagcctccaatttcgctgcggcaccggctttctcgcactatatgg

SEQ ID NO: 81666 - DNA, 122 bp, Homo sapiens
ggaccgcagcagcgagtgttacagctcaattagagaaacgcacggacccaaagtgtgcgccggcaagatttattaaagcaaaagtgaaagtaaagtggaacccaaagtaaagcttccacacc

SEQ ID NO: 81667 - DNA, 122 bp, Homo sapiens
cacccaggtacacacacccgagaatgtgtgtgtccctgtacgtgaacccgagtgtgcccacgtacacgtacccaactgtcctcatgtacacgtacccgagtgtgctcatgtacacgtacccg

SEQ ID NO: 81668 - DNA, 122 bp, Homo sapiens
caagttagtgcccagggcaggatggggccgacgccagccccccaccctgcacagcacaaccgagccattcaaacagactcggacaggcacaaggtccctgctactgcagggatgccatttgg

SEQ ID NO: 81669 - DNA, 122 bp, Homo sapiens
gacggcggcggctgctcctcaccggcccgttgttccacccgcccccatcttccagacccccgcccccgccaggctaggacgagcagccgccaccgctgccaccgccaccaccgccgccgcag

SEQ ID NO: 81670 - DNA, 122 bp, Homo sapiens
ttctcttcttgtagcagatgctgatggccatctacccaactaacattctccttgccttctcgctctaatatccgcatgactagtaaagctatgtgcttgagggaaagctggcattagtctca

SEQ ID NO: 81671 - DNA, 122 bp, Homo sapiens
cacctctgtccccagagcaaacccacctcccagggcacacgcagaggggcagtcaggcaccgcctccaccctgccccacccaggccgcgcgcaccccggaaacctggactccgcgaccagct

SEQ ID NO: 81672 - DNA, 122 bp, Homo sapiens
agcctgttccctgctagcaaacaataagaccgagagaggaaatggccgtgagttgacctacgtgggcaagggaacagatgacttcgcagaattccagtgtcctcaagcttggcatgcaaatg

SEQ ID NO: 81673 - DNA, 122 bp, Homo sapiens
cctagcgaaatgcgctgtacctaggcctcgaactctcgcctgctctccggtgggcggtctcgaactccagcctgctctccggcagcccacagcaatgcgcctgccaagaccttaggctgcaa

SEQ ID NO: 81674 - DNA, 122 bp, Homo sapiens
ttatccccgtgagcaggttgcctctcagaccattgctagaaacactatgccttggtttatcgtcagtagagccaaccaagatgattgtctagtgaagacccttcccacatttaattttttta

SEQ ID NO: 81675 - DNA, 122 bp, Homo sapiens
gtgcattcagaggtgatgttcaaatatagagcaagttgttaaacgtttgcttaactggttcgagatgtgtatgcactctctgctttaaagaaagcaagcatacattgctatgcctgttggcc

SEQ ID NO: 81676 - DNA, 122 bp, Homo sapiens
cctagctttagattggcgcctcagcggcttctgactttagcaattccagtgttcaggcagcgaaagccagggaaacacaatagaaatgacaggggcgggagtaacaggagagtgttggaaaa

SEQ ID NO: 81677 - DNA, 122 bp, Homo sapiens
ctccctagggcgggaaggaggaggggtcgcttccaaacaccttggaggggaaccacggggcgcctgcccgccaggagcgcttgccacaccctgcaacagccggaccagaattgatgaggctt

SEQ ID NO: 81678 - DNA, 122 bp, Homo sapiens
gcagggagtgacaacgggccccagccgtcccttccttttaggaatatcaatggaggaaaccgatgtgtcaactagataaaagcagaatgggaaagaggtgcaagcaaaatactctggaatga

SEQ ID NO: 81679 - DNA, 122 bp, Homo sapiens
ataaacaaagtgtcctcacagcggagaaactggaaaatgtatccttgaaagcgtgtgaatcgggtgagcgtacaacgggtaacatcagtattggtgttctcactgctgggtcagcactgacc

SEQ ID NO: 81680 - DNA, 122 bp, Homo sapiens
gcttccctccatgcggcagaggggaagcgcggtaattctttggggctccagctagcctttcgtctgggtttttgctgcattggtcttcaggaccgtgaatttggggccgatgactgtgtagc

SEQ ID NO: 81681 - DNA, 122 bp, Homo sapiens
caggtagcgcacgaaggtgttcatgcgctcgcccaggctctggaacatgaccagtgtcagcgggatgcccagcacggcgtagaacatgcagaaggccttgcccgcatcggtgccaggtgcag

SEQ ID NO: 81682 - DNA, 122 bp, Homo sapiens
tagtaatcacatatttgtatagcatttcataggctttgtgctggggtgggatttttttcccgaaagatggagtactcctgggatttagaattagaaggccaggtttggtcttctcccacttg

SEQ ID NO: 81683 - DNA, 122 bp, Homo sapiens
taatgttcgtctcccccatcagactctgagctgcacgaaggtagaggccacacccagcaccgcatatccagagctcacagccgggcccgcacagagctgcccagcagtgagctgtgtggtgg

SEQ ID NO: 81684 - DNA, 122 bp, Homo sapiens
attcttcaagggaaggccccccggggacatggggacatggggcaggagtcttcacctgtccgtgccagtgaggaaggctgtgggatgaggaggcaggtggggactgtggggacactggtggt

SEQ ID NO: 81685 - DNA, 122 bp, Homo sapiens
gatttattgtctgaagagcagaccttattttatttgatatttccatgggaaaacagcagacgatacccagtgggcattccatacatatttatgcaatgaacaaataaatgaatggatgagtg

SEQ ID NO: 81686 - DNA, 122 bp, Homo sapiens
ggaccagccgaagctgatgtccacctggtccaggagggccttctcctccaagagacacagcgcctcccggaaggcggcggctgaatacgctatgtagacgctgatcccagcgagggtcacca

SEQ ID NO: 81687 - DNA, 122 bp, Homo sapiens
cctagcccccatgtccggtcccctcctgcccctgtactaaccctgaagctgctcgataagcgtccatgccatccgagagccgctggcatcaaacaccacatggccctgagggaaggaacatg

SEQ ID NO: 81688 - DNA, 122 bp, Homo sapiens
tagggcttggagttggggtgggtgtggggccttcatgggtcaggggtccttagcagaggccgtctgggcctgcaggtccgggtgcccttggaggagccccctctaagtccagacgtggagga

SEQ ID NO: 81689 - DNA, 122 bp, Homo sapiens
ggaggagccgcgggagagccgccggactcagcgagcagagggtcgtggagcctgatggatcgatgagatctgaaaaagaacactgtgcgagattgtattcctgcttattctttccaagttag

SEQ ID NO: 81690 - DNA, 122 bp, Homo sapiens
ttttcctaggacgaaccatgggtctcagcatagtgcagaatgagccccaggcagcataatcggggacagtttccccagcacttgtccccctcctttggctctctacaaagagatgtaggggg

SEQ ID NO: 81691 - DNA, 122 bp, Homo sapiens
cagggcagtgactgcttagtttatcctggtacgcgggaactggctgtggaccgagtggttcgggggaggggatcgctgggaccgggatgggtcatctggacaaatagggagggtgggcgggt

SEQ ID NO: 81692 - DNA, 122 bp, Homo sapiens
tgggcacagagaagtgcagccatgagccaggaacagagctgagatgaaacctcggcctcccgtcttcggaacgagagttaatccacagaggagctaaggaaaacgccgggcaccgagttgac

SEQ ID NO: 81693 - DNA, 122 bp, Homo sapiens
ttctaggctgaggaaacagcatgtgctatggtacgaaggagtggctggctttgcgtcttccgttgagtttctgagagttgatatcagtggaatcaaggctaagaggtggtgagcctgtgcgt

SEQ ID NO: 81694 - DNA, 122 bp, Homo sapiens
ccgcgcccattggcgggtttgcttttattggtttgttctgcgctccctcccgccttctggcgcgggcactggatgctagccgttttgctccaggagatataagaagcccaggttttccccct

SEQ ID NO: 81695 - DNA, 122 bp, Homo sapiens
gaagatatagagaaattggaaccgccgtgcatggctggcgggagcataaaacggcacagccgctgtggagcagtctagcagctgctcagaaagccaaacatagacttaccgtgtgacccagc

SEQ ID NO: 81696 - DNA, 122 bp, Homo sapiens
acgaccttgtgcacgcggggcgggggccctggcgacgttgtccacgcagggtaggagtcccggtgaccttgcgcacacggcgcaagggccctggtgaccttttccacgaccttgtccacgca

SEQ ID NO: 81697 - DNA, 122 bp, Homo sapiens
cgcctctctcctaccttccgttcgggttccgactcctccattctttgctgcacgcatgcgcgccacggcgaaaccccgcctcatccttgcgtgagacccaatccgatgtgaagaggcgaacg

SEQ ID NO: 81698 - DNA, 122 bp, Homo sapiens
taaaatgctggagaggggctggagcagcaggaaagtctctgggtcccacacagcctttctcgcgactggcaatgtgaagtgtattattgaaaaaggctggcagctcaaggcattgtttggct

SEQ ID NO: 81699 - DNA, 122 bp, Homo sapiens
ggggtcggctcagcccccggagccagaggtcacgtggcgtcctcagcttccaatcgcccccgcccaccataggaattgctctttctggaaagtgaccagatttcccccactaagataaccag

SEQ ID NO: 81700 - DNA, 122 bp, Homo sapiens
tgagcgtggcggggaggagagccccaggggctgcagagggcccgtgagatgggaagccctcggagggcttagagcagatgaggggcatagcctggcacgtgtttttatgtgacgccttgagc

SEQ ID NO: 81701 - DNA, 122 bp, Homo sapiens
gcaggtaacccagtctcagtagcttggtagttaccatggctcccagtgctgtgcgtctgacgtcattctgcggcgctggctgatggcgcaatcagttgcggcgtcctgtgagcgcggggatg

SEQ ID NO: 81702 - DNA, 122 bp, Homo sapiens
ccccgagttgagcctcactcgatgaatgacttccagggcctttggctctttgggactaaacgagaaaattatttttagcacaactatttggaaatctttgagaatttggatctgttattctg

SEQ ID NO: 81703 - DNA, 122 bp, Homo sapiens
cagggtatatatagggtttgatactatgtgaggatttgggcatccatgggggccttggaacgtatctccccaggataagcacaaactactatataaaacatttctatcaccacaaggatccc

SEQ ID NO: 81704 - DNA, 122 bp, Homo sapiens
tgctaaaatataagatccatgggggctggtcttatctaaaattgtaacctcctttccccccgtgcctagtacatagtaggtgctcaataaatatttgttgaatagatgagtgaattgattga

SEQ ID NO: 81705 - DNA, 122 bp, Homo sapiens
cgcggacggggcccatactggcggcggtcatggttggcactgcgggcggagcggagggcgcggtggcggcgagcggggagcggcggggcctggagcgctggcggtggtcggaggtggggacc

SEQ ID NO: 81706 - DNA, 122 bp, Homo sapiens
aatttatttcgtctgtgaaatggggaaaagatagccaccttgcataactggtgaagaattcgtaaactgacagcagaatctagtaagaggactggcccgtggtcggctcttaatggtgtgta

SEQ ID NO: 81707 - DNA, 122 bp, Homo sapiens
tgcatctggaagtggacttttggatcgctttgaggcgtgtggtgaaaaagggaatatcttcgcataaaaactatacagaagtattctcataaactagtttgtgatgtgtgttctcaactaac

SEQ ID NO: 81708 - DNA, 122 bp, Homo sapiens
tcacatcccaggagtggtggatgggtaagaccctgcctcgggaccatgtttggagggtcccgccagccgtgctccgagcgtcagggcagctgtggtgtgcgaggtgtttggacgagaccagg

SEQ ID NO: 81709 - DNA, 122 bp, Homo sapiens
ggcttacaaggttctgcgtcgccctaggcattttcttaatactcatccttttacaaaagacgtaatccgcaacagcttcgctttggggaccctttagcaaaagcaatgaattaggaacacct

SEQ ID NO: 81710 - DNA, 122 bp, Homo sapiens
ccttctcagcagagggccacaaatgaatcctgagttttgttctggaattttcctatgcaacgtgctggaaccagtagccaaatagaatcagtggatgaggcaggaagaaaaatgaggatctc

SEQ ID NO: 81711 - DNA, 122 bp, Homo sapiens
gagatgaccaggatcactactggatccacaggaacctgacccaactgttaagctgctagtcgagggctcctcagactctctttctgtgggtcagaatcagtcccagtgcctggggtggctgg

SEQ ID NO: 81712 - DNA, 122 bp, Homo sapiens
gtggagcctgtgcggctgaaggagctgaagcccgcgccagagccaaagctggagcccaggcggtagctgcggctgggagttgtgaggcccccataggctgagctcagcccacttgcattgcc

SEQ ID NO: 81713 - DNA, 122 bp, Homo sapiens
gggacacgcctggtgtctcttactccgacattgctgcacgagcctatggttgtggccgcacggagctggccatcaaggtgtgggtgcccagccctccacagacactctgatgtggttgttca

SEQ ID NO: 81714 - DNA, 122 bp, Homo sapiens
gaggcgtcctcgccccccgagaatgcgcctccgccgcggctgctcgcttcccaaaacccccgccattggcccccaattgccgggcctcggccccacagtgcccaaggaggagaggcgtcgca

SEQ ID NO: 81715 - DNA, 122 bp, Homo sapiens
agcctgaaatattactacagaggagaaagacccattcttgctatgttgctctatcttccacgtccaaaaacagtcctatgtagcttcagctgctccgaaatcaggtcacagaacagcaggag

SEQ ID NO: 81716 - DNA, 122 bp, Homo sapiens
cctagctgatggaaggatgccaccccctcctctggaaagagcccttgagagcctatggtacgtgtggtgtatttggagggctggctggctgtcccccaccagtaatgccactgccctctcct

SEQ ID NO: 81717 - DNA, 122 bp, Homo sapiens
catggggcgggagggcaagcggcctcaggttccacagttgttccaaggccggttccgggccgccgatgctcgcgcgtctttgttctcgcgagaatgaatgcgtcacttccggtaaccgctgc

SEQ ID NO: 81718 - DNA, 122 bp, Homo sapiens
ctcataatgtgccgtttgacctccttaggacataattaataatggtaattaacagtgctacgatatgccaggcattgagcttagcgccttaaaagtcatagctaactatgtttcacagcaaa

SEQ ID NO: 81719 - DNA, 122 bp, Homo sapiens
gcccacctctctttaaaagttgccccgtccacgcaccattcagcttacactaaactgtcccgacatgccttagccgtcagtttaattcataaagtagctgtaactcttgacatcacctccgc

SEQ ID NO: 81720 - DNA, 122 bp, Homo sapiens
cctggcatgctgtaaagagccctgtatcccaccacctgcctggtgcggggtgggatcttgcgaggtgttgaccatccctgttgtgagttcctgagtctccagatgtgtctctcagcttacaa

SEQ ID NO: 81721 - DNA, 122 bp, Homo sapiens
caatctagcgtttgggctatttccgcccttgtttcctctactccgaagtgcgcttcctagcggtcaggagagatcaagaccgacttcccaaaattccctcactgaatttacatagtaaatag

SEQ ID NO: 81722 - DNA, 122 bp, Homo sapiens
ctggaagaaagagggcatgatactgagctcaaactagttaaaatttgtgacttacagttgcgatctggaaatctaagggcaaggtgctgtaggattatggtctcagtgactcacctaatgga

SEQ ID NO: 81723 - DNA, 122 bp, Homo sapiens
aagaattaactcacccttctccgtctcacttcttgggctcaactctgtctggctaggacacgctgagtcaaagtttcccagttacctctggcaaccacgtcgacaatacaacacgaaaatgg

SEQ ID NO: 81724 - DNA, 122 bp, Homo sapiens
tggcttcctgcccctagggatgatggccgccaggtggcttcacttagtttctcaccaccccggaagacggggaccggcgattgggcggtgtccagaggctccgagaagaaggccatcggcgg

SEQ ID NO: 81725 - DNA, 122 bp, Homo sapiens
cgaccattttccacatggcaaactcttggtggatgggcaaacttgcaatctgcatcagctcgagagcaagttcctctctgaaattctctacagacttctaaagtcagccacttggtatcacg

SEQ ID NO: 81726 - DNA, 122 bp, Homo sapiens
aggggctttagactgttaggtagacattagtctggttgatctgggataggggtggtctttcgcgtgtggtggtgtagttttgacaaagctttgtcatcaaatttctgttgttttgggtacta

SEQ ID NO: 81727 - DNA, 122 bp, Homo sapiens
ggcttttggggcagctggggcgttcacagtccagaggccagggcactcaacccctgctgccgccgcccgaaggaagggccgctagacttacccatggaatcgggcagggacatgtcgctgga

SEQ ID NO: 81728 - DNA, 122 bp, Homo sapiens
cctgtggggtctctggggtcttcctacctcgtttcccagcaaggcagaaacacatgcttccgaggcgtcgcaaatggcggtcaggtcgtggcctccctcgagggccaggacaatccggccgc

SEQ ID NO: 81729 - DNA, 122 bp, Homo sapiens
ctcccctccccttctcccctccccctttgctggctttaggttcaccactggtgcttagcacgcggctgtgctggggctctgaatacagtactgcaaggctttagatgtggttgttttacgaa

SEQ ID NO: 81730 - DNA, 122 bp, Homo sapiens
cctggacaccgtcccgcgcctatcggattatatctgcccaagatgtgcgtctgattttatcgaggagcttcctgaagagaccaggagcacagaaaacagctctgccccttccactgccccca

SEQ ID NO: 81731 - DNA, 122 bp, Homo sapiens
tcccattgcccctagtcatccactccctaccatggtcggggcttccaggctgcgcatggccgcctgcggggcagggtggccggcgcgggcccggggcggggctcccggagccgtgtgttagg

SEQ ID NO: 81732 - DNA, 122 bp, Homo sapiens
ttcctcagtggggaggcccagagctcctttccgtgagcccgaggtctgtgtgtgctgttgcgggccacagtcttgctcttgctctcagctgtgctctcgtcccctgcaggtgaccgggctgg

SEQ ID NO: 81733 - DNA, 122 bp, Homo sapiens
ggcccacttttcactttttaacttttgcacctttcaaggatttgagactggccaatatgccgctatatttcgttgtccttactgataatctgtcagtttccatgatcaaactgatagactca

SEQ ID NO: 81734 - DNA, 122 bp, Homo sapiens
cttcctactttgtgctcaaggcgcaggatctggagttctcggtttccaagcaagactggtcgagtctaggtcggattggctgcgatagaacgaggggcaggggttgtaccgaatcacaaagc

SEQ ID NO: 81735 - DNA, 122 bp, Homo sapiens
tctcactttctaagcccagttataacatgctgggcccatgattttactcaacagtaaaatcgaggtttacgctgtgtgctaagagaggcatccaaaccaaacgtgtggactcaggggaggct

SEQ ID NO: 81736 - DNA, 122 bp, Homo sapiens
acggcccagccccgcccgcggcgaggtgcgcggggttcggtgccagccgctcgcccctggcggggccagcctcttgatgcaccggggacgggcgcccccatccgactcttcgaggggcggca

SEQ ID NO: 81737 - DNA, 122 bp, Homo sapiens
agagaagttgctgttgaagcactggttctattatcacgcctctccagccctttggagtcccggcctccagcttttgaaaccgtccccggggcaacagagtcccttgctcagatgtcgttcgg

SEQ ID NO: 81738 - DNA, 122 bp, Homo sapiens
tcggagaggctggggcccgcaccggtggggaggggctcgggcatggcgagctgcaggtcccgagccctggccctcagggaggccgctgaggcccagcgagaattcaagcagggcgcgggcgg

SEQ ID NO: 81739 - DNA, 122 bp, Homo sapiens
ggccctgctgccacccccttgggggctcggagcgcgacagcagcttggggacgcctcccgcgcccagcacggtgcacctgggccctgaggtcctggccgaaacgcgccaagttgggggtagg

SEQ ID NO: 81740 - DNA, 122 bp, Homo sapiens
gttattgaccggccttccctgccagggcgcttctttccttgcactaaactccgggttagccgaaggtgggcttcggcagaatcctcaagacccttggtgttgccctcctggaccgcacctag

SEQ ID NO: 81741 - DNA, 122 bp, Homo sapiens
tttgtgttttaggaggctgtcaatccaattaggttcagacttcaagtcggtcttgccttccggggcaaggatttcagtgtcatttggttttgaaacccactctgggtctttgcatatgggac

SEQ ID NO: 81742 - DNA, 122 bp, Homo sapiens
cagagtagggtctgagcctgcttaatccctctgagccccaggggtagggagcatggtgtccggcctctgtaatcccagcgccctgggaaccccctcccgccagcacccagccgggagatggt

SEQ ID NO: 81743 - DNA, 122 bp, Homo sapiens
actaggtcagctgaaggctgaactaaatttgttccataaaagttggtgagtttcatttttcgcttctaaggggataaaggaaaaagaatgtgcattgtgtttaagaaaacccagaatactgc

SEQ ID NO: 81744 - DNA, 122 bp, Homo sapiens
catgggaaaattctctctctttttgactctctctctttttgaatatattcaaaaggtgaacggaagtattctgctgtcatattaataatacgtaaaatttttgttcaagagaaaatcaactt

SEQ ID NO: 81745 - DNA, 122 bp, Homo sapiens
accgatccacctgccttggcctcccagagtgttgggattacaggtgtgggccactgcacccggccaactcaggttcctatctctggactgcagagtagctcccccatgaccccaggcacccc

SEQ ID NO: 81746 - DNA, 122 bp, Homo sapiens
ggtagcagccacagccaggagcacacagacagaagactgtgtcatgggtcatggcccctccgcacacctacaggtttgccaaaggaaaagcctggctctgttaggcacccaggagccccagg

SEQ ID NO: 81747 - DNA, 122 bp, Homo sapiens
aggcccaggtccgggctgggtgggggcagtgggctctgcttatcccgagtcctggcaagacgagtcctagccctgccctccgcgtcgctgggcgaaagggagtgggtgtgcgccgcgcgagg

SEQ ID NO: 81748 - DNA, 122 bp, Homo sapiens
ggaacagatggatggtcagatctcactgcagctctcacagaccaaggccaagcctggcttcgctgccaacctggggagacaaagctcaagactgctctccttgctttgactccctcccatcc

SEQ ID NO: 81749 - DNA, 122 bp, Homo sapiens
tacgcagggtggggctgagggcgtgagggcacaagtcattgaggacatggagggaacccacgctcgtcccgatagattgtcacggtcctgaggcgggacggtcaggacagggaagatgtatt

SEQ ID NO: 81750 - DNA, 122 bp, Homo sapiens
gctgtcccgccagaaatgcacagcgtcccactgaaaacacagctctgaggaacatctagccgtggctgcttcttggaggaacgtctagccatggccgctgacttggccttcttgatgctcct

SEQ ID NO: 81751 - DNA, 122 bp, Homo sapiens
cactcacacactcatacacactcatacactcacttgcactcacattcacagtcacatattcgcacttgcatacacacgctcacacactcactcgcacttgcattcacactcgcactcacact

SEQ ID NO: 81752 - DNA, 122 bp, Homo sapiens
ataaaaggtgcaaacctgaggaacgtggggacctcacagaggcaggcgcagccggctcatcgagatgtgtggacagcagaaagcgagtgaggcaagagaaaatcagcacagggtaaacatca

SEQ ID NO: 81753 - DNA, 122 bp, Homo sapiens
cctcgggatttgagttgcctgtgaaacgcagcagccttctgccgaggacgcagaaacccccgcctctcatccagggctgacagggcacgggccgcgagccgcggcggggcctcctggcgcat

SEQ ID NO: 81754 - DNA, 122 bp, Homo sapiens
tttatctgtagcctttttgaagttttattatttccataagttaatattgatatcatttttcggtttcctcatagatagatcctgtcgaattgtctggctgtttttatcaaggatatggtcta

SEQ ID NO: 81755 - DNA, 122 bp, Homo sapiens
tagccgccctgactgccttcagacctggccctgtagcttttctttttctccaggctgggccgtgagcaggtgggccgttgagttacctctgtgctggatcccgtgcccccacttgcctaccc

SEQ ID NO: 81756 - DNA, 122 bp, Homo sapiens
acaggatcctcttaccccatcaacagtggggcactcccttccttctagccccttccttcacgtctatgtggtttagcctggttagtaacttggacgaacagaagcttttctctggaacttga

SEQ ID NO: 81757 - DNA, 122 bp, Homo sapiens
gaccaatcagcaggatgtgggcggggccagataagaataaaagcaggctgccggagccaacggtggcaatctcctaggctttgtggaagctgcgttgtttttgctctttgcaataaagcttg

SEQ ID NO: 81758 - DNA, 122 bp, Homo sapiens
tgtcctcggtgccacgcctggagatgggcattaatagcagcctccctcaggcccctgacgcgtctgggcagctgctcagcacgtcccgcgtccctcggccccaaggccagcccactctggct

SEQ ID NO: 81759 - DNA, 122 bp, Homo sapiens
acaagttttgtgcggacccgttttcagttgtcctgagtatcagcccgggcctagacttcccgggttatatggtgatacagtttaaacgcatgtccttgccaagcctcgtgttgaactgtcat

SEQ ID NO: 81760 - DNA, 122 bp, Homo sapiens
acttcgttgcggtcccgttggcaagggtcccacctggaatgtggcctaatattaaggaaacgtgcgaaacgggactgcaattcctgcaggggtgccggcttcccggccagcgtgcagagaac

SEQ ID NO: 81761 - DNA, 122 bp, Homo sapiens
ccccgcctccgaggcaggacttgtgggagcaaaagtccgaggcgccgccgggactcctcccgtcccggcgcccagccaggccccgcccccaccccacatcccgtcgcccccctccccccgcg

SEQ ID NO: 81762 - DNA, 122 bp, Homo sapiens
ctcatgaaccctgtctccaggcctaacctccgcaccctggttgtctcaaagcctgtgtgccgaacaacaccaagctcacagcagggcctgccctggcacacaactgaaaagccagcacagcc

SEQ ID NO: 81763 - DNA, 122 bp, Homo sapiens
ttccaaatttcagttaaaatcaaacttggaaaattgcctatttccctgtctgtcagccaacgctagatcccactttcaggagcttcttaggagactcattaccaaagaacttacgcagggaa

SEQ ID NO: 81764 - DNA, 122 bp, Homo sapiens
aaacttaggtatcaattggtcgctcagttagtgcagtacgcagaaagacaagaaagtccgcggaatccgctaagaccgagactacctgaagtcgctgtggctagcacttccggtaccggccc

SEQ ID NO: 81765 - DNA, 122 bp, Homo sapiens
gtcatagaaccttagtaagcccacgttgtacagaagacattgtagataatccttcaattacgagcaggtagtatccaggtaactacatacatcttctaaggtggtcttcccagcagtcctta

SEQ ID NO: 81766 - DNA, 122 bp, Homo sapiens
cgtcgatgcctagccagggcggggccctcacagaatttgttcacggtgggggcagatcaccggagaacttctccagagcgctacggcacggttccttctacacactggcagaactgccattg

SEQ ID NO: 81767 - DNA, 122 bp, Homo sapiens
ctcaaagaatggagctttaacctatgttgaaaaatagcttcctgaataagttgtttatagcgctagttcattctctgagccattttggggaggtggtggaatcttacacagtatttgcaaac

SEQ ID NO: 81768 - DNA, 122 bp, Homo sapiens
actccagccacgtgagttttccgcctgtcagccaagcaaaatggccttcctgcagtcgcacggccctttggtctctgctcagggcttcggggaccctttccagccattgccctgcacctacc

SEQ ID NO: 81769 - DNA, 122 bp, Homo sapiens
ctcaggccacgccctaacaaggctgctggagctctggctcaggggccaacttttccatagcggggtccaaccagccaagagtgggaggaaaagaccgcggtgagaaacacagccgacgcctc

SEQ ID NO: 81770 - DNA, 122 bp, Homo sapiens
ggcggcggggactgcgcagtggccggagctgcctccagggggcggagctgctttggcctgcggcgacctcctgctctgggttgggcatggacagaggccctgacccgattcggggcttctct

SEQ ID NO: 81771 - DNA, 122 bp, Homo sapiens
ccccaggtcctaccactgtgactctctgtccaccctgatactggaagaaactgaagtcaccggattcactgattgctgcttcttgtgaggttaagtgactcatccaaggtcacacagctaga

SEQ ID NO: 81772 - DNA, 122 bp, Homo sapiens
ggaaaaggaatgtggttgactccacacaaacctgtcttcagagtgaaagtctgtgattcacggggtcagtggtctcatcttcatatctgaaagacagtgtactttttgtctccctaagccct

SEQ ID NO: 81773 - DNA, 122 bp, Homo sapiens
tggttgggagccagcggctggcgctcatagaggaggttccagccgcgcaggagctgacggcgcagggcaggctcaggcatggcgggctgcgcgtcccgagcccttcccccgggacgcagctg

SEQ ID NO: 81774 - DNA, 122 bp, Homo sapiens
cggagctgactcctaccagggtgaccggctgtcacctggaaggtcggggctgcagggctgcggcgcggtcagtcctcaggaaaggctccggcaactactccagtggaaaataacaaaaacaa

SEQ ID NO: 81775 - DNA, 122 bp, Homo sapiens
tacggggggggggagccgcctgaacacgggaagaagcgccgcctctgggggtggcagctacgacggacagggaggatggaggagtgggccaaatgcagtttcagaccaactgacgaccctaa

SEQ ID NO: 81776 - DNA, 122 bp, Homo sapiens
gatatggtttgaatttatattacacactactggattacatccaatagcatttacctggcccgagcaggtactctgtaaacaaaacaaagttatatcaccaagtgccttccccgaattcgctc

SEQ ID NO: 81777 - DNA, 122 bp, Homo sapiens
caacctctgtcatttcctatgtttttcacaatgtgccaaaacaactgcacacattggaggcgtttttgaatgtgatattcaggcgaccttgccaagcattgtctcatttccttactttgtgg

SEQ ID NO: 81778 - DNA, 122 bp, Homo sapiens
accatctccttttgccatgagacccggcagagcagtcccagagtaacacttggcggggctcggctctgcggagatgtggccaccgggctccctccgcgtccctcgaggctgtggccactccc

SEQ ID NO: 81779 - DNA, 122 bp, Homo sapiens
ttctccagcctgaagaggcacttatgccacctacagcctggaatctggcactacaattcgcgcccaagtccctggctcatcctaggtgggagattagaatctatgtagggaatggaaaatgg

SEQ ID NO: 81780 - DNA, 122 bp, Homo sapiens
tagaggccagatggccaggggcaggtcactgagaaacagagcagccatactgaatgggtgcgtctgggctgcaacggctgcggaacatggtggatttgattccagccttcttggatgacttt

SEQ ID NO: 81781 - DNA, 122 bp, Homo sapiens
tagcaactagacctaatctccagtaaggctggagactgacctgtggcccctgagagaagtcgtcagtgctgaggccaggtgaggagggcagccacattgtgctcttgactagagggcatgtg

SEQ ID NO: 81782 - DNA, 122 bp, Homo sapiens
gtggtttggcttcaccatggcttcctgccgtgcctggaaccttagggtgctggtggctgtcgtgtgtggactactgactggcatcattttgggactgggcatctggaggattgtgatcagga

SEQ ID NO: 81783 - DNA, 122 bp, Homo sapiens
gtttatcataagcagtgagggttacaaaatcctaaggcaggaaatgtgatgttgccaagccgcaggaattttatagctatggggaaatggggttgtcctgtgtctttctgtggctgcctcat

SEQ ID NO: 81784 - DNA, 122 bp, Homo sapiens
tcgccggggccggagagggcgggcggaggcacggggcccggaggcgccaggcggaggatgcgggcgacacggtggcggcggcgaccgcgcgaccgggcgggcgggcgggcaggggcgagcgg

SEQ ID NO: 81785 - DNA, 122 bp, Homo sapiens
aaagaatcttatttaacaaccgggaatgctagacgtgagctcttctgtgtattaaggtcccgcagtccagggcgcccgtatctgaatttggggctgacgcttttctcttgctccgcagcccc

SEQ ID NO: 81786 - DNA, 122 bp, Homo sapiens
aggtagaggttgcagtgagctgagatcacacgccactgtactcccacctgagtgacagagcgagactctgtctcaaaaataatatcaatagtaataatggtaatacaaacaaaaatactgat

SEQ ID NO: 81787 - DNA, 122 bp, Homo sapiens
caaatacagctgatggcagagtgacagcctgacaggccccagccctgggtgcctggaacccgggttccatctgggtttccacctctaatctgcacgcttgagcaagttctgtaacctgagcc

SEQ ID NO: 81788 - DNA, 122 bp, Homo sapiens
agctgggacggaggacgccactgcaacccgggtgaccatgacggcagctgggacagaagacgccactgcaacccgggtgaccatcacggcggctgggacggaggacgccactgctttaaaca

SEQ ID NO: 81789 - DNA, 122 bp, Homo sapiens
gaaagaagcgggtcttaccttggtaccgagagcagggagttgccatccattgttggtgggcgcccagagaagaaagacggaaagtgcaggcgaaggataagtctgtggtgctaggacccagc

SEQ ID NO: 81790 - DNA, 122 bp, Homo sapiens
atggccaccacttcctgtgccgtgttgaagaatctgtctactgctctgaaggcataaagccgttctctactttctagaagttttacattttgtctttaacatgtatgtctacaattcccctg

SEQ ID NO: 81791 - DNA, 122 bp, Homo sapiens
gttgaccgtattgtgagtaatatcatctccccctctggatattatgaactgtttcacagacgggtgtgcaccctcagtgtacagagggtgttcacccgtctctattgggtgtaatatcatcc

SEQ ID NO: 81792 - DNA, 122 bp, Homo sapiens
caggaaggcgaaaccgaacagaactgctgctgcgcggcgacagctgaagtgggtggagaacgggagggcgggggaggcggggccgagagcgattggaaggacgagggggcggagcccgcgct

SEQ ID NO: 81793 - DNA, 122 bp, Homo sapiens
aaaatatctggataatggttaccccgtcctcagtgcgttggacttgcatagacgcgagttcggtctcgggggccaccacgataatttgggggtctggggaaaccatctcctggagagtttga

SEQ ID NO: 81794 - DNA, 122 bp, Homo sapiens
cacaccccagcatgtgtgcacaccagagacgcctggagtgctcctgctaaggaggaaagccgccgtgccgcacctgctgggaaacgaggacctttcttgtcacctctgcctcccctagcagc

SEQ ID NO: 81795 - DNA, 122 bp, Homo sapiens
cgagggtgacgggccacaagccagtgtgattctttgtgtgtctctgggtgtgtcccagagcgggtctgcatacggagacgtatccttgcgggggtgttccttggatggggggccccagagtg

SEQ ID NO: 81796 - DNA, 122 bp, Homo sapiens
ggggcgggaccagttagggggcagggccaacctgggcggggccatggccggggacgtgggcgggaccaggtcaggggcggggccaggccaggatctccgctgtcccgggtcctggagctctc

SEQ ID NO: 81797 - DNA, 122 bp, Homo sapiens
cgtgcaggctgcggattcctccagtccctccctcggccgcctctcctcccggagcgagcgcgcagccctgcgcagcagcgcccactggtcccgtcctgtgagccccggccccagccgcggac

SEQ ID NO: 81798 - DNA, 122 bp, Homo sapiens
caagtccctgtgtaacccttcaggtacacgatctctggggtcccctgctcatgtggctttcgctcatgtggaagcacacaatagacaggcactgaagaccagcctctcacttcctcctgctg

SEQ ID NO: 81799 - DNA, 122 bp, Homo sapiens
ctaaaagtagaatgtcaaagcactgtaatatgataagaaaccaaaccccaaaattaaacacgaagatcagtgtctgtgctgaacagccccatctggtggacacaggatttgtgttaccgacc

SEQ ID NO: 81800 - DNA, 122 bp, Homo sapiens
ctcctcagccacagccacctcgtctgcgtaggcccgcccattgatgaagaagtccactggcgctgatgcgttgctcagggccccgggggacgggcaggtgatgagggtggagttgagaacct

SEQ ID NO: 81801 - DNA, 122 bp, Homo sapiens
acccccgctcagccccttcccgcccccaaccgactcttcccgaacgtcccttaccaaccgcgagagccccctactgcgctttggccacaccccctacgcctcgctcccggccccgcctctgc

SEQ ID NO: 81802 - DNA, 122 bp, Homo sapiens
agagagaggggagggcccctcgggttcctcgtcctcttcttttccagcccgaccctcctccgtgtcttcactggacgttgtcgttggtcaaagtggctttaatttgggatagctgtgttggg

SEQ ID NO: 81803 - DNA, 122 bp, Homo sapiens
cggcttgttttgtttcgacttctagctaaggccgagggaggcggagcgccaagctggtgacgcacttccggcgggaatgggctcggagcgacccgcagctccggggcgggcccgagcggaag

SEQ ID NO: 81804 - DNA, 122 bp, Homo sapiens
gggccgggcgctgcccggtagggcttgtggctggaaccccaggctaggcctttggggaaacgggaccctcaccctcagccccagccgataagggcgaggtctgctccccaccccgacccagg

SEQ ID NO: 81805 - DNA, 122 bp, Homo sapiens
cttttgccttggtggcccactttctccatttaaaacattaggatttgtatttttctgctgcgtttgtatgaagacatatttgattgttgttttctcttgattttaaaataaaacctcatgag

SEQ ID NO: 81806 - DNA, 122 bp, Homo sapiens
ccctgcttgctgggaaatctctgaggggccagtacagcagtcgcgccaggctgcaagaggcgggctgcagctggcgccggtcccggcgacggccacggcgtggcagcagcgagcgccagcac

SEQ ID NO: 81807 - DNA, 122 bp, Homo sapiens
gtgacatcctctgggaggatctgcaccggccgtgagctctcacagggagctccgtcttcacgcatgggaacagcttcatctcgtttccgtacgtgccttggccccggctgcccctacgaccc

SEQ ID NO: 81808 - DNA, 122 bp, Homo sapiens
agcgtgggtagcttccctgagagccaccagcccagtcatggggactgctcaggggagacgcgggggccctcttaggaggggtctgcaaacctagagcataggaaacactgcctgggagcact

SEQ ID NO: 81809 - DNA, 122 bp, Homo sapiens
agaaggaaggagcgctaacgatttggtggtgaagctaggaaaaaggattccaggaaggagcgagtgcaatttggtgatgaaggtagcaggcggcttggcttggcaaccacacggaggaggcg

SEQ ID NO: 81810 - DNA, 122 bp, Homo sapiens
aatatttatggaatgagatgagtacatatgagcatttcttcttcgtgggcagggaagaggcggaggagaagtctttgcattgtgtaaattgtataaggtggaatcaaatcaaattgaaattt

SEQ ID NO: 81811 - DNA, 122 bp, Homo sapiens
gccgccaccaaggctgtgacgaaggtgaggggccgggaggccggcactcggggcccgggccgcgcgccggcgccccatgtgcccgcccccgcctgccggggaagcgtccgggaggggccgcg

SEQ ID NO: 81812 - DNA, 122 bp, Homo sapiens
gataatttgatgaatgggagctgtggcgtgggaaatataaagcgtggacaaggttttaaacggctgcagtagagcagaaggatgggagaggaggcagaaaaacaaatgataggttgcagaga

SEQ ID NO: 81813 - DNA, 122 bp, Homo sapiens
cctccgtaggcagctcaggcagcacccccgcgggggcggcctcctcgcaggcgcacccagcgctctcctgccgcctcccgccttctggaacaaggtcagagccctagcgtgagcgccccgcc

SEQ ID NO: 81814 - DNA, 122 bp, Homo sapiens
ttccttggggggcagagaatgtgggttgttagaagccacttttgtactttaggaccatttcgctgacagagctgcctcttttgtgatgccttgagacagatatgttctgagatacccctgta

SEQ ID NO: 81815 - DNA, 122 bp, Homo sapiens
ctgcgggggctcagcccaggctctgggaccgcagcacgtcccgggcccgacacacccggccgccggcctcaacccctcgggagcccaagctgccaggttttaagtcagaacttacggaaagc

SEQ ID NO: 81816 - DNA, 122 bp, Homo sapiens
cagcgcccgaaccagcacgcatgcgcgccgcgggccggccccatttccgccccccccccacgcgcccccccatcacacgcacacccaatccccggactgctcgctggtgctgcttgtgagac

SEQ ID NO: 81817 - DNA, 122 bp, Homo sapiens
ttccaaatagcctgtccagaattgtgacagtacatttggttggacaagaccactgggactcgctcatttttatggagcttccaaaactgtcatttgacagcaagggtctgattctcagggat

SEQ ID NO: 81818 - DNA, 122 bp, Homo sapiens
tatgcctccccccagcctcaccggtgaagagaacgtcagtgccatccagcgtcgcgttctcgtctcctatttccacaattcggagccccaggtcttgcagggctttgcggactccatcgacc

SEQ ID NO: 81819 - DNA, 122 bp, Homo sapiens
cgaagactagatggatcccttctgccaatgtcattccgttcctaaagcagcgggaagcatcgcttagaacccagggaatctgcagaggcgggactgaagagagccaagcaacgctgttggaa

SEQ ID NO: 81820 - DNA, 122 bp, Homo sapiens
gggttgggaaaattaatctaggcatcttctgtcccatagctcacctcctgaatcccgtcacgttgaccgtagtgtgtcactgtgatggccaggccatccccaacactacactcctggaggag

SEQ ID NO: 81821 - DNA, 122 bp, Homo sapiens
acacttcaaactcgtaccgtgagtaataatgcgccgtccacggcaccgcatcgaaaacgccgctgagacctcagccttgacctccctcagcgtggccgggaccctgagcctctgcgcagagc

SEQ ID NO: 81822 - DNA, 122 bp, Homo sapiens
gctatctcgacagtcgactattcagccttgcaggcgcctctggcgggcttcactgagatccgctctttcggtgctcgactcgcccgtgctgctgccgccgccgaaggaggggcaaagctcaa

SEQ ID NO: 81823 - DNA, 122 bp, Homo sapiens
cagctgccggcgcgcggacgcgtctggggcggttcgccttagccaagtggaaagagactccgcgccgcgggctacttaatagagggctgttcccagctctcagtttactcggttacgaaacg

SEQ ID NO: 81824 - DNA, 122 bp, Homo sapiens
gaacaggaaaaaggatcaagataagaaagtaaggaaagaagggctgaaaagaagggggaacgtttgtaatgacgactgtggatattagaagacagaatcatgcaggcatacacccaaggatt

SEQ ID NO: 81825 - DNA, 122 bp, Homo sapiens
aaatgtaatatatatgttaactaagtatcatagataaaatccatgctcccttcagcagcacgtgtaataatagatacaaagattgaaaggtaaaagatttaggatgaaaagaatcctctctt

SEQ ID NO: 81826 - DNA, 122 bp, Homo sapiens
ccgccccaacctgggctttgatcttatctgagacttgtgagtccaaaagggcttagcaaccgcagccatggcagccccaacgacgtgaacatccgcacctctgagcctccccctgagaagta

SEQ ID NO: 81827 - DNA, 122 bp, Homo sapiens
aagcataaagagcagaataagaattctttatctgcaacaggattccctatggtattcttccgtaatgtataggtctgtaacagatattcaacaagagaatttaagacaagatatcatttaac

SEQ ID NO: 81828 - DNA, 122 bp, Homo sapiens
actttcccacagccaagttcaaactcaaagtgggtttcaaaatttaggtttgtccggctccgagacccgtgttctctgcagggcacttagaggactcctgtgctgacctctcaggcagcctt

SEQ ID NO: 81829 - DNA, 122 bp, Homo sapiens
acatgcgtaagaagggcaagcccaacccggaccagaggtgagcaggtgggggccctgccccggagcccctccatttctgaggcaggaagacactgccctgggtggcacaccaggcacagagt

SEQ ID NO: 81830 - DNA, 122 bp, Homo sapiens
actcaccctcttctccctttttttggtcacccaataagcagaaattccagatgcatccttcggggtggttgggagcaaaggatccccagggtgcactgtgccctgggctgaggtatctctga

SEQ ID NO: 81831 - DNA, 122 bp, Homo sapiens
aggtgggcggcggcagccattttggaacgcaggcggcagccattttggaacgcagtgcgtcgccgcgagcacgtgcggagttcacccggcgtcccactcctgcgcggcggccggctagggcg

SEQ ID NO: 81832 - DNA, 122 bp, Homo sapiens
gcgggactgcgcttcgaggcttaaggtcgccagttcggaggcatcgatgtgttgtctgtgcggagaagccaaaaagtgattacgtttatttgcaagaccgttcatgttgttttcagttcatg

SEQ ID NO: 81833 - DNA, 122 bp, Homo sapiens
agtggtacaatcagggccactgcagtcttgacttcccaggaatgagggccactgcagcctcgacctcccaggctcaagcaatccccccaccttagcctctggagtagctgggactaaaggca

SEQ ID NO: 81834 - DNA, 122 bp, Homo sapiens
cctgggggaactgggagttcagctttctgcagagggccactaggaacctcggattgcccacggaagccagccactttctttgacagtccagcccacctcctcttctgcccggagaagctcca

SEQ ID NO: 81835 - DNA, 122 bp, Homo sapiens
ctcagccctcgaccccggacagctcccaggagtcccggccgcagctcacctgggacgatccggcccgcaaggccacttgtcgaaccaccgctcgtcaagtcgcacccaaagtccgccgcagg

SEQ ID NO: 81836 - DNA, 122 bp, Homo sapiens
tgttgttctctttggttttcctttttcttccctgaggacctcctcccctgctccacagcccgcccccgaggcagagcttcagtgttgtcagcagaagggtcccccagggaccccccagtaaa

SEQ ID NO: 81837 - DNA, 122 bp, Homo sapiens
ttagggccgtagagttttttaaaatatggactacaactcccggcatgccacaccaggattcgaggaccacacgcctcagccagccccggcaagggcctatcaggggtgggtcggggcatccg

SEQ ID NO: 81838 - DNA, 122 bp, Homo sapiens
ataagcagcttttttacacacagactaatgttgccagcagcattccagtgtccttgctcacggcaggagaaaggcatagggactaataccactgggtcttgttgaagaaaagtggccggctt

SEQ ID NO: 81839 - DNA, 122 bp, Homo sapiens
taagttccaatctggaccagcctcagggttggcactcctcgcatgcccccacccatgagccgggccaagtccaggtctggtttatctcagcttctggacagcagagcccatctgcaaacatc

SEQ ID NO: 81840 - DNA, 122 bp, Homo sapiens
aaaaactgacagaaaatggggctggctggcaccaggaggtcaggaactccactcagtactcgtctttgcgttagcctagctagctgagatggtgctcaggatgaattcctgctgaaacagga

SEQ ID NO: 81841 - DNA, 122 bp, Homo sapiens
agccccggacagtcaagtttcaatgcgttgcctagaggaactggggagcctggaaactcccgaagaagactgagtgggtagatgcacctgagccccagagaaataggacaggagaggtccag

SEQ ID NO: 81842 - DNA, 122 bp, Homo sapiens
ccgccccagttccaggctctcctgcttctccacggactctgcgggaagttagagcctctgcgtgcgctccggggcccggcgagaggatgcgcaaggtggagagccgcggggaagggggcaga

SEQ ID NO: 81843 - DNA, 122 bp, Homo sapiens
tgtcacccaggctgtagtgcagtggcccaattacagctcacctgcagcctcaatcacaagcgatcctctggcctcagcctcctgagtagctggaaatacaggtgcgtgccaccacacctggc

SEQ ID NO: 81844 - DNA, 122 bp, Homo sapiens
aattcccacttgggtgtaaatgactgctaggcttccagggtcactgcattttgaaagtggcgaagcctggagccacagtgctctgcccctactgtaatggatgctaggaggatgagggtgtg

SEQ ID NO: 81845 - DNA, 122 bp, Homo sapiens
tccagtcccggcttggaactgaactgtgtgagcacgggtcctggaacccgggcccagaaccggcgagcccaggtctgagcccagagctcagcggtcagcctcgtaggccctgactcggaatc

SEQ ID NO: 81846 - DNA, 122 bp, Homo sapiens
accttgcttctacctgtcttctgaaaaggcttgcctggtggtccgcctggaggtcattaccgtgcccttctactgcccatcttcagactgctcagctcactcagaatttttcctcttcactc

SEQ ID NO: 81847 - DNA, 122 bp, Homo sapiens
cacgctacgcataatccgtttggggattccgaaccccagtggctctgtacgcacccaggtcgctggagcaggaggtcccagatccccgctgtaaggctccgtgggcgagcgcccaggtgggg

SEQ ID NO: 81848 - DNA, 122 bp, Homo sapiens
tctccaatggatatcctaaataaactcaagtagactctgaagaagtgcagagtttgataccgtttatgcaacatttaaaagcatgcaacacagtctagaaaatgttattatgcaaaacaata

SEQ ID NO: 81849 - DNA, 122 bp, Homo sapiens
ctcacaacgaaccctctatgaatgattgatttctctctcaacactacttttaaagcaccccggcagtgtggacactggaatgtgatattttctttgaaaccctatgtacttacaataaaatt

SEQ ID NO: 81850 - DNA, 122 bp, Homo sapiens
aaccgagtggcccaaatatctggaggctgaagataaattgacaaagaggcgggccgcgcacgctctcacgcttcggcagctcagatacctgttacctggcgttaattgcatttacagcggga

SEQ ID NO: 81851 - DNA, 122 bp, Homo sapiens
ttgtgcatttaccattatggtttttgcagtaaagcctgtcctcttcgtagtgtataaactcggtgagggcagagagcctgctttgttcactactggcttcccagcatgtcctactgtaccta

SEQ ID NO: 81852 - DNA, 122 bp, Homo sapiens
acgggactgtatggctgcaggaggctacacagcctcaggaggctgcttctaagaggcccacgtcgcctgcatggggacgcgcctggctctccagcatgtggtcatttgaattgtacatgttt

SEQ ID NO: 81853 - DNA, 122 bp, Homo sapiens
ttgggcaaaatgtcccaaccacctgtcctgttaagtcattatataaatatagactctacacgcagctgcttttttagaacttggaaaaggacagggcagctgatggctccccttttgagggg

SEQ ID NO: 81854 - DNA, 122 bp, Homo sapiens
accatgacactttttgaaagggtaacaagataaaaggaacgtgttggatgtcatcggtctcgatatagttctaaagttttggtaatcagagtgcagtgttgaaggcctggaagtaggggaga

SEQ ID NO: 81855 - DNA, 122 bp, Homo sapiens
gacacccgaactctgactcacacacactcacagctcacacgtggacagggagacaagacacgcacggagcccaggaagctagaggcgcgccgaggccagggaagcgccgccggagcgggagg

SEQ ID NO: 81856 - DNA, 122 bp, Homo sapiens
gtttggtgttagctgtttatgtattttttttttgtttacctgtttatcctgatgttcttacggtgcagttgaaaaaattcttggtggaaagacacagtaaaagtaaaaaaacatcttgggag

SEQ ID NO: 81857 - DNA, 122 bp, Homo sapiens
aggagttctgccaatagtgacatgactcagcacctagattgttgatcctccagcttcaggcgtgttgacagttggccacaaaccccactgacatcttgattgcagattcatgaagagtcttg

SEQ ID NO: 81858 - DNA, 122 bp, Homo sapiens
gttgcgggtgggtggcggcggcaggattggccgggccacgcgccggtcaccgagaagcagcgactccagccccttccgcaaaccaagacccgccacctagagccgccgcccaatcccctttg

SEQ ID NO: 81859 - DNA, 122 bp, Homo sapiens
aaacaaacctttgatgtgcactttcactcgtcagctaaacataatgccacagcagtgtcccggatggaagttacacctggggtgggaattctatgtcaaacgaaatacttaactcgttaatt

SEQ ID NO: 81860 - DNA, 122 bp, Homo sapiens
gcgggtccttcctgccctgctccttgaccccgacctgacggtccactaaggcttcttagtcgctacacataaccccagaacatagaggtcgccccgaagaaggagaaccatgctagatgaat

SEQ ID NO: 81861 - DNA, 122 bp, Homo sapiens
actcaacttctccaagtctcagttttcccatctgtaaaatgggatctgagcatctcgttgcgttatgtacctacatgtacagtaagtttgtaagtggcaacaacacaggccctaatctcggc

SEQ ID NO: 81862 - DNA, 122 bp, Homo sapiens
tagtgagggagccccgtgagcccgtgccagcccggaacccgcaccagcctgcaagcgccacgctcagccccggctggcttcggcgcctcccgctccacacctccctgagagcagagggagcc

SEQ ID NO: 81863 - DNA, 122 bp, Homo sapiens
ccatctcatgttattgtcattcctcacttgtctaaacaggaatagggctgagtggaactacggaagacctgtatcctgctcctgatgtttccttttctgcccactctgtgtctctgaaagct

SEQ ID NO: 81864 - DNA, 122 bp, Homo sapiens
gagagaagggcctgggcctcggcacctgcacccctggcacagggacagttctgggaagggcgtggtgcccgtcctggtggctggaggacgggactgaccctctggccactaggggtctctct

SEQ ID NO: 81865 - DNA, 122 bp, Homo sapiens
ctgaggccctggtggtcccggaagtggtggccccggccggcttccacgtcgtgcctgccgcgcctccacctggcctccccggggaaggtgccgaggccaaccccccagccaccagccagggc

SEQ ID NO: 81866 - DNA, 122 bp, Homo sapiens
cacctcccgctggctgaggtcagggagccgggagcgagccagtggcccgggagtgggcggcgttgcgtttgggtgtgtcctcggcggcgacagcagcaggtgtttcttggccggggccccgg

SEQ ID NO: 81867 - DNA, 122 bp, Homo sapiens
tcaccgcagtcaccgcccacggctacgcccctgcggggaaggccgcggccaccgcccacccgccccaccccctgtgctccgggcacccagctgacatctgggggccctttctccactcgcgg

SEQ ID NO: 81868 - DNA, 122 bp, Homo sapiens
cctctccccacacccactgctccctaacttctctcacaggcccccaacggcttcctcctgcgctggcgcacgctcaggtcttacccgccagcaggtggcgaaacacgattttctgtcctctg

SEQ ID NO: 81869 - DNA, 122 bp, Homo sapiens
aggtgtgtctttgtttctgtgagcaaaggaaaaaagagattcccctcactgtgactaaaccgggcaggtcagcccgagggtcccagaggcactgctgtccactcagcctcttgggctgaggc

SEQ ID NO: 81870 - DNA, 122 bp, Homo sapiens
tgaagagattcctgtcatttaattagatttgccacaaaaagcaataaccttagctaaccacgctgctctcctcctccacctaacccccatctcccttcatatgcacaaacacaggaacccaa

SEQ ID NO: 81871 - DNA, 122 bp, Homo sapiens
tttgactcctacttgatatttaagctcgcgggaaatgtgtagtagtgccacactgtgaaacggtcccatttgaatgataactggaaggcgtggtctggtttggagaattggtgagcggggtg

SEQ ID NO: 81872 - DNA, 122 bp, Homo sapiens
ggctccacccagttcgagcttcctggctgctttgtttacgtactcaagcttcggcaatggcgggcgcccctcccccagcctcactgctgccttgcagtttgatctcagactgctgtgctagc

SEQ ID NO: 81873 - DNA, 122 bp, Homo sapiens
cagcagcttcctggaggtgaggcctgatgggcacggcggtgcgcggctgcacacagtggacggccactgggtggcgcccgtgccgcggctgccttttgaggtgctgctgcgcatgctgtacc

SEQ ID NO: 81874 - DNA, 122 bp, Homo sapiens
gcatggcagcctcatcagaaagcaagttttgagcttgttctgtggacaaagttcattgcacgtgcacttggccaagtctacagatgaggaaaacaccacaattccaggaggtttttgtttgt

SEQ ID NO: 81875 - DNA, 122 bp, Homo sapiens
agggatgcccttaatgtctcccaggcttggcgctggtctttgccctatgaaaaggtttctcgacttcagaaagcctgtggcgatgccatgaatttgctgggctaccgccacgtcagatctga

SEQ ID NO: 81876 - DNA, 122 bp, Homo sapiens
cctggctacagagtgagaccctgactccaaaaacaaacaacaatgtgtacttgaaaattgcgaagagagattttaagtgttttcacaagtatgtgaggtcatgcatatgttaatcaacttga

SEQ ID NO: 81877 - DNA, 122 bp, Homo sapiens
cccatggcacctgaccaggcacaagaaagctccttagtaactaccagctgattaacttaacgatccctttcttctttctattaagcaggcagagatgttgactctcagatgttgatgaagaa

SEQ ID NO: 81878 - DNA, 122 bp, Homo sapiens
gcggggaggggggggcggggctgcccgcccgggagctaaaaatacacctcgctgctaccgcgctgttgggcgccggctaggtttgaaggcttcaaacttccaaccggttaggggcgggcggg

SEQ ID NO: 81879 - DNA, 122 bp, Homo sapiens
ccccagccaatccacagcttagccttccctttcctgaggatgattggtcgatgagcctagcgatccaagccaagaccccaccctcacaccgcccccttcggttttccaacatcccaggggct

SEQ ID NO: 81880 - DNA, 122 bp, Homo sapiens
tccttcctcattagcatggcagctcttcaccctagggccccagatggggcagttgtcttacgctgcctcctgcgagaaattggagcccttctgccaaaataccattgctatgggtggaatgt

SEQ ID NO: 81881 - DNA, 122 bp, Homo sapiens
tcaaatatgtcttgtccatttgtatatcctcttttgagaaatgtccacgtcatatgcccacgttttaatgggattatttgctctttctccttgctgtttttgtagagttccttgtagattct

SEQ ID NO: 81882 - DNA, 122 bp, Homo sapiens
actggttctgccactttccccttgaggactgtaaactccccaagggcagaggcagggccccggggatttcacagggcagtctggctcccttctcccaatccccatgactcacagtacctttc

SEQ ID NO: 81883 - DNA, 122 bp, Homo sapiens
ccgggtccgaaggctgagcgcccgccccaccccgcgccggagcgaggccagtgggttcctcggtttggcctgatcacactggaggaggccctgcttgcgtcagtcttggcgctagaacccga

SEQ ID NO: 81884 - DNA, 122 bp, Homo sapiens
cactctaaatgagcggcggccgttcagggcatgtgacctcttttacctggcactgcagaacgttttatccagaaatcagcatcttctgtttcgttcgtacctcgggcaaattagtagcgtat

SEQ ID NO: 81885 - DNA, 122 bp, Homo sapiens
agatgcaaaagacaggtgaggtgatgttaccctaagaactgtgacaatggtggtattgcacgttgagctctttatatttgtcccctttttggggggcagtgggggaagaggaaaatgcaggg

SEQ ID NO: 81886 - DNA, 122 bp, Homo sapiens
ccgtctgagcgccctcagcacccccaaccccggcttagctctctctctcgccccacagcacggggccctgtcactcattttggtctttgctaatcccacaggtcaaatgtggccctttctct

SEQ ID NO: 81887 - DNA, 122 bp, Homo sapiens
gtacgagaaggcccgtggcccgaaagtggggagcaagggggcgtggggctcggccttgcgcgtcctttggattcttggccaaggaaaggggagtctggggtctgcacccagagaacggctta

SEQ ID NO: 81888 - DNA, 122 bp, Homo sapiens
ttttttcttattattacattatttatttaagggctgtattacatgggatctgactggagacgatagaggttatttgcaaagcctttgaaaatgaactcagaagaagtttaatccactctccc

SEQ ID NO: 81889 - DNA, 122 bp, Homo sapiens
ttaattctgtctctaatctctgcaacagccgcgcttcccgggtcccgcggctcccgcgcgcgatctgccgcggccggctgctgggcaaaaatcagagccgcctccgccccattacccatcat

SEQ ID NO: 81890 - DNA, 122 bp, Homo sapiens
gtttataagcagcggggaaggaggagagagctgcttccaagcccggaggtgtcaaatttccgtggtcgattctgaagaccagagacagcccaatcaggccgcttgccctgagccctcaggtc

SEQ ID NO: 81891 - DNA, 122 bp, Homo sapiens
ctgcccgagcgaagcccttggagctctaaatacttggcagcaagtacaaagcaaaggtggcggggtggagggggtgacggggggcgggggattgtcaaatgtaaatcagtccgactggaagc

SEQ ID NO: 81892 - DNA, 122 bp, Homo sapiens
aggtcggtgcatttgaatgtgccttttaaaatagaaagtacagacatgcaaagggtgatgcgctagtaactggagttgatagagtctgtggttttgttttaaaagtagatgggaattgtgca

SEQ ID NO: 81893 - DNA, 122 bp, Homo sapiens
ctgcgccgcctgcactctcgttgcggtgcgccccagcctgcgccccctcgggacaggggacgtcccgcccgccttaaccccaagacccagctggatctcgggttccaccccttcggggacct

SEQ ID NO: 81894 - DNA, 122 bp, Homo sapiens
gatggtgggtgggggtgggttgtgttctgtgtgcaaagagcaataacacccccctttccccgcaagcacacaggagaggactgtcttcccaagggacagctgggggtaggtggccacatccc

SEQ ID NO: 81895 - DNA, 122 bp, Homo sapiens
tgtctggaattggtgggttcttggtctcactgacttcaagaacgaagccgcggacactcgcggtgagtattacaggccgcgtgcctggagtttgttccttctgatgttccaatgaattggga

SEQ ID NO: 81896 - DNA, 122 bp, Homo sapiens
gaaagcccctcttcattatgcaaggggttccggttcattggcagcgtggagtcccccttgcggaagttttcactgggatcctggtaggggtccgggaagtccacgttctcgggcagggtcac

SEQ ID NO: 81897 - DNA, 122 bp, Homo sapiens
ctaaccaaaattaaaccagtccatttgtgaaatttctttgcttcacctttgtgttttcctcgttccattggtttttgttgttgttgttttgttttattttgttttttctttttaggttgtag

SEQ ID NO: 81898 - DNA, 122 bp, Homo sapiens
cagacctagtttttccaacgcctattgatcatgactgtaagtcaacactatcctagaccccgtggttaagacaaagatgagtaagattcccactctgccctggagctctcacactgaagagt

SEQ ID NO: 81899 - DNA, 122 bp, Homo sapiens
agggtccttcatgatctgctgagaacatgtttgagctggggaggaactgtcatcaagaaccgagaattagtcattagtaacattggctaagagactaactgggcattccaaagcaattagct

SEQ ID NO: 81900 - DNA, 122 bp, Homo sapiens
aaggaacctcgagggtttcctgggagacaggggagggcaggatgtgacgtctgtctgtgacgggacctgggctgtcaggtgaaacgcctgatggtcttccctgacaagctgcggctgcctct

SEQ ID NO: 81901 - DNA, 122 bp, Homo sapiens
gatgccaggcccaccaacgactctgtatctggatgaccttgggcaagttttctaagctctcgccagccttaatttcccatctataaaaactggatactgcattactcccaggtttaaccaga

SEQ ID NO: 81902 - DNA, 122 bp, Homo sapiens
taagaccccagacccaaagccaagtccaccagagtggctgcaggccaggcctggagtccccgtgggtcaagcatttgtcttgacttgctttcctcccgggtctccagcctccgacccctcgc

SEQ ID NO: 81903 - DNA, 122 bp, Homo sapiens
aggcctttgcctagtagctaaaggccaccttctataacacgaaatagccttgaactctgccgtgatttagtgacagagttccctcgtgtcttctacccaggttgaagtccagcaaaattgcg

SEQ ID NO: 81904 - DNA, 122 bp, Homo sapiens
ttgccctccctgcctcatcctggagcaatgaccactctctcagtttcctcctgcattccccgctccagtgtgaaacctcaattcaggtctcacccatcaaagtgagttctccccaaattacc

SEQ ID NO: 81905 - DNA, 122 bp, Homo sapiens
ctcttggcttgaaccccgcgcactttttctttgtgagcttcggtttcttcgtctgtgaaacgggggtcatggcctcatccctggagatcacctgaataagcaagagaagagtggcggacgct

SEQ ID NO: 81906 - DNA, 122 bp, Homo sapiens
tcccggcgtgctgagagcgcatgcgctaagtcctgccgcgagaagggcaggctgggtggtcggcggcttccgcctgtgagagccgggggagagccgggtggactaggcttctcctgggcggg

SEQ ID NO: 81907 - DNA, 122 bp, Homo sapiens
cctgtcccatcctggagggagcgcgagggcccggctcctctgggagtggcggcgacagggcgtcgtgcaatggacgccagcaccaggggcgggctggagggggaccggcgatcagggaaacc

SEQ ID NO: 81908 - DNA, 122 bp, Homo sapiens
gacgaccgcaccagcgccagaggagtcccacgccaagcagccccagacatcgtgggagggcgccgtcttctcgcgcatgcgttagcgcccgcgcatgcgcgccctcggcagctgtctttcct

SEQ ID NO: 81909 - DNA, 122 bp, Homo sapiens
tgggcacaatagcagcctctcggtgggtttcatggctgtaacccagaccttaccctggcccgtcctctctcagcacagtatcacctgtctgtctgcccctagctgctgggtgtaaaagagcc

SEQ ID NO: 81910 - DNA, 122 bp, Homo sapiens
tcttctgcctgacagtcatgagcatcgaccgatacctggctgtggtccaccccatcaagtcggccaagtggaggagaccccggacggccaagatgatcaccatggctgtgtggggagtctct

SEQ ID NO: 81911 - DNA, 122 bp, Homo sapiens
cctggagctcggagcccggcgccgaaacctgcagatcacaacctgtcagtcgcgctttcccggcagcctcacctgcctccagatctttccaaacaaggaaaggagctgcaaacatggcaatc

SEQ ID NO: 81912 - DNA, 122 bp, Homo sapiens
ttcacactccgcaaacaggctggggccagacgccgccctgccctaggtgcccagcaaacacgcgggccagccagacccctggaccttcacagggaggaggagatggagatgggttcaccccc

SEQ ID NO: 81913 - DNA, 122 bp, Homo sapiens
ctttggtggtcgacgggactgggcgccgtggagcagggggccgcactcgttggggaggctcgggccgcacaggagcccacggacggtggggaggcccaggcatggatggctgcaggtcccga

SEQ ID NO: 81914 - DNA, 122 bp, Homo sapiens
ttctaatttggcacaccctaccacagcagtactggatttctccttaaacaaaaatggtcacgggtgtcaaagagatgtgagtgagtgtccactgaactgtgtctaaatgattttccttgtga

SEQ ID NO: 81915 - DNA, 122 bp, Homo sapiens
ctgacagacacctgccagccgggaactggggaggcggggtccagacctccacctccccgccgcaggctctgccaaggcccaccgggaagaagccccacctggcgacgtgagccccacgcccg

SEQ ID NO: 81916 - DNA, 122 bp, Homo sapiens
cctctctgggcctgagctgcttcttcagtaaaataatccttgtagctaagatttgttgagcgctcactatgcacactgccatgagcccctatatgtgtatttctcatcatagctctatgagt

SEQ ID NO: 81917 - DNA, 122 bp, Homo sapiens
ggcgaaatggtccatttgttgttccagcaagaccaccagctgctccatttgctgaagctgcggctgctgcaacagctatgaagaagaaagcaaaccgtttggctatgaaagggactggccac

SEQ ID NO: 81918 - DNA, 122 bp, Homo sapiens
gaggcaggtgtgtgttggggccaggtgggaggcaggtggcctggacctcccttgtgctcccgcctgctgaggctggctgtctggcgaggctggcgtgtgtggatgcagtggctggtggctgc

SEQ ID NO: 81919 - DNA, 122 bp, Homo sapiens
aggctggtggtgactatcctgccgtctcaggtgaaatttggcttccgtctgggtagtgaacgtgcagctgacagcacaaaaccgaagggggcgccgccaggccgtgggaaaggtgcgcgcaa

SEQ ID NO: 81920 - DNA, 122 bp, Homo sapiens
tgaaaatgaaaataagagtgcagcaagcaggagccttagccaccgaagccgtaaagagtgcgtccctgtcgcttcagcgcgtagaccacatccattgctgtcacggtcttgcgtttggcgtg

SEQ ID NO: 81921 - DNA, 122 bp, Homo sapiens
gctcctccccctgccacacctccctggccgtggtggggattgccctggggctctggcggacgtgactggtcccttcacccgctccttgtcggggtgtgctggggcgacccttgctggaggta

SEQ ID NO: 81922 - DNA, 122 bp, Homo sapiens
ggaggcagaggttgcagtgagccgagatcgcgccactgcactcccgcctgggcgacagagcgagactgtctcaaaaataagaagttaaaatgggccaggcgcgcgcgcgcccctgtagcccc

SEQ ID NO: 81923 - DNA, 122 bp, Homo sapiens
caattcagcaccgtggacagagctgctggagccctcaggaccctggacagagaagcaggccgcgcattcccggggaaccgaattcgcatcacttgagaacccacctagagaagccagagcgt

SEQ ID NO: 81924 - DNA, 122 bp, Homo sapiens
gttgggatcaggaggggtttgaatcggggttgggtgctggaatgttatggggtaagggggcgttacaacctgggaaggtaagtaggttgggggcaagctcccaggattaggtggggtcacgg

SEQ ID NO: 81925 - DNA, 122 bp, Homo sapiens
gctcccccgcaccagcacagagaccaacaggccggagtctcccacgcggaacttcccctccgaggcctttatcttggggagctgagcgggtgcagagtcccagtgtctcccttgccagctcg

SEQ ID NO: 81926 - DNA, 122 bp, Homo sapiens
accatcagccgggactaggactccaatggcaaggctgggagactgggagacctgcctggccggaggccggctgcaccacgatttccttcctggcttcagtgagagtttccacccagtctggc

SEQ ID NO: 81927 - DNA, 122 bp, Homo sapiens
ccctagacgacgtgagggaaggcggtgccgggcggggcctgtgccaggctggcgggccgccgcagacagagctacccggagcaaccgttcaggggtgaggccggaagtcccatccgacctcg

SEQ ID NO: 81928 - DNA, 122 bp, Homo sapiens
ggcgctccaggatggctgccagggcccgcagagcccctaccaggttgctgtcaccaggagcgctgtcaaagatggtgcccaccacacgcaggcggcagaagcgacgggtctgcaggagctcc

SEQ ID NO: 81929 - DNA, 122 bp, Homo sapiens
atagtttcctgatacccagtcacctttgggaacttacgaggaaagtttttccagtctctccgcagacccttgcatctcttctctttttgtttagacccttgaccaccaccccctattctaat

SEQ ID NO: 81930 - DNA, 122 bp, Homo sapiens
tgtagcaggcgcgagatgcggggcgctcagctgcgcggagcgagattaccttgcgagcaacgcggtggacatctgtaacaagcaaatgaaaaattaaaggcgattagtggccgaccaaacat

SEQ ID NO: 81931 - DNA, 122 bp, Homo sapiens
ctctaactacaggagaccaagaaagagaaaaatctgggaagtgttagctggctaaattaacgtagtcagcttatgattatccagctggaggacatataggccccttgaccacctggttccca

SEQ ID NO: 81932 - DNA, 122 bp, Homo sapiens
agcaggatctcaaagagatatttgtacacccatgtttataacagcattattcacaatagccggaagctggaagcaacccaagtatatattgattgatgaatgaataatacgtagtattcaca

SEQ ID NO: 81933 - DNA, 122 bp, Homo sapiens
ggcgtgcagtccaggggcttttatgggaggcccaactaaggacaaggagcaggggagcaccgtgaggaggcatttgagaaggcctgctccagctccagtgtgaagaatggattcagggaccc

SEQ ID NO: 81934 - DNA, 122 bp, Homo sapiens
cgatggcagcgggtgtataatcagaaatggaatatgccctcataaaaaatggcggcggcgcgggtactcgacctttgcccctacgcagtcgtgcccaagacaacgcccccggtatctccagt

SEQ ID NO: 81935 - DNA, 122 bp, Homo sapiens
gcacgaaccagcgatttgtgcagcgtccccacctgtgagcggcgggggaaaccgatcagccgcgcccctcgaccccggaagctccctggggacctcaccgcctcttttccaccctacctggc

SEQ ID NO: 81936 - DNA, 122 bp, Homo sapiens
gctctagggcccgtgcaggccacaccatgaacacctccccaggcacggtgggcagtgacccggtcatcctggccactgcaggctacgaccacaccgtgcgcttctggcaggcccacagcggc

SEQ ID NO: 81937 - DNA, 122 bp, Homo sapiens
gagggtctccagccgctcaggcttccagtaccgcaggccgatgcacatggccttggtggccgctccaaaccctgagcctgtgtggagaaggaagagctagtttagacttctgctccaataat

SEQ ID NO: 81938 - DNA, 122 bp, Homo sapiens
gcttcccccagttctgctccgaggactgggtctaagggacgagggccaggaactgagcagcgggttcacctcccaggtccttcatgatcctggtgtccctgccgcggctgccacttctggga

SEQ ID NO: 81939 - DNA, 122 bp, Homo sapiens
tgtgtgtgtgagcacgtgtgctgtggatatgtgcaaacttccagcaatgaggaggcccctcgtgggttcctgctctgtggccacccagctgacctgcagggcaccacggtcaagggagaagc

SEQ ID NO: 81940 - DNA, 122 bp, Homo sapiens
ccaagttttcaaactagattgtaattcagggacaatatcaacaataggggagttggaccacgaggagtcaggattctaccagatggaagtgcaagcaatggataatgcaggatattctgcgc

SEQ ID NO: 81941 - DNA, 122 bp, Homo sapiens
gggtcgcggttggcctttgaaccctggggggactcagtcctggttttccgagccgcagtgcggaccacagccccatagtgtgagccccaggagggcccccggtcccatctgccccagccctc

SEQ ID NO: 81942 - DNA, 122 bp, Homo sapiens
ccgtagtcgctacacgtcacttccgggggaggggctgcgaccctaaggggtgtcgtgagccgcgtctgccagcaaacccgggtttggtgtggccgggggatgtagctcgggcgcctcctgga

SEQ ID NO: 81943 - DNA, 122 bp, Homo sapiens
gagcccttcctcctctctgtcctcgtccttgcagattgaaatgctagaacataagtacggcggtcacctggtgtcccggcgcgccgcttgcaccatccaaaccgccttccgccaataccagc

SEQ ID NO: 81944 - DNA, 122 bp, Homo sapiens
cacatggagacgccatttagaaaaattacaggatatgagtctcctgagacatagagtacacgtagacagctcacaaggtctttttcccttttttcagagacagggtctgttgcccaggttga

SEQ ID NO: 81945 - DNA, 122 bp, Homo sapiens
gtgggccactggtactgctcttctgccactataatccctccccctaccaggtacctggtgcgtagaagtctaaagacctgtgaggtctagcctggcgcctgtaatcctagagaataaggagg

SEQ ID NO: 81946 - DNA, 122 bp, Homo sapiens
agccactgcacccagctccaactcctttctttatgcaaatacaaaaggcaaaccttggtgcgacacttagtccttagtagcaaccctggctcatcctcctagtctttccctagtatttgcat

SEQ ID NO: 81947 - DNA, 122 bp, Homo sapiens
aggacctccaggtcccccatgtctgggtgactctcgtgatttatcttaattgtcatgcctcgttccattgactgaacttactagggtaattagagagctttgatgataatgtagctgatgat

SEQ ID NO: 81948 - DNA, 122 bp, Homo sapiens
cggacttctgcaaggccagacgtgaggcgacactgaattgctcccgagacgcgggaagggcgaaggcaatcgaagcgaagagctttaactcatcttctccaggatttggggcacgggaacct

SEQ ID NO: 81949 - DNA, 122 bp, Homo sapiens
aaagcgtaggccgggcgcggtggttcacacctgtaatcacagcattttgggaggccgatgcgggcggatcatcaggtcaggagttcgagaccagcctgaccaacatggtgaaaccccgtctc

SEQ ID NO: 81950 - DNA, 122 bp, Homo sapiens
gtttccacaagatcctggaagtctgctcccctgtagtgtgctttgcaaaaagaagactctcgtgggcttctgttggcaatgtagactcatccagtctcctgtggatggccacttcattactt

SEQ ID NO: 81951 - DNA, 122 bp, Homo sapiens
tcctcactacaaatcggctctctcgggggattagtggctccgcgaaagtgcacacaagcgcggcgggcgggagggccaggggccgggcgcggcgggcactccctagcccggccccgcccggg

SEQ ID NO: 81952 - DNA, 122 bp, Homo sapiens
gttcctaacgtgacacctggaggaggcagagtcgctgtggatgccacgccacctcgcagccgtgacagctaatgacgcctgcagtccccaccatggtccctgcctcatcctctgtgccgttg

SEQ ID NO: 81953 - DNA, 122 bp, Homo sapiens
gaatctaaatgtgacagtcgatggctgaggagagggtcagaaggaatagaatctgtgacacgtatgagaaaggaacaaaatttatctgctctggttgcaatgattagatgtctctttgtctg

SEQ ID NO: 81954 - DNA, 122 bp, Homo sapiens
ggccggcagtagagaaagccgcagaggcatggtccttgtggttccggccgagccttttcacgctggtttaaggctagatgtccggctcccaattctgtgggtaaagttttgtatgggggcaa

SEQ ID NO: 81955 - DNA, 122 bp, Homo sapiens
gctgcgtccccgagaaatgcttgttactgtggaatgagggacagagcaaatcccctgaatcgggcagagctgtcgttaaatcccttaatgacggcggtgttttctctggtgcgccgaacagt

SEQ ID NO: 81956 - DNA, 122 bp, Homo sapiens
aggccgaggagagccccccaatcccgcgccgaggcggcggcggcggcggcggcggcgcgacgatgaggatgatgaatacattgcaaagtttttttggccccggcgaggggtgtcagattgag

SEQ ID NO: 81957 - DNA, 122 bp, Homo sapiens
gaaaagagctcagagcttagctgctcagaagagagtggagaatttgggagccctccctcacgggtgccttccagagccctggagatgggtaatacagagacaggagtgcctggagaaagagg

SEQ ID NO: 81958 - DNA, 122 bp, Homo sapiens
aaaacaaaacaaacaaaacaaaaaaacacatcaactaaaaatactaaattattagttttccgtctcatcgtggctacaagaacttgtcatggtttgaatatggaaaccaataatttattacg

SEQ ID NO: 81959 - DNA, 122 bp, Homo sapiens
ggcagtgcaagtgagtgaaaatttgtctgtctgtcttccaggagtagcttgagccgagaacgaggcgagaaagctggagaccgaggagaccgcctagagcggagtgaacggggaggggaccg

SEQ ID NO: 81960 - DNA, 122 bp, Homo sapiens
cgtgttccaggctccccggtaatgagcaggatgcagaggcctccgtgcagctctgtctcccggcctgcctcggcgaggccctgctgaattagcccagcccctcccggcgcgcagcccgggtg

SEQ ID NO: 81961 - DNA, 122 bp, Homo sapiens
tgagggacaaaagctctgacacctcggtgttttaattagagtaagcaaaggacagacgcgcgtacgtcccaccgcgtcagccctgtgaacatccagaggttccagccagagtacgtccggcc

SEQ ID NO: 81962 - DNA, 122 bp, Homo sapiens
tctggaggccggagaggggagtgggagcctggcatgggccaccaccctctcccctgggcccgctggcttcggggccatcctccagacagctgaggtcattggctgtgttcaccaggctgctg

SEQ ID NO: 81963 - DNA, 122 bp, Homo sapiens
ctaagcagcagccaacggaccgggcccgctgccagggggtcagggctgggccgaggcggccgcggtctcaggctctggccaattttgcagccgcgggtaaagttcacgctgcccgctcccct

SEQ ID NO: 81964 - DNA, 122 bp, Homo sapiens
ccgaccccaacgccctgggagtggtgccctacctgagcgagcagaattactaccgggctgcgggcagctacggcggcatggccagccccatgggcgtctattccggccacccggagcagtac

SEQ ID NO: 81965 - DNA, 122 bp, Homo sapiens
cttaatcatttggcttggctactttaccttaaagccatactgtctactttcacttgctcccgcagcatgttgataatctagtagtgtcatcagactggaaattagaagacctggtccagttt

SEQ ID NO: 81966 - DNA, 122 bp, Homo sapiens
ctttgggcctccaaggatattatttcttgaaaccaaacttttgcttgatattgtgattaccgacaacaatcccaggtacagattgtgtatgttatcaattaagggcaaaattttaagttagt

SEQ ID NO: 81967 - DNA, 122 bp, Homo sapiens
ggagcgacgggggtcacttccgtgtcccggaagtatacctctgaggtcacggggcgaggtcgggttccggaagacgccggcattattcctcccaaagagtttaagactcgtcataaggaaag

SEQ ID NO: 81968 - DNA, 122 bp, Homo sapiens
ggggcggggataggcgagatggtcctgtggttctctgccttcttctggtgaattaaaatccgatttggaagagagaagggcagccagcaccagtatgcacagcccccggccccagagacccg

SEQ ID NO: 81969 - DNA, 122 bp, Homo sapiens
gagccgcatctctatggtcggccgcggctggaacggcccccggggcccgctttgtgcgaccgcctccggctcagccgcctctaggatattggggatgtggaagccactctctcttcctcttg

SEQ ID NO: 81970 - DNA, 122 bp, Homo sapiens
attgtgattgattatatgtttgactcctcaccagacaagatctccgttaattcagtcattcgttcacacattcattcagcgcatactgagccttttctgtgtcaggcccagtgttagccttt

SEQ ID NO: 81971 - DNA, 122 bp, Homo sapiens
tgagagatcatctcaccccagtttaaatggctattatcaaaaagccaaaactgacgatgccggcaagcctgtctcggagaactggtacactgctggtgggaatgtaaactcgtacagccact

SEQ ID NO: 81972 - DNA, 122 bp, Homo sapiens
cgccccccgggagcgtgccctcccgccggaccctgggactccagagaagcgccgagggcgcgagtacactaagatatacgaccttccctggggaccgggaagggcacaaccacctcttgcaa

SEQ ID NO: 81973 - DNA, 122 bp, Homo sapiens
attttgatgttcatattgttccagacttggccagtgggtacccctccaagctggggcttacgtcctttggacaggtgcttctctgtatttgatcttgttcttatgctgatataactttttgg

SEQ ID NO: 81974 - DNA, 122 bp, Homo sapiens
gtgaacacagaagctgccgtggaagcaaatcctgggcgggaggatggctgcacctccccccggagagcaccggggtcctgcaggaaaagcagaggtctcctgtggccgctatgcctcttcca

SEQ ID NO: 81975 - DNA, 122 bp, Homo sapiens
gggccttacagcagctcggagttgctggagggccaggagccggacggggtgcgctttgaccgcgagagggcgcgccgcctgtgggaagccgtgtccggtgcccagccggtgggtagagagga

SEQ ID NO: 81976 - DNA, 122 bp, Homo sapiens
gcagtcacgcacacatttaccggggacagcatgtgaaagccttgggaagagatgacctgccggtaccgaatgtcaaagccctgtgtattttgcaaacagataaccatggcgcccactgcccc

SEQ ID NO: 81977 - DNA, 122 bp, Homo sapiens
atgctactactgaaagtgtttatcaaaatgtgatgaagtaattccatgaggaaaattagccgttatcacaaaaacagccttaagtattgtagaatttcaggtagtgaagatgtactatttac

SEQ ID NO: 81978 - DNA, 122 bp, Homo sapiens
gggcagggcccgtgtgtgtgcacgcaccagtgtgtgtttaaggatacagctgttcaggtgcggtggctcaggccaataatcccaacattcaggagaacaaggcaggaggattttgcttgagc

SEQ ID NO: 81979 - DNA, 122 bp, Homo sapiens
aaagtacttgtcccatgcctcatgctcagtgcatactcaataaataagagtagtcaccatcgtcactgtcattgtcattactgttgggttttcatggaaggaccctggccagaacagtgtca

SEQ ID NO: 81980 - DNA, 122 bp, Homo sapiens
ctgcagaggaaggccaggatccacgagctgcggctctctaggtggggcgaggggtccaggcggggtctgattagggcgtggggccccaggtggggtctatctggggtgtgcgtctgcaggat

SEQ ID NO: 81981 - DNA, 122 bp, Homo sapiens
gtaccggacacccaggtaacgcagtctaccgtgcctggagctgggaagagtagttgcaaccggagcccccttttgggaactcactaccctgaggcttagacaggtcgggaatgatcgcctcc

SEQ ID NO: 81982 - DNA, 122 bp, Homo sapiens
gctgtgtgaccttgggcaagttactgaacctctctgtgcctcagtcaatagggatgatgacggcaccccttgcagaccttttggaaggcttaactggatgagtcaccctaagcattcggagc

SEQ ID NO: 81983 - DNA, 122 bp, Homo sapiens
cgggagagaggcaggaagagccggtccagggcgacggtcctggcggggtgcccgcccccgcgggtggcctccacctgtgtgaagtcgtgttccctcagctgcaggtccgtcaggccctccac

SEQ ID NO: 81984 - DNA, 122 bp, Homo sapiens
gtgggcagggggctggcaggcgccggccgcggctgtctcctccagggcctgctgttgtggcgtctggccgcggcccagcaccgccgtcatctgggctcagctctctctgtccgcggggctgt

SEQ ID NO: 81985 - DNA, 122 bp, Homo sapiens
agctccatacatgttagctgtatttattattaattacaacctaatagtgactgtatcagtcggagtttaccaaagaagcagcacctctaggatagatggatggatagagataataaaggaac

SEQ ID NO: 81986 - DNA, 122 bp, Homo sapiens
ggtttcgccatgttggtcaggctggtcacgaactcctgacctcaaatgatccgtccgcctcggcctcccaaacttcggggattacaggcgtgagccccggcgcccagccctggatgccttgt

SEQ ID NO: 81987 - DNA, 122 bp, Homo sapiens
agagactccaactgcaggctaaagatgagtgctctacacctgcagtcaacccacttgccacgggcctctagtgattaacaagctacggcccagaaagccagttccaccaggagctcccttgc

SEQ ID NO: 81988 - DNA, 122 bp, Homo sapiens
gtaaggggaagaaggtttgtagtaggatataaggctgtcaaggaggtaaaaaccaaacttcgtgaggctctgaatatcaggcaaaataggtggaatgtttaaaaaaatctaagaaaggtagt

SEQ ID NO: 81989 - DNA, 122 bp, Homo sapiens
cccaggagataagtactaactttctccccatttcctagaggcttgggaaattaagtaactcgcactggtcacacatctgtaagtgggagaggcaggattcaacagatctgtctgtcttgagt

SEQ ID NO: 81990 - DNA, 122 bp, Homo sapiens
cctaattttctttttgctcagaataagggctgattttcatgtgccatccctgtcatcacccgcatcttcagcctgcagcgcgtagggaggactccccatgggcgggcaggactctggacctg

SEQ ID NO: 81991 - DNA, 122 bp, Homo sapiens
tagtggtgatagaaaatcttttcagcctctcagagaacaatgacatcttgtaaaataaggcggtctctctgctatttgtcctgccccccatcaccggagggcatgagtttcctgaggatgga

SEQ ID NO: 81992 - DNA, 122 bp, Homo sapiens
catgcgcccttccctaggctgcggcagcgggaggtatgggagggaggggcagggccagtgcgctcctccgcgttgaattctggctgcgctctgcctcccagctgtggttctccttgtggttc

SEQ ID NO: 81993 - DNA, 122 bp, Homo sapiens
ccaacattctgcctgctatgtggggtggattaaaagagagagaatggaaacagtggggcccggtaaataatcattttatttaccctggtgatagatgattgtgataggaatggagaaaataa

SEQ ID NO: 81994 - DNA, 122 bp, Homo sapiens
aatgaactacagccaggaaggtgatagatgatataataagccacctctgaacctacaccccgtctcttcacggtttagacttactaaaataaatacaaggtgattttcatcttcaggtagag

SEQ ID NO: 81995 - DNA, 122 bp, Homo sapiens
ggtgaacacccaaatcctgccctacccaaatccagaaccaggaggcggggagagaacaggcggcctcccaaggaaggactcaccctgcttggccatgcaggaggaggaaggctggcctgaga

SEQ ID NO: 81996 - DNA, 122 bp, Homo sapiens
ctgcgttcatgataatgagaatggagtcgcggtcacagccgggctctctgcggggcgcatcgcccgcgaggggcgcctgggcctctgggcgtcctctgccgccccgcgacctttcctgccct

SEQ ID NO: 81997 - DNA, 122 bp, Homo sapiens
cctgaccccaaaagtggagttttattcgccaagcccgtgtagtaaatcggagtgggctgacggtgttaccaagacatttcctagggggcctgctgttttatttatttaaatgagtttattta

SEQ ID NO: 81998 - DNA, 122 bp, Homo sapiens
ggggggccgtgtgggggaactgcctctccgagggccgcgtgggaggggcttcccggaggccggccccgtgggtggggagccagcgtgcgtcccagcgagtcagctccacttgatcggcagtt

SEQ ID NO: 81999 - DNA, 122 bp, Homo sapiens
gaaacggtggtctaaataaagccggagactcactcactgcaccaatcagcaccgtgcgtccgtctggatctcggcgccggctgcgcgcagccgccaggaggtggccgtcgggacgcgagcgc

SEQ ID NO: 82000 - DNA, 122 bp, Homo sapiens
gggggacaagtggaagcgccccacacaaatcagatgcactcaggacacagggtctgccaccggacacccagttggccttctcaacaggccatgtcatgaggtgaatcactgttctgggttga

SEQ ID NO: 82001 - DNA, 122 bp, Homo sapiens
ctctgccccatggagaggcagctgaggcctggtgagaattcgagcgtggcatgggcaggccggcagtgctgggggaaccagcgcctcctccacagctgccggcacgggtgttaagcccctta

SEQ ID NO: 82002 - DNA, 122 bp, Homo sapiens
gggctatgcggtcctgtcccaagtaaggggaggggtgtagacagttaatgccagagccagcgtttctggccacaaccgagcagcctcaacgagaggggttggtgactgctctcggcccgccc

SEQ ID NO: 82003 - DNA, 122 bp, Homo sapiens
ccaggctccgcccaagtcggagccacggctcaagtccccgactctcctcctttgtcatggcggatctgtgtcagggagcccaacctactgcagagtgttaattcctccccccgaccggagcc

SEQ ID NO: 82004 - DNA, 122 bp, Homo sapiens
actctgatactgccacttctccgggaggctctgctgtgggcaccttggcagattcagatgcggtctcctctggactgcaggcagggccctcggaggtgtttttttccatcattgctggactg

SEQ ID NO: 82005 - DNA, 122 bp, Homo sapiens
acctcgggcagagccagccatctggaagggtctacgccccaccggtcgctggttacccagcgcagcagctccaactgcactgtcccccaaagaccctagggctcgcaggatgaaatggggcc

SEQ ID NO: 82006 - DNA, 122 bp, Homo sapiens
gagagactgggcgctgtggctctcaccaaggctggaggatcgcttgagcccaggagtttgcgggcaacagagagagatcccgtgtctataaaaaaataaaataaaaataataaaaattgggc

SEQ ID NO: 82007 - DNA, 122 bp, Homo sapiens
cagcctgcggctcgaggcggagggcgacttcgacgtcgcggacctgcgggagctggagcgcgaggtccttcaggtgggcgagatgatcgacaacatggagatgaaggtcaacgtgccccgct

SEQ ID NO: 82008 - DNA, 122 bp, Homo sapiens
gagagccgccccttccctgttgccaggcaacattgctgaggggcagtcatttggtccaatcgtggaagcggaggtgtggggcggaacccaagagaggagtcagccaatggtgacgcgcctca

SEQ ID NO: 82009 - DNA, 122 bp, Homo sapiens
agggtgcctgcctctcccggcctgcgcctgcgcgctggggccttcggctgaaggggtgtgcgctagcggagctccgggaaatgaatgaatgaatgaatgaatgaaatgctgaagcgggcagg

SEQ ID NO: 82010 - DNA, 122 bp, Homo sapiens
ggcccggggagggtggttaccgctgaggagctgcagtctctgtcaaggtgagtgggactgcgcgggagttgaccgccaggtgcgggtggggagctgggttgggggcgcggggcgaggagtag

SEQ ID NO: 82011 - DNA, 122 bp, Homo sapiens
ctttccagcaaatgttttcaccctaccaaagccatcatttggttgaacaggagtgtctcccgaccccaaagaaagatagttttgttgttttaagagagacggattaaagacaggggctgctt

SEQ ID NO: 82012 - DNA, 122 bp, Homo sapiens
ataaatgtggaggacaagtacaggggaccataaacaccccaggagggactgcaaagagcccggggacggtgggaaagggcattcccagcggtagaaacggcgctgtgtgaaaacaaaacaaa

SEQ ID NO: 82013 - DNA, 122 bp, Homo sapiens
gccctgggccctgcctgagcgccagagagcttgaggagcctgcagcatagttctcagacccgaaacaatgacctcccccgtccaaacccaggcactcttgcgccaaggccctaacctctcag

SEQ ID NO: 82014 - DNA, 122 bp, Homo sapiens
cgctcaaactccttgctctattctcttatcccgtacttggcagaggatcccaaaaccgctcgaacacggatgcactggtttcctgcaaagctttgtcctgggttcggtcattctccatcaat

SEQ ID NO: 82015 - DNA, 122 bp, Homo sapiens
acacagagtggtctttctggagaggttataggtcactcctggggcctcttgggtcccccacgtgacagtgcctgggaatgtattattctgcagcatgacctgtgaccagcactgtctcagtt

SEQ ID NO: 82016 - DNA, 122 bp, Homo sapiens
gaccaagctcagggagagtgggaatcgaaaacaaggccaagaattatgaaataatgtacacgtggcaaaaactaaggctctttagtaactgcaagatctagagggaagtgaatgagcagaaa

SEQ ID NO: 82017 - DNA, 122 bp, Homo sapiens
tcagagatccagaaacaaaaattgtagcgtcgagatggttagggccgagtctacttctttcgccggttgggcctcagagccccaaggccgccctgctatactgcgcgactgcaccgcgggcc

SEQ ID NO: 82018 - DNA, 122 bp, Homo sapiens
ttttgcggagacggggtcttggtatgttgcccaggttggtctccaacccctgagatcaagcgatcctccagcctcagcctcccaaagtgttgggattacaggcatgagccactgtgcccagc

SEQ ID NO: 82019 - DNA, 122 bp, Homo sapiens
ggggtgagggggacaggaggccgcaccattggctggaaggcgtgtgagtgacaggggggccgggcgcagggcccatgggccggtctcgtcagctgcgagcccgggcgctccgggggagggcg

SEQ ID NO: 82020 - DNA, 122 bp, Homo sapiens
cgggcgcgccccttggaagcagggctcagagctgctctcctctcacgcattccccggatccgcgcggagcaggctgctggccagccccgggcccgcgccaagcagagcctcaggtgcggttc

SEQ ID NO: 82021 - DNA, 122 bp, Homo sapiens
gccgggtccgctgttaattcggagttgagtcattcggggtggattgggggcagattgtggcgcgagatctagaaaaggatcaaggttgagcggatctgcttaaaagtgactggtaagaggaa

SEQ ID NO: 82022 - DNA, 122 bp, Homo sapiens
cctgccttgacttggtctgctgccttttgcaatctgctcttgaaggaagggccagcctctcgcatcttcctaggaacaagtccgaccacgatcagggctattgtgaaattagctaaattagt

SEQ ID NO: 82023 - DNA, 122 bp, Homo sapiens
acatgccgggaggaagaatgagaggcccaagcgcagcacacacagccctgtggccacccgcgaattcccgcacacacacggccctgtggccacccgtgaattcccacacacacacggccctg

SEQ ID NO: 82024 - DNA, 122 bp, Homo sapiens
tgtcacaatggtgaatgggcagaaaagggaaagatgctctactgcactgtcgattttgaacggagtcacaggctcggtcgctgaatggggactgtcagacccaaactagttacctgcctttg

SEQ ID NO: 82025 - DNA, 122 bp, Homo sapiens
ccacagggccgggggcctggggctgcagggaggcggcaggcccctccccacagagcaggccgccctcgtccatctcctccctcgccagtccgtccagggaacatccctccgcagcgcccaga

SEQ ID NO: 82026 - DNA, 122 bp, Homo sapiens
gaggcggccgccgggcgcttccccctacccagactcccggcgctggggcccgccgccccccgcagcagctggcccgactcacgtgaccgcgggcccaccctccgcctcccccaccccggccc

SEQ ID NO: 82027 - DNA, 122 bp, Homo sapiens
tccgccagcatctgaactccatcagtgtgagtgtgtggggccgggccgcccgcgtgcgagcgtccccgtggtctggagagtgcaccttcaggtgccggacgctgctcccttacagatgcagt

SEQ ID NO: 82028 - DNA, 122 bp, Homo sapiens
atagcacgtttatttacgcctatgagcacacactcgagcaaggacctgaaaaacctgcagcgtgggcaggaggtaaaccactgaaagtatgccgaggttacgtctctcctggttattcaggt

SEQ ID NO: 82029 - DNA, 122 bp, Homo sapiens
ccagaggcagaatatctaactccttcaggagaacttccagtacagaaaacaaaacaaagacgctggggaaacttcaccaagagcctcggcagctccagagcgacgggaaacgaaaggtcagg

SEQ ID NO: 82030 - DNA, 122 bp, Homo sapiens
tccattacctgggcaaattccccttcgccgggccttaagcataatctacagaaaaaactacgtacataaatatacgtttacaactcaatgagatttctaaagtgaacccacctatctataat

SEQ ID NO: 82031 - DNA, 122 bp, Homo sapiens
agggtgacacaaccctgttccctgtcgctctgttcccgcttatctctcccgccttttcggcgccaccaccttcttggaaatgagacagagcaaaggggagggggctcagaccaccgcctccc

SEQ ID NO: 82032 - DNA, 122 bp, Homo sapiens
agggtaataagggcccctggtgcgtagaaaatggtggcttttataacaaatgcaaaattgcgtttggatcaaagttttggagccaaacctctttgctcctgagactaggaataccaggttcc

SEQ ID NO: 82033 - DNA, 122 bp, Homo sapiens
gggtggaccccagcctccacctgcctgtcctcttcctggcaaggttcctgaagctcccagcgacgatgctggggctgcccttctgcaggccaagggaaggacctcaagggcaggaggacaca

SEQ ID NO: 82034 - DNA, 122 bp, Homo sapiens
ggaatatttttttttcttaaactaaagctacactgcactgtctctctgtgatgttcttcacgttattttggttcttccatagctgccaaagcccccacaagggaaccgggggctttaggatc

SEQ ID NO: 82035 - DNA, 122 bp, Homo sapiens
gaagaggacctgtggacaacatccccttactattaacagcacagcaattccgtagtctcacgaggctgaactcttttggtgctgagagtaacagcactgtgggcactctgcttcttcctcca

SEQ ID NO: 82036 - DNA, 122 bp, Homo sapiens
ctcgtcggtggagatgtaccgccaggcactactatggggctgccgctgcgtggagctggacgtgtggaagggacggccgcctgaggaggaacccttcattacccacggcttcaccatgacca

SEQ ID NO: 82037 - DNA, 122 bp, Homo sapiens
actccatcaagctgaaggattctgtgctgagcctggtgtgggtgaccccagaccgagggccgggcggcgcgggggaacggggcggagggggctggcacagcctggcccaaaccaggctcacc

SEQ ID NO: 82038 - DNA, 122 bp, Homo sapiens
cgttataaatttttaagcacaagtgaggtcaacccactatcacctggtgtaaaatacggtcgtctgccaacccttcccgctgagggccgagctcactggcagaaggaaacaggacctcaggc

SEQ ID NO: 82039 - DNA, 122 bp, Homo sapiens
agggcctccatcctcgctcgggactgtgcggctgcggcggctattgtgttcttggtggaccggttcctgtatgggctcgacgtctctggaaaacttctgcaggtcgccaaaggtctccacaa

SEQ ID NO: 82040 - DNA, 122 bp, Homo sapiens
taccaagccggcccagaactgggggagcacttgacaactctgaccagctccctgcagaaacgctttagaagcgtccacgatttagccaaacccagagtgcccaacggacgcgccaaagaaga

SEQ ID NO: 82041 - DNA, 122 bp, Homo sapiens
ggagccggggattctgaagccattaggtggggattaacacccaagttaatctgctttggtcgctcaattgtcagcagcgaacgcgcgggactgaggaagcctggctcccagcgaccacaggg

SEQ ID NO: 82042 - DNA, 122 bp, Homo sapiens
cgccgacccctgccacgatgaggggggtgcgccccgcggctgcgtgccaggactggtgaacgccgccctgggccgcgaggtgctggcttccagcacgtgcgggcggccggccactcgggcct

SEQ ID NO: 82043 - DNA, 122 bp, Homo sapiens
ctgaaaggagccctggctatactatttcaagtcactacaatacagttgtaatttgtgcttcggccttattggcgtgcttttacattcccctattcataaaacagtgataatcaccagagcaa

SEQ ID NO: 82044 - DNA, 122 bp, Homo sapiens
ctcttaacatccagtttgtggtacaaataagaatcaagttccatctcatacagcaccacccgggggcccaaagtagtagcccctggacctcctcttgcacccaaacaactattttatgcacc

SEQ ID NO: 82045 - DNA, 122 bp, Homo sapiens
ggctcgggggaggtggtgctggtgcgtggctgctgcagcctggggacacagccgtcctcacgctcggccaagggtcactggtgacagacggcgaggcctcgtccccagatgccgcctcccac

SEQ ID NO: 82046 - DNA, 122 bp, Homo sapiens
gacatcaccacaaaatgacccaagtgtcgggaagcttaagggtgtccaggcatccaccagcgggaagggtcggtgaagactggacagccacatccacttctgagcagtgaccctgtggcctt

SEQ ID NO: 82047 - DNA, 122 bp, Homo sapiens
gctgggaggaacataacacacctttatcttgtcctgagtgctggaggaccttggagggcccgcatttccagtcaaacgagcgtctggggaggctggccagcatcgccaggcagctccggtcc

SEQ ID NO: 82048 - DNA, 122 bp, Homo sapiens
ttcagcaatttgagggcgctttgtttcttacgttgggagagaaatccatcaggaaatcgacgcccaggatcagatgcagatcctgggatccttggctctgagtagcacggtggaaaagtgag

SEQ ID NO: 82049 - DNA, 122 bp, Homo sapiens
cgatggccgacactgcctgacctccaggttcctcagcctcaccgagttctttggcgcctccgggccatgttgcgtgctgttccccctgcctggctgatcttcctgaagccctttgcctggcc

SEQ ID NO: 82050 - DNA, 122 bp, Homo sapiens
cggaactgagcccgcgtgttctgaggccagggcagggctggagcgttctgaacacctccccgtcccagcccctgggccaggcaagggccggccttacctctcctgggttggtggcagcagag

SEQ ID NO: 82051 - DNA, 122 bp, Homo sapiens
atttgctgtgaattgcaagcagagaaggtctgctaagcgccagcgtcgctgagccccacgcgggggaaatggagctgccgttctgctccgtacatcacagccaacgatgaaaagttctagag

SEQ ID NO: 82052 - DNA, 122 bp, Homo sapiens
ctcaccatccatcactatcagcagcattcacgttgacaccaaaatccagcaggaacttcacgatgtgatggtggccggcgcagacggcgttgtgcagtggggtgatcccttcgtcgttgggc

SEQ ID NO: 82053 - DNA, 122 bp, Homo sapiens
aggggtgtgtggtgtgcaatgctgtttgcttgacagaatcctttcagtctctctctctctcgaaatataaatttcctgcactacaacagcctactaagtgccagacacagtgctgggctctt

SEQ ID NO: 82054 - DNA, 122 bp, Homo sapiens
tttctattacacaacactttttgatacagcgtctcttgtcttcactgatactggagtctccgttgtctgcttggtcccttcgagtttctagttacagacacaatcatactgtgattttattt

SEQ ID NO: 82055 - DNA, 122 bp, Homo sapiens
cattacttttaggaaatcttcagtacatctgttcccacactgggactatgagcaggtttgcggcatgtaagagaagggtgaggcaaaactccctcatcagacttgccatcaggataagggtt

SEQ ID NO: 82056 - DNA, 122 bp, Homo sapiens
cgcccgagagaccggcacgccacggcccctcccccaaggaacagagcaaaggatggtggccgcaggccccacgcgagcccacaggacaccggcccctagattccagccaccaagcggaagca

SEQ ID NO: 82057 - DNA, 122 bp, Homo sapiens
atttgtttgcaagtcattgacagaagtgaagtttccaccaagattcagctgagaccttgccgctgcaggctaagatcctcaactctctagtgtggacgtcacatctggaatcttgtgtcttc

SEQ ID NO: 82058 - DNA, 122 bp, Homo sapiens
ggcgagaaatcaagcgcagcgccggtgggctggcactgctgggggacccagtacaccctccgcagccgctgacctgagtgctaagcccctcattgccccgggccggcagggccggctggctg

SEQ ID NO: 82059 - DNA, 122 bp, Homo sapiens
ctgaacgcgggcctctgacactgcttacactgcactctgaccctgtagtacagcaataaccgtctaataaagagcctacccccaactccttctgcacttttgtgtggtcattatcctaaagc

SEQ ID NO: 82060 - DNA, 122 bp, Homo sapiens
cgccatattgtcgtacggaacacaggcttcctgtggccggaggtgacagtaggcccgccccgcgaacacctccagtgcggcccacatagtcagcggtctcttccaggtcggagtttgtctcc

SEQ ID NO: 82061 - DNA, 122 bp, Homo sapiens
tctgccttaaggggtgggttgatgggtgtctggaatgcagtagcactgtgtaactgtctgcgttatcatcacaggttccccaacctctgtgccatgaggcatttatcttcctgaattcactc

SEQ ID NO: 82062 - DNA, 122 bp, Homo sapiens
actttgattccatcaattaccattatctttctccgcaggtccgccaaccatcccccgatccggccgtgtttaactttctttgccagtcgtgataccccgtcagatttctggcgctgccacgc

SEQ ID NO: 82063 - DNA, 122 bp, Homo sapiens
ggctgggctgcctactgcgaggtggcctcgtgcagcgtagtgagatgcctcctctatccacgggccctgggtttgtcactgtccctgggcgccaaacataatctgagctgtaccccttgagt

SEQ ID NO: 82064 - DNA, 122 bp, Homo sapiens
tgccagctcggtgcctttgccggccccgcggcaccagaagttgggctggtccaggaggaacgagtccgagaactggctgaagccgatgaacagcgccgggatccaggtgagcagcacgaggg

SEQ ID NO: 82065 - DNA, 122 bp, Homo sapiens
acagagtaatcactcaatgaaatgttatcccctaatacatgtcactactagattatttctcgcccttaaaatgtaagagaccgtttttcctcttttcttccatccgtgtctccagcttctaa

SEQ ID NO: 82066 - DNA, 122 bp, Homo sapiens
caatctcagaactcttactttttctgcttctcacaaaatgcatcttcctcccacactttccgcagctcctggtcagccccttcccctctctcctctttctccctgtctccaccaggtatata

SEQ ID NO: 82067 - DNA, 122 bp, Homo sapiens
cagaacgcctgctcagaacaccgtgagccactgcccggcgctgagccggggcctccggaacgtgaaccaagcggctgcagcccaggcccagagccaccggcatcgccccatggcagctgcag

SEQ ID NO: 82068 - DNA, 122 bp, Homo sapiens
cgatgcctgtccttgctagttcactttctggctttgagatttctcactggcagagagaatcgaaacacagagaggcccgcacctccctcctcctgcatcgcgaacgctgcacaagggcagcc

SEQ ID NO: 82069 - DNA, 122 bp, Homo sapiens
cctgagccaccgcctccaccccgtggttcttagtgaatgagccatgctgtttcccccatgcgctgctgtgcaaggggcactggtgaccctcctcccacgctccaggcccaccaggcgccctc

SEQ ID NO: 82070 - DNA, 122 bp, Homo sapiens
catgtggatggcctggtgtgtggctgcgctgtctgtggtggctgtgtgtggcaccagccacgagacaaacacggtcctcagggtgacgaaagatgtgttgagcaatggtgagtccagcccca

SEQ ID NO: 82071 - DNA, 122 bp, Homo sapiens
cgcttcccccgcgctcgcggcggggtcccggggagggggcttctcggaaactcgcctacccgagcggattgggagaagcgctctcccacctagcaagcgctttacatcagagcttccagagg

SEQ ID NO: 82072 - DNA, 122 bp, Homo sapiens
ttggagcttggacctttgagatctcacactgccccacccagtagcttccccttccagtagcgtggcaccaccttctgacccacccctcagtgtgtccaccagtgagagtggttcctaaggga

SEQ ID NO: 82073 - DNA, 122 bp, Homo sapiens
gtccccaaaggcagacagacacttccctcggccttaagatcttgtcgtttcttaaataagcgaacacgtgtgcacccccacactccgttcaagatgccgcgctctgtgggcgcctctgctcc

SEQ ID NO: 82074 - DNA, 122 bp, Homo sapiens
tccttggtcctgtgattcaagacagggtgaaagtcagtggcggccattggtgcctctggccggggttcctcacaggggcccgcaaggggacagcgaatggagcgtggagggtggagggctcc

SEQ ID NO: 82075 - DNA, 122 bp, Homo sapiens
ggcctctgcaaaccaaaacacccaccctcctttgggctctgccttgtctgctgtcttccccgccttcaggtctgatgcctgtaggcaccaagacagagcaagcaaccacctgacaaatcatg

SEQ ID NO: 82076 - DNA, 122 bp, Homo sapiens
taaggcatctgctgagtgtataaccattttacctcttgtttttagccctcttctgggtcacgctagaatcagatctgctctccagcatcttctgtttcctggcaagtgtttcctgctacttt

SEQ ID NO: 82077 - DNA, 122 bp, Homo sapiens
gctcctctgggggccctacgtcgtggccagctacctgcgggtcctggtgcggcccggcgccgtcccccaggcctacctgacggcctccgtgtggctgaccttcgcgcaggccggcatcaacc

SEQ ID NO: 82078 - DNA, 122 bp, Homo sapiens
gcacgcacgcacacacacacaccggcccaggacctcagcacaaagggcgcgctgacccagcgctaacacacaagacaaattaaagaaaggggcaaatcggaggaggggctaaggcgagggtc

SEQ ID NO: 82079 - DNA, 122 bp, Homo sapiens
tcaggacagcggcttggcctaacgggaagtcgggcaggggtccagggcggtcaccctttccgcccagtctttgggtaaggagctccaactttcagcacgagagtgataggtaggaaaggcag

SEQ ID NO: 82080 - DNA, 122 bp, Homo sapiens
cccggctcggcgcgtgcagtttccgggattcacagttcgatccccggaagtgacgataagcgagcccaagtagttcaggctcaaacttgagaggggaaagcagaatgacttgttctcaagtt

SEQ ID NO: 82081 - DNA, 122 bp, Homo sapiens
gggaggccagagacagccgtggcctctggggcctggcactcagccagagctggcaggaggcggggatgcacctcctgcagctgaggttgagacaaagccaggtgcctgccacggcagctgtg

SEQ ID NO: 82082 - DNA, 122 bp, Homo sapiens
gctccaaaagcgaggcaggctccctggagacagagccccttgggcctcaccagcagctgccgctgcacacgctcgttcttctctgcctcagtgatgcgcttctcctcattgcggtcatcccg

SEQ ID NO: 82083 - DNA, 122 bp, Homo sapiens
ggttgggagtggagtggagactggcgagtttcgactcccccagccaccccgctgtgggtccgtcggtcaccaccttggcctttggtgagggttgttggggccctgcagtccctggggttcac

SEQ ID NO: 82084 - DNA, 122 bp, Homo sapiens
cccagggaggagcattgccgggggcagcccagcaggaggtgggagccaagtcggggatggcggctgggaacaggctgcattccaagactacggggagcgggcaacggggggctaggcagcaa

SEQ ID NO: 82085 - DNA, 122 bp, Homo sapiens
gaggagcaattgcgtcaaggatgaataagatcaagagcagcaaaaatcacatcattcatccggtacagagggaggatttcaggctggattttatgtggttaggttgcaagtttttttgtttt

SEQ ID NO: 82086 - DNA, 122 bp, Homo sapiens
gaagttttattagtctgtagcagagttcaggacaattattgaaaaccataccttttaatccgggaatttgccacaggagccctcaaagctgagatgtaattacactaaatattcagcccaag

SEQ ID NO: 82087 - DNA, 122 bp, Homo sapiens
tcagccagagccacagtttgaccccaggacaggatgtaaaattaatttgcttgaatgcaacgttcaagcatttttcttggtaagctggtatgtgtcaagtactatcatataataaattatac

SEQ ID NO: 82088 - DNA, 122 bp, Homo sapiens
agatgtctaagccatcccttgtattttgatactcacactgcatcttttaataacaattttcggccaagcgtggtggctcacacctgtaatcccagcactttgggaggctgagacgggtggat

SEQ ID NO: 82089 - DNA, 122 bp, Homo sapiens
aaaatgtgaatttgccaggccaaaagataacctttagaaatgagcttctttaccttacaccgatctgaaaagatctctcaacaatttaccaacatgctaatgtgggtgtcaaatcacctttt

SEQ ID NO: 82090 - DNA, 122 bp, Homo sapiens
cctccggccttgctgcctggcaatgggtagccacctggcgtctgtctcagaataggactccgcggcacgcctcctagcgcagtcggttgacactgcaagaatgggaaggtgcgggtgaccac

SEQ ID NO: 82091 - DNA, 122 bp, Homo sapiens
ggcccacacttggagtggctggctggcatcgccggcctgcacagtgaggggtttagcacccgggccagcagctgcggaaggtgtgctgggtcgcccagcactgccggcccatgcgcgacacg

SEQ ID NO: 82092 - DNA, 122 bp, Homo sapiens
tgacaatttgcggcaattaaagcgtctgcgcgctgttgccggaggaacagggacccacagcggtttttgttttcccaggcttgatgatgtgactaactcgttagagaatttgcgtcctaggt

SEQ ID NO: 82093 - DNA, 122 bp, Homo sapiens
cgccctcccgcagccggccccgccctcccgcagccggccccgccctcccgctcgcggccccgcccccaggagcttggccctccgccaaccacaccgtctggccccgcccgggcggagcgccc

SEQ ID NO: 82094 - DNA, 122 bp, Homo sapiens
cccggaagccctcggacaaggaactgtagcccatgtaccgcgtgacgtgagagcggagcccgggtctgcccgggcgcgggcccgcggccacggcgtttggatcccagatcccagcccccgcg

SEQ ID NO: 82095 - DNA, 122 bp, Homo sapiens
ggagagtagtcagagggcggcaccctccccggtctgggccgagttattggctggtggtagcgtcgctcgcccggcagtaccacgtgacggcctcggccgcgggcgtttacactggctctgcc

SEQ ID NO: 82096 - DNA, 122 bp, Homo sapiens
ggcagacaaagcgcctccatcccgtgagagcctctgtgcgggcggccccgagaccacagccgtggctgtgcatgctgtcgtggaacctgacagcattgctgagcccaggacactcacctcga

SEQ ID NO: 82097 - DNA, 122 bp, Homo sapiens
agatctgtgtcatctgatccatcagggtttcttgtccagatgctcaggctgaagaggtaccgtcggtccgaggtcactgcctggcaagcgaaggccatgatggtgggttggatgggtcatag

SEQ ID NO: 82098 - DNA, 122 bp, Homo sapiens
gcccgcggccgctcggacgcgcgcagagccgccccccgccgctgccgccgcgtgcgcccgcgaacatgacttctgccttcaagctggatttcctcccggacatgatggtcgagggccgcctg

SEQ ID NO: 82099 - DNA, 122 bp, Homo sapiens
cagtccgcggctggcagggcctggggcggtctttcgcgtgggtgtccgtccctccgcagccgtactgccggcgccagggccggctctgcacatttcgtaaggccttacatggctgcaccccc

SEQ ID NO: 82100 - DNA, 122 bp, Homo sapiens
ccgcctcccgggtccacgccattctcctgcctcagcctcccaagtagctgggactacaggcgcctgccaccacgcgcggctaattttttgtattttttagtggagacggtgtttcactgtgt

SEQ ID NO: 82101 - DNA, 122 bp, Homo sapiens
cagactcgcacgtgaggctcaccagcctcagcctccacaaccatggaccccgtaagactacggtgcctctctcaggccactgggaccaaactgagactggtgagaagaggcgggggagttcc

SEQ ID NO: 82102 - DNA, 122 bp, Homo sapiens
cttgggctcacttggggcttctcccaaggcagtttcccattctcctttctggctgaaaaccgctgtcctgggctcagttgaagatccgccccccatctgacctcccagactggttaatcatc

SEQ ID NO: 82103 - DNA, 122 bp, Homo sapiens
tgtcaaataccatataatgagggttacattttgcattatctcactggatcctctcaataacgtgcatgctcttcttagacccattttacaaatgggtaaagtccctgccctaaccctgatcc

SEQ ID NO: 82104 - DNA, 122 bp, Homo sapiens
tcactgtttcttaataaatgttatcctgtttatctttgtttcctcagtgtcttaaatacccggttcctaatcaatgctttaggcatttaagggtattctcacacatctctgtatctctcaac

SEQ ID NO: 82105 - DNA, 122 bp, Homo sapiens
tcaggcactggcgctgcgcgggactgtactcggcagggggcgtgcaggcacagcggtagccgccgcgcgtgttctcacacactccgttccggcagttggactcgtccaggcactcgtccacg

SEQ ID NO: 82106 - DNA, 122 bp, Homo sapiens
ctgggcaaagtttctcaggctgtacttccacctttggggcctcgttactattttcttctccgtggagttccctcttctctgtggtgggctttctgccagatgctgcctctattggcggccac

SEQ ID NO: 82107 - DNA, 122 bp, Homo sapiens
tgctaaaaatacattcaacaaaacaatgggcaatagcccagtagtttattcttagaagaacggcacatttattttttgtgtaggacataaatgaagggctcaagtaacttccagctttttta

SEQ ID NO: 82108 - DNA, 122 bp, Homo sapiens
aaaaaaaaaaaaaaagaaatatggaggattctttctgatgagggcttctgcactgaattacgtaaaactcccatttcggaattatcaggaattaaggtggcaggataccttaagagatttaa

SEQ ID NO: 82109 - DNA, 122 bp, Homo sapiens
cctggtcctagtagtctaagggatcagcctcaccttggcctatcgggtaggtgctattatcgtgcctatttgacagatgaggaaacagactccaagagaggttaagccacttgcataaggtc

SEQ ID NO: 82110 - DNA, 122 bp, Homo sapiens
ataatgcttatcagaaagaatgttccccaatctgatcataatggatgcagtgtgctgtgtcgaatcacgtcctctttcctgattgcggataagaagaacgtgactcaatcagagcatctgag

SEQ ID NO: 82111 - DNA, 122 bp, Homo sapiens
gagtggggccagccgtggacagctgaggttggggtcaatgcctcctgggcacccttgcctcgccccagaccggcccgtccagtccccatcacacctcggcggcctttatttattctgttccc

SEQ ID NO: 82112 - DNA, 122 bp, Homo sapiens
tccaacaccccagtcctaataaatacaatcaattccaaatgccccaactatacatgaacccgaagtagccaatctttaaacccacactgaaaattgcaagtccccaagctgcaaactcccaa

SEQ ID NO: 82113 - DNA, 122 bp, Homo sapiens
tcccatagttcctgcacaggggaaccattgtgtaatggagaagtcatgtcatatcccccccgcccgtcaacagccaaatgaaaaggccacgtggaaagaagagagggagggcaccctgagac

SEQ ID NO: 82114 - DNA, 122 bp, Homo sapiens
gggctcggcccctcccggcccagctgccaatcatgcacgaccctgcccggagcagcctcccgcaggactccggacccagggtcaaggccagactcacccgaggcaaaggccgaacgctcccg

SEQ ID NO: 82115 - DNA, 122 bp, Homo sapiens
caggtactctcctgcccttctccaacaaggaagtaaataaatagacttttaactcaggaacggggtgttggagcaggggaaccctccccttggagttagtaattaagtctcatgttaaaaac

SEQ ID NO: 82116 - DNA, 122 bp, Homo sapiens
gcgtccccaccacctggtcttcgccccagccccgtctcatctgccgctagagttgcgtaacgtgagtcctggacagttgattccacctgaagtcgacatccgtgccccagatccctagcaga

SEQ ID NO: 82117 - DNA, 122 bp, Homo sapiens
aaatgcattatacagaagattaatagcttagcccaattaggaaacatctttagtctttcccgttgacattttcactatgcaatctaggcaaaaaaaaaaaaaaaatagcaactcagataaac

SEQ ID NO: 82118 - DNA, 122 bp, Homo sapiens
cgcctcttctgggcagagggcaccgccgacggccaggccgcagagggggcttgcgaggatcggaagctggtcagcagctgttgggatgtgtacatcgtgaagcccacctggtggccgtggtt

SEQ ID NO: 82119 - DNA, 122 bp, Homo sapiens
cagcggcgaagtcactgccgctcggtgcgcactccagcgagaagcgggcgcgtcctgtgacgtcacaggcaaccacccctagcagggcaccaatcccggagggcgggcccagtgcggggcgg

SEQ ID NO: 82120 - DNA, 122 bp, Homo sapiens
atgagatttgggaagctgtctctgagggctggatagcctgggaaggctttatcaaaaactcgtgatttgaagtgggacttgtaaaatgggtgggatttagactggaggagaaggaggaggta

SEQ ID NO: 82121 - DNA, 122 bp, Homo sapiens
ggctggctcgggggtcgcggggagccgccgggcgcccgctccagcccggctgctcctgcccggtttccctgctcacctccgccatattggtacctttagggcgaacgagcagcgccgagccc

SEQ ID NO: 82122 - DNA, 122 bp, Homo sapiens
aatgacacggggggagggtgctccaggcctctgcaattcttcggagatttcagctgcccccggaggatcctcctcccaacagccagatgcctgacgtggaattagctccagaaatggttgca

SEQ ID NO: 82123 - DNA, 122 bp, Homo sapiens
tggaatagtgtttggcacattatagtatctgcttctactatcgtcttcccaactggaacacgagccccgcggggctggggacaaggtcttaccttgcatcccaataaatgagcatttcattt

SEQ ID NO: 82124 - DNA, 122 bp, Homo sapiens
ctcacggccgcccgcccgtctccgcagttctcctcagtgaccggaggctgccgcgcgccccgttctccagagaaacaatccccggagagaaagacggccagtgtgaaatatcagctgtttca

SEQ ID NO: 82125 - DNA, 122 bp, Homo sapiens
cgcccgggccgcgcccgccgagccgctcacgccctgcccacattgtcctgtggcacaacccgagtgggactctccaacgcccaagagccttcctcccgggggaatgagactgctgttacgac

SEQ ID NO: 82126 - DNA, 122 bp, Homo sapiens
ccggcagtccttcctccagctggtgtccctgccctcctgtggtcctgtgggcggtgagggcggtgaggacagtgggcagcagccccggtgctctggctagaagccacctgcacccaccgtgc

SEQ ID NO: 82127 - DNA, 122 bp, Homo sapiens
atttcagctgcagagggtgttgtgaggaagctggaaaggaaggttggattagagaagcctcgagctccaggtaagcgatttggacatgcccacctttcaagaggggctgcaggcacccacag

SEQ ID NO: 82128 - DNA, 122 bp, Homo sapiens
agattcggccccagacacacactcacaagggcacgtgatcacgtgcgtggtcacatggaccggcccactcagaacacactcacaaagtcacaccaaccaaggcagccacgcgccacacacac

SEQ ID NO: 82129 - DNA, 122 bp, Homo sapiens
tttcccataatggctgtagtgagtgggtgtgctttcccgattgacccgctgtgaggtgagcgattttaacccacatccttactgacttcacagcacagtaggtgcttcgtggctgtccggtg

SEQ ID NO: 82130 - DNA, 122 bp, Homo sapiens
cctgcccgtggaggcttcggttgaaggaatgcaggaatgccctgcctgtcagactcagtgcggcggacaggggcaggcgaggcactcagctcctgcccgtggaggcttcggtggaaggaatg

SEQ ID NO: 82131 - DNA, 122 bp, Homo sapiens
cctcagttccctctgtagcatcaaacagaggatgctgaggtccagggcatatcatcatcacgttccccaatatctgtgtaaaggtaaaatcagctcatgaggacacagaacttcagcttgat

SEQ ID NO: 82132 - DNA, 122 bp, Homo sapiens
tttttttatttttaatttttttagagacagggtttcactctgtcactgaggctggagtgccgtggcacaatcatagctcactgcagcagacttgcactcctgggctcaagtgatccacctgc

SEQ ID NO: 82133 - DNA, 122 bp, Homo sapiens
atgggtgggaggggacaaccccagggcctgcccgagcagatgacaggcagaggtggcagccgccccccttcctgagcctgtggagtactgagcaccactcatgctgatctcaaggagtgtgt

SEQ ID NO: 82134 - DNA, 122 bp, Homo sapiens
gctgatgatgtatctgaggaggtttctcaatggagcttcactcgacgtgcgtcctgatggcggcttcccagcccgcagcctcagcgcttcttgacacctcactgtcgtgtttcctcttcttt

SEQ ID NO: 82135 - DNA, 122 bp, Homo sapiens
ggtgcagctgagggcgcggccgaaggtgcccgacgccgcccacgagctcgactccacgctcggctactaggaccttctgcacttgcaccgagcaagcagcgaaatggctgtggcttcgtacc

SEQ ID NO: 82136 - DNA, 122 bp, Homo sapiens
gggtctctgttataaacttccgccctcctctggcttctgttccttaccctctgccccctgcggagttgtgttttctgggaatcagcaagtaagatcacaagtggtcttttcttttattcact

SEQ ID NO: 82137 - DNA, 122 bp, Homo sapiens
aaagactcaactcactccactgatgccagccaccagctactgttgatgacttcccaagttcgtactttcagtccacacctcttcctttcgctgggcaccaaacttgtctacattccgagtgc

SEQ ID NO: 82138 - DNA, 122 bp, Homo sapiens
cctgagaaatggaagccactgtttttagcgtaaatgcccttaagaatgtctccttgtagccgggcgtggtggctcatgcctgtaatcccagcactttgggaggccaaggtgggtagatcatg

SEQ ID NO: 82139 - DNA, 122 bp, Homo sapiens
cctttggagggtgtagtcagtgtaccattccatccaatcgttgcaatcacttgagcccttcggagggtgtatttggcgtatcattccatccaatccttgcaatccctgacattttctaacct

SEQ ID NO: 82140 - DNA, 122 bp, Homo sapiens
cccccgaccccgccccgcagagggaagactcagcttcgttccaatacaggacgcaatacccgcccgtcaaagactcagccaaccaccgaggcctgtcttatgattttcccgccccttccccc

SEQ ID NO: 82141 - DNA, 122 bp, Homo sapiens
tcgacctctggactctgtgcaaatggacactctgtaactgacacagctggtaggggttaccgagagagctgggttcctggtctggtggactccgccggatatgcaacgagctctttatggca

SEQ ID NO: 82142 - DNA, 122 bp, Homo sapiens
ggtagagagaaatttcagaatacgaccaactgaagacgcagaaaactccatagaggtatgcgcaggtttagcttcaccaccacaaggtgggttatgataagggccatctttgccatgtgttc

SEQ ID NO: 82143 - DNA, 122 bp, Homo sapiens
gggatgtgaggagcccctctgcccggctgcccagtctgggaagtgaggagcgcctcttcccggccgccatcccatctacgaagtgaggagcatctctgcccggccgcccatcgtctgagatg

SEQ ID NO: 82144 - DNA, 122 bp, Homo sapiens
tacaaaggaaaagaagtgttactcaactctccaggaagtttaatcagtatgttaaacccccgtcatcagaaatctacctattttaatatgtgaaatgtattaagcagcacagaaaaaaatgt

SEQ ID NO: 82145 - DNA, 122 bp, Homo sapiens
tgccggcagggcgcacaggggagtgggcacagaggcgggctggagcgatctcacccgttccgggctggccagcacgcgccctccctggccggagcgctgctcatctgatggagggcaggaag

SEQ ID NO: 82146 - DNA, 122 bp, Homo sapiens
acgcccacccggaactccagctggcccgcaagcgccacgcgcagccccggttcccgctggcgcctctcactccacacctccctgcaagctgagggcgtcggctcccgccttagccagcccag

SEQ ID NO: 82147 - DNA, 122 bp, Homo sapiens
gtgaccaggcatgattcctgtgacactttgctggggcagccatttctcctgccattgccgcggctttccaagatgagtgtccaagagtggagtaagggtccggggcctgagcaggacaaaga

SEQ ID NO: 82148 - DNA, 122 bp, Homo sapiens
gtaggtgccatctgcactcatgtgtggtgggatgaagccaggctggggcattgggtgacccggcggctcatagggtggggggccaatgtccgcagggggcagtggcatgcctggagggggct

SEQ ID NO: 82149 - DNA, 122 bp, Homo sapiens
gacgattctcgtgtctcctcctgtgtggggccttggggtagccagggcaggccgggcctccggtggccaaggtctcggaggccaggatgcctgccctggcatgcctccggaggctgtgtcgg

SEQ ID NO: 82150 - DNA, 122 bp, Homo sapiens
aagagtagcctgggccccttgccctggaggagccctggccctgtgagggaggctggcaggcgctgcccgctgtcactccatgccggtgccctttgctccacttcagtggccacgtgaccagg

SEQ ID NO: 82151 - DNA, 122 bp, Homo sapiens
cacccgaggcagcctagagctgggggactggagttgccttcccaaaatgttatagtttaccgggttggtacttgggccttcgtggctcagccctgcctctgcaacttactagctatgtgtcc

SEQ ID NO: 82152 - DNA, 122 bp, Homo sapiens
tgtgcgggagtgtgagcagcccatccggagggtcttccagagcctcagcctggccgtggacggcctcatggagatggccctggactccagcaggcaggtgaggcccaggctcccggggtcct

SEQ ID NO: 82153 - DNA, 122 bp, Homo sapiens
taaaattaaatacagtttaaaattcagttcttcagccacacctcaagcgatccatggccacgtgtggctagtggccaccatattggccagtggagacagaacattggcatcatcccagtaaa

SEQ ID NO: 82154 - DNA, 122 bp, Homo sapiens
cagagcacaaaatggaaaataatcataaaaaaattaaataataatactatcaaatcataacgtgaataatgctgttattagagttgaagagaagcccttagaaatgggacaaacattgtaat

SEQ ID NO: 82155 - DNA, 122 bp, Homo sapiens
ccccttccctaggaaatgggcacacagtggttcaggggccagctttggctgacgctgcagcgaagactagttagacacttggaagaactgggaggcacaagggtttggactcagggtgtcac

SEQ ID NO: 82156 - DNA, 122 bp, Homo sapiens
tcttcattattttccattactcttggaatgaaagtcaaactttttacccagggccagagccggtcccacctaccttggtaaccacacctcccgtgctctctgcctccctcactaagctccag

SEQ ID NO: 82157 - DNA, 122 bp, Homo sapiens
cggtggggcatctgtcagcccaagcatacagatgaacagactgaagcttgggtgcaaacccggctgctccagggagggagagcgcccacccaccactggccccagccaggaggagagggggt

SEQ ID NO: 82158 - DNA, 122 bp, Homo sapiens
actaccctccagccttggcgacagagtgagactgtgtctcaaaaataataaataaacaaacggacaacacaaattcaaatacagatctaaagaaaactaaacaggttgatggacttcttatg

SEQ ID NO: 82159 - DNA, 122 bp, Homo sapiens
aacacacggtgcacccaactgaatttaaactcgggaacagtgtaggcagtgtcaacaaagcgcggtgctgggtcccgagcgtccaaaggtccctgccagctcccagacgcggccaaatccac

SEQ ID NO: 82160 - DNA, 122 bp, Homo sapiens
atcctgaatttcttagttgctagaaaaatatattgaaaaggaattatgcttgtatagcaacggattatctctggaaaagtactgggtgtctagaggatgagtgaaaattgtttcccctatat

SEQ ID NO: 82161 - DNA, 122 bp, Homo sapiens
gtagaggagaggtgaagttgagattcatcttgagcggagcacctgccacaggacaagggccgggacgaagtggaggacgcaggcagagtctccaagcctgctcgaaagccggcaaccaccct

SEQ ID NO: 82162 - DNA, 122 bp, Homo sapiens
cccctttagagagaccctgctctgggctggtttggggctaggactgctgacttggggaggcggggagtgaacccggaatgggtgatctgggctcttgcagccattcctctttgttggtgtag

SEQ ID NO: 82163 - DNA, 122 bp, Homo sapiens
ccagggtgcgaggcgcctcctctcccttcctgaacccaggaaactgtcgccgtttctccccgtctcaggagccatcagaacacaagaggagccccagacatctgagcccgttgtccctgccc

SEQ ID NO: 82164 - DNA, 122 bp, Homo sapiens
gccaggttcccagacctttgcaggggccatacttgtccctgccttcaggtcatttactatcggacctgatctgcataaatgtgaaacgtcagtactgacccaaaaccaacttaggtatcagg

SEQ ID NO: 82165 - DNA, 122 bp, Homo sapiens
atacctctcgcactcagctctccgccatcatcttgctccccagaaacatgggactttctccggaaatttcaatagaggagccagtcggcgtcccccgtgcacctttcccttggtctaagggc

SEQ ID NO: 82166 - DNA, 122 bp, Homo sapiens
ataatgggaagtgcatgctagggatgacaagtcagatttggtaattacagttaacagtaacgtctgttcatccactattgacgcattgaagtatttccatgggatatgtaagggagtcatgt

SEQ ID NO: 82167 - DNA, 122 bp, Homo sapiens
ccaaggagtcgcggggatggagggcggtggggcagagcctgggacgggcacgggaccggacgggcaggaggcggcagagtcgcgacgcccggctccctcgctccgggcgccccgcggccgca

SEQ ID NO: 82168 - DNA, 122 bp, Homo sapiens
aagcatgagaagaattccatgccctgttgctgcttctgaaatgtaggggcgggccaggcgcggtggctcacgcctgtaatcccagcactttgggaggccaaggcaggcggatcaccaggtca

SEQ ID NO: 82169 - DNA, 122 bp, Homo sapiens
cagacttattgggttttccagtagttttgtcaaactttgtggtcaactttctccgtggtccgtggtaaagcacattttcttttggtacaacataagctttaatgctcatgttttgtattaga

SEQ ID NO: 82170 - DNA, 122 bp, Homo sapiens
ttattggatatctttctcccatggtttatggtcattgtcaccagcaaggagtgtttcaggcgacctcacaagtgccaactaccttaggagcagaagaaacttggagactatatccctcttga

SEQ ID NO: 82171 - DNA, 122 bp, Homo sapiens
ctggagttcggggtgtgcgtggagggggctgtgagcgggaagcggcgcggacgcggagtccgggccggtgcgagtgagcgcgtgtgcgcgtgggagagcggcgggagggggccgggctcgca

SEQ ID NO: 82172 - DNA, 122 bp, Homo sapiens
ttcattctgctcttcttcagcctgtccggcctcagcatcatctgcgccatgagtgtcgagcgctacctggccatcaaccatgcctatttctacagccactacgtggacaagcgattggcggg

SEQ ID NO: 82173 - DNA, 122 bp, Homo sapiens
atatggaacataaatatgagataggccattccatcagcagcttttagtgtaaaaagcatccgttcccctcaaagagaccatgaatgttttcacaagcttaaattttattttattttaagtaa

SEQ ID NO: 82174 - DNA, 122 bp, Homo sapiens
ttaggaacgcacgccggacattctgttttgcccagcagtgagtccagttacctggagacccggacttaatggatcaggactggtccctacccacgtgacacagatgtggcattctggttcgt

SEQ ID NO: 82175 - DNA, 122 bp, Homo sapiens
aggtctctgtggcgtgcccgggcccgggcgtcgaggagggcagcattgtgacccgggccgcggcgcgctgacctcacagagcacgttcctcccactggagaacccccaacggtgccccctgc

SEQ ID NO: 82176 - DNA, 122 bp, Homo sapiens
ccaaggcccggcagcctcagtccactgctgggcctggaacacggagcagtggctgccctgcgaggaggtgggtgtccggagtgctagccagggtggggctgggctagggggagcctgatgtc

SEQ ID NO: 82177 - DNA, 122 bp, Homo sapiens
tactggggaggctgaggcaggaggatctcttgaacctgggaggcggaggttgcagcgagccgacattgcacaactgcacaccagcccctgcgacagtgagagactctgtctaaaaaaaaaaa

SEQ ID NO: 82178 - DNA, 122 bp, Homo sapiens
gccaatcctagcactgggcatttgcgggtggcccagcaagtggcctagcacttgcgggggcgtggccatggagacacagtgaccaaaggcagagaagaatgcgaatgggggaggggaagcgg

SEQ ID NO: 82179 - DNA, 122 bp, Homo sapiens
tgcgcctgcgtttcccctagagagaagtcagagcaaattccattccctttggagcagagccgctagagactgtgggcattgctgggtaaggcctaggtcctactccttggaactggagggct

SEQ ID NO: 82180 - DNA, 122 bp, Homo sapiens
cctgggcttgcgggcctgccagccgctccgagtgccgggcctgctgagcccacgcccgcccgaactcatgctggcccacaagtgccgcgcacagagccggctctggccttggccagcccaga

SEQ ID NO: 82181 - DNA, 122 bp, Homo sapiens
cccagacttacagctagcatccgacacaagcacagtcctgttggggatctgtcctgaacccgtgcagtctgcactaacactgggtagttagcatcagaagtgaactgcagtgttgtgctgta

SEQ ID NO: 82182 - DNA, 122 bp, Homo sapiens
tgcgaggagggggcggcgggcgcgaccggggtggctgggggcttagggaaggggaaatagcgcctgcaagaccgcatttgttctcttaacacagggcagtgaacggccgcgaacgacgtcat

SEQ ID NO: 82183 - DNA, 122 bp, Homo sapiens
gcaagcgcattgctgagtttgcctttgagtatgcccggaacaaccaccggagcaacgtcacggcggtgcacaaagccaacatcatgtgagctccttgcgggggccggcaccccatcttgctt

SEQ ID NO: 82184 - DNA, 122 bp, Homo sapiens
cccgtaactgggcgggcgcatagctggggctcagcggtgcgcgtcctgataaggagactgcgccttccagggctctgggaagagggccggggcaccgggcagacagatgcgcgcacacacat

SEQ ID NO: 82185 - DNA, 122 bp, Homo sapiens
gaccacccatggggcatcattcctttctcccggcttccttcattctcccggcttccttcacggggttctgggcacacctggtcccttgtagctgcggtcagcacggaaacaagaaaagcttc

SEQ ID NO: 82186 - DNA, 122 bp, Homo sapiens
ctcccgagccggcggcggggccggcggctgaggatgagctggggccgggccttgcggacccgcagccaagtggaacggcaggaaccccgctttagcagcagtcccgagtccgccatgctggg

SEQ ID NO: 82187 - DNA, 122 bp, Homo sapiens
gggatagctttggaggcaggtcttgaggagtggaggaggaggaatcttaacaagtagcagcgaaagaggcaaggagtaggagaatagaacaaggtgaacaaaagccccaagaagagacactg

SEQ ID NO: 82188 - DNA, 122 bp, Homo sapiens
ctttacactgattctcctggccaggtctgtcctcaaccaaatcacttccttattcaagtgcgtgtaaacagcctcctcctggctgcatacttctgtctaccctctggctcctgacattgtgg

SEQ ID NO: 82189 - DNA, 122 bp, Homo sapiens
gcaatgtgatcacttgattttaaacgcaactatgcgtccaaatggctgagtgcaagaggtcggccggagatagggccgagtgcgctgccccaagctgcgatccctgccaagcactcacggac

SEQ ID NO: 82190 - DNA, 122 bp, Homo sapiens
cggtccttctgccacatcaggttttgaggcatagggtatctctgtgtgccatgcaagtaccggtatgggatcctcacgtgacaagcagtggctctacaacgaggttgtggcataggaggaag

SEQ ID NO: 82191 - DNA, 122 bp, Homo sapiens
ccccccatgcctgaacctcccccgcctccttgggctcctgtgcaaacggagcctcccccacgagcgccaccccctgctccacggtgcgcaattccatcgaccacccaagggctgaggagtgc

SEQ ID NO: 82192 - DNA, 122 bp, Homo sapiens
ggctgagttgtttaaaaaaacaaaaaacaaaaaacaaatctgtgcttcttttcttaaccacgacctcagcaatcgtgagcaaaatgtctgagggagtgttctaacaggcctaagaggaagct

SEQ ID NO: 82193 - DNA, 122 bp, Homo sapiens
gggcgagagcaggagtcagtcactttggagcctccggagccctgtctgcaaagagtggtgcgtgtgcgtgtgtgagtgcgcgcgtgtgcgcgcgtgtgtagcggtgggagggggagtccctg

SEQ ID NO: 82194 - DNA, 122 bp, Homo sapiens
ttcgccggcagctgtagcggaggtggagggatgggggactgtgacccccgtgagtgccggcggggcggggcagctttaaaaacttctgaaaggcctggttcaaagcctcaaaggatagaact

SEQ ID NO: 82195 - DNA, 122 bp, Homo sapiens
aggtaacacatcccgtgtctgcacggtgtggcctggggtccacagtctgcactgtctgtgcgctgtggtttatgcgctgtggcctgtggcccatgcgcctcagctctgaccacctgcttgcc

SEQ ID NO: 82196 - DNA, 122 bp, Homo sapiens
agggttttccccgccagggtcaggcctgggggcggggcggggcgggggcgggggccaggccgtgtgctctgcccagcgggctggctcaggcctcggtcagcagccgccaccgcggggccaat

SEQ ID NO: 82197 - DNA, 122 bp, Homo sapiens
cgcgagggatccggatattgaaagcccctttgccggaagactcgggcgctgggagaagcccgcatgggacaggctgccccagtgcccgccggctccctagaatcgtgcagctctgacccttt

SEQ ID NO: 82198 - DNA, 122 bp, Homo sapiens
caggaggggcctcttgtttctcagcccccgcagctctggccaccccaggcttatggcacacggtaatggatatttctgaatgtctctttggccaaatgagtctggaaaatgatgtgctaagg

SEQ ID NO: 82199 - DNA, 122 bp, Homo sapiens
ctctgaccaatcaccctttgccttacaacatgtaaaacggttatcaaatgccttttagggcgggatttatcactaaactgctccaggtttggactatagaaatgcggctgttcgctgcaacc

SEQ ID NO: 82200 - DNA, 122 bp, Homo sapiens
gtgcacccttctgtgtacaccactgagcgtgtgtctgcgtgtgcaccggggtttggctctcggggctgatgtccgttaggagcagcccggggtctggatgtgttgctgtccgtgtgcgcgcg

SEQ ID NO: 82201 - DNA, 122 bp, Homo sapiens
tggaaaatgaataaatgacttcttcatctccaaagtatcaaggtggctgctcccttcccacgtttccttcctaaagacagaggtggacaaagactcagtgtcctctgtgggggcttttatgg

SEQ ID NO: 82202 - DNA, 122 bp, Homo sapiens
agtgcagggcctaacaggccttcttagctagagtcgctctaaaggactcctgattcagttcgggtaatcggagtcttatttaggacaagtctgggtgaatcccttatgtttaccagatgtac

SEQ ID NO: 82203 - DNA, 122 bp, Homo sapiens
ctagagtgttactgacatcacaacatacagctgttgactttctattgtctgagtcctcctcggcaagtgctttagactgctctagcaggcactcccaatgccagactaatcagctggatgtg

SEQ ID NO: 82204 - DNA, 122 bp, Homo sapiens
gaccctgggacaaataaagtagggaaagtgacttccaactaaagcatttatccaggaattcgggggtggaaattgatccaagcaatcttggcaaattgtgaaagcaaagagtgaccaattct

SEQ ID NO: 82205 - DNA, 122 bp, Homo sapiens
gagctgtacccaccgaaggtggtagagatccgacaggcccttgcttcccaccacggagtccgaaatcagcacccccaactgcaggacgggaaccgtgagttcgtgcaggcacatcttctgca

SEQ ID NO: 82206 - DNA, 122 bp, Homo sapiens
aatgaataaatgacgcaaggcaaaatgacaggacaaacacagggtgggtagaaagagttacgagtgaaagggaaggtagaaacaataagactttcactggaccaaaacatggaaaggctgtt

SEQ ID NO: 82207 - DNA, 122 bp, Homo sapiens
ttgttaccaagcagcgacaggaaacgactgcccacaacaggaagtgatgatgccgcgtcccggcaccgcagccccactcccagcctattagccaatcccagtcgattcctcgaaaaggctcc

SEQ ID NO: 82208 - DNA, 122 bp, Homo sapiens
cggtgccggccggctgctcggagtgcggggcccgttgagcccgcgcccacctggaactcgcgctggcccgcgtgcgccgcgtgcagcctcagttcccgcctgcacttcttcctccacacctc

SEQ ID NO: 82209 - DNA, 122 bp, Homo sapiens
gttggctttcccttcaagtccttcttggatgttatttgtatccaaagtatcctaatgtaccgttccgggaagttactattaacaaataacactcacctggcacggtggctcatgcctgtaat

SEQ ID NO: 82210 - DNA, 122 bp, Homo sapiens
gagatgtgttcacaatggataggcacaggaaaccagttaggtctcaatacctgaagctatcgtaaaattaagaaaggataaagttggtaaaccttttatatttagtatctttttattcagct

SEQ ID NO: 82211 - DNA, 122 bp, Homo sapiens
gccagtagtcgttgcagtgggggcagcgcggttcagcattcgactggaagtacttggccacgcagggtaagtgcatcctgatcccacaggtttcgcagctttgaccctgaaacaggaaaggc

SEQ ID NO: 82212 - DNA, 122 bp, Homo sapiens
acaggttccagagacactgaggggatcaacaggactcctgaagccatcaatcagtaggaccgggtggaggagagggacagatccagcttggcttgcataacaccaggttcatcttgaggttg

SEQ ID NO: 82213 - DNA, 122 bp, Homo sapiens
agaaatacaaacaactttagaaataaagtaaccaaacccccgaaagcggctttgaagaggcgaatgcctggtggcgctttactatggtgtgggccgaggccccggcctaatcccgctttcat

SEQ ID NO: 82214 - DNA, 122 bp, Homo sapiens
ttggctagcggcccagagtcggggcagggagggttcccgtgcggacgggggctaagaggccgcctccagcccggggcagtccgcgcacccgagcctggagcccggagcctggaggggtgggg

SEQ ID NO: 82215 - DNA, 122 bp, Homo sapiens
gggtgggacaaaaccaaaacgtgtgaggaccggcccgatggagtcgtggctgagagggggcggggctaaagggagacgtcggactccggtgtgggcggagctcagaaatgaggtggaggcgg

SEQ ID NO: 82216 - DNA, 122 bp, Homo sapiens
gggggccatcgcggggctcaaggtgctgccgatcatcaatgaggccacggcagcagccatcgcctatgggctggaccggcggggcgcgggaaagcgcaacgtgctcatttttgacctgggtg

SEQ ID NO: 82217 - DNA, 122 bp, Homo sapiens
accccgcggggcctagttgggagcgcgccgcccactgaggcctgggggcccggcgaggcgcgggggtggccaaggcagtctccccggcacacagatcagcacatgtctacgcgcacacaccc

SEQ ID NO: 82218 - DNA, 122 bp, Homo sapiens
ggaggtccctctacttggaaggaaacttcaacagtaatgaagcagaatgaaggaaatgaacggaaacgtggacaggggtttcctgaagcttctctttgccaggtgccatgctatcccatttc

SEQ ID NO: 82219 - DNA, 122 bp, Homo sapiens
cgtgcccggccggctgtattgttttctatgtttatttaaaactaaaaacttgcaatgatgcgagtttggaactgcatgccccaggaacatctgggctcctgagtcactggagaacagcttag

SEQ ID NO: 82220 - DNA, 122 bp, Homo sapiens
gcaacgccagacaccagtgtcagcggtctcagccgcactcagaagccagtcgggagaggacggctgccctggccttttccacgccccgcatctctctccagctcagttccaagatcaggacg

SEQ ID NO: 82221 - DNA, 122 bp, Homo sapiens
ttttgcggggttctcctcggatatgcagaaagaaaagggcatgcacagcagagccactatcgtaccctcctggtggcagcaagtctccccagagggctccaattagtccaccccgccctgca

SEQ ID NO: 82222 - DNA, 122 bp, Homo sapiens
ctttgatcctacagcggcaagagttcttgacacttgccggctgccaagcctgtttcctcccggtctaacgttctgtggttgtctgaatctccagctgcccctcaaaaccttcaatcagatta

SEQ ID NO: 82223 - DNA, 122 bp, Homo sapiens
gagaaaatcatcagagactggtccacataaaagtatgttcctggaattcatcttatgtctcgttgagtccatttctagcatttgtgtttattcctgttaaagtatttgaactactgccagaa

SEQ ID NO: 82224 - DNA, 122 bp, Homo sapiens
caaagaaaattttattgggctctctgagcctcagactagaagatttaataatatcagagacgattaaagtttcctcttagccatctgtctttgactttattgtaaatttaattcacaaagca

SEQ ID NO: 82225 - DNA, 122 bp, Homo sapiens
atcctagggggtggccctccccaggacctctaccccttacctagaggaggaaatgtctcccgaggagtccctgaactactcagagctcatcaaagaaaggagtctacttccctggagagttg

SEQ ID NO: 82226 - DNA, 122 bp, Homo sapiens
cacccttttcccttcctttctcccctcctctctcctctcctcttccccagaggaggatatcggcaaaattaagtttgttcctatatacagtattttttgttgtcattgttgagatagtcttg

SEQ ID NO: 82227 - DNA, 122 bp, Homo sapiens
gctcacaggcaggcacacgtgagctcctggaggacagggagagcggccgccccgcccctgcggagcacaggacgcttcctgccacccctgcagagcatgggacgcttcctgccatggtgccg

SEQ ID NO: 82228 - DNA, 122 bp, Homo sapiens
tccagagagcaacaggcatcaggaaacgtctgtcacaacaggcagggctggagcttgacacggttgagaatccctgatgctcaacccgtattttctggctaccagttgaaagaaagggtgag

SEQ ID NO: 82229 - DNA, 122 bp, Homo sapiens
ttgcggtgctcctgcagccaggccttgagcgtgctggtggtctcgcgcgtggcgttcttgcgccgcgtgccgctgtccatggttccatacctggagacaggctctgcaatgggctcaggctg

SEQ ID NO: 82230 - DNA, 122 bp, Homo sapiens
tggtgggagtgcccaggtggcagcctccgccgcatggcacagccagggttcactctcgctcgctacagggtgccagctatcgtagctcacaaaagccaattaagagcaaatatgtatatctt

SEQ ID NO: 82231 - DNA, 122 bp, Homo sapiens
gggaacggatagattgttttaaaggatcctgcgtttttctgaacgtcattctccgctctacgtactcagcattaccactagatggagccctggcgatcgcttgcatcatttttagacccata

SEQ ID NO: 82232 - DNA, 122 bp, Homo sapiens
agacagacataggaaggtgaaggtagatcataaaccagcccacaaataaaaaccaaagggcgttttaggtatccatgagtttaataaaaaattaaacacgttgatgtgattgagagctggag

SEQ ID NO: 82233 - DNA, 122 bp, Homo sapiens
acctcacgtgatccgcctgtcttggcctcccaaaatgctgggattacaggcatgagccaccgtgcccggccttaaacgggtgatctttgagagaacaattcagtagagttgctagtggtatc

SEQ ID NO: 82234 - DNA, 122 bp, Homo sapiens
cgaaagcgctcctctagaggtgacagcaccagatcctggcgaaggaccaggccccggggtcggaggatagggggacaggtggccggggctccgcggcggctgggactccgcggctgctgggg

SEQ ID NO: 82235 - DNA, 122 bp, Homo sapiens
ctgtggaaggtgctgggcatcagtagcaagtaagagcaggcctgcgggtgcggtggctcacgcctgtaatcccagcactttgggagcctgaggtgggtggatcacgaggtcagaagatcgag

SEQ ID NO: 82236 - DNA, 122 bp, Homo sapiens
atccaaccccacaggccccggggccgagggcgagggcactgtcagttcttccagcagggtcgtgctgggctttctgtcaaaaggggctctcagcaaagagcgagctggctgcgctctcccag

SEQ ID NO: 82237 - DNA, 122 bp, Homo sapiens
cccctcagttctcatctgagttcctgtccttttttatataaccccaaaggctcagtaagtcgctgcctcccaggtcattgggcccattgtgttgaaatccaacttcgaacgacgccccttcc

SEQ ID NO: 82238 - DNA, 122 bp, Homo sapiens
agtggaggagggaccagcccagtggcacaggaataccatcagaacagaactggtcaaacccgttgggaaggcctgggctgatgtgtcacccctgaaggtggcgtcccttattttagtcctcc

SEQ ID NO: 82239 - DNA, 122 bp, Homo sapiens
cggaagacggcctgagaggggggcccagactctcccggaagacggcctgagtcaggtccacgctcccccggaagacggcctgagaggggggcccagggtcccccggaagacggcctgagcca

SEQ ID NO: 82240 - DNA, 122 bp, Homo sapiens
cgagaggcgtgccgcagtttatcgtggggtgggtctaaacaaggacctaaaaactgtattcgaatcccagccctactaccgccagctgtgtgaccttacgaggcgcctcactttactgtttc

SEQ ID NO: 82241 - DNA, 122 bp, Homo sapiens
tctggtctgtggggatggtcagatctgcccaccactctggcaccgaggcttccctggagacgcataaacctgggttgggaaagtgcccagatctgcctgggggacacacgagcctcgctgcc

SEQ ID NO: 82242 - DNA, 122 bp, Homo sapiens
tcttgcaaagtattttgggcagcttatttataacacaaccagattaaattaaaaaacaggcgaggggatcagtacaaaggaaaaataaaacagataatacaacaaaaattcatgatgtgagg

SEQ ID NO: 82243 - DNA, 122 bp, Homo sapiens
aaggcctggcgagaaatggagcgcagcgccggtgggccagcactgctgggggacctagcacgccctcctcagccgctggcccgagtgctaagcccctcattgcccagggccagcagggcttg

SEQ ID NO: 82244 - DNA, 122 bp, Homo sapiens
tacaggccccatgcaagttcgaaatccaatagggcagtcattaaaccttagagttttggtcgacttcatccccagcagagagagtatcagaaaacgacagagcggtaaagaattttgaaaat

SEQ ID NO: 82245 - DNA, 122 bp, Homo sapiens
ggttgcgagctgcagaaagcccacgctcgccagcgggacccaaggaacgctagaactatacgtcccagaacacttagctttgtttttaactacggtgcagccgcaaaagggaaataccggct

SEQ ID NO: 82246 - DNA, 122 bp, Homo sapiens
gcggaggccatggccagggtcagaagttacacggagaggagcgcatgagcctgcttatgccgccaggaagccgaaggacttggccacaacaggagcagctaacatttgtcccatgttggtga

SEQ ID NO: 82247 - DNA, 122 bp, Homo sapiens
ggcccttcctggaccaatgatgacaaataccggcgtatgagtcttggatgatgaataatacgtgtctggaactctgaggtccatcagaaaagaaaaccagttctttctgctcatgtattttc

SEQ ID NO: 82248 - DNA, 122 bp, Homo sapiens
tgtgaggcggtcctgcctcgctgccttcagtccctagtgtctgggtccccgccctccagccgcctttgagtcgtgcctgggtcctcgcccttgcctcagaaccgcgaagaaaggaagctcgc

SEQ ID NO: 82249 - DNA, 122 bp, Homo sapiens
ttccaacatccattctcttaaccacaatggcaatgacttctcccagtatgctgggggcttcgtgtgactctgtgtccctccatgcagacagcaccaggcagctgaagaaatcagggtccctg

SEQ ID NO: 82250 - DNA, 122 bp, Homo sapiens
tgggcacctaacaacactccatgggcatttattgagcacctgtggtatgccaggtgcatgcgtcagagggagccatgaatagcacagactagatccctgccttccaggggctcctggccctg

SEQ ID NO: 82251 - DNA, 122 bp, Homo sapiens
agtcttgcgccagggctcacgtgcctgggcagggctgattgccaaggggcccaatggcctcgtgactggggacccagcacctggcaggggtgggggtgggacactcagaggaaggagtggag

SEQ ID NO: 82252 - DNA, 122 bp, Homo sapiens
tgcctgggtggcttcagagagacgggcgtgtgactagctgtgcgtgtccaggttttcacccgaggcagtggttggcaaactacagcccgtgggctaactcaggtccactcattatttatcgc

SEQ ID NO: 82253 - DNA, 122 bp, Homo sapiens
taaacagctctgcacagcctttcctcattccgttcccgctctccccacccactctgcgttcgatccgaggtttctagtccccagctggacatcacagcaccaactcccactcaggagccggc

SEQ ID NO: 82254 - DNA, 122 bp, Homo sapiens
tttgtaaaagagggagggtgagttcagtcctcttgctgagaatcctcagaaatttaccagcgcgccgacagggggcgcgagagttgttgcgcggggggcttaaacattttcgagtactttag

SEQ ID NO: 82255 - DNA, 122 bp, Homo sapiens
gacagggtgggtgagggaccttgaaaggcacttcctcgggttctgggaaaagttctaggacgactggggtgtggggttaaagtgctttctgcagggagggtcagtggggttgagggagtggc

SEQ ID NO: 82256 - DNA, 122 bp, Homo sapiens
cgtagagcaccgggttggccacgctgttgaagaaggccaggctggtgacgaagggcagcccgcgccacacgagcggccgcagccccgggtttgcgtgcgcccgcgcctccagcaggctgaac

SEQ ID NO: 82257 - DNA, 122 bp, Homo sapiens
gtgactgcttgcaactgcagtagcaggaacatgtcaggtgcttactgggtgagacccagccggggaagcctctccaactcctcctagccctggaaaccagacacccagagccccaggctttc

SEQ ID NO: 82258 - DNA, 122 bp, Homo sapiens
gtcatagctcgcacagtagccatgcagacctaagaggacaatggaaatacaaattgctatcgatgtgtctttattttctagaacttttttttaaaataaaagaattaagtgaaagcaattcc

SEQ ID NO: 82259 - DNA, 122 bp, Homo sapiens
ctgggggtcccctcctggagttccctgctgctgacaggaaccagtgcgccttttatcacccgcggtgcacatctgggaacactctggccagtgcgctggagagctgactcccggccaagctc

SEQ ID NO: 82260 - DNA, 122 bp, Homo sapiens
aggtaaattctaaggtttgctgtcgactgtttccagctccctggcgcactttccgtgcagcgaggggacgtccaaaggctgcagcagagctgggttagaaaacaggctcccacccgccctct

SEQ ID NO: 82261 - DNA, 122 bp, Homo sapiens
tacctgaagtcgcaccacggagagcacgagagacccgagttcatcgcctacccccatctccgcatcaggaccaagccgtttccctggggagatggtaaccatactctattccataaccctca

SEQ ID NO: 82262 - DNA, 122 bp, Homo sapiens
tggattccaaattcctatgcccccgatctgcaagcctcgtgggctctggagcactcgtggcggagtgtgtcagtgtgtctgcacgcacagtgaagggtgtgaactggattctagcacctact

SEQ ID NO: 82263 - DNA, 122 bp, Homo sapiens
cgaggccaggaccgaggaaggcgaccgggcggacccccaaccactcccgctgtctgcacgcgcagcagcagcgcccagctcaccccgccattggtgttccccgcgcctgcagcgcgccgccg

SEQ ID NO: 82264 - DNA, 122 bp, Homo sapiens
acacagtgtgtcaacagagccggactgtagcattaacatttaagatgtccccatcaattccggaagagagccagtggtggggaacttctgctgggagcctcaggggatctctgaaatgagaa

SEQ ID NO: 82265 - DNA, 122 bp, Homo sapiens
ccctgcatgcccgcagtcagggctgcccggctggggcgttcccaagtccgccggctcatgcgtcccctccggggtcccaaggacccagacgcagagcccagcgccttcctacctgctgtagg

SEQ ID NO: 82266 - DNA, 122 bp, Homo sapiens
gagagggaggctctggctggaagtcgggcacacacaggtggagatgcagggggcagccagcgggccgcgcgtgaacaccgaggggaggaagcttccacggagcagcttcagcttcagggaca

SEQ ID NO: 82267 - DNA, 122 bp, Homo sapiens
taagagcccactgacacaggctggactggtcaccagatcctgcgctgaacgtgagctccccgacatccaggcaggaaactgcccccaaagagcctactgtcactccctagctggggtaaggg

SEQ ID NO: 82268 - DNA, 122 bp, Homo sapiens
gtagtttaagtcatttctttttatttgattaatttgctttattaagtatcttctggattccgctctcctatgcttgcaaaatagtaaaagagaacaaattagaaagagaagaaaatattttc

SEQ ID NO: 82269 - DNA, 122 bp, Homo sapiens
cgtcacggagccaggagtctgggatgaccttcgtcctctgagcctaatgcttcaaagatccgatgggaggtttgatgttggtggggacattctcagatgatgagggcaagggcgcatcctcc

SEQ ID NO: 82270 - DNA, 122 bp, Homo sapiens
ggagttagaacaccttgcctctacttcattgttaaaaaagaaagcttctagctcatcaggcgtatctaatgcttcctacctggcaatgaggggcctgctggcctccaccccaaccagggcaa

SEQ ID NO: 82271 - DNA, 122 bp, Homo sapiens
gccatgcctgagcctccccctcctccatgggctcctgtgccgccgagcctccacgacgagcgccgccccctgctccatgccgtccagtcccatcaaccacccaagagctgaggagtgtgggc

SEQ ID NO: 82272 - DNA, 122 bp, Homo sapiens
gtgatgtttgcagttttgcaggctgcatgtgggcctcaggcatttgtcagggtgggtggtcgggctgtttctctgcatgagtcagaagaaggaagagacccagctgagtatacgaaataaat

SEQ ID NO: 82273 - DNA, 122 bp, Homo sapiens
gggcaatgattgttaaggctcgggtgtgtgtgtgtgtgtatgtgtgcgcgcgcgcgcacacgtgcacctgccgtgtttgaaaaaaatggactgtcatgcattgtgagactttatagcatact

SEQ ID NO: 82274 - DNA, 122 bp, Homo sapiens
aggaggtgaacgatttctacaaggaaaactacaaaacactgatgacaaagtttaagaggacggaaagaaatggacagtcatttcatgctcatggaaggaattcatagcattaaaatgaccac

SEQ ID NO: 82275 - DNA, 122 bp, Homo sapiens
tgaacgcctgggctcaagcagtcctcccacctcggcctcccaaagtgttgggattacaggcgtgagccaccacaccaagccacacattgagttttaagtgaggctttgaaactgccaagaag

SEQ ID NO: 82276 - DNA, 122 bp, Homo sapiens
cagaacctgttgtacgtcgtcttggggtccaaccccaggatttctctttcctcatgaatccgaaaagaaaatgttgagactgaggtgccaataaaaaacctgcaaaggatcacagaggttcc

SEQ ID NO: 82277 - DNA, 122 bp, Homo sapiens
atggcagatgagggtcgcctggatggggggacacagtaagcggctgtgctcccctccctgcgcagctcctgtcacctaccggatccacccactctctctgtcttttactttgcaacttttca

SEQ ID NO: 82278 - DNA, 122 bp, Homo sapiens
gctcttccatcctcgccccttccagggtgcaggatgtgcgggccggcgggcctgtgatcccggaacgcttcctgccatccccttgcgcgaacttgaaaggactgggaggtgttgagagcaga

SEQ ID NO: 82279 - DNA, 122 bp, Homo sapiens
tgctctttggagccaagcaaacctggggggaatgttgtccctaccacatgctagctctgacgttaagcaagttacttaaccttctctcagcctgagtttcttcttctaaaagcaaggttaat

SEQ ID NO: 82280 - DNA, 122 bp, Homo sapiens
gccgggcggctgtggcggctgtggcggctgtggctgtggcggcggcggggaagcagctgacgggccggcggcggcggcggcgctggcggcggtgactggtccaggccccggcggcggctgca

SEQ ID NO: 82281 - DNA, 122 bp, Homo sapiens
gtcaggagttcgagaccagcctggctaaatgttgacaccccgtctctactaaaaattagccgggcgtggtggcgcatacctgtaatcccagctacttgggaggctaaggcaggagaattgct

SEQ ID NO: 82282 - DNA, 122 bp, Homo sapiens
cgcctgcttccattggtcagtcctggcaggaggcggagcacccgcggcagctgattggtgcgggaggcaaggtgggcggggctctgagccggaggttttgttgtgagggtcggttgtcaagc

SEQ ID NO: 82283 - DNA, 122 bp, Homo sapiens
ttccccagagcccattgttagacatttagcagcccaccactgactttattcctttgttcacgctgatcacttttcttccatgaccttccttgccattttcactgggtttaattttcaaaggt

SEQ ID NO: 82284 - DNA, 122 bp, Homo sapiens
gtggactatttaaagacagaagtgcaggacttgtatcaacataactgcttccagtagatgcggcagggttcaaggagtcctgcctagtggaaacaagttcttggtctgattttaacctgcca

SEQ ID NO: 82285 - DNA, 122 bp, Homo sapiens
ggcagtttatctctctaagagcatcccactcccggtgatacgcccagctctgacacatcacgcacgattgttattcatcatctggtcactgggtttaaggcacagctcagccacttattaac

SEQ ID NO: 82286 - DNA, 122 bp, Homo sapiens
ctcactcctcagtctcgcgagtctgtggtggtgtctttacgtctttgttattttagccatcgtgctggatgagtaatgatattacatggtggttttaatttgcatttagccaaagtctaatg

SEQ ID NO: 82287 - DNA, 122 bp, Homo sapiens
ctggggacctaggcctcctctgctgtgctcagcccaggatttcctcagcagcttggaggacggggaggagggtgaggctgccccccaaccaaagccatgactcagcgcctgaagccccaccc

SEQ ID NO: 82288 - DNA, 122 bp, Homo sapiens
cttgttgcaggcaaatgtcaactgccagagaaatgaagatagattgaatggcctaggaggcgagccagcactgtgccagccaagggccaagccagccaccacacaattcgatcctggcccgg

SEQ ID NO: 82289 - DNA, 122 bp, Homo sapiens
gccctccaggggacgcagggaaatccaacctttgggtcgggggcaattaggactgggagtcgataccgcgggcaacgaatgatgaatgaataaatgaaaggatgaacagagtggcgaggcgg

SEQ ID NO: 82290 - DNA, 122 bp, Homo sapiens
cgctggccacacgtcttcttctcctgcagagccgccatcgtccctggcctgagatcctcccgtctgctccctgcaccctctacgcccagactgaggccagatgcccacctctgggctttata

SEQ ID NO: 82291 - DNA, 122 bp, Homo sapiens
tgccgctgctggccttcctgctggccctcgccttcaagctggacgaggtggccgccgtggcggtgctcctgtgtggctgctgtcccggcggcaatctctccaatcttatgtccctgctggtt

SEQ ID NO: 82292 - DNA, 122 bp, Homo sapiens
tggaggcggccgcgggcgcggggggctgttttcgggcggggtgggcgcccatgctgtggccgggggcagtgaggaggaggaggagcgggccggccgcgctgcactgaggaaggaggtggagg

SEQ ID NO: 82293 - DNA, 122 bp, Homo sapiens
gcacagcccggctgtttccagccagtgcggcctctccacagcagccccagggaaaccctacgcctgccaagaggcaagcgcgcggcattttataaaaatggtaaggataaaaaaagtcgggg

SEQ ID NO: 82294 - DNA, 122 bp, Homo sapiens
cttgtccctcctctctgatgcactaatttcttaccgaaatgtattccctgagcagctccacggaggtgaatttggcttgcgtctctgttcccgttcgcacacacacttggagcagtccgctc

SEQ ID NO: 82295 - DNA, 122 bp, Homo sapiens
ttcagtgacaaaaaaaaagtctttaaaaatagaagtaaaagtctaaagtcatcaaaacaacgttatatcctgtgtgaaatgctgcagtcaggatgccttgtggtttgagtgccttgatcatg

SEQ ID NO: 82296 - DNA, 122 bp, Homo sapiens
tcccgggagccccagggtgcccaggcgggcctcagctgagtccaggcctcggggacagtccgtgcagcccctcctggggctgggggcgggcacttgtcccagccacgtttctgctgactgag

SEQ ID NO: 82297 - DNA, 122 bp, Homo sapiens
cgcaggatgccccacgcatccggagatggggtttggaacatcctttgccccagcgaggtgcgaggtgctccggaacttgcggggcttagctgcccacacacgtgggacagactgttgggtgg

SEQ ID NO: 82298 - DNA, 122 bp, Homo sapiens
acctcactcctaacctctcccttatacacacacacacacacacacacacacacacacacacgctgggaaaagcagcagtaacagggagcagtttgaatgctatttgtggcatcttaacacaa

SEQ ID NO: 82299 - DNA, 122 bp, Homo sapiens
acaccggtattaagaaaccgacttcgctagcgactgcaagtgcttgcgattttgactttccgtccacagttgagcgtcttgcacttaaattcactgcgccccgcatgcaacagtgcctcgcc

SEQ ID NO: 82300 - DNA, 122 bp, Homo sapiens
gctgaggcctggggctgggcggacagcagtgccctggtgggcctggggactggtgcgccccgggcttctgaggactagggctgcagtcggctgtaagaattattttttaattccaaaagcct

SEQ ID NO: 82301 - DNA, 122 bp, Homo sapiens
atatgaatttgtattcttatgtacctttacaactccttttttaaccagcagttcccagggcgctcaatttgaagcatctaaaagggtcaaacagggttgcagataaatgccagggttgatta

SEQ ID NO: 82302 - DNA, 122 bp, Homo sapiens
tcagaatgatgctggcctcatataatcaattaaaaagtgttcccttcttttctattctttcgaacagtttgaaaggattggtgttaccttcatttagtgatctgagagaaaaaaaaggactg

SEQ ID NO: 82303 - DNA, 122 bp, Homo sapiens
catgccgcaggtccccgtgagtctgggccgtgtgcctggcgagccctgaattccacctcacgtcagccgctggttcacgtcagccgctggttcacgtcagctgctggttcacgtcagctgct

SEQ ID NO: 82304 - DNA, 122 bp, Homo sapiens
ctgctgttggggctcctttgggtctaccccaggtgaagccagccaacaccaaagggggcacgggagaaggacaggaggggtggtttccctcagcaagctctcagtcccactgacactggccc

SEQ ID NO: 82305 - DNA, 122 bp, Homo sapiens
cttgaattcctgtcctcaagaaatcctcccgcctctgccgcccagtgtcatgattaaaggcgtgagccaccacacccaactttcaactcccaacccgctccctggcactctctcaggctctg

SEQ ID NO: 82306 - DNA, 122 bp, Homo sapiens
ctccgcctcccagggagccgggagcatcttggggaagggcctgtctccatctgtgtgtcccggtggaaaaacggtcacggtggggagtcactgtcattattcattgaactcaagcgctccta

SEQ ID NO: 82307 - DNA, 122 bp, Homo sapiens
ttccccctgtctgaaggagaaagtgttccacggtgcctgccacagttacacagctgccaccgactttctcagcagattccactgcagtgcaaggaggtgacaggagtggtcaaccctcatct

SEQ ID NO: 82308 - DNA, 122 bp, Homo sapiens
gggattggaaggggagattttagagacgctgggaggcgtctggggggcctccgggcacggcggctggaggaggctctcagtcctacctgcaggtcggccccgtagaaggcagccatggacgc

SEQ ID NO: 82309 - DNA, 122 bp, Homo sapiens
tttccaaggtggttttcccttgatgccagaagatgtgaataaaaacattatgatgatgttcgggtctatcttgctatttgatatatggtggaatttttcacttaatactaattttttaagcc

SEQ ID NO: 82310 - DNA, 122 bp, Homo sapiens
ggatgcctggaagggcttttgaccacccacccttcttcatttttgacacccgagtggggccgaggttgccggatgaggagacctatggcgagcagtagaatgggctgacctggagaagggca

SEQ ID NO: 82311 - DNA, 122 bp, Homo sapiens
tcgattacagacattggatagaaaagcactgtgaaaatccctatcctgttttgttcagatcgaattaccggtgcatgcagcccccagacacgtaccctctgcttgctcaatcgatcacgacc

SEQ ID NO: 82312 - DNA, 122 bp, Homo sapiens
ggctgacattggcttcgtcatcgacggctccagcagtgtggggacgggcaacttccgcaccgtcctccagtttgtgaccaacctcaccaaagagtttgagatttccgacacggacacgcgca

SEQ ID NO: 82313 - DNA, 122 bp, Homo sapiens
tcccagcgcccgagaggaggccaggggaactacaatgcccacaaggctccgcgccttcctcgatgtacttccggctggcctgggactcaggctgaacattggttctctgtgcggggcggtgg

SEQ ID NO: 82314 - DNA, 122 bp, Homo sapiens
ctcctcagcccttgggtggtggatgggactgggtgccgtgcagcagggggcggcgctcatcgggaaggctcgggccgcacaggagcccacggagcgggtgggaggctcaggcatggcgggct

SEQ ID NO: 82315 - DNA, 122 bp, Homo sapiens
tgtgagctactgcctgcctccggtgctctgtttctgtccctagagttcttttcctttccacggagttttggtatgcatttcaatgaatgtttgtattatgttgtccaacatacttgtgtcct

SEQ ID NO: 82316 - DNA, 122 bp, Homo sapiens
ggacgtctccatggagctgggctgtttcctggctggagcgctcgtctcctctcagggccccgtggtcaccgaggagatcgccacctccatcgaacccatccgcgacttcctggccatcgttt

SEQ ID NO: 82317 - DNA, 122 bp, Homo sapiens
tgtaagcagttctttcccagagcgctctgattttcctcatttgcagggacaaacactgtgcgtggatcgatgatgacttccatatatacattccttggaaagctgaacaaaatgagtgaaaa

SEQ ID NO: 82318 - DNA, 122 bp, Homo sapiens
taacatgtcaactaaatccttctaagagtaacatttgaaaaataacgttatggctgggcgcggcggctcacgcctgtaatcccagcactctgggaggccgagaagggcggatcacgaggtca

SEQ ID NO: 82319 - DNA, 122 bp, Homo sapiens
ggaagcactgtaccaggactgtgtctagggctatttttatctggctgggacaaatttgtccgaagtatttatgggcctcttctgccctctgctgggcctaagagccaagcacattaatgcat

SEQ ID NO: 82320 - DNA, 122 bp, Homo sapiens
tccccaggtctctcggtttcctcatctgctgcctctccagacttctgccagaacattgcacgcgacagtttcaggcacagaactgactggcagcaggggctgctccacgagtgggaatttgc

SEQ ID NO: 82321 - DNA, 122 bp, Homo sapiens
ttccctttctctctatactaaaaatagcaaatttactatggtgtaggttccaaacagtcacgagttatttcctcctgctgctgtcagcttgcttcttgtctcagtaatatgttctgttagca

SEQ ID NO: 82322 - DNA, 122 bp, Homo sapiens
ggtgtccctgcccatcagcaaacagcataccctgacaccagctgcaccccaggccccagccggcccttgttcctgacccagacaagaaactagttcatggggctacaactccccttctaggg

SEQ ID NO: 82323 - DNA, 122 bp, Homo sapiens
ttaagagatacacactgtgtgtgtgtccctaggtgaataaaaatccgactcccgctggctcggtgcgacccagcttttcccttaccccctccgtttccccatcttaaagccctattgggaaa

SEQ ID NO: 82324 - DNA, 122 bp, Homo sapiens
gagaaaagtcacgtgggggagatccaacaccaagctggcctgactggagaggtttcctatcgctaaaacctggccggggcgggggaggggggtgggggcaaaaaggtaggccatctcgcact

SEQ ID NO: 82325 - DNA, 122 bp, Homo sapiens
cttgctacttcatccttcgctccatcttggtcctcccaactggagagaggacagcctagacgagacttcccacaaccaagatggcggccgtgcactccttgcccacagctggccttttctcc

SEQ ID NO: 82326 - DNA, 122 bp, Homo sapiens
tccaggtgctgctcacctaccgcgtcggggagggacccggggtgagtgcgccccagactgcgcccgccgctgcctgcctgcccttccggcccccagccgccctgcaccctcacctaccccac

SEQ ID NO: 82327 - DNA, 122 bp, Homo sapiens
gagctgggcccaccgcatctctttccactggtccgcagccagaggacccaggtgaagacccggacgctgcaccctgtatacgacgaactcttctacttgtgagtgtcctaagccccagcccc

SEQ ID NO: 82328 - DNA, 122 bp, Homo sapiens
tcgggctggctgcgggtcactggtccctgcatccttgccagcctccctcatggaggctgacgcagacgtctttgaatcatcctctttctggggagagaagtcattgcttgctctgtactgac

SEQ ID NO: 82329 - DNA, 122 bp, Homo sapiens
cggacgtgtgggcaaaccaccctgaagcatcgtggcgaggcgggcaggggtgcagggtcccggcagggcagcccaggtgccctctgccttactgtcggctgcttatttactgtctgaagatt

SEQ ID NO: 82330 - DNA, 122 bp, Homo sapiens
tcaggagccgtggctctcaatgcctggttcacagagaggactcagcttgaggaggtcactcgttcacagccgctcctcccattatatttttccccttattgcagaactgctgtatgtataca

SEQ ID NO: 82331 - DNA, 122 bp, Homo sapiens
gctaggcccaccctcttaggaatgttgtgaggcttaaataagaaatagccactctacaagcggtgtcaattagcatgggctctggtttctgtgtgaggtagtttgctaacatgagagggtat

SEQ ID NO: 82332 - DNA, 122 bp, Homo sapiens
cgtcggagtgccccgctgaccaggctgcttctggccgcggcggcgttccgctgcagaggacgggagtgcgaatctgggaagcagggttctggttgaactccagcttcgtctgcaacatactg

SEQ ID NO: 82333 - DNA, 122 bp, Homo sapiens
aacactacctagatttccaaagcctaatttcctaaccatggttgcaatcccaacctggaacgttttatctgtgtggtactgtcatatcaagaaataagaaatgccaggtgatcgagatgaac

SEQ ID NO: 82334 - DNA, 122 bp, Homo sapiens
taaagcgcagtcagcgagcccacgtgcttgtgttgactggacaacttcctggtggaaaaccgcgactcttgcaagtgggcaaacttgacgttttcgctatgggcaaacgcgggagccggagc

SEQ ID NO: 82335 - DNA, 122 bp, Homo sapiens
ggggtggggaggaaaggaaggaaggaaagggaaataaaggaaagaaagaaatgcactagacgaggtgtcagaagacctgatttagagtatcagttctgcactggctccttgcagaaccatgc

SEQ ID NO: 82336 - DNA, 122 bp, Homo sapiens
ggtgtgggatataatctcgtggagcgccattttttaagccagtcggaaaagcgcagtattcgggtgggagtgacccgattttccaggtgccatccgtcacccctttctttgactcagaaagg

SEQ ID NO: 82337 - DNA, 122 bp, Homo sapiens
gaccttcaggccccagcaccttccccctgacgcacagcctgtgccccatcacttaccctacgtcctctccagggcccaggccgagagcacctcgggctctgcagatcttgctgcaggctctc

SEQ ID NO: 82338 - DNA, 122 bp, Homo sapiens
actgctgcttcctccaggaagccttcccagatggctcaggttggtcccaagtctcttggccgtggccactctgtgagggtccctttgtccctgacccagccactggggccccggagggaggg

SEQ ID NO: 82339 - DNA, 122 bp, Homo sapiens
tctctgcgtggcctcccactgttgtgatctctgcgtggccccctactgtcgtgatctccacgtggccacacactgtcatgatctctgtgtggccccccactgtcgtgatctctgcgtggccc

SEQ ID NO: 82340 - DNA, 122 bp, Homo sapiens
ccagagcctaattaagacctttagaggctctggacagtgaaaaatgcctgtgcctgtccacgtgtgatccaacataaaaacaacacttggttacaaactaagcatgagaaaaatctaaacca

SEQ ID NO: 82341 - DNA, 122 bp, Homo sapiens
gaagcaaaaagaggcaggggaccccttaggtgtactgctgatttggagaaatccttcatccgacggaaggtctttctaggttcctcccctgacactcctatctaaataaaaactacttctga

SEQ ID NO: 82342 - DNA, 122 bp, Homo sapiens
aagatcactcacagcttgtaaggagacagtttggcaccctgctctggctctcagcacaggcgctgtcttcatgaacaggattccatttcatcccatgatccctgctcaacccctaagggagc

SEQ ID NO: 82343 - DNA, 122 bp, Homo sapiens
cttttggagatgtctttgtctgcatcctgtgtacagttctgggtttcaggtggtctctgacgctggctgacaggtaccagaggaaagaaaatgggaaactcaccaacagcttagtagtgttt

SEQ ID NO: 82344 - DNA, 122 bp, Homo sapiens
ctgtacccgccctggccaatggccacgccaagtcccgccctgcccccatcacgcagccaccgccctcactctcgaccccactcattggtcgagtcgggcaaacgccctcccagcctttagcc

SEQ ID NO: 82345 - DNA, 122 bp, Homo sapiens
ccgggagctggggctagcgcagggcacacacatgttccacctcgaactgcgagcgctgaccgggatctctgggcagccctctctgtgtgcactggcttgctgaaggctcgcgacagcctggg

SEQ ID NO: 82346 - DNA, 122 bp, Homo sapiens
tccgcggccgcctggtggtccagcccgggccgctgcagtgcagccacacggggagggacacggcgcgccgagtgctccgggcggccgcacgttggttccgcccgggccgttccactgcaggc

SEQ ID NO: 82347 - DNA, 122 bp, Homo sapiens
acagtgggaggtgctgaaagcagggagcgggtgcgggggcggcgaggcggaccgctgctccgagcgcccccctcctcgctccgcggctcctccagccctcccctcctcccgcagccatgttc

SEQ ID NO: 82348 - DNA, 122 bp, Homo sapiens
gtttttttcctaaatatctatgaagccctgtaggaactacctgccctaatttcgttcattcgacgtgctaacaatttctatagttccagctctgacatcactcttgcttagagtctaacggg

SEQ ID NO: 82349 - DNA, 122 bp, Homo sapiens
catcaagtgccaagctggcctaacttcagtctccacccactcagtgtggggaaactccatcgcataaaacccctccccccaacctaaagacgacgtactccaaaagctcgagaactaatcga

SEQ ID NO: 82350 - DNA, 122 bp, Homo sapiens
gatgaagtctaggaatgctttctatatcggccccggcaggcccagacgtcttggtggaggcgttggtgagaaatgaccttggggacagaagcacatatgtgaagctctctacacttgaagcc

SEQ ID NO: 82351 - DNA, 122 bp, Homo sapiens
cccgccgccccgccccgttccgccccgccgcccgcccctggcgcccctctttcccgcacccgcccggagacgggaggaaaccgaggcccctgaaaacgcagctcccctacacccgaaaagac

SEQ ID NO: 82352 - DNA, 122 bp, Homo sapiens
ccctcgccctgctcacctgccagcagctcctgcaggctctggctgaaggtctgcagctgtcgctcgctcgtgagccccttggtgcggagaaacttggagatgaaggacacggcggcggcgat

SEQ ID NO: 82353 - DNA, 122 bp, Homo sapiens
gtgggggggggggaatacacatcgtgtatgaaaaccgactgcagattctagataatcttacgtattctcacatccttggcactacaggaagctagcttcttcccgcaaggtttactccagct

SEQ ID NO: 82354 - DNA, 122 bp, Homo sapiens
gaaacagcctgtgttcctgacagtgcccttcaggccctggcctgggatttcctcaaagaccgtgtcccttacttggggatggacccctgttccctctcacagcctctaaggccagggatctt

SEQ ID NO: 82355 - DNA, 122 bp, Homo sapiens
aggatacatatatttagggcttatgttcaacatgttaaaaaatagtcttataaaatgtaacgtttgaagagcagagtgtaaatatcacagtcttgaaaataattagtggaaacaaaatttct

SEQ ID NO: 82356 - DNA, 122 bp, Homo sapiens
ggtatgataactctggcaggagaaagtctgttttcctacgtggtagaaagtccttgggcccgccacgacccttcccccatcccggccgctggggcaccggggcacattcccagtgcgggcgc

SEQ ID NO: 82357 - DNA, 122 bp, Homo sapiens
tcaattgctttgctcatgaagctgacatagcagatcccccgtcaccaagttgcgtgcacacgcatgcatacacacacacacgcatgcgtgcaagcacacacacacacacacacacacacaca

SEQ ID NO: 82358 - DNA, 122 bp, Homo sapiens
tgctctttccctcggggcttcggagccggagcatttgtagacagttcctgcctcttcactcggctgccggcctgggggtcccgtcgcctcccggagccgcccgccgcgtcccccagcccgcg

SEQ ID NO: 82359 - DNA, 122 bp, Homo sapiens
tgcactaggccgctgaactgcggcacgtagccacccttgcacaggtccagctgctggttacgctcgcgcttacgccacttggctcgccggttcttgaaccagacctgggggaggggacggga

SEQ ID NO: 82360 - DNA, 122 bp, Homo sapiens
ctagcaaggagggctgtggaggaggcaagcaagctccaaagtgcagcactgaggctggggcggagacactgagagtccgaaggcacctccatccctaggaagcaaagccagacacccaattc

SEQ ID NO: 82361 - DNA, 122 bp, Homo sapiens
atacgtcgctttttaagtttctcatttgaaactatgcgttacacgttctgctgagagccgcgaaggcaggcagaggttaaggtcctggaataaaaagggtggcgggagagaggggcagagcg

SEQ ID NO: 82362 - DNA, 122 bp, Homo sapiens
gaggcagagcaggatgtgaaacgagcgcagtggtttgccaaacccgcagcaggcttaggacggagtggtgagaacagcccccttccttttcctcagcttgacggtcccagcctttcccattg

SEQ ID NO: 82363 - DNA, 122 bp, Homo sapiens
gcgacgtctctctgccttggggctcacagcagcgggccgcgacctcccactaacgcctgccgcaacccaaggaggagacaaaagtcatcttccgggctgcaacattaaccgtcatcagcgcg

SEQ ID NO: 82364 - DNA, 122 bp, Homo sapiens
aagggtaccagggaagagcgtcgcggtgcactctggggtttgtagtgaccaacccaagtccgacagtcgcctcctcgatacttaccggacccagccactaccaagatactgagagactcccg

SEQ ID NO: 82365 - DNA, 122 bp, Homo sapiens
aggaaatgctttggagattgcgccacaaccagggcagcgtaaactacagttcccagagagcgccgcgtcgggagcggagccttttctcgctaacaccgctcgccctctccgagtcagttccg

SEQ ID NO: 82366 - DNA, 122 bp, Homo sapiens
agggggccgaggaccacagcctcatggagatcacgtgcgtgggctccatggaacacatcacgactgtccctgcaggaggtgatgccacaccacacctagactgggctcccgcaagtgcctcc

SEQ ID NO: 82367 - DNA, 122 bp, Homo sapiens
ccctcggcgctgctcttcagtctcctgtgtgccttcttctggatgggcttgtacctcctgcgcgccggggtgcgcctgcctctggctgtcgcgctgctggccgcctgctgcgggggggaagc

SEQ ID NO: 82368 - DNA, 122 bp, Homo sapiens
tcccagctgcgggggtagctgagccggcaaggtctgcagcggcatcgtctgcatcatcagcggcgagaagatgggcagctccatcggcatggagagctgggtgagcggcactgatggctggg

SEQ ID NO: 82369 - DNA, 122 bp, Homo sapiens
gccctcagcaagctaatttcccagaggagcttcaggtgaattatcttccaaaaagagatgcgttttaatcgcagaagtctgcagatgcgaaggaccttgaaaaggctatctaatgtggccct

SEQ ID NO: 82370 - DNA, 122 bp, Homo sapiens
ttattctaccccggctggtgtccaccaagaagcaaatgcctccacacagcaggtgggtgccggctaagacgccagcccacttcagcagctcccatccaggcaacgcaactcaggtccaactt

SEQ ID NO: 82371 - DNA, 122 bp, Homo sapiens
agtcagggtctgggttggtgtcaggtgtgtcctgcttcccgctgtgcacttggtcaggttcgctcagctccctgagcttgttcctgtctgtgaaggtgggcagtgagcccgtgagggtgaca

SEQ ID NO: 82372 - DNA, 122 bp, Homo sapiens
tcaattcaggacacaggtagaagaccaaaaggccaatgagacttctttcctatttgagatcggatttgagaatgctcagcctggctcccttcttcccccagctctgaatcaatcctttcttc

SEQ ID NO: 82373 - DNA, 122 bp, Homo sapiens
cctcgagtttgttttggtggagctaaaccagaaacccggggatatttctgtttgggggaccgccaagcccgggatgcgtctgcctaaggcgaggtggggagaaggagagcgcaagaagtgga

SEQ ID NO: 82374 - DNA, 122 bp, Homo sapiens
ggccactgaggagagcagaggcggcgacagtttggaggcggaggtgaccacagggagcaccggtccgaggctgccgctagggggcgctcgcaaagcaggcgcctccggatgtgccgagccca

SEQ ID NO: 82375 - DNA, 122 bp, Homo sapiens
acagggcacagtcttccaaacgtttcactcacaggggacagtcttgcaaacatttccccgcgcataacaaggctcactggttccctaccctgaaataaacatgccttcctctgctgcctcct

SEQ ID NO: 82376 - DNA, 122 bp, Homo sapiens
gaggcgctcctcacatcccagacggggtggtggggcaggaggcgcaccccacatctcagacgatgggcggccgggcagagatgctcctcacttctttccagatggggtggcagctgggcaga

SEQ ID NO: 82377 - DNA, 122 bp, Homo sapiens
cgccgccggctgtcgggctctcgtcgggtttcgggtgaaggccccggctcccacctgctgcgccttttaaccgcgccccaccccgcctctgccctgacgcggctcgggcgggctgcgggagg

SEQ ID NO: 82378 - DNA, 122 bp, Homo sapiens
cgaaaagacagtatggtgcctgggctcctgtatataagagttcttttgatgacgtcacgacgcacgctcccggcagcgtccgcttcggctcctccccctaacctccctcaatcttcctctca

SEQ ID NO: 82379 - DNA, 122 bp, Homo sapiens
tcccccgcagtcattgtcacactgccaatattttacaacgggaacggaacacctgtttgccgagcacccacgagggcccaggcatcctcttaggtctggaacagagaaggaaggaagccaac

SEQ ID NO: 82380 - DNA, 122 bp, Homo sapiens
ccttgtgagtgcttaaggctgaaggactctgttttgacagtagctgggctccccgcgccccgctggccctggccgcgcgacaggaggctgcaggcacgtcctgcggctccggggcgaaggct

SEQ ID NO: 82381 - DNA, 122 bp, Homo sapiens
ctagggcgccggctgcctctgcgggccccggctgcccagcccagcgcggggaggcggcgccgactgccggggggcgcctgcaagacctgtttatttgcatttgtccaatttggctcaagtga

SEQ ID NO: 82382 - DNA, 122 bp, Homo sapiens
tcgctgtcctcctcctgctgctttgccaacttcttcgcctgctgttcaaaccactggagccggggtggtttctcactcgggtctcggtcgtgggtcccacggccaccagtacccacggccac

SEQ ID NO: 82383 - DNA, 122 bp, Homo sapiens
gtctattctcttctacttcctgtcctcccacaggctgcctgccgacactacggccactgtcgaggacatgctgccttctgtcaccaccgtcaccactaactctgacactatcaccgaaacct

SEQ ID NO: 82384 - DNA, 122 bp, Homo sapiens
ctgcccacgctggaaagttcttccttaaagttaataaaatctgtcaacttccataaaggccgagagaaagggggtgcacaggtgcagacgttcgggctgaggctcgagaagtcgaggcagct

SEQ ID NO: 82385 - DNA, 122 bp, Homo sapiens
tataacccaagtcttttaaggaaaagatcatgccttaaaccattctcaatgattccctctcggaggcccatcactaaaatgtatttgcacaaggtacttaatttttaaccagtgacagtgac

SEQ ID NO: 82386 - DNA, 122 bp, Homo sapiens
caaggctcacagccgtgcagacagcgtcacatgggaggaaagggaagaaaaacaggtccacggaacagaagagtccagacggacccactcacatgtggccaactgcctttccacagaggagc

SEQ ID NO: 82387 - DNA, 122 bp, Homo sapiens
aagcaagcagtgatgcagacgcttcctgatgacgatgctgacggtgcgggcaggggaaggcgctgggaagccggaccggcccaggctccacaccggcttcggccacggctgttgtcctgttc

SEQ ID NO: 82388 - DNA, 122 bp, Homo sapiens
tgtgtctcggttcagcagtcatgcatctgttcacgtgcagacctctggaagcacaggaaacgggttgccaaaaagggacaccagagaacccccaagtatgagcaagactcatcagctctcag

SEQ ID NO: 82389 - DNA, 122 bp, Homo sapiens
cactgaacagaggaggaaactggcgctcccaggccagacagctgagtggacgagtggaggcgctggattcaccttcgtcctctcccactccccacactgcttttgttcagataccgacaaag

SEQ ID NO: 82390 - DNA, 122 bp, Homo sapiens
ccaagtgccgagctggggctgccagagccgagccgggaacggcatttgccagagccgaggcggaagccggagcatttgggggacgggaccgcgggaacccggaaacgcctgggctgcaccga

SEQ ID NO: 82391 - DNA, 122 bp, Homo sapiens
cacagcgtcaaagctcatctttaaaaatatgtacatttataacctgggttggcgaggcggcgctcttctgcccaaaacgtaggggtggttagtttgtagagtgggcttagctcacaggtgcc

SEQ ID NO: 82392 - DNA, 122 bp, Homo sapiens
gcgggaatgagggggcttctttctcaaattgggaatgcctagcttttttctagctgtaaacgtttcagacgctgcggacagatcctccaatgggaagtgaacgcactgtcgccgcgcccaca

SEQ ID NO: 82393 - DNA, 122 bp, Homo sapiens
ctgaaccatttgtaagcgcacagctcagtggcatgaagcacattcacactgttgcgcagccgtcaccaccaagcacccaaggaactttcttatcttctcaagctgaaactgttcccattaaa

SEQ ID NO: 82394 - DNA, 122 bp, Homo sapiens
ccaacctcagtacaatggctccagggtggagaccccggtgtcctacgtcgggaaggatgacgaggaggacgacttcaacgagaacaacaaggacgactgacgtcctctccacttcacattca

SEQ ID NO: 82395 - DNA, 122 bp, Homo sapiens
taaccgcgagtgacgccttctccctgtaaggccaggacgttctggactcgccgccgcctccggctacagaacccccagctttaccctacagacgcctctagggtcgctgcctgatcgcccag

SEQ ID NO: 82396 - DNA, 122 bp, Homo sapiens
taaactgtgggtttaaaagtttagaatatcttttgactgtggctgtaatcagagtcatcacggcaattacattttagcatgtcatgatttctttggtccacaattgtttttctttccaaatg

SEQ ID NO: 82397 - DNA, 122 bp, Homo sapiens
gatgaagtgtaatggggtatcggcttcatttgacgtaccccccgggagtggcttctttctcgttaactcggctcacttccccgcgctttctcttaaaagcctttatttttgccaaagcctgg

SEQ ID NO: 82398 - DNA, 122 bp, Homo sapiens
gcacatccccttctaaccagggtccccatcccaggtgaggaccaccaaaccgagaaggggcgcgctccctgggcctccctggggccagcaagagtgtgtgtctgggttggtgactcaggctg

SEQ ID NO: 82399 - DNA, 122 bp, Homo sapiens
tggcgggtgcggtcacacgcaggacgtgccgttcacgtgagccctgtgcatgcaagttctcgttctgaaggccgtttctctcgtgtttaaataagaatccagcagctcttcctgcttggctg

SEQ ID NO: 82400 - DNA, 122 bp, Homo sapiens
tatttattttcaaaatgccatatttatcccccaaaatcatgcctaaaatgtccaaaattccgtgcatggtgattgaaaaatgaagttaaagcacatgaggcagttgtgttgaatctttcata

SEQ ID NO: 82401 - DNA, 122 bp, Homo sapiens
tttcattgaaccttccatcacttgagttgtatgtcttccaaatgaatttttccatgtttgcgcagcaaggtaatgacacgacctcaactttatcttttttgtgtatcctcaggaatgggtag

SEQ ID NO: 82402 - DNA, 122 bp, Homo sapiens
cacaagtgatgtggagttttcagtttgcttgttttttgctgttgtttgtttgcttttgagcgatctgagtgatttagaaaactaatgtgtctcagtcggctccaccattcagacagatcata

SEQ ID NO: 82403 - DNA, 122 bp, Homo sapiens
gagtttttttttctgccttcagacacatctgtagatggcgatgccgcctcttctgtatgacgctccaacctccctcagtgtccattcccccatcccacctgcgttgagggagaggcctttca

SEQ ID NO: 82404 - DNA, 122 bp, Homo sapiens
tggtgggggcgcccacccctgcgcccgcccctccgcccgctggccacgccatccatcacccgagcccagactcctgtggctcattcgtcaccggccctgacaaatgcctgccgcccccttcc

SEQ ID NO: 82405 - DNA, 122 bp, Homo sapiens
gttaaccctaagttcaccaaccaagtcaagagatgtggctttcaatgtggtgacaaaccccggccttcacatggtgagccctgctgaatggtcagcctctgtcattcttgacctcaccatct

SEQ ID NO: 82406 - DNA, 122 bp, Homo sapiens
ttttaaatggatttctactgcatgctgagtttcccaccagtggccttctcccatgttccccggacttctggaacccagcttttatggtgtacttggtctacctctgacactctgagatcaat

SEQ ID NO: 82407 - DNA, 122 bp, Homo sapiens
acactctactgcacacagcacacacctgggtgcccatgctgtgaaggaccagtttctcaccgaggtgtgtttgcctaaactgattatttacctgggctgttgaagaagtctgagatcggcag

SEQ ID NO: 82408 - DNA, 122 bp, Homo sapiens
cctgtatataacctcagtatatgaatgctgctgaagggaagtcaggcccttgcaagttcacgtgtcttcatgtagagctgcttactgcccggcttagagaaccaggaatgggttatcagcgg

SEQ ID NO: 82409 - DNA, 122 bp, Homo sapiens
aggtataggagcgctggctggaggctcctcgagagctccccagacacgcccccgtgcgtacgcccccgtgcgtacgcccccgctgccgccaccttcggttgaccacccccatctagactgta

SEQ ID NO: 82410 - DNA, 122 bp, Homo sapiens
ccaatggggtagaggaaaaggggaaaggcaataaacaagatggttacaatgtatgttaaacggtatgttagaagctgataaaagttaaggaaaaaatacttggcagggtgatgggcactgga

SEQ ID NO: 82411 - DNA, 122 bp, Homo sapiens
ggcccgaggtctagtgctccgtttaatccttgcaacagcccattttacagatgcggacgccgaggcctgggaagagggagagagccacacacggtctcacagcccatacatgagagagccag

SEQ ID NO: 82412 - DNA, 122 bp, Homo sapiens
acaatgaagaaaaaggtaacgattatttgccaatggctgcttgaggtggcagattttcagcgataaccaagagaaaaaaaaaagaggtacatcaaatggatagttttctgttttgtacattt

SEQ ID NO: 82413 - DNA, 122 bp, Homo sapiens
ggcaatctcaggaccagggaggcagcctgaaaaccagcctgctctggcccatatcactcccggagaatgttaccagttattgaaaatttgtttcttgcattgggataaatcaagggctactg

SEQ ID NO: 82414 - DNA, 122 bp, Homo sapiens
cccgactgtgttttcatggctgagttaggaagcagtgcgcgggcggtgctgtaccctactcggggagagcaggatcccccgtgaagggggctggtcgggagaggaggctgagcacctggctc

SEQ ID NO: 82415 - DNA, 122 bp, Homo sapiens
cgaattgttggtttgtctatcaccaaagagctggtgaaaacaaaaatttgtttcccactccgtcctcttcccggatacttggagacagcagcgtcagtggcattgtttggcgtctctgaacg

SEQ ID NO: 82416 - DNA, 122 bp, Homo sapiens
cagccagagttaaaggaatctcccactttttatgacctgcaaagaactcccttacctgtacggcttagatgagccttaggattctgaagaaggtaaagatgtgcctttctggcatattgtct

SEQ ID NO: 82417 - DNA, 122 bp, Homo sapiens
gtctttctaagccagtttcctcctgtgggaaacttatatttcagaggcccctgggcacttcgttaatcaacagagaatcatgtgataggagggttctttcctttctggataaatcatatgat

SEQ ID NO: 82418 - DNA, 122 bp, Homo sapiens
tcacatcaggacatgaattaaaacaatgtaaactatggacctggggtgaccatgatgtgtcgatgtaggttcttggattataacaaatgtaccactctagcgcaagacttcgatagtggagg

SEQ ID NO: 82419 - DNA, 122 bp, Homo sapiens
tgtctgtctccctgttaaactgtgagcttctctagagcagggactgtttcttctttcacccgggtaagccctgcatcagctgctggcacccggcaccagcaagctctcagcaccacctgtgt

SEQ ID NO: 82420 - DNA, 122 bp, Homo sapiens
cccttcttcacaatcttcaaaatatccttctgattgaaccagatatcttattcttcatcccgtttcctgccccctaaaatgacctatctttcccttctaaaacttccactaactttaaaatt

SEQ ID NO: 82421 - DNA, 122 bp, Homo sapiens
ttaacgatatgtattttttaggcggagcagcaaagggccactcttgtcctttttaccccacgaagtcccacctcccattccttacgctcaagttttcatttcttggagagcaccccgtacga

SEQ ID NO: 82422 - DNA, 122 bp, Homo sapiens
ggttattctctattgaacatctgtgcatctctgctcccacccattgagttgcatgtttaccgagagttaggtgtgtttatgcctgtaagaacaacaggatatgaatgaaagtgattcatgca

SEQ ID NO: 82423 - DNA, 122 bp, Homo sapiens
gccagggtgggagagatgcccttcccccagataagataagactagtaatgtcatttcccccgaagaataaggcctttgctctggagaatactcggtgtgcttgtcacaatggttactcctcc

SEQ ID NO: 82424 - DNA, 122 bp, Homo sapiens
ctttacttccctcttttttcttttttttttttcctttatatctttctttttttagtatcgcgaaataagaggtggtatcagttttttaaaagtttcagtgtaactttctctaaacccaagcc

SEQ ID NO: 82425 - DNA, 122 bp, Homo sapiens
aaggaaggagggcacattaactccctccaccagcctgctgacagacactaactttgtatccgttcaataagcatttcataaataaaggtgtagaaaaggttcatgcgtcttccttggaggaa

SEQ ID NO: 82426 - DNA, 122 bp, Homo sapiens
caaatgtgaccaagacatccattcgccacaggctggggggtgtccaagccaagcacttaccgtgtagtggagacggtgctaagaatggcagtcctcagtgagaacataaagcaccaactaat

SEQ ID NO: 82427 - DNA, 122 bp, Homo sapiens
ccactggtacgagaccgacccccggcgccacaaggagagctgcgagcgcagccgcgcgggcgccgaccccccggaccagaagaaccgcctgatgccgctgtcgcacctgccgctgcgggact

SEQ ID NO: 82428 - DNA, 122 bp, Homo sapiens
gaggtacctgacagtggtggtcccatctcaccctcccggtccaagggccctggtgggaagcgacccgagcgtattcgccgcccgcagctcgcgcgcctgggcacccgggggcgctcacagtg

SEQ ID NO: 82429 - DNA, 122 bp, Homo sapiens
cacatggtgggcgagccggtggagttcagatgcatcccggaggctcagaatgttcccgaccgttactttgctgtctcctgggccttcaacagctcgctcatcgccaccatgggccctaacgc

SEQ ID NO: 82430 - DNA, 122 bp, Homo sapiens
tggactcacagttccacgtggatggggaggccttataatcatggcagaaggcaaacagcacgtcttacatggcagcaggcaagagagaatgagagaacagtgaagggggaaatcccttataa

SEQ ID NO: 82431 - DNA, 122 bp, Homo sapiens
tcgctgccgggggcaagtctgccgactccagaaagaaaggcgaaagaatgtgtgtagacccgggcatccttggtcgtcagcatgtttgctttatttaattacagatgttcaggctgctgtca

SEQ ID NO: 82432 - DNA, 122 bp, Homo sapiens
ttaacaatagaaaaacaagcatgtgcagcatacaacaagtgggagaaacctcagtgaaaacgaactcagagcacagtggcttagagctctggtttatatagcatcttcaacaaagaacagta

SEQ ID NO: 82433 - DNA, 122 bp, Homo sapiens
caatagcgtggtccttaaaaacctgccattccttacaagtgccttagaaaggattcagggcgaaccaactgggttaattgcattcagtaaaataacacgattacaaaattagatctgtacca

SEQ ID NO: 82434 - DNA, 122 bp, Homo sapiens
ctccaagtgaaaaaggaattttattggcccatgttactgaaaagtccaagagaatcccaacgaattctttagttgaaactattcctggtctctaaaaatcacttctgggtctaatgatctgc

SEQ ID NO: 82435 - DNA, 122 bp, Homo sapiens
tccggccccgcccccggcactcacgactccttgtagtacacgatgaagctgagcaggtcgcgggcctccagtggctcatagcgctcccagcgtagcaggatgcggtctgcctccgtcacgtt

SEQ ID NO: 82436 - DNA, 122 bp, Homo sapiens
tgctcaacactatcaattatagcagaagcatttagcaaaataaggcatgaggaatacttacggcatttgtaaatgtgcatgtcactgatgtctttagctaaagctgcctcagtgatatatgc

SEQ ID NO: 82437 - DNA, 122 bp, Homo sapiens
gtgacgcgactgcagcgccggggcccagctcgtctgggtgctcccttcagtacctccttccgagagttcccagcgcccaggcccaccctgatcccggggctcgaaaaactttgcctccagct

SEQ ID NO: 82438 - DNA, 122 bp, Homo sapiens
cgcctactcctcagtgccagcctgccccagccagaggtccctcctggcaacagcccaccccggctctctgggttctcactgagacctccacccaggccctactctgcaggccttgtgaggcc

SEQ ID NO: 82439 - DNA, 122 bp, Homo sapiens
tatcttaagagatagatgttctttgcaattaattccattcagctcttgctcagaccccaacgcaatataaagctgtccgcacagtcttcagccttctcttaacccgaaaggagttatctcta

SEQ ID NO: 82440 - DNA, 122 bp, Homo sapiens
caagaagcccgcagtgtcactgagaacgaggtgctacgattcagaggggtgcaggagctgcggtacccagagcaagggcccttcacagccagagagcgtcagggggcttcccagagctctct

SEQ ID NO: 82441 - DNA, 122 bp, Homo sapiens
gacagggaaggataaaaccttgcatgtcttgcacttacatgaatattcccagctgtacttcgaaaaaacagcaggtcatagaacctgtggagacaaaatgacccatcttggatgctagtcca

SEQ ID NO: 82442 - DNA, 122 bp, Homo sapiens
ggactttggcttcccatgcagttggagggtagaagggatgtgcggaactgatgacttcaccggctcctcagcagcatgtacattcaaattgaagatgcttgagagccccactataccaaatc

SEQ ID NO: 82443 - DNA, 122 bp, Homo sapiens
ttaggatccggggcgaggcaatgagagcaggacacagcagcgtgggcgaggtctggctgccgggggctggctgggcaggacaggtgggtgagtgtggaggctggggacaccagcctgtggac

SEQ ID NO: 82444 - DNA, 122 bp, Homo sapiens
cggtgacctacactttcacctcttctacgctgtcggtcgacagtcctctttttaaggcatcgttggtatctttcttcaagaagctgacccctttaagattcggcttaggtgatactttcctc

SEQ ID NO: 82445 - DNA, 122 bp, Homo sapiens
ggaggggagtagagtagggcaggagaaactgggccaggctgcacttagctcaaggggcctcgaggactctctgcgtctctggagacaagggcactacacgcacttcagaatgaagagttgta

SEQ ID NO: 82446 - DNA, 122 bp, Homo sapiens
atgctcttttacaaaataacccggtgaagcagctgagcccgagccgcccgccagcggccccgcagcagctccaagaaggaactaagagaccaaggccttcctgctgcccggacccgacaccg

SEQ ID NO: 82447 - DNA, 122 bp, Homo sapiens
aagagagaagatgaatggatagaaatctgaattatttatttatttagcaagtatttcttgcgaggcaattactgcatagctctgtgggatacctgagactgggtctataatcttgttgaaag

SEQ ID NO: 82448 - DNA, 122 bp, Homo sapiens
atactcgaaagcctgcttagccagtcggccgggcccgtccaccgtcttgccgtcgtcgtccggcccccagctggcactgtaaatgtcgatgtagttgggtctgatgcccagcgactttgcct

SEQ ID NO: 82449 - DNA, 122 bp, Homo sapiens
gatctggcttgctggagagcagaccaaaggcggtgtatctgcctaaagctgtagctgacacgtctcccccatcccctacatcatcgcctacccctcactcgcacctccacccgcgcagtcgg

SEQ ID NO: 82450 - DNA, 122 bp, Homo sapiens
cgtccccgccacccttgcgggcggatccgggggggcgcgcagagctggagaaactttctccgccttagggtggggggcaccggtgcagatactcacgccggggtcagcgctcggagccatcc

SEQ ID NO: 82451 - DNA, 122 bp, Homo sapiens
ggggatctttgccatcgatcccgattctggggacatcctggtcaataccgtgctggaccgcgagcagactgacaggtatgagtttaaagttaacgccaaagacaaaggcatccccgtgctgc

SEQ ID NO: 82452 - DNA, 122 bp, Homo sapiens
gatcatagctcactgcagccttgaactcctgggctcaagccaccctctcacctcaacctccgaggggctgggaatacaggtgtgcaccacatctggctaatttttttgttttttgcaaacat

SEQ ID NO: 82453 - DNA, 122 bp, Homo sapiens
gtggacgcacagacgacatggacgcacagacgatgtggatgcacggacgacgtagacacacggatgactcatccacagatgactcagatgcacggacacccagacgacgcggacgcacagac

SEQ ID NO: 82454 - DNA, 122 bp, Homo sapiens
acggcaccccgtcggcagaggaaggcagcggcgcttcccgcgtgcacacaacagtccctgcggcccgcacacccctggctgtcatcggggaggccgagtcctgctacctgtcctgagtgaca

SEQ ID NO: 82455 - DNA, 122 bp, Homo sapiens
gctgccgcgcccggcttctctccagcgccccgcgccgttagccacgtggaccgactccggcgcgccgtcctcacgtggttccagtggagtttgcagtccttcccgcttctccgtactcgccc

SEQ ID NO: 82456 - DNA, 122 bp, Homo sapiens
agatcagtgcataccatggggtaagtacagaaataggtttcaatgaatgctggagagcaccgaggtggatcctaactatatctggagagctcaggaaggttcatgcctcccagtctttctct

SEQ ID NO: 82457 - DNA, 122 bp, Homo sapiens
tagggagaattcaggacaggttgtgccacagtctagaagtaaaatttccggtgagctgcccgcagcgccgtcccattctccccgctgcccattgtgaaaagctgggccagcgcttccttgtc

SEQ ID NO: 82458 - DNA, 122 bp, Homo sapiens
gcgggtgagatgagcaccatcaccgggggccggagcaggtgagatgcaggggccggagcacgtgggacgcgggggccggagcaggtgagacttgggggcctggggcaggtgagactcagcag

SEQ ID NO: 82459 - DNA, 122 bp, Homo sapiens
agcattgtagaactatcaattgctcacttcaaatgcaatcatgttgaatgtctgtttcttcgttcctcggttctctcattccacaagtgcataggttatgtcttctgtaggtctggggaaaa

SEQ ID NO: 82460 - DNA, 122 bp, Homo sapiens
tgggcttgggtgggatggaacatgcccgtgacagacaggcccacctgccaatcagaagggcgctctccttagctgggatggggccgcaggagtggaaatggctgttgggaggtggcagagat

SEQ ID NO: 82461 - DNA, 122 bp, Homo sapiens
acacaggaccacagcgagagaagtgtttcaaagggagccggcccaggcaagagaggagaacgaatgggcccgacaaggagctagaatctttcctcagttacagatcttaacgagaacaaagg

SEQ ID NO: 82462 - DNA, 122 bp, Homo sapiens
cgcctccttgagcacaaactcaggggactcatagttctcggtgtcatagccactgtccagcgctcgcggctgccctccagaggggccagtggccgacgggctgaagacctcatagccaccat

SEQ ID NO: 82463 - DNA, 122 bp, Homo sapiens
ggcaggggccctggggtccagcgctgcccccacctcaactccatcctgcgtcagggcccgcgaggggccctgtggactggacccaggccgcccattcccagggagaggctattaattattgc

SEQ ID NO: 82464 - DNA, 122 bp, Homo sapiens
ggcgctggtgtagaactgcagctccggggccctgtgggtgacagaacacgctgggccccccgtgtcgggacaggccgagttcacacgcagctccctcacagcaagaacacccaggcacccca

SEQ ID NO: 82465 - DNA, 122 bp, Homo sapiens
gtgctcctcgcacttaggctgagtttagccggcgggagcctggagtccgctcggcacgagcgcggggacgcgggagccgcgcgggacccaagcagtttttccgagcagccgccaggctcagc

SEQ ID NO: 82466 - DNA, 122 bp, Homo sapiens
acgctgaacaaacccaccctgatgctccagtctgtcaggagagtgtctattctacagtaccgctctaaagcttcccacatctcagtttccttatctataaaatggggagaaaagggccggac

SEQ ID NO: 82467 - DNA, 122 bp, Homo sapiens
ctgagatcgctgccgtgtggggcttcagcgcccggctgcctgtggggagcggatcaccggcggtttcatccccgtgcactcttgtctgatgaaatataaatagcacgcgatgttttcgagca

SEQ ID NO: 82468 - DNA, 122 bp, Homo sapiens
ggaagaaggcctcctagtaatgcatgtgctttttattcctgtctgattgctccaatcaaacgttttgtaggtggtttatctggaatataaagaatctgaaaggagcacagactttcacccca

SEQ ID NO: 82469 - DNA, 122 bp, Homo sapiens
taagcatgactgtttctgggggaggggaaaggggtggttgtatttactgaaaattcaaatcgaaataataaatggccaaatgtggacacttatggacccaaacagttttgctcacgccagag

SEQ ID NO: 82470 - DNA, 122 bp, Homo sapiens
gttaatagttgatcacatgttgatgagaaccttttcttctacgagaggattacccattaccggtgatatgcacttctgacttatttctctccccccaaccccaccccccatctacacctaaa

SEQ ID NO: 82471 - DNA, 122 bp, Homo sapiens
gctacctcctggctgctgctttccaacctcctggccagattctcattttcttgccttagtcgcttcttctcttcctccagaactgacttgtctcggaggaggttgctgtaggcagtctccaa

SEQ ID NO: 82472 - DNA, 122 bp, Homo sapiens
aattggcagcagccccactaccgggtgatgaaatacatcgctgagttgcaagcataattacgacagaggtccctggcccactgtttggggaatgggctgcagcaagcacaggtcacctccgg

SEQ ID NO: 82473 - DNA, 122 bp, Homo sapiens
actatcagaaggaagaggctcccctgtattctacaactagaaatctacaactgtcttgggcggaagatgggatttattgctgtctagctacttatctggttcagttggctcagcggattgga

SEQ ID NO: 82474 - DNA, 122 bp, Homo sapiens
tagatctaggacaattcaaaaaccaggcagaaaacggtgctcacggtggccgtgttcaggcggctgggggcattttaagtgagaaagtcgcctctctcaggagggaacttgcaaagggctgg

SEQ ID NO: 82475 - DNA, 122 bp, Homo sapiens
acctttctcggtaagcagggattacactttgctgttagccgcttcacaaagccagctgtgcgcctgcctctgcccggccccgacggtgccaggctcctctctgctgcgggtcagctggcttc

SEQ ID NO: 82476 - DNA, 122 bp, Homo sapiens
tgtcctagtttcatatctggtaggaaggcttggatcaccagaggatccaaggagtcagtgcggaaggggctggactcaaatttccttctagaatagaaaacctgcaggccctgcttatccac

SEQ ID NO: 82477 - DNA, 122 bp, Homo sapiens
ctcgaggctccccggggcccaggtctgcagccagctggcggtgggcaggcagggggccggcgggaggcccccacccgcaccttcacccccaacccccacgtccacccccccaccccccacct

SEQ ID NO: 82478 - DNA, 122 bp, Homo sapiens
ccaaagtgcccacgtgcctggtggttttacctggctgtgctctcagatcctctccgaatgcgtagtaactgcgatgaattcccgcagagggcttctgagagttaatatttctgtcatcagtt

SEQ ID NO: 82479 - DNA, 122 bp, Homo sapiens
agggccatcttctccaatgagaagagcaacagcaaggaagatggccacagcctgagcacccgcaggaagtaaacagctcgttagccgggtctcttcttataattccatcatgaggaccccat

SEQ ID NO: 82480 - DNA, 122 bp, Homo sapiens
gaacgggataaaacccaggggttgtgcggggtcctgaggggaaccagcgccggataaaaacggggaagggagggaggtgaacagagctgagggaaaccgggaaaaggggagcgatagaaacc

SEQ ID NO: 82481 - DNA, 122 bp, Homo sapiens
ggggcgcccaggtgaaccctggcctagttcccagctaccccagaagggtcttagcgctcacgtctcacgcccagactcgaatgtcagtgtaagaatcaggtgtctgcaaagactaatcgaaa

SEQ ID NO: 82482 - DNA, 122 bp, Homo sapiens
cagacagccttactcttgggatgactctaccttcccagagcctggtcttagatcaggagccggggattaacgggtcctggaaagccagggatcaaaatccctgccgtccatctggagacact

SEQ ID NO: 82483 - DNA, 122 bp, Homo sapiens
ctgggtttgctgctgctgtttcacagacagcaccccacacagggcagcttgaggatgccccgctgcttccctggttgtggataagccaggcagctggcggatggcgcggcacgagcgctggc

SEQ ID NO: 82484 - DNA, 122 bp, Homo sapiens
tgtgcccagttagctgtgtcagtcaagacaaccaggagtagattttagtcaccttaaggtcgaaaactatgtttgttatttggagcttcttttctttagttcgctttattttcccctggttt

SEQ ID NO: 82485 - DNA, 122 bp, Homo sapiens
attgtgtcttgctccagtgggggagaatacaaaaacaaccccctccttcctccaatgaggcgccagggaaagagacagaaagaggcacactttctagatgtcacttaaaaaaaattcattgg

SEQ ID NO: 82486 - DNA, 122 bp, Homo sapiens
tccggggctgccggccaaggctaggcgctgccagcccgattctcctctgctctccacccccgcctcacccagtggccggccggacctgcaccccgcgcttgaccccgctcatcctccccccg

SEQ ID NO: 82487 - DNA, 122 bp, Homo sapiens
aggcactggcatccaggggaggaccgcagcctcctctttggtggcgccactatttttccgcggcctgtgtcaacgttttcttgaaagcctgcgagcctggagtccagtccccctcacttggg

SEQ ID NO: 82488 - DNA, 122 bp, Homo sapiens
cccaactcgctgagttctcgtccttcgaacccccagcgcctcccgcggtgcccatggccacggcccctttaaatgtgcgcagggacgccccggccctcgcctccctgaatctctgaccgagc

SEQ ID NO: 82489 - DNA, 122 bp, Homo sapiens
gagggcgagtgggaacttagaggtcatatttgtgacgggctcaggcttggctacgggccacgcttctctggcttggatctctgaggcccacttcggccgcggtcatctacccatgatgaggg

SEQ ID NO: 82490 - DNA, 122 bp, Homo sapiens
gaaggggggcctgaccacccgcgagggagcagaaacccattggacagcgaggctcgggatcggcggcccgccccgatgggcagggagggcacctgcgcctgccggagcccccacttcgcagc

SEQ ID NO: 82491 - DNA, 122 bp, Homo sapiens
agtggctaggggcaggtcacatactggacacactcccatcagctggacacccaccccaatcgatacccactacgcaagtagaccccaaacctgggcagcaggcaaagtcaagagcagtccag

SEQ ID NO: 82492 - DNA, 122 bp, Homo sapiens
agccaggacataccccatgtgcttttttttcctcccctttcagaaatgtaatttccatgacgcgtccacccagggccaggaaccacagaagagaaagagcagtgggaagcttccagaaactc

SEQ ID NO: 82493 - DNA, 122 bp, Homo sapiens
caaagaaaaaaacaagatcagaacaaacctaacttagctccgtgaattcaatttgcacatcggcaacgttaataaggcattccgatacaagccacatcaacgtccgcccctaaatcaaacaa

SEQ ID NO: 82494 - DNA, 122 bp, Homo sapiens
gatccacccttctcggcctctcaaagtgctaggattacaggcgtgagccactgcgcccaacgataagtgttctttgttttgttttggtttggttttttaagagtcagggtcttgctgtcacc

SEQ ID NO: 82495 - DNA, 122 bp, Homo sapiens
gcgcggctcttgcttcctgctgcacatgtgccttgaggctgtcaggctccctgttgctggcggtgggtgcagcaggcacggtgggcagagccctccaggtgatgaggggccctggcgcctca

SEQ ID NO: 82496 - DNA, 122 bp, Homo sapiens
aaaattaaagagccagagacccatggtgggtcagccatccttggggtcctgaccagacctcgggggcattgttagtcttgtgcgtccagggccccagtgatatggtttggctctgtgtcctc

SEQ ID NO: 82497 - DNA, 122 bp, Homo sapiens
cccagccgcatcatctcccgcaaccgccgccgccgccgcagccacctgcaactttgcaggcgagagagcatcccgtctacccgcctgagctgtccctcctggacagcaccgacccacgcgcc

SEQ ID NO: 82498 - DNA, 122 bp, Homo sapiens
aaagtctctccttaaaggtgttaacctctcgagaagttgctgaaagccggaaaggttttacgcaacaggaactcaagccccgtacactttgcattcttttccagcataactcagccagtgtt

SEQ ID NO: 82499 - DNA, 122 bp, Homo sapiens
ctgaagaagtgaagggtatttgtcttccatgcttcagcgatggagaatagactttggggtcgacccatgaacaaatcaacatataattgcatgaatgcttgcatgtgttttgtagactcttt

SEQ ID NO: 82500 - DNA, 122 bp, Homo sapiens
ggccgagggcggggccgcgcgaggaccccgggacctgcccccctccccccgcagccgcgtcgccgctcgctccgggcgcctcctgctctgcacttacacgctcggcagctgcggggagcccg

SEQ ID NO: 82501 - DNA, 122 bp, Homo sapiens
cagagctgttcaggctttgctcaagggtaccaagggccagccctgcagctcttttccctccgtatagtcagcagacaatgatgtgcacagagtacccaaaaaagcttcacttctattcttca

SEQ ID NO: 82502 - DNA, 122 bp, Homo sapiens
ggcgcgagacgatggcttggccatcatctgggtgacttttaaatatgacggctccatcatcgtccctgttgggcaaggagcagaataccagcacttcatcccccagtgcacagacgagatct

SEQ ID NO: 82503 - DNA, 122 bp, Homo sapiens
tggcaaggcacacactaggcgcactctgtcttacggcagaacctaggaatgatctggttccgaacctcctgcacctctccttgtttgcaactggcgggtcagactgagttctctccattacg

SEQ ID NO: 82504 - DNA, 122 bp, Homo sapiens
aggttggaaagagtctctgacctcccttgtttagttttagaatctcatttactcactctccgccagcctgggaaatgactttgggtcctcagccctgccactctctgctgtcatcatcagct

SEQ ID NO: 82505 - DNA, 122 bp, Homo sapiens
tctgagtggagctgtgcggcagcgggaggcagacctgctggcggcgcagagcctggtgcgcgagacagaggcggcgctgagccgggagcagcagcgcagctcccaggagcagggcgagttgc

SEQ ID NO: 82506 - DNA, 122 bp, Homo sapiens
atcagcctaaacgtagttcatgtttaggaagcaacaaccgtaaatagtcccacatccaaacggagtggatttaggtttcactttttcaaggaaaaaccatcaaagaatttttccacatactt

SEQ ID NO: 82507 - DNA, 122 bp, Homo sapiens
cctcgtgggagcgcccagtggggacctgtagggacccctgatgcctctggcacggcagtacggcctctcagccccgcacgagcccctggaggtagtcggccccccacgttctataacctgcc

SEQ ID NO: 82508 - DNA, 122 bp, Homo sapiens
cattgcagagtcaggggtagagcggcaagtacttttgggagaccagatacccaaattcgccgttgccactttaccacccgcctgaatcctgggattctagtatgcaataagagatgccctgt

SEQ ID NO: 82509 - DNA, 122 bp, Homo sapiens
cactgtgtgtccacagtggctggtaacatgaagggagggacggggattgaaattactctgcgcatcagcggagagtgtccacgcccctgcgatgtggctcctaatatccatggggaaagggg

SEQ ID NO: 82510 - DNA, 122 bp, Homo sapiens
cttcagatagtgctttgaaagtcctgttgactcattcatcttggagatccgatcaccctgcggttgatctcccacacttactaggctgagaagaaagacgtctcttctctccttacaaaccc

SEQ ID NO: 82511 - DNA, 122 bp, Homo sapiens
tgtgcctcgcggatctccttgctgagctccatcttgtagttgagcttctcctccgcctggcggctgaagttgttattctcctccagcgccttgtgcagcacctcgcgctcgtgctcgcgccg

SEQ ID NO: 82512 - DNA, 122 bp, Homo sapiens
gacgctaaagtagaaatgaaacttagcacacctgactcctctgatagtctccctgcaacacgctagctgccttcctagttagaaacccaggctccaatgaatgagcatgagaaatcaggcca

SEQ ID NO: 82513 - DNA, 122 bp, Homo sapiens
cttctcgtgcaggaagctgccctggctggatctggatgctaactcagcagttttctgggacgggccgtgcagcctgggcgctactctctgccgcgggcatggctctgaggccccggctcgga

SEQ ID NO: 82514 - DNA, 122 bp, Homo sapiens
tggtcatctgaccgtagcattcccagaagtaacattcagacaagacaaaacttagagtcacggcagaaagaagatgcccacttcccgacttaattggaagccccacagcatacttttttcct

SEQ ID NO: 82515 - DNA, 122 bp, Homo sapiens
atcctcccccggcctggccccgacattaacagggccaggaggaaccgctacggccaccaccgccacccgccgaggagccgcccaagcccatttgccgccacagccaaactttgcggctccaa

SEQ ID NO: 82516 - DNA, 122 bp, Homo sapiens
taatgtcgacgtagtacatgcacagatgaggttatgatgcaaagccgctgctccttgcctcgtgtccctgctccagttccccctcctagagacagccgtgtagttttttttttataatgctt

SEQ ID NO: 82517 - DNA, 122 bp, Homo sapiens
cagcgagggccggagtggggctgaggcttcggtgcagagctggagagccgcggctgggaccggagtggggagcgcggcgtggaggtgccacccggcgcgggtggcggagagatcagaagcct

SEQ ID NO: 82518 - DNA, 122 bp, Homo sapiens
gtcctaaatcaaagtttctccttactctcctctttcagttagcatgagagttgtcacagccgacagaggcaatggatgaagccaatcactctgtggtctctgagtttgtgttcctgggactc

SEQ ID NO: 82519 - DNA, 122 bp, Homo sapiens
aagttacactccagggtggagcagcattttttgttagaaaaaaatcttctcttagaaaatcgtccctggaaaatgagccgtcactgggacgcacccaaaagagtaaatcagaagtcattgaa

SEQ ID NO: 82520 - DNA, 122 bp, Homo sapiens
ccctgctctgttggtgggatgcactgctgagcattagagatcacgagtgaatatggctcccgtgcaatttagtgcggtgatgagtcaaactagacacaggctgggatctcaactccctcacc

SEQ ID NO: 82521 - DNA, 122 bp, Homo sapiens
ccccactcagccacctcctggccctgtgactttaggaattaactccatttctttgtgcctcggtttcctccgtttcctcgacggtaaaacagaaatacatggcactacccccggggccatgg

SEQ ID NO: 82522 - DNA, 122 bp, Homo sapiens
tgaacaagggcaacaagtgatcatcttagggttccttggtatttggggtgagaacagttccgttctccctgggtcagacgaaaggcagcatttggcctctgtgtcaggcctgccttttcttc

SEQ ID NO: 82523 - DNA, 122 bp, Homo sapiens
acaaagccagaaacaagttgacgggagaggtggtggcgcttaagaaaatccgcctggacacgtgagtggcctctgtacccgggactcctaactggggacctccttgattgtcccccccaacc

SEQ ID NO: 82524 - DNA, 122 bp, Homo sapiens
gcaaactgtccccaaagtgcagtagcgcttaagcctctccgggcccctagcacccatcgacgccgtctctaaggcacccagcacacccagacccatgcatcagcctctccgggggtcgctca

SEQ ID NO: 82525 - DNA, 122 bp, Homo sapiens
taggtgttttctccaatcaaacttacccagtcaagctgattcctcagaagcagccccagacgtttaactcgacggaaatgagaaacgacccatgaacccgtggccctttggtcgtcgtagtt

SEQ ID NO: 82526 - DNA, 122 bp, Homo sapiens
aacatctgggactcaggccctctcaggctggccacatgcccacccctttcccaaaacaaacgaatcagatactgtacagatgtctagaaacatcttttatttgggtaacaggtcccaaaaca

SEQ ID NO: 82527 - DNA, 122 bp, Homo sapiens
ccactctaacccaaaggggtgttccctggtgaggccctgctgagaagctagggttggtctcgcttcatctctgtgtcctgaggtttcttgagaaaggttggttgtgggcccgcagagggctg

SEQ ID NO: 82528 - DNA, 122 bp, Homo sapiens
gaaatggcaatttcctctcacaggctttggcttaaagaaggaggggtggatctggaactccgcctgccctgtggcaacctgggcatcagctacactgaagaaggccaggcaaggccagaatc

SEQ ID NO: 82529 - DNA, 122 bp, Homo sapiens
tctaggcaggacccgtgggctggggtggcccgaggccctccgcagggctgcactgtgctccgtggagactccccagcccacctgtccccgaccccagcagcatcccaggcctcagctgtagg

SEQ ID NO: 82530 - DNA, 122 bp, Homo sapiens
gagtctggagggacggctggagtggagtgtgtgggacctgaaggtggtcgtaaggctccgcgtgcggctcgtgcccatggcgactgcgcagaagacaggcggggttttttttctccctctaa

SEQ ID NO: 82531 - DNA, 122 bp, Homo sapiens
ccacctgcaggctctgctcagggtcgtcgctcatgctgcgggcgggagggcgggctgagccggggcacagggcgggagcggggacgcgggatcggctctcggggaaggaccgaggcatcggt

SEQ ID NO: 82532 - DNA, 122 bp, Homo sapiens
tggtcccacatccccactttcagtgcatcccccatttcagtgcaggatctttaggggtggcgagtaccttgctaaactatgtcctttgcagggtttaacacagtggtaggggatgctcatag

SEQ ID NO: 82533 - DNA, 122 bp, Homo sapiens
ttcaggacgggcccagggagccggcagccccccagtaccactccagtaagtgtgggggcccgtggcgggcggaggcctcgctttcctgggagatccctcctgtgctgacgcggagtcacgga

SEQ ID NO: 82534 - DNA, 122 bp, Homo sapiens
gcggtggaggcaagtcctctgcggggcggaagtcttcagcctagtgctgttagggaggtccgctttccggtcccggcggcattccgcctcagacggggttttagggttccgctggcttaaga

SEQ ID NO: 82535 - DNA, 122 bp, Homo sapiens
gccgaggttcgcggctctccaagcagccgtccggtagtcccggcacgatgcattgaaaaccgtttctgttcccagtgaactgcagcggtggcctttggttatggcgtaccacacagccataa

SEQ ID NO: 82536 - DNA, 122 bp, Homo sapiens
gtcccctccctctcccccatcagcccccccctcggcacttcagtccggggaacagcggtgcgagctccaggcccatgcactgaggaggcggaaacaaggggagcccccagagctccatcaag

SEQ ID NO: 82537 - DNA, 122 bp, Homo sapiens
cggagatgccgttacaccccacgtgatccctgcgcccggccagtccttccagaggcgtctcgcggggtgttaattaaaggtcacaacaaaacagacctgctggctcaccagaagaaatgtcc

SEQ ID NO: 82538 - DNA, 122 bp, Homo sapiens
caccactcactcatttctgcatgtgtaaatgggttgttgggaagactgaggtaagccatgcgtaatacttagcactcagtctagcctacagtgagcactagatattatactctcctggttta

SEQ ID NO: 82539 - DNA, 122 bp, Homo sapiens
caaggagtgtatgtggcagaggtgaggggtagagggtgagaaagaaatatagacaataggcgacagacagctgtgtgcattgtcacaacctccctgtggggtaagaggattatcccctcttt

SEQ ID NO: 82540 - DNA, 122 bp, Homo sapiens
tcctgcctccagaggtgcccctgctccccactgtggccctctttagacagagtaggagctcgggctacccacatgcagcccagcccttagcacccaagggcctgcctgtgccccactctctg

SEQ ID NO: 82541 - DNA, 122 bp, Homo sapiens
tccctggagctcccaaggtctccaacttcctaaggcatttggtggatgccagataagccccgccttaaaaccagagtttagagagcatcttcttcaggtacttgttgtccatcagtgatata

SEQ ID NO: 82542 - DNA, 122 bp, Homo sapiens
caggaagggccggcacaaagtggacggccccagagtgcagcctaaaggccccccatctagcgtttcagacaccgccaacaagtggtgctgcccacccaggcgtgcaggtagaggcgctccgg

SEQ ID NO: 82543 - DNA, 122 bp, Homo sapiens
gagcagggaaagggggtgccaaaatgaagcatcattcacgtccagtcacatatgcagagacggggcaaacgtttgatgcaatcttgggtctcgctgctcccggggccgacaccgcaggcgat

SEQ ID NO: 82544 - DNA, 122 bp, Homo sapiens
gctgggtgtggtgccatgcacctgtagtcccagctgtttgggagcctgaggtggaaggatcgcttcagcctgggcagaggttgtagtgaactaacatggtatcacgtcactgtactccagcc

SEQ ID NO: 82545 - DNA, 122 bp, Homo sapiens
agggccatggccgaggcggctgcgcctccggtaagggcgaccctcatggaggcttggggacgtggagccgagtcctgaattcgccaggaggatgttccaccccccaccatctccggcgacct

SEQ ID NO: 82546 - DNA, 122 bp, Homo sapiens
tcaccgggaagggggacaaactggcctctgggtgtcgacttcaaacttgccgcccgtctccggtctggaaaggcaggtgatcagctagaagggtgataagagtatcatcgtggctcctaaag

SEQ ID NO: 82547 - DNA, 122 bp, Homo sapiens
tccctctaacgaatgctcctgttaaacacgtgaagtgacagataagcattgggcccagcccggggaagtccccagcccccagcaactgagggcagttggaggcacagagtgacaaagttcag

SEQ ID NO: 82548 - DNA, 122 bp, Homo sapiens
atttaaacagtgtgaaactcagcaacaggactcttggattctggacaagacacttcatgacgaactcagggacagagcaaagttcacagaccaggatttgtggcaggatcccagggcacagg

SEQ ID NO: 82549 - DNA, 122 bp, Homo sapiens
gagtggcggcaaccggcagcgtccagctcccgcacctcgctgcacatcgcacctgagccccgccgcgaccgcatcgcgctcgctgcgacccattcagaccccccagaaacgccaagccgctc

SEQ ID NO: 82550 - DNA, 122 bp, Homo sapiens
cggaggcacggggtagcccccgggtcctttgcggccccgcgcgagcggcaagttccggcgcggcctgtgtcgtcgccgctactcactgtcatcgctgccgtgcctcagccacttctggtcac

SEQ ID NO: 82551 - DNA, 122 bp, Homo sapiens
ctgccggattctcagtacaacgggaaccccgagtccgtgggctacaggattaagtactggcgctcagacctccagtcctcagcagtggcccaagtcgtcagtgaccggctggagagagaatt

SEQ ID NO: 82552 - DNA, 122 bp, Homo sapiens
gagagcagagagtggaaatgttccaggtataaagacccacaagataaagaagctcagagtcgttagaaacaggagcagatgtacagggtttgcctgactcacactcaaggttgcataagcaa

SEQ ID NO: 82553 - DNA, 122 bp, Homo sapiens
gcctctcacactccgcggcttcaccacccacctggaggggactagaattcgaagtgcccgcgaaagaagcaaggttcatctccgcccggctttaggacccgggggctccggaaaaagtcatt

SEQ ID NO: 82554 - DNA, 122 bp, Homo sapiens
tgctccacgtacagtggaaacccaccaagggtttcaagtaggggcatgatatgtgtgatccgctctacatgtggctgagactgctgtgtaacctccagagtccactctccccttcctccttt

SEQ ID NO: 82555 - DNA, 122 bp, Homo sapiens
gagcccgcggttgccaggagttggacctgcagtagtatgggaagctcacggcctaaataccgactgccctctgaccccaccgtccagcgattctagaacatttctagtaggaaagacatagc

SEQ ID NO: 82556 - DNA, 122 bp, Homo sapiens
ccggcgccggcggtgtgcggcaggcaggagcccccacaatcatctgacgagcccacagtgcgcccggcggctgcctgggcgtcatcccgcgcgagcatccgcaggctgggctgggagagggc

SEQ ID NO: 82557 - DNA, 122 bp, Homo sapiens
cgcgtgcacctgctctcgcaatcaccgactgcggtcagcatcttccttagagcagcgccccgggccacttggatcccggtctcaatttactaagcgaacccagaggatgccccgagtcctgg

SEQ ID NO: 82558 - DNA, 122 bp, Homo sapiens
caggaagtctcagcgagctcacgccgcgcagtcgcagttttaatttatctgtaattcccgcgcttttccgttgccacggaaaccaaggggctaccgctaagcagcagcctctcagaatacga

SEQ ID NO: 82559 - DNA, 122 bp, Homo sapiens
aggtcccacagcgtgggcgtgggccgtttgcacatcctcttcatgtccgggctccttgtgcggatgagcagatggaggcaggatgctcagtgttctgttcccactttaatgagttagcatct

SEQ ID NO: 82560 - DNA, 122 bp, Homo sapiens
tccttgttttccgggtcttgcgcctctgaagcgaactaggcctggaggagtgctgggggtcgaggaaacagggttggggtgaccgagggacaggtggggcgggcacctgggccccggtcgag

SEQ ID NO: 82561 - DNA, 122 bp, Homo sapiens
tggggaagtctatttggggcgagtgctttatatatagcccgaggggatgcctgctgagaccgagctgcgggggctctcggtctggcgcggactgtgtgtcctgaatgagtgtacgtgtgcgc

SEQ ID NO: 82562 - DNA, 122 bp, Homo sapiens
ctcccctgtgagggtgccctggcgggtgtgagcccggcgggctggagaaccgggtctcggcgccgcaggtgggtgaccgtcctccccctccttccctccgggggcagcctcctcgcggcgtg

SEQ ID NO: 82563 - DNA, 122 bp, Homo sapiens
agctggggcccgggtcccgggctggtccgagcggggacatgagccatggcgtggtgagggcggcaaagggccgaagtccaggaggaggaaggcgagcgctggcgcaccggaggctgcggact

SEQ ID NO: 82564 - DNA, 122 bp, Homo sapiens
gggggagggtgtgtagtggcagacggccgctgggattatgaatgggggctggggggccggcgagtgtggggttcaaaccaggattttcggtctctggctttggataggcacgcagggctgtg

SEQ ID NO: 82565 - DNA, 122 bp, Homo sapiens
aaggataaaggtatgacagctcacacaagtgcttgttctgggcctgtctaaattcatcaccgccctgtattattcccatttgactgctgaggcacagggaaggtaggaaacttgtccaaggt

SEQ ID NO: 82566 - DNA, 122 bp, Homo sapiens
cttaatatttttataacctcatcaacaaacagtgagtgtctcttgtaagtagcgtactgccgaaccttagtcagagaagacatgacatagttttggtccatgaagggttttcaacccatttg

SEQ ID NO: 82567 - DNA, 122 bp, Homo sapiens
ttcgatcaactggaaggcgatgacccagcatccccaaaagggttgttagaaagccacccgcgtccttcaacactggaagtccctccctgggggtcaggacccggagtcttccactgtagagg

SEQ ID NO: 82568 - DNA, 122 bp, Homo sapiens
tctgttttcctgctgtggtattggcaggaatctctgcgtttgaatcgtgcattgtgtgggcgcagccgtggggaagcaggcattgcgcagcggctcagggtgaattatcggccccatggagg

SEQ ID NO: 82569 - DNA, 122 bp, Homo sapiens
gttctattttttaaaaaatttgctctagtatttgtttatctcctgcaacaaggaaaatttcgctatttggctttggctgtttgaaggcttttgccaaatgcttaacaatctgtagggtttga

SEQ ID NO: 82570 - DNA, 122 bp, Homo sapiens
tctcaccttcccccggacaaggtttctaaggcccgggaagcatcttctgcttccgaggcccgaaacagtggcgtttcctcttccccgagcactcagcctccatctggctttctgtccaccgg

SEQ ID NO: 82571 - DNA, 122 bp, Homo sapiens
ataaaataattataaagtacatttaaaacttttgctagcccacgtcggcttaagcctcatcgctcttcatcactggagcaggcgatgctcaggcctctgtagcagtgggctgcgtttacaca

SEQ ID NO: 82572 - DNA, 122 bp, Homo sapiens
ccagcctgggcaacatggcaagacacctgtttctacaaaaatataataaaattagccaagcgtggtggtgtgtgtctgtagtaccagccacttgggaagctgaggcgggaggatcacttgag

SEQ ID NO: 82573 - DNA, 122 bp, Homo sapiens
tagttgtttatgactacaccagaatcagtttcttcaattcagacactgtcttttctgttgcgagtgtttaaactgaagtgatgaatcctggtgttgactcacttactagaatgaataattag

SEQ ID NO: 82574 - DNA, 122 bp, Homo sapiens
tgggctccaccgagttccgcttgcgtcaggcgccttcgcccctatagcggggcggccagccgcgcacgggcgagttcatctccaagtcactttttgtaaacgccccgcacagcctggaccgg

SEQ ID NO: 82575 - DNA, 122 bp, Homo sapiens
ggaggcgatgcctacgtcaacgcgggctcattctgagaaaaactttctttagcttgtacgcggggtagggggagcagtgagcaaagaaagacggaaaccccaggggggtggaaaaagccaga

SEQ ID NO: 82576 - DNA, 122 bp, Homo sapiens
aatggccccagggctccatgagcgccagcccgaaacagcagcgatggcagggcattgctgcgttggttttctcatacctgaagaagcattaactcctccagaagccttttgcagagaagtca

SEQ ID NO: 82577 - DNA, 122 bp, Homo sapiens
gccctaaggtctgaagttccagccttcaaacaggatgtgggcagaggcctccccttgcttcggtaataaagtagatggatggctgatagggagggcccagcagtccctgacggggaaatagt

SEQ ID NO: 82578 - DNA, 122 bp, Homo sapiens
cacaccggcagggcagctgaccacacttagcactctcagagccagaattgccatttagctcgaggcgctgtccggaagggtctggtgtgggtgggcagacagaggaggggcagttcagaggg

SEQ ID NO: 82579 - DNA, 122 bp, Homo sapiens
cgacctggtctctctggggcggcgttaagagggccaccgagtttctccagtttcttttctcgctacctccttcccgcccccgcccagctccgcggctccagacccactcgggagctcgctct

SEQ ID NO: 82580 - DNA, 122 bp, Homo sapiens
ctccaaagcgctgccgggctcccccagcccacagcccccccacttatatagctgcggcggcgctggctccgggcttccgactccccgggccactgccattttgggaggccccggccctgccg

SEQ ID NO: 82581 - DNA, 122 bp, Homo sapiens
gccttatcagttacaaacccaaattcagaatcatgtgacagctggatacattcaactgtacgtacaaataatgatcaaaaaacacaaaagttgggtagtggttaccatagcttttactgtag

SEQ ID NO: 82582 - DNA, 122 bp, Homo sapiens
tcattctgtatagcatctttctccacctaccaaatggggggccgtgccatctctgcctctcggtgaggagatattacgacacagccagtgagattcacaaagcaccttgcagagtgggccta

SEQ ID NO: 82583 - DNA, 122 bp, Homo sapiens
tttcaaaacactctaacttgccagacactcctctgatcattggtgtctattagctgataacgttctctttcgatgttgttaagtgtgctgagttgccacaaagttgtcaagttacaatcctt

SEQ ID NO: 82584 - DNA, 122 bp, Homo sapiens
gttagggtcgaataccgaggtcagcaaactctttctgtaaagaggcacgtagtaaatattcggctttgcagggcgtaagttctctttggcaacgactcaactctgcattgtggcatgaaagc

SEQ ID NO: 82585 - DNA, 122 bp, Homo sapiens
cccccagtgtgagttattgattccggccgtgagagcctcctccagcccccacccccaccccgggtctgctccagcccagccccctgcagctgccctcggcctggcagtgggtgccatgccgc

SEQ ID NO: 82586 - DNA, 122 bp, Homo sapiens
tgatggtcacaccaccatgggaagaagattgtcagtactgggagctaccaccagccaagacgccacagccaccatggatgctgacgcatctttgctgctattactgaatgctactcatgttt

SEQ ID NO: 82587 - DNA, 122 bp, Homo sapiens
gaggttcagggaggtgggagccttctcctccaacttaaaaaacagcaaggtggggctaggcgcagtggctcatgcctgtaatcccagcactttgggaggccaaggtgggtggatcatgaggt

SEQ ID NO: 82588 - DNA, 122 bp, Homo sapiens
ttttgttcctatgttttctttatcatgaagcatacagcacagtcctacacacatatcaaacgtttgataaacactttggtgcattacactcatttgtcgagttagtcagtgtatcaaagatc

SEQ ID NO: 82589 - DNA, 122 bp, Homo sapiens
atgcagaccgcacccaggagctgcaactgcgcctttcgggtggggacgcaagacaggtagcgatccaggtagttcatggccagggggaagacttcctcctcacagcgctgctcctcacatac

SEQ ID NO: 82590 - DNA, 122 bp, Homo sapiens
ctcccacagcacacgcctcccaagtgttgacttttgggtcactgggacaaagcgtccccgcgaggggatttgctggccctctgagatttaactggaaacccgtctcagtgggaatcagggca

SEQ ID NO: 82591 - DNA, 122 bp, Homo sapiens
tctacattcctgtaagtaccgagctttagctctcttttgtatcatgcgtatttcacagttcgacctggaatttgaaaactgttaatgattcctgcaatctgtggaaatgttggtacaaagtg

SEQ ID NO: 82592 - DNA, 122 bp, Homo sapiens
gcattcggccttttgtacggggtcagctcattgggcggatgagaaggtgtccccgcctaccgccccgaactggccaattgcaaggggtttcacagggcgctgaactcgcgggagcgtcaccg

SEQ ID NO: 82593 - DNA, 122 bp, Homo sapiens
gttgttccgtggattggaatcccccgaggatcaagggctaattgttgagctcaagcttcccgggcagcggaaggaaggcgctgccggggattcaccttggctggggcgcgcgcggagcactg

SEQ ID NO: 82594 - DNA, 122 bp, Homo sapiens
tttgaaactatgggctacaaagtactctgccagatttaggacatggcccaattctttattcggaccggaggcaatagaagaaatgttacattgtaccattactccagtgttacccagagttt

SEQ ID NO: 82595 - DNA, 122 bp, Homo sapiens
tgcttggcccaatactgaacatctagggttaaatgttcttgcatacaattagaaactgtccgtaagatgttggcagcagggcctgaaacactctgcttctttgcagagcattcgagttaagc

SEQ ID NO: 82596 - DNA, 122 bp, Homo sapiens
ttatttttcttctacaagacttttggtcagttagttcatctctttgcacatcagtttcctcgttatgaaatgaagagaattagagtaggtaccttattgagttgctatgcatgctgaaataa

SEQ ID NO: 82597 - DNA, 122 bp, Homo sapiens
tttctctacatgtgtgacatgttctcaggactcaactttttcttttaggtttggaagacccgcagtaagtgtgctttagaattaaatgggtgggaaggggagctaggcaaaacacctcgcac

SEQ ID NO: 82598 - DNA, 122 bp, Homo sapiens
cagtcccatccggaccacacacacggggcaggtgctggggagtcttgtccatgtgaagggcgccaatgccggggtccaaaccttcctgggaattccatttgccaagccacctctaggtccgc

SEQ ID NO: 82599 - DNA, 122 bp, Homo sapiens
ggccagggccggtcttggcaggagaacgtgtctctggctgacatcctctccctgcgggaccgcggcctcagcgagcaggaagcctgggccgtgtgcctggagtgcagcctgtccatgcggag

SEQ ID NO: 82600 - DNA, 122 bp, Homo sapiens
ccggtcctgcggccctccccgagcaggagtccggggacccaggccccaaggctgggagagcgccaggcccctggccggctgcgctccgatgatctccaggacttaaggcgagtgagctcagc

SEQ ID NO: 82601 - DNA, 122 bp, Homo sapiens
ggaggccgccgtccaattcttggtccagagccaggacgtggtctttggcctcgaggccatcgaggctcagtacaagtaccagacaacgcgcgtcagaagcaagggcggcgtcctcgaggtgc

SEQ ID NO: 82602 - DNA, 122 bp, Homo sapiens
gcagcccccgtggtgttgccacagccgcccaggagagagaggatggtgccgtgagccctccgggtgtccacctgcgaggacaggaccctccccacgggggcagcctctccccccacaagctc

SEQ ID NO: 82603 - DNA, 122 bp, Homo sapiens
agatttaagggggaactgactcaattctcactaaaaagtcccttagtattccaatgtggacgtagagagatctatgaaacaaggtcacttcacaattctcttgctttcgcgttagaggatct

SEQ ID NO: 82604 - DNA, 122 bp, Homo sapiens
tgacaaaaacacccctgaacctatagaagctgggaccctgctcagtgctgaatctttccccgaccctcctgccaaaagttgggctacatctgcccaggcaaaggccagggctacatgcacat

SEQ ID NO: 82605 - DNA, 122 bp, Homo sapiens
gcctaatgtgtccgtcaggcagagagggtaccactgtatgaacgggcaaaaccctggagacgtgagccaggcccttctcatggggatccaactccagaaagtgatgaaaaaccagtgaaggg

SEQ ID NO: 82606 - DNA, 122 bp, Homo sapiens
atccctgagcgtgtggcagcagtgcggtcgtggtccctccctatgcagcctggtttctagcgtgacacgcccttgacttgaggaccatgaaccgcagccgccaggtgacgtgcgtggcctgg

SEQ ID NO: 82607 - DNA, 122 bp, Homo sapiens
atggaatggtgaaaaacccacaggatacttgtctgtgctgtgtggcagcagagttcttttcgtccctacctggactttggctaggggtgtaccactgtctgggtgggaggttgaggctgggg

SEQ ID NO: 82608 - DNA, 122 bp, Homo sapiens
ctcaggtgatccacccacctcggcctcccaaagtgctgggattacaggcgtgagccaccgcgcctggccagaccacccccatttttacagatgaggagagtagttaagactgacccaaaata

SEQ ID NO: 82609 - DNA, 122 bp, Homo sapiens
cggtcctccccctcaccccccccagtccgagcgccgccgccgccgccgccgccgccgccgcggccgctcagtaacacgtccccaggagactcgcaggagcaacacgtgatgtgtctacttat

SEQ ID NO: 82610 - DNA, 122 bp, Homo sapiens
cgacgcgtctctccagcccgggatccggggagctgggctgtccccagaccgacgggacagcggcatctcctccacctgaaaaggaaagaggaccaggtgggggccaggcagggcgcatgaag

SEQ ID NO: 82611 - DNA, 122 bp, Homo sapiens
tcaaaattccaggatcaggtatatttttacttctgaagattgcatgctcatatgatagaacgagaattcaaatcactggctgatttgggttgataagtcttcaagctagaatgctgcctatt

SEQ ID NO: 82612 - DNA, 122 bp, Homo sapiens
gcagagtccgcgggcacgcggtgggcgagggacagtgcaggtgccgggtgcgggggtctccgggacagtccccggcacgcgctggtccgccgtggggccctgcggtgagcggcgccccctgg

SEQ ID NO: 82613 - DNA, 122 bp, Homo sapiens
gaaatgagaatatctacttaactgaataatatagaacatattaaaaaatcctgtggagtgcggctatagtagcgtttacaggaagtgttgcagctttgtttctggctatttactgtaatgca

SEQ ID NO: 82614 - DNA, 122 bp, Homo sapiens
ttttattttttttttctattttgtagagctggggccaccccatgtttcccaggctggtctcgaactcctgggctcaagtgatcctcccaccgtggcctcccaaagtgctgtagtcccaaaag

SEQ ID NO: 82615 - DNA, 122 bp, Homo sapiens
gggcgggagcctgaagcagccttacccaggaattgcaggggttggggtggcgagcagtcgcggcgcctcagcctaagtggcttttaggggcagctgccgggatatgggcacccagggggcca

SEQ ID NO: 82616 - DNA, 122 bp, Homo sapiens
agcccgggatcgcccgcaccttcccgtgggcggaagcgcaggagccggctggggagggggcgccctagagaagcggctagaaagctgagacggggaactgaggtcatcctgggggggacaag

SEQ ID NO: 82617 - DNA, 122 bp, Homo sapiens
ctgctgctgccaccactcctgtcagcaagtgctcagagcaggtgggaggcacagattgtccgtgggagggctccagtgtctgggaagagggcaggcggcccccatgaatgtcctcggaaggg

SEQ ID NO: 82618 - DNA, 122 bp, Homo sapiens
taggacgcactggaggggcctccaagacccagaaacttgagcccgggcgcgatgccggagcgccgcgcagtcgggccgctgcagcccacgcgccccggaaagtcgcccctgtggaccgagcc

SEQ ID NO: 82619 - DNA, 122 bp, Homo sapiens
tacttggaggcattccagcaaagcagggaagacctctcagaaatattcaagaaaggttcacgcatcagggaagggaaggaatcagagaacttctttggtgcctttcaaatagaaaatttgga

SEQ ID NO: 82620 - DNA, 122 bp, Homo sapiens
tatctccctccgccatcgtctcggggatgcagtctctacaagcgcaggccacctccccaacgagtcctccaaccgaaacccgcacaccaaccacaacccgagggaacgccccgcaggctgct

SEQ ID NO: 82621 - DNA, 122 bp, Homo sapiens
tttccccccttgcaccagcgccgcctcaaatgtcagggctcgcccactcttctccggtctcgccgacataaccttttgggggctccagaggggaaatttgccgtttctgccggaccgctcta

SEQ ID NO: 82622 - DNA, 122 bp, Homo sapiens
atcagacccctgtagcgttgaagccagcgctcgtttaattaatgcaggtgggaacgctgtcgccacagtttgcagtctattcattcagaataacccgccagtcagccgactgctcagagctc

SEQ ID NO: 82623 - DNA, 122 bp, Homo sapiens
gtggggcccagaggatgggatgggcagtaggagttggagcaggtcctgcacgccagagctcgctctcctgaagggaggcgaggaggccagggggccttttccagaagtttgaactctgaata

SEQ ID NO: 82624 - DNA, 122 bp, Homo sapiens
gcccaatatgtctcatagattcttcgctggacattagcactaatgtaatttgccgaggagcgcaggcctctatctagaaggcggccggggccctctgcggatcagggcgctttcccagtgcc

SEQ ID NO: 82625 - DNA, 122 bp, Homo sapiens
cgtttgagaaacagcctcctccacacggccagggagagcctgctgcgcgctgaggtggagcggcacagaagcctgtatttggcagggccctaaacacgctgtgactgtactcatgtctgagc

SEQ ID NO: 82626 - DNA, 122 bp, Homo sapiens
agccctgccccgggtcctgaggttgacgggggacctccgggagggcagcagcccggggatcgccctgctcaccgggacctaagcagagcgcctgcccgagaatagggagacacgcgggaggc

SEQ ID NO: 82627 - DNA, 122 bp, Homo sapiens
gtctccattctcatgtccctggttgtatccccagggctcatttcctgtgcaggaaactgccgcaaggagctgtctatcagtacctcttctgaagaatcgaaatagctgattctgtatgcacc

SEQ ID NO: 82628 - DNA, 122 bp, Homo sapiens
aaaaggaagagaaaacttgctaagtggagagccaaattcacctcgccccacatgcagccacgcccaaaactcccatgcccacccaacaagccatgtcttttgaaccatgctatcaccccgaa

SEQ ID NO: 82629 - DNA, 122 bp, Homo sapiens
cgctctaaacacaggaaaagacctgaagctttaattaaggggttacatccaaccccagagcgcttttgtgggcactgattgctccagcttctgcgtcactgcgcgagggaagagggaagagg

SEQ ID NO: 82630 - DNA, 122 bp, Homo sapiens
cctctgtccctctgtccctccgctgcagctgtgggtgggcatgcctgcctggtatgtggccgcctgccgggccaatgtcaagagcggtgccatcatggccaacctgtcagacacggagatcc

SEQ ID NO: 82631 - DNA, 122 bp, Homo sapiens
tcacttccctggtctaaccctaggtcatgtcattgtcgattgccataaccccatccacttcgagggtcacactctccaatcacctctaccatccctccctctgctaccctttggtacctgtc

SEQ ID NO: 82632 - DNA, 122 bp, Homo sapiens
tacagcattataacttcttttgtgatgttcttgtatttcgcttgtaactctttctccatgcgagtacgtccaccatgtccaatgctgagatgtgtattatgcagaatgtcaaataagtcctc

SEQ ID NO: 82633 - DNA, 122 bp, Homo sapiens
gattgggaagttcccgtccactctgaatttcctgctgatgggttcctcggggtccacccacgggcctcagccctgccaccaactccaaggcctgttctgagaaagggctttgtgagtctgac

SEQ ID NO: 82634 - DNA, 122 bp, Homo sapiens
tcttggagagggacgcgtaggctacgccaccgcggacgggtcggatccggtccctggacgcggaacagagatcccctgattcagccacccccagactgagccccgtagagtgcgttcttacc

SEQ ID NO: 82635 - DNA, 122 bp, Homo sapiens
caggactcgggcggcccggcggctctgcccaggccgggcaggctggggagtggagggccccggctgagtcttcctgccactcctctgggccatgcctttgtgccaccttcccgcgccgctcg

SEQ ID NO: 82636 - DNA, 122 bp, Homo sapiens
tcattctttaggcagcgggaacatcctccactcagggttcgcctttccacctacggcgtccggggacgcaggaagtaaactaagttgtttctatggcaacgcacagctttggcggatttagc

SEQ ID NO: 82637 - DNA, 122 bp, Homo sapiens
aggctaaacaatggaacatccaacctgaaaatgacgttgggatagtgtcccgatgaaatacggatttcattctagaaggagttcttttggtagcaaagataggcatgaagctgaacattgct

SEQ ID NO: 82638 - DNA, 122 bp, Homo sapiens
ggaaggggagtggtggcggctgcggcagtagggacagcaggagcagtggtgctgtcagcgcggccgtcggagacatgggagacccggggtcggaagtgagtagtcgagtgagggtcctggcg

SEQ ID NO: 82639 - DNA, 122 bp, Homo sapiens
gtcccaagctgagacttctttcttgattaacacagggggagcacctggggaccacggaagcgaccgaggccttctttgccatgaccaagctctttcagtccaatgatgtaagtgcctcaacc

SEQ ID NO: 82640 - DNA, 122 bp, Homo sapiens
gcgggtgagtgtgctgagagtcaggggcggacagggctgagccttggtctgcctcccctgcgggtcaggtgacctttgccctcgctttccctgcagagctgtgggacacctggaaggttgct

SEQ ID NO: 82641 - DNA, 122 bp, Homo sapiens
acaataactatcttagaaaggcttaagaaaaatattgtaaagaaccttcagtataaaaagcgtagatgaactttgtgaatgtatgccattgattgaataccttttgatcttactgtgcatac

SEQ ID NO: 82642 - DNA, 122 bp, Homo sapiens
cccaccggtcctgtgtttccatggcctttccccgggtaggggcctttcttttcctagcttcgctcagttccctgctacattgtcgcctcctcgcagaagccgtctctggccgttccgtatcg

SEQ ID NO: 82643 - DNA, 122 bp, Homo sapiens
acagcgggcgggtcctggagcggctcgggagagcggagggtcggcgagggtgcctgcgcgcggctgggcctggggatgcaggttccagcctgcttgcgcgtctcacctgatttaggagcttc

SEQ ID NO: 82644 - DNA, 122 bp, Homo sapiens
cctcggcgacacagcaagactcactctcaaaaaaaaaaaaaaaagtccaaacaaaatctacggatgagccccagaagctcattttgcccagggactacagtctccccatcccatgaatgggg

SEQ ID NO: 82645 - DNA, 122 bp, Homo sapiens
aaataagaaagaaaaaaaattagctcggtagggtgatgcacacctgtagtcccatctactcgtgaggctgaggcagaaggatcaggatcacctaagtccaagaattggaggttacagtgagc

SEQ ID NO: 82646 - DNA, 122 bp, Homo sapiens
gccaggatccttccagctgggaagcaaagaaagcggaggattgtggggagagtggataggcgaagctgagtagctctggtatgacacagagtctggatctgatacagatattaaataaaagc

SEQ ID NO: 82647 - DNA, 122 bp, Homo sapiens
ttgtgaagctaagtgctgtgagggaaaccagaggcagctgagatgtcgtggaagtaacagcgaatgaagccaggatgctggattctgaccttggaactgttctgagtaaatcacttttctca

SEQ ID NO: 82648 - DNA, 122 bp, Homo sapiens
aggtgttggggtcgctgatgggttgggactcgggagacttgcggaacctccaggagctgccgcgtttagagcaaaagttagctcttttgctcttttccagcgcgctttccccgctcagccga

SEQ ID NO: 82649 - DNA, 122 bp, Homo sapiens
aaataaaactcagtgtctgcgtagggacctcatggtcttgaaacatgcataaaacagaaccgagggaggaaggggccacacacatctttataagctcagtttcagagctgagccgcacgtgc

SEQ ID NO: 82650 - DNA, 122 bp, Homo sapiens
gccgtggcgaaaggggcggggcgttgatgggcgggggcggggctcccggaacccgagctgcgggcgaagaaaggctccgagctccgagctgccctagcccgggagggcgccgctgctctgcg

SEQ ID NO: 82651 - DNA, 122 bp, Homo sapiens
caggacagtgggtgcagtgcaccatgcgcgagccgaagcagggcaaggcattgcctcaatcgggaagcgcaaggggtcagggagttccctttcccagtcaaagaaaggggtgacagacggca

SEQ ID NO: 82652 - DNA, 122 bp, Homo sapiens
acatgacagagagagccaattggaggaggggctgctgccagcccaggaggggtgccttcccgcagcaggcaggacagaccaaagctactatcacaaggcatggctgcccagacttggccaaa

SEQ ID NO: 82653 - DNA, 122 bp, Homo sapiens
aaagcaaggcagcgaaagcagatttattttaaacaaaagtacactccacagggtgggagccggctccagcaagctacccaagagctgttggttacagaattttctagggtttaaataccctc

SEQ ID NO: 82654 - DNA, 122 bp, Homo sapiens
ccgccacagcaaggaggaccagtgcagacacaggcacagacacgcacactaatgtgtatacgcacacacacatacatgcagacacactgatgtgtacacacacaggcatagtcacactaata

SEQ ID NO: 82655 - DNA, 122 bp, Homo sapiens
gtggggtccctggggaagccactttgcctaaaggctagggacaacctaagcagggcaccacgcatggtcagggctgggtgtgtgggcaggctccatgctggggtgaccctgatggggcctga

SEQ ID NO: 82656 - DNA, 122 bp, Homo sapiens
gggaccaacaaagagtcttcccgacctagccatcttggggggctccccgaggggacagtacggaccccagcccgatccagctctcctgaaagaggatggaaaggcgggggcagagaggccgg

SEQ ID NO: 82657 - DNA, 122 bp, Homo sapiens
cccgtctgggatgtgaggagcacctctgcccggctgcgaccccgtctgggaggtgaggagcgtctctgcccggccgcgaccccatctgggaggtgaagagcgtctctgcccggccgccccgt

SEQ ID NO: 82658 - DNA, 122 bp, Homo sapiens
gcggctctgacgggcaggacgggcaggacgggcagggcttccaggagagctcaagcactccgggggctccgagacagcctgagccctggccctgctgcttggtgaatcatgggggccaaaag

SEQ ID NO: 82659 - DNA, 122 bp, Homo sapiens
tatccaccgcacttagcttgtcctcgtggttcggggacctctcctggcgggaggtggtgccggaacaggttgggcggccccagaaccgtgaggggagaaggacgggatgagggaaactctgc

SEQ ID NO: 82660 - DNA, 122 bp, Homo sapiens
ggcttttaattctgactttcttatttgccatgtgaccttgggaaggctgtttaacctcttcgagcctcagtttcctaatctgtaaactgggggtaatacctgccttccatggtattacatgt

SEQ ID NO: 82661 - DNA, 122 bp, Homo sapiens
ttgctgtgagtgttacagctcttaaagacagcgcatctggagttgtttgttcctcatgtccggagttgttggtccctcccaatgcgtttgttcgtccctcccaatgcgtttgttcgtagtct

SEQ ID NO: 82662 - DNA, 122 bp, Homo sapiens
agctttattccgttgcagttgaggagctgcgttcctcagttggaaatgcagcgtcttctgcgtcgctcacgctgggagctgtagactggagctgttcctattcggccatcttggctcctccc

SEQ ID NO: 82663 - DNA, 122 bp, Homo sapiens
aaatcgtttccatattcaaatccagctggttgaagataaattacttctctgatgctcaggcgggggtgaaaagagcaagccttagccccaggaggggcctccagggagcctggggcagagac

SEQ ID NO: 82664 - DNA, 122 bp, Homo sapiens
gggcggcggggagtgacaggcgcttggtccggcgcggctttgcctggttgtaacaagcgtcgggacatgcggagccacagaagccgggctggccacatcatcaatcacggcgctgacagccg

SEQ ID NO: 82665 - DNA, 122 bp, Homo sapiens
ccgttccaggcctggggctggcagcctgggccccacgagggggcagaggccagagcccggcggcagagcccgtgcccacgcctcgctgctgccagcctccgcttggtcacgacacagccagg

SEQ ID NO: 82666 - DNA, 122 bp, Homo sapiens
gtgcactcgggcgagaaaccttacgagtgccagctgtgcgggggcaagttcacccagcagcgcaacctcatcagccacctgcgcatgcacacctccccctcctagaagccaaagacccgcgg

SEQ ID NO: 82667 - DNA, 122 bp, Homo sapiens
gtcctggctgcgcccagggcccccgccataccctgccgccactgcacaccctgccctgcgcgtctgcccctccaaggaccagcagcaagaaaccctaaacttgtgggcggtctctgagcttt

SEQ ID NO: 82668 - DNA, 122 bp, Homo sapiens
caggctttccactgtgtggttatgtcactttctcaaacaaatgtgtatatggagggagatcgatgctgataatgtttagaagattaaaagagcattaatgctggcaacaataacgtaaacgt

SEQ ID NO: 82669 - DNA, 122 bp, Homo sapiens
ttccgcatgaagctcaacacgcaggagatctttgatgactgggcaaggaaggtgcagcagcgcaacctcggtgtctcggggcgcattttcaccatcgaaagtactcgggttcggggccgaac

SEQ ID NO: 82670 - DNA, 122 bp, Homo sapiens
ttagggacctccgcccactctaccctcaagccaggatgcccggagctgtccccggaaatgcgtgtgcttcaggtgatttaactgattattgaataggcccgcaggaggtatgtcctgcccac

SEQ ID NO: 82671 - DNA, 122 bp, Homo sapiens
ggagcgcgcctcaagggatgcggggtacgagagaggggccgggagcccggggacccgcggcgcctgcctacccacctgaggctgccatgccgcggggcgccgctcacatccctggctcgctg

SEQ ID NO: 82672 - DNA, 122 bp, Homo sapiens
cagcatctgcttgcgtgaccctggtaaagcatgggcatgtgcggttcaggctcagagaggcgtggagtttagaaaaaacagcttaatagcaaaacattcactctttgtttcatggatggaaa

SEQ ID NO: 82673 - DNA, 122 bp, Homo sapiens
aggggtgaagaaaagtcgtcccgagactggtggtgagcgtccctgtcgccggcagtgtggcggagaccccgcggctgaccgagggcgctgagccgggcctggagtacgcgccctttgacgat

SEQ ID NO: 82674 - DNA, 122 bp, Homo sapiens
aataacacatccctccgccccatcatcctgcaatcctttagctggcagacaccagcatcccggggggacttcttagactccactctgagtttggctttgccacgctgtggtttcatcacgac

SEQ ID NO: 82675 - DNA, 122 bp, Homo sapiens
tgaccagctcagcaaaggctgagactgcccatgacctgaaggctccaggtggctttaaagcgctatgtttaccaactatcccggtgtcatttctctttttgtcagttttgctttttgacacc

SEQ ID NO: 82676 - DNA, 122 bp, Homo sapiens
aaatgacagatcattaacaagtgaaaattgaaagccgagatgaaaacctcccccaggaaacgtagtcaggctgctccattctccagagatgtaaatcaataaaataattccagagagcttaa

SEQ ID NO: 82677 - DNA, 122 bp, Homo sapiens
cctagcgattagggaaatctcgcgagattcaggtcctgggagcctggcaagcccacacagcgacggttatttagccgttgaactgccagccgcccggggcccacgcgctccgggccgctcag

SEQ ID NO: 82678 - DNA, 122 bp, Homo sapiens
tcttgagttgccctgagagcagaaaaaccagttaaaaatgttttactgaagaagccgaatcgagggactcatgagaggcagaactggaaaaccagatttgggagtaatcctcccagcaatga

SEQ ID NO: 82679 - DNA, 122 bp, Homo sapiens
aagtatttatttccttaattatttttagtggtgtttttataaatgcatcaatatcagtaccgtaatggaatagccatactgtttatcttgaactaagtaggtattgaattgccaggtaagcc

SEQ ID NO: 82680 - DNA, 122 bp, Homo sapiens
gcaagtgtaagaagtgcgaagggccttgccgcaaaggtaggaagcccgccggtgtgcggacgaggcttgttctcggctgctgaggctgggctctcatgccacctccaaaggaacacatcttc

SEQ ID NO: 82681 - DNA, 122 bp, Homo sapiens
aggcgggaccacccggcactgtagacagctgccctttacaatcatgactcatagaaactacggcactctggccgtggccgacgttgctcctccgaagcatggcgccggcgggagttgtaacc

SEQ ID NO: 82682 - DNA, 122 bp, Homo sapiens
atgggggaggagtcactaataagaatgagtggcagggacagggcggccttgtaacgccctcggtgttggaagggaagaccgtacagcgcgatggggaccagggcggcgggccgcagccaggg

SEQ ID NO: 82683 - DNA, 122 bp, Homo sapiens
ttcgatataagtaaaggaggctctgcattaagggcttgtccaaggcacgcagctgagaggcgctaggactggctccatttccatctctattctcactgactttgactacccagaaccccaac

SEQ ID NO: 82684 - DNA, 122 bp, Homo sapiens
cataggcagacagaccccgggccatgagaaaaactctcacactgggacccccaacccccccggtatggcccagcccaaagtcacactcacctgatggcttgcaaccatgggcccagcatcac

SEQ ID NO: 82685 - DNA, 122 bp, Homo sapiens
tcttaaaccaaataataatgttctgcctcacactagtaaatattttgcactaaaaaattccgtgtcattttgatttgttcaggtagacaagaacatcttttgtttgaggaagaactgaagag

SEQ ID NO: 82686 - DNA, 122 bp, Homo sapiens
cagctcccgcctcctcggggccattgtccctggcatgcggtggcagctgtctctggcacccgcaggaagccagtgtgggcccgaagataatcgtgcacccttcatttaccccaatttttcat

SEQ ID NO: 82687 - DNA, 122 bp, Homo sapiens
ttgagttgctatagcttgatgcagggacccagtgaagtttctccgttaaagattgggagtcgtcgaaatgtttagattcttttaggaaaggaattattttccccccttttacagggtagtaa

SEQ ID NO: 82688 - DNA, 122 bp, Homo sapiens
cgtggtggagagtccttcgaaacacagtttttgtcatatatgtggccatgttgcgacccccgatcccggagggagctcagtcgccaagacttgcattttggcagtttctgccctagaagagc

SEQ ID NO: 82689 - DNA, 122 bp, Homo sapiens
cttcgttcattcacgtcaccgacaaacactcctagcaggcgttgttaaacgttcagggagcgcccgggacctagccgaggccccctcctggctgtgccgcggggggatgcgcagcccctcgc

SEQ ID NO: 82690 - DNA, 122 bp, Homo sapiens
gatctgcccacctcggcctcccaaagtgctgggattataggcgtgagccactgcactggccgacctcaaatttttatgcctggagattagtaaagggcatggaataatgaaggggaactttt

SEQ ID NO: 82691 - DNA, 122 bp, Homo sapiens
agtgaaagtgtcatttcatttctctccctgcttttgaaactcgctgctggtaacacagatcggaaaaaagagaacgcccacagaaacccgagcgcgggggcagggtgggcgcgaagcagcga

SEQ ID NO: 82692 - DNA, 122 bp, Homo sapiens
actcagtgtaagtacagaataaaacctttttaaacatttaagatattgaaaacccatatacggatatataacggaaacgctccggccatcaaataaatttaagtagaagcaattgtaatttt

SEQ ID NO: 82693 - DNA, 122 bp, Homo sapiens
ggtgcatgcctgtcaagtcccagctacacaggaggctgacgcaggagaatcgcatgaacccgggaggcagaggttgcagtgatccaagatcacgccactgcactccagactaggtaacagag

SEQ ID NO: 82694 - DNA, 122 bp, Homo sapiens
gaagaagcctcctagtttagaggctggcaaggtaaaaggaggcacaggaaggccttcccccgaccccaactgactagtgtgtgacaggactgggacttgcaggccgggacagcacccccacg

SEQ ID NO: 82695 - DNA, 122 bp, Homo sapiens
atataatctctgccctcaaagagtttacaatctccttgtagtccctttgagactctgtctcggaaaaaaaaaaaaagaaaaagagtttacaatctactaggggaatctgaacaagtaaaaag

SEQ ID NO: 82696 - DNA, 122 bp, Homo sapiens
atactagtagaccaagtggggtggcccagcaaagcctgtccagattcttcttggcctctccgtgcagcatttcttccttcttgatatgggacaggaccttctctgcaatgcgggtcttatga

SEQ ID NO: 82697 - DNA, 122 bp, Homo sapiens
agtccacacctctatcatctcttgcctggactactatttaatgtaacagcttttaaccggcgttcttttctccatttttgttcccctacaatcagtctatactccacttacagtcagagaga

SEQ ID NO: 82698 - DNA, 122 bp, Homo sapiens
ttcaagtataagcctttattcaatccacaaatatttagggtacctactgtgtgccaggcacgtgactaaagcctatcatgcaggggtgaatgagaaggttagtgttcctgttattcagaggg

SEQ ID NO: 82699 - DNA, 122 bp, Homo sapiens
atgcaggcaaggtaaataagcaaggcaaggcattttcaagaatagtttttctcggccggacgcagtggctcatgcctgtaatcccagcactttgggaggtcgaggtgggtggatcacctgag

SEQ ID NO: 82700 - DNA, 122 bp, Homo sapiens
ttcggacccaagagtcaccgtaacactctagaaggggagaaaaggagcgagggcggcaggcgacagagaacctcgcgagtcagcggccccgcgcagacccccccaggcacggtcccctgcgg

SEQ ID NO: 82701 - DNA, 122 bp, Homo sapiens
catgtggcttcatggaccactcaccgtgcagtgcctgcaaccaccacccttgcgtgtccacgtcgccatcatctgaaagtcacaagtgagcctggctgcattccacccccagtgtcaggtgc

SEQ ID NO: 82702 - DNA, 122 bp, Homo sapiens
cagcacttcctgtacttgccctcaacaaagatggtgtcaacacttcctgtttagggttttcgccattaacaaagatggtgcttatggggcaggttccctaacagtcaggattccggttgcag

SEQ ID NO: 82703 - DNA, 122 bp, Homo sapiens
ggataaatgagactgtatctcgagcacctgggacggggccagattcctaggagggcttcacgagtgccagctgccttctccttcatgcctctgctcaagctggccacgatgcctttcctggg

SEQ ID NO: 82704 - DNA, 122 bp, Homo sapiens
tcaaaaggcttgattctttttgaaatgtctgtggtgatgggtgtgcagcgaaccccagctcgccggtggccgctcaccccgctcgcctctctctccctctggactcggtgctgaagccccag

SEQ ID NO: 82705 - DNA, 122 bp, Homo sapiens
ggcttcactcctgggcaactctcttgactggttttgtgattcctaagcactggctgggaccgaaataagtatcttggctgtcacatttcaaatctctgcctgtgctgagaaggcgctgcctg

SEQ ID NO: 82706 - DNA, 122 bp, Homo sapiens
ctgaattggctccctgtctctggtgggccccctcaagggcatgaactgggttttaacccccggagagtgtggcccaaacgtgaggctgcactgcccagtggttaggacatgctaggctttgg

SEQ ID NO: 82707 - DNA, 122 bp, Homo sapiens
tggtcagcatcacacatcataccttccctcggtcaaactcttcgtcccagtcatcaaccacggtctcagtccgggcctgtctgctgtcttcaatagcatcctgactgaccgccgacatcttg

SEQ ID NO: 82708 - DNA, 122 bp, Homo sapiens
caagagcagacccacaacattcctattatggctcctagttctacaaattataagcaggaacggaacggatttacaggcaatgagttcagctccttcttggctggagattctataatccaaga

SEQ ID NO: 82709 - DNA, 122 bp, Homo sapiens
tgaggctccagacctggatagagtaaggcttcagacccagttagagtgaggctacagacccggatagagggaggctccagacccgggacagagggaggctccagacccggatagagggaggc

SEQ ID NO: 82710 - DNA, 122 bp, Homo sapiens
cttaagtgcactgccaggaggccgggagcccagcgtgcgagcgtgaggtcagactgtgcacggtaccgaggactagttccattcctgagtatgaaagggtgaaaccgttcacctcaagtttc

SEQ ID NO: 82711 - DNA, 122 bp, Homo sapiens
cacagccttccctggtttaggggtttaggttggctcttgctgtggatttcctagtcccttcgtggcgttgctctttggttccagtaacaggaccagggctaaaaaggcgttgttaaggtgaa

SEQ ID NO: 82712 - DNA, 122 bp, Homo sapiens
tgggctttaaaaaggatggatttcaaatacactgtgcccactagaagcttcgaagggcctcgtccctctgctacagccctgggaggagccaggatccttgttggtctagctaaatactgtta

SEQ ID NO: 82713 - DNA, 122 bp, Homo sapiens
ttgtggcaaaagaaaggagcatcagaaccagcaagagtggaaacagcctgaaagtatcagcgtagactccacacccccagccccactctgggcagttcctctgtcttcggctgcggcttctt

SEQ ID NO: 82714 - DNA, 122 bp, Homo sapiens
aaaaccctaccataacttttattctgcaccatggaaacacactcggacagatttgcataacgtaaccttaaggctcagggaatccgaaagagtcccttaatatttaacagaatgagattatg

SEQ ID NO: 82715 - DNA, 122 bp, Homo sapiens
agaactgcaacccgccggtgcactgggaggagtgcgccctggggtggagccacggaagttcgtaccgtttccagcagagaggagcctggcccttcctcttcctgtgtagaacccgggatttt

SEQ ID NO: 82716 - DNA, 122 bp, Homo sapiens
aaacaacgtttaaggagggttggccatgggccatgaagtatgccaagtgctatgccaaggcgtatccttctcttgccaagtcctttttaacgaccctgagtggttactcatacagctcaggg

SEQ ID NO: 82717 - DNA, 122 bp, Homo sapiens
ggagcggccgcgtgaggcaccaggagcccacccggcgccgggcgggcgggtccattttgccgcacaagccgggctattggcaaactgcggatgggcaggtccaccttccttcgggggtgagc

SEQ ID NO: 82718 - DNA, 122 bp, Homo sapiens
gtgtctacctcctccccgggcgagtaggatgtgtctcgagtagggtgtctccctccttcccgggcgatgggctggactctggccttgccaggcggggcagtgctgtctcggccctggcgtct

SEQ ID NO: 82719 - DNA, 122 bp, Homo sapiens
cgaattcaccgaatgaccctgagcctagcagtgtgtcttgtgcaccgacggtcccagagccgacacgcacggacacgccgggctccacctgcctccacctcctgcgttctggtccccccctc

SEQ ID NO: 82720 - DNA, 122 bp, Homo sapiens
ccgcagcgtccgattgggcggaggagcgagctaggtcaccggagtccctgtcagccgtggcggcacctcccctggcccgcccccaaaggggaagctgcgcattttgattcctctgtatattg

SEQ ID NO: 82721 - DNA, 122 bp, Homo sapiens
ccagcctccaactaccggagctgcaagctggaggaatgcaaaataaataacaataaaacgcgcgggtgggattggttctttttattttctgaaaggagatgggactgaaaaaacgactttta

SEQ ID NO: 82722 - DNA, 122 bp, Homo sapiens
agttggggcagatggcttccgactgcttgctgttgcgtccccgagtatttatatttccctcgaattttctccactgcgccataatgtaaacatataattgagtaccccatgtccatccccaa

SEQ ID NO: 82723 - DNA, 122 bp, Homo sapiens
cccgccatccagggaaggggcggggcagggttcttggtccgccgctgtcgcctgcgcagtcgcagtgcggctcgtggccgcagctgcctgaaagggcaaagggacgagtatacgcatgcgtc

SEQ ID NO: 82724 - DNA, 122 bp, Homo sapiens
gtccgctcccaagctagggctgggctgttgcgcttgcgccaggggtcgcatgcagtcacgcgctgccgaccgcttccggtgcgccgcgagggccgccgggacgggtctccctggcgatccgt

SEQ ID NO: 82725 - DNA, 122 bp, Homo sapiens
cagagcagggagaaaggccccggtggccctgtcggctccgcgcggcgccctgcgaaaggccggccatgcgacacggaagctcctgcagaactgtcgccgtcgaaaagaaagaggccctcgcc

SEQ ID NO: 82726 - DNA, 122 bp, Homo sapiens
agcattggcaggaaggacgccagaggacaggggtcgcagagcatgagctttgggaggtgacggcatgatgaggcaacaaggagcctcctctggctgtggggctgcccagcctggcctgcctc

SEQ ID NO: 82727 - DNA, 122 bp, Homo sapiens
cccctaggtaccttggccaggctggcagtgaagagaacacattcaaagagttcccccatgcgtctcaggaactcatccacataaggcctcttgagcacatacacctgaggaagagcagagca

SEQ ID NO: 82728 - DNA, 122 bp, Homo sapiens
gtggggcggccagggagagacgcttctcacttcccagacagtgcggcagccaggtagaggcgctcctcacttcccagacagtgtagtccctgggcagaggggcacctcacttcacagatggg

SEQ ID NO: 82729 - DNA, 122 bp, Homo sapiens
ggtggtggctgcgcactgccggtccccggcaccctccccaggctgtcctcctcgtctctgcggtgcgttccatccctctgagggcctcggctttcttaggcccctgactgctggcctggtct

SEQ ID NO: 82730 - DNA, 122 bp, Homo sapiens
actttccccaccacaaattttcacataaaaatgacacgccagaaaggtgcatcacagcaccgcgcaggtatttgtgacaggcctcatcccttggaggctgcgagcccagctggagaagcaca

SEQ ID NO: 82731 - DNA, 122 bp, Homo sapiens
tgtactttgcctcttgagaaattaaatctgattacaacagagctaagtatttttcagcaacggttagactgacattgtaaatacacaatctgatagttggggctggcctcatgggcctgcaa

SEQ ID NO: 82732 - DNA, 122 bp, Homo sapiens
gtgctatgatgaagcgacataaccaaagacataacgcaattattttgatttcaagtccagcgctcttccgagtaactaggaaaaatgaggggaactgtgtaggcagaatgctgtggaggggt

SEQ ID NO: 82733 - DNA, 122 bp, Homo sapiens
agcagggctgatccgggatctcgatggtgtagtccagctctgccgaggccatggtgaaggcgccggcccagagcacgggtctccagccggaactcccgcttgcgcacccgtgcctcacccgg

SEQ ID NO: 82734 - DNA, 122 bp, Homo sapiens
cccacagacccctgtgtccagaccgtcttgaagagtgacagctgggacctgtggagagcccgcagcccttctggacttgtctgccctgagttcctcacagcagtgtgctgtatgcctggttg

SEQ ID NO: 82735 - DNA, 122 bp, Homo sapiens
atcctatctataaataatagtaccacagacaaaattttatacacccagcacaatgcaaatcgtccccctgtaaacagagaccagtttagtgaactgaatagtaatgtcaagatgggtatcaa

SEQ ID NO: 82736 - DNA, 122 bp, Homo sapiens
cccgccccacctccggctccggggccgcggctccggcgccgcgttttcccggccgccccgcgcccgagggttaaagctcccccgccaggagtaaacagcaccccagtcggcagccggcagcc

SEQ ID NO: 82737 - DNA, 122 bp, Homo sapiens
catcgagctagagtcggtgcgcggcaccaaggagtccctggagcggcagctcagcgacatcgaggagcgccacaaccacgacctcagcagctaccaggtaggaaccgcggctgcgcggccag

SEQ ID NO: 82738 - DNA, 122 bp, Homo sapiens
gtgctggaaaccacagctagggctggattaccgctgcagggggtacggggcgaaagggggcgtccttctcaggaagccagacctggagcagggacagaggagtcggtcctcagccaggacgc

SEQ ID NO: 82739 - DNA, 122 bp, Homo sapiens
ggccatctcagggtgtgtgaaagcagaggacagggccactttactgtcttaaccctgctgcggcctcctccgtcagcactgtgtgctcttgtgcggggtggacaccaaatcagtgtttggaa

SEQ ID NO: 82740 - DNA, 122 bp, Homo sapiens
tagagcagaagtttttcaaagtacgatcactgggccctgaggattcctgagattcttttgcggggggcctatgggttcaatttttttctaataatactagggttttttgttttttgtttttg

SEQ ID NO: 82741 - DNA, 122 bp, Homo sapiens
aaggtggcgagttggcaatgattaatcaatgtggatggtacaatccggtaatttaagtttcgactggtttaagattgagacaaccagaaaggaaggcttatcagaagggcggcaggggagga

SEQ ID NO: 82742 - DNA, 122 bp, Homo sapiens
aacctctgaccagaaagagccgacagggggcgttcctggatgatctggggctgtcaattgcgagacgcggaggattgtgggacttgtggtttttctcgcatcatttaagctttctggactac

SEQ ID NO: 82743 - DNA, 122 bp, Homo sapiens
tgagctcggccacctcttgaccttctgaacggctgtggtttccaaacacggatggataaccgggccgggcgcaggggtggcctactcacctgggggcgaactccttctggcacatggggcag

SEQ ID NO: 82744 - DNA, 122 bp, Homo sapiens
caccagccctggtggggacactcacttatccttcattttattcacgtagagctccagggacggcaggtcctccgacagcatcctgggcacctcgaagcggtgcgtgtccgacttctcgtagc

SEQ ID NO: 82745 - DNA, 122 bp, Homo sapiens
cttaggcataactgaaaattgttgatcgctaccaggttattccaataagctggaggctcacgtatttgcatataaattaggtcatttcttaaatttccatatatattcttaggccttgcaaa

SEQ ID NO: 82746 - DNA, 122 bp, Homo sapiens
aggagcaatgctttgtcttcctgaagctgtctgaaaagatgcttgtatacatgtgtatagcgctttgggtcatagaaattaggtgttatgtcatctgtttcagaagatgcactaatgcatca

SEQ ID NO: 82747 - DNA, 122 bp, Homo sapiens
ccgcagtcacttctccaaggtccttccttctgggaaggctccctctgggtacctgtccagcggtcctggaagcagaagaggggccgtggatgatccaaggcagccgaagcggccatctccat

SEQ ID NO: 82748 - DNA, 122 bp, Homo sapiens
ttgttttatgttttttgacaactttcccctccttgtccagtttggggacagcgccctccgcgctggacaggaaggggctcttcttctccgacagggaggctcgcttcctgtgctcctgcctc

SEQ ID NO: 82749 - DNA, 122 bp, Homo sapiens
cactgaggaagactcggtactccagggagaagggcgcggcgcgctcctcggtgctgaagccgctcatagtgccggagtcctgccgccgccgctgccacagagccaccagcccgcacgcggcg

SEQ ID NO: 82750 - DNA, 122 bp, Homo sapiens
atcactacctgacggcctttttggcggcctggccgggctgtgcagggtggtagggcaagacgcgcggctcccaattctccccggcgccttcgccggccccgggcttctcgcgctccgctccg

SEQ ID NO: 82751 - DNA, 122 bp, Homo sapiens
ccccgctgccagtcacccccgcctgctctgcccctccgcgaaggatcccagagagcccggcgccaaccttagttgtttgtgaccaggggagcggctggaaagcagactgaatttttagaatg

SEQ ID NO: 82752 - DNA, 122 bp, Homo sapiens
ggagtgtgctggtcctctgtttccatttggtcttgagtggtgctgagtgaggtgacctttcggggcgcgcgcggggcgcgggtgtggagggcagcctttagcacacctccttgcccgtgctg

SEQ ID NO: 82753 - DNA, 122 bp, Homo sapiens
caaagcaaaactggagcccaggactctctgacttaagctcatcctccttctgctccatcccggctgtgcacacctggagaccaggccctcgagcctccaaacgccgtgagcagcctcctcct

SEQ ID NO: 82754 - DNA, 122 bp, Homo sapiens
cctttgcccctacaaaatttatttttcccactaaactgtaagatccccaagggaagggtccgtgtattatgctcatcacaaaacctttctgcctagcacatggtggatattgactggtagtg

SEQ ID NO: 82755 - DNA, 122 bp, Homo sapiens
cgcgcctgggccaggcgagaacttccggtgcgctccccgggactgcggtcccccagtccgcgccccgcccagccgtcccccgtcggctccagccaatccgcgcgcgctcccctggccgtctc

SEQ ID NO: 82756 - DNA, 122 bp, Homo sapiens
caaatgtgcacgttcatatctaaagcgaaatcacatctctattcggcaccatgccaggggcggaaggcgcctgctctctaagacaatggttttatagtaacgattgcagcctccacccagag

SEQ ID NO: 82757 - DNA, 122 bp, Homo sapiens
tattggcaggaattgtttttgaccacagcgtcaatgacagcaatggatctttgccacttgcggtaagaacatcctttctctaacaattgtactgtgctgccgagacttgagcatgtgttcct

SEQ ID NO: 82758 - DNA, 122 bp, Homo sapiens
cccgttgccacaggcagggctcaccctccagaaaccgacggggtagatgagcttgcccagcgtggcatcatctgtctgcaggatgctgtccaccgtcaggccccgcgcccgcagtcgctgca

SEQ ID NO: 82759 - DNA, 122 bp, Homo sapiens
tctgcctctttccgcgagcgctgacgtcgccgacgtgttgtttaaaagcggccgcgcaggcgcagtgagcccaaatgcgaacttaggctgttacacaactgctggggtctgttctcgccgcc

SEQ ID NO: 82760 - DNA, 122 bp, Homo sapiens
atcttaagcaacaacaacaaaacaaactctgaagcaccctgcggcaggcagcttctgcatcgtgggggttgtggaaggggctgatgggcaggatcatgagaaagacagcttttcattaagag

SEQ ID NO: 82761 - DNA, 122 bp, Homo sapiens
acagagcatgacagcaagtaccatattccaactcagcagtgtaatgtagtttggcgactccggacagacaaacatttgctgaatgcctacagtgacactagaattgctagtcactgctaatt

SEQ ID NO: 82762 - DNA, 122 bp, Homo sapiens
cgaactggcggccggtgctgtggccgatcccgcgccgctgcctcgggccttggggggcagcgccacccggccaacccgcctctgcagcgttcctggcgtcagcccctatcctccagcttcct

SEQ ID NO: 82763 - DNA, 122 bp, Homo sapiens
ctccaagtgttcaccaacttggtaactctctgaaccgccttgttcaggagttgttatgaacgttccattacataggcatgattgattaaagaatttgtcattggcgattgaactcaatctct

SEQ ID NO: 82764 - DNA, 122 bp, Homo sapiens
ctggactagagagagagcggaagatgctggaaaaggtaatttaggcatcaggttcgtcgtcgtgaaagcctgtggtaacctcggctttaacccggaggtgtggtttgtgttctttgctttcc

SEQ ID NO: 82765 - DNA, 122 bp, Homo sapiens
tctgagccgactgcggtggtcaagaggtgggtttgtttggaaagtgggtggtgagagtagcgaggatgcgggtgaagaaaacctaagggccccaaattcaacataagcgaggtttgcgggct

SEQ ID NO: 82766 - DNA, 122 bp, Homo sapiens
cttgtccacggtgagcttgctgtagaggaagaaggagccgtcggagtccagcatgggaggcgtggtgttgtagttgttctccggctgcccgctgctctcccactccacggcgatgtcgctgg

SEQ ID NO: 82767 - DNA, 122 bp, Homo sapiens
gtccccgcgcgggcaggtgcgacccccgagcccgcgccaggctcgcgcaggcctcgcggccgactgacccgaagtcctggtccatggacttaaagaagaatttgtaggcgtgcacgggccgg

SEQ ID NO: 82768 - DNA, 122 bp, Homo sapiens
gtaaatcagggccgccgagggggtcggcctgcggccactgggcgcaagcgaggaagacgccgggccagtgctcaggctccagatctgattggcttaatgtggtctgggacagatcatcctga

SEQ ID NO: 82769 - DNA, 122 bp, Homo sapiens
tcctttcatctaccctaatgtctcatgatcctggataaacccatttccctgtaaggtgagcgtatgctggtatgaggtgtgagccttcaggcagagtgtggtgtcattgttcttgtaggtaa

SEQ ID NO: 82770 - DNA, 122 bp, Homo sapiens
ctgagcttcctgaacactgccactgaccctcagccagaaatgcttgcccccttagggtaccgttgtcactagagaaccgtgtgagagtagtaatgttgctttttttttttttggagacagag

SEQ ID NO: 82771 - DNA, 122 bp, Homo sapiens
gggggacctgaagacgtactttgtaaacacagaaatgtcaaggtccctttcccagagcaacgtggcatcctgaagagtcaccttcattttggcaagaagactgtattttcaggaaggtatca

SEQ ID NO: 82772 - DNA, 122 bp, Homo sapiens
gtcagagccgggtgggcacggggtgggtggggcaggcccacggggctcagttccaccgagcggaaaatcatctgacgtgtcctcggtgtatgtgtctggagcagaagcaggtcagatgtcgc

SEQ ID NO: 82773 - DNA, 122 bp, Homo sapiens
tttgaccaaagtcaacagctggtgactggagagccaggtttaaaaaccggatgccggctccgtgcagcagcccgccgatggctactggagcggagaggttccgaggtttcaggggcattttg

SEQ ID NO: 82774 - DNA, 122 bp, Homo sapiens
attgtagatcttcccagaagccctagcgggaaggaggttcccccccgcctcccgcctccccgctttatgaatagcaagagagccagctcccatggtgccctccgtctcatgaataactaaca

SEQ ID NO: 82775 - DNA, 122 bp, Homo sapiens
ggtggggaaggtggtggcgttgggggtgagggttccacggtggtggagctgagctggtcccgccctgccgcaggtggtgggcaggggcaggtgtgacaggcaggtgggctggggctggatgg

SEQ ID NO: 82776 - DNA, 122 bp, Homo sapiens
gtccttgcattgatttgccagcgggtaaagggaatcatataacagttctaatcacttcaccgggctctgcaggcagttcacagaactaaaggaagtgggggctttggttcattcactatcag

SEQ ID NO: 82777 - DNA, 122 bp, Homo sapiens
catcttagcggaccaccagtatgtatggtccgtcgtgaacagaaacatcgtgaggcagcccgacagcaggaccactgctgcaccggcggcctagagacatctgctgagcaaaggagcaattc

SEQ ID NO: 82778 - DNA, 122 bp, Homo sapiens
gtggcacataatagggccttatactaaaggagctccacggtttacgagacctagagctaccggcgagatactttacttcattccctgtggtgaaccgtggggactttcgctccaaattttca

SEQ ID NO: 82779 - DNA, 122 bp, Homo sapiens
atgctgtgatattattgttatctcctccacgttctttgtttaaactattggtctgccgggcgcggtggctcacacctgtaatcccagcactttgggaggccaaggtgggcggatcacgaggt

SEQ ID NO: 82780 - DNA, 122 bp, Homo sapiens
ctgctggcccccaccgggccagtgaaagcagcaggctttatgcggctgtcgggctcggggcgaggagccggctccaccctcccagtctgggcccatcctccggcctcggccagccccttccc

SEQ ID NO: 82781 - DNA, 122 bp, Homo sapiens
ctaatggtagcagccctggcctacaaccagtggttcaccaaactctactgcaaggacttgcggctggtaggaactgggaggggctggtgaggtgggagaagtagtgccccccttggcccctg

SEQ ID NO: 82782 - DNA, 122 bp, Homo sapiens
cttcctctccacagaagcagctggaagagaactcgaggggctgtgctgcaggcctcccctcgaaagacactgggaggtcagcatgttccacaggtgttcagagggagtctgctacaaactat

SEQ ID NO: 82783 - DNA, 122 bp, Homo sapiens
ccacctaagcgtggatctgcccactctgctgggccccgggcgcgctccacccgcggggcacgccccttgcccccagggccaatgagagaagcaggccaggaacactggtttttatgaatggg

SEQ ID NO: 82784 - DNA, 122 bp, Homo sapiens
ccgagaggcgcgtggggcacccgccgcaaagaggagcctgctggtctgctggcgggcaggcggcgctgggccggagcctctccctccggtgcgcacagcgcaccctctcctcccccggccgc

SEQ ID NO: 82785 - DNA, 122 bp, Homo sapiens
caaacacccgggctccagtgatcctcccgcctcgaccttccaaagtgctgaggttacaggcgtgagccactgcccggccaggtgcaccctttgtacaggaaaaggggtaggaaaggcttcga

SEQ ID NO: 82786 - DNA, 122 bp, Homo sapiens
gtgtagaggggtacgggtgaaacagagaccagtattattaaggggatggagaggagagaccgccaaaacatcgcagagacacaccgtcggaaccaagagaatggggtgcagacgcctggctt

SEQ ID NO: 82787 - DNA, 122 bp, Homo sapiens
aaaaacgcagttcacacaccaaacccaccgagcagcacggcttagcctcacccaccttaacgcgctcagacactcatatcagcctacagctgggcaaactcatctaacacaaagcctatttc

SEQ ID NO: 82788 - DNA, 122 bp, Homo sapiens
caaacacccagcagcaaccggtcgcgctcgcggctgatagcgccgcgacctctgcgcgtccgccccggccggttcccattctcaagtgcctggaccctgtcacttccacctgtcccagtccc

SEQ ID NO: 82789 - DNA, 122 bp, Homo sapiens
ctgacacgtcctgcgggtgcccggtcctcagttggctcgagccggatcccggcgcgccaacggctcgaccttgccccccacgaggcagggcttcctgcccggcaggaaggactcggccggcg

SEQ ID NO: 82790 - DNA, 122 bp, Homo sapiens
gtgtgtgtatatatatatatagagagagagagagagagagaaagagagagagagagagcacgagatctccctatgtttagtcttgaactccttggctcaagggatcctcccacctcagcctc

SEQ ID NO: 82791 - DNA, 122 bp, Homo sapiens
tgtcggctacttttgctcgtaccagcaggtgtgcactgccgcgtcaatctccaacaaagccggaaaagcagcctggcgcatgtgcaaaggaagtccctcctaccactaccgagccgagatga

SEQ ID NO: 82792 - DNA, 122 bp, Homo sapiens
ttcatccccactgttgtccccagttcctctctgcagaggcacctgctgtcacttgctcctcgcgaatcctgctagagctacactatgcgtagatacatggcagcgtgctcctcagcctcttc

SEQ ID NO: 82793 - DNA, 122 bp, Homo sapiens
ccagccacgtggaactgtgagtccatgaaacgtctttcttttgtaaatgcctcagtcttgcgtatgtctttattagcagcacgaaaatggactaatacagctgtgctccctccaagggctct

SEQ ID NO: 82794 - DNA, 122 bp, Homo sapiens
cgcacggtgctgtcgggaaagttggtctcggaaaactacagccgccctcagcgcgccttccgcccgcatttcttcgcagtgcattctggggaatgtggttcgctgtggcccagaggcgcgag

SEQ ID NO: 82795 - DNA, 122 bp, Homo sapiens
agtggacagaggaccagggcaccagctgctcttctgcctcagtgcggagcatccctgactcgcactgccctgtacaggtggggctcacagtctgtgcatggaactcagataaaacacctggc

SEQ ID NO: 82796 - DNA, 122 bp, Homo sapiens
atgctttgggctccgactctgtctccctcttcttcaaatcatgagggcactcgggcaccccggtgtgagaggcaggtggtcccagagtccgtgtcacctgggtcacatctccaaggccccag

SEQ ID NO: 82797 - DNA, 122 bp, Homo sapiens
attcatgatagaagaaatgcagaaaaaagtccagtctcctgttgagtgtagtaaactaagcgtagaggctttctgctaactatagttccaaaatacagctagcatttattgagtacttactg

SEQ ID NO: 82798 - DNA, 122 bp, Homo sapiens
acacagtgaggcaccaaatgggctagccaagggaaatgtgtctgcaggctggatttgtcccgtagacgatgagctggagacctcttccctggattatggaacagcagtcgcagtctgagaag

SEQ ID NO: 82799 - DNA, 122 bp, Homo sapiens
cacatgcgcagaccttctcagatggcgctccaggaggaagttggcgtatttgagcatgcgcgagggagtccgcgcttttcgctgacttttggcaaaggaaggactgaaattagccccgcccc

SEQ ID NO: 82800 - DNA, 122 bp, Homo sapiens
aaaatctgcggaggcagcatttgttccgcctctcccctctagagtgtggagacaggaggacgtctgtgtagggaagcacgtcgttggcagactgctgttttgccgatgtttatttgttatgc

SEQ ID NO: 82801 - DNA, 122 bp, Homo sapiens
gtgtcagggccgagtagccacaggacagaactgagaagcgagtaccaacatcaagcctgccgcgccatttatatccacgcatgcgtttccccttacctgcaccgagcctcccgccccgttta

SEQ ID NO: 82802 - DNA, 122 bp, Homo sapiens
cagattcttatcttttctgactgacagtgactttatctctctaatccctctggccacccccgcctccgccagtgtgtgtgtgtgtgtgagtgcgcgcgcgcgcacgcgtgtgtgtgtgtgtg

SEQ ID NO: 82803 - DNA, 122 bp, Homo sapiens
agctggaggggctgccccttcccccgggtcggccctgaccctgtccaccccacctcaggacgttctccaggggtccctccgggatgcactcggaccccctgcccgctgcactcagcctccca

SEQ ID NO: 82804 - DNA, 122 bp, Homo sapiens
aactcccaaaggaccaaaaaacaaaaaccccaccccagtgaggtggtgcaaactcggctgcggtgtccatggggcacagtgcaggatctgggaggatggtccctgagcattttaatgagcag

SEQ ID NO: 82805 - DNA, 122 bp, Homo sapiens
agctgttatgtaataccagtaccaggcagggccatcgcataatgtagagcttggtccaggcgtggcagagaacttcttaagtgacacaaagcaaatgaatgaatcatgcccctggcagttgg

SEQ ID NO: 82806 - DNA, 122 bp, Homo sapiens
tgtagaaaatagttcccagcctgggcaacacagggagacctcatttctacaaaaataattcgccaagcatagtggtgcgcacctgcggtcccagctacttgagaggctgagatgggaaagtt

SEQ ID NO: 82807 - DNA, 122 bp, Homo sapiens
gaaaatcagctggtgagtcaatgggactttgttaggatagtcacagggcgcagctggcgccggcttaagggaagagctggatccccccttgataacatgctgtttatctggcttcctgtttc

SEQ ID NO: 82808 - DNA, 122 bp, Homo sapiens
ttgatggtgggcagggctcagggcacttcgggggtggacatggctctgggcactttggcgcggggcacacaggaggtggctggcagggctgcttgcactgctgctgttgataagacatcctg

SEQ ID NO: 82809 - DNA, 122 bp, Homo sapiens
agcttacgtcagtttctcggtggcagcgaatttactgccagagtcttgtggcatgagatccgcgcaggcctggggccctggccgggaacccctcactccccaaacgtcccaagcccaaccca

SEQ ID NO: 82810 - DNA, 122 bp, Homo sapiens
cacccagccgtccaggaagctgaaaaaaccgaagtgatcccaaagaactaaggctggagccggcagtgccagggtcctccgtggagggcacagtgtagcaagtgactccagggtgcgcccag

SEQ ID NO: 82811 - DNA, 122 bp, Homo sapiens
agccctcggcagttctgaaaccattctcgccccggcccgccccggcaccgccccttccaccgccccgtctaggcccgccccgccccggacccagccttggccctgcctgccccacccccgcc

SEQ ID NO: 82812 - DNA, 122 bp, Homo sapiens
ccactgtctcttcctgctccagcaccatactgttttaaagactgtagttttggccgggcgcggtggctcacgcctataatcccagcactttgggaggccggggcgggtagattactggaggt

SEQ ID NO: 82813 - DNA, 122 bp, Homo sapiens
ttatgagctgtaacactcaccgcgaaggtccacggcttcactcctgagccagcgagaccacgaaccccaccagaaggaagaaactccgaacatgagaaggaacaaactccagacacgccacc

SEQ ID NO: 82814 - DNA, 122 bp, Homo sapiens
catgccacccgataggagtctcgaaatcactagtcggctcagccataccactggcgggtccggagtctagcacgcgactgtggagcaagcattaggcgtcacttcctttaccgtgaactaca

SEQ ID NO: 82815 - DNA, 122 bp, Homo sapiens
gttaaacgcagcaggaaagtaggcgtgtgttttcttcctcttcccgcctccccagagactcgagcccagtcctttcccctcattttcaccccagccgagtccaatggctgccctcgccgcgg

SEQ ID NO: 82816 - DNA, 122 bp, Homo sapiens
agcgctgcgttttctgcgtcgggtgttgatgacgtggaactaacgcttccttgaagttcccgcctctgccttaagtctccacctttgttctttgtctagttttacagttatggccttaagtc

SEQ ID NO: 82817 - DNA, 122 bp, Homo sapiens
gagccttgatgacttgtccctacagtggagatttccaaggaggtacctattgttttcctgcgactctgggaaacagttttgaataatgtgatccaacaggttttctccccatcatctatagc

SEQ ID NO: 82818 - DNA, 122 bp, Homo sapiens
attgctagttttggaaggtattgcccaaactttttctcaaaaacactcagtttattctgtcgatatgaatgttgcaggggatattatggtacgttcagagaatacagttcactacagtgatg

SEQ ID NO: 82819 - DNA, 122 bp, Homo sapiens
cacccgggaagggaaagcagccagcagccctccagccctcttgtgctttccctgggagtgcgccccgtgctcagccatggtggacatgggggccctggacaacctgatcgccaacaccgcct

SEQ ID NO: 82820 - DNA, 122 bp, Homo sapiens
cgcgcagcccggggtgggtggtcctggcgagtggggctgcgaggcagaccggccccaccccggggccgccgaggggcgcgggctggggcgcgtggcgggcggggctgggcgggggcgggcgc

SEQ ID NO: 82821 - DNA, 122 bp, Homo sapiens
atggtgattcgcttatgtctccatacaattttcctcgtcccctgtgcaaattcccctgaacggatttcagaaccaaaaactagctgatgagctgggggccatttaaattcgctcccctcgaa

SEQ ID NO: 82822 - DNA, 122 bp, Homo sapiens
cgggcgggctcccgcgaagggaagtctgcgggctccgaggtttccgggactcgccacactcgagccacaggaaacctctgctgcaactgtaaaggctggacttgttgctgatctatactcat

SEQ ID NO: 82823 - DNA, 122 bp, Homo sapiens
caacgaccgttctctctacgccaagctcatttgtctgagcgtatcagcaacacgacacctcgcagttcagtggatttgatgtgagctcccgcccctggcatacctagcgtgtaatacctgct

SEQ ID NO: 82824 - DNA, 122 bp, Homo sapiens
gggcctcatcagcgtcccggggtcccctgaaagactggctacaactccgaccggacaactcgggcgagctcacttccacacaaacttcagactcaatatggcaaaacataatcagacaggac

SEQ ID NO: 82825 - DNA, 122 bp, Homo sapiens
gtgccgggtggctctggagggcccttgtgggggcgctgcactggggatcctcatggtcttcggcctggcacccgcccaggggctgagacagtggcgagtgagccgtggcctggagctggaga

SEQ ID NO: 82826 - DNA, 122 bp, Homo sapiens
gagtttgagaccagcctgaccaacatggagaaactccgtctccactaaaaatacaaaattcgccgggcgtggtggcacatgcctgtaatcccagctacttcggaggctgaggcaggagaatt

SEQ ID NO: 82827 - DNA, 122 bp, Homo sapiens
cgggccggatcccgaggtgagtcccccacctgcggtcagcccctgcgggcagccaggtcccgaggtgagtccccccacccggggctggtccagaggagatccccctacctaaggccgggccc

SEQ ID NO: 82828 - DNA, 122 bp, Homo sapiens
caaggaggagaatccaaaaagccttctgctgctatctaaggctgcttagctccacagatccgtgaacagcacgcccagagtacagagaacgcggcaaaaccaacgcgaagaatccactccag

SEQ ID NO: 82829 - DNA, 122 bp, Homo sapiens
aagcaaaacagaaagagcctgctttcctgcagcctggggttccagctactccgaaggctgcggctgaaggatcactgcagccccggggtttgcgtacagcctggacaacatattgaaatgcc

SEQ ID NO: 82830 - DNA, 122 bp, Homo sapiens
ttatactatagcagcaactatacttttaaatgattcgaatcttgaggtttcaaactgaaccgtcttgtgccttttgcccggcgggcatttctgcggggaccgcgggtcaccttctgaatttt

SEQ ID NO: 82831 - DNA, 122 bp, Homo sapiens
agtgagcagagccctctgggaagagatgcgcctctcctcgcccctctcgtttgttccccccgccaccctccacaggctgacagttcccgtgtccctctacaggtctgacatgtttccatggc

SEQ ID NO: 82832 - DNA, 122 bp, Homo sapiens
ggggcgtcaaagggagggagggaagggagcgggcgggaggagacggtcacgtggtcgcggcggaaggatgcgtctgtgctgcgtccccatagagacgaagtctataaagggccggcgggcgg

SEQ ID NO: 82833 - DNA, 122 bp, Homo sapiens
gggctcatggggcagctgtggggaaactgaggcgtgcacatgcaacaattagcagaatgccgggtggggcagagtacacactgaagggataggagccactatgatgagactccctcttgtgc

SEQ ID NO: 82834 - DNA, 122 bp, Homo sapiens
ttactattgtagctgccttctcccaggcaaaaataaaagggggaaggagcaggtttagaccgaggaggagggttcccctagcctgcagggcgctgcaacatccacctgaaacacggagctcg

SEQ ID NO: 82835 - DNA, 122 bp, Homo sapiens
cccgcaacaagccgatccaaccaaaaacgaccaggcagaccagaagcggaaatacatcatcggtgaacaacgctctccctcccacgctctctctcaagccgggcctcctcgggaggcctcac

SEQ ID NO: 82836 - DNA, 122 bp, Homo sapiens
gaactggacgcccccttcctgcggggctaggtggcaagggcagccagtaacgtcattgcccggaggatcggcggagggggcccattaactcgttatccagtgttgtcagcctcgtggtgggc

SEQ ID NO: 82837 - DNA, 122 bp, Homo sapiens
ccccccgccctccacacaatcccacccagtggttgggtctgggcaggacaccctgacacacgctcccctccccccccccacctgggtagatgaatgggatgatgcagtggttgtcatgacga

SEQ ID NO: 82838 - DNA, 122 bp, Homo sapiens
cagctcctacgtgcacctgcggccggcgcgacccacaagcccacccgcccacagccaccgcgacttccagccggtggtgagtgcccccccaaagtgggcttggctccatctagcccctcggc

SEQ ID NO: 82839 - DNA, 122 bp, Homo sapiens
gcacttaaatgtaagctactcttactctagttacacataaagttacttccaaaaaccttacgaaattccccgagcactgtccatggtatgtggtttcccggttgcttattgggtggtcccga

SEQ ID NO: 82840 - DNA, 122 bp, Homo sapiens
gaggctggagcctgatcactcggggtcttactggccacggtgaggagtcagggtttcatgcgcccctgcagtcagaaagcatggcccaaccccagtgccctaagtccggaaacattcaaagc

SEQ ID NO: 82841 - DNA, 122 bp, Homo sapiens
ggatggggccacttacccggcaaaggtgatgggtctgagcaggagtcagagccaagccagcgagggagggatcaactgagtagatagcccacgaagagagggggctgaggacgggtggacag

SEQ ID NO: 82842 - DNA, 122 bp, Homo sapiens
ccgtggcggcgggggcaaaaagctgcggtgatgggggcaaaaagccgtaaaaagccacagcgtcgggggcaaaaagccgcggtggcgggtgtaagaagccgcggcggcaaaaagatgcggcg

SEQ ID NO: 82843 - DNA, 122 bp, Homo sapiens
ggagctcctggaaggggtcgaggcggagctgagcgccggggcgtggcaggtgcggagcttcgggaagggtaggggcggggccgagccgggggcggggcaggggcggggctagtgcctggagt

SEQ ID NO: 82844 - DNA, 122 bp, Homo sapiens
agcgccagtatcaacctgaaatgcccataagccctaggataaactaggtctcctctgagtcgcggttactttaggagcaaacgcaggtacaaacaaactgagtctgtcacccgcagcgtggg

SEQ ID NO: 82845 - DNA, 122 bp, Homo sapiens
ccacatcaagggattccccctcccaacattcctggctagtcctatgagcaccgcggacagcggcattgaccatgtcaaaccccgcaggacagaaagagcagcagccccgccccttcccttcc

SEQ ID NO: 82846 - DNA, 122 bp, Homo sapiens
caccaatggggagggggtgccctgggaagccagacagtgagtcaccccacttccaggcaccgctgcttttggggtcagtggcttctggggattggctggagcccagtcacagcttggagggt

SEQ ID NO: 82847 - DNA, 122 bp, Homo sapiens
atgggaaggcagggcagcgggagtgaggatggcagagaggattacacatgtcaaggcagccggggtcatggaaacaaaacatgaatggcctgggagaaacactgtgaaaggacacagaccta

SEQ ID NO: 82848 - DNA, 122 bp, Homo sapiens
gggctcacctgtgtatcggaatccgtggatgaagcccccagcagatttccggtagtccaccgagtggctggcagtacccaggataaacagaccccggcttcctttggattcgtagctagctc

SEQ ID NO: 82849 - DNA, 122 bp, Homo sapiens
atgaatgctccatggaaaattacaatcaaacatcaactgctttcatcttgttgggattgtcgccaccaccaaaaattggccatttcatcttcattctcattaatttcgttttcctaatggct

SEQ ID NO: 82850 - DNA, 122 bp, Homo sapiens
atggcacgagcacgtgcggcgctcagcttaggctctcggaggcagctgagttggaaatcccgacggaaagcacccacaagctcccactctgcgctggcccacccgcgtgcacgcccaccccc

SEQ ID NO: 82851 - DNA, 122 bp, Homo sapiens
agcccgggccaaggggcggggccagcgccggccacggggggcggggccttgaggcaggggcggggccgcggcggggggcggggacccctcggggggcgccccggaggggagctgggcgtcgc

SEQ ID NO: 82852 - DNA, 122 bp, Homo sapiens
ctccgacctctcagaccgagtaagccaagcgaagcctgtatgcgcacgcttgcagctcagcgcccgcggggactccggaagcctctcccaagtggcgcggtccgcaaggggcggctacagct

SEQ ID NO: 82853 - DNA, 122 bp, Homo sapiens
cctctgcccgactgctcggcctcctcggttcaaactgaaagcctgagactttcccaactccgtatggggcagcctgggcccgcccggcttccgggagacactcccgccccagcctgcgctcc

SEQ ID NO: 82854 - DNA, 122 bp, Homo sapiens
cctagataaatcaggctctttgctccccacctctgggttcgggcagacactcacttgtgccgacactcagatgaacaagcagatcgtagccggcctgtggctaagctccgaaactagaaatt

SEQ ID NO: 82855 - DNA, 122 bp, Homo sapiens
ggctcccggagatatggagcggggtcagcgaggcctggtggcgcctcctggagtctgggacgagcggcggtccgaggagcagcccaggtggggcgagggtacggagacgctatttccctccg

SEQ ID NO: 82856 - DNA, 122 bp, Homo sapiens
gtcttccctcaaggagtttatcacccgagacagagagacatatgtgaacaaaatcttacacgtgcattgtagtgttgtagtagagctatatgtaagtatatacaagatacagtggcaacaaa

SEQ ID NO: 82857 - DNA, 122 bp, Homo sapiens
aactaccactcacgcagagccaatcggaactcgcggtggggctgctggttcttccaggagcgcgcatgagcggacgctgcctacgggtggccgggcgggatgtaaccggctgctgagctggc

SEQ ID NO: 82858 - DNA, 122 bp, Homo sapiens
ttcccagccgggttagcgcttcctccgccgcccgggctcctcctcgcgcgccgcctggagcgcctttgtccggctgatcgaggctctccccgaggaaccgctggcaaaccgctggcgacggc

SEQ ID NO: 82859 - DNA, 122 bp, Homo sapiens
cgagccggccaaataggggagacccgggagagccgccctgggaggcactggaggaagctgcgagtgagaggcccccaggccagccccccggcgtgcttaaatacaagctcaaaatgaggaga

SEQ ID NO: 82860 - DNA, 122 bp, Homo sapiens
gtgcggacacacctccttcagcacgcgccccttgttgtcccgtccagcaaaaggacagctcggccacagcaggtgaagccacctgcccaagtgtccagcgcccgctattgggtgaagctggg

SEQ ID NO: 82861 - DNA, 122 bp, Homo sapiens
tcacaaaggcccacatattgtacaacgccactcatataacatgttcaaaacaggcaaaaccggcctggcacagtggctcacccctgtaatcccagcactttaggaggccaaggcgggcagat

SEQ ID NO: 82862 - DNA, 122 bp, Homo sapiens
tggttaccacgacatcaacacacttactgcctttagcacgttccagaaatcctcctgggacggtgcggtggctcatatttgtaatcccagtactttgggagaccggggcgggcggatcactt

SEQ ID NO: 82863 - DNA, 122 bp, Homo sapiens
ttttagaggtgcagaaatggaggcacaggggttcagtaacttgcacgaggtcacaatcctcgagcccggatagaagcccaggccatcgggctccaggcccatcctctgccatgccattcctc

SEQ ID NO: 82864 - DNA, 122 bp, Homo sapiens
ggtgaggccaggggaagatagcctacctgcaggggctgaatggatcatccatgactaacacgggctctggtgagtctagctggattcctgaacctttactttctgctaaaactctgcccttt

SEQ ID NO: 82865 - DNA, 122 bp, Homo sapiens
ggacaccaccaggggtctttctgcgaaagtgcggtgacaccaggggtcctcctgcggccccgggagggcccagactcggcctgaggggctcagcaccggctcctcccattcccttccttcct

SEQ ID NO: 82866 - DNA, 122 bp, Homo sapiens
cggccactcggccaggtcccccggggtccaaaccgatacgaaatggtgccctctgcccgtcgcccccttgggctccttttcaagggcagctatcacgccgcctctggtccctgaactttcat

SEQ ID NO: 82867 - DNA, 122 bp, Homo sapiens
gcaccgttcccgggaagcctcgcttttgtccaccgccggctgggtcctgcccgcctcccccgcctcccttagaaagccccagagggagggaacagcaggcccggaatagggggaaatagaag

SEQ ID NO: 82868 - DNA, 122 bp, Homo sapiens
tctccgacatgcagcagcagatgatctgctggctcctacctgtgaacgtgttgacactcacgatagggttcccattgatgctccacacatggatatatgtgccagcgcaggacacaatgtcc

SEQ ID NO: 82869 - DNA, 122 bp, Homo sapiens
ttactgtttacaagcctcaggaagttagcagcaagcttgtcccttagtccttagcaataacgtttgagaattgctggaacctgtttgtcttgttagcaactacccaaatacgaagaagcaag

SEQ ID NO: 82870 - DNA, 122 bp, Homo sapiens
gagcctggctccacaggccagggtgtggggggacctggccacacctcagccatgtggaggcggcacccgcacgcctgagctcacctttccggctctctggccgcatgcgtccactgtggctc

SEQ ID NO: 82871 - DNA, 122 bp, Homo sapiens
aatggggcaagcctgagtaggaatccgaatgctatggatcaccagaaacatcataacaggcgaattacctaccctcactgagcctcagttttcttgtctctaaaactaggataataacacct

SEQ ID NO: 82872 - DNA, 122 bp, Homo sapiens
gctctcagcaacaggaaccagttaggtacaaatcagcagagatggtgtctctgtctctcacgctttgtgtccagtccagcggctgcagagagagcctctggaggtggggccagtgtaataca

SEQ ID NO: 82873 - DNA, 122 bp, Homo sapiens
cctgtaaattgagtggagagagggatagaggcctatttcgcagagaaaagggatggtcatcggcttccaggctgagcagacacttaaaaaaatgatccgaaatgatatccatcaattccata

SEQ ID NO: 82874 - DNA, 122 bp, Homo sapiens
acagtagcaatgaaaaataatagctaccagggagaacaatcaatatgcctaataggtgggcgtggggaaaggaggaaatagacaaagacaatgactaagaaaatgacaataatacttagaga

SEQ ID NO: 82875 - DNA, 122 bp, Homo sapiens
cccgggcgcccctggtggagtcagctggggatcccctcgctagggcaagggcgtgggcatcgcctccctcggtgactttcttccttgcctgatgccacagcaaccggatgggggagggtgag

SEQ ID NO: 82876 - DNA, 122 bp, Homo sapiens
catatgcagccctcatctttgcaaataaagttttaaaatacggccttctgtagtaagtgacgctgcccaccagggggcaggactgccccacaatgctctcagtcactcccttcattcactac

SEQ ID NO: 82877 - DNA, 122 bp, Homo sapiens
cccgttagggcgtcctcttcctacaagcaccgtgtttccaatgaaaggttacgggggaagcgaccaaaccgacagccgagtccgggggtgccccttcacctctccagaagcccccggcccac

SEQ ID NO: 82878 - DNA, 122 bp, Homo sapiens
agacccccagacccctgcacacacgcccagtccatctgaccccagtacacctacatccagcgcagcctggcccctctgacccctgcacacacacgtgcagcccagaccagcccctctgaccc

SEQ ID NO: 82879 - DNA, 122 bp, Homo sapiens
gttttgggcgaggtcgctagagctgcagcacatggcagaaagtaaccgttctcccggatgcgcacagtcgttgtctggactaacaggctcctgtgcccaagggctcgccaagccccaccggg

SEQ ID NO: 82880 - DNA, 122 bp, Homo sapiens
ggagaaccacccacggggctttaaaaatgttggtgcccaccacctccccggaacagggcccgctctacctcggtcggggagcgcgggacctcagcgttcccttaacgccaccgtccgcgggt

SEQ ID NO: 82881 - DNA, 122 bp, Homo sapiens
gccactgccacgcacctggtagctaagtcaagaaaagagtccagtccacttggctgctcccgcggttgcgcgcatctcggcctctgcctcaggacaggtccacaggcccaagaatgggggag

SEQ ID NO: 82882 - DNA, 122 bp, Homo sapiens
ggaaagcgattctctcattctggcaaccagttggacggccccatcaccgccctccgggtccgagtcaacacatactacatcgtagggtaagattctttgaattcctggctgggcgcggtggc

SEQ ID NO: 82883 - DNA, 122 bp, Homo sapiens
catggcggcggacgactggcggcggaggaggacggtgcagctgcgagggtctcagttgcccgcagggcggctccacgctagctgcggccgggcggggcggcagggcgtgccgggtgggaggg

SEQ ID NO: 82884 - DNA, 122 bp, Homo sapiens
caacatggtgaaaccccatgtctactaaaaacatacaaaaattagccggccgtggtggcgcgttcctgcaatcatagctactcaagggaggctgagcaggagaattccttgaacccgggagg

SEQ ID NO: 82885 - DNA, 122 bp, Homo sapiens
aaccccaggctttcaatgattcactttatgtggataattatgtgcattttaaccaacatccgacttagaacatattcattttttggttaaaactaggcatttgtcaggtcgggcatggtggc

SEQ ID NO: 82886 - DNA, 122 bp, Homo sapiens
cgtagacgcggagggcccgctgggggacaacatacaagccgagggcccggcgggggacagcgtagacgcggagggccgggtgggggacagcgtagacgcggaaggtccggcgggggacagcg

SEQ ID NO: 82887 - DNA, 122 bp, Homo sapiens
tactgagggatactaaaggtgaataaaatagccacgtgctccagggtcatggagcttgcacgttagtggaggcaatgggcaaaaagcagataaacacacaaaatcagaggttgtgatctgtg

SEQ ID NO: 82888 - DNA, 122 bp, Homo sapiens
acacagagacaaatccccgaggcggggagactttcagggcatcgggatgctgaagcctcgcggtccccattcccaagcccaacccgtgcgccgcctgcgcgtggcgcagttaatttgggtaa

SEQ ID NO: 82889 - DNA, 122 bp, Homo sapiens
tcgccgaggacgaagaggctggcgtgcccggtggctcggctagctcccgggtcccggccccgcctggagggtgggtccgccgattactcactttgtttttaggggatttcagggccccctcc

SEQ ID NO: 82890 - DNA, 122 bp, Homo sapiens
aatactagagtgtttttcactttgctaactttactttctaggtgagctcatccaatctcacggctttaaataatctccttctctgactttccctttgactcctacacttccacatatgtttg

SEQ ID NO: 82891 - DNA, 122 bp, Homo sapiens
gcacgggaagcggaaacgaggccggccccgaaagctgagcaaagagtactgggactgtctcgagggcaagaagagcaagcacggtgagctccgggggcacgtgggtcctccctgcgccgggc

SEQ ID NO: 82892 - DNA, 122 bp, Homo sapiens
gacgtgtgtgcgcgcgtgtgcgtgtgcgcgtgtgtggcgcgctgggccggaacaagttgtcgcggcggcgccccctgggctgcccgggtcgggcagggcccgaggctcaggggaggaccggg

SEQ ID NO: 82893 - DNA, 122 bp, Homo sapiens
gcttcaaccttatggcagccaagagtcctggggcgctcctcctcattcctgatgctcctccgcattcctgatgctgcgaggagggcaggccacagcgacgtgcccctgacccctctctgcag

SEQ ID NO: 82894 - DNA, 122 bp, Homo sapiens
cccgaccctcgagccccctgcactgcggcacggagagaaatgccagcaggctgctctcaccgtagaccagtccccagttttccactcgtagcagcctgagtagtcctcgcaggcctcctcgg

SEQ ID NO: 82895 - DNA, 122 bp, Homo sapiens
accatccctgctgcctcaatcacagctggaactgagagggcagatgggccaggcagagcccgaatccatggttgagacactgcggctgagggaggggagctgtggatccaagcagtgttcag

SEQ ID NO: 82896 - DNA, 122 bp, Homo sapiens
ggagctcgggatcctccacgctggtgacgggggacgagtggagtggcctcccctgactggcgggttgagtgccctgagcagcccaggcccacgaggcaggcctggctcctagccccggggct

SEQ ID NO: 82897 - DNA, 122 bp, Homo sapiens
gctatctccaaggcacgtgtctttgccgccctcgtagtagccagcacagaacatgttctccgtgacgctgtaattgcccgagcgggactcatagctagttttgcactcagcgtgaggcacca

SEQ ID NO: 82898 - DNA, 122 bp, Homo sapiens
cgctcccctcggtggtgtgtgggtcctgggggtgcctgccggcccggccgaggaggcccacgcccaccatggtcccctgctggaaccatggcaacatcacccgctccaaggcggaggagctg

SEQ ID NO: 82899 - DNA, 122 bp, Homo sapiens
aacacatacgcggagaggcggcaggctgagggaatcggaaagacagtggccatgggaacccgcagactgatggctttggaaaaagtggcgagtgccctggaacctgaaagcttgcaaaaagc

SEQ ID NO: 82900 - DNA, 122 bp, Homo sapiens
atagattgtttggaattgggaccattatagttaaaattctttgggatttaggttaggaagcgaacactggttgtacatttcttgtatgtgtgtctgtgtccttgtgcatttttatgccctca

SEQ ID NO: 82901 - DNA, 122 bp, Homo sapiens
tttcaaagcgacttgtgcggagtcgtgcagttacagtaaggtcccatccagcctgggaatcgcctgtcttggctacgtgaaaatgctgagtttaacgaaaacgcagtgagcaggtgtcatca

SEQ ID NO: 82902 - DNA, 122 bp, Homo sapiens
atgcacactgaatacccagttattgaaaaatcgtgttcctagattggagttaaccatttccgcctaccacatcaaaccaaatctttgtcgtgatgctaagctagctgtacagacaaagatgt

SEQ ID NO: 82903 - DNA, 122 bp, Homo sapiens
tctctggcttctccctgctcacggtgctgcttactccgggaggctgagtcacttgagaaacggcaggaccccggctggtgaccagctcagaggggcagcacccggcagagggggtctgacac

SEQ ID NO: 82904 - DNA, 122 bp, Homo sapiens
cagatgcatcctctcctgtggctaaaagctccatgaggggccagtgagtcacatgacaaccgaatttctcctctgccaatctgaacatattctgggactgagacttccgtactcagggaaaa

SEQ ID NO: 82905 - DNA, 122 bp, Homo sapiens
cctccgccagggaaacttggaggaggagaaaagtttgtacagagggtggaaaggcgagagcggagctccaagcccggcagcccgagaggaagatgaacagccccaggccagagcctctggca

SEQ ID NO: 82906 - DNA, 122 bp, Homo sapiens
gggagacatggacagatgacgtgaggctggagggctaggggggagttcacaattgatggccgaggtgtttatcagtgaactaagagtggatgttgtcaactgatagggacgagagtttgagg

SEQ ID NO: 82907 - DNA, 122 bp, Homo sapiens
caggtctcttgaatggaggagatgtaaatacttgggaaatgccggagacacctcccaccgcggaactgagccgcggagaaaagcaagctgcagagaaagaggaagcagatgtgcagagaggc

SEQ ID NO: 82908 - DNA, 122 bp, Homo sapiens
ataagcaaaggatttaccatcatggagcttctgggactataccgaccacgggtcactctgcgctgcgatctgtaacctagtcagttctgagatgcacggtggctcaaacgcacttagcatgg

SEQ ID NO: 82909 - DNA, 122 bp, Homo sapiens
gagcgcggggggcctcggcccctcggaccccgggcacccgcgggcgggggatggtggccgcgtttgcacccccgccctagtgcatgttcccgctggaatcgttccacgaccgctccccctcc

SEQ ID NO: 82910 - DNA, 122 bp, Homo sapiens
aagtgtaagaagacacaggcgcccgggatactatataatctggttctgagctagagggagcgcatgcgccggcgacacttctggcggcaggagaaaggcgcgcatgcgcagagccgagacga

SEQ ID NO: 82911 - DNA, 122 bp, Homo sapiens
ctccaccaacaggagctccttgaggcgaggcacagtgtcttctgtgtccctggagccaagcgcatggctcagcccaggtcacgtgtccagtgaatgggtggcatctgagcctcctgcacctg

SEQ ID NO: 82912 - DNA, 122 bp, Homo sapiens
tccagcatcgtctccccttggtgtgtggagcagcagggcagagcctggatgtcagacagacggggttccacaaagtggctttgatcagccactcattttgcttatctataaaatgaggacac

SEQ ID NO: 82913 - DNA, 122 bp, Homo sapiens
ctctgtcacggcctcggtcactcccctctgtcacaacctctgcccagcgcggcgcccagccgggtacttacacactggcagagctcacagatgagaaacgcccccagggtggcctcctcgtg

SEQ ID NO: 82914 - DNA, 122 bp, Homo sapiens
acgcaggcagggctgcagttccgggcaggccttgggggctcaagatgcggctccccagggcgagtgctggggtcccggggcaggcgggcggctggagcgctctcgtgggcgggcgcaagggg

SEQ ID NO: 82915 - DNA, 122 bp, Homo sapiens
ctcctgcctctctgtaggatcaaagctgctctgtgaggctgtgtgatcctgggccaggagcggggagtcagcctcaaccctaagcaaggaggaagcatctttgcctgaatccttctggggga

SEQ ID NO: 82916 - DNA, 122 bp, Homo sapiens
agggacagctgggggcaggtggccccatcccggatggtacctgtgtgtgaccatcacatgcgctctgagccccgcgcggtgcagcgggcagggaggtcacagggtgcctggctgattcccgg

SEQ ID NO: 82917 - DNA, 122 bp, Homo sapiens
ggaagctgatgcagcacgtatcccggcaccaagaggcactcgccccgggcccctccctaacgacttgccttgtagaaagagttgcaggtcccaggcccccggaacccaaggctccgccatcc

SEQ ID NO: 82918 - DNA, 122 bp, Homo sapiens
aacagaggacttctcggggttcccgaattcccagggttaaaacaaacttggtttgtgcggcgacaccgctacccttaccggtccccagatagtcgcggatccccgaagctaagagccagggc

SEQ ID NO: 82919 - DNA, 122 bp, Homo sapiens
ctccccatatcggtatttccgttgacttagcgccccctagaaacttccaaacagaaaaatcgccatttcacaggagagccttgtcataattgccctgtatgtcatacccattcatccccata

SEQ ID NO: 82920 - DNA, 122 bp, Homo sapiens
ttttggacctggcaattcctgcctcggcgtgtttctgtcttccttaccttttctcccactcgaacaataagaaagctgtgtagaccacaccgccacggttggactcagggccgtaacaaaaa

SEQ ID NO: 82921 - DNA, 122 bp, Homo sapiens
cttgttctctgagagctgtggagaagctgtgaatcgcttttctgtcttggcatttcccggcgggacccatgaagaaaagagctttccttctcagcattttcaaagcactttattgagttcct

SEQ ID NO: 82922 - DNA, 122 bp, Homo sapiens
ctgcccacacggatgcccagagcgtgttccccaagaccagcgggtctcatgctgtccacacgctcccaccaggcgatcgacaccagggtccgcctgtgccctgcctgggtggggtcagccac

SEQ ID NO: 82923 - DNA, 122 bp, Homo sapiens
gagaagggaggattgcttgagcccaggagtttgaggctgcagtgagccatgatggaatcccggcactccagcctggacgacagagaaagaccctatctctgagaaaaacaaaacaaaacaaa

SEQ ID NO: 82924 - DNA, 122 bp, Homo sapiens
ggaggcagtcattcaaactgccttttgtgtttggctaatcagggcagcccaggttcccagcggaggtgcgtctgtggtgtcagacacctgtgtctcagctctgtcttcctcgggctggctcc

SEQ ID NO: 82925 - DNA, 122 bp, Homo sapiens
aagacaggaggattaaacagaattcttggatgttcaatgcggctccatggggacctctagcggctgttttgtcgaactgcggtctccagccttcccagcctcaggacattccacacctggat

SEQ ID NO: 82926 - DNA, 122 bp, Homo sapiens
cgagcacgactgaccatggccaccgcggtgtttccctccctcctgctctggggaaggagccgtcaatccctcgtgcactcagtgccaccagggctgctcccgcccggggctcacactgatgt

SEQ ID NO: 82927 - DNA, 122 bp, Homo sapiens
tgcccacgttctccttgtaggagacgaagttgtggaaggtgaggtccaccatgtccgggccggacaccaccgtgagtgtcttcagcaggaaactgttatcaggaaagtccatgttgaagacg

SEQ ID NO: 82928 - DNA, 122 bp, Homo sapiens
gccctggccgccttcaacgctcagaacaacggctccaattttcagctggaggaaatttcccgggctcagcttgtggtaaagactgagattcttttgacaggttgggcagttcggtggcactt

SEQ ID NO: 82929 - DNA, 122 bp, Homo sapiens
tggctgaagtcacagatgtgccactgggatccagcttgtgctcagctgcccaaatcacaccgtcaaatgtcagtgtgggctccaaatgccaaagaaagggattacatttgagcaaaagaatt

SEQ ID NO: 82930 - DNA, 122 bp, Homo sapiens
ccgccgcgtagtgggtcttaaatggagctgaaccctttcgcgcagtgagcagagagccaacgtgaggctaaaagccaggagggagggaggcgggaccagcgaagagccgcaggcaccgagac

SEQ ID NO: 82931 - DNA, 122 bp, Homo sapiens
cttaaaataacccagccacattttctgtgtggctcaaccagtcccacacgggcctcagcacggtcgagcagctgatttacaagggcccaacgccatgggttttcacttctctctcctgccga

SEQ ID NO: 82932 - DNA, 122 bp, Homo sapiens
tctgaaagtctggaggccaatgagagatccagaatggagatgacgtttaggagtcctccgcgtgcagatggcgtttagcgccctaggtctgagcacgaagactccgtgaaacagcacagatg

SEQ ID NO: 82933 - DNA, 122 bp, Homo sapiens
ccgtccgagccttggtgccagtggctacacgcagacccagcccacacctggagacatgaacgtggaagcaccgggcttgtactgatgctttgttccttgggtacagcaatcctgccagaaag

SEQ ID NO: 82934 - DNA, 122 bp, Homo sapiens
ggtcgccatcttcccagcaacaacgtcacttcccttccggaccacaaggggcgctgactccgaacttaggacaggaagaaacaggcacatttccggtctctatgctttctcatccggccggc

SEQ ID NO: 82935 - DNA, 122 bp, Homo sapiens
ataccagactaatgattaaataaattaacagtcctagggttccggaagtggcctaaagcacgtagtagccctccttagagctcactgcctttgtgttgtagtttgacagaagcaaagttaag

SEQ ID NO: 82936 - DNA, 122 bp, Homo sapiens
ggaataccatcagacacctatcaacaaaaagaatcacaacaaactgagccagcagcaaatcgggttgcaactcaaggggagatccgctccttgcttgccttctttttataatccattatttt

SEQ ID NO: 82937 - DNA, 122 bp, Homo sapiens
agggagaggcgccggcgggaaccagggctgcacgcggtgcttgcgggccagtgtgagttccgggtgggcgtgggctcagtgggccctgcactcggagtgtccagccggccctgccggccctg

SEQ ID NO: 82938 - DNA, 122 bp, Homo sapiens
ccggaggcgagcaggaggctgggatgctgcaagggggtgaagagtcgaggcttttcggctcgctgctctggactttgccatggcgtgcgtgcagctcctggaagttgtcccagggtgatgcc

SEQ ID NO: 82939 - DNA, 122 bp, Homo sapiens
cacggaactctacaaccacgttttcgctgctccatcgcgccgccatctcccccgcccggccgccgcggccccaggacggcgccctcccaccccgccgtccccagtatcccgggaccgtgcgc

SEQ ID NO: 82940 - DNA, 122 bp, Homo sapiens
gctgattattcctcttgcattttaaaactaaccaccctggccgggcgcggtggctcacagcgaggcaggcggatcgcttgagcccatgagttcgagaccagcccggggaacgtggcgaaacc

SEQ ID NO: 82941 - DNA, 122 bp, Homo sapiens
aaagccttacagtcactatcgcctgacaagccagatttggagcacagggcacagaaggaccgattcaccatattcttcctcagcaccacccctgactcacctgctaacactccctaggaaaa

SEQ ID NO: 82942 - DNA, 122 bp, Homo sapiens
tcgcctcgtcgccccttttgtgtcggtgtccgcgctccctggcggctgcgtgggcgctctcggccttgcaggtggcccccctttgtgttactgcccctgtctgtgggctgcgcgtcccctag

SEQ ID NO: 82943 - DNA, 122 bp, Homo sapiens
aaggttattgacttattttggcagaatgtgtttattattttgtacctctgtacacaagcacgtatgtctcacttgacattcagtgcgtcttaatgaaaaagaacacaaattgctcaatgcat

SEQ ID NO: 82944 - DNA, 122 bp, Homo sapiens
tcattaaatgataacaatcccccccacccaggctgctgcctctgcggtcagagtgtatggcggctgtttggtctcgggccccaggctgctacaagcattcacattgttcttcaagtgatggc

SEQ ID NO: 82945 - DNA, 122 bp, Homo sapiens
ataaaccagccgaggactgctttcattcgcacatcagccaaggcgtgagcagaattaaagcgccttctaattcgacccctggcaacgtgcgcgtcacggacaaatgtttagttttaacgcct

SEQ ID NO: 82946 - DNA, 122 bp, Homo sapiens
cagaggtggtggaaggggccagggacctgcaggcctccccctggaactgggactggtctccgtctgctaacgtcaaggtcagctcccccgtggagctgacttcaacagccatgccagcccag

SEQ ID NO: 82947 - DNA, 122 bp, Homo sapiens
ggtttctgggctgcaggcggcgctgcatggcccgggaacttgttgagtctaccctggagccgcctccggagcagctggcgggcgggggactccgtgtgttctctcagggatggggggtcgct

SEQ ID NO: 82948 - DNA, 122 bp, Homo sapiens
tcccgcagggacagctcggggaccatgcaggcccgggtgggcgtgtgggctcacatagctcggtggtgaacagctggcacgtctctgggttgcggacgataagggccacgtagacttgagga

SEQ ID NO: 82949 - DNA, 122 bp, Homo sapiens
tgcataatgtgaggcccctggtcactggccccctccttccctgcagcagcagttatggagcgcctccatctggccctgagacccatctgcagcctcccaccgctgctcactcgtagtgaggt

SEQ ID NO: 82950 - DNA, 122 bp, Homo sapiens
tgtggacccggggtggacgggcggtgacgtgcgtgtggacccggcgtggacgggcggtgacgtgcgtgtggacccggcgtggacgcagccccgacgtgaatggatgtggttccgacgtgact

SEQ ID NO: 82951 - DNA, 122 bp, Homo sapiens
gtggtggggagcaggtgttggggggtctggtctgggtctccctgtggtcttctgttcttccggagatcagacttcctgcaaggactggcagccccgccatacccagaggctgagtgagctgg

SEQ ID NO: 82952 - DNA, 122 bp, Homo sapiens
gcaccacaatggctgacttgagtagtttggacagacactgtctgactcaacaaagcttgacgtatttactatcgggctctgtgcagaaacactttgccaacccctgtcctaatgactgataa

SEQ ID NO: 82953 - DNA, 122 bp, Homo sapiens
tagcagagctgggattggagccccggcctttgtgatcccagagcaccagcaataccgtctcggcctcggctcctgggttataccctctgtcacgccaagcccatcagcccgcttgtgctgtc

SEQ ID NO: 82954 - DNA, 122 bp, Homo sapiens
acgctggtgacgccctctcagctattgccccagatccaaggcgcgcggggaagacggccacgtaaagatacggcgccctggtgactccgcctcgcccaatcagagcccgcgcaacccctgaa

SEQ ID NO: 82955 - DNA, 122 bp, Homo sapiens
cttccatctactaggctatcacctcctttttcccgggtgcaggggaataggcacgggagccgagttagggcgagaaaggggcggaggccgctggcacctgactcacctgaagagtcggtccc

SEQ ID NO: 82956 - DNA, 122 bp, Homo sapiens
ctaccaataatttgaagcctttgctttaggcaggaggcatgtggctatgaatagggaacacgtagatttgaccctggttctgcatccaactagctgtttcttgaaagagcctggatcctcag

SEQ ID NO: 82957 - DNA, 122 bp, Homo sapiens
cctccaggggcccggttcgatgtccccatctgcccacggcgcctctcgtgccagctgctccgcctgtcctgcccttgctcagaccacccaagtatcatctgtgctctggcccctggccacca

SEQ ID NO: 82958 - DNA, 122 bp, Homo sapiens
ctcggaaccagatacggttactgggggcttctcagagcggcaggaaggtagagtaagaaccggacaccggggctctgacattacacagaaaaggtcagaattcctcccttcaagtcacccta

SEQ ID NO: 82959 - DNA, 122 bp, Homo sapiens
cggtcagggtggagggccccttgccacccatgcagatatagttgcttagctcctcctcaccgcgggctggtggggtgtggcccagggaatccggagtgacactgcggaaggaactccggaaa

SEQ ID NO: 82960 - DNA, 122 bp, Homo sapiens
tggggggcgatggcatcttgggcttagaatcccctttccttccaaggcagagggggtgggcgcacggctaggaagctccgcgagccgcgcacacgccatcgcctgcggcctccccaggcagc

SEQ ID NO: 82961 - DNA, 122 bp, Homo sapiens
tttgtgttcgcttatcattttcaggtgggcaccaatagggtgggggttttcctgtggctgcgtgccctgacacggtggaggccttcggctccggtcccgccgtgtgcctggtgccccgtgac

SEQ ID NO: 82962 - DNA, 122 bp, Homo sapiens
attctgtaaggtggaaattagtactgccttttcctgggacctatgttcccctccgagccacgcgagggcagcaacgcgcgcactctgaggaacacccccttcctcaggactcgtccgcctgt

SEQ ID NO: 82963 - DNA, 122 bp, Homo sapiens
ggaggtgtaactgtgtgtaactttgtggggttacagggtggaggagttgagagaagaaaacggaggcttttagggtagaaatcctctagaacagtgattctctgtgttggcgtgctagggag

SEQ ID NO: 82964 - DNA, 122 bp, Homo sapiens
cactgggacaagaagtgtaaggcgaaactacctgggcaacctcaagcaatgctttacactcggctgccaaacggaaaggaccacttccgcccagctctcccgctacggggagccaagtgcca

SEQ ID NO: 82965 - DNA, 122 bp, Homo sapiens
gagtctgaatctacaaaggcggctgcagtggtctccacccgtgagtacctcagcctccaccgagagcccgtagacttgtgccccagtaggaaactttctgcctagaaagttagctaaacact

SEQ ID NO: 82966 - DNA, 122 bp, Homo sapiens
gcaccttccttctgcacaagcttcaccagcatttttagcggcacagaccacaaatcagcccgaggttttctgtaaattcacacacagcaaagaagtattatggggtccaggctgatgacacc

SEQ ID NO: 82967 - DNA, 122 bp, Homo sapiens
ttttggttctttttcgtcccctgttgcaaattctcatggtttgggttgggtggtggagagcgtgtgtcacccgcgggtggcactgcccgcggtgggcggtgggcagtgggtggtggtggggg

SEQ ID NO: 82968 - DNA, 122 bp, Homo sapiens
tagagcttgaggcgagggttttatggccagggaaaccggagaagcgggcggagctgagagcgggtgacaccccaggactccagagagccgaggtctggagcccgcaagagaaggtcgccggg

SEQ ID NO: 82969 - DNA, 122 bp, Homo sapiens
gcgcagggcacagggcgcgaggcgctgggtgcaggggaacccagcagctgcgcctaccttcggctgcctgcagaacgctgacctccagccccttaaacgtcttgctggcgagctcctccagc

SEQ ID NO: 82970 - DNA, 122 bp, Homo sapiens
ccctcgcccaccgagggcagctttgccttcctgggcatccctcctcccccaggcctggcccgctgcctgtccaaggctcctgtgcggggtctccacccacacattcctggggcgtgaggcgc

SEQ ID NO: 82971 - DNA, 122 bp, Homo sapiens
cggactcttggcctcaggcgatctgcacgccttggcttcctgaagtgctgggattacaggcgtgagacactgcccaggctatgagatccttgataaccatgagaccctgtgccacagttccc

SEQ ID NO: 82972 - DNA, 122 bp, Homo sapiens
tgggtttcggggagtcacttggtctcctctcctgccttgccggagacctcaggtttccttcgcgctgtgctcggcctttcttcactcttttactgaagagccaggcgggtgtccgcttgaca

SEQ ID NO: 82973 - DNA, 122 bp, Homo sapiens
ccaccaactgcacaattcataacctaaatctctccattctcaatgacaccaggggacattcgaatttgggctcctcttggaattgttttccctcgaggccacgctaatgacctcctcaacca

SEQ ID NO: 82974 - DNA, 122 bp, Homo sapiens
ctgagcgccagggtctcttcctctcctcctcgtcctttcggatcccgggccctgcggccgcgcttccgcttcagaccccgcatcaggacccgggacacggggacttcttccgggctgcaggc

SEQ ID NO: 82975 - DNA, 122 bp, Homo sapiens
gcgcagccagagcgcctagcggccgccagggccccaaccggccggacctcagcaataaggcggcccccggacctcaccccgcgccggcccccccagggactgcatgtggacccccgggcggc

SEQ ID NO: 82976 - DNA, 122 bp, Homo sapiens
ggttgcttacctgggaaatgcagacagcagtgtggggcctctgccctggcttctgtgacacgtgggctctcagcaacaggaaccagttaggtacaaatcagcagagatggtgtctctgtctc

SEQ ID NO: 82977 - DNA, 122 bp, Homo sapiens
actttcccctctgcagagcccagagccaggcccgagcccccccagcctgacagcaaagtgcgcttggcaagcagagcccgtgtctggtttatgtagagcaaggaaaccactggcaagcggct

SEQ ID NO: 82978 - DNA, 122 bp, Homo sapiens
aagaattttaaacttgcagaggggagctaagtcagaagacaaatgcaaatggcaaacactcggggtaacttggatacaagcctctgacttaacctcagccgctggcttggagcagagaaaga

SEQ ID NO: 82979 - DNA, 122 bp, Homo sapiens
tcggcattcctcatgagggtgtggagggcagggcctgctccggggaacagctgctgggcacggaattagcaggtcccggaaacaagcaagctcgatgaatcccagaagcctggcctcggaca

SEQ ID NO: 82980 - DNA, 122 bp, Homo sapiens
cactcctcagcccttgggtggtcgatgggaccggggcgccgtgtagcagggggcggcgctcgtcggggaggcttgggcggcacaggagcccacggagcggggggaggctcaggcatggcggg

SEQ ID NO: 82981 - DNA, 122 bp, Homo sapiens
ggctgggattggcagccatgactcataagggcggaataccacggggatcggtttgtctggcgaacttgagtgaagggtcaagatctggatttcacctttcctctgagcttcctgataacccg

SEQ ID NO: 82982 - DNA, 122 bp, Homo sapiens
aagcctccgtggagggtctctgcgcccctggggtgctgtgtgcacagtggaatgttaatgcggccagtgctctgggccactcctccatgcacacaaaacagagctcagacgaggtaataaaa

SEQ ID NO: 82983 - DNA, 122 bp, Homo sapiens
agggggacctcgcgcgaaccaatcccagggccccgggggcggggctctgcgggggtggggcgagctgtcattcccagctcccagaccgggaaactgaggctcagaggggacctggctccggc

SEQ ID NO: 82984 - DNA, 122 bp, Homo sapiens
cacacgctctgaggtaccagaggtagcaaagcaaaataagcgcggggtcccgcacggcagcgcgggtgcagcgcccaaacctcgcgagatttgttggctgggccaagtaccacccaccaaat

SEQ ID NO: 82985 - DNA, 122 bp, Homo sapiens
tgccgggccacccacgtggcagccacacaacatgccacagtgacctccagctcacctccgcgggtgcccagccccctctggtcagcagggctccctggcagggcataccaagctcacaccag

SEQ ID NO: 82986 - DNA, 122 bp, Homo sapiens
agcagggtgccggcccttgcgccaagaacctgctcgggggtcgtatcccaagatgtggagcgtttgttctttggctgtttgctataaatctagttgttgctgactttgggttcactgcgttg

SEQ ID NO: 82987 - DNA, 122 bp, Homo sapiens
tgttccgcctggggaaccgagtgccatggacagagcagacacttgggcagaactgaacagcgtcatcttcgcctgcctggcgctccctgcctgggaaatggagcttcagctctgtctcccgg

SEQ ID NO: 82988 - DNA, 122 bp, Homo sapiens
gggtaattgatctggaggtgccaatttgcagcaactaaatatttggtttctgcctttgcccgctccgcgctctgctcaaacaaacttcaattaaaagcgaaaagcgaggggtggggaggcgg

SEQ ID NO: 82989 - DNA, 122 bp, Homo sapiens
tttctaagccatagagtgagagagctgtgcctttacagctcctcctgacccgtcattggacgagggctgccccaggaaggggcatggccgtgggccaggcagcgctcttcagcagatgcatt

SEQ ID NO: 82990 - DNA, 122 bp, Homo sapiens
aagtctaaaattagccacaccccctcctgctgctaaaactcagctggagcagcagcagcacggggcccagctacttttagaaaccatttctttgtggcttagtgctgagcaacagaaacagg

SEQ ID NO: 82991 - DNA, 122 bp, Homo sapiens
cttggtccccgcttaccaggcagcggcgccagcctagttcttagccccgccctggatgggcgccgccttccatcacgccaaagactttccaaaacagcccttcttgggcctgggaagcagat

SEQ ID NO: 82992 - DNA, 122 bp, Homo sapiens
agtcctttgaagtctcagaagcattcgatagtgtcagtcctccttgaaaacctgtcttcccgtgactctcttggtccaatactctccgggttctccttccactcctccagaggcttgttctc

SEQ ID NO: 82993 - DNA, 122 bp, Homo sapiens
gcggtgcacatctgggaacactctggccagtgcgctggagagctgactcccggccaagctcgccgggcaggaggggtggcctgggtctgggaagcgcctcccagtcccgggcgaagctgccc

SEQ ID NO: 82994 - DNA, 122 bp, Homo sapiens
cccactccttcttccctctctccctttctcctctccctgctttcttgaaaaggactgaatcgccactacagcctgggtgcaaaatcagcaagaaacattgagtatttttttttctttgtatg

SEQ ID NO: 82995 - DNA, 122 bp, Homo sapiens
cctctcccgggctgggagtgcacggcgcggtgcgcccaggtaggcttgggggaagggtgccgagctccggaaagttccacaggtcctccgcagccctggggagcaggacccagaaaccgacg

SEQ ID NO: 82996 - DNA, 122 bp, Homo sapiens
tccagcctgggcaccattgagcattgagtgaaggagactccgtctgcaatcccagaacctcgggaggccgaggctggcggatcactcatggttaggagctggagaccagcccggccaacaca

SEQ ID NO: 82997 - DNA, 122 bp, Homo sapiens
tctgcggggtgggagtgacctggccttaccatgttgagctcctccgctgccgcagcccaacgctactacttgacctcaaccgccgctgcagctgcgcacgcccaacgacagcctcccgccgt

SEQ ID NO: 82998 - DNA, 122 bp, Homo sapiens
tctgaactcccgtctgagcatactgccctagttacagtgggcatttgagggcaggggatgcggtggcttcttatgcttccagggactccagatggtttccaagtaacaatgtctaaaattga

SEQ ID NO: 82999 - DNA, 122 bp, Homo sapiens
gcgtctgatcgcagtctggctccccgagtcatgagttcccgcccctcccccgtcccgccccgggcagctgcgcaccctgggcctgacactccctggccctgcctccacccaggacccttctc

SEQ ID NO: 83000 - DNA, 122 bp, Homo sapiens
aagtcgcttcacaaactctgcaagtttgggatcaatatttacaccctctctgccttctcccgcccgttttcccgctgctactcaagaaagtaactgtcccctgctgctctgtgtaaacgcgg

SEQ ID NO: 83001 - DNA, 122 bp, Homo sapiens
ccagtcaaagttcctctaggaaaagattagacacggctccgaaagttccactgggctagacgcccgccgagtctccgtttcaccttgtctgtggagacgcagctatgcggtgtctgataagt

SEQ ID NO: 83002 - DNA, 122 bp, Homo sapiens
ggtctcatttgccttcttagagatcacaagccaaagctttttattctagagccaaggtcacggaagcccagagggcatcttgtggctcgggagtagctctctgctgtcttctcagctctgct

SEQ ID NO: 83003 - DNA, 122 bp, Homo sapiens
gctatgcccggtgacagctgagctcttcagaaatgcgtcacattcagcgttcacttccttcgcttcctccactacctatgacatagcgggggaaagagacaaccatgagagaggggtccctc

SEQ ID NO: 83004 - DNA, 122 bp, Homo sapiens
cccgccgcttgccccccgaatgaccaaatagggcgcaggagcggggcctggagggggcgtcgcgtgcgcagccggggcggcggggccgggctgggtggcgcgggggcgggctcggggttctg

SEQ ID NO: 83005 - DNA, 122 bp, Homo sapiens
agagttcacagatttcaatgatgccgtgtcgtggactgactgtcctcatggctctgcacccgcagaggtggctttgcaagagcgacagtcagtgaggcgtttgctcggcaccgttttttctg

SEQ ID NO: 83006 - DNA, 122 bp, Homo sapiens
tgctagaaaagaggcctaaggggtctgcccaacgtcctgagaacccgagagagcagggcccgctgggacaggcaggggaaggcctcgggagggacacgacggtccggcagcagagcctgcgg

SEQ ID NO: 83007 - DNA, 122 bp, Homo sapiens
gcacgacagccaccaaagcacgaaaggggctctgcacatcgggcaccacgagctcaactgcgtgagccgggctctgtgaaggaggcgctaagctgtgtttgactgaagagttcatggaggga

SEQ ID NO: 83008 - DNA, 122 bp, Homo sapiens
tcctctgccatttattttctcagaatccttgtgggggcggggaggggaagagcaccggtgcgaaccccggggtgccccctcgcccgacttggacttctccgactaaagaggtgggaggagtt

SEQ ID NO: 83009 - DNA, 122 bp, Homo sapiens
cgcccctctcttctcgcccaaccgcccacctctgttggccccgccctcccatctaagtcacgcctcctagtaggtcaatttagcttctccagctccagagcccagactcctcattgggcgca

SEQ ID NO: 83010 - DNA, 122 bp, Homo sapiens
ggcgattcagaagcaggaggagatcaacttccgcctgcaggactacatcgacaggatcatcgtggccatcatggagaccaacccgtccatcctggaggtcaagtagaggcaggaaggtccag

SEQ ID NO: 83011 - DNA, 122 bp, Homo sapiens
ggcccaattcccactcccccaaacacacacaagtacacactgactaaggcacagctagggcgggggcgggcagaaggccccttgggaggacgtggcgccacagctgcaatgggtgtgggggt

SEQ ID NO: 83012 - DNA, 122 bp, Homo sapiens
agggggtctcctggtttgtaacagaaagtgcgtaaggaatgggaatccgtctgatggcaacggtggagcactggcctgttctccgttcacaccaggatgctgaggatggcgtgtgaacgcgg

SEQ ID NO: 83013 - DNA, 122 bp, Homo sapiens
gcctcaggtgatccgcccaccttggcctccacaagtgctgggattacaggtgtgagccaccgtgcctggcccgttactattcttgagctttgttttggatccagatacttggaaactgaaaa

SEQ ID NO: 83014 - DNA, 122 bp, Homo sapiens
tggtggcttcttggcctctcttacagtagtaaatttagttttcagcctccctttttgtagcgccaacaaagtcaatcattacttctgtgacatctcagcagtcattcttctggcttgtacca

SEQ ID NO: 83015 - DNA, 122 bp, Homo sapiens
ccagcctccccacgtccgatatctacccccaggggaccgttactattgacagcgagcgcgcggagctgcatgggcacacaaggcggaggggacaccaaggtccgttattccccagcacgttc

SEQ ID NO: 83016 - DNA, 122 bp, Homo sapiens
atccgtcatccgctaacgccgcgctccctgcatccctggcttggcccccaggctctgcgccgcttgtctgtagcagacacaactcagctcccttactgtcctcaggcccggctatttcaaga

SEQ ID NO: 83017 - DNA, 122 bp, Homo sapiens
ttcaaagccaaacgcctcgtcgtttgttaatcgctgattgggtgtagggctcgtacactacgcttcagctcgtggttccgtggcttcccagtgctgcacgggatcgcagtgaggccgcttgt

SEQ ID NO: 83018 - DNA, 122 bp, Homo sapiens
ggggaagttacttagggacgtgtaggagcttcagtttcctcctctgaaaaagagagaacacggtcaagtttcttcccaagctcagtcactctgtcagcaaaaagatggaaagccagccctcg

SEQ ID NO: 83019 - DNA, 122 bp, Homo sapiens
tgaaaaagcgggagcctggtctcagctggggcctggggcctgccccgcccatgcaggggtcgcgggagcaggggctcggcctccttcccaggccgtggcggcgccgccccggaggcagggac

SEQ ID NO: 83020 - DNA, 122 bp, Homo sapiens
ttgtaattcccttcctaggaattttgcaagagggaaagccaatagccgcttaaagccaaacgctcttccggtcttttgtaaaagtgttaaaaccagtggagaaagggagggaagaaagagag

SEQ ID NO: 83021 - DNA, 122 bp, Homo sapiens
cagcaaatcctggcaactccgccttcagcatctaccgggagccggcacttcccacacctgcgcagacccacccgggccccagcccaggcagcccctgcacggggagcccgcgggtctctggc

SEQ ID NO: 83022 - DNA, 122 bp, Homo sapiens
agccaaacaggatctgaagacagttgtctctaactcactcctccccacttcatgaatccccgtgagttctttcccactggatagtacttgcatattacacaatcagctgcatctagcatctg

SEQ ID NO: 83023 - DNA, 122 bp, Homo sapiens
cttggacccacccttggaactaaagaaatttacctgcacaggagattttgcttctttaagcgcctgggcaagctctaatcccggtgcagtcagaagcatgcagcctgaaaccacctcttata

SEQ ID NO: 83024 - DNA, 122 bp, Homo sapiens
gaggaggagatgagtcctgggactactcttggggtcactcagtccatctcccagcctctccgtgagactctctggcaacctgaccctgcctttctgcccccacctcccactcagtaaggaca

SEQ ID NO: 83025 - DNA, 122 bp, Homo sapiens
cccaagttcccagttcatgtcagacactgaagacacacttgtgaggatcgggaagccccgcggtagccccagtcgacctctgggtgccacgtggcacctccactgttgtgactacacacaca

SEQ ID NO: 83026 - DNA, 122 bp, Homo sapiens
gctgtcagctttcatgagggagctccctggctggttcctgttctttggggtcttcctccccgtgactttgctgctgctcctcctcatcgcctacttcaggatcaaactgattgagggtaagt

SEQ ID NO: 83027 - DNA, 122 bp, Homo sapiens
ggaagctgtgactccttcccatcgccttcactctagggaggaatccgaggggcagctctgcgcttctttccaactctatcaactttacaagtgcaatcgggccaattgacaggagcgcctcg

SEQ ID NO: 83028 - DNA, 122 bp, Homo sapiens
acaagaaaatcacatactcacttttcattagttttcctgacaattcttttagtggagaagcgggactatttctactggctactgtaagtgtagaggaagattcttgggtttccatggaaact

SEQ ID NO: 83029 - DNA, 122 bp, Homo sapiens
ctggagagagacagtcattctgagtgttcggaaattgaagactagatctgggtctggttccgtacccatgccctgtgatgacagacccgtgatctctcttctgagagggaaacaaagacctc

SEQ ID NO: 83030 - DNA, 122 bp, Homo sapiens
cgtctcccaagtcttcaacctgttcagaacgatgggcctgcgccacctgcccgtggtgaacgctgtgggagaggtgagcgaggccccggccctgcccccacctttgagagaggatcccctag

SEQ ID NO: 83031 - DNA, 122 bp, Homo sapiens
caaacactttgtgagcagagatcagctgtgcctgagcagtgaggccatgctaattctccacgtggctttaattttttcatttacagtgcatacattcgatgttaaattatccatgacaatgg

SEQ ID NO: 83032 - DNA, 122 bp, Homo sapiens
tttggctggtagaaggagctaaagaaaactgttagcttgcacgttccgggcaacgcctgccggctcatctaggacagaaatgcttaggttgcaaggaaagtccaacactggactccgaaaat

SEQ ID NO: 83033 - DNA, 122 bp, Homo sapiens
ccagcctcttggtctgagagtgcggacggcgctcgctaggaggctggacagaggcctccccgccctgccccggggaccacactcaccccgtgcagcttcatgtagaggccgcaggcattgca

SEQ ID NO: 83034 - DNA, 122 bp, Homo sapiens
cacacctgggggagtcagaaataaacatgccttcctggagggccactgaaacagacggttcgttcgtttaagcctcagggagaacaagtgaataatttgatcctttggttcacgtcgcaaat

SEQ ID NO: 83035 - DNA, 122 bp, Homo sapiens
ctggaccctccgcgcaaggaggtcacgggctccatccagctgtgccgtgacgccgggatccgggtgatcatgatcactggggacaacaagggcacagccattgccatctgccggcgaattgg

SEQ ID NO: 83036 - DNA, 122 bp, Homo sapiens
aggctgggaagtggctccgtaagcgccggggcctgcaccgtaggaggaggggacctgtgtcgggaaccttccggaagccaggacgagagtactcccatcctgagcgaactgctttctccttt

SEQ ID NO: 83037 - DNA, 122 bp, Homo sapiens
aggaatgccacgtggtatgagggtgggcacaatgggcgtccagaaaagccaatcaacagccgtaggtgccaactccggaggacgaagggaaccaataggaaggaagtcgaggtaaaaacaga

SEQ ID NO: 83038 - DNA, 122 bp, Homo sapiens
cacatgcctgcctcttggatgatgtaaattcttcccctagactttttactagaccactatcggggttctcttccactgcagcggccacccaataactcgttttaaagactgcctcttgcggc

SEQ ID NO: 83039 - DNA, 122 bp, Homo sapiens
aaaaaaaaaaaaaaaaaacctacctaggaaatggctgtaaggggcctccagtgaggattccgtgtcaccctgaactgccccgcaggagagaagtggttgtgtgaactgagagcgcaggaaag

SEQ ID NO: 83040 - DNA, 122 bp, Homo sapiens
gtccctatgcatagatgcagattgtcagagttaacagtgttgtaatagattgtgagctttcggactccatggctagggaagcaggaagagatgtgtctacagggactggctagcagggagac

SEQ ID NO: 83041 - DNA, 122 bp, Homo sapiens
tttattttcactgcagaccctttgcccaagaatgcctttaaccaccagtggggtgacattcgttttgcaggactcattctctaacttccggccctccacgttctggccccgggctctctttt

SEQ ID NO: 83042 - DNA, 122 bp, Homo sapiens
gccggtacccaagccggggctggagaaatcctctccgtccccagctccaggcggctcgcgcgagcacgcttcctccggagtgacaggcgcgatttatacattatttacaacagtaattaaag

SEQ ID NO: 83043 - DNA, 122 bp, Homo sapiens
gtgggggtgggggtggtgaggtggtggcgagcatggctctagaactagcaagcccacacccgagccggacccccgcggagcacttatcagggtggctagctggaatcgcgtgtcagactcac

SEQ ID NO: 83044 - DNA, 122 bp, Homo sapiens
ccaatcagaggagtccggagaccgggggcaaagtcaaggagcatccggtcgggttctaggcgcccgctgcttgggtttaaatcacccgcgcttcgctgcacgcgatgggccctgagccctgc

SEQ ID NO: 83045 - DNA, 122 bp, Homo sapiens
ttcccctcccacggcagcttcgcacggccagcagcgcccccacagctccgtgtcttcccgcgcggctccacaaaaaaaccctaccttccgccatgtctggcccggcactgcctgcaacctcg

SEQ ID NO: 83046 - DNA, 122 bp, Homo sapiens
gcgcgaggccctccctgggaataggaagcgggagaggctggagatgtttcgcattctttccgttttcctgagaagtttttcttgggttcagtcacttttaaaagtctgttaaacgtggtccg

SEQ ID NO: 83047 - DNA, 122 bp, Homo sapiens
aatttcgcgcctattttttgttggctgggtgttctcgccagtgattgggtcccggcaaggcgtgccggtgcgctcggctgcggctgctccgtcgacctttgcaggaccgggcggtgcagggc

SEQ ID NO: 83048 - DNA, 122 bp, Homo sapiens
atgctatttggacgaagcaaacgggctgaagaaggtttgactgtatttggttgtaggcttcgcttggcaccgtctctttaaaaggctgcctgcctttgaactaatcctctatttataatcca

SEQ ID NO: 83049 - DNA, 122 bp, Homo sapiens
acttgaggggtgcagcctgctggggacaggccaggcaacagtcagcgttagctctgcttccgccttgaaataggctagattccagtttcccatttgcttgggggtcggtgggatgggagatc

SEQ ID NO: 83050 - DNA, 122 bp, Homo sapiens
cgcggagcggagagggaccaggctcggcactgatttgtgttcagggctagcccagaggggcggggccaggtacggggcgcagccgggagcgggaggggcggtgcaggacggggccgggcacg

SEQ ID NO: 83051 - DNA, 122 bp, Homo sapiens
gcacacacacgaacatttgcctcgcggtagacacggggggaaatgtaatatttttttaagcgcttaaacaatttctgaaattcctcaaagaaaagcctttcagaggcaccttggcctcaagc

SEQ ID NO: 83052 - DNA, 122 bp, Homo sapiens
tgtccgcccagaatgctcaagcatcaactcgtatgagtcaggggaattggtgaaataaaccgcaaaatccagtctatctatcctataattaagcccctctaatgtatggacaaaacagattg

SEQ ID NO: 83053 - DNA, 122 bp, Homo sapiens
caatcagggttgggttgggtctttgacagctttctttgccagattcaaagatggcgcttacggccacgctaagaatgcagcgtgaagctgcagttctgccatcactcaagatggctgccccc

SEQ ID NO: 83054 - DNA, 122 bp, Homo sapiens
agctccccgagggcaggaatatgttttgctctctactcgatcccagcgactggcaacgagcgtttaataaatatctgttgaatgaataaatgtctgcgtgtgagagcgtctaccctccagag

SEQ ID NO: 83055 - DNA, 122 bp, Homo sapiens
actaaaaaaatcctagatgtcaaagattagtcctccacatccaaatcagccattgtctcccggtctgctcctttgcttctattttaaccttcacatagcagcaggaactctgtttttttaag

SEQ ID NO: 83056 - DNA, 122 bp, Homo sapiens
gagagagagagagacagagagagatttgaatgatgtgccaagtaataaatgtttctttctcgagggtccacagacctctgtattgtatgacaaacttattcactgggacaacgtagcaggtg

SEQ ID NO: 83057 - DNA, 122 bp, Homo sapiens
aagtccctttcccatctgatcctcagagattctaagggacttagcctatccatgactcttcgtcctgcttctcacctcccatgattgccctaacgatgtgaaagtgctttcaaacaaagatg

SEQ ID NO: 83058 - DNA, 122 bp, Homo sapiens
ggagcaggtgcctgggagggtgccagggcctgtgtctgcggcccaaagtcctcctgccctcgttggtagcaggctaagctgcctcctctgagagagcccacccccatgcccagagcccacgt

SEQ ID NO: 83059 - DNA, 122 bp, Homo sapiens
gaacgtgctcctccgcttttataccccggaaaaaaggcgtggtcagttgtactcccttcccgcagtcacttccaggcactcaggctgggtctcccccagcacctccaggagggcccaggttg

SEQ ID NO: 83060 - DNA, 122 bp, Homo sapiens
cctgccatgcccgagcacccccgcagtgggctcctacgcagcctgagcctccctgatgggcgccaccccctgctccacgtcgcccggtcccatggactgcccaagagctgaggagtgcaggc

SEQ ID NO: 83061 - DNA, 122 bp, Homo sapiens
tgaactactgaaagccacacaacccagattttcttcctccagggggtctcaatggaacaccgttccttctctgttccctccttccctctctccctcccttcctataattgcccttttcagtc

SEQ ID NO: 83062 - DNA, 122 bp, Homo sapiens
tctccctctgagaggctgagccctgcccggacaggggtgatggtggccacctcccctgagcgtgggggcgccttgggcttggtcctggcagccggggctgcagcaggtgagaagtgcaggag

SEQ ID NO: 83063 - DNA, 122 bp, Homo sapiens
ccatagcgcttggcgtcacctgctctcccggtcctgccccagggccgagggattgcgtcccgaaccgggcttgggaatcggctgcctctcaagttggtgttatttatgtttgtcttttgtga

SEQ ID NO: 83064 - DNA, 122 bp, Homo sapiens
gatgaaacttcatgaactgaatttgtttctaaagatgttgtagcaggtgggatgcaagtccgttctctgacatgggatctaaattccatctcagattggctaccaaaggacctctcctccta

SEQ ID NO: 83065 - DNA, 122 bp, Homo sapiens
gtgccgcgaggaagctgcggcaggaagaagggcggaggtgccccgggcgcctgagacgcccggcaatggccccgctactctcgccgcgcacacgcaaagccgcttcccaggcagttgcggcg

SEQ ID NO: 83066 - DNA, 122 bp, Homo sapiens
gctctgaactgcctttgggagatgccggccaggatcccggagaaccgagggggtggcgcccgtgcccaaggcctggggggacctggggccctggcgcgggacgcacagggagggcgggggct

SEQ ID NO: 83067 - DNA, 122 bp, Homo sapiens
aaaggggcagacgtccctgggttccggtgttcgcggaggagtcgaggcacggagaggcttcgggggagggacggaaagaagggtggcccgccaggcgggcggggtccatggattcggggtga

SEQ ID NO: 83068 - DNA, 122 bp, Homo sapiens
gattcaccatcttcctggagggctcttgccaattcctattgcgtcttacttggcatgattcgcctgcttcccttaacaccttgtagcacagctgacatgaggctgggatgttgagaccatta

SEQ ID NO: 83069 - DNA, 122 bp, Homo sapiens
ataacagcaatctggaatagaaagtggagcttttacaggctgttgtatgtgcaccaaggccgggagaggctgaggtccgtcagcatcatgtggcaggaaaaccgcaaatagttcgaaaggcc

SEQ ID NO: 83070 - DNA, 122 bp, Homo sapiens
cttttatagcacgccaagcgccgcgagatctccgcagccccgccccaagcgggagcgggccgagctcctataagacaacctgtgattggctccgcggtgccccgccctcaccgggctctgag

SEQ ID NO: 83071 - DNA, 122 bp, Homo sapiens
cttgtgccacatctgagaggtcacacaggacactgcagcaagagcaggagtcctccaacacggaaggctgcagcaggatcttcctttgtttgtttacattcacatgtttccatacacctgta

SEQ ID NO: 83072 - DNA, 122 bp, Homo sapiens
cggcccgccccgggcggcggctcacctttcggatccgccgtttgatgatggattcggccgcgaagacccgctcgcccactgcagacagctccatcttgctcagcggcacccacagcccataa

SEQ ID NO: 83073 - DNA, 122 bp, Homo sapiens
tttgtgatggtgtgaagtacctgacaaacacaaaaccctagggaaccatgctaactgtcccgggtgatgatggtgagacattcatggtgagcatactcagtgtgtctgtaagtgtggatgag

SEQ ID NO: 83074 - DNA, 122 bp, Homo sapiens
ccacagagtttgttgccataccccaacataaaagcctctgggacaaggttgaaagggtagcggggagagggccttggatagcggatggggtggttaacccgcgactctggtgacattttgcc

SEQ ID NO: 83075 - DNA, 122 bp, Homo sapiens
gaccgagccctccccctccgtggcccgcaggtgacacaccagctgtgatcctgggtaacccgagcccgcctgacgcgacatccctggcagtgacaattaaggggtctcctcacccagcttcc

SEQ ID NO: 83076 - DNA, 122 bp, Homo sapiens
cacttcaaactgccttgaaaaggcctgttgaatgcgcacagtccatcagaggcccaggttcgtccctacccttgccctgaatgccttacttcaaagatggcccgcattctttaattgccctt

SEQ ID NO: 83077 - DNA, 122 bp, Homo sapiens
gctgggccttcgcgcgtgcctatgagcctcaggagctgaagccctttgtgactgcaatctcgaggtaggcccattcgtcgaggtacatcggatgcgccgtgccccctgacggcgccgtgtgt

SEQ ID NO: 83078 - DNA, 122 bp, Homo sapiens
taggtgttggaacccagagaggtcgccatcttgagagcgtccggaggtagctgtagcttccgaattgggagagaggaccgccacaatcccgtcaagccccgaggctagcgccgcgccggtcg

SEQ ID NO: 83079 - DNA, 122 bp, Homo sapiens
cagctctggtgggcgagtctgtggaaaggttgtcccagtgaggacctggaacactgaagccggtgtacactgcccccatgtggatattctcaaccctcacacacattactttcagacagaag

SEQ ID NO: 83080 - DNA, 122 bp, Homo sapiens
gagaccagcggactttcttatcaaagcgtttggattcaactgtgaaaatggcagcccactcgggccccctctccgccacagagagcttttttctttcacttattaaactttcgctgcaactt

SEQ ID NO: 83081 - DNA, 122 bp, Homo sapiens
tctcctgcctccgcataggcaccaagtctttcaacatgatgtccccgacgggcgacaactcggagctactggctgagattaaggcaggcaagagcctgaagccgacgccccagagcaagggg

SEQ ID NO: 83082 - DNA, 122 bp, Homo sapiens
ccctgggaataagtcctcgctcctaggcccaggctgggtgcagaattttgtggaaagccacgggcctgcagcaacctccaaggtaacagccgctgccaccatcgccagcgcatggctgccat

SEQ ID NO: 83083 - DNA, 122 bp, Homo sapiens
agaggtgaactccagatcggccgatagcttgcaggccgctgctgtttgtcctgacttcagcgcatctctgatagacctttgacaccttccaacaaagaggttacaggagggagagctggaga

SEQ ID NO: 83084 - DNA, 122 bp, Homo sapiens
gttccccactgtgaccatgtgatgagaggccctgtaggtccagtgggccaggatggaggtcggggacagcccagctgctgctggaagtcctcagaggcggatggccggccctggccagtgtg

SEQ ID NO: 83085 - DNA, 122 bp, Homo sapiens
cttactgcttatggcacttcatgtattaaaaaatgacagtggcagcattgcccagacatgcgttttgtcatcaagtcttaatgcagtccacctggtccctcaggcaaatgaatggaggcaca

SEQ ID NO: 83086 - DNA, 122 bp, Homo sapiens
acgaactcttccgggctgtcccggggcgaccctaccaactcccaaccagtcctccgcggccggctccgggggaggtgtttacagcctgtgctcgccccctgctctgcacaaccccttccgtc

SEQ ID NO: 83087 - DNA, 122 bp, Homo sapiens
gctggccctctccgaggtgctgaaatggcgtccggcgtctgcctcagatgcagtggaggccgctgaggtctgggagcctccacgttttccgatgtttgctttctaaagggtgaggagaggag

SEQ ID NO: 83088 - DNA, 122 bp, Homo sapiens
aatgtgacaaatacgtctgctacccaaatctctcaagtgcacaggctcaggagcacattccgtcgcccacccccgggggacccagctatggaagtgtctcaacccttcctggccccctacgt

SEQ ID NO: 83089 - DNA, 122 bp, Homo sapiens
aaaagaaatagccccagttaaaaatggccaatggactttcccatggaatacaggcctgtccgactgaagcgtgaagagcaatactcaggacctctctgctctcctctccctcacaggcctct

SEQ ID NO: 83090 - DNA, 122 bp, Homo sapiens
gtctttcgtgtccctggtcagactgctctgcctgtaactgcggtgtgcagagagcctgcgcgagaccgttgtcctatctcactgggcttcaaagctaccgaaagcagtcatgagagaggaaa

SEQ ID NO: 83091 - DNA, 122 bp, Homo sapiens
agggtttgttaaaatgcaaaccactggctcccgctcctacagcttctgattcagtgggtgcggagtggagccacaaaacctgcatttcttttctttttctccttttgcttttttttcttttt

SEQ ID NO: 83092 - DNA, 122 bp, Homo sapiens
cggggagctgggaagtgacagtctacacccgcttccgggctccccgtgacataggccagccgggcctccatttacacctcaaagcaaagtcacagagggatccgcccctttcctggctgcct

SEQ ID NO: 83093 - DNA, 122 bp, Homo sapiens
ctagagcggcggcggctggctagggctgcggcgcgcgtggagggttcgctgctggtttgccgccgggtcgggctccgtgggccggggcaggaggaccagcacctgaggccgggcccgcagcc

SEQ ID NO: 83094 - DNA, 122 bp, Homo sapiens
agcagccatgtccttcaggcagagcacttcaggaggctgattatagctcctctccaaatccgaatctatcaccaaattataccctgcctcttttgtaaaataaatgttaataagaggtaatt

SEQ ID NO: 83095 - DNA, 122 bp, Homo sapiens
aaaatacactttgggcctaaaagacaagatctagctatttcatgacagctcagacctgcccgccccatgctgcgtggcttggcgacgcacgagacctcgggcggggaggagacggagcccac

SEQ ID NO: 83096 - DNA, 122 bp, Homo sapiens
ccctctctcactccatcaggtgtgcctgatgtctacaaagccctctctcactccatcatgcgtgcccgatgtctacagagccctctctcactccatcatgcgtgcccgatgtctacagagcc

SEQ ID NO: 83097 - DNA, 122 bp, Homo sapiens
gtggtagcagcagtggcagtaacagtggtggtggggctggaagtggttccgtacatccggcggggactgcaggggttctcagagaggaaattcaggaaactttgacttcggagtatttccag

SEQ ID NO: 83098 - DNA, 122 bp, Homo sapiens
ttgtcagccccttaagagtagccctgaatttagcctggagctggaacttcatggagccctcgaggggtaatttgaaaatgtctaagtgaggtactcaggtgatgggcctgagaaaccaggga

SEQ ID NO: 83099 - DNA, 122 bp, Homo sapiens
gcgcccggctgctcctcacttgctctgagacaggtgcggcaagtctactgcgggctggtccgggctcctcaggttcagacccgaccgttatccagtcggttcgtggagaggagaggtgaggt

SEQ ID NO: 83100 - DNA, 122 bp, Homo sapiens
aggttcgcgccgccacgccgaccgcctctgggttcccagaaagtggtggggtgttcacgccgtatctccgttgggtacctaggcgggacttagacaaacttcagcctcagctacgagagtgg

SEQ ID NO: 83101 - DNA, 122 bp, Homo sapiens
gacagaggtagtatctaactctttagactcacccggagcccagtacaatagttcttgtgtcgaaggactgggttgaatcactgtaagaggtaggatttgtattgagagctctttcttttcag

SEQ ID NO: 83102 - DNA, 122 bp, Homo sapiens
acacgctgcctgctgtacccatgggagcgagggcaccctgtgtgggtgtcccagcttcttcggcttcacgactccctgagctttctccaaacagttacaaacgtttcttctcatctggcttg

SEQ ID NO: 83103 - DNA, 122 bp, Homo sapiens
cggggtgccacattctcgggcatggcaaactccgctgtgtctgggttggctcgggaaggacggatggacccggattctggccggccgcagtgtaataacggtaagccctcactgccttcacg

SEQ ID NO: 83104 - DNA, 122 bp, Homo sapiens
tttgcgtgggaggagtcgggcaacggcagcccagcgccttgaggtcagcacctgtgtggccggctggagaggggcggaatcaccccggggccttcagagtcgatcagtccatcaggctgggc

SEQ ID NO: 83105 - DNA, 122 bp, Homo sapiens
ccctctccagcccggcccaggccagcctaccggcgactaggatgctttcgctttcgctctcgctttccaatactcgggactggggaaaccgggagaatagaagcaggcaaggaccgccgtgg

SEQ ID NO: 83106 - DNA, 122 bp, Homo sapiens
ctcctgccaggagggcacacacagggcacctttgcacggcgctgcctgtcctgaatgcctcgctgtccccgggtggacataggaattcatcacagtcctcctcgaagcccgggttgctctag

SEQ ID NO: 83107 - DNA, 122 bp, Homo sapiens
tgcctcatctggggcttcattcagagtgggtggggaggcgacaggtcgaggcagttgccccgtgctcacgaatccctgacacagctggtgacctctccaggtgacctcttcaagcctggtcc

SEQ ID NO: 83108 - DNA, 122 bp, Homo sapiens
atctccgggaggccaaaagcgagtagcatcttttcacatccttttttaatttttggcaaccggttccggatattaaggggaaacttcggtgggctgtttgaacgctactttaagacgtgttt

SEQ ID NO: 83109 - DNA, 122 bp, Homo sapiens
agcggctccggctccggatccccaggcactgcatggccctccacagtgcccctgcctgcgcggagccgggtccggggcagtgccgcctccagtgttttatgctcacaacaccctctgctctg

SEQ ID NO: 83110 - DNA, 122 bp, Homo sapiens
ggctgaggggacggcgccgacacaggcccccgcaggggggttcagctgaggggacggcgccgacacaggcccccgcagaggggcgcagccgcatttccatgtggccccagcagccccgggct

SEQ ID NO: 83111 - DNA, 122 bp, Homo sapiens
tgcagcgagagccgcgggggttgcggagcccctgcctgggggagctggcggaatgtgagccgccggccgggggccgccacataagacctgcaaggtggtgcctggggccctggctccttctc

SEQ ID NO: 83112 - DNA, 122 bp, Homo sapiens
gtcctggagctgctggttaaaaacgaacgtgtcaccgggtcccctgggtctgaggccacgcggcacgcggcccctccgcgatattcccgcacctcgcggggaaaaggccgctcggcggccgg

SEQ ID NO: 83113 - DNA, 122 bp, Homo sapiens
gggggcaggctgttttattacctgaggaatcatcagaggtggggataacgttgatctggacggtttcaaatgaggatgttgggtcatctcccaggagacacagtgggggtgccaaggactct

SEQ ID NO: 83114 - DNA, 122 bp, Homo sapiens
ggcctgggtccaggctggctggggagacttgctgtaaaaccgactggctggtcaccatggcgctgttgccatggtgactgattgttgaggaggaagtgatctcattgtttccctgctggctg

SEQ ID NO: 83115 - DNA, 122 bp, Homo sapiens
gagagtcagtgaaggggctgaaacatgaaaacgttcattatatgaattaaattctctgttcggttaccagaacacatggcctgtaatgaactatgaattaatgtagttttagtccataatcc

SEQ ID NO: 83116 - DNA, 122 bp, Homo sapiens
cttacacgtctttgtgtgtctgtgtgcgtgtgtccgcagttgccctgtcctcgctgtcctcggtttggcagacaggtccctcaccttccttgcctttcatctcctgtgaccctcgccaggcc

SEQ ID NO: 83117 - DNA, 122 bp, Homo sapiens
ttaaggctctatatctgtattttccagtgtggtggtcatttgacacatgtgtcggccactcgaagtgtggctagtctgaattaagatgtgccataagattaaaatacacattggatcttgaa

SEQ ID NO: 83118 - DNA, 122 bp, Homo sapiens
ctcagtgggcagagcctctgttttgttctcagctctttctcctctccacaggactcagcacgagtactgttggtctgactggtcccactcgatttgccctgaattgcattagctgggaacag

SEQ ID NO: 83119 - DNA, 122 bp, Homo sapiens
ctgcgagttcccacggggtccttggcccggtagtgaaggtgacctgaggactgctgggcacgcactaggaaccggcaggccctagctgaggggagggaggagggaagtctcagggaactgga

SEQ ID NO: 83120 - DNA, 122 bp, Homo sapiens
aaaacatgtggaacagcgccacccaccctccaaaaaaaaaagaaagactgcaaagagaaccggctgccagccctaagagcttcactgagagaggagatgcgttatatgtaattgcagtgatc

SEQ ID NO: 83121 - DNA, 122 bp, Homo sapiens
tttttccagttagtcaattcatgttaatcttttctccctcttgttaggctaaaaattcctcgagcctgaaacacagtttctgattatttatacttttattcatatagaatcaaataatgaac

SEQ ID NO: 83122 - DNA, 122 bp, Homo sapiens
agaggcggggccgcctggggctggtaggccgggtgtctgagtggtaggctgagcgggactcggctgggcgtgggtgtggcacgcggttgggactcggcgccctccgccgccaccttccccct

SEQ ID NO: 83123 - DNA, 122 bp, Homo sapiens
ctccagagcgaggcacgcgcctttaaaggcaggtccgcggctctcccacgtcctggcgcccggttttccgcacccagtgtccccacagctgtgcccgggcacagaggcgcggccagaccgca

SEQ ID NO: 83124 - DNA, 122 bp, Homo sapiens
cctttgcactcgccgcgtgggccatgcccaccttgctcacgagcctgggccatggtgcgacgttgtgctacggtgcacaatgcatatcataccatgcaaccgttaagtgaaatatgtgcatt

SEQ ID NO: 83125 - DNA, 122 bp, Homo sapiens
ctacagaggaaggaaacaaaaccaaagagactttcccagccgtcactccagctccagctacgtatctgccatcacagcccaggcagtcaatcttagccccattcctcaaatgcaggaacatt

SEQ ID NO: 83126 - DNA, 122 bp, Homo sapiens
ctcaggtgatccgccggccttggcctcccaaagtgctgggattacaggtgtgagccacctcgcccggccagtaatgcatttttgatggggtttctacagaagtgaggtcgtatcttcagtgt

SEQ ID NO: 83127 - DNA, 122 bp, Homo sapiens
atggggactatgaatttgttctctatcttgattgctgtgatggtttcatccatatatatccgaacttatcaaattgtataatttgggatagcacttggtttgagctgttgcggagaaagagt

SEQ ID NO: 83128 - DNA, 122 bp, Homo sapiens
atccccagcggagtcccggggaactggctgcattctctcctggcatccgctccatagctacggctgctgtcctgtgggagccaccaccgcaccagcttattctgggggaccccggcacaggg

SEQ ID NO: 83129 - DNA, 122 bp, Homo sapiens
aatattcagtattgcagctgcattggctagctggggattctatttaccaccacattgtcccggactgaatctggggacaaaaaaaccacttcgggaacaaattcttgtcttcaacaaagagc

SEQ ID NO: 83130 - DNA, 122 bp, Homo sapiens
cctacggcctgacgtcaggccagcgcttggggctccttttgggcaaaggcagggtgggggcggggcaggctccttccccgcccccaggaggagtcaaggctcagagcctgagggacggtgcc

SEQ ID NO: 83131 - DNA, 122 bp, Homo sapiens
tggtgtgaagcctaaggagggtgcactgctaagaaaagcctgcaccacgcaccacccttgcgtctatagtctggaggtggttttgtggtcagaacatgggtgggcaggagcctaagcacagg

SEQ ID NO: 83132 - DNA, 122 bp, Homo sapiens
gagcaacgatccggggaagctggcctggcctcatgaataattaatgtgccagagccggtccgcaggcggggtagcgatggaaggaggcgggggcgccattgggcgcctgcgcagtagctgcc

SEQ ID NO: 83133 - DNA, 122 bp, Homo sapiens
ccattcgccgcgcctgtctgcgggacactgctgtctgcgggcagcttggacatctcagaccgtggggtcaactcggctgctcccagagaaactggaataactggacagagcgatgcccggcg

SEQ ID NO: 83134 - DNA, 122 bp, Homo sapiens
ctccttctccacgcccctattggcggggagcttccctaactcaaccccgcctattggagacggactgctgaagcccacccccgagccccaacactattggaggaagcagggaagctcttcct

SEQ ID NO: 83135 - DNA, 122 bp, Homo sapiens
tcacccatacctgggaaaagctggcgagtgggtgcactgagctgggcaggtcgtgccactcggtaggccacatcagctggacagatgcctttcgctctccggacaccatcagggagggaggg

SEQ ID NO: 83136 - DNA, 122 bp, Homo sapiens
acccccggatcaccccagtgaggacactccacaattccccaggaggcatcacagtggggccgttaaacccagggacttgggattcagacacttctgggctccagtccacccctcactggctg

SEQ ID NO: 83137 - DNA, 122 bp, Homo sapiens
aaaggggacgcgggaggcctccagagggccacaccgggggccctgcttcaaagctatctgcggagacaggcctgggccctccctggacagacagcggttgcccgcgcgaggtggggccccgc

SEQ ID NO: 83138 - DNA, 122 bp, Homo sapiens
tgtgtgtgtgtgtggagggtcgtgtgtgtgtggagggtcccctttctttctctgttctatcgtctcttttctaccgtaagagaagctctttctgtagcacagaggtggcccccatgcgtgcc

SEQ ID NO: 83139 - DNA, 122 bp, Homo sapiens
catcaggaatatgatgatgaataataagatgccttctctggcttcaataaactacagcctcgtggggataacagctggattaaactaacaatgatgcacttaaatgagcttagtgtaaaggc

SEQ ID NO: 83140 - DNA, 122 bp, Homo sapiens
cctaagtccctaaaacagaatgtagacaggaaaagagaaatgcttttctgcaaatagcggcgcgtctgcagttgtcacctaacttctcgtcatcgtcatgttccctgagagagaagaggaaa

SEQ ID NO: 83141 - DNA, 122 bp, Homo sapiens
ccgagtctcaactgtttacagaactcagcttggagcctgtaagtggaccctcagctggaccggcagagcagaatatctgtgtgccagtgtactttattcatctgtcaccgaatcaggggtct

SEQ ID NO: 83142 - DNA, 122 bp, Homo sapiens
gcctcacccaggaggtgaccgagaagagtgggcgcgtcatgcagctggagcagaagtcggcgctcataatgaagcagctgtttgaggcccaggccctcagccagcaggacggggaggcctct

SEQ ID NO: 83143 - DNA, 122 bp, Homo sapiens
tggggtgatgtgtcctgagccccattgtttcctagtctgaaacttccccaagaagctccacggtacagaaactgggtgggtgtgttgtcccataatgctttgaagaggcatttctatggaaa

SEQ ID NO: 83144 - DNA, 122 bp, Homo sapiens
gagcccgtcggcgacggccaggttcaggatgaacacgttggtcaccgtcttcatcttgggcgcccttaggattacaaggatgacggccgtgttgccagtcagccccacagcacagatcccgg

SEQ ID NO: 83145 - DNA, 122 bp, Homo sapiens
aatatcaactacaattgaatatttagaaagtaaagaaatgctgtaatcgcaagggtattgcgattgttaggttgggctaatttctgtaataaacaacccccaaaatctcagtggttatggaa

SEQ ID NO: 83146 - DNA, 122 bp, Homo sapiens
gggcaccccctttcctctggaaggttctggtggggggcagcacaccgtccacgggagcaacggcctctgcatctgcccactgcagattcacttcgtatttttagttcccaaaccttgacatc

SEQ ID NO: 83147 - DNA, 122 bp, Homo sapiens
taaagaatgcccaggtaggaagctgggggcccatggcccacttctgacccctcttttcctcgcttcctcccacaagggtacaggcccaatcctctctcactttggtcttggttgaaacgcag

SEQ ID NO: 83148 - DNA, 122 bp, Homo sapiens
tgtctttctgtggagaggctaagcctagcacaaataaaatgagggagagggaaggaggaacgcagaaacagttttctgcagaattacctggcagtagtttcttctcatgctgcaacacagtg

SEQ ID NO: 83149 - DNA, 122 bp, Homo sapiens
gaagcactcaactatgagccacaattattatctctaatattgtaagtctagtggaatggccgtatttgttctgctggtgattttcaaataccactcatctgaataaatactatgaatttttt

SEQ ID NO: 83150 - DNA, 122 bp, Homo sapiens
tttaatatgtgtccatttgtaaacatattcaacacagtcattctcctgcttcccatgtcccgggagggttggcctcatgttcatctctggaggcccagtactcacccatgctatggaaatct

SEQ ID NO: 83151 - DNA, 122 bp, Homo sapiens
tctttttaaaatgtaggacgtttgaccaacgtgggattgaatgggtctgtcggtcgcctgcggcgtaaggagtgtgtcccacctcgctcgcaggtcctggagcgcaccggcagacctcgagg

SEQ ID NO: 83152 - DNA, 122 bp, Homo sapiens
gcgcctggagcgcagtggtttctgggaattgtagtgtaactggaaggccctgaggattgtcgagcttgcaggttctgaacgtgaggactacaactcccgacgtgcaaagcgagggccagtgg

SEQ ID NO: 83153 - DNA, 122 bp, Homo sapiens
aatcatccatttgcatgaaatacaggaatattcctagaaagttcggaggctcactctcaacgatctgtccacgggatcataaggctctccttggattagtaaaagaaatcaacaggtgagct

SEQ ID NO: 83154 - DNA, 122 bp, Homo sapiens
ggggttccagtgaagtggagtctgagtcatgttgctgatagggaagtcagcttctggacgcgaggtgctggggggaggggtgctggtaatggacgctagggccctggagtacccagggagga

SEQ ID NO: 83155 - DNA, 122 bp, Homo sapiens
ctggcggccggcccagggcgaggagtggcttccaggaagcgggcggaggagcgttccagccgagtcccgccgtcgccgcggccccgcgcgctccgagcggcccgggcctggccccacacggc

SEQ ID NO: 83156 - DNA, 122 bp, Homo sapiens
agcggctttatacattgtaaagtgatctgtaaatgttcaaatattattatccttgtgcgccgaatatttgttaatcagcactgcgcttagacttgtgagggacttgtgagcatgagatttgg

SEQ ID NO: 83157 - DNA, 122 bp, Homo sapiens
ccagtgactcgcacaagtcctcagcggcatgcagggcgccgaggccccttccctgccacccggagtgctgtgtcgcaccccctgcttctgggcatgcctggcactgatgccaacgcagggcc

SEQ ID NO: 83158 - DNA, 122 bp, Homo sapiens
gagggggagggtttttcccttaagtcatccctcccaggacttgctttttctgctctgagccggacgccggaatggagtttgaggaagaggtgaggtgtgttgcattgtatagggtagatgga

SEQ ID NO: 83159 - DNA, 122 bp, Homo sapiens
tgtccccggccaccctggcgcccagagcccccacctcgcccccgcccccggcccggcccccgcctccagccgcccgcccacagccaccgaagggaaaccccaccctcagtctccacctgggg

SEQ ID NO: 83160 - DNA, 122 bp, Homo sapiens
gcgcgggcgctcgcgccgcctgccgcccccggccgttcactgccgcatttcgcgctctcgcgccgcgccccgccccaccggcctaaatttgcatatcccaggatcgcggccaatcgctgctc

SEQ ID NO: 83161 - DNA, 122 bp, Homo sapiens
atcatagtgactgtgagtcaacaacaacaacaaaatggctcaaggctggcagatatttagcgtaagatattaaccatctgtcacacacactaactaaatcaacagaggggccaactgagatg

SEQ ID NO: 83162 - DNA, 122 bp, Homo sapiens
gcaaggaaagggggtcttccctggtcctcgggccccgaagtttcggggttgcttataggacgggttcctgcagtccagggaagctctgggcagatagcgagcccattctcccttccattacc

SEQ ID NO: 83163 - DNA, 122 bp, Homo sapiens
cggacggccgagcagggggaccaggctagggtcacacgtcgggggcggcccggggccctgcgctgcagcggggcatcttggcacccccgtcctgagcggaggaggagggcacagccccgagg

SEQ ID NO: 83164 - DNA, 122 bp, Homo sapiens
gccctgagctgcgcgaggccgcggagagcgctcagggcgggcggctggtccgggaggccacgccagcgcgacccagccgagtcggcccccagcccgggcccccacatttcctcccccggagg

SEQ ID NO: 83165 - DNA, 122 bp, Homo sapiens
ctccacctgcggaaacgcctccatcctggagggcacctcggacaccggctcttgcatgcacgcttgctgacgtgcccggcgtgccgctgctcctcgtgcctgcaccagcacccacagatcca

SEQ ID NO: 83166 - DNA, 122 bp, Homo sapiens
aagatggcggccagggagggggattctgtggcaacgttcgagaagtcctgaaatgtcgtccgttatctaacatttatctgggtgttgcagaataagtgtttctcgaagtgagacttcttgga

SEQ ID NO: 83167 - DNA, 122 bp, Homo sapiens
aaatccagtaagagactgaaaatcagatgattcacttattctgcaccatccccatggcctcgcagaaccagaaatgcctattgttatttccatgtccacttcaaccatgaggaagcccaata

SEQ ID NO: 83168 - DNA, 122 bp, Homo sapiens
ccgcgaagcagcaattacccgcccaggcggctgggaaagggccaattagcgcaggagacgcggcccctctgcggggcccctgctgaccgcagcccacgcagcgctgcctccgccgcgggccc

SEQ ID NO: 83169 - DNA, 122 bp, Homo sapiens
ctgtacctgagtggcagctctgaaacttgtccctgtagtagatttaacttttggacatggcgtctacaatcagcaccagagccttcaccataagcctgagaaaccaaaaaatatattacatt

SEQ ID NO: 83170 - DNA, 122 bp, Homo sapiens
cactctagaattttccattccagactagggttttctctgtggtctcctgtcaggcagagacgagcatccagacagctccgggacaggtggggtcacgggcggggtcacaggcaggcccccag

SEQ ID NO: 83171 - DNA, 122 bp, Homo sapiens
agcggcttcatactctgtgtggcagtattatcctcatctaacaaataaggaaactgaggccgagagtaattatgtgacttgttcaagttctacccgacagctgagctcttttcaagatggca

SEQ ID NO: 83172 - DNA, 122 bp, Homo sapiens
taaacaaagcataactgacagcttccatgaaagggaggcagtagggagaagtggggaatacggcccccgggaaagcctgtgtcctaagcgaggcagcctagcctcttctcagcttcactgtc

SEQ ID NO: 83173 - DNA, 122 bp, Homo sapiens
aagggcaagagcttaaatgtcagccagagcctactgaaatcccagatttcacactcttatcggctgtgtgattgcctgcaagtggctttccctctctgaacctcatttctcatttggaaagt

SEQ ID NO: 83174 - DNA, 122 bp, Homo sapiens
ggagacatccataggtgcttctcttgttaaagattaatgtctcttgtctctaaaccaattcgtgttactggaaggaaaggcaacgcaagttttataaatcagcccctttgtgggctccattt

SEQ ID NO: 83175 - DNA, 122 bp, Homo sapiens
tccccccgcccggggctccgggatccgggcaccaacagacccggagggaccgcgccgccccgggcaaacccgcccaccccgttgcccaacacaactggaagcactaaaaccgaatccaaccg

SEQ ID NO: 83176 - DNA, 122 bp, Homo sapiens
aacagctattatttggtgaagtttagctcagacaccctgcaaggacaccctaacccatctcgggcccgccttccctgtcgcgccattgggcttcgccggtccaaaacacagacccattggtc

SEQ ID NO: 83177 - DNA, 122 bp, Homo sapiens
aatagggagggatgaaggcagagctgatgggctgggcgggagccaggctgcctacagctgcggacctcagacctgtcttctatgaggcaggcccttcagcagactcctcagcctctgggggc

SEQ ID NO: 83178 - DNA, 122 bp, Homo sapiens
atccttttctactacagtagatatacctgtagtcaggactttgaactcacagctattcgccgcaccattccctcttaaggaactactgcgccctccagcggaagaacagcggcggaactcca

SEQ ID NO: 83179 - DNA, 122 bp, Homo sapiens
agctgcggaccatgaacggccacctggacagcatagcgcgggccctcaccaaactggcttcgtccctggggccccagcctgagcccctgccagatgtttcggatgccaactaatggagctcg

SEQ ID NO: 83180 - DNA, 122 bp, Homo sapiens
ccttcagtatcaaaagtgtctgtggggcaggtggggctggggcgggtggaggctcccccccgcgccgacgacagggaccgccggccgggagcagagccgggcgctgggacgggagctctggc

SEQ ID NO: 83181 - DNA, 122 bp, Homo sapiens
aaagaatccaatcatgtctcattccgggctgtggccaatgagattggatgcaggcaggggcgggggagactttcacacatgacttttcatggtttcgatcctgaaacacgtgaaaatatgta

SEQ ID NO: 83182 - DNA, 122 bp, Homo sapiens
agcgccgccctcgccgccccccacgctgctggacgaggtggaattgctggatctggagagcgtagccgcctggcgggacgaggacgactacacctggtactgcctggctccgctccttcccc

SEQ ID NO: 83183 - DNA, 122 bp, Homo sapiens
tgcctgctgcccaggcagaaccgtcctgggtagtgggaggtggaggctgagggtgccccacgggcctgtgcctaccgccctgagccgtctgcaggacccagctctttcctgcgcgtctagaa

SEQ ID NO: 83184 - DNA, 122 bp, Homo sapiens
ccactggcttccctgcagcctgcgggataatggcatggtcttcacaccggagggtctgtgcgagtcagtgatactccctctctttctccctggcagactcgctctccgtctccagcaatgac

SEQ ID NO: 83185 - DNA, 122 bp, Homo sapiens
cccggggaacggcgagagagagcgagaaaaaaaaaagcctgaaggcggcgcggcagccagcgagaggggagaaacagattcacacccaggggcctccgggcagggcccacgggactcaggcc

SEQ ID NO: 83186 - DNA, 122 bp, Homo sapiens
ccgtggccctcctcctatagatcccgccccctccgtaccctcgggccaatcagagggcggcgtcccgtcgcggttgccatggtgcccgccgagtccctcccatcactcaccagatgtgcggc

SEQ ID NO: 83187 - DNA, 122 bp, Homo sapiens
tctctccaaggaaaaatgcatttagtcattacctatatgctgctaagtagggatctttagcgtggattattttcatgatcctccacaccctagtccagtagagaactcaataagtatttgta

SEQ ID NO: 83188 - DNA, 122 bp, Homo sapiens
gctgtgtgtcattccacagattagtgcagtggatatgttatgccttcgtttcctccccaccgaaacaaaaattgactgtaaactgtttgagggtaaaattgattaacagtcatgctgatgaa

SEQ ID NO: 83189 - DNA, 122 bp, Homo sapiens
gtaacccaacacctatcctcagctttaagaatccaatattaccttcactctgctggagaccgcagtcctctggaaaggtgaaagggctaatcctaaagaagactctagctaaatcagaggcc

SEQ ID NO: 83190 - DNA, 122 bp, Homo sapiens
gtccctggagcaggctgactcggacgccctggatatcagcaccaaagtgcagctctacggcgtgctgtggaagaggcctttcggcaggccgtcggccaagtggtcccggcggtgagtgcgcc

SEQ ID NO: 83191 - DNA, 122 bp, Homo sapiens
tcttgtaaaggacatggagtagagggagtaaggggtcagataaatgaatatttgtggatccgacatgccaggcaacaattcataaaatattccctaggagcaggaggaggaagggtcactgg

SEQ ID NO: 83192 - DNA, 122 bp, Homo sapiens
tatataaaccaaccagaagatggtaagcaggagttttaacatatgcaggattactgcttgcggatgaacttgaatttgttaataatgaatagtcatgccttgggcattaatagttccagcta

SEQ ID NO: 83193 - DNA, 122 bp, Homo sapiens
aaaccatcagatctcgtgagaacttactatcacaagaacagcatgggggaaccgcccccacgattccatcacctccacctgatctctcccttgtcacatggggattatagggattacaattc

SEQ ID NO: 83194 - DNA, 122 bp, Homo sapiens
gctctgtcaactaggctggaatgcagtggtgcaatctcagctcactgcagcctctgcctccgcctcccaggttccagcaattctcctgctgcagcctcctgcgtagctgagattacaggcgc

SEQ ID NO: 83195 - DNA, 122 bp, Homo sapiens
ctttagggaaggtctcccagctccccctgtcctagggccgccgcccccacctctactccacgttattattaatactggcgatttacagtggatgacacggtgtcgtgagtggaagccgtgtg

SEQ ID NO: 83196 - DNA, 122 bp, Homo sapiens
ggggagccagggtggtggtggtgttggggggaggacaagaggtagatggggaagtgggggcggaccagctaccttgagatgtttctgccacaaccatcagctgtcctggcctggtggagaga

SEQ ID NO: 83197 - DNA, 122 bp, Homo sapiens
tgtgccagttatcacactgttctgattactgtggcattataatcatcttgataactgtatcgtgaattctccaactgtgttcttcgccggaagtccacggaacaccaaccacgaccttcgga

SEQ ID NO: 83198 - DNA, 122 bp, Homo sapiens
gctctcttctgctgtagttttctggctgccggagggcagggtgggtcaggccagaccagccgagacccaacccccaccccacttccgtgcccctcaccttcctcctcctgcatcttccgcag

SEQ ID NO: 83199 - DNA, 122 bp, Homo sapiens
attagtattaaactgaatgtgcctttaacttggcttggggtacgttgaattgaggatgagcgctcacacaatattaagaatttctttccaagaaatgtgctcgggtcaaacacaaggccttt

SEQ ID NO: 83200 - DNA, 122 bp, Homo sapiens
ttcttgccatcagactggaggtgaaagaggggggatcagttttggggtcactctgacccacgcagggagaagctatggtgatgccctatccttaccgtgagactaggagctcctgtggtcat

SEQ ID NO: 83201 - DNA, 122 bp, Homo sapiens
gcgcccccaaccccacctccgaaccgcagggccacccgcgcctcgccttcccctggggcccggacccctgcgggggccctgaaagcccagcccggactccagcagtccccggggagctccgg

SEQ ID NO: 83202 - DNA, 122 bp, Homo sapiens
ctcggctgcacgaggaggcgcagctgctggctgagctgtcagatcaggctgcggctgtgacgtggctgaaggatggtcgcacactgtccccaggccccaagtatgaggtgcaggcatcggcc

SEQ ID NO: 83203 - DNA, 122 bp, Homo sapiens
cgcccactctcgagttcaggcaagtgcagggtccctccgagagagagcgtctccagagaacgcggctggcgcctggctgaacccgtagcctgaagacccgccggagccgcccgccccacgat

SEQ ID NO: 83204 - DNA, 122 bp, Homo sapiens
gaacttgagccggtgcttctggccgaagcggaacaggatgttgagcagggtgctgctggccgtcttgtgcgtcttcaagaacacgatgttgcgccgcggctggcactcccccgccgagccgt

SEQ ID NO: 83205 - DNA, 122 bp, Homo sapiens
cccacttactcccatttccacctcaaaaaaggcaccatcattatcacccaaaccaactttcgagacagaggggaatgatgttcccactcccaattaggaatcaatgcagcccaacaaagaag

SEQ ID NO: 83206 - DNA, 122 bp, Homo sapiens
ctctcccgcccatgaccaggacccacctcaatgccgccagcccggcgggtctcccgggcacgaagccccgccagtcttccgccctcgcgccacactacctggccagccccgcccccgagact

SEQ ID NO: 83207 - DNA, 122 bp, Homo sapiens
ggccacagagggaaaccctatccataaaaaaccagcagcagggccgggcgcagtggttcacgcctgtaatcccagcactgcggaggccgaggcaggcggatcacctgagctctggagttttg

SEQ ID NO: 83208 - DNA, 122 bp, Homo sapiens
taagtccctcggtcttgggttcccggagaggtgagtcggctgcaggtgggtgcggggcgccgggctgttcggggtaccggtgtcgcagtcgccagtccgagctcacaccgggcgtggagttc

SEQ ID NO: 83209 - DNA, 122 bp, Homo sapiens
ggggagccctcggtcaccgtcaccggggcctggatagtgggagccattggtcactgttaccgggacctgggtgggaggagccctcagttaccttcaccggggcctgggcagtgggaggcgcc

SEQ ID NO: 83210 - DNA, 122 bp, Homo sapiens
tgtgttctaaaccactattcttcacttcttccctgaaagcactgaactctgatagaggtgcgctgggcacgatggtgtaggggaaagaaaggagtccttctggcactgagttatacctgcat

SEQ ID NO: 83211 - DNA, 122 bp, Homo sapiens
cgtatgtgcacgcgggcgcgcgccgagtggataacgcgcttccctgctagcccccaaacccggcggacactcacagcaccagaagcacaacacgccctggcccaggtggcacacatatgccg

SEQ ID NO: 83212 - DNA, 122 bp, Homo sapiens
tccctcagccagttcttcccgagaacagaacagttaaaaccaagccctccgatggaggtgcggggagagggcgtggctcccgtcccaggaggcaggtgagcttctggggattccagttcacc

SEQ ID NO: 83213 - DNA, 122 bp, Homo sapiens
ggaatcattcagaggagccccattggctgagagataaaattctgtttttacctgggcacgcgggctctccaggatttgattccagcttacctttccagtcttgattccctatattccagtat

SEQ ID NO: 83214 - DNA, 122 bp, Homo sapiens
tccacaggaggccccatcgcacggcagaactggtgaccggacacaaaagctgctgccaagcgtcagtcatacagagctgtcacgcagtgtttgcggaacccgggctgaattgtgtcctggag

SEQ ID NO: 83215 - DNA, 122 bp, Homo sapiens
aggtgaatactgacttaattccagtaaaatgtcacctctgatccaggacagagccgttcccgcctgaattgtgactgcacacccagtttgtccctgtgtccctctagcctgagggtggcgtt

SEQ ID NO: 83216 - DNA, 122 bp, Homo sapiens
gtgatgcccagaacggcgctgatgacaccagtttcagcaccagtgcgaggtgctgagccccgattcccgccaggtgctgagtgaccgtcatttgcacgtcacgtgcatcagctccgagtgcc

SEQ ID NO: 83217 - DNA, 122 bp, Homo sapiens
gagaggtagcaggcgcttaaggccaagaggtgagctgtccctgtctgggcagaagaagtgcgctaggggcagctgcctgcaccccctgctctgaattcctgcaacagcggtcccaggagaac

SEQ ID NO: 83218 - DNA, 122 bp, Homo sapiens
tactaaatcttgcaactgcactcttctggtccatgtttgttacggctcgagcttcgctttcgctcaccgtccaccactgctgtttgcccccgtgggagacccaccgctggcttccatccctc

SEQ ID NO: 83219 - DNA, 122 bp, Homo sapiens
agaaaaccaaatcgcctttctcttcagcagataagacttcctggagcacctgactgtcgtcgcgtggggaacgtgagcgcaacatgtcttgccacacccaatggaaggcagcactcaggctg

SEQ ID NO: 83220 - DNA, 122 bp, Homo sapiens
ggtgcgcagcagggggtggccccggtcacacagtgtcccccatggaggggcctcgatggccgggctgcgcatggcacgtgtcgtgtgtggatccacagcagggccgctgcccccacccagcg

SEQ ID NO: 83221 - DNA, 122 bp, Homo sapiens
cgctagagagtgaatgagccgcgcgggcccgggacccttggggctcttcactctccaggccgtcccgtgggcgcgctagccttttcaagtgatagtaatcggagacttttccgttacatgag

SEQ ID NO: 83222 - DNA, 122 bp, Homo sapiens
gggtgttttcttctcggttgttagatgtacaattggattaatgtccatcgttttggaagacgagagaaagttgagaagaacacgaagcacagaccctgatgtgataaaacattttgtggttt

SEQ ID NO: 83223 - DNA, 122 bp, Homo sapiens
acttttttccaacctaagaaaccaatctccacagtactatatttctacaattctaatagacgtttcctccatattttaagatatctccaaagagggaaatacatatatatatttttattttt

SEQ ID NO: 83224 - DNA, 122 bp, Homo sapiens
cacgcccttacctggataaagacttggagcgcggtgcggctcaccagcaccgtgcacactcgcgaggcgggctccggctccccgtccgccgtctcgagttcgtgcttctgccccatgatgac

SEQ ID NO: 83225 - DNA, 122 bp, Homo sapiens
ttgcaatcagctttttctttcatgagtagcacaagacgcagcaggaggaacatgagcacgcgtggccatggggagcgtcggcacggctagaaatgcctgattctcggtgtgtgtgtctaccc

SEQ ID NO: 83226 - DNA, 122 bp, Homo sapiens
ctgtctctttcaatgtcatatcacaccaagaccatacatttaacatgcatttgaatcccccggagggtattttcaaaatgcagatccccagacctaattccttaaataacttctacattaaa

SEQ ID NO: 83227 - DNA, 122 bp, Homo sapiens
ccctgggctgtgcccctcggagcagcttaccagaacatgtcctgagatggatgccgcgttcgccacagacgtggtgaagacattgtctgcagcagcccccacgttggccactgtcactgtgg

SEQ ID NO: 83228 - DNA, 122 bp, Homo sapiens
cccacggatgatgactaccattacattgagggtgagtgcctgcccgtgtgtccgtgtatacgacgtgttcccactccaccagccgtatttaaggcccatctgcataggaggtttcttgttgt

SEQ ID NO: 83229 - DNA, 122 bp, Homo sapiens
acacgtacaagaatgtgcacagcagcactgttcgcaatgggcgaaaacgacccaagagtccgtcaacagatgaatggctgaacgcagtgtggtctgtccagacagcggcatctgactcactt

SEQ ID NO: 83230 - DNA, 122 bp, Homo sapiens
agtcgggcagggggcggggcttccgaaggggcggggtgaggcaaggcagctcttctgtgacgtcaaactgcgcccaaagccggacgaaagggagctgctgtttgtataatgggacggtgctc

SEQ ID NO: 83231 - DNA, 122 bp, Homo sapiens
cgcccgcactttcctctgcccagaaagcttactgcttaactccagtacaacttactggtgcgcctggatccacccccgtctccactctgcttaagacacaggaggctgataggctggaagaa

SEQ ID NO: 83232 - DNA, 122 bp, Homo sapiens
agaacatcctcagctttatgtcctacgacgaaattagccagctccgcctggtgaggcccccgcagaactcctgcctccctctccccccggccgaggtctgggagatgagaagggagcgcgtt

SEQ ID NO: 83233 - DNA, 122 bp, Homo sapiens
gagctccgtttccacctgccgggtgatggcattgtacatgccctgtaaggagaggggccccgggggagagggtggatgtgtcaaaagaagagacttcaaaattacccttccagaacccttat

SEQ ID NO: 83234 - DNA, 122 bp, Homo sapiens
tgtccgtatttatgggaagttttcatacacgcatgcaatgtgtgatgttcaaatcagggtcgctgggatgcccaccgcttcagacatgatttctttgtgttgggaacatgactttctcttcc

SEQ ID NO: 83235 - DNA, 122 bp, Homo sapiens
cggagggcgggggctgggcttcttcctcggtgcgttcccggtgctggccgccgccgcgctcgctccccgcgctggcttcaggagcgacccggccggtaattctgcatatttgcggacatcag

SEQ ID NO: 83236 - DNA, 122 bp, Homo sapiens
aattccttgccccctgctctgtgggtttagagtcgttctttaaatgcttatctatcctaccgagtgccgagccatggggacggaggactccaacggggtccctccaatccctcgccacggca

SEQ ID NO: 83237 - DNA, 122 bp, Homo sapiens
tcaattccttgacatcccactcgaacttctgtggcatttccttggacattaccatttttccgactttcttctaatagcttctaaaacaagaggtgctaactaaaatatgaactacttgtttg

SEQ ID NO: 83238 - DNA, 122 bp, Homo sapiens
agggcctgctgggaaatgtagttcgaatgcaaacaaccaatggacgaccgtcaggcgcggcggttggggcggggcaggcccccccaccgccccaccccccgcccacccagcgcccgcgctcc

SEQ ID NO: 83239 - DNA, 122 bp, Homo sapiens
tttgtacaaccttgggcaagacacctaacctcagagctgcaggttctttatcttcaagttcgaaatgatatcatccctacctatctaactgggtcgccgtgaagttcatatgaatcaaaggt

SEQ ID NO: 83240 - DNA, 122 bp, Homo sapiens
cgctcagagccgaggaagggcagtgccaggcgaggggtgagccgggagtgtggggccgcacgctcagagccgaggaaggacctcccatgtggggtgggtgggatgtcaggatttctcacgag

SEQ ID NO: 83241 - DNA, 122 bp, Homo sapiens
gcaacatggtgaagccatgtatctacaaaaaatacaaatcttagccgggcacgatggcagcgcctgtggtctcagctacttgggaggctgagctgggaagatcgattgagcccaggaggtca

SEQ ID NO: 83242 - DNA, 122 bp, Homo sapiens
gctaagaattgtgcaccaattgagaaaacgcccagtgggcgctactggcaaaagtgctgacgcaaaaccgacagctccgcataagaagcggagtcgccagacagaacccgggacctggcagc

SEQ ID NO: 83243 - DNA, 122 bp, Homo sapiens
gggagcgacccctgcaatggggcttggctgcaccggccgcctgggtggtcggtctgtgtgcgggtgacccaggcgtgtgcccccacccgcgctgccccagcccgcggacctcggcggggagc

SEQ ID NO: 83244 - DNA, 122 bp, Homo sapiens
cgtggacaacctgcgcgccgcgctgagcccgctggcggacctgcacgcgctcgtgctgcgcgtggacccagccaactttccggtgaggcctttccggccggggcaatggtgcagcgcgcagc

SEQ ID NO: 83245 - DNA, 122 bp, Homo sapiens
agcccggtttccactgcctgttcccacatggtgccgggcccagcggggcacgcaggaggccggagggcccaccctgcttttgggaggggaaagccaccccgtcccacagggaagcagacaca

SEQ ID NO: 83246 - DNA, 122 bp, Homo sapiens
tatctaggtcccatcctttgtacagcctcacatgctgttacaggatctgggcagctgctgcgcagagaccaaacaggcagcacggagaggaagggtggtctctccaccatctggtgatcaaa

SEQ ID NO: 83247 - DNA, 122 bp, Homo sapiens
taacagtgcaggccttctaacaacccttcaaagaagggggtgaaactaggcagaggatatcgactatcttggttcataagtaggtacacctgggagtaccaagccagggaaacatgagctct

SEQ ID NO: 83248 - DNA, 122 bp, Homo sapiens
ccaggatgtgttgtttaccatctttatcttcagggatttcgctttaattctttaatcccccgtgcacgcttggagtctgggctccggttctggagaacttctgctgcacaacgaagcacgct

SEQ ID NO: 83249 - DNA, 122 bp, Homo sapiens
ggccttccccctgagcttcctggggctcctgcgaggacagagcgagactgccaaggtgcccggcccaggctcagcacatggcgtccttcataccgttacttccaccgccccagctccagaca

SEQ ID NO: 83250 - DNA, 122 bp, Homo sapiens
cagaacctccccctgacctgcctgcccctactcccacatacctatacatgtgagcagttgcgcacacacgcatgcacacacacgcgcgcacacacaggcggagtagccccgcagccccagtc

SEQ ID NO: 83251 - DNA, 122 bp, Homo sapiens
gctcagacgccgccttgatcttctgcacccaggcggtcctacgggagaagcaggggcagccgttggccgcatcccaccctcacaggtcagcgtggagccccagagctctgcacatgttcttc

SEQ ID NO: 83252 - DNA, 122 bp, Homo sapiens
tgtgcgccacaccctcgtctccaggccctgcgtgctcagtgggctctcagttgccaggtccgacctgggtggaacatcgtttccgagctctgtctcgaagtgagttccatagacagtttggt

SEQ ID NO: 83253 - DNA, 122 bp, Homo sapiens
ggccttgtggcctccggtcggtcgtggagacataagaggccgcctttcctctgttaacaccgggaatgtgccccagcctctccctccttcctgcaaatccagtccttgtcctggagaacctc

SEQ ID NO: 83254 - DNA, 122 bp, Homo sapiens
gaggcaggtggatcacgaggtcaggagatcaaaaccatcctggctaacacagtgaaaccccgtctctactaataatacaaaaaattagcctggcgtggtgtcgggtgtctgtagtcccagct

SEQ ID NO: 83255 - DNA, 122 bp, Homo sapiens
gtgtgtgtgtgtgtgtgtgtgtgtacatagcgcgcgcgctctaggctagaaagaaggtaacgaaaaagtagcttcggtctcctgcagcttggatcccactaccaagtccgaccatattcagt

SEQ ID NO: 83256 - DNA, 122 bp, Homo sapiens
ttctaagctgatctaacaacaagctaaccatatatagctaaaagttataggctacgtacacgcggtgttcactgtatgccaacgctgtacacaaatatttgtctatgctaacttgtctgaga

SEQ ID NO: 83257 - DNA, 122 bp, Homo sapiens
cgggccccccagcgggggagccgggactatcgggccccctagggcaggaggctgggtcatcggaaccaccggggcgggcagctggccctgtggggcctcccaggcaggctgaggtgcctgcc

SEQ ID NO: 83258 - DNA, 122 bp, Homo sapiens
ctcctctgctgttccttccccagccactgaggcggctcccagctgcgttggcgacatggccgacacccccagagatgccgggctcaagcaggcgcctgcatcacggaacgagaaggccccgg

SEQ ID NO: 83259 - DNA, 122 bp, Homo sapiens
tgtcctttagtcaagccacacacatccttgaagctgccacattctctgcacagagagtcacgtctgtgctcccgctgagtgataatagggtcgtgacctccttggaaagggagaccatgttc

SEQ ID NO: 83260 - DNA, 122 bp, Homo sapiens
ttgcttgctgtggcttcatttaacctcctccccaccacgtggcctgcagccctcaagcgccgccccacatcctggctggggagatcatcaggccctctcttgtggctgtggctgcaggtgtg

SEQ ID NO: 83261 - DNA, 122 bp, Homo sapiens
tgcagcaggctgctgcctaggcctggacacagtatttacctggcattcttttagatcaaacgaactggttatctgaggggttgggtgaactggctcgggtgggccttccttcccaccaaggc

SEQ ID NO: 83262 - DNA, 122 bp, Homo sapiens
agtttctcctgccccctgcgaggccttgggccccggcatgacccccacagacagggccggcgtccacacttgaacagaaagcgcctgcagccagcacatgcccggcgcacacgggaacacgc

SEQ ID NO: 83263 - DNA, 122 bp, Homo sapiens
ccgaggggtgcaaggggccgctaccttgcggaaacctccctccctcggccctgcggaccgcggagaggcacctttccaccaccggacacccaagcaacagccctcgctccatccgcgctctc

SEQ ID NO: 83264 - DNA, 122 bp, Homo sapiens
aggagccagcacagcaggtggtccagcctttcctggacctcctcgtcccggggctggtatcgatccgggtatccgtctctgaggtcaaagttggggcctggaccgttagtggggggtgggct

SEQ ID NO: 83265 - DNA, 122 bp, Homo sapiens
ccgaggtgtcccaattttctgccaggggcagtttgtcaggacagatttcagcttgaggaccggatggaaccaacagcagccctgtgccccagcccctggccttcaagaagggctggccctcg

SEQ ID NO: 83266 - DNA, 122 bp, Homo sapiens
aacggggagcggaggcggcctgaccgagtgagtgccagcgagtgtggagttaggggaagccgcctacccccgacccgcttccccattccttctctccccgttcccgtttctccccccaacca

SEQ ID NO: 83267 - DNA, 122 bp, Homo sapiens
tctatataaggggcaggatttccgctttcgctcctttccggcggtgacgacctacgcacacgagaacatgcctgtgagtgctttggtccaggtttcggcggagatctcgctgttctgtccga

SEQ ID NO: 83268 - DNA, 122 bp, Homo sapiens
gacagggggaggggatatctcaaaagttgttggaaatgccagatatggctcatccagtgccggatcttgctgggcacctgccagctgctaaggattgtgaggccatggctgaagctgggagg

SEQ ID NO: 83269 - DNA, 122 bp, Homo sapiens
gatgggcagaagccacgtgggtacggctgggacaagtggcagaagccatgcgagtatggccggaatgataggcagaagccacacaggttcagctgggacaatgggcagaagccacacaattg

SEQ ID NO: 83270 - DNA, 122 bp, Homo sapiens
ccgggccgcggcggcgcccctcgcgcctcagtcgcacactccggggtcaccagactcaagcgccgccccctcactgcccggccattttttcggcgccacacacacagacgactcctccgccg

SEQ ID NO: 83271 - DNA, 122 bp, Homo sapiens
gccagcccttccccttctgtttctccccgtcccctccccccgaccgtagcaccagagtcgcgggtcctgcagtgccccagaagccgcacgtataactccctcggcgtaagtgctaggaatgc

SEQ ID NO: 83272 - DNA, 122 bp, Homo sapiens
ggaccgcaggtgaccgtctttgttgaatgctgaggccgggccatgggcacatggagttgtcgtgtttcccttcactttggttcatgtttgaaatttccaaaattaaaaaaacagtgacttgt

SEQ ID NO: 83273 - DNA, 122 bp, Homo sapiens
aggcatgtattttgtggtgcttcacttggaagtcttctaaagcttccttctcgtgggctgcgtgtgtgcagtttatttctgcagtatacaagcacatggatacagaacagaatgaggattct

SEQ ID NO: 83274 - DNA, 122 bp, Homo sapiens
agcctctcctacccttcccatagggacacaggcctttaccccactgtacttcggagccaacgcctttccctcagcactgccaccccagagtcaggacccagaggactgtgccttcgccccca

SEQ ID NO: 83275 - DNA, 122 bp, Homo sapiens
ttatcacaagagctgttgaaaaatttgactcattatttcagccgcctcacccctcactgtcgttgcacccattcagccttcagccctgtttttgctcagctttttgctcaaaggcctcagct

SEQ ID NO: 83276 - DNA, 122 bp, Homo sapiens
ttccaggtgccatctgtcaccactttctttgactaggaaagggaactccctgaccccttgcgcttcccgagtgaggcaatgactctccctgcttcggctcgcgcatggtgcgcgcacccact

SEQ ID NO: 83277 - DNA, 122 bp, Homo sapiens
gaacactgcccccctccaaacatttggaatctggcacgacctgtcatgcagtttggcgggcgggtccccctccacccgcttcgcgatgaaccccatgggcgtttccagggagacgtgagcca

SEQ ID NO: 83278 - DNA, 122 bp, Homo sapiens
gggtctataaaacacttttgaaagaagagcgtggtgactgggagtgaagtgtgggactcacgcccagagtggtttgccagtaaagggtggagatgctccaggcaatttcctaactggcctta

SEQ ID NO: 83279 - DNA, 122 bp, Homo sapiens
cgccgcgcccccgtactggggagccccggggtccctgaggaaggcagtccggaggctgggcgcccagtgggggcggggaggggagcccgccaggtcctcttcggcccccgatgtgtggcgag

SEQ ID NO: 83280 - DNA, 122 bp, Homo sapiens
tgttgggattgcggatgtgagtctccgcgccaggtttcttctcttttcttgtgcgtttcacgcaaaaaaacccgagtccctgaagctacgctgctttcctgcctctagggaaaacgggagtt

SEQ ID NO: 83281 - DNA, 122 bp, Homo sapiens
caggagcacgggcgaaatcagcggaggcccctgctgagtgagtggacacacccaggcgcacgggcgaatcagcggaggcccctgctgagtgagtggacatacccaggagcacgggcgaaatc

SEQ ID NO: 83282 - DNA, 122 bp, Homo sapiens
tgcctcgccaacccttaacccaaagagccactagttatcttcctaaaacagcttgactgacgacattcccctccctcagaaaccctcattggctcaattgtattgtccaggaaatacaattt

SEQ ID NO: 83283 - DNA, 122 bp, Homo sapiens
ggcagcccccgcctgggaggagcattgggggcgccaggggctacccctcggtctcgcaggcgcggaactcagcccggccctgcggctccgggagttgctgagcactcgcggccagcggctgg

SEQ ID NO: 83284 - DNA, 122 bp, Homo sapiens
cccgggcgcaactcaagaagatcttctggggcgtggcggtcgtgctgtgcgtgtgctcctcgtgggcgggctccacgcagctcgccaagctgaccttcaggaagttcgacgcgcccttcacc

SEQ ID NO: 83285 - DNA, 122 bp, Homo sapiens
tcgcagctcatacccgggctctccagtcccctgcagtactggaggatgtccagcaggtggcgcaaaagacaagggctcgccttacccatctcttgtccttatgaaggaaatttgaccaaaat

SEQ ID NO: 83286 - DNA, 122 bp, Homo sapiens
tgtacgttatctttattatcaggtcacaaaagatgtcataaaagaatttgcagatgacggcgtcaagtacctggaactaaggagcacacccagaagagaaaatgctactggtagaatttata

SEQ ID NO: 83287 - DNA, 122 bp, Homo sapiens
tggtggagtgaacacccacacggatgtctctggatagtggaatgcggaggatgcagggcacgccggtggagagctgcccagccgtgccagcaaggccccggcatccctcccacctgccgtta

SEQ ID NO: 83288 - DNA, 122 bp, Homo sapiens
accggtctgtgtctgttttcttctcccttttcactctagcccttcttaggcatcccaatgcgagtagtaaaacataaatcatgcaatatcataagatactgctacagctcttgccctgccct

SEQ ID NO: 83289 - DNA, 122 bp, Homo sapiens
gagagaaaagtgaggagcagtgattaccgccacagaaatatcctttcatggcgtgtcctccggcatggtctactcagtgtggtggagccactgcaggtccctcctccagggatgtaggaatg

SEQ ID NO: 83290 - DNA, 122 bp, Homo sapiens
tttaaatatgcgcagtgatgcgcagagaggatgaaggggacgcaaactttcagagacgcacgccccttgacgatgacatttagaaaagggctccacatccctgttattcgtaaaggacggga

SEQ ID NO: 83291 - DNA, 122 bp, Homo sapiens
cagattccagttgttaaggctacgatgaaatagcagaagactctgggaagcagcgtgcaacgagtggcaaaggagcccctaacgctctttcttctgtgctcgccccgccccctccggcgtgg

SEQ ID NO: 83292 - DNA, 122 bp, Homo sapiens
caccagtgcatacctcgaccgtgtgtgggcgcacaggcctccgttcctttttactccgaccgatgcttctaaggaagtcttcgaccgctttttctgtctgaggcatctgctgaggagtcgca

SEQ ID NO: 83293 - DNA, 122 bp, Homo sapiens
ataaaaactatgagctgaaatgctgcgtcagagctgacagaaattctctcaaagactctccgaggttataatcctcagtaagatggaataaaactaactttaattatttaaaaccctgattt

SEQ ID NO: 83294 - DNA, 122 bp, Homo sapiens
aagctgcagttaggggcttcccggatttgtgtcaccaagaatccactccccaccaaccctcggcgtccccacaaacccagcccggaatctatgtaaaagcaggaaaggaaccctggaggttg

SEQ ID NO: 83295 - DNA, 122 bp, Homo sapiens
ctgtgagtccaccgcggatcctaagagccaggggggcaagaggggctggctcttactccccgcatcgcggggggcgcctcgcctccctgccatttggatcttaatatatgcggggggagagg

SEQ ID NO: 83296 - DNA, 122 bp, Homo sapiens
attcccctgcctaggcctcccaaagtgctgggattacaggcatgagccactgcgcccagccgacagtggctatcttcaggaagtgagacaagatggagaaaagaggatgtttttgcttttta

SEQ ID NO: 83297 - DNA, 122 bp, Homo sapiens
gttagattttggataaaggcaggctgtgaggctgaagagagcctgaagtcaccctgaacccgtgccccctcctgcctttcacctctggcccctcaaacctttggactctgctccaatgtttg

SEQ ID NO: 83298 - DNA, 122 bp, Homo sapiens
gcggtccccgcctcggcgctgatgtggtctggcagtggagattggcgcccgggcggagcacgatgggcttccccgcggcaggcaggcaggctgctgctgcaggtgggtcccggcgcccgcgc

SEQ ID NO: 83299 - DNA, 122 bp, Homo sapiens
acagtgttcaatagaagctcctaggacaaattctcacccagaggaaatggagcataggagcgtgcagcaacttcctagccgtgtgaccttgggtgagtcacttaacacccctgagcctcagt

SEQ ID NO: 83300 - DNA, 122 bp, Homo sapiens
ttcaagcaattctcctgcctcagactccttagtagccgggactacaggcacgtgctaccacgcctggctaattttttgtatttttagtagagacgggctttcgccatgttggccaggatggt

SEQ ID NO: 83301 - DNA, 122 bp, Homo sapiens
ggaattcttgggggggcagctggaatgagcctacttggaagctcagttaggccttggttacgagcaaagcatgtttatgggatattaaaaatagatttcaagcaaatatataaatctctttc

SEQ ID NO: 83302 - DNA, 122 bp, Homo sapiens
aacacgcgcagcgccaccggcgctttcggatctggacaggcgagggaggatggggagggacggaaggggagaggccctagcacttataaagatgctctcacagccaagttattcaacactcc

SEQ ID NO: 83303 - DNA, 122 bp, Homo sapiens
gtgcctactcatgagctgtgccaacgacgccttcccggaggagtacgtgcccaccgtcttcgaccactacacagtcagcgtcaccgtggggggcaagcagtacctcctaggactctataaca

SEQ ID NO: 83304 - DNA, 122 bp, Homo sapiens
atagagagagagacggcatttaaaggaactatgaaggttcatccaggtaaatcatctccccggctttctatccctgttagaaggaatgtgctagatgttttacactgactactacatccctc

SEQ ID NO: 83305 - DNA, 122 bp, Homo sapiens
tcacactttcctcccttattcacaatagagctctcatttattgagcacctattgtgtgcccgcccctttataaaatcaaacctggtttttactatgatctgggggaggatgctgttaattag

SEQ ID NO: 83306 - DNA, 122 bp, Homo sapiens
gggaatgcggccgctcacccgcgcacccctaacgcagtgccttctgcttgctccatggcccgtgcctgtccacctccacctggccccgtcgccaggcctgccacaccttctcggtctgctct

SEQ ID NO: 83307 - DNA, 122 bp, Homo sapiens
tgaattttgctgtaaacctaaaactgctctaaaatatcgtgttttttaattgaaagaacccggcctggcccagtggctcatgcctgtaatcccaacacttgggatgccaagggggatggatc

SEQ ID NO: 83308 - DNA, 122 bp, Homo sapiens
ccatgattatttctgtctctgctctcgctgggggaaggcacagaagctgtaccagtttcccgtgatgtccccagcctccagctcagtgcttggcgaacagaaaggagtcaaaggcagcagaa

SEQ ID NO: 83309 - DNA, 122 bp, Homo sapiens
tcctgggctgccgctcgggctcgggactgccagatgcaggctctggctgggggcggcgggcgcaagcgggcgcacccgcagctaggggtgcggggtgcacgcacacgcacgctcattaagag

SEQ ID NO: 83310 - DNA, 122 bp, Homo sapiens
agatctccgtgtttcttcctaaaggaacgtggcctgatacacaggtgagctttattagaacgcgggctgatacacaggtgagctttattagaacgcgggctgatacacaggtgagctttatt

SEQ ID NO: 83311 - DNA, 122 bp, Homo sapiens
agcggtcgcaagagggaagagcacgtctttgctttttcttggcatccgaaaactcaagctcgaactgggggcaaaggccagcggctgcggttccaccggctaaggcgcacacattccccgag

SEQ ID NO: 83312 - DNA, 122 bp, Homo sapiens
gctccagcgctgcccatggcacaccccgccatcccgggggcccgccccccaccgcggcgtcgtctgttacctgacaactgacactggcatccaaagggagcctccgtctgaccctcaccctg

SEQ ID NO: 83313 - DNA, 122 bp, Homo sapiens
tccctctgcccccgtctctccagcccggggcgcctccccagcagcccccaccttctctcccgcccctcccgtagccctggggcctcttggttccttccgggctcaccgtgtggggccgaaga

SEQ ID NO: 83314 - DNA, 122 bp, Homo sapiens
gaccaagggctgtgaacccgcctggggatgaggcctggtcttgtggaactgaacttagctcgacggggctgaccgctctggcccagggtggtatgtaattttcgctcggcctgggacggggc

SEQ ID NO: 83315 - DNA, 122 bp, Homo sapiens
cctggccggcttcgctacccttgtgcttgcgttgcccacaagcttgtagtcagaagaactcgcctgggagggatcgctcctgggagatccgaacgcgggagggcctggagcgcggcggcagc

SEQ ID NO: 83316 - DNA, 122 bp, Homo sapiens
aaaacccatgatgctccttcacttgctctccgaggcgcaggcgcacagaaacagcggccacggaccacagaaatgcaggacggagctctcctgctcccacgccacgaggctggaacatcagc

SEQ ID NO: 83317 - DNA, 122 bp, Homo sapiens
agcctccgagaagtgagtggaattggcccgctgaggcccccgggagggcggaaagtttaacggacttcgttgacaaagagtccctgggccttaccacgcatcttggcccacctcgctgcttc

SEQ ID NO: 83318 - DNA, 122 bp, Homo sapiens
cgtgtcccagccgcgccgcgccagcagctcccgggagacagaggccctgggctttcgtgccggccgctcacgccctacggtggctatctggccaccaagtagttcggtaaactgggccccgg

SEQ ID NO: 83319 - DNA, 122 bp, Homo sapiens
gtgggagctgggaggctgagataaattcccgtgattgggggctgaaatggcctcccatgccggactgccgtggttctagaactttttcctggaacaggccggcactcccactggagagtccc

SEQ ID NO: 83320 - DNA, 122 bp, Homo sapiens
tggggacaattaggcgccacgccctgtcgcttcactgcgcgacgctcgcgaggccggggacgccactcccagaccgggcgggacgcgcacgctcacagtgaggtctcaaaagatccccacct

SEQ ID NO: 83321 - DNA, 122 bp, Homo sapiens
tgcaaggtagagggcggcgtcccatgtgaccaggcctgtggtaccgtaggagatgatggccgtgctctcggagagtgtgaccgagcctcccgagggctgcaccaagagaaggcgagagagtc

SEQ ID NO: 83322 - DNA, 122 bp, Homo sapiens
gactctagagagagataggtgtgacttcaaaagccagtctactctgggcatggtggctcacgcctctaatcccagggctttgggagacccaaggcgggaggattgcttaagcccaggagttc

SEQ ID NO: 83323 - DNA, 122 bp, Homo sapiens
cagcggggcgggggctctctggggctccatcctagtgaggtaagtgccctctaccagaggcgccttctggcgggaggtgagtgggcccctaggtgcttccagcatcccagctctgctgggac

SEQ ID NO: 83324 - DNA, 122 bp, Homo sapiens
tgacagctgggtcgggagaggggatgcagcagcagcagggccctccaggggtccatcctgcgtctaacaccagacccagtgcttcccagtgaccccacacgccccacacatggtctctgtgc

SEQ ID NO: 83325 - DNA, 122 bp, Homo sapiens
tcagggacccacagagtcaagcaagttattgaattcagcataccgaattttatttattgccgctcaggagggtgggggcctgctgaaagacagggtcggggcctgcctcctgcatccccggc

SEQ ID NO: 83326 - DNA, 122 bp, Homo sapiens
ggggttccctaaggaattagctcagccatattacccacaacaaagcctgctgtcaaccaccgcccccacccactcacacatacacatacagagtttccaaggattttagtgctccacttgta

SEQ ID NO: 83327 - DNA, 122 bp, Homo sapiens
aaggacacttgatcacacaatccctggaataatatccaggaaacacttgctggagccactcgcagcacccttccctggcagcacacttggggacagcgaggagatgagcgcatctctgaatt

SEQ ID NO: 83328 - DNA, 122 bp, Homo sapiens
cagtgggcggcagagcccgcctcttcgtggagacgccccagcggccacccccttcgccttcgtcctcctcagctgcggccttggggctgaggatatccagccctggctttgcgtggcaaagg

SEQ ID NO: 83329 - DNA, 122 bp, Homo sapiens
ttttgctttcagtactttcgaaatgtcaatttttttttatctcctggtttgcatagattccgatgagaaggctgacattgttttttggtctctaaatgtaacatgccttttttctatgatcc

SEQ ID NO: 83330 - DNA, 122 bp, Homo sapiens
acctttttctgactcctcccgacccgcactttttaaagtccttaccgcgaggcggattcccgcccttggcgcctcccagtcttgtcttaaggcgccgtcgccccccacctccctcctcgttc

SEQ ID NO: 83331 - DNA, 122 bp, Homo sapiens
cctctgttttctgggcaactcttcgcacccacaaggtaatgactgcaaatgaattccaggcgggagcagaaatcctcctgcgctgtgcgtcgtctgccccgctcgggcctgcatatgggctc

SEQ ID NO: 83332 - DNA, 122 bp, Homo sapiens
gaggctggggcagccatgaccaccgacggcgctcggggaagccccagggagcggaacgggcgaggcttatagaccgacaaccccccggttcctctcaacgcccgcccgcccgccgaccagct

SEQ ID NO: 83333 - DNA, 122 bp, Homo sapiens
gaaggcagaccaccaaacagcactggccataagccacaagttcactctaggacaaaacagcgatgttccccaaggaaaattcactgcgatctgcaagccctggcaaccaaccgagagaaaga

SEQ ID NO: 83334 - DNA, 122 bp, Homo sapiens
cgatgacgtgctggggatcggcctgccgcagcagccctgggagcacactagcggtgagcccgtgcagccagactgtgagccccgttgcgctgccgttgggctctgggagggtgatggccaaa

SEQ ID NO: 83335 - DNA, 122 bp, Homo sapiens
taaggtaaaaattatcctctttttacaacctcaagtctgttatttgaagccaataaatagcggttaataatggagaagtcttaaatttcaggcatgtttttagagactaagcctaataaaat

SEQ ID NO: 83336 - DNA, 122 bp, Homo sapiens
gggtcaatgctttgagtatctaataatgtgttgcttctctttgtgacttctatggaatgccgaataggagattaaagatagctgttcccagaaggcttggagatcctcccaaccctgaacct

SEQ ID NO: 83337 - DNA, 122 bp, Homo sapiens
ttcccactgggcatgccgggccctcgaatcctccatgactccagggaagcgactccgtcccgcttggcctcagtcactgctctgtcaatgggatgataactgcccttcccgcaggctgccat

SEQ ID NO: 83338 - DNA, 122 bp, Homo sapiens
cccacctgggaagtgaggagcgcctcctcccggccgccatcccatctaggaagtgaggagcgtctctgcccggcagcccaccgtctgagatgtggggagcgcctgtgccccgccgccccatc

SEQ ID NO: 83339 - DNA, 122 bp, Homo sapiens
actccgatggcagtcggataacatccctgtgggtttcaaccgctctgaatgttcagtacccgggaacgtgtttgaactcaaagagcttgtgtaggaagacccaaaatgtccctgcagggctg

SEQ ID NO: 83340 - DNA, 122 bp, Homo sapiens
acaattctacaaatattccttggcagttaaagaaataactccccaggaggtgctagacatcgggcgcatgttagaggcacaaagatgagaatgttaaaagacataaaatacaggtctgctct

SEQ ID NO: 83341 - DNA, 122 bp, Homo sapiens
ggcacctcccgcctccttttctcttttctgctgcactcactttgctgtcttgcagggttccggggagacgaggaaccattccgttcggtgggactcccgattggatgtaagtgggtttttgt

SEQ ID NO: 83342 - DNA, 122 bp, Homo sapiens
taattataagtagaagagaaaatgtctgaatagtgatatttaaaaagtggggaggggtgacggcttggggctctgtagcccttgtacaatgtaaaatgactctgagagtaaaagactggatt

SEQ ID NO: 83343 - DNA, 122 bp, Homo sapiens
attcggagagcagcaggtcccagagtgacacgctacaccccttaaacctccctgtgctgacgggcaccttcatggccctcagagccaccgcggtgtggtcgtccacctcaagcactgtgtct

SEQ ID NO: 83344 - DNA, 122 bp, Homo sapiens
cctgagccagggcctcaagggtctcctgggtgatgatgccagcatccagcagccagacagcgggtacctcaccccgtgggccgggcaccatgacgcgggcctgggccaggagcttggtctcc

SEQ ID NO: 83345 - DNA, 122 bp, Homo sapiens
ggctgccctgtgcatttcatgttgttggttcctgcctgtccacagcacagatggcatacccgggcagcgggaccctgctccagcctgcaccctggggaaaggtgtcctacattccacattct

SEQ ID NO: 83346 - DNA, 122 bp, Homo sapiens
agctttagcagttgtgcggggaaaatgtcttcagtactttttttataccgggcttctctgcgcttccggggcccagagcggcacgttcgccacaccctcctcatctgcatagggcgccgccc

SEQ ID NO: 83347 - DNA, 122 bp, Homo sapiens
gcgggcccggcggccgggctggctgggccgcgcttgggttcccgcgccggctcccgcacccgcaatggggaactcacaccacaagaggaaggcccccagcggtccccgggtccgcagcttct

SEQ ID NO: 83348 - DNA, 122 bp, Homo sapiens
cctgggcggttctgcctgggcctggactttgccgtttccttgtagggcccagggccctcccggggagatggactgagctgtcctggtctgagtccctgcagtccctcattgctcagctgaac

SEQ ID NO: 83349 - DNA, 122 bp, Homo sapiens
tcaggtttgaataaacctactattttaaacaaatgttccaatgttaccatttttaacaagcgttccaatcatttttctcttcaacagcaaatgctacacatcaagactcaatcctctacccc

SEQ ID NO: 83350 - DNA, 122 bp, Homo sapiens
ctccggccccgccgcggccgctgcctgcgctcctcctcctactccactcgctgctgccgccgctgcttcgctattcccaatcctgttattacgcaggtgaaaatggcctgcttggtccgggt

SEQ ID NO: 83351 - DNA, 122 bp, Homo sapiens
agccaggaagactcccaaggaaatatgttacaagttgacggaagttaacctgagtccagccgaggctaagtttggatcatgaggcactgcccaaggaggctactctagtaaaagcattggtg

SEQ ID NO: 83352 - DNA, 122 bp, Homo sapiens
gccaaggcaacggctcatctgctgcagatctcatcaaggccctgcaaagcatccacggcacgttacgctttgcgtttcacagtgaatcggctgcaatcagtcttcctgcagccctcccttac

SEQ ID NO: 83353 - DNA, 122 bp, Homo sapiens
tgctgctgggcaacttcttctgcattaggaagaagcccaaagagccacagcctgaggtggcggccgcggaggaggagaagctccacaagcctcctgcagactcgggggtggacttgcgggag

SEQ ID NO: 83354 - DNA, 122 bp, Homo sapiens
ggaccacctccgggaacagcagcgagagctggaggcgatgaggcagcggctgctctctgccgcccggcttctcaccagcttcaccagccaggccgtggacaggtgtgcacccacgccacctg

SEQ ID NO: 83355 - DNA, 122 bp, Homo sapiens
tgtggaaaacagtaaccactaaccacagtcttcagccactctcaccacagtgagtcagaacgggaatcactgttttcaattcccagcccactcaaactgctccagtgaatctttgcaggtgc

SEQ ID NO: 83356 - DNA, 122 bp, Homo sapiens
gactataagtctatgtttatttcaccccccaatgtagaacaaatgtctaactgtgcctgacgtgtagtaagcacaatagatgttggctaaataagtgaatgtatatcattaaagaaagagga

SEQ ID NO: 83357 - DNA, 122 bp, Homo sapiens
ggcctgtggtgagtgggactttcattacggatcaggggtgctctttccctgtgaggagctcgggggaccagggaggcctgaggtccacctcacatgccatgtccagagggggtctcaatttc

SEQ ID NO: 83358 - DNA, 122 bp, Homo sapiens
tcaggggctcataattttgagagatggaggaagttgaccgcatgagagtggtttgaggatcgctgtgcctagaccgtttttgacattggcaacttaacatatcagagatggaattaatggca

SEQ ID NO: 83359 - DNA, 122 bp, Homo sapiens
gagggatgtgggccttccaacacctcgatttcacagccttgggacttctggcctccagaacggtgacagaatacatgtatgttgttctaagccaccatatttgtggtcatttgttacagaag

SEQ ID NO: 83360 - DNA, 122 bp, Homo sapiens
gtgtatctgcattcttaatttcctcagtgtgagacaacaaacctcaggtatcatcccagacgagcaacaccatttcacaatgaaattccatgtcatatttccttaaacaatatacttttatt

SEQ ID NO: 83361 - DNA, 122 bp, Homo sapiens
cctatgagatcagtgaggctcaaataaatgtcattcctccctgcccagctcttggcaggacgagaagtttacatactccctgggtggagaggtgggggtgggtgccagagcagaggaggggc

SEQ ID NO: 83362 - DNA, 122 bp, Homo sapiens
ggtgtctgtgcctttagggtttaaccagaccctataaccaggatttggaaatcttcacagcgtgaaattagaagtaataaatttgaaaattatctgtcgctgagaatcagaagtttgtggca

SEQ ID NO: 83363 - DNA, 122 bp, Homo sapiens
acgtccctccctggccggctcgcctgcgcagccgagcatcaggctccgcgccggggtaggcgagcaggtccccagccccaggcccgcagctgtaggccggtgaggaacagctctgctagaga

SEQ ID NO: 83364 - DNA, 122 bp, Homo sapiens
caggcagcacctgggaccaggcaccccctccctgggaaacagttgggggcgatcgtgctgcgggcctttgctctgggaggccggcgctttgggaacagggtggctccagagccttcccaggt

SEQ ID NO: 83365 - DNA, 122 bp, Homo sapiens
acctggtcctcgacggggaggagatcccggtgcagaagaacatcctggcggcggccagcccgtacatcaggtggggagggggctacggcgggcgggcgcggcggtgctgcccggagccggag

SEQ ID NO: 83366 - DNA, 122 bp, Homo sapiens
aaaaagtccttttgccactgcctccaaacataaaaaggagcctgtgccctagccccagcccgggccacccatggccctgattgtccatggaagaaagttaaggattgaggggcccacagcct

SEQ ID NO: 83367 - DNA, 122 bp, Homo sapiens
ggatgttgcaacacatcacccaagggaatggaaatgtaagtctgagtataaaattgaagacgtccatctgtaggaacagtgagtaactcagtgagtgccctaaaccaaatgaaacccaggtc

SEQ ID NO: 83368 - DNA, 122 bp, Homo sapiens
ggagcctcgctccggacgccacgcctgcctcagctgagttggtctccctcatcctgttcccgctgtccacagccccaccctaagctgatgaggaagcctcacgggccacccggggaatccag

SEQ ID NO: 83369 - DNA, 122 bp, Homo sapiens
gctgggagagacctcacggacacggcgccacttgggtttagcatctgagctgacaagcgccgagcgtgcggcccccacacacctggcccaggcactcagggcctttaccaccagtgctcaca

SEQ ID NO: 83370 - DNA, 122 bp, Homo sapiens
ttcaacctccgcgccggctgcgcctgtttctcggccaggggagcaaggccacgcggcctacgcagccgagtcggaaccaaccggttgtttggtgaaacctaccccagagcctcccgcggccc

SEQ ID NO: 83371 - DNA, 122 bp, Homo sapiens
actgttgacatccagcaacaaagcatagcccaacataagaaatacagatttgcaacacttcgatatgtgctttgaacattgatatgccaagtagcaatagaaataattatctctttggatgg

SEQ ID NO: 83372 - DNA, 122 bp, Homo sapiens
ggacgccgggatactggccagctccaagtcgaaaggaagcgacgcatgagttgtttggtgcggtgggtagatacctcgagtttctcctcgcccaccgtaggccccgacccctaaaaaggaaa

SEQ ID NO: 83373 - DNA, 122 bp, Homo sapiens
tggtgagcatgcagtccttcaggcaggtgtccaggaagcctgtgtggtggccaaggacgtcgtcaatgttggaggcctgcggggaacaggccaagccccttctcagaaagacgtggctgaca

SEQ ID NO: 83374 - DNA, 122 bp, Homo sapiens
tttctcattgatttgtaagatctgtcttgattaacttgtgaattttgcagatggtggaaccggggtgccccacagtaagtcccctttgttaggcatcctgtccctggattcgacacctccat

SEQ ID NO: 83375 - DNA, 122 bp, Homo sapiens
gtctccgaggtgggttttcaggttgcccagccagggggccggcgggacctaccgcggactcgcgcatttacgttcgcaagaagtgaatcaccaaacgtgcccacggctaaaactctcgtgcg

SEQ ID NO: 83376 - DNA, 122 bp, Homo sapiens
gacggtggaacagtagtagtaaagacaataatagcttgctctccccaaatgcctaatgcccggccctgctctttttggacgtaattctctctagtacccctcgccggcacctgaggataggt

SEQ ID NO: 83377 - DNA, 122 bp, Homo sapiens
cacaagtgaaggagcaagggaaaaatcgctttcaagagctttccctgctatgatacggaccgcgtggactcgcccttggtgacctgacgttaattctgactctgtggagatctgtcagacgt

SEQ ID NO: 83378 - DNA, 122 bp, Homo sapiens
gctcagagtgcagctattcctgcagccggccttcctattttcagtaatctgattaggggtcgatgttggtgggctcggggacggcttctccgtgaggtcgttatttagcgcgcaccgggtcg

SEQ ID NO: 83379 - DNA, 122 bp, Homo sapiens
gcccggggccgcgaacttccactgcggcattcggggcagcaacgcgcagaaggtggtgggcgcctcgggctcggggggcgcggggggcgccgggggcgcgcgcccgcccggaccctgcgtca

SEQ ID NO: 83380 - DNA, 122 bp, Homo sapiens
tgatacgctggcaacagcagcacagagcttgggaggacaccggagctagagcgaagagcgcgatgggaaaaacactactctggcttaagtgagggggaagaatacagtaagtttgcaaatta

SEQ ID NO: 83381 - DNA, 122 bp, Homo sapiens
gtgcagcagatgcaccgttgcctttgtacaaatgctgcagccatgtggttgtaaggagagcgtttggttgtaggttccagtatactcgggaacagaaggcgagtacggagcgagttctagct

SEQ ID NO: 83382 - DNA, 122 bp, Homo sapiens
agacaggccacacggcggggcccaggctggcgggtgaggccaggcgcagcagggccaggtcggcgcccagctccacttggctgtagttggccggcaccacgatggcggccactgcgcgggtg

SEQ ID NO: 83383 - DNA, 122 bp, Homo sapiens
cccactcggagcgtgagcgcctggagacacgtacagccaaccagtgagaaggagtggccgcgagtggcatgcacttggtccaattacctgcggccctgccggtcggcccgcgctggggccaa

SEQ ID NO: 83384 - DNA, 122 bp, Homo sapiens
ctgcccagggccaatcagccctagggtgtccgtgccaggctgcggcctccccgcctcccccgcactgagggtactcatggcgtgcaaatgctcccgcacccccagagctgccctatcggatg

SEQ ID NO: 83385 - DNA, 122 bp, Homo sapiens
ctaacctccacagggctttagcaacccagtttcttcccaattataggaagcagttggccgcgtgcagtggctcatgcctgtaatcccagcactttgggaagcagaggtgggcagatcagctg

SEQ ID NO: 83386 - DNA, 122 bp, Homo sapiens
aaaattagccaggcgtagtggcgggcacctataatcccagctattcgggagcctgaggcacgagaatcgcttaaacccgggagccagagattgcagtgagccgagatcatgccactgcactc

SEQ ID NO: 83387 - DNA, 122 bp, Homo sapiens
aggttgaaaagaacaggactttaggaaatcccaatctttagaaagagccagaagaccgggcgcggtggctcacgcctgtaatcccagcactttgggaggccgaggcgggcggatcacctgag

SEQ ID NO: 83388 - DNA, 122 bp, Homo sapiens
accgtcttcatctgctatcgaactcctgggccgtgaaggtggaaagggagtaactgctaccgtttcttaactgtcccacaggccagtcaatgccttttgcacttgctaggcggagatctcct

SEQ ID NO: 83389 - DNA, 122 bp, Homo sapiens
ttggctctcatttccgtccgcaagctatttcgctgaacttaacgctctgggttgttgaaacggcctatgaggcagaggagggaggggaatcagtgctctcaccacagtccgcggaagcacta

SEQ ID NO: 83390 - DNA, 122 bp, Homo sapiens
agttcagctttaggtagagtaccgcaggcaccaagtgcagctttcctgtcgccatagcgacgggcggggcgagatggcaaagtctccctttggaactacatctcccatcatgcatccgcgcc

SEQ ID NO: 83391 - DNA, 122 bp, Homo sapiens
tcatgctcgtggtgacggagttatagttggtctgctggggagtggtgctcggcacgtacccgtgtggtgatacgctgcttgagttgcgggtgaaacctgaggggcgggggcaaaaccggagg

SEQ ID NO: 83392 - DNA, 122 bp, Homo sapiens
actccgtgaccatggcaactcactttgcctctccatgccttagttttctaatttatccaacggcgggaacagctgcccctatttagagttgtggggagtcagtgaattaatatgtgtaacgt

SEQ ID NO: 83393 - DNA, 122 bp, Homo sapiens
gaaatttaaaaaaattttaatgagcaataaaaaatcatctgggctgggcatggtggctcacgcctgtaatcccagcactgtgggaggccaaagccggtggatcacctgaggtcaggagttcg

SEQ ID NO: 83394 - DNA, 122 bp, Homo sapiens
aggtgtgagccactgcgcccggcccatttcttaggcttgaaatgttacctatgtgatatccgtataggtttaaacataccatcaggccctccctgtcttttgagcttcaaaatcttatatcc

SEQ ID NO: 83395 - DNA, 122 bp, Homo sapiens
ttccagtactcattcccctgcagggacatcaagttcaacaaatatcctcacgagcccaggcggcacagtgtgaagacagagtctacctccttaggaagtaaaaggaatgttagtgtgggatt

SEQ ID NO: 83396 - DNA, 122 bp, Homo sapiens
ccatcttagcctttgccatgttatagtatattgagcctggtggtgggtgattgtctctgccggtaagctgtaagcacatcctgtgtaccatccagcacagagcatggagtctgacacccagt

SEQ ID NO: 83397 - DNA, 122 bp, Homo sapiens
cgccaggccatggcaacagggttagcattacagggcaacgtctcaggctgagaaagcaatcggccaaaactccggccctcctggctccctcaaggaagcctggctcatctcctgtgtggatc

SEQ ID NO: 83398 - DNA, 122 bp, Homo sapiens
aacagaggtgcgacagtcacaggtccttcactcagttggccaggccggggcgaagcaccacgaccagcagtgaggagtccacagatgggtgtctgcccagcatccctggagttacagctgaa

SEQ ID NO: 83399 - DNA, 122 bp, Homo sapiens
gggcctgctactcacctccccagtaaatgtccaggcagcattggacagagaggctggccccgccctgacgggggctgaagaacaggcccccagcagccttgttgttgggctactgagcactt

SEQ ID NO: 83400 - DNA, 122 bp, Homo sapiens
cctgaggggtcccttgtaattaaacctgctgagctagcagcactgacatttgtactcactcggggacaggatggaggaatactcagcacttgccccaggtggccatagaatgagagctcaag

SEQ ID NO: 83401 - DNA, 122 bp, Homo sapiens
agtcggtacaggccccacctcccgaggggcgtgggctcctttctcccgcccgtggtctgacgcccagcctgtggtctcatctgtggccacccggggaaatgacagtccctcttcgagcggga

SEQ ID NO: 83402 - DNA, 122 bp, Homo sapiens
tacaagatgaatttagtctctgaaccccaggaggtcctgcacataggaagcgcccacaaccgaagttccatgccctttaccacctcgcctgcctccagcactaacgccagggtcatcacaaa

SEQ ID NO: 83403 - DNA, 122 bp, Homo sapiens
ccctcatcttcctctacacgtttggtttcacaccgctgatcttgacgaggctttatgtcccgcctttttctctacatcacatgcattccgttaccgagtgctcccctggacagcactgcaaa

SEQ ID NO: 83404 - DNA, 122 bp, Homo sapiens
cgggcatctccatggtactggcgttgagcatccagggagaagcagcccagttccgaagggcgccggtagaaaggaaagggcccagagtagagggcagggtctgtgggcagagaaggtgctgg

SEQ ID NO: 83405 - DNA, 122 bp, Homo sapiens
accaggagctcagagaggccagggtcaggtgtggggcctggagctgagtcacaggtgggccgtgtggtgagtatgagatggggccagagaggcctgagaccttgagagacaagaggccctgt

SEQ ID NO: 83406 - DNA, 122 bp, Homo sapiens
cggcccgtgggctgccactggccgcagcaacgggacgggtgagagcacctgcccccgacgcgtcttaactgctctggtggggcggggctgaccgtgcaagccccgccccagtctaagcccct

SEQ ID NO: 83407 - DNA, 122 bp, Homo sapiens
cggtcacctctgacacagcactgcctggggcccgaggcccggtggccccgcggtttctcgcgccaccaccccggggactgacacagcccgtgaaggctgggccaggctggggcagccccgta

SEQ ID NO: 83408 - DNA, 122 bp, Homo sapiens
cccacaatggaccgatatactgagggcctctctattaacgcccatgaatattaaagagatcgccaagtggcggccagcgggcgaggggggcgacggagcctgagagctccggcccggccgag

SEQ ID NO: 83409 - DNA, 122 bp, Homo sapiens
gcaaattccccggcatatctcaaattatatttaatttggcttagggttcagatacataaacgtgacttcttatgttcgataattttttaaattaccaagcactctgtgtcctttttacttta

SEQ ID NO: 83410 - DNA, 122 bp, Homo sapiens
ccggaccagggtccgggggcgtggtctgctgggggcgggcccgggttgtggtttgagagccgctcggcctgtctgggcctccgcctccgggtcgccctccagccttcctgccgccgcttttc

SEQ ID NO: 83411 - DNA, 122 bp, Homo sapiens
tgctctggaaagcttgatgctgaacaacaatgccttgaatgccatttaccaaaagacagtcgaatccctccccaatctgcgtgagatcagtatccatagcaatcccctcaggtgtgactgtg

SEQ ID NO: 83412 - DNA, 122 bp, Homo sapiens
acactaatcctccttaagtattcctcagaaccttttctgattaactgctaaattagcaggcgtttagaagacccgtttaagcctaaccctagcccaataatgcctagtgaatgaataacgaa

SEQ ID NO: 83413 - DNA, 122 bp, Homo sapiens
agtatgtaagagcgtgggtcgtgacaggtgagggacttgtgtgtgcaactgtgcgtcctgcgagagtgaggaggtctcggactgaggaactgcgttcagtgctcagtggtgagttcccacgc

SEQ ID NO: 83414 - DNA, 122 bp, Homo sapiens
tttaatgacaaaaggctgtcgtgatttctcttggaccacagtgattttggtatgcttatccgtttttaaagtcatgttggtggttgaatttatacaaaatgtttaaaatttcctggaacaaa

SEQ ID NO: 83415 - DNA, 122 bp, Homo sapiens
gaggggtgcctgccgcgtcagaggaccccccgacccaccccgcgaggcagaaggcgggggcgggacagcgaggtcaggccgggttccgcaccccatgccttcccaacgcaccacccgcaggc

SEQ ID NO: 83416 - DNA, 122 bp, Homo sapiens
agggccccaaacagagggtgagctgacccctgtcccgcccgcagcagcctcctccagccgcgagcccagctgcagggagcttctggcctgggaccccccccaggagctgcaggcagacgccg

SEQ ID NO: 83417 - DNA, 122 bp, Homo sapiens
tcgtctcttagctacagagccgagcaccgagcgcccagcgcaggtgggtggagaagacgccgcgggctttttcaaccacacactcctctgggaagcgcgcctgattgacagttcccacgaac

SEQ ID NO: 83418 - DNA, 122 bp, Homo sapiens
ttggaagagtatgacaatgggcggaaatgcccagacactagtactcccactgtacttattcgccagggctgtcgagaaagctcaacactgttgttccaactcaacactgtagaggaccctta

SEQ ID NO: 83419 - DNA, 122 bp, Homo sapiens
tattttgtaaccactgggcccccagcccctcttttgcgaccccttgtcctgacctgttctcggcaccttaaattattagaccccggggcagtcaggtgctccggacacccgaaggcaataaa

SEQ ID NO: 83420 - DNA, 122 bp, Homo sapiens
gccggtgggtgcgacgtggtgtctcgctgcggttttgattggcatctccctaatggccagcgatgtggagcatgttctcaagtgtctgtgagccatttatacatcatggagtggacggagaa

SEQ ID NO: 83421 - DNA, 122 bp, Homo sapiens
ttcagatccccgggaaggatgcatttcccccactcttgggcacaagctgccctttggtggcgttgggcacagatcaccgcctggcagaagcccgcgacagcgtggagggagcgatgcccccg

SEQ ID NO: 83422 - DNA, 122 bp, Homo sapiens
catttaagaaatatattggtttagtccagaaaggctgggaaattcaaaggtggggtagggcgggggagattccaggctataggtgaatttaaacattttgtggttgacaattggttgagttt

SEQ ID NO: 83423 - DNA, 122 bp, Homo sapiens
acttgtttgaatatcgaattagtgccatagatatctactggtacctccctcattagtaaccgagggataagtgaggatatctagaataacaagtttaaaccaggatgctgaagaaaagtggc

SEQ ID NO: 83424 - DNA, 122 bp, Homo sapiens
cctgcactggggacagcggcactcagacaagcccatttttactggtgcccttcagatgcccgcgggctcagctgtctcggtgcctggcattccgggggtattgttcctctctacgagtccca

SEQ ID NO: 83425 - DNA, 122 bp, Homo sapiens
agcactgagggtggcaccaccacccctccttcttcctctggtgcccctgagtcccaccggcgtggggttgtctgggtttgccactcaggcccgggtgggccccactgcctctccctccctcc

SEQ ID NO: 83426 - DNA, 122 bp, Homo sapiens
ttgtggtcgaggttcagaggtccctagcactcactcgtgtgcttgtgatttgctagacttcgggacccacaacctttaagcagcagaggagcacgaggatcgtgggagctaagaagtaagtg

SEQ ID NO: 83427 - DNA, 122 bp, Homo sapiens
ggggcccactgcccctcgctggggcacctggggagggggcgctggggcacctggagagggcgcgcaggagcagcgggccgagccttctgcggggatggggtgggaagagaagaaatgaagac

SEQ ID NO: 83428 - DNA, 122 bp, Homo sapiens
tcagttaaggacctggccagtcagaatctcgtcagttaaggacctggccagtcagaacctcgtcagttaaggacctggccagtcagaatctcgtcagttaaggacctggtcagttgggtcca

SEQ ID NO: 83429 - DNA, 122 bp, Homo sapiens
aggcttgtagagcttggattttctccaccagattccgcaacagcgagttgaacctgattgcgttcttccttacggaagttttgcagaggggacatttgaaaaatccacatgatgtttcccca

SEQ ID NO: 83430 - DNA, 122 bp, Homo sapiens
ctccccaaaccggcgacgccggtcccaacactcatttacactgtctggcacacacactcgcgctttgtgagcaactgcacttttaccatcatgggcagccaaaggacgacttttgtaagcgc

SEQ ID NO: 83431 - DNA, 122 bp, Homo sapiens
gaggcggggccgggggcggggcgtgagctggccggggcggggcctatggaggggcgggaccgcggcgccctataagtactgcggagcgaggcgcgcgcccggccagagagcgagcgcgcaac

SEQ ID NO: 83432 - DNA, 122 bp, Homo sapiens
accgtggctgctgagatctcagggggcagtcccacctcccacccactaagggcggagaaccggaggtggaccccaggtcctgcatcctggactggggatctggttcacgtcctgcccagcag

SEQ ID NO: 83433 - DNA, 122 bp, Homo sapiens
gcccacccggcccgggagggctcagcattttccctgcagcggcagtagcggcagcggcagcgcttcagccatgtttgacaaccgaggcgcgctctgcgcttgcgcggcgcctagtgcccgct

SEQ ID NO: 83434 - DNA, 122 bp, Homo sapiens
acagaaaagcagaagaggttataccagtggagggaaggtggtcttggggtctgaacagttcgtccactgctgctcaggtaggtggtttcacccagggtcagttttgtcttctggagataggc

SEQ ID NO: 83435 - DNA, 122 bp, Homo sapiens
tctcgggcactgctctgtcaatctgcatctggttcacaggaagggcttcgccagggcctgcgttcctacttgctgttgtcaccagcactgtttgcctacccttgaaccaagcccttaccctc

SEQ ID NO: 83436 - DNA, 122 bp, Homo sapiens
agaggctggggattaatttcctgcgcgctccacaagaggcggggctgggcggggcgggggcgagagggaacgagggcgcctgcgcggagaggagtgaccatagagtcggtcctccagagaca

SEQ ID NO: 83437 - DNA, 122 bp, Homo sapiens
gcaggaagtcttgaaaggggaggttgaggtacctgtgttgtggaagaaaaacaaaaagggcgaggaagaggtcccccacaacgggcgaaagtgcctccacaccaggcttgagtggggcctga

SEQ ID NO: 83438 - DNA, 122 bp, Homo sapiens
gcccttctggtgcagccacatctcccgcctggtacgcagcctgtccctgctgctgaagggcgtgcatgggctagtacagggggatgagaagccatccacccggcccctgcaggacacctgca

SEQ ID NO: 83439 - DNA, 122 bp, Homo sapiens
aggcactgagctagggactactagaatcggagagggagtcgcggtacatagagccgatggcgaagtaaagcagaggtcatgtgttctgtcctccatcctggagtgggggaggtgcaggtttt

SEQ ID NO: 83440 - DNA, 122 bp, Homo sapiens
gggtcctggccggcgacgacacgcgccccccactcaccgtcagagccgcagcctcacgcgcgaaggaacggcatcccgcagcaccttcagacaaagggctgccccgccccgtctgcgcagcc

SEQ ID NO: 83441 - DNA, 122 bp, Homo sapiens
tacaaagagcgtcctcagccctggagaagaaaacattcaagtgaaaaagagaactcccagcgcagaagcagcaacagctgcaagagggcatcggaaaaacagcgcatcacgtgggggctggg

SEQ ID NO: 83442 - DNA, 122 bp, Homo sapiens
aacaccttggattcagattggaagataaagagaaagtttaaagaatgtggcctataaaggcgggtacctggaaatattaaccgactcacactgtaaaaatgagaccagtttctaaacaatag

SEQ ID NO: 83443 - DNA, 122 bp, Homo sapiens
gccgcgctggcgcatgcgcacaaaaagcgccggcaattggggtcgcagctggagatgctgcggccggcagggctctggcgcttatgtcggcgaccttgggcggcgagggtcccagcggagaa

SEQ ID NO: 83444 - DNA, 122 bp, Homo sapiens
tcccatagtacagtactttaaaattaatagcacatgcagaggaaaaactaaaccctttgacgtcactcttgaaatgaggaaacataaacagaaaaggctccactccagtaagctgccagagt

SEQ ID NO: 83445 - DNA, 122 bp, Homo sapiens
agaagggtccagttccctggggctgtcaaggaagatgctcttccacactgccgctcgaggcgaccctcctctggtatcctgggcctcactgagatgcttttcctatctgcacagatcatcac

SEQ ID NO: 83446 - DNA, 122 bp, Homo sapiens
aaaaatgtggtaaatcagacttcatcaaaatttaaaacttatgctctgggaaagagacaccgctaagacaatgaaacacaaggcacagatggggagaaaatgtatgaacatcacacagccta

SEQ ID NO: 83447 - DNA, 122 bp, Homo sapiens
aggagggcacagccgagccccctgctgggcgggacctgaggtgctgggtgtggtacatggcgccttgcttctctcgctctaagccaaagccactcagcaggcggtccagctcccgcttctcc

SEQ ID NO: 83448 - DNA, 122 bp, Homo sapiens
ttcggcgccgcggaccgattctgacgccttagttgctgttgcaggcagagtacgtccccacgaattgcccttgaactttttgcgagggaaccttttatgaagctttcttcatagataatcgt

SEQ ID NO: 83449 - DNA, 122 bp, Homo sapiens
gcttcatgctaaggtgtattcttggaatcaggtgggcttcacgacagaggcgctctgcaacgtctgaggacaccactgagatccgggtgacactgcatcctttccagggcagcgtcctctcc

SEQ ID NO: 83450 - DNA, 122 bp, Homo sapiens
agtcgtgtaggcccagtgcctccacgtccacaggcttgtagaagggccaggcgtaggcggcgtgcttcttggcaaacatctccttgaggatgccgctgcagcacttgagctgctccgagacc

SEQ ID NO: 83451 - DNA, 122 bp, Homo sapiens
ggggagatttcactttaaaacctggatttctcaaaaatcagaaagtctgccactgtgctccgtgtcctggcagccacagccacagccggggcccgggcagcagtggccgcttatccaactgt

SEQ ID NO: 83452 - DNA, 122 bp, Homo sapiens
caacctgaaatgtctgttataattaggttattagtttcccagagcatggtgttctcgtgtcgtgagcaatgtggtttgctaactggatggggttttcttattaataagatggctgcttcagc

SEQ ID NO: 83453 - DNA, 122 bp, Homo sapiens
cgcctttgccgcagcgtccccgtactgagggggccgggcacctgttggggcaggagctgccgtcctgtcattagcctgggggcaccaagcccattcctccccgggaccactgcggggtttgc

SEQ ID NO: 83454 - DNA, 122 bp, Homo sapiens
tctcccaccctaaatccttaaaaactcttagtctgtaagtgagtgggctctgacctaactcggccagaagcccctttcaaatttgttttctctaaaataaacctgtccttggctgtcaagcc

SEQ ID NO: 83455 - DNA, 122 bp, Homo sapiens
gacgcacgtgcaggtcagcatggtgcgggcagctgcctggtcctgggggctggctgtggacgcagccgccactggggtgtgtgagggatcttcactccctcactccaccttgaaggttctgg

SEQ ID NO: 83456 - DNA, 122 bp, Homo sapiens
ccagaagtccaaactcaacttcactggccccacatcaagacattggcagagccgcaggagcgtaggggataatctatttctcatctcttctttcttccagtggcttccggtattctttggat

SEQ ID NO: 83457 - DNA, 122 bp, Homo sapiens
ccaaagcagctgggggccgccattttgccgtacggcactggctacgcccggactccggtgcgcagccagtggagctcttttcacccggtgcttctacgactccgccaatcagaaacttcctg

SEQ ID NO: 83458 - DNA, 122 bp, Homo sapiens
gcttcgcctcaagcgccttggcgggaggcaggtgggggccctgggaatgaacctgtgccccgagttcctccttagaaagcaggtggcggccctggccttgtttctaatatcttcctccacct

SEQ ID NO: 83459 - DNA, 122 bp, Homo sapiens
gtggatggtgaactatcagatggaaaagaggagcatggcacacaggactctggctactggcggcctaaaaggccagaacctgaagatatcatttgcatactgcgttgacattcatgcagcgc

SEQ ID NO: 83460 - DNA, 122 bp, Homo sapiens
agtcccatgtgtcccctccctctcgcagccgccgcagtcgctgcgccccgagcccctctccggctcctcaacagagggctcgccgccgccatgtctaccgcccagtcactcaaatccgtgga

SEQ ID NO: 83461 - DNA, 122 bp, Homo sapiens
cggtctggcgcatgcgctctccagcgcgctctccaggagctttggctcggtgggtactgtcgcggaggcttgtcattctgacccggggattcctcacagcgtctggcaggttggtcgtgagg

SEQ ID NO: 83462 - DNA, 122 bp, Homo sapiens
atgatttgccatccccgcctccccacgctggagagcagcgccctcacagaagggccgagccgcggacgggccacacacccgcgtgtacacacagtccgagaacgcacacacgtacacacaca

SEQ ID NO: 83463 - DNA, 122 bp, Homo sapiens
tccaacgttgctaagactccactatggcggctccacttgcccggagcttttcctcttaagcgtcacccgcggatcctgatattgcttctggactgtctgccagcgcccctcctgccagatcc

SEQ ID NO: 83464 - DNA, 122 bp, Homo sapiens
gggaaaagcattagatttcatgaattactataagtaaagtgtccaatacagtgcttagcacgtaatgaagcctcaatacaatgtagttattctccatgccccacaaagctggcatgcctagc

SEQ ID NO: 83465 - DNA, 122 bp, Homo sapiens
tcttacagtgtcccctcagtccactgagttgaggactctggtgtccattctaaaatcatgcgactaattgcttacaacagaacttccaaggatatcatttgtggggcccaaacaaacaaaca

SEQ ID NO: 83466 - DNA, 122 bp, Homo sapiens
tgcactgatattcaaaactgttatttaaccctatgaactgcagcttttagctttacaaagcgtccttttttgctgtgccttctggtctgaaccctatcttgtttgatatcaaaacctcagca

SEQ ID NO: 83467 - DNA, 122 bp, Homo sapiens
cctgagatccctggttccactgagacgctcagcttcattcggcaactcgcggacaccaagcgccacaaattcaaatacgagatctagagacgctgggtctcaaacgtctcccagagtgaaag

SEQ ID NO: 83468 - DNA, 122 bp, Homo sapiens
gagggcgtgggatggcgcgggcaggggggcgcccaggcggtcccgcagctgccagaaggtcggggctgcccaccagccaggctggaccatcccaggccaagctcctgcaggcctggcctagg

SEQ ID NO: 83469 - DNA, 122 bp, Homo sapiens
cacagtttgccagcgggcaggcggcgccgcaggaagtgaccgggcaagaacgggggtcgccgcccagctcggccttctggtctctgcgccctcggcctggggctccaggccacaaggggagg

SEQ ID NO: 83470 - DNA, 122 bp, Homo sapiens
tgaacaaagcagatatggttcctcttctcctgaagttaattctgtagtggagaaggtagacggtaatcaagtgtcatttaaaccaatatgtgtttaaaattgtagaaaatgcacggaaggag

SEQ ID NO: 83471 - DNA, 122 bp, Homo sapiens
gctcctgctcaaatccacagtgaagtctatgacaataaatagtgccactatcggctggtgcgtatttacattttcccagcagggagtgatggatggcaattgtgtgctgggaacaacactgc

SEQ ID NO: 83472 - DNA, 122 bp, Homo sapiens
ctatttcctacccactggactgtgacagctcataaaaattttatttaatcattttatacccggcactgtatgaactgcccttttcctagcttttgttaagaaagcttggtagggcatatcat

SEQ ID NO: 83473 - DNA, 122 bp, Homo sapiens
gcgggcgccctgccaaattccgcgttcctctccaggagacggggagttgcgtcccaggctcgggaaagcccgcagttcgggcttgggactcgcttacaaagccccccaaggcgccagggacg

SEQ ID NO: 83474 - DNA, 122 bp, Homo sapiens
ttccctaactggaggaaattctgaaccccagacctggaaagttcaaagctgaaataaaatcgccccttgttttgcgagctgctgcctcctatgtgccctcaggcaggtccattccctcctgg

SEQ ID NO: 83475 - DNA, 122 bp, Homo sapiens
cacaagacaaggaacttccggcctggtaccttctggtttatactgagcgatgatcgtgaccgtctgacccgcattcttcagggcaatggcagcctgctcatggctggcatttcggaggtcca

SEQ ID NO: 83476 - DNA, 122 bp, Homo sapiens
acagcctccatttgatggtgaagatgaagacgagctatttcagtctatcatggagcacaacgtttcctatccaaaatccttgtccaaggaggctgtttctgtctgcaaaggagtaagtcgat

SEQ ID NO: 83477 - DNA, 122 bp, Homo sapiens
cttggcacttagggaccagaagcctctggatgtctagcaacaggggtcacgggatcactgcgtggggtctctgtaagcagtcccctgaggcagtgcaaaaccggaaacctgctctgtgcggg

SEQ ID NO: 83478 - DNA, 122 bp, Homo sapiens
ctgttctgggagaagattagcgtgatgcagtgctcttatgtattagcgccgctccccctccgtcgcctgcctcgcggggttaacgccggcgccttccagcgccgcgccggccggcgccgcgc

SEQ ID NO: 83479 - DNA, 122 bp, Homo sapiens
ttaacgcgtgtgcatttgacaggggtcttctgtaataatggggtgattctcacgcgtgggcgggattcaggcacggcagcagcattgggagaagtgctttggggctggggtgagaggagttt

SEQ ID NO: 83480 - DNA, 122 bp, Homo sapiens
gattttagaaatgcatcacaatcacaccccatgggcagactcctgtttcatcaatatagacggaactaaatttgttttgcagctacacagttactccttttctcttgcagcaataaaatctg

SEQ ID NO: 83481 - DNA, 122 bp, Homo sapiens
gcatgcatgaacgtgccaagccagcataggggagctagaagccactttccagccacctgccgttgggttttttcatatctgtacataatgccgagtgcgtaaggaaaccgtggcgtcgcgca

SEQ ID NO: 83482 - DNA, 122 bp, Homo sapiens
cgccgagcctgctcgggtgcggcggtgccacagcgccctctgttggccagaggcggaggccgcctgttcagggcctctgatggaaacggggactggagctgcctacaagacaggcaggtgct

SEQ ID NO: 83483 - DNA, 122 bp, Homo sapiens
agctgccgctgcccactgcttcctgggttgcaagagagcctctgtccccaacatctgtcccgggtttcagcaccaaatgtaagtgttaaagaggaaagaaacacgaaaagcagctcaacagt

SEQ ID NO: 83484 - DNA, 122 bp, Homo sapiens
gtccttcatctgcgtaactctagggactcgcccagaccttggaagaggttcacattcccgcgtgccgagattgattatgggccaccctcggtctcattcgttgacttccaataaagcattgg

SEQ ID NO: 83485 - DNA, 122 bp, Homo sapiens
cccgggccccagaagctcggtggcgaaactttgacgccttctatttaaagtcgcggggctcgcccgcccccggcgccgggaacccgagccgcccccgcaggggcagggctggggagggcagg

SEQ ID NO: 83486 - DNA, 122 bp, Homo sapiens
aaaaggcgggtggaggaggagtagccgagcccagagtcctgctccggcgccgccgagcaccgcccgcctcagccgaccagccccgtcggctactgggcctagcctagaggagaggagggaaa

SEQ ID NO: 83487 - DNA, 122 bp, Homo sapiens
gaattctgcaaaacaagaaaaaaatagatctgtgtgctacactgaaaactgaacaaggcacgtcgtaagtcagtcacacagaaggcgcagctcagggcgataccaactagaaaagtaacttt

SEQ ID NO: 83488 - DNA, 122 bp, Homo sapiens
ttaagatgggaaaggtttgcttgaaaacgtttctgcgagcgatggaggcgcgtcctgcgacgaggcgggaggagcgctgggacctggtggatgggagagggcgacggtataaggaagctctt

SEQ ID NO: 83489 - DNA, 122 bp, Homo sapiens
taggctggacactcacagtggcaagctcaaaaccaaggcaaggctgggcaaggtggctcacgcctgtaatctcagcactttaggaggtcgagactagcctgtccaacatggcgaaactccgt

SEQ ID NO: 83490 - DNA, 122 bp, Homo sapiens
gggaggacggagagggtgctgcagtcctggcatgccctgaaactgcaagtcgggcagaaacgacccggcggaggagcagggcgcgcagcgccctgcgcagcatccccgggctgccagaagag

SEQ ID NO: 83491 - DNA, 122 bp, Homo sapiens
agaccactgcttccccagggagtccttcacctccttcgtagtggcctgcaaaccaaaagccgtcagacacgcacaggcagccaggggcagggggaggggggaagggggaagggggcacagag

SEQ ID NO: 83492 - DNA, 122 bp, Homo sapiens
gggggagggagggataggggtgagatcccaagatgtggatgagcagggagaagctgggggcgcagggctggacccctgcacctgtcatgggctccggctgggatattataaatccctgtggc

SEQ ID NO: 83493 - DNA, 122 bp, Homo sapiens
cagtttttaaggcaaagatgattaatatcatctgaggaaaaggtatttgtgtgtagccagcgtggttcgttgatagcatctcccctgaatggtgggtgacaaaaaacatgaccaccatttga

SEQ ID NO: 83494 - DNA, 122 bp, Homo sapiens
catgatcgcagggctggctctcatggctcagctctcctcctcctacacaccttccacaagcgttcattagaaagcggcccctcctgagaggaagcactatctggagtgaccttattcttttt

SEQ ID NO: 83495 - DNA, 122 bp, Homo sapiens
cagcctgctttccccgccctcccccgaccctgcgtgtccacggtccccagcctcaccctccggcttttcatggaaagacccttctcctgtgatgactggaggagagtacacacacataacac

SEQ ID NO: 83496 - DNA, 122 bp, Homo sapiens
acattcgggttcagacgttggggacagagaggtccctggggcctgcccatggcaggagggcgactgacctgggggccagcgcagctgatcttgcagatgtcgcagtagtgaagctggagctg

SEQ ID NO: 83497 - DNA, 122 bp, Homo sapiens
caggctggaactgccagggtggtgcccacccaaggcggctgtctgccatgacaacaggagcgtgtgcgtcaggctggtcctgccgcactttctgggttttgttttccactcctcctcattgc

SEQ ID NO: 83498 - DNA, 122 bp, Homo sapiens
caaggaggaacgcgaggagcctgagaacgcgaggccctaggggcagccacccgcgcccagcgccccgcgccccgcgccccagccgtgctgcctgccctcagggacctataaagcccactttg

SEQ ID NO: 83499 - DNA, 122 bp, Homo sapiens
cccgcgtttgcacacagaggaaactgtacctacctggagtggggcgctggcgggtgactccggcctgcccatgagcagaggctgggcccagtcgggcggcgcgtggggcggcacgtcctggg

SEQ ID NO: 83500 - DNA, 122 bp, Homo sapiens
gtataaaagaaaaaaaagaaaagtaaacagcttcttccaggggatgaagtaggtttatttcggtgagattgctgctcaggacttaggagagccatcaaaggcagaagaccgctcctggggcc

SEQ ID NO: 83501 - DNA, 122 bp, Homo sapiens
tgcgcccagtccgcagggcgggccgcgcctttaccgcccagctgcctcccggagcccccgcgccctcccgacgcgcagagccatggcctcccacctgcgcccgccgtccccgctcctcgtgc

SEQ ID NO: 83502 - DNA, 122 bp, Homo sapiens
tcggtggcgcgctcctgctcagaaggttccatcgaatcctgcacgtgtgactaccggcggcgcggccccgggggccccgactggcactgggggggctgcagcgacaacattgacttcggccg

SEQ ID NO: 83503 - DNA, 122 bp, Homo sapiens
tccaggtgttttaagctagtctcaaaaactgatttattaatttggaaaaaaaatagtaaccgatttcagaagtattacagaatgggactgagataattgatagttgacagctgtatcctgat

SEQ ID NO: 83504 - DNA, 122 bp, Homo sapiens
cagcgcggccgtgcagcagcgctgctcccgggacgcctgggtggtttgcggggagacccacgtgcggctgccgttgcggggtgggtgcgcggggcgcggcgagctccggagaaacccaggtt

SEQ ID NO: 83505 - DNA, 122 bp, Homo sapiens
ttcaggccttccatctgcatctccaggtcagtcctggccagggtcagctcatccaacacccggcacaggccattgacgccagcctccacagtctgccgcagggccagctcatgctcgtaact

SEQ ID NO: 83506 - DNA, 122 bp, Homo sapiens
aaggacagggtagcagctggttttgggatggcacacctcgtacattctgctcagaaaacacgaaggcatttatagaaaactcaattatgcactgaaaaatgtggagggtttctctgcactat

SEQ ID NO: 83507 - DNA, 122 bp, Homo sapiens
ctagggctccagcaccacagagtcaatggttagaatcgggctgatttagcccagtgaagacgttacgtgctagcaaaacggtaggcgcactttatcattactagtaacaaccagcttgtatt

SEQ ID NO: 83508 - DNA, 122 bp, Homo sapiens
aacctacaggataaacatggcccattgcctatttagaatggcctgcaagaatggtttttacgtttttaaggcgcttattaacaagaaaaaaaaaaaagcaaagaatatgtcagagaacactt

SEQ ID NO: 83509 - DNA, 122 bp, Homo sapiens
catgcgctgggcctgtgcaggtgttgagccacacccacgcccttccagggggcggggtctcgaaggggagagcaggtgctatagtcaacaggagggagggcttctggccgaggtggcaagga

SEQ ID NO: 83510 - DNA, 122 bp, Homo sapiens
gggcgctctgctgactgagaggctcgggtaagctcgcggggtggcgggcgcggggatgagcgcggcagaccgcaaaaaagccgaagtcagaggacgacccagaacttggcttccccgagccg

SEQ ID NO: 83511 - DNA, 122 bp, Homo sapiens
cctccgacagcgccgcattcctgggccttgggaggaggctctgagtagggccgcctggggcgcgtcttcagggtcctcccggcactggggtgaccgccgagctagacgcgcctgagggctga

SEQ ID NO: 83512 - DNA, 122 bp, Homo sapiens
ggtgaagtgggacaggatgagaaggatggtagggtgtcaacgggatgaatgggagccagccgctgtcagcaggactggggaacagatgtcaccaccagattgccctcaggtctgctttagag

SEQ ID NO: 83513 - DNA, 122 bp, Homo sapiens
ttactggtaagaagactggtggttcctgaagagtgccagtcccatccccaagagggtgagcgcaatcagcttcgccatggtcggggatagacaaagggatcgatgggcgcagacaccgacgg

SEQ ID NO: 83514 - DNA, 122 bp, Homo sapiens
tccgtgggacgccagcccgggagggcagtctagaggtagtgggcagctcaaggcgatgggcgctgggaggaggctgtgagcggctgagggacggagatcctgacggggaggttctagggggc

SEQ ID NO: 83515 - DNA, 122 bp, Homo sapiens
ccaccagacaggcacagactcatgggtggctccacagaacgagggccccaccccacctgccgcgtcacatcctggacacctcagctgctacagcctcaagccctgacccatttctccccgcg

SEQ ID NO: 83516 - DNA, 122 bp, Homo sapiens
cctgtacacccatgaaaagcacctggcagaggtcacatgagcccaaaggtcccctccacccgcggtggctgccgtcacctctgcctcttgcttccggaacaccccctccctccggccagtgc

SEQ ID NO: 83517 - DNA, 122 bp, Homo sapiens
gcttagggggaccaaggtggccggggtagtgggggcgaccccgcggggctgggagagccgcggtgagcctagggggctgtgcgggggccgctctggacgctgcagccaagtgtcccaggaaa

SEQ ID NO: 83518 - DNA, 122 bp, Homo sapiens
atggtttccatggtgacagatccggctagtccggactcctggctctttatactgcgcaagcgcactgcgcaagcgcacacaactgatttggataccccgcgccttttggttcaaagacaaag

SEQ ID NO: 83519 - DNA, 122 bp, Homo sapiens
gaacgcccaaacacccctggcatccccgcgcagcccaccccacaccctggactgccggggcgcccttccgttttgcgctgcgggcccttcccaccgaccccccgtgcgcccccggcatcctc

SEQ ID NO: 83520 - DNA, 122 bp, Homo sapiens
gctggggctggctgcagtaggtggggactgactgtgtttctttctccatcaggcagcttccgatgatttaagggacgtgccaggagctgttggtggtgcaaggtaaggaagaggttggaaag

SEQ ID NO: 83521 - DNA, 122 bp, Homo sapiens
aggaaaagggtttggtctttccattcaaagtcattattttagatggcttcaagatagctacgataaaggtctaaaggaactggcataggagcaaggcagcaaagcagtaaattaggcttgat

SEQ ID NO: 83522 - DNA, 122 bp, Homo sapiens
aggcagaagctggctctccgcctgtcggcgcgcgtccccggtgtttacggccggtggggccgtaccacggggacgccccagccccgccccttgtgcccgcccctcgccgctcatcagccccg

SEQ ID NO: 83523 - DNA, 122 bp, Homo sapiens
ctggaggacctccccacatgaaggactcccacctggaggaccttcttacctgggggaacccgtctcacctggaagaccttcacctgggtaatcgccgtggcctcccactacggcgcagccgg

SEQ ID NO: 83524 - DNA, 122 bp, Homo sapiens
gcatggcatacctgtccagatacttccctctgccaatgctctctagcatgttacaccatgcggggtgtgagacttctgagacacattgtgtttggagttcttcaaattgtatcttgttatat

SEQ ID NO: 83525 - DNA, 122 bp, Homo sapiens
cagagactttaagtgacttatccaaggtgacacagcacggttagacccacaatgaaaacccggacttctgactccacagccagtcccacacagctcaactttacataataagccctggttat

SEQ ID NO: 83526 - DNA, 122 bp, Homo sapiens
ggagatcaaatctagaagcaagattatgggaaatgctaacatttttcaaacaaaagcgttcgaaagaaaatatgagaaaacatccttagtgtttgagaattgttttttagtttactctagca

SEQ ID NO: 83527 - DNA, 122 bp, Homo sapiens
ttattcctcccatctgaaattccaaggatacatgacaaacctgtttccattatgtgctggcgtttgcattccacaaccacgacagcctggagaatcagaaccaggcaaatcgggctgttccc

SEQ ID NO: 83528 - DNA, 122 bp, Homo sapiens
cttgtgcatgagctacggagaaacaggggtagcgacgcagatgggactggagggggtgggcgtcccacagtctcaggagctgctgagaccatcccgcaggcaacatccgacggcaccgcggt

SEQ ID NO: 83529 - DNA, 122 bp, Homo sapiens
ggcttgactgcgggccctcaggtgtccttgtccagggctcagcctccccatcctctgcagcggggacattctaagtgagtgtcttgtttaaaaaataaaggtggtaaaaactggagtgtgag

SEQ ID NO: 83530 - DNA, 122 bp, Homo sapiens
atgaacaacccaaaagggttttgccaacaaacagaaatatttaccacacaacagttatgacggccaaaatattaaaacccagttagaaattaaatgaacacatttacaaagctattctcagg

SEQ ID NO: 83531 - DNA, 122 bp, Homo sapiens
gcactgcatgcccctccatgccccctaacatgacaaagccaggctgtccccagccaactccgatggcatccctgcattgcactcagttcttttgctgaggaacattccccactgaagcagga

SEQ ID NO: 83532 - DNA, 122 bp, Homo sapiens
agactaacgtactgctgagcccccgccgtgtacgggggccattgtggggccttggggtctcggggctcattgggatccctgcggaaggaagggaaggctcagtccagacgggcagtgggagg

SEQ ID NO: 83533 - DNA, 122 bp, Homo sapiens
gacttcgcgtagcaggcagggaactggccgcggcgagcgggactggccattggagtgctccgctgcggagggaggggaccccgactcgagtaagtttgcgagagcactacgcagtcagtcgg

SEQ ID NO: 83534 - DNA, 122 bp, Homo sapiens
atttataccacattacattgaaggtgatgggagacaaccccagagcacagataacaaacacgggttctttgtggcaataatattaggttgaaaaaatatatattaacattcaagataaagga

SEQ ID NO: 83535 - DNA, 122 bp, Homo sapiens
cagccaatcctcacatgacggtgaccagaggccacttgagctcaggcacctcggctggcacgtactccaccctccagggctcggggcatgacgggcacctcggctggcacgtactccaccct

SEQ ID NO: 83536 - DNA, 122 bp, Homo sapiens
aacatttgcaaaagcttttaaaataaactgctcagggatcaggggtttgctggaaactcccggtcgcttgaagccctgtccctccactccgggcaccctggcctccccagggtgggcacccc

SEQ ID NO: 83537 - DNA, 122 bp, Homo sapiens
tccaagcagcccggtttctaggtgttcccaggaatccagctataccagtggtggccaaggcgctggccggggggccgagagctcagtgggcagtggctgaggagcccggccacaggccccat

SEQ ID NO: 83538 - DNA, 122 bp, Homo sapiens
aggatcaccgcagggtctgtggtgcctgggataaagtgctttagcaggttctccaggtgccgctcgaagaacatgcgtttccagctgccgccatggtgggccacgtggcacacgggccagcg

SEQ ID NO: 83539 - DNA, 122 bp, Homo sapiens
gtgtgcatgtgactcctctcctccccaagacagaaagtcgccacaggctccacatgaaagcgcctcgctgctccccacccgaggacggccccaagggacttggcgcctggcaggtgttcgct

SEQ ID NO: 83540 - DNA, 122 bp, Homo sapiens
ggtggtgcatgctaaggtccccttagcccaggctgattctgaaacctagaggagcaagtgcggcctcatctgacggccagtggtggggggcgtggacagagcaggaagggagggagggggca

SEQ ID NO: 83541 - DNA, 122 bp, Homo sapiens
aaacatggtatgatatggagcacttaattaccatgccagcccccagatacgactgagtggcggtgactaacaggtggtgtcatctccctcctccaggcatagtagatccccctgttatttat

SEQ ID NO: 83542 - DNA, 122 bp, Homo sapiens
atacgtttctaagaacatctatgaacatctatgaagaacatctatgaagtctatgaacgtcgacttcacatgcttactatgcggcaggcagtgacatgcatcagctcatttaatcctcacaa

SEQ ID NO: 83543 - DNA, 122 bp, Homo sapiens
ctctgccatgctgggctgggccgggccctgcaaaccctgtctctccttagccagctgctccgggaggccgtgccgagaaaactcaccccgcctatcttggcttctctgagcctctccccagg

SEQ ID NO: 83544 - DNA, 122 bp, Homo sapiens
ggcatttcagggaaagggaatggcacgtaagtacagaggctaagtacagaggaacggaggcgtgagagagaaagtcgtgttctgtgcagtgctaagtagttcaattcctgtatgaggccggt

SEQ ID NO: 83545 - DNA, 122 bp, Homo sapiens
gccagcttgggggaggagcaatgtggccaaagtgaaactactcctcttattcttggcatgcggctgttctcagttctgcggtataagggggtgtcttagcttcactctcaagttctggaata

SEQ ID NO: 83546 - DNA, 122 bp, Homo sapiens
ggggtgacattgacataagggactcagaggtggaactaaagactgttcttttctggcatccgtgcctgccttctgttccaaactaatgccctcccatcttcttttgaggaccacatttctgg

SEQ ID NO: 83547 - DNA, 122 bp, Homo sapiens
gataacttatcaagaatggttgaacagattatccaaactaattttggtatccaacgggtacgtctctggaaagaatcccttgggttggcactgagcactctgacttttctccgtgatcatga

SEQ ID NO: 83548 - DNA, 122 bp, Homo sapiens
tccatgacaagtcttgacagagcaaagcagatgctgtcaggaccgctttccatcagctctcggtggccttgaagtcccaacagccatcgcctgtaccctcaagttgccggagccacttagtc

SEQ ID NO: 83549 - DNA, 122 bp, Homo sapiens
ttttgcaaataaagttttattggagcatgactatatgtatttgcttacagtctgtggctgcgttcacactatcccagcagagttgaataattgggacagggaccatatgatgggtgaagctg

SEQ ID NO: 83550 - DNA, 122 bp, Homo sapiens
gccacttacagtaacttccggcgagggttggacgaccgcggagaagtggtccggagtgggcggcgttagggcggtgctttctggccacgtggtctggcggccgattgtgcttctgggctccg

SEQ ID NO: 83551 - DNA, 122 bp, Homo sapiens
catgcttctcaaacgggagtcagccagtcacttaacagtcatatccctcgaaataggcagcggtgtcatggaaaagtaatagagggtatcttctgggactctcaatttttctgaatggtgcc

SEQ ID NO: 83552 - DNA, 122 bp, Homo sapiens
aaccctccccagcgtggagatacagcacaggggccaacatggcgtcagcacgctgggtctcgcctgcgacccccgtgactccgcactgctgcagcccgggcgaggctgcgccccattggcca

SEQ ID NO: 83553 - DNA, 122 bp, Homo sapiens
gagacctgagcaggttcttttctcttcccagggtgaagaacctcctaaagatactgtaaccggagtaactcccgcgctggcagcgtctcaacagcccggagtgaacgagctgaccccaccag

SEQ ID NO: 83554 - DNA, 122 bp, Homo sapiens
ttaatgatgaaactttattacactatattgtcacaaccattctacattctactggacctacgagacaatgcaataagatgagaaataatggaaggtataaaacttacaaagacattccaaag

SEQ ID NO: 83555 - DNA, 122 bp, Homo sapiens
gcgcgggcccgcggcggccagcgcttccggtcggcaggaggcggggcgaggcggaagcggcgcttgcttcaggtggagtctgttagtttttgagaaagagttagggcgagtttaaggcactg

SEQ ID NO: 83556 - DNA, 122 bp, Homo sapiens
aagaagccgggatcgcgctggtgccctggggctgcccctggacgcaggcggagggcaccacggcccctgccgtgacccccgccgcggatgccctctacgccctgcttcgcgcattcggctgg

SEQ ID NO: 83557 - DNA, 122 bp, Homo sapiens
tctctcttatttctctctctctcctctctcgctcttttgctctgtgtccgtctgtgtgtgcgtgtgtgtgtctgttgggacacatgtgccctgtgctccagagggcggtatcttgtacatcg

SEQ ID NO: 83558 - DNA, 122 bp, Homo sapiens
acgcgggcaccgtaaggccgggcgcgaccgggaggccccgagagaacgcccggccccagacgctggagctgctctctgccccctgctgttgcctctaccgcaaatgggtttgagactggcag

SEQ ID NO: 83559 - DNA, 122 bp, Homo sapiens
agtgacgcacggctgagtgcacatgctccctcctgtgagatgccctaaagctacactgtgcgtggctggggtggacgcactccctcctgtcagacgtcctaaagctgggtgacgcatggccg

SEQ ID NO: 83560 - DNA, 122 bp, Homo sapiens
aaaagctgtgttgtcaaactagtgcacatttagaaatcaaaaccagttttcataaggaatcgttgaataaactgagcattttcacctttagaaagagaagattgagagggaacatgataact

SEQ ID NO: 83561 - DNA, 122 bp, Homo sapiens
ccggcctggcgcaatcagttgcagagcggatggggcgggggcgcccagccttcttgcgcgcggtgtctcctccctgggtgaacagatgtctcggaattttagatgtgctctccgcccctcct

SEQ ID NO: 83562 - DNA, 122 bp, Homo sapiens
gccaagtaacggtgccctgaatcccggcccctgccttcctctcagccctgcagaggaggccgcgcagcgtacaaggccctctggccagcccggcaccaactcattcctgttgttggtctttt

SEQ ID NO: 83563 - DNA, 122 bp, Homo sapiens
cctcccttcaaccagactatgtagagcccactgacaattcgaggggaatgaatcagatcacggcttttctccacaaagcttctagcctccctttcaccccattcctattaatataagccacc

SEQ ID NO: 83564 - DNA, 122 bp, Homo sapiens
aattgtggggttggaggcgaggtgggggtggccgtttgttttctcgtgctctccaactagcgtgctctcttcccctcccccgcggcgtgcagtggggtagagaaaaggtggcgacggcgact

SEQ ID NO: 83565 - DNA, 122 bp, Homo sapiens
caaagtcctgcagctcgtgcaccaggatatgcagcgccttctcatgctcgcccagcttcccgtgcaggatggcgctctccatgggcaggccagctccctgcagcctctctgcaagacagaac

SEQ ID NO: 83566 - DNA, 122 bp, Homo sapiens
ccaacaagttaacagcttataataggaaagcactctccagacttctgcccatctccatcacgccgcggaaacttgtctgaaaggagaatttggatgcaacagggcaacggagcgacgtttct

SEQ ID NO: 83567 - DNA, 122 bp, Homo sapiens
ttcaagttttcaccctgattctggcacaccccgaggcaaaaatagccatttgccttcatacgagcttctgtgtaggctgtgaataaggaggtttctatctcagctttctttttgctcattta

SEQ ID NO: 83568 - DNA, 122 bp, Homo sapiens
gccttttattattatttttttagacagagtctctgtcgtccagattggagtgcagcggtgcgatctcgactcactgcaacctctgcctcccggttcaagctattctcctgcctcagcctcca

SEQ ID NO: 83569 - DNA, 122 bp, Homo sapiens
gttcaagtggccggggaaatcagcgatttggagggtcgagggctggtgctttgagagagacgcggagggcagagagggattccccgtcccagctgcactcggtgcatcacctaggttactcc

SEQ ID NO: 83570 - DNA, 122 bp, Homo sapiens
ctttccatcggcatcccagctgtggctggggacgttttgggaagtgtgtttggctcactccgagagaacgaggtctcaagaggaagtgtgtctggcttgcaaagatgtccctgggcctggac

SEQ ID NO: 83571 - DNA, 122 bp, Homo sapiens
gtctcagctgaacttgagtgtggccacagcactgccctcactgaggctttctgcgaaatccggccgcctgccacctgcttctgttaactttgtacacgttgtgtgggacctgattcgctgtg

SEQ ID NO: 83572 - DNA, 122 bp, Homo sapiens
gtctcactatcctcactccatccgcggagccaatggctgggaccgccaggagctcgttcgcgcgagtcacacgatgtcggcaactgcacagaccaatcaccgcgccgagaaggcggggcggg

SEQ ID NO: 83573 - DNA, 122 bp, Homo sapiens
gaaaatgttcagtcctagttgataaaaggcagctgctgtgagccctctaagtgtcccccacgactccaccaatagcctagttctcctctaagatccccaacaacccagcaacacaaccatgg

SEQ ID NO: 83574 - DNA, 122 bp, Homo sapiens
tggaaaaagtcgcaaataaccctttttctggtttaagcagaagagagtcgttaaaagcctcgcataatatctttaaccacacagggctcagtaaaattagggtacctccccgcttcgtacac

SEQ ID NO: 83575 - DNA, 122 bp, Homo sapiens
gggcactggggtacagcagccaacatcacacataaggtctctgctctcatggagctcacacgccagtgggagaagacagataataaacaaacaaaccataaaatacagtgatgaatgctgca

SEQ ID NO: 83576 - DNA, 122 bp, Homo sapiens
gcgttctcagtctacggcagaaaacgccagtcggcgccggaccgtgactccagggtttcgcggaaataaattttaatccagttttgaagccaccacttggagttccagggcagttgcacccc

SEQ ID NO: 83577 - DNA, 122 bp, Homo sapiens
gggcggaagttcataggggcgaggagggtccacagggacaagctggaagccttccaggcccgctatgccccgcctcctgtcctttcccactccgtcttcaatcttttaccctttgcatggag

SEQ ID NO: 83578 - DNA, 122 bp, Homo sapiens
aaaggagctatactcggtaaatggggaagaaaacgcttcctgggctccggcacctccttccggaggtcctggcatcccccgcattccgccccggggctccctgcaccgccgacccggaccca

SEQ ID NO: 83579 - DNA, 122 bp, Homo sapiens
cccgtgtgtgagggggacgtgctcaccctgttggagtcagagcaagaggcctggaagttgcgctgaacttggctgctcactgggtcttggatgtggggtttgaccacttggctggtgggaat

SEQ ID NO: 83580 - DNA, 122 bp, Homo sapiens
tctggaagatcatcgcagaaccagtaacatgacccatcgcctccacaaggcgcggcgtctcgactgttcttagagtgtatttctagtaaaatcagaagctcaccaaagcaacatgcttgaga

SEQ ID NO: 83581 - DNA, 122 bp, Homo sapiens
gggccctggcggcgcgtcccgcgggcgcccggcgggaccggtgggcgcaccctccctgcgcggagctcgccggctctcgaccgggtccgctcagccttcgactaatttccggtggtcggagc

SEQ ID NO: 83582 - DNA, 122 bp, Homo sapiens
ctgtgaatatctctttcaggctgaggaccgggatgacatgctggggggatcagagcgatccgggagaacagcagggccgagggcgaggtgagggcccggccagcccggcggccacagagggc

SEQ ID NO: 83583 - DNA, 122 bp, Homo sapiens
gaggcgaattctgggctctgcgacctctcagcctctgcctccaggtgccctggggtgcggcgggggcactgccgcatcgagctcccaggctgacgggacacagactcacccgtgaccgcagt

SEQ ID NO: 83584 - DNA, 122 bp, Homo sapiens
tctgacgtatgaatgtgccacagtttgtttatgggaggaaacttgagattcctttcattgcggtaggattcacatctatccagcatcaatagagtatctgccagggttttgagagttaagct

SEQ ID NO: 83585 - DNA, 122 bp, Homo sapiens
ccagcgagacggagagctcaggacgcaaccctatgagttggaagccgcaggaggcggaaccgggttgcgggatacgcgttgacgtcacatcctctgggcggggccgcaaggaacccgcgcaa

SEQ ID NO: 83586 - DNA, 122 bp, Homo sapiens
gatcgattgtttttatggcacaaataagtagggtcaaaactaaccatccttgttgccctacggggccatttgagatgaagtcagaccagtttcacagcatgctgggagatgtagtttccgga

SEQ ID NO: 83587 - DNA, 122 bp, Homo sapiens
attccagtgaccctatgaagtctttttaccaatggccaattctcccggaactattgccaccgggcgaagtcacctccctttccccctcggcgccggtccacaattgaaacggcaatcgagag

SEQ ID NO: 83588 - DNA, 122 bp, Homo sapiens
ccaacataatgtggtcacaggtgtgttgggtgagccttgattaatgagattcacggctgtcgagtcaggtcctccggctcatcagcctttggcagtttagcaagcaggctggggccctcagc

SEQ ID NO: 83589 - DNA, 122 bp, Homo sapiens
gtctcaggctgaaggcctgggaactggaggatggatttgtgaaggtccattcccctgagacggactgtgtgagcttgggcaagtcacttcacttccctgagcctcaggtacaaaaatgggga

SEQ ID NO: 83590 - DNA, 122 bp, Homo sapiens
cgcatgcgtggtcttgagggcggtgcttccggtcaaagcaccgcttgggggcggggcctgcgacacgcggtgggcgggtcctgagtcgcgaccctggtccggacctgacctgaattgcgacc

SEQ ID NO: 83591 - DNA, 122 bp, Homo sapiens
cgcgtaccagtccagtgaacagctccttgaagcgcacacataccgacagcattcagtcaacgaggtcgacgcgctggaactactttggtggagtattaaagaaggggtccgaaggccccaga

SEQ ID NO: 83592 - DNA, 122 bp, Homo sapiens
cttgttcctgccgacacagggaagtcttcttagcagctaaagagggcagcctctgcgtaccgcctgggaacatggcaaaaccattttaggcttaaaaaaaaggtggagaacaagttgtacat

SEQ ID NO: 83593 - DNA, 122 bp, Homo sapiens
gcaagggttgggaaagctgctgggctgggtaaggggcagtgcgcggacagtgaggggactcggcctggggagctggtctggaccagctgctggtactcccacagactagactcgggaactgg

SEQ ID NO: 83594 - DNA, 122 bp, Homo sapiens
gaggaagggttggcaaacatcatcacacagccctgttcccccgccctgttactcactgaccgcacaggcctcgttgcttccttagtagggtgtttattttaatttcagcttttctccttggc

SEQ ID NO: 83595 - DNA, 122 bp, Homo sapiens
cccgggcttccccctttctttccagcatccacgggttcctctttgtggctagaacattcacgtcctaagtggggctgccgttggctgggttaaaccagtaaccagtaacaggagaaatacgt

SEQ ID NO: 83596 - DNA, 122 bp, Homo sapiens
cacccctggtccctcctccccacctcagtccccagctcctgagcacatggagtcagaactcgaatttgagcttatcggcccaagcaaatcaacaagtgggaatcctagagggcttcgttctg

SEQ ID NO: 83597 - DNA, 122 bp, Homo sapiens
gcacaccccctcggtacccgacgctgccccgcggccggaacctcgtacctgcgaggcccgcgagctacaggcgcgcgcgacgcctcctcatctcagtggctcctgctctccctccgcctcct

SEQ ID NO: 83598 - DNA, 122 bp, Homo sapiens
tcttctctggctccatggttcagatcagaacctggcgttgggtagggtgcacgctccaggcggaggatgacgggtgtctgtacaagcagccttggggaactgatttgataggaactcacccc

SEQ ID NO: 83599 - DNA, 122 bp, Homo sapiens
tggagtctgggcccacccctgccccgctgagcctggaaatagtggcgggccgggccgctgcgctgtggcttctgggatctctaggtccgcggctccggacacctccttcccgagatactcag

SEQ ID NO: 83600 - DNA, 122 bp, Homo sapiens
attttttgttcttcaaaagttgctttctggctctcttgccactgaaggtcctttgccctccgccacctccctcagtgcagcccgtttctgctcttgtctttctttccaaagccctttccttt

SEQ ID NO: 83601 - DNA, 122 bp, Homo sapiens
tggcctgcggcagcgtcgttcccccctgtcctgcggcccagggtcctgcggaaagtcaggcggaatccccggtgagtcagaagcagaatgaaagcagaatggaggacccagcagggagggaa

SEQ ID NO: 83602 - DNA, 122 bp, Homo sapiens
agtgtgaatgtacttccagctcctagaactctgcatgatatctatcaccatattccctcgcgtcaacagggagaatgaggttcgggaggttatgtaacttatccaggatgactcagctaatg

SEQ ID NO: 83603 - DNA, 122 bp, Homo sapiens
ccccgtcgcgcgtagatggcagcggaggcggcggcgcgggccggggtgaccaggtacgagcgggcggggctggcgggccgagccgggagtagtgcgggacagtcgctgcagggaggacgcgg

SEQ ID NO: 83604 - DNA, 122 bp, Homo sapiens
tgacagaaaaatgtgttgtggcatcttattgtgttttaagtcgtttaatgtgttttaacccgttgtaatgtgctgtgagagaaaaagccgcagctaacggtgctatggaattactagagagc

SEQ ID NO: 83605 - DNA, 122 bp, Homo sapiens
ccacaggccctccgaggatcacgtggtggggaggcgctggcaccgagcggctgacaggcgcgagagcccagttcaaggcggcggcatcaggctgcagctgcctcactcccctccacttcctg

SEQ ID NO: 83606 - DNA, 122 bp, Homo sapiens
tttcagttcaatgtccgtgcccctcttttgctctcttcccaaggtacagaggcggaacggcgcggtgccctcgggtcccaagagagaagggcgccaagctcagagccagttctgtggaaggg

SEQ ID NO: 83607 - DNA, 122 bp, Homo sapiens
ctggtatttactgagctttctttgggaattccgaggcatttcaaatagcttagtttgtaccgagataccgccactgcactccagcccctgggcgacagagccagaccaaggaagaaagaaag

SEQ ID NO: 83608 - DNA, 122 bp, Homo sapiens
acacagcagggcctctgatgaagcagctgtgcatcttcccatgtgtgtcagtgtggatcccgggtggcagaactggtggggatcttggggactgggagttaccaatgactcatttgtgagca

SEQ ID NO: 83609 - DNA, 122 bp, Homo sapiens
ccaggccaggcaatggggctgacatcaccctcactgcaggtggtcccagggcgagggaggcgtggggtccgtgtctggctcggggaagggctacgtgctgggtgcaggtctgaaacccagcc

SEQ ID NO: 83610 - DNA, 122 bp, Homo sapiens
tttaaattagaaaaatcaatagataattattatagattggtcacaaccaaaaacttggaccgggaaacactctctttgtataacatcacactgaaagccacagatggtggaactcctccctt

SEQ ID NO: 83611 - DNA, 122 bp, Homo sapiens
gggcccgaggtcaccagggcagagagacccagctgggcctggacggctgcccaggcctgtcggtgcctttggtagcatcccgtggtcacctcccgcccattccggttccctcctttccagct

SEQ ID NO: 83612 - DNA, 122 bp, Homo sapiens
catttgctgtttcctacctgctccacccctaccagctcaggcgtcagcaccgccaggccccgtaaaggttaggaaggccgtccaaccaccatcttgatcgagggcggaagtcttggctaaag

SEQ ID NO: 83613 - DNA, 122 bp, Homo sapiens
gctcaggccgccgcagccccggcggacccactgttggacctgaggagccagccctcctcccgcacccaaacttggagcacttgacctttggctgttggagggggcaggctcgcgggtggctg

SEQ ID NO: 83614 - DNA, 122 bp, Homo sapiens
ccccccacccgatctctcactctgcccctcccagcccccacccgtgagaaccggccggcgcgaaacgtcacgcagcctggtgacgtcacagtactcctggccaggtggcctcaacctgaaac

SEQ ID NO: 83615 - DNA, 122 bp, Homo sapiens
ggctgtccaggtggctgcctgtggaacaaaccccaggtgggtcagtgagggcgggggagccgggtgagacaggattgtccaccttggggcctggccagcacctcctctctggaatctgggtg

SEQ ID NO: 83616 - DNA, 122 bp, Homo sapiens
tggggccaaggaagagcggatcccacggtgtgagggcagtgaacttggcgaaactcaggacgtctgggctagccctgccagcctccgccctgaacttatgtgcagttaccacctgcacatgg

SEQ ID NO: 83617 - DNA, 122 bp, Homo sapiens
agctgagggagggcgggcgccacgggtccctgactcagacctgactgtggggctgggacacgactgcccctagtgggagcaaggcccaacggttggggggtgcccagcgcccagccagcagc

SEQ ID NO: 83618 - DNA, 122 bp, Homo sapiens
agctcgatgcagggctgtaggtccagcccaaagtcgatgaagttccactcgatgccctcgcgctggtactcctcctgctccaggatgaacatggtgtggttgaagagctgctgcagcttctc

SEQ ID NO: 83619 - DNA, 122 bp, Homo sapiens
gagcagagcccccagtgcccctggcaccctcacttccagccccattcgaaagggacggagcgcctgtaattcagactaagttggacctaaatgtttcaaaacagagagaagggaaatcgggc

SEQ ID NO: 83620 - DNA, 122 bp, Homo sapiens
ccacacgtccaaaaccaatcaggtcaactcgggcggtgtgctgctgaggttgcaggtgggcgaggaggtgtggctggctgtcaatgactactacgacatggtgggcatccagggctctgaca

SEQ ID NO: 83621 - DNA, 122 bp, Homo sapiens
cattaaccacagcatttgttagttactgccaagaagcctgtatctgtagggtaaaatcctcgctgaagtgggttgccaaaacaatcaatatcacgttgcctaagagctggggagggagtgaa

SEQ ID NO: 83622 - DNA, 122 bp, Homo sapiens
ataccagggggcgcatggctcactcgtggtcctacttctagtgacgcaaggatcccattgcgtttcgttgtgaagtttgccagccccctgtcccttaatggcattaacatccaatgattatt

SEQ ID NO: 83623 - DNA, 122 bp, Homo sapiens
tgaatgatctctaggtgtgtatgtgcccatgtccctgaggatcaccctttgggttgtgtgcgtgcctctggatcctgtgtgtgagctcctgtaagcaccttgtaggtgtttgtgtgcattct

SEQ ID NO: 83624 - DNA, 122 bp, Homo sapiens
ctcagatgatccacccgcctcagcctcccaaagtgccaggattacaggcatgagccaccgcgcccagcttagttatagttataatcaaacagtattgagcatggtctgccaggtaactgttc

SEQ ID NO: 83625 - DNA, 122 bp, Homo sapiens
ggacgtgggtcgaggctgtagcaggactccaggtgaggcctgaggaccactctgccctcccgcggcccgggctcgcgccgggggccatttaatcccgacagcttgcggcctgacgtcgctgc

SEQ ID NO: 83626 - DNA, 122 bp, Homo sapiens
tctccgcccccgctaccggcgcctcctctgcggccactgagccggagccggcctgagcagcgctctcggttgcagtacccactggaaggacttaggcgctcgcgtggacaccgcaagcccct

SEQ ID NO: 83627 - DNA, 122 bp, Homo sapiens
tctcgtctcctatttccacaattcggagccccaggtcttgcagggctttgcggactccatcgaccttaggataggagaagagggcacggagctgtgacacccccatcctcaattcttcccca

SEQ ID NO: 83628 - DNA, 122 bp, Homo sapiens
ctgcaacctccctgcctgattctcctgcctcagcctgccgagtgcctgggattgcaggtgcgcaccgccatgcctgactagtttttgtattttttggtggagacggggtctcgccgtgttgg

SEQ ID NO: 83629 - DNA, 122 bp, Homo sapiens
attatagctcattgcaacccggacgtcctgggttcaagctatcctcacctctcagcctctcgactggctaggaccacagcctcgagccatcatgtctggctaatttttacgtttttttgtag

SEQ ID NO: 83630 - DNA, 122 bp, Homo sapiens
gtcagaaggaggctcttacacatcacaggccgcctgcccagttggaggggagtctgggggcgcaggtgatccccttgccccaagtgcaggcaggaagaggaagtagaatcactttctgagca

SEQ ID NO: 83631 - DNA, 122 bp, Homo sapiens
atcttggtccagagaagaccctccctaacctccccactaccatcaccaggacatatcctgcgcagagtccacactgcccctcaccccagtagcagtgcagaggatactccccaggtgcttgc

SEQ ID NO: 83632 - DNA, 122 bp, Homo sapiens
caggacagatttgggcagtgaatgaaccagtgctttaataatgaagaacaaggcagctgtcggcattgcctggagacctgtgactcccacttactgggcagttaaacggggcagagcaggga

SEQ ID NO: 83633 - DNA, 122 bp, Homo sapiens
cacaagttaagggagagtgaggggagagagggtaaggtgaatgaagcttgtcttcttatgcggataaaatttctcaggtaagaaaagttagctctgagcagccctccgcctgatactaatac

SEQ ID NO: 83634 - DNA, 122 bp, Homo sapiens
gcagagccactacccgccggatggacttgggcgggttctcggttaggtagacgagccggtcgcttagcaccacatacttgaggatgtggttctcagagttggacaccacgatgcatggctcg

SEQ ID NO: 83635 - DNA, 122 bp, Homo sapiens
acacaatcaggagtaaataatatctgtatctagatccagaaaagcccatttgatgagaggcgaaaataaggttaaaatattatttaattttaaaattaaaaaaaaaaacaaatatgctccat

SEQ ID NO: 83636 - DNA, 122 bp, Homo sapiens
attactgtaactagggatttctgtgatccctggggtggtggtccaggcctttgatggacccgtggtgacccatgtgactctgacccacatggcctccacctccccatcccctagtttgggtc

SEQ ID NO: 83637 - DNA, 122 bp, Homo sapiens
gcttcgaatgccgagccacagggcctgggtgcacttcctggctccaacatttactggccacgtgaccttgggcgagtcacttaacctgtgtgtgcctcggtgttttcatctgaaagtgggga

SEQ ID NO: 83638 - DNA, 122 bp, Homo sapiens
aagtgggtggaagggggtggcaccgggttaccctgcctgctttggtgtttgagactggggcgctgcgcccccgttcccgcgccccagcacctgccaggacgtgaggtgtctttaagggcggt

SEQ ID NO: 83639 - DNA, 122 bp, Homo sapiens
tgacctcgtgatctgcctgccttggcctcccaaagtgctgggattacaggcatgagccaccgtgtctggcctagaaactattttaatagaagcaagtagtgcccgaatggttggcatttgtt

SEQ ID NO: 83640 - DNA, 122 bp, Homo sapiens
ttagctctcccttgtactgccacagatccatctctaaaggacaggcaggtctctacttaacgtgttccattctcactacctgctccttcccacaccaatgaatgcacagtcttaaactgcct

SEQ ID NO: 83641 - DNA, 122 bp, Homo sapiens
tctgcttctccttggcagtgcatcacctcctgctgttgttccccagccccatgagcctgccgtgatctactcagcgtccctgctgctgggtcccttttttggagttgccagatgcttccaag

SEQ ID NO: 83642 - DNA, 122 bp, Homo sapiens
ttccatgtgagccccatgtcacgcagggggccatgcacacacgtctatcccgcgtggacacggcacacgtttacccacgggcctgtgggcacaatcctcaaacacaggtgcacacgtgcaca

SEQ ID NO: 83643 - DNA, 122 bp, Homo sapiens
ggaccccgtgcggcagtgcgcggagtgcgccctcgtgtccctcaaggaggcggagttctacgacaagcagctcaaagtgctcctgagcggtaaggacgggtgtcctgcacagtcccgcgcgc

SEQ ID NO: 83644 - DNA, 122 bp, Homo sapiens
ggtttccttttaatgctaggccagattgggatagtcttgtgttgtaattattttcactagcgtttagaaaagtagttttcattggacgcatatcagaattactgtggaacattttaaaaaca

SEQ ID NO: 83645 - DNA, 122 bp, Homo sapiens
gtttaccttctggaatgttgttgaagcccctgtcctctatgctgggacactttcatgcaacgtttgcttagccagactcaggaaaacgcctttttttttttttctcatttccctgcactcca

SEQ ID NO: 83646 - DNA, 122 bp, Homo sapiens
tcctcttgtccctggccctgtctgtaaatttaactagctcattatggagcccttctcagacgctccctcccccctctcccctccccaccgccacccacccacaaagaccatgcgtgctattt

SEQ ID NO: 83647 - DNA, 122 bp, Homo sapiens
gaggtgaggccggaatggaaccagctttggcagaaagcaaccctaggtcctaggctgccccggccacgtgagaaaatacctaccaaagggcactgggacgagactgcctgcaaagcccccca

SEQ ID NO: 83648 - DNA, 122 bp, Homo sapiens
ggtttcctcaagctcctcttcagcctgcagggctagggataaccagatcctgaactgctgcggacaagagacgcagctccagcccaaatccactgctattccttggggccttgctttggaag

SEQ ID NO: 83649 - DNA, 122 bp, Homo sapiens
acaccagtctgatgtaccagtgacggggtggtgccctgcctgacttacctaagcaggaggcgcagcagaaagacatggtggacactgcccagagatactctctgataagtgttccacagcta

SEQ ID NO: 83650 - DNA, 122 bp, Homo sapiens
gagtagtcatgacgtcatagtgcagtgcattccttgtgtctgtggtgatgctgggggaaacgaacctagatcgttgccaggcagctttaacctgggtgtgggtgaggatgacactgtgatgc

SEQ ID NO: 83651 - DNA, 122 bp, Homo sapiens
ctgagcactgacactgaagagcctgaaacgaggggactccgcctcagcatgctttatagccgaggttaaggcacacgcagttcctggactacatgttctgattggatgagagaaaaaccttt

SEQ ID NO: 83652 - DNA, 122 bp, Homo sapiens
gcacaggaggtggccctgctggcagagcgtgaacgcctgatgcaagatgggcatcggcagcggggcctggaggaggagctgcggaggcttcagagcgagcacgacaggtgccgcccctgcca

SEQ ID NO: 83653 - DNA, 122 bp, Homo sapiens
tgggatactcaatcatcactagtataggcagttgttcagataggtggtactggacaatgacgtttttgtttagccagaaggaagcaaggaaaagagtcccttaacacctgccatctagtggt

SEQ ID NO: 83654 - DNA, 122 bp, Homo sapiens
gcctctgggcgggggacgttatgccctgcctgggggaagcccctgctgccccagctgcttcgagaaccgctactcggatgcaggctcgagctgggccggggcactggaagggcaggcattcc

SEQ ID NO: 83655 - DNA, 122 bp, Homo sapiens
agccctgtaacttcccagttgaccttgctccagacatcgtactcactgagttatttcctacggtatcagctgacctctcccatctaccactttcatacccacttaccagatagctagagatt

SEQ ID NO: 83656 - DNA, 122 bp, Homo sapiens
tgagcggcttgaaaacaggaagtggggagggggtgggccagccggccctggaggctgattcgtagaaacttgggccaagcagcgttctgggtatttgactttggtggaggttatggggccag

SEQ ID NO: 83657 - DNA, 122 bp, Homo sapiens
ctcaagcagatcctctcacagtgcctcagacgggggctcacgtggctcctctcaggcccccgcgagttcctccgagttcccgcacgcttccccacagtgtcctccacatttccacagatccc

SEQ ID NO: 83658 - DNA, 122 bp, Homo sapiens
ctctgggtttaacttcagtccctcacatggcaacactaggaatgatcaagacttttgttgcgggtagtggtgatgtgggtttgagaggaggatgcatctggtcgtgggattaattttggttt

SEQ ID NO: 83659 - DNA, 122 bp, Homo sapiens
atcaccaccttgagattcttaatgatttttgaacaacagactcacattttcagttcccaccgggtcccacaagttatgtagctggtcctgcccctgaaacagagatgtggtttgttctttgg

SEQ ID NO: 83660 - DNA, 122 bp, Homo sapiens
aaacgcttcctgggctttctaactccacagaaacgctaaccaggtattgggcgctcgcaccgcttccaggtaacccgcggagctgcggattccaggctcgcgctgtgacgtcaccgggctcg

SEQ ID NO: 83661 - DNA, 122 bp, Homo sapiens
taagaataaatcccttcaagttcttatgcatttgagtgtcataccacctacagcaacatacgctcaagtacctttaacgatacagtcatatagcatgagtttaattttcctgagaactaaat

SEQ ID NO: 83662 - DNA, 122 bp, Homo sapiens
ggcgcttgccttcgtgcattcatctctcgcgtgtacgtgtggcagtccacggctggaatccgggtgtgacttaggagagcagggcataaaagagatctggcttccctggctctactgggatc

SEQ ID NO: 83663 - DNA, 122 bp, Homo sapiens
gttctcaattgatcatagtgagaggtgacagcgtgctggcaagccctcgcagccctcgctcgctctcggtgccttctaggcctcagcgcccattctggccgtgcttgaggagcccttcagcc

SEQ ID NO: 83664 - DNA, 122 bp, Homo sapiens
gctttattatcttctttctctcttactttcactttaaaaaaacattccattcaacgggggcgagtgagtcaccataatcatttatttagacgcatttcaggctcgctctatgctatccggcc

SEQ ID NO: 83665 - DNA, 122 bp, Homo sapiens
agctgcagggcccacggctccggccggcccaggaggagggagggcggagcggctggtcagcgtgattctcgtaacagccacaccgagttgtgggtgcagcccctgaggggtcaggaggggtc

SEQ ID NO: 83666 - DNA, 122 bp, Homo sapiens
agctcatgcagactgggcatgaaacagttaagctgtcaaatcctgaacttctgcagccaccgggaatatttgatgttactgcacaggaagcataacctagagtgaataattcccgcacagca

SEQ ID NO: 83667 - DNA, 122 bp, Homo sapiens
ctctcttccttccattcttccttccttcttgcaatcttggagctgaaaggagccttagaacgagcctttaatggccagtggccgacgcgctactgagccctctcccttctccttccatcaga

SEQ ID NO: 83668 - DNA, 122 bp, Homo sapiens
tctttcggtgaatttcaaatagtattactctccggttaggaaaaacagctgacctgtttccgcccgggatcgaaccggggacctttcgcgtgtgaggcgaatgtgataaccgctacactacg

SEQ ID NO: 83669 - DNA, 122 bp, Homo sapiens
tttttaattaaaaaaagaaaaggcatcaattgggatggggactgccacagcaggtgtgaccggtgtgccgccgtgtgacacactgcactgagaccaaggcaggatgcagatgtgatgggact

SEQ ID NO: 83670 - DNA, 122 bp, Homo sapiens
tggccgccctgcgatcggctaacatcctgccgatggctgcccggtgagtgagcagggcgccggccctcccgcctaatggcctgcgattcagcgccggtcgcctctgtgattgacgggcctgg

SEQ ID NO: 83671 - DNA, 122 bp, Homo sapiens
tttctcttcctagagccagatttcacactgagcagctgcagtcggagaaatcagagaaagcgtcacccagccccagattccgaggggcctgccagggactctctcctcctgctccttggaaa

SEQ ID NO: 83672 - DNA, 122 bp, Homo sapiens
ccagactgtcctgcaaaccacctcacccgtctctttggcgcaggagactcaggctgtaaccggagaaaacacttcaccctggaaccctaactcaggtcctggcaaaagatgcgagaggaaga

SEQ ID NO: 83673 - DNA, 122 bp, Homo sapiens
gggcgtcggcctcagcgccgtcctagcctaggacaccgtctcccagttcccgggcccggccgtgtagcgaagcccagagcctgcagggtcccatggacccagcctctcgctcggcggccccg

SEQ ID NO: 83674 - DNA, 122 bp, Homo sapiens
ggttaccaccgcctttggtatctataccttggcaataatggctttgctaaaacctacctacgatggtatctcacccggcaagcaggagctggacaagagcctacataaattctacgcgtcta

SEQ ID NO: 83675 - DNA, 122 bp, Homo sapiens
ttccctgccaggggcagggtctccatcgtcgattcagaccctgagctaagggagacatggcgtatgatagggaattggcagggttacagcttcggaccacccggggtagggcagggaaacta

SEQ ID NO: 83676 - DNA, 122 bp, Homo sapiens
ggaccaagccaaggactcaagcaaacgcagggaatgagacagcgtttccaggccagaatgcgggagcccttcagcagaatcaggggttaggaagctcggtgacttcaggcaggaaggcgatg

SEQ ID NO: 83677 - DNA, 122 bp, Homo sapiens
caccgcccaggaggcagtgagaaaagagggggtgtgtgtagcccacggacgcagacggcacgtggctgagcctgggctacttgaataattgccagtattcaaattttggcttataaaatcat

SEQ ID NO: 83678 - DNA, 122 bp, Homo sapiens
ctttatttctctctcattattccctcaggggtctccgagcctatctcctctgtctgtccacgcctctctggccctgtttcctcagttgtgcagcaaaggggttgggtggtgaggtctctggg

SEQ ID NO: 83679 - DNA, 122 bp, Homo sapiens
gggcgtcctgggctcccgaggttcggcttcacccagcagtaaaacgcatgcgcaaagcttcggtcaatgcgggctgtccatttctcaccgccgactccctacatcaactacgcatgcgttgc

SEQ ID NO: 83680 - DNA, 122 bp, Homo sapiens
aacagattcagtgtctctcccagcttcctggctggctcacctgtcccgatgtagagggttcgatagcacatgttcacagctcctcccaaccctaagagggggtagaacacagctcgggcctg

SEQ ID NO: 83681 - DNA, 122 bp, Homo sapiens
tcctaccccgagagctctctctgttatcatggttcagtcccttggaagaccgctttgcttcgctcctggtatgctcttcctgttttcttttatgagcatggagatggtaactggagactgga

SEQ ID NO: 83682 - DNA, 122 bp, Homo sapiens
tcctacgaggtgtagcctgggaaagttgggggtgactggtggaaaggaggagtgaagctccgccctttctgctgcgaggctgcgcccgaggctatttaaacccaccctggcaggcctgtact

SEQ ID NO: 83683 - DNA, 122 bp, Homo sapiens
tcctggtggtctccgtgtcccttcctttccccgacctcagccggggccacctgagtcccccgggttaccctgcatacctccaactctcaggaagaagcgagggtaggagggaccccacccct

SEQ ID NO: 83684 - DNA, 122 bp, Homo sapiens
gcctggcccataaattcctcctgcactgcctctcttctttccccacccactggctaaatgcggagaattcagagggcctaaggaaaaaaaccacaacatggaagaattttaggctgcagctt

SEQ ID NO: 83685 - DNA, 122 bp, Homo sapiens
ctggggaggtccagggggcggctcctcaccgaaggccttgcgaggctccgtgagcttcagcgtgaaggtacggcctcggggcagctccttgagcagccgggccacctcgtagtgccggcagc

SEQ ID NO: 83686 - DNA, 122 bp, Homo sapiens
ggagagcccggactgagggcagccagaggccggtgtccgcagaacggcccacgaggccttcggctcagtagcctggagtttgaaatgcaccttgagctttaatggccttttccttgtgagaa

SEQ ID NO: 83687 - DNA, 122 bp, Homo sapiens
actgagagtggagctcaagtccaaggtttccacacagtctcaagcataaagatctgtacccgttagaaaaacgttcaattctgctaaaagtggaactacaaaggacagcataccctatagca

SEQ ID NO: 83688 - DNA, 122 bp, Homo sapiens
ataaattctttgttacccaacagaaaccaaaaaaaaaaaaacctgcttttttttccaagacggtagaaggggcaaggaacacaaattgtgtttgttagcacatttgtaataactgcaagttg

SEQ ID NO: 83689 - DNA, 122 bp, Homo sapiens
tgggattcagagctggggtgtagaatgcaaccttgcactgtgtggatttaggaaagacaccgcccctctctgattgtcagttcttcatttacaaagtgggaagagaggtccatctctgaccc

SEQ ID NO: 83690 - DNA, 122 bp, Homo sapiens
tgtgtgaccgtccgtgtgagcatccgtgtgagcgtgaccgtccgtgagtgtgtgaccgtccgtgtgagagtgtgaccatccatgtgagcatctgtgtgaccgtccgtgtgagcgtccgtgtg

SEQ ID NO: 83691 - DNA, 122 bp, Homo sapiens
gaagccctcgtcgttctctatgcctgcaatctcgctctcctgctgggccaggaaggcggccgccgggtcctcctccgccgcctccggggcaccgctctccgacgacgagaagaagccaaagt

SEQ ID NO: 83692 - DNA, 122 bp, Homo sapiens
agaagctggagcacagagagattaagtcatttgtccaaagtcacacagctgctaagtggccgagctgagattcaaatccagacaggctggctccagagtctctgctctgaaccatagagctc

SEQ ID NO: 83693 - DNA, 122 bp, Homo sapiens
gtggaaaccaacctgccctaatcctattgcacccattttcccatcagctcactaaagagtcgtgtggaaagttggtagctttatcctcagaggccctcctggatcctctctggacctttccc

SEQ ID NO: 83694 - DNA, 122 bp, Homo sapiens
ggtgagcgctctgaggagttggcttcgtctgcgctgtagactctacggtgtagagtgtggcgctcttgagcgagtgtgctcgagaccagctgtcgtttcctttgcttctttcatctgtaaaa

SEQ ID NO: 83695 - DNA, 122 bp, Homo sapiens
ttcttccccctctcctaggctcaaactagtcaaatcttgttcactcgaccaatggcaaatcggaagtgggcgggacttcacaagtccggaccaaagaaacgcgagcttagccctgggtagcg

SEQ ID NO: 83696 - DNA, 122 bp, Homo sapiens
ttggctgccggtgaaggattcacatgcttattttgtttttttccgatgggagcctccaaacggctctgcttctagtcagccatctcggccagaataatcatccttgggcgtttagtttctga

SEQ ID NO: 83697 - DNA, 122 bp, Homo sapiens
ctctgaaaaccatcgagccgtagtgacaaatgcaccatttaccatgctccgcgccagtcacgcgatgggcttctccgccgggcctcgcttaggcatctttggtcccaagttccagaaacaag

SEQ ID NO: 83698 - DNA, 122 bp, Homo sapiens
taagctctcccggtaagaaagtggtttggatgggtcagagcccccactccttctcttctgcggtcactctgcagtccagcctggaaagaaagtaatctgatatagctcggagaataacagct

SEQ ID NO: 83699 - DNA, 122 bp, Homo sapiens
ggtggacacagtgttcctggtgctttctccacaaaagaaacctcaccttcctaaagctatcgatccacccactggcgctgtggcaatgaaattctcacgggggaaagtctcagggccagcat

SEQ ID NO: 83700 - DNA, 122 bp, Homo sapiens
tctcacgaggctttccaccacttgattccatagaaggtttttccctgtaagggttctacgcgttccgtgtggaattaggaaaagagttcttctgacacctgggtttgattttgttttgcagg

SEQ ID NO: 83701 - DNA, 122 bp, Homo sapiens
accagcagcagcggctcctggccccgcccgaggcccccggatccgccccaccacctgctgcgtgggtcatccctggccccacgacggggcccaaagctgcatcccccagccccgcccggcga

SEQ ID NO: 83702 - DNA, 122 bp, Homo sapiens
tgggcgggggcgcctgttaagatctaaaatagatatgttggattgatattctcacgtgttcggtgtggaaaacaaaacaagtacatgctttagaagcaacaacaatgaaatccttttgaaat

SEQ ID NO: 83703 - DNA, 122 bp, Homo sapiens
ggctcgctccgtcgaccccacgtccactcgccctgcctcgccgggcgaacgcagtgctagcgcgccacctcgtggttccttcgagctctgcagctccccgagcccggcgcccggccaagcct

SEQ ID NO: 83704 - DNA, 122 bp, Homo sapiens
gggcttggcccgcagactgaggggcccgcgttgcgggttttgggggcccctctgcctctgcgcaccgggtggccccgggtcccctcggcccttcccgccgcctcccgggtccagggtttcta

SEQ ID NO: 83705 - DNA, 122 bp, Homo sapiens
acagataatttgaagaacattatacaccaattcaacctgagagacattgacataactctccgccccccaacagaatacacattttctcaactgcacatgaaacattcttcaagacagaccat

SEQ ID NO: 83706 - DNA, 122 bp, Homo sapiens
ccggactcccctcttcacccacctgccaaagccgcaaattccgcagctggtgtccttcaacgaatgtaaccacctctcggcccggccggaagaagccacctcccccgcacgcgtttagccgg

SEQ ID NO: 83707 - DNA, 122 bp, Homo sapiens
cccagccaaactccgactcgtccctctggttcaagggcctgcgggtgtgccggggcttgtcgctgtgctctcccgccgacgtgccccctccgcagcctcgccccctccgcagcctcgccccc

SEQ ID NO: 83708 - DNA, 122 bp, Homo sapiens
tttccagagttatctggaatgtacacacagcattcagtcttaattatagtgcacattccccgctgtcaattgtacccagagcttctgtggggatgacaggttagctaaacatatatatgtga

SEQ ID NO: 83709 - DNA, 122 bp, Homo sapiens
gcaaggtcctgagattcagacggtggtgctgtttggcagtgaccctgggtgtgggcgtcccgggtgccggggagagctcatcttcagaaatgaggaggccgggggtggcacagactgtccac

SEQ ID NO: 83710 - DNA, 122 bp, Homo sapiens
gactccctgttcgtcatctgcgcgctgtctcttgctgcctgcctctgcctcgtcgccaggcgggcgccctccactagcatctacctggaggccaaggtagggctgcagcactgatgcccagg

SEQ ID NO: 83711 - DNA, 122 bp, Homo sapiens
aggagaggggtcagttcggttcagagcgactcagcccctcgactcgggtcttaaaacctccgagccgccagttctgcctcaggccgcgcccccttaaagcgccaccagacgctgcgccccgt

SEQ ID NO: 83712 - DNA, 122 bp, Homo sapiens
aactcctgggctcaagggatcctcctgcctcagcctcctgcgtagctaggaccacaagcacgcaccattactcctggttaattgttatatttttctggccaagcgtgggagctcacacctat

SEQ ID NO: 83713 - DNA, 122 bp, Homo sapiens
tactacaaattctcagtatatgctatgaactagcattgtgctatgagcacagagggaacacgcagacatggtctctgccctctttagccttactctacaaatggagacaggaagaactagta

SEQ ID NO: 83714 - DNA, 122 bp, Homo sapiens
ggctccggggctgatgagccatccagatacggagcttccgccgcactgtgtgaccgtgagcgagtcgccagccctctctgggctcgcctcccggctaccccggagtcagactgcctggagga

SEQ ID NO: 83715 - DNA, 122 bp, Homo sapiens
gggcacgacacgcaccgccccgcccggcactccctgcttcgcccacgacacgcccctccccgcccggcaaactgcccggagccaaggccccgcccccagagagaacctgccccgcctccctg

SEQ ID NO: 83716 - DNA, 122 bp, Homo sapiens
ggcggcggcgggggccgcgcaactcgggccaactgcggggcagccggccagggcgcggggcgctgagcctcggccgccccagctccccagccacgcacggccgagcccaggagagcgcgcag

SEQ ID NO: 83717 - DNA, 122 bp, Homo sapiens
cctcgtcctcaatggggcagcaagtgcggcttggacctcggtggcctgacagctgccgctcgcgcccgccgctgccgccgcgcagcgtctcgagcccgcgcccgcgcccgccaggggagggg

SEQ ID NO: 83718 - DNA, 122 bp, Homo sapiens
cttagtgaagcagtcattggggtaacaatgctacgttttgtgtccgattcagtgtgtaaacgttggtggttctatgtaatactgaccccaaggaaagacgatcagatacaaagaaagatggt

SEQ ID NO: 83719 - DNA, 122 bp, Homo sapiens
ttatctctctttctcctcctcctctttctgtctctctgtctctctcacacaggctactcccgaggctctgcacccagctgctcccctcagcacgtagccctgaagcccagtcagcttctccg

SEQ ID NO: 83720 - DNA, 122 bp, Homo sapiens
agccctggtctgtccgggccatctgcgcgccacgtcgagactcagcgtcccaggcagccgcgtcccaacgtggcgctggtcccccaactcgacaggtccagtggagcccggctgtgggctga

SEQ ID NO: 83721 - DNA, 122 bp, Homo sapiens
agtaggcgaccctaagctgtcacaggcagggggcgagctcctctagttgtcttcaaagttcgtttcgtcttcgtagggcacgcgcccaccctgaatcccgcctttcctctcgtgaagctctg

SEQ ID NO: 83722 - DNA, 122 bp, Homo sapiens
tcttgttattccagcatcttgtggccccgatcccacctcaatacctggggagtgataggccgaccatgtttgctgaaggggaaggaagccaacacttattagatagagtccgaacttacccc

SEQ ID NO: 83723 - DNA, 122 bp, Homo sapiens
aagctccgcctcctggattcatccattctccatctcaggctcttttaaacaaccagctctcgagggaacaagggaactcacagagcgagaactcactcattactgtggggagggcaccaaga

SEQ ID NO: 83724 - DNA, 122 bp, Homo sapiens
gagtggacatcagacgtgcccaacgggctttggattgggtgttcgggggacggggcgtgacgagaagtgccaggtgtacagaaagattctcccttggttcccagattgggtccgcctgtgag

SEQ ID NO: 83725 - DNA, 122 bp, Homo sapiens
aaatatattgctttctcttgaacagttaagttgcatacatatctaaactgaaatgctgaccgattcaattcatatgccaaaaatccatagtagtattaattgccattggtctggtatgctgt

SEQ ID NO: 83726 - DNA, 122 bp, Homo sapiens
aagccctcgcggctccccaagcctgtttgggtcccctggttatttgctgctatggcaccccgcagtgctggaggacatggatactcagtgcacttttaattataccatggctggcttccccg

SEQ ID NO: 83727 - DNA, 122 bp, Homo sapiens
cattccaaacaaagcaaagcttcaactccaaattggctggcttttgctgtaacatcacatcgtgtaaagctgggggaaaattctgcttttattttcactaacaagcttttcccacaagcact

SEQ ID NO: 83728 - DNA, 122 bp, Homo sapiens
ggacctgtgttgtctcagtcatccctgcctctctagaacaagtacagaggcgacacaccacggggactcaggatatgtgtgataactgcatgagccttttcaccttttgaatctcagcaacc

SEQ ID NO: 83729 - DNA, 122 bp, Homo sapiens
agggagaggcgcgagcgggaaccggggctgggtgccgtgcttgcaggccagctggatgtccgggtgggcgtgggcttggtgggccctgcactcggagcagccggccggccctgccggccctg

SEQ ID NO: 83730 - DNA, 122 bp, Homo sapiens
ggtgtcacagacgccagggattgctaaaagtcctccagtggaaacagaaggcaaactgcacggcttctccctgtcctgttcaaacgcagaagcaaatgtcacacttttctgcttcaggagat

SEQ ID NO: 83731 - DNA, 122 bp, Homo sapiens
gctgtcttcccgtaccgcggagcccggaaggggctgtactttttcggcctctaagcactacggtggccgagcgagttcaaacctcgcggaaccatacctgaaaactcggggtaattcttttt

SEQ ID NO: 83732 - DNA, 122 bp, Homo sapiens
agtgatccacccgcctcggcctcccaaagtggtgggattacaggcgtgagccaccgtgtccggctttgtctgcagaaatttttaagaactaggttacccatggccaggcatggtggctcacg

SEQ ID NO: 83733 - DNA, 122 bp, Homo sapiens
agtgctttaagaagcacgaggatgtcgagtgtcaaatgcggcaaagggctcagagctcgccgccaaggggcgtggcctccgggccgcggcggcctctgggagttgtagtcccgcctcaactt

SEQ ID NO: 83734 - DNA, 122 bp, Homo sapiens
gcatctcctggccttcctcagccacagcctcctggggcttggagctgcagaggtcctgcccgctcccctgccccgcctccgtctccagccctgcagcccccgccgcccacctccggtgcacc

SEQ ID NO: 83735 - DNA, 122 bp, Homo sapiens
taccacattttcctggacctccttctttaacctgagatgccagggggacaagtctcttctcggctgctgattacttcaagatgtgggggctggtttgaactgaaggataaagacacgcgcac

SEQ ID NO: 83736 - DNA, 122 bp, Homo sapiens
cccggccgccggccttatgggacttgtagttttgacgttgcacaaactcagaagagaagacggggacggggacatcacttctgatctgtgaaaggaatttttttaaaatgaaactttctatg

SEQ ID NO: 83737 - DNA, 122 bp, Homo sapiens
cttatgttctccaactgctataagtacaatcccccagatcacgatgttgtggcaatggcacgaaagctacaggtgagtggaaaggttggagtttgaaaaataaatggtatggggagttattt

SEQ ID NO: 83738 - DNA, 122 bp, Homo sapiens
ccactgaggggagacgaccaggactggtttttgttttccaggctgaacaccggaccatgacggctttcattctcgccgtgatcgtcaacagctatcacacggggcaggtgagccccccagcc

SEQ ID NO: 83739 - DNA, 122 bp, Homo sapiens
gactgcgagagctgatcgagagctgccaccggccgccgaagcctggatcaggctctgtcccgacgcctgaccggaacctgaagccagcggaaatcctgagagaaagtctgaaacccactcag

SEQ ID NO: 83740 - DNA, 122 bp, Homo sapiens
ttgaggaattcctgctctcttcagcttagggaatgagagggaagttttcatttcagatagcgtctgtgcatgtttaaatagctatttgaaaggaattactcgaggggaagtggaaatggggg

SEQ ID NO: 83741 - DNA, 122 bp, Homo sapiens
gaagtcccaatccggcaaatagagtcaatcaattatgaagggaacaatctggcggcccctcggggagcggcggccgagcgatcccgggggattaggccgcaaatcgcgctgagcctccctaa

SEQ ID NO: 83742 - DNA, 122 bp, Homo sapiens
ggcaggcaagcaggaatttttcgtattgcagacagcccctggtggtcatcatctatacatcggatctctaaggacgtgccggaaaaaaaaatctgtgaacacaatcttcccatgctgtattc

SEQ ID NO: 83743 - DNA, 122 bp, Homo sapiens
atctcatgttttctatgagtcaagagtgttgatgtggctcaaccggatgcccgtggctcacggtctttcatagacatcaacagacactgcagggaggatccacttacaagctcactttcctg

SEQ ID NO: 83744 - DNA, 122 bp, Homo sapiens
ttcactactgcactccagcctgggcaacacagcaagaccctgtctcaaaaagtaaaacaacgaaaaagtccattgatatgatgtaggttctacatcacaacgaacctttaagaaactactat

SEQ ID NO: 83745 - DNA, 122 bp, Homo sapiens
gtagcagagctgccattcagaataacacctcttcttttgaactacagtcatctttatttacgtagtattcttctctttctgtttgtcctgatgcggtagatttgcagagaggtgcctaccac

SEQ ID NO: 83746 - DNA, 122 bp, Homo sapiens
cgccggcgccgggcgcgcagcagcgtgtgccgccgcaaggtggcccaggcgcgcgagaagcgcttcacctttgtgctggctgtggtcatgggcgtgttcgtgctctgctggttccccttctt

SEQ ID NO: 83747 - DNA, 122 bp, Homo sapiens
ccaccaatggaagatgcagatgtccacctcttcccatgcaggcatctggcagccgtaactcgtcagtcctagggaagagtctaccttccctcatcaagcaccatttttttaaaccagaaagg

SEQ ID NO: 83748 - DNA, 122 bp, Homo sapiens
attctctgtgagacctgaccctgactttgaaatttcgtctgtaaaatgggatgatttagccgtgcactaccttcctctcccaattgctatgggaaaccaggagttagaggcacaagcagatt

SEQ ID NO: 83749 - DNA, 122 bp, Homo sapiens
caacagccagggcgatgtttgtgctgcagaatgtctttgcggagccgagagcccccgttccggtcggtgtctgtgtccctgtgccggaggcggtggtgtggagttacgtttttagggtcctc

SEQ ID NO: 83750 - DNA, 122 bp, Homo sapiens
tttctccacaccccaacatgcttgggaacacagaggcccccagggatggggaagcaggggcggctgggtttccaggggcggcagagccaccaagagcgatggaaacccacccccgagtccct

SEQ ID NO: 83751 - DNA, 122 bp, Homo sapiens
ccataaccactgtcctccccgggagctgggcaagaggagccctggactctgggttgacctcgtcccggtcgggttctctctcctcccacccaggcccggccgctttctggcgtccgtcctct

SEQ ID NO: 83752 - DNA, 122 bp, Homo sapiens
gcctccatggcttggatcttggcagcactgtccccgtacaaacgcttcatctcggcctggcgccgctcaccaggcctctcagttggggcttctaccgaccggcgggtgttgcagtacaggtc

SEQ ID NO: 83753 - DNA, 122 bp, Homo sapiens
ctcggtccctctctccgctgtaggtcggggtgagagtgggctgagacgcgcggggggccgcggggcacacctacctgcgggtcccggggcagccgccctgagcgaggcctagtgcatcgccg

SEQ ID NO: 83754 - DNA, 122 bp, Homo sapiens
gttcttgcacatacctactctgggtgggtggaggcctatccaacatgaactgagaaatctcgtgaagtaacccctgtgcttcttcgagatctgattccgagattttgactggccttatggat

SEQ ID NO: 83755 - DNA, 122 bp, Homo sapiens
gtcaaagaaaggggtgacagacggcacccggaaaatcgggtcactcccacccgaatactgcgcttttccaacgggcttaaaacacggtgcaccacaagattatatcccgcacctggctagga

SEQ ID NO: 83756 - DNA, 122 bp, Homo sapiens
ggcacggacgcccggggctgctccctactgggtgtagcgcaccccgccccccaccccgcccggcctcctctgggcctgcgccttgggcctattgaggccaggcctggaatggtgccctggaa

SEQ ID NO: 83757 - DNA, 122 bp, Homo sapiens
agccagatcccagaaagcaacggcttcctctgcgaacaaatatggtctcttctcagaaaacgactcagctagtttcctttaccacttcctctgctgggctctaaataagtaaacaaggaagc

SEQ ID NO: 83758 - DNA, 122 bp, Homo sapiens
tcctagcatcacagccaaactcatcaatggaggtgtagcagggctcgtgggggtgacctgcgtgttccccatcgacttggccaagactcgcctgcagaaccagcatgggaaagccatgtaca

SEQ ID NO: 83759 - DNA, 122 bp, Homo sapiens
agatgtcttcccagttaatcggaactcaagggcgctgtctctgctcctcgggccgagactcggtttcccctgccgctttttgaagtctagcattcctctgtgaaagctggcttttccctttt

SEQ ID NO: 83760 - DNA, 122 bp, Homo sapiens
aaaccaacaatgactctggaatcaaagctggctaaggatttcttgccttaaagcaaggcacgtcattatttcatttgtacagtgaaagaggctggcaatgatctctaaagccctttccaagt

SEQ ID NO: 83761 - DNA, 122 bp, Homo sapiens
gtcgactcagttgtctcgcgaggtttgttgcttggtcttggagccacaatttgagaatgacgtatctgagttagagtctcctggaattgaggtttatgtaactttttcagacggttgttccc

SEQ ID NO: 83762 - DNA, 122 bp, Homo sapiens
gtgtcagccaatggctgagcctcctgcaaaagtttgccggcttccgcagtgatggatcaccgttttagtggcatttaaatccccggcgctccgccgtctaggtgacgcgcagtcgccccccc

SEQ ID NO: 83763 - DNA, 122 bp, Homo sapiens
cctctttagactcctgatccgcgggaaaattccacttgtccgtgttttctccaagctctccgtaggtgcaagtcacctgttgcattaaataaaagcgaaagatgtgtcaactttcaaagatt

SEQ ID NO: 83764 - DNA, 122 bp, Homo sapiens
cccattctccttttcaaagacaacatatgatggattgctatctctcagcgcagcaggacacggggaccatgcaagctgtaattggtcaggtatggagtcagccatttctcaactcccctttt

SEQ ID NO: 83765 - DNA, 122 bp, Homo sapiens
aagccgcccgaggagcagctcaccttcaaggacctggtgtcctgtgcctaccaggtggcccggggcatggagtacttggcctcccagaaggtgggcagggcggcaggtgtgggtggagtagg

SEQ ID NO: 83766 - DNA, 122 bp, Homo sapiens
actcaccaccctggcgtcctcccttcttctcttgcagagcctgacgcaccccagggctgccgccatggagcccctgttcccagcctccacgcccagctggaacgcctcctccccgggggctg

SEQ ID NO: 83767 - DNA, 122 bp, Homo sapiens
atacttggaactgcccacccagttagtcaatatctgcaacagactttgtcttcaggattacgagatccaattttaaaatacttccagacagatatgtgctaaaaatacatcgtttacaaaaa

SEQ ID NO: 83768 - DNA, 122 bp, Homo sapiens
aacagcatttatgaaagcattgctgggaggattagaccgaagaaatgcaagcaggacactcgcacagagcctgacacatatgggaacctcagtaaatattttcagtgctaatagtagtggta

SEQ ID NO: 83769 - DNA, 122 bp, Homo sapiens
caccaagactggccacccgctgcgtgtgtgtgcgcgcgcgtgtacgtgtggccccacatccgccgccttccacgctaggatgtaagaggtcgcctcctattgtacatttggggaaagccttg

SEQ ID NO: 83770 - DNA, 122 bp, Homo sapiens
cgtatgcgaatccactcactgcctatgcaactcagctcgctctgcgtatgcaactgagctcgctctgcgtatgcaacccagctcgctctgcgtatgcaactcaagtcgcactgcgtatgcaa

SEQ ID NO: 83771 - DNA, 122 bp, Homo sapiens
aagacccgcccaggctgctcttataggcgagcgcggggcgggcctggctgggggcggtgccgcgcggccccgctcgcctataaggagctgtccgccacccgggtgctgattccagctctcgc

SEQ ID NO: 83772 - DNA, 122 bp, Homo sapiens
tatgaatgatcttaattaaatttgaatgcattgctaactgaatgctgtgggaaaataccgcgtccttactggccgctcttcccatagtactcagtagcaatacattcaaattcaattaagat

SEQ ID NO: 83773 - DNA, 122 bp, Homo sapiens
tctaccatccgcggagccacgccctccgtcacatcccacctccccgcccaggagcttccgcgaggctcgcccggcagctcctgctccacagcaggcttcctactttgacgcctcacgcgctc

SEQ ID NO: 83774 - DNA, 122 bp, Homo sapiens
cgagtacctgggaccacaggcatgtgccatcacacaggcaaattttttactttgtaaaaacgggttcctattatgttgcctaggctggtctcaaacacctgggctcaagtgatccttctgca

SEQ ID NO: 83775 - DNA, 122 bp, Homo sapiens
gcttgggggcggggccacggcggtgagcgcagcccgggactggagtttggggcggggcctcgtcggtgggcgacaccggggactagagctaagggtggggcctcgcggtgagtgcagccggg

SEQ ID NO: 83776 - DNA, 122 bp, Homo sapiens
cagtgcctggagaccgcccgccttttcagcaccacggtcagcggccttttcgcaggcgcgcgccccagccccgccccgggttgggctggcatccagcctcccggcccttctgcgtgtccctc

SEQ ID NO: 83777 - DNA, 122 bp, Homo sapiens
ctgaaggttttttacagttttcacactgttttcaacattgattcattcaacaaacatttacggagcatcttcgaaatttggggaactgtgtagggagttgggggcacagagtagctagaatg

SEQ ID NO: 83778 - DNA, 122 bp, Homo sapiens
aatctgccttaaagcaagagatcaccaatatatcctagtctgcttaccaggggaatacttcgtagctaattgaaaatttcccaaggaggttattttttgattatgtcattcccaacatgata

SEQ ID NO: 83779 - DNA, 122 bp, Homo sapiens
ccatgctgaatggtttgtactaaaaaattatattttcagggaaatgtttatatgtttctacgacacttggctccatcctgtcctgaggctgaaccacaactaaggctgagacctgaggcaca

SEQ ID NO: 83780 - DNA, 122 bp, Homo sapiens
aaaagggggggtaggatgaaatgtttggggtctgggctctgattggctgcgcccgggccacgcccccagccctttcccctttctcccccctcgaaaggggggcgtgaagggagccgggatca

SEQ ID NO: 83781 - DNA, 122 bp, Homo sapiens
cactgccgccccgcggatcccaccggcctggccgggagctccctctgcccggctcacccgcgcttccggcccgaagcccggcttcctctgacgtcacggcccctgcgccccctggcggcgcg

SEQ ID NO: 83782 - DNA, 122 bp, Homo sapiens
ggtctcaggcggcacagtcaggggtcaaagggcgggaggtgctacctcgcaggccaggaccggactccaagcctgggtaggtggggacctgggaaaggcggtcgccggggacaggatgggcc

SEQ ID NO: 83783 - DNA, 122 bp, Homo sapiens
gacgtcacattcaacaggccaaggcacacatgctcccgtgtcatacaagtgacttggttacggccgagagcatccaacccacagcaatgctcagccgcaatcactgtgagaatctccctcga

SEQ ID NO: 83784 - DNA, 122 bp, Homo sapiens
gcattctccctgtacctttctctgtgcccatttcatcacacagtcatatatagggtggttcgtttacaattggagaaatgtctccaagtcaacaggtattgatctcacttgttcttttcatt

SEQ ID NO: 83785 - DNA, 122 bp, Homo sapiens
gggtgggcggcggggtgggccgggaagccgcgtgcccgcctcctacccggggtctttccacgtctccactgcggtgctcgtgacaacctgggaggctaacggagcaggaagtatttttccca

SEQ ID NO: 83786 - DNA, 122 bp, Homo sapiens
gacgccggcccgaggtggcgccggagctgctggcagaggggcggcgggcggcggcggcggcggctacaggagggactgacaaagccccacggcacgccgctccctacttatagcaccggcgg

SEQ ID NO: 83787 - DNA, 122 bp, Homo sapiens
tggactccagaaaccgcccagtgaggccccggtagggggagctgtgggcggtgggctctgcgcttgctgctccccggcctggtctgcagaccatcatccaccccttcaccgcaggccactgc

SEQ ID NO: 83788 - DNA, 122 bp, Homo sapiens
ctggcataaagcatcaagaaaacgcagagggtaggaagaagtcaaacctactctcactggcgtaaagcatcaagaaaacgcagagggtaggaagaagtcgagcctactctcgctggcgtaaa

SEQ ID NO: 83789 - DNA, 122 bp, Homo sapiens
cgggggttggcgccctgctgggttccaagccggtgggcgcggacagtgtggcgggaaggccgggcctggcgggtgggggcgcggcctggcggtgggggtggaccttcctggggtggagcccg

SEQ ID NO: 83790 - DNA, 122 bp, Homo sapiens
gtgccagagttcgaaacttattttactatccaaaactcacttctaccagattctttgttacgttaacttttgtaatgaaacttgcatttctccgccctcaacaccccctcaaccccgcccaa

SEQ ID NO: 83791 - DNA, 122 bp, Homo sapiens
aggagccaggggtaggaggttgtcctgggagacagcgcgggaccctgcatcaccttgtttcggtaagcattgtgtggggcatgtggagcctctaaacttccatttaaagtgtcaggagaaag

SEQ ID NO: 83792 - DNA, 122 bp, Homo sapiens
ctgtctctaagtgagatacacttaatatttgtagttaagagagtggcacgtggcagcccacgtgagacttgcacgggggcccacagatgtcagagccacagactaggaaatgagaattcctc

SEQ ID NO: 83793 - DNA, 122 bp, Homo sapiens
aacgcgctcggaagcaacttccgccgatccgataggaagtgacataaagtcgttcaattgcgcggacacactcctccggaaaccaagctccttcgactctgggttccgtttctagccgctgt

SEQ ID NO: 83794 - DNA, 122 bp, Homo sapiens
tctaagcggcggccccgcgaggcccttgcacggcgccccgggtcgaggccctccccgcctcgccctaccccaggagcctgcctccccagctggggatgaggctaggaggcggccgcgtgggg

SEQ ID NO: 83795 - DNA, 122 bp, Homo sapiens
caaccccccgccgctgctgacctggatgcgggacgggacagtcctccgggaggcggtggccgagagcctgctcctggagctggaggaggtgacccccgccgaagacggcgtctatgcctgcc

SEQ ID NO: 83796 - DNA, 122 bp, Homo sapiens
agctgatccaggtcaagagagagggagggctgggaactcactgtcctctgaagaaacacccgtggaaatgctgctcagggctagatgtggattctagcagtatgaggaacctgagggaacag

SEQ ID NO: 83797 - DNA, 122 bp, Homo sapiens
gggcgagccggaagtggagtgcgctgcggtgcgagctgggccggcggggtggttcgagagcgcgcagagtccagactggcggcagggcccgaggggccgacccgcagcgtccctggtctctc

SEQ ID NO: 83798 - DNA, 122 bp, Homo sapiens
gctgctcggaaggcagggagagcactgccgaagctactacgagtcttctgaatttctgcgcgacagtccaaagtgacgtgctgagccgctgcagggtcagacacaacatgaaactcaggctc

SEQ ID NO: 83799 - DNA, 122 bp, Homo sapiens
tgccactcctgccacgagtggaagcagcctgaggtcctcatcagaagcagatgctagtgtcgtatgtcttgtgcatcctgcagaaccatgagccaaataaacctcttttctttataaattac

SEQ ID NO: 83800 - DNA, 122 bp, Homo sapiens
agctgctgcaagatccaagcgcgctcccgcccagcggtggccccgggctcagggaaccagcgctgcttctctccgaggctcgcggcctgagaaaccttccgctccgaatgcgggctggcctc

SEQ ID NO: 83801 - DNA, 122 bp, Homo sapiens
caaactcctgacctcaggtgatccacccgcctcggcctcccaaagtgcagggattacaggcgtgagccattgcgcccagcaccaaagactttaaataccgaaagagcttacatttcaaatag

SEQ ID NO: 83802 - DNA, 122 bp, Homo sapiens
cgttaacttttgtttcttggcaaaatgtctggatagaattttcatctgctcaatgtccaccgtttttctgtgaaactttttctgccacttgtttttgttctttttctcctttgctctaacac

SEQ ID NO: 83803 - DNA, 122 bp, Homo sapiens
tggccagggcggggggagataagatttttccgggggggctagcagctgggagattggggtcgagtcaccgtgggatacgggctcaggttctgaagacgaagagaaaaatccaagaagccggc

SEQ ID NO: 83804 - DNA, 122 bp, Homo sapiens
cttctctcgctaaaaggcaaataccatggaagcatggatgtttgtctgttccattgtgaccgaaacttcagtaccgggaagagtacctgctcacagtcggtgctgattaaatgtttgtgaaa

SEQ ID NO: 83805 - DNA, 122 bp, Homo sapiens
gacactacggcttctcctgggagaaattcgctgagcaaagccattaggcagcagtgcatgcgcagctcagcaggctgaggagacacgcgccctggccgccctcccccgggcaccgcatgcag

SEQ ID NO: 83806 - DNA, 122 bp, Homo sapiens
gctgtggtcctgacctccagcagctgccagtcatcttggcaacatagaaaatcaaggaaacggcctaaaggcaggcagaagtgtgtgtcagcaaggtcccaactatgtaagatggacacgag

SEQ ID NO: 83807 - DNA, 122 bp, Homo sapiens
attttaactatatttatatagctaaaattttctcttttatatttagaattactatccagtcgctgcccctactatttgactggaatctccctctttctattagacctatcacaatgactgac

SEQ ID NO: 83808 - DNA, 122 bp, Homo sapiens
aataactcaacgctgcgaccgagaaaaccagggacgcgagaggctcgcgtcatcctgcagcgccgacaccacagacactagaaagcgacgcctccggtgggacgactggaggtcacgtggta

SEQ ID NO: 83809 - DNA, 122 bp, Homo sapiens
ggctgtggtgcggagagaggctgagacggagaagaggagaggcagagagggcgcggggaccgtcagcagcaccttagctacaatcgttcagctattctcggaagagagaagggagagggagg

SEQ ID NO: 83810 - DNA, 122 bp, Homo sapiens
aacctgacagcggcgccgagggggccacccggactctgtttggaacggaagcacagtgtccgccgcttcctggttgcgggtcagcgcccaggtcctgggctggccgccgggatgttgcccta

SEQ ID NO: 83811 - DNA, 122 bp, Homo sapiens
gaattgcatttctttcttacctttggtcatagaaaggagcacttaggtgtttggctggaacgcaaagtgagaccagagcttacattcttagcagcctgggtttgtctcgagaggccatgctt

SEQ ID NO: 83812 - DNA, 122 bp, Homo sapiens
ctgaagcctgcagtatgctgaacttatgctctcagcatctgtccactttcacctaagctgcgtttccactggtttgctgctgaatctactcctgactgaaaccttccaatgtgcatggggcc

SEQ ID NO: 83813 - DNA, 122 bp, Homo sapiens
aacccatgattccagagctagccagcttatttggtcgggcccaacaggtggggttgaaatcgcagacagggacacatggagaacgcccccaccagttcccacgtgcttctctttccgcaggt

SEQ ID NO: 83814 - DNA, 122 bp, Homo sapiens
tcagattggcaccccatccccactggggcaagcaggactcttagcaattaaggcctaagacggctgacaggtgggacatggcagaaattcagtgcttccaccacagctactcaatgtgccac

SEQ ID NO: 83815 - DNA, 122 bp, Homo sapiens
aatgactcaggagtggttgtccgagggtgtgccctgcggttcctgtccgagtagtgttcacgcgtgcccagtggtggccgatggggtcacggcccctctccccaccccaggcgcgcggcgat

SEQ ID NO: 83816 - DNA, 122 bp, Homo sapiens
ggatgcacgcgcgcgagcctcctcggctcccgggaggattccgttccgggggcgggggagcgtccctcggcctcggctccccgccccgaccccgcccattggcccgccgcctgccgtatatg

SEQ ID NO: 83817 - DNA, 122 bp, Homo sapiens
tgtcccagcacacggcaccggcagagccccagcttccccagcctgtcatcctcccgaggccgacggcacagaagaatggcaggcccaggacacactgagctcccagagcaagcggcgggtca

SEQ ID NO: 83818 - DNA, 122 bp, Homo sapiens
aagcagccgaagcttgactcagtgatgattctctctatcccgtaactgcgaggaagtgggcgatcagcaaattgcccttttgcaggaggctggggacgcccctggaagttcgctttcattct

SEQ ID NO: 83819 - DNA, 122 bp, Homo sapiens
ccgccgatttgcagtaagatcttggatttgacctatgacttttatgtcacaaaggatcagcgattgcaattcgggtaatagaagaggccaagtcagctttctctttttcctgcctcccgtcc

SEQ ID NO: 83820 - DNA, 122 bp, Homo sapiens
tccatcctggcccctgggcatctgggctcccggggtaaccggaatcaataaaccagggcccgatccccgaggcccgcggcatctcgacggctcggcggggccagagagcgatcgaggtttgt

SEQ ID NO: 83821 - DNA, 122 bp, Homo sapiens
agcgggcccggacgggtcggtggcgtagacgcggagcgcgcagctcacacctggcggccgcggtttccaggaggaagcaaggatgctttggacactgtgcgtggcgcctccgcggagccccc

SEQ ID NO: 83822 - DNA, 122 bp, Homo sapiens
tgacacctctcacccatcatatcctagccccgacaggcgatgactcttcccctttgtctccgccaacaccctaaacactgggcaggagccaagggctgaggaacttggcgcgcgggcggccg

SEQ ID NO: 83823 - DNA, 122 bp, Homo sapiens
tgtcagcatagatgaaatggcgattggttatctcttcctcttgccagccccttaaggatacgaggtgaaattagtagcaagaaagcatgtaattgacaaagtcacgtgtgctcagggggcca

SEQ ID NO: 83824 - DNA, 122 bp, Homo sapiens
gccctgcccaccgccgttcatcctaccccactggacagggcatttacttctgaagctccccgtggtgaaaagacagaccccctccagggattccagccgattcccacgcaggagttggactc

SEQ ID NO: 83825 - DNA, 122 bp, Homo sapiens
gctggaagagacacagcaaacagtaggctgagtgcatccacaacccacacccacctccgccgccctacctatgagcctgaaagggcttggcctcctgcatattcagattgaggcctcaccag

SEQ ID NO: 83826 - DNA, 122 bp, Homo sapiens
aacgtggttagacctcatgatggtcaggggcttgttttattggtctttgttatttcagaccgtggcatattacctgatgtatagtaggtgctccatacatgtttgctgaataagatggtaga

SEQ ID NO: 83827 - DNA, 122 bp, Homo sapiens
aagtagaggtggcaaggggcaacggtcgtaggagaagaggtcagagagttggtatttgcacgcttgcagggcacaaagatttgggagtttaatcagtgagaaaaaagttttaggggtttttg

SEQ ID NO: 83828 - DNA, 122 bp, Homo sapiens
gcgggggccggggggacccggcgttgcggggagttggggcgcggaaatcagggcagtagacgtgcattcgcgggactctcagaagcacgtctcaggctactatcacgcccatggacactagc

SEQ ID NO: 83829 - DNA, 122 bp, Homo sapiens
gcacagcgcgaccgcccggggacggcacagtctatcatcccgtgtttattccccgtacagcgcgaccgcccggggacggcacagtctatcatcccgtgttgatttcctgtattctgccgctt

SEQ ID NO: 83830 - DNA, 122 bp, Homo sapiens
atgcctgtcgtggaagctggcctggcccccggagctccctggagtcggtactgggggcttcgttttgtacgcaccggtaggtacgctctttgtggtccctggcctttcctcctgtctgaatg

SEQ ID NO: 83831 - DNA, 122 bp, Homo sapiens
atcccgggcacagtcccctgcctgtcgccaaattttcttttccatgaaaaatctctccttcggagaagagcttctccctgactggttgtcaaatacgcttttgattttctcacacaccgact

SEQ ID NO: 83832 - DNA, 122 bp, Homo sapiens
ccccgccctcttccaacctttcatccgggtctcgggcaggggcgtgtctgggcagaggggcgggtggtggcggaaaggaaggatgtcgtgggagactggagagtggggagggaagcgggaag

SEQ ID NO: 83833 - DNA, 122 bp, Homo sapiens
ggcaattccgggagagactgagtcactcaagactcatggtctgcactgggcagccaaaggcgattcggccaccaagtgtgattctggcctcattcagaagtggatgctaaacaatacaccct

SEQ ID NO: 83834 - DNA, 122 bp, Homo sapiens
gctgagcacatcgagagcgccccctaggcgctggcacgtggctctgcaggaggaagccaccggtcgatcatccctgcgtttgtcaggcgcccaaacccacacacaaagccctggcacaggcg

SEQ ID NO: 83835 - DNA, 122 bp, Homo sapiens
caatcgaaggtcaaggctgggagggtcccgccctctgcaggccagacccccttaggggagcgcgagcgccccacctcgctggggaggccccgagagccagaatgggaggagcggggtctcct

SEQ ID NO: 83836 - DNA, 122 bp, Homo sapiens
tcccctcaattcagaaatggagccccagaaagttgaagttagtaaaccagggctacccagcgagtgctggttacccgaggtgatcctcacaatacaactagtcttctgatttcgctcggcgc

SEQ ID NO: 83837 - DNA, 122 bp, Homo sapiens
actccgcgcgggtttcctaaccgctaaaggtgcctttcggtggtggctgtctcagaagcacgttaaaatgtcctacccaccccaatctagatgcggctgtgggggaatgggagcggccggac

SEQ ID NO: 83838 - DNA, 122 bp, Homo sapiens
attataatgcactgtcctctgtctaccacgtggagcctccagaccccagtgtctgcagaacggtttgtttctcttatcagggaggactctggagccagccacatggagacagcacccacggg

SEQ ID NO: 83839 - DNA, 122 bp, Homo sapiens
agaaggtgggtgggttggggagggcattttggcctgggggcggatggggcccgcggggtgcggcgccctggcggagtgggaggcggggcttctgtgcccggtgtccccaccccgcccggacc

SEQ ID NO: 83840 - DNA, 122 bp, Homo sapiens
cccccggcccctcgggcacccgcatgcgcagttggaagtaggcaaaggtgtcaggctgggcggtccagaccacacggaggcgccctgtctcatctctgcccagcaccctcaactctcccagc

SEQ ID NO: 83841 - DNA, 122 bp, Homo sapiens
cggaggcagccacgccacgttagcagattaaatcattaatacccgcatcggtcatttttacgagcctgccttaccccgaactcctcaccaccccggtgttgagtacactgttagtgatgcag

SEQ ID NO: 83842 - DNA, 122 bp, Homo sapiens
tcttctctccactcctgtaaggcaggtgtagtgggatgccaggaaggcaccatgccacctcgcatggggctgagctgctaggtttgcccttcatcaggtggtatgggccaagacagagagga

SEQ ID NO: 83843 - DNA, 122 bp, Homo sapiens
accctctccaagccaacatgatgaagactccacaaaaacccaagacgtcggggcttggggcgattccagatatagctgaacacgtggaggttcttgaggggaggccccagaggggatccaac

SEQ ID NO: 83844 - DNA, 122 bp, Homo sapiens
cctcaatctcgccttccgccctcgctctccctccgcgccaccggaccccgtagccccgcgcgcccccagacctttaagccagatgatgaacttcctgcggcgccggctgtcggacagcagct

SEQ ID NO: 83845 - DNA, 122 bp, Homo sapiens
tccttgtatttcaccacacgttaccggttttcccgcagcggttggctttgtgagtgaagacgaatacttggaaattcagggcatcaccagggagcagtcaggggactacgagtgcagtgcct

SEQ ID NO: 83846 - DNA, 122 bp, Homo sapiens
gcggaggaagaggctattggctaaaaagcctggacaaattcaaaaccagcagctcggccccggttttttcggagcacagccaaacccaaatcacacctctgcacctacctagctccagagat

SEQ ID NO: 83847 - DNA, 122 bp, Homo sapiens
aataccgaagccaccctgtgtgtgtgatgcccttatgtctgaatgtgaagggagcaaggacgggtacatccagagctacgaataaccttgagttttggagactgggcactgacagctacaac

SEQ ID NO: 83848 - DNA, 122 bp, Homo sapiens
cggaagcgcttctgggaacagaggtggcctccggcccttttctcaaaagtccgaccccagcgggaggttggggcggctgcggttttccgggcagatggaggccgccctgtgcgagtggctcg

SEQ ID NO: 83849 - DNA, 122 bp, Homo sapiens
ttttctggagaattttagtatcattggtgatgactggaaaacctgcatcagaaatcaggtcggaagaggaagatatatatctgatatgtactggagaggaagatatctatcttatggtctaa

SEQ ID NO: 83850 - DNA, 122 bp, Homo sapiens
cgggagggtgatcgggtgaaacgcctgccctcagaggaagagacgggacatggcccacggcggggtctcacctgcggcctctggttctccccgtgctttggcgccgctcccgctccatcctg

SEQ ID NO: 83851 - DNA, 122 bp, Homo sapiens
taaggacctccgttcttcggtctccgtcccctccccttcccccgcgtgccgtccccacaacgggccaggactgaacccaactctcgaccaactcccggcagcaaaactaagcaccctacttc

SEQ ID NO: 83852 - DNA, 122 bp, Homo sapiens
atgtccacattgttgtgcaaccaatctccagagctctttgatcttgcaaaactgagacagcgtacctattacacatcaaactcctcgttcccagttctcctccagcgcctggcagccactat

SEQ ID NO: 83853 - DNA, 122 bp, Homo sapiens
tcctgccagcttcagctcatataggataaaagccagctcaaatattttggtagataactccggagactcagaaagccaactgctgaacttgagatacagtttccagtttgagagtggacagg

SEQ ID NO: 83854 - DNA, 122 bp, Homo sapiens
gggcgtcgctaacgaggacgtcgtccagggcgtcgctaacgaggttgaagtccagggcatcgcacacgaggacgccgtccagggcatcgctaacgaggacgccgcccacggcatcgctaacg

SEQ ID NO: 83855 - DNA, 122 bp, Homo sapiens
gcgcccgcggaagtggcggctcccgtgtgcaggttgagcctaggtgggcggggcgggaggcggaagggccgcggtgcgcagccgcgtcaacggcccttcgcagcgggcgcgctgtcagacct

SEQ ID NO: 83856 - DNA, 122 bp, Homo sapiens
ccatgccaggtcagccttgtactgcagctacaaaagaaaaaccacaaagctctcattgggcgcatggatagagacaggacaaagttgatgggagagttaagaagatcttgatcctgcatttg

SEQ ID NO: 83857 - DNA, 122 bp, Homo sapiens
gcctgcaggtggggagctcatccatgccctggtttaagacgctaagtgtatggcttaagacgctaagtgtatgacagttgtcacacagcacaggaaatgaatacatgtccccgatgtgtttt

SEQ ID NO: 83858 - DNA, 122 bp, Homo sapiens
agcatttttggaggctgaggtcaagagttcgagaccaggctgaggttaacctggccaacacggtgaaacctcgtctctactaaaaaaacaaaaaatttgtggggcgtggtggcaggtgcctg

SEQ ID NO: 83859 - DNA, 122 bp, Homo sapiens
ggccgggaagggccttgcgcagcccgggttcccgcccgttcctctctctccacacctgcccgcaagctgaaggagccagctccagtctcagccagcccaggaagcggctcccacagtgcagc

SEQ ID NO: 83860 - DNA, 122 bp, Homo sapiens
ccaaggcacaagcctgggcttccccaagcccctcagggcccctctcctaggcccccaacccgatacgagccccagagggtcaacagcggcctcagttctggtaagctggaggggttatgggt

SEQ ID NO: 83861 - DNA, 122 bp, Homo sapiens
gccatatcaccccatagttggatccaaccaccttctactaagtgggtctcacaggttttgcgccagtgactgagggcagtcctaagctccatcaacctccccttttactcctagcagctcat

SEQ ID NO: 83862 - DNA, 122 bp, Homo sapiens
ataaaccacatactccactagaaggacaattggataaatataacatttggcatgtggcaacgataattttacgtgttcttcccattgaaaggacaagatttgaccctaaagcatctctgaaa

SEQ ID NO: 83863 - DNA, 122 bp, Homo sapiens
catctcaactatcggagcctgggatctgactcaaaggccggcctccgtctgagaactgagcgtccatttctcaatccttgccggctctgacccaggcctgggccacaggctgtccgggaata

SEQ ID NO: 83864 - DNA, 122 bp, Homo sapiens
ttgagggcggaagtgaggactgtgtcgcgctggaggagcccacagattctcccggacccacgtggaagcggcactcaagatggtaggagaatgagctcctgtttcggaggtccggggcgcgt

SEQ ID NO: 83865 - DNA, 122 bp, Homo sapiens
gtaattatctttgtaatgctctaatgctgaataatgatgctgctaatgcaggctgcacttcgcgcacaggtgccagctgttacctcgccgggcagctgaccgcgcggtgcacacttgggcgc

SEQ ID NO: 83866 - DNA, 122 bp, Homo sapiens
cacgtgcttgctgcggtgctaactttgtgtccaggcacagaatcgagcccgttcccaacccgtgagtgggtccctgctgtgttcatctgaataagatgaaatgaagcactggtggaggtagc

SEQ ID NO: 83867 - DNA, 122 bp, Homo sapiens
ttctattcctaggatttcctctacctgtatcatagacgttggtgttcccaagaactatgacgtaaggtactcttttccttcttgagacatccacccccccaaccggtaggagccgccctcca

SEQ ID NO: 83868 - DNA, 122 bp, Homo sapiens
ctcttaacattctgatctttagataacaaagtcactggttgaagcatttggttttgaccacgtcaaggatcttcttaacaattctatcacattgcgaaaaataaataaattttgactgagtt

SEQ ID NO: 83869 - DNA, 122 bp, Homo sapiens
tcttattaaaacacattacctgaagtagaaatgagctagtatcccactagtacgtggccccgccatacctgccccacgcatacactactttgagatctggcaacctaattacagtgccagtg

SEQ ID NO: 83870 - DNA, 122 bp, Homo sapiens
atgctccttcatatttacccaaaggaattgaaaatttgtattcacacaaaaacatccacacggatgtttacagcaactttattcataattgccaaaacttagaagcaaacaagatgtccttc

SEQ ID NO: 83871 - DNA, 122 bp, Homo sapiens
gcagcaaagactacgcctcccagcgtgctttgcggcgggccggcccgctttacccagagtcgccctgccgcaatcgcgcgtctttccaccgaggccccggatgtagattccctcccccgttc

SEQ ID NO: 83872 - DNA, 122 bp, Homo sapiens
cacacctggcacaaaacaaagtatttacaggtaaccaggtgtatagaaagagtggtgccacgagccaggtcacagatacttctaaatgtgttgctcagtctctgagaagccaggtccatggc

SEQ ID NO: 83873 - DNA, 122 bp, Homo sapiens
gtaaatagtaagggcgagagctggcgggagcgggctttctagtggtgggcgggactgtgccgtgtctttccctccctggccaggccctggcttggcagggtgtgctggtcctggcgccgtct

SEQ ID NO: 83874 - DNA, 122 bp, Homo sapiens
aactcctaaaggagtttgttgattctcaggaccacttcatcactaaaatataatgagtggcggaccaatagatacagtttctaggccagagaattggcatttaacagattttctgggtgaat

SEQ ID NO: 83875 - DNA, 122 bp, Homo sapiens
aattttcaggtccgtggcttgttgttattcagacgtgatggatcgccatcatttgctcagcgcgggagttaagtgcccctgtcatttccaaagagtataattgggacgtttcacaggtcagc

SEQ ID NO: 83876 - DNA, 122 bp, Homo sapiens
tttatcttgtatggaacctcagagtaggcatttgagctgcttgtttcactctgatctagacgagttgcctgtagccaacttcctgttaaaagtctctgcctttcactgaggtcattttttag

SEQ ID NO: 83877 - DNA, 122 bp, Homo sapiens
taatccccacggagccacgaaccgcttattactcctaccctgatagaaatacttagttggcgctatgatgatgtcttttatttttaacccagctgaaaatggaagcattacagagctcagaa

SEQ ID NO: 83878 - DNA, 122 bp, Homo sapiens
tcgtgggatctcattggcaatattgggaagggctgtgtgtgggaccagtggattttgccccgatcgagtcacgctttcttcagatagttgttgaagttgttccacctgccctgttcctcaag

SEQ ID NO: 83879 - DNA, 122 bp, Homo sapiens
atccaggaatgcggatgctggggcagagcacctcctgctccggggacgctgtgctggcggcggcaacagcgtgtgacacccagtgaggcatttcccccaccccgcccggcctctctcttctc

SEQ ID NO: 83880 - DNA, 122 bp, Homo sapiens
tgcagttgggagaggaagctagaagggttatggttggagttctgtacagtgttgagtttccgacagggaaagaggattcctccaatgctcctagagagaaagcctgagcaggagatgatgca

SEQ ID NO: 83881 - DNA, 122 bp, Homo sapiens
acctcgtgttccgcctgcctcggcctcccaaagtgctgggattacaggtgtgagccactgcgcccggcctcaaagcacagtttttgaagaagcatgtaaatggctacttcatggattgcttt

SEQ ID NO: 83882 - DNA, 122 bp, Homo sapiens
tgcacatggtcagcacatacacacagcacagatgcacagatgcctgcctacgcacttcctcgcacactcctctgaaacacatacgtatgcaagaggccatgtgggtgccaagccctcatgca

SEQ ID NO: 83883 - DNA, 122 bp, Homo sapiens
tggaccgggactgggacggctgcagcccccgggcctggactgcactgactgtgccagccgcgtggtgcagccagcagggctctggcccgtcatgctgagagcaaaccaaggtgcagggaggt

SEQ ID NO: 83884 - DNA, 122 bp, Homo sapiens
ttaccgtttatatatttaaagctcagaatatgataaaggtcctgtctccaccacttcaaacgcacagggtttcaaatgacacagttaagatctaaaattaaagtttggttgcatgggactgc

SEQ ID NO: 83885 - DNA, 122 bp, Homo sapiens
ggtggggaatggggtaaaactgcagcatggaggctctagggcagaccataggaagaccctcgacttgggcttttctcctgaagtccgggggcaggggctgtgtcccggctacttagggagga

SEQ ID NO: 83886 - DNA, 122 bp, Homo sapiens
ttcccgccacagccgccgccaccgcggtcgccgccatcgctccagccccgacgctgcggccgcgggcgccactgcctcttcagccgctgtagcgtcctggcgctctcctctgctgactgcgc

SEQ ID NO: 83887 - DNA, 122 bp, Homo sapiens
gggaggtgaagctgcaggtgcagccacgtgtgggagtcttggaaatggaccagtggatggcgcgctgtcacacccaatgccccctttttctaacaaatagtttgtaatgtccatcttattct

SEQ ID NO: 83888 - DNA, 122 bp, Homo sapiens
gagccgccgcccgagccccggagttccctgcgggtcttacccaccccagcctccggccgccgaccccaagccccctgcactgtgcttggctcccagctgtttggtcgcttatgccatcctgg

SEQ ID NO: 83889 - DNA, 122 bp, Homo sapiens
agcggcggccgcagagcgcagaggtagggagagaaaaaggaggcgtcggcggggcgcgagcgaccagggcgctaagtgccgcctcacagtcctgccagagacaggagacgccgggccgcccg

SEQ ID NO: 83890 - DNA, 122 bp, Homo sapiens
gtgacagcaacttggcaaagcagcatgctgttaaaaatgacagggatggggaacttggaacgctgaatcaaggattctttcggctgtggggcccctgggcagcccttttctcctttggaaag

SEQ ID NO: 83891 - DNA, 122 bp, Homo sapiens
ggcctacgcaggcaggggccgtgcgggcgctgggggctgaacccgcgggctccgcctccccgagtcctcggggcatcttccacatggtccctcttcagaaggctctccttcatggcgtcctc

SEQ ID NO: 83892 - DNA, 122 bp, Homo sapiens
tcccagaattaattaatgattcccgttcctcactgcacccagtcctaagggtaccttccccgcggtagcccttgacaccggcaagcagttcgccctcaggtcttcccgcgtgcacctggccg

SEQ ID NO: 83893 - DNA, 122 bp, Homo sapiens
cttctggaggcctcgtgggcaggcagaagccaagacagccacaggatgtttctttgtcgccgtcgtttatttaagagaagtggccgtagcttgtcatttcctttatccgcagtcctgcaata

SEQ ID NO: 83894 - DNA, 122 bp, Homo sapiens
ttcgccactgcgtcgcccccggggtccgcgctgatgggcgcgaggcggaaggacgggatccggggttgccaccgctgcagtcagcccaccgcttgcaggtggcagctgcagctcgggctccg

SEQ ID NO: 83895 - DNA, 122 bp, Homo sapiens
agggctgctgcccacaagcccagctccggccaccagcatgctccctccccacccgaaccacgggtgcctgggctgcccaggccctggcgagcttagcccagggcatcaccactcacctgctt

SEQ ID NO: 83896 - DNA, 122 bp, Homo sapiens
caacacatgttctctcatctttcagcaagatgtcaacatcacacccaaatgtggtatcaacgtcacccatacagtggggtatacagtgacaacatccctcatagacaaaatgtcagtgtcac

SEQ ID NO: 83897 - DNA, 122 bp, Homo sapiens
tttttaagtgcctcttgaactatacgctgttttcttctagttgcagataaagcagtctcccgattaggaatgggatgctggtcatccctgctctcatttgatgccaatggcagaaataagta

SEQ ID NO: 83898 - DNA, 122 bp, Homo sapiens
tccaactgtgtaacattctggaaaaggtaaaactatggagacagtaaaagtagcagtggtcgtaaggattaagataatgtaaagcattttgtaaactgaaaagtaaatgaaataccatcccc

SEQ ID NO: 83899 - DNA, 122 bp, Homo sapiens
ccgcacagcagaggcgttccccgcaccagcatcctgcacaagagccagcaaagagaggcgcgcgtggaattaaaatccggggtagcccccggcttctcactgagcacccaccaccaacaatg

SEQ ID NO: 83900 - DNA, 122 bp, Homo sapiens
ttcctgtcactaggcatgccacgaactctaatgctccactgatgtgttgaaaatattacacgtgggagatggtgaaagcagcatctgtctcacacactcaagctgcctgctctttcacctcc

SEQ ID NO: 83901 - DNA, 122 bp, Homo sapiens
gcggaaacggcgggccactgcgcgggaacgggttacgcggctgacgtccgccgcagcagccgctgggtcctggaggcagaagcctccctgagaagcgcacaataggcagggcgcggtggctc

SEQ ID NO: 83902 - DNA, 122 bp, Homo sapiens
cgtttattcatccattcaaaacaacgctaattagtgtcttttccaagccaagctcagtgccggccaagggacacaggtgaatcagacaaacctctgccctccaagagggcacagaccaactc

SEQ ID NO: 83903 - DNA, 122 bp, Homo sapiens
caaattcctaaagcagaacaaagaaagtgtcagaggggaatgggcacggagcctgtggaccgcactagaatcttctaattcttaggaatgcagatcgccctgtgtaaggggccgctcagagc

SEQ ID NO: 83904 - DNA, 122 bp, Homo sapiens
caccagcacagacacctgcagcagcttgtggatctgcagggacaggcggcctcagcacctcggggacccaccgccctcccgcctggccactcaccaggccagagacccgcatgtccacaggc

SEQ ID NO: 83905 - DNA, 122 bp, Homo sapiens
cctgctaattttttgtattttagtagagatgggctttcaccaagttgcccaggatggcctcgaactcctgaactaaggcaatccacccacctcagcctcccaaagtgctaggattacagatg

SEQ ID NO: 83906 - DNA, 122 bp, Homo sapiens
gagctaattggctcaggtgtaaaccaagccagcagggctgggactttgaagtgagtcagccgcgcagcgcgcccgggaacatccttgtctgcgtgtcaaataccagcctgccgggcccgctg

SEQ ID NO: 83907 - DNA, 122 bp, Homo sapiens
gagcccttgggcccctaaccccgtccctttccggagcctcgggtgcccaaaggcgccggccgccagtcccaggcccgaagggcccctcccactgagtcggctctggtctccccgcccctgag

SEQ ID NO: 83908 - DNA, 122 bp, Homo sapiens
tagtaaagcacgagtggggcaggcagttacattctgactggacgctcctcctcagcggcccggacattctctgcagctccaaggaggaccggtcggcctggcccacggccgtggcagtgcca

SEQ ID NO: 83909 - DNA, 122 bp, Homo sapiens
aggaggccggcgtgaaggaaggggaggggcgttcccgggcagaaacccagctgggcgccgcgtttaaaagcacaaagggagcatagtctagtgagaagctacacgtttgcaagtggtacaca

SEQ ID NO: 83910 - DNA, 122 bp, Homo sapiens
ctgcattaagcgcgtgcgcgcgcttgtgtgtgagcgcgtctgtgcatgtgtgcatgcgtgcgcctgtttgcatgtgggcgtgtgtatgtggggttgtgtgcgggtatgcgggcgccacgcgc

SEQ ID NO: 83911 - DNA, 122 bp, Homo sapiens
tgtcaccccagggccggctgctaggcaactcaagccgtgcccgcgccttccccaatgggacgctggagctgctggtcaccgagccgggtgatggtggcatcttcacctgcattgcggccaat

SEQ ID NO: 83912 - DNA, 122 bp, Homo sapiens
aagcaaaccacgcccggcggccccgcggcctggagagggtccccggcgcgggcggacgggcggtctacctggaggcgctggtctcggccagccggttgttcatgatgcccagcgcgcccacg

SEQ ID NO: 83913 - DNA, 122 bp, Homo sapiens
agggactttaggaaagttttctctgaagtttatatgtgagctaacttgtgaatgatgtaacggagtgaatcatgcatgtatttgtgaaaagagggttttatgtagacaagtgcaagagcctt

SEQ ID NO: 83914 - DNA, 122 bp, Homo sapiens
tttctatcctgaaatcttaacaaaattcgattttaaaaacctcaaggtttgtattcttcacgagtacatggataccttgagttctacctagaggcctctagtttctgacagagctaacttgg

SEQ ID NO: 83915 - DNA, 122 bp, Homo sapiens
agagatgtgcaaaaccatgctgaagagatgaatcatggtcactcacatggtgtatgagtccggtcaggaaacagaagccctcctggtttttcacgctgaggggatctaattgaggaatcaga

SEQ ID NO: 83916 - DNA, 122 bp, Homo sapiens
aggtatgaggtaagtgtgtgccgagtaaagtacacgtgtggatacacaggtcccagtgcacgtgtgtgcatgtccacaggaacgcccccagggtggacaaaggtgcctaggtatgtttactc

SEQ ID NO: 83917 - DNA, 122 bp, Homo sapiens
atgggagttgttaaggtataaggaaagggactcaagataatttgggtattgattaaaaatcgtatacatctgaaattgtatgtattgggtaaactttgctatcagtctttatggtatagaag

SEQ ID NO: 83918 - DNA, 122 bp, Homo sapiens
gcggcggctgcgggctgagcggcgagtttccgatttaaagctgagctgcgaggaaaatggcggcgggaggtgagtggagataaaggaggaggcggtggcgggcgagggggtggagtgcgagg

SEQ ID NO: 83919 - DNA, 122 bp, Homo sapiens
gcggccggggctgaagggagaggcgcaggagccctggggagagtggtccctgcccttccgcgcctcgagccatcgctaccgcccttcggaaccagtgcagcggccgatcagtaaacacagag

SEQ ID NO: 83920 - DNA, 122 bp, Homo sapiens
cagggcaaaggttgggggcctagcccagctcccagcggcaagtacactaggctctaacttcgcttgtcctctctgcaggccctgccgaagctcccgctggtttcccgcagcgatcccgcgca

SEQ ID NO: 83921 - DNA, 122 bp, Homo sapiens
cccactccgtgggctcccgtgcggccctagcctccccgatgggcgccgccccctgctccacgcggccagtcccatccaccacccaagggctgaggagtgcgggcccagggcttcggactggc

SEQ ID NO: 83922 - DNA, 122 bp, Homo sapiens
tcccatatgtcccaacaccagcagagaagggccacaggacctggggtcactgcacatgcccgggtctcattccccagggacagtgggaaaacgcacaccagggagtgctacccactggtcca

SEQ ID NO: 83923 - DNA, 122 bp, Homo sapiens
tatgggatttgtggtccttggattcacgacacacaaaacagaggaacttcccatcatcctcgcagaaatagtggaacatctcctggtgcctcgggcatgtagcctctttccttttggactgc

SEQ ID NO: 83924 - DNA, 122 bp, Homo sapiens
ggcagccaagaaccacagacccaggcggctgcagctcctacttctgaacttctggtctcccgagtgacagcttctgcatggtcttaagctccaggacccccaaggccacccagagtcagagt

SEQ ID NO: 83925 - DNA, 122 bp, Homo sapiens
agatagagaccccacagagaggaggagtccctgcccaacctgaggactcacctctgcctccgggattcttgcctagagagttcccggccaccccgtgcccttggcttatatggcagggccta

SEQ ID NO: 83926 - DNA, 122 bp, Homo sapiens
taggaaaaaaataagttccagcctagatctgccaaacaggggtcccccatctaaagtgggcgggcaagagaattgccaaaacacatcggctacagtcactttcaagtttcttgcaaaaaagc

SEQ ID NO: 83927 - DNA, 122 bp, Homo sapiens
aggcccctccctttatcccagacccgccccggccctccgtagaccacgcccctccgattccgggcccgccccaatccttggtttctggtcccggccccgcccctccgcagacctggccccgc

SEQ ID NO: 83928 - DNA, 122 bp, Homo sapiens
gggagggctggacgggaagagggctgctaggcccggtcagagaggacttcaggcagggagcgtggaagctgtggacaggacagcttttagctctgggagcaggtgctggagccaagtcacac

SEQ ID NO: 83929 - DNA, 122 bp, Homo sapiens
cctcctctcggccacgccctttagcacccaacccctcaacaggtaatgatcctctcttcacgtggccattgcgggtacatgattggtttcctgtactgactgctcttctcgtgagaccaagc

SEQ ID NO: 83930 - DNA, 122 bp, Homo sapiens
gtgcactgccatcgctccctctacacgagccggcgtggacccagggctgagctgtgaccacgagggccatcccgacgagccgccatggacccagggctgagctgtgaccatgagggctatcc

SEQ ID NO: 83931 - DNA, 122 bp, Homo sapiens
caacggctcctacacgtgcgaaggtgggccaggcgggcgggtctgcactccggggcctgccgggtttcgttgctgcctttgtcaacattcatttatggcttcttagtgtcacttccatacat

SEQ ID NO: 83932 - DNA, 122 bp, Homo sapiens
aaaaacaaaacaaaaaaactaagttgaccagtctgttttcactggtatgagagcattaaccgcactagatttcaagcacctgaaggcactagtttgtaattactagctggttggcacagtcc

SEQ ID NO: 83933 - DNA, 122 bp, Homo sapiens
ctgtatggcctttacccgtcatctgttcatctgacaaacattttctgagcacctatcttacgttgggcagcctcgttcctgtcctgtcccccagtagcgtcattgtctcttcccatctgtct

SEQ ID NO: 83934 - DNA, 122 bp, Homo sapiens
catggcggagtcctaggttcagcaggtgcgaaagcggggcttcgtggcggaagtggccgacggggatttaagtggcacatcatcgcctgggaacctacggggcctggctctgtgctgggggc

SEQ ID NO: 83935 - DNA, 122 bp, Homo sapiens
aatcctctggctgtggttgactggctttccccggcatcgataacaacgacccatgaggggcgagccgggtagggggcgtgggggtagtggtgggagtgtgctctcacttgctatcttcttcc

SEQ ID NO: 83936 - DNA, 122 bp, Homo sapiens
ccaccctaaggggttttggcgtgggcaagcgcggcatcgaggaacgcatccaggaggaggcgggcttcctcatcgacgccctccggggcacgcacggtgagtaggggaccccgagtgcgagg

SEQ ID NO: 83937 - DNA, 122 bp, Homo sapiens
gaagagtggtgacagaggtcaacacagaaataataacagccttggtagctttaaaactagcgttaggactcaagtttgttctgccctgtagaatgttgaccttcagcttttatgaaaatggg

SEQ ID NO: 83938 - DNA, 122 bp, Homo sapiens
tcgccaagaaccggaacctgcactcacccatgtactgcttcatctgctgcctggccttgtcggacctgctggtgagcgggagcaacgtgctggagacggccgtcatcctcctgctggaggcc

SEQ ID NO: 83939 - DNA, 122 bp, Homo sapiens
agccgcctgacctgtatacagtattctgaaaagggggtcgcgaggtgcatgtccaacctccgccgccgggggcagcagcgagtccaggccgagccggggcctagcgagcggggtcaaatggg

SEQ ID NO: 83940 - DNA, 122 bp, Homo sapiens
cccaccgctgcttcctctgacctggctgcagagatgagaccgccctccgggcaggtgacacggcccttgctcttcagcctggaggccaatgcttcctccaaaggccctggccccctcagctc

SEQ ID NO: 83941 - DNA, 122 bp, Homo sapiens
ccgggaaggggtggggtccggcggaactgggaatgtgcacctggagccccaggactaactcggggaggctggaggcgggctgcgcacttggcctgggaaccgaggcggccaggggggcggcg

SEQ ID NO: 83942 - DNA, 122 bp, Homo sapiens
aggattcggtgagccagtttgtgtgaagggcccagcctcctgcctgtccctttacattcccgtccctgctacattggaatagcagggccgaggcgggcgcgaccgcgttgctaagaagcgca

SEQ ID NO: 83943 - DNA, 122 bp, Homo sapiens
gagccgactctaaccaagtgggaaaggcgaggtccgtggctgcctgtggcccaggggtgacggtttggcccaaggccccacctccgccccgcccccggccccgcccctgttcttgtcctccc

SEQ ID NO: 83944 - DNA, 122 bp, Homo sapiens
gctggccacggctgccgggcggctcggctccggagccaggtggggacggggcctcctgcacggagtcctctctgagttgaggctgagaatggagcaggaaaactggagcagaaagtggacga

SEQ ID NO: 83945 - DNA, 122 bp, Homo sapiens
ggcacgagaactgctgaccacttcctgcaggcctccgacccggcggcccagccacccatccggctggggtggccatcagtcatctggaaagcctatgagccccgtgtcctcgttttgcaaag

SEQ ID NO: 83946 - DNA, 122 bp, Homo sapiens
ataagttcttatccatatacaattggcttctgggtcctacctgttctatcccctggaagtcgctagcccactctttattcttcattttttctgtctccagaatgctttctactgctccagta

SEQ ID NO: 83947 - DNA, 122 bp, Homo sapiens
agccggatcgggccctctttttaagggaagaaagtctggagtggaagggagggcacagggcgccaggagcctacatgaagtccttccagaaatccacaacagctacctctctgatcctggag

SEQ ID NO: 83948 - DNA, 122 bp, Homo sapiens
cagggcacagtctccaggagggacaggagcagatgcctcagtggaaaaccaggactttatcgtgcaagggctgcagagtaagcagctggtaaggaaaaatcgagtgtcaaattcctgctcta

SEQ ID NO: 83949 - DNA, 122 bp, Homo sapiens
gacggggagcaggtgggcggggacagggcccctgctggaagaggcgcagcagcgaggtggcgggctgcgtgcgcaaacagggcggccgccttctgggcccggagaacggtgaggccatttgg

SEQ ID NO: 83950 - DNA, 122 bp, Homo sapiens
ttgctgctaagaacccaaaacaataggctgaaagtcctgctgatgcactgccaggaaagacgcagagtacgagaccagtctagctgaggcctgcgcaccgccgggaaagacgcggtgtccga

SEQ ID NO: 83951 - DNA, 122 bp, Homo sapiens
accagggcctacttgagggtggacctacttgagggtggaaggtacgaggagggtgaggatcggaaaaactacctattgggtactatgcttattacctggggaggaaataatctgtaacccaa

SEQ ID NO: 83952 - DNA, 122 bp, Homo sapiens
ccaagaattcagctcaggaatatattcacattttctgttctttctactccccactgttttcgcaagataccaggctactcctttctccgatcttactccaaaggaaagatgtccctactagc

SEQ ID NO: 83953 - DNA, 122 bp, Homo sapiens
cagggagcccggccccttgtgtaaacacaggagggcccccacaggcccctggaggaggtccgggggtgcggctcacacgctttctttacctgtgctctcccagggggtgaacgcccctctag

SEQ ID NO: 83954 - DNA, 122 bp, Homo sapiens
gggactcagcttttcagagatggagggctgccgtaacctacttggcctactggacaacgacgagatcatggccctatgcgacactgtcaccaaccgcctggtgcagcctcaggaccgccaag

SEQ ID NO: 83955 - DNA, 122 bp, Homo sapiens
tcgggggtccctgcccccggaggaggctggccctgggtcagcagggaggtcccgggcacccggagctttggcccagccccagactccacgcgcccctggctagagagtccgcctcaaggtcg

SEQ ID NO: 83956 - DNA, 122 bp, Homo sapiens
gagaagcgaggggcccactgggaacgggaaggcctgagcaagacagacgcatgcccggggcgaggaaggggagcctggaaatccaccctcagaagaatcagacacgttttctagactttccc

SEQ ID NO: 83957 - DNA, 122 bp, Homo sapiens
ttccttttgagtcttcgtggagctgtgagctggatcacaaggtccccggggcattctgggcgggaaggccctcctccatccagagggcggcggccgagctgctccggggagtgcgcctgtgg

SEQ ID NO: 83958 - DNA, 122 bp, Homo sapiens
agacaaaagaaaaccacttaaacatcagctagctgtgccagacatttgtccctctggccacgtcttggggacagcggcgctgcggctctggcccgtgggatcctggttgggctcagccccgg

SEQ ID NO: 83959 - DNA, 122 bp, Homo sapiens
tacctgcaccaagggaatatttaaagcctctgggacaacctggctgcgtatcatagtatacgccctgcaaagagactaggataggaatgccacctgcacacagaggaggatttggaatgtgt

SEQ ID NO: 83960 - DNA, 122 bp, Homo sapiens
gctcagcaggtctcaagcccgcgctcactcgggctccggctgctgacagctgcgagcccgcgcgtgtatacccgctcaacgctgggacgttacagccagggccaatgggcagagcgggactc

SEQ ID NO: 83961 - DNA, 122 bp, Homo sapiens
tgactcaatccaaagcaattctcactgcctgcccctacaaagcctcagtgaatgtcttaccgtcttgtagtcatgtgtcacttaacaatggggccacattctgacaaatgcattgttaggca

SEQ ID NO: 83962 - DNA, 122 bp, Homo sapiens
ggattacaggtgtgagccactgcgcctggccagggttccttactcttggcccatcctggccgtagggggaaggcctggtctgatgacacaagtcagctgggaccagacaagcatgcccggga

SEQ ID NO: 83963 - DNA, 122 bp, Homo sapiens
cccgtctccacaaccaccagattatctcaccggcgagtgagactgcaaggtttgggggcccggccgtaccactccgcgctgcgcacggggggttcgtacccatctggccgcgaccgtccgtt

SEQ ID NO: 83964 - DNA, 122 bp, Homo sapiens
cgtcgtgcgggtggtgcagagccagcctgctcacccgcggaccccagcgaccccggttcccgcagggccaagtcagttacacataggccctgcccttgctatctggcgaaaggaacaatctt

SEQ ID NO: 83965 - DNA, 122 bp, Homo sapiens
tgaggactgatataaaattagtcattatatatcactataaattacttaccataagagcctcggccagccattttatgaaattgttgccaagtgagaggaccctgaacaccccaaggtcttac

SEQ ID NO: 83966 - DNA, 122 bp, Homo sapiens
ggcagccccttgcatccgggagagccccgcggagcctggcgacaggaactgctccagtcacggtcagcactgcggccatcagcaccagcactggcatgcagtccccggtcatgtctgtgtca

SEQ ID NO: 83967 - DNA, 122 bp, Homo sapiens
ccaggagtttgcaaaaggagccccctttccctccttttgcaaactccagactagcctcagcggggagtcattggcctccggctctgctgccccctacaggttattaagccgcttcttacccc

SEQ ID NO: 83968 - DNA, 122 bp, Homo sapiens
gagcttgcctcggggcccgtggcccggggaagctgtgggaggggcgggagcaggcagctccgggggcagggccaggtggtcaaaggtgcacacagtccccacggctccctcctgacggtcgg

SEQ ID NO: 83969 - DNA, 122 bp, Homo sapiens
tagaatcttctaattcttaggaatgcagatcgccctgtgtaaggggccgctcagagcgcccgaggagcgccggtggcctcccttggatgcttcgctattcatcccaccttctggaagaggct

SEQ ID NO: 83970 - DNA, 122 bp, Homo sapiens
tgagccccactgcctcgcgggggccgccttcctgagagtcaggtcacagaagacactgaccgccggcttctgcattgtgcctggggataagatctcggagagctgctcgagttgcccaagtt

SEQ ID NO: 83971 - DNA, 122 bp, Homo sapiens
ggggcatgaagccgctggagaaatttctgaagaagcagacgtcgcagctggcgggccgaacggtggcgggaggtcccggcgggggtctggggagctgcggtgggcctggagggggtggggga

SEQ ID NO: 83972 - DNA, 122 bp, Homo sapiens
ggaggatttcattttagtgtcttggaggatggaagttttgacttcatgtggtgctcttgccgatagatctggtaccaaaggcagactcagagaggttcatatcaattgcctgatttactgct

SEQ ID NO: 83973 - DNA, 122 bp, Homo sapiens
gattggcaggtgggagcctcggcatcccggggacctgccaattccctcgggccgcggggccggcccagcccagcagagctgtctgcctggtgtgaaaatgaagattgatcatcgtggaaagg

SEQ ID NO: 83974 - DNA, 122 bp, Homo sapiens
tcctcatctgtgagataggaagactctaagaagagtcacttccatcaggactgtgaagatcgaatgagataataacatttaagcacttcgggcagcctctggcatgtgatgggccccaagtc

SEQ ID NO: 83975 - DNA, 122 bp, Homo sapiens
ggtgatccacctgccttggcctcccaacgtgctgggattacaggcgtgagccaccgcacccggcctggacctgggatttttgtaaaatttgtaaaagaaagatttttttttctgttgctttt

SEQ ID NO: 83976 - DNA, 122 bp, Homo sapiens
ggggtccggagcgggtgttgggggcaggggagggggcccggccttacgtgcttgaggcagcgctccttgagcttctccaccgaggtgtcctcggtggcctcctccagccactcggcgccgtc

SEQ ID NO: 83977 - DNA, 122 bp, Homo sapiens
ctgtcacctgggaccagagctggcttcaaagggcaggtgtgctctgctggagtgcggatgcgcggagtgtctgggagctgggctgggcagaatggctggagcaggggtctgtgtgggcacca

SEQ ID NO: 83978 - DNA, 122 bp, Homo sapiens
gcccgagcctgagctgtgtgggcacctagagcctcatcagcagcctctgctattgccttgcgctttgggaatatgttttttaaaattggctttttttatcctattctggggagcacattcct

SEQ ID NO: 83979 - DNA, 122 bp, Homo sapiens
cataggtagaatgtttggttttagagttttataagaggagtatttgacttttccttatagcgatctcagatttcattaagtttgtgttttaggatgatttataatatcagtctatgatttgg

SEQ ID NO: 83980 - DNA, 122 bp, Homo sapiens
gcccctctccctcctcgcggctgcggcgcccgcccgccctcaccggacttgggcgggtagcggtacacggaattagacgggatgtccacctcctccacgcccgcgtgctgccggctcgtcag

SEQ ID NO: 83981 - DNA, 122 bp, Homo sapiens
ggccatttttaacactttctgtttcacagctgggattattttcctctctcagaatccaggcgatgaacctgacggcctctggttcacaggattacttggtgaaacctgggtgtggagcaatg

SEQ ID NO: 83982 - DNA, 122 bp, Homo sapiens
gtccaacaacgactccagcgcgtccattgctacttcagtcggcggcgcccggggcgcatgcgcaacgcaccgccaagggccttggtccatcgcgcctgcgcacaacgatccggggcccgggg

SEQ ID NO: 83983 - DNA, 122 bp, Homo sapiens
cactcgctccaccttctccaccaattaccagtcccagggctctgtcctggagcccagctacggttccctgccagtcagcagtgcagccagcatctatgcaggagccgggggctccggttccc

SEQ ID NO: 83984 - DNA, 122 bp, Homo sapiens
atcactcatgtgttaagatttaacatgtaagtcctttatctagctgagagatcccagattcgggttcctgccccgtcagtaagggaagatacagcaaggagtttgtaaaagcactagcccag

SEQ ID NO: 83985 - DNA, 122 bp, Homo sapiens
tcactttagaagtacccactggtacaggaacagttgctatgctaattacaaagcaagttccgctccacattacagcaggttccctgcagatcttagcaaggctgcattttgacgtggaatat

SEQ ID NO: 83986 - DNA, 122 bp, Homo sapiens
ccccggcggccgtccagcgggaggcggagcgagtccaaaatggcggctctcaggctggcgcgctccgtgctgctggggctttgaggtggtcgccgggggtccgggggaccctttccccgccg

SEQ ID NO: 83987 - DNA, 122 bp, Homo sapiens
aaaagaaaaatgaaacaaaaaagtcaaactcttaaaaacaaggccggccacccacacagccgcctccccggctggagtccgagccgggaaggggtagtgggcgggagggaccaggacgccgc

SEQ ID NO: 83988 - DNA, 122 bp, Homo sapiens
cattatttgttattactattatccagcagcctttgctagagggttgccccgatctcctgacgcttggcctgagagattctatagtgcccagagataacagatgataccctgggaatccctag

SEQ ID NO: 83989 - DNA, 122 bp, Homo sapiens
ggcgttagcgccgagactcctgtttgaccgggaagcctttgccctgtggctaatggaagccgagcaggcgggaagggaggaacaaagcttgctcgagtggaggaagcgcgcagagctgttcc

SEQ ID NO: 83990 - DNA, 122 bp, Homo sapiens
gcagggacgggaagctggccaggcgcaggctgtgctcgcagggacgggaagctggccaggcgcaggctgcggtgtggcacagggggaccaaccagagggaaaggctgaccccctgggtgcct

SEQ ID NO: 83991 - DNA, 122 bp, Homo sapiens
aatggagactctaaccaccttctgagaatcccagccctggggtcaaacctgcatgcctgccgagtgcctgcatgacaataattaggatttcctatgctctgaagcaaacctcccacctggca

SEQ ID NO: 83992 - DNA, 122 bp, Homo sapiens
cagcaccaccagctggtctcctccgctggtcacgctcagccccgtcacctgagcggagcgcggggtcagagtgcagccgcctcaacccgcaccccagcctagccggactcaccccctcccca

SEQ ID NO: 83993 - DNA, 122 bp, Homo sapiens
ccgcgggaccttggcgcttgagcatgcacgacggaaactcagtctggctcagggaggtggcggcggcggcggcggcggtggctgtgtgggccagggaccagatgcgcggcttagcctccagg

SEQ ID NO: 83994 - DNA, 122 bp, Homo sapiens
cattccttctgcaacagccttaagaactaggcgttcttatcccaatttcacagacgaggacgatcaagtcgttaatttgtcaaaggtcacccgcaggcgacaggcggggacagggtctggga

SEQ ID NO: 83995 - DNA, 122 bp, Homo sapiens
ggatacactgaactggttttgaagcctgaactgcagagatcctaatatagcaacgcaggacgtttacggccacccgccagtgacagccggtgatgtgatgacaggagggcctgggtgaaaat

SEQ ID NO: 83996 - DNA, 122 bp, Homo sapiens
agaaaggcagatacccagagctagcgaggaagtaagcaagacgaaagccttgctcgctgccggcaggagtgtcaaacagtgaagccgttttagaaaacaggaggctgttaacctagagtgac

SEQ ID NO: 83997 - DNA, 122 bp, Homo sapiens
ggcgactgcgccgggcggggcagggcggggaggttccggtgcctgagccaatcggagccgcgccccggggaaccgcagccaatcgccaaggagagaggagaggggcgtggccgcagggctcg

SEQ ID NO: 83998 - DNA, 122 bp, Homo sapiens
tgaactcctgacctcaggtgatctgcccgccttggcctcccaaagtgctgggattacaggcgtgagccactgtgcctggcaagatttctttaagatacataactagaaatggaatttctggg

SEQ ID NO: 83999 - DNA, 122 bp, Homo sapiens
tccccaggcaggcagcgtcccctggtgttcgcggcagggactgcggggcggggtggaagccgggggcaaggacccgctggaggcccgccacacccgcgaccctcccggccacgccactgccc

SEQ ID NO: 84000 - DNA, 122 bp, Homo sapiens
ggctgcggttttgggggaataaatggggccctcccgcttctctgcagcgcccgtcgacagcgtccctggctagcgtctagtgtctcgggctagaaataggaaccgttaccgtcgtacctcga

SEQ ID NO: 84001 - DNA, 122 bp, Homo sapiens
cctcgcgcggcggaacgctccgcgctgcgccggtggcggcaggatacagcggcttctgcgcgacttataagagctccttgtgcggcgccattttaagcctctcggtctgtggcagcagcgtt

SEQ ID NO: 84002 - DNA, 122 bp, Homo sapiens
ggattgttgatatgtttgtttttgttgcaatggtaggtcactctagttcttacgtctgggcgtagaataacattacttgcacaagggtgctggcggtaggagctttgcaagagattgtaaaa

SEQ ID NO: 84003 - DNA, 122 bp, Homo sapiens
caaagtaatacagcacataatttacaatacaaaatgatatttcaatactacttcaggggccgggcgtggtggttcacgcctgtaatcctagcactttgggaggctgaggcaggcagatcact

SEQ ID NO: 84004 - DNA, 122 bp, Homo sapiens
gaggaacaggacattctgcagcgactccgagaaaatgctgctcaccttggggacaagcgccgggacctggcccacttggctgccgaggtggagggcaagtgcttacagtcaggcttcgagat

SEQ ID NO: 84005 - DNA, 122 bp, Homo sapiens
tttcttacaacccatcaaacatgaaaaagccactctgtattctgcagcaggccatcgttgcgggcacctccctggaacaagagggcttgggaagatgagcagcgtggtttaggaacgtggct

SEQ ID NO: 84006 - DNA, 122 bp, Homo sapiens
gcggagggcgcggcccagggcctgctgggagtcgtagttctaacgcgtagtttctcctcacgcctcctgcccccagccccccaccgccgccctttccggcttcaggcccagcaatcttacgt

SEQ ID NO: 84007 - DNA, 122 bp, Homo sapiens
taaggatgctggtcattggatttagggctcaccctaattcgttgtgacttcagtgtaattcgattatctctgcaacccaccccatttccaaacaaggccacagtcgcaggtacggagccagg

SEQ ID NO: 84008 - DNA, 122 bp, Homo sapiens
gtgcagaaggctgtgaccttgaccctttgctgggccattaacacttggctgtccacggaccgcacgctgagtgaaatgagccactacagttccttcccacaaagggggtcaaggtcaaagga

SEQ ID NO: 84009 - DNA, 122 bp, Homo sapiens
gtgccagggagggaggggagcgggccgagccccaaaatagggagtttgcatttaccacgacgcctcgcccgtagtctggcgcctcctcgctgctcccggccatgtttctcccggggaacgcg

SEQ ID NO: 84010 - DNA, 122 bp, Homo sapiens
cccaacgtcgccctcccggggtccttgtctagtctcagcaggcggcaaacggaccccaggcgtctggcgctcacccaggagactgcccagcggtttctggagagagcgctaagcggagacgc

SEQ ID NO: 84011 - DNA, 122 bp, Homo sapiens
ctcttcactggccagtcctccattgccacctggtggccattgccccacgacagccgggaccgccaacctgcccgacccgagctcctccaggcaccggtgcctcctgggtggacactgggcag

SEQ ID NO: 84012 - DNA, 122 bp, Homo sapiens
ctccttcttggccttattaacctgtcttgccctcgggtacaaacataaattgtgcacaaacgccatgcaaggaagtgatgcctcctcaactgccattggcaaatcagaggacctaagcgtgt

SEQ ID NO: 84013 - DNA, 122 bp, Homo sapiens
cccgaagatcccacgggagagggacgcacagcattgcctgcggagcgagaatgtaggccccgccccctcggcccctcaccttctctttctacagcctaatttattggattccctattcgtag

SEQ ID NO: 84014 - DNA, 122 bp, Homo sapiens
gtgtacccggaggagccctgaagaggtcctctgtggcctcaaggctaaggcagcagagaacgtgggacaggcaaacagcaggggagccacaagctgtgccctgcagaccgctcctcttactg

SEQ ID NO: 84015 - DNA, 122 bp, Homo sapiens
gactgaaccccaagggcacgcctcaccagttctccctcctgggccctgcctggtccctggcggcatcaggcctcgctggtcatcaagttcaagaccctggcagtgagggtgcccaaaatggt

SEQ ID NO: 84016 - DNA, 122 bp, Homo sapiens
ccgccctcctcttcaaggatgctgttttgcctctggtcgctctatcttatcttttttctccgcactcctggacgtctctcggacctttcgctctgacagtggcttgagcctcggccgccact

SEQ ID NO: 84017 - DNA, 122 bp, Homo sapiens
aggccaatatcagatgaatctcaaaaggggtctaaatgaaaaactttgggagaagagcaacgtgctctgcactgaccagaagaaaggcattacttcagtattttctgtatatggcttgatta

SEQ ID NO: 84018 - DNA, 122 bp, Homo sapiens
cgctgcactgtgggggctcctctctggggctggtcgaggtcggagccggctccctctgctcgcggggaggtgtggagggagaggcgcgcggcgcttgcaggccggcgcgggttccggatggg

SEQ ID NO: 84019 - DNA, 122 bp, Homo sapiens
cctgggatcgctcggaggggaattcacccagcgctgcccctctcgtgttaagccccacgccggcaactgctgctggagcctgacttgactgactgcctgtcgtgtgttcgagagctgtggct

SEQ ID NO: 84020 - DNA, 122 bp, Homo sapiens
tgtaagcccaggtgcaccccagctggccaggggttcacctgcatttgctccagcggtttgcgtgacttcccaggcctctgcaggcagccttggagtgggttcctgccccctcgggcacacaa

SEQ ID NO: 84021 - DNA, 122 bp, Homo sapiens
atggagcgggtgaagatgatcaacgtgcagcgtctgctggaggctgccgagtttttggagcgccgggagcgaggtaatggctgggcgccgctgcgtgagcccgagcgctactaatctttttc

SEQ ID NO: 84022 - DNA, 122 bp, Homo sapiens
gctgaaatctagtcttcctaccaactccttccaggccctggaaaaatgacttccatctaccggctgtgaggaagagctggcttcatttttgatctgactgctcacagcctttaagcctctgc

SEQ ID NO: 84023 - DNA, 122 bp, Homo sapiens
tgactccacagaccaagatactttgaccgtggcatttgaatacatggtatttttaggtcccggttggtttccctgaaatgaaactcactctgagcttcctgttgtgacgggcgaggagttca

SEQ ID NO: 84024 - DNA, 122 bp, Homo sapiens
ggtgggggccagataagagaataaacgcagcctgcccgagctggcagtggtagtttgctccggtttctttccacactgtggaagttttatttttttgctctttggggtaaatctggctgctg

SEQ ID NO: 84025 - DNA, 122 bp, Homo sapiens
ccgcccgtgggcaccagggaggtgtcctgggacccccgcgatgggatagacggtgggggccgcgatgcacctgccccgcccgacccgcacgcctcgggtgccgcagcgcagctaccccgccc

SEQ ID NO: 84026 - DNA, 122 bp, Homo sapiens
cccaggtacggggagtgcagggctgggtgctggtccagggcgtgcgggcgcaggagagggcgtgcaggccgggaccgaggtgcgcctggagaggctgagcggccgaggagaggctgagggga

SEQ ID NO: 84027 - DNA, 122 bp, Homo sapiens
aacctgcagctggggggctggggtccaccgcctcctgtcagccacgcccgaccggtagaacgctcttctgcagaaacttcccagacctccacttaatggcacccaagcagggcgccctggca

SEQ ID NO: 84028 - DNA, 122 bp, Homo sapiens
tgtgatctgcccgccttggcctcccaaagtgctgggattacaggcgtgagccaccgtgcccggcctacttcaaaggattttcacaggggattaaataagctaacacatgaggaagagcagga

SEQ ID NO: 84029 - DNA, 122 bp, Homo sapiens
agatactttcacttatgtcgtaatttctatgtcatttggtgtaggatgtagagatattaacgtttacacctaacttaagtttgtcatctaagacctgaaggggttttgtctatcagctgcac

SEQ ID NO: 84030 - DNA, 122 bp, Homo sapiens
cgaggcctgggcggtgggtatggagggcaagtgcgcccagccgaggcccagtaagatcgccggcctttcccaaaggcgtttggctcacccatctctcctcggctagcctcttggtctcccct

SEQ ID NO: 84031 - DNA, 122 bp, Homo sapiens
ctttatcagtgatggcaagggtgtcctttccagatcactgttaatgatttgcctgtgggacgctccgtggatgaggctctgcggctggtccaggccttccagtacgcagaagagcacgcgga

SEQ ID NO: 84032 - DNA, 122 bp, Homo sapiens
cgaagtccggagagcccttaagtgtgcggcacgcagagctcctcagcagcggcctgacagcggtgcaggagaccccagcttcctgggctgggacagggctgttgtctcacggtcttgttcca

SEQ ID NO: 84033 - DNA, 122 bp, Homo sapiens
cgcggggttacagcagtggacagacaggccagtccctgtcctcgaggagcccatgatccgcggggagacaggcatttaacgacgactcacacgatcacttaaatacaactgtggtgaaccgc

SEQ ID NO: 84034 - DNA, 122 bp, Homo sapiens
aaagatctgaggaactagagcaaaaagccatgcggatggattgtggtcgtcagaggctcccgtagtctttagcggcgctggcttccgcaggctccgccctctcttgcccacccggaaacagc

SEQ ID NO: 84035 - DNA, 122 bp, Homo sapiens
agagtgagctggggggaagaggagcggcaggccctgcttgggcctcgctcgggagctgtccgggaccaggagctgtccccgaccaagagctctcttcaaccaggggaagaaaggggagctgt

SEQ ID NO: 84036 - DNA, 122 bp, Homo sapiens
ctgcctctcgggttcacgcaattctcctgcctcaccctgctgagtagccgggatcacaggcgcaccacgcacccagctagtttttctatttttagtagagatggggtttcaccatgttggcc

SEQ ID NO: 84037 - DNA, 122 bp, Homo sapiens
tcctctgggagtgagacctcaagacaactgtggcagttcctgatagaaacactaaataaacgaggtcctctgtggcaagggctgacgcttccagaagcttctgaatagatcattctatttga

SEQ ID NO: 84038 - DNA, 122 bp, Homo sapiens
acctcagtgggttcccttgtggcccgacgtctccctgtgtcttcatacctaaactcggagcggggcgccaggtaaggatgagtattacagtccgagaagcgaacttccaagtcacctccgcc

SEQ ID NO: 84039 - DNA, 122 bp, Homo sapiens
ggagaatgcactgacttcctttaatcttctttgccgcagagctgcagagagacaaggcggcggcggctgctgtgctgggtgcagtgaggaagaggccctcggtggtgcccatggctggccag

SEQ ID NO: 84040 - DNA, 122 bp, Homo sapiens
aggtgtctgagaattcctcctcctgggactttcagaggatccagagctgcagtcggtcctcgctttgctgtccctgtccctgtccacgtatctggccacggtgctgaggaacgtgctcaaca

SEQ ID NO: 84041 - DNA, 122 bp, Homo sapiens
gactcatggggccgcctgagagcgtcgggtttgtttgtgcagagtttgcaggggctgctgcgccgcctgcaccttgcctaccgctgctgcaggcaaaatgcggagaggaggctagcagaccc

SEQ ID NO: 84042 - DNA, 122 bp, Homo sapiens
acctggggagatgagaatgtcagtgagcgctggtgcatgtgctgacagtattgttaatggcgccgtttccacatctgcaggcagacttgtgctccaaagacagttatcggagttgctgcaaa

SEQ ID NO: 84043 - DNA, 122 bp, Homo sapiens
ctgcactcacacctgcttcgaccccaagcagatcagatgtggcagtggggggtcatgtgacggagaggggtctataaatagctggaggtgggcatgctgccccagacgccttggggacagca

SEQ ID NO: 84044 - DNA, 122 bp, Homo sapiens
cagtgaaaagcgcgtgttttacgtgtccagttgctcttaatagcagatacctgccctggacgccagtggcagcatgtgccctctgagcagcggccttcagcttcccaggaacacggggctct

SEQ ID NO: 84045 - DNA, 122 bp, Homo sapiens
agagggaggagggaaagctcttagtcacatgctgcctttgcctaagccctggcagcctcccggaggtgtgaggttctgggaaatggtccctccagtgtagccccagggacagctccttgagg

SEQ ID NO: 84046 - DNA, 122 bp, Homo sapiens
aggcgccccttttcctaccctaacccagcggctcccacgctgtgtggccggggagaaccgcgagggagggttcccagattcgtgatggatcctttagcttcacagcaaggagcgctccaacc

SEQ ID NO: 84047 - DNA, 122 bp, Homo sapiens
aagcgctttctattcagtcctcaaatgcaaagcagacccttgctaataatggtaataatccgaatgggtttaactgcagcattgtaagaaaaggcaggcagtactcttagactacaggggtg

SEQ ID NO: 84048 - DNA, 122 bp, Homo sapiens
cttaatggttggctggccctaggattcagtccttggacctcttctcttgcacactccatgcgtgatttcatctagtggcctctgaccgcatatttcgttctctctcttatttctgtctctat

SEQ ID NO: 84049 - DNA, 122 bp, Homo sapiens
ctgaggtctcacccctctcccaatctagaggatctcacatcttcctttgaatttagtactcggcatctttgtgggagctgaggaccttgaagaagagattgctcagagacctcttaccaggg

SEQ ID NO: 84050 - DNA, 122 bp, Homo sapiens
aatgataaacccggcacggtcctgagaggaaattcctttgcttcttaaagctgccagtcccggctttttgggggctcatgtgttataaattctggaagctcttttagctgcagtttgagcat

SEQ ID NO: 84051 - DNA, 122 bp, Homo sapiens
ccttagtgtctaagaagtaatttgtgcctctttgccagaaatatgctcgtgttgcattgccgtttctttgtatatattacttgctttccgaagtgtattatgggttccctaaggcccacttt

SEQ ID NO: 84052 - DNA, 122 bp, Homo sapiens
tcataacaaccaggaaagttggcagaacaaggatctttctttctacccatttttcagatacgttccattcagaaaagcccaaaaaggcaatgactgccccaaggtcacccagagtggcagaa

SEQ ID NO: 84053 - DNA, 122 bp, Homo sapiens
ctgactttgtgaggatttcccaagctggttggtgcatgggcttcctcacttttttcctcacgaagaggtctctggtctcccctctctgagcactctgaggtagggttgctgtgtgttttgct

SEQ ID NO: 84054 - DNA, 122 bp, Homo sapiens
gagaggcgagagcagcgtgatgccctcccagaggcggcagcgctgcagagggcagggccacgtcctgctgcccttctctcccctgcccagggaagcggcagagcttctcctcggggagcggt

SEQ ID NO: 84055 - DNA, 122 bp, Homo sapiens
ctccctggtctctaggtggctcgcacctgccacacgacactccctggtctctaggtggctcgcacctgccacacgacactccctggtctctggttggcatgcacctgccacacgacactcct

SEQ ID NO: 84056 - DNA, 122 bp, Homo sapiens
ttggcgtgaacgtggcgtttgtgggagtgtcactgagatggcccgtgctgccgcccaccccgcctcggagcctctgggagcagcagtgccactgtgcatggcgtgggctgagccttggtgtg

SEQ ID NO: 84057 - DNA, 122 bp, Homo sapiens
ctgttgtaaccagcacgtgggtaaaaggcaagttccacatcacccgacgtggaagctccccgatgcccacgtgcgccctaccctgtgaccctctcccatccagggccctgatgcccacatgc

SEQ ID NO: 84058 - DNA, 122 bp, Homo sapiens
aattgcacctgaatgtcttttcctcctgcctatctccactgtgtatactctattgtatcacgtggtgtaaagatcttggtttcctctgcccaatttaaagaatgtatgacacaggggggtgc

SEQ ID NO: 84059 - DNA, 122 bp, Homo sapiens
ctaaaaagacaagttttactttacaatgcaggataatgagcagccttcactactcattctcgacgttaacagaggaagatgccgctgcgcggcaggagcgcctcaccaggacaaagcggggt

SEQ ID NO: 84060 - DNA, 122 bp, Homo sapiens
cacccacaccaacctctggcctcagcaggcaggaaaggcggctcagaggcatcccagatccggacacctgatccctctctgtgagtgccctggtgctggcttcttttccttcccccttccta

SEQ ID NO: 84061 - DNA, 122 bp, Homo sapiens
tttccgcagcggaaatgagaaagcagagggagttctatcacaaattgggcatggaggtgccgggagacatcaagggggagacctgctctgcaaaacagcacttagattcccatcggaatggt

SEQ ID NO: 84062 - DNA, 122 bp, Homo sapiens
cagacatctttcctgttgtttctgtttgtacgacttagtcaggaaagataccttgttaaacgttgcacagagagtgcagcttaacttgcagagtaagttgcttactatacagcacatttagc

SEQ ID NO: 84063 - DNA, 122 bp, Homo sapiens
tgcggctccttccccacggccacctatccctgccgccaaaaacgagttaatctttcaccgcgaaaacggccttgtgggcagacccactccaactgtggcccctgagaaaccaagtcagccgg

SEQ ID NO: 84064 - DNA, 122 bp, Homo sapiens
ctgctgcccagcacttaaggtagagatttgggaagaattgaagcagacagcgtggaaaagcgccgtaggatcttgcgttcggcgctctcccagtggaggccaacaccaaacaagtggggaag

SEQ ID NO: 84065 - DNA, 122 bp, Homo sapiens
tttgggcatctgcagagggcgaggaactggtcacggcgccgggtgggcttgcagctgtgacgcttatgtggacacctcagtgtcgctggtggttcacctcggcttcccagtttatttattga

SEQ ID NO: 84066 - DNA, 122 bp, Homo sapiens
atcctgactggttgcgcacttgctaagggcaggaagtctggagggctgcaggaatggtgccgttgataaacaggtggacttataatcatcatgcactgcaattgtagaacatagtctcctgc

SEQ ID NO: 84067 - DNA, 122 bp, Homo sapiens
gaagctgcagactttcgcggtgagtgttacagctcttaaggcggatcgtctggagttgttcgttcctcccgtccagagttgttcattcctcctgctgagttcgtggtgtcgctggcttcagg

SEQ ID NO: 84068 - DNA, 122 bp, Homo sapiens
ctcttcctcgtctcccgcccccgccccccatctttctccagctagcctcgccccaattaacgccctacagccagtcagccttacacctgctggaaaaatcttggtggcagtggtgggaggtg

SEQ ID NO: 84069 - DNA, 122 bp, Homo sapiens
tcttaccctggtgcgtggggccgcagggctaacaccaacaattcatccgatggagcatgtcgaggtcgagccagaagacttgtccaagcaggttcctgagcaacagttgctctaggcaagta

SEQ ID NO: 84070 - DNA, 122 bp, Homo sapiens
gaaactgcggaaaggctctgcctcctgttctggaagcttctatctcatgtcactgattcccgggcctctgtgaccaggcaaggacgtggaacttcccaggagccaccgggagaggtgctgct

SEQ ID NO: 84071 - DNA, 122 bp, Homo sapiens
tcgagcgctggctgcagcgacaccatggatctctcctttatggccgcgcaggtaacggggcgtcccccccacgcgccccgggccgccaagtttggggaggttcggggccacggtctcgccct

SEQ ID NO: 84072 - DNA, 122 bp, Homo sapiens
gcccccagctccttggcctgggtcacaccagggtcccggtcggatttagccgggctgctccgggtcgggtgaggcactgggtgcgtgtgggagtcttctcttctgtctcttcgaaagactag

SEQ ID NO: 84073 - DNA, 122 bp, Homo sapiens
aatgagggagacagcgatgcgtcagcagcatgaaaggtgactggcaccagcagtttggatcgcctcctgtggcgggaggcccttgtagaggatacctttggagaacagctcacaccccagag

SEQ ID NO: 84074 - DNA, 122 bp, Homo sapiens
ctggtggaaggaggaattcttcctcctctttctcgtctttctgggcaggtattgtgaggacggtatctgccctgtcagtatctacccaaacaatccagagctgtcaacagaaaaaccctctg

SEQ ID NO: 84075 - DNA, 122 bp, Homo sapiens
agagaaagatattgaggttataaacactatagttattatggtttagcattctgcactacacgaataaagctccattttcccatggcttttgcttgaagcattggaattgttaatgctatggt

SEQ ID NO: 84076 - DNA, 122 bp, Homo sapiens
tgggccgcgagaggggcggggcaggggcgcagggctggagtcggtggctttgtagggccccgcagggcgcggagccacctggggaaacggaagttcagggagggcgaggccgtgccccacat

SEQ ID NO: 84077 - DNA, 122 bp, Homo sapiens
ttttacttcccgcccgccaagttcctgcgccacccaatcccctcgcggcccagactccctcggggcccgccccttcgcgcgtcattagcaattccgccatcttgaagtgactctgtcgggga

SEQ ID NO: 84078 - DNA, 122 bp, Homo sapiens
gtccagagaggcgatgaggatgccagtctcgcagatgaggactgtcagcagcagcgcccacgtgggctccccgttggccttcccgtggccaaacacctgcagggagaagggcaggaagatgg

SEQ ID NO: 84079 - DNA, 122 bp, Homo sapiens
aggagccttccctgaccagccgccccaggcacccttccctgatgaaccaaggtgtaatcacgtgtcctgatcccgctccccatactcctgtgctctgagctcccccagtgcagggatgcgga

SEQ ID NO: 84080 - DNA, 122 bp, Homo sapiens
ggtcccgctcgggaggctctgcagtcgcgcctggggtcagggccgggggcgaatgtggctcgcgttctaggcctccctgggtgagaaagtggtagactggcaggaaggcggcggaggcggac

SEQ ID NO: 84081 - DNA, 122 bp, Homo sapiens
ccccaagagggcgtggagtcttttccacacagaaccttaacagggacagaactgaccctccgcagagagccctgggctcctccccaggcagaactgccactgacacgtgtgtttctacggtt

SEQ ID NO: 84082 - DNA, 122 bp, Homo sapiens
cagaaggtaccaggcactgtgccaagtcatcttatagtcacttccttgtttaatgagaagcgctattgatgaaggaagtgctattatttccccacatagcagatgaggaaatgaaggctcgg

SEQ ID NO: 84083 - DNA, 122 bp, Homo sapiens
gaattcttgcccctctactaattcttgataagatgtcagaaagctgaaaggaagtctcttcgagacaatatggatttatcagaaatgcgagtaccgtggaatacatctcaacatgttaaccc

SEQ ID NO: 84084 - DNA, 122 bp, Homo sapiens
aacagtggagtgtagcccaggatcagaaattatcttctattgtgtctctaaataggagatcggagagacagaacatggatcccgatgtatccaaattactttggataagattgcataagatg

SEQ ID NO: 84085 - DNA, 122 bp, Homo sapiens
gaccacaagactcggtgattttcgtgagacccttactacgggtgaggaaacggaggccagcgcatgaagtggcttgctcaagtcccctgaggttagccgaggcctgcctgatgggctggaga

SEQ ID NO: 84086 - DNA, 122 bp, Homo sapiens
cccaggcgagcggcgggtggctcttaccagcgggaacgccatggggccggtgtggccctgcggggctgacgggctgaccggccagccggcgggcgagagacgcgcacgcacgtgggcactat

SEQ ID NO: 84087 - DNA, 122 bp, Homo sapiens
gcgtctgtggacaggcaacgcaggccggagggcctaggactccggcctctgagaggcgggcggttgtccaggggagtccttcgtgccggcgggaagcgcaagggtgccggaagcctgaggtc

SEQ ID NO: 84088 - DNA, 122 bp, Homo sapiens
agcgggctccgccccctgctgcacgatcctggggcccgaggcttccgcctggcctcccggcgccaactggctctcacacctgcccgtcaaagacgttcttccgggggcgttgggaagaacac

SEQ ID NO: 84089 - DNA, 122 bp, Homo sapiens
ggcaacttactggtttcggcattttcggtttctggtgagtatcctcgatccccgaaaacacgactatccagcagcagcgaagacgctgtcccaacctggagtcagagcagaacccttagagc

SEQ ID NO: 84090 - DNA, 122 bp, Homo sapiens
gagaggcagctggcctggcacagtgctgagatgggcagcccaggtggtgggatattccgccgcacccgggtgtgccagtcttggtgtgtaggaagtatagcggggctgcaagatctggggcc

SEQ ID NO: 84091 - DNA, 122 bp, Homo sapiens
atggactgtggggagcaccctaatcctagctcccgataatggtctgttaatcttcaacagcgttccagacacagataagtacaaatagataacacgccagaagcaagagaatgtggaggaga

SEQ ID NO: 84092 - DNA, 122 bp, Homo sapiens
ctgctaaactagaaccagaattggagaaaaacgaccctgtgaattccaagccaacaaagccggggaagaggcattgagcaacctgtggttgcctgagaaacaaaaggcaaggtggttggatg

SEQ ID NO: 84093 - DNA, 122 bp, Homo sapiens
gccacctcggttttgggcagggggtgggggcaggcgaggggccagttattcttcagggttcgggacggcccccaccagactcttcgtggggaatgcaataaggttctgacattcctcagggg

SEQ ID NO: 84094 - DNA, 122 bp, Homo sapiens
aagatggccatccagacccagcagtcgaagtttgtgaactggcaggtggacggggagtatcggggctctgactcacagcagccgtcaccctggggaacccagacgtcctcgtgggttcaaga

SEQ ID NO: 84095 - DNA, 122 bp, Homo sapiens
ggaagtacagggtcggggtaagaagccagaggcatccccttctttgtacagcagggagctcgggtggtgtggctggtggccctgcctgagcatccttccctcccatggcagagactgtttgg

SEQ ID NO: 84096 - DNA, 122 bp, Homo sapiens
tgcttctctcccaggaagctccgtcacgctctgcctgagccttgggtgcctagcatccctcgcaagacagaaggcacgccaccccagcctgatcaaggacacagtgaaaaacgtgggtgatg

SEQ ID NO: 84097 - DNA, 122 bp, Homo sapiens
gcctagggtggaggttggtctctgctaaggatgggccatctctgccctctgcatccgcatcggcggcagcaaaacggggttacagaaccacacttgggaagggggtgaacccgagtctggtc

SEQ ID NO: 84098 - DNA, 122 bp, Homo sapiens
gtggaagcctccctagaccctgtctgttacctcccgcctagcctaaaaagtgcagtctggcgggcctctcacccccaaactctgtatcttcagggaacccagagggagcctaaccttgctgc

SEQ ID NO: 84099 - DNA, 122 bp, Homo sapiens
tgcgccatccgctccggctttcgtaaccgcaccctgggacggcccagagacgctccagcgcgagttcctcaaatgttttcctgcgttgccaggaccgtccgccgctctgagtcatgtgcgag

SEQ ID NO: 84100 - DNA, 122 bp, Homo sapiens
ctatccccaggagtgatttgcagaaccagagactcccttttcaggcttgggcaaagcagacgcctcctgctccgcatcggctcacacgcggccgggcccacgagcctcctccaaccgccgcc

SEQ ID NO: 84101 - DNA, 122 bp, Homo sapiens
cctgtgtggccccatctctgggacccctctcagacagagacgcacagggtccctgagtggcggggaggccgggggtctgccctgagtgcccgcgtggactgggccgagttggggccttagtt

SEQ ID NO: 84102 - DNA, 122 bp, Homo sapiens
tgccgggcgccggcgcgctcggctctttccgccgccgccgctgccgcgcggtggcccgtgcgcctcggcaccttcggcaatttccgtcgggccccagccgccattttctcgccgcttgtgtg

SEQ ID NO: 84103 - DNA, 122 bp, Homo sapiens
attttaagcaaaacaaagtttccctccaaaatgtccgcatcctaatctggaacctgagagcgcgttatgttatagggcatagaggaattgaggttgcagatggaattaaagttgctaattag

SEQ ID NO: 84104 - DNA, 122 bp, Homo sapiens
acagcgcaccccacttttgctcgcctctgccccccaggattcccgggcgcacgtcggctgcgaaccaccacccccaagatcccactaacagcctgtgcacccgggctagccaccacggaaga

SEQ ID NO: 84105 - DNA, 122 bp, Homo sapiens
ggggaggacagaggagtgacccccaaagccagcctgtccacagagaagcagatgagaaagcggggccacctcctaccacaatccccaggaggaatggggcttccatgggacaaggaaagtta

SEQ ID NO: 84106 - DNA, 122 bp, Homo sapiens
gcggggagctgggctcggccggaggggtggcggtcgctggggacctggcggagcctttgacgtgggttccagcgttgccgagggaaccgcgtgtttacgcaggagcgcggggcgggacggca

SEQ ID NO: 84107 - DNA, 122 bp, Homo sapiens
tgagcagaggccgcgtctccagagggaagcagtgactgttccattagcttctttgcctgccgaagccctcccaccttaacatgtctgtaggaggggtcagacaaacagagcaaaccccggag

SEQ ID NO: 84108 - DNA, 122 bp, Homo sapiens
cacctcagaggtggggagaaggttctctgagaccgacatgggggctagtgctggcaccaccggacatggggcatttcagacacagggcgagcacattccctagttaccagggttcattcgag

SEQ ID NO: 84109 - DNA, 122 bp, Homo sapiens
tgtctcctggtcacgccctttgtccttgctgtcctctactattctcttctggaagactcacgatgagagagccgacttctccaagctgcactcctagctctctgggacccagcagggaccgc

SEQ ID NO: 84110 - DNA, 122 bp, Homo sapiens
agtagggtcaggggcccaaagaggcaattctcatgagcattcatccattgggatgtgtgacgcatggaagggctgtactttccttcagtcccactggcagaccaggggaagaggcacccttg

SEQ ID NO: 84111 - DNA, 122 bp, Homo sapiens
tccctgagcctcggtcctcatgtgtggacgtcccagggtacccagatttcccaaggttgacgtgaggaatcaatgagatcatctgtgttctgagctgaactcagaggctggcgcaaactaac

SEQ ID NO: 84112 - DNA, 122 bp, Homo sapiens
agcgagctggacacggggccttcctgcccaaggagagcgccaccctgcctcccccgagggcgggcacccagcgcagggtcagagagcatgccctgaccggggaccagcctggggggcagaca

SEQ ID NO: 84113 - DNA, 122 bp, Homo sapiens
gtggagggacgagcagcttcgggggcacgtcctcgtgtatcctgtggaggaccctgaccccgcaccccaccctcgaggccagaaatcggttgcctctggggacctgagaagcgagaccactc

SEQ ID NO: 84114 - DNA, 122 bp, Homo sapiens
atgaagggagatggactgggtccatgccgaaggtttctccctggtttctcagcccccgggcgaagactcagggagacattgagacacaccctgcacaggagggggagggggagggggagggc

SEQ ID NO: 84115 - DNA, 122 bp, Homo sapiens
gcctcagtggaacacggtgcaagtgcctgccgctctccccacccctgctcctggcgccggcgcctgccgctctccccagctctgctcctggcgccagctccccgtgcctctctcccagacgc

SEQ ID NO: 84116 - DNA, 122 bp, Homo sapiens
tgcgccagacagagcgggagtgcgagacagacagacaagccagcagggtgtcagccttgccgtctttccgcgccagtctcgctcgcctgcctcactgtctgtctgtccttccacccctccac

SEQ ID NO: 84117 - DNA, 122 bp, Homo sapiens
ctaaaacttcacctttctggaggggtcatgcaaggaggcgtgacttgagagaatttgccacggttaatgttacaattctggggcagcctacctttcattgcttgattattctgcatagaccc

SEQ ID NO: 84118 - DNA, 122 bp, Homo sapiens
gaatgggggtgtggtgaggatttaataaaaccgtccacgtttggactctcctatggtgcccgtgaaggtgggcaagcacggacgggcagctgtgacccctgcgagatccctgagccgtgaag

SEQ ID NO: 84119 - DNA, 122 bp, Homo sapiens
cgcagaggtagctcttctgcgccctggaggggtacccggactcccacatcctgtctgccacgacccggactccctaggggattccaagggacagcaccgtcctccccatacatcatcaggaa

SEQ ID NO: 84120 - DNA, 122 bp, Homo sapiens
agtgttctcggacaggagttagctgagacctggcacagttttgggtgggcaatgttaagacggaggatgtaaacctagtgacagctgcacaccccttcaggactgactataaatatagccat

SEQ ID NO: 84121 - DNA, 122 bp, Homo sapiens
aagcacgacgttatggcgctttgaggctgtcgcgctactggtatctgtagtcgtggctgccgtggaccaggagagactgaagtggaaaacagcgggcggtagccgaagcagagagcaaggaa

SEQ ID NO: 84122 - DNA, 122 bp, Homo sapiens
gtctcggaggcctcccgtcccctcccttgtccgtcttctaactcttccccacgccaggtccgtcaagcctaagtccttgagttccgggtccgggcagcagagaaaggaagtcctctccctgg

SEQ ID NO: 84123 - DNA, 122 bp, Homo sapiens
taagctgccttggatgttgaggtttttggattcttttctcagtttatcccacatatctttcgccccttcctggcaatccgtaagggctgtgaccgtgcagctgtggaaatcctcccagtatc

SEQ ID NO: 84124 - DNA, 122 bp, Homo sapiens
ggccagagcgagttccgggtaggcgtgggctcggtgggcccagcattcagagtggccggccggccctgccggcgccgggctgtgaggggcttagcacctgggccagcagctgctgtgttcaa

SEQ ID NO: 84125 - DNA, 122 bp, Homo sapiens
gaacagcggtgagtcaggagcaggagcgtgcggaccaaaaatcctcagcccttacgaccgcgtcttcctcaaaaagaaaggggtgggacttgagcaacgcttatatagcacgcttgcatccg

SEQ ID NO: 84126 - DNA, 122 bp, Homo sapiens
aactaagctgtgagctggggctgcaatcatcttaggtcttgaatagggaaggatcagcttcgaaggtcattgttgtgatgattggcaggtctcaggtgtttgtaggttgtcagatggagaca

SEQ ID NO: 84127 - DNA, 122 bp, Homo sapiens
cttctgctgggcccacttggaaggcaataaaccgcatagtggtagctcaccccggaattacggagtcctctgagaggcaggtctcaccaccatggagaaggtagcactaccattttactgca

SEQ ID NO: 84128 - DNA, 122 bp, Homo sapiens
atcgctcaggcgggtccacacagccccgggccaacctccctggcactcacacccagtgtccggagcagctggtcagtgggcgtggagctcctgcttgtgtgcccccacccctgtcgcgccct

SEQ ID NO: 84129 - DNA, 122 bp, Homo sapiens
catacagagacgcattctgaagctcggatagtgcgtgaggtgtgaggctgcctctgctgccggtgccacccagtgggaaccccctccatgccggtgcagcccatggacacaggatgctgggg

SEQ ID NO: 84130 - DNA, 122 bp, Homo sapiens
agctggagacgacgtcttagaacctaggatgagtctcgtttggttttagtctgcaaagctcgtctgcatcagacaggaattttccccagacgcgggtgcacgtgaattaattcatcagaagg

SEQ ID NO: 84131 - DNA, 122 bp, Homo sapiens
aagaagggttttaatttccatcttgaaatggttacaaatgcttatcacttatggggattacgtctgtggccctgaattagtagagaatagacaatagaaaaagaatggctgttattgaaaag

SEQ ID NO: 84132 - DNA, 122 bp, Homo sapiens
aaaaatagattgcgtcgctcgctttgagccgcttggataaggaaatggaagcagcggcggcggagctcctgtcttttaaatggaggatcattgattgtgttggtggttgctgttactggggc

SEQ ID NO: 84133 - DNA, 122 bp, Homo sapiens
gggatcctgaggcctggcagcgggcgctctcaggaaccttgaagccctctaaacgggacccgccatccgtgcctgtcagaactggtgccgctacctgcacttggcacacaggcaaatatggc

SEQ ID NO: 84134 - DNA, 122 bp, Homo sapiens
accagttgtgtgcagtgaggaaaaaactttatgaaaaccatgaaaggaaatttaaataaacggagagacaaacagtgttcctagcttcgaagcctgaaattttcattttcctcatatacttt

SEQ ID NO: 84135 - DNA, 122 bp, Homo sapiens
gttctgcagggcaaagcctgtttatactccgaggaattacagaacagacgtttacttggacgtggagatttggtctggaggaatgtgacatggccctgacagcacatccctgggtttcggtg

SEQ ID NO: 84136 - DNA, 122 bp, Homo sapiens
ccaatgctactcgcgaagccgaagtcgcggctgcccgaaggatctccgcagccccgcgtgcgcgatccttaaatacccttcgcgatgctcgcgtgagtgtgtgtgtgagtgtgtgagtgcgc

SEQ ID NO: 84137 - DNA, 122 bp, Homo sapiens
aggtggcagtgcctgtaaaccagggtactccatattctattctccagagccccacaggcccggacagacagatgggttcttggaagggtgagtcatctaccctccctaagtcagaaatgcag

SEQ ID NO: 84138 - DNA, 122 bp, Homo sapiens
gtgcggaacgtgagtgactgagcggcaaagcccgagtgagcgagcggtgggctgccgggccgggcggggggcgccggggcgggctcggggggctgtgtgggggggaagcactaatcggcttg

SEQ ID NO: 84139 - DNA, 122 bp, Homo sapiens
ccaggggtgcccggaaacaatcacgagaaagccgggcgaatgcctgatgcagggacgcggcgagccagtcactgccctcagggtcacggctgactccctctgcgggactcgcccagcccgcg

SEQ ID NO: 84140 - DNA, 122 bp, Homo sapiens
cctggctgtgcgtgctggtgcccctcggagtccaccaccttcatcaaggagagcttgacccgggagaggtcgccttgccagccggcgccgacctccttcgcgtgctcgctgggtcttctgcg

SEQ ID NO: 84141 - DNA, 122 bp, Homo sapiens
cggtgaatccccgtctctactaaacatacaaaaacaaaactagccgggcgtggtggcgggcgcctgtagtcccagctactccggaggctgaggcaggagaatggcgtgaacccgggaggagg

SEQ ID NO: 84142 - DNA, 122 bp, Homo sapiens
acgcccagctgtggcatcctcctgctgcaggtgaggagtgggcagcagggagggctgcggcgcctgctctgtccccatcccggtctctgtgtctcttgaactcactagggcgcatccaggtg

SEQ ID NO: 84143 - DNA, 122 bp, Homo sapiens
attccgatgcaggtcatgcaacttgcaggcaagatgggggaaggggtatgccggtgtcaccgcctgccccaggcgcaaccacaaacaggccggtcgccttcgggtggcactgtcgcttggag

SEQ ID NO: 84144 - DNA, 122 bp, Homo sapiens
ctgggcctgagacggcctcaggatgctgcagcggccttggcatcctcttcagcagggtggcggccggaactggcaccttccccccggtctctttatttaccaaaaaactgcatgcacagaaa

SEQ ID NO: 84145 - DNA, 122 bp, Homo sapiens
cttctttagcttcttttctcctaggacacattttcatttccatgcttcctaagtcttccccgcctgctcccctctcccaacccagcccggcccccaggccatgcttgtgcaggtaccaagga

SEQ ID NO: 84146 - DNA, 122 bp, Homo sapiens
ccacatctctggtcctatccttggacaacagccgagtcctggacatggatggcatcatctcgacgtctccgcccagtaccaggagatcgccagccgcagctgggccaaggccgagagcatgc

SEQ ID NO: 84147 - DNA, 122 bp, Homo sapiens
ccctgatctgatcgtggacactgcagtccccagatggctcatcccgttaagctaagccctcggccatccctccagctttaggaagaaaagcagttctggcccaagccagactgagcttcctg

SEQ ID NO: 84148 - DNA, 122 bp, Homo sapiens
agcacggctgtggcgagttcgttgttcaatcccggatggctcagcaaatccaaccccctccgccctgttctatcgccgcatggatctgcagaggcagccgttcctgccgggtggatttgcct

SEQ ID NO: 84149 - DNA, 122 bp, Homo sapiens
ggaatccttctaagccaccttaatctcctagaattggacatatccagcaagttcagttcacgctatctccaagaaccatctctgtctctctttcatctgctctcaagaaggtaaaagacccc

SEQ ID NO: 84150 - DNA, 122 bp, Homo sapiens
gtgcccagggaagctcagtgtcacacagccccaagcatcctgtgtgtccctggcagagtgcgagccccttatcctgcctcagtgaagaggacggtgctggctgccctagaggatgtcagcac

SEQ ID NO: 84151 - DNA, 122 bp, Homo sapiens
aaaaacagtgaagacaaagacagatgagacgcaggaagcagttcgcaccaaggctgtgcccggaacgtcctctcttttctttccacattaattactctcaagtcacccgggcttccttgtca

SEQ ID NO: 84152 - DNA, 122 bp, Homo sapiens
gctggctgagggcggggagggagcaggcagggaagcggcccgcccttcgtcctgccccttcgccctactctgtcacctcgctggaaggagtggaacccagacttgctggtctgatccatgca

SEQ ID NO: 84153 - DNA, 122 bp, Homo sapiens
cggctggagtcctggagtccagcagctcctcctttctctgactcttgaggtccagggaggcgaaggcccccatcaggcggtcaaggctgggcttggggcgcggggcggagggtgggatcctc

SEQ ID NO: 84154 - DNA, 122 bp, Homo sapiens
gcgtaaaaacagctttaaaacgaccagtgaatctctcagcacaaattacagcaaacagaacgccggagaaaaacatctgtccctcgttctcaggttaggtataagctgatttcaaacttttg

SEQ ID NO: 84155 - DNA, 122 bp, Homo sapiens
ggtggatgaggagggcacaggccccagggcatgggggttgctgggggcatgtgagtgccacgtgtggcatgtgggtgggagttccagggtcaggacacatagagtcctagagtcctcgttcc

SEQ ID NO: 84156 - DNA, 122 bp, Homo sapiens
ggcacatggcgaggccagggccagacctgcaggcccccgacaccccgacagggattctgacgcctcggtttataatggaaatttaagatgaaatactcggaagagaaaatctgcagacaatg

SEQ ID NO: 84157 - DNA, 122 bp, Homo sapiens
agccacaggagcagccattccaggaagccaagctataatgggagacgcaaggaatggaggcggaactcctgtttttaagtcctagctccaacactagccttgtcagcctgtaattctgaatt

SEQ ID NO: 84158 - DNA, 122 bp, Homo sapiens
tgtcggaggtcttagagaggttcgttttgagaaggctactagataaccaagtagaaatgtcgagtttgataaatgaatgtggagtttagaaaagaggtctaattaagcatcaagattggagt

SEQ ID NO: 84159 - DNA, 122 bp, Homo sapiens
ggtttccgctctgacaccacctccgctatggccgcatcccagctcttgaaacgggggctgcgggacctgccctgtagtagcgtacactaccttagataggataatcatctttgggtggagac

SEQ ID NO: 84160 - DNA, 122 bp, Homo sapiens
atctgtcttacattagtgtagcattttgcaatttggggaacatcttcacaatttgtgtctcgttgttcagaacaaccctgtgaagtagttttggcaatgtctgtgttacatttcatgtaatt

SEQ ID NO: 84161 - DNA, 122 bp, Homo sapiens
ctcctagacaccatccggaagatgaagaacgatttccggaagatggaggatgagatggaccggctggccaccaacatggcagtgatcaccgacttcagcgctcgcatcagcgccacgctgca

SEQ ID NO: 84162 - DNA, 122 bp, Homo sapiens
caaaaccccaactctgggctgagccatcatctgggtcctatggaaagaccaccaactcgacggaaaaggccatggagacccagtgcggggtcagtggagaaaaggccgccgacgtggagacc

SEQ ID NO: 84163 - DNA, 122 bp, Homo sapiens
tatgatatgtgaatacacctcattgtgtagttattagcatatacagagagtaaagggctgcgattagtatattaagccttataagcatgatggtatgatcagatcaagagaatgaggctgta

SEQ ID NO: 84164 - DNA, 122 bp, Homo sapiens
taccattatacttccctttgtgtcgagagaccccgagggggcccagatagttttggggtccgcagcggccggcgaaacgcaaggagcaaggtcccgcagcgcacgcctggggaggggtcttt

SEQ ID NO: 84165 - DNA, 122 bp, Homo sapiens
ccacagcctccaggacgcgctcaactatgggcttttccagccgccctcccggggccgcgccggcaagttcctggatgaggagcggctcctgcaggagtacccgcccaacctggacacgcccc

SEQ ID NO: 84166 - DNA, 122 bp, Homo sapiens
tcacctgcgcgccagctgatgacacagtgtgaatctcctccaaggtgtgactccatgtcccgggactggcggaggcagaaggtgggaggtggggactggctgtgcccagcctggagggaaga

SEQ ID NO: 84167 - DNA, 122 bp, Homo sapiens
ggggaaacaagatcagaagcttcacatataaatcagagtgatggacagagccctaattcccggggaggtcaggtcaaatatacttggctgaaagccaaagtatgtacaacctccatgagtcc

SEQ ID NO: 84168 - DNA, 122 bp, Homo sapiens
ctttctgaacacaagagggcagtatttcctaccccctcagagcctgtctcagatgtgaaacgaagttcactgcatagctggattaggccagtatgtgtaaggggctgaacaggcttgccatt

SEQ ID NO: 84169 - DNA, 122 bp, Homo sapiens
agatgaggatggtcaagtgctggagaggcgtgtttttggctaccagtccttcacctgcgtcgatcttctcaactggaaaaacaatacaccgccctatagcgaaaagccacaagccctaattg

SEQ ID NO: 84170 - DNA, 122 bp, Homo sapiens
cagtgcggcgctcactcccgggctgcccggccttccctgcaaacctccgtaatcccttcccgcaggtgtttctgcgaggccacgctgggtgacctctgaggtctcctttaggtctgtgctga

SEQ ID NO: 84171 - DNA, 122 bp, Homo sapiens
cactaacagtaggcatcgggataagactggcaggactaagatgccagccaggctccgccccggaggcttggaagtgcgggacaccgagagcagggatgccgggacagccggcccgatccccg

SEQ ID NO: 84172 - DNA, 122 bp, Homo sapiens
cctgggggaccagatgagcctgctgcagagtgcctggatggaaatcctcatcctgggcatcgtgtaccgctcgctgccctatgacgacaagctggtgtacgctgaggactacatcatggatg

SEQ ID NO: 84173 - DNA, 122 bp, Homo sapiens
ccagtagggccgctgtcccaacacgccaaagaggctacaaataaccttccaggagagagccggggaggggagagcgcagagcggagcggaacgtgggccggccaagctaccgctcttcggag

SEQ ID NO: 84174 - DNA, 122 bp, Homo sapiens
aaaggaaagacgaaggaaggagacctacctagctgaggctgcgcgccagcgggaaaggtccgactacctctgatctgcgttctggggacggctggaccccaatgcgccccctgcggcaacgc

SEQ ID NO: 84175 - DNA, 122 bp, Homo sapiens
ccatctccccgatggactctgtggcctcactctccactcatgttggaccacccagctcagcgccttccctctgctcatacccattgtccacgtctcctcttcacaaacccatattcactcct

SEQ ID NO: 84176 - DNA, 122 bp, Homo sapiens
cccagcctcatgggggctgagctccagccgctgactgtgggccggagggctgctgccgcccgtggctgtggagggacagccgtgctttcagcgcagcaggggctctgcggagaggtgtggat

SEQ ID NO: 84177 - DNA, 122 bp, Homo sapiens
gttgggggcttgagagggtgacaggtcttacgggcagaggcagtggcgggtcggcgcgggcgccggggttcgcggcgaggcaaggaagaatcaggggcaggggcagttgcggggccactcac

SEQ ID NO: 84178 - DNA, 122 bp, Homo sapiens
gctgggatggggatgtctctgcaggtctaaggttccccttgggagtctaaacaaagactacggcagcgccgtcccctcccccgggaacccgacgccgcgcggccacagggggcctggagggg

SEQ ID NO: 84179 - DNA, 122 bp, Homo sapiens
ccgcccgcctcagcctcccaaagtgttgggatgacagggtaagccaccgtgcccggccttcgctgagttttgatcaatgtgtccacccatgtggcccataccgaccgctgcagctctgatgt

SEQ ID NO: 84180 - DNA, 122 bp, Homo sapiens
cttgatgataaaaggcgggcacagggactacgtgggtggtggcagaaagggcgcgggacacgcctcgcaaagagggaagagtgggcggggccacgtgccgttgtcagagttcgcaactcgag

SEQ ID NO: 84181 - DNA, 122 bp, Homo sapiens
cctctcccacctcccgacaggctgttctttctcccttcaaccttgggcacccactcctgtcgccgttgcgggacccgcgtggcagccctccaccctcgtacccactcccagccggtgtctta

SEQ ID NO: 84182 - DNA, 122 bp, Homo sapiens
cgagggatctgcaccagaggaagggaggcaggcctttcctgtatttatctctgcaggagccgggagggaagctcctccacggaaaagtgtcaaaccttgcccaagctcgcaggtccacgagc

SEQ ID NO: 84183 - DNA, 122 bp, Homo sapiens
agacggggtttcaccctgttggccagggtggtctcgatttcctgacctcgtgatctgcctcgctccctccgtccttcttctagtagtctcaagttgctattgttgccatctttacgtccacg

SEQ ID NO: 84184 - DNA, 122 bp, Homo sapiens
tccttgtcagcacgcaggggctcctgtggccctgactggcatttccctgcttgttggctgcgtgggtgtccttttcaggaagtccccggtcacggttttggtctctttttttcaaatgggtt

SEQ ID NO: 84185 - DNA, 122 bp, Homo sapiens
ctggagcctcaatcacgtcgacggaaaacaagtgcgctccctactgcagtcaccaggaggcgctagtcccgcctgtctcccggcacgggtcctcgtttgcgcacgcgtcatttctttcctcc

SEQ ID NO: 84186 - DNA, 122 bp, Homo sapiens
gcgtgccctctcctggctagccctcccgtctgcgtctctcagggcatctgtagtgggagccgcctgtgctgggcactggggtacggccttctcaagacccagggaagtgggggagctgggca

SEQ ID NO: 84187 - DNA, 122 bp, Homo sapiens
aaagcctccggaattggtgagatgcccgcctctcctcattacgtcggctggggctgggggcgggggccctcctgggagcctcatttagattttaattaaactgacttttcccaaacaatttg

SEQ ID NO: 84188 - DNA, 122 bp, Homo sapiens
cctcatcttgcagtacccctcatccctttctccagctaaagaacagctgatagaaataggcgcctttttttttttttttttaacatcaaaggcagcccagagctatgtcagccttgccccag

SEQ ID NO: 84189 - DNA, 122 bp, Homo sapiens
gatggtttctgtgcagggaaccttggccggctctgcagctgcccgcctgcctggactctccgatatccactcctcagtgcacctgacacgcatggagccggtcctttcctggaagccagacc

SEQ ID NO: 84190 - DNA, 122 bp, Homo sapiens
gccctctgcagggttgttggggacaaagatttcccagagatgcctttgcctttagctgtccgtgtgcggaggggcacacgtgtgtgatacagagctgggctcggagccaggttggcagggag

SEQ ID NO: 84191 - DNA, 122 bp, Homo sapiens
tgctctccttgagacagagatggggctggagggggcggggcagaggctgattcccacacccggtgtaaggtccagggtagcagggcttccccccagggcttctggcatcactgggagtcctg

SEQ ID NO: 84192 - DNA, 122 bp, Homo sapiens
ggagatggcttccacagtgaaccagggaacagccgaattctcaacaccatttctcatggtcgggacctagacagttagagactgtgagagccgagatgcaaccttcggtcttcgttctcggc

SEQ ID NO: 84193 - DNA, 122 bp, Homo sapiens
cctcacagacacagtggcttatgcccacttcacccagtttctcgcattgttcacaccttacgttactgtggttcatacgtcaaaaccaagtgggagttaccagtgggtcaactggtcattat

SEQ ID NO: 84194 - DNA, 122 bp, Homo sapiens
gttccttctgtggctgagacggtcggtgaggcagggctgggagctggcctccgagctggccggtgggcactgggacccccacgtgggggctctgcagtgtgtctgccggcatccccaagggg

SEQ ID NO: 84195 - DNA, 122 bp, Homo sapiens
gcaggtgggaggacagctgagcctccttctcttggttggtaggaggaaaggttcaggcgccgctgaccctacctggacagtgctgtctgcctgtggtgagggcctgggccctgggcagaaaa

SEQ ID NO: 84196 - DNA, 122 bp, Homo sapiens
atttgtatttgtgttcatggtttttatctcatgatcttaggttccatggaaggtatccttcgaaaagctctgttctgtcagagatgtggggcgcagaaaagagctacttagaaaccatgaaa

SEQ ID NO: 84197 - DNA, 122 bp, Homo sapiens
aactatcatgtagcagagctgttctcctcttaccaacataaatatttctgagcctagtttcgctttcttaggcccagtgcctttggtaggtcctttgaggtatacctttcaccttctagcct

SEQ ID NO: 84198 - DNA, 122 bp, Homo sapiens
ggtgctgtggggagagagccacccgcccaggccttgcgggccaggtcctcatggtgcccacggcgcgggccgccctgtgcctgctccagtaacaggtgggctcacctttgttttggtgcagt

SEQ ID NO: 84199 - DNA, 122 bp, Homo sapiens
gcacgcgccctgctgaccgcacgcccacgtgatatcgccttctgccatcgcagaaagcagcggttcagcctctctgcctgcacacttgcgtgatggggagctcacaagcagtccactgcatt

SEQ ID NO: 84200 - DNA, 122 bp, Homo sapiens
gtgtgtgtgtgtggtttgtgtgcgtgcgcgcgtgcgtgtgtgtgtgtacgtgcacacacacgtacattcagcatagtagagccctcctggagaaaaacaatgattaagaatgggatgcatca

SEQ ID NO: 84201 - DNA, 122 bp, Homo sapiens
agcaaccttttctccaaggacatgttgcaaaacagagcaccaagcaaatgaaacctctgacgctaagtgttggtgaggataagaggatcgagaaggatggagcacacatcacagtgttgtca

SEQ ID NO: 84202 - DNA, 122 bp, Homo sapiens
ggttgggcttatgagggtatgggtggggcaaattgtataccccctgcccctccaaggcctcgcaaaggaagctggacccagcatcccttctcaaacctcaaactggcagtctgtgcctgaaa

SEQ ID NO: 84203 - DNA, 122 bp, Homo sapiens
gctgtcctccagctgcactggcttctggggtctggacccccagaggctgccattccttcacgctacttctcctgggcgccgtgctgcagctggcacccccatgtaggtgccacagggtgtgg

SEQ ID NO: 84204 - DNA, 122 bp, Homo sapiens
atgtgaaaatgggccttgcctttgctggtgcccaaggaccgccttccactgcagtgacggcgctggcgggggaggcgctcttgagcccctcccgattgtccctctgcctagcaagcaagttg

SEQ ID NO: 84205 - DNA, 122 bp, Homo sapiens
gcctcccggcgctgtggggcggggtggggaggccacccccttgaattaagagggctctgccgcggccccagcagtgcggtgtccgtggaaggagactcagccctgcgatttcggaaaaccct

SEQ ID NO: 84206 - DNA, 122 bp, Homo sapiens
tgtgtgatgacaaaggcctccagcacctccatcttgtattctaagttctggatacagaagcgatacaagtctgggaaagactcggtgtacagctgacgaagaatttctgcttcttgaggtga

SEQ ID NO: 84207 - DNA, 122 bp, Homo sapiens
ggcaaccgtatggccagatttctcaagaaggtcctgatttttaatattctgtcctgctgtcggcccaagtgtcaccaattttgatgtgaaaaatttggctatggaatctgtaaagctaaagg

SEQ ID NO: 84208 - DNA, 122 bp, Homo sapiens
tgaaagacccaactctctcattgcacacccagagacctgacagaggaggtcaacaaataccgtctgccgggctgaataaaggaacgctcgtctgcacaagacagtggttctcagctggagcc

SEQ ID NO: 84209 - DNA, 122 bp, Homo sapiens
atgctctcaagagcatcaacaatgccgaaaagagaggcaaacgcccagtgcttattaggccgtgctccaaactcatcgtccggtttctcactgtgatgatgaagcatggttacattggcgaa

SEQ ID NO: 84210 - DNA, 122 bp, Homo sapiens
cgcggggcgctatttacggcgcggagccggagagacctgggctggcgcgggcgggagctgcggcggatacccttgcgtgctgtggagaccctactctcttcgctgagaacggccgctagcgg

SEQ ID NO: 84211 - DNA, 122 bp, Homo sapiens
ttccgggcccctgcgatgcccacagacttcttaatgtctctctttgtaacaccccagggccgcgtgaatagcggggaaggtaacgtgactgcggagctcagggccggcccgggaggggcgcg

SEQ ID NO: 84212 - DNA, 122 bp, Homo sapiens
cgtgtcctcctccgtcatcgagcagctcttcttcgtccgtttggtaggtaaaacccccatcgaaactctcatccgcgatatgttactgtctgggagcagcttcaactggccttacatgtcca

SEQ ID NO: 84213 - DNA, 122 bp, Homo sapiens
catgggtgtggctcagctttttagggtcccccaaggcagaggtggcccgggcccctgcagcgatctcacaacacacttcaactgcagacggtggagactgcgggctgtcctccggctcaagc

SEQ ID NO: 84214 - DNA, 122 bp, Homo sapiens
ttgaatgcgtgggataaagccaacttggttgttatgtattattttgtatgttattggatgcggtttgctgatatctacatgaggatttttgctggtcatgagtggcataggctgcttttaaa

SEQ ID NO: 84215 - DNA, 122 bp, Homo sapiens
ccggaattgtgtgcagatgcatccagtcgtggcattgcaagaagtctgtctgatgaagctcgggaagcattttgcaatattccctttggctgtgttcctgtgttccctgctcccacttttct

SEQ ID NO: 84216 - DNA, 122 bp, Homo sapiens
gagggaatgagtcatacccccaacccccagcataagggatgaaaatacagaagccagatacgagttcccttgtgctccatgcagaggtttccttccagattagaatacttaggtccccaatc

SEQ ID NO: 84217 - DNA, 122 bp, Homo sapiens
gcgccggagagttggagagtctgtgggtcagaacatccggcttctactgatggaaggccacgactccccagtggaatgagggcctaggcaaagaaaatgagagagccctcggggtagtgaca

SEQ ID NO: 84218 - DNA, 122 bp, Homo sapiens
tcgggagaaagaggaatctgtaaggcctaagcggatggcatggatgcatgtaatgaagaccgggaagcagatcctgggtgggagagctgctctaagcagaaaaacagccaactcaaatctac

SEQ ID NO: 84219 - DNA, 122 bp, Homo sapiens
agaacttcgtgctcaagatcctcttctgcaagcagtcggaccgcggcctctacacctgcacggcgtccaacctcgtgggccagacctacagctctgtgctggtcgtagtgcgcggtgagctc

SEQ ID NO: 84220 - DNA, 122 bp, Homo sapiens
actacaagaaaatcccacagctgggcatgcagatggcttcggctctcacccctgaagactcggggggaggagttcacagtcttcagttctccgagtattgagggtaagatagctgaggaaca

SEQ ID NO: 84221 - DNA, 122 bp, Homo sapiens
gcaggaagcgcagtcatctcaagctgacctccaaggttaccgagttcgagggctgggagccgggtctgaaagccccgacccgcctatggcgcggggactgtgggtccagccggccgattggc

SEQ ID NO: 84222 - DNA, 122 bp, Homo sapiens
ctgcctggcttgtcccgggagttgtctgaagatgggcatcgccaggagggggcccctggccgagtcagcaggggtcccagcagtgggcgccccagacggccctgactcacctgggtttgggg

SEQ ID NO: 84223 - DNA, 122 bp, Homo sapiens
aggggcgcgcgggagtcccacctacctgagtgccagaagcctctcgcccaggagcgccagcgcgatccccagcaagcccacagccaccagccgccccatggcgcgggagccgggcgcgctgc

SEQ ID NO: 84224 - DNA, 122 bp, Homo sapiens
cgcgcccagttggtttcttagtgtgggttgagggacgcggaaatttctggaaggcgccgccgccgccgcgctgggcctgatcgaagcgcgcgctcctaaccgtccctttcggagtgcggcgc

SEQ ID NO: 84225 - DNA, 122 bp, Homo sapiens
tgccactagcaaacacagccccctttagccagctgcccaccctcccccaacccctgcctccggctccctcctgcagccgaggctgctaattttatccgcccccgaccctggcctgggcgtta

SEQ ID NO: 84226 - DNA, 122 bp, Homo sapiens
tgctactagatagagaataacctgcacaactgtacattgtcaggctaagtcacatagacccggctgtaaatctggttctcctatttactagctcagtggtcttgggcaggtcatcgggcaat

SEQ ID NO: 84227 - DNA, 122 bp, Homo sapiens
atgggtatcatgactaccccatgtgtttactggcactctttaaaccataatttgattgaacgggaaactgagtagttttcaattaagtacctacttgcatttttaggccattgctgatgaaa

SEQ ID NO: 84228 - DNA, 122 bp, Homo sapiens
tttgtccgagtgtctgttgggaaacgcgcttacatcccgcagaaggcggtaaggacacagcgcacaactctgcattatacctgcgagttaaaaagccaagggttcgctcactcaaccttgaa

SEQ ID NO: 84229 - DNA, 122 bp, Homo sapiens
caggctggcccggggcggggcgtcatccagaccaaagccctgtcattgcgctgccccggccgccagcccctcaagaagctatacatgagacgtaggtagccgtagtcggactgactacactg

SEQ ID NO: 84230 - DNA, 122 bp, Homo sapiens
ctgcaagctgtcacaggctcttggtgctggcactggctcaggctttcacacacacacacgcgcacacacacacacacacacacacggacaggcacccccttggtggccttcacagtttcacc

SEQ ID NO: 84231 - DNA, 122 bp, Homo sapiens
cactaccctgcccaactgctcttcatccacgctgaacagcaaaaccctctgcttatggcgcgcttaaccattccctccttccccgagccaagtctgttcacagggtgcggataatttgaagc

SEQ ID NO: 84232 - DNA, 122 bp, Homo sapiens
gctttcgtattgaatgacagagaccaggggtgtcaaaggctctgggccctgcactgcctacgcacccttcaaaacagaaatacacgtgagaagacaagtgtttgtaaataatagtttttaac

SEQ ID NO: 84233 - DNA, 122 bp, Homo sapiens
ttacagcttcacactcaccaggtccccagccggcagccggcgctctcagccgggacctcccggcgtcacctcccgcagccccgcccaacccaagtcttcacagctcactggcggttgctaag

SEQ ID NO: 84234 - DNA, 122 bp, Homo sapiens
gggaagtcacgtgtcccaatcccgcagttccaaagcccttggggaccctactgtcagggtcgtgcacgaggaggtgaaggtcaggtgagccaatcgcctcgaagggtcttgcctcattcggg

SEQ ID NO: 84235 - DNA, 122 bp, Homo sapiens
ggccaaagagaggaaggccagctccgtctccgcagaggacggctacatggaggccagcagcgggcggaggaaagtgaggatccgcagcaacttcgtgagcgagagcggggcccgcgaggcgc

SEQ ID NO: 84236 - DNA, 122 bp, Homo sapiens
gcaggcaggacacctgggagccaaacctcgtgcacgtcggcgtctgagaagagtcgcaggcgcctggtccagtcccggaagcaggtctccttctacggcgtctccgaggctcgcagcgcggt

SEQ ID NO: 84237 - DNA, 122 bp, Homo sapiens
acagaagctggtgtcgagggctggagaagctgcacaggccaaggccggctctgcccctgccgcccgcctgcgcggtggaagcacagacgtgaggcgttgggatggaaattcccatcttccag

SEQ ID NO: 84238 - DNA, 122 bp, Homo sapiens
cccacgcctagagcacacacgctccggggatgcacacccacgcccagagcacacgcgctccggggacgcacacccacgcccagagcacacacgctccagggatgcacacccacgccctggac

SEQ ID NO: 84239 - DNA, 122 bp, Homo sapiens
ccaggctggaatgcagtgatgtcatcacagtcacaataactttgaactcctgggtttcagcgatcctcccgctccagcctcctaggtagctgagagtgtaggcacaagccaccacacccagc

SEQ ID NO: 84240 - DNA, 122 bp, Homo sapiens
attcccccaaaaggagggcggggctgagaagcaggacaggaaccacaggattctccgccccgcgccacaggtcagcggagagagagaggcctgcggattgtgacgcttcttctcgaatccct

SEQ ID NO: 84241 - DNA, 122 bp, Homo sapiens
ggagggcgaatctcagggggcagtgaggtgcaggggactgcagagcctacctgtcccccacggatggctcattagtgctcggggaaaggtcaccacacagtggagacgggacagcccctcgc

SEQ ID NO: 84242 - DNA, 122 bp, Homo sapiens
agggattccacccagagctcttcctgaggcatatggtgatggatattctcacccttgtcgcggtgaggagacaggatcctgactaatttcacagttcacatggccctccaggtttcccttgg

SEQ ID NO: 84243 - DNA, 122 bp, Homo sapiens
agcattgccattcgcttgccagacacggactacttgaagtggctgttccccacctccatgcggtctaacctctatcggatctgctatagcccctggggccaggaattctccatctgcaacta

SEQ ID NO: 84244 - DNA, 122 bp, Homo sapiens
ctactatgtgatcagttcagaaggagaacaaagcagctctcattttgaatcctcaaaacacgcagtgtgttattgtgcctcctgtccccagatattcaaggctcttcaccccacgttaccct

SEQ ID NO: 84245 - DNA, 122 bp, Homo sapiens
actggattatgaatcgtgctcacacacagctgcccacctggtaatagttggctttggcctcgatcatcagctgctgggtggagatcatcttcttccggcgtttgcactcttccttgagcgtc

SEQ ID NO: 84246 - DNA, 122 bp, Homo sapiens
gcgagatgggggtagatggaggggctgcagggcggccgaggatgaggccggccggctgggcggggacccctccgctgccgcgccctctgaccacttggaagtttaaaaataaaggctgcggc

SEQ ID NO: 84247 - DNA, 122 bp, Homo sapiens
catcctctttctaaggtcgtcttggaagcaagcggggtcccacctccaacctggggtgttcgccctcgagaaggcggcgttccgctgggcgaacacacacacacactcgagaaggcagcatt

SEQ ID NO: 84248 - DNA, 122 bp, Homo sapiens
cttggtcattgtgttctggtctccttctgtccctccaacatgcgtagctcattccttcctcggcgactttgccttgctgtcctctgtcccaggtctcggccctaatgtctcctcgccacaaa

SEQ ID NO: 84249 - DNA, 122 bp, Homo sapiens
gtttgatgggcgctcaggtcctctttgccagcgtccatggtccatttgctccacagagcccgtctgcttcagaagctgtcctcctggcttctaacaaagatgtaaagtgaagcagcagcaaa

SEQ ID NO: 84250 - DNA, 122 bp, Homo sapiens
gaggtgggggcgaggggtcgggggctcacacgccctgcgatttcctcccatgagaatgggcgggggcagctccgggaagggtggcggatggagccgccctctccccaggaccacaggggcgc

SEQ ID NO: 84251 - DNA, 122 bp, Homo sapiens
gcctgcctgggacaccactgccctttcctctgtctggtcccgccgatctccctgtaggcacgcagccacaccatccttcatgtcctcagtcactgaagacagagactttgcaccagcctgct

SEQ ID NO: 84252 - DNA, 122 bp, Homo sapiens
gcacgcgcccagcggctcagggctccctggctctcaccggctctgctgcccggaggcagccgcttaccctggagccctgagaggcccctttgagtctccagaccttccagggataaataaaa

SEQ ID NO: 84253 - DNA, 122 bp, Homo sapiens
gggactgtgtcttacacttttgtatttatgctacagcttacctaatacagtgccaggcctcgttaaacacttattgattgctcagacgataaagaacttgctttggaaggaggagaggatag

SEQ ID NO: 84254 - DNA, 122 bp, Homo sapiens
ctgcatctgcagccggctaacggcggtaggctgacctgcgggggtgctgctggccgagggcgggggcgggccggacaccggggtggccccgctgctccggccgcctgacccacaggctgcag

SEQ ID NO: 84255 - DNA, 122 bp, Homo sapiens
ctcgccagatctgttgtgggccatgagggtccggaaacgtggaacccgggcaggggcgcgcggggctgctgcagtgacgaggcactggttctagatatttacccaactgtgttgtcataagg

SEQ ID NO: 84256 - DNA, 122 bp, Homo sapiens
ggcagtgggcgggcggccaccgggtcaccccaagggtgcagtgctggagcacctggtgcccgcaggtgtgtgttcctgcccgacaacggcgccttcttcgtgaactacgtcattgcctcagc

SEQ ID NO: 84257 - DNA, 122 bp, Homo sapiens
ctctaaagttgaactgtgcgggatcaagattctattccaggagatcccgcatttcatgcacgaccttctgagtgaatcgccctcccccaagaagccactgaaaggctcagaggccaggaatt

SEQ ID NO: 84258 - DNA, 122 bp, Homo sapiens
ctgggccaggtcaaccacaccatggaggtgtcctgttgaagcccttgatcccgctgacgacgcccacgtcgaggccccaccgccatccttgcgccggctcatgttccctttagtttattttt

SEQ ID NO: 84259 - DNA, 122 bp, Homo sapiens
agcacggctgggaagcccccgggcctttggctaagcgcgccgggggacggcacaggggggcgacgcgcatccaccacctggtccgcgctctcccggcctccggcagctcagggcgggctcgg

SEQ ID NO: 84260 - DNA, 122 bp, Homo sapiens
ggcgatggagatcgaaatctgtcataatccgtggctctgctcttgagggactgcggtctccggctctgcggagaactttgcgcagttcccgggggcgggcacctgaagcagggaggtctggg

SEQ ID NO: 84261 - DNA, 122 bp, Homo sapiens
acccacagccatggtgccccccacaatgagttcccggccccagccccttcacaccacccacgccctctagaaccactgttttcaggtgtttgggggctgtcttagtcagtttgggttgttat

SEQ ID NO: 84262 - DNA, 122 bp, Homo sapiens
ctatttccacctctgttttctttctttggatgctcttgtgtttgtctaagtcaatttcctcgcagcttttttttctcttatgcttagaccgctcctcctctgatttttctctgccttcctct

SEQ ID NO: 84263 - DNA, 122 bp, Homo sapiens
gccggctctgccaagaatatctggaaacgggcattgcctgcgaggctggccgagaaatcccgtgtaagtgcctgggatggggaggctggggcagcctgtgtgggtgggagtcagccttgagg

SEQ ID NO: 84264 - DNA, 122 bp, Homo sapiens
ctgtaggggttggtggcatcttctggcatctcatctgtagaggttggtggcatcttctggcgtctcatctgtaggggttggtagaagggggtcgagcagcctgtggcaatttagaagtgcat

SEQ ID NO: 84265 - DNA, 122 bp, Homo sapiens
gagctgggatccaaaactgggtctgactgcacaacccatgcttttttaacctcacagttccgccagcgggccaagattttaacatctacgaaatgctgttaagaagtataatagttaggttt

SEQ ID NO: 84266 - DNA, 122 bp, Homo sapiens
gaaggatgcgtgtgtgccggtctgctgtgcatgtgtgtatctgcatgtctgtgatgcatgcgcatgcgtctgtatgtgcattgtgtgtgcaggactttgattctgtgcaactctgtgcatat

SEQ ID NO: 84267 - DNA, 122 bp, Homo sapiens
tattttgccattctacagatttggctccattgtcctaaggtttcagcacaataaaaatctcgtttctcccagtgcttgtcttgacatcaatgtagcattaaaaagtccaagacttttacaga

SEQ ID NO: 84268 - DNA, 122 bp, Homo sapiens
gaaagagaaggtgcacgacaccctcgtaccctcagcctcccacgctgctgccacgcgggacgctccaactgaaatgggcacaggttttccctacacggctgggtccaaatccgtcactgtcg

SEQ ID NO: 84269 - DNA, 122 bp, Homo sapiens
tccccaccagactcaggagcccagctgacttcacccggtggatcccgcacccaccggggccgcaggtagagctgcctgtcaatcccgcaccgtgtgcccgcactcctcagcccttggatggt

SEQ ID NO: 84270 - DNA, 122 bp, Homo sapiens
acaatgaatgttggagagcctctcccgcagatgggtggcacggcctcagcctgagggaaacgtgttcccatcccgctccgggggcaagtccccgccggctcggaccccagggaggtggaggc

SEQ ID NO: 84271 - DNA, 122 bp, Homo sapiens
gggtcagcgtatccatggaggacaagtgggtggcgctttcctgcttgggagagtcctcaccgcttcagatcgcctccagccagcctaccttttctcactgaagttcccttccctgaagttat

SEQ ID NO: 84272 - DNA, 122 bp, Homo sapiens
aaccctggtggcaggtgcggggagccaggaccactgatgggcctgcagggcaaggggctccgcttacctgagaggggtccgcaaggtccagaaggggactgcgggatcggggagggggtata

SEQ ID NO: 84273 - DNA, 122 bp, Homo sapiens
agaataaaaagaatggatattggcagaaaaacaagcaaatggcttctacaccattgctctcgacaagcaagtctaaaatcttagtatttagggggcaatgtaagtctcatctatattgcttt

SEQ ID NO: 84274 - DNA, 122 bp, Homo sapiens
acacagatgcctcctccacacactctggtccgagggtttccgggccctctgcccaggcgccgaggctggagagctcctcccgggctacaactggtcactggcgtggtctctatccgcctcgg

SEQ ID NO: 84275 - DNA, 122 bp, Homo sapiens
gaccagtgaggaagctgggcatcctagcgcgtagccgctaaaggaatgggcaggtagatccggaagccctgcctccatcagccacctgacgccccctcccccgccccgcagaaagccctgag

SEQ ID NO: 84276 - DNA, 122 bp, Homo sapiens
gccgtgggcagtgggtcaggtcagcctgccgtgtagatgcgagaccgccttggaggcgcccgtggatctttgggcttgaggaaatgttcacacacattgtccttgcatatgaaaattagcag

SEQ ID NO: 84277 - DNA, 122 bp, Homo sapiens
ccgcggtcacggtgtccacagactgacttctccagaggcctctccttggcttgtggacaccgtcttctccctaaatcctcatctcctcttcttatacattgtatcagggcccgccccatgac

SEQ ID NO: 84278 - DNA, 122 bp, Homo sapiens
aaacaaacaaagaaacaaaaaactacatgaggtgggttcggtcccaaggctaccagcttacgatccttgggctataagccatctgacttcaactatcactgctgtgtttgctcagtctcaga

SEQ ID NO: 84279 - DNA, 122 bp, Homo sapiens
ccctgcggtgtgtccaccaagtccctagtcaccggtgcacatgcgttagggagtgggaggcggggagctgcatgtcccccatctggctcagcctcaggctgtggcagggctgctcccagtcc

SEQ ID NO: 84280 - DNA, 122 bp, Homo sapiens
tcggggagtcccaaccttcatcagagattcccactggtgccagctcatagctcatcatgacgtgtcccagatggtgactgggagtagcctatgccaagcaggagtttttccccgaagtcttc

SEQ ID NO: 84281 - DNA, 122 bp, Homo sapiens
aaaaaaaaaaaaaaaaaaaaaaaaaaaaagaggctggcctcctgcaagagactggcttcccgggctgtttgctatagataaagaggttggtttcctaggcaggtcactgtgggtcgtgggcc

SEQ ID NO: 84282 - DNA, 122 bp, Homo sapiens
gtgtatcctctttttctcaatgtttctatttcctttccaggtccacctcccccaggaatgcgtccaccaagaccttagcatactgttgatccatctcagtcactttttcccctgcaatgcgt

SEQ ID NO: 84283 - DNA, 122 bp, Homo sapiens
ttgctggacacagaggttgcctggacaccgtgctggcatcaacagggatgctgtgaacatcgtcccctgcatgccgagccctgaccctgggcctcgggccgtcctgtccccctccccgcagg

SEQ ID NO: 84284 - DNA, 122 bp, Homo sapiens
gaaggcaggggccgcccggcgctcccctggacctgacggggaggctgtcttgctcgtgtccgtggaccatccacccacagtggagccctagggatgaggagggacatgaagttgagtggtga

SEQ ID NO: 84285 - DNA, 122 bp, Homo sapiens
ggagtacttaacagaattatgtctcgaagaatcattgtgggaacccttcaaagaacccagcggtgagtgaaacttatattgataaaattatatcttctttcctttacaaaataataaattag

SEQ ID NO: 84286 - DNA, 122 bp, Homo sapiens
cagagtcctcaacagatgaggagccaccggcgttttgctgtcccgtgtgttcttggttgacgggcgttttgctgtcctgcgtgttcttggttgctctgggcacctgtcgggagatgctgccc

SEQ ID NO: 84287 - DNA, 122 bp, Homo sapiens
ttaaaactgaagtgacaggcaggaactcacctatggcaaccacagagcatgcagattccccgaataagaaccgcagtacctgaaaaaccacgggaaccagaaaggacttggttcccacagtg

SEQ ID NO: 84288 - DNA, 122 bp, Homo sapiens
ttagacccctggagccccttttttgccagagctaccggtccacggtttaaatgatcgcagcgaagatacataaagggccttagcattagctgtgcttccaaggcctgacctcctgaccccaa

SEQ ID NO: 84289 - DNA, 122 bp, Homo sapiens
ctgcagtgccctcgtccagagaagcattgagtaatcgcggaaactcagcaccacagatcccgcccccctccctcagaccctgccaggacagccacagcttcctccaggcctggggaggggca

SEQ ID NO: 84290 - DNA, 122 bp, Homo sapiens
tggggggcagtcgggcagcttcggaccaaggagaggtcccagcctgccgctctcccgctgcgccaggtacaacgccgccgccattctgaccatggagcccgtcctggggggcaccccgtacc

SEQ ID NO: 84291 - DNA, 122 bp, Homo sapiens
cataactagcccaggaaatgactctggttttgagtggcctgtaatgggcagaggctccctcggggctcgggatctgcagcatctatgtggatcagcccacacccttcccagagccagggagc

SEQ ID NO: 84292 - DNA, 122 bp, Homo sapiens
gagaacattcctgtcagcactgttctcaggttaccaaagaaacaagcccgttaacaggagcgaggagaatttcattccacagagactactacacagtagtgagcgtccatggtgcaggaagg

SEQ ID NO: 84293 - DNA, 122 bp, Homo sapiens
cctccttgggctcaagtgatcctcctgcttcagcctcgtaaatagctgggcccatgggcacgtgccaccaaccctggctattttttaacgatttttttgtggagatgtggtcttaccatgtt

SEQ ID NO: 84294 - DNA, 122 bp, Homo sapiens
atgcgaaagcttgcgccttgcatttacctggcgcttccacctgcccggtagctcgggccacgggcagttcggccacacccacgctgagaacaacccctgggcgagaaacatcttatcccaaa

SEQ ID NO: 84295 - DNA, 122 bp, Homo sapiens
gtccaggagagagggagccacaggaagacctaagaccaaacgaaatatcgtaacacaaggcgaggcaggcttgtgggaaccggtccccagcgggcggcggcagagcggggaggattggaggg

SEQ ID NO: 84296 - DNA, 122 bp, Homo sapiens
ctaattagggatctaagcgccggcttccgaggagggcctgcatgtcacttcgtgtggtgtcgccggccctcccgctgtgagatggaaatggctcgcctgctctgtgccccactacgcttcat

SEQ ID NO: 84297 - DNA, 122 bp, Homo sapiens
cgatgtccgtatacctcacgtgcagggtccggtcctggaagacgccatagaaaaccagggcgactctggctagaaaggccacaccaaagacgccggctggagccaccttcaagttcaggagc

SEQ ID NO: 84298 - DNA, 122 bp, Homo sapiens
caggtcgcgaccacggcgtggagggcagcggtttccaggagcgctaggaagtccttcctgcggtgtggccctgggagcccggacggtaagtcacaggaggttggggcaccgcagaggtgggc

SEQ ID NO: 84299 - DNA, 122 bp, Homo sapiens
agggcttcccgcgaaggaccggaaaggagcgcctactaaggacgccgtcgaggtccggggcgcctcaactctatagctctaactggctagaagtgcccaacgtggaatgtttcttttttaaa

SEQ ID NO: 84300 - DNA, 122 bp, Homo sapiens
gtactgctgccatcttggctcactgcaacctccctgcatgattctcctgcctcagcctgccgagtgcctgcgattgcaggcacgtgcctccacgcctgactggttttcgtatttttttggtg

SEQ ID NO: 84301 - DNA, 122 bp, Homo sapiens
aggcgggggtcactgaggcagcgaaatgtacagggtgaacggtgctagccctaccgggaccgcacagccccagggtggggtcgctgggcgcggggtgggggtggggtggggggtctcggcca

SEQ ID NO: 84302 - DNA, 122 bp, Homo sapiens
acacctgatacttgacacccgtgtcaccaacagctacagtgcaccacggccttggaacaccgcactcagtgctctgcctggatgagccctgtacccccatgacgaccccactgtggacattc

SEQ ID NO: 84303 - DNA, 122 bp, Homo sapiens
cgcgcgcggtgttgccatggggacgagcggctccggctgaaggtttccgtgcttggaaaccgcgcctccgcggaggtagccgttccctgacctagccatggcacagaacactgaaaaccacg

SEQ ID NO: 84304 - DNA, 122 bp, Homo sapiens
gtcatccccccactccttcctcctccatacttaaggctctgcagcaagggctcaaaccctcgcttttggcaactgtgtgaccttgagcaagtcacttaaccagtatcaatcccagtttcctt

SEQ ID NO: 84305 - DNA, 122 bp, Homo sapiens
ggtctcatcaatccttgtacttctgccattatcatccttatcatatgtcacagattttaacgtgacagtaaggtgtgttttctggttgctggacacagactgacaaagacgaaagccactaa

SEQ ID NO: 84306 - DNA, 122 bp, Homo sapiens
ctgcccagggcagggagctcccgggacatcctgctcgacctgtggcgtcgttgcgaggagcgtgggtttcccactgacacgcctttgcttgcttgctatagggtcttcttgtccctggaggg

SEQ ID NO: 84307 - DNA, 122 bp, Homo sapiens
ccctcgaattccttaatgtccacttctggctctcccagtccctgtgcaaggtgggcacaccggccccttcccagcaatccgctccgtgtctatactttctgaatcaaccaagagccacaaaa

SEQ ID NO: 84308 - DNA, 122 bp, Homo sapiens
gcttcggccctgccgctgggcccgccggcgcccccgtggatctctgtgagcagacgggcccgagccgcatactcctcggagttctccaagagcaggcggcccgcctcctcgttgagtgcaga

SEQ ID NO: 84309 - DNA, 122 bp, Homo sapiens
ccctctttgggctcacagaagcctcgcccctcatgaatatgtagatagcactgcccaccgcgcgtactgccccgccctccactcttctccctcgcaaccgactctcccttcaaacgggaaac

SEQ ID NO: 84310 - DNA, 122 bp, Homo sapiens
aagctcaccagaaagggtgcagcctcttatctaggcaaaacaggcccttcaaattttcaccggaaacaaaaaggtcagctttctctctgccagcgtctcttatgtaaaagctgcagaaaagt

SEQ ID NO: 84311 - DNA, 122 bp, Homo sapiens
tgcacaattattttaattctacttgatagccatgaagacaactcagcgcacttaagcatacggcagcatgcatatggcctaaaagaatggcaagtggggaatctccttacccttgctattga

SEQ ID NO: 84312 - DNA, 122 bp, Homo sapiens
cacaactgcacctcacacccctaatcctcagcgtcacctgaggttgcagagctccagcgtcgctgcttaaagtaccactgcccagtcatcccaggtaactggcccatgagaaagagggagag

SEQ ID NO: 84313 - DNA, 122 bp, Homo sapiens
atgtacccctgaagatggagaaagaggccttccgggtactacgtagcagtcacgtcagaccgggacacttcctgtttagagaggactataaaactccggtccggtaatcacttggggctgac

SEQ ID NO: 84314 - DNA, 122 bp, Homo sapiens
aaataatgaatgaatatcattttcaaagttttgccaagttcctaagtttttggccaggcacggtgactcacacctgtaatcccagtactttgggaggctgaggtagacggatcacttgacac

SEQ ID NO: 84315 - DNA, 122 bp, Homo sapiens
ccccggcgcgcgggggggcggggggcgcgcggggtcggcttatcatggcggatcggacggcgccccgctgccagctccggctggagtgggtgtacgggtaccggggtcaccagtgccgcaac

SEQ ID NO: 84316 - DNA, 122 bp, Homo sapiens
aacaaccctgacgtgtatttaggggactcactcagcagggcagccactgtggtattcctccgggaagccccctttggtgtttgctgtcaacaaggtgcatgttaaggcatccacctggagag

SEQ ID NO: 84317 - DNA, 122 bp, Homo sapiens
tcaccaacgtgcacgcttctttctgtctgctcgctccaaagcagcaacataaaggaaagccgggatggccacagttgatttcaacacgtcagcctttccgagaagggcaatagcagtaatga

SEQ ID NO: 84318 - DNA, 122 bp, Homo sapiens
cgagaatcctcttctgatactaagaaaacataaataatttgtgtcaacatctgtccccaccgccccagggcccagcggcagacccagcctgggaactggtctggagaggccagccggcgtag

SEQ ID NO: 84319 - DNA, 122 bp, Homo sapiens
ttgacaaccatcctcctctttttctcgtccagggttcggtacatagcacctttaccctcccgcgctgcacctggccagagggactgaggtcaaaacacccagcacagacatcccgaactgca

SEQ ID NO: 84320 - DNA, 122 bp, Homo sapiens
atgtgcagaacttagcaggagctcaaaaaatggtagcaattggccgggcgcagtggctcacgcctgtaatcccagcactttgagaggccgaggtgggtggatcacaaggtcaggagttcgag

SEQ ID NO: 84321 - DNA, 122 bp, Homo sapiens
ttattttctagaatctgggatccagttctttgggcataacatgtgtgggttgtcaaagctcggcccagtcttgtccttacagccacttcctgcttaagacaggggtgttgacacatccctct

SEQ ID NO: 84322 - DNA, 122 bp, Homo sapiens
acagcttctaaaaaaaccacagcaagctgttccttggctctggaaaggctaaatgactaacgcccacactgagcatcttctcccagaggtgaccctggtgacacaaggcccagttcctgcga

SEQ ID NO: 84323 - DNA, 122 bp, Homo sapiens
gtctagtccagttcccagggaactgtcacagaagcagcggctccccttctctctggggttcgcgagcggggcagggcatcccctccgagtctccggagttggcgggcgctgttgcccacgct

SEQ ID NO: 84324 - DNA, 122 bp, Homo sapiens
gcggggcgcagggaggggacagcagtgggggcggggcggggaggaggaaggaggagggggcggggagcaaaagttcacaccgctcggggctcagccgctcccctatctcttcccaggcccgc

SEQ ID NO: 84325 - DNA, 122 bp, Homo sapiens
agagggagcccggcccctgggtgtgctcggcagctgctgagatgatggcaagggggagcgcggcacctgtcgtcgtcacctttgtgacgtcccaagcactggggggccctgcggggggtggg

SEQ ID NO: 84326 - DNA, 122 bp, Homo sapiens
cctcagccgaccctgagagagggacctgtggcaggctgttctgggcggcgcctgacgtagcgcctggggtgggctcttccgggcggcgcctgacgtagcgcctgtggtgggctgttccacgc

SEQ ID NO: 84327 - DNA, 122 bp, Homo sapiens
aatagggaaaagggcttcgcgttctagctcactgcacctggacaggtgcctgtgtgacttcggccctgccctgtgacatcacacagtgttgcccaggtgacccagctaggtggaagagctta

SEQ ID NO: 84328 - DNA, 122 bp, Homo sapiens
cgttgatttcctccgaaattgggggctgcgagggacagaggatgtgctgctggcctgcaccggaattgacagaccagaaagtgatgaaatggaaatcagccagaaccgacggcgctgcggcc

SEQ ID NO: 84329 - DNA, 122 bp, Homo sapiens
gtctccctgtctgcggattctgcgtgacagtcacggaacggcgtgatgggggcagcagagcgtgggggcctctgtccagcactcgtggccagcagccccgctttcacaagaacacgggcacc

SEQ ID NO: 84330 - DNA, 122 bp, Homo sapiens
ccgtccgggccctgctggcggtgcggctccgggggcggcggcggggctgattcatggggccgcggcggccgccccccggcgccccgcagccagcgatggtggccgagtggtcggagcggcgg

SEQ ID NO: 84331 - DNA, 122 bp, Homo sapiens
atttcagtctgtccaggacggccgctgctgcagggccggggaagctttttccccaagcagcgtcatgactggtcagactaagggagctctctgctaacaacccccaacactgtccctagatt

SEQ ID NO: 84332 - DNA, 122 bp, Homo sapiens
cattttattattaacatcatcttcccatgtagccaagtgtctgtcatgtataaggaatgtcggtaaatattccatttgaagcttctttgtacatatttccctcgataaataaactctgaatt

SEQ ID NO: 84333 - DNA, 122 bp, Homo sapiens
gacttccttagtgagctccacattacttgatggtaaccacttcaaaaggatcagaatccacgtaatgaaaaaggtccctctagaggatggagctgatgtgaagctgccaatggatgaaaagc

SEQ ID NO: 84334 - DNA, 122 bp, Homo sapiens
cagacgggagagcaccaaaacaaggaccctcagatgggagtgcgccaaaacaaggaccctcggacgggagagcaccaaaacaaggaccctcggacgggagagcaccaaaacaaggaccctcg

SEQ ID NO: 84335 - DNA, 122 bp, Homo sapiens
aaatgatgtggagagattgacaaggactcctgtctccccacccctaggtgtcgctttcctcgcttgctacggcctggtcctgctggtgcttctctcacctctgacgcccttgactgtagtca

SEQ ID NO: 84336 - DNA, 122 bp, Homo sapiens
gcaaatcagaatgaactgattggacatcgtgcatcttgacagtgaataactcagtgttcacggagttcatctgctccttcttgaaactataacatgagatcagtcagaccactttcttcctt

SEQ ID NO: 84337 - DNA, 122 bp, Homo sapiens
caaaagctgccccacaggccagatgcactgtttaacaaggcttccgcggcttctaccttacgtcatccaagaaggcgttttttttgtttttgtttttttttcctaaggccactatcaccaca

SEQ ID NO: 84338 - DNA, 122 bp, Homo sapiens
gcagcagggacagatcggctgttgactagtcagaacgggtcgtggaatgcaaagtccctgcgctttcgctgctccccttaccgtgagaagatctgggagggaggaaaggaggagaaacaccc

SEQ ID NO: 84339 - DNA, 122 bp, Homo sapiens
ccccagagggtagcttttcagtttattacaattactgtgcaggccccccatcatcactatcgaataagtacttgtcattacccacagagtgatgagccagagggaccctggggctccccctt

SEQ ID NO: 84340 - DNA, 122 bp, Homo sapiens
actaggatggtgaggcagtgaaagcaaagcttgacctgcagctgggtggacacttgcagccgagggtccccccggcccactcatttctggtttattcgtagttccagaacatctgtggttcc

SEQ ID NO: 84341 - DNA, 122 bp, Homo sapiens
tgttttgacatataaactccaatttggccccaagtcactgcgagtggacactgccaccaacgtctctgacactaggttatttgttgttgctgttcgctgtccctgtttgcacattaatccag

SEQ ID NO: 84342 - DNA, 122 bp, Homo sapiens
aaaacagaaaacaggaagaaagggaagaaggcaaaggccacacgcacaggccggcccggccgcacgcgcctgctggacggcacttcagggcacaacccacacgcgtctttggacttgcagac

SEQ ID NO: 84343 - DNA, 122 bp, Homo sapiens
aagccagacacaaggctctgtgaggtcacactgcgggctccgctcttattggccaggggacggtagctgcaggactctgctctcctgcggccatgggccagggttgggctactgcaggactt

SEQ ID NO: 84344 - DNA, 122 bp, Homo sapiens
tcttcagaccagcttctcggcttgctcgaggtgtctgcttctctgtgaatttagttggcacggggatttgatttgttgtggtccattttcccaccaactctgcatgaattttcacctccgtg

SEQ ID NO: 84345 - DNA, 122 bp, Homo sapiens
tggtcttggtcttcaaaggccaactcctgccccaccacagtctcactggatcagaagctccggaagtggagcccagtaatccatgattttcacaagtccctgggatagtagagagagcacca

SEQ ID NO: 84346 - DNA, 122 bp, Homo sapiens
ggtgggccaactccagcccccacaatccgatgccaaggccacttcttgccacttcctgcccgcctccagcccgcccctaacaagctagcgcatgcgctgtaggactatttgcgcgccgttcc

SEQ ID NO: 84347 - DNA, 122 bp, Homo sapiens
cctgccagcaaataaataatgaagtttccattacctgataacccacagtcatcaggaaaacgtttccaaagctgtgaatcatcttccacgaaagttaaaaataaatcagattcatctgtcca

SEQ ID NO: 84348 - DNA, 122 bp, Homo sapiens
acctcccaattctcccacagcctctgtctgcttcctgctccgttccaggagtgactgtgtcgctgtagggctttcacacaaatggaaggccccagagggcaacccatcctctctcattttcc

SEQ ID NO: 84349 - DNA, 122 bp, Homo sapiens
cctaagtggggcaggacctgctggtggcccaggtgcttaaggggccagcaggacagctgacgaggctgtgcgctccagcagagggctgggagctgctcacgggcccggcaggcccctgtcct

SEQ ID NO: 84350 - DNA, 122 bp, Homo sapiens
ggtgtgtgtctgctcccagctcaagtccctccgagtgccagagaggaaggcagggagaagcggagcacccctctttgggccaaggccaaggaggactgtggtgagcagtatggcttgtgacc

SEQ ID NO: 84351 - DNA, 122 bp, Homo sapiens
caagaggttttactggtctggctggttgttattgctgctgttgttgttgcttcgagtaagcggaagagatgatagcagtgtggaggacgactgtgacggggtagaaaggtgggtagtggagg

SEQ ID NO: 84352 - DNA, 122 bp, Homo sapiens
actggagaaaggagaactaggtaaagagtgtggttggaagtgggagaagattccagaaggcgtacgtggtaaaggcgtgggagacagggatgcaattctgaaactattgactcttctttttt

SEQ ID NO: 84353 - DNA, 122 bp, Homo sapiens
atgaagctcatgcctcactcggggtctccttctctctccctgcagtgcacccactctggacgggcccggtctccgtgccagggggcacccggcagtctcctatcaacatccagtggagggac

SEQ ID NO: 84354 - DNA, 122 bp, Homo sapiens
ggccagcgtgtgcgctccgacttctaaatccctactctggatattgaagacgggaaagaccgagccgctcattctacagatggggaaaagcgaggcctgaggagtcccagagcgggtgccag

SEQ ID NO: 84355 - DNA, 122 bp, Homo sapiens
cacataggttgtgctgttctgtgtcccataagggcctgcgagaacccagacattctgaatcggtgacgcctgctggaggcagcaacacctgttgcattaattttagaacacacacacacgga

SEQ ID NO: 84356 - DNA, 122 bp, Homo sapiens
ggggggaccgggccaccccccgtgctgaccgccccctccgcctgcagccaacgtgtgcgacgacgaccagctgctgtgccagaacggaggcacctgcctgcagaaccagcgctgcgcctgcc

SEQ ID NO: 84357 - DNA, 122 bp, Homo sapiens
gtggacgacacagagttcgtgcggttcgacagcgactccgtgagtccgaggatggagcggcgggcgccgtgggtggagcaggaggggctggagtattgggaccaggagacacggaacgccaa

SEQ ID NO: 84358 - DNA, 122 bp, Homo sapiens
cacagccccctttccgagacttatttcgcgcggtcggagaatcagattgtgcccacaaggcggaaatgtacgacagcgggttccggtgaccacgaaggcggcaaaggcgacggaatggagga

SEQ ID NO: 84359 - DNA, 122 bp, Homo sapiens
ctcagcgatggtgacgcctcttgtccctggagtaggcaacggagggtttgtattggggggcgggggaagggttggttgttttcactgttttggtagattacaaattaaagttttctaattaa

SEQ ID NO: 84360 - DNA, 122 bp, Homo sapiens
taggtgacgtactcggcgtagcactggggcgcctgcggcgtgatacagcacaggatcttgcgcttctcctcgatcttcttcctgatctgcaggtattcgaagtaggggttggccctgtcgct

SEQ ID NO: 84361 - DNA, 122 bp, Homo sapiens
cacagggtgagttattcctctgtgacattcttttgtcaccaaggggtcttgttagagaggcggttaatgccagctgatatatatattattcaaaggtagggctcaaggtgtgatctgaggtt

SEQ ID NO: 84362 - DNA, 122 bp, Homo sapiens
ttcttcctgaattccccaaagcgcagagacagacaggatctgccaggacagcgcgcagggcggggcggggacaggcgcgccaggagcggggcgggcttccagccgctggttttgctgagggc

SEQ ID NO: 84363 - DNA, 122 bp, Homo sapiens
agtagtgttaaggacactcccagtgttgtgcaatctccagaatgtttcgtgttgcaaaaccgaaactgcactcattaaacaactccccattccccctcccctcagcccttggcaaccaccag

SEQ ID NO: 84364 - DNA, 122 bp, Homo sapiens
gccacggggtggaggagagtcgatgtcggatttagggcggggctgaaccaagcccagggccgcgggggccgtggcttcagcaccgcggagagcgccatctccgggggcggggctggcggggt

SEQ ID NO: 84365 - DNA, 122 bp, Homo sapiens
ggtgagtggtggtaggggctagctggtgaaacttcatctgtatttacagccgcttcctatcgcattaccgcctgagctccacctcctgtcagatcagctgtggcattaaattctcctaggag

SEQ ID NO: 84366 - DNA, 122 bp, Homo sapiens
catcatgaaatagcacagcagataaaatagactgttagccgtaagtttaaaggcctctgtcgcccactttcctgagcccccaagccaagctggggaatgttctcttctattagctgtctgtt

SEQ ID NO: 84367 - DNA, 122 bp, Homo sapiens
agcgcagccgccgctccagcgcccccacccctactcctcgtctctcacgctccgcgccgccgccacgcgccgcctcacattccccgggccccgccgccgcctcttcacacttccatcagcgc

SEQ ID NO: 84368 - DNA, 122 bp, Homo sapiens
cctcatctgcgggcccagagctgagcaactgaggcgtctggacacatggcctgccacagtcgtgtgaccttcacgccgagtctaggccagagatgtcagaggagggaattgcggcccaggca

SEQ ID NO: 84369 - DNA, 122 bp, Homo sapiens
ccttatttcagttaatgccattgccatttgtgttagaaaataaagtctaatctggacactcgctgctcacttgaatcctgcctctcctgcctcaaacaagtgtctctaatgggtcctccttt

SEQ ID NO: 84370 - DNA, 122 bp, Homo sapiens
cccaaacgaaatgccatctcgagcccctaccgctctacgggaggcctcccggaacgaaagcggagaagggggccagcctcatcccactgccagctgaacctcagttcctgaaacacagtgag

SEQ ID NO: 84371 - DNA, 122 bp, Homo sapiens
ataaaaaataaaaaaaataaaaaagagaacttcccccacctctctaaggtgtccaagccccgaggaggccacctcccaggaaccaggtcaggcatccagatagaactgacttataagttctt

SEQ ID NO: 84372 - DNA, 122 bp, Homo sapiens
tatatagtgatggtctttggaaggatacacaattaactggtacagcggttgaggggagttcggaaactgggagaaagtggcaccataaacctttctgctctgtttgatttttaaaatacagt

SEQ ID NO: 84373 - DNA, 122 bp, Homo sapiens
aacaaagctctgattagagcaagcatcagtgactgggcctggtaatgcaatgacgggaggcggcccaacaccagcaaatgcttgctgctggtggaaaaagagcctccttagcacttagcagg

SEQ ID NO: 84374 - DNA, 122 bp, Homo sapiens
ctgcggccgcagcccgggaaagcgcagccccgcgggcggggcgcagcgtgggcgcctggccggatccggctcaatgggtggccgcccccacccagctcccaggcttccccgtcctgcacttc

SEQ ID NO: 84375 - DNA, 122 bp, Homo sapiens
ggcgggaggcgggaggcggggaccgggccagcggaggtggggagcctggaagctggccctcgcgaggcggcgcggggagggtgggtgaagagcgcctgtgcgcgctaggcggagcctcaccc

SEQ ID NO: 84376 - DNA, 122 bp, Homo sapiens
tgccccagtcttctgcactaagctgtggtgagcacatccgggttccactggatttttgtgcggggagggggttttctacgttgggtcaatgatgagaatcttatattgtcctgaagagaggt

SEQ ID NO: 84377 - DNA, 122 bp, Homo sapiens
gagcggcgcctggccctgggaggagggagccagagaccagcaacagcgagagggccagggcgctgggcagcgacgaacccgacatcctccctagcagaagacccaacagcgaatgggccggg

SEQ ID NO: 84378 - DNA, 122 bp, Homo sapiens
gttaggaaaacagcgaagaatgccgggactagtgaagcgggtaagggacgtgcggaatcgcggccccagcggctgccaggcatgatgggagttgtagtcggcgcggctgcaaggcatcaagg

SEQ ID NO: 84379 - DNA, 122 bp, Homo sapiens
gggacagtggacagtgagtcccccggccgggatggggctgggtcacccacgatcctagcacgtggtgagtgggtttcaggtgaataaatctgggagccgggagccccaggcagcttactcag

SEQ ID NO: 84380 - DNA, 122 bp, Homo sapiens
agggtgtgtgtgcgaggcgctagggtgccagggggcgaggggtgaggggcgaggtgcacgcgggctgctccaagacaacaggagttgtaaaaaaccggcccggctggcggacgcgcctggcg

SEQ ID NO: 84381 - DNA, 122 bp, Homo sapiens
cagtcaggtgaggcccggacaagctgggggctgggctgggggccatggcccagccccagccgcagtccccaccgtgccctcctgtccccaggggagtcacgagggtcaaggcggccccgggg

SEQ ID NO: 84382 - DNA, 122 bp, Homo sapiens
cccacggtggggggacttgaacccagaggtcctcaggctggcaaagtgggaccagggtgccgtgcacggctgagaaggctcccgcagcagcagaaccgggagaacgggaagggctctccgtc

SEQ ID NO: 84383 - DNA, 122 bp, Homo sapiens
ttgggtccagaagtcttcctgggtcccccagaggcccagagcttcctgagtagccatacccggattccaagagccaaccactgggacctggagctgctcacaccagggaacctggaacggga

SEQ ID NO: 84384 - DNA, 122 bp, Homo sapiens
ccacggaccccatggcaggggtggcgtcttcatgagggaggggcccaaagcccttgtgggcggacctcccctgagcctgtctgaggggccagcccttagtgcattcaggctaaggcccctgg

SEQ ID NO: 84385 - DNA, 122 bp, Homo sapiens
aggatggaggccccagctccgaagccctgatcatgaatttcaggctgctcctccatgttccgccaccagggtgccatttccctgatgatgagccaagagggacatgtgaggaggagggggcc

SEQ ID NO: 84386 - DNA, 122 bp, Homo sapiens
ccttacagtctgtaaaataaatctttaatcgccattatccattaaatgtctagcaactcccgaaaacaaaatgtcaagttataaaagtgacagaggaccactacctgtttgactatggcccc

SEQ ID NO: 84387 - DNA, 122 bp, Homo sapiens
tacagacaatgagtgtgaggtgggagcacctttcctaagccacatcctctaacttggtgtcgatgggggcatcctggcatctcatggggctggggaagattgctatctctagctctcctgac

SEQ ID NO: 84388 - DNA, 122 bp, Homo sapiens
gtgctcgggagggggcgggtgcgggccgcactgccgggcggggtgcgcgagtgaggagggcggggtgcgcgagagaggagggcggggtgcgcgagtgaggagggcggggtgcgcgagtgagg

SEQ ID NO: 84389 - DNA, 122 bp, Homo sapiens
tccaggttaccaagtgaacaaagccgaccaactgtccaaccccttccacgtctcgcctcacgtgccttgccccttgcattttctcatcgccagcctgtctcagggcagattaaatgcagctg

SEQ ID NO: 84390 - DNA, 122 bp, Homo sapiens
aaagtgctgggatcacagacgtgagccactgcgcctggccaagttagttctggttttagtcgtactttttatctctattactttggctatgctataggcctcagtttcctcatctctaacaa

SEQ ID NO: 84391 - DNA, 122 bp, Homo sapiens
gaaaaacaaataaatacaagtgcagctggcacggcgatggtgcctctgcccccgagcaaccgtctggtgacatcaaataagaagccctgagaactctcacaccgctgctgttgttcatattg

SEQ ID NO: 84392 - DNA, 122 bp, Homo sapiens
agacccacaacttagctcccaaaggcgcctggagggctctgggcaaatgaagcctccatccgggatgcacggacttgtgctgctactgttccctcctgggctggagcgggcccgactgggaa

SEQ ID NO: 84393 - DNA, 122 bp, Homo sapiens
aatagtttgggatggctacactggagagtgatcaagagtgagtgtagggcaggggttggccgactttttccataaagtgctctgaaagttgcagattccaggagaagtaactattgtcagac

SEQ ID NO: 84394 - DNA, 122 bp, Homo sapiens
ttttagtagagacaaggtttcgccattttgcctagcttggtctcgaactctgacctcgggcgatctgcccgcctcggcctcccaaagtgggattataggtgtaagccaccgcgctcggctga

SEQ ID NO: 84395 - DNA, 122 bp, Homo sapiens
cctcccgggccctcgctggtgccccgtcctcccgggccctcgctggaagccccgtcctcccgggccctcgctggtgccccgacctcctgggccctcgctggaagctctgctcatttactccc

SEQ ID NO: 84396 - DNA, 122 bp, Homo sapiens
cttgggaggccttaggaaacttacaatcatggcagaaggcaagggaaagcaaggcaggcacgtcttacatggtggaaggggagagtgagagtgaggaagtgccacttcctcactctctttaa

SEQ ID NO: 84397 - DNA, 122 bp, Homo sapiens
agatgcctcaaacctggagatcttccagtatcaactcacaccttcctcagtgtggtcttccgagccattgatttcctacagcagcaccccttctgctctcttcgcagccatcaactggccca

SEQ ID NO: 84398 - DNA, 122 bp, Homo sapiens
aaagactgagggctggggggggcgactcctaatcaggagcctggcaagagaccccgggaacggcagcccactgacagtggagaccaggagctccagatggctttttgtctcaataaaataaa

SEQ ID NO: 84399 - DNA, 122 bp, Homo sapiens
gacattgagacctcggcaaagagcttccctttaccctctcttcccactggcctttgtgggcggtgtggaatgtgctgtaggccttgcgagagcggcatttcttttttttttttctctctttt

SEQ ID NO: 84400 - DNA, 122 bp, Homo sapiens
gccgatgtcggctgtgtaggagatggtatgcagggcgtggtccatcatggcctcctggggcgggagaggcagcctgggtgggttggggggccgtgccaggctcgatcaccccacccgcatcc

SEQ ID NO: 84401 - DNA, 122 bp, Homo sapiens
ttgaggcagctgaacacagaggaagcccgtggagcctggccgtgagccaggtgctcaaggcgggcggcgggcggcggccttcaaatggcaggggggtcattgttcctcttggcccttctgct

SEQ ID NO: 84402 - DNA, 122 bp, Homo sapiens
ttccaacacagagacctccatacataagtaacatttcaaggcattctctttacatgtaatcgataatacaaaaaacacctgggctcgcactctttgatacaaaggagaggtagaaagaggct

SEQ ID NO: 84403 - DNA, 122 bp, Homo sapiens
tcagccgcttgggagccctgccttcgcccccgcggtgcacacacgcgtctcccccacgtgcgcaggcgccctacctggccgtgcagcatggactccagcactagcgcccacaggtccacaaa

SEQ ID NO: 84404 - DNA, 122 bp, Homo sapiens
gcgggggcgcgcgtgtgcgtgggcgcggggaggggggtggggaagccgcggtggcggcggcggcggcggcagctgctccctccgcatgttctcgctgcatcttccgagtggggggagttatg

SEQ ID NO: 84405 - DNA, 122 bp, Homo sapiens
cctgggccgcggggcgggatcggtctccgggggcgcacgggtacgaggagggcgcgggcgcgagctgctgccgctaccagtggtccccgagccaccgccgccgccaccgccttatcgctgca

SEQ ID NO: 84406 - DNA, 122 bp, Homo sapiens
gggctccccgctgcgagcgcgccccacagccgggtgccgccaaaggtctcctgctgttagcggtgactcacattcccagtgatttagaaaaactgtggtgccgagtgaaagaaaaaaaaaaa

SEQ ID NO: 84407 - DNA, 122 bp, Homo sapiens
tgcccggcttagagaaccaggaatgggttatcagcggctgtgcactggatggtggggccacgacaacgtggctcgcctggctgcggttggtggtggcggcaacggagacggcagcgtggctg

SEQ ID NO: 84408 - DNA, 122 bp, Homo sapiens
cttcaaatcttggcttaaaagccttttctcagtttcattgaccaggctatctaacatttacgattcccccagcatatcatccattttattcttctttacggactcatttctggctcgtagta

SEQ ID NO: 84409 - DNA, 122 bp, Homo sapiens
agacacccggctgcggcctaagaggccaggctgggtgggcttggctgcagccgccagccccgtgttaaagcggcagccagggaggtgtatcctccccggggtctgcaagacgccggctcagg

SEQ ID NO: 84410 - DNA, 122 bp, Homo sapiens
atcttacattcaaccctcacagccaataggagccgattgctcctctcgcgataatcggggcgtcggatcccgcgagatctgggactgcctaccggccaaaattaaagtgaacgcttcagcag

SEQ ID NO: 84411 - DNA, 122 bp, Homo sapiens
gatctgcctcagtcacttaaagatcgcgaaacccgagccctggacgcactctgattggaccggctgagctgcttcgccacgtagccctggggcgcccaccagcacctggacagcatccattt

SEQ ID NO: 84412 - DNA, 122 bp, Homo sapiens
caccataagggagtgaaactgaaagtcctgaagttcagggaggtggctcgccaggctcctcggcagaaggcgcggggattggacggtttctttctagaagatggagcactgtcgctctctag

SEQ ID NO: 84413 - DNA, 122 bp, Homo sapiens
cagcgggcagaaggaagtgtgccggacgcgagagagaactacggccgagacccgcggggccggctcaaagcccgacctctgccatacgcaccgtatctttatgggagccgatgaggtcagca

SEQ ID NO: 84414 - DNA, 122 bp, Homo sapiens
tcggttttagcaattctcccggccagactgggcacggagtttgcagctaatccttgtgcacgtggccgtcttcctggaggcggcgggttttaaaacctttacccggcccacggggaagcgac

SEQ ID NO: 84415 - DNA, 122 bp, Homo sapiens
cgcgcgtcacggccctgaggccatggtgggtggatgcggctgcggaaaggctggggagtccgagccctaggactgggagcagcgaggtagagaatgaaagctgcacctgtccctcatcctgg

SEQ ID NO: 84416 - DNA, 122 bp, Homo sapiens
tcacggagtacatgagcaagggtgagtcctgggcggccggggcagggggcaggggcactccggacagggcagggagcatgagcctcatttcctctcatgtctagaatgggcatcttcaaagg

SEQ ID NO: 84417 - DNA, 122 bp, Homo sapiens
cagctgttctcttttttccaattcttttctttcattgaatcgtaaatcctgttttcacaacggccactgtttctattgctatggaaatgatgacgatgtatatcacaaattcaaatattatg

SEQ ID NO: 84418 - DNA, 122 bp, Homo sapiens
acctcaggggctctgccttgctctgttcttttccagtctctcaattcagcaggcatttcacggttctcctgggggctgaggggagggaggcaggcaggagtagttttcgttttccctgggta

SEQ ID NO: 84419 - DNA, 122 bp, Homo sapiens
cttcttttcaagtttgagggggttgtggaccatgtgaggctggacggctcacatgtcagccgccaggctcttagttacagacatggcaaacttccatcatttaagcagtggcacagatgttg

SEQ ID NO: 84420 - DNA, 122 bp, Homo sapiens
ctaacttcattttaaattctcacgcttaaggaccatgtttgattagtttcttttatcccccggtaggaaatggcagtacttattctttatcgtgtccacatttgggctgtattatcagtctg

SEQ ID NO: 84421 - DNA, 122 bp, Homo sapiens
ggcgcccgcgccacagggtccccccgaggccacccagttcagcctgcagtgggagagctacgtgaagcgcttcctggacatcgccgactgccgggagcgctgccggctgccatctgagctgg

SEQ ID NO: 84422 - DNA, 122 bp, Homo sapiens
tgcaattggtggccaaggatgaactactgatgtgagcaaaaggccaactaagtgtccgcccgcttactcattttttctcttcttcttttccactccctccctcctcttccccttcctgctcc

SEQ ID NO: 84423 - DNA, 122 bp, Homo sapiens
gtacacaggcagtgtttctccagcgtctgtgcacgtactcaccatatccctccttctttccgtgtggatgcatgctgcttttgagcgagagtttggcatttttcataaggtcggttgatgtc

SEQ ID NO: 84424 - DNA, 122 bp, Homo sapiens
cccggggcagctggccgagccctcgatgcctcccgtctgacggaggcgcccgggaagcgccgcccacctcggccccgcaccctcgccggcctgccgggtctccgccagccctagcagacaga

SEQ ID NO: 84425 - DNA, 122 bp, Homo sapiens
gtgggttgtgtgtcatcagctgagagctgttctgtggggagtgaaaagaggccctgtcggcgtcttcaccagtggtgggtgacgctccatgctggaaagttccagctgctgtctggagtcct

SEQ ID NO: 84426 - DNA, 122 bp, Homo sapiens
cgccttggcctcccaaagtgctgggattacagacctgagcctctgtgcctgtccttcgaccggggatcttcttaacgtgcaaattctgaggcagatctggggtaggatcgagattctgcgtc

SEQ ID NO: 84427 - DNA, 122 bp, Homo sapiens
gagggcgagagaaggggggaggcaaggggagcggggacggcctcgtgttttgggtcagtccgattttatgtggagttttataagcattcaaaggattttattataacctacaaagccctctc

SEQ ID NO: 84428 - DNA, 122 bp, Homo sapiens
tttcggcagcagcagggttccctttcctagaaagtccccagctctggccctaccgacgtccgcacctgaggcttccctgctgggggatcaggcactgtcagctcctcggggccgccctcagc

SEQ ID NO: 84429 - DNA, 122 bp, Homo sapiens
ccatcctctgacttgcgtttcttgcgcttcttcgtctctggcaagaatccctttttcttccgcttcttactgatggggctctgggtggcactggggatctccttggcatccttcttctccaa

SEQ ID NO: 84430 - DNA, 122 bp, Homo sapiens
gaatattttccccaagtcactcagccttgtcgactcaatcatcgcagcaaatggcattatcgcgggcatctgtgtaacccaagctgccgtgggcctatcaaatagcccttggtggtatggct

SEQ ID NO: 84431 - DNA, 122 bp, Homo sapiens
cagccggcccgcccgcccaccccgggaccggtaccttttctggcccatacatgtcgtcgccgtattcgttgaggaggctgtaggcctcctccacgcacttgcgctcgttcatattgcaggtg

SEQ ID NO: 84432 - DNA, 122 bp, Homo sapiens
cggtaacacagaaacatctggcaggatggagtggttggcggaagacacatctgacgagatcgaatgttttgcagaagagccatgtgaccagatccctggtttggcagaggagacatgcgaga

SEQ ID NO: 84433 - DNA, 122 bp, Homo sapiens
ttcccggaaatgaagcaggctctttgacttccctataggaacagcatggcgcacaggcgtcgcgtgtgaaggcccctcatagccgtgatttgttgatctgttttttttcagcttcagcagcg

SEQ ID NO: 84434 - DNA, 122 bp, Homo sapiens
agccccggaggaatgggtcgctgtgggtctgtcgcccccgctgccccgagaatgtgttctcgctcgtgctggcaccgggttttctccacctctatcagagaaacaggcaacaagaaagctgt

SEQ ID NO: 84435 - DNA, 122 bp, Homo sapiens
acttgaatttcaagcgtgcatagagttagactgaagagcactgcataaagaagagcccctcgtcaagatgtaaattgcttcctaggctcactgctcaacaggggactggatgggatgcgagt

SEQ ID NO: 84436 - DNA, 122 bp, Homo sapiens
caacaactgtttcattctcctggtttatgtggaacgaagccaaacatatggcaaactatacgattacagaggaatttggatgtatgggttcctcctctatgtatcattttcaatcccaccgc

SEQ ID NO: 84437 - DNA, 122 bp, Homo sapiens
tcacatgggctcctctaggcccgctcccgcatccctttctgtcccctcccacaaccacagcgactcttcccataaacaaccgtgacctggtcatgccgcctcagccgcctccagcatggccc

SEQ ID NO: 84438 - DNA, 122 bp, Homo sapiens
aggaaccgggacagcagcgaactcagtccggccgggcccagaagctgggcgggaaggttccgggcttctgcgcctgcgcagcgccgccgcgtgagcgtggctgcaggggcgacagcgggccc

SEQ ID NO: 84439 - DNA, 122 bp, Homo sapiens
tcacggggtggaagggggaacgaaacaggaaggcccacgaggtcccatatgccagcgtcccggttcccaactcttcacaggccatgtggccaccctcagggcctgggcccccaggaaacacg

SEQ ID NO: 84440 - DNA, 122 bp, Homo sapiens
gttgggcgctaagccttcgtttgaaaaaagccaaacctctccatggatccctaagcttaccgatgcagaggatggccacttttgtggacagtatgagctggtgatatttctggtagaaaaac

SEQ ID NO: 84441 - DNA, 122 bp, Homo sapiens
aacaaaacaaaaaactccggattgggccctcgaagtgcccatggggcatccagatactcccgacatctgcgcaggagagctgggcaccctggtggggacgccaggacacaaagccgggcaga

SEQ ID NO: 84442 - DNA, 122 bp, Homo sapiens
cggggagggggcggggccaggcggggtaaatgcacactggaacggggccaaacaggtgggcgaggagggggcggggccaagcgggatagatgacacgagcggggctaagcaggtgggctcgg

SEQ ID NO: 84443 - DNA, 122 bp, Homo sapiens
tttggagaaacgttcatctctaaaacctcaactcaacaaaagcttgcttgaaatattttccggccggacgcggtggctcacgcctgtaatcccagcactttgggaggctgaggcgggtagat

SEQ ID NO: 84444 - DNA, 122 bp, Homo sapiens
ccacgcgtttccaaatggctgccacctcctgcatcacagtccccaccagggttgccagggcgaccagggccagggacggcttccacccaccccactcagcccctctatggcccactgctagc

SEQ ID NO: 84445 - DNA, 122 bp, Homo sapiens
tgggcgggccggagtgcgcggtagagggggcggcgcggccggggtgcgcggtagagggggcggagcggccggggtgcgcggtaaagatggggcggcgcggccggggctcgccagcaccagcc

SEQ ID NO: 84446 - DNA, 122 bp, Homo sapiens
acagtgcgggtggaactcagcaacactgagtctcccttccctgtgcaatcccatgaagatcggaggaacccttgtgcgcctttgggaaagggacttcctccctataggcaggagggtagctg

SEQ ID NO: 84447 - DNA, 122 bp, Homo sapiens
aagaaactcttcgaccttcctctccctacctagttaactccttttctgcttgcaggaacacgcggcaggtcgcctcctccccggtgcacccgtctgtatgcaggtgcgcttccccagatgag

SEQ ID NO: 84448 - DNA, 122 bp, Homo sapiens
ctgactttgattccgattccatgaaagagcctgtctgcccagtctcgcgagtggagagggcgttccgtcttccccagacttgccccgcgcccctcggacttggggagggtaggacgcagcag

SEQ ID NO: 84449 - DNA, 122 bp, Homo sapiens
tccctagtgatgtgggagtagccaccgaggcatgtaaggctggccacacagggtgcactgcgtcagcctgtgcccgacaggaagggaagagaaatacgtcagttactctaacaagaagaatt

SEQ ID NO: 84450 - DNA, 122 bp, Homo sapiens
cccaagactcccaatttccgacctccctggcccgcgaggggcggggccttcctctcggggcgtggccgtcaaattgaattttcccaatggggcacgagagtgggaggtacccaatcgagggt

SEQ ID NO: 84451 - DNA, 122 bp, Homo sapiens
tcggtcctgctggctgagcgcggggatggctccggagggagacactcaggaaaccacctccgcccttcccccatctctatccagcggcgccccctcaccctgcccccggctcgcttgggctg

SEQ ID NO: 84452 - DNA, 122 bp, Homo sapiens
gctgggcggcaggactggggtggggcggaagggctcggcaggaggccccacgtgcattcccgcgaggggctcgggggccgcagtggaaaagaagggtaggctgcatctgcctctgcgggggt

SEQ ID NO: 84453 - DNA, 122 bp, Homo sapiens
tcaagcaggtcacttcccgatgatcagaaggtggacgctggggcctgaaatgcccaggctcgagatgaaaaataatccaactgaataaataaatcaccaaagagagcagcaaccactgtctg

SEQ ID NO: 84454 - DNA, 122 bp, Homo sapiens
gaactctgaagtgctgttgtcacttaactctacaacaggacattagtcttgtgttccaatcgtatctcctgttagcccttcatacgcatcctgggctccagataaactgaatcatgtgctta

SEQ ID NO: 84455 - DNA, 122 bp, Homo sapiens
cgcggccggcgcgttgcccactgggagttgtagtcagtggcgcgttgccctgacgcctgccgggccgggcgtgggggcctgtgggaggtggcgcggccgggcccagctgcggggcggaggcg

SEQ ID NO: 84456 - DNA, 122 bp, Homo sapiens
ccggctgggtacagggtgagttccacgcagccagccgtcaagataactttatcaaggacgcggaatcagatttcagagaatacagtggacagccttggaaggcacttggaagtttccagtcc

SEQ ID NO: 84457 - DNA, 122 bp, Homo sapiens
aatcaccagactaatgcataaattcaatacctatttggaaagcagcacggcacaaacccacgagaagaacatgaagtcatcattccatgggttcatttgtaaccacacttggaagtagctct

SEQ ID NO: 84458 - DNA, 122 bp, Homo sapiens
ccactcaccccaggaggagccgaggagaaccaggcttagggtcaggctgagcagcaacatcgtggcagatgtgaggttgggagctgggtctggctttatgggtcttctcgtccttgagctaa

SEQ ID NO: 84459 - DNA, 122 bp, Homo sapiens
caagtagagaattgatttcaagttcatgagctctttaaggaaacttgtattagctaccgccggcggcgtgtggtgtgggagatgcaggagttggtgagagggtggctggccctttgggtgct

SEQ ID NO: 84460 - DNA, 122 bp, Homo sapiens
cgcttcccacgtggcacaccccgtcttccccgcagcccttaatccgccgatcctccctggcgatctcagcgcccccaggggctgaccaggccaccgccagaacctctccgtcctcacgggtc

SEQ ID NO: 84461 - DNA, 122 bp, Homo sapiens
gggtaagatctggctgacggtgctcttcatcttccgcatcctcatcctgggcctggccggcgagtcagtgtggggtgacgagcaatcagatttcgagtgtaacacggcccagccaggctgca

SEQ ID NO: 84462 - DNA, 122 bp, Homo sapiens
tggggcctcacttatgctgctgaccctcctgccaccaagacatgaagatcagaaaccagacgcagaagaaaacacagggtcctgggaacttctgcgcttggctcataaatctttcgggggtc

SEQ ID NO: 84463 - DNA, 122 bp, Homo sapiens
atctgatagtggttacgggctattatgcaagatcatgaatccttttcttttttttcatctcgtcagccagtacagaatgaaggatcatgaatcttaaaactgatttcctgagaagtaataag

SEQ ID NO: 84464 - DNA, 122 bp, Homo sapiens
gctgcaggtctggaggattgagaagctggagctggtgcccgtgccccagagcgctcacggcgacttctacgtcggggatgcctacctggtgctgcacacggccaagacgagccgaggcttca

SEQ ID NO: 84465 - DNA, 122 bp, Homo sapiens
gcagtttgagaagtgtggcaagagggtggatcggctggatcagcgttgttccaagctgcgcgtggctgggggccatccgggcaactcaccctggacagtcagcttgcggaattggtgaggca

SEQ ID NO: 84466 - DNA, 122 bp, Homo sapiens
aggggggcaagaggggctggctcttaccccaagcatagcaggacgtgactaaccccgctgcgatgggggaaactaagagccaggggggcaagagggtttggctcttacaacccgaaacgggg

SEQ ID NO: 84467 - DNA, 122 bp, Homo sapiens
cacattttctccaaacagcacatttcaaaagtgagggagaccgttggcagtcagctcgatcgggagaaagattacttggctccgaccacggttcggcagctgatggcacagcaagaacttga

SEQ ID NO: 84468 - DNA, 122 bp, Homo sapiens
agaccctgggcacccctgtggcgggccggaccccgggaaagtagggcccctgctgccccgcgcacttggtggccaaacacctccggagcctgaggtcttgggcctcctctggctctgcgtcc

SEQ ID NO: 84469 - DNA, 122 bp, Homo sapiens
aactggtaattttgttgacatttccagagacaatttgggaaattttaaacagctcctctacgcagcattctggcatgtagaaagaggtaaactgtaaagactcttgctttgaaaagttattt

SEQ ID NO: 84470 - DNA, 122 bp, Homo sapiens
tgcctgccatttagttattttcacactccacaggggacagattttcccctgcaactttcacgtgtctcaagcagggtctcaagactactccctattccccattcttttagcctaactgactt

SEQ ID NO: 84471 - DNA, 122 bp, Homo sapiens
aaaaattaaacaaaacttaggccagctgccatttaagaagggctccggggcctccagactcggtgtgaccgtagccgtgcccggtgctcccctcgcggaggcgttagggcggcaggtttatc

SEQ ID NO: 84472 - DNA, 122 bp, Homo sapiens
gaaggctgtgattgggcttttttttggagtggcctgtttgaaaggctgagggtgaaggagcgacagatctgaaaatagccggagctgaggggcctcagggtctaccctgactcgcttttccc

SEQ ID NO: 84473 - DNA, 122 bp, Homo sapiens
aaaactgtcactctgggctcctttttgaccacagcagctatgcggaagcagctgcagcttcgataagggccaaggggcaattcagatcccagggcggccgcctaaagcctcacctgtccatc

SEQ ID NO: 84474 - DNA, 122 bp, Homo sapiens
agggaagagacaagacctgggaagggacgcctgtggcttagaaagaccctcaggcagggccgggcgtggggcgcgctgataaaaattcctggagctgtattattcacatcgcagatttgtcc

SEQ ID NO: 84475 - DNA, 122 bp, Homo sapiens
aactaccacccctccctcctccgctctctccccttccccccatcccccctttctcagtagcggggagattgctgcacacgccgccctcagctcggctgttctgagcacgctgagcggagggg

SEQ ID NO: 84476 - DNA, 122 bp, Homo sapiens
tatgatgtcaagaaaacctctatccctccatgtgggtgtccagaactaatggatggccaccggatgccacaagaggaaatcaggatcactagatgagacctcttaggtaaagtatatctgat

SEQ ID NO: 84477 - DNA, 122 bp, Homo sapiens
tacacgtggcgcgcactgctcaggaagctttccttggagggctggatcccgcaaaggtgtcgaaaaaggatgagtcccggatatcattcgctcaggtgaggtgggttcgggtcccggctgcg

SEQ ID NO: 84478 - DNA, 122 bp, Homo sapiens
cacgggagagcagggcggaccccgcgaacggggacagcacctgacggcgacatccacaaacgccgccccgcaggagcacgcactcccacacaaagcgcctgcagctgacagccgccgggagg

SEQ ID NO: 84479 - DNA, 122 bp, Homo sapiens
tccccgatatttgtgttctgctgagggaacccctacccttgcggtgtggggcagacatggcgggcgtgccccatcgaggctgtgtcctcatgggagtgtgtccctgaaggtgtcctgctgag

SEQ ID NO: 84480 - DNA, 122 bp, Homo sapiens
accctgcccccgcgcgactcgcagcctgggttttatggctgggcaggctcgaatggcagccgggtcgcggttacctgtcctaggaggtgcacactcctgtgggctgttgcccgctgacacca

SEQ ID NO: 84481 - DNA, 122 bp, Homo sapiens
aacctaacgcagaaatgggaactggctccaacgccacacgaacagccagcctgggtctatcgcgcccagttcagacccgggctgcagcttggagacgatgacgtccaaaaaccaagctccag

SEQ ID NO: 84482 - DNA, 122 bp, Homo sapiens
gccaaagcctatggttactctccctggcctggacaagtagagtaataactaatacacactcgtgaacttagggttccactagattctctccactttgcagttctctcctgtatctctctcct

SEQ ID NO: 84483 - DNA, 122 bp, Homo sapiens
gcctttggccgtgtccaggtaggtggtgcccagatggctgcgctggttcatagaggcagacgtgtctatcaggaacagtaagatgggcatagtgctggccggggacaccggggcccgaggtg

SEQ ID NO: 84484 - DNA, 122 bp, Homo sapiens
tgtctccttccctcctgtcactcaggcggggcagggaggggcagacacaaaggcttcctgcgggtgagattggtgccgagctctgtgcccagcctggagcctcaggcctaccccagccttct

SEQ ID NO: 84485 - DNA, 122 bp, Homo sapiens
gtcaccaaaaatacgtaaaatattgccagctatgaagaattcttttaggcggcgccgtgacgcgcctcgggaacggtcctcggcgcgcgccgctctcttaccctcgggcctcagaagtcggt

SEQ ID NO: 84486 - DNA, 122 bp, Homo sapiens
agctgatcagcagcgggctttgtgaagatgcctggtctaccacgtgcctccagctggtcacgcccaagactccctgagccctctggaagggcagcacttgcccagtgcctccctccaggtcc

SEQ ID NO: 84487 - DNA, 122 bp, Homo sapiens
tttttttagtggggcggggacagggtctccctctgttacccaggctggagtgcagtggtgcgatcacggctcactgcagcgtcgaccaatggggctcaagcaatcctcccacctcagcctcc

SEQ ID NO: 84488 - DNA, 122 bp, Homo sapiens
ggatagaggttctggaagccgagggcttttctgagactgggctcgaggtctcattcgacccgctcatctctttagatggtttagtggcctggaacaaaaacaggggtcaggggtcagagagc

SEQ ID NO: 84489 - DNA, 122 bp, Homo sapiens
caaagagagaactgtagagacccgtgcatgtttagacctgctacactatccaagaaaaatcgcagaattggctgggcacagtggctcacgcctgtaatcccagcactttgggaggccgaggc

SEQ ID NO: 84490 - DNA, 122 bp, Homo sapiens
cgcagtcccatgtctaggtatttatgcaacagaaacctgtgcttgggtcacatgaggacccgtcacgagtgttcagagcagcctgaacctgacagcagccaccagagctggaccgaccggcg

SEQ ID NO: 84491 - DNA, 122 bp, Homo sapiens
tgtgtgtgaatgtatgtgtgtgtgtgtgtgtgtgtctctgtgtgtgagagagcgagcgagcgtgtatgttctcattaggggacgatctatgatttgacagcctcactgctgctgctcctgct

SEQ ID NO: 84492 - DNA, 122 bp, Homo sapiens
gtagcctccgccaccactcccagttcacaggtatccttcttcagcgcctgctactcgctgcgcgctgcgcgccgctccctcctgtcgacatcgaattgtattcttcacgcaagccgcgagag

SEQ ID NO: 84493 - DNA, 122 bp, Homo sapiens
agagggagccgtggctgaatggtctggggagggaggagtgggtttagcagctgtggcttccgaggaccccacctagaccggtcctagcagggctgtggggaggagctcctcgtccccgccca

SEQ ID NO: 84494 - DNA, 122 bp, Homo sapiens
tcgcctcccgcgggtcccgcctggccttggccgacggaacaagaacaacaaaggaagcggcgcgaccggcggagggggcgcccgccgccctcccacccctcatcccggccgggccgatggcc

SEQ ID NO: 84495 - DNA, 122 bp, Homo sapiens
gtccagagaaagtaacctactgctgaagctctgcaaacttgagcagtcaaccaacttcaccgctcacaaacgtttggccgctaggcattgtgactttctgcccagataaaagtctttttttc

SEQ ID NO: 84496 - DNA, 122 bp, Homo sapiens
ccaccagcttgctggcccttgcataacatccttagggggcatttgcagtccagaggctgccggaatctacctgagaccctgggcatccgcttgtccgaggcccccctgtcctagtccccagc

SEQ ID NO: 84497 - DNA, 122 bp, Homo sapiens
agggaggctagttttcaatgtgttctacagaaggataattaaggcagtgtgtcacctgctcgtctgctatttttaaaaggaaacaaacataacctttgcatgtgagaggcattgcaaactag

SEQ ID NO: 84498 - DNA, 122 bp, Homo sapiens
agtgtgggggcggggagcgggtggctccttccccgcgagccggtggggagatgctggggtcgcgccctcttcctcttccacggggtctcgtcccccgggggccgccaccctctcggtgtgag

SEQ ID NO: 84499 - DNA, 122 bp, Homo sapiens
acaccctgccacgcaatttgcaggattttctctggcaagtatcagaccacatcacacacccgcttacaaccttgcatgtgtggccctctcggctcccagacaaagcctgggccccttgacat

SEQ ID NO: 84500 - DNA, 122 bp, Homo sapiens
gtaaaaccatccaggcttggtagtcactatggtgctttcctcagggtcccctcccacaggcggctactgaggtcattttatcaggccccctgggctcaccttttgttccatcccgcacaggt

SEQ ID NO: 84501 - DNA, 122 bp, Homo sapiens
ctcagcagccgcggcaggaattaggggacatgctcgttaattgtttccactatcagccgccgtctgcctcctgtgtgcacggatcaaaccttaattggtctttacatttatcatggtgaatt

SEQ ID NO: 84502 - DNA, 122 bp, Homo sapiens
cctataggaggcagaatcccattcatcaaacgctgcaaagagcttttctttgttcaccatcgtcctaagtacagtacgtgttaatgagcccgggcggtcagatggaaggagctcggcttcag

SEQ ID NO: 84503 - DNA, 122 bp, Homo sapiens
aggactggcaccgcaccctccggcgcccgccgaggacgcatcctcgtcttggctgagctccgtgagagccttgtccctggctggagcaaggccagggtcaaggcccaagcctggaacccgtc

SEQ ID NO: 84504 - DNA, 122 bp, Homo sapiens
tgtgattgtaaggaggggactgtctgtgttctaagtctggtttctggctgaccttggactcggcagtggtgtctgcaggcgggtggcccgttgtgtacgattgtgaacgccgaagagatggt

SEQ ID NO: 84505 - DNA, 122 bp, Homo sapiens
gtcccatccccagggaacggagcaccccttaacttcctccaggatcccacctatgaggagcgaatgcgaacagtccaaacacgccatctgttcattgaggggaggggtgaaagagccttttc

SEQ ID NO: 84506 - DNA, 122 bp, Homo sapiens
ggcgccaagagggccggctgtgcatccggcgtgggcggcacagaacgacctcgccccgcccgctgggtccccaagcccgccctgcacagccgggcctcggtcacctcggtccccaattcggc

SEQ ID NO: 84507 - DNA, 122 bp, Homo sapiens
tacaactcatgattgaacagtctcttctagggcattgccattatacttatcaattcccatcgcttttagtcttctgtccctcctatcaaaattcacattctttctggaggttagcttgcagg

SEQ ID NO: 84508 - DNA, 122 bp, Homo sapiens
gggggacgttccagcctgtgagcctgcgggggacgttccagcatgtgagcctgcgggggacgttcccgcatgtgagcctgcgggggacgttccagcatgtgagcctgtgggggacgttccag

SEQ ID NO: 84509 - DNA, 122 bp, Homo sapiens
gccccaggtccagagccaccttgtggagagggcgcctcacccaggccggcgtaggtcctccgcttgctcaggctggccgacttcaccaagaacatgcacgactggtgcgtcatccatgagca

SEQ ID NO: 84510 - DNA, 122 bp, Homo sapiens
cgacctatgcgcaggcgcgcacccgcacttcctgcccgccataccggccggggcgcccttcgctccgcccacacccggcagtcaatacagccgcccagagtcgttctcccagctgccccggg

SEQ ID NO: 84511 - DNA, 122 bp, Homo sapiens
tcaccaggtatcatcccgtttctggttggagcaagggaccttgcctcgctattgaaagcgcgctgctttacttcgattgtaggtttgtttggagtgccaggagggatttatggagacaggga

SEQ ID NO: 84512 - DNA, 122 bp, Homo sapiens
ctgggcggctccgcccagaagagggccgagaggcggggcggtgcccccaccgcaggcccgcggcgccctctgcaggccacaggcagcgactcaccagttgcctcatctttcctctcctccct

SEQ ID NO: 84513 - DNA, 122 bp, Homo sapiens
ggaacagcaaggcagcaaggctgggacagagggttgctcttctcacctttcccggaggctcgggccccagaccccatcagccaagcaccttcgtgctctgctctgctgggataagatcctca

SEQ ID NO: 84514 - DNA, 122 bp, Homo sapiens
gagaagaagtgcaaggtactcaacctgctctggggatacagcaggaaagcagagtgtttacggatttcacattccatcaaagaaaatccattttgacaaaatatccaagtcacttttctaag

SEQ ID NO: 84515 - DNA, 122 bp, Homo sapiens
cgtcctgtgctctctcgcaggtccagtgtcacagctacacgggatactgctggtgcgtcacgcccaacgggaggcccatcagcggcactgccgtggcccacaagacgccccggtgcccgggt

SEQ ID NO: 84516 - DNA, 122 bp, Homo sapiens
cttgtgccttgatgtgatggtgccgtcctgctcaacagttttgaatcctctgggaaggcacggggaagatctgctggggacatgtcttgaagcctcagaactgggtaccccctttcagacag

SEQ ID NO: 84517 - DNA, 122 bp, Homo sapiens
tcaagtgatcctcccgcctcgccctcccaaagtgctgggattacaggcgggagccacctccgttttgagagagagaaaacctgcccaaggtggtaagtcaagagaccccctatgacaggtcc

SEQ ID NO: 84518 - DNA, 122 bp, Homo sapiens
agacggagagaagctaatcagcataccactgaactgctacggttgttggttggagcggggcggggtgggtagaaaatatcaacagcattggaaaaaaggatccaccagacaaaggtacaaaa

SEQ ID NO: 84519 - DNA, 122 bp, Homo sapiens
ttcatggataattggaagcaggtctccagccaggcagagtgggcagccctagtggcctgccgggcggccaccgcagccaggagacaaggagggacaaggcggggtgggggtgccacctccat

SEQ ID NO: 84520 - DNA, 122 bp, Homo sapiens
cagtgggcggccgtggtgcctgcggcccaggcaggggacaggtcacccggcaggaagacgcgggaggagcctctgctgctgggctccgggagcctgcctgcttggtcacatggcaatggccc

SEQ ID NO: 84521 - DNA, 122 bp, Homo sapiens
agagatactggaaaacctacgtgggagagggcagggtgggtggggcagtaatcctgaagccgctgtgcccagtgccaagctcttctagcacttcctgtgagtcagctgtgaggggtccaaac

SEQ ID NO: 84522 - DNA, 122 bp, Homo sapiens
tcttaactctctcaattgtgggatgacgttcatccacagctgtgattaaaactgcctttccgaaaattatgaatgtgaaagaaatctgacataactccatcttgcttctgacgtccaagctg

SEQ ID NO: 84523 - DNA, 122 bp, Homo sapiens
tcttcctcctgccttggtcttctgccatagctggacaagatgctggacccccaggtgtggcgggaggcagctacccaggtcttctttgccttgggcctgggctttggtggtgtcattgcctt

SEQ ID NO: 84524 - DNA, 122 bp, Homo sapiens
agggagcgcgagagggggcggggcggactcgaggggcggggcattgcccacgtgaccagacgtccccgggagcgcgaggtggagcgcgcgccagctcccttcggtgctgagtgcttagtgct

SEQ ID NO: 84525 - DNA, 122 bp, Homo sapiens
ctccctcccgggtcgatgtagccacgccagcgtacctgcgtgggatggatgggctgtctacgcccgctgttggtatcactgccccctttattcctcacatccctctggatgagaattagatt

SEQ ID NO: 84526 - DNA, 122 bp, Homo sapiens
tccacccactagcgcggggcgcccaggcgcgccccggtgtctgctgcccccgtgcggccgcgctgcagtcctgcaccctcagggggcgcacctgagagccgatgggtacccaggctggcaga

SEQ ID NO: 84527 - DNA, 122 bp, Homo sapiens
atctctacacccttttagagttgtagaagttgagtttctaaggagaaattattggctggacgtagtgtcccagcctgtgtccagaatgagatgttcaggaaaggtgtttctaggagggacgt

SEQ ID NO: 84528 - DNA, 122 bp, Homo sapiens
tgctcaaactactccaaacttttgtttggtctactgaaaacattagttggaaaggtacagcgttaatttaaggcagggaagcctccagcacgtgagagtcgtgtctctctcggtgatgctgg

SEQ ID NO: 84529 - DNA, 122 bp, Homo sapiens
cctgattggctcttttctccaatacccgcctccggttggttgcggttaacccttgggtgtcgcggctcggctgagggagcgcgcccgctgattggtcgaatttgaaaaccttttgcccgggg

SEQ ID NO: 84530 - DNA, 122 bp, Homo sapiens
gggtggtcagctgacagttttctcatcctgcacatggtccacggggtctcccagagcccccgggggatggagtccctgaggtccacagctgttgctcagcaatgccccaaccctgcgttgac

SEQ ID NO: 84531 - DNA, 122 bp, Homo sapiens
ttattagaagtcacaccttgcattgtgtgcttttagtaactttggtctactcatgatatgcgttgggtgtgtaatatgtaatcttaaaaacttaattaatgcaattacttgacaagattata

SEQ ID NO: 84532 - DNA, 122 bp, Homo sapiens
taaggagttgaacttgcttagtccactggagcagtggaaaagtcgggtgtaagaggggcacgtttctatttgtgttttagaacaaaaatatgggaaatggattggtgggggacaagatgaga

SEQ ID NO: 84533 - DNA, 122 bp, Homo sapiens
ccgtaaatatccctcgacggcgcaggcgcgggccgtaagtatccctcgacggcgcaggcgcggaccgtaaattgcacaccgaaggccctgagaactgaaccgtgggtagattatcaccccgg

SEQ ID NO: 84534 - DNA, 122 bp, Homo sapiens
aatacattccactttgctcaaaagtatttgactggggaaaccatgagcaaagaatttcatcgctttaaaaaaacacattgagtgctggctggaatcaaattcttttaattttaatcaagtgt

SEQ ID NO: 84535 - DNA, 122 bp, Homo sapiens
tacgactggtagggtcaccaggtgtcagagttcaatttctttacttttcccaggtttgttcgcccttacagtgtcctttgcctgtgatagcctaaactctagccgtcctttgaggccaaagg

SEQ ID NO: 84536 - DNA, 122 bp, Homo sapiens
tcacccctcaccaagcaactccctaccctgatcctgttccaaggtggcaaggaggcaatgcggcggccacagattgacaagaaaggacgggctgtctcatggaccttctctgaggtacctga

SEQ ID NO: 84537 - DNA, 122 bp, Homo sapiens
aaggtcacacagtgagtacaaacccaggtgtgccgccagagcctgaactgggaacccctgcgcggtaactgcctcgtggcgaaatcggggtgtccttctgtttggccagtcgccgaagaggg

SEQ ID NO: 84538 - DNA, 122 bp, Homo sapiens
acagtacagggtaaactgggtccaggtgggcgtagccgccgcgacaccttcacgtgaccgcggacagcttaaggaccccgcatccagtgcgcctgcgctggagctcccggaagttgccggac

SEQ ID NO: 84539 - DNA, 122 bp, Homo sapiens
ccgtgggggaagaggaggatctggaagagatggaggacctgcgggagttaggatggggggcgggttctgcaggacagctcgcctccctgaggcttcccaatgttcctaggatgacggcgacc

SEQ ID NO: 84540 - DNA, 122 bp, Homo sapiens
gccagtcattagctttctatacagtgagcagcagaacctagatgaaccccaggacctagacgaacccctggtgttttggtaacaagaccatccttgcagctgggattttaggatcctagctg

SEQ ID NO: 84541 - DNA, 122 bp, Homo sapiens
tatgaaggatttccagagactttatgggtccagccctaaagtgatatgtatcacttccaccgcagttcattggccataactagtcacaattctacaaaggaacctggaaaaaggagtctaac

SEQ ID NO: 84542 - DNA, 122 bp, Homo sapiens
cccggacggcctcgccctcttagcaacctacctaaaacggcctcgcagtggccccaaccgcgcacttgctgcttgtaacccaggcctcggcccaaaacccgcgactggcctggtgtcctaga

SEQ ID NO: 84543 - DNA, 122 bp, Homo sapiens
cgcactctccccagcccctccccccacgccccatcgcatggccccgacactggcagaaggcggccgcccagcctgagcaccttgtgcaggtctgcggccagcgcgcccaccagctcctgctc

SEQ ID NO: 84544 - DNA, 122 bp, Homo sapiens
gaagtactgcgagcaggaggccagcacggccttgtggcaatggaactgctggccctgggccgtcagggtcacgtcgcaaaacagctgcttcctccacagcaggttgaggccgtgcagcaggt

SEQ ID NO: 84545 - DNA, 122 bp, Homo sapiens
gggcacccaggaagcactacagggagcattggaatgccaagacccaagctactcagtccccgagtcgtcagtgggtcccatgggcaggcaggagggagtgaagggggtggagcctgaggtgg

SEQ ID NO: 84546 - DNA, 122 bp, Homo sapiens
tttcactgctagtgaaatgtaaggaaatacattttcatttttaagcctcttgagaatgatcgtaagtattaactacacttatgcagtattgtttgatgagcagaaaggtcacaatggcagat

SEQ ID NO: 84547 - DNA, 122 bp, Homo sapiens
agcaggtgttacctgagtaagattgagattctctcaccaggcgacaaggcttgttgtgcccgagacaggcacagctcagattccctccccgtggtaattaacccggggagaaatgtaaccaa

SEQ ID NO: 84548 - DNA, 122 bp, Homo sapiens
tttacaacacagctgaccagtgtccaaactgtcaaggtcataaaaagcaagtttgagaaacggtcacagcacggagtagactaaggcgccaggagactcatgtaacacgggatcttgggaca

SEQ ID NO: 84549 - DNA, 122 bp, Homo sapiens
ctggtgtctgagtctgcaggtgacactgcttaggtacggagcgcggagtcggagcggggacgcgccgggctgcagctctgggatgcaatccgcctgcctcgcaagctgctcgccgctgcgct

SEQ ID NO: 84550 - DNA, 122 bp, Homo sapiens
ccagggcactagtgacctagagagaatctcctcaagcggaatctgcgagattcgtgcagtcgattatcctatcccctcgaccggctccataaaacggttcttaggaaaaactcgattttttt

SEQ ID NO: 84551 - DNA, 122 bp, Homo sapiens
tccttatacgccactacgaaaaagtgacgcacgtcaaaaaaaaccgctgagcatggcgcccggcgaggagagcacgttcgcacacagtgcccgccggacccgctgcgccacggcaaaaaaac

SEQ ID NO: 84552 - DNA, 122 bp, Homo sapiens
tgccaagcaaatttgttttgcaggacagaattgatgctttataagaacaccaaccagggccgggtgtggtggctcaggcctgtaatctcagcactttgggaggccgaggcgggcggatcatg

SEQ ID NO: 84553 - DNA, 122 bp, Homo sapiens
attatcaaccttttaaaagaatatgctggtttatgtaaatgaatctgtaagtggtatttccgaatatataaaaaaatgaagtggaaaagatacaggattggaggaagtagttttggactaaa

SEQ ID NO: 84554 - DNA, 122 bp, Homo sapiens
cgcccgcggagcgcggggtgggcttagaagggcccccaaccgcttttcttccgggaaccacgcagcgggacgcgggctccggactccctgggggcagccttgctgtgggtgagcaagcgcgg

SEQ ID NO: 84555 - DNA, 122 bp, Homo sapiens
aacccataaacttgtctaagatgaccgaagttgtccaaaggcccgataagtcaccaagaacgtttttagagcgcctccaggaggcttatcggatttacaccccttttgatccggcagctcta

SEQ ID NO: 84556 - DNA, 122 bp, Homo sapiens
ataatccatgtgcagaatgggttaagggtggactggccaggctcaggagtcaataaatgacggtgaaactctgctgaaacaaaccagaaatagggtacagctaactcctcactggaggctcc

SEQ ID NO: 84557 - DNA, 122 bp, Homo sapiens
caagtcaagcccattgcagcctccagaacttcgcacctgctgtcgcctcccttcagagcgcgtttctttcagggattcccgtggctggcttttacttatcctcaggactccatcagatatga

SEQ ID NO: 84558 - DNA, 122 bp, Homo sapiens
cgccgagagcgttccgcgaagcctcccctcccgctccgcagcgctgggcggtctcagcctcggcctcgggctcttatccagtagacagggtccgccccgccccgccctcccgccgacggggt

SEQ ID NO: 84559 - DNA, 122 bp, Homo sapiens
gccgctgatattccaaacgaggaagtgtaaggaaagcactatcctcggtctagccgcaggcggcatcaccatcagtcagcctctatcctaaaagctctggccattcagcgggaatcatcgcc

SEQ ID NO: 84560 - DNA, 122 bp, Homo sapiens
cagctggtgtcctggctcctggagtggcggtggcatcctcgtggggatgggggtggctggcgagtggccgtcggatgcacccctgcctcacacagccacaggctggagggaaggacccgagc

SEQ ID NO: 84561 - DNA, 122 bp, Homo sapiens
tatgggcaccagctggtgtcgggggacagcacggcgctctcacagtcagaggacggggcgcgggcccccttcacccaggcagagatgtgcctcccctgctgtagcccccagcagggtagcct

SEQ ID NO: 84562 - DNA, 122 bp, Homo sapiens
tccgggatgtgtggaacggggcgttgcgggtttgggtaatggccgggaggtggcggcgcgcgggccacccccagggcagggtggagtctgcgtgtggaaccccagacattgctctcgttcca

SEQ ID NO: 84563 - DNA, 122 bp, Homo sapiens
aaacatcccggagggatgaataggaaccaagacgggcccccggctcctagttcgggcaggcgcccagttggcactcaataaagatgtgctggcccggcgcggtggctcacgcctgtaatccc

SEQ ID NO: 84564 - DNA, 122 bp, Homo sapiens
tgccgccgccctgtcaggcttcccaggcaatcgcccatcttattccttctccagtgtggacgcctacgaggagggagcgtcccctctcgacagttaactggcatctagcttatgaagcccgc

SEQ ID NO: 84565 - DNA, 122 bp, Homo sapiens
tggctatttatggcagtaaggaatattatccacatttcacatggagcttagaggacagggcgagggtccacactctccttactgcgctctgccgcggtcctgccccgctgtgccctcgcggc

SEQ ID NO: 84566 - DNA, 122 bp, Homo sapiens
gaagagatgggatgcctcagagccgagattgctgaaattcagagtcaccagcagcacggccgaagtgagactgaggagtactcctccgagagcgagagtgaggatgaggaggagctgcagat

SEQ ID NO: 84567 - DNA, 122 bp, Homo sapiens
attaatgtttaaggcaacacacaggacttcaaaggcattttttacttgtctggtgatttccgtctatgcccttagacacctggatatatctgcttctgctgttataaatcagtgagtggaaa

SEQ ID NO: 84568 - DNA, 122 bp, Homo sapiens
ggagcgtgctgggcccaaaggtggccgggacagtctgcctcagggctgtggtcaggggcacgggctgggactgccccactgcggaggcttctggcggacggggcgcggggagtggacgggac

SEQ ID NO: 84569 - DNA, 122 bp, Homo sapiens
ctgagaatgactgctgaaacagcaggtagttgtggcaggtggctgagatccaagctggttcgaataccagccacatttccacactgccaaatgtcatggcaagagaagacttgacagggaac

SEQ ID NO: 84570 - DNA, 122 bp, Homo sapiens
aaatcccactcggcacccaccccctgttggggagggcttggtattggactccacgagcctcggtttccccatctgatcaccttgcacgtaaactgaaaggcacagggaaccaagtggcccga

SEQ ID NO: 84571 - DNA, 122 bp, Homo sapiens
ctggctcagcgaccacccttcaggctccccaactcccgttggtcccgaactcccctcccccgcaccccatcctttcggatcccagttgctccaggtgggcgggtgctaccacccccaccgct

SEQ ID NO: 84572 - DNA, 122 bp, Homo sapiens
tggaatgcaagctccatgaggccagaaggtgccagttttgttcacttctgtacctcactacgttgaccagtgcctggcacagagcatttgttgattgaatcagtctggtctgatccccgagc

SEQ ID NO: 84573 - DNA, 122 bp, Homo sapiens
agccccagagggaggtaggagccacccgacctggtcagcatcccactgggacagactgcacgtgaatccaaagatcctggaccgaagctcaggtctgtctgggtcactgagttccttaagac

SEQ ID NO: 84574 - DNA, 122 bp, Homo sapiens
cccgcgtgccgcccttcttcactccgatgatgatggcctgcggcagctgcttgctgccttcgtccaggagcagcgccagggtccccggcggggcctcggccacggtgcttccggccccggag

SEQ ID NO: 84575 - DNA, 122 bp, Homo sapiens
cttttgttgttgaataacctaccttacacattggttagttacctggggcttctcaaaagccgggtctggaggctgctctgactccagggggcttgggttgtgaggcttcaggtctgtatgcc

SEQ ID NO: 84576 - DNA, 122 bp, Homo sapiens
ctttctgggggacagaagcctcccgggattccccctaggctgagtgatgtgtctctactccgtgcttcagaggaaggagggctttctgccctcgcagcagtatcagaattgctgatttacct

SEQ ID NO: 84577 - DNA, 122 bp, Homo sapiens
ctgttgttttttttttttttttttttttaaagtcagcctcctagaggatgttggatttggcgggtgtgctctttgaaatactatatcgggaacctcacacataattttttttttttaattgc

SEQ ID NO: 84578 - DNA, 122 bp, Homo sapiens
cgttatggatgcctaactcagcagccatcagtcaagggtgatagatgagggtcatcactgcgcaaagcgctcacctttcgaaaagaaaacatcatatggccgccgtccacctcccatagctc

SEQ ID NO: 84579 - DNA, 122 bp, Homo sapiens
agactgatccgcggtcccctttcaccccacagcaaccttgggcaccaggacttttcctcccgggccttgttctctgcctcacactcaatgtgtcggagtctgactccagctcctctgagtcc

SEQ ID NO: 84580 - DNA, 122 bp, Homo sapiens
cttctggagaggaggaggatgccgggcatactttctggcttgcaagcaacatggcaactccggctgtgcagcctgcacttaactgacacctgccctgtgccaggccctgaactgggcacttg

SEQ ID NO: 84581 - DNA, 122 bp, Homo sapiens
cgtgtgcagctgtgggaggtagcctgcaagcagcctctgcagaagcatcctggccataagcgaacgtgcggtcagggcactagtggggcaggggcctgggtggcggccagggctcagcagag

SEQ ID NO: 84582 - DNA, 122 bp, Homo sapiens
ctggaaccctccgctctcaggaggcgcggtccgggcgccaaaaggtaagcctctgggggccgccaggggacgctgccccgccgcggaggccggcacgactcggggcgtggcctccagcctcg

SEQ ID NO: 84583 - DNA, 122 bp, Homo sapiens
tggggagagcagcctggattatccgggttggccctgtcaatcgagagggccggtctcccacgggtcgccctagtgcacacggtaatgggcagcacgagggtttccgtggctccgtatcctca

SEQ ID NO: 84584 - DNA, 122 bp, Homo sapiens
ttctttatttttgagttactgcatttcctaatttcatggtcataacagcctcctgtctaccgactcagaacggattttaccaaaactgaaaatgcaggctccatgctcagaagctctttaac

SEQ ID NO: 84585 - DNA, 122 bp, Homo sapiens
cgagcgatggcggcctggtcacatcgctcggacctccccagctgcctccgcctccagctccgcagcattcgaagatctcaatagctgcatttccagctccgagaggcgaagagatgcaagcg

SEQ ID NO: 84586 - DNA, 122 bp, Homo sapiens
ctttcttaaaatgttggcctccccaggatcatccctgcctttcccattcagacgatgagccgcgtaaagaatgtttgtcaaaccttggtgaacagctgtagcattcaaacatgaccccagtg

SEQ ID NO: 84587 - DNA, 122 bp, Homo sapiens
ttttggcttcttgagtaggaggaaagtcgggcgggaagggcgtcaggaatgtccgtgacacgtgaatggggccgtgtgcaaaccttgtatgacatcactgagacacctagcggaaaacagct

SEQ ID NO: 84588 - DNA, 122 bp, Homo sapiens
gccacggagccagcgagggagacgggcgagaaaggctcttctcccttaggaaagagagaacggcccgaaatgacaggacctccgcctcccgggtgccgactcccagccccacagcccggctc

SEQ ID NO: 84589 - DNA, 122 bp, Homo sapiens
aaagaaaaacaggttgaacctaatcctgatttaaacattagtatcacacaaaaatcaaaacgacaccattccaggcaacgaagacaatatcatcaggttttgtagattagcacaaccctctc

SEQ ID NO: 84590 - DNA, 122 bp, Homo sapiens
cttaacaattccaagtgctccctgtccaggaaccgtacagccaccgcacacccgacagcacgtgccacatgcacacccactgggatctgacaccagctggacgagtgctcacggtcccagct

SEQ ID NO: 84591 - DNA, 122 bp, Homo sapiens
aaggaattttagggctgagtgtgacaccaagaaccaggtgccctccactctctggataaacgattcagtgaagatgtggcatgtctttctccaactcaaccctagcacttacctccaagaaa

SEQ ID NO: 84592 - DNA, 122 bp, Homo sapiens
atcgtgcagggttctagagaaacaaagggccgcgcgcacccgcaggcccctgcgtggaggcgaggacctaaatcaaaactgctaaggggtcaccaggcatggtgaggggcctcacgggccaa

SEQ ID NO: 84593 - DNA, 122 bp, Homo sapiens
gtgagaattaggtgtgaacgtgatgtccgcggatatcagtggctagtgggcaagctccagcgcccaggaactttgagtcgcttgtctaggagtcctgtattgaattgcaacactaagtgcaa

SEQ ID NO: 84594 - DNA, 122 bp, Homo sapiens
gcgcactcggtgactttcacagcaaggccctgtcattcgaaccctctgtgcagaatctcacggggcacctcccttggtgccctctgccctgcctcgctcccttctgtggagtttaggaagat

SEQ ID NO: 84595 - DNA, 122 bp, Homo sapiens
tctggccagccctttggggctctgtggtctgcatgggaaggccccaccagctgccagccccgtatcaccagaaaacatgtcgtctctttagagtgagacacgagctcccaagttactgacaa

SEQ ID NO: 84596 - DNA, 122 bp, Homo sapiens
tggggctcagaccttccgtctggaaaatgaggctaatgagtcctacctcatagccatcaacgacatcaggaacatcatcatcatcatccctggacaatttcagtgtgaaaggaacgtggtat

SEQ ID NO: 84597 - DNA, 122 bp, Homo sapiens
ggcgccgggcagaggcggggtgcggcccctcgtgcccactcctgcgggccggggtgagcgcgtgaggctcaggcccctgggcctgcccgcagtggcctgtcccaccctggccttggggacag

SEQ ID NO: 84598 - DNA, 122 bp, Homo sapiens
tttccttttgcaacaagacaaagcaaagccacattttgcattagacagatgacggctgctcgaagaacaatgtcagaaactcgatgaatgtgttgatttgagaaattttactgacagaaatg

SEQ ID NO: 84599 - DNA, 122 bp, Homo sapiens
ctgtagtcccatctactcgggaggcggaagtttcagtgagccgaatgcactccagcctgacgacagagagagactccgtctcaaaaaataaaaaataaaaataaaaaataaagggtcagtag

SEQ ID NO: 84600 - DNA, 122 bp, Homo sapiens
ccctcgtggcagtgtcgctgaagttcatgagtttccaaaatgaaggttccaggtgctcagcggtacggagaattgcatctagagccttaggatttaacctcctgtttaggataggcagcagg

SEQ ID NO: 84601 - DNA, 122 bp, Homo sapiens
ccaggcacttcatgtcacctctaccgaacacggtgaactgagaactgtggtcacccgagtcgcagatgaggaaatagagacgcggccaatggcatgtccaagccacagacaggaagaagccg

SEQ ID NO: 84602 - DNA, 122 bp, Homo sapiens
ctcgaatcttcgccaaaccctcttacaggccaacagtcggggcctttgtgaagggaaactcgctctgggtcactctggtggtggcggggctggtacgtgacgcggccaccccacgggcgtga

SEQ ID NO: 84603 - DNA, 122 bp, Homo sapiens
gcgggcacagtggacagctgagcaggccagactctgacatgaggtctggacaggcccttccgcccttccggatgccagtccccctgcttgtctgaccactggcccgcctgcccacggggcgg

SEQ ID NO: 84604 - DNA, 122 bp, Homo sapiens
cttttgagatggcttcttttactcagcatagtgtctttgagattcacccaacttgttgaacgtatcaacagtctattccttcttattgctgagtagtatttcattgtaggaatgtaccacaa

SEQ ID NO: 84605 - DNA, 122 bp, Homo sapiens
catcatctttctcccagatcccatcaaagcagaatggtagaaacctaaggtcagcctgggcgcagtggctcacgtctgtaatcccagcactttgggaggccaaagcaggcggatcacttgag

SEQ ID NO: 84606 - DNA, 122 bp, Homo sapiens
cccggggcgcccggccgggccgcttcctttgctgccgcctggctgggagtggcgcccacacggctccgccatgagcctggcggtgtttgacctcggaaaagtttgactgcgccttcgtggcg

SEQ ID NO: 84607 - DNA, 122 bp, Homo sapiens
tgtgtccgcacttggggcggggctggaagccccggccccgccccggccccgcccccggcccggccgagctggtatttttccacccagcaggatgggtgatgctgagagctgcctgctcagac

SEQ ID NO: 84608 - DNA, 122 bp, Homo sapiens
aaggcaggagcaatccatgctaacacccacctggagagaattcctgcaagccctcgccttcgccgtgtgggaattttcctggatgctgacttagaagaaatccagttttttgatgttgacaa

SEQ ID NO: 84609 - DNA, 122 bp, Homo sapiens
ggccgccgggcagccagagaacatggacagccagcaactggtgtccctggttcagaaagccgtcaccgccatcatgacccgcctgcacaacctcgcccagttcgaaggcggggaaagcaagg

SEQ ID NO: 84610 - DNA, 122 bp, Homo sapiens
gcagccttaccccggctctggctcgccgcgccgcgaaggttgccccggcccccgcagagccgccaattgctggactgcagccgcgagctggagtctccacccacaggaaaaattcctggccc

SEQ ID NO: 84611 - DNA, 122 bp, Homo sapiens
gccacactctagtcattctcgagccaggccacacctcattccacagggttcatccctgcccgctctttggggccatctgtgagcaagccctgtgtcacttgtttttgctgacatggagagct

SEQ ID NO: 84612 - DNA, 122 bp, Homo sapiens
gctggggaaagaatctgctcttcggaggctatcgcagtgccttggaaggcggcaggaatccgcacacacccgccccggaagtgagccgcttctggcgcggggcattgtggggggcgtagtct

SEQ ID NO: 84613 - DNA, 122 bp, Homo sapiens
ggccgttcatctttgcaggaactgacagcgttagccccgacacagagggcatgggccccgcggctccaccgggaagggggctcgcccgccggcccgggcaccccctggtggggcctcccgct

SEQ ID NO: 84614 - DNA, 122 bp, Homo sapiens
ggacatcttggcggccaacacagtcaatgttaccaaaggtgagtgtgggacgagggaagccgggcgcaggcgccgccagcacagcctcacgcccgcctttcctgcctgcagccctgtgcctc

SEQ ID NO: 84615 - DNA, 122 bp, Homo sapiens
agccaaagcgtgttgcatctgttttcacttccccaggccttagtggtgcggtctaaggctcgccctctgccacacatcctcctctccctcctcccggcagctcctcctcctcctcgtccacc

SEQ ID NO: 84616 - DNA, 122 bp, Homo sapiens
gtggaacggtcaagtctaaatttcttcccttggtgaatgtgagcgaatcccgggcgcctacgggctctggtcgcccccagccgacaccaggggtcttcccggaacgtgcgtctggaaacaac

SEQ ID NO: 84617 - DNA, 122 bp, Homo sapiens
gcatgcgccttagctcggagcgtggtgaacgtgtttgcgcatgcgcatcagagcctgcctcgttggcaatctcgggaagggcggagaaacggtgttgagcttttccagaggcggcgagctgg

SEQ ID NO: 84618 - DNA, 122 bp, Homo sapiens
ttgaacacaggtcagacgaatcatacgcccttcgcccttcgccctccctacctcagaggtcggatgtggtgatcggggctttccacatgtctgaaatgtctgacatggatgtggttttttta

SEQ ID NO: 84619 - DNA, 122 bp, Homo sapiens
ctgcagagggaaatccacaggggctctcacggagcccacatgtcagacccacccgggcgtcgagactcaaaacacgaccatcacatggctgtccctcctgggaaagtcgaagccaaagacga

SEQ ID NO: 84620 - DNA, 122 bp, Homo sapiens
tggttcggtcttctcctagggcgcatgtggctgccactcagtaaatgttagtaccgcttccgttctttccagcctggtggccaaaaacgggatagtccaaatttgtctcctacgggaatatt

SEQ ID NO: 84621 - DNA, 122 bp, Homo sapiens
gttgcggctcctagccactaggtgtcagcctgccctcactgtggcgcgggctccccctcccgcctccgagcgaggcagctgctttcggggagagtttaggtataaactctgggcgaaaggag

SEQ ID NO: 84622 - DNA, 122 bp, Homo sapiens
tcacctgaagccctgagaggcaaagcccaaacaggaggccaaggcttttgacaccctgcccgtttttatagcacctctgtggaattgttcattttctaagccagatcattccacagaaggag

SEQ ID NO: 84623 - DNA, 122 bp, Homo sapiens
taagtcatctctaagaagattcagactttccctagtcttcttctgatccctctttataatcgctcttaatgctccattcacagcaatgaaggtttttccagcctgcttccccaaattcttac

SEQ ID NO: 84624 - DNA, 122 bp, Homo sapiens
ggaggcggtgactcacctgggaggtaatcatgatgctggagtcgatgaggaaactcatggcgaagtgtaaggaaggctcctgcctccacttcccactccccgaggccacagcacgctggggc

SEQ ID NO: 84625 - DNA, 122 bp, Homo sapiens
gcgaccagcccagccaatcagcgcgctccctctgccggcccgaccggcgctctggtgacgcgcgacgtctgccttcgcccacggctcttgggcgacgacccctcccacactcgccgtgcttg

SEQ ID NO: 84626 - DNA, 122 bp, Homo sapiens
agcaaatattcagtgaatcgatttcaaggtcaccgctcttctcgtgctccctcaggggcacgtggggcctgagtgccagggttatgaagggcgttctttgtaggtcccgtagctgagactga

SEQ ID NO: 84627 - DNA, 122 bp, Homo sapiens
gattacaggcgtgagccaccgcgactggcctcttggtccggatttctgtctgagtgaggacgctcctgtttgcacataacagaagcccttagagtttggtgtttgggggcagttgttaagga

SEQ ID NO: 84628 - DNA, 122 bp, Homo sapiens
tagcagcagaaacctatccggctctcccaggcaccggctttggcccttcctgcacagcctcggaagtgcctggatcacctccatcagcagctatcgacctctgtctgaagtccaagttgttt

SEQ ID NO: 84629 - DNA, 122 bp, Homo sapiens
aactgcactttgttacctgtttctgatggtgtgacatgactgcgcttcgttacccatttccgatggtgtgacctgactacgctttgttacctgtttctggtggtgtgacccaactgtgattt

SEQ ID NO: 84630 - DNA, 122 bp, Homo sapiens
tgctaatctaacgacccaccccaaatggtgctatttcatgtttgagcctactaataagttcgcagctatcagtttcatatcatctttcatattcgtgaaatattcatattcataaactagag

SEQ ID NO: 84631 - DNA, 122 bp, Homo sapiens
ccgccgcggactccggcagctttatcgccagagtccctgaactctcgctttctttttaatcgcctgcatcggatcaccggcgtgccccaccatgtcagacgcagccgtagacaccagctccg

SEQ ID NO: 84632 - DNA, 122 bp, Homo sapiens
cttttgtttccagaaggcagggagtgtgtgaactgtggggcaacctcgaccccactgtggcggcgagatggcacgggacactacctgtgcaacgcctgcgggctctatcacaaaatgaacgg

SEQ ID NO: 84633 - DNA, 122 bp, Homo sapiens
tctgacttcaagaccagtgttgtcggcgtgatccaagtggggtcagaacccacaaagtcccgggaccgccagcaggaccggaggggaaggcacagccgtggatccgggtgggctggtagcga

SEQ ID NO: 84634 - DNA, 122 bp, Homo sapiens
gaaactgcctcatgcatgcaccagtggcggggcaccaggagcaagtagtgagcgcgggctcgagtcacagtgaatgccttcgttgcatctcgacaagtctctgactcttggcaaagaggggg

SEQ ID NO: 84635 - DNA, 122 bp, Homo sapiens
tggaggaaggctggcaggcaaccgtgaggtgtaagttccgtcgacaggcgcggctgagatcgggtggagagcaaggtcataggtggaaaggaggtcaacaaactagaggccaaggcattcca

SEQ ID NO: 84636 - DNA, 122 bp, Homo sapiens
ggagactgtcgggaaagtcggggactgtcggggacggttgcggacagtcagacactgtcgcggactgtcagggaaggtaggggacagtcgggtactgtcggggatggtcgcagatggtcggg

SEQ ID NO: 84637 - DNA, 122 bp, Homo sapiens
agtgtgctgtgaaaccgcaaggctgaaaccaccttcacgctgggagcaaacgaaaggacccgagggcaaggaatctgattggtcccccagtcagatgtcaaaggtcagctcttcagagtgag

SEQ ID NO: 84638 - DNA, 122 bp, Homo sapiens
ttacactcaccagcttggcgggagctctgcgtgtggtccaaagccgtgtcccctctgtggcgggcggcatggcgggggcagctggggcccctctatcctcccgcggctgcacgtgcttccct

SEQ ID NO: 84639 - DNA, 122 bp, Homo sapiens
ctctcactgcgcagcgagtccctccgctgcctcctcccagcccaaaatggcggcgatggccgccgagcttctcgtcgccttcctcaaaggccaaggatccctccgcgcctgctgccccgccc

SEQ ID NO: 84640 - DNA, 122 bp, Homo sapiens
ggacgttcttgttctgtggagaataacggctgcacctggagattgacgcagagtgggcggcggtggtggtaagtttgaaccagatattttcagtaatacaaaataaggtttcttctagtcta

SEQ ID NO: 84641 - DNA, 122 bp, Homo sapiens
aggaatctaggccattagtatacctaatgaaattatataaaattaccctttccggcaggacgcagtggctcatgcctgtaatcccagcttttgggagaccgaggcgggcggatcacttgagg

SEQ ID NO: 84642 - DNA, 122 bp, Homo sapiens
ctggtgtttcgttatgtggacacttgatttatctaacccagcccatgactggctgtgtgtcgtcacgtggcgctgtcaggcaggcatgtccccaggaggccatgttttgtgttaagtacaca

SEQ ID NO: 84643 - DNA, 122 bp, Homo sapiens
agcttcctggcacagacaccccaccatcacagcttattcagaaattaaatacttgtgcttcgccaccacaaacgcaagtgctgccgcttatcttttttctcacgaaaatgtgaccttgggct

SEQ ID NO: 84644 - DNA, 122 bp, Homo sapiens
cgctgccttaagagctgtaacactcactgcgaaggtctgcagcttcactcctaaagccagcgagaccacgaacccaccagaaggaggaaactccgaacacatccgaacgtcagaaggaacaa

SEQ ID NO: 84645 - DNA, 122 bp, Homo sapiens
ggaccattccgataacagctccaggcttccaagctggctcgcaggtggaatagttgtgctcgcagcatgtggttcagctctgagtctaccagaatgaggtgtgggtggcacaaaggcctgga

SEQ ID NO: 84646 - DNA, 122 bp, Homo sapiens
cttcctctcactggcacctgacgcaaggcgcagccaaggactattacacctctggctgctcggacgcatcttcgcactgcgccccctcgctctttaaacctgggagacttgtaattgtgtac

SEQ ID NO: 84647 - DNA, 122 bp, Homo sapiens
agatagataaagaagagagggaagggcataacacaaaggaacaggaagtattaaaatgtgcgtgttatggacttgcatacaaattgagtgctttaattttgccaagcatctttcataacact

SEQ ID NO: 84648 - DNA, 122 bp, Homo sapiens
aggagaggccgcggcttccccaaccttcccaccctaacccaccgcacccaataggctggccgctcaagccgcccaggtcccgcactgcccctcttacccggccggccactgggccggcctcc

SEQ ID NO: 84649 - DNA, 122 bp, Homo sapiens
ggccgacccatgccgatcttctccaggtcctcattcttgacgtactcaaagtgggacaggcgggtgacgttgaggtcatctcggagccgcaggaagtactgttgcagctgcacctcggacag

SEQ ID NO: 84650 - DNA, 122 bp, Homo sapiens
cggggccagggtctcacacccatctagaggatgtctgtctgcgacgtggggtcggacgggcgcctactccgcgggtatcaccagcttgcttacgatggcaaggattacatcgtcctgaacga

SEQ ID NO: 84651 - DNA, 122 bp, Homo sapiens
aaagatgataggccacaggagggcagggtcaactgtgttgaggcaagctggcttttgtgtcggcccttaggggctgaggtgaaaggctttgacacggagccagggtagctttggcagcttct

SEQ ID NO: 84652 - DNA, 122 bp, Homo sapiens
gccctgaacaccacccaccctccccaacccaccgcttctccgtccctccgttgccttcatcgagctccgcagaattcagattctgaaggtgggcgtggatgtcatttggccagagccgggct

SEQ ID NO: 84653 - DNA, 122 bp, Homo sapiens
agagggtgcgtggggaggagatcagggaaccgccaggccggagctggaagccggggccaccgtccaactcacgagggctcggcagagaggacaggggagcttcccctgctggctgaagtggg

SEQ ID NO: 84654 - DNA, 122 bp, Homo sapiens
tcggaggccccgcctctccctggccggccctgcccacggccgaaggccccacccacaccccgggaggccccgctcacagtcccggaggcaccgccccctccagccggccccgcccacgcgcg

SEQ ID NO: 84655 - DNA, 122 bp, Homo sapiens
agccttcttcggagctagaaatgggaatttgaggactgttcctattctaatcaacaacaacggtggttttccttagtcaaaaccagctggaatccagccccaagccttaggtgggagaacag

SEQ ID NO: 84656 - DNA, 122 bp, Homo sapiens
aacttccaatcatctttattaataaatggaaagtgggcaatgaataatgtgaaacagaagcgaatctaaaaataatttctgttggcgggaacatataccgtattattcatagcttgatctcc

SEQ ID NO: 84657 - DNA, 122 bp, Homo sapiens
ggcgccatgtcagaaccggctggggatgtccgtcagaacccatgcggcagcaaggcctgccgccgcctcttcggcccagtggacagcgagcagctgagccgcgactgtgatgcgctaatggc

SEQ ID NO: 84658 - DNA, 122 bp, Homo sapiens
acctttttgccgtattgttaggtagaactgcattttaatgactgtgtccctgctgttgcccgaagtgacggggcgacctcccggcacaatgaaatgcttgtgtgaaagagatttttaaaagg

SEQ ID NO: 84659 - DNA, 122 bp, Homo sapiens
tttctattttatcttcgatgccggaggggagagcatttcccacaagccaggtggaggcagcgggagacgcgaggaagtggacaagaccgaaaaacaaccctcgggctctaccagggtttgta

SEQ ID NO: 84660 - DNA, 122 bp, Homo sapiens
agggtttctcctggtcccctcccagtcccagggaggaaactgaagctcagagagagacctcgagtggatcattgtggaggaacctggctgagctgcccctaggctcatccctgtgtaccctg

SEQ ID NO: 84661 - DNA, 122 bp, Homo sapiens
cgaggctgcgcttgcggagatccgggttctggtgcctggcgccggcagccagtaggggcgcgcgtcctgcgcagttgccgcgcgcggcctcctcgggcttcaggccgggccaatcaggaggc

SEQ ID NO: 84662 - DNA, 122 bp, Homo sapiens
gagctgtgatgccttccccccattgtcatcaagatgatcaaagctctgccatctttaaatcgactccaggaggttcatatttagggcttgccttcagctggggcagggagtagcatccttac

SEQ ID NO: 84663 - DNA, 122 bp, Homo sapiens
agcttcaggccctagtaaatgtgccaacttcttgctcgttggtgtttttcaaacacagctcgaggcaaggaatgaggcacaatggaaaaaatcctagctggatctgagaagccaaagaatgt

SEQ ID NO: 84664 - DNA, 122 bp, Homo sapiens
ttatagccttaataccaatctaacataaaacttggcatatagtttatatcaataaatgaacggttgttgaataagtgaatgaatggatgcacaaatcattgatatactgttgcattttccag

SEQ ID NO: 84665 - DNA, 122 bp, Homo sapiens
agagtggaagggcccctgggggtaactagcctttgagctcaaaggggcatttcgtgaggtcgccttttggttcggagagcgcgcggcgatcgggtggagggggcctggcgggaagaaagctg

SEQ ID NO: 84666 - DNA, 122 bp, Homo sapiens
gagccaagttacactcatgtaccaatcacagtatcacccagataccgactgcaggatccgcgtgatctgatttaggctgggcataccaatgatttaagaaggcttccctagacaccacaaat

SEQ ID NO: 84667 - DNA, 122 bp, Homo sapiens
ggccgcgcgggcggagggagcaattgccggccgacccgatgggtgcccggcttgtgggcacgctgcggccttacgcttatcaccccccctcacatcttgccggcgcccgatcgctgacaccc

SEQ ID NO: 84668 - DNA, 122 bp, Homo sapiens
aactgaggttcatagagcctaaatgagtaggccaatgccaaggtcacccagatagtgaaacgagaacatctgtttccaaactctactcacaagctttttcatttgttgcctgttataccagg

SEQ ID NO: 84669 - DNA, 122 bp, Homo sapiens
gaaaaaaaatgatctcttatcaattagcactcactaatgtactactaattgagcaacctacgcactcagttgactacgtaaatctgtcaggtcttttgtgatttcctctgatgcaggagagg

SEQ ID NO: 84670 - DNA, 122 bp, Homo sapiens
cccccttgagggcccagtgacctaactgggccggcagggtccgaggaagaccagggtcagcggcggcacggtccgttccgcgacccctctcctgtgaccccaggtaggccgccgatcggttc

SEQ ID NO: 84671 - DNA, 122 bp, Homo sapiens
gcgagtactctgtgcctgttatatactgaaatgagttcaacccaccttgcaaaagaaccacgcgaaaacggaagggaagccatagattgggtgttcccgttgccctctgggaaatgtagttt

SEQ ID NO: 84672 - DNA, 122 bp, Homo sapiens
tgctaagcaggaatgtctgttcccatgtggggaatttccataataaaatcctggcaccctcgctgaagagtacagttttatagaaacagagaaaaacaacagcaagtattttccctgaggac

SEQ ID NO: 84673 - DNA, 122 bp, Homo sapiens
gctattccttttagatttcccaattccaagtctatacttagtcttttctgcactagaacacgcacggcagttaaatatgaaatctaagatgtcatcaaccagcagcctaggattccacataa

SEQ ID NO: 84674 - DNA, 122 bp, Homo sapiens
tggggacagttgcctccaaagagccaagagcattccattgggttgcctgttagttttctccggagcaaccccagctgcaagtaaatcaatccacatctgcatgcaggtcacctgccaggctg

SEQ ID NO: 84675 - DNA, 122 bp, Homo sapiens
aggacgcgcccccccctcccattttggctagccgcagagtccagcgggtctctgggacggcgtgggagaatcaggaagtcgaagccacacagccaagaaggggcagctggcgtctcggaggc

SEQ ID NO: 84676 - DNA, 122 bp, Homo sapiens
gttagccgactttgtaggtgttcaggagcagcctcctagcagcctcagttttcccctccccgccctgctggttcaagcaccacagcctggaatgggagaactgttgtccaccgccccctccc

SEQ ID NO: 84677 - DNA, 122 bp, Homo sapiens
gcacccgggccagcagctgcggagggtgtactgggtcccccagcagtgccagcccaccggcgctaagctcgatttctcgccaggccttagctgccttcccgcgcagcagggctcgggacctg

SEQ ID NO: 84678 - DNA, 122 bp, Homo sapiens
gggacgctggaaacaaggggtcacacgtgcgtgtgcctggccttcgcaggtggatgtgtgcgccgagctggggaaggggccagggagccgcgagactgcggtcccccgcgagagagaagtat

SEQ ID NO: 84679 - DNA, 122 bp, Homo sapiens
gtgatcatctcacctcagcctcccacgtagctgggactacaggagcttggcactaggccccggataatttgtttgtttgtttgtttgtttgttttgcgacggagtcttgctctgtcgcccag

SEQ ID NO: 84680 - DNA, 122 bp, Homo sapiens
gctggcggagggcgacggcgaggcaggcgccgggggcgcggcctcgcaggagcagaagctcgcctgcgacacctgtgggaagagcttcaagttcctgggcaccctgagccgccaccggaagg

SEQ ID NO: 84681 - DNA, 122 bp, Homo sapiens
acaccccagacaaaagcccggttccatgctgctccaccgccccctcctactgctccgagtcggagttacttcttgcctctaggacgctgggcagcaggggctgctgcccacctttggaaccc

SEQ ID NO: 84682 - DNA, 122 bp, Homo sapiens
atacctctattttttcattttgtttttaagtaaaatgtctgctgtttacttttaacttttcgttttgaaatgatcatagcttcataggaagttgcaaaaatagtagagaggtcctgtgtacc

SEQ ID NO: 84683 - DNA, 122 bp, Homo sapiens
gccggctgacatgagttggcggctgaggctgtcgtggccgctgaggctgttgtggccgttcgtctgggtcctcccagccttgctttcttcgcggagcctgcggagaagccccgtcactcccg

SEQ ID NO: 84684 - DNA, 122 bp, Homo sapiens
aaggcaaagcctggggaaaaacaggtttgaggaggcaaataaaaaaatctctgttgcacacgttacatgtgggatgctctttatacagccaaatggggaggccacataggctagcagatcct

SEQ ID NO: 84685 - DNA, 122 bp, Homo sapiens
tactcgccctgcccccgcccttgctccgccccgcccttcgtcaggcctccttgcgctccccgccccttgtcaggccgtgccgcccaccccgccccgctcctcgccaggctgctccacccgcc

SEQ ID NO: 84686 - DNA, 122 bp, Homo sapiens
gagatgggactcgggggcggttttccctcacccttggcgggatcctcccctctgcagacccggggaacctgcccacgtgtgttcacgtgcccccgccacacgcctggttcacctcgagacct

SEQ ID NO: 84687 - DNA, 122 bp, Homo sapiens
agggctgtggcgtgaaccaaggggatgagtcgtggcaagctggcgaggggaagggggcagcggcagcctgggagcatcgccgacttaattgtgatggagagaaattcattacagataagcca

SEQ ID NO: 84688 - DNA, 122 bp, Homo sapiens
atgagtgctaggaaatctggcaatttggaaatgccattggcaacagaccaaagaaagcctcgaaagaaagcctgccctctctagccaaaagacaagaaagggatagcctagaaagacaaaac

SEQ ID NO: 84689 - DNA, 122 bp, Homo sapiens
gcccgatgaagaaacgcacaaggtggggtctggaagggccccgagagcaggagcttccgtcgccgtggagttggggtgctccaccctccctgcacatagaggagttcctgttcaccttcctg

SEQ ID NO: 84690 - DNA, 122 bp, Homo sapiens
tggctcctgcaggccagatcttttccaaatgtcaaactcttaggaaccttggcacagagccgagtgggctctggccccaaatctctttcctcccttgtctttgtcaggctctgctttccttt

SEQ ID NO: 84691 - DNA, 122 bp, Homo sapiens
gggaggaagatgctgacagctgatccgagggggtggggcccctctcaccactccttggggcggggagccctgctctggagctacctgcccagcccagtgtcaagtcactgccgagccctgtg

SEQ ID NO: 84692 - DNA, 122 bp, Homo sapiens
ggccacttaataggcattcaataaacccccgagctggcttgtggtcggcttgcaggacgccgtcgcacaaggacgggcgctgtagtctttccttctggattctgcagtgacgaatgaaggcg

SEQ ID NO: 84693 - DNA, 122 bp, Homo sapiens
cgcttcctagtcgagacagggagcaacccgagtgcgctgggtgaatctgtccgactcaaccgaagctctgccgggaggttggagaggcgctctcttctatctaagccagttacattcaagtc

SEQ ID NO: 84694 - DNA, 122 bp, Homo sapiens
cagctgagtagaagtcaacgtagttgccggtggacttgagacccaggtgcatggtgtactcgctggcgggagggcgatggtggacctggtcctcgaagaaggactcatcgtaatttcttgtg

SEQ ID NO: 84695 - DNA, 122 bp, Homo sapiens
ccgccggccggcgaggggcgggcgctgcagtgcacgccgggggatgtagtttggctcggacgagagcgtctcgtcccggggtcgcgcgttgctccgggtgccaggttcagcccgcgcggcga

SEQ ID NO: 84696 - DNA, 122 bp, Homo sapiens
aataccttgcttgggaagtgaaagaaacctaactcggtgtgagtggaaatgaggagtggccgtgtggggaaagggttaagactgtgctgcaacttggtcgagtttcagaaagttctccggag

SEQ ID NO: 84697 - DNA, 122 bp, Homo sapiens
cgccggaagactccgggctgtgctctggtaccggccgccagggggaaggggcaggggccccgactcataccggtcatcctgagtctgcaggaatttccggacgagcagcttaattctagtga

SEQ ID NO: 84698 - DNA, 122 bp, Homo sapiens
tttggaagacagatagagtaagccaagaaaatcatcatcagtgtccctgaaacactggaccgtaaaaagaaaaattctcagttttcacacaaaacatttatctaaagtgaagaaagaactga

SEQ ID NO: 84699 - DNA, 122 bp, Homo sapiens
tcagaaatcactccccaggggcctgttcttcctgcatcttttgctggtggctgtgatcttcggaagcaagtggataaacgggagcatgtgaaatgcgaatctccacgaggcgttatttgtag

SEQ ID NO: 84700 - DNA, 122 bp, Homo sapiens
gcggggtgcctttgcgacggcggagttgcgttctcctcagcacagacccggagagcaccgcgagggcggacctgcgttgtcctctgcacagatttcagtggtactgcgaaggcggagcagag

SEQ ID NO: 84701 - DNA, 122 bp, Homo sapiens
ggggagctgtctgcccccggagctgggagtggagcccctttccgctagagcccagtgccgcgggtgcctcctacccgatctccattcgatgcagggtgcttaagattgggttggggagtttt

SEQ ID NO: 84702 - DNA, 122 bp, Homo sapiens
cgtctccggatgccaggagtcgcaaagggccgaccacgatgaggaaaccccaggctgggacgggggaagcagcacgggatcccagcctcaggcctgcccggacggtgttggttggggtgagt

SEQ ID NO: 84703 - DNA, 122 bp, Homo sapiens
atggaggtatgcctttgtccactgagctgaagtctgagacgatgtctcgagggagcaaaacggtggcacccagggagctgcaaccatgggaaacatggggtctcctttggccagaaacagag

SEQ ID NO: 84704 - DNA, 122 bp, Homo sapiens
cctcctgtcctggggctgagagcccatgaggacatgcccggggaccccgcatccgctgagcgagcactaaagccatggttccctctggttagcactgccaacaactgagcccgggaagaccg

SEQ ID NO: 84705 - DNA, 122 bp, Homo sapiens
tcccctcatccagacgccggctcccaaggtggaagtaggtcatggcatgcctggctcagccgcagagcaagtgcaggatctgggccagagctcaagccaagcacagcctgcctggccaggtg

SEQ ID NO: 84706 - DNA, 122 bp, Homo sapiens
tattgctggattgttgggtcaaattggaagccaggatactgtttataggcacttctggcccgggtaccaaggttcacacctgtaatgccagcattttggggagccaaggcaggagaattgct

SEQ ID NO: 84707 - DNA, 122 bp, Homo sapiens
gaatctcgctctatggccaagctggagagcagtggcgcgatcccgactcactggaacttccgcctccctggttcaagcgattctcctgcctcagcctcccgagtagctgggactacaggcgc

SEQ ID NO: 84708 - DNA, 122 bp, Homo sapiens
atcccctggaaggcgggcgccttggtttaggggggtccaatcggtttcaaggggttgcagcggggcggggagatgggcgggaggagtgggagctggccccgcgcgcgggggagggctaccag

SEQ ID NO: 84709 - DNA, 122 bp, Homo sapiens
atgaatgatttagactacaaacactatgctcccaccgctacccaggagcctggcgcctagcgccccatcttcaggacccagagtttatgctaaagtaaaattgccggaggtactgggagccc

SEQ ID NO: 84710 - DNA, 122 bp, Homo sapiens
agttcactcgatttcgctacaaacctgcagcactcggcctggaggtaacctggttgggagcgaattcagaactggaaattccaggcggcccagagggacacccatccctctccgaggcgcgc

SEQ ID NO: 84711 - DNA, 122 bp, Homo sapiens
agagatttataagatcagtacttactttgttaaatgctgtcacctttgtggctggacaaccgaattccaggtcctaatgtatttataagctctttgttcctctcaatagttccctcccactg

SEQ ID NO: 84712 - DNA, 122 bp, Homo sapiens
aggcctgctgaatcagtacatgcacttcagcaagatcaccaggtgactcctggggtgcaccgtaaagatggaaaagcattgcactgtagtgcatggtctcgtccacttcagaccctctattg

SEQ ID NO: 84713 - DNA, 122 bp, Homo sapiens
atggctgctctacatgcctgaggacaccacttcagaacatcgttcagttcattataagtccgaactgagaacagtataagctatgtctgttgtaggttttcttttaataatctgaggcatgc

SEQ ID NO: 84714 - DNA, 122 bp, Homo sapiens
gccggctcacccagaggagctgggagcctcgggcgctcggcaggtcgggaggggtgccggcgagtgggggcccccaagagggcagaagggggtagggaaggcagggccgacccagtacagca

SEQ ID NO: 84715 - DNA, 122 bp, Homo sapiens
agatcaaggcgggctggaaagcaaatttttaaaaaatgtaaacctctgctcaaaactgagcgataacccgaaaaaaagaagaaagggaaaatccaacgaaaagaccaaaataataaaattag

SEQ ID NO: 84716 - DNA, 122 bp, Homo sapiens
tgactcggcactgccagttaaacagcctgtttcccagggctgtcggggttccttccgtcccgcttgagggatgctagggctgagtgagccaggacgttgcaaccctaactggctttggaggt

SEQ ID NO: 84717 - DNA, 122 bp, Homo sapiens
tggattaaaggtcaaagtaactcagatttatatgttctgtcgcgcggtctcagtctctcccgttgctcacgtatatggagcccatatcccagggatttggtatccctggcatgaaactttgc

SEQ ID NO: 84718 - DNA, 122 bp, Homo sapiens
aactcagtggccgctgacctgggcttcccctgagggcagagctctgagccccagcctgtccgacaccagctggttcctctaaagtcaccctggccccgtctgcaccctctccctgggagatg

SEQ ID NO: 84719 - DNA, 122 bp, Homo sapiens
aaggaaagcaaagtctcttatgaacacattgagggaaacttctagcaaataccagtgacccgcatggcatccattggagctgccgtttttagtaactgggctctctgagtgttcttacccca

SEQ ID NO: 84720 - DNA, 122 bp, Homo sapiens
tcttgaactggatgaaagtgattgattcttttcttagtttaaatgttggtttagttgtcccggtgtcttttgtgcctaggtgtgattgagctggttagattaatgggaacgagaagggtgaa

SEQ ID NO: 84721 - DNA, 122 bp, Homo sapiens
attcccggacccaataacgcgaccaagcaccgtgactcccaggaaaactagcggagtgagcgcggctgaggaaattactgacaccggaagtcacgtgagcggctgcccctaaggtcgctatc

SEQ ID NO: 84722 - DNA, 122 bp, Homo sapiens
gggtgcgctccgagggtgtggcccccgggctgtgcggggctcagagctgcttgctgggcgcggtgcccgacaaaggtaaggcaggagtgggcgtctttctcgcgggacgctgggtcggaggg

SEQ ID NO: 84723 - DNA, 122 bp, Homo sapiens
agaagggcgtataccttgtgaccgcctctggttgtcttgggctcgcgcctggcgccgctacgtggagtcgctctctcgtcgtcacttttggctgccgacttgttgagtagaagtgcagactg

SEQ ID NO: 84724 - DNA, 122 bp, Homo sapiens
tcgggagacataggcgggccgtgggggcaggtgaagggtgctggacgtgcgagcctggcacgcagaagccagagggcagagaggaaagggcgtgaagagggggcggggcccctaacgcccac

SEQ ID NO: 84725 - DNA, 122 bp, Homo sapiens
ggcctgctttccctccttttcttacaacttctggagaagcgtcagccctctgcagggaggcggccaagctggcaggcgagtcggcgagggtgtcattgcttatatggctgcggggaccgaag

SEQ ID NO: 84726 - DNA, 122 bp, Homo sapiens
cagagacaagcctcacctccacttctgtcaagagaggggcctgcagtgcaaaccctcttccgctgagcagctgtctgaactataggccccagtgctgaagaccagttgtgctaagataccgg

SEQ ID NO: 84727 - DNA, 122 bp, Homo sapiens
gctttcttcccctcatacatcacagccccagcctcggaatcgaaaccgcattgatgagtacgatgccagtagccttcaacatacttccaagctggtttgctgttggctttagataactgtta

SEQ ID NO: 84728 - DNA, 122 bp, Homo sapiens
tcccgcccagagacctgtcacttgctgtttgttcattgtgcctggaatgccactccctcacggctgcccagctcactcccacactttcttcatgccttgacacagcaaatggcctcttccta

SEQ ID NO: 84729 - DNA, 122 bp, Homo sapiens
ctccgcggtcgagtgtgggtacgagtggaggagtgagcttcccagagccgccgggctccccgaaagtggagcgccgccgccgccgccgcccaagctcacagctgaaagcactgcggaggagc

SEQ ID NO: 84730 - DNA, 122 bp, Homo sapiens
ggacaggagaacctttcctggctggagggtcagggaaggctcgcgggagggacacggccacgtctgtgcttgagagcgcgccctctggtggtagatagaggagactgcaggctgggagggca

SEQ ID NO: 84731 - DNA, 122 bp, Homo sapiens
gaactcgtaggtgagaaacgtttgtaggcaccagcgctgacgctgtgctgtgagcagggacgcatcgatcggtaagaggtaaaggagtgaacgccgacaggcattggtttttgcagagatta

SEQ ID NO: 84732 - DNA, 122 bp, Homo sapiens
tcaggtgcctggtacctgggctagaggctgccttgggcttctgagagagagaggcccggccgagggcgacacaggcccagaagcacacaggtacgaggctcaactccacaaagacacacaca

SEQ ID NO: 84733 - DNA, 122 bp, Homo sapiens
ccagcagtctagctgccagccagcttgctgcacctcctcctcctaccagcaggcctgctgcgtgcctgtctgctgcaagactgtctactgcaagcccatctgctgtgtgcctgtctgctcta

SEQ ID NO: 84734 - DNA, 122 bp, Homo sapiens
cggatctcttcccaagcacctagaactttccaaagcgtgcttggaatttaacaccttggtcgtcgatccccgcaaatatactctgatgagaccggctttcttcccataccgcccaggagttt

SEQ ID NO: 84735 - DNA, 122 bp, Homo sapiens
ttctgtacactgctggttaactgcttcggaagaggacagcccgcagtctggagtgagcagcgaagcagagaaaaggagacgccctttcggacaagggactggttggtttgttcttgtgcaga

SEQ ID NO: 84736 - DNA, 122 bp, Homo sapiens
ttcttcatctgaagtgtttttttctttgtgtcaccattcctctgacactcctgggacctccgggtcctgcctcctggctcctagcatatgagcaacagccaccagcaattgaatgggcacac

SEQ ID NO: 84737 - DNA, 122 bp, Homo sapiens
ttgccctgcttctgccccaccgagcaggctctggcgctggtgtgaggggctgagcccctgcggggagtgctcatgtggacatcagggccagacacccactccagtgcacaagacagacttgc

SEQ ID NO: 84738 - DNA, 122 bp, Homo sapiens
ccgccccgccgtcggtcctgtctcagtccctcagcagagcgggaaagcggaggccggagccgtgacctctgaccccgtggttatgcggagccgccgcattccttagcgatcgcggggcagcc

SEQ ID NO: 84739 - DNA, 122 bp, Homo sapiens
cagatactgcttccggagaatgaagaagagggtggcacatgtggcaaagccaaaaaccagcgccagcaccttccagagcctgacgctcgactcctgcctctgcagcaggctgtcgaagtcct

SEQ ID NO: 84740 - DNA, 122 bp, Homo sapiens
cgcccaggtggaggggagtttgcacatggagccggagggagcccgggcgccggcagggggcgggccgggacgcggaagtgccggtccgccgggggcagccctccgagagcccgaggcgctgc

SEQ ID NO: 84741 - DNA, 122 bp, Homo sapiens
aggatcattccgactttcccgccccgtacgtgaggggccgccttgaagcctcttccgccacggacactcgaaactgatcttgaagcccctgccgtcacggatactagaaactgatctcgaag

SEQ ID NO: 84742 - DNA, 122 bp, Homo sapiens
caccaaaaactccagtctgtgggaagtgcacagacacagacttcacttctgtgtcttggtcgagcaatccatcaggtcattggttaggttcaggacttgccctcttttccttccctcttcat

SEQ ID NO: 84743 - DNA, 122 bp, Homo sapiens
ggtacacagtgagagggttcttgcatgtctgtttgtgcatgctattctagtgtgactgagcgggtatctctcatgaggtgaattgaaggaagcaacactgtgaccacttgaaggaagcaaca

SEQ ID NO: 84744 - DNA, 122 bp, Homo sapiens
acactgggtttgggatcccgaaacccctgaacaaaatggcgaaacctaatatggccgttccggagtgattgacgcgcaaataacattcttgttctctttctttctctttctatgtgtgtttc

SEQ ID NO: 84745 - DNA, 122 bp, Homo sapiens
ccgctaatgggaactgacaggtcccggtcccggtcctcccgggcggcgcccccgcctccgcggaccccaaggcctctccccgcccggcccagggctgcaccccgcgcgaaaaaataaaaaaa

SEQ ID NO: 84746 - DNA, 122 bp, Homo sapiens
ttgcctttaaaataaatctggcattgccttcggtacttgcagttggtcaagaaaggcccacggtgcgtggctgagagcagccgaatggagggagcagacgcttgctggatggagacgccgcc

SEQ ID NO: 84747 - DNA, 122 bp, Homo sapiens
ctcctcccagccagaaacggttaattgccagctccagactgcctccagcccagccctaatcgccgatctcaggcggctgggctgcgctggggctgagcggctccagcccaggctggggttgt

SEQ ID NO: 84748 - DNA, 122 bp, Homo sapiens
gagagcggcgcaggaggcaaaggttgaggaggcagcaccctcggatgaataataacaccgcgccgcgcaagttgcggagccgcctggaaatccagcccttcgcgtgaactcgcgtcgagcgc

SEQ ID NO: 84749 - DNA, 122 bp, Homo sapiens
tcctagagcctcaaagcggcggaagggagggagcagccggcacctgcattgtgcgagccccgctccccgctgagcttctgtgacctctggctcgcgctcttggcatccgctgctggggcagg

SEQ ID NO: 84750 - DNA, 122 bp, Homo sapiens
gtgagtcacaccctgaaacacaggctctcttcctgtcaggactgagtcaggtagaagagtcgataaaaccacctgatcaaggaaaaggaaggcacagcggagcgcagagtgagaaccaccaa

SEQ ID NO: 84751 - DNA, 122 bp, Homo sapiens
gatgacacttgggaacattcgggaggctgaggcccctactctcccgggccccagtttagacgaatgggctataggcagaacacacacggccagggttctttctggtgccctaccacctgttt

SEQ ID NO: 84752 - DNA, 122 bp, Homo sapiens
agctgaaggtagaaccgggctaccccaagtcagccctgagggactggatgggctgcccatcgggaggccggccggatgaggggactgaggaggagacggaggtgatcatcattgaggtggac

SEQ ID NO: 84753 - DNA, 122 bp, Homo sapiens
tttcgtcactgaattttgctggattttacagatggcctctgctcagggctcttctccatgcgggacgttagggttaggggtgcttctcttcttcagaggtaggcctgtggcttccaggtggg

SEQ ID NO: 84754 - DNA, 122 bp, Homo sapiens
cccagatggtcatctgagacgagaggtggcggcgaaggagagtctcgcctgtcacgctcccggagcaggggcttcatgaggtggccatggaaacagcctggcagactcccatctctcctggt
